United States Patent Application Publication US 2024/0084332 A1 - sequence listing, part 14

SEQ ID NO: 61050 - protein, 539 aa, unknown
  TnpB Polypeptide
MGKKQPKEQKQRSQKTPTFLLELPLVVNTGQAKRIRGHLEAGRQFYNAVLSQGQRRLRCMQADPAWQEARTIPRAHKQERRAAFSALRERHSFSEYDFHELARGLRVSWLADHLDAVLAQTLATRAYHALNRVCVGEARRVRFRSRGRGLCSIENKRNDTGLRFALQKPEEGNRGFLIWKDDRLEAVIDWEDEVVTHALRSRIKYARLVQRKASSERAEGADALGFRYVVQLACEGVPHRKQKHGVGSDTIGADLGPSTIALVPREAEASLAVFCEELAPDEQAIRRLQRRMDRQRRAANPGNYDAQGRIKKGSKTRLRWKTSRSYEQTRRRKAAKERKLAAHRKSLHGHKVHEIVAVGNTVILEKLSYRAWQKQYGRSVGLRAPGMFVEMLRRTVASTGGTLLEVPTRQAKLSQFCHGCGTCVKKPLSQRLHQCSCGIGPVQRDLYSAFLAAYLSADQLIPSCPQYVIPWEGAEARLRAGHERVIQRANEGQSLPRSMGIPRVGARRPQSLCEPTPEPTFLARRGRLEAWKERQNPWH

SEQ ID NO: 61051 - protein, 368 aa, unknown
  TnpB Polypeptide
MNETLIRTISIKLDIDGHEAALQETQKYFNEAASWIASLCWEEGITNTNTAHHRVYGETRSRFGLGAQLAVCARAKAIEAIKVVKTQQKETCPQFGPRGSVRYDARTYRLLSLDRVSLNTIQGRVVCKLILGKRQHTMLIDQTWKIGGADLVWRRGTYYLNVTQSKGAPELTETNDTLGIDLGVVQLATDSTGQSFSGAKVHEVRIRYHKRRREVQRVGTRSAKRRLKKLSGREKRFQKDVNHKISKALVHKAVQSRKALALEDLTGIRESTTVRRENRYERHSWAFYQLRMYIAYKAAWASIPVRFVDPRNTSRTCSECGHCEKANRQSQSSFKCKQCGFCLNADYNAAINISRAAVKQPLVASVRG

SEQ ID NO: 61052 - protein, 400 aa, unknown
  TnpB Polypeptide
MKLLRIQKRLERMKKLKRAYKIEINPTNEQKSKIHRTIGASRFIYNFYIARNKEIYKREGKFVSGMDFSKWLNNEYIPNNQEMNWIKEVSSKATKQAIMNGDKAFRDFLKKSKGFPKFKKKKNQDVKAYFPKNNKTDWTLERHRVKIPTLGWIRLKEFGYIPINSIVKSGTVSQKADRYYVSILVEENNEEVYECTNEGIGIDLGIKEFAICSNGNKFKNINRTYTVKKLEKKLKREQRKLSKKYESLKFIYKKERRATGQNIQKQVVKVQKLHQKLRNIRTDYINKIVSSIIKQKPSYITIEDLAVSNMLKNKHLSKAIASQKFFEFKTKLMSKCKQNNIELRIVDRFYPSSKICSNCGEIKKDLKLSDRVYKCSCGFIIDRDLNASINLKNAKEYKIA

SEQ ID NO: 61053 - protein, 405 aa, unknown
  TnpB Polypeptide
MSRYIVRTYKIPVPIELYSLCSELNRLAARIYNKTMSLVKKIKSKKDFWLSPGAAQKYILCWASTINIHTHSKQAMVQQYFQALDSYFNAIKTKPYLKPPYKKKKIMPFIWKNTAIKLLPDRKIRLSMGNNQEPIVIQTTLPADTKIRQAKLVYEEGKYYLHLVIEVKNEYKKNQDKKVMSVDLGILRPITCFDGFEVISYHGGILNSLIRYRNKKLAEFQKILSRCRKGSRRYRKLLKAKKRMLRRIRHQIKDMLHKITSNFLKICLQKGIGTIVIGDITNIRERVEGNDNFNQKIHQWCFRKIVEMITYKAQLLGIEVKFVSEEYTSQVCPVCGNKNHPVGRNYECSKCGFRYHRDGVGAINIWQRYLGRESQVVAGLAPARGVRFTPHLCGHGVSNAPWKAA

SEQ ID NO: 61054 - protein, 380 aa, unknown
  TnpB Polypeptide
MLKAYKYCLLPTVEQKEQLAQMFGSCRFVYNLGLQTKLTAYKQYGVTLNCFDLTNQIVDLKKEATWLADCPAQALQMSLRNLDNAYTAFFRGAGFPKFKSKRGRQSFQLPQGVKADLEARKVFLPKLKWVECAFSRTFTGAIKTVTVSRNPSGKHFVSFLVETGEDKPVKKPINRDTAVGVDLGVKTFAVLSTGRNGVPQVFENHKFLRRSLKRLRVEQRTMARRFKKGAAEQSKNWHKQRVIVAKLHETITNQRRDFLHKTSTQIINEYDTICLETLNTSGMMKNQKLACAIGEMGWTDFNAMLDYKADWYGKNILRIGQFEPSSRICNVCGWHNKDLKLSDRVWTCANGHTVERDANAALNILDFGMRLHPLSAKTER

SEQ ID NO: 61055 - protein, 369 aa, Chloroflexia sp.
VERKAYQFRLAPTKGQQRLLEQTLETCRWVYNETLAYRKTAWEERQETVGLYDTNALLPQWKAQRPDLKQVYSQVLQDVQNRVHLAFDAFFRRVKRGETVGYPRFRGNGWYDSFTFKQAGFGFKVAGNGLDLSKIGRVPMIVHRPIEGTIKTLTIRRTNTGKWFACFSVETEPQPLPELQRAVGIDVGLEQFATLSTGEPIANPRFFRTDEPALVKAQRRLSNAEQGTPERAKRRKVVAHIHERISNRRKDFAHKLSRRLVREFGIVVFEDVNIARMIKNHRLAKSIADAAWNQFANDTRYKAVNAGRTYVQIDPRGTSQRCSRCSGVVKKELSVRVHQCPYCGLEMDRDLNAALNILAVGRHSLGENP

SEQ ID NO: 61056 - protein, 463 aa, unknown
  TnpB Polypeptide
MFRLNSMAGSSSLLRSEIWRRYGALQNVGKSRFELNKEIRNSDFYKEIITVGELKCEVVNDTVLNILMSKEAAKSKVRKEIYKLHKKDKIELKRLYTLLKSDKWLEDKFLHRRMRFYFKHGVSKMNNQILFMAKNQSVISDNNHTFIKLTIPKKFGGAIYLNISGNETVKKYLDKKNLRLIIKDNIIEVHYSFDKEQGRPCGTEEIGIDKGYTEAFVDSDGEFYVTDFGSLTTSYSDKEKYKGKARNRLHALSKKHKTTGNYKKFQNIKNNNLGYIAKNRRKTRIHNQLTDRVNKAVHKLVDKAGVLVSEDLTSQIKGKGYSKNMNRRLANWYKGILATSIENITTQRGCKHLLVNPAYTSQMDSNTQRLEGKRVGDKFYHENGAVSQSDYNASRNILARASDRDIGLYTPYKEVKQILLAREKTDVYTAIPDLSCNESLLKLLSTKSELTKAPNTLISIGGV

SEQ ID NO: 61057 - protein, 463 aa, unknown
  TnpB Polypeptide
VKVTRTIYAATVVELLPICKATGFMRADIWRRYGALGTHAVSAGDIRKDFASLYGHLNLDGTIRAETSKDVLNDVLAYRAAATEKVKTAVAKRTNSEQERVRLYGLLRRGEWLADPFLHRQMRKHFRHGVSKTRNQFIVRSDKFSYGIVGGFLAVTVHVSRKYGNDFTIITNTTGKNVDLTGCNLRIIVKGDATEIHYAVDKPEGRPHGDAALGVDKGYTEAFADSDGDFHGQGFGAELSAFSAAAHKTGIARNRLHALEKAHRADGRTAKADRILSNNLGSKKINARRDRTQRLLRTVAFKAAHAIVDKAATVAAEDLTSPIARKHPWKGFNRRMSYWAKGVLAEALESVSKQRGACLVHVASAYTSQIDSHTGLLEGKRVGDRFYHASGDVSQADTNAALNVLARMTDPDIGRYTPHREIKRILLARSPAKLIVNRVELQAGLPAYQPTADKPNAHFRARF

SEQ ID NO: 61058 - protein, 385 aa, unknown
  TnpB Polypeptide
MSIRTIALTLKPTDVEARAFARLQSTFNDACNYINGVAWEAQEFNSVRLHRLVYYDVRARYGLRSQHVVRAIGVVADSYKRDRNVKRAFRKDAAVVLDTPRLYRLRSTKAAITTLDGRLTVTLNIGGIQRAQLGAALKLAEADLIRDRKGRWRLLVSAHYADPPLRETNGVLGVDLGRTDIAVSSDGDRFSGAQVTAVRDRYTRHRQSRQAIVSKGTRSTRRRVRQALQRLSGRERRFQQQVNHTISHRLVAAAASTGRAIALEDLTGIRDRTNTQPRGKTERRRSNSWAFYQLRGYITYKCVDAGIPLVLVNPAYTSQMCSRCLHIGRRAGKSFRCGHCGVSCDADVNGAKNIALLGAAVTSPGGPVLCCWYQPDARATESLAL

SEQ ID NO: 61059 - protein, 418 aa, Halobacterium sp.
MEVRRTAPVKLVVPDEYHDDLHETAEQFIYCANEASDYCWDNTSYENCITSNVTARNALYDRLREETDLTANLVQEAIRRAVHAVDSGVDRWKNGKRTNKPEFTSWSMVYDKRSATFYRNKISLSTVDGRIECDFELPADSPTPYEEYVLSEEYEFRTSTLQYDQATDEFYFHVKTRKMDTDGEAVEIEGSDDTGHQTVLGIDLGVNSLAVASTATFWSGDGYDHWIREFEKRRAEMQQRGTQAAHNAWLRLGKRERAWRKQYIHMVANEIVDEAVDHDCDVIVFEELTDIRERLPQADWHHVWAFHRLVEYVAYKAPERGVAVEQVEPAHTSQRCSRTDCGFTHEDNRDSEQFQCLKCGYEINADYNGAKNIALRYMRKRQHRLRSSPTSRGADAPVDVRVHGGTLNDDGYRPTADS

SEQ ID NO: 61060 - protein, 406 aa, unknown
  TnpB Polypeptide
MTTGIRTLNVKIEAEDRESLARLHDTLVVHGRAFDIVSRHIFEHIDEKKILDQKIVHSKTYRDCMRIPKMKSQFACKARQAALAAWKAIKSNNPKCWRTLLEEAPTMKGLSMRLDCRIHKMLPNNSLKISVLGGGMEVFRFDPYPRLFEMMSRHVMLDPLVFEREGQFWLAMSFEMPEPLHVPGTCIGVDLGQRRLAVTSEGTIFSSREFLRTKRRIRYLKRQLQTRKLFSHSARTKLKRSRRHERNYSRNEMHHLANAVLSSTDANVIVLEDLSKIKTHTKRQGRKHNSMLSQIPFYTFKTILTYKARALCKRVETVDPAYTSKDDSRGLPRGERRGCRYIGSDGVQLDADHNAACNIAQRWSRMSRHPASSTAPFRGRQTLRAGYVNRPIVGARVLQANDFSRW

SEQ ID NO: 61061 - protein, 381 aa, Marinobacter sp.
MKRRAYKYRFYPTSEQAVLLARTFGCVRFVYNAVLRYRTDAFYERQEKVGYTKANAHLTALKKDPDLAFLNEVSCVPLQQSLRHQQTAFKNFFDGRARYPRFKSKRYRQSAEFTRSAFKYQGGQLFLAKSKEPLAVRWTRDLPCEPTTITVSKDSAGRYFVSCLCEFDPQTLPVTPKMVGIDLGLKDLFVTSDGHRIGNPRHTAKYAARLAKAQRRLSRKKLGSRNRAKARGKVARIHAKLSDCRMDNLHKLSRKIVNENQVICVESLKVKNMLRNRSLAKAISDAGWGEFVRQLAYKAEWAGRQLVTIDQWYPSSKRCSGCGFVMDAMPLNVRHWACPECAAEHDRDLNAAINIKAAGLAVLALGENVSGMESVSVSGSR

SEQ ID NO: 61062 - protein, 259 aa, Microcystis sp.
  misc_feature (222)..(255): Xaa can be any naturally occurring amino acid
MLVVEAKLKNGTPEQYHRLDEAIITSQFVRNSCVRYWGSNQGTTRNDLQKLCAVLANNKETPYVNKLNSQARQSAADRAWQSINRFYQNCHAKIPGEKWFPRFKKHNRSFEYKLTGYQLSDDRRKIRFTDGFQAGEFDLWCSQKTLFYYSEQQIKRVRVVRRADGKPTGQITGIDLGLKEFYTDAQGNNVENPRYLRKSEKRLKKGQRRLYKKFPQGNKQSXXXXXXXXXXXXXXXXXXXXXXXXXXXXXXXXXXLMIW

SEQ ID NO: 61063 - protein, 256 aa, Scytonema sp.
MSVLRVEQQESTPVNSDESAAIDLGLNNLATLTSNQKGFVPLLINGRPLKSINQFFNKRKAALQSKLSRKRQTSVRIQRLTRARNLQIDNYLHNSSRFLVDHLVEKQIGTLVIGKNDLWKQEINLGKRNNQNFVTVPYSRFIEMLTYKCQLAGIMVVVIEESYTSKSSFLDFDPIPTYGHVSDSPSFSGKRISRGLYRTSGNQFINSDVNGSYNILRKAIPNAFADGIGSCVVQPRRVTPNKVKAKGKSEMVSKAM

SEQ ID NO: 61064 - protein, 354 aa, Scytonema sp.
MPRSAKPSFVLELPLKANSKQDSELQARFNAAMRLYNNVLGEAKTRMELVRKSEAYQTAKKISPDRKKERSDAFKGAREAYRFTDYDLQSYANRAAKDSRWIADKVDSNTQQKLATRAFQAVERVLFGKAKNVRFKAESRFRSVEGKTNKQGIRWKDNCFVWGRLQLSGIIDTKNAVIQHGLSCPVKYCRLIRRELNGKRRWFVQLVLEGTPYQKPQNYVSDGLVGLDLNVSNIAFVADNHAGLLPFADKVPTFRKEITKLHRQMQRSQRVNNPDNFELDFEARKGRKTVVKKGKPKKGKRQWKRSSNYRKAAQKKRELERRKTAYAKSQNRRVVNEILRHGKHIKTENVSVKG

SEQ ID NO: 61065 - protein, 515 aa, Streptomyces sp.
MVQDEKVLRAVGEHMGRLASRDLARRCRDGLQHSTATWAERKRELTAQSSSRWAGSITARTHDQWGLSRRAQVAHLQSLDAGIRMLRHRLSLPVGQKGSRGTPGGYRSRHEWFHKSRRLAVLESEYERVRCEHRVGKLSVARGGRRLLKQRHHLAAAHKTQARWRQEWEAARWFLTADGESGKRFGNETIRVTPGGEISIKLPASLAHLANARHGRYILTAKVSFPHRGDEWRDRIVDNRAVAYRIHLDVTKGRWYLDASWTRKNLPVIPLAALRSDGVIGVDMNADHLAAWQLDEHGNPVGKPRRFDYDLTGTATRRDAQIRHALTRLLHWAKATGVQAIAIEDLDFTDSKTREKHGRKKRFRQLISGIPTGKLRARLLSMCAEAGIGVIAVDPAYTSRWGAEHWQAPLTTTTRKTTRHQAAAVAIGRRALGHPIRRRTAPPRRHQSDAGGHRTAQATSGARGREEHRPRVPGPRTRSVRAGHGRNAVDQNPQDRSGRSTEPGPWQHDPLPLSP

SEQ ID NO: 61066 - protein, 411 aa, Meiothermus sp.
MPRAETVILKLRDPGAGKRRWLDQTAELFRQGTQLGLDYALSNQTSNRGKIHAATYPKIRALGLPSDYCRMAVNQAVQLARSHFGLRKGQRRAGKPTTVRSQGIGLGVNAYRVVGSALRLSTGVQGDYLWLPLCVPARWRDKLQHVKGDARLFKRGEDWYVMLPLRVPHTPTVRDGDGESTVIGVDLGVVRLLTAKHPHGCLVVNGKPVRHKREHRASLRKRLQRHRRTDRVRAMRGKERRWMTDLNHKVSRRLVDLALQYPNPVLAFEKLDGIRDRVRGSKRFNRMVSSWAFRQLVDFVLYKAERAGVRVIFVDPRRTSRTCPKCGHATRANRPEQGHFRCVACGYQGNADVVASLNIAGVAAGLLRQGPPDTARPGRPGQAPSVGRGLDGVKVCEAQALHTDSNLESSA

SEQ ID NO: 61067 - protein, 385 aa, Meiothermus sp.
MSMQRTSRLRLEPTREQADALLETLRQHTECFNAVSAYGWQHREKNGVRLHHATYRALRERFPALPAQLVIAARERAREALRSALTRARRGKKASQPRSRLCPIRYDARTYTLCTAKGYVSFASVAGRLKIPFAANPHAQGILDRAVGFGSADLIFRRGRLWLHVAVTLPDPAFQPSGLVVGVDLGLSRPAVGSNNRFFGERRWKEIERRYFRLRRGLQRKGTHSALRHLRRLAGKVNRFRRDCDHVLSRRIVNSVQPGTVIVVENLVDIRSRTKQRGRESRRRLHSWSFARLKAFLVYKAEAMGCRVVGVDPRHTSQTCSRCGYVHRSNRRSQSRFLCRACGFELNADLNAARNIARKYLAGGGMPAAGGPPSTGPSCQPAPAG

SEQ ID NO: 61068 - protein, 545 aa, Promicromonospora sp.
MAAMARHTSFRFCLDLSVEQERVLSRHVGAARFAFNQALRLHKDARAMADREQSSAPGSGPGSGAASDDDGAPSDIDDSRGGPGVPWSGFDLINAFNAWKRSEAAGRRFVVGPDGTTDLVVTGLVWRDQVLAQVFEEAAVDLGRGLKACKDSRTGARKGPRVGFPRFKKKSHAGGSFRIRNKTTGGRSSIRVGNKGGQGGNGARSVTLPKIGTLRVREDTRRLRRMIATGRARILSVTVSRGVNRWWISITVEAADLHPAARHTPQPDRPTDIDVGQDNTQHGKAQGEQGWVGVDRGLHDLAVAGSSDGTEVLRVTNQRALRRGLPRLRRLSRAASRKKRGSKNRLKAVVRLGRQYARIRDRRNHYLHQVSNQLVKNHAQLVLEDLNITGMTSNRKLSRAISDAAWGELARQVTYKQAWRGGHVMLADRWFPSSKTCSSCGTLRKALTLKDRVFACGTCGHVMDRDLNAALNLAAWAENHTPTTTTASTAAASDAGRDAARVGDRQAAGPVNNAHRQDTPTHPGSRDRGGKGLNDVGTSQTAPAA

SEQ ID NO: 61069 - protein, 239 aa, unknown
  TnpB Polypeptide
VETVEPTQQAVGLDVGLNFFYTDSTGYQESNPRYYRKAELRLKKLQRRVSKKFKKPKKKGDKQTNNYKKASIRLAKQHLKISRRREEHAKRLARRVVKSNDFVAYEDLKVRNMVKNQKLAKSINDAGWYQFRVWIEHFGKKFGKVTVAVPPHYTSQECVKCGTLVKKSLSTRTHLCKCGCVLDRDESAALIILRRGLSTTGHVGTWAMDALNAWEDEPSTGVGKSLSQQGLSANQESHP

SEQ ID NO: 61070 - protein, 375 aa, unknown
  TnpB Polypeptide
MRSVVTAKIKIPTTPEIVNTLSAYTKGLQCCVDTAWEHKIRNNIKLHYLIYKDLRLRFKLPSQLAVACISQACGYVKKAKSKPIIKRASIGYNFPRSARLKGDKLIYKTLIGRQETIITIPDCYKEYFISWGSPTESLLRIDKQGRAFFLFTFSKEVNAVNNTSQFVLGIDLGVNKLAVTSDNRFFGSAKVKQIKRKFKFLRGKLQSKGTLSAKRLLRKISGRETRYMRWVNHNISKDIVSNFDGNKIIMENLKGIRKQRRGKRMNYWISNWSFFQLQSFIQYKAERQGIEFVKVKPNYTSQICSKCGTLGSRSGNSFVCHCGFSLNADLNASRNLAHPMLVERQALVTVPHNLCNDSLSVLDIVVEHKVKSPAL

SEQ ID NO: 61071 - protein, 425 aa, Cupriavidus sp.
VERRKVTFKLYPNARQAERLTGWTRLHCELYNAALEERISAYQKRGKSISYYDQQNVLPEIKAARPEFVALGSHALQQTLRKLDLAFQAFFRRIKAGQTPGFPRFKAGRRFSGFCYPDPAGWKLAQNGTRGATIRLGSGKDAMSIRARGRHRFGDGAKPNDLTITRKHGEWFASVTLRVSEDACARARTGDAQRGVDFGLNDWATFDNGETIANPRFVRNEMPRMAELQRQQARKKRGSIRYKRLGKQVAKVHERIGNLRREFLHKTTSRLVAACALIATEELCTQNMSRSAKGTQDKPGRMVRQKAGLNREILSAGLSMAHNMLAYKAVEAGTRLHVSNTRQLKPSQRCAACWEIVPKTLAQRMHVCTHCGHTAQRDKNAASVVLIDAHAPGTGVAARPKPLARQRPKSKSVTREPLAIASPDA

SEQ ID NO: 61072 - protein, 320 aa, Cupriavidus sp.
MLLAHTIELVTSQREVDYFARAAGCARFVWNWALAEWNRQRAAGGKPSAMALKKSFNAIKYQQYPWMADIHRDAHAQPFANLSKAWSKFFSDIKSGIKAHAPRFKKKGQCKDGFYVANDKVRFDGRSVVLPLIGRVAMREALRFPGRVIGATVSRRADRWFISVQVEVADDVAFVPRTGNGVVGVDLGIKSAVTLSTGETFEGPKPLKAALRRLRIRSRRLSRKVEMAKPGRAAFSRDFIGPLRPNTKPQPARSSGQIDSAARLARLHACTPASLISGRISCTRQPPGYAVKTKRLAWRISTSAVCSRMSVLHAHYQTWG

SEQ ID NO: 61073 - protein, 440 aa, Lyngbya sp.
MNCDQQQPSSDAILAEYKIQIELCYIFRMLTLTYEFKLIPSQEQIATIEEMLVVCRKVWNYALRERKDWINSRKCAVNSCSLQQEYIISADAPYPNYNIQAASLTKAKKTNPELKKINAQVLQQVLKTLERAFNNMKEQGYGFPRFKNKYRMRSFVFPQFKSNPVSNNWIKLPQIGWVKMRLSRPIPEGFKLKQVRVVRKASGYFAMLSLQSPVSIPDTPASGHPLGIDIGLEKFLATSDGELIERPKFLNKLHSKLKLLQRRLKLKTSSSANRHKLNQKSSRLHQKISDTRKDFHFKLAHHLCDQAGMIFVEDLDFRAWAKGMLGDLTLDAGFGQFFNILAWVCWKRGVYFDKVDYRYTSQICPNCGAHTGKKDLSERTHKCRSCNYECNRDVAAAQVICNRGIAAVGQIVVQEIDCVGVLSGERKRTDKCRRSSKSKS

SEQ ID NO: 61074 - protein, 377 aa, unknown
  TnpB Polypeptide
MLIYEYKLDATKAQYAAMDEAIRIVQFIRNKCLRLWMDERGISSNDLQCYCASLAKEYLFAPLLNSQARQVSADRAWFAIQRFYDNCKNHKPGKKGYPTFQHDNRSVEYKQTGWRLEPDGTHITFTDGCGIGRVRLIGCRDLATRPLPHIIRVRIVKRADGYYTQFCVKAERHVQHVPTGKQVGIDIGLKSFYTNSEGNTVDNPRFLLKAEKKLKRLHRRVSRTKKQSRNRKNARQRLSKAYLKVSRQREDFARKTANTLVTSSDLIAYEDLKIANMVKNHRLAKSISDAAWGLFLRWMNYYAAIHATPTIAVAPHFTSQNCSACGTLVHKLLSVRTHVCVKCGLVMDRDENAAVNILNKALCRTVGHTETGLSAQR

SEQ ID NO: 61075 - protein, 365 aa, unknown
  TnpB Polypeptide
MEKAYKYRIYPNKKQKELIAKTFGCCRYIHNTYLAKRIKLYKGYKQSFTYNQCANDMKKLKSELEWLKEVDSTALQSSLKDLDNAYRKFFKENAGFPKFKSKKTNKYSYQSKCTNNNIEYKDKYIKLPKLGMVKTKNKLIPQGRILNATISQEPSGKYYVSLCCTDVEIKSLNKTNSNIGIDLGLKEFCITSDGEMIENPKYLKKSLSKLAKLQRELSRKTIGGSNRNKARIKVARCHEKISNQRKDFLQKLSTQIIKENDIICIEDLQVKNMIKNHKLAKSISDVSWSEFVRMLEYKAKWYGKEVIKVNKFYPSSQICSCCGEITGKKTLDIREWDCPYCDAHHDRDINAAINILNEGLRIRVI

SEQ ID NO: 61076 - protein, 425 aa, Halorubrum sp.
MEVRRTVPVKLDVDSDDAALLRETVDEFLWAANYVVDHAWQGEYKTASKAQLQEETYDEVRHQTRLHANLVQNARNKAADAVQSVVARWKQGEYAGKPHFSTPTAVYDKRCATFHDEYVSLATVDGRIEVDYVLPDPERDTPHSRYLDHNDYEVTGAELHHKWGEWFLHLRTKAELESDTPEQATTGHSTVLGVDLGVNQLAVTSTGTFWSGDEFDHWRREYEKRRASLQQCGSRHAHENIQAVERKETGRFKMTLHGIANGIIEEATENGCTVIVLEELTGIRDRVPEAAWGHKWAFERLYEYVEYKAEPRGITVGRVEPENTSRRCSTCGFTHPDNRNGEEFECLKYNYKNHADYNAAKNIGLRYLRRNQTGDGGGAPVGVRLNRGMLNANGEFEPPAGDSGQSGSPRESPTLNEANGEAVSE

SEQ ID NO: 61077 - protein, 494 aa, Clostridium sp.
MTKEKRAIKFYLNKSVNKSKKDKILKFLSECNLVENQLLTYYWNNFDIVIKSKTKIDFIYNNKINFKDITPQLKSHHFQSIIQQVYEQMKSIQSKIINKKIRFKFKDDTNKQRIYNYCKQFCFDWDKLEKYNKKQLNKFKKKDEKYHEFLLLVKDYINDDKLYSELKQDIENKFWEEKAKFKLPNKTEFQIRCSSFNSVDIKLKEFEWLFNISNNDRIGGTEKKGIYDKIIIPVKFSNYHKQKLKDKKLASTFNLKLNNYGRIEIIGCYEVEVDYSKNDINNEIGIDIGFKKLITSSDGEIIEQNDKIIKMAKRVLSNQHNRDGLEYHLKEKYNNRDFKLPNKRHKLLQAKLSNFVKSDNRFKIKQFLNGRENYHIIMEELELAYNRTYNREVNYLMKRIGIQSLKSDIEKYCKKYGINISTVNPAYTSQQCPVCGYVNKKSRKTQERFCCVNCGHTANADFNASINILNRYYDDRIKLYTPIWRIKEILNVNT

SEQ ID NO: 61078 - protein, 404 aa, Clostridium sp.
MIKLQRTERHVINNKHPCFRIFDELCFKSKNLYNYANYTIRQEFINNKNYIKYNNLTFQLKHSEPFKDLGSNSSQHTLKMLDKSWKSFFVAIKDWSKNPSKYLGKPKLPKYKKKDGRYICILTNMQSQIKDGYLYFAFKPLKPFNNLIKTKVIDKHMQTRIIPKGGCYVLEIVYQKEIEEKEIESKNIIGIDLGLNNFVTITNNIGLKPIVINGKGIKSYNQYWNKQIAKYKSLAKTNNKLDWTKKLEKLTLKRYNKIDYFMHCTSKYVIGYCMENNIDTIVIGHNKEWKQESKLYKTINQGFVQIPYDLFINKLKYKCEDTGIKLIETEESYTSGTSFLDNEKPIKENYNKKRRIFRGLFISNKGIKINSDVNGAYQIIKKVFSNAFANGIEGVGLHPIVISL

SEQ ID NO: 61079 - protein, 312 aa, Heliothis sp.
MKKFGCCIQTDGVAVSISMNRPKIMPIRRKAALPKSYTIDAFFEDRIVAVDPGSRVPVAACDSRAGFKRITKRWVRSHTLEWKRDRYRSRKLRRVELDEAADRQRVELDRGVQITCRNGEQVKLYTDFRLKWFDARQRPFERTRKLTRLSFNKYMMTARTNERIVRETFLSDAPSDRVLVLYGAGVNFVNVACYSGRKFKHTDLLRRLRAKRNIRVRLIDESYTSKACSDCNELRNGTYTRLRMNHRLRRGVCPDCNADVERDYNAAKNILVNYQRSAICRPSPSCDSGVATDTDPHSVRSIFQCAAIEPGS

SEQ ID NO: 61080 - protein, 495 aa, Heliothis sp.
MMNYVYALKGKGPHAQKFDDMVRYHGNIRRYDGRLRTFIVQEVAKTYWTVLKTNISRHAYSRLARYFGVKRNDPTLFAAYYHKEFGDDDSISRVCRFINVSSDWHSTIPMWIEIQRDMYARGEQSFVIFPQPGHGLKHVSYTSRGWHELLRRVDPSNVTSNWTSITDHKKELWVPYLDTCVVDMKKFGCCIQTDGVAVSISMNRPKIMPIRRKAALPKSYTIDAFFEDRIVAVDPGSRVPVAACDSRAGFKRITKRWVRSHTLEWKRDRYRSRKLRRVELDEAADRQRVELDRGVQITCRNGEQVKLYTDFRLKWFDARQRPFERTRKLTRLSFNKYMMTARTNERIVRETFLSDAPSDRVLVLYGAGVNFVNVACYSGRKFKHTDLLRRLRAKRNIRVRLIDESYTSKACSDCNELRNGTYTRLRMNHRLRRGVCPDCNADVERDYNAAKNILVNYQRSAICRPSPSCDSGVATDTDPHSVRSIFQCAAIEPGS

SEQ ID NO: 61081 - protein, 419 aa, Moorea sp.
MILTYCYRIKPSQEQIAIMDRWLELLRRHWNYALGERLDSLNRTRSSVDRCSIVSEPIGEIPHPVNYYTQQAALKETKRLFPEYKQIYAETQQVNLQRLNKAWDKWRKPDKGGLRGGRPRFKKSAQLRSFVFPRVNNSKAGAKLIDGVLTLSRIGSIPVVMHRPMPVGFTLKQCTIVKKADGWYCCISMKDDSVPELLPVDSVKSAVGIDVGLEKFLTTSDGEAVTIPHFYRKAQDKLAQAQKIMSRRVKGSKNWRKAKQKVALLHLHLTRCRKEFHYQVAHWLCSKYDLIAHENLNIKGLAKTKLAKSIHDAAWGAFLEIVQAVAVRRGLLVQFVNPRGTSIECSNCGSLVEKSLSNRVHHCSSCNVKIDRDWNSGINILNRGLLAVGLPLNGCGKLAQDAVEQQVSFVNLRSPHHNL

SEQ ID NO: 61082 - protein, 386 aa, unknown
  TnpB Polypeptide
MGFCVKYHILRIKKYHSIKKEVELMRKGVKFRIYPNEKQRNLINQTFGCCRLIYNIGLDMRNKAFENGEKVNYYKTSAMLTELKRTDEFSFLRDTDSVALQQSLRNLDKGFVNFFQKRTRHPVFKNKHGRQSYQTMNRRNNIRIVGKHIRLPKLGYVKVRQSMEVGKINNATVIRTPSGKYFVVLNVDFEPKAKQNNGGSIGIDVGIKEFYSDSNGNTVLNPKFLEKSSKKLRREQRKLSRKKKDSNNRNKQRIKVAKVHEKITNQRDDFLQKLSTMLISENQVICIEDLKIKNMVRNHKLARYISSVSWGKFFNMLEYKANWYGNDIVKVPTMYPSSQTCSCCGYKNPLVKNLAIRKWECPNCHTKHDRDTNASINILNKGLSIA

SEQ ID NO: 61083 - protein, 443 aa, unknown
  TnpB Polypeptide
MQKKKPAPIHTRTLAMTIRKGHPFFASADRVTKCYRRIKNATNYLIQHNPVDDSKLMTHGEADKWLKAHNRELYTRMPSSFSQRATQIVGAEWANYLAAIKAYKIKPESFERKPRKPGYARGATTAYISVNGFRIENGTVHFLKGFLTPFKTPFSFSQDFNHKAASKIVSEIRIVPLGNSYNVELIYDESKLAKEGDYCPLLDKNRKAGIDLGINNLIAFASDQPDVRPVLINGRPIKSINAYYNKRVAELRSLKKYKHLSAVSAKRNRAIKDYIHRATTHIVRYCIENNIGFLAVGKNKQWKKNINIGSVNNQKFVQISHAMLIDILIYKCRSAGITTAIQEESYTSKASALDNDVIPEYKADNNVVPIFSGRRVKRGLYQFTEGVINADINGALNILRKATGESLSGELVCRGLVYCPVQLNVSRHTVRTRSPRTILPLAA

SEQ ID NO: 61084 - protein, 368 aa, Nocardioides sp.
VEPVEQQSHWRRSRRGHAPGYHEQARQLTEARREFEWLRAGAQMVQQQALRDFAQAMTNFFAGAHRRPTWRKLGRHDGFRIVSVKPRHVRQLNRNRGAVWVPKVGWVQFRVSRPVPAAVSYRVTRDAAGRWHIAFAAVPDTIPAPGSGEVVGVDRGVQTSAALSSGDLLHCSGLRPTETERLRRLQRRLARAQRGSHRRHKTKAAIARLRAREADRRKDWVEKTSTDLARRYDVIRVEDLNVGAMTRTARGTVADPGRNVVQKTALNRGILANGWGNLVARLEHKAPGRVEKVPAAYTSQTCSVCKTVDAEARESQAVFRCRSCGYTGHADVNAARNIAAGRAVTARGDLDTSRSVKREPQPNRLLSA

SEQ ID NO: 61085 - protein, 496 aa, unknown
  TnpB Polypeptide
MAIITYCKGLPTAEQELNELGFTDFEMFLEAYAPIFRAASIETVNHLLSGTEFKKSDWNTHLQQAYGINKRHANGVISSAKGRVDGAKKHRILHLKTLEGKIKSISTWLKKSERKLALARKFYAKKKWYNSKTGCNFPIACSLQYRSTNWQNLRFQIHSKKRKLTLLTNQVEYLRFTPVKVFVPHGDIFVVGSKDESFGNQVCQWNRDKITFRVPKCLESRFGKTVSSKIGDFSRNINRLPECGAKTWHFYRKNGKWVVAVQFTPNPVNQVSREKTYGCIGIDMNPGSIGWAYVDSEGNLKAKGQIPLQMGLPSGKQQAQIVDTCLQLAIRATEFECPIVCEELDFSTKKQSLGEKGKKYARMLSGWAYSDFYKQLSSILSNRGIELIAVNPAYSSIIGLVKYLKMYGLASDESAALVIARKAMKLSERIPRSLTAYSEVNSEKHVWSEWNQLNRKIKRSAVMSRRCDYYSVSNWSFLVNLDVGEASSSTSRKRKH

SEQ ID NO: 61086 - protein, 426 aa, unknown
  TnpB Polypeptide
MNEMLVTNIVGALEAYAVSVGLFQVMSTHIKETRPERIVSRYRDTYPDGPQPTSGMVRAHLRRYHLKGEKTVSPPGVSAKLNLAVCDTHFAPKTFREDVDSLSVTVQVKTPTYGLTRLYLRLPENAERFGDGKVCRPTVRLNSKGQVVFDIAIEHEVQQRDTGRVVGVDLGRVEPFIATVIDPKNKHSSAPYHVHYKGRLGSLVKKEQQRRDLATHLYEKADLCENYNRDQHAQVLRTEAKRVSAKATRIKHEISQCVASQVVEIADQNNAHLSLENLSWLDSQGGRWPHAEIQSRIEKTAKRYGLKVVKVSAKDTSRTCSRCGGKASNNPKTRVGSCIACGFSLDRDVSASREIALRAVSITRNRDRMRSLLRQRKEMRSSAATRQPKPVTALGGIQGHTGTSSNGLEATLMMVRETLDSRVSPT

SEQ ID NO: 61087 - protein, 510 aa, unknown
  TnpB Polypeptide
VKYYDAVTRYRFTTDDGVDVEQVSRDLAQMIAWMAQAEREMLASQEFHDLAIKALQGDRPTGSLNSWGRKRLPRYNFEFQKHNMNEMLVSNVVGALELYAMSVGLFQVMSTHPSTTKPDCILSYYRDTYPDAPQPTSGMVRAHLRRYHVKGERKASLPGVSAKLNLAVCDTYFAPKTSRDDNDPLSVIVQVKTPSHGLTKIFLRLPENSERFSGGKVCRPTIRLNNKGQVVFDVTIEHEVQQRDTSKVVGVDLGRVEPFVATIIDPRAKYRYAPYHVRYKGRLGSLVRKEQQRRDLAAHLYERANLCERYKRTDHADVLRTEAKRVSAKATRIKREISQCIASQVVSIADQSDAHVSLENLSWLDAKGGRWPHAEIQNRIEKTVKRYGLKTIKVSAKNTSRTCSRCGGKVSNNSKTRVSTCTTCGFELNRDVSASREIALRAASPSSRSQERMRCLLRQRREKRSSAVTRQSKPVTALGGNQGHTSTSERKTEATLMMVRETLDSRGSPT

SEQ ID NO: 61088 - protein, 510 aa, unknown
  TnpB Polypeptide
VKYYDTVTRHRFTAENGVDVDSVSADLVQMVAWVAETEREVLASQEFHDLALKVLRGDRPTGSLNSWGRKRLSRYDFEFQKHNMNEMLVSNVVSALELYAMSIGLFQVMRTHPSTTKPDRIISYYRDAYPDAPQPTSGMVRAHLRRYHVKGDRKASLPGVSAKLNLAVCDTYFAPKASRDDNDPLSVIVQVKTPSYGTTKISLRLPENTERFGTSKVCRPTIRLNNKGQVVFDVAIEHEVHQRDTNKVVGVDLGKVEPFVATVIDPRVKHRSAPYHTNYKRRLGSLIKKEQRRRTLATHLYERADLCERYNRTDHADVLRTEAKRVSAKATRIKHEISRCIASQVVEIAEKNNAHISLENLSWLDSLGGRWPHAEIQRHIERTAKRYGLKVTKVGAKDTSRICARCGGRVSNNSRTRVGTCTTCGFELNRDVSASREIALRATSPSSRSRDRMRSLLRQRTLERSSAVTRQSKPVNALGGIQGHTGTSSNRLEATLMMVRETLDSRGSPT

SEQ ID NO: 61089 - protein, 459 aa, unknown
  TnpB Polypeptide
MTEQNLALVTYFNGLKPADAGRQMNLKLPSEVKKRFRSGASRLEKMFQEQVVSNLRSWAARVGVVDQTYSGYVSAGWKRTANSSKPGSMQPRLALSATDRGYHKNFSVTPERISLDMVVQGQWVTLHFPVPSRLLEAGCEPGAPDIWIDSRNRVMFGFHGKTDPGRPNFSERYVIGVDVGVINPAAYVVWDTREKRIVERSLLGQRARSLSNKIRRGSRQVAALRRKGRDEEAAYHRGHLSNRRRELSILVAQEITDASWRYGNAIVSFEDLSHIKNTMKFGRWFRGEVHRRTRDMVEANGGRVMKVNAAYTSKRCHACQSDLDMSDYSSPVCHSCRVTYHRDVNAAANIAQRVNLEKVCRTRKKHATKTKRVRRSKCRARPLKHPGTKNRPTPKAPQNRTKTLACSPLPSREVSKGMCPADVRVSAVDHTEWFQTTSGTTVPKDNLSVSTVGWVYPKE

SEQ ID NO: 61090 - protein, 502 aa, unknown
  TnpB Polypeptide
VSRTYPRVPYAAFSKGGEPLDLDDVLNDIRADAELVAHYALRELTEQNLALVTYFNGLKPAEAGRQMNLKLPTEVKKRFRSGASRLEKMFREQVVSNLRSWAARSGVVSGNYTGYVSAGWRRTVNNSKPKTLQPRLALSATDKGYRKNFSVTPERVALDMVVQGQWITLHLPTPPQLLEQGCEPGAPDIWIDKNSRVMFGFHGKTDPGRPEFSSRYVVGVDVGVTNPAAYVIWDTREKRIVERSLLGQRARSLSNKIKRTQTQVASLRRQGRDEEAVPHRGHLSNRRKELSILVAQEIADASWRYGNAIVSFEDLSHISDTMMFGRWFRGEVHRRTRDMVEADGGRVMKVGAAYTSKRCHVCQTDLDMQNYSSPVCHSCHVTYHRDVNAAANIAQRVNVEKACRTRRKHATKAKRVRRSKCRIKPLRHPGTKNRPTPKAPQNQKKTHAHSSLPSREVSKRMCPADVRVSVVDHDMWFQTTSGTTKPKESQFADAVDWVYPKE

SEQ ID NO: 61091 - protein, 509 aa, unknown
  TnpB Polypeptide
VRFYDTVTRHRFTTENRVDVEQVERDLAQMIAWMAQAEREVLASQEFHNLAVKVLQGDRPTGSLHSWGRRRLPRYDFEFQRHNMNEMLVSNVVGVLELYAMSVGLFQVMSTHSKETKPDRILSHYRGAYPDAPQPTSGMVRSHLRRYHLKGDRKASLPGVSAKLNLAVCDTHFAPKVFRDDSDPLDVAVQVKTPTYGLTRLYFRLPENESRFGDGKVCRPTIRLNNKGQVVFDITIEHEIDASQTKIITGVDLGKVEPFVATVIDPKSKHRSAPYHVNYKRRLGALVKKEQKRHDLAAHLYERANLCEKHNRDQHAQVLREEARRVSAKATRIKHEISQCITNQVVEIADQNNAHVSLENLAWLDAKGGRWPHAEIQSRIENTAKRYGLKVTKVSAKNTSRTCSRCGGKVSNNSRTRVSTCSICGFLLDRDVSASREIGLRAASNTRNRERMRSLLRQRREALSSAVTRQSKPVTVLGGNQGHTGASNNRLGATLMMVRETLDSRGSPT

SEQ ID NO: 61092 - protein, 512 aa, unknown
  TnpB Polypeptide
MRGGSPEVPGSTVSRTYPRRPYAAFSKSGESLELDEVLDGIRADAELVAHYALREMTEQNLALVTYFDRLKPSGAGYMMGLFLPVEVKKRFRSGASRLEMLFRERVVSTLRSWAARSGVVNQTYSGYVSSGWKRTVRDSKPESLDSRLSLSATNNQYRRMHVQEDKIVLDLVVQGQWVTLNFPTPPQLLEGGCEPGVPDIWIDDQNRVMFGFHGKTNPGRPEFSSRYVVGVDVGVTNPAAYVVWDVEKRKIVEQSLLGQRARSLHNKIKRAQTQVSALQRKNRSEEAVSHRAHLSNRHKELSILIAQEVADAAWRHGNALVVFEDLSYISNTMRFGRWFRGEVYRRTRDMVEADGGRVMKVNAAYTSRKCHVCQSDLDMSDYSQPRCTTCGITHHRDINAAANIAQRANHAKACQTRRRHATKTKRVRRSKCRIKPLKHPGTKNKPTPKAPQNRPRTHTPTAPSREVSKGMCPADVRVSVVDHATWFQTISGTTNPKENQFTNMADVVYPKE

SEQ ID NO: 61093 - protein, 362 aa, unknown
  TnpB Polypeptide
VKTVSFQYDASNELSSLFEDFRLMCNDAIRAALKYEEEHGGEKVQSRFRLIELAYPRLKEYGLHTHYILSACEVAYSVYRDKNRKSPPYVRKAFLKLDKQFYLLNHLILRIPTKSRRFVYLTLHASDYHLSLIDSVALKKGSITVNGHFVNISLRKEAAEVEPCGQIGIDVNERNVTWSDSSGRTEKADTSAVAELKECYRALRGKIDERTQKDRRVQQPLLSKYGKREKDRTIQRIHCVTKTIIEHAQANRFGIVMERLKGIRKLYRKGNGQGKSYRGRMNSWTFREFQSQVEYKAAWAGLPVTYVIPRGTSRKCPDCGSSMIKLEGRKLICPSCKQAEDRDVVASKNILACVVSQARPSS

SEQ ID NO: 61094 - protein, 365 aa, unknown
  TnpB Polypeptide
LQAVKAVGFRYSASDDLRSLFEDFRLMCNDAIRAAFQYEHEHGGERVSSRFKLIELSYTRLKEYGLHTHYILSACEVAYSAYRSKNRKRTPYVRRAFLKLGRQAYLLNHLIIRIPTRPRNFIYLTLRASDHQLAFIDDPALKRGSISLTDCAVSIALSKKVDQRQPIGQIGIDVNERNVTWSDSSGGTEKEDISEVAELKERYRAVRAKIAERTQSDARVRRRLLSKYGKREKGRTIQLIHRVTKRIVERANANGFGIVMERLKGIRKPYRKGNGQSRSYRGRMNSWSFREFQRQIEYKAAWVGLPVTYISPRGTSRKCPDCGSSLTRLEGRKLLRSSCNKSEDRDVIASKNIMACAVPQARPSK

SEQ ID NO: 61095 - protein, 378 aa, unknown
  TnpB Polypeptide
MWYNKNMIRAIKRRIYPTEEQAQFFERNFGCARFVYNQLLEHQIKNHEQGERFANKYTMVHWLTALKTENPWLREVDSRALQEAMFALESGYLAFFRKNNAFPNFKSKKSARQSYTTNANLKVLDGYIQIPKAKLVRYKGKSLGNICPKKITISKTAGRYYASIMYDDGRPTPEKAPIQKSVGVDMGVKDYAVLSDGKKYVNPKLLSKSEERLKVLQRRLAKKQKGSNRRLVAKLKVARQYEKIRNQRQDFLHKLSNEITNQYDYVAIEDLSVTNMVKNHKLAKAIEDCSWGEFARQLEYKSEWRGKTLKKIGRFEPSSKTCSNCGYVKHDLTLADREWDCPECHAHLDRDVNAAKNILVFSSTAGTVGSGRGGANNG

SEQ ID NO: 61096 - protein, 421 aa, Verrucosispora sp.
VAEGGRVVKVNHGYVRRLCLAPGQAAALDEQGHAARAMWNLLHAWWTWGGKHRRPSLKQADGAIRQARKDIPWLADLPAQAAQQVLKTYVRAWKNCWEGRASAPEFKSRIRSRMAVDVPQGRDLGVVRLSRHVGQVRIPKVGVVRFRWSGPIPGVGREPGRITGARLVKDVLGWHIVFRTEVDMPTPAQHPGPAVGVDRGITIALALSDRNNHPHGPWTRPTEAVRLLRLERTAARQKRARKRGEPTSNRLHRTYHQIAKVRAKVKRRRGDWQHKTTTSLAQQYKVVVVEDLRIRNMTRSAKGTAESPGVNVRQKAGLNRSMRNEAHGRTVELLAYKLAERGGQLLKVPAAGTSQTCSACGHRDPASRNGARFVCTSCSWVGHADSNAALNILNAAGLAVYGRGAKTIGSGRETSTIRRAA

SEQ ID NO: 61097 - protein, 408 aa, unknown
  TnpB Polypeptide
MTVVLTEQIKLTFPSKKERIFADQAFSKVTKRYADACTYVSEYFFLDGCVDSAQSLQNLLYKDVRFMFGLKSQMTISVFKTVVARYKTVEEQMKQQTVSYSDGNGTNYLFHKSLEWMQSPICFRRPQADLVRGRDWGFLSGMTEVSINTLSKRVKCTYECRKDSRIFDPSWKHGGAKLVFHETDKNWYLHISVSKVFPETDRSRIRAIDGHDRGLINLTTSCKENGAIVYQSGQHVSEVKKRYAKTRASLQAKGTKGAKRVLKRISGRENRMMQDKDHCISKTLVTGNREHTLHVFENLSGISFENLESRDASGRYALRSWTFYSLELKTAYKSAMCKGMILKVDPRFTSQRCPACGTIDKTARDRLHHKYTCKQCGSAYGDDEVASINLRQLGVLYVSGVDEPRFSK

SEQ ID NO: 61098 - protein, 445 aa, unknown
  TnpB Polypeptide
MKIISIYGVKIKTYNHIFKETVEVYRHATDFLIQVCLNEWEQISPLKGQNRLTYVETLIHVTDRHPDVKYTEFDKQFYKLPSYLRRSAINEATGKVSSYKSNLANWENEDLKNRGRKPSFPKAGYIYPCMYRGNMYQRIGTYEAKIKVYIRNTWDWLTVKLRKSDVDYIEHRCATRKKCAPTLQKRGHEWHLDFPFMEEVELCNTDIQEQTIVAVDLGINTAATVSVMRSDGTILGRHFCKLSEETDRLTHSVNRIKKAQQHGNRKIPRLWAKVKGINQDISVKTAEFIVDIAVLYNADTIVFEHLNRKGKVHGSKKQRLKLWRSQEVQAMVTNKAHRLGMHISRICAWGTSRFAYDGSGTVLRGSEADFPTYELCRFQNGKVYNCDLSASYNIGARYFIREILKSLDESSRLLMEAEVPSCSKRSTCTWSTLINLNAELMSLAS

SEQ ID NO: 61099 - protein, 398 aa, unknown
  TnpB Polypeptide
MYRYRLLPMPAQEALLHDHCAHARYIWNLAVEQHTYWHPGRKSAPGYLEQCHQLTQARAEHAWLAAGSQMVQQQALRDFACARTAFLDPRNPARRPTWRKAGRDEGFRIVGKRRQQWDVRRLSRHVGEVRIPKAGWVRFRWSRQVPPGVKSYRVTMDRSGRWHVAFAAIPAPVPGPGNGQVVGVDRGVTVSAALSTGEMLTVPRLNPSRQRRLHRLQRRLARARRGSTRRARVKLAIARLRARQVDVRKDWVEKTSTDLARRFDLVRVEDLKITGMTRSAKGTVTRPGRNVSQKAGLNRGILASSWGLLVRRLRDKAPGRVEKVSPAYTSQRCSACGHVAAESRKSQALFACVACTFACNADVNAAKNIAAGHAVTARGGDGVARPVNREPQLLLLPA

SEQ ID NO: 61100 - protein, 307 aa, unknown
  TnpB Polypeptide
VTWKQNGVKHDSKHNKLRLSKGFNLKTHRSDFILCEYETRPDVIVENIQQVRAVWNGDRWELHLVCKVEIPVEDAPGDKTAGIDLGISNYLAIAYDDGDAELYPGNILKQDKHYFTRNEYDTEGTNGPSSRALRARQKLSRRKDHFLHALSKHIVEQCIDHEVGCIAIGNLKEIREDENGDSRDWGKRGNKKLHGWEFDRFTTLLEYKAEEYGILVDRTSERDTSKTCSCCGRKRDANRVERGLYVCESCGATMNADVNGAVNIRRKITQNPPTEDMSNGRLARPVAYLFNQTSGHFAPSEQAGCEP

SEQ ID NO: 61101 - protein, 503 aa, unknown
  TnpB Polypeptide
VRRRVRGGRAVGLRAQAAGRRPVRGGWRPSEGRDRDPHVAVRSAVRPQGRGEPGQACHGSGHRERAVKVRQGYRFALDPTPSQERGLWSHAGASRFAWNWGLAKCKQRYAAERRWYSGAELHKLWNAEKKADPGLAWWGENSKCVYQEAFRDLDRALSDFIKSKRGERKGRRLGFPKGKKRGRCKDSFRFSTGVIRCAGNTVTLPRLGVIRMHESARKLSRRLENGTARILSATVSRTAQRWFVSFTAEVERATPGRHARPGSVAGIDLGVKTLLTAVDNAGNVLAIGGPKALRSSLRKLRRASRAHSRKVRGSVNRRKHAGRLARIHARVANVRADALHKATTDLAARYEKVVAEDLNVTGMLANRKLARAVADQGFGTVRRMLSYKTAWNSGQLVIADRWYPSSKTCSACGWRKPSLTLAERRFTCDACGLVMDRDENAARNLLALAASGAERLNACGGTVRPGLAGQIPLKQEPGTADAGQTGTVSGQPLAAGQELSHAH

SEQ ID NO: 61102 - protein, 436 aa, Halorubrum sp.
MLEVHRTHRTKIRNHTQVAESLDRHGWSASKLWNVANYYARQQWEKIGEIPDHEELKRELKDHDKYRGLHSQSSQRVLEELAEAFNSWYSSDDDRDNPPGYRKENYYDDHGRRVHEEHPRSTVTWKQNGFRHDSKHNRVRLSKGANHKDHPRAREYILVEYETRPDVEVENIQQVRAVYNNAKERWELHLVCTKDVETPAPPGDETAGIDLGISNFAAVAYSTEEADLYPANRLKQDGYYFPKEISKCDDSGGERATRLHHKWSERRTHFFHALAKHIVQRCVEKGVGQINVGDLDGVREADDGESKNWGRHGNLDLHGWGFDRFTSILEYKAKVEGIDVEEVDEKDTSKTCSVCGKKDERQRVERGLYVCESCDAACNADVNGAENIRLDITDSTSNSESPSGDRSTGWLAQPGVYLYDLTCGFQPQAEVVDSKP

SEQ ID NO: 61103 - protein, 446 aa, Halorubrum sp.
MKRTNTFAVRPLSNNGEQLLRDLLDASAALWNETNYQRLMRYNDEDGFEGEDVFEADTGQLEGKYKGVLGASTAQQVIRKNTEAWRGFFALKDQYHDESNTSVTIHPEPPGFRGNEDDGRQLKGVIRNTSYTVEWGDCSRLEILVGSELKDRYDHTGRLRLEVAGDPNWPDYEKQGRLDLWYDETASTFRASQPVTVSGDTRDTPLASETAALDIGANNLVACTTTTGEQYLYEGRDLFDRFRNTTREIARLQSKLEGGQYSSERIRRLYRKRTRRRDHAQEALCRDLLERLYEDGVDTVYVGGLTDVLDTHWSVETNAKTHNFWSFKKFTERLVCTAAEFGISVEIRSEAWTSQECPQCGLTDRTMRHQDTLTCPCGFEGHADITASETFLRRRTEQAVRPMARPVRFEWDDHTWSESPRSHRPKEQRTDPSTVNRDGNIASGDS

SEQ ID NO: 61104 - protein, 409 aa, Escherichia sp.
  misc_feature (24)..(27): Xaa can be any naturally occurring amino acid
MDAEQLQELTAPTGKFTRDCPKGXXXXMRRFAGACRFVFNRALALQNENHEAGNKYIPYGKMASWLVEWKNATETQWLKDSPSQPLQQSLKDLERAYKNFFQKRAAFPRFKKRGQNDAFRYPQGVKLDQENSRIFLPKLGWMRYRNSRQVTGVVKNVTVSQSCGKWYISIQTESEVSTPVHPSASMVGLDAGVAKLATLSDGTVFEPVNSFQKNQKTLARLQRQLSRKVKFSNNWQKQKRKIQRLHSCIANIRRDYLHKVTTTVSKNHAMIVIEDLKVSNMSKSAAGTVSQPGRNVRAKSGLNRSILDQGWYEMRRQLEHKQLWSGGQVLAVPPAYTSQRCACCGHTAKENRLSQSKFRCQVCGYTANADVNGARNILAAGHAVLACGEMVQSGRPLKQEPTEMIQATA

SEQ ID NO: 61105 - protein, 119 aa, Clostridioides sp.
VKKAYKFRMYPNKKQQELINKTFGCCRFVYNKYLAKRIDVYKSDKETFTYKQCSSDLTNLKKELNWLKEPDKFSLQNALKDLDNAYKKFFKEKAGFPKFKSKKINRFSYKTNFTNGNIM

SEQ ID NO: 61106 - protein, 316 aa, unknown
  TnpB Polypeptide
MVSQTWFSTRLLKNVLAEAYGMVLGAKSLAETTQKLYRRPTHSGKKMTLSETCAQIILGPRVKAFDLLVRLASLGQKKSVTLLLHKHRQLNRWLSEGTLCKTVTVYADRIQFSFEVDTGPKKIEGEILGVDIGMNKLLATTQRKFYGEDLLRQKLDILHRKQFRSKAYYGAKEDLKSYINREAKQLPWREMSIVVVENLKGLKHGKNGQTRRRGLSKSFRRLIHNWNYRQVLERVQALAEENRVSFRSVSPWKTSQTCPVCGHMDQKNRLSQDLFKCQICGHSDNADFVGALNILNRFVTGAYGPGCKFETGTECT

SEQ ID NO: 61107 - protein, 604 aa, unknown
  TnpB Polypeptide
MQTTLTSTFMEQSNYKSIVKKLDVFVVNYNKVKHKLYKDIIEFLIDNNTNKLSSAKHNELKSTYQKNYNINSRHYNSLFIELTGNISSVLALNKVYLQDTQDKILSLNKTIKYKQKTLDSLIKKIANQDYKIKTSISIQKVDQSNLKSLKNKLYFLNKNLLKATTKVGKLKDINESGNPHLCFGSKKNFRQQFELKKDNNLTGLKTKEDWDKLWFQSRNKTFSLVGSADETGGNSNCQLIVIDQEHTQNNIFELKVNIYPEAIKHSDKYLKVKIKVHNDVKNYLFTVFNNKEIKQALTYRFYRNYNSKSGRFDDYKVFISLDKAKQQPKIISSKQLGTVGIDINADHISMTEVDRNGNLLFTHDFKLNLKDKTSEQSTNNIALAVKEITDYAVKVNKPIVIESLDFSQKRLELKSGINKKYNVMLNSFAYAKIIELFKSRCFDKGLEVIEVNPAFTSKIGKFKYQNLYKLTTHQAASLVIARRGLLSYQKIVKLEYKNKETKEVISKDKLITVINKEKTISIRTTKHYPFELPARNIQMKNNFYWKEIEQNYIKAKKNRKLLKNKVLIPNKQDLLGEISVVVDSFGVQALESTVALNPYLTVPF

SEQ ID NO: 61108 - protein, 437 aa, unknown
  TnpB Polypeptide
MAITAEQLQDGTFRFHGRAVNITKAKNLALKPFGKQVLNYGQTLQLLPTPEQAQALNQQIGNARFIRNDYLDKRIQMYQKEKKTLSVEMYKKEYLPKLKEEHPFLLSSDKFALESALGHVDNSYRNFFSGRASFPKFASKNKPNGNRYSTKQTDNNIALAEGKDGLPYIKLPKVGMVRIVLPKGKLLPGLCPSGTVIRKATVIRQGNRYDISFGMETVIDEIRLVEEVSLSEILSADMGLKDFAVLGDSDGFLKIRNPRWIRVHEKRLRRFQKALSRKQYDTKTHTGSKNWNKAKAKVAKEQRRTAAQRKDFQHKLSRCIADSCKVFVCEDLNIKGMLKNRRLAKAVASAGWYSFFQKVKYKLEHGGGRFLQVSRWFPSSQTCSCCGYRNTDVKKLSIREWVCPECGSYHDRDGNAQQMILKEGIRLLEAAGVCVTP

SEQ ID NO: 61109 - protein, 186 aa, unknown
  TnpB Polypeptide
MATQNKAYKFRIYPTEEQRILLHKTFGCVRFVYNKMLAERMDTFERMKDDKEKLKKIKHPTPAKYKKKFEWLKEVDSLALANAQLNLEKAYKAFFKGNTGFPKFKSKRHKQSYTTNVVNGNIQLLDGHIKLPKLKQVKIKQHRKIPGESTIKSCTLSMSASGKYYVSILTVCEKKLLVKRLKKLKA

SEQ ID NO: 61110 - protein, 199 aa, unknown
  TnpB Polypeptide
LREKIVGKEVKKIEGLDFAMDGLFVDSEGKKANYPKFYCQMLDKLATEQRKLSRKKKGSSNWKKQRVKVAKLHEKVANQRKNFLHQKSKELVATFDAIAIEDLNMKAMSKALKFGKSVADNAWGMFITFLQYKLADQGKQLIKIDKWFPSTKMCSNCCSVKEVKLSERVYQCVCGLHLDRDHNSALNIKKEGIRLLAMA

SEQ ID NO: 61111 - protein, 541 aa, Thermus sp.
MKSPGRAILPHRRPSVISEAASRGSSRKRKKEKAFTGVHALLVFPSGEDHKATLDLMRRFSAAVRYAYNRLLEGQTREALKRENGPLRIFFGLNTRYADAILKAQALLDSARERGEDPRKVVFGGRKLFETLKRGHLSGKPLKELKREWKEKRQGLLYSRGDKTKGGNLNLRLEAEDGALWLRVNLGNGRYAWALVKTSHPNLSALVERVYASLPYNVELTLREGKVYATFAWEEEPAPLAATKENGVLALDVNSDPYHLALALVSPDGNLRRHLTLSLEEVDRAPNKGAKELVLWKIAHEVVSLALEHGVAVATERLRHLPKGRKGDGSGRTFRRKAHRFAYASLLRKVHSLARKRGVQVVEANPQDTSTIGMLKYAPLLSLSKDVAAAYVIGRRALGFREKLPRGYERLLRDERFRGHVQGFYASKVQELQAKKAQERNPYLRRRLSREIGKAKRHLALFSSLQGSPGSQREVTDGRNSPGVNPWRVLRVGTFLPLLGREVPRDLSPLKPILHGSWEGWKGGLGPHPGGGPECTNVYFG

SEQ ID NO: 61112 - protein, 414 aa, unknown
  TnpB Polypeptide
MLRAYKYRLYPTDEQKVLFAKTFGCCRFVYNWALALKIEAYKERKKTLKNVFLTNLMKSELKAEHEWLSEVNSQSLQSALRNLDTAYSNFFRNTKAVGFPRFKSRKNQQSFQCPQHCRIDFAKGTITIPKAKDIPAVLHRKFKGTVKTVTISLTPSGKYFASVLVESNIQELPPAPIRRSTTLGIDLGIKSLAVCSDVHTFDNPKNLQKSMSRLQLLQKRLSRKQKGSANRNKARIKVAHLLEHIANQRKDHLHKITHTLTHENQVRTICMEDLYVKGMQRNHHLAGAVGDASFGMFLSLLEYKCRWYGVNLIKTDRFAPSSKTCSKCGYVYKGLKLSERSWTCPECGTYHDRDFNAACNIKEFGLKTLPTERGEVKPVDCPLVDDRPWVLKSNGRKKQEKRGDHCLRSLYRQA

SEQ ID NO: 61113 - protein, 485 aa, unknown
  TnpB Polypeptide
MTELTSEIRGISAYATYVVRNDTMLEAGLGQAGTVQPAVAGRRAGVTMPDFLEFGRTGKSRKEWLVRHRVVTSYRSWQERVKAVNGESTKYVSQGWKRTMSASAPTYGEDYINLGAVDKQYAVIENNPFTDGEIVLKMVIHGAWYRLIFNFDNTRFREGKVTLPLVKVENNQLVFIFTVETDNPVIQFSGDYVIGVDVGITDYATVVVRSIKSGQIVYQSTLSQRVHSLWNSVKASERQVRALWKKAEHLLYQRQAQMSSLDEAQLHREAASRKKRELAIITAQEIAYLSHFYGNAVVAVEDLGWVSNTMRNGRWNRGALIQWLTHYVSQNGGWVLSVSAANTSQLCHACGARVTHPTHKVSVCPVHGVMDRDVNAAANIAARAVPKVEKARKTRAKNRKLRRQIVLKTPVARGSLKYPGRDRTKCAPTPKRRKKCKEVKTFSSPARVNMTTVLADYDTYGVTETNKAAIKQDYITHECRLYNLH

SEQ ID NO: 61114 - protein, 374 aa, Actinomadura sp.
MLEQCRHARFVWNLAVEQHGHWRPGRRAAPAFIEQCRQLSEARAEFPWLRSGSAVVQQQALRDFSRSLANFFNGTHGRPTWRKAGRHEGFRIVGVKPDDVRRLSRRTGEVKIPKVGWVRFCWSRAVPEGARSFRVTCDRAGRWHLAFAHIPDPVRGPADGSSVGVDRGVTVSAALCTAELLCAPRLSRKEAERLLRLQRRLARSRSGSRRRTKLKAQIARLEARAADRRRDWVEQVTTDLARRFDRIALEDLNVMAMTRSARGTRAAPGRNVSQKSGLNKAIRNSMWGAFARRLEQKAAGRVVRVSPGFTSQRCSECRTVDRRSRESQARFRCRSCGYTDNADVNAARNICVIAAGQCGGSAGSPPAVGRGDEP

SEQ ID NO: 61115 - protein, 305 aa, unknown
  TnpB Polypeptide
VNLSKIGDFHLNYHRPLPDDATIKEIILKKQKTGDRTVSVVVEHDADYPEKPAVEDIAVEDTVGIDLGITKFAHDSENRAFARLDEETDRERIEKRHRLLSRKQHESANWNRARQSLARAYERVKNRREDYREKLAHWYTREYDAVFLEDLDVASMTQQDRNARNIASMSWRATLHAFERHGEKNGCHVVLVDPAGTTKQCANCGIETDKPLWVREHSCPSCGFTADRDHNASLEVCQRGLEQLGVEFKQSELGLGQSEPTSVETGVTAGRHHRDALLANTVVEAESPLQEHGSPTLTEPATAGE

SEQ ID NO: 61116 - protein, 388 aa, unknown
  TnpB Polypeptide
MLKAFKFRLYPSDAQKMQIEQHFGCCRLVWNLALEAKKRAWESARIDVSRFDLQKQLVELKKEYIWLYEVHSQALTSVLLHLDTAFDKFFKGAGYPRFKNKGGRQSFQFPQFVTIEKGYIKLPKIKKVRCEKADMLEGQVKTVTISKTSTGKYYASVLVDNKRELPTKPQTHPEKTTGVDVGIKSFAITSDGKFYAPNRYLQNSLDRLRCLQRRASRKKKGSNSKKKAALKSARINEKITNQRTDHIHKITTQLVRDSQAETFVIEDLNLVGMVQNRSLSRVISDASFGEFFRQMKYKCEWYGKNLIVIDRFAPSSKRCSECGEINNELTLSDREWGCSCGAHHDRDLNAAKNIKYYGLLKHSGVGSPGEPVESRRLRRAKKQEKYFT

SEQ ID NO: 61117 - protein, 422 aa, Natronolimnobius sp.
LHEGCLEARRVRNEVNRLDKHGWNWDDIHDTVVDNANLIKNTTQLLVQKALGELETYHDHKNEGWGRPFPYIDEAYPMRMNHDEGYALNVDDSGDVRFRISYKPYNHVKGVLRGSPNHLEQVKNALESEAWRVGVAELVYKHGEWRLHVTVTHKTRTVSSPDNAGTVVGVDINEDCVALAAMCRDTGDVLDSVVIEYPDIKWVRHEFFTKRKRMQTVRQTAFENVVRTEERDFVHDQLHKVSRDVTQWVSQFNNPVIVFEDLKDMRDSIDYGTRMNRRLHSLPFATLREMIAYKSAWNGVPSDDVNPEYTSQRCPRTECLHTERANRDKKRFKCKECGFQDHADRKAAVCVAQEWFDDHDENVLSLETFPRVRKVRRTVSGLCEEADAHGAVFASGVTDTESAQDSQSRARAELKTVASTAD

SEQ ID NO: 61118 - protein, 328 aa, Natronolimnobius sp.
VGILALQRGEDVNAPTIKYDANTMTVFDDETVSLTTLENRVRCEMVLPEADDGFQYQFLNNDDWHVATSTLTARDGEFYLHLGFRKESPMDDVEESPAEDRTVLGVDLGINHLAVTSTARFEPGKKLVHERDCFEQTRGGLQKTGTQSAHRTLVRMEGREERYYRDKLHRVSNAIIDEPVEHDCTHIVFEDLRYIRKRISNGKKFQQWAPQKLVQYVEYKAEERGIRVEFVNPRYTSQRCSECGHTSKGNRTGTEFECEKCGKELHADYNAAKNVGWRFVRRGLNDSRRTGDSQLALKSGTVKPNRGFAPYPDYFGSEAESTDKPRVT

SEQ ID NO: 61119 - protein, 361 aa, Photobacterium sp.
MKRAYKERFYPNEQQAELLAKSFGCCRFVWNNSLKYRTDAYYERGESIAHSVLEKRLVPLKAEFEWLKEVSSVIFQQALRDQQEAFKNFWDKGAKYPKFKSKHDKQSIRLTKAAFKYKDGLLFIAKSKQPLDIRWSRKLLSEPSSITISKDKAGRYFVSMLCEFESKPMPITVKTVGIDLGLNNLFITDSGEKVDNPRHTKRYENKLAYLQRQLTKKKKGSKNRDKIRQKVARLHAKIADSRLDNLHKLSRKLINENQVVCVESLAVKNMIRNPKLSKHIADASWGEFVRQLKYKAEWAGRTIAEIDQFFPSSKRCSCCGFVHESMPLNIRNWSCPECNTYHDRDINAAMNIKTVGLAGLV

SEQ ID NO: 61120 - protein, 311 aa, Photobacterium sp.
VTQYDSIALQQSVINLHQAFDNFFNPKLKAKYPQFKRKHGKQSSYHCVGVKVMDGAIKLPKMKPIKANIHREIIGTVKSITLSLSKTGKFYASILVDDGIDAPALINTVSKVTGIDLGLSHFAIESNGKKTANPRYLKRAEKNLKRKQRQLSRKKKGSANRAKARLLVAKCHEKVANARADFQHKLSRTLVDKNHAVIVETLKSANMMKNHKLAKHIADASWHSFVVKLEYKLKEQGKHLVKVDQWYASSKTCHCCGYKMEEMPLSVRKWDCPSCGTTDIDRDLNAALNLRDKGILELKAAGRSFLLMEAA

SEQ ID NO: 61121 - protein, 310 aa, unknown
  TnpB Polypeptide
MIARGLEENSVLRELRRVLNKAYADSAYKVAKAIVEGCIFNGGNSLNIEVKKPFIVSEGESSRLGNRNVRLEDTCLVKVKYPYDGSWITLRAEFGEKYLPLLRELVDLARQKKLSYTARIVFREGDIYLHLSIPTQLYLKYFKKGEARGRLIAGFDLNSDRVNLVIIDEHGKIVDVKTAWFPEVTSHGFPREKAKALRLNALARLLEYCYRHGVSAVVFENLLSVKRKRFTRSKKANRKITRSAKKQLIQHGVVMALKHGFRVLLVDPKGTTNSREHGEIMKRFGLDRHTASAYLIALRGLRHHEYGCYK

SEQ ID NO: 61122 - protein, 410 aa, unknown
  TnpB Polypeptide
LEEKLNSNDNKIYRSVKIRLLPTKEQEILFWKSVGVARWSYNYFLSESYRVYQEWLEDNSKPKYISESEVRKYINNVLKKTTHVWLKEVGSNVMKQGVKDANTALQNFFKHNKDYPKFKSKKRSKLSFYVNYESLKRTSNGFQGEKIGVIKTRESLPKIPKGDKYVNPRITYDGKFWYLSVSFEVSKVNTELSDNKLGIDLGIKELAVVSNQDGTMVKKYHNINKTHEVVRLERKLKREQRKFSRKILANTSHCDNKNRPKYKRELDLCKNIQKQNGIIQRLYRRLLNIRTNYLHQTTTEIVKTKPFQIVLEDLNVRGMMKNRHLSKVLMCQKLYEFRRQIEYKAELYGIKVVIADRFYPSSKTCHNCGHINKDLKLSDRTYKCFECGNVVDRDINASINLANYNIDSIN

SEQ ID NO: 61123 - protein, 372 aa, unknown
  TnpB Polypeptide
MKLIAQLKLQPTPEQADLLRRTLEAANAACNFISDVAWETRTFGKFALQKACYAQIRERFGLSAQMTVRALAKVGDAYKLDKKTKRTFRPLASIAYDDRILSFALPPSEVSIWTLSGRAAIPFVCGERQRQMLATRQGESDLLFHRGAWYLLVTCEVEEADPQDVDDVLGIDLGVTNIATDSDGTIHSGSTIKNVRYRHRRLRNRLQQKGTLSAKRRLRRLAGQEARFAKDTNHTISKHLVETAERTKRAISLEDLKGMRTRVRARRQQRAQLHSWSFAQLRSFIGYKAQRIGIPVVLVDPRNTSRRCPACGHIDKANRPAQAVFRCTSCGCAGHADVIAAENIRVLGRAAVMQPHVSEAAPPSCQRQAAGL

SEQ ID NO: 61124 - protein, 310 aa, unknown
  TnpB Polypeptide
LRFVYGKLLAEVYFRLDKAMHAFFQRVAEGTKKAGFPRFKPRHQFFTLCYPAMYLEVPGTTLILPTGGGHSWGPKRFPNIIAHLIEDPPEHLREVAVSRDARGNYFCSFVYEESKKQVAHEGIVAFDLGIKTLATGYNNKGRFYHIGGFKGYRWYNKQLDKIRSKRDRCKKKSRRYLYLSRVYKRVSEQKRNKQHDCLHKASHLIADTLAERAVVIGELSQRQMVVRKQENETPKERKKRQVRNRLVYNDWGLYSFVQMRHSKPTLTQKGHTTLHHSTKYSHSAFSFVPSWITCTHVSLLLSSAISSLPI

SEQ ID NO: 61125 - protein, 402 aa, Escherichia sp.
MLRAFKIRIHPTEEQAHFLNGQFGAVRFVYNKALFITKHYYDKKGIKLNIRKDVKPLLAIAKKHDKYAWLANYDSQTLAYTFINLERAYKNFFEGLKKGRKVGFPKFHSRHHVQSSWHVGAKCKVFKGGIKLPKMKEPVKVRCFVPDEIISGEFKLNSITLTKTKTDKYYASLLIDDGKELPEKVHHIEKAAGVDVGLKDFLIVNDGEHCKKYDNKHFMQKADRNLKRKQRKLSRMQGPVYFDADGKKHYREPSKRWLKMKNKVAKLHEHVANRRADYQHKLSKELIDNYDAVAVEDLNVKGMLQNDKLARAVSDVGWSSFIEKLAYKAEWQGKHLVKIDRYFPSSKTCHVCGYKNTDLKLKDRAWICPECGTEHDRDDNAAQNIRQQGLIKLMANGHTVNK

SEQ ID NO: 61126 - protein, 396 aa, Trichocoleus sp.
MNPKAYRYRFYPSEEQEQLLRRTLGCVRLVYNKALHTRTEAWYERQERVDYKQTSGMLTQWKKQEDLQFLNEVSSVPLQQGLRNLQKAFTNFWAGHARYPNFKKKRSGGSAEFTRAAFRWKDGQLWLAKCSEPLPIRWSRTLLKGCEPSTVTLRLDASGRWFVSLLVEDHTVKSLPKVDKAVGIDAGITSLIATSDGEKIANPKHFKRLRHKLRKAQKALSRKVKGSNNREKARHKVARIQAAIADARKDFLHKLTTRLVRENQTIAVEDLAVKNMMKNHKLAQAIADASWSELVRQLEYKCQWYGRTLVKIDRWFPSSKRCGKCGHVVDKMRLDVREWDCPECGTHHDRDINAAQNILAAGLAVIVCGANVRPDGHKPKGQLRKSSNGRKQKPKL

SEQ ID NO: 61127 - protein, 438 aa, unknown
  TnpB Polypeptide
MTIPASTPAVVTQAFTFALDPTPKQASAMLSHVGGSRFAYNALLGLVAANWEENRAKKAAGLEVTKDDYVSTSHFGLLYLWAGRRDELAPWWAENGSSTYNDAAQRLSKAFTNFHKGRAKFPTFKRRGQSGSVRIVGPAVRLDDSHHVTISRIGTIKTYESTRKLYRHIERGSGRIVAATLRHRNGKWTISFTAEVTRQVPVTRAPERIIGVDLGITTLYTGATPSGEHVLEVDNPRHLVKARAKLAHAQRVASRRHGPRKGVSPSNRWRRANGRVQKIHAGVANARKNLIHETTTSLAKNYDVIVVEDLNVAGMLKNQALAKHISDASWVEFTRQLEYKTKWYGSTLVKADRFYPSSKTCSQCGTVKAKLSLDERMYHCEACGLAIDRDVNAAINLANLGLPGTSSGTGRGGKGKTGRVSPAHPREASTETLTPVSV

SEQ ID NO: 61128 - protein, 386 aa, unknown
  TnpB Polypeptide
MARTDKKPTVIKTASIRLNLSGEEAACLAAVQAVYAEACNRLVPLVIDKRCWNRFALHALGYDMLRSETRLGAQMCCNVMRSVAAAYKALRANGEIENDKPVPAISFKRASIHYDQRTCTLLADGLVSLWTLEGRMVVKLAPGTRQRQLMGWGKPKEAEVHCRKGQWYFNLVLEKEVEFRTNGIIVGVDVGENNLAAASTGKVWGGEKLRDERDRCLALRRRLQSNGSESAKQLLGKVSGREARHVRHVNHETSKEIVGEALRVGARAIALEDLTDIRSRIKAGKRMRSRLHRWAFRQLQDQIVYKAAEHGIAVVFVDPAYTSKSCSSCGQMGSRVRHRFACGCGRRAHSDVNAARNLAWLGESALSPRADVNRPNVGAVSHDCAP

SEQ ID NO: 61129 - protein, 365 aa, Leptotrichia sp.
MKYNLAFKYRIYPNKEQELLINKTFGCVRFVYNTILYAANKFYEETGKNKIITPASLKSENQFLKEVDSLALSNAQLNVKRSFTNFFQKRAKFPRFKSKKNNVKSYTTNCVNNSIRIEENKYLVLPKLKKVKLKYHREMPKDYRIKSVTLTNSNGNYYVSILTKFEKEIKKNPSNDKVIGLDFSMSELFVSSENQRADYPRYFRILEKKLKELQKSLSRKVKFSKNWYKQKSKISKLHEYIKNCRRDFLHKLSKKLSKEYNAVVVEDLNMKGISQALNFGKSVGDNGWGMFLKMLEYKLMFLGKQFLKIDKWFPSSKTCSKCGNIKEELKLSERSYKCECCGIEIDRDYNAALNIRNIGKAMLKY

SEQ ID NO: 61130 - protein, 418 aa, unknown
  TnpB Polypeptide
MERLLRTEVMEVKPHQALSALCHQTKNLYNRANYLCKQRLQQQGTLYSYYELDRILKTAECYTILPAHTAQHTLKLLIRNWKAFFQARKEWKKNPEKFLGSPQAPHYKPPNGETVAIISNQQARIRNGWVVLPRKIPFTLKTRLKATDDLREVRIIPRGVGYTVEIVYRKHFPRHIQKKKSRKGALDLGLTNLVTFVDNIGSRPIVVKDEGKGIKSITQYYLKKISQLQTQYAQQQHKHLKQQNRLRYGPAYYRAKERWRRKVKDCFHQLSKFLVNLWEQRELHTIYVGYNSLWKQQMRLRKKTTQLFVIIPFHHFLSLLTYKAAERGITITLVEESYTSKCSFLDNEPPQKRITYAGQRIKRGLFRSQQGYLINADVNAAYNILMKSDPQAIPKRTVNGVGGYVMYPLRVSYPAMTL

SEQ ID NO: 61131 - protein, 341 aa, Sinorhizobium sp.
VTRAAVLHVSRMTGNRGIIMRQLAQICANKAEADRINVSFSISDTHVSVTFDPMDLPHHPQRRRPVAPIKGRCLGVDLNPNWIGIAAAANTEDPGAVDKTRLLEHAPVKLDMPKDASAELVRETLGAVCDRAISMARKHRCGTIVLERGLSKLRSSGRSRSLNRLLNYWARTVFVQMLQRRARLAGIDVLEVWAGYSSTIGNLAFDAPDACASATEIARRGIARLAGIKDVLPALEEGCVSRLWKNGKVPAELGSWQDVHRTIKAAKIGYRRPHPDVPLGARGSDVHGTELFCGHAVVRLGRRRRPGLLFRLTSARPDAAVRALAQCGRMPCWRVSTRKSE

SEQ ID NO: 61132 - protein, 343 aa, Okeania sp.
VKDSHGGQKIAAQLTPAPRCMPIPQLRDHPDYYSQKKDLVNTKDKFPEYKLIHSQVLQDCIKRVKLAFDRWLKADKNGHKLGKPRFKGKGRYRSFTYPQIKLDCIEENQINLPKIGKVKLIKHRPLPEGFQIKTVTISRKADGYYVTLSLEDKSVPALTTEVEPTLKNTLGIDMGLKEFLVTSVGESVPIPQYYRKSQQRLKTLQKRLSRKKKGSKRWLKALLSVAKQHKKVADKRKDFHFKTANELLSKAEVIAHENLNIKGLAKTRLSKSINDAGWGQFLTILTVKAVSAAPPEEANAGGENYSSEPQKYQPKLLKLWKKSSQKIKHTNSFLSALRYCDRS

SEQ ID NO: 61133 - protein, 402 aa, Escherichia sp.
VKRLQAFKFQLRPGGQQEHEMRRFAGACRFVFNRALALQNENHEAGNKYIPYGKMASWLVEWKNATGTQWLKDSPSQPLQQSLKDLERAYKNFFQKRAAFPRFKKRGQNDAFRYPQGVKLDQENSRIFLPKLGWMRYRNSRQVTGVVKNVTVSQSCGKWYISIQTESEVSTPVHPSASMVGLDAGVAKLATLSDGTVFEPVNSFQKNQKTLARLQRQLSRKVKFSNNWQKQKRKIQRLHSRIANIRRDYLHKVTTTVSKNHAMIVIEDLKVSNMSKSAAGTVSQPGRNVRAKSGLNRSILDQGWYEMRRQLEYKQLWRGGQVLAVPPAYTSQRCTCCGHTAKENRLSQSQFRCQVCGYTANADVNGARNILAAGHAVLACGEMVQSGRPLKQEPTEMIQATA

SEQ ID NO: 61134 - protein, 390 aa, Natronorubrum sp.
VLQKVVQRLYGNLSTLKGRKDNGYRVGGLKWKAPQEYRSVKYSQTGFELKNTSGCTVLSLSKIGDIPLVYHRDVPDDATVKEVVVKQEPTGEWFAVLGIETENDAPSKPDTLEKCVGIDVGILKYAHDTDVTAVERPDLSDERDRLEREHRKLSRKQHGSANYRKQQRVVAKRHADLQRKRRDFLHKLSNHYAREYDLVAVEDLDAKGLMELPSNSRNRAGAAWGTFLRMVEYKCEREGTHFVAVDPAGTTKECSACGVSTDKPLWVREHSCPSCGFTADRDWNAAYNILVRGLKQVGTGCPESTSSESKDSDGLRKSADDFRTPAETALPMGTNSVPAKRVVETGSPTLKERTAQAVSEYGGKEVTAGSVSSADQWVCTFHRRQENNNP

SEQ ID NO: 61135 - protein, 406 aa, Halorientalis sp.
VDPTVHKRQKLRETRDAYQQALQAAFAAGCDTQAAANDVVVEYDLSGYAKNALKQYVPQLHNSYDADELHDDHPVRFTNEGLQLDHQPQNAIEWYVKVPHHEDYHLWIPARANPDQREWLEALYADDAEMGESRLFERDGMWYLHITATRDVEDKSAASADEQTPIGVDIGEASLVTVCHRDESGSPVRPELWAHDGKAVRRLRKTYFTAKRRLQQRGSKRIAESYGDALWDQIDDVFHRVTREVVEYAESVENPVLVLEDLTYIRESMDYGEYMNRRLHGWGFAKLHAQIRYKATETGIPVATVNPRNTSKACHACGEHGSRPRQATFRCSNDGCWVGEYQADVNGAINIADHYRSGESHRRSDRASRQKAGDDDSTTGGASLTGPQDSHADAETQQMTRGTYAS

SEQ ID NO: 61136 - protein, 472 aa, Halorientalis sp.
MAAQTEEERTRTNTFQLQPKENWKRVCLIELLDPAAALVNIVTYHRRQAYFDDEQTRNDVWNAITKTEIRDRFQPTLGRAITDKLLDKCDETWDGFFTQLDDYHDGDREDRPSPPGYCKDGGQRVLKTVVRNDAYTVEWGEHSRIELALGSELKEKYGIPFNQRLRVPIRGNPQYEGHGGRLELVYDRSTESFTAHQPVTFRHDTTRAAASGDEDVVAAVDVGANNFVAVTTTNGHQAVFDARPLFDRFHRITERIAELQSQLPDGEHSSRLIEKLYDRRRRQRDHAQDALIRYLARLFEEWGVGEVYVGKLDDVREEHWSAVVNEKTDLFWAHGRFRRRMHEVLDGECGINVEEESEASTSSRCPQCGEEESVGRNGDVFQCGGCGFEGHSDVVGSENFLSEVVDGNVEFNTGRPMARPADSGQNGPEWRHREVPRLEWDDHEWRRRGHSTKEEPANRSTRKGNLASGVSR

SEQ ID NO: 61137 - protein, 360 aa, unknown
  TnpB Polypeptide
VIKGAYRDAARRAKSFRERKKKGKAHKDKPEVKRVTITYSDSQDWRLDGGVIKLKTHRGWVELHYRNHKQLHKYLYGGWRLASELRFKILGRKIVVYLSFTREFEVSYNPKNVVAVDVNENNVTVAVFKSNSLTDVYRVETSLGRIVIAYSERRKRITQGKSTKTREVKEKLKKLRERERKQDVLRKTAKLIGSLAIENRAVVVVGNINEKAKERMEEDANSKLRHRIHQWSVKKLIELLDEKPIHVVKISEKGTSSRDPFTGKRIKWFEPLVIRSAVKGLKRAKVVKVALRVAWVNGGVLERDVVGAVNIGLKYLNSDGSPVALGSTGTHEVWVKQVNPHRDATPLTELQVFTNTIKYR

SEQ ID NO: 61138 - protein, 439 aa, unknown
  TnpB Polypeptide
VSEVVRTVVVKSTPLPRKLFMVFVELEGMYRNMVEQLVLYAARSGITSFTKLKALKYGELRSLYPQLPSHYAYTACQDASTRTKSFFKRRKKGLAKKDYPVVNRVSIWLDDHLWRMKSSTSIEIATHKGSVTIELEPHKQYWRYLNSGWRPASEAKVKLDKRSRRLITYLVFKKSAETYESRGFISVDVNENHVAVLVDDKAFLFETGFKDIVLGYYYRRRRVQERYDKLYGVNCRVKRKIFRKLKERKKKSDLKWKLANIVVRAAWERQYAVVLEELGEEPAKDMINHIGDNQLRHRIYQASFKGVQKAIEEKAREYSVPIVYVNPRNTSRMCPVHNAGIIYSNGCRIGRCSKGGELWHRDVVACYNLLLRAHLGNGGNAPSLGGLVVDGSPVPLGSTATHDPTVATRAPWARWKSLEDTTKPLKTPTNTLQGQTVVI

SEQ ID NO: 61139 - protein, 311 aa, unknown
  TnpB Polypeptide
VRRVTVHLDDHLWKFSLDKISISTKRGRVFISPTFPKIFWRYYNKGWLIASEARFKLLKGNVVEFYVIFKRDEPKPYEPKGFIPVDLNEDSVSVLVDGKPVLLETNTRKIILGYEYRRKAITTGRSTKDREVRRKLRKLRERDKKVDIRRKLAKLIVIEAFESRSAIVLEDLPRRIPEHMIKGVKDKQLRLRIYRAAFSSMKNAIIEKAREFGVPVVLVNPSHTSSTCPIHGAKIVYQPDGGDAPRVGVCEKGKERWHRDVVALYNLRKRAGDVSPVPLVSKESHDPPKRWLRAKSLHSIMIEHKMIEMKV

SEQ ID NO: 61140 - protein, 382 aa, unknown
  TnpB Polypeptide
MATVQKSIRVRLYPTEEQEILINKTLGCCRFVHNQTLDNCKLSYEQTHHFPSGKERSANLVPLKEEYEFLKEVSASALQQSVRDLDSALNNFFKNRSHFGFPKFKSKHNSKQSYRTPYSNGIARIIDNKHIRLPKLEKIRTKKFLVPDNYRLFNITVEKTSTGKYYASICIETEIQPLPKTGKPIGFDLGLIDLLIGSDGTRYARPKFAYANKDRLAKEQRKLSKMRTKLERVNANLDECRNYQKQKHKVAKIHEHISNCAKDFNHKLSRKLVEEYDFLAFENLNVEGMKKNHCLAYSISDVHWSQLLSFIQYKCLWYGKEFRHVDRFYASSKICSECGTYHKDIVNSLSVREWVCPDCGTHHDRDVNAAKNILNQALSVGV

SEQ ID NO: 61141 - protein, 336 aa, unknown
  TnpB Polypeptide
MYEERNCKIRETGKATRERRANMDCCVISVKIQENRLSKAKLEKIQRCFLEAKWLSNAVVASETLTLENTSTVQVKVKDSFEVREINTLSVQMKQSVMDSVKQNIFNLSKAKQKGLKVGRLQFKKECNEINLKQFGKTYAIKGKNKISVQNIGVLVVNGLEQVNLDEVEFANAKLIQKPSGYYIHLTIYSNKQPQSSVEKEVIGLDMGIKDQLTFSNGVKVNFYLEESEQLKGLMRKLSRQTNGSNQYKQTLNRIKRIYESQNNKKKDVVNKLNSVLKTNYIICFQDELLNQWKRKKSKRRFSFGRKVQHGILGRVKNKLKKNSTNHMLESSVPTT

SEQ ID NO: 61142 - protein, 382 aa, unknown
  TnpB Polypeptide
MTVVHKGIRVKLYPTEEQEVLINKTIGCCRFVHNQTLADCKQSYEQTQHFPSQGERSASIVKMKKEQPFLKEVDAHALQYSVRDLNSALNNFFKNRGHFGFPQFKSRHRGKQSYRTPYNGGKANVLDNKHIKLSKLGKVKTKRFDMPEVYKLCNITVERTNTGKYYASICIETEVQLLPKTGKQVGFDLGLKDLLIGCDGTRFARPKFGYANKDKLVKEQRKLSKMRAKLERANANLDECRNYQKQKHKVAKLHEHIANSAKDFNHKLSRKLVEEYDFIAMEDLNVSGLIKNHSLAYSISDVRWSQLVNFIKYKCSWYEKKFVQVDRFYASSKICSCCGTYHKDIVNSLSVREWTCPDCGVHHDRDVNAAKNILIQALSAGI

SEQ ID NO: 61143 - protein, 385 aa, unknown
  TnpB Polypeptide
MSTQMNFKYRIYPSRTQIIRLNKTISDCCFVYNQLLETKINAYKLDKTNIAQFDLNKIAKDIDVPVHSQVKQNISKRINDAFNHFFRRVKAKKGKVGFPRFKSFNRYKSITYPQSGFKIVSQSKLFVSKIGNIPIILDRVPKGKMKTFCIKKTAIGWFAIFSCDDVPIDKIKVPDNQIGIDVGIENFATLSNGEVIANPQFLKKSEKKLAKLQRRLSRKKKGSANRRKARLRVARLHERIFNQRNDFLHKISFSIIKKFKIISVEKLQIKNMVKNHHLAKSINDVSWGIFIQMLSYKVERTGGQLVKVNPRNTSKTCSNCGTILDMPLNKRKFKCKCGFVCHRDLNASININTLGQREINACEHDVRPSSVKAVVDEAGTIFESA

SEQ ID NO: 61144 - protein, 537 aa, unknown
  TnpB Polypeptide
MSTKSFIINLPIITGDQDRRRLRKSFSFGCNLQNAVMGGGWDRVLQMRATAEWQATRAMPKGRERTKAFRDLRVRFRLSEYDFHADVAKHRKASGRGHLLGINECQKLASRAWISVERHLYNGGSPRFISSRRGLHSIEGKTNRTGIIWKADQQCVTVCKHVYRVRVDKRDDWLTRALQDPTDPTKPRKVKYCRIVREMRKGKERFLLQLVAEGTSPLKHAYAGKDLRMAIDPGLGSLTYATEDGTIAKVQIAPSADTDHRAIRRIQRAMERSRRAMNPDNYEAVDVVRHGKKKKSFKVKSGRLQWRFSKRYESLRAELAEIFRLSAATRKREHGEVCNWLLGHAGSIIVEDNSYKAFQRGRFGKTIGRHAPAALYAQLTNKAESAGLLVEVVSPKKLKPTQHNLLTGQFVKHELWERRVRLGNDDDDRWIDRDAAACLNLLYADLEKQTYAPERIREAVLAGVTAWLDAGVVVIQAREGITEREFGRFRRRGIPSLTVQGLRQQGFRGRSDSKSGVTPRRKASTVSKPSHFSGEVV

SEQ ID NO: 61145 - protein, 376 aa, unknown
  TnpB Polypeptide
VKLTLKIKLLPTDEQANLLLETMKEANTVCNAISDVAWEKKIFNNFKLHHQVYHPYKDTFKLSSQILVRCIAKVADAYKLDKKVKRQFRPLGSIGYDSRIMTYKTNDIVSLWAIGGRIKIPFVCHNRNYLPYIKGEADLVYKKGKFYLFQTVDVPEEDVVDVEEFIGVDMGLLEIAALSNGKSFNSKKLNDYREKRQKVRSSLQSKGTKGSKKVLKRLSGKERTTSTIINHTISKQIVQLAKTEGKGIAIEDLKGIRFSANKKGKKFRTRVGKWNFNQLRGFLTYKCLLNGVKLVVVNPAYTSKTCHNCLHIGSRQGKKFTCNNCNSVFDADENAAKNIALLGTNYVNSPEKPSMLYCQVHSFLGLKPIPSLCVGG

SEQ ID NO: 61146 - protein, 405 aa, unknown
  TnpB Polypeptide
MIVLEFKAKGKTTQYTAIDEAIRTAQFVRNKCIRYWMDNRGVGQKELYRYNTALRAEFPFVKTLNSHACQASVERAYSSIARFYDNCKRQVPGQKGYPKFKKNCRSVEYKTSGWSLSETRKQIVFTDKKAIGKLTLKGTWDLNFYQIDQIKRVRLVKRADGYYVQFVIRIEHQVETNSTGRTIGLDVGLKEFYTDSNGHNEPNPRFYRKSEKRLKSRQRCVSRKKKGSTNRKKAINRLGRVHLKISRQRQEHAKGIARCVIQSNDLVAYEDLRIKNLVKNHCLAKSINDAGWYQFRKWLEYFGVKLGKITVAVNPAYTSQNCSNCGTVVKKSLSTRTHNCQCGLELDRDWNAARNILNLALGTTGHVGTWILNPNASGDSTSTQAGAILSKQVKSVNEESSRLDS

SEQ ID NO: 61147 - protein, 353 aa, unknown
  TnpB Polypeptide
VISIKTLQVRIKDKHAKVLRQLSNEVNFVWNFCNELSLKHTQRTGKFMSGYDLQKYTAGACKEGLILNSATVQMIGHELATRRKQFKKIKLSWRKSNGSRRSLGWVPYRQDCISYKGGQVRYAGYKFNIWDSYGLSNYELGSGTFSEDSRGHWYFNTTVKVEKKPNTATKSIGIDLGLKECAVTSDSHRLIGRNYRKLEQSLGMAQRANKKSLIKALHAKIKNRRKDELHKFSTMLTQEYGAIFVGNVSSSKLIKTKMAKSTLDAGWSSLKTMLEYKSDCAGVMYEEVNEALTTQTCSECGTLPPSRPKGIAGLGIREWVCSDCKTVHDRDVNAAKNILALGHERLAVGIPSL

SEQ ID NO: 61148 - protein, 310 aa, Streptomyces sp.
VGQRRRRDRLRARQQGVRGDQPRVGFAEPDVPDVVDCGDLLQCSGRHDCDGELQRAVHGHPWLQHRPRDLRRQVELLSFGFRPDVVFGAIGLLSAAVRRGRSGAPASYGTTPFDCVRAQRAVSRKRKGSNNRRKAKQTVAKIHARIADRRHDFIQQETTRIVRESQAVYVEDLNVKGMAARGGRLGKSVHDQSLGRFVGTLEAKCTRYGRTFVRIDRWFPSTRLCSRTGCGRLTGPKGREQLNIRVWTCTECGTRHDRDENAEANLRAAGRKRVAEMRLEAERQNACGEHVRPRKPGQRSMKQEQANFPY

SEQ ID NO: 61149 - protein, 151 aa, unknown
  TnpB Polypeptide
LSRKTKGGSNWEKARIKVARWQEKIANQRKDKLNKLSSAIVKSYDVICLEDLQVKNMVKNHTLAQSISDASWSAFTRQLSYKAKWHGKEVVKIDKFFPSSQTCHVCGHRNKGTKHLGVRTWICPNCHTEHDRDINAAVNILHEGLRILKIA

SEQ ID NO: 61150 - protein, 342 aa, unknown
  TnpB Polypeptide
MIRTYRYRIKDSTDAPTLNRLARSVNQVWNFCNETQEHALRWNQRWPTGFDLNKLTTGCSKELGLHSQTVQAVGEEYATRRKQFKKRKLRWRGRRSLGWVPFKASGVKVVDDTVRYADHPFRFWKSRELPGVIKTGSFAQDARGRWYVNFVCEVADEAPTTGTQHMGIDLGLKTLATCSDGRKIEAPRWYRNQQRRIAEHQRKKRSRQARNLHAKIVNRRKDFLHKESDRLTKECELIVIGDVCSSKLTKTNMAKSVNDAGWSMFRHFLEYKAMARKVVYREVSERFSTQTCSGCGAIGGPKGREGLGIREWVCSECGAVHDRDVNAAMNILRMGHHTLALK

SEQ ID NO: 61151 - protein, 356 aa, Planktothrix sp.
LLKQWFGVSRFVYNETLKYLQQPDTKANWMAIKTGILKGLPEWAKPVPYQIKSIAIKDACLAVKAAKKGFKADGKIRQCKFRSRKDVKQSIYIPKSAIKDCGIYHSILGGCKFKELLPDNFSDGRLTLIYGEYYLTISTKVQQLNSENQGRVVALDPGVRTFMTFFSETSFGWLGQDSNLQIQKLCFQLDKLVSQLSKAKCKQKRNLKKAASRLRCKIQNFVKELHHKTARFLVENFDVILLPTFETSQMVSKSRRKLRNKSVRQMLTLSHYEFKQFLKWKAWENHKVVIDCNEAYTSKTVSWTGEIINNLGGAKTIKSNSTQLKMDRDLNGARGIFLRALVDTPWLREYLNLCVC

SEQ ID NO: 61152 - protein, 404 aa, unknown
  TnpB Polypeptide
MAGELSLLTVRIVEYKLVANRQQGQRIEEAIRCVQFVRNKALRLWRDTNAKPYDLNRYCAVLAKEYAFAHALNSQARQAAAERAAYGIARYLKPDKKGKRLKKPKFQKGNRSVEYKTTGWKLSENRKRITFTDGIGIGEVKLMGTQDLCAYDIARIKRVRIVRKADWYFVQFCVDVDRSEPTELTGRMVGLDMGLASFYTDSDGQKVDCPKFLRKAEKRLKREQRRLSRKKKGSSNRRSKNYDKARVRVSRRHLKVQRQRKDFAVKLARCVVASNDVVALEDLRVKNLVKNRHLAKSIHDAAWSQFGNWLCYYGSVFGKPVVKVPPAYTSQDCSACGIRVRKSLSERTHVCACGCALDRDENAARNILRLGLATLGANCTVGHTGTGEGLPSETLAEMAPLLST

SEQ ID NO: 61153 - protein, 539 aa, Streptomyces sp.
VRESRALTEPFVVPGPTGVSIRTRLRVTPADATVLTEVGEFLGSQASRDLMARSRQGAGRDGGGWAGRKRALTAETSARWAGGITRATNDQWALARRGQAEEMAWLRGQIKRIESRLARPLGAKADRQTGVVRGYAGRAEWHAKSRRLRVLRDRLGALEKDWADGRVHVVRGGRKLAGLRHHLDRSGLTRSAWRERWRAARMFLMADGESGKRCGNETIRVTETGQLSIRLPAALSRLANAPRGRYVLDAAVAFTHRAEEWRDRITTHRAVAYRVHLDVSRGRWYLTASWQRAAVLAPPLSAVLARGVVAVDMNDDHLAAWHLDAHGNPVGEPRRFAYDMSGDAGHRDAQLRHALTRLLHFTRRSGAAAIAVENLHFKDGAGREQYGRNKRFRRLVSRFPTARLRARLVSMAAEHDVAVVAVDPAYTSKWGARYWQRPLTTATRMTTRHDAAAVAIGRRALGHPIRRRTAPPPHDRSDRAGHRTAQAGGKPGSREGPRPRSPGPRTGSVRPGNGANVGDQRAQDRSGHAVGHAPWPQGP

SEQ ID NO: 61154 - protein, 419 aa, Dolichospermum sp.
MLLSFKTALIPNNQQVTAFRKASGVARHAYNWANAQIKDILAAQKEGEKLKLPSAIDLHKRLVAEVKYEHDWYYEVNKNVPQKALADLRQAWDRCFKKVSKQPRFKKKGQRDSFYLESGTKAKPLIKNDGKRIKLPSIGWVRLAEPLPVTAIHNCVISRQADRWFIAIKHEVERPVLVAPRPTVGVDIGIKELAVCSHGKIFENPQAYRRKSKRMKRLQRSVSRKVKGSKNRIKAVKKLGKIHAKVSNIRQDSIHKLTYYLAKNHSVIKIEDLHVKAFLKNHKLAGAIADCGMYEFKRQLEYKTEKFGSQLILVDRFFPSSQICSNCGNHRHKMPLKNRVYVCPNCGYTEDRDLNAAKNIDRWFMDIFIPERSDMAVSSTVSACGVDKPLKSHLETTVKQEINTKMIAVQMCLDLGSFG

SEQ ID NO: 61155 - protein, 126 aa, unknown
  TnpB Polypeptide
MAKGFLGKHTLDAGLGQFVNQILPWVCFKRGVYYSKVDAYGTSQECPDCGAMVRKDLSARAHQCGECGSVKPRDIAAAQVINARGQSGVKNVCGWDLSGTGLAQSRQDRVKQKLFGVNQGSPRCTA

SEQ ID NO: 61156 - protein, 427 aa, Haladaptatus sp.
MKAKSNANIRTFEATLTNKQQVSDDLDQLGWAASKLWNVGRYYTQERWDATGEIPDDGELKSELKGHERYTDLHSQSSQRVLEELAEAFTGWFGKRRNGDSRCRPPGFRKQGDSHPRSTVSFKAAGFKHDAQYQRVRLSKGRNLKEHRSDFILCEYQTRPDVDLTKWDIQQVRAVYKRDEWRLQFVCRTIIDPEPPGDETAGIDLGICNFVALSFGGESILFPGNVLKEDEYYFGKEKAKCGDSRSRKRMRIDRKRTDRRSHFLHTLTKHIVSECVERRVGTIVIGDLGGIRDDENGDSRNWGTHGNLDLHGWTFDRFTTLLDYKAEAEGIEVTLVSERNTSKSCSVCGTVDGDQRVERGLYVCDECEMAMNADVNGAENIRQKVTPSLVCDGGDRSTGWLAQPAVHLFDRREGRFAPRKQVVNREP

SEQ ID NO: 61157 - protein, 434 aa, unknown
  TnpB Polypeptide
  misc_feature (355)..(403): Xaa can be any naturally occurring amino acid
LGESNAAYRETGKRKSLKDISSAFTVMRASSWLGELPREPFNQVLRDLERGFSNAFAGRADFPKFKRRGAVSAVRFTLDQRRAQVDRETGVVQIDGIGKIRFRVTEPMIGRLRSVTISIDSAGRWHASFTADQIPAPAAAEAAMPVIGIDMGLKDAVCFSTGEKVEAPKYLKAKLAKLRRYQRSYARQRDHQLRLTGLDPKAKIPKGTRIPVSNRGRRTQQAIGRLHAQIGDQRREFQHQLSRRIVDTAQVIAIEDLNLAAMTKGMGRRAFRRSVADVGLGELRRQIEYKAAWAGRTVIRVGRFFPSSKTCGDCGTINAALTLAERQWTCAACGATHDRDLNAAKNIEREGLRLXXXXXXXXXXXXXXXXXXXXXXXXXXXXXXXXXXXXXXXXXXXXXXXXXDETPGSQNREPVYRPQSGLTPTRRDGAGKAG

SEQ ID NO: 61158 - protein, 337 aa, Gammaproteobacteria sp.
LTYRYRLLPLKSQHRALERLCAAQRELYNAALEERIDCYRKTGKSRTYIDQCKALTECRRELPEMGALPANLQRWTLKRMDDAFQGFFRRVKTRSVKAGFPRFRGNGRWEAFGFAEFSGIQFDGRRLRFAGMPGGLKLHLHRSLPDCPNIRSCVFRRDGRGWRVCLQIAVAKAQKRSVATAVGVDLGLTVFAFCSDNVVIPNPRIAQRAEKELRRRQRALSRCKRGSSRRHKVRAQKVSNLVRHPTPARSISDASWSRFVSMLDYKAEKAGGHLIRVDPRNTSQKCSGCGELVPKLLAVRTHACPSCGLVIDRDHNASLNILRAGIGAGALNMIGWR

SEQ ID NO: 61159 - protein, 510 aa, unknown
  TnpB Polypeptide
MWFVKVFMGGRCMESVKRAVAVELERPPSELYAVEIAYRRIVEEVAAYVAERGTLEKEKYNELYRRFRKQYPLPAQLIQQAINQGVEIGKSFLALKKDGRIHRPHPEVRRVSIRFAKDSWSYKKTISSTAPVRLTLSLPGGRREVWIKPHRRFWLYWWKVLRREAGLASTLVLKRRRGRWYAVFVFDVAPKREPPAEAIALDVNENSVAVARVTLLSTVDAVAQWNRQYVDPAVYSIRTDFGRLAKRYEAVRNAKLEELKRKYPFAGRDEEERRQNVTDTREFRKFARRLRERRRKEGRVRQVAREMTKSPAVIITEELGKNPQEEMIGVEKKKVGKRELRHRVKQTPFKKLVSAVEDKAAEGGSVVFYVSSLRNSRVCPIHFALLKNGGGWHVLHCPHGHAVDRDATAVLNMLWRATPTGWVKTVWWDLKDVKRRLEKGRGLAPRDFAKRRNPLVPWPVAYAVWASLRALKAGGKWPAVLARAAPMTPAQGADEGGTRAPPRRAGTPAL

SEQ ID NO: 61160 - protein, 624 aa, unknown
  TnpB Polypeptide
VRTVVVKSAPLPRKLFRAFVELEGMYRNMVEQLVLHAVRSGVASFVRLKASKYRELRSLYPHLPSHYAYTACQDASARAKSFLRLKKRGLTSREYPEIRSVSIWLDDHLWKPSSLTSVEVATHRGWVRVELEPHKQYWKYVNGGWRLASEAKVKLNKKSRRLVIYLTFKKSVEAHEPRGFVAVDVNENHVAVLVEDKVYLFETGFRDVVLGHYYRRKRVQEKYDKLFGVNCRAKRKTFRKLKEGRRKNDLRWKLANIVARAAKEKQCAIVLEKLGKNPARGMINHARVDQLRHRIYQASFRGVQRAIEEKAREHGVPVVYVDPRNTSKLCPVHGAIIVYGDGGRIGRCSMGGELWHRDAVACWNILSRALRGGGSYAPSSAGLAVDGSPVPLGSTAAHEPSALPKGLWARWKSLPRELKRNEAVGMNGRPSIETGDRREGIRSWGAAGRLAALAHVGRDQPHAQLFRRFLGGGVHVEAEHEHVHVAVLEELRDLARRAVEPPHVVAVDPRLRLTEDVHSPALPQPFTVQVDFHLLSLYGKEPPHQILDLNTFVPVQPTGYDDARYVFQAKADGLGQPPHLSREVLHGVCELQHAHRQFLHALLEARVRSSKLLHPFRQALVSNS

SEQ ID NO: 61161 - protein, 188 aa, unknown
  TnpB Polypeptide
VVGVDLGIKDLAITSDGVKYPNNRYTYQAEKRLARLQRELSRKTKGSKRWEKQRVKVARLHEHISNQRRDNMQKLTTELIRNYDVICIEDLNADGMRRNHHLAKAVSDASFYEFRRELDYKAAWYGKTISVVDRFFPSSQLCSHCGYQNKDTKDLNVRSWVCPECGTVHDRDINAATNILNEGLRLLA

SEQ ID NO: 61162 - protein, 385 aa, unknown
  TnpB Polypeptide
VITYNAKITSIDLNDGNLLLSLLEQQRHLVNKVSELQFSDLKTLSNIKSLHNEFYHKTRTEYPDVPSQVVIKCEQECLTTYKTIRSNKHKISKPFVKHNLSLRLDKRIYSRTEDKYIINIITTKKRKLFKIESYPKLNELMNKYDYSDPLVFVRNGQLFISLTFDVTPKIKLKQNLCLGVDLGIRRVATCSDGRLIIDRKFNKDKRKLRYLKRCLQSKGTKSARKHLSKLRRKERNKNKNQTHLVVNEILKTNANIISLENLKGIKAKKHKNQNKNGVSQVPFFELRRILTYKAENMGKHVCLVSPAYTSQIDSVTGIKEGTRKGIRFYAKSGIVYDADVNAAINIARRSKHPISQGSLLDGQGVVNHPIACQSPKGALQAHSSH

SEQ ID NO: 61163 - protein, 372 aa, unknown
  TnpB Polypeptide
MRKTFKYRLLGNRQTFANAEKWLILCQRLYNAGLEQRISIYHQSKKAISCYDQIHQLPELREAFPEYQEVGSQVLQDVIERLDKAYKAFFRRVKSGSGKAGFPRFRSRDRYDSFTLKQTGWKLDGRYLSIRNVGRFKLRLSRPIEGNIKTVSIRREVGKWYVCFSCDKVPERKLEPRTESVGIDVGIKSFCVDSDEGHEDSPSYFRNAEKQLRVRQRRLSKRVKGSQGRKDARLLVAKAHEKVVNQRNHFLHRVANHYITNYGVIYIEDLNIKGMSKNHHLAKSISDASWGKFFEMLNYKAEEAGRTVIKVPRFEPTSKTCSACGAINQELTLSDRQWVCKSCGVLHDRDFNAAKNIRRVGQTLQELTYASG

SEQ ID NO: 61164 - protein, 361 aa, Chlamydiae sp.
MKRTIALKLNIIEEEYQFLCEMQTTFAMACQFVSQNSEEKNRIRLHHDVYRSARKTIPQIGSQMVCNAIAKVSACRKALRKAKTLEFKQATSVHYDKRTYSLKNGILSLFTLQGRKQFSFQIGPFQEKYLEQGIIKEAELIRRGKRFFFNLVLDLPDPPTKPTGKIVAVDFGENTIAATSEGKLYGGGLLKSRRDQFLGCRKRLQSKGSQSSIQRLRQISGREKRHVKYVNHCIAKDIVEEAHNKGASMIVLEDLKNIRIRIKAGKKLRSRLHRWPFSQLRLFVEYKAQAKGIQVICVHPAYTSQTCSTCLQLGERDKHRFSCQNCGSLSHSDLNASQNLLRLGLTAVGSTGAVNSRHVAI

SEQ ID NO: 61165 - protein, 462 aa, unknown
  TnpB Polypeptide
MYQTVQMLISEKNYPEVFCFAQKNSVLAKNLYNAALFRIRQVFTGWDKQKRSKNEEQVFEEIKATLKVYPTLSFKRVLTYHSLEKLMRVTVNPDFFAGLPMQTAQAVVREAVNKFKEWLDSLKQYKKDPSGYTGKPKMPKYIKADKRTFVVTNQDAVLYQLEKEGYCALKLPGFDKNSRIQLAYVSSDSRLRQISFTPYYGRYLMSFDIEYLVPAFYPDLPNAAGIDFGTDNIAAIACTDGSSVVYKGGAILSENRLFAKRKAEAVSLITQGHAHKHAESVFLSNLSARHACFNKDQMHRISMDIIHYCIDHRVGTLVLGVNKFWKQRSNMGKINNQKFVSIPHNQLRWMISYKAMTAGITVIEQEESYTSKADITAKDFIPVYGKETGRPVFSGRRIERGYYLCSLGYCINADCNGAANILRKAFPDIWDKVSDFRFLAMPETIRFHHLYKRTRKCCRLSA

SEQ ID NO: 61166 - protein, 265 aa, Leptospirillum sp.
MKITLKVKLMTTNEQARILLETMESFNKACDWISEKAFEAKVFNAYDLHYLLYKEGRDVFPSLPSQSMIRAIAKVSDSYKLDRKKRHFFRDRSAMEYDKRTLSFKDLSQASLATVRGRIKVPLVFGHYAPLDKNKMLGQADLTYSKGTFFLNLVIDRPDDPPFKPEGSLGVDMGIVNLSTDSEGESFSGKTVDHVRERSTAHKARLQKKGTKSAKSRLKKVSGREARFKKDTNHVISKRLVSKAKGTCRAIVLEDLKGIRDGDHG

SEQ ID NO: 61167 - protein, 387 aa, unknown
  TnpB Polypeptide
MSIRIIALTLAPTDAQRAAFLRLRRAFADACNHISRVAWDTGTFNRVRLQTLVYQDVRATYGLMAQHTCQAVSIVAQTYRADKDTKRAFKPTMAVTLDTPRLYRITGNHGAITTLDGRSAVKLNIGGIQRAWLKGATALKEADLVCDRKGRWRLMVSAVYADPPPMDTNGVIGVDLGRTDIAMTSDGDTFSGQQVTTVRDRYSRTRRMIQRHVSKGTRSSRRRGRQTLARLSGREHRFQAQVNHTISRRIVTWAVESERAIALEDLTGMRERTTRQARTKTERRRSNSWAFHQLRLFLAYKCVGEGVPLVRVNPAYTSQICHCCLHIGERSGKRFTCLNAACRWGGDADLNGARNIALLGCSLNAPHGPWLCCSYQPGRRALEIPPL

SEQ ID NO: 61168 - protein, 345 aa, unknown
  TnpB Polypeptide
LSVSELPPAAKPAAPSSQNQSPTAGRTGPDAAGCRAAAARRLGLVSRTGIRLSPFQKARTVPVVGLSAVQPQPGDGRANRAAQAGTGAHQLRIIRKAKGWYASLSLAVPWDLPNPSPHGRWLGIDAGLECLVATSDGAVAPPRFDKHLQGRLQVLQRRLAKKQLGSRNRKKAKHKVAQLHEHIAERRRDWHYKLAHWLCDRADSIAVENLDYRTTARGMLGKDMLDASHGEFRSVLAWVCRKRGKHFRRVDARGTSQTCPNCRATVAKSLAQRWHHCSECGHQAHRDVAAGQEIANRALEAVEGVSTQGRWGKEMACQVGLPGAKSLGQGRGAGMLSREAGKPAP

SEQ ID NO: 61169 - protein, 387 aa, unknown
  TnpB Polypeptide
MTKNNAKKITRKEIVSNIKEQILLSKDSKNDVVFEYQSLFEQIEDFVIDMKSQGLIYKDIREFIELFVETPKVTTVSHNIQYPTLTIPDLDVTEKTVVQEGKAGKYNVVITELYKEEISRTKVIEESTITEIVKVPMLSESIETKGNSTSDTGIGTGGISYVGESYDFTKTKNNKDLSVGIDINSSYKDNNIITAVFSDQRRPVTFVCEKYKNYLASLKGSLGFEPTDKNFNNTTTGAASNFYRKTLNFTISVVQKLKEFGVTRVYLGKSGCMTLNTGNHFMVSIYAQLITACSIHSLEVVVVDEHRTSLADSIANDDFDKGHFSGERSKSNVHNYKSGIGVVVDADVNAAYNILRKGTQGSFKVSPELIGVSFNKKTVQLPEVNYM

SEQ ID NO: 61170 - protein, 383 aa, Proteobacteria sp.
VIQRQGYHYRLKTTPALRRSFAQYAGACRFVWNKVLAVNEGRYLAGVPRLSYYEAAWLLTRWRLSEEYGWLADVSIHALQHGLRDLERAYQHLFSGRTMPPRFRKKFLSDSFRFPRDFQLDGHRLKLPKIGWMRFGKSREIEGAIKNVTIRRDGKHWAVAFQTERAVDTPVHPSTSAIGIDLGIATFAALSDGTLYPPLNASRRLQAKLAKAQQRAARKVKFSKNWQKCQTVIRRIQATIAHCRKDFLHKLSTTISKNHAVIVVEDLQIGNMSRSAKGTVEAPGSQVAQKSGMNKAILDQGWGMFRRMLEYKQCWRGGVVLAVNPRYTSQTCPSCGCVSKLNRPQQALFSCIDCGYTSHADVNAAQNILALGYRERLNACPPR

SEQ ID NO: 61171 - protein, 391 aa, unknown
  TnpB Polypeptide
MKKAYQFRIYPNKNQEVKLNRTLATCRHLYNDALDERKRQAGLNNLCRNFDVFPWGKPEWISYEDQANNLVSNKDSFQKEVYSQVLQNTLKRIDRSFKNFFNGFGYPRFQGRNRYNSFTYPQSGFELENGKINLSKIGNIKIVLHRDIEGKIKTCTIKKDVDQWYAIFSTEIDREIRKIPAVSKTGIDVGLTSLLTLSNGKTIEPPKFLRASEKRLTREQIRLPNKKKRSNKRKKQVTTVARVHRKIRNQRKDFAHKTSRVLVNTYDHIVFEDLQIQNMMQNHHLAKSISDAGWYQLISLTESKAEYAGKIVELVNPKGTSQICICGYPVPKTLSMRIHNCPKCGLVLGRDHVSAMVIESRSTVGTTGIQARLSSLSIGMMTREAHKLQRE

SEQ ID NO: 61172 - protein, 295 aa, unknown
  TnpB Polypeptide
VAWKYEGLQKNNTDYEYTIKFNEREHQLNIHLCKDGERYIPQPNGNTIGIDVNCKHNLFSLSNETTYDYNRKLVNDFCNLSLEIDKLKKQNKEYEIGKRKQQKLDTLKSKMAMSEQQLIADMCKILQSQGVGHIVMEDLNNGFGKCYVKDKDNSDINYNRKVKFLGLSNLKQEVEHIARKYDIAVSTVHASYTSKMCPVCGCIEDENRPNQETFECIECGHKDNADFNAAKNIRNRVCVTVLRESLLKQLDNGAFEPKKLKHEKVKEVLLSFRRNLQKNARSKCTESRLTTFDYI

SEQ ID NO: 61173 - protein, 370 aa, Micromonospora sp.
MGEAVKRAYKYRFYPAPEQAEQLNRTFGCVRKVYNLTLEARTRAWAVDRRRSTYVQSSSWLTEWKRTEELAYLTEVSSVPLQQALRHLQAGFAAFWDKRSRYPRFKSKRKSRASAEYTRSAFRWRDGQLTLAKMDPPLTIVWSRPLPDGVEPSTVTVSRDPAGRWFVSLLVEDSTVTPLPPVDTAVGVDAGITSLLTLSTGEKITNPRHERADRRKLAKAQRNLSRKAKDSANRAKARLAVARIHARIADRRRDHLHKLSTRLVRENQTVVIEDLSVRNMLRNHSLARAISDAAWTHLRNMIEYKAAWYGRTVIAVDQWHPSTKTCSACGRINTAMTLGVRIWTCPGCDAVHDRDVNAARNILAAGLAER

SEQ ID NO: 61174 - protein, 378 aa, Micromonospora sp.
VGSRSGRFKYRFYPTPEQADQLNRTFGCVRLVYNRALDARTRTYTTERRSMTYVETSTALTEWKCTDELAFLNEVSSVPLQQALRHLQVAFAAFWDKRSRYPRFKSKRKSRASAEYTRSAFRWRGGQLTLAKMNAPLAIVWSRPLPDGVVALSTGEKITNPRHERADRRKLAKSQRKLARKDKVSANRGKARVKVARIHARIADRRRDHLHKLTTRLVRENQTVVIEDLSVRNMLRNHNLARAISDAAWSELRGMLEYKAQWYGRAAVAVDRWFPSSKTCSTCRRINPTMPLRVRSWTCPACGADHDRDVKESVRSWSRMSAGLSATLRRCPMIMVQARVSPARPRIIWPATVSTEAMIGSSGSANSRMCSEPRVPRW

SEQ ID NO: 61175 - protein, 481 aa, unknown
  TnpB Polypeptide
MYRAYEMKLLANKKKLKIIDSILNEYRKTASAIFKLYWSNFVSTGKIPQFIELSSIKSNLSERYKQTCASQVRGILMSYISNRQNDFKEIIYKSSLCDEDQKIKLLFINKHGKFFDETILMRKKEIEPETIKLARKIFHHLIKVNRLPRMNGISMALDEKVAMVAESNNKSLAGYWVKLSTLEPRKPIMLPVSKNKYYEAIKGSRANFIQLNKNRDGYISVSFIKDIAPKQVAFKTERVSIDLGLTNLLTFNDGSMYGRTYLSSRLKDYDKKISTLCARLQRNGVRPRSSRRYRKLVDSLRAFLKNEIGRVMNKSLKRFMPKHIVVERLNFQSQRLSKRLNRLIGNFGKSIVKAKLDDFSEKYGTTIEEVNPAYTSQTCSSCDYVAKKNRRSQSVFICACCGLKLHADINAARCIDARSSSPIANIYKSKAFILDKLITRFIERQASHYSLAKITQCNPYFRPYSDQIALVTRLSNINGIV

SEQ ID NO: 61176 - protein, 395 aa, unknown
  TnpB Polypeptide
MLRGMKIALDLTDEQELQMWKSVGVSRWSYNYAITRDREHYLNYLEDNTLPRTLTASEILKELVVLKRTTHPWLKDVGSSVIKHAIRDWDIARTRLFKGLGKSPKYKSKTTSKPSFYVNYESLRRVEGGFRGERLGFIKTTQPLPRIPKGSHYKNPRISFDGKYWYLSFSYEVPEISVELTDLVIGVDLGVKTLATLSTGEFIENINKSRRVKQLEKQLRREQRHLARQLQANTKGYLTTGNGSRKPIYKRPLEFCSNIQETKRKIKLIYRKLHSIRMNHIHQTTSYLVKQLPKGIVIEDLNVKGMMKNRYLARNIQNAMFYEFRRQLEYKCLQYGIYLVVADRFYPSSKTCSYCGNIKSKLNLKERVYKCSSCGLKKDRDLNAAENLAYYFYRG

SEQ ID NO: 61177 - protein, 353 aa, unknown
  TnpB Polypeptide
LLATLDECRWLYNHLLEQRKTAYAERGDTLTLYEQQDTFGALKAAHPSLAGVHSQVLQNVAVRLDLAFKAFFRRVKAGENPGYPRFRGYDRYDSFCYPQSGFKLNGDRVFLSKIGHVKAIIHRPLVGTVKTCGVRRTSTGKWFVTFSCELESAPLPATDAAVGIDMGLDKFATLSTGEAIPNPRFFRRDERALARAQRRLSKEPKPEKVERATPERGKRRRVVARIHERIANRRTDFSHQQSRRVVNAYGVITVEDLSINNMVHNHCLAKSIQDAAWRQFIAALTYKAAYAGRRVIAVNPANTSQDCSRCGHRACKDLSERVHRYSCCGVVLDRDYNAALNILAVGLHSLAQA

SEQ ID NO: 61178 - protein, 94 aa, Lachnospiraceae sp.
MMRNHKLAQHIGSASWSKFFDMLAYKAVWYGNDVVKVPTMYPSSQTCSCCGYKNPLVKNLTVRIWECPDCHTVHKRDTNASRNILNKGLQMQSA

SEQ ID NO: 61179 - protein, 435 aa, Moorea sp.
MYGCQQHLINTTFDNQAVIEFICSEANKLTNCGLYYCRQMLFKNGKYLNNAELDKIMKTNVHFKAMRSACAQQTLHGVIESFKSYKALNKKYKKGQLTDKPRVPKYRKKGGLAVVSYPARWVKLIKGQLKFTLGKQIKVWFGIDHFFLPMPSNIDFKSIKEYRFVPRNGCFYLEFVYERPNPEPVLPTNKMLGIDPGLSNWLTCVSNIGKSFIIDGKKVKSQNQWYNKRVAAIKKGKSKDYWDDQLASLTEKRNRQMRDNVNKAARFVVNWCIKNRISTVVFGWNKRNKDGINIGKKNNQQFVQIPTAKLKNRIEQLCLEHGVKFIETEESYTSKASFLDRDFLPTLGEKPEGWEPSGKRVKRGLYRSSKGDLINADCNGAGNILRKVETQLGFPLAEVCRAALNLPQRYGMDSLSRCYREASWSAVLTRETTSA

SEQ ID NO: 61180 - protein, 213 aa, unknown
  TnpB Polypeptide
MEETYQIHENFLYLENKIFRGMDQIKQLRIYPPEKGNCKIIVVYEIPDQEELPQNGHELSIDLGLHNLMTCYDSKNGKTFILGRKYLGLERYFHKEIARVQAQWYGQQSGKGVKHPTTSKHIRKLYKRKHDSVTDYLHKVTRYLAEYCREQGITCVIAGDIRNIRREKDLGHRTNQKFHSLPYNRIYIMLEYKLKRYGIRFIKQPANKKSRLN

SEQ ID NO: 61181 - protein, 320 aa, unknown
  TnpB Polypeptide
VEATTRVPQFHVQPVWLQARQEGRSDCLVLSKLADIPIRLHREIPDVHESDSSRAAHQKSPISEDDAALKQVTLKKEPTGEWFATFGVEIDREPPQKPDQPKNVVGIDVGILKYAQDTDGHAIESVDLSDERDRLEREQRKLSRKEHGSNNYEKQRRRVAECHADLTRKRRDFLHKLSNYYAREYDLVAVEDLDAKGLIQLDGNSRNRAGAAWGMFLRMLEYKCERESTHFVAVDPAGTTKECAACGVSSEKPLWVREHSCPSCGFTADRDWNAVVRRSLTGSKRVAFATAWNILSRGIKQVGAGRSESTSSESKDSDGL

SEQ ID NO: 61182 - protein, 364 aa, Cohnella sp.
MLYHRAYKYRIYPNREQERLIHRTFGCSRFVFNHFLTQWNEKYAATGKGLTYNSCATVLPILKKQFEWLREVDSIALQSAVRHVSDAFERFRSKQNHAPRYKSRKHPVQSYTTRCTNGNIEVNGNRLKLPKLGVIRFSNSRPVEGRILSATVRRNPAGKYFVSIVCEVEMKPLSEVSGDIGIDLGLKTYAVCTDGRSIENPGVYRKHERRLAWWQRRMTRRKRGGTNWHKAKRKVARIHEKIACRRGDFLHKVTTMLIRENQTISIETLRVTNMLKNPKLAKSISDAAWSEFTRLLTYKSEWYGRTLKFAPAFASTSQVCHVCGENHPVVKDLAVRQWACPSCHTIHDRDENAAYNIKQAAISK

SEQ ID NO: 61183 - protein, 417 aa, Halorubrum sp.
MANLVTRTYVASIRNHQQVRDDLNSLGFAASKFWNVARWTCDCIWSETGTIPDHGTLKAYLKSHERYADLNAQSSQAILEELAEAFDLWYAHRQKGNGDANPPGYRKQGDEHPRSTVTFKEDGFKHDPDHNRIRLSKGANLKKSWSDFVLCEYATGPDVDVQHVQQVRAVWTGKEWELHIVCRVDTGDPDPPGDRVAGIDLGICNFAAVAVGDKALLYPGGALKEDDYYFQKERATCDDSDSHKAQRLDRKRRGRRDHFLHAVSKDVVAECAARNVGTIAVGDLSGIREDADWGDHGNLDLHGWAFDRFLEMLEYKAAERGISVERVDERGTSKSCASCGTTDDSQRVERGLYVCDECGVVANADVNGAENIRQKVLPNLVCDGGDRDNGWMAQPAVRLFDKSTGQVAPQEWASREP

SEQ ID NO: 61184 - protein, 311 aa, unknown
  TnpB Polypeptide
MLTELKKQEDYAFLKEVDSIALQQSLRDLDRGFKNFFAKRAAHPRFKSKHDHHQSYRTMNQGNNIRITGRYIKLPKLGYIKIRQSMEIGHINHVTIERTPTGKYFVILNVDFDPELRPNAGGKIGIDVGIKAFYSDSNGNTVSNPKYLEKSARKLIREQRKLSRKQKGSSNRNKQRIKVALAHEKITNQRNDFLQKQSTMLVRENQTICIEDLHIKGMLRNHRLARSLSSVSWASFFSMLEYKASWYGNEIIKVPTMYPSSQTCSCCGYKNPLVKNLAVRRWKCPACHAVHDRDINAGLNIMNKGLQMQSA

SEQ ID NO: 61185 - protein, 420 aa, Lysinibacillus sp.
MNKTFKTQVNRIKGLTKQEYQVLRELCGISKNLYNVGLYNVRQHYFNENSFLTYEANYHVAKHNENYKMLQAGVSQQILKVVDRSFKSFFNLRKKAKHGEYRFQDVKIPKYLAKDGLFPLILSTNAIRVKGGYFYIPLSNAYKKKNELKEVKVKFPPQLVGKTLKEVRIIPKAKGKRFDIQYVYEQPFETVPLDKEKAMSIDIGLNNLATCVTSDGLSYLYDGKPLKSINHYYNKQKAKYQSIAMKQGMKYTNRLANMDIKRNNRVKDYMRKVARSIVELCKEQQIGILVIGYNKDFKRGMNLGKKNNQQFTQIPFGSLREYLYNLCEHYGIDYVEQEESYTSKASFFDNDKIPVWTAEKEVVQFSGKRVRRGLYRTATGILVNADINGALNILRKSNLIDTRILQGIGCLAHPQRVRIE

SEQ ID NO: 61186 - protein, 246 aa, Sulfolobus sp.
LKEYSSWRMREARLVVKDGKAFLKVVFERPLGKVEAKSSVAIDINMSEIVVGRDETHYVRIPTRLHEVHHWKSLAENLQKKYPKRWRENKMILNRVRSFHQKARRVMEDFARKVGKWVVEIAEDFGANVIKLENLKNLVKNVDKLPKEFRDKLYLMQYRRLQYWIEWQARKHGMVVKYVNASYSSVSCPKCGKRMEEKGYRWFKCACGYENDRDVIAIVNLNRRGSLTLSTAHQMRDVNPNRWWER

SEQ ID NO: 61187 - protein, 317 aa, unknown
  TnpB Polypeptide
MKLRYRYRIYPTNQQKWQLAKLFGCCRVVWNDALAFCQEQYIKGEKKPSYSDLCRILTQTKKTEEKEWLGEVSSVPLQQSLKHLDQAYSNFFNSCKGKRKGKKVKSPRFKKRRSKQSARFTENGFQLRENRKIYLAKIGEIEVIWSRELPFDAQGKPAKPSSATILKDSADRYFVSFVVEFNPQQLPKNDNSVGIDLGITDFATLSNGKKIKSPKPLKKRLKGLRKLSRNLSRKQKGSKRREVARKRLAKLHAKVKDTRTDFLHKLSTKIIRENQTIVLEDLNVSGMMKNRKLSRAISDLGWRSFRTMLDAKSVIWA

SEQ ID NO: 61188 - protein, 416 aa, unknown
  TnpB Polypeptide
MSVGQKDEAKAAAVTMKAYRFAGSPTPEQAHLLSQFAGSCRFMWNRMLADINASYEAGAKYSCPTPAKYKDVPGLEWLKNMDSLGLANVQLHLDAAFKRFFKSCAGGPFAGHPSFKKKHESTDSYTTNLANKKHPNIFLDGCLLKLPKIKEPIRLRLHRQVEPGGLLKSVTVTHEATGKWYFSLLFEYPKQESTAVPAKNKEQLRHIGLDMSLPKLYVDSNGNVADFYKPYRKVEAKIAREQRKLSHMVKGSNNYNKQKQRIAKLHAKAKRQRNDMLHKLSFRLTEQYDVISIEDLDMAAIKQSLHFGKSASDNGWGNFTRMLAYKAVWKGKHIVKVDKWFPSSKTCCKCGHIHKELTLSDRLYCCPNCGNLMDRDHQAAINIDKEGFRLFCEELPSGCGDSPRAELSAHPQPSAA

SEQ ID NO: 61189 - protein, 472 aa, Micromonospora sp.
VKVTRIAYSTGMNAGKYAALVEQARRLGRVRSEVWQRYGSINGAGVGLRDRQVRDRWLADGTHVRFGVLANAWKETVRDAMADIAANLEAAKVEVRRAVLRRTSDPVERERMFDALKADRWAGNRFLARQMRKHWKRGKNRTHDQIVVRADKYKTTVDGRGRLWLAVPGLKPRKMVKIPLSTTVAPTGTLRLILRGGRVEVHYQIDASQVRSSQRPCGQRMVGVDKGYTEALTDSDGQPHGVQLGVLLTSESDRLKERNRRRAKLRSIANTAALRGDQAKAHRIKVNNLGTVKRDRQAARHRARVRTEIFTAVHRVVDKAATVVAEDLTKRFAGRKKLGKNINRRLAAWTKGVTAEALRSVSERRGSALVPVNSAYTSQTCHRCGRLGRRSGDRFHCTWCGVVWQADVNAAINILHRAGDPDIALHTPHHKVRQILQDRTDRHRTRLSVQDSSPATTGRRAKHPNRSAMSKK

SEQ ID NO: 61190 - protein, 406 aa, unknown
  TnpB Polypeptide
MLKVITGTIHVGDFKPLLQLMHDQRSCTRFAYQRIYKDKLVKANDVVKACKPLYMKKLNQRYIQDAVLKAKAIKQEHAIFGGRKLWNRLLKKDITKTEWNTIRDNELYSRGDTTQHGNPNIRAIKTSIGYKLRVGLPEARQFQMYTLYIPQKFQEEFDLYSECYDVRIKHKDNKFYVYIGLTIPDTKSVFSFSKGAIGIDTNPDGLAVVNISYDGNLLEQQYMQSNRISYARTDKRKNDVEALALKVVNYAILQGKGIVLEELKFNQNKPLKSRKFNRMRHNFIYAQIITAIERRACKDGVKIKKVNPAFTSKVGILKYQEQYSLNRHTAAALVIARRGLGIMETVRVKVEPGENKKLNLEGRGFKIALTAKAYSYLKHLYRVVEIKTPSFTETCLTPMSGNYGTG

SEQ ID NO: 61191 - protein, 310 aa, unknown
  TnpB Polypeptide
MRLVERHIIKDNRFEDICLKSGLLYNYVLYTKCNCRIKDDGYIHFVKNVIEPIKTNVKKDELKQVRIVPQATCYVVEVIYERKEIDLNLDKDNFLSIDLGLNNLCSCISNVGVKPFIINGRVMKSLNRWYNKKKARLMSYVSDKGTSRRIRRISLYRNCWIDDKMHKISKYIVNFCASNNIGRIIVGLNKEWKKNINIGKRNNQHFVSIPHSKLINKITYKAKLLGIEVVTHEESYTSKIDHLAFEPLKKQDDYLGRRKKRGLFQSSIGKLLNADINGAIGIARKVVGDSCINTIVDSGFAFNPVRVNIL

SEQ ID NO: 61192 - protein, 247 aa, Xylella sp.
VHDRFTLTNDQFDLDASRIRIPRLGWVRMRETLRFAGRIMSATVSRVAARWFVSITVDVPDPSHLPQAENQGAVGVDLGVLALATLSTGETICGPRPHRVLLGRVRRLSRSVSRKVKGSTNRHKAKATLAHLHARIAAIRLDALHKLTSDLTRRFHTIGIENLTVKGMKGMVKNRHLARSIADMGFFEFRRQLEYKAVMCVVGRLWWLIVSLPVARCARRAGTRSRNCRSRCASGRVWGAAHVMIAT

SEQ ID NO: 61193 - protein, 381 aa, Bacillus sp.
MLVNKAYKFRIYPNKNQEILISKTLGCSRFIFNHFLAKREEVYTSEKKHLGYNECAKRLTQLKNELIWLKEVDATSLQQSLKFLDDAYKCFFKRKNNLPRFKSKRNPVQSYKTVGKIKLKENQMFIPKLGWVRFSNSREIDGRILSATIRRNKSGKYFASILVELEIQPIEKTGSSVGIDVGLKDFAILSTGKIFSNPKWFRTLEKKLVDAQRILSRRQQLALKRKCKLDEAKNYQKQKRKVAVIHEKIINARTDYLQKISTEIIKNHDIIGIEDLQVSNMLKNHKLSKAISEVSWSKFRTMLEYKAKWYGKQVIVVSKTFASSQLCSCCGYKNKDVKNLNLREWECPSCGTHHDRDINAGQNLKNEAIRLLTVGTTGVAY

SEQ ID NO: 61194 - protein, 472 aa, unknown
  TnpB Polypeptide
MKIYKRRGVTIILDNKCDEFKKIIEEKEKYRACCQEVFNKIRQLMISGQLEKRLYGSFCDICIVQDSEVYIENINDIVTKDEMVRGNFAGILNTVTTAKLVKGMFKETFEKYGFVDKGISNYKRSIVKHALDRIDGFLTRNKKSKKVKKNGGLPHVNFHGKVIHIAEGLNYNDEEKTLSIPYSGGKLTIPVHRYIGKGMVKKNFGGNFIFKYDKNKNIYAIVVKAAIEIFSEPIYDPVGFIGFDINETPTDWIVYDDGSKTARPPEMSAKIRENRILNYEISNTNKKAEIKLQDGTVRVLRTKERRKRRLKQQDVLKDIQKMTRPFAEDVVNKAIKSNMGIAIDKINPGANSNGEFGQYISEYIISLCEDKNVPFYVCPSAYTSRRCVCGNEDKKNRNGDNFKCVECGYEQNSHVHAAQNMVRIAEDLYEKETMYFGSKSKSVNHLIKTSDDLWKRYNGERLKRPEEELEDQ

SEQ ID NO: 61195 - protein, 435 aa, Ktedonobacter sp.
MKQVVTAKLKLHTTPEQFQALRQTQLAYRDALNAVSRYAYAHGKMSNQQALQRGMYGELRATYHLPAQMACNVPRQVGATYKTLWTKVKQNAAQRQAGQTKKRYKGLDQAPKYVSPTLTYNYHRDYSLKQAQQVSILTLQGRLIVPYTGYHKHVALLQQEAQIGAAKLWYDKPHKQFYLLISLEVAGADPTPHTHTSVAGVDVGVRYLAVTSTTQGACSFHTGKGVVPKANHYARLRKRLQQKGTRSATRRLLALSGRERRLKQDANHVVAKRIVEQHPHSLIGLEHLTDIRERTKRKTGKQGSLKQRKANTAYSKWAFAELQGMIAYKALLAGSMAIKVDAHYTSKACPICGYTAEANRPNKGLLFVCQNCHYTLHADLVGARNITMRTLLVRQDWARTGVLSVRPDVSDAEAKAARLTRYAELRWSPDTSPCL

SEQ ID NO: 61196 - protein, 561 aa, unknown
  TnpB Polypeptide
VFEHCADSVSTRLRETSAPYVAARPAGARVRTRLRASAQDAIVLQAAGRHLGALAGRDLAARCAEGRLDTAGRAVSRRERKRALTAQSSSRWAGAITRASEDQWQLADRNLRAQRSGLRARIRRVETRLAVPAGHKHGRVRGYATPAERHGKQRRLQHLRARLGEVERRIAAGQVSVCRGGRRLAKARHSLDAAGRTADQWRAEWDAARLFLTADGEAAKAHGNETIRWHPDEGWLEMKLPAPLAHLANWPHGRYRLSCPVEFPYRGDEVAAQAAISAVRYDISLDPVTGRWYLDASWRAAPALQPALEDLREHPVLAVDLNHGHLAAWTVTADGNPAGPPVTVPLTPAGLPAPTRDGRLRTAISTIIQTAHQRGCAAIAVEDLDFTDAREQGRERHGTRPSRGKRGRAYRRMLAGIPTGKFRDRLAQMAANAGLAVIAVDPAYTSRWGAEHWLAPLREQNSVTATGHHAAAVVIGRRAHGHRARRRAGVTGPDQRISAWRAAPRALHAARADRNGRPRQAQRQPPPRWRKTATADREHPPDQAAQDRPGPPAEALHTMTQ

SEQ ID NO: 61197 - protein, 342 aa, unknown
  TnpB Polypeptide
MEAFNRGCDYVAEFAFKKRLANKIAIQPFVYGTLRSEYGLSSQMAIRAIAKAIEAYKRDKNIQPTFDPHGAMVFDHHIMSFRDLSHVSLLTLGGRELLPLRYGTYQEARLDRVKGQADLILRDGVFYLYLTVDMPTPPPMEPVDVLGVDLGIVQLAVDSDGEAHTGAGVKQCRRRFQRLRKGLQSCGSKSAKRHLKRIRQKEGRYQRYVNHCISKHLVQKALVGQRAIAIEELSFINQRVSVRKNQRYERLSWAFAQLRSFIAYKCEAAGVPLLVIDPRNTSRACPACGHCAKENRRSQSEFLCVECGFQANADYNASCNIRRKGLEARATLSGPLSAPVFG

SEQ ID NO: 61198 - protein, 406 aa, Erysipelotrichaceae sp.
MSRLSQNTSMTSGKRRRHMPKIKKGFVIRLYPNQAQMQQIRRTAGCSRWLYNQILAMNDSRKELDQGASFLFDRKLNYLLPCLKEEHPWLKEVDSTSLTGVVDNISNAYKRWLSGKSKRPKFKKKSAYQQSYVSKCVNNNIVLIDANHIKLPKLGVIRFKAGELPHGRICSATVSLKASGKVCASVLCEYDEVELPKTGEKVGIDLGLKDLAILSDGTKYELPRWDKESAARLHYWQRIASRRLLRAKEAMKEDDSLRLTDCKNYQRARQMVAKICEHIANQRRDYLEKLSTMLVTRYDVIVVENLIVRNMMHNHKLAGAISNASWGMFAQMLAYKCAFYGKQLITVDPAYTSQTCSACGCVNGRLGYNAYGWLKVREWTCPVCEAHHDRDINAAINILNAGMIAA

SEQ ID NO: 61199 - protein, 355 aa, unknown
  TnpB Polypeptide
MGTCRYIYNFYLTHNKELYDNGKKFMSGKSFSVWLNNEYLPNHPEYSWVKEVSSKSVKHSIECGCTAFTRFFKHQSAFPNYKKKGKSDVKMYFVKNNPKDCFCERHRINIPTLSWVRIKEKGYIPTTKDGYIIKSGSVSIKADKFYVSVLVEIPDNEGIGIDLGLKDFAIVSNGKTYKNINKSARLKKLEKQLIREQRRLSRKYENLKKGEVTQRANIQKQKLKVQKLHHKIDNVRTDYINKTIAEIVKTKPSYITIEDLNVKGMMKNRYLSKSVASQKFYEFRAKLPSKCNENGIELRVVARWYPSSKMCHRCGRIKRDLKLSDRIYRCECGYVEDRDFNAALNLRDAITYEVA

SEQ ID NO: 61200 - protein, 388 aa, Escherichia sp.
MHQENTMLPRRISVSLFIDQSIIWPVKRLQAFKFQLRPGGQQEREMRRFAGACRFVFNRALALQNENHEAGNKYIPYGKMASWLVEWKNATETQWLKDSPSQPLQQSLKGLERAYKNFFQKRAAFPRFKKRGQNDAFRYPQGVKLDQENSRIFLPKLGWMRYRNSRQVTGVVKNVTVSQSCGKWYISIQTESEVSTPVHPSASMIGLDAGVAKLATLSDGTVFEPVNSFQKNQKTLARLQRQLSRKVKFSNNWQKQKRKIQRLHSCIANIRRDYLHKVTTTVSKNHAMIVIEDLKVSNMSKSAAGTVSLPGRNVRAKSGLNRSILDQGWYEIRRQLAYKSSGVVVRCLLFRQRTQASVACAVVIQRKKIACHKVNSDARYVDIQRTPM

SEQ ID NO: 61201 - protein, 384 aa, Haloarcula sp.
MKRTVKTTVRVKLHSLTNRKADLLAREYEAFQTEVHGGDADLYSATDQQASKVQRQKDPNPDTEQPVVLRNDVFDVTYDEDTVLSSWWVKVPVYNPEQGQGNSIWCPAHVPRKDAQLVREGNLRDSELVRRDGDWYVHLVVKRSVTVQDEYDDVLAIDMGARWVATCAFLSDRKTTFYGEEVRRIREHYKQLRKSIGKAKPRQGQQVVERIGDAEARKVDDCLHKIARQIVADARERNAVIVVGDLGGIRNDNDKGRYVNDKTHKMPFARLLNYIEYKAHDSGIEVQLVEEYDTSQTCNRCACEGVRATQGRFECPECGLDDNADKNGALNIGKRALGKFSKPLSEAGAVLAQPETQVIVQRDDEPANLPLLVDSTPSGGTPRL

SEQ ID NO: 61202 - protein, 593 aa, unknown
  TnpB Polypeptide
MVNEYYTPIQAAKLLGVHTESAALWERERKITSHRTEGGIGGTREKKSIDSQSNQQQLELFATRGSQLIPNAKILSDNLSSCAATTRAQNLFRKLETDSILDGENLAPFWNELSSAMSIGLSLPTKTDYAVRDENWLSKYASIMQSNSWFSTRAVSVQSKSLYRICCPSSTASVLGYTVNENIKEKKARSYGKNSFKRSKNITPNSVLKIPLFPEPELHKIWKRWLAAYRWVYNNCVEFYNNNRSLSDGQSLDQYIQQLQNLPENEWTKCLGNTRQEAVCEAQNASRQSRKVNGGKCSLRFRSCKNKSQAIQFKNSAYKNGTWFRSKIGKLNFTVAKGYELPINCVYGTELIYQRGQWFACFPQYVPEVTTDSDRVIALDPGNRTFITGYDGENVLEIGKGDIGRLTRLCLHLDKLIGRKIQAVGKANKRLRYKLNKAIDRLRFKIRALVDDLHRKAASLLVTSYKLIFLPTYQTSQMVVKANRKINRKSVRNMLTWAMSRFASHLEQAAKRQGVLVIRCNEAYTSKTCPKCGYVHKKLGGSKVHKCPACGHKAPRDWVGALNIMLRALQAVAFSIVDGVISISDADVVAAQG

SEQ ID NO: 61203 - protein, 560 aa, unknown
  TnpB Polypeptide
MSKPKGNRFCVTVCGEFFPESYPAFRSPKWSRGDEDPLQTEMRLFCACERWAFNRLLEGASRDGVKKEGQELFGLNSRYVDDARLKAHALIDSRSKLLELEIDETEAKLARARKKLGLAMRKLAGAKKGAASEAVEKLRLAVKGRSGRVASLEEKLAELRAHQENGTIPKVVFGGRKLWKKVCNGRASREEWRAARRNRLSSRGDEEKGGNPNMKVSYRDGEFHLAVTISHLSEQIGVDALGRPKVSRAPKVEGKLWLPEKHRDLVRLWLAMKLPYTVELVRTLDGRYLVHLTFAPGGVREPDFARGCLALDTNPDGVALCHVGAGGQPGPWPDGFNIPYPRNLGKYKGEFQVTISPNGFLSLRVPDLAYASGFRRDYLIGVLAKVVVDIAVFLGKPIAVENLDFGKDRLDTNKKFNRIASNFPFAKMVEAVCRRAVKEGVPFKPVPARHTSTVGYWKYMERYAVPVHCAAALVVGRRAMGYRERVTEELKELVARIRNSLTREVGPDKPREGKGMTRRVRAVLERLERKMQSHNAFAPWQQTGFYSAWRDFKLLALSLR

SEQ ID NO: 61204 - protein, 431 aa, unknown
  TnpB Polypeptide
MKTAHKIRINPTPDQTEYLKRACGTRRFIYNWGREQWEKQYQAYKEEQETVPEQERKLKPPHALALKKQFNESREQEYPWTYDVTKCVVEGAFDDLKKAYDNFFAGRAEYPTYKKKGKSHESFYLSNEKFTVGSHWISIPGLGRFILDQRKIEKGRGNLLRKLGTVNLAEKLRFVEESKASTPRKSRNKRKQVICESVKILGATVSCEADHWYVSIQVEIKKQRPPTPTAAVGVDVGLKQAAVVSDGRKLENQKPLALHLKKLGKLQRKLSKKQKTKDPETKRTVFSRNYEKQRLKVARKHQQIANIRRDVQHKFTTELARTCGIIGLEDLNILGMMANRKLARAVADAAMGQLLRFLKTKITNAGGDLFIASRWFPSTKRCSCCEHVKKRMPLKHRTYQCLVCGLIMDRDLNAALNLLWFATEQLRQLHA

SEQ ID NO: 61205 - protein, 542 aa, unknown
  TnpB Polypeptide
MNKEVLEMLTGKKSNSNFVTVECLLAFDKDEDKERVLILMRKFSSMVRFAYKRLMEETEKKELKKLLSRKYGINTRYSDDAILLAKQNLESCVERKQNPKKLVFGSRELFEHLKKKHLTGKRRETLRQKWEERRYGILYSRGDKSLQGNLNLRLVYLNNQWYLRINLGNGEYVCARAIRSAKRKTDKWIGFISNIEHAEKTGDWFPYTVRLKLRNGKIYAQFSKEDKFPEVTITKDNGVIGIDINAYPFHLAIVHTAKDGNLEKYERISLDNLLEGSSEKREYLSWQVAHQVVENAKKERKAIVVENLEKLPKGKRGDGLPKLRQRLQKWVYKALLQKIEIVAKRNGIQVVKVNPAYTSIIGKLKYAPLYNIDKDTAGAYVIARRGLGFKERLPKNYKELLKDPEFLSYTIAKIENKITKLKQEIREEKNEYKRNRLKNVLWKTRKKLDLLLIPFMGSGESESAAQQAVNRELKPMRGRAQALQKSWQVLSVALALSCLESLRDFSPLKRVIFARDWVGAANKASPSLPGQGMTVLNMYSFV

SEQ ID NO: 61206 - protein, 468 aa, Lactobacillus sp.
MYLLTVDYKIYIGYNQTAIIRGGENMKRMSSLAYHFGIKLRFYPSSKQKKMIKLNYDAQRFVYNSYVGRNRTNYHARRFLAAKQHQAMPFAFSALNSYETKLAETIAANDELLAKPKSIRDAYDFLRVKEIDSLALANAIQNYHKAWNNYRKIGHGIPTFHKKSSAWSYQTNCQYPKQSEAYLDNGTAKFIDVKHVKLPKLGVVRIAGFRKLIKDRLLNHIPTRIGTVTIKKTADDQFYLSMQLGSDISFVQELPTTQSQIGIDLNLDNFLTESNGSMVANPRFYCKAKKKLARAQRVLSRRQRRAKQEGRNLRTARNYQKQRLAVAKLHDKIRRQRENLLQVLSTALIKNHDLVVAEELRSKNMLKNHALSQSISDAGWRSFLNMLAYKADLYGKQFKTIDPKFTTQRCHQCGTIMGQNGYCKLKLQDREWTCPVCQTHHIRDWNAAVNILEKGQGIWQNPRKEKAA

SEQ ID NO: 61207 - protein, 512 aa, unknown
  TnpB Polypeptide
MFVSLQFNLELKKEDREKLIKLMRMQSSAIRVAYNMLKELEKEKTKKPHVQIYQRLRQLFPELPTKYIDSAIYKAKQYPTDKSAVFGGKRLFEKLCKNHLTGKAREKLKKQWRELRQGTLISIGSKSDKGNRLTRFEDLSGQLCLRITTGHREFIYAKVLREPSNSKDKWITFMAILLESWQTQSYFPYTVELKLRDGEVYGSVSFEIPTPKVRYTKESGVIAIDTNASPIHLAIAEVSKTGELLSSQTIKLHHLLGLSQNSKDHQEWILAHQLLDLAIQKNKAIAIENVKKLRKGKRGDGKAKLRKRLHRWNAKKFLQKLKRVAMLKGVEVIEVHPAYTSVIGILKYAPQLNIDKDIAGAYVIGRRALGFKEDMPENYERLLKDKAYLEFALKKYEEREKELKELLEKESNEYKRNALKSVEYAKELLTNLIQSLQSEPSSCEGANGRNPEQGETKKVSRVAWQVLKVALLFPILGRILPRDLSPLKPLLVEGVWDRVRSRLVPLEAGGAS

SEQ ID NO: 61208 - protein, 409 aa, Halobacteriales sp.
MEVRRTVPVKLAVTDEQAGLLHETIDEFLWAANYVVDAAWDGEWAETRLSILHEQTYDDVRDQTRLHSNHVQSARDRAVDALKGVVATWSKGEYASLPTFSTPFVDYNQRNATFHSDHASLSTVNGRVTVEYVLPDETRDTPHSEYLRSDEWETTGATLHYDRGSFYLHVRTKADVADSDPAENGTVLGVDLGVENIAVTSTGAFWTADELNHWRQEYVERRTSLQECGTRDAHENIQAVGRTETGRFKQYLHRVANDLLDEAVESGCTVIAFEDLTGIRDRMANARKFHEWAFRRLYEYVSYKAEERGIHVEQVNPRNTSRRCSSCGFTHEDNRRSQDTFCCQSCGYENHADYNAAKNIGYRLLRNQNGGEGGALVGVRLNTGMLNANGIQPVPDSVRVGVHGESPPL

SEQ ID NO: 61209 - protein, 350 aa, unknown
  TnpB Polypeptide
MRTVKIKLLPTIEQENHLISISKTYIKTVNETVSEMVGAEKVLKLTSKDVGAPMPSAVKNQAIRDAKSVYKKSKKLGTVPVLKKPVCTWNNQNYNVNDGSIDFPLWIKGKCMRVEVEAVFDEYQTTLINNAVKFGALRITQKSDKWIAQIAIEEPELITVPTNIVMGVDLGLKVPAVAKTSDGKVRFFGNGRMNKFFKRRFRALRKKLGQAKKLSVIKKLHDKEQRWMKDQDHKISRAIINFAIENHVSVIRLEELSGIRQTAKTSRKNEKNLHTWSFYRLANYIEYKAALAGIRVEYVNPAYTSQICPVCGQLNKAKGRNYTCDCGYHAHRDLVGASNIINAPVIADAA

SEQ ID NO: 61210 - protein, 455 aa, unknown
  TnpB Polypeptide
MAAKEQNVTISIKVKLYPDQKTIEEFKKLTTTYSEAATWLSDLMFNDFSSPGMITARKTLHDRYYYDIRQKKDMKSQLAESLIKSVSAKYKAIGTTFKKQYYTYTDADGNTAKYRKDLNWLQHPVVYKRPQADLVRGRDWSFVNDDNGGLILSIATLTGRTKVRFVVKGFDDVINDSDMPGLNIEDPKWKFGEAKLLSSGGKWFVHISATAKLPVTDSEDISNIVGLDRGLVNIVTAADQSGFTARYSGDDARKIRARYNKTRASLQKKGTRGAKRVLKRLSGRENGYMNDVNHCLTKALCENYPEDTLFVLEDLTGVSFEERNFHSKEQTNELRSWTFYDFGEKLKYKAALRGQQVIEVDAYKTSQRCPHCGRYDKAARHRDTHEYICPECGHVENDDEVGALNLMFLGAEYLKCGKKPSFTKMEPKSKKGKANANAAKKNAENTIAENAFVLI

SEQ ID NO: 61211 - protein, 395 aa, unknown
  TnpB Polypeptide
MPISYKYRIYPNKATEQKLNEALDTCRWLYNRLLQEMNEAKERGITLGKLDTQNMIPTLKLENPDLQKVYSKALQMVNYTLWSNIKALSAFKKNGRKIGKLRFKGKDWYKTINYNQSGFKIDQDHSLLHLSKIGDIKIKLHRKTDGVIKAVLIKKSGKEWYAIVQTEPGPNIPDPETRSIGIDVGLKSFAVDTDGNSVENPRFAEKAAIKVKSIQRRLSRSEKGSNNRRKLKDKLSKVHERINNQRTDFLHKLSRHYVNNYDTICVEDLDVKGLKEKGHNKGVHRSIYDASWSKFMFMLSYKAESAGRKLIKVDPRNTTQRCSSCGSIVKKELSDRVHECPYCGFSCDRDYNASRNILIAGMEQPAAPIEPKPLRHISVMQVLAMKWEALPFRVG

SEQ ID NO: 61212 - protein, 384 aa, unknown
  TnpB Polypeptide
MLQALPVKLETTDDEKQLLLATMRKYNEAANFLAERAFELKMANKVELQKRFYRQLREQFNLSAQFAVRVISKVVESYKRDKRIKPVFRELGAIQYDQRNLSWKGLDKVSLITLQGRIKLSTRIGDYQKSRPDRIRGQADLIYRNGTFYLIAVVDAIEQSEFDPVDVLGVDLGIENIATDSDGQVFSEEKVEEARRRYNKLRASLQRAKATSRHRSAQRKLKKMSGMEKRFKRNVNHVISKAIVSKAKGTLRAVALEDLSGIRSGATVRHIKHTQRDKRDKRDRHSKWSFGQLRQFVEYKAKCDGVPVRIVDPRNTSRECPKCRNVDARNRPTRSQFKCTECGYKEMADYVAATNIAARAAVNQPIVAPLFSAVTSHGPSGRGS

SEQ ID NO: 61213 - protein, 251 aa, unknown
  TnpB Polypeptide
LTCNKYDLHHLCYKEIRTRFGLSAQVAVRVIAKVADAYKLDKKTKRTFKPSGSIAYDDRILSWRISDSSVSIWTLSGRIRVPFICGPHQKDLLATRKGESDLLCRKGVFYLTTTCDIKEPKQIKTTDAVGVDLGIKNIAVDSDGVVHSSSMVNNVRHRHRRLRTNLQAAYRKSAKRKLKRLSGKESRLTTALVKSLWQKRKTRNMHLLSKTLRASACGLRFHAPGVPRFPTGRLANSGLLRNTKQCVWAFR

SEQ ID NO: 61214 - protein, 394 aa, unknown
  TnpB Polypeptide
VQKQAGLSAGFVQCCADTALWMWRSYWQLHREWQRTVRQAQRAGDERWLCKLMKREPQPPFSNGLRHKIPIWFDDRIGSLEHSEIKLSPRVIRISTLKRGERITVLLNPAKYHLDLLECGEIKSFQIVKRGKKFYVHVKVEREVRDQPVRAVRGVDLGVKRSAATVLLRSDKPLSRGDFSVIRDGEKTHRLNELNEKVAKLQQMKKWGALKRMRNKRRRVAEYYDRLTAKRIADISSECIVAIGHPKGIKYENYRDNGKRKLRRLMTRWAYGRIIRYTIEECAEQGIKVAAPDERWTSITCHRCGSRNTERLTQSVVHCYDCGLTYNADFNGAINIGSSILAGPRSRWAEVDPAPTSDESLEKRDEAGSPRLHAWEWSHELCPDFIDADDEHGA

SEQ ID NO: 61215 - protein, 415 aa, unknown
  TnpB Polypeptide
MSQVLGHKFEYTFSMQLRYNYRLDPCPRHRAAFAKAFGCARVVFNDALRAREAAHQAGERYVTDAELSARLTAAKKTPERAWLGEVSAVVLQQALADLNAAYRNYFASLNGERKGPKVQLPRFRSRKDTRQAIRFTANARFRLLPNERLRLPKIGDVPVRWSRPLPSEPSSVTVIKDSAGRYFASFVVQIRPPALPAVQPVMGIDLGLTHFAVLSDGQKISAPRFLRSAEKNLQRRLRDLSRTQKDSRNRDKARVKVARAHARIADARRDFHHQLSTMLIRDNQAVAVEDLAVKALGRTRLAKSVHDAGWASFVAMLEYKARLYGRTFIKIGRFSPTSQTCSRCGLKGGPKPLHVRAWQCLGCKVLLDRDINAAVNVAKAAGLAVTACGAVVRPGPALADRSEAGTHPKSHPKAA

SEQ ID NO: 61216 - protein, 277 aa, Archaeoglobus sp.
MPKYLPKDEYFVCIFQKDMFKVAGDKIRLSLGRNFAKEFGVRFLEFKLPKTVVGKKIKEVRILPRYKGLWFEIEYVYEVEPEKADLDYSRYLAIDLGLDNFATCVSTGGTSFIIEGRGLKSFNRWWNKEKAKLQSIYDKQGIKMGEKMAWLLRKRKNVINNFMNQAVNYIVKYCIANRIGNIVIGELKEIKNRMNMGKINNQNFQYIPYGLFKQKLKSKCEYYGINYIEVDEAYTSQTCSICRDVNRNNRKHRGLYVCKKCGNVMNADVNGALNILK

SEQ ID NO: 61217 - protein, 317 aa, Enterococcus sp.
VNHLKVLKAYKFRIYPTSEQRQFFIETFGCVRFTYNSLLKNREYRDLRDDPGELLTPAKLKQKHPFLKKTDSLALANAQRNLDRAFRNYYAGRCSHPKLKTKKAMWQSYTTNNQQGTIRIETGRLKLPKIKTLIPLLLHREIKGEIKSATISAKNLEEFYVSLLCEEQVAHLPKTSRTISIRFCPQQLVLADAPLSGLGFCQKELSEKLLKEERRLAIRALSARRRLVKLKEAKNYQKQKNRVMDLQRHKRARQKAYMDELSLTLVKDFDEIIICFEPKQSAVAFNWSDWQKFLQKLKYKARWYGKTVNLQTLSKNA

SEQ ID NO: 61218 - protein, 404 aa, unknown
  TnpB Polypeptide
VKRLQAFKFELRPTGAQRQQMRCFAGSARFVYNKGLALQKACFDAGEKRLSYAGLCKLLTQWRNSTGTSWLKDAPTHPLQQALKDLERAYTHFFAGRAALPRFKRKGQYDSFRYPDPKQIRLDQVNSRILLPKLGWLRYRNSRQALGRVKNVTVSLSCRKWFVSIQTEREHAQPLPRGGAVGIDLGVIRFATLSDGTFYAPLNSFRRHQTRLRKGMQAMSHKQKFSANWKKAKARIQRIHARIGNARLDYLHKISTAISQSHAIVCIEDLQVRNMAKSANGSIERPGQHVRAKAGLNKSILDQGWFEFRRQLEYKLSWSGGSLIVVPPQNTSRRCPRCEHISAQNRQSQQCFQCIACGFQENADRVGAMNILRAGHARCACEVSDADRQQQEPTEAIQGRPRAA

SEQ ID NO: 61219 - protein, 394 aa, unknown
  TnpB Polypeptide
MLKAIKIRIYPNKEQTQFINKQLGSCRFVYNECLAYKTNTYKEEKVSISPVEVISHLVVLKERFPFLKEVHSKVLQQTIRDLNQAYTNFFKNGNGFPKFKSKKDNRQSCRFPKDAFIGINGNRISLIKALKNIHFKCSRKDERYLNKRQEHIHNITLIKTCSGKFFLSVLVDFEPEIKETTGSVIGLDLGIKDFIIDSNGNRFEKNNFFKKTERRLKHLNRQFSKKKTLKTGKQVFSKKWNKMVDETIASHNKEKLRKRIAKLYEKITNQRLNYIHQLTSQLVNENQIICVENLNVNGMIKNHKLAKHIQDAGFNEFIRVLEYKCKLYGRELVKIDRWFPSSKKCNHCGYINKELRLSDRQWICPECGSVIDRDYNAALNILEEGMRIYLERKK

SEQ ID NO: 61220 - protein, 452 aa, unknown
  TnpB Polypeptide
MTQVYCYETELKPNHNSDIIKYFEQYKKKFNEAARFTWQYYNNQDPLIAQKSKLNTLMQNKFNISTRGANSIISYVAGRHRSLLELKKTELRSFQSEINELNKDITELSIKVNNLSRKAANNQLNDKQLKKYRNAKIRLITMKKRLDRRNNALPKIEKQIETKKLSLCFGSKTLFTHQRLERDHLSWYMDFIEARDSFIYYLGRREETSCNQQCQLFYDKKYNSFKIQLRKEYDYQANDRDKYVYGECYFRYGNKEIQEVLSFKNSPISYRILKRGSRYFLQATITVEKVDAQQESKIIGVDFNKGFVALSEIKEDGNLINTDKIYYRFRKGDGSKNDLRVLADTLAKRCISNNASLAIEDLNFAKKKTKAMKHKKDKKYNEMLHSLAYSNFSEFIKRACFKHNIHLSLVNPAYTSIIGKEKYSENKKLNVHTAASYVIGRRALSFVDNRPV

SEQ ID NO: 61221 - protein, 560 aa, Kitasatospora sp.
MCEGGGTGWEGEGVTGSKRKLRRIDVPFVSLGPSGVTVRDRLKGLASGDEKVLRLVGAHVGALASEDLKVRCADGLDHSNGTWAARKRDLTVRSSSRWAGSVTKATHDQWALSRRGLAAHLDSLDAGIRMLRHRLSLPVGQKGTKRSPGGYRSRHEWFVKSRRLAALEERLAAARADREAGVVHVVRGGRKLLNTRHNLVAANLTEAEWRQRWEAARWFLSADGESGKRFGNETIRVTPDGEVSIKLPGPLAQYTNAKSGRYVLAAKVSFPHRGTEWADRIGNNRAVAYRIHYDVARGRWYLDAAWTRPVVQTVPLATARAQGMVGVDTNADHFAAWQLDVHGNPFGDPRRFPYDLSGSADHRDAQIRHAITRLLHWAKRRGVAAIGLENLDFTAEKTREKHGRKKRFRQLISGIPTGKLRARLVSMAAESGLAIVAVDPAYTSVWGAQHWQRPLATPRRTTTRHDSAAVAIGRRALGHPIRRRTAPPHHDQSDRRGHRTVQAEPGDRGREGTRRPVTDRAHDARSRTGTTRTRATSAPKTVRDARSATTWVQDSLLLTD

SEQ ID NO: 61222 - protein, 397 aa, unknown
  TnpB Polypeptide
MLIRRAIPIIIEDDEDLRTTLRNYCTITNMISPFGWNGGKQLSALQLHYKVFKGLPRILNSQMLCTAIRIVSGLYVAAKKQNRKLRRPINFKRVRAIFAIGPRGRDAAFRKDGKLSIWTVSGRKRIGFRLPEYSKKLFKNAIGFDSLNITEHKGKMVCSIIVKLEVPDPVSINPVGIDLNEKNAVVASNSVGRVFIKTGKGPRSKNFRTYRVMRRLEQKRDSRKAVGLSTRSIDRTLKRLGKKLKNRNLNFARDVAKKLCAWSGKKAVLVFEQLNTSGFKKHITKKYLRRRIDSWPSGIVRRAITSKAEMLGIGIASVSSRYTSKLCSRCGLLGIRKSEKFNCPHCGFKEHADINAAVNIRNRYTASRSSGVLSATPEACVSGNPEFTDADSILCFY

SEQ ID NO: 61223 - protein, 352 aa, unknown
  TnpB Polypeptide
MILTYKVKHNKDFSSELNIARKIATFAIKTKSRSSKDVKHFGLKSQISNQILKKYSKNKKCKSIKSVKLTVPNQGIKVNQETRIIKVPVIKLELQYQFPNNFTKINQIEVDNTYCYISCEVFNKQEMKTKDYIGVDLNTTGHCAVVAIPKTKKVIKLGKEANHLHLKYKNLRTKLQKKGAKYQLKKIKRREQNRIKNLNHEISKKIVQVAQQNSCGIKLEELSKIREKRNKKTQSSFKYSLNSWSFYQLKTMIEYKSKILGIPVIYINPAYTSQRCSRCGVIGNRNGKVFKCSCGHVDHADSNAAFNIAAFELLNNTEGNGHLVLDSDNTKRNTDILRLENQMPKCNEAFAN

SEQ ID NO: 61224 - protein, 396 aa, unknown
  TnpB Polypeptide
MKTIHKSFKYRIYPTKNQEMLLEKHFGCMRFVFNRFLNERQEEYLNNGNSLNYYDNASSLTELKKDLVWLKEVNSQSLQSALKNLDIAYNRFFRKLAKFPRYKKKNDKQSFHVPQSLAIKDGKLSIPKFKKGIEIVIHRPIKGKILNGTITKTATAKYYISITCEVEHQELEKTNSSVGIDTGLKDLAILSNGTKYENIKCLRKSLSKLKYEQRQLSKKMKGSGQKERQRKIVATIHEKVANRRKDNLHKVSTNIIKNHDVICVEDLAVKNMMKNHKLALSFSDVGLGIFYEMLSYKASWNDKTIVKIDRFFPSSKMCNSCHWINQELTLKDREWTCVCCSTTHDRDVNASKNILIQGLNNLSGLGTNSDIKQKQVESFAVAKAMKLEAQGSLALV

SEQ ID NO: 61225 - protein, 394 aa, unknown
  TnpB Polypeptide
MYIARKIMLLPTKEQEEYFWKATRISRFIYNWYIAINQPFLNFEENAKFIHQIEANKALTVFKKLPQFSFLNEVASRVCKQTIIDGYNNIQRYLNKLSKKPKFKSAKRSRPSFYVNYETFHKTQNGCYIEKLGNVKTVEQLPKISCKHYSEPYVVYENNHWYITFTYEIEDKKIKNKGKSIGIDLGIKDLAIVSDKRIFKNINKDKYIRRLQKRYRHLQRSVSRKFNANVEAKDKNGKPTKYKKPLRECKNYQKALVKRNKVLNRITNIRNNYIHQVTTKIARTKQIKRVVMEDIRIRNLVKNKHLAKTIYESKWYMFITCMKYKCERYGIEFVQAKSTYPSTQKCSKCGNVRKGKDKLTLKDRIYKCECCGFTMDRDLNASINLSRIDKEKVK

SEQ ID NO: 61226 - protein, 484 aa, unknown
  TnpB Polypeptide
MQLYFIRHGGEVTSLELEKTYGAQKVRLSLPELETELLLFLLQQANKLANCAIYALRQSVIWFGRSRFHLEVVKNELQTELKENVHYTVLHSQAGQSVLHKIAENFNAYQEGVSAFFRGENSIKPKLPHYRKKGGLHEITYPEQALKKKYDEHGYPMLGFPLGWDIKKLYGDDMHSIDYIWMPYPTNIKPSNIVEVTISPQNGDLYAVFIYKASTEIKPSLNYELALGIDHGVNNWLTCVPNTGKQGFIVDGKQLKAFNQLYHKEVSNGKTGKPEGFWNNHLNRLTGKRNRQMHDATNKAAKFIVDYCLTEKIGNIVFGWNKGQSQRMEMGRKNNQNFATIPTGKLKERLRQLCSSHGIHFHETEESYTSKSSFFDHDALHVFGERPESWKASGKRTKRGLYITGRGFHISSDANGACNILRKVADKIGISLSKISVNCCQILDRVYLWKRSRITEAQRKSTAACCQGNSSRLNRLVKIESPSS

SEQ ID NO: 61227 - protein, 388 aa, Meiothermus sp.
VRRLRLPNTPQLDALARAAGELYSAVVVDFWRTVRKRGIWLKPSSMMRWHTSNQLHAHSADAVVQSFYAALKSWRKRRKTDPQAKPPYRRRRYFRVQWKSSAIRVREGTLILSNGRGNTPLVVPWPWEAPVLVELGWTGTDYELRAVYSRPAAEPVAEGGVAGADLGEVHLAVVYDGERTTIYNGRELRAKRQHQNKLKAHLAAKQSRMRKGSRRWRKLRRSKQKQLRKLENQIWDILHKQTTALVSTLHERGVQTVVIGDVRDLRKRVDYGPAANQRIHQMVTGRVRWLITYKAEQLGMRVVLQDESYTSQECPRCGSRHKPRGREYTCLVCGFRFHRDGVGAVNIRRKYLGLGPVVGVMASPTGVRWHPHQRTCVARDKRERIPAL

SEQ ID NO: 61228 - protein, 222 aa, Streptomyces sp.
MPATDRTIGIDLGLTHFAVLSDGTKIDSPRFLRRAEKKLKKTQKELSRKQKGSKNREKARLKVARAHAKVADARREFHHQLSTKLISENQGIAVEDLPVRGLARTRLAKSVHDAGWASFMNMLEYKAQRYGRTLIKIGRYEPTSQVCSTCGVKDGPKPLDVREWTCSACGTLHDRDTNAAINVKTAAGLAVSACGAPVRPGAIPAQREETGSHGFPTEPRAT

SEQ ID NO: 61229 - protein, 287 aa, unknown
  TnpB Polypeptide
LALVYTAKDGNLEKYERVSLDKLLEGSSEKRAYLSWQTAHQVVEIAKRERKAIVVENLEKLPKGKRGDGLPKLRQKLQKWIYKALLQKIEIVAKRNGIQIIKVNPAYTSIIGKLKYAPLYNIDKDTAGAYVIARRGLGFKERLPKNYKELLKDAEFLSYSIAKIEDKIAKLKQETRNEKNEYKRNRLKSALWKIRKELELLFKYFRESGESESAAQQAVNHELKPMRGRVQSLQKSWRFLSVALAFSCLESLRDISPLKRILISRDWVGAAKRNGLAPPYLVRGQTH

SEQ ID NO: 61230 - protein, 416 aa, Oscillatoria sp.
MSSEDETAQMTLRAFRYRFYPTPEQESLLRRTLGCVRLVYNKALEARSHAWKERQEKLRYRETSRMLTQWKQKKEWQFLTEVSAVPLQQGLRHLDQGYSNFFAGRARSPRFKKKRNGGSAEFTKAAFRWRDGSLYLAKSKDPLDIRWSRQLPKGSDPSTVTVRLDPSGRWHISILVDDNTIKPLPKSEKSVGVDVGIAHLAITSDGEKVENPRHLTKHYRRLRRAQKSLSRKMKGSRNREKARRQVAKIHEEIRDSRSDYLHKLTTRLVRENQTIVVEDLSVKGMVRNHKLAKHISDCAWGKLVNQLDYKCQWYGRTLVKVDRWFPSSKLCSSCGHKADSMPLSVRAWTCPLCGTVHDRDINAAQNLLAVGHTVTACGASVSLEGHCSREQLRKTRMRKKQEPKSRGLGITVLPGR

SEQ ID NO: 61231 - protein, 434 aa, unknown
  TnpB Polypeptide
MRVKRVLKFNIKESCIDFEYIKQQLKESKEIYNYANYILRQMYFKNSQKGNYSLEFVNEYPELEYMLTQYIKENKQFTSLFYNIICSFARIKGLSINSKIVQGIVRKLKNDWQSYWSLLKKKTNKEYDKPVKLPRYKKKYNLVEYNNQTISKEKLKIGYIGTAKMKQGIKLGKKYNCINCKSFRIYEKNNKFVCEIIYEKDIKDIKQGNRVAAIDIGVTNLFVISFNYNKKGISVKTELKGINQYFNKEKARLQSRLSQKQFISKQIQALMSKRSNQLRNCIGYYCNKVIKLLISENINKLIIGYNKEWKQEVNFGRKNKKSTQNFVCIPFRQILNILKYKCLDNGIEYVEQEESYTSKASYIDNDDIPVFNKNNTKYKFSGRRIKRGLYKTKDNKIIDADLNGSLNILRKAGIKLIEPLEYLKFNNIFTSKLV

SEQ ID NO: 61232 - protein, 440 aa, Enterococcus sp.
MIKLQKGGEMNMLLASEYVICDTYGILNETSKQANNLFNACLYQVRQNFFQREPMKPYEFYNALFKQKYEARENMLYRALGYVQSAQQTLKEVLEIWLAWRKALKEYYNNPKKFTGKPRMPKYLKKGSRHTFFVTNQNAKVKNGYLVIDKLKVRVKLIETIGKVKRVAFKPLSKNFFKMIVQHEIPDVLPKTDNGIVMGIDPGLDNLFTCVTNTKNRPLIINGKGLKSVNQWYNKQRSALYAKHATYGQCCKQVKQKDGKVAIAYYESKKTRELTDWRNRKMKDFAHKATKRIIDYALSCGVTTIVIGHNKRQKNKSNMGTQNNQNFITIPHVMMMDMLEYKATLAGITVIRTEESYTSQTSFLDNELPIKENGNHARKLKGLKPAKRRLKRGLFKSDKGILINADVNGALQIIKKVFPEMQLDGIVGMVLFPVKYNVQF

SEQ ID NO: 61233 - protein, 542 aa, Halobacteriales sp.
  misc_feature (415)..(420): Xaa can be any naturally occurring amino acid
MQLTEQFHIPDEHYEACDRLTTLVETHTRRLLSDEYWQDHHLDAISDHAGQSYTYIRDDDYDAFESVEEYLYSRFKRCVYHRVTHVLDAHTDEYRAFQFVTETVAERKIKRIGWYRLRNRLFDEESPYIEWRVLEAVAEQLNDYYDTHGRFPDAYTDLVDCPEPNGTLPYAPDKGDYHIHELSVEATELVVTLNAPESLSPENHYGWTDHELRFPVHSRFQEMVEAGDMKAPTLHASDHGYTLDVPVAVPETESETVDERVLSVDLGVKKQATAVVLDAGSEKHDQVAPPQFIDHPAKDKLFRIKTDAESINDQLAALRQQGKDHTDRFDHLLAEYRQTRRKERYLRDQIQHAVANELVWLAVETGCETIIFESLGQIESSDTSGAVAWSISSWARGELLDLVAYKAELFGIDVXXXXXXCPACGYECDRDVVGALNVGRKHLSDSQMEEANPAAYMEAGNHASFPSSSGARSTGVQSATEQQDAASGRQTHLSRFRATPLTVKRGETDTGGLHQNHGSKTGLRYPRCSVTRHVLASATDTG

SEQ ID NO: 61234 - protein, 377 aa, unknown
  TnpB Polypeptide
MRSYKFRLYPGKAQEKELWHHLWVSKELWNEMLTFTKEIYGHHGKFPTKTSLREFVKNSGLFSQVGQELVDRLYDALHKKIKMKRNGVKCGFPRFKSIERMKSLHYPQFGFELGEKLRVTPFGELSIVKHRRIAGKIKTLTLKREPTGKWFACFAVEQEKVLPRENNGKKVGVDLGLKSLATLSDGTVISNPRHLLEHEERLAFLQRRLSRARKRGTNRLKAKLRVAMVHERISNMRKDFLHKTSVQLVNNYSFIALEKLASQEMAERQFGKQINDAGWNMFANMLAYKAEEAGCQVVFVNPRDTTKECSNCQGLTKKELRERMHNCQFCGLSMDRDLNAARVILKRATVGTTGSNASGDVAVATSMKEDATRFIGW

SEQ ID NO: 61235 - protein, 405 aa, unknown
  TnpB Polypeptide
MQRLQAFKYELMPNGQQHRDMRRFAGSCRFVFNKGLAMQKARHEAGEKKLGYAGLCKQLTEWRNGTETPWLKDAPVHPLQQTLKDLERAYANFFAKRANFPRFKKKGQSDRFRYPDPKQIKLDQANRRLFLPKLGWLRYRNSRDVLGTVKQVTVSQSGGKWFVSIQTEREVEQPRHESGSMIGLDVGVAKFATLSDGTVYVPVDSYRKHEKRLACLQRALSRKTKFSNNWKKAKACVRKLHSKIANIRRDHLHKTSHEISQNHAIVVIEDLHVRNMSKSAAGTTENPGRNVRAKSSLNKSIFDQGWFEFRRQLEYKQLWSGGWVIVVPPQNTSRTCPACRCVAKENRKTQAHFECVECGYSENADLNAARNILAAGHAVLACGESVPSGRSMKQEPAEVSQPAFG

SEQ ID NO: 61236 - protein, 402 aa, Leptolyngbya sp.
MKQRFRYRLYPNEGQAQRLAQMFGCTRVVWNDALAECQRLYSQGEKYPGFAVLAKQMITAAKRTTERVWLADVSVVPLQQSVRNLDVAFRNFFNSVTGKRKGPKIRMPRFKKRSNAQSAEFTQRGFKVEQKLYLAKVGHIKVQWSRELPSEPSSVTVIKDAAGRYFASFVVEVESKLLPWIDKAIGVDLGITTFATLDDGTKIDAPKPLKRYLKKLARLQRRLAHCEKGSNRRKRAVLAVAKVHARIKDIRTDFLHKWSTKLIRENQSISLEDLNVSGMLRNHCLAKAISDLGWRTFRTMLEAKAEMYGRDVQVISRWEPTSQICSDCGHRGGRKKLSVREWQCLNCGSLHDRDVNAAKNIKVAGGQSEPQNGRRRADKSSLLAQPVDASSQPKETQLSLCF

SEQ ID NO: 61237 - protein, 272 aa, Okeania sp.
VWLLTAYNWGLATCITEYQSTKKRLSAITLHKRLVREVKSQNPWYYEVSKCAPQQALRNLERAFKNFFTIPKRGFPKFKKKGKKDSFYLEGSIKILKGNYITLPRIGIVKTYEILPSVSIKNVTISKRANNWYISFKYDYQPIHTAKERDIIGVDVGINALATCSDGTKFANAKAYKQGKKRLTRYQRRVNKKELGSKNRAKAIKKLAKLHKKISDIRADALHKLTTWLAKNHSTIVIEDLNVSGMLKKRSRDGEVSSPYPIDQEIINWQVP

SEQ ID NO: 61238 - protein, 476 aa, Microbispora sp.
LTWCRTRCTCSSRPTRRARRRTSPTSSRASPPTTRAPGSRTRVPRCPHRGQGPASWPRSARCRPRRCGAIWRRGTSGRKAVAVPRSFKFLLRPTAKQAAALAACLEDHRTLYNAALEHRRTAYVKAGVSVRYGDQSAELKHIRGDDPDGQGRWSFSSQQATLRRLDKAFAAFFTRVKAGRTPGFPRFKGRGWFDAVEWPKDGDGCRWDSQPEHPSATFVRLQGVGHVRVHQHRPVRGRVKTISAKREGKRWYVVLACDDVPAEPLPGTGAVVGLDMGVACLVTMNDGVHVANPRHLAATADRLAEAQRDLARGERGSRRRRKKVARVAALHGKVRRQRIDYAHKVANALVRAYDVIVHEDLRIANMTRSASGTVEQPGRNVAQKSGLNRSILDAGWGVFLTVLAHKAESAGRELIAVNPADTSRTCSRCGHCAKENRVTQAEFVCTACGHAAHADVNAATNILRAGLALRQAAEAA

SEQ ID NO: 61239 - protein, 380 aa, unknown
  TnpB Polypeptide
MNTYKAYKLRIYPTNLQRELIEKTFGCTRYVYNNFLAERKNKYEESKTKVHVYEQLKKLTDLKREKEWLREIDSCALQACVYNLDDAFQGFFHGKGYPKFRAKGVHESFRTNNTLNTYKNKKYESIRIDFNKRIITLPKLKEVKFRGYRTTKEMVGKIKSATISKDANKYFVSILVEVPFIKYSINPTSIVGLDLGIKDFIVTSNGEKLKNEVKVNEKRLKGLQKGLARCKPGSKNRYKLKLKIQRLYLKIRNARKHMIYKLANNILKENDIVAVESLDVKSMYQVHKIAKHLKNIPISEFIRVLKYKSNWLGKKVIEINKYYPSSQCCNRCDYKNEEVKDLSVRKWTCPRCGLIHDRDINASENIMFEGLKIYMKECII

SEQ ID NO: 61240 - protein, 294 aa, unknown
  TnpB Polypeptide
MSSSRSIHAVRVLRLRVKDKHAPWLCSLAHEVTTVFNYCNELSVKVFERERRFLSGFDFWPYLKGATRGDCALHLPVQAVQEIAEEYARRRRQHGKVRLAWRRKGGARRSLGWIPFKVRTIRYRGGQIYFAGRWLSLWDSYDLSRFELRAGNFSEDSRGRWYLNVCVPRAQRAGEERHKPAVGSILDRSVPSVGIDLGLSTFAAFSDEALPPIEAERFYRDLQPLLARAQRARHRHRSRAIHAKIANRRKDFLHKLSTRLVKANGAVFVGNVDASALAKTRQAKSVLDPGWSTF

SEQ ID NO: 61241 - protein, 294 aa, unknown; identical to SEQ ID NO: 61240
  TnpB Polypeptide

SEQ ID NO: 61242 - protein, 388 aa, Ardenticatenales sp.
VKLTATLKILPTPEQADALKRTLAIGNAACNHISAVAWETRTFSQFKLHELVYYDVKVQYGLGAQLAVRCIGKVKDAYKLDKDTLRTFKPTGAIPFDARMLTYWPEQREVTIWTVAGRLTIPFVCGEYHRALLQGQWGESDLVYRKGKFYLYATCRVEEAPQADVSEYLGVDLGIKNIASDSDGKRYSGAKVNGLRTRHFKIRQHLQSKGTTSATRLLVKRSRKEGRFAKDVNHVISTELVGKAKGTSRGIALEDLTGIRERVTVRKSQRREHASWSFYDLRAKITYKGFLAGVPVVLVDPRNTSRECPNPECKHIDKRNRPSQSKFCCVKCGFSGHADTVAAGNIARRAAQSTGLCLDVLGEEGYRSSLNGSTDALEPSPRFLTGGS

SEQ ID NO: 61243 - protein, 338 aa, Oscillatoriales sp.
MLLSIKTKLKLNKSQATVMSKHAGIARFTYNWGLATWSHLDQDGLKPNKYLLKKFFNNHVKPEFTWIKETGICQKITQYAFDNLGDSFSLFFSKKAGYPKFKKGLPHTTCKSITISRTADSWFIAFAYEQEHEPTVKQHDVVGVDLGVKELATLSTGVVFPNPKHYKTHLSKLRRLSKELSRKTKGSSNRFKAKQRLAKHHAKVANLRKNTLHQITTYLGKNHATIVVEDLNVSGLLSNHKLAQVIADCGFYEFKRQLEYKAKKFGCEVIIADRWFPSSKTCSNCGHIQDMPRAERTYNCGNCGHSMDRDLNAAINLSRLAFIVKAYRGITAPMLPMN

SEQ ID NO: 61244 - protein, 397 aa, unknown
  TnpB Polypeptide
MEQIITCKLKLILTEEQKSDLLYTINQYNLAMNFVLQDNFTDKLTNDVKLHHKYYTIIKEKFQLNSQTAINVNRQCSSIYRTRWTRAKTKRDHSIFEKPPVYKALTMKYTLNRNVSIFKEGMLLSISSLNNRIKYIQLKGWKKHYDLIQHCKLSDPLLKYDKNKKEFYLLLPITVNIEDQKHKSIIGLDSGIRNPIVAASQNEVKFYDKPEIIKERKTRLKEMRQELHSKGTRSSKRRLKSMSRRERLFVSDWSHCLAKQVISDFPSALFIMEDLTDIRQNTSTFRKEKEDRRQREQWNFVEIQDKIAYKSVLYSGIRTEKIDPAYTSQTCPECGYVSEDNRSKGSEIFTCQNCGLTKNADEVGAINIRFKGLTVSQPHCSERQTSSNKPTNLFVGS

SEQ ID NO: 61245 - protein, 407 aa, Okeania sp.
MQLVEKHIISKQHQHWKECDRLALQSKHLYNAATYLQRHHFFETGKYYNSVDIYHQTKNLEAYRYLPTKVSKQIVRRVSECWKCWLAALKDWSKHPDKYLGQLKIPKYKHKERGRNVVIYPSDALSKPALNKGIIKLSQSSIEFLTFVSNINQVRIVPKLNCYVIEVVYTVCDVEPKQSNYVAGIDLGLTNLMAITSNQPGIKPLLVNGRPLKSINQNFNKKLAKAQSKKAWRQIKELNFKRDNRVNNYLHTPSRKVINWCVKNEVSTLVIGNNQGMKQNILIGKRNNQQFTKIPHSRLIEMLLYKGQLAGIKVVITEESYTSKASALDGDELPRYTPNSKSKYSFSGRRTTRGLYKTASGKSINADTNGSMNIARKVIPNAFEGIEGLPFVPVVLDLWTKITNVYV

SEQ ID NO: 61246 - protein, 539 aa, Streptomyces sp.
VRGLAAPFVVPDPSGVAVRTRLKQLTTTDVEVLRQVGAHLGALASRDLTARCRDGLDHDAGAWAVRKRALTPLSSARWAGAITKASHDQWALARRSAHAYLQSLEAGVRTLEHRLSLPIGEKGAKRGPGGYRSRREWHAKARRLHVLEDRLARARADWDAGTVHVVRGGKRLARARHHLTDAGLTEARWRERWEAERWFVQADGESGKRFGNETIRIRPDGEVSIRLPAPLTHLANAAHGRYVLTGRIRFAHRGQEWADRVEANQAVAYRIHHDTTCGRWYVTASWQKPVTRTVPMAAALTQGVIGVDMNADHLAAWRLDTHGNPVGDPRRFSYDLTGPAAHRDAQVRHALTRLLHWATTSGVKAIAVEDLDFTAEKTREKHGRKRRFRQLISGMPTSRLRARLTSMADSTGITIIAVDPAYTSRWGAQHWQNPLTSTTRKTTRHDAASIAIGRRAQGCPIRRRTAPPRTHQSDGCRHRTAQTGPETPGREGTRPRLPGPRTRSVPPDAARTRVTRTSKTVRDVRSAQEWVQDSLLLTE

SEQ ID NO: 61247 - protein, 393 aa, Streptomyces sp.
VLTDRLDAARADREAAVVQVVRGGKRLLNSRHRLGAAQLTEEQWRIRWRAGRRFLQADGESGKRFGNETIRVTPDGEVSLKLPAPLAHLANAPHGRYVLAARVAFTHRGEQWRDRVTANRAVAYRIHEDTARGRWCLTASWTIPPVKTVPLAAARAGGLVGVDTNADHLAAWRLDVHGNPVGRPLRFGYDLSGTASHRDAQIRHALIRLLHWAKRHGLAIAVEDLDFTAEKTREKHGRRRKFRNLISGMPVARLRARLVSMAAELGITIVAVDPAYTSRWGAQHWHKPLTSKTRKPSRHDAAAVAIGRRALGHPIRRRTAPPPAHRSDEQGHRTVQARPGTPGREETRPRIPGPRTRSVLPGAERTRATRTSKTVRDVRSDQAWVQDSLLLTD

SEQ ID NO: 61248 - protein, 397 aa, Streptomyces sp.
VARGGKRLLGARQHLDAAQLSEAQWRQRWQTARWFLSADGESGKRYGNETIRVTPDGGISVKLPAPLSGLANAKHGRYVLACTVRFPHRGAEWADRVEANRAVAYRIHYDVQRGRWYVDASWTIPVSRTIALRTALAHGVIGVDTNADHLAAWRLDEHGNPVGRPRRFFYDLSGTRDHRDAQVRHALSRLLNWAKTCGVNAIAVEDLDFQGEKTREKHGRKKRFRQLISGLPTGRLRARLTSMADAVGIAVIAVDPAYTSRWGAQHWQRPMASKTGKTTRHDAASIAIGRRAQGRPIRRRTAPPRAHQSDVRGHRTVQAGPGTLGREGLRPRVPGPRTRSVPPDVESTRATRTPKTVRDVRSDQVWVQHSLPLTDQERSGGLRGRLRPGQGPAPGCW

SEQ ID NO: 61249 - protein, 413 aa, Solobacterium sp.
MQLAETIKLRLYPTAEQELAFSELSYWYMKACNFVSDYVFSHDFCTNSVRLSTALYSDIRSKFGLKSQMSQSAIRTVTARYQTVDTQMKNQPHKFKCDGKYYTFRRDITWLQKPIAFRRPQADLVRSRDFSFVEDKETGELLLSLNTLAGRARLPFAHSDYFEQKFLNGGWQFGTGKLVCMKGRWYFHISATREVQETQREDIQHVVGIDRGLRFLAATYDDKQNTDFFSGKKIIKKRNKFDAVRAELQSKGTKSAKRALKRISGRENRWMSDVNHCISKTLVRKYGPNTLYVLEDLTGVSFEEENQHGRKQTHDLRNWSFYDLETKLSYKAKETGGRVLKVDPHYTSQRCPHCGAIVKESRDHDRHVYTCRKCGFSSNDDRVGAMNIYLLGTLWVTGEEKPHFALQEPSEAA

SEQ ID NO: 61250 - protein, 431 aa, Solobacterium sp.
MKKMAEYTFHIGLQMRAYPSYRQKSVIRMNGGASRFVYNRLVAVHNEMFQLKKSAAVSSADAGRLSFLQASYQDARAIKNAAPFLWDCDSDMVLHTIANYQRAWKQFRSVKGTRIPTFHKFDNTYCYQTSNHYARKKLDAIPHVIGLYEGSARFKDKNHIVLPMLGTIRVKGSPKLVSALLDRTSETRIGTVSIRLDACGDCYISLALASDEPFHHAYTQTGTAVGIDMNLTNFFTDSDGVAVDQPHWLKKAERKLCKAQRALSRKYEAAKRDGRDYRTCRNYQEARIRLAECHRHVANQRLNFIRCMADKEVKSHDYLFAEDLKVCNLKKNHTLAKAISDSGWRTFLTELQNTASKHGKTCLLVDPKHTTQTCSKCEHVMSGDSKIVLGQEEWTCPICGTHHVRDYNAAVNIKNAGLSLLKESGMAIDIR

SEQ ID NO: 61251 - protein, 173 aa, unknown
  TnpB Polypeptide
MKRLQRRVSKRVKGSNNRKKAISKLAKLHLKVSNIRKDAIHKLTTYLAKSHSEVKIEDLHVKAFLKNHKLAGAIADCGMYEFKRQLEYKTQKFSSKLTLVDRFFPSSQICSSCCNNRISMPLKVRVFECPDCGNIQDRDLNAAKNIERWFEGIFVPERSELAVSSTPVSLWSR

SEQ ID NO: 61252 - protein, 392 aa, Chloroflexi sp.
MKLACQYRLKPNRTQEKILATLLAVACRLYNDALAERKDAWEQERRTVTYLEQAGKLKTLRETDKEVALLNFSAAQHVLRRLDKAFRRFFKAIQSGQKVGYPRFKKPHRFRTLEFTYGDGTKIKPDERGRLRLSLQNVGLVRVIWHRPLPEPAVIKQVWVTRKVDGWSATFALEVPDERLREPLPPTGKAIGMDVGVENLLALSDGRLVDNPKWLKKIETKIAEKQRILSKKVKGSKRGKRMCRQIAKLHLKVARQRRDVYWKLAAELVREHDLICVEDLTIKGLAQGNLSKSVLDAGWSVLLTHILPDKAWRAGREVIAVPANGTSQRCARCGSPVPKDLSVRWHDCPHCRLSVHRDINSALLILTLGLERARRDGCLPSCLHEAEGESQR

SEQ ID NO: 61253 - protein, 387 aa, unknown
  TnpB Polypeptide
VNFVGRSQKKQVQAGKVLQHTTLKFRLYPTPEQAELMEKTFGCCRYLWNQILSDVQEFYAATDVHYIPTPAHYKKDAPFLREVDSQALCTVHQNLRKAFMDFFRNPAVFSYPRFKTKKARRDSFTVYCREYRTGPSIYLTGTGLQMPKLGLVRAKVHRKPLHWWSLRFVTVSRTRSGKYFCAATFGYEVSAPKQVNPAPERTVGLNYSPSGFYVDSQGANPDQPATAKSREKLARMQKKLSRMVPGSQNYQDQLQKIRLLHEHITNQRKDFIHKESRRIANAWDAVCVRADDLTELSRGMTQGDLRDAGYGMFRECLRYKLERQGKPLILVDRYYPSTRTCSACGHVEAAVSYKRRTWTCPACGTVHQREINAAKNIKAEGLARFRA

SEQ ID NO: 61254 - protein, 354 aa, unknown
  TnpB Polypeptide
MQILTYKYRLKDRRAATALRGHAFQCNQIWNRCAAQHRDTLNRYRAGAPKRKWLSHFDIAKTFKGYGREIGLHQQTIGSICEQWVRNRSTRFRASYGPKRALGWIPFQKQSRQIKNNSIWYLGKQYRFFGSKRRPLPDNAKGGYFTEDALGRWYVCFHVEVERKPCVGNAEIGIDLGLKSFATLSNGEKIEAPQIYRRYEGRLAVAQRAHNRQRVRRLHAKIANCRRDFLHKTSTDLSARYALIAVGDVNAKQLAQTRMAKSVLDAGWSTFRSMLKYKSAGYLEVDEKFTTQTCSQCGALPPERPKGIAGLGIRTWQCSACGTDHDRDVNSALNILAIAARSAAGPVVESRVAT

SEQ ID NO: 61255 - protein, 245 aa, unknown
  TnpB Polypeptide
LTYKSGQVRFKGMNIGLWDSYGLSRFEFRAGSFNEDSRGRWYLNVVVKCQTEAKPVQYGASAIGIDLGLKTLATDSNGGKFEPKQWYRESEAALGIAQRARKKARVRAIHAKIANQRKDAIHKETTRLVKAHAIIFVGNVNAKALAKTPMAKSVHDAAWTTFRTQLKYKAMRQCVVFEEINEAFSTQTCSCCGKIPASSPKGRASLRIRAWICSECGATHDRDTNAAKNILAAGLRRLAAGIPAL

SEQ ID NO: 61256 - protein, 415 aa, unknown
  TnpB Polypeptide
MKKTYKYRMLGDKQTFAKADEWLMLCQRLYNAVLEQRISIYRQNKGSISCYDQINQLPDLREAFPEYQAVGSQVLQDVIERLDKAYKAFFRRVRNGNGKAGFPRFRSRDRYDSFTLKQAGWKLDGKYLTIRNVGRFKLRLSRPIEGDIKTVSIRREIGKWYVCFSCNNVPERKLEPCTKDVGIDVGIKSFSVDSDEHREFNLAYFRHAEKQLRVRQRILSKRVKDSHGRKDARLLVAKAHEKVTNQRNHFLHKIANYYITNYGVIYIEDLNIKGMVKNHHLAKSINDASWGKFFEMLNYKAEEAGRLVIKVPRFEPTSKTCSACGAINQELKLSDRQWVCKSCGVLHDRDYNAAKNIHVVGMEIFKSRVGQTLQELMYGDTQAYPENPYTSVLGSFNGDVNRRSPQKIVANILDL

SEQ ID NO: 61257 - protein, 415 aa, unknown; identical to SEQ ID NO: 61256
  TnpB Polypeptide

SEQ ID NO: 61258 - protein, 410 aa, unknown
  TnpB Polypeptide
VLKAHKYRIYPTNEQSILLVKSFGSVRWFYNYALSLTSETYQATGKGLSRNDTINLLPSLKKEDQWLTEPPSQCLQQVALDLSNAFLNFFEKRAKYPNFKKKEQKQSIRFPQGIKLHGNFLTLPKLGKVYCKVSRLPGGKLKSATVSLTVSGEYYASCLYDDGKALPATLSQGKAIGVDLGINHYAITSDGTKHENPKYYRKYEVKLSKKQQQLSRKQKGSQHRNRARIKVAKVHEKISRCREDFLQKLSRKLVDENQVIVVENLAVKNMVKNPRLAKSISDAGWGKFCTMLKYKSEWSGKLYIEVDRFFPSSKTCSHCLHQIERLSLDIRSWQCPQCQTIHDRDINAAINIRDEGLRLLAGGHLATASGEKVRPSKGTAFTRRFSVKEESPCLIAGELSKLLFNIKKSR

SEQ ID NO: 61259 - protein, 386 aa, unknown
  TnpB Polypeptide
MIFHKAFLYRLYMNEDQSDKLDNLLDAARKIYNAALEQRIHAWKYQHKSISYYDQANELKYLRREIPEVAQLNTSAAQDVLMRLDKSFKAFFRRVKNGEKPGYPRFKGKERFNSITFHWAGRWSNGTKIIDNRLRIQNIGMVKVKLHRALEGKTNTVTLKRVCGKWYVIFSNTVEIEPLPVSHKAVGIDVGLEHFAVTSDAMCIQNPHYLKEGLSVLRRLERSMERKNKGGNNRHKAVGLLAKKHLKISRQRIDYSHKAAKDIVDKYGLIAVEDLPIRNMVHNHHFARSIHDAAWGQFLDILSYKAEWAGREFIRVNPNGTSQICSGCGAVVKKSLFIRIHHCPNCGLSLNRDLNAALNIKRLGLSLWDSTCDSSQSVSQEAARFI

SEQ ID NO: 61260 - protein, 484 aa, Nostoc sp.
MKSTRHFQTLYSQAAQQLCRAVYESFASFKQLNASYRRGELANKPKPPRYRKKGFKIISYPKQALKLKDGQIRIPLGSQVKVWFKLDSFTLPMPSNLNFEDIKELRILPRNRCFYAEFVYRTNTVASDVFYLLYLIYSMNNNTSALVGEIAKQLSVVVQGPIVGKPNDSFEERLTEQCLKSIRHYLPDAEIILSTWKGSDVSSLNFDILVENEDPGNFIRPDGEPNNINRQIVSTREGLSRVKREYALKIRTDCIFQGTGFLSYFGQYNERLQQFKIFRGRILTCAIYSRDPVKAPLLFHPSDIFYFGFTEDILYLFDIPLAPDYETTSWVEYRSNTFIMHYFWGCKIRYYPEQYLWIKCLNKSGIPIELNWNFDANPLLVFQSELSLINNFIFLDPEQAGVVLPQKILCYGLSYTYNFNKWLNLYQEYCLHKNITLLAYRSFLASFIHNSKAICIKLFTCSGYLIILIATALLKKFYKLFRAY

SEQ ID NO: 61261 - protein, 525 aa, Bacillus sp.
VDGMKVTKICLISDKNAVELEKLNRLMAVFCAALRYSFNRLIEGEQSGKLIKKVNVLFRMNKRYAEDAVMQAQAIISSQKELLPLRIEEVQGKIKKTSVKMEDYQTGKKSPKKVSLEVCLKGLSSRLEKLQLKESILIKHQEDQTIPTVIFGGKRNFNDRLKGTLSKGEWKDLRSNTLYSRGDKSKKGNLNTRIVFDDNKQQFYLEVANPLLIEGRGKSPRLRFKLQIPDNYFNEMVEVVLPNKVGVIRKNKPHEEYKPYSIELKRKNGRVYVHITYDEDVHGSVLNWNEKIQSDVVAGIDVNVDRVSVSILTKQGNLLESKTFYCHEMEYVKSNRRSNISGELAKNIVQYLLSWNVGEMALEDIKLKQDHDTNKLFNRRVHSFAKTKIQKALISRGLRYGFKIKKVNPAYTSVIGRFKYSEKYGLSVHEAASFVIGRRGLGLDEKITQELLNHLRTMVKPKLISILGSMEESEKRSKKGIQRRRYIGMLLKNIETFKENHRWKLWNVIHKTFMMKNQKLQFKEV

SEQ ID NO: 61262 - protein, 403 aa, unknown
  TnpB Polypeptide
VFTLTYEFKLKPTSAQVVIFEDWLEQCRQVYNYALAERKDWFKSRSCQINACSLHFEYIIPADKGRPTYASQCKGLTEARAKIPALGAVQVHVLQQTLKRLEQAFVSMWEQNHGFPRFKKPGTMRSFVFPQMGVEPIKNSAVKLPKIGWVKFRQSREIPDDATLKQVRIVRRASGWYAMLALQWDVKVPDVMPHGSAIGIDVGISHFAAVSNGKLFPNPRPFKKLERQLKLLQQRVSRKVKGSNNRKKALFKVTHLHERIANTRKNYYWLLAHNLCDWAGMIFVEDLNLKGLARGFLGKHCLDAGWGQFFQVLEQCCRKRGVFFLKVNSKKTSQICPNCLVETGKKELSERIHSCQDCGYTTDRDVAAAQVVLVRGLAAVGHTVKMLSEGKAVALPTMKESPC

SEQ ID NO: 61263 - protein, 441 aa, unknown
  TnpB Polypeptide
MSQTITAKLKLNLNTEQKALVSQTALAYRDALNYTSQIAFDAGKTSNGDKLQKAVYGELRVRFGLGAQMACNVPRQVSTTYKTLWTKVKQSNDAIAKGYTKRRYKGLDKAPKYISRTCTLNYQRDYSFKTERRVSIITLQGRIVVSYNGYNKHLDLISNGTKIGAAKIVYQRSSKTYYLMVSLEVKTPEIEPLKITRVSGVDVGMRYLAVETDLNNKSKFYSGKAARHKANRYHKARQTLQRKGTRSAKRRLIALSGRERRFIADVNHKISKEIAKPNSLIGLEDLTGIRDRTSSKSGNKASKKQRRTNRNKAKWSFAELHGYIDYKANLNGSLATKVLAHYTSKSCPKCGHTSDANRPNKGLLFRCECCGHELHADLVGSRNIALRTLLVRQDWISTGSLSASHNVSRVETKAEILQRFSELRWTSDTSPHCSGTPLSVG

SEQ ID NO: 61264 - protein, 448 aa, unknown
  TnpB Polypeptide
LHSVIARHREGSGRKAELGINETQKIATRVFQAINRYKLGLGGMPRFKSFKRGLHSIEGKTNKTGLKFRPEKKVLNWCGHDYRVLIDPKDDYIQRALKENERSDKYRKIKYCRLVRKRIRSSDRFFLQVVLEGTAPVKHVYAPVTERAAIDPGPQSIALFSKAFAGKIQVAGSNNFNEAASRRLLRAMDRSLRRNNPDAYNENGTIKKGAKLVKSKNYQRKVDRLREMHRVAAAERKCRHGQTINLLLSIAGDIRIEKNSWKAFQRGHFGKSLGKSAMSGFIAQLKSKAESAGLKVTEVNPYKLKLSQYDPYTDTYRKKDLSERWQEMKAGSGQYIQRDVLSALLLYCADIEKEIHIPKAAVEQLEGAKQLLTDAGYVVLKSTSSRDQRDPRLASEPKAMTPEMARQKILRGAGDSHLPTDQELGQIRAGGKVSTWSKETFPLQRGVV

SEQ ID NO: 61265 - protein, 381 aa, unknown
  TnpB Polypeptide
MNRAHRIRLNPTAEQAAYFWRCAGVARFTWNWALGEYNAALARGEKPSLTALKLEFNRRRSEDRFAPWVGEVQSYAYQYAFQDLQTAISRYHERRQADKLKPPAGWKPRKDGKPFGWPRFKARDNTTPAFGLANNGGIRCTGHQAQIQRCPGPVNMAEELRFDGRILSGRVTYIAGHWYLAVAIELPDPQPEPLPGRVGVDLGIKSLAVTSDGVIYENPKHLRGSQRKLAHLQREFSRRQKGSHNWAKTKAKITRLHARIGNQRREVLHEMTTDLVRTYGTVVVEDLNVSGMLQNHHLAQAVSDASFGEIRRQLEYKASAFGSKVVIADRWYPSSKTCNDCGQIVELTLAERTWTCPRCGVIHDRDLNAARNLRDYSAVTG

SEQ ID NO: 61266 - protein, 537 aa, unknown
  TnpB Polypeptide
MRFVKVFMGGGDMEKVRRAVAVEVESPPPELYAVEEPYRRIMEEVAAYVAERGRLEKEKYNELYHRFRKQYPLPAQLIQQAINQGVETGKSFLEAKRNGRVHKPYPEVGRVSIRFAKDSWSYKKAISSAAPVRLGLSLLGGRREVWIKPHRRFWLYWWKVLRREAGLASTLILKRRRNKWYAVFIFDVAPERKPPAEVVAFDVNENSVAVAKVSLLSTVDAVARWNWRYVDPAVYSIKTDFGRLAKRYEAVRNAKLEELKRKYPFAGRDEEERRQNVADTREYKKFARRLRERRRKGGRVRQIAREVAKSPAVIITEELGKNPQEEMIGVEEKAKKGAKKKVKKRELRHRIKQTPFKKLIRAVEDKARETGSAVFYVSSFRNSKVCPIHFALLRDNGNWHALHCPRGHVVDRDAAAVLNMLWKTTPTGWVKAVWWDMKEARKRLKKGIMPKDVAKKRNPLVPWPIVRAVLVSLKTLRASDKWPAVLARAAPMNPAQGADEDGARAPPHGAPALGEEVRPTSSLGWRCTAPWATSPWP

SEQ ID NO: 61267 - protein, 534 aa, unknown
  TnpB Polypeptide
LLVESLFHLCYTKQQKQSMGQEEADMAKAISTIKETLNYQPQYAQYFAANQALFNRVVAFYFDCIQAHEGILDLPNKEALTALEKLTHATVENPVPIMPVYEIAPDIPALFRRAAINAALGSAHSFSSSLKKWRTRKEQHEARPARTGTKKKPFPERPPVPPRSWKKLVPFYAGLWKERQDHSILLKVWTGSCWSWVKVRTLGRLVPAGYVLGSPQLILHGNQWWLHTSIEKTFTAPPKIAEQVTNPQTKICAVDLNLGEHIAVCSVQTVEGTILATRFIGGGRAISGFRKKLLGRIARHRSQTGIIAENEQDNADLWRKIRKVDEHIAHLVSARIVQFAAAHQASILVFEHLGNLKPEKGKYSHRGNSKRAYWMKGRIFKYARYKAWNQKILTSRVNPRNTSRECHRCHAQIIRYNTGEPVEGYTPGGTLVLCQQCQMRGHSDRNASLVIGQRLIARYQEPSKEKPHTAVRRGGRASKETGVTRSQDAKRKKGPSISHARQGDGNEHGTAQGKRHRMGSPFSATPHQLRLPLE

SEQ ID NO: 61268 - protein, 420 aa, Sulfobacillus sp.
VNCWTLPVHLYDRALFDAVETMRRWILAAIAQTHIEGKLFRMFEGRQRRYAFWLLRKFVRIGAVLRGEAPEPQFAIALAERQAVVRLLRRLLRKALGKAPRVHLRRSFALDNTLYRFFTHQGKPYLSIASLVPGQRIVIPLKGFPVPAVTGNVRVVIDPLQHTVAIHVPIPVRVKTLPERREPVVVGLDAGVTEVFADSRGHFYGEGFGLVLDRLSAQTTTQGAERNRLYAAAKTLAASSRPEDRQKAGRIRRYNLGRMKLDARRARGQAEVKRRISEALREVLRSRPDVLVMEDLSRMRGRTKSRHLSRVVSRWMRANLKERAEFLAQAGGSRLETVNAAYTSQECPQCDYVHHNNREGDRFHCQRCHFTGHADTVGAVNVARRYTHPELWERIRVFTPKEDVLKILREIFERQKARCT

SEQ ID NO: 61269 - protein, 500 aa, Vulcanisaeta sp.
MLCRAVAVELEVPKDVSKLLYSVESAYLGIVRGVVEYAVENNVLNATELQRLFYRRYRLEYPDLHAHLVIQAIRQAVQIAKSFLRRKRKGLVDKPYPEVRSVSIRFTEDAWSYEQFVKSIAPVRLELSLLGGRREVWLRPHRRFWLFWWRVLTGEAELASTLMIKRRANKWYAIFVFELKPRVERPQSIVAFDINENTVAVSRVDLPSTVDKVAYWNRQYITPELYTIRTDFGRLARRYEKVRNTIIERLKQSFTLPSGNYVNVTNTREYRKRVKHLRERGRKLGRVRQVVNELTKTPGIIVTEGLGENPQESMIEDVGRSELRHRIKQTPFKSIEEAVEDKALERGSKLFHVSSYRNSRVCPIHFVRLERTDDWHILQCPLGHLVDRDYASVTNMLWKITPKAWTKGVWWDLRKRMDWRECEGKSNPLIPYFMAKILHTTLKEFTASEESPAVLARGSPMNHHRMQDEGGGEETSQKGRRSEPQLEDVEDMVLVITVER

SEQ ID NO: 61270 - protein, 416 aa, unknown
  TnpB Polypeptide
MVERYVFRGVVFRLKDSVHEIELPDKLVWLMKAFRLMVNEAVRAGLQLGITSRYAIRKAVYRGFRKDYDVYSQYIPSACEVAGAILKNHRRRLRQGKKSKTPFVKRLCLKCENQTYRLDRETGLLDLPIRAREHITIQLNISPYHRKYLKDEKLSLGSLTICPDRIIVAFRKDRPLKAPVETVMAFDTNERSMDGIFVSNDDEPLPLRYDTSEVPIIQERHQKRRLRLQQKKAHDRRTMKYLCGREGKREHDRIDDRQRKVALRIVSIAKVRNSVIVLEDLTGMRKKSWSKDLNRRLSSWPRRQLHKFICEYADWLGVTIIFVNPWNTSNDCPICGRRNANSRKDGMFRCECGWECDQHLNASLNIYLKAIASSEEVARAVTGRPDASWHDLMMSPYDLFTGARTEANRMSGMVGG

SEQ ID NO: 61271 - protein, 416 aa, Euryarchaeota sp.
MGSRLVRVNRTLAFALPCRDSQLEWLLREFRLIVNKSIRIAVEGNIRSRTKLARAAYAELSREHAIYKQYIPSAFEVALGALKAYRRRIRKGNGLTGARPYLNRLLLKAENQSYKLDRKTGLIRIPVSGRRGLEFVLPLSRWHRQFLDDREWTLGSLTLIPGKLLLVVRRDAPRPPQAEGSIALDTNEDSLDGVFADANRAMLLSVPLGGVRSVQATHFRRRRRLSQKKSGDVRVLRRLLAREGRRERNRVRQRLHRVTKELICAARVKNAAIVLEDLAFNGIGGRSRRMKRRLSSWPRGEMHRQIDYKAALAGVSVIKVNPAWTSKTCPVCGARRRDRVGKDFVCLVCDWEMDRQHNAALNILKSALTSNEALARAVRFQPGALRHDVVSPLYDLSAREGAREEPSGVESDALRI

SEQ ID NO: 61272 - protein, 412 aa, unknown
  TnpB Polypeptide
VLVRGVAFRLTSGLPPEAMFLLEDFRLVVNEAVRAGLSARASSRNALCKLVYKAFREEHPSMFAQHLVSSFEVAAAILKNHRRRLARCENAKTPFVRRLMMRTENQAYKLDRAKGVIDLPIRAGCHVKLRLVVSRYHRIYLDDPQLTLGSVTLLPDRVIVAFRKEAPRPIVASSVLSLDTNERSLDGILVRGSEDEGLAVPVKASFPEVAVIQMRHHDRSKRLQKKKAHDRRTARTLCRIEGKREHDRIDYRMHQVANAVIEFAEDKRSAIVLEDLKGMKPRKSKDLNRRISLWPRRKLHQIIEYKAAWKGIPVVKVDPRYSSRKCPICGRIPDSRMGTWSEFACECGWHMDRHINASMNLLQTAISKGLKVAGGLRFNPGAFQHDAVRILYEPAMAARSEPNGASPASVVA

SEQ ID NO: 61273 - protein, 575 aa, unknown
  TnpB Polypeptide
MNEAIIETATKNTVESEAEAKDENKGSAFIRTSKILFESNNTNQVKLDELSNFLDLCSNALNFYVIYFARYHQLDKLLFVPAKHKNNKIFASTKQSCSNLTKLNNIFYDLVYDKEKNKYKFNLKLKFYPDEILKANASPSPVNNAETIFAESDDSDDSLDQKFRSILSARTLKSVKTQAMGIIRSWVQQILQSYQFGYFNRDKYKKSHRKNIRKYCDDKRKVVKNLIRGAGKKDSKLNIDKFEFNSVNCQLLRAGIDDSFELSKNSELSFDLLFSLHSMYTKEYSKQNYHDRKNKLHIPLRSHKHFNELKSGIVANTQCKHEEIAKSFLVSKDGIEVRFKLKSISKESQLKSNLVGIDQGQRKLFSAIYVNENLNNKDINCCYLTEENLQEQLHNHTYNEVCDKIAIRQKGSKGFKRAQEHRKNLINQAVNILAQIFNFEDDVAEIRLEKLRRLGEGKKKSRKLQSFNYADLRHKIERKCQETNVRLIETSNAYRSQRCSLCGFVHKKNRLNGGEEFKCLICGYTADADINSAKNQVANLPPIYVNRQNRNKSSRPNHTTGFYWLCESNGTGEDR

SEQ ID NO: 61274 - protein, 572 aa, unknown
  TnpB Polypeptide
MTFIRTSKILFGSFGSNGSNGINQRKLNELASFIDLCNIALNFYLVNFIECYELDKLLTIKGGTKKFTNKVIFSEEPCSKLTILNDIFYELSKKDSDDKKETKYFFKRKLKFYPSGIGDGTDLRRIKVVEKKLEFNEQSPLSARTLKSVENQAFAIIKSWVKQILQSYQFGFLNYRGLTLVKDVDVDQVYKKSHRRNLIKRCRQKCKLVKSIKNGKYQLIIDKFEFNSNNCKLLRRDSAAVVDEETFGSFELSDKSPFDSLFVLSSMYKRNSKILENNKLSFPLKLHSHKHFNNLKNGIVANTKCKTEEAGLAKSFLVSKNGIEVRFKLSSIAKEAEFKFKKVGIDQGQRKLFSAVLSQEPTGPTEPVGSSDSLEPMGSLESSFYCYLSETDLQDQLHKHAYNKVCDKIARRQKGSKGFKRAQDHRKNLINQAVNILAEIFNFEDDVAEVRLEKLRRLGEGKKKSRKLQAFNYADLRYKLERKCIETNVELTETSNAYRSQRCSLCGFVHKKNRINGGEEFACIKCGFALDADFNSAINQIAELQPLYRKSSLPNKTTGFYWLDKTQASVVA

SEQ ID NO: 61275 - protein, 431 aa, unknown
  TnpB Polypeptide
MVACAHVVSHQRGILLGMQLRYRYRLEPTAEQRQALARAFGCARVVYNDALRLREDTHMAGRPFIPDGEVLRLVTTQAKRTPERAWLAEVSAVVLQQSVADLHRAYRNYFRELRDLKAERAMRNPKAKLRVRKPRFKSKRGEQAARFTANSRFRILANGRLSLPKVGDLAVRWSRPLPAPPSSVTVTLDCSGRYHASFVVEVARNPLAAVEREVGVDLGLHVLAALSDGTTVPNPRWLRQAERALRRAQRTLSRRQQGSTNWHKARRKVARRHARVTDARRDFHHQLSTRLIRDNQVVYLENLNVAALGRSKLAKSLHDVGWGQFTAMLAYKADLYGRMVVRIDRWCPSSQQCSACGAKTGPKGQAGLKVRAWTCSVCAAAHDRDVNAARNILAAGRAVTACGGYVRPGLALAVAATPSGTEAGTPPGTAA

SEQ ID NO: 61276 - protein, 413 aa, Lactobacillus sp.
MAQLEYHYGLKVRIYPSDHQKKLIKLNSDASRFVYNEMVAIGKELWQLKQVKLPIDTVQDRIKQLELRQNAKQLSNHFQFLEDKRIDSLAKANAIQNYRKAWKAFRKVHSTGVPKFHRKSYAWGYQTNCQYIQQKTTQLTNGTVCFEDGKHILVPKLGRLRIKGSHKRLLNRKAETRIGTVTITKDAADRFFLSMQLGSDTPFMTKPAKTNRQTGIDLNTENFLTTSDGKVVANPRYYRTIKGRLAKEQRILSRRARRAKKEHRPLRNSKNYQKQRLVVAKIHAKVLDRRKNFLHNVSTTLIKNHDLVVAEELRSKNLLKNHALAMSIADVGWRTFLGMLTYKADLYGRQFITVNPKNTTQTCHHCDFVMGTEGTDKLTLADREWMCPKCQTHHVRDHNAAQNILIKGVAKLA

SEQ ID NO: 61277 - protein, 366 aa, Tychonema sp.
MFAVKRALKLNNNEATLMARHAGFRRVVFNFGLSLRTQMYSEGKFTDSKVINEVKKVLTNYIKKQPEFGWMNQLSSRVYQNALIDLKDAFSRYRSVQAGYPRFASRRDGQSFRVDSSNGKVLLSAGNTIKIPTLGTFRLYEALECGYVSQTFTISKEGSRWFVSFCVDAERLPVQQSQASVGIDVGIKSFATLSNQQVFDAPKPLKQAKTKLAKLQRQASKQVKGSQNQRKTYDMISLLHARIARIRLDFLHKLTTYLAKNFKLIKIENLNVQGMMANHKLAGAISDLGFYEFKRQLDYKCQMYGASLVLVDQWFPSTKTCSNCGHKKDMPLSVRTFDCPACGRSLDRDLNASLNILNWEPKAIGG

SEQ ID NO: 61278 - protein, 547 aa, Boseongicola sp.
LRDARGSPRKPSGAGPREGDINDLSGHPEGIAGSGSLSIPTPSSAPACPAPGRSHPLTPRSDSCAIDVPTATLSVTLDPESIASDDALSPYWNGRCAEMQSKWWLPHRTMSPGQSACPPGMSSNFREEASDFWKRTIFPTSSTCDASLRISLPSATPTTASVLVKGTRKIRAYPKNPDLLHEMVRQQRRAYNLAIACFREADTGLVDPKGPDLKQTALRATIRDYVRSEVHERGGTFRSADCDEAVNAACRARDAVIRRRSRGGRCRLSFRSIKDMRQRIAVQKLSGAFVAQNFGLAEPMPDEAWKKLTTIVLERGQWFICAQLHMVTVGQDEIQVRSAVALDPGVRSFVTAYAVNHAASYGDGFYAERVFPLLLQLDRLVGQRAKARCGQWKRHFQKRIDRLAIRVRNLVDDLHRRVAYDLVQSFDVILLPSFETKEMSAKEDRKIRTRTVRSMLGLAHYRFRRKLEWTCRKYGKRLVICNEAYTSRTRSWDGFVNENLGGAKTVSDGSIVVDRDMNGARGIMLRALYGNLGRFRAAGADVALVAE

SEQ ID NO: 61279 - protein, 424 aa, Methanomicrobiales sp.
MKAGFKSSDEKKRKIKETLQLTREKRKSQSVKVYALKIDESHLNIPQKLWIEKLFLEAKWFFNYAIGRDDLFSLDLKLKNVLVKNKEGNDEWRKLEYLSSQMKLGLHSRIIDSIKGLSVFKKKGFQVGRIKHTKNIDSIPLPQFKNTWNIQNGRIRIQGLKKTLPVSGLDQIPENAEFANAVLFKKASGYYIHVTTYLPKETRIHTGKEVGLDFGIKDNITTSDGEKFNIKIPESEKLKHLQKRFSKKAKGSKQRRKVNLKVQKEYEKIGNQKKDKVNKIVSHLVKNYDTIYMQDEMIKNWHSGLFGKQVQHSALGAIKARLKNLESVRIVSRSFPTTKMCYNCGLINKISLSQRTYKCSCGLEEDRDIKAAKTILKVGRLKFHSTERSLTPPEEMTSTQIGSNIDLSKLIPLKEEAVKSLVSR

SEQ ID NO: 61280 - protein, 400 aa, Methanogenium sp.
MEKWMIVSYKYRAYPGSVAETRLNTALDTCRWLYNKLLEECNEARACGTSLKNQETQARIVSLKDENPALKDVYSKVLQMVNYTLWSNITALSQSKKNGLKIGKLRFKSAFRYRTLNYNQSGFKIDREHNTISFSKIGAVRVRMHRPYIGKVKGILITRLGDKWYVTIQAEHEVSEPKICGRSVGLDVGLNSFVTDSDGRVIENPPRFYEHSLDRIKKLQQSVSRKKRFSKNWKKAKSRLNKAYEHIFNQKNDFLHKLSRQYVNTYAAVCVEHLDIKGLKEKGNHKGLHRSIHSVSWGKFFSYLSYKAESAGTKLVTVNPRNTSQMCSNCGKIVKKTLSVRVHECPDCGFVADRDYNAAVNIHRIGMEQPFEPVETMPLHHVSVMQVLSMKQEATPFRAW

SEQ ID NO: 61281 - protein, 425 aa, Escherichia sp.
  misc_feature (55)..(55): Xaa can be any naturally occurring amino acid
  misc_feature (72)..(72): Xaa can be any naturally occurring amino acid
  misc_feature (256)..(256): Xaa can be any naturally occurring amino acid
VKRRQAFKFQLRPGGQQEREMRRFAGACRFVFNRALALQNENHEAGNKYIPYGKXQQSLKDLERAYKNFFQXRAAFPRFKKRGQNDAFRYPQGVKLDQENSRIFLPKLGWMRYRNSRQVTGVVKNVTVSQSCGKWYISIQTESEVSTPVHPSASMVGLDAGVAKLATLSDGTVFEPVNSFQKNQKTLARLQRQLSRKVKFSNNWQKQKRKIQRLHSRIANIRRDYLHKVTTTVSKNHAMIVIEEVKFSNNWQKQKXKIQRLHSRIANIRRDYLHKVTTTVSKNHAMIVIEDLKVSNMSKSAAGTVSQPGRNVRAKSGLNRTILDQGWYEMRRQLEYKQLWSGGQVLAVPPAYTSQRCACCGHTAKENRLSQSKFRCQVCGYTANADVNGARNILAAGHAVLACGEMVQSGRSLKQEPTEIIQATA

SEQ ID NO: 61282 - protein, 229 aa, Escherichia sp.
  misc_feature (35)..(35): Xaa can be any naturally occurring amino acid
  misc_feature (52)..(52): Xaa can be any naturally occurring amino acid
MRRFAGACRFVFNRALALQNENHEAGNKYIPYGKXQQSLKDLERAYKNFFQXRAAFPRFKKRGQNDAFRYPQGVKLDQENSRIFLPKLGWMRYRNSRQVTGVVKNVTVSQSCGKWYISIQTESEVSTPVHPSASMVGLDAGVAKLATLSDGTVFEPVNSFQKNQKTLARLQRQLSRKVKFSNNWQKQKRKIQRLHSRIANIRRDYLHKVTTTVSKNHAMIVIEEVKFSN

SEQ ID NO: 61283 - protein, 408 aa, Mycobacterium sp.
MARFEIPQGWTAQAYRFALDPTPTQLRALASHAGAARFAHNHMLALVKAVMDQRAAERSYGISESALTPVLGWSLPALRKVWNQRKTGYAPWWAENSKEAYNTGLDGLARGLDAWSSSRHGQRAGGVVGFPRFRSARTPKAVRFTTGTIRIEADRRHVTLPRLGAIRTHESTRKLARRIEAGSARILQRRAARQHGRYDWQIRTRQQPKKRWRATQARIGRVHAHAAAVRRDVLHKATTRLAQQHDVVVVETLNAGGMRSAGGARKRGLNRALADAAVAEIRRMLGYKSRWYGCHLVEADRFFPSSKTCTACGRRKPNLTLADRVFACDGCGVRIDGDLGAAINLARLGVPTQLGEQSPAGSGPVAGRGATHETEPAPAGDAAGEEASTPHHHQADQTGTASPQGEAA

SEQ ID NO: 61284 - protein, 397 aa, Mycobacterium sp.
MVIAIAAAAQSGRRGKEQRAELAEIEALIAVGKVLSTRIVRTVINGRDTYRMQLVCDGSPTRRHPVGDGRVSFDLGPSQIAVAIERSDGAWTGWVEPLADRIRLNMVRLRRGQRHVDRQHRAGSPGCFNPDGTHKTGRCHWQQRSRAAKQAATVVAEQHRRLAEHRKTLHGGLANRLLAHGADVVCEKLNYVSWQKNFPRSVRDRAPGLLVEVMRRKAESAGGDRLYEFNPKTTALSQTCLCGNRKKKPLFQRVHRCACGIKEDRDLFSAFLGLHVRQGADGLDRLDLEAANHGWLIHRHDVDGRRGPAVAVSKRRGRRCPSSRRSVARIKARRALQRQSRSARTFPAGEPTALPAQQGHSETAHHHKESVHLRCAEDVEQKRSTFAVWGREKHQNC

SEQ ID NO: 61285 - protein, 438 aa, unknown
  TnpB Polypeptide
MGSGVFEAVKVALDPSPAQERRLLSHAGAARFAYNATLARVKAAIDAGEIIDWSYYSLLRWWNANKDSLAVGEDGEPWWKKNSKESYARALESLAKGLSNWSKSRRGDRKGRRVGFPKFKAKGRTAPRFTYGTGCFGLVKGDPKALKLPRIGRVHCMEDVAKRVGGAKVLRMTISQRAGSWYASLTVEREDKPVANPPKGGAVGVDLGVKHLATLSDGAVVENPRYLKKSERKLKKAQQALSRKVKGSNRRAKAKAKVARLHAHVANQRSDALHKLTAWLASKYSDISIEDLHVAGMVKNRHLAKHIADAAFGEFRRQLEYKTARTDARLHVVSRWYGSSKTCSGCGSVKAKLSLSERTYTCEDCCLSMDRDLNAAINIEVAGSAPETLNARGGTVSRNRPSGCVTLDPVKCEPSVRHSGAVSLGADSQKAVLQTASR

SEQ ID NO: 61286 - protein, 277 aa, unknown
  TnpB Polypeptide
VYETTLSQRVHSLWNSVRASQRQVRDLRKKAATLLHDRQARMAALDEAQLHREAASRKKRELAILAAQEIAFLSHVWGNAVVAVEDLSWVVNTMQNGRWNRGAFVQWLTHYVSQNGGWVVAVNSSNTSQLCHVCGSKVTHPTHEVSVCATHGVMDRDVNAAVNIAARAVPKVEKARRTRAKNRKLRPQVALRTPPARDSLKYPGRDRTKSAPTPRRKNHRRTAREVILPVCPARAQTYCLEARVLADQDTHVTLETNVAVLKQDTGATCEHKLRSPI

SEQ ID NO: 61287 - protein, 313 aa, unknown
  TnpB Polypeptide
LVVAARRKAGEALKSVQERKKQERSVSCPQSALCPVRYDARSYWVRLQDGCASLTTTQGRVRVTFRLCGYYTRYANWKPRSADLCFRDGAFYLHVVMEADAPEPVCEGVLGVDLGIVELATDSEGNSYSGEAVKAVRCRLKRLRSLLQKRGTKSAKRHLKKIRAKQSRFVKNTNHVVSKSLVRTAVQSRKALALEDLRCLRDRAETVSREMRWLLGNWAFLQLRQFIAYKAEAAGVPVVLVDPRNSSRTCSVCGYCAKANRKSQSQFHCQQCGFEANADFNAARNLKARGESSDALLCRLAGHASNQVQAPAL

SEQ ID NO: 61288 - protein, 402 aa, unknown
  TnpB Polypeptide
MLVLEFKAKGKTTQYSAIDESIRTAQFVRNKAIRYWMDNRGVGQKELYRLSKALREEFPFAKALNSSACQAAIERAYSSIARFYDNCKKSIPGKKGYPTFRKNCRSVEYKTSGWKLSETRKQITFTDKKGIGKLKLKGTWDLNFYQLEQIKRVRLVRRADGYYVQFLVDAQSKEVLKPTGKTIGLDVGLKEFYTDSNGHTEPNPKFYRTGEKAVKFRQRRVSRKNKGSANRRKAINQLGRVHLKISRQREEHAKRVARCVIQSNDLVAYEDLRIKNLVKNHCLAKSINDAGWYQFRRWLEYFGIKFGRITVAVNPAYTSQACSSCGSLIEKSLSTRTNACECGFVLDRDWNAAINILELALSTTGHVGTWVVDPNASGDSTSTQVGAILLKQVGSANEESPL

SEQ ID NO: 61289 - protein, 317 aa, Chloroflexi sp.
MYDCLKVLQAFRFELDPNRAQRVALAKHVGVARFAYNWGLQRCLEALTQGQPLPTAVQLHKEWNRWKRQHALWWQEVSKCAPQEALRDLEKAFRNWREGRAGRPRFKRKKSLEDNKARLTGSIRVFPRQVQLPRLGKVRTKERTDRLLTLLTAQKARILSATIAREADRWFVSLTCVVERPDPPPRQGKPVGVDLGLQAFLVLSDGTRVDAPQPLRRALRLLRRRSQQLSRKRKGSRNAARAALRLARLHRRVRNIRRDFLHKTTTWLAKTKPVIVVEDLGVRGMMRNGHLSRSVAERAGAFSGGCWRTRAAGRGPG

SEQ ID NO: 61290 - protein, 340 aa, Exiguobacterium sp.
GCARFIYNKLLEDRIAIHEEAKAGNGPKRKPPTPASYKPLFPFLCEADSLALANAKLHLDAAFAKFFAGTAGFPVFKSRRKSRASYTTNNQHGTIRIEGDRVRLPKVGFIQFTQHRGFDGAIRSATVSMTKTGKFFVSLLVEQSDEPWVPAEHKIGIDLGLGHFAVMTNDAMVTEKVANPRNLREAEERLKRAQRALSRKKPGSRNREKARLLLAKKHEKVANRRRDFLHKLSRRIVDENQVVVVETLKPREMMQDHRLAKSIGDAGWGEFVRQLEYKARFYGRTLIKADPWFASTQVCSACGENGGKKDLHVREWTCAACGAHRDRDVNASLNLLSLAD

SEQ ID NO: 61291 - protein, 366 aa, unknown
  TnpB Polypeptide
MKQTVLVKLAPTPEQHASLLRTLEAFNAACNAVAEVAFAHHLANKIALQKLVYYDIRQQFGVSAQMAIRAIAKVAEAYKRDKKIKPSFRPHGAMVYDERICNFPTADRVSLLTLDGRVIVPFRFGVYAEGMLQRRRGQCDLLYRRSMDTFFLAVTVDAPEPTPDDVSDYVGVDLGIITLAATSDGEFLNRSTGPKHAHVNAVRARFSRFRQKLQKKGTTSSKRLLQKRSGRERRFARDVNHCLSKAIVQAAKGTRRGIALEDLKNIRSRVNGSKRQRRVLHRWAFGQLRAFIAYKAALAGVPVAYVNPVYTSQTCSRCGHCEKANRVSQARFLCTSCGFSAHADVNAADNIRRAAVILPDAAPLAG

SEQ ID NO: 61292 - protein, 419 aa, Oscillatoriales sp.
MLLSFKTALIPNNKQQTSFKKACGVARHAYNWANAHIKEVLELRKDDKTIKIPSAIDLHKKLIAEVKSVNDWYYETNKNVPQKALADLRQAWDRCFKKVSKQPRFKKKGHRDSFYLESGTKAKPMIKNDGKRVKLPSIGWVKLAEPLPVTAIHNCVISRQADRWFIAIKYEIEKPYVDADRPIVGVDIGIKELAVCSHGKVFSNPQAYRRLSKRLKRSQRRVSKRVKGSKNRAKAVKKLSKLHARVSNIRKDAIHKLTNYLAKNHSEIKIEDLSVKSFLKNHKLAGAIADCGMYEFRRQLEYKTEKFSSKLTLVDRMFPSSQICSNCGKHRRKMPLKNRVYVCPECGHTEDRDLNAARNIERWFEGIFVPSRSDLAVSSTVSACGVDKPLKSHLETTMNQEVNTKISNVQLSLDFGNFG

SEQ ID NO: 61293 - protein, 533 aa, Clostridium sp.
VSKEIKSVFLYGYPAKDKLEELQKLQNIYTKQINIFIEDLAYNKEYYIDILNNKKKYSNIRSYEKLYRNKIIGSAYSQNCIDRAVTELHSHFIKIRNAMYGESINDKTNLMFVSSLALFSQCLLNKTIEDCVALIEKLELVELSNKKIDTYKVEFYKSILNTLKTTDRIILSESMLDVKQCFFDELNSRKIPYVINNTVQLDARLFNIVKSNNNISEPYVIQVKGLKIGHRISVPINTSSNSLRRMNQYKTYSPNIKVINNKIMVLLPFKKKVELSKITEYKGVDVGITTLLSVSDGRLIGSFSEMQTKYDSELLPKLKYRSNLRNLMRKYRKLIKSKDITEDKKGILRLKICHINTMLQKRGTLDGLRRGYNSKTKELVNKAVNEYVKNTSINTLTIVEDINLIINDDIAYKNRKFSNWCRGLLLRKLEETLSWSGKQLAKVDPAYTSQLCPRCSLISKNNRHGKRFKCIGCGHENDADVNAAENIKNRYFNEDIRSICETYEYNRNLRHKAIKEYYKIINNNFNISIVINC

SEQ ID NO: 61294 - protein, 422 aa, Kibdelosporangium sp.
MLVGRKYRLAFTPEQAGLAETIGGICRSVWNTGLEYRRRGAWINYVEQAGQLADAKTEHDWLKQAPAHVLQQTLMDLDRTCRQHGTWKVRWRSARGWSPSFRFPDGKRISVERVGRRWGRAKLPKLGWVRFRWSRCLAGAVRSATVSWDGRHWFISFLVDDGVTTPEQHARTTVVGVDRGVTVAVACSDGWMRDREFRTPGEQRRYLALQKKLARQLRGSANREKTVSSMRRIKRRESDRRNDFVAWTASQLATRYSMVVIEKLNTKGMTRSARGTVELPGSRVSQKAGLNRAILDKGWHAFELALRNVARRTSCRVVTVPAPFTSQRCSECCVVDPESRESQAGFRCVACGHCENADVNAAKNVLADGLSVFACGDLGTTRSMKQEPGGIPRGSTTPIRNVSRLDSAASGRGRTSTINPVG

SEQ ID NO: 61295 - protein, 399 aa, Clostridium sp.
MKKLKRSYKIEINPTQEQKTKIHQTIGVSRFVYNFYIARNKEIYEREGKFVSGMDFSKWLNNKYIPNNQEMKWIKEVSSKATKQAIMNGDKAFRDFFKKAKGFPRFKKKKNQDVKAYFPKNNKTDWTLERHKVKIPTLGWVRLKEFGYIPVNSIVKSGTVSQKADRYYVSILVEETAIKISNGNTGIEIFNHNNEGVGIDLGIKEFVICSNGNKFKNINKISTVKKVEKKLKREQRKLSRKYESLKIRNKKEKGGNVTSQNIQKQVVKVQKLHQRLANIRTDYINKIVSSIIKQKPSYITIEDLNIKGMMKNKHLSKAIASQKFFEFKTKLTVKCKENHIELRIVDRFYPSSKTCSQCGKVKKDLKLSDRIYKCDCGFTIDRDLNASINLKNAKEYKIA

SEQ ID NO: 61296 - protein, 430 aa, Moorea sp.
MDSLKPIEGLDAPIIGKFLKYLHNIIAHVSYNLAMLTMTYEYKLEPTAEQIESIEQTLDICRSVWNFALRQRKDWCASRKSPINACSIQSEYIISADEPFPNYHKQAKQLTQAKKLYPHLKTVHSQVLQQTLRTLDRAWDDMKARGFGWPRFKNKYRMRSFVFPQLGKDPIRDDGIKFPKLGWVKWRQSRPIPFGFQVKQARIVRKASGYFVMLSLQLNVNVSSPMPHGHPRGLDLGFDTDGFNFRGNLGNRVLKFVATSDGEEIKRPRFLITLQRKLKLLQRRLKNKQKGSNNRYKLNQKIARLHQRISDTRKDWHFKLAHHLCDGAGMIFVVGEACPKAHTGKKTLDIRFHHCDECGYRTTRDVAASQVLRNRGLNAVGQTVVENVCGLEATGSIGHDTLVGTGRSRKPNSRELGIPSLKVTEHREVA

SEQ ID NO: 61297 - protein, 382 aa, Chloroflexi sp.
MLIGRRYRLKLDFGQAAYAERTAGICRAVWNAALDQRRAAAQLNRGRTEDRAVWPSFASQCRELAQAKRTEPWLGEAPSHCLQQTLRDLDKACRQHGVWRVRWRGKRRWEPSFRFPDATQIGEARRLGRHLGAVRLPKLGNVRFRWSRPLAGTVRNVTVQRDGRHWHITFCVENHLAESAPNGQPPVGIDRGVVIPVAASDGQCFEGVGMRPGEQRRLGHLQRRLAHQRKGSNRRRRTVRAIGRVYERVRNRRADFCHQTAHTLTTEHGLVVVEDLRVKHMTASAKGTVVEWHGRKNGCGIIAVPAAYTSQTCSVCGHVAAESRESQARFCCQACGHQAKADVNAAQNILALGLRASGRGGVGVGPPMKRQPPEREVARAAD

SEQ ID NO: 61298 - protein, 405 aa, unknown
  TnpB Polypeptide
VNDNYANIIGHMCYAAYKLWNVCNYERIHHNELNLPVEYPDWYYQKAAHKNDLWFKQLPSQTAQEVCKLLDKSWKSFYVLKHTGGIINPRPPKFKHEAIAVTYMQNGITHTSDTVRLTLSKGLKRYIADEYSINENYLFLKNRIFKDIGIIKQLKIYPPEHNKCTIIVSYEVPDVIPLPDNGKYLSIDIGIHNLLTCYASDSQETFIIGRKYPSICNYYYKEIARVQSQWSLQQSRKGVKYPKISKHVQKLYERKNNAVSDYLHKITRYIVNYCISNDIRTVIIGDITNIRKDKDLSNVTNQKLHSLPFKRLYQMLEYKLKLAGIRLIKQNEAYSSQTSPLADKVCRQNADKKKRVYRGLFIDGNNIWNADCVGAYNILRLYLKNNATELNPYGIKVPYIVKVAV

SEQ ID NO: 61299 - protein, 431 aa, Escherichia sp.
  misc_feature (64)..(64): Xaa can be any naturally occurring amino acid
  misc_feature (292)..(292): Xaa can be any naturally occurring amino acid
VKRLQAFKFQLRPGGQQEREMRRFAGACRFVFNRALALQNENHEAGNKYIPYGKMASWLVEWKXLERAYKNFFRKRAAFPRFKKRGQNDAFRYPQGVKLDQENSRIFLPKLGWMRYLNSRQVTGVVKNVTVSQSCGKWYISIQTESEVSTPVHPSASMVGLDAGVAKLATLSDGTVFEPVNSFQKNQKKLARLQRQLSRKVKFSNNWQKQKRKIQRLHSCTANIRRDYLHKVTTTVSKNHAMIVIEDLKVSNMSKSAAGTVSQPGRNVRAKSGLNRSILDQGWYEMRRQLEXIVIEDLKVSNMSKSAAGTVSQPGRNVRAKSGLNRSILDQGWYEMRRQLEYKQLWRGGQVLAVPPAYTSQRCACCGHTAKENRLSQSKFRCQACGYTANADVNGARNILAAGHAVLACGEMVQSGRPLKQEPTEMIQATA

SEQ ID NO: 61300 - protein, 291 aa, Planktothrix sp.
KTEADYRTMTFPTASNNWIKLIRKNWIYIRLPKLGIVKVRMHRPIPNGFVVKQISVTRKADGWFIQLILEDISVPQFTPDQVIPNWDNSIGLDAVLHEDVYLATSEGEKFPSLKPLRKNQFKLDRISIKRNKRKRGSKSRRKLAKKEARQHQKIARSRKDFHYKTAHKLARSGAKFFFHEDLNLKGLTNRNQTKQDEDGKYLPNGQSAKSGLNKSWQDAAFGQFFTTLDYIAGKAGAVVISQKPAYTSMVLSYRNEIIFTDCSIRDYWDEQNSLIVDRDINAAINLKRLGP

SEQ ID NO: 61301 - protein, 724 aa, unknown
  TnpB Polypeptide
MPSTTITRTFSLIPISTAKKAIYKKMQDALVKFRDLENIFIKRLIDAFHKGDLTMQDFSGTSTTHIKSRIYNHLELNKVKADQWKTLQLKERINRCAIQHPYHAVRNWLIRTENLSQILVELIELFHSDRNLIAQFLKGKRIPKPVVRRLFEALARDPFGESQSLTYFHITNMIGQLRNIVLSETQLESLLKDRLHEIREDTPLIERFLMSCLHSFTKTKKRKDIALMPHELSQYFLDLYFRKIKWLSTRIAKKSMTIEEFHSFTQVRDKELDAKKRKITARLSHFSLDNLNTLSSRAFHAMITELVSEPNIFLPNHLFKPYFRRINVDIVNPTYEDFLKFFQVRLRYKIKERVKELFLTDSITTFFLSELEKMRAEIYSVVSIPHIKKLALPIQNLKETQVYKSDLEHLTIELSFVSREFHKFQIHDTKGRIKELLCNGAEEHPPVIRLKRGKLYFHLPFEVQKKSLSKQSHDGAHPHIEIGVDLGLKHFAVLSVMDKSSPQDVKEIARYFLGQKTLFDMNFNISTGRFEKRKRFDNLLTSKQSNVKRKLIHIRSEIRTIQHKLHEYQNRLLERAFVQFQKKRKNNLLEVTLGVLWDRIHHINLEIVRLLNHTILQIAQYHKASVIKCENLKWARHSKRKDIGTFLAFWQTHWFYAQIQDAVKLQAYLHNIHFKQVKAGGTSQICSHCGNMGQREGKKFYCSHCKSHLDSDLNAARNIALAET

SEQ ID NO: 61302 - protein, 387 aa, unknown
  TnpB Polypeptide
MNIVKLARTIKLKLDVPVEAINPTIEAYTTAFNLVCQAGWNDGDSNGVSLHNKTYSATRKYLPSQLAVSARMKATEAVKAVKTRIKKKQKASCPQSKQTSIRYDARSYNVWFDRGELSLLTTGGRIKVPFSVPEHFRQYLTWKRCSAELFVRKNKVFLNVVFSKDVSDPEFTGKVIGIDRGIKKLAVTSENKFFGGGKIKKVSKRYERIRSALQSRGSKSAKRHLRKISRKENRFITDTNHVITKRIVESIDSGDVIALEKLTGIRQNARLRKKQRKDLHKWSFFQFEQFLTYKANARGIGIAYVDARYTSQKCSACGYISRSNRQSQALFRCKHCGFSLNADVNASRNIRQNHLDAICSPGRAAVNPPIVGLLRIAYKPSALADGR

SEQ ID NO: 61303 - protein, 427 aa, Planktothrix sp.
LLNSDTPTTSDKNIIILEGFQKQYVAAMLDVLRVRIYPNKEQETALVKNFGCCRFVWNHYLEKTNNQYKETGKGLSYCDMAKDLTQLKKLPDYLFLQEATAATLQQSLKNLESAFKNFFQKRARFPQFKSKHKKQSIRYPESCSIKGNGLKLPKLGIVKAKFPKIIGDKIKSVTVSKTITDKYFAAILFETNNLIPNKTGKISGIDLGLKSLVTVFDGETCTKVDPIKPTRKYAKRLKWKQRVLSRKTKGSNNRKKQVKRVAKVHEKIANTRVDFLHKLSRKLVDENQVIVVENLCIKGLARTKLAKSVLDAGFGMLINFLSYKLEREGGKLVEVDRFFPSTKLCNCCQFKNDSLNLSVRDWICLNCQTHHDRDENAARNIREEGIRILSTNTAGHAGIKACGEGVRLVNACIKKHSFVKQESPVTT

SEQ ID NO: 61304 - protein, 389 aa, Planktothrix sp.
MEKAYSYRFYPTPEQESLLRRTLGCVRLVYNKALHERTQAWYERQERVGYAQTSSMLTNWKKQEDLDFLNEVSSVPLQQGLRHLQTAFTNFFSGRTQHPKFKKKHQGGSAEFTKSAFKYKNGEIYLAKCLEPLPIRWSRQIPKGCEPSTVTVRWHPCRRWHISIRFDEAIKPLAITDKSIGIDLGISSLIVTSDGQKIANPKPYKKHYRRLRRAQKSLSRKQKGSKNREKARIKAAKIHAQISDSRKDHLHKLTTQLVRENQRIVVEDLAVKNMVKNRKLAQAISDVSWGEITRQLAYKCRWYGRTYIEIDRWFPSSKRCSNCGHIVEKMPLSVREWECYKCRTHHDRDINASKNVLAAGLAVSVCGASVRPEQSKSVKATAMKQKPKL

SEQ ID NO: 61305 - protein, 501 aa, Shigella sp.
  misc_feature (393)..(410): Xaa can be any naturally occurring amino acid
VKRLQAFKFQLRPGGQQEREMRRFAGACRFVFNRALARQNENHEAGNKYIPYGKMASWLVEWKNATETQWLKDAPSQPLQQSLKDLERAYKNFFQNRAAFPRFKKRGQNDVFRYPQGVKLDQENSRIFLPKLGWMRYRNSRQVTGVVKNVTVSQSCGKWYISIQTESEVSTPVHPSASMVGLDAGVAKLATLSDGTVFEPVNSFQKNQKKLARLQRQLSRKVKFSNNWQKQKRKIQRLHSCIANIRRDYLHKVTTTVSKNHAMIVIEDLKVSNMSKSAAGTVSQPGRNVRAKSGLNRSILDQGWYEMRRQLEYKQLWRGGQVLAVPPAYTSQRCACCGHTAKENRLSQSKFRCQVCGYTVNADVNGARNILAAGHAVLACGEMVQSGRPLKQXXXXXXXXXXXXXXXXXXAYKQLWRGGQVLAVPPAYTSQRCAYCGHTAKENRLSQSKFRCQVCGYTANADVNGARNILAAGHAVLACGEMVQSGRPLKQEPTEMIQATA

SEQ ID NO: 61306 - protein, 421 aa, unknown
  TnpB Polypeptide
MYFLVGFMGYVSTRSRLKEMRNLLKAFKTELRLTERQKDKVRRSLGICRFLANQYIARNIWLYRLYQRGVLDEKQRRFVTANDFDKYVNHILKKKFPWIDQCGSKARKKVLVNAEQAFRRFFKGQAHFPRFKRKNQQNVKLYFPKNNKGDWTIWRHKIQIPTIGKVRLKEFGYLPQSVTIKNGHVSYEAGRYYVSVTAEIEETSRYNNDLEASYRPQSDGIGVDLGVKSLAIVSDGRIFENINTSSRARRLEKRLRREQRRLSRKYEMRKKKGGSTATASANIEKKRLSVQRLHQRLANLRRNHENRVIHALVEQKPRFITVEDLNVTGMMKNRHLSKVVAQQRFYSLREKLRRKAEVIGIEFRIADRFYPSSKTCHACGQVHSGLKLKDRVYVCPSCGYTEDRDLNAALNLRDTKNYRIT

SEQ ID NO: 61307 - protein, 712 aa, unknown
  TnpB Polypeptide
MRAVKHKIKPLNVEQKTKFFAVAYAYQFEKNYFSDLFSKFSRKTFKQIDDENIIFNCINNSFISIQNQLVKSQYQSVNNLQARAWKMALKEAYDLHVRTYEAQVALLKDIIYRKIYTFYQDLDITITLLKNTQGTKQEQEQSLKNKSVKSNNVPESSGTETDSTDIEVKQDPLLNFLTYTINYLFYNYSTFKQFEEQFYSKKFTKARIYQRIQPILQDLLDDSKAVKKEVLTQEQAKQLSQLLNQVDYELKQNKDVKNVEFSNIGLTKLLYYYCRCLVRAICKFRRFKIIQTQINPTITLDGESYKLYSKYDEQGTEKKNRWFFDVMSLEKGKRIKGLELTGFHHAKKIMKHKKYANLTLSFDPVEMAYYAHFTFESKAKPKKLKINKKKVKTKAKSHQAYVSKNKSNVLPTATTVGGDFGLTECFTFSDGWVAGRTQRKILKDIADNTKDDVAQIQSNSQKKYFGLEKNNPENKRNHINNSFNHNSERYNINTNYRKRQQRYNRYLENYKHQMVNDIIHHFTTDNEYGQYEKYGIPTCETNEKLSNLTLVFEDLSDAYTNLGRTKDDKRQINLIKGVLTLLEEKIKLYNLPIEIKYVNPAYTSQSCPSCYYVDRKNRKSRHDDFRCLHCGFTANEDVRYRALTEVVQEKFLPSKDDFIAACNIAERLSVLPNSTKLHQSKIKELLMRKHEQAKLKGSCKMFDSSNIECCST

SEQ ID NO: 61308 - protein, 296 aa, Halococcus sp.
VSLSTVNGRAECEFVFPADSPTPYERYIVDDDYEFRMATLQYDDVTDGFYLHLSTRKYDGVDEADSEASTDTEHQTVLGIDLGVNSLAVASTGTFWQGDDYDHWVREFEKRRAKMQQRETQHGHNALRRLGKRERAWRKQYVHTVANEIVTEATETGCDVIVFEKLDDIRDRLPFAEWHHIWAFRRLYEYVSYKAPEHGVEAKRVPPNHTSQRCSRLGCGFTHEDNRNGTEFCCQNCGYTVNADYNAAKNIGLRYARKRRHRLRSSPKSPNGDAPVDVRINGGTLNGTSRQHVAAE

SEQ ID NO: 61309 - protein, 337 aa, Streptomyces sp.
VPALRKVLADTRPASSGIRPLAGSRGLAESGGGRAVAADQSEVDVQLRVVSVRFVGGHNIAFRVQTLEAGPEPRQGPEVGIDAGVNVPRALSNEDHQEHGRPPRLPEGTADRDKWLTEKEKAKLLTLERQAAHQKSFRKKGEKTSRRLQHTYDQIKQLRAKATRRALDWQHQTTTYLACTYGTVVVEQLNILGMTKAPKPKPDPDNEGNYLRNGAKAKAGTNRSITQEAWGRTVMMLTYKLARCGGELVKVPAPYTSQRCSACGFITQAAERPKSCSRARTPSVGGPETPTGTRPGTSCTCIGSATSAWRSRPPEGAVVGRVNPSSLSPKGRRESPS

SEQ ID NO: 61310 - protein, 507 aa, unknown
  TnpB Polypeptide
LPEIPQEGARGRHRLPLRGDRARGRGGTRFRDKGNQGHARPRAHARLSRPPVRHPPGREAHQGQDQPRPARRVPAAEAQAADALDEQLLRLDRRRGDARGRQAVYRGPEERVRAMDKTFEYRIYPSAEQEALLQKTFGCCRWVYNRVLAMRRDEYARTGKSRHINSYITQIPAWKRADAPWLSEVDSMALQQSLRDLDKAFKNFFRAPGKVGFPKFKSKRAGRKSYRTNGVGIIDARHVRLPKLGTVRARVSRPVEGRVLSATVKQVPSGKYYVAICCADVPATDAPAPTVGFLGVDAGIHDIATCSTGERLPNPKNLQRSERRLAREQRRLSRKRKGSANRARQRVRVARAHEKVANRRKDALHKFTTHAVGESQNIAVEDLNVRGMQRNRRLAKAVGDAAMSELARQLEYKCAWSGRGFVRVGRFYPSSKTCSACGYVYRGLTLAERVWDCPACGMRHDRDLNAAVNIAREGRRILEGTAGHAGTAADAANACGEGVRPTAACAV

SEQ ID NO: 61311 - protein, 367 aa, unknown
  TnpB Polypeptide
VYNLALETKNRAYKDYGVNLSAYDLQKQLTELKKDIGWLKEVSVHAMQQSIQNMEKAFNNFFKGAGFPKFKSKHSRKQTFKCPQGSSISIKRNIVKIPKFKEGIKFIDSYPIEGEIRQATVSKTPTGKYFISILCETGVAIPAKKPILQDTAIGVDLGIKTFAVLSNGQEIANPKHLRNSTERLAVLQRRASRKQKGSENRRKANLKVAQLYEKIANKRKDFLHKVSTNLINSHDTICLENLNIVGMVKNKKLSNSISDVSWGEFIRQLNYKAEWKGKNIVRIGRFEPSSKTCNVCGLINKDLKLSHREWTCECGVTHDRDLNAAINIKNIALLGEALSDEPVELPTMVGAVKQEYPKKIGARFDGY

SEQ ID NO: 61312 - protein, 378 aa, Pyrobaculum sp.
MREYRTLLIRRNVEEIPPEQLVKFLEVQQKFREWATQWYKSGFKEPMPTESPLKYFARELKFALRLLLTNGLKNGVWKVPLPFNAQLRVNNERDQSRGVFVDLPKGEIRIRKWGGVIKIRLRKSEIKWILKRLREGAQLKLVFAWVGSRTNLVTFNVALAFARETEPYLPERVLAIDLNALHNGVVWAIVDRERVLRKGIYRPDLGKIGRIQREISSLDSLCAKKGEPYCKKANELKSRLWRLLRQFEDEVAKKLVVSAMRRKCTIVVDVPEDESVRELKEGRYSPDRKIFLNIGRLRRRIRQLAEWYGVPYREDRLYSTACPRCGSKMEELPGRRVRCHCGFEAPRDEVPIMWAIKRFSELVQPPSFSSVLLPIPAL

SEQ ID NO: 61313 - protein, 415 aa, unknown
  TnpB Polypeptide
LKVVRGYKTELDLNNEQRTLCLKHAGASRYAYNWGLARSQKVYKLTGKRPTAIDLHRELNALKPSQFPWMYEVSKCAPQEALRDLEQAYRNFYRKLKLKKIGQWKGKLGFPTWKKRSKAIGSFRLTGSIKVFAKAIQLPRLGRLRLHEKDYLPTDAKVLNATVGEQAGRWFVSIQVEEEQDKPVMTAPSAIGVDLGIKTLATLSDGTTWQNPRALKHAQKKLRRLERQKSRRKKGSKNRTKTRQAIAKVHARIANIRQDATHKLTSHLVKHHAFIAIEDLHVSGMLKNHKLAQAVSDSNFGEMRRQLEYKAEWQGAHIVTVDRFYPSSKTCSGCGYVKAELSLGERTFVCEDCGMVLDRDLNAAMNLKGVAVSSIDTQNACGAASAGYLATGSETCRVEAGTKGDVWALSQMSMF

SEQ ID NO: 61314 - protein, 360 aa, unknown
  TnpB Polypeptide
MKLVVNLKLKPTEDQAILLKTTLETANAACNYISSKAWEAKVFGQYSIHKLTYYDTRERFSLSSQRTVRSIAKVADAYKLGQKIQRKFRKDSAQPYDGAIIRFTKNDVVSIWVLGGRQKIPFIMGDRQRELFSHRKGEVDLMFIRGTFYLAVVCDVDDPELIKTTDVLGVDLGIVNIAADSRGETYSGKAINRIRCTFEHRRRNLQKKQTSSAKRKLKKISGQQARFQKNTNHCISKAIVADAKRTESAIAIEDLSGIRKRVTARRHQRARLSNWGFHQLRAFLTYKAALSGVPLLLVDPHNTSRECPECGHIDKANRKTRDNFVCIKCGLAGPADTIAAQNIRARALVNAPMVAGGSAA

SEQ ID NO: 61315 - protein, 457 aa, Moorea sp.
MYKSIPIKAVFSDEERAFWEFQCRQSNSLFNCAVYYSKQKHYQWLEEQQAFTTYWRGDEFRAGWKTYKCGVKYPEIDKALKMSPHYKAMAAQSAQQTLKTVGEAIKSYNQLVGLYYKGEVDRPRFPRYRKSGGLASVTFPRQALTYKQGLFHPSVSKESKPELLIQITLTPPEFIDPDWVKEVTIRPCYGQLWIDWVIDDGKQPVDTSPELDYSQALGIDHGGDNWLTCVSTLGKSFIIDGKRLKAMNQGYSRLVAKHKAGKSEKYWDSTLDRIQLKRNNQMRDATNKAARFIVNRCLNDGIGNIVIGWNEGQKNRSNMGKKGNQKFVVIPTKRLIERLKQLWPEYGIKLIVTEESYTSKASFLDGDSLPKYGEKPECWKPSGKRVRRGLYQTASGMLINADCNGAGNILRKVTTQPFDLAKVARGSLTVPHRYDLFSNLSKSYRYKGGAGRVYPPA

SEQ ID NO: 61316 - protein, 280 aa, unknown
  TnpB Polypeptide
MKFKKKKAIRICAELASAGICMENSQIKINPTKLGEHSMFRISERNIKKYKDLKIDNNCDLMKIKSEYFIYVAVPVAKEPLKIPETFCGIDPGLRTFMTVYSNHGIYEYNQCDEPRLQLNLKINLLKNRKCLKKKHKKSRVKKCAISKREERRSNLTDELHWTVINDLVRKNDLILYGDIKSHDIVKDGKNKFNNKRFNDTKFYVFKQRLMYKALRSGKKVIPVCERYTTKGCSKCGNVKHDVGSNKTYYCDILECAFVHDRDINSSKNIMMKGMIPITG

SEQ ID NO: 61317 - protein, 362 aa, Lysinibacillus sp.
MAMITYKFKLEPTAEQQKKIVETLHLCRWLYNTCLEQRIQTYKQQKKSISFYTQKKELPLLKKELPIFKTVHSQVLQNVLERLDKAYQAFFKRLAKGGKAGFPRFQGKNRFHSFTYTQSGFQLKKKYLYLSKIGEVRIKQHRQIQGNIKTCAVVHKNGQFYACFSCEVETKKSFKTNQVVGVDMGITHLAITSDGQFFDNPKHLRKSERRLKRRQRSVSKKKKGSNRRKKAVHLLAKCHEHIANQRKDTAHKISRQLVNGYDVIVFEDLNIQGMVKNHKLAKSIVDSAWRQLIQITTYKAENAGKQVIEVNPYHTSQVCSNCGQLVKKTLAERKHRCKCGYQEHRDVNAAKNILKLGLQKIA

SEQ ID NO: 61318 - protein, 408 aa, Burkholderia sp.
MERLQAFKFELMPTGAQARKMRCFAGACRFVYNRALALQKENYAAGGKFIGYVAMAKHLTAWRNSAETPWLADAPVHPSQQMLKDLDRAYTNFFAKRADFPRFKRKGGGDSFRFPDPKQIKLEQDNSRLFLPKLGYIRYRNSRNVLGEVRNVTVSQSSGKWFASIQTKREVEMPLPTAISAIGIDVGISRFATLSDGSHVAAVNSFKKHEKRLAKYQRRMSRKTKFSNNWKKAKARVQRIHSDIANARKDFLHKSTTTISKNHAMVVVEQLQVLNMSKSATGTMEAPGKNVRAKAGLNKSILDQGWREFRRQLEYKTAWSGGMLLAVSAHNTSRTCPCCAHVAKENRKTQARFACVSCGYENHADVVGAINILERGQRSLACAESSPDVRASWQEPTEATQAVLAWAP

SEQ ID NO: 61319 - protein, 366 aa, Brevibacillus sp.
MHRAYKFRLYPNKEQATLINKTIGCTRFVFNHFLAKRKDAYEQEKKTLNYSDCSALLTQLKKEIEWLKEVDSTALQSTLKDLDCSYKKFFKEKKGYPKFKSKKNTKQSYTCKMNIRIEGNRIKLPKLGWVTFAKSREVEGRILSATVRKNPSGKYFVSVLCETEIQPLLLARKSVGIDLGIKDFAILSTGEKIANPKILRYYENKLATWQKKLSRRKKGGQNRERARKQVARLHEKIRNTRSDFLHKLSTKLINENQVICLEDLTVENMVKNHKLAKSIADASWSMFRTMLEYKAEWYGRTISIVGKQFPSSQLCSTPNCGYRNKDVKNLDLRSWICPNCGVQHDRDQNAAINIELEGLRLLSIAN

SEQ ID NO: 61320 - protein, 412 aa, unknown
  TnpB Polypeptide
MYLTIKQRLKLPKEEIAQLKYLCHIAKNLYNEALYLHRHYYIDNGIFLSYVDSYHMLKNSPNYKILNSDISQQLLMDVEDIFKGYDKLLTLKYKGNKWVKRVNLPRYLPKDGYYRLCVGLIRLYPDHFMVPYSVSFIKKYPRIFIKTPPVLKNKIVKEIRIVPKYNATKFEIHYIYEADYKNLQLNKSNALAIDLGVDNLCTCVTNTGKSFIIDGRKLKSINQGYYKEFARLQQISNKQKNTNMTDKMNQISFNRKNKSSDYIYKAVNYIINYCKDNDIGTVVLGYSDTFQCKTNLGTANNQTFVTMPFAQVSKFLSIYTYLNGISYFKQDEAYTSKASFFDKDPLPNYGDTNIPEFSGKRVKRGLYRTKNGYEFNADVNGALNILRKSNVVSLEALYARGEVDTPIRIRIK

SEQ ID NO: 61321 - protein, 403 aa, Planktothrix sp.
VLKAIKVRLYPTPEQELALAKSYGCARWYWNFALKACIEHYKETRKSLKLAVYKGMLPQLKKDYPWLQEDCYSSVLQCVAINLNKAYQNFFEGRAKFPRFKSKHHKQSIQYPQSVTVVNQTLKVPKIGEIPAIFHREITGTIKTVTISKTPTNKYFASILCEVEATELKELGDKIIGIDLGLKDFAIVHDGENVTKYANPKHLKRHQKNLARKQKKLSRKTKGSKSREKFRKIIAKVHEKIANSRQDFLHKLSRKLGNESQVIVVENLNVKGMVKNRKLSKAISDVGWGMFVNFVNYKLQQRSGKLIEIGRFFPSSKTCSCCGYLVDELSLDIREWDCPNCNTHHDRDINAALNIRNEGIRILTEGGGNPVFADGGCVSPPACKSKGHRSVNSEAYTDPIRAV

SEQ ID NO: 61322 - protein, 304 aa, Streptomyces sp.
IPKLGRVRFRWTKDLPVGKRANNDNRITGARLIKDALGWHIAFRVQTLHARPEPHQGAEVGIDAGVNLPLALSDGNHFDHGRPSRLANGTADRDKWLKSEEKVKLLRLEQRAAHRKSFRKPLERTSNRLRKTYDQIKQLRATATRRAVDWQHKATAEIAGQYGTVVVEQLNITNMVTSARGTIENPGKNVAQKAGLNRSISQEAWGRTVTMLTYKLVQRGGALHKVSARNTSLRCSACGIITPGSRKDQATFECENADCGWSGNADHNAARNVLQLYRMGHVLIPAAGRAVARRTRGVKPAAAR

SEQ ID NO: 61323 - protein, 241 aa, Planktothrix sp.
  misc_feature (234)..(234): Xaa can be any naturally occurring amino acid
VLKATKVRLYPTPEQGLALAKSFGCARWYWNFALNACIQHYQETGKSLKLASYKGMLPQLKKEYPWLKEDCYSSVLQCVAINLDRAYKNFFEGRAKFPNFKSKHHKQSIQYPQSVTVNGEYLKVPKIGEIKAIFHREVTGKIKTVTISKTSTDKYFASILCEVESNRVKELSNKVIGIDLGLKDFAIVHNGETVTKYANPKHLYRHQKNLAQKQKKLSRKTKACTERSRSGSKXYSTTHYS

SEQ ID NO: 61324 - protein, 421 aa, Planktothrix sp.
MLDYIKELKTTMFQAYKYRIYPTTEQQIAASKSFGCCRWYWNYALNLCQETYKTTGKGLSRTAIQGLLPQLKKEYLWLTDAYSQCLQVVALNLSTAYKNFFDKRARLPRFKSKHGRQSISYPQNVKFEGDYLKLPGKIGLVYCVRHREFEGTIKTVTISKNPDGKYYASVLVDDGKEQPTTSTNGKAIGIDLGLTHFAITSDGDKYSNPQHFTKHEHNLKRKQQKLSRKQKACTERSRSGSLSRQKARLKVAKVHAKISRCREDFLHKLSRKIVNENQVIAVEDLGVKNLVRNHKLAKAISDCGWGMFCTMLKYKAEKEGKTYLEVDRFFPSSKTCNVCLNQVGSLPLDIRSWTCEHCQTTHDRDINASINIKNEALRILSLGTSDTANLRGCKSSDEISVSSDAIPVEVGSPHLLVEKCG

SEQ ID NO: 61325 - protein, 447 aa, unknown
  TnpB Polypeptide
MKRTNIVKLVVDKNIHEKLKELAIITAKCWNEVNWLRMQQFKKGKRIDFINTEKEVYKKYKHVLKVSAQQVARKNAEDWRSFFSLIKEKKEGKLPKWFKPRPPDYWRDKGGKYKLRIIIRNDRYKIDEENRIIYLKDFKLALGFKGKFKWHGKQGRLEIIYDEARKSWYAHIAVEVENVADAEDSLRASVDIGIVNLATIYVEDGTWYIFKGGGVLSQYEYYGKKISGVQKVLARHRQNKSRKLKMLYDKRKMFLKHASNSMVRKIMKELREKDVGEVIIGYPKEIVRSHGNKLTVNFWNYSYVIKRFEEIGEELGIKITKVDESYTSKTCSLCGEAHKGGRIKRGLFKCPRIGKVINTDLNGAINILHIPEFLGPGSRGQLPVRNRDNGLETQPVVYRWMNGAGWVNPTSYEVMRMKAVNHKPMIRSKETPRPSGREGGRIYCLQY

SEQ ID NO: 61326 - protein, 359 aa, Deinococcus sp.
MTSHNLRIHRDANTTLDSMIQQGILLPTNEKISGVSGQVYRIADGVDLSALDHFHLRVAEKIIPVNLYALPPEEYAGLLAAAPEFSQYRYAHLATALLRTMTTEQQSQWLKDVASGIEEGLRVDQTPRLLQLPTHPARWQPEGTRLSRAGCGWLLTLTFDDPQVDIIEGLDRSAAGVDVGLHHLTTTAFASGAVHQAPGVVDVSRLSPEQIALPISQREFERHLQLLQHAAARTSFQHLMLTLLSSASVVYLEDLRYDDMAEVFKERSRTLGIRDWMMGWLPQRLHAHNIPLERVRPDLTSRFCSTTHCRGERNGRDFLDGNGRMVDADLNAARNLLQIGLAQRIARELLTKRNIRKGN

SEQ ID NO: 61327 - protein, 404 aa, unknown
  TnpB Polypeptide
VSKNLRLKSFQPEEEYVYLTYSLKNNKKEETKILLENYRVLLQKALDWLWDRTRIERKEVKKGKKAFTKVKVKLPKKKEVYKALRDELEKINKLASHYVDKAISDAYSILESWRRRAEKGKALRKPRLKKVYVRVKSTLRKVDGEEVRITVRPYEYVTFSWSHKWFSRRVEGLELGEPIIKEDKVHLPFRYRLPWSTPLDFLSIDSNLYTLDAYDGEKFVTFSLKELYSLKFGMELKRSRIQSFASKHGRKGKVLLRKYSHRERNRVLDYVHKFVNKLLEMYPVTIFAVEKLNKQSMFQDADDKLSKKVSRTVWRTIHRVLKYKAPLYGSFVKEVNPHLTSKSCPRCGWVSRKVGRTFHCERCGFTLDRQLNASLNIYLRMCGFPHLFLTPSGSRWVGVIPLKG

SEQ ID NO: 61328 - protein, 381 aa, unknown
  TnpB Polypeptide
MNYKTYKYLIKPTALQKEAIKTTLECCTYVFNRFIEEKENGVVHSKLAKEILAEYKRDNEFLNLVDSSALMNTLFKLQDLSDKVYKKKNKSVTSYTTSNLSGRQAIYLIGNEYINLPRLGNVKIVLHRSLPIESIINKATVSIDNTNNYFVCLTIQYQRNNNNTIDINKSIGLDYSSSHLYVDSNGNKVDMEHFTQKHEERLSKLKSALTRCQKNSNNYYEIKNKISRIYKKTVNQRMDFLHKLTTKLANENDLICVEDINMNVIAGRYHLAKNTYDNGYGMFLEMLKYKLEDRGKVLVKIDKYYPSSKKCNCCGYINNNLKLSERVWICPSCGKSHDRDINAALNILNRGKEKFTSIGYLDYAYENRKHTTLNYDPEVSI

SEQ ID NO: 61329 - protein, 478 aa, Methanococcaceae sp.
MKVITRIYVYDDRLKNITPFSMKLAHFRNILIIFIHKLKAYLNYYLTNESLLYSLLADKLNLSNTKDENKIEKLNELLSIIKSDNFLSELLKSMKKVKGEIKNSYAIQSVIRQVCRDFKSYRKSYKEYEKNPNKFNGTPKSPKPKKLKNIDKFTIDLNRNSFKIKNKVLYLKLHNDNKIKVKLPEFALDLSSVRITYYLGFAYVDIVYDKHIKELKPSGEHKAGIDLGVENLATIVSTNNIPSIVIKSSYLKAFNQWYNKSLAILKSEYDTTTDIKVKNNLKRKIMKLHLHRKKWMENMAHQVSKTISIFLHKTGHDTLYIGNNILEAKNGSNLSKKVNQNFVQIPYRLFIDKLRYKLQWLGIELIEVDESYTSKASCISDDINEIQKKSKNNKKVSMSGDRITRSLFKDLKLNKVFHADVNAGFNILKVGLKKNKLFDKLNSAVMSKLCNPIKYKLFEFCDLILSKKATPELSLSGQ

SEQ ID NO: 61330 - protein, 349 aa, unknown
  TnpB Polypeptide
LLLTFKAKHGRNLSQELAKARKIAEFAIKTHSRSSRDVKHIGLKSAIANQILRKYSHNDKARKVSRVVLTVPGQSIKTNKEQRTVRVPCLGLELSYRFRNDFMKVNQIELDDQYAYITVTVPEPETVRTEQFIGVDLNTTGHCAVAANPQTGKVWKLGKSAEHVHKKYREIRRTLQRKGKFRKLKTVRRREKRKVRDLNHKVSNRIIQIATADGCGIKMEDLTGIRSNRRHARTFQYSLNSWSFYQLQLMIEYKARLQGIPVAYVDPANTSKTCSRCGQLGSRNGKGFKCLGCGHVDHADANASFNIGTALAVRMAGRLRADSDACKGSTDTPRWATPVDDGDPRTPRL

SEQ ID NO: 61331 - protein, 393 aa, unknown
  TnpB Polypeptide
LEVKFKDDKRAFSLGDNCTILWNILTYKRRQSFWKHKFTWASKREYNAFKKLIGSATAQQTIRKNDEAWRSFFRQLKLLKQGTLKGVTYANPPGYWKDKQGNRIPRIIIRNDCYTINGQRLKLPLGLKGRVHGKPEWQGKQGTLTLKHDALDGQWNAQQSMVVTRPRFRKNGERAFVDIGVRCIIAGWTQDAKQVIAYSGNPLLADWWYQTSRITQLQRMLPKGQHTSHHIQCLYRLRQRRFHQAVNSIVADYTQRCLNENVSTIVAGDLKHVLDNNNHTAPVNAMLHNFWSNQYILQRLKCTAENHGIRVRTRSERGTSSRCPWCRSKHVQKRKRLFRCLSCGREAHRDVVGALNIGLVSCKERGVINRVMTHPRLIQTRNLQVNLEESPDL

SEQ ID NO: 61332 - protein, 487 aa, unknown
  TnpB Polypeptide
MAKFAGDCYIGRDHEGACREAEEQARNQYVKTDRFTSAYRFRIYPNTKQQRMLLVVLELCRRLYNYAVCQRKDTYKATGRTVHYEEQQNQLPQFKDQRPEYEQAHSQVLQDALRRVERAFTGFLEGRTRYPKYKKHGQCRSITFPQISNENIGSNSIILPKIGRVRMTKHRPIKGKPKTLTITLTKSGEWYTSITTELNPPNNNSNPRIIFNNPIGVDSGLVNYLYLSDGEHVDNPRFISNHAKRIIKAQKELSRKKRKVKRVVNVNGNSTTLKVPGSNWLKAKTILARRWRDYVNAKEDWQWKQANRLVNKHDFIGYENLPIRNMLKNHCLARAIQDAAWAGFWEKVESKAATAASTTTQKVPPQYTTQRCSKCGYKHKVALSERSFMCPNCGHFDDRDHNSSDVVLSDALQLYYKAFEKIVGMDVPEFTPAEIEPLPPNAEKPMMVASSIAETGNKFHTRVDEPGRGITRAEAHGFSNGRTSQPL

SEQ ID NO: 61333 - protein, 361 aa, unknown
  TnpB Polypeptide
VGKEVLNKSQQLAKNRRIKKTMKETVARHRKMVCKTYELKIDKSHLSEETARVLRLLFLEAKWFYNHLIAQGKVWNADYAIKTVLVRNKDKRLEPRELIHLSSQMRQEIIDRAKDNIKGLSVSKKKGCKVGALKFKSRINSIPLKQRGVTYRLKGNRIEIQNVKQPLKVRGIQQIPEGAELTSATLEQRNGDYFIHITTFQPKTHKQFPLKELAVDAGIEKQLTINNGIDVMEGAPITKKIRRLHRELARREETRGKNWLKTNLKLNREYDKITSKRRDIKNKVVSRIISTAKTVHLQGKLPTTEGRGHSMANGLQRTAFPPSPHRNARIRLQGSCPPANWSFLRAGRGLFLLAKAPQWPY

SEQ ID NO: 61334 - protein, 376 aa, unknown
  TnpB Polypeptide
MLKAFKYRIYPTKAQRSKMEETLELCRWTYNETLAYRKNSFEQEGKSISKYETHYLLPEWKKNKPELTEVFSQTLQNVQERVDLAFKAFFRRVKAGEAPGYPRFKGKGWYDSFTYPQLGFKLSSGKLRLSKIGDVKIKLHRPIEGEIKRLTVRRSSTGKWFACFSVEIDDPPKPPWKDGLMAGIDVGLESFATLSNGEKIDNPRFFRSEEKALAIAQRRLSKYEKGTPERRRALKVVQRTHERIANRRYDFAHQVSHNLVERFALIAFEDLSITKMLKNRCLAKSISDAAWRMLVITTSYKAESAGSMVVLVDPRSTSQLCSRCGLKVAKSLSDRVHECPQCGLVMDRDENAAINILRLGLQSLPKARSPALQGGE

SEQ ID NO: 61335 - protein, 535 aa, unknown
  TnpB Polypeptide
VRWEKEGRSQAIKTPSKQRRFFVESYTAGSEKELLTVIYARVSSRNQRPDLNRQIAAISNLYPTAEIISEMVGGGNFKRKNLQPYWKESCKEISQEFLSHTKINWQDLVSTNINGSVSDLTAESWFSTRKTYLNSQKSLKTSSPYSTASVVDYMDSENTKLRSKKIKIYPSSELKKDWNKWLAACRYCFNQAVAYQKENGSIGKRKLRDIVMQSELPEWVKETPCHIRQNAIFDAHQAYSKSQNCKFRSCKAPRQTIKFNNSNYTKGKWYSRLTKGKEFQSSEAIPTSSAYATQIIKTKCGDWFAVFLEEAKPNINNVDGIIAIDPGVRTFLTGFDGRAFVEIGAGDIGKITRLCQHLDLLMSKIGKSKSKRQRQKMRKAAARSRRRIRNLIDECHRQAASWLSKNHSYILLPTFETSQMTKKKKRKIRSKTARQMLTWSHYRFKQVLKNKAELSGCQVIDVTEEFTSKTCTKCGHIHTKLGGNKVFKCPKCGHEINRDFNGALGILRSALRDTSVTFSSDAIVVKGDFVSLCTA

SEQ ID NO: 61336 - protein, 212 aa, unknown
  TnpB Polypeptide
VNNLAVASTGTFWTGNEFDHWRREYEKRRGDLQEHGTRWAHENIQAVGRKEEGRFKQTLHRISNELVAEARAHDCSVIAFEELTDIRERTGASWGHKWAFDRLYEYVEYKATEYGVDVAQVPPESTSRRCSDCGFTHPENRAGEDFECLKCGYENHADYNAAKNVGLRYLRRNQTGDDGGAPVGVRLNSGMLNENGEYESPADVFGSIGSPR

SEQ ID NO: 61337 - protein, 368 aa, unknown
  TnpB Polypeptide
MINDCIRIGIREKSTSMKSLSSKAYRQLSQYDVAVCYRLTAISRAAGILKNYRRSLRKNSQTRVPQAKRLSLVDCYGFRIKGKRLRLTLRAHQHAYIELNAYTLKALGDNFLRSVTLTSESLSVTYSRDVEELRPKGLMGIDSNLDNVTTASSDGEVQRFDLSGTTRIKEAYKEVKSHLRRNDVRIKRTVFRKYGSLQRNRIWWILNNVSASVVKQAKVKELGIVMEEITGIRRLYRKGNGQGRLFRSRLNSWSYHELQREIEYKARWEGIPVVYVTAWGTSAKCSTCGSKTFPNEDRTLSCSKCKTTVDRDVNAARNILAKGALRFGADGFAGEAVKGNETRTPIPGVDAGQLTTEARMWAEESAEP

SEQ ID NO: 61338 - protein, 546 aa, Streptomyces sp.
VGELRSIAPSFVASGPSGVAVRTRLKQLTAGDEEVLCLVGAHLGSLASKDLKARCRDGLSHSGEAWAVRKRELTPFSSSRWAGSITKATHDQWALARRCQSAHIQNLEAGVRTIEDRLSLPIGQKGTKKAPGGYRSRREWHAKSRRLRVLEDRLAAVRADREAGIVHVVRGGKRLARTRQHLEEAQLTESGWRGRWEAERWFCQADGESGKRYGNETIRISPDGEVSIKLPAPLTHLANAPHGRYVLACRVAFAHRGEEWADRVAANRAVAYRIHLDTGRDRWYVTASWQLPPTPTLSIEAALAHGVIGVDMNADHLAAWRLDTHGNPTGSPRRFFYDLTGTAEHRDAQVRHALTRLLHWARTCGVKAIAVEDLDFAAEKTREKHGRRKRFRQLISGMPTGKLRARLASMADQTGIAVIAVDPAYTSRWGAQHWQKPLTSTTSTNRKPTRHDAAAVAIGRRAQGHPIRRRTTPPPPHRSDAVGHRTVQARPVVPGREGTRPRIPGPRTRSVPPGRGANAGNQNAQHRPGRSAEHETWQQDSLPLSL

SEQ ID NO: 61339 - protein, 218 aa, Marinithermofilum sp.
MVEGTGCDFVAECIEAFGGCFSTVFQETESPPPVQEQKASGSVVHVPVVIPNPKHHRKYEKQLIRWQRILSRRRKGSQNRNKARLKVARLYEKIRNGRQDFLHKLSTRLIRENQTVCLEDLQVRNMVKNRRLARGISESAWSEFRSMLEYKARWYGRRIRLVGKTFPSSQLCSQCGFRNKEVKKLNVREWTCPACGIHHDRDLNAAKNILKEGLKPAG

SEQ ID NO: 61340 - protein, 363 aa, unknown
  TnpB Polypeptide
MQKGVKFRLYPSKKQQNLINQTLGCCRLIFNKGLAMRNEAYFNGEKIGYSQTSAMLTSLKKQEDYAFLKLVDSIALQQALRDLDRGFVNMYSKRANRPQYKSKHNNHQSYRTLNQGNNIRIVGKYIKLPKLGYVKIRQSMEIGRINNVTIERTPTGKYFAVLNIEFTPEPRPNKGGLIGIDVGIKEFYSDSNGNVVSNPKYLEKSMCKLAREQRKLCRKQKGSNNRNKQRIKVALVHEKVVNQRNDFLQKQSTILVSENQIICIENLNVKGMIRNHKLAKFIASASWSNFFAMLKYKAAWYGNKVVKVPTMYPSSQTCNCCGYKNPLAKNLSIRNWECPKCHSKHNRDLNASINILNKGLLLA

SEQ ID NO: 61341 - protein, 350 aa, Candidate division WPS-2 bacterium
  misc_feature (335)..(346): Xaa can be any naturally occurring amino acid
MHGRRIFLRGVCQGVGTLTCFTWSVKHRLVVRLYPSARQAAACEHILTVTRRLWNALLAQRRDAWKTRRLKISSKRQYHELTELRHEDPWFASAYRECEDAVLHRLDLAYQKFFSGGGHPRFKPDARWNQFEFPHGNRALLWDREQDRITIPGVGLVKVRKKRKRVIPPHGRAMVFRRCGRWYALFECEVAPKPLPATGKMVGIDRGIRALAATSDSELIANPRHGAALALKVARAQRTLERRTVRDQRGRVQNGDGKNRARAVEALRKVWDKLKRARRGYLHEVAHALVNRYDAIAFEKLALNGMTRSAKRTREAPGRNVRAKTRLNFALLDAXXXXXXXXXXXXAMPT

SEQ ID NO: 61342 - protein, 379 aa, unknown
  TnpB Polypeptide
MRKTFKYRLYPTKLQSTKMNNILEQTRWVYNETLALRKNAWESEKKSISLYESQKNLTEWKIQKPELTTVQSQVLQNAQVRVDLAFKAFWRRCKSGENPGFPRFKGKGWYDSITYPQSGFKLHRGETYLSKIGSVKTIFHRPHEGTIKTCTVKRDPTGKWYVYFSCEVERPEPLPKTGKIVGFDLGLLTYIQCSDGTKIDKPRFFKQEQRALAQAQRRFSKTKSPHNKRSVAFVHERIRNKREDFCHKAAKSLVDKYDFIAHEDLNVKGMLEQKKFSKSISDAAWSTLIQFLTYKAENAGRIRVAVDPRGTSQRCSQCGAVVSKDLSVRVHHCPHCGFKTSRDLNSALEILRLGLESVERPVPRRKAGAKVGAHRSPRL

SEQ ID NO: 61343 - protein, 397 aa, unknown
  TnpB Polypeptide
MYRTIEVRLPFDSSLIGTVKTYNSCCNDILKKAYKSKTRDKSLIHNLTYRRMRRKYPSIQSGLLQCARDQSMEMLKQCKYRTLPIKNMSSGIRYDKRNLSVNLDRGLLSISTIDGRKKYHISLPSYFKRYVDWLVDAATLRCSNGNLMLSLNCFKDDIDKREPKRVIGIDRGLRNIAVLSNNIFINSNHLTAVKRRYEHLRSILQQKGTRSANRKLNEISGSEKRFVKDANHCISKRIASMPASVFALEDLNINRSKRNGKLFNKSLNRWSFHQLEQMIAYKAEALGKHVVFVDPRNTSITCSKCGHADKESRKLSRFRCIKCGFDIDADLNAARNIAYRGKSSISRLQRRPMGITHSDRPSVTIHKMNCALCSISQKDMLRHKGCQPTKCSVDQSD

SEQ ID NO: 61344 - protein, 417 aa, unknown
  TnpB Polypeptide
MLRTNTLELKPNKQQQWILKEMLVRSSAIRNVRNYHRRQAFFDGNIKNPCYSSQCKKIKNHDLYKELGSAYSQQILKKLDKSWQFFWNSLKSDNINHKVSIPSYFKNYKTNQTLPKLLICRNDCYRIDKHYIHISCSKDLKQKFGIKGLLNIKYNGVRKWKNKQSQMEIKYIPHTKKFYAYQSENVEPTPIKKREENICSIDLGIKRYMSVYIKNSKNINLTYESEHIFQEYISLTKKIAYYSSKAKKENNKYSTKRIQRLYLKRKRKLSNYLNNIIAHLFRKLEQYEVSKIIMGDLNGIRDSMIPNHFRNKKKINQMIQNFWSYDLFLRKIENKCQEHEIKLILINESYTSSVCPICNERVKPNDRRFKCKNCNYEQDRDVVGSINLLKKYYHDHHKTDDSRVENYPLVSKVCIES

SEQ ID NO: 61345 - protein, 307 aa, unknown
  TnpB Polypeptide
VTWKQNGIKHDSTNNRIRLSKGFNLKTHRSDFILCEYNTRPDVTVENIQQVRAVWNGDEWELHLVCKVEIRVEDAPGNNTAGIDLGIKNYLAIAYGDGEAELYLGNVLKQDKHYFTRDEYDTEGQNGPSRRALRARQKLSRRKEHFLHALAKHTVEQCIDHEVGRIAIGELSEIREDENGDSRNWGKRGNKKLHGWEFDRFTNLLEYKAEEHGILVDRVDEENTSKTCSCCGWKRDSHRVERGLYVCESCGATMNADVNGAVNIRRKITQNPPTEDMSNGRLARPVAYLFDQTSGRFAPSEQVGCEP

SEQ ID NO: 61346 - protein, 437 aa, unknown
  TnpB Polypeptide
MSVVVRRTNTFAVRPISSEDGRLLRELLDASASLWNELNYERRQNFFDGESVWDTAAYRKQYVGVLGSATAQQVIRKNSEAWRSFFAAQEDGGDTAPPGYWGNEDKGRELRTYIRNDQYTLETGERSRLEIPVGQDLKEKCGLGYHDRLRLEVAGNPKWPGEQGRLELYYDEVSDTVRAIQPVTVPDSRRDSPLADESAALDVGANNLVACTTTTGQQFLYEGRDLFARFRETTEEIARLQSKLREGRYSSRRIRRLYRKRTRRRDHAQDALVRDLIERLYGEGVATVYVGDLTDVLSEHWSAVVNEKTHQFWAYRSFIDRLATTAEEYGITVEVRSEAYTTTECPACGEREETERDRDVFRCQCGYEGHADLDASQMFFERQAGMNLDVGSMARPVRLKWDDHCWSEPPDSPEGASPNEERTNRSTGDGKLASVSG

SEQ ID NO: 61347 - protein, 210 aa, unknown
  TnpB Polypeptide
MEVRRTVPVALDVNSADAALLENTVDTFLWSAQYVVDHAFQDEYVTTSKTTLDDETYNDVREAMDGFNGGLVQAARNKAAEACKSVVARWKQGKTASKPRFTSPPVVYDKRTATFHDEYVSLATTDGRIEADYMLPDEDSDTPHSEYLFSDEYETTGAELHYRDGNWVLHVHCKTEVELDTSEQNTTENGTVLGVDLGVNNLAVTSTGAF

SEQ ID NO: 61348 - protein, 393 aa, Proteobacteria sp.
MICAHKIALDLTTSQEAYCRRAAGTARFTYNWALAEWQRQYQAGEKPTARQLKSQWNALKRTRFPWVTAVHKDANQQPFTHLATAFQKFFRHEAQYPTFKKKGQHDSFYVSNEKCTFQGMRLRLPVLGWVRMREALRFTGKVMSVTVSRVAQRWYASVAVRCEAIPTTGDNQAVVGVDLGVLHLATLSTGEVVDGSKPLRRLLKALKRDGTRLARKVQGSANRLKARAKLARLHARIAFQRADSLHKLTTHLVRRFGTVVIEDLHVKGMVRNHRLAKAMSDMGFGLLRQMLTYKAERAGVRLVVADRWFPSSKMCSQCSVLQNMTLQDRIFKCDCCGFVVDRDLNAARNLAKVPTASGEVTPVDIAALAGVSDTRETAVDEAGTTKRARVHTW

SEQ ID NO: 61349 - protein, 532 aa, unknown
  TnpB Polypeptide
MGRKKQKKQTITLQCLLRLETREDREAVLSLMRRFSAAVRFAYSRLLEGMEDREVRQRIAALFGLNARYAHGALTKAKAILSACREQGRSPKKAVFGGRRLFEQLKRRHLSGKRQAELKRAWRERRQGLLFAVGRKHDQGNQNLRLEWEGNRLFLRINVGNRRWVRAEVIRKAKREKDKWNRLLARLAQAEATGEWFPYTVTLRLREGKVYAFIAFEEDLPPVSVARDRGVIGVDLNAFPHHLAWAEASPDGNLLAHGAIPLTGMEGLRKAERERRLWLAAYEVIRLAKAKGKAIALERLKGIPRGQRGDGRPGLRRKLGKWAPRSLGEKIRILARREGIEVVEVSPAYTSIIGSLKYAPQFLLDKDRAAAFVIARRALGFEERLPEHYERLLQDGAFLEYAAAYWMDRIAELRERLKGEKSKPKRNALRAELKRARESLRLSQSRMRVQQSADGGTASQQTVDRGKEPVRGRASARRSGWEVVRAALAEPILGRSFRDLSPLRPVLVAGDWGRPAMRRAPDLVRGRGPQGP

SEQ ID NO: 61350 - protein, 505 aa, unknown
  TnpB Polypeptide
MAKATKTIKQQLCYKSAHRSYFATTKTLFNQVAAFYFEVLVAHRGILELSSEEALTALETLTHTTKANPHPVMPLASVIPADIPAMFRRAALHAALGAARSFYSHLEKWRKQKAKAQAKGKKFTIRPPVPPRHWNRSVTLYAGQWKERTPKSIMLKLWTGSSWAWIKCGIQGRELPGAWDAESPTLVQDGQHWNLHTAVQKKFASPGKVKQQLSTNSETRICSIDLNITTHLAVCTILTVEGTVVATRFIKGGKQLHGLRKRQLGRIARNRSKTGIIAAGEQDNAALWAKIRALDEDSAHQVSHRIVEFAKQHRATILVFEHLGHFKPHKGKYSHRGNEKRSYWLRGKMYNYSKYKAWNEQIVTCRVSPRNTSRACARCGGLVARYDAGKPAEGYTPGAPLVYCPQCFMHGNSDRNASIVIGKRLLARYQQTPAQEKPQAPLAPERPVKTGGVRRSQEAKGSGRPSTDLARHGTVNAQGTAQDTLTGMVASVSGIARQLRLFNES

SEQ ID NO: 61351 - protein, 372 aa, Sulfobacillus sp.
LTAKVPWYPNPDQATLLQQTVEAYRQGCHGVSGVVDTTHCLQQADLHTETYRPLWAPFGLRSQMAQSVIKTVMARYNSVLAHGHPWTRVPFTKPAFDLVCNRDDSLKAGAFSLNTLAGRVPIPFARQGMERVFDGTWQCGTAPLVHRHGRWFLPVPMTKDVAETDWAEIRQVVGLDFGINVLVTAYDSQGQTTFFPGRAVKVRRDHFKILRQTLQRRQTPSARRRLKRLGQRENRWMTDVNHQVSKALVVRYWGPDAIRPGGSDGDAGGHGAGPATGSVYVRVVGLLPTPLDARNKATLYQSRTIAVDPRYTSQTCPHCGHVARGNRDKRRHRFACQQCHYRSNDDRIGAMNLHRQGIEYRVTGAIAAGPRS

SEQ ID NO: 61352 - protein, 588 aa, Actinomadura sp.
MLQSVIIKGVDAAAHPDGGDATRETAAQTPAQPAGRGGHPRPLRPIDAPFVAAGPSGVAIRTRLKGLALQDENVLREVGAHLGSLAGRDLKARCRAGTAHDADGWAARKRELTGGSSARWAGSITKATHDQWALARRSQLAHLNGLEAGISAIERRLSVPVGQKGTRRAAGGYRSRREWFAKSRRLHVLKDRLTAVRADWEAGRVRVVRGGRRLLNNRHHLDAAGLTEEQWRARWEAGRWFCRADGESGKRYGNETIRVTPGGEVSIRLPAPLAHLANAPHHRYVLTCRVAFAHRGTEWADRIEADRALAYRIHHDTGRGRWYLTASWQRPTIPTLSLEAARAHGIIGVDTNADHFAAYHLDTCGNPVGDPRRFSYDLSGSAGHRDAQVRHAIAGLLHWAVTCGVKAIAIEDLDFAQDKTREKHGRRKRFRQLISGFPTGKLKARLTSMAAEQGLAIVAVDPAYTSRWGDQHWRKPLSTSKRSMTRHDAASVAIGRRALGHPIRRRTTPPPHHQSDAAGHRTAQPDQSAQEREGTRPPVTERAHDARRRTATQRTRATCASNTVRDTRSSGSRHQVSLLDCLGTVTWL

SEQ ID NO: 61353 - protein, 388 aa, unknown
  TnpB Polypeptide
VRHKAYKFRLWTNANQERELSIALETHRRLYNAALVERKESWEQFQIDINYCQQSAWYKAQRSENPWFERINFSSAQATLRRLDRSFQAFFRRVKAGEKPGYPRFKAADRFDSFTFPSHGDGARLTDNRLRVQHIGVIRVKLHRPIEGEIKTLSLKREADKWFVIATAALPAAPKLGNINPPVGIDVGLEHFLSTSDARHVANPKFLRSDLPALRRSSRSVSRKKKGGTNRRKAVKRLRKWHAHIANLRREHAHKTANFLLDRYGMIAVERLNIRGMVRNNRLARAISDAGWNQFITILKSKAENAAVEIVEVDPKGTSQECSGCGATVLKKLSVRIHRCNSCGLTLHRDVNAARNVLSRACVTGLGTSPSVVRVPVGTLTEEAVCFS

SEQ ID NO: 61354 - protein, 389 aa, unknown
  TnpB Polypeptide
MNKNFQYRLYPTKKQLRMLEVTLEECRWLYNHLLEKRKTAYAQEGKSLSCYGQQATYPILKEERPSLNTVHSQVLQNVSVRIDLAMKAFFRRVKAGEKPGYPRFKGYGRYDSFTYPQSGFSITYDERVSLSKIGSVKMVYHRPIKGTIKTCTIHRSSTDKWYVTFACECKPERLEPTSTQVGIDVGLKTFATLSTAEEIENPRFFRQEEKALAKAQRKHSTLAKGTIAPIAYSPKDASPKDASERKKHRKVVARVHERVKFKRDNFTHQHSRQIVDRYGVMCVEDLNVNRMVHNHCLAKSISDAAWSAFFSQLNAKAEEAGRQFIQVNPAYTSQDCSRCGHRQKMPLGERVYHCPCCLLILDRDLNASKNILRLGLESLGIQSLEAPSL

SEQ ID NO: 61355 - protein, 442 aa, Natrialba sp.
MGVEEATRTIQSRLFIESGNPEWLHDARLTAREIFNETIDLKRDGYNRTEIQREVDRDDFLRNNKCAVVGKALGTWTSYKRLLDWWHNQDDTRAGNPSPPSTDKTGAYPIVMAHMEGYELSIDEEEDRVDFRISPKPYKTVRGHLRARKTDIDQLKNALDNDNWSVGQAELLYRDGVYHLHVTVTTEFTIPDPEEEADTLVGVDINERNVALTALDRESHETLGTLVIDYGSVKARRQWYHTVKKRCQTHGQTSIHRTFSDKEERYTEWVLHRMSLAVVEFAEQFSNPVIVFEDLSGIRDAIEYGTYMNRRLHKLPFHKFEDFVRYKALWRSIPCDTVDAYHNSKTCSCCGERGYRQGRRFRCTNGECAVTQDHADRNASVNVAWRAWAKYRGIEDVDEVNYRTHKTQPQVRLVRLFGSGRVVSRPSSSARIAERGVLELQG

SEQ ID NO: 61356 - protein, 408 aa, unknown
  TnpB Polypeptide
MERRQGFKFELRPTGEQQRQMRRFAGCARYVYNKGLALQQQRYQNQEKKLTRFQLDKLLVPWKRESPWLAEAPAHALQQAIVDLDRAYTNFFEKRAEAPKFHKKGVRDSYRESDRKCIELDQGNSRMRLPKLGWVRYRNSRAVLGQIRSVTVRLSAGKCFVSISTLREVRPPQHRSTSVVGLDWGVARFYTLSDGESRDACQPLKPLLPKVAKLQRRLARKKKFSNNWKKAKGKIGRVHSKIANRREDFVHKASRDISKNHAVVFVEDLQVRKLSASARGTREKPGKGVARKSGLNRSILDASPFELRRQLEYKTEWSGGRLHAVAAQNTSRTCPVSLGGCGHVSEQNRKTQEKFVCVACGFTANADWVGAVNIREAGLASLACSSSSHAVGASCQEPTEATPVQQCA

SEQ ID NO: 61357 - protein, 426 aa, unknown
  TnpB Polypeptide
MAKQVVTRTYTASIRNQSRVQDDLDSLGFAASKLWNVGRWTCSRIWDEIDHIPNHNELTTYLKNHERYDDLHSQSSQRVLQELAEAFNSWYGKRRNGDTRANPPGYRKHGDDHPRSTVTFKAAGFKLDTQYNRVRLSKGSNLKACWSDFTLCKYQMRPDVDLSSVENVRQVRAVWTGEEWELHFVCKVKIDVSESPGEQTVGVDLGITNFAALAYEDGHSELYPLNCLKQDDYYFSKRIARCDDSNSEQATRLNHKKSERRTHYFHTLSKHIVERCVEDGIGTIVIGDLSDIREDEESDESRNWGKHGNLDLHSWAFDRFTKLLNYKAEMEGISVEKVSERDTSKSCSCCGRTRDANRVERGLYVCDECETVANADVNGAENIRQKVSPSSPNLSVNRSNGWLAQPSTFLFNTETGAFAPQEQVTS

SEQ ID NO: 61358 - protein, 383 aa, unknown
  TnpB Polypeptide
MKSIKTVKCRLEVDKETEPILQESIERFADCCNDVLSVSKEHKTTNKVKLQHLCYHQLKAKYELPANLVIRAIARVAESAKGKKPPKQYKPTSIAYDQRTFCFIEPKEEISISTHAGRLHIKLRLGNFQRGLLAGQKPTSATLSYKRNKKAFYINIVLEKEVVVPSGNNPVGIDRGLYNIATTTKGQTFSGRKIIHTRKHYSELRKRLQAKGTKSAKRRLKHLSGRERRWMTDTNHCISKAIVNNCQLNDILVMEDLKYIRDRVKTQKKQKLFIHSWSFYQLQNFIEYKAIEVGIPVIYIDPHYTSQNCSRCGQKGIRDKHSFVCPSCNHKNNADFNASYNIQRVGLTSLNGLQSISPLVPVKPETINVANVEVKVPEQSLFW

SEQ ID NO: 61359 - protein, 416 aa, Lachnospiraceae sp.
MYLTVKQQVKHLSKEDYFTIKELCHTAKNLANEAIYNVRQYYFTEGEFLKYEKNYTLLKNSPNYKALNSNMAQQILKEVDGSFKSFFGLLKLAKQGKYAFKDCKLPHYLPKDGYTTLVIGFVRLNGNKLILPFSNSFKKSHKSVEITIPPVLLDRKVKEIRIIPKANARFFEIQYIYEAEYIQRNLNTNNALALDLGINNLVTAVSNTGKSFIIDGKKLKSINQWFNKENARLQSIKDKQHIGKRTTNRQKAIARDRNNKVNDYMNKAARKIIDYCVANDIGTLVVGYNETFQRSSNIGKQNNQNFVNIPYGRLRDKFEYLCELNGINFVKQEESYTSKSSFWDKDYIPVYNADNPKEYQFSGDRIHRGQYKTASGKTFNADVNGALNILRKSSVVDLDILYGRGEVDTPVRIRIA

SEQ ID NO: 61360 - protein, 381 aa, unknown
  TnpB Polypeptide
MIAYKYKLYRTPKTKHLDKMLREACFVWNHALALQKRYYRLYHKYIGATRMQKHFAKRISRCLLHSQTTQEILQRLDTSYQRFFKHLAKRPPKFRKARDFTSILFKQGGYSLDGNVLTINSIGKRFKFSLSRPYDGKVKTLTVKRSHIGEFFIIMVLDQSPQSIGKTHNGASVGIDFGLKKYMTLSDGRTVGNPQFLKSGLRQLQRKSRNLSKCLKGSHNRERKRLELDRHHEKVVNQRNEFQWQLAHQLCRQYDRIFIEDLQLTDMSALWGRKMSDLAHGEFVLKLQYLATKYGVTVHKIDRYYPSSKMCTCGYKNEGLQLHERTWQCPECGIVHKRDLLAANNILRQGIAELESVSKSKNATGASLRSRLHPRISLLQG

SEQ ID NO: 61361 - protein, 458 aa, unknown
  TnpB Polypeptide
LVRFNYPDSNRLVLEHAETRVVLLESGQIYANYLHQNTSRKPTFFNVGGIELKYLSFLKLLAEIMQRAILLQTNATKSKQKTLNKASLEAVELANFLLQNRKSKRLMDLHKTMYSTCKKTTSFNSQVICDIERTVVESKGTTVQSITVKFNTPRNCKTFNTKSHFFVELGIYPRNRIAIPIKANKNYQRFQDLIKKGWTCKTFGLTSNLQIVAYLSKEKEIKQRKNILGIDINAKYFAISVVSPQGKVLYQTYFGKRIWAKRKKIMKRRALLQSLNATKKLKTLRNRERDFVKTNLGQIVREIIKIATKYDADISIEKLKRFNPKGKRFNKTVMRIPFYRFKQILEQRCFDNDIPLNIVDSWHTSKWCSHCGAVGNGHNSTNYSLFKCKCGQTVNSDRKASLAVAVKSLLVRNKHNLSNSAFFQFTNGRVSVNGLLRSDDVGLNQIAVQHSNQSMESQ

SEQ ID NO: 61362 - protein, 475 aa, unknown
  TnpB Polypeptide
MKTIKIRIKDNKVKPYIVDKVYEYRHFENMYIILLHQDYNQKLNDFKVLTDYKVMRAVLTDNNGGKVREKAEYIKEKYKDHSLMKDIIESSKNLKIHNLVEIMKRVKSQYKGFFTKNKRGDVSARPPKTKKLSKMHSYTIPLDSHKSFSLKNENKAGINLDKKMIYTHMNFVEVGKLTGGIDNIESINLNFSNKDIYFLITHNKKTSISNNPKEIKSCGIDLGIENLITLYINDDKSNSLIIDGRPYKTYNSNFNRITGKLNTDISNLINKKNPEEREKNQYLCNFRSFLYEKRNRYFETEFNKISKRVVEYLIKNEVTNLTLSNNLAELKNNGDCKLRKSVKQSFIQIPFIKLLKMIKYKSEIRGITVNYVDEAYTSKTSSISSDIKRIQELSKDKKLSTDDFNGTRVKRGLFLDNKVNKIVNSDCNAGFNICKLNPAYKDINKKGESWFKLCNPKKFKSDHELCKFLHNNEFG

SEQ ID NO: 61363 - protein, 263 aa, Firmicutes sp.
  misc_feature (60)..(131): Xaa can be any naturally occurring amino acid
VRRDEGSGSRLGPEELSGSQLRRRNAVLQWRPSRLRPPQVQRVAPSHGQGQSSRRYPPHXXXXXXXXXXXXXXXXXXXXXXXXXXXXXXXXXXXXXXXXXXXXXXXXXXXXXXXXXXXXXXXXXXXXXXXXKEARWMKNQDHEISRKIVDWCIARGVGTIRMEDLTGIRIRGNRNRKDRGRSLHSWSFYRLKQFIIYKANLAGIKVGLVVPENTSRTCPACGVVDQASRRGIRFRCTACGHTEHADSVGAANIARAISGLAAA

SEQ ID NO: 61364 - protein, 288 aa, Firmicutes sp.
  misc_feature (212)..(283): Xaa can be any naturally occurring amino acid
LRLRLHQPTKAKQAVYRELAGRVTGFANNLVAAGRPKKLTSKTAKPYCPDRIPSAVINQALRDVAAHPKVEKFRVLWPGFNNQNCRLERVGGFWTVGFPTHVGRVRVPLQATDRQAQLLAKLGATVKQGAAKLYEKRGRWYLALSISVQVTPCVGTKAAGVDLGLRNLAVVNCEGETLFFSGDRAAFVRRRFNALRRRMGKAKALGAIRRMXXXXXXXXXXXXXXXXXXXXXXXXXXXXXXXXXXXXXXXXXXXXXXXXXXXXXXXXXXXXXXXXXXXXXXXXRKPAG

SEQ ID NO: 61365 - protein, 347 aa, unknown
  TnpB Polypeptide
MSLTLVIKGKLRVLQKKVNTNLKSVNAQVLQQVLKSLDRTFADMKKKKLGFPRFKNKLRSYVYPQLGKNVIQDNYINLPQVGSVKFIKSRKIPEGFQVKQARVIRKASGYFVLFSLQLDVNVAQPFPSGHSLGIDLGFDKFVATSDGVEDNRPKFLKTLQRKLKLLQRNLKNKKKGSNNRHKLNRKIARLHQHISDTRKDDHFKLAHRLCDGTGMIFAEDIDFRTWQRGMLSKHSADAGFGQFVGILQWVCWKRDVYFAKVDKDGTSQECSKCGTHTGKKTLSMRVHHCPECGYTNSRDVVSAKVIRDRGLSAVGTPVDIKQKACGGGLAGAISLAKSLKQESPVKA

SEQ ID NO: 61366 - protein, 174 aa, Halobacteriales sp.
SYNVGELHDDHPVRFTNEGLRLDNKPENAIEWYVKIPHHEDYHLWMPAQPNPEQRGWLEALNAGDATMGESRLFKRDGTWYLHVTATRDVEERSEVSAEERTPIGVDIGEASLVTVSRKSKISDESSKTLRVFEMSPRRPRFSDRARTVGRRGQDRSSAPQDLLHRQAPTPDAR

SEQ ID NO: 61367 - protein, 384 aa, unknown
  TnpB Polypeptide
LEDVLMENFIAKLGYKYDMVDKKELTMCLTFKVVIPHSLTPVLNELYQKAGVCVNRMLKDRTKSSSKYYKEIPCVLAKSLISKYQRNKKLKHVKNLVLPVCGDKGKQVKIVEGGIRIPAFFKKSILPASFSKPIFGFIRQVEFFKRGGKWFMSYSYNTPVLSKQEVQGFIGVDRNSVGNVAVCADVMTGKVRKFGPDTAGITKNFRNRRKNLQKKGAKNALTKIRRKQSRRIKDINHKVSKSLVDYAKLHRSAIVLEDLGKISKKGKAKRYVQKSQWSFYQLETFIKYKAALLGIPIFYVNPAYTSQVCSRCGSINKPNGKHYKCSCGHFDHRDSNAAFNISANEWFIYEQTAGPSASVVPCIGDGLNQSSKKVVQLESSGGAR

SEQ ID NO: 61368 - protein, 371 aa, unknown
  TnpB Polypeptide
VEYSYKFRLYPTAMQETIIQRTFGCSRFVYNHYLSVRKEAYAENKETMNYYACAKDMTKLKSSLSWLSEVDATALQSSIRDLDTAFQNFFRRVKRGEKPGYPHFKSKHDRRKSYKSKCVGTNIKIAGGKIQLPKLGFVECRISKLVQGRILSATVSQNPSGKYFVSLCCTDVEIAPLASTGSSIGIDLGIKDFAVTSDGQIFKNHKYLSKSEKKLAKLQRELSRKSKGSKNREQARIKVARCHEKIANQRNDALHKLSTQLVKNYDLISLESLAPSNMVKNHKLAKSISDASWAEFVRQLSYKANWYGKVVVQVDAFYPSSQLCSCCGYKNPQTKSLAVRSWICPGCGALHNRDENAATNILNEGLRRLSA

SEQ ID NO: 61369 - protein, 522 aa, Asgard sp.
MKIEKENKQKELKNRLKKYEKQEEATSTLQAPSISGYYHVKIRIKTERMTAQECDRLRIITNRDTRIIKDYLRIIYHNEEKILRNDSKVAKTQLDKLTLTTSKKTQHKLRTTVPHDLKKSYPRCSHDEFIECRDKAIWTYESWKAQQKQSKEDLSRPQFKKKTPRIYYKGLEHRGTFRVIPTPDNTLAKLWLDLRDSLDTKRSGRTNHKRLMLPLAYSPYHKKKLILDNVKTLELVYKSKEQQWCAHFTLQYTVPLYQSTQPPAVLGVDLGIKKTAVAVLLTPTGKVIMEELCFIVNKERQAKMWRLEKQIKSIQRELDTRNYNGQPHKQLNVKLYQLRRRLRSVTQQELGYAVNQLVDFILQLKKQYNLFVSVGYPKYIRKSQPRGSGNKSLRRQLHKWCYRLFITKLQHKLTQHGFEPHRVVAVNESWTSQRCSKCNSLNTTRTKQGKFNCHDCNYEINADLNGARNIGKRLIKYALKPEHGYTSIRDTLTNDYHSLKLYKCLQPLSQWLKYSVKNLSSR

SEQ ID NO: 61370 - protein, 361 aa, Sulfobacillus sp.
MVKLQPNPAQAASLLATMERFNAACNAIAETAFREHTASQVKLHHLMYRDVRESFGLSAQMAVRAIGKVVEVYKRDKSIQPTFRPQGAIVYDDRLLSWKGVDRVSILTLEGRIMVPVVMGTYHAQRLRRVRGQADLIYRDGQFYLAVVVDVPEPPSLQPTDWLGVDLGIVNIAADSDGQTYSGGHMNGLRKRHAKLRERLQKKGTKSAKRLLKKRRRKEQRVAANENHRIAKQLVTKAQDTGRGIALEDLTGIRDRITVHKAQRRRQHSWAFYQLRTFITYKAKLAGVPVALVDPRNTSRTCPQCGLIDPHNRPTQASFRCIACGFAGPADTIAAGNIARRAAVNLPHAGSLQEIPASFAL

SEQ ID NO: 61371 - protein, 236 aa, Mycobacterium sp.
MPGFRRRDGDQRFVCWFNGGRNAVFTKTGRRSGMVTISGANPGAHRAPGLGPDGQPHRLAWRITLHVRLSQPIRPYTSVRVNWTRRQLVFVNEPSPVADKVRTGEVIGLDRGVVHTAADDRGGFYDAPDTAAPDKQRKFHQRRMAKCKQVAARQGRRFWESKRYQAHKTAAAGLGAKQVRVREDFAHKLSTQLVRDHDFIGIEKLSLHRMTRRGKGKGAAAKRDSTGCCRMPRSAD

SEQ ID NO: 61372 - protein, 452 aa, Mycobacterium sp.
VKADLDAKAVDPGHESVGWDLGSLRKAWNRAKHEVAPWWAANSKEAYSSGLADLARALDNWSASKNGTRRGRRMGFPRFKSARRDAGRVRFTTGTMRLEDDRRTITVPVIGPLRSKENTRRVQRHLSAGRARILNMTLSQRWGRLFVSISYALRTPATAPAVARPTVIAGVDLGMRTLATVATVDTITGEQTITEYPNPAPLKATLAARRRAGRQLSRRIPGSRGHRSAKAKLTRLDRRCVHLRREAAHQLTTELAGSYGRIVIEELDVAAMKRSMGRRAYRRAVSDAAMGLVGPMLAYKTARHGAVLTVADRWFPSSQIHHGCTTPDGTECLLVGKGRIDKLLVCPLTGEVVDRDRNAALNLRDWPDDASCGPVGTTAPSVPGPTKQVGTGHGADTGTSGAGGASIRPAHAGRKRRGQNPNPARGRRIMCATQTHSTATVRKGRLETRTRG

SEQ ID NO: 61373 - protein, 408 aa, Lactobacillus sp.
MEYQYHYGLKVRCYPSDKQKKIIEHNINGSKFAYNEMVAIDKELYKLRKCKLYIKQVQNRIDYLKKRKESTKYLFALHSWLHQFNVGTDVTSMAIRSYKAAWKMFRNVHSSGVPKFHRKQYSGGFQLPNRYSSKVSTPSLFNGNIKFVDNKHLNVSLIGRIRISGSHTRLMVEHSAIRIGTVSVSRDSIGNYYISLQLASDSPFVQTLNITGNPIGIDLNTENFLTTSDGDVVDNPRYYRKNKKQLAKQQRILSRKQLRAKKEHRSLRDSKNYQEQRVLVAKLNNKVSNRRNNFLHETSTALIKNHDLVVAEELRSKNLLKNHALAMSISDVGWRTFLQMLEYKAKVYGKTFVTVDPKNTTQTCSHCGYLMKGEEKLTLSDRTWTCPNCNQYHVRDHNAAKNILAKAI

SEQ ID NO: 61374 - protein, 375 aa, unknown
  TnpB Polypeptide
MEVMAYRTELNPTNKQIGLIHQYCGTVRFAYNWYLDAAKAYYAECGLFLTGYAFSKALNNSKRPEWFTEAPSKSVKHAIMCAERAYRRFFKRQSGFPRYKRRNTNRDSFYVICSIHVERHRIRLPKLGWVKLKEKGYVPTRQEPKSATISIVNGRYYVSVLYEAQDPAPIQPTGEPLGMDVGLKNLAVLSDGTVFMNINKTNRLRKLEKRKRRIERMITRRYLANKGKDKVHGWHNYRKAIMEKWRIERRLNNRRVEYMKWVCAQVVRRQPSSLTIEHLNVKGMMKNRHLAPALHKQGLSVFLELVEQVCHKHGIELRRVSAWYPSSRLCHVCHRKNTSLVLGQYEWRCPVCGTLHDRDLNAALNLRDASEYQDL

SEQ ID NO: 61375 - protein, 450 aa, Caldivirga sp.
MRTVRLRLLPNGSQERKLRRIADAVAKLWNELNYARLVQYRVSGKVDFKGTGHEFYHRYKDGLGVNAGQVINLNNWAWKSYFELLRLYRQGRLPKFMGKPSPPGFWKDRLLGRRELRILVRNDRYYLEPTNGGEGYIVLKDWGLKIKYAGRVKWSGKQGVLVIKLEGNRWFAYVPISIGEKPARSNPRGYVKGIYEKIRIEEPRGGNKAFIDVGLNNLFAVVFNHTDTAILIKGSSIKAEYYWWKREVKTYQAIRDWLRNHGFESWRRYHAFHLHAVYKQHERLRHYYRTAIRFLARIMHEMGVDEVFIGYPYMLSQNNGNEYNTNVWWFSKIINWLGDVLEEYGIKLHVVNEYGTSKQCSICNANHENGRIKRGLYVCELTGIKINADLNAARNIAKRVGYETPIPTKILSHIVTTNGVKPLTPMEGVTVETPTVNPAPKGRGGGHPMP

SEQ ID NO: 61376 - protein, 361 aa, unknown
  TnpB Polypeptide
MILTYNLKHQRDFSGELRKAKKIADFAIRTRTNTSKDVKHFGLKSAIANQILRKYRRHIIKKATNVKLTIPGQGVKFDPNSAMAEIPCLKLTLDCKYIPTFQKIRQVEIGGTFAHISVEIAEPEMSSSEKFIGIDCNTTGHAVVVAIPHTGKIHKLGKMAIHTHTKYKQIRKKLQRNGKFSLLKKIKNKESRILKNINHHISKKIVQIAVSENSAIRFEDLKGIRKNKKYSRKFRYSLNSWSYYQIQQLTEYKAKKQGIEVAYVAPAYTSQTCSRCGSLGNRDGKKFQCVCGHADHADVNASFNIGRPVSHCLIDPTRIKSKSQLHKESDLCKGSTDTPLYHEHYKTAMSKMMVTVEPTKL

SEQ ID NO: 61377 - protein, 291 aa, unknown
  TnpB Polypeptide
MKKKRKKKQHRRTYKYQIRGHPQNMRLGNMLDDLCDVHNHFLKLENRYYRIYGKYAGRFRLQPHLTKLLQRTHPHWTWIPRDTLDAVIINLHRGFESFFDIPGIGRPKHKKRGKLRSAKFQSGYKLEEGRVRLSFKEWDTPTQSFRFNKRWFSFYHHRDWKGKVCYIQILRDAVGTYWLYVVTDDVSKGVLPATDESVGADFGMETYLTLSTGEKIRHPQFLKQSLNELRTLCKTFSRKVKGSGNWWRCLREICRLYRQWTCPECGTDHDRDVNAAINILRAACDPSVEQM

SEQ ID NO: 61378 - protein, 451 aa, Thermoanaerobacterium sp.
MKCIKTVKFKIKIADKSFSDTISIYNKALSYIINAIENEWVIISTLSTEKEQLNYIEKLIHGTKKNKAKYDFDSRFYKFPSYLRRAASSEALGAVKSYHSNLNNYLNKKAQYEAKGKTLRDKPPTLGIIRYSFPVFYKGNMFERTGNNTAKIKVYKNNDWVWHNIKFKTDNLKNRDMTNFKEMNPSLVKSGKKYYLYFTYEKEIKFKNTPLKDRTIISVDLGLTNSAVCSAMKYEGTVIGRLFINQPIEKDRLFHKINKLAKTQRISGNGRKPNIWRKINNIKNQIINDTVHQIIEFAKSYDADVIVFEHLGKLQSKGNYARRTRIKLQFWAKQTIQKKVYDIAHSYGIRVSWINPKNSSALAFDGTGKVVRNNKKDICEFTTGKKYHADLNASYNIGARYFIREILNPLVEKKRLQYQAKVPEIAARSQQTLSTLISLVKAMQSQCGCVA

SEQ ID NO: 61379 - protein, 405 aa, unknown
  TnpB Polypeptide
MLIYEYKLDANKKQIQAIDTALRVVQFIRNKCIRLWMDERVVSQNDLQVYCSTLASQYDFAKCLNSQASADRAWFSIQRFYDNCKNKQPGKKGYPKFQHDNRSVEYKQTGWRLESDGKHIEFSDHCGIGRVRLIGCRDLATFPLPQIRRVRIVRRADGYYCQFGVNAHREIQHVPTTGRLLGIDMGLNAYYTDSEGNTVANPRYLRKAEKRLKRLARIHSKCAKKSKNRIKAQKKLAKMHLKVQRQREDFARKAANALITSSDVIAYEKLSIRNVVKNHHLAKSMSDASWGKFLSWVNYYGGIHNVPVIAVAPNFTSQDCSACGTRVKKSLSVRTHVCHNCGMVLDRDHNAAVNILDKGLMVLSGRQEPVGHAAHETLLDRCASTPVSKGTTGKRSGGKKNPPSL

SEQ ID NO: 61380 - protein, 482 aa, Erysipelotrichaceae sp.
MLLAYQFEITIKEKESIILGHLCYAASKLFNVGNYERKEYKSLGFERMPNWYDQKKRLKDNIWYKSLPSQTAQDVLARLDESWKSYLTLHYKWQKRKDNGRLKENDGEPNSPYYKKDGYHMNIKYLSNSFKVMDDNSIRLSTPKALRLFLKEKYQIEFSYYYIKLNRKFNKIKQVEFSYLSNNRYKVYIIYEKPSLPLKKDNKHYVSIDIGTKNLLTVYDNKGTSFIVSGQSLLNTNYYFSRKIAYYQSKFDTCYPNHKKGETTKRIKGLYELKRKRINLILHRSTKMIVDYCINNDISKVIIGDLSGLLNVNRVFVNNNEKHRYNQNIRVVCFDRIYQLLSYKLQLQGIELIKVSEAYTSSCLPTSKEVSERCSNKKYRVKRGLVRCHNHIYNADSLGAYNIMRVYKQISGKGFNVPSKGLSNPKREYIPVTDQFLNEDYINWNGKAGNVGISGRNYPKGYELVEIINQFITKMPGNSIAG

SEQ ID NO: 61381 - protein, 219 aa, unknown
  TnpB Polypeptide
MRLTGAIRVEHGGVVLPRIGRVANKEATDKFRGRIRSATCRREADRWYVAVNVEVERRDPAPVDGPVIGVDRGVAVFAVCSDATNIDGPRALSRSLRRLQQRSRAVSRKQPGSTNRRKSALALARLHRRIRNQRLDALHKATTALAKTKSVIVMEDLHIAGMVRNRHLARAISDQGWAEFHRQLATSASGMGRGYLLHRASIRHRRPAPAAGSSRQSCR

SEQ ID NO: 61382 - protein, 386 aa, Proteobacteria sp.
MEQVLTLVCQLQPTNDEAWHIDATLQAFAEACTYIHATMPLRIVNVMRMQAMLYYDVRGRFGLSSNLAQQAFRRVSGSRKSAQAHGHEVKAFEPTSIQYDQRIFSFIARDWHVSLTLLHGRVHLALRLGNYQRGKLKGHQPTSAQLCQHAAGSYAIHIQVKEPLPPPQTPTEVLGVDLGRTDIAHTSDGAHWDGGAIRRCRDHYVRMRAGLQRKASKGTRSTRRRCRQLLDRLSGHERRLQRHTNHVIAKTLVETAQAKPSALALEDLTGIRQRINQQPRGTTERRRGNSWAFFQLRQFVTYKAALAGVALYLVPAAYTSQMCHRCLHLGSRQGKRFACDHCGYTGDADCNAAQNIKILGEQVSLPRGPWVHSFWSGEPSGLLESP

SEQ ID NO: 61383 - protein, 134 aa, Okeania sp.
VLVIEAKLKGSQNQYKVLDEMILTGQFIRNSCLRYWMDNKDVKRNDLQKLCSQLAKDTNFPWAKKLNSQARLASADRAWQSIQRFYNFCRLKLPGKKGYPKFKKFTRSIEYKTTGYKLSPDRKKIEFKDGFKAG

SEQ ID NO: 61384 - protein, 446 aa, unknown
  TnpB Polypeptide
MVVKARRTVCIPLELNGNAIDSLHATRDPYQTCQNRTIEYCWPDHPKRPDDLCTSKGDAEAALYHPLREHTDGLHANLVQKAIKDAVSAVSACKSNWKGGRRVSKPSFENRRDAEWAMRYDKRAATYSRYKVSLATVDGRVEGRYVLPAELKGTPYATYVLNRRWSFSTSTLVYDGERFWLHASMQRTYTTTPTPPTPTNIDEGDLEAQEDAIRILGVDRNVKGSLAVTSTGGFYGNADALNDYRARQEALRGELQQAGTHAAHERLKARRGREWRHYDDLVHRVANAIVDDALKVEATHVVFEALTDIRSRISNLPKFQQWLFSKLYETVEYKLEPYGVVVDTVNPAYTSQMCSRTDCNCVSKRNRDGKDFECVECGYAVDADYNAARNIGLRYLEKQHPASHTRSSGWATSQLALMSGTLTPAGTFVGRDWASTGKPTTSVAGH

SEQ ID NO: 61385 - protein, 163 aa, Okeania sp.
VINGRPLKSINQYYNKIKSCLQSQLQENRSSKRLKKLCNKREFKINDYFHKASRLIIDTLINHQIGTLIIGHNQEWKQKINLGKRNNQNFVSVPYNKLIEMLSYKAKMVGIDVIITEESYTSKASFIDNDLIPVDNKSEKNQVTFSGKRIKRGMQSYRQQKIN

SEQ ID NO: 61386 - protein, 219 aa, unknown
  TnpB Polypeptide
VAGSGSCSSPVELPDPPQPQQVVGVDMGVRFLATTYDSEGRTVFYDGREVKRKREHYKKLRASLQKKGTRSARRRLGKIGKRENRWMRDVNHQVSKALVSRQSKPTLFALENLEGVRNATEKVRVQDRYVQVSWAFYQLRQMIEYKSAKGGHSVIVVDPRYTSQTCPTCGLVRKANRRKKTHEYRCSNCGYRSNDDRVAAMNIQRLGYQSIVETQSDKL

SEQ ID NO: 61387 - protein, 437 aa, Bacillus sp.
VKLTHKFKIPYKKDLYHQLKNKQLESGKCWSDVVRYANDHYFTFKKWISTSELVKMTKNTYDLHSQTVQEIVAKYDENRTSTLTKRRNGDKNAKYPWRSKRFFSIPYKKSAISVKDNIIILKNSNYSNKLSLKNMVEKKKKKGWNETVKKQKDYIEIPNLAIENLSNISYAEIVYKNGSYWFHYVIEVEEEAKVKRFKPAGSDLGEIHSITLATEDKALVISGRAIRSIKQRRAKLLSELSKKISRCKKGSRQQKKYIKAKNRLKSKSDAQIEYLIHKSTKEAINFLVQEEVSDLVVGNPEGIEKNSKKDENKKKKNNKTRRQQLSGWSYGEFKQQLKYKSELKGINIHFVNESYTSQDCPFCGGRHKANGRKFKCSVHNTEIHRDVNGAQNICRKRFAMETKSVDVLYRQPVWYRRYLTVKKRKETSDKSIAWRKA

SEQ ID NO: 61388 - protein, 250 aa, Cupriavidus sp.
QKHALKWGKKWPTGFVLNVLTTGSSRELGIHSGTVNAVCEQYAKSRSQHRRPYLRYRGRRSLGWVPLKGRDLKRSGDAFRFAGNTFRVFNSRPLPEGKIKDGTNFSRDARGNWFLNIVIEVADTQARSPARGVGIDLGLKELATLSTGEKIENPRHLGQLEQALAKAQRARKRRQATNLHARIANARRDFLHKLSHRIVRDFDYIAVGNVNAAGLARTSMAKSVLDAGWSSFRTMLAYKAIAHGAWYEEM

SEQ ID NO: 61389 - protein, 340 aa, Cupriavidus sp.
VLTTGSSRELGIHSGTVNAVCEQYAKSRSQHRRPYLRYRGRRSLGWVPLKGRDLKRSGDAFRFAGNTFRVFNSRPLPEGKIKDGTNFSRDARGNWFLNIVIEVADTQARSPARGVGIDLGLKELATLSTGEKIENPRHLGQLEQALAKAQRARKRRQATNLHARIANARRDFLHKLSHRIVRDFDYIAVGNVNAAGLARTSMAKSVLDAGWSSFRTMLAYKAIAHGAWYEEMRPGMLASCMATSPSLPAPPTSFRSFPLRWRPCSCVHHYRLPSGRAHRWFVRGRSCAGWQHEGDVPRHPRFQHCGGRRNVSRSREFLRPRGRIVSAPTPGSNRAKNTLR

SEQ ID NO: 61390 - protein, 361 aa, Gloeocapsa sp.
MSPINGAIRTLQFVRNKTLRYWIDNKDNGKAALFRYSTALRKEFEFVEQLNSTACQVAVERVLIAVNKFFDNCKNKVKGKKGYPKFQKNNRSVEYKQSGWKLSEDRKRITFTDKKGIGTLKLICSPDLNYYQPEQIKRVRIVKRSDGYYIQFCLKLDPRDTVKQLEPTKKTIGLDVGLKYFYADANGDIVENPRFSRQAERKLNRLNRKKSKKYRKGKPQSQNYLKARNRYARKHLRVNRQREEFAKRVALRVVQSNDLIAYEDLKVKNMFKSKLAKSINDVAWTTFRHWLEYFAYKYGKAVIAVPPYNTSQNCSNCGKKVQKSLSTRTHKCPHCSYIADRDVNAAINIFKKGLSTGAGNL

SEQ ID NO: 61391 - protein, 265 aa, unknown
  TnpB Polypeptide
MIGADIGTQTVAYTSDTEVGLKNLSERGNSIQTSERKERLYYRAMDRSRRATNPQNYNPDGTIKKGKKTWKYSDRYKKLKAKHAELCRINAVNKQIAINEDANYLRSLGDTFVTEPKNASKLMKRAKKTTVNSKGRFNKKKRFGKSIKNRCPSGFQTTVEKKFKVTGGAYIEVPNNYRASQYDHTADDYIKKKLSDRLYRLRDGTLVQRDWYSSFLLYCYDYRTQDIDKDKCITDFGRCYDKEKALIAWIKANHIKILNSGIKVA

SEQ ID NO: 61392 - protein, 426 aa, Nostoc sp.
MQRAFKVTLIPNHNQQVLINKTIGCARYVYNRFLALRQELYATEQKTLNYNACSQQLTLLKKEIEWLNVVDKFALQNSLKNLETAYKKFFTDLKKSKNKKGVGFPKFKKKHGCKQSYKTNLTNGNIQVIENRLKLPKLGWIKFHKSQDISGKLTNVTITRTSEGIYIASILCETEIEKYPQVTQNIGLDLGIKSYLVTSDGEVVENPKYYRTQKRKLRASHKKLSRSQKSSSNRVKAKNKLARTYQRITNLRDDFLHKLSTRLIKENSIICIEDLRVANMVKNHKLALSISDASWSKFVAMLEYKALWHDRIVQKVGTFYPSSQTCNDCGFINPLVKDLKLREWSCPNCTNYNLRDKNAALNILSEGLRILTAKSGGVNTAGVSPATPRLFKTAAVGAPDAIYACGELVSPEFLQAKIVEAGITRL

SEQ ID NO: 61393 - protein, 379 aa, Nostoc sp.
LGGEIDRTLESFADACNRILEAAKRDNCWNTTKLHHKVYKPVREATGLKANHVCQAIRRVIGNAKAVKQIHRFRPTSISLDVRTFVYKEESQSVGVTLMCGRVEFKLSIGGYQIALLRGQAPTSATLNKTKHGGYFINFVVDIPTQPTGKTPKVIGVDLGRRDIATTSTGKSWSGKQIQSVRDRYSKIRANVQSKRTRSSRRLMRRLSGRERRFQEWLNHNISKQLVQDAKRLNAALAFEDLTNIRESLNQKPRSKVERRRTNNWAFYQLRLFVGNKANIADIPVVFVPPAYTSQTCSRCGGIHPLQSKSYRNGKIFKCGRCGFEHDSEALASLRASADINAALNIAALGKSVSLPESLGMSCQLQGQMSLFPISQICG

SEQ ID NO: 61394 - protein, 412 aa, unknown
  TnpB Polypeptide
MIRSSKISLKFTNTQKIDNLSIFCDEYKTVTQNFVDIIWQQHLNDEKISNLIPKSITDLMKDKTWLSSRAIQSSAKQASGIVRGTIRKFKQREYIYNKLTKEGKFKQARKLKRVIDQYPISKPELNEVNPELDSRFIKINFDNETSFDGWITLSSLGNKMKIEIPFKRTNHLNNLSKKGEIKGGIRISKKFAWFNFDIPDKTKKTNGITVGLDIGIKKVFVSSDNQIGKSDKDGWSLSDIQKKISRRKKGSEGFRQAQDHRNNFINWSLNKLNLSNVKELRVEKIKDLRRYKNTSRYMSHWTYTSIFDKIENLCEENGVQIIQINPSYTSQRCSRCGWVHKSNRKKEMFKCLVCGYATDSDKNASINIGLPLPPSRRKRCLGHDNRVGFYWNVLDGEPIVPRAQKTNFHIFQ

SEQ ID NO: 61395 - protein, 283 aa, Gammaproteobacteria sp.
LETDVERGRVRLFGNKVGWMRWRSGLPRVVETWWVKSPSPKEDRGFFWRLADGRLIKINSGRVSYRGGHWYLAIQYEGPAPEYAEPKALAVGIDPGIRAMTAHDGEQSLEFARVPERSKKRRRRLDRKIARCKRGSRRHRKLVLTRSRLMEREGNMRRDRTHKATRKLIDHARIVGYEDPSAKAWQESGFFGEASREAAAGEFCRQIEYKGDWAGREVVAVPESASSTQTCYACRERTVHPLGKRAYSCPRCGYRARRDENAALNVRAAAIQGARAALPEAVM

SEQ ID NO: 61396 - protein, 419 aa, unknown
  TnpB Polypeptide
MILTYCYRIKPNTEQVAIMERWLELLRRHWNYALGQRLDWLNRSRCSIDRCSIVSEAIGEIPEPLNYYTQQSALKETKRLFPEYKKIYAETQQVNLQRLNKAWERWRKPVKGGKRGGRPRFKKPGELRSFVFPRVNSSKAGAHLIDGVLKLSKIGSIPVVMHRPLPDGFTLKQCTIVKKADGWYCCISMKDDTVPEILPIDSVKSAVGIDVGLEKFLTTSDGEAVPIPQFYRKAQDRLALAQKAMSRRVKGSNNWKKAKKQVSLLHLHLARCRKEFHYQVAHWLCNKYDLIAHENLNITGLARTKLAKSIHDAAWGSFLEILQAVAVKRGLLVQEVNPRGTSIECFNCGVRVEKNLADRVHHCPDCGVKIDRDWNSGINILNRALMAVGLPLNGCGKSIQDIEEQQVSFANLRSPHHNL

SEQ ID NO: 61397 - protein, 509 aa, unknown
  TnpB Polypeptide
VSSKTIVSRTYPRVPYAAFDKDGGSLVLSEVLDGIRKDAELVAHYALQEMTEQNLALSTYFERLKPSGAGYMMGLHLPAEVKKQFRSGASRLERMFREQVVSNLRSWAARVEVMTQTYPKYVSTGWKRAASKSKPSSMQSRLALSAADKQYREMSVTPDHIELMMVVQGKKTVLHFPTPPQLLEKGCEPGAPDIWIDKSDRVMFGFCGKTDPGRPEFSERYVIGIDVGVKNPAAYVVWDTEKKEIVERSLLGQRARSLNNKIKRTQTQVAALQRKNRSEEAALHREHLSNRRLELSILIAQELADASWHYDNAIISFEDLSHIKNTMKHGRWFRGEVFRRTRDMIEADGGRVMKVNAAYTSKRCHVCQSDLDMSNYSSPVCDACGITHHRDLNAAANIAQRANVKKACQTRNKHATKTKRVRRSKCRIKPLKHPGTKNRPTPKAPQNRPKTHTRTYPPLPSKGVSVRMCPADTRVSAVDHMEWFQTTSGTTNPTDNPSISDVDWVYSQE

SEQ ID NO: 61398 - protein, 509 aa, unknown
  TnpB Polypeptide
VRFYDTVTRHRLTTEDRVDAEQVSTDLAQMITWMAQAEREVLTSPEFHDLALKALKGDRPTGSLNSWGRKKLSRYPFSFQKHNMNEMLVSNVVSALELYAMSVGLFQVMSTHPKEARPEKIISHYRNTYPGAPQPTSGMVRAHLIRYHKKGERNPSLPGVSAKLNLAVCDTYFAPKAFRDDNDSLNIIVQIKTPSYGVTKLYLKLPDNNERFGDGKVCRPTIRLNNKGQVVFDIAIEHETQQRDTNKIVGVDLGKVEPFVATVIDPESSHRSAPYYVNHKKRLGSLVKAEKKRHDLVSHLYKRADLCDKYKRTDHADVLRTEAKRVNAKATRIKHEISQCIASQIVSAADQNDTHISLENLSWLDSLGGRWPHAEIQSRIESTAKRYGLKVVKVSAKDTSKTCSRCGGRVSNNSRTRVGTCTTCGFSLNRDVSASREIALRAVSNTRNRERMRSLLRQRQEKRSSAATRQSKPVTALGGNQGHTGTSVSLTEATLMMVRETLDSRGSPI

SEQ ID NO: 61399 - protein, 502 aa, unknown
  TnpB Polypeptide
MQIGNRFRCYPSPAQEQTLLQWIGCQRNIYNSKVREDQYFRCFARKSLQHAGQYAPIDQQYSQFKTELTPYLSEVPSVLLRNGAVLWKQAYGRYFSKLAGRPVIHQRHGKQSVWLTSEVFKFAPVVDTDTGEITGHQLHIGTKKFPVGILDFKAHKEFKLPASLHISIHAGRWHVSFNYDDGVPEPTDKDTTDWLIQFDETELRKMTAGLDRGVTLPLAGSDHQQFDFSEAQEKRLIAQERHKKRWQRRQARRDKGSAGWLKAKRRVARYQRYGADVRRDVAHKTSHVLSVDPRYKLYVFEALKVKNMTGKAKPKQDEHGRWIRNGARAKSGLNKSILASTWGQTKTYLQYKARRQGKLTIEVPPFYSSQECAACGHVHQDNRVSQSEFVCLSCGNTDHADHNATKVIAMRGVRQLLAGKCVQKEKKRCRITRITPVKGVSADVTGLTARTSGAKVGAEGSRTGCEESQSTSGETVVSRLGGNTSALWSLTQETPATRPSGL

SEQ ID NO: 61400 - protein, 377 aa, unknown
  TnpB Polypeptide
MIKSFKIRLLPNEIQEQLLWKHVNTSRFVWNFGLSHQLERYKNNEKHLSGYDLRKVFIELKQQEEYIWLKEISSHTISNICLDLDVAYKRFFKKINGKPKFKKKYKCKNAFPIRQDVFYLNNNCAIIEKIGQIKYQTNYKLPQGRDIRGKFTNPRVKYENNKWILSFGIECNKQAYELTDNAMGIDLGIKDLCIVSCGNEFKTFKNINKTKHVKKIKKQLKHAQRIVSKKYHTNKSWKKSNNIIKAEKRVKQLHNKLSNIRKNYIHQTTRELVNKLPKRITMEDLNVSGMMKNRSLSKAIQEQCFYEFKRQMQYKCEEYGIEFILANRFYPSSKTCACCGFIKKDLKLKDRVFVCPDCGFEIDRDKNASINLMNYKG

SEQ ID NO: 61401 - protein, 438 aa, Mycobacterium sp.
MARLKVPEGWCVQAFRFTLNPTQTQAASLARHFGARRKAFNWTVTALKADIKAWRADGTESAKPSLRVLRKRWNTVKDQVCVNAQTGQVWWPECSKEAYADGIAGAVDAYWNWQSCRAGKRAGKTVGVPRFKKKGRDADRVCFTTGAMRVEPDRRHLTLPVIGTIRTYENTRRVERLIAKGRARVLAITVRRNGTRLDASVRVLVQRPQQRRVALPDSRVGVDVGVRRLATVADAEGTVLEQVPNPRPLDAALRGLRRVSRARSRCTKGSRRYCERTTELSRLHRRVNDVRTHHLHVLTTRLAKTHGRIVVEGLDAAGMLRQKGLPGARARRRALSDAALATPRRHLSYKTGWYGSSLVVADRWFPSSKTCHACWHVQDIGWGEKWQCDGCSITHQRDDNAAINLARYEEPPSVVGPVGAAVKRGADRKTGPGPAGWP

SEQ ID NO: 61402 - protein, 332 aa, Janthinobacterium sp.
VLKDLEKAYANFFAGRAKFPRFKCKGDRISFRVAAKGAIRIEQTNSRLRFPKLGWLRYRKSRDFVGEPVNATISQAAGKWFISIQTRRAVDLVVPIATSAVGIDVGIARFATLSDGSFIAPLNSFKRHQQRLARYQRRMNRKVKFSSNWKKAIAKVRRIHTRIANARKDFLHKTTTAISRNHVLVCIEDLQIGDMSRSAKGTVEQPGKKVSQKSGLNRAILDQGWGEFRRQLDYKMEWSGGMLLAVPPHHTSQTCPACGHVSKDNRQTQANFQCVNCGYTNHADTVGAINVLERGHRLLACGEMAQSGRSKKQEPLEACSNSSRRAVEIPVL

SEQ ID NO: 61403 - protein, 316 aa, Fischerella sp.
LNGLPDFCKSVPYQIKSIAIKDACKAVSNAKKKFKNGGGISKVKFRSRKDPIQSCYIPKSAVSDKGIYHTILGEVTFKEALPQSFGDCRLVKAYGDYYLTVPEEVSRQQSENQGRVVALDPGIRTFITFFSESSFGEIGISANIQIQKLCFRLDKVISKIAKAKCKSKRRLKLAATRLRGKIKNLVDELHKKTARFLVDNFDVILLPTFETSRISKKAKRRIRSKSVRQMLTLSHYRFKQFLKHKAFETNKVVIDVNEAYTSKTVSWTGEIIHNLGGAKFIKSPTDGRVMPRDLNGARGIFLRALVDTPSLRECIC

SEQ ID NO: 61404 - protein, 392 aa, Streptomyces sp.
MQLRYSFRVYPSAGQRTALARAFGCARVVFNDALRVREEARAAGLPFVTSAELSKRLTAAKKTPERAWLGEVSAVILQQSLRDVDTAYRNFFDGLKGKRPRMGAPRFKSKRDNRQSIRFTANAAWRITPGGKLRLPKIGDLRVKWSRSLPSDPSSVTVIKDAAGRYFASFVLETGPEEVLPEVAPELGIDLGLGHFAVLSDGTKVDSPRFLRRAEKRLKKAQRDLYRKQKGSSNRGKARVKVARAHARAADARREFHHQLSTQLIRENQAIAVEDLCVKGLARTRLAKSVHDAGWSAFVSMLEYKAARYGRTLVKIGRFEPTSQVCSRCGVKDGPKPLSVRVWTCGACGAVLDRDVNAAVNVAKAAGLAVSACGAQVRRAPVPAQRSEAGTH

SEQ ID NO: 61405 - protein, 614 aa, Streptomyces sp.
MQLRYSFRVYPSAGQRTALARAFGCARVVFNDALRVREEARAAGLPFVTSAELSKRLTAAKKTPERAWLGEVSAVILQQSLRDVDTAYRNFFDGLKGKRPRMGAPRFKSKRDNRQSIRFTANAAWRITPGGKLRLPKIGDLRVKWSRSLPSDPSSVTVIKDAAGRYFASFVLETGPEEVLPEVAPELGIDLGLGHFAVLSDGTKVDSPRFLRRAEKRLKKAQRDLYRKQKGSSNRGKARVKVARAHARAADARREFHHQLSTQLIRENQAIAVEDLCVKGLARTRLAKSVHDAGWSAFVSMLEYKAARYGRTLVKIGRFEPTSQVCSRCGVKDGPKPLSVRVWTCGACGAVLDRDVNAAVNVAKAAGLAVSACGAQVRRAPVPAQRSEAGTHPKRPSGPCGSRRESRASNPGGCQDRYTGDRAALAESLATERGLTLVPPYDHPHVIAGQGTAALELLEETGGLGALIAPVGGGGLIAGSATAVKGLYPATRVVGVEPEAGDDTRRSLEEGRRVTVPVPRTIADGQAVPTPGELTFAVNRRLLDGVVLVDDEAIEEAMRFAFTRLKIVLEPSGATPLAALLTGRAGPLPPRVGLILSGGNIDAERFARLCAPGG

SEQ ID NO: 61406 - protein, 479 aa, Oceanobacillus sp.
MAAYQTMQIWVKKSHRMHPYFQNMCQNAKNMHNTTNFYIRQVFTGLKQEKELQPLQKEVLESLQTHLPAINANQLQAYRRRSTKEQEKAKSEQKEIKCHLFEMPSKDKPYISYPFLNALFKSMKQIDYQSLPIQSSQGIMRTVFQNWKAFYGNLREYKKNPTKWKTRPNIPGYCRSKEKEIIFSNQDCVVKDKKFLKFPKTKLRLNIGKLGYSEGKLKQVRVVPKYSHYVVELVFQVPIEVEKKESKNRLLAVDLGMDNLATIVTNTGKRAVLVKGKNVKSVNQRFNQLKAYYTGILRQGKQVKEGTFTSNRLEKISHHRFLQIKDLFHKASFQIVKIALEENIDTLIIGQNKAWKQHAAMGKRNNQSFTSLPHSLLIQMIKYKAEEHGITVVLTEESYTSKASFLDNDDIPVYGQKNKNAVFSGKRIKRGLYLSKNRERINADVNGAANIMRKVFKDAFHRNFSNIEALRRPVTLVVR

SEQ ID NO: 61407 - protein, 430 aa, unknown
  TnpB Polypeptide
MTHYASHSVRIEPNNVQQTLLRKHAGCARYAYNWTLKISERIYAEQKIVLSAIDLNKMFLRMEKQHHAWLKEPSIRCYQQAIRNYEQARKNFHAKQKESGYKKMRTLRGGTKILEGLPQIKKKGKCTDSFYVEGDGVRPLQLNGNKIKLPKIGWVKTSELIPQDANIKNCTISRKADQWFLSYKTEFTPTKHNKTTRVGVDLGIKTFATISDGTSFETPKRYKTLQSKLRREQKSLSRKYEAYKATKKTNQNIPYPKKSNNYVKNQDRVARLHKRIADHRNDATHKLTSYLAKNHGTVVIEDLNVKGMMKNKKLAKHISNVNFGEFRRQMTYKGEWYGCEVIIADRFYPSSKKCNCCGELNRNLTLKDRTWVCANCGTHHDRDLNASINLRDYPIGGYAASSAVKACGDGSSAHVAHSPSVKQEVNFELT

SEQ ID NO: 61408 - protein, 406 aa, Escherichia sp.
MIWPMKRLQAFKFRLRPGGQQERGMRRFAGACRFVFNRALALQNENHEAGNKYIPYGKMASWLVEWKNATETQWLKDSPSQPLQQSLKDLERAYKNFFQKRAAFPRFKKRGQNDAFRYPQGVKLDQENSRIFLPKLGWMRYRNSRQVTGVVKNVTVSQSCGKWYISIQTESEVSTPVHPSASMVGLDAGVAKLATLSDGTVFEPVNSFQKNQKTLARLQRQLSRKVKFSNNWQKQKRKIQRLHSCIANIRRDYLHKVTTTVSKNHAMIVIEDLKVSNMSKSAAGTVSQPGRNVRAKSGLNRSILDQGWYEMRRQLEHKQLWSGGQVLAVPPAYTSQRCACCGHTAKENRLSQSKFRCQVCGYTANADVNGARNILAAGHAVLACGEMVQSGRPLKQEPTEMIQATA

SEQ ID NO: 61409 - protein, 381 aa, unknown
  TnpB Polypeptide
MKTRVTIKLKMPCNQLVINAMKQYSKAITYISNLGFKHNVSNRYKLHHLVYYKARDKFNLPSQYIINAIRVASQTLKSVKTNKGSKPIFKEIMPLDFDRRTFNFSFNKVRITMPKQRIDIPIDIPEYYWKYLDWSYQTMRIIYDKRFNRMFLHITFSRDITIPNNSDNFLGIDVGINNIAVTSNKNFFNSNKIKHIKSKFRYLRSRLQSKGTRSSRKLLKKISGRERRFMRQCNHEISKIIVSSINVGDTIVMEDIKGIGGCRVSKKQRYWLNNWSYYQLRQFIGYKARLKGCNIFLVDPRNTSKTCSRCLSLNTIRNGSNFHCLNCSYHLNADLNASNNLKLLGRFLTTKVDVSQPYVPNVDSKASFNGTADEFRDKFIL

SEQ ID NO: 61410 - protein, 197 aa, Cupriavidus sp.
MKHALRKAHQAMSHKVKFSNNWKKAKARIRRIHSRIGNARRDYLHKCSNTISQNHAMVCIEDLQVRNMSKSAKGSAEQPGKQVRAKSGLNKSILDQGWFEFRRQLDYKLAWNGGWLIAVPPQNTSRTCPCCGHVSKDNRQTQARFECVGCGFEENADVVGAINVLRAGHARFACEVSGAAMPPAAGTHRSDSIRLDA

SEQ ID NO: 61411 - protein, 307 aa, Salmonella sp.
MTFPAYRFSSRYATNRPRSLTSLPGVLHIRHSKVSAINRQRELTASAFKYRDGRLYMAKSKTPLDVRWSRPLPSTPSTVTISRDAAGRYFVSCLCEFEPASLPITASTVGIDVGLKDLFVTDTGFKSGNPRHTAKYAAHLTLLQRRLSKKAKGSKNRAKARSKVARLHAKIADCRMDALHKATRKLINENQVVCVESLKVKNMIRNPSLSGAIADAGWSELVRQLQYKGEWAGRSVVAIDQFFPSSKRCRCCGFTMQKMPLDVRKWHCPECSADHDRDVNAARNIKAAGLAVLAHGEPVNPESLNAA

SEQ ID NO: 61412 - protein, 273 aa, Methanomethylovorans sp.
MRIKIYRKIEGCIKAVIIKREGERWFAIVQSEQEPHPLPETEEAVGLDVGLTSFVVDSVGNKIENPRCAEKSADKMAKLQQSLARVVRGSNNYRSLKDRISQLHKRINCQRDDFLHKLSRTYVNSFDIICVEDLDIKSLKEKGHNNGMHRSIHDASWSKFIFMLSYKAQSAGRKLIKADPRNTTQRCSACGSIGEKDLSVRVHECPYCGFSYDRDYNASMNILITGMEQPVVPIESNHGSRFAPKTMKNAATYRSIDMGSEGCNLVRDLYPVL

SEQ ID NO: 61413 - protein, 438 aa, unknown
  TnpB Polypeptide
MLEVHRTYRAKIRNHSQVEDSLDRHGWSASKLWNVANYHSREEWEETGEIPDHEELKDELKEHPKYKGLHSQSSQRVLEELAEAFNSWYSSDDDRDNPPGYRKENYYDEEGRRVHEEHPRSTVTWKQNGIRHDTKNNRVRLSKGATHKEHPKAWEYVLVEYETRPGVTVNNLQQVRAVYDTAKERWELHLVCKDEIETPDAPGNETAGIDLGISNFAAVAYSTEDADLYPGNRLKQDGYYFPKEIAKCDDSGSERATQLHKKWSERRTHFFHSLAKHIVDQCVEKSVGRINVGELENVREDEDGESKNWGRHGNLDLHGWAFDHFTNILEDKAKVAGIEVVEVSERDTSKTCCVCGRADESQRVERGLYVCEACDAAFNADVNGAENIRLDINDESNSESSGQLSGDRSTGWLAQPGVYLYDLSCGFQPQAEVVDSKP

SEQ ID NO: 61414 - protein, 379 aa, unknown
  TnpB Polypeptide
MLRAIKVRLYSNKQQEQTLNKVLGSYRFVYNHMLARKQDAYKADKTNLTLKKLSNYLHHELLKDEQYIWLKEQNTKVMNQAIRQMLTAYDKFFKQYNGFPKFKSKKDKQSALFPVGTISKRNTFEERKITLTQSLKNIKFRCSDLYFKRLRKYKGDIRSATLSKTKSGNFFLSILIDIPQTEIVKFKKTNKQVGVDLGVKDFVITSDGKKFENKHFFKKDERKLKKLQRQLSKKKVGSNNRNKQRFKIARAFERITNKKENYIHYVVNELLMNYDTIYMESLNVSGMVKNHHLAKAIQEVGFFRFKEILNSKAIANDKKVVLIDKFYPSSKTCSNCGYKNKDLKLSERHWQCPNCGANHDRDLNAALNILNEGRRMRVA

SEQ ID NO: 61415 - protein, 387 aa, unknown
  TnpB Polypeptide
MRRLLKSFKTEINPTEEQKAKIRKTIGTCRYIYNFYLAYNKELYDKGEKFMSGKSFSVWLNNEHLPQNPDKLWIKEVSSKSVKHSIENGCIAFTRFFKHQSAFPNFKKKGKSDVKMYFVKNNPKDCRCERHRIKIPSLGWVRIKEKGYIPTTKDGYVIKSGHISIRADRYYVSVLVETPNNKIANNSNEGIGIDLGLKDFAIVSNGKTYKNINKSAKLKKLEKQLIKEQRSLSRKYENLKKGESTQKTNIQKQRLKVQKLHHRIDNIRTDHINKTIAEIVKTKPSYITIEDLNISGMMKNKHLSKAVASQKFYEFRTKLQAKCNENGIELRVVDRWFPSSKTCHCCGAVKKDLKLSDRIFKCSCGYVEDRDFNAALNLRDATTYEVA

SEQ ID NO: 61416 - protein, 396 aa, unknown
  TnpB Polypeptide
MRGGIGLIETIKVQLRPNNKQLTKLFQYANCSRFAYNWTLAREHENYKQGNKFLQDGELRKEFTRMKKLPEYEWLREASTNVPKQAIKDACNSYKSFFKGQSKYPKFKSKKRSKPSFYQDSVKIKFTDTHVKVEGFAVSKKKNKQKLNWIKLCEKGRIPTNCKYMNPRFTFDGLHWWVSVSIEMENDTNIPQNKGIGIDLGLKDLAVCSDGNTYKNINKTHGVKKIEKRKRRLQRSVSRKYNMNKEGVRYKKTSNIVKREKELLKVIKRLTNIRCNHLHQITSEIVKRKPSFICLEDLNVRGMMKNKHLSKAIQQQGFYEFRRQIQYKSEWNNITVILADRFFPSSKLCSCCGMINKDLKLSDRMYRCDCGNIIDRDYQASLNLKQYGENVLKQNL

SEQ ID NO: 61417 - protein, 392 aa, unknown
  TnpB Polypeptide
MIETIKVQLSPNNKQLTKLFQYAGCSRFAYNWTISREQENHKLGNKFLSDNELRKEFTQLKKHKEYQWLSKISNNVTKQAIKDACNSYKRFFKGQSDYPKFKSKKHSKQSFYQDNVKIQFTDTHVKVEGFTMSKKRNKQKLNWIKLCEKGRIPTNCKYMNPRITYDGLHWFVSVSIDVEDNTGIPSNKGVGIDLGLKDLAVCSDGNIYQNINKTSKVKKIEKRKRRLQRSISRKYNMNREGVRYKKTGNIAKREKELLKVIKRLTNIRQNHLHQITSEIVKRKPSFICIEDLNVSGMMKNKHLSKAIQQQGFYEFRRQIEYKAKWNNITVILADRFFPSSKLCSCCGEIKKDLKLSDRIYKCDCGNIIDRDFQASLNLKQYGENVLKQKSVK

SEQ ID NO: 61418 - protein, 389 aa, unknown
  TnpB Polypeptide
MKARFKYRIYPTLGQKRRLARFVGCVRVVWNDSLACCQEKYKLGNKKPTNSELQKQFITLAKKTQDRVWCSVVSAIPLQQSLNDLNQGYQNFFKSTQGNRKGKPIRPPKFKRRMSLLTARFTKGGFKVGQHKVYLAKIGKLKIVCSRELPAILSSVTVIKDSANRYFLSFVAEVLPEVLPKTDNSVGINLGIKTFATLSNGKKIDAPKPLRKRIKKCRKLSKSLSKKTKGSKRYEKARLKIAKFHAKLKDTRNYFLHKLSTEIIRENQTIVLEDLNVYGMVKNQKLSRAILDLGWRTFRTFLEGKAEKYGRYFRVISRWEPTSKICSCCGFKGGKLDLSIREWECLNCGAKYDRDQNSAINILVAGGQSETLNGHGGRQPDYCQSSSSL

SEQ ID NO: 61419 - protein, 380 aa, Vulcanisaeta sp.
MPEGGTYYKTLRAEAEVVNGDINDLLWELAVYRYALQKVIDALWELGRLPRKSQLHQLFYPLLRSYGFRAHVTRNIYDYALALVKSARGNGGDKPRVRRLSARFDYQDARAEMDKGTVKIILRDKWYVLKLKHGREYIGKFKGLRWKEVHVKYENRKLYVSVVFELRYQPYTPKGFVAIDVNLRNITTFNGSEVRRFGTRFIEALSKRARAEELQRKYPRRWKFNRRILNRVRTLHGSARNIINDFCWKVAKEIVAKAHRRKHAIVLEDLEHLRDSINKKDGGVRWKLTLFAYRRLQHAVIAKVIEYNVPVVFVDPRNTSSTCPRCGSKLSHIHRLAICSKCGFKRDRDYVGAVNIWFRALHAYAGEPGSPPQRAPCNEQ

SEQ ID NO: 61420 - protein, 386 aa, unknown
  TnpB Polypeptide
MIRTYRCRAKLSAAEHERLGEIFRLSAELYNAGLQSRIDCYRKTGEGRSYYDQCKELTEVRAELREFEEVSAIVFRGVLSRLDKAYKRFFRYGGFPRFKSSRRWRTIEINDQCWRMLRREGQKLVLKVKGLPRIGVKTERELPSNALLKAIRITRKPLRTEVALSYELATPEEKPVSDPVGIDMGISKRLTMSDGKTVEKREIDRKRLIRLQRSVSRKKKGSNNRRKAVSLLAKEWQRLTTDKERNYLHRLTSEIVKMHDFIAAEKLETKKMLGNRQLARSIQEQTWGKFAALLNEKAESAGVKMVRVDPKGTSQECSSCGVTVKKNLSVRMHKCDCGLEMDRDVNAAINILHRGISVAGGKITRMVERMGNKRGAALVRPRTVYV

SEQ ID NO: 61421 - protein, 383 aa, unknown
  TnpB Polypeptide
MELTKTVVCKLRTGKGEAEKIRETAMAFRNACNYISEVAFTQKCFNPVALHHITYRTVREEYNLLANLAVRARDRVAKSYKQNKHRQHNFRQLSMDLDKRLFTLFRNGSFKVSISTLSGRVKPTLDIGEYQRELLNNPAKDAKIRFRDGDIYIHITVSSRVPEPEGGNPVGVDVGEMKILVASNGFERKGGEIKEKRRRYRKQRQALQSKDTSSAKRKLKRLSGKEERWVNTVLHQVSREFVDSLNEGDRVVLEDLTGIRNGAKRRKKSRADFHSWAFHKLATMIGYKCAECGIPVEYVSPAYTSQRCPRCGTIDRRNRKSQALFRCINCGFQHNADHIASVNICELAQDVWAPVNAPNVGMNAVPGSLRGLHDDSPTSHLTC

SEQ ID NO: 61422 - protein, 389 aa, unknown
  TnpB Polypeptide
MKAHTAVRFRAYPTEEQARRINRTIGCVRFVYNLMLETRIAHYQTTWESCYPTPALYKDTYPFLREVDGFALCNAQLALEKAYKRFFEDRKTGFPKYKSKRRGRKTYTTNLSHGNIRLDDKTRRLKLPKLGWLAVRQHKHIPDDWKLKSVTVEHCPSGRYTATILFEYETQIPEKVKPVKTVGLDYASHGLYVSSDGEHAEYPGYYRKMQDKLAREQRKLSHMVKGSANWRKQCKRVGRLYEKTSNQRRDYQRKKANRIVASYDMVGVETLNMKSMMKKPKPKPDYEHPGHYLPNGRKARKGLAKSTSDNGYGMFCTMLEYKLARQGKQLVHVDKWYPSSQLCHDCGCKNPLVKDLSIREWACPSCGVLHDRDVNAARNIRDEAMRIIE

SEQ ID NO: 61423 - protein, 405 aa, unknown
  TnpB Polypeptide
MATVLKGIKLRLYPNKKQERDLIQMCGNDRFLWNKLNEMLQSRYENNKHLYNGDKSKDAKLKRRHVMLSAYDMDMLLPLMKVEFPFLSYSDSSALQVVTSNLSKSYFNFFKKPEQFGLPKFKKLGVCKLSYTGKSTVKILARRNLKLPKLGCVKTSKTGVLNNVKVKRYTIERDSTNRWYITFQVEAQVNEFEKTNKTVGLDLGLTDMVIGSDGFKSGRFLVSELENEIKSKQKVYSKRRHYAKVKIAMDKNKKVINLRTLLDFINVEKARVTKAKLQKRLANKRKDFLHKLSTNLVKTYDVIVIEDLKSKNMMKNHKLAKAIGNASWYEFRTMLEYKCQWYGKQLIIVPPHHTSQECSNCHYNSGKKTLDVREWICSNCGVHHDRDINAAKNILTKGLETLQTI

SEQ ID NO: 61424 - protein, 431 aa, unknown
  TnpB Polypeptide
MKFIVGGESAHFRGNEVCLFFFIKDLCALFFMKRMRAWKYRIYPSKKQQKEMDQHLNSCKDLWNSLLEYTKSYYEKTGKFPSRKQLYTLTKETPLFSQVAQNVADRLTKSLKGIIARKKRGMKTGFPRFKPIERVKSFTYPQFGFKLNEKLELSGIGDISIKKHRDVEGEMKTLTIKKTPSGRWFAIFTTVIEKEIPQKKQGGSAAGIDLGIEHFVYLSDRTIIENPRHLKQAEQKLKQRQKQLSNKKKGSKNRKRARIKVAVAHEKLTNRRTDFLHKVSRKLTDKYSFIALETLNVAGLAKSFLAKSVLDCSWAEFLSMLTYNAEEAGCEVVLVDPAHTTKKCSSCGLIQKKSLAERQHNCICGASMHRDLNAAINILSRATGGTLGSRADVQMYCTEARKACGEETSTHYKPNGQVSSMKQEAHVFTRG

SEQ ID NO: 61425 - protein, 402 aa, unknown
  TnpB Polypeptide
MKQTIKYRLNPNFEQEKHLHNLCSIATKLYNTDNWQRRDVWDKTGKIPSVYTQKKALNQNHWFKLLPSQTAQEIIFNLQRNYNSWFKLRKKDATANPPMFRRKEMLSVISFYQQFKIIDDKIRLSMSMKYRAENRIKLLEIGFDKWNVQEGTPKFCQIIFNKGKWYAHIVYEIAEQSPVLNDSVMAVDLGIINTAVIADSEGNTKIYSGKQILAMQHYFNKEKAKLTSILTKQYPQRHQSRALRILQNKQTRQINQSLHIHSKAIVTDCLNKGIKTLVAGDVTDIRKDKNFGKKNNQKLHSWSFSKFTQQLEYKCMKVGIRFVCVNEAYSSQTCSHCGQVRKANRKHRGYYVCKSCGYKLNADVNGAVNILKKYLRDFLSRSIGIVAMPSVARITNVCPYII

SEQ ID NO: 61426 - protein, 405 aa, unknown
  TnpB Polypeptide
MMKTESIKYINIYWISMEKTYKYRLYPSNKQINIFNNILNNCRYLYNSMLEYERYVYEKDIRFANKIELNNILPDIKIINPNLKSVHSQILQNVNDKVIKSFNGFFNRIKEGNKAGYPRFKNIHRYNSFTFPQTGFKFMNNKKLKLSKIGEVNIKLHRMIKGNIKILTIIKTLTNKWYACFSVHIDLKPPIRQSNKIIGLDLGLEKFAVLSDNSIIENPRLLKKSLELLKSKSRQLSKKQKGSSNRLKSRFKLAKLHEKVSNQRLDFLHKTTSRLVNEYDCIALEDLKPSSMKNKYLQFSINDVSWDKFRQLLTYKAEYAGCKLDFINPKNTSKECSNCGNLQDMPLSKRTYNCSCGLSISRDFNSSLNILNHSLFHRHMAGTAIKACEEVSLETSVKQEAICFS

SEQ ID NO: 61427 - protein, 379 aa, unknown
  TnpB Polypeptide
MHKVYRYRLYPTKTQETSMKRTLEFCRYVYNETLAMRKHAWEQEKKTLSNFDMHNLLPAWKAQRPELKAVHSQVLQEVQERVDLAFKTFFRRVKRGGEKKAGYPRFKGKERYDSFTYPQSGFKLDTDNNILTLSKIGEVKIELHRRVGGAVKVKRVNINRRPTGKWFACFIVDHEPKKQPFKDGAVVGIDVGLSSFATLSNGEKIENPRFFKQEEKELAKAQRKLSAQERGTPERTRAKKVVARVHERIANRRSDFAHQLSRRIVDRFGVIASEDLNIKGMMHNGHLAKSIGDVAWRQFTNYTKNKAEEAGSIVVMVNPNNTSQQCSRCGSVVKKELKDRTHSCSCGLIMDRDENAAINILRRGLASIGDRTLEAPCES

SEQ ID NO: 61428 - protein, 248 aa, Brasilonema sp.
DSFTLEGTVKILGSNKIQVPVIGVLKTYERLPQVLTKSATISRQADRWFLSFRFEIETQNLGNTNVVGVDLGVKNLATLSTGKVITGAKSYKKYEAKLSRMQWLNRHKIIGSVNWKKAQLQIARLHRKIANIRKDTLHKLTTLLAKNHGTVVIEDLNVSGMLANHKLAKAIADMSFFEFRRQLTYKCELYGSKLVVVDRWFPSSKTCSNCGTKKETLGLDERVFNCGHCGFVVDRDLNAAINLSKAVS

SEQ ID NO: 61429 - protein, 429 aa, unknown
  TnpB Polypeptide
MIPIGKKYGIDAIFALTKAEDVWRGIEKCLYANGKTLHFSKYGVLPCIRAKQRNRGIPISVKENQLQFKFGKSTFGIQLKDRFQSDEIHAVLDYLAEPEIIDKKAIQIFAEKAYCINTYRPCYATLVPKLIRGKYRVYLHLTIEGKAKPKYDRFGNPRHKFGKGIIGADIGTQTVAYTSDTEVGLKNLSERGNSIQKSERLERIYYCAMDRSRRATNPQNYNKDGTIKKGRKIWKYSNHYKRLKAKHAELCRINERNRQLAINEDANYLRSLGDVLITEPKNASKLMKRAKETTKNNKGKFNKKKRFGKSIKNRCPGGFQTTIEKKFEVSGGRYIEVASNYRASQYDHTADAYVKKKLSDRMYHLVDGTLVQRDWYSSFLLYCYDDKIEEINKTKCRTEFEKHYKREKALIEWIQANQIKILNSGIKTA

SEQ ID NO: 61430 - protein, 269 aa, unknown
  TnpB Polypeptide
MTVSVECGHWFVSVVTEMDFANDGPRRPGEVGIDLGIAQTVTLSDGTVFQLDVESIKKHEKQIAVLQRQLCRNKEARQKLAKLGKANPFDKREPSRKRRRLKAKIQNHHRCIRNIRRDFMLKTAHTIAQNYGGVAMEDLKLKNMTKSAKGTVEESGKNVRQKTGLNRSLARVAPYAMRMAIHWAVFKANGRLILVDPKYTSQTCPICGCTSSSNRPSQAHFGCQKCGYTANADVVGATNVLKKSRTGSVRPCSELGNKTATGTVLFVAS

SEQ ID NO: 61431 - protein, 416 aa, Halobacterium sp.
VADNEYHRRTAITRLSVSPADSTLLRGTIEEWQQGCQVAVDRAWEQGHSNSDVQELAFDAVRNQTSLGSQHAILACHQAAENIRSCITRRRAGKKASKPTYTSPTITYDSRTMTIFPEQEQVSLTTHGDHARVRGDLVVPDDEDGYQHQYLASDEWEPTESTLHYRNGEWYLHLGFRKPDTNATSETTENGTVLGVDLGVNEIAVTSTARFFSAGNLNHERREFERVRADLQTHGTRNAHRTLESLSNREDEYVKHVLHGVANGIVEEALRYDCDGIIFEELDGIRERLPKAAWHSKWAFNRLYNYVEYKAEAEGLFVDTTDPKNTSKRCAECGFVHGNNRQSRGAFECQECGNRNQADYNAAKNVAELYLRREQQSSRRRGVSQYALKSGTVTPKRGYTPYPDGFEAESADKSHP

SEQ ID NO: 61432 - protein, 411 aa, unknown
  TnpB Polypeptide
METVRIYRLAGLRPGFQTRLREAQMEAARVWTLCRDIHLSARQQHARWPNRDELQQATKGQFALHSQTVQMICHAFLANIETTRELRQTNPKIRYPYKDKRYYPLCWPAQAVSRERGRVVLPMGRCRASLVFHVDLPTDSGACKLVWNDGYELHVAVPVVRADAAPGQAQATVDLGEIHQAAVTTNTGAALVISGRGIRSLKRRHNMALGQIAKKRKRCQKGSRRWRKLQAARGKVTARKRRQIRDLRHKGTRAVITFCQQQGVGSLFIGNPHGVRNHNSGRHHNQRMSQWEYGQDMAYLGSKAKQSRIESFTGSERGTSSRCPICGWKQKVKGRVWRCRNRSCSFVGHRDVVGSANMHPLAFGNVIDFPAQVTYQRPGPVRVHRRDKQPLRVVQASRNVVAARTRVTNSG

SEQ ID NO: 61433 - protein, 441 aa, unknown
  TnpB Polypeptide
MLRTITFACSLPKDEADTLNRESGRIYSDMLTRHYRLYRKQGVWLALKSGERLEDALGGPTTLHAHSRDAAQQGFYKACKTAKACKAAGLVAKYPHWQKRWRTTIWKSTGISRKGTDLLLARARGLAPVAVRLPHNLLTLPQAPFLEARLVWDRAARHYIWHVVVEDGLKPEPLPGNHTAAVDLGEVHPAAVTDGQETVIITCRALRANAQCTAKRLSEIRAKQARKQRGSRSWWRLQRRKSRFLAKQKRRARDMEHKASRAVVTWAKQRHVSTVVIGDVRDVADGKRLNAKSQQKIDVWSHGRQRQYITYKAEAEGMSVVLCPEAYTSQTCPQCGHCTKPKGRTYRCPACGFVAHRDAVGCANILSQHYTGEPGHVLPPPEKYRHPFGGKRSRPDTADLAWARAARQVPSQEAAPLLRQRSVTNEKALVGPTFQQGCPLL

SEQ ID NO: 61434 - protein, 371 aa, unknown
  TnpB Polypeptide
MSETIIRTICIKLAIDGHEASLAAVQKAFNEAATWIADVCWQEGITNTNTAHHRVYGETRTRFGLGAQLAVCARAKAVEAIKAVRTAGKETCPTFGPRGSIRYDARTYRLMSLDRVSLNTLAGRVICRLLPGPRQHEMLVDPAWKVGGADLVWRRGTYSLHITQSQEAPPLAADDGNHLGVDLGIVNLATDSEGQVFSGAQVSKARKRYHTRRQILQKVGTKSAKRRLKKNSGREKRFQKDVNHKISKALVKKAAQSRKALAIEDLTGIRQRGTVRRAQRYERHSWAFYQLRSFLSYKAAAAGVRLVLVDPRNTSRTCSACGHCEKANRQSQASFTCQRCGMQMNADHNAAINISRAAVKPPLVATRLLAS

SEQ ID NO: 61435 - protein, 195 aa, unknown
  TnpB Polypeptide
LVSPLPKGARPTTITVSRDAAGRYFASFLVEEDFQPLPVTPQTVGIDLGLHDTVTLSTGEKTGNAKFFAQDEKQLAQAQRALSRKQKGSKNREKARRRVARIHARIADRGQDFLHKLTTRLIHENQVLCVESLRVKNLLKNHCLAKAIADVGWGELIRQLQYKAAWYGRAVVAIDQWYPSSKRCPVCGHILEALS

SEQ ID NO: 61436 - protein, 202 aa, unknown
  TnpB Polypeptide
MRFATLSTGETVENPRHLRKGLKRINVLSQIKDRRKRGSHRRKRVAIALAKAHRKVRNQRLNAHHQLARPLVNRYGLIVMEDLKILNLTTAPEPKPDPENDGQYLPNGAAAKSGLNQSILDAGWGQFQSCCIVKAERAGRRVVLVDPKYTSQLCSGCGAVVKKELSERWHSCECGCSLDRDHNAALNILCRGQEVAHRATAL

SEQ ID NO: 61437 - protein, 387 aa, unknown
  TnpB Polypeptide
MLLCRKIRLEVSEQDAATLEMMQGKCRGLYNWWVMRLRAGERWRCLDAKKTLAESRKYDPDIDQVYGKLLAEAYFRLDKAMQAFFKRVAAGEKPGFPRVRPRHQFFTLCYPAMYINVVGNTVLLPTGGGRGKKNKPYPTIVAGLTETPPTGYREVAISRDARGHYSASFVYPRQDEVQTTGQVVAFDLGIKTLATGVNEHGRFYHIGGFKGHQWYNKQLDKIRSKRDRCKKKSRRYLHLSQVYQRVSEKKRNKQKDCLHKASHLITHRLVERTVVIGDLSQQQMVMKEHEEKRRFQHRAVFNDWGLYGFVQMLEYKCVLAGKALVKLDERDTSKTCSGCGEMQSMPLYKRTYRCGYCGLVMDRDENAAVNILQRSLARLGPQAQASA

SEQ ID NO: 61438 - protein, 418 aa, unknown
  TnpB Polypeptide
MMPVEEIRLTAKFKVDFTDADEATISEIHRLFKEYQRIVNELIEYAHSHGITSSMRLWYAKYHEMRQKHPTLPSHYICTACWHAASIYESFIELKKLGMCEKEKPAFKGQVIWLDKELFKLDTNGWRVSIIVHEKRWITLKLLHCRYHERFKGMRLGGARLVLKDGGNLYLNVVFRQTIVLPEMDADAKVIAVDVNENAIVYGNDDFIERFETNEGIIRTRYFLKRRLIQSKIRGRGLRARLLEKYRGRERHRVREIYYRAAKEIIGKAREVGATVIVMEDLDIHKRDLGSRELNGRIHRWGYGKFQRILEYQAKLHGLNVKYVDPAYTSKICPVCEGELEESSNGRRLRKCKRCGLEEDRDAIAVKNLTKRYYEGCMNMKNPKTSFDCRCQIDVGSPRSPRKPPNEKEGGRAKAQNA

SEQ ID NO: 61439 - protein, 287 aa, Nostoc sp.
VLKGHWSAIARFFDNCKKGKPGKKGFPKFKKEQMHGSVEYKTCGWKLSEDRRSITFSDGFKAGTFKLWGTCDLHFYQLKQFKRVRVVRRADGYYCQFCIDQERVERREPTGFTIGIDVGLNHFYTDSNGEIVANPRHLRKSEKSLRRLQRRMSRTKKGSQNRVKFRNKLSSKHLKVSRQRKDFVVKTARCVVKSNDLVAYEDLQVRNMVKNHRLAKSISDVSWSLFRQWVEYFGKVFGVVTVAVPPHYTSQNCSNCGQVVKKTLSTRTHVCPHCGHIQDRDRDQLHL

SEQ ID NO: 61440 - protein, 393 aa, Lactobacillus sp.
LIKTHKIKLYPNATMRKELEKLFDYRRFVWNQGLEVWNDMYDASLVVMDKSIRPNERKVRDELVTNKADWQFERSSRVLQLAVNDLSKAWANYLNPKMPNHAKPKWKSKKRSRKTFKTDRAQIVNGKLRLDKPRGTKVWYDIKMAEPPRWQGEIKQVCIVQDADGYYASLSIEATVMVEKRTIRRVTAVDVNVGKFDYKTPSGYAIQSTLLASLPALYARITHYQKQLAHKRTTNPKHFNSMTYRSTRTKLKRNYQRVERIQMDLLNKFTTKLVVDNDLIGIEDLDNQHMRMNRRLAKNLHRSMFGKFKIMMQYKADWNGNTLILADPMFPSTQRCSRCGHIKTGEEKLTLHGNVKYHTGHDDYICYGCGARMRRDENAVDNLIDYAKSKVQG

SEQ ID NO: 61441 - protein, 404 aa, Streptomyces sp.
VVIAGQTVIVCAEVALRSDVVKLVVQVKLLPTPEQASALEATLRACNRAATYASQTAFAKGLKDRNGLQKEVYADLKATFGLSAQPAVRAVKKVVDAYTTLKANLQAGNLGPPTAKRHRKAVSTPIAFRPEAAQPFDDRCLSWQYDARTVSIWTVDGRMKGIRFACSPDQLKTLVTHRKGESDLVQRNGKWFLIATCELPDPEVYEPADWIGVDRGIVNLATTSDGTNHQGRRLSRYRRWQARKRAELQARQTRSDTRRLARRAQKEKRHATHVNHHISKEIVLVAQRTGRGIAVEQLGGIRDRVRLRRDQRGTLSSWPFHQLGQHLAYKATMAGVPFLEVDARHTSQRCPRCGHTERANRPTRDHFRCRRCGLAGPADVVAGVNVRDRARSAWVLVTAPAPSP

SEQ ID NO: 61442 - protein, 431 aa, unknown
  TnpB Polypeptide
MSSYGIEIKNMNKIFYPTIAVYNKAVSFCISTFESEWTDIKNLDNLQKKSYAEKLIHSTKNNTAKYNFDSMFYKMPTYMRRAAINAALGYLNSYHSLVKLWQDNGCIGKKPSLQINHNSFPTFYRDNMYVPNGDGTVQLKLYINNDWKWINVSLKHTDLQYIYKHLQNASMSAPTLEKKNKKWFLRFAFEENVTLKKTDNTIMAIDLGINTDATCSIMKKDGTILARKFINFASDKDQINHTLNKIKGISQKYGSHNTTKLWRTVSFKNEELARKIAKSITDYAIEQNVDTIVFEYLDTKGKKRGSKKQKLHMWKKNTIQNIVTHKAHRNGIKVSHVCAWNTSKLAYDGSGEVLRGKKANLCTYELCKFSNDKIYNCDLSASYNIGARYFIRELEKSISAKKWSLIQAKVPECVKRTQCTYHTLIEILNAM

SEQ ID NO: 61443 - protein, 406 aa, Thioalkalivibrio sp.
MQRRQAFQFALQPNGQQERQMRRFAGSCRFVFNHALALQQERYAQGEKKLGYAGLCKQLTAWRNRPETAWLADAPVHPLQQALKDLERAYSNFFAKRADFPRFKKKGQHDAFRYPDPKQIKLDQGNSRLFLPKLGWLRYRNSRDVLGTVKNVTVRQSSGKWFVSIQTQREVEPSVPQGGAVGIDMGVVRFATLSDGTFHAPRNSFKRHETALRKAQQVMSRKVKFNNNWKKAKAKIQNIHARIGNARRDYLHKTSTAISQNHAMVCVEDLQVRNMSKSAAGTVEVPGRNVRAKSGLNRSILDQGWFEFRRQLDYKLHWRGGWLVAVPPQYTSQTCPCCGLVSADNRQTQARFQCVECGFEENADVVGAINILRAGHARFACKVNGAVMPSAAGTHRSDSGVAPCHA

SEQ ID NO: 61444 - protein, 408 aa, Hyella sp.
MLSFTFQYKLIPNKSQSAQIDEWLEICRRVYNWNNCERKDWIKARKNNISSCSLIKEYIIPAEAKFPNYNIQAVNLTIAKKENPELKKVQSQVLQSTLKRLDKAWTDFFNKKQKRGLPRYKQSNQFRSFTYPQIKESVFEGNKVRLPKIGWIKFKKSREFPTGMIPKQLRVVKKAVGYFIQIIFVSTEDIPDIVPGMSSLGIDAGISSFIATSDGELIETPQFVKKAASKLQSLQRKLKHKIKGSSNWLKLQRMIAKLHFVVTSRRTDWLFKLAHQLYDKTDNIFVENLDFRGWQKGLFGKQINNSAIGKFINQILPFVCFKRGVYYQKVDKNYTSQICPQCATNTGKKSLNQRVHHCDCGAIMNRDIAAAKVIQQRGEIAVGHTVKEIACGGDATGVQLQLNLVGSH

SEQ ID NO: 61445 - protein, 404 aa, Boseongicola sp.
MALVATHRQVVFRLLPQTRSGWRLLERTLEQQRQLYNAALEERIDCYRKTGRSLSYYDQCKALTECRRDLPEMAECPVAIQRGTLKRLDEAFRHFFRRVRNGEAPGFPRFKGRAFFNSVSVVSGVKVRDGTLHVPGLGSMSIRRRGGNPHPGGKPVSAVLKRELGKWHAVVCYAVEIEAPADNGHVLGLDRNGGQVADSDGEIHDMPDLARLEAQARRLQRRVSRRRKGSRRRERARRHLAKVRRRIANRRRNWHHHVSRRLAAKAGAVAVEGLDVKGMTRSAKGTAEAPGTMVAQKSGTNRVILNTGWTALRRMLDYKAANVIIVPARNTSRKCHECGAVEAASRRTRDDFVCMACGHAAHADLNAAKNIRDKALERLAAMNEASGTGASARRAAFALATSDP

SEQ ID NO: 61446 - protein, 438 aa, unknown
  TnpB Polypeptide
VPRAAGQEITVADTARLPQFFDRMCDPVRVRTAYKCRAYPDPAQQQVLTRTFGCVRVVWNRTLAARRARWHLQGTGTSYAESDRALTAMKKDPALAFLNEVSCVPLQQALRHQHQAFGAFFAGRARHPRFKSRRSRQAAHYTRRAFSLRGGELRLAKTSAPLRYVWSWPGVDLAALDPAMVIISRESDGRWYVTFTRDTAAPQPLPQTGHAIGIDLGVTRFAVTSDADMVANPRHLDRKARNLARYQRRLARCRNGSANRAKVAAKVARAHRKVRHARADFLHRASTRLVRAADLIVIEDLNVAGMVRNRHLARAISDCGWGEFRRQLAYKCQRFGRELVVIDRWYPSSKTCSACGYRRAELTLSARHWQCPGCGARHDRDVNAAKNILAAGRAVARGSPGDACGAEVSHSGSSRVRSAVNQEPRAARTGIPVLQGGE

SEQ ID NO: 61447 - protein, 402 aa, Gammaproteobacteria sp.
MQRVERHIIVNSYALNELTFKAKNLYNVANYHIRQTFIFTGLMPCEYELSTFFAELNQPDYRALPAQTSQQVIKLLFKNWTSYFAAIREWKKIPSKFQGMPKIPNYKKKNGHFVAIFTNQQVKVKQGFIHFPKAVNMKPIKTSVSKPKQVRIIPQATCFVVEVVYEKEVQKVETLPDSFISIDLGLNNLITSFNNVGLAPFIVNGSRLKSINAWFNKNKAKLQSQLPKGIFSTRRINHLTHKRHQKINDYIHKTSRFIVDYCVENRIGTIIIGNNDGWKNSINIGKRNNQNFVQIPHTKLIRSIEYKALEFGIGVKITEESYTSKTDNLVLEPLKKHGSNQIKKPSLGKRVKRGLFHSSNGMLINADCNGAIGIARKVVGDLALKPIIDKSIALMPRLMFSF

SEQ ID NO: 61448 - protein, 391 aa, unknown
  TnpB Polypeptide
MARYRLMPIPTQEAILRQHCAHARYVWNLAVEQQSWWRPGRTSAPGYVAQCRQLTEARSENLWLADGSQIVQQQALRDFGQAMANFFAGTHGRPTWRKAVRDEGFRIVALRAKNIRRLSRRTGQVRIPKVGWVRFRWSRAVPIARSYRVTLDRAGRWHVAFAVRPTPTPAPGTGEVTGIDRGVAVSAALSTGELLRCPGLRQPERRRLCRLQRRLSRARRGSRRRERIRAAVAKLHARESDRRKDWVEKVSTDLARRFDLIRVEDLRIRDMTRSATGTVERPGRNIRQKSSLNRAILCNGWGLLVRRLEDKAVGRVQKVNPAFTSQRCSVCRTVDAKSRKSQADFACRSCGFTCNADVNAARNIAAGHAVSARGRLPLGERVNREPQPSAS

SEQ ID NO: 61449 - protein, 458 aa, unknown
  TnpB Polypeptide
VLDLNDTEALTALERLTHATRKNPHPVMPLSEVTRDVPAFFRRATIHAALGSARSFSRHLCKWRAQKAKAEAKKKAFHKRPPVPPRTWRKAPTLYAGIYKENTDDTILLKLWTGSAWAWIKCQIGGRRLPEGWDAASPSLVEKAGTWWLHTPITKQFESPAKVVDQLHSSEVRICAVDLNLDGHLAVASILRADGTPLATRFLGNGAEINGRRKSLLGKVARNRSKTGICAEGEQDNLYLWNRMHGLNEQVAHLISCRIVEFAKTHGATILVFEHLGNLQPDQGRYSHRANQKRMYWMKGRIFRYSRYKAWNEGIVTCRVNPKNTSRECALCHQEVARYHTGQPEEGYQTGAPLVVCLDPECRHRDHADRNASIVIGHRLLARTQKPFQEKPPARPSSGRSTKVEGGPSSHDAKGKRNPFNSSSGLGRWVESGTTQRRESGMADPSRGIPRQLRLLPE

SEQ ID NO: 61450 - protein, 427 aa, Escherichia sp.
MHQENTMLPRRISVSLFIDQSIIWPVKRLQAFKFQLRPGGQQEREMRRFAGACRFVFNRALARQNENHEAGNKYIPYGKMASWLVEWKNATETQWLKDSPSQPLQQSLKGLERAYKNFFQKRAAFPRFKKRGQNDAFRYPQGVKLDQENSRIFLPKLGWMRYRNSRQVTGVVKNVTVSQSCGKWYISIQTESEVSTPVHPSASMVGLDAGVAKLATLSDGTVFEPVNSFQKNQKTLARLQRQLSRKVKFSNNWQKQKRKIQRLHSCIANIRRDYLHKVTTTVSKNHAMIVIEDLKVSNMSKSAAGTVSQPGRNVRAKSGLNRSILDQGWYEMRRQLEYKQLWRGGQVLAVPPAYTSQRCACCGHTAKENRLSQSKFRCQVCGYTANADVNGARNILAAGHAVLACGEMVQSGRSLKQEPTEMIQATA

SEQ ID NO: 61451 - protein, 226 aa, unknown
  TnpB Polypeptide
MLGIQFANHDEFCFIRIGNHYEWFVTIAYAVEDLMKDTEFKDPTMAKRDAGLDLGLENLVTMSDGTVIPNDRTYRKKERELANAQRMLSECEEGTPDYYKRLGKLSHKYKKTRNHRKDMFHKISRKLSVRYGNIAMEDLSVKEMAEESPKGIRKSYRDAGWNTFTRMTAYKVEETGHTVVFVDPTYTSQIRSSCGTLVPKDLSVRVHECPHCGLIMSRDRNAAINT

SEQ ID NO: 61452 - protein, 603 aa, Rhodococcus sp.
LNISADLAVSRQFSFSTRPHAAVDGVTGEPVGLDDVDVRVGWLLDLVAAAGAELLERLWHPVTFDVLAAGLDRQDRRLPAQGHVAAARLGWTPRYPDGVYAPSRVTRMVTAQVVSTLRTLAFRDAAIVSLSARFDPVTGRIAPPDNVSDHVPSGFARGVRRQLATRARDGAVGEGVGRLRITDVQGPPQVAAMARLSATDKQFAQLAVTGGELVLTVKLPTSPAPQGRSGWRWVRLTAAVPAHLCVRAVTDWHLPTLTLDHRGLLLRCAATESVPAADAAAGLVAVGVDWSPSTLGATAIAADGPGGLSSTYRGWTYDDRGLGVKLARLQAEGQLLHRKAACLARLAATAPPEVRARLEAKIAVLDGNRTAVGVKRAKINRELAFHFARQVTDHATTVGARVIAVEDLATLEPKNRGRGNNNRAAQSARRKAVAALAHTAAGAGIEVVTVPARGSSALCPGCNEELTRPGGYHTARCGPCGLHGNRDHVAGVNLAKRVLLGRGRIVRRPGHLPAIRVAEHAPVRKSRDKNQPTPARPRHRRVRRSLHLNTHRAGVKPNNPVPAPQASVWDTVKPAAPRCDTGSRDTHGTPPPATPVVESARST

SEQ ID NO: 61453 - protein, 238 aa, unknown
  TnpB Polypeptide
MQMGIVHERDTDRVRLSLPKALKKYMEETYQIHENFLYLENKIFRGMDQIKQLRIYPPEKGNCKIIVVYEIPDQEELPQNGHELSIDLGLHNLMTCYDSENGKTFILGRKYLELERYFHKEIARVQAQWYGQQSGKGVKHPVTSKHIRKLYKRKHDSVTDYLHKVTRYLAEYCREQGITCVVTGDIRNIRREKDLGHRTNQKLHSLPYNRIYIMLEYKLKRYGIRFIKQPANKKSRLN

SEQ ID NO: 61454 - protein, 488 aa, unknown
  TnpB Polypeptide
VETIDQPQTITRCYRYALAPSAVQREAIFAAARVARRYWNSLVACQRHALHEIEHGRRGSVASALTELLLVKKLTGGAVVKARPRAETDGISLEQAAHLNRIDQSREASKCEYTKKGFFLRKEVQSQARHRLRDRKCRSNPQEKRRVQNRNGARADKKVPRLLSVLHHRQARGTTIQADRRFYFAAVPAQHGSSNPISGDRVRLDKLAGDMCSAAPAILHRPIPETATIKQVALTIRGPRMFAVLMLDLVGQDRQYAATGQVAGIDPGRKMALSLSNPDQTVTERMQPPLARHSHVLKRLRRLQRKAARQLRAANPDCFNADGTFKRGKRPKNKSNNFRRASQQVLDAQEHIANARSDYYHNAANQLLSAYDVIGVGTWRGKGNAPGEGKAKRAQNRKDYDHAISSFVSILEYKADECGKQVFDVPEHGSTKRCSYCRADTGPTGLEGLKVREWTCRECGPHHDRDFQAAAEIARRAQRMAGANSRPR

SEQ ID NO: 61455 - protein, 422 aa, unknown
  TnpB Polypeptide
MYFTIKQQVKGLSKEEYETLQELCHIAKNLYNQGVYNVRQYYFEQKEFLTYEQNYHLLKDSENYKLLNSNMAQQILKEVHGAFKSFFGLIKLAKQGRYEYRDIKLPGYLPKDGFTTLVIGFVRLKNNQLLLPYSNEYKKLRKKIIITIPPNVVGKNVKEIRIIPKAKAKFFELQYIYKVEQPQRKLTFNNCLVVDLGVTNLATCVAITGSNQDSKSFIIDGKRLKSYNQWFNKENARLQSIRDLQGFGSKQRSNRQYRLYRKRNNQVSDYINKSARYIINYCLDNDIGTVVIGYEPTLQRSSNIGKQNNQNFAMLPLGNLKEKLEYLCKFYGIRFIKQEESYTSKASFFDNDILPTYNKDNPETYEFSGKRIKRGLYQTSKGYLLNADVNGALNILRKSSVVDLTVLCSRGAVDTPVRIKIT

SEQ ID NO: 61456 - protein, 355 aa, Lachnospiraceae sp.
VQNKAYKFRLYPNKEQQEFMNKTFGCTRFIFNRILGDAMNHYQETKKSKINTPAAYKSEFPFLKEVDSLALANAQLQVKLAYKNFFNGSGFPKFRSKKDNYQTYTTNNQKGSVRIENGKIKLPKIGFVKVKLHREVIGLIKSVTISKNPSGKYYISILTEQEIHPLPKIEKKVGVDLGLKEFAITSDGEVFANPKFLRRTEKQLMKAQRELSRKKKGSSNRKKARLKVAKLHEKIANQRNDFLHKLSTKLIHENQVIVMEDLSVKNMVKNHKLAKAISEASWYQFRVMIEYKSKWYGRELMIADKHFASSQLCSVCGYKNPEVKNLGLREWECPNCHTHHDRDVNASKNLLQLAM

SEQ ID NO: 61457 - protein, 414 aa, unknown
  TnpB Polypeptide
MLRAYKYRIYPTADQKILFAKTFGCCRFVYNWALNLKIEAYKSNNESLSNVYLTNRMKSELKQENEWLSEVNSQSLQSSLRNLDAAYKNFFRNKKVGFPRFKSRKNNQSFHCPQHCSVDFAGSTISIPKAKSIPAILHRPFKGTVKTVTISMTPSGKYFASVLVDTSIDELPLQPIEPETSLGIDLGISQLAICSDGRTFENPKNLKRSEALLKHRQKQLSRKQKGSVNRNKARIKVARIHEKITNQRKDHLHKVTYALTHDSQVRTICIEDLNVMGMVHNHHLAGSISDASFGMFRTLLEYKCKWYGVKLVVIDRFAPSSKTCRRCGYVYKGLKLSERSWTCPECGTHHDRDFNAACNIKKFGLKALPTERGKVKPVDCPLVDDRPRVLKSNGRKKQEKRGGIGISEAAKSLV

SEQ ID NO: 61458 - protein, 220 aa, Microcystis sp.
MEKAYLFRFYPTPEQESLLRRTLGCVRLVYNKALHLRTQGWYERQERVGYTETSSMLTDWKKQEELDFLNEVSCVPLQQGLRHLQTAFTNFFAGRTKYPNFKKKHQGGSAEFTKSAFKFKDKQIYLAKCTEPLPIRWSRQIPESCEPSTVTVRLHPSGRWHISIRFDDPTIKPLPPTDKAIGIDLGISSLVITSDGDKVSNPKHFKKHYRRLRRASEKSF

SEQ ID NO: 61459 - protein, 410 aa, Salmonella sp.
MMMLILKAYKFRLEPTPEQSQRLRQLCGCARFVWNLGLAETKRILDSGEKLPSAFELSRMITAWKKMPESIFLQDAYTDNLQQKLKDLHTAWKRCFDKKLAAKAPVWKRKNEGRDSIRFVNFEKYCCLENRRVKLPSGLGWVKFRQSQRVNGKIKNATISQLAGQWYISFQVEIETAEPNHTSTTIVGLDAGVAKLATLSDGTVFEPVNSFQKNQKKLARLQRQLSRKVKFSNNWQKQKRKIQCLHSRIANIRRDYLHKVTTTVSKNHAMIVIEDLKVSNMSKSAAGTVSQPGRNVRAKSGLNRSILDQGWYEMRRQLEYKQLWRGGQVLAVPPAYTSQRCACCGHTAKENRLSQSQFRCQVCGYTANADVNGARNILAAGHAVLACGGTMQSDRPLKQEPDAEQSAVTH

SEQ ID NO: 61460 - protein, 389 aa, Escherichia sp.
LTLPKKCGYIVHSKQPHTECKMLIQKAYKYRLYPTDQQAQRLRQLCGCARFVWNYALNETLSIHDAGGKIPSAFDLNKRLTGWKKLPELAFLSEGYTDNLQQKLKDLRSAWDRCFDKSLTAEKPVFKKKTKGCDSIRFVNFSKYCGLDYGRVKLPSGLGWVKFRQSRKIEGVIKNCTISQHAGHWYVSFQVELAVTDPIHASTSAIGLDAGITKLATLSDGTVFEPVNSFKKNQDKLARLQRRLARMVKFSANWKKQKAKISRFHSHIANIRRDYLHKTTTTISKNHAMIVIEDLKVSNMSKSAAGTVDQPGRNVAAKSGLNRAILDQGWAESAASSNISRHGAAVMYWRLIRRTPVRNAHVVGIHRKITAGRRRALSVPRAAIRQTPM

SEQ ID NO: 61461 - protein, 218 aa, unknown
  TnpB Polypeptide
LVFNIRIEQGENKTELNQDLSIGIDLSVKDLAIVNCLDKPIKNINKSKEVKRLKKKLKRLQRQVSRKYRKNKDGKKFIKTNNIIKLEKKIKLIYRKLTNIRDNHIHQSTSKIIKLNPYRVVMEDLNIKGMMKNKNLSKAIQEQKLYEFIRQMKYKCNFNCIEFVQVDRFYPSSKLCSDCGFKKKDLKLSDRIYKCDNCGLVIDRDKNASINLGNYKLA

SEQ ID NO: 61462 - protein, 374 aa, unknown
  TnpB Polypeptide
MNKAYKFRLYPNKEQEILINKTFGCVRFVYNKMLAERKEIYEQHKDNKEELYKQKLPTPAKYKSEFEWLKEVDSLALANAQMNLQSAYNNFFRDKKVGFPKFKSKKKDKNSYTTNNVKNNIKIVDNKIKIPKIGFMNVKYHRQILDNQLIKSCTISKTSTGKYYISILVEFEQQVIQKEININNILGLDYSQYELYVDSMDKIANYPKYYYKMLSKLKKEQRKLSKCQKGSNNRNKQKLKVAKLHEKVANQRKNFLHKKSKELSDNYNAIIIENLNMQAMSQCLHLGKGISDNGWGMFTTLLKYKLKDRGKKLIKIDKWFPSSKKCNECGEINKELKLSDREWNCKSCGSIIQRDYNAAKNIRDEGIRLLGLIA

SEQ ID NO: 61463 - protein, 378 aa, unknown
  TnpB Polypeptide
MISYKYKLYRNRRTRHLDAMLREASFVWNHALALQRRYYRLYGRYISCKRMKAHFAHRVHRELLHSQTVQEVLERLDTAYQRFFTRLAKRPPKFRKARDFSSIVFKQGGYFLSGNVLTINRIGKRFKFSLSRPYEGKVRTLTVKRNRLGEYFIVMVLDKPPVSLGKTHYGASVGIDFGLRRYMTLSDGTSVDNPMFLKEGLCELRRRSRNLSRCVKGSSNRERKRRELDRLHARICDRRSDFQWKLAHTLCRKYDTIILEDLVLEGMRRRWGRKMGDLAHGNFVVKLQYVATKYGVTVHKIDRFYASSKTCACGNVNEGLRLSDRRWTCPVCGMTYDRDLLAARNIHRQGIVDLASDGKTSRPLVGRRSRLQPRISSL

SEQ ID NO: 61464 - protein, 503 aa, unknown
  TnpB Polypeptide
MNNAQLGVNKRKGRQKGKYEYKKKILQQKINKYTKLFSKNINETIFIDYNTNSWFNLKIYKQPQQLFNKPKVDYKTLSHDGYYTKQYNLTPTVDQKIILREWLRDYTLMYNATTEYLRTEWFKYKILSNIGKVKKLKKNKKLKYPRKKLKITFSLNIKIVKGKLQKEKEKIIEGSIITSNKKSIKVDSHLLDYAINDALNRYKSCLTNKQRGNIGSFRLRNLKINRNNQILKLEKLAFNDSGFSTSKIGNMKINCANFNYKNNIHTVATLHYIKKTDTFRLLVKYKKKEINTKKTPENIIALDPGIRTCFTGYAQNEIIEIGTNIYQKIKIKLEYIDKIKNAKKSNYKPSIKNVKERPRIELSEKLKNKIIEKQRKRITNLINDYHWKTINYLTDTYSGILIGNFSTKSMGETKTVSKMVKRVGNSLRLNQFHERLKYRCTYTKTKYNNVDEAYTSKCCCKCGTYNKNLGSAKRYICINPSCNLNIGRDINGGIGIMISSLPI

SEQ ID NO: 61465 - protein, 444 aa, Methylacidiphilum sp.
VQLTHKIALRPTPEQADYFARACGTARRVWNWALDEWKRRYAAGCKPNAMALKKQFNAIKYRDPQWLDEDGQPWLKTIHRDAHAQPFAYLEKAWKRYFADRKAGKPASEPQFKKKGRCRDSFYVANDKFRVSGKTIRLPKVGEVAMAEALRFEGKILGATVSRTADRWFVAIQVEVPDRIFHRRRTGDGVVGLDFGVKAAATLSSGEAIDAPRPLKAALRRLRIRSRRLSRKIEAAKVAAGFAPQARLPKGTKLPVSNNRRKSAATLARLHARVANVRADFTHKLTTRLCRKNQAVVIEDLRVKGMLANDRLARAISDVGLGMFRAQIEYKARRYGTRLIIADRWYPSSRLCSVCGWKNEALTLKDRSWTCPECGAHHDRDFNAALNLKRLATATALPVASPSGNSGVAAEMVSAVVGKVTPVRDDSVEESGQEENSAHLCARF

SEQ ID NO: 61466 - protein, 405 aa, Methylacidiphilum sp.
MLISHKIALDPNNVQATYFAKAAGTARFAYNWALERWQKQYEAWKANKRLPKPSQYSLRRQLNAIKREQFPWMLEVTKCAPQMAIIQLGQAFANFFAGRARYPQFRKKGRDDRFTLTNDQFDLDGSRIRIPNLGWVRMREPLRFTGKIMSATVSRVADRWFVSITVDAPDLCHHKAENQGIVGVDLGVSALATLSTGEKVPGPKPHKVRLGRLRRLSRSLSRKAKGSANRRKAKVKLARLHARIANSRMDALHKLMTRLTRRFSLIGVEDLNVRGMMGNRRLARSIAAGGFFEFRRQLEYKAAMWGSVVVVADRFYASSKTCSACGYELETLPLSVREWTCPACGAIHDRDWNAAKNLERLALATASSAGSYACGEEGSGLAFCAKRNRLDEAGSQPCSCLSRNE

SEQ ID NO: 61467 - protein, 233 aa, Methylacidiphilum sp.
LWRAVVEVPDRIFHRRRLSRKIEAAKVAAGFAPQARLPKGTKLPVSNNRRKSAATLARLHARVANVRADFTHKLTTRLCRKNQAVVIEDLRVKGMLANDRLARAINDVGLGMFRAQIEYKARRYGTRLIIADRWYPSSRLCSVCGRKNEALTLKDRSWTCPECGTRHDRDFNAALNLKRLATATALPVASPSGNSGAAAEMVSAVVGKVTPVRDDSVEESGQEENSAHLCARF

SEQ ID NO: 61468 - protein, 304 aa, Methylacidiphilum sp.
VGEVAMAEALRFEGKILGATVSRTADRWFVAIQVEVPDRIFHRRRTGDGVVGLDFGVKAAATLSSGEAIDAPRPLKAALRRLRIRSRRLSRKIEAAKVAAGFAPQARLPKGTKLPVSNNRRKSAATLARLHARVANVRADFTHKLTTRLCRKNQAVVIEDLHVKGMLANDRLARAISDVGLGMFREQIEYKARRYGTRLIIADRWYPSSRLCSVCGWKNEALTLKDRSWTCPECGARHDRDFNAALNLKRLATATALPVASPSGNSGAAAEMVSAVVGKVTPVRDDSVEESGQEENSAHLCARF

SEQ ID NO: 61469 - protein, 169 aa, Methylacidiphilum sp.
MESTMSTGRAAKLLGVSVKTMQRWEREGRLIPAARTDSNRRLYTESQLRDFLGLRHAVSEPARLIIADRWYPSSRLCSVCGWKNEALTLKDRSWTCPECGTHHDRDFNAALNLKRLATATALPVASPSGNSGTAAEMVSAVVGKVTPVRDDSVEESGQEENSAHLCARF

SEQ ID NO: 61470 - protein, 351 aa, Methylacidiphilum sp.
VSGTQALYEWNKQYAQGKKPNAMALKKQLDAIKYNDPQWLDENGKPWLKAIHRDAHPRPFARLEKAWKRFFADIKAGKPARELQFKKKGRCRDSFYVANDKFRVSGKTILLPKVGEVAMAEALRFEGKILGATVSRTADRWFVAIQVEVPDRIFHRRRTGDGVVGLDFGVKAAATLSSGEAIDAPRPLKAALRRLRIRSRRLSRKIEAAKVAAGFAPQARLPKGTKLPVSNNRRKSAATLARLHARVANVRADFTHKLTTRLCRENQAVVLEDLHVKGMLANDRLARATSFVGFRMFRSQIEYKARRCGTRQGNRRPLLSEKPVVRGLWLEERSARAQGSGVDVPRVRYAP

SEQ ID NO: 61471 - protein, 426 aa, Methylacidiphilum sp.
LPAPAAPCGASGTGRWTSGSASMPPGVNPTRWRSKSSWAPSSTATRSGSTRTGSRGSRPSIGTPTRSPLRTWEKPGSATLPTAKRANRCLNRNSRRKAAAATASPEPTTSFGSAVRRFACPKWAKSPWPRRCALRARFSAPPSLARRIAGLWRAVVEVPDRIFHRRRTGDGVVGLDFGVKAAATLSSGEAIDAPRPLKAALRRLRIRSRRLSRKIEAAKVAAGFAPQARLPKGTKLPVSNNRRKSAATLARLHARVANVRADFTHKLTTRLCRQNQAVVIEDLRVKGMLANDRLARAISDVGLGMFREQIEYKARRYGTRLIIADRWYPSSRLCSVCGWKNEALTLKDRSWTCPECGARHDRDFNAALNLKRLATATALPVASLSGNSGAAAEMVSAVVGKVTPVRDDSVEESGQEENSAHLCARF

SEQ ID NO: 61472 - protein, 367 aa, Bacillus sp.
VEGMHKSYRFRLHPNEEQKVLIHKAFGCARFVYNYFLTKRKEAYENDKVTLTRFQCDKQLTLLKKEIEWLKEPDKWVLQNVLKDLDAAFKKFFKEKKGYPRYKKKHDRDRSYRTNNNGNTVRVEGSRIRLPKVGLVRFSKSREIEGRIISCTVRQKPSGRYFLSILCESDKQTFQKTEQSVGVDLGIKDFAVLSTGEKIPNPKNYRKYEKKLALWQRKLSRRKKGGKNREKSRLQVARIHEKIANIRKDFLNKLSTKLIRENQTICLEDLKVKNLMRNHNLSKSIADAAWHTFREMLEYKANWYGKTISIIGKSFPSSQLCSSCGYKNKDVKNLNLREWECPYCKTHHDRDVNAAINILNEGLRLLA

SEQ ID NO: 61473 - protein, 383 aa, unknown
  TnpB Polypeptide
MPDRPSQWATYTAARVEAARLWGDLVARHHRLRRMNWRWPSKARFQRWAKGRYPGLSAQATQQIIGEFIEAVDATRQLRKNGHDEARYPWKRPRYRDVVYTNQDARIKGNRLVLPNGTSGHLRIPLPDDRPLPGRLMEVRLCLGHVLLVCEVPDEPRHQRTVIGVDLGVNTLIAATDGKKAVLISGREAKATVQWRNKRLASAASKQSHMVEGSSRWRRIQRRKKQMLAKARRRVNDLIHKATHRVAQEFPGATCHVGKPFNEAAQKMNGVWAQQVSQASNGKITRQLDYKTSGAIQEDEAFSSQTCPVCGARHKCRRVYRCRNCGTVAPRDQIGATNILCIGQHGAMRSGQAIATQVVYVRPVKVFRREPDSAGGHPGTSSA

SEQ ID NO: 61474 - protein, 376 aa, unknown
  TnpB Polypeptide
MKLTLKIKLLPNDSQFKSLKNTLIEANTACNYISEVAFKKKIFNQFKIHKETYYVIKDTFNISAQMAVRCISKVADSYKIDKKVKREYKLLGGIAYDSRILTYANNTISIWTVDGRLKGIKFVCHNTNYLPYIKGEADLVLKKGKFYLFQTVEVPDEEIKDIEEFIGVDFGLTDIAVTSDNKKHSAEWLNKYREKKQRIRSSVQSKGTKSSKRLLKRLSGREKTTATIINHTIAKSIVSNAKEQGKGISIEDLTNIRFTSKNRNKTFRTKLGRWNFSQLRSFLTYKSLLSGVKLVAINPRYTSQTCNECKHIGKRTNKVFECTNPNCRVDKIDADYNASKIISLLGASVNKPESSTMYCSLHYVVSSKAHTPLGCG

SEQ ID NO: 61475 - protein, 402 aa, Escherichia sp.
VKRLQAFKFQLRPGGQQECEMRRFAGACRFVFNRALARQNENHEAGNKYIPYGKMASWLVEWKNATETQWLKDSPSQPLQQSLKDLERAYKNFFRKRAAFPRFKKRGQNDAFRYPQGVKLDQENSRIFLPKLGWMRYRNSRQVAGVVKNVTVSQSCGKWYISIQTENEVSTPVHPSASMVGLDAGVAKLATLSDGTVFEPVNSFQKNQKKLARLQRQLSRKVKFSNNWQKQKRKIQRLHSCIANIRRDYLHKVTTAVSKNHAMIVIEDLKVSNMSKSAAGTVSQPGRNVRAKSGLNRSILDQGWYEMRRQLAYKQLWRGGQVLAVPPAYTSQRCAYCGHTAKENRLSQSKFRCQVCGYTANADVNGARNILAAGHAVLACGEMVQSGRPLKQEPTEMIQATA

SEQ ID NO: 61476 - protein, 376 aa, unknown
  TnpB Polypeptide
LSDSCAGGLLQAACGTARRVWNWALNEWKKQYAAGGKPNAMALKKQFNAIKYTDPQWLDKNGRPWLRDIHRDAHAQPFAHLAKAWERFFTDRKAGKKAHEPRFKKKGRCRDSFYVANDKFRLDGKTIRLPKIGDVAMTEELRFTGKILGATVSRTADRWVVAIPVEVPDAQCYRHRTAHEVNGIDLGGTAGATVSHGEVIDAPKSLNAALRRLRIRSRRLSHTLEAAKKAAGFGHHTCLPKGTRLPVSNNRQKSAATLARLHARIANIRADFVHTLTTRLCRENQALVIEDVNVKGMLANEKLARAISDVGFGMFRSQLEYKARRYRTRLVIADRWYPSSQLCSAAVGRMRRGRCRIGNGCVPSVVRTMIVISMRR

SEQ ID NO: 61477 - protein, 414 aa, Nitrospiraceae sp.
MANTQCLPVLVGIEFPIDQAYNKTMLIRKAYKYRLKTKPSHELKLRRAAGCSRYVWNKALAVQKDRLDKKQPCLSYNELAGLLIEWKKDKDISFLREVHSQPQQQTLKALHRAIHDALDRPYPKRFPSFKRKGVHDSFRYPQGFQINGDVIYRPKIGWIQFYKSREIEGIPKNVTVSRQGAHGDIAIQVEIECEDPVHPSKEETAIDPGITQLATLSDGTFYKPLNSFKTLESALARSQRDLSRKDKFSKNWHKQKDKVNKIHTCIAGARSDYLHKISTTISKNHVLIVLEDLKVANMSARGIKEQPGRQVTQKSGLNKAILEQGWDEFRRMLEYKQLWRGGLVVAVPPHYTSQTCPACGHVHSDNRKTQCHYMANADHVGARNILAAGYAVLACGEVDAVKPLDEAGIRKDAA

SEQ ID NO: 61478 - protein, 342 aa, Okeania sp.
MYSCQQVLVGKNPELIAILTFLCEQSHKLTNMGIYYGRQLFFKSYKTLGKFDLEKVYKKNNHYKVLYSQAAQQILRTIAESFRSYYGLIKAYSEGKISERPKIPNYRKKGGMATVSYPKQALKLKDNLLRVPLDNTCKRWFGLDCFYIHKPSNLNFASLKELRILPRNRCFTQEFIYEKEVVVKPQLNQDNVLGIDHGVNNWLTCVSNVGTSLIVDGKHLKSMNRWYNKQVSTIKENKPTGFWSNKLAAITEKRNRKIRDGINKAARIVINHCLKKSIGTIVFGWNKGQKNEIKLGKKSNSEFVPIPTARLKERIAQLCYEYGIIFIETPRKLYKYSFIFRW

SEQ ID NO: 61479 - protein, 202 aa, unknown
  TnpB Polypeptide
MAQKALSRKVKGSNRRAKARAKVARLHAHVANQRLDAIHKATTWLTQTYSYISVEDLNVAGMAKNHHLAKAVSDAAFGEFRRQLEYKTARTGATLHVIDRWYPSSKTCSRCGRVKAKLSLSERVFHCDACGLSIDRDLNAAINIKVAGSAPETLNAHGGTVRRGGQPGRATQVPVKCEPSCGTNRVRLGAGARKDTLQATVM

SEQ ID NO: 61480 - protein, 389 aa, unknown
  TnpB Polypeptide
MSGTGPSLENNEKRTEMMRNYKYLLRPSKKQDQMLDFLLWQERIIYNAALEKRIRMYQETGKSLNYMSQWVFIRDLHRQHPDTFGLLNVNSLNRLLRRLDQAYAGFFRRVKAHDKKVGFPKFKSRRTFTSMEYVYGNGCKLRVREGRTRFYIQNVGEIRMCYHRPVPTEAKIKCALISRNGARWYVILMIELPDPQPEPRPPLVIGIDVGLKSILTCSNGLSVGNPHWLGASLVRLRILNRQASRRQDGSNRKKTAYAQVSRMYAKIANQRRDFYHKATRSFVDNYSLIAIEDLPMAFMNANEFLGKPSYDAGLGTFRRFLEYKAQAAGVQVVAVSPYNTSQRCSGCGELVPKNLDTRIHDCPHCGLVLDRDVNAARNILQAALAQVNQ

SEQ ID NO: 61481 - protein, 389 aa, unknown; identical to SEQ ID NO: 61480
  TnpB Polypeptide

SEQ ID NO: 61482 - protein, 423 aa, unknown
  TnpB Polypeptide
MPSATRTLSFRLYPAPCQEAALWRKLCFLKDLWNAALEERIGAWRHGVRIGLADQEKLLKEVRSDIPGWKGLVHTHEAQSVLKRLDLAFQGFFRRVRAGQKPGFPRFRSAQGFRGWSYKEHGNGFRVVMRPGWRHGHVTLSGVGRMRIRGCARTPGRILKADVLRDSFGWKLSVVIDTDCAERAQADEAQAAGLDWGVADFATLAFEDGTFEKVPNPRLLADETEALREEQRRLSALACARKISKRAHGKAKRDLARRHAKVAARRKDFLHKATCALVRRCRLIATETLSVRNMTATARGTVEEPGTNVAQKAGLNRSILDTAPAAFLNMLRYKAEEAGMEFLEAETRRLKPSQRCPDCGAVHKKPLSLRQHDCTCGCHLGRDEASALVLLRWGLKESANKALPDASDSQPAGTVGAQVANAA

SEQ ID NO: 61483 - protein, 427 aa, Nostoc sp.
MLVFEFKAYGKSTQFTAVDEAIRTAKFIRNSCIRLWMDVKDTGKNDLQKYCAVLAANFPFANELNSMARQASAERAWSSISRFYDNCKKGIPGLKAENAVLGSPQVERFSQTGYPQFQKDCRSVEYKTSGWKLADDRKSITFTDKKGIGRLKLKGTRDLHFYQINQIKRVRLVKRADGVYVQFCIDIDRFENIEPTGNTVGLDVGLKEYYTDSDGVMFENPKFLRTGERVLKRSQRRVSRKVKGSKNRGKARQILGKRHLKISRQRKDHAVKLARCVVQSNDLIAYEDLRIKNMVKNHCLAKSINDASWYQFRVWVEYLAKVFKRVTVAVNPQYTSQECSSCGEIVKSGEIVKKTLSTRTHVCSCGCVMDRDENAARIILSRGLGTVGHTGTFALDASNALGDATTTHAGVILDEQVMSLIKESQCL

SEQ ID NO: 61484 - protein, 420 aa, unknown
  TnpB Polypeptide
MKLAYKFYYRKKFPELDTLCIVSNDLYNQANYIVKEEFKKSGKWLRYNDLDKVLKTTENLNHEINYRKLKAQVAQQVLRILDKNWTSFFNSLKAYKKNPKDFKGLPKSPGFRKTKDRNLLVYTNQSCQIKDNNRITLEENIELSIPKTDIDFSKFQQIRVLPRKRRYEIEIVYNKDCVNFELDQENYLTTDLGVDNFAACVSKEGSFLLDGKSIKSVNQYFNKMKAKNQAYRDKKGKNVCHKKSYELSNYRGMFTRDQFHKMTRFLINYCILKNIGTIVCGYNKQWKDSIDIGKINNQKFVCMPHKLFLKILKYKCELVGIVLICKEESYTSKCDSLALEPVKKQKKYLGKRVKRGLFQSSMGKLINADVNGALNTLRKVIGDCLFIKGIIDSVVLFNPVKIRFADLSCEQTLSNFLVRC

SEQ ID NO: 61485 - protein, 465 aa, Caldilineaceae sp.
MSEHLKGVGKSHRIALDPTDRQATRMLEHAGWARVAANWARGRFQLAWFGHTDEQHAEEWYAHVDVNPGGGTWLSDMDLRREFNAVKADLFAWSCDHSQNVSKNAIIHMGRGLDAWGEYCKARKHGKPHRKVGFPPLRKRHRKLAFTPSNGRHSIKVDGRQVHLPKIGWVRMREALRFDGDIMSVTVSRKAGRWFASFTVDTCEPAPDPKPGPDIGIDMGIRTLATVWDGEEGEEIANPKALARALKSLRRLDKAIARSLHTHGRHNPSQRRDGLYAKRNRLYFDIANLRADHHHKATTQIAKRGGTVKVETLNVDGMKRNRRLARPLSDAGMSEFVRQLEYKCAWYGTAFEKVDRWYPSSKTCSACGAVKQSLLLSERTYRCNLCGFECDRDENAARNLQAYTGHSEPARHLNEFPGPARSAGGERDVETHRSHRREACARSVKRLPDSQPPCSAIAPDCGRLV

SEQ ID NO: 61486 - protein, 523 aa, unknown
  TnpB Polypeptide
MMLLVNLSRGGEPVKFYDTVTRHRFTTEDSVDADSVRADLAQMVSWMAKAEQEVLNSQEFYDLALKDLKGDRPTGSLHSWGRKRLSRYGFEFQKHNMNEMLVSNVVSVLEAYSVSVGLFQVMSTHPKETKPEKILSHYRNTYPDAPQPTSGMVRAHLIRYHKKSERKASLPGVSAKINLAVCDMKFAPKASRDDNDSLSVVVQVKTPSYGVTKIHLRLPENAERFGTGKVCRPTIRLNNKGQVVFDIAVEHETDERQTKKFVGVDLGKVEPFVATAINPESKHRSAPYYANYKRHLGSLIRKEQQRRDLSHYLYEKADLCESHNQDQHAQVLRTEAKRVSAKATRIKHEISQCIASQVVEIANQNDAYISLENLSWLDAKGGRWPHAEIQQRIESTAKRYGLKIVRVSAKDTSRTCSHCGGRAKNNTVTRVGACSVCGFELNRDVSASREIALRATSPSSRSRERMRCLLRQRQEMRSSAATRQSKPVTALSGNQGHTGTSSTSLEATLMMVRENLDSRGSPT

SEQ ID NO: 61487 - protein, 512 aa, unknown
  TnpB Polypeptide
MSPKTVVSRTYPRTPYAAFGKNGEPLNLEDVLSGIRKDAELVAHYALQEMTEQNLALSTYFDRYKPAEAGRQMNLKLPVEVKKQFKSGASRLEKMFQEQVVSNLRSWAARVEVMTQTYPKYVSAGWKRTADASEPAFLKPRLALSATDKGYYYKNFNVTPKRISLDMVVQGSWVTLQFSTPPQLLEVGCEPGAPDIWVDKNNRVVFGFHGKIDPGRPEFSERYVIGVDLGITNPAAYVVWDTEKKQVVEESLLGQRARSLSNKIKRGQTQVSALKKKGKDDEAVSHREHLSNRRLELSILIAQELVDVSWRYGNAIVSFEDLSHIKNTMKHGRWCRGEAFRRTRDMVEADGGRVMKVNAAYTSKRCHVCQSDLDMSDYSQPRCTTCDTTHHRDLNAAANIAQRVNIKKACETRKKHATNTKRVRRSKCQMKSLKHPGTKNQPTPKAPQNRPKTHARTYPPLPKREVSVRMCPADNRVSAVDHDTWFQTTSGTTNPKENLSIANTVDVVYPQE

SEQ ID NO: 61488 - protein, 510 aa, unknown
  TnpB Polypeptide
VKYYDTVTRHRFAPEDGVDAEQVEHDLAQMVTWMAQAEREVLASQEFYNLALKALKGDRPYGALTSWGRKKLSRYPFSFQKHNMNEMLVNNVVSVLEAYAVSVGLFQVTNTHTRETKPERILSYYRNTYPDAPQPTSGMVRAHLIRYHKKGERKASLPGVSAKLNLAVCDTHFAPKVSRDNNNPLNVIVQVKTPSYGVTKIHLRLPENAERFGTGKVCRPTIRLNNKGQVVFDIAIEHETNQRDTSNVIGVDLGKIEPFVATVIDPENKHRSAPYYANYKRRLGSLVKKEQQRRDLSARLHDRANLCDRYNRTNHADVLRTEAKHVSAKATRIKHEINQCVASQIVSIADQKNVHISLENLSWLDAKGGRWPHAEIQSRIESTAKRYGLKTVKVSASNTSRICSHCGGKTSNNTKTRVGACTTCGFELDRDVSASREIALRATSPSSRSQERMRSLLRQRQEKQSSAATQQSKPVTALGGNQGHTGTSNNGLEATLMMVRDNLDSRGSPT

SEQ ID NO: 61489 - protein, 444 aa, unknown
  TnpB Polypeptide
VENAVRGHAVRGLEPRALELEIPRFEREVVPVGKAPSNRAGLGFRVYKPRVSKVNRERLKALYNDVINYILGVVHELKGSKYLAYYADEWVEMYENAKRVREEAGKRTLPKTPPVLVPVRFVMPDGRERGNRNAPAVIDLRKGELRIPSYGIAQKLRRSLVRALIEENSLEPRPDFVLMVTRRGFLRLIASRYVRASVALPLRIIAIDENSLNGEALAAWDVLKPGRIVRSRYEELMPRNRGFLDRMAALFQGAAAGKAGALEEVKELLREAERSEAEIAALLAPKKLAEIAAKTLEREKRLNRAFAEELVSLVRKLVREAKERGWSVAIAIDPINAESLKGSELQRTLLKPRKLLRNLARYEGARFKLYRVSGKQCPNCGEIGVEVGHRRYKCPRCGIEWDRDKCATFWLAKRFLDEHFKEECGDETYVDLDGWLRKHPRGLL

SEQ ID NO: 61490 - protein, 534 aa, unknown
  TnpB Polypeptide
MQTKGRSKASKTKQGKDSTMSSLTSAVQLELPLFATAELVQPSSETTSPDKLNSCSSSTQTPKSSKISAQESISKGKDCKPYWSDLWAANSLRLLLPVATDCADSDLNYSSSWQNKTVEKSWFSTEVFTAQKPNSRAIFLPSFTSSVAECTDSGVIAIKSRKIRIFLNPEQKALIKQWFGVSRFVYNTTIKYLQEPGTKANWMTIKTGILNSLPEWAKSVPFQIKSIAIKDACLTVKAAKQGFSKDGQIRKCKFRSRKDTKQSIYVPKSAIKNCGVYHSILGKCQLKEALPIAFSDGRLTLVYGEYYLIVSQEVQQVKTDKQGRLVALDPGVRTFMTFFSEDSYGWLGSDSNLHIQKLCFRLDRLVSRISHASSQQKRRFKKAASRLRCKIKNLVKELHHKIAKFLVDNFDVILLPTFETSQMVSKSRRKLRNKTVRQMLTLSHYEFKSFLQWKAWEISKLVIDCNEAYTSKTVVRFVLKKPRNGENSGSNKVIQYGLSSHFNPLLDDNLFVLWVRTLFKSHPAGAAVKASPLR

SEQ ID NO: 61491 - protein, 377 aa, unknown
  TnpB Polypeptide
VIKAFKYRAYPNRLQQAAMAETLETHRHLYNRALAGRKDAWEAEQRAVRYGEQSGHLKADRTTNPYLAKTNFSSCQATLRRLDRAFQAFFRRCKAGETPGYPRFRGYGRFDSVEFPSYGDGCRLKDGRAEFQHIGEVKLNLHRPIEGTIKTMRFKREADGWYVVFSCDLGDVQPEPSANPAVGIDLGLKAFLTTSDGEQVAPPKLYRTAQALLRRASRRVARRKKGSNRRKKAVRLLARHHQHVANQRRDFHHKTARTLVTRFGTIAHEDLNVAGIARTRLAKSTHDAGWTAFLAILAHKAESAGVATVAVDPRNTSQACSGCGALPEVKKTLSDRVHSCSCGLTLDRDWNAARNILQRGLGRSLQASPTPPLGDVA

SEQ ID NO: 61492 - protein, 449 aa, Escherichia sp.
MRRFAGACRFVFNRALALQNENHEAGNKYIPYGKMASWLVEWKNATGTQWLKDSPSQPLQQSLKDLERAYKNFFQKRAAFPRFKKRGQNDAFRYPQGVKLDQENSRIFLPKLGWMRYRNSRQVTGVVKNVTVSQSCGKWYISIQTESEVSTPVHPSASMVGLDAGVAKLATLSDGTVFEPVNSFQKNQKTLARLQRQLSRKVEFSNNWQKQKRKIQRLHSRIANIRRDYLHKVTTTVSKNHAMIVIEDLKVSNMSKSAAGTVSQPGRNVRAKSGLNRSVLDQGWYEMRRQLEYKQLWRGGQVLAVPPAYTSQRCTCCGHTAKENRLSQSQFRCQVCGYTANADVNGARNILAAGHAVLACGGDGAVRPPVEAGTHRNDSGDSLNVAGIHVLQGVEDVNELRHLLVQCADAVFHLSHFTLLHTGAKAEQASQQEQSKNVSIHRSSLSRRN

SEQ ID NO: 61493 - protein, 336 aa, Chloroflexia sp.
MIATAEAFNAAATYCASVAWEERITNKNKLHHIVYGPTRVQYGLGAQLACCARDKAAEAVRAARANGSDTCPTFRPDSSIRYDARTYRLMSLDRVSLNTLTGRVVGQLVLGEFQRRHLYDTSWKVGGAELVQRDGQFYLHITQTKASPKPDEPTGFLGVDFGIVNLAADSDGETYSGEDVKRIRERRFRHRQRLQTANTRRARWRLRKNARRETRFQRDVNHCISKKLVEKAHMTRKAIALEDLTKIRARGTVRREQRRVRHSWAFRQLRSFVTYKAQQAGVLVIAVDPRNTSRTCAVCGHCEKANRPNQAHFQCLSCGHTDAADTNAAVNIAFRA

SEQ ID NO: 61494 - protein, 466 aa, unknown
  TnpB Polypeptide
MYRSIPIKAVFSDEERAFWEFQCKQSNSLFNCAVYYSKQKHYQWLEEQEAYTTYWKKDELKAGWKTYKCGVKYPEIDKALKMSPHYRAMAAQSAQQTLKAVGEAIKSYNQLVGLYYKGEVDRPRFPRYRKSGGFAAVTFPKQALTYKQGLFYPSVSKDCKPELLTQITLTPPEFIDPDWVKEVTIRPCYGQLWIDWVIDDGKKPIEDTNSDLDYSQAMGIDHGGDNWLTCVSTLGKSFIIDGKKLKAMNQGYARLVAKHKSGKPEKYWDSILDRIQLKRNNQMRDAVNKAARFIVNRCLNDRIGNLVIGWNEGQKICSNMGKKGNQKFVVIPTKRLIERLKHLCLEYGIKLIVTEESYTSKASFLDGDSLPKYGEKPVREACPSGLCWKPSGKRVRRGLYQIASGKLINADSNGAANILRKVNTQPFNLAKVSRGSLTVPHRYDLFSHLSKSYRYRGYAGRVHPPA

SEQ ID NO: 61495 - protein, 328 aa, unknown
  TnpB Polypeptide
MRANPPGYRKRGDKHLRSTVTFKAAGFKLDTEYQRVRLSQGDNTKDYRSDFILCKYKSCPDVDLSTVESVQQVRAVWTDDEWKLHIVCKVAIEAAEAPGEKTVGVDLGIKNFAALAYEDGHSELYPLNCLKQDDYYFSKCIAQCDDSNSKQATRLNQTKSGRRTHYFHTLSKHIVQRCVEEGIGTIVVGNLSGIREDEENGESKNWGKHGNLDLHSWAFDRFTDLLEYKAEMEGITVTKVSERDTSKSCSCCGRKRDANRVERGLYMCDDCDTVANADVNGAENIRQKVSSSSPSLSVNRSNGWLAQPSTFLFETETGVFAPQGQVTS

SEQ ID NO: 61496 - protein, 432 aa, unknown
  TnpB Polypeptide
MRQEAEKTIVAKIRTDELTQIKKEALDDEFSEFQAYIRGDDADLYSATKQAADAYIDTDNLRDDHEYPWFIRNDVFDVEQHDTELADWWMNIPVSQVYGGVNVPINPHESIPDDAEMKDSKIVNEDGEYYAHLSIKQRVELQDEYDGVLAIDLGSRWVAVSVALPSRETMFYGKDVRQLRRHHQELRTRLQEKGAYNTLVSVKNSEWRAIDDRLHKISRQVVEDAKERNFLIVIGNLEGIQNQEMGTEMDRRLHSMPHYTLTQYITYKARFAGIGVKIVDEYNTSQTCWRCGEKENTERVGQDRHLCDECGLDDNADKNGATNIGKKGLAKDIQSPLSSLGGVYEPSLELGDDDETAAQVRVRLRDDSETKPHPILDERVHRTSEVGWGSSLRTLYFSITKYPICQGSVLYFHYEDTRALFDVGFFATDMRE

SEQ ID NO: 61497 - protein, 236 aa, unknown
  TnpB Polypeptide
VKKDVAPSCDEESENGVVLGVDLNVDGYVAVTSTGAFLGNADHLNHRRNEYERRRGNLQQTGTRSAHLIIKGIGSRFARWSADSLHRVSKALVQEAVKNDCTAIAFENLKHIRDRISNASKFQQWAFRELQRHVEYKAEEYGIDVEDVAPAYTSQRCSHGECGFTHEDNRDGDEFECLKCGKELHSDYNAARNIGWRLVHHWLKSGAGRATSQLALKSGTLNANGRFRPTATALRG

SEQ ID NO: 61498 - protein, 406 aa, unknown
  TnpB Polypeptide
VFNEVLRLNYDGWDWDKIEDVVEQNADLVQNTAQRIIDKVFDALGNYYDNDDWGRPQYKHETFPLRMNYGEGYNLFLEDETVRFRISAKPYNHVKGELQGTQDQFNLLTQAIKHDDCDWHVGTAEALCRNGREELHVTVTNETAEVGEKTAAETVIGVDITEDCVALAALTEHGIEDSIVLDYPEIKEQRHRYFTMRKRMQEAGQTAFNDVFRDKEQQFVYDQLHTVSRRVVEWIQRLRFDSPVIVFENLTDMRDDIEYGTRMNRRLHSFPFAKLRDFITYKAAWRGIPSDDVDPEYTSQQCPVCGHTERANRHKKRFKCCECEHQDHADRGAGISVAQKWLRKQNNRNMPALNTLPQVQKWELQLRRQASGSVDDPTVVSDTVRGDQTDGIRGVSDQSTGRSSGA

SEQ ID NO: 61499 - protein, 336 aa, unknown
  TnpB Polypeptide
  misc_feature (303)..(319): Xaa can be any naturally occurring amino acid
MTLSHPTTYDLSSYAKDALKNYVPKLVDEADELDDAHPVRYTERGLTVNHDHDSAREHSFCWRVPKAQSADGSPFWIPLRINPAQQSLWKGLLDGEIEPNQFQLQRDGETWSLHVGVDIDVSEPAYESDDEDATAVGFDIGEAHLSAGCACTNGSPTDPLLITGGRARQLRKEMFTTLTRLQERDAAQWRIDERFDHCQNALTDIVEKASWQAIDYAQQFAKPVIVLEQLDSIREGLDYGKWMNRRLHNWAFRRLQDAIDRKAIEAGIPIEYVHPHHTSQTCHACNHIGYRDSDEFRCTNDAXXXXXXXXXXXXXXXXXNTASLTSCFSESSVRNE

SEQ ID NO: 61500 - protein, 421 aa, unknown
  TnpB Polypeptide
MNYAYRYRIHPTESQRETLDHHLDTCRQIYNHTLHELNNIPESAGTVNQRVNKVIKQLPDLKEWWDELTELYSTVSQDAAKRVAKNIIRLSGAKQNGLKVGSLNWKSPREYQSFTYVQSGFEFDNKNGQTVLSLSKLADIPLSYHRDIPETVNIKRVTLKREPTGEWYASFAVDEKEEPAKPDDPQRCVGIDVGILKYAQDTDGRAVGFPDLQDNRERLRREQRALSRKEQGSNNWEKQRQTVAEYYQTLRRKCHDFLHKLSNYYATQYDLVAVEDLDVKSMLKSSGNSRKTAFAAWDTFTTMLEYKCKREGTHFVEVEPAGTTKECASCSVETKKPLCVREHSCPACGFEMDRDANAAINILSRSFKKLGLGQSEDTTPVETALPLFTSSGSVDVVDGKRVIESGSPTLHPRGTNRESGE

SEQ ID NO: 61501 - protein, 456 aa, unknown
  TnpB Polypeptide
MQTTLRFRVSLSDAVASEAWRQIDILRQIRNHAVRDYYNADYNDQPSDYDQHKRLKQWGNRWPTFAVPSQHAAQQAISQIHTDLDGLEERRNNGYDVGRLHWQGRGEFRSVSYNQPCRWNVDHNTGGERFVRFRLEKIGWFRIRANRPVPDADEISEAILKKQKTGEWYLSLVVEVENTPAKPGLDEIGPQDCVGVDLGITNYIHTSDNLPVGTLDLSDEYERLRREQRKLSRKERGSHNWEDQRQQVAKAKREIKRKVLDYQHKLTTWLVTKYDLVAVEDLDVKPMLEDSQNAKNKQDAAWSRFVNLLEYKADLHGTHVMTVNPAGTTKECASCGVATNKPLWVREHSCPACGHTQDRDLNAATNILNQGLKQIGAGGSESTPMQTALPASAPQREAVDASVSMNWEASGLDPEVVHERSNRALMLTPRSPQPVPGTPPTREVEMPATRHPCRGT

SEQ ID NO: 61502 - protein, 140 aa, unknown
  TnpB Polypeptide
MRDSIDYGTRMNRRLHHLPFRALQFYTSYKASFEGIPTAWINPEYTSQRCPICGNTERANRNKKRFKCKVCEHQDHSDRSASVNIAVKAIKQLDWNVPALNSLPIVRKVRRQASGAVDAPTVTHPTARGYQTDGRMGVSE

SEQ ID NO: 61503 - protein, 384 aa, unknown
  TnpB Polypeptide
MSSGLTQTLSFGLDIATGSPDDLHDGCIEARRIRNEVNRLDRQHWDWDKIKSIVVDNADHVQNTTQLIVDKALGEIERYHDNKADGWGRPYPYIEGRYPMVMNHTEGYRLFPENDAIQFRISAAPRSHVKGELRGSPDQFNRLRTALNNAEWHVGTAEVVHKHDEWRLHVTVTKEDCDVASPDDADTVVGVDVNEDCVALAAMDRNGEVKDSIVVSYPSIKERRHEFFTKRKRMQTAGQTGLESVVQTAERDYVHDCLHKVSRQVVDWMSQFTTPELQDHAPDTVVAEVSTPSGVTTTDGGELDKTDDRTRPNRSACRRGRTARRFRTHRHRWVRLRHGRPHRERGRGAGRRCTVWGSSLGDEWCRRRVDVHADKDYRQLRRSG

SEQ ID NO: 61504 - protein, 272 aa, unknown
  TnpB Polypeptide
VTKEDCDVASPDDADTVVGVDVNEDCVALAAMDRNGEVKDSIVVSYPSIKERRHEFFTKRKRMQTAGQTGLESVVQTAERDYVHDCLHKVSRQVVDWMSQFTTPELILEDLKDMRDSIDYGTRMNRRLHSLPFASLQDMLSYKAAWAGIPTAKADPEYTSQRCPRTDCQHTARGNRHKKRFKCQQCGFQDHADRKAAVCIVQNWLDERTENVPSLNTLPRVRKVRRAASGRGGATDSHGVASTSGVDRHRTSAQGESRVREELNSVAPAVPE

SEQ ID NO: 61505 - protein, 430 aa, Lactobacillus sp.
MTNYYLKTRVYELFPSKTMKAVLDRNCDYRRYCWNQALALWNDLYFAHQIYDKIRYTTFTPKENKKTHQIKIIKKDVHLNPSPSWRLVRDKLVEDKEDWQFNYSAHLLQLAVQDLGKAWNNFFDKAQPDWGKPRFKSKREVRQGFKSDQAKVINGELVLEKPKGLKQEWEAIGLSEKPLDYPTGVMSIYRESGRYFVSIPYKIPKNEFKAKASTGRVTGVDLNVGHFNYIAGDERILPQKLEYTYEKIKHYQRLLARKRKVNGRKESTKSNNYLKTRTKLQVAYKRATNNQNDLLQKFTAKLTNDYDAIVVENLDVKKMMMSHVASKGMHRSMFGKFRQIIAYKCKWYGRELIIANSLYPSTQRCAVCGTVKKGEDKITLKGNKKHGTKHNEFICYNSKCPNYNQKVDRDENAMLNLTMLVEHPELNKAL

SEQ ID NO: 61506 - protein, 402 aa, Streptosporangium sp.
VIRAYKFLLRPTARQEQGLGEMLADHCSLYNGALQERRGAYRHASKTSIKYGDQSAQLKEIRAFDPERQGRWSFSSQQATLRRLDKAFQAFFRRVKAGQVPGYPRFKGVGHFDTVTFPKDGDGCRWDSTPHDAQVRVRLQGVGHVRVHQHRPVKGRVKTISVKREGRRWYVVLSCDEVSAEPLPVTGSIVGIDMGTVHFFTDSNGVHKENPRFLVSMGEELAAAQRHLDTFPKRTKRRTKKHRSAARKVAKIHVKIRRRRLDHHHKTALALVREHDVIGHEKLNTVGMTKRPQPKPDPEHDGAFLPNGAAVKKSLSRSILDAGWGLFLGILAQKAESAARRVIPVNARNTSRECPECGYTSAENRITQAKFECVTCGHVANADHVGALNVLKRAGLVLCAEA

SEQ ID NO: 61507 - protein, 382 aa, unknown
  TnpB Polypeptide
MFRACKFRLYPNRKQIELINKTFGSSRYVYNYYLDKMKNNGYVSAYTNIKDYTSNLKYDAVFLQEIDSIVIRESLFNLDNAYQKLFSKTGGYPKFKSKYNRNSYNTTAVYNNYKDKEYCNIELDLINKQIKLPKLKWLKIRGYRNIDNINGKIKSVTISKESNGKYYVSVLYEMYDKVPSIKSRTIVGIDLGIKELLTLSDGTVYDNNKYIYKYAKRIKRKQRELSRKEKGSKNYYKCKKELAILHSKLANARKFYTHKITKDITDEYDIITCEKLKTKEIIIKGKDNKLSIKINDATFSEIIRQFQYKSKHKGKEFYQINTYYPSSQVCSRCNNQDRRYKDLTRREYKCTKCNQEIDRDLNASINIMFEGLKLYMKNYAKI

SEQ ID NO: 61508 - protein, 237 aa, unknown
  TnpB Polypeptide
MKKHREPAENCRLKSVTVSMEPSGKYFASLLYEGYSCENQAADKDYSNARILGIDYAMHGMAVFSEEIEMEEAGFFRKNEKRLAREQRKLARCVRGSHNYVRQKKKVARCHEKIRNQRKDYLHKLSRRITDQYDIVAVEDIDMKAMGQCLHFGKSVQDNGYGMFRNMLDYKLTWKGKKLVKIDRFFPSSKKCSKCGKIKKELKLSERVYRCTCGNEMDRDRNAAINIREEARRMLAA

SEQ ID NO: 61509 - protein, 333 aa, unknown
  TnpB Polypeptide
MAQIKEVRCARDEYACIHVHLLQDSITRLDRAYRAFFRRCTAGEKPGFPRFKGRGRYRTLTFKDCKTKKRWIVAGDKRLSLAGIGDVKIKLHRPYEGTLKQVSVTLGGDGQWYATFACVDVPAKPLPATGQSVGVDVGISAFATLDNGESVENPRPYEAAQRKLKTAQRRVSRRKRGSSRRCKAVARLASLHDKIARVRRDFHHKTALDLVQRFDSIAVEDLNVKGLAAGMLAKQVHDAGWGQFISILADKAESAGREIIKVDPRGTSQDCSGCGAAVRKMLRVRVHACPECGLVLDRDHNAAINVAIRAGHALRGGLSNGQLDEPRSPCLAR

SEQ ID NO: 61510 - protein, 320 aa, Escherichia sp.
  misc_feature (320)..(320): Xaa can be any naturally occurring amino acid
MRLFAGACRFVFNRALARQNENHEAGNKYIPYGKMASWLVEWKNATETQWLKDSPSQPLQQSLKDLERAYKNFFQKRAAFPRFKKRGQNDAFRYPQGVKLDQENSRIFLPKLGWMRYRNSRQVTGVVKNVTVSQSCGKWYISIQTESEVSTPVHPSASMVGLDAGVAKLATLSDGTVFEPVNSFQKNQKTLARLQRQLSRKVKFSNNWQKQKRKIQRLHSRIANIRRDYLHKVTTTVSKNHAMIVIEDLKVKHMSKSAAGTVSQPGRNVRAKSGLNRSILDQGWYEMRRQLEYKQLWRGGQVLAVPPAYTSQRCACCGHX

SEQ ID NO: 61511 - protein, 418 aa, Nostocales sp.
MQLVERHIIQRNHPHYQEIDSLCLAAKNLYNYANFLMRQNFIFNHKYLDNNCLAKQLNSSQTYQALPAKVAQQVLLGLDRNWLSFFTAIKAYTENKYKDQYQDKLLGRPKLPKYKHKEKGRHILVYTAQAVNKPKMKVGLINLSQTHIYIPTSLDYSRLHQVRIVPKIDHYVVEVVYEKEELDYDLEQDAIAAIDLGIDNLATLTANKPGFVPVLVKGRIIKSVNHYYNQQKSKFQSLLPTAQKTSKRLQRLTKKRNFRIDDYLHKASRLIIDLMVKNGIGTLVIGQNPLHQQNANLGGTHHQNFVFIPHNRLVQQLSYKAKLVGIKVLIAEESYTSAASFLDQDPIPTHGETHAHQVKFSGQRIRTKLYRAGNGLLIHADVNGSLNILRKVVPTAFSQGITGVVVRPVGVIPGEQIA

SEQ ID NO: 61512 - protein, 380 aa, unknown
  TnpB Polypeptide
MLRAIKVRLYPNKVQEQELNKVLGSYRFVYNYMLAKRQSAYETDKENLSVTDLSKCFHGTLRKDEQYAWLKEQNTKVMNQAIRQMDDAYQKFFKQHNGYPKFKSKKDKQTALFPYEAISRRNTFETKHITLITSLQNIKFRCSELYHSRLKKYKDKIRSATLSKTKSGNYFLSILVDIPEAECIRFGKTNKQVGLDLGVKDFVITSDGVVFENKHFFKKEEAKIVRLQRQLSRKVKDSNNRNKQRIRLARAFERLTNKKENYIHSVVNEILKSYDVVFMEDLNVQGLLLNHNIAKAIQEVGFHRFKEVLRDKALVNGKLVYLIDRFYPSSKTCSCCGYKHQGLKLSDRFWTCPECGEHHDRDLNASKNILLEGQRRLQAV

SEQ ID NO: 61513 - protein, 402 aa, unknown
  TnpB Polypeptide
MRKINRTYKFRLYPTKAQTELLAKHFGCARFVYNYFLNQRQEQYKLTGKSGNFYAECKSLTELKKHEETAWLKEVNSQTLQFAIKCLDVAYTNFFKKRADFPKFKSKRSKNSFTAPQAAYIAGGRLFIPKFKEGIKCRVHREIKGKIGKVTITKTPSGKYFASVHTEEEYVTPLEKTNKSVGVDMGLKDFLTTSDGEKFKKNRYTKKYERKLAHAQRHLSRKKKGSRGFENQRLKVARIYEKISNSREDYLHKCSISLVRRYDTICIEDLNVKAMVKNHRLAKSISDASWYSFVAMLTYKAEWNDKKVVKIDRFFPSSQTCSVCGHINKETKDLSVREWECPACHSHHDRDVNAAINILLVGLKQYTSAGTADYTGGEGVRADLLESHSSVKPEARKQKACE

SEQ ID NO: 61514 - protein, 387 aa, Methanoculleus sp.
  misc_feature (280)..(356): Xaa can be any naturally occurring amino acid
MFPEDYQKQYIPVRSTDTCMLQAYKYRMYPNCEQTAMLMKHIHACRFVYNHSLEQKIRAYEQEGKKLSCYDLNNRLPVLKEEHPWLKEVNSQSLQNANKNLDNAFTRFFREKKGFPRFKSKKNPVQSFQVPQHYTVDFGRRRIKLLKIGEIKTIFHRMFTGKMKYAIVSVTTTRKWFVSILVDDGQPAPDPSPFCLDTTLGIDVGLTDFATLSTGEKIKNPRYLKNSLQRLKVLQQRVSRKVKESKNQQKAIQRLARCHEMIANQRNDFLHNLSNRIVSXXXXXXXXXXXXXXXXXXXXXXXXXXXXXXXXXXXXXXXXXXXXXXXXXXXXXXXXXXXXXXXXXXXXXXXXXXXXXEYRGCIVEYVLHDAGIQVPKIREDPSRDREV

SEQ ID NO: 61515 - protein, 272 aa, unknown
  TnpB Polypeptide
MFFNSFFRYFLYLTGTKFILAPDARYFEIQYIYEAECIQRNLNTTNALALDLGINNLVTGVSSKGETFIIDGRRLKSINQWFNKKNARLQSIKDKQDYGRKPTNRQKALARRRNNRINDYMNKAARRVIDYCIDHDIGTLVVGYNETFQKDSNIGRRNNQTFVNIPYGKLRDKLEYLCELNGIILVMQEESYTSKASFWDKDVIPVYKSDDTEEYHFSGKRINLGQYRTASGQVLNADVNGALNIMRKSSVVDVNILYSRGEVDTPIRIRIA

SEQ ID NO: 61516 - protein, 484 aa, unknown
  TnpB Polypeptide
MPVFNYKYNMVVQPVCAVILGFHGCFYLHINLLFNRVYNMKIVRSDNLKINTNSKQREALRATLSLYQCYVRDLMVLVNARWRHFQHYQGNEVIKATEHLIHPTSKRPEVKHRYFHQRYYKFPSYLRRVAIMDAVGQVRSFHTRYDDWLDNSGMKNKPPKLTCATNTFPSLYQGQCIKFNESLTSAFIKVYVNDDWIWHCFRLTGKTRYEKQGKRLSPLLTLKGKQWTLSLPSKLEIPLIKQQDFSGLVLGVDVGINTAATCAVVDKSGTVLDRKFFNRSDKDREYHLMQRIRAKAKKQTKHGSKLPSRFCTQDHRRLKQLANNEAHQISRGIVDMAKVSGCDAIVLESLKGWKPTAGRKRSRMKARFHRWFHRLLVGRVASKAQELGIRIINIYARGTSSNAYDGSGKVKRDKSNYANCVFASGKRYNADLNASYNIASRGIITLYYPQLRKQLWSQGKSNTCPTTGNPLVLSSLWLLEAKVG

SEQ ID NO: 61517 - protein, 380 aa, unknown
  TnpB Polypeptide
MEKAYKFRLYPTAKQEELIRKTIGCSRFVYNQTLAARKGAYASGNSIHMTFKESHSGYDCVKLLPGLKDTYPWLREVDSTALQASVLNMDHAYKNFFSGRKGRRKVGFPKFKAKHHSKASYTSKVVGKNIQATDKAVKLPKLGWVKAKVSTQVQGRILNATVSMSRSGKFFVSLCCTEVDVPQLLSTGAAVGLDVGIKDLVITSDGQKYDNPKYLQKAEKKLATLQRRLSRKPKGSCNREKARLRLARQHEYIANCRQDYLHKLTTQLVRDYDIICVESLNVGGMLKNHKLAKAITDASWGELTCQLKYKAAWQHKMLVEVGTFFPSSQLCSCCGYQNKEVKDLSVREWTCPQCGAHHDRDQNAAQNLLMEGLRLLKAST

SEQ ID NO: 61518 - protein, 385 aa, Streptomyces sp.
VKIVVRVKLLPDACQASALGATVRAVNEAANWVSTVTFERGVPREFELRKHTYGELKASGLGAQAAQHVIKKVRDAYTTLKANLRAGNLGRPGSKRRVKAESKPINFRPNSAQPYDDRCLSWQYDARTVSIWTTAGRLKHVRFACSADTFTMLREYRKGESDLIERDGVFYLIATCDVPEATTYEPSGFIGVDLGIVNIATTSTGYRAAGRGLNRHRKRQLELRRKLQAKGTKSAKRLLKRRNRRERCHAANVNHIIAKKIVTTAERTGRGIALENLSGIRDRVRLRKDQRTQLHTWGFHQLGRFIAYKALRAGVPLVYVDPAYTSQQCSQCGHIDRRNRVDQATFACRACGALMHADDNASHNIGSKGEAVWTAGRESRVPATP

SEQ ID NO: 61519 - protein, 375 aa, Moorea sp.
MSSPAESTASENTVKKSAKMRVFLNKEQRSMIRRWFGVSRYVFNKTVKILENGEVKANWKAIKTDILNDLPEWCKAVPYQIKSIAIKDACTAVREAKKKYKKTGQINRVRFRSRKNPVQSCYIPKSAVSVKGIYHTKLGELTFAETLPGNICDCRLTSTNGNYYLVVPHETTQVKTENQGRVVALDPGVRTFLTFFSETSVGKIGHGDFSRIQRLCQHLDNLISKISKAKGKTKYRMRKAARRTIIRIQNLINELHHKAARFLVDNFDVILLPTFETSKMSKKHNRKIRSKTVRNMLSFAHYRFKEFLKHKATETGKVVVDVCEAYTSKTVSWTGELINIGGSKIIKSKLDGQMMDRDINGARGIFLRALVDTPW

SEQ ID NO: 61520 - protein, 408 aa, Moorea sp.
MRHYAIKVRIYPSDEQKEILAQHFGCARWWWNYALNHCIETYKSTGKSVRQSSLNALLPKLKKAEETEWLKTCYSQVLQAATLNLVTAYKNFFQGRARFPRFKSKKRKQSIQYPQKVKLVNGNLKFPGKVGVIKTKFDKRPIEGEIKTVTISMTPSGKYFASILTELEGDNPQPNHEGKVAGVDLGVKDFAIVNDGNQTSKFANPRHLYKSEKNLARKQNKLSRKQKGSNTRNKARRIVARVHERISNTRQDYLHKLSRKLVDDNQVIVVENLNTKGMLCATRTLRERNHNLAKAILDAGWGMFVNFLSYKLEKEGKVLVEIDKWFPSSKTCYSCLYQVSEMPLDIRAWKCPNCGAHHDRDENAAKNIRAEGIRILQSSGTGDSASGGDVRPKRGSKPKLRQSPVKLE

SEQ ID NO: 61521 - protein, 421 aa, Symploca sp.
MLTLNYTYRLYPDDLQVELLNEWLEICRSAYNYALRELKDWIASRKCPVDRCSLESEYIMSADYPFPGYQQQQNNLPKAKKEFPRLAAAPSQVLQTTIRRLHDAWDFFRKRGYGFPRFKKYRQIKSILFPQFSTNPITGWQIKLAKLGKVQINLHRPIPDGFVVKQVRILKKAMGWFAVISIQSDISMPDPVPHGHFIGVDVGLNNYLATSDGFLEPGRKLFKTEHRRLKVLQRRLSKKNKRSKNYDKSRIKVEHQHNHIAFKRKDYQFKLAHKLCDMADTIFVEDIDFRIMAKGFLGKHTIDAAFGQFRTILSYVGKQRGVYVAEVNHKGTSQTCPNCRIEVSKELKDRWHSCPECGYEADRDIASAQEICNRGYEQLSTQGLWGKEIGCQVGLSGAMSLDKWRRAAMSNSDVGSPRCNL

SEQ ID NO: 61522 - protein, 636 aa, Nonomuraea sp.
VDELSGELLSPGVLAMRVGWCAELVSGITQALLAEHWNSADVAQLASGVDAGGQRLPSQAWMALRRLGWTAGPPQGVRVSDRIVRMAQEQAGRLLRSAQWRAELTAGVLTTWPADASKRTTEEWQQVRAALPDGRHLPSSVIRARTRQIAAYAQATRRLPADVFELEGAPRAARMLLLAACDRQQATLERSDTDPRQVLLRLQLPTRADPRAYADWTWVACPITLPAIVPTSAVLHLPTLCLQGQSVRAEVAFTHAVPQTRRSGHTVALGVDWGLNTLLSAGAARLHPDGRITTLGAGARFHAAGVLAKQHRLRRLSERLHAKTDQYQRLADQDAPHTELSGKHDVLRREIGHVSARRSHLNDALAWAAARWAVDQAIAARASVIYLEDLRSLEATGMGRTLNTRLSQTVRGQIADHIRHLAAQTGIAVVTVPAKNTSRHCPHCLCPLRHRKAPDRPTTPGWAWALCPNPGCSWQGDRDQGAWRRIAARGLAHQTKTVVDRGTGQMTIHNVVDTLEARAVIPPAAAMTSRADRSKTGPTRRRTTRPAPRRRGAPSPARPVGRAGQRPEGHAPTGRDRLPRAAHRHQGVTTISTPTRRRHRPRGAALGAGFHLHAHTTPPRWAPPMPDATTDMGSLS

SEQ ID NO: 61523 - protein, 422 aa, unknown
  TnpB Polypeptide
MVTKADKIKQTIKETKERRKNLRPVVYQLKIQNLSDTKEEKLNRVFLEAKWLYNWIVADIDRVNTPTKEIKEIEVKVGDKLEKREIKYLGSQIKQAIQERIKDNLKALKVLKENGYKVGKLKFKKSVSSINLKQYKITFDIDFKRNKVKIQGLGWFRVLGLHQLPQDYEIANALLIKKPSGYYVYLTCYVNKEHFERDKVGTAIGIDFGVVNKLTLSNGLTVDFEIEVSKRLKRLQKKLAKKKAVSKNRARIQKKIQKEHENLVNKRKDIHNKLLALFKHYGIVVFQDDSIKSWHEGWFGSQIQYSGIGKLKARLKDSLATILVDRFEATTQECHVCGYKQKLDLSNRVYYCPVCGNTINRDLNSAINMLKKGLDLSQNQVVGMDCPELTPVERALATKILGSNPYIKVAVLCEAGSPHFYK

SEQ ID NO: 61524 - protein, 348 aa, Frankia sp.
MRTLQAYRFALDPNDAQAANLCRHAGAARFVYNWGLARVKAAFAQRDAEKSYGLDGDLLTPVPWTLPALRLAWNAAKRDVAPWWDECSKETYSAGLDQLARALKNFTDSRKGKRNGRRVGFPRFKKRGKARDSFRYTTGAYGPATDLYVKLPRIGRVKVGEPMGVLTARLADGRARLGGATVSRTAGRWFVAFTVDADRDVSERPTRRQRTGGTVGVDLGVKHLAVLSTGETVANPKRHAAALRKLRRASRAYARSKPGSAGRRQRAAGLATIHARVANQRRDGLHKLTTRLARSHDVIVVEDLHVAGMVRNRRLARAVSDVGMGEIRRQLDYKTRWYGSRLHVADRW

SEQ ID NO: 61525 - protein, 329 aa, Lactobacillus sp.
LDQSVVIKAQLLNIDDETAQAFSNTMCKYRDACNFISQYIFEHAFELKQSKLNKALYHDLRDKFELKSQMAQSAIKIVIARYKTVKTQLFQHPFRYDTGKKDGKGRGIWAQIYRDLTWLWQPINFKRPQLDLQRGRDWSYLSTTNQLSLNTLNGRRKVDFVCKGFDQYLDQTKWKFGSLKMLQLRGKWYIHLSATTAIPEFEAEQAVHVVGIDRGLRFLAACYDEKGKSILFSGQKILRKRRKYKKLRAELQAKGTKSAKRRLKKIGQRENRWMSDVNHRLTKTLIDHYGSNTIYALEDLTDVRFATEKSPKDQRYEIVSWAFTNLSNS

SEQ ID NO: 61526 - protein, 226 aa, Lactobacillus sp.
LKIPKLGYVKTSKNGVLQNTKIKRYTVVLEPTGKYYLSLQAEIPEPEKYSLTGKRVGIDVGVADLAILSNGLKYPSFDSSYFEKKAKIWQKKYSRRRHLVKLLVLQNKNKRVLCPRSLESFANWQKAQKSKAKYQAKVANQRRDYLHKLTTHLVKQYDVIAIEDLKTKNLQKNHHLAKSIANASWRMFRQMLEYKCEWYGKKLIAVDPKNTSRIVQNVAITVALSH

SEQ ID NO: 61527 - protein, 298 aa, Lactobacillus sp.
LAKPRFHSRKYLKKSYTGKSIIKTAGKRYLKIPKLGYVKTSKNGVLQNTKIKRYTVVLEPTGKYYLSLQAEIPEPEKYSLTGKQVGIDGGVADLAILSNGLKYPSFDSSYFEKKAKVWQRKYARRRHLAKLLVLQDSNKKVLCPRSLESFANWQKAQKSKARYQAKIANQRRDYLHKLTTHLVKQYDVIAIEDLKTKNLQKNHHFAKSIANASWRMFRQMLEYKCEWYGKKLIAVDPKNTSRICSKCGYNSGAKPLEIREWTCSKCQTKHDRDINAAVNILHKESKKLSGQGLAMVTS

SEQ ID NO: 61528 - protein, 216 aa, Hydrococcus sp.
MVSYLQLSTPMIVLECKLKGKLGQYQLLDEAIRTALFVRNKALRFWLDNRGVGRKELMRYNTQLRAEFEWCKKLNSHAGQASVDRAWFAITRFYANCKAQTKGKKGFPNFKKRGHSVEYKTSGWQLSTGKKFLTFTDGFKAGKFKLIGTRNLNFYAVDKIKRVRVVKKADGYYAQFIINIERQEKHESTGKQIGIDLGLEFFIQIVTGKLLAILVT

SEQ ID NO: 61529 - protein, 395 aa, unknown
  TnpB Polypeptide
MLVRSLKLKVNKSQEKYLNRYLFHLEGVYNWAIRQIKFNSANGIYLSHYDLQNATSNHAKKIEIHSQVFQATLKQAWSAWDRCFKKLGGQPRLKSRYRRLESFLFPQILERNHPIGNQIHLPGGFNFKFFKQDIPEGKIKTARIQKKSSGWYLNLTIDTNHKITNLKDTEEAVGVDTGFHHLAILSNGIKYENPRELKIGAKCLAQAQRGHDKKLVARLHEKQSNKRKDRNHKDSTEIIRNYKTIYITNDNLVGQAKKFGKSVTEAGIAQLRNFLLYKGLNSGRVVGLVESHYTTMTCSCCGSLTGPTGLKGLAVRDWVCCVCGTHHDRDVNSGQVVLKIGVGTALALTIGVQPSVVDLKQKSFGRRKKSMSGVGGSTANLNSPVCLGIPERCEE

SEQ ID NO: 61530 - protein, 440 aa, Thermoanaerobacter sp.
MSRYVVRTYKVPVPTELYSLCSELNRLAARIYNKTMSLVKKIKQKKGLWLSPGTAQKYILRWGSNISIHTHSKQAMVQQYFQALNSYFNAIKTKPYLKPPYKKKNFMPFIWKNSAIKLSPDGILKLSMGSSQEPILIQTTLSTDTKIRQAKLVYEYEDEKYYLHLAIEVKNNHKKNQFPEVMSVDLGVLRPITCFDGFEVISYHGGILNSLIRYRNKKLAEFQQMLSRCKKGSRRYRKLLKAKRRMLRRIRYQIKDILHKLTSNFLKICLEKGIGTVVIGDVTNIRERVEGNDNFNQKIHQWCFRKMVEMITYKAQLLGIEVKLIPEEYTSQVCPVCGSKNHPAGRNYECKSCGFRYHRDGVGAINILKRYLGRESQVVAGLAPVRGVRFKPHLCGHGVSNTPWKAARKELLRIPSSSGDWECQLFYLPVYLQNIFIGKI

SEQ ID NO: 61531 - protein, 497 aa, Thermoanaerobacter sp.
MLGEKPKPKVVLYARVSTKKQEEYLKNQIRRLEEYANSQGWQYEVIHEIASGVNENRRGLLKLLNKIKRGEVEKVVIEYPDRLARFGFEYLRFFMESFGVELIVLNGKEKEEDANKELAEDLRAIVTSFAARTDKGAAKSMIVIQAKLIFLNQEDKQIVLNLMRRWSSCMRFAYKRLLEGYDRKTLKRDLQGMFDLNSRYVDDAIMKAKSTLESARELGNNPKKVIFGGKKLFKKLQKHHINGKEYQKLKIKWQEKRKGNLYSRGDKSKKGNLNTRIELKENGTFLRINVGERKYVYARIQAGYKKNKRREELLQEIAKADIPYSVELKLKNGSIYAYFAIEEEYPEVKITKEKGVIGIDINAYPDNISWVEVDEKGNLIGYGNIPMPELATGNKDKKEYFRWQYAHEIVKIAKEKRKAIVIEELDIKEKGKRGDFSGRKSRRIRHSFSYKSLLSKIKTLAKREEIEVIEINPSYTSIIGMLKYSPQYMITKDVAAA

SEQ ID NO: 61532 - protein, 421 aa, unknown
  TnpB Polypeptide
MSEEKNLKIKESLHETKERRSQMDCCVISAKVQENKLSKAKLEKLIRLFLEAKWLYNAVVATDSLSLEDTSSVQIKVNNSFETREINILSAQMKQSVVDSAKNNVCNLSKAKRKGLKVGRLRYKKECNEINLKQFGKTYYFKGKNKIHIQNIGILIVNGLEQINLDEVEFANAKLIKKPSGFYINITVYSKKRPQPTLEQEVIGLDMGIKDQLTFSNGVKVNFYLEESEQLKGLMRKLNRQVKGSNQYKQTLARIKRIYEHYNNKKNDVVNKLNSILSKNYIICFQDELLRQWKRKKSKRKFSFGRKVQHGILGRVKDKLKKNTSNHMLESSVPTTQTCPECGCLTKHGLDKREYHCNHCGFENADRDIHSANMMVLLSGYGTYRSLNTDTVSPNKLVSLLANLESAGVVVTTNSMEADYL

SEQ ID NO: 61533 - protein, 382 aa, unknown
  TnpB Polypeptide
VSRVQKGIRTRLYPTEEQEILINKTLGCCRLVYNQTLADCKQSYEQTQHFPSKKERSANIVKMKEEQPFLKEVDACALQRSVKDFDSALDNFFKNRNHFGFPQFKSKHTRKQSYRTPYNGGKADVLDNKHIKLPKLGKVRTKRFDMPDVYKILNITVEKTPTGKYYASICIETEVQPLPKTGKQVGFDLGLIDLLIGSDGTRYERPKYGYTFKDKLAKEQRKLSKMRTKLERANLNLGECKNYQKQKHKVAKLQEHIANCAKDFNHKLSRKLVEEYDFLVFETLNVEGMKQNHKLAYSISDVHWSQLLNFIKYKCQWYGKEFRQVDRFYASSKICSCCGTYHKDVVNSLKVREWICPDCGTHHDRDVNAAINILNKALSVGI

SEQ ID NO: 61534 - protein, 364 aa, Lactobacillus sp.
LFDIIFGRKEGTNVLKGIKLRLYPNQTQQGQLWQMFGNDRFVWNQMLAMMNERYKNNQDLPFLSKFKLNYLLKPLKREYPFLKNSDSSSLQVVNEFLVQSWKNFFKDKTGQVSKPRFHSRKYLRLSYTGKSIIKIAGKRYLYLPKLDYIKTSKTGALKDVRIKRYTVMLEPTGKYYLSLQVETAVQIKLKKAGKQVVIDVGVSDLAILSNGLKYPAFDASYFEKQAKSWQSKYSRRRHQAYVLCQQDKQRKVLMTPRSLESFSNWQRARKLKARYQSKIANKRRNYLHQLTTHLVRQYDVIAIEDLRVKNLQKNHCLAKSIANASWSMFKQMLEYKCEWYGKQLIIVDPRNTSRICSHCGHLSH

SEQ ID NO: 61535 - protein, 257 aa, Bacterium sp.
MVNGNIRLFSTIQNQTTYLRLPKAGNIRIHMHRIPQGVLKAVTISKQQDRYIATCLFEYENKVESKEVVHVLGLDYSQKYLYVDSEGQVCDYPHFYRASEKRLAREQRKLSKMVKGSNNYKKQRNKVAKLHAHVAQQRKDFLHKESRKIANSWDMVVVEDIDMKAMSQGLQLGKNLMDNGFGILRNYLKYKLEDGGKRFIKVDKWYASTQICNHCGAKRKIGLNERIYQCPKCGHIEDRDINAAKNIRDEGIRLHRG

SEQ ID NO: 61536 - protein, 387 aa, unknown
  TnpB Polypeptide
MIVRRSYVYRIYPNKAQTEKLTWTLDRCRELYNAGLEERREAWRMCGASVNYYTQQAQLSSIKNEVRPEYKQITAQVLQGVLLRLDRAFDAFFRRIKNGEKPGYPRFKGKHRYNSLTFTQNGWKIADKRLKIAGVGHIKVKWHRGIEGEIKTVTVKRDADQWYVVFSCLVEVEPRPTADLPPVGIDMGLEYFATLSTGEHVENPRYYRKAQEAIARHDRAMRRRKRGGKNRAKAGILLKRAHRHVANQRKDMQHKLSRRIVEQHGAVVVEDLSIDNMSKRPKPIKNDDGTYAPNGASAKAGLNKSITDAAWGQFISFLTYKAASAGTIMVKVNPHGTSQHCSRCGAKCPKTLDVRWHRCAACGLSLQRDTNAARNILHRAGLARSVA

SEQ ID NO: 61537 - protein, 278 aa, unknown
  TnpB Polypeptide
MLRAYKYRIYPTDEQKVLFAKTFGCCRFVYNWALNLKIEAYKQEKESIGNVELTNRMKSELKAEHEWLSEVNSQSLQSALRNLDSAYTNFFRKTKTVGFPRFKSRRDRQSFLCPQHCRVDFEKGTLTIPKAKDISAVPHRKFKGMVKTVTISMTPSGKYFASVLVDTTIQELPASAIQGNMTLGIDLGIKSLAVCSDGRTFDNPKNLQRSLDRLKLLQKRLSRKQKGSANRNKARIRVARLQERIANCRKDNLHKITHARQPSAYPLHGGFEREGYAA

SEQ ID NO: 61538 - protein, 449 aa, unknown
  TnpB Polypeptide
MKRTNTFAVRPLSDTGEQLLRDLLDASAALWNEVNYQRLMRYNDKDDFEGDVWDADTGHLEGKYKGVLGASTAQQMIRKNSEAWRGFFRLKEQYHDKANTSVTEHPQPPGFRGNEDDGRKLKTVIRNTSYTVKWGERSRLEILVGTELKDRYDHIGRLRLEIVGDPNWSDYEKQGRLDLWYDEIDCTFRASQPVTVSDDSRDTPLADETAALDIGANNLVACTTTTGEQYLYEGRALFQRFHETTREIARLQSKLENGRYSSERIRRLYRKRTRRRDHTQEALCRDLLERLHVEGVDTVYIGGLTDVLETHWSVETNAKTHNFWSFKKFTERLACTAEEYGISVEVRSEAWTSQECPQCGSTDRTTRHQDTLTCPCGFEGHADLTASETFLRRHTEKEVRPMARPVRFEWDDHNWSESPRPPARESPKEQRTDPSTVHRDGNLASGESA

SEQ ID NO: 61539 - protein, 481 aa, unknown
  TnpB Polypeptide
VEVEISDKLTHAQDPLLERARGAVKGLVQPVAEIEAVRFRIYPNRIQQQVLKRWIGAQRYIYNQKVEELDYQLWLKNYAKFSNRFLEPQENYCAWDQAFSKYTLSASWLKEIPSFIRRNGCSRFRSAMANWGKGGKRPQLKSRKSVQSVLLTAECFTLRTYDGEDCLFIGTKSKNLGILKWVRHCEYKEPRQISITHEPDGKWFVGFSFESGRMLPQTVIPESKKEVLGLDRGVVNPVTDNTGRFYDFTPAEKVKLRRRAEKRARLQIRLARQKKGSKRRAKTRKSIAIAHARDRRLRASFAYRIANHVVNHAIEAGCKAIALEDLRLDNMTRRSKARQDDCGSYLPNGQAAKSGLNRSLLGRSLGQIKTFVEYRCRLVGLLFIPVAPAGTSIECPECHHKDGRNRLTQADFECVRCHHIEHADVLGGANVRDRAFQKITEISPGTSLKNARLSKARKGQPAELMKHAEYLKNPPFTVGRL

SEQ ID NO: 61540 - protein, 558 aa, Brasilonema sp.
MKGKSRASKTRRGKDSTTLNRMCEATQLDLHATLLNGGNPPQSPQRGEPPQGAALGTEMAPLFVTAESHPQNSETTSIDKLSTCNLSTQKQKSSKTSGRDSTLSAKDCVPYWNGFCEEISSRLLLPVATDCAGLGLNLYNTWSNKTVDKSWFSTKLYTAQTQNLPKIYSPSFTSFHAGCTDSVNIVKKSKKIYLKLSPAQKTILKKWFGVSRFVYNETIRYLQQPNTKANWKEIKTGILHSLPDWCSEVPYQIKSIAVKDACTAVKNAKRKYKDGGGISRCRFRSRKDPVQSCYIPKSAVKDAGIYHTILGKVVYKEDLPTSFGDCRLVLAYGDYYLSVPVESPRRETENQGRVVALDPGIRTFLTFFSEDSFGWLGEAANLKIQKLCFKLDKLIGKISKAKCSRKKRLKMAATRLRGKIKSLVDELHKKVAKFLIDSFDVILLPTFETSNMSRKAKRRIRSKSVRQMLTLSHYQFKLFIKHKAFENNKIVLDVSEAYTSKTVSWTGEVIKNLGGSETIKSPSTLLKMDRDLNGARGIFLRALVDTPWLRENLNFCIC

SEQ ID NO: 61541 - protein, 394 aa, Glycomyces sp.
MSYLLATVARVHLRYSFRIYPTRPQRQALARVFGCVRVVYNDAVAARKAAHRSQLAYPSTAELDKRLITAAKRTPERAWLAEVSTVPLQQALRDCHQAYRNFFDSLTGKRAGGRIGPPRFKRRSNTQTARYTRRGFTLKANGRLYIAKVGELKIAWSRELPAEPSSVTVIKTPTGKYYASFVVAVDDGTEMAEPIADPEAETGIDLGLKSFAVLRGGKTIESPKFFRQAERKLKKAQRALSRKQQGSARREKARLKVARLHEQTRAKRDDWLNKQVKAIIGENQAVYVEDLCVKGLARCRASKSVHDAALGMFLARLESKAARTGRTFAWIDRYFPSTQLCSACGALTGPKGLEGLSVREWACGCGAVHDRDANAEINIRREGKRLVAAGHADT

SEQ ID NO: 61542 - protein, 401 aa, unknown
  TnpB Polypeptide
MNKAYKVRLYPNITQTKLINKTFGCTRFLYNQILNEHIQVYEKYKNDKEALFNYKYKTEKEYKQEFEWLKEVSSRALQQSHRDLQTAYTNFYAGLKKSKKVGFPKFKSKHKSRLSYREPQVSDCIEIKDNKIKLLKLGYIKFRGLDKNFSGCIKSVIVYKSKTNKYYASILVEKTIDKKVRISNNDIGIDLGLKEFAICSNGEIIKGIKQDLYNIENTTKRLHKNLSRKKAGSKRYEKARLKLAKNYEYSTNYLNHFQWNLIKKLCSENQTISLETLKVTNMIKNRKLSHAIQTISWSSFVTKLEQKAKEYNTAIYRVPTFYASSKICSHCGNKKLELSLAERVYTCDVCGFTIDRDINASINIKNYKSLEYNDYERGENVRPVELFYNPAGYFYEAFKRS

SEQ ID NO: 61543 - protein, 387 aa, Thaumarchaeota sp.
MEMRLIVLQNYRPTEEIISLLEDFRCMVNDCIRLGLRESLTSMKSLCMKAYHQLSVYDVPTCYRLTAISRATGLLRNYRRELKKRGRSARVPYVTKLSLTDCYGFRVIHRLVRVPIRKGEYTFIVLNDHTLRSILSHTPRSLTLTPNGLSICLSKEIAEIEPVGAIGIDRNLDNVTTADSAGNILRHDLARATEAKAPCRETKSHFKRNDVRVRRLVYGKYGRIQRNRVSWLLHNISASIVRRAKEKRFGVVMENIRGIRKLYRKGNGQGNTNRAKLNSWSFYELQRQVEYKARWEGIPVAYVAARGTSVNCSICGSRTYPNGRRTLHCSKCGISIDRDVNAARNILAKGRRGVRFTPDGPPEVRMEAMKGNETTTPILRADGGKVT

SEQ ID NO: 61544 - protein, 422 aa, unknown
  TnpB Polypeptide
MKLTHVYRIKPSTEQVAIMETWLEMLRRHFNYALGQRFDWLRRTRCQIDRCSLVSEPIGDIPEKFPGYNFQAGELKQTKELFPVYKEIHAEVQQQNLKRLERAWDRWVKPDKTGKRAGRPRFKKKGELRSFTFPRINCPKAGANKIGEGILTLSKIGSMPVVMHRPFPDGFELKTATIVKKADGWYVAMSLEDDSVPSPLPIDEVKKAAGIDLGLKSFLVTSDGGFVNVQQHYRKTQKHLGRQQKRLSKKKVGSINYQKQQQKISCIHQRISRKRQDFHYNVAHDLVKAYDLIAVEDLNIKGLARTRLAKSIYDVAWGNFLTILEAVALRSGVHFVKVNPHSTTVDCSECGTKVPKTLSVRLHQCPKCELELDRDENAAINILNKGLTAVGLTVAAYRRLSGCTPDEIGMPLSDVGKLTLYS

SEQ ID NO: 61545 - protein, 496 aa, unknown
  TnpB Polypeptide
MSVGKSKTPSYIVETPLLTTKETYQFLEHCRFLGCRANRVMVNEANKRLNKYYRDPEVKAVRKRQRKKGYKLSPAEKSLLKDKREEYGLSDYAFQAYLKVHGRRIANYLDANTVQKIATRVWQGASAVLFGRGRKVYYQDYEHFVSLEGKDNKCGMLFRNGCLSWQGYKVPIRVRAGDRWLQRALQDRVKYCRVVARWHNNHWRYYLQLVMEGAAPAKPRKPAVDADVGLDLGPSAVALVSNAGLSLQELGDEINSIEAEIARLDRKLDRQRRANNPQNYDKLGRIKTLKKGERRVWNNSSGYYETRNRRRALYAKRKAKLKQSHEMFANFLLENVGSCFFVEKMSTAGLSKRSKKTKTNPKTGRPYSKKRFGKSIANHAPSMFVDILTRKAQAVGGSVVKIAAKAIKASQYDHTDGSYTKAPLSRRWKRLSNGDWVQRDLYSAFLLSCLMADGLAIDQAKCKARYDAFKRMHDDIITKLRLQKAGGKKFPKCMGI

SEQ ID NO: 61546 - protein, 450 aa, unknown
  TnpB Polypeptide
MCSTSSYSITSTYKMKLTGDLKALETSINIYRDALRMLIPIINDNWESLSEYEFANQKYNCIEKWIHNTKEHQARYAFDEQFPKFPSYLRRSAIAQTLGIVSSYRSNLANWEKEPKGQAPQLSLNHYAYPAYYKNNLFRNFDPVKQTIELKVFKNGDWVYEIYKLKTSDCTYYQAHLTTKKQKVPIIQKKGRRFYATFSYEEVVSLVKKESISKICAVDLGLNTDATCTIMGQDGTVYARTFISFSKEHDRLNRQLGRIKRNQKRGSRRNKRLWRGVAGISQDIADKTALAILDFGNEHGVDAFILEYLDFKGKNTVKRAHFWRCKRICKVLCHKAHQHGLRVARVNARNTSRLAFDGSGWSKRGFEIKPNTPYALIQFTTGKIYNADLNASYNIGARYFIKHLLKTVTATQRLALEAKVPQVAKRSTCTLSDLINLRSEFVALAPKTQA

SEQ ID NO: 61547 - protein, 384 aa, unknown
  TnpB Polypeptide
MTTAYKFRLYPKKEQQDKLDLSLEACRKTYNHLLAGLDERFTKNELQNYLLDLKSVYPEMNNIHSKVLQMENQRLFSNLSSLVKLKNKGYKIGRLRFKGKNWFKTFTYNQSGFKLTYLKAKKGILFLSKIGNVPIRLHRPVDGKIKSITIKKSIGNWYCSIITDAVIKRECGNGEIGIDVGIENYIYDSNGNTYKNPKHFDNYHKELKVAQQSLSRKVKGSNSRKKAKLKVAKIHEKIVNVRNDFIHKISTKLIKENKFIAIEKLNIKHLIGISYNAKNITDASWGKLSCYLHYKAENAGCVVQDVDPTYTTRNCSFCGHRNNKLELSQRKFICENCKRELPRDYNSALNIFICGKELTTMEKSTNTEQSVQQVVSMKSETSSI

SEQ ID NO: 61548 - protein, 365 aa, unknown
  TnpB Polypeptide
MRVFRYRLKPTKAQVTKLNEQLELCRWVYNETLALRKNSFEQEGKSISYFESKRMLPIWKESKPELRSVHSQVLQDVVLRVNFAFSAFFRRVQSGEKPGYPRFKGKNRYDSISYPQSGFSIDGDKLWLSKIGDIKFKLHRPIEGDVKRLTIRRSPTKKWYVSFLIEDVPNHILEPSNEIVGVDMGIKNFAVLSNGEFIENPRFLLADEERLKKAQSNRDKLPKGSPRRRKASKVVSHLYERVTNRREDFAQQLSRQWINKYGIIVFEDLNINKMVHNHNLAKSILDASWNKLIQYTSYKAEDAGRKVVLVNPANTSQMCSSCGQTVKKDLSIRIHNCPYCGLSIDRDLNAALNIARLGLQSLASA

SEQ ID NO: 61549 - protein, 319 aa, Planktothrix sp.
  misc_feature (267)..(267): Xaa can be any naturally occurring amino acid
LTPSFRLFLLFSGVCSNIFRPGGANRVLHKAVQVRLYPTAWQKARLAQTFGCSRWWWNYALNKSIQVYQDTGSWLGRLALNALLPKLKKAEDTLWLADCYSQVLQATTLNLTTAYKNFFAQRAGFPKFKSKQGKQSIQYPQNVKIVEGNVKLPGNIGIVKAKIHRPIEGKIKTVTISQTPSGKYLASILTEIEGENPTVSEGKIYGIDLGIKHFAVVTDGEKVFKYDNPKHLAKHEKNLKRKQQKLAHKQKGSKSRQKYRKIVAKVXELGNKHYCGREFSLRWRSPQEYHKLIDLNPVAINFDSIDQSVDRLVIVIHWN

SEQ ID NO: 61550 - protein, 410 aa, unknown
  TnpB Polypeptide
LSYGVWLFSKVIDKRGINALESGGFMYDDLRKIEKRTKLSSAYIQQCRDQAMWLWRSYQVQHRNWEQRLVRSKARWKDALLKREPHKPFQGGLRRKVPVRVDYRTGLVQPAEHIHLSPYVVRLSTLRKYARITIPLNPAKYHLDSLQKGKVVDFQLVERNGVYCVHICLRFEVQDVSVQSILGVDLGIRRAIATVLLRPNQYIQRKDLSIIRDGAKRHRLNMLARRETELQQARKWKPLHRLRQKRSNVIRHYDHVLATTVANLAKRESSIVAIGYPKNLRSQRYRGDGRVLLRKLLHQRFSYGRMIQLIQEKCNEFGVTAVPVSERWTSTICHRCRSRTTKRIGQSLFWCMKCGLKYNADWNAAINIGSVLFAERRGRWAIEDLARAEDELAYKPMSLEVGNHDQESHV

SEQ ID NO: 61551 - protein, 393 aa, unknown
  TnpB Polypeptide
MLQGWKYRLYPNKAQAELINKHIGACRFVYNLALETKNYAYASHRKNISCFDLMNQLPELKRECIWLKEIDSQALQQSLINLDKAFTQFFKHGAKFPNFKSKRNKQAFRSPHPSKIVIENNKISIPKFKQGIKIIIDRAFKGEIKSAVFSKTPTEKYYVSILVETGKEVPKTKPIKENTAVGIDLGIKDFIVTSEGIKTNNPKYLKNTITRLKVLQSRMKNKKKGSMNSKKAYKRIALVHEKIAFQRKDFLHKLSTELVNNHDTLCFENLKVSNMIKNHCLAQSISDAGWSMFVDMCKYKATWNGKNILQIGTFEPSTKMCNSCGATNHTLTLADREWTCKCGVFHDRDINAARNIKSFALRNSGAASPGVPVEMLAIAKSMKQEVIMAGNYL

SEQ ID NO: 61552 - protein, 556 aa, Cupriavidus sp.
VQLTTQTRPTITPEAALVLARLVGHYGMQLRKLYAVVAAKGGKVKNHKTEFCKAHGITARYFNGLANDLQGSIDSVCELLKQNVKDRNSALKKLKKRVAGFDKKFADLDAKRIAVTTKVFRRWTAQQRKLQLKVKRLEGKIAELQRRLEANVPGICFGSRKLFQKQFNLAENGYRNRAEWLADWRAARDHQCFFLGSGDETGGNQSCTLSVGEDGLLALRIRLPDAVIAAGKEKSECDGSPVEKPTGKDKYLVLGGLSFPYDEPALRWALREGKPLSWLIHKDHKGYRLMVSFARPAAPISTLSAKFGAIGIDFNADHLAVTETDPGGNMIQSWRVELPLEDKSTGQRAALLSDALEGVVEHALQAGKPIAAEDLDFTDKKKDMSTMSPAQARALSGLSYAKYQQLLASKCHRRGVELIKVNPAFTSLAGQIKYAKPRGLSVHKAAAGVIARRSQGYKECIPRLKSTPVSVKGVTVLFQLPARNRAEGGGTSWDELHVALGKFRRAIVAAQKNTSVARKVGTSRGKMPRGPSGGTVTPAGNKSSRSPARGEQICSW

SEQ ID NO: 61553 - protein, 312 aa, Bacillus sp.
MKRAYLIEIKPTTEQVSKIRQTIGVCRYVYNLYISKNKEAYESEGKFLSGYDFSKWLNNIHTKECDQWIKEVSSKAVKQAIMNGDKAFKRFFKGLSQFPRYKKKRKQDVKCYFPKNNKTDWTVERHRVKIPTIGWTRLKEYGYIPKNATVKSGTVYQRAGRYFVSVLCELEEMATKLVLNKIGLGIDLGVKDFATRSDGIVHENINKTIKVKKIEKRLKREQRSLARKFENLKKRGEKSVTNKRVNIDKNVLRVQKLHARLANIRIEYVKSIVTNVVKTKPTFITVEDLNVKGMMKNKHLSKTIAKQSFFCF

SEQ ID NO: 61554 - protein, 483 aa, unknown
  TnpB Polypeptide
MDKEVLKMLIEKKSNSNFATVECLLAFDTNEDKGRVLTLMRKFSSMVRFAYKRLMEGASSKELKKLLAQKYGINTRYSSDAILLAQQTLESCAEREQNPKKLVFGSRKLFEQIKKKHLAGKRRDELRQKWEERRYGILCSRGDKSLQGNLNLRVVNLSNQWHLRINLGNGEYVWAKVIRSAKRKTDKWIGFISDIEQAEKTGEWFPYTVRLKLRNGKIYAQFSKEENCPEVTITKDNGVIGIDINAYPFHLALVHTTKDGNLEKYERISLDNLLEGSSEKREYLSWQIAHQVVEIAKRERKAIVVENLEKLPKGRRGDGLPKLRQKLQKWIYKALLQKIEIIAKRNGIQVVKVNPAHTSIIGKLKYAPLYNIDKDTAGAYVIARRGLGFKERLPKNYRNLLEDKEFLSYSVAKVEDRIAKLRKEIGEEKNEYKRNKLRSDLRRLKGKLKLLLGSLSDSGESESATQQTVNRKMERLRGLTHVR

SEQ ID NO: 61555 - protein, 297 aa, unknown
  TnpB Polypeptide
LGCPPRYNLHTFILDWETGIVNLSTSKGRMKIPFNFPQYAKYAICYPTATADLMFRKNKFYLHVVVVLPDVEFVSNEKAIGVDLGVTRPAVSSDNRFHGSRHMKEIVKRIFRLRRDLQANGSKSAKRHLRCLVGREQRFRRDCDHVISSSIVKDIDAGTNIVLENLTNIRNRVKAYRGAASRRLHSWSFLQLRSFLEYKSEARGCQVAIIDPRKTSQRCSRCDFTYRGNRRSQSEFLCRKYGFHLNADLQASRNIRDKYLVSWSIPPSDALSSTSVSSRSLPVGKGRDKLTALAVSG

SEQ ID NO: 61556 - protein, 374 aa, unknown
  TnpB Polypeptide
MEKTYKYRLYPNRAQASLMGQTFGCCRFVYNRTLAMRQEYYNTLGITLKKYDCVKLLPVLKAKYPWLKAVDAIALQASVEDMDTAYQNFFRGIKSGKPVGFPKFKSKRHSRAAYHTKKVGNNIEVSDRAIKLPKLGWVKCKVSRPIEGRILRVTVTRSTSGKYFVSVCCTDAEITPLPPVDTVVGLDLGIKSFCVDSNGIDYSNEKYLSRSEAKLRREQRKLSRMVKGSNNWQKQKVKVARIHEHIANQRNDHHQKLSTRLIRENQVIAVEDLNIKGMVRNHKLAREISDAGWSDFLRMLEYKARWYGRTAVRVPAFYPSSQVCSGCGHQNPQVKDLRIRQWDCPACGAHHDRDHNAACNILTKGLEMLATGAA

SEQ ID NO: 61557 - protein, 428 aa, Saccharopolyspora sp.
VQLRYRFRLYPTPGQQAALARAFGCARVVFNGAIAARREAYEAGKKMPTASELCKLLVTEAKKTPERGWLASVSAVVLQQAFRDADQAYKNFFDSMSGKRAGRKVGAPRFKTRRDRRQAVRFTANARWSVTAGGKLRLPKIGDVPVQWSRALPSAASSVTVIKDAAGRYFASFVVDASPESIETEAPEIGVDLGLGHFAVLSDGTKIKAPKFLRNAERKLKRAQRNLSRKQKDSNNRDKARIKLARAHARVADARREFHHQLSTQLIRENQAIAVEDLVVSGLARTRLAKSVHDAGWSAFVAMLEYKAALYGRSVVRIDRFEPTSQVCSNCGTKDGPKPLHVRVWRCQECGTHLDRDINAAVNVAKAAGLAVTACGAHVSPERVRAERGEAGTHRGDLASAEPRAARRGRNHRPLRTGEEVNCCLSTL

SEQ ID NO: 61558 - protein, 441 aa, Burkholderia sp.
VWCGWFASLCSVCRAASSCLLRETLSFRLGAERGAADLLLRQSLRLTPAYDMVRDMDIKRAYRFRFYPTPEQAAMLARTFGCARYVYNHMLRLRTDAWQQHQARIGYHETSAALTALKKTPEHAWLNEISSVPLQQALRHLQTAFVNFFAKRAKYPNFRRKDGTQSAEYTASAFRWDGTVLKLAKMDAPLAIRWSRTIPKGTRVTTVTVSKDTAGRYHVSMLCDDVVSTKSAATGKVGIDFGLTDFVVLSTGEKIAAPNALCKNAAMLVKLQRRLARKQMGSANRRKARLKVARMYARIADCRRDFLQKLSTRLINENQVIAIESLAVRNMLKNRRLAKSISDASWSEFVRQLTYKAAWYGRTLIGIDRWYPSSKRCADCGHIVATLPLKVRVWVCPGCETAHDRDINAARNVLAAGLAVSAHGEGVIPMSLCEAMSGCIQ

SEQ ID NO: 61559 - protein, 478 aa, unknown
  TnpB Polypeptide
MGMEERTIEGTNNGSRARGRCPRANQPEEKGKHYVKQSEQKGCESSGNRSIVPLNVWAKNPGASEALVWRADTVRIVSQEQEGKLLEIASACARLMELEDERRRELYEKTGRIDCGVMDAYRNAEYAEHKRILGSRNFDEVLRLVSERWKSFRELLEERRRGELPAWLDPQPPKSVKRPIIVVRFGNYRVDAQSKTIKLGYYNIALKFKGELRWWPRRIQQGRLVIVYDEIEETWYAHIASEVRIKREVPRARAKCGIDLGQVHLIAAATEGGVALLYRGSVLKSEYHYHKRLMAQIDGAAKYADFDTAVWLEKRRWLARRFKRRRAELIKNAAAHLVKQLSALGVAEVYVGYPRYLSQDKPSENNAAWPYRKIVQEIACVAENFGIAVYAVPEDGTSKTCAYYGCKVVREPRGLVRCPRGHTMHADVNAALNVLKRGGGKVPERVKVLSFVPTPSGVIERKRRRREKGPYSPAPKAG

SEQ ID NO: 61560 - protein, 425 aa, unknown
  TnpB Polypeptide
MFYSSGMLTMNYRYRIYPDATQQSTLFEWMETCRSSYNYALREIKDWCNSRKCMIDRCSIEQEYILPADLKFPNEVQQLNALPHAKKEFPRLGEPPSQVLQQAIKQLHRACVGFQVRGFGFPRFKKFGQFKSLLFPQFKKNPVTRLHIELPKIGAIPVNLHRPIPEGFAVKQVRIIKKADRWYALINIHCDVNVPEPMPHGHAIGVDIGLSKFLATSDGVLVKPPKFFKNLQSELKLLQRRLSRKQKRSKNYEKQRLKVARMHHTIDNTRKDFHYKQAHALCDGADIVFMEDLDYTITAKGMLGKHMLDGGFGQFRSLVKYVCWKRGKFFAEVSARGTSQECPECGAQVRKDLSVRVHHCPECGYTTDRDVASSQVIRNRGIALISTPGLGGNESVCAVGLPGAEETPTRSEAKPRKGKTRKAKK

SEQ ID NO: 61561 - protein, 429 aa, Moorea sp.
MTVTLNYTYRIHPDSKQEAMLCEWLEICRQSYNYALRELKDWIASRKCPIDRCSLESEYILSADYPFPSYHQQQNQLPKAKKVFPELAKVPSQVLQTNVRRLHDAWDFFRQRGFGFPRFKKYGQMKSLLFPQFKSNPLTGWQIKLPKLGNVQINLHRPIPNGFVIKQVRMVKKAIGWLAVIGIQSEMKLPEIETPFGHYLGIDVGLDKFLATSDGYLEKGRKFFKTEHSKLKLLQRRLGRKQKRSNNYEKARQKVEKQHNHIAFKRKDYHFKLAHKIGDMGDSIFLEDLDFRNMAKGFLGKHTLDAGFGQFRDILKYVCKIRGKYFGLVDHRGTSQTCPNCRAEVRKTLSDRLHNCRECGYQCDRDVASAQEICNRGIETHSRQGLCRRETVCQVEVSGISNLDNWRRGTIPLWAEISRRESGSPTHNL

SEQ ID NO: 61562 - protein, 400 aa, unknown
  TnpB Polypeptide
LDALLLACLTLTYNAIHYAQENGINNRRGMKEFYRTLRRVELPSCYKVALIGRACSISESRKKTEKRNRKAKHSKPLKPVVCLISGFFTTARGRLFIPLSKRNQYADVLLNRHVRRTIEGKALRSLTITPGSLSICYSEDVVPIPARTVYGVDRNEKNLTFGNEKNVIQIVMSKTVKVRQTTRKIVGSFKRNDVRMRRKLASKYWRRATNRTDQMLHGATSFIVESAVHGSAALALEDLTDIRKMYRRGNGQGTDYRFRLNSWPHGKAHYMLDYKAVWNGVTMISLTKADTRGSTTECASCGERLHSPAKGDAKHGRMLWCQSCKAWMERDANAAINLSKRGLVRFASSLPQSQSRSQESNLAEDKGLAVEALKGNGTTTPILRVDASKLARCGPRADSL

SEQ ID NO: 61563 - protein, 326 aa, unknown
  TnpB Polypeptide
MKTLKLRIKDKHAKVLIQLASEANFVWNYCNELSYKHLQRTGKFFSAFDIATYTKGASKSGLSLHSQTIQAITEELVTRRKQFKKAKLNWRVSNPKSPKKSLGWIPFKASGIQYQNGQIKYAGYWFGLWDSYGIKSHKVKTGSFVQDSRGRWYVCLVVDTPELTQTMSGIAVQGKTPVGIDLGLKDFATLSNGEKIEAQRTYRKYEQKLGIAQRANQKQRAKAIHAKIKNIRSDFQHKLSRQLVNDHAAIFVGNVNAKGLAQTKLAKSVLDAGWTMFRTMLKYKCENAGVWFEEVNESYTTQTCLAPYMAHAAHATTVRKVEQVLE

SEQ ID NO: 61564 - protein, 419 aa, unknown
  TnpB Polypeptide
MLLSHKTTIKINRNYSNIIGHMCYAAYKLWNVCNYERVHYKELALPAGYPDWYYQKKAHKSDLWYKQLPSQTAQEVCKLLDKSWKSFYTLKKTNGIQNPRPPKFKHDPIAVTYMQNAVVHCPGSDMVRLSVPKKLTEYMESVYGISDHFIYLENKIFKTTDTIKQIKIYPPENNECCIIIIYEVDDVARLSDNGKYLSIDLGLHNLMTCYDSSSGDTFIVGRKYLSYCNYFNKEIAKAQSQWAKSQYAHGIKYPKTSNHVRKFYQKKNDTINDYLHKCTRYIVSYCKCNDIHTVVIGNITNIRKDNSLGSVTNQKLHSLPYNKIYIMLEYKLAAEGICFVKQKESYSSQCSPLMPIVSKNNACRSNRVKRGLYRDGNHSWNADCVGAFNILRLYFQKNKINICLDPMEIKSPHIVKVAA

SEQ ID NO: 61565 - protein, 300 aa, unknown
  TnpB Polypeptide
LRHANQYQPNITVAELDQNRSLTRIRADDPVWAALPVALPRRPIARVNDVMQAFFALVKRGQKPGFPRFKPATRWKSFGVVEFSCIRLRDGRLHLGGIDGGLRINPHRALPPEAALKSCVFKRRGRHWHVSLTVNVPAAQSHGHPDCAIGFDVGVAHLATNSHGVHISNHRPSTRRAKELRRAQRALARCRKDSKLRRHKMRETLARLQRAVSNARDTYLHQVSAASTRDHAFIAVEKLQLKNLTRSAKGTAAELGNNVWQKAGLNRSLLDAAPGRPIAFLSYKAARAGGTLMAVDPQNS

SEQ ID NO: 61566 - protein, 322 aa, Actinocrispum sp.
LAAARAGRSVGRGSSPARTTGSRSASPVTVSVSAQTVGYVWRRSGRAGEMVPRPAVRTVVDHDHPRSGRPLLRLIRGRDRTVTGGARSRGRSRSGSARDYRRYDRSADGCAEPEVPRPEAAQARPLGAGEDPPCQGGKNRARTRRKIAIQHGKVSRARRDYHHKQALNLVRDNQAVYVEDLYIVGMVRNRRLARVIYDAGWAQFLRLIEEKAERYGRTQHKVSRWLPSSKTCSACGHVMDTMPLKVRDWVCAVRGVAHDRDHNAAINILAAGRVERQNAWGASVRPPSGEAQGDEPGSIRRDMTAWESPALWRGARQQVWSS

SEQ ID NO: 61567 - protein, 382 aa, unknown
  TnpB Polypeptide
VTTVQKGIRVRLYPNEEQEVLINKTLGCCRFVHNQTLENCKQSYEQTHHLPSKKERIINLVPLKEANEFLKEVDSTALQQSVRDLNSALDNFFKNRNHFGFPKFKSKHNLKQSYRTPYNGGNADVLDNKHIKLPKLGRVETKRFDMPDVYKIFNFTIERTNTGKYYASICIETEVQPLPETGKQVGFDLGLIDLLIGSDGTRYERPKFAYAFRDKLAQEQRKLSKMRTKLERVNANLDECKNYQKQKHKVAKLHEHISNCAKDFNHKLSVKLVRNYDLLAFENLNVEGMKKNHKLAYSISDVRWSQLVGFIQYKCQWYGKEFRQVDRFYASSKICSCCGTVHKDIVNSLNVREWTCPDCGTHHDRDVNAARNILIQALSVGV

SEQ ID NO: 61568 - protein, 471 aa, unknown
  TnpB Polypeptide
MKRTVKIKANCSNNEDEILLIGTIQRNIKNYVWSRYSGIGSLLKQSGWTIRDELIQEDLLSKKITKTFSRTAIEKSASTIKSNWMATKKKVKNAIKQNENLTEDDKRYLFLCLKHTPTLYNILNYKKVDYATDYLKDLKIDVHRLNNLLRRYIRRYKTKSHTNKANVILTSNLYKFNPSNNEFSFTGKKRNSQMKITLIGNIPKLKGTLELVRNQKSNQYYLHVPLDRIIIKKELTEKSETLGLDVGITDLITLSNGSVYGANSAELFYTLSDNLVNKNRSRLFSYKQKLEQRILTELDQSKKSILEQKLKNLEDNNLGPKKRSSKISKYKSRIVSHINHELNKMMKEEDIEEIVREDLNWVSKKNNVSKKQQNRFSTWSKGVLLERLSIKLAENGIEETIVNPAYTSQVCCKCNHLGERKGKEFKCSNCNISIDADFNASINIKKRKFIEEINIYTPYKEVKKYYENLPV

SEQ ID NO: 61569 - protein, 468 aa, Kitasatospora sp.
VLEAAGEDNRVRVTGVEAGRVKREALGVPARVKHQQRVAVPMRRRTPAADTRQRVYRYRCYPTPVQAEQLIKTFGACRWAYNEGLALRDRAWREHRVSLGFAESCRALTGWRNAEGTRWLQEVSSTVLQQALRHLDIAFGRFFKGTAKHPRRKKKSRSRDSATYVRTGFRWVEDSERPGTGLIALAKQSGSLRIRWSRPLPAGTRPVKLIMSRDQAGRFFVSVLVEERIEPLPPVFLRDGGPPKAAALDLGLAALVTLDDGEKVDHPRLLKKYGARLAGLQRNLHRKERGSRNREKARQEIARLYALISDVRGDALDRLTTRLVRENQVLVVEDLSVASLVRSPRGKGRRRKAGLNPAILDASWGELLRQLRYKCAWYGRTLVVVNRFFPSTRQCSACGVTGPKLDLAVRGWSCGECGAAQDRDVNAARNLRVEGMRLYELVASTLPPGRAMPSLIRASEVPDVVRTA

SEQ ID NO: 61570 - protein, 257 aa, Klebsiella sp.
VVKNVTVSQSCGKWYASIQTESEISGPHHESSSMIGLDVGVAKLATLSDGTVYHPVKSFKASQRKLAVLQRQLSRKEKFSANWQKQKRKIQRLHSHIANIRRDYLHKVTSEISKNHAMIVIEDLKVSNMSKSAKGTAEKHGRNVRAKSGLNRSILDQGWYEMRRQLEYKQLWRGGQVLAIPPAYTSQRCACCGHTAKENRQSQSKFECLECGYTENADINGARNILAAGHAVLACGGMVQSGRPLKQEPAEVIQTSI

SEQ ID NO: 61571 - protein, 590 aa, unknown
  TnpB Polypeptide
MKTMIHKGFKFRIEPNEEQRKLLACFVWNKALEMNLWRLKNGYRIMRCAELCHWLTHWKQSNKYGFLSEAPSQALQQKLQDLDRAFRDAFDKNQPLKRLPTTRKNGIHDSIRFPDPKQIKLEQHNNLIFLPKFGWIRYRNSRAVLGTIKNVIVSHSCGKWFVSSRGLLLPIARKSIEPIAAHLDPDRVQTKHQALHHFVAKSPWSDEAVLRKVREIVAPHLALDEACYWIVDETGIPKQGRHSVGVARQYCGQVGKNENCQVAVSLSLASEKGSLPIAFRLYLPEAWANDPERRNKAGVPETVTFATKPEIALRQISEALAAGVPPGVVLADAVYGDTTHFRDQLTAWGLRYAVAVREATTVWPPGVEPLQPKPYSGRGRPAKNLRRSPGHEPVSVKRLAESLPQSAYRTVTWREGSNGVLRSRFAAVRVRAAHRDYWRSTLREPEWLLIEWPETESEPSHYFLCTLPETYSLTQLVHTVKMRWRIERDYRELKQEVGLGHYEGRNWRGFHHHATLTIAAYGFLLLQRLKDPDKKNRALSKAPPLPQGYIPRGSPKGTTPRTRLDRNDSLLDCPTHRPAASEVSLLRESA

SEQ ID NO: 61572 - protein, 396 aa, unknown
  TnpB Polypeptide
MIRAHKIRLYPNNKQATYFCKACGVARFAYNWGLSEWKRRYDAGEKVNAGLLSKELNAIKRERFPWMLDVTKCAPEVAIRTNLKRALKNFFEKKAKFPVFHQKGRHDSFSAYSQHFSVEGTTVKIPRLGKVRIAEPLRFSGKIIGATVSKTADKWFIAIAVEIPDPEPIRTNANQAVGVDLGVKTLATLSDGTVVKGPNASRKHEQKLRRLNKELSRRKGVKKGETQSNNFKKTKRKIARLHARIANIRLDATHKLTTTLVKKYDLIGVEKLNVAGMMSNHRLARSIADNCFYEFRRQLEYKAPAAGTRVIAANVMYASSKTCNVCGTKRKILSLDDRKWTCECCGAVHDRDVNAAINLRNYAVGYTATACGGLGEVTAPDETGIKRRNRKASGKS

SEQ ID NO: 61573 - protein, 411 aa, unknown
  TnpB Polypeptide
MPKFLKGYKVELDPNKCQMTLFRKHFGASRFAFNYSLSKKKEAFDKKEKIPNNIELHRELNKIKGTDELPWAYECSKTAFQSGLINCDRAFQNFFSKCKKKTKGKKGFPKFKSKKNEIQSFKLDGSIWLVDDNHIKLPRIGKIKLKESGYIPLDADIKSVTITSKSGKWFISCLVETEVKMQPVSDKIVGVDLGIKTLATCSDGTTFENPNALFKNLKKLKRKQRQLSRKKKGSNNYKKSKKKLARLHHRIANIRKDTLHKATTKIVSENQGIVLENLKVSNMMKNHCLARAIGDVGMFEFRRQLEYKSKWYGRDIQYADTFYPSSKTCCECGWKNENLTLGDRTFKCEICKNEIDRDLNASINLKNLYIGSSPKINALGDGSPVCSESDKHSPSLKKESNGKFTYVLKRV

SEQ ID NO: 61574 - protein, 407 aa, Clostridium sp.
VKTIVKIERVERHIINKNHKMYKICDELCFKSKNLYNYANYIQRQNFIKNKKIIKYVDFSKMLNKSEPFKDLGSNSSQMILKLLEKNWKSFFVAIKDWSKNPSKYLGKPKLPKYKNKNGRYICILTNMQSQIKDGYLYFAFKPLKPFNNLIKTKVKDKHMQTRIIPKGGCYILEIVYQKEIEEKQIESKNIIGIDLGLNNFATISNNIGLKPIVINGKGIKSYNQYWNKQIAKYKSLAKTNNKLDWTKRLEKLTLKRYNKIDYFMHCASKYVINYCIENNIDTIVIGYNKEWKQKSSLYKTINQGFVQIPYDMFIDKLKYKCEDVGIKFIETEESYTSGTSFLDNEEPIKENYNKSRRIYRGLFISNKRRKINSDVNGAYQIIKKVFSNAFANGIEGVHLHPMVISL

SEQ ID NO: 61575 - protein, 463 aa, Deinococcus sp.
MKLNATQAQCLFFGRAAGASRFTWNWALAQCTDIRHATGKNPTMGDLKKRFNAIKETEFPWIYDSPKDANQQPFTFLQRAWTRFWDGVKDGKIPVWNTAQKKALLAEGKKRSELSFAPTFKKKKDGASFYVSNDKFSIDRESRTVTLPKVGQVKLAELPRFRGKVMSGTVSKDGNDWYLSVQIDVADRDYFRFRSGDGVIGIDLGVKDTAVLSTGEKLTGPKPFKRACRRLAILQRRVSRKQAVVLDSLGLNGKAIPKGTRLTKSNNQKRSERLVHAVQSRVKHIRQNFQHTFTTRIIRENQAVVIEDLNVAGMMANHKLARSIADIGMGEIRRQLTYKAARYGTALHLADRWYPSSKTCSDCGWKKADLTLNDRTWVCEDCGVIHDRDVNAALNLKNLVPKVLAPQDEVVLPGGYRERHALPVEVLFQPSEFMSALGEASGQEKKGNDSLSESVVHQTTLLG

SEQ ID NO: 61576 - protein, 218 aa, unknown
  TnpB Polypeptide
VDRGGTVAVALSTGEMTSPQGLWAKEAERLLRLQRRLAHATGGSNRRKKTKALIAGLKAREVDRRKDWVQKTTTDLARKFDVIRVENLIVKAMTLSARTTVVELGRNVARKAGLNRGFLKSGGGLLVARLEQKEPGRVEKVKAACRSQTCNPCKHIASDRRKSQATFVCVSCGHRANADVNAARNIAAKHGVTARADRSVLARSVEREPQHGRPPQVA

SEQ ID NO: 61577 - protein, 218 aa, unknown; identical to SEQ ID NO: 61576
  TnpB Polypeptide

SEQ ID NO: 61578 - protein, 433 aa, unknown
  TnpB Polypeptide
MEPVRSEETKARIRASMSATKARRQTQVCRVFELKVSVRHNPKETFRKLAQCFKEAKWVVNDMLSQTKDNPDNSMFDYKYTEHREVVHYDRDRNPITDTITLPSVLHRATVAQKKTDIVNLAKAKQKGIKIGALKFRSEVNCLPIITGFTQILDGCRITIPGFRKLRVHGINQLHQFEKFELADAKLIRKASGYYVKISIMLPKERRNPTGRNVGLDFGIKDSITTSYGDKYKCDVRESDRLKYLSRKLNKRGKKRNEKGSKRYYRCLRQLKREYEHVANARKDVGNKIYHKLVTDYDVIYFQDEQIKGWQKGLFGRQVQSSCLGSLKQRLKSLQDSGRSFMISRWEPTTKLCPACGAINHPTLADRIYLCGCGYTMDRDIHSARLVLMIGSSKRAECLEQASMEPGPIIPRSSAAATRQARAVKSKQEAAAL

SEQ ID NO: 61579 - protein, 491 aa, unknown
  TnpB Polypeptide
MPTKLYTSREAARILDVCPNSLETSEVDSTSNEKVLKPFWNELCRELTSHLWLPTETDLQDLGLTSFDKFLSRTTENSWFSTKLFSRQNKNLLTTCSISSTYFPQECTDLEVIKSKSVKLSVTPEQHRTFKHWHNVSRWVYNQALNFMIVYETNEELGVKKPSWMDIKKMFTRTLPEWTKDVPAQIKGIAVKEAVDAYWKTLKAHKGKKGKIYFNFRSWKNPVQSCYIPKTAIFDNGIYPKISGKDLKFLESFPDEVLDSRLVWRAGKYFLTIPTKQRVSYGENQARVVAIDPGVRVFSTFYGTDSCGFLGQGDFSRIQRLAHYLDDLISRMSKVTGKQKLRKMKLAAARMREKIKNLVDELHHKVALFLVKTFDCILLPTFETKQMVGKSERKIQNKTVRSLLSFAHYRFKQFLKHKAFEFGKEVVEVCEAYTSKTHPETGEVKKVGSAKRIKLLNGQWINRDIVGARNILLRALVDQPHLFSVAVAKCE

SEQ ID NO: 61580 - protein, 437 aa, Lachnospiraceae sp.
LKYIIIYIIIYISTQIYHRKEKDAMSEVVKTMKLHIHVNETEAKSLEELTACYAQACTFISKYVFDHGFILNFMKLQETLYQTIRTEFGLKSQFTISAFKTVTARYKTVQEQLFQNPYRYENEKEETHFISRTLEWLQKPIVFRRPQADLVRGRDYSFVTADDGQKLLSLNTLKKRIKVTFDLPKKFKEYFDGTWSFGSGKIVSMNGNWYFHIPITKNVSEEFSMDHVKHVVGIDRGIRFWVTSYDEKGKVTFVSGKEIQKKREHFQQVRSELQSKGTKSAKRALKRISGRENRWMSDVNHQISKTLVTKYKAGTLFVLEDLKGVSFSDDLLGKRSAKDRQELRTWTFYQFEQDLTYKAQAIGSQVLKVKPDYTSQRCPKCGRIQKENRHHDIHEYICDCCGYRSNDDRVGAMNIQILGTMYVSGDGNPRFGVRKVN

SEQ ID NO: 61581 - protein, 417 aa, Streptomyces sp.
VKLVVQVKLLPTPVQASALEATLRACNEAATWVSAVAFEKDVKRNFALREHTYTEVKERWQLGAQAAQHVIKKTCDAYTTLKANLKAGNLGKPWSKRYRRAVEKPIRFRPEGAQPYDDRMLSWQIPDRTLSIWTLQGRVKGVAFTASPEHLARLALYRKGESDLLFRDGMWFLNATCEVPEAEPDTGVQEFLGIDLGIVNIATTSDGQIMAGRVLNRGRLRERTLRTKLQRKNTPSARRRLKKRRRKEARRAKDINHKIAKRVVAEAERTGRGIALEDLTGIRERVRLAKPQRATHSSWAFAQLGAFIAYKARIAGVPVVHVDPAYTSRTCAECGHIDKANRVSQAWFACRSCGFVDHADRNGSRNIRARAEELWRRGAQSTVPDPPPNPGRGTRRKRSTTASGARCASPGLQSRVR

SEQ ID NO: 61582 - protein, 537 aa, unknown
  TnpB Polypeptide
MNQNKKISQTNKLENSENKNMNDKQKNENILKRVSIYQIKTKHPMFSYVDSNTFYGKNLYNLANYYIRQCFINHSKDEKDLTQEQKDLIENINKYIKKYNEQYANNFRKNNKKNLIKYMKKYNLLKTQENKENEILALDEKINKLFKKRMNLQVEISKENGLLSYNFLNYYFAHCLNTEDNPYKTLPIPTAQQVLRYLEKNWVSTFKSMKKYAKDSSNYTGRPKLPKYKKKDGRIKISFTYQQCKIKDGYLTFPKTDLTIKLGFDYSGLILKEVRIVPMGSIYKVEVIWNKQKQEPLKYLNVSSCIAIDLGVSNIATITNNIGDNPIIINGRKLKHINHCYNKEKAKLQEKLPFVENWKGDLEQLHWSKLLSRITKNRNNKMDSGIHKISKYIIDYCLKNKIGKIVIGLNNTWKQNINIGTKNNQNFVTIPFRTLINQIIYKAEEVGILVIVREESYTSQASFLDLDEIPTYKTGDSTTYHFSGKRIKRGLYKSKDGTYINADVNGSYNIMRKEFPELFTKDTIKTFKIKPKKVNIL

SEQ ID NO: 61583 - protein, 488 aa, unknown
  TnpB Polypeptide
VGKFEIPQGWTAQAYRFALDPSPAQFRAFRSNAGGARKAYNTMLALVKAVMDQRQAERSYGIGEADLTPALNWSLAGLRKEWNQRKDEAAPWWAENSKESYNSGLDALARGLDAWDKSRKGKRAGAAVGFPRFKTARSRRSVRFTTGAIRVEADRHHVALPRLGRIRTHESTRKLARRLEAGTARILSATLSEDSSGRWHVALQVIVQRAASVPAHAGAGVPAVGVDVGVKEDSLMVIASPDGREIRRVPAPKSLTAAQGRLRALQRRAARQQSPWNPETRTRRPPSKRWARTNRRIGRLHAHAAAVRRDVLHKETTKLAQSHQVITVETLNASGMRSAGGAYKKGLNLALSDAALAEIRRMLTYKCTWAGSALVEADRFYPSSKTCSGCGRRKPNLTLADRTYECDHCGLRIDRDLNAAVNLARLGETRHQVPGEQGPAGSGPVAGRRATRETEPARAGDAGGRETSTPHRQPPGKTGTASPQGEAA

SEQ ID NO: 61584 - protein, 273 aa, unknown
  TnpB Polypeptide
VKVPKVGWVKFRLSRQGLPVAKSYRVTYRNGQWHVAFAVKPSPLPGPGTGEVIGIDRGIVITAALSDGRNLNCPQLTSRERARLRKHQRRAARAPKGSPQKAAEYAAVARIKAREAGRRKDWCEKTSTMLATEYDTIRFEKLSIVTMTASARGTTEKPGRNVAQKAGLNRVILAQGWGLLRDRTENKAPGRVQDVPAPYTSLRCSACGWIDKESRKSQAGFVCSSCGFTCNADLNAAINVAAGPRRRDDARKRRASVNQQSGPREPLLESPSL

SEQ ID NO: 61585 - protein, 359 aa, Chloroflexi sp.
MKQTMLLKLAPTTQQHHALLETMHAFNAAANYVAQVAVSEKSANKFELQKLVYAELRTTYKLAAQLAIRCISKASEAYKRDKSIQPTFKPEGAIVYDERVMSFKGLNTVSLLTLSGRVVVAFRIGAYQESRLDQMKGQADLISRNGVFYLAVTLEVATPPPNAPTDTLGVDLGIVNLATDSEGQTFSGEQVERNRKRHHALRGRLQKRGTKSAKRHLKKLSGKERRFRKNTNHVISKRIVQKAKQQHKALAIEELRHIRTRTERTVRHSQRARQSSWAFGQLRQFLCYKAALAGVPLHTVDPRNTSRTCSECGHCAKANRKSQACFCCQACGHTDNADRNAAKNISRASVMVPTVAGRA

SEQ ID NO: 61586 - protein, 425 aa, unknown
  TnpB Polypeptide
MSNITLVAESKLYVKDNLSLYNYFDDYSKLFNFLVRRCIHHLRHKLNEVSESQYRTNLMKKFDLTNRMAKAIIRTAKNQLKLLTESARYHFNNLYKRRKSFYKKIQKYKLMLSLSSTSSKQRKVTKLRLFWTQMKLNKVNQVIANGLKPHLTFGTKHFLKTNKQKFFTKRDNQVVYIGDKNETCGNQQFQVQFNSKHNRFDYKLRLDNQWVSDSKKYIFGSFVLKNKEAKKDILKTLSNKKSNPLTYRILKRKGALYLQIMYRKEITDITRYNHGALGVDFNKGFISVSEIDSCGDLKSLTRYNYLHKGKATKTKTSMLELVAKLVTQAVSVGKDIIIEDLVSLDSNKKQVKTTSKNYNQMINSLKFGLFKRCLLSKATKEGVTVHSVNPYNTSKIAQKSYTNKMKLNVHDAASYVIARRFYQYD

SEQ ID NO: 61587 - protein, 417 aa, Lactobacillus sp.
MAKTMAQLPYHCGVKVRVFPSTEQKRLIKRNSDASRFIYNQMNDMTNDLFWLKQVKIPITIVLNRIADLTERLRNPSTAISNIHGWLNHPDFDSLMKANAIKNYKTAWKLFRQVHQAGTPKFHKRGYTQTYQTSCLYGAKVAVPTMRNGSVRLNDTHHLQLPKLGRLRFKGLPSKILDQADDIRIGTTTISMDAVGHYFVSLQMGSGHPFAAKQRVTKSKVGIDLNLDNFLTDSNGQVIANPRYYRMIKGKLAKAQRKLSRRARRAKKNQQRLSESKNYQKQRLLVAKLRLKVANKRKNFLHHVSTTLIKNHDLVVAEELRSKNMLRNHALAMSVSDVGWRTLLAMLSYKAGLYGRKFLTVSPRNTTQTCSRCGHVMAGKNKLTLADRKWTCPSCGIFHIRDHNAAQNILAKGLATL

SEQ ID NO: 61588 - protein, 362 aa, Eubacterium sp.
SDSESNQIGQADLHHNLPLSTFNLPPESAKKGRPSRPKNLHMSMLYYKGMYKDFADGQILLKLYTGKAWSWVKHRYTGRPFPENAEPMSPTIVIKKKKVMLHIPVKEVVEDSRTAKERVKQHESFVAVALTGSDTLAVCTTIQADGRATAPYFIKGGKALAHRRKQLLGYTKRGTAGKKMTHIIENDALGVCPRGLSSYGQAEAGSALQEHRPNAKYYEKITRVTDHYAHEVSRKIVDYALKQGAKLIVLPELKESFDQAKKLYLGKSPYDFIGRRIARYVKYKAWQKGLVAMTSKPYYASTRCYHCDAPIAKHNTEYQNPSPNFYGGKNFVCKEGHKGSTALNSARNLGKGFYERFYAGVA

SEQ ID NO: 61589 - protein, 380 aa, Lactobacillus sp.
MVLKGIKLRIYPSKEQQTSIKLNFGYNRFVWNQMLGMLQERYANNPKLPFPSAFTLNNLLPTMKREYHWLKDAESKSLQITCKNLVDAYKKFFKTHKGFPKFKSKKYPKQSYQTNHPIRIVGNKVKFPKLGYMKFKGSSKKLEEISKIKLGTIKLTPTGKYYLVLIAECENQTLSKTDKSVGIDMGLADLMITSDGVKYPTIRFDKILAKKKHYWEKRLARRRLQAQREIAWDKHNKVLEPRGLNDFSNYLKAKHLVAKYSEKIANQRSNYLHLLTRQLVEQYDIIKIEDLKTKNLLKNHKLSRAIANASWRELRRQLEYKCLWYGKQLVTVNPRKTSQICSSCGYDDGKHTLDIREWTCPRCGIHHDRDINAAINILNA

SEQ ID NO: 61590 - protein, 397 aa, Lactobacillus sp.
MWYINSVPYDIKERRKNVTLKGVKLRIYPNQEQQLKIKLNFGYNRFVWNQMLNMLQERYKNNPELPFPSVFTLNNLLPTIKLEYPWLKDAESHSLQLTCKNLVDAYKKFFKMRKGFPKFKSRKFPKQSYQTNKPIRLVGNKVKFPKLGYMRFKGSSKKLEEISKIKTGTIKLAPTGKYYLVLIAECENQALPKSGNKVGIDMGLADLMITSDGVKYPTIRFDKILAKKKHYWEKRLARRRLQAQELIAWDKHNKVLNPRELKDFKNYQKAKIMVAKYSEKIANQRSNYLHLLTKQLVSSYDIIKIEDLKTKNLLKNHKLSRAIANASWRELRRQLEYKCACYGKQLVTVNPRKTSQICSNCGYDDGKHTLDIRVWKCPHCGKVLDRDINAAKNILMA

SEQ ID NO: 61591 - protein, 388 aa, Lactobacillus sp.
MLKTHQIKVEPNAHMRKHIEDLFNYRRYCWNKALGIWNDLYDESVVLGDKKIRPTEYAVRNILVANKQDWQYALSSRVLQQATRQLDKAWKNYFNPKMTSHRRPKFKSKKNYKPTFTTDRAKIVDGKLLLDKPSAISKSVWYGIKLREQPRFEGKLKLCTVVEKADGLYASLLFDTTQEQKEPLKQGVTGVDVNVKRLNHKDGVVNIYPKKLDRYYQRITHYQRILAHKRVDNPHNFRTIRYAKAKAKLRRDYQKVHNLQMDILQKFTAGLVTNYGEIHIEDLNVHGMMMSKCMGKNLQRSMFGELSVNLAYKCKWNNRKLVLVDRFYPSTQICSECGFCKTKDGYGGKQALSGDSIYHQHQTYYCYNCGAVLDRDENAVKNIINYQG

SEQ ID NO: 61592 - protein, 407 aa, unknown
  TnpB Polypeptide
MVKTHKIALKPNKAQATLLSKHCGYARVAYNHALNVFKDGLDNDEFKSLYTLKREFNAVKNEEYEWNGELSQNASKNAIHHLDRAIKNWRNKTLPARFPTHRKRAHGQSCQADNGKGTVKVCGNAVFLPKIRWVKMAESLRFDGEIVQATVTKTHGRWFVCLSVETGEETPAKRAGETLGIDMGIQALATYSDGQTVENPQASLDQHYRKLRRVDKAIARSQNVHGKNKPSNRRQRMYDQRQRIYGRIANIRDDVHHKATSALVKATTVGKVIVETLNVAGMRQNKCPSRAFHRANIAGFLRMLAYKCEWSVFEKADRWFASTKTCSDCGEKKVAMDLSERDYVCLACGLVINRDLNAAKNLAHDDAASHAESQNGRGGAVRRTRGCKCVDACPVKRQSNQLSFAFA

SEQ ID NO: 61593 - protein, 414 aa, unknown
  TnpB Polypeptide
MEVRRTAPVKLIVPDERRDDLHESARQFLYCANRAAEFCWDDHSYTNCVTANSTARDALYAELREETELTANLVQEAIRRAVQATKGCVERWKQGKRVSQPEFTSWSMLYDKRSATFYRNKVSLSTVNGRVECDFELPADSPTPYEQYVLSDEYEFRASTLQYDKATDEFYFHITTQKYDDDEFEVSADAGHQTVLGIDLGVNSLAVASTGTFWQGDDYDHWCREFEKRRGEMQQRGTQAAHNALLRLGKREEAWRKQYLHTVANEIVEEAVEHDCDVIVFEELTDIRERLPQAKWHHIWAFRRLYEYVDYKAPDQGVSVEQVAPNHTSQRCSRTDCGFTHEDNRHGEHFECQKCGYEVNADYNAAKNIGVRYARKRKHSLRSSPKSRNGDAPVNVRTNGGMLSGESYQRIAGD

SEQ ID NO: 61594 - protein, 360 aa, Clostridiales sp.
LYRGYQFRLYPNKEQQRKILMNISYARFLYNKMLEDSIAYYKETGKALHRTPAYYKKQFPWLREADSLCLNNSHQQLRSAFQNFFEKRTRYPKFKSRHHSKWCYTTNSLKNSIRIENHRIQLPKIGWVKVRDHRPPIGILKKVTVSYTRSGKYFVSCEYEAPDTKADPVPVEKAIGLDYSSPHLYVDSNGNIPSYPCCFRQSEKKLAREQRKLSHMKKFSNNWFKQKRKVSRIHEHISNQRLDFLHKLSAQIANEYDLVGIETLNMGNMSRSLHLGKSTMDNGFGMFSRFLEYKLKDRGKQLVKVPWNYASTKTCHICGNKKPMKLSDQIYVCPICGQISDRDINAAINIRSKSLELAAL

SEQ ID NO: 61595 - protein, 456 aa, Oscillatoriales sp.
LLTNYVYKLRPNQTQSSKMSAWIDMLRSQYNWNLNDRITQYNQQFIQGDYCCIKTKAEASPLTCFVSKSGATGNPWKDSKFDKEGKARNPRRSAADIQITALPELKIARPWYAQIDATVLQQNVKRLDTAYKNFFDGRGFPKFKNRSNFTSFTYAMGVKIKGNKIYLPKLGWMRFYNSRSIPDGFTIKACTVRKRQNSWYVSVRIENTSVPDYSPKSLGSNPKVIGCDLGITKLVHLSDGYQIENPKFLSNQKAKRTLKIRQRRVSCKVKGSKKRKKAAIRVGRFYQKISDKRQAYQWKTANKIVSRNVDVIAIEDLNISGMMRRCQAKSDGKTGRFLKNGQSRKKGLNRAISDASWGDLGLKIEYLAAKQGKIVIKVNPKHSSQECRSCGYIDKSNRDGEKFICVECGYREHADIGAAKTIRDRALKIVRGPGRETWCNEPKRPKDITTLVEQTW

SEQ ID NO: 61596 - protein, 145 aa, Microcystis sp.
VISKAIVAEAKLTNSIIAIEDLTGIRERTNQQPRNKTERRRSNSWAFYQLRQFLEYKGIKEGVEVIAVNPRYTSQTCHCCLHIGIRSGKSFKCSNKTCGWIGDADANGSKMIRLLGLSVIQPREPNLLACPISLGLQKAPVKLTL

SEQ ID NO: 61597 - protein, 408 aa, Pseudoalteromonas sp.
MKKTLRYNFRLKPTAEQEAKLVEFCSYARGLWNLLLSENMRRYRYDKTFLFYNEMAGLIRDLKKFEEFSWLKAFDSAASQQVARDLETALKNSLTKGRVQQFPTFKVSFKQKKLHDDSFRCVNNSNCIRIEKGAISIPKIGKIPIILHRKLASKIKTATVQMCHGKWDISLTQEVECKSAKQVLSTLVGYDINSQHTVVGSNGWYVKNPKVFKKASTKLKQIQVQLSRRKKGSNRWHKTKTRLNKLHGKISRQRLAFAHEVSCSIAKTSDIIVFEDLNVKGMQQFNGQMVNDNVMGVITELTKYKAELNGSVYHEIGRYVKSSGICCECQHEHKFDLSVREFACENCKVVQCRDLAAAKSVADTGEKDLMATGIVARALPKFQKKSPSKTKVFEQSKFGVGTEKKEAA

SEQ ID NO: 61598 - protein, 410 aa, Thiomicrorhabdus sp.
MKKMIRKAFKFRLNTTSEQSQKMIEFAGANRFVWNKALAMNLFRLEQKQPLLWYNELAFWLKLWKSSEDYGFLKTVHSQPLQQTLKNLEKAFKDGFDKKQSLKRVPRFKKKRASDSFRYPQGFKLEQESNKVFFPKIGWVKYRNSRQVIGDVKNMTISRKGKHWYVSIQTEYEAEIQHHKSTSMVGIDMGITRFATLSDGSYIEPLNSFRKLSKKLAFEQRKLSKKVRFSANWKKQKQIITRLHERIANARLDFLHKTSTEISKNHAMIVVEDLKVRNMSKSSKGNIEQPGKNVKAKSGLNKSILDQGWGMFVSFLEYKQAWSGGDVMRVNPQYTSQICPSCHHVSRDNRKSQSAFACTECGFKANADLVGALNVLERGHRLLACGVETLVSSVKQEPVGSSNTSLLLTA

SEQ ID NO: 61599 - protein, 390 aa, unknown
  TnpB Polypeptide
MSIKAYRYRFYPTREQEKILAHTFGCVRYVWNRALAYRQATYVYTGKGANYGETSKAMTGWRAQHDWLSRAASVPLQQALRQLNAAYTNFFKALAKFPRFKSKRDSQGLTYTRSGFRWDADSQTLTVAKLGALKIRWSRRFTADPSTVTITKNRAGQYHVSIRIDEPNRELPAADGEVGIDLGITTHATLSTGEKVDNQRFTKRFASKLRRAQKSLSRKKKGSNRWQRAKLKVARIQQHNADSRRDWMHKTTTRLVSENQTLVVEDLNIQGMLKNRRLAKHVADCAWFEFVRQLEYKCEWYGREFVQIDRWEPTSKTCSNCGHVVELTLSDRTWACDSCGEHHDRDVNAAKNILAAGHAVKAQGETVRRPSRKSRRTVNQPKASLGIPRL

SEQ ID NO: 61600 - protein, 296 aa, unknown
  TnpB Polypeptide
VIAAYSADRVSSIRAQQPNPTSLEGIDAGVTEVFTDTSGRRYSARQYEMVAVRAERDNARGKARNKLRTLRDYHLARAAAAAHAGDEAAARTARTKAARIERHNLGHKKLSRQRVYGRAVTKDAVYQAVHDLVDTTFHVVAEDLSGLRGKSKFGRTASRVYAAWQRSFLADALASVPSRRGSAVTLVNPAYTSQQVHPCGHLGVRRGKNVYCQTAGCPQQGIVFDTEINAARVIRDRATDPQISRHTPRHEVKRILTERAGTVENCPTTTQATTKFGGGCERNNPFPSEHLHKRDE

SEQ ID NO: 61601 - protein, 259 aa, unknown
  TnpB Polypeptide
MFKTNIKDKLMQIRFIPKGADYILEIVYEIYIPEIKQHNQKIAGIDIGINNLATVSNNIGLRSFIVNGKPLKSINQYYNKKKAKLQSELKIKHNKNWSNRLDKLTNKRNNKINNYIHKSSKYIVDWCIENNINTLIVGKNKNWKQESSMSKKVNQNFIQIPYQMFINQLEYKCQNKAINFILTEESYTSGTSFLDEEKPTKEYYDKSRRKYRGLFISNKGIKINADLNGSYQIIKKVSPNAFSNGVEGVCLHPVRVNII

SEQ ID NO: 61602 - protein, 430 aa, unknown
  TnpB Polypeptide
VKINRAYKVELDPNNRQRTAFLRAAGCARWAYNWGLRKKLDAYAARTAALAAGVLKAEAPKVPSAIDLHKELNLLKKVPQVEGGVPWMYESSKSAPQEALRNLDKAFDGFFRRCKAKTKGPKGFPRFKSKKKGIGGFRLAASATQTHAVLPRIGKVKLKERGYLPTKTSPGVRVLGAAVSEQAGHWFVSLQVEQEAPEPPDRPRIPVLGVDVGIKMLATCSDGTVFENPKALKAGTARLRLYQKSVSRKVKGSNNRRKAKAKVARQHYRISCIRKDAIHKASDSITKNASVVVLEDLNVAGMMKNRCLAKAVADSSLSELHRQIRYKAAWRGVKVLTADRWFPSSKMCSSCGNVKKALTLSDREYFCESCGVIEDRDLNAAINLRNLAVSSTVAACGEASSGEDRKIDVKLASVKQESNTEQGLSLFGSV

SEQ ID NO: 61603 - protein, 437 aa, Halonotius sp.
MLEIHRTHQANVRNHPQVEDSLDRHGWSASKLWNVANYYSREVWEETGEIPDHEELKDELKSHPTYKGLHSQSSQRVLEELAEAFNSWYSSDDDRDNPPSYRKENYYDDQGRRVHEEHPRSTVTWKQNGIKHDTKHNRVRLSKGANHKEHPKAWEYILVEYETRPGVEADNLQQVRAVYDQQKERWEVHLVCKDKIETPDAPGTETAGIDLGISNFAAVAYSTEDADLYPGNRLKQDSYYFPKEIATCDNSSGERATRLHHKWSERRTHFLHSLAKHIVKRCVEKGVGQINVGDLEGVREDQNGKSKNWGKHGNLDLHGWAFNRFIKILTYKAKVEGIEVVEVDERDTSKTCCVCGRIDEDQRVERGLYVCEKCDDAFNADVNGAENIRLDLNQSNSESAPDLGGDRSTGWLAQPAVYLHDLSHGFSPREQVVDCKP

SEQ ID NO: 61604 - protein, 411 aa, Halonotius sp.
MKYNYKYRLDPPEALTETLLYHVDTCRQLYNHVLYKLNESDEIPARYKIQGTLPDLKSWWDELGNVHSKVLQMVVKRVYDNLSTLKAQKENGRAVGMLKWKPPREYRSLTYNQSGFKLKNTGGRPVLWLSKIGGIPIHLHRDIPENATIKQVTVKQEPTGEWFATFGIDIDEDTPKKPENPERCVGIDVGILKYVHDTDGSAVESPDLSAERERLERAQRNLSRKEHGSANWEQQRQVVAQHHADLKRKRRDFLHKLSNYYATEYDLVAVEDLDAKGLVELPGNSRNRASAAWGRFKQMLTYKCEREGTHFVAVDPADTTKECASCGVKTEKPLWVREHSCPACGFEADRDANAAINILSRGLSELQIGVGHSEETPVETALPVDTPVSAKRVIEAGSPTLKERTASAVSE

SEQ ID NO: 61605 - protein, 332 aa, Halonotius sp.
MTLVLRSARPVALGQTKKDSGDCPESISLDRHGWRWFFALPHHNLCNLHTNGLWLAWACGPVATERLGDNDGGVSPPYCATRSLCSLRCSLRKGTYRLKTVKERDEPQGEAEGRTVLGVDRNVDGYLAVTSSGAFIGNADLFNHKRREYERRRGKLQQQGTRSAHLTIQSIGSRFANWSDDYLHNVSKQVVAEAVANDCDTIVLEDLAGIRERIGDLSKFQQWAFSELARQITYKAKAEGITVEMVNPAYTSRQCSHTECGFTHKQNRDGDEFVCQKCGKELHSDYNAARNIAARYLQNRRKSGAGGATNHLALKSGTMNGSGDFTPTASRG

SEQ ID NO: 61606 - protein, 410 aa, Halonotius sp.
MHYNYKYQLDPSEDIVETLLHHVDTCRQLYNHVLYKINETDDIPARYKIQDTLPDLKEWWNDLNGVHSKVLQMVVKRVYDNLSTLKAQKENGRAVGMLNWKPPREYRSLTYNQSGFKLKNTSGRPVLWLSKIGEIPVNLHRDIPENATIKQVTVKEEPTGEWYATFGIDVDEAPPEKPANPEECVGIDVGILKYVHDTDGTAVESLDLSDERDRLERSQRDLSQKEHGSANWEKQRQDVAERHAELKNKRRDYLHKLSAYYAREYDLVAVEDLDAKGLVELPGNSRKRASAAWGTFKRMLEYKCEREGTHFVAVGSRGTTKECASCGVSTEKPLWVRKHSCPACGFEADRDANAAWNILSRGLSKLGVGHSESTPVETVLPTDTDSVSAKRVVEAGSPILKERTASAVSE

SEQ ID NO: 61607 - protein, 494 aa, unknown
  TnpB Polypeptide
VDDQLDLASVPGEDRPDRRSVPDVRVHMAVARSQGTLQEPTLPGGRRLLAEEDEPHVVVDADHVHAEVGEVAGGRGADQAGGPGDDDHTHKRIGREPSRSRDGERPSLHLFCSAQYRNISYMKTTVTLRIRMDLAPDSASKLDATRAAYVRALNLTSSVAFDREITSGVTLHHATYRDIRAATGLPANLVCSARAVVAEAYTRDATRKHRFRDHSAMRYDARTLRFDLNKGFATLSTLTGRVRASLVLRDYHRRYLDGSWAFVKGATVKRSGKAWMLHLTCQRDTPESDKPGVLGVDAGIKRVATTSGGKVHKGGSISQIRRRKFRQRRELQRKTAGHKKTRGQRRLLKRLAGSEHRAVEWRLWNVANDIVREAVARECGVIAVEDLKGIRGRIRAAKKQRLIQQGWPFASLQAKLAHVASRHGIRVESVDARNTSRTCRCGHIDKANRATQSDFRCVQCSHSLNADINAAHNIARRYVSEPCPDVNQGLLPAG

SEQ ID NO: 61608 - protein, 380 aa, unknown
  TnpB Polypeptide
MRTFEYRLYPNREQSSLLMQCLIESRMLYNQMLEMVKTQYAEQETFPSKYDLESAFKGQGEHVPATTVQMLADRLSKSLKRFLAAKKLGIPDVGFPRFKKPNRWHSLQLRQYGKDCYLHEDKKHLIVPKKVGHFLKIKLHRPIEGKPKTVHLVHRADGHWYALIVCETEPHTEHLPSGCTHPDIGIDVGLKSFLTDSEGNTVENPRYYRMSQRTLRRKQRTICRRKKGGQRRRKAARSTAQTHLKINRQRRDHHFKVAKQYAESYHHIAVEDLQITNMVQNHHLSKSILDAGWGQFLAILSNKAESAGHQMIRVNPRFTSQKCSHCGEIVQKSLSVRTHICPFCGYVADRDVNAAKNILKRARPGHGHQELTYTDGCPVS

SEQ ID NO: 61609 - protein, 371 aa, unknown
  TnpB Polypeptide
MMQVAHKIELKPNNKQKTYFTKACGTARFVYNWGLAEWNRRYEESLQLPDECREKISGMSLKKVFNAIKREQFPWTAEVTKYAAQQPFLDLQEAYGRFFKRQGGRPKFKKKGKSHESFYVGGDQLRIRAKKIHVPNLGLVRLKENPRFEGKINSAVFSKTAEKWFVSIQFEVKEDKREMPLKDRSVGVDIGLESMAVTSDGHRFESPMPLKKYLRRLARQQRVLSKKLMAAKVDGRKIFESKNFQKQRMKSAKTHYKVSCIRKDTLHKLTSFLANNYTGIAIEDLNVKGMVKNHNLARAIQDVSFGEFRRQLTYKTLWRGTNLVVVDRFFPSSKTCSQCREVKDAMPLTARMFECECGFKANRDYNASSNQ

SEQ ID NO: 61610 - protein, 371 aa, unknown; identical to SEQ ID NO: 61609
  TnpB Polypeptide

SEQ ID NO: 61611 - protein, 393 aa, unknown
  TnpB Polypeptide
MMLVAMRIRLKPDKEQEALFWKSAGVARWSYNYFLSESERHYSEYLEGKQSTKTIKETEVRKHINNVLKKTSHPWLGEVGSNVMKQAVKDADAARKRWFDGVAGRPRFKSRRRSKISFYVNYESLKRTRNGFRGERIGNVKTCQPLPELKDSQKYSNPRISYDGRNWFLSVGYEEVFEEAILTGVSLGIDVGIRELAVCSDGARKRNINKSNRVKQLEKKLRRCQRKLSRKIEANIGKRDKNGKPTYKAPMEDMKNIQKQNQIIRKLHKAISDIRTNHLHQSSSEIVKTKPSRIVMETLNVKGMMKNRHLSKAIASQGLYEFKRQMKYKCKKYEIEFVEADKWYPSSKKCSCCGQIKSDLKLKDRLYVCSCGLRIDRDLNASINLANYQIQRV

SEQ ID NO: 61612 - protein, 438 aa, Halorubrum sp.
MSVVVKRTNTFAVRPLSTEDEQLLRDLLDASASLWNELTYERRQNFFDGESVWDTADYRKRYVGVLGSATAQQVIRKNSEAWRSFFAAQEDGEDTGTPGYWGNEDNGRELRTYIRNDQYTLETGERSRLEIPVGRDLKNEYGLGDHERLRLEVAGDPKWEGKQGRLELCYDEMDNTFRAFQPVTVPDSRQDSPLAEESAALDVGANNLVACTATTGQQYLYEGRDLFARFRETTEEIARLKSKLREGRYSSRRIRRLYRKRTRRRDHAQDALARDLMRQLYDEGVATVYVGDLTDVLSEHWSAEVNEKTHLFWAYRSFIHRLATTAEEYGITVEVESEAYTTAECPVCGERETTSRAGDVFRCLCGYEGHADLDASRTFLERQAGKNIEAGSMARPVRLKWDDHNWSEIPHSLERESPNEERTNRSTGDGKLASVDTA

SEQ ID NO: 61613 - protein, 498 aa, Caldilineaceae sp.
MATSAAKPKSKTTEVRCERYRIRFDRRAQAALCAQIAGACRLVWNLLLADCERRYRLHKEYGKGAAIEGAVPVDKSVSFFTLGKRFTDLRSRPDAAWVRAFLGSPWGRRYRAMDLSWLGDLPYAPLRYTAKYLANAYTRFHAAWDVAAAQGKTLGVRKSDGKPKGFPKYKRKFDRDDGFTIPSDVRMDGDRLHIPKVGWVRLEGSGWYRGCKPKQVRIRKEGTEEHPKWYAYVFHEVPVDRLKPPAWTGAVGVDRNVGQATDSEGEVYEVPDDPKLDANIKRKQRSAAKARARSKANGQPMSNRGRRICGQLKKLQRKQKRRRENAAHQHSRKMADRAHTVVMEDLNTKARTRSAKGTVAEPGKHVKQKSGLNRGILKSNWGRTERMLDYKAGQVLKVPPAYTSQTCAACGHVGKENRKTQAHFRCTACGHTANADRNAAQNILARGLALCPTARGTGASARREALGPCPLPLAMDKSTSVTREQGRPAALGPPGSGA

SEQ ID NO: 61614 - protein, 401 aa, Halorubrum sp.
VTELTKTLELKLVDPNAHKRRKLRKTREAYQQALHDAFDARCTTQTEANDIVVDYDLSGYAKNALKQYVPQLTTTYNASELHDDHPVRFTNEGLRLDHKPENAIEWYVKIPHHEDYHLWMPTQPTPEQRNWLEALNAGDAEMGESRLFERNETWYLHVTATRSVAERSEVSVDERTPIGVDIGEASLVTVCHRDDNGSPTVPKLWADEGKTVRRLRKTYFTATRRLQTRESERIAGSFGDDLWNQIDDIFHTVTREVVEYAESVENPVLVLEDLTDIRESMDYDEYMNRRLHGWGFAKLHAQIRYKAIEKGIPVETVNPHNTSKECHACGDVGSRPRQATFTCTNDDCWINEYQADVNGAINIADRYLSGESQPREHTDGNDSAEDGGRLTAPQDTQADAT

SEQ ID NO: 61615 - protein, 439 aa, unknown
  TnpB Polypeptide
VVEETFKYAATPEDVETATAAWTDIQTCREVYNHTLTQEYRPRPDYDKPSYTAMQNKLTGPNGWKQRWPEWKDVYSKCLQMAIRRIKQSETVLESLQDRGYDVGRLKWKAPREFRSIVYNQSGFDVDHNTDRVGHAIVNFSKIGDFHLNYHRPLPEDGDITQVILKKEKTGDWSVSIVVDYDPEYPDKPAVEDIDPVDTVGIDLGITKFIHDSDGRSFGSLDEQRDRDRIERRHRDFSRKAYDSNNWEKARQKLAQAYNRLQNRREDYREKLAHEYTDRYDAVFLEDLDVKAMTEDDGNSRNIAAMSWRETIQTFKRHGEKNGCYVIEVPPEGTTKRCSQCGCSTDKPLWVREHSCPSCGFEADRDHNAALEIKRLGVEKLGVQAHTMTVGQGMAESTPVETALPGETEETSDDVSPKRVVETGSPCLKEPPKAASRQG

SEQ ID NO: 61616 - protein, 421 aa, unknown
  TnpB Polypeptide
MRLVYKFNIGRNENILSLCRIGNNLYNQALYVFRETLSKEDKWLSYFELDTIMKNAKNLDGNINYKLLKAQCSQQILKVLDKNIKGYYKSVGDYRKNPCKYKEKPRLPKYRKRGSGFNLYYTNQSCKIKDGRIVLSKELSIDIPQYDKYSGLINNFKQVRIKPLNKGYRIEIVYEVKDAEVLEYKEEKVASIDLGIDNLATLISENFTILFSGKFIKSYNKLFNKTLAKLNSIKDLQKIKGTTKRIKKLYYEREQYIEDVFHKISRKIVNLLIKQGITKLIVGYNKGWKQGVNMGKRNNQKFTQIPFARLISYLEYKCELAGIEIVTHEESYTSKCDSLAFEAISKHDNYLGKRKKRGLFQSSTGKLINADVNGALNIMRKVVGDSCESVRRIIDRGLLFNPVRITNVFCQNAHSETYKEI

SEQ ID NO: 61617 - protein, 394 aa, Pseudanabaena sp.
MEKAFKYRFYPTPEQETLLRRTMGCARLVYNRALAARTEAWYERQERVGYIETSAMLTQWKKQEDLQFLNEVSCVPLQQGLRHLQTAFSNFFAGRAKYPNFKKKHHGGSAEFTKSAFRWKDGKVFLAKSSEPLAIRWSRQLPKGAEPSTITVKLSPSGRWTVSLLVDIEIEPLPKSPNQIGIDLGITSLIALSNGEKVANPKRFAAKRIKLRKAKKALSRKQKGSNNRQKARLKAAKVHQEISDARNDFLHKLTTQLVRENQTIAIEDLAVKNMVKNRKLALAISDASWGELVRQLKYKSDWYGRTLVKIDRWFPSSKRCGHCGHIVDKLPLNIREWDCPKCGTHHDRDVNAANNILAAGLAVKVCGANIRPDRHESKGQLRNPSNGKKQKPKS

SEQ ID NO: 61618 - protein, 433 aa, unknown
  TnpB Polypeptide
MKVKRIVKFNIKKSHIDYQYIKIQLIESKEIYNFANYILRQLYFKNSNKHKYSLSFIEEYPTLKELFLEYIDENKQFTSIFYKIICEFSKLKRYSINSKIVQNIVDKLKNDWTSYWGLLKAKKDKTYNKEINIPTYKKKYNLVEYNNQVMSKKKLKLGYIGTDKMQQGIKIAKKHQELNCKCFRIYEKRDKLVCELIYEKDITKVEKTDKVASIDLGLENLFTIAFNYNKKGISIKGTKLKAVNQYFNKLKASLQSMLPHKQYTSKLINQLMYKREEQLRNYIGYYTNQLIEILKKEKISKLIVGYNKGWKQNINIGKANNQNFVNIPFRKILDILRYKLEENGIECKEQEESYTSKSSYLDNDNIPTYHKGNSQEYLFSGKRITRNLYQSKQGKIINADLNGALNILKKSGEKLIEELDYLQFNHIFTSKLI

SEQ ID NO: 61619 - protein, 383 aa, unknown
  TnpB Polypeptide
LGAARWLWNTALAIRCEAYRECRLTLTGIDISRWLTQWKRTPGHEWLKLVPATCLTQRLRDQDAAFRNFFARRARYPRFKRTSMSGSLRFQDVGAQWGRGFLCLPKLGVLKLAEALPQVERPDLVTLSRDSAGRYHVSFRAEVEVTLLPITHRVVGVDLGLKDLAALSTGEKIPNPKRYHARLRYLRQQQRCFARRDKGSRRREKQRLRVARAHARVRQERQFTLHALTTRLVREFDLICIEDLNVKGLARGLHARAFQDVAFGELRRQLAYKSDWYGKIFIEVNRWYPSSRTCSACQYTLDELRLDKRQWECPKCGTLHDRDVNAARNLLAEGLRQLAGRDDRDLRVDAGDACPEEILVQVLAEEARSGQRNRTCMELARFG

SEQ ID NO: 61620 - protein, 332 aa, Acidithrix sp.
LRDLDRAFQNWWGRPDHFKRPTWRKAEINEGFAIRDLSVKRLNRKWGEVLVPKCGWVKFRVSRKWLDIENSTSARVTKDRSGRWFVSFTAPASQMDRVSTGSSIGIDMGISSTVTLSNGEQMQMPELLTKGQLQRKRRLQRKLARQSKGSNRRKATKLAIAKLSAREVDRRKDWIEKTTTKLTHDYDTIVIEDLKIKNMTKSAKGTIANPGKNVAAKSGLNRSILEQGWGIFRKRLNDKATNAQVPVKVTSINPAYTSQRCSVCGHTMRKNRKSQAVFSCQSCGHIDNADVNAAKNIIAAGLAVTGRRGILQAKSVSTKQSNPMKRQPLIPA

SEQ ID NO: 61621 - protein, 378 aa, Enterococcus sp.
MLPHKAYKFRIYPNQEQKILIVKTIGCSRFVYNYFLNLWNHEYTTTGKGLSYHSCSAMLPQMKKNVETIWLKEVDSIAIQSSLKNLSDSFSRFFKKQNKRPRFKSKKNPIQSYTTKNVNNSIEIINNFVKLPKLGLVKFAKSQEPKGRILHATIRKNPSGKFFVSILCEEEVYKLPQMNAAIGIDLGITNFAILSDGQKMDNHRFTSKMEKKLKREQRKLSRRALLANQKGKNIFEAKNYQKQKVARLHEKVMNQRTDFLNKLSTDIIKNHDIICIEDLNTKGMLRNHKLAKSISDVSWSSFVSKLQYKADWYGREIIKVDRWFPSSQICSKCGHKDGKKSLEIREWTCPICHTHHDRDINASIRDFSHERFNYMAFL

SEQ ID NO: 61622 - protein, 272 aa, unknown
  TnpB Polypeptide
VAVTTSEALWRGGEPELHVNIRNIERTVRDKKDSRTVIGVDVNEDNVALTALSEDGVEDTLVIDFPEIKFERHRYFTMRKRVQNAEKSSMHDTLEGREERFVRDRLHKVSRHIVEWSQQFEKPCIVFEDLKEMRDSIDYGTRMNRRLHHLPFRALQFYTSYKAAFVGIPSDSIDPYKTSQQCPLCGHAERANRRKKRFKCKECGHQDHSDRGASVNIAVKGVKKLDWNVPALNNLPTVRKVRRQASGAVDAPTVTRNTVRGYQTDGVAGVSD

SEQ ID NO: 61623 - protein, 512 aa, unknown
  TnpB Polypeptide
MQIPRRLVPEIQALRVGQAGGCSTESSHPRDGGGSPMRSHRTGSDARSCPPPRGGRSAVRYPSVGSRTQRQKLARATERVSVAGYALAHLVDQLVFRFHCRRLAARRRQAVHREPEAERAMTHRKVYRFRMKPNATQREALARMAGARRYVWNWALAQRQAYYRETGKSIPAAELSTRLTALKQQPETAWLLQVDSQAMQQTLADLQRAYANFFKKRARFPRFKSRKRDQSRFRIPQRVRVAGGKVYVPKVGSVGIRQSQPMDGATKSATFKRDVTGNWDVTLVTEFAMPDTALVAANPCGVIGIDLGLKDFAVLSSGERVPAPQFFRKAERKLRKAQRVFSRRRKGSARRLRAKHKVALVQRKTANQRKDFLHKLTTGLVVKYEGICIEDLSVKGLVRTKLAKSMTDASLGEFRRQLEYKTIWNRRHLAVIDRWYPSSKTCHVCGEVNAALTLADRSWICVCGVCHDRDLNAALNIRTEGLKLLAVGYPDRLNAHGAVVRPPQLEAVGVEL

SEQ ID NO: 61624 - protein, 452 aa, Okeania sp.
MVEKAYKFRFYPTPEQESLLRRTLGCVRLIYNKALAARTQAWYEQKQRVSYKQTSAMLTNWKKQKDLDFLTQVSSVPLQQGLRHLQTAFTNFFSGRAKYPKFKKKRNGGSAEFTKSAFKWKDGQVYLAKCAEPLPIRWSRQLPPGCVPSTITAKLDPSGRWSVSLRVDDSRDLRLKPTNKQMGIDLGITSLLTTSDGEKVANPKNLQKLHKKLRLTQKSLSRKTKGSNNYQKARLKVAKIHAKIKDSRLDYTHKLTYVANPTAPLRLIRENQTIVVEDLAVNNMVKKRCDPATTPVARERAPRDHKLARAISDANWSELVRQLEYKAQWYGRKLIKIDRYFPSSKRCSNCGYILEKLPLRVRQWDCPECGSHHDRDINAAINILAAGLAVSACGATVRPEGSKSRKASAMKQETPNSDARESPRCLVEQRREDVKKHDSGSILYHVRLNSDK

SEQ ID NO: 61625 - protein, 382 aa, unknown
  TnpB Polypeptide
MRVYKFQLKLSKAQEVKLERTLDLCRGMYNKLLNELNEQEVIDKSHIQGVIPDIKICEPKYKEVYSKTLQYECYRLFSNLKGLSKSKAKGNIVGRLRFKGKKWFKTIVYNQSGFKLIDTNKHYNKLKLSKIGEIKIRQHREVEGKIKGIIIKRKVDTWEAHIVTDADYEIGSGNDEVGIDMGVLTFITTSKYETFSNPLFMNKSLEKLQSLHKRISKSKKGSNNRKKICGQLQKVWEQIDNQKKDYFHKISTHLVNNSKFIAVEKLDIKSMTKNVKGDYYNHRNILDSSWRMFLQMLKFKAENAGIEYVEVEPKNTTKMCSKCGKLKNMPLNVRRYECGCGLELDRDYNASINILAKGKGFAFVGENELSFLMKQEATPFMV

SEQ ID NO: 61626 - protein, 378 aa, Micromonospora sp.
MGGVVKRAFRYRFYPSAEQAGQLNRTFGCVRLVYNRALEARTRAWVVDRQRTTYVQSSAWLTEWKRTQELAFLNEVSSVPLQQTLRHLQAGFAAFWDKRSRYPRFKSKRKSRASAEFTCSAFRWRDGQLTLAKMDAPLNIVWSRPLPEGAEPSTVTVSRDAAGRWLVSLLVEDPTVKPLPPVAAEVGVDAGITSLITLSHPLAGVSDEHGKVANPRYGQADRRKLAKAQRDLARKQDGSANRAKARMKVARIHARIADRRRDHLHKLTTRLVRENQTVVIEDLSVRTMLRNRRLARVISDASWSQFRSMLEYKAQWYGREVIPVDRWYPSSKTCSVCGRINTTLALNVRAWTCPDCGAEHDRDINAAKNILAAGLAER

SEQ ID NO: 61627 - protein, 393 aa, Mycobacterium sp.
MRRAYVFRLRPTARQHVALAACVDAHRELYNAALQERRNAWSHSKTRVSYGDQSGQLKEIRALRPDHAVWSFSSQQATLRRLNKAFEGFFRRVKAGQKAGYPRFKGQTRFDSVEWPKDGDGARWITNRKRVYLQGVGQVQVSVHRQVHGRVKTIQVKRQGRRWMLVLSCDDVPTNPLPATGNQAGIDVGVITYPTCSDGTEVANPRWARAAAAELQAAQHRLQTAKRGSNTRVLRRETVAARHRKIANRRKDFHHKQARALVARYDLLVVEDLAIANMVRRPKTKPDLDNPGQFLPNGARAKSGLNRSISDAGWSQFVSMLRAKAEDAGRIWIEVNPRHTSDGCECCGHAAPENRVSQAEFVCQRCSHSAPADEHAARNILRAGLALHAAPAA

SEQ ID NO: 61628 - protein, 410 aa, unknown
  TnpB Polypeptide
  misc_feature (219)..(219): Xaa can be any naturally occurring amino acid
  misc_feature (226)..(226): Xaa can be any naturally occurring amino acid
MSNLTYNIRLITQSQEDHNLLLSTLIEHQKIWNHISKDVFSHKQIDKKIMYDRNYHQCRKLFPDAPSQVIIRAKDSVYATYKIHKTSKTLDKLKEPCEQTNLSIRLDKRLYTFLDNNQIKLTTTGKRIICSYQPYPKFSELFSKYSVCDPLIFMRDNKFWLSVSFEVPEPTHVENSYIGVDLGIRRFAVTSEGLALSDKDFLKQKRQLRFLKRVLQSLXTKKRSHXGRKKLRKLKRKERNKNKNLCHHLANKLLETDSNTIVLEDLHSLKKTKLKKDNYKSSKSSKNRLSQVPFGMLKDILTYKAPLLGKRIKTVNPAYTSQNDSRGLKRGERKGCRYYASDKVMFDADWNAAINIALKYVQTKEAHGTKHPISFGLPLRGRLNLMGRLLSTNQSSYSFSGQTQPSLAVG

SEQ ID NO: 61629 - protein, 399 aa, Thermodesulfobacteria sp.
MKLQFKLKIFPNKNKRMILENFCNIWKNLVNSYIDLYWKLPDWELKSKYPPKEFFLGNNKFEWYACLKAWQIVKATIKMKRKTKPFFKKNEFDFYDNLFSFCNFVTKEFDLWLKVYSGIPFRRILIPCKKYRRLNYWLNKRATFSKAIKFKKINGNWYVIVYLNYKPKERKQNTKIVGFDIDYRNGVADSIGKIWFNKEFENLRKRTKWRSYKNGINPLRQLFNRIAKEIINIYQCNFAFEKLNFKGKKGRSKKFRRDYKNVPYNHLIKRIETLTKLEGFQTVRVSSVYTSQTCPICGYISKENRSGDNFKCKKCSFEYHADVVAATNIAIRAGLRYGYQPVVAQAVAEEWRRQGIQPPVECLAVSTPLQSRQGVGLCTLNLSCFKDKTVPRRIPDFLS

SEQ ID NO: 61630 - protein, 364 aa, unknown
  TnpB Polypeptide
MEKAFKFRIYPNKTQQKQLAQTFGNCRFVYNYYLAKKIKLYENKKEKLTYNQCCSDLTMLKKELDWLKVSDKFALQNALKDLDRAYQNFFDKRAGYPKYKSKKTHRYSYRTSYTNNNIEVLYSHIKLPKLGCVKFRDKIKIEGRILNATISQEPSGKYYCSICCTDVETEKLPKTNKNVGIDLGIKEFATTSDGVKIQNPKYLSKSLEKLAKLQKGLSRKTRGGSNWNKARIKVAKAYEKVSNQRKDFLQKLSTEIIRNNDVICIEDLQVSNMIKNHKLAQSIADVSWSEFTRMLMYKADWYGKEVVEIDKFYPSSQICNCCNYKNGEIKDLSIRQWECPIYHTKHDRDINAAINILNEGLKIV

SEQ ID NO: 61631 - protein, 346 aa, unknown
  TnpB Polypeptide
MSNGTSNPRVIRNYKFRIYPNKEQERKLLRWLETCRRIYNEALAQRKEAWEQEKCSVTRLEQQIWLREAKKENEFFKEVHSQVAQEVLFRVERALDGFFRRVKNGETPGYPRFKGKGRYKSLTFTQFGDRLGASFQNGKLKLSKVGLVKIELHRDIPGTVKTVTIQRDSCGRWHAVLSVEVELSIITAHSGPALSLDVGLEKFATLSDGCTIENPRYFRRTENRLKHAQRALSRKQKGSRNRRKTRLKVAKLHVKIRSQRHDFLHKASCRLVNTYSLIAVEDLTVKNMVKNHHLAKNIFDAGWSEFLAMLCYKAEEAGSRVVVELTRLGYDEAGNPRIRLAQEAPS

SEQ ID NO: 61632 - protein, 390 aa, unknown
  TnpB Polypeptide
MPAFRVDKGQIQSYDAIVKLTLQLQLLPSADQKRMLLATMEQFNAAASHAARVGFDAQRFSQPSIHALCYRELRQRFGLSSQMAVRAIGKAVECFQRDKKHCPRFRPYGAMTYDQRLMSFKGMDKASLLTLEGRQIVPLIYGEYQKARFDRIKGQCDLIFRGGKFYLLASIDLPDKAPIEVKEFLGVDLGVEKIIATSDGTSVSGQHVEAVRQKYHAVRRSLGRKMHQRHKRRTRKNARRAMKRIGNKEGRFRRHQNHVISKQLVTQAKDTARGIALEDLKGIRERTRFRKGQRAKMGGWAFAQLRQFVTYKGQLFGVPVVTVDPRNTSRTCSRCGHSEKNNRKSQSKFVCLHCGFACNADINAARNIAARAASKPAIEVSEKHQHRLVS

SEQ ID NO: 61633 - protein, 513 aa, unknown
  TnpB Polypeptide
MSHVLGTLARVMRATTFRFALDPTPAQAAMLARHAGASRYAYNQSLRLVLDALAAKEVDPAVVVPWSGFDLINAFNAWKKTEDAGRVFVVAADGTSTKRVTGLAWRHEVAAQVFEEAAVDLGRALAAYSQSRSGSRKGQRMGFPRRKRKGRCRDSFRLRNNKGKGGSSRIRIGEDCPRSVALPRIGTVRVHDDTRRLRRLLRPVAQTDPDTGEPVVAPRANVLSATVSRHGARWYVSLNLQAPDFHAKRRHQLRRGDSLPGFVGVDRGLALFAVAATSDGTEVGRWQAPKPLNRRLGRLRRRSRALSRTKPGSRNRAKAARHLSQEHARIANLRRSFLHEISGHLAKTHGRLVVEDLAVANLVRNKHLARAIADAAWAEFGRQLRYKSTWLGAELVICDRWFPSTKTCSRCGIVKHRMGLAERTFDCGQCDLIMDRDRNAAANLAAWAEATSMAAAQAPDRQAGGRTTNAHGAEGGGRHPGDGATGRNEVGTEAQVAWAEDTRAGCCRVISAR

SEQ ID NO: 61634 - protein, 364 aa, Megasphaera sp.
MEKAFKVRIYPNEDQIQLLNQTFGCVRYIYNYFLNRKINLYKENNENLTYNECSKELTQLKKEKKWLANPDKCALQNTLKNLDVAYRNFFNKRTGFPKFKSKKFSKDVYKTNSNLRFENNKIKIPKIGWIRIKGYREISGRILSITISKTKSNKFFASICVTEFKPKQFEKTNQNVGIDLGLKEFAILNTGEKINNLRFFKESQEKLSTMQRKLSKKVFKSNNYFKYKIKVANFQEKIKNQRLDFLHKISIRLVKEYDIICIEALKVENMMKNHNLAKSIQDVSLSEFVRQLEYKAKWYGKIVSKIDTFYPSSQLCSNCGFKNIEVKNLKIREWTCQECGTHHDRDVNAANNILIEGLKVLNSI

SEQ ID NO: 61635 - protein, 278 aa, Moraxella sp.
LANQQPKSKRKSLGWIPFKKSAIKLLKTYQTNKSALKSKLQLSLAKGQKLIITVFDQYDLSKYAINTCEIVQDNRGHWYACVTVKDYPKQSCGTKSVGLDLGCKDSVTASDGNTLTTKFTHKYAQQLAKAQRANKKKQVKAIHAKIKNSRLNAIHQFTSKLVKDNALIVVGKLKSNSFTSTKLAKSVYDAGWFELKRQLEYKCKYAGCLFESVNESFTTQTCSCCGQIDQNSPKGRAGLGIRVWTCSACNTTHDRDVNAAKNILRIGRDTLAVGSPSL

SEQ ID NO: 61636 - protein, 366 aa, Moraxella sp.
MKTLKFRIYDKHKNQLENLASSVNFVWNYVNELGLKYLQRHQKFLSAYDLNEYTTGANTELGLHSQTVQAINETHVKSRKQFKKVKLNWRTNNPKAKRKSLGWIPFKKSAIKLLKTYQTNKSALKSKLQLSLAKGQKLIITVFDQYDLSKYAINTCEIVQDNRGHWYACVTVKDYPKQSCGTKSVGLDLGCKDSVTASDGNTLTTKFTHKYAQQLAKAQRANKKKQVKAIHAKIKNSRLNAIHQFTSKLVKDNALIVVGKLKSNSFTSTKLAKSVYDAGWFELKRQLEYKCKYAGCLYEEVSEKFTTQTCSHCLTVSDSSPKGRAGLGIRVWTCSACNTTHDRDVNAAKNILRIGRDTLAVGSPSL

SEQ ID NO: 61637 - protein, 291 aa, Moraxella sp.
MSIPPLPIFKGRAKFPRFKSKKILERSYQCPQHCTVNFEQGIINLPKIKGIKTVFSREFVGNIKTVTISKTATGKYYASVLVETDILPTPTTIEPNLTVGIDLGIRHLLNLSDGSKFDNPKHLAKASQRLAIQQKIFARKQKQSKNYQKQKLAVARIHEKVRHGRLDIHHKITHSLICENQATSYALEDLAVKNMVKNRRLAKAINDVGWGQFVTLLTYKANWYGKNILKVNRFFASSKICSHCHYKLDSLALSVRNWTCPSCQVHHDRDVNAASNIRKQALADVAGLATV

SEQ ID NO: 61638 - protein, 424 aa, unknown
  TnpB Polypeptide
MILTYKTRLEPNNKQAQKFKEFAGAARYAYNWALTKEKEAYMLGNGFMKEKELRALFTRHKDNMRWLYNISNDVTKQAIRDAVIAFSNFFKKKAEYPQFKTKKKSKPSFYQDVFKFKASQTHIKLEKIAGSLRKNRIVANWVKLSEKGRIPTISKGYLNPRITFDGIHWYVSVGVEVPDKTTEQMNDGIGIDLGIKDLAICSDKNVYRNINKTDRIRRLEKQKRRKQREVSRKYLMNKNGERYVKTKNIVKTELALLKLNHKLTNIRRNYLHQVTNEIINRKPSFIVLEDLNVKSMIKDKHFAKAVQQQNLAEFADILEYKANQNDIKIIYADRFFASSKTCSCCGEIKRNLKLRDRIFKCNQCGSVIDRDYNASLNLYRLGCSTASSAGIYVCGALHQTEVASAKRDAMKQKSNINLSKGLSV

SEQ ID NO: 61639 - protein, 401 aa, unknown
  TnpB Polypeptide
MLVYEAKLRGNQHQYERLNEVIRTGLFVRNSCLRFWEDGQAKSRNDLYKYVTRLAKDSNFPWTKKLNSQARQAMAERTWAAISRFFDNCKKQIPGKKGYPKYKKNRPNHGSVEYKVTGWKLSENRDRITFTDGFKAGEFKLYGSRDLNYYRLEQIKRIRVVRRADGFYAQFCIDYDRTEERQPTGKTVGLDVGISAFYTDSDGNKINNPKYLRKSEKAIQRLQKRVSRKFKKGQPQSSNYKKAKGKLAYKHLKVSRQRKDFAVKTALCVVRSNDLVAYVSEAGRFERTDLKVRNLVKNHKLAKSISDASWTMFRTWLEYFGQVFGTVTVAVPPHYTSQDCSNCGTTVKKSLSTRTHKCGCGTVLDRDENAARNILRLGLRTAGHAGTFQEYWINASGQMSL

SEQ ID NO: 61640 - protein, 410 aa, unknown
  TnpB Polypeptide
VCRSRSPRRCRAGGRAQSLCWRCRTLPLPCWSWIIVTVSPVSGSSARTRPGRCPGVGRWAWNPVTPPVSWSVPRGTGRLAAWSSCGVVGSDAGYARVPVRAGSDAASGGCPVGARGGGAGLPQLGSGAGAGESGAAGGGALLRCRRGRADPVSFCVEVEKRDRVPARPDAVIGVDLGVRTLAVFSDGRPPVGNPRHYDTARRKLVRLSRTVSRRTGPDRRTGRRPSNRWRKANEQRNKVHHRIATLRRDGIHKLTTALAREYGTIVVEDLHVAGMIRNRSLARVVSDAGFGEIRRQLTYKTRWNGGRVEVADRWFPSSKTCSGCRAVKTKLPLRTRTYVCERCGLVLDRDENAALNLAALVKRQVAGSGPETRNGRGADRESGPGPAGGCETSTLHRIPEISGQARTFAQ

SEQ ID NO: 61641 - protein, 374 aa, unknown
  TnpB Polypeptide
MQIISSYGVELRKQNIPIRQTLEIYRSAVSYLIGIYVQVWEGLAEIPDAKRRFNAAEHLVHTTKKNHACFDFDIRFPKMPSYLRRSAIQHALGTVSSYKTRLDLWEKTDGKSGKPKLVYENHAMPVFYRDVMYREGAEGKDEAYLKLYDGHDWKWSCVRLDHTDMEYLRKCWSGKKASAPTLEKRHRKYFLRFSYKEEVTLTKTPVKEQIICSVDLGINTDAVCTIMRADGTVLGRRFIDHPSEKDRMYRTLGRIRRFQREHGSAQTQGRWAYTKRLNTELGKKIAGAIVRYAEENHADVIVFEYLEMQGKISGKKKQKLHLWRKRDIQKCCEHQAHRKGMRVSRICAWNTSRLASPDTRQENDIIVTCQHPII

SEQ ID NO: 61642 - protein, 353 aa, unknown
  TnpB Polypeptide
MFRFLWNKALALEKEAYETEGKRLGYHMLAGKLKDWKKEDDTFFLAEAHSQILQQALKDLDRAYKGFFAKRADFPRFKRKGVHDAFRYPQGFKLDEGNIRILLPKIGWAGYRKGRGTEGTPKQVTVSLSAGKWFISIQTEREVPESVRSSQSAVGIDMGLARFATFSDGSSIRPLHSFCKHEKKLAALQRKLAKRTKFSANWQKLKKRIQRLHRKIADVRNDFLHKLTTSISKNHALVVLEDLKVRNMSRSATGSVDAPGKSVRAKAGLNKSIPDQGWFEFRRQLPCKLAWLGGKPLVVPPRYTSQTCSRCGCVDKNSRPTQAKFKCTACGFECNADHNAALNILAAGQAVSA

SEQ ID NO: 61643 - protein, 372 aa, unknown
  TnpB Polypeptide
MMLVARVKLLPTADQASTLLATLCQCNHACNWMAGEAWEHQVFGQFSLHKLVYRPTRERFGLAAQMAVRAIAKVADAYKLDRSHRCTFRALGAVPYDGRILSWRLADGTISILTLAGRQTMPFVCRARDRDLLAGKRGEADLCRIDGSWYLLVACEVETPPTLAVEAYLGVDMGIVNIATDSDGRTYSGAQVNGLRRRHRKLRQRLQTKRSKSARRLLTKRRRKERRFARDVNHCIAKRIVAEAERTGRGIALEELTGIRDRVRARRSQRATLHAWAFRQLGQYIAYKAALVGVLVTFVDPRNTSRECPACGRIDKANRPVQASFSCIGCGYSGPADTIAAGNIARRAAVNRPHAGGFQPHLQATGWKPVVC

SEQ ID NO: 61644 - protein, 213 aa, Cupriavidus sp.
MTGMLLVYRYRVKSLNGLLNQQSRVVNYVWNFCNDTQKHALKWGKKWPTGFDLNVLTTGGSKELRIHSGIVNAICEQYAKSRSQHRRPYLRYRGRRSLGWVPLKGRDLERSGDAFRFAGNTFRVFNSRPLPEGKIKDGTNFSRDARGNWFLNIVIEVADTQARAPQHGVGIDWREDHESAPPWPTRASPCQSTACAQETTGNEHPRAHRQCET

SEQ ID NO: 61645 - protein, 333 aa, Cupriavidus sp.
MEKTPKELASARTCRIVREGRDRYFAVFTFKGQKKARQRGTRVVYIDPNLKNFGYALDTEGRAFELSNLEKLKESERILDRLTSLRDRCIAKSLWVDTVHGDGTVSTHWRPSRRWKGLDDAVERMQTKVREQKKHFMYSLANQLCRHYDVIGIGNYVPENTNHGKGRKYNRAVRNRTMHGAFKDIVSWVATRSRKHALVLDETGTTRTCHACGHVVEGGIAPAIREWDCPGCGTCHLRDENACQNGLRRLLTQVGDAVDCSHLPCSGPVQTIGRCDWRFHPQGWTGVPRGGANVNSMRLPEYRQRMRALPRARVGDRASKSAKTSPLAMRRLA

SEQ ID NO: 61646 - protein, 387 aa, unknown
  TnpB Polypeptide
MRKLLKSFKTEINPTDEQKVKIRKTIGTCRFIYNFYLAHNKELHESGKKFMSSSQFRVWLNNEFLPSHPECSWIKEAYSKSVTQAVNNGQTAFKNFFNHKSAFPKFKKKGRSDVKMYFVRNNPKDCLCERHRIKIPSLGWVRIKEKGYIPTTKDGYVIKSGHVSIKADRYYVSVLIEIPDHRIASHSSKGIGIDLGLKYFAIVSNGKAYKNINKSAKLKKLEKKLIREQRSLSRKYENLKKGESTQKRNIQKQRLKIQKLHHRIDNIRTDYINKTIAEIVKTKPSYITIEDLNVSGMMKNRHLSKAVASQKFYEFKTKLLAKCKENGIELRIVGRWFPSSKTCHCCKSIKKDLKLSDRIFRCDCGYIEDRDFNAALNLRDATTYEVA

SEQ ID NO: 61647 - protein, 329 aa, unknown
  TnpB Polypeptide
MVKAIKVMLIPNNVQETKMFEYAGASRFAYNWALAREKENYEKGGRFISDSELRKEFTKLRHSDEYAWLLNISNNVTKQAIKDACNAYKNFFKGLKKIPRFKSRKRSMPKFYQDNVKIQFSNTHVKLEGFSSSRKANKQKLNWVRLAEHGRISTDAKYMNPRISFDGLNWWISVCVEFPDCKEILNDDGVGIDLGIKDLAVCSDAVKYKNINKSQKVKKLEKQKRRLQRSISRSYEKNKKGESYCKTNNVIKKEKLLLKRNHRLTNIRKNYLNQTISEIVNRKPRFICIEDLNVSGMMKNRHLSKVVQEQGFFCLENSLNTNAVIKESS

SEQ ID NO: 61648 - protein, 401 aa, unknown
  TnpB Polypeptide
VIIKGYKYRLYPNKIQIQQINQMMGNARFIYNWALDKRIKAYQLDKTKLSAFTLMKDIPKLKYQPEYEWLQLSVAQSLQASIVNMEKAFTRFFKQKKGFPKFKSKHKSKATISFPQNTKVDFENGKMSVSKIGWIKTKFSREFEGEIKTAVISKTPTNKYFISITVELPDKGIKLKPIEEGTAIAIDTGIKTFATLSNGTKIENPKYLKANLQRLKILQRKVSRKVKGSNNRKKAIKKLSLLYEHVTNQRLDFAHKVSTSIAKEYNTVVCENLNIAGMVKNHHLAQSIMDLGLGKFYSFLQYKLEEQGKNYIEIGRFEPSSKMCSCGVINNELKLSDRKWTCKVCGKSHDRDILAAQNILKFGLTKQNLINRVGTIQRASGDVGSNQIDEGRRIDLETLCF

SEQ ID NO: 61649 - protein, 386 aa, unknown
  TnpB Polypeptide
MEQKRAYKYRVYPTDEQKHVLARTFGCARFVYNWALRQKTDAFYQEQQRLSYKDLSEALTRLKQQVEYCWLAEVSSVPLQQALRHLEKAFLNFFEGRAKYPTFKKKRHRQSATYTSNAFKWDGTQLTLSKMTEPLDIHWSRPLPEGAQPSSVTVSKDCADRYFVSFLIEEDIKQLDAVEQSVGADLGLKEFVTLSTGETVGNPKFFHTDEKKLAKAQRRHARKQQGSKNRTKARRKVARIHARIADRRRDFLHQLSTRLIRENQTICVETLAVKNMVKNHRLAKAISDVGWSEFVSLLSYKAAWYGRNLVKIDKWYPSSKRCFDCGHLLDSLPLDMRVWTCPECGVVHDRDLNAAKNIHAVGLTVFEACGEAVRPGRAKARSGKLR

SEQ ID NO: 61650 - protein, 390 aa, unknown
  TnpB Polypeptide
MVGHTIALNPNNKQKTYFSRASGVARFAYNWGLSEWTRQYEEYKNGTLDRAPSQVALRRQLNAIKKSAFPWMGEVTKNAPQMAIIHLGEAFRKFFAGTARYPRYKKKGLHDSFTITNDQFRVQDTHLRVPKLGWVRMREKIRFQGKILSARIFRKAEGWYVSFTIEIQHNPLSPDNKTEKIKKAENQGSVGIDMGIVRFATLSDGSFYLPLDSFRKHEKQLAKAQKALSRKQKFSQNWYKAKKRVSRIHERIANARKDFLHKTSTTISKNHAMVVLENLQVSNMSRSAHGSLENPGKNVAAKSGLNKSILDQGWYEFRRQLEYKLRWRGGCLILVPPQNTSRRCSSCGYTDKGNRPSQALFRCLSCGYEANADENAAQNILAAGKNLVAS

SEQ ID NO: 61651 - protein, 715 aa, Streptomyces sp.
MATAPCTAFGGVVEGSGERVGQQLLHQRVSFLAGLCGDLTRQLVAARWDEESLDVLAAGVDGQGERLPSKGWMALRRLGWAQAAAPAAGVYVSDRVRRAAEEYAARTLRLALHRRTLVAAILATWPADPSGRRSEAEWTALRAALPAGVNKAEIRNRTRQVSAYVRERGRLPAGLCELEGSPEVAGLVVLAAMDRQQVTLQRVDAVTAQLRVKLPLCPAPASGRDWAWHVIDIRLPRTVAADAVLHTPTLRPTRAGRIAVDLPHSRPAPATSASGHRVAVGFDWGVNTLLTGTVGRLSGRGETARVVTDGRPLIFDATTVSAKLHRLRGHREHLAAKRDHYQHLADGLGAPHLAWGYLLDEAAVLEVEHERVCGRIRQLNQALAWSAARWAVDQTAALGATVIYLEDLATLEARGRRRGNARLSGQVRGTVAEAIRHLAAKAGITVVTVPARGTSARCPGCLNRLGHHPAPDRLAERGWAWAHCTRCGLSLDRDHAAARRIVARGLLGQSHTVTERATGTRTIRTTVDGTVRPVRRPKKTTRRLRRARQAFTAPARPRGPKTTPGKGRPTPSRPADTNRRRTPRAAGQPSTATAPALAATVAVAVAVAVKTSRRMPEVRTVPATTPAGVVQRPAGHDTKAPALPGPVPGHGVTAPPRTETPPARRGRLSRGTCRRRTHAAQRTGFHHLHATGVHILNPRFGPHPGDRRPRRARKA

SEQ ID NO: 61652 - protein, 402 aa, Lactobacillus sp.
VIKFNKAEQLMLLTYKVEIKPTEKQAWQIDCHIGGSRWAYNLFLDINRQRYECGYHYMGAYEFGKWFNHEYLEANPHDDWIKTLYAKSVKQAFIDADRAMKRFFKKQSGFPHWRSFKHGQGSYYFVKNSKTQMIACERHRIKLPKLGWVRLKEFGYILTDSDHFVIKQGRIKFKAGRYYLTCLVEQAELPKLELTGEPIGIDLGLKEFAILNDGTLYHIQNKSSRIRRIRKRLRRLQRKMSRQYQALKARRQKEGKSATDLNLAKTQRKVQRLYQRLTNIQLDYQNKIIAAVVRTKPQWVALEDLNVKGMLKNRHLAKAISYQGFYNFRIKLIAKCQQLGIPVHLTNRFEPTSKVCHQCGHKKVDLKLKDRVYECQNCNYTEDQDINAALNIRDTENFELAY

SEQ ID NO: 61653 - protein, 191 aa, unknown
  TnpB Polypeptide
MTCSLATVDGRIELPFTVPPHLVQYAGHKTCSADLCYRQGRYTLHIVVSVPKPSITPSAEVIGVDLGMNRPAVTSSRHFLGEKRWKEQERRTFRLKRKLQAKGTRSAKRHLRRLSGKQFRRRRDHDHVLSRRIVQHTSAGATLVLENLKNIREHSKMGRGKQDSKKRDNKRRLHSWSFAQLYFFGNSYTNW

SEQ ID NO: 61654 - protein, 374 aa, unknown
  TnpB Polypeptide
MQRVISLTLPKRNELVETIQIYNQIANFHISKALEFKTISKRKLHNICYSEIRNKYPEFPSALIQCARDNAVEMLKGNKYNSYTRKRLDSSIRFDLRTFKMLLESGELNLTTIEGRNKYKIKIPGYFMKYKDWLVKGCTLGIDKSNLKLKIIVEGIDFTHNLTSVLGIDLGLKNLAVLSNGTFIKSNYIRKIKRKYAYLRKQLQSKGTRSAKRKLKCLSGRERRFVKDCNHSLSKKIANLCYGITAMENLKNIRKGKKGKIFNRLRSNWSFYQLREFIKYKTEEFGNKLVLVNPKYTSQKCNKCGYIDKANRSKGDFKCLNCNYNSSADLNASRNISHEAQLFCEQVVVNQPNVAILTKVDNNLNQLQIQFTIF

SEQ ID NO: 61655 - protein, 462 aa, unknown
  TnpB Polypeptide
MSQNSERKTKRTITRTVTHIRLIDVNPGKLEALNRVAMAYLLLCQQYITFFCSDQAPNKYADPRFPTELSERWHRVAIQQAAGIAQSWRTNRANAYETYLKEMAEYAEAQASVSQTGADPKLKEPVWKEWNTPTLRVPCIQANVNVVVLEPSEESTFDYWLRISTLDRGSPLRVPVKLASYHRKVTQGRTINTSTTLYRLRGAWWLTLSFDEDVPLQTGPSAPTVGVDVGIANFVTTSTGKRYGSFHGKLRQRHKHDREKRRRKAKLRACLKKKGMHNLPSTSSRSGQRLTRHVRQEINRAINQMLAEHPDARVVYEDLSVASMRFKARSMNSYLYASNLAHIPKQLAWGTTKRGMGAHTVKAAYSSQECHRCHYPDRANRPDQQTFRCLVCGHRDHADHNAAANLARRFGDQDLAACKNKAEVKELLLRRHTVWKKHYGLAVVQPAVQLSLFEASTDVAER

SEQ ID NO: 61656 - protein, 366 aa, unknown
  TnpB Polypeptide
MLLTYKYKLYKTKKTKHIDELIHTACSIYNHCIALHKRYYKLYHKSLHKVRLQKHLTKLKKLEKYKKWKHLGSQAIQQITERIDNAYKKFFKKQGGLPSFKKRIKYKSFTLKGSVGYQLKDNVISLKGYTYKFSKNQKILVDDKIKTLTIKRDNIGDYYICVCLETKDKTHITTGKSVGIDFGLKTFLTLSDHTAIDSPMFYLQSIKELRAKQRNLSLKKKGSNNRAKAKLELAKFHKKISNQRKDYFFKLVNALAKKYDNIFIEDLNLKSMAKIWGRKINDLAFNEFIHILITKTNVVKIDKFYPSSKTCSHCGHIKKDLSLKDRIFDCPNCHTKIDRDYNASLNIYRVGASTLRGESVRPTKVG

SEQ ID NO: 61657 - protein, 402 aa, Escherichia sp.
VERLQAFKFQLRPGGQQEREMRRFAGACRFVFNRALARQNENHEAGNKYIPYGKMASWLVEWKNATETQWLKDSPSQPLQQSLKDLERAYKNFFQNRPAFPRFKKRGQNDAFRYPQGVKLDQENSRIFLPKLGWMRYRNSRQVTGVVKNVTVSQSCGKWYISIQTESEVSTPVHPSASMVGLDAGVAKLATLSDGTVFEPVNSFQKNQKTLARLQRQLSRRVKFSNNWQKQKRKIQRLHSRIANIRRDYLHKVTTTVSKNHAMIVIEDLKVSNMSKSAAGTVSQPGRNVRAKSGLNRSILDQGWYEMRRQLEYKQLWRGGQVLAVPPAYTSQRCACCGHTAKENRLSQSKFRCQVCGYTANADVNGARNILAAGHAVLACGEMVQSGRSLKQEPTEMIQATA

SEQ ID NO: 61658 - protein, 322 aa, unknown
  TnpB Polypeptide
MYEAWKADASQEKPSASKLMNLWTIEKPEWAIKTARSAVTCSLNNLGISFKNFLRHNTKYPKKHKRSQGISFQVDNAHAAIVDNRIRLPNIGYVRLREQPRFQGKITGYTVQKIASHWYVTVAFDCPDVPKEAPESVVGIDVGLQHPAVASDGTVLMLPVEKLQKLEAKKRRAQRALSRSKRNSNARERKRTKLQRIQQKITNIRQDAAHKFTTTVSKNHATVVTEDLDISELQKKAPARSVRRAYNSSLMGTILFQISYKAVHHIKAPKYFPSTKRCSTCGHVKEAMPPNVRTYHCDHCGAHLDRDENAARNLMLQPWVTR

SEQ ID NO: 61659 - protein, 372 aa, unknown
  TnpB Polypeptide
MLKAYKYRIFPNRQQEELIQKTFGCCRFVYNTILSYKINKYEKEKVSLSKFDCTNYCNKVLKKEHEWLKDVDKWALSNSIFNMNSAYQNFFKQHAGYPKYKSKKDSYKSYKTNCVCSPRATIEVSFENNKIKLPKLKWVKAKVHRKFEGKVKSATISQVPSGKYYVSILVETEHEPMESTGCMVGIDLGIKDLLITSDGQKFDNKKLTKKYENKLTKEQRKLSHKVKGSKNWDKQRIKVARIYEKISNTRKDYLHKISHQLVCENQVIVTEDLAVRNMVKNHNLAKAIQDCGWYELTRQLQYKSDWNNRQYIKIGRFTKSSQPCHVCGYINTKTKNLAVREWTCPNCGIVHDRDINAAINILNEGLKLLNVA

SEQ ID NO: 61660 - protein, 408 aa, Haloquadratum sp.
MEVVRNIQIKLDVPEDDHELLDETFEQFRQAAQHVADHGWHDNPYKIIDTKNTLHDETYSDVRDNLSLQSSLVQSARNLAATALGNCKDRIIEDGEKASKPEFKGTVVVYNSRTITYNDDHVSLATTDERVTAEYVTPVTEDGTPFEDYWTGEWERAEATLHKRDGTYYLHVAVKKEVQPESTDEASENGVVLGVDLNVDGYLAVTSTGAFLGNADYLNHKRDEYERRRGSLQQTGTRSAHLSIKSIGSRFARWSANYLHRVSKALVREAVENDCTAIAFENLKHIRKRISNASKFQQWAFKKLQRHVEYKAEEHGIDVDDVSPAYTSQQCSHGECGFTHEDNRDGDEFECLKCGKELHSDYNAARNVGRRLVQHWLKSGAERATSQLALKSGTVNANGHFRPTALRS

SEQ ID NO: 61661 - protein, 380 aa, unknown
  TnpB Polypeptide
MKITKALKMRIYPNKEQALKIDKTIGSCRYIYNHMLARNKKIYARRNEHLSYYDMQNLLPSMKEYLPWLKESDSQALKYACRQLNTAYNHFFKKKSGFPKFHSKRMNRQAYTTTAKTSIAYDSEIRKVKLPFLGWMRCSDNRVLSNPDFKYATVSRQNGKYYVSITYSIEKTVHPVDVSESQALGLDYKSDGLYVDSNGNIAGMPKWFRDSQTKLKKEQRKLKNKVGSQKGETKSHGYLKQFRKVRNLHEHIANQRLDYLQKESTRLADQYDAILIEDLDMKAIANKGFGNGKATLDNGWGMFTTMLDYKMTERGKHLQKIDRWFPSSQTCNICGCVNEDVKNLNIRKWTCPHCGTEHNRDVNAALNIKREGLRLLSEAD

SEQ ID NO: 61662 - protein, 439 aa, unknown
  TnpB Polypeptide
MLMYSTYKVKIKHYNHIFKDTISVYHTAVDYLIRVCLENWDSIISYEKPLEKQRFVETLIHQTKDNPVVTYDFDTQFYKFPSYLRRGAVSEAIGKVSSYKSNLANWEADPQGKAPSIPKAGYIYPTMYRKGMYEQTGTYQVQIKVYVRNTWDWITVNLRKSDIDYINRYCSTRKQCAPTLQKRGKEWFLDFPFEEKVKLCNADVNQQTILAVDLGINTAATISVMSSDGTILGRHFCHLNKEIDHLMHSINRIKKAQQHCNYKTPRLWARTKGINHDISVKTAQFIIDVAVLYNADVIVFEHLDRKGKLRGSKKQKLHIWRSQEVQAITANKAHRLGMRISHICAWGTSKFAYDDSGAVLRGKDADMATYSICKFTNGKIYNCDLSASYNIGARYFIREILKSLDESLRLDIEAKVPRCSKRSTCTLSTLISLNAVLAA

SEQ ID NO: 61663 - protein, 436 aa, unknown
  TnpB Polypeptide
MSKFRKTRRYNLIVSSNTIGLLDQTAALYRNAVAYYLQVFQDRRDILGTGDWLRRAEILTHRTSSNLNPAYDFDARFPFLPSGFRRSAIAEAYGLALAWQSNYRKWQTRKAKAGEKSVRRLAVGKSEINFMERPPVYPDKTVSWPVYYKTEFRILDERHMLLKVFTGNAFAYRKVVLMSPLFVPTGYTAESPMLVRKKHGFELHVPMVQESRCDLQKATVLAQDPSLKICAVDQGINNHAVCTIQNAKGRVLASLFLSGAEDNHLRKLLLEKVARLQRETRIIPEGETFAADLWRKIRNMDDDIAHQVSRRIVNFAKAHGAKVIVFEHLGSFSPAKGTRSRRQNLKFLYWLRGRIFRFAQYKALHEGVVVVRVNPKNTSRQCPYCGCLEITRYTFGRENSTKLARCGSCEIDGINADWLATLNIGQKFQKKHKRPA

SEQ ID NO: 61664 - protein, 373 aa, unknown
  TnpB Polypeptide
MEPKLITKTLRVRVKDKHASVLSQWAFEVNQVWNAANELSANYSWVPVPGVGYMNFGTSEYDLQKELTVIRTERQLSIGAATVQSVIAQHAKSRRQFKKNKLQWRCSSGSKRALGWVPFKAAGIKLVNGQVRFCGEHFGIWDSYDLSKYKLGTGSFSEDARGRWYFNTTVEVEVKPSEGRSSVGIDLGLKAVATCSDGFVMERRRITDEFAVQLAKAQRANKPRRVKAIHAKIKNSRSDAIHKFTTELTEKYGAIFVGDVSSKKLVKTNMAKSVLDAGWGILKEQLRYKASARSVVFDEVNERNTTQMCSCCGEISANSPKGRTGLRIREWVCAGCGTRHDRDVNAAKNILALGHERLAVGIPTLPAQAAAIG

SEQ ID NO: 61665 - protein, 227 aa, Synechococcus sp.
MWMYLKHRFMGIPLALMSGWNMEYFLSTSDGTQVKRPRFFAKLHRKLKLLQRRLKHKQKGSVNCAKLLKKIARVHQRIADTRKDWHFKLAHRICDQADSIFIEDLDFRIIAKGMLGKHTLDAGFGQFTNQILPWVCFKRDKYYAKVNPNGSSQECPDCGGAVRKTLSDRLHHCHACGSTKPRDVAAAQVINSRGQRDRENACGVEVAGDSVTGSSQLAVKQEIFRAI

SEQ ID NO: 61666 - protein, 599 aa, unknown
  TnpB Polypeptide
MGKKKKVDETPKEKSKRKDVQERKEANKNTEFTCVKTTFNSLVENNFLNGGIQEIVLNINKICFLSYQLLNYHFTRLIQEKKPLPEITQNLFYQACSTVSVMKERKEKVDTTHELYISFSHYKDYLGELPFRDRMGNLINNLNKQQLTMTENHLKLNFYKRLHKYLEIKTGETRKSVIYKWLKDIYANEYAGNNYFIKSLREWLKYPPTEYNIKAYSSHFIKIYYKILMIFEKYPNVKHIRTFNLLPTKNSFTLSTVEICSSCLKDIIGYFTKEPVPDFNENKLVYWYEFFKIEKFETKRRKFANTIFTDGKIAVIRLRKPKTVASKPKDIKQIKYEQYVGIDPGVRSLQTSCNDTGRVIETTTPSYRNDCKMKYACRKREMWYKDWEHYEMWRNIPSFKTTNLQKMQYYFKYVYPNLNNIFQFHLYKNFRGLSFRSYCRGKATMHKICKSIVEDKKTLVGFGDFSQKHGLVKKHPTAPIQKFKNELRKYCDVIDVDEWGTSKTCNLCKSPIELYKNRVIRKKKDGTYTKGRISQINSVIRCKLNECKLCCMDRDINASKNILHLLQLQQAGKRRPECFSPKNMNDCDTPLEEDKYIVA

SEQ ID NO: 61667 - protein, 375 aa, unknown
  TnpB Polypeptide
MKIQRAFKTELDLNNRQRTACIRHSDAARFAFNWGLSRKIQAYQAGEKVPTAIDLHRELNALKKSELSWLYKVSKCAPQQALRNLDQAYAHFFRRVKQKRATKNGKVKVGFPHFKSKKHGPVSFKLTGSIHVFDKAIQLPRLGVLRLKERHYLPMQNVHIQSATVREKAGRWFVSLQVEMELPDPKRPERIVAGVDLGINRMAQVSDGTYFENPRALKSRLHKIKRLQRTFSRRQMGSANRAKTLYQLKKAHYRVANIRKNALHQATTTLTQTKSMIMMEDLNVSGMLKNHHLAQAIADVGLYEFRRQMMYKGAWYGCEVRLADRFFPSTKRCSKCGQVKTIIGLGERNYHCEFCGSIIDRDLNAAIDLEALIDL

SEQ ID NO: 61668 - protein, 402 aa, unknown
  TnpB Polypeptide
MEVKRLQAYKFELMPTGQHQKLMRQFSGSRRFVFNKALALSVRYYRRFKKSAGYVNLANQLPKWKRLHLFLAEAPSQVLQQSLMDLDKAYVAFFKGNADFPTFKKKSQGGGFRYPQGCALEQSNSRIKLPKLGWVRYRNSRDIEGLVKNVTLSYKSNKWFMTVQTERSVVQEIHPAMSSIGIDVGITRFATLSDATFITPLNSFKQHQVKLTKYQRRMSRKKKFSKNWIKAKNKVAQVHADIAHARLDFLHKTSNIISKNHAMIFVEDLQISNMSKSSKGTIESPGRKVKQKSGLNRSILDQGWGEFRRQLEYKSNWNGGECMAVTPKNTSRTCPCCKHISGDNRPTQSMFLCVACGYTNHADVVGAINIKRAGHAQLTCEVNDALMSSATRTHRSELILTD

SEQ ID NO: 61669 - protein, 307 aa, unknown
  TnpB Polypeptide
MTVLCCEHQVFNAKAHEAVVGDLRIVPMGNTFVVELTYRSEKQEKDLSKCVSLDSNEALCCDLGLDNFATFVSTKPGVRPFLIKGKVLKCINQNYNKQVSELRSKGHKTHIRTKGVKRYWRLHDLLHKASRMVINFCLAHDLGHIVIGVNKQWKQEVNIGKRNNQNFVMLPHGKFVEMIRYKAQDYAIDVTIREESYTSKASALDFDEIPSFDEKGSNPKPIFYGKRIKRGLYRSAKGLLINADINAATNIGRKELGDEWLKQLLELDGGVLVDTPAVVLNLHAGAASRQWLELGIRSQETLHVSAR

SEQ ID NO: 61670 - protein, 377 aa, unknown
  TnpB Polypeptide
MTGSMKIKECRAVVFRMYPTVVQCQQIDRTIGCARLVYNLMLETRIAHYQTTWGSCRPTPRLYKDDYPFLREVDSMALCNAQLNLEKAYRNFFENPKAGFPKYKSKHRSRRTYTTNYIRNNIRFEKGGTRLRLPKIGDVRIRQHKTIPADWKIKHVTVEHTSSGRYTASVLFEYETQAPEPVTPVNAVGVDYSSHELFVSSDGEHGDYPRFYRKAEQRLAKEQRRLSRMVEGSNNWTWQKQRVARIHEHIRNQRKDYLHKTANRLAARYDTVCVEDLNMRGISMSLKLGKSTMDNGFGILRDMLAYKLAAQGKHMVKVGKWYPSSQLCSECGYRNTDTKNLNVREWVCPECGTYHERDENAATNIRDEGLRILLDRR

SEQ ID NO: 61671 - protein, 421 aa, unknown
  TnpB Polypeptide
MVVSADEYHRRTAITRLSVSADDESLLRETVSAWQRGCQIAVDKAWQQCRSKSDIQSLAYDTIRENTSLASQHAILACHQAAGNIKSCLARKQDGKKASKPTYTSPTVAYDSRTMTLFPDREQVSLTTHGDHARVQADLVLPDDADGYQYQYFNSDQWEPTESTLHYRDGHWYLHLGFRKPKTTEPTTENGTVLGVDLGVNEIAVTSTARFFSADRLNHTRREFERVRGDLQDYGTRNAHRTLEAVSGREDEHVKHVLHSVANGIVAEALRYNCDGIIFEELDDIRNRLPDAAWHSEWAFNRLYEYVTYKADASGLFVATTAPQHTSNRCAECGFVSDVNRPTRDTFECSRCGNRNHADYNAAKNIANAYLRREQQSSRGRGVSQYALKSGVVMPDRGYLPYSDAPVAEPTDKPKPVQANS

SEQ ID NO: 61672 - protein, 453 aa, unknown
  TnpB Polypeptide
MAKWPMKRTNTFTMRPLTDDDEQVLRELLDASAALWNEINYQRLMRYNDENGFEGEDVWDVDTGRLEGTYKDVLGASTAQTVRRANSEAWRGFFKNTKQFHDESNTSVTEHPEPPGFRGNKDDGRVLKGVIRKDAYTVEWGDRSRLEFVIGDDLRDKHNSPKTRLRLEIVGEPNWPKHKDQGRLELWYDETGGTFRASQPVTVSDDAQASPLAEESAALDIGANNLVACTTTTGEQYLYEARELFQRFRSTTQEIAQLQSKLSDGQYSSHRIRRLYRKRTRRCDHAQAALCRDLIEQLYDEGVDTVYIGGLTDVLEAHWSVEANAKTHNFWAFKQFTERLATTAEEYGITVEVRSEAWTSQECPQCGSTDRTTRQQDTLSCGCGFEGHADLTASETFLRRQTEQAVRPMARPVRFQWDDHRWSESSCSHRPNEQRTNRSIRFQTGNLATGESA

SEQ ID NO: 61673 - protein, 441 aa, unknown
  TnpB Polypeptide
MKVKRTGRFKVKVSHPDYEMIRVHTIEAKEIYNYANYITRQIYFKNSKNHKYSLEFIHEYPELKEDFEIYLKENNQFTSIFYRIICKFSRIKEYSLNSKMVQNVVNILKRDWKSYWKLLKLKTEGKYDKKVNIPRYKKKYSVVEYNSQVISKIKLKNRYVGTVGMKEGFKIPNFYMEYSCKSARALWKNDCLYMEIIYEKEVPETKPNEKIASIDMGGKILMAVAYNFNRRGICISANMLRSLNHYYNKAIGDMTSLLPKGIKISNAVRNLWRKREEQVRNLLGYYANRLVEEFASLNVTKLVIGKNIEQKNGIDLHSKLENRNFCLIPFNKLIEILRYKCQENGIECIEQEESYTSKASFLNNDFMPVYGEKNKDYEFSGWRNGRTYKIKGKNQKIHADLNGALNIMRKAGHELIEKVDFLNKNQIFPAGKFKVRNLNYI

SEQ ID NO: 61674 - protein, 243 aa, Borrelia sp.
LALHRKIKSNEVIKNVVVEKDTDDKYYISVAVECLDVKNNDKTKCNNNKKEIVGIDMSMRHFLVSSEGEKINHPKCLLKNERKLKKCQRKLSKKQKGSRNRAKSRLRVAKLHRKISNQRKDFLHKLSYYFVANYKNIVIESLSIKSMQKGMFGKSVNDLGWHEFVRQLSYKSEWCGAYLHKVDRYFPSSKLCNNCGIKNITLKLSDIRWSCRSCNTLHDRDINAALNLKAYYYKEIKTKAGTA

SEQ ID NO: 61675 - protein, 669 aa, unknown
  TnpB Polypeptide
MFVVERIVSRKGQGRNPDPSFQRGVHQTTQLSSIIHSSGRKVRSIDLQTLTLHFDNYVQAVNLVLSKIYKTDARAQSLGKALSEYRGFAYNLLRREKDLCYQHNQDIKDLIYERLHRNVLEQAGRMTLSDWTRRGLITAAVNVLNESIDDALTLLRRKRIPSYLIRKVRDSCDSPKNNGSGYHYAMGILRQVRLALDKHILDTMEVKIGWRARQRKKVASLLKSGSPDCQRVSHIIESKLDDWVKSGYAFTVPQLRSYSLDFSASTENSIGQGYWFTLDEERENEIHLHLKLPPGINGTHHKDSPYKGKTLTFRFLDWLPRAAKQDRRKTQTAREKREVNRAESLIFRAAKFDDMHNQLMNTLKFQHLALKLARLKQRKDSPPKEIIELQKQITDLKGARRSAPPRLLLRGQRVILQIPFLSPNGSVSSTIFEDRKYSTKAGVDRGLRAPVALSVEKEQSFEDLVISVDTLIKNREKLRKHAYNLTSKLTRKKNNWDQKRSGQSYPAPILKHDRHVEALWRKVRRLDREIARQVASRTVWFCEEHRVKKLFFEDLRSFQGHAGSKDFSYNLTSNLWGKIIDTVRYMRESLGHSKYSVWTVSPRYTSQTCHVCGERGKRVEDEKSTTEKRGGEYFYCEKCEGHFHADINAARNIIHVQDSSAVPGRTMST

SEQ ID NO: 61676 - protein, 407 aa, unknown
  TnpB Polypeptide
MKRGHVICLDPTCKQARSLARAAGCSRFTYNWALHEWGRQYRAGLKPTAFKLKKQFNSIKAEQFPWILESPRDANSQPFADLGAAFRNFFASIKGQRKGRKVGYPRPRKRGKDDSFYVANDKFDVRRQGKRGVVRLPVIGFVKMHEAVRYEGKILSGRVYRKADRWYLAIQAEVADVRLPAAHKREVVGVDLGIKTAVMLSDGRPLDAPKPLKDALAKLRRANRRLHRRKKGGANRRKAAMQVARIHEHVANIRKDWMHKVTTMIVRENQTVVIEDLNISGMMKNRRLSRALSDVGLGMFRPMLEYKAPVYGSRVIAADRWFPSTKRCHRCGHVKEVMSLSERTYVCEVCGLICDRDLNSSINLEWYPRLAGNLTPMDTSASTAGPAPAASAVDEVGTNPCSLVSTL

SEQ ID NO: 61677 - protein, 519 aa, unknown
  TnpB Polypeptide
MQRTIRIKLEPRKKKKEEILLTMETYKETVNRFINKFSKYKYLDKLNYKCLYKPENKDIRIASNYSTNALAYAVTLLNNRLKLIRKGCKARIYNHIKDKEERHYLFYLLKQPKYIEAIMLRKKFIVDKEFDVTRSDYLNKYLHRILRHEFKSNNIPELKKPLLRTDVVTARVEKYKNPKQFSHILKLSTINKGKRVVIPFNPNTWAKKFFNKKKGCFIVCLDAQSNINLHIPIEEKPKENNNNKEIAIDKGFRKLIVDSNKQKYGEDWHELEKRIDDKFQKKQKQRNKLYSLRKELHKKYQEIKDKKLYKKIKHLEKYNLGKNKFNKNKIKTRETIKNNVNHTINDFISKNPKLKTIVLEKLDGFDNGKKYSKKSNRLLNQWKRGFLKDKLIFISQLKSLELAYQNRAYTSQECSNCGYVHKDNRQGERFTCIKCGFREDADVNGALNILRRKYDQEISLYTPYKQVKEILLKRYSVGAIKPPRLETLNLNGCESCKQSIQEQNIILVTGGESSLSSQP

SEQ ID NO: 61678 - protein, 386 aa, unknown
  TnpB Polypeptide
MWSNNISSWTKAKKVLYKKFREKYLDIPSHYVHEAIRDASQRIKSFKKLKKEGLAKTEKPVIRRWSVGCDNQLWKLTLEGVRIATHKGWVSIPLQFHKLFWRYFNGGWVLRSSARWKLVEDELYLYIVFVKDMKIKSDSSRRVYGIDINENNVTIYTYPDNKVITIVTNFSRVVLGYAHRRARIQQRWSKVYGIKGNRRLKVSLRKLREMDVKRDIKLKLVKKITEIVRDGIVVLEELPKRFQDKVIERDRRLHELDVHRLKQSSIRGVHKLITEKLTEYGIPYVLVNPSHTSSVCPICNSKLVPMTGCTQRNGWKPRIMKCLRCGFMHDRDVIGAMNLVKKYLLDVGGHAVSLPKGAHEPHVEWLVATMKHGIEAQPVLARPTMT

SEQ ID NO: 61679 - protein, 409 aa, Chitinivibrionales sp.
MQIKKAYRFELRLSQEQRQQCVHFAGCARFVWNKALALKKEAWDNESRNVSRFEIDSLLPTWKEEFPWLKEAPSQSLQQANIDLDQAYKNFFRRVKKGEKPGHPRFKKKGKHDAFRLPQGIKLLNPLNHKTGLVQLPKLGQTKFTMSRPIEGRIKHATISRCAGKWFISFNCDGVEIEDTAPSPTAVGIDRGVAVFAACSDGTRIEAPQPAKRYRRRLAKIQRRLARKKKFSKNWRKERAKLSALGSHMANVRRDALHKASTTLAKNHGSIVLEDLRTRNMTRRAKGSIEVPGKNVAAKSGLNRAILDQGWHAFQTMLVYKANWHGGKVILVAPHHTSQTCSACGNVDVSNRRSQARFVCTCCGHMDNADFNAAKNILAAELAVSACGEAPLGAPAKQEAHKRKAAKAA

SEQ ID NO: 61680 - protein, 369 aa, unknown
  TnpB Polypeptide
MKTYKYPLGKQSNTIRIGNLLDDMWQVHEYFHKWQDQRYKAGLPYANYAAMCQHAKDLKRTTHPHWKSLPSQAIQAELERIDNAYQRFFKKLGGKPHIKPLHKFKSITLKQTGYKLTNNRITLTFRKWAKGKWRFDKVSYAFHKHRQWHGTLSRITIKRDNCGDYWICITTTYTDFKLLPATGKSVGADFGVKDAYLTLSTGDKKQHPQPLKQSLNKLRSLNKDLSRKKKGSNGWWRCVRQLTRLHRKISNQRKDFHWQLASELCKKFDTISIETLNLEGMKRLWGRKVSDLAFYQFVEILKYKCQKHKRRLKQVGQWTATTKPCSDCGFHNETLTLSDRQWTCPDCGSHHDRDINAAINILRAGIAVT

SEQ ID NO: 61681 - protein, 399 aa, unknown
  TnpB Polypeptide
MIVLEFKLTGAASQYATLDEAIRTTQFIRNKCVRKWRDERGVKPYDLNRYCAVLAEEYMFVGKLNSQARQAAAERAGAAITRFYTNCTNCHARTPGTKGYPRFQKDGRSVEYKQTGWKLDAARRALTLTDGFAAGTFRLRGTRDLVGYALDQIKRVRVVKRADGYYSQFCIDADRRVSVEATGRTVGIDLGLSHFYTDSDGVTVENPRYLRRSETALKRLQRRVSSKIKGSKNRAKARQRLSKKHLKVGRQRRDFAVKTARALVMSHDVIAYEDLRVRNMVKNRHLSKSISDAGWRAFLTWLDYLAHVYGKVVVAVPPQYTSQECSSCGERVVKALSERTHVCPRCHTVLDRDHNAARNILALGLRRREETTAGHAESNAWGQSALYPSGATPVDKAAG

SEQ ID NO: 61682 - protein, 379 aa, Proteobacteria sp.
MSIATKILKLPFLRLNRAKADEFSRLQVLNTQTANAILVMPKAQRRLLTTKAFAHVEIGSAWMNQTIRHANARTTVQRFQALPLETGHQNWTLHKVGETYSMAFGLRRGIKKRLPLAVHQASHQQWLDAILEGRASPGTVKLWCSRKGLWYACLAVSMEVPDAEPTGRWMGIDRGQNVPLAAATPDGPVLFWKAKRLRHIRRVYAGRRQQLQAAGKHHAVQKLDRHEGRIITHINHGLSKDVVALAQRCGAGIRLEDLSDIRAHAKQRQTTTNDAGQNRDAWPFFQLEQFIIYKAQLAGVAVEKVPAAYTSKSCHHCGALGTRKKHAFACRRCDYHAHADANAAQNIRDWHGLCCPLVLEAPADGAHGLPPNTVRDSAA

SEQ ID NO: 61683 - protein, 356 aa, Proteobacteria sp.
MIQRQLKLRLTPVQATQLDTWLWHLTGVWNWAIPKIEQDAKLGIFPTQKAFHNLLAGHSTKLGIPSHTLQGLRDTAYSAWQRCWKKLAKKPRLKGQRNRLTSLPFPDPFKRPDKPRIHIPGLGHVRFHAQDLPTGRLKSGRIVKRASGWYLCLFLDAQPQAIPHVADGAIGIDPGFQTLLTCSTGEKVAHPHELRQTAQRLAQAQRGGRRHLTARLHERLANQRQDRNHKLSRRLIAENRVIVWSKDHAKGLARSFGKSVASAAHAQLRGMLAYKCTASGRQSLEVPSRFSTKTCSACGSLSGPTGYAGLSVRQWVCAACGAAHDRDGNAAINTLHAGVGTPHERRREAAPGIPWL

SEQ ID NO: 61684 - protein, 509 aa, Phycisphaerales sp.
MDKQQRTYQSRTVVIPEEDKALSAYASLFSKAERALFARLEAGGDIVGLKRQFLLKFGISARQFNAMAVQLGGKISSIKERRAGLIKEAEQRIARAKKVLKKITNPAKAHHKKRRIETLQSRLARMKADHACGAVHLCFGSKKLFNAQFHLGDNGYADHGEWLSDWRAARSSQFFVLGSKDETAGCQGCVATVAQDSSIMLRLRLPDALSKYGKYLTFTDIRFEYGQEAIVAVIGRNLSDNKEDWQAISYRFLRDDNGWRVFVTVALPEVPVQSYKDIGVIGIDINVEHLALTETDRFGNLLEHFSVACATHGQTAQHRGAIIGDAVKQAMAFVCKRKKPIVIEKLNFQNKKAALEKESPQYARMLCSMAYTQIQTLIRGRAFDAGIEVYEVSPAYTSVIGQYKFADRYGMSRHNAAAFVIGRRSLGFSETLPSQLRNTLSLPVRNREKHVWSLWAVVSRKASAALAARRRSGSARSSPSPVPGQGTACDPSAWTGEIPVCESSQTLFV

SEQ ID NO: 61685 - protein, 576 aa, unknown
  TnpB Polypeptide
MQNTETEPKADLKQFHKVTDRHVLVLEADISEYDKRELLHMSNVIRVAGNELIAVMKKQYEQLLRTKKYRHLQDMYAKAKKSEDKKKVAAITAEMTEMQKSYHVTWEFCRKSMIEINQKYNVNSIFALSKAEDVWQAVEQCLFSDGKTIHFKKYGDYPEIRAKQANRGIIISADDDGIILKIGKTKLRPIINKPKHTKTRRGNTIHVQESHDMFAEFEEEAVLNYISSPKVIDDTALDLYNKKDIVMDTFRPCFASISFKEIRGKMRVYIHITIEGMPKPKYNKNGTRRHQYGKGFIGCDIGPQSIAYTSKEEVGFKNLAERGTSIKTREQKEARILRKMDRSRRAMNPENYNDDGTIRKGKKTWKKSNRYKKLHAQYRNICRIAAENRHFAINEEVNHIRALGNVFITEPQNTKKLQKRSKSTERQDKPSVIQKSDGTTQLVYKYKRKKRHGKSIKNRCPGYFQAQAKAKFERTGGAYIEVPVSYRASQYDHTCNKYIKKTLSQRMYELADGTRVQRDWYSSFLMYCIGTDLQNISRYKCKRYFCELYTKYLKLEQYIIRNKITVMNSGIKFKTV

SEQ ID NO: 61686 - protein, 426 aa, unknown
  TnpB Polypeptide
VASGDYVRRTAITRLAVSSEQAERLEATIDEYRTGANIATDIGWRHHVTEKHELQSLAYDEIRNRTSLGSQHAILACFQAAQAIKGVDERDSQGRAYSKPEFTAPTVKYDANTMALFDDDTVSLATTDDRVRCELVLPDDEEGYQYQYLESDEWELAESTLTARDSDYFLHLGFRKPKPDTERSPAEDRTVLGVDLGIENIAVTSTAHFEGGQELLHEHREFERIRGNLQQTGTESAHRTILQRGNREERYNRDVIHRVSNRLLAQAVAYGCTHIAFEDLTHIRDSMPSKRKFHQWMHAKLVQYVEYKAAEFGIEVEYVDPCNTSKRCCECGHTSDSNRTERAFFECEKCGMTANADYNAAKNIGLRLVRRGLHDSRRTGDSQLALKSGTVKPNRGFVSYTEQEVEVESTDKHHLKRSERASAPSK

SEQ ID NO: 61687 - protein, 262 aa, Burkholderia sp.
MILVYRYRVKSLNGLLNKQSRAVNYVWNFCNDTQKHALKWGKKWPTGFDLNVLTTGSSKELDIHSGTINATCEQYAKSRSQHRRPYLRYRGRKSLGWVPLKGRDLKREGDAFRFAGNTFRVFNSRPLPEGKIKDGTNFARDARGNWFLNIVIEMPDVQARPIRSGVGIDLGLKDFATLSTGEKLPNDQFGRRAAEKLAKAQRARKHKRHIAKLHAKVANARADFQHKLALDLVRRFDYIAVGNVSAAKLARTRMAKSVYDAS

SEQ ID NO: 61688 - protein, 266 aa, Verrucosispora sp.
MVRCFPCSSVTSSACTRHPVSGSSWLGRSGARGWCSTTVSSCASRPARRACRTSRTPSCPSESSRKRLQQALSRKRRGSQNRKKAVVRVARAHARVADTRRDWQHKLSTTITRENQAVYVEDLAVAGLGRTRLAKSVHDAGWASFTAMLEYKAAKYGRAFGRVDRFFPSTRMCSQCGRINDTMTLNVRSWNCPCGTTHDRDVNAAINVLAAGQAESLNDRGAHVRPGHVPAARREAVTHPDTACSTRSVEGISVLQGGEDVKARAS

SEQ ID NO: 61689 - protein, 527 aa, unknown
  TnpB Polypeptide
MKKCLASRYIKKTDLRPEENEWILQDLFAFNSMKRTSFLWQRQDRKFYQEDGKERSHQLKLKDIHRCKDYFINSAIGNARALIKSGQELAKLYIDDAKEDVKAIQKTLRRKKNYRKKLLKIKESIIKHTKDPKKPLKGSANIQYQKDGSVTVQFFQKIWVYETLYLFEHQWLDRKLRQLKTQIANMEHKMKRLEIKQQRLKDHPLKVRFGGKKLTRNRTIPERHRALGKRRNRRMQISGRKDCKYGNFVFHYDIETKTLEYRSMTGWNGDRVCFPDVTFPYGQEWIETWLQEQKGAIAWEIVDCGTAWQIRCILTKEAEDMNGYYGDGAIGIDINYDHIAMTETDQSGNLLHHKVFHYDMKGKTSGQIKYQISEVIEKVFQYADQQHKPITAENIKSIQRKKFYDKHRKRHRHISMFASACILELLISKAVKYHIGVKFVHPAYTSKAGKMRYLRRYGLSVHETAALCIARRGQGFKESIPSYLKPYLKDEKVRALIPQQWGSLTKLINKVTIQELLSYQDPVLHRN

SEQ ID NO: 61690 - protein, 392 aa, unknown
  TnpB Polypeptide
MQFTVTTKVQIITTDEDRALLDRTMDTYREACNCASAYVFRTHDLNQASLNKALYKDLRSRFGLKSQMAQSVLKTVIARFKTVLANEKAWIKVRFKKPQYDLVWNRDYSFSTNVFSLNTLEGRVKLPFYAKGMEQYFDNSIYSFGTAKLVQKHGKYFLHIPVTSEVAEVTPSDICNVVGIDRGINFLVATYDSKHKSGFVSGRAVKQKRAKYKQVRKDLQQRGTPSSRRRLKAIGHRENRWMQDVNHCVSKALVENNPEHTLFVLEDLTGIRHATERVKRKDRYVSVSWSFYDLEQKLKYKAARNHSMVINVNPKYTSQTCPICGHIERGNRDKKRHLFTCRACGYRSNDDRIGAMNLYRMGINYLTDKQVPDTVTQEHVSFVQGAVNHPAM

SEQ ID NO: 61691 - protein, 372 aa, Clostridiaceae sp.
VNIVYRFRIYPNKSQKELFARTFGCVRFVYNRMLAEKNEYYEKTGKVLKVTPAKYKAEFPWLKEVDSLALCNAQLHLQTAYKNFFRDSSAGFPKFKSKKNPVRSYTTNCVNGNITLQNAKLKLPKAGWIRIKQHRSIDDRYILKGATVSQEADDKYYVSLLYAAEEPGHEIRPVKTAIGLDFSMSELYVDSHGAHADYPHFFRKSQEKLAREQRRLSHCEKGSGRYMKQKKKIARLHAHIARQRKDYLHKESRKITNFYDLVCIESLNMKEMSQDSRFGTSVHDNGWGMFTDFLSYKLERAGKKLVRIDKWYPSSKICSCCGKLKKELKLEDRIYSCTCGNQMNRDENAAINICREGLRISGVELETERKIS

SEQ ID NO: 61692 - protein, 381 aa, Lentzea sp.
MSKTLVKRAYRYRFYPTERQQLELLRTFGCVRLVYNMALQARAEAWDQHRRRINYHDTSALLSGWKRTDELAFLNDVSSVPLQQTLRHLQTAFTGFWAKRARYPRFKSRKRGKASAEYTRSAFRWRDGRLWLAKLDDPLDIHWSRPLPDNATPSTVTVSRDAAGRWHVSLRVETSVEHLPPGVDAVGIDAGLTALITLSTGEKIANPRHERRDRQRLARAQRVLCRKQKGSNNREMARKAVARVHARITDRRTDFLHKLSTRLVRENQTIVLEDLNVRGMIRNHNLARAISDAAWSKLRSMLEYKADWYGRTVIVVDRWFPSSKTCEQCGHRLDDLPLETRAWTCPGCGYTHDRDVNAARNVLAARRAVAACGDGVRPIRR

SEQ ID NO: 61693 - protein, 360 aa, unknown
  TnpB Polypeptide
METQTRQFKLKLRKPNTGKEQKLENTLSQFQDCVNKWIEKIDELNQRPTRGNVHEHAYHKIKEDFPKLYSDTLQECMNRAIEIMRNHSGSLPEYEADSMSFKAVDMKYDSDNIGIPVAGKEYIWLPLIVPSYFGKYRELEKGRTQIIRVDNDWYALISVKYPVEQEIEPEGVLGVDLGIRQIAVVSNSEGNVNEFYGSERLERRKQLKSVQDALMEKKSGGSNASRALQRLSGKRSRFMDNVNHNISKEIVETAKHYRYKIAVENLTGIRNGSPSQTLREMLNQWAYRDLVDKIEYKAEAAGIPIDYVDPRKTSKTCSKCGSENDVGSAKQYNCSDCGVELNRDLNAARNIAEKGASFPA

SEQ ID NO: 61694 - protein, 480 aa, unknown
  TnpB Polypeptide
MTAYRWFREGKLPVPARPAGRLILVDQPTVSAVPGITAVDARVSSADQRSDLDRQVARVTAWAAAEGLPVGRVVTEVGSALNGKRRTFLALLRDNSATTIGVEHRDRFARFGAEYVEAALAAQGRRLLVGDPSEVDDDLVWDVTEILTSLCARLSRTASGCQSSGQGHRGGHWGGPVKLTQAGSPRSPLRGVPQAYRYALDPTPAQERRLRSHVGAARYAWNWGLARVKEQYAAEKKWYSAEDLHRLWNAEKQRNPELAWWQENSKCVYQEAFRNLDRALEDFSKSKKGLRKGRRLGFLRYKKKGRCRDSCRFSTGVMRCSGSTVTLPRLGTIRTHEPTEALAGKIAEGKARILSASVSRTAQRWLVSFAVEVEREILDHHRRPQTAVGIDLGVSALIMAVDHQGKVIRFPGPKPLRAALRRLCRASRAHSRKKTGSANRRKSARRLARIMPGSPTAVSMPCTRPRPGWLLDTRRWWSRT

SEQ ID NO: 61695 - protein, 307 aa, unknown
  TnpB Polypeptide
VTWKKGAIKHDDKHGQLRLSKGSNLKQGWSDFILAEYETRPDVDVENIQQVRAVWNDDMWELHIVCKKEIPVKDAPGNKTAGIDLGIDNYLAIDYEDGVSELYPGNVLKEDKHYFTREKYQTEGENGPSKRARKARQKLSRRQDHFLDTLSKHIVQRCVEEGVERIAVGDLSGIRDGKDGDSRNWGVSGNKKLHGWEFDRFTNLLEYKAEEYGILVDRESERDTSKTCSCCGRKRNKNRVERGLYVCDSCGKTMNADVNGAVNIRRKITQTPPTGDMSNGCLAQPGVFLFDRESGLFHMREQGDCKP

SEQ ID NO: 61696 - protein, 410 aa, unknown
  TnpB Polypeptide
MIVLQATTGRLYPSAMQAKAMARIGGQCRALWNHWLAVNAERYAAEGKFAFYKEMSATLPTMRREERFSGLPHRCAQMTVQKLDRALRDCAKAATARKGFPKFKRRSDRRDAFQFVGRELRFEPGRIKLPALGWLRTRGLRVPDGARLVQVTVHQDRGGWGLALQIEAAPPAYADPARPVVGVDVGLNSLITLSDGSPKIEPPRLARKQAKRLRRLEREKARRRKGGVNRRRTVARLNREHTRLAARRRDFTHKLSRRLIDTYEGVAVEKLRLKGLMRTRLAKSFADAGIGELIRQLRYKAEWASREYREFPTFRRSTGVCPPCGLVGPRLPLSVRVWRCAGCGAVHDRDTAAAQVILLGAVPPVRREPAGNSRRKRGAVVRGGVEAQALASHGEPPSNVAEVRATESVL

SEQ ID NO: 61697 - protein, 381 aa, unknown
  TnpB Polypeptide
MVKHKAYKFRIYPNKQQTILINKTIGSSRFVFNHFLHLWNETYSKTKKGLSYNTCATMLPNMKKSEAYTWLKEVDSIALQSSIKNLEDSFNRFFKKQSKAPRFKSKKNPIQSYTTKNSSNNIQIEGNKVKIPKLKWVKFANSREVKGRILRATISKRPSGKYFVSLLVEETIRESPKTESSVGIDLGIKDFAILDNGTIYNNNKFTYKMEQKLKREQRKLSRKQLQAKEKGINLFEAKNYQKQKIKVARLHEKVTNQRKDFLNKVSTEIIKNHDIICIENLNVKGMLRNHKLSKSISDVSWSSFVTKLQYKADWYGKEIIKIGKWYPSSQICSSCGANTGKKTLDIRTWTCECGVEHDRDINASKNIKNEGLRIRNLKLNI

SEQ ID NO: 61698 - protein, 240 aa, Nonomuraea sp.
LTLAKMDAPLNIVWSRPLPEGAQPSTVTVSRDAARRWFISLLVEEKISPLPAVTQNVGVDAGITALATLSTGEKIVNPRHERCGRRKLAKAQRALARKEKGSNNRAKARLKVAQVYARIADRRRDHLHQVTTRLIRENQVIAVEDLTVGNLVKNHSLARAISDASWRQLRSMLEYKAAWYGRTLVAVDRWFPSSKLCSVCGALRATMPLNVRKWECACGAIHDRDVNAAKNVLAAGLAEN

SEQ ID NO: 61699 - protein, 381 aa, Silvanigrella sp.
LITTYRYRIKDSGSTKKKLLKMANGVNFIWNFCKETQSNALKNKPVKVITDPKTKKIYYTPYFFTQYEMNELVAGSSKELGLHSQTVQAVAEEYITRRKQFKKLLRWRGRNSLGWIPFKSSGIKIVKDVVQYNKLKFRFWNSRNLPSDAHIKSGSFAQDNCGRWYINITIETKNNLYNKNSTSESAIFLSNYKGIIYQNESDSVKPNFSSKLIAKIKKLNIAKKKRVIQRKKDKLKEKPKPIGRKEKKILNKVANIKQDLFHKESTKIINNNRLVITNEIIAAKKRIQSRNSFISTRLNVKHFQNMLCYKALRAGKVVSIVSNKNLSLVPFQCCSLQSQFILRKRTFVCKICHKRTSFMTSARNNLLLAAKHLLRIGHDTP

SEQ ID NO: 61700 - protein, 607 aa, unknown
  TnpB Polypeptide
MEKRESTVVTIAPVRMCGTTIRVYRYGLAPPLDWDDECDAEMARLDRFYNALVEIEEAAQAEYRRLSSSDETALLETRIAAAEEAKDWGAAKALRAALKEIRAALRKANAAAIDAAEEKRKADAKAARQNCGAYWSSYNAVIRSVELARQKAIKEGAAFGKRTHEPGKGDWRMTVQIQGGASVADVLGGKNSQLRIAAPAHFGALRDRPAGMSRKACRHGRVTMVVHNTGGLRRVTWPLMMHRPIPPEAIIVGAEIVKRRRLGSRWDDWHLCVTVREPAPAPHESPDCAGVNIGWRRLSVERGLVIDGAGLRIATIWDGATLNHVILPEEIISAAWRCDELTSAIDKRVDAATARIFKDSPDHPVARQLGDTFVESGRLRVRDLWTFANAMTPAPDWLLAMLRACSRDRRERAGLLRRMARRRRDIYRVAAKTIAENYGRIAICAVDWAKLARLRESGKDNPLPPPARGYRKIAAPGEFEAELRRAIKARGGTIMDIKDSVSFLCHACGKEHAPSERSAAHHTCPSCGATWDQDRNAAMNLFAALDSSGPAAIKPADSLENGKGEMQSTAYVGRFQRRAKQAQEAKLANKEALENASELVDETIGCK

SEQ ID NO: 61701 - protein, 419 aa, Beggiatoa sp.
MKALKTKIRGLDKSQFKRLKELTHHAKNLYNQTLWTLREAFEATGLYFSYPKMDKAMKQVENLEGEVNYRLLKAKVSQQTLRRLDKNFKSFFKCHQDFQKNPNKYKGQPKPPRFKHKQYDNLIFDYQAFSVKDGVVILEKGLSFSLPEKLIGKTIKQVEIVPKYRHFEAIFVFSNDDIKAKVSKNDKVMAIDLGLNNLATCVTNGVEKPFIVDGRRLKSINHHYNKRYSKFQSHLKKTRDHKWSNRLQRLTDRRNARMADYLHKATRQVTDICVKKGISKVVVGDVTKSLNQINLGKKTNQNFVNLSLGQFIEKLRYKLELHGIALEITDESYTSKASFVDGDILPKKYEPKKTHTFSGKRVKRGLYRSQNGTAINADVNGAYNILRKSNPKFTLSELMSKVSEGILDWLHPYTRLKIY

SEQ ID NO: 61702 - protein, 443 aa, unknown
  TnpB Polypeptide
LLRIKTAKFTTPVLTQRKYELLNDLIINFAKSVNFCIEQCLEHNVTSRAGLHRVAYEEWKKRFDLSTHWFHSASQVTTRLLRSWRKLSSKGAGDSSKPPCYDAKAMRLELWSKNNRAGICKFHGHAIQVRVREGKYLWLPLITTEYNERMYIQDWQAGKTKAGEISISLGPNSRANIHVPFKREVELKQAEGVCGIDINERSVDLCIMKLNQEPKHVKLDTSKLASIAHSMELKQKSIQEKLDSLPQRPIQKARLKWKYSKRRRNRTNQVLHVVSKEIAEVLSKERVEPVFEDLTNIRQSMRSKQKSENGKALRKDMRRRLNQWPFRKLQFYVEYKTLQQGYSTHYLPREQVKGTSSTCPMCGAKSKPNGHVFSCKACGLSADRHFVGAYNIAARWTKDVARNVPAEWRQMQPIAELVVPVEKLSAETQESPMQNLCGNLGRR

SEQ ID NO: 61703 - protein, 386 aa, unknown
  TnpB Polypeptide
MKRIAYKYRIYPNTEQKVFFAKCFGCVRFFYNKSLSDMNEIYKSTGKFKNITPASYKEDYSFLKEADSMALCNAQINRNTAFKAFFSHKSGFPKFKSKRNDQSYTTNMINGNIKFSNNYRYISIPKCPRIRIKKHRDFIGTIKSITVSMTTDNKYYMSLLVESEIKPLKASNKIVGLDLGLKDLIVDSNGKKYKNHKYLTKSQNKLAKEQRKLSKMVKGSNNRNKQRIKVAKIHRHINNQRNDYLHKLSKKIIGENQIICIEDLKVKDMMSGSKLARNISDVSWSRFVSMLIYKADWYGRKVIKVPSTYPSSQLCHACGYKNSLTKDLAIRKWTCPKCGSIHDRDINAAKNILSKGIEILTKDGTHPDSLFMLGSLESSSKKPPLL

SEQ ID NO: 61704 - protein, 405 aa, unknown
  TnpB Polypeptide
MLIRSLVFRLKDPLPNEANFLMEDFRLAVNNAIRLGVHSNVTSRFALTKLAYKDFRMEHPGMFAQHLVSAFEVAGSILKNHRRRLRRGLPSQVPFVRRLFMKAENQAYKLDRENGIIDLPIRAGLHIQLGLIVSDYHRRYLDDESLSLGSLTLLQDRVIVAIRKHPPKPYAHESILSLDTNERSLDGVLAKEDRITAIVRAEFPEVSVIQSVHHERRRRLQKKKSHDRRTAKRLCNNEGNREHHRIEYRLHEVANVVLAFADEHKSEIILEDLTGIRPRMGKRMNRRISIWPRRKLHRIIEYKAAWQGIPVIKVDPRYSSRKCPVCGRKQGSRKGTEFVCGCGWRADRHINASINLLQTAASKKAAGGLRFDPGAFQHDVVMVLCGSGKTVRPEPNGTSSMRAAV

SEQ ID NO: 61705 - protein, 488 aa, unknown
  TnpB Polypeptide
MGAADEGFVTRAVVFTLDTSPAQDRMLRSYSGAARFAYNWARRTIVENLEVRAGERAAGVAEEALTPSQSWSAYSLRKQFNQVKPEVASWSGEVAKHCFDTGIIQAAEAFKNWSASRNGERAGVRVGFPGFKSRKTAKLSVSFVELNHQLSWFHPSRHAIRLMLPQTLLQSKNLHVRAKMQQLVWLHTVESTRRLYRLVEQDKATVQKVTISYTGGRWQASFMVRYQLAARPQKRGHTRIAGSVGVDVGLTHLATLSWPVPDVTDEDGHVHNPRPLAGQLERLKDLDRRIARCSDGSKNRAKLVRRRARLHGRVTKTRAIAHHQLANQLAARFDLVGVEDLNVRGMTHNRPLARALADAGLGQLRTIITTECTDRGTNLVAVDRWYPSSKTCSNCGTVTAKLSLSQRTFDCTTCGTHIDRDVNAARNIEREAVRLHAQQQADPSGLDVAGLRPETRNAALRTHKTEPATAGAAVSVDARTRQSHLRVA

SEQ ID NO: 61706 - protein, 228 aa, unknown
  TnpB Polypeptide
MMATSEQELLGTDLGKYFSEIADKRGKNSEGRNRMHALFLSLLKKTSKDNLAKAERIRKHNLGRKKQRARYIRDIGVIKTVVNRELNFLFTRKTNPVKAIVVEDLSARMKAHFCKKWNRWLSGWMRGYRIRYKAKKHGIEVNEVNPAHSSRECPRCHCTDKKNRQGDVFKCSYCGYHEHADLVAALNILGRLGDKEIRKGMSPSRVKAVRSARRLEIIERYRYRQDFR

SEQ ID NO: 61707 - protein, 379 aa, unknown
  TnpB Polypeptide
MISYKYNIYHSKKTKHLDKMLRECCFVWNRALALQRRYYKLFGKYISVGKMQKHFAKRIKRNLLHSQTTQEILQRLDSAYNRFFKKLSKRPPKFKRADCFNSFIFKQGGFTLNGNCLTINKGKKRFKFSYSRPYEGNVKQIRIVRETCRRYSLIIITDHNPTNSYRKTHDGASVGLDFGLKTYLTKSDGSSIVSPLFFKQYQNKIRKLSKRFSKAKKGSSNRKRILFDLQQAYRRIDNLRSDFQWKLAHQLCKQYDYIFIENLNIEGMKRLWGKKVFDLSHSYFIYKLMYVASKYGVIVHKIDKWYPSSKTCECGRINKGLSLCDRTWVCPSCGAINDRDILAARNILRKGISELESKSDSSDSNIGVSCACIQESHSL

SEQ ID NO: 61708 - protein, 365 aa, unknown
  TnpB Polypeptide
MEWIMETVRRYNYRAYPTRGQCEALSRLFGACRYAWNWYVRQRLTDWNFNRSRPSYAELSAKFNRTKTEKALEWLTQVSAVPLAQSLRQCEKAYSAFFRYVEKHGCHVDHKGRPLGYPRFKSRHCGEQSAVFTTSARFHVRHDHNARWMFLDLPKIDGEVRLRWSRDLPSRPSSVTVMRHADGTYEASFVVKAEPKAPPKPRHNACGIDMGLESLASIVYSDGTRGKVAPLRALRKAERKLRKLDKELSRRRRGSNNYSKTRLAKARLYARIGAQRRDLAYQLASRVAGENQAVAMETLCVKGLMRTRMGKSVADAAWSTFTDRVDMLCAQWGRRAVRIDRWCPSSQVCSQCGRRDGPKPLDVRE

SEQ ID NO: 61709 - protein, 427 aa, Campylobacter sp.
MSANNNELISISHKIELKPNNKAKTHFKKAFGCARLAYNWGLAKWQEYYKQGIKVTHLDLKKEFNAIKKEQFPFVYEVSKYATQQPFLNLNLAFQKFFRDLKQGKVSYPKFKKKKDNFGSYYIGGDQAIIKDEKYLKVPNLGLVKMRENLRFNSKINSATISQKGDKYFASFSVEIPQDEFIKTHKIKENKGGILGIDMGLKSFVSLSNGLSINAPKPLNKLTRKLKRVSRQLSKKQHPKAKGDKTKKSNNYLKQNLKLRKIHTKIANMRNDFLHKLTSILANHYKYFCVESLNVQGMMKNHNLARSISDVSFFEFKRMLAYKSAYRGNEVIEADRFYPSSKTCHCCGYKKEFLTLSERIFQCENCGITIDRDYNASLNLKRYAINNIGLVQAEFTPEDLTALQSDLAINRIATSKVDTGIQQKSCL

SEQ ID NO: 61710 - protein, 931 aa, Lentzea sp.
VRRAFKFRFYPSEAQTVELSRTFGCVRKVYNLALQARSEAWTQRRERVGYEATSALLSVWKRTEELAFLAEVSAVPLQQALRHLQTAFGSFWARRARFPRFKSRKRSRASAEYTRSAFRWRDGALTLAKMAEPLDIRWSQPLPEGVVPSTVTVSRDAAGRWFVSLLCEDPSVRPLPATDAVVGIDVGLDHLLVLSTGEKISNPRHERRDRTALAKAQRSLCRKQKGSNNRAKARIKVARVHARIADRRTDFLHKVTTRLVRETQTLVIEDLAVSNMVGNHRLARAINDAGWRQFRQQLQYKADWYGREVIVVDRWFPSSKLCSVCGALAAAMPLHVRTWTCGCGATHDRDVNAARNILAAGLAVTVCGAGVRPQRNPPGGQSATKQKTRQVRQRQCDRAEHQRVLGDRDRVGRGEQQRDAEQHADQHDGVEARGLARADELAPLPAEVLRDRVPGGQPRFQRRAEGRGEEAEDHHDESELAERHGDRQRGLAQGVHLGAERLVDHRGAAHDRQRQDSPEREADEHVHALDREVAPRPLLLDATGGEEEHLVRGHGGGEQRDGEEPVGPPVLGGRRDGTRHLVTELAPRRVERDERHDEHHERESGEAEHPFHGLELHLPQDHPQDERDNRHPQQVVHARRQLDRERDTADLRAEREQRDEVGAGQVREGRTGSEAFADEVEHRTPAHRGDPAGHLGVEADADHTDDHDPGEPHAEPGTCLGVRDQVTDVDEAADRGEDAERDGQEPFHRRPSSTVVSFSPAAVSPSTAPVAAARSSSSSPASRSPSRRAESCSSGNTSSRRSRELSSGTDDSAMSEIAVATLLRASSRTVDSYGPNVLPLRAVCPVTRAVPTEDTAFCTLVSTVDRNCPGVLGRTPISTTASSTAPKPINTAHRRVRTEHAYPRSAASNLGPTAVSAAAVRRIFTGRGLAR

SEQ ID NO: 61711 - protein, 368 aa, unknown
  TnpB Polypeptide
MVEKAYKYRIYPNKKQKEIIAKTFGCCRFVYNTYLAKRIKLYEELKETFTYVQCANDMKNLKTELEWLKEVDSTALQSSLRDLDSAYQKFFKEHSGYPKFKSKKTHRYSYKSKCTNGNIQYCDKHIKLPKLGMIKTKNKLMPKGRILNATVSQEPSGKYYVSLCCTDVDTDPLEKTGCSIGIDLGIKEFCITSDGEMITNPKYLKKSLDKLAKLQRELSRKSKGGSNRNKARIKVSRLQEHIANQRKDFLQKLSTKIIRGNDVVCIEDLQVKNMIKNHKLARSIADVSWSEFVRELEYKANWYGKQVIKVDKFYASSQTCSVCGYINKKTKNLSVREWDCPCCNTHHDRDINAAINILNEGLRLLEVA

SEQ ID NO: 61712 - protein, 426 aa, unknown
  TnpB Polypeptide
MKASRVEQHRMKKNNKFYPIIDELCWKSKNLYNYGNYIIRQEFIKTSKQKEQGLIENAHWITYNELFRLCKDSDSYKNIGSNVGQATLRKLDKNWKSFFKSIKDYSKNPSKYLGRPKLPKYLSKENGRFELGIDNIKFRIIDEYIYFSWKPLKIMNNVFRTKIPNTSKLIQIRFVPKNNEYIMEVVYEIDVSDTENIISERISAIDLGVDNLMTITTNCGINPIVINGKPLKSFNQYYNKKISEMRSNLKLRNDNDWSNEMQRFTTKRNNKVNDYIQKATKMVIDFCKNNNIDTLVYGYNSGWKQETNMGKSVNQKFVSIPYLSIIQRLEYKCENAGIKFIKTDESYTSGTSFLDDEKPIKNNYDKSRRVYRGLFQSNKGEYINADVNGSYQIMKKVFPNIFMNGIVGAGSHPVVVNIPLQTANNI

SEQ ID NO: 61713 - protein, 375 aa, Proteobacteria sp.
MRKTMKYRLYPTRHQQRLLDDTLVTCRQVYNQTLAHRKEAWEQRQATLSLYETNAMLTQWKHEHPALTSVYSQVLQNVQERVDLAYKAFFRRVKAGETPGFPRFRGPGRYDRFTFKQSGFAVHDSLLRVSKIGALRLVLHRSIAGTIKTLTLRRTPSGKWYACFSVAVEPTPLPETERAAGIDVGLSSFATMHTGQKIDNPRFFRRDEQALAKAQRRLAKAEKGTPARQKCRKVVAHIHERIANRRYDFCHQEARKLVNTHGVLAFEALQIPNMMQHHGLAQSIADVAWGQFVRITTDKAACAGRRVAHVDPRSTSQECSQCGQRVPKSLRQRRHQCPACQCVMDRDHNAALNILRRGLASLGPAPRSSGIYAGE

SEQ ID NO: 61714 - protein, 386 aa, Oscillochloris sp.
MSETVSTRTVCCKLALDSASNAALRATAVAFNRAATYCASVAWTQNVTNKNKLHHLVYLESRITYGLGSQLACCARDKAAEAVRAVRAAPERRDKQTGESIPRTCPTFRDDSSIRYDMRTYRLMRLDQVSLYTLGGRVVGQMDLGTFQRNTLYDRSWKIGGAELFCRDGVWYLHITQTKADPAPDEPTGFLGVDLGIVTLAADSDGETYTGADVERLRRWYRARRAALQRVRTKSAKRHLKRLKARQQRFQKDTDHRISKRLVETAKRTARGIALEDLAGIRERVKVQSADQRARHSNWAFLHLRSCIAYKAQRAGVRVVFVDPRYTSQRCSVCGHTERANRRSQAQFCCVVCRHTAPADYNAAINIQRAAVTQPMVPDPTLQRLG

SEQ ID NO: 61715 - protein, 310 aa, Oxalobacteraceae sp.
VRSPERRGGDHQPGRGHDVRGRPRKRRARDHHRLFGAAVRESQPSQPEADRRRVAGREGGAMLMAHRIALDPNNVQATYLARAAGVARFAYNWALSEWQRQYVARQADPALPAPSQFALRRQLNAIKREQYPWMLAVTKNAPQMAIIQLGKAFENFFAHRARYPRFRRKGVDDRFTLTNDQFRVDGKRFYVPKLGPVRMRETLRFTGRIVSATVSRRADRWYASITVDATEVSLPPAENQGEVGIDLGVSALATCPERGVRHDRDVNAAVNLKNMAMSSIATACGGNGTGPVRERGAKPVPVKQEPSGKS

SEQ ID NO: 61716 - protein, 535 aa, unknown
  TnpB Polypeptide
MEELRTFTIQLNEKICTEGFYKESMDHLFTCRQFENLLLILLKENYERFKEGKDTNDFRYLTNAFLMQNVLFDYDGKAKNEKKYITEKYSQYPIFQELLKSAKAVGHNNAPSLISRVKNTYTSYFELLKAYEKKELTEKPNPPQPKKLSKIVNYAIDLNNAHSVSLCRLENMSVFGINLNSEMKYIIINPEIIDGLNLTKKKIKSAKLVYSNGYLYLQTGYYKEINETTSLTKKDAGLDIGIKNSISCFVDDNKTPSLLINGGDLQSYNNKFNNELSALQTELTTKEVKEWGASKTGTKYPKTYTENGIKIKEEISVMFEERNKYFKDQFHKISKGMLEYLHINKVTDLYISNTLAELKNNGKCKLKTRVKRDFIQIPFLSLFEIFKYKAKEYNISIHFVDEAYTSKTSCITANINKVQELNKNLTNNHTPSEPVPLIRVEGKEGNIYKGKRTQRGLFKDTILNKVWNADLNGAVNILKVGTKITKTSFEWLKNALWKLSNPIKCSVCELHNIYAIASTGLRYRTQRNQSLIMSV

SEQ ID NO: 61717 - protein, 359 aa, unknown
  TnpB Polypeptide
VLAKHLKLLSWVYNKAIEAVKDAYEKKEPYPKRSGLYKLIHQWTLEKPELEGIHSQVLQNVCDRVDKAFKAFFRRVKAGEKPGYPRFKSWRRYKSFTFPQSGFSLKDGILTLSKIGKIKVVAHRELRGKVKTCNIKCDASGDYWVSFATEVSEETLPPSTAEVGIDLGLTNLIALDDGTKVPAPKYYRRYEDRLAKAQRKLSALDKKSAAYQKQKKVVAKIHRKISNLRHNFTHQLSASLVKNYGFIFYEDLNLKGLIAKNYAKSWHDAAAGQLVSQIAYKAESAGRCHIGVNPAYTSQMCSSCGQLVPKDLSVRIHKCSCGFIADRDVNAAKNIRRLGLQSLEDLRSKAVDVLRSPHL

SEQ ID NO: 61718 - protein, 367 aa, Escherichia sp.
MRRFAGACRFVFNRALARQNENHEAGNKYIPYGKMASWLVEWKNATETQWLKDSPSQPLQQSLKDLERAYKNFFQNRAAFPRFKKRGQNDAFRYPQGVKLDQENSRIFLPKLGWMRYRNSRQVTGVVKNVTVSQSCGKWYISIQTESEVSTPVHPSASMVGLDAGVAKLATLSDGTVFEPVNSLQKNQKKLARLQRQLSRKVKFSNNWQKQKCKIQRLHSRIANIRRDYLHKVTTAVSKNHAMIVIEDLKVSNMSKSAAGTVSQPGRNVRAKSGLNRPILDQGWYEMRRQLEYKQLWSGGQVLAVPPAYTSQRCACCGHTAKENRLSQSKFRCQVCGYTANADVNGARNILAAGHAVLACGGCQQTG

SEQ ID NO: 61719 - protein, 359 aa, unknown
  TnpB Polypeptide
MNLVLPIKLAPSGEQTALLLKTMHQFNAACNEIAETAFRLHTANKITLQKHVYYPIREKYGLSAQLTIRAIAKVAEAYKRDKSIQPTFKPESAIVYDSRILSFVGLEAVSLMTLDGRIEVPMILGAYQKARSDRIRGQADLVYRNGTFYLYATLEVPASDPIDPDGFLGIDLGIINIAVDSDGTAYSGAAVTHTREKHGALRGALQRAGTRSAKRHLKRLSGKTARFCRNVNHCISKQIVTNAKGTDRGVALEDLTGIRKRKRKTVSKAQRGRLNAWGFYQLRQFIEYKARLAGVPVVIVASPYTSQTCPHCGYVHASNRPDRGSFLCGSCGCAGPSDHIAAMNIAARAAVNQPIVACR

SEQ ID NO: 61720 - protein, 397 aa, Arsenophonus sp.
LLEKQFGAVRFVYNKALHIRTHWYKRYGVSLSNIKHIQPLLPIAKKSRRYGWIKQADSNALQVALQNLDQAFKNFFDKRAKYPKFKRKHGAQSSYHCSNLKITNDTIKIPKIPAIRANIHREITGKVKSITLSRSATGKYYASLLCDDGVEVPSKPVLISNITGLDVVLSHYAIKSDGNKIANPRHLINASHNLRRKQKALSRKQKGSTNRRKARIQLAGVHERVANARADFQHKLSRAIVDENQAVIVETLKSANMMKNRCLARAIGDASWHGFITKLEYKAAEKGIHLVKLDQWFASTKTCHCCGYKMSEMPLHKRIWQCPECGVEHDRDINAAINIRHKGILELQAAGHVVSAHGDQRESVVRRLRSEKWEASPFTAGSSHQKNMAFSHRFLVG

SEQ ID NO: 61721 - protein, 414 aa, Rhodobacteraceae sp.
LYNLALEHRSQLKSQDYAFHSRQLSKEQLREFSNYSQAVAIRSVLKELKGDPDYEWLRKFPSQCIDSLLSDLNEAFQKFFKKQGGRPKRRTFLKNNSAKLKTLEKRGDKFRVNVLYRKDTVRIPKLGLVKYKKHKKFYGKPTVSTVMREGNEYFICVTTRQTVKALEYCGIAIGVDLGVTFPMATSDGEILPKNTVLDAIDSRYRKLQKKFSRQKNKQSVRRKRTKAQLADLKRKQTRCRKAYIHKATTELTKRYSYIAIEDLKVKNMTKFAKGDAEEPGKNVKAKSGLNRVVLNVAPYEMRSQFVYKAGWYGSHIEDVHPKNTSLTCPECGAIDKKNRKSQSVFECVGCGHTNNADINAERNILIKSGMSETALGLRKTPRKNHQVLATSESIVSCFQPLSDCNSSALSSGYG

SEQ ID NO: 61722 - protein, 416 aa, Arthrospira sp.
MTSLDRLNFYAAHTQQHKFLQKLAVDSILNGENSSLYWNEYTKEISAHLSSLTPIGLSVSDFHSLNGYVQKVDVNSWFSGKRVSLQNKNSLAISCPSSTVSLLGFTDYESTKNQPVKNFKKKPRHQTSKMTPNRLRKVRLYPCEELHAVWKRWLAAYRWIYNYTIATWKHGYQWSCFDCQKLVINSDKPEWVKSLPVHQLQEAVADAFDAFKQANAAGVQVKFKSCRAPSQIIKFKVNNFRNGTWYTRLTKGLTFTSPQAIPKNCPYGTQLKYARGKWYGCFPEYQEPETTEQKRVIALDPGVRSFLVGYDGESITEFATNDIGKINRLCYHLDVLMSRISQCKIKRKRYQMRRAYHRMRERIRNLVDDLHKKVAHFLVNHYKLIFLPTFNSSKMVFKSRRNLNSKSVRNLLNWSH

SEQ ID NO: 61723 - protein, 309 aa, unknown
  TnpB Polypeptide
MHPGFLGRHLYNYALGERRDQGKFNKLIADWQLCPWGTPEWINYKDQQKSLKLNKNEYQKQVHSQVLQNVLRRVEKSFDKFFTGAGYPRFQGRNRYDNFTFPQSGFKITDEGKLKLSKIGEIKIVQHRLRQSEKKLVKAQRELSKKKKRSNNRDKQRVEVAKIHRKIRNQREDFNHKLSRELVNNYDTIVFEDLQIKNMVKNHNLAKSISDAGWSQLIQFTTYKAEYAGRIVDLVNPRNTSKTCSICGHIQSMSLSERTYKCLCGNLMDRDHNAAINILNRAVGTTVQDCGGHLNREPTKQEAPSVRVG

SEQ ID NO: 61724 - protein, 291 aa, unknown
  TnpB Polypeptide
MNKSFKVRIYPNKEQQVLLEKTFGASRYVYNHFLKLKSYLYQEFKIKITYNHTSKMLTELKRQKTWLRVPDKWALQNALKDLDSAYKKFYNGAGYPKFKRKDDKNSYRTSSNIKVDNSFITVPKVGIIRYRDNYNLEGKNILKIYNITISKSYSGKYFASISAEVYTPCFERTNQNCGIDLGLKDFAIFSNGEKINNPRILKHLEVKYRKLAKSLSRKVKGSANYRKAKLRLSRFHEYVANVRKDFLHKLSTKLVKAYDIICIENLNIKGLMQNHKLAKSFQDVSLSEFIR

SEQ ID NO: 61725 - protein, 410 aa, unknown
  TnpB Polypeptide
LEEKLNSNDNKIYRSVKIRLLPTEEQEVLFWKSVGVARWSYNYFLSESYRVYQGWLEDSSKPKHISDGEVRKYINNVLKKTTHTWLKEVGSNVMKQGVKDANIALQNFFKHGKGYPKFKSKKRSKPSFYVNYERLRRTPNGFQGEKIGVVKTREPLPKISKGQKYVNPRITYDGKFWYLSVSFEVRKLDTKLSDNILGIDLGIKELAVVSNQDGTIVKKYHNINKTYEVKRLERKLKREQRKFSRKILLNTSHHSDNGRPVYSKDLELCKNIQKQKGIIQRLYRRLLNIRTNYIHQVTAEIVKNKPSRVVLEDLNVSGMMKNKHLSKSLMCQKLYEFKRQIEYKAELYGIEVVISDRFYPSSKTCHKCGHVKRDLKLSDRTYRCDCCGNVVDRDINASINLANYNIESVN

SEQ ID NO: 61726 - protein, 300 aa, Erysipelotrichaceae sp.
CRDADRKNDKLAKQGKNITVTATLPVLKKACCYVNNQNFKINGDYIEFPVMVNGKSKRLSVKTKMSDKQKSVFANSKLGTMRIVYKGNKIVAQVVYETIEPTYTTEGNVMGVDLGVKCPAVSYISDGSVKFYGNGRKNKYMRRHYRCLRKKLQKAKHIDAVKRINDKEQRIMKDIDHKLSHDIVETAVAHNVKAIKLERLANIRSTTRTSRKNNHSLHNWSFYRLAQFIEYKAKLAGIAVEHVNPAYTSQTCPVCGHVHHANDRNYTCKCGFHIHRDILGAMNICNSTEYVGDSNIRHTA

SEQ ID NO: 61727 - protein, 1104 aa, unknown
  TnpB Polypeptide
MTGDWKDKAREKKAREEAIDHCIADADKLPIPDAEKEKETLKCAAKVLTMPLKELDAFLATHTKEAPPSPPPASPPPSPEATLYTGLEGCDRESKKAKNPEEKREFLNYCHTKVVQEYERALAEQKAQAQAQREAPHIQQAEHLERLQEFCTEEEPCTQETVPDPKAVSYPLNLSAITEVSPLYEKSDEDALRFEAAHPISPSDAVITRKFSLLPPLELPERTRAHLQHVVDTFYNQGDPSKRHLTNAYFDVCFAHFQHVVNAMIREGLQLPPVVKINRQQKDAEGEFLRDEAGELIKKEIDYEVFAKDTQYAEKRFGALVIGQVKAAFKESPWLFARVPKAARRADETPIFQFHNRVYRCAGAVAYHIVRNYRMQWMVVSRLVETLLQKIKVPLKGTKAGKAPSLGRLGRRLYEEQIYEDEAEEATPKALVTIEPLATLFDREFPLHALVSAGREALKGLDLPHGYLNFVYLRNTYRYIRNLLRQACQAMNWKPETIKEFKAAKANADIERVLEEWLAQPHVSDALEKAKEKEKALPSQTELEYQFDSFLRRLSARLTKRVQFLLRKRKAEAKGKGSKASKAKGKGSLPMKKKKGRTFGEGSLDALIGQILAQDSQTFAELKSAKAWQKSRQKWRDQLYDQLSAQLAATDLRSLVHEVTGQVQAAPEMDFLRRIFDLRPARTVFVDGDFAEFLAFLKARIQGEAEMVLVKEFYGTLQPYLVQFLELLRNIGPMQVAQLQTLPFFRRPCYSGRSIPTAHAFDQKVCVVDHSGSTVTVTLQLEADVPLQFTLATQRRRKNPAGGDRFRPFIEEGWTERPGTLLKAPGRGLLLALPFSKALKAQAPVATQALMPARKAGLDLGLKDFGAISVCEGDREIARHFLDQWELVGRRTDWVLPPDPAEAATRRERFFNWKNRLRDLRQEAANYQAKLADYKNEMRQHGMSSKRLHHQRKFQELRRAWKRCWQKLTRLHEELARQLATRVVACCLHYRVATLRVEDLRWARHKPKPQAGYFLTALQVHWFHGQIQQRIKDLAKRAGLRVELVNARDTSKTCSKCGERGTRDDKRFTHQECPQHGGKLVQLDADLNAARNIVRALPHGLASD

SEQ ID NO: 61728 - protein, 396 aa, Streptomyces sp.
  misc_feature (396)..(396): Xaa can be any naturally occurring amino acid
MQLRYSFRVYPSAGQRLALGRAFGCARVVFNDALRVREAPRQLTAVKKTPERAWLAEVSSVVLQQSLRDLDTAYRNFFDGLKGKRPRMGAPGFKSRKDTRQAIRFTANAGWKVTAGGKLRLPKVGDLAVKWSRSLPSAPSTVTVIKDSAGRYFASFVVETEPGTLPDTGSAVGIDLGLAHFAVLSDGTKITSPRFLRRAEKKLKKAQRDLGRKARGSANRAKARVRVARAHARAADARREFHHQLSTRIICDNQAVAVEDLAVRGLARTRMAKSIHDAGWSAFVTMLECKALKFGRCFHRVGRFEPTSQVCSVCGVKDGPIPLGIRVWECGACGAVLDRGHQRGGQRRPGRRTGGISLRSAGKTGTRPGTARRNRNPPEAPAGDHRQAGGNLRPLX

SEQ ID NO: 61729 - protein, 443 aa, Candidate divison MSBL1 archaeon
MGEFMLLFIKDVLVSVASPEKWLIIGSLDGFISMEVTFEVPVSSPTVKKESFLESISKKFPKMVQWFLTVFEKEGLDFREMNMNRARKVVKELCYPTRKRSSKYNCKGAVRFPHSHYYDTAITEAIQKWNSFLTWKEKTGTDKRFPCIKNYAPSLDSQMFDLDLENGWITINTGRGEKNVHIPITVPNKSHYKKLDEEKISSIRLKRKKTCFVFLLIQKSSSPVASSPSDLGERPVLGIDLGERNLASLVAIRPSSQQTEIIEADFFDGARAKEIEHKENGIRTKLQEEGKSSEIPKRGEKSSNWKKDLCEKIACEIKEIAERLEAIAVFIGDLKAPRPRNYGTLSRRLNNYPFSRLKNAIKRHLEKADIFVELIYEGKTREEDLGTSQKCHKCGSRGERHKGGFSCPDCGLGDYNDDLNASINIAERGTKLLGKSEELGAVP

SEQ ID NO: 61730 - protein, 384 aa, unknown
  TnpB Polypeptide
MIKTHKIALDPNRDQIAWFYQQCGYAKFAYNSALSDFKTELSADNFLSMYDLNKRFNKKKKAFDWTKAQDQRAAMYAVHNLGSAIDNWKAKRAKFPRLKKRGCKHSYTTDEQAVRMRGKRIKLPKIGWIKTFEELRFVGKIVSVTISRTAHRWFASVSVEVQPPIHRCPASSEFVDWFASKAEVGTPHEIERSIYPTIGIDVGISTLATLDDGRKYENPKALERYERKLKREQRKLSRKVFLSQNYYKQKRKVERLHYRIACIRRDAHHKATTDILIGVSGIGIETLQIPNLLKNRKLAKSLSDAALGGFLEKLKTKAKALGIPIVQADRFFASSKTCSACGYKKDDLTLSDRQYHCSNCGTSIDRDENAAINLRTLAAGHAES

SEQ ID NO: 61731 - protein, 184 aa, Okeania sp.
MKSIRTKLKLNNKQKTLMAQHAGYSRWCSNWGLSLWNQAYKDGYKPNAHKLREVFTNHTKPRYPWMKNLSSKVYQYAFINLGEAFKRFFSCGMLRKQGLGKHSRFKKKGKHDSFPSECFANTIDNCGKPIELNGWSHKLPFIGIVKTYEPIEATTKTITISRQAGDWYLSCSYEFNATTTPKKK

SEQ ID NO: 61732 - protein, 405 aa, unknown
  TnpB Polypeptide
MITNRVERHNITKSNLMWKIVDDLCWKSKNVYNCANYIIRQEFIQNGKWIRYNELDKIMQKQECYYELGSQCSQQTLKVLDKNWKSFFVAIKDWSKHPEKYLGRPKLPKYKNTEYGRFVLTLSNIQFRIEESYLYFSWKPLKIFNNSIRTNICNKLLQVRFIPRGGNYVLEIVYEIDIPETKNKSTNIVGIDIGIDNFATISNNIGAKPIIINGRGIKSINQYYNKKKAEFQADLKIRHKADWSNKLQRLTDKRNNKIDYFLHNASKTIIDWCLFYKIDTIVIGKNDNWKQESQMSKKVNQNFVQIPHALFIEKLKYKAENKGIKIICTEESYTSGTSFLDNELPVKANYNKGRRIKRGLFKSNTGKLINSDLNGAYQIIKKVFPNVFTDGIEGAGSHPVRLNII

SEQ ID NO: 61733 - protein, 425 aa, Thiomonas sp.
MQRRKVTLKLYPNAAQTARLEAWTRLHCELYNAALEERIDAWRKAKKSIGYYEQQNVLPQIKMDRPEFVELGSHTLQQTLRRLDLAFQSFFRRVKAGQTPGFPRFQSAKRFSGFAYPDPAGWKLMQHGSRGATLRLGSGEFAMSIRARGQHRFGAEAKPNDITLTRRNGQWFVSVTLRVQDEACARQRTDNQRRGVDFGINDWATFDDGQTIANPRWMREELPHLAALQRQRARKLRGSIRYKRLSVDIARLHDRIGNLRRDFVHKQTTQMVQQCAVLATEQLAPKNMSRSAKGTVGAPGRRVRQKAGLNREILSAAFGMAHQMLAYKAEEAGTRLHLSNTRQLKPSQRCSKCWEVVPKTLADRMHVCPHCGHVMQRDQNSALVVLIDANTPGTGVAARPKPLPRQRGKSKSVTRETPTTTAQAV

SEQ ID NO: 61734 - protein, 449 aa, unknown
  TnpB Polypeptide
VIAQQAFRYELAPNVGQRVLLAKHAGCARFAWNWTLAARIRRYQECRAEERFTNAIEQHRELNARKGTEWPWMYEVSKCAPQEALRDLDRAFRNLVRARRAGRAFGFPRFKRKSIDDAFRLTGSIRVRARAVQLPRLGAIRTKEGTEKLRGRILSATVRRKADRWYVSLMVEAERLDPGPVLGPVAGVDLGLHSFAVISDSVGEEMVAAPKPLGRCLRRLRWRSRRLSRKARGSGNRRRSAVRLARLHRRIRNMRVDFLHKLSTRLAKTKSVVVLEQLNVRGLMRNRHVARHIADSGWGTFRRMLEYKSQWYGSKVVLAPRFLASSKTCSDCGHVLDSMTLSLRKWLCPACGVEHDRDGNAARNLVFWYRRATGSSPGSDACGEPSGGAEAQASASHGSAKQESAVEDCPLAEERYYYSLRGARCRASEQIPHKNVPVTLRGEGSGRGR

SEQ ID NO: 61735 - protein, 274 aa, Bacillus sp.
  misc_feature (39)..(50): Xaa can be any naturally occurring amino acid
MEVNQIMMNKAYKFRIYPNQAQAILINKTIGCSRFVFNXXXXXXXXXXXXTGKGLTYGTCSAKLPAMKKELVWLKEVDSIAIQSSVRNLADAYMRFFKKQNSAPRFKSKKNNLQSYTTKQTNENIAIIGNKIKLPKLGLVRFAKSREVEGRIVNATVRRNPSGRYFVSLLVETEIQELPKTHSYIGIDVGLKDFAILSNGTHYKNPKFFRSLEDKLAKAQRVLSRRMKGSSRWNKQRVKIARIHEYISNARKDYLDKISTEIIKNHDVIGIEDL

SEQ ID NO: 61736 - protein, 283 aa, unknown
  TnpB Polypeptide
LVYDDEQTDIYQIVKQAKTVCQVEFDKLDQKGEFQSKEVLLHESVMSIDLGLNNLATCVTNGVVKAFIIDGRRLKSVNAYYNKRKAKIQSTLEKTRGRKWSRQLQNLTNWRNAVVNDYIHRATHFVVKTCVENSISKVVVGDVTQSLNGINLGKRTNQNFVNLSLGQFVDKLGYKLGSHGIELVVTDESYTSKASFVDGDKMPKKYNPKAKKKPTFSGTRVKRGLYKSSDGTLLNADTNGAYNILIKNDCEFSFEKLLEKVGTSIKEWLHPIKRYEVTGRSFL

SEQ ID NO: 61737 - protein, 476 aa, unknown
  TnpB Polypeptide
MYSIGMTSTLQSGVRFRAYPDVGLAALLRRWIGCQRAIYNGKVDEDRLFAAQRRLELASGKTDIKTPLDQQYAHFKDRELAPWLYEVPSQILRNGAVRWMTARQRQLKGLGRSPRRRNRRDFNTVVITQELFRFIQTGHGVVIELGTKASPVGQLSFKAHRRHGLPNTIVVRETAGQWFVSFSYGHASEIIMREPHERAYELNGLDDYELERVTLGIDRNVRDNYIATSDGQQFRPEEIVLERMRRKEIGAKRYQRRIARTVKGSANRRKLVARLACKNGYAPRARNDFAHKVSHGLATSDAQFFVLEDLKIGNMTRAPKARFDESTGKWLPNGARAKAGLNRSILQSCWGTIHRTLAYKAARRNKLVGLVPATNTSRECSRCGHIHPDNRDGARFVCQRCGFEAHADDNASRNIKARGIMRLRDGEYEATRTRKRVAPIRRKESNTTGGRPAQACGGASPHPGNRTERTQDLVAA

SEQ ID NO: 61738 - protein, 434 aa, Microcoleus sp.
MFNLTYSYRIYPELNQEAQMLDWLEQCRHVYNYALAERKDWMNSRKCSVNACSIRQEYIIPADTPYPHYYKQQNALTKAKEVIRELKAVHSQVLQDALKRLDKSFKFMQERGFGFPRFKKFGQYRSFVFPQFKSNPVNGFEIKLPKVGAMPINLHRPIPDGFEVKQVRVVFKASGWYAQLILQADIYVPEPMPHGEPIGIDLGLEKFLAISTGQLIERPRFFVDLQSELTWLQRKLKNKTKGSANYRKIQAKIRSLHEHIYNIRREFHVLTAHKLCDIAEMIFAEDLNLKMTSRGMLAKHCLDAAWGSFLEILKWVSWKRGVYFAKVDPHGTSQTCPQCGAHTGKKELSERVHHCSECGYTTNRDVAAAQVIEQRGLVAVGQTVILPVEEGCLGTPVKQENSRAILGSPRYTRSRVSVGRMSRLQTSVIACSER

SEQ ID NO: 61739 - protein, 419 aa, Coleofasciculus sp.
MLTLTHRYRIYPDTTQEQQFIEWMEICRSSYNYALREIKDWCNSRKCAIDRCSLEKEYILSPELKFPGEVYQLNNLPRAKKEFPKLSEVPSQVLQQVIKQLHVGWKYFQERGFGFPRFKKYGQFKSLLFPQFSSNPVTDLHLKLPKIGVIPVNLHRPIPSGFEVRQIRIMRKADKWYASISLQCNVSVPDPMPHGHPIGVDIGLEKFLATSDGTLVKPPKFFKQLQSELKLLQRRMSRKKKRSKNYEKARIKVARLHHKIDNTRKDFHYKQAHALCDAGDLVFMEDLNYRTSAKGMFGKHMLDAAFGQFRSIVKYVCWKRGKFFGVVDARGTSQECPECGEEMRKDLSVRIHDCPYCRYRTDRDVASAQVIRNRGIELISTAGHVGMETACAADLPGAGVTQSRQVAKSLHRTTRKPKE

SEQ ID NO: 61740 - protein, 537 aa, Ornithinibacillus sp.
MEYFYIDEHTFLWYNENKHNSMKERWIMRINNNPTFIVELKLSTELWQCHILDKRLEIARKMYNSTLAYALKQIQLMKESKQYRKTIHDYRQTKALLSKTKNKELAQLYKNELSALRKRLQEIRKSYHLTKYGLHRIIAKHQRNYKTHIDSFTAQKIADAIYRSLEGVLFRGYRAHFKKFGTLTSVEGKSNKTGIRYKREENKLYWNGLVIPVIIRKNDLFAEEVLSSHRIKFCRIVRKVIRGKHVFYLQLVMDGTPPPKRVKKTGQFRHQPTPNGRVGIDIGTSTIAVSSDDEVFLKPLAPRVRQFDQEKRRLSRKLDRSRRSMNPQNFNRDGTIKKGIKLAWKRSNTYMKTLFKLKELYRKRSMYVKEQHSRLANHILSLGDEVYVEKMSFKGLARRAKETKVNKFGKFQRKGRFGKSIGSYAPALFLGILKRKLIYIGKELHEINTYTFKASQYNHLTDTYQKRKLHQRWIYINKHRIQRDLYSAFLLMNCDSNLQQTNRERCKRTFEKFVILHHEHKNLLKNQLTKYPTSMGI

SEQ ID NO: 61741 - protein, 421 aa, unknown
  TnpB Polypeptide
MHEEKNRKIRENGKATRERRSNMDCCVISVKVQENRLSKAKLEKIKCFFLEGKWLYNAVMASETLTLEDTSFVQIKVNDCFETREIKNLSAQMKQSIVDSVKQNIFNLSRAKKKGVAVGRLKFKKECNEINLKQFGQTYAIKGKNKIRVQNIGIFIVNGLEQINLDEVEFANAKLIKKPSGFYIHLTVYTKKQPQPETSKEVLGLDMGIKDQLTFSNGVKVNFYVEESEQLKGLTRKLNRQVKGSNRYKQTLARIKRIFEHQNNKKNDVANKLNSVLKKNYIICFQDELLNQWKRKKSKRRFSFGRKVQHGILGRVKDKLKKNSTNVMLESSVPTTQTCPECGCLTKHDLDKRIYHCSHCGFENPDRDIHSANMMVLLSGYGTYRSLNTDAVSTERMVGFLNNLSELGVVVTTNSMEAYCL

SEQ ID NO: 61742 - protein, 418 aa, unknown
  TnpB Polypeptide
MYEERNCKIRENGKATRERRSHMDCCVISVKIQENRLSKAKLEKLIRCFLEAKWLYNAVVASKTLAIEDMSNVQVKLKDSFEVRQLNTLSAQMKQSVVDNVKQNVFNLSKAKKTGHKVGRLQFKRECNEINLKQSGKTYIIKGKNKIRIQNIGVLVVNGLEQINLDEVEFANAKLIRKPSGFYIHLTVYTKKQPQSNTEKEVLGLDMGIKDQLIFSNGVKVNFYVEESEQLKGLARKLSRQVKGSNQYKQTLARIKRIFEHQNNKKSDVVNKLNNILKQNYIICFQDELLNQWKRKKSKRKFSFGRKVQHGILGRVKNKLKQNQSNHMLESSVPTTQTCPVCGCLTKHSLDKRKYHCEQCGFENPDRDVHSANMMVLLSGYGTYRSLNTDTVSTERMVGFLNNLSELGVVVEDTTRSM

SEQ ID NO: 61743 - protein, 361 aa, unknown
  TnpB Polypeptide
MLIRTIRCKMTITQETEQAFLETRETFAKACNLVLAKALETKTRNAVALHRLTYAEIRKECHLSANLAVRAIRRVAGSLSQKKKRRPKPNQFRPGSIEYDARIFTFWEAGFRVSLMTLQGRKKALLDVGEYQKKALKGQKPTCATLVKRGNEWYLNIAIEEPEPPLVEGIAIGIDLGLRNTAYVSTGFYASGQDRQAFKKRREKIRASLQSKGTRGSRKKLRTLSGYERRRIRHDNHNLSKQLVQEAQRHNAGLIRMEQLSGIRERTLVWNPHRNRLMSGWSFYQLQQLVTYKARRVGIAVELVDPAYTSRVCFECGQQGLRSKDVFQCIACGEKHADHNAACNISIGGAVVNRPKLTVCV

SEQ ID NO: 61744 - protein, 142 aa, unknown
  TnpB Polypeptide
MRKNRQEYRKVLARLYRKQANQRRDFHFKLAKELCQKYAVICLESLSMKAMQQGHGKKVNDYGFAAFENILEYVGRQMGTKIIKVDTFYPSSQICHDCGYQNKEVKNIRVSEWTCPSCGIHHDRDRNAARNILSEGLRLLTA

SEQ ID NO: 61745 - protein, 416 aa, unknown
  TnpB Polypeptide
MKCAYKYKIKPTTKQQHMLLQFFGCARFIYNWGLDKKIKTYKETKKNVTYIQLAHELTLLKQTDEHKWLNDCSAAMLQQSLRCLDNAYTNFFRNKKGFPKFKSKKHSKDVCKFINSVHFDFIKSKLKIPKVGWVKLCPNQQFDLSKVKLGTLTVSRDKCGDYWCSIVVDDGKPNKSKAKICEETAVGIDLGIKDYAILSDGTKYGNPKHLEKGQKKLKQLQQRFARSEKHSKHHEELRIKVARQHRKIANKRNDFLHKLSSDLMKRFDTICLEDLNVDGMLKNHHLARAIQSVSWGEFVRQLKYKSEWYGKNVVFIGRFEPSSQICHKCGYQNKDVKNLNVREWTCPICGEHHDRDVNAAKNIKQFGLHPQSLVAIENKIPQGSGIKDGEGNVVAHPVKRQYNKSCNTLQSGSTGI

SEQ ID NO: 61746 - protein, 392 aa, unknown
  TnpB Polypeptide
VLKNPVAVATIRTCRKSYKYRIYPTKSQVKTLEKWLDLSRELYNSALEERRESWKEKISTSYNKQAKDLPELKKTRPEYKEVHSQVLQQNLIRLDRAFQSFFKRVKNGEKPGYPRFKSADRFNSLVYPQAPGFKLVSRKKLHLSGIGEIKIKLHRDVLGEPKTCSIKRTPSGHWYASFSCDQVPVEDWPEATGEVGIDPGLESFATLSNGENETKIENPRWFRKSEERLAKAQRELQPKKCGSKRRSKARQRVAKIHEKIANQRDDFQHKLARKIVSENKLIAIEDTDVKEMLETSPTSRNKSIQDAAWNGFSMKLSCKASNAGRIFVLVPAPGTSSTCSQCGFHKKKELSERTHQCGNCGLVLDRDVNAARNILRLGRSLLGSNSREAAGL

SEQ ID NO: 61747 - protein, 398 aa, unknown
  TnpB Polypeptide
MLILEYKLDGKPTQYAAMDEGIRVVQFLRNKCLRAWMDRAEEGQSASAMSASTAVLAKQFPFAAALGSQARQAAAQRAWQAVQRFYDTCKQQQPGKKGYPRFQRTNRSIEYKVAGWKLAPDGKHITFTDGLGIGRLRLVGTRSIETFPLAQIKRVRLVRRADGYYCQFCVDAQRTLIHVPTGKHVGIDLGLLSFYTDSEGNVAENPRHYRKAEKKLGTLNQRVHRKPKGSKNRGKARKRLGKQHLKVARQREDHARKLACALVSSHDLIAYEDLQVRTMVKNHHLSKSISDAGWSLFLQWVRYYALLHGVECIAVPPAYTSQTCSGCGELVRKSLSVRTHCCPHCGLILDRDQNAALNILQEAYRILGHRKTGESAFGDSRERLGTEAPLAGDHMASR

SEQ ID NO: 61748 - protein, 401 aa, unknown
  TnpB Polypeptide
MIEVNRKVTYRLYPTRRQEAELLRVKEMHRQIYNAALEERIGAWKKTRKTISFVDQCRSLTQVRNENPEYKTLNAQSLQITLHRLHLGYQAFFRRIKRGEKPGFPRFKNKDRFHGFGYSSQTGWDIEPGINPKNGRDRNGKIRIEKMWVKIKGQTRNKGQYSSMEVVRRNGRWYAVATMQCWPVRGKGNVAVGIDLGLETLATVAYDTHDRKIEKINNPRFLKRQLQKLKAAQRVLAKKKRGSGRRGKAEKVVVRIHEKIANQRRDFIHQETAKIVGKVDLIATETLKVKNMVARGGARKRGLNRELHSASFASFTKTLKCKAEEAGVRWVDVPVKTVKPTQRCMDCDRVEKKPLSERVHRCGCGLTIGRDENSAGSMLVYALKETGREPAWRGGQELVAL

SEQ ID NO: 61749 - protein, 530 aa, unknown
  TnpB Polypeptide
LDVRGDCRPWFGDELSQEGLEATAGRGDRRPGRPAGHCPQGPIAALRRGTGVCHLRGQECRGRDPQSRRGHDVRGRLGERRAGDHYSVLGAPVRQPFAQEPEAARRREASCGGCGMLIAHKIALDPNNVQATYFARAAGTARFAYNWALAEWKRQYEAWKADNSLPKPSQAALRRRLNAIKAEQFPWMLEVTKNAPQMAIIQLGAAFKNFFAGRARYPQFRKKGVHDRFTLSNDQFSIDGSRIRIPHLGWVRMRETLRFTGKIMSATVSRVADRWFVSIVVDAQDDSHLPKAKNEPQDKNQVSGEFRRSQNQGAVGVDLGVLALATLSTGEKIPGPKPHKALLGRLRRLSRSLSRKVKGSANRRKAKAKLAKLHARIAAVRSDALHQLTTDLTRRFHTIGVENLNVRGMVRNRHLSRSIADMGFFEFRRQLEYKAAMRGGRVVVADRFFASSKTCSACGKKLDELPLSMREWTCSSCGVVHDRDVNAAVNLENMAVSSTVAACGEEGAGRRCKTAVKPASVKQEVSFEPV

SEQ ID NO: 61750 - protein, 409 aa, unknown
  TnpB Polypeptide
LKIVADDDYLRRTAITRPILTDEQQSSLDATINEWKTACNISSQIGWEHGETRKIYLQDFAYDDIREDTRLGSQHAVLATHQAAAALSGVDEIEDLDEDYKTSQPTFTSNTVKYDTRTMTLFDDGSVSLSTVDGRIRCDLNLPDEEDGYQHEYLEDDDWEVTESTLSKREGEYYLHIGFRKAKPEKQVEVQDDDEDRTVLGVDLGIVNIATTSTAYFASGRELRHQHREFERIRGGLQQTGTQSAHRTIQQMSGRESRYVRDQLHQVANQIIEEALDRSCEYIAFENLKHIRERAPPVKEFHQWAHRQLVDLVEYKAVTKGICVEFVSPRNTSRRCPECGHTSKGNRVKQAIFECESCGATQNADYVGAKNVGWRFVRRGLQSSRRMGDSQLALKSGTVAPDRGFVPSD

SEQ ID NO: 61751 - protein, 441 aa, Nocardia sp.
VGRFTSFRFCLDPTVERPSLLVRHAGAARFAFNQCLAMTKAALRGRRRNKDVRVPWTGFDHINGFNAWKKTEQAGRVFAVDSSGSASLVAVGLGWRNQVCQQVFEEAAVNLGRGLVAWRDSRTGKRAGPRVGFPKFKLKSSTVPSFRLRNKHSPRGRPMIRVGEDGPRSVTLPVIGAVRVQEDTRRLRRMIAAGRAKIVSVTLSYRAGRWMISLVTEATDLHPAHRHPVRDGGEEGGWVGVDRGLSAFLVAATSDGAEVDRITDQPKPLVTGMARQRRLARSVTRKQRGSRHRRTAVVRLARHHHRIRNIRAHFLHQVSNRLVKTHDRLVIEDLNIAGMLRNRCLARAIGDAGWGEFARQLRYKQGWRGGDVLTVDRWFPSSQLCSRCGASTVGLTLADRIFTCGCGARLDRDLNAAVNLATRGEQLDLCPSPGARSTSPG

SEQ ID NO: 61752 - protein, 402 aa, unknown
  TnpB Polypeptide
MAKKQGYAITTCCFRLRCKHPEWLEETQKFYNQIEKFYYDLYLEHPELWKENSQNSLRGVEQLSIPGRRGNPVESPLPWDYALLYFRRAAANAGIAAAKSYLVRSENAYVGRSDSFDSAVTYYKGMYRDLTSDGITLRVWDGTTWKWMHCRLYGNAFPEEAQIMSPSVAFKKPYVMLHVPVKTVVNDASGVKDRIAERRNVCGIHFANQNTFAAASVMNSEKKEIAVRFFKGGKEYSHQCAAVLQHIDRSFGSHGENAGGQVNRKYWMRLKHLNDHYAHKVSREMIDFCKIHDVGIIAFPKYVEEYANYVKKGAGNYSALHLSTKIREYLTYKAWKEGILVIDVNAKGMHETCAACGKKIVSTDKKAQECVCENGHRTNRYLNVARNTANRCLDQFQKKAGK

SEQ ID NO: 61753 - protein, 502 aa, unknown
  TnpB Polypeptide
MNNIENNTLESSKDLDANQIQKLILVLKTYKYRIYPTTEQIEFFHKSFGCERFLYNHFAGIQLEAFKSKSPLLSNYSLDKLIPKLKKEKSWLKDVNSQSLQKVTKDLKKGVDTFFRKCKKGEGSNLFNFKKKNSFKQSFGFPSNGQVKFIHNYKIKKKNKKKICYISIPKLKTSIKLLKHRNFDQSAVIKNVTITRESDGYYMALQCEIENSKNESKSLDFNDDIPKKLSIVGGDLGVVKLFTTSDGDVFSPIHPFQTNQLKLKELQQDFNKSHANYKAKEKDKIKELKEKNQYNKENFYYAPSKRYLRLKSKVRKLHQKIARIRHNYLHNISKMLVDNYDHIILENLDVKKMTQSNKGTLEEPGENVSQKSQLNKSILDQGWGILKQFVDYKLEWKNGHKSIKIPPYHTSQTCSCCLHQSNLNRENQASFDCKKCDNIMNSDVNASFNINIIRLGLIKMGFSKEKSHEYVLRSYLINFRFRLEEKHPWAMGDKMGISLRVN

SEQ ID NO: 61754 - protein, 301 aa, unknown
  TnpB Polypeptide
LFPTSNATHSTEPVEPSFVLPADSPTPYERYVLSEDYEFRESTLRYDAATDEFYRDISTRRKDGDGDDAEVPADTGHPDQTVLGIDLGVNSLAVSSTGTFWQGDDYDHWCREFQKRRGEMQQRSTQAAHNALLRLGKREKAWRKQYIYTVAHELVTEAVEHDCDVIVFEELTDVRERLPQAKWHHVWAFRRLFEYVEYKAPEQGVAVEQVKPNHTSQRCSRTDCGFTHEDNRHGERFECRKCGYGVNADYNGAKNIGLRHARKRTHKLRSSPTSGNGDAEVDLCVNGGTLNGGSHQPVAGD

SEQ ID NO: 61755 - protein, 300 aa, Pyrobaculum sp.
MMAYRTVLIRRKVEEIPSEKLVEFLGAQGGINKRVALRGDQFSVDLQGGEIRIGQGEGAIVIRLRRAEVRGILQRLKEGGRLEEAYAWVGPTGRSDLFTFNVALVFAKETEPYQPTRLTAVDVIALHNGVVWATVDGERVLQKGVYRPDLGKIGRIQREISRLEALCASGEEDHCERVAALRRRVKNILRQFEDETAKKLVMEARRNKAVIVVSVPDPRQVSDRGIRLNAERLRRRIRELASWYGVPYREDRLYSAVCPRCGIEMGELSDRKLRCQQCGFEAPREKVLALWAQRRFSELI

SEQ ID NO: 61756 - protein, 471 aa, unknown
  TnpB Polypeptide
MKSKKNKDYLVFTYPSRLHLTKEGKNILHMVGLFLSTVRNDDYSYMVSHYRNDNPIPSKSERRKRLMEKYEISRREADYVVYANSDQYQLVLRTSKENIANWNKEITRLQKKLPSLYGVKKKNATDTIANINKKIRKASSKSPSCCFGGSKLQRKITQNHWDDSLREDWDNKRLFLYFMGESGKKCGNDTIKLDSNTGELSIKISSGMQQALKLKNREYVLGEATIKHGKKNVQHSIEQRVATTYKFQWDCNKKEWRLHITTRVEKKSLHKEYGISHIPGRACGIDQNSGFVSCTIVDKHGNPIAQREFHHSHSKDIQALVHSIYLWLKKNHCNEVYIENLKSLSLIKRSSIGSAKALNRTVNKIPYYTFSTLLKRKMEICGGKCTKVNPYHTSKNTKFWKSEKYGKTIHQKASYLIARRGMNLSIVPRCIRQSPQDNSVCLGVSHSKNGVGLVNDIHDNKISNDSVCSDL

SEQ ID NO: 61757 - protein, 393 aa, unknown
  TnpB Polypeptide
MRKAIKVRIYPEPEQVAFLNRQFGAVRYVWNKALWAKRHAWRTHGLSLSPKHDLKPLLAAAKKTERRAWLKDVDSIALQQSLINLDRAFSNFFNPKLKAKFPRFKSRRSEQSSYHCMNVDVGPDWIKIPKIGRMPAVVHREMSGKLRSITVTRSATGKYFAALLFDDGEALPDKPLSLDEDRIVGVDVGIKEIAIQSDGKRTPNPRILINAAHNLRRKQKSLSRKRKGSANRNKARRMVAAVHERIANKRNDFQHKLSRALIDDNQAVCIETLKVKNMIKNRKLVKHIADAAWGGLTIKLGYKAEWAGKYLARIDQWLPSSKSCHDCGWIHDDLSLEDRFWRCLGCDTIRDRDLNAAQNIKREGIRHLLATTAGLVVAACRGLRKTGTLPAAA

SEQ ID NO: 61758 - protein, 435 aa, unknown
  TnpB Polypeptide
MTVVTQAYRFALAPTPAQRRGLASHCGAARFAYNWGLALVKARLDDRANGSAVGVPWTLPSLRKEWNQAKGEVAPWWAENSKEAYSSGLDALARALANFSDSRAGRRAGRRAGFPRFKRKGRARDACRFTTGAIRVEPDRHHVTLPRLGTVKTHESTRKLARRLEAGTARVLSATISRTADRWFVAFTVEADRHLPEGNGQSSVVGVDVGVRHLAVVAGHPPEYVANPRALARQQRALARAQRTLARRRVARLHARVASRRRDHLHKLTSRLAHDHHTVVVEDLHVAGMVRSRPLARAVADAALAALRRQLAYKTRWYGARLVVAGRWYPSSKTCSGCGLVKTKLGLAERTFHCEGCGLAVDRDENAARNLAMLAVAASGAETQNARGPDLSPGLPGRRGRSGKPAPAASRTSLAPSSSNRRPPEPSNLLKLRQR

SEQ ID NO: 61759 - protein, 418 aa, Okeania sp.
MWLEVILLYAKKLELKLSNQERSKMAQCAGYARFIYNYGLSMVNGTSGMTKVNKGGKKVSFSYNQRILEAKKVFTNYVKKQSEYAWTNNYSSRIYQSAFQHLAEAFKQYKEGISKYPKLKSKKDRQSFTVYDGNGKVTIPSGKKIKIPTLGTFRLLESIPYTTASQTFTISRTGNKWFVSFSIEAEKLPFHPLLDERLQETFGIDVGLKQFASIADQEKEKNEVVSLPESIKADQLKLSKFQWRNRNKQIGNKGKLPSKNAIKYYKKLALYHAHIANVRRDFIEKTTHYLVSQVKHVCLESLNVKGIMQNGKLAASIARQGFYEFRQRLTTKIVGSGGTVVLADQWFPSSKTCHSCGYINQELKLKDRTFDCPHCGVRIDRDLNAALVLSQYGEVNQKNRVGCTRIYACELEEAVLPG

SEQ ID NO: 61760 - protein, 309 aa, Okeania sp.
MRCRSGAPQQALRDLERAFKNFLTIPERGFPVFKKKGRKDSFYLEGSIKIFQGNYIQLPRIGVVKTYEILPSVPVKNVTISKKADSWYISFKYNFEQDTTEKVGETIGVDIGINTLATCSDGSKFANVKAYKQAKKQLVRHQRAVSKKVIGFLRNATQTKNRRKAVKKLAKVHKKVVNIRADALHKLTTWLAKNHSTIVIEDLNVSGMLKNHKLASAIVDCGFYEFKRQLTYKCEWYGSELVIADRFYPSSQICSNCGHQQKMPLHERTYNCANCGFSYGMLPYGMLRKRKQADRDFNAAVNLENYVNK

SEQ ID NO: 61761 - protein, 537 aa, unknown
  TnpB Polypeptide
MISDEEYKKLLKQFHKLSDRHILVVETDMSSSDIKKVVVLSDRIRKAGNELVGLMSKNYDQLMRTKKYRKLLKLYGSTEDKKKRKDLANQLNEMQKQYNVTWDYCRTAMIPIGKKFGIDAIFALTKAEDIWRGMEKCFYDNGNTIHFSKYGDLPCIRAKQINRGIPMSVKDNQLQFKVGRTTFGIKVVDRFQTDEVNAILDYLAEPEIIDNKAIQALLDEAYCIDTYRPCYATLVPKHIRGKYRVYLHLTIEGKAKPKYDKIGNPRHKLGKGIVGADIGTQTVAYTSDTEVGLKNLSERGNSIQTSERKERLLYRAMNRSRRATNPQNYNVDGTVKKGRKTWRYSNHYKKLKSKHQELCRINAVNRQLAINEDANHLRSLGDVFITEPKNASKLMKRTKETTVNNKGRFKKKKRFGKSIKNRCPSGFQTTMEKKFKTSGGTYIEVPNNYRASQYDHTADDYIKKKLSDRMYKLTNGTLVQRDWYSSFLLYCYDYKAKDIDKNKCISVFDRCYDKEKALIEWIKANRIKVLNSGIKIA

SEQ ID NO: 61762 - protein, 330 aa, unknown
  TnpB Polypeptide
VIVQKAFKYRFFPTDEQAAQLAKTFGCARYVYNQALEFRSTAWQLEKKSIGYHTTAAKLTVWKKEPEKAFLSEVGSVVLQQSLRNLDTAFTNFFEKRAQYPKFKSRRDRQSARSATNAFIFRDGQITLAKQSAPLDIVWSRPLPNDAKVLNLTISRDTSERYFVSILVETDVKPRRRAKTEVGIDVGIKTLATTSDGEKLENPRPLVKREQRLKRLQRRLSRKARGSNNRKKARLKVARLHAKISDARRDTLQKFTTRIIRENQAIFVEGLNVAGMVQNHNLAKHIVDAAFGEIFRELEYKAKWRGRTYFPLDSFFSVVEVVFVVWSSAG

SEQ ID NO: 61763 - protein, 257 aa, Micromonospora sp.
VKTIQAYRFALDLTPGQERAVRAHVGAARVAHNPRHLVAAQARLRALGRASSRKSGPDRRNGCRPSNRWQRASDRLGRAHARVANLRRDGLHKLTTRLAREHGSIVVEDLNVAGMLRNRRLARHIADAGFAEIRLQLAYKTGWNGGRLLVADRWYPSSKTCSGCGAVKAKLALHEREYDCDACGLVIDRDHDAALNLAALAAELNNTAGSGSVAARGADQKTHTRGQVAVKREPGTASAGKTGTVPTARRGNQSRAH

SEQ ID NO: 61764 - protein, 443 aa, unknown
  TnpB Polypeptide
MGRENPTPALAGAKPLVGGDESTPVKKSENIFQKRRNVDKKYRISIYKSIEVFIEMLKAYKYRVYPNQEQKVLISKHFGCARFIYNQGLATKIKSYEETGKSPSCIQLTNSMLMDLKDDKSHLWLKEVSAQSLQMSLRNLDNAFTRFFREKKGFPKFKSKHKSIQSCQFPQSVRCEFKKKRIILPKIGGLKTVFSREFEGKIKTTTLSKTSTNKYYVSILVDNLVELPKKVGVEEQTTIGIDLGIKDFCIISNGEKISNPKYLRNNIERIKVLQKRKDVKKKGSTRRFRQNKKVEKKHEYVKNIRQDFLHKLSSKIISENQTICLEDLNVSGMMKNHCLAQSISDVGWGKFVELLTYKADWYGKNVLQIGRFEASSKICSVCGEVNKLLTLKDREWICKCGVKHDRDLNAAANIKKFGLIRYEKYKNYSGAERPGEPVEMSGR

SEQ ID NO: 61765 - protein, 415 aa, unknown
  TnpB Polypeptide
MDRYTAKKLTKKRRQTQVCHTFEIKIDKSHLSKSTINHFDSLFKESKWFYNYCLSHKNVNDADYTVKSVPVRISKKGEPELYEDRKFKALSSQMKQSIRTRLFNNLSSLKALKDKGFKVGRLKFKKLINSIPLVQYQKTFDFDMEKSRIRIQGCKPWIRVIGLDQIKDNYEIANATLVRKANDYYFNITTFEMKPEKTLEDDSIGIDFGCETQLTFSNGIKIEFQVPISKRLKRLDRKIMKKLRKKSKKKIKDQIKRQKEYDKINNKKKDIRKKIVSAVVNSYKYVCFQDESIYEWKSSGHGKKIQNSSIGSILSDLKSKSEVPIEVDKYFPSTKLCPICKKKNEIFQSERIYSCDCGYVNDRDLKASICIESEGMLKIPMDHRDFKTREILSSTFFDKLMKINNIKVSKIESMN

SEQ ID NO: 61766 - protein, 403 aa, Actinomadura sp.
MARTVKRAFKYRFYPTHEQTAELARTFGCVRLVYNRALEERTRSWYTEQRRMSYVDTSAALTAWKKTDELAFLNEVSSVPLQQALRHLQAAFAAFFDKRAKYPRFKAKKKSRASAEYTRSAFRFRDGNLTLAKMGGPLDVRWTRPLPAGAEPSTVTVSRDAAGRWFVSILCEDGITRLDPSDKAVGVDAGLTSLVTLSTGEKITNPRHERRDRERLTRAQKDLARKEKGSANQEKAKRKVAGVHARIADRRRDFLHKLSTRLVHENQVVVIENLNVRNMVKNHPLARAISDAGWRDLRAMLEYKADWYGRELVVIDRWFPSTRTCSECGTIAGKMPLGVREWECDGCGARHDRDVNAAKNVLAAGLAVSACGAGVRPQRESSRTGRSASKQETHGATRGLPRL

SEQ ID NO: 61767 - protein, 368 aa, unknown
  TnpB Polypeptide
VVSKLHKAFKFRLYPTKKQASLINRTIGCSRYVYNHFLNERIVAYETAQETLSYAKCCTNLTKLKKEISWLNEVDSMALQQSLRDLDNAFKKFFKGDANFPKFKSKKNIRQSYRTNANKTSIQVQNNKIKLPKLGWVKFAKSRDIQGPILSATVRKTPTGKYFVSVLCDVEIKPLPETDQQIGVDLGIKDFAITSDNQVFSNPKYYRKYERKLKKLQQELSRKQKGSKNRNKARLKVAKAHEKVRNCRMDFLHKLSTKLIRENQTICLEDLSIENMVKNRKLAKSISDAGWTEFRSLLEYKADWYGREIIIIGKTFPSSQLCSSCGYQNKEVKNLALRKWLCPSCGTYHDRDINAARNILKEGLRLAG

SEQ ID NO: 61768 - protein, 479 aa, Pelotomaculum sp.
VIIDAHAALSSRIELQQIEIAKLKERIEVKQKKISELQRELDGKRAMLQSCVKISKASKQDKPRKKDLKLKTYKGCRERQLPSGLYAVCCKKHSRIYYNLYNFEHGYLRPEIKRLKNTISQIRHSINIMKARLKRMESRLPGITFGTKRLFRAQFTKYWYDCGRWKAEWRSARLKSFKVVGRLDAACGNFVFKYRPDAKTLDIVLSKDRTITVKDVYFPYGQGLLEAVLNTRAPVTWEITDHGEYYIFKAMFTPPEVKRNYFTGDGVIGYDKNYDHIAWAETDGEGNLLRRGKIPFNLEGKTTGQVNKILEAAAIGLVKIAREAHKPLVGEELDTSNSKTKLKYGSKERNRKISRFAYQKMDRSIESRATKEGVGLILKDPAYTSMIGKMKYMRAFGVPIHIAAAYVIGRRRLGLKEKVPAAYRKIVTDKNLKRHHWSYWRFLHRHLNGIQTKDFYQLALNKQVFLSVKGVKATLSSEA

SEQ ID NO: 61769 - protein, 125 aa, Caloranaerobacter sp.
MVEVTYILYNTIKIINENQVIVLEDLKVKNMLKNDKLSKSISDVAWSEFVKMLEYKAKWYGRTIVKIDTFFPSSQICSTCGYKNKEVKNLNIRMWECPKCKTIHDRDVNASINILNEGKRTLGIA

SEQ ID NO: 61770 - protein, 211 aa, Mycoplasmataceae sp.
LLYHIKNGKYYACFSSEVEPKFLPKTGKKVGIDLGLTSFLATSESKLYQAPKTYQKSEKKLAKVQRKVSRRIKRSKRRKKAVILLAKQHEKVSNQRKDLAHRLAKELVEKYDGIAYEKLAIKNMVKNRFLAKSINDAGWKLFLTILAYKVEETGKQGIGVSAKNTSQICSECDKQREQKLKLSQRKFTCSFCPYSGNRDINAARNIFKRAK

SEQ ID NO: 61771 - protein, 178 aa, Mycoplasmataceae sp.
LGLTSFLATSESKLYQAPKTYQKSEKKLAKVQRKVSRRIKRSKRRKKAVILLAKQHEKVSNQRKDLAHRLAKELVEKYDGIAYEKLAIKNMVKNRFLAKSINDAGWKLFLTILAYKVEETGKQGIGVSAKNTSQICSECDKQREQKLKLSQRKFTCSFCPYSGNRDINAARNIFKRAK

SEQ ID NO: 61772 - protein, 184 aa, Lactobacillus sp.
LIKSAIISRYSSGKYYISLLCKEEISELPKANFDIDLGITDFAILSDSQKIDNNKFTSKMEKKLKREQRKLSRCALLAKKKGIELCEAKNYQKQKRKIACLHEKVMNQHTDFLNKLSTEMIKNHDIICIEDLNTKGMLRNHKLAKSISDVSWSSFVTKLHYKAEWYGRKIIKVDKWFPSSQICS

SEQ ID NO: 61773 - protein, 516 aa, Lactobacillus sp.
  misc_feature (486)..(486): Xaa can be any naturally occurring amino acid
MKSMAKMKYHYGLKMRCYPSDQQKQLIKINSDASRFIYNEMVAINKELMQLRRVKLPIDIVRDRIKQLTMRQNAKQMSNHYQFLEDKRIDSLTKANAIQNYRKAWNAFRKVHTAGVPKFHRKNYRWRYQTNCQYPGQKTALLTNGTVCFLDNSHVKVPKIGLLRVAGSQARLLKRICETRIGTVTLTKDSADRFFLSMQLASDESFVKVAKATHGHVGIDLNTDNFLTDSGGNIVPNPRYYRTIKGKLAKEQRILSRRQQRAKKEHRSLRDSKNYQKQRLLVAKLHAKVMNQRHNFLQQISTALIKNHDLVVAEELRSKNMLKNHALTDSGGNIVPNPRYYRTIKGKLAKEQRILSRRQQRAKKEHRSLRDSKNYQKQRLLVAKLHAKVMNQRHNFLQQISTALIKNHDLVVAEELRSKNMLKNHALALSISDVGWRTFLGMLAYKAKLYGRQFITINPRNTTQTCCDCGFVMGTNGTDKLTLDDXKWTCPNCGIHHIRDWNAAKNILDKGIAKLA

SEQ ID NO: 61774 - protein, 511 aa, unknown
  TnpB Polypeptide
VLDRLTPAGSSGEVYLGTTGTSHRSGTVPFVEQPYQMRAVVVPLDPTPSQEQLLRSYCGAARFAYNWTIGLVKENLDVRTREREQGLGESDLSPSLSWTPYSMTPLWNSLKDDVAPWHHDVTMHAFRSGVTNATVALKNFSESKGGVRQGRSVGFPKFKNRHSKQSVTFTETRTQCGWFTENSRHVRLVLPRRAADPRIVRRREQLQWIHTTESLRRLKEKVDSGDWTVLSVTMSFTGGHWQASFSVRQLVLPAIAPKKRLGPLVGVDLGVKYLATLSVPVSGVSDENGHVANPRHLDAELERLARLNRQLARCVKGSKNRAKILRRRQLLYGRISRTRDLYLHRLSATLASSFETVVLEDLDVTGMAKKSKTSTHGRSRSILDASFYELRRQLTYKANDRGHRVITIDRFYPSSKMCSHCGETKAKLALSDRVFECSTCGIRLDRDVNAARNIHREGLRLLGNETTVAGHQPETLNADSRDRKTRAPRCDGGDRYQSRTTQPIKESLHSA

SEQ ID NO: 61775 - protein, 434 aa, Hydrocoleum sp.
MSSYGCQQNLINPDKELIAILEFICSESHKLTNCGIYYGRQLFFKSKKIIGKYDLEKEYKSNKHYQALYSQAAQQILRSVAESFKSFKELNKKYKKGNLHFQPRIPKYRKKDGLAIVTYPKQALRIVGNQIRIPLGTTIKRWFKLDSFLIPMPSNLQFVDLKELRILPRNQCFYVEFVYKKEVAPQHELNPQNVLGIDPGINNWLSCVSNVGTSLIIDGCKVKSLNQWYNKRVSTLKEGKPQGYWDEQLAKITEKRNRQMRDAVNQAARLVVNHCIKHQIGTVVFGWNQGQRQEANLGQVTQSFVQIPTAKLKERVKQLCEEHKIKFVATEESYTSKASFLDGDFLPTFGEKLEGWKASGKRVKRGMYQTGKGLLVNADLNGAANILRKVETQLGINLVKVCRQVLTLATRLRIWETKAKKRNRTALASYVATA

SEQ ID NO: 61776 - protein, 384 aa, Lactobacillus sp.
MVLRTQKVRLYPNKTMQKVLDDLCDYRRYCWNAGLALWNDMYEESLILEDKKLKPTQYKVRDEVVANKEDWQYRLSARCLQLAISDLNKAWKNFFDKAQVDWGKPRFKSKKATRQGFKTDRAKIIKGKLLLDKPHRIKNWYDIRMSGAKLLTGELKVVSIYRENGKYWASLPFEVNIETKPKTDHVTAIDVNVGHINYTEGKINTLPDNPKRLYKRIKHYQRMLARKSVVNGKRATKSNNYVKTRAKLQRDYRKVANIQHDIMQKFTTQLVEEYDKIVIEDLAVKEMQMTHVASKGLQRSMFGYFRQILSYKCDWYGKDLLIADKYYPSTQRCSNCGYVKTGEEKVGLNGNLKYGTKHNEYICYECGNIMDRDENAVLNLLALI

SEQ ID NO: 61777 - protein, 258 aa, Thermofilum sp.
LREKEREIAPLTVHRTVRIQWRPERAQALKAQIILRVQRPRPAQPDPKSALLCFIDVNSRYGVAAVIAAYEEERVKVFETPKFRPPNQARRLKEAAKRLRAAAHGSKPSVNYALARLSMKYDAQGWVKSAAARIFKKALERAKGRSVLMNFDVPDSASVKGSCLQRTLLSIRRVAENLANWYGVYTTFECFPSRRCPLCGGRLKEYRTKRTRVMRCQQCGFFEDRDYIPFYHWLRALGLPLPEHPLAPLPKPNDPGAL

SEQ ID NO: 61778 - protein, 485 aa, unknown
  TnpB Polypeptide
MRAKFKGSVPSSFDGQIYTQVFTCYQNKFDAIQHRLVFEVPTFQGFEYYKRNTKKYKKGDLKRVLIEKKHTPLSSCLTYLARYGNEGTMAYINSNIDKCDTDKRDFYNNIIRCCEKYGFERLYELALSKRKRIINKYTNNPIEFRSLTFSGRCRKKKIIEYNHRFGSVINSFISLSGFSRNSFDIPVSFNKGWHGNMKDYRKRNPDYIYTLTFDKKKHQVNINLCKDGERYIPEPNGKTIGIDVNCKHNLFSLSDETTYDYDRKLVNDFCKLSLEIDRLKEDRDYVIGKRKQRKLDTLKTKMMKSEQQLIANMCRTLQSQGVGHIVMENLDNGFGKCYVKDSNNEDINYNRKVKFLGLSSLKQEVEHIARKYDIAVSTVQASYTSKMCPICGCIEDENRPDQETFECVECGHKDNADFNAAKNIRNRVLVTVLRDKLLKQLDNGAFEPRMLSREKVKEALLSFRRSLSKVGSECTGSRMTTFKDV

SEQ ID NO: 61779 - protein, 401 aa, unknown
  TnpB Polypeptide
MRKINKAYRFRLYPNRKQTELLAKHFGCSRFVYNYFLNQRKEQYRLTGKSDNFYAQCKTLTTLKKQEETAWLKEVNAQTLQFAIRSLESAYTNFFKKRAKFPNFKSKHSKNSFTVPQSASIAGGRLFIPKFNEGIKCRVHREIKGKIGKVTITKTSSGKYFVSVFTEEEYVTPLKKTGKSIGVDMGLKNLLITSDGETFNNNRYTRKYECKLAKAQQHLSRKKKGSRGFENQKLKVARLHEKISNSRADYLHKCSISLVRRYDTICIEDLNVKGMTKNHRLSKSITDASWGKFITMLTYKTEWYGKKIVKVDRYFPSSQTCNVCGYVNKQTKDLSVREWECPHCHTHHDRDINAAINILHFGLNDTSSGTGDYTGGEEVRADHLESHSSVKPEANEFLTQG

SEQ ID NO: 61780 - protein, 449 aa, unknown
  TnpB Polypeptide
MVVQEDRKTFYDDLCKGISSHLLSHKDIDKAISKWNSSSCAMNVRSWFSTKQITVHNKNSQDNCIQTFFPVRTKCMVSDAVVTKARRIRIYPTHQQKQLFKQWFGVERKVYNTCINHFNKKDIEFKGWMKMSTLVLHSLTENYIKSVPYQIKNIAVKDSYTSWMTNCKKTKKTGKPFKLRYKSRKNPIQSCYILKQAVSESGIYHTISGKLKLSEREFLKNDICDCRLIYDHGRWYLSVPQKFSNVATENQGGIVALDPGVRNFLTYFSEDGRFGWLGIHAFDRILTLNLKRDHLQSRLALTKDKRKKGKLKRTVNRTYHRIQDLVDELHWQCINYLTHNFSVIVFPPFEVKGMTKKGRRLRKSAVRSMLSLRFFEFKERLKQKCKECGVMYIEQNESYTSKTNSFTGELITNLGSKEWFMYDGIKVHRDLNGARNILIRAMRDSSAAG

SEQ ID NO: 61781 - protein, 449 aa, unknown
  TnpB Polypeptide
MVVQEDHKAFYDDLCKDISSHLLSHKDIDNAMPLCDKSSCVMNIKSWFSTKQVIACSSNTQNNYIQAFFISRAECTVSSATMLKSRRIRIYPSQQQKQLFKQWIGVGRKVYNTCINHFNKKDIEFKGWMKMGTMVLSELTEDYIKSVPYQIKKIAVKDAYTSWQTNCKKTKKSGKPFKLHYKSLKNPVQSCYIPKSAVSESGIYHTISGKLKFSEKEWFKNDICDCRLINDHGRWYLSVPQKLTTISTENQGGIVALDPGVRNFLTYFSEDGRFGWLGMYAFNRILTLNLKRDKLFSRLVLTKDKKKKSKLKRSLNRTYHRMHDLVDELHWKCINYLVHNFSVIVFPPFEVKGMTKKGRKLRKSVVRSMLSLRFYEFKERLKQKCKECGVAYIEQNESYTSKTNSFTGELMTNLGGKEWFVYDGIKIHRDLNGARNILIRAMRDSSAVG

SEQ ID NO: 61782 - protein, 380 aa, unknown
  TnpB Polypeptide
MLRAIKIRLYPNKAQEQELNKVLGCYRFVYNQMLALKQKEYDENKKSLGLTELSKYFHGTLLKDEQYAWLKEQNTKVMKQAMRQMLSAYDKFFKQHNGFPNFKTKKDKQSALFPYEAISKKNTFETKHISLITSLKDIKFRCSDLYFRRLQKYNKDIRSATLSKTKSGKFFLSILVEMDDTELKRFGHTNKQVGIDLGVKDFVITSDGEVFENKHFFKKREKQVKKLQRQISRKVKGSNNRRKTKIRIARLFERITNKKVAYIHYVTNELLTYFDTIFMEDLNVKGMLKNHHLAKAIQEVGFYKFKEVFINKALVNDKKVVFIDRFYPSSKTCSGCGYKKRDLKLSDRFWVCPECGSEHDRDINAARNILLEGQRMLAAV

SEQ ID NO: 61783 - protein, 378 aa, unknown
  TnpB Polypeptide
MLRAIKVRLYPNKTQEQTLNKVLGCYRFVYNQMLALKQKEYDENKKSLGLIDLSKYFHGTLLKEEQYAWLKEQNTKVMKQSIRQMLTAYDKFFKQHNGFPKFKSKKDKQSALFPIDTISKRNQFNDRKITLTQLLKDIKFRCSNLYFKRLQTYKEGIRSATLSKTKSGNYFLSILVDLPQEEVIKFRLTNKHVGIDLGIKDFVITSDGEVFENRHFFKKQEVKIAKLQRQLSNKQKGSNNRNKQRVRIAKAFERLTNQKNAYIHSVANELLTYYDTIFMEDLNVQGMLKNRKLAKAIQEIGFYKFRQILEDKAKNNNKKVVLIDRFYPSSKTCSCCGYKNQYLKLSDRFWACPNCGEYHDRDLNAAINILHEGERLIS

SEQ ID NO: 61784 - protein, 402 aa, unknown
  TnpB Polypeptide
MRNINRAYKFRLYPNREQTELLAKHFGCSRYVYNFFLNQRKEQYKLTGKTDNYYAQAKTLTTLKKQEETAWLKEVNAQTLQFAIRSLEAAYNNFFKKRAKFPNFKSKHSKNSFTVPQFASVAGGRLFIRKFKEGIKCRVHREIKGKVGKVTITKTPSGKYFVSVFTKEEYVTPLEKTGKSIGVDMGLKDLLTTSEGETFNNNRYTRRYECKLAKAQQHLSRKKKGSRGFENQRLKVARLHEKISNSRTDYLHKCSISLVRRYDIICIEDLNVKGMVKNHRISKSITDASWGKFVSMLTYKAEWNEKKIVKIDRFYPSSQTCNVCGYLNKETKDLSVREWECPECHTRHDRDINAAINILHFGLNNNISAGTVDYTGGEEVRANQSESRSSVKPEANESLAQG

SEQ ID NO: 61785 - protein, 410 aa, unknown
  TnpB Polypeptide
MDRTIQLHLHTTPEQADALTETLAQFTHAYNMVCEYGWNTQEKNGVKLHHATYYDAKASCPGLVSDLLIQARVKATETLKSAFTWKAKHEAKHRKKVEKARKLGKPEPRFTPVKCPRSMACGPRYNVHTYTFNWTKSVVRLSTTHGKQTIPFTVPDFCRKYLGNPNTTADLLYKNGKWWLHVVMSVPEPVVPQDSTVIGIDLGLNRPAVTSHKHFLGNTRWKEIDRRTFRLKRKLQSKGTKSAKRHLKKLSQRQARFHRDCDHVLSKQIVVSTPTGATIVLENLTNIRETSKIGRGKKNKNVENKRKLHSWTFAQLYGFIAYKGQERGIGVEKIDPRHTSQTCSRCGHRARNNRRSQSLFLCRKCHYSLNADLNASKNIRDKHIASLASVGTSFASGSLSTDLSSQPLVG

SEQ ID NO: 61786 - protein, 403 aa, Synechococcus sp.
MKYNELMSQVLTVSCKLKASQSQAAKLDATMEAFGQALNWVNQNTPEKIVNAVKLQSLCYYEIRARFGLSSNLAQQVCRRVAGARKVARQRNRPVKEFKRRFVTYDARIFSFREKDWTVSLATVDGRERFELAIGNYQRGMLAGSNPKSATLFQRKDGSYYIQICVEKKPPKQQDTDKVIGVDLGRTDIAHTSEGDNWNGQQLNRVRDHYSRLRAVLQRKASKGTRSSRRRCRQLLQRLSGKERRFQVWVNHRISKAIVSRAKATNSAIALEDLTGIRERVNQQPRSKTERRRANSWAFYQLRQFLEYKARVAGVPLILVPPAYTSQTCHRCLHIHPDPAQSYRSGKSFKCGHCGWEGDADLNGANVIALLGAVVNQPRGSGLFCSLVEQNRLRATESPLRTA

SEQ ID NO: 61787 - protein, 465 aa, Synechococcus sp.
  misc_feature (337)..(441): Xaa can be any naturally occurring amino acid
MKYNELMSQVLTVSCKLKASQSQAAKLDATRDAFVQALNWVNQNTPEKIVNAVKLQSLCYYEIRARFGLSSNLAQQVCRRVAGARKAARQRNRPVKEFKRRFVTYDARIFSFREKDWTVSLTTVEGRERFELAIGNYQRGMLAGSNPKSATLVQRKDGSYYIQICVEKKPPKQQDTDKVIGVDFGRTDIAHTSEGDNWNGQQLNRVRDHYSKLRAALQRKASKGTRSSRRRCRELLQRLSGKERRFQAWVNHRISKAIVSRAKTTNSAIALEDLTGIRERVNQQPRSKTERRRANSWAFYQLRQFLEYKARVAGVSLILVPPAYTSQTCHRCLHIHXXXXXXXXXXXXXXXXXXXXXXXXXXXXXXXXXXXXXXXXXXXXXXXXXXXXXXXXXXXXXXXXXXXXXXXXXXXXXXXXXXXXXXXXXXXXXXXXXXXXXXXXXPALSSRLSVGLWPASAGSRRPDLA

SEQ ID NO: 61788 - protein, 406 aa, Synechococcus sp.
ASAVGSTDSENTGLQSRKIRIYPEPALAKVWKQWQAACRYCYNQAIAYQRQHGAPKTARKLRDIILRSDLPGWVKDAPCHIKQNAVVEAWLAFRRSKDARFRSVRDRSHTLQFNAGNFRNGTWYPKLTRGLAFRASEEMPREWARGTELMRVKDRWYAIFPEPVNEQCSLAKGVIALDPGVRSFLTGFDGAGFVDIAKGDFGRIVRLCYHLDDLQSRLSKAPRPKRRRMRQAAFRLRERIRNLVDECHRKVAAFLTDNYRLIFLPTFESAKMVAKAGRKFGSKTARAMLTWAHYRFKQFLKFQAKKKNVVVVEVSEAYTSKTCTKCGHIHTKLGGAKVFRCPKCNHRLPRDWQGALGVMLRALRDTAFLFGLRPSSAVASASRSDNGNGQNAIASPLSITAQQCSA

SEQ ID NO: 61789 - protein, 376 aa, unknown
  TnpB Polypeptide
MLKVFQFRLYPTKAQKSKINQTLEYLRWVYNETLAVRKNSWEQEKKNVSLTQTNKLLTGWKKQHPKLNSVYSQVLQDAQVRVDLAFQAFFRRVKASCEKAGYPRFKGYRRYDSLTYTQFGYKLEADKLNLSKIGTIKVNMHRKVEGKIHRITVRRASTGKLFVSIITEVEAKPAPFKDGSVVGVDVGLESFATLSNGEKIENPRFFRTEEHELAKAQRKLSAEKKGSERWRKRLKVVQRVHERIANKRSNFIHQESRKLVNRFGVVAFEDLNVKGMMNGNLAKSIGDAGWSMFVNATRYKAEEAGSKVVLVNPNGTSQICSRCGLVVKKDLGERTHRCECGLEIDRDLNASINILRLGLESLGLKTIEAHDLQSWE

SEQ ID NO: 61790 - protein, 127 aa, Sphaerospermopsis sp.
ARFLVDNFDVILLPTFKTSIMSRKAKRRIRSKSVRQMLTLSHYKFKKFIKHKANEFHKIVVDINEAYTSKTVSWTGEIINNLGVSKIIKSRIDGKAMNRDLNGARGIYLRALVDTPWLRENLNLCIC

SEQ ID NO: 61791 - protein, 411 aa, Azospirillum sp.
MPLANRRVRYKLYPSARQAVALERLCDLHRALYNAALEERIEAYRKAGVSIRFADQCKSLTVVRRECPEYLALNAQSAQVTLKRLDKAFAAFFRRVQAGQTPGFPRFKGKDRFPGFGFKTHGDGFTFKPGNNWRHGRLRLSGVGTMEARGEARTPGRIVCADVQRKTDGWFLSLVVEGEPHRARTADRECGLDWGVETFATLAYGPDAFAAIANDHHLNAETNAIKEQQRQLSKALRGKRSGHATKARRHMAKRHRKVASRRKDFLHQTTARLARDHKVIVTEALTVKNMTATAKGTEETPGKNVKQKAGLNRAILDTAPSSFLAMLAYKAEEAGCELIILDTRKCKPSQTDPLSGAILKKPLSQRTHTLPDGRVIGRDEAAALVMLRIGLTQLGREPTWAARPETPIRAA

SEQ ID NO: 61792 - protein, 438 aa, Streptomyces sp.
MSRFRMYPTPAQAERMLSHCAHARYVWNLAVEQHSHWRRWRGSAPGFAEQCRQLTEARRENEWLGAGNADVQQQALKDFARAKNARFTSGFGEPTWRRKFRHEGFRVIGTDRVPEYDTDGSPKLNAKGKQVMGRSVVVRKLNRRWAQVKVPGCGWVRFRLSAKGKGAAPPSAKTFRVTFKNSQWHIAFAVIPGLTPAPGTGEVIGIDRGVKITAALSDGRTLNCPQLTVRERAQVRKHQRRAARAKRGSPEKTAEYAKVAKLKAREANRRKDWCEKTSTMLARTYDVVRFEKLNIKNMTAKTKAKPDPDRPGQYLKNGRAAKAGLNRVILAQGWGLLRQRTEHKAPGRVEDVPAPYTSLRCSACGWIDKNSRKSQAEFECSSCGFTCNADTNAAVNVVAGQGGIPRPRRSAGAGGTTPPTRRSSVREPQPVWVGIPLF

SEQ ID NO: 61793 - protein, 358 aa, Methanosarcinaceae sp.
MLLTIKMKMYPNEHQGKALLETMERFNEACNFISKTAWDTHTFGKIGLQKIVYYDVREKYNLSAQMVVRAIGKVAESYRVDKTCYHEFKKHGAIVYDQRILTFKTSDEISILTLQGRERITIKYGEYRPLDMERVKGQADLIYHNNTFYLMVVVNVPDADPIDPNGVIGVDMGIVNIATTSDGEIFSGKKCTEIRQHYSTLKATLQSVGTHSSKKHLKKISGRERRFKKDTNHCIAKAIVQTAKDTNRAIAIENLKGIRTNRTVNKAVRTAIGKWAFDELGNFLKYKAILAGIPIFEIDPKNTSRECSVCGYIDKNNRKTQSELCCVKCRHQENADVNASKNISFRGICQLPHRPLSC

SEQ ID NO: 61794 - protein, 394 aa, unknown
  TnpB Polypeptide
MQLTKTIILKIDSPDNNLEGMLTVFAQGMNYASQIVFANGEPIGSDRIQKATYRYLRNELGLMSQMSCNVARQVAGAYKTLQEQVNIEQAEWQLLEFSPTSATFSFERDFRFSQGTLSIATLAGRKKYKLQVYKYAQRYFDGSWKYLASKLCRHKDGSYFFHLACEKEIPDKKLTDASTFMGIDVGINCLAVASTTDKKCKFFAGGEIKNHRNIRSRERRRLQKAGGRYLGTRSSMRLLGKIAGRETRFMTAINHNVSRRLIEFALENEVSVIGMEDLTGIRDRTKKVSKEFRYEHSSWAFRQLQTFVEYKAREAGIAVLYVDPAYTSQTCPRCNHISSNNRNGLAFRCKTCGYETHADRAGAMNIEHRTRDLRYIFESQGGLVSPPDATRLFA

SEQ ID NO: 61795 - protein, 373 aa, unknown
  TnpB Polypeptide
MILGKKVRLKPTEEQEQQLWKSAGTARWAYNWALDRQEKNYASGGNFISDNDLRKELTQLKQTEEFSWLNEVSNNIPKQAIKDACEAYKKFFKHLAEKPTFKSRRKSKPSFYNDNLKLKVKESIVLIEKIGWIKTSEQLPLDQKYTNPRISFDGKYWYVAVGIEQEQVTEQLTSEVIGIDVGVKELAVCSNGMEFKNINKSQRVKKLEKRLRRLQRKVSRKYEMNKEGSRFVKTCNIIEVAKQIRVQHRKLKGIRSNHTHQATNAIVKTKPCKVVMETLNIKGMMKNRHLSKAIAQQKLYDFKLKLQYKCEKHSIEFVEVDKWFPSSKLCSSCGAIKKDLKLSDRVYRCECGLVLDRDLNASINLSRYPQLVV

SEQ ID NO: 61796 - protein, 399 aa, Streptomyces sp.
VTASHVKRAFKYRFYPSDAQAAELSRTFGCVRKVYNMALAARTEAWARQERINYNQTSALLTEWKKTEELAYLSETSSVPLQQTLRHLQTAFAHFFAKRARYPRFKSKKKSRKSAEYTTSGFRYRDGELTLAKMTEPLSIVWSRPLPKGASPSTVTVSQDGAGRWFVSMLCEDPTVKPIPATDTAIGIDVGLTHLLTLSSGEKIANPRHERRDRTRLARAQRELSRKAKGDGSNRAKARRRVAKVHAQIADRRRDLLHKLTTRLVRENQTLVIEDLTVRNMVKNHTLARAISDASWAEFRSMLEYKAAWYGREVVAVDRFFPSSKLCSACGALAERMPLNVREWTCENCGTTHDRDENAANNLLAAGLAASACGAGVRPQRKTPGGQSAMKQETPRREP

SEQ ID NO: 61797 - protein, 392 aa, unknown
  TnpB Polypeptide
MTSRAYKYRIYADEEVESFFARCCGVVRLVYNLALEQRSNHWRQFRRAQGRHISYPSQARELTAIRAEIPWISECPIDAQQQALRDLDKAFRNFFSGRAGYPKPRRKFVNDAFRIPASRVGEIEVLNAKWARVRLPKIGTVKFRYSRPIRGEVGNVTVTREANGWHVVFACSFEHEAPANDNPAVGIDRGIVNNVALSTGEMFSMPDAAALEERPRRWQRVASGRRPRSKRQAKAKRHAARVAAKAARRRLHWQHVVTTRIARRFGTVVLEDLKIRNMSASARGTVDEPGSMVLQKAGLNRSILGAAWYQIETLQTYKSDHHGGCVVKVDPRHTSVTCASCGSRDKGNRENQAKFLCLSCGHEDHADVNAAVNIHAAGTRPSDTCRAPPGSG

SEQ ID NO: 61798 - protein, 390 aa, unknown
  TnpB Polypeptide
MTLAYKFRMYPNKEIREKLDFALEMCRLTYNNLLSELKEQTIIDRNMIQQHILDLKIVNPELKQIYSKTLQYECYRLFSNLSALSALKKNKKKVGRLRFKGKDWFKTISYNQSGFWFEQKGKKGILELSKIGIIKVKSHRQVEGKIKQITIKKSLDKWYCMIVSDFIQIRTCGEKEIGIDLGINNYIMNSEGNIIEHPKILSKYAKELKITQQELSRKKKGSHNRSKAKFKVAKLHEKIERTRTDFLHKLSYKYVQDCKLIVIEDLSIKEMMSSSYNAKNIADASWGKFVQFLTYKAESAGCKIVKINPKNTTKQCSNCGNLQNMPLWIRTYKCSSCGFEIDRDLNSAINIKNEFIGLERANVENNPSVQIEQGLSMKQEAIISKELGYE

SEQ ID NO: 61799 - protein, 463 aa, Clostridium sp.
LRAIKVRIKDKHIISYLKDKILITQHLENMMIILINQDLNQNNGNNFKFLTNGRVMRAVFTNSSGGKLKKDVDYIKNYYKNNSLMNDIIDVTKELKIHNIVEQIKNIRKNYISTYTKSQMGDFKANKPSTKSLALANHITLYMDGYKSMTFKRKNIIGLNLNDKMIYTHVKHEPLLRIVKDLNNIKNINLNYSNGYIYMIINYTHPKIHIIPAEKVKYAGLDIGIKNLASIYVHDNTTKSLIISGKKFISYNSSFNKLISKLDKDINELEKTSNFEKVNYLNYYKKFLYEKKYNFFFSEFHKLSKYILIYLKDNDVTHLVLSKTINELKNNGKCKISKNIKNHFLQIPIIKLINDICLKAPSFNINVIEIDESYTSKTSCLSGDIFEVKSKAFNNSISTDVFGGRRVKRGLFKDYKYNKIINADLNAAFNICKYGSFEINNFENIKIHYYKLCNPIKIYTMAI

SEQ ID NO: 61800 - protein, 218 aa, unknown
  TnpB Polypeptide
LFNKKGKYYFAVTIKINQAQAMGSNIMGIDIGLNQLAVASISNTSEGEIARQFNSGKEAGYIRKRNRSLRRKLGKDKKPKKIKALNDKESRYMTDLNRKISIKLINLAVQEGVSTVVMENLKNIRKNSYSKGANRNLHSWAFYQLQTFIEYKAKLAGMEVVYINPKYTSQACNSCGQIQKSNRDRNIYSCNCGYRVHADLNAARNIANICLSGKSLSA

SEQ ID NO: 61801 - protein, 398 aa, unknown
  TnpB Polypeptide
VKTIYKTYKFRMYPNTEQVELLGKYFGCTRFVYNYFLNERMEQYKATQKSDNYYDQAKKLTLLKKHEEFVWLNEINSQTLQHSLRHLESAYLNFFRGNAKFPRFKSRKDRNSFVVPQFCSVVGNSISLPKFKSNIKIKKHQEISGNVRSMTVSKDCDGKYYVAILTEQLYEPIQKSNKSVGIDLGLKDFVITSDGKVYKNHRYTKKYERKLSKAQRHLSRKQKDSRSFENQRRKVVKIHKKISNSRNDVLHKVSTELVRNYDIICCENLNVKGMIKNHKLAKHIADVSWGTFVNYLEYKCEREDKTLVKINRYFPSSQTCSDCGYINQSIKDLCVREWTCPKCGKHHNRDLNAAINILREGLTTLSAGTVDYTGGDDVRLACKQLSAKPEAHKSLVCE

SEQ ID NO: 61802 - protein, 295 aa, unknown
  TnpB Polypeptide
MSRYRLLPTPAQEAVLRDHCAHARYMWNLAAEQHAHWHPGRAGARGYLEQCRQLAEARAGHSWLAAGSQTVQQQALRDFAQARAAFFDPGNPAGRPTWRKAGLERARLRRLDRKLACARRGSHRRGRVKLALARLRARETDRRKDWAEKASTGIARRFDLIRVEDLQVRNMTRSARGTAERPGRNVRAKAGLNRGILRSGWGLLVRRLQDEAPGRVERVSPAFTSQRCSACGHVDANSRESQARFGCTACGFACNADVNAARNIAAGHAVTARGGVRDAGPVNREPQLLASLPGE

SEQ ID NO: 61803 - protein, 281 aa, unknown
  TnpB Polypeptide
VKMYFVKNGTKQIISCERHRIKIPTLDWVKLKEKGYIRTNPETHIIKSGTVSMKAGRYYISVLVEEPKTEKPILNDFGIGIDLGIKDFAICSHEKSYKNINKTARIRKLEKSLKRQQRTLSRKYESQKKLPNNRKGEATRRNIQKQKLKVQKLHHKLDCIRTDYINKVISELVKTKPDWITLENLNIRGMMKNRHLSKAIAQQKFFEFRTKITAKCKEYGMELRIADRFYPSSKICHRCGCIKSDLKLSDRVYVCSECGYTADRDFNASLNLRDCRTYQIE

SEQ ID NO: 61804 - protein, 409 aa, unknown
  TnpB Polypeptide
MESVRSVRRAVAVEVESPPPELSAVEEAYRRIVEGIAVYVAERGTLEREKYSELYRRFRELYPLPAQLIQQAMNQGIEVGKSFLEAKRSGRTHKPRPEVRHVAIRFAKDSWSYKKAVGSAAPVRLALSLPGGRREVWIKPHRRFWLYWWKVLRKEAELASTLIVKRRRGRWYAIFAFDVQPRGEPPAEAAAFDVNENSVAVARASLLSTVDRVASWNRQYINPAVYSVRTDFDRLAKRYEAVRSAKLEELRRRYPFAGRDGEERAQNVADAREFRRFVRRLRERRRKDARVKQVAREVARSPAVIITEDLGENPQEGMIGVKGKKAEKSAKKKVKRKELRHRIKQIPFRKLVRAVEDKAAEAAPRFSTSRRTATARCVQSTSPSLRTAAVGIRCGVPTATPWTETRRRC

SEQ ID NO: 61805 - protein, 396 aa, Anaerolineae sp.
VLIRKAFKFRLYPNQAQQQTLAAQFGHARFVYNHFLQVRREHYATHQEGLRYHDTALMLTTLKRDPEHGWLREADSQVLQQTLKDLERAFVNFFEGRARLPRFKSRRAEQSLRYPQRVKVDLAARRTYLPKVGWIRTVFHSPLEGTIKNVTVSKTRSGRYYAAFQVELEIAAPDPQGELAGLDLGLSAFAALSDGRKFENPRHVLQAERRSRRLQKSLSRRQKGSAGWERQRQKVARQHEQIANQRRDFQHKLSRVLVEEHRLIAIEDLHIRGILQNRRLAKHISDAGWGQFVGMLAYKGAWYGYEVVVTDRWYPSSKTCSAWGSEMSSMPLNVRTWECSLCGVQHDRDVNAAINLLNQTTVGTTGSHADGVHVRPGRQYIQAGTKKSEAPQLAAR

SEQ ID NO: 61806 - protein, 216 aa, Bacillus sp.
LEEMATKLALNKIGLGIDLGVKDFATHSDGIVHENINKTIKVKKIEKRLKREQRSLARKFENLKKRGEKSVTNKRVNIDKNVLRVQKLHARLANIRIEYVKSIVTNVVKTKPTFITVEDLNVKGMMKNKHLSKTIAKQSFFAFKTWLLTKCEEYGIELRQVDRFYPSSKLCSCCSQKKADLKLSDRVYTCECGNVMNRDLNAAINLLQAKEYTILT

SEQ ID NO: 61807 - protein, 364 aa, unknown
  TnpB Polypeptide
MEKAYKYRIYPNEKQKEIIAKTFGCCRFVYNKYLAKRIEMYEKNKETFTYVQCANDMKKLKLELEWLKEVDSTALQSSLKDLDSAYQKFFKENAGYPKFKSKKTHRFSYKSKCVNGNIQYCDKYIKLPKLGMVKTKNKLVPKGRILNATVSQEPSGKYFVSLCCTDVDIQLLDKTGNDIGIDLGIKDFAITSDGVKYDNPKYLQKSLDKLAKLQRQLSRKTKGSNNRNKARIKVARLQEHIANQRKDFLQKLSTELIRENDIICLEDLQVKNMIKNHKLARNIADVSWSEFSRMLEYKANWYGRQVIKVDKFFASSQTCSCCGEKFSITKDLRVRNWTCPNCNSELDRDLNAAINILNEGLSIA

SEQ ID NO: 61808 - protein, 265 aa, unknown
  TnpB Polypeptide
MIVRIASVGELSILGYPRNLKEYIWMMGEARLVIKGGRAFLKVVFEKGEESVEPRSSIAVDINMNEVVVGKDDENYVRIPTRLGEVQHWKSLAESLQKKYPRRWRGNKRILHRIHSFLLKAKRIAEDFARKVGKWVVGVARITGANAIKLESLKNLIKNVGKLPKEFRDKLYLMQYRRLQYWIEWQAKKHGVVVKYVNASYSSVSCPKCGRKMKEKGYRWFRCNCGYENDRDVIAVVKQEGVSDPLDCPSNERCKSESMRGTLAL

SEQ ID NO: 61809 - protein, 404 aa, Pseudomonas sp.
MMKRLQAFKYQLMPDGNQERQMRCFAGSCRFVFNKALALQKSNHEAGNKFMGYVEMAARLPIWKREAGFEWLKDAPSQALQHTLKDLERAYSNFFARRADFPRFKRKGKSESFRYPDSKQFKIDAANQRIFLPKLGWIRYRNSRDILGKAKNITISQSCGKWYVSIQTEREVEQSFPQGDAVGIDLGITRFATLSDGTFYKPLNSFRQHESRLRKAQRVMSHKVKFSKNWKRAKARVQRIYSHIGNARRDYLHKTTSSISKNHAMVCVEDLQVRNMSKSSAGDSEQPGKNVRAKSCLNKSILDQGWFEFRRQLDYKLAWKGGCLVAVPPHYTSQTCPCCAHICKDNRQTQAKFRCVECGFSENADVVGAINVLRAGYARLACEVNGAVKPSAAGTHRGESALTG

SEQ ID NO: 61810 - protein, 296 aa, unknown
  TnpB Polypeptide
VISFDINENTVAISRINLASTVGMVADWNRRYTTPELYTIRTDFGRLAKRYKMIRNKIIERLKPEFALPNGKYVNITNTREFRKRVRKLRERGRKLGRVRYVANELTKTPAIIVTEELGDNPQESMIDGIEKDELRHRIKQTPFKALVRAVEDKALERGSKLFHVSAYRNSRICPVHFTKLERTDDWRSLYCPKGHYVDRDYASVMNMDWKITPEAWVKGVWWDLRKNMNWREYEGKSNLLVPYGIVTLLQHIMENAKASEQSPAVLARGKPMNHHRIQNEGGGEETSQKGRRSAG

SEQ ID NO: 61811 - protein, 391 aa, unknown
  TnpB Polypeptide
MLKATKIRIYPNTEQTDFLNQQFGAVRFAYNKSLAIINQAYKRHGVSMSAKKDMKPLLAVAKKSRKYKWLKQYDSIALQQACINLDRAFQNFFDPKLKARFPCFKKLHGKQSSYHCTSIKAESELIKIPKCSPIKARIHRDITGTLKSITLSRTKTGKYYASLLIDDGIAIPKPIAHVNSDQITGIDLGLTHLLIESNGKKEDNPRFLKRAYTNFRRKNKKLSRTKKGSKGRVKARIQFAQAHEKVANARSDFQHKLSRRLIDENQAVIVETLKSSNMMKNGKLAKHIADAAWHGLVLKLEYKAKEQGKHLVKIDQWVASSKTCSCCGHKLDSLNLDVREWDCPKCSSHWDRDINAAINVRTHGIIDLKAAGLSVSANGGLCKPGNLPVAA

SEQ ID NO: 61812 - protein, 482 aa, unknown
  TnpB Polypeptide
MDPRVSQKPEKATEEDKKKRRHKQRTKRTITRAVTHIRLIEANPGKLAALDQMMAAYLPICQRYVILFCTAETPPDKYGDPVFESELSDRLHRVAMQQAAGIAKSWQTNRENAYQAYLEDVADYVQAKAKAEAEDRMSAFKRKEPTWNEWNVPVLRVPVIQANANVVVVEQSKDSTFDYWLRVSTLDKGTPLRVPVKLASYHKQVLKERTINTSTTLHKRNGVWWLTLSCDEDVPLQTEPSAPVVGVDVGIAHFITTSTNKEYGSFHGKMARQHKRDREKRRRKAKLRACLEKKGASADKLPSTSSATGQRLSRHVKQEINRAVNELITDHPDARLIYEDLNVASMRFKARSMNAYLYASNLAHIPEQLAWAAAQRGMAAHTVWAAYSSQECPRCHFVDRANRPNQKTFKCVVCGYEDHADHKAAVTLAGRWGDRELAACRDKREVKALLLKRHDVWKQQHQQRIERADPPVQLSFWDPSQV

SEQ ID NO: 61813 - protein, 213 aa, unknown
  TnpB Polypeptide
MCKTNKILSIKENSQFVKASFKRNDRRVKGRFFTKIRGRQTRRANQFLHKISKNIVQKSKESKSAIIFEDLKGIRKLYRKGNGQGKKYRRKLNSWSFYELQRQIQYKAEWEGIPVVFVDPKRTSKLCPICGDRIQDDKLNRRKLWCSNCGKSMDRDVVAAMNIAYKGWSRFCHPRGLSDEAIKGNADRLNPLILRVDGSNLVVKVTPRLAEPV

SEQ ID NO: 61814 - protein, 480 aa, Massilia sp.
VRDDWSRRRAPPATAVGIPSASCARHWRVTMLLAHRIRIDPTLEQRGYFARAAGTARRVWNWALAEWQRQAAAGCKPNAMALKKQFNRIKYADPAWLDENGRPWLRTVHRDAHAQPFTNLARAWSRYFEQRRAGTPAYPPVFKKKGRCRDVFYLANDKFRIEGSTAVLPRVGRVALCEALRWPGRILGASVAREADHWFLCVQVEVPDATARLPRSGHGVTGVDLGVSAAATLASGEKIAAPRPLTAALRRLRIRGRRLSRKLEAAKALAGIAGRIPKGTRLPVSKNCIQGAQALARLHARIARVRQDFTHKLTTRLCRENQAVAIEDLNVGGMLANARLSRAISDVGFYEIRRQLLYKAARYGTLIVLADRWYPSSKLCSGCGVRNATLALGERAWTCAGCGARHDRDVNAAINLQRLATGALAAATALPVASPAATPGTAAGLVPAGGGKVTPVRHEHGQQEGSGQEENAAYFCARFC

SEQ ID NO: 61815 - protein, 240 aa, Shimazuella sp.
VRHATCDPARKEAISIDLGLRDFAIFDDGTKTKPNRFFRQYERKLAKLQQTMARRKKDGSNWHKARIQVARIHEKITHARHDFLHKLSTKLVCENQVIHIESLQVKNMMKNQKLAKSITDASWSEFVSMLEYKAKEYGRKVVKVGKSFPFSQLCSGCGHPNKEVKQLQLRAWTCPNCNEHHDRDIHAAKNILQEGKRLLAVGLTWDYPRIPRLSPCGVVKTFILTNFDNNLTNRSNILSI

SEQ ID NO: 61816 - protein, 343 aa, Shimazuella sp.
MFGKFQQEGDPMHKAFSYRLRPTKAQAILIHKSIGCSRFVFNYFLGEWNRVYQETGKGLSYTTCSRALTGKKRELTWLKEVDSTSLQNTLQHLADAFQRFFRKQSDAPRFKSRKNRLQTYTSQCNYSKNSRPTIEIEGNKIKLPKLGWVKSVPSRAISGRILSATIRRTRAGKYKISILCEACFLRSIPARKEAVGIDLGLKDFAIFDDGTNWSPNRFFRHYEQKLAKLQQTMARRKQDGFNWKKTRIQVARIHEKITHARHDFLHKRSTKLVDENQVIHIESLQVKNMVKNQKLAKSITDASWSEFVSVLEYKAKEYGRRLVKVGKSFPVSFVQVVVIETKK

SEQ ID NO: 61817 - protein, 386 aa, Thermoflavimicrobium sp.
MLKAYKTELNPTPEQITKIVQSMGICRFLYNQYLGYNFARYEQGETFISGYDFDKYVNHELSKQYPWIKICGSKARKKAIMNAETAFKRFFKGQSRRPRFKKKKNQDVKVYFPKNNKGDLIVERHRIKIPTLGWVRLKEKGYIPTTGKVKSCTLTQQADRFYISVLVEVSTSESKEKHSYVEGIGMDLGIKHFAVLSNGQVFKNINRSSAIKRTEKRLKREQRALSRKYEFRKKRGETTATKSGSNIRKNILRVQKLHARLARMREAYRAFVVSMIAKAKPSYITIEKLNVQGMMKNRHLSKSIADQGFYDLKMKLLNMCTKLGIELREVNPFYPSSKLCSSCGHKKEKLSLSERIFQCESCGHTLDRDLNAAMNLMQAKEYVVLT

SEQ ID NO: 61818 - protein, 432 aa, unknown
  TnpB Polypeptide
MPTMLSRVERHVIKRADKNYSKIKELCHRCKNLYNYTNYILRQSLFRQEGLPREYELVGILTRENQDDYRALPAQTSQQVIKLLYRNWKAYFQSLKSYQKDKTKFSGCPKIPKYKPRGDKGHSVALFVNQQIRLRDGKIIFPKHTGLLPIKTKTSSIEQVRIVPATACFIVEVIYEKEIAPAETIDGSVASIDLGINNFVTFLDNQGYQPFIINGKGAKAWNQYYHKTKANMQSKLKEGRYSSNNIQLLSQKRSMFMQNFLHQSSSIVVKALIERKIKTLVIGLNEDWKQDSNMGKQNNQNFLSLPHKQLIDQLIYKCEEIGIEVILTEEAYTSKIDHFVEEEMKHHDKYAGRRIHRGLFRSSTGIYINADFNGALGIMRKVFPEKALAIAELIRNSGVAFTPVIVNPISCHVVSMKATNNLISFYTTKKAS

SEQ ID NO: 61819 - protein, 401 aa, unknown
  TnpB Polypeptide
MLLTHKTRIAVSKESAEILIKMSFECSNLYNHFLDQKLKYYEENKKYLSYYIQQKELKDYKTEFITYDLKKEVLRGLEANFKSFFQLIKKNKDLNPKPPKFRSSKYFFTLSFIQDFIIKNDQVSISLSNRKRLNFNLEYFKPINDLICKRNKSQSQIKQLKLFRKDDNFFVGITYEKNVDVNIDPNKNLISIDLGKKNLATIYNKDENSATKFDSKLLNKNLKFHDKRIDELKSKRDKKIKFSSRWKRLNSKFSKIYSKKKTQQNLSLHKLSKEIANQNSNIIIGDLTNLKRNIVSPFKKLNRQMQNNWNLSTFIHQLEYKSILRGNKVIKVNEAWTSKTCCGCGCIHENQTLDDRILNCDCGLSIDRDVNGAINILTVYLGDYNPPLETIKVSKRYIRFN

SEQ ID NO: 61820 - protein, 398 aa, Kribbella sp.
MSRFRIYPTPVQQAALLEHCRHARYVWNLAVEQWAMWTKDKGLTPGYTEKSRQLTEARAAFDWLRAGSQTVQQQALRDFDQAIKNFYRGTHGRPKWRKAGLSEGFRIVGPQASRVMRLSRKWAAVKVPKVGWVRIRLSREIPAAKSYRVTRDRVGRWHIAFAVVPPAIPAPGTGLIVGVDRGIAVSAALSTGELLTCPGLSDREQERLKDLQRRLARCRRGSNRRKRVQAAAAKLYARAVDRRKDWVEKTSTELARRFDVIRVEDLRITQMIKRPKPKPDPERPGAYLPNRRCAKAGLNRGVLANGWGALVRRLEYKAAGRVEKVNPAYTSQTCSTCGHCAPDNRKSQAVFRCVACGHQANADVNAAVNIAAGRAVSARRETPTRVSPKREPQLATST

SEQ ID NO: 61821 - protein, 453 aa, unknown
  TnpB Polypeptide
MVAVYQTKRECPVELIRAERIVIKPGHVNHAACKRYCGAARRVYNAALYQMRQALFAEAPISASQADKVLKQTQRETYQLLPSAGAQRTTQVLGDNWKGWLAAKKDYEKHPHKYPSRPKLPNYARAAKAYVVGRNGHKIEQGRLFLASGKDFGFQPLKVTCCQNQPYNSKASETIVNDVRIVPLGTAFVVELVYRETVEPPPKPNPDNAFGIDLGIDNLVTIVSTQQDYAPVLIKGKAIKSINAKYNKLKAQLASNGKHGHISTKSRRRYSQISDYFHKVSHWLISECVRTDTGRVVIGLNADWKRSVNIGRVNNQKFCAIPHRRLLDMIQYKAERHGIEVVIREESYTSKASCLDLDAIPDYQAVKEGKVVPLFSGRRVKRGLYKTGSGVLLNSDVNGAANILRKEIGDDWLISQIEAGKGVMDTPVAVKHIDLLLEAGLRPRETMSNREAA

SEQ ID NO: 61822 - protein, 195 aa, Salinigranum sp.
MQRTGTRSAHLSIRSMNDREHCWMQDELHRASNRILDEARDHECTHIAFENLTDIRNRMAGAKRFHAWTFRRLFEYVEYKAEMYGIEVEQVSPAYTSQRCSKCGSLHESSRRSKHRFKCQKCEYELNADYNASKNIARKLLKKLHSGQTSSSGGAPCQCALTSGTLNLNGDFHASVGSTAEGESTDKPTSSVVGY

SEQ ID NO: 61823 - protein, 345 aa, Planktothrix sp.
MTKTSKTMGVQQILLSPDPETRALLEYLCQQSGKLYNTGIYFARQTLFKTGKLLTGKFDLAFKPSVSKSLLARSMPSTPMQQTLMSVTEAFKSFKNLRDLHEKGQLHFRPKPPSYLLDINQALSIDLGTADNLAACVDTLGNSFLIDARDLKAKNQLWNKKVSTRKEGKSQDYWDNWLDCVTRKRNHQMRDGINKAAKLIINHCLKYGIGTLVIGWNEGFKTNANLGNLNNQKFVQMPLGKLKSRVKQLCDLHGIRFIETEEAYTSKASFLDGDSLPKYGEKPMGWKASGSRIKRGLYRTSDGFVVNADLNGAANILRKVSGRLGIMLNQLSRRYAAIVARIRLN

SEQ ID NO: 61824 - protein, 461 aa, Archaeoglobales sp.
MRAGIILLRPSRPIILHLHTPIAKEAHGFNHRRDWRNLFVFLTTIPYWVLRVEREVVKSLKLNLLPLSNRKERLLSTLFNSVIACCNDVLAIAKSKSPKNFAILHTTSYPIIKQKYNLHSQILVDCIHQVWENYKTIKDRFKQVPIRFNIPRSGKFSKTKRGNPVVVISSFNGNGRIAMPIKQDGAYKRFIEHINDGWKYTQFRLHKQNGQYVVIVNLKKKFKVKTEYQAVVGVDVNSGSFAVTVLSRKALKQLYLGQDIWHKQWKFMKRRSKLKSYADKGNRKAQRALRKLRGKERNFVNTRIWQIAHEIVEIAMRYDAVIAIEKLKNLRERNGKGKKPKRANRRIHRIPFAKFRITIQSVAWQNGIDVVEVPATKTSQKCPKCGYTGKRNWVFFDNKRKLFKCRKCGYEANPDRTASRNIATLALERGFVFVSTLSTQPQFSRAGGDVSPRVWLGEEVR

SEQ ID NO: 61825 - protein, 497 aa, unknown
  TnpB Polypeptide
MTSTGSILVVVVIILFLSTATSATLVLFIIVVIVIVVIVTITASVTSLTLFFFHHLAFTVLSLASPVLFFLDVLVVTVSIETNYSYHVYSFLFNPSISSFKSSILPFIFPTFGCVRFIYNWGLQKRIEAYAKDKGRISYIQLCYMLTDLKKDERYSWLREVSTECLQQALRNLDAAFTRFFREKKGFPRFKSKSRSRQSYKAILSVHVDQERRRIKLPKIGWVKYGNNRKFEGDVRSVTVNMTPSGKYYVSVLVDDGKEIPEKLPVTFDTTIGIDMGIKDFAVCSNGDTYENPRHLIKAEQRLRTLQRRFSRKKKGSNRRNRARMILARQHEKVANRRQDYLHKISTKIVRENQAIVVEDLNTKGMMRNHRLAKVIGACGWSTFFKMLEYKCERQGKTFIRIGRFDPSSKMCSCGHVYKGLKLSEREWVCPKCGSVNDRDLLAACNIKRFGLQEQNLLFNKKPVAHGGLDVEVPTMDDRQEIDLKSSVPVKRQYVQV

SEQ ID NO: 61826 - protein, 375 aa, unknown
  TnpB Polypeptide
LFVCCWIYNYFVRLARDGFISRNDMCYALVELKETNTWLRDYHSKMLQMVATTIVNSEKTLFALRKKGYKTGKLHFKNHLNFKSFTYNQSGFKLEKHGQTNLLWLSKIGYTEIRLHRNVGEIKQITIMKRAGNWYAVICCNSSYVIPKIIDFATSVGIDVGIKNFAYDSDGNQTSNPKNLQKMLKPLIRIQRKVSRRKKGSNNRLKSILKMQKVHEKIAHRRKDFQHKLSTQYAKNNDVVFVEKLQIINMVKNHRLAQSIMNASWGTFVQKLEYKCKMLVEVPARNTTVDCSRCGNKVPKSLAIRIHRCNKCNLVIDRDYNASINILQKGLNIFNHNTLPQELRELTPVEIPKGSRKQEAPNIFRYIDSSPGLNI

SEQ ID NO: 61827 - protein, 217 aa, unknown
  TnpB Polypeptide
LYNLCALSDGKIISSKKTVAVKRKYQYNRKKLQQKGTRSAKRKLKKLSGREMRFMRDFNHVVTKQLSSHDVSTYVLENLKGLRNQRKDHKLNSWLSNWPYFQFQSFLEYKCEFNGIEVVYVDPRYTSQKCSVCGVTEKNSRKKSNYICSSCGHIDHIDLNAAKNIRDNYVLSKRNRLFQEANSSEKFSATTPIHKGGVGILKHRVEVRVIFCIGCVR

SEQ ID NO: 61828 - protein, 417 aa, unknown
  TnpB Polypeptide
MVVLTGLVMPPAPRAVTYTDSTDPVQVRRAYKLRAYPTRPQEGRAARLLRDHCDLYNAALQERRDAWRMRNVRISYSEQSAQLKEIRAADPDGQGRHSFTAQQQTLRRLNVAFQAFFKRARDAKQQRKVGYPRFKPYQRFDQVLFIAGDGAKWEPANDGPWAHASFQAVGRVKVHQHRQVMGRVKTLQLKREHRRWYVIVVTQAEPQPLPATGRAVGVDVGVARFLTTSDGQVVGNPRFLDAALARIAELQRRKERARPGSGNRRRLRRQLAREWRKVANQRRDFHHKTARALVDACDTVALEDLRVANMTASASGTVAEPGTNVAAKSALNRGILDAGWAQFMGILAAKAASAGRQTIYVNPRHTSVTCHSCGGRCTRPRQDTVVCPNCGEWDADLNGARNIATRAGLGSGQASAA

SEQ ID NO: 61829 - protein, 357 aa, Pseudomonas sp.
MGMTATKTLKLRVKDKHARLLSEWARAVNFTWNYINELSERSIREKGVFLSSYDIQKYTDGAGKLLGLHSHTVQQVGAEYVTRRKQFKKRRLQWRKSSGAKRSLGWIPFKSGAVKWKNGTLTFNKQTFKVWDSYGLGDYALRAGSFNEDSRGRWYFNVVVEVERKLSPGQGQVGIDLGLKTTATCSDGVKFENGRFYRDLEKSLGLAQRARRKARVRAIHAKIANRRKDALHKFSNALVARCGVIVVGDVSSLKLAKTTMAKSVLDAGWGQLKTMLEYKCDHAGIVFKVASERNTTQTCSNCQQLPDSRPRGIAGLGIREWICSGCGITHDRDVNAARNILALGHERPVVGIPFQIG

SEQ ID NO: 61830 - protein, 412 aa, unknown
  TnpB Polypeptide
VSSSDRANEGELLCAGMSNGKGWGTVPGRRKAAAQAGQEIQFTTLKVRIYPTSAQAELFEKTFGCCRYIWNQMLSDQKRFYEETGAHFIPTPAKYKNGAPFLKEVDNQALIQEHNKLSQAFRMFFKKPDSFGYPRFKRKKDDRDSFTACNHEFESGPTIYTTRNGIRMTKAGIVKAKFSLRPQAWWKLKRITVSRTRTGKYYCSILYERLVKQPEAAVPTAETTVGLKYSIGHFYVADNGAMADPPRWLKQSQEKLAKIQRQLSRMQPGSRNYEDAVRKYHFIHEHIANQRKDFLHKESRRIANDWDAVCVRADALREISEALMQDRGAVRDSGYGMFRELLRYKLEQRGKVLVLVDRYVPTTRTCSVCGKPQDSVSYKKKTWVCSGCGTVHQREVNAARNIKQEGLAQFCA

SEQ ID NO: 61831 - protein, 234 aa, unknown
  TnpB Polypeptide
LSKIGFFTLVIHREFPLERVSQVCVKLYPSGRIYVIFLVEEPEAEEQQSEKPKNAVGVDLGITRLATLSDGRYLENPRPLERSLERIRLLQRRLSRKKFLSNNWIKAKRRLAKQYEHVKNLRRDLFFKLGVLLSQKYDVLVLEDLNVQGLIQKGVTKTRRMRLYDSSFSELRAVLEWEFRKREKLVLPVPAYNSSRECFLCGGINKGLTLEDRVFLCPHCGFILDRDLNASLVL

SEQ ID NO: 61832 - protein, 343 aa, Escherichia sp.
LALKPLEWKNATETQWLKDSPSQPLQQSLKDLEQAYKNFFQKRAAFPDSKSGDRMIHSATRRALSSTRGTAFLPKLGWVRYRNSRRVTGIVKNVTVSQSCGKWYISIQTESEVSTPVHPSASMVGLDAGVAKLATLSDGTVFEPVNSFQKNQKKLARLQRQLSRKVRFSNNWQKQKRKIQRLHSCIANIRRDYFHKVTTTVSKNHAMIVIEDLKVSNMSKSAAGTVSQPGRNVRAKSGLNRSILDQGWYEMRRQLEYKQLWRGGQVLAVPPAYTSQRCACCGHTAKENRLSQSKFVCRACEYTANADVNGARNILAAGHAVLACGGMVQSGRPLKQEPTSFRA

SEQ ID NO: 61833 - protein, 445 aa, unknown
  TnpB Polypeptide
MERAYRTLVLKYDLLRLPPEAAEKVSALLKVQEEFRRWATEWAKSGGSLPLPEHNPLRYFANEFLHASMLDWFKGLEKNGIEVKKMRPPLIFNAQLRLGGERDMSRGVFVDLPKRELRIRKWGGARGNTITLPLSESAVRWILERVREGGRLALAAVWVGRSRRSHAVKLYVALVFRREVAPMEVKRLLVVDFNALHNGLAWAVVEEGRIVEKNILRPHVSKILHLQKVVAKLDSVCAEKDEACGGAIAVKSRIWRMLRTWEDEAVKKLVRLALQYKAAVIVDIPNDGSVRELKKSGYIAERKAFLNLGRIRRRLRGLAEWYGVSYREERLYSTICPRCGRKMEELSDRRVRCQCGFEAHRDEVPFHWAQKRIHELSIPSFSSSSAPTRRVTPVEIEKRRWLLAELFGEKPTPQHVVTPPCKEQRQALVRNRITSSPVGKKRGLL

SEQ ID NO: 61834 - protein, 381 aa, unknown
  TnpB Polypeptide
MIDKAFKYRIYPTKSQKELLSRTFGCVRVIWNACVESFNSYDKELNPIPKMPGKLDLVEEKPWLNEVSAATLQQKQRDFIEFSKQYFSKSRKKKVNKPKFKSKDDHQSFRLPAKKFKLKDNKIRLEKIGYVKIVIDRTIPENSRLISCTVSKDKSGRYFASILVETEQVYKSKTGKSIGVDIGVKTLTTLSDGITISNPHFLRKSQTKLARMQKHLSRKQRGSNRRRKCKLKVARLHRKISDKRSFYMHNLTIMLVSNYDVICIEDLNTSGMLKNHNLAGCISDTSFSMFRSQLEYKCSWYGKELIVIDRFYPSSKTCSCCGWKNEGLKLSDRIFKCINCGSELDRDLNAAINIKRVGVGILSNRTQSGEVTSCGEAFRVK

SEQ ID NO: 61835 - protein, 335 aa, unknown
  TnpB Polypeptide
MSISVFKTVLARYKTVEEQVKQQTVSYSDENGTNYLFRKSLDWLQYPIRFRRPQADLVRGRDWGFLSGMAKVSVNTLSGRVKCMYECRKDSRLFDPSWKHGGAKLVFHESDKNWYLHISVNKVFPETDRSKIRAIDGHDRGLINLTTSYKEDGTVLYQDGQHVCKVKGRYTKTRASLQSKGTKGAKRVLRRISGRENRMMQDKDHCISKTLVTGNREHTLHVFEDLSGISFENLESRDASGRYALRSWTFYSLEQKTAYKAAIRKGMILKVDPKFTSQRCPACGTVDKTARDRLHHKYTCKHCGRSYNDDEVAAINLRQLGLLYVSGIDEPSFSK

SEQ ID NO: 61836 - protein, 383 aa, Chloroflexi sp.
MLVRKAYKFRLYPNNKQQRALAVQFGHARFVYNRFLQVRRDHYQIAREGLSYQDTTSLLTEIKRCPDYEWLRDADSQVMQQSLKDLDRAFRNFIEGRTSYPRFKSRRSKQAIRYPQRVKVNLETRCTYLPKVGWVKTVFHRPLEGKLKNVTVSRTKGGRYYASIQVEVDIPEPVSRGEMVGIDLGLKHFAVLSDGRKIANSRNLIQSERRLRRLQRQLSRKQKGSRGWEKQRMKVARQHEKVANRRVDFQHKLSRSLVDEYGYLAIEDLHIKGMVKNRNLAKHISDAGWGQFVRMLAYKGEWYGCQVKSSARWYPSSKICSECGAEMEAMPLRVREWHCPICGAYHDRDRNAAINTLLHTTVGTTGSHAGGVHIRPNWIRQGL

SEQ ID NO: 61837 - protein, 359 aa, unknown
  TnpB Polypeptide
MEKSNEACNDIAKVAFKNKIANKWKLHHEVYYRIRKQYGLSAQMTVRAISKVVEVYKRDKTKQCTFKPHGAMVYDQRILSWKGLEYASILTLEGRLKIPIRIGDYQKTRIDRIRGQADLILRNGTFYLATTIDAPEESPLDPVGTLGVDLGLKFLAYDSDGESYSGKKVEHTRTKNAKLKTDLQKCGSRSAKRHLKRLSGKEARFRKDVNHVISKKLVTKAFDTQRRIALENLKGIRKGVTVRKAQRSRLSSWGFYQLRSFIEYKAELKGVPIIAVPPRGTSHICPVCGMNKKANRPNRGLFKCVECGFAGPADKIAAINIAARANVNKPIVACNETEAVFNGIEVEHSYKPSNLLVGS

SEQ ID NO: 61838 - protein, 252 aa, unknown
  TnpB Polypeptide
VPLAFQETLASAKEINSVVVTVRGDRLIGYVAITVEVPDMPGIVPAGVDLNETNAIVAVDADERTLFITGLHRKVLTIRTRKTVSRLQVKLEAKKAEGKNTRSVVRVLKRLSLKRSRRTRDFCHCASRHLIEWAPQNCVLVFEDLSFSNKKKKSKKRSKSLNRRLSVWPRGMIRTFATYKVAGKGIAVGIDPAYTSQICSRCGLPGNRSRHSFTCPHCGHTDHSDINAAINIRNRFTVLRDSGVLSTTPEAS

SEQ ID NO: 61839 - protein, 280 aa, Anabaena sp.
MLLSFKTALIPNNRQITAFRKASGVARHAYNWANAQIKDILAAQKEGEKLKLPSAIDLHKKLVAEVKSEHIWYYEVNKNIPQKALADLRQAWDRCFRKTSKQPRFKKKGQRDSFYLESGTKAKPAIKNDSKRIKLPSIGWVRLAEPLPITVTYNCVISRQADKWFISVKYEVEKPPILADRPTIGVDIGIKELAVCSNGEVFENPKAYRHKTEKFGSELILVDRFFPSSQICSNCGNHRHKMPLKNRVYICPDCDYKADRDLNAARNIDRWFVDIFIPVA

SEQ ID NO: 61840 - protein, 337 aa, Anabaena sp.
LQDGEIKANWPAIKTGILNDLPDWCKSVPYQIKSIAIKDACKAVSNAKKKYKNGRGISRCRFRSRKYPVQSCYIPKSAVLEKGIFYTILGETSYKESLLKGFGDCRLVLSHGDYYLTVPEEKPRLNTENQGRVVALDPGIRTFLTFFSEDSFGWLGDTANIKIQKLCFKLDKLVGKISQAKCKQKRRLKLAATKLRGKIKNLVSELHKKTAKFLVDNFDVILLPTFETSQMSKKGKRRIRSKSVRQMLTLSHYQFKQFIKHKAFEYRKIVLDVNEAYTSKTVSWTGEIVKNLGGCKTIRSPSTNNVMDRDLNGARGIFLRALVDTPWLRENLNLCIC

SEQ ID NO: 61841 - protein, 374 aa, unknown
  TnpB Polypeptide
MKRDVQITVVGKVWNTSRGKILALNECLDEYFKAVSFFLTFNSASKTYLQRNGYEEARERFNLGSALIQTARDKAVEMLKSFEKNKRGDSVLKPKKISIRFDERNYEFSKTKNVLTPYWLTLSLSKGKRVSLPIVFGERQKQRIEEMLRGEWKLTTVEMVKRGGEWFAHFVLKKTVEVSDEPETVIGIDLGERNLVVAVALSRNNPEKPMKGRFWRGSEIKRIRGLYAHIRRKLQKKHRIGKVKELRGKERRKVNQQLHIIANEIIEYAKQFPKPAIVMENLKGIRENFNRSKNLNKRFHTLPFRKLQTFIEYKALLEGINVIYLSKRETKNTSRTCHRCGCVTQVEGRMFKCPNCGMEYDRDLNAAINIARRV

SEQ ID NO: 61842 - protein, 521 aa, unknown
  TnpB Polypeptide
MKRDVQITVVGKVWNTSRGKILALNECLDEYFKAVSFFLTFNSASKTYLQRNGYEEARERFNLGSALIQTARDKAVEMLKSFEKNKRGDSVLKPKKISIRFDERNYEFSKTKNVLTPYWLTLSLSKGKRVSLPIVFGERQKQRIEEMLRGEWKLTTVEMVKRGGEWFAHFVLKKTVEVSDEPETVIGIDLGERNLVVAVALSRNNPEKPMKGRFWRGSEIKRIRGLYAHIRRKLQKKHRIGKVKELRGKERRKVNQQLHIIANEIIEYAKQFPKPAIVMENLKGIRENFNRSKNLNKRFHTLPFRKLQTFIEYKALLEGINVIYLSKRETKNTSRTCHRCGCVTQVEGRMFKCPNCGMEYDRDLNAAINIARRVMSSARWGFCEQPEPANVSEGEKPRANAGSRLLRRQFASNLRDRRQLTSSDILHSQELAKWEVERIKKGQRAIIRKIRFAHKNIIIDGTLYEAEVKRWTPNYAIYRRTKSFISIEEGKKYCEELGIDRNEICYIIFLKKPRKVSFKWL

SEQ ID NO: 61843 - protein, 427 aa, unknown
  TnpB Polypeptide
LWLPGDSSLAVLEGWQSKTGAASWFSVAQSMVRKHRAKSLFCPFAIGSLVSTASNKALVTKARKVRISLSADQRALVKHWMAGSRWWYNKAVELYRAGFKVSEYDLRRIVRAVSPKWFADVPSKILCGAIADAHHANQAVWRKRKTGEKAALHYRSRKNPIQSLSLCNVAWNKDRSTIYPLSLGQIRLSRPVPEAPKDGRLVVHQGRYYVTVPYSSPRRVAESQGRVVALDPGIRSFLTFYSETDCGKIGEGDFGRIQRLCAHLDSLIGRMVKAAGFLKVRLKRAIERMRWRMRDLIDELHKQAARWLVDNYDVILLPTFETSEMVVRGKRCLRRKSVRSMLTFAHYRFKQFLKHKAFETGKLVFDVNEAYTSKTVSWTGEIVKHLGGAKVIRSRMDGHTMDRDINGARGIFLRALGDTPKLRDCLA

SEQ ID NO: 61844 - protein, 394 aa, Marinobacter sp.
MIVRQGFKYRLDTNDAQSARLRVLCGHARFVWNQALALCNEAAQTEGQYVPRYESMAKWVTDWKKDSETEWLKEAYTDNLQQKLKDLDTAWQRYFKKIGNARRPRFKKKGRSRDSIRFVNFHKYCKLEGRRVKLPSGLGWITFCKSRDILGTVKNCTIGFDGGHWFISFQTERQIDQPKHSSRSMVGLDLGVTRFFTLSDGTVKEPASSFKAHQHRLTRAQRALAKKVKFSANWQKQKARINRIHTRIASVRRDYLHKTSTTISKNHAMIVIEDLKVSNMSRSAKGTTENPGTNVAAKSGLNRSILDQGWHEFRRQLTYKQAFRGGEVLAVPAHYTSQTCPVCQHISADNRKTQARFECVECGFSENADLVGAINIKARGHRVLACGESALAAR

SEQ ID NO: 61845 - protein, 417 aa, Methylobacter sp.
VKRLQGYQFKLEPKSKYLAHLNQALGANRFVWNKLLAMNLARLANKQPILWYYEMCWFITLWKQSEEYAFLREAPSQSLQQTAKALARAFKDAFDKTQPNKHIPVFKKAGKNEAGIRYPQGFALDEPNQVVQLPKLGWVKYRRSRHITGTVKNVTVSRTAGHYTLSIQTEREVEPPVHPAQSAVGIGLGVKNFAALSDGKFIAGPNSFKRHQQPLAKLQRQLARKQKFSANWQKQRAKITRLQAHIAAARLDFLHKTSTRLSKSHAMIAVEDLKVANMTQSSRGTREAPGQQVRQKSGLNRAILDQGWGEFRRQLEYKQHWQGGWMVAVPPQGTSQHCPDCKQSSRANRQTQATFVCVNCGYADHADTVGAINVLDRAIALLSWKPKQKPQDFAGFVCEVNGAVSAVSSRNQLSAVF

SEQ ID NO: 61846 - protein, 463 aa, Hapalosiphonaceae sp.
MQTAYRFKLIPGINQQETMFSWLGMLRGVVNYSLADRIDSYNQGYIQGDFCSLQSKAQACPLTCSVTRSASNGNPWKEDKPSLRRGKGNKPFNPRRTAYEMQSSSLTGLKQSRPWYKSVNADVLQQALRHLDTAFNRFFQGKSKFPKFKNRSNFNSFEFKPKTVRINGNHIIFPTLGDMRFFKSRDIPSSWEIRTVTVTKEADGWYASILLRDDTVPDLSKKRVDELQWVNGVDRGIKKITAQADGTVDPNPNIGKRFERRLEIRQRRLSRKKKGSKNRAKSRLSVSRLHQKIRNLRNDYQWKLARRIAASADVIGFEDLNVKGMKSKCKPKKDPETGKFVKNGQAAKSALNKAISDASWYSLRVKTEHQANKLGNWVVDVSARHSSQECSACHYVSPKNRDGEKFVCENCGHHDDADIDAAVVIADRARNKIGLPNLPLVKRKVTPKPESTGTKELSPAECG

SEQ ID NO: 61847 - protein, 160 aa, unknown
  TnpB Polypeptide
LSRQLSRKKKGSSNCSRARKKLAILHEQIANSREDFCHQLSRKTANSCDAVIVEDLSMKAIAGSLHLGKATNDNGFGMFRRFLKYKLEEQGKYMITVDRYYASTQTCSVCGTKNPETKDLKVRKWTCPVCGTVHDRDRNSAVNLKQEGIRILEEKNVMVL

SEQ ID NO: 61848 - protein, 345 aa, Lactobacillus sp.
MYDESLITTEKKCKPNEYKVRKELIANKADWEYKLSSRCLIWTINDLSKAWKNFFNKSMPDWGKPKFKSKKSPRQGFKTERAKIVDGRLRLDKPRGTKEWFDIPFKGAKSLDGDLKVVSIYRENGKYWASLPFEVGIAKKRETSRNTAVDVNVGHLNYTDGKVNTLPNRLRMLYKRIRHYQRVLARKREVNGNLATQSNNYVKTKAKLQRDYRKVTNIQHDILQKFTTKLVDNYDSIVIEDLDVKRMQMTHVASKGLQRSQFGYFRQILAYKCEWYGKQLILADQFYPSTQRCSECGYIKSGEDKVGLNGNRKYGTKHSEYICYECGAVKDRDENAVYNLLALAN

SEQ ID NO: 61849 - protein, 383 aa, unknown
  TnpB Polypeptide
MIKTQKARLYPNRAMKKVLDDLCDYRRYCWNQGLALWNDMYDAFLILEDKELLPNERKVRNELVADKVDWQYQLSARCLQLAVSDLGKAWKNFFNKAQPDWGKPQFKSKKAPRQGFKTDRAKIVNGRLRLDKPRGIKKWYDIRLKGAKSLKGELKVVSIYRENGKYWASLPFEVEIKTKAKTGKQTAVDVNVGHFSYTEGQIKTLPNNLKFLYERIKHYQRLLARKRKTNGKKAVRSNNYVETKAKLQRDYRKVANIQHDIVQKFTTELVNNYDQIVIEDLDVKRMQMSHVASKGLQRSLFGCFRQVLNYKCQWYGKELFLADKFYPSTQRCSRCGFVKTGDDKIGLDGNMKHKTRHNEYVCYECGAVMDRDENAVMNLLALI

SEQ ID NO: 61850 - protein, 363 aa, unknown
  TnpB Polypeptide
MKRSAKYSLKFATIRKKQLLQETFKLYKFYLQKTIDLMWSKQIPVKKFMSTKDIYWMDNLGGQYKALIYKHASAIVRSARKKKKSKPEIKNLTIYFDEKFVKIEPSNNSFDRWVRIRLPFVKENRKRERIEIFIPLKEHKHSLKFKDWKLCKTIMINLDKNWVGLIFEKEAPQKKEEGKIIGIDLGYKNLITTSEGQFIGKDFYKIYEKISRKKQGSKAFKRALIERNNKINELINKELNFSDVKVIKIEALKNLKKRIKGKFRREFNNKLQRFVYRQVIDKLERKCEDEAVLLLTVPPANTSITCPVCQFRHKNNRNAERFKCLNCGYVNHADIVAAINIASREPIVPDAKKANFMDRNKCL

SEQ ID NO: 61851 - protein, 281 aa, Clostridium sp.
MINSTLEAFLKALNYASQVAFNNGEITNKPKLQKLVYDDLRTKFNLKSQMAVNTCTTVCSSYVTQHSNKVFNSLAVYKSPKAIYSYGRDYSFLNDGQTISINTIAKRIKVHFKVNNYFKKYLTKEWSFGSLEIVERENSYYAHITVSKEVQEKPLNEFKNIIGIDLGQNFIATFYDSKGKIKFFKGRYLKDMRAKYTRLRKQLQRKGTYNAHKKIVTINQREQRTMTYINHKISKEIVEYAKQNNAIIAMENLTGINLSCKVKKIIAIIELVGHLTNYSNL

SEQ ID NO: 61852 - protein, 424 aa, unknown
  TnpB Polypeptide
MNVLMEVKRTVPVKLDVADERRDDLHTTIEQFNDAANYTVENGRNDDGYLILNKSTIHDEVYYDLRDWTDLPSNLCIRAYSKAIEAMKSTVEDWKSDESRPLPSFDQPSVVYDKRTLTIRDRSATLSTVNGRIEVEYALGEYQRSHLDDDEYERRMGTLHYREDEDAFYLHIVLLKEVEERDGDRVMGVDLNLKNVAVTSTGGFYDGGELLWGQNHFFRVRRSLQDKGTRPAKQALARLSGRENRFVLDRLHTISRRLVEEARSHDCSYIAVEDLTHIRERMDNGSDRIKRQMHNWAFRELQEMVAYKAAEYGIRVEGVNPAFSSQTCSKCGHQSSTNRDSDTGWFECNECEYELDGDYNAAKNIGKRLLTVPEGKRPSGLGDGQLALKSGTVNGNGEYTPDDPSGSADRESTGKPHPQSAEGA

SEQ ID NO: 61853 - protein, 512 aa, unknown
  TnpB Polypeptide
VQVKLTYKFRLYPKPEHEERLLETLELCRQTYNYFLGQWNGKENIPGRLELQSQLPRLKREKPELARVYSKVLQMVLYQLYSNLRALSQLKKKGKKVGRLRFKGKGWYKTFIYNQSGFKLIKTEKRLGILHLSKIGDIPIRVHRPVEGSIKQVIVKRHNSGKWFACICVEKEVEVKREEPMRVVGIDVGIRYFLTDTDRRQIENPRFYEKTLERIRVLQHWLSRRRRGSNYEKTKIKLAKAYERLVSQRDDFLHKLSKFYVKNYDVICVEDLQIKNMVRNHNLSQKILDASWGKFIRLLHEKAERAACVRVVVDVPPKGTSEGLSYNNPYRDFISACRIKMRGWGSPDPPAEAEPLLVEIPASSIIEAGSPQPSGVGSSRPRRVWNIGYGSLSKERFLTLMKAHNINIIVDVRRWPTSKIDHFKKENLESLLQGAGIKYVWLGHKLGGFRKGGYRKFMDSPEFDEGIRNLISLSESGNLCILCLEPDPKRCHRRYIIERLSSLGFDISNIEY

SEQ ID NO: 61854 - protein, 291 aa, unknown
  TnpB Polypeptide
LIISYKYRVYPDVIVETRFHEAPDTCRWLYNKLLEECNTVRENRSSLTMQGIRAQIVILKDRNPALKGVYSKMLQIVNYTLRGNIRALSETKKKGWKIGMLRFKSAPRYRMLNYNQSGFKIDCESEFIIFSKIGTIPFRMHWSYSGEVKGVLITRSGDEWYVVIQGEQKISKPRKKGRSVEIDVGLSAFAVNSDGVAIENPRFFERSRARIKRLQQSVARKRCGSKNWVKVKKKLEKAYIHITNQRNDFLHKLSRRYVDSYATICVKDLNIEYLKENDKSRGLRRGVHDVS

SEQ ID NO: 61855 - protein, 426 aa, unknown
  TnpB Polypeptide
MMATVTQAYRFALDPTPREQGALASHCGAARVAYNWGLELVKTRLEQRRAGEEVEVPWTLPELRREWNRVKHQVAPWWAENSKEAYSSGLDGLARALKNWSDSRGGRRKGHPMGFPRNKKKGRARDACRFTTGPLRVLPDRKHVQLPRIGVLKTHESTRKLARRIEQGTARILAATISRQAERWYVSFTCEVHRHIPCHTGRTTVVGVDVGIRHLAVLSTGAVIPNPRALEGSLRKLRRLNRELARRTPGSHRRTWTRRRLARTHARAANIRRDTLHKVTTTLATQYCTVVVEQLNVAGMLRNRRVARAIADTGMAELRRLLVYKTSWYGAELVTAERFYPSSKTCSDCGWVKAKLTLAERTFTCEACGLALDRDLNAARNLAQLVELIVAAGSGPEALNARGADRKTQSAGQVATKREPRKARSR

SEQ ID NO: 61856 - protein, 400 aa, unknown
  TnpB Polypeptide
MQTRMLKFRLYPNTSQKQILEQTLEDCRHIYNTLLANHKKTYEETGKILSQYDMNKALKHLKDRTPILFGVYSQILQNVSKRIKDGYTNFFARRKAGLKAGLPRFKKYGRYKSITYPQSGFKIVETEKRLNVLSLSKIGNVPIRMHRKVEGKIKTLTVKRMPSGKWFAVFSCVVKESLRAKPFKDVGVDMGLNSFAVLSNGSRMENPRFYRSREKQLKRVQRRLSRTKKGSKNRGKNRIKVARLHEKIENQRNDFLHKVSRQIVDNYQTVYVEDLKITNMVQNHCLAKSISDAGWGRFIKMIAYKEEESGGQLIKVNPRNTTQLCSQCGEMVEKNLSVRIHECPFCGLVIDRDLNASRNILRIGRESTEYKPEREETSIQSLWVEQVSPMKQEALLLVGR

SEQ ID NO: 61857 - protein, 391 aa, unknown
  TnpB Polypeptide
MQTHKFRLYSSKKSEQKMLETLEICRQGYNTFLGELNNQREIDKSQIQGTIPDMKICDEQFSKVHSKTLQYECYKLFSNLNGLSQRKKTGRVGQLRFKGKGVFKTFTYNQTGFKLLNTNKRCQTLWLSKIGNISIRCHRQITGKIKQITIKHFPSGKWFAFVIEDGNRKKQYPTTNKIVGIDLGLIDTVYDSDGNSITNPKQLKQKEKRLKHLQRMMSNKQKKSSNRNRFRVQLARQYERLVNSRDDFLHKLSDYYVTNYDVIAMENLAIVNMAKGYFSKSILDACWGRFRQFVSYKAENADKIQMLVDYRGTSQRCSQCGEMVHKELWEREHRCHNCGFIVPRDYNSALEIKRLCLHRIRQELPEYKHLETEALPIGQLLSMKNEAPCES

SEQ ID NO: 61858 - protein, 364 aa, Lachnospiraceae sp.
MQKGIKFRAYPNKEQQSLINRTLGCCRLVYNKGLDMRNRAYASGEKASYGQTSAMLTGLKKTEEYAFLKEVDSIALQQSLRDLDRGFKNFFEKRAKHPVFKSKHNHRQSYRTINQSDNIRIVGKYLKLPKLGYVKIKQSMETGHINSVTVERIPTGKYFVVLNVDFEPEPRPNAGHTVGIDVGIKEFYTDSNGNIVRNPKYLEWTQRKLVREQRRLSRKQKDSNNRNKQRIKVAGIHEKITNQRNDFLQKQSTMLVRENQTVCIEDLNVKGMLHNHKLARSIASVSWAKFFFMLEYKSAWYGCTIVRVSTMYPSSQTCSCCGYKNPLVRDLSVRRWECPVCHATHDRDQNAAVNILRKGLTAAV

SEQ ID NO: 61859 - protein, 442 aa, unknown
  TnpB Polypeptide
MRPCKFTVVAQLHEDQNHDLIEYVDSCFAIYGKAKRETFHVLKRNADFNKSTFNTHLQTKYNILKRTANSIISDAQGTLNALIELKKYEKSQLERKLSSLENSIGKLEMKVSDNKTLLQLNDKSVSLVTHRNLKRKLVSKKNQLNNKKQRLKNLQYQIEHGIYKLCFGTKYLFKRDYNEFIARRDSQLSFIGTKTEKAGNQVLQLSYNPQNNQFDIQLRKDIGGFKDQRGSYVNGKIHFNHHKRELISILANRNSPLSYKIIKKNGRYYLYCTFEIQRDELSFVTRSSNGVIGLDFNKGFVTVTETNQYGHMIDTDLIRYRFKKGNATQTDLELIANKVKKQALATGKDIVIENLNFKDTKAKTVSKRGKKYNDMLHSLAYRKFTDIMDSVCYRNCIWLRKVNPAWTSWVAKQKYCPNMKLNIHTGASFVIARRGQGYTDAV

SEQ ID NO: 61860 - protein, 400 aa, Lactobacillus sp.
VLKGVKLRLYPKPAQQMQLTQLFGNDRFVWNQLLAMMNQRYENNPALPRLNNYQLDRLLPCLKREYPFLKESDSSSLQVVTKNLNQAWQNFFKVPAQFGKPRFHSRRFLRQSYTGKSTCQIIAKRYLKLPKLGYVKTSKTGQITAGKIKRYTISHEPTGRYYLALQIEVSDAQPLPKTNQAVGLDMGLTHLAISSDGIKYATLNAKWLQTQIERWQRKTSRQRYQATVAVRQWNHDQRHFVQLELADYQNWQRSRQIKARYQAKLANQRKDWLHQLTIRLVRQYDVIVIEDLKVKNLQKNHHLARSMANAGWGRFRAMLTYKCDWYGKQLITVSPSYTSQQCSHCGFQSGAKPLAVREWTCVKCGRHHDRDINAAINILQAGLASRPELKATGLERALVK

SEQ ID NO: 61861 - protein, 279 aa, Oscillatoriales sp.
MLVFEFKTYGKSSQFAAVDEAIRTAKFIRNSCIRYWMDNQKVGQNDLQKYCAVLAKEFPFASELNSMARQASAERAWSSISRFYDNCKRKVTGKKGFPQFQKDCRSVEYKTSGWQLASDRKSITFSDKKGIGRLKLKGTRDLNFYQISQIKRVRLVKRADGIYVQFCIDFNRTENTKPTGNTIGLDVGLKEYYTDSNGLMVGNPKFLLRSEKVLKRSGRRVSRKAKNSKNRGKARQILGKRHLKISRQRKDHAVKLARCVVQSNDLIAYVGASPCRRQI

SEQ ID NO: 61862 - protein, 437 aa, unknown
  TnpB Polypeptide
MLSLKVKIKLSYNQQIIIETMSNEHRLLYNHLLENIKSSPKTFKELGQLSKNYKNYNLFTINAKSAQNTTNQLINNIKSFYALHKKDNTTKFPYKFKGYKYFKSFTYSWAEGKGGFIFKNTQLMINLFGNKRTKESKDLIIDLPKYVTDKINDNNIKTLTFTKEDDNYYLVFVYGETASNKIINKDFLSIDLGYSQLVTCYSNKIDNFSVENLKLKKLQKRIEYLQSYKDNKVKYSNSYNKVNNVFKRIKRKQVNKLKDFQHKLSTKIVKLCIENNIGNLIVGDIQVKKVIKNKINDLKKQIKESKVLNDDFKTRCLLEALNSEYKKQKINGLSKSTALGRFKTFLEYKSKLVGMEFHSINEAFTSQQNCITDEIMYSSDLSNRSVEVTKGVFIDRDLNSAINIAKKCKVTWLDHDLNFNLDRMYLNCHNSDLVKYE

SEQ ID NO: 61863 - protein, 437 aa, unknown; identical to SEQ ID NO: 61862
  TnpB Polypeptide

SEQ ID NO: 61864 - protein, 776 aa, unknown
  TnpB Polypeptide
VGLAADRGEPVDGGQPDGGGGVGVPGAAGGGLRHLEAEAPGDLLGLGDQRGDGGGALHRRVPVRRQQPGRRPGHRRRLDDPLDLGHREVERGRAGGPDLHLQGRPVGDHVAAGAAPQHPDVAGHSLPAVVQGLQGDGLVGGLQDRVHALLRPDAGMHGTPRHLHGERRDALAGRDQRAVDPRRLQADGDLVPAGERLDQRAAERRADLLVGRADQRDLGEVGEAGQVAEDLDRLHAADEPRLVVGHARAVGAPVPGVERPLGGGPVVEDGVHVGEQQQAAAATIDRQATGAASDHHVPQPRSRPVRPGTVGMALDPPAALAEAGLAAVGDPVDPLGRPRAGVEVDQLLDAGEQVALPLAQRRQQAGGIGARVHGPPPPLHVRFVTPSCDNQVMRRAYKFRAYPTRRQEQHALAMLDAHRQLYNAALEERREAWRHGVRVRYREQSAQLTEIRRADPAGQGHWSFTSQQQTLRRLDRAFDSFFRHVRAGRTAGYPRFKSVTRWDSVDFVDGDGARWRGPQGKWGRAYLQGIGQLKVTAHRAVLGRVKTVRLKREGRRWYVIVVAEQQPAPLPATGREVGLDVGVARFATTSDGQVIPNPRFLVTSARELAAAQRALAGCRPGSGNRRRAKRKLAKLHRKLANRRRDFHHQTARRLVDTCDVIAVEDLAIANMTRSASGTIEQPSRNVAAKAGLNRSILDASWGQFLVILLAKAEGAGRRAITVNPWRTSITCHRCGARCDRPRQNTVICPAHGGMDADLNGARNILTRAGLGSGRAA

SEQ ID NO: 61865 - protein, 496 aa, unknown
  TnpB Polypeptide
MMKVVKVFKVELHLSNEDREYLLRLFEENRKLVEVIYNVMRHYGYREISCEGVTSRHCPTRIRRLIKSCIRGRGVFTEWKGGLVDLQIDKVWESFVGTYVAHRKMPSEKMIDSLANVVRVRVSKVARSGRFYKRMITLVEYNDCIIAEINVGRREVTAILGTKRDLKSIMDAVNGKGLLLGDPVELVRYGDRIFLHLSLIKNIKLPVAHERVVGVNIGFREHFLVAVAYDLRRNEVVGVLKIPSRELRRLWDLQDTIQRRRTKAFRKVRGRIGNEYYRAIRDYKKRLLKLVKRGRLNYDDLLLIRPVRWLLPFKHNPKRALKVREGRAEYKVAPRDRLGRSVWRWGARYFVYSCVNRVVDFAERYGCTLIVCKNLRGLRQWVSQLKQESRRLGTLYNKTRDYGALIRKRGIDRMVKVLARFPYRVFLDDLRTEAVWHGIAVKSVGPSGTSTTCPKCLYNDRKNVTKEGLFVCQKCGYKDRADFVASINIAMKPFWK

SEQ ID NO: 61866 - protein, 213 aa, unknown
  TnpB Polypeptide
VEDIEEFIGLDFGITDIVSTSEGKTYSSDTLNRYRERQRMIRGSIQSKGTRGRTRQCKRGCARLLKRLKGRERTTATIINHTISKRIVAEAKQRGVGIAIEDLKHIRRTSKRRNKTFRTKLNSWNFSQLREFLAYKCRLSGVKLIVVQPEYTSQTCHKCHHIGIRSNKSFKCNHCSCDMDADINAAKNIALLGAVVNQPEKSGMLSCALHTSA

SEQ ID NO: 61867 - protein, 508 aa, unknown
  TnpB Polypeptide
MTKKPKTPSFILELPIEVPPREMHLVLARLDAARQVYNACLGESLRRLALLRQSKAYQAARKMPKSRARTAAFSAARQTHGFREYDLHAYAAQFNHCWIGDHLDIHVIQKLATRAFAAADRYAFGKAGRPRFKGRNQLDSMEGKNDASGIRWRDGRVEWNGLSLRAMIDPEDRVVAHGLAHRVKYTRIVRRKLNGKDRFFAQLVLEGEPFRKPEHKIGTALVGLDQGPSTLAAVAPEAGFALKETVCAELDTRQAEIRRLQRKIDRQRRANNPDNYNPDGTVKKGRRTWKSSPRMRKTADRLAEVRRRQAAHRKSIQGRKINKLLEVGNKFKIEDVSKKAWQRMFGRSVSHRAPGMLVDRLVRKAESAGGWTDSFPTRTTRLSQVCHCGAEVRKRLSDRRHVCPRCGIDCDRDLYSAFLASCVEGGRLDAGRAEKLWPGVDALLRAASGLWYQQAKGGRKLSHAGETRRQSLSPVESGTNCGEAHDVVVPLKGRERARAAEAPGTPRL

SEQ ID NO: 61868 - protein, 354 aa, unknown
  TnpB Polypeptide
MSVIMNVSITKKLGWSSYPDWYYQKKAHKEDLWYKQLPSQTAQEVCKLLDKAWKSFYALKRSGGIETPRPPRFKQESIPITYMQMGIVHERNTGRVRLSLPKALKKYMEETYQIHENFLYLENKIFRGMDQIKQLRIYPPEKGECKVIVVYEISEREELSQNGHYLSVDLGLHNLMTCYDSGNGNTFILGRRYLALERYFHKEIARVQAQWYGQQSVKEIKTSSHIKNIFADYIRKKQNSVTDYLHKVTRYLAEYCREQGITCVIAGDIRNIRREKDLGHRTNQKFHSLPYNRIYIMLEYKLKRYGIRFIKQEESYTSQCSPLSPEVGKRYAEPPTGKREDHIGMETESIMQMR

SEQ ID NO: 61869 - protein, 378 aa, unknown
  TnpB Polypeptide
MLKHINNLFNYRRYIWNQSLGLWNDMYDESIILDDNTKRPNNSKVRNMLVNSKQDWQYNLSARVLQQTVASLEKSWKNYFNPSMPNHLRPKFKSKKNYKPTLTTDRARIINGKLVLDKPRTINKDLWYGIRLQEQPRFEGKLLTCTITEKADGLYASLTFETEHEVIPPQKQDIAGVDVNVKRFNYNEGAVNIYPDKLERYYQRITHYQKMLARKRQENPYNYKTKRYMKVKTKLRRDYQKVSNLQNDILQKFTTQLVSDYPEIHIEDLNVHGMMMSKRMGKNLHRSMFGKLAEVLKYKSEWNKRELVLVDRFYPSTQICSECSFQKTAEGYGGKQTLRGDSVHHEHQTYYCYNCGAILDRDENAVRNIINYGQALSI

SEQ ID NO: 61870 - protein, 386 aa, unknown
  TnpB Polypeptide
MTLVAIKLRLYPNVTQMEQIELTFNHTRFLWNAMLELQNTRYENNRDSKFLGKYDLDLLLTTLKQEKGWLYDVDNTALQDTNAKLDKSFKRFFKKTGGHPRFQSWKWSKKSYTTKMGMRLADNHHLKIARMDPIYFRSSKDVPEGNIKTVTVSKSTTNNYYASVVIEQEIKPLPKTGNNVGLDLGLASLSTQSDGIKIPLPRFDKSLTKKKRNWERKLARRRIRALSVIHEQKKFGRELELEDFANYTRAKYMVAKYAEKERNQRNDYLQKYTTKLVKEYDVIVMEDLKVKNMMKNHKLARAVANAGWRSLRTMLEYKTQWYGKELIVINPAYTSQVDFETGEIQKKGLKIREYVNSNGTVVDRDVNAAKNILKWGMYPETRITKA

SEQ ID NO: 61871 - protein, 411 aa, unknown
  TnpB Polypeptide
LPFVVLCGIIVLAQRKEDREVTMTVVKVRLYPNKNQEEQIWINFNHTRSLWNKLLGLQMERYENSKDNESAKRSAYLGGYDMAILLPLIKQENPWMNEADSRAMQEVTTNLDLAFKRFFKKTSGYPRFKSWKRSKQAYTTKQRLQLVGENHLKLPKLGPVKFKQKFIPEGRLKRATVSISATGNYYASVVIEREIEPLPKTGKSVGIDLGLASLSTQSDGTKIPLPRFDKSLAKKKRYWERKLDRRRIRALSVIHEQKKLGHTLELEDFANYTRAKYMVAKYSEKERNQRNDYHQKYTTKLVKEFDTIVIEDLKPSNLVKNHKLARAVANAGWRSLRTMLEYKTSWYGKELIVINPAYTSQVDFETGEIQKKGLKIREYVNSNGTLVDRDINAAKNILKWGLYPETRVTKA

SEQ ID NO: 61872 - protein, 428 aa, unknown
  TnpB Polypeptide
MKRTNSFEVVPQSDTDAECLRRLLDASAALWNEINFERREHYADPDGDVWEIDEYRGRYGGVLGASTVQQVERKNREAWRSFFALKAKGERTGKPGYWGNASEGRELRTFVRNTSYSVQWGEYSRLEILVGKDLKAEYGLGARERLRLEVSGRPNWPDYDKQGRLELYYDDVSDTFRAFQPVTVSRQATPLADESAALDIGANNIVACTTTTGQQYLYEGRDLFDQFRETTFEIARLQSKLAERRYSSNRIRRLYRGRTRRRDHAMDALCRTLIERLHADGVSTVFVGDLTDVLETSWSVEANAKTHNFWAFRAFIDRLACTAEEFGLSVEVRSEAWTSQQCPNCGSTADTTRHADTLTCLCGFDGHADLTASATFLRRHEQTPRPMARPVRFEWDSHEWLATPHAPARESPKEARTNPQVASVESGQ

SEQ ID NO: 61873 - protein, 396 aa, unknown
  TnpB Polypeptide
VRRAYKFRAYPTRPQEGRAVRLLADHCDLYNAALEERREAWRMRKASVSYGMQSAQLKEIRRADPDGQGRHSFTAQPQTLRRLSDVFAAFCERRRAGEKKPGYPRFKPYSRFDQVRFVAGDGAKWVPAGDDGWARAQFQAVGAVKVRPHRDVRGTVKALQLKREHRRWYVIVIVETEPVPLPATGREIGVDMGAARFLATSDGEIVGNPQVLARSAKVIADLERRKSHAKPGSGNRKRIRRALAREWRKVRNRRRDFCHKTARAFADSCDVIALEDLNTAGMTKRPAPRPDPERPGTFLPNNALAKAGLNKSILDAGWAQFAGILAAKAEEAGRRVILVNPAYTSIDCHACGQRSTRPRRDTVICPRCGPHDADVNGARNIYARAGLGSGQAAAAA

SEQ ID NO: 61874 - protein, 561 aa, unknown
  TnpB Polypeptide
MICEWFNNSTLKLQNYIPSHTEFKNKKVHKNYTNVLSSIKSYDSSTLNNNKSNFKFNLFTDDVKNNDELIRSHKYQINFSKEQHLILKSYFEESAGLYNFCVDIWKEYSNISSSWQLVKDVIFKHLYRSNEDNEIDVIKQLIITDLKKLKNDYDAENTKNKAIIDKLKEEYKKKYIEECNKYKEVLKNNKKVIVKIEIVKPKMQKIKIEKIKKPAKPRGETIKKPAPDETLKAEIRDFCKNLSNAREQIYEQNLKNKNKVATFELKYKNTDTSQTISISKRNITEDGLFIQALGNLNCDNYKKIVNKYPLDKECKLQYDKILNKYYLYVVFEGTDIKIDNREEVVACDPGEKTFITYYSIKEYGNIGDNMRMRILALQRQIKKYQSILDKKKNKSGKRIKNKKRLQNRNRKLYLKIKGYVNEIHKKGAKYLCENYKNILLPTFETKPMISNYRIKLENERIKKINNKEEAKEELKKLNKTLKMSKNVKYVLSQQSHYKFKRYLKAIAKRYGTKIHDVDESFTSQACTNCGILSKEYNKNRLKSCICGTKIDRDFLVEYCML

SEQ ID NO: 61875 - protein, 452 aa, unknown
  TnpB Polypeptide
MKKFELKNDGKEGKIKVMKSLIVEYEENEETERLLEDFKNMVNFCIEKGMKYGHSLKKLHENCYEELKKRYEYNTQIYPQTYRVTQSIIKSWKANKGKGKPSAKKKLIRLHKDIFKIDLEKNQLIINYKPREKISLNLKLSDYHKQQIKGANKIGEVLVNEKSVYIPLIYEVNLTKPEKFVAIDVNENNIAFVSSDGKFGKIETGIRELKVGYAEKRRKIQKIRNKRKRAKLLKKYKEREQNRTKYILHKVSKFVAENFKGYGIIMEDLKWLIRTINRKVKKLNRYNHKIQKISINNSFMKLRLNSFPFRKIQFYIQYKSLFNGSPVYFVNPKNTSKICFRCGGLINSSKFCPNCGLDRDINACLNLLKMWGLPSPESLFNASMTLPLTIKDEEKVEDLSGRGIDGKFFNYALRSQYFPVFFRQFSYIALLKRSISLTIYTYKSGKILLKNN

SEQ ID NO: 61876 - protein, 413 aa, unknown
  TnpB Polypeptide
VWFVQLRYQFRVYPTPGQQIALAKAFGCARVVFNDGLRLRQTAHEQGLPYVSDAELSKRVITRAKATPERAWLGEVSAVVLQQALADLNTAYRNFFASITGRRKGAKVAPPRFRSRKDNRQAIRFTRNSRFTVLDNGRLRLPKIGDLTVRWSRMLPSDPSSVTVIRDAAGRYFASFVVRTSEDEPLPEVDSEVGIDLGLTHFAVMSDGTKVAAPRFLRRAARKLKRLQQALSRKQRGSNRRGKAVVKVARAHARVADTRRDWQHKLSTTIIRENQAVYVEDLCVVGLGRTRLAKSVHDAGWSSFVAMLEYKAARSGRTFARVDRWLPSTRMCSDCGRINEKMALDVRSWVCPCGGHHDRDVNAAINIKAAGQADFNDRGARVGPGPVPAPRGETVTHQNTARVTRSVAGIAAV

SEQ ID NO: 61877 - protein, 390 aa, unknown
  TnpB Polypeptide
MRSAYKFRIYPNQKQVAELEDTLEICRNLWNTALADRKAAWEKRGETRSYEDQAYILVREKQRDPDLRKVHSHVLQDVLRRLKKAMDNFFRRVREGAKKKGYPRFKKRYNSFTFPESGFKLEGTRLNLSKISGTIRTFVHRPIEGNIKTCTMKRDATGTWFVIFVTERETPAPTPVDSGKVIGVDLGIEHAVTTSDGEVYDYPRYYVQAEKKLRAAQKSLHRKKLGSRNRNKARRQLSRIGKRVTSLRDEFLHQTSRKLVDSADVIVFEDLNIGGMLKNHHLAKHVQDVSWGKLIRFTQSKAERAGKSVVLVNPRNTSQTCSSCGTLVPKELADRVHICPRCGLEVDRDLNASLNIRTLGLRGRACGESTSGLGSPPSKRRFNEAGSSAL

SEQ ID NO: 61878 - protein, 401 aa, unknown
  TnpB Polypeptide
VKERKAALFRLYPTPEQATQMAQIAGACRFIYNLALEQRRNWYRPGRRFNFASQCREVTMLRAEVEWLKAAPIHPLQQALRDLDRAYQNWWTGRAGAPTPRKKSLNDSFRFPDPASLRVERTGASSGRLKLPKLGWVKLRGWQELPGDICNITISRRAGQWFAAVQCEREVAEPAVSTLAAVGIDMGIAIFAALSDGTTIAPTNHGKRALKALRRAQQALSRKKRGSANRRKAIRRVARIQKRVADARKDFLHKHSTIIAKNHGMVVVEALQVRNMSASAKGTADAPGRRVRQKAGLNRAILDQGWSMFRTMLGYKLADRGGRLVEVPATYTSQTCSACGFVNAANRQSQARFVCIGCGHEANADSNAALNILRRADSALKPVEGHRTKRPGEAGTTRWAA

SEQ ID NO: 61879 - protein, 213 aa, Phormidium sp.
MGLVHARLHRPIEGSIRTVTVSLNAKGQYFASVLVDDGKDLPEKTTEGKAVGLDLGLTHFTITSDGSKFDNPRWLAKHEKNLRAKQKRLSRRQKGSNNRNKARKQVAGGLHKIARCREDFHHNLSRRMIDENQVVVVENLAVRNLVKNHCLAQAISQVGWGQFCTMLKYKAEPEGKVYLEVDRFFPSSKTCNVCLNQVRSLTLDVRFWQCEKC

SEQ ID NO: 61880 - protein, 374 aa, unknown
  TnpB Polypeptide
MKTFKYRLRPSKHQPTQLVQTLELCRWVYNETLVARKNSWEQDHTSLSLYDTNKLLPLWKRSHPELRNVYSQVLQNVQERLDLAFKAFFRRVKADEKPGYPRFRGHGRYDSFTFKQFGFELLQKGLFLSKIGIVKIILHRPVEGKIKTLTIQRDGLGNWYACFACEVEVERLPSNELAVGVDVGLDSFATLSNGVKIANPRFFRRDESELAKAQRKLSQTPKGTPERAKRRKAVQHIHQRIANRRHDFAHQVSRELVNHFGWIAFEDLNTKGMLQNHCLAKSIADAAWCQLIASTTYKAENAGRVVVLVDPRNTSRQCSRCGTMVEKSLSVRVHTCPECGLIMDRDQNAAINILGLGLQSLGFALEAPAFRRGE

SEQ ID NO: 61881 - protein, 369 aa, Exiguobacterium sp.
MLNNKKQGGDTVSQTLTVNIKLHPTKEQESILKDMMATYIETTNRLVSDMVKAEVTLKLTSKNVSSPLPSAVKNQVIKDAQSVFRKVKNSKYKVVPVLKKPYCTWNNQNYSFDFESVFLPIMVDGKVKRTEIRAEMVDRDNRNFSLLNNKLGTLRITKKSNKWMAQIAVTIPTTEKTGTKVLGVDLGLKVPAVASTDCDKVRFFGNGRENKCMKRKFRARRKELGQKKKLNAIKELDNKEQRWMKDKDHKVSREIVDFAKENNISVIRLEKLANIRQTARTSRKNNKNLHTWSFYRLALFIEYKAKLEGIKVEYVNPAHTSQTCPSCGSRNKAKDRTYSCSCGFNKHRDVVGAMNIRTAPVVDGKSQSA

SEQ ID NO: 61882 - protein, 405 aa, unknown
  TnpB Polypeptide
LKLTKEQEDKAWWFSKVSRNYWNLLVDIDKRNNKGEFDEILSRSGNRTYHSNFYDREVYHLSQSDYLNLAKIVVAKNLEDDYDVWAWYYQPNQSFIYAFLVRELVKIKRQNKGRLNFRSVDKIQPSFNVRCDVSSDKKRPSRIYLKDNGKLQIPTLGDMKFGSVREGFDLSCKKQVANISFDGKYWYLSYTEDVEPQVTDLPDYTDGVGIDLGIKTLATVSDGTVVPNIKTFRRVRILNKRLKRLQRKVSRKYLINKCNKHNKTKNIIKLERQIKLIHRSIRNIRINHIRKFVSELVKKQPQYIAIEDLNVKGMMKNKYRAKDIANCSFYTIREHLIRKAKEHQIAVRLVDRFYPSSKTCSNCGSYKKNLTLNNRVYCCDNCHEKLDRDFNASLNIARTNRYTLA

SEQ ID NO: 61883 - protein, 400 aa, Microcoleus sp.
MLVFEAKLEGTNEQYKKLDEAIRTARFVRNSCLRYWMENKDIDKYDLSAYCAVLAKEFEFADNLNSMARQASAERAWAAISRFYDNCKKAKPGKKGYPRFKKEQTHGSVEYKTSGWKLSVDRRHITFSDGFKAGTFKMWGTRDLHFYQIKQIKRVRVVRRADGYYVQFCLDQERHQKREPTAHNVGIDVGLNHFYTDSDGHQVANPRHLRKSEKSLKRLQRRMSKTEKGSKNRIKFRNKLARKHLKVSRQRKDFAVKTARCVVMSNDLVAYEDLKVRNMVRNRHLAKSISDAAWTQFRSWIEYFGKVFGVVTVAVPPYYTSQNCSNCGKVVNKTLSTRTHTCLHCGHVQDRDHNAARNILEKALRTAGHVGTNASGETDQYLGEETPSSKSTRRKRKSGK

SEQ ID NO: 61884 - protein, 400 aa, Symploca sp.
MMGNCQVRFLGGRDAATYALLPDNSCLRFWEDGNAKSRYDLYKYVTRLAKDTDFPWAKKLNSQARQAMAERTWAAISRFFDNCKKQIPGKKGYPKYKKNRPLHGCVEYKVTGWKLSKNRDGITFTDGFKAGEFKLYGSRDLNYYQLEQIKRVRVVRRADGFYAQFCIDYDRTESREPTGKTVGLDVGISAFYTDSDGNKIDNPKYLRKSEKTLKRLQKQVSRKFMRNQPQSNNYKKAKQKLAKKHLRVSRQRKDFAVKAALCVVRSNDLVAYEDLKVRNLVKNHKLAKSISDASWTQFRTWLEYFGKVFGTVTVAIPPHYTSQNCSNCGTTVKKSLSTRTHRCKCGTVLDRDENAAKNILKLGLSTAGHAGTFQSQHWIKASGQMSLWCLDESQYTKFAG

SEQ ID NO: 61885 - protein, 380 aa, Symploca sp.
MYAIKLELKLNNKQRTKMAQHAGFSRFIYNYGLSLMRQLDHKEFKGSSSKKIDEIQKTFTNFTKKQPEFAWTKKLSSRVYQTGFRSLKDAYSRWHKGYCKAPQFKGKKDRRSFTIVNSSGKVVLDTGKRIKIPTLGTFRITRSLECRYVTQTFTISETAGKWFVSFSVDAEKVPLLIHEVAEPVGVDLGVKCFATLSDGSKYVAPQPYQKAKTKLGKQQWRNRNKVLGNRRLGVKASNNAKKHYARLAKTHAHIANIRQDFLQKTTTEMSRKYAVIHIEDLNTSGMIANHKLASAISDLGFYEFRRQLGYKQKHYGNKVLLVDRWYPSSKTCNNCGNVQPMPLSERTYECGECGHVADRDLNAALNLASVPSGELKPLEP

SEQ ID NO: 61886 - protein, 395 aa, Symploca sp.
MMGNCQVRFLGGRDAATYALLPDNSCIRYWMDNKGIGKYELSAYCAVLAKQFPFAGKLNSQARQASAERAWSAITGFYDNCKKGKPGKKGFPRFKKHQTHGSVEYKTTGWKLSEDRRTITFSDGFKAGNFKLWGTRDLHFYQLSQIKRVRVVRRADGYYVQFCLDIERVEKREPTGKTIGLDVGLTHFYTDSGGQTVENPRYLRKSEKALKRLSKRFSRTKKASNNRAKARNRLSRKHLKVSRQRKDFAVKLAKCVIESNDLVAYEDLQVRNMVKNTKLSKSISDAAWSAFRDWLEYFGKVFGVVTVAVPPHYTSANCSNCRGVVKKSLSQRTHRCHHCGFVLDRDSNAARNILELALRTVGHTGTLNASGDIDLCLGEETPLSKPNRGKRKSRK

SEQ ID NO: 61887 - protein, 402 aa, Escherichia sp.
MKRLQAFKFRLRPGGQQERGMRRFAGACRFVFNRALALQNENHEAGNKYIPYGKMASWLVEWKNATETQWLKDSPSQPLQQSLKDLERAYKNFFQNRAAFPRFKKRGQNDAFRYPQGVKLDQENSRIFLPKLGWMRYRNSRQVTGVVKNVTVSQSCGKWYISIQTESEVSTPVHPSASMVGLDAGVAKLATLSDGTVFEPVNSFQKNQKKLARLQRQLSRRVKFSNNWQKQKRKIQRLHSRIANIRRDYLHKVTTTVSKNHAMIVIEDLKVSNMSKSAAGTLSQPGRNVRAKSGLNRSILDQGWYEMRRQLEYKQLWSGGQLLAVPPAYTSQRCACCGHTAKENRLSQSQFRCQVCGYTANADVNGARNILAAGHAVLACGEMVQSGRSLKQEPTEMIQATA

SEQ ID NO: 61888 - protein, 363 aa, Escherichia sp.
VKRLQAFKFQLRPGDQQECEMRRFAGACRFVFNRALALQNENHEAGNKYIPYGKMASWLVEWKNATETQWLKDSPSQPLQQSLKDLERAYKNFFRKRAAFPRFKKRGQNDAFRYPQGVKLDQENSRIFLPKLGWMRYRNSRQVTGVVKNVTVSQSCGKWYISIQTESEVSTPVHPSASMIGLDAGVAKLATLSDGTVFGPVNSFQKNQKTLARLQRQLSRKVKFSNNWQKQKRKIQRLHSRIANIRRDYLHKVTTTVSKNHAMIVIEDLKVSNMSKSAAGTVSQPGRNVRAKSGLNRSILDQGWYEMRRQLEYKQLWRGGQVLAVPPALRVLWSYSERKSPVTKSIQMPGMWIYSERRCKRRS

SEQ ID NO: 61889 - protein, 339 aa, Dolichospermum sp.
MILVERHIIKQSHQHWPEIDKLSFLSKNLYNAANYICRQHFFASGKKYSLNDLYHLTKDLVDYRNLPTKVSKQIIKRLVSTWTGYFEAQKEWNKNPSKFLSEPRIPGYKDKVKGRNVVIYYHESVYKTELKKGICHLSMSDIKIPTKVDNVVEVRLVPRLTCYVVEIVYEKQEERLSTSDYVAGIDLGLTNLVALTSNQPGFKPLLINGRPLKSVNQFYNKTKAKLQSQLGQKRKSSQRIQSMTSYRNNYVDNYLHNTSRIIVNLLKACDIGTLVIGKNENWKQNINIGKKNNQSFTQIPHARLIDQITYKCQLAGIKVVVTEESYTSKTSAPLFRNTS

SEQ ID NO: 61890 - protein, 231 aa, unknown
  TnpB Polypeptide
  misc_feature (120)..(123): Xaa can be any naturally occurring amino acid
NYTQTSAMLTKLKRSDDFAFLKDVDSIALQQSLRDLDRAYQNFFKKRAKFPQFKSKHNNHQSYRTLNHGNNIRIVSNYLKLPKLGYVKVKQSMEVGRINNVTIKKTPTGKYFAVLNVDFXXXXVRENQTICIEDLNIKGMIRNHRLAKAISSVSWSKFFTMLGYKATWYGNTIIRVPTFYPSSQTCNNCGQANPIVRNLSVREWECPFCHTKHDRDYNAAINILNKGLSLA

SEQ ID NO: 61891 - protein, 402 aa, unknown
  TnpB Polypeptide
MSTLVEQTKVIRRNSLYPDLDHLCFLSKNLYNATLYRVRQHFFETKQFLRYADINKMMIAERDPDYYALNTKVSQQTQKLVDQNYRSFFGGLKSDKKKRAEVKMPKYLKKDGRQVVMFTKQAVSTVVKGYIKLGGTNILIPTKQTDIQFVRLVPHGSYITVEVGYRKETPEYVDNGRYAAIDLGIANLATLTFFDDKPIIFNGKPVKSINQYYNKKLAELKSKQSMSKSPYRNTNRMNALTSKRYNKIKDYMHKTSREIVNQLVSHNVTNLIIGYNKGWKQDTNLGKVNNQKFVQIPFLMFINMLMYKCELAGIRCETIQESHTSKCSFLDHEEICHHDKYLGRRIHRGLFKSATGQVINADINGSLNIMRRFLNVAKNINIYDFVNLVEVCSTPTVFTVKL

SEQ ID NO: 61892 - protein, 411 aa, unknown
  TnpB Polypeptide
MLVQSSAVRSAYQFMRRTGHVTNEVKKHVKTRYMADLNQRYVSDACGIAAQMRDKPSVIFGGKKAWKNFQSGELAKEDWQQRRNSLLYSRGDKTKKGNPNIRVVKDKILINDPAARGLWIEGKFWMPAKFKPNWSCYDVRLKWVGEDKFKVSISWDELAPHVITTSPSNGTIGVDCNPDGVALVEVNSDGNLLDHRYEKEQRIQFACEGKRTYDVRQLAIQVVDYAVKVRKPLVLEELRFWGGKQRGAKFQRMKHNFLHRRILDAIKSRAASEGVEAIEVNPAFTSVLGLLKYAGMYSLNRHTAAALVIARRGMEIKERQTFTDTLQGRGGSRVKLEARSRNHALKPKAWSWMKDSFLRPKNSRAHSPVSGSSNPAGTGDNSGEIPGGESGSTTGQSRHPTAAKRSDANGE

SEQ ID NO: 61893 - protein, 343 aa, unknown
  TnpB Polypeptide
MLDLQNKNYEAGNKYISKFNMIKLLTPLKKTGEFCWLGEVARHSLVIVCDDLDGAFKGFFSKISRYPKFKSKHKSKLKFPVRAESMYFKSDIFINIEKCGEVKYKSDFKFPIGIHVCKFVNPRIEDKNGKWILSFAMKYENQVQNTNDFSMGIDLGIKELAVVSCDNQEYVFHNINKSKKMRDIEKRIRYVQRSMDRKYRQNKEHTNNWERERQKLRRLCAKQTNIRDNYLHQTTRFLVNLLPNRVVMESLDITSMMKNKYLAKEIAEQKWYEFTRQMQYKCEWAGIEFVKVDQYYPSSKTCSHCGHIKKDLKLSDRVYVCTVCGLEIDRDLNAAKNLEKYIA

SEQ ID NO: 61894 - protein, 320 aa, unknown
  TnpB Polypeptide
MRVNISNNVTKQAIKDACTAYKNFFRGLQKFPRFKSKKRSMPKFYQDNVKIRFSNTHVKFEGFSSSRKANKQKKNWVRLAEHGRIPTDAKYMNPRISFDGLNWWISVCVEFPDCKKNLNNDGIGIDLGIKDLAICSDGNTYKNINKSQVVKKLEKCRRRLQRRVSRKYEKNKKGVSYCKTKNVIKNEKLLLKVNHRLTNIRKNYLNQTTSEIVNRKPRFICIEDLNVSGMMKNRHLSKAVQKQGFFEFRKQLEYKCNNNGIQLIVADRFYPSSKLCSCCGNIKKDLKLSDRIYKCECGNVINRDFQASLNLKAYGEKFAS

SEQ ID NO: 61895 - protein, 635 aa, Microcoleus sp.
  misc_feature (433)..(625): Xaa can be any naturally occurring amino acid
VGNKKTAYQYRLYPSDKQKISLNNGLRVCRYWYNRMLGERLDWWEQNRCPVNSCPLICHLPELKERPNYYNQKNQLPSIKEDLVLVRWSGELLDFSDIYSTILQDVCKRVDKAFERYIKGDKDGKRSGKPRFKSESRYRTMVFDGAKNEWLKFCTVNGRWLYLRLPKIGLVKVRTHRPIPDGFNLKQVSVTNKSDGWYVSFILDDPSVPDFTPDKTIPTWDNSMGLDAVLNEDVYIATSEGESIPSLKPLRKNLDKLGKLQTKRNAKNKGSRRRRKLAKREARFHQRIARSRQDFQYKTAYKLVRTGKKVFFCEDLNLKGLTKRNAPKQDDDGKYLPNGQSAKSGLNKSWLDAAFGQFFSTLSYIAAKAGAVVVEKNPAYTSQILCYRDEFVFTDCSIREYWDEQLQIWVDRDINAAINLKRVGLDVFPTLKXXXXXXXXXXXXXXXXXXXXXXXXXXXXXXXXXXXXXXXXXXXXXXXXXXXXXXXXXXXXXXXXXXXXXXXXXXXXXXXXXXXXXXXXXXXXXXXXXXXXXXXXXXXXXXXXXXXXXXXXXXXXXXXXXXXXXXXXXXXXXXXXXXXXXXXXXXXXXXXXXXXXXXXXXXXXXXXXXXXXXXXXXXXXXXXXXDACKIDWQPL

SEQ ID NO: 61896 - protein, 397 aa, Microcoleus sp.
  misc_feature (212)..(393): Xaa can be any naturally occurring amino acid
VFNLTYEFKLKPTKNQVAIFEDWLEQNRRVYNYALGERKDWFKSRSCQINACSLRSEYIISADTPRPTYNRQAVALTAYRKTSSNLKRVHSQVLQQTLKRLEKAFVSMWEGGHGFPRFKKVGTMRSFVFPQLGVEPIQENAVKLPMIGLVKFNQSRPIPEGAIIKQARVVKRASGWYVMLTLHFDFAQWDLDVPQPMPHGEAIGIDVGISHXXXXXXXXXXXXXXXXXXXXXXXXXXXXXXXXXXXXXXXXXXXXXXXXXXXXXXXXXXXXXXXXXXXXXXXXXXXXXXXXXXXXXXXXXXXXXXXXXXXXXXXXXXXXXXXXXXXXXXXXXXXXXXXXXXXXXXXXXXXXXXXXXXXXXXXXXXXXXXXXXXXXXXXXXXXXXXXXXXXXXXNIHQ

SEQ ID NO: 61897 - protein, 463 aa, Streptomyces sp.
MTGKLSLSVIRLGRWQRDGCRGREAVAVSRRRGRVQRENIADSGRKYRLYPTPHQAERLREWGHTCRAVWNVALEQRTYVYRQRGRTLRADEQCRFLTQARHDLEWIGDLPSQAPQQVLRHLDRAFDNFWNPEHPAEFPRFKKRTACVVIPLPGQAVRVTKLNRRWACVRIPKLGEVRFRLTRSLGGLIKNASIRVDGAGRWCIAFGVRVGRPEAPPNGQPCVGVDFGVKQSAYLSDETAPRLMRRTLTDGEKRRLAGLERRRERQIKQAKRHQGGRYSNRLKRTLRAIAELKARQARRRLDFTHKLTTDLAKSHGLVAIEDLRVKQMTRSAKGTQDAPGVRVSQKSGLNRAILDNMPGERRRQLAYKCPASGSVLVVVPPAGTSQTCGVCRVWDPASRVSRDTFVCTSCGHTDDADHNASVVILDRALHIDTLPQDIAVNSTQRQPLVGGPWLAPMRARVNP

SEQ ID NO: 61898 - protein, 390 aa, Rhodococcus sp.
MKRIVAVKLRPTADQFAALEATLLLCNNVANEIAKAAQAMPQRSRRALQVALYPEVKARGLSAQPALHVLRKVADAYAVRQANLDNGNCGKPSSRRYMAVSQKAIQFRARAAQAFDDRCLSWQIDASTISIWTATGRMRGVRFICAPWQRKLLAARKGETDLVFRDGCFYLHATIDQDAPELYAPQDAASGWLGVDLGIVNLAVTTDDDPDGLDVRWSGGAVTARRKKNAALRSALQRVGTKSAKRKLKARRRKEHRFASDINHQLAKTIVARAQRTGRGIAIEDLSGIRERVRLARAQRAQVHSWGFAQLRGYITYKAEMAGVPVSIVEPRNTSRTCSKCGYCAKANRLSQAEFRCRRCQWSCHADYNAAHNIAVLGHQRYRVAQSTCL

SEQ ID NO: 61899 - protein, 367 aa, unknown
  TnpB Polypeptide
MFKAYKYRLYPNKEQQKYFAKCFGCVRFIYNRMLLDKIEYYKETKQKLNNTPAQYKKEFPWLKEVDSLALANAQMNLQAAYNNFFKRPEVGFPKFKSKKNHNCSYTTNNKSGTIYVTDKHIRLPKIGLIKIKKHRDFAGLIKSATISQKPSGKYYVSILVDQKDKEKLPMNNNEIGVDLGLKEFCITSNGEMVKHPKYLKKSEKRLRKLQKDLSRCKKESKNREKCRVKVAKQHEKIANQRKDFLHKLSKRLINENQVICLEDLKVKNMMSNHKLAKSIADVSWSEFVRQLEYKADWYGREIIKIDTWYPSSQICSNCGHKDGKKALSIREWTCSVCGTHHERDINAAINILNEGLRMKTVGTTVLA

SEQ ID NO: 61900 - protein, 373 aa, unknown
  TnpB Polypeptide
MVDMGYRFRIYPNQRQRQLIERTFGCTRWVWNHFLNKRQIEYAETGRSSRAFRQMKDLPKLKAANPWLREVDSVSLQAVLQHLDRAYDNFYRRIASKKKGGYKGTAGYPRFKGKHDRHQSYTTKNVGHTVYVVDDKHVRLPKLGMVKAKVSRPVTGVVKSATVSRNPAGEYYVTIKCAGVCRHMEPAPGESIGIDLGLKDYCITSEEVKHPNHRYLKQSEKRLRRAKRKLSRKPKGGANREKQRIKVARLEQKVARQRRDTLDKLSTMLVRRHPVICMETLMPKNMVRNTSLPSTSATRHGASSRACSTTRPTGTVARWSTWTGSIRPASSATTADTSTRRSRTSMCANGHARNAACSTTGTSTRPLICAAKA

SEQ ID NO: 61901 - protein, 465 aa, Acidimicrobiaceae sp.
MATTRTAASISHSGQVLSRAVTFQFTLDPNVEQKIMLAKCAGARRFTVNHHLARVKANLDARSAERVASSDDVTPAEPPASSLSWSGFSFINEFNAWKNGMADDSPINDDGTRGLIWRHELPGDVFECASVDAAHALENFSASRNGKRRGSPVGFPRFQAKGKVTPSFRLRNRATPDQAPSKHPIRFSDAGHLRLPKFGQVKLFGPTRKIRCMIDAGRFHVYSATLTQCAGHWTVSLTGVAAELHQAERSRSNRHAVPVGVDRGITSLAVAADANGTPFEDFEGVKTLREAQATLKAANQALARTTPGSKGRQRARARLAKTHRKVANTRRHLVHQVSKALVTRAQVLALEDLNVAGMVRNRHLAKSISDAAMGELSRQILYKAKWHGVEVRMVDRFFPSSKTCSGCGEIKRDLDLSQRTYFCNVCDLAIDRDLNAAINLARWQPKERPADTPPNPTRTLILTTV

SEQ ID NO: 61902 - protein, 390 aa, Acidimicrobiaceae sp.
VSRSRTYKFLLQPTSRQLAAFECLLKLQRELYNAALEERRGSWKWNRRSVSYVDQTKELAQLRSVRPDILAFGVTVCRGTLMRLHRSFDGFFRRCQAGETPGFPRFKGPGSFVSLQWNDAKGWALDEAARRLRLYGIGHVKVYLHRPIKGTPKTITIRREGKRYWVSVQCVDVPAEPLPTTGKSIGIDLGVDFLVATSDGQLIQGSRFGKRGQAGLEKAQRDLATKVPGSKRRQRAKDRVATHHRKIANQRRDFAHQVSRSLVNDHDLIVYEDLKIKNMTRRSRPRPDKQGGYEPNGAKAKTGLNRSIHDAGWGQFTAMTIYKAESAGREVIAVDPRNTSRTCPECGHVSAGNRHGAVFRCQLCGREAHADVNAAENILQAGRARQLTAA

SEQ ID NO: 61903 - protein, 432 aa, Paramecium sp.
MTLKPWWTKTSQQLTHIIPWKSTNTNIFQNDANIKKVLRTRKVKLNPTKQQKLMLMKYANAARYSYNIAIAAVNDKTHKANKIELQNAFLSLKRRDDGSYNQFFQKRRWLLATPQPIRQQAIFEAAKNFKAAFTNLKNKNIDHFKMKFKTKKHQRQHGFSIGIGTHLKHNDGVLSILPRSLGQMRYFGSLPFEGKPDAECRIQRDPYGDHWLLIPVYKITKTQTTKPIVAIDPGVRTPFACFRSDGDSKCIGEDMNAKLVDIKTRVSIVDRRISKCQDVALKRKLREHRRVLFRKHQRVRDAYHWKIINDITDECSGVLLPPFETQRVSRMLKAKTNCSMLGISHYTFRMRMKDKCEEKGLLYDEPTEEYTSKTCGVCGLINYLLGSKKIFECFCGNVCDRDVHAARNILLKWLSSEAGARVAETFLASRSS

SEQ ID NO: 61904 - protein, 298 aa, Streptomyces sp.
MPDLLLPHGQQSAQLKEIRAVDPERHGRWSFSSQQATLRRLDKAMQAFFRRVKTVSVNREGKQWYVILACDYVPAGPLPATGAVTGIDMGIAHFLTTSEGEHQPNPRHGRRSAEALGDAQRALKAFPRRRRENRTTRHRRAVERVARLHRKVRRQRTDHAHKTALAMVRTYDVIAHERLSIANMVRTTKPKPDPDMPGRFLPNGAAAKAGLNKSIHDAGWGVFLGILAHKAESAGRVLIPVDPRNTSRTCPECGHVSGENRTTQEKFECTRCGHTANADQVGALNVAIRAGLVLPDVA

SEQ ID NO: 61905 - protein, 440 aa, Streptomyces sp.
VSWELGLEKRQFGHRARLTLSPAEIRLVDDQAHAARTMWNCLHAWWTMLSKDKRTLAADDVAIRRARMEIDWLGVLPAQAAQAVLKTYYQAWKNCWEKRADEPNFKNRFRTVMSVDIPQGRDLQITRVHRRWGMVNIPKVGRVRFRWTRDLPVGKKANADNRITGARLVKDALGWHIAFRITTLEPKPQPHRGPEAGIDAGVNIPLALSDGNHQDHGRSPRLPDKTADRDKWLNPDEKARLLCLERRAAHRKSLCKPGQRMSNRLKRTYDQIASLRAKAKRRASDWQHQTTTELARTYGVIVVEQLDIPAMTKSARGTIEEPGKNVAQKAGLNRSISQEAWGRTITLLTYKAARHGGILHKVPAPGTSRRCSACGFTTPGSRESQEVFVCKNRDCGWSGNADHNAARNILHLYRMGLALIPAAGRAVVRRPPGVKPATAR

SEQ ID NO: 61906 - protein, 215 aa, unknown
  TnpB Polypeptide
LSNDYYDNTPGIRKNFIQVNVSEGNVIAFFFAKDVPARTDYLPEMDKLSLDIGLSTLFVSDKGDLWGRTFFSVLKKYDDLLTALAKNRQRQGQKTRSLKYDRLVDNIREFIKNEINRVLNRAVDIRKPAELVVARLDFRSPDLSQRMNRLISMFGRSLVKRKLDSLNASLGITVTEINAAYSSQECSVCGYVAKEIDRRNRSSNANVAAPECMPM

SEQ ID NO: 61907 - protein, 326 aa, unknown
  TnpB Polypeptide
MYYLFAGQSVHALQLLATSMRYMNTKNMKNMMKKEGMKNEGVVNYMPTIYISRKFQIFPDEQQKKIINDTFGCCRFMWNKLLEKASETYFNEDMVFEIVNYGDIVSEHAFLDKSNKELVIDRHAVSVEKTFKSLYVDSNGTSAEYPRYYRKAQKRLRILQKKLSRQTKYGKNWNKTRIKLSKLHEHISNQRYDFLHKLSSSITKNYDVIGVEDINMRNMSQSLKLGKSTMDNSFGMFRTMLQYKQDKQPFHIVVRADMWFCSSKMCHRCGNIKKDLQLSDRVYNCSSCGLTIDRDWNAAINLRNEALRQVNSWSIRKFTIKETFVS

SEQ ID NO: 61908 - protein, 390 aa, Nocardiopsis sp.
MVGVSKIVAWVKLTPSPEQAAVLASTLRTLNDHATRVAKVAHEQGVMRNYELRKHTYQQLREAGVGSQAAQHVIKKVRDAYRTRQSNPDNGNYGTKGSARRTRMESMPITFRPESAHPYDARNLSFAMDARTISLWTFQGRLKDVPFVGSVDQVKMLAEHKRGEADLLRRNGTWFLAVTVEVPDAPEIDPASFLGVDLGIINIATTSDGQVMAGRQLNRYRRRQLRLRQKLQAKGTGSAKRLLKKRRKREARHARNTNHQISKRIVAEAERTGRGISLEDLTGIRIRVRQRRPQRVTLHSWSFHQLGAFIAYKARRAGVPVVFVDPAYTSQTCAECGHVDHRNRVDQAIFICRGCGVVAHADRNASANIAARGRVVWNAGRKSHVPPDHP

SEQ ID NO: 61909 - protein, 379 aa, Microcystis sp.
  misc_feature (300)..(366): Xaa can be any naturally occurring amino acid
VITLTYQYKLKVNRQQEREIVHILDVGKSVYNYALSERKDWLNSRKCLADHCSLVSEYIIPADEPYPNYFVQAKNLTEAKKVYPILKTVNAQVLQQVLKTVDKAFSDMKSKGFGFPRFKKKMRSLVFPALSKNFLGDGCLNFPQLGKIRIRKSREYPSGFEPKQARIIQKASGFYVSVSFQSPELVPDMTVGKTCLGIDAGIESFVATSRGDLIKAPRFLLKVQSKLKLLQRRLKHKVKGSNNWLKLQEKIARLHEKVSNTRRDWHFKLSHYLCDFADNIFVEDINFVSWSRGIVRKQSXXXXXXXXXXXXXXXXXXXXXXXXXXXXXXXXXXXXXXXXXXXXXXXXXXXXXXXXXXXXXXXXXXXSVLIYKVFRNQQR

SEQ ID NO: 61910 - protein, 384 aa, Bacilli sp.
MITHKIRIYPNVKMKNFLDSQFEFSRRDYNRQLKMIVDGIREKRIHEGNFVQALERIKLHAIKSVQSMGGSLPYFPDITARNAKRLVPVAKTILRTRVFPPFRKPQRGSHFLHLASAGNPNFAFSLPQSKKLQIGSFGSIRMSEKLRFSSPLSCTIEEKNDCYFACFLFKDSITPYPKTGKITSIVPGTRTTIIGMGSDNKTRAWSLNEKSVSKLLKRCSYLSRLLRQKEPQNKTKSSKRFDRNLHKLRSARQKLNNQISSFLEQTSHSLLWKFDRITAESPTTTTGFHEKRCLRVQSKNAYSQLLKRVVSKAIQVEKEANVTSPVISYRKTCKDCGSQLPLLLWSTHYDSVCPFCNAKIRPNINAATNILRGMLYAKSSMSGP

SEQ ID NO: 61911 - protein, 234 aa, Frankia sp.
VRGQALIRHPVLRRRPGRAAPDDRRRGRRGCRYRAVFDDGEHEPNPTGLVRSAGRLAAAQRDLSRTKRGSTRRRKDAAHVGTISRHIARQRLDHAHKTALGLVRDHDLIAVEKLTVTGMTRRAKPRPDPDTPGAFLPNGQAAKSGLNRSIHDAGWGVFLGVLRAKAERAGRVVVEVNARHTSQRCATCGHGAKENRLTQAEFACVRCGHTADADENAAVNLLRAGRALQSAQAA

SEQ ID NO: 61912 - protein, 312 aa, Chroococcidiopsis sp.
LIKAAKQGLYRFEQIRLPGYLPKDGFFPLIMPRIKVKDGFFEIPFPARLEGKELKEVRILPKYKARFFEVEYIIEAEPEPQPVDPNDQIAIDLGLNNLATCVSTTGVSFIVDGKPLKSINQWFNKENARVQSIKDLQGIKGITERQSRLTLNRNNRVRDYLNKTARYIINWCIEHKVGTVIVGVNQGWKQEINIGSRNNQNFVQIPHWSLRNKLKALCERYGLNYLEQEESYTSKASFLDKDDIPTYNPDNPQEYKFSGRRVKRGLYRSCGGHLVSADANGAANIGRKCSLNGFNSERVAAVLAQPLRVKIS

SEQ ID NO: 61913 - protein, 398 aa, unknown
  TnpB Polypeptide
VERVFPEPEFLPYYSRRYAAFCNKTIHITAGGKAMNKAFVFRIYPNKEQRILLAKTFGCVRFIWNKMLADKKDCYETTGRSLRTTPAKYKKEYSFLCEVDSLALANEQLSLEKAYKNFWNGKGKVGFPKFKSRHKGRSSYTTNYVNGNIEIADSKIKLPKLKWVRIKQHRDIPEDYKLKSCTVSQDPDGKYYISVLFAYEEMVTQQKIEKVTGLDFSMKELYVDDQGRIPEYPGFYRKAQEKLAREQRKLSKCEKGSNNRARQRKTVAKLHKKISNQRKDFLHKQSRQITNAYDAVVVENLNMKDMSKALRFGKSVHDNGWGLFIRFLQYKLTEAGKQLVKVDKWFPSSKTCCVCGKKKDELALSERVYICECGNIMDRDQNAAINIRQEGLRKLGIA

SEQ ID NO: 61914 - protein, 390 aa, unknown
  TnpB Polypeptide
LLKSYKTEINPTLEQIQKINKTIGTCRFVYNFYLAHNKEVYEKEKKFVSGMDFSKWLNNIYLKENPEYAWIKEVSSKSVKQSIMNSERAFKRFFKGQSGFPKFKKKGKSDVKMYFVKTDSKVIIPCERHRIKIQTLGWVRLKEKGYIPTDSSTYIIKNGAVSCKAGRYYVSVLVEQPEQVSPQLKDFGLGIDLGVKDFVVSSNGIVKKNISKTAKLKKLEKQLKREQRCLSRKYESLKKRNKNEKGEATRQNIQKQVLKVQRLHHRIENIRTDYINKCVNEMIKTKPSYITIEDLNVSGMMKNRHLSKAVASQKFYEFRAKLEAKCREYGIELRIADRRYPSSKLCHECGCIKKDLKLSDREYVCECGYHADRDYNASLNLRDAVSYKVA

SEQ ID NO: 61915 - protein, 473 aa, unknown
  TnpB Polypeptide
MGGWQHYQLPEGWVARGWRFEVEPTTPQQPSLIFRQFGARRFAYNWALAQVKANLDARTTDPAVPPLAWTLPTLRKAWNQAKDEVAPWWPSCSKEAYACGIADLVQALQNWSGSKHGHRAGRRIGFPRFKARRRDHGRVRFTTGTMRLEPDRRHLTLPVIGKLRCKENTRRLQRLLGNGRARVLSMTLSEHGGRLFVSVATIIAHAPRSPSQPDARCGIDLGIGQEWAVVAHADGSIQRVTHPAPWAAAHSQRRRAARQVSRRIVGSRGHRQARTKLAALDRRAANLRRESMHTLTTAVARRYGTVVVEDLDVAAMARGMGRRAFRRTVYQAGIGVVSPILAYKTNWAGGQLVVADRWFASSKTHHRCGGYLADLKLRQQAWACPKCGALVDRNANAALNLRDWTGPVTDRDVQRGGVATPVPLVGDHGGQAHATSVGVRGLVRPPQGGGGRRHQNQPPARGGEEPRTGVPAR

SEQ ID NO: 61916 - protein, 556 aa, unknown
  TnpB Polypeptide
MARSRGTIVSVKVPINWESMTNRSRQRLRQIVGRDSRAIRAFLGIIEQHENELLTGRKKNRIHDGKLDKLTLTALRTKTGFGQRPSVLHDMKARFPRMSQNELQECRQTAVALYESFLSLREKKGWQASRPRTIKSTWRIPRWVFTQRFKIEYNESSFSKWWLNLRDSLDSVPEGRKTHDRLLLPLKISPFHINQFRRGDVKACQIFIDRSRKWWANFAVRVVIDEAPDTSLPPAVLGIDLGIEKAVCTTLITPEKVRETKFFKQKEKVELIRKYDRLVADLQRKISIDDNSSPDGVFQKLRQIRHKRENIAREYDRVLVKYLLDYIEELSNKYTLYVSIGRLKNIRNVARKGNYQGSQFRGMIHSWAFARITESLKHGLAQKGWSVDGKDSKFQVVSEAWTSIMCWKCGTKGVRPKQNYFKCPSCGHKTNADRNGAINIAGRLITLTKSLHSVRGLGKWEDSVKTGKHSRLKARKKKPSQGKSLLSSKDQTSGLGESAAVHFVQMDLLGFGDDSKMSDNDPAVASTMETLSVVGSDVPTLKQEKETRSSGGISSR

SEQ ID NO: 61917 - protein, 442 aa, Halobacteriales sp.
MKRSNTFDVVPRSPTDGELLSRVLDASASLWNELTYERRQRFFGELDGSVWDAPRVHDTYKGVLGSAAAKEMKRKNDEAWRSFFAAKEAGEPAGPPGYWGNEEDGRDLRWYGRCDQYTLEIGERSRLEIPVGKDLKDEFGLGHAERVRLEVRGRPKWDGKPGRLELYYDELDDRYRAIQPVTVDNSRQDSPLADETAALDIGANNIVACTTTTGQQYLYEGRDLFEGFRETTRRIADHQLKVKREEGRYTSKQIQRLYRRRTRRRDHAMNALARDLMERLYEEGVSTVYVGDLTDVLETQWSVETNAKTHNFWAFRAFIDRLAYTAEEFGITVHLRSEAWTSQECPQCSSTEDTTRHQDTLTCSCGFEGHADLTASETFLRRNEADVPRPMARPVCLKWDDHDWSGTPYPHVDGSGFHVHDRQQAVETARERLPSVRKTPEQ

SEQ ID NO: 61918 - protein, 421 aa, Synechococcales sp.
MLNMTWEFKLEPTVDQVSEIEDILEVCRNVWNFALRERKDWLDSRKCLVNACSIRQEFILPVEAPFPNYPVQAKRLTLAKTEFPRLKTVNAQVLQQVLRKLETSWESWRLKRSGLPRFKKPKRMRSFVFPQMLKNCVTPEGIKLPQLGLVKVRWSREIPDLFEVKQARIVRKASGYFVMLSLEADVDIPAVAPHGHPVGIDVGLEYFLSTSDGEQVKRPRFFDSLHRKLQLLQRRLKKKVKGSANWLKLQKKIARVHQRIADTRKDWHFKLAHHLCDNAGMVFVEDLDFRIMAKGMLGKHTLDAGLGQFTNQILPWVCFKRDVYYGKVDARGTSQECPDCGAAVKKDLSTRVHHCYNCGSIKPRDVAAGQVIRTRGQRGIENACGADLAGMAVTSSSQVALKQEIFGVTQRIFTHSARLGG

SEQ ID NO: 61919 - protein, 392 aa, Lachnospiraceae sp.
MQQTLTAKMQIVPQPSDRQLLLDAMKAYSAACSFVSAYVHEHAMPLNQIRIHDAVYRTCRSNYALPSQMAASVTRTVIAAYKSIRTNQKRHSERFSKKKRHADIVPEFRAPQLSLVWNRDYSLVWNADKTERLFSVNTLKGRIKCAFHADAMEWAFADGAKFGTAKLVYKHDKFFLHVPVTIEVPDAPDASGHTRVVGVDRGIRFLAATYDGRKTTFHSGAQVKQKRAHYKQLRRQLQMRGTSSARHRIRTIGQRENRWMNDVNHCISKALVCSNPEGTLFVLEDLTGIRGATERVRVKGRYTQVSWAYYDLEQKLAYKAKKYGSSMLSANPAYTSQTCPICGHVDKKSRKHETHTFKCTACGYTTNDDRIGAMNLQRMGIEYLLKAQVSGE

SEQ ID NO: 61920 - protein, 306 aa, unknown
  TnpB Polypeptide
MIRHVKKLKRLKRIRRIKEVKEVKKLKEIKVPVLKKLCCYINNQNFKIQDNYISFPVMIDGKSKRISVKTKMTDKQKLILSSHRLGTMRIVIKNINTLVAQFVYEINEIEKVNESNNVMGVDLGIKCPAVSYCTDGSVKFYGNGRKNKYMRRHYANLRKWFQKAKKPTVVKRIKNKEQRIMKDIDHKISREIVNTAKKHKAKVIKLERLENIRSTTRTSRKNNPSLHTWSFYRLAQYIEYKAKLAGIEVEYVYPAYTSQKCPQCGNIHHAKDRKYICKCGYHTHRDLLGAINICNSTEYIGNRCIA

SEQ ID NO: 61921 - protein, 397 aa, unknown
  TnpB Polypeptide
MMHAYKFRLYPTKENEEKLLLTLNKCRYVYNFLLDELNRQKVIDKAQLQEMIVDLKRVEPDLQDVHSKALQYENYRLFSNLRSLSQTKKHGRKVGSLRFKGKNWFKTFSYNQSGFAIIENNTRFDKLWLSKIGEIPMIVHRKIEGKIKQVTIKRASSGKWFASVITETENEVPQSTNTKAIGIDLGIKNFVFDSDGNSLSNQKFLEKSSKKLGKEQRKFSRKAKGSQNRNKQRIIVARIHEKIVNQREDFQHKLSRYYVNNYGLIAIEDLQVKNMIRNRCLSKSISDAAWSKFDQMLEYKAESAGVRVVKVEPNNTTQICSNCGINVQKKLGDRIHECQCGLIIDRDYNSAKNILNKALLSERQESTPVEIEPLILSEQVRSKKQEALSVRVGQFTR

SEQ ID NO: 61922 - protein, 673 aa, Variovorax sp.
LRGRQDRGLCLRPGPRDAHERFVPPQGRERSCCGERQARVRRRRLHLGRARRLGEGLGERDAVDAPQLPGEGLRRPPLRRGLSPSRGRDDEEAGRQRLATAASRYLRPVGNVGLNDSSRLTYCRLVPVPVAPSPVLLQSGVRFRARPDAAMAQRLRQWVGHQRCIYNAKVDEDRYFAGMRLSMLARGRTAAEAATPLDRAYAQFRGETTPWLGEVPSQVLRIGAERWFEGKQRQLKGLARAPRRRNRLNFDSVRVSSELFEFRELDEPQGDLRHELVLGNDKFGFGSLPFTAHRPYEVPKSLTLRCTGGQWFVSFSYEHAAPKGFVARNEEELAYELDLLDGPALETRTLGLDRNVADNCLATSDGRFYALSAVQKARIARKAVGAKRHQRRLARQEKGSANSRKTRDRLARKLAYKREVLRDFSHQTSHDLLESKANDAGVPQLLVLEALKVGNMTARPKARQDETGRWLRQRRREQGGFEPGHPLERLWAHCRAAGLQGGPAQRSRAAGACGLFIPRVFPVRAHSPRQPRRTAVCLSTLRTRSARRYERRPHHCGPRYRDGARPKGRREGQEACRLSTARNKGRAGIARCACGGWCKSRRSESRHRAVPEEAGRCHDYSAVRRLVAGDSRWPTYLGKLRRACRGGERRCAADRRAHPHCSRSPQRTQDSRR

SEQ ID NO: 61923 - protein, 487 aa, unknown
  TnpB Polypeptide
MMVMTQKVCIERVEVRGAAPYLGMCVDVEGCEMPVWSDDPRVVLDWLCDAWRCRYNQLRTRRMKWNRGRSELVPLGAVVDSRTDRQVREQCSWLASVPAMVLQSPNRIENTDWWSANKRRKTLKKRHRYPGSMPGFKSRKTDPMFVCWYNKGANAVFHKLNRRHGVVVISGQNSKEHSLPGRGCRFEIRIRVRLSQEIRPYTSIGVHPKAGYLVFVNDPLPIPRKRTGLETGIDRGCAHSLALADGSFIDLPKNRLEKIDGEIRRRQKAQARRVRQSGLSAKEYVRGGHRSNRYMREQEQISRLYRQAHRIIDDFQQQVSHRLVSEYDLIVLEDLNLQGMSRKAKPVSDPLHPGRFLPNGQAAKRGLNHALRSASMGGIRQKLEYKTQRAYASSLLLVNPAYTSQQCSRCGHTCKENRESQAEFHCTKCGLKLNADTNAAINILQRGHQQLISGLDEAGRGNTASDIQDKNIAKDAAALKREPTASH

SEQ ID NO: 61924 - protein, 404 aa, unknown
  TnpB Polypeptide
VRAESKSFIFYWFNIANIANKYYIRVIYISFMQRISYKYKIYKQNRNHQKRLDSLMHIAAEVYNHALALHKRYYRFFHKSLSKNALQKHIAKIKSRCYNHWNLLNSQAIQQITDRIYSGYDRFFAHDAKHPPKFRSGRKYRSVTFKNSGWTLNGNVFTVNALHLRLKFHCSRPIEGRVKTVCLSRDAVGDWWLSFSVEKEESKMPKKPMSGKTAGFDFGLKHFLTGADEQKIDSPLYLTHAIGQLKRKSRNLSRKVKGSRSRVRARRDLARLYRRISCMRGDFHWKLALRLVEEYDVICLETLHMNAMKRLWGRKVSDLGFAEFVNILSYQCSKHGKKLVRISQWEATSKTCSVCGYKEESMPLKIRQWTCPSCGKTHDRDVNAAQNILRVGTSTLGRGNVRLA

SEQ ID NO: 61925 - protein, 404 aa, unknown
  TnpB Polypeptide
MQLVEQHNLKGKQWKEADDLCFRSKNLYNLGLYHVRQHFFEKESYLNYNQLDKLLQSTEAYKSLPAKVSQQILIQLDRNFRSFFNALQSWKTDPSKFTGKPRIPGYKDKTKGRNLAVFTDQAISKRLLKKFKIAKLSKTEIAIHTLKENINQVRIVPTSTGGYVAEIVFEQEPVKAATDSKKHLSIDLGVNNLLAMTSDQKDFQPLLVSGGAGKSINQWFNKQRSKMQEQLNPEQAVSKAILRLTQKRNRKIRHLFHQVSRFVVQTAIEHGIGTIVIGKNKEWKQEVNLGKRTNQNFVSLPFNQLIQQIDYKSELVGIKVHLQEEAHTSKCSALDLESVEHHENYLGKRVKRGLFKTAEGILLNSDVNGSCNIMRKHLKKEFQKSSENWIEAIVVWPKRMVFQA

SEQ ID NO: 61926 - protein, 410 aa, unknown
  TnpB Polypeptide
MVQVERQFIKGTPEIEEICFKAARLFNRCNFLMRQEHFAGRRVFGISQLWEMLSKEQVFQQLHNTKTAMQTIRRCLTDWSNFFKSLKVWNKDKTKFLRCPKPPGYKKKMGQVIFFNETIKRKPLKQGLLVPTNLLFSIKSKHCNDFKQVIITPKTFGFVIEVSFEAPKEPKKLKQPGTCAIDLGVNNLCAMTSDQHDPVLIRGGIPKSINQWFNKNRSKKRSRKRYWRLENFFHHTSKFIIENCQANGIGTIIIGRNQGWKQKTKFRRKSKTSQNFQSIPFFKLIEKIQFKAEQQGIKVVFTEEAWTSQASFIDSDPIPVFDKDQPKPQMSGTRFKGLFKTDSGAVLNADVNGSLNIARKVIPKIVEDDRWSRSVSATPVVVNPLKWFHLEKGSMESGLMARTSECFATF

SEQ ID NO: 61927 - protein, 364 aa, unknown
  TnpB Polypeptide
MPLAKKCYHCRVIEDLTNTKLVALEQEYNNLQHYLQTKEDLGLYSANKQQADRFYKIVKKTSRYPISIRNDLIRIEHNPNTIAEYWVRIPVKLVRGGLWIGLIKPYEPIPKDAKICECKLYKRDNRWFLDVVVEKEIPEKLQYQNVIGVDMGIRHIATSVELANDLTKFYGKNLNHVRGHYFWLRRKLGIKKAIDTVKKIGSHEKRIANDIIHNISRDIVNRAIETNALIVLGDIKHLRRRRQNTKGRKFNRKLSGFQYYKLTQYIKYKAALAGIKVIQVSERWTSQYCRKCNRKGIRKIQGLFQCKKCNVRSENADRNAAFNIAYRGLGQVSSLGVTVNIPRTFPSVDRNAMMRKEATDFNQW

SEQ ID NO: 61928 - protein, 306 aa, unknown
  TnpB Polypeptide
MRRAYKYRFYPTPGQAELLAQTFGCVRFVYNSILRWRTDAYYERQEKIGYTRASARLTALKKEPEFVWLNDVSCVPLQQALRHQQTAFSNFFAGRAAYPAFKSKRHKQTAELTASAFKYRDGRLYMAKCKAPLDVRWSRELPSAPSTVTISKDAAGRYFVSCLCESEPVSLPIAASTVGIDVGLKDLFVNDTGFKQSNPRHTAKYAARLALLQRRLSKKARGSKNRARARLKVARLYAKSADCRLDALHKATRKLINDNQVVCVESLKVNNMLRNPSLSKAIADASWSEFVRQLRYKGEWAGRSVV

SEQ ID NO: 61929 - protein, 435 aa, unknown
  TnpB Polypeptide
MREGKPRPPLGGLPSLDILRQPCYHSSMVAIARTVRIRINLPLAVARATLADYAHACNIASRIAFDAGCISNRVHLQDLAYDCIRLETGVTAQVAISAIRDVCAAYTTLRTQKKRPDEPVHFNGSTITLQGGERGRDFAFRKSGVSLSTSAGRVKGISFTHAPEAARYFDGSWQMGTAKLTVRNRKVYLLVAFSKQLPDPTPADGVIGVDRGERYLAVAASEKRSCFFGGGRVKQVRHQYRIRRRALQRKKAQTHSRSVRRVLQRLSGRESRYVRDVNHVISKRIVQFALSEGRPAIALEDLKGIRQRGQRRGKRQRAAFNSWPFFDLEQKLAYKAEEVGLEVLRVNPRNTSRACSQCGYLDRANRQGLDFACRACGYRTHADRNASLNIRLRGLLTRQVPSRDGAPSVAPEVPPVDAKAVHTELRPRAGTSFRL

SEQ ID NO: 61930 - protein, 436 aa, Veillonellaceae sp.
MIQMIRSIRVQLLPNNKQKTKLFQFAGAARYAYNWALDKQMDNFREGRKLQTDHELRKAFTLLRHSEENKWLLDISNNVTKQAIKDLCIAYKNFFRKQKQPGYIKYSSKKVTHYTRIGKSLTIYDMNGHPKFRSKKNGDFRFYQDNVKIQFTDTHVKLESLAGSKRKNRQRLNWVRLAEKNRIPVRAKYTNPRITFDGENWWLSVGIQISRALKPLRGLFFVCKKQQPAHTEGIGIDLGIKDLAILSDATKVGNINKTRAIRKLKKKRRRLQRQVSRKYQMNKKGDSYCKTSNLIKSEKQLLRINHRLANIRQNHVHQATTAIIKRKPSFVCLEDLNVRGMMKNRYLFIKIQEQNLYEFRRQIEYKAQWAKIPVIIADRWFPSSKTCIACGHVKKDLNLSERIYVCPACGNVIDRDFQAALNLKRYGEAERMISAS

SEQ ID NO: 61931 - protein, 403 aa, Uncultured sp.
MNTKEQPFKKGYKFEIYPNIEQKELLENTFGCCRFVWNKALDNAKKEYEFFLAHKDLNPSNIILKPNLSGYEFVNRLIKYKSDPETQWLNDVNSVALQQTMLHLGTAFSIFFKNRKGYPAFKKKHNRQSFSLMTNSFRFKGEQLFIAKSKDPLIVGFSRKLPSQPSSATISKSPTGRYYISFICEYIPTKTNGKGKIGIDLGLKDFLVTSDGIKIPNPKHLKKHEKRLKRLQQSLSKKRKGSKSRNKARIKVAKQYEVVSNCRNDFQHKLSRILVNENQVIGLEKLIVKNMVKNRKLSKAISDVAWGSFTSKLNYKAKESQNCKLVYMDCWYPSSHICNVDHIQLDRKLSLSERTWKCPHCNTIHDRDINAAINIRNEAILTIELFQLQTKAGHVTFLANRPH

SEQ ID NO: 61932 - protein, 393 aa, unknown
  TnpB Polypeptide
MNILKRMRRLLKSFKTEINPTEKQKVIIHRTIGTCRYIYNFYLFHNKELYGHGEKFMSGKLFSVWLNNEYLPKHPEYSWIREVSSKSVKHSIESACTAFLRFFNHQSGFPKYKKKGRSDVKMYFVRNSPTDCLCERHRIKIPTLGWVKLKEKGYIPTSKDGYVVRSGAVSMKAGRYYVSALVEIPDTVPDGNLNEGIGIDLGLKKFAVVSNGKAYKNINKTARIKKLEKKLRQEQRKLSRKYKNLKKGETAQRTNIQKQKLKVQKIYQRIDNIRTDYMNKIIAEIVKNKPSHITIEDLNVSGMMKNRHLSKAVASQKFYEFQTKLKAKCIENGIELRIVDRWYPSSKTCHCCGHIRKDLKLSERVYRCDCGFIEDRDFNAALNLRDAETYRIA

SEQ ID NO: 61933 - protein, 370 aa, unknown
  TnpB Polypeptide
MEYSYKFRIYPTAVQAEQIQKTFGCCRFVWNHYLALRKELYEQDRKTMNYNTCSGDMTQLKQTLLWLKEVDATALQSSLRDLDMAYQNFFRRVKRGQKPGYPRFKSKHDHRQSYKSKCGGTNIKVLDKAVQLPKLGLVKCCISKAVKGRILSATISQHPSGKYFVSICCTDVDMEPLPSTGAVVGIDMGLKAFAITSDGVEYPNHKYLSKSQKKFAKLQRQLSRKSKGSNRWEKARLQVVRLHEHIANQRQDAAHKLSTQLIRENDVICIEDLAPKNMVQNHCLAKPISDAGWGEFRRQLQYKAKWYGKTVVTIDRFYPSSQICSCCGAQWSGTKDLSVRNWTCPECGAVHDRDINAAKNILAEGLRMLA

SEQ ID NO: 61934 - protein, 303 aa, Okeania sp.
MRLVDRHIINRTHNFWRVCDELAFKSKNLYDLANYYCRQHFFQSSKSLDLTKLYHATKDSDAYRALPTKVSKQIIKCLVATWRSYFQAMGEWSKHPGKFLGKPKIPKYKDKTQGRNVVIYSKESVYRASLKNGICHLSMSDIKIPVVVDTVIEVRIVPATSCYIIEVVYEKTLQPQINSRYVAGIDLGIDRLVALSTNKPGVKPLLINGKPLKSVNQLYNKRKAKYQSHLKGNRKTSRKIEALSYHRNRFVENYLHNTSFLVVEYLTTNNIGTVVIGKNDNWKQGANIGKKTIKTLPKYHTLS

SEQ ID NO: 61935 - protein, 208 aa, Okeania sp.
MQSIKTKLKVNNKQKTILAKHAGVARHAYNWGLATCIAEYEETKKRPSAITLHKRLVREVKSENPWYYEASKCAPQQALRDLERAFKNFLTIPQHGFPKFKKKGKKDSFYLEGSIQILKGNYIKLPRIGIVKTYEILPSVPVKNVTLSKRADNWYISFKYDLEPAPLPTPKQRAVIGVDIGINTLATCSDGTTYRSTKLTQTYPCMVA

SEQ ID NO: 61936 - protein, 415 aa, Moorea sp.
MRAAYQYRLRLTKLQEIEVEKWLEMLRYQYNYLLADRFNWYEQNRCSINSCLLICHLPDLRDNPDYFSQKKTLPQLKKNRPWYGVLQSQVLQDCVKRVDLAFKRFLKGDSNGKKSGRPRFKGKNRYKSFTFPSLSRNPINGSVLSLPKFGKVKMIYHRPIPEGFKIKTATITRKADGYYVTLSIQDDTVPDVIPVDSVKNPIGIDMGLKSFLVKSDGSEVPIPQYYRKAQKRLRKIQKAVSRSKKGSNNRKRIVTKLGKAHKKVADTRKDFHFKTSKELLDNYDIIAHEKLNIKGLARTRMAKSVLDAGWGQFLSILSTKAVRVAWPTALNAGLITKAVNPRNTSQNCSNCGRKVPKKLKDRTHSCPYCGYVADRDVNAAINILNLAVGHPVTSKAYRVTVRAASAKADTVRWCW

SEQ ID NO: 61937 - protein, 355 aa, Bacteroidetes sp.
MIKTYTYKLKPNKSVERKFYQWLGVCRVVYNLSKEVSQTSYQRGVSMSSYDIQSQLPDLKKAVPWINNVHSQTLQAVVGRYSDSMKKFFKGAGFPKWASKKSWKSVPFKSIKTTHNAFKLPKFGAVKVFNFKQPKGNLKTATLIREADGIYLKVVVDEFQSRTFCENQTVVGIDMGIKYFMISSEGNFTENPRHLQSKLKELRIQNRKLSRMKKGGKNFVKQVIVLQRLHQKVKRTRLDFLQKESTKLAAEYSTVIREDLKVKNRIKNPKLARTIADVSWGTFFELLEYKTNIIKVNPAYTSQRCNSCADVNKESRKTQSIFECVSCGHVDNADLNAANNILEKGQFLMEAKVAC

SEQ ID NO: 61938 - protein, 453 aa, Brasilonema sp.
VAVRRQTFRLYPNKVQEAKLLQARRDHCYLYNACIAHRKYEWRANRKSVSYLEQQNCLPAYKKEWVEFAYLHSQALQATVKRVDLAYNAFFQGLRKPPKFKSIRKFSGWTYPATSGWKVNTSGRHGSVNLNDLGVKIKMRGQARQWGKPSTLTVVYKPGLKQWFASFTVEVPDVTVRFGSQSELAYNEIVAFDLGCETAITTYDGKKVEQVANPRFTQKTEAKIKKVSKELRRKQAPNRTKKIKASRRWKKANRRVAQLQRKAGSQRRDWQHKVTSEIASCYDIGVTEQLNTKGMTRKAKNGSKRKKQKAGLNKSILSVGFGTLNKMLTYKIEAKGGLMIMLPTKDVKPSQRCPKCGTVHKQWAELSNRHHVCLSCGFDVPRDAGSAMVMYNVVTNQQPGLGTSLDSLGCLSSTSKTSKRKNTGSMKQLGQARRQKSSYVAEPGETPSAYAAG

SEQ ID NO: 61939 - protein, 380 aa, unknown
  TnpB Polypeptide
MVVHKGIKVRLYPTEEQEVLINKTIGCCRFVYNNALENCKQSYEQTQHFPSKKERSANLVPLKEINQFLKEVDYHALQQSIRDFDSALDKFFKNRNHFGFPQFKSKHNLKQSYRTTCDGGRADVLDNRHIKLPKLGKVRTKKFLIPNEYKLCNITVEKTSTNKYYASICIETKVQPLPKTGKQVGFDLGLKDLLIGSDGTRYARPKFAYAFKDKLAQEQRKLSKMRTKLERVNANLDECRNYQKQKHKVAKLHEHISNCAKDFNHKLSRTLVEEYDFLAFENLNVEGMKKNHSLAYSISDVRWSQLLNFIQYKCLWYEKNFVQVDRFYASSKICSECGAYHKDIVNSLSVREWICPDCGVHHDRDVNAARNILNQALSVA

SEQ ID NO: 61940 - protein, 357 aa, unknown
  TnpB Polypeptide
MLDALTKTLKVRVRDKHAKKLRRQAAAVNRVWNYVNELSSRAIRERGQFLSAYDIHPYTKGAGKLLGLHSQTVQQVAAEYVTRRKQFRKSKLAWRKTLGVRRSLGWVPVNTAAAQWKHGQVFFNGQHYKVWDSHGLSQYRFRSGCFVEDARGRWYFCVAVAVKPEQRCGTGSVGVDLGLKTTATPSSGKPLEAGRFYRDQEQKLAIAQRARKKQRVKAIHAKIRNRRHDALHKFSHQLVSENSLVVVGNVPSSGLAKTKMAKSVLDAGWSTLRTLLAYKCEHAGSVFLAVDERYTTQTCSCCGFISPNSPKGRAGLRIREWTCECGVTHDRDQNAARNILALGHQRLAGGMPHQNAD

SEQ ID NO: 61941 - protein, 252 aa, Streptosporangium sp.
VTVSRDPCGRWYASFAVETADPDQAPATGAMVGVDMGIKDFAVTSDGEKIANPRHLAKRERNLARYQRRMARKKRGSANRGKAKAKVARAHRKVAASRADFLHRTSTRLVRDHDVIVVEDLAVKNMVRNRSLAKAISDSGWGTFRNMLEYKSARYGRHLIVIDRWYPSSKTCSACGHLLAELSLSTRTWQCPSCGTRHDRDVNAAKNILAAGLAVSACGGDVRHSGSSRVQSPAKQEPQSVRAGIPVLQRGE

SEQ ID NO: 61942 - protein, 293 aa, Mycobacterium sp.
  misc_feature (67)..(146): Xaa can be any naturally occurring amino acid
VGPVIRGGLLRAAHPDHQITAHPADCARRNGPGSPDPGHGRHPRHRHRRADHHRIPKPGPAQGDTRXXXXXXXXXXXXXXXXXXXXXXXXXXXXXXXXXXXXXXXXXXXXXXXXXXXXXXXXXXXXXXXXXXXXXXXXXXXXXXXXRSVSDAAMGLVAPQLAYKTAKCSGVLTVADRWFASSQIHHGCTSPDGTPCRLQGKGRIDKHLLCPVTGEVVDRDRNAALNLRDWPDNASRGPVGTTAPSAPGPTTTVGTGHGADTGSSGAGGASVRPRPRRAGRGEAKTQTPQGDAA

SEQ ID NO: 61943 - protein, 602 aa, unknown
  TnpB Polypeptide
MIPLPTPLWGDASDPEDEPEPPARRFWNQRLKPLYDACPLPVRSTPSAPHHRAESSYGFRYTFQDWHQNWTHTAPPNTPSTDPSLSARLRPLVHPSPPPDPKAPSRKKAKATAADSPSTSTTDDVDAASTDPKKPPPFKRKVAVEGHLRTYKIRMWPTREQERELIRAFAGARKAYNWALEQVKEHGQRPNAIALRTKFRSEYEPPDWLKDDNGKHAISDRIRVGAIKQLADAYASNKAKQDKNPSHHYEVKYRGKRNYTDVLKIEKDPVGGHKNSPLLKFAPVPYANSERRAECLAFFGSNFKGKGGIRLQDKQHVIARLLAEGGRLKEDAKIQHDKRTNAYYFIYTFEAPKLTDPDPDFTSKRIASLDSGVEPFNAYYSPTTGEYGQLLARFRDQLEPRILKLDALQSKIAKRYVWIRDPETGKITDKQLAPPPPNRTRTQWRRTTHALENQLARERRRHVGWTQMAHYHACNFLLSKYDLIVNPKLQTQRLSMRHGRKLRTKTARAMLTMSHYMFDQRLQWASTRYAGRHVIDSAGEPGTSKTCGNCGAWKPNLTLGNKVFCCDRCGVRIHRDTANGARNNFFAALGKAMGVPPDATSA

SEQ ID NO: 61944 - protein, 375 aa, Verrucomicrobia sp.
VKLVAVAKLLPTPEQAAALLATLERVNEACAWLAERAFELKSADKLKLQGLYYRDLREKFGLSSQMAVRAISKVVEAYKRDRTRKPTFKPHGAIAYDQRIMSFKAMDRVSLLTISGRILLPYVAGPYHRARLEGVRGQSDLVLRKGKWFLYVTVEVPDGSPIDPEGWLGVDLGIRNLAVDSDGEKHSGAAVEATRQRHQRLRNMLQPVGTKSAKRHLKKLSGKEARFRSHTNHVISKHIVAKAKGTGRGIAVEDLTGIRERATVRRSQRAMHSGWAFFQLRAFLSYKAAIAGVKLVAVDPRNTSRTCPACGSIDKANRKSQSEFACKSCGFAANADLVGATNIARRAAVMQPIVSGYRGGKHCLSVPAQGQSCLL

SEQ ID NO: 61945 - protein, 100 aa, Salmonella sp.
VCVESLKVKNMFRNQNLSKAIADASRGERVRQLQYKGERAGRSVVAIDQFFPSSRRCGCCGFTMKKMPPDVRNRTCSECGEAHERDINAARNINAAGLAV

SEQ ID NO: 61946 - protein, 407 aa, unknown
  TnpB Polypeptide
  misc_feature (116)..(116): Xaa can be any naturally occurring amino acid
LQVQKAFKVTLIPTHNQEVLINKTIGCARFVYNRFLALRKELYSSEQKTLKYNGCSQQLTLLKKEIDWLREVDKFALQNSLKNLDTAYKNFFTDLKKTKGKKHVGFPSFKKKYGCXQSYKTNLTNGNIQVLQNRLKLPKLGWVRFHKSQEITGRLVNVTVTRTSTGKYVASILCETEIEQHPASPKSIGLDLGLKSYLVDSNNNEVANPKYYRTQKRKLRKASKKLSRAVKGSSNRVKAKIKLARVHERITNLKDDFLHKLSTRIIRKNGIICIEDLRVSNMIKNHKLALSISDASWSSFVDMLEYKALWHDRIVQKVGVFFPSSQTCNQCSFVNPDVKDLKLRGWVCPGCSHYNLRDENAALNILQEGLRILSAADGASEAQNACGHEVRPGLVQALVSEAGITPL

SEQ ID NO: 61947 - protein, 362 aa, Thiovulum sp.
MVLTYKYKLYETIKLKHLHKLVDISGIIYNHVIALHKRYYRLFGKYLSKFQLQKHITKLKNLDKYRFWKNVGSQAIQNITERVDEAYKLFFDNLKRKIRTSPPSFKKVKRYKSFTLKGKVGYKIEDNVISLSGYKYKFWLSRPIDGKIKTVTIKRDNNNFYIAVTIEKKEDENRIATGKKVGIDFGLKKFLTLSDGTEIESPLFHLKNLKKLKELSRKISKAKKGSNNRKKRKDRLSKLHTKIANSRKDYFHKLANFLKSKYDDIFIEDLNLKAMQKLWGRKINDLAFAEFVTILSYKANVHKIDRFYPSSKTCSNCGFKKEKLSLSEREFICENCGFKIDRDLNASINICRVGTSTLVERK

SEQ ID NO: 61948 - protein, 442 aa, unknown
  TnpB Polypeptide
MSYTTYSFKVKTPNPGKVRRLLGLMSGPWRRGLNFCVEQAKQHRPGDAWALHRFVYRHLRGPVGLGAQLAEACRDKAYEAYASYREQRKGGCARGFPHWNGVPPLRLNIPRSLRLFTRKGQYWAEVTVGGPPIRLRIAGTPRALEHVWQSAATHGEIVYARGDLFLHIATRDKTKVTPAPKCLTAIGVDLNVTGHLLVAVACDLAGTVLGTFWVPVGRLNEKRRRARRARAALQRAGRRDRVKAMKNRESRAVEAYLEEGTTLFVRWAAQFPAPFVALETLTGIRDKVRQTSTAWNRRLHSWPFRSGQDMVRYKGARCGLRVKALRAACSSRYCSRCGSRSTRRSGAAFACQRCGYGQNAHLNGARNMSWRAARYILAVAGRADPGAKPGSWGGHLLSSETAERQSGPGGRVDEERLPSSHTVSLRWPFRASPKPRTSVRGS

SEQ ID NO: 61949 - protein, 375 aa, Desulfobacteraceae sp.
MKITRSSKTSLKFATAEKRKILDEILDEYARAANFFIDWFWEHPEIRAKDEIKKEIYSLPETWFTARMRQCAAREALSMVLGAENTENRRKSSAEREVEELLGYEIFNDPVKPVHNGKKMTLSSQIVRIEKSRNSFDLWLILTSVGKEIKLNLPLKKHRQFIRWEKIGKPASSVVIHRDYVQISFEIETGKKREDGKSVGIDAGINHLMTTSEREFLGNDVRPLISGIKRKRQGSKAYRRAKKELSYYIHKTVKDYFKNSGIRLAVVEKLKNLKLNTEEKNKTKEFRKTLSNWNYRELLSIIEMRCEENRVFFRSVSPYKTSQRCPQCTHTQRENRSGEEFECLKCGYSEQADFVGSLNILQRFLTGRYGAGFKT

SEQ ID NO: 61950 - protein, 441 aa, Halobacteriales sp.
MEVRRTVPVKLDVDSDGAALLYETVDEFLWAANHVVNHAWQGEYKTTSKAQLQEETYDEVRDQTGLHANLVQNARNKAADAVQSAVARWKQGRYAGKPHFSNPTAVYDRRCATFHDEYVSLATVDGRIDVEYVLPDPARDTPHSRYLDNDDYEVTSAELHHRDGEWFLHLRTKAEVESDTLEQATTGHSTVLGVDLGVNQLAVTSTGVFWSGSEFDHWRREYEKRRGSLQQRGSRHAHENIQSVGRKETGRFTMMLHRIANGIIEEAAENGCTVIAFEKLTGIRDRLSGASWGHEWAFDRLYEYVEYKAEPRGISVKQVDPENTSRRCSTCGFTHPDNREGENFECLKCGYGNHADYNAAKNIGLRYLRRNQTGDGGGAPVGVRLNRGMLNANGEFEPPAGDSGQSGSPRESPTLNEANGDSAEQSSANHSSGPAAREKKP

SEQ ID NO: 61951 - protein, 430 aa, Halobacteriales sp.
MAWDVTRTVRVRLNVPDDRKSDLHATNDLFQYCANRTADWAWRYPNEDCVTSKSEAEAAIYNELRHETNGLHANLVQKAIKRATDDIGNCVDRLADGENTSKPEYDTFSIVYDKRAATYYRDKVSLATINGRVECDYDLPDSPDGTPHGDYLLNDDYSFSTSTVHYDSETDEFYLHAAMERELDVAHPEKAEHSRVLGVDCNVDDHIAVTSTGRFVGNADFLNHRRREFEKRRASLQQTGTRSAHLTYHRIGDRFGHWSEDYLHRCSKALVEEAHRQNCSHIAFENLEQIRDRISDGKKFQQWAFRELQQQTKHKAELAGIVVETVDPSYTSQQCSKCGTTLDENRDGQHFECLDCLYTANADYNAAKNIARKLTLKLQRGQKSPAGGAFCQYALKSGVMTVNATEVASDQYVSAERESTDKPTASAVGS

SEQ ID NO: 61952 - protein, 389 aa, unknown
  TnpB Polypeptide
VILLKHYSIGEFAKARMILGKRVRLFPTKEQEQKLWQSVGTARFIYNWTLTRQEENYKSGGKFISDNDLRKELTILKKTELNWLNQVSNNVAKQAVKDGGEAYKNFFKGLADRPKFKSRKKAKPSFYNDTSKLKVKESNLLIEKVGWVKIKKNAIPMNCKYTNPRVSFDGKYWFISVGLEREKPIIELTTDSLGVDVGIKDLAICSNGMTFKNINKTRIVKKLEKRLRRLQRRVSRKYLRNKEGSKFVKTSNIIKIEKQIKLLHRRLANIRSNHNHQATNKIVKAKPSRVVMETLNIKGIMKNKHLSKAIGKQGLYEFKKQMQYKCEFNGIKFIEADKWYPSSKTCSKCGHVKQKLSLSVRTYICDKCSLVIDRDYNASINLSRYELVG

SEQ ID NO: 61953 - protein, 379 aa, unknown
  TnpB Polypeptide
MPRKPNKENRAVRCRAYLSGAQLEAAMRTIGCCRYVYNEALSYEDAEYCEHSRHVSYEDLTSRLPGMKKRLPWLKDADSSALQQSLRHLDTAYRNFFERRARFPKYKSKHRSRWSYTTLCINNNIRFEDGFLVMPKIGRVRIVLTRDIPAGWKLKSATLTVERDQTVYISCCFEYEAAPVSYVPDVNNAIGLDYKSDGFYVDSGGNTCGSPKYMRKTQDVLTRRQRKLRHKKKGSRNYAKQKARIARIYRHAANQRLDFCHKLSAGIANRYDIVCVEDLDLKAMADKGTGNGKATMDNAWGMFLRFLEYKLRARGKALVKVGRWFPSSQICSACGARHAMPLSVRTYVCPECGAVMDRDENAAANILKEGIRLYLLATA

SEQ ID NO: 61954 - protein, 342 aa, Bacillus sp.
  misc_feature (94)..(109): Xaa can be any naturally occurring amino acid
MEVNQMIINKAYKFRIYPNQAQAILINKTIGCSRFVFNHFLSLWDHAYKETGKGLTYGTCSAKLPAMKKEFVWLKEVDSIAIQSSVRNLADAYXXXXXXXXXXXXXXXXREVEGRIVNATVRRNPSGRYFVSLLVETEVQELPKTNSYIGIDVGLKDFAILSDGTTYKNPKFFRLLEEKLAKAQHVLSRRMKGSSRWNKQRVKVARIHEYISNARKDYLDKISIEIIKSHDVIGIEDLQVSNMLKNHKLAKAISEVSWSQFRTMLEYKAKWYGKQVIVVSKTFASSQLYSCCGYQNKDVKNLNLRKWDCPSCRTHHDRDINASINIKNEAIRLLTARTAGLA

SEQ ID NO: 61955 - protein, 313 aa, unknown
  TnpB Polypeptide
MLIQRAYKTELDPNNKQRTVLLKHADTARFAYNWGLARRKEEYKNTGHSSNAFEQHKQLNALKKIDFSWMYEVSKCAPQEALRDLGKAYKNFFEGRTAFPKFKSRKERIGSFRLTGAIRVSKDAIQLPRLGLIRIKEQDYLPTNLHILSATVSERAGRWFVSVLVEKEIPVPINPGEIAGVDLGIKSFATVSDGAVFKNTKALSRYERRLKREQRAISRKKKGGNNRKKAVRKLQTAHARISNIRKDVIHKATTWLAKTKSVVVVEDLNASRNLEKLAVSCTESINACGEESSDQFGETLPMNQELNARGING

SEQ ID NO: 61956 - protein, 428 aa, Nostoc sp.
MCRIYSALKTVYPFLRYHRQDPGKMLNLNYTYRLKLNQQQSQTYDAWLETSRRVWNFALAQRKDWYNSRSCRIDACSIKSEYIIRADAPRPTFASQCKALTQARKTNPNLNAAHSQMLQQVLRRLEKAFIGMWESERGFPRFKKQGRMRSLLFPQLGVNPIQGSKVKLPGVGWVKMQLSRPIPDGFVAKQAQVVKKASGWYVMLTLSTDVDVPSFAPHGQPIGIDLGLKSFLATSTGEQIARPKFFVDLQCKLRLLQQRASYKKLGSNNWRKAQQKVSRLHEHIHNNRADFHFKLAHHLCDQGGMIFAEDLNLKAWAFGMFSKHSLDAGFGKFLSILEWVCWKRGVYFAKVNPDGTSQTCPNCNHHTGKKDLSERVHRCGECGFQTDRDVAAAMVVMQRGLAAVGHTVKMLGEGLSNSSLLTQESPVL

SEQ ID NO: 61957 - protein, 312 aa, Nostoc sp.
MLQQVLRRLEKAFIGMWESGKGFPRFKKQGRMRSLLFPQLGVNPIQGSRVKLPGLGWVKMQLSRPIPDGFVAKQAQVVKKASGWYVMLTLQADINVPSFAPHGYPVGIDLGLKSFLATSTGEQIARPRFFVNLQRKMRLLQQRVSHKKLGSNNWRKAQQKVSRLHEHIHNTRKDFHFKLAHHLCDQGGMIFAEDLNFKAWAKGMFSKHTLDAGFGEFLSILEWVCWKRGVYFAKVNPDGTSQACPNCNHHTGKKDLSERVHRCHECGFETDRDVAAAMVVMQRGLAAVGHTVKMLGEGLSSSSLLTQESPVL

SEQ ID NO: 61958 - protein, 423 aa, Nostoc sp.
MIVYEFKVKGKDRQYRAIDEAIRTSQFIQNKCLRYWMDNEKVGRYDLNKYCAVLAAEFPFADELNSMARQSAAERSWSAIARFYDNCKKKIKGKKGFPKFKKNCRSVEYKSTGWKLSETRKAITFSDRKGIGTLKLKGTYDLNYYDIRLLKRVRLVRRADGYYAQFAIDIDVKIESQPTNQVVGIDLGLKYFIADNKGNVEPSPQFYRKSEKQLNRANRKKSQKFSSERKKAKQRQSNNYHKARNRYARKHLRVSRQRKEYCKRLAYSVIQSHDLVAYEDLNVKGLVRNRHLAKSISDAGWYTLRLWLEYFGHKYGKVTIAVPPHNTSQNCSNCGEKVKKSLSTRTHICPHCGYVEDRDTNAAINILRLGLSTVGHTGTYATGDLPSWAVGASLLSNGESVNVESPSQSVRGVSKQFVQELRN

SEQ ID NO: 61959 - protein, 261 aa, Nostoc sp.
LGIRVRIEFRNSIRTQPELKAIFIKFALKTPYVAIDAERNIDTQPTGKTIGLDVGLNHFYTDSQGNTVENPRYLRKSEKALKRLHSSVSRKNSGSNNRQKAINRLGTKHLKVSLQRKDNAIKQGLCVVRSNNLVAYEKLQVKNLVKNSTLAKCISDVSWSLFTQWLEYFGKIYGRVVVPVDPKFTSQNCSLCGEVVKKSLSVRTHICKCGCILDRDLNASINILNKALKQTHLDISTVGRTETFNACGEITLYRDLVHQRS

SEQ ID NO: 61960 - protein, 410 aa, Nostoc sp.
MIVYEFKVKGKDGQYRAIDEAIRTSQFIQNKCLRYWMDNKDSKVDKYALNKYCAVLAAEFAFADELNSMARQSAAERAWGAIARFYDNCKRKIKGKKGFPRFKKNCRSVEYKSSGWKLSETRKAITFSDKKGIGTLKLKGTYDLNYFCLKQIKRVRLVRRADGYYAQFAIDVNVKIESQPTNQVVGIDLGLKYFIADNKGNVEQSPQFYRKAEKQLNRANRKKSKKFSSERKKAKQRQSNNYHKARNRYARKHLRVSRQRKEYCKRLAYSVIQSHDLVAYEDLNVKGLARNRHLAKSISDAGWYTFCRWLEYFGYKYGKATVAVPPHHTSQNCSSCGKKVKKSLSTRTHVCPHCGYVEDRDINAAINILRLGLSTVGHTGTHAGGDLPSWAIGANLSSNGESLNLESPSL

SEQ ID NO: 61961 - protein, 393 aa, Methanosarcina sp.
MIPCFILHIYQKLYILLNHILPCMMKAFKFRLYPTATQAVQLNQHIGSCRFVYNWALDQKIKTYEQTGKSISRFDLNKKLPVLKASNEWLGEVNSQSLQGMTKQVESAFTRFFREKNGFPKFKSKKNPIQSFPVPQHYSVNFEKNTIKLPKIEPIKAVFHRKFEGELKTATVSRTCKGHYYISILVEDGNELPTKQKYSESTTVGLDVGIKDFAILSTGETIENPNYLKNSLNRLKVLQKRVSRKQNGSKNRVKAKHRLAVLHDKITNQRNDFQNKLSFKLISENQAIALETLNVKGMVKNHHLAQAISDSAWSSFVTKLEYKTEWYGKTILRIGQFEPSSKVCHVCGYHNSNLTLKDREWTCPDCKTKHDRDINAAINIKKFALIDQNLIGL

SEQ ID NO: 61962 - protein, 492 aa, Bacillus sp.
MKKTEKDKNPNTYRTFQIHISPTHPMFSYCKEMCQFAKNMYNTTNFYIRQIYTSLKSEKPLQPLQQEVMDQLRMHLPLVNENQYKAYEKKLLMESKKPAEEQKEVKLNLMEMPKEEKSFPSYNLLDALFKSMKQADYKSLPAQSSQGVMKAVYQGWSSFFASIEEYAINPSKFSGRPKIPKYNKTMVKEVYFTNQDCKIQNGMYLKFPKTKQRLCIGKVAEFDGKLQQVRVIPSYNQFTVEMVFKQNNIVEIPEKPKYERMMSIDLGVNNLATIVMNTGRRPVIVKGKTVKSINQYYNKKRAYLYGILRQGKEKREGLFTSKKLERLGRKRFLKIKDMFHKMSYNIVQLAVQEGIDTIIVGKNNGWKQELEMRKDAKQNFVQLPHNLFIQQITYKANTKGIHVVTVEESYTSKASFLDFDDIPTYGQTEIEPVFTGKRVKRGLYRSAEGTYLNADVNGAGNILRKVVPNAFEPFKSNGIEGAVSHPRVLSVR

SEQ ID NO: 61963 - protein, 417 aa, unknown
  TnpB Polypeptide
MKRVEHHRLKPSSPFYAMLREFCHRSKNLYNHGNFLIRQTFIDDGKWLRYGEVDRLLKADAEYPDYREMPTAQTAQQTLRLLDKNWTSFFAAIKDWKAHPEKYKGRPKLPKYKPKDGYFPLVLTNQNCKLKDGVIRFPRAFQGFTVKAIFASQPDAVFKQTRIIPHGGEIDLELVYELPEVEEKADNGKYAAIDIGVDNLAALAWNTGERPVLLKGTPLKSVNQYYNKQMAKRRSICELMNGRHSSKRIARLTAKRNRKDEDYLHKASRKVIDLCAEQDVSVLVIGKNKGWKQDVSLGHKVNQSFVQLPFARFIQMLQYKAESIGMKVVLTEESYTSGTSFLDGEAPIKDHYDKSRRVHRGLFQANDGRKINADVNGAYQIMRKVFPNVNANGIEGVALRPAVVALSMSARCGSGCA

SEQ ID NO: 61964 - protein, 363 aa, unknown
  TnpB Polypeptide
MRIIRAHNIRLKPNNRQASHLWKACGVARFCYNWGLAEWKRQYEAGEKPSGYSLRRKFNSIKRQEFPFVMDVTKCAADQPFVNLGRAFRNFFRNVKAGKPPGYPRFKRRSVRGSFYVSNDRIRFNGCRVNIPKLGWVRTQEPLRYEGRILLAVITHVGNHWFCSIQVEIETPNVKAIGPIIGVDVGIKELAVTSDGRVFQNPRALRAAAKRTRLLQKAVSRKPKGSQNRRKATQRLQLHHYRVACIRADAIHKATTAITKGVGRIVLEDLNVKGMMQNRRLSKALADASLGELHRQIIYKAEQLGIEIIRANRFYPSSKTCSGCGAVKDVLTLGERIYKCSECSLEIDRDLNAAINLRNLAAD

SEQ ID NO: 61965 - protein, 401 aa, unknown
  TnpB Polypeptide
MIECLCKALFFTKRRGCEYVTTVQKGIRVRLYPTEEQEVLINKTIGCCRFVHNQTLADCKQLYEQTQHFPSQSERTKNLVPLKETHEFLKEVSAVALQQSIRDLNSSMDNFFKNRSHFGFPQFKSKHNRKQSYRTPWNNGKADVLDSKHIKLPKLGKVKTKRFDMPKVYRIFNITVERTNTGKYYASICIETEVQPLPKTEKQIGFDLGLKDLLIGSDGTRVERPKFDYINKDKLAKEQRKLSKMRTKLERANANLDECKNYQKQKHKVAKLHEHISNCAKDFNHKLSRKLVEEYDLIAMEDLNIEGMKKNHKLAYSISDVRWSQLRNFIKYKCLWYGKEFVQVDRFYASSKICSECGTYHKEIVNSLKVREWTCPDCGTHHDRDVNAAKNILNQALSVDV

SEQ ID NO: 61966 - protein, 382 aa, unknown
  TnpB Polypeptide
MTKQILKAHKVRLYPNEEQQIFFAKSFGCTRFIWNRMLSDKIDHYNEHKTELKNTPAQYKKEFEWLKEVDSLALANVQQNLRAAYSKFFKGLGFPKFKKKGQRDSYTTNNQKGTVAITDSTVKLPKIGHIIAKFPSKVNGLIKSATISKTPSGKYYVSLLVETIATTLPKTHSNIGIDLGLTDFIVLSDGSKVANPTFLSKLQHKLAREQKILAKRRAVAKADQRKLSDSRNYQKQKVKVAKVYEKITNIRKDFLHKLSFNLIKNHDVIAIEDLNVKGMVKNRKLSKAISDSSWSTFTTMLNYKAEWYGKALIKVDRWYPSSKTCSGCGHLLTKAELPLQVRSWNCPSCLQSNDRDINASINILNEGLKLATIKTVGTTGLA

SEQ ID NO: 61967 - protein, 370 aa, Bacillus sp.
MAKQNKAYKFRMYPTDEQAIFIRRTFGCVRFVYNKMLAERKETYELLKEDKEALKQVKHPTPAKYKKEYEWLKEVDSLALANAQLNLDKTYKAFFKGNAKFPKYKSKRHKQSYTTNVVNGNIQLLDGHIKLPKLKMVKIRQHREIPAKYKIKSCTVSTTSSGKYYISILTEYEKEIKSKEIEKIVGLDFAMDGLFVDSEGEKANYPKFYRRLLEKLASEQRKLSRKKKGSSNWNKQRIRVAKIQERVANQRKNFLHHKSKELVTNYDAVVIEDLDMKGMSQALKFGKSVADNGWGMFTSFLQYKLKEQGKQLIKIDKWFPSTKTCSSCGNTQPMPMAMRTYTCSCGVNLDRDYNSALNIKKEGIRLLASA

SEQ ID NO: 61968 - protein, 453 aa, Scytonema sp.
MAVRRQTFRLYPNKQQEAKLLQARRDHAYLYNACIAHRKYEWRANRKSVSYLEQQNCLPAYKKEWVEFAYLHSQALQATVKRVDLAYNAFFQGLRKLPKFKSIRKFSGWTYPATSGWKANTSGKHGSVSLNDLGIKVKMRGQAKQWGKATTLTIVYKPSLKQWFASFTVEIPDVEAKFGQESELAYNSIVAFDLGCETAITTYDGEKIESITNPRFTQKTEAKIKKASKELRRKQAPNRNKKIKASRRWKKANKRVASLQRKAGTQRRDWQHKVTSEIASRYDIGVTEHLSTKGMTRKAKKGSKRKKQKAGLNKSILSVGFGTLNKMLTYKIEAKGGLMVMLPTKDIKPSQRCPRCGTVHKEWAELSNRHHACPSCGFEVPRDAGSAMVMYNVCTLRQPGLGTSLVSLGCLSSTSKTELRKNTGSMKQLGQMRRQKSSRMAEPGETPSAYAAG

SEQ ID NO: 61969 - protein, 393 aa, Calothrix sp.
MKARYQFRFYPTDQQQQLLAQLFGCVRVVWNDALAICKQSEKLPSNNDLQKLVITQAKKKPERSWLSDVSNIPLQQSVADLGVAYKNFFDSLKGKRKGKKIGTPRFKKKTGKQSARFRIGGFSIKGDEVYLSKIGNIKPVWSRQLPSEPSSVTVIKDCANRYFLSFVVEVEPIQSQAKNQSIGIDLGIKTFAVMSNGEKAISPDYSKKDRKIRKLQRKLARQKKDSKRREITRLRIARLHNQIADTRKDFLHKLSTKVVRENQTIVLEDLNVSGMVKNRKLARVISLQGWREFRVFCEAKSEKFNRDFRVINRWEPTSQTCSCCGYRWGKIDLSVRSVPCLNCNTEHDRDENAAKNINKVGIGHCHDSKRTWRWSKTTSVASVDEASKITHCP

SEQ ID NO: 61970 - protein, 392 aa, Calothrix sp.
MLVLEAKLKGKESQYGLLDEAIRTALFIRNKALRHWIDNKDVSKNDLQKLCAVLAKEFDFAGKLNSMARQASADRAWCAIKRFYDNCKAKKPGKKGYPRFKKRGHSVEYKTSGWAISADKKYITFTDGFKAGKFQLVGTRDFSFYSTKQIQRVRVVKRADGYYCQFCVDAERKEQHQHNGKQVGIDVGLEFFYTDSDGKTVENPRFLRKSEKSLKRKQRKVSRCKKGSSNRRKAVKKLAKKHLKVSRQRKDFAVKTARTLVQSNDLVVYEDLQVRNMVKNHHLAKSISDASWSLFTDWVDYYGKVFGIWVIAVAPHYTSQDCSVCGTRVQKSLSTRTHKCHCCGTVMHRDHNAATMILNKGLKSTVGRTESKACGQNDLCLSGETPLSKSAE

SEQ ID NO: 61971 - protein, 244 aa, Calothrix sp.
VLVLEYKVKGRREQYKAIDEAIRTTQFIRNKAIRYWIDAPQGRKINRITLNNYSTTLRTEFKFVEELNSMACQAATERAWSAIDRFYANCKAKKLGRKGFPRFQKDNRSVEYKTSGWSLHPTKRRITFTDNKGIGEFKLLGKWDIHTYSTKLIKRVRLIRKADGYYCQFCIDVEIQPESRDANGEIGLDVGLEYFYTDSNGHHQENPKFLKKAEKAIKRAQRQIYKKEKGKNQRQKARQRYAIN

SEQ ID NO: 61972 - protein, 221 aa, Calothrix sp.
VILDGSPRCAGEPVLPVEIKTGKIAGFDFGLKTFLACSDGTKIESPQFFKQSLNAIKKASRQHSKKLKGSANRERARKNLVRKYEDISNTRRDWFWKLAHDLTNRFDVLCFETLNLKGMQRLWGRKISDLAFGEFLQILEWIAKKKGKQIVFIDQWYPSSKTCSNCGHVLEKLDLSVRKWRCPSCQSVNGRDENAAKNICAVGTSTAGLDDLRRTLSAIVV

SEQ ID NO: 61973 - protein, 186 aa, Calothrix sp.
LRKSEKSLKRKQRKVSRCKKGSSNRRKAVKKLAKKHLKVSRQRKDFAVKTARTLVQSNDLVVYEDLQVRNMVKNHHLAKSISDASWSLFTDWVDYYGKVFDTWVIAVAPHYTSQDCSVCGTRVQKSLSTRTHKCHCCGAVMHRDHNAATMILNKGLKSTVGRTESKACGQNDLCLSGETPLSKSAE

SEQ ID NO: 61974 - protein, 230 aa, Calothrix sp.
LIILVSFAERKEQHQHNGKQVGIDVGLEFFYTDSDGKTVENPRFLRKSEKSLKRKQRKVSRCKKGSSNRRKAVKKLAKKHLKVSRQRKDFAVKTARTLVQSNDLVVYEDLQVRNMVKNHHLAKSISDASWSLFTDWVDYYGKVFDTWVIAVAPHYTSQDCSVCGTRVQKSLSTRTHKCHCCGAVMHRDYNAATMILNKGLKSTVGRTESKACGQNDLCLSGETPLSKSAE

SEQ ID NO: 61975 - protein, 355 aa, Calothrix sp.
MINASGVIYNHCIALHRRYYRMWGKHLSCAKLQSHIAKLRKRNLFWQSVGSQAVQDICQRIEKAYQLFFKHNKKGVRPPGFKKVKKYKSFTLKQAGYKFLSGNKVKIGNRIYQFWKSREIEGTVKTLTRKRTSLGELFMVIVVDDASNPDVEIKTGKIAGFDLGLKTFLACSDGTKMESPQFFKQSLNAIKKASRQHSKKLKGSANRERARKNLVRKYEDISNARRDWFWKLAHDLTNRFDVLCFETLNLKGMQRLWGRKISDLAFGEFLQILEWIAKKKGKQIVFIDQWYPSSKTCSNCGHVLEKLDLSVRKWRCPSCQSVNGRDENAAKNICAVGTSTAGLDDLRRTLSAIVV

SEQ ID NO: 61976 - protein, 366 aa, unknown
  TnpB Polypeptide
MGCKGRLYPTPEQAQQINQTIGSCRFIYNYMLARQLKIYNRRGEHLSYISMQNLLPGMKKYIPWLATADSQALKYACRQLNDAYQRFFKGLGEKPRFKSKKRSDGQSYTTTNGASIHVLDNAIKLPLLGVVRCKGLRKLDGKVSKATIRRTPSGKYFVSILYVVEADDPAPINGMIGLDVGIKEFAVDSNGVHYENPKYLAKSLKKLRREQRRLSRKTPGSKNREKQRSKVARVHERISNQRSDHHHKLSRKLVDENQVIGVEDLNIKGMARNQKLARCILDAAWGDFLRMLEYKAGWSGRTLVKVSTFFPSSQTCSCCGYKNAEVKDLSVRKWVCPACGVTHDRDENASKTILAETLRILAEQAA

SEQ ID NO: 61977 - protein, 441 aa, unknown
  TnpB Polypeptide
MATRTFKYRIYPTAEQAEKLSRFFGCARKIYNLSLAWWRDAYMVYKETGEPMGKTPDYGYYRRMPEYSYLSECDTVALQQARIHFEKAIMAYIEAKGGKRKGKVGFPKFKKKGVSKDSYTTYNNGTAVHITSDGKHITLPKIGKVKIVLHRPFCGKVKTVNVSRTKSGRYFVSITVETREKEGPVISRVANADNPKVVGLDMSMSSFAVSSDTSDAAKPKYVRLFRKNQRRLARLSRRVSRKQMVEADGHKRGSRNREKARRRYARACERVADQRRDFVAKAALHFARRYDVVVLEEINLQAMSQSLKLGKSVMDLGFGEFRRWLEWEGSKYDCYIHYADRWFASSQTCSECGHVYKGTKNLNVREWVCPVCGAVHDRDVNAATNLKNSFLEEYSTAGTAGIHACGDSASTLRETVARVLAMKQEPRDCRGSSEARDFSRG

SEQ ID NO: 61978 - protein, 398 aa, unknown
  TnpB Polypeptide
MLGVMQVRYRYRLYPSPGQQQALARAFGCARVVYNDCLRLRDTCHAAGEKISDTEVQRRVITLAKLTPQRSWLGEVASVALVQACQDARRAYKNWFDSLTGHRKGLKIRHPKPRRKRGRQSIRLTRNGFALHGGRLYVAKVGDIKVEWSRSLPSMPSSVTVIREPDARYYASFVVEREATPLPACDRETGIDLGLNSLIVTSGGEVIPNPRFLRKAQRRLRRAQRVLSRRRKGSANRAKASHRVTVVHRKVRETRLDHAHKTALKLVRDNQAVYAEDLCVSGLARTRLAKSVADAGWAQLMRCVQEKAARYGRTFARIGRFEPTSQVCSACGVKDGPKPLSVREWSCAACGTVHDRDVNAAKNILAAGRADKSNACGASVRPHPVAADAEAGTHRSAA

SEQ ID NO: 61979 - protein, 412 aa, Nonomuraea sp.
VARLDLGVAQALTLDGQAHTARALWNLLHEYFTFRQGRFATLKDCDQAIRQARQDIDWMGQLPAQAAQAVLKTYRQAWANFFNPDHPAERPTFKSRGRSRMAVDVPQARDLQIKRINRRWGVVNLPKIGRVRFRWTKDLPGVTKGGPAGRITGARLVKEAHGWNIVFRTETLIAPTPAVHPGPSVGIDRGINVALALSDGTMREHGPWLTDGEREHLRRLEKKSARQRRTRIPDRPISRRLARTYAQIAKARATAKRRALDWQHQTTTELAGTFSTIVVEDLKITSMVRSAKGTVEQPGVNVGQKSGLNRAITAEAWGRTVTLLEYKSADRGGRVVKVPAPGTSQTCHQCGHRDPGNRARTVFTCKNPGCGWAGHADSNAAININNAAGTVVSGRGDLGATRSAKRQPPRAA

SEQ ID NO: 61980 - protein, 377 aa, Burkholderia sp.
MDVKRAYRFRFYPTPEQAVMLAWTFGCARFVYNQMLRQRTEAWHQRQERMGYHETSAALTALKKTDGYAWLNEVSSVRVQQALCHLQSAFANFFAKRAKYPNFRRKDGPQSAEYTASAFKWDGVTLKLAKMAEPLAIRWARTIPKFAKVTTVTVSKDPAGRYHVSMLCDDVVNARPVADGKIGIDLGLTHFAILSTGEKIAAPNTFRKNEAKLAKLQRRLAKKQKGSANRRKARLKVARMHARTADARRDFLHKLSTRLINENQVIAIESLSVSHMQKNRKLAKSIGDASWSEFIRQLEYKAQWYGRKLIGIDRWYPSSKRCSDCGHTVARMPLNVRAWDCPECGAIHDRDINAACNVLAAGLAVSAHGESVSPMSL

SEQ ID NO: 61981 - protein, 303 aa, Burkholderia sp.
MDVKRAYRFRFYPTPEQAVTLARTFGCARFAYNHMLRRRTEAWYQRQERMGYHETSAALTALKKTDGYAWLNEVSSVPVQQALRHVQSAFANFFAKRAKYPNFRRKDGPQSAEYTASAFKWDGVTLKLAKMAEPLAIRWARTIPKFAKVTTVTVSKDPAGRYHVSMLCDDVVSARPAAKGTIGIDLGLTHFAILSTGEKIAAPNTFRKYEAKLAKLQRRLAKKQKGSANRRKARLKVARMHARMADARRDFLHKLSTRLTNENQVIAIESLSVSNMQKSRSLAKSISDASWSEFTRQLEYKAQ

SEQ ID NO: 61982 - protein, 425 aa, Halococcus sp.
MSETDEELLRRVMDATASLWNELTYERRQQLFDGETVWETEDYRKRYIGVLGSASAQQAIRKNDQAWKGFFDSDEPDKGLPGYWGNEDEGRELRWYGRNDQYTIQWGDRSRLEIPVGKDLKDEYGLSGRLRLEVRGEPRWDGKQCQLEIQYDEQRGQFRAYQPVEVADLHPRLGTPVADESAALDIGANNLVACTTTTGEQYLYAARDQFERFRSTTQEIARLQSKLRDGRYTSKRIRRLYRQRTMRRDHMQDALARDLMQRLHEQGVSTVYVGALTDILETHWSVESNAKTHNFWAFGAFIDRLETTAEEFGIGVVERSEAWTSQECPQCGATERTTRHRDTLTCECGFEGHADLVASKTFLQRQTTVARPMARPVRYEWNDHEWSGMSHPHESSKVARTNPQVAPVGEGANARRDPTGGIPRL

SEQ ID NO: 61983 - protein, 421 aa, unknown
  TnpB Polypeptide
MVQRAHKIRLDPNNVQATALSRAAGVARFAYNWALAQWQEQYQAHKDDPSKPRPSQYALRKQLNSIKRSEFPWMLESTKCAPQEAIIALGGAFDNFFAGRARHPTFKKRGRHDSFKLSSGNFRIDGARIHIPKVGWVRMREPLRYVDAKQVSVTVSRQADRWFASVQCDLANPAGLVPSGVDDHRSCGGSSPTADAVGVDVGVREFVVSDGTRHPVPRSLRKAQRQLKRAQQSLSRKDKGSNNRRKAKAKVARLHARVVDVRADWLHKLTSNLIADNNRVVVEDLNVAGMMSNHHLAMSITDASFGEFRRQLAYKAEGRGRTLVVADRWFPSSKLCSACGVKTKRPMRLDVRTWTCETCGTQHDRDLNAARNLAAYDPAVSSTVAARGELLTSGVPAPVGAGTSSRLVEPGIRHQTRHEPV

SEQ ID NO: 61984 - protein, 405 aa, unknown
  TnpB Polypeptide
LIIKTTFYTTEVTKILKSYKTEINPTDKQIEKIKKTIGTCRFIYNFYLAKTIEEYNKSKKFITAFDFMKWLNNEYLKENSDKQWIKDVSTISIQKTVQNANLAFKNFFNKQSKFPKFKKKNKQDVKMYFCRQGKNDFIKCERHRIKIPTLGWVKLKEKGYIPTNPNTHIIRKGTVSYKAGRYYVSVLVEEMQPMREKLNDFGIGIDLGIKEFATLSDGIVYQNINKTKRVKDLEKRLNRERHKLTRKYKAYLKRKKLDENCSKENLLKQQIKMQKVFHQLDNARTDYVNKCISEIVKTKPSYITIEDLNVKQMMKNKHLSMDVQKQKFFEFRTKLTAKCKEYGIELRVVDRFYPSSKTCHNCVCVKHDLKLSDRVYKCPECGFKIDRDLNAALNLRDAKIYKAIL

SEQ ID NO: 61985 - protein, 371 aa, Proteiniphilum sp.
MRLTLKIKLLPTDEQADLLLSTMKKANAVCNAISEIAGENKVFNQFKIHALCYHGFKSSFNLSAQMLVRCKSKVAGAYKLDRETKRSFRPLGAVTYDSCILSYKDMSVSIWAIGGRLKIPFVYHNPKYLPYIKISKVEADLVYKKGTFYLFQTIDILDEEMEDIEEFIGVDFGLTDIVVASNGGKQSADWINSYREQRQKVRKSIQSKGTKGKMHSYKRGYAKLLKRLKGKERTTATIINHTIAKNIVLAAKAEHKRIAIEDLTDIRFTSKRRNKTFATKLGRSSFGQLRSFLKYKSKLHGVNLIVVEPRYTSQTCSCCHHVGIRKNKSFKRPNCGNDMDADINAAINIATLRSAINQTEKSGMYCSLHTA

SEQ ID NO: 61986 - protein, 432 aa, Halorubrum sp.
MQMVWDVTQTVRVRLDVPDDRKSDLHATNKKFTYCANRTADWAWRYPDENCVTSKNEAENGIYDDLREETDKLHSNLVQKAIKRATDDIGNCVDRLADGENTSKPEYETFSIVYDKRAATYYRNKVSLATVNGRVECTYDLPENPDGTPHGEYLLNEDYSFSTSTVHYDSETDEFYLHAAMETEVDVTSPEKAEDSKVRGVDCNVDDHIAVTSTGRFIGNADYLNHQRREFEKRRASLQQTGTHSAHNTFQRIGDRFGRWSNDYLHQCSKELVAEANRHGCTHISFENLEQIRDRMSDGKKFQQWAFNAFQSQVEHKAEQVGIVVEKVEPAYTSQQCSKCGCTLEENRHGQHFECLDCEYMANADYNAAKNIARKLSLKLQQGQKSVAGGASCQYALKSGIVTVNAVKVASDTFVSVERESTNKPTASAVGN

SEQ ID NO: 61987 - protein, 326 aa, Halorubrum sp.
MTYDTRAGTFSKHDATFATTGSTVTLEYHTPANLDETPYNEYVLSSAWELTTSKLAYRHGQYWLHLGIKRDASDQHWTAQANTEVSNAPTEDTSRVLGVDLNVKGWTAVTSAGGFHGNADYLNHRRTQYEQLRGELQQTGTRSAYLRLHERSGTESAWFDEYAHAVSNTLIEDALDTRATHIAFEKLDGIRKRMSNLPKYQQWMFGRVQDYVEYKAAEHGISVVYVSPRNTSKQCSHTECQTVSSSNRREKRFECESCGRSWNADYDAARNIGLNYIFDSVLPASQTCSSGKATSQLALMSGVLSVTERDVNHVSKDWMSTDKPTA

SEQ ID NO: 61988 - protein, 414 aa, Halorubrum sp.
MKYTFRYQAYPDRVGVTSDVLRHIDIHRQAYNYTRYEYQTLDDDEYNIGSAYKHHKRLKTWKNEFPVFSEVHSKALQATVKRFYSNLSGLSELKKNGQKVGMLRWKPPREFRSMTYSQSGFKLKNTSGQTATLWLSGIGDIPMRYHRDIPPHTTIKEVTIKQETTGEWFVSFGLEMPDDALPSKSNLDEIDPQDCVGIDLGITNYIHTSENLTVDTLDLSDEYERLRREQRNLARKEHGSNNWEAHRKQVAKANREIKRKVTDFQHKLTTWLVTEYDLVAVEDLDVKPMLEDSHNAKNKQDAAWSRFVDFLQYKADLHGTHVVKVDPAGTTKQCASCGVATDKPLWVREHSCPACGHTQDRDLNAAKNILNRGLKQVGAGRSESTPMQTALPTFTPQRVEVDAKRVDEMGSLGA

SEQ ID NO: 61989 - protein, 403 aa, Halorubrum sp.
STLWNVANSHAQQVWTTPVRSLMKQTLKHELNDHPTYDGLHSQSSQNVLEELSEANSSWVGSKDDRDNPPGYRKHNYSDADGNRVREEHPRSTVTWKPSAIRHDTDNTRLRSSKGANHKSSPRAREYILAEYDAPPAVTLEHIQQVRAVWQSREQRWELHIVCKHELATESPGEAVAGVDLGICNPAAVAFPGDAVVYPGNRLREDKHYFQREEYQTEGDNGSSTQAIWAREKLARRKDHFLHALTTDIVERCVSHSVGTLVIGDPSGVDESDWGRHGNNRLDNWASKRTMNLLDYKAREQGIEGEKRDERGTSSQCSVCGFEDGDSRLERGLWNCDRCGVVAHGDVNGADNMRQQTLPVTPPVGDSGNGCLAQPRISQFDRTQGFQPRDPVDGANRHIPTQR

SEQ ID NO: 61990 - protein, 322 aa, Halorubrum sp.
VLEDKYDLEYQEQVSLEVRGNPQWNGDDSRLETIYDDTADVLRVTHPVRIHPDKLNTQRLDDFTQTLDSENTSHTAAIDVGANNTLTLVTSTGESAVYHARPEFKRFQKHSMRIARLQSALPEDKYSSERIRRLYAKRTRKRDHSRNAAVKHAADWLLEQDVDTVYVGDLSDVLESHWSSTVNEKTHSFWSHGRLVERITLTLGDVGISVTEVSEAGSSSECPECDSTNVRRDSDEFRCHECGLEAHGDVVGAWNLLQAEVGPMARPAGLRAERRRDVSQSCDGEGAYWEWNEHDWTLTDCEEQSGSIDQTRISKPVSSQLG

SEQ ID NO: 61991 - protein, 528 aa, unknown
  TnpB Polypeptide
MSDREGTVTRMNTTAIRHKRAQVYAAELTPAQAETFALQRAGVTWFYNQAAESQLARYRQGGKEKAASSRRRTNVETYMSLAYAVTQARQAGWTFQHRGAEHLISEVPAVMLHGALRQLAASWVRHLAMRKENRESSPPRFRSVHRAGGLYWQTQHRSGKCPLSGIVTVTKLGRAMITVPGGIGPVRIRYHRELPADTLVGFAGLKIDDVGRYWALVQYETSQVRQAATSGVVGVDRGVAVTVATSDGEVYSVPGLSPGQDARRVRLQRNMARKRRLNPCSHDIWVTAAGRSRLVRGNCPPPGAPDHDCDCWKHSNRYQRDKLAFLKLAQREARQRTNGAHLASRALANKYATVVMEDLNISGMTASAKGTEETPGSNVRAKAGLNREILAGNWYELQQFVAYKAELVTVSARYTSQTCPACGLVTSANRPSQAVFRCVGCGLSGHADIIAAGNIKDRFTAVAQTAEAREISEPVRVEPVNSHNSISSTQDVAQSSPVGSLVPPEWGLGPPRQRKPRPRNRRVSRKAT

SEQ ID NO: 61992 - protein, 629 aa, unknown
  TnpB Polypeptide
LAGGKFADGDAATSLTVQNGSPKGRGGKPVPPKVQDRVVQQAYRFALAPTDRQIQALNSHAGASRYAYNWGLATVAAALDARAAEKETTGTAVTEVPKHFALCKQWTAYKDAHAGDPDPAEGERRTNTAWVAENSICVYQAALRDAAAAWQAFFDSKAGRRKGRRVGRPKFKKRGRARDSFQVHGDGLRLADATHINLPKIGRVKVCESMRKVTRRLGKGTVPCPECDQTGFEPAPAASKGKTVRACPVCQGTAGSAAAAGSRSGMAEAGGGQPAGTAGRGTAGMQAGQGMGTAAPASSQGTTGSSDTAGTTGTTCSGTGCGGTGKVKPCHACNGALHVPVLRIIRGTVARGSDRRWTVSLTVETVRQIRLLPTARQQAGGVIGVDFGTRELATLSTGEVIDNPRFLAGALRRLQRAQQALSRCEKDSARRADAVTRVGRLHARVRHLREDNLQKITTRLVQTHAVIGMEGFNVQAVAERGSKDLPRKVRARRNRDLADASPGMTRWMITHKGAWDGVRVVVADRHEQTGRTCSRCGQVRATPVPPGRDMFDCGHCGYRGNRRENTARLLALRACSENGSTSAPSSEDDVKHARRDGVSRVTVRRRLQPSLKREASRRSSNGRPGTPGS

SEQ ID NO: 61993 - protein, 238 aa, Escherichia sp.
VEKMPEYIFLQDAYTDNLQQKLKDLHTAWKRCFDKKLAAKAPVWKRKNEGRDSIRFVNFEKYCCLENRRVKLPSGLGWVKFRQSQRVNGKIKNATISQLAGQWYISFQVEIETAEPNHTSTTIVGLDAGVAKLATLSDGTVFEPVNSFQKNQKKLARLQRQLSRKVKFSNNWQKQKRKIQCLHSRIANIRRDYLHKVTTTVSKNHAMIVIEDLKVSNMSKSAAGTVSQPGAMSGQNQV

SEQ ID NO: 61994 - protein, 405 aa, unknown
  TnpB Polypeptide
MIVRSLAFRLKDPLPNDAKFLMEDFRLAVNNAIRLGVHSRVTSRFALTKLAYMDFREEHPGMYAQHLVSAFEVAGSALKNHRRRLRKGFPAQVPFIRRLFMKAENQAYKLDRVNGIIDLPIRAGLHIRLELVISDYHRRYLDDESLSLGSLTLLRDRAIVTFRKHPPEPYEHESIISLDTNERSLDGVLAKEDRITSVVRAEFPDVSVIQSVHHDRRKRLQKKKSHDRRTAKRLCAREGTREYHRIDYRMHEVANTVLSFAEERRSMIVLEDLTGIRPSKGKKLNRRISMWPRRKLHQIIEYKAAWCGIPVIKVDPRYSSRKCPVCGRIQDSRKGAEFVCGCGWHIDRHINASINLLKTAASEKAAGGLWFSPGAFQHDVVMVLCGPNKAVRPEPNGMSGMRAIA

SEQ ID NO: 61995 - protein, 374 aa, unknown
  TnpB Polypeptide
MYKAYKFRLYPDNKQKESLNYIFRYTRYVYNYYLAYMMENGYKTSQNNIKDYMSDLKQRIPMLKYADDTIIRKILFKLDDSYKLMQKDQNCKPNFKSKYKHSSYIVDNYEINGYTNIILDLNKRMIKLPKLGYIKIRGYRNVEKIEGKLRNVTVSIEGNTRYYVSILYEIKDAALIEMPCSIIGIDLGIKCLLTLSDGISYKNNKYLLKYKKQIRRTQKELSRKVKGSTNYYKCRVKLCRLYSKLANSRKYYIHEITKELTDKYDILILEDISSEKLLISNKKHLSKYISDASFGEIIRQVAYKSALKGKYFYQVNRFYPSSQICNKCGFCDDEYRNLNKREYVCKKCGETIDRDLNASINIMFEGLKMFLKTI

SEQ ID NO: 61996 - protein, 417 aa, unknown
  TnpB Polypeptide
MDRTIIAQLHPTPEQVKVLRRTIEEHTACFNTVAGLGFTSRCSNGVELHKATYYDLRKQYPDLPAQLVCAARVKATEAVKSALTWQKKHEASYPKQVAKAKKQGKEPPKFKPVRAPRSEVCPIRYDARSYWVKWESMTASVATVAGRVQVGFTIPEYARDSIGGKVCSADLCYRKGQLTLHIVVSLPEPTMERSNEVIGVDLGLNRPAVLSNHHFLGERRWKEQERRLFRIRRKLQKKGTRSAKRHLKKLSGQLFRQRKDHDHVLSKRIVQLAPQGSTLVFENLTNIRTTSKIGRGKKHKTVDTKRRFHSWSFAQLHRFTTYKAAARGSVVTKVDPRHTSQTCSRCGYQHRYNRRSQSLFLCRQCGYCLNADLNAAQNIREKHIASLAGVDTSSSAGVSVNTPIVSTLRSEGQVPVL

SEQ ID NO: 61997 - protein, 382 aa, Nocardia sp.
VQLRYRYRVYPTPEQRESLARAFGCARVVFNDCLRTRRQAYEHGVKVSDTEVQKKVVTHAKKTPERAWLADVSSVVLVQACQDARRAHRNWFDSIAGKRKGATLGCPRFRSRKDNRHSIRLTRNGFGLRPNGRLYIAKIGELAVAWSRKLPSEPSSVTMIKDSAGRYFASFVVEVDPEPLPVVDSEVGIDLGLTTFAVMSSGKVITSPRFLRGAERRLRKAQLNLSRKRKGSSNRAKARARVARIHAKVADTRKDWAHKNSTAIIRDNQAVYVEDLCVTGLARTRLAKPVHDAAWAMFTRMLQDKAARSGRVFVKVDRFYPSSQICSDCGAVDGPKPLSIRQWQCAACNAVHDRDMNAAKNIHAAGRAEWLNACGGAVSLSG

SEQ ID NO: 61998 - protein, 380 aa, unknown
  TnpB Polypeptide
MIKAFKYRIYPNRSQEILFSKTFGCVRLIWNANVASFNSYDKDINPNPNIIQKSDLIDNKPWLSEVSAAAIQQKVMDFKETLKQHFSKNRKKKIGRPSFKKKGNTQSYRLPNQKFRIEGDRIRIEKIGWVKMVVDRNIPDNGKIISCTISKNPSNQYFVSITVDCEITKKPKTGKEVGIDLGIKEFATLSDGVVIDNPKHLRENQSKISRIQKHMSRKVKGSSRWHKNRLRIARLYNKISNKRLWFLHNLTTYLVDNYDTICIEDLNVSGMLKSHRLANSISDASFSLFRSLLEYKCEWYGKTLSVIDRFYPSSKTCSNCGWKKDDLTLSDRTFICENCGLTLDRDLNAALNIKRVGVDILYNRTLRDEVASPGEAFKIK

SEQ ID NO: 61999 - protein, 267 aa, unknown
  TnpB Polypeptide
VACRRVVDRPAAGVAGPRPGGGGTSSPAPTGARRGVKAANMRACVSSGLRGLRVRQDNRAGSSVLVPKIGWVQFKRSRALAGWTSYRSTADRAGRWRIAFAVIPEPIPAPGTGVVVGVVRGVAVAVALSTGELTSPAGRSVKEAERLLRLQRRLARAARGSNRRRKVKTLIAGLKATGGDRRKDWVEKAQHRPGPQVRRVRGRVPQRQSHDPLRAGNRAEAWQERHIEDRPQLGHPHIRVGSARGPVGAEGTRSGRESHSCVHVGDR

SEQ ID NO: 62000 - protein, 267 aa, unknown; identical to SEQ ID NO: 61999
  TnpB Polypeptide

SEQ ID NO: 62001 - protein, 265 aa, Cyanobacteria sp.
VYEHNPSLNRYFVEPCVAVFGSWQVREALLDLFEQGSNFEKAGAVNALYWAGFPSFSKSAPKFKNNCRSVEYKTSGWKLSPDRRSINFLDKKGIGKLKLKGTWDLYFYPLEQIKRARLVRRADGYYVQFLIRVESEKVDIMPTGRILGLDVGIKQFYTDSNGITVPNPKFYRTSEKRLKFRQRRVSRKKKGSVNRHIAINKLGRVHLKISGALTRTLRDWQREEHAKRVARCIIQSNDLVAYEDLRIKNLIKNHCLAKSINDASW

SEQ ID NO: 62002 - protein, 400 aa, unknown
  TnpB Polypeptide
MFRRAAINAAYGSAKSFFSSLKNYKDKKAKVEARGKKYKQRPPVPPREWNKNTVFYTGMIKSMDDDTVMLKLYTGKSWVWLKFRHTGRTFPDGWNVCSPQAIIYKNRLELHFPVEKNIKLIKIAKQLRQNPDLKVCAVDLNMDSNHAVCVILSSDGTQGKVKFIHGNKPLQARRKRLLGKIAVKRSQYNGILEEDDNIALWKKIRDIEDYESHRVSRRIVEFAIENNAAVIVFENLKNLKPAKGKYSKRSNTKRAYWLKGKIQNFTRYKALEHNILISLVSPRNTSRNCYYCVEQVFRYNDTPTGHTVGAPLFLCPNGHKGNADVNASWNIGKKFFLKHSKPGKKLPGVTVLQAANQAIEQPEHSNGPVALPDSSVGQYGPNEVAATPQMLRDTPTHGLA

SEQ ID NO: 62003 - protein, 396 aa, Symploca sp.
VIEEVLVLEYKAVVKKAQAIAISEAIRTSQFVRNKVLRYWMDNPGIGKKELYQYNTQLRAEYSFVKELNSHACQASVENVERAIQRFFANCKSNKPGPKGYPRFKKHTRSVEYKQSGWKLHPTKRRINFIDKKGIGELKLLGKWHIHTFDLKLIKRVRIVRRADGYYVQFCVKVAHAQLSPPTDAQVGIDVGLEYFYSDSNGYHEPNPRFLRKSEDKIKRSQRNIYKKKKGSTGRKKARGIYARKHLKVTRQRNEHAKRVARNLCLANAKVVLEDLNISGLVRNHKLAKSIVDASWYNFRQWLEYFGNKFGREIIAVPPHFTSQECSNCGVKVHKSLSTRTHSCPHCGHVEQRDVNAAKVILSRVNGRGGHPQTNAGGDVSSTSVGRKTCLSKKRR

SEQ ID NO: 62004 - protein, 369 aa, unknown
  TnpB Polypeptide
MKLTATIKLQPTEEQRDLLYATLERANAACNYISERAWAEQRFGRVPVHRLTYSAVRADFDLTAQLAVRCIGKVVDAYKLDKKTKRQFRKLGAVPYDSRILNFRLADSTVSIWLLGGRQTIPFVTGAHQLALLQYQRGESDLVHRKGEFYLYTTCDVPDEAPIDPEGWLGVDLGIANIATDSDGEMHQGKGVERVRYRHRRLRQRLQAAQTDSARRHLKKLAGKEQRFARDTNHRISKRIVEKAKGTTRGIALEDLTHIRERVTARKARRATLHSWSFAQLRSFIEYKAALAGVPVVAVDPRNTSRTCPACGCIDKRNRPSQSTFSCVECGCVGHADHFAAVEISRRAAVNRPIVGSTAQRYRLTSSRL

SEQ ID NO: 62005 - protein, 369 aa, unknown; identical to SEQ ID NO: 62004
  TnpB Polypeptide

SEQ ID NO: 62006 - protein, 412 aa, unknown
  TnpB Polypeptide
MKLTLKYYPRWNEVQQQIVEELSFHTTKLYNIANHQCREIKYKSYRALEKELKQNWHSPYLHSHTYQQLLKVLEQNWKSYFNSLRDYKQNPTKYKAMPQPPRYKHLVNHKNEVIFTNFAIRRKDENILLSLSKTLQNKFQVDSLKVEVPKTLPLPESSQLQQIRIQYDRLKKAWYLLIIYKIAHKMESSSANMMAIDLGLDNLAAITFSHSEDNYIINGRSLKSINGYINKRIAMLQSIRMKQVGAKSFKTTTQIQRLRKKRHDYITNTLHQASRRIIKWAEHYQVGHIIIGNIKGIKQENHHKTFVQIPISRFTQMIVYKAELAGIKVTYQNEAYTSGVSAFDLEPIMKQYYNKGRRVKRGLFQTNQGYYVNADINGSLNILRKVYTGIPNLIKSVRDNGCVNHPQRIRVA

SEQ ID NO: 62007 - protein, 388 aa, unknown
  TnpB Polypeptide
MLKAYKYRIYPNQEQKELLSRIFGQVRFVYNLGLETKISAYTGNKKHLDMFNLTKQIKELKDNECDWLKESPSQALQMSIRNLDNTYTNFFKGAGFPKFKNKYSKQSFQLPQGVFLNDDKKQVWIPKLKFTDIDLHREFKGEIKTVTVSKTTTNKYYISILVDNKKEIPKKQPIKLNTTVGVDLGIKDFVITSDGKKFKNHDFFKSVMNKLRVEQRSLSRKQKGSNHYIKQKLKVALLHEHIKNQREDYLHKISKYLVDNYDTICIENLGVSNMMKNHKLSRAIGDMGWYKFKSFLDYKCKWYGKNLSVIGRFDPSSKSCSVCGKINKELTLKDRSWKCNSCGTEHDRDINAALNIRNFGLRNQPSVTQSEWLHCACGVETHQSLADV

SEQ ID NO: 62008 - protein, 526 aa, Acanthamoeba sp.
MFWNNECTKLSKSLWIPSKTINLKQNKKKYFKCDNPNITFNYFTDNTKINKKIKFNEIKISDNHNKKEKLRNKLIKTENTRYLKEQNNKKCKLNKDQLEEKHKNFLDKIELKVNQLDGFIRSRKIQLFLNNKQKNIIQQWIYDTTSIYNKLVCNFSQIYHKYQTIVNNMDVQNKSYHLGKLIKQNTEFPINFHKLRALKCNDFIQDYNRIPYCVVADIIKEFVTNVKSCITKISKGQITEFKFKYKKYNRVYSSIPLESHYTTGKGFYPSIFGEVKTNENNFSWLDVKHDYKLIYDKYSNKYYIHVPKYVYRNKPLMRKPIAIMDPGARTFQTVYGLDHFITIGDDLGSTFKKRLLKIDNLKSKLSKPGKYKFNKKLGKKTKVKKWKYKRAIDRHHKKMDHIQQELHYKTANYLCSNYDRIVVTNFSDKKIGSKKNDLGAITKRILGKLSHYKFRQRLQTKSEEYGCQYYEVDESFTSKTCCKCGNIHKTLGSSKIYDCTKCKNKIDRDMNAAICILIKNKNILLK

SEQ ID NO: 62009 - protein, 372 aa, unknown
  TnpB Polypeptide
MKIIRSTKCSTKFATNKKKIELQTILQEYGKVVNIFIDYFWDKKVDKTQLLKPIVDIPKDSWLSARLRKVAAREALDMISASKERWKNKPNKLVKPVHKGKRMYVSCTIAELKDSKDARKFDAWLHIASVGNKITMDIPVKFHKHYNKLCIKGRRLNSYIITDRYVQFVFETETGAKKEGKKCIGIDTGINALASLSTGEQLGTDIKQNIERVKRCKQGSKGKDRARRALKQRINEIAKEVIKKNIDLVVVEALKKMGHNGKLKRRLSKNIRRSIGSWNWKYWLTRLEMACEANRVSFRQVTPYYTSQTCPSCSHVDRGNRSGEVFLCLKCGYTDNADINASRNILNRFLTGKYGSCYKPENVQKLPTSGFL

SEQ ID NO: 62010 - protein, 394 aa, unknown
  TnpB Polypeptide
MRDAVRYALQVAYRGAVADERHRILSPIALRREVREWFYSHYDYARHHINPVCRAAVSMLRSYRRNHHGELRIPEVRRLAMRVDGELFRVMDGRIRMTLQPNRYVWLTVNASNKHYQEYSRGRASELLITDSKVCLTFVVGEGKKPLGDKLIAQDLNFKSVDSTSARVGSRAALEGVTTESLRKVVQVQDDFSRRRRALQRHVRNPQKRVKKLKETRGRQRNRIKDALHKLSTKTARKNPGASFVFEDLKGIRRTSREAKKSKRLRTYLNRWPYRLYQSMVEYKSPNRTVYVSPRGTSSECPVCGGKLEHPAWAVSRCGTCGADYDRDRLASLAILCRGLRLCGLTPFAVSADASWRQMRDEYSYSRSTPEAAGAGGTDAASAPNLDVYTKIHV

SEQ ID NO: 62011 - protein, 427 aa, unknown
  TnpB Polypeptide
VDGKTYLIRECLKESKYDYVELNFIERPELVELFENATNAQDLLMRLSLITDKQLNKGNTIIFFDEIQEFKDIVTRIKFLVEEGSYRYIMSGSLLGVELNDLRSAPVGYLRIEDMYPLTVKEFEVDSLALANVQLHLEKAYKNFFRDPKTGFPRFKSKHHSRNSYTTNVVNGNILVESKKIRLPKLKWIAMKKHREPAEGLRLKSVTVSMEPSGKYFASLLYEGYRCENQAAVSDYSTAKILGIDYAMQGMAVFSEKIETEEAGFFRKNEKRLAREQRKLSRCVRGSHNYELQKKKVARCHEKIRNRRRDHLHKLSRKIADSYDAVAVEDIDMKAMGQCLHFGKSVQDNGYGLFRKMLDYKLAWQGKKMVKVDRFFHSSKKCCKCGRIKKELKLSERVYHCECGNEMDRDRNAAINIREEARRMLTA

SEQ ID NO: 62012 - protein, 379 aa, unknown
  TnpB Polypeptide
MYESEVRTVEYSYKFRLYPTKVQQEQIFRNFGCCRYVFNHFLAQRQEQYRETGKAPTRFQQDKSLTALKQELPWLREVDSTSLQAAIQDLDAAFQHFFRRVRQGKKPGYPRFKSKHDHKQSYKSKCVGTNIKVLDRVVQLPKLGLVKCRVSKEVKGRILSATVSQNPSGKYFVALCCTDVELEPLPPTGAAVGLDMGLKSFAITSDGAEYPNHKFLTKSQKKLAKLQRELSRKSKGSKRREKARVKVARLHEHTANQRKDMLHKLSTNLVRQYDVVCIEDLAPKNMVRSRKLAKSISDASWGEFRRQLKYKAAWYGKHVVTVDRFFPSSQLCSVCGNQWQGTKDLSVREWTCPQCGTHHDRDVNAARNILNEGIRLMAS

SEQ ID NO: 62013 - protein, 412 aa, unknown
  TnpB Polypeptide
MLKQKYTIVTQLHEKNNKDIIEYFENASVYFCKLQRKAFHRLKNENRMGNQTEYGKLRKDFMKEYSISTRTANSILKDIQGRMKALEELKKYEASRKEQKIKKLREEIERLDNNISRFQERLNNKIKVSHLKYWNLKKSRAFKKMKLNKLQLELEQLKWQVETSHYKLCFGTKNLLKSNKGKFVIQRDSQMFFIGCKDETGRNSMFQLKYNKQNNQFKIKIRKDFGLDKKDKYVSGKCYFNHHKNKLIEALSNKNSTPLTYSIIRKNERYYLHCTFEYRVEDESDFLTRKTHGTIGIDFNKGFLAVSEIDRNGNLIGTDVLKYRFGCGNKTQSDLEECISKILKRAIETGKDVCFEDLNFKDKKSKTMKGTTDRGKKYNNMLHSLAYSLYIKLITNITFRNKVNIIKVNCLD

SEQ ID NO: 62014 - protein, 274 aa, Halobacteriales sp.
VSTLTEVKRTVPVKLNVPDERHDDLHITIEQFNDAANHTVQNGRNDDGYRILNESTIHDEVYYDLRDRTNLPSNLCIRAYSKAVEAMKSTVEDWKDGESRPLPSFNRPSAVYDERTLTVRDRSAILSTVNGRVEAEYVLGDYQRSYLDDEEYERRMGTLHYREDEDAFYLHIVLLKEVEEQDGDRVMGVDLNLKNVAVTSTGEFYDGGELLWGQNHYFRVRRSLQDKGTRSAKQALTRLSGRENRFVLDRLHTISRRLIEEARSHDCSTSPSRI

SEQ ID NO: 62015 - protein, 417 aa, unknown
  TnpB Polypeptide
MLRAYKYRIYPTDEQKVLFAKTFGCCRFVYNWALNMKITAYKERKETLGNVYLTNLMKSELKAEHEWLSEVNSQSLQSALRNLDTAYTNFFRNTKAVGFPRFKSRKDRQSFLCPQHCRVDFKKETITIPKAKDIPAVLHRNFKGTVKTVTVSMTPSGKYFASVLVDTAIQVLPPIRVQVDTALGIDLGIKSLAVCSDGRTFDNPKNLQKSLGRLKLLQKRLSRKQKGSSNRNKARIRVARLQEYIANSRKDNLHKITHALTHDSQVRTICMEDLNVKGMQRNHHLAQAVGDASFGMFLTLLEYKCSWYGVNLIKTGRFAPSSKTCGKCGHVYKGLKLSERSWTCPKCGTHHDRDFNAACNIKEFGLKALPTERGKVKPVDCPLVDDRPRVLKSNGRKKQEKRGGIGISEAAKSLVLR

SEQ ID NO: 62016 - protein, 393 aa, unknown
  TnpB Polypeptide
MIKAFKYQLFPTKDQEILLSKHFGCSRFVWNWALGEKTKAFQTDKIKLSRYDLQARLPIMKKQDEFSWLKEVNSLAIQSKLEDLDKAFVAFYKKKSDYPKFKCKHRSRESFRIPQHTKVDFETSRISIPKFLDGIKFDNHRKFEGEVSSSWVTKSPTGKYFISILVENNKELPVKPLIIESTTVGIDLGITNFATISNGLKIDNPRHLKTQLTKLRRENKRLSNKQKGSKNRDKQRIKLAKVYEKVTNCRKDFQHKLSYKLTHDNQVDTIVMETLSIKEMTKNRKLARHIQDCSWYQFQTYLKYKCEWYGKNFIQIGKYEPSSKLCSCGIINRELTLKDRNWTCKVCGITHDRDILASNNIKKIGLVQPESTPVESCNSDSLKQETSDSLGQR

SEQ ID NO: 62017 - protein, 374 aa, unknown
  TnpB Polypeptide
MIRRQAFKFQLKPNPEQIASMKSFAGACRFVYNRALTMQSGIWRNGDRYIPYNKMASWLVEWKDQEEMSWLSNAPSQILQQSLKDLDKAFNNLFARRATFPSPKKKGKNDAFRYPTQRVKLDEGNERIQLPKLGWVRYRKSRNITGVIKNVTVSMKLDKWYVSLQTESEVDTPAPQQSSMIGLNTCNIECITTSGGTDFLSQASLPKMEKSLEKSIRCLRRKKKFSSNWVKQRHKVNRLLNRISNMRKDHFHKISTALSKNHAIVVIENLEHATSLPKRSKHKKAAAVNDTYELKRQLDYKLSWNGGELVTVHERDDNFKPAQDESTYTPYGLLRAKKILAAGHAVIACGGVDILRHPSKQEPSEDSGISANLL

SEQ ID NO: 62018 - protein, 416 aa, unknown
  TnpB Polypeptide
MQRVVKMKLQANAGEKGILRDTMAHYAACFNTVAALAWSERLTNGVTLHHKTYYLLRGEHPTLPAQLVVSAREKARGAVKSGLLRQKRGKRATCPQAHWGAVRYDARSYTFWAARGEVSLATTAGRLRLSVSIPAYFQPVLQQCTGFDSADLVYYQHTGDYWLHLVVTLPGPEGEEEDSSQVVGVDVGISRIAVTSQNVFFEGKRVKEHARKMFRLRRRLQACLQGGRQAKGTRSARRHLKELRWRENRFRADVNHRVSKWLVEMLPRGSVMVMEDLVDIRERVRARRKQRRELHNWPFAQFQRFVGYKAAARGISVEFADPRYTSQGCSRCGHVARSNRRGQGWFSCEKCGYQLNADLNAARNLALRARGAQSRPIVNRPIVPNVEAKAALPGAELRLSSGASLPAGRPPASSGW

SEQ ID NO: 62019 - protein, 411 aa, Azospirillum sp.
MPPVNRRVTYKLYPSVRQAVALERVCDLHRALYNAALEERIEAHRKAGLSIRFADQCKSLTVVRRECPEYLALNAQSAQVTLKRLDKAFAAFFRRVRAGQTPGFPRFKGEDRFPGFGFKTHGDGFSFKPGDNWRHGRLRLSGIGTMEARGEARTPGRIVCADVQRKADGWFLSLVVECEPHRERSADRDCGLDWGVETFATLAYGPDAFAAIPNDRHLNAEADAIKERQRDLSKALRGKRSKRAARARCLIAKRHRKVANRRKNFLHQTTARLVRDHKTIVTEALTVKTMAATARGTEEAPGKHVKQKAGLNRAILDTAPGSFIAMLAYKAEEAGCELIMLNTQKCRPSQTDPFSGDVLKKPLSQRTHTLADGRVIGRDEAAALVMLRVGLKQLGREPTWAVRSETPTTAA

SEQ ID NO: 62020 - protein, 553 aa, Azospirillum sp.
MTENATLAACKPLVSAMGTAPPSTKAKCVHQSFQAEYAALMRAATPSFIAEFPLRTSAADERVLEVRLEAARHIYNACLDETLKRLALMRQSKDWQAACRLARSKERTALFKAVMLRFCFSSASVQKHAEACRNACWIGQHLGSHDTQTTSLRAFKAVQMHAFGKRGRPRFKGKNRLSSVEGKGDAVIRLRWQDEKAVVLWNGLVLPLLRDPHDRDGWQKQALACRTKYVRVLRRSVRGKTRWYAQLVQEGLAPRKERLPVGAGIVGLDLGPSTIAAVSDTDATLEPFCPGVADRDRAIRRLQRAMDRSRRATNPDAFNADGTYRRGARITVRSRRYRVLAAKKAEVERCLAAERKRAQGELVNRVLAHGNLIKMEKVSYRSFQRNFGRSVKRRAPSLFVSTLKRKAASAGASVVEFATRTTRLSQVSHDTGEYMKKPLSQRWHVFADGSRVQRDLYSAWLARFVEQDRLDASQCALHWAAAEPLLKRAASGFTQSASGAGFAGPHVRPGNRGGVGADRPLQEDGRRTEAADAVAQARAAERSGAGTSRTAWL

SEQ ID NO: 62021 - protein, 405 aa, Azospirillum sp.
MMLLMIERKAVLFRLYPTSEQAAQMAQIAGACRFVYNLALEQRRDWYRPGRRFNFASQCREVTLLRAEVAWLKAVPVHTLQQALRDLDRAYQNWWAGRAKAPTPRRKGLNDSFRFPDPISLVVERTGVSSGRMKLPKLGWVRLRGWTALPGAICTITVSRRAGHWFAAVQCEREVVEPAPSILPPVGIDLGVAVFAALSDGTSIAPANHGKTALKALRKAQRALARKTRGSANRRKAVRRVAKLQKRVADARKDFLHKHSTIIAKNHGLVVVEALPVRSMSASAKGTAAEPGCRVRQKAGLNRAILDQGWGLFRTMLAYKLADRGGKLVEVPAAYTSQTCACCGHVDAANRPSQPVFVCGRCGHRANADTNAAINILRRADSALTPVEGHRAKRPDEAGTSRRAA

SEQ ID NO: 62022 - protein, 400 aa, Azospirillum sp.
VLNRGYKFRLYATDEQESLFGQYAGVCRLVYNLALEQRRDWWRQVKANTGYNISYASQCRELTLLRAEFDWIAAVSIICQQQALRDLDKAFANFFAGRANHPTPRKRALNDAFRFNGRDCPWRKLNAKWAAVTLPKIGEVKVRLTRDIPGTVKNVTVTRDALGWHVVFSVEVEHDTPATFDPAVGIDRGVVHTLALSDGTFRDLPKERLNVLDQRARKQARALAKKTRGSNRRNAAHRALARTKAKAARLRLHWNHERSREIADRFGMVVLEDLKIGTMTASAKGTTAEPGRKVRQKAGLNRAILNNGWYQFECFLSYKLAERGGALHKVNPAYTSQACSVCGTIDKSSRESQATFHCGQCGHTANADTNAARNILRVGTQPAPRSAVGRPVKRKLKRVA

SEQ ID NO: 62023 - protein, 517 aa, Azospirillum sp.
MPRRKYDHPPVHRTDLLPSNLTAAKETAVLALLRAYRRGAVLLGREQWRLFFETGRFDKNFDEDKVTFAAVIGAANRVQMARWQVVGQLQGWISNRANEFRDTVNRSTLPPATKHMLHTINVLGAWFRCGAVVMKDTGEAIPDAVRRLARTIMRHCMAPHRKPDLSRLSMRLDHRAGSIARPVTATQSGAVGWWVTLSTLAKGRKIAVPLLTYTYHAERPGRITNGIQINERDGHLTFGVITDMGEACARSRADYRGSGVLALDFGLSTLFATSEGQLLGQGWLNRLKRYDALLSMIAASQQRAGRKPRDSRRYQALVEDVRGFLRTEVGRVLNRLVEQDKPAELVLERLDFRHSDLSRRLNAILRNCGRKVIQDKLRDLEERFGITSSEVNAAYTSQTCSCCGYVDKRNRRDQKTFVCLWCGHELHADLNAAANIEARRARPNGWLFQGKAAVLAELVRGFGERRVRAFRSGRTGSRGAPADPRLTNPYFGGKPSAVVRSAERHEASMKSPETQTF

SEQ ID NO: 62024 - protein, 401 aa, Azospirillum sp.
MLLLRGYKFRLYADAAQQAQLACFAGVCRFVYNLALEQRRDWWRQFKATTGRQISYASQNRDLTLLRAEVDWIAAAPVDCLQYALRDVERAFSNFFAGRAGYPQTRKRTEQDAIRFPFARSRWTKLNAKWAVVLIPKVGEVKFRLTRDIPGTVKVVTVTRDALGWHVVFTTEIEQPIRPSDKPAIGIDRGVTRTLALSDGTFRDLPKERLNVLERRARKQARALSHKQKGSNRWAAAKRLLARTKARIARSRWHWNHERSREIATRFGFVAMEALNTKAMTASAKCTVERPGRNVRAKAGLNRAILAAGWQQFETFLGYKLAAEGGVLVTVDPCRTSQTCSCCGAIDKESRESQAVFRCVRCGHAMNADHNAAVNILRAGKQPASRSAVGRPLKREPKRAA

SEQ ID NO: 62025 - protein, 369 aa, unknown
  TnpB Polypeptide
MRKTFQYRAKINKQTEAKCNQWLELCRILYNLALEQRINIWQQHGKSISCITQKNQLPELKAEFPEFKIVGSQVLQDVIERLNRAFDAFFRRLKDKAEKAGFPRFRGKDRYDSFTLKQCGYKIEGRYLYISGVGKFKLFLSRPIEGDIKTVTIRHTSSGKWFVCFSCDNVPTKEIPEAIAEIGIDVGIRVFLVDSTGRSVDNPKFFRQSERILRKRQRALARKMRSSERRAKAKILVAKAHEKISNQRKDFLHKIANFYVTGYQIIHIEALNIKGMIKNRHLSKSIADASWNKFFEFLSYKAEEAGRKVIKVNPRNTSQICSGCGEKVKKSLSVRIHTCPFCGLVLDRDHNAAINIKAVGQTAQALSAQ

SEQ ID NO: 62026 - protein, 658 aa, unknown
  TnpB Polypeptide
MGRNEMINKYKICGNWDEISIEYDIDTLSIISSVANAMGNRQYLELVRSYSKNFKELEELDVPSEEDEGIEKQTVSFVRGLSSSDVASKMGVFQINKGTEMHQVQNIRIPYSETLSKFCKLSKNLRSRAVFLGRQLYFLRTNKLNYNLAKQYPKLAEQLLDYMETKLDSPELYEELRQKLYINPTMQISRKLFSKLNKFEYSEGLNTFLKFEDCFKNLGAIYSQLPTQVLRNVASDWKSYRENHKNWKIYPELYKEEPRIPSKNRKTDEFLLTFSGTYVNNRKYASTIVDRFINTRRPTRNSKRLKKQLSKYCTSGELILPNEFLKKFSKLDPFPIVRTTIDIESIKEVKIVPKKIFYEIQIGYYAQKLQNNSLNPLRAYTIDIGVNDLIGLANNFGEQSIIIRGRPIKAINQWMNKNISKLRSAQTIGMTMKKGVSVPETSEMTRIRRKRDAVIDDYFHKVSRFVINCCLSRRAKNLAIGYNAGWKKDLTSREEKKMRYDVKQNFAYLPFYKLIKMIEYKAELVGINVVRIGESHTSKCSSIDFEPIEHHDKYIGRRGVYRKGPNKPSRIAMGKPKLKYYKARGLFKTRDPITGKPIIMHSDINASFNIGRKAFPDLFNKNTLKIRDMVKPPRTVCVYKYEYSEKKKRSVKHSCAMV

SEQ ID NO: 62027 - protein, 266 aa, unknown
  TnpB Polypeptide
LKIPVPQWEKYKDRIERFKQVRIIPKRTYMTVEVVYDCVCSDNVGTGMASIDLGVNNLATLVCGCNALLFSGKVVKSYNRWFNKKLSMLQSIKDRQGIDKLTNRMRKMYEKRERFMNDSMHKTSRRIVDYLVSHHIGTLAVGYNKGWKQSVNMGGVNNQKFTFIPFARLRSCLRYKCELAGISYIEHEESYTSKCDALAMEDICKHDIYLGKRVKRGLFKSAVGKVINADVNGALNIGRKVFGDSFMIADSGRWYRPERINVLKCV

SEQ ID NO: 62028 - protein, 498 aa, Actinophytocola sp.
VKVTRVAYSVGLNSGKLEQLAEQARRLGVVRSKVWREYGSVNGVGVGDRLIRDRWMADGTIESFAVLANAWKETLRDAVADITANREAAKAKVRKALNRRTTDPAERRRLFTALKRDTWTDDPFLRRLMRRHTQRGRNRTHNQIVVRSDQYRTFALNEGGNVWLAVPGLKRRQPVKIPLNTTLAPVGTLRLILRGGRVEVHYTIDAAAVRSSQRPCGECAIGVDKGYTEVLSDSDGHHHGSGLGKLLSSESDHRKTKNARRAKLRSIAEKATERGDHAKTRRIRDNNLGVAKRQRRSSAWQRRVRDLTFKAAHTVVDKAAVIVAEDLTKTFTGRKRLGKNTNRRLAAWTKGVTAEALASVSQRRGSASLAGGLVRRSSRCSLCGRRRSRRGSALRLVNAAYTSQVIPGTDSFGRRAGDRLHCTSCGAVWQADHAAAINILDRNADPDIGLHTPHTRVKQIIQDRDRQRSRLPDQDSNTAGHCECGERNIRNRSTLIKE

SEQ ID NO: 62029 - protein, 450 aa, Moorea sp.
MQLGYVYKLKPSLQQEDTMVRWLDMLLAQYNYLLKDRNDSYEQVKSPKMGDYCDLKSRGEACPLTCSVSKSSSVGYPWKKSKRNPRRSPYEIQSSTLPVLKKQRPWYKQIHSTVLQQMLRQLDVAFSKFFKGETKYPKPKRRSRFRSFKYSPGQVKIDGNQIYLPGIGWMSFFNSRPIPDGFTMKSVTVRRKSRGWFVSIQIEDKSVPLPPIKTTKEIKPDHVKGCDLGIRKLVSVSNGEIVQNPSNSKKYKRQARRLRLRQRSASRKKKGSNNRKKLFSRVASLHERVTNKRSAYHWEVAKNLTLGSDAIVFEDLNIKGMKSRCKPKPNENGGYEHNGQSKKRGLNRVISDAAWGELIKKVEVVAAKSGIPVIKVNPRHTSQQCPNCHHISADNRKGEKFVCTECAYHDDADVNGAVNIRKRGLEKLGIDPIQLPSVRGKVTPMETTAV

SEQ ID NO: 62030 - protein, 381 aa, Corynebacterium sp.
MRDKAVKRAYKYRFYPTPEQAEQLARTFGCVRYVYSRALAERSRAWTQEQRRVTHAETDRMLTQWKRDPDTVWLAEPSKGPLQAALRHLQDAYSRFWSKQTGYPKFKKKGKTRDSATYFRNCFTYRSGQIKLAKQSEPLDIRWSRPLPEGADPSQVTVSRDSAGRYHISILVEDTITPHTPADTTVGIDAGITTLYTLSTGEKITNPRHEKKDREKLARAQRQLSKRQKGSKNRDKARRKVARIHARIADRRRDHLHKLSTRLVRENQVIAIEDLSVRNMVKNHSLARVISDASWAQFCTMLEYKAGWYGREVIAIDRFYPSSKQCSACGMLQDLMPLNIREWMCPGCGEIHDRDVNAAKNILAVGLAVSACGDGVRPSRT

SEQ ID NO: 62031 - protein, 444 aa, unknown
  TnpB Polypeptide
MRITRGYKTELDLNNEQITACKKHAGCARFAYNWGLRRKQEIYKATGRRINTMDLHKELNALKQTEYPWMYEVSKCAMQSALEDLENAYKHFFRRCRLKKEGKLKGKKLGYPKYKTKRRGLGNFRLTGQIHVYEKAVDLPRLGRLRLKECGYLPTSGVHILSATVSEKAGRWFVSVQVEEEVSDPIPATGNPIGVDLGIKTLAQCSDGIAIENPKALQSELKRLKRMHRRLSRKQKGSKNRAKARLRLARKYAHVANVRRDALHKGTSQLTCARLTQEERASRIAKIAASLPEPKAKAKVKKGKKAQVIGTTPLPESLAKKVKWKQVKRLLRLTTEADRAQRPRMVVLEDLNVEGMKQNRKLARAISDVGFYEFRRQMSYKTEWQGEGFLLADRFFPSTKKCSRCGHVKEKMDLSERIYECDQPECALILDRDVNSSFNLAALA

SEQ ID NO: 62032 - protein, 416 aa, Archaeon sp.
MFAILSVIFGKRARFPRLACPVLAVKTVRQKHQASNELLSLLDKFRRMVNECVAFGIEENISSLMTLSLRSYNRLSPSTLSYYRLGAISSATGILRNYRKAKRKNPRTSVPYAGKLMLTTCYGFKIQSDLLRLPLNPRQYIYVKLNNHTLQVLSGHDVRSVTLTPHSLSISYSKETVDIKPEGYVGIDRNLDNVTVASTDQIVRRFDMLKATRIKSDYRFVNSHFKRNDSRIRKRVHGKYGRKQRNRVQPLIHNVSRRVVDEAKNRRYGIVMERLTGMRRLYRKGNGQSRSYRARMNSWSYGELQRQIEYKARWEGVRVIYVPARNTSKRCSVCGYKTLESTQRRLWCPHCGAILDRDENAARNIAARGLRFSPNGPPGEAMVEEREPENATLILKVDGGKLSQRPTTTTIRSMKT

SEQ ID NO: 62033 - protein, 591 aa, unknown
  TnpB Polypeptide
MTDHLSFPLRLPDTNHGAHERLDEFVQHVATRILHLRWTPEYLDGIHNADYQAWKYFDEHQPFEELDDHVLYHSIHGEDPPEDFKLYVPSRIRRCILQKVGETLRSHADRREAFQSIQRVLPTHKIRRIHRRRIKEELWDNGEYLSDGYIDVLIDQLNTYYDRHGRYPDTYFELQDPPEYSNGALPYSADDGPTSGQAVKYHYDEDVRSLTVKVKTPDTVTPESRGEWSWNEHDLSGYDAFHTLTQHGSLSAPEFQVTRRKNGDRIYELSFPVDVDTADADGDVERVLALDAGMRKEMTAVVVDGDGEQVSQPHFVRFTDRDRMRRLNRERQRLNAQLAELRRDGRDHTERFKRVQAEYERVNAKIQHKREQLTHDVANQVVALALVYDVDAVVHEDLRSLSPPRGEGRLSWELSSWARREIIEKIEYRCECVGVEVERVFPQGTSRMCPRCGSSGHTCKSPDHSEEVWWGGHFRCDNARCGFEGDRDYVAAVNVARVYFSETDGLDSGFTFSYTGDVEIVPAGRSVGTRLAFGRGVVAYRPEQARATAGGGSAVIAPAVALSESNADGSVRCGPATRQYTQFQRVTAEHC

SEQ ID NO: 62034 - protein, 442 aa, Kibdelosporangium sp.
VAEVVKRAFEYRFYPTPEQSAEFARTFGCARLVCNMALQARVEAWTLRQERVSYNTTSALLTGWRKTEELAFLNEVSSVPLQQALRHLQAAFTNFWGKRARYPVFKSKKRSRRSAEYTASAIRWRDGTLTLAKMGQPLAIVWSQPLPEGASPSTVTVSQDAAGRWFVSLLCGDVIEQAPASGAIGVDAGLGSPMILSTGEKIANPRHERADRARPARAQRSLATKVKGAANRAKACRKVARVYARITDRRRDYLHKLTTRLVRENQTIVIEDLTVRNMVKNHSPARAISDAAWREFRSLLECKAEWHGRDLVVVDRWFPSSQLCSACGARVERMPLNVRSWTCHCGATHDRDVNAARNILAAGLAVTACGDGVRPQRGNLRSGQSTVKQENPRATKGTPALQGREDVKMPPGRRRRFRGTRRTAAPRSAGCPCPARPSSACG

SEQ ID NO: 62035 - protein, 402 aa, Actinomadura sp.
MAYKCRAYPDPDQTAALTRTFGCVRLVWNKTLAERHNRYRSHGMPTSYRQTDAALTAWKQKPELAFLKEVSSVPLQQTLRHQHAAFQAFFAGRSRYPRYKTRTGRQSAHFTRSAFRMRDGQLWLAKTGGPLKLVWSWPEVDLAALNPTTVVVSQEPDGRWFVTLAVDRADPAPAASVGGMVALDLGLKDFAVTSEGERIGHPKHMQRHEQRLKRYQRQMARKTVGSQNRRKARRKVARQHARVRDARRDFLHKTSTNLVRRYDVIVIEDLNVSGLVQNRCLARAISCTGWAEFRSLLEYKAAWLGRRLVVIDRWYPSSKTCSACGHLLGHLHLGTRHWECPECGTRHDRDINAAKNILAAGLAVTACGAGARPAGASLPGQSAAKQEARSVREGIHTVSGDG

SEQ ID NO: 62036 - protein, 405 aa, unknown
  TnpB Polypeptide
MVTVLKGVKLRLYPNKEQERDLRQMCGNDRFLWNLLNGMLQNRYETNKHLYNGDTSKETKEKRKHVMLSAYDMNYLLPLLKVEFPFLECSDSSALQVVTSTLSKAYLNFFKNPNHFGLPKFKKLGVCKLSYTGKSTIKILARRYLKLPKIGCIKTSKTGILTDVKIKRYTIEYDSTNRWYISFQVEAEVNEFEKTNKTVGLDLGLTDMVIGSDGFKSGRFLVSELENEIKSKQRIYSKRKHYADVKIAMDKNMKVINPRTLLDFMNVEKARVTKAKSQKRLANKRKDFLHKLSTNLVKTYDVIVIEDLNSKNMMKNHRLAKALGNASWYEFRTMLEYKCKWYDKQLIVVPPHYTSQECSNCHHNSGKKTLDIREWTCNNCGIHHDRDLNAAKNILAKGLKTLQTV

SEQ ID NO: 62037 - protein, 370 aa, Bacillus sp.
MELILTAKAKILPTNEQALVLRDTLHANRKALNHASQIAYYNNLLSKFKLLQQLVYADLREQFGLKSQMACNVCTVVAGSYAAVKEQGENTLVEYKRPKLQYSYGRDYSFTKDGLVSVGTLQGRIKIPFITKGLERYFDGSWEFGTAALVYKKGKFFLHFAVKKIFEATSAIKNIVGVDFGMRFLATAIDSNDNHLFESGKSIKETKARYVRLRKGLQASGTKSAKRKLQRVSGKENRFMTNTNHVLSKALIQFAGEHSLIVIEDLTGINLTTTVRKRNRYYRLSWAFYQLRQMLEYKGIVNNVKVVAFDPAYTSQKCPKCGNTSEKNRNKKTHTFYCTTCQYRSNDDRIGAMNLRQMGIEYHHQMTLEA

SEQ ID NO: 62038 - protein, 405 aa, Lactobacillus sp.
MEMQVTIKTKLKISNSEIAWSFSKTMEQYRQACNYVSEYIFNNDFDMKQSRLNKELYTKLRNLFSLKSQMAQSVIRTVIARYKTVKTQMARRPYKYQNQNTGEWYREVRDLTWLHKPISFNRPQVDLQRNRDWSYLSSGQLSINTLDGRVKVDPICRGFNQYLDGTWKFGLAKLLKSSGKWYLHISATKEVADFNKQTVKHVVGLDRGLRFLATSYDEQGKTAFFDGQAIMRKRAKYQKLRATLQAKGTKSAKRRLKKLSGRENRWISDVNHCLSKTLVQKYGANTLFVLENLNGVSFERTDLPKALRNQNKSWAFYQLEQFLTYKAHLHNSEVVEVSAKYTSQRCPKCGVIKKDNRNHEKHEYHCDNCSYRSNDDRIGAMNIQLLGTQYISGQEQPKFELTTNA

SEQ ID NO: 62039 - protein, 404 aa, Nocardiopsis sp.
VHADGVQVPGLPGPRTAGPAGPHVRVRAPGLEQDPRRSPHRLPPTGRENLVPADRRGADRVEEDRRPGVFVRGVLGPPAADPAPPTQRVRELLRPTRQVPRFKNRTGRQSAHYTRSAFRIRDGRLWLAKQQAPLEVAWSFDDVDLASLKPTTVIVSREADGRWYATFAVETTDPEPAPRTGREIGVDLGVKDFAVTSDGDKIANPRHLERKARNLARYQRRMARKQRGSANRRKAKAKVAAAHRKVRHARQDFPHKTTTRLVRTADLIAIEDLNVAGTVKNRRLARAISDCGWGEFRRQLEYKCARAGRTLVVVDRWFPSSKTCSACGYLLAELSPGTRQWTCPACRTRHDRDVNAAKNTLAAGRVAARDSVSGDACGADVRRQGSSLPRSATKQETAVARQPA

SEQ ID NO: 62040 - protein, 359 aa, unknown
  TnpB Polypeptide
MILTYKREIQLNKKQLKYYNDSLSVFNALSKAIYATYQNKKPIFDPSYYLRLPSIKKVDRFAIVDRIIEHRNEYEQSYNLEIKNYDRYEVTNPRFNIVREETCVYIFGFGYISTSDLNDNIPRNSKIYKIMIKKVKNIYYSYIYFVVKDIPEPINTIKNSIGLDYSIKDFYVASNKERCGFPDLSKYRNRIKMLQKELLNHEKGSSNYNKIKAKIGNTYKKMVSTKSAFLHKESTRLVKKYDLIAVETLDLKQLCKRGYIDRNGLWHRYGKEIYLTSYNQFVDMLAYKSKLKGKIFIKVSKFFPSSKKCSYCGELNNLSIDIRNRILTCPTCGKQYDRDENAAINILNEGIRKYKEQIK

SEQ ID NO: 62041 - protein, 477 aa, unknown
  TnpB Polypeptide
MISGIKFQARPTLGQAKILCSWMGAAKFIWNAKCDEDRYLRTFARKYLPVGTFPEINQQYSQYKNKELSEFLSEVPSQILRNSVSNWYASYQQFFKQKDRGRPRRKKRGEGMSIHLTRELFEIKRDEKSGEIKMFIGTKRNNIGFLSVNWHTKKWFRYGPPNSIRIKKLPNGTFTVSFCFGEEEKSSPEKTEQANWFNFLREHKTEEELEKIVEGVDRGTVVMMATGTKNLTYSNKAIRGLAKYKKILAKNQKKFAKQKDKKSKRREKRRLKMAKTHQKISNIRENEIHHMTKKMVDGEEFKDIKVFVLEDLKTKNMTKSAKGSAIKPGKMVKAKSGLNREILDKCWHKMEAQLKYKAMRYNKVVFKINPAYTSQECAHCGHTHPDNRLSRDEFKCVSCGHSDHADTNAAKVIKKRAVKMILDSGTELSDKGVLRPKSDTGRGAKLRPLKGKPSGAQAKDLETRRNRQKRKEVAACP

SEQ ID NO: 62042 - protein, 418 aa, Halococcus sp.
MDPMRRTNTFEVVPMSEVDEELLRRVMDATASLWNELTYERRQNLFDGESVWDTEDYRMQYVGVLGSASAQQAIRKSGQAWRGFFDSDEDDTGLPGYWGNEDEGRELHWFGRNDQYTIQWGDRSRLEIPVGKDLKDEYDLTGRLRLEVRGEPRWDGEQGQLEIQYDEQRDRYRAYQPVEVDDSHPRLGTPLADESAALDIGANNLVACTTTTGEQFLYAGRDEFERFRETTREIARLQSKLPEGRYSSHRIRRLYRKRTARRDHAMEGMARDLMERLHARGVATVYVGALTDVLETHWSVRANAKTHNFWAFSAFIDRLETTAEEFGIEAEERSEAWTSQECPQCGSTDRTTRHRDTLTCECGFEGHADLVASETFLQRHAATKRFRPMARPVRYEWDSQKWLESPRSHRPKVARTNP

SEQ ID NO: 62043 - protein, 337 aa, Caballeronia sp.
LWLSDAPRHSVDEAIPDFDRAFQNFFAKRTDIPQFKRKGKSADSFRYPDQKQIKVVRENGRISLPKLGWLRYRDSRTVLGEVRNVTVSSKCGKWFVPILTKREVDQPVPHGPAVGVDVGITRFATMSEGTFIAPLASFKKHEQRLAKYQRRMSSKTTFSNSWKRAKARVQRIHARIANARGDFLHQAFTTISKNRAMVCIEDLQVLNMSKSAAGTADAPGTKVAQKRGRYKATLEQGWFEFRRQFEYKMAWRGGYLVAVPAAYTRQMSSSYGHVSKENRKTQALFACVLCGYSNNADHVGAINVLERGQRLFACGGMAQSGRPSKQEPTEVTQAIPA

SEQ ID NO: 62044 - protein, 412 aa, unknown
  TnpB Polypeptide
MPAARLVRSLFFPVREMPAPLRWLLGEFRLLVNRSIRIALREDVRSRYRLAKVAYTTLSAEHDVYKQYIPSAFEVALAVLKAHRRRVRRGKNTSVPYVRRPLLKAENQSYRLDRETGRLRIPIRGREGVQVVLPLSAWHRSILGDSSWGLGSLTLTPDRIVVVVRKAAPDPYAPIAALAFDTNEASLDGVVAVDSEACLVTVPFPEVRIVQATHVRRRRRLARKKANDRRVMRSLLAREGRRERNRVGQRLHRVSKGLVAAAAERRAAIVLEELRLPRGGGRGPGMRRRLSSWPQGELHRQIAYKALAAGVPLIKVNPAWTSKTCPACGARRRDRVGQDFVCLACDWEMDRQHNAGLNILKSALASDEALARAVRFRPGALRRDVVSPLCDLPEREGARDELSGVERVVETA

SEQ ID NO: 62045 - protein, 533 aa, unknown
  TnpB Polypeptide
MLSDSKYKELHDFAVLLNKHKNAVSKEVCSNLAFFMEMNVYDFTKYMRNKYKGVINSNFYNQLYQDVFTSYQNKFSSIQKNIVFEKVSFKGFEFYKRDTKNKKKDDFKKVIIKKEKTKLSSVLTYLSRYGNENTIEYITNQLKKSDLTIDKANYYQDILNYINKFGFDRLFNLSLQRRSRIIEKYSEHPVEFTKLTFRGRSRLQKQDIISYNENYNSKIKAFINISWIGRGNKSTIPVKYSKNYHGLMSEYKKTIPSVEYVITFSNKGKIKVNISKDGVRFIPENKVNYCGIDVNVKHNLFSLSDNTTFDYDRNLLSKLTDELSIIDSLKKDKDYVVGKRKQRKIDSLRNQIQKSNEQICSDVCKHLNSVGLDHIVMENLDNSFGKSFVNDKTSGLNFNRTNKELKLSSLKQMMERIARKYDISVSTVHSIYTSKMCPICGCIEDENRKDQETFECIECGHKDNADHNASINIKNRVSTTVLRKNLLKQSKLGNGTYEPKIITKDNVKNVLLSFRQNLAIDKDMVGVYAFDYV

SEQ ID NO: 62046 - protein, 375 aa, unknown
  TnpB Polypeptide
MNENIIRTISIKLDVDGHEAVLQETQQRFNAAASWIARVCWEEHITNTAHHRVYGQTRTRFGLGAQFAVCARAKAVEIVKAARTQEKQRSLAQKPVTCPQFGVRSSVRYDARSFRLLSLDRVSLLTVAGRITCRLLPGKRQHDMLVDPTWQIGGADLVWRRGTYYLHVTQHQDAPPQQETTETLGIDLGLVNLATDSEGQTFMGTKVYEVRMRYHRRRRELQRVGTRSAKRRLTRLSGRERRFQKDVNHCIAKTLVHKAVVSRKALALEDLTGIREQVTARRENRYERHSWAFSQLRMFLSYKAAWVGIPVRVVDPAYSSQTCSGCGHCEKANRQSQASFLCKQCGFCSNADINAAINISRADPVKRPLVTPVRG

SEQ ID NO: 62047 - protein, 399 aa, unknown
  TnpB Polypeptide
MIRTFRYRLYPHARQSKKMHYLLWLARNVYNSALEQRITTYQETGFGITCFEQSKHFGRLRRIDPDGIGLLNCNCMGLTLRRLDKAYKAFFRRVKSGGAPGFPRFKSKKRWRSIEFTHGNGCKLKFDDGGRALLYLQNVGEVKIKYHRDIPDGKIKHVILKRWFGKWYVLFQVDLPEPEIVGRDENSVGIDMGLHSLLALSDGKFVENPRWLRGSLKELRIAQRRVSRRKRGSAGRRRARYQVAKLHDHISNQRRDFWHKTTRDLVNTYSLIAIEDLNLKFMTVNHHLALSAHDAGLGIFRQLLVSKAEEAGSLVVTVNPYNTTQMCSGCGEIVKKDLSARTHSCPYCGLVLDRDTNAAINIINLAIKSARTEPPGDNADHGIKRSPGSLLLKYGESSP

SEQ ID NO: 62048 - protein, 390 aa, unknown
  TnpB Polypeptide
MIKTIKVQLRPNNKQLTKLFQYAGCSRFAYNWTISREQENYKQGNKFLSDNELRKEFTRMKKLDEYKWLNNISNNVTKQAIKDACNSYKRFFKGLSKYPKFKSKKRSKPSFYQDNVAIKFTDTHVKIEGFATSRKKNKQKLNWIKLCEKGRIPTNCKYMNPRITHDGLHWFVSVSIDVEDNTDIPLNEGIGIDLGLKDLAVCSDRNTYKNINKSPKVKKVEKRKRRLQRSISRKYNMNKEGERYRKTSNIVKGEKELLKVIKRLTNIRRNHLHRITSEIVKRKPSFICIEDLNVSGMMKNKHLSKAIQQQGFYEFRRQIEYKSAWNNIPVIIADRFFPSSKLCSCCGMINKDLKLSDRIYKCDCGNIIDRDFQASLNLKQYGENVLKQNL

SEQ ID NO: 62049 - protein, 542 aa, unknown
  TnpB Polypeptide
MKWARWAFIIASEVFLGGSRMRVQATLTLPMKVAPEGATILLRALRAFRAGAQYALDTILVKRLYRRVKDSYKVASLARLHKLLYGELKTRFGLPSRLAIDAIRYARSVAMTWLNNPNRGKRPRLKKLCMTLTKKQGYTLWLDNRKASILTPEGRVRCGVIYVERWHGKYADWEMGEAKLTYRRCRFRLHIVVKKDVDELQPKAILGVDRNIKNVVITVVSLDGRVLHQEMIPLRGIEKAIEHKKRQERLQKRYPRAWRFLEGVKGSIRKHGARQHNRPRQEMFLVAKRLEHIALQYHAWLAQEDLTGLSANTGVEKVRLWAYRQLGTILSYKLAFKGVRTILVKPEGTSSCCPCCGSRVKRITYHRLVCPRCGREYDRDLMASWNIALRALKAIGCGASQAALSAPDADENPSAMRGKLKNGGQAMAPVFQQPVSARDSPPGLPRRFDAKTAFSWGVSAPYPGALLSTLEPQRVSSRREFPPGEDGAAGRFSPATLPGSSGRGCRRDHRSGPASPSSTSPPICGRNALPHSGRFRHPRPRH

SEQ ID NO: 62050 - protein, 329 aa, Oscillatoriales sp.
MQLTERHIIKSTEHRFAEIDELAFKSKNLYNAANYVIRHNFIYGWGYVNYNEMNRLMKSHQAYKALPAKVSQQILMVLDQNWKSFFEAVKGYKADSSKFTGRPKLPKYKDKTKGRNLLVYTIQAISSKQLKKGIVKLSGTELLIKTKVDPDRICQVRLVPKCDSYVIEVIYDACTEHSRSEPESTASYNDFAAGVDLGLNNLVALTSNQPGFIPLLINGRTLKSINQFYNKRSSRLQSQLKGRRKTSPRIQRLTRCRNQKVDNYLHHTSRRIVDILVAQRIGTLVIGKNAQWKTDINLGKQTNQNFVSIPHARLIEMLEYKGFLVGILT

SEQ ID NO: 62051 - protein, 247 aa, unknown
  TnpB Polypeptide
VTKICQVRCLPRLDSFKIEVIYEIDDPIELPHENVAAIDIGLDNFTTLVFSHPVAPCIFKGSKAISYHLQHMKKVSELQSELWRTQKSHHQSKRVRRLREKRQRYFQDVMHKLSHSIVNQLLENNVTTLIVGHNSKQKEGSRLKTFTKIPIFGLLKKLEYKCKKAGITYKEVNESHTSGTSFLDGELPTADYYDKSRRVNRSTFITNSGKKIHADVNAAYQIMRKAFPSLHIDYDSSIFNPRVIHFH

SEQ ID NO: 62052 - protein, 256 aa, unknown
  TnpB Polypeptide
MTNNNIAFLGNKIKLPKIGKIKTRDKYRQIKGRILSATVSQTPSGKYYVALCCTDLPQPEFIKTNKYVGLDLGIKDFVITSDAVKYSNPKYLQKSLTRLAKLQRELSRKTKGSSNWEKARIKVAKLHDRIANQRHNLLHQVTCQLIRNYDVICFEDLQVENMMKNHKLARNIADVSWSEFMRQLTYKAKWFGRIIVKIDKFYPSSQLCHICGYKNIEVKNLNVRKWNCPKCKTHHDRDVNAAINIRNEGLRILNIA

SEQ ID NO: 62053 - protein, 358 aa, unknown
  TnpB Polypeptide
MEHTRTLRIRVKDKHARVLTAMAREVNTVWNYLNETSHRAIRERGQFLSGFDLQKLTNGFSKCDGVLIGSPTVQQVCEDYAKARKQFKRAKLRWRVSNPKSSKRSLGWIPFKARALTYKGGQVSFAGHKLNLWDSYGLGQYELRAGSFSEDSRGRWYLNVAVKVQAVASTGTASVGIDLGLKEAAVTSDGQRIEGRFYRKLEAKLGVAQRAGKKARVRAIHAKIANQRKDMLHKFSTALVRANAAIFVGDVASAKLVKTKMAKSTLDAGWSSLKTMLEYKSHQAGIVFMEVNESYTTQTCSRCRLIPASSPKGRAGLGMRGWTCCHCGAVHDRDVNAARNILALGHERLAGGIPFQVA

SEQ ID NO: 62054 - protein, 344 aa, Microcystis sp.
  misc_feature (286)..(319): Xaa can be any naturally occurring amino acid
MIVLEMKAVVKPSQCSAIDEAIRTVQFIRNKALRLWMDAKREDKIDKYSLNKYCAVLAKQFKFVDTLNSTARQASAERAWSAIARLYDNCQKKVKGKKGYPKFQKNNRSVEYKNSGWKLSEDRKKITFTDKKNIGTVKLKGTRDLNFCPLDQIKRVRIVKRADGYYVQFCLSVDIREYAKPLEPTKKCVGLDVGLKVFYANSDGETVEIPQYYRKAEKRLNRLNRKKSKKFRKGQPQSNNYQKARKRYARKHLRVSRQRKGFVEKEALRVIKSNDFIAYENLNIQXXXXXXXXXXXXXXXXXXXXXXXXXXXXXXXXXXKSLTILFIKPKIMSNLSRVLDIFTR

SEQ ID NO: 62055 - protein, 358 aa, Microcystis sp.
  misc_feature (59)..(92): Xaa can be any naturally occurring amino acid
MEKAYSYRFYPTPEQESLLRRTLGCVRLVYNKALHERTQAWHERQERVGYAQTSSMLTXXXXXXXXXXXXXXXXXXXXXXXXXXXXXXXXXXHQGASAEFTKSAFKFKDRQIYLAKCTEPLPIRWSRQIPESCEPSTVTVRLHPSGRWHISIRFDDPTIKPLPVTDKAIGIDLGISSLVITSDGDKVSNPKHFKKHYRRLRKAQKSLSRKQKGSKNREKARIKVAKIHAQITDNRKDHLHKLTTQLVRENQTIVVENLAVKNLVKNPKLSQAISDVSWGEITRQLAYKCRWYGRNYIEIDRWFPSSKRCSNCGYIAEKMPLNVREWDCPDCGTHHDRDINASKNILAAGLAVSVCRAT

SEQ ID NO: 62056 - protein, 324 aa, unknown
  TnpB Polypeptide
LNRHHGEVVITGQNPGEYRLDGQPCRYSIHIRVRVSQSIRDYTSIGVNWTRRTLVFVNDPLPIGRERTGAMVGLDRGCAHTLATSDNRFLDLPKQRLERIDREIRRRQKAQARRVNMSGKTVREYRRNPSRTYERTGREISRLYAKAHRIIDDWQHKTTSMLVHDYDLIALEDLNLQGMSRKSKAKPDPDRPGAFLPNGQSAKRGLNRSLRAASLAGIVSKLEYKTRLTGQNRLILVNPAYTSQTCSECGYCDSRNRESQADFECKQCHMSMNADLNAANNILKRGLNHLIGLDEAEHARTESDVPTAYSSRDASALTCGTSTR

SEQ ID NO: 62057 - protein, 276 aa, unknown
  TnpB Polypeptide
VIYSTLFIIQNSIEFDYWITIENQFERKKGVKLPCKSHKKLNQALRDGWVLNDTAEFFKDKNGKFYARVFVQKEVSKAEKKEVSLGCDVGYRNSVIRSDRYIGRNISRIIRTERQKQASRQKNGLEVKKSLGLKSRIKQVLDLEAKIAVRRSQKAKLNLVVESPKVLANLSSGKLHGWGRSYFANRCQVLGKEQGVFIWEVNPAYTSQTCFKCGHVDKQSRAGVSFVCTKCGHADHADINAARNIALKGTESLGKLKRSGSVNVLGGYVNEKYKSR

SEQ ID NO: 62058 - protein, 371 aa, unknown
  TnpB Polypeptide
MKRAYKYKMKPTDEQKQLLSQAFGCARFIYNWGLDRKKTAYETEKKKLSYVDIAKEMTLLKKQEEYKWLNDVANDILQQSLRNMSAAYDNFFKQHNGYPKFKSKKNSRDSVKYVQCVHFDFNEWKVKIPRIGWINICKNRTFDQSNTKQGTCTVSRDHCGTYWCVILTDDGIENTPKTKVIEETAVGIDLGIKDYAILSDGTKYGNPKFLEKGQRKLAILQKKFARTKKDSKRHEAMRMRVARQYRKINNRREHFLHDISSAIINNYDTVCLENLNIEGMVKNHHLANSIQSAAWGEFKRQLEYKAEWNGKNIITIGRFEPSTKTCSHCGYVNNEITLKDRSWVCPNCGTRHNRDVNAAKNILRMGMEKNK

SEQ ID NO: 62059 - protein, 430 aa, Planktothrix sp.
VLHQAVQVRLYPTALQEAHLAQTFGCSRWWWNYALNKSIQVYQDTGKGLGQVALNALLPKLKKAEDTLWLANCYSQVLQATTLNLTTAYKNFFEQRAGFPKFKSKHGKQSIQYPQNVKIVDGNVKLPGNIGIVKAKIHRPIEGKIKTVTVSKTPSGKYLASILTEIEGENPTISEGKIYGIDLGIKHFAVVTDGKKVSKYDNPKHLAKHEKNLKRKQKKLAHKQKGSKSRQKYRKIVAKVYERVSNSRQDFLHKLSHKLVSDSQAVIVENLHVKGMVRNHNLAKSISDCGWGTFTNFLAYKLEQKGGKLVEIDRWFPSSKLCSNCFYQVSQMPLDVREWTCPNCGTDHDRDGNAAINIRTEGIRILKTDGSAVWRCRRGGKTKRGAQVCLEAFACEYRSRHCTWYSKSVWVVHILLIFNSRGRTKNTQQF

SEQ ID NO: 62060 - protein, 467 aa, unknown
  TnpB Polypeptide
MRQVIHGEIYVEDSTKLDGLCQMFQHIRRYGYNRHQKNDVQGSIRTHCEQKFQGQLNKRWIRDAELSGNSLHTRFKDEKVIFGGRDNWKQLKTGNLSKQDWLSARDHHCYARGEANKQGNLNCKILGNQLRVNFGTRDYQYYPLHVSTKVTKKMAKQGRPSDKEKLRLLLLLAQQKKFSYNIRLRKKDANHYKVNIEYDLPDPEAKVTFANGAIGVDTNTDHIAIAETDAKGNLVNVESFDSQRIQFAKKDKRFYDIAIIVNQIIDYAKKTGKGIVFEGLGKFKKKKGSKKQNRKRSNFCFRKFLNLLEAKCIQYGIAYRPVKAAYTSIIGNLKYAKMYKITGHQAAAYVIARRGLGYKEKISLYKQNKVFVKAYLIRTLETSSKSGKYKGKRWSNWKLWSRLNKEQAVLTGPQSRLQMPFRELCGSRSSTTLEWEKSQANPSLEQVEKVTSRNISSEGRKALFQSR

SEQ ID NO: 62061 - protein, 468 aa, Glycomyces sp.
VKVTRIAYSDCINQSKYMHLSTQALRLGAVRARVWREFGSIRGVGMRDRHVRDRWMKDGTAATFGVLANAWKETVRDAMADIASTREGAKLKARKAIHRHTRDEAVRKRLYIALKYDRWPADPYLRRVMRRYMGRGRSRVSNQIIVRADNYKTFTLSDSGNVWLAVPGLERHKTVKIPLNTTVAPTGTLRLILRSGRIEVHYAIDAAAMKSSKRPCGDATIGVDKGYTEILTDSDGHRHGAGFGRLLAAESDHLKLKNARRAMIRAVADSARESGDIAKAERIARNNLGTAKRDRRRIRFRQQVRTETFGAVHAVIDKANQLVAEDLTRAFVSRKRMGKNTNRRLAAWTKGVTAEALENVSERRGSVLTLVNAAYTSQVAPCCGALGRRSGDRLDCTRCGAVWDADHAGAINVLNRNADPDIGLWTPHLRVKQILQERDRQRTRLPVQDPSAKVRGANYPIRATTSKK

SEQ ID NO: 62062 - protein, 474 aa, unknown
  TnpB Polypeptide
MLQAFRFALDPTPVQARALASHCGAGRVAFNAGLARVKRCLDQQEAERSYGVAEAELTEVPWTLPALRRWWNTHKSEVAPWWPENSKEAYNSGLDALARGLRAWSDSRAGKRRGPKVGFPHFKTRRRARPSCRFTTGALRVDDATHVVLPRIGRVKTHEPTVALLGKVTAGTARVLAATVSFDGSRWFCAFTVEADRVVGPPAHVSADRAHPVVGLDLGVRDLLVAAAPDGTEVARVTSPRSLAAAQGRLRALQRQAARRHGPDRRSGQRPSRRWRRTQARIGDLHRRAANLRRDVLHKATTALAQRHQLIVVEDLHVAGMTRRKPGAGRGGRGLNRALADAAPAELRRQLGYKSTWYGSELVVADRWYPSSKTCSACGDVKAKLTLSERMWTCGGCGTVHDRDTNAATNLARLGDPRWKTRPAGSGPVVGRRAIRKTSPPAGVAAGGDEASTPHGGPPAADQTGTACPQGKAA

SEQ ID NO: 62063 - protein, 406 aa, Deinococcus sp.
METRQVRFKLYPNQVQNEQLESWNRLHCELYNACLQERRDAYKKCGKSLTYYDQQNQLPAVKEARPEYKKLGSQALQETVRRVDRAYQGFFRRVKKGDTPGFPRFKSGRSYVGFTYPALAGWKFELGETGQHGTLNITHLGTIKARGKPRQWGEMRCLTLSKIGGEWYATITIRCTPKRQAGMLAAGVDFGVARIASLSDGTPVENPRFLKKAMSKLKTLSRELARRKRFGSNWRRTKAQIAKLHAKVANQRANFQHQLTSDLVSQYGVLVTEDLSIKRMTAKGGASKTGLNRAILDVGMAGIIQKLACKASEAGTLFLSVPTRLVKPSQTCPACGNPSKKTLAERVHKCECGYAEDRDVAAAQVMLQWALANCQELAGRDTMAAPGRVSELRNPDQTALFAVGRG

SEQ ID NO: 62064 - protein, 436 aa, Deinococcus sp.
MRITISAKLKLNHTAAQKAALDRITLAYRDALNYASNKAFELDKTSSAPRLHKAVYADLRAQFGLGAQLACTVERQVAATYKGQWTKLKQNLKARELGRTKRRYKGLEAAPRFVARTLEYQHGRDYSWKKGGKVSVGTLEGRMVLEYEGYQKHLDLIRQGCETGAAKLYYQKSKKQYYLIVALNVELSDPHPTQHSNIVGVDVGQRYHFVATDKDGKSLFEKGKAVRQKKEHFARIKKSLQRKGTRSATRRLVALSGRERRLIADRNHTLAKRLITRFPRSIFGLEDLTKIRERTERRSNPKASPKTKRAKRHQSQWSFAELQSKLAYKAPLFGSLAVRVDAHYTSQACPKCGHVSRGNRPKAGLEFLCEACGHRGHADRVASVNIALRTMLVRQDWMSTGALSMRPDVSDGEVKAARLKRYAELRWNPDASPSLM

SEQ ID NO: 62065 - protein, 441 aa, unknown
  TnpB Polypeptide
LKYTTETRLYTKNNEDIVTYFDEVKEQYSYILRKVYYIIRSNPKIKESSLNTELQNKYSISKRTANSIIKIVQGRINSIKELKKTEVKQNQYRLERISKKLEKLIPMLLDLKLKARENDIKDLTKYRNLKTKVAFLKIRKDKLVNKIKSLNHQLETNKFKITFGTKKLLKQNLEEFLNKRDNQMVFVGSKEETNCNSTFQLRYVPKINQFIIKIRKDFKYKNTKGEERYVYGKCFFNNHKKLLKEILKTKNSPLTYKIIQRNNKYYLQCMFEINSCDLSLTDNTQGTIGIDFNKGFVAISQTNKYGHLIGIDKMTYRFGSGNKTKNDLLLIINKLMELAINTGKDIVVEDLNFLKERSKTIKAESEKGKRYNKTLHSLAYRMFLDKTEQICNKRNVGLIKVNPAWTSWIAKNKFCDKMKLNVHTGAAFVIARRGMNIKDVV

SEQ ID NO: 62066 - protein, 134 aa, unknown
  TnpB Polypeptide
MAGTGETALWRRFQLWVNHCISKAIVSRAKATNSAIALEDLTGIRERIHRQSRHKTERRRSNSWAFYQWRQFLEYKAIRAGVRVWVVPAADTSQTCHKCLHIHPDPAQSDRDGKQFRCCKPAWRFGLVLFSCRT

SEQ ID NO: 62067 - protein, 465 aa, Moorea sp.
MYRTIPVKATFSYEEKVFWEFQCRQSNSLFNCAIYYAKQKHYKWLEEQEAYTTYWRGDELRAGWKTYKCRIKYPEIDKALKMSPHYKGMAAQSAQQTLKTVGEAIASYNKLVGLYYQGKVNRPRFLRYRKSGGFATVTFPRQALTYKEGLFYPSVSKESKPELLTQITLSPPDFIDPDWVKEVTVRPCYGQLWIDWVIDDGKQPVTDNSKLDYSQAIGIDHGGDNWLTCVSTLGKSFIIDGRKLKSMNQGYCRLVAKHKSGKSEKYWDSHLDRIQLKRNNQMRDAINKAARFLVNRCLNDGVGNLVFGWNEGQKSRSSMGKRGNQQFVPIPTKRLIERLRQLCPEYGINLIITEESYTSKASFLDGDSLPKYGAKPSGWIPSGKRVRPGLYRTASGKLINADTNGAANILKKVTTQSLDLTKVVRGALTLPHRYDLFTNLSRSYRNKGVREASPSAIVARIYPST

SEQ ID NO: 62068 - protein, 211 aa, Paenibacillus sp.
MRPLSSNIELYTAKLDRTAIVIFIGAELVGSGVIEDISEFNVEVKGERLKLSRKAQVAQKQGRLLAECRNYQKQRMVVAKLHEKIANQRNDLHHKRSTDLVNNHDVIFVESLNIQGMVRRRGWGRSLHDVSWFLSKLTYKAAWYGKQVIPIGRWFPSSQICSVCGHQDGKKELHIREWSCPSCGVHHDRDINASMNIRADGLRQTSLFASV

SEQ ID NO: 62069 - protein, 413 aa, unknown
  TnpB Polypeptide
MSKKKSKPKIPYIVRRVHIGTSQQLQELSHECGEIYSKTLVFFWRTVRHKGIWLKPRLLMRLFTSPKLHAHTSDACVQAFFAALASWRELRQTDPNAKPPHRRRWYFRIEYKRSALSLTGGMLRLSNGRGNAPLVLPWSWDLPQTVVIRWTGSEYEALATYAIGAPIMPEEEEEPDYQARRAEQSAGIDLGEVHAAVSHDGQHTHIMNGRLLRSKRQYQNKLKAELDGRIARKKQGSKRRKKLIRTKQKQLKKMKNQIKDVEHKLTSKLICTLQREGVQRLVIGDVRSIRKNLDVGSTNNQKLHQWSFGSVRHKLTYKAEHAGMRVLLQEERDTSRTCPVCGHRRKSKPRGRVFSCTNKKCRWSGHRDAVGAMNIRYKYRGEFGSPHVVGGMAPPTGCGYIPQLVCSSGATAV

SEQ ID NO: 62070 - protein, 430 aa, Halobacteriaceae sp.
MEYSHRYRASPTEEVAVGLEHHLNVHRQLYNHVRWDYEQAPEDDKPSEYDQNNKLTEWKRKWSVFSELHSKAAQATVARFHRNLSNLRKKKEKGYNVGRLKRQTPTDYRSVTYNQSGFNLDEKRGHDKYAYVRFSKIGWVKIRYSRPIPDHATIKEVTFKKERTGEWFVSFGLETDDANLPEKPGVDSLNTSNSVGIDLGILNYIHTSDGKTVDWLDLQDDYKRLRREQRKLSRKEKGSNNYEKQRREVAKVKRHIKRKLLDYQHKITTWLAKEYDAVFVEDLNVQSMLQGDGNARNKQDTAWRQFITLLEYKADLHGTHVVQVEARGTTKECASCGVETAKPIWVREHSCPSCGFETDRDANAVVRLRLTGSKIARDFATAMNVLKRGFSELGLGWPESTPVETVAATDTADFQRVSARHVVETGSLLS

SEQ ID NO: 62071 - protein, 418 aa, unknown
  TnpB Polypeptide
MQLTRKIRIYPTAGQEAVLWELSEINRKVYNLALNERREAHAAGIKGVNYIKQQNDLPVLKKEWPELKTVNAKVLQMTLKTLDANYKSFFELRKNGDVDANPPGFKGRHYFTTMKHNQSGFKVTNTSIRLSHNLPGKVELTFPIPEQEFGAIKQVEVFRDSKEKWFLAVVEDVLPPNPVDNGQYQAWDLGVIKQTAVNSQGKFIEVKNIRPDRYWNPKIDAVQSRRDHCKKVKGKKPSRRWISYNTTKRKMERKRSDQIKDFQHKVSKNLVENTRAGTIIIGDLSVKKMPKSRSATRQTNRSTQGTGHLARFAGFLTYKGILAGKQVIEVGEEYTSKTCCCCGKIHAEMTVRDRVMHCECGTVLDRDRNAAINIMVRYLSQNALWTGYREFTGNLRQTGLRIPVTPGHSQEAPCASGG

SEQ ID NO: 62072 - protein, 390 aa, unknown
  TnpB Polypeptide
MIRGFKYRFYPTPKQEVLLARTFGSVRYVYNWALALRSQAWYEDQKRINYATTSTELTNLKRKPETTWLNEISSVPTQQCLRHLQTAFVNFWEKRTSYPSFKRKHGPQSAEFTRSAFQWDGTTLTLSKIGRLKIKWSRKFTAEPSTVTVSRTPAGRYYVTFRVDEPLLKMPKAKAAIGIDLGLTAFATASNGSKFHAPRPLRREMEQLKRAQKTLSRKKKGSKNRDKARVQAARIHQKISDTRNDFLHKLTTRLVRENQTIVIEDLAVRNMMGNHALAGAISDSGWSEFARQLEYKCAWYGRRLVRIDRFYPSSKRCSCCGCMVEPMPLDVRKWRCGSCQTEHDRDVNAAINILGAGQALIACGDGVRPPRSQDRSGHHLRSRNRSGSRV

SEQ ID NO: 62073 - protein, 373 aa, Chlamydiae sp.
MIVRKAFQFSLRPTKKQRKMLQAQLDECRWLYNTCLEQRKLSFEDLGVSLTKYQQICFLPELKQERPTLERVHSQVLQNVVDRLEKAFQSFFRRVQAGENPGFPRFRGIHRYNSFCYPQSGFSIENGELKLSKIGSIRIKMHRPISGTVKTCTLRKNASGDWTVSLSCEVEATPLQPNEESIGIDVGLTEFATLSNREKIKNPRFFRQGEKKLAKAQRGFAKTEKRTKERRKKGKAVAKIHSKISNQRKDFCHKESKKIIDQYQYICIEDLNIKNMVEGSSFAKSILDASWNQFRQFLTYKAEEAGRKIGLADPAYTTQDCSRCNSRERKALWERRHCCPNCGYCTTRDHNSSEIIEARGMAGLGLRPRSPRL

SEQ ID NO: 62074 - protein, 450 aa, Streptomyces sp.
VGRKRSIVIDTVGLLLAVLVTAASVQDSVAGQTLIERVVAEHPTVRKTWVDGGYRQHLVEHAATLRVVICGGGVIGACTAYFLTRSGVEVTVIDFLAVLPAQAAQAVLKTYFQAWKNCWEGRADAPTFKGRFRTVMSVDIPQGRDLNINRVHRRWGMVNIPKVGRVCFRWTKDLPVGKRAGAENRITGARLTKDSLGWHIAFRVQSLEPAPRPHTGPEVGIDVGVTVPIALSDDATKKHGPWLTDREQAKLLRLERRAARRKKHRKPGERTSRRLHHTYDQIAGLRAKAKRRALDWQHKTTTDIARTYSVVVVEALTITNMVKSASGTIEEPGRNVARKSGLNRSISAQAWGRTVTMLTYKLARRGGTLVKVPAPNTSRRCSACGFVTPGSRETQALFVCKNPDCGWFGNADHNAARNVLHLYRMGPALIPAAGRAVVRRAKRVKPAAAR

SEQ ID NO: 62075 - protein, 723 aa, Streptomyces sp.
VSTVLSDVAPDSAGPGPAAAALPARRFRGKNKGERWKRGEDTELAVIRLPLDVHNLDDLHRLEQLYSAMWSVKRALQRDARAAVDAYWAGDVRREVDAKAWRQTLGLSREGMERRGYRHVEASRHLAHHVTKALVMHQADEVFETAVSRHLFPDATGRRFGRPRTGSWWDYTRIPGRARSHTTARKWETFRLHGTLAGHFAAYRHRNLDPSVTVPEQAAGLPADTSVLEQPRRLPVSARPAGRIATGEVTPKGTPKTRAATWWDHTGPLTVVFTGGADSRRGDLVLPVRLPAGAGRWPRLIHFLNNPETWHKVDLVRRRAAAAPGGWAYEAHLMVLTGGYASPATRARRAAAADLCRIGGIDGNVSNVSVVSFPRTFDPDDGEVKATRVEPTDEERAALAKARRKERGRKRALDRSRRAANAKQYGPSKRQQARTARRQAAGLPERNVQVPGGVRAANKAGVPKQAYRRDDLSAGYRRNRARLAEATATAAAAKDHRARRIAERIVGDHGPNLTVEDCNVSTWYRLWGKALQATTPGRLITAIGRECEKTDGRLLRASTFTTKLSQTCLCGERVSKTLADRVHTCPACGLVADRDMVSAALATHVTLTDPDDPSTARLDYVQARTTQIWFSQRLQGALSSQPQRGASPTRGRTHAAAHTPGIPGQRASARQNTTDRYRPTPNETRPANQRHKAHVGTAAHEGNAPPRGDIPERELVGRHLITG

SEQ ID NO: 62076 - protein, 539 aa, unknown
  TnpB Polypeptide
MNSAQKTEVKPRRATKPARVIGAPAGIAIKTRLILSERDERTLRALGSHLGALAGRDLVAVLGGQSWTARKQTLTSESSSRWAGTLTRANNDQVKLARMAQQAHRAELRAAIGAITRRLNLPCQDSPCALDDKGKKITSGYRDQGEHWLKAQRLKILQAELAWVETDLAAGKLHIVRGSKKLLKARHSLEDAGLTLDQWSERWWAARSKISANGSHDEPLGNLTIGVSSEGTCSILLPPSLRHLANDGHRYVLEARVKFSYRESDWKAQLAQNGALAYEISYDVRKSRWYLTASWTHASAESETVHNTSQFYVGVDLNSDHLACWLADPSGNPVGRPIDIPLILQGSRGLRDGHLRWAISRLLVFCKIQGAKTLFIEDLDFSDGKSRENFGHNKPFRHLISSFPTSQFKNRLQAMAARAGIELVAVDPAYTSKDTKSWIKPTSTKFQETTSHQGAALGISRRGLGLSLSRRKGVPQSHQRMTASELPTSSRNQPGSLSQGRSASQRQPGVSPSLPRPIAAYLRPPRTVRGGPLISNCQR

SEQ ID NO: 62077 - protein, 539 aa, unknown; identical to SEQ ID NO: 62076
  TnpB Polypeptide

SEQ ID NO: 62078 - protein, 606 aa, Rhodococcus sp.
MTDAGLTALRRFSFTTRPYLAVDDATGEPIGLDDLDIRVGWLLELISGAETELISRLWQPATFDVLATGRDSHGRALPKHGHVAAARLGWTPRYPDSVYAPSRVTRVVTAQAMATLRTLAYRDTAIASLSARFDPETGRLSAPSGAAEYVPSGFARGVRRQLIARTRQIDDADSGAAQSARVRITDVQTPPRTSAMARLSAADRQLAHITVTDAVMTLTVTLPTTVAPTGRAQWRHVRLAAAIPPHLHRRPIREWHLPTLVLDHRGLLVRCAATEAVPAAGMTSGTTAVGVDWSPSTLGVAAVATETPDGLVSDYRGFTYDDRGLGIKLARLQTEGQLLHRKAARLRRLAATAPPEVRAHLDAKIAVLDGHRTAVGVKRGKINRELAFHFGRQVTDYAAAAGATVIAVEDLTTLETRGHGRVNNNRAAQSARRKAVDALTHTAAGVGVTVVSVPARGSSALCPGCNEPLTRPGGYHRAWCARCTVGGHRDHVAGVNLAKRALLGRGQAVRKRGDSPQIRVIEHAPVRHCRDKKSPTPRRPRHRRVRRSAPAATPRVGVNHPKTVPAPQASVWDTVQPATPQGVTGSREVHTSPTPATSVVGSMRSM

SEQ ID NO: 62079 - protein, 370 aa, unknown
  TnpB Polypeptide
VINLSNKHHITVHHIKLFKPTKTKQEQLNLLLKNWNKAIRSALKIVKHWGFTAYTKSHKHTYRVSRHNFNLPSQIAVEANRKAIETYKSADKKYRNNVQFHKQVEVSLVNNKGFELIKKDNDRYIAKIPIEGRKSIYCPLAFGEYQLNKIKSDKFTFKTAKLYKYNGEWYLDLIMEYNQPKRKTNTILGIDLGIVKLATFSIIDKQENIFHQECMSGQELRFKRMRYKHKRKAKARSSGSKATSLIAENRLCKELNFKIANQIVEFADKHNSLIVFEDLKNIRKNITNDNTLNNYEKNSWAFYQLKQLIKHKADLKGIPYQEVNPKDTSQICSVCGEKGFRLSQNRFLCDNLHLQNADYNASVNIAKRAI

SEQ ID NO: 62080 - protein, 415 aa, unknown
  TnpB Polypeptide
MNRTNIVLLTPTSEEEQQLRSLAEASARLWNIANYERRQGLFFQNSWTPTYTHQCRRFKDTDAFKQLGTCKAQALLAKLREAWGSYRALKQLEERGQLPPHIQRILPPRYMKDRSTRKLRAESIYVRNDGYKQREDALVLSKKLRISFKSGDLWVGKQGRLELHYDRLRGKWYGHIPVRVKWPRKGLPHQSTRKRASIDLGICNLTTCVVEDSDKAYVYSGRAVLSDWRYWTKRIASYESTLKKTNQRDSSKQLSRLYRTRKRRLNHAVKSMLRNLYDRLEAHGITDLIVGDLKHIRDNANHGKVGNQKLHNFWPFAQIRQRIQELSEEYNIRVHFKSERGTSKRCSICGKKHKNGRIKRGLYKCPDTNVRLNADVNGANNLLYGRKVAADSGSRPMALPLLLKWNSQEWEVSAA

SEQ ID NO: 62081 - protein, 315 aa, unknown
  TnpB Polypeptide
MLIKKIIFKLEDNYKKYINGNSGYLKYKSKYNKNSYTINIIHSNKTIDYKNIKLDLENKLIKLPNLGNLEIRGYRNLKQIDGRIVNYTISREKNGKYYIAVLYELSDIQKVTPETIVGLDLGIKKLITLSSGKTYENNRYITKYEEKIKREQKNLSRKQKGSKNYYKNIKKLNGLYIKLSNNRRYYNHKITKEITENYDIISTESLTISKMIMDKEHHLSKAISDATFNEILEQLEYKAKERGKYFYKISPYYPSSQICSVCNNIDKKYKNLDERMYECNRCYSKLDRDFNASVNIMFEGLKLHIMAPMKNLSTR

SEQ ID NO: 62082 - protein, 426 aa, Streptomyces sp.
LGVQLRYNYRAYPVASQRRALARAFGCARVVWNDCLRDRKEAHAAGLPYMKSAELSRLRITQAKHTEERAWLADVSAVVLQQSLRDLDTAYKNFFDSVKGKRQGRKTGPPRYKSKKDTRQSIRLNTNAFSLQGDGTVYVAKVGNLNVTWSRRLPAAPTSLTVTKDSSGRYVLSFVVDTEPDILPEVEAESGIDLGLSAFAVLSDGRKIDSPRFLRRAEKKLERLQREHSRKAKGSKNRAKARIKVARQHAKVADRRRDWHHKASTQIIRDNQAVYVEDLAVSGLGRTRLAKSVHDAGWSAFTAMLEYKAVKHGRTFAKVDRTFPSSQVCSVCGFRDGPKPLHVRAWTCGECATVHDRDHNAARNVLFEGRRIVATGRVETLNACGVPVRRAHVPAQRGETGSPRKGQTTQAGITGLQAREHVKVAV

SEQ ID NO: 62083 - protein, 470 aa, unknown
  TnpB Polypeptide
MAAGEQRRGKLHLVGCPASVPSLPRGKGFRAVSGKKSFQQFLKKQENVMKRWHAAYISPALTHKKKCSIVCMTDVDQLQESLLMIRAHKIRLNPTPEQAIYFAKAAGTSRFIWNWALAEWNRQYEAGLKPTAFKLKKQFNEIRREQYPWTWEVTKNASDQPFLDLGKAFTAFFEGKARCPRFKSKKKSKASFYLANDQMEVSDHRLWIPKLGWVNMAENLRFKGKITGARITKTSDWWFVSIQVEMPDSLPVKKPAAVGLDVGLNRLATLSTGEGYENQAFLKTALKKLRQANKRLHRRKLGSKNREKARRQVARLHYRITCLRDDVLHKLTTRLANCYGILGIEDLNLKGLLKNRKLARSFSDASLGRLLSLLTTKMEQRGGQVIKVDRFFPSSKTCHCCGWKWENMTLADRVFVCQNPTCAYHLFPQDRDHNASLNILREALRLTGLIDQVVGGTGSDATLNLAVDAG

SEQ ID NO: 62084 - protein, 373 aa, unknown
  TnpB Polypeptide
MIKKHKRVHKGWMRRASRIYLNDLNNSKASILKDFLNQYQQAANYTIARLWSEKDMSSDLLPKEVTDVIGERFDTTARLSQCIGKQAKEIVASQREKSKRKQRMPRLKSHTANLDSRFVEIQEFNGHFDMCIKTGSGVPKMVIPFNWTKHANKFRKAEKGKGKEWLLSNSIRLGYDEKGIFIDLIFEKEKPKLRQSGKVLGMDRGYRCMLACSDGQMIGTELKQQIEKGGKRRKSYHHFIETEMNRNLKTLNTENIKLIALENLKNVKANKCGKFSRKVNRLLSFWQYAKAGEWLEQFCEQNGICIEYKSPWKTSQRCSVCGNIDRRNRKGDKFLCLECSAQMNADYNASRNIELLGLAGVYSLRSLTSGGLE

SEQ ID NO: 62085 - protein, 412 aa, Crenarchaeota sp.
MKGQTAIVAVPRGREIVRTLKCRTVIERGRAEDLLEFLVLWRDRVQWIVDLIWNLPKVPSESQLHQLFYNILRQQGFRAHHVKQIYKYARAVVAGAKANKGSKPILRKLTARLDKYDYKLDLERGIVVLKLHKDRVVILRLLHRKEYLERYKRGWQNYELIVKCENGTFWVCIYFKRRVEFYIPLSTLVIDVNLWSISMLLVDEVGDRTSIRFVKSPFEKYLRFKWRAHLLQMQYSKTWRFSKSIFARVRYWFRRARNVLTDHCWKLAKQIALYARKNYALVIIEKLEYVTRKKSGWKLAGFCYRKFLHALKCKCEDLDVPYIEVDPKNTSKTCPICGSELVFVNYRLARCIKCGFTGHRDIIAVLNLYKKVIGKIAPLPYILLYLRPTAGVGQDEPSRRRCKPKPDVGGKE

SEQ ID NO: 62086 - protein, 376 aa, Cetobacterium sp.
MEVKTMKTYNLSFKYRIYPNETQANTINQTFGCTRLVYNRFLAQRKELYEAEKKSVTYNTQAKELPLLKLELPFLKEVDSIALQQSLKNLETAYKNFFQKRTAFPKFKSKRSTRKSYNTVSTSNNIRIEGNFLKLPKLGLVKTKLHRQIPQNYVIKSATISQEPNGAYYVSLLTEFEKDIKEVPSDNNIVGLDFAMSELFVSSDNQRAHYPRFFRKLEAKLIKAGRELSRKVKFSQNWHKAKLKVAKIHNLIKNSRKDFLHKLSNELVTKYNAIILEDLNMKGMSAALNFGKSVADNGWGMFTTMLQYKSMFLGKQVIKIDKWFPSSKTCSFCGAIKAELPVSSRVYKCDECNSEIDRDLNASINIREVGKELLAY

SEQ ID NO: 62087 - protein, 397 aa, unknown
  TnpB Polypeptide
MLKTFRYRLYPTPAQATTMQHTLNECRWLYNHLLEQRKTAWDERGETLGYYDQNVTIPPLKAERPALKGVHSQVLQDVAVRLDLAFKAFFRRVKAGEEPGYPRFKGYGQYDSFCYPQSGYKLDGARVFLSKIGHIKAIIHRPIGGTVKTCCVRRTSTGKWFVTFSCAVEDAPLPVVESAIGIDVGLASFATMSDGSEIANPRFFRRDEQALATAQRRLAKEPKPEKGERATPERRRRRVVVARVHERIANRRTDFAHQHSRRVVNAHGVIAVEDLAVNRMVHNHCLAKSISDAAWSMFAQFLSYKAASAGRQFIAVNPAYTTQDCSRCGHRQKLTLADRVYRCPCCGLEMGRDHNAAINIVTLGLQSLGAKTVAAHRLLALGVVTCAGSCGRPIHRW

SEQ ID NO: 62088 - protein, 418 aa, Escherichia sp.
MHQENTMLPRRISVSLFIDQSIIWPVKRLQAFKFQLRPGGQQEREMRRFAGACRFVFNRALALQNENHEAGNKYIPYGKMASWLVEWKNATETQWLKDSPSQPLQQSLKGLERAYKNFFQKRGQNDAFRYPQGVKLDQENSRIFLPKLGWMRYRNSRQVTGVVKNVTVSQSCGKWYISIQTESEVSTPVHPSASMVGLDAGVAKLATLSDGTVFEPVNSFQKNQKTPARLQRQLSRKVKFSNNWQKQKRKIQRLHSCIANIRRDYLHKVTTTVSKNHAMIVIEDLKVSNMSKSAAGTVSQPGRNVRAKSGLNRSILDQGWYEMRRQLEYKQLWSGGQVLAVPPAYTSQRCACCGHTAKENRLSQSKFRCQVCGYTANADVNGARNILAAGHAVLACGGMVQSGRPLKQEPTEMIQATA

SEQ ID NO: 62089 - protein, 364 aa, unknown
  TnpB Polypeptide
MLKAHKIRIYPNSTQRKLLDSSFGASRAWWNYLHACWRNKETKLTEAQWKRQEGYEWSLALDKDVFQATTRQYNQAWSNRKKNKKHFGMPQFKKKRVAKLSYTTYCTNNNIRTEEKKVKAPKLGWIRMSEELRFKGNVKQATFSKTKSGKYFASILVETENFQLKPVESQLGLDLGLTHFVTDSNKNKVEAPRYFRKTQEKLAKAQRRLSKRQKPSKGKKSSNRYEKQRIKVARLHEKIANQRADFLHQLSHKLTHENQVLVAESLAVKEMLQDKDLAKSISDASWSEFLRQLEYKSAWRGRTFVQIDQWFASSQICSACQHIDGKKELEIREWACSNCGAFHDRDINAARNILNEGLRILEVA

SEQ ID NO: 62090 - protein, 404 aa, Paraburkholderia sp.
MQRLQAFKFQLMPTGEQARKMRQFAGACRFVYNKALALQRENREAGGKFIGYVGMAKHLTAWQNSTETPWLKDAPVHTSQCALKDLDRAFVNFFEKRTAFPRFKRKGMRDSFRYPDAKQIRLDRENGRICLPKLGYIRYRNSRTVPGEVRSATVSLRAGKWYVSILTKREVEQPVPHGPAVGIDVGVARFATLSDGAFIAPLASFRKHEQRLGKYQRRMARKVKGSSNWKKAKARVQRIHARIANARNDFLHKASNTISKNHAMIAVEDLQVRNMSGSAKGSAETPGRNVRAKSGLNKSILDQGWFEFRRQLEYKTAWRGGFFVAVPPQNTSRTCPCCSHISADNRRTQALFACIRCGHEANADHVGAINVLERGQRLLACGEPVQSGHSVKREPTEVTQAIVT

SEQ ID NO: 62091 - protein, 278 aa, Salipaludibacillus sp.
AKFPKFKSKKHKQSYTTNVVNGNSDILEGHIKLPKLKWVKIKHHREISETHRLKSVTISMTGSGKVYVSILTEYEIETNRVEPKNVVGLDFFISDLYVTSDGEKANYPRFYRQSLEKLAKEQRVLSRRKKGSNRWYKQKRKVAKLLEKTANQRRDFLHKKSYTLAVNYDYDAIAIEDLEMKGMSRALNFVKSVSDNGWGMFKTFLKYKFEDQGKFFVKIDKWFPSSKKCSNCGEVKEKLSLSERTYSCTCGHISDRDDNAAKNIKKEGIRLLSQTKVA

SEQ ID NO: 62092 - protein, 450 aa, unknown
  TnpB Polypeptide
  misc_feature (100)..(147): Xaa can be any naturally occurring amino acid
VQRLQAFKYELLPNGQQERQMRRFAGSCRFVYNKALALQKERHEQGQKKLGYAGLCQLLTAWRHSTDTAWLADAPVHPLQQALQIWSEPTATSLPSAPAXXXXXXXXXXXXXXXXXXXXXXXXXXXXXXXXXXXXXXXXXXXXXXXXASPYPKHAGKWFVSIQTEREVNWPIPQEGAVGMDMGIARLATLSDGTFYAPLNSCKRHEARLRKAQQALSRKVKFSNNWKKAKARLQRIHSQMANARRDFLHKVSTAICKNHAMVCIEDLRVRNMSKLAAGTADAPGKNVRAKSALNKAILDQGWYEFRCMLEYKLAWRGGRLIVVPPQNTSRTCPCCGHVSSDNRQTQAWFECVACGYENHADRGSGPKAFRGSGPEAFRVSGPEAFLVGAINILARGIQLLRDEGQDTADAAVGMRVGEPPVSARMACGSNCTGGRKQEPAETTAQGAIHA

SEQ ID NO: 62093 - protein, 381 aa, Candidate divison MSBL1 archaeon
MELILTVKTKIRKDNRLIKTLRIYTRAIQFVIDTAWRLGLKTRRRIHDECYREIRERFKLQSQLAVCVISQASEMINGNPESKPQVGEHATIRYNFPRSATIKGDWRELSLATVDGRVTVNLDIPEYYQRYLDWEVRESNLLFRGGDLYFYFTLAKEVDTRPKRDDFKVLGVDLGVNKIATTSDGDFYGKEVKRKRGERDKFVAELQTKGTRAAHNRLKAKSGEWKRFMTWVNHNVSRRIVDKLDEGDVLVMEDLTNIRRTAKYNGWVHKWAFRQLQSFLGYKAALKGVRVVHVNPRDTSKECNRCHSTNTTRHGGFFECKSCGHTLDADLNGARNIARRYKRITGLAGISRYAHGSRSDETEARPSGVEVEATRKLRAVA

SEQ ID NO: 62094 - protein, 451 aa, unknown
  TnpB Polypeptide
MKKAKKVTRIAYSDDLNQAKYDALNEIAKRCGSIRTEVWRNYGSKGGLGAKFRPVRDGWIADKQVKNLPQRIWRATLSDTLDDIKANRFAAKEKVIRHIFRNIDEGEKRQELFKKLKNDSVWINDSYLRRLMREYWKHGKNHTQNQIVLEPGSYKCFSHHGKNYIEVISLTRGKRIAIPIATDFILTGQIRLILRDKRVEIHYTIDNTDDRVCGSVDLGIDKGYTEAFVDSEGNFHGKGLGKVLSKESDYLKNKYQNRNKIKAVLEKVKPKNPKKAKRIIKHNLSRKKLNRRKQKHQASVKTIVFTAVNRIVDKAETIVCEDLTKNFKSKNLGKNTNRRLSGWVKGLMASAIEIVASRRGSWVVLVNAAYTSQICSQCERFGKRIGDKFHCASGCGAVMQADQNAAVNILARLHDNELHRWLSFQKVKQILLERCRRPDETAHPELQLPLF

SEQ ID NO: 62095 - protein, 414 aa, Thermus sp.
MCHNTIMHRAETVVLKLRSPSKAKRAWLDQTAERFRQGVQLGLDAALSAKTSNRGKIHAATYASIRALGLPSDYCRMAVNQAVQLARSHFGVRKSKRRAGKPTVVRSQGIGLGANAYRVVGTTLRVSTGNRGEYLWFPLCVPARWRDRLQYVKGDARLFKRGNDWFVMLPFKMPTTPTVRDGGGETVIGVDLGIVRLATARHPQGVFLVNGKPIRHRRERFASLRRRLQRHRRTDRVRAMGNRERRWMTDLNHKVSRQLVDLALRYPNPVLAFEQLDGIRDRARGSKRFNRMVASWAFRQLINFVQYKAERAGVRVVFVDPRKTSQTCPKCGHATRANRPEQSHFRCVACGYQGNADVVASLNIAAAALDVLRHGPPDTARLGQPGQAPPVGEGLDGVKVWASAHADSNLASSA

SEQ ID NO: 62096 - protein, 506 aa, Thermus sp.
VKAKPKATRERAKKKAKAFTGVQALLLFPSEEDHKTTLDLTRRFSAAVRYAYNRLLEGQTREELKRADGFLCTSFRLNTRYADDAILKAQAVLDSARERGEDPRKVVFGGRKLFQQLKRRHLSGKPLRELKREWRERRQGLLYSRGDKTKGGNLNLRLFVKDGVLQLRINLGDGSYAHALVRTKHPNLSALLQRVYASLPYNVALSLREGKVYATFTWEEEPVPLVATKENGVLAVDINADPYHLALALVSPDGNLRRYLTLSLEEVDRAKNKGAKELLLWKIAHQVISLAEEHGVAVATERLKYLPKGRRGDGSGRAFRGKQHRFAYASLLRKVHSLARRKGIQVVEVNPQDTSTIGMLKYAPQLSLSKDVAAAYVIGRRALGFEEKLPKGYGKLLRDEAFLAQTRNFYQTRAEELREQKKATGDRSRKNRLSRELKRVHGALSLLSSLQGSPGSQEGSTEGRVTGEARILAPLWRQSLAGLEGRPLQDRPYGPDPSPPQERGAA

SEQ ID NO: 62097 - protein, 398 aa, unknown
  TnpB Polypeptide
MVILSLPLDFIIKAYLISELIVTKSVKQPHHCRQLDRLMEEFRHMVNEAIRIGIEKNITSKLRLRNELYLKFKNEFHTCYISMAVFKAHALLKSYRKSFKKNSNTKKPYVQKKFFVVNSFVYRILDGDMRIPTRPREFVKISLNKYTLNILSEPNLKFGNATISSDTISISFSKDIDQKKPHGYMGIDTNLANATSIDERGKTTVVDMSSIISRKIKYRDIISHFTRHDVRIQKRLKSKYGQKQKNYEDTYLHQKSKEIISMEKQIFVENLKGMRNLYKRGNGQGVRFRFKMNSWTRFKWQKMLDYKSQWQNGFPVIFVNPSGTSSKCSICEAKMILEENRMLYCSRCGLHIDRDVNAARNILARGMQFVPDAVQGEVMKQSKEAEQIAPNLFVGMFR

SEQ ID NO: 62098 - protein, 368 aa, Nocardia sp.
MSQVVKRAYKFRFYPSGAQAAELSRTFGCVRLVWNRALDARQRRYATESKSTTYVQASAELTKWKSLPELAFLNEVSSVPLQQVLRHQQAAFAAFYAKRARYPRFKSRKRSRASAEYTRSGFRWRGGELTLAKMAEPLDIRWSRQMPDGAVPSTVTVSCDSAGRWFVSLLVEETVAALPSTPQTVGVDVGLTCLAVLSTGEKIVNPRHERADRRRLAKAQRDLARKMKGSNNREKARRKVARIHARITDRRTDFLHKLSTRLIRENQAVAIEDLTVRNMVANHALARAISDASWRQLRSMLEYKADWYGREVLVVDRWYPSTRVCSHCGALHARLPLDVREWTCRCGAVHDRDVNAARNILAAGLAER

SEQ ID NO: 62099 - protein, 399 aa, unknown
  TnpB Polypeptide
MLIYEYKLDGNKQQYQAIDEAIRIVQFIRNKCLRKWMDGHGVSRNDLQCSCAVLAQEYSFAARLNSQARQASADRAWAAIVRFYENCKNKKTGKKGYPQFQHDNRSVEYKTTGWKLEPDGKHLTFTDGCGIGRLRLVGNKKQSVETFPTKQVKRVRLVRRADGYYVQFAVEAERKIEHIPTGKQVGIDMGLKTFLTDSEGNIVANPRYLRKAEKRLKQLHRRLSRKQKTSQNRRRARKSLAKAYLKVQRQREDFARKTASTLITSHDLIAYEHLQIHNLVKNRKLAKSISDASWGRFLSWLNYYGYIHNIPVIAVLPAFTSQDCSVCGTRIKKSLSVRTHICSGCGLILDRDHNAAKNILEKAYRTGGQSETGGQPQNASGQTASTRSRRRTRASKRAG

SEQ ID NO: 62100 - protein, 147 aa, Megamonas sp.
VLINCFHRRLAKIALARLHKKISNQRKDFHFKLANKICSEYALICIEDLNIKGMQKRWGRKISDYGFSEFIKILEYKAREIGSIVQKIDRYYPSSQICHVCGTKNPETKNLAVREWICAKCKTSHDRDRNAAINIWKVGASTFFGEI

SEQ ID NO: 62101 - protein, 351 aa, unknown
  TnpB Polypeptide
MIVRTLKLKLTRSQETQLEQWLWNLTGLWNWAIRKIENDARGKIYHSPFDFVNLIAGHSKRMGIPSHTMQGMLNQAHAAWRRCFSKLAGKPKLKGRRRRLNSIPFPDPIRPPLGGRIGIPGIGKIRYHKQELPEAKIKCGRIIRRASGWYLCLWLKTEHRFPVKETDKAVGIDPGFHTLLTLSDGTKIENPRELRRGTKRLAQAQRGHDKNLSARLLERQANRRNDRNHKISRKLVEEYGTICYSDDNFKSMARLFGKSISEASLGNLIGMLTCKCRTGGRELVPVNSFHTTMTCSVCGALTGPSGLGGLAVRRWRCSVCGTDHDRDVNSAVVVLNAGLGTSHEGGLRHVA

SEQ ID NO: 62102 - protein, 170 aa, unknown
  TnpB Polypeptide
MNCTQKLAQRKLSKRMKGSNNYYKQKLVVAKIHEKIRNQRDDFLHQESRRLVNTYDIICVETLDLVEMMKTKYFSKQVSDISCNKFLHNLSYKCEDSGKTLHKVNKYYASSKICSVCGTKKKTLPLSTRVYSCECGNVLNRDHNAAINIATKGMISCLTNTIEAGTALLA

SEQ ID NO: 62103 - protein, 387 aa, unknown
  TnpB Polypeptide
MDRTIRIRLLPTSEQAIALAETARQFTDAFNLVCRHGWQAGEKNGVALHHATYRDSKDAAPGLVSDLHIQARVKATETIKGALTRQRQGRRVSCPRSRACPPRYNLHTYRLDWAPGVVNLSTTEGRQHIPFLVPAYARSLTGYPTATADLIQKRGHWYLHVVVTVPAPDVQAVEVVVGVDMGVTRAAVSSDNRFHGERRWRELEARDFRLRRALQSKGTKSAKRHLRELSGKTARRRRDHDHVVSRRIVDGAPAGATIAVENLTGIRSSVKARKANGGQRRLHSWSFANLRACVIYKAEERGIRVEGIDPRHTSQTCHRCSFQHRSNRRSQSEFWCRSCGYRTNADRNGALNIATKLLASRGMTAAGGPPVNRPIVSPSGAGTSPVF

SEQ ID NO: 62104 - protein, 140 aa, Selenomonas sp.
MWLDGLLKVQKLHQRIDNIRKDYENKTVHEIVKQKPRFITVEDLNVKGMMKNRHLAKAVAAQRFFSLLSKLKRKAEIIGIEFRTVDRFYPSSKTCHSCGHIHKGLKIKDRVYVCPECGYTADRDYNASLNLRDAEKYRVA

SEQ ID NO: 62105 - protein, 334 aa, Thermocladium sp.
MNTTYIPYTGKNRGGSPCRLGKRFRNPGNPSEHMFLGMDVNRASIDVAIIGCIDVINVFIKVLSSELKSLGLAYAINNVGLIDEYLISHAKIILPSFNDNEVEKLLSAIFSSAHKRIDMEWLDLLRVGATEFRRFLSRERKLDMKLSVIAMRRAMEFVANMGIHPIIGMEALHSMNKLGAMYDFEMDFDGLLHNIELSLEVNPLSSIQIEAELGGSTNMRWRGSLLEGSLAELILINPARTSGFCSNCMRLGLMSEVRRFGRRNVLCAGCGIILDRDENASISIAIITMMLALHGTRFRRHCRGIIFNGGGYCLASLCTFLGGQTLGPPWWATP

SEQ ID NO: 62106 - protein, 230 aa, Thermocladium sp.
VDLARTEKEVYEKYKQALKVNAQQVARKNAEDWRSFFSLIKEKKEGKLPKWFKPRPPGYWKDEDGNYRLIILVRNDRYIIDETNQLIHLKDFKLSLKFKGKPKWRGKQGRLEVICDGARRSWYAHIPVEVENNERVEGSLRASVDLGIVNLATVYVEDGTWCLFKGGGALSQYEYFSRRISSVQKLLARHGQRRSRRLKLLYDKRKRFLKHALNSMVRKVMEGGLKEKGG

SEQ ID NO: 62107 - protein, 398 aa, unknown
  TnpB Polypeptide
MKLVLKVKLLIDGQAEQALQQTLFADHSACSYLSVYAFQNQIFSKSNLQKACYYEVKHRFSLPAQLVIRAIAEVSAAYKSQKAQIQELNRGCHSEDRRDLTQIKFNSDLAIVYDERVLSYTRNEESLSLTTVYGRMKLTYQVGEKRKSLLPYIRGQADLKRYGKKWFLLQTLEIPETEQQEPENSLGVDLGIRTLASWHDGKKNHRHYGNQARAVRKHYASIRRSLQHHNTKSSRRRVKAIGQKEARTIRNLNHQLSQRIVEHAQRTNSQIVMEDLSSMKDRAKDRVPKSQRYEQMSWTYGQLQAFILYKARLVGIRVLFVPPAYTSKTCSQCFYCSDQNRKEIWFTCKCCGYCCHADENAAINIRFLGAESTRQKRPVCMQEFLHADRCKPLAFALR

SEQ ID NO: 62108 - protein, 335 aa, unknown
  TnpB Polypeptide
MLNDKIREYEKTKKMLKNTPAMYKKEYPFLKEIDSLALANVQLHLEKAYKNFFRDPKIGFPRFKSKHHSKNSYTTNVVNGNILVESKRIRLPKLKWIAMKKHREPAEGLRLKSVTVSMESSGKYFASLLYEGYSCENQAAGPDYSTAKILGIDYAMQGMAVFSEKVETEEAGFFRKNEKRLAREQRKLSRCVRGSHNYELQKKKVARCHEKIRNQRRDHLHKLSRKIADGYDAAAVEDIDMKAMGQCLHFGKSVQDNGYGMFREMLDYKLAWKGKKMVKVDRFFPSSKKCCKCGRIKKELKLSERAYHCACGNKMDRDRNAAINIREEARRMLTA

SEQ ID NO: 62109 - protein, 429 aa, unknown
  TnpB Polypeptide
MEAVRSEDTKAKIRASMSATKARRQTQVCRVFELKVSIRHNPKSVFEKMSQCFKEAKWVINDMLSLSKDNPDNSMFDYKYTEHRDVVHYDKDKNPVHSPITLPSVLHRATVAQKKTDIVNLAKAKSHGKKIGALKFKRQVDCIPIITGFTQIIDGCRITIPGFKKIRVNGLNQLHQFEQFEIADAKLIRKASGYYVNISIMLPKSQRIPTNREVGLDFGIKDSITTSNGDKYNCKVQESERLKYLSRMLNRHKTEKGSKRRWRCKCQLAREYEHLANRRKDIANKIYNKLVTDYDVIYFQDEQIKNWQKGLFGKQVQSSCLGTLKRRLVALEASGRSFKITKWEPTTKLCPVCGCINHPTLADRIYKCGCGYTMDRDTHSARVVLMIGSSKRAECLEQASPELSPIPKCNPIATRQDSVMMARQEAHRL

SEQ ID NO: 62110 - protein, 393 aa, unknown
  TnpB Polypeptide
MPTGGEGALTVTVRMKVSPEPEQEETILDLLRRYRDALNYSIRVIIANKALSLTKAHKLLYKELKKRYGLPSKIAQDCYREAIAIAKSWLRNPRRGDMPTVKSLRMWLTPKDGYRVKGDRVELIGGYRLRVIGWDRRYDDLPNREARLVFRDSEFTLYVYKRVPRPAKYAPKGVLAVDVNERQIVVGNSHVEQRIETPTERALRYRRLAERLQEKYSSPKYSAWRRRRGIRRRVRRFYRKSRNIIEDWARKTSHIIVSLAKQSQLAVARENLTGLIESLRRLPKDHRVALIALGYRRLGYWIDWQAEKNGVPLLVVDSAGTSSTCPRCGARLVEVSHRRMRCPRCGLEADRDSIAILNIERRALSKMGGSLATPTAPQMTDVSPNRWGEPPHL

SEQ ID NO: 62111 - protein, 279 aa, unknown
  TnpB Polypeptide
LRAIRQVESAEKAPFFALPRQKNLGWVPLKGRELKREGDAFRFAGNTFRVFNSRPLPKGKIKDGTNFSRDSRGNWFLNIAIEVDAMAANARAPVRGVGIDLGLKDFATLSTGEKIEAQRIYRGMEQALAIAQRAHKKRRVKASHAKIANCRNDFHHKLSSRLVREFDYIAVGNVSAAGLAKTSMAKSVPDAGWSSFRRKLAYKAVRHGAWFEEVNERFTSQTCSNCGALPGSRPKGIAGPGVREWQCSDCGCVHDRDLNAALNILRRGRVTLDVGIPVL

SEQ ID NO: 62112 - protein, 396 aa, Bifidobacterium sp.
MVHSKSKTAQRREKASSLVQQRTIVLPLDLEPEQFDLLMQVAALYNRMWSSLISWCDSNRTVNRTRMQKDNYRRLRDQYPQLPSQFVCVGMRDAAGAMRSWNLNRPKRRWNMKARRKASTINYDLRLMSIRGNMLTLSTLQGEKRIHTLMPEIPLWFDTLYPERKLNAAKLMLDPKNHTARIALIYRLPDTFTEQAELDVLGVDLGQHSLTMDSRGGESKANDIWGVKRKYAHNRKTLQEKGTRSAHRRLKAMKGREERFIRDVNHRVSKQLASTPDIGYIAFEDLTYIRRQARKGTKTGKRRRNMLNQWSFSQLQEFTAYKATRNDIRILMVDPSYTSQRCNRCGYVDQRNRNHARFDCKRCGWSDNADHNAALNIRDRAIKSLHEEQAKTHIPG

SEQ ID NO: 62113 - protein, 423 aa, Haloterrigena sp.
MQKSLTKTLVFQLQPDESGQQLLDDAFLEARRVYNETIRRAKNGDRWDKIRKDLESDADLVNNTTQLVVQKSLEAMENYYEYDDYNQPSHTTDSAYPLRSNYEEGYNLFLEDDCIRYRISAKPYNPVKGTLCGSPDALEQLRHAIQSDAWRVGTAEAMRRNEKYELHINITHTEADIQDKEDLRMVVGVDINEDCVALAALHEDDIVDSVVIDFPEIKEERHRYFTMRKRMQNNGKSSFDRAFEQQEERFVHDQLHKVSRQVVEWVSQFEKPVIVFEDLKEMRNSIDYGTRMNRRLHSLPFRKLREFITYKAAFQGVPSDKINPEYTSQACSLTECEQTTRANRNKKRFKCVDCGRQDHADRNAAINIAKKGLATLDRNVPALKTLPNVRKLRRQASGCVTQPTVTHDTARGHHADGVAGVSE

SEQ ID NO: 62114 - protein, 396 aa, Kribbella sp.
MSRYRLDPTPAQQAALLAHCGHARYVWNLALEQWSMWPPDKRPTPGYVEQARQLTEARAVFEWLRAGSQTVQQQALRDFDQAVKNFHAGTHRRPTWRKAGVHEGFRIVGGQASRIVKLNRRWAAVNVPKVGRVRFRLSRPVPDAKSYRITRDRMGRWHLAFAAIPEPIPAPGTGEVVGVDRGIMVSAALSTGELLTCPGLSDREQARLTQLQRRLARCRPGSKRRHRVKAAIAKLHARAADRRKDWVEKTSTDLARRFDVIRVEDLRITQMTRRPKPNPGRPGGYRPNRRRAKAGLNRGILANGWGLLVQRLEHKAAGRVEKVNPAYTSQTCSVCGHCAPENRENQAVFRCVACGHQANADVNAAVNIAAGRAVSARRETPPRVSPKREPQHATSA

SEQ ID NO: 62115 - protein, 313 aa, unknown
  TnpB Polypeptide
MNKSFKVRIYPTKEQQILLEKTFGASRFVYNHFLKLKQYLYQEFKIKITYKHTSKMLTELKRQKPWLRVPDKWALGNALRDLDSAYKRFYKGSGYPKFKRKDGNNSYRTTWSVKVDDSFITIPKVGLLRYKDKCKFNDKHILKIYNVTISKTSSGNYFASITAEVYIPCFEKTNQSVGIDLGLKDFAIFNTGEKIKNPRILKHLDVRYRKLAKSVSRKVKGSSNYRKARIKLAKFHEHIANIRKDFLHKLSTNLVKSYDIICCETLRVSNMMKNHTLAKSFQDVSLYEFVRQLEYKAKWYGKIISKVDKFYPS

SEQ ID NO: 62116 - protein, 570 aa, unknown
  TnpB Polypeptide
MNEIIKRTMSSWLNLDNEENKLIGSISHESKNVFNHYNFCCKLFNEYKRVIYKKLLKHKSFDVNEDILNELAEYYKIRTSNFEAIKNNSQLIYEYIREQNINVYNYNFEELYKKYKQECKLIENIIIPAKHRHMVYFDLIYNILKSRYFRNYYKSRFEMLNKIPLTITDKIFIDHVKSKTTIFDGKNYCDLLKRKYETKENKVTSQQNLIKRFAYKTLTNCKLTGDLICNIMNKCYSAYASFNALKEKGLRVGQIKYLPKDGHYVIPIFSHGFLIEENKIRISIGKEIATEFENVSSVKKKFMYLDLPNYFLNNEACKIKLIEISPKYDGYRYKINIVYDEIITSRVIKPILNKDNFASFDIGVTNLITAYDPLSVQRIIKGSNLTSSNHYFNWKIDKAKSELPSNKGTSKKIRNLLIKRDNVLNSKMNNIVDELYKTYKHKEKIIIGYNEGWKQNVQMGHEMNRKFYDIPFDKLIKKLENKFKGNVVERIKEPYTSKTDALSLENICYHDNYNGKRIHRGLYQSKDKRIINADLNGAINIMRLYCKKEKVAFNQVTGIYLFNPRIMHIK

SEQ ID NO: 62117 - protein, 392 aa, unknown
  TnpB Polypeptide
VIVQKSYKFRTEPTPEQEQSFVHFAGCRRWVWNWALSRKREVYRATGKGIYAKALCQELTALRRELRWLQECQAQLLQQTLRDLDKAFEAFFEKRARFPRLKSRKRSPHAFRFPQFTRIEDGFVVLPKIGRVKSRIHRETEGAVKSATIKQESDGHWYVVFVSHIEIADAVPLCDQPCGIDLGLESFLTLASNDGNNGTKVKPPKFYRRGQRKLKLLQRRLSRCQKASRNRAKAKARVSRQHHRIAARRNDFLHKLSHGLVTRYDTICTEDLNLSAFVRTKLRGHTKSWADAAVGSLMRMLEYKSLWNAGQVVKVGRWFPSSKTCQCCQSIQPLELSDRVWTCNSCGVVHDRDHNAAVNILCEGLSTITAGSAGISTASRGSVSPAMAGGSR

SEQ ID NO: 62118 - protein, 361 aa, unknown
  TnpB Polypeptide
VKLTAQVKLVVTKSQAKALKETLARANAACNSISEWAWQNQTFGQYALHKGTYSATRAAFDLAAQVVVRCNAKVADAYKLDKRVQRTFKPDSAIAYDDRILRWYVDKGEVSIWSVTGRLRLPFVCGDYQRGLLAFQQGESDLAFHGGNFFLLTTCNLPDPPLMETDGVLGVDLGIVNLATDSEGRAYSGDAVKAVRRRARRIRALLQSKGTKNAKRHLKRMGRRTANYQRWLNHNISQQLTQNALSSRKALAMENLQGIRERGNGFNRETRWQLGNWAFFQLQQFVCYKAKRAGIPVTFVDPRNTSRTCHACGHCAKENRKSQSVFQCLSCGRVAKADENAALNIAARGEVNRPIDAPALG

SEQ ID NO: 62119 - protein, 420 aa, Acidobacteria sp.
MNMHSKHAVSSVPKVLAFVHTPDHDASMERRQAFQFELMPKGEQPRQMSRSAGCAGYVYNQALALKKERYEKKEKLTRFQLDKMLVEWKQETPWPSEAPDHALQQARLDLDRAYTNFFRKRAEFPKFHKKGIGDSFRESDPKCIQLDQVNRRIQLPKLGRVRYRNSREVLGEIPSVTVSISTRREVEPPVHASRSSVGLDWGAARFYTLSDGEYQDQLQPLKRFLPKLAKLERRLAGKKKWSSNWRKAKAKITKLHSKITHIRKDFVPKASNDISKNHAVVFVEDLPVKNMSASARGTKAKPGKRVGPKSGLNRSILDASPFELRRQLAYKTQWKGGLLVPVSPQNTSRKCPRCRHTAAENRQTQTKFVGVECGFSAHADWVGAINIREEGLASLACSSSWHARSASCQEPTEGMVCASV

SEQ ID NO: 62120 - protein, 205 aa, Bacillus sp.
VRGRCWFEELCDSFRWYGLSQNPKFFRTVEKKLAKAQRILSRRQEIALNRNNPLAEAKNYQKQKRKVAILHEKISNARMDYLHKVSTEIIKNHDVIGMEDLQVSNMMKDHKLAKAISEVSWSQFKKMLEYKAKWYGKQIVTVSKTFASSQLCSGCGYQNKDVKHLNLRVWDCPSCSSHHDRDINPGINLMNEAIRLLTVGTTGVA

SEQ ID NO: 62121 - protein, 378 aa, Bacillus sp.
MEVNQIIINKAYKFRIYPNQAQTILINKTIGCSRFVFNHFLSLWDYAYKETGKGLTYGTCSAKLPAIKKEFVWLKEVDSIAIQSSVRNLADAYTRFFKKQNSAPRFKSKKNNIQSYTTKQTNENIAVVGNKIKLPKLGLVRFAKSREVEGRIVNATVRRNPSGRYFVSLLVETEVQELPKTHSYIGIDVGLKDFAILSDGNPYKNPKFFRSLEDKLAKAQRVLSRRMKGSSRWNKQRVKVARIHEYISNARKDYLDKISTDIIKNHDVIGIEDLQVLNMLKNHKLAKAISEVSWSQFRTMLEYKAKWYGKQVIVVSKTFASSQLCSCCGYQNKDVKNLNLREWDCPSCRTHHDRDINASINIKNEAIRLLTARTAGLA

SEQ ID NO: 62122 - protein, 364 aa, Simplicispira sp.
MIFTVSTTTKTLQLRLKDKHARVLRQMAREVNQVWNHINAISAKAARPFHGKPQYLSGYDLQKFTAGFSQCEGVSVGSGTVQVVCTEYATRRKQFKKTRLNWRVSNPQSAKYSLGWIPFKGGHAKYKAGQIHFAGQKLSLWDSYGLADYELRAGSFSEDSRGRWYFNVAVEVQRKPSPGTAAVGIDLGLKECATASTGDKIEGRWYRSHEQALGIAQRANKKKRVRAIHAKIKNQRKDALHQFSSKLVQENAAIFVGDVASGQLVKTKMAKSTLDAGWSMLKTMLEYKSHQAGVVFEVVNESYTTQTCSCCGAIPASSPKGRAGLGIREWVCSDCGAAHDRDVNAAKNILAAGHRRLAEGVPVL

SEQ ID NO: 62123 - protein, 380 aa, unknown
  TnpB Polypeptide
MTIKTYKFKLYRAKKNKHLHQRIDISGIIWNHCITLHRAYYRLTGKHLNQYELMAHIAKLKKRPAYAFWNLVGSQAIQDIVQRIERAYTLFFNNLKAGVKTAPPGFKKVKKYSSFTLKQAGWKLLGGNRIRIQNLVYKFSKSRAIPVDVKTLTIKRDTLGNLWLYFVVEVPADQSNLTMSGNSAGFDFGLKTFLTLDDGQAIESPLYLRQAMAELKLAQQNLARKVKFSHGWRKARLVVARIYARVVNKRRDWFFKLAHALTDQYDYLFFEDLNMKGMMRLWGRKVGDLACSEFMGILKYVAGSKGKVVHLVDRFYPSSKTCSACGHIYQTLQLSERRWACAVCGVVHDRDTNAAINIRREGASSFRLGAVSLVKPARAV

SEQ ID NO: 62124 - protein, 410 aa, Hydrococcus sp.
MLKTVKVRLYPTPEQEYLLAKAMGSVRWFWNYSLNLTNETYKATGKGLSRNQIQVMLPVLKKQEDTEWLTETYSQCLQVVALNLSNAFINFFEKRAQFPRFKSKHGKQSLSYPQNVKIEGDYLKFPKLGLIYAVFHREIKGSLKTVTITKHPSGQYYASVLFEDGTKKPNQSTEGKAIGIDLGLTDLVVTSGGSKFNNPRWLKKHERNLKIKQQRLSRRNKGAECTAACLPPSHGGKVGGSNNRNRARVAVAKVHNKITRCREDFLHKLSRKIVNENQVICVENLNIKAMVKNHNLAKAINGVGWGMFCTMLKYKSENEGKVYLEVDRFFASSKTCNNCLYQVSSLPLDIRFWNCPNCGAHHDRDINAARNIRDEGLRIISSGTGDKAYCPDVRPNGKGRKSSTIRHSVG

SEQ ID NO: 62125 - protein, 395 aa, unknown
  TnpB Polypeptide
MVKKMIRSIKVRLSPNNKQLTKLFQYAGCARFAYNWAIAREQENYKQGGEFLSDCELRREFTQLKKLPKYKWLNEISNDVTKQAIKDACNAYKRFFKGQCKHPRLKSKRRSTPSFYQDNIKIQFTNTHVKIEKFSMSKKRNKQKINWIKLCEKERIPTNCKYTNPRFTYDGLYWYVSVGIEVDDNTTFPSNEGVGIDLGIKDLAVCSDKNTYNNINKTQKIKKLEKRKRRLQRSISRRYEQNKKGVSYCKTCNIIKREKELLKVSKRLTNIRHDYLHQITSEIVKRKPSFICMEDLNVSGMMKNKHLSKAVQQQSFCEFRRQIKYKSEWNNIQVIIADRFFPSSKLCSCCGNIKKDLKLSDRIYKCECGNVTDRDLQASLNLKMYGENVLKQSVA

SEQ ID NO: 62126 - protein, 576 aa, Streptomyces sp.
VGGSRQAAAPFVAPGPAGVSIRARLRLSPADEAVLIEVGAFLGSLASRDLAVRSGQGTAHDANSWATRKRALTVASSARWAGSITKATHDQWALARRGQATEAARLRSEIARVEARLARPLGAKADKAARLVRGYATRAEWHAKSRRLHVLRDRLTAVEADWAAGRVHVVRGGKKLAGLRHRLDDAGIDGQTWRDQWQAARLFLAADGESGKRYGNETVRVTDTGQVSIRLPATLVHLANAPHGRYVLGAAVAFGHRSEEWRDRIATDRAVAYRIHRDVVRGRWYITASWQRPAAPVLPLRTALSRGVVAVDMNDDHLAAWHLDVHGNPVGEPRRYFYDLSGSASHRDAQIRHAMTRLLHHARRCGVGAVAIEDLDFTDGKSREQHGRSRRFRRLVSRFPTARLRGRLVSMAAEQGLAVVAVDPAHTSQWGAQHWQMPLSTPRRPITRHDAAAVAIGRRALGHPIRRRTAPPPHDRRDRAGHRTVQTGTETRGHEGPRPRLPGPRARPVSPDAVRKRVTSVLRTTWGTRSSMRPARRTQTRSIFRKRLRLLTPYWFAGHGPGQCRLSACLGCVAQW

SEQ ID NO: 62127 - protein, 409 aa, unknown
  TnpB Polypeptide
MLIKKAFKVTLIPNSTQEVLINKTIGCARFVYNRFLARRKELYESEQKTLNYSGCCHELTQLKKEIDWLTDVDKFALQNSLRNLETAYKNFFTNLKKPKKQRRFGFPKFKKKHEFKQSYKTNFTNGNIQLSENYLKLPKLGWARFHKSQDVDGTIVNVTVTRTKTGKYIASILCETEIERHPYVDKNIGLNLGIKSSLVTSDAVEVENPKHYHRALRKLRRANKKLSRSVKGSNNRAKAKTKLAQVYERIANLEDDFLYKLSTRLIRENSIICIKDLRVANPIKNHKLALSIMDVGWPKFIAMLEYKALWHDRIVQKVSPFFPSSQTCSCCGIVNSEVKDLSIREWNCPACNTHHLRDCTAAVNILREGLRLLTAAGSSEVQNACGESVRPGETQAGLGEAGIMRLLAV

SEQ ID NO: 62128 - protein, 365 aa, unknown
  TnpB Polypeptide
MEKSYKFRIYPTKTQQVLIQKTFGCCRFVYNYFLNERINRFREKQQSITYNQCSKELTALKKEIEWLREPDKDALQKSLKDLDMAYQKFFKNQFGFPKYKSKKERHKSYRTSCTNGNIKFLSGHIQLPKLGRVRYRDRCIPDGRILNATVSQEPNGHYYVSLCCTDVCFEELPKTFNNIGVDLGIVNFATLSDGIKIDNPRFYENAEEKLVKLQKSMSRKTIGGSNWNKARIRVAKLQHHIKEQRRDFLQKLTTDIIRKYDAICIEDLKVSGMKQTDLTIRNKRVGDVSWYEFRRQLEYKCKWYGKKLRIINRYYPSSRICHVCGNNDGEKDVSIRIWCCPNCGTKLDRDVNAAINILNQGLLIV

SEQ ID NO: 62129 - protein, 406 aa, unknown
  TnpB Polypeptide
MQRLQAFKYELMPSGEQQRLMRRFAGSCRFVFNQALALQQANREAGGKFIGYVAMAKRLTAWRNSAETAWLREAPVHPLQHALKDLEKAYKHFFEGRTDFPRFKRKGQGDSFRYPDPKQIKLDQANGRIFLPKLGWLRYRNSREAIGELRNVTVSASNGRWFVSIQTRREVEIPVPQGSAVGIDLGIARFATLSDGTFYEPLNSFNRHEAALRKAQQAISRKVKFSANWKKAKARVQRLHARIGNARRDYLHKTSTAISQNHAMVCIEDLQVRNMSKSAAGTTEQPGRNVRAKSGLNKAILDQGWFEFRRQLDYKLAWRGGWLVTVPPQNTSRTCPCCGHVSADNRQTQARFVCVECGFEDNADVVGAINVLRAGHARFACEVSGEVMPPAAGTHRSDSGAAQCRA

SEQ ID NO: 62130 - protein, 506 aa, unknown
  TnpB Polypeptide
MVVKRVLLISLSSKYRAIVRSFIYDLAQFQNLLRVFILEWDKRTVDIFRLFNQSLLYSLIADRIHLDKSGWQRKELEDVKKIIEEHSELAGWIEKLKKQKERLKNSWICQKVIIQEVSNLKSWAKALQEYKVNPAKFRGKPGLPKPKKLKNLTRFSVVVPHVTVGRKLFLKLRKEEKPLEVLLPDGFDSKVKEVRLVYDMGWIEVHVVYEKEIDIDAIGMFQAGIDIGLDNLVSVVSDSPELKSFIVSGKELKSYNRWFNKKRAEVLSHIDRILNMIKEEKDEERRKSLEKHYQWLRRYLWNLYKARERKLDTWMHQVSRRLADLLYETGHRVVYVGKDAIDKRGISFSKVVNQSYVCIPHRKLVNMLKYKCEELGMQVVEVDERYTSKASSISDDVVEIQSKKGNGEEVVFSGKRVHRGLYKDLKLNKVFNADLVGAMNILKVGAKLRGLLLNLKTLFVKLCNPVRFKLFDLIYRSNPESLLRVGIGDSKPVLGQEALAYEGAGI

SEQ ID NO: 62131 - protein, 393 aa, unknown
  TnpB Polypeptide
MIVHKAFRYRIYPTAEQEQALAVQFGHARFVWNWALALRKAAYKETGRGIGYYELKRRMTSLKQQAETAWLREADAQILQAKIQDLERAYKNFFEKRARFPRFKSKRDDQSIRYPQRFKLDENCIYLPKAGWVKTKFHRSLEGRPKNVTISKTKTGKYFVSIQCEVEMAEQPAKSCEIGVDLGVKSFLATSEGWKRDNPRHLQQAEKKLKRLHCQFSRRVKGSAGRERARIMLARQYEKVANQRRDFLQKLSTQLVGRYGLIGMEDLNVRGMLKNRRLAKAIAATGWGTFRRMLEYKGGWYGSFVHKVDRFFPSSKTCSNCEYVLDELPLSVREWQCPICGTIHDRDINSAINILNETRAGVARSHAGGESIRWRQGATILAEAGGPSAFSGR

SEQ ID NO: 62132 - protein, 355 aa, unknown
  TnpB Polypeptide
MFKGQYALHSQSIQALAEKLEANVDATRTLRKSDPSVRYPYHPKRYQTVVWKQAAIHLLDNGQLLLSNGKNRQALTLLVPAEYIEADVCRAELTWRADHYELCLTIDTGTANPPPKESGQIAGVDLGEVNIAAVVTEGGNALVVSGRALRSVKRLRNKRHAALDSLISRCKPGSKRHRRLTKSKAKASAKMYRQQRDILHKASRQVVEFCEAHDVKTIVVGDVRDVQNGVNLSTNSNQKISQWPHGQFVKYLAYKSAECGIQTGYIPEDYSTRTCSCCKRVANRAPQGRVYVCPRCGAVIHRDANGASNICSRARYGSYGRVQAQTIMYLRPLWRSRAFDTGQRCGAISAKLCAH

SEQ ID NO: 62133 - protein, 417 aa, unknown
  TnpB Polypeptide
MGYRSSHTNCIVRIIPLRGLSVQQEALCLILRQEAGRCWTDMLNAHIESRGGKWLSSSDLKKMFKGRYVLHSQTIQALAEKLEANVDTARELRKSDPDARYPYHPKQYQTVVWKKSAIYWLEAGQILLSNGKNNQPLILTVPAEYVAADIRKAELTWRADHYELCLTIDTGTVNPPRKQTGQMAGVDLGEVNIAAVATEAGNALVVSGRALRSVKRLRNKRHAALDSLISRCKPGSKRHRRLLKSKAKASAKMYRQQRDILHKASRQVVEFCQANDVREIAVGDVRAIQDGVDLGSKSNQKISQWPHGQFVKYLAYKSAEHGMKSDYIPEDYSTRTCSCCKRVANKAPQGRVYVCPRCGAVIHRDANGASNICSRAQYGSYGFVQVQTIMYLRPLGRSRAFDTGQRCGADGAKPHSL

SEQ ID NO: 62134 - protein, 404 aa, unknown
  TnpB Polypeptide
MVKKNRKGYRSMYKGFKTELRVTKQQHIDKIHQSIGICRFLYNSYLAKNQELYELYKEGKIDKKQSFMSANDFDKYINNDVKILEEFNWINNCGSMARKKSIVNAEKAYKMFFKGQGGFPKFKKKKSQNIKIYYAKNNKTDWTVKRHKVKIPNLGYIELKEKGYIPTNAKVVSGTVSMKAGRYYVSVLCDIPDHNNYSQSENEGIGIDLGIKDLAIVSNIDEPFKNINKTEIVIKLKRKLRRLQRQVSRKYEMNKDGKKFIKTKNIIKLEVKTKRIYKRISNIHSNYAHQITTSLVKSKPEYVTIEDLNVSKMMKNRYLSKAIAEQCFYEFRKQLVYKCSLNNIELRIVDRYFPSSKLCSECGSIKSDLKLSDREYICKECGIVLDRDKNASINLKNAKEYKVV

SEQ ID NO: 62135 - protein, 407 aa, unknown
  TnpB Polypeptide
MKQLKAFKFRLIPNKQQKVLINKTLGCSRFLYNQMLNEKQVKYKSKDISKTKTEKQYKEEFSFLKEVDSIALQQSRIDLRTSYTNFFRKLKSGELQKEISKRLAVAKTPKQKAKALNYGKPNFKCKYNPKKSYRTVNINNSIRVEENKIKLPKLGVVKFKKSKEVLGIIKSVTITKNILNRYYISVLCEVEIQKLSKLDTQIGIDLGLKEFCVTSNNEFASNPKYLKKIEENLQKSQRKLSLRKKNSKNRFKQQKKVFRIHQKISNQRLDFLHKLSTKLINENQVICLEDLQVKNMVKNHKLAKSISDVSWSKFVELLKYKCDWYGRELIQIDKFFPSSKTCSSCGNIKTDLTLKDREYNCSACGRTIDRDYNASLNILEEGLRILEKNRRDDEVSLLNIQTLVCSS

SEQ ID NO: 62136 - protein, 505 aa, unknown
  TnpB Polypeptide
LDKDKNYHIIRKEILPNEKICSYFDEICSKSNNLYNVTNYYIRQLYIGTKKKNNNQQLTPNEQEVFDIVTNALPLLDEISVNNIKTKISKLEKALLLNPKDKTISKKLEQHKEKLLKFKPHSLSKSGFPSYKLLDGVFKVTNNADYRALPAQVNQQTMRECYTNWKSFFESIKKYKINPSKFTGRPKIPGYKKSGSKFKTIFTNQTSGFHFKNEQCSLWLTLYDEEISFGNYVKETDVLQQVEIAPFYDRYKVSLILQDKEYSEKECKPTRIMGIDLGVNNFATISNNIGINPIIIKGGMLKSRNQYFNKTRACYLSKLQKGKDSSHNQKNSKKLYTLSKNRDNFFRDSFYKIAHRVVKIALENEIDTIVIGNNIQDMKQNIDIGKTNNQNFVSIPFCLFIKILKYLCLKNGIQFIETEESYTSKSSLLDNDILPVYNDSDTNEYKFSGKRISRGLYQSKEGIILNADVNGASNIIRKADITAFENLDLSYLQSITVLSFKDFYK

SEQ ID NO: 62137 - protein, 442 aa, unknown
  TnpB Polypeptide
MSYKTICILLKEKDKVLFNYCEENCKLAKLFKNAVIFRCRQLITAKNKNYQNLTENELNVLAEFKLTEDRYKSIGNKYFLPNYYHFQYMFTKTNNVDYYNNLPMQTSQQIIKECLADFKSFFKAIKDYSKHPEKYTGKPKFPGYIKKDKTSFDITNQDAVFKFEENKLKLPKTKEKLLIGKADVGKLKEVTIKPFYDTYKICIVTEVEDIPAVLDKNRVLGIDLGLKNIVSTSNNCGLTPFVINGNDLKSFNQWFNKKNAELHSQLPKKQYSSKKLEKLYLYRHNRTTDFYNKLASYIVNYCVQNNIGTIVIGKNEQWKNEINMGNQNNQHFCFISHSFIIKKIEELAIKAGIVVLQTEESYTSKASFLDGDVIPVFKKSSNAKYSFSGKRIHRGLYKTKEGIVLNADVNGASNIIKKAISTAFDKVTDLSYLYKTTIRVNL

SEQ ID NO: 62138 - protein, 407 aa, unknown
  TnpB Polypeptide
VRNYKFRLYPNDSQEYKLNNNLNVCKWVYNKFVEHAQKSFLTRNDMNYILTELKQSEPWLYNYHSKMLQMISTQFESAEKSLIERSKKGHKTGNLRFARYGEYRTFTYNQSGYKLKQCGKQDYLYLSKIGYIEIRKHREIPQNVNIKQITVTRSKSGKWHACVTCEIQEPIIDIPKISFKRAVGIDVGIKSFAYDSNGCQTPNPLNLKKMLKPLARAQRKISRRVKGSSNRRKAVRFYQIIHERIANRRKDFQHKLSTQYAKNHDVVFVEKLEKLNMVKNKKLSRNIMDSSWGTFVQKLEYKCKLLAEVPARNTTINCSRCGNKVPKSLTVRIHRCDKCNLVIDRDYNASINILQKGLDIFGIGLDMKLPQELRKVTPVEISMRSVKQEVAVMTAFSKGKPKSFRIG

SEQ ID NO: 62139 - protein, 473 aa, unknown
  TnpB Polypeptide
MGQASRTTKLLLDFSDRRGGGANTSKRAYLEETGKILDAARAFYLAFFLAHPDKLTERVQYFSEKLQQERERLLSPHELLSWAEALTVETAAHPSPLPSYNFSQQFPDFPFIYRRSVIKDALGKARSYLSNLANWNTGGKKKGQPGSPGASNHPTLYAEAFCLDLDATDLRPGKRTCFVRLKVYTGTGWEWHNYPVKLSRYFEARWRDPAWEHQSPKLIVRQGSAALHFPQVKQVEAQRVKERKADPHLVTVGVDLNVKNLAVVTVRQDERIIETVFLTDHGLDQARYRHLKKIARKQWQTGKPIKGEHSNQQLWRHVGRTNEDAAHKVAHQIAEICAKYPGCILLFERLRKIRAKGGSKSRRMNRRQANQLRGKINQYAKDKAYASCNTVTVEVNPHGTSQYCSRCGAKGERFSYRGGKRIVEKWGKLFFCPTCHYEAHADHNASKNMHHSFYHELHWEWRDKRRAGSAPSG

SEQ ID NO: 62140 - protein, 381 aa, unknown
  TnpB Polypeptide
MRVAFKYRLFPTAAQRTALQKSLDACRWVYNKSLEIRKEAWEQHGESVSRYDTVKMIPGWKRENTFLNDAFSQCLQETCTRLDLAFRAFFRRVKSGDEPGYPRFRGVSRYDSFTYPQSGFQLLDDGCLRLSKIGDVKIRLHRPLQGQCKTLTIRRDSLGNWYACFSCIVEPKPLPLTDKVVGIDLGLTTFAVLSDGTTIKRQRWMKRDEKDIARLQRKKEQYPKGSSERRKVIHALCHAYERAANRRRDFAHQESRKLVNQYQFIAFEDLDIKDMQAKNGNGSKTIRRGIADVAWGQFAQYTAYKAEWAGRGVAFVNPRGTTQNCSGCGVIVPKGLRVRIHSCPHCGLRIGRDLNAALNILARGLTSLDASPRSPNGHGWE

SEQ ID NO: 62141 - protein, 394 aa, Microcoleus sp.
MSFAAKNLWNAANYCLRQSYIFGHNVPSYNQMDKLMQPSTEYKTLAAKLAQQVLRLLDKSWKSYFEALAQYKQNPDKFTGKPRLPGYKAKDGRCVCIFTEQATSKKVFKQSGQIKLSGIDYNFDTQVSQSQYCQSRIVPKIDHYVLEIVYEVHDVEPSANQDNIAAIDLGINNLMAVTSNMPGFKPVLVNGKPLKSVNQFFNKKRATLQRRSQLRTSRRIKRLTTRRNHKVKNYLHRASSYLINLLVKSNITKLVIGCNSDWKRNVNIGKANNQQFVQIPHGQLIDMLTYKGTRAGITVIVREESYTSQSSFLDGDKIPDYGSKPQKWKSSGKRIHRGLFKTASFRLLNADVNGSYNILIKEFPNAFGTGDREVLVDPIRVNLDGFRARSLTPF

SEQ ID NO: 62142 - protein, 405 aa, unknown
  TnpB Polypeptide
MGMNRAWRYRLYPSKAQQEKLNGYLRECKNLWNSLLEYTKAYYNETGKFPTRKEFYLLTKEPPLFSQVAQNVADRLSKSLKGMMLKKNAGKKAGFPRFKPIERIKSFTYPQFGFILAERLELSGIGSIPIKKHRALRGNIKTLTIKKMPSGKWFAIFTSEVEAPEVRRKIGTSVGLDLGIETFAYLSDGSKIENPRYLRLAEERLKLTQRCMSKKKKRSLNRVKARRAVAVAHEKLTNRRRDFLHKVSRALVTQYALIAVEALNIEGLARGFLAKEVLDCSWAEFSSMLAYKAEEAGCEVVLVNPANTTSTCSSCGLVQKKSLAERWHFCPCGAEMSRDFNAAINILNRAIANSPGRVRQSELANNSATAGTAGSQACGEETPTHYKHNEQVSSMKQEAHAFRRG

SEQ ID NO: 62143 - protein, 404 aa, unknown
  TnpB Polypeptide
MKVTRVEQQIIKHNHPMWKTIDENCFYSKNLYNLGNYTIRQEFFNNHNWIHYKELDKTLQKEEAYHQLKSQPSQCTLQVLDRCWKSYFKAIKDWKQHKDKYLGMPRLPKYKKKDGRFTWFIKNNCCYFDGEYIKFRVKRLQGYDFKTKAQGRLICVRFVPRGDNYVMEVVTEIEIPDYQKINSNRIASIDLGVNNFVTLTNNIGIAPIIINGRGIKSINQYYNKKRAEFQSDLIKRNKQHWSHKLDKITFKRNNRVKNYIHHASKYVIQYCINNQIDTLVCGYNSTWKQESKLNKKVNQHFIEIPYDMFIKQLQYKCEEVGIKFVTTDESYTSGTSFLDGEIPCKENYNKSRRIYRGMFQASDRLINSDVNGSLQIMRKAFPDAFSYGIEGNLTPTIINVTKVA

SEQ ID NO: 62144 - protein, 402 aa, Streptomyces sp.
VHRAYKFLLRPTVRQAAALGEMLRDHCSLYNGALQERRDAYRHPSKTTVRYGQQSAQLKEIRAFAPERQGRWSFSSQQATLRRLDKAFQAFFRRVKAGEKPGYPRFRGAMWFDTVDFPKDGDGCRWDSTPHDPVTRVRLQGVGHVRVHQHRPVKGRVKTVSIKREGWQWYVILACDEVPAEPLPTAGAVTGIDMGVTHFLTTSEGTHVGNPRHGKRNADALADAQRVLKAFGRRKRENRTAKHRQAVEKVAKLHRKVRRQRLDHAHKAALALVRDYDQIGHERLNIANMVRTPKPKPDPAAPGAFLPNGAALKAGLNRSILDAGWGVFLGILAQKAESAARVLIPVDPRNTSRTCPKCGHVDSENRHGEKFQCTSCQHIDHADRVGAWNVALRAGLVLPDVA

SEQ ID NO: 62145 - protein, 394 aa, Trichocoleus sp.
VLKAYKYRIYPTGEQSILLAKSFGCVRWFYNYALNLTSETYKATGKGLSRNDIINLLPSLKKEHEWLTEPPSQCLQQVALDLSSAFLNFFEKRAKYPNFKKKGQKQSIRFPQGVKLDGDHLTLPKLGEVYCKVSRLPVGKLKSVTLSLTTSGEYYAACLYDDPKDKPATSSEGKAIGIDMGLTHYAITSDGTKHGNPKYYRKYEIRLAKKQKLLSRKQKGSKNRNKARIKVAKVHSKITRCREDFLHKLSRKLVDENQVIVVENLAVHNMVKNHKLSKSISDAGWGQFCTMLKYKAEWSGKIYIEVDRFFPSSKTCSSCLHQVDVLALDVRRFTCPKCQTVHDRDINAAINIRDEGLRLLAGGHLATASGERVRPSKGTAFTRRFSVKEESSRL

SEQ ID NO: 62146 - protein, 416 aa, unknown
  TnpB Polypeptide
MYLTVKQQVKHLSKEDYRTIKELCHTAKNLANEAIYNVRQYFFTEGEFLKYEKNYTLLKNSSNYKALNSNMAQQILKEVDGSFKSFFGLLKLAKQGKYAFKDCKLPRYLPKDGYTTLVIGFVRLNGNKLMLPFSNSFKKTHKPVEITIPPILVDKKIKEIRIMPKSSARFFEIQYIYEAECIQRNLNKNHALALDLGINNLVTAVTSNGRSFIIDGRRLKSINQWFNKENARLQSIKDKQHFGKKPTNRQKAIARDRNNKVNDYMNKAARKVVDYCITNNIGTLVVGYNETFQRNNHLGKQNNQNFVNIPFGQLRSKLEYLCELNDIIFVKQEESYTSKSSFLDKDDLPVYNADNPQEYSFSGKRVHRGLYQTASGKTFNADVNGALNIMRKSSVVDMNILYGRGEVDTPIRIRIA

SEQ ID NO: 62147 - protein, 378 aa, unknown
  TnpB Polypeptide
MNFLLIKNSYKYRIYPNRTQKQLLENIFGCSRFIYNYFLNLWIKKWKSESKSLSYNACAKILTDLKKDEAYLWLNDVDSTALQSAVRNLDTAYKNFFEGRSKYPKFKSKKKRKDRYTSKNNNNSIRFFEKTLKLPKLGYIKTKVSRPCNGRIISATVSRVPTGKYYVSVLCEEEVSPLPVKSNSVGIDLGIKDYATLSDGNKIPNKKYFSQMQKRLALSQRQLKRKTIGSHRYEKQRILVARLHERVANLRKDFLDKLTTELVRNYQIICIEDLNVKGMLKNHKLAKQISDAAFGTFQRMLTYKCERYGRTLVKVSRFFASSQMCSCCGYKNEEVKDLSVRAWVCPACGTHHDRDINAALNILIEGLRILGLEIKISA

SEQ ID NO: 62148 - protein, 351 aa, Rhodococcus sp.
VHPVCLQPGVGRADACLVAGAAAGDLRGHLEDAHRMETRCRDRVVGGAVEGAVAGIAAATAGCVREVLAQADPLPAIQEEGPIEGFGDLLFELLHLPGWAGPVGQAGRTPGYSVVEATTGGGRAVAGDGVAQCPRSVPHLDPRRRHHHRTRVDRSGGRARRRDHQPVHALDGGEDHQPAPRARGPCAAGEGAAALAKKQKGSRNRAKARLKVAKIHGRIADRRRDYLHTLSTRLVRENQVIVIEDLSVRNMVKNRSLSRAISDAGWSEFRSMLEYKADWYGRRVVAVDRFYPSSKTCSVCGVIVSAMPLNVREWTCRCGVVHDRDVNAARNILAVGLTVAACGDGVRPPRT

SEQ ID NO: 62149 - protein, 304 aa, Bacterium sp.
MNNVPYQIKSVAIRDCCQAVSAAKKKFKQTGKFNEVKFRSKKRGDNNLFIPQTAVSENGVYHTVLGKLKTAEPLWKPTHDCRMVLQNGRYFVVVPIDVAVKIPENQRLSACALDCGVRTFQTVFSKELILKVGEHDFQHIFRYCYALDKLISRKKKERSNRFNKTMQRIRWKVRDLIDEIHNKLSLTLCRLFDVVYIPSFETHDMVSKLRHKTSRAMLGWAHYRFKMKLKAKAEEYSCKVIDCTEEYTSKTCGNCGTENQIGVKEVWTCKHCGCVHDRDINGARNILLKQMFLAMRDPSTPCLV

SEQ ID NO: 62150 - protein, 373 aa, unknown
  TnpB Polypeptide
VKTLRVRIKDKHAKALDAMACEVNMVWNFVNELSSTHTKRTGKFFSAYDLDKYTSGATKEGLKIHSQTLQGITAEYVTRRKQFKKAKLRWRVSRGSRKSLGWIPFKVGAVTYKNGQLRYAGNLLGLWDSYGLADYKLRSGSFSQDARGRWYANICVETVAAKSAGTESIGIDLGLKDFATLSTGEKIEAQRLYRGAEAKLAVAQRANKKQRVKAIHAQIANRRKDFLHKLSTRLVKENGAIFVGNVNAAGLAKTNMAKSVLDAGWSSFRTMLQYKSDHAAVWFEEVNERYSTQTCSQCASIEGPKGLKGLGIREWTCGCGSVHDRDTNAARNILARGHARLAAGIPALKGGEDVKSPRLAASRSCSRAKRCAT

SEQ ID NO: 62151 - protein, 348 aa, Geobacter sp.
MIQRQLKLRLSNKQEAILIKWLPILTSIWNWSIRKVKMDAQGGIYYTPKRFNNLLAGTSRTLGIPSHTIQGMLSLAHQSWTRCFKKLAKKPRLKGNRNHLNSIPFPDPIAAPADNKIRIPGLGMVRYHKQELPEGKIKCARVVKRASGWYLCLFIEAEPVVIPRTGDHAVGIDPGYNHLVTLSTGEKVAHTRELQRSIKRIGQAQRGGNRKLAARLNERISNQRKDRNHKLSRRLVSENSLIAFSKDNIRGLSRKGFGKSVAAAAHGQLRSMLSYKSRIGGTQYIEVPSKGSTRVCSHCGASSGPQGRAGLSVRQWECKACGTHHDRDVNSAINTLIAAVGTTVERAA

SEQ ID NO: 62152 - protein, 371 aa, Exiguobacterium sp.
MRRLLKAYRTEIRPSDEQAVMIHKTIGTCRYVYNLYLQKNKEAYKADSSFLSGYDFSKWLNNEHARREEFAWIKEVPSKAVKQAIMNAETAYKKFFKKLASFPCFKRKSDYGSFYLIGTIHVKRHLIQLPKLGKVRLKEKGYIPSAGVRSATVSREGDRYFVSVLVEEQEACKKKSGPSEGIGIDMGIKMFLYTSDGEHVANVSRSNQLAKLTKSLKHQQRKLARRVKGSANFQKQKVIVQRLHRRIRNIKTDLKRKTVLKIVKKNPQFITIEHLHVKGMMKNRTLSNAFQQIGIGYFTDWLKVKCAECEIELRRVDRFYPSSQICSCCGERKKMLLHVRTYDCEHCGMSLDRDWNASINLKNAKDYTVLV

SEQ ID NO: 62153 - protein, 346 aa, unknown
  TnpB Polypeptide
MYKTQKNHIRCSKQAYKLLRTLCHISKNLYNYALYQVRQHFFKTQQHLKYESVYHIVKDNENYKLLPSQVAQQTLISVDEAFKSFLNLLKAKKEGKFEGKVSIPKYLPKDGMYQLVFPKDQFKVEGDKVRLSLGRGFAKEFGVKYIYFKLPKTVESKKIKEIRILPRFSGRWFEIEYVYEEEEQKTSVDTNRYLAIDLGVDNFAAVVDTIGTAFLIEGRHIKSVNRWYNKERARLQSIYSKQGIKSGRKLARISLKRQNIINNFLNQTVNFIVKHCIANEIKTVIVGKMEGIKQGINLGEVNNQNFVSIPYEKFKRKLEGKCQYYGIRYMEVEEHIPHRHAVNVTK

SEQ ID NO: 62154 - protein, 456 aa, unknown
  TnpB Polypeptide
VTSIRLIEANPGKLTALDALMAVYLPLCQQYTTLFCQSETGPDKYSDPVFETPLSDRLHRVAMQQAAGIAKSFRTNRANAYQTYLEDAADYEEARAKAEAEGRVSTFKRKEPVWQEWNLPQLRVPVIQANANVVVVEKSKDSMFDYWLRVSTLGRGHPLRVPVKLASYHKQVLAGKTLNTSTTLHKRNGVWWLTLSFDEDVPLQTEVSAPLVGVDVGIAHFLTTSTNKEYGSFHGKMARQHKRDREKRRRKAKLQACLEKKGVSKDKLPSTSSETSQRLSRHVKQEINRAVNELIKDHPDVRLIYEDLNVASMRFHARSMNAYLYASHLGHIPEQLAWAAAKQGMAAHTVRAAYSSQECCRCHFVDRANRPTQKTFKCVVCGYQDHADHKAAVTLAGRWGDRELAACHTKKEIKVLLMTRHEKWKKENEQRIKGAGPPIQLSFWDLPETFLDLSQA

SEQ ID NO: 62155 - protein, 176 aa, Hydrogenophilales sp.
LRLGDHQRRILESGAPNEAELIFRKGRWYFNLVVESGEVEPVASGQVMGVDVGEINLAAVSTGKVFGGGKLSHERNKYLATRRRLQSNGSRSARQKLRQVSGKESRRVRHINHETSKAIVADAKAAGVAKIVMGGLTHIRDRIQAGKRTRARLHRWAFRQLQAFVEYKARAARLAV

SEQ ID NO: 62156 - protein, 394 aa, Glycomyces sp.
VSYSAGTVAGVHLRYSFRVYPTRPQRQSLARTFGCVRTVYNDAVAARKAAHETGAKYPSAVALAKSLITDAKRTPGRAWLGEVSVVPLQQALRHCDRAYRNFFDSLKGKRTGPRIGPPRFKRRSGTQTAEYTRRGFRLKEDGRLYVAKVGDLKVTWSRELPAEPSSVTVVKTVTGKYYASFVIAVEDDADLLEPLDDPDAETGIDLGLKSFAVLRGGKVIESPKFFRQMERKLKKAQRALSRKRKGSNNRAKARIRVGKIHEKIKHTRSDWVNQQVAMIVAENQGIYVEDLNVRGLSRGRAAKSVQDAAFGIFLSRLESKAARAGRTFVRVDRYFPSTRLCSACGALTGPKGLDGLSIRQWVCGCGTRHDRDANAEINIRREGKRLVAAGHADT

SEQ ID NO: 62157 - protein, 376 aa, unknown
  TnpB Polypeptide
MLKTFKYRIFPTKKQLKNLETTLDECRWLYNHLLEMRKTAYEQEGKGLSCYGQQATYPILKEQRPSLNIVHSQVLQNVAVRIDLAFKAFFRRLKAGEKPGYPRFRSADRYDSFCYPQSGFSIIHDERVVLSKIGTVKMVYHRPMKGKVKTATVQRSSTGKWYITFSVECEPERLPERKEQVGIDVGLKTFATLSNAEEIENPRFFRNEEKALAKVQRKHAKLAKGTPERRKHRKGVARVHERTKFKRDNFTHQQSRSVVDRFGVIAVEDLMVNRMVHNHCLAKSITDAAWSAFFSQLSCKAEEAGRQFIKVNPAYTSQTCSTCGHRQKMPLSERVFDCPCCHAHRDRDLNASLNILRLGLQSLGLALEAPAFTHGE

SEQ ID NO: 62158 - protein, 368 aa, unknown
  TnpB Polypeptide
MRKSFKYRIYLTNGQRRILEQQLEECRWVYNETLAERKRAYEERGESLRLYDTQMMLPVWKMTRPSLTLVHSQVLQNVNIRVDLAFQAFFRRVKAGENPGYPRFKSFGRYDSITYPQYGNGVRLDGERLILSKVGAVHVVLHRPVEGAPKTVTLQRSPTGKWYACFSCETEANKLHPVDKIVGIDVGLASFLTTSSGGTVPNPRFYRKDEADLARVQQRLSDAKNQQDWVAYRKRKRAVAHIHERIANRRTDFAHKLSRVMVNTYQVIALEDLAPLEMGRSRGMRKSIRDVAWSQFVSMTCVKAEEAGRTVVLVDPAYTSQRCSSCGERVKKTLSDRTHACPHCGLVLDRDHNAALNILHRGLQQLRL

SEQ ID NO: 62159 - protein, 392 aa, Marinithermofilum sp.
MLRAKKVHFRASPSDIHRLFACNRESAAVWNQCLQLSRQYYLDHQKWISKSELQKATKGRFHLHSQSIQAVCHKYLFARDSAHQAIQKGMKTARYPYKNKAHYNTKWAKDGFRIDVNGKIELSMGIHGGKREKPIVVYTKNLPQGKIKEIELCYDHGLYLSVAFEDGKENQPYAKKQSLGVDLGEIHTIAAFAESGEALIITGRKVRSIHRLRNKKLSQIQRLQSKCKKGSRQWKKYQKAKRYVLSKSEKQLQDALHKTTKQFVDWCVKQSVSDVHMGNPEGVQRKTRKKKKATRKQAQRLSNWSFGKVKKYLQYKLAVMGIHLHEIDESYTSQTCPVCKRRKKVSFRNYRCSCGYQEHRDTHGARNILAKSLYGEIRHLEVSTKQTYLRIA

SEQ ID NO: 62160 - protein, 316 aa, unknown
  TnpB Polypeptide
VTKQAIKDACNAYKRFFKGYSKFPKFKSRKYSIPSFYQDNVAIRFTDTHVKIEKLSSSQKKNKQKLNWVRLAERGRIPTNCKYMNPRIKYDGINWWITVGVEYENAVKNSSNDGVGIDLGIKDLAICSDGNKYQNINKTQKVKNLEKRKCRLQRSISRKYEKNKEVNRYCKTNNIIKSEKKLLKLNHKLTNIRHNYLHQTTSEIIKREPSFICIEDLNIKGMMKNRHLSKAVQQQELYEFRKQIEYKAKWNNISVIIADRFFPSSKLCSCCGNIKQDLKLSDRIYKCECGNVIDRDYQAALNLKRYGENVLNQSIS

SEQ ID NO: 62161 - protein, 345 aa, unknown
  TnpB Polypeptide
MRAYAEAFSISAKWGYDNQSWNRVDNHNATYKLTRQSIPDLPSSLVQGARDCACEALKAVKCETLPERKPLSAMRYNQRVITVNLIHGLASIASTNGRIKATFFVPSHYRDYLSWTIKSSTISYDRRNKTFYLHVSLEYNDPEKVANLEVLGIDRGIVNIAVCSDNTFYNSKQIKNRRARYAYLRKELQSKGTKSAKRKLKRMSGEERRFVTDVNHCISKQIVNSEYTVFALEDLSKIRVQKRRGKEFDRKLNNWSFYQLEQFLGYKAEALGKHVLLVDARYTSQKCSNCGHTYKGNREGSAFRCRKCGFELHADLNASRNIAQAGISCLSRLPSQPAKCDTIST

SEQ ID NO: 62162 - protein, 394 aa, unknown
  TnpB Polypeptide
MSRFRLVPTPEQEQELLAHCRDARYVWNLAVEQQRHWQPGRKAPGYLEQAAQLTEARAEYSWLRAGSQTAQQQALRDFTQAMKYFFNGTHRRPTWRKAGVHEGFRQVGLRPHHVEKLNRRFGRVWIPKVGWVRFRLSRPVPVGVKSYRVTRDRAGRWHIAFAHIPDPVAGPRDGSVVGIDRGVAVSAALSTGELLRAPNLTSGEAKRLKVLQRRLARAKPCSNRRGKTKRAIAKLRARERDRRKDWVEKTTTDLARCFDVIRIEALDVRAMTRSARGTVEQPGARVAQKRGLNRAISQNGWGLLATRLQHKAFGRVEQILAAYTSQRCSECGHVAPENRKSQAVFECQACNAGQCNADVNAARNIAAGRAVTARGDLARRRSANREPQLATPAA

SEQ ID NO: 62163 - protein, 378 aa, Chloroflexi sp.
MMVKRGYQAELDLNNAQITLARKHCGAARWAYNYGLRRKQEAYTAGEKTLYATDLHREINALKKTELSWMYEVSKCAAQEALRDLDSAFKHFFRKVERKKQGKWKGKCGYPKCKSKKKAIGSARFTGSIHVYPDAIQLPRFGLLRLKEHHYLPMNVKIGSATISEKAGRWYVSICVHEQQAEPTPATGEVIGVDLGIKTLATCSDGCTFANPKALRKKLNKLKRTSRRHSRKQKGSQNRKKAKTRLARMHARIANVRKDALHKATSAIVARTKPDSERPAVIVLEDLQVSGMLKNRRLSRAIADVGMYEFRRQMEYKAREAGVQVKFVSRWYPSSKTCSDCGWRHEDLTLAERVFICQQCGVVLDRDENAALNLAASA

SEQ ID NO: 62164 - protein, 414 aa, unknown
  TnpB Polypeptide
VLETTRTYVGKIANHSQVKQDLDKCGFSASKLWNAGRHYVQERWDEEGEIPDEAELKSELKDHERYSDLHSQSSQRVLEELSEAFNGWYNSDNGNSPPGYRKHGDSHPRSTVTWKKRGIKHDDKYNRLRLSKGWNMKESRDDYILVEYETRPDVKVENVQQVRAVWTGERWEVHIVCKKKIPVEDAPGDDVAGVDLGIDNYVAIAYEGGDAELYPGNHLKQDKHYFTREGYETEGKDGPSERSLRARRKLSRRKDHFLHALSRHIVERCVEKEVGKIAVGDLSDIREDKDGESRNWGSGGNKKLHGWEFDRFTRLLEYKAEEYGILVERVNEEDTSRTCCCCGKIDGSNRVERGLYVCNSCETVMNADVNGAVNIRRKITQSPPSEDMSNGCLAQPSVYLFDATAGILPQEQVV

SEQ ID NO: 62165 - protein, 394 aa, Brasilonema sp.
MYAIKRELKLNKVETSLLRGNAGFKRWVYNYGLDVVKASWDFVDIQASDSKRIDAIKKVFTQITMQKPENAWMKKYPSTVYQSAFIDLKKAFARWREGKSSFPVNKSKKKGDSFTVYKTAGVYPEKGKPPIPFTNRVVINPGKRIKLPGLKEFRLKERINFHCSSQTFTVSRTADKWFVSFVLDAEKVPPVIHPIEKIGVDLGVKALATCSDGSKYDMPVTTKKAKTKLGKLQWRNRDKILGSKKLKIEPSKNACKFYVIAARQHARVANIRQDTTQKMTTDLSRKAYTIRIEDLNVSGMIANHKLANAVSNNCFYEIRRQLIYKQAHYGTKVELVDRWYPSSKKCSRCNHVQPMKLSERVFQCQNPQCGHIQDRDENAAVNLEFAPPDKVRLA

SEQ ID NO: 62166 - protein, 570 aa, unknown
  TnpB Polypeptide
MGQRFKCEGDMAMARSKDVTISVKVPINWEAMTERSRQRLRQTVGRDTRMIRAFLGVIEQHEDMLLTGHSKNRIHDGELDRLTMTALKVKSGYSQRLTVLHDFKTRFPRISQNEMAECRQTGVALYESYLALREKKGRRASRPTMINGTRRIPRWVFSQRFKLIEKKTSVSRWWLDIRDSLDSAHEGRTHHDRLNIPLKMSPFHLNQIRRGEVKAVQLFTDQGRKWWVTIAVRITLDESPEEKLPVAILGIDLGIEKAACSTLLTPEKTRETRYFVQREKVKVIRKYDRRVADLQREMHTRSNNGLPSNSITEKLRLMRSKRENVACEYDRVLVRQLLDYISELSKKYTLYIAIGRLKNIRMRAKRGNYRGRRFRGMIHSWAFTRITDSLKHGLAQQSWKVEGKDARFRAVPESWTSIMCWKCGSKGKRPRQEYFHCPNCGLKLNADRNGSINIAARMLMLTKSLHSVRGLGMWTRTLNKVRRARLKARKKKPSQGKSLLSKKELISGSGESAAVHFVQSDLLGFGDEAGKSDHDPAVVRTVESFSVAGGDVPASVQEKEARSSGGIPSR

SEQ ID NO: 62167 - protein, 440 aa, Streptomyces sp.
VSDELVEVKRQFGHRARLALTPTQIRLMDDQAHAARTTWNLLHDWWTMLAKDRRFLATADAAIRQARKEIDWLAALPAQAAQAVLKAYFQAWKNCWDGRAEAPNFKSRIRSLMSVDIPQGRDLNITRVHRRWGMVNIPKIGRVRFRWTKDLPVGKQANADNRITGARLVKDALGWHISFRVQTLETTPALHTGPEVGIDAGVNLPLALSDGNHQDHSRPAYTSEGKADRDKWLNPEEKAKLLRLEQRAAQRKTHRKPGEKTSRRLRHTYDQIKQLRATATRRAVDWQHKTTTAIAKQYGTVVVEHLQITNMVKSARGTVQEPGRNVARKSGLNRSISQEAWGRTMTMLTYKTARYGGTLHKVPAPGTSRRCSLCGFSTPGSRETQALFVCKNIGCGWSGNADWNAARNIHHLYRMGHALIPAAGRAVVRRAKRVKPAAAR

SEQ ID NO: 62168 - protein, 156 aa, Okeania sp.
VSSRFAIFYEIGITFKPVNQQIGIDLGITSLLTTSDGKKFANPKNLNKLHKKLRLAQKSLSRKTFGSNNYQKARLKVARIHAKIKDSRLDYTNKLTTRLIKRYQTIVVEDLAVKNMVKNHNPPPSPPGRGARGVGSDANWGELVRQLEYKVEWYGR

SEQ ID NO: 62169 - protein, 414 aa, unknown
  TnpB Polypeptide
MLLSQKTTIKISDNYSNIIGHMCYAAYKLWNVCNYERLHYKDLNLSNFPDWYYQKAAHKDGLWYKQLPSQTAQETCKQLDKAWKSYFTLTKTGGVENPKPPKFKHDNIAVTYMQNAIQHNNDTVKLTISKGLKNFMSAEYGINETFLYLKNPVFKNINSIKQIKIYPPEENICSIIVIYEIPDVLKLTDNGKYLSIDLGIHNLMTCFNSDTHETFIVGRKYLALEHSYNKEIARVQSQWYIQQSEAGIKSPKSSKRIKKLYEKKNNAIRDYLHKITRHIINYCVSNDIHTVVIGDINGIRKDNTKDDKFNQQLHALPYNKIYNMLEYKLTLEGISFVKQTESYSSQTSPLADEVCKKNAVKSNRIYRGLYADGTNIWNADCVGAYNILRLYLKNNATGLNPYGIKVPEVIKVAV

SEQ ID NO: 62170 - protein, 415 aa, unknown
  TnpB Polypeptide
MKTVVQVKLVTTPEQFAAVAATLAGCNAAANTASSIAHVYGAATAKRKVSFHTLQKLAYPTMKQTLSAQPSLLVLSKVAGAYAALRANLRAGNYGKKDSPRRVKVEATPVTFRPDAAQPFDDRCLSWQHDRSSLTTGTVSLWTTSGRMRGIRFVGHPAQVGMLRRYRHGETDLLIRDGVAYLVACVDVPAAVLHLGDHLSAGTGWIGVDLGIANIAVTSDRTLAAELMTDFGDTAPEGPAGRGSTKDRRTRNRELRERLQKKGTKSAKRLLRKRARTESRFGADINHQISKRIVAEAERTGRGIAIEDLAGIRARVRLRKPQRATHSSWAFAQLGTFLTYKAEQAGVPLVQVDPAYTSQRCTACGHTDRKNRTTQAEFCCQKCGFVEHADLVGADNIAVLAPPTYRAPSTVPSVA

SEQ ID NO: 62171 - protein, 419 aa, unknown
  TnpB Polypeptide
VQTVKIYQLNHLSYQQFRLLKAAQMEAAQVWNRCMEMHKQARLDHTTWPGRQDLQQATKGRFALHSQSVQMVVHAFLATIETTRKLRHMHPEMHMKYPWRTKRFYPVLWPAQAVSIEPGRVLLPMGRGRKSICLPLHLPEQSAACVLVWNRGFELHVCVEVSQAEQAPGPYHATVDLGEIHLAAVTTNMGAAMIVTGRGIRSLKHQRSKQLGKLAKKQARCTKYSRRWKRLQRAKNKQCRRAKRRIRDLRHKATRKVIDFCVQQKVGTLFIGNPHGVRDKDKGRHHNQRMALWEYGKDIDYLTHKSRAVHIASFTGSERGTSSRCPNCGHLHKPKNRNWACHACQFSGHRDLVGAANMHPLAFGEQVKFPRSFTYLRPGQSRSRSSRAGTPQCCLGKAEAQPRLAETVSSEAGHPSDVT

SEQ ID NO: 62172 - protein, 398 aa, Thermosporothrix sp.
MRKAYTFRLYPTKKQEEKLCWTLNRCRELYNAALSERRDAYRMAGKSISSYEQKRDLPEIKEIRPEYNDIHSQVLQDVLLRLQRAFDRFFERVKNGEKPGYPRFQGRNRYSSFTYPQSGFSLEEKHLTLSKIGTLKVKVHRTIEGAIKTCTIKHESGQWYVIFSCEVKQPEPLPVSYEDVGIDLGITHFAALSNGDFIDSPRHYRQAEKKLKKLQEALSRKKRGSHRRKRAVQAIAKAHRKVRNQRRDFAHKASHQLVQRYQTIVLEELQTKNLLRRPKPKQDEEAGQYLPNGAAAKGGLNKSITDAGWGMFTEMLRVKAAWAGRVVAFVDPKYTSQVCSGCGTVKPKTLEERWHSCECGCELDRDTNAARNILKKYIGAGSALQILPRGESVEAPAF

SEQ ID NO: 62173 - protein, 378 aa, unknown
  TnpB Polypeptide
MQLSETVKLYMTKEQKALVVMAMSEYISTVNSLVSVAVNGTSISKYTTADVNASLPSALTNQCIRDAKSIVNKYNKDCRKVSTKNKKFAKQKPNITIKEPTVPVLKRPCCYVNNQNFKIKDNCIEFPLLINGKSRRIAIRTSMTDNQKLIFANAKLGTMRIVYKGNKIVAQIVYEVTEPEYSDDGNVMGIDLGIKCPAVSYISDGSVKFYGNGRKNKYMRRHYKYVRKKLQKDKHLEAVERINNKEQRIMKDIDHKLSHDIIETAVSHNVKVIKLERLANIRSTTRTSRKNNHSLHTWSFYRLAKYIEYKAKLAGIKVEYVNPAYTSQTCPVCGHVHHANDRSYTCKCGFHIHRDLLGAINICNSTEYVGDSNIRHTA

SEQ ID NO: 62174 - protein, 437 aa, Thermococcus sp.
VKLTRTVVLESLPLTRRKFEAIKEVYDEYSAILEFLTDYAVENRVKSHLKLRKLFYGKLKEEYDLPTHYYYTVCQDAVTRAKSFLELKKKGRAGTEKPVVRKISLWLDDVLWDYKRFPQFNTLKDGRKILVIGLTTKRGRVKLPLKPHKLFFKYLNEGWKVKAGVKLHIVEKERKVLAYFVFEKEFDERELTGNFLSVDYNADNVSFGTGEFLIQVQTELGRLTRFYSSVRKGIQESHSVGWNRKLPSTRGKELLRKFGRRKMSRRIDLQRKLAKRLVEVAKELNTTIVLEVVPKNFNQKVTKRRRKSEKRLRDTLHNIGMNGFQRFVLEKAIEYGVPVVFVNPSYSSQVCPHCGAFKVKPDDDALRRRVFECPVCGFSLDRDFVAVLNLLGLFPFSPKACEPPVEDSVSPVMLVVEANLLHHKNSLVVVSECLQRK

SEQ ID NO: 62175 - protein, 438 aa, Thermococcus sp.
MKRAVTVKLQPSKEQEKILFELAYGTAIVWNKINYERLKQFREYGKIDFGTTEKEVYYAFKDWVGGSTVQQLARKNAEAWRSFFSLSKKKKSGELPEWFEKPSPPGFVRKRNGRKLFAIPLRNDQYKIRGNVIELRRLGKFGKLEIQFKGRIHLRGKQGRLEIIYDDVKRKWYAHLSLTVGEKLEYDGWVELPRRPKGNYSAGIDLGINNLMAVYVENGESFLVNGRPLKSIAFYWQKKIGDYQSRLNNSGYKTSRKFRRMHKKAKVQVRHYINTAVRQTVRKLYGLGVSRIIVGYPKGIARNSDRGRKQNYLLSHVWRFNYLIKRLTEVAEEYGIEVVVVDEAFTSKVCPLCGQRHSNGRIFRGLFKCRREGVVMNADLVGAFNILKKSVKTITPSLPALSGGRGNWGKTVPGGFEEPVLMGSLMRTPRTSLSLARG

SEQ ID NO: 62176 - protein, 453 aa, Ktedonobacteraceae sp.
MQQIITAKLKLLTTPEQLQALRETQLAYRGALNAVSSYAFEHGKTSSVTTLHKGMYTELRTHYHLPSQLACSVERQVASTYKGLWTKVKKNAEHRRKKITKKRFKGLDKPPKYSSPTVQYTYERDYTFQRESQISVRALNGRVSVPYQGYDKHIALIRQGTTIGDAKLWYDRQKKTFYLLVSLSIDVASPTYEQFTEVVGVDVGIRYLAVTSTSTGKAGFHPGKRTRHTANHYARLRKRLQHKGTRGAKRRLRRIEQRERRFKAQANHTIATQIITQHPQALIGLEQLTDIRERTKRKKRKRRKNGKGTEHISPKARKANRVYSQWSFAELQALISYKAVLSGSLAVRVDADYTSKACPMCGHTEDSNRPRKGLLFVCQNPACRYILHADLIGARNVTLRTLLIRQDWIRTGCLSIIPDASDKEAKAARLQRYAELRWSPEVTTSLPTEWGGH

SEQ ID NO: 62177 - protein, 380 aa, unknown
  TnpB Polypeptide
MKTIHIYRLDHLSPALFEHLREVQMEAAQVWNLCVSLHKEARMSHTRWPGRNELQQATKGRYALHSQSVQMIVHAFLANIETTRKLRREHPEMRMKYPWREKRFYPVHWPAQAVALEKGRVILPMGRGRPSIVLPIALPDNAGACTLVWNYGFELHVCVETEQAAQAPGAVQATVDLGEIHLAAVSTNAGKALIVTGRGIRSLKRGRAKQIGQITRKQSRCSKHSRRWKKLQRAKNKVCRREYGKDIDYLTHKSTQARISCFTGSERGTSSRCPRCGHKHKPKGRTWVCRKCGFRGHRDLVGSVNMHQDAFGVHLKFPRSFTYLRPGLLKTGKRSSRADTPLVSQETCCLEQPTAQPRIADTVSPEIGSPVRVVQKPIPF

SEQ ID NO: 62178 - protein, 375 aa, Desulfobacteraceae sp.
MKITRSSKTSVRFATKKKQEILNEILDEYGRIVNFFIDYFWEHSEIITKDEIKKEIYSLPETWFTARMRQCAAREALSMVHGAKNTENRRKSSAEREVEELLGYEIFNDPVKPVHNGKKMTLSSQTVRIEKSRNSFDLWLIISSVGKEIKLYIPLKKHRQFLRWENTGKTASSVVIHREYVQISFEVETGAKKEEGKTVGIDAGINHLMTTSEREFLGNDVNHLISKIKIKLQGSKAYKRAKKELSYYIHKTVKDYISNRELRLAVTEKLKDLKLNTKEKNKTKEFRKTLGNWNYRELLSIIEMRCEENRVFFRSVSPFMTSQRCPRCAHIQRENRRGEEFKCLKCGYSEQADFVGSLNIRDRFLTGRYGAGFKT

SEQ ID NO: 62179 - protein, 267 aa, Exiguobacterium sp.
VSIVGNRLKLPKLKWVRFANSKQVEGRILNATIRRNASGKYFVSLLVEQEIDELPKTGSTVGVDVGLKNFAILSDGTVYQNDRYFRTLEKKLAREQRKLSRRRLIALNRNIKLSEAKNYQKQKRKVACIHEKIANKRTDFLHKVSTEIVKNHDIIGIETLQVKNMQKNRALSKSISVVSWSEFFRMLEYKADWYGKTVVKVGKTFASSQLCSSCGHRHKDVKHLGLREWTCPGCGTHHDRDVNAGLNLKREARRIFASSTVGTTGLA

SEQ ID NO: 62180 - protein, 198 aa, unknown
  TnpB Polypeptide
MRRLNRELHRRKLGSRRRGQTRRRLARVHARAGMVRNRHLARALADAGLAGLRRQLCYKTDWYGSRLVVADPFYPSSKTCSACGWVKAKLTLAERTFTCEARGLRLDRDLNAARNLAMLAEHVAQSGWETQNARGADRKPQLAGQVAMKREAGGPGGREAGNAAFRKDASTRRSPAAGCPSASPWSASAGRDQAATVW

SEQ ID NO: 62181 - protein, 407 aa, Nonomuraea sp.
LSVVVGSLIGVSRYRLQPSPAQEAGLLEHCGHARYVWNLAVEQHMLWKPGRRSAPGFAEQCRQLTEARAAFAWLRTGSIIVQQQALKDFAQAMANYFGGTHRRPTWRKRGRGEGFRIVAVKAGDVRRLSRHVGEVKVPKVGWIRFRWSRAVPDEVKSYRVTRDRAGRWHVAFAAIPDPVPAPGLGEVVGVDRGVAVSAALSSGEMLHAPGLREAEKARLRRLLRKLARAGRGSNRRAEVKAAIARVKARESDRRKDWVEKVSTGLARRFDVVAVEDLKIGAMARSVRGTVEVPGRNVRAKAGLNRSILAAGWGCLVRRLEDKAPGRVVKVSPAYTSQRCSACGIVDRQARESQARYRCRSCGYAANADVNAARNIAHAAGHVVSAREGPRVAGPVHREPQHDLLLVG

SEQ ID NO: 62182 - protein, 450 aa, unknown
  TnpB Polypeptide
VRIRRSRFGIIFRISRKSKWKGGVFMQMVVQRGYVYRAYPTDEVKSYFMQCFGADRKMYNLHVDKLYSFLEDSQYQIGERVDIKALKAQMPTVAEFKKMITNPEGEKYLYEVDAFACNEAKQHFWKALSEFNKIVSRKQFQRKALKRKRTEGIEPTWRDLKGLPRFHSRKNNDYSYTTFNQNGNIFIDDCMLFLPTAQKSVLKKAAVRLRIHRPLPEGSTIKHVTVSMNAKGQFFVSLCMEFLKDIKEAGKLERFLGLDYSQSDFFVDSEGKKANYPLFMRKAEERLAQEQKKLSRMVKGSHRYEKQRQVVANLHNKVVNQRKDWLHKKAYALAKRYDVVVVEDLDLRLLSQNKRFAKKQQDNGFGKFRLHLQYKLEQQGKLFLKAPKDFPSTQLCSCCGYKNEALKGLTHIGIREWKCPVCHRKHDRDINSGKNLKQYGEKAVQELFTF

SEQ ID NO: 62183 - protein, 431 aa, Coleofasciculus sp.
MRYHRKLHKDLYNAAVSNRFTQYQKFGHKVDYFEQQNSLSAFKEVWIEYKECNCMTLQATLKRVDYAFGRWFKGLGKRPKYKSIRHYSGWTYPSKTGWKAHTTSNNGYLDLAKIGSIQMRGKARVWGTPTTCTIVYRNGKWYASITVELTELLLSARQTDFGAVGIDFGCKSALAITDGEVHSFVEAPKFLRKAEAQIKLLSKGKRRKVAPNRRKKQKASSRWKRTQSRISKVTRKVANQRSHWVHQVASDIVRCNSCALRAPRFANVATEKLEVSKMTRKAKKGKRKKQKAGLNKSILDVGVGMLRAAIQYKVIEAGGVFVEVPTRTVKPSQTCPNCGNQHKKTLDERVHQCHTCGFTLDRDLAAALVMLLWAQGKLPGFETNLVDADAASSTSDTCKRKQTGSQKQLGQMKRQKSKSTGLDAKTQTSTK

SEQ ID NO: 62184 - protein, 427 aa, Scytonema sp.
MSLVLNYTYRLYPDAEQEAKLLDWLEICRGSYNYALGEIKDWSNSRKCAVDRCSVSSEYIIAADAPFPGYYRQQNALPQAKKEYPRLGEVPSQVLQTNIRRLHDAWEFFQKRGFGLPRFKKYGQLKSILFPQIAPDAITGWQVKIPKLGLVRINLHRPIPEGFVVKQLRIIRKAVRWEAVITIESDVKIPTVQPHGRAVGIDLGLNKFLTTSEREFIGRPRFFVDKQRKLKLLQRRLSRKTKRSANYEKARSKVAKHHNNIAFSRKNYHYKTAHHLCSDKQVGMIFAEDLNLKAMSRGMLCKHTLDAAFGQFLNILEFVCWKKGVFFAKVNPNGTSQTCPMCLEETGKKDLSQRIHECYFCGYKTDRDHAAAEVVRQRGLELISTQGLCGMETACAVGLPGVEETSSRSEAKSDSRKGGRRTRNAQP

SEQ ID NO: 62185 - protein, 262 aa, unknown
  TnpB Polypeptide
VFDMVSGRAIRAESYLHLEDQKARHAKAARRAPKPGQRGSRRWKRHRARLRRVEARHRRRVHLAQHQAAKQVIAFAVQQKVGTLVVGDPKGITEHDAGRVHNLRLRRWRRTHLLQALRDKAELAGITVRLVDERGTSSTCPACQRRVPKPKGRRFHCPHCMLQGHRDLVGAHNIAAKAGGGPTSTDLPVLIEHRRAGRMPARRDRRRHLHDQQRRRSCLTLGHPPASHRGRGCRSSDVGLSSSTGEDQAALPNRQTLPEGAL

SEQ ID NO: 62186 - protein, 411 aa, Moorea sp.
MLTLTYEYKLIPSPKQIAIIEEILAGCRKVWNYALQERKDWINSRKCDVNSCSIEKEYIIPGDAPYPGYKEQAARLTQAKKSNPELKKINAQVLQQVLRNLDRAFKNMKAQGYGFPRFKNKYRMRSFVFPQFSSNPIKRDGIKLPQIGRVKIRWSRPIPEGFQLKQVRVVRRANRYFVMLALQSNVDIRDHPPSGHPLGIDLGLDKFLATSDHELIERPRFLTELHSKLKLLQRRLKLKRKGSSNRHRLNQKIARLHQKVSDTRKDFHFKLAHHLCDQAGMIFVEDLDFRTWAKGMLGKHTLDAGFGQFLTILSWVCWKRGVYFAKVDYRYTSQICPDCGAHTGKKDLSERLHQCPECGYECNRDVAAAKVICQRGVTAVGQIVEEIDCVGVLSGTRKSLDKCRKNSKPKS

SEQ ID NO: 62187 - protein, 576 aa, unknown
  TnpB Polypeptide
MVLSIASSKNFNKRKAHKHYITLECMLEFGKEEEKEKALTLMRKFSSAMRYAYKRLLEKVTEKEIEKAIQEKHKLNSRYTKDAVLIAKGVLSSCLQRGQNPKKLVFGSRELFEKLKKNHLTGKHREKLRQKWEERRYCYIYSRGEKSKSGNLNLRLVNLNNQWYLRINLGNSEYVLAKVIRNTKRRKDKWIDFTWRLLEAERLGEWFAYNVMLKVRNGKFYTQVSYEENIIKPMITKANGVIGIDINAERQRRISMLGNRHRHSKDLRTAQGTLYPFHLALAYVSTDGNLEKFERIYLMEMEDKTKNQREHITWHIAREVVERALESGKAIVVEDLQKLPKGKRGDGLAKLRRKLHRWSYKAILDKIEVYARRLGVQLIKVNPAYTSIIGKLKYSPMLSIDKDIAGAYVIGRRGLGFEKKLPKNYKELLKDKEFLAYAIAKVEERINNLKRSLKKETNEYKKNALKKRVKRLRAFLKLLLSYTQDSGKSEPVAQQAVNREMKPMRGMAKSLQKSWQVLSVALASLRATTCLEWCRDHSPLKRVLISGDWVKVAGKGSPSLLGQGMAASNCSFIHFG

SEQ ID NO: 62188 - protein, 411 aa, Acidobacteria sp.
MRQLQFLNSLAVEDTAAVFGYQDQMNMHSKHAVSIVPKVLAFVHTPDHHARMERRQAFRFELMPNGEPQRRMSRLAGCARYVYNQALALKQERYEKKEKLTRFQLDKLLVEKGIGDSLRESDPRCIKLDQVNRRIQLPKLGWVRYRNSREVLGEIPSATVSLSAGQWFVSISTRREVEPPVHPSRSSVGLDWGVARFYTLSDGEYQDQLQSLKRFLPKLAKLERRLAGKKKFSGNWKKAKAKITKLHSKITHIRKDFVHKASNDISKNHAVVFVEDLPGKNMSTSAQGTKAKPGKGVRQKSGLNRSILDASRFELRRQLAYKTQWNGVLLVPVPPQNTSRRCPRCRHTSTENRQTQAKFVCVKCGFSAPADWVAAINIKEAGLASLACSSSWHARSASCQEPTEDMVCASV

SEQ ID NO: 62189 - protein, 421 aa, Okeania sp.
MLNLNYTYRIYPDQKQVELLNEWLETCRVTYNYALRELKDWIASRKCPVDRCSLESEYIMSADYPFPGYQQQQNKLPKAKKEFPRLAAVPSQVLQTTIRRLQDAWDFFQNRGYGFPRYKKYGQMKSILFPQFSTNPITGWQIKLPKLGRVQINLHRPIPDGFVVKQVRILKKAMGWFAVIAIQSDISIPEPEPHGHFVGIDIGLNSYLATSDGFTEPGRKFFATEHRRLKVLQRRLSKKKKRSANYETARIKVEKQHNHIGFKRKDYQFKLAHKLCDMAGTIFVEDIDFRVMAKGFLGKHTIDAAFGQFRSILSYVGKKRGVYVAEVDHKGTSQTCPNCRIEVRKELSDRWHSCPECKYEVDRDIASAQEICNRGYEALSTQGLWGKEIGCQVGLSGAFYLDKWRRAAISNSDVGSPRFIY

SEQ ID NO: 62190 - protein, 421 aa, Okeania sp.
MLVLNYTYRIYPDQKQVELLNEWLETSRSAYNYALRELKDWIASRKCPIDRCSLDSEYIMSADYPFPGYQQQQNNLPKAKKEFPRLAAVPSQVLQTTIRRLHDAWDFFQNRGYGFPRFKKYGQMKSMLFPQFKVNPITGWLLKLPKLGKVQINLHRPIPEDFIVKQVRILKKAMGWFAVITIQSDISIPEPLPHGHFIGVDVGLDKYLATSDGFVEPGRKFFQTEHSRLKVLQRRLSKKNKGSANYEKARIKVEKQHNHIAFRRKDYQLKLAHKLCDMAETIFVEDIDFRTMAKGFLGKHTVDAGFGQFRSILFDVGKQRGVYVAQVDHKGTSQTCPNCRSLVRKELSNRWHSCPECKYEADRDVASAQEICNRGYEQLSTQGLWGQEMGCQVGLSGTFCLDKWRRAAMSNSDVGSPHCTS

SEQ ID NO: 62191 - protein, 381 aa, unknown
  TnpB Polypeptide
MQRKAFVYRLYPSRTQERLLDSTLETCRRFYNDCLAERKTAWEEEQRSVGKTEQLRHVKVYKTTNPWAKTIHSHVLQTVVQDLDKAFDAFFRRVKAGESPGYPRFKGRNRWRSFGLKELGNGFRLDGRRLKLSGIGRIAVRWHRPRAGQIKTLRVSKKAGKWFASFSCVVDTPAPLPATGQGVGIDVGLSSLITTSEGERVGHPRFYRKAQRKLRVCQRRVARRKKSGENRRKAVLMLQRQHERIRNQRKDYLNKLAHDLVMRHDRIALEDLAITRMVHGNLAKSILDAGWGYLVQRLHDKAESAGRVVVLVDPRGTSKTCSGCGATFEGLTLADRWVTCGCGVSLDRDHNAAINIKNRGGQLRWSSSSPRGGLGQEAAPR

SEQ ID NO: 62192 - protein, 420 aa, unknown
  TnpB Polypeptide
MKTTEDKKNKIKQSLQETREKRKTQRCCVFELKIDYSKLNKIQKESLKMYFVEAKWLYNFFLSNDDIFKQSNKIYKVLTKNKEGEFVEKELKFLPSKLKQSILYQLRQNIINLSKVKKNKHGKLKFKKEINSLDFNQYENTHRIIDKKRIKLTGIKKPLIIKGLEQIRDCEIANAKLIKKASGYYIKLTCFKNLLEKDFNFINKKGDIGIDFGIKDNIITSNGEFFNIKIQEDESLKRLQKRLSKKKKGSKNSYKMKFKLRRKYEKISNEKQDKVNKIVNYLCLNHNTVFMQDENIKGWYAGLFGKQVQRSALGSLKSKLSKQNNVKIIDRFLPTTKLCFHCGKKLDIKLSDRIFKCDCGYEEQRDIKAAKTILYFGRFNLNYIPVERRELTLLEKKTSKNESNDSNLSYASLKKEAKVL

SEQ ID NO: 62193 - protein, 379 aa, Endozoicomonas sp.
MKIKRAYKERFYPTPGQTQLLAQSFGCARFVYNDTLRFRTDAYYKDGSSISHSQAEKRLVSLKSEFPFLKDVSSVILQQTLRDQQEAFKNFWAGRAKYPKFKNRNARQSIRLTKAAFSVKNGQLFIAKSKEALNIRWSRELSSEPSSITISKDRAGRYFISMLCEFEAKPMPISNKTVGIDLGLNDLFITSDGEKSGNPRHTKRYERKLAYLQRKLAKKQKGSSNRAKAKLKVARLHAKIADCRMDATHKASRKLINENQVVCAESLNVKGMIQNPKLAKHIADANWGEFVRQLQYKAEWAGRLVVQIDRFFPSSKRCPSCGFVHESMPLSVREWDCPECKTHWDRDIAAAINIKTAGLAGLACGATGTGIAALVPFRV

SEQ ID NO: 62194 - protein, 387 aa, unknown
  TnpB Polypeptide
MAQEMKAFKYRIYPTKKQQQTMLQTLDTCRRVYNYFLAQRKDNWEQTGKSISCFTQVKEIPKLAIKDDALDSVYSQTLQDVARRLDKAYQAFFRRIKTGDKPGFPRFRGKGWYDSFSYPQDNGSFKLIENNTKLKLAKIGCIKIAYHRAFQGVIKTCTVKKTPTGKWFVIFSCDNVPTEYLPHSDLKVGIDAGLKTFAVLSDGTEIKRKRFFKTDEAALAKTQRKLAKQAKGSSKRKNAKKVVAKIHERIHNRREDFAHQESRKIVNKYGVICVEDLDIPSMLQGKTIEVNGVIKDARPTHRSIADVAWRSFHNKTGYKAVNAGRLFVKPNPRGSTQDCYGCGEPVPKDLGTRIHNCPHCGLMLDRDLNAALNILTAGLRSLAVKTA

SEQ ID NO: 62195 - protein, 366 aa, Pseudomonadaceae sp.
LKTIAYQYRFYPNKEQVILLAQTFGCVRFAYNSALAFSKEQYELGNKTNYNDWSKNLTLLKKNPDYAWLKDVSSVPLQQALKHLDKGFKSFFKSGFGYPKFKNKHARQSAHYMSNAFKWDAGTKSLTLAKMKQPLKIKWSRSFTGTPSSLSISRNKAGHYFVSILVKEEVESLPFTSKTIGVDVGVSNLAVCSDGKIFNNPRITKKYAKKLAKAQRQLAKKKKGSNNFKKKKRVIAKVHQKIANARKDFTHKMTKTLINENQVISVESLRVKNMVKNRKLAKHIHDANFGEILRQLEYKAAWYGRKVSAISQWFPSSKLCSCCGTMYEGKWSLAIRNWSCACGASHDRDQNAAINIHKEGLIDMLA

SEQ ID NO: 62196 - protein, 253 aa, unknown
  TnpB Polypeptide
VILHRPIPDGFVIKTCTVVHKADGWYVTLSLSDDTVPAVSPDINLEKTVGIDVGLKDFLVTSEGEVVPIPQFARKSEKRRRLLNKALGRKRKKGTRRRQKAGKQLSKHYQKVARQRKDFHFKVAGQLLKQYDVIAHEALNIKGLAKTRLAKSILDAGWGEFIDIVTAKAERAGRLTVAVNPSGTTQNCSGCGIKVPKTLADRWHSCSHCGAELDRDLNAAINIKNLALGHWVSKAQRVSEAVAGVVEKPRLTA

SEQ ID NO: 62197 - protein, 377 aa, unknown
  TnpB Polypeptide
VAVKLDVGHHAPVLAETARRFNAAATWIASVCWVEGITNTNTAHHRVYGETRASFGLGAQLAVCARAKAMEAIKAERKKGGDACPVLGPTAAVRYDARTYRLLSLDGVSLNTMRGRVTCRMLPGQRQRDMLLEAGWAIGGADLVQRRGVWYLYLTHHKPTPTPDEPTGYLGVDLGITYLATDSDGNTYSGTQVTAVRARRFRHRQRLQTRNTRRSRARLRTQAKKEARFQRDVNHRISKHLVAKAKNSCKALALEDLTGINERTKTMVRHEQRRERMGWAFYQLRQYVTYKAAQAGVRVVLIDPRNTSRTCNVCSFCDKRNRRDQSHFHCLQCGHTTNADVNAALNIASRAAVNPPIVLPTPPGVHREHKPRAVALG

SEQ ID NO: 62198 - protein, 428 aa, unknown
  TnpB Polypeptide
MITMNYRYRIYPDATQQDTLFGWMEVSRSVYNYALREIKDWFNSRKCMVDRCSIVQEYILPADLKFPSEVNQLNALPDAKREFPRLAEPPSQVLQQTIKQLHRALENFQGRGFGFPRFKKFGQLKSLLFPQFKESPVAGFHLRLPKIGSIPINLHRPIPKGFVVKQVRIIKKADRWYASINIQCDVNIPSPMPHGYPMGIDTGLSKFLATSDGVLVKPPKFFKSLQSELKLLQRRLSRKQKRSKNYEKQRLKAARLHHTIDNTRKDFHFKQAHTLCDAADMVFMEDLDYRTMAKGMFGKHMLDAAFGQFRNLVKYVCWKRGKFFAEVDARGTSQECPECEGEVKKDRTRAVAFRNLSVRIHCCPHCGYTTDRDVASGQVIRNRGIALISTDGQSGTERVCAVGLPGAKETSSRSEAKPRKGTTRKASK

SEQ ID NO: 62199 - protein, 424 aa, Bacillus sp.
  misc_feature (271)..(420): Xaa can be any naturally occurring amino acid
MILAKKVRLIPTPEQEKVLRNHAGAARFAYNYCKRMSDRYYKLFGKSVSQLALQKRFTKIKKRKRYEWLNNINAQVPKQASKDFDKARKHSFKKYKNSYHTSYKSKKDLMQGFYANYERLIIGKKVVHIQSIGEVKTSQQLPRNKKSSNPRVTFDGRHWWISVGFEESFEAQELTNESIGVDVGLKDLFVASNGMKERNINKDAKVKKLLKRKKSAQRDMSRRFKKGVKIQSAGYEKAKAEHLRLSRKITNIRNNHIHQATAKLVKTKPMXXXXXXXXXXXXXXXXXXXXXXXXXXXXXXXXXXXXXXXXXXXXXXXXXXXXXXXXXXXXXXXXXXXXXXXXXXXXXXXXXXXXXXXXXXXXXXXXXXXXXXXXXXXXXXXXXXXXXXXXXXXXXXXXXXXXXXXXXXXXXXXXXXXXXXYRFS

SEQ ID NO: 62200 - protein, 345 aa, Clostridioides sp.
  misc_feature (279)..(345): Xaa can be any naturally occurring amino acid
MYPNKKQQELINKTFGCCRFVYNKYLAKRIEVYKNAKETFTYKQCSSDLTNLKKELNWLKESDKFSLQNALKDLDNAYKKFFKEKAGFPKFKSKKINRFSYKTNFTNGNIMYCGQHIKLPKLDMVKIRDKQVPKGRILNATISKEPSGRYYVSLCCTDVDIEAFENTNNQIGLDLGIKEFCISSCGEFIENPKYLKKSLNKLAKLQRELSRKTIGSLNRNKARLKVARLQEHIANQRNDFLQKLSTKLIKDNDIICIEDLQVKNMIRNRKLSRLISDVXXXXXXXXXXXXXXXXXXXXXXXXXXXXXXXXXXXXXXXXXXXXXXXXXXXXXXXXXXXXXXXXXXX

SEQ ID NO: 62201 - protein, 377 aa, unknown
  TnpB Polypeptide
MLKTFKYRLYPNKNQANLLQQSFGCVRFVYNWGLAEKTKEYNNTGITLSCFDLSVKLAQELKKQHDWLNIPYSQCLQMSLRNLDNAYTKFFNKECKFPKYKKKGQCRKSCQYPQGVNIDWCRNYIKIPKIGKVKVVLHRKFTGKIKTVTVSQNAAGQYFIAVLADSNDATQIKSKIDHNNAIGIDLGLKHFTCDTNGHKTQAPKPLKKVVKRIARLNSLKSKMRKGSNNKKRLQLKINKLYNKAKNIRHDFLHKLSHKLIRENQTICLETLGIQEMLQKSHVSGDISDVSWGIFIEYLKYKAEWYGGNILQISPFLPSTKLCSECGHLENGLTLSERKWTCAACNILHDRDINAAKNIKHFALVGNQPKSPLKREVA

SEQ ID NO: 62202 - protein, 402 aa, Escherichia sp.
VKRLQAFKFQLRPGGQQEREMRRFAGACRFVFNRALARQNENHEAGNKYIPYGKMASWLVEWKNATETQWLKDSPSQPLQQSLKDLERAYKNFFQKRAAFPRFKKRGQNDAFRYPQGVKLDQENSRIFLPKLGWMRYRNSRQVTGVVKNVTVSQSCGKWYISIQTESEVSTPVHPSASMVGLDAGVAKLATLSDGTVFEPVNSFQKNQKKLARLQRQLSRKVKFSNNWQKQKRKIQRLHSCIANIRRDYLHKVTTTVSKNHAMIVIEDLKVSNMSKSAAGTVSQPGRNVRAKSGLNRSILDQGWYEMRRQLEYKQLWRGGQVLAVPPAYTSQRCACCGHTAKENRLSQSKFRCQVCGYTANADVNGARNILAAGHAVLACGEMVQSGRPLKQEPTEMIQATA

SEQ ID NO: 62203 - protein, 366 aa, unknown
  TnpB Polypeptide
MTLRAYKYRFYPNSEQAEMLDHTFGCVRFVYNNALAFSKEQYERGNKTNFSDWNKNLTQLKNNPDFDWLKNASSVPLQQSLRHLDKAFKAFFKSGFGYPKFKSKRNKQSACYMSNSFKWNAKTNSLTLAKMKKPLKIKWSRSFVGLPSSCYVSKTKTGKYYISILVEEEICKLPESNKTIGVDLGIKDVAICSDSTVFNNPRTTKKYERKLAKEQRKLAKKVKGYNNFKKQRSKVAKIHEKISTVRSDFTNKMTAKLVNENQVICLESLKVKNMVKNRKLAKHILDANFGEIERQLKYKSDWYGRTLSKIDQWFPSSKMCSCCGALYSGKWSLAIREWTCDCGQKHDRDLNAATNIHIEGLRLLAV

SEQ ID NO: 62204 - protein, 372 aa, Aeromonas sp.
MTKRAYKYRFYPTSEQATLLAQTFGCTRFVYNHILRWRTDAFYQHQEKIAYTQANARLTALKKEPEYLWLNDVSSVPLQQALRHQQAAFKNFFEGRNKYPTFKSKHHKQSATLTDAAFKYREGQLYMAKSKEPLAIRWSRPLPCEPSTVTISKDAAGRYFVSCLCDFDPEALPITPKMVGIDLGIKDLFVTSNGNKVDHPRHTAKYATLLARAQRRLSKKKLGSANRAKAKAKVARIHAKISDCRQDNLHKLSRTLINENQVVCVESLKVKNMIRNPKLAKAIADASWGEFVRQLSYKGEWVGRSVVAIDQFFPSSKRCSCCGYTLSKLPLSVRDWECPECGEHHDRDHNAAKNILAAGLAVKACGENVSLV

SEQ ID NO: 62205 - protein, 398 aa, unknown
  TnpB Polypeptide
MIKSYKYRLHPNKAQAEFFEKSFGCVRFVYNWALNQRIEAYQKDGMRIGWVESCKRLTELKKQEETKWLCEVANQSLQSSIRNMDSAFTRFFREKKGFPKFKSKKKSKSTFQFVEYVSIDFKNKLLKLPKVGSVKFGRSREFVGKIGTCTVSKTPTGKYYISILVDDGIPMPEKSPITTETAVGIDVGIKDFAVLSNGQVYSNPKFLEKDEKRLKVLQRRLSRKQKGSNRRERARLAVAKQHEKIKNHRENFIHQVTSRIVRENQTVIIEDLNVEGMLKNHNLAKHIASASWSEFFRQLQYKCEWYGKNLIRIGRFEPSSKMCLCGYINKDLTLKDREWDCPHCGRHNDRDLLAAMNIKRFGLQKQNLIGEISPVVNGAEDVEPLTLVGAVKRQYTKM

SEQ ID NO: 62206 - protein, 428 aa, unknown
  TnpB Polypeptide
MAMTDEQRLAKNASIKEAMKATHEKRKSQVCRVYMLKVQKNSLSARQREDFRMLFLEAKWLYNDILNYGNVKGQSVFDYELDDDVEVKLPDGTFEPRVLSHIGSQMKQSVYADLKSSIKALAKLKKTGHKVGRLKFKSEIGAVSLKQYGTTYKFNNDHRVKIQNIHGLVRVNGLDQIKDDVEFANAKLLNRADGYYLAVTTYTERKPYTDRPRADVGIDMGCHTSITLSTGEEIDVKVKEPERLKRLQRKQHRQKKGSNSRRRTIHRIQKTHQRLVNRKNDRANKIVADLNSRFGLIYIQDENLSGWQQAGHGKAVQHSCLGRVKARLKAQDNVYVVNRWIPTTQQCINCGDKHPMPPEIRTFECECGLCMPRDLHSANRMVQEGRKLVPPERREFMRADWWTSILPYLGQGKSCRDDARSSHPLGCG

SEQ ID NO: 62207 - protein, 332 aa, Chloroflexi sp.
MAKRRTLICLRFSSIPRSNAFIAPSPTSFVVSKKVARLAFPASKVPTPGIPYNSVTPPTAWTMDGLRLLCNVGGRLRVIVHRPLEGTLKFARIVLRPSGWYLQCVCETPPHPLLKKENAVGLDMGIRYLVADSHGHLIDNPKHARKTAKRLAHAQRTLARGKKGSHRRKKAKKKVARIHEHIANQRKDTLHKASRYYVDGYQAIVIEDLHVSNMVRNHCLAFAIADASWGMFRQYLEAKAESAGRQVIAVRPHYTSQKCSSCGEYVEKSLSVRTHVCPFCGYIADRDENAARNILQRGLQVLARTGPSSSRREGPEPSGESPSALKREAAGL

SEQ ID NO: 62208 - protein, 252 aa, unknown
  TnpB Polypeptide
VEYRRTAVIKLDVPQDADASLRETVGQFKHCANTASEWCWHGSDDGYHVTSKAKAERALYDQLRDETNLTANLVQKGVRRAVEAVKSGVARLKRGERTSQPYFSADSAVYDKRSATFYRDHVSLSTVNGRVKCDYTLPDDPDRHPRTYLEDEDYEFRMANLQRRDGEWFLHASMRKVEADDPEPDTEHRTVLGVDLGVNNIAVASTGTFWSADEFNHWRREYEKCRSSLQQHGTRAAHEAIEGVGRKGVRTL

SEQ ID NO: 62209 - protein, 217 aa, unknown
  TnpB Polypeptide
MSLTIGVGSTKSAVARFNSTEREPHTKPSKASVAKEYGRFEIYLHGVANELIEEAVEYGCSHIVFEDLTHIRENIPKATWQHVWAFRRLFQYVEYKATEHGVGAVQVPPNHTSQRCSTCGCTREDNRDGEHFECLKCGYQNHADYNAAKNIGFRYLRRRQNAADGGAPVDVALNRGMLNVSGEYAPPATTDGGIERESTRKPPLNERGRQTERSRVG

SEQ ID NO: 62210 - protein, 519 aa, Lentzea sp.
LLLDVLTQATERGAADGPGEVRTRPELGGPVVVPSQVWEFLPHPAAGDSLEGVDQLRQGDFGRKVHEQVDVVVLAVELDQLGLEVGAHQTQCLPVRMPSRSAITQWVRWRCAAPLQLPDVPGRQAARGAGPVVRVRQGGVQRRTQAAPAGTGERREARLGRGPVQAGHHPGQGHTATGVAGRGVVGGVAAGPRGLERGVPQFLRLHLRQAQGSHGRAAPIPVAQGQSAGHPVHQEQSVQGAGQRSAPVAEDRGRGGPLVSQPAVRGQLGHGDPGRGRPVLRVVRSTDHGRTVAGDRLGSRHRPGAHPLRVLSDGTKVAAPKFLRRAARKLKRLQQDLSRKTKGSNRREKAVVKVARAHARVADTRRDWQHKLSTAIIRDNQAVYVEDLCVVGLGRTRLAKSVHDAGWAGFTSMLEYKAARHGRTFARVDRFFPSTRMCSDCGRINEKMALDVRSWVCPCGSTHDRDVNAAQNIKAAGQADFNDRGAQVRPAVMPAPRDEAVTHPDAACSTRSVEGISVL

SEQ ID NO: 62211 - protein, 422 aa, Pseudobacteriovorax sp.
MKTYVEKVDLPKDKLIVLKAMCNESRRLYNSSLFQVRRHYKENDKAYLSYPKVDKLMRETQPHIYRRLPSQVAQNTERKLHQAYNSFFELLKLKNQGKYDAKVRQPKYKKDRRLFSIYFGTRTFFREGGKIRLTISKFHRNIFGIRFLYIPFPRHLESHDLKEVEIVPKGYGRFEAHFKYDSPVYGPIQKITRKGSLSIDLGISNLASCVSTKGDAFLVKGLKLKSINRFWNKRTANLESSKAKERHKILKMMLENDIAQITFKRNRQVKDFLHKASYQIVEYAVREKLESIVVGKNIGWKDSINIGKKNNQTFVQIPHAKLIDYISYKAKKHGIKVVEQEESYTSKCDSLVLEGIQKHSQYLGKRTRRGLYRSSTGVVLNADMNGAINILRKAKKSKRESELLAEITCMGRVFRPWHLAVS

SEQ ID NO: 62212 - protein, 356 aa, Desulfosporosinus sp.
MKKLFNGKTHKLHAQTIQATIELHQETCDRTRKQRAQGKLNWKYPWRYKQFFSVKYKKIAFRHLEKTDSIVFSNGRNEEPLVIKRPKHISFKSIHSAEIVWTYNQYWLHLAIEKPKPIKIKNSGCAGADPGEIHALTLTDGKVHLILTARELRSLYRTRNKVLAQLSKKISKKLKGSKAYWKLVRRKQNFLAQISKKIEYVMHCLSKMTIDWCVERGIKKLYLGNPAGVQKSSHNKRSRKVNQKLSNWPFGELRKMLDYKAKRHGIILERINEAYTSGTCPVCGTFTKQHSRNYVCPSCKSIGHRDVVGSSNIRDKGMNGEITAGREMPKYQETKYRRVEVCPHLRQWRSALDWAA

SEQ ID NO: 62213 - protein, 439 aa, unknown
  TnpB Polypeptide
MERVRIVSLKGIRKRQSATIRAGQMEAARVWTACRDAHLAARQEHGKWPNRDALQKATKGRFALHSQSVQMVTHAFLANVDTAQQLRSQGRAEIRYPYKDKTFYPLMWPAQAMHLEDKRMVLPMGRGRPSLILPKPEWLDQPRACKIVWNGLHNELHISVAEDTEEAPLLEPTHKHATVDLGQIHQAAVATNEGDALIVSGRGIRSLKRQHSKQLGEIASKRSRCQKGSRRWRKLGKTRAKLTLRQERRVRDLRHKGTRQVMDFCKEREVESVFVGNPDGVRRKNSGRHHNQRMSQWEYGKDIDYLQQKSEQDRIVCFTGDERGTSSRCPVCGHRHKPKGRNWRCKACGFEGHRDIVGAVNMHPIAYGQVVPFPKRITYLRPGSLRRSSSPGTGHRPDLSGRRCLAEARNQAPQDVCAGSLEHAHEPCHSARSLPALAG

SEQ ID NO: 62214 - protein, 376 aa, Bacillus sp.
MTKHNKAYKFRLYPTEEQANLIRKTFGCVRFVYNKMLAERKKVYEKYKENKEELKKQKFPTPAKYKVKYEWLKEVDSLALANAQLNLQTAYKNFFSGQSDFPTFKSKKSRKSYTTNRVNGNIMLFHGYIKLPKLKLVRLKQHREIPQNHIIKSCTISLTPTGKYYVSVLTEYEKEIVQKEVESVVGLDFAMAELYVSSEDEKANYPRFYRQMLNRLAKAQRVLARRVKGSVRWNKQRICVAKLHEKVANQRKNFLHHKSKELATNFDVVAIEDLHMKGMSRALRFGKSVADNGWRMFTTFLAYKLQEQGKQLVKVDRWFPSTKMCSNCGNRKDMLLSERTYECSCGLTISRDYNAAINIKREAIRLLASDSVNSTK

SEQ ID NO: 62215 - protein, 442 aa, unknown
  TnpB Polypeptide
MQIISSYGVELRKQNIPIRQTLEIYRSAVSYLIGIYVQVWEELAEIPDAKRRFNAAEHLVHTTKKNHACFDFDIRFPKMPSYLRRSAIQHALGTVSSYKTRLDLWEKTDGKSGKPKLVYENHAMPVFYRDVMYREGAEGKDEAYLKLYDGHDWKWSCVRLDHTDMEYLRKCWSGKKASAPTLEKRHQKYFLRFSYKEEVTLTKTPVKEQIICSVDLGINTDAVCTIMRADGTVLGRRFIDHPSEKDRMYRTLGRIRRFQREHGSAQTQGRWAYTKRLNTELGKKIAGAIVRYAEENHADVIVFEYLEMQGKISGKKKQKLHLWRKRDIQKCCEHQAHRKGMRVSRICAWNTSRLAYDGSGVVTRDWENHSLCTFQTGKRYHCDLSASCNIGARYFIRELLKPLPATERSLLEAKVPSVKRRTSCVYADLRKLHSEMEFLKAA

SEQ ID NO: 62216 - protein, 421 aa, unknown
  TnpB Polypeptide
MLKGIKIRLYLNKTQENQINSLLGSYRFVFNQCLAHKKNLYDVEKKNTSLSDLGHYFHQNLRNENVWLKEHNTKVLKQSIMNLEVAYKNFFKQHKGFPKFKSKHDEQKARFPREAISSKTFNEDFSKLNLTTTIKGLKFECSKRDKNYLYKNKSGIKSITIIKTKSGKYFVTVLIDGDLLRNVNKPTNSIIGIDLGIKTLLTFSNGETVDNPRWINTNEKKLKKIQKQLSKKVKGSNNRNKVRLRLAKLHESIKNQKQDFLHNITAKIINENQVIVLEDLNVSGMMKNHKLAKSIQELGLYEMKRQLEYKSKWYGRELILVSRWFPSSKTCCKCGWKNDNLTLKDREFICQECDNAIDRDMNAAINIENEGKRIYNEQIGTRYPEFTLVDNPTMDDRLGNEALKSSGWMRQEERTTNTNFL

SEQ ID NO: 62217 - protein, 161 aa, Burkholderia sp.
MTGMIIVYRYRVKSLNGLFNKQSRAVNYVWNFSNDTRKHALDLVRRFDYIAMGNVSAAKLARTRMAKSVYDAAWSSFRDKLRYKAIAHGAMFEEVDESGSTQSCSSCGSKDSTTRPKGIAGLRVREWTCSGRGVVHDRDTNAALNILRCGRASPAVGILRL

SEQ ID NO: 62218 - protein, 449 aa, unknown
  TnpB Polypeptide
MSAAGLTSSEKDLMPYWNSFCLDMSQKLLSHTETGCVGSDTNLLNLLPKSSIAESWFSTKVSYHHKQNLSTTCFQSFTSSLADCADLESTVVRSKKIRIYPKNRQLARKYLGLSRWWYNRTINYLRQPDTKASLYDVRKVVQKGDDIPEWAMDCPQRIREHAMSDACNAVKNAKAKYLKTGKIQQVSFRAKRDSIQSFAFDKVSLNQDFVFGSKKFKLEFEASEPFHTDLEGTRIVREGSRYFVIIPQKLPYQVPENQRIDAVALDPGVRTFMSFYSEVLHGKIGEGDFQRIYRLCLNLDELVSLISKAKCKQKRRLKQAAERMRWKIWDLVDELHKKVANFLVRTFDRIFIPTFETSKMVKKLASSTSRNMLTFAHYRFKQYLKARGQQAMCEVIEVSEAYTSKTCSYCGKMHKIGSKKRMKCSCGADVDRDLNGARGIFLRALSVTT

SEQ ID NO: 62219 - protein, 402 aa, Escherichia sp.
VKRLQAFKFQLRPGGQQECEMRRFAGACRFVFNRALALQNENHEAGNKYIPYGKMASWLVEWKNATETQWLKDSPSQPLQQSLKGLERAYKNFFQKRAAFPRFKKRGQNDAFRYPQGVKLDQENSRIFLPKLGWMRYRNSRQVTGVVKNVTVSQSCGKWYISIQTESEVSTPVHPSASMVGLDAGVAKLATLSDGTVFEPVNSFQKNQKTPARLQRQLSRKVKFSNNWQKQKRKIQRLHSCIANIRRDYLHKVTTTVSKNHAMIVIEDLKVSNMSKSAAGTVSQPGRNVRAKSGLNRSILDQGWYEMRRQLEYKQLWSGGQVLAVPPAYTSQRCACCGHTAKENRLSQSKFRCQVCGYTANADVNGARNILAAGHAVLACGGMVQSGRPLKQEPTEMIQATA

SEQ ID NO: 62220 - protein, 414 aa, Planktothrix sp.
MYLTQKCQIRDLSKQEFLALRELCRLSKNLYNVGLYSVRQFYFSEQRYLRYESNYHQCKDNENYKLLNTDIAQQTLKVVDRSFRSFFNLIKAAKQGLYRFEQIRLPKYLPKEGYFPLIMPRIKVKNGGFEVPMSNAFRKEFGSIRLPFPERLNGKTLKEVRILPKYNARFFEIEYVVEAEPEPQDVNPDHAIAIDLGLDNLATCVSTVGASFLLDGKPLKTVNQWFNKENARLQSIKARQKIKGTTKRQATLTLNRNNFVRDYLNKSARYIINWCIEHKMGTVIVGVNPGIKQEINIGAKNNQNFVQIPYWSFRQKLKNLCERYGLKYQEQEESYTSQASFLDGDDIPVYNPDPSQKYQFSGKRVKRGLYCSQQGHLINADCNGAANIGKKSSHNGFTGVGRGCLTQPLRVKIS

SEQ ID NO: 62221 - protein, 435 aa, Planktothrix sp.
  misc_feature (287)..(427): Xaa can be any naturally occurring amino acid
MIKVTRTIKLKFAKLNRCQAQMFEQMTEENTQIANKLLSLPIKERRKMTTAKIMSELKSALVNQVIRHTTSPTGRKTKQYKVLPVEVNNQNWKLTQRGNTYSISFPTLKCEKRIPIEVVSAHWQTILDGLLEGTIQGGSFKLIKHRNKWYVYLSITEDVPEVETEKRLGCDRGQNNLAVVAPKEGFGKFFNGQSVKHRRRYFQQRRQQLQEAKKFRALKKWNKKEQRWMEAINHTISRRIVRFAEFHNADVVIEDLEGCRNTMKQRQKSRSDSGQSRHSWSYYSLEXXXXXXXXXXXXXXXXXXXXXXXXXXXXXXXXXXXXXXXXXXXXXXXXXXXXXXXXXXXXXXXXXXXXXXXXXXXXXXXXXXXXXXXXXXXXXXXXXXXXXXXXXXXXXXXXXXXXXXXXXXXXXXXXXXXXXXXXXXXXXYNRGNPKN

SEQ ID NO: 62222 - protein, 219 aa, Planktothrix sp.
MEKAFNYRFYPSPEQESLLRRTLGCVRLVYNKALHERTQGLKRAQKNLSRKQKGSKNREKARIKVAKVHLKIADSRKDFLHKLTTNLVRENQTIAVESLAVKNMVKNHKLALAISDSGWSELIRQLDYKCLWYGRNLVKIDQWFPSSKRCGNCGHTMDKLPLNIREWKCPKCEVIHDRDLNASKNILAAGLAVSVCGATVRPEQSQSVKAGAMKQKPKS

SEQ ID NO: 62223 - protein, 511 aa, unknown
  TnpB Polypeptide
MAKAIATIREALCYPPQYAQYFAENAVLFNRVVAFYFSCIQAHEGILSHSNQQALTALEKLTHATEANPNPVKPLRDLAPDIPAMFRRAAINAALGSARAFFSSLKKWRLRKEKYEARPARKGKKKPFRERPPVPPRTWNKSVPFYATQWKERADHSIMLKVWTGSCWSWLKVHTLSRDLPKGFEMGSPSLVRRGKNWRLHTPIEKTFTAPDKVERQITTNPETKICAVDLNLDRHLAVCSIQTVEGTILATSFIGNGTAIAGFRKRLLGRIARNRSQTGIIAENEQDNTDPWRKVRNVDEHIAHLVSSRIVQFAKAHGSSILVFEHLGNLKPAKGTYSRRSNMKRAYWMKGRIFRYCKYKAWNAGGIITCRVNPRNTSRECHRCHANVIRYNQGEPVEGYTPGASLCLCPQCHMRDHADRNASLRIGQRLIERSQEPLKEKPHTPVRRVGRVSKGTGVGISQDAKREGQPSIAQARRGDHTNGYGTTPRGLRRMGARPSDMATTLRLHFE

SEQ ID NO: 62224 - protein, 543 aa, Caldilineaceae sp.
VRATLWETFGTSSCGTGFGSGAGRLMQHPGTCQTRVATYAGVERKAGDAVLSAYGELYGRVQRTLFAEMAAGRSVVSLQSEYLKRYGIPARLFNAVRVSLEGKVASVKAQQKLRVDNLGRRMARVERRIRAAAGRGRWDQVHQQQRRWAALQSQRAALQEDLEAGRVRLCFGSKRLWRKQHRLAENGYTSHQEWLGDWREARSNEFFVLGSRDETAGCQLCVATVADDGSLTLRLRLPNCLMARHGKYLTIQGVRFAYGHEQVLAALESNTEYVRYRREHGEKAVRATALGQAISYRFKRDAKGWRVFATTEMIDVPVITDKRRGSIGVDLNADHLAVAETDASGNPVHAFRVPLVTYGKSRHQAEAIIGDAVAHVVAYARETGKPIVIERLDFRQKKAELEGENRRYRRMLSSFSYGKVKAFFLSRGYRQGVEVRQVNPAFSSVIGRVKFMERYGLSVHQAAALVLARRLLGCSERIPRRRVAPVGNGIQVAFTVPARKRVKHVWTYWGAVARQLGPALAAQHRLGRRRGPPNPAQAAQRVA

SEQ ID NO: 62225 - protein, 368 aa, unknown
  TnpB Polypeptide
MKLIRSSKCSLKFATKSKIDELKIILTEYGKVCNIFIDYFWKNGTPSKSDLLKDIVDLPKDTWLSARLRKVAAREAIDMINAARERWKSKPNKMVIPVHKGRRMYVSCTIAELQNKETAEFDAWLHIQSIGDDHIFDLPIKFHKHFNKLALQGKRLNSYIITEKYVQFSFEIETGKKKTGINAIGIDTGIKALASINNGTQFGLDTESLIERIKRCEHGSNGQKQARRAFKQRIDEVVQELMTHFKNIDLVVVEQLKNMNYKSKLKRRLSKNMRRSIGTWAYRYWLKRLEQACETNRVSFRTVAPFYTSQTCPSCGHVDRGNRDGQIFRCLKCGHTGNADIVAARNILTRFLTGLYGARYKPYEVKFV

SEQ ID NO: 62226 - protein, 419 aa, Holophagaceae sp.
MEAARVWNTCCEIHREARKAETKWPSRGDLQVATKGEFRIHSQSVQMVAHAFLANIDTTRQLRKTHPQMGMRYPWKEKRFYPLLWPAQAVHVEATRIVLPMGRGRKSLVIPRPVGFPDAPGGVKVCWNGAGYDLHVAIEAPDEAQSQAVDGVHATVDLGEIHQVAIATSTGKALVVSGRGIRSVKRYRNIALGQILRLRSRCSKGSRRYRRLSWAISRSMHRTLRQVRDLRHKGTRRAIAFCVENAVSSIYVGDPDGVRKRPSGRKHNQRMSQWEYGKDMQYLDYKSRKAGMECCSGTERGTSSHCPSCGHRHRPKGWEWACKKCGFRGHRDVVGAVNMHPLAYGEQIEFPSQITYRRAGITQGTKQPLRSARRSRPDPGLGACGPVLSRYANGPTTQIAGTPQGVGQAEGLRMEAHPL

SEQ ID NO: 62227 - protein, 168 aa, unknown
  TnpB Polypeptide
MPSCSSLKHHRRLEEKIARAQRAKKPQRVRALCASAANRRKDQHHKHSTALVRQYDAIFVGHVNSLALAKTRMAQSVLDAGWGMLRTMLRYKCDDAGVWFEEVNEAYSTQSCSCCQFRTGPKGVAGLGIREWACEVCGAYHHRDINAAINILAPGRGRLAGGIPALSA

SEQ ID NO: 62228 - protein, 410 aa, unknown
  TnpB Polypeptide
METIEKGFKYRIYPKKSQIEQIELMFNAKRFVWNYFLKLNMDKFQKKEKLLTYNQMSSLLTQLKKENIWLKQCEKSILQNTLKDLARAYSTFFKGSMKYTKETIEHAKRVDKKLTFYDLEKHPKFKSYKNNYQSCKMNFTNNNIEVLEKETKYTSTGKYRKQFCKIKLPKIKKVRIAYSRQYQGRIVSSTLSRDTDNKYYISLCCVDIINNSYKQTGVMIGVDLGVKEFATTSDNEVINNPKFYRKYEKQLIKTQKVLSRRKIKGNNRNKQRLKVNKYHKKIANCRIDFLQKLSTELVKNYDIICMEDLNTKGMLKNHKLAKSIADVSFYEFNRELEYKSKWNYKVISRIDRFYPSSQICSGCGNQSNQTKDLSVRTYICEKCGLEIDRDYNASLNILNEGLRLLEDKVS

SEQ ID NO: 62229 - protein, 395 aa, Nitrospira sp.
MQRLQAFKYELMPNGQEERHMRRVAGSCRVVFNAALALQKERYERGEKKLGYAGLCKKLTAWRNGAPLPSGRTAPWLAEAPVHPLQQTLKDLERAYSNFFAKRANFPRFKKKGRSDSFRYPDPKQIKLDQANSRLFLPKLGWLRYRNSREVLGTVKNVTVSHSNGKWFVSIQTEREVEQPIPQGSAVGIDLGIARFATLSDGTFYAPLNSFKRHETRLRKAQQAFSRKVKFSNNWKKAKARVQRIHARIGNARRDYLHKATTTISQNHAVVVIEDLQIANLSASAKGTVAHPGTNVQAKAGLNKSILDQGWFEFRRQLDYKLAWQGGWLIAVPPQNTSRTCPCCGQVSADNRQTQARFECIDCGFEEHADMVGAINVLRAGHARFACEVSDADVE

SEQ ID NO: 62230 - protein, 397 aa, unknown
  TnpB Polypeptide
MIKSFKYRILPTKKQKELLISTLITCRFLYNNSLAERIEKYKEDKTSITYTQQANNLAENKNDYQKKVHSQVLQDVLKRLDKTYANFFRRIKNKEKKAGFPRFKPEQRYNSFCYPQSGFRLTNNEKRIELSKIGDIRIKYHRPIPSKPKTCIVVRDIDQWFVVFTCEIEDRIIEKSDKPEIGIDVGISNYLTLSNGKTFDNPRTLIKSQDKLVKAQRQLSKKVIGSKNRTKQRIVVAKTHRKIRNQRNDFLHKLSTHLVQEYGLIVFENLNIRNMVKNHKLAKHISDASWNKLIQMTTYKAVGANCVVELVDPKNTSQNCSVCGNKVSKTLGDRVHKCPACGVELDRDLNAAINIKNRAGTVRIKSCGDDVRQEEIEKSKSSRNLLRNKKPHGLSVW

SEQ ID NO: 62231 - protein, 499 aa, Microcystis sp.
  misc_feature (306)..(366): Xaa can be any naturally occurring amino acid
MEKAYSFRFYPTPEQESLLRRTLGCVRLVYNKALHVRTQAWYERQERVGYTETSSMLTDWKKQEELDFLNEVSCVPLQQGLRHLQTAFTNFFAGRTKYPNFKKKHQGGSAEFTKSAFKFKDKQIYLAKCTEPLPIRWSRQIPESCELSTVTVRLHPSGRWHISIRFDDPTIKPLPVTDKAIGIDLGISSLVITSDGDKVSNPKHFKKHYRRLRKAQKNLSRKQKNSKNREKARIKVARIHAQITDSRKDHLHKLTTQLVRENQTIVVENLAVKNMVKNPKLSQAISDVSWGEITRQLAYKCRWYGXXXXXXXXXXXXXXXXXXXXXXXXXXXXXXXXXXXXXXXXXXXXXXXXXXXXXXXXXXXXXPVTGVTIIPRLADGTIVLIRRRDTGKWALPGGMIDWGEDIFNTAQRELKEETGLNLVSLGRLVGVYSSFERDPRIHSISVLIEVTAAGNFQIKDTLEVSEVRAFSVETLPLGNLSHDNDRQLEDYLRGATVVA

SEQ ID NO: 62232 - protein, 409 aa, Natronomonas sp.
MQYNYKYRLNPTENLAETLLYHVDTCRQLYNHVLYLINESEDTPARYEVQGRLPELKKWWDDLGDIHSKVLQMVVKRVYDNLSTLKAQKESGRAVGMLKWKRPRDYRSLTYNQSGFKLKNTSGRPVLWLSKIGEIPIHLHRDIPENSTIKQVTVKREPTGEWFATFGIEVDEDIPAKPETPETVVGIDVGILKYAHDTDGFAIEPPDFNEERDRLERAKRNLSRKEHNSKNWEKQRKIVARRHAALKRKRRDFLHKLSNYYATKYDLVAVEDLEAKRLVEQPGNSRNRAGAAWGMFLRMLEYKCEREGTHLVAVDPKNTTKECASCGVKTAKPLWVRKHSCPSCGFKADRDANAAWNILSRGLEELGVVHSESTPVETAFPVDTHVSAKRVIETGSPILQERTAHAEGE

SEQ ID NO: 62233 - protein, 375 aa, Natronomonas sp.
MQEWQNACQIAAESAWGVTTDATSVQSMAYDAVRDGTSLKSQHAILATHRVADTLRSITEKHDRGWDAPKPRFTSPTVVYDERSMSFLDDGTVSLATTEGRVSATLRLPDKKDGYQQQYLDDEAWEHTQSTLHERDGAFFLHIGFKKPAEPSRQPEYGTVLGVDLGIDNIAVTSTAQFFSGSELEHRRRQFRRKRRRLKETGTRSALRTLIGIENKERRIAREILHRVSNGIVAEAERYCCDIIAFEALDGIRNRLPAGDVFHSWAFRRLIEYTTYKARSAGIRVTRVSPEYTSQRCAECGHVEEANRSSRDEFVCQSCNARSNADYNAAKNIGERAVRCVQQSTQRTSVSRYALKSGTVTPDEGFTPRDGGVRG

SEQ ID NO: 62234 - protein, 304 aa, Bacillus sp.
MNGDTAFKRFFKGLSGFPRHKKKKNQDVKCYFPKNNKTDWAVERHRVKVPTIGWVRLKEYGYIPKNGIVKSGTICKRAGRYFVSVLCELEERATKPTLNETGLGIDLGLKDFATRSDGIVHENINKTINVKRIEKRLKREQRSLSRKFENVKKRGETSATNKRANIDKNILRVQKLHVRLTNIRLEYVKSIVNDVVKTKPTFITVEDLNVKGMMKNKHLSKAVAGQCFYTFKTLLLTKCEEYGIKLRQVDRFYPSSKLCSCCGQKKLYLKLSDRVYTCECGNVMDRDLNASINLLQAKKYTILT

SEQ ID NO: 62235 - protein, 380 aa, Enterococcus sp.
VERLKAYKFRLYPTEEQEIFFAKSFGCVRKVYNLMLNDRMKAYEETKKNPSKKMKFPTPAKYKEEFSFLKEVDSLALANAQLNLDKAYKNFFRDKSVGFPRFKSKKNPVQSYTTNNQKGTVALIDNKFIKIPKLKSLVKIKLHRQPKGMIKSATISRHSSGKYYISLLCKEEIIELPKTNSAIGIDLGMTDFAILSNGQKIDNNRFTSKMEKKLKREQRKLSRRALLASKKDINLFEAKNYQKQKRKVARLHEKVMNQRNDFLNKLSTEIIKNHDIICIEDLNTKGMLRNHKLAKSISDVSWSSFVTKLQYKADWYGREIIKIDKWFPSSQICSECGHQDGKKSLEIREWTCPICHTHHDRDINASINILTEGLRTKQFV

SEQ ID NO: 62236 - protein, 477 aa, Coleofasciculus sp.
MTTITYCKGLPTPADELNPIGFTELEMFLTSLSDIFYQATVETVNHLLNKEIKFNQSSWNSLMQEKYGLSKRYANGVIALARGKTSSAKECRKRQIKQLKSRVQSGKDWVARATKKINLARKFYGKKNWQSSKNGCNFPLSSNLKTRKTNWHHLRQGLHQKKRYIHRLQNQIKHLLRAKIRVKVSRGSVFIVGSKDESYGNQTCQWSEDTIKLTLRLRSASTPSEAEVLRVPDCLEAKFGKYVTSKIGSFSRQINRLPNSGAKTWHFYRKENRWVVAVQFTPAAVEKVSREIQYGALGIDLNPSSIGWAYVDGQGNLKAQGTIPFQTGLPKGKQDAQLVDVCLKLSVLARDFKIPVLCENLDFSRKKAQLRERTKKYARMLSAWAYSRFYQILSSILSNRGITIKFVNPAYTSLIGLVKYSRMYGLSSDVAAALAIARRGMNCRDAPWRVCTEIAALCVRLSRSESEKARMERSISI

SEQ ID NO: 62237 - protein, 424 aa, unknown
  TnpB Polypeptide
MYLTQKNKIRNLSSPEYTALRQLCRLSKNMYNVGLYNVRQFYFAEKQYLRYESNYHQCKTNENYQLLNTDIAQQTLKVVSRSFQSFFKLIQVAKSGLYRFEQIRLPRYLPRSGYFPLIMPRVKVKDGFFNVPMSRAFKKEYGAVKIPFPERLKDKELKEVRIIPKYNARFFEVEFIVIEDAQKPQKTDNSLAIDLGLDNLAACVSNTGSSFLMDGRKLKSINQWYNKQNARLASIKDKQGIKGITAQQVSIVVNRNNRVRDYLNKAVRYIADWCLENHITNIVVGVNPGIKKEINLGKNANQKFVQIPHHSLRVKLKAMCERLGWTYIEQEESYTSKASFLDGDQLPVFNADNPIGYKFSGRRIQRGLYKSKYGFLVNADCQAAANIGRKSSLNGFTPDRVAASLAMPLRIKFERALAFQTCTS

SEQ ID NO: 62238 - protein, 418 aa, unknown
  TnpB Polypeptide
MNRTNIVLLAPTCEQEQRLRRLAEASARLWNMANYERRQAYFAGRRVPTYENQWRTFKDADAFKRVGTCKGQALLIKLREAWGSFFALKRLQRLGQLPVHIKRVSPPRYMKDRSTRKLKAEAIYVRNDGYRQDHDTLVLSKTLHVPFKAGELWVGKQGRLELHYDRLREKWYGHIPVKVKWARKKSVAPHHSTRKRASIDLGICNLATCVVEGGDKAYVYSGRGVLSDWRYWTKRIASYESELKKTSMRDNSKRLSGLYQTRKRRLNHAIKGMLRDLYDRLENEHVTNLVVGDLKHIRDDKNHGAVGNQKLHNFWPFMQIRQRICELGEEYGIRARFKSERDTSKHCSICGQTHKNGRVHRGLYKCETTGRTVNADVNGAYNILYGLQGKVAAGSGSRPMAWPMLIRWNRQQWQVSAG

SEQ ID NO: 62239 - protein, 402 aa, Escherichia sp.
VKRLQAFKFQLRPGGQQECEMRRFAGACRFVFNRALARQNENHEAGNKYIPYGKMASWLVEWKNATETQWLKDSPSQPLQQSLKDLERAYKNFFQNRAAFPRFKKRGQNDVFRYPQGVKLDQENSRIFLPKLGWMRYRNSRQVTGVVKNVTVSQSCGKWYISIQTESEVSTPVHPSASMVGLDAGVAKLATLSDGTVFEPVNSFQKNQKTLARLQRQLSRKVKFSNNWQKQKRKIQRLHSCIANIRRDYLHKVTTTVSKNHAMIVIEDLKVSNMSKSAAGTVSQPGRNVRAKSGLNRSILDQGWYEMHRQLEYKQLWRGGQVLAVPPAYTSQRCAYCGHTAKENRLSQSKFRCQVCGYTANADVNGARNILAAGHAVLACGEMVQSGRPLKQEPTEMIQATA

SEQ ID NO: 62240 - protein, 439 aa, unknown
  TnpB Polypeptide
MCYYVSYDCLGDVEMPKGKTKNVIYGCQKQQLNKLTKKEYVALREISRLAKNLYNVGLYNFRQYYFQENKYITYESNYQLSKNNENYKLLNSKMAQQILKEVDTVFSSFFALIKKAKEGNYSFQNIKLPNYLERDGYFTLIIAQIRIKPDMTLDIPMSPSFKKEYGKVTIKVPKNLRGKKIKEIRIVPKHKARFFEIQYTYEVFGDQKELNKNHVLAVDLGVNNLAACVTNNGKCFIVDGKRLKSINQWYNKENARLQSIKDKQNITGITKKQAILTINRNNKVNDYMRKSSRIIIDYCLKNNIGTVVVGYNPTLQKESNLGKRNNQNFVNIPFGQLKENIKYLCRINGIQYKLQEESYTSKASFLDGDEIPVYNAFDIKEYVFSGKRITRGQYKAKNSRIINADVNGALNILKKSKLVGLTTLQCSGVLDTPLRIRVV

SEQ ID NO: 62241 - protein, 537 aa, Persephonella sp.
MEMLCSFFFPLLRHRNRVISVNGYSIRVSFKKPYCFSIFYINCWNNKGFQSHISSLTPTLKFSLIHYKTTKNIKKYLMNSITLTLSIQISKKSAVNKLQRASKTFQHFKNLVYITALEYFKHTKSIKPFLYVSFLEKYIKGKERLPFENEKIREIQIQLINLWQTQIGSDTAKMLVNVLVREFKSIVEKWKKGEKASLPLPRKLSKLHYYTIETNPNMIVDKRSLKGKRKSNHIVVRIGKAFGALRIKIPEGINANHLKLIWREEGYIDVLLNYEQPLENQQLDKEQFISIDIGINNFISAVSNKENIRSFIVNGNPLKAFNQWVNKLSAKLQREGKEKEHKILWRYRNKRVNQFFASITNLLVSLSLRENIGTIVISKGLMEEYQKEGTKGKKFNQTFRTIPLGKFIQMLKYKCDIADIDLKIAEEESYTSKTSSITGDLEKKEFNGKRVKRGLFKDHKTGKVYNADLNGALNIAIKELGEKAREQFLKLPNWLDKLSRPIKLNLFSKYSASVLKDIADSNSLSDDRRRTLSETFC

SEQ ID NO: 62242 - protein, 435 aa, unknown
  TnpB Polypeptide
MKVIRSSRHFYHQNNKIKTQLISDFLDEYHVAMQKYINFIWQNPLPWQTSKGEDRLLDIQNLILDCPSVYDYQITTFQTNLSARALSSAITQSLSVVKSKTNDVRKRKYALQKATEEHKSDKIIKKLQEKLEKSIEKLQKPNIGYYNKAELSSKNVTVEISKTAKHFEYWLKFSSLGTNEPFVIPVVLHKQDHRLMGKQMKIKGSFLIGRDYCEIRYDKEVEKREKGETIGCDTGIKTVAYFSHQENETDRINGLTYEDTVERCARQKKGSKNFQQAMACRKNVINALINLVNFDNVKQINLEDNQNLKQGKRLKRYLQHHAYGEIKQKLEQVAEELGVQVKMQTSNYKSQRCSDCGWTQESNRDRKKFECKRCGFAADADYNASENNRSKLCWLDMSLISKQKLNITGFEWLAESGEEPGVPHSVGSDISWDME

SEQ ID NO: 62243 - protein, 373 aa, unknown
  TnpB Polypeptide
MPTLSHKIRLDPTEAQIVQFKKACGCARFAWNWALAKWNEKYAAGEKCTGYSLNKEFNAIKGELFPWISESSAWASQRPFANLQSAFRRFFKKTAKHPKFKSKGKSHDSFYVHNGAFSVDNKTCKLPRIGEVRMKEELRLSGKIMSGVVSRTADQWYISIAVELDKLPRTVKATSKVVGIDLGLKETIVTSDGDRFKAPKPLKKYSKMLARRSKQHSKKVKGSNNKYKSQMKLAKLHAKIANIRKDFNHKATTKLIDENQVIGLEDLNVAGMLKNHCLAKAISDVSWSEIRRQLEYKSAIYGREVRLVNRFFPSSKTCSKYGSVKKTLGLDERVFRCSDCGYIIDRDLNAAINIKHTVGHTGINAWGENCEVN

SEQ ID NO: 62244 - protein, 470 aa, unknown
  TnpB Polypeptide
MLVHQAFRFELDPNDLTRSALSSHAGASRFAYNWGLRFVEGQLEATRALTVLAIRQGAGVEEAKAWAREVAGPVPWSLAALRRVWNAAKHEVAPWWAENSKEAYSSGLDALARALDGFFKVRSGERAGTLGFPARKKKGHRRSCRFTTGAIGVVDDRHVKLPRLGHVRTKEPTTHLRRLLDEGSARILSATVSEEAGRWAVSFTCEVERQGLFASHPDAVVGVDLGVKHLAVVSADEVVENPKALGRYQRRMQRLQRELSRQEKDSKRRRRTKAKLARVHRKVANTRRDALHKLTSGLASTYGTVVVEDLNVTGMTAAPAPKPDDAGGHGPNGRRRKAGLNRAVLDVAPGEFRRQLTYKLAWHGGRLIVADRFFPSSKTCSSCGAVKAKLRLDDRMYHCEHCGLVIDRDHNAALNLAAYGQRVVAVSGTETLNARGGAHPRLRPAAPVKREDGSGQPGRTVTASSQEVAA

SEQ ID NO: 62245 - protein, 378 aa, Clostridium sp.
VLSIIGITITSKVQIYPTDEQIEKLTKTMIKVRKALNYISNYVYDNNCLNQSKINKDTYYYLREKYSLKSQMAQSVMKTVIAKYKTNKSNGHDFTLVQFKKLEYDLVWNRDYSLTNGVFSLNTLDGRLKIRFETKGMEKYFDGTYKFGTAKLVYKYNKYFLHIPMTKEYPQTTPFAINKIVGIDLGINFLATVYDSYGKTIFFNGKQVKAKRGHYKILRKQLQECGTKSAKRRIKSIGSRENRYISNINHNITKALVDHYGANTLFVLEDLTNVRTSTEKVNINNRYVSVSWAFYQFRELLTYKAQMNQSLVIAVNPKFTSQMCPKCGHIEKSNRDKKRHIFCCKNCNYQSNDDRIGAMNLWRKGIEYIEANSKEIVE

SEQ ID NO: 62246 - protein, 221 aa, Burkholderia sp.
MILVYRYRVKSLNGLLNKQSRAVNYVWNFCNDTQKHALKWSKKWPTGFDLNVLTTGSSKALGIHSGTINATCEQYAKSRSQHRRPYLRYRGRKSLGWVPLKGRDLKREGDAFRFAGNTFRVFNSRPLPEGKIKDGTNFAQDARGNWLLNIVIEMPDVQARPIHSGVGIDLGLKDFVTLSTGEKLPNDQFGRRATEKLAKAQRARKHKRHIRSAPVSASISA

SEQ ID NO: 62247 - protein, 618 aa, unknown
  TnpB Polypeptide
MPNNKESATRPHGAGFGTAKLKADALAHTPSWWRKGLSQPSRGQNGWRSMLVFHRRRTSPIWTVKQSVFSPTAQPKAIRSPKWSRRLAQASMMPVPSCWPCWRIRISPALSSSTKIGLPVSASATWKRFCADRDGLLKSSTWPKMGRRTCSLISPASFTAFAPVCMDNAVPGGRRKPLSRNWRALMQLVERHCIGKSDPRFALIDRAAFASKNLYNAALYEIRQHFIFTGKYLSYNAMDKLMQKHEAYRALPAKVSQQVLKLLDKNWAAFFAARHSYQEDPSKFKGRPKLPGYKDKKEGRNILVYTTQAFSKPARKRGILKPSQLGIEIKTSQKPGSIDQVRIVPRSGFYVVEVVYQKQEQAASSNEQYVAGIDLGINNLAALAANKPGFVPVVVNGRPVKAINQFYNKRRAELQKQSGGRGRTRRINQLTTKRNRRMEHYMHAASKHLIAILLSEQIGTLIIGKNDGWKQEVEMGRRTNQTFCQIPHARFIEMLTYKAELVGITVKLTEESYTSQASFLDRDSLPTYDPHRKQDPKFSGKRVKRGLYRASNRRDINADINGACNIIRKVAPKAFDAEGVEDGEALLASLVVHPRRIVVLRPTQKEKSKASRAKARKR

SEQ ID NO: 62248 - protein, 448 aa, unknown
  TnpB Polypeptide
VRKINRAVKIRIYPNAEQRVQIEKTIGCSRFIYNYMLADKMEHYKKEKKMLRNTPASYKKEYPWLKEVDSLALANVQMHLESAFHKFFREPSAGFPCFKSKKSSRKSYTTNVVNGNIFLEGKYLKLPKMTAVRMKLHRPISEKWKLKSVTVSREPSGKYFASLLFCCENQTAEKRPAEKFIGIDFAMQGMCVFSTGKRAEYPMFYRNTEKKLAREQRKLSRCQKGSQNYKKQKKRVALCHEKIRNQRKDFQHKLSASLAESFDAVCVEDLNLKGMAGGLHLGKGVHDNGYGLFLSMLEYKLEERGKYLIKVDRYFASSKICSVCGKKKEELSLSERIYYCECGNRMEHTEPHCLSHRIILHKNRKGQHGSRTLNAKCHHQHHFQQPQNALKAGLVQRFLDQRSFPNADLLAGQQDDAYTQRGDPHAADLDQQQEDCLSESGKHCITLN

SEQ ID NO: 62249 - protein, 267 aa, Thermocladium sp.
MRLGSAFSMGLQDSRGRRNPISTTLIYPQSGWRIQVREGTKGRRLVLRLSSLGVFKLIVHRDFPLDRVKRVAVKLTRSGKVYVSFIVENHEFPKLPNTGEAVGIDVGVEKLLVTSDGEYLPNLRPYERALKKVKRLHKALSRKRYLSHNWFKAKMELARAYEHLANLRRDLYMKLGKYFAEHYDAVVMEDISVKQLIGGANRGLRRSLQDAAFGMMRTAIKYQVEKYGKGFILVDPRNSSKACAKCGYMKDLALSDGVFECPVWLEE

SEQ ID NO: 62250 - protein, 296 aa, unknown
  TnpB Polypeptide
MVLRTFFTSAAINTHRGWVHIDLEPSKEFYKLLARGSKPTSHTKIKLDRKNRRVLFHLSLEKEFEIYKPVDVNENSVATLYEAFAVILETDLAKATLGYSYRKESIQRRYGSGGKETRKAMEKLKERKKRDYRWKTANMIVRDALRTRGVIVIERISGEDIRGMIARYRNKQLRHRIYQSALKGELNAIIDKAREYGVPVLMVDPRNISKICLIHKAVIEYGEDRIGVCSKGGKRWHREVVALINIYLKALEALHEGYAQKGFGVSSLDGSPVPLGLKATREPIEITRSLWEWRLP

SEQ ID NO: 62251 - protein, 336 aa, unknown
  TnpB Polypeptide
MASGDEGLLTISIGMMVSPELDAIELLKRYNVALNYAINKILKLNLKKIGEIHNALYRELKEWFGLLPRTAIDCYRDALANVKSWGNNPRRGRRPRVRKLSMFLHPGSGYRIKDGYVEIAGGIKLRIIGWDRRYDGYENGEARLVYRDGKMMLWISKKVPKPKAYQPRDVIAVDVNERKIVYGDDKINKERDTKIDEAHRWKKLAENLQKRYSFTRYPAWRRRRGILNRIRSYHRKARNILEDWARKTSLEIVELSKKLGYAVAREDLTGLINSLRKIKNKDHRTKLIIMSYKRLGKWIDWNAKKQGVPLAIVKPTGHRLSVLNVIQSWRRLGIED

SEQ ID NO: 62252 - protein, 432 aa, unknown
  TnpB Polypeptide
VEKLTKILRRTVILEGWVNRFGRQALREIEDAYREMLDVMIDYALEHGASQSTLHRIFYSRFRDKYPWLPTRVIKGAYRDAVRRAKSFKKKKRKGETEKDKPVIRSITLIYSDSQDWRLREGYVELRTHRGWIRIGYRNNKQLHRYLYNNWKPSSELKLKLSSGKILVYLTLTKEFEVYYNPDNAVAVDINENNVTLAVFIDRRLHEVYRIETSIGRIVIAYSEKRRRITEGRSTRDRVARKALRRLRERERKEDVIYKTARIIEEIAKKYDASLVVGNAHRGKGKMASNARKSLRHRIHQWCVSKLVEILNNKPLHVVEESEAYSSSRDPFSGKPIKRYTPSVIRFALRGGRRVKVIKIQMRLAKLSNGLTIDRDVIGAINIGLRYLSSDGSPVALGSTGTHAARVKLVIPSLGATPLAEIQVFGSIIKYR

SEQ ID NO: 62253 - protein, 206 aa, unknown
  TnpB Polypeptide
VNPKSIKQRDPISDKEAFIDMGLNNLFAVVTTDSSALLVKGGTIKSEYYWWKREIATYQAVRDMLRNAGFSTWEEYHERYLKAMYKRDERLRHLYITAIRFLANELHRRGVRKLYIGYPIMLSQDNGNEYNTNIWWYRRIMLWIVDIFMEYGIEVEIVPEDYTSRECSICGNKHKNGRIYRGLYECKKTGTQDKDNMEDRELFDNT

SEQ ID NO: 62254 - protein, 237 aa, unknown
  TnpB Polypeptide
MGLNSLFAVVTTDGSALLVKGGSIKSEHYWWKREIATYQAIRDLPRNAGFPKWVEYREKYLKAMYRRDERLRHLYITATRFLADELYRRGVRKLYIGYIMLSQENGNEYNTNIWWYRKIVLWIVDIFMEYGIDVEIVPEDYTIQRCSMCGAKHKNGRVYRGLYICKKTGKKINADINAALNIARSLGCKIKITKKIKSYLVTHNGVKLLIPLQGASTRDPSIETRPSRQGGVILISL

SEQ ID NO: 62255 - protein, 509 aa, unknown
  TnpB Polypeptide
MSGGGNLRGVPARDSDPLQAFRELIERRKRGRRRTNRVALFPNRYEEETLFDIGLACARLWNELNYEKRQAFFNGELSPGKRDEINRRYYHKYKGVLGVNAGQVVNKNDEAWNAFFELLDLRKQGKLPPFMKKLSPPGYWKDRETGEKKIHILIRNDRYHVEPISEDEGYIVLEDFDLRIRYAGRIRWEGKQGRLEIIYVNGRWFAHIPIEVGVEPPKSNPKGYVKPIYDDEEKKKKRRIVNPRSIKQRDPIGDKEAFMDMGLNNLFAAVISDGSVMLIRGGSIKSEYYWWKREIAAYQSIRDVLRRLGISTWINYHEKYLDAMYKRDERLRHLYITAIRFLADELYDRGVRKLYIGYPIMLSQNNGNEYNTNIWWFRKIVLWIVDIFMEYGIDVEIVPEDYTSRECSICGIKHKNGRKHRGLYICKKTGKKINADINAALNIARKLGHRIRLTKKIESYLVTHNGVKPLNPLQRANTRDPSIETCPLGRGGVIWKIYRLDQFHLREHM

SEQ ID NO: 62256 - protein, 363 aa, Spirosoma sp.
MIYVRTYRYKLKPTKAQELQFEQWVGACRFVYNLCLEYRQVMWRFHKLSVSKSDLKKEIAQIAKETPWLRAMKAQTIQAAIDRLDNAFINFYKGKKGYPKFAKKGRFASFEYWQNVRITHESSLIKLPKIGFVKMFYSRPCHGVIKQAQIKKFVDGWYVTVVVEEEIAPLPRIEKTVGLDLGLKSLITSSDGLKISNPRHLHKKEKKLIRLQRNVTRKKRGSCNRKKAVRKLASQYLKVANARKDYQQKLTTQLIRDNQTIVVEELNVVDLLKNNHLAKSIGDAGWGELVAMLEYKAKWYGRNLYKVPAHYTSKTCSSCGFINQSLTLDIRQWQCPLCFTEHDRDINAAINIKNRAEGHSVSA

SEQ ID NO: 62257 - protein, 415 aa, unknown
  TnpB Polypeptide
MSRYRLLPSSAQETVLRNHCAHARYVWNLAVEQHAHWRPGRKSAPSYLEQCRQLTQARAEHGWLATGSQTVQQQALRDFAHALAVFFDPRNPSGRPSWRKAGRDEGFRIVGRRGQHWDVRHLSRHVGEVRVPKAGWVRFRWSRGVPTGAKSYRITMDHAGRWHVSFAFVPDPIPAPSNGQTVGIDRGVAVSAALSTGELLHAVGLTASEQKRLRRFQRKLARTRRESKRRARVKHLIARLRARDTDRRKDWVEKTSTDIARRFDLIRVEDLQIRNMTQSARGTRENPGRNVRQKAALNRGIMRSGWGLFVRRLEQKAPGRVEKVNPAYTSQKCSACGQVDRKSRESQAAFRCTACGYACNADVNAARNIAAGHAVTARGGCRDAGPVNREPHLLASLTEMRVAGIPGLRVWEDVK

SEQ ID NO: 62258 - protein, 293 aa, unknown
  TnpB Polypeptide
MYPNKTQEELLAKTFGCVRVIWNACVDSFNSYDKETNPNPKFPTKSDLVIEKPWLNEVSAATLQQKQRDFIEFSKQYFNKNRKEKFGRPNYKNKHDNQSFRLPLPKFKIADNKIRIEKIGWVKIVIDRGVPDNARFISCTVSKNRSGQYFVSVLVEIEQCCKQKTGKTVGVDLGIKTLATLSDGMTVENPHFIRENQAKLKRMQRHLSRKKLGSNRRNKCRLKVSRLHRDIANIGTTLSLPLLDSYHENFSHRHKIHIPNKDQLLYNYRLIYNHHPNLHNFHLKPESVIQICK

SEQ ID NO: 62259 - protein, 382 aa, Nocardia sp.
VQLRYNFRLYPTVGQQVSLAKAFGCARVVFNDALWARQEAFEAGHKLSESELSRRLTRAKQVPERAWLGEVSSVVLQQALADLNTAYRNFFASVTGNRKGGKVAPPRFRSRKDNRQSIRFTRNARFTVTAGRKLRLPRIGDIAVRWSRELPSEPSSVTVIKDASGRYFASFVVQVDTEHLPELDTEVGIDLGLSTFAVLSDGKTIASPRFLRRAERRLRKAQQALSRKQKGSRNRVKARVRVAKAHARVADTRRDWAHKHSTAIIGENQAVYVEDLCVKSLARTRLAKSVHDAGWGMFTRMLQEKAARFGRYFGKVDRFYPSSQICHPCGHRDGPKPLSVRIWTCPRCGAVLDRDVNAANNILAAGRAERLNACGETVSLSA

SEQ ID NO: 62260 - protein, 366 aa, unknown
  TnpB Polypeptide
MLMIILSHKIQIKNPTVKQEQYFRQACGTSRFAYNWGLEEWKKQYELGLKPTAFQIKKSFNAIKLLEFPWVFNVTKCAAEQAFINLGTAFNRLFNGRGKYPRFKKKGQHDSFYLSNDQFKITENQFKIPKLGWVSVTETLRFSGKILSATVSRAANKWFVSIQVQMETTAIKVSENQADTVGVDLGIKNLATLSNGETTEGSKPLKKLSRRLARIQRHTQKCTKGSKRYNRQKMKIARLHYRICCIRQDGLHKLTHRLCQDFKIICLEDLNVKGMMKNHKLAKAISDMGFYEFKRQLEYKSSLFGNWISSVDRWFPSSKTCSNCGNKKEELKLSERVYHCGKCGFKIDRDLNAAINIEREGIRLLA

SEQ ID NO: 62261 - protein, 406 aa, unknown
  TnpB Polypeptide
MYKAYKVRLYPTKQQAELIDKTIGCCRYVYNYSLANRVSFYEKFKDDKSMLGIYKYPTIKNLREESSWLKEVSSNALRQSQIDLDKAYSNFFRRVKQGQKPGFPRFKKKGKCNNSYRECQITNTIRLEDNNTKLTLPKLGKVKIRGLSKDFSGAIKNVTVSRSKSGKYYASILVEKEQIEKRKRVSNDIIGIDLGLKEFAVCSNGDFIYGIKDKIFEIDIKIRKQQKHLSRKVQGSNRWYACKRRLNILYEYRQNYLNHFQWHLANKLCSENQAIALEDLNVIGMKKNRKLSHSIQNVNWSSFVVKLEQKSKQYDMTVYKVDRFFPSSKTCSRCGKIKKDLKLSDRVYKCDCGFEIDRDLNAAINIKNEFLKSAEYVDNRHGEVVRPRRLAYKPQGSFVEVSTNSL

SEQ ID NO: 62262 - protein, 553 aa, unknown
  TnpB Polypeptide
MHTISIFVDKNRMPKPASYFECQTHLAKNLRNAANFIIRNLRTGLKKAPDTRTANENEVLETVRIGIEMANEKLLKDVDRLTKQLQKLPADDPARTKIQKRIENKQKNHPSMPTSDHWMLTYETLDAVMKNTKNPDYYAMPSQVNQQVLRKVLKDWKSYFEALTAYRQNPERFKSQPKQPGYIKTPYTTVTFTNQVAKRSDIRGKMYITFPRCLVPVCVGKSEGSYVRTEVKPCYGGYMIYVTFQDAVKTPEAPKNPTRILGLDPGLDNFLTALTNFPLAPFILDGHWLKSINQNFNRKRAVLMSELTRGLDSTKSVKNSARLNRISKNRACQIEDFFYKAAHYILDFCLKNRVEVIVCGHNKDQKQGINIGAGNNHHFVSIPYARFFWILTCVAAKAGIPVIETEESFTSRASLIDNDPLPVYKEGKDAEYRFSGKRISRGQYESKNGTILNADVNGAGNIIRKIYPNAFDEVKDFSYTNKTVIRVTREALCLVKHKEKHARPRRKSGMNRRLHHRRQEQKLVYFELFKASSARDKTRYIEESKQKAAQKTA

SEQ ID NO: 62263 - protein, 305 aa, Megasphaera sp.
VDSLALANAQMNLNKAYNNFFRNRKHFGKPHFKSKKTGHCSYSTNNQKGSVRLEGNKVKLPKVGWVKLCLHRPLMENSTIKTVTISRTPSGKFYISILVEYENQILPIMPKKFLGLDFAMHGLYVASDEDDANYPNFLRKTEKRLAQAQRKLSKRQKGSHNREKQGLRVAVLHEKIANQRRDFLHKKARYLVDHYDAIGIEDIRVKAMAKRKKGGKFSFGKSLADNGWNMFTNILEYKLAWQGKQLVKIDKWYPSSQLCHVCGFQNDATKDLSVREWDCPKCGSHHNRDKNAAINIREEARRISA

SEQ ID NO: 62264 - protein, 246 aa, Megasphaera sp.
LPKVGWVKLCLHRPLMENSTIKTVTISRTPSGKFYISILVEYENQILPIMPKKFLGLDFAMHGLYVASDEDDANYPNFLRKTEKRLAQAQRKLSKRQKGSHNRKKQRLRVAVLHEKIANQRRDFLHKKARYLVDHYDAIGIEDISVKAMAKRKKGGKFSFGKSVADNGWNMFTNMLEYKLAWQGKQLIKIDKWYPSSQLCHVCGYQNNETKDLSIREWDCPKCGSHHDRDKNAAINIREEARRISA

SEQ ID NO: 62265 - protein, 375 aa, unknown
  TnpB Polypeptide
MKINKAFKFRIYPDNQQKQFLAQSFGCARVVYNRFLRQRIDYYAETGKGLTYHNNALALTQLKKQPEFEWLNDINSQSLQQTLRNLDVAYNNFFNKRAKFPKFKKKSNKQSFNVPQNFSIHDNMLDIPKCKGIKIKLHRSRSAVQRKNRDIEGTMKSITISKTPSGKYFASVLCELEIPEPIYSGGEIGIDYGVKAFITTSDGEIIESLKFLRKSEKRLQKLSNSFSKKQPNAKNRYKAQKLLARQHEKVSNQRQDFLHKLSKQLTCDNQAIYIESLAIRNMIKLHTLAKSISDSGWNTFVNMLKYKGQWYGCRIIEIDRWFPSSKRCHVCGYINDNLTLSDRSWLCPECNTNHDRDVNASINILTFGRAGIAQT

SEQ ID NO: 62266 - protein, 650 aa, unknown
  TnpB Polypeptide
MEIPKKPPEFFKSTKTSLKSILKHPNVNGKKINDVVQKAHRIVIHTLQFLKLYTLHEMNDCTIPVIDKVLIMNVMKVVCGEKHTKRGCPPKKETVVLKEKLTAFYEEHYKPYTQPEELDYEYMSNVLAYLCVDIITMYENNIQMHYVEYVERYVNVVWKKKMLVTKIRKLFTTKKERESRIRCLEKELRKIKNDLLNVDNSTAYTSPCHYHSWITKQKTQILPVKEKFQKQSIYYDLKCKPMDYFPCMIRMMRCVECDGETVSNVFPLRSAIAPGYIRLDTITLVNLLLRKEQGNKSDYSNKGNTKKHEDAIWNFFFRTEKKVFRKNPYSFHHMISTDGIGVSVLFLREDLVGKRLPNVPKCVSKELYIDELDDYERLRDKKIVGIDPGKDDLIYCVDGATKDANVFRYSQDQRRKETKMKKYNHIILAMKTKSINGKTVTEHETELSHYNRKTLQIGNFKEYIHAKNRMNSELFDFYAKQLFRKLKFGKYINVKRNELKMLRNFKELYGEPDDTIICIGDWEQKKQMKFKEPTLGKGIRTLFRKNNYKVFLVDEFRTSCRCSKCDGGVCEKFMVRKNPRPNKDDIRLVHGLLRCKSGCGSWNRDRNGSSNIYKIAENAINNLERPSYLCRETSKQNTSTSVYNQTVHKV

SEQ ID NO: 62267 - protein, 464 aa, unknown
  TnpB Polypeptide
MNNTEHMFPYNGKVVKRLSRKKAVKVLRRKKNIENIQRFTQTQNLGGNSLTAKKFRVLKRMTHSTKALRNVGLYTIKKSYRENGKNATTKEIDDAMKIDVNYWGVQSNSVQAIRRSLLNEVNSFFKALKCWKENPEKFTGRPMFPKYLHKEAKRIIEIYQIPKVDKDGYWTIPMNVGFKKRFGAIKIRMPKNLLNQKIVYIEIVPKQKGRFFEVHYTYEVQVAQIKKQPTTTTNALSIDLGVDNLMGCATNRGDAFLIDGFALKSINQYFNKEISKLQEKNVENGISKRVVTNKQARLWMKRERQINGYISQAVGLLFKKAKEFNIDTFIVGYNAGWKQKSDLGKKINQSFVQIPFKRIISAIENKCLKEGIRFVKQEESYTSKASFIERDELPVWSKNDKNTYCFSGNRITRGMYRSKNGEQIHADINGSLNILRKSGVVALPTELKVKNPIRMEVQKRKAVA

SEQ ID NO: 62268 - protein, 424 aa, unknown
  TnpB Polypeptide
MPAHRRKITYKLYPTPKQAAVLARMLSAHQQLYNAALEERISAWRHGRHSISYEDQSKSLTAIRQALPEDWAWLNCSSQQLTLRRLNKAFQAFFSRCKKGQPPGFPRFKSVSRMPGFGYKSHGDGWRFTPGKDWRNGTLRLMEVGHVKARGQARTVDGKIKSCELMHDHGTWTLSLTVECKPEREGGTKVGAADWGVSTLLTVVDDEGVREIANPRHSKKGMERQVELQQAVSRAKRGSKNWKRRCKALRAFKRRQANRRLDEQHKLSAQIAKDYFAFGMEKLSVKNMTASAAGTAEEPGKNVQQKAGLNREILDTAPARLMQLISYKVEETGGWFFEAPTKQLKPSQTCPSCGHVAKKKLSERTHQCEECGHTEPRDVASARIVHAWLHSQLQAQNKGQELSLGRASHALETATIAPLAFGGR

SEQ ID NO: 62269 - protein, 528 aa, Vulcanisaeta sp.
MGMPPQTTTNETRKPLRRAVAVELEVTRELNRLLYSVETAYLNIVREVVEYAVVNNVTGANKLHRLFYSKYRSEYQGLHAHLVIQAIKQASEIAKSFVKRRKKGLVNKPYPEIKAVSIRFDETTWSYDQFISSVAPVRLGLSLPGGRREVWLRLHKRFWQYWWRVLSGEAELASTLMLKRKGGKWYAIFVFELKPREEEPKAIVSYDINENTISICKIDITTVGKVTNWNRQYVMPELYIIKTGFGTLTERYERIRNAIIERLKPEFALPNGKYINITNTREYKKFVRRLREDNRKLGRVRQIANELTKVPTLIITEELGKAPQQSMINEIKRSETRHRVSQVPFKSIEKTVEDKALERGSKLVRVSSYRNSKTCPVHFVRLKSTNDWHVLYCPKGHYMHRDYTSILNMLWKVTPEGWVKGVWWDLRREMNWREYEDKHNPVIPQNIVQYIHAVLKSFVANEQCPAVLARGSPMNPAGGADEGWAREKGQIEFNASIITNEDLSEISTPEDLMKVILIAHSQMGYYYG

SEQ ID NO: 62270 - protein, 437 aa, Thermococcus sp.
MKRTVTVKLQLSKEQERILFELADTGAKVWNEVNYLRRRAFFEGKGVDYGTTEKIVYEKYKREIGSATVQQICRKNTESWRSFFALLKKSKSGKLPEWFGKPSPPGYRKGNKKRKPFIILRNDQYKIEGNRLILKGLGKFGKLGVQFKGRIHLKGKQGRLEIIYDDVKGKWYAHVSISKVEEKLEGGKWVSVPKTPKGNLTAGIDLGINNLMAVYVSDGHSFLVNGRPLKSIAFYWQRKIADYQSELNKNGKKSSKRLKKYHLKWKLQTRNYVNSSVRQVVRSLHDLGVSKIIVGYPKGIARNSGKGRRQNFLLSRVWLFSYIIQRLREVSEEYGIVVEVVDEAYTSLTCPFCGRSHYGARFVRGLYLCPQEGLVLNADLVGAFNILRKAVKTITPNLGGLLAQGRGNGGKTVPEGLYDPKVVTLVGETPQTSLALG

SEQ ID NO: 62271 - protein, 380 aa, unknown
  TnpB Polypeptide
MRAIKVRIYPNKQQEQMINKTFGCVRFVYNRALALKKSRYDNYRDNLSTIEIDKMVTFWKKTEEMSFLKEASSQSLQQTLRHLDSAYKKFFKEKKGFPTFKKKSDKQSYSVVRNVKVIDSRIQFPKLGLLKVKGLRGFEGEIKTATLSKNKCGQYFISFCMDDVKKTPKIKEIKSVIGIDVGIKTLAVTSDGMTFVAPNTLKTLENKLKYYQRQQAKCIKGSNSFRKWKHKIAVLWNKITNIRKDYLHKLSIRLVKNHDLIVVENLKVKNMVKNHKLAKAISNMSWGEFFRQLEYKSEWHGKHFIKVDPKSTSQKCSCCGFVNKSLTLSDRQWECSECLSVLDRDLNAAINIKQKGMDSVLKSCGDILIREVDEARIPCL

SEQ ID NO: 62272 - protein, 433 aa, unknown
  TnpB Polypeptide
MEIIRGYKTELKLNNKQRTACLRHAGCARFAYNWGLARKQAAYAARKAAADPQSVKIPTAMDLHKELNALKKTDFPWMYESSKCAPQEALRDLDTAFSNFFARRAKYPKFKKRSKGIGSFTLTGAIHVGPDWIQLPNIGKVRLFEHGYLPQDTDLTTTDRKTLKKRAKKGRIGTEPVHYLSATISERAGHWFVSVQVREIVPDPEPATGDAIGVDLGIKTLAVCSDGQEIPNPKALRRNLGKLQRTQRRHSKKQKGSKNRKKSKQEVARIHYRIGCIREDALHQATAQITVKAKPASERPQAIILEDLNIAGMLKNHSLAQAIADVGLGEFRRQMTYKAHWYGNRLYLAPRFFPSTQLCSQCHRLPSVPLDLSVRTYCCEHCGLVIDRDLNAARNLVWLYTASSAEIDACGENVRPMVLALAAVSVKQEPDAI

SEQ ID NO: 62273 - protein, 404 aa, Lactobacillus sp.
MFLAEAVLFQREEVNRMIKTHKIKIYPNATMRKVLNSLFDYRRYCYNQALETWNAMYDESTILADKSRRPNERKVRDELVENKQDWQYLQSARVLQLAVRDLAKGWKNYFNPKMPNHAKPRFKSKKWSKHVFKTDRAKVIDGRLRLDKPHGSGVWYDIRLAEIPRWQGAIKLVTVIEEADGYYACLAIEVTDTVVEKHGDRVTGVDANVARFDYKDANGYQRINTLPQRLLKLYQHITAYQRQLARKRVTNPTNFRSNNYRATRTKLKRDYQKVSRIQEDLLKKFTIKLVAEWDVIAIEDLDNLHMRMNKRLAKNLHRSMFGKFKQMMVYKCAWRGVRLVLVDPFYPSTQRCSQCGYIKTGDDKIGLNGNHLYHTGHDDYVCYQCGAVMRRDENAVENLIQYAS

SEQ ID NO: 62274 - protein, 423 aa, unknown
  TnpB Polypeptide
MIEITLVTSSLLYKDKNEQLYNYFNDITPLFAFLVRRTIHHLNHGLNGEDLTKYRTRLKQEYRLTNKFAKAVVTTAKNTLKLSTAAGDYLHSTYAIKIKKVNAKIIKTKAILNNPKTKKHRIKPQKTKLFWLQMKKNKLIQLQNNGSKPILTFGTKKLLNNNKELFFKKRDNQIVYIGDKYDFCGNQQFQLFYDKARNKFTYKIRREDQYIKDSKYIYGEFIIKDNIAKKEILKTLKSPKSNPLSFRIIKRNEALHLQIMYRTHSEAKTRYSNGVIGVDFNKGFVTISEINQNGKLLNLKRLDYVHKGKAGVTKNSMHHLVKNLVDIAIKSGKDIVIEDLKSLNKNKKEKTERKQYNRMINNLKFSKFRNFLKTRCDKSGVNLSLVKSYNTSKIANNKYCYDMKLNIHSGASYVIARRFYNLD

SEQ ID NO: 62275 - protein, 379 aa, unknown
  TnpB Polypeptide
MEQMTITAKIQLSVFDTDKVLLDNTMSVYRDACNYISDYVFRTHDLKQFSLNKALYSTLREKFGLKSQMAQSVFKTVIARYRTVLENQKEWIKPNFKKPQYDLVWNRDYSLTQCCFSVNTLNGRIKLPYFTKGMSKYFDHTIYKFGTAKLVNKHGKYFLHIPVTYNVSEASPSDICNIVGIDRGINFVVATYNSKHKSGFVSGKIIKQKRAAYSQLRKELQMRQTPSARRRLKAIGQRENRWMQDVNHCVSKALVESNPKHTLFVLEDLSGIRSATERVKLKNRYVSVSWSFFDLEQKLIYKAKQNQSTVIKVDPRYTSQRCPMCGHIEKANRNKKRHLFTCKNCGYKSNDDRIGAMNLYLMGINYLTDSQVPDTVTTE

SEQ ID NO: 62276 - protein, 376 aa, unknown
  TnpB Polypeptide
MKKNKAIKYRIYPNKTQQDLILKTFGCCRFVYNYMLEMSINAYKNGESFCTRNSFGYLLTSLKKEFIWLKEVDSRALVSANNNLAAAFSNFFKKNANFPKFHKKKFVGSYTTMCANRNIALLDKGIKLPKLGKVRASLHRMPKKDWRLKSATVSQSSDGKFYASILFEYESDINYQVDLNNAIGLDYASNGLFVDSNGKRGTNHKFYCESQKKLAKEQRRLSRMKGSKKNAPKSNNYIKRLRKVNKLHRHIANQRLDNLHKISTEIANQHDVVCVESLNMQSIANRSFGNGKATLDNGYGMFLRMLEYKLSDRGKVFVKVDRFYPSSQFCSCCGNRKKLTLADRIYKCDCGLTIDRDLNAAINILNEGLRLLNEVA

SEQ ID NO: 62277 - protein, 471 aa, Oscillatoriales sp.
LLTNYVYKLRPNRTQSSKMSAWIDMLRSQYNWCLGDRICQYSQQFIQGDYCDIRTKGEASPLTCFVSKSGATGNPWKDSKLNKEGKARNPRRSAGDIQITALPELKMARPWYSGIDSTVLQQNVKRLDIAYKNFFEGRGFPKFKNRSNFTSFTFVMGIKIKGNKIYLPKLGWMRFYNSRSIPDGFTIKACAVRKRQNGWYVSIRIEDKSVPEYSATAVGDSPKVIGCDLGITKLVHLSDGYQIKNPKLSTNKKAKRTLKIRQRRVSRKTKGSKNRKKAAIQVGKFHQKISDKRQAYQWKAANLIVSRNVDVIAIEDLNISGMMRRCKVKSDEKTGRFLKNGQSRKKGLNRAIFDASWGDLGLKIEYLAAKQGKIVIKVNPKHSSQECRNCGHIDQSNRDGEKFICVECGYHEHADIGAAKTIRDRALKMVRGDSAKLGVQHLNAQKISPRRTGKRGEFGNLSNQDIKNEIS

SEQ ID NO: 62278 - protein, 339 aa, unknown
  TnpB Polypeptide
VQAARNRAAEAVDGVVERWKQGKNASKPEFTSRFASYDARTVTVNDDHATLATIDERVTAEFVLPDEQQDTPHTAYLFNDDYDVKGATLHYDEVEDCFYLHVRTKPAVENTEADTGDAKHVSVLGVDLGITNIAVTSTGEFWSGGELNHWHREYEKRRGDLQQTGTRWAHETVQRVGRKQTGRFEQLLHTISNDFVAEALENGCTHIVFEQLNGIRERLPHAKAVHKWAFHRLFEYVTYKAESEGLVVKQINPAYTSQRCSKCGFPHEDNRPHNNGQDEFECLKCGYDVHADYNAAKNIGLKYLRDQQKSGRGGAPVGVRLNSGTLNVNGEYSPTPLTG

SEQ ID NO: 62279 - protein, 268 aa, unknown
  TnpB Polypeptide
VQGRLVYPVAHSPLINKYRGEYTNAQLVIDEKSKRIFIMVQVNIKDKEVIRKEDAKVLGIDIGIKNIAILSNNIFFNNKHVREVKGRYQYLKRKLQHLGTRSAHRKLKKLSGRERLFVRDVNHTILKKIVSLPYDVFALEALNPAYMRENGHSRRFRKMLGSWSPAELQKFMEYKAQDAGKFLIYVNTNYTSQRFSKCSHIDKINRYGSVFKCKNCGFELHADLNASRNIEVLVKSEYFRLLSTSQSLCFNETPLTGRGGDQQQAPKL

SEQ ID NO: 62280 - protein, 511 aa, Streptomyces sp.
LRVVVVERGGKIMGLRARGRSGLSVLREVAAPFVVPGPSGVAVRFTKASNDQWGLARRAQLAHVQGLEAGVRSIARRLSLPVGEKGRKGTPGGYRSRREWHAKSRRLRVLEDRLEAVRADWQTGVVHVVRGGKQLLNTRHHLDAAGLGEAGWRARWEAGRRFLAADGESGKRYGNETIRVSPDGEVSVKLPAPLAHLANAPHGRYVLTARVAFARRGEQWRDRITDHRAVAYRIHEDVLRGRWYLTVSWTNPPVNCVPLAAARTRGMLGVDTNADHLAAWRLDTHGNPVGAPLRFGYDLTGTATHRDAQIRHVLIRLLHFAKRHSLAVAVEDLDFAGEKTREKHGGRKRFRRLISGLPTARLRARLVGMAAELGIPVVAVDPAYTSKWGAQHWHKPLTSINRATTRHHAAAVAIGRRALGHPIRRRTAPPLQHQSDAAGHRTVQAGHGSRAREETRPRIPGPRTRCVSPDTERKRATSASKTVRDAPDAQVRVQGSLLLTEEERCHGVHDR

SEQ ID NO: 62281 - protein, 383 aa, unknown
  TnpB Polypeptide
MPLSFTRTLRLKVRAESYPWLNAAAVEVNQVFNWANATSFDARRRTDLKSKWLSGFDLCNLTSGATEYFERIGADTIQSICTHYAQKRTAAKRLKLRWRVSRGVRRSLGWIPFKAASLKRRGNALRFAGKSFRVFEREQLAGVKWRDGCFAQDAVGDWYLCLPVIVTAEQTVAPMEAVGIDLGLKTIATTSDGEKLEAGRWTVGNAVALANAQRRGHKRQAKRIHRKTANQRKDALHKFSTGIVRRYQTIVVGDVSSLKLAKTKMAKSVLDSGWGMLKNFLDYKSQSAARNFSVVSESYTSVTCSLCGSLSGPRGVNELIVRSWICRDCGESHDRDINAALNILTAGRCSGPCAGTSLSPHAVASSTASRRRETGKRLREVAA

SEQ ID NO: 62282 - protein, 406 aa, Lechevalieria sp.
VKRAFRYRFYPSETQAVELSRTFGCVRRVYNLALHVRAEAWAQRGERIGYGATSALLTAWKRTEELAFLNEVSAVPLQQTLRHLQMAFAGFFAKRARHPRFKSRKKSRASAEYTRSAFRWRDGALTLAKMAEPLDIRWSRPLPEGAVPSTVTVSRDAAGRWFVSMLCEDPSVTPLPVVDSVVGIDVGIDHLLVLSTGEKIGNPRHGRRDRTALARAQRALCRKQKGSRNRARARVGVARVHARIADRRSDFLHKVTTRLVRETQTLVIEDLAVSNMVRNRSLARAIGDAGWRQFRQLLEYKAGWYGRQVIVVDRWFPSSKLCSICGVLAPTMPLHVRTWTCGCGTTHDRDVNAARNILAAGLAVSVCGAGVRPQRNTPGGLSATKQKPRGASRGNLLVHEREEVNP

SEQ ID NO: 62283 - protein, 269 aa, Planktothrix sp.
  misc_feature (3)..(3): Xaa can be any naturally occurring amino acid
MMXITGKIKTVTISKTSTDKYFASILCEVEGTDIKQSGDNIVGIDLGLKDFAITHDGENATKYANPKHLYRHQKNLAQKQKKLSRKTKGSFSREKFRKTVAKVHEKITNSRQDFLHKLSRKLVNESQVIVVENLNVKGMVKNRKLSKAISDVGWGKFVNFIDYKLKQKNGELVEIDRFFPSSKTCSCCGHVLDELSLDIREWDCPNCHAHHDRDENAALNIRNEGIRILTEGGGNPVFADGGCVSPPASKSKGHRSVNSEAYTDPIRAV

SEQ ID NO: 62284 - protein, 362 aa, Thermoanaerobacterium sp.
MKEGMNLLRAYKYRIYPTKEQQEYLIKVFGCVRFIYNKMLYDKIEHYNQTGKMLNSTPAQYKRKYPFLKEVDSLALANAQLNLEKAYRNFFMDENFGFPKFKKKRGYQSYTTNNQNGTVSLENGYLKVPKLKTTIKVKQHRTFEGKIKSVTISKTPTGKYYASILVETEVEKLPNTDKKVGIDLGLKNFLVLSDGTKIENPKWLGKTEKRIKKVQRDLSRKQKDSRSYEKTRMKLAKLHEKISNQRKDFLHKVSSRIINENQVIVLEDLKVKNMQQNKHLAKAISEVSWSEFRRMLEYKAEWYGREIIIAPQKYASSQICNKCGYKNADVKNLALREWKCPNCGAIHDRDINAAKNLLKLAM

SEQ ID NO: 62285 - protein, 389 aa, unknown
  TnpB Polypeptide
MTQKFKKNIGSQMGQELAERAFATYEKFKYGKAKKVYFKSYENFYSVREKGNITGLRFFKEDCCISWLGLKIPVIIKNNDKYTQSCFLDKLLYCRLLKRVVNGKNKYYVQITFEGTPPKKHKVGGENEIGIDIGTSTIAIVSDNKVELKILAENIEINEKEKTRLQRKLDRQRRANNPNKYNADGTINIENKEKWKKSKSYVKTKLKLSNLQRKITEKREQSHNILANSILEIGTIVKVENMSFKGLQRRSKKTGISEKTGKFKKKKRFGKSLSNRAPALLIEIINRKLEYIGKNIIKIDTFKVKASQLNHSTNEYEKKSLSKRWVEILGNKIQRDLYSAFLIKNVKENLEEVSIEKAQKEFKNFVKLHNEEIERIKKGNVKTLKCMGF

SEQ ID NO: 62286 - protein, 459 aa, Mycobacterium sp.
MAKFEIPEGWMVQAFRFTLDPTAEQARALARHFGARRKAYNWTVATLKADIDAWQATGIQTAKPSLRVLRKRWNTVKNDVCVNIETGVVWWPECSKEAYADGIDGAVDAYWNWQNSRSGKRDGKRMGFPRFKKKGRDPDRVTFTTGAMRVEPDRRHLTLPVIGTVRTHENTRRVERLIAKGRSRVLAITVRRNGTRIDASVRVLVQRPQQPKVTDPGSRVGVDVGVRRLATVATADGAVLERVPNPRPLDAALNELRHVCRARSRCTKGSRRYRERTTEISRLHRRVNDVRTHHLHCLTTHLAKTHGRIVVEGLDAAGMLRQQGLSGARARRRGLSDAALGTPRRHLSYKTGWYGSQLVVADRWFPSSKTCHVCGHVQEIGWAEHWQCDSCSASHQRDDCAAINLARYEDTSSVVGPVGAAVKRGADRKTRPGRAGGREARKATGHPAGEQPRDGVLVA

SEQ ID NO: 62287 - protein, 156 aa, Filamentous sp.
  misc_feature (156)..(156): Xaa can be any naturally occurring amino acid
LLQQRVSRKKLGSNNRRKAQEKVTKLHEYVANSRKDWHRKLSHQICKGVGMVFVEELNLIGLSKAMLGKHCLDAGWGQFFTILEQTCWKYGVYFQKVSAHKTSQICPNCLVETGKKELSERTHSCSSCGYTTDRDVAAAQIVLIRGLAAVGHTACX

SEQ ID NO: 62288 - protein, 374 aa, Sulfobacillus sp.
MDLTLTAKVQLYPTLEQEAWLRQTVEAYRQGCHDVSGIVYATHNLQQAVLHKETYRLLRAQFGLRSQMAQSVIKTVIARYKSVLANGHPWTRVRFTQPALDLVWNRDYFLKGERFSLNTLAGRVRIPFARKGMERFFDGTWQFGTAQVVHRHGRWFLHVPMTQDVSAIDLADIPQVVGLDFGINFLITAYDSQGRTTFFPGRAVKARRAHFTQLRQTLQRRQTPSARRRLKRIGQRENRWMTDVNHQVSKALVVRYGVKTLFVLEDLKGIRGATERVRRRDRYTSVSWAFYQLRQMIEYKAALQQARTVAVDPHYTSQTCPQCGHVARGNRDKRRHRFACQQCHYRSNDDRIGAMNLHRQGIEYRVTGAIAARP

SEQ ID NO: 62289 - protein, 406 aa, Candidate division WPS-2 bacterium
MRWMHRVRLYPKRSQAERLEFMLDVTRQTYNALLDERRYAWTARRIRVTTKMQYAEITALRAEDSRFAAVYRECVDAVLHRLDLGFAAFFRRVKNGETPGYPRFKPKARWKQLEFPHGDRALKLDQEQKWVRIPGVGTVRLRKGRAIPDFGRAFVAEKNGRWWASFECEREPKALPKTGKVVGIDRGVHVLAATSEGVLIGNGQHGERLRRIVSSHQRALDAVSVKDAKGRCLNRRDPGRIAAARRLARAKEREANARLDGLHKAAHKIVKSADVIGLEALDVRAMTRSAKGTIEKPGRNVAAKSGLNRVMLDAGFGTFAALIREKAEYAAREVVSVDARYSSQTCGRCLHVDPKSRRRRRFCCVACGWTCHADVAAALEIGRRAEKQRISELSWARTPLTTHDAA

SEQ ID NO: 62290 - protein, 341 aa, Cyanobacteria sp.
LPLIVDNLQEKQLLSRLQAARQLYNACLNEAMARMNLVRNSKAYQLAKQIDRKWKKARSDAFSAARQAYRYSDYDIQAYATIVSNRSKWIARAIDSNTQQTLATRAFRASEKVLFGRAKSVRYKIPSRFRSVEGQTNKQGVRWKDNQLVWGFLKLLPIIDKNNPVIGHGLNSPVKYVRLLWRELNGRRRWYVQLVNEGMPYQKEKNYVADGVIGLDLNISNVAFVGDNKAGILSFAEQVPTYEREIKALQRQMQRSQRCLNPLNYEPDFSSRLGRSSAIKKGKHKKETKQWKKSKTYQKIARKKRELERRKSAYAKSQNRRIVNEILRHDFRLPDARDGRN

SEQ ID NO: 62291 - protein, 543 aa, Streptomyces sp.
VGGGLREVAAPFVVSGPSGVAIRTRLKSLSAGDETVLCLVGDLLGSLASRDLKARCAAGLDHDSEQWAERKRVLTEESSSRWAGSVTKATHDQWALARRGQLAHIQSLEAGIQTITHRLSLPVGAKGTKHVPGGYRSKQEWHAKSRRLHLLTDRLRTARSDRDAGVVHVVRGGKRLLNTRHNLKEAQLTEPEWRKRWQAGRRFLKADGESGKRYGNETIRVTDDGEVSLKLPAPLTHLANAPHGRYVLAARVSFVHRGEQWTDRVTANRAVAYHIHEDVERGRWYLTASWTTPPVKTLPLEAARASGLIGVDTNADHLAAWRLDQHGNPTGEPLRFGYDLSGTADHRDAQVRHALIRLLHWAMRHGLAIAIEDLDFTAETTREKHGRRKRFRKLISGMPVSRLRARLVSMAAELGIPVIAVDPAYTSRWGAQHWQKPLTTTTRKTTRHDAAAVAIGRRALGHPIRRRTTPPRTHQSDGRGHRTVQARPGTPGREGNRPRIPGPRTRSVHAGRGENAVDQNAQHRSGRSAEREYWQQDSLPLSS

SEQ ID NO: 62292 - protein, 256 aa, Bacteroidia sp.
MIPKNSFFEVVFVYEDKTNYVKIKPNNQVMAIDLGLNNLATCVTNGVVRPFMINGKPLKSINQYYNKKASNIKSGLMKRNAKHWSAKLDTLNACRARKINDYLHKASAKVVKQCLENQISTVIIGDVANSNYKINLGKKTNQNFVNISLGQFIEKLKYNLERHHIKVVVREESYTSKGSFIDNDILPKKYEEAKSYRFSGKRVKRGLYVSKFGKKINADVNGAYNLLRKETPEFSYASLHNSNGVEGWLIPHKLVV

SEQ ID NO: 62293 - protein, 390 aa, Streptomyces sp.
MISGMKRVTQVKLLPSPEQTAALECTLRTVNDAANWVSGVAFERGVPREYELRKHAYAALKARGLGAQAAQHVIKKTRDAYTALKANLRAGNLGKPGSKRRIKAESKPIVFRPNAAQPYDDRCLSWQYDAGTVSIWSTAGRLKNIRFACSADALKTLREHRQGESDLIERDGAFYLVATCDVPDIPLNENPDGFIGVDLGIVNIATTSTGYRAAGRGLNRHRKRQLGLRKKLQAKGTKSANRLLKKRSRKEQRHTANVNHIISKTIVTTAERTGAGIALEDLTGIRSRVRLRKDQRAQLHSWSFHQLAAFVEYKAKRAGVPLVYVDPAYTSQQCSECGHIERKNRVDQATFACRNCGLTMHADDNASHNIARKGETVWIAGRESRVPVTP

SEQ ID NO: 62294 - protein, 341 aa, Actinomadura sp.
MARQVKRAFRCRFYPTDEQAAELSRTFGCARLAYNRALEARTRAWYGEQRRVSYVETSAMLTAWKKTPDLAFLVSGPLDIVWSGHLPEGAEPSTVTVSRDAAGRWFVSLLCDDTITRLNPADRAVGIDAGVTSLVTLSTGEKVTNPRHERRDRERLARAQRDLSRKAKGSKNREKARVRVARIHARIADRRRDLLHQLTTRLVHENQVVVIEDLHVAGMVRNHRLARAISDAAWRDLRTMLEYKADWYGRELVVIDRWFPSSKLCGDCGTVAGSMPLNVRQWECGCGAVHDRDINAAKNVLAAGLAVSACGADVRPKRREPGGQSATKQETRPARVGVPRH

SEQ ID NO: 62295 - protein, 407 aa, Thermus sp.
MPRAEAVVLKLRFPSKAKREWLDRTAGLFHQGVQLALDYALSAKTSNRGKIHAATYSSIRALGLPSEYCRMAVNEAVQVARSHFGLRKKKRRAGKPRVRTQRIGLGVSAYKVVGTALRVSTEKKGEFLWFPLSVPAHFRDKLQYVKGDARLFRRGDEWFVMLPLSVPHTPTVRDGDGQVTVIGVDLGIARLLTAKHPQGCLVVNGKPIRHRRERFASLRQRLQRHRRTDLVRAIGSKERRWMTHINHKVSKQLVDLAARYPNPVLALERLDGIRDRVRGSKKFNRTLNSWAFRQLVDFVQYKAARKGVQVVFVDPRGTSRTCPRCGHADRSNRTTQAIFRCVACGYQGNADVVASLNIAAAALDVLRHGPPDTARPHKGQAPSVGRGLGGVKVWVSAHTDSNLQGSM

SEQ ID NO: 62296 - protein, 223 aa, unknown
  TnpB Polypeptide
MKACRYYVSVLVEISAPEVNGNFSDGIGIDLGLKDFAVVSNGTVYRNINKTARIRKLEKQLRRAQRKLSRKYENLKKGEPTQKANIRKQKLKVQKLHHHIENIRTDYSNKTIAEIVKTKPSHITIEDLNVSGTMKNRHLSKAVSSQKFYEFRAKLKAKCSEYGIELRVVDRWYPSSKTCHCCGCIKKDLKLSDRIYSCTCGYVEDRDFNAALNLRDAENYEVA

SEQ ID NO: 62297 - protein, 387 aa, Methanococcoides sp.
MFLTKTVILKINFPDNDLVETMQKYSEGMNHVSKVLFENGKTMGAMKLQKLVYPYLRENLGLKSQMSCNIPRQVAGCYKTLKEQIKTKRSHWQQVEFSPTSMTLSYKRDFTIDENIVKITTLNSSRKAYAILNYDYAKQYFDGSWKYQASEVVKHNDGNYFFHLSIEKEIPDKNIIEASTFMGVDVGINYLAVASTTDKKCKFFAGGKIKNLRNHYRSMRTRLQSKGTLSAKRMLKYISGKEKRLMRDVNHKISKEIIKFALENNVSVIGLEDLTGIRDAALTKVHKKRRHTHSSWAYRQLQTFIEYKAREAGILTHYIDPAYTSQTCIRCNHISKNNRNRLSFECEICGYQNNADLIGAMNIEHKTRDFRYILESQGCMSAAQTIA

SEQ ID NO: 62298 - protein, 390 aa, Nonomuraea sp.
MRPTRHQVIALTACLDDHRALYNAALEERREAYKRTKISIRYGDQSAQLKEIRACIPDQARWSFSSQQATLRRLDKAFRAFFDRVKAARTPGYPRFKGRGWFDTVEWPKDGDGCRWDSQPGPPAATFVRLQGVGHVRVHQHRPVQGRVKTISVKREGSRWYVVLSCDDVPAETLPATGAVAGIDMGVASFLTTSDGAQVGNPRHLAASADRLAAAQRNLARKKRGSKRRRKAVARVAALHGKVRRQRLDGAHKAALALVQDYDVIAHEDLRIANMTKAPAPKPDPDQSGAFLPNRAAAKAGLNKSILDAGWGVFLTILAHKAESAGRELIAVNPANTSRTCARCGHYAKENRVTQAEFRCTACRYEAHADVNAAINILRAGLALRDAAAA

SEQ ID NO: 62299 - protein, 323 aa, Nonomuraea sp.
VAQIAKRTYRYRFHPTVEQADELARTFGCVRLVYNRALEERTRVYTLEGRRVSYTESSAALTRWKKTPELAFLGAVSSVPLQQALRHLQAAFANFFARRARYPAFKSRKRSRLSAEYTRSAFRWRDGRLTLAKMDAPLEIVWSRPLPEGAEPSTVTVSRDAVGRWFVCILVEETIRPLEPITNVVGVDAGIIALMTLSTGEKVANPRHERRDRRTRLVRENQTVVIEDLAVRNLVKNRRVARAISDASWRQMRSMLEYKAAWYGRELVVIDRWFPSSKLCSACGALRGEMPLDVRDWRCACGARHDRDVNAAENILAAGPAER

SEQ ID NO: 62300 - protein, 405 aa, Streptomyces sp.
VKLRYNVRVYPSASQRGNLARAFGSARVVWNDALRVRRDAYARGLPRLTATKLSKQVVTEAKKTPERAWLGEVSVVVLQQSLRDLEAAYSNFFASKNGTRRGPAMGPPRMKKKTARQAIRFTANARWSITDGGKLRLPKIGDIQVRWSRELPCEPSSVTIVKDPSGRYFASFVIEVEDKPWLGLDVEETDTGIDLGLSSYAVLRGRKIASPKFFRRQERKLRRAQRGLSRKQKGSNNRRKARRAVARIHARIADQRRDFIEKETTRIVRESQAVYVEDLNVKGMATRRGRLGKSVHDQSLGIFVRTLKAKCKRYGRTFVAIDQWFPSTQLCCTPACGRLTGPKGREQLHIRAWTCTGCGTRHDRDENAEVNIRAAGRKRAAEMRREAERQNACGEHVRPRTPGQR

SEQ ID NO: 62301 - protein, 448 aa, Deinococcus sp.
MRITVSAKLKLKHNAEQKSALDRITFAYRDALNFASKKAFELDKTSSAPKLHKAVYDDLRAQFGLGAQLACTVERQVAATFKIQWTKLKQNLKAREAGQTKRRYKGLDTAPKFVSRTLEYQYNRDYSWKKDGKVSIGTLKSRLVLGYEGYHKHLEYIQQGCETGSAKLYYQKSKKQYYLIVALNVELPDPHPTHHANVVGVDVGQRYHFVATDKDGKSLFEKGKAVGQQKDHFARIKKALQRKGTRSATRRLVALSGRERRFIADRNHTLAKKLLTRFPNAIFGLEDLTKIRERTERCSNPKASKKAKRVKRHQSQWSFAELQAMLAYKAPLFGSLAVRVDANYTSQACYKCGHVSRGNRPKAGLEFVCEACGHRGHADRVASVNIALRTLLVRQDWMSTGALSMRPDVSDVEASRPHSGCRSAQEVKAARLKRYTELRWNPDTSLRL

SEQ ID NO: 62302 - protein, 406 aa, Gammaproteobacteria sp.
MQVTRVERHIVNMNQRLIDLSYSSKNLYNCATFIMRQNFIKNHKIINYNTMDKIIKRDYPVVYKGLPAQSSQQVLRLVENSFQSFFKSNQEYKKNPDKFKGRPKLPKYKDKEKGLNIVIFTNQQCKLTNNQIRFPKKAELPVLNTTVNNLQQVRLIPKYRHFVIEVVYKKEVPNEKLTHDNVLGIDLGLNNLATLVSNQPDVHPMLINGKPLKSINQYFNKKKAKLMSFIGESVPSHSIGRLSKKREQKIDDYLHKASRNIIDYAVETNSGLIIIGENKHWKQEINIGKKNNQNFVSIPYDKFKAMIAYKAFDMGIDVVFTEESYTSKSSHLDNDPLPIYKKGESHSFTGKRIGRGLYQWSKGIINADLNGAIGIIKKVVPEALDSLIEIRNRGAGFAPFKVMNTF

SEQ ID NO: 62303 - protein, 648 aa, unknown
  TnpB Polypeptide
VAKKEQQFKTYKTHVDSDKATFDALNHLMQCFLNYKTKRFAAIKKDNITKVDTKKADAFRQTQTFINDKGQRKDTFDARYSRTMEKSLFAFTSSRKACQTDAIFLKEGKLERLKDKYTKAKNKYRNYKHHSSHDWQGVKERRNRMNFFHRKIQQTQSTIQSLQQMINNDSKDNIVFGSKALWDKYNTFIHNPEASKEKKEKLKQQWSMRGSEIECYGHKGEEYGNNNIRLKKCANVDYDALRLKNKQIEETNKNKKKGKKQKNKNQKQKKIAYPFDVEIKVPPVLQQHYGKFITLHNVKFYYGKEELLDNVEACEQFQTDLRDYTNEKNRYNNAIKKLKKQLKVIDNDDDVKLIHHQIKTIEARIEKNEETKPLADTYGCRAFSLLINKNVDDRLSVHVSVEQREHDLITHDKNGVIGIDINYDNIAIADINKVGQLLSSHVYRYNFGQTHSSIYREHHIHKAVNAIIEKAKALKKDIVIEDLDFIKTKIKQDKGINPKHNYKTHSFPYAKVINKFLTEGFLHGVKVHQKNPAYSSLLGKICYTKAYGLSTHQAAAYVMARRYYGLKEKIPPRLVFNHRGVSCSVSLPEDKVHTHVRKKQHSHYIVNNELNIQSLYQWFKKIVLAYQQFPLTKFDRSNRSWERSPSIA

SEQ ID NO: 62304 - protein, 366 aa, Bacillus sp.
MLTNKAYKFRLYPNQEQEVLIAKTIGCSRFVFNRFLSLWNETYQATGKGLSYSACSSQLTQLKKEFTWLQEVDSHSLQSSLKHLADSFDRFFKKQNEAPRFKSKKNKVQSYTTNIEKKNQLPEVSIAGNRMKLPKLGWVRFANSREVQGRILNATVRRTPSGKYFVSLLVETEVQELSKTHSSVGIDVGLKNFAILSNGEVFTNPKWFRTLEEKLAHAQRILSRRKQGSSNWNKQRIKVARIHERIAHARKDYLDKISTHIIKNHDVIAIEDLQVANMLKNGNLAKAISEVSWSTFRKMLEYKAKWYGRQVIAVNPHCTSQTCNVCGHTAKENRKTQASFKCVSCGHEDNADINASKNIKDLAIAN

SEQ ID NO: 62305 - protein, 421 aa, unknown
  TnpB Polypeptide
MLKAIKIRLYPSKEQMGYINRQLGCCRLIYNSVLGWKKELYESEKRSPSNEETRVFIKNLKIEKPFLKEVHSKALQQSLIDLNTAYNNFFRGLEKGQNIGFPKFKCKKKYNDSCRYPVDAFIGVRGNRISFTRALNDIHFKCSRRDEKYLNERQNFVRSTTIRRTSSGEYYASILIDYENSENQAIHIHGDVKSNSVGIDVGIKAFAVTSEGEIFESMKFTKLEREIKKYQRQLAKTENDSKRHHRIRRKLAKKHEKVANKRLWYHHYVANSLLKDNFIIAVEDLNVSGMLKNHKLAKALQAQAIGNFFTILSYKAEWQHKKIIKVGRFFASSKTCHCCGYKNKNLSLSERAWECPVCGSHIDRDYNAALNILEEGIRIYKENIGLSSSEFTHVDCPTVDDRCSCNLKSSGRLNREKNVFQ

SEQ ID NO: 62306 - protein, 465 aa, Chloroflexi sp.
MNRKPKRPRRQKRARPGEPQVITRAVTHIRLVEVNPGKLATLDELAPIYLALCQHYITLFCIEETPNNLRTPLYATPLSERWHRVAIMQAAGIARSWRTNRATAYQEHQEALAAYREQQAEGTLAPTSQEPTWREWNVPTLRETAIQANANVVVCEPSQDSTYDYWLRISTLSKGKPLYVPVKLAPYHQKALKDKKVNSSVQLNKRDGVWWLTLSYDETVAPQTAPDAPVVGIDVGITNFITTSTGRHYGSMHGKLRERHKRDREKRRRKAKLRACLKKKNAKKVPSTSSRSGQRLIRHTRQMINKAVNDCYKDHPDAHFAYEQLSVASMRFRAKAMNAYLRASNLAHLPKQIAWNARKRGVTATPVTSAYSSQECSTCHYTHRNNRPDQKTFFCQFCGYQAHADTNASVNISRRVGDTQLRACRDRKAVKALLMQRHEQWKKRHGKEDITVVKRKKPCVSSRRP

SEQ ID NO: 62307 - protein, 342 aa, Helicobacter sp.
LGKVSYPRFKRKREYQGSFYIGGDQVKIIQGDKKDYIKIPNLPKIKMTEKLRFKGKINGATITQRGNKFYVSIQTDITQEEFNRTHKPIANNHTLGIDTGIKAFATLSNGLQVFAPKPLNRLTRRLKRLSRQVSRKSKHSACLPKTKGREQNAPHTRKSANYLKASLRLNRLHARIANIRNDFLHKLSTALVRHAKTLCLESLNVKNVLKNLRLAKALSDVSISAFNTFLDYKAKYYGREIRRVDTFYPSSKTCSHCGNVKSDLKLSDRVYHCGACGVAVDRGFNASVNLVKHLVGGEHTELTPADMTALLDDCQSNGLVTSMVETRMQQKPLKFFSIDRIL

SEQ ID NO: 62308 - protein, 277 aa, Helicobacter sp.
LGKVSYPRFKRKREYQGSFYIGGDQVKIIQGDKKDYIKIPNLPKIKMTEKLRFKGKINGATITQRGNKFYVSIQTDITQEEFNRTHKPIANNHTLGIDTGIKAFATLSNGLQVFAPKPLNRLTRRLKRLSRQLSKKRHCKTKNDGVKKSRNYLKASLRLNRLHTRIANTRNDFLHKLSTALIRHAKTLCMESLKVKNMLKNSKLAKALSDVSISAFNTLLEYKAKYYGREILRADVFYPSSKTCSSCGSVKKDLTLSDRVYQCGACGAVIDRDFTRV

SEQ ID NO: 62309 - protein, 213 aa, Helicobacter sp.
VGVKLGDYFLCFVCEKEDNPKPAGGKSVGLDFGLKTFLTCSNGAQIPSPLFFSKYLPLIRACSRSLSKKKRGSHRRLKARLRLARLHRKVAHLRKDFFHKLANSLAKQYSHIFIEDLNLKGMVKLWGRKVNDLAFGEFVAILEKKTQVIKIDRFYPSSKTCSSCGTLKEDLSLKDRFFHCPSCGFSLDRDLNASINIYRVGASTLGVEAIRPA

SEQ ID NO: 62310 - protein, 487 aa, Neobacillus sp.
MSKKKTEQPITYTGMVMNPSVQESMILDELMRKFQSAKRYLRERIFDGLDRKEAVAKAKPLFLNNSRYMRDAFLEAEASISSQIELLPLYVEQYRNSIQKIKKQVERIQHSKKFNKDDLIQYKQSRIKKSTKKMNYYQYHIQNDSVPKIVDGTNKKILLLNKHKITKQEWVNSRTNALFSRGEASKGGNENIKLMYLQNSLIEMNVLNPLSSKRNDRLRFEVQYSEKHILTILPHLTTQNAYSVRIMREDKKYYVHLTFDQKIESPHDFSKGCAGIDINPDNLSVSIVHPNGNFRISRVFWMNDVNSVRADKRNCIIGNTVASVIDWVKSNGIEIIAIEDIYFKNDLSKNTKFNRVSSNFVYRKMVTAFISKCIKEKVSLAQVPAYYSSLIGRVKYQKPYGLSIHQSAAFVLARRAMGYEEKIPKQMMSVLFAKEAKKGHPLSNLFKHWKKVQAWVFTLKERAFQHGQQYKHWNMDDFILFASLPRK

SEQ ID NO: 62311 - protein, 365 aa, Neobacillus sp.
VNQTIGVCRYVYNLFLKRNQELYEKEKKFIGGLDFSKWLNNIYTKENDPWIKKVSSKAVKQAIMNGDKAFRNFFEGKAKYPRFKKKRNQDVKAYFPKNNKTDWIVERHRVKIPTLGWIKLKEFGYIPTNAQVRSGTVSQKAGRYYVSVLCEVPPKEKTINNHDGLGIDVGIKNFAVCSNTDVYENINHLPKIRELEKKLKRQQRKLSRKYESKKKGGESCYKNIQKQVKIIQKLHARLTHIRKEYVRDVVTRVAKAKPSFITIEDLNIKGMLKNKHLADCVRKQNFYYFRTYLEQKCKQNGIELRIVSRFYPSSKLCSCCGHKKVCLSLSERFFICDLCGIEIERDFNASLNLKYARNYTIITYR

SEQ ID NO: 62312 - protein, 247 aa, unknown
  TnpB Polypeptide
MKDNNRLPRGTKYKDNIKLHNCRILYDKSGKFWYANIGIEYNKKNISLDKNLVLGIDLGIKDFAILSNGMVFKNINKDKKIINLEKEIDINTKIIMNKFKINNDLYSNNIIKLEDKNRKLYYKLKCIRKNYIYSVVNEIIKLKPYKIIIEDLDVNRLIQKSEHFKGQFYNQYLGMFKKLLSNKCYEYNIELVVANKFYPSTQKCSNCGNIKKGNDKLSLNDRIYRCNKCGLEIDRDYNASINLKNYK

SEQ ID NO: 62313 - protein, 462 aa, unknown
  TnpB Polypeptide
VHIAATAPAEAGRRAGVTMPEFLATGRSGRSRKEKLVQYNVVTSYRSWQECIKAVNGESDKYVSQGWKRTVNDSAPTYGEDYINLGAVDKQYAVIENDDPFGDGEIVLKMVIRGAWYRLIFRFDNARFTDGKVTLPLVKIEDGAPVFIFSIVTDNPVIQFSGDYTIGVDVGINDYATVVVRNTVTGKITHQTTLSQRIHSLWNSIKASEKQVRQLREKANSLSLYDRQAIMAARDEADLHRKAASRKKRELAILAAQEIAYLSHQFDNAVVAVEDLSWIINTMQNGRWNRGELIKWLTHYVSQNGGWVVAVNSANTSQVCHVCGSKVAHPTHKVSACPKHGMMDRDINAAVNIAARAVPKVEKARKKRSKNSKLQPQAPLKTPIARASLKYPGRDRTKNVPTPKRKKKGVKTLSSPARAQATCLDARVLADCNTCSINVTGTSQAAIIQDNMTYTCKLCNLN

SEQ ID NO: 62314 - protein, 363 aa, Clostridiaceae sp.
MKLIPDHGQEVLIENTLNSYIATVNSIVADFISKYATDNRTSADVSANMPSALKNQAIQDARSVFKKYAKDLNTVCNINKKNPLKKQKITKVPILKKPVAIWNNQNYSLGENTISFPVWKERKSKKLTFRVVATEYQKSLLQNKLGTLRITKKRGKYMAQISVEIHCDENEGNSVLGIDLGLKIPAVAITDSNKIKFFGNGRENKYKKRVARSKRKALSKAKNMKALRNRSNKEQRWMKDKDHKVSREIVKFAKQNNVKVIHMEELSGIRQTARTSRKNAKNLHTWSFYRLARFIEYKASLAGIEVIYVNPRYTSQTCPVCGARNHASDRKYMCPCGFKTHRDILGAMNIVTAPVIGGNSLSA

SEQ ID NO: 62315 - protein, 385 aa, unknown
  TnpB Polypeptide
VGPFFGINPEYIKNEYLNEMKILRSTKCSVKFSTQKKKDQLKTVLQEYGRVVNTFVDHFWTNPLQSKTELLKPIVDIPQTWLSARLRQVDAREALDIISASKERWKGKPNKLVKPVHKGKRMYVSCTIAELTESKHAPKFDAWLHISSVGNKIVMDVPIKFHKHYNWLCAKGKRLNSYIITENYVQFVFETETGSKKTGKNCIGIDTGINALASLSTGQQFGTNIKLSIERVKRCKQGSKGQLKLRRALKQIIDEVAKTIIAFEPDLVVVEKLKDLGKNGKLRRRLSKNIRRSIGTWNWKYWLGRVEQRCEDNRISFRTVSPCYTSQTCSRCGHVDRGNRDGEMFKCQKCGHTDNADINASQNILGRFLTGPYGAGYKPLICNFA

SEQ ID NO: 62316 - protein, 360 aa, Deinococcus sp.
MSNNTTVRVFRFRLYPTKPQEAAMFETLRLTRTLYNAGLEQRIAAYRKQGRTVTAYDQQKELTALKAECPEYAGVYSHVLQDALDRLDKAYKGFFARVKRGDKAGFPRFKPRQRWNSFKFKEVWDRKKNQWLSPGKPVDEGRRINIPKIGAVKCKFHRPLEGTPKTLQIVLDVNEWYAVYSCEVPVHPLPVSGSAVGVDVGTRYFAITSDGEFVHNPRHLGSTLKKLRVQQRSVSRRKKGGNRRRKAAQQVAKTHRKIRRQRQDFHHKTARKLVNEHDLIAHEDLKVSNMVRSSLARSISDVGWSAFFDILRGKAESAGRVVVRVPPHTDSVCFANNPELHRIAGSTSGTRFSLTRIRSD

SEQ ID NO: 62317 - protein, 450 aa, Deinococcus sp.
VKVTLTAKLKLHHTREQKAALDAVTLAYRDALNYTSHKAFEMNKTSNAAKIQKEVYTTLRQRFGLGAQMACSVPRKVGATYKTLWTRVKQAAAQRAANPKARRYKGLDTAPKFVSRTLSYQYGRDYSFKTGQQVSISTLAGRLVLPYEGYRKHLDWIADGAQIGAAQLWYDTRKKQYFLLVALEIERPDPEPVTHQQVVGVDVGMRYFAVASNLSGKAFFKSGKETLRMAERFQKARKSLQQKGTRSAVRRLVALSGRERRFIADVNSSLASAILKTYPHALIGVEELTGVRDRTERRSRPNSSEAQRKANRRRARWSYAELLGFLAYKAPLLGSTVVKVDAHYTSQTCPKCGHCSRDNRPRKGLMFVCEGCGYQLHADLVGARNVGLRALLVRQDWMSTGRLSCAPDRPWNADPQAGSAGRDVSDAETKAARLSRYAELRWSPDTSPRL

SEQ ID NO: 62318 - protein, 558 aa, Moorea sp.
MRMMERSNARKPQDEHDSLIQKAYSVLGDNNQGSLQLSVTVGSVAVNQETTSSDKSLTGTPSSQKRKSSKTSVPDSTTRGKDLKPYWNGLCAQISSQLLLPVSTDLPGLGLNSLSTWSVSTVEKSWFSINLKVAQNQNLPQIFSESFTFCVALSTDSENTVKKSKKIRVFLNPEQRLMVRQWFGVSRYVFNKTVKILSDSETKANWKAIKTGILNDLPEWCKAVPYQIKSIAIKDACTAVREAKNKYKKTKQINRVRFRSRKNPVQSCYIPKSAVSSKGIYQTKLGELTFTEVLPDDICDCRLTSTNGDYYLVVPHKTTRNRAENQGRVVGLDPGVRTVLMQSLMGETPKTALHRFLSFFSENSVGKIGEGDFSRIQRLCQHLDNLISKISKAKGKQKRRMRKAARRMVIRIKNLVNELHHKAARFLVDNFDVILLPTFDTSQMSKKQNRKLRSKTVRNMLSFAHYRFKEFLKHKATENGKIVVDVCEAYTSQTVSWTGELVNIGGSKIIKSKIDGRSMDRDINGARGIFLRALGDTPWLRDQLALVSQNLPLVDFGS

SEQ ID NO: 62319 - protein, 126 aa, Clostridiales sp.
VANIRNDYRHKMTYRLASDNQVVCIEDLNVKEMMGNHRLARSISDASWSEFFRKLEYKMGDRGGILIKVPGTYPSSQRCSCCGRQERKVRDLSIRSWTCPECGAKHDRDVNAAVNILVKGLEMLAS

SEQ ID NO: 62320 - protein, 641 aa, Mycobacterium sp.
VAVIRLELDVSDPVVLRRVERQWAAVFRLRRALQRDAAARCRAYWAADRERAADPKALRERLGLSRKGFETSARRHIEASGWMRDHLTKAIGLHVADEVWETVDRHLFADASGRRHGPPRVGSWSEFTRIPGRARSHTKNRPVWETYRLVGSLDGHLGAYRHPQLPAVVTIATEARAQPTGSSILAQPARLTAPNRPASGSWADYDGVLAVVFTGLPAGDLVLPVRLPQGAGQWARLVHFLAVPQVWHKIDLVRVADRKAPGGWRYYAHLLVHQGGYQSPATRARRAEIPAGRRAGMDANVSNLSIASFAGERPEHLMVDRIDCTPEQQQAATRAATKARARQKALDRSRRNTNPDQYGPSRRQLKRAARRSQAGLAVKQITNPGGPRHARTDGVPLCAYRHDTLSRRYERTRRDHAAESRSASQAKQARADQVAARIVATHGHTITIEDCRISTWARRWGKRIALFSPGMLVAALQRECQAGGGTLYRASTSTTALSQHCLCANRVPKTLAQRTHHCGHCGLIADRDIAAAMLAACVELTDPDDPRTARVNYQLAHALQRAWQASQQAWEGSVNRYQPPAPPDCVGSARTGSRHPVASAEQAALGLPLNRPAPKPGRRGTSQNNQPQAGWRCMTQYGVNS

SEQ ID NO: 62321 - protein, 413 aa, unknown
  TnpB Polypeptide
MSKQTFIRQNYLIKPSNNGIQFFNQDTGNQRFVWNYFLAKSMERYESEKKFWFYYDMAKMLPDLKDEFEFLKLGNSQGLQQTLRQLDTALKGSFKSTKNKVKKGFPKFKKKSGTGSVTYPQGVKILDGKLEIPKFKESIKIKNNGMGLPQDYNSVTITKSATGKFHASFVVPFMIPDKVQINKNSSVVGIDLNSKHIVVLDDGSAIINPKHLLKKEKRLKKYQKQYSKKQKGSSNKNKARIKLARLHEKIANARKDFVEKITLDIVRNNDIIVIEDLNVKGMQKWNGRMIQSAPFGLIRSRLTWKANKLGKHLVVIDRYEPTSKVCSDCGQIHDFGLNTRWLSCDCGLELHRDHNAAINILHAGLRILEENPDKNFEVGTTFKACEETKFHDSSNGIRWVSLKQENTRSLVEY

SEQ ID NO: 62322 - protein, 288 aa, Clostridia sp.
MKSNGHPFSKVSFRNFEYDLVWNRDYSISDQSVSLNTLSGRLRIPFEPKGMEHWLHAGGRFGTARLIRKNRKYYLHIPVTLEVENRNILNHIVGIDLGVNHLAVSFDDEGNTRFFSGRAVKEKRAKSLALRKRLQACGTKSAKLKLKKLREKETRYVTAVNHAVTKALISQYGAGTLFIIEDLTGIRTVTEHVRLKSRYVMVSWAFCQFREMLEYKAALSQSEVLVTDPKYTSQSCPVCGNTTKANRNRRKHEFCCTICGYRSNDDRTGAINIYRKGCNTLFAEACQA

SEQ ID NO: 62323 - protein, 429 aa, Anabaena sp.
VILVFGCQQELIKCNKETKSIIEYLCFESNSLYNCSVYYARQIWLKTGKIVSGFDLTVEIKTNRHFNAGYASAMQQTCLNVGEAFQSFKKLLAKSKKGELDQKPKAPNYRKPGGLFTVTYPKRWLKLKDGFIRFPLGNQVKAWFGISEFFLPVPSNLEWSEIKEIRLLPRNRCFYAEFVYKTETAVVKLDKSKVLGIDHGLNNWLTCVSNVGTSFIVDGLHLKSLNQWYNKSVAKIKENKPQGFWSNRLAAITEKRNRQMRSGVNKAARIVITHCIENKIGSIVFGWNVGQKNSANMGVKTNQKFVQIPTAKLKNRIEQLCDQYGIEFIETEESYTSKTSFLDHDALPKYGEKPDGWKSSGRRLTRGIYQSFAGIKINADCNGASNILRKVSVMLGLDLSGISRGALSAPKKVLLWTLQKSPRLQTGEA

SEQ ID NO: 62324 - protein, 510 aa, unknown
  TnpB Polypeptide
MDIIRTVNADRRYYLDEDKIYNADSLVDTIRRFNDIKIQMYNHLYDLRYDNTGVFSDMTYSQWCTDTFGINAYYACAIYSAASGALASQSELNKIYIRSKEEDLKARDTKISSVKEQLERKQAVKKSLDLYRTTRQWKTPYTGCQLTVGNRTVHLPGKKTMDTGSFERMVEQNIRNLKHRLKMLISSRERAGKKLEDLKGFPPKRILFGTKKLYSRKDAVDKEGNPVVDREEWKQGFNDKRHASISLPGRHTSKDCNFLVRRASVKDLKEKKYLKGDKDALIIRCMDGTEAVLYGFHPAQLGEEWLKALFTAPVSRKPVCYSIQLKRDPDGRLYLIPSVTLLLENHHCNESLEDGCVSIDLNYDHVALTDIDKDGRYISGEILKFDPENKTSGQISDEIGRVMSKVGKFCADRKKPLIMEDIDTVISRGGMRYGNAKGNRHASVFAYRKMTSCLENQAYERSFGLIKIDPAYTSQMGKFLFMRKMGIHPRRSLLCHRAERNGTPRTASPG

SEQ ID NO: 62325 - protein, 419 aa, Lachnospiraceae sp.
MYLTQTNYIRHLPKNQYEAILEMCAYANNLYNVGLYQIRQHFFATHQYLRYEENYHLCKGNENYKLLQAGVSQQILRICDRNFKSFFALLGKKKTGAYSKKVRIPHYRTKGGKYLLVLSTNAINIRNGYLTIPMSRMFAKQHADLDAIRIPVPERIAGKHISEVRIVPVLNGKVLKIQYCYEQETEPKNLNASNALAIDVGIDNLASCVTTTGTSFIVDGRKLKSINQWYNKQLAHYASIKDRQHIKGFTKSMSSITDKRNRQVTDYMHKAARYIVNYCIANDIGTIIMGHNIDQKQSVDMGKANNQKFIQIPFNQLRTYLKCLCERYGIAYIETEESYTSKASFLDGDNIPVFDAKNPHTGTFSGKRVKRGLYRTKTNTLVNADINGACNIAKKGKQNLNAEGLCRGLLASPLRIRIV

SEQ ID NO: 62326 - protein, 354 aa, Azotobacter sp.
MNSMKQTKTLKVRVRDKYAPLLRQMARSVNFVWNYLNELGCRALRERGLFLSAYDMDRYTQGSGKELGLHSQTLQEVSREYATRRRQFRKARLNWRKSGGVRRSLGWIPFKSGAAQWKGGQVCHNGHCFKVWDSYGLGRYRFRSGRFSEDARGRWYFNVVVEVDVHPSLGQGAVGIDLGLKDVATCSDGTKLENGRFYRDLEAKLAIAQRAGKKARTRAIHARIANRRKDALHKFSRQLVNRYGEIHVGDVSPTKLVKTPMAKSVLEAGWGQLKTLLEYKCAHAGIVFKEVGEAYTTRTCSSCGSLSGPQGVNGLRIREWTCCECGVAHDRDVNAARNILAAGHGRPAVGIPVL

SEQ ID NO: 62327 - protein, 309 aa, Okeania sp.
MMHEFKIKAKKNQYAAIDEAIRTGQFIRNKCIRLWMDERGTGKAKLYRYCRLLAKEFAFANKLNSQARQAMAERAWSSISRFYDNCQKKISGLKGYPKFKKHSRSIEYKNTGWKLSEDRKYITFTDKLDIGKLKLKGTWDLHFYQLEQIKRVRLIKRADGYYCQFLIQADINVETTPTQKTTGIDLGLNYFIADSSGNVVESPKYYRKASKKLSRLNRRKSRKYRNPGKGKKGAKMVKAPKQRQSNNYHKARVRYARKHLKVSRQREEFVKRVANCVIQSNDLVAYVGAERRAGGRFECKRHGKKSAFS

SEQ ID NO: 62328 - protein, 404 aa, unknown
  TnpB Polypeptide
MLRWVRTSKAFRYRVYPTQEHVARLNAWESALRFLWNLALEQRRLGYARPRDERVYPTAFDQINELTELRAALPWLADVPRNVCSQLLVELDRAWQRCFARLARAPRWKRKGRDVLGFTEPHPKAWRVDGSNVRFPKLGTLRTVMHRPLEGKPKTCSLKRDGDQWFVSIVCELDVPKPAPREGPIVAIDRGITNFGATSDGGMIANPRNLEASLKRLAHAQRTVSRRKKGSKNREKAKVCVARIHRKVRRQRDHFLHVQSARLAKSHGVVVLEKLNVAGMIRGRCARSIADAGWSRFADMLRYKLAWSGGALVEVPAAYSSQTCSVCDCVDAESRRSQAAFCCTSCGYQDHADLNAAKILLARANRSGLRVEGSLKLGTLRSTKRIGLRVPRRPSESYALLGRG

SEQ ID NO: 62329 - protein, 290 aa, Mycolicibacterium sp.
LPKLGWVKFRAGRSLDGETLRSATLSREGRHWFLSVLVDDGRQTPETHASPGSAVGVDRGVAVAVATSGGELIDSQFVAPGERRRGIALQRKLSRCAKRSTNRDKTRAALAAVRARERRRRLDFAAQVAHRLAVANAVVVLEDLKITQMTKSAKGTIESPGRNVAAKSGLNRAILSKGWHQFALALASAARYTGTTVVKVPAAYTSQRCSACGHVDPKSRESQAVFRCTHCPHHEHADVNAAKNILAAGLAVTACEDQSRPAGRARSPKQEPAGNREELLLQPTTAAPAA

SEQ ID NO: 62330 - protein, 416 aa, Mycolicibacterium sp.
MLTGRRFRVEFTDEQVEYAERIGAACRAVWNTGLEQRREYRRRGAWMNYQSQAKELAEAKTEHSWLKAVPGHCLQQTLMDLDRACRERGTFRVRWRSGRRWSPSFRFPEGNKMAVEKLNRRHGRIKLPKLGWVKFRAGRSLDGETLRSATLSREGRHWFLSVLVDDGRQTPEAHVSPGSAVGVDRGVAVAIATSDGELIDSQFVAPGERRRGIALQRKLSRCAKRSTNRDKTRAALAAVRARERRRRLDFAAQVAHRLAVANAVVVLEDLKTKQMTKSAKGTIESPGRNVAAKSGLNRAILSKGWHQFALALSSAARYTGTAVEKVPAAYTSQRCSACGHVDPRSRESQAVFRCTRCTHCEHADVNAAKNILAAGLAVTACEDQPRPAGRARSPKQEPAGNREELLLQPTTAAPAA

SEQ ID NO: 62331 - protein, 404 aa, Mycolicibacterium sp.
MQLRYRYRIEPTPAQQAMLARVFGCTRVVFNDALRVRDEAYHAGVKVSDSGIQRRVITLAKTTEERAWLSEVSSVALVQSVNDSRRAWRNFFDSASGRRRGRRVGRPRFKSRKDHRQSFRLTRNGFSVRANGRLFVAKVGEVRVRWSRDLPSEPSSVTIIREPDGHYYASFVVEVAPTPLPVVDRETGVDLGIARLATTAATDGRRSDIENPKHLRRKLRKLARLEREKSRRQKGSANRDKSRRKVAIAHNEVARARRDYHHKQALALVRDNQVIHVEDLNIVGMVKNRRLARAISDAGWGQFVRIIGEKADRYGRTVHAVSRWLASSKTCSTPDCGHVLDELPLQIRQWRCPSCEVIHDRDHNAAKVILAASRAERLNACGARVSPQPIAAVGVEAGSTPTAA

SEQ ID NO: 62332 - protein, 387 aa, unknown
  TnpB Polypeptide
MKILLKSFKTEINPTLEQKVKINKTIGTCRYVYNFYLAHNKELHSNGEKFMSGKSFSLWLNNEYLPNNPEYAWIKEVSSKSVKKSIEDANIAFHKFFKHQSGFPKFKKKGKSDVKMYFVKTDKKSTIWCERHRIKIPTLGWVRLKEKAYLPTTKSGYVIKSGTVSMKAGRYYVSVLVEMPEIEKETLLNEGVGIDLGLKDFAVLSTGKVYKNINKSARIKKLEKQLKREQRCLSRKYENLKKGESTQKNIQKQKLKVQRLHHRIDNIRTDYINKTIVEMVKTKPSYITIEDLNVSRMMKNKHLSKAVASQKFYEFRNKLKVKCEDNGIELRVVDRFYPSSKQCHCCGRIKKDLKLSDRTYKCDCGYIEDRDFNASLNLRDAKIYKIA

SEQ ID NO: 62333 - protein, 393 aa, unknown
  TnpB Polypeptide
VLKAIKVRLYPNKEQQNLLNNHFGACRFIYNATLNYKKVMYSDYKIKLSKFDLFNELVNVKQDSNFGWLNDVKAECLRESIANVDTAFKNFYRGNGYPKFKNKKSKQSFLQTQNFKILENSNKLVFLKNKIKFKCSESNTHELRTSKIKRITYSKDNLNHYYASILIENNKDLTLSKLNNEVGIDLGLKYFLITSDGEFIDNPKFFRKSEQKLAKQQRFFSRKKKGSNNKEKARIKVAKIHKKIHNQRNYFLHEVSNKIIDENQVIHLETLTVKNMIMNHKLAKSIADASWSKFVTMLKYKALWRGRELHQISRFSPSSKTCSNCGWVDVDLTLGNRIFKCENCNHTQDRDLNAANNIKNFSINNREELSQINASGEQPLGTRRKKKNQVQTL

SEQ ID NO: 62334 - protein, 424 aa, Thermotoga sp.
MARSVNIAPEVQNMAKHMKTYKFPAPPEYHTKCKELSKLAGRVYSKTVSLVRKIHKKKGFWLSMNTVQKYILRWAQNIPLHSQTKQALVQRYFEALKSYFKASKTNQGLKPPFRTPKYTNVVWKNQAVKLLEDGTLRLAMGNGNDPLYIPTTLPKEVDIRRVELVYDKRQDKYFFHVTVSFESQTNISGSKVVGVDLGVVHPIVASTEDKAVIYNGGVLNSKLRYRNKKLAELQKKLAKKKPGSRRYRKLVRAKRRLLAKLYNQIKDILHKYTTHFVGWCLTEGVGTIAIGDLRGIRDRVDYNSTANQKIHQWLFRKISDLIKTKAEALGIEVVFVDESYTSQTCPVCGAKHKTSTRNFRCLGCGFEWHRDAVGALNIRKKYTGESLVVGALASPVGVRYNSHLRCPVIMWSPWKPTFEWAKTS

SEQ ID NO: 62335 - protein, 397 aa, unknown
  TnpB Polypeptide
MKTYKFRLYPSKEIEVKLHRTLDLCRFTYNALLAELGEWESISRYELQSMVLDLEICNPELREVHSKVLQYENYRLFSNLKALGETKKKGRKVGRLRFKGKGFFKTFAYNQSGYKLMLTGKRCQTLRLSKIGDILIRCHRNVEGDIKQIVVKKEQSGKWFAFLITDEKKEIKQKEIKNVVGIDTGLIDVMWDSDNIKTPNPKYLNRYAEQLASCQRRMSKKVKGSTNRDKFRVRLARRYEKLANTRTDFVHKITRYYANKYDAVGMEDINYSQMARGRFGKSFLDSCCGQIRQQMAYKVESTGGQFVAVDYKGTTIRCNQCQTEVRKEIWERVHNCPSCGISIPRDYNSALEIKRLTLIELGLERPETTPEEMMALHRKVQLSSVNQEAHSSTSGET

SEQ ID NO: 62336 - protein, 404 aa, unknown
  TnpB Polypeptide
MLKAIKIRIYPNNEQEIYISKLLGTCRFVYNHLLSYKINEYNDNKHAVSFGESGKKLVELKNEFEWIKEVHSKVLQQSLINLESAYKSFFKNGNGFPKFKSKHNSSNSCRFPSDGIRGLKGNRINIIKQLSNIHFKCSKNDEIYLNKNQHLIKSGTLSKNKSGQYYFSILIDKPITKVLPITNNIVGIDIGIKDFIIGSNGINFENIKVIRNNEKKLKKLHQNLSKKVNGSNNKNKTRIKLAKVNNKLNNIKNNYLHHIVNQLLNENQVIVIEDLSVKSMMNNHNLAKSIQELSINKFTNILKYKAEWYNKDIIQVDKFFSSTKLCSCCNYKNNNLTLNDREWTCPTCKTHHDRDFNASMNLLNEGKRILNIKIPSSSGKLTLQESTSLDNSANEENNDYYALL

SEQ ID NO: 62337 - protein, 581 aa, unknown
  TnpB Polypeptide
MKRGNASIEASVFRYGLLPPLDWGEDCEAELARQTQLWNQLVEIERAHVEKVRAITAADAAAGEAEQHWRALAEQRLDLVEQRKMRRKAARGKIPTPDLDEAIAVLSSPLQQATIAAKEARHNAYAAARDTLRSLDQEHYAAVKAAYQASGLWWGNYNAVVASYERARRACLKTGAELRFRHHDGSGRLTNQLQGGMSVAELFSGSRSQAHIGEKPAWMTHRAGVSLTVTGFVRGGVRRNITWPMVLHRPIPDEMRIKEIVVHRERVASRWKWHATFLCTSEPPLRALVNGPAVAINIGWRATPMGIRVATAIRTADDQPDYIVLPHDGIPAAVGRCEETAGVRADALNSMLSLLRQADWQGAPAELVEIARPLLRAPRVSAGRLASLCRFWRELRTEWNPELQAELEAWRRTDKRRWETDAHRRLWIRDARTDFYRREARRLIGAASVIIINRHDMAKTARNTDLPPRARHQRVVAAPSELRHWLLNCAERSGARLVVHTEGNSQCAECGGKLNVKEPEELRWRCPSCGRWLDQDQNYAKLMLAAVTDLPPREPDAVGETREARAAERLPREVVQRRTAE

SEQ ID NO: 62338 - protein, 380 aa, unknown
  TnpB Polypeptide
MHKSFRYRLYPTKAQARVMQQTLDECRWLYNHLLEQRKTSWEERQESISLYQQLGTIPSLKLERQSLASVHSQVLQNVGVRLDLAFQAFFRRVKAGEEPGYPRFRGAGWYDGFTYPQEGRKGGTWLETLPNGKQAIRLAKIGAIKMVYHRPVEGHIKTTCVKRCSTGKWYVTFSCEVEDAPLPERTEQVGIDVGLKTFATLSDGSTIDSPRFFRAEEKALKRVSRQHAKLAKGTPERRKHRKAVARVHERVSFRRHNFVHQESRRIVDGHQVIAVEDLAVNRLLHNHCLSKSISDAAWGMFASILSGKAASAGRQYIAVNPAYTSQDCSRCHHRQKMLLSDRVYRCPCCGLVIGRDHNAALNILGLGQQALGLVPRSPCL

SEQ ID NO: 62339 - protein, 383 aa, Nonomuraea sp.
VQLRYNFRLYPSPGQRAALAKAFGCARTVFNDGLRIRQEARENGLPYVSDGDLSKRVITQAKQTPERSWLGEVSAVVLQQALADLNTAYRNFFASLSGKRKGPKIAAPRFRSRKDNRQAIRFTKNARFTVTAGGKLRLPKIGDLKVKWSRDLPSEPSSVTVIKDASGRYFASFVVGAGGESLPEIASEVGIDLGLTHFAVLSDGRKIDNPRWLRRAERRLKKAQQTLSRKAKGSNNRKKAVVKVAKAHAEVADTRRDWAHKLSTELVRDNQAIYVENLAVSGLGRTRLAKSVHDAGWAQFTAMLAYKAARYGRHFVKVDRWFPSSKLCSACGALQEKMPLNVRSWACSCGAVHDRDVNAAVNILAAGRAERLNACGGTVRPAA

SEQ ID NO: 62340 - protein, 445 aa, Nonomuraea sp.
VPGSVTCVPGCPRCGRGPASWPPPAPCPQRRCGVTSSGRGMSGRPRRVAVRRSYKFLMRPTAHQQAALTACLDDHRVLYNAALEERREAYRRSRVSIRYGDQSAQLKEIRAGDPDRARWSFSSQQATLRRLDKAFGAFFGRVKAGRTPGFPRFKGRGWFDTVEWPKDGDGCRWDSQPEHPSATFVRLQGVGQVRVHRHRPVRGRVKTISVKREGSRWYVVLSCDDVPAEILPATGAVVGVDMGVASLLTTSDGEQVGNPRHLEASAGKLAAAQRDLARNKRGSRRRRKAVARVAALHGKVRRQRLDGAHKAANALIRDYDVIVHEDLRIADMTRSPAPKPDGEGGYLPNRAAAKAGLNKSILDAGWGVFLGILAHKAESAGRELISVDPRNTSRTCARCGHLAKDNRVTQAEFACRACGHTAHADVNAAINILRAGLALREAAAA

SEQ ID NO: 62341 - protein, 367 aa, unknown
  TnpB Polypeptide
MYEFRIYPTGKQRHRLFTQFDLCSKLYNNLLGDARTAYKETGKADTRKFTLINAIKTAKGKDPNLSQVYSQSLQNVGDRLSKAYANFFRRIKERKAGKNIKAGFPRFKKHFRSITYPQSGFSFKSDNRLFCSKIGNIPIVLHRVPKGKIKTLTIKRNQAGQWFATFACEVNIKAVRNKGKAVGIDVGLENFATLSDGVVIENPKFLRKSEDRVKLLQRRVSRKVKGSKNRRKAKHRLAKLHLKVTNQRKDFCHKLSHRLVTEYSKINVEKLGIKNMLRNHHLAKSISDASWNDFIQKLSYKALSAGSVVVEVNPRGTSQRCSNCGEIVKKSLRIRQHTCPTCGLSIHRDLNAALNICASSTVGLTGT

SEQ ID NO: 62342 - protein, 467 aa, Tolypothrix sp.
LAAKISNFVTEIPLVITSKDSRVLAARLEVGRQLYNAVLAEGKNRLQMVRDSELYQQARLINKKDKKALEAAFQKAREAYRFSDYDLQSFANKTAIASVWIKSHLDAQTIQKIATRAFKAIERMAFGKAKKVRFKQKGQFASLEGKTNKQGIRWTGNGVEWSKLKLSGIITNDPVMLHGLNSKIKYVRLVRRILNQKTYWFAQLVCEGEPYQKPKNIIDDGTVGIDLGVSTVAIVGDEETIWTYAAVELTSKQRKIRKLQRKMDRQRRANNPDNFNPNGTVKKGSKRWHKSNRYKKIVAKKREIERKQAAQRKSSHGKLVNQTLALGKHIKTEKVSVKAWQKNYGKSIGFKSPASFQSELKRKAENAGGTVLMFSTRKTALSQTCLCGNKQKKSLSQRVHNCSKCGLTMQRDILSAYLSRHVDPKTETLSIQSARNGWLGMEQCLLDGWRNGSNQSARTATSSRVTC

SEQ ID NO: 62343 - protein, 431 aa, Tolypothrix sp.
MLKVIKIRIYPNAQQQQSLAQAFGSCRWLWNYCLNLMNQTYKQTGKGLSGYEVKKLIPQLKKEHDWLALTYSQCLQQVCLNLGVAFNNFFEKRAKYPRFKSKHGKQSIQYPQNVKVADNHLSLPKIGDISAIIHRTIQGKVKTVTISRNCSNQYFAAILFDDGKDKPESSTEGKAIGIDLGLTHFAVTSDGSKFDNPRILNKYEKNLKIKQQQLSRKQKGSNNRNKARQKVARVHRKINNCREDFLHKLSRRIVNENQVIVVENLNVKGMMQNHCLAKSIQSVGWGMFCTMLKYKAEMEGKITCEVDRFFPSSKTCHVCLNQVGSLPLDVRSWTCESCQTKHDRDINASINIKDEGLRILTRQSPQVGKPFRQSLMGETNMTALPHHGAGSSGTGDKACRPDVSRSNRGRKKSTTTLSAGQEAYCVREASL

SEQ ID NO: 62344 - protein, 714 aa, unknown
  TnpB Polypeptide
MVKFPCEVVGVCAPGVGDLPHRLEPVQGREDRRRLLRRARLHSRARRHRGGPEPCCRLRAGIGPPQAQGPARVPGGADAAVGRCERLPGHRGRPRSRVRGQRQPARPGVPAETRHLGNADRGAQGPADPVWVPLVRPLRHRARTPHRSGQPCRRRFRRPNPRPCGDHLLLLGPAVRAAEITAGAGAGPAGPETARCRQGLMTATPVARSYRLPSSANASKLAAVAELLPLWRRGLGRSQAVIRRYLLTTGELPRWVDSRGWGGGLSQRQWDSVNQQALGADRSWLGNCERVFRNLVLGSSLGEATIRDLLYVNKAQAWYRPVDAGADGLVRLSAKKTVPAAVLALARVIMRRVRKLVGAPDLRRVRTMVMDGKIARVTAAGNAGHADYWVRISTAVRGRPAQIPLHAHKAFTGRLSRPGAVLANHCQVIVRPDGNVEFRLVVKTPQAVPEKERTRDIALDWGLSTLFATSDGTLHGRGFLGRLRDYDARLQPLVAALNRQHIPLRDSRRYRALARDIRGFVTNEVNRCLNRILHPGKGGDPAIARVISEKLDFRGLAREGRLSRSLRRILASAGRAAVARKLESLREDHGIETVEENAAYSSQQCGGCSYTARNNRRTQAQFRCRFCGKTVHADIGGARTLLRRSQTGGLPPFRNRGQVLDHLDERFQARWGLSFAEAAQRQHHRAPRVAPRADPRAAPVVQGRRKGNGFPSVT

SEQ ID NO: 62345 - protein, 442 aa, unknown
  TnpB Polypeptide
MIAIKTLKLRTLRARKGKDKILRDLMEDWKHLVEFFFDICVRHDVKSKGKLHALAYLASKSIVPDKKWHSKYRYTAMEVAVATYKSWTKLKKKRRAEKRPEFKRFFLKLYKESNGAGVYKIFRRGNAWFIKIATTPRNSVVLPLVVSDHEAEFLEAWSRGRIVFGEAYMRRLGDGSYELHIAVKKEVEEKDFERRLGVDINERNVTLSVLDGGRVIYAERISLDSIVELDYTYKMVWIRRLQKKLYSGENPKYLPRWKIEIIRRYASRWRQRKEHLLHVVAKRIVALATTFQARIVLEDLRDIRSRILNKSKKLNRRLSLADFRKLQFLIEYKARWVGVPVSYINPRRTSRLCPICGFPMTGLSQRELVCRRCGVVFDRDFAASINIALRDVARGVRAEAPMSWVPRRSVSADGCSWEGMICAMKGRYSLPNITKFGNTYPK

SEQ ID NO: 62346 - protein, 394 aa, unknown
  TnpB Polypeptide
MILAHKIRLAPNNKQATYFAKAAGVARFTYNWALAKAKERYEQDKSSKFNEGEMRKELNKVKREQFPWMLEVTKCAPQLAIKEGLARAFKNFFAGRAEFPTFHKKGVKDSFSLSNDQFAVSGKLIRIPNLGYVRMTETLRFCGKIMGATISRKADKWFVSIQIEMPSPEPIHKSHNENQAVGVDLGVKDLAVLSNGTKVAGAKPHKALLSRLRRLNKAVSRKQGAKKGEKRSNNFIKSKKKLARLHERIANIRNDELHKLTTGLAREFGIIGIEDLNVSGMVKNHRLARAINDVSFFEFRRQLEYKAQIKGGIVVAASRVFPSSKLCSTCGYKNENLTLKMREWNCPECGSNHDRDINAAINLRNNAVSYTVSACGELVETVTSAKQELNIKTG

SEQ ID NO: 62347 - protein, 274 aa, Cylindrospermopsis sp.
VISRQANKWFIAIKYEIEKPTIAVDRPTVGVDIGIKELAVCSNGKVFSNPKAYGRMSKRIKRLQRSVSKKQKGSNNRKKAVSKLAKMHTRIANIRKDAIHKLTNYLAKNHSEIKIEDLSVKSFLKNHKLAGAIADCGMYEFRRQLEYKTEKFSSKLMLVDRMFPSSQICSNCGQHRHKMPLKNRVYVCPECGHIEDRDLNAAKNIERWFEGIFIPSRSDLAVSSTVSACGVDKPLKNHLETTMNQEVNAEDDTWFWTAEETDALWFWSASSTIV

SEQ ID NO: 62348 - protein, 484 aa, Chloroflexi sp.
  misc_feature (213)..(277): Xaa can be any naturally occurring amino acid
MAAKSITTIRQVLSYQPHQAAWFAATQALFNQVVAFYFEVIQAHEKLLDLNNKDALTALEMLTHTTQKNPTPVMPLEEIREDLPALFRRAAINAALGSARSFFSHLQKWRKRKEQAVAKGKTFTERPPVPPRTWNKSVPFYGGQWKERTPSSILLKVWTGTCWSWLKVRITGRELPTDAELGSPSLIRRGKQWWFHTPIEKHFARPAKIERQXXXXXXXXXXXXXXXXXXXXXXXXXXXXXXXXXXXXXXXXXXXXXXXXXXXXXXXXXXXXXXXXXLAHLVSARIVQFAHHHGATILVFEHLCDLKPARGKYSRRGNSKRAFWMKGRIFKYAKYKAWDQRIITSRVNPRNTSRECARCHSLVARYQEGQPAEGYTEGAPLVLCHQCGMQGHADRNASLVIGQRLVDRSQKPLQEKPSTPLPRVERVEKSTGVLLSQEVKRKEEPSSLRARHGGRNEHGTAQGRRRRMGTPPPSIPRQLRLPLE

SEQ ID NO: 62349 - protein, 366 aa, Methanomassiliicoccales sp.
LIEEYFKVKRRALEAIFSRVKLSRKAHLEFDKEDRRALRDELLRDWKYSKHYVDSAINSVIGLVKGWITLYNRERIKKNPKITRKTVYIKNTLFSYRSKVLRISIEPNRRYLEVDLSKYPWIPRDSDRIGGLILTEKELIITVKKSVEPKAEKWASFDVNLTNITALVDGEVKRYDLRKLYHVHRVYEIKRQRIQKLSKPKTSKKLLKKYTQREENRAKDFMHKLTTAIARELRGIGSGAILENLKNIKNRVLNGSRENNRKLSKWNARMFQFMLEYKLRWNGLAVNYVNPKSSSKVCPLCSDSMATYEGRLMKCCKCGLIMDRDVVAVLNLQMRGAGFPQRALNEIVEREELSADESSKIQCIST

SEQ ID NO: 62350 - protein, 480 aa, Streptomyces sp.
VRRKVRLGEGETERVACASASAFRGLDTVTGEVLGVDALGKRVGWLTALVESMCTSVTGARWNRPDLAQLASGKDRSGVRLPSNAWMALRMLGWAATAPEGVYVPDRVRRVAEEQAGRALRSGWWRTQITDAVLATWPTGNPDPMRRTAGEWEALRAACPDGQAVAASVLRSRTRQVAAFHTTHGRLPADICELEAAPGGGRQVVLAAADKQLATLARCEDDPARYAVLTVRLPVRPEPRTRTDWHPVVIRFRLPPTIDHTAALHAPTLRLRGGRLRLDLAHTAAAPTARRDGHARAVAFDYGLNTLLTGGTLTLTGDTQPAVHTDARPVFFRPDGVLAKADRLRIQAEQLWAKAARLTALTDGRTASGLRPDPLTAAKLAVLRTEHTRVSKRRARLNEQLAKAAAHFMVGHARAARASVIYLEDLRDMEARGKGRTLNTRLSSSVRGQIVAHTRHQAARYGIAVVIVPARGTPGTAPPA

SEQ ID NO: 62351 - protein, 213 aa, Thaumarchaeota sp.
MLFKGGSALSEFKKITKRIVKEKKRLAKHGLKTSRKLEMLYNRCTVLLKNVREGLAREVVESLYDKGVGEIDIGYPKGIAQSKGNEINSNYWIYSAIIGCIKEAAKEYGIKVKPVNEANTYKMCSLCGETNENERIKMGLFEYPRTGKVINADLNEAINMMKNIPKSYDDRGKWLKAQPVVCSGCATTSNETIKAINHEPMISLEGTTFPLGL

SEQ ID NO: 62352 - protein, 411 aa, Okeania sp.
MKLVERHVISKSHYLWSACDHKAFLSKNLFNLANYYYRQYFFTNQKKLNFTELYQQVSKSDDYQALPTKVSKQIIRRLDQSWKSYFAALREWKKQPNKFLGKPKIPKYKHKIKGRNILPYPDESIYKKALKKGICHLSMSEIKIPTSQTEIIEARIVPKSSCYIIEIVYEKSEETTENQQIAGVDLGVNNLIAVTTNQIGYSPLLIKGRPLKAINTFYNKQRSYLQSQLKTNHNKTNSHRLKKLTQKRNCRVENYLHTASKRVIDWCVNHEIGILIIGHNQTWKQEIKLGKKNNQQFVDIPHYRLIEMLTYKARLRGIKVRVTEESYTSQSSCLDGDNLPSYGDKKTKFSGKRVTRGLYKTRENKLLNADVNGSLNIIKKVIPDVFDQGIKGLPFNPVVVDPLRMTIPSDL

SEQ ID NO: 62353 - protein, 409 aa, unknown
  TnpB Polypeptide
MEKRRTVPVKLDLDSADAALLRDTVDEFLWAANYVTRHAFQGEYVITSKTTLNDETYEDVREETALHSNHVQAARNKAAEACKSVVKQWKQGKKASMPHFTSPHLVYDHRTATFHDDYVSLATTDGRIEAKYVLPDEQRETPHADYFFSDEYETTGAELHYSNGNWMLHIHCKKEVESDTLDKAATENRTVLGVDLGVNNLAVASTGTFLTGDEFDHWRREYENRRGDLQEHGTRWAHENMQAVGRKEEDRFKITLHRISNDLVAEAREYGCSVIVFEDLTDIRERTGASWGHKWAFNRLYDYVEYKAAEYGIDVEQVDPENTSRRCSHCGFTHPDNRDGEDFGCLKCGYENHADYNAAKNIGLRYLRRNQTGDGGGAPVGVCLNSGTLNANGEYDPPAEVVRDGEAVS

SEQ ID NO: 62354 - protein, 457 aa, unknown
  TnpB Polypeptide
MAEGAYKRMLEEMVEYAVRHNASQAALHKAFYARFRREYPWLPTRLIKGAYRDAARRAKSFRAAKKRGRAYTEMPEVRRVALTFSDSRDWRLEGGMLKLRIGGRWVELRCSGHKQLHRYLYGGWRLAEELKLRRRGKHWVAYLTFKRDFDVDPDPRNVVAVDVNENNVTAAVFVGGVLRGVLRLETGLGYMVIAYAERRKKITEGHHTSDREVRTKLKKFRERGRKLDVVRKVAKFIERLAEEHNAVVVIGRITHRAKEKMGEDKGRKLRHRIHQWSVRALVKLLDEKPVHVVEVAESGTSSRTPSGARISFRPLVIRTAVRGASGRARPVKMRLRVGKARGEVWERDVMAAVNIGLRHLQMGGFVALAPTGAHAARATLVIPRPGPAPLAFPRQRGNAPESLRAAREPQKEGSGNILHSLHAVGVCSARAEMGRGAASGLPPLTSATTSLTSVTTR

SEQ ID NO: 62355 - protein, 541 aa, Streptomyces sp.
LRELTVPFVVPDPSGVAVRDRLRVSEADAVVLAEVGRFLGSLAAGDLAARSRQGLGHDAASWAVRKRELTGRSSARWAGSITKATHDQWALARRGQAAHLSWLRGQITQIEERLARPLGARADKQEGLVRGYASRGEWHAKSRRLHALKDRLAAVEADWSAGRVRVVRGGKQLANARHHLAAAGLSERAWRERRQAERMFLAADGESGKRFGNETIRVNGAGQLSIKLPAALAHLANAPHGRYVLDATVRFRHRGQEWRDRITANRAVAYRIHHDVARGRWYVTASWQRATALVLPLPVALAQGVVGVDMNDDHLAAWRLDTHGNPVGEPQRFFYDLTGSADHRDAQIRHALSRLLHCTRRFGATAIAIEDLDFTDGKSREKHGRNTHFRRLVSRFPTARLRARLVSMAAEQDICIVAVDPAYTSRWGAKHWQKPLATPTRRISRHDAASIAVGRRALGHPIRRRTAPPPHHQSAGAGHRTVQAASGARGCEEPRPHVPGPRTRCAPPDCGPKAGDQCAQHRSGHAAEHEFRKQDSLPLSL

SEQ ID NO: 62356 - protein, 291 aa, Bacillus sp.
MNVTFRKKFGAVKIKLPKNLRHQKIAYIEIVPKHKGRFFAVHYVYEVQKPQMKQLSTSIKHVAAIDLGVDNLMSIGTNTGKTLLVNGKPLKSLNNYFNKVISRQQQVNIENGLSKRVSTKKQAQLWTKRDRQINGYFSQAVGLLFKWLRENRIDTVVIGYNAGWKQKSDMGKRINQQFVQIPFLKLIQAIENKGLKSGIRIIRQEESYTSVASFLERDTIPTFGEARKKHLTFKGSRVTRGQYISQNGTGIHADINGAMNIMRKAKIVDIQTELRVETPVKVHVQTRKTVA

SEQ ID NO: 62357 - protein, 417 aa, unknown
  TnpB Polypeptide
MYLTIKQQVKHLTKEEYNILRELCRIAKNLTNQAIYNVRQHYFQEKQYLRYESNYHELKNCQSYKLLNSNMAQQTLKNVDTMFKSFFALIKLAKQGKYNFRYIKLPNYLPKNGYANLIIADFKIKDDNTLTIPYSYTFKKKYETKIQVKVPKILEDKKVKQIQIIPKFNARFFEIQYIYEIQEENIKLNTNNALAIDLGVNNLCTCITNTGKSFIIDGRKLKSINQFFNKQNAKLQSIKDKQNIKRQTKQQYLISRKRKNRVDDYINKTCRYIINYCLSNDIGTLVIGYNQSFQNKANLGKRNNQIFTQLPFGKIREKLEYLCRRYDINYVLQEESYTSKASFFDNDNLPTYNMDNPQTYEFSGSRVKRGLYQTKDGYLFNADCNGALNILRKSSVVDLSVLYGRGALDTPKRIRIY

SEQ ID NO: 62358 - protein, 419 aa, unknown
  TnpB Polypeptide
MYLTVKQQIKHLKKEEYNILRELCRTAKNLTNQAIYNVRQHYFQEKQFLKYEANYYELKSCENYKLLNSNMAQQTLKNVDTMFKSFFALIKLAKQNKYNFRHIRLPKYLPRNAYSNLIIGQIRLRQDNFLTIPFSNAFKKKHKEIKKIQIKIPKILENKKIKEIQIIPKFNARFFEIQYTYEIQEEEINLNTNNALAIDLGVNNLCTCVTNTGKSFIIDGRKLKSINQFFNKQNANLQSIKDKQNIKKQTKQQFLISRKRKNRVDDYINKTCRYIINYCLSNDIGTLVIGYNQSFQYKPNMSKKNNQNFTQLPFGKIREKLEYLCKRYNINYVLQEESYTSKASFFDNDDLPVYNMDNPQKYIFSGSRVKRGLYKTKDGYYFNSDCNGALNILRKSSVVDLSILYSRGALDTPKRIRIS

SEQ ID NO: 62359 - protein, 550 aa, unknown
  TnpB Polypeptide
MSPSGRPVLLFDVLAQDRDRCPADRSGEVRPGPQASRPPVVLPQVRELLPQPAGGHPLEAVDQPGDGHGGREVHQQVDMLGFPVELGQLRAEVRAHVPHDLLHPLQVSGTEYLVPVLGDENQVDMQDEDTMPASADVPVSGHETNYTGGVQLRYNYRLYPSPGQRDALARAFGCARVVFNDGLRARQEAHAAGQPYVTDGELSARLTASKATPERVWLGEVSAVVLQQSLADLNTAYRNFFASVTGKRNGPKIEPPRFKSRKDHRQAVRFTANARFRVLASGKLRLPRIGDVSIRWSRDLPSEPSSVTVIRDSAGRYFASFVIETGPVILPETGPVIGIDLGLTHFAVLSDGRKIASPQFLRRAEKKLRRAQRSLSRKEKGSRNRDKARVKVARAHAQVADARREFHHQLSTTLIRDNQAVAVEDLAVKGLARTRMAKSVHDAGWSAFVAMLEYKARLYGREFHRIGRFIPTSQTCSACGVKDGPKPLHVRAWQCHECGTWLDRDINAAVNVAKAAGLAVTACRAQVRPGLALAQRGEAGTHPKSRQEAA

SEQ ID NO: 62360 - protein, 517 aa, unknown
  TnpB Polypeptide
MLPLNVTLSYYKRRDIQEEIIKAAKNREIAVRFDDKFGSRPDVLNNPNDILELAKQKATSFHASEELWSNPLQLNPNMKKNEMDSLRIGWDLVLDIDCPMWELSRLITWLVIESLKEHNIKAISVKFSGNKGFHVGIPFESFPIKINKIPTKELFPYAPQKITLYLLDYISSNHIKIENEKIIFGKKNTILLKDIIEATKKSMDELTTRYCSRCNEVIKKEREKRTEFLCKKCGSVIVANEPYMKCIKCNIFMEKFESGICNCGSNDYSRKFNTLSVLNIDTILISSRHLYRIPYSLHEKSGLVSLPLDQDDVLRFKKDSTKPENVKISEFKFLDRENVVKGEASRLIVQAFDFNPRVDEIDFEEKKKFEILEDAVPEELFPPCIKLGLAGLKDGRKRFVFVLINFLVSAGWDYDSIEKRLKEWNKKNPELLREVNLLGQLRYHKQQKKKILPPNCNNSAYYLDIGICKPDNLCNKIKNPVIYVVRKSKHLEKDDWGKKNTDKKDKKAISPSNKKQL

SEQ ID NO: 62361 - protein, 266 aa, unknown
  TnpB Polypeptide
MPCPRRPVFSQPEGNQSRGGFRQRHPISRNPLLVSCYGFKIKDGNLIIHLNSEKLESIPSNSHTKLLLSDPELKVRSFTLTRTSLSLCVSKNVRDMQKEVAGAVGVDRNLRNLTVGNAEKATYYDMAKIVDVASNTRGILSSFKRSDVRVRRRLSLRYGERRTRRTRQLLNLVSKRVVKNAKDKRQVIVSEDIAGIRRLYRKGNSQRRSYRAKMNSWPLHEVKRQIEYKAAREGVPVITLTKGETRGPRWIVHDAGRDSKCQSEAM

SEQ ID NO: 62362 - protein, 408 aa, Acidobacteria sp.
MSNSTKHGVKGRVYLTPEQVLLAARQFGCARFVYNHLLNFSQTRYSHNKTKTSPAQRSLELTRMKTELPWLREVSAQSLQQTGRALDTAYKNWFDSLMGKRPDKVKPPRFKKKSNRQSARFARNSFRFKNGVLSLSKIGAIPIVWHRRVSGEPSSVVLSMTPAGRYYVSFQVEQPLPVVGPASHRLAVDMNTKTFNFFNGRRWSQVSLPRPLLAALSKLRTAQKRLSRCEQGSKNREKARSRVAHICQRVTDLRTDFLQKLSTQLIHKNQVIMVETLGTKNILKNRRLARAISDAGFGEFVGMLEYKCKWHGRTLVKVDRFFPSSKLCCICHQKNVDLKLQDRWRCSGCHTEHQRDENAVVNIFVEGLRILAEGRSVLACGGTVRPKREFRRVPVKQETSSEVCGHAA

SEQ ID NO: 62363 - protein, 709 aa, Halobacteriales sp.
VFAPGERLPERDRPPLARLDEQLRIRGGIGGRRRAEEFVRVLSDVHRAVHAAPQGPERPDLLGEDELVDRDDERRTGDDRPDEPLEHGLDHMSLDCIVERSDTGSRRPQSMNTRKIPKASPPASARRLTSISRWNQYGFLSVRSRRVSFAEGSLMPDGGFGHQQFRAVAVVADRVAELSLIGAEPVELPLRVDGLPFGQPLRRFERLVLPLSWGVGDHAPKPDVTALALVQELRKFKEKASPFRAGMNPTWFSASADDGRAGYSTFTFTVHRSELSTYGDIGYVWRNRSSRAPTAHASATTRRCATTSIRSDSPPASSGTVADGRPNVSGTLVARFPAQTRSWRTSRATNATPTYIHSRVSEFFKNSVRRLRVGTSSVETGTRTRIRPATANTTATTRARRSRSSKRASSTTPRTTAFASQKAKISKTGGATSPSASTTLSARSVEPSRMFNKSVRCTKMASGGCTSSVASRSKPPDAPGDGMAGIDLGICNLAAVSFGDEAVLYPGGALKEDEYWFQKERAKCDDSSSAEAKRLDRKRTDRRTHFLHTLSKDIVAECVKRSVGTIVVGGLGGIREDENGDTRNWGDHGNLDLHGWAFDRFTQMLEYKAEAEGIDVECVSERDTSKTCSACGRSADRQRVERGLYVCDCGFVGNADCNGAENIRRKVLPSLARDGGDRDNGWLAQPAVRLFDRSEGRFAPREQVTDCEP

SEQ ID NO: 62364 - protein, 421 aa, unknown
  TnpB Polypeptide
MITLNYTYRIYPDAEQVESLNEWLETCRGVYNYALRELKDWIASRKCAIDRCSKESEYIMAADYPFPGYQQQQNNLPKAKKDYPKLKAVPSQVLQTTVRRLHDAWDFFQERGYGFPRFKKYGQMKSILFPQFKTDPITGWQIKLPKLGKVQINLHRPIPNGFVVKQVRVIKKAMGWFAVVTIQSDISLPDPVPHGHFIGVDVGLNSYLATSDGFIEPGRKFFKTEHRRLKVLQRRLSKKKKRSKNYEKARLKVERLHNHIAFKRKDYQYKLAHKLCDMAETIFLEDIDFRAMVKGFLGKHTVDAAFGQFRSILFYVGKQRGVYVAEVDHKGTSQTCPNCRIEVRKELSDRWHSCPECKYEVDRDVASAQEICNRGYEQLSTQGLWGKEIGCQVGLSGAFCLDKWRRAAMSNSDVGSLHRNL

SEQ ID NO: 62365 - protein, 306 aa, unknown
  TnpB Polypeptide
MAELSMSIRVVKRAYRYRFYPTPEQTDLLNRTFGSVRYVYNRALAERSRAWTQEHKRVTFAETCRMLTAWKNDPDTAWLYEVSNVALQQGLQHLQNAYVNFWAKRARYPGFKSRHKSRASATFTTSGFRYRDGQIWLAKTSTPLAIVWSRPLPEGAEPSTVTVSRDAAGRWHISILVDCPVGPVPAATTAVGVDAGITSLVTLSTGEKVTNPRHERRDRGRLAQAQRALSRKQKGSANRARARVKVARVHARITDRRRDVLHKLSTRLVRENQTVVIEDLQLRLGAHRGAGCRRFGRRRARGTRAL

SEQ ID NO: 62366 - protein, 391 aa, unknown
  TnpB Polypeptide
MLKAYRFRIYPTKEQQITLSKFFGCSRFVSNWALETKLKHQTQDRDGISRFNLLNLLPDLKGEHEFLKECHSQVLQNSVDRVHVAFGEFLKGKRGCPNWKSKKNPVCSVSFPQSVKLEGISASRLRRIKLPKIGSVKIVLHRECAGQIKTVTVSRVASGKYFASILVEDGKELPETAEVDAQSAVGLDFGIKDLVVASDGRTWNYGENLKAAEKNVIRFQKKLSRKVKGSQNFFKAKNKLARRWEKVANIRNDVLHKISNELLGEKQPTVVVEDLAVKNMVKNRKLARVISRQGWSTLRSYLTYKAAFRGKNLLVIGRFEPSSKLCSECGVINKELKLSEREWLCGCGAKHNRDLNAAKNIRNMGLNKNASGIGVKVSGQNVSLASASNSG

SEQ ID NO: 62367 - protein, 445 aa, Actinomadura sp.
MYWRRTLSGAPPILPARSRWVPVNTGCRNLVTKTKWACRARTQCLPVLMSSYSVIHQCQNHGVQLRCTFRLYPTPGQCAVLARAFGCSRVVFNDGLRARQDAHAAGLPYISDGELSKRVITEAKKTPQRAWLGEVSAVVLQQALADLNTAYRNFFASLSGKRKGPKAAPPRFRSRKDNRQAIRFTRNARFQVTAGGKLRLPKIGDVKVRWSRRLPSEPSSVTVIKDAAGRYFASFVVEAAGEPLPQTAAEIGIDLGLTHFAVLSDGRKIGNRRFLRRAERRLRKAQQALSRKAKGSNNRAKAVVKVARAHARVADARRDFAHQLSTRIVRENQAVMVEDLAVKGLARTRLAKSVHDAGWGQFTQMLTYKAARHGRTLVKVDRWFPSSKLCSACGAVAESMPLNVRSWACPCGAVHDRDVNAAKNILAAGRAERLNACGGTVRPAA

SEQ ID NO: 62368 - protein, 363 aa, unknown
  TnpB Polypeptide
MKLTGDLKALEESIMLYREALQTLIPIINDGWETLSEYTFTKQKYNCIENWVHNTKTNQALFDFDKKFPKFPTYLRRSAIAKALGIVSSYRSNLANWKQNPKGQIPQLSLTHYAYPAYYKGNLFRNFDPVRQTIELKVFKNGDWVYEVYRLKTSDCTYYQNYLTGKKQNVPIIQKKGRRFYATFSYEENVPLVPEKSIHKICAIDLGLGTDATCSIMDKDGTVYARKFISFSEEHDRLHTQLGRIKRNQKCGSRHNKTLWRKVAGISQDIADKTVKAILDFGNAHGVDVFVLEHLDFKGKNIVKRAHFWRYKRIYKVLSHKAHQYGLRVARVNARYTSRLAFDGSGWSKRGREITPETPYALM

SEQ ID NO: 62369 - protein, 396 aa, unknown
  TnpB Polypeptide
MRNTANFYIRNTMTGIRKSPEERTALETEVLHDVFTGIQKANREAEERFLSKLERLVKAGGMKSAVQRSKLVQTVFSYPTKNKWFLNYETLDAIFKETNHPVYRRMNSQVNQNAIRKTVKSWVGYFESMKEYAVCPEKFLGKPKLPGYIRTQQATAWWTKQTARLTFQAGKAYLQFVNLKEMFCIGKESQYRGLKYIKTEIKPFHGQFRILITLDDHMKEPKLPEDPKRILGIDPGLDNLLTVAGNFGKAPFVIRGGVVKSINQRFNKRRAKLIASLTRGYDSSHSHKDSHALDALSRKREDALRDIFYKCAWYLVRYAKVHKVEVIGIGYNPLQKQEISIGKQNNQSFVSIPFQKLRETIRMVANREEIPVVIQDESYTSKASEKNRWIVSLYDI

SEQ ID NO: 62370 - protein, 368 aa, Microbispora sp.
VAQLVKRAYKYRFYPTPEQADELARTFGCVRKVYNLALEERTRAYTLEGRRVSYVETSAMLTAWKKTPELAFLGEVSSVPLQQALRHLQAGFANFFAKRARYPTFKSRKKSRASAEYTRSAFRWRDGRLTLAKMNAPLNIRWSRPLPEGAQPSTVTVSHDNAGRWFVSILVEEKIRPLDPTQNMVGVDAGVTALATLSTGEKVTNPRHERADRKRLAKAQRALARKTKGSNNRAKARLTVARVFARIADRRRDFLHKLSTRLVRENQTVVIEDLAVRNMVRNHALARAISDASWRELRSMLEYKTAWYGRELLVVDRWFPSSKLCSVCGTLRNAMPLGVREWTCACGLTHDRDVNAAKNILAAGLAER

SEQ ID NO: 62371 - protein, 407 aa, Microcoleus sp.
VVQLFSLTYEFKLKPTSAQIALFEDWLEQCRRVYNYALAERKDWYKSRSCRINACSLHSEYIIAADAPRPTYSHQCKALTAYRQTSPNLQSVHSQVLQQTLRRLENAFVRMWELHHGFPRFKKAGAMRSFVFPQLGANPIQGSTIKLPVIGWVKFRQSRSIPDSATVKQVQIVRRASGWYALLTLQWDVQIPDVIPQGEAIGIDVGISHLVAVSNGQLFPNPRPFKQLESKLKLLQQRLSRKQVGSNNRKKAQCQVSKLHERLANIRKNNCWLLAHHLCDGAGTIFVEDLNLKGLARGFLSKHCLDAGWGQFLQILEQCCFKRGVFFLKVDSKKTSQICPNCLVLTGKKELSERVHSCQDCGYTTDRDVAAAQVVLLRGLAAVGHTVKMLSEGKAVALPVMKEFPSL

SEQ ID NO: 62372 - protein, 436 aa, Massilia sp.
LDRPSDIIADLDSGMNHHKKGLRRLLDEIMAATDASAMLIAHRITLAPNNVQATYLARAAGVARFAYNWALSEWQRQYVAHQADPALPAPSQFSLRRQLNAIKREQFPWMLDVTKNAPQMAIIQLGDAFKNFFAHRARYPRFRRKGVDDRFTLSNDQFRVDGKRFHIPKLGWVRMREALRFTGRIVSATISRRADRWHVSIAVDATEASLPPADNQGVVGIDLGVSALATLSTGEQWPGPKALRSLLDRLRQLSRSLSRKVKGSRNWDRAKRRLVRLHARIANMRRDSLHKLTTSVTRRFHTIGIENLNVRGMLSNRHLSRAIADMGFHELRRQLEYKAAWRCGHVVVVDRWYPSSKTCSCCGHWLKELALGTRSWTCPECAVWHDRDVNAAVNLKNMAMSSIATACGGNGSGPVREQETKPVPVKQELSSKVNYS

SEQ ID NO: 62373 - protein, 436 aa, Proteobacteria sp.
MGHIRKETWQRFGSINSSGIDFRVVRNDWVKTRDFAPLPAKAWKETLRDTLDDVFMHEQTAKLKVREAVFKRIKDPAKQRELFRLLKGEGWKAHSFLRRKMRKFRKHGQTSVANQIILETGVYAQFKGLDGNTWLKVPTFERGRRLVIPLNAKTTLSGCLRLILKDGTVFVHYTIQQKTFKPCGTETLGVDKGYTEAFVDSAGRFYGCDFGKVMTEGTQKRHVRGKARNKLHQIEKKKFKKSRHIKRYNLGRKKLDRHNSLQKKRIEGIAFQSAHAIVDHAKTVIAEDLTKPFSTRTKWKTYNRTMSAWAKGALADALESVTKARGSCLRVVNAAHTSQMDSKSGHLEGRRDGDKFYHTNGEVSSSDINAAINIKRRADDTEIRLYTPHKRVKKILLDRLMANGGVNPAKDDRPSRTPVARRKRTSTESELGGNLA

SEQ ID NO: 62374 - protein, 427 aa, unknown
  TnpB Polypeptide
MIRTSKHNLHNANTSKLKNISDFVDEYRRVAQIYIDHIWEHGLEWNVKNKKYEFNATYKLDCPKMLSTVKLNKEIGLETFLSGRALKCCINQVCGMLGSATAKQRKRRFISNKQRANHQRVNKRLRKAIRKNKPVKPDASQINPELNSICTDVQKSDNSFDYFIQLHSLVNNKRSFRINVPVNHHRCSKKWSDIGSMKNSILLSKNTVDLRWEVERAPKESGKVVGADQGLKDVLTLSDKQVTPKMDKHGHSLASITERLARRKKGSKSFSRAQDHRANFIHWSINQLNFNGIKEVRLEEIRNIRYKSRSSRLMSHWCNTLIRDKLLSVCEEKEVLCTLQTSTYRSQRCSDCGLVRKSNRKGKVYSCSSCGLELDADYNASLNHQHDLPDVPHALRKLNLNRKGFFWRSEGFYDLTGEEFTVPLTRK

SEQ ID NO: 62375 - protein, 486 aa, unknown
  TnpB Polypeptide
MTLAVSSTRAAIGDHVKSIAARTRQDSNPHLWLRRPRLFPTELRVLRNTRLALSAIPPLKVEGGQWREGLMVGSGSAVVRSLVFPIRPMPARLALLMAEFRLIVNETIRIALVQDIRSRYRLTKAAYSDLSRAHDIFKQYIPSAFEVATSALKNHRRRLRLGRTTSRPYLRRLLLKAENQSYRLDRSTGRLRIPIRGRDYVFLDLQFSDWHRKFLSDSSWSLGSLTVLPGRVVICVRKRPPKPYEKKGVLALDTNESSVDGILADENEPRMVSAHFREVPIIQRTHFSRRRRIGKKKAHDCRVSRRLLAREGQRERARVQQRLHALSSTLVKVAVDLRVAIALEDLRVPGPSSSSRRLNRRLSSWPRSELHRQIAYKALAAGVPIIKVNPAWTSKTCPACGARRRDRVGQDFVCLVCDWEMDRQHNAGLNILNTALASDEALARAVRFQPGALRKDVVIPLYELLRKDEVGREEPSGDEPSSVLGG

SEQ ID NO: 62376 - protein, 366 aa, unknown
  TnpB Polypeptide
MGVAAAEIAASLASGHRSRVRKGVASRIPYVRTPFVRIPKESFHFDPETGKLRLSLRRGEWTSLTVPVSNYHRQVLAHPGRRVTQVHIGLHRVVLVYAQVPPEPYAPKSIVALDSNEASMDGVQVDSDGAFYVRVHFPEIPRIQWRHMGRRQYLGRKKSHDRRLSRWLLGREGRREHDRVRSRLHELTRTLIDRLASTESALVLEDLKSLQTPRRRGSLSGRRPPFRSRRLRRRLSSWPRGELHRQLTYKAQDRGVPIIWVDPYRTSRTCPRCGEVSEHRRRVGTRFDCAKCGWSCDRQLNAGLNLGITALRTHAGLGGLRLDPDALPEDVVRPLYGSANDRPARVERMGREGRGSNVSRNREASE

SEQ ID NO: 62377 - protein, 153 aa, unknown
  TnpB Polypeptide
VNLTAQLKLEPTAEQAIALSQMLVASNAACDYISAAERTGRGIAVEELTGIRNRIRATRRQRGVLHSWAFAQLWAFLEYKAKRAGVRLVAVERRNSSRECSACGHTAKRNRPNQSTFRCAACGFAAHADTNAARVISGRAAVSGPNVAGCAAV

SEQ ID NO: 62378 - protein, 118 aa, Bacillus sp.
ISFFICASPRINCVSFLVETEVQELPNYFEMDVRQKDLAILSNGTIYKNPKFFRLLEEKLAKAQCVLSRRTKESSRWNKQRVKVARIHEYMTNARKDYLDKISTEIIKNHDVIDIEDW

SEQ ID NO: 62379 - protein, 431 aa, unknown
  TnpB Polypeptide
MSEVTRTVVLKSAPLPRRAFRVFIELEGMYRNMVEQLVLYAVRNNITSFTRIKALKYRELRVLYPHLPSHYAYTACQDASTRAKSFLRLKRKGLTSREYPEVRSISVWLDDHLWKPSGLTAIKIATHEGWIKVELEPHKQYWKYVNSGWKISSEAKIKLDKKTRRPIIYLTLKKSVEVYELKGFIAVDVNENQVAALVEGKTYLFETGFKEIVLGYYYRRKRVQEKYDTLYSVKCRIKKKILRKLKEMKLKNDLRWKLANIVVRVAKEKQYAIVLEKLGKNPARGMINHVGDGQLRHRIYQTSFRSVQRAIKEKAKEHCVPIVYVNPRNTSRMCPLHSAKIAYSNGSRIGKCTVGGELWHRDVVACLNLFLKARLGDGSTAPSLGGSPVDGSFVPLSSTAAHDPIGIPKSLWARRKPLDAMNKNELMRMSI

SEQ ID NO: 62380 - protein, 359 aa, unknown
  TnpB Polypeptide
MKITVPVKLNIDDQQKKVLLRTMEEINEVCNGMSEICFQEKIFRTYDIHYLFYHQIRGCYSLSSQMAIRAIAKVADSYKKDQKVRRTFRKHGAVAYDSRLLTWKEGFVSLTTLEGRMNFSFSCGEYFQEILKNQKGETDLIFREGNFYLSTTCEISETPEKEVSQYLGIDLGIVNLATDSLGHRYSGLKTIAVRKKNQKLRKKLQAKGTKSSKRLLKKRRKKEQRFAKNINHCISKKIVDTAQRHSMGIALEDLKGIRQRVTVRKGHRYGLHSWSFYDLGQKILYKAKRAGVRVVFVDPRYTSQECRSCGHIEKRNRKTQSHFECKSCGHTDHADLNASGVIARRAAVNRPHGEDLLML

SEQ ID NO: 62381 - protein, 432 aa, Pyrococcus sp.
MRIARTVVLKSERLPKKVFKVFIELEGMYREMLLQTVQFAVQNEITSFVKLKAEKYSFLRKLYPQLPSHYAHTVCQDSVTRAKSFLKRKRKGLVKKEYPEVRSVSIWLDDHLWRAGLTFIKIATHKGWIEVGLEGHKHYWKTVNSGWRMASQARVKLEKKERRLVVYLTFYKDVEPREAKSWISVDVNEDNVTALVDFTPVIFETGQKRMTLGYYYRRKRIQRKWDKKLGPRSGRKRKILGRLHENDKKKDIRNKLAKIIVEEARRRNAGIVLERLPKNVPRRMLEGISDKQLRHRIYQSAFLGIQKAIERKAKEYGIPVIKVNPRNTSRICPVHNAVVKYENGSRFGVCSAGGEVWHRDVLAVWNLYLRALQSDGGSAPSSGELFVDGRPVPLASTATNEAIWIEKSRWLRWNSLPLALIQTDTLPHKTKR

SEQ ID NO: 62382 - protein, 524 aa, Pyrococcus sp.
LPKWFKPRPPNYLKDGGNRKPLIILRNDQYKIEDNKLILKGLGKFKRLEIQFKGRIHLKGRQGRLEITYDEVKRKWYAHISFTVEEKLTRKGWVKIPRQPLGNLSAGIDLGVNNLMAVYVENGESFLVNGRPLKSIGFYFQKKVADYQSKLNKSGAKTSRKLRKLYERAKLQARHYINTAVRQTVERLYHLGVSRIIVGYPKGISRNSNKGKKQNFLLSHIWRFNYVIKRFIEVAEEHGILVEVVDEAFTSKLCPVCGRPHEGARFTRGLFKCPATGLIFNADLVGAFNILKKVVKTITPNLGGLYAQGRGNGPETGPSGGTETGDGSRWMRARKPPRPLKPRPSRRGGGQEEITVKPFSRELSKEFLRRGFEEVGMEVEEELIERAVELLDGIPGWLVEFGYNYLETKSFERAMENVILKAERFLEGELRELERRSGRYLLILKAIAMGFDRWELIKDYVEVRSGKIANSRLANLLRNLEKMGWIRKDNTTKRYEIIDPIVMRVLRNVKARKEEIGRNHQWFT

SEQ ID NO: 62383 - protein, 437 aa, Pyrococcus sp.
VKLTKTVILESYPLTGRKFNAIKEVYVEYSEILPPLTNYAVENKIKNPKKLRRLFYDELKGEHDLPTHYYYTVCQDAVTRAKSFLGLKKRGKAKTEKPVIRRVSLWLDDVLWDYRRFPQFNTLRDGRKILIIRLTTKRGRIKLPLKPHKLFFKYLNEGWRVKPCVKLRLIEEERKVLAYFVFEKEFEELKPTGSFLTVDYNADNVSFGTREFLIQVKTDLGRMTRFYSDARKEIQKSHSIGWRRKLPSKRGRELLEKFGRRKKNRRADLQRKFAKRLVELAKVLNTTIVLEDVPKNFNQRVARRRKKGEKRLRDTLHNIGMNGFQRFVLEKAVEYGVPVVFVDPSYSSRVCPRCGAFNVKPDDDALRRRVFNCPVCGFSMDRDFVAVLNLLGVFPFTPKANEPPVEDSVSPMTLVVEANLLHHKNSLVVITQGPQQK

SEQ ID NO: 62384 - protein, 379 aa, unknown
  TnpB Polypeptide
VGGVQRWPPHPGAGVPGGAAVRHRRGAVGPADRDQGDPGAGLARGRVRRDPPAVPGRPEHGVPDLLRLRHRSAQGPPRAGPPRFKSRKDRRQAVRFTANARFTILPSGRLRLPKIGDVEVRWSRALPSAPASVTVIKDPAGRYFASFVVQAGPAADAARFPAPDPGAQAGIDLGLTSFAVLSDGTVVRSPRFLRRAERKLRRLQRSLSRTAAGSRNRDKARVKVARAHAKVADSRRDFHHQTSTAIIRDNQAVYAEDLCVAGLARTPLAKSVHDAGWSAFVTMLEYKAKRYGRHFGKIGRFVPSTGPCSACGVNSGSKPLHVRQWACPACGAVHDRDLNAARNILALGRRERLNACGDDVRPPLAVAAVSETGTLRGAA

SEQ ID NO: 62385 - protein, 450 aa, unknown
  TnpB Polypeptide
MQQLYTYETELKPKYNQEIIDYFNDYTTLFNKIVLNVWQYYNHQDVLISQKSKLNTLIQNQFGVSQRTANSIMRYVSGKYNSLKETKKYELKRNSSKIKELDDLISELALKLDVMAMKAHHNQLKEKKLIKYRGLKKKFVAIKKAKDRLLKANIRAQKQLDDQHFSLCFGSKALFNHQYLEANHQAWYENFKRARDGLILFVGCKEETACNSQCQLIYNKKNNQFTIQLRKEYAYQTNNRDKYLYGQVYFSYGNKELQKVLKTKNSPITYKIIRRDDRYFLQATITIEKNNITEQDRYMGIDFNKGFVALSEVKEDGNLINTDKIYYRFKQGDKTTNDLRQLALDIATRCKENNMSLAIENLDFGKKKSKISKYKKDEKYNDMIHSLAYSKFNEYISRACFSHGVWLSRVNPAYTSYIGKKKYNEIKKLNTHTSASYVIARRGMRFKDAA

SEQ ID NO: 62386 - protein, 478 aa, unknown
  TnpB Polypeptide
MPKLASYFECQTHLAKNLRNSANFIIRNLRTGLKKDPVDRTSNENEVIKTVRIGIEMANEKLQKDVDRLTKQLQSLPASDPARTKIQKRIENKQKNHPIMPTSDHWMLTYETLDAVMKNTKNPDYYAMPSQANQQVLRKVLKDWKSHFELLASYRQNPGKFKAQPKQPGYIRTPYTTVTFTNQVAKRSDIKGKMHITFPRCLVPLCVGKPEGSYVRTEVKPCYGGYMVYVTFQDAVKMPEAPTNPTRILGLDPGLDNFLTALTNFSATPFIIDGHWLKSINQNFNRRRAALMSELTKGMDSTKSVKNSARLNRISKKRACRIDDFFYKAAHYIVDFCLKNKVEVIVCGHNKDQKQEINLGANNNQHFVSIPYTRFFWILTCVAAKAGIPVIETEESYTSKASLIDKDPIPVYKEGDRLEYHFSGKRISRGQYESKEGTILNADVNGAGNIIRKVYPNAFDTVSDFSYTNKQLFELPEK

SEQ ID NO: 62387 - protein, 210 aa, unknown
  TnpB Polypeptide
VRDTKRKSNGISNCDCPRDGREPGFRRDRAGLARLHKRIADIRRDHLRKIARDICKKHAVVYREDLRIKNMVKSASGTVEEPGKNVKQKSGLNRSILDQGWGILFRMLDEYMLEMGGEVRVVPPQYTSQTCPACGHVAAENRPTQSKFCCVKCGYKNNADRVGAINILRVGQTRSACGSVEATSMQVNRTARKRRSGQQQEPIEETVGKA

SEQ ID NO: 62388 - protein, 202 aa, Salmonella sp.
VRFVYNSILRWVPMRTTSERKKIVTYGQRSPYGLKKEPEFAWLNDVSCVPLQQSLRHQQTAFANFFAGRAAYPAFKSKRHKQAAEFTASAFKYRDGKLYMAKNKIPLDVRWSRPLPSVPSTVTISKDAAGRYFVSCLANLNPHHCRSPLQWSALMLFKICSSPIPDSGPAIPAIPLNTRLACTTPAPVKQKAKGSKNAPKPT

SEQ ID NO: 62389 - protein, 383 aa, Micromonospora sp.
VKLVVQVKLLPTPDEAAALEATLRACNSAASDVAVMAREIDCYRNYDLRRHAYHGIKDDYGLGAQAAQHVIKKVADVYKTLAGNLKAGNYGKPGSKRRRKVETNPITFRWDAAQPYDARMLSWRHDARVVSIWTVQGRLKQVTFTGSADQIKAVATHPVGESDLVHRDGMWFLYATVEVDEPQVYEPDGFLGVDMGIANIAYDSDDTRYTGTKLNGYRRRQQRLRKRLQEKGTKSAKRLLARRRRKETRHTANINHTIAKSIVTEAARTGRGIAVEKLTGIRDRVRLRKPQRVTLHSWAFQQLGAFLIYKARRAGVPLVQVDPRYTSQTCAACGYRDKRNRPNQETFHCRSCGVVAHADHNAARNIASRGVASWGAVNRPHAA

SEQ ID NO: 62390 - protein, 385 aa, Lentzea sp.
MFGCVKLVVQVKLLSTAGQAAALAATLHACNEAADWVSRTAFERGVFGEYALRKLTYGELKARGLGAQAAQHVIKKVADAYATVRASIRAGNLTGTRRIKAESKPISFRRWAAQPFDDRCLSWRLDAQTVSIWTTAGRMKDVRFAGSPAQLETLRAHRQGESDLLFRDGMWFLIATCEIPEMPQFEPADWIGVDRGITNLATTSDLDNFQGRRLQRYRRWHASKRAELQARRTKSAARRLKKRSRREARHAAHVNHRIAKDIVAVAERTGRGIALEELHGIRDRVRPRRYQRATQSSWPFHQLEQHITYKARRAGVPVLLVDAHYTSQMCPRCKHTSRSNRPTRDWFSCRRCGLAGPADVVAAVNIRDRARRAWVLVNVPLPMAA

SEQ ID NO: 62391 - protein, 387 aa, unknown
  TnpB Polypeptide
MIRCQKVRIYPTDDQKDLFEKSFGVARFAWNIALQESIGMKEYNGYKLRNKFTKLIKPLYPWIKEVSKESYANSILNLGKAWDRMFESKKKTRKGYKVGQPRFKSKHDNKQSFTMIETKIKPQQVPNMQWISHELKIPKCTGRKNALPKIRTTENPRWKHAKIKQVTISRNGDKYYASVRFEVKPNRETNTREMQSNGGTVGIDWGIKNLLTLSDGTVIPSQDFSKIDKLIKRRQRQLSRKVKGSKNYDKAKIKLNHKTQKKMNMRDDYLHKVTNFLIRNYTHIKIEDLKASNMVKVHSLARRIMDASFYKFKIMLVYKAEHANNFRQGGNHVTVELVSPFNTTQICSQCGKKQSRKLTLSDRIFDCEFCGNHMDRDLNAAINIKNK

SEQ ID NO: 62392 - protein, 426 aa, Natronorubrum sp.
MAKKVVTRTYTASIRNQSRVSDGLDALGFAASKLWNVGRWTCSRIWDEIGHIPNHNELTAYLKTHERYDDLHSQSSQRVLQELAEAFNGWYGKRRNGDTRANPPGYRKRNDDHPHSTVTFKAAGFKLDTQYNRVRLSQGSNLKEYWSDFILCKFQTRPDVDLSTVENVQQVKTVWTGDEWELHFVCKVEIEVSESPGDHTVGIDLGINNFAALAYEDGHSELYPLNCLKQDDYYFSKRLARCDDSDSEQAMRLNQKKSARRTHYFHALSKHIVQRCVEEGVGTIVVGDLSDIREDDENGESENWGRHGNLDLHSWAFDRFTELLTYKAEMVGITVKEVSERDTSKSCSCCGRTRKANRVERGLYVCDECGTTANADVNGAENIRQKVSPSSPSLSVNRSNGWLAQPSAFLFDKETGAFAPQEQVTS

SEQ ID NO: 62393 - protein, 417 aa, Natronorubrum sp.
MAKRSVTRTHVASIRNQQQVRDGLDSLGFAASKLWNVARWTIGRIWDETGTIPGEGALKSYLKNHERYADLNAQSSQAVLEELSEAFKSWYGHRRNGNKNANPPGYRKHGDDHPRSTVTFKEDGFKHDSKNGRIRLSKGRNLKAHWSDFLLCEYETRPDAEIENVQLVRAVYEHGEWRLHIVCRHEVEFRSSGDRTAGIDLGICNFATVSYGDEATLYPGGALKEDIYYFAKERAKCAHSASREARRLDRKQTERRTHFLHALSKHIVSACKQRSVGTIVVGDLGGIRDDENGDARNWGDHGNLDLHGWAFDRFTSMLEYKAEDEGIEVVRKSERDTSKTCSSCGTKDGNQRIERGLYVCDDCGTVANADVNGAENIRRKVLPNLATDGGRDRDNGWMAQPAVHLFDRSEGSFAPRE

SEQ ID NO: 62394 - protein, 352 aa, Natronorubrum sp.
  misc_feature (296)..(329): Xaa can be any naturally occurring amino acid
MAKEVVTRTYTASIRNQSRVSDDLDSLGFAASKLWNVGRWTISRVWDEIDYIPEHDELTSYLKSYERYDDLHSQSSQRVLQELAEAFNGWYGKRRNGDTRANPPGYRKYGDEHPRSTITFKAAGFKLDTQYDRVRLSKGSNLKEHWSDFILCEYQTRPDVDLSTVESVQQVRAVWTGDEWELHFVCKVEIEVAESPGEKTVGIDLGINNFAALAYEDGHSELYPLSCLKQDDYYFSKRIARCDDSNSEQATRLNQKKSARRTHYFHTLSKHIVQRCVDEGVGIIAVGDLSGIREDXXXXXXXXXXXXXXXXXXXXXXXXXXXXXXXXXXDASATTEALTDRATALAAQLSDG

SEQ ID NO: 62395 - protein, 411 aa, Natronorubrum sp.
VTTTATKTLEATLAPPTKGKEQRLERTVATYRRALSEAFESDADTQTAVNDIVTPYTLTSYAKDALKNYVPKLRDTYNASEIKDDHPVRFTNRGFRIDHSDDRTYEFCWRVPQAGRGNAFWIPLRINPEQESLWFDLFDESATVGEFRLQQHRTNWVLNVTVEYNVAEPEIPDDPTRIGFDIGESKLLTGCARQNDTPTQPYIYDGGRARALRKEMYTTLKRLQERDAAEWRVDERFDHYQNALTDIVEKASHEAVEYAESFDNPVIVLEDLSYIRGNLDYGKYMNRRLHAWTFARFTDRIEDKALDAGIPVEFVNPRYTSQTCHACGHIGSRGSQAEFKCTNSKCWITEYQADINAAANIAGRVDPWGESVPWKPERDDSPRNGSRCDTAAGHRTPSRQSRQTTLAAFES

SEQ ID NO: 62396 - protein, 435 aa, Natronorubrum sp.
MADVFAVTERSEYIERMSAVTKTLKLRLAKPNSHKERKLCETRKAYQQALQAAFDAECTTQSATNDVVVEYDLSGYAKNALKQYVPQLCGDSYDANELHDDHPVKFTNDGVQLDHKPENGIEWYVKIPHHEDYHLWIPAHANPDQREWLEAVYADDAEMGESRLFERDGTWYLHVTATRDVEVQSETSADERTPIGVDIGEASLVTVCHRDESKSPVRPNLWADDGKTVRRLRKTYFTATRRLQRRSSERIAESYGDALWGQIDDVFHCVTREVVEYAESVENPLLVLEDLTYIRENMDYGEYMNRRLHGWGFAKLHAQIRYKAAEKGIPVETVNPRNTSKACHACGEHGYRPRQATFRCSNDDCWVSEYQADVNGAINIADRYRSGESHCRSVRTSRQKASDNDSTTDGASLTGPQDSHADAETQQETRGTYAS

SEQ ID NO: 62397 - protein, 467 aa, Paraburkholderia sp.
MACKEKPSFVVDLLLSPSQSDERRLADRFLCGTRIYNPVLADGLAIVEALRADPRWGAARRMKKGAARNEAFSAVRTAHGFTDFSFTGLAIRHKNAAGFSSRIGAHETQAIGTRVFKALEQYVFGKRGRPRFKGLRRPLHSLEGKNHKGMLRWKAENQALQVEHGWQIPVQLPNLQKDEWLAAALQFKTKYCRIVWRNIKGERRWFLQLVQDGRTPIKASVAKRLAPENSVGGLDIGPSKIAWCTAVEAGNERFADEVERPHAAIRVLRRKLDRQRRASNPDNYHEDGRVKKGRRTWKKSPAMRATERQLAEMLRYEAAVRKNAHGALINFLLGRARIWKDDGVSPLALQRRFGRSIAVRAPGLFMDMLERKAERAGGQRDIIDVYRLKTSQYDHSTDTFTKKKLSERWHVFGDGRGRAQRDIYSAFLARNTEGITYQPSMLEKAWRELASPLLVAGWYETKLQREG

SEQ ID NO: 62398 - protein, 399 aa, unknown
  TnpB Polypeptide
MMKVILKTYKYRMYPNKEQQQMLAKYFGSVRFVYNHFLAERKHQYTENGKSDNYYTQASTLTKLKKQEEYTWLKEINSQTLQFALRNLETAYTNFFRGNARFPRFKAKKNGGSFHIPQHCSIGNGKIYIPKFKDGIKIVEHRPFKGDEVRNMTISVTSSGKYYVSILTKISYEPLQKTNAKVGIDLGLKDLIITSDGKKYSSNKFIKHYSKELAKAQKHLSKKQKGSNSWNRQRIKVARIQEKIHNCRFDKLHKISTDLVRNYDVICCEDLNVKGMQRNHRLAQTISDASWGAFLSMLTYKAVMNDKQVVKIGRYYPSSKTCHYCGWVKEDLQLKDREWTCPHCGNTLDRDVNAAINILKEGLRNISAGTVDYTDGADVRPFQGQSVMKSEAHKSLVCG

SEQ ID NO: 62399 - protein, 147 aa, unknown
  TnpB Polypeptide
MASKRNKNLIKRTARVYLNDLNVGKFLIVREFLGQCEDLKKVKQGKRGTFSRLFNRRLSHWLYRTLVQLLERKCEEEGIQLVVKDPFKTSQFCSICNRWDRRNRKGDRFRCVHCGYLAHADHNAAHNLELLGVAGVYGLRSYLSSKS

SEQ ID NO: 62400 - protein, 379 aa, unknown
  TnpB Polypeptide
MKFNRSVKCHFSKWITGSKSGRIKDLLSEYDAVASSAIDGIKNRIEDGDSKFDVHKNYKVPETWLTARAKQVVLAETYGMVDGQIKSCKELKQPYTKPKHCKTKAVLSSQLVSVNLNPDLEDFDLLVELKCFDSRQRAVKIAIPLKKNRCFEKWNSKGKLSSSVILTDKYIQFSFEADVPKKTEGDIIGLDPGATNLLTSDEGVVYGDRIKPLLQKLKRKKRNSRSWKKCKKEIKYYISKTCKELPFKETKLICIENNKDIKRNSKVKGRLTKSMRSVLDGWTSGLLDSRVEMLAEENGVSLRRVPAFYNSTTCPVCGHVEKGNRLSQEAFRCLSCGYAGKADMVGALNTLGRFSLGKYGSGFKTDFVKKHAGYYACKI

SEQ ID NO: 62401 - protein, 303 aa, unknown
  TnpB Polypeptide
MVVTVSFCYEDGVDEKTLKTDSKHLKLLKTKSVEELERVAEGVDLGVKVMVQTTKGKYDYSDIAKQRLVSLEKKRKRYQRWMARQIKTSNRRKKTKSKISKTYIKQAEIRHDFCHKTSRKLVDQENISVLVFENLKIKNMTRKPKAKQDEHGRWLKNKAKAKAGLNKAILSKGWYKLVLFSTYKAKRENKVVFKVSPHYTSQECADCGHTQPENRETQASFVCCSCGHAENADLNAAKVIKKRAINLIKHSGTELSKTGVLINPDIGHGDTVKSLEGKPTKARIKKPRNRKELSKKKELVVCV

SEQ ID NO: 62402 - protein, 439 aa, unknown
  TnpB Polypeptide
LHTGTGKEGIAGQGNAARIIRVFHDAAIKPAHKSGICFEGNGEGGLDMAWKKRSAADGKTVQYTTFKVRLYPTEAQAELFENTFGCCRYIWNHMLADQQRFYLETDQHFIPTPAKYKKGAPFLKEVDNQALIQEHNKLSQAFRVFFKSPETFGYPKFKKKKTDRDSFSACNHIFESGPTIYTTKDGIRMTKAGVVKAKFSRRPQAWWSLRRVTVEKTKSGKYFCYILYECEVKTPEPVTPTPETTLGLKYSMGHFYVGDHGDMADPPRWLKESKEKLVRIQRRLNRMQPGSKNYQEAVHKYRLLHEHIANQRHDFIHKESRRIANAWDAVCVRADALADMSRDPRYGSVPDSGYGMFRACLRYKLERQGKPLILVSRYQPTTRTCSVCGLVRDTAPVKGKTWSCPKCGTVHNREINAAQNVKAQGLAQYFNSQDSRESA

SEQ ID NO: 62403 - protein, 614 aa, unknown
  TnpB Polypeptide
MNKFKEKNIIRPGPQSTPFKSFKIPLKSILLNSSLLPKINDLVIKINNLTILSYQFIRLYLIYCYQNNIEVKINDKFIKYAIKTLGFSKKTSPSLDITLLNQLEYFYVTEFQPIFNHQKMDLSNLSHFISNISVQILTCISNNCQERFISHIRRFINLTAKDIGTEQDFKQFKEDFLFCRLTNSIYGEWKNRYYNYILPLNIKESVYYDLKCNPLKYLKSMYSMSYILESYGIKTFQFVPLRTDIIPKHIMLDSSSLLDYFNDELYLEQNKSYYMTHLNETKKYFWSHFLNLNHKIFRSKRYCFHFNIQTDGIDCSLLFVLHQLENEKRGSSSLKPKEEGDFPSIENLPDNHRQYYLDETKVNLVGCDPGKRSLVYLVDSTGKKLQYTAPQRKFESTAKRSQLILEEEKEKYGILSEEALLSKENSKTTDYFKFKKYIYEKNKLNYITQTFYNRPTWRKMKMRRFIYGKKSVDKFISKIGKLFGSDGRQVVIGYGNWSQTDQMKHYMPTLGKGLRKLIHRKYCTFTVNEAYTSKRCTDCFRDLNNYVGKVKNFKTKKVEVIKIHRLLVCSGCVSSENKKITFKSRDINAAINILKLTRYYLLYNCRPVEFCKRN

SEQ ID NO: 62404 - protein, 397 aa, unknown
  TnpB Polypeptide
MEVRMMIKTIRVMLVPNNKQKTKLFQYANTARFAYNWTLGREQENYKNGGKFISDGDLRKEFTQLKKKEECAWLNYVSNNVTKQAIKDACEAYRDFFKGYTKFPRFKSKKHSVPKFYQDNVKIQFTDTHVKIEGFATSRKKNKQKLNWIRLAEHGRIPTEKVKYMNPRIKYDGLNWWITVGIEYKDSTTLPSNDGIGIDLGIKDLAICSDGNTYKNINKTHKIKKLEKRRRRLQRSISRRYEKNKKGGNYCKTSNIIKSEKELLKLNHRLTNIRQNYLHQTTTEIVKTKPSFIVLEDLNVKGMMKNKHLSKAIQQQCFYEFRRQIEYKSAWNNIQVIIADRFFPSSKLCSCCGSIKKDLKLSDRIYRCECGNVIDRDYQAALNLKKYGEMVLEQSVV

SEQ ID NO: 62405 - protein, 380 aa, unknown
  TnpB Polypeptide
VVKVTLRLKLYRDPATETALRETLLQFTDCFNAVCRYGWDNNERNGTRLHQATYKPLRQAHPDLPSQLVVSARMKATEALKSVAERKKQRRSVTCPQSALCPVRYDARSYWVRLQDGYASLATTQGRVCVTFRLCDYYTRYAHWKPCSADLCFRDGAFYLHVVVEADAPEPVCEGVLGVDLGIVELATDSNGNTYSGEAVKVVRRRLKRLRSLLQKRGTKSAKRHLKKIRAKQSRFVKNTNHVVSKSLVRTAVQSRKALALEDLRCLRDRAETVSREMRWLLGNWAFLQLRQFIAYKAEAAGVPVVLVDPRNSSRTCSVCGYCAKANRKSQSSFRCQECGFEANADFNAAVNLKARGECSDALLCRSEAHASNQAQAPVL

SEQ ID NO: 62406 - protein, 370 aa, unknown
  TnpB Polypeptide
MMQIFKAYKYRIYPTENQEVLLNKTFGCCRVVWNVCTEAFNSPVGQKVEFPKSYTEIKKKFDWMSEVSATALQNAFNNFFEFKKQFFSKTRKKKVGRPKFKSKVGKQSYSLHSQKFSLGNNFIRLEKIGRVKVVIAGHRPPKDCDFRSVTVSKDVTGKFFVSVLVKELKPKSLPVTDSVVGIDVGIKTFAVLSDGTEISNPKFFSESQAELRKAQKSLSRKKKGSTRRKKARLKVALIHEKIRNQRKHFHHEVSRMIVNSYSVIGLEDLTISGMVQNRKLSKAISDAGWSQFVSFLSYKAEWAGRTVQKIGKFFPSSKLCSNCGVIKKDLTLADRSWVCDCGVRISRDLNAAVNIKNEAIRLLAQEVACA

SEQ ID NO: 62407 - protein, 386 aa, Paenibacillus sp.
MRSFKTELKPSIEQIKIINQTIGVSRFTYNFYLAHNKEIHENEKRFVSGIEFSKWLNNEFIPKNPEYCWMKDVYAKATKQSIMNAEKAFKNFFKGVSKFPRFKKKKNQDVKMYFVKNDAKVIIPCERHRIKIPTLGWVTLKEYGYIPTDAIIKSGTVSIKAGRYFVSVLVVDNSSPIVPSNPNNGIGIDLGIKDFANISNVEKPIKNINKTSKVKKLEKSLKRQQRKLSKKYESLKENTRKGDATRRNISKQVLKVQKLHCRLSHIRENHINQTINTIMKQKPSFISIEDLNVRGMMKNRHLSKAIAQQCFNQFRIKLTTKCKLTGIELRIVDRFYPSSKTCSSCGKIKEDLKLSDRLYVCGCGIVMDRDKNASVNLLNALTYKVA

SEQ ID NO: 62408 - protein, 602 aa, Streptomyces sp.
MEHSRHLGHHVTKALVMHQADEVWEGVSRHLFPDASSRRFGRPKPGMWWHYTRIPGRARSHTTPRKWETFRLHGTLAGHLAAYRHRDLGPAVLTPEQAAALPPGTRVLEQPRRLPAPAQPSGRVPTGEVTAKGTPKTRAATWWDHTGPLALVFTGGADSTRGDLVLPVRLPSGAGRWPRLLHFLNNPDTWHKVDLVRRRDTCAPGGWAYEAHLMVLTAGYTSPATRSRRNAAAKLARVGGIDGNVSNLSVVSLPDTFDPTDGPVVATRLEFTDDELVVLEKARRKERGRKRALDRSRRATNPDQYGPSKRQQARSERRRTAGLPARTVQVPGGARDSNKAGVPKQAYRRDDLSAGYRRNRARLAEAAATAAAAKDHRARRIAGRIVADHGANLTVEDCDIRTWYRLWGKALQATTPGRLITAISRECEKSGGRLLRASTFTIKLSQTCLCGESVTKTLADRVHRCTYCGLIADRDMVSAALAAHVRLTNPDDPRTASLDIVQARMTQIVFAEGLQEALSGQPQRGARPRRGRTPAAAQRPVPGQRASARQNTTDRYRPTPNETRPALMRHKAHVGTAIPVGNAPPTDGAPEQELIGRHPTTG

SEQ ID NO: 62409 - protein, 414 aa, unknown
  TnpB Polypeptide
MATASVFPSPKCVEPPSPRTLKIIKSVKFHYTATELTRELLVTFRTMVNEAIRICLSEDIKGRLRLRNRIYREFQDKYKVGSHFPYSVAEVAWSISKKHRRWQRRPLAKRLMLKMESQGYSLHHGIFSLPFKKGTSVMIPLDYGEYQRSFLTSETLKRGSVTLTERDVIIAYSKEVSLRIPIRRIGIDLNEKMAVTSDGVGYDLSKVARLRTEYGIRRARFSCKHSRDRRLLRKFGSSLREKGRVSQLLHNKAKEIVKTAIEKQQGIVLERLQGIRNAHRRGNGEGRDTRRRIAEWPFRLFQKYIAYKAAWEGVPVEFVNPAWTSQTCHLCRHVNRKLARTEREWRCPNCGAILDRDLNAAINIERRGTIACLGVVRPGAQGIDEAMKGNEATTAPIPRVEALKSRRQEDVQPS

SEQ ID NO: 62410 - protein, 267 aa, Rhizobium sp.
MRDSSATARSDSTSRQASGWHIAFSGAFEHETPENDNPPVGIDRGIVNTLALSTGEMHAMPPTNLDDRHKQWQRTASRATAVEAPGQGQTPRRADRGEGGAPTAALATPDDDAHRAALRRGRPRGPEDPEHERLGERDLEEPGTNVARKAGLNRSIRAAAWYRFERLLTYKLAFLGGTVVKVDPRYTSVTCSKCGSRDKGNPRKPSEVPLPLLRTRRPRRRQRGGQHTPGWNTAIGGVGDFRREPKTRKGGLLKPPLKISVRRRGRC

SEQ ID NO: 62411 - protein, 375 aa, unknown
  TnpB Polypeptide
MQITITAKIQIQPNSEQALQLQNTLSSIKKSLNAVSDIVFLTKEFSQPKLHKLTYEFLRSERYALKSQMAQSVMKTVIAKYKSAKSNNHEFSKVFFQKPEYELVWNRDYSLVNGLFSVNTLNGRIKVSFKQDGMDQYFDGSWRFGTAKLVFKHGKYFLHIPTTKEIEDSLIQDVKNVVGIDLGINFVATSYDSFNQTQFYRGRHIKHKRAIYSQSRKELQQRKTPSSRKKLRLMGQRENRWMTDINHQVSKALVNNAGQNSLLVLEDLAGIRNATEKVQLKNRYVFVSWSFYQLRQMIEYKATFNHSLTIAVDPKYTSQKCPQCGHTEKANRDKKNHIFTCKNCGYTSNDDRIGAMNLRNIGIEYVHAELIKQVS

SEQ ID NO: 62412 - protein, 519 aa, Acidimicrobiaceae sp.
VPEVPHKSARRPGRVPSERVARRDRRRERLADYRSGGYARPRAHLRAGPPHRFARRGGTQVQGSHVAGAASRVRLARAPTGSVVEVVLRRLGRIRLRKHRPAIHRPPVGPGGVRRAYKFRLRPTKGQHLRLQACLDDHRELYNGALEERRDAYERTVRRAPGFFGDGRAKMPVRYGTQSAQLKEIRSVRPEMARWSFSSQQATLRRLDKAFGAFFRRVKIGEAPGYPRFRAAHRFDSVEWPAEGDGCRWKPEAGRVYLQGVGDVKLTAHRVVEGRVKTVQVCREARKWMLVLSCDDVPARLLEPTGEVVGVDVGIASFATTSAGQHIDNPRHGRRAADQLADAQRVLAGKKRGSNNRRAARETVAARHRKIANQRRDFHHNTARNLVGSYDVIAVEDLKIANMVRRAKPRPDPDTPGTFLANGQAAKAGLNRSISDAGWGAFVAILRAKAEEAGRTVIGVDPRHTSDRCGHCGHTAKENRVSQAVFRCQACSHTSHADEHAAHNILRAGLALLAADQAA

SEQ ID NO: 62413 - protein, 335 aa, Exiguobacterium sp.
MLKGYKYRLHPTAAQAEFLVRTIGCARFIYNKLLEDRIALHEEAKANGGPKRKPPTPASYKPLFPFLCEADSLALANAKLHLDTAFAKFFAGTAGFPVFKSRRKARASYTTNNQHGTIRIEGGHVRLPKVGFIRFTQHRIFDGEIRSATVSMTKTGKFFVSLLVEQDDEPWVPNPRNLREAEERLRRAQRALSHKKPGSRNREKARLLLAKKHEKVANRRRDFLHKLSRRIVDENQVVVVETLKPREMMQDRRLAKSIGDAGWGEFVRQLEYKARFYGRTLIKADPWFASTQVCSACGENGGKKKLDVREWTCAACGTHHDRDVNASLNLLGLAD

SEQ ID NO: 62414 - protein, 367 aa, unknown
  TnpB Polypeptide
MEYSYKFRIYPNVEQRTLIQKTFGCSRFVYNHFLAQRIAEYTATGKAPTRFQQDKSLTVLKQEIDWLREPDKCALQNALKDLDSAYKNFFRSAKSGGNIGFPQFKSKRDRHKSYKTNSNIAISNSHVRLPKLGFVKCRVSKEVRGRILSATVSQNPSGKYFVALCCTDVEIAPLPSTGAVIGLDMGLKSFAVTSDGLEYPNHKFLTKSLRKLARLQRQLSRKSKGSKRREKTRVKVARLQEHVSNQRQDTLHKLSTQLVRDYDLIAIEDLAPKNMVKNHSLARSISDASWGEFRRQLEYKAAWYGKQVVTIDRFFPSSQLCSACGAQWPGTKDLSVREWTCPECGAHHLRDVNAAQNILNEGMRLLA

SEQ ID NO: 62415 - protein, 206 aa, unknown
  TnpB Polypeptide
MTCAVNSGKTFIIDGKKIKSINQYANKKNAKLKSVLDKQGLKTSIRLDKLWTKRNNIINDYILKSCRYIVDYCKTNDICTVVLGFNRDMNRNINLGKKNNQNIAVLPMGKIKSTLEYMCKLDNIELHIQEEGYTSKASFFDKDNMAKDIVFSGRRIKRGLYKTKTGNILNADINAALNILRKSNVVGLSALYTRGFVDVPKRIRLI

SEQ ID NO: 62416 - protein, 282 aa, Psychrobacter sp.
VSLQQKVRDLASAWSRFFDPKVHARLKENKKKFRKPKFFKLSDGTEIQLRQLMPRFKRKSDGCDSIRLVQFDKYCRVEGNRVKLPNGVGFVKFKKSQDIIGTIKNVTISKKSGHWYVSFGTERALSENPTHPSKSAIGIDLGITKLITTSDGQYIKPKNSFKANQIKLAKLQRQLSKKVKFSENWKRQNRKIQKLHNHIANIRHDYLHKITTAISKNHAMIACEDLKVANMSRSASGTMEKKGRHVKAKSALNKSILDQGWGMMVNMFEYKQQWQGGLQTVK

SEQ ID NO: 62417 - protein, 505 aa, unknown
  TnpB Polypeptide
VTASLRPVAAPFVAAAPGGARVRARLRLSPQDEVVLRAAGSHLGTLAGKDLAVRCAEGRLDARGRPRSRAARKQALTAGSSSRWAGAITRTSEDQVRLAEQNLRAEQSSLTARIGRIEARLAVQAGGKAGKTRGYATAAGRYAKTVRLQALKARLGRVRRQLDCGTVSVVRGGKALLRKRNNLAAAGLTETRWRREWESARLFLTADGEKDKAWGNETIRWNPDEGWLEVKLPAPLADLANQPHGRYRLSCPAGFSYRGDEVAAQAATGAIRYDISHDPARGRWYIDASWKVSSVPAPSLDDLRQHPAVAIDVNHGHLAAAVVAPDGNILGAPATIGLDLAGLPATTRDGHLRAAITSLIATARAHGARAIVIEDLDFAGARAEGRERHGNRPSRGSRGRGFRRAVSGIPTGKLRDRLVQMAGNAGLSVIVVDPAYTSRWAAQHWLRPLREHHPKATGHHAAALVIGRRGLGHRARRRATGNHTAPEEAARPAQARPRTPLNNGR

SEQ ID NO: 62418 - protein, 474 aa, Glaciecola sp.
LLDVLADHGNWRTTTTPRKVARRPQCAASVFRHKDQMHMHHKNDVSSSPNIIVFVHRPEYSRSMKRLQAYKFELMPNGEQQRDMRRFSGSCRFVYNKALAMQKTLHEQGAKKLGYAGLCTSLIEWKDQPETDWLSETPSQALQQTLKDLERSYTNFFAKRADFPRFKRKGQSNCFRYPQGCKLDQINSRIYLPKLGWIRYRNSRDALGTIKNVSVSSNGDKWFVSIQTEREVAQALPSSITAIGIDVGIARFATKSDETHIDPLNSFKKQQVRLARYQRRMSRKVKFSSNWKKAKAKVQKIHTGIANARKDFLHQATTTISQNHALVCIEDLQVRNMSRSSKGTSEQPSKMVKQKSGLNRAILDQGWGEFRRQLDYKVAWNGGMLLAVPPHHTSQTCPCCGHVSKDNRLTQAQFLCVDCGYANNADVVGAINVLERGYRLLACGESAQSGRSVKQEPTEGRAQKLRSPVGIPAL

SEQ ID NO: 62419 - protein, 484 aa, Burkholderia sp.
LADRPQATRGARTATCRRQREPRARHAVLADRSRHPGTAAAAGMGRESDRPARARLEGRLSRHARIFAAQPQIHAGARAGVAGAGICATGRCTIALVPCRDLARQAQGPGHARLVRRQIPRTRLVAQRAGDADRHAGACPRRQRGDQLRRTPAAAAIRSGARSPERPVRLRLSRPHRGREVSSVPLQQALRHLQTAFANFFAKRAKYPNFRRKDGAQSAEYTASAFRWDGTSLKLAKMDAPLAIRWSRRIPSGAKVTTVTVSKDSAGRYHVSLLCDDVVCAKSASTGKVGIDFGLTDFVVLSTGEKIAAPNAFRKNEARLAKLQRRLARKQKGSANRTKARLKVARMYARTADSRRDFLHKLSTRLINENQVIAIESLAVSHMLKNRRLAKSISDAGWSEFVRQLTYKAKWYGRTLIGIDRWYPSSKRCADCWHTVASMSLKVCAWDCPGCGMTHDRDINAARNVLAAGLAVSAHGESVSPMSL

SEQ ID NO: 62420 - protein, 330 aa, unknown
  TnpB Polypeptide
MLREFCHRSKNLYNHGNYLIRQTFIEDGKWLRYGEVDRLLKTDAEYPDYREMPTAQTAQQTLRILDKNWTSFFAAIKDWKAHPEKYKGRPNLPKYKPKDGYFPLVLTNQNCKLKDGFIRFPRTFQGFTVKTIFASQPDAVFKQARFIPHGDEIDLELVYELPEVEEKADNGKYAAIDIGVDNLAALAWNTGKLAVLLKGTPLKSVNQYYNKQMAKRRSICELMNGRHSSAHSEAEPQGRGLPAQGEPQGHRLVRGAGCVGTGHRQEQGLEAGSDPWPQSQPDLRAAAFRPLHPDAPVQGRINRHEGRADGRKLYEWHLILGWRGSDQGPL

SEQ ID NO: 62421 - protein, 285 aa, unknown
  TnpB Polypeptide
MTVTLSHKIELKANDKFKTYCRKAFGVSRFTWNWALERVKEKRERKEKIDILELKKEFNHIKRKQYPFVMEVTKYASQQPFIFLKRALSQFFDDLKSDKSPSKRKGFPVFKKKRYSSGSFYIGGDMAVVKKGSEIKDKRFGASDNKPYLHVPKFGWVMLREEIRFPGKINSVTISQDGDKFFASFSIETSEIIYEATHRENVQEALCGCDWGVKDLLTLSNGIKIKGSKHLRRRQKQLSRQQRKLAKKQHPRSKGDKTPISGTPAVVKHFRIKFSFSLAKQDLFA

SEQ ID NO: 62422 - protein, 295 aa, unknown
  TnpB Polypeptide
VNKAYRYRLYPTTEQKSIFAKSFGCARFIYNKMLGDRLDYYMKTGKKLNNTPAQYKDELPWLREIDSLALANAQLNLNKAYNNFWNNRKHFGKPHFKSKKTGHFSYSTNNQKGSVRFEGNKVKLPKVSWVKLCLHRPLMENSTIKTVTISRTPSGKFYISILVEYENQILPIIPKKFLGLDFAIHGLYVASDEEDADYPKFLQKAEKKLAKAQRKLSKCKKDSKNREKQRKRVAVLHEHIANQRRDFLHKKQSFSRIATTLSALKISASKQWRNARRENISALENPYLITVGASL

SEQ ID NO: 62423 - protein, 404 aa, unknown
  TnpB Polypeptide
MKLKLTQQIIIGQKHENYASLDRLCWLSKNLYNQALYQIRQQYSKDKTYLGYSKLYRLLYDTKQPDYFALPYTQCSQQILRLVDKTYTSFFKGIKSAKNKGKKVRLPKYKDKENGRYVFVYTSQCIKVKDGILRLKVNNTDFIYLNCDKEDVCQVRIVPKGNHIVVEIIYQVEYELKEDNGNYASIDLGIDNIVALASNSAQSVLYNGRPLKAINHFYNKRKAELQSKVKTKSTKRIKRLNGKRNRKVKDFMHKLSHAIVCYMESNNINTLIVGKNVGWKDSIKLGHVVNQNFVSIPYNMLIQMLKYKCKLKGITFIAVNEAYTSKCSFMDNEKICKHKVYAGSRIRRGLFVTKNGLRLNADINGALNIMVLGCNKINVKRDALVIEPANMRFVVNPIGLTLSQ

SEQ ID NO: 62424 - protein, 373 aa, unknown
  TnpB Polypeptide
  misc_feature (355)..(361): Xaa can be any naturally occurring amino acid
MRRWSSALKTLKRTVKLESDPLNEWKYRALREVEEYQKKIVNEMIDVIISEGLPTTRKKLHERFYSHYKEKYPFLPSRVIEGSYITAGRIVKSFRERKRKGLTRKDKPEYKRVIITIPNMINWRFNRVSISILTHKGWVEIPLRVTSQLIRYLHEGWRVSQELKLRLVGRKVLVWLTFEKEVEVETREGNYISIDVNENNVTLAVFEGFKLRELRRYETGLGRIVVNYSLRREEISRGNSTKDELVKKKLRRLRERERKIDVLRKTVKRITDLARSLNAKVLVGKFSLRAKEKMEGDKNDKLRHRIHQWSVIKFVEMLKAQPIDVEEVSESYTSSIDPFDGRKLKKGKQVVERVXXXXXXXPRPSMPSPPRGP

SEQ ID NO: 62425 - protein, 379 aa, unknown
  TnpB Polypeptide
MEFIRALKMRIYPSNEQKAKIDKTLGSCRFVYNHMLARNKKVYERRNEHLSYNEMQNLLPVMKNYLPWMKEADSQALNYACRQLNTAYDRFFKKKSGFPKFHSKRMNRQAYTTINKRQIAYDAENRKVKLPFLGWMRCSDNRILSNPDFKYATVSRQNGKYYVSITYSIEKTIHPVTVSENQALGLDYKSDGLYVDSNGNMAGTPKWFRNSQAKLKKEQRKLRNKVGSKKGETKSHSYLKQLQKVRNLHEHIANQRLDYLHKESTRLANQYDAILIEDLNMKAIANKGFGNGKATFDNGWGMFTTMLDYKMAERGKHLQKIDRWFPSSQTCNTCGCVNENLKDLSIRKWTCLRCGTEHDRDINAAINIKQEGLRLLEAI

SEQ ID NO: 62426 - protein, 369 aa, unknown
  TnpB Polypeptide
VSKSLRLKSFQPEEEYVYLTYSLKNDKKEESKILLENYRVLFQKALDWLWERTKIERKEVEGKKATKVKITLPKKKEVYKALRNELEKVNKLASHYVDKAISDAYSILNSWRRRAEKGQASLRKPRLKKVYVRVKSTLRKVEGEEVRITVRPYEYITFSWSHKWFSRKVKGLELGEPIIKEDKVYLPFRYKLPWSSPIDFLSIDSNLYTLDAYDGDKFVTFSIKELYSLKFGMELKRSKIQSFASKHGSKGKELLRKYSHRERNRVLDYVHKFVNKLLGMYPVTIFAVEKLNKQSMFQDANDKLSKKVSKTVWRTIHRVLNYKAPLYGSFVKEVNPYLTSKSCPDVDGFPERSAGLSTVRGVGSLWIGN

SEQ ID NO: 62427 - protein, 398 aa, Streptomyces sp.
VTTHVKRAFKYRFCPTDAQAAELSRTFGCVRKVYNLALAARTQAWATHQERVTYNATSAMLTAWKKTGELAYLNEVSSVPLQQALRHLQTAFTNFFGKRAKYPRFKSRKTSRRSAEYTTSAFRFRNGELRLAKMSEPLRIVWSRPLPEGTKPSTVTVSQDSAGRWFVSLLCEDPSVKPLPATGQAIGVDVGLNHLLTLSTGEKITNPRHERRDRAALAKAQRNLARKARGDGANRRKARLKAAKIHARIADRRRDTLHKLTTRLVRENQTIVIEDLTVRNMVKNHRLARAISDAAWSEFRSMLEYKAQWYGREVIAVDRWFPSSKLCSACGTLRDTMPLNVRTWTCDCGVTHDRDVNAANNLLAAGLAVTVCGAGVRPQRSTPDRQSATKQKPSRREP

SEQ ID NO: 62428 - protein, 270 aa, Streptomyces sp.
  misc_feature (182)..(261): Xaa can be any naturally occurring amino acid
VFSDGRPTAENPEHYDTARRKLGRLSRTVARRLGPDRRTGQQPSKRWQRADAARNRVHYRTANLRRDALHKLTTPLAREYGTVVVEDLNVSGMLRNRRLARVVADAGFGEIRRQLAYKTRWNGGTLEVADRWFPSSKTCSGCQAVTPKLPLRIRMYVCEHCGLVLDRDENAALNLAALVKRXXXXXXXXXXXXXXXXXXXXXXXXXXXXXXXXXXXXXXXXXXXXXXXXXXXXXXXXXXXXXXXXXXXXXXXXXXXXXXXXRLGAARSPC

SEQ ID NO: 62429 - protein, 654 aa, Streptomyces sp.
LPLGEAETARTACARGLLRTGVVEKTGEVLSASALAERVGWAADLVSGMATELLAAHWNAADVEALASGVDVAGRALPSNAWMALRRLGWSVAAAEGIRVNDRIVRMAQETAGRTLRSAKWRADLATGILATWPAEPGKRTPDEWDAVREAISDGRHLPSSVITSRTRQITAFTRRHSRLPADVFELEAAPRMARMLLLSACDGQQASIARGDNPGRALLRLQLPIRPDPCSYRDWMWVACPITLPPTVPPGAVLHLPTLRIHHGRVRADLAYTHAAPRARRSGHAVALGVDWGLNTLLTAGAVHLHGDGKITALGAGGMFRASGVLAKQHRLRRESEHLHTKADHYQRLIAGNNAHLLTSKHHVLAEEIRHVSNRRANLNDALAWSAARWTVDQAITAAATVIYVEDLRSMEARGIGRTLNTRLSQQVRGQIVERIRHLAAEAGIAVVTVPARNTSRHCPRCLIPLRHRKAPDRPTTPGWKWAICPNPECGWQGDRDTGAWQRIAARGLAHQAKTVTDRANGTMAIRSVVDKLEVQAHVTPTTKTSRSGRSKTGPTRRQTTRPAPRRRRAPSPTRPDGPAGQRPEGNAPPGRRRLPRAAHRHQGVTAISTPTTGRHRPRGAALGAGFHQHVHATPPRWADSMPDGTSCMESLC

SEQ ID NO: 62430 - protein, 759 aa, Mycobacterium sp.
MAVLVVGALCCADHMRPSSDRVGRWRTVRLTLDPTRRQIKVMEMYCLLDRRAYERALPDGPCPNGDSSHASVSRQPDVAAVLASIEPPSTPGDLETKWAVVSSAHHYAAAVSGRRALRVPPRSARRPAPRKRPQTSTRTMFGLYERGGRPHFEIQSYRRVRIGPLASIRIHNSAKGLAAELKDPAVRLVMTTVHRKAHRWYASILIEDSRPLPAPTARQKRNGPVGVDLGVLHLATLSTGETIPNPKVFERGRKQVAKASQAVARSAEGSRRHQKSVERLHRRHHEIAEHRKTVLHTITRRLATSWSHIAIEDLNVRGMTTSARGTIENPGRNIKAKSGLNRALRDVSPWKFREQISYKSGWYGSELVICSRWFPSSKRCSQCGTIRRALPLTQRIFRCATCQLTIDRDLNAAVNLASRVGVAWGTWETENARKESIITNTAGVSHDAASTGRPRADSSATLDEQSSSHPTRSNRQGGPKTLRGPGPLTSRKQPDWTRYHTQWLLNCLALAAQQPPTTRARWEAVTQSLAENSQRSGNVEHGMPVVAVGSRALAIGAQYLCESVIQRCLLQLSAISPDPPIALVRRGRGLGADRWALLPVTSPTEIATGIKPMHPAWHIVGPAHMPTYELVQKHGPTSPVEIISAATHIGKSAAYNSFNVLQQWGLITRRPRYIALGPTTLDDILDQHDHAAAKDAMLDRHRRQRAGWRKTLNLIEYARTSHDIAELAPDSPQLTAGDSEDEQQYRIAVMAGPPPPEAP

SEQ ID NO: 62431 - protein, 522 aa, unknown
  TnpB Polypeptide
LAKNQTYKAFVARPSHVLDLDGELLDGSSVMAELASEVRDISSYATYVVRNDEILGDELARVTDTQPAAAGRRAGVTMPDFLVSGKSGRSRKENLLRYNVVTSYRSYMERVQAANGESSKYVSRGWKRTANGAVPSYGGDYVNLGAVDSAYARIENKPFTDGEIVLKMVIQGAWYRLIFDFDNKRFSEGKVTLPVIKVQDGQPVFIFTVVTDNPVVQFSGDYTIGVDVGINNYVTVVVRDVKTGRIAHETTLSQRVHSLWNSVRASERQVRDLRRKAATLLHDRQARMSALDEARFHREAASRKKRELAILAAQEIAYLSHAWGNAVVAVEDLGWISNTMQNGRWNRGAFVQWLTHYVSQNGGWVVAVNPSNTSQQCHACGAKVSHPTRELSVCAEHGAMNRDVNAAVNIAARAAPRVAKARVTRAKNRKLQPQAPLKTPVARNSLKYPGRDRTKSKPTPKRNKRHLVSEGVNLPLCPARAQAQRLEARVLADQDARGYLGTNVAALKQGNIAYKCRLCYLI

SEQ ID NO: 62432 - protein, 367 aa, Thaumarchaeota sp.
MCNDAIRIALEEKPKSRFKLIESAYFRLKEYGLHSHYILSACEIAYSVYKNKNRKKSNPYVKQAFLNLDNQSYTLNHLLLRIPIRPREFIYLTLQGSDYHLRFIDDPTLKIGSITLGRNNLSIAFSKAIAEIKPLGNVGIDMNERNATTSDTLGTTNIFDTSGVVEVKERYKAIRAKIGRQTRQDNRVNQKLYAKYGRREKNRTVQRLHTVSKKIVQQAKEKKLLIVMENLKGIKKLYRKGNGQGASYRGRMNSWTFHEVQRQIEYKARWEGIPVTYVNPRGTSRNCPECGSRVVTLAERKLYCPKCDKTWDRDVLASLNIMMMACVVPQAQPSTDEAVKGNGKNNNNYPNPPSRRMKVVIGREPTT

SEQ ID NO: 62433 - protein, 233 aa, unknown
  TnpB Polypeptide
  misc_feature (209)..(228): Xaa can be any naturally occurring amino acid
MLLSKKTSIKVSREYANLIGHMCYAASKLWNVCNYERQHYKETGMGQYPDWYYQKKAHKEDLWYKQLPSQTAQEVCKLLDKAWKSFYALKRSGEIETPRPPRFKQESIPITYMQMGIVHERDMGRVRLSLPKALKKYMEETYQIHENFLYLENKIFRGMDQIKQLRIYPPEKGNCKIIVVYEVSGQEELPQNGHELSIDLGLHNLMTCXXXXXXXXXXXXXXXXXXXXGKIFP

SEQ ID NO: 62434 - protein, 192 aa, unknown
  TnpB Polypeptide
ERYFHKEIARVQAQWYGQQSGKGVKYLATSKHIRKLYKRKHDSVTDYLHKVTRYLAEYCREQGITCVVAGDIRNIRREKDLGHRTNQKFHSLPYNRIYIMLEYKLKRYGIRFIKQEESYTSQCSPLSPKVGKRYAEPSKRKERGLYRDGNRTYNADAVGAYNILRKYHSVSGVKKELSVTGLKTPEIIKVAV

SEQ ID NO: 62435 - protein, 406 aa, Xenorhabdus sp.
MLRATKVRIYPTLEQAEYLNAQFGAVRFAYNKALHIKKHVYKRDGVSLSPRKDLKPLLATAKKSRKYSWLKAYDSIALQQAVINLNTAFDNFFNPKLRAKFPVFKRKHGKQSSYHCVGVKVLNEAIKIPKLTPIEARIHREINGEVKSITLSRTPTGKYFASILCKDGKEPPVPPDVIDADKSTGCDLGLTHFLICSDGRKQANPRYLIRASKNLRRKQKALSRKRKGSKNRGKARLIVARCHEKVANARGDFQHKLSRQLIDENQAVIVETLKTTHMLKNRRLARHIADAGWHSFVTKLEYKAKEAGKHLVRLDPWYASSKTCHCCGHQESEMPLSQRYWVCAVCQTEHDRDINAALNIQQQGLFELQAAGLVVSAHGGQRQTCHGQAAACEVGSLGGAVTYGHY

SEQ ID NO: 62436 - protein, 362 aa, unknown
  TnpB Polypeptide
VNKSFKVRIYPNRKQIQLIEKTFGCVRYVYNYMLNLKQKAYNIFELKLNYVKTSSILTKLKQRKSWLCEVDAVALQQCLRDLDAAYIKFFNGSGYPNFKSKRGKNSYRTNNKLKLDQDNKMIRIPKVGWIKFRDKTKFNGLNKIYNITISKTSSGKYFASISAEVDIKAFAKTKKSCGVDLGLKDFCILNDGTKFENPRFLTRNEKRLKLLQKSLSRKVYGSKNYEKARIKLAKFYKYIANCRKDYLHKISLFLVKNYDIICAETLQVKNMLKNHKLAKAINDVSWYEFCRQLEYKCLWYDKKFVKINTYFASSQLCSNCGYKNSDVKNLEVREWTCPECGQHHDRDINAAINILNQGLTLI

SEQ ID NO: 62437 - protein, 400 aa, unknown
  TnpB Polypeptide
MKVKRAYRYRFYPTPEQAQNLACTFGCVRFMYNWALSKRKRAYFDQGVKLYTKDLSAAITALKKEEGTTWLKEVSSVPLQQALRHLDTAYKNFFEGRADYPTFKKKHHEQSATYTDNAFTLKDEKLTLAKHTEPLDIVWSRPLPDGAKPSSVTVSKDRSGRYFVSIVLEEEIAPLPLTEQQVGLDVGLKSLVVLSTGEAIDNPKYYAKDEKKLARAQRKQAKKKKGSKNREKARKKVARLHARIADKRRDYQHKLSTRIIRENQTVCVESLAVKNMLKNHCLAKAISDVGWGEFTRQLEYKAKWYGRTFIKIDRFYPSSKTCSACGHILEALTLDVREWACPSCGVCHDRDINAACNILAVGLTASVCGGRVRPVDSKGLQATPVETETSLVSVGNPVCL

SEQ ID NO: 62438 - protein, 374 aa, Geobacillus sp.
VSTAGNVSSETIQRYVEEQKTRGGETVQALTIKIRFFPDNPELLRQLSREYIHTVNALTEQAEKQGSFPKVTTKDVDAHLPSAVLNQAIRDAKSVSKKMKKEGKRPILKKPVYFVNNQNYTIGEQMIAFPIMLDGKTRKTRFRAMVTERDKNLIQHAKLGLMRIVEKTGKWYAQVSLSIPVTKKKNEKVMGVDLGLKVPAVAVTSNGKTRFFGNGRQNKYIRRKYQQRRRKLGKLKKLSAIRKMNNKEQRIMKDINHKISRQIVNMAIKEDVSVIKLEKLTNIRQTARTSRKNEKHLHTWSFYQLSKFIEYKAKLAGISVVYVDPKYTSQHCPQCGTKNKARDRKYVCRCGYVAHRDRVGAWNIMKAPVADGVA

SEQ ID NO: 62439 - protein, 367 aa, unknown
  TnpB Polypeptide
MSKSRSKRVKNTMTLQIRLHPTCEQVALLRAHCVEYISTVNVLVAALDADLLPDDASTKDFSCALPSAVKNQVLRDAHSVFKRSLDLGMIPVLKKPIAQWNNQNWHLTDSTLTIPLSIEGTTKQTHIPCDGLVYAGKAGLLRIKQKRGKWFADIALILPDHAPIQSEKVMGIDLGVKVPAVSYIPGQEACFYGNGRYQRMMRRRFYSRRKKLQKAKKTRAVRKSQGKEQRWMKNINHQLSRQIVNQAHAQDVGTIKLESLSGIRKGTTRTSRGASARKNNRMIATWSFSQLTQFITYKAAQIGIKVEQVNPAYTSQECPACRARNKAQDRTYVCSDCGWIGHRDKVGAINISRRASLPDKRASATGA

SEQ ID NO: 62440 - protein, 299 aa, Lachnospiraceae sp.
MIKTIRVMLIPNNKQKTKLFQYANTARFAYNWALSREQDNYKNGGKFISDGDLRKEFTQLKKTDEYAWLSNISNNVTKQAIKDACEAYRDFFNGYTKFPRFKSKKHSMPKFYQDNVKIQFTDTHVKVEGFAASKKKNKQKLNWIRLAEHGRIPIANVKYMNPRIKYDGLNWWITIGMEYEDSSALPSNEGIGIDLGIKDLAICSNGHKYQNINKTQKVKKLEKRKRRLQRSISRRYEKNKKGENYCKTSNLIKSEQELLKLNHRLTNLRQNYLHQTTSEIIKREPSFICMEEYSDNYCR

SEQ ID NO: 62441 - protein, 549 aa, unknown
  TnpB Polypeptide
MVLSIASGKNCSEEKAHKLYITLECMLEFEKEEEKEKVLALMRRFSSATRYAYKRLLEGVADKEIEKAIQEKHKLNARYVKDAVLIAKQVLKSCLQRGQNPKKLVFGSRELFEKLKKKHLTGKRREKLRQRWEERRYYHLYSRGDKAKNGNLNLRFVWEDSLKLRINLGNGEYVFAKVVRDAKRHKDKWIDFTWRLLEAERLGEWFAYNVRLKVRNGKFYAQVSWEKKTVQPVITKAYGVIGIDINAHPFHLALAYVPTDGNLEKFERIDLREMEGKTKNQREHIAWHIARQVVERALENGKAIVVEDLQKIPKGRKGDGLAKLRRKLHKWVYRSVLEKIEVYARRLGVQLIKVNPAYTSIIGKLKYSPMLGIDKDVAGAYVIGRRGLGFEEKLPKNYREPLKDKEFLAYATAKVDERINKLKSELEKEKNEYKRNALKGRIKRLRRYLKLLLSYTRDSGKSESASQQPVYRQMERVRGRARSLQKSWQVLSVALAVLRATTCLEWCRDHSPLKRVLISGDWARVAGKGSPSLPGQGTAASNCSFIHFG

SEQ ID NO: 62442 - protein, 339 aa, Tetragenococcus sp.
MKKEDLVKVLKGYKFRIYPNEKQIQYFIQTFGCVRFTYNHLLHARQKALQAGDYQTQVSPASLKRDYPFLKKTDSLALANAQRNLDRAFKNYFSKRAGYPKLKTKKNNWQSYTTNNQKHTIYFVGNQLKLPKLKSLVTVNLHRKVAGEIKSATVSAQNNQMFFVSLLCLEEINPLPKTGTTIGVAYCPENLVQMSAVNRLPVYKQETLQYQLDKAIKRLEVRAKAAKRRKVLLEQAKNYQKQKSKVQKLYMAKNDQKKNYIDQLTYRLVHDYDCICLEKQPEFTENTKFSETDWQHFLRKIQYKARWYDKQLVFVDSIEKENETKCFTIEQVGKKLINQ

SEQ ID NO: 62443 - protein, 317 aa, Escherichia sp.
  misc_feature (310)..(310): Xaa can be any naturally occurring amino acid
VKRLQAFKFQLRPGGQQECEMRRFAGACRFVFNRALARQNENHEAGNKYIPYGKMASWLVEWKNATETQWLKDSPSQPLQQSLKDLERAYKNFFQKRAAFPRFKKRGQNDAFRYPQGVKLDQENSRIFLPKLGWMRYRNSRQVTGVVKNVTVSQSCGKWYISIQTENEVSTPVHPSASMVGLDAGVAKLATLSDGTVFEPVNSFQKNQKKLARLQRQLSRRVKFSNNWQKQKRKIQRLHSRIANIRRDYLHKVTTTVSKNHAMIVIEDLKVSNMSKSAAGTLSQPGRNVRAKSGLNRSILDQGWYEMRRXYLVTKTR

SEQ ID NO: 62444 - protein, 309 aa, Escherichia sp.
VKRLQAFKFQLRPGGQQECEMRRFAGACRFVFNRALARQNENHEAGNKYIPYGKMASWLVEWKNATETQWLKDSPSQPLQQSLKDLERAYKNFFQKRAAFPRFKKRGQNDAFRYPQGVKLDQENSRIFLPKLGWMRYRNSRQVTGVVKNVTVSQSCGKWYISIQTENEVSTPVHPSASMVGLDAGVAKLATLSDGTVFEPVNSFQKNQKKLARLQRQLSRRVKFSNNWQKQKRKIQRLHSRIANIRRDYLHKVTTTVSKNHAMIVIEDLKVSNMSKSAAGTLSQPGRNVRAKSGLNRSILDQGWYEMRR

SEQ ID NO: 62445 - protein, 526 aa, unknown
  TnpB Polypeptide
MGKLEIPTGWALQAYRFEVDRPSRYRSIPSHEGARRFAWNWGLGLVEGQLQARSAYRVLALRQGATTDEATAWARETVPVPWSLPALRLIWNREKDEVAPWWNENSKESYSSAFEALSVAFKNYFDSRSGTRRGDRVGWPKYKRRAGRQSVAFTTGAIGIVDRHHVKLPVIGALRVKEPTDKLGKRIVGGTARILRATLSTDGQRTFVSFSVLAQRDPPHRALVGVCGHDVGISTLVTSSDSHRVANPHAGKDSQAGIRRYQRRMDRQHRTGSPKCFASDGTHIKGGCHWKARSKRSVKNQARLTRTHAKAADVRRDITHKASHRAATTYAVNIVEDLGISGMGRRGRGKRGFNAALHDATLAELRRQLTYKTTWHGSALWLADRWYPSSKLCSKCKTKKADHRRSDRIFSCDACGLVIDRDLNAAKNLQALAELACVCLLAPLMTGQPVDWSNLPVRPSGWGPDQSTRSSRGCARAGSHKADGGERKTARRSSTGDRSFDREAAVATGSVVSLGGASPSPKKAVA

SEQ ID NO: 62446 - protein, 371 aa, unknown
  TnpB Polypeptide
MKILKSYKYRIYPNKEQEILIQKTFGCCRFVYNQVLAYKIKLYQTQEKSLSRFDCEEYMIHNLKTKYEWLLEPDKFALSSAIENLDNAYQKFFKEHVGFPRFKSRHNHRKSYTTKITNNNIEVSFEKNQIKLPKLRWIKARLHREFIGKIKRATISQNPSGRYFVSVLIEQEYLPLSTTGSAIGLDLGIKDLIIASDGKKYANPKTLAKYEKKLAREQRRLAHKQKDSRNRGRQRIKVARIHEKIRNIRLDYLHKTSNEIISENQVIVSEDLAVSNMMKNHKLAKSISDCGWYELTRQLEYKAKWNDRQYIKIGRFIPSSQICNCCGYQNKETKDLSVREWICPNCGVKHDRDINAAKNILDEGLKLLKTS

SEQ ID NO: 62447 - protein, 404 aa, Streptomyces sp.
VIRAYKFLMRPTVGQAAALGEMLRDHCSLYNGALQERRDAYRHASKTSITYGMQSVQLKEIRSFDPERQARWSFSSQQATLRRLDKAFQAFFRRVKAGEVPGYPRFRGVMWFDTVDFPRDGDGCRWDSTPHDPVTRVRLQGVGHVKVHQHRPVVGKVRTVSVKREGRRWCVILTAEQAQPEPLPATGGVVGIDLGIANFLADSDGGFVPNARHGRKAAAKLGAAQQALARFPRVRRDKRTRNHRRAVQKVADLHRKVRRQRLDHAHKTALDLVRRHDVIAHEDLKIRNMVKAPAPKPDPGRPGSFLSNGAVAKAGLNHSISDAGWGVFLTILHVKAESAGREVILVDPRNTSRTCPACGHVAKENRPTQEKFHCVSCGHTAHADTVGALNVLRAGLVRRNTRQG

SEQ ID NO: 62448 - protein, 425 aa, Helicobacter sp.
MSAISITHKIALKPNNKHITYFKKAFGCARLAYNWGLAKWKENYQLGIKANHLQLKKEFNALKKSQFNFVYEVTKYATQQPFIHLNLAFNKFFRDLKKGLVSYPKFKKKREFQGSFYIGGDQIKIIQTANTDYLKIPNLPPIKLTEKLRFQGKINNATITQKGDHFYVSISCDIDEREYKRTHKLQESHNKLGIDTGIKSFVSLSNGLNIYAPKPLDKLTRKLVRISRQLSKKIHPKTKGDKTKKSNNYLKHSKKLTHLHEKIANIRLDFLHKLTSSLIRHSNSFCLESLKVKNMFKNHRLAKSLSDVSMSMFNTLLEYKAKYSNKEILRADTYYPSSKTCSNCQKVKQDLKLKDRIYQCLECGFELDRDINAAINLLKHLVGRVTAEFTPMDLTALLNDLSNNRLATSKVELGIQQKSQIERIL

SEQ ID NO: 62449 - protein, 358 aa, unknown
  TnpB Polypeptide
MSITLTHKICLALTIKQEQYFRKACGTARFTWNWALNEWQNQSKSGLKPTAYWLKKQFNALKLAQFPWTYEVTKYASQQPFIFLQTAFKRFFEGTSRYPKFKKKGHRDSFYVGNDQLKVNGNRLKLPKLSPLKMHEALRFQGEIISATVSRTANKWFVSLTVKLLKAPTTCKSQASVGIDLGIKSLATLSNGETVKAPKPLKKSLNKLKRLQRSFARRKKDSHNRAKLKLKIAQVHAKIVNLRQDSLHKLTTHLTHHFAGIVIEDLNVKGMLKNRKLSRAIADLGFYEFRRQLEYKTQLKGNYLLIADRWFPSSKICSNCGNKKEELKLSERVYHCEACMHQIDRDLNAAQNLKNLLT

SEQ ID NO: 62450 - protein, 447 aa, Bacteroidetes sp.
MISIAHRIELKPNNKQKTYFRKAFGCARLAYNWGLAEWKRMYEAGEKPNGRKLRTQFNAIKKEQFPFVYEVTKCATEQPFENLQSAFDNFFRDLKQGKVSYPQFKKKRDNEGSFYIQADKIRLSETNKNSKKFAKLAHNERGKHQYICMPNLRGGWVKMAEHIRFNYAKINNVCISQSGGKFYASFSLEITEDEYRRTHRHMDSINVDRKVGIDMGIKSALILSDGIAIENPKPLKKNLRKIKRLSRQLSKRFHPKTKEERLKGVRKSNNYMKLSARLANEQGRVANIRRDFLHKVTTILTTHYGEIAIEDLNVKGMIKNHRIAQAVNDVSFGELRRQIEYKAKTNGVKVVKADRFFASSKMCSVCGEKKEDLSLSDRIYRCEHCGAVIDRDLNASLNLLGLLVNHKIGMDYPKSTPADLTALLSRFSKSGIVTSKVETGKQQKSNV

SEQ ID NO: 62451 - protein, 415 aa, unknown
  TnpB Polypeptide
MYLTIKQQLKNLSKEDYLNLKELSHIAKNLYNAATYNVRQYYFQEKEYLRYEQNNLLCKENENYKLLNSNMAQQILKEVDGSFKSFFGLLKLAKKGKYDYKSIKLPQYLDKDSFATLVIGFIRIKDNVLIMPYSNIYRKTHKPIKINIPPVLQDKKIKEIRIIPKYNARFFEIQYSYESTDIQRNLDNTKALAIDLGLNNLATCVTNEGKSFIIDGRRLKSVNQWFNKQDSILQSIKDKQGIKNITKKQMIIINNRNNKVSDYINKTCRYIINYCLNNNIGNLVIGYNKTLQKDINLGKANNQNFVNIPVGNIKEKLEYLCKMYGINFTKQEESYTSKASFFDDDEIPKYNPNAPKEYIFSGKRVKRGLYITKTGYKLNADINGALNILKKSSVVCLKTLYSSGEVDTPVRIRIA

SEQ ID NO: 62452 - protein, 406 aa, Streptomyces sp.
  misc_feature (406)..(406): Xaa can be any naturally occurring amino acid
MQLRYSFRLYPNGPQRSALARAFGCARVVYNDALRTREDARAAGLPFVSSAVLSTAVTAAKSTPQRAWLAEVSAVVLQQSLRDLDTAYRNFFDGLKGKRPRMGAPRFKSRKDNRHTVRFTANARWKITPGGDLSLPKIGDVRVKWSRALPSAPSTVTVVKDAAGRYFASFVVETDPEILPAMDNVVGIDLGLTHFAVLSDGTKIDSPRFLRRAEKKLKRAQRDLSRKAKGSANRLKARIQGRPRARADRRCAARVPPPAFHKDHPREPIGGGGRPGGQGTRPHTHGEVRARRRMVGVRHDAGVQGRQVRPHVPPHRPFRAHLSGVLRVRRQGRPQTARHPRVDMHSVRGRPGPRHQRGGQRRQGCRTGSDSLSSAGKTGTCPGAARRSRNPPRRSDGRGRNPLPLX

SEQ ID NO: 62453 - protein, 494 aa, Streptomyces sp.
MQLRYSFRLYPNGPQRSALARAFGCARVVYNDALRTREDARAAGLPFVSSAVLSTAVTAAKSTPQRAWLAEVSAVVLQQSLRDLDTAYRNFFDGLKGKRPRMGAPRFKSRKDNRHTVRFTANARWKITPGGDLSLPKIGDVRVKWSRALPSAPSTVTVVKDAAGRYFASFVVETDPEILPAMDNVVGIDLGLTHFAVLSDGTKIDSPRFLRRAEKKLKRAQRDLSRKAKGSANRLKARIQGRPRARADRRCAARVPPPAFHKDHPREPIGGGGRPGGQGTRPHTHGEVRARRRMVGVRHDAGVQGRQVRPHVPPHRPFRAHLSGVLRVRRQGRPQTARHPRVDMHSVRGRPGPRHQRGGQRRQGCRTGSDSLSSAGKTGTCPGAARRSRNPPRRSDGRGRNPLPLGRGAEVNPPAPPADGLSSVRPAGSRRTGRCAGPSPSGGPGSAGSPPRRSRPGASARARRPVRSGCTRGSSARGRCGRRPAPRRPPRRAG

SEQ ID NO: 62454 - protein, 402 aa, Streptomyces sp.
VIRAYRFLLRPTARQAVALGEMLRDHCSLYNGALQERRDAYRHASKTSIKYGGQSAQLKGIRAFDPERQGRWSFSSQQATLRRLDKAFQAFFRRVKAGQTPGYPRFKGVGHFDTVTFPKDGDGCRWDSTPHDRQTRVRLQGVGHVRVHQHRPVRGRVRTISVKREGNRWYAVLACDNVPIEELPPTGMVVGIDMGVAHFLTTSGGAHVTNPRFFQAMADELAEAQRHLATFPKRTRQRTKKHRAAARKVAKLHGRIRRRRADFHHKTARTLIAGHDVIAHERLNTAGMTKSPAPKADPGQPGGFLPNGAAAKAGLNRSILDAGWAQFLTILANKAESAGRLMVPVDARNTSRTCPACGHVAKENRVTRERFRCTACGFAANADHVGATNVLDRAGLVLCTAA

SEQ ID NO: 62455 - protein, 262 aa, unknown
  TnpB Polypeptide
MEREIKGKIGKATISKTPSGKYFVSILVEKEYNPVNKTNKSVGIDLGLKDFLVLSTGSKIKNGRFLKHYEHQLKLNQKSLSRKTKGSNRYENQRLKVARIHEKISNSRMDLIHKVSLNLVRNYDQIFLEDLNVKGMVKNHKLSKSISDVSWSKFIEVLTYKANWNDKEVIKVDRFFPSSKTCNSCGWINNSLTLNERTWTCKCGLEVDRDLNAAKNILNEGLRKNISVGTTDYGRGAQIRLDKSSTSRETSKKKVLHGPETH

SEQ ID NO: 62456 - protein, 385 aa, unknown
  TnpB Polypeptide
MRAYKYRIYPTPKQKKVLQDTLFSCFKLYNTALEHRREAYRIAQKSISYNEQQNELPSIKDEFPEYNKIHSQVLQNVIKRVDLAYQNFFRRIKQKGEKSGFPRYKSFDRYDSFTYPQSGFDIINKKVRLSKIGSIKIKLHRQIPLNSEIKTCTIKREGNQWYVIFSCKLSNPIPEKKVITNVIGIDLGLTNFAVLSNGEEIANPKYLKQSEDKLKEIQSKYSKGKSKKIKKQLTNLHRKIARQRNHFQHKLSYRLVNTFDLIAYEDLKIKQMIEDNKYNLQKHISDASWSTFIFMLKYKAEDAGTYCIAVNPKGTTIKCSNCGTLEPKTLYERSHKCTTCEFETTRDHNAAINIHKLGINLVGNSVCSDMVHHFLSSEAPLPLVI

SEQ ID NO: 62457 - protein, 443 aa, unknown
  TnpB Polypeptide
MILTENHRIKRIKHKVLFRKIDAYCYCAKNLSNSVQYLICQCYRIHQKLKNGESLDLWEQEMIDEINHAIIAYNAGRDEKEKLKCVDADNGFIADAYFLSWHLKTHEVYRAMPYATCSQICIQEKCRQWKSFYRAKIEYHKNPDKFFGVPRKPGYLDSLRGRDALVITSQNFFITEDGLITMPGFLKEIRIKAKHRSVRQIRIITDKNSIRIMLMYEQKTEKAKADGNIMGIDLGVDNLITAGLSSDTSPVIINGRPLKSINRYYNKRKAILQEMAKKSNRLDTTNRMERLTTKRNNKVKDFLHKASRKIIELANENGISHICIGNNRGWKQKVELGKRTNQTFVSIPYRMLIDMICYKAQLAGIKVSVVRESYTSGTSYLDGERPEKFFYDITRRVKRGMFKSSRGILINADVNAAYQIIKAGGYQELPIKENEKVVRLNVA

SEQ ID NO: 62458 - protein, 370 aa, unknown
  TnpB Polypeptide
MKQTLMIKLSPNPEQYKALLETMERFNEGCNYTSGKAFETYTYGQFYLHHVVYGYLREHYKLSAQMAVRVVAQVSESYKVDRKVQHSFNPHSAMVYDQRILSWKGLDKVSILTLSGRQIIPTRIGAYQEARLDRKVRQSDLILRDGIFYLAVVVDAPEPTPDDPNGYLGIDLGIVNIAADSDGKTYSGNQVNGLRKRQAKLRGKLQAKGTKAAKRLLVKRSRKERRFATNINHTIAKSIVAKAKDTGRGIALEELSGIRDRITVRHSQRRQHHSWAFRQLRTFIEYKAKLAGVVVKLVDPCNTSRTCPICGCIDKHNRLSQAIFSCVSCGFSSPADTVAAGNISRRALVNVPYFSPTLVGAGQGKAVCFS

SEQ ID NO: 62459 - protein, 482 aa, unknown
  TnpB Polypeptide
MQIGNKFRCYPTSAQEQTLLQWIGCQRNIYNSKVREDQYFRRFAQKSLQHTGQYAPIDQQYSQFKTDLTPYLSEVPSVVLRNGAVLWKQAYSRYFSKLGGRPTIHKKIGKQSVWLTSELFRFVPVIDADTGVITGHQLHIGIKKFPVGMLVFKAHKDYRLPASLHISIHAGRWHVSFNFDDNIPEPTDKDTAEWLIQFNEAELRKLTVGLDRGVTLPLAGSDCQQFRFSEVQDKRLLAQERHKKRWQRRQARRDTGSAGWIKAKRRVARYQRYGADVRRDVAHKTSHTLASDPHYKLFVFEALKVKNMTAKAKPKQDEQGRWIKNGAAAKSGLNKSILASTWGQTKTYLQYKARRQGKLVIEVPPFYSSQECAACGHVHQDNRVSQSEFVCLCCGNTDHADHNAAKVIAMRGVRQLLAGRCVQKESRRCRITRNKVGAEGSEPVAETQSTLGETVVSRWGGNIPALWSLTLEETPTTTRLRA

SEQ ID NO: 62460 - protein, 148 aa, unknown
  TnpB Polypeptide
LSRCVRGSHNYELQKKKVARCHEKIRNKRRDHLHKLSRKIADSYDAVAVEDIDMKAMGQCLHFGKSVQDNGYGLFREMLEYKLAWQGKKMVKVDRFFPSSKKCCKCGRIKKELKLSERVYHCECGNEMDRDHNAAINIREEARRMLTA

SEQ ID NO: 62461 - protein, 313 aa, Acidimicrobiaceae sp.
LCRGTLKRLDHAYGAFYRRVRLGETPGFPRFKSAGRFESLQWFNASGWKVKAENQRLYLKGIGEIKTNYHRPRLGEPKAITVRREGAKWWLNVQCVTVPAIPLEPTGRTVGIDLGVTNMVATSDSVFEEGEHFGSKAQHGLARAQRSLATKQLESKRRRRQVEEVARLHRKVKNQRSNFAHQLSRQLVNEYDFIAYEDLKIAKMVSTPTARPDPEQSGAYLPNGARRKAGLNRSIHDAAWGQFLSFLIYKAESAGRTVVKVNPRFTSQTCAECNYVDAGNRVRQEEFRCLACGHCAHADNNAARNILRAGRAL

SEQ ID NO: 62462 - protein, 460 aa, unknown
  TnpB Polypeptide
VHSVSVRISAGQGVTQVVKLRLNPSRAQVELLAGYCGTARAAYNTLLFQVKANLGQRVAERTYDIPDANLTPGLSWHRYGLEKLLRENRGTWLPWHAQVPYLVLDRQAHQLADGLKKWKAGTAKFPRYRKKRGDGAGLVPVTFKETDAVWLTGGGRALALPISAVTRRELGRARSVQLSGVPVIKDNRGRRAAKLIADGRGQVQEVTFSFSGGYWWAALRMRVLPAAKTQPTRHIVLSRAGAVGVDAGMGRHFATLDVPTPGVTDDAGHIDAPMFLRRALGDLAVAQRALQRTLPGSKRHAKALARVQKLHGRVASRRETWQQRLAIALVERAHIVGVETLNLRGMARKTKGFRFGRSVADNGYGLFVEILARQADKRGSAVVKAGRFYPSSKTCSDCGAVKAKLHLSVREYQCTTCGLRLDRDVNAARNLAALARTGLTRPESSGISPGPAGSELVLAA

SEQ ID NO: 62463 - protein, 426 aa, unknown
  TnpB Polypeptide
MDFYEVPKKRSILTPPVSFWISSQGQSFSNRIQTYISRRSYMVIMGSPFFSVMYFNLVFRVSRVFTFPRLLMQKLSLSFLSGWLRKKHIFFSCRRTSSSQTKSGISRPPRFKQESIPITYMQMGIVHERDMGRVRLSLPKALKKYMEETYQIHENFLYLENKIFRGMDQIKQLRIYPPEKGNCKIIVVYEVPDQEELPQNGHELSIDLGLHNLMTCYDSGNGKTFILGRKYLALERYFHKEIARVQAQWYGQQSGKGVKYLATSKHIRKLYKRKHDSVTDYLHKVTRYLAEYCREQGITCVVAGDIRNIRREKDLGHRTNQKFHSLPYNRIYIMLEYKLKRYGIRFIKQEESYTSQCSPLSPKVGKRYAEPSKRKERGLYRDGNRTYNADAVGAYNILRKYHSVSGVKRELSVTGLKTPEIIKVAV

SEQ ID NO: 62464 - protein, 430 aa, unknown
  TnpB Polypeptide
MKRVEKHKIRKSNKYFPFILEQLEQCKKISNSATFIIRQNFFFNKTKDSKGNEVRKYIKYNDMDRIFKRDRTELYRSLIYVQSVQQILRKVHSSFDSFFKAIKDYKKNKSNYTGRPKLPKYKSSKYDELIITNQNFKQNDKVLNFKGYLKDLSFTMYNIGKANQVMFKYNGLDIDVYIIYDNSKTLINKEVVNYIDDDSRIISIDLGLNNLVTITNNIGIRSIIINGKGLKSKNIYYNYQIGKYQSILATVNEKDKKKKSYKSNRLTRLRVKRNNIMNDYIHKTTRYIINYCKENNIDTIIIGNNKFQKQNKRKKQLKGLKNFIQVPIKRIIEQLRYKLEYENIRLIETEESYTSKTSFLDNEIPNKETIPKGKRIKRGIFKRPNGEYVNADVNGSLQILSKVISTRLLEQLRKVVSSNGLALNPLKIAL

SEQ ID NO: 62465 - protein, 406 aa, Moorea sp.
MIVYEMKLQGTQAQYRRLDEAIRTGRFVRNSIIRAWMDGDVKNRNDAYSYCKVLSDNPEFPWVSRLNSMARQAHAERAWASIERFYRNCRQKVPGKKGFPRFKKSQIRASVEYKTTGWKLSEDRRYLTFSDKFQAGKFKLWGSRDLHFYQLKQIKRVRVIRRHDGYYAQFLIDHTREENKELTGKQTGLDVGLNFFYTDCSGEQIDNPRFLRKDEAKIKKLQRRLSRTQKGSQNRKKAINRLGRAHLKVSRRRNDWVCKLAQHVIQSNDLVAIENLRIKNLVKNHKLAKSINDAAWYKFREWLEYFGRVYGVPVIAVDPAYTSTDCSNCGEKVVKTLSTRTHRCPHCCYRADRDKNAAINILKSALKQLSNTVGQTEINASGEIDLCLKGETQLSKSARRKRKPKQ

SEQ ID NO: 62466 - protein, 409 aa, unknown
  TnpB Polypeptide
MFFNNISVKLTEVIQVDYSLKLSKICHLAKNLYNLANWYVRQDLFNLNNFLTYYDLDFILKYKQAYQSLPSQTAQQVLKYVNRNWKSYFKGLVEYRLDFRKFKKRPKIPRYKKKNGESVVIFTNQQCKIKQGYLYFPKRVNINPIKTRITERLKEVRIIPLGIKYKIELVYEKEEKDLGLDKNHMLSIDLGLNNLITAVNNNGCKPFIIKGGTIKSINQYYNKQLAYYRSIENKKGYFNDTKRIQKLHLTRNNKLTTLFHRISKNVIKYCALNNIGTIVIGYNLGWKQKINIGKRNNQKFVQIPFLKLVKQIEYKAQLKGIRVLTVNEHHTSKCSFLDNEPIGKHETYAGKRISKGLFKTSKGILLNADVNGAYNIMKKAFPNAISEDEIEAFGLMPQIIQQNIIDIII

SEQ ID NO: 62467 - protein, 407 aa, unknown
  TnpB Polypeptide
MLIYEYKLDGSKEQYAAIDEAIQIVQFIRNKCLRLWMDERGSNAYDLNVHCAVLAKDYPFASHLNSQARQAAAERAWFAISRFYENCKQKKPGKKGYPKFQHDNRSVEYKTTGWKLEADGKHITFTDGCGIGRLRLVGNPSQKIEAFPLKQIKRVRIVHRADGYSIQFGVQSEIQVVHQPSGRQVGIDMGLLSYYTDSEGHTVDNPRHYRKAEQKLKRLHRRLSRKQKKSQNRKKARRALAKGYLKVQRQREDFARKQASTLVTSSDLIAYEHLQIRNMVKHRHLAKSIHDAGWGTFLRWVKHYGSVHGIPVLAVEPQFTSQDCSACGTRVKKSLSVRTHICPGCGVVLDRDHNAARCILQKALAMYPGAQGNILDEENAWGEPTSTALSAMATQQVGSRNQEPLRL

SEQ ID NO: 62468 - protein, 355 aa, unknown
  TnpB Polypeptide
VKLVVTPDQADALKRTMQAANAVCDSISAWAWENQTFGQYPLHKAQYAVQRADSGLTAQVIVRCIGKVADAYKLDRRTQRTFQPTGAIAFDDRILNWYAEREQVSIWSVDGRLKLPFVCGEYQRGLLAFRQGEADLAFVGGDFYLLATVSIPDPPLIVADGVLGVDLGIVQLAIDSEGNQYSGEAVRNCRLRRRSHRSGLQRTGTRRAKRVLKKAGRKASRFSKWVNHNISRAIVQTALISRKAIALETLTGIRQRGSAFSREMRWQLGNWAFHELATFICYKARRVGVPVVFVDPRDSSKTCSCCGYCDRANRKSQAQFLCLQCGFQANADRNAACNLEARGKVNCPLVAPALG

SEQ ID NO: 62469 - protein, 425 aa, unknown
  TnpB Polypeptide
MSGVTRTVVVRSVPLPRRLFRVFVELEGVYKSMVGRLVAYAVENGVASFVRLRALKYLELRSSYPQLPSHYAYTACQDAATRAKSFLKLRRRGLARGNYPEVRRISIWLDDHLWRMSGLTGIEVATHVGCVRVELEPHKQYWRYVNSGWKLASEAKLRLDRRGRRLIFYLTFRRSVEAYEPRDLIPVDVNENHVAVMINQEVYLLETNFKDITLGYYYRRKAIQRKYDKSCGVDCRVKRRILRKLREGVRKNDLKWKLANIIVRTAVERRSAIVLERLGKNPAKGMISRIKDAQLRHRVYQASFKGVQRAIEEKAREHGVPIVYVNPRNTSRMCPIHNAPIIYENGSRVGRCSRGGELWHREVAACHNLRLRASPHLGGEGNAQSPGGPLLDGSPMPLGSTATHEPTPITHEVWARWKSLGAINK

SEQ ID NO: 62470 - protein, 369 aa, Anoxybacillus sp.
MVNKSYKFRLYPTKEQEQLLAKTFGCVRFVYNKMLEERIQIYEKFKDDKEALKKQTFPTPAKYKKEFPWLKEVDSLALANAQLNLQKAFQNFFSGRAGFPKFKNRKAKQSYTTNVVNGNIQLSDGYIKLPKLKWVKFKQHREIPAHHIIKACTITKTKTGKYYVSILTEYEHQPVPKEIQTVVGLDFSMNTLYVDSEGKRANYPRFYRQALEKLAKEQRILSRRKKGSNRWHKQRLKVAKLHEKIANQRKDFLHKKSYELAKLYDCVVIEDLNMKGMSQVLNFGKSVHDNGWGMFTTFLQYKLEEQGKKLIKIDKWFPSSKTCSCCGQVKESLSLSERTFRCECGFESDRDVNAAINIKHEGMKRLAIA

SEQ ID NO: 62471 - protein, 408 aa, Anoxybacillus sp.
MKAMEASRVERHIICPTHPYYQMLDEYCFKSKNLYNFANYQVRQTFFQHGTYLSYNKLDKLLKTKGMDADYRAMPLAQCAQQTLRVLHQNWKSFFKAMKDWSKNKEKYTGRPKPPKYLKKDGRYVLVLTNQSCKIKDDDIVFPECFQGFRLKTAIKGKLQQVRFIPKHRHIVIEVVYKISIPKQKRDHGKYLSIDLGLDNFATIVNNVGVKPIAINGKGLKSVNQYYNKQISHYRKVAKQMNRLDWTKRMSRWTEKRNHIVENFMHQASRFVIKYALSLDCDTIVVGMNKDWKREVHLGKRTNQSFVHIPYQTFIHQLRYKAEQHGIRVIVTEESYTSKCSSLDMEEIKKQKQYKGTRIKRGLFQSANRVLINADVNGAYNIMRKVFPKAFANGIEGVGLHPIRVHVA

SEQ ID NO: 62472 - protein, 377 aa, Anoxybacillus sp.
MLVNKAYKFRIYPTKEQEILIAKTIGCSRFVFNHFLVKWNETYKETGKGLTYNACSSLLTQLKKELTCLKEVDSIALQSSLRHLADAFDRYLKKQNNKPRFKSKKNNVQSYTTKYTNGNIVVLDKHIKLPKLGLVRFAKSREVEGRILNATMRRNPSGKYFVSLLVETDVQPLPKTNKEVGIDVGRKDFAILSDNTRYENPKWFRKLEEKLAKAHRILSRRVKGSSNWNKQRVKVARIHERIANARTDYLQKISTHIVKNHDIIAMEDLQVSNMMKNHQLAKAISEVSWYPFRTMLEYKAKWYGRTVVVVGKTFASSQLCSCCGYQSKEVKNLNLRQWECPSCHSKWDRDINASLNILAEGKRLLSASSQEPQGLRG

SEQ ID NO: 62473 - protein, 370 aa, Anoxybacillus sp.
MELVVTAKIRLLPTEAQHLQLVETMQAMKQALNFASKVAYEHHLLSSFKKLQVLVYRDLRELFGLKSQMACNVCTIVAGVYASMKSNGERTLAVFKKPKLQYSYNRDYSFTKDGQMSIGTLNKRIKMPFLTKGQERYFDGSWEFGTGTLVYKKGKFYLHVAAKKVIHPPSVYQNVVGVDMGMRFLVTAVDSHNRHLFIKGTPIQSVKARYVRLRKELQQRNTKSAKRKLKKIAGQENRFMTNVNHCVSKALVQFAGKHSLLVLEDLTDINDTVCVRKKDRYVRFTWAFAQLRSFIEYKARLHDSHVLAVHPAYTSQQCPTCGFTHKNNRKKQIHTFICGACGYTSNDDRVGALNLRQKGIEYHHGVTAQA

SEQ ID NO: 62474 - protein, 386 aa, Anoxybacillus sp.
MKKAYFVEIKPTTEQAIKINKTIGVCRYVYNFYISKNKEIYEKEKRFMSGYEFDKWLNNVHIKQQDQWMKDVSTKAVKQSIMNAEKAFQRFFQGKSGFPRYKRKKDQDVNCYFPKNNKTDWTVERHRIKIPTIGWVRLKEYGYIPKNAIVRSGTVSKKAGRYFVSVLCEVEDVKPNVPLQSTGIGIDLGIKAFAVLSDGRVFQNINYTQKIKKLKKKLKREQRSLSRKYENLKKRGEEPAAKRGANIDKNIFRVQKLHARLANIRLEYVKFVANEVAKTKPRYVVIENLNVKGMMKNRHLARSIAEQCFYTFQTWLIHKCKKYGMEVRQVSRFYPSSKMCSRCGHMKKDLQLSDRIYVCDGCGHTMDRDLHAATSLLRATDYIVLT

SEQ ID NO: 62475 - protein, 402 aa, Escherichia sp.
VKRLQAFKFQLRPGGQQEREMRRFAGACRFVFNRALALQNENHEAGNKYIPYGKMASWLVEWKNATETQWLKDSPSQPLQQSLKDLERAYKNFFQKRAAFPRFKKRGQNDAFHYSQGVKLDQENSRIFLPKLGWMRYRNSRQVTGVVKNVTVSQSCGKWYISIQTESEVSTPVHPSASMVGLDAGVAKLATLSDGTVFGSVNSFQKNQKTLARLQRQLSRKVKFSNNWQKQKRKIQQLRSCIANIRRDYLHKVTTTVSKNHAMIVIEDLKVSNMSKSAAGTVSQSGRNVRAKSGLNRSILDQGWYEMRRQLEYKQLWRGGQVLAVPPAYTSQRCACCGHTAKENRLSQSKFRCQVCGYTANADVNGARNILAAGHAVLACGEMVQSGRSLKQEPTEMIQATA

SEQ ID NO: 62476 - protein, 366 aa, Streptomyces sp.
MKLVVQVKLLPTPDQAAALEATLRACNEAASWTSEVAFENDVKNNFALRKLTYDQAKTRWRLGSQAAQHVIKKTCNAYTTLRANLRAGNLGRPGSKRYRKAIEKPIVFRPEGAQPYDDRMLSWQYAERRVSIWTVDGRMKDVRFTASPEQLTTLALYRKGESDLVCWDSVWFLLATCEVPEEPLNMTPVDFLGVDLGIVNIATTSDGEIMAGRELNRVRIRERGLRKKLQKKNTPSAKRRLKKRRRKEARRAKDINHKIAKHVVAEAERTGRGIALEDLTGIRERVRLRKPGGTSHALEAVGEGHSLQLGLCPAGGVHRVQSPPGGGTGGIRRSGVHVPHLRRVRAHRQSEPGLTGLVRVPVVRIR

SEQ ID NO: 62477 - protein, 365 aa, Oscillochloris sp.
MKLIAQVKLTPIAAQADALLRTLEAANAACDAVSELAWNTRTFKKFDLQKLCYLSIRETYGLSSQLAIRVIAKVGDAYKLDTTTVRTFRRHGSIAYDDRILSWALPGHKVSIWTLDGRLSIPFLTGERQLAFLAYQHGESDLVYRKGEWYLLATCDIPEPTEQEVDDVLGVDLGIVNLATDSDGESYTGKDVERKRQWYAGRKKALQAVGTKSAKRRLRQLSGRQRRYQKDVNHGISKNLVAKAERTKRAIGLEELTHIRQRARVTGPTQRARHSNWGFAQLRACIAYKAKMAGVTVRVIDPAYTSQTCHACGHRARANRRSQAEFCCVKCGHRAPADYNAVRNIRERAAVIQPMVSIPTLRRSG

SEQ ID NO: 62478 - protein, 433 aa, Moorea sp.
MIILEFKAKGKKHQYTAIDEAIRTVKFIRNSCLRYWIDNKGVNKFDLNKYSAILAKKFPFANELNSTARQSSAERAWSSIARFFDNCKKKIPGKKGFPRFQKHCRSVEYKQSGWKLSPDKKSIVFSDKKGIGKLKLKGTWDLWRFDKKQIKRVRIIRRADGYYVQFCVSVDVNVREAWPTALELKPTGNTVGLDVGLKDFYTDSDGNTEPNPRFYRTGEKRLKFYQRRVSRKNKGSANRRKAINKLGRTHLKISRQREEHAKKLARCVIQSNDLVAYEDLRVRNMVKNHCLAKSINDAGWYQFRKWLEYFGTKFGRATVAVNPAYTSQNCSECGEVVKKSLSTRTHTCKCGCQLDRDHNAAINILQRALSTVGHTGTWVIDLNALGDLASTLLGSGLVEQVESVNKESPRLMTGECQKDMRSHPLTPPSPNTT

SEQ ID NO: 62479 - protein, 410 aa, Moorea sp.
VRLAYQYRLRPTKNQVTKLEKWLDMLRCQYNYLLADRFDWYEQNRCSNNSCLLICHLPELRNNPDYFSQKKTLPDLKKNRPWYADIHSQVLQDCVKRVDLAFKRFEKGDCNGNRSGKPRFKNKNRYRSFTFPSLSKNPINGNILTLPKFGKVKMIYHRPIPDGFKVKTATITRKADGYYVTLSIQDDSVPDIVPMGSVANPVGIDMGLKSFLVKSDGSEVPIPQYYRKAQKRLNKIQKAVSRSKKGSSNRKKAVIELGKAHKKVADTRKDFHFKTAKKLLDDHDLVAHEKLNIKGLAKTKMAKSVLDAGWGQFLSILSVKAENAGVITKAVNPRNTSQNCSNCEKKVPKKLKDRIHSCPHCGYIADRDVNAAINILKLAVGHPVGNKACRVSEPLGGVGKKPTLNLQRSV

SEQ ID NO: 62480 - protein, 402 aa, unknown
  TnpB Polypeptide
VKRLQAFKFQLRPGGQQECEMRRFAGACRFVFNRALALQNENHEAGNKYIPYGKMASWLVEWKNATETQWLKDAPSQPLQQSLKDLERAYKNFFQKRAAFPRFKKRGQNDAFRYPQGVKLDQENSRIFLPKLGWMRYRNSRQVTGVVKNVTVSQSCGKWYISIQTESEVSTPVHPSASMVGLDAGVAKLATLSDGTVFEPVNSFQKNQKKLARLQRQLSRKVKFSNNWQKQKRKIQRLHSRIANIRRDYLHKVTTTVSKNHAMIVIEDLKVSNMSKSAAGTVSQPGRNVRAKSGLNRSILDQGWYEMRRQLEYKQLWRGGQVLAVPPAYTSQRCTCCGHTAKENRLSQSKFRCQVCGYTANADVNGARNILAAGHAVLACGEMVQSGRPLKQEPTEMIQATA

SEQ ID NO: 62481 - protein, 324 aa, unknown
  TnpB Polypeptide
MERRKYFMRKSKDMPYHIGLKVKLYLSYQQKHIVSVNDGVKRSVYNLLVSASNEKYRLSKTAPYCLADRNRLDYLSSVISTTAGIKNALPYLNEEDVDSLAIDNAVKNYRTAWKNQKERHTGVPAFKKKSYEQSYQTNAHYRKDGLGHEVSNVRFEDARHVILPKLGRVRIGGSPKLIESLINRDADTRIGTITISRDSVGEYWASFQIASEKPFRNKLKKTGSKVGIDLNLLELINDSNGDSAANIRYYKNSMDKLTKAQHKLSRMQEHAKKMDVPCVPQRITRSSGLKWLISIEQYPVRGKTIFTIFPGKKSRVKTSLLRKT

SEQ ID NO: 62482 - protein, 212 aa, Methanotorris sp.
LLFFIYNKKEGNDYYAYLSKVKEKGPYKQTLWFGVDLGVYNLVVIADNKGESLRFDGEIVKGHKRRLKKKEFNKYTKVGNKISNYSRYINHVISKEIVKKAKQYNAGIVLEKLKGLKKSKLNNSTPKNIRRVLHIWSYADLIEKIEYKANLEGVPVVEVSPRNTSKTCSRCGYVNRRLKNERIFICSKCGLEIDRDLNAAINIAKKVASKQV

SEQ ID NO: 62483 - protein, 370 aa, unknown
  TnpB Polypeptide
MQRVVPIKLNEDVDLRATIESFRLVQQRVSDLAFATGSWDSAIALHRVAYPHVRGALKSQLVCTAIRLVASDYARLRRLRKRIHGAIHFSKPRALFLIGKGKRDACPPRKETIRIWTVAGRKDIGFTIPKEFESLLKRVTSYDTLAVSIKRGRLVASLSVTLKAPDRKGSRPAGVSAGLRNDIAAVDASGRALRIVTTAQTVMEETTQKTKKRLERRLAARKADGYETRSVRRALKRLSRRRHLRTRAFCHVAANELIRWLDLDVIVVMEDLRRPPPSRRKSSSSNIPHYYEGLRRRLEEKSEAAAIPVHYVSVTGNARRCSVCGDAGTIGRRVFSCGSCGSSGPLSKNAALNIRNKFTVTRPWAAVNQP

SEQ ID NO: 62484 - protein, 414 aa, unknown
  TnpB Polypeptide
MRLVEQNVIARKDPRFVVIDAAAFASKNLYNAANYEIRQAYIHEGRYLNYNEMQRRMQSHEAYKALPAKVSQQVLMQLHHNWESFFKARAAYEEDSSKFLGRPKLPKYKHKIEGRNILVYTIQAISKRGLKCGLIQPSMLPISFQTKQTNINQVRIVPRNGYYKIEVVYEKEAVQADVNPDLYAGIDIGITNLATITSNKVGFVPRIVNGRSVKSVNQFYNKRKAELQKKLGTAGTTRRIERLTNRRNRRIDQFLHTASWQVIDLLVDEGIGTLIVGKNPGWKQEANLGKRNNQHFVQIPHARFITMLTYKAELVGITVKITEESYTSKASFLDRDALPVYDPQQKEEYAFSGRRVERGLYRASNGRYIHADVNGSLNIIRKVVPDAFERAEGIEDVVVHPVRIARTKPEKRAP

SEQ ID NO: 62485 - protein, 387 aa, unknown
  TnpB Polypeptide
MSKQQKKAYKYRFYPSPEQAGMLTRTFGCCRVVYNWGLRERTDAYYQRGERLYYDDLSARLTQRKSQEGSAWLNEVSSVPLQQTLRHLDRAFLNFFEGRAEYPTFKHKHGPQAATFAASAFTWDGSHLTLAKMSEPLDIHWSRPLPDGCKPRNVTITKDGADHYFVSILLEEEIVALPVLNKQIGLDLGLKSMVITSDGHTYGNPKFFQKDEKKLAKAQRRLASKRKGSKNRDKARRKVAKLHARIADRRRDSQHKLSTQIIRENQVVCVESLQVKNMIKNHSLAKAIADVGWGEFVRQLEYKAAWYGRTLVQIDKFYPSSKRCSHCGHLLDLLALDTRHWECPECHTSHDRDINAAKNVLAAGLAVAAFGEAVRPGRAKARTGSPR

SEQ ID NO: 62486 - protein, 468 aa, Plantactinospora sp.
VLVVQLRYNFRVYPTPGQQIELAKAFGCARVVFNDGLRLRQQAREAGEKYISDGELSRRLITEAKQTPERAWLVEVSAVVLQQALTDLNTGYRNFFASVTGKRKGRKVAPPRFRSRKDNRQAIRFTKNSRFKVCDNGRLRLPKIGDLAVRWSRTLPSDPSSVAITKDAAGRYFASFVVRTTEGEAPPPVEPEVGIDLGLTNFAVLSDGTKVAAPKFLRRAARKLKRLQQALSRKRKGSANGKKAVMKVARAHARVADTRRDWQHKLSTAIIRENQAVYVEDLAVAGLGRTRLAKSVHDAGWAGFTAMLEYKAQRYARTFGRVDRFFPSTRLCSACGRVNDKMALNVRSWDCPCGATHDRDGNAAINILAAGQADRLNDRGAQVRPGLVPAPRSEAVTHPDAARSTRSVEGTSVLQGRGDVNGRPRWPPPARPAPRPAGSPGPAIGAVTPERRPDRSPVRRPDGSARPA

SEQ ID NO: 62487 - protein, 383 aa, Plantactinospora sp.
VKLVVQVKLLPTPEQASALAATLAACNTAATEVAALARQLGCYRNYDLRQHTYHRIKIDHRLGAQAAQHVIKKVADAYATLKANIRAGNLGRPGSRRRRRAETGPVRFRSDAAQPYDARMLSWQADARTLSIWTVAGRLKGVAYTGSADQLRAVATHPVGESDLVHRDGKWYLYATIDLPEPDTYEPDGFLGVDMGIVNIAHDSDGTRHAGAALNGYRRRQQRLRRRLQAKGTTSARRLLARRRKKEARHAANVNHAIAKTIVTEAARTGRGIAVEQLTGIRDRVRLRKPQRVTLSSWSFHQLGAYLAYKAQRAGVPLVEVDPRYTSQTCHACGHRDKRNRPAQETFHCRSCGVVAHADHNAARNIAARGVAGWAAVNLPHAA

SEQ ID NO: 62488 - protein, 385 aa, Plantactinospora sp.
LGDVKVTVQVRLFPDATQEAALRATLDLCNEAANWTSSEAYRTRTFAKQAVQRLTYGRLKTMGLSAQPAIHVARKVAGAYATLKANIRAGNLGKPGSNRRTKAESKPIAFRRDAAQPFDDRCLSWQIADRTVSIWTVGGRLNKVRFACSDSQHATLATYRAGESDLVHRDGKWYLYATCDLPDVETKEPGGFLGVDLGIANIATTSDGARYCGKGLYRVRHRNQRLRTKLQKIATKSAKRLLRKRSRKESRFAADTNHVISKRIVTEAERTGRGIALEDLGGIRDRVRLRRPQRVTLHSWSFHQLGRFVAYKAARAGVAVAHIDPAYTSQACSTCGHIARANRPNQSTFRCTSCGFAEHADVNAARNIAARGVEGWAAVSLPNAA

SEQ ID NO: 62489 - protein, 499 aa, Okeania sp.
MNFCSDNVTEVCPEIMAALIAANEGCAMPYGADEYTQRLEAKFSKLFEAPVTIFPVATGSAANALALSAIAPPYGAIYCHAESHINVDECGAPEFYTGGAKLVTLSGTDAQINPSDLATALEKAGIGIVHHVQPAAVSITQATEAGTVYLPEDIAEIAKLTHDLNLYLHMDGARFANAVASLGCAPADITWRAGVDVLCFGATKNGAMAAEAVVFFNQELAKTFGYRRKRSGHLFSKMRYLSAQLEAYITDDVWLKNASNANQMATKLAQGLVNCPVARLCHPVEANEIFVEIPESVVTGLRADGFEFYVWQEGTLPIIRLVTTSTGKLIKSPKFLLSQLRELKLLQRRLKNKERGSNNWLKLQNKIARLHEKIANARRDWHFKLAHQLCDGTDNIFVEDINFKSWSRGIVRKQSLDSGIGQFINEILPYICWKKGKYFAKVDKNYTSQECPKCGHRQKKKLSDRKHICSSCGYQVNRDVAAAKVIRNRGLIAVGHAVQ

SEQ ID NO: 62490 - protein, 303 aa, Aphanothece sp.
MFGQHLNCAKLQKHMAKLRNKNKFWQLVGSQAVQDICQRIDKVYQLFFKHNKKGVRPPGFKKVKKYKSFTLKQARYKFLSSNRVKIGTRVYQFWKSRNLEGKIKTLTIKRTPLGELFMVVVVDHVDESEIKSTTGKIAGFDFGLKTFLTCSDGTKIESPQFFKQSLKAIKKASSQHSKKLKSSSNRERARKNLVRKHEDISHCRRDWFWKLAHELTDKFDVLCFETLNLKGMQRLWGRKISDLAFGEFLQILEWVAKKKNKLVIFIDQWYPSSKTCHRCGHVLETLELSASRVALSILSIGQW

SEQ ID NO: 62491 - protein, 317 aa, unknown
  TnpB Polypeptide
MPNARVCANRKTAKLRGDKVKKFAPTSATYDTRSFSFTEKDWTVTLSTLKRRERFRLHIGNYQRGLLKGQNPKSATLVKRQDGAYYLQIQLESEPPEIVETSTVLGVDLGRTDVAVTSSGEKFSGKQITKVRDRFSRVRASLQTKASKGTRSTRRRARRVLQRSRFRSRRFQTNINHTVSYRIIQQAKANIQAIALEDLTGIRERTNQLPRSKTERRRSNSWAFFQLRMFILYKGIKYGVAVHLVDPRYTSKSCHSCNVLGNRQGKKFSCLNLACGWVGDADENGASNISALGALINCPGGSSTMFCSLQDVVLSLC

SEQ ID NO: 62492 - protein, 449 aa, Acidithiobacillus sp.
MLAILVNMDELPTTQSLTCKLKLLLTEDQTKAVRRTALAYRNALNHASAVAFANGKMSQGMRLQTLVYQELRERFGLPSQMACNAPRQVAAAYKTLWERAKSNAAHKAKGWTKRRYKGFDQAPKFTAMTVTLNHRRDWALGKEQSVSIGTLSGRIRCRYEGWNRHLDWLEHTADRGITLGAAKLWQDPASKVWYLLVSIEKALDPKATERITTIKGVDLNRRNIAVESNTRGRCRFYHGGHQKHLAERAASTRSALQVKGTRGAKAVLRKLALRERRLNADTAHCVSKSIAEPHAMVGLEWLKDIRNRTERRHSKKASVKRRKANRKVSSWSFADVQAKTAYKTRLSGGVPIWVDADYTSQGCPICGHAGRENRLNNGLLFVCARCGHTLHADLVAARNISMRTLLVRQDWVRTGRLSAVPEASGDEAKAVRLSRYAELRWSLDASSVL

SEQ ID NO: 62493 - protein, 242 aa, unknown
  TnpB Polypeptide
MYKRDERLRHLYITAIRFLADELYRRGVRKLYIGYPYMLSQDNGHEYNTNIWWFRKIVLWIVDVFIEYGIEVELVPEDYTSQRCSICGAKHKDGRVYRGLYICRKTGKKINVDINATLNIARRLGHEIRITRKIESYLVTHSGVKPLIPHQRANTRDPSIETSPLKGGEGVIIAAFVAAVVLTVVVEYYLYGAVSSVFDTYLDAVSQFNKFVLTIAILIIAFPLLLLLEAWDRFKLWVHKVW

SEQ ID NO: 62494 - protein, 259 aa, unknown
  TnpB Polypeptide
LQTASTRLERFFKGLARFPKEKKPHKYYSLVYPQGGWKILEVREIRTKSRKNKKKLAVLRLSNLGVFKVIIHRDFPINRVSRVVVKLAKSERVYISFIVEGYVFPQLPKTGRVVAIDVGIEKLLTTSDGQYFPNLKPYEKALKKLKRLHRALSRKKFLSKNWFKAKLRLARAYEHLGNFRKDLYMKLGRYFAEHYDEVIMEDINVKQLIGKSVRKLRMRLQDVAFYTLKEIVKYQMEKHGKKLTLVNPALNSKKCAKCG

SEQ ID NO: 62495 - protein, 215 aa, unknown
  TnpB Polypeptide
LARGFKPTSHAKIKLDRKNRRAIFHLSLEKEVEIYKPEKAVKPVDVNENSVTTLYGAFSVILETDLAETTLGYSYRKKSIQRRNRSGSREARKAMEKLREGKKKKDYRMKKANLIVRDAMRTRGVIVIERISGEDIRVMIARYRNKQLKHRRYQSALKGELNTLIDKAREYGVPVLMVDPKNTSKICPIHKAVIGYGEDRIGIYSKGGERWHRGV

SEQ ID NO: 62496 - protein, 404 aa, unknown
  TnpB Polypeptide
MVSGDEGLLTLSIGMVVSPEPGAIELLRRYNTALNYAINKILRLDLKKIGEIHNALYRELKEWFGLPPRTAIDCYRDALANANAWRNNPKKGRKPRVRKLSMWLYPGQSYWIRDGYVEIAGGIKLSIIGWDRRYDHYENGEARLVYRGDRMMLWISKKVPKPQPYKPRDVIAIDVNEKKIVYGDHVINEEKDTKIDTAHRWKKLAEDLQKRYSSTRYPAWRRRRGILNRIRSYHRKARNILEDWAKKTSLKIVRLAKELGYAVAREDLTGLINSLRKIENKDHRTRLIIMGYKRLGKWIDWNAKKQGVPLAIINPNGTSSKCPKCDSKKLEETGYRRLRCSRCGFEADRDVVGKLNIRKRALKTLGISGGSLTTPTAPQMTDVNPNRWGEPMIRLKGMTIKMMT

SEQ ID NO: 62497 - protein, 285 aa, Moorea sp.
MLLTYCYRIKPNDEQIAIMERWLELLRRHWNYALGQRLDWLNRTRCPIDRCSIVREAIGEVPEPVNYYTQQSALKETKKLFPEYKLIYAETQQVNLQRLNIAWERWRKPDATGKRGGRPRFKKQGQLRSFIFPRVNNSRAGAHIKHGVLKLSRIGEISVVMHRPLPSGFTLKQCTIVKKADGWYCCISMKDDTIPEFIAVESVKSAVGIDVGLEKFLTTSDGEAVGIPQFYRKASNRLASAQRVMSRRVKGSKNWQKAKQKVALLHLHLTRCRKEFHASCRPLAM

SEQ ID NO: 62498 - protein, 338 aa, Nanohaloarchaea sp.
MARKTVVCRFQKPNKKKLEAVEREYRNTQKYLQGEDDVDLYSATKQQMDRRAGNEDNEQPLFIRNDSFEVVERDTDLTKYWVRVPVASVYGGVWIPIQPHTDIQSGWDIGDSMIVRKDHGFELHLVVKKEVEEQEEYDGALGVDLGLRKLATATECFCGSDTSSKTLCLGSSVENYFDKYFHLRRNCRDGYVRKRWDGKVADKTEDLCHQISRKIVDHAQENNLFIAVGDLEGIQDKDRGKRMNRKLHHFPHWKLRNYIRYKADWEGIRVVEVDEAYTSQTCSRCGEKGERNKGNFQCPECDYETDADKNASHNIGERGIGKLNASSDSEGCVTQPLV

SEQ ID NO: 62499 - protein, 220 aa, unknown
  TnpB Polypeptide
MRSLTSIEIAIRRGWVANELEPHKQCWRYVNSGWKLASEARVKLDKRGRRLITYLVFKKNVEVHESRSFISVDVNENHVAILVDDKVLFFETGFKDIVLGYYYRRRRVQERYDKLYGVNCRVERKTLRKLKERRKSDLKWKLANIVVRVAREKQHAVVLEEPAKEMINRVGDDQLRHRVHQASFKGVQRAIEEKPREYSAPVVYVNPRNTLGCDQYTMLK

SEQ ID NO: 62500 - protein, 406 aa, unknown
  TnpB Polypeptide
MYQKKLLNEWIKTSNYVYNKTIACINNGDKVNFINLRDKCVTSRTKKTSTNYTILTEKIKILNKQIKEQKNEEQLKNLNEELIIETNKRKAIKFEKNMHILEWESNTPKAVRDGAVRDVCKANDVGWSNLKAGNINHFKLGFRKIIKNTSFVLPHSLIKNKSGSLSIAPEYFKDECTFKMGKKTLKKYRDIEINNDCRIIYQRNKYWIAIPIPTVLKPKLKCVNYCGIDPGIRTFLTSFGNNGVVEYTQNKELLKRLNKKIDLLNSQRTKKRNKYKVEARKENVINEIHWKSINDILKRNDYVFYGDIKSHGIVKKSRNKFLNRDFNDLKFYKFKERLMYKANVLNKRVFNVNEMYTTMTCSSCGHLNDVGKKEIYKCETIRCNKTLLRDVSAAKNILMKGIIKFL

SEQ ID NO: 62501 - protein, 210 aa, Lactobacillus sp.
LPSNHRVCGVDANIGKFVYNDDNQTKAVRVLTDQLTNLYTRITLYQQRLARKRNENPKNFRSNNYRAMITKLQHSYQKVARIQNDLMQKFTTQLVQDNGTIAIEDLDVQHMKMNKHLAKNLHRSQFGCFKQLLKYKAEWYGRELVMVDRYYPSTQRCSQCGEVKVGAEKLTLAGNALHHTKHHEYHCYACGARLERDVNAVQNLIQYAKG

SEQ ID NO: 62502 - protein, 422 aa, unknown
  TnpB Polypeptide
MIVLETKLKGTEEQYGRLDEAIRTAQFVRNSCIRYWMDNRGVGKGDLSKLCAQLAAEFEWAKKLNSMARQASAERAWQSIYRFYSNCKKKKSGKKGYPRFKKNTRSVEYKISGWKLSDDRKSISFTDGFEAGKFEMWGTRDLNFYQISQIKRIRVVKRANGYYAQFCVDVEREIKHEYTGKIVGIDLGLEHFYTDSDGQTVANPRRLRKSEKRLKRLQRRVSRRKKGNANRKKAINKMARQHLKVSRQRKDFAVKTAGALVASNDLIVYEDLQVRNMVKNHKLAKSISDASWSMFIGWVEYFAKLHKIVTVAVSPQYTSQDCVGCGNRVKKTLSTRTHQCLKCGLKLHRDHNSAKVILVKGLETLGVKQSTDGQSGTYTPGDENHLWSIEGNFGWVSGLVEPGTHRGDSMESPTIIKSALRE

SEQ ID NO: 62503 - protein, 240 aa, Staphylococcus sp.
MSVPHIENERIKSVTIKQKPSGKYMMSVLVTSENQTLPKTHQTVGIDLGVSDFAITSDGHKYRSQRLHLKYQKQLHVWEKRMARRRLRAKAEDKSLSESKNYQKARQQVARIHEKIAHTRKDYIHKITTDLVKNYDVIVIEDLKTSNLLKNHHLARIIASQSWHQFKIILKYKCERYGKQLHCVNPYKTSQFCSNCGHDSGKKTLDIRHWRCSSCHTLHDRDINAAKNIRNVGLGQALVK

SEQ ID NO: 62504 - protein, 414 aa, Oscillatoriales sp.
MVLATAIKVIVLKALKVRIYPSTEQQSHLAQAFGCVRWVWNQSLATMSQTYKETGKGVSALTMKKQIPIWKTEHEWLKECYSQCLQSSVLNLSQAFINFFDGRAAYPTFKKRQGRQSMQYPQHVKILSKSEIKFPGNLGVVKVKIHRDIVGTLKTVTVSKMPDDRYYASLLMDDGTELTATNTEGKAIGLDLGLIDFCVTSEGSKYQNPRHLKKHERNLKRKQRKLSRKKDKTTVKRRKAKCAVAKVHAKIARVREDFRHKLSRKIVNENQVIVVENLAVKNMVKNHNLAKSISDAGWGMFCTMLKYKAEAEGKVYLEVGRFFPSSHLCSNTLLPLPHMDLSMREFDCPHCGNRHDRDTNAAINIRNEGLRILALGTSVTALGGNVRPKQYGRKSTAVEAVALELGSPHSTRSG

SEQ ID NO: 62505 - protein, 521 aa, unknown
  TnpB Polypeptide
VDPHCNAGKLVQLQAMQDEWQRLLPLVGEHCWSQFLRGERPTASLSSAVGPASVFGATPLVTSMKQCMAVAVEGQLKSWKSNFQRRITRLIMRSRRYATQPEVRHQILWLNSLYLWAVPLAEQQALLAVSPSKTKVTQIAPRSSQVLRRYLRAYLHRFRAPCFENLPMQVNQMSSVWSAANTTTHPGAKYWLRISTLERGQRITLPIRGNSYADKVPGVQALTFSLMQRKGRWYIKVCKKIPRPDARPASGPVLGIDSGMVNLLATSQGAIFGKGFNLHLRRWDDRLQHLTKSLQQAGIVRLSETRRYRDFVHRMRAWITSEIRRAVNRALALGQPSTVVIEALNFSSQPGRLSKKMNRLVRRMGTGVIKHSLTMKSEEQGFRLVQVNPAYTSQECHACGFISRANRKKNLFRCVCCGKQAHADAQAARNLVKRFHAGRVDEYVKHTTVGMRSLEIWGGVMLSRLTRSIPGTSSYQGAFGCVQAGLRVLKGKGDALPVIQQLQRLLNGVSSTSTPCPLGME

SEQ ID NO: 62506 - protein, 284 aa, Lactobacillus sp.
LPIKKYWQYTQSARILQLAISDLGKAWKNFFDKTQPSWGKPKFRSKREARQGFKSDRSKIKDGILYLEQARGSSVPKDQWRGFKLSEKPLSDEFGTVSYFKEKGRYYVAIPYKIKAEDVKLPDKTGKATAVDVNVGHFDYTGGRVNVLPKKLDRIYKKIKHYQRKLAKKQVENGEVACKIENYLKTKAKLQACYRKASNIQNDLIHKFTTELVNDYDKIVIENLSVKGMLMSHVASKGVHRSMFGKFKQILTYKCDWYGKELILANKLYPSTQRCAACGNVKKR

SEQ ID NO: 62507 - protein, 352 aa, Rhizobium sp.
MPTSWPGAQDIPRAPQEGRERRLPLSGAGDEVKRLNGKWSAARLPKIGWVKFRDTRRRRGKTMNVTVSLAANGWHIAFACEIDHAVPQNDLPAVGIDRGVANTLTLSTGEHWWMPAGLAEIERRKRRAQRVLARRKRGSRRHAKARRRVAALQARAARIRQDWRHKASLDIARRFATVVLEDLATRNMTRSARGTVDAPATNVCQKAGLNRAILEQGWHGFETVLAYKLEERGGYLCKVDPRHTSQTCSACAAVDRESRESQASFRCCQCGLRAHADHNAAINILRRNTASMIVEEGQPLSVEAITIAELRAPSEIPRLQAGEDVNVFLQAGMPIHISRRFGINRSQPVSVL

SEQ ID NO: 62508 - protein, 408 aa, unknown
  TnpB Polypeptide
MSVRSPVFFLDGQLLPEVKFLMEDFRLATNGAIRAGLQTGVTSRNGLCKLAYKDFRKEHPNMYAQHLVSAFGVAAGVLKNHRRRLRTRRTVRTPYVRRLMMKAENQAYRLDRKEGVVDLPVRAGLHIKLKLVVSQYHRRYLDDEAFSLGSLTLLPDRLVIAFRITPPKPYTPKSVLSLDTNERSLDGVFIREGSSNAVRAEFPDVAIIQQRHHDRRKKLQKKKAHDRRTARALCKREGKREHHRVEYRLHQVANTILSFAKSHESAIVLEDLRGIRHKKNKDMNRRLSMWPRRELHRIIEYKAEDDGIPIIQVDPRYSSRKCPVCGITQHSRMGTEFVCECGWHMDRHINASINLLQTAVSKGLEVAGGLRFDPGAFRHDAMMILYEPAMAARSEPNGMSGELDVVVP

SEQ ID NO: 62509 - protein, 566 aa, Desulfofundulus sp.
MKKPKKKRTNPVEGIKYTVCGEFFPELYPSRRNEKWAKGMEDPLATEMRLFCACTRWAFNRLLAGDSREALKKQGQGLFGLNSRYCDDAILKAREIIGSQQELLAREIEETQTKLARAKRKLDRAEKDLAKAVKAGDATKIAKAKHTVHGRKARVKKLAGKLEELQTHRDNGTIPKVVFGGRALWKRVCKGKATREEWKNARQNRLYARGDETKGGNPNIKISYRNGKFTLTVTVSHLSEQTGVDRLGRPVMTRAPLVTGKMWLPEKHRLKTWELLLSGAPYTVELIRDNGGRYRTHITFTVAVPETVTSPNRGYLGMDTNPDGVALASVSYTGQPEPWPEGFTVPYPKALHKFAGEFQVTVHPNGFLYIKIPELAYSRGYRRTYLIGVLAKVAVDIARALGKPIALENLDFGKDRLDTNKRFNRMASNFPFKKISEAITRKAVKEGVSVRPVWPAHTSTIGYYKYKQRYGVTIHHAAALPIARRAMGFKERITKEIKQKIQAIREKLNHKANSLPGEGKGMTRKVKRLFKQLDGKIPLHNGLTRFQQESFYSAWHDLKQLALSSR

SEQ ID NO: 62510 - protein, 316 aa, Bacillus sp.
MKRAYLIEIKPTTEQISKIRQTIGVCRYVYNLYISKNKEAYESEGKFLSGYDFSKWLNNIYTKECDQWIKEVSSKAVKQAIMNGDKAFKRFFKGLSKFPRYKKKKKQDVKCYFPKNNKTDWTVERHRVKIPTIGWTRLKEYGYIPKNATVKSGTVYQRAGRYYVSILCEVKEVKPNSILNAVGIGIDLGIKDFAVRSDGKTHKNINKTVQVKKIEKRLKREQRSLSRKFENIRKRGEQPVTNKRANINKNILRVQKLHARLANIRLAYVKSIVNDVVKTKPTFITVEDLNVKGMMKRVICASGYKNLFVCEGTTRI

SEQ ID NO: 62511 - protein, 397 aa, unknown
  TnpB Polypeptide
MPLSPPVLTLLTDFRLMVNRGVREALEKGLTAKSSLDKFSQGLARELRVHGAHARTAMATALSLDAGHRRRLRKGTRAHIPYVRTPFLVADDATFHLNTETGHLRLSLRNSEWAGLDLRLSDWHRSVLATRRIKQLRLNAHRAVLVLEADAPEPYDPRAVLALDTNERSLDGILLEPETVAPVVVPFPDVATIQHRHFARRRKLGRKKAHDRRVGRKLLRREGRRERRRIVQRLHLLTKMLVAEAKARRAALALEDLHLPPGGGRGPRMRRRLSSWPRRELHRQLEYKAEEQGVPVIKVNPRNTSKTCPKCGEVKERRSRIGRVFVCASCGWRCDRQLNAGLNICRTVLREAPKGPSNSGLGGLWLDPDALPKDAMRLLYSPGRAGAHGRSGREGRI

SEQ ID NO: 62512 - protein, 372 aa, Lachnoclostridium sp.
MPKNNTAYKFRIYPNEEQKIMIGKTFGCCRFIYNSMLADKIEEYKKNNRMLKITPAGYKKANPWLKEVDSLALCNEGLHLGIAFKNFFDRKDMGFPSFKSKHRSRQSYTTNMVNNNIKLNGNRLTLPKIKNIRIVIHRELPSDGYRLKSVTVSRESSGDYYASILYEYESCENQAEHIDAEHADVLGIDYAMHGLAVLSDGTECDYPGFYRQQEARLKREQRRLSHCVKGSKNYKKQKIRVARCHRRIKNQRKDYLHKLSRKIADTYDAVAVEDIDMKAMSQCLNFGKSVMDNGYGMFCAMLKYKMERQNKRLIVIDRFFPSSKKCSCCGSIKSNLLLSDRVYECECGNRMNRDYNAALNIRDEGKRIIACA

SEQ ID NO: 62513 - protein, 363 aa, Acidithrix sp.
VSGDIRLVAEKGSKCATVHVVYGIKAPEKATGPIDAIDWGVTEVCTDSKGHKHGISLGEILEEFSEKNNATGKVRGKAHAKTRSLRKVNTKSKKAPRIARNNLGHKKQARRRERAQASVRTLSGQATKEVIYGKGNRTRARGKVPQDPTQRPRLLATEDLSHLRGKAKSKKMSRICSTWMRSENEGRMVVHTSIGGVDAKTVNAAYTSQMCPEPTWGYVSSDNRQGDKFHWRNSYWDCNRQGDADHVAATNLKSRLTDRQISVFTAYTEVKVIQNERFRSRKESRVGARIVLQGITDNGVQGACVEDGATAHGRTPSKPRRRKPVVEGGNVFDATDSQSPEHTVCTGETQRLESENKRIPRNA

SEQ ID NO: 62514 - protein, 353 aa, Halomonas sp.
MKQTKTLKVRVKDKHVAQLNRMARSVNYVWNYVNELSSRAIRERRLFLSAYDLHPYTKGAGKELGLHSQTLQCIAAEYATRRKQFRKTRLGWRKSHGLRRSLGWIPVNTGAARWKDGQVFHNGSYFKVWDSFGLSQYTFRSASFNEDARGRWYFNVVVDADVQPSLGQGAVGVDLGLKNVATCSDGETLENGRFYRGMEDKLAMAQRSRNRKRTRAIHAKIKNRRKDALHKFSRRLVSQYGEVIVGDVSSQKLTKTKMAKSVLDAGWGQLKTMLAYKCAHAGIVFKEVRESYTTRTCSTCGSLSGPQGVNGLRMRGWECVACGVTHDRDVNAARNILNLAAGHRRPAVGIPGF

SEQ ID NO: 62515 - protein, 212 aa, unknown
  TnpB Polypeptide
MSMPSNIDYSKVKEFTILPKNGAFYLEMSYEVEKQKHELDINQALSIDLGTSDNLAACVDTFGNSLLIDARAMKAMNQLWNKKVSTRKEGKPEAYWDNWLDRVTRKRNHQMRDGINKAAKLIIDHCLKYGIGILVIGWNEGFKSNANMGRLNNQNFVQMPLGKLKNRLKQLCDLHGIRFQETEESYTSKASFLDGDSLPKYGQKPEGWKALL

SEQ ID NO: 62516 - protein, 441 aa, unknown
  TnpB Polypeptide
MPVRRVTFRLYPNKKQSSALRYHRKLHKDLYNAAVCNRFTQYQKFNHRVDYFEQQNSLPAFKEVWVEYKECNCMTLQATLKRVDYAFNRWFKGLAKRPKYKSSRHYSGWTYPSKTGWKVHTTGDNGYLNLAKIGSIQMRGKARIWGTPTTCTIVYRNGKWYASITVNLTELQAATRQTDFGAVGIDFGCKSALAITDGKNHSFVEAPKFLRKAEAKIKHLSKGKRRKTAPNRKKKQKGSRRWKKTQTKISKVTRKVANQRQNWVHQVATDIVRCNSFVATEKLEVSKMTRKAKKGKRKKQKSMLNKSILDVGMGMLRSAIEYKVKDAGGVFIEVPTRKVKPSQTCPNCGNQQKKTLDERVHHCHKCGFTMDRDLAAALVMLLWALGILPGFGTSLVDADASSSTSETRSSQQTGSMKQLGQMKRQKHSPAGLVVETQTSTK

SEQ ID NO: 62517 - protein, 395 aa, Lactobacillus sp.
TLLIKTHKIKLYPNSTMRKELDKLFDYRRFVWNQALEIWNDMYDASLVMMDKSIRPNERKVRDELVANKADWQFERSARVLQLAVNDLSKAWANYFNPKMPNHDKPRWKSKKRSRKTFKTDRAQIVNGKLRLDQPRGTKLWYDIKLAELPRWRGDIKQVCIVQDADGYYASLSIEAAVLAEKRPIRRVTGVDVNVGKFDYRTASGYAIQPTIPASLAALYARITHYQKQLARKRTTNPKRFNSATYRATRTKLKRNYQRVERIQMDLLNKFTTKLIVDNDLIGIEDLDNQHMRMNRRLAKNLHRSMFGKFKIMMQYKADWNGSTLILADPMFPSTQRCSKCGYIKTGEEKLTLHGNAKYHTGHDDYICYQCGARMRRDENAVDNLIDYAKSKVQG

SEQ ID NO: 62518 - protein, 329 aa, unknown
  TnpB Polypeptide
VGRARLPRFKRKNLTPDNKALLTGRIRVFPRHIQLPRIGKVRSKEPTEKLLRFLEEGKARVLSATVSREADRWYVSLTCEVERPEPEKREVKEAGDVVGIDLGLSSFAVLSDGTRIEAPKPLAKKLRLLKRKSRQLSRKEKGSNNQRKAALRLARLHRRIKNLRQDFLHKLTTWLAKTKPVLVVEDLNVKGLSRGWLSRSVADVGWGAFRRMLAYKAGWYGATIIAPPGSFPSTRLCSRCGHLHGKVPLSERVFRCEACGLEMDRDLNAALNLRAYGLAHLTGPTGSSPGRAAFGGGDSSGGGTAPLSRSTSHGSLKQEVTGRLRHSPG

SEQ ID NO: 62519 - protein, 375 aa, unknown
  TnpB Polypeptide
MLQTLFVKLLPDETQADALLQTMEKFNAACNHIATVAFELKTANKIRLQKIVYREIRERFGLSSQMAVRAIAKTCEAYKRDRAILPTFRPHGSIPYDQRILSWKGPDRVSLLTVSGRVVVPFVMGAYQAERFHDLRGQAKLVYRDGKFFLAVIVDLPETPLGTTEDFIGVDLGIVNILADSDGETYSGRRVNMLRDRHARLRAKLQQKGTKSAKRLLKKRRTAESRFGRDVNHCRSKRLVAKAKDTSRGIAMEDLQGIRQRTTVRKAQRRVHHSWSFNQIRMFVTYKALLAGVEVVLVDPRNTSRTCPGCGCVDKRNRPSRDRFLCVSCGLAGPADSIASENIRRAAVNRPNAAGTNQSCRPPICKLAPFMGLVV

SEQ ID NO: 62520 - protein, 375 aa, unknown; identical to SEQ ID NO: 62519
  TnpB Polypeptide

SEQ ID NO: 62521 - protein, 367 aa, unknown
  TnpB Polypeptide
MRTYKYQIRETPKNKRIGNLLDDMWQVHEYFHKWQRQRYKDGLSYANYNAMSAHLTAIKKITYPHWQALPSQAIQSELKRIDAAYQQFFKKLGGRPNIKKRHKFKSITFPGHAGWKLKENRLILSFRKWDSGTSKWKFDKVPYTFHKHRGFKRTIRCITIKRDTVGTYWLYVITDASTTDPYSPTGESVGIDFGLETYLTLSNGEKIQSPHYLKQSLKTLRILHKSLSRKVRGSNNWWRCVRQLARVYRHIANQRKDWHWKLVTDLCRRFDTLAVELLNLEGMKRLWGRQVSDLSFGQFVEILKFKCIKHHREFCQVGQWTPTTKPCSDCGSPNHTLSLSDRQWICPECGSHHDRDVNAARNILRAA

SEQ ID NO: 62522 - protein, 555 aa, Burkholderiales sp.
LLNVLADNRNRCATTATRKVAGRPQGVTPQLFGNARVLLLANHATGHALETVDQYRHRNLGRIAHQQVHMVVLPVELNQFRFKVKADPGEDRAQVINHLFGEDTTAVFGHEDQMNMHKENTVSSVANFVVISHRPKYNLAMQRLQAFKFELMPNGEQQRDMRRFSGACRFVYNKALALQKTNYEAGGKFVGYVALAKSLTDWRNGTETPWLKDAPCHPLQHALKDLERAYKNFFAKRADFPRFKRKGSGESFRYPDAKQFEIDQANSRIKLPKLGWVRYRNSRDVLGQAKNITISQSGGKWYASIQTEREVPQPVPTATTAIGIDVGIARFATMNDGSFIAPLNSFKKHQQRLARYQRRMSRKVKFSNNWKKEKTKVQKVHTCIANARKDFLHKTTTTISQNHALVCIEDLQVRNMSRSSKGNSEQHGKRVKQKAGLNRSILDQGWGEFRRQLEYKMAWNGGILLSVPAHHTSQTCPCCRHVAKENRLKQAEFFCVDCGYTENADVVGAINVLERGQRLLACGEDGSGRDRKTPTKPASAKQEPTEATMHEVSHA

SEQ ID NO: 62523 - protein, 348 aa, unknown
  TnpB Polypeptide
MKFNKSTADKKAVSFYSHHLNKEKLNTITEFAEKIRILQNHISYIYFDEYFNKQTIKCTDFIKLMNKRYRDKDFSSIFFQQICKQVYESYNKKKPPKEQVIFKKLSFIGVNQHHTIFIEESNNKYTNGIINLNIPHFGIVEIPFRYSKKYHGNLSDIHYSMTSTNKNQYQKQYTCTVEKDRLKIVIVEDDNRVYPISIGNHIEGIDVNIKHNLMQCSDGYVIDYDREMVKSILKRKKKQDRITSTKKTRNLSTEYTYKQLKQNQKDKRRSISMVEQCLVELFKHCNYNGIDHLVFEDLNVFTRKYKVNNKEFNVNIRRLMSILHIVDIKNMAERIGKKYGITISLTNA

SEQ ID NO: 62524 - protein, 424 aa, unknown
  TnpB Polypeptide
MIGDIWGAIEWKRVLKTKSLGDTSISPMKQFRLFPHLPVTRQFKHAIRDGYIPSWEYAAHWVDSAERAAFAIVKSWKKNYNNGERSRKCPSVRRLFAQTKQSLCKLEDDKLRITVKPHEFVFIDLSKRYFKLPAEMSPFGIGEPIITPDKIHLPLYTHDEKVGSTPDLMAWDSNFDSFDGFSPETGWTKIDTKVLSLVHYNSSSKLGSIKSRFGRSIKGRRLQKKYRNREINRAKRHQIEIARVLRHSSDRIVMEALRKRKMLKGRAFNYRLSKTDWRGIATLAGERVEEVPPHWTSKNCSRCGWTNKDLYGAKVFECKQCGLRIDRQLNACIGIYERAEGVPYEMRWWDAKVLPSIIGGYFQSGAESKVADELVRSLYETVKPQVEFGYDRYADAYLPRSGWTETRVRAASSPLSSGFPTNGM

SEQ ID NO: 62525 - protein, 363 aa, Caulobacteraceae sp.
MEMIKTFKVKHGVNFDSSLFEKAVKVAQFALENGLVSTKVVKHIGLKSEIANQIVRKYGLNKKIKSINPKRVKLTVPGQNLKFDLETRKIRIPSLNAEFRCWFPSGWTKLNQVEIDQKWAYVSVTFPDQQADEPKSFIGIDLNSTSHSIVVANPLTGKVQKFGKQIPFLKKKYKNIRQNLQEKKQWSQLKKIKDRERRKTTDAIHKITTKIVKEAKKSGVGIKLEDLSGIRKDCTKKYRKQGNHTLNSWPFYQVRMLLTYKAKEQGVELNVVDPAWTSTSCSRCGVVDKESRNGKVFHCLHCEHIDHADVNAAFNIALRPKIDPVKKEIRRKGRRMTQSSELKSLKGKVDEGKTTLEPYGLVP

SEQ ID NO: 62526 - protein, 576 aa, unknown
  TnpB Polypeptide
LPDLLQADALRLLDASRQVINAAVVALWDRLDEFGERETKYAYKQVTAMIGSSDPHGDRQWRCEAEQAGRILRGQAERKKQFAFILPLLEAGMIQPQTEKKPAGKNRKAIKAALACLREEHSDGGSAVELQSLIEQACNFYLKHGCFPATYEEMQPIPVLKVGILPYAGDDGGEHGQAYRLRIDPIRHCCYFAFRAPDQAGQWNPTWTEPVTQLSLPDPVLEHLQAGESLAPTLREIALPDGTRYAVLDFIVEVPVSPLPDPQQVRRILGWDWGVRTLVTATVVDLSGNRLSPPLFLDTGGFDGRQAHTRRHIDGLKKKVAKLEARRDQFPVGDPKREPSERKLVVLRQEIAQCWRKYEARNNDLAHLAANILILLASVWGAELIAGESLKSLKSEGRGRGVQGRWVHWRNNSQIRGALWRTLRYKCHLSGLRLVWQHPRGTTHTCPKCGLPAHTYASPALDAKELDAGPWLRCFACGWNGARDYAAAINIALLGVASLLQELEYQEQQKPRTRPTMKTKSLNSESYIGSGLALRLPPTSPRGRLMHSGKRYVNGWIKSVTLHSALPPDTMLRLCG

SEQ ID NO: 62527 - protein, 387 aa, unknown
  TnpB Polypeptide
MNGLFDRQHALRNTKIMRKTFKYRLYPTKEQRRLLEQQLEECRWLYNRLLEERKTAWEQRQESVRLYDQHALLPLLKSERPTLARVPSQGLQNVAVRIDLAFKAFFRRVKAGEAPGYPRFRGQGRYDSLTFPQVPVGCHLDAEARRLRVMNVGLVKVVLHRPLEGTPKTATIQRSSTGKWHVCFSCECAEPSPLPATGREVGLDVGLKTFAMPTEGEPIENLRFFRRDERALAGAQRRLSKVEKGTPERAKRRRVVARVHERIAWRRGDFAHQQSRRLVNQFDLIAVEDLSVNRMVHNHCLAKSIQDAAWTQFAAFLAHKAAWAGRRFVAVNPAYTSQDCSGCGHRQTLSLADRVYQCPCCGLVLDRDLNAARNILRLAKQQLGLGQ

SEQ ID NO: 62528 - protein, 454 aa, Candidate division WPS-2 bacterium
LSCVRVSPICESIGDFDTNAVFGAALCHTLGTTAWYSSRVSTSTRFDGQVRWMHKARLYPTCAQDRRLVEMLRTTCELYNALLQQRRDLWTTRRASIWSSVQHRQITELRSFEPRFARVYRECEDAVLRRLDQSFAAFFRRLKRGETPGYPRFKAISRWSQLQFPHADRALRLKDQQRRVVIPGVGGIRMRKGRRIPQTFGRAFLTTKNGRWYITFECHRAIEAMPATNRRVGIDRGVRALAATSDGALIANPRHADRLRSKVARHARKLEVRSARDPAGRVTNRRDPLRAAAARRLARAKEREGNARRDWLHKVSRHIVDQYDLIALEDLSLGVMTRSVRGTVNQPGRNVAAKSGLNRALLDAGIGMLGTLIREKAEYAARIVIRVDPQYSSQTCAACGHVAKESRKAARFRCVNCGHEADADVNAARVILLRAESPPRRARSTIASGSKMRA

SEQ ID NO: 62529 - protein, 98 aa, unknown
  TnpB Polypeptide
MAKRKKGKHFSFGKSVSDNGWSKFVNILKYKLAWQGKQLIKVDKWYPSSQICHNCGFQNEETKDLSVREWECPKCGSIHNRDKNVAINIREEVRRMIA

SEQ ID NO: 62530 - protein, 235 aa, unknown
  TnpB Polypeptide
MPDRPSQWATYTAARTEAARLRADLVARHHRLRRLNWGWPSKATVQWRNKRLASAVSKQSTMVKGSRRWRRVQRRKKQMLAKARRRMNDLIHKATHRISQEFPGATCYVGKPFNDASRTMNGVWAQQVSQASNGKITRQFDYKTSGAIQVDEHYSSQTCPRCGVRNKCRRVYRCRECGIVAPRDVVGSTNILCIGLHEEMWIGQSMATEVVYVRPIKVSRNHPSSSVGHTGNSSA

SEQ ID NO: 62531 - protein, 353 aa, Azomonas sp.
MKQTKTLKVRVRDKHAALLQQMARSVNCVWNYLNELSARSIRERGRFLSAFDLHPYTKGANKELGLHSQTLQEITREYVTRRKQFKKSRLNWRKSGGVRRSLGWIPINTGAARWKNGQVYHNGHYFKVWDSYGLSQYSFRSGSFNEDARGRWYFNVVVEVEAVVPAGQDKIGIDLGLKDTATCSDGTKLEAGRFYRDLEPKLAIAQRARNKKRVKAIHVKIANRRKDALHKFTRQLVNRAGAIYVGNVKSSSLTQTKMAKSVLDAGWGLLKTMLEYKCAGAGIVFKAVNEAYTTQTCSNCGALPDSRPKGIAGLGIREWTCSACGVRHDRDINAAKNMLAVGHGRPVVGIPVL

SEQ ID NO: 62532 - protein, 340 aa, Catenulispora sp.
MLCSERRWLAEVSSVVLVQSLRDLNSAYRAFFESAAGKRGGARAGAPVFKTKRDGRQAVRLTTNAFSIREGGRLYVAKVGELVVRWCRPLPSVPSSVTVSRDAADRYWASFVVDVEPDPLPAIDVECGIDLRLTYFAVLSDGSKIASPRFLRRAERKLKQAQRELSRKQKGSANWRKARKRVARQHAKVADRRRDWHHQASTRIIRENQAVYVEDLAVAALARSRLAKSVRDAGWTRFVDMLEYKARRYGREFRKVHRFAPTTRLCSTCGACGERLGLNVRDWTCRSCGMRHDRDVNAARNILALGRRERLNACREDVRPEHALAIFNEAGTDRSEGERK

SEQ ID NO: 62533 - protein, 182 aa, unknown
  TnpB Polypeptide
MVKNINKTEKIRKIEKKLKREQKKLSKKYENLKKKGGTATKSNIKKQIVKVQKLHHKLDNIRTDYVNKTISNIINQKPKFITIEDLNVKGMMKNKHLSKAVANEKFYEFRSKLTNKCNALGIELRIVDRFYPSSKLCHLCGSIKKDLKLKDRIYKCNCGYIEDRDYNASLNLRDCLTYKIAQ

SEQ ID NO: 62534 - protein, 433 aa, Nocardia sp.
MLEYRVHTVRVGAEHPAWPELDRMALAARRLRNAINYDRRQMFFADLEFNENIDRKDRKTTAEWKALPSKVAREVSRGLDADWRSVRVLRRTKGRRAQPPKYLQGRSRYQLRFSIDALRAQPAKRGMLGVAGMKLDLCPLPVSWDRIKEVRILPSGREFDVEIVWVKTVAEPVESPDWSRVAGADLGIDNLITVACDDAAVRPLIVDGRSIKSRNRFANVRSDLYAALLPNLEGGTRQQRDSTRREALWRHRNSVVKAELHTASKRVVDYCRAHHVTTLVIGWNPNWKTQSTTQSTMGRVGNRRFRSIPHRVLVNQITYKARRYGITVLETEESYTSKTSVLAGELPVKHHEYAAQRINRGRLKVLATGQILNADVNGACQIARKCKPEAFSWANGVAGEVGLSRPLEVVTGGGRPGVRTHLGVKCIEGDTSS

SEQ ID NO: 62535 - protein, 340 aa, Microcystis sp.
LQQSLKNLESAFKNFFSKRTKFPKFKSKHKKQSIRYPESCSIRNKGIKLPKLGVVKANISQVINGQIKSVTVSKTSTDKYFAAILLEMDDSTTIEKLKISGIDLGLSSLVTVFDGETTYKVDPIKPTRKYAKRLKRRQQALSRKAKGSNNRKKAIKELAKVHEKIANTRQDFLHKLSRKLCDENQIVVAENLNIKGLARTKLAKSIHDAGFGMLLNFLDYKLEREGGKLVEVDRFYPSTKLCSGCGFKNDLLTLSIREWICPECKSHHDRDENAAKNLREEGMRILSTNTDGQSEFQAWGETVRLVGTCTQKRVWGESRIPRHSVSLTAGVSKNLILEDF

SEQ ID NO: 62536 - protein, 402 aa, Thermotoga sp.
MLRTYKFRIYPTREQEEKLAKHFGHTRFVYNFFLNYANIIYRVMERPTYYNEWASVLVKLKKTNKYSWLNEVNSQALQQSLKDLERAFKNFFKKQAGYPKFKKKKFSRQTFRIPQHIQLYIKEDNPKYGCIFVPKFKEGIKVRLHRKLPKDGKIKQATFIKTPTNKYYAAIVFEVQDAEVQNTSTDILGIDLGIKDTITLSDGKKYKMPDLSKYERQIKRLHRRLSRKQRGSKNWEKARLCLAKLYEKIVNIKNDWLHKITHDLVSESQAGKIVVEDLNIKGMVQNHRLARHIHMQSWRRFLELLEYKAKRCGIEVIKANRYYPSSQMCSECGYINKEVKDLSVREWTCPVCGAHHDRDVNAAKNLVRYGLMLSIGREPSEFMPVDRALAAEPERGLRAITG

SEQ ID NO: 62537 - protein, 431 aa, Azohydromonas sp.
MPCRASLHQELVFHTVAGMQRLQAFRFELVPNGQQQRDLGRFAGACRFVFNQALALQQRRHEQGLKKLGYAELCRQLTLWRHSAETPWLQQAPTHPLQQSLKDLERAYTNFFAGRARAPRFRKKGRHDSLRYPDPKQIRLDPAGSRVFLPKLGWLRYRNSREVLGAVKNATVSRLGERWFVSIQTEREVERPVATGGAVGIDMGVVRFATLSDGTCLAPLNSFRRHEVALRKAQQALSRKVRHSSNWKKAKARVQKIHAAIANVRRDYLHKASTTISKNHAVVCIEDLSVRNMSASAAGTVDAPGRSVRAKTGLNKAILDQGWYEFRRQLEYKLQWKGGRCIAVPPQHTSQTCPTCGHVSAGNRTGQARFACLACAYEENADVVGAINILARGMQMLRDEGLDAAHACAGPQGRPDRLPSEQQKLSATGTR

SEQ ID NO: 62538 - protein, 390 aa, unknown
  TnpB Polypeptide
MYRVRKLEISSQKDVCDTIALESGKLYSTTVKFFWRTVNRKGLWLKPKSLMRLFTSNKMQAHSADASVQQFFHALNSWREARKTVPTANPPRKLKKYTAVTWKKSAIFIRNSQLILSNGKITEPLIIEWNHPETPVLVTLHWDGSGYELVFCYEYEDTEKQQITTEKPIGLDIGQINMIACSNGTILNGRLLRSLKQGRERSQAILQKRMSYKKEGSESWKKLRDAKQSLCKKVTNQARDILHKYTTGLVMYLQKEGYNTLVVGDLTGYRVENDKGPVRNQENHAWMYAQISWYLKYKWENLGLKYVPQEESYTSRTCPCCGNQIEVKGRNYICPVCGFRGHRDLVGATNILRKYLGSFGKPSKPVDGLMARPSHVRYKPNMSVAYGLVL

SEQ ID NO: 62539 - protein, 323 aa, Nocardia sp.
VAWERIVAAKSARVTFDNGVWQVTFVTLPPEKTVSNGTGVAGIDRGVANSIAISDGEFACAPGLSSGQQRRAVALQRKLARQRRGSRERGGDQAAAVEVAGHRPQSEEGLGGADHHAARTRLRRVRPGTAADREHGEKARTQARPGHPGAISAQRARGQARSCPGDHVVVLGRVRAPVGREVECGVRACGEYLPHVCVVWSHFGWKSQEPSGFPVREVRPRGARGHQRGHQYPRESVPPTRGHRGLGCGSLPCGSGTNQWVIEREAHSLHARESRPFRPPEGPILVITDGMIDVLRIRHEHAYLIPAGAALPFRPHGPVFRIR

SEQ ID NO: 62540 - protein, 508 aa, Nocardia sp.
VVGGSAEFDQLGFEVLADPSHDFFHPRQMRCGEHRALIFSGENQMDMHYVNHVPTCAKAGIDAHETKCRVCWVKANTAHKFRLYPTQDQADRLTGWSDTCRAVSNTALAQRVWAYHSAQRVTLRAVDQCPELTQARREYDWLADLPAQCAQQVLRRLDTAYDNFWNRDHPAGLPQFKKKRDRQSICFPGQAIEVRKVSRRSAQVKLPKIGWVRFRLSRPIDGIVRNATISRDGFGWHISFGVHQPAPVAPPVNTGPPIGIDVGIACSVFCSADDTARQRPATATVGEQRRLRGLERRRARQLTYAKRHAGGKYSNRLRRTNAAIAALKARQARRRLDWNHKLTTDLAQSHGLIGIEDLKVSSMVRSAKGTATQPGSKVRQKAGLNRSIADQGWFEIRRQLEYKTRRHGGQLVAVPAPGSSQTCSRCGARDPDSRRGCGRLFACTQCGHTEHADKNASVIIRDRAIRTAGRAGTSTGGGAGSQSTRSPKGRGGRRASRMREPSSRGTAA

SEQ ID NO: 62541 - protein, 431 aa, Planomonospora sp.
VTSPTAPAPTPPAHTARPDRTRQGYRIELAPTPAQRTRLAQHAGLARVAENFYLEKIRAALDQRTAEATYGIPDEQLTRVPWTAPELETRWRTEREHRFPWFTAEKLSSRIPKEAARCRAAALKNWADSRTGRRKGPKVGFPTWRRRRHGRRFRYDADRAHPIDTRTVALPGIGTVAVREDMTWLTSRLESGQARILGATVREQAGRWWISLQIEIDRTGLNTARTVDPHAPACGLDLGLKVFATLTDDDGTTEEIHAPKPLKRSLNKLARANRALARAQDGSANRARKARTVAALHLKIAHQRADFLHQTSSRLARTKRAIAIETLNIAGMVRNRRLARAISDAGWGEFARQLAYKTGWYGGHLHAADRWFPSSKTCSACGRVHRGLALADRTWRCVGCETVHDREVNASVNLLADMLSTLDPGGGQATA

SEQ ID NO: 62542 - protein, 414 aa, Euryarchaeota sp.
MPVGLKEQMLVKGVAFHLESGLPPEARFLLEDFRLAVNNAIRVGLQTHTTSRNALIRLAYGDFRENHPKMYAQHLVSAFGVAAGVLKNYRRRVRMSSAHRVPYVKRLMMKAENQAYKLDRENGVIDLPIRAGCHVHLKLVLSRYHRKYLDDATLSLGSLTVLPDRVIVAFRKEAPKPYDPESALLLDTNERSLDGVFVQGNGTRIVKAEFPAVATIQQRHHDRRRRLQNKKSHDRRMATFLCRREGSREHRRIDYRMHQVANAVLKFAESQKSAVVLEDLKGIKFKRNKDLNRRLSLWPRRKLHQIIEYKAQWRGIPVMKVDPRYSSRKCPICGRIPDSRMGTEFVCECGWRLDRHINASINLLQTAISKGLEVAGGLRFDPGAFQHDVVMTLYDPARGARSEPNGTSCAIGVT

SEQ ID NO: 62543 - protein, 499 aa, Brasilonema sp.
MATLTYIKGLPTPAEELNSLGITEFEMFLTAYSLVFHKAACETVSFILSGQKFNKSSWNTHLQTTYGISKRHANGVISHAQGAVEASKEHRKQHIKTLEGKLKSINSWITKSEKKLADSLKFYDNKNWQNSKAGCRFSLSCSIQFRDTNWQNLRFQIHNKKRRAYQLSQQIEHLKTAPIQTVIPRNQVFVVGSKDESFGNQVCQWDGEYLKFRVPACLESKFEKYVQTRLGSFDRNINRLPKDGSKTWHFYRKNGKWNAAVQFTPAPVKRVSRHSAYGCIGIDMNPGSIGWAYVDRDGNLKVHGQIPLQMGLPSGKQDAQIVDACLQLATLADTFACPVVCEELDFSTKKEQLRERGRKYARMLSGWAYSRFYELLESVLSNRGIYLMKVNPAYTSVIGLVKYARQYGLASDEAAAMAIARRAMRLTENIPGSITAYLSVKDGKHVWSLWNQLNNLIKKSSIKRHNFYAISNWESLVKRWTEQSVQSKLCPSDTLREWC

SEQ ID NO: 62544 - protein, 374 aa, unknown
  TnpB Polypeptide
MTTVQKSVRVRLYPTEEQEILIDKTIGCCRFVYNQTLADCIQSYEQTKHFPSQSERSANLVPLKEENEFLKEVDARALQQSVRDLNSAFDNFFKNRNHFGFPKFKSKHSRKQSYRVPHNNGRADVLDNKHIKLPKLGKVKTKRFDMPDVYKIFNITVEKTDTNKYYASICIETEAQPLPKTGKQVGFDLGLIDLLIGSDGTRCERPKYGYAFKDKLAKEQRKLSKMRTKLERAKLNLDECKNYQKQKHKVAKLHEHISNCAKDFNHKLSIELVRNYDLIAMEKLNVSGLIKNHRLAYSIADVRWSQLLNFIKYKCQWYGKEFKQVDRFYASSKICSCCGTYHKYIVNSLKVREWVCPDCGTHHDRDVNSECSLK

SEQ ID NO: 62545 - protein, 420 aa, unknown
  TnpB Polypeptide
MYEERNRKIRENGKATRERRSQMDCHVISTKIQENRLSKAKLEKLYRCFLEGKWLYNAVVATNSLSLEDTSHVQVKVKDIFEVRELTTLSVQMKQSIVESVKTNVSNLSKAKKAGLKVGKLQYKHECNEINLKQFGNTYKIKGKNKIHIQNIGVLVVNGLEQINLDEVEFANARLVKKPSGFYIHLTVYTKKQPQPETSKEVLGLDMGVKDQLTFSNGVKVNFYLEESEQLKGLTRKLNRQVKGSNQYKQTLTRIKRIYEHQSNKKNDVANKLNSVLKNNYIICFQDELLNSWKRKKSKQKFSFGRKVQHGILGRVKDKLKKNSSNMMLESSVPTTQTCPVCGCLTKHSLDKRKYHCEHCGYENSDRDIHSAKNMILPSGYGTYRSLNTDAVSTNKLVCLLTNLESVGAVVTTNSMETHK

SEQ ID NO: 62546 - protein, 350 aa, unknown
  TnpB Polypeptide
VLQVSATSVSEREGLGVLCQVACYEAVKVRLDPTPNQERSMASHAGAARFAYNAGLAHVKEALENGEPPEWSHYDLRRWWNANKDELAVNQTTGEVWWDQNSKEAYSMGLRGLAQGLSNWSQSRKGQRKGRRVGFPKFKSKNTTMRFAYSTAFTAPTAGDPYGLKLPRIGRVHCMENVYERVNGARLIRITVSRRAGNWYASLTVEREPTAKPAPKGGVVGVDLGVKHLATLSDGTVIPNPRALDMGLKALRKAQKALSRKVVGSARREKDKARVARLHARVADVRMDAINKATTMIANTYSTVCVEDLNVAGMVKNHHLARSLSDAALGEFRRQLEYKDRAHWCSVACG

SEQ ID NO: 62547 - protein, 281 aa, unknown
  TnpB Polypeptide
LPGIGALGVHDDTRRLRRMLANDRAKICLATVSHHGGRWWVSLNVEAADLHPAHRHRPRDCGNNDGWVGVDRALSAFLVAARADGTEVARIHDAPKALTNGMFKQRRLAKSLSRTRKGSRHRRDAAAKLGQHHHHVANVRRHFLHQVCNALVKTHDRLVIEDLNVSAMLTNHHLARAISDAGWAEFARILAYEHTWRGGQLVVADRWYPSSKLCGQCGTVRSDLTLADRVFTCGCGHTADRDTNAATNLARWGHDHHNPSSRPPDPHATGPGHQRPPTGRR

SEQ ID NO: 62548 - protein, 383 aa, Stappia sp.
LIIVHKIELTPNASQRAYFAQASGVARHAWNWSLDQWKRQYEAGGKPSEGALRRQYNAIKPVEFPWAMDVTKCAPQQAIKNLGAAFQRFFQGKARYPRFKKKGVHDSFRADNGPEKSGADAVPVSGKRIKLPRIGWVQMRECLRFNGQVKSVTISRRAGRWFAAISVDTGDALPHVRKANGVCGVDLGVKVLATLSSGEVVAGPKAHKALLQRLRRLSRSLSRKVKGSANRRKARTKLATLHARIANIRGDALHKLTTRLVLENDVIGIEDLNVRGMAKNRRLARSIMDQSFHEFRRQITYKAAWYGTQVVVADRWYPSTKTCGTCGTVSRNVVLGMSEWPCGSCGTLHDRDLNAALNLERLAASSAVTASRTEGSGSAFAAE

SEQ ID NO: 62549 - protein, 401 aa, unknown
  TnpB Polypeptide
VSQGWKRTANGAAPSYGEDYVNLGAVDSAYACIENDPFTDGEIILKMVIQGVWYRLIFDFDNKRFREGRVTLPVIKVQDGQLVFIFAVVAENPVVQFSGDYVIGVDVGINNYATVVVRDTKTGRIVYGTTLSQRVHSLWNSVRASEMQVRQLREKAERLLCDRQGHMSALDEARLHREAASRKKRELAILAAQEIAYLSHSWGNAVVAVEDLGWVANTMQNGRWNRGAFVRWLTHYVSRNGGWVVSVNPANTSQLCYKCSSKVTHPTHKLSVCHEHGVMDRDVNAAANIAARAVPRVAKARETRAKNRKLRPQVALMTPPARGSLKYPGRDRTKSKPTPRRKNNRRVSREVILPLRPARAQAQRLAARVLADQGARGALGTNVAALKQGNVAYECRLYSLI

SEQ ID NO: 62550 - protein, 507 aa, Thermocrinis sp.
MKEQILSYELTLPQRIYPHLDRLFSVFKNQVNSYIPKLWNEKGFKLLSQKGSAVGILKKEFPTPEGLPSRVFRNVLELTGQIIRSQIERKEVFEKLLKGEEIKGYSKNFVLNIQRQIENLRKKGKEVSCYFDLPHPRFNGQIVITSADDNLEKGQFRRLKISGNFLEFSIKVPTQKGWEWISVKKLIPERLRRALTKAKEVKAVLIKKVLLKSGYSIYRLVIPLSFEVKEPENIERVLALDLSPSEKRLGVAVLVEGEKVSKPLFFKTQMLRKIERLHFEVSALERKIDNIYNSIENTACKREKERLWERLRHLFVEQKLRQRKIKQLRKEILETFTNFVIAHAKVYDCQAIVVEDLSFKEVPDWKDKKALRRFSQWFYSRFASRLEEKARLYNLKVIKVNPAHTSRICHKCGKEGKTERLVFKCSCGKYDRDYNASVNIAFRLTKPKAQRAEGIPGRFPSRLVQVEWKAILSFISFSKLLAWLRIVETSQLKLKKLLKWVGSDKYG

SEQ ID NO: 62551 - protein, 712 aa, unknown
  TnpB Polypeptide
MIKHEKARRRPREPKQSSTAEQQTMDDKFISSSSGTPKTGLRYLTESFTLNSVDRVVARQGKGRRPDSLIELTSRVSGESGSSHKLKRVDVLRLGEHFAVYVKLVNMVLERVYETDEQAESVGRQLSEYRGKGYDLLKKIGYLRYRDNEEVKSICFERMYRNALEEAARVILSDWRRRQLMVTSLSVLLRDKELALKFLKNKYISSSLIRIIRKECSAIKTNGKNYYYVVSVLKQLRRLLDESILTERQEPLGFRKSQRVRVKKLLVQNPDLVMPTVKNALASWFTEGYPFSVPKMLSFSEDFSASSENDIGQGYWYSLDRDSERENEILFFLKLSEPLEGIEHTGSPYRTKTLSFRFLNWFPKAIKKDLQNADRAKRNGQLQRAKQLRFRAAKFCDMHQQLMNTIEYQHLTYQTKLRSCRKSTDLEELRQLEARKEELKKSRRCKPPQIVFRAHKAILHLPFLPPTCEVIETALGKTSYHRRAGADRGLRVPIAVSVQKDEQYVDELIEMDQLLKKRIVLLEDTKWLQSDIGKKQNNWKNKHPNSPYPSYILKKLRHHGAIWDRIRRIDREIARQVASRLVWFCEEHEVKTIVFENLKNFSAPSGYNNLSWNLSANLFSKVFETVRYMRRTIGHSYGGVWVVSPAWTSQTCHQCGEIGIRVSSELSTSETKAGEFFYCHQCEEHFHADINASRNIIHVQNKMSSAVPGRSA

SEQ ID NO: 62552 - protein, 411 aa, unknown
  TnpB Polypeptide
MISESVLNVLRTSTVLLKPADTQPLSEYAEQSAILWNIANYERRKAFFEHKKMPSYTAQCRELKHTEPFKKLGTCKAQALLSKLNEAWQSFHALLRLKKKGKLPSHIHKIRPPRYWKRNGKRVAKAFYVRNDGWGMNENEISISRAVKIPYQCGELWVGKQGRLEVRRDELSGRWYAHIPVEVSWKPPSRTDAQKRASLDLGICNLATLYMEGERPVIYSGRAALSDWIYHTKRIADRQSKLPQRKHTSKRIRLRFRKRQRRLKHAVNTMLRSIFSLLEKRNVGELYIGDLNGIRKEADHGRRGNQKLHNFWAFNLVERRIMELGEEYGIAVRKVSERNTSRTCCLCGRRHNGRVERGLMVCSGKHMGINADVNGAVNILKVAVKRSPSVLSTDKKETSGSRLLAQPLLLR

SEQ ID NO: 62553 - protein, 376 aa, unknown
  TnpB Polypeptide
MLSYRFRLYPSKTVEHVLNRQIELCRWFYNHLLSELNMIREKGIRLKQTDIQALIPDLKKHEKPEPDEVYSKVLQMVNYQLWSNIKVLAQLKRNGRRVGRLRFKGESWFKTLNFNQSGFKLENGKLVLSKVGEIPIKPHRKIKGKVKGVIIKRERSGRWYAIFQVEDEPEPLPKTGKAVGIDVGIKHFLTDTEGRQIKNPRFYERSLERIRVRHKQLSRKQKGSKNREKARVRLARAYEKLVSQRNDFLHKLSRFYVNGYDAIAIEDLNISNMAKNHNLAQKILDASWGRFFQMLSYKAERAGRMVVGVNPRGTSQNIPEGFDRDYAASLRILRVGLGWPEPTPVEMGPLLGVPASAVVAGQVPSVKQEAPCEGWG

SEQ ID NO: 62554 - protein, 494 aa, Rhodococcus sp.
MTGPGSTAPRQFAVTTRPYMAVDEATGEPIGLDDIDTRVGWLLDLVTAAGGELVSRLWQPATFDVLAAGRDRQDRRLPTQGPVAAARLGWNPSYPDGVYVPSRVTRVVTAQVMATLRTLAYRDAAITALSARFDPATGVVAPPTEPGDSVPAGFARGVRRQLAAYSRRGDGSPAGRLRITDVQGPPRMAAMARLSAADRQLAQITVTDRELMLTVKLPTSPAPAGRAQWRSVRLTAAIPEHLHGRAITAWHLPTLVLDHRGLLWRCAATELVPAGDLTAGTVAVGVDWSPSTLAAAAIVVEGSGGLSSDYRGWTYDDRGLGIKLARLQTEGQLLHHKAARLTRLAATAPPEVRAQLEAKIAVLNAHRTAVGVKRGKINRELAFHFARQATDYAAAGAQVIAVEDLTTLETRGHGRVNNNRAAQAARRQAITALAHTAAAAGITVVSVPARGSSAQCPGCDEPLSRPGGYHTAWCPGCRVGGNRDHLAGVNDPVA

SEQ ID NO: 62555 - protein, 427 aa, Actinomadura sp.
MARQVKRAFRYCFCPTGEQAAELARTFGCVRLVYNRALAERSRAWYTEQRRISYVQSSATLTAWKKTDELAFLGEVSSVPLQQALRHLQTAFTNFFAGRAMYPRFKSRKKSRASAEYTRSAFRWRDGELTLARMSDPLAIVWSRPLPENAEPSTITVSRDAAGRWFCSILCTDTIARLDRMEQAVGVDAGVTSLVTLSTGEKIVNPRHERRDRESLAMAQRDLARKVPGSANRDKASIRVARIHARITDRRRDFLHKLSTRLVRENQVVVIEDLNVRNMVKNHSLARAISDAAWRQLRTMLEYKAGWYGRDLVVIDRWFPSSKTCSQCGSITEKLPLDVRVWECGCGARHDRDVNAARNIAAAGLAASACGAGVGPQRVSSRTRQSVLKQESCGATRGLPRLSGGGGGQTSVIGSGSMPSAVLPYRA

SEQ ID NO: 62556 - protein, 400 aa, Clostridium sp.
LPLYTSLSYCSLFTNIIIIIVKGVDIIEITITSKIQIYPTNEQIDILNNTMFQIRKALNYISKYIFNNNCLNQKKINEDTYYYLRETYGLKSQMAQSCIKTTIAKYKTNKSNGHDFTLVHFKNLEYDIVWNRDYSIKSDIFSINSLQGRLKIPYETKGMEKYFDGSYSFGTAKLVFKFNKYFLYIPMTKDYPQTTPFEINKIVGIDLGINFLATIYDSYGKTTFYNGRHIKAKRGHYKILRKQLQQCGSKSARRKIKSIGSRENRYVNDINHTITKALVDKYGANTLFVLEDLTNVRNTTEKVNINNRYVSVSWTFYQFRQLLEYKAKMNNSIVISVNPKYTSQTCPKCGHIEKANRDKKKHIFKCKNCNYQSNDDRIGSINLWRKGLEYIEQFSKEHSE

SEQ ID NO: 62557 - protein, 470 aa, Clostridium sp.
MKMIKKKDDTLSRVEKHIIKPNHKLYDYLDRYCFLSKNLYNYANYQIRQIFIITSKLAKDEKVTKEQLDYLNDINAKVDEFNELRKFNFRKAKLKAFKENKEFKKKLKTIKYFDKDNKYPCYEFIEFSVKDGVDYKSLMAQVSQQVLKLLDKNWLSFFEAIKKWSKNKTGFSGRPKLPKYLKKNGKNIVIFTNQNCKQENDYIKMPTCFNKYKLKTNIKGNLQQVRILPRNKYFILEVVYKINDIKLKQDNNKYISIDIGLDNLATITNNCGINPMIISGKKLKSINKYYNKQLSHYREIAKRMNDLDWTNKMNKLTIKRNNMILDLIHKASKSVINYALSCGANTIIIGNNKDWKRESSMSKKVNQSFVGIPHQLLIEKIQYKAENVGLNVIITEESYTSGTSFLDNEEPIKENYNKSRRVFRGLFISNKGIKINSDVNGSYQIMKKAFPNVFNHGIEDFGLNPIRVGI

SEQ ID NO: 62558 - protein, 213 aa, unknown
  TnpB Polypeptide
MEYVNGYASTTDVGTPEQMERFIYPTIGIDVGISTLATLDDGAKYENPKALKQYERKLKREQRKLSRKVFLSQNWYKQKRRVERIHYRIACIRWDAQHQATTDILKCASKIGIETLQVTNLLKNRKLAKALSDAALGGFLEKIKTKAQALGIRIVQADRFFASSKTCSACGHKKDDLTLSDRQYHCSDCGVFLDRDVNAAINLRTLAAGHAES

SEQ ID NO: 62559 - protein, 381 aa, unknown
  TnpB Polypeptide
MKTAYKFRMYPNRQQNARLELTLDTCRHLYNQALADRKNAYEIGGISRTYEDQAAMLVSEKKDGNFNGVFSQVLQDVLRRLDRSFKAFFRRVKTGDKPGYPRFKGEGWYKSFAYPQAGFKLDGSKLTLSKIGSIRIFKHREVDGKIKTCTIKKDNLGHWYAILVSEIEDVPQAELKTAIGVDVGLKNLVALSTGETVEYPHYYVQAEEKLAAAQRNLSGKKNGSANRRKAKAKVAKLHQKIQNHRDEFLHQVSRKLVDSADIIVFENLNIYRMLKSHQLAKHIQDHAWGKLIQFTQSKAAKAGKVVELVEARYTSQKCSQCGIMVPKTLAERIHLCPHCRLEMDRDINASLNIRTLGLRGRAYQDPTTTLDFGSKQAGSMT

SEQ ID NO: 62560 - protein, 404 aa, unknown
  TnpB Polypeptide
MLKAIKIRLYPNNGQEIYMNKLLGSYRFVYNQSLNFAIQQYKEDKKSVNIKILGNFLFQNLLKNEELHFLNEHNTKVLNQTLINLLDSYKRFFINGNGFPKFKSKNNNQQSCRFPAQAISKNNDYESGRLTLTKQLKNLKFRCSKQYKKQLNESIVKSATLTKTKSNKYYLSILVETELNKQLPESNNIIGIDLGIKDFIITSEGETFDNIKIKRNNQKKIAKLHRKLSRKKKGSNNRNKAKIKLAKYYEKLNNKKEYYLHKISNKLLNENQVIVMESLSVSNMVKNHKLAKSLQELSLYRFKEILRYKSSWYGRDLVEIDRWFPSSKLCNNCGYKNNGLTLKDRTWICPECSKSHDRDINAAINIKKEGIKILTNKVPDSIGELTLQESSLLGSRRMKKNNFL

SEQ ID NO: 62561 - protein, 422 aa, unknown
  TnpB Polypeptide
MQLVEKHVVKSTDKYYSEADELAFKSKNLCNAANYVIRQSFIFGWGYLNYNKMYNLMKFHEAYRALPAKVSQQVLMLLDKNWQSYFEALVAYKLEPEKFTGLPQIPKYKDKVKGRNVLTYTIQAISKRQLKKGIIKLSGTNIQIRTQVSPEKICQVRVVPKCDCYVIEVIYDEPESTQLQNKLVASIDLGLNNLAALTSNLPGFIPLLINGRPLKCLNQFYNKRKAQLQSQLKGNRKTSSRIQRLTRCRNQKVDNYLHHTSRFIIDYLVSAGIGTLVIGLNAQWKNEINLGKRTNQNFVSIPHTRLIEMLQYKAELVGIKAIVHEESYTSQSSFLNLDPIPVYGEEVKSEVVFSGKRIKRGLYKTNDGRLINADVNGSYNSLRKAIPDAFCQGIESCVVQPRRVNPLKVKAKGEGQKLPKAV

SEQ ID NO: 62562 - protein, 404 aa, Symploca sp.
VLRAIKVRLYPSPKQQVALSKSFGCSRWYWNFCLNACIQHYQETGKSLKLATYKGMLPQLKREYPWLKEDCYSAVLQCVAINLNKAYTNFFQGRAKEPRFKSKQSKQSIQYPQNVTVKRDNLIVPKIGEIKAVFHREITGIIKTVTISKTASDKYFASILCETQENVNQTLGDKTLGIDLGLKDFAIVHDGEQVTKFSNPKHIKLHEKNLARKQKKLARKNKGSKTREKYRKFVAKVHERVSNTRQDFLHKLSRKLVDQSQVIVVENLNVKGMVRNRKLSASISDVGWGMFVNFLAYKLESSEGKLLEIDRFFPSSKKCSGCGHVVAELPLDIRKWDCPSCGTAHDRDGNAALNIRTEGIRILNMDGGNPVLAVPRRSKTNKPQGGKASVIEAGSPHLLKEKCR

SEQ ID NO: 62563 - protein, 320 aa, Rhodococcus sp.
LRIRSRVPVSRASCSSRTVIDESFPVLPCHQPTGNGGTDSVQDCCPGQRVQPEVWSLEFGESRSDSVLCPSKVNTNEQFCNFSIIACWTPMKCTVVENPRLLRRAECRIERARREVARKQKGSNNRRKAVRKVARLHARVADARRDFHHQTSTSIIRDNQAVYMENLAVNGLARTRLAKSVHDAGWSAFPSMLEYKAIRYGRTFHRIDRWFPSTRMCSTCGTVGERKPLNVRAWTCGCGSVHDRDHNAAKNILAAGRAERLNAYGARVRPAAMSAQRGEAGTHRGSRPAAVENPDPRVEEDVKMTFSGQEEAGEASTTLR

SEQ ID NO: 62564 - protein, 407 aa, unknown
  TnpB Polypeptide
MIRAHKIRLHPNNKQATHFANACGTSRFAFNWALNEWKTLYEQGEKVTEGIIRKRLNAIKKDSFPWMYEVSKCIPQLAIKNNLNSAFQMFFKSATNSKKEVGYPKFKKKGLHDSFTLDNISFEVKNKKIKIPHLTPVNMKEELRYKGKLLNATISKVANKWFVSIQVEIEDSHLQLTTYDESQVTGVDLGCKDLAVLSDGTKITGIKPSRVYSRKLKRLNQELSRRKGSKKGEKKSNNFLKTRRKLATLHYRIASLRQDQTHKLTTWLVDNFKVIGIEDLNVEGMVKNHNLARAIEDMNFGEFRRQLEYKALEKGVKVVVLDRWFPSSKTCNVCGSVNKELILKDRTWKCVDCGAVLDRDINAARNIKQVAVSSTVAQPVESSWVASSMKQELNNRFVQKCTRLCKF

SEQ ID NO: 62565 - protein, 406 aa, Granulibacter sp.
MIQRKANIYRLYPDAKQRLTLAGIAGACRFVYNLALEQRRDWWQRHKDRTGKAISFAGQCRELTDLRRDVDWLREAPIHPLQQALRDLDRAYQNFFSGRSGYPSPRRKGLHDGFRFPDPASLRVERIGKKTGRIKLPKLGWVAFRGWYDLPGAIRNITISRRAGQWFASVQWEREVPDQALSTLPAVGLDMGVSVFTAMSSSTTIAPGNFGKKALCALRKAQRSVSRKKKGSANRRKAVWRVQKLHARVANTRKDFLHKLSTTIAKNHGTVVVEALQVRNMSASAKGTAEEPGRNVRQKAGLNRSILDQGWRMFRTFLGYKLADRGGKLVEVPAAYTSQTCSVCGVTDPASRVSQARFVCATCGHTENADINAAKNILRRADCPLKPVEGHRIRRPVEAGSIGRAA

SEQ ID NO: 62566 - protein, 235 aa, unknown
  TnpB Polypeptide
MSNLTKTIKLRIYVTPEQEILFRQMTEQYRLACNFVSQYIFDHQFDLAYQNLNKELYSNLRHLFGLKSQLAQSSIKTTIAKYKTVKQQLFQNPYRYKDENNDWQRIPKTLEWLWKPIFFSRPQADLVRNRDYSFVNDGQTLSINTLDGEPNAHLKASILLNILTVLINSGQQKLVKLKGWWYLHIPVTKTVEDFQKVNVRHVVGIDRGLRFLTVSYDEQGKTEFVSGKKIATKTS

SEQ ID NO: 62567 - protein, 137 aa, unknown
  TnpB Polypeptide
VFVEDLKVSNMSASAAGTKENPGKKVKQKRGLNRSILDQGWYGFFQMLSYKLERKGGKLIKVDSRNTSRTCPQCGYVSAENRKTQASFACIHCGYHANADLVGAINVLRAGRARLACGKSGAVRPLSAGTQRDLLQH

SEQ ID NO: 62568 - protein, 419 aa, Beggiatoa sp.
MKKALKTKIRGLDKSQFKRLRELTHHAKNLYNQTLWILRQAFETTGKYFSYPQMDKAMKQVENLEGSVNYKLLKAKISQQTLRRLDKNFKSFFKCHQDFKKNPCKYKGPPKPPRFKHKQYDNLIYDYQAFSVKDDMVVLEKGLSFSLPKKLLGKTIKQVEIVPLYRHFEAIFVYEDKDVVAAVSPNDKVMAIDLGLNNLATCVTNGVTKPFIIDGRRLKSINHHYNKRFAKLQSHLKKTRNRKWSNRLQRLTDRRNARIDDYLHKATHQVTEISVENGISKVVVGDVAKSLDQINLGKKTNQNFVNLSLGQFIDKLRYKLELHGIALEVTNESYTSKASFVDGDSLPKKYEPKKTHSFSGKRVKRGLYRSQNGILINADANGAYNILKKSNPKFSLEELISKVGEGILDWLHPYTRLKI

SEQ ID NO: 62569 - protein, 385 aa, unknown
  TnpB Polypeptide
MTTTYKFRIYPKKAEADKLETAREVCGQTYNYLLAELNEGFTKNEIQNYLLDLKVCYPEMSNIHSKVLQMENQRLFGNLSSLSKLKKHGKKVGRLRFKGKNWFKTFTYNQSGFSLKHIRAKKGILWLSKIGDIQIKLHRQVERNIKSVTIKKSNGRWYASIVTDFIQKRICGEKEIGIDLGIENYIYDSEGNVYENPKHFDKYHQELKIAQQDLSRKLKGSNSRKKARIKVAKIYEKITNARDDFIHKLSAKLIKECKFIAIEKLNIKNLMGISYNAKNIADCSWGKLSTYLHYKAGNAGCVVIDVDPAYTTRNCSFCGTRNNKLELSQRKFICKKCNTELPRDYNSALNIFVCGKELATMEKASNTEQLVQQDVSMKSEAITLK

SEQ ID NO: 62570 - protein, 327 aa, unknown
  TnpB Polypeptide
MAIEVTRTYVGSIQNQRQVCDGLDSLGDSASKIWNVARWTADRIWDATGKIPDEGTLKSYMKNRGCWKDLNAQSSQKVIEELSDAFQSWFDLRHKDPKANPPGYRKHGDTRPRSTVTFKADGFKHDPENNRVRLSKGSNLKESWSDFILCEYQTRPDVDLSEVNRAQNVRAVWNGNEWELHFVCKVELETTDSAGDELAGIDLGIKNIATIAFPGEYVLFPGNSLKQDKHYFTRSEYDTEGENGPSEKSMWARQKLADRETHFYHVLTDTIITECVERGVGTLAVSWPEDVRESDWEKLAIRSCTRGRSTASTSTSNTKARSVALRC

SEQ ID NO: 62571 - protein, 429 aa, Streptomyces sp.
MPVRRAAGNVTVVKLTVQVKLLPTPVQAAALEETLRACNEAATWVSSVAFERDVKSNFALREHTYTAVKDRWRLGAQAAQHVIKKTCDAYTTLKANLTAGNLGKPSSKRYRRATEKPIAFRPEGAQPYDDRMLSWQYTQRTVSIWTLSGRIKEVAFTAAPEHLARLALCRKGESDLLFRDGMWFLTATCEVPEAELTTGVTEFLGVDLGIVNIATTSDGQIMAGRRLNRGRLRERTLRTKLQRKNTPSVKRRLKNRRRKEARRARDINHKIAKHVVAEAERTGRGIALEVLTGIRARVRLRKPQRATHSSWAFAQLADFIAYKARRAGVPVVHVDPAYTSRTCAQCGHIDKANRASQGRFVCRSCGVVAHADWNGSRNIRHRAEELWRCGAQSTAPDPPPNTGRGTGRKRSTTASGARCASLGLSVPGG

SEQ ID NO: 62572 - protein, 347 aa, unknown
  TnpB Polypeptide
MVVHCIKCGIIGLTKTKREALDWEYEGFQWWMQFGIDPGILSQHKAAKGHYYQKDSIKYKDYPLVVPHCMVWYRFKNTKLTPHWVKISVRKRKGIGVWLPIKPHKPLPDIQYLRDSLMVRNRKGDYEFRLIYDVPQQLVVPKEVLAVDLGERVMATVCGSGYRAFLGREVRGIRRHYAWLRRRLGQKKLLGKIRQIGSKERNKVRNVLHHVANQVVSIAEQTRAIIVIGQLKGIRRVRTSKRLNRIVFNMPYYTLTKMIQYKAAQRGIQVFLVDERGTSMTCHRCGNADRKQRKSQGLFVCSRCSLEYNADLNGARNIMDRAGEQGFLARALAEALKSGSIPAQIST

SEQ ID NO: 62573 - protein, 372 aa, unknown
  TnpB Polypeptide
MILGKKVRLKPTEAQEKQLCKSAGTARWAYNWALGRQEINYAHGGNFLSDNDLRKEITKLKQTEEFSWLRDVSTNIPKQAIKDACDAYKKFFKHLAGRPKFKSRRKSKPSFYNDSINLKFKVGTVLIEKIGWIKTAEQLPIGGRYTNPRISFDGKYWYVAIGTEQDKIIKPLTNEVIGIDVGIKILASCSNGMVFENINKTQSVKKLEKRIRRLQRKVSCKYQKNKKGVRCVKTCNIVKVEKQIRVLHRRITGIRSNHIHQATNAIVKTKPCKVVMETLNIKGMMKNRHLSKAIAQQKLYDFKLKLQYKCEKYGIELVEADKWFPSSKMCSSCGVVKKDLKLSDRLYKCDCGLVIDRDYNASINLSRYGLVV

SEQ ID NO: 62574 - protein, 458 aa, unknown
  TnpB Polypeptide
MKQIITAKLKLTTTPEQHRALRETQLVYRDGLNAVSQYAFAHGKTSSVTKIHKGMYAELRARYHLSSQLACSVERQVAATYKGLWTKLLKNKEHRRLKITKKRFKGLDQPPKYSSPTVQYTYERDYTFQCEQQVSIKTLNGRISLPYQGYFKHLLLIQQGGHIARIGDAKLWYDQPKKQFYLLVSVELTLPDPTCDSLSETVGVDVGVRYLAVTSTAAGKATFYSGNRVRHKANHYARLRKRLQKKGTRGAKRRLRRIGQRERRLKLQANHQIATQIITEHPQTLIGLEQLTGIRDRTRRRKRKRKKNGKGTEKVSPKARKANRVYSQWSFAELHALISYKAVLSGSLAVKVDADYTSKGCPMCGYIADENRPNKGLLFGCQNPQCGYTLHADLVGARNLVMRTLLVQQDWARTGCLSLIPDASDREAKAARLKRYAELRWSPEVSRKASRWSETGGS

SEQ ID NO: 62575 - protein, 310 aa, unknown
  TnpB Polypeptide
MLSDIWGQVVWTEKKIKGKNQYRILPTIPEYSFKKVMRNTYLQQWNYTRHWIDSALKTAFSIIKSWKKNYVNGSRTRTHPVVKRFFARVKQTQLKLEGEQLRISINPREFVYIDLSKRYFSIEGLLGEPVITTTHIHLPIYHHHPQSKQEIKSGWDANKYSLDGFSPQLGWIRIDLKPLHTLHTTYDNKRRRINKLASKKKRLGKKLRKKYSHRERNRVDQLLHQLTNEMVRIADMHGFEDLDKLRMMKKRRRRWNRELSKTSWRKIMSQMEYKSCTNYVLPYYTSKKCSRCGWLHKDLKGSCSSVRNAV

SEQ ID NO: 62576 - protein, 379 aa, Prochloron sp.
MRQHFFKTKKVLGFTQLYHLVSKTDDYYAMPNTKVSKQVIRRLHKSWVGYKQAHFDWTKHPNKYLGEPRLPRYKDITKGRYMIVFPSETVSKPPLRKGIVKLTPCPIEFNSGLTQVHEVRVIPKSGCYVVEIVYTQEELPFDLDEDKIAGIDLGLTNLVTLTANQSGFPPLLIKGGALKAINTFYNKKKAKLQSSLEMSNGAKVSRRLLALTHKRNCRVDNYLHTTSRRVIDWCVHHKIKTLVVGKNQGWKNSINIGKRNNQQFVGIPHAKLIDQIVYKGKLVGIKVVMTEESYTSKSSFLHNDPLPSYGEHSPKFSGKRIHRGLYISDKGIINADVNGSLNIIRKVKPNVLSDYGDQGLPFSPVTGDPLRTHDFLQFV

SEQ ID NO: 62577 - protein, 294 aa, Okeania sp.
MYCCQQVLVGKNPELIPILTFLCEQSHKLTNMGIYYGRQLYFKARISIGKYYLEKVYKHNYHYKVLYSQAAQQILRTVAESFRSYYSLIKAYREGKILDIPRIPNYRKKGGMATVSYPKQALKLKDNQIRVPLGNTCKRWFGIDSFLIPMPSNLAFSSLKELRILPRNRCFYWEFVYEKEIVIKPQLDRENVLGIDHGVNNWLTCVSNINTSLIVDGKHPPLSPPGRGTKGVGWYNKQISTIKENQPTGFWSNKLAEVTEKRNRQMRDGINKAARIVINHCAQKFYWYNCIWLE

SEQ ID NO: 62578 - protein, 380 aa, Rhodococcus sp.
MAGRVVKRAFKYRFYPTAVQADQLARTFGCTRYVYNRALAERSRAWSQERRRVSYSDTSKMLTGWKRDTETAWLSEPSKGPLQESLRQLQGAFDRFWRKQSRYPQFKRKGRSKDSATYYSNCFTYRGGRIRLAKQSDPLDIRWSRPLPEGATPSQVTVSRNARGRYHISILVEDTITELDPTDGVVGLDAGITSLYTLSTGEKITNPRHERRDRERLARAQRVLARKAKGSRNRAKARLKVAKIHGRIADRRRDYLHTLSTRLVRENQVIAVEDLSVRNMVRNRSLSRAISDASWSEFRSMLEYKADWYGRRVVAIDRFCPSSKTCSVCGAIASTMPLDVREWACRCGVVHDRDVNAARNILAVGLTVAACGDGVRPPRT

SEQ ID NO: 62579 - protein, 337 aa, unknown
  TnpB Polypeptide
MILTYKIRHERDFRKELSLAKKVAEYGLQHKTISSKDVKHIGLKSAISNQILKKYSKSKTAKECKSVKLTIPNQSIKIQDDTIYVSCIKLNLSIYFPKNFSKINQIEIGKEFAYISVSYPDTPKINAMNTIGIDRNTTHHTIVASCLESGKILKLGKSCNHIHHKYKNMRKSLQKQGKFKRVKAIKNRESRIVRDINHKTSKALVKFARDNNACIVMEDLKEIRRTAKTRKKQRYSLHSWSFYQQKMMIEYKAKKYGVSVHYVAPQYTSQRCSICGHIEQANRKGNLFCCKKCGTVEDSGVNAGFNIAYLYHEGIPQFNIERDMLKGNTDIPKEATL

SEQ ID NO: 62580 - protein, 402 aa, unknown
  TnpB Polypeptide
MFINRAHKIKLHGLSDNQEQYLLSSAGAARFAYNWGVAEWKRQYEAYTQGQQVNRPNAYDLRKLFNERKYIENPSNYEELTFEQKREYFSWVRDVSKCVVQQALINLGNAFTRFMKKTAKYPTFKIKGIHDSFYLDNENVKVTTSEVNGKTSSYLTFPKIKEHFRLTEHPRFHGKLMSVTVSRHGEHWYASLSYEINIPDPVVDKERQKTAIGIDLGIKNFAVMVDHGEVVFEEEGPKPLKKLLQRMKRLSRSLSRKNKGSKNYEKAKLKLSALHFRITNIRKDYQHQLSTLIAKFYHRVSVETLDIQSMLKNQKLARHIMDASWYQFKMMLKYKVAERGGLLVEANQYFASTKTMSCCPWVKLDNVKLSDRTLTCPSCGTVHDRDVNGARNLKNYSSVCEE

SEQ ID NO: 62581 - protein, 283 aa, unknown
  TnpB Polypeptide
LDGAGRCPFAQGGRADSGRDLAGHKPALHLGDRRGVLGAARGGLITGAISTRRDRWRVVLPRESADCSSAIAGRWYVSICVHEEMSEPTKATGEAIGVDLGIKTLATLSTGETFDNPKALRKKINALKRASRKHSRKKKGSNNRRKAKQKLARVHVPIANVRKDALHKATSALVARTKPDCKRPSCIVLEDLNVSGMLKNHKLARACADVGLSEFKRQVLYKAAFAGVEVKLASRWYPSSKICHCCGWKKEDLTLSDRVFVCEDFGNVTDRDYNAACNLAALA

SEQ ID NO: 62582 - protein, 393 aa, Clostridium sp.
MIKGIKIMLKPNNKQKTKLFEFAGASRFAYNWTLAKQEDNRQNNGKFISDNELRKEFTQLKKQKDFKWLNNISNNVTKQAIKDCCIAYKKFFKGLAKHPRFKSRKHSTPKFYQDVIKIQFTATHVKFEGFATSKKKNKQKLNWVRLAEKNKIPFNKDIKYINPRVSFDGVNWFISVGIEYNDNLEVPHNEGIGIDLGVKDLAVVNCLDKPIKNINKSVKVRKLKKRLKRLQRQVSRKYLMNKQNNKFIKTSNIIKLEYRINKLHKRLTNIRNNYLHQTTTGIINREPMFVVMEDLNVQGMLKNKHLSKAIQEQCFYEFIRQMKYKCEWNNIKFIQVDRFYPSSKTCSCCGAIKKDLKLSDRVYKCDKCGLVIDRDKNASINLSNYGKSIELAS

SEQ ID NO: 62583 - protein, 390 aa, Clostridium sp.
MKLLRAYKVEIKPTQEQIIKIHKTIGVSRFIYNFYIAHNKELYEKEKKFVSGMQFSKWLNNEYIPNNQDKIWIKEVSSKATKQAIMNGDKAFKRFFKGLSGFPKFKKRKNQDVKAYFPNNNKTDWTIERHRIKTPTLGWIRLKEFGYIPLNSKVKSGTVGQKANRYYVSVLVEENNNNTIKPTNHGIGIDVGIKDFAICSNEDKFKNINKTLRVRKVEKKLEREQRKLSRKYESLKIRNKNIKGGKATRQNIQKQIIKVQKLHQKLTNIRTDYINKTVNEIVKQKPSYITIEDLNVSGMMKNKHLAKAVAQQKFYEFRTKLTSKCNQNNIELRVVDRFYPSSKTCSCCGAIKKDLKLSDRVYKCDKCGLTIDRDLNASINLANVKKYKIA

SEQ ID NO: 62584 - protein, 513 aa, unknown
  TnpB Polypeptide
MTKNIQKSKETKIMFVYTLKLDANNKVKQQLNRRFKMAQDIYRRTIQEIVKRAKKQKKDPRNKKIKQIYSQVHALKDQIAELEVDLKNKPKKEQTQINALTKPLKKQIKELEAEAKPIFRQLDEDYDIVGKFTFTKYANDYRNARNYSSYIPSDVSIKLGERAWNAYEKVKFNKGAKKVNKFAQVSSIEAIKDCAITIRNGILKMGTKDKKIEVPVIYKNDEYEKGVFENKFKYNRILRKFENGEVQYYVQMIFDGIPPQKLDNYIKGTVGIDVGLTKIAVSTPNEVKILPLAPGLQNFDKEIRRLSRKLTRQRIANNPDNYNPDGTIKKGKKVWVNSKGYLETKHALADLKRKQAEYRKLSHKELANAIIQMGDKFIIRQSNFEKLKERSKEDRKSATGKNLSKKRAGKTINSHAPAMFIQQLLYKAEFQNKETQVITNKDFNPYEYNHVSKETIENKAHLKSININGFEVQKNLYAAFLVSQYENMENDNIIKSNFETFLRNQEFYIENVA

SEQ ID NO: 62585 - protein, 384 aa, unknown
  TnpB Polypeptide
MLTAVKYRIYPDKNQSILINKTIGCARFVYNLMLADFYDNDLITTPAYYKKDYPFLKEVDSLALANSQMNLKQAFRNYKNNKDHFGKPKFKKKSRSKLSYKTNNKKSANSIRIENDRLILPKFRSGIKIVLHRQIEGVIKSVTVEQVPSGYYTASILYEVSDNQIETTLSKDNIVGIDLGLTHLAITSDNEKYDNPKNFRQLQKKLAKEQKILSRRFNNNVKERIYDENGDYVKTVFKKPLKDCKNYQKQKRKVAKIHNKIKNRRLDNLHKVSTEIVKNHDYIVLETLRVHNMIKNRKLSKSIADVGWSLFVNMIKYKCERYGKEFVQIDQWFPSSQICSHCNYKDGKKVLSVREWTCGNCGTHHDRDINAAINIKNKGLELIS

SEQ ID NO: 62586 - protein, 402 aa, Calditerrivibrio sp.
MLKAYRYRIYPDKEQEEFFTKTFGACRFVWNKMLEEKLKFLDRKEKIPIITPANYKKEFLFLKEVDSLALANIQLQNEKAFRDYFRNPKHFKLPKFKNKKGKQSYTTNNVKVDFEKGLLFLPKIKSGIKACFHRTFTGKIKSATITKTKTGKYFVSILVEIEQQCNIQPPKNEVCGIDLGLKDFAIITNEKKETIKIPSPKHLVKAEKRLKRLQNQLSKKQKGSKNREKHRVRLSKLHEHVSAARNDFLHKLSFAIIRDNQTIVVEDLNVKGLSQSNLSKSVLDSSWGKFLNYLKYKAEWYGRTIIVVDKFYPSSKTCSVCNFINHRLTLKNRHWTCEECGTYHDRDINASVNLMFYGMKKVGMEQPEFTPVDCALAAELKQFRSTSHHRMKQEATTSISGW

SEQ ID NO: 62587 - protein, 401 aa, Calditerrivibrio sp.
MVLKAYKYRLYPTKEQAELIERHFGCCRFVWNYFLSLRKETWDKEKKHLSFYEIKKLLPELKKQNPWLKEVNSQSLQEVVIELERSYQRFFKGICNFPLFKKKKKSQSFSIPQHFRIESDRVYLPKFKTGIKFKKHREFTGLPKRLYITRTPSGKYFLLVVCETEINVLPENKYIAGVDLGIKNFVTIARVNKDNTLIKTEKVPHPKTLQKYEKRIKRLQRQLSRKQKGSKNRQKARIKLAKIWEKAKNVKYDYLHKLSSRLINENQVICLEDLNIKGMIKNRKLSKNIWDSAWYEFIRQLRYKAMWYGRKIATIPLFYPSSKTCSNCGWIFSDMDLSVREWECPCCGAKHDRDINASINVVKVGMEQPEFMPVEETTRVFSMRRQVVPVKQEAMHGISIP

SEQ ID NO: 62588 - protein, 432 aa, Anaeroplasma sp.
MGFKTLKYHYKASNSEIAMLKLLTRISKNLYNASLYYLRHYYFEHKTIPSYYDTNKELKMNENFHIINTYQSICTIRCAHNNMLKFIKNHGSLPKYLPKNGFYPLYTDQVRPIIHNGHNCIKLPLSNDMRTNKVFYNVYQDKLINDSIEEYSNKESMNIFFRIPKLLDGKEIHQVRIVPDKRGEYYSIEFSYKDIDYELKNIDDNIMGIDLGVTNLASCVMYNNESFIIDGKLLISKIQYTSKRIAKAQSILPSGVYTSKRIDSLRRKNNDFINDYLNKAVKELLNKAKENNISQIIVGWNKGIKTGGIKNESLKGKRRAKTNQKFILVPISKFKNKLILKSLEYGINIVEINESYTSASSFYDNDEIKKDKPRSGKRIKRGLYKRKDGKVINADINAALNIMKKYKRNSNDTIKYLMSRGLTIPYRVHVNM

SEQ ID NO: 62589 - protein, 489 aa, Anaeroplasma sp.
MSKNYKVVKQRLKSTSGEFFIYRFLSMKCRSANNTALANIKKHYTNEKKYINKFDNFTELSNTELALWLNNEIYQKAVFRADASYQAYFKLLEYQKENHLEITAKEPDYIKGYYPITFSYIGNKYENGKRVFNIPLSVPFKRLLRELAPGINYLKQFVDVSKLDLPDNYFIKLSIPKILTDKKIKEVSIIPLYNGKKFEIAYTYLDDKEYKKASGSGVMSIDLGINNLATCVTDKGDSFIIDGKRIKSMNQYYNKRMAELKGENPYCYRLNENPITKDLEYKKDLKKKLKPNEKYKSFKTKRMINLMMKRENKINDYIYKSSKMIIDYCLNNEITKIVIGYSNNFQKGFEYSGSYDFKNNYLKHIEKNMIKSNNQKFLSIPFGKIKSRLEYLCKKHKIDLILQEESYTSLSSFMDLDEIPVYNKEENKEYTFSGKRIQRGLYETKDKIYINVDINGALNIYRKSSVCDMKVIEYLLRRGVNTPKRLQVI

SEQ ID NO: 62590 - protein, 404 aa, Lactobacillus sp.
MTLKAFKVRLYPNQKQIKQIKQTFGSTRFVWNQMLAMQSARHKNNSHARYQNEFAMNNLLKALKTDYPWLKDVDATALQATNGNLHDAFQRFFNKELSNGYPRFKSKKDYAQSYTSKAVNQNIKVIDDHHLKLPKLGQVYFRAGRILTGKVRRATVRINSQGQYYATILIEGEKQALKPKTKQSVGIDLGLDSLMILSNGQKVNMVHFDTDARKQIRVWERKMARRRRNALKEIAFDKHDKVLFPRTSLRQFPRYQQARRTVAKLKRQVSDRRNDKLQKLTTQLVQDFDVIVVEKLNTQGMLKNHHLARAISNAGWGNLVTMLQYKCDWYGKQLIFVDPKYTSRICSVCGQKNHQFDGLSQHEWLAVREWQCPTCGTHLDRDINASQNILQRGLAQITPIKALV

SEQ ID NO: 62591 - protein, 372 aa, unknown
  TnpB Polypeptide
MANKAYKFRIYPDDAQKVLFARTFGCVRMVYNHWLARKIRQYEENKTTVTYTVCAKEMAEMKKTEAYAFLREVDSVALQQSLRHLDTAFQNFFKQPKTGFPKFKSKKQNKKSYSTICINGNIAILNGYLKLPKAGQVRLKQHRAVPKEYKLKSVTISQSASGKYFASILFEYENQVIEKKSKTFVGLDFSMHELYVDSEGIYANYPKYYRQEQLKLAREQRKFSKMEKGSKNREKQRIKLAIVHEKVANQRKDFLHKLSKKLIEKFDCVCIEDLNMKALSQVLNFGKSVMDNGWGMFVNFLDYKSKEVGKKLVKVGKYFASSQICSNCGYKNKEVKDLSIRQWKCPNCKVVHDRDINAAINIRNEGMRIVLG

SEQ ID NO: 62592 - protein, 389 aa, unknown
  TnpB Polypeptide
MVSYSYERGNIREHRKGRERMKTYCFKLYKSKKNKNLHRQIGAAGLIYNHCIALHRRYYRLYHKSLNLYALQKHLTKLKKRPRFSYMKEIGSQAVQDVTERIDRAYRLFFRNLKRKVRTAPPSFKKVKKYKSYTLKQCGWKLLEGNAIRIGTRKYCYFKSRAIEGVVKTVTIKRDALGNIYLYFACETAENEVAARTGKSVGYDFGLTQFLTASDGNDKQAPLFFKKNMAAIQKAGKALARKQKRSNHRKKARLALARVYKKTANQRKDFHYKLANAICEEYALVCIEDLNLKGMQKRWGRKVSDYGFASFVSILEYQASKMGTIVQKVDRYYASSQTCHICGARNPATKDLHVREWTCPHCGTVHDRDRNAAMNILKVGASTFFGEAS

SEQ ID NO: 62593 - protein, 394 aa, unknown
  TnpB Polypeptide
MQVRYRYRIYPSPGQQQALARTFGCARVVYNDCLRLRDACHAAGEKISDIEVQRRVITLAKQAPERAWLGEVASVALVQACNDARRAYRNWFGSLSGRRKGRRVGHPVFRRKHQRQSIRLTRNGFALRGQRLYVAKVGDIRVEWSRDLPSVPSSVTVIKEADGRYYASFVVERQATPLPGCDREIGIDLGLASLAVTSDGDVIANPRFLRAKERKLARAQRGLSRTRKGSANRARARHRVAVLHRKVRQTRLDHAHKFAFRLARDNQAVYAEDLCVSGLARTRLARSVHDAGWSQLLRLIEDKAAQYGRTFARIGRFEPTSQVCSACGVKDGPKPLQVRAWTCGACETVHDRDVNAARNILAAGRADNKNACEAGTRPHPVAAGAETGTHRSAA

SEQ ID NO: 62594 - protein, 322 aa, Thermoanaerobacterium sp.
MAKDLRTKNSKTCFQNIKKEHPEYKTVQSQILQDVLRRLDRAYKNFFDKRAKYPKFKDKYHYTSITLPQCEAKRNFGKEGYVYIKNIGYIKIKAHKDFDPTKVKTINIKYHAEKWYINLSVEIEEEKEKPVILERAIGIDKGINSIAATSDGELYLNPRWLQKAEKKLKKLQRQLSRKKKGSNNREKQKKRLAKLHEKVANQRRDYLHKISYNIVKNNDIICVEDLQVKNMMKNHKLAKSIANAGWRMLDKYLQYKMEREGKIFIKVNPAYTSQKCSRCGKIVGKDLSVRVHRCECGLEIDRDVNAAINILHEGLRQLGIVA

SEQ ID NO: 62595 - protein, 473 aa, unknown
  TnpB Polypeptide
MCPANADFHNKRSLGILVCMEQQCGRKIGLLPTKAQIRTMYRMCAVARRAYNWKLAVQNAAYEEAKANTPEGEKPKCKLGTPIDWHKEWCIHKKLPENKWMTEVSKFCGQEALIDLGAAWKRFFKGLAKHPRFHKYGVDESFRCSGGVFIGRDFVQLPTLGRVRLAEKDYIKIPDGVEKTPIAMATVSVDPTGHWSVSFAYHVDIEPLYSPNIEITSDDIEGIDLGVKDSGITSSGIVYSNPKAYRRYITRITRLQKAVSRKHKKSKNRKKARKRLAKTWHKVTCIRVNHAHQMTSDLTYKLKPKMIVMETLRPGNMAKNHNLASSVLDANFGRIKEFLKYKCQWLGIKLIFAPQFYASSRYCSHCGCYHNDNLTLADREWTCPVCGCHHDRDANAAVNLKFYGQWLAGLVQTDENIAARLAVGGCSADACPSVYQKEGVTFVSPRDRRLQFFLADESCRTMKQELSSMNSLI

SEQ ID NO: 62596 - protein, 392 aa, unknown
  TnpB Polypeptide
MAELTLTLKLPFHRLNQSKATEFERLTVINTQVANDLLRVDKNERKKLTSAAFRHIEIGSMWMNQTIRNTNAKTKAKHFKRMWLEVNNQGYEVLKSDELYTLSFSLYRGRKGRIPLAVHSASQNEVLDKMVKGDVKLGSLKLCKSKKGIWYALISVSMEVPDANEVKGWIGVDRGQNNIAVAALPKGFGKFWKGGRVKGLRRQFQRTRKKLAVAKQHKEVKRLEQRERRIMTTINHVISKELVQFASDFEMGLRFEDLSGIRQTSKQRQKNKSDAGNNRDNWAFYQLEQFTRYKAIRESVPVESVPAPYTSKSDHRNGVIGKRNGDWFRGFDGYRCNADWNAAQNIGQWLGFSCPLDLQSAVAAMAMVDREGGVDDSPLTSEASETTALASS

SEQ ID NO: 62597 - protein, 360 aa, unknown
  TnpB Polypeptide
VLTLQYPITEHIKEFIGEYRTLASHLFWCARLSLKPDENVVSRLKERIPSYWRDPLLNSKNPLYLFKNVVKVPRPHRAVLRLPLVDALHPAKGAHIKDGELILRLGRRVVLKVPPRALGWLERRLAEAPDAKKHVRVFERGGKLVVQVVLHRVSEVEAPEDPLLVVVDVNSFHGIVVHFWCDGRLVKRVKLRPPNQGRRWRRARELMSLRDRLYNQGCIKQEQINVYDALVRLTLRNTAPREWVKREVAMLVKRIRRMARRRGKRPAVLIDVPSDTSLRHTPLQRTLLSFVRRLENLLSWYGIYCEEVRLYSTVCPRCGSDLVLEARTRRTRIMRCPRCGFRDDRDNIPLWWAVKRWFDA

SEQ ID NO: 62598 - protein, 411 aa, unknown
  TnpB Polypeptide
MINGIRIRLFPTQEQEDKLWEHVHAARKVWNWGLNYEMELYKNKEKHLSAKSLKKELTKAKKAEGLSWLNNVSSHTLSMVILDLGEAYDRFFKIKPARYTKAKRNKSARTGKKLTAYDLEGHPKFKSRKDNDFRFPIRYEAVYFTREMCVNIEKIGKVRYQYDTCFIPGKNAFKVSNPRIKYIDNKWILSFGIECENQAPGISPGLAGKSLGIDLGIKTTAMVSFGGERRDYPNINKSGRVRRLERKLKHAQRNLSRKYRVNNKRDSNKQYEQTNGVKKTKALKQKIESRITNIRNNYTHQTTRELVSLQPKRIVMEDLSVKNMMKNKHLSKAIQNQKWAEFIRQMKYKSEWRGIEFIQADKYYPSSKRCSSCGAVKKGLKLKDRVYICDECGLTIDRDYNAALNLERYVS

SEQ ID NO: 62599 - protein, 530 aa, Ammonifex sp.
LILTTSLRLPDELVEPLKNLTALGLKVQEQVLGTYWSPEGLEAVASSPGKAWKLLDAELPRPQDVYIPSRVWRSILESAGRLLRSMAERKRIFELLLPLFNGKARDAAKELYDLLKKDGEGEKFGYLFNVAEAVANFYAEHERLPQDFFELQRKPEPKKFTFTTSADDGPRQGQVLKYECDGEVLRGRVKLPLCPEPKSEKDWEWFSFDVKLPEELKEKLKAGKLHAPDLRLKRKPSGKLIALLDVKVEVPEKALSGEKDRALGLDWGQRKLITGTVVSREGQLTPPFFVFWQALRAKLFRIRQEIRRLQKTRDQHERKSPEWKKYNRLFASAWQKYHRIQHQLAHQVSSLLVLLAKAFDCRYIFVEWLLTLRGKRGRPKDLNWWVTTTVRGLLFRLLRYKARLLGIKVIPVPPGGTSSVCPRCLEKGKRVKSPGEPEEKDSGSWFVCPSCGYSADRDYVGSLNVGRFGFRLKRPLSYRVGGAAQPFPSQGASHEEAMTFTTLGYIKSAFVANFNALARLLNSAVLPSIT

SEQ ID NO: 62600 - protein, 141 aa, Campylobacter sp.
LAFNKFFKDLKQGKISYPKFKKKRESFGPYYIGGDQVIIKDNKYLKVPNLGNVKLREKLRFIGKINSVTISQKADKFYASFSMQISQDEYNKTHKITIKNNQSVGIDLGIKEFISLSNGLQIKAPKPLNKLNRLLVKKLDN

SEQ ID NO: 62601 - protein, 395 aa, Marinobacterium sp.
MKLRKAFKFRLDVNAEQQARLRVLCGHARFVWNQALARCNEAYATEGEYVPRYESMSKWITAWKREEDKAFLTEAYTDNLQQKLKDLDSAWRRYFDPKLKADRPCFKKKGRSRDSVRFVNFNKYCQLNGRRVKLPAGIGWCKFRKSRDITGLIKNCTLSFSQGHWWISYQAEQDITPPAHPAPDHWVGIDVGIAQLATLSDGSSIAAINSFRQHEQALARAQRQLSRKVRFSSNWHKAKARVQRLQGRIANVRQDYLHKTSTTLCQNHAMLVIEDLQVKNMSASAKGSVESPGKHVRAKSGLNTSILDQGWGEFRRQLEYKSLWMGGEVLAVPAHHTSQTCPECGKVSPLNRLTQSAFVCIDCGYENNADVVGGLNILARGIEIRERAGRRPDRL

SEQ ID NO: 62602 - protein, 371 aa, unknown
  TnpB Polypeptide
VKKSFKYYIKGNREIVQKASRTLELCRILYNLCLEQRKFAWDNYRKSISRYDQIKELPSLKKFFPEFKEVPSQTLQEVVERVDKAFQSFFSRVKKGEKPGYPRFKSFNRYHSFTLKQAGWEYVDKKLKIKKIGNFKIFLSRPIEGEIKTVTIRKTLSNRWYVTFSCDKVASKPLPKTSESIGIDVGCLSFLTTSTGEKINNPRFFQRAQKSLTQKQRSFSHRKKGSSRRNKMRIMVAKAHEKIFNQRRDFHFKIARKLLQANDTIYIENMNHFKSFRALNRSMRDVAWFNFFNILLFKAEEAEKEVVKVPARNTSQMCSSCGKTVQKDLSCRVHSCPFCGLIIDRDTNAARNVLRLGQSLQGAEALASAMN

SEQ ID NO: 62603 - protein, 486 aa, unknown
  TnpB Polypeptide
MARYRLLPTPAQQAVLRDHCGHARYVWNLAVEQHQHWHPGRKSAPGYLEQCRQLTQARAEFPWLAAGSQMVQQQALRDFAQAMAAFFDPRNPTGRPSWRKAGRHEGFRIVGRRGQQWDLRRVSRHVGEVWVPKVGWVRFRWSRPVPPGVKSYRVTLDRAGRWHVAFAAIPDPIPAPGDGEVVGIDRGVAVSAAIARFRARETDRRKDWAEKASTNLARRFDVIRVEDLKIHNMTRSAKGTPENPGRRVRQKAGLNREILRSGWGLLVRRLREKAPGRVEEIRPAFTSQRCSACGHVDGKSRKSQARFACTACGFADNADVNAARNIAAGHAVTARGGFGNAGPVNREPHLLASLTGHEQVNPGPSGHGRMSIAGSFRGPAQFPGDLAANGGRVAFERRGAHVGRAGFEPGHRGLGGPHPGGHLGLRQASRLPLLGQFANQAAALFGHPGRLLVRATAQRHLAEARHDRQRRGGWSALRLARAARAA

SEQ ID NO: 62604 - protein, 455 aa, unknown
  TnpB Polypeptide
MAASSSNPQVVHRTARICLRTTRAQANRCYRLLRAAGDVWAWLLDSNRDRRQQGDLAVVGYQALCRQLTSSGGFGGLSAVGARSVLQRYADAWFEAARRHNRGERAGFPRRKRLLVPIRFYNGTFRLDGDRRVRLPIAKGHPELWVRLARPLPYPSDQVRSVTLLHDAGRLWRSVTAAVPITHHDLDPDRVAGADLGIIHPYAVVTEDAGLLGSGRAVRAESYLHLQDQQARQAGAAGRAPKPGQRGSRRWRRHRARLRRVEARHRRRVHQAARQVIAFATAHQVGTLVVGDPAGTRAGCRTGGCGSGAAPTCSERYATRPSRPESGEPGGGAGDVLDLPGLPPTRPQATRAPVHLSAVHVPGHRDLVGATNIAAKLGGGHPSMAFTALVEHRRAGMVPARRDRRRHLHDRRRSCLASGHPTRILAGMGVARRTHPPLLCLARIKQRRPTGANAT

SEQ ID NO: 62605 - protein, 542 aa, unknown
  TnpB Polypeptide
MGESVSRNRKRPKGAPTHVRSVALRLTPAQRRLVDTRFHAGVRVYNACLREALDRGERMRADPGFACARDMAPGVDRTAAFHTVRDTHGFTSFALRTYASGLRCSWVRGQALSQEVQVLGARAFEAVNRWHCASGGRPRFKSARRGLKSLAAKDLHGSLRPALDPKGALLGLTWGAGTVLAAEQITSTGRRGREARAERVATEAVVAAGEVLSCRIVKTVIRPRATYRAQLVCAGHSPQRHPVGTGVVSLDLGPSTVAAVTAGTEGTLTGAGLTPLAAKLADTSPELRRAQRQADRQHRAGSPACFDYRGRHTNGRCEWQKRSTRSERTAAKVAELHRRRAGYRATSHGALVNTWLAVGPHLRTEKLNYVAWQKNYPRSVRDRAPGLLIEMARRKAASAGGELYEYSTWTTALSQTCVCGAQVKKELSLRTHRCGCGVTAQRDLFSAFLGLFVRPEPDVEDPEKMIDLLDVGQAYASWPAAHDMEWLPASKTAVARPKRRGQVRPSRRSVARIKQRRLPPLPTSDGVVRHEPVYLGPTAVAA

SEQ ID NO: 62606 - protein, 209 aa, unknown
  TnpB Polypeptide
VSVLYEYEAAIMPQAVNPEQVIGLDYKSDGLYMDSEGRCCGMPHYYRKNQKKLTKAQRKLKAKQLQSVNYRKQQKKIARIAKKAANQRKDYLHKKSTEIANRYDLVCVEDLSLRALANRGFGNGKATMDNGYGSFLTMLKYKLEERGKRLIRIEKWYASSKTCSRCGAVKMMPLSVRRYECNCGMSMDRDLNAAINIRNRGYEIYLKAA

SEQ ID NO: 62607 - protein, 367 aa, unknown
  TnpB Polypeptide
MKRNRAFKFRLYPTYEQEIFFSKTFGCCRFVYNKMLAERKESYESTGEPSSRTPAELKKEFPFLEEVDSFSLASEWMNLNKAYGNFFRDKKVGFPKFKSKKNDRKSYTIFNQGKRIEVLNNFIKLPKIRFVKCKVHRKIPDNWRIKSATISQTPTGKFYVSILCEYETEIEPIIPDRNNAIGIDYKSNGFGVTSEGEILSNHRYFRENQSKLSREQRRLSRKKKNSKNFNKQKMKVDLVHEHITNCRLDQAHQLSYLLAEKYDVVCLEDINLQNIAQSLNLGKSTNDNGFGMFRDFLKYKMGERGKYLIYIDKWDATSTVCSECGTYHKDIVNSLRVREWICPDCGIRHDRDINAAKNILRLGLERL

SEQ ID NO: 62608 - protein, 158 aa, Archaeon sp.
MYGQRRTSRTGHLLHNATKTIFAVAVQRRTAIVLENIEGIRSLYRRGNGQGRKYRGRMNGWSFGEAQRQIEYKARWVGLPVVRLSRRETRGSSVSCPRCGERLQSDKRLTRRGRVRFARSRPPIIEAQGRAGEAMKGNPTPTVIPGVDAPKLTQQTKG

SEQ ID NO: 62609 - protein, 430 aa, unknown
  TnpB Polypeptide
MRQVERHWIKKGHALYPICDDLTFKAKNLYNAGLYQIRQSIFERNKCQEEEKPSVLSWVGLVSQFRKEKQSDMLALPSKVSTNILKSLGSSISSYYQLLRCYHDKSNSSVTSKPQLPRYLHKTEGRYVVEFTSQTISKKRGLNGELILCPKDFSLVIPTKVKTPKSVRIVPKLKAFVIEVVYEVDVSPLKSTGNYAAIDLGIDNLASITFSNGVDPLVVKGSRLKSINQGYNRLIAKATSKFSANQKTSQSIHRLWRNRELKLQSELHKVTSFLSLYFDEMAIEKVFIGKNQGWKQEVSLGKKTNQTFTQIPFNTFISQLTYKCLARGIEVVEQEESYTSKASFVDQDEIPTYGESDKKTAFSGKRISRGLYKAKNGRVLNADVNGSYNILVKGLLSLGKTLNRKAVSFHTRSLKVWQSISNKALLSQYM

SEQ ID NO: 62610 - protein, 472 aa, unknown
  TnpB Polypeptide
MPRKRAADAPRVVHRTARCGLRVTAGQRRRLFGLLRSAGDVWCCVLELNAWRRRRQDLPLAGYQELCRELARSGPGTFGELDTTGARSVLRRYSDAWFAAAKRRRAGDTSARFPRRKRGLVPVRWYAGTFTLDGRVLRLPVARGCAPLVVRLDREPPYPARQVRSVTLLCEAGRLHVDVTAEVPVAAYPEGEGPDPGRVAGVDLGVIHPYAVAGPGGQLLLVSGRAIRAECRQHLREARARHRAVARRAPRPGQRGSRRWRQFRRHQRAVEARHRRRVRQAQHEAAKTVVGWAIQHRVGTLAVGDPRGVLGLAAGRRHNYRVRAWRVGHLIRALADKAEAAGIAVTLVDERGTSSTCPACARRIPKPAGRVFACPYCGYSGHRDLVAAVNIAARAGGGSIPAEMSGGITHRRAGMHLPGVHPARRDPRRRPHRGPPHGPLAGTGPPRLRLAGSRSRHREEPGIHPNNYGRVH

SEQ ID NO: 62611 - protein, 174 aa, Methanosarcina sp.
LQRRVSGKVIGSENRRKAVHKLAKLHELISTQRHDFQHNVSKKLISDNQAIAVETLNIKGMMKNHSRAQSTGDAGWYSFVLKLQYKAEWLGKTILKIGQWEPSSKTCNVCGYKYQDMTEEIREWQCPDCGTNHDRDINAAINIKKFALLGQEVEPVDSQRLLWRMKQEAPPSKA

SEQ ID NO: 62612 - protein, 421 aa, unknown
  TnpB Polypeptide
MSTYAVQSNVIRGLSKKQYNLLKEMCRYSNSLYNVALYNIRQHYFDTKMFLTYESNYHECKTNENYKLLQAGVAQQTMKVVDRSFKSFFNLLKKCKVGDYRYHDVKIPHYRKSGGLFNLVLSTNAIIIRGDYLMIPMSREFRVLHPEVKEIAIPFPKRLSDKTIKEVRILPCGNGRVFKIQYVYEVTEEPINLNKDNVISIDLGIDNLATCVSTIGTSFIMDGRKIKSINHQWNKEMSRLRSIAMKQNLKTTNRIQRITTKRNNQVNDCIKKTARYIIDYCIENDIGSLVVGYNADFKRNSNIGKVNNQNFVQIPLGDLRNQLSFLCWKYGIDYIEQEEAYTSKSSFLDKDVLPEYKPEQPYTGKFSGKRIHRGLYCSANGTIINADVNGAANIMRKCKQNVDFDKLCLGLLASPARIRLS

SEQ ID NO: 62613 - protein, 402 aa, Escherichia sp.
VKRLQAFKFQLRPGGQQEREMRRFVGACRFVFNRALARQNENHEVGNKYIPYGKMASWLVEWKNATETQWLKDAPSQPLQQSLKDLERAYKNFFRKRAAFPRFKKRGQNDVFRYPQGVKLDQENSRIFLPKLGWMRYRNSRQVTGVVKNVTVSQSCGKWYISIQTESEVSTPVHPSASMVGLDAGVAKLATLSDGTVFEPVNSFQKNQKKLARLQRQLSRKVKFSNNWQKQKRKIQRLHSCIANIRRDYLHKVTTAVSKNHAMIVIEDLKVSNMSKSAAGTVSQPGRNVRAKSGLNRSILDQGWYEMRRQLAYKQLWRGGQVLAVPPAYTSQRCAYCGHTAKENRLSQSKFRCQVCGYTANADVNGARNILAAGHAVLACGEMVQSGRPLKQEPTEMIQATA

SEQ ID NO: 62614 - protein, 373 aa, Halanaerobium sp.
MTGKKIIREKGYKFRLYPNKKQKILINKSVGCTRYVYNHFLSKAKEDKYKTYTEYSKQLTQLKRELMWLKEPDKFALQNALKDLDKAFNNFFSGKYDFPQFKSKKNIKNSYRTNKFVRKSGTTNIEIKDNKIKLPKLGWVKFSKSQKVKGKILNVTVTKTNTDKYFISIAVKEEIKKFPEVDKKIGIDLGLKEFAITSDGEKKANPRVLNKYEKKIARLNRSLARKEKGSNNWYKTKKKLAKVHEKMANIRLDFLHKFSTKLIEENQLIAVETLEVKNMLKNSNLAKSISDVSWSKFIEILTYKAKWYGRDLIKIDTFFASSQLCNNCGYKNEEVKDLKIRNWKCSECGKVHDRDINASKNILDEGLKMQKAS

SEQ ID NO: 62615 - protein, 299 aa, Halanaerobium sp.
MTGKKIIREKGYKFRLYPNKKQKILINKSVGCTRYVYNHFLSKAKEDKYKTYTEYSKQLTQLKRELMWLKEPDKFALQNALKDLDKAFNNFFSGKYDFPQFKSKKNIKNSYRTNKFVRKSGTTNIEIKDNKIKLPKLGWVKFSKSQKVKGKILNVTVTKTNTDKYFISIAVKEEIKKFPEVDKKIGIDLGLKEFAITSDGEKKANPRVLNKYEKKIARLNRSLARKEKGSNNWYKTKKKLAKVHEKMANIRLDFLHKFSTKLIEENQLIAVETLEVKNMLKNSNFTKTFNLNYARKVLV

SEQ ID NO: 62616 - protein, 778 aa, Actinopolyspora sp.
VQLRYRYRIYPTPGQRRALAQAFGNARVVFNDAVRARQTAHAAGEKFPSGTQLQKRLITDAKKTPERAWLANAQHSMLQQAIRDCDQAYKNFFDSLRGARVGRKVGAPRFKSRKDNRQAIRFQPDGFRVLDTGKLRVSKIGDVPVAWSRDLPSAPSSVTVVKTADGRYFASFVVEAGDETLPDAVDADGNEVEIGLDLGLSAFAVDQHGRVIDNPRFLRRAERKLKRLQRALSRKQRGSNNRRKARKKLARAHAKVSDTRQDWLHQATTSIVRENQTIVLEDLAVSGLARTRLAKSVHDASWGTFRRLLEEKAARYGRELVIIDRWLPTSQTCSDCGRIDGTKPLSVRTWSCPCGAAHDRDRNAARTILAAGRAERQNACGPDVRPHTGADGDEAGTQRSAAPTQQRITAPQGGEDVNGKHVPDGSSQPSGPDSGNEPKQPPLRPDRPQDHGPPSGPGSQGPPNGPGSQPNQPFGPGSQPDQPSPPDSGPSAPRDSGTGRQPHTDLTDRVGSPETPGDGPTRPSPPNGPEVPHSPEPDSPDPSGPDGPGQSRIDSPEDGTPEPGGRHHDDGDQGPGDKGDEEYRRRVETRYGTSWDEAVADLRADHPELDHLPDEEAMAVRRYVGGDASTINDTLRNGDAIDREYMSREVEHLREGLDKLPGHTPTPDNPVVYRDLHVSPEELPKLLERYTPGETVEEAGFTSASKEIPPEMFGDQPGFKRVEMIIDEPEHAADLEKINPDEREVLWKNDNQFTVNDVDQAPDGTWQIRLTDVGPKGE

SEQ ID NO: 62617 - protein, 363 aa, Paenibacillus sp.
MHKAFKFRLYPTPEQAAIINKTIGCVRFVFNHFLARRKDVYEQERKTLGYTACSAELTLLKCEKEWLKEADSTALQRGLRALDEAYRAFFREQNGYPKFKNRRNPNQCYTSVNNGAIRIEGNRIQLPKLGWIRYAKSRDIEGRILSATIRRNPSGKTFVSVLCETESQPLPESERAVGVDLGVKAFAVLSDGETVANPKPLTKLEKRLGKAQRTLSRRKTGGSNREKARIQVARLHERVANARNDFLHKLSTRLIRENQVICLEDLQVENLIKNHKLARSIADASWATFRAMLTYKAKWYGRTVSIIGKSFPSSQLCSCCGHRNPDVKRLNVREWTCPECAIHHDRDVNAAQNILEEGLRLLA

SEQ ID NO: 62618 - protein, 434 aa, unknown
  TnpB Polypeptide
MGSYEAVKVRLDPTPKQERLMASHAGAARFAYNAGLAHVKEALDSGDPVDLSHYGLRRWWNANKDELAVNRDTGVVWWSQNSKESYNMALHGLARGFSSWAKSRKGQRKGKRVGFPKFKSKNSVASFAYSTGFTAPKSGDPYGVKLPRIGRVHCMENVYERVNGAHLVRITVSRRAGCWYASLTVEREPRASGTPKGGAVGVDLGVKNLATLSDGAVVPNPRALNAKLRMLRKAQQALSRKIVGSTRRERARERVARLHARVVDVRADAIHKATAMIANTYSIVCIEDLNVSGMVKNRHLARNLSDAALGEFRRQLEYKTARTGAALRVVDRWFPSSKTCSNCGVVKAKLSLSERVFNCDACGASMDRDLNAAINIQVAGSAPETLNARGEDVSRANVLLGNADLCEARTKRARKSAVRLGAGLGNEVIQPRIN

SEQ ID NO: 62619 - protein, 445 aa, unknown
  TnpB Polypeptide
MPDFLSSGRTGRSRKEKLLQYNVVTSYRSYEERVKAANGESSKYVSQGWKRTVNASPPSYGKDYVNLGTVDRAYACIENDPFADGEIVLRMVIQGTWHRLIFDFDNKRFTEGKVTLPVIKVESGQPVFIFTVVTDNPVVQFSGDYTIGVDVGINNYATVVVRDTKTGRIVYETTLSQRVHSLWNSVRASQQQVRDLKKKAATLLRYRQARMAALDEAQFHREAASRKKRELAILAAQEIAYLSHVWGNAVVAVEDLGWIRNTMSSGRWNRGALVQWLTHYVSQNGGWVVAVNPSNTSQLCHKCGAKVTHPTRKLSVCPEHGVMDRDVNAAANIADRVVPRVVKARVTRAKNRKLGPQRTLKTPVARNSLKYPGRDRTKNKPTPKRKNHRRTVKEVILPVRPARAQAQRLEVRVLADQGARGALGTSTAALRQGNMAYKSRLGSLI

SEQ ID NO: 62620 - protein, 377 aa, unknown
  TnpB Polypeptide
VDKWYAAIENNPFCDGEIVLKMVIQGAWHRLIFDFDNTRFTEGKVTLPLIKVQDGQPLFFFTVVTDNPVIQFSGDYTIGVDVGINNYATAVVRDVKTGRIVHETTLSQRVHSLWNSVRASELQVRRLRKKATTILGDRQGHMSALDEAQLHREAASRKRRELAILAAQEIADLSHVWGNAVVAVEDLSWVINTAQHGRWNRGVLIQWLTHYMSQNGGWVVAVNAANTSQLCHKCGSKVTHPTHELSVCAEHGVMDRDVNAATNIAARAVPLVAKARVTRAKNRKLRPQQPLKTPVARNSLKYPGRDRTKSKPTAKRKKRHLVSKGVILPVCPARAQAPCLTARVLADQGTTCSALGTVQAALKQGNIVYERRLYIPV

SEQ ID NO: 62621 - protein, 434 aa, unknown
  TnpB Polypeptide
MLEAVKVALDPTPSQERRLLSHAGGARFAYNAMLARVKAAFDAGESIDQSFYALRKQWNMDKDALAVCDDGEPWWAENSKEAYSYGLESLAKGLSNWSKSRKGDRRGRRVGFPKFKSKSKTTPRFAYTAGGFGLIGGDPKALKLPRIGRVHCMEDVTKRVNGARVLRMTVLMRAGRWYASLTVERDDASVTRKAPRGGAVGVDLGVKNLATLSDGTVVDNPRHLAASERNLKRVQQALSRKTKGSNRRAKAKATVARIHARVANQRQDGLHKLTTWLTNKYSDISIEDLHVAGMVKNRHLAKSVSDAAFGEFRRQLEYKTARSGTALHVVDRWYRSSQTCSKCGSVKAKLSLAERTYRCDSCGLTMDRDLNAAINICVAGSAPETLNARGGDVRRSDLVSGNADPGEARTKRAQKSAVRLGAGLGNEAIQPRII

SEQ ID NO: 62622 - protein, 491 aa, unknown
  TnpB Polypeptide
MAELASEVRDISAYATYVVRNDVALGRRLAAVTTSVPADAGRQAGVAMPDFLVTGKSGRSRKEKLLQYNVVAAYRSYEERVKVANGESSKYVSQGWKRTVNVSPPSYGEDYVNLGAVDGAYARIENDPFTDGEIILKMVIQGAWYRLIFNFDNKRFREGKITLPLVKAQDGQPVFIFTVVTDNPVVQFSGDYVIGVDVGINNYATVVVRDVKTGRIVYETTLSQRVQSLWNSVRASERQVRYLRKKAATMLGDRQARMSALDEAQLHREAASRKKRELAILAAQEIAHLSHLWENAVVAVEDLGWISNTMQNGRWNRGALMQWLTHYVSQNGGWVVAVNPSNTSQLCHKCGARVSHPTHEVSVCPEHGVMGRDVNAAANIAARAVPRVAKARVTRAKNRKLGPQAPLKTPPARVSLKYPGLDRTKNVPTPKMGTRRTEGVKLPLSPARVQAPCLEARVLADQSARGALGTSVATIKQGASVDYEYPLCIPI

SEQ ID NO: 62623 - protein, 432 aa, unknown
  TnpB Polypeptide
MRRVDKIINDPEYKALLNNYWNYGINWWKPVDVQLLKIKNDSWFNIKKSEDTTDNLRFNLDTKKVTNFEPIKSIKIALFPNREQKSILLKWMDTYIDMQNEVNRFSKNLLFRKKKLILNWRDLRDTHLKNIKNKIKNKTNINAHCLDKAIKEMCGKYKSAISNLGNTKFRMRYIKKTKKVKTIKFEKISIAKDKKSFCPAVFGKIFETNDNYLTNVSSDFTIQYNYNSDRFFLYYVTDVTVKVSKKNKQIGLDPGIRTFLTGYSNNHCLKIGDNLYDTIKGHIKKINEINKTELKPSIKKKIERKQYSKITNKVDDLHWKTIKYLTDNYKDISLGNMSTKQICSGFLNPYVKRVGTSMRLYVFKERLKYKCFVCGVNYQEVNERHTSRYCSNCGNGYNFRLTTEKEYGCRTCKIKIDRDINGAKNITIKGTK

SEQ ID NO: 62624 - protein, 410 aa, Actinoplanes sp.
LLAESGPGTFGELDTTGARSVLRRYSDAWFSAAARRRAGAVEVRFPRRRRALMPVRWYHGTFTLIGRTLRLPVARGRPPLVVRLKREMPYPPGSMRSVTLLFTDGRLCIDVTAELPLITHPAARAPDPQRVAGIDLGIIHPFAVAGPGGEALLVSGRAIRAEHRLHLADTKQRSRPVAARAPRRGQRGSRRWRKTRRRARLVEGRHKRRVRQALHEAAKTVIGWAVERRVGTLTVGDPRGVLNLNAGRRHNLRLRQWQIGRTLQILQDKAALAGIRVHLVDERGSSSTCPACRKRIPKPSGRNLSCRHCQFAGHRDLAAAFTIATRTPGGATTTPTRVLGGVVTHRRAGRHLPGAATARRDPRRRPPRTAAGSLGRRRPAPSQGSRSLTPVSGDPQHHRTNPGERSWTPL

SEQ ID NO: 62625 - protein, 447 aa, Acidilobales sp.
LRLLPEKHEEKLLLNIGLASVRLWNKLNYEKRQLFFKNDLTLEKRVEINRRYYHKYKNFLGVNAGQIINKNEETWDSFFELLKMKKQGRLPPYIRKISPPGYWKDKITGEKKIYILIRNDRYYLEPINKGEGRLILKDFKLSIRYVGRIKWEGKQGRLEIIYEAGRWFAYIPIEVGEKPSKSNPQGYIRSNYRDEKDKIFNPRSIRQKDPVGDKKAFIDIGLNNLFAIVVSDGSALLVKGGVIKSEYYWWKREISTYQAVRDLLKSAGIHRWKDYHEKYLRALYKRDERLRHLYRTAIRFLAETLWSREVEKIYIGYPIMLSQNNGNEYNTNIWWYRKIILWMIDVFIEYGIDIEIISEDYTSQKCSICEEIHRDGRIYRGLYICRKTNKKINADINAALNIAKRLGYKITITRKIESYLVSHNGVKPLIPHQRANTRDPEVRNLAL

SEQ ID NO: 62626 - protein, 482 aa, unknown
  TnpB Polypeptide
MKNDPDYIVRTAMTRIDFYDGAQETLIALGKILQRLRNDDYIALLEAERTTTKITAKQRRDYLLSHGLNMRYADSIIMSNNDQLALAKRTYEENVKSWEYEKQRIEKTLKNTNISGYRKDQYLKQHESLERKIYQATAKHPSVCFGGAKLFKQYTQASQRGELSDELEANYYNKRLFLEFVGQSGYIGGNMMIRINPENWEVTLLLTPELMKQLGLQSRTVVLGKIDVRNKKYRKNLVYCLENRVSTTYAFVWSMKKQCFRLHISTRINKSSLPTRKAIDKNRFCGLDQNNGFITATIIDRHGNPIDQKNFDHGSANDLMGIVHELRDWCAQHGCFKIAIEDLKSLWKHKRRSASRARGVNRVVNRIPHGEFKRLLENMGEEHGFEIVEVNPYGTSKNTIQWSESKFGLTIHEKASYLIARRASGFSLERKLRHHTRGCGGAGSYKGVMMTVMNDEPMITHCSSAHNPDRLKSNHLFNVLGT

SEQ ID NO: 62627 - protein, 405 aa, unknown
  TnpB Polypeptide
MKRGYKVRLYPNKAQRDALAVTFGCVRWIYNAGLELCQTRFKETGKQPIYHELQNVFMPQAKADHPWLKEANSQSLQVSLQNLAAAFDAFFAKAARYPRFKSKRSVQAAAYYSSTYVSERRDNGWGKVRIPKIGHIRARLHREVKGAVKHITVTLDRAGRYWAVLQVDDGVDVTPVAQADTALGIDLGLRHFATLSTGEKIDNPRHLRRAEKNLKRKYQQHARKKAGSKNKEKARLKLARAHARIADARKDFLHNLSRRLVNENQAIIVEDLNRRGMMKNRSLAKSIADAGWFAFAAMLAYKATADGKPFVKVGRKFPSTRTCHDCKHVRDALPMGDKEWNCPACGTVHDRDLNAALNIRDEGLRLMAEVCPATASGRRGRRWAPSRLAQRRLKEEKDRIGGSGH

SEQ ID NO: 62628 - protein, 543 aa, Synechococcales sp.
  misc_feature (274)..(350): Xaa can be any naturally occurring amino acid
VAVLGYKPLPSGRLFIRELTNHVPEQLGHGPAPSGGGSMKLCQLVGSQAHLESLSPGHRARLPLQCGDMKQRYRYRLYPHPHQQVALAKAFGCARVVWNDALAKSRELYAAGEKTSYPVLAKLCITQAKQTPERSWLSGPSNVVLQQSVRDLDQAFRNWWVSLSGKRKGSKVKPPRFKKRRGAQSIRFMSHVFRTGERSLTLSKIGTIPIEWSRDLPSDPSSVTVIRDAAGRYFASFVVEVEPKPLPANGKAVGIDLGLASLAVTSAGEKIAPXXXXXXXXXXXXXXXXXXXXXXXXXXXXXXXXXXXXXXXXXXXXXXXXXXXXXXXXXXXXXXXXXXXXXXXXXXXXXRSALKRLRRLQRNLKHKQKGSNRLAAAKRQVAKLHATISDKRLDFLHQLSTRIIRENQMVVLENLNVSGMLKNKNLARSIADAGWRQFRTLLEFKAEQYGRQVVVINRWLPTSQVCSTCGHNDGKKELSIREWQCPSCGTVHDRDINAAKNILAAGLAESQNGRGAAHKSTALVAAGCEAPTHPIAEAPSCAA

SEQ ID NO: 62629 - protein, 303 aa, unknown
  TnpB Polypeptide
VTTTTTSTSTSWGRRRPSRALAPTTPPKRSFFETVEAADQEVSPPGYWGTKPTVATCGPTSATTPTRSVSERSRLEVPIGSQPKAEYGFGRAERLRVAVRGEPHWHGDQGRLHLTYDDIDETYRAHQPVTVSDEAQATPTGTDVAALDIGANVLVACTTAAGDQYCYSGQEPFRQFRETTERIADAKAKLPDGQQTSTRIQRLYRKRSRRRDHAVNALLRDLVQRLYDDGVETIYHGDLTGVPVSTGRSRRTSKRVRSGHTGSVSISSRTSAKSAGSTWQQRPKRGPPKRVRVRRARADAPPS

SEQ ID NO: 62630 - protein, 373 aa, unknown
  TnpB Polypeptide
MNTITRAHKIRLNPTPEQEQYFRKAAGIKRFVYNWGLARWKAMKADSVAVYGMMAAKKDFNAIKRVEYPWVMDVAKDVAEGAFADLGAGLKNYFDWKNGKRTGRKVGFPTFKSKKNTRQSFRLNNDKFRVDGHTIVMPKLGPVNMAEPLRFTGKIMGAVVSKGSDWWFVSITVQIERPTPRRFPKQSTGVDVGIKALATLSDGRTFENQKPLRRQIRKVRKLNRSLSRRTQGSNRWLQAKQKLARLHDRIANQRADAHHKASHTIASTYAIIGIEDMHVAGLVKNHRLSLALSDVGLGEFLRQIAYKSDAFGGTAVTVGRFYASSKTCHTCGHINQTLVLRDRTWTCGSCGVLHQRDWNAAQNIEREALRLIA

SEQ ID NO: 62631 - protein, 334 aa, Halomarina sp.
VISGDGFKLDKKGGQTVLSLSKLADIPIRLHRAIPDDAKLKQVTVKKEPTGEWFATFGVEVDRDLPEKPDELTETVGIDVGILKYAHDTDGHAVESLDLSDERERLEREQRKLSRKQHGSNNYETQRRRVAECHADLRRKRRDFLHKLSTYYAREYDLVAVEDLNVSGMMESPSNSRNTASAAWRTFLSLLEYKCERAGTHFVAVAPAGTTKECAACGVSTDKPLWVREHSCPSCGFTADRDWNAAWNILSRGIKQLGAGRSESTSPEISDFWLANETYRVSSTPVETALPTGTTTVPAKRVRQNLWFWLAARHSLATSWKQEAPPARSERRQP

SEQ ID NO: 62632 - protein, 497 aa, unknown
  TnpB Polypeptide
MMNSKNSSATSFKNSDPRTICQTFSYQTRLLECGENFSILENYASMYGQIERFLLEDLKLHDLNVLKQSYLVRHGITARQFNAIRVSLEGKIESAKQCLIANIAQLKEKVETLSKKLPKIKKPLVKHEKKRKLVRMQDKLKLIEENLKNDKISICFGGKKLFHAQFSLEENGYASHEEWLADWQAARNSEFFCLGSKDETSGNQSCVATIDEGGKITLRLRLPNALVKKHGKYVIFSDVFFAYGHKEILQALISSQAVSYRFKKDEKGWRVFASCKQKSAPIVTNQERGAIGIDINANHIALVEIDHNGNPIYKETIPLNTYGKTKNQAKALIGDACKKIVILAKEKNKPIVLEQLDFTKKKTALKEGTLKYARMLSSFSYSSIVQGITFKAFREGVAVFFVNPAMTSIIGKIKFAMRYGMSHHHAAALCIARRYYRFSEAPSKSPMKVCYRNIHVTCPSPVRKRGQHVWKWWKEAMRKLQTVLAELRRANRSPCPH

SEQ ID NO: 62633 - protein, 297 aa, Westiellopsis sp.
VLVLEYKVKSKRQQYQAIDEAIRTTQFIRNKAIRYWMDASKEAKINKIALNNYSTALRKEFKFVEELNSMACQSATERAWSAIDRFYSNCKAKKSGRKGFPRFQKDNRSVEYKTSGWSLHPIKRRITFTDKKGIGEVKLLGKWDIHRYPVKSIKRVRLVRKADGYYCQFCLDVPKEVIDPDCLTNWREIGLDVGLEYFYSDSNGHHEPNPRFLRKAEKSIKHAQRQIYKKEKGKNQRRKARQRYAKKHLKVSRQRNEHAKRLARNVCKVNALVAYEDLKVKNMVKNHCLAKSINDAA

SEQ ID NO: 62634 - protein, 455 aa, Westiellopsis sp.
LLTNYVYKLRPNTGQNLKMSSWVDMLRSHYNWCLNDRLTQYSQQHIQGEYCDIRTKAHACPLTCFVSNNGATGEPWKDSKQKNPRRGAGDIQITALPELKKARPWYAQIDSTVLQQNVKRLDVAYKNFFEGRGFPKFKNRSNFTSFTYAMGVKVQGRKIYLPKLGWMRFYNSRSIPNGFTIKAATIRRRQDGWYVSIRIEDKTLPNYVAKPLTEVNKIIGCDLGITKLVHLSDNYQIENPKFSTNKKTQRTFKIRQRRISKKFKGSSNRKKAAKRVGLLHNKIADKRQAYQWKTANKIVNINVDAIAVENLNVSGMKRRCKPKIDEKTGRFLKNGQSRKKGLNRSISDASWAELILKIEYLAAKQGKVVIKINPKHSSQKCRNCGYIDESNRDGEKFICTQCGYMTNADIGAAKTIRDRAFSIVRGDSSELTRPKNRKETSARPRGKRVEPGNLY

SEQ ID NO: 62635 - protein, 528 aa, unknown
  TnpB Polypeptide
MKRAKTSCFLLELPLSVPPAQARRVRAHLEAARLLYNTLLGEARARLTRMRNDPTWKAACDLPRSHTQQRAAAFSCLRSRYGFSEYAMHAYAKGARCTWIAEHIDSTMAQTLASRAYAAVNRLTKGEAKHVRFKSKGRGIDSVEGKRNDTGMRFVLQGPEQGNAGYLLWGQDHLAAIIDWGDPVIKHGLDHRIKYARLVRRKASSPQAKGADSTGHRYSVQLVLEGAPYQKKKHRPGSDTIGLDIGPSSLAIFPREGRPQLRTFCEELRPDARKKRRLQRKMDRQRRANNPENYDEKGRIKKQGKKRLQWKTSRRSLQTWRQYATAERKLAAHRKSLHGKLVNEIVQVGNHIQIEKTSYKGWQKQFGKSVELRAPGMFVAHLKRIVAKTGGTLCEVPTFHTKLSQYCHGCHTYVKKPLSQRWHHCPCGIGPVQRDVYSAFLLAYMQPPEPIPSITHDEWAGVESRLKAVVEVLQQRAKEGQSLPQSFGIPGARARRPKSPQPNRQELAYLYRRGRLEALGLAQEPPLL

SEQ ID NO: 62636 - protein, 528 aa, Hydrogenobacter sp.
MKDRVVVSYELTLPQNIYPKLDRLFSEFKWNVRRTLSSLWNEETIEKLKGKGSSVGILKSEVMRPSHLPSRFHRNVLELSGQIVRSQIERKRIYEYILEKPCRAIISENILAKELKTSPLFVLNIQRQVRKGLRRGKVEKDYLRAVRPSFSGNVVITSADDSLCRGQMRKLKTDGKFIEFEIKVPDGRGWRWIKVQKLIPDRLKKDIFRAKGIGSPLIKRVFLKSGYTIYKLVIPLELEVEVQKEADRMFAIDLSPSENRLGVGTVVAKEGHSKPIFFRASKMIKKLERLLKEISNLERKIDRIADQIHSTGSEEHREKLKGRLRHLYAEQRLRWRKFKELRKQVLEVFVNLVVEHARAYGCQAIAIEALKFSSSPRWKNPKMRRYFETWFYSKFSERLAHKAQRRGIRVIEVPAFYTSQVCHVCGRRGRAKGLEFECECGSFDRDYNASVNIGIRALEWVSGSKSEPYRGEDSPARFPFPQGTVHLKGRALLSILPPAQLLSYLKLVETSYLKLSSLSKYLQVDKYG

SEQ ID NO: 62637 - protein, 475 aa, Hydrogenobacter sp.
LGAKTLHKQFKIISKEVALMPKLLRCLTIALTDVPEEYKIALGYLTYHSGRLYNQALYLLKNKLARVNMFDLYNKLNSSIHLKALQSRSAQIVLDQLVRAYRNWFEYLKNPQKFKGQEIKPPKFRKKTKPHRTLTYDRTGFKIVGTKIRLSLSKDLRKFLKEKHDIHIKYLWIETGLELREELIRNIQIVPKGNEFELHIVYSAEKETKEQEGNRAMVIDPNSENFMVIGIDGVKTPYIVDGRGLKSLLRKYLKKIAKLQSLKDNLKNKRLPYHRVEERINKLWTKVKRLLRHYAHTVSNLILELAIKHRVKEIWIGNSVKNKNRESNLNSIADQIWSLLPHGKVKEYLEYKAEPYGIAARYIDERYTSGVDSTLECGVCKENYTPEGRIKRGLFKTSRGYLNADVNAVRNMLKKLERFDQITAVAKPVRVRIFKSISVSSLYGQIGGRSRGSVNLPVVVRDTSGVQTHHEAPHL

SEQ ID NO: 62638 - protein, 498 aa, Hydrogenobacter sp.
MLSSKRVLTIRVGGKERKRKVRTLLLDLAHFRNMLIILITKYKELYGMYPLHQSILYGLVAKTYTGKYRQEFEKVLKNIESNPKLGELLKKLKTQKERIDNPHYVQYVIRQVIRDFKSFFKAVENFRANPERFKEAPRPPKPKKLRYLMNFSVEGNANTFKQEGDKLIIKLRNGKYLKVKLPKDFSLRVSSVRLKLFGNDLYVDLVYEQEVEARNPVGEYTAGIDIGLDEMLSLVSENPNLKSFVISGKEIKAFNQWFNKERAKLRSQMDCLKNEIKRGDYKDTKKLERKLRELEIKEKVLSAHRKRWLDNNLHKIARKLLDLLYETGHKVIYIGKNALESKNGVNLGKRTNQNFVSIPFRRLVELIKYKAQQYGIEVVEVDESYTSKTSPFANVMEIQRTKNKELCYGERMGNLFKDKVLNKVFHADLVGALNIMRVGAKLLRLSFYENLKILFIKLCNPLRLKLIDLFYKVSSESLWIGGSRQGVSVPAGWMEKLG

SEQ ID NO: 62639 - protein, 363 aa, Hydrogenobacter sp.
MQAKEIKRSLLFSLEFANAGKKKFLDQLWEEYKNALQYFVDKGFDERSLPSYEHVKTYSHKTWLSKRYLGCALLQAVDILKSVFQRKKKVNKPEVKKVSLKLDKRFYRLERGNNSFNFWFLLRNPKDKNWVHFPVKNYRYAQKYFDEWKLSSGMELLKRDGKWFLKLTFKKEVVLEERGPKGIDIGYRKLITLSDGQVFGREIKEIIEKKILPKKQGSKRFKRVLDYLKTEVNRVLKQVIDGSFSPVLEKLKNLKRGKRGKWRRDINRRFNYWMYGYVLRRIKELCEVAGVQWHIVPASYTSRTCPQCGYEDRANRDGEWFHCLNCGYENDADVVGAVNILWRFGREPIVPYPAKPPSVSLNL

SEQ ID NO: 62640 - protein, 376 aa, Hydrogenobacter sp.
LYLKINVGSREWIYAKVQRTVKREKDKWINFISSLLQAESTNEYFPYTVEIKLKDGEFYAFVSYQEKLPELRITKESGVLSIDLNASPLHIAYAEVDRKENLNSYGEITLSEILNKDRNQIKQILWETAHRIIELAKEKSKAIAIEKLNKIDKGQRGDGKGKLRKRLHSWVYKGLIEKIITLAKRNGIQVLQVNPAYTSVIGALKYCPIYNITKDVAGAYVIGRRALGFKEKAPKNYKELLKDKEFLTYSLERLKGMHEQTKARYDKETNKYKRKAIKRELSSIRKWITLISQSLKSEPERGLRPLYGTSLSSYHFWQVLKVALVISLLGKSFIRDFSPLRRIVVSKDWKGVASQVSSLSAWAGVQSVVNQYFGIF

SEQ ID NO: 62641 - protein, 408 aa, unknown
  TnpB Polypeptide
MIRTHVFRCTFPKAEADTLNRESGRVYTGTLVRHYRCYRKSGHWLSMYAGKRVEDGVGGPTTLHAHSRDAAQEGFYKACKTAKALRQAGVTDARYPHRRKWFRTSTWKKTGIRVKEGALMLARARGLDPVRATLPAPLAVLPASSFSEVRLVWDRAARHYTWHVVVDDGITSPPTTATGVAGVDLGEIHAAAMTDGVSAAVVSCRALRSTIQYTNKRVASIQTKQSRRVKGSSRWKRLQRRKNRFLAQQKRRERDLVHKASRAVVGWAEDHGVGTLAIGNVRDVADGKRLNRLVQQKVSQWPHGTMRRYINYKAEAAGITVDDTVDERDTTKTCPGCGTRTKPKGRVYACRACGFRGIRDLVGAANILSRKMMGDVGRVMPPAQSKYLRPFVRRSSRLDTAHVARGVA

SEQ ID NO: 62642 - protein, 601 aa, Chlamydiae sp.
MFLFIYYYLNVFRIVYFKYLLLCLMLNSSKLALLKKTLIFPHKHLENGQTQESLNLLKSKTQGQDYLITNASSTLSVQTNSLVPLREKEKEEFVMQESLPIIKKKISLDKQNTLVNDTLITKSSQILPQVLTGKEKVCKPFWTESSKNLSKNLWLPTKIDYQDSDLTLFNGSAINLIANSWFSTNIQTKTQNSTSHKMYYPLLTSSQQKIMECDLLCTEKKEILRSKKIKIYPTTSQKKLLNIWFGSCRWVYNQCVNYINATKKNKAISEKILRDKFINGDKKAAFSQNVPFDVRDEAMRDAIKNMKSNYAKQKKSNKKYYFQLKFKKKKNNVQSITIRQKHFNRKTGMYSWISQLKMSEKIKTMETDFRILKDLVGDYFICLVNKKNSQSESQACKFSKTSMNGVISLDPGVRTFLTGYDPVRKNILNLGTNVQTISEKHQKTIDILSKKIQTTKDSKKKSRYNKALRKIRRKVKNQVKDMHHKISKFLCTNYKTIIIPEFRVKDMVSTENRKLQKKTVRGMLSMSHFMFKQILLAKSEQYKYCKVVLVTEEYTSQTCGNCGTLHKTLGGSKNFNCSECKYPTTDRDVNGARNIMIKTIQ

SEQ ID NO: 62643 - protein, 456 aa, Aphanothece sp.
MPIVTRRYTFRLYPNVAQTSKLFEARRLHCYLYNAAISHRKTEYERFGKSVTYLQQQNVLPAFKEDWPEYKELHSQTLQATLKRVDLSYNRFFKGLSKRPKFQSIRNYSGWTYPAYSGWKALTNGKHGQVVLNDLGINIRIRGQVHQWGTPTTLTIIYKPYLNQWYASFTVNVEVPNSKFGSESTLSYQSILAVDLGTQTALTGYDGEDFIELENPRFVRQSEEKVQRLSKKLRRKRSPNHNKKIPASKRWKKARKQVSKLQRKVANQRKNWQHQVTREIASRYDIVVTEKLETKNMTRKAKKGSKRKHQKPRLNRSILDVGFGTLNQQITYKVQSKGGLVIFLPTKKIKPSQRCPQCGTVHKHWADLSNRYHICDNCHFEKGRDKSSVMVMYNVVTNQQTGLGTRLEIVDLTISTSKTRKHTGSMKQMGEMKRQKSRQNNKSLGDLETPTSQKSG

SEQ ID NO: 62644 - protein, 414 aa, Aphanothece sp.
MYATQKNQLKRLSQREFKALTALCRLSKNLFNVALYECRQYFFTERRRLTYESNYHICKSNENYRLLNTDIAQQTMKIVDRSMRSFLGLREAISIGRCDQRPQLPKYLPKEGYFPLIIPRIKLKDGIFEIPMSREFKKEHGEVKIQLPERLKNKNIKEVRIHPKYSARWFEIEYIYEDEKIETSVNSDSAIAIDLGVDNLAACFDTDGHQFLIDGKRLKSINQWYNKRNAELQSEGDKQGIKRLTNKQAQLNQWRNDSIRDYLNKSARIIINHCLIYQIGKLVVGYNPGIKQEINIGRSNNQNFVQIPFWQLRQKLKAMCSRYGIEYFEQEESYSSKASFFDRDEIPVYNADNPGKYKFSGKRIKRGLYRTKDKHLVCADINGSANILVKSKHRLSFERVSSGFLANPLRTYVS

SEQ ID NO: 62645 - protein, 380 aa, unknown
  TnpB Polypeptide
MYRAIKYELRPNSTQRSLISRTCGCCRFVYNNALAFARDNKVSNYELIKRLPQLKTENEWLKEVPSQALQQSIIDLGKAFKNKWKGHNGWPVFHRKGNNEAFRIPVPCRIDYSRWRIDIPKLGSVKFYKDKIIDQSTIRSYTVSMTTTGRYYISVLYEAPDRDKLNNGQAVGIDVGIKSFAVCSDGVVFENQKRYIGELRHLRILQRTMSRRYDRSRNIYDNDGRKIGENGPQSKNWYKAKQAVAKCHERIRNQRRDYLNKVSSEIASKYSIVCVENLNVKGMVRNHHLAKAIADCGWSEFRRMLQYKCDTVIEVDRFFASSQTCGSCGYKNTKVKNLNVREWTCPQCGTHHDRDGNAAENILREGLSRYSISTPLGVLG

SEQ ID NO: 62646 - protein, 238 aa, Photorhabdus sp.
MQTKTLSVRVKDKHVKLLRQMAYEVNQVFNLANEITRKAYSHAGEFGAQKPQWLSAFDVQKQTAGIQKEKGWIIGSATVQEVIAEHGKARKQFKRAKLRWRVSGGAKRSLGWIPFKSRAATWHNGQIKFAGHFFRVWDSYGLSGYKFRAGSFSEDARGRWYFNICVQVECEATKGTGAVGIDLGLKETAMPTEGAPLAADRFYRELSASLGKAQQANKKSRVKAIHAKIKKPPQRCNP

SEQ ID NO: 62647 - protein, 445 aa, Micromonospora sp.
LRSAGDVWACVLEINTWRRQRRSAPLAGYQELCRELSASGPGTFGELDTTGARSVLRRFSDAWFSAAKRRREGDVSAKFPRRRRRLMPVRWHHGTFTIDGHRVRIPATRSAAPLWVRLARDLPYPVEQVRSITLLCEGGRLFLDVTAEVPVAVYPPGEGPDPARTAGVDVGIIHPYAVAGPDGEGLLVSGRAVRAEHRMHLADTKSRRRAVAQRTPKPGQEGSRRWRQYRRRARRVEGRHRRRVRQAQHEAARTVVSWAVRQRVGVLHVGDPRGVLNIDSGRRHNLRLRQWQIGRLLQILTDKAVLAGITVHLVDERGTSSTCPACQLRVPKPRGRSLSCPNCAFSGHRDLVAAATIATRTPGGGPTTPPAAVVLPVVVTHRRAGRHLPGAGRSRRDPRRPHRAARGSVGPRRPAPPPTGGESLAHPARIHNNHRTPGERPWTPH

SEQ ID NO: 62648 - protein, 387 aa, Actinomadura sp.
MKLVVQVKLLPTAVQAAALAETLHACNTAANQVSRVAFDTGMTRNFDLRKATYAGLREAGIGSQAAQHVIKKVADAYTTLHANIRARNLGRPGSRRRARAQSKPIMFRADAAQPFDQRNLSLAVDAGTVSIWTTRGRCKDIAFACSTQTRKTLAESPRGESDLLYRDGKWLLLITVDATEQPLNTDPGGFVGVDLGIANIATTSSGYRAAGRGLNRHRARQAALRRKLQHKRTKAAKRVLKRQRRRERRRATDINHCVSKRIVAEAERTGYGIALEDLTGIRSRVRHRKPQRAAFHSWAFAQLASFIRYKARRAGIPVVLVDPAHTSQRCADCGHVSHLNRVSQALFVCQDCGVVAHADRNASRNIAHRAGVAWDAGRQSSAPAPDP

SEQ ID NO: 62649 - protein, 384 aa, unknown
  TnpB Polypeptide
MILTYKYRLLPTKRQHVGLLSILESQRQLYNAALEERIGFYKKTGKTRTYIDQCKGLSEWRQSDLDASATPSNLQRWTLKRLDDAFNGFFRRVKNKNGKAGFPRFRGFGWWSSFGFKELGGLRFDGKRLRFKGLPGVLKVHLHRQLPKNSEIKTCVFTKNDKGWSICLQVEVRCRPSRVSDRSIGIDVGISHLATLSTGDHIPNARIAKRSEHRLRLKQRALARCKRNSKRRQKIRRQVTRHYSKIKNTRRTYLHQVSRKLVNNYDLIAVEKLNIKGLVQGRLAYSVYDASWGILNKMLCYKAERAGARYIEVDPKYTSQDCSKCGTRVPKALSVRVHECTSCGVVLDRDVNAARNVLHRAVVSPEVLNVIQQNKRVPRNVSLG

SEQ ID NO: 62650 - protein, 390 aa, unknown
  TnpB Polypeptide
VLKGFKVQLRPSKEQEVLCDKHVGCCRKVYNYFLDVRKKYYEEFGESFPLNECLRELTDLKKQLPYLQEVNTPSLQQVMRDQEQAYQNFFKGKAQFPKFKSKHRDRPSFRMTNTKESVRFDKNRIKIGKIGFIKISKANKQLKRLPSTFKIKSATVSKDSDQHWYASVLIECENQAPLPELDNIVGIDLGIKNNYQTCYFDEKQEYHTITNPKAYEKESKKLKKLQQRLSRKAKGSKNREKAKIKLAKKHFRVKSIRSDFNHQLSRFLIDNFQMIVIEDLDLDQMKQNRLGQKISDLAFYQFRTFLDYKSKWYGRDLVIADKYFASTKICGECGFKNMNLTLKDRSYTCPSCNTQLDRDKNAALNLYQLGAHRWNTGVVLDSNGYMSLFK

SEQ ID NO: 62651 - protein, 390 aa, unknown
  TnpB Polypeptide
VLKGVKLQLTVNKDQETLIRKHVGCCRWLYNYALAEGKEYYNQFKSFLPMNMLITELPDLKSTYEWLREVDSTCLQQVLRDQHKAFQNFFQKTSGFPKFKSKHRDRDSFRLTNTNNSVRFRNDRIKLGKIGFIKISRANKQLKRLPSTFKIKSATVSKDSDQHWYASVLIECENQAPLLELDNIVGIDLGIKNNYQTCYFEENQEYYTITNPKAYEKESKKLKKLQQRLSRKAKGSKNHEKAKIKLAKKHFRVKSIRSDFNHQLSRFLIDNFQMIVIEDLDLDQMKQNRLGQKISDLAFYQFRTFLDYKSKWYGRDLVIADKYFASTKICGECGFKNMNLTLKDRSYTCPGCNTQLDRDKNASLNLYQLGAHRWNTGIVLDSNGYINLFK

SEQ ID NO: 62652 - protein, 409 aa, unknown
  TnpB Polypeptide
MEMVRTTKIQIDLPLGLARQMIEKFTAGCNIASAVAFNLKGASRALALQSKCYQTIRQQTGLSAQVTTSVARVVSAKYTTIRKLKRVPTKPVVFRGEPVQLQGGPRGRDFRFFPADSVVAVSTPEGRLRVTYYTAPRFAEFLSSWNLGGALLTVQKGKVYLLVSFTKEAPVTVNPNNAVVGVDSGIRFNAVATDGSKALFCRGSHARTVRQQYLNTRSSLQSRRAQKDTRSLRRVQKRLRGKERRFLADLNHVVSKEVVEFAASAGCPTIAMEDLTGIRQRGKRVRKDTRRERNGWPFRQLAAFIAYKAEERGFDVVLVDPRYTSQGCSKCGHTEKANRNGLRFRCRACGYQLHSDLQAARNIRLRGICARQVPGPDGLSSISPKHAPLTPALNPDEGTGKPPASAGGS

SEQ ID NO: 62653 - protein, 450 aa, unknown
  TnpB Polypeptide
VKAKALPKEKAVVFGGKTLFEKLCKNHLQGKQREKLKREWREKRQGSLISVGSKHKTHKGNLCLRFEEKEGSLYLRIALGDREFIYAKVKREPSGEKDKWNTFLAMLYQSWQKKIYFPYTVELKLKERQVYGNVSFEMPTPEAWLTRRYGVVAIDTNASPLHLAIAEVSPDGNLISYQSISLHEFIGYSKNRRDYEEWLLAQKIVEIAKEKGKAIAMENLKKVNRGYRGDGKAKLRKRLYSWNFKSLLSKIERTAKLNGIEVIKVNPAFTSLIGALKYAPQLGIDKDIVGAYAIGRRALGFKEEIPENYLKLLSDREYLEYAIYTYEEKEKELKEQLKKETNQYKRNAINSELKVIQKAKDMLLERLKSLQSESSSCEGANGRNSEQGLGKTSQSAWQVLRVAFVLPILGEVFVRDFSSLKPVLVEGKWNRRARRLVPVGFAGTISRETG

SEQ ID NO: 62654 - protein, 418 aa, unknown
  TnpB Polypeptide
MLLSHRTSVNIRPEYSNMIGHMCYAASKLWNVCNYERRRYKELGLEKYPDWYYQKKAHKGDLWYRQLPSQTAQETCKQLDKAWKSFYALKKTGGIKVPNPPRFKQDNIPITYMQMGIRHEKGSDQLRLSLSKDLKSYMEETYGIHEKFLYLENKIFRNMDHIKQLRIYPPEDGKCDLIVIYEVKEPEPLSLNGHYLSIDLGIHNLMTCYDSGNGRSFILGRKYLSLERYFHKEISRVQSIWYAQQVENGIKYPRSSKHIKRLYREKQNAVKDYLHKVTRWLAEYCRKEEINCVIIGDIRNIRKGKDIGHKTNQKFHGLPYNKLYIMLEYKLKLYGISLTKQEESYTSQCSPFSPEISKRYAEASNRKERGMYITDGVRYNADAVGAFNILRKHLSVSGKQKELSVTGLKNPEIIKVAV

SEQ ID NO: 62655 - protein, 427 aa, Leisingera sp.
MEVIRGHVYTLCPSQEQDHLLSQTAGVVRLVYNLALEQRRTWGGKPYAGGAPRVFGAKRLSRELAELRALEPWITAVSQTAQNQALIDLDRAYANFFEGRAGYPRKRKKGQDDNFRQAGREIAVRRLNRRWSEVRIPKIGWVRYRDTRKLRAKKDGSIDIRNATISRRPGGGWQISIAVRCEIAERPVPSEAVGVDRGVAVPYALSTGEMIRLPGTVPGLERALRRAQKKLSRGKRGSRRYAASRARLAKLKGKLARIRAHAAHVLSRDLAGRFGLVAIEDLNIRSMTRSARGTREAPGRNVSQKSGLNRSILGIGWHALERMLGYKLEETGGVLIKVPAAYTSQTCAACGHVDARSRESQALFACTACGSETNADTNAARNILDRALNPESYRRGSTPLLDVEASALAACEASTRLKRQQLDAAAV

SEQ ID NO: 62656 - protein, 425 aa, unknown
  TnpB Polypeptide
MTNITLVAESKLYLKDNTSLYDYFDDYSKLFNFLVRRCVHHLKNKLNGESESRCRTNLMLEFDITNRMAKAVMRTAKKQLKLLTGLARYQYNNLFKRRRSLYKKIAKLKAILSSSSATLKQRKLAKLQLFWTQMSLNRVNQLIDNGLKLPLTFGTKQLLKTNKQKFLAKRDNQVIYIGDKYDTCGNQQFQLSFNSKYNRFEYKLRLDNRWVFGTDKYIYGSFVLKNKEAKVHILKTLSERKSNPLTYRILKREGTLYLQIMYRRETFDVTRHNHGVLGVDFNKGFISVSDINSDGKLQSLTRYNYLHQGKTTRTKTSMLEMVSKFVSQAVSVGKDIVIEDLVSLDSNKKQEKTTSKNYNRMINSLKFGLFKRCLLSKAIKEGVSVHIVNPYNTSKIAKESYTDRMKLNVHDAASYVIARRFYQYG

SEQ ID NO: 62657 - protein, 371 aa, unknown
  TnpB Polypeptide
METVRIYRLKGLAPPTRERLQTAQREAARVWNMCRERHQDARLRHQPWPDRDALQQATKGGQFALHSQSIQMVCHQFLANVETTRQLRPTHPRMRYPYKPKHYMTVQWPAQAIARQGKRLILPMGRGRKALCFRLDLPEQIGAVSLVWHGGYELYVGVPTPAATEAPGVAQATIDLGEIHLAAVTTTTGRGLIVSGRGIRSLKCRHNMSLGRIQRKQARCTKGSRRFHTLQRAKARLRARAERQVRDRRHKATRQVVRFLQQEGVQTVFIGDPHGVRDQPCGRHHHQRMSQWEYGRDKDYLSQKCAQAGILSFTGSERGTSSRCPSCQRRQKVRGRNWVCKPPQPPGSSGPLRRQVTGGQVRPEAHLLSGD

SEQ ID NO: 62658 - protein, 410 aa, unknown
  TnpB Polypeptide
MQLTQKIRVFPTKEQEDILWHLSERCRLTYNFALSERIRTWKEQGRSISYTEQQNNLPELKQQYPEYGWVYSKVLQMILRNLDADYKSFFSLWKKGHRDARLPRYKGKKHFTTMTYNQSGFSIKNNKISLSHFYNNTPLLFDIPDKFKFDEVYQITIYNDGNGFYLSIVYSVPEKTYEDNGLYQAIDLGVTKTVTAINMQGRFFEVKNPRPDKYWNKRTDALQSRRDHCKKDSNRWKRLHTTMNKCKRKCGNQIRDFEHKLSRKMISNTRANTIIIGELDVKNMAQSNKTNSGLNRSTQNQGYLSRFAGFLTYKAKIVGKKIIEISEKKTSKTCYVCGKEHNMPIWKRYMVCDCGNNIDRDRNSSINIMYRFLSQNAKWTGYQQFVGNLRQTGLPVGNALVGSPSLDIRQ

SEQ ID NO: 62659 - protein, 219 aa, Gammaproteobacteria sp.
VRFAGKCIRVFERERLEGVKWQGGEFAQDAVGDWWLCLPVKVQADCSIAPQEEVGIDLGLKTIAVTSDGDRLEAGRWTHRYAEKLASAQRRGHKRQAKRIHRKIARCRADALHYFSRKMVDRYQKIVVGDVSSLKLVKTRMAKSVLDSGWGTLKRFLEYKCEHAARSFEVRDERYSTVTCSNCGALSGPREVNGLIVDHGNVATVESCMTETLIRLGIT

SEQ ID NO: 62660 - protein, 337 aa, Methanomassiliicoccus sp.
MLLTFKLRHERDFSIELIKARKVAEFALTSDSYSSAVVKHIGLKSAIACQILKKYVRNKHIKTIHNVMLTIPGQGVKVQGMELYISCLKLRLDISHLPKFEKVNQVECDKEFAFVTVTVPDKPLYEPTWFIGIDRNTTGHVAVAANPATGKVWKLGSSCQHIHQKYKNARKRLQKQGRYKEVKEIKQRESQIVRDQNHKIAKKIIDIAVQNACGIKMEQLDGIRNNRKQARSFRYSLHSWSFYQLQQFIEYKAKLNGVTVAYVDPSYTSQQCSRCGLIGNRDDKVFSCSHCGHVDHADVNASFNIALRPSLEEGTGRFKPDRDGLKGRIDTPQEAPA

SEQ ID NO: 62661 - protein, 231 aa, unknown
  TnpB Polypeptide
  misc_feature (16)..(22): Xaa can be any naturally occurring amino acid
MIQSYAEPVTTTCPAXXXXXXXNNLASVVVDDGTWLLYKGVRTKEDYFYFQRRIAETQSLRDTLKDKLLDDAIDELNHEMRRLYEKLRRRLLHLYRNLTSHLLKQLHELGVSTIYLGYPLNIAQQKGNKFTVNMWSYRKLIEAIELKAQEYGIRVFEVVEYNTSKYCAFHGVEVKRKPRGVVHCPFGHKLHSDLNGALNIMRKATGKVPFNHQKAPIIHHRPQPSSPDKAG

SEQ ID NO: 62662 - protein, 431 aa, unknown
  TnpB Polypeptide
MPSYCLELKLKVKKDSDRNYLQNYFNAVAKLGNEIRRFAIRQLGHLKQDKNYKSLLAEYVKVKGDKDSPERERLSKELSVIVSSYGLTKYGLQKSACQMRKHLKYVHSDVYQKLSDSIWRSVEKYLYGNGKQIHFKKWDDVMSFENKKNSTGIIYADGKVYINCTPKKPKGGIVLDIILPRNKESTHYMYETTCLADRTKYCRIVRKMFPSGWRYYVQLVQEGIPPQKHEIGKGRVGIDIGTSTIAAVSKDGCILEELGDPASSPAEECLLQRKLDRSRRAMNPNNYKEDGSVKKGKKTWKKSKTYQAVQNQLKSLRRQKAARLKQWQEAEANKIATMGNKVFVETMDFKALQKRAKNTERQEQTSIVKQKDGTEKKVHKYKKKKRFGNSIGMHAPRAVHIHTGTEAVVPQRRTLQNQYLEIQSQPIQPCG

SEQ ID NO: 62663 - protein, 415 aa, Pandoraea sp.
MQRLQAFKYALMPSGEQQRQMRRFAGACRFVFNRALALQKERYERDEKKLGYAGLCKRLTEWRNSADTAWLADAPAHPLQQTLKDLERAYSNFFAKRADFPRFKKKGRSDSFRYPDPKQIKLDQANSRLFLPKLGWLRLRQSRDVLGTVKNVTVNQSCGVWSVSIQTERDVEQPVSQGGAVGIDMGIVRFATLSDGTFYAPLNCFKRHETALRRAQRAMSRKTKFSNNWKKAKARVQRLHARIGHVRRDYLHKTSTAISQNHALVFVEDLQVRNLSRSAAGTTEVPGSDVRAKSGLNKSILDQGWFEFRRQLDYKLQWRGGHLVAVPPQNTSRTCLCCGHVSAANRQTQARFACVVCGFEDNADLVGAINVLRAGHARLACVPQGDFLRGKVSGAVMPPAAGTQRSDSSVAQGRA

SEQ ID NO: 62664 - protein, 434 aa, Anabaena sp.
VTYLYGCQQLLIHVNQELKSILEFVCAESNKLSNCAIYYARQIWFKAKRYITKFELHNELKSNRHFQALYSQAAQQVCGSVYESFASFKQLNALYKRGELADKPRPPKYRKDGFNLVSYPKQALKLTDGQMRIPLGSLVKTWFKLDSFTLPMPSNLKFEDIKELRILPRNRCFYVEFVYKTNTVKSEVDITRVLGVDHGLNNWLTCISNVGTSFIVDGRHIKSLNCWYNKQVATIKENKPQGFWSNKLAAITEKRNRQIRDAINKVARVVVNHCLDNRIGRVIFGWGQGIKQEINLGKKRNQQFVQIPTARLKSRIEQLCQQYSIEFVETEEANTSAASFVDGDTLPKRGEKPDDWKSSGRRVKRGLFRTGMNWYINADCNGAANIIRKVSTTLELDLSGVSRGALTHPTRIYIWVTAKKKQSDAVIKRRAASF

SEQ ID NO: 62665 - protein, 402 aa, unknown
  TnpB Polypeptide
MMRTYKFRIYPSKSIQNTINEHLNLCRYLYNYLLEQKSKNPKLNKMDTQKLITQLKKENPELKKVHSKVLQMVNNKLWGNLKALGELKKKGHKVGKLRFKSSKNHYKTLEYNQSGFKIDYNTKKLKLSKIGEIPIILHRNIKGEIKGVIIKKEPSNKWFAFFQVKEEPKPLPKTNKVVSIDLGIDGYAVDSDGNKFENPKFIDKTLDKIKRVQKCLSKKVKGSKNWSKAKLKLIKVYDKLNNQKNDFLHKLSRYYVNNYDKIVLEDLSIKSMVENRICKTLNRHILDSSWRKFVSLLLYKAEGAGREVIFVNPAYTSKKCSNCGCVVDGLKLSDRTFFCPNCGWNADRDYNASLNILKSGLGESVVPVERKPLLQTISYMEVVLGQVFSMKQEASPVRQVIH

SEQ ID NO: 62666 - protein, 449 aa, unknown
  TnpB Polypeptide
MSKSITDEKSYKFKLRPKPMQRLALAKAVGCCRWVYNWGLEQRQALYNTVKELPKEERYEALKTCSRFGQDAQLTHLKKQFPFLAEAPANALQSVIHNLDKAYQGFFERRTGFPDWKRKGEGDSFTEKSPNCFAINGEAVKLPKIGWVKCYVSRKVEGKLLNLTVTKDGGDWFVSITTRVTWKVEPPTGPPIAFDLGIAKSLAFSDRTEVHLPVATPKELRQKGRLQRAIARKQKGSKRRKKAVARLGNHERHICQRVNDSRHKITSSRANNHSLVIGEALRTCNMTRSAKGTLDEPGTNVRQKAGLNRGILAQGWGITRRQFAYKCRWRGGHYIEVDPRGTSQRCNECDHEEPANRPTQALFLCVECGYTENADFQSSDNLLEDGLEKAMELGLIGGETPHPTDGLAVAARRGPSGEMGSVEARTCGAKGFPLQKEVLALPAMGGPAR

SEQ ID NO: 62667 - protein, 275 aa, Proteus sp.
  misc_feature (270)..(270): Xaa can be any naturally occurring amino acid
MKRLQAFKFQLRPNGQQKREMRRFAGACRFVFNRALARQNEAHEAGNKYIPYTKMASWLIEWKSDTETQWLKEAPSQPLQQSLKDLEQAYKNFFQKRTAFPRFKKRGKNDTFRYPQGVKLDQSNSRISLPKLGWMRYRNSREVVGEVRNVTVSQSCGKWYVSIQTEYEATEPQHESTSIVGLDAGVTKLATLSDGTVYPPVSSFKVNQRKLARLQRKLSRKIKFSANWQKQKRNIQRLHSHIANIRKDYLHKVTREISKNHAMIVIEDLXVFNRA

SEQ ID NO: 62668 - protein, 375 aa, unknown
  TnpB Polypeptide
MLKAYKYKINPNMQQQELLLKFFGCTRYVYNWGLNLKTSAYKENGIKIGYAELAKELVNVKKQSEYEWLNECPGVSLQQSLRCLDNAFTMFFRKNGKYPKLKSKKHSKDSAKFIQSVHFDFENWTVKLPKLGKVKLCKNRTFNQSTCKQGTCTVSRDHCGTYWCVITVDDLQPKVARTKPLKETAVGIDLGIKDYAILSDGTKFTNPKHLEKAQRKLAWLQKDFARTAKGSKNHEKMRVKVAKCYRTISNQRNDFLHKLSTHLIRNYDTICLEDLNVKGMEQNHHLARAIQGAAWSEFVRQLEYKSEWYGKNVLFIGRFEPSSKLCHKCGYINRNLKLSDREWTCPMCGEHHDRDINAAINIKEIAFDKQNLVGV

SEQ ID NO: 62669 - protein, 457 aa, unknown
  TnpB Polypeptide
MPSSGQLLGDEGREPIPPAIPEGGTREVKYTDRRTNVVRLLPSGSQERRLRRLASISAKLFNEVNYERRQQFFQQQRVDLEGTWDKYYERYKNVLGVNAQAVLQKNNEAWSSFFSLLKLKKEGKLPPNMKRVGPPKYWKNRETKERKLILVVRQDRYIVDEQNHRLFLRDFDMEIEFAGRLRWYGKQGRLEIRHDEARGAWYASIPVEVGVETTRNGNGSKHIVRGERGSIRIAKPKGKVAAGVDLGINILASAVTSGGAWLLYRGSRAKEDFFHLTRKIAEVQSEADSARNAGDEAKSLRLNRRRRRLFRKLVGRMAHLYRNLANHLVRNLWELGVSKIYLGYPHDIARERGNKLTSNLWTYRKLMDAIELKAQEYGMRVYEVLEYNTSNHCAVHGVEVTRGPRGVVRCPLGHRLHSDLNGALNILRRGAGSMPATLKGPLSFLVDHSGVAPVKGA

SEQ ID NO: 62670 - protein, 389 aa, unknown
  TnpB Polypeptide
LLPSPEQAAALAEHCRHARFVWNLAVEQQRHWQPGRRAPGYNEQCAQLTAARAEYEWLAAGSQTVQQQALRDFAQAMRNFFNRSHRRPTWRKAGTHEGFRQVGFKPRHINRLSRRCGQVWVPKVGWVRFRWTRNIGDTVKSYRVTVDRLGRWHIAFAVIPKPVAGPGDGSVVGIDRGVAVSAALSTGELLRVPGLRAGETQRLHRLQQRLARAQRGSTRRARTKLAIARLRARETDRRRDWVEKTTAELARGFDTIRVEDLNVRAMTRSARGTRECPGTNVAQKRGLNREIRRQAWGVLVARLKHKAQGRVEFVPAAYTSQRCSHCGQVARENRKSQAVFQCVACGAGPCNADVNAARNIAAGRAVTARGDLGTSRSMNREPQLCSPAA

SEQ ID NO: 62671 - protein, 469 aa, unknown
  TnpB Polypeptide
MYHSMNINVKNGPIFDWCDELAHKANNLYNAALFRERQVMTSRKKTDAQLTDNEKEVLREIEVMNERLLSRNKKPRKISRTGYLSYEFLDDLMKLNENPDYICDTLPAHVAQHVLKHAAGDIRSFFGAMKQYKQDPSLFTGKPELPHYKHKQGICSFDISNQECVIRQNGKGHYVAKLPKTKCIVSLGKQVPGILKEVHVAPINGQYQISFVFDDGEELPAHITEQPERIASVDFGISNFMAVTNNCGLGCLLYKGGVIKSANHRYNQKIAAIMSRQTKGGTEKFKPTEEYYAVTQRRNNVIKDYMLQTGKHFITWCVENRIDTIVLGDNQFWKQNIRMGVVNNQNFVQIPFDQMKKILTYQAERRGIRLIRQEESYTSKANFLGQDDIPVYGGNDEDVRFTGTRIHRGLYKTNAGTLLNADINGSANILRKCISDAFRSHELAYNQITVVRHPMYEAVKENRNRQISK

SEQ ID NO: 62672 - protein, 377 aa, Proteobacteria sp.
MLYDMLKAMKYRVKPTKKQAHLLQEQLEECRCLYNHFLEDRKRGWEERQESLSYYGQKATLPHLKAYCPALSNVHSQVLQDVAMRIDLAFKAYFRRCKAGETPGYPRFRGYGRYDSMTFPQYGNGCQLVDGVLKLSKVGALRVVQHRPLEGTPKTCTIRRSATGKWDVTIACEVEGQPRPSTGEAVGIDVGLLSFSTLSTGENTACPKFLRTDEKDLKRTQRQLAAAAKGTPERRKRRTIVARVHERIRHRRTNFAHQESRRLINRFDLIAVEDLSVNRMVHNHCLAKSIQDASWSQFAAFLSYKAAWASRVFVAVNPAYTSQDCSGCGHRQKKTLAERVHQCACCGLTLDRDHNAALNILTLGQQSLGLVPRSPGL

SEQ ID NO: 62673 - protein, 382 aa, Staphylococcus sp.
VKNLYKGVQCRIYPNKEQKQLIHMTFGHTRFIWNKMLDMLISRYKNNPDLSFPSKYRLRNLIKSMKYEYPWLKDVDSRALYSSVDDLYSAFQNLFKYSSKHPRFKSKHRNKQSYRTQYSNQNIRLNSNQRFIKLPKLGWIYCRKSIDFIENKNIKSATIKCLPSNKYEVTLIMESEKQALPTTNRSIGIDLGLKYFLITSEGKKINNQQFIKNNIQKFKREQRKLSKRALIAKQSGKSLHEAKNYQKQCIKVAKLSEKIKNQRKNFSHQLSKYIVRNYDVICIENLAVNFLIKNHKLSRAISDVSWFEFVRRLKYKAQWYNKQIIQVSRFYPSTKICSTCGAYNSKIKLGVDKWTCPKCKTLHDRDINAAKNILYKGIKNKV

SEQ ID NO: 62674 - protein, 314 aa, unknown
  TnpB Polypeptide
LRAISRATGILRNYRRAKRKGKVKEPYAKRLQLISCYGLKIKDGVLLLPFKSKQPIQIPLNQRTQRVLSEPGLAVRSVTLTADRLVIAYAKEAAEIQLKGLIGIDRNLDNLTLANSSGRVERFNLANITEIKSKHRAVKARFTRNDVRVRKRIFGKYGAKERNKVQHILHNVSKHIIEDAKVNQLGIVMENLKGIRKLYRRGNGQGRFYRGRMNSWSLHELQQQIEYKAKWEGLPVIYVKPHGTTSKCSICGRRLKPEENRTMKCQNCGLTIDRDVNAARNILALGLRFRPAAQPLEAMVAELQPERNPQSRWL

SEQ ID NO: 62675 - protein, 401 aa, Nonomuraea sp.
VQLRYSYRLDPTPAQRIALAKAFGCARVVFNDAVALRNHAHTHALPFITDAELSRSVITEAKKRPDRAWLAEVSAVVLQQALADATTAFRNFFSSVTGKRRGPKLGSPRFRSRKDNRQAIRFTRNARFKVVSGGMLALPKIGDVAVRWSRELPATPSSVTVIKDAAGRYFASFVVEVTDNPLPDTDTDTEAGIDLGLGHFAVLSDGTKVSSPRFLRRAEKRLKKLQRGLSRKEKGSKNRTKARIGVAAQHAKVADARREFHHQLSTKIIRENQAVYVEDLAVKGLARTRLAKSVHDAGWSSFVGMLEYKAKLYGRTFHRISRWFPSSKLCSACGTIQQSMPLNVREWTCACGATHDRDVNAAINILAAGRAERLNACGGPVRPPLVVAQPDEAGSHGSAAA

SEQ ID NO: 62676 - protein, 538 aa, Streptomyces sp.
VIEGPFVALGPSGVAVRDRLKGLTPEDEGVLRLVGGHLGRLASLDLKARCADAGDHTSDTWAARKQGLTAESSSRWAGSITKATHDQWALSRRCQLAHIQALEAGVRTLMHRLSLPLGEKGSKRAAGGYRSKGEWFQKSRRLHLLEHRLCVARAEREAGVVHVVRGSRRLLNTRHNLSVAQLTEVEWRQRWEAERWFLAADGESGKRFGNETIRVTPDGTVSIKLPAPLAHLANAKHGRYVLTSRVAFAHRGQEWADRVTDDRAVAYRIHLDVERGRWYLTASWQRPVVQTVPLEAARAKGMIGVDTNADHFAAYHLDGHGNPVGDPMRFYYDLSGSADHRDAQIRHAITRLLHWAKRCGVAAIALEDLDFTAEKTREKHGRKKRFRQLISGIPTGKLKARLVSMAAEHGLSIVAVDPAYTSMWGDEHWRKPLTSNKRKMSRHDAASVAIGRRALGHPIRRRTAPPHDDRSDRRGHRTAQAGPSTPGREGTRPPVTERAQDVRRRTGIQRTREPSASNTVRDACSTRRWQQLSLLGTD

SEQ ID NO: 62677 - protein, 380 aa, unknown
  TnpB Polypeptide
MLMLCAYKFRMYPNKEQEVFFSKSFGCVRFIYNKMLGDKIEYYNEHKEKLNNTPAQYKDEFPWLKEVDSLALANAQMNLQTAYNNFFRNPEVGFPNFKKKYINRFSYTTNNQKGSVAVTERHIKLPKIGLVRIKKHRAFDGLIKSVTVSREPSGKHFVSVLVDQAEKEQLLPDGSIIGIDLGITDFAITSDGDKTENPRCLVKSEKKLKQLQRSLSRKKKKSSNRGKARVKVARQHEKIRNQRNDFLHKESKKLIDENQVIILEDLNVKGMVKNHKLAKHISDVSWSKFKTYLEYKARWYGSEIIYIDRYFPSSQICSSCGHNDGKKSLDIRQWKCPKCGIVHDRDISAAKNILAEGIRIRTAGIAGLACGVLPSVSFRL

SEQ ID NO: 62678 - protein, 418 aa, Roseofilum sp.
MKKHYGCQQNLIKNWEELPFLEYLCTTANKLINCGIYLARQWYFKCRYITGKYDLEKQLKPNTNYQLLHSQAAQQTPQGVAESFKSFKQLSKLYISGELSTRPHLPSYRKKGGLGTIAYPRQALKLKDNEVRVPLGNKVKAAFGVEAFFLPFPSNLDFNPIKEMRILPHNGCFYVQWVYPLKLNLSTPLNSKKALGIDHGIDNWLTCISNTGTGFIIDGKQVKSLNQWYNKQMATIKENKLQGFWSKRLALLAEKRNRQMRDAVNKAARLVINHCLEKGIGRIVFGWKKGQKDSINIGAKNNQKFVQIPTAKLKKRIEQMCQLYGIEFEQVEESYTSQASFLDNDFLPTFGEKPESWKPSGKRVKRGLYRTQLDELINADANGAANILRKVAATSGFALEGVSRGALTTPLRVRLWTA

SEQ ID NO: 62679 - protein, 425 aa, unknown
  TnpB Polypeptide
MEVRRTVPIKLDVADSDADLLHDTVSEFLWAANYVVDHAWHGEYKTTSKAKLQRETYDDVRAETRLQANLVQNARNKAADAVQSVIARWKQGKYAGKPHFTSPTLVYDKRCATFNDDHATLSTVEGRITAEYVLPDASRETPHSEYLFNDDYEVTGAELHYRDGEFFLHVRTKADVEFETTDEGDTEHRTVLGVDLGIENVAVTSTGTFWNGAELNHWHREFEKRRGSLQQRGTRAAHETIQSVGRTETGRYDHFLHTVSKDLVAEAVEYDCDVIAFEKLTGIRERLPNAKKFHAWAFRRLVEYVEYKAEVVGISVEQVNPAYTSQRCSRCGMTLEENRPSQARFRCQKCGYELHADYNAAKNIGVKHLRATQTSSDGGAPVNVRLNRGTLNVNGKYEPAADSGQNGSPRESPSLHEANGHAVSE

SEQ ID NO: 62680 - protein, 564 aa, Limnoraphis sp.
  misc_feature (109)..(109): Xaa can be any naturally occurring amino acid
  misc_feature (350)..(350): Xaa can be any naturally occurring amino acid
MAHKAAPKTIRTDKWRIVPNSGQRQYLLNTVQEYRRLCRFLVTVICTHWIDLGSLGSDELVPAVERLVHRTAKNPSPKYPQINRAFHKFPSYLRRAAIMFAAGQVSSYXVERLVHRTAKNPSPKYPQINRAFHKFPSYLRRAAIMFAAGQVSSYMTRYWDWQSGSSRNRRDAKPPILNSDTGCYPALYKGQCFKLHGFKKVEIKVFTGSDWIWITMPIASLRERHKIPTNQIKSPSLIVNDKSCHLSVPFECHPEKVKGSGVVVAIDLGINTTATVSVVSRDGTVIHREFIHPGRDIDRRDKRLKSVSQRAKKTMGKGGKLGSGFCKNTYRKCRNINQQIGHIVSKRITXTVIHREFIHPGRDIDRRDKRLKSVSQRAKKTMGKGGKLGSGFCKNTYRKCRNINQQIGHIVSKRITLIAQKYSADAIVFEDLKGWKPKGGKKRSNLKQRFHGWLKSLIVELTQRKWTELGGKTIAVIAAYTSRLAYDGSGRIKRDEKNYALATFSSGKRYNCDLNGSYNIAARGWLKLVSRKDYEKRPSKNSGRLPGSWACLCDLWAVGSPRLA

SEQ ID NO: 62681 - protein, 497 aa, unknown
  TnpB Polypeptide
MTSPTFIIELPIRVSDSESRTILRKLEFARQLHNATLGTALGQLQQLRQDSEWEKACLMPKGKERSELFRKLDRKYQLTEYDLHTVIAKHRQRSGRKTELGINETQKIATRVFQAVNRYKLGLGGRPRFKSLSRGLRSIEGKSNKTGLKFNIEKSVLSWCKHDYRVFIDPQDDYLQRALRSEDRGGFKKIKYCRLVRKTIKGKNRFYLQVVLEGQAPIKHVYASSSERLSIDPGPQTIAVFSEVWAGKIKVSPTAQVDEKRLRCIQRSMDRSLRKSNPDCYESDGTLKKGCVLKKTKGYEKRIQRLQECHRKAAATRRCEHGQLINLLLSMAGDIRVEKNQWKAFQRGHFGKSLGKSGISGFIERLKSKAESAGLKVTEVRPYKLKLSQYDPYTDQYRKKSLNERWHSLGEGSEWIQRDVMSALLLQCADLEEEKHIPTEVIKTLEGVKQFLRDAGYVILKPSSNGESNPAFASEPKAVTPEKVRLEIFCGASDSYL

SEQ ID NO: 62682 - protein, 388 aa, unknown
  TnpB Polypeptide
MKKTQIESHQISINHKYFKECDELTFKSKNLWNATLYTVRQHYKKTGDYLNYNAVNKEFTHNNQPDYRALPAKVSKGTQRLLEKAYKGFFNKKGFRKPPGYLHKTKGRQLVHYEKGALSFKIPGFVKLSKTNILIKTNKNVEFVRIVPHLDYFTIEVGYQIEVPAPSATTGIRVASIDPGLNNLATITSNVMAPIIINGKPIKSINKFSNFLIAEKQKLSPKEATHKIRTYYRKRYNKIKDYFHKATQSIIHILIRNKIDTLVIGKNIGWKNKSKLKNFVYIPFNLFIELLTYKAENNGINVILQEESYTSKSSFISKDPIPVYGIKNTTQFSGKRLKRGLYQDNSGVLLNADVNGSLNILRKSKIWVDSMWSECISQLNQPIYKLSF

SEQ ID NO: 62683 - protein, 388 aa, unknown
  TnpB Polypeptide
MGGGGEHMTTVKKGIRVRLYPTEKQKILIDKTIGCARFVYNQTLADCKRSYEQSKRLPSQSERFKNLVKLKETYAFLKDVDAHALQQSVRAFNSALDNFFKNRHHFGFPRFKTKHDSKQSYRTPHNQGRANVLDTKHIKLPKLGKIRTKHFDMPKAYKIFNIAVEKTSTNKYWASICVETEVQPLPKTGKQVGFDLGLIDLLIGCDGTRFERPKFDYLNKDKLAKEQRKLSKMRTKLKKAKLNLDECKNYQKQKHKVAKLHEHITNSAKDFNHKLSRTLIEEYDFIAMEDLNVSGMLKNHNLAYSISDVRWSQLLNFIQYKCKWYGKEFKQVDRFYASSKICSCCGAYHKDIVNSLSVREWVCPDCGAHHDRDVNAARNILIQALSAA

SEQ ID NO: 62684 - protein, 490 aa, unknown
  TnpB Polypeptide
MANALLPTVLSVPSLRRLTPGNARRPEVAKFDIPEGWTVQAFKFTLDPTEDQARALARHFGARRKAYNWSVATLKADIEAWHATGIETAKPSLRVLRKRWNTVKDDVCVNAETGVVWWPECSKEAYSDGIAGAVDAYWNWQTSRAGKRAGKRVGFPGFKKKGRDADRVCFTTGAIRVEPDRRHVTLPVIGTVGTHENTRRVERLIAKGRARVLAITVRRNGTRLDASVRVLVQRPQQPCVALPDSRVGVDVGVRRLATVADADGTVLEHVRNPRPLDAALRELRHVSRARSRCTKGSRRYRERTTEMSRLHRRVNDVRTHHLHLLTTRLAKTHGRIVVEGLGAAGMLRQKGLPGARARRRGLSDAALGTPRRHLAYKTGWYGSSLVVADRWFPSSKTCHACGHVQDIGWDEYWTCAATAGGCGTVHQRDDCAAINLARYEETSSVVGPVGAAVKRGADRKTGPRPAGGREARKGSSRKAAEQPRDGVQVA

SEQ ID NO: 62685 - protein, 356 aa, Escherichia sp.
  misc_feature (30)..(40): Xaa can be any naturally occurring amino acid
VKRLQAFKFQLRPGGQQEREMRRFAGACRXXXXXXXXXXXERAYKNFFQKRAAFPRFKKRGQNDAFRYPQGVKLDQENSRIFLPKLGWMRYRNSRQVTGVVKNVTVSQSCGKWYISIQTESEVSTPVHPSASMVGLDAGVAKLATLSDGTVFEPVNSFQKNQKTLARLQRQLSRKVKFSNNWQKQKRKIQRLHSCIANIRRDYLHKVTTTVSKNHAMIVIEDLKVSNMSKSAAGTVSQPGRNVRAKSGLNRSILDQGWYEMRRQLEHKQLWSGGQVLAVPPAYTSQRCACCGHTAKENRLSQSKFRCQVCGYTANADVNGARNILAAGHAVLACGEMVQSGRPLKQEPTEMIQATA

SEQ ID NO: 62686 - protein, 408 aa, unknown
  TnpB Polypeptide
VKLTKEQIKERNRKISAATSATKARRRNQEMRFIRCKIDKRKLTAEQINAINEIFFEATLLYDDCVTSQASVFEYAIPREVTYTDKNGNQITHPLTRIGAQMKQGIIRGIKAKVYGLATLKRSGHKVGHLKPKRRINGIPLQQPENTFKLRRNYITISKIPGPMHLLGVKQLTGWETGKAQLVRFNGDLFVTFYVFTDKDVYAREHARKSKPPIAVGGIDAGIKNEITESDGTKTTNRLPDSGKLRYWHRRLSKRTKYSGGWYRALTQIHKEYHRQLCSRKGIAYRMRDYLLGKYQRLYVQDEQINRWAKRCGKAIHSGALGLLYQLLKTEKNVTVLDKWQPTTRWCYLCGRRTPQPPAKRVFRCAYCGYSEDRDVHAAKNMVHLGRSPLSHEQLRMANCEPIGPYAA

SEQ ID NO: 62687 - protein, 418 aa, unknown
  TnpB Polypeptide
MRKSFAIHKIFTIFATEMRKINRTYKFRLYPNKAQTDLLAKHFGCTRFVYNYFLNQRKEQYKLIGKSDNYYAQAKTLTTLKKQEATAWLKEINSQTLQFAIRSLETAYTNFFHKRAKFPKFKSKHSKNSFTVPQFASITDNRLIIPKFKEGIKCRVHREIKGKIGQVTITKTPSGKYFVSVLTEEEYITPLEKTNKSVGIDMGLKDLLITSEGETLKNNRYTRKYEYKLAKAQQHLSRKKKSSKGFESQKLKLAKLHEKISNSRVDYLHKCTISIVRRYDTICIEDLNVKGMVKNHHLAKSISDVSWGRFVAMLTYKADWNGKKVVKIDRYFPSSQTCNVCGYINKQTKDLSVREWDCPICHTHHNRDVNAAINILKIGLNNISAGTVDYTGGEEVRVNHLKDHFSVKPEAHELNVHG

SEQ ID NO: 62688 - protein, 331 aa, Microcystis sp.
  misc_feature (286)..(319): Xaa can be any naturally occurring amino acid
LTTEETPWVNKLNSQARQSAADRAWQSINRFYQNCHAKIPGKKGFPRFKKHNRSVEYKLTGYKLSDDRRKIKFTDGFKAGEFDLWCSQKTLVYYSEQQIRRVRVVRRADGYYCQFLIDVERQEYHKPTGQITGIDLGLKEFYTDAQGNTVENPRYLRKSEKRLQKAQRRLSKKFRQGNKQSKNYHKQRIKVAKLHLKVSRQRQDKAIKDAWALVQSNDLVVYEALKVINLVKNRKLAKSISDASWYQFTEWLNYFAKIYRIVCVAVPPHFTSQDCSVCGTRVQKTXXXXXXXXXXXXXXXXXXXXXXXXXXXXXXXXXXHLGGVLLTILSA

SEQ ID NO: 62689 - protein, 462 aa, unknown
  TnpB Polypeptide
MVARFKVPDGWAVQAFTFALDCTPEQAGCMRRQFGGRRYARNWAVRTLKEDLDRYHAAGQETEKPSLASLRKRWNRAKDAECVDAASGQAWWPEISKEAFADGIRAAADAYWSWQQSRAGKRAGKRVGFPRFAKKGRDRDRVTFTTGAIRVESDRRHVTLPRIGTVRTCENTRRLERLLAKGRARILAVTVSRKGTRLVAAFRVLVRRPQQAGLADRGSRVGVDVGVRVLATVANSRGEVIDRVPNPRPLEAALKELRHLCRERSRRTRGSRRYAETSRKITRLQRRAADIRACHVHHLTTRLAKTHGAIVVEGLDAAGMLRQKGLTGARARRRGLSDSALGETRRQLGYKSGWYGSTLITADRFYPSSKTCHACGHVQDIGWAEHWTCGQCETRHQRDDNAAVNLARYEPPATGDSAVGPVRAAVKRRADRKTGPRLAGGDEARKGRSRTAAEQPRDGVPA

SEQ ID NO: 62690 - protein, 406 aa, unknown
  TnpB Polypeptide
MPVKGIVFHLASEIPPDAVFLLQDFRLAVNEAVRAGLRSRVTSRYALTRLVYKEFRREHPMMYSQHLVSSFEVAASVLKNHRRRMRRGTARVPYVKRLMMKAENQAYRLDRENGVVDLPIRAGCHVQLKLVVSQYHRRYLDDKSLSLGSLTLLLDRLIIAFRNETVKTYVPETALSLDTNERSLDGVFVTGDSSSPVKAEFPDVATIQQRHHDRRRRLQRKKAHDRRTSRHLCGREGKREHDRVQHRLHQVADSVLSFAWTRRSAIVLEDLRGIKHKKNKELNRRLSMWPRRKLHQIIEYKAEWRGIPVVKVDPRYSSRTCPICGRIRDSRMGTEFKCECGWHLDRHINASLNLLQTAISKGLGVAGGLRFDPGAFQHDVMMILYEPAMAARSEPNGTSCIGVVTS

SEQ ID NO: 62691 - protein, 359 aa, Nonomuraea sp.
VHIAGFTIELGKAATRSDIPLLGPGPHSYDHGVQLRYNVRLYPTAGQRQALTKAFGCARTVYNDALRVREQARAGGLPYVSDAELSRRVITQAKKTPERAWLGEVSAVVLQQALADVNTAYRNFFSSLAGKRKGPKIAAPRFRSRKDRRQAVRFTRNARFSITASGKLRLPKIGDVDVRWSRDLPSEPSSVTVIKDAAGRYFASFVVEAGDEPLPETAGEVGIDLGLTHFAVLSDGRKIGNPRFLRRAERRLKKAQRALSRKAKGSKNREKAVVQVARVHAKVADARRDFAHKLSTQIIRENQTVVVEDLCVKGLARTKLAKSVHDAGWSRFVGMLAYKAARHGRVFVRIDRPPDGRTG

SEQ ID NO: 62692 - protein, 368 aa, Nonomuraea sp.
  misc_feature (87)..(87): Xaa can be any naturally occurring amino acid
VAQLVKRAYKYRFRPTPEQAEELVRTFGCVRLVYNKALEERTRAYAEEGRGVSCTESSAALTAWKKTPELAFLNEVSSVPLQQTLRXLQAAFANFFARRAKYPAFKSRKRSRASAEYTRSAFRWRDGRLTLAKMGAPLDIVWSRPLPEGTEPSTVTVSRDAAGRWFVSLLVEEKIAPLPPVEQSVGLDVGLTALATLSSGEQIANPRHERRERRRLAKAQRALARKEKDSRNRAKARLKVARVHARIADRRRDYLHKVTTRLVSENQVIAVEDLSVRNLVKNHRLAGAVSDAGWRELRGMLEYKTAWYGRTLVVADRWFPSSKLCSVCGTLRNDMPLSVREWVCACGAVHDRDVNAARNVLAAGLAES

SEQ ID NO: 62693 - protein, 400 aa, unknown
  TnpB Polypeptide
MITINKSYKFKITPSNEQKQLIEKHFGACRYVFNRYLNSRKETYLEYKKTLNYYDNANDLTILKKNEQFVWLKEINSQSLQSSLRNLDIAYNKFFRKQTNFPKFKSKFDKQSFTIPQSVFIEDGELQIPKFKKGIKINIHREIKGKILFATISKTASGKYYASITCEVDYMPFVKTKSRVGIDTGIKDLAILSDGKVYENIKSLKAKLKKLKYNQKQLSKKQKGSNSRLRQKTKVSIIHEEVANVRKDYLHKVSTEIIKNHDVICIEDLAVKNMMKNYKLAQAFSDVSLGAFYAMLKYKATWNDKVIVKIDRFFPSSKTCNVCNFINQELTLKNREWTCNGCGTNHDRDLNASINIKNQGLKILSGSGIESDIKQKRSKALPLGKSMTSEANPVSITDRR

SEQ ID NO: 62694 - protein, 400 aa, unknown; identical to SEQ ID NO: 62693
  TnpB Polypeptide

SEQ ID NO: 62695 - protein, 567 aa, Acidithiobacillus sp.
MSKAKIPQFTAKDALRISETVHTVTDRIRTGWSNTKKKKTTADHFEQVRVIKNSMAQFAFSHLADIETPDFKKHGYQYFNKTLSPALTDIITAWEMQQLFNKVVCTHTVNYVQQVMTNRTFHLSRGKPELSKGLLRWKSHRIYGNLATLLNAIRFRALPKTDADVPKKWQKAWRSYCGKFGRDRLVRLLADHQHNVARRIHPVEYTTGSYMKAAQFNKHKANPSWHSHWFKDDSNRKFKDWYLFKTPQWEIALPLAVNPEYHDKPYDLTKEHWVTLNRRGEVDISLVYDRTDVLLTPQTVVGIDLNVKTNLLAASNGLMFRLEEDWLQKHEAELVRLEKKGYQHLDTADRLHLKKIVKHRGSTLRNKIQDVLLQLRAQGVTDVILESLSITLGGGLSRRMHKLLRLLRFGTIRTWMREQAHKLGMRIHDFPPAYSSQACRCGQVDPGNRKDQKFECTACGSSEHADTHAGNSLLWLFEQARDVLVRDGFLSVNAFGEYVATAKARFQYKAMKAYYVGKTGASHIQGGMLVMDHPLSTVRGNPCPLGQVLENDGIASHFIQKRRNKCP

SEQ ID NO: 62696 - protein, 471 aa, Micromonospora sp.
VKVTRIAYSARLNPGKYAALLEQARRLGRVRSEVWQRYGSIGGVGSGLRDRQVRDRWLADGTHVRFGVLANAWKETVRDAMADIGANLASAKVEVRRAIIRRTGDPGERKRMFTALKADQWADDPFLARQMRKQWKRGKNRTHDQIVVRADQHNTVVDGRGLLWLAVPGLQRRQMVKIPLSTTVAPTGTLRLILRGGRVEVHYQIDASQLRSSQRPCGDATVGVDKGYTEALTDSDGQRHGVRLGRLLTTESDRLKERNRRRARLRSIANNAARRGDHAKAQRITVNNLGTFKRDRQAARHRARVRAEIFTAVHRVVDKAATVVAEDLTTSFAGRKRLGRNVNRRLAAWTKGVTAEALTNVSERRGSALVHVNAAYTSQTCHRCAGLGRRSGDRFHCTWCGVVWQADVNAAINILQRAGDPDIALHTPHRAVRQILQDRTDRHRTRLPVQDSSPATTERRANHPNRSAMSN

SEQ ID NO: 62697 - protein, 471 aa, Micromonospora sp.
VKVTRIAYSSRMNPGKYAALAEQARRLGWVRSEVWQRHGSINGVGAGLTDRQVRDRWLADGTHVRFAVLANAWKETVRDAMADIAANVAAAKVDVRRAIIRRTSAPVERKRMFTALKADQWAIDPFLSRQMRKHCKRGHNRTHDQIIVRADQHNSVTDARGRLWLAVPGLERRKMVKIPLSSAVAPTGTLRLILRGGRVEVHYQVDASQMRSSQRPCGQRAIGVDKGYTEALTDSDGTHHGTRLGQLLSSESDRLKERNRRRAKLRSIANTAALRGDHAKAHRIKANNLGTVKRDRQAARHRARVRTEIFTAVHEVVDKAATVIAEDLTKRFTGRKTLGKNVNRRLAAWTKGVTAEALTNVSERRGSALVPVNAAYTSQTCHQCGRFGRRSGDRLHCTRCGVVWQADVNAAINILHRAGDPDIALHTPHHAVKQILQDRTDRHRTRLPVQDSSPATAERRANHPNRSTMSK

SEQ ID NO: 62698 - protein, 325 aa, Micromonospora sp.
VRADQHRTVADGRGRLWLAVPGLERRQMVRIPLSTTVAPTGTLRLIVRRPRVEVHYQIDASQLPSSQRPCGDRTIGVDKGYTEALTDSDGQRHGVRLGGLLTTESDRLKERNRRRAKLRSIANNAALRGDHAKARRITANNLGTAKRDRQAARHRARVRTEIFTAVHGVVDKAATVVAEDLTTSFAGRTRLGSNVNRRLAGWTKGLTAEALTNVSERRGSALVHVNAAYTSQTCHRCGRLGRRGGDRLHCTLCGVVWQADVNAAINILQRAGDPDIALHTPHRTVKQILQDRTDRHRTRLPVQDSSPATAERRANHPNRSTTSNQ

SEQ ID NO: 62699 - protein, 475 aa, Micromonospora sp.
VSYRVVIVLGVADRVRLSVVQAYRFALDLTPRQERAVLAHAGAARVAHNWTLARVKAVMDQRAAERTYGIDEADLTPTQGWSLPALRKSWNAAKSDVAPWWAECSKEAYNTGLDALARALKNWSDSRSGKRAGRPVGFPRFKSRRRSTPSVRFTTGAIRVEPDRKHVVLPRLGRLKLHESARKLARRLDAGTARILSATVRRDGGRWFVAFCVEVDRAARTPNQPQVVVGVDLGVRHLAVLSTGEVEPNPRHLDAAGRRLRRLARRASRRVGPDRRTGRRASKRWERARAQLGRAHARVANLRRDGLHKLTTRLAREFGTIVVEDLNVAGMLRNRRLARCIADAGFAELRRQLAYKTGWNGGRLVVADRWYPSSKTCSGCGAVKTKLALFERTYTCAMCGLVLDRDVNAARNLAALAVTVAGSGSETRNGRGADRKTRPGGPVAVKRQPGTAKAGKTGTVPPQGRTSNHVPAYAS

SEQ ID NO: 62700 - protein, 472 aa, Micromonospora sp.
VKVTRIAYSTRLNAGKYAALAEQARRLGRVRGEVWQRYGSIGGVGSGLRDREVRDRWLADGTHVRFGVLANAWKETVRDAMADIAANLASAKVEVRRAIGHRTGDPADRKRMLTALKADRWAGDPFLARQMRKHWKRGRNRTDHQIVVRADKYNTVVDGRGRLWLAVPGLERRKMVKIPLSTTVAPTGTLRLILRGGGVEVHYQIDASQLRSSQRPCGDRAVGVDKGYTEALTDSDGARHGSRLGELLAAESDRSKERNRRRAKLRSIANNAARRGDHAKAHRITVNNLGTAKRDRQAARHRAQVRTEIFTAVHRVVDKAATVVAEDLTKSFAGRKTLGRNFNRRLAAWTKGVTAEALANVSERRGSALVHVNVAYTSQTCHRCGRLGRRNGDRLHCTWCGVVWQADVNAAINILHRADDPDIALHTPHHRVKQILQDRTDRHRTRLPVQDSSPATTERRAKHPNRSATSKE

SEQ ID NO: 62701 - protein, 259 aa, Methylococcaceae sp.
VTLKKALGWIPFKTAGVKWVNGQVRFCGHYFKVWDSYGLSQYELGTECFSEDSRGRWYFNTTVEVEPILRQAECGQVGIDLGLKTTATCSNGDKLDRQDCYRNLELKLGKAQRAKDKKRVKAIHAKIKNTRKDAIHKFTNKIVKENSLIIVGNVSSQKLAKTKMAKSVLDAGWFMLKTQLEYKSITTQGVFLEVNECYTTQTCSCCGLISQSSPKGRAGLRIREWTCAECGTTHDRYINAAKNILALGHKRLAVGIPVL

SEQ ID NO: 62702 - protein, 353 aa, Acinetobacter sp.
MKTLKLRIKDKHSKMLNELASQVNFVWNYVNDLSFKHLQRKQQFFSAFDMSQYTAGASKAGINLNSNTIQAVTEEFVTRRKQFKKAKLRWRISNKKSARRSLGWIPFKKSCIKYHNGQIQYRKQWFSLWDSYGLSKYQIKTGSFVEDARGRWYVCLVVDNPKTEKSTATKAIGIDLGLKDIATCSDGTVISNPNFYRQYEQKLGIAQRAKNKKRVRVLHAKIANCRKDHLHKASTMLVKKNALIVVGDLSAKKLVKTKMAKSVLDTGFSALKTMLKYKCENAGVLFEEVNERFTTQICSCCGEITAGSPKGRADLRIRVWECECGSVNDRDLNSAKNILALGHKRLAVGISLF

SEQ ID NO: 62703 - protein, 435 aa, Acinetobacter sp.
MKINKAYKFRLEPNTEQEVVLNNLVSSARFVWNQILSVSFEMFARNEFISATNLVNKITGLKKIPEYAFLESNSNAVSLQQKIRDLASAWAKFFDPKEHAKLKEKKRKPKKPKFFKLTDGSEIQLRPLMPRFKKKSDGYDSIRLVQFHKYCRIDGNKVKLPNGIGIVKFRKSQDILGTIKNVTISKVSGRWYISFGTEKELTETPIHPSKSAIGVDLGIKKLVTTSNGEVFNPKNSFKANQPKLARLQRQLKRKKKFSQNWKKMNLRINKLHHHIANIRHDYLHKVSTTLSKNHAMIVVEDLKVANMSKSAKGTIEKKGKNVKAKSGLNKSILDQGWSMLVDMLEYKQRWRGGLLIKVDPQYTSQTCSSCAHVAKENRQTQAKFECVACGYVANADLNASRNILAVGHTVLSVEGGCGKGRPKKQKASEIRKEVT

SEQ ID NO: 62704 - protein, 371 aa, Bacillus sp.
MLKIKKQGGEKMSQTITVKVKLVPTKEQVKLLEESGHEYIKVINALVSEMVEAKKSTKKSTKDIEANIPSAVKNQAIKDAKSVFSTKVKKSKYKIIPVLKKPVCVWNNQNYSFDFAHISIPFMVKGKSTRLKIRALLADKNNRNFDLLKHHKLGTLRIMKKSHKWVAQISVTIPTNENTGTQIMGVDLGLKVPAVAVTDDDKVRFFGNGRQNKYIKRKFRSVRKKLGEQKKLNAIRNFDDKEQRYMKDQDHKVSRAIINFAKENNISVIRLEQLTNIRQTARTSRKNEKNLHSWSFYRLSQFIEYKANLEGIKVEFVNPAYTSQTCPVCSEQNKAQDRKYKCKCGFEKHRDIVGAMNIRYVTVIDGNSQSA

SEQ ID NO: 62705 - protein, 384 aa, unknown
  TnpB Polypeptide
MLRAFEYRLYPNKEQVELINKHIGSARFIYNIGLEVNNSSNENKTTPFDCYYLIKQIPGLKKDVEWLKEINSQTLQAPIKNLDNAFKRFRRKTSGYPKFKSKWSGKQSFHIPQNIYFDDGKLSIPKFREGIKIELHRAAKGAIKFATISRRPTGKYYVSISCDTGVGRKPKPVIKAETTIGIDLGIKDFMVFSKGDKVNNPRYLKNNESKLKYTQRKYSRNKGVRTKRKLSKIHEKTAFQRKDFLHKESSRLVKENQSIAIEDLDIKGMMKDRKLAKAISDVGWGMFTTMLEYKCDWYGVNLLKIGRYDPSSKTCSSCGDINHELTLKDREWSCKECNAQHDRDINAAINIKNFALIKNNTVSGTATENHDELSSLEEVLTLET

SEQ ID NO: 62706 - protein, 441 aa, unknown
  TnpB Polypeptide
MPREGVYPVEFTNRRTNVVRLLPNGAQERKLRKLADVCARLYNELNYERRQQFFSGEGVDFKGTWDKYYEKYKGILGVNAQAVIQKNNEDWNSFFSLLNLMKEGKLPPHMRRVSPPGYWKDKETGKRRLIIVIRQDRYEVDVERHVIILKDFNMEIKFAGRLRWLGKQGRLEIIYDDTKNAWYAHIPVEVGVGETRTGKKTKHIVIGERGFIQIVVPRGNKVASIDLGINNLASVVVSDGTWLLYKGVRAKEDFFYFQRRIAEIQSLRDSLKDKLLDDAINELNHEMRRLYGKLKRRLLHLYRNFAKHLIEQLYESGVSTIYLGYPFNIVQDKGNKFASNLWSYRKLMDIIELKAQEYGMKVFEVVEYNTSKYCAYHNIEVKRQPRGVVHCPLGHKLHSDLNGALNIMRKATGKIPLVIKKPHSFIVDHNQVAPTKKGSNL

SEQ ID NO: 62707 - protein, 263 aa, unknown
  TnpB Polypeptide
VKRLQAFKFQLRPGGQQEREMRRFAGACRFVFNRALALQNENHEAGNKYIPYGKMASWLVEWKNATETQWLKDSPSQPLQQSLKDLERAYKNFFRKRAAFPRFKKRGQNDAFRYPQGVKLDQENRGIFLPKLGWMRYRNSRQVTGVVKNVTVSQSCGKWYISIQTESEVSTPVHPSASMVGLDAGVAKLATLSDGTVFEPVNSFQKNQKKLARLQRQLSRKVKFSNNWQKQKRKIQRLHSCIANIRRDYLHKDRQQKPRNDGH

SEQ ID NO: 62708 - protein, 217 aa, Pseudonocardia sp.
MRLRRYPTRAQEAGLLGHWAHARHVWNLAVEQLGHSRPGQHMPGYGEQLNRRKARQRLARLHARNADRRRDFVEKASTELAWRFDRIRIEDLRIKNMTRSARGTVERPGRNVAAKAALNRSILAGGWGLFLRRLQDKAPGRVEKINPAYTSQTCSACGHIARESRESQALFCCVACGHAEHADVNAAKNIAAGRAVRGAENSSASKREPQHAPPRVA

SEQ ID NO: 62709 - protein, 579 aa, unknown
  TnpB Polypeptide
MSICSSNVRMRWRRLFTGVPPRSNATSSPNDCSDCRRDDDVFAGRAGNEECLQVHMGVNIVQVVAEVNPGLTEKRLKLPRIVSDLCATVIVMAHRLSRFEIPDGWVAQAYRFALDPTPRQIEALLSHAGGARFAYNTMLAAVKANLDQRTAERSYGITEAGLTPCMGWSFQSLRKDWNRRKHTAAVRNDGTPWWPNNSKEVYGNACRALAEALSNWGASRKGARSGQPMGFPRFKTKAFAIKKFSFSTGAIRLESDRKHVTLPRLGTIKTHETTRKLARRIETGSARILKATVRFDRGRWLVSFTCIVARGTGRPAHVKAGAGLVGIDIGLKDLIVVANPQGQELERYRAPRELKHAHRKLRALQRKAARQVGPWDHAAKRKQEASKGWRRTQRDISRAHARVANLRAERIHKLTTRLSQTHYVIGAETLAVKNMMAAGGSHKRGLNRSLGDAGLGELFRQLDYKTSWYGSRIVKATRWFPSSKLCSRCGVVKAKLRLSERTYQCDSCGLTIDRDLNAAVNLARHAQGETDPSTGVVTGGADRRPSPNGDAGGNETRTRAEVGVDADNGGSASSKEEAA

SEQ ID NO: 62710 - protein, 432 aa, unknown
  TnpB Polypeptide
MEAIKSYRIPIEPSTELMGLIESYFSVKKKALEVVLSHIKFSEKSKARLDFRNNDRKKLRDDLLKDWEYSKHYVDSAIHSVISLVKGWIKLYNKGRAEKLPEITRRTVYIKNTLFTFKDGILKISIKPHKQYFEVDLSEYRWIPKDFDRLGGLILTEKELIITTKKNVEPEANNYASFDVNLTNITALINGEIERYDLRELYHIHRVYELKCQRIQKMSKYKPKTSRRLMEKYSEREKNRTKDFLHKLTTKIARKLKESGCGAVMENLNGIKYRVLNGSETQNRKLSKWNARMFQFMLEYKLKWFGLPVKYADARNTSRTCPYCSGYLVASEGRFMRCEKCNIIMDRDVVAVLNLQMRGAGFPLRALDEMIEREGVGGSNGLLPNSTYSRTLLFRSNCMCYWKKTFYVDAKSREYESGKQPTPVFERCRQES

SEQ ID NO: 62711 - protein, 402 aa, Escherichia sp.
MKRLQAFKFQLRPGGQQEREMRRFAGACRFVFNRALALQNENHEAGNKYIPYPRMASWLVEWKNATETQWLKDAPSQPLQQSLKDLERAYKNFFQKRAAFPRFKKRGQNDAFRYPQGVKLDQENSRIFLPKLGWMRYRNSRQVTGVVKNVTVSQSCGKWYISIQTESEVSTPVHPSVSIVGLDAGVAKLATLSDGTIFDPVNSFQKNQKTLARLQRQLSRRVKFSNNWQKQKRKIQRLYSRIANIRRDYLHKVTTTVSKNHAMIVIEDLKVSNMSRSAAGTVSQPGRNVRAKSGLNRSILDQGWYEMRRQLEYKQLWRGGQVLAVPPAYTSQRCTCCGHTAKENRLLQSQFRCQVCGYTANADVNGARNILAAGHAVLACGEMVQSGRSLKQEPTEMIQATA

SEQ ID NO: 62712 - protein, 469 aa, unknown
  TnpB Polypeptide
METKKKTITQPKGLHKSNGDEESKTRTITYSVRACTPENETYLRQMTDTVRYRYNQAVEMNMKTQEQRKRCKYKTKDGCRCGKECKHKLKTGRQDSPEITKLFQEEKERGMGAHWHYEFDPHKFSNHIQRAAMNEVTELNKAHLNKLKKKEKSNIAGFRSAKKILQDTITIPHNCFHLYDKKSKKLIALEKRNSTWRPQHNDRFWIGNKNMAPKNPRHLLQLKESGGGKYPEGVPRSAILVFCRVKKRWYCHITFHISDEKKDRKRQLSVLGIDQNAGFHSASNGRHYHYTGKIANHNDRIARESQKYEPKKKAAMQHNNWDSRSRKEQKRLLQLAHKKKSDRVDALNRNFVQDIVAGGYTHVAFEKLSTLNTNKKEKRNLPRYVERENHHKMREMSAYKLKRMLEDRGVEVLEVDPKNTSKACSVCGCVDEKNRIETRRFVCTECGHKQHADINAAHNIRKRAEESIK

SEQ ID NO: 62713 - protein, 431 aa, Halorubrum sp.
MANQVTRTYVATIRNHQQVCEELDSLGFAASKLWNVARWTADRIWHETGRIPGHAELSAYLKKHERYADLNAKSSQRVIQELAEAFRAWYTKRQNGDETANPPGYRKRGDEHPRSTVTFKQSGFKHDSKHSRVRLSKGRNFKEHRSDFTLCEYEADPEARIENIQQVRAVWNSGREEWELHLVCRVELEDVDPPGERTAGIDLGINNVAAISFGDEAILYPGGALKEDEYYFGKERAKCDGPNSHEARRLNQKWANRRTHFLHTLSKTIIDECERRNVGTVAVGDLSGIREEESGEVTDWGSKGNQSLHRWAFDRFITMLEYKGEERGITVETVDERNTSKTCAGCGRVDASQRVERGLYVCDECGTVANADVNGAENVRRKLETAKVPPSPTDSSSVDRSNGWMAQPAVHLFDRESGRVRPREQVVDCEP

SEQ ID NO: 62714 - protein, 379 aa, unknown
  TnpB Polypeptide
MKSQEDFDSLKSILDMHSIVFNYASPLQFTEKKNSLIVLHSKVYGNIRKLYPNIPSQVVIKAEQECLASYKSTKSNKHKLKSPIVKKNLSMRLDKRLYSKDKKDKYSIKITTTNGRQSFKFVVYPRLKELMDKYQYCDPLIYENNGKLFISFCFQNKPKEAQKQKLALGVDIGIRRSVALSDGRIIIDRKFNGNKRKLRHLKDCLKSNGTKSARKHLNKLRHKEHNQNKNQTHLISNAVLKTDADTIVLENLKGIKKKKNKYQNKRSISQVPMFELRRIIMYKAENMGKTITLVRPSYTSQTDSVTRKIEGERRGCRFYSKNGLIYDADINASINIAKLSKLPVSQTHYLTYGQVIVNSPIVCKSSASREVLQAPIPLG

SEQ ID NO: 62715 - protein, 248 aa, Okeania sp.
MYSCQQVLVGKNPELIAILTFLCEQSHKLTNMGIYYARQLYFKSQKGIGKYDLEKVYKKNNHYKVLHSQAAQQILRTVAESFRSYYGLIKAYSEGKILERPRIPNYRKKGGIATVSYPKQALKLKSNKIRVPLGNTCKRWFGLDCFYIPMPSNLNFTSIKELRILPINKCFTQEFVYEKEVVVKPQLNQDNVLGIDHGVNNWLSCVSNVGTSAGYRWETPTPLVPLPGGDRGGLVQQTSINYQRKSTN

SEQ ID NO: 62716 - protein, 362 aa, unknown
  TnpB Polypeptide
MFATLNAGRYVYNWGIEDRKNLWQRCHVSTGFNDQANYLKHLKNANPWLKEVHAHPLQDALKRVDKSFDRFFKAHKNGHGYPRFKGRDQYDSFTFKEWENGASFDGKRLFLSKIGRVRIVLHRPIEGEIKTCTVKRKADGWYALFSVIVADAKPSVIDNPVGIDVGIKTFAALSTGEKIGNPEFLHKNERKLKVAQRKVSRRKKSSFRRKKAVRHLKLEHLRVQRSRKSFHFTQAHSLAKRFNPIFVENLNIKNMIRNHHLAKSISDASWGQFLGILFHSAESAGGAYMAVEARGTSQECSGCGTTIQKELSERVHCCWNCGLVLDRDVNAARVILNRGLGRPFGEGAGRNRLPETREAARL

SEQ ID NO: 62717 - protein, 492 aa, Mycobacterium sp.
  misc_feature (321)..(345): Xaa can be any naturally occurring amino acid
MIVRMRSCAQAAKVAEATGGVQLAGKPKPDGTPTFSRYVEIGVDFEAHRPVVESVSVLFELYDGDANSYAATGGPGAQLPSGWMVTAAKFEVEWPADPQRAGLVRSHFGARRKAFNWGLAQVKADLDAKAADPAHESVDWDLKSLRWAWNRAKDDVAPWWAENSKECYSSGLADLAQGLANWKAGKNGTRKGRRVGFPRFKSGRRDPGRVRFTTGTMRIEDDRRTITVPVIGPLRAKENTRRVQRHLVSGRAQILNMTLSQRWGRLFVAVCYALRTPTTRSPLTQPTVRAGMDLGVRTLATVATLDTATGEQTIIEYPNPXXXXXXXXXXXXXXXXXXXXXXXXXPPHPRLPWASGSESQAGPPGSPVRAPTAGSSPPAHHRVGGHLWPGRDRRPRRGRDETQHAPAGVSPIGLRCRNGFGRAAAGLQNGQVQRRADGGGPLVCLQPNPPRLHQPRRHTVPAARQGPHRQTPALPCNGRGSRPRQKRCFESP

SEQ ID NO: 62718 - protein, 299 aa, Hydrogenibacillus sp.
LQTITLRLRLHRPTQAKIRRYRELVEHTTAFANNLVAAGRPKGLTSRTARAYLAGNLPSAVINQALRDVAAHRDVKTFRVLWPSFNNQNLRLKKVGDFWTASFPMQTGRVRVPLAVTRKQAALLERLGRDVRQGAAKLYEKRGRWFLALSVTLPVEEKTAGTESGKIAGIDMGLRYLAVVNAGGETLFFPGDQAASVRRRYHALRRRNTRKRDFGRSLHSWSFYRLQQFIAYKARLAGIRVEWVNPKDTSRTCPRCGHCAKENRNGIRFRCRKCGYRGHADAVGAWNISLAISGLAEAA

SEQ ID NO: 62719 - protein, 406 aa, Hydrogenibacillus sp.
VKIHRAYRYELDPNTEQRILLAKHAGAARFAYNWGLARWIEIYEKEGRTTNAIELHRELNRLKKTDFPWLYEVSKWAPQEALRDLEKAFQNFFRGRKTGRKIGHPKFRRKHDRRDSFRLDNSSRTIRLLLGGEDRRHRGKTRHIVLPRIGAVRLKEKPVRRKKNGAAKTYLPQGRILHATVSREADRWFVSLTVEEEIPDPLPPAGPRAGIDAGLQSFTTQVDETGAIRKTDAPRPLRRALKRLRRLQRKLSRRGVRDEKGRLIERTKNYEKTRLEIARLHRRIRNIRLDFLHKLTTELVRTHPVIAIEDLDVRNLIKNRRLARPIADVGWGTFRALLEAKAKLRGARIVKAGRFEPTSKTCSSCGYVLPELPLSVRAWTCPACGTHHDRDVNAAKNLLKFALTVA

SEQ ID NO: 62720 - protein, 463 aa, unknown
  TnpB Polypeptide
MKYTYQYKALPITEQKLELNLWLRTCQYWYNRQLGDRFDWWKRNRCYINACPLICHLPELRENPNYYSQKKYLPELKTDLLTVGWSSELLDFSRVRANTLQEVCKRVDRAFDRFLSGDSNNKRSGKPRFKSAERFRSIVLEGAGLELHSCSLGGKYLFLKMPKLGLLKVRMHRDIPVGATAKQVQLIKKADSWYVNLRLDDPTVPMNPDGVVFNWDSALGMDAVLHESDYLATSDGEKLPSIKSFRKSQKRLAKVSNRKATKRKGSRSRRKLAKREAREHQRIARARRDHAFKTAHKVIRTGKTVFFYENLNLKGLSKRNAVKEDEQGKYQPNGQAAKSGLNKSWNDAAFGQFFTILEYIAVKAGAVAIGVNPAYTSQLLAYRDEFIFTDCSIRKYWDEIENIWVDRDINAAINIKRVGLGEFPTINRRKGKIVVGHSTTNSTLKEVLSTLRSLEKPTLYAKH

SEQ ID NO: 62721 - protein, 543 aa, Streptomyces sp.
VGELRSVAASFVASGPSGVAVRTRLKQLTPGDEKVLRVVGAHLGSLASKDLKTRCRDSLVHSGETWAGRKRELTPLSSSRWAGSITKATHDQWALARRCQLAHIQTLEAGVRTVKDRLSRPVGQKGTRKAPGGYRSRREWHAKSRRLRVLEDRLAAVRADREAGIVHAVRGGKRLARARHHLDAAGLTESAWRGRWEAERWFCQADGESGKRYGNETIRISPDGEASIKLPAPLAHLANAPHGRYVLAGRVAFAHRGGEWADRVAANRAIAYRIHLDTGRDRWYLTASWQIPPTPAIPLEAALATGVIGVDMNADHLAAWLLDTHGNPTGSPRRFFYDLTGTGGHRDAQVRHALTRLLHWTRACGVQAIAVEDLDFAAEKTREKHGRRKRFRQLISGMPTGRLRARLSSMADATGIAVIAVDPAYTSRWGAQHWQKPLTSTTRKTTRHEAAAVAIGRRAQGHPIRRRTAPPPHDRSDRAGHRTVQAGLGVPGREEPRPRIPGPRTRSVPPGRGANAGNQNAQHRPGRSAEHGFWQQDSLPLSP

SEQ ID NO: 62722 - protein, 393 aa, unknown
  TnpB Polypeptide
MSRYRLLPSPAQVAVLQRHCADARFVWNLAVEQQSWWRPGRRRAPGWVEQCRQLSAARHDHKWLAAGSVVVQQQALRDHAQAMANFFHRSHHKPTWRKAGRDEGFRIVAMRPGHVRRLNRKTGEVYVPKAGWVRFRWSRAVPPARSYRVKLDRSGRWHVAFVSIPAPIRAPGTGHLVGADRGVSVSVALSTGEMFTCPRLSTGRQRRLQRLQRRLARAQRGSVRRAAVKHAIARLKAREVDARKDWAEKLSTDLARRFDLIRVENLRVRDMTRSAKGNVAAPGHNVRAKAVLNRQILASGWGILVTRLEQKAPGRVERINPAYTSQRCSTCGYVADENRKSQAVFTCAACGYACHADVNAARNIAAGHAVTAREGVRIAGPVNREPQLALLST

SEQ ID NO: 62723 - protein, 286 aa, Escherichia sp.
  misc_feature (34)..(37): Xaa can be any naturally occurring amino acid
  misc_feature (239)..(242): Xaa can be any naturally occurring amino acid
MKQQVSFKFRLKPDGQQERQMRRFAGACRFVFNXXXXLERAYKNFFQNRAAFPQFKKRGQNDAFRYPQGVKLDQENSRIFLPKLGWMRYRNSRQVTGIVKNVTVSQSCGKWYISIQTEREVSTPVHPSASMVGLDAGVAKLATLSDGTVFEPVNSFQKNQKKLARLQRQLSRKVKFSNNWQKQKRKIQRLHSRIANIRRDYLHKVTTTVSKNHAMIVIEDLKVKYMSKSAAGTISHPGXXXXVRCLLFRQRTQASVARAVVIQRKKIACHKVNSDARYVDIQRTPM

SEQ ID NO: 62724 - protein, 309 aa, unknown
  TnpB Polypeptide
LRYYKIIKRGKEYPISIRCDLLKIKYVGNKVSEYWAKIPVKGTRSLWVAIKPHRPFPDDYKICESKLYRRNSRFYLNVVIKCKVSLDLDFNFKKILAVDMGERTIASTVLLCNGKISNPSFYGKSIRGIRRHYSWLRRRLQEKKALKTLKKISDKERRKVKDILHKISKAIVDMAVKENAIIVIGDLQGIRQRVRDRGKGKRLNRRVHTMPYYSLKKMIEYKAIFRGVAVVSINEAYTSRICHRCGNEGERRTQGLFICKQCGEYNADLNGAINIGKKFERDIGYMPLSGAACEPALTPTIKLEKPSYL

SEQ ID NO: 62725 - protein, 464 aa, unknown
  TnpB Polypeptide
MAVRRVTFRLYPNGQQEQVLRYHRKLHKDLYNAAVSNRFTQYKKFNHKVEYFEQQNSLPAFKEVLTEYKEIASQALQATLKRVDYAFQRWFKGLGKRPKFKSIRHYSGWTYPAKSGYKIYSIGDNGYLELTKIGSIQMRGKARLWGTPTTCTILYRNNNWYASITVDVDDQLLKESRQLKGNRSCGIDLGCLSAVSLVSHSDGKFATAPQVEPPKFLRKAEKQIKQLSKEKRRKRASNGRKKVRASSRYRKAQKRVSTVIRKVANCRQNWVHDIANRVIKSGHSLVAMEKIEVSKMTRKAKKAHESADRLCLPQTSRKGGKRKKQKAGLNKSILDIGFGMLTGAIRYKVEESGGTFIDVPTRQVKPSQTCPKCGSQRKKELSERTHNCSVCRYTLDRDYSAALVMLLWAIGQLPASGTGVVGDDVSSSTAKTPKRAGSMRQLGQAKRQKSKLIESGLETQASTK

SEQ ID NO: 62726 - protein, 447 aa, unknown
  TnpB Polypeptide
MITTKYRIYPNKNQTEKLEFALDIYRQAYNIMLGELREQAIIDRNMIQAVLPDLKICEPRFREVYSKALQYECYKLFSNLSALSALKKQGRKVGRLKFKGKKLFDTMTYNQSGFDLEHIFGKNGRLKLSKIGDVKVKLHRLPEGNVKQVTIKRINDQWFAFVISDGKTRLEHGDKTLGIDLGINHYVKELDRKLHHSGCSSSLSTRKLPQKQFSVPRNPLKDFSCIQKTSASSNCGFQAAVAHRFFDLVDSEGNKVEHPRNYEKTLPQLKIAHRKLSRKKKGSHNRLKAKKGLNKMYGKMNNQRNDFLHKTSTDLIRRSKIIVVEDLNVKGMMEQKYFNAKNVADSSWNKFIQMLEYKSENSGVQLIKVNPKNTTKTCSNCSHVQKMPLWVRTYKCENCLFEMCRDENSAINIKNLGLGQPYVEIISDSSSEEQLSMKQEAITSAQC

SEQ ID NO: 62727 - protein, 384 aa, unknown
  TnpB Polypeptide
MGHLKSVVAIKLKIPGNKVLFNAMEEYSKCISYITNIGFKNNISNRYKLHHLVYYGAKEKFNLKSQFIINAIRIASQTLKSIKANKGSMPTFKKYMPVNFDKRTFTFSFNKVRLTTLNGRIDIPIEIPEYYWKYLDWKYQTATLTIDKKNKMFINITFRRSNNVVNSDSSNKIIGVDLGINHVAVTSKKQFFSGNKVKNTMLNFKHLRTKLQAKGTRPAKRLLKKISGREQRFKAWVNHNISKAIISSCNAGDAIVMENLRGIRNTRKGKRFNFWLNTWSFNQLQGFIEYKARLNGIKVIKVNPYNTSRICSMCSSKGTRTKGFFHCNHCGFSLNADLNASYNLAKHNSMPDCVLADVNQPHSQSDEAKALQGTEAELMANAQR

SEQ ID NO: 62728 - protein, 311 aa, unknown
  TnpB Polypeptide
MVLNGYKYRIYPNVEQAEMLAKQFGCVRYVYNRALAMRIDAYRNGESVGFAATGKALTSWKRDDETQWLSEVSSVPLQQALRHLEKAYSGFFKGVGKFPTFKKKTHTQSARYMPNAYKLADSPQTPAVTLAKMNTPLKIKWSRPLPGKVISLTVSKDAAGRYFVSFQCERHIELLPQETNAVGLDLGLTHLLITSDGEKFGNPKFFAKLQDKLAKAQRNLSRKVKGSSNWHKQRVKVARIHARIGTLAGTFCTSSQPDLSGATASSVPKRSESRTCLRTARCLKRLATRAGLSLSGNLNTSLRGTGGRWSR

SEQ ID NO: 62729 - protein, 111 aa, unknown
  TnpB Polypeptide
MLKNRSLSKAISDAGWSELVRQLEYKSAWYGRAMVKIDQWTPSSKLCSACGHLMTFMPLDIRTWDCPECGTKHDRDVNASVNIRSAGLVALNACGAAVKPEMAVAITGTRR

SEQ ID NO: 62730 - protein, 508 aa, Allocatelliglobosispora sp.
VVLLSVVCGMVRVVARFTAFRFTVDPTPGQEVLLRRHAGASRFGYNQCLRLVKDALDAKARGGVVKVPWTGFDLINAFNAWKRSGDAGRVMVAAGDGSVSVVATGLVWRGEVSQQVFEEAAVDLGRALAAFTGSKAGARAGRRVGFPRFKSKRRVPPGFRIRCKTSTAGRPGIRVGDDGPRSVTLPGIGVLVVREDTRRLRRMLSKGRARVLSATVAYRAGRWSVVLTCEAADLHEAHQHTQAGSAGTEGRGWVGMDRGLSALVVAARADGREVLRIDDSPRPARAGMARQRRLARSLSRKQPGSANRRDTAARLAGHHAYVRAVRARFLHQVSNQLVKTHDRLALETLNVTGMLQNHRLAAAIADAAWAELARQVTYKQAWRGGRVVLVDRWYPSTKTCSACRTVASVVPLGQRVFTCNACGYQADRDHNAAVNLAVWAEQHHAQTRDPHAGGPVTNARRGEGTGPRTRAGETGPHDAGTTPTPPGVRRGRPRRALSHDPEGLRDRP

SEQ ID NO: 62731 - protein, 247 aa, Shigella sp.
MRYRNSRQVTGVVKNVTVSQSCGTWYISIQTESEVSTPAHPSASMVGLDAGVAKLATLSDGTVFEPVNSFQKNQKTLARLQRQLSRKVKFSNNWQKQKRKIQRLHSCIANIRRDYLHKVTTAVSKNHAMIVIEDLKVSNMSKSAAGTVSQPGRNVRAKSGLNRSSIGIKTPKRLKKHHKNGCFFNTTFAPYERNRRLNWMAPIDSGYEWRFFAPFPSKWTQLPLCGSQPHHRIRASGSCIRTCSARR

SEQ ID NO: 62732 - protein, 492 aa, unknown
  TnpB Polypeptide
MSQKVAIRRVRVHGSVYLGVVDDPVTGQAADEWSADPAVVMSWLCSGFQARFNQHRSTRCKYVHQDGERVLNAAGKPVLVPIGSSVTDISDKNARLLYPHLAALPAMVIQAAEKVERTDWFAATKRRATNVAAGRRAGAMPWFRSRKCGVERFVCWFNGGASAVFARTGRRSGVVTLTGANPAAKRGPAQRCWFKVVLHVRLSQPIRDYTSVRVNWTRRELVFVNASLPVTRRGHTGEARGFDRGVTHSLADSTGRFYDAPNVTALVKSRVFHQRKMAKSRLIAARQHRQFWESTRYQAHKTAAGAAQAKAARIMSDWRQQTSTAIVRDCDLAVFEDLKLANMTRKATGPGAAQKRGLNRVLLVTGLGELAALVRQKMLRAEGIYLAVNPAYTSQRCHQCGHTAKENRESQAVFRCQQCAHTANADTNAAKNILDDGCVLWARESEQSAGGNTGGPAGSKSETDPRIRGFDTSVSTASAMNCEPPSFAHAGI

SEQ ID NO: 62733 - protein, 443 aa, unknown
  TnpB Polypeptide
VGKKQVLNLTYEYKLKPTTEQAQEIERILDVCRKVWNYALRERKDWLNSRKCRIDACSIVSEFITPADTQYPNYAIQCKFLTEAKEKYLELKTVNAQVLQQVLRRLETAFVDMQRKGMGFPRFKNRVRMRSFVFPQMLRNCVQGISIKLPQLGVVEFIKSRDIPDGFVVKQARIVRRASGYFILLALECDVNVPDTMPHGYPVGIDLGLDKFLATSEGELVERPRFFVERQRKLKLLQRRLKQKVKGSKNRRKQGLKIARLHQRNNDTRKDFHFNLAHQFCDQAGMIFVEDIDFRTWAKGMLGKHTLDAGFGQFLTILQWVCWKRGVYFAKVNKDFTSQVCPNCDAHTGKKELSDRIHICPECGYTTHRDVAAAQVIRNRGETALREGFPPQATANPKGVLAVGRIVGDEIACGDGLAGTGNSLVKSPRSRKKGGEVRIYPAS

SEQ ID NO: 62734 - protein, 384 aa, Psychrobacter sp.
MPKQILKAYKVRLYPNDEQQVFFAKSFGCTRFIWNKMLADKVNHYKANKTILNNTPAQYKKEFEWLKEVDSLALANVQQNLRSAYKKFFEQGTGFPKFKKKGIKDSYTTNNQKGTVALTYNSVKLPKIGHIKAKIHRRINGLIKSATISATPSGKYFVSLLVETVVEPLPKTYSNIGIDLGLTNFIVLSDSTKVANPRFLSKLKDKLAREQKILAKRREVAKAQQRKLSDSRNYQKQKVKVAKIYEKITNQRLDFLHKLSFNIIKNHDVIAIEDLNIKGMVKNRKLAKAINDSSWSVFTIMLAYKAEWYDKALVRIDQWYPSSKTCSGCDYVLGKDDLKLSDRLWDCPRCLQTHDRDINASINILNQGLILVKQSKTVGAIGLA

SEQ ID NO: 62735 - protein, 537 aa, unknown
  TnpB Polypeptide
LDVLTVTHDSREEGALAKSQTYRAFVARPSYILDLNGELLEAVPIMTELTSEIRGISSYATYVTRNDVILGERLALVGAIQPAAAGSRAGVTMPDFLASGRTGRSRKERLVQYNVVTSYRSWQERIKAVNGESSKYVSQGWKRTMNANPPSYGVGDFINLGAVDKQYAVIENNPFTDGEITLKMVIRGKRYLLIFPFDNTRFTEGKVTLPLVKVQDGVPVFIFSVVTDNPVVQFSSDYVLGVDVGINDYATVVVRDTTTGKITHQTTLSQRVHSLWNSVKASEKQVHYLREKAVSLSLYDRQGRMAARDEADLHRAAASRKKRELAIIAAQEIAYLSHFYGNAVVAVEDLSWIRNTMQNGRWNRGTFVQWLAHYVSQNGGWVVSVSAFNTSQVCHICNGEVTHPEHKISQCAKHGMFDRDVNAAANIAARAVPKGEKARKTRAKSRKLQPQAPLKTPVARGSLKYPGRDRTKHVPTPKRKNRPRNVKEVTLPISPARVNPTTVLADCNTCSINVTGTFQAAINQGNKTYTCRLCNLN

SEQ ID NO: 62736 - protein, 544 aa, unknown
  TnpB Polypeptide
MTAEVFVDIGYIAGVECIFGGALAKNQAYRAFVARPTNVLDLNGELLDDTRVLASLASEVRDISAYATYVVRNDDGLGDELARVTATKPTTAGRRAGVTMPDFLVSGKSGRSRKEMLVQHRVVTEFRSWQERDKAANGESTRYVSQGWKRTVDASAPSYGEDYVNLGAVNKQYASIENNPFTDGEIILKMVVQGEWHRLIFNFDNKRFTEGKVTLPVIKVEGGHPVFIFTVATDNPVVQFSGDYVVGVDVGINDYATVVVRETKTGQLVYETTLSRRVHSLWNSVRSSERQVRNLRRKAATLLHDRQARMAALDEAQLHREAASRKKRELAILAAQEIAYLSHLWCNAVVAVEDLGWISNTMQNGRWNRGEFVRWLTHYVTQNGGWVVAVSPSNTSQQCHMCGAKVSHPTHKDSVCPEHGLMDRDANAAANIAARAVPRVAKARATRAKNRKLRPQAPLKTPPARDSLKYPGRDRTKNKPTEKRRNHRRTVGEVILPLCPARAQAQRLEATVLADQGTRSTLGTSRAALKRGNAAYKCRLCSLI

SEQ ID NO: 62737 - protein, 410 aa, unknown
  TnpB Polypeptide
MIDTVTYGIVLRRTVVVKLAIPQERHDDLRETTERFRQAAQLVADRAFERDDDGYVITSKTKLHERTYQQVREATDGLNADLVCAARNYAADSVKGVTSAWQNGKYATQPTFTANTVVYNKNAVTYRDDHCTLAAVNGRVKAEYVLPPEGENPQTTYLRNDEWELRESTLHYRDGDYYLHVGVAKDDEQQEAEGGTVLGVDLGVKTIAATSTGRLWSSGYLNHRRREYEQIRGSLQQTGTESAHRTLDSIGDRESRWTEDYLHRISKALVQEAITHDCSTIAFEDLTDIRERMPGAKAFHTWAFRRLYEYVEYKAAEFGIRTKQIDPAYTSQRCSKCGHTERGNRPKQEKFCCQKCSYEVHADYNAAKNIGIKHVRAGQKSPSGRANRQLALKSGTLNVSDEFTSAEVSA

SEQ ID NO: 62738 - protein, 448 aa, unknown
  TnpB Polypeptide
MKLRTIKIRVKDEKVEEEYKEKMKEAKEFYNSCLYLTRFRYFEFVGKTEKLDYEARRSYDVEEWFNDEEAFIGNYYSYGGSFIKKVQEAIGTDLKEKDRQTILMKVCTDWTAYFKTKEAMKDTDVKVNIPGYKRYDYLVCEFNKQMLKIPVKYEKERLIGFLGVEGRIKAPEWLKEEEIQAARFKYKNNYLYVEIIYKKEDKKNRKGLKSRVAAIDPGLNSIATMTFSWMKKPIAIRGKHLKSINQLYNKTVAELNKKVSEYEKTKEEVKEERMRELIVKVTEKRNLRVEHELHKISKEIVRILKEEKVSKLIFGHNKGQKTEINIGKRNNQNFVNIPYNKLISYLEYKCEDVGIDFELQEESYTSKASFLSNDDIPTYVEGDSTKYSFSGTRRRGIYTDKQHNLKIHSDVNGSYNIMRKNEIDLRKIQKAILKANKTIEPVGMRFYI

SEQ ID NO: 62739 - protein, 444 aa, unknown
  TnpB Polypeptide
MTPFSDLYTKSKSMATEMYRTVKMPIRPRSEQRRAIDRFIELNRYIYNASVTAIGLYYEANHKLPSEFDMNKLITKIRDTSPMFKESYAEVEYDAAHRALKGYQSLLEKSRKEYFRTTGERSFDYYPDKLERPRYKKQGRYHSISYIEHGIDVRDVKGPDGRIRKVLKLGKIKGNIKCLNQKSLSQYDECEPVTCTIIRKDYGTHYEYYASVTFDVGAIDSGVININPFNLDPNWTEYMGVDLGVSHIAALSDGTVFDNPHDYAKRKKDFQKKHESYSRTIPYTEDNKKRRNRLKRSYDRLSNMRKDRVENISKHIVNSAEVVVMERLSIRQLKGISRSKAMMNAYSDASLGTLIRRIGEKAAGAACRIVFVNPRGTSRRCSACGADVPKRLSDRIHNCPYCGLTMDRDVNAAINIAIRGSAGDPFPDIKMDESLTCRRWAPEL

SEQ ID NO: 62740 - protein, 189 aa, Okeania sp.
MNHWYNKENSRLQSLKDKQGIKGLTKKQISITVNRNNKIRDYLNKAARYLINWCRENKIFTIVVGVNPGIKQSINLGKKTNQKFVQIPHHSFRFKLKAMCYRYGLTYIEQEESYTSKASFLDGDRIPVYNANNPNEYSFSGKRVKRGLYKTKQNKLINADCNGAANIGVKSNLMGVYPGQTLRHLWLCH

SEQ ID NO: 62741 - protein, 403 aa, Scytonema sp.
VLKAVKVRLYPTTEQQVDLAKSFGCARWYWNYALNACIEHYSETGNSLKLSVYKAYLPQLKKEHPWLKEDCYSAVLQCVAINLNKAYTNFFEGRAKFPRFKAKHHKQSIQYPQNVKIVGDCLEVPKIGVVKAVFHRPIEGKVKTVTISKTPTDKYFASILCEVEAEVNQLKSDKVLGIDLGLKDFAIVHDGEQVTKHSNPKYLKRHEKNLARKQKKFARKVKGSNSRNKYKKLVALVHERVSNSRQDFLHKLSRKLVDESQVIVVENLHVKGMVRNRKLSKSISDVGWGIFVNFLDYKLKAKNGQLVEIGRFFPSSKTCSCCGHIIDELTLNIREWDCPKCKTHHDRDGNAALNIRSYGIRILSMDGGNPVLAVPRRSKTNKPKGGKASVNDAGSLHCTARSV

SEQ ID NO: 62742 - protein, 372 aa, Okeania sp.
MKSIRTKLKLNNKQKTLLAQHAGYSRWVYNWGLSLWNAAYKDGYKPNARKLREVFTNHTKPLYPWMKNLSSRVYQYAFINLGEAFKRFFKGLGKYPKFKKKGRSDSFTIDNSGKLIELDGWSHKLPFIGVVKTYEPIEATTKKITISRQAGDWYLSCSYEFNGITTAKKTDVIGVDLGVKTLATLSDGKVFDSVRSYQKFEAKLSRCQYRNRNKIIGSANYKKAQLKIAKLHRKVANIRRNALHKLTTYLAKNHGSVVIEDLNVSGMLANHKLAKSIADQGFYEFRRQLEYKCQWYGSELVVVDRFFPSSKTCSNCGHVQDMPLNVRTYDCDYCGVSIDRDLNASINLRNAVGLTVNACGRSAADSSGGSRK

SEQ ID NO: 62743 - protein, 377 aa, unknown
  TnpB Polypeptide
MHKRTYKYRIYPTKAQRTSLQKSLDACQWVYNQALAVRRDAWEQEQKLVSRYDTIRMIPSWKQEHHFLLDAYSQSLQEACTRVDLAFQAFFRRVKTGSTPITDGGEKPGYPRFKGQSRYDSFTYPQSGFVLLDNDRLRLSRIGDLKIKLHRPIGGKIKRLTIRRDGVGHWHACFSCNVDQKPLPQIDTVVGVDVGLASFVTYSSGEKASNPHFFRKEEMALARAQRRLSKAEKGTLERARRRKVLSQIHKRIANKRRDFAHKLSRQLVNSFGVIAFEKLDIVDMMGANYRSMNRSISDAAWRQFVQFVAYKAEDAGRKFVRVDPRNTSKMCSRCSRLVAKNLYVRVHDCSSCGLILDRDHNAAINILRLGIQSLALA

SEQ ID NO: 62744 - protein, 519 aa, unknown
  TnpB Polypeptide
MRKLKAYRFRIYPTAEQETMFRRISGCCRLVYNLGLEQRRTFWRQYRATQGRHISCAGQRREIKDLKAEAEFLKEVPAHCLQMALVDLDSAFQRFFAGTGGYPRPRRRLRNDAFTFPDPEQIRVDVRHGVLILPKFGRTARDNGPIRAVFHRQLEGRVRRVTIGRDGTHWYASVQVAVRVRRPQKTDGITEADVIAADRGALVPVATSEGALLGAPVTTERDRRKVRRLQKKLARTERGSKRRLKALKRLRAKTAKLTRRRRDMTHQITSTLAKNHRVVILEDLKVQAMTASARGTEAEPGRNVAQKAGLNRAILDVGWGEIERQLRYKLAWRGGLLLKVPATNTSRTCARCLTVDAASRVSRDRFRCTSCGHEADADVNAAIEIRRRGLIALGLRPRPEQPGLPVEPSAPSTAPCKTREKENVRDSAARIERAGNGAGVRREMSLKPRTSVRGEIHTEPVIAPGVNTVSGRSRPTRTGEGRASKAKRHPPRTSAAGRTRAGSFRRSGTGPAGGATSAT

SEQ ID NO: 62745 - protein, 408 aa, unknown
  TnpB Polypeptide
MDISLTSKLRIVFQSEADRKITYNTLIAYRDACNYVSTYIFNHNFILKQSELQSALYQELRHRFGLKSQMTQSVFKTVIARYKTVQTQLRKERVWDGYKKDNHGKEIPNYIYKDLTFLWKPIEFKRPQLDLVRNRDYSFKKDFLSINTLKGRIFVKVYGLSENPYFDGTWKLGLGKIVRNGKHWYFHLAASKEFPDFEIDHLKHLVGIDRGLRQILTTYDEKGQTHFINGNFLSKKRKHYAKLRASLQAKGTKSAKRRLRALSGRESRWMNDVNHCLSKTLVETYGKGTLFVLEDLTGVTFDTVHARKKANRYELHSWSFYDLEQKLRYKAHLNESEVVLVDAHYTSQRCPKCGTIAKSNRNKDLHQYTCSNCSYSSNDDRVGAMNIYELGKWFVSGVEKPTFLITNE

SEQ ID NO: 62746 - protein, 489 aa, unknown
  TnpB Polypeptide
VESVSTLTYCKGLPTPVAEMNELGKTQLEMFLETYAPIFHCAAIETVNHLLSDVELNKSAWNTHLQKSYGINKRHANGVISFASCKVDGAKENRQRHIKTIQGKIKSVEKWLEKAERKLKLARKFYTKKNWQDSKSGCNFPLSCSIKYRNTNAHYLKFQIHHKKRKFSLFQNKLQHLKSSPIQVSVPKGNIFIVGSKDETFGNQVSQWDGNTIKLRVPSCLESRFGKIVSSQIGNFHRNINRLPESGSKTWHFFYKNSKWVVAVQFTPKPVLQKSISIGYGCIGIDMNPSVIGWAYVDSEGNLKSFGRISLLMGLPSGKQDAQILTACLELARLAHLFECPVVCEELDFNDFKERLGEESRRYARMLSSWAYSRFYQLLESILSNRGIELKTVNPAYSSLIGLVKYMKMYALSSDCAAALVIGRRGMRLSEKPPSSITAYSSVNEEKHVWSFWSQLNKIIKRSSRINRRHDYFAVSNWSFLDNLNTEEA

SEQ ID NO: 62747 - protein, 567 aa, unknown
  TnpB Polypeptide
MLRAMKSVNMKDDEPPSFFMVVGMLLYSFIINYWLKWRFRNKESQEIMARRKKRDKKWMWVIKPGDKIVVSRTAVLPSKKLSRREFRALEEILNIYGRMLGDVLPHASRNIIESYYRLKNEKYRELRNIYPNIPSHYIHGLCRDAVERISSLRRNRARQYSREIFDELVKHLGLGKKDLRSMRLRRHLWRKSREIARHQVDLEMMEGILAPRINSVSLWLVDDHVWKPIDATKININGVENTFFTSVAINTHRGWVYLDLEPSKEFYKLLARGFKPTSHAKIKLDRRSRRVLFHLSLEKEIEIYRPENVKPVDVNENSVAILYEAFTAILETDLAKTTLGYSYRKKSIQKRNGSDSREARKAMKKLREGKKKKDYRMKTANMIVRDALRTRGVIVIERISGEDIRVMIARYRDKQLRHRIYQSALKGELNTIIDKAREYGVPILMVDPRNTSKICPIHNAPIEYGEDRIGICSKGDERWHREVVALINIYLKALEALYEGIAQKGFGVSILDGSPIPLGSTATSEPIEIPRSLWGRWKSLDDHRDVITSLWIKKQSNPKQKNINDNQ

SEQ ID NO: 62748 - protein, 450 aa, unknown
  TnpB Polypeptide
MRDTNSYSITSSYKIKLTGDLKALETSINIYRDALRMLIPIIDDNWESLNEYEFANQKYNCIEKWVHHTQTNQALYDFDEQFPKFPTYLRRSAIAKALGIVSSYRSNLENWEKEPKGQAPQLSLTHYAYPAYYKGNMFRNFDPIRQTIELKVFKNSDWIYETYKLKTSDCTYYQTYLTGKKQNVPIIQKKGRRFYAAFSYEEKVDLVKEESISKICAVDLGLSTDATCSIMDKDGTVYARNFISFSEEHDRLSTQLGRIKRNQKRGSQHNKTLWRSVAGISQDIADKTVKAILDFGNEHGVDVFVLEYLDFKGKNIVKRAHFWRYKRIYKVLAQRAHQYGLRIARVNAQYTSRLAFDGSGWSKRGREIAPETPYALMEFPTGKIYNADLNASYNIGARYFIRHLLKTVTETQRLALEAKVPQVVKRSTCTLSHLINLRSEFVVLTTKTQA

SEQ ID NO: 62749 - protein, 413 aa, Clostridium sp.
MKLCFKFKPQINSKQLEIIEELSYHTTKLYNIINYDLRENGFKNYYDIEKQYKSNWHCDFLHSHTRQQMFKVLEQNWKSYFASIKDFRVNPSKYKGLPRPPKFKNTDKNKNEIIFTNLAIRYSDGILKLSLSKAIKSLFNVESLNFEVSKKLQNIINWYELQQARFNYDKIQKVWHLIIIYNKNEVETTSNNVMSIDIGLDNLATITFKDGINQYIYCGKKLKSVNSYINKRISYLQSIEMKKVGSDKFKNTKEINKLRRYRNNYINDYLHKVSKNIIDKAIENNVSRIVIGKLKGVKQNMNFNKSFVQIPIQRLVELITYKAKLHGISIKLQEESYTSGCSAIDLEPITKKYYDKSRRIARGLFQSTYGIVNADINGSLNILRKAEKCIPDLVNTMRDKGNWTHPQRIRVAC

SEQ ID NO: 62750 - protein, 404 aa, unknown
  TnpB Polypeptide
MALSETYLIMQLIKTIVLKLDVPDNDLAELLATFSRGMNYASQIAFDIGKPIGSGQLQKATYKHLRNNLNLKSQMACNVARQVSGAYKTLQSQIDKKESEWQLLDFDPTSATFSFERDFGISGDTLSITTLAGRRRYKLLNYRYAQRYFDGSWKYLASKLCLHKNGAYFFHLACAKDIPDRNIVDASTFMGVDVGINCLAVASTTDKQCKFFAGGEIKNHRNIRSKERRRLQKAGGRYLGTRSSMRTLKKIAGRETRFMTAVNHKVSKDLVKFATDNGVSAIGMEDLTDIRKRTENKVSTEFRYEHSSWAFRQLQAFVEYKAKEAGIAVIYINPEYTSQTCPRCNHISRNNRRGVAFRCEKCGYETHADRVGAMNIEHRTRDLRYILESQGGLVSPPDATRLFA

SEQ ID NO: 62751 - protein, 454 aa, unknown
  TnpB Polypeptide
MSFGKGAAPDGYVVRTFRVKVMATPAKQHRAYNLLVSGGDALAWCIDRFHARIREGLPNANSMEQMWPDQKAHGPFGELMADCAQDVTKAWSAALFETLKRKKKGEQARLPLRKHWVVPVTWRKGRFDLVAPAGGQRARVRLGTAQGHPDLVLALSHDHPYDPGQVRAVRLFGEAGELFIDITAWVAVAKAEVMPLKVAGVDPGIIHPLAIAAGDQALLISGRAVRAEEFLHLEDQKGRQKKMATKRSPLRAKAGQASRRGSRRWKHLAQSQRKAEAKDRRVVKLANNRGARLAAGFMVQHNVTLAVIGNPTGIEKKDSGREQNPRTARWARTHQRDALRYRLEEARIHAALTEERGTSSACPDCGAKATKRGRRLVCTNFVCKKTHHRDIAGAQNMVRKLGHVPSELARTEHRRVGPPARRDRRRHLYDADRGLARTGPPHPQSWVRSRSLLP

SEQ ID NO: 62752 - protein, 454 aa, unknown; identical to SEQ ID NO: 62751
  TnpB Polypeptide

SEQ ID NO: 62753 - protein, 483 aa, Paenibacillus sp.
MSDPLFMYRTYHVWIKPGHRLFAYLDEACQCAKNLYNMANFYLRQVFTAKGQQTGGQPLQQLVMATLSAHLDAMNERRRASNRSRPFVLPTPEQPFLSYAFLDALFKVMEQPDYRSLAAQSSQGILKLVFQNWASFFASMKDYRKHPEKYTGKPNLPGYARGQVKDVVFSNQDCVIKKGRYLKLPRTKLQLNIGKLGAADGKLMQVRVLPRHGHYLVELVFACPQRQQASEMELRLNVRPADAYMAIDLGVNNLATIVTTTGAQPLIVKGGMAKATNQYYNKMKAYYTGILRQGKAPQEGLHTSKRLERLHRKRYCRIKDLFHKTSYHIVKLAEKQGIGTLIIGQNKGWKQASGMGRQTNQTFCHLPHRQLISMIQYKAEEKGMTVILTEEAYTSKASFLDQDPLPRFDEPPPAAFSGKRIHRGLYASLAGLINADVNGAANIMRKVFPNVTAKHTNGVEGLDGNQTVNVSTPRRLSILRTSG

SEQ ID NO: 62754 - protein, 387 aa, Streptomyces sp.
VLQQSLRDAEAAYRNFFASLKGARKGPRLGAPRFKSRKDARQSIRFTANARWNITDSGRLNLPKIGAVKVKWSRTLPATPSSVTVVKDAAGRFFASFVIDTDLDADTMRMPATDRTVGIDLGLTHFAVLSDGTKIDSPRFLRRAEKELRKAQRELSRKQKGSKNRARARLKVARAHAKVADARREFHHQLSTRLISENQGIAVEDLSVAGLGRTRLAKSVHDAGWSSFIGMLTYKAERYGRTLVKIGRFEPTSRTCHACGVVDGPKSLNVREWTCSACGTVHDRDHNAAINVKTAAGLAVSACGAPVRPERSRHSVKKQEATDSRPETVPRSGHGNRWRWPESSSLQGEEHVSPSGRARHRGTPCGWGECRPRPSRPAAPPGRRGPF

SEQ ID NO: 62755 - protein, 311 aa, unknown
  TnpB Polypeptide
VPRYKSRRDGEQSAEFTKSARFKVGHADGCKWAFLTLPKIGRVKLRWTRELPSKPNTVTIMRHADGSYEASFTVQVDDKADAPEPLHEACGIDMGLDSLMSIVYTDGTREKIPHPRTLNRKMRRLRKLDKQLARETKGSANHAKTRLLKAKAYGRIRNQRRDVAYKLASKVAGENQAVALETLNVKGLARTCMAKSLLDANWTRIIDRIQQLGVQYGRTVKRIDRWYPSSQICSQCGRRDGRKPLDIREWECPQCGIRLDRDWNAALNILDAAGLAESLNARGGDVRRRLAQTGRNADAREAGTRRTARLH

SEQ ID NO: 62756 - protein, 459 aa, unknown
  TnpB Polypeptide
MAKFAVPEGWCIQAFRFTLDPTEDQAASLARHFGARRKAYNWTVATLKADIQAWHAAGVQTAKPSLQVLRKRWNSVKDDVCVNSGTGAVWWPECSKEAYADGIAGAVHAYWNWQTSRSGKRAGKRIGFPRFKRKGRDADRVCFTTGAMRVEPDRRHITLPVIGTVRTHENTRGIERLIRAGRARVLAISVRRNGTRLDASVRVVVQRPQQSSVVLPGSRVGVDVGVRRLATVATAEGTVIEQVANPRPLDAALGQLRQVCRARSRCTTGSRRYRARTIAISRLHRRVNDVRTHHLHVLTTRLAKTHGRIVVEGLDAAGMLRQKGLSGARARRRGLCDAALGTPRRHVSYKTGWYGSALVVADRWFPSSKTCHACGHVQDIGWAEHWQCEACSASHHRDDTAAINLARYEDTVSVVGPVGAAVKRGADRKTGPRPAGGCEARKGRSRKAAEQPRDGVRVA

SEQ ID NO: 62757 - protein, 528 aa, unknown
  TnpB Polypeptide
VHEQLPVSSVGGWGDVAGPAPGVVPEAPSAAARRSGRGPARRTIGGDRRREHMGDRGEGGHARPRAPVRGGATGRRSGGGCTQIQGPHGTRAATRVSVAGEIQSVVVEIVFRRVGRVRVGVAGAPVYRAPVGCGRVRRSFKFRMRPTARQHVALQQCVDAHRELYNSALQERRDAWRANRTCIRYGDQSAQLSEIRAVRPDVGVWSFSSQQATLRRLNRAFDGFFRRVKTGDRAGYPRFKSAQRFGSVEWPKDGDGARWHPDASRIYLQGIGQVKVTAHRTTAGRVKTIQIRREGRHWYLVMSCDDVAATPLPATGTPVGVDVGIASFATTSDGTHVHNPRWNRNSAAKLAAAQQKLARAKRGSNNRKRAKEIVGNRHRKVANQRRDFQHKTARDIVRDYDLVVVEDLEIRNMLRRAKPVADPNNPGHYLPNGSAAKSGLNRSISDAAWGQFVSILRAKAEDAGRAFIEVDPRHTSDRCERCEHAAKENRVTQALFQCRSCSYETHADEHASRNILRAGLARHAVTAA

SEQ ID NO: 62758 - protein, 309 aa, unknown
  TnpB Polypeptide
MDEKEEFLEKISDVLNNYFEVGSRSPKKLKEFTEYIVKSKKNSTDYLHFEDKSFPSYIKKIKGRYFYKDKKNKRKKLYLKDFNFEKGIEIIYEKETDKYFLHVSVDSNWFPIDDKRNDNQIKFKVEKENRIISLDPGVRKFLVGYDPTGSSIFIGEKANNEILNLFHMIDKCKNKKEKFLLWKKLKNMISELHWKTISFLIENYDTILLPEFKVSEMVKKKKLSRSTKRMMMMFSFFSFKQKLKWKCDLYGKKLIIVDESYTSCTCTNCGTINKTKGKETLKCYSCEFTVDRDVAGARNILIKNVILIQ

SEQ ID NO: 62759 - protein, 346 aa, unknown
  TnpB Polypeptide
MILTFKIRHNTDFSTELKQAFKIAEFAVRNPKCRTSKDVKAFGLKSAISNQILKKYGNQKTIKQVHNVNLVVPNQAIKVDKDTRTIRVVPLKLVLNYQFPDFQKVNQIELDKEFAYVSCTISEQPEMIPQQFIGVDRNTTGHVAVTANPDTGKIEKLGKSALHIHRKYSAIRKQLQREGKFRKLAVVKDRESRIVKDLNHKISRKIVNMAQVQHAALVFEDLGGIRQTRKQHRSFKYALHSWSFYQLQTFVEYKAKLLGVPVLYVDPAYTSQDCSRCGAWGQRNGKGFKCPTCGHVDHADVNAAFNIALKVKDMIDRTQKEMCTMGALIPHDAMLECSATLEPHRL

SEQ ID NO: 62760 - protein, 302 aa, Moorea sp.
MEFKAILKEPQKVAINEAIRTARFVRNKVLRFWMDNHGIGKKELYRYNTQLRDEFEFVKDLNSHACQASVENIERAIKRFFDNCKNKNPGKKGYPKFKKHSRSVEYKQSGWKLSPDKKSIKFTDKKGIGKVKLKGTWDLWRFDHKLIKRVRLVKKADGYYVQFCVKVDNSEQLEATGFTVGLDVGLKEFYTDSDGCSEPNPRFYRKSEKRLKFYQRRVSRKKKGKAVGHASRTSNRKKAINKLGRTHLRISRQREEHASVIRWSETQHWGDWPQGLHLDNLNSMLVRIQPSRNLSDIPTPRY

SEQ ID NO: 62761 - protein, 402 aa, Alphaproteobacteria sp.
MTINRKAALFRLYPTPEQDAQMAQIAGACRFVYNLALEQRRDWWRPGRKFNSVSQCREVTELRAQVDWIKAAPVAALQQALRDLDRAYQNWWAGRADYPTPRKKGFNDSFRFPDPNYLTLRRTGKSSGQLKLPKLGWVRLRGWRALPGDLRNVTVSRRAGQWFAAIQCEREIPEPIPSSLPSVGIDMGVAVFAALSDGTSIAPANHGKKALRALRKAQRALARKRKGSANRRKAVRRVARIHQRVANARKDFLHKHSTTIAKNHGTVVVEALNLRNMSASAKGTTEKPGRKVRQKAGLNRAILDQGWGAFRIMLAYKLADRGGRLVEVPAAYTSQTCSACGVVDSASRVSQAVFACSGCGHTANADTNAAINILRRADSALKPVEGHRVVRPGEAGTSRSAA

SEQ ID NO: 62762 - protein, 535 aa, Alphaproteobacteria sp.
MTYRHHDIETVPHGESGLMPRSLRPKDAPPPVMRCDLLPSNMTAGKDARVRDLLAAYRKGAVLLGRDQWHLFHETGRFNKTHDVDKVTFAAVIGAANRVQMCRWQVVGQLDSWLSNRANDFRDTVNGSTLDPDTRHMLHVINRAGAWFARKDVAMRDTGEIIPDHIRSLARSIMRHVMGKHRRPDLSHISMRLDHRAACLSAPTKANQHGRVGWWVNLSTMTAGKKIVVPLLTHARHESRKGKVSNGVLITEDRDTGRVMFGVVTDIAEECAASRAAYRPERDVLPLDFGLSTLFAGDDGALLGQNWLKALRAYDHRIAEIAKGQQRRGRKPRDSARYREAVTALRGWIRTEVGRVLNRLVAVRRPAALVLERLNFQNPALSRRLNRIIQNCGRAVIRAKLADLADRFGIVSEEVNPAYTSQTCSCCGYVDKRNRPSQGTFRCLWCGSRMHADVNASRNIGERRALSIGSVFQSKAAILAELVSRFSKRRVFSTRSGGSGSTADPRLTNPYFGGEKPALARMSRKAKPLPGLVAA

SEQ ID NO: 62763 - protein, 570 aa, Nonomuraea sp.
  misc_feature (483)..(537): Xaa can be any naturally occurring amino acid
LTSRWTWLSAPLNSVSSVSKSAHTSRMISSMRVRWVPVNTWCRSLVMGGRELVKRQRGHKARLELTCEQSAILQEQASAAITLWNCLHAYWTHFPGRRPTLAQADQAIRQARTDVPFLAALPAQAAQAVLTTYRQAWENFFNPGHPAKRPTFKSKKRWPRLAVDVPQVRTMWIVRLSARWGQLSLPMVGRVRFRWTKPLPGVGKSSPAGKVTGARLVKDAFGWSIVFRTETLVQPAAPHQGEQVGIDRGVTVALALSDGTMREHGPWLTGRETGHLRRLEKKSARQRAARPSKTRPSGREQRTYHQIARLRAKAKRRAVDWQHQTTTELAGTFAVIKVEELAILNMVTSAKGTIQAPGRNVAQKAGLNRSISGQAWGRTVTLLEYKSADRGGQVVKVPAPGTSQTCHRCGHRDPASRNGTVFACVNPVCGWVGHADTNAAININNAAGPAVSGRGDLSLTRSAKRQPPRAAQPRRDGRTLGLXXXXXXXXXXXXXXXXXXXXXXXXXXXXXXXXXXXXXXXXXXXXXXXXXXXXXXXLGLQAGEEVKGSRRSGPGAASRDRTAPCGSAGG

SEQ ID NO: 62764 - protein, 377 aa, Cyanobacteria sp.
MKQTLTIVCQLNPTPEQAQKLDKTLVAFAEACNYVNETVNPQIKNKNRIQAETYKEIRSQFGLSANLAVRVCARVAANRKVGKPVKSFKSTSADYDARIFSYREKDQSASLTTVDGRLVMPMVLGNYQIGKLKGHTPTSATLCKHRDGLFYLHVQVKDETPEPINDSGVKGVDLGRTDLAISSEGERFSGNEVKAKRDRFALRRASIQRKGTKSSKRLLKRLSGREKRYQTWVNHNISKRIVECAYSANQAIALEDLTGIRERTNQQLRSKTERRRSNSWAFYQLRMFIDYKAAAKGVPVVLVNPAYTSQTCHRCLHIHPEKGKSYRSGKTFKCGYCGWKGDADLNGANNIKRLGGVVTRLESASLLSCSLLDRVTG

SEQ ID NO: 62765 - protein, 405 aa, Cyanobacteria sp.
MGFLWIILPEKLGLKPRPSRAAFSALWCYNPIMRTLKFKLYQHKRNRYLKRQINGAGVIYNHCVALHKRYYRLWGKYLNCAQLQKHIAKLRKCNRFWQLVGSQAVQDICQRIDKAYKLFFKHQGKGFRPPGFKKVKKYKSFTLKQAGYKFLGGNRVKIGSKVYQFWQSREIEGKIKTLTVKRTPLGELFITVVVDSSEKLITPKSGKTAGFDFGLKDFLTCSEGFKIKSPLFLKQSIQEVREASRALSSQKKGSKNWHKARLNLARKHEAIVNRRRDWHWKLAHELTDRFDVLYFETLNLKGMQRLWGRKINDLALTEFLSLLECVAAKKSKRVVYIDRWFPSSKTCSECGHVLNELKLKERQWSCPSCSTEHDRDLNAARNIKSVGASTDSLGDVRQSQTAIAV

SEQ ID NO: 62766 - protein, 256 aa, Oscillatoriales sp.
MLLSIKTKLKLNKSQTTIMSKHAGIARFTYNWGLATWSNLYQDGLKPNKYLLKKFFNNHVKPELTWIKEAGICQKITQYAFDNLGNSFSLFFSKKAGYPKFKKKGHHDSFTIDASGKPIPVGGTSIKLPTIGWVKTYEGLPHTTCKSITISRAADSWFIAFAYEQEPQPTVKQYDVVGVDLGVKELATLSTVVVFPNPKHYKTHLNKLRRLSKELSRKKNSKPQKKYSSSNHYLLRQKPRNDSSRRFKCFGAASQS

SEQ ID NO: 62767 - protein, 369 aa, unknown
  TnpB Polypeptide
MKEFGWMINEAIRIGIEQNLTSQKTFNSNVYHYLSDNTEFLKMYVSRAIIVAKSKINDFRKIRKKNPSAIIPHYKKPYVVVDKSSYQIIGNILLIGIRPGQPYVGIPLNCHTMAQISDSSIKIGTITITSDTLSIPISKETEGIKSTEFVGIDTNLNNISAVHSDGQVDVFSDVVKISKTKERYRKVKSHFRRNDVRIRRKLFRKYGAKQQNKTKQIIHNITKKLADEKKQLIIEDLKGIGKLYRKGNGQGKKYRARLNAWPFYEFRRQLEYKSKWYNGIDVIKIKPNKTSSKCSICGAKIISEENRQIRCHCGHRENRDINAARNILYKGTPCVQLRGLRLRPNASQGEAMKQSKDVEQIVMSQINQQ

SEQ ID NO: 62768 - protein, 420 aa, Microcoleus sp.
MLISFKTALVLNNKQVTAFRKHCGVARHAYNWGNAVIREILELRETDKSIKVPSSIDLHKRLVAEVKPENPWYYQVSKASPQQALAELRTAWDRCFKKVSKQPRYKKKGRSHDSFYLEQGTKAKPGIRNDGKRVKLPKIGWVRLTEALPVNSVHNCVISRTGDSWFIAIKYEIEKPVVATNRPTIGVDIGIKELAVTSDCKVFSNPKAYRRMSKKMKRLQRSVSRKVKGSKNRWSAIRLLARHHAAVANIRKDAIHKLTNHLAKNHSVVKIEDLSVKAFLKNPKLAGAIADCGMYEFKRQLEYKTEKFSSQLILVDRFFPSSQICSGCHVHRHKMPLKNRVYHCPECGHTENRDLNAAKNIERWFEGIYIPISSDQTVSSTEIACGADKPLKSHLETALKQEVSTETTNVQLSLDLGSFG

SEQ ID NO: 62769 - protein, 395 aa, unknown
  TnpB Polypeptide
MQLTKTIILKIDSPDENLGELLSVFSQGMNYASQIVFANNKPMGSDRLQKATYRYLRNELGLMSQMSCNVARQVAGAYKTLQEQVNIEQTEWQLLRFDPTSATFSFERDFGFCKDTLSIATLAGRRKYKIQVYEYAQKYFDGSWRYSASKLCKHKDGSYFLHLVCEKEIPDTKVTDASTFMGIDVGINCLAVASTTDRKCKFFAGGEIKDHRNIRSKERRRLQKIGGRYLGTRSSMRLLQKLSGRETRFMTAINHTVSKRLIEFALENEVSVIGMEDLTGIRGRTEKKVSKEFRYEHSSWAFRQLQGFIEYKAKEAGMAVLYVDPAFTSQTCPRCNHISRSNRNGLRFRCEKCGYETHADRIGAMNIEHRTRDLRYIFESQGGLVSPPDATRLFA

SEQ ID NO: 62770 - protein, 400 aa, unknown
  TnpB Polypeptide
MSRYRLLPTPAQEAVLRDHCGHARYVWNLAVEQHAHWHPGRRNAPGYLEQCRQLTQARAGHPWLAAGSQTVQQQALRDFAQAMAAFFDPANPAGRPSWRKAGRDEGFRIVGRGRQWEVRRVSRKVGQVWVPKAGWVRFRWSRAVPPEVKSYRVTMDRAGRWHIAFAVIPGPVPAPGNGQVVGIDRGVAVSAALSTGDLLHAPSLTARERIRLRRLQRTLARAKRGSNRRGRVRHAIARLRARETDRRKDWAEKASTDIARRFDLIRVEDLQITNMTRSAKGTPENPGRNVRQKAGLNRGILRSGWGLLVRRLEDKAPGRVEKVRPAFTSQRCSACGHVDGKSRESQAVFRCTACGFACHADVNAAIDIAAGHAVTARGGDGITRPVNREPHLLASLTGRG

SEQ ID NO: 62771 - protein, 393 aa, Uncultured sp.
MLAGGEGALTLTVMMKVSPEPESEQTVLDLLRRYRDALNYSIRVIIANKAVSLGKAHKLLYKELRERYGLSSTIAVGCYRDAIAIAKSWLRNPKRGKMPTVKSLRMWLRSEDGYRVKGDRVELIGGYRFKVMGWDRRYDNYPNREARLVFREGKFTLYVYKQMPRPARYAPKGVLAVDINERQIVVGNSSVEQRVETPIESALRYRRLAERLQEKYSSPKYNAWLRRSGVRRRVRHFRRKAKNIIEDWARKTSHTIISLAKQSQLAVAREDLTGLVESLRKLPKGHRTALIMLGYRRLAFWVDWQAEKNGVPLLVVDPAGTSSTCPRCGTKLVEVGHRRLRCPNCGLEADRDVIAMLNIERRALSKMGGSLATPTAPQMTDVNPNRWGEPPHL

SEQ ID NO: 62772 - protein, 422 aa, unknown
  TnpB Polypeptide
MQIVVRSAKQNYVPTDEILSLLEDFRCMVNDCIRIGLRENLTSMRSLSLKMYHKLSAYQLPVCYRLTAISRAAGILRNYRKASREHQNARIPYVKRLSLIDCYGFRIFGRLLRLPFRRGEYVFVILNGHTLEMISRREARSVTLTTSTLSISFSKELEEKKQRGILGIDRNYDNVTMATSNGLLRSIDLSETTRIKEAYRQTKGRFTRNDARVRKSIFAKYGKRERNRVNQILHRATKEIVAIAKSDNLGIVMEDLKGIRKLGRKGNGQGRRSRAKLNSWSVYEFQRQMRYKAAWEGVPVFHVSAWGTSAKCSICGEKTIPNEHRMLYCKNCNLSFDRDENAAKNILAKGLVRFASDVPPNEAMKWNPEGRRMQQVIHGADDGKRNSMGHTLQSNQNQLRLQLELEYLVRERLGGLPPCQCC

SEQ ID NO: 62773 - protein, 433 aa, Cyanobacteria sp.
MKLTHIYRIKPSTEQVAIMDTWLEMLRRHFNYALGQRFDWLRRTRCQIDRCSLISEPIGDIPNLFPSYNFQAGELKTTKELFPIYKEIHAEVQQQNLKRLDKAWQRCIKPDKSGKRAGRPRFKKQGEMRSFTFPRINGPKAGVNKIEAGVLTLSKIGSMPVIMHRPFSHGFELKTATIVKKADGWYIAISLEDDSVPSPKPIDEIKTVIGIDLGLKAFLVTSVGESVEVQQHYRKTQKHLARQQKRLARKTSGSRNAQKQKEKVCRIHQRIGRKRENFHYNIAHQLVKQYDLIAVEDLNIKGLRRTRLAKSIYDVAWGKFLTILEAVALRSGVHLVKVSPHNTTVDCSRCGTKVPKTLAVRLHECTKCSLEMDRDENAAINILHKALNAVGLTVSAYRRLSGCTPDEVGIPNCEFGKLTLILTDIASEDVTSL

SEQ ID NO: 62774 - protein, 1451 aa, Streptomyces sp.
VVSADRSRHRRGGDGDTRRARLRPDPAAVSGALRRAGRRRLARRTGRAAPLLRAAARRVGRGGAAAAGLAPAARRARRRPRVHRRQRRRAAAGPARAAARPGADGRHRQAAPPPPRRLPPGGPGGTARAGGRRAGDRRPGRRPAGRAHRPRVRGRRRRPGRRGPAVLRRPGGRPARPGPRGPGGLGGPGGAVRRRRARRRAGPRRPRTAAAGGPAAAAGVGGARRGAAAGGAARRRRGRRAADAAVGRRGPDAAAHRAATAAGRAVDAQGGGRPRGRGRRHRAAGAGLRGDRGGGQVHLAGAGVPPADPPRPRRRAVHDVEVPQHGAGRGAAEVHPVGGQRARGQPHLQDPPRPAGHPRRRGAAPQLAGRAAAAVQRAARRDVPGGPAPAAAGGGRQVQRHGAAPAGGEAGDDGPVAGQRPLGPDLGRDDRAGPALRRELVLRPRHGRDGPHPARGRRRPGGVLSRRAPFRLRRATAPGARPVARAAVTPRPARPPHAAVRSGARGARPPRTGRSMTPPRPERPTHTAPRPGRPTHAAQRAGACGARRPQADRLTAPTLAARGEAAAASGVPEGRSPSEASRPAAGRGAAEGRSPSGPAPALVHRRDAVPQRDLRAPAQLRDPGHVQQLARRAVRAARVEGDPARVADDVPYGLRQLADRQVLAAPDVDRRVVVVAAQQREARRRQVVDVQELPARRAGTPEHHLLGAALPRLVEAADERRQDVARLQVEVVAGAVQVRRHRRDVRRAVLPPVRLHLLDAGDLRQRVRLVRRLQRPGQQRVLADRLVGQLGVDARGAEEQQPADARGVTAGDDAQLDAQVVLQELHRVAAVGHDAADLGRRQHHRVGPHRPQPRRRPLGVAQVEFVAGAGQDLVAVGGQPAGDGRADQPAVARDEDARAGREEIVADGRGRFVRCSHRTCGAVTPGLKPGTETPSPFVGDAVVSGGNYIQYVSRYRLRPTSEQQRVLASHCAQARFVWNLAVEQHSWWTPRRGSAPGYVAQARQLTEARAEFSWLRAGSQMVQQQALRDFAQAMANYFAGAHGRPTWRKAGRHEGFRIVAVKPECVRRLGRHTAEVRVPEAGWVRFRLSRPVPDGVKSYRVTEDRAGRWHLAFAAVPDPIPAPGNGATVGVDRGVAVAAALSTGELLTIAGLRPPEARRLRRLQRRLARCRRGSRRRHRVKAAVGRMHAREADRRKDWVEKTSTALARRFDTIALEALNIRAMTASARGTAAQPGRGVKAKAQLNRGIRTVGWGAPARRLEHKAPGRVVTIDPAYTSQRCSACGTVDREARGEPSRLPLPRLRTYGQCRRERRQKHQNGCRAGSRCAGRATGCRAGAPRTSTRSTLGLSVDRVGIPASGRRRTPKVRILPSGGMIRGKEPWARRPSSPASPARTARTSPNCCSPRATRCTASCGARRRSTPSASTTSTRSRRSPAAGWCCTTRTSPTGSRW

SEQ ID NO: 62775 - protein, 131 aa, Helicobacter sp.
MSMKAQRKGKTLLSIDKFFPSSQLCSYCGVNTGKKHEGITKFTCPHCKTTHHRDYNASVNIRNYTLGMLDERHKIKIDKSRVGIIRTDYAHYTNERIKACGASSNGVISKYGNILDLASYGAMKQEKAQSL

SEQ ID NO: 62776 - protein, 472 aa, unknown
  TnpB Polypeptide
MLLSYQYRAYPDTNQKLVLNYWRRVCQHWYNWQLGDRFNWWEQNRNSYTVPNGEFCYISCSLPPMDLRDNPNYYSQKKLLPGMKKDLVKVCRSGELLDYTSVPSQTLQDVSKRVGEAFERYIRGDSNRKRSGKPRFKNSASYRTMRIDGQAVTIVRVEKNWLFLSISLLKGCLRVRLHRPLPDGFTLKNVLLTKKADGWYCTIAIKDPTIPVFAPDDVTPTWENSLGLDAVLHENDYLATSENAKLPALKSFRQSEFQLAKVSKRKSTRKKGSRTRSKLAKRESRVHQRIARARKDHAYKTAYALVRTGKKVFFCEDLNLQGLSKRNKVKKDTQGKFLPNGQATKSGLNKSWFDAAFGQFFTTLDYIASKAGAVVVKVNPAYTSMLLSYRDEFIFTDCSIRNYFDLRELLYIDRDINAAINIKRVGLGLFPTINRRSGKIGKSITPSTAKQVLEVLKGSRSPHRTCTQVGAG

SEQ ID NO: 62777 - protein, 221 aa, unknown
  TnpB Polypeptide
LAQWHNRNKQNGNRKQRIRASNNARKYYLKSAKHHARIANQRRDFLQKTTTEISRKYAHIRIEDLNVQGMIANHKLAAAIADLGFYEFRRQLEYKAPMFGTRVELVDQWYPSSKQCNKCHHIQPMPLVERVFVCGECGHTIERDLGAAINLKHAPSKVVRSALTLILKRLWTRRSRLPRAKQKVDFNIVPRCPVLYQFYVAGQWYYRRESEGVVKSQGADA

SEQ ID NO: 62778 - protein, 499 aa, Acidibacillus sp.
VCEFPLRVTRRQERTLEARFEAGRQMYNVLLGEARKRLSLVRQSIWYTKAKKSSNKKERQAHFAAARQAHGFSAYALEAFADKIRRTTWLGDHLDSHVAQKLADRAFDAVQKVAFGKARKVRFKGKRGLHSLEGKTNAACIRWREDRVLWNGLELPMVTDVAHDPVIQHGLSSRVKYVRLVRKDIHGHSRYYAQLVCEGVPYVKRNEKGERTHPIGNETVGLDIGPSTIAIVGNTQATLTRFADEVVRDHKKIRRLQRKQDRQRRANNPECYDEKERAIKGKHPTKKSRHQLETEAVLRELHRRETAHRKTLHGQLANQVIAIGTRINTEKLSYKAFQKMFGRSIGVRAPKLFLSILTRKAESAGGGVEKFSTYHTALSQVCLCGQRHKKRLSERVHACDCGVVMQRDLFSAYLAKHVENERLQAASAYEHWQGAEPLLRTAWQQAYNQPASGRPAPSSFGTYRSQSGSFEKESLPKHEARDVVVMAQVNARACESAKV

SEQ ID NO: 62779 - protein, 453 aa, unknown
  TnpB Polypeptide
VETLSIVPLKGLSAVLQATLKKAQQEAARVWNDLVTIHRQAREIGQQWPDRSELQRLTKGRYALHSQTVQMVCHQLLANVDATRERRRQEPKSRAWLKYPHKEKRFFPLYWPGQAVHHDAKGRRLVLPMGRGRKSLVFRVDLDFEPQGVKLVWKDGYQLHVVRPGQETKPAAPGTVKACVDLGEIHQAAVVTDTGKALVVSGRGLRSQKRLLSKQLGQLSRARARCKKGSRRDRKLAQARRKRSALSARRVRDLRHKGTRQVIDFCREQGVGTLFVGDPRGVREKDCGRHHNQRVSRWEVGKDLSYLGHKAPLAGMACFTGEERGTSSRCPPCGRRHKPKGRLWRCPACEFVGHRDLVGATNMHALAFQQEVTFPVSVTYRRPGPERAACGVNNRKPGHPPERRSSLDTGQPKAVVVSVMPPAWGATGLAGAPKGAAPAGSVETKKLIPFIEL

SEQ ID NO: 62780 - protein, 384 aa, unknown
  TnpB Polypeptide
MIKRMIQMSKEYITLHHIKLYQPTNRKRAELNKLSNNWNKAIRSALKIVKHWGFTSYTRSHKEVYRVLRNNYNLPSQVAAEANRKAIESYKSCNKKFRNNIKFNYQAPVDLVKDKSFKLIRKGNGTNIIKINIEPYNNVYIPICLSEYHLNYLNNNKYSLKTAELYKQNGEWYLNFVVSYEVNIKETNSYMGVDLGIINLATISVISDKETILHTEHLSGKELRFKRMRYKDKRKSLSKKSDSIKTTLIAENRITKETNWLIANKIIKIAKKYNSTIVFEDLKNIRKNITTNNSLNNYEKNSWAYYQLKQFVKHKANLNNLPVIDVKAYNTSQKCHVCSHKGLRETQDLFECPNGHKFNADTNASINIAKLGKNKYNDLIDKTA

SEQ ID NO: 62781 - protein, 406 aa, Oscillatoriales sp.
MRTAYQYKLRPTKQQVVELDRWLSMLCSQYNYLLADRFNWYEQNRSPVNACPLVCYLPELRDNPDYYSQKKTLPQLKKTHPWYGEIYSQVLQDIVKRVKTTFDRFLKGDSNGKRSGKPRFKSRSRYRTFTYPQMKDGCLQDYSISLPMFGKVKVVLHRPIPDGYKIKTASVTKKADGYYLTLSLEDKAVPEIKPDFNPNSITGIDVGLKEFLTTSEGETVAIPQYYRKAQKRLRVAQKRVSRRKKGSNRRKKAVKQLGKCHKKVADRRKDFHFKTASKLLLKYDVIAHEDLNVKGLARTKLAKSVLDAGWSSFLSILTNKAENAGLLVVPVSAYNTSQDCSNCGEKVPKKLHIRWHSCSCGCELDRDHNAAVNIKNRAVGHSVLKAKSLLSDSRIVLEAHTISASD

SEQ ID NO: 62782 - protein, 326 aa, Lactobacillus sp.
LKNSDSSSLQLVNEFLTQSWKNFFQDKTGKIGKPRFHSRKYLKKSYTGKSIIKIVGRRYLKIPKLGYIKTSKTGALRNIKIKRYTVMLEPTGKYYLSLQAEVPEPQKHRLTGKAIGIDVGVADLAILSNGLKYSSFDGSYFEKKAKAWQRKYSRRRHWAKLLALQDKNRKVLCPRSLESFANWQKAQKLKARYQAKAANQRKDYLHKLTTHLVKQYDVIVIEDLKTKNLQHNHCLAKSIANASWRMFRQMLEYKCKWYGKKLIAVDPKNTSRICSECSYNSGAKPLEIREWTCPKCQTRHDRDINAAINILHKARPTGQGLAMVKS

SEQ ID NO: 62783 - protein, 475 aa, unknown
  TnpB Polypeptide
VLVHQAFRLELDPNRRALSTLSSHTGASRFAFNWGLALVKERLEMRDQIRAAANRELLSDEEAEALVRTVEVPWTLASLRKEWNRAKGEVAPWWGENSKEAYNSGLDALARALDSFSKAKRGERVGTVGFPRFKKKWTKKSCRFTTGAIKVVDLHHVQLPRLGVIRTKEGTGKLLSKVASGSARILSATISQEAGRWFVSFTCEVERDDKGASHPGSLVAVDLGIAHLASLSNGKVVENPKALSRYQRRMKRLAKEVSRRQPGSKRRRASKTKLARCHARVTHVRADAVHRLTTELAAGYRTVVIEDLAVKNMTASPRPTPDPERPGVFLANGARRKAGLNRAILAVSPAEIRRQLAYKLEWRRGTLTVVDRFYPSSKTCSRCQTVKAKLSLRERIYRCAHCNLVIDRDLNAALNLAAYGRRVRTVAVSGTETQNGRGRDTTRASNTGSGPRLKRQDGSGQPVKADTAPPAGEAA

SEQ ID NO: 62784 - protein, 396 aa, unknown
  TnpB Polypeptide
MIKSFRIKLITNNKQRTKLFLFAGAARYAYNWALEEEQKEYKNSKKFLSDSELRKRFTQHKKLNNNFWLRNISNDVMKQAIKDACNAYKNFFKHQSRFPRFKSKKRSTPSFYQDPIKIKFTSTHVKLEKISDSKRKNRRVLNYIRLAERDRIPTGVKYFNPRITYDGLNWWISVSIEYHDSDNKPCGESIGIDLGIKNLAICSDNNTYHNINKSKQVKSIEKKKRRLQRRISRKYDKNKIQIKGGVFRYYKTKNIIKDEKLLLKMNHRLTNIRKNYLHQVTSEIIKREPSFICLENLNVSGMLKNKHLSKAIQEECFYEFRRQIEYKSKERNIIVIFAPMFYPSSKLCSCCGYIKKDLKLSNRIYRCPKCGNVIDRDLQAAINLRNYGEQQLQNLT

SEQ ID NO: 62785 - protein, 366 aa, unknown
  TnpB Polypeptide
LKITKGLKFRIYPNKQQQTIINKTLGCVRFVYNHFLCIRMNEWKLNHNSIHYNDTASMLKELKKYPEYTWLKEVDSTALQQSLRDLQKAYDNFFTKKAGYPHFKSKHNHCLSYRSQCVNNNIRVVCDRIQLPKIGRVKIKLSREVVGKISNVTVTRIASGKYYVSLCVTYEADAFSNAGGQLGIDVGLKEFYSDSNGNTVANPRTLRKWSRKLAREQRKLSQKMPRSRRRDKQRIRVARVHEHIANIRQDFLHKLSTKLVRENKMIAIEDLKVKNMMKNHKLAKAIADVSWSEFFRMLEYKATLYGSEVIRIPTFYPSSQTCHECGYQNPITKDLSVREWDCPKCGHHCDRDVNAAQNILTVALSS

SEQ ID NO: 62786 - protein, 410 aa, unknown
  TnpB Polypeptide
VLRIILDLQIVTKNRMILAHKIALDPTVKQRIAFAKACGVARFTWNWALAEWVKQYKAGKKPSAFALKTQWNKTKKKKFPWVYESPKDANQQPFTNLGNAFHRFFTKTAGHPVFKKKGERDSFYVSNDLFKVKGMVIRLPLVGEVRMTEMLRFDGKIMSATVSRQADRWLVSIAVDVGEARKPRAGNGEIGIDIGLKHALVCSDGQVFDAPKPLKENLKRLQRRSRQHSRKQKGSNNRKKSQRRLARLHARIARIRYDWQHKVTTKIARENQTVCLEDLNVKGMMANRRRSRATQDVGFAEIRRQCEYKMPLHGGRAIIISRWFPSSKKCSRCGVVKDSIALSERVFRCDRCGFEIDRDLNAARNIRTVGLTGTYACGPEGAGDRREATAKPCRVEAGTAPWVDSHSLTK

SEQ ID NO: 62787 - protein, 387 aa, unknown
  TnpB Polypeptide
LETVKTVVQNHRPEPKLLDLAERFRQMVNLSITIGLERGRTSLKSLCLVSYHRLKIFETPSKYRLCAISRAAGILKNYRNLSKKHSVGRPYCRRPSLIICYDLKVKNNELNLPGGFHIPLNNYTLNVLKQPGIRLRSATLTVSRVCISFSKETSEVNCEGMLGIDRNLNNITAADSFGNIIVNDLSKVTVIKSASRRTIARFKRNDSRIRRQIASKYGRIQTNRTQWLVHNASKEIVGHAKTNRLNIALENIKHIRRLYRKGSGQGHYYRARLNSWPFYEVERQISYKASWEGLSVVHVSPRGTTRKCSICGDHLAFSKQSSRMLGCSSCGNLVDRDVNAARNILYKAAGLRFGPKGLSIEAVKGNPSNAMVIPGVDVSQSSPTTQF

SEQ ID NO: 62788 - protein, 167 aa, unknown
  TnpB Polypeptide
MWARRKLSEREIHFYHTLTDAIITECVERGVGTLAVSWPKDVRESDWGKTGNKKLHSWAFDRLYQYLEYKGEMRGVEVLKENEWNTSKTCSRCGDDTKSNRVERGLYVCSSCELVANADCNGSENMRQKITPSPHGEDRSNGCVAQPSTYLFDCESGCFAPREQVVS

SEQ ID NO: 62789 - protein, 172 aa, unknown
  TnpB Polypeptide
VTRSGLSNQSPCLILDWIHHWLLTKPPLDVGANNLVACSTTTGNQYIYDGRELFGRFRETTDEIARLQSKLREGRYSSKRIRRLYRQRTKRRDHAQNALVRDLVERLYDEGLATVYVGDLTDVLDTHWSVRVNEKTHNFWAFKKFIHRLACVCEEYGISLEAEPEAWTSQTS

SEQ ID NO: 62790 - protein, 436 aa, unknown
  TnpB Polypeptide
VKSVAKQTKSKKTKKAKKPLYGTQKQQLNKLTKKEYKALKQMCFLCKNMYNVGLYNVRQHFFNEKKYLSYNSNYHLSKGNENYKMLNSNVAQQILMEVDGAMGSFFELIKLAKFGEYNYKDIKLPKYLEKDGFFTIIIGQIRIKPDGTLDIPMSPKFKREYGKVSIKVPRNLRDKKIKEIRIIPKYNARYFEIQYSYEIPESKLELNKNNVLAIDLGIDNLCTCTTNLGGSFIIDGKRLKSINQWANKQNSKLQSIKDKRGIKGTTRKQCKLWIKRNNQVNDYINKTCSYIIKYCIANDIGNIVIGYNPTIQKDSNMGKKNNQNFVNIPLGDIIFKLEYLSKRNNINFIKQEESYTSKSDFLANDPLPIINPDNPKKYTFSGKRISRGQYKSSTGIIINADVNGSLNILRKSNIIDVSHIQKDPSILKEPIRIKIA

SEQ ID NO: 62791 - protein, 385 aa, unknown
  TnpB Polypeptide
MFNISVTKGGVNLVNKVNSFNKSFKVRIYPNEEQKVLIDKTFGCVRYVYNYMFNLKQKLYKYHNISLSYNHMSKILTELKKHKLWLKEVDKWSLQNALKDLDFAYKMFFNGGGFPKFKSKKQDTNSYRTSSNIHLDIDNKKIRIPKVGCVRFRDKSKFDDLTKINNITISKSSSGKYFASISAEVNIEHFEKTNQNCGIDLGIKDFCILNEGTKFENPKFLVRNEKRLRMLQKSLSRKIYGSKNYDKAKMKLAKFYEYIVNSRKDYLHKISNFLVKNYDIICAETLRVKNMIKNHRLAKAISDVSWYEFCRQLEYKCLWYSKQFVQIDTYFSSSQICSKCGYKNSDVKNLSIREWTCIGCGSHHDRDINASTNILNEGLRMLRLI

SEQ ID NO: 62792 - protein, 459 aa, Mycobacterium sp.
MARFEIPDGWCVQAFRFTLDPTEDQARSLARHFGARRKAYNWTVATLKADIEAWHTTGVETAKPSLQALRKRWNTVKDEVCVNAGTGAVWWRECSKEAYTDGITGAVNAYWNWQSARAGRRAGRRVGFPRFKRKGRDHDRVCFSTGAMRVEPDRRHLTLPVIGTVRTQENTRRLERLIRAGRARVLAISVRRNGTRVDASVRVLVGRPQRPNVAQPGSRVGVDVGVRRLATVATAEGTVIETVPNPRPLESALRELRHVSRARSRCVTGSRRYRERTTELSRVYRRVNDVRTHHLHVLTTRLAKTHGRIVVEGLDAPGMLRQKGLPGARARRRGLSDAALGTPRRHLSYKTGWYGSALVVADRWFPSSKTCHACGHVQDIGWAQQWQCDACSAAHQRDDNAAINLARYEEPVSVVGPVGAAVKRGADRKTGPRPAGGHEARKGPSQPAGEQPRDGVRVA

SEQ ID NO: 62793 - protein, 345 aa, unknown
  TnpB Polypeptide
MLRQSTTRIGKLKLRNLVMQSDLPQWVKETPCHIRQNAIFDAHQAYRASRDAQFRSIRNPRQIIKFNESNFTKGTWYSQLTKTLKFKTSEPIPSQCDYGTQLVYRRGKWFAVFPEPVITSSTSSQKIIALDPGVRTFLTGYDGEGVIEIGNGDMGRITRNCQHLDDLVSRSTKVNAKQRRSMRKAANRIREKIKDLIDEVHKKAAHYLTTNYGLIFLPRFESSQMVAKSRRKIHAKTVRNMLTWAHYRFKLVLKHQAAKRGCVVLDVGESHTSKTCGACGHRHVKLGGAKVHKCPHCGSQTQRDANGARNIMLRALRDSSFTVSDDGIAIVTVQALSTNAKECSA

SEQ ID NO: 62794 - protein, 595 aa, unknown
  TnpB Polypeptide
MFKNTLSGGKKKGKSKRTERHQDNDATTATQLSIFHLLNQPSSTPELAVEVKKPTFFDRLTFFCLATPDVKSSKTSGVASISKEKVLLPYWNKFTQATSEWLSLPQKIDCVSSDSMLSHGLRSGAGVRFWFSTIVHLVQNARWLKIYSPLSTATVADCTDSESIKSKSLKTLTYRVYPKGETKKVWMLRIHANRKVYNNAIAYLNQNQGKFTYYTVDKKTNQPVLKTSGKQAFRSFCKTLGYEIIPEWCKELGIAHGLDNALFEAYTAWKKTDKQPAQLGKGKNAKPNPLAELKLARFRSIRAQKQTIQFDPGDYKSGHLMANASKNLEKPLWTGQDYCLINYDKAVEVTYNKGRWFVNMPVEMDIPEPKNGGKIIALDPGLRCFLTGFDGNSFAEFGKYDFGKIARLCQHLDKMQSKLGRSKGGEFSRLRYRLRQAIEKARTRIKNLRSEIHKQVASYLVRNYDIIYLPTFETSQMVGRGSRKLNSKSARAMMTWAFYQFSQTLEHLCNRYGSRLVRVTEEYTSKTCTKCGHIQRKLGGSKTFKCPNCGYEIPRDFNGALGIFLKALWDTTILSDLSDECAIFRFSPIVGDCLD

SEQ ID NO: 62795 - protein, 367 aa, unknown
  TnpB Polypeptide
VEKAYKYRIYPNKKQQEIISKTFGCCRFVYNKYLAKRIKMYEQNKETFSYVQCANDMKKLKSELEWLKEVDSTALQSSLRDLDMAYQKFFKEHSGYPKFKSKKTYKFSYKSKCVNGNIQYCDKYIKLPKLGMVKTKNKLIPQGRILNATISQKPSGKYFVSLCCTEVDIEPFKKTNNTVGIDLGIKEFCITSNGEMIPNPKYLKKSLEKLVKLQRELSRKSKGSSNRNKARIKVARLQEHIANQRKDFLQKLSTEIIRNNGIVCLEDLQVKNMIKNHKLAQSITDVSWSEFVRQLEYKANWYGRQVIKVDKFYASSQTCNVCGYVNKDMKNLSVREWDCPCCHAHHDRDINASKNILKEGLRISEIE

SEQ ID NO: 62796 - protein, 241 aa, Okeania sp.
LLVKAIEADYLPVHPLLEERQYETFGIDVGVKKFASIANQEKGESEVISLPDSIKLEQLNIAKFQWRNRNKQLGGKDEPPSKNAIKYYKKLAKYHGRVKNLRRDFIEKTTTKLVSQIKHICLESLNVKGMMQNGKLAASIARIGFYEFRQRLTTKIVSSGGTVVLADQWFPSSKTCHNCGCINQELKLKDRTFDCPHCGIRIDRDVNAALVLSQYGEINQENREGCARIYACELEESGLPG

SEQ ID NO: 62797 - protein, 340 aa, unknown
  TnpB Polypeptide
MESMERLQAYKFQIMPSGEQHRDMRRIAGSCRYVWNKALALQIANHEAGEKFINHFAMCKWLPAWKKDPETSWLKETPSQLYQVVLKDLARAYKNFFEKRADFPTFKKKGVSSSFCFPQGCEIDAGNCRIRLPRLGWIRYRKSRNVEGVIKNITVSSVAGKWYASIQTEREVDEPVHPSTSIVGLDAGVTLFATLSDGSVFEPVNAFRKNAAKLAKYQRGLSRKTKFSNNWKKQKQKITRLHQRIVHTRNDFLHKTSNIISKNHAMVVIEDLKVTNMSKSASGTIEAPGRSVKAKSGLNKSILDQGWGEFRRQLEYKQAWLGGGSACHQPRKYQSDLSGV

SEQ ID NO: 62798 - protein, 401 aa, unknown
  TnpB Polypeptide
VITYTYKAKLNAHTHRNLAEFLEQQRLLYNGALQERIDCYQKTGGSIGLYDQRGSLTMIRRSDEWFRKFDRWCQDSALVRVERAFKRFFKQGHGFPRFKAYRRGVQSFETLHKKPTFSGKYGYVKLKGIGRFRWRQDGRCDDRNKVKVVRVVKRPTGVFIQLVCDEKIRRIGLNRAIGIDVGVHLRAALSDGTVFPRHIPDRADIKRKQRALSRCQLGSNRRMKRRQALTRACYRDRVRGHHALHRLTSEIVKDHGKWIAVEDLDIEAMTASASGTVASPGRGVKQKTGLNRSILEQNWGMFITQLDYKAASAGGQVVRVDPKHTTQRCSACGGLPVKALTLNDRWYHCAHCGYQDDRDVNASKNVLLKGLELFDAGGSLPAVSATEKQNQDMGPDRHGTV

SEQ ID NO: 62799 - protein, 483 aa, Streptomyces sp.
VKKFRPQPGFVVQAYRFALDANATQERALRSHCGAARAAYNWAVAWVEASWWQRRAEESYGIPEEQLTQWRPWSLPALRKAFNAAKHTDPRFAARWEDNSKEAYSTGLANAAAAFDNYAKSKQVKRRGRTVGMPRFKSKRKARLACRFTTGTIRANADGRHVTLPRLGTIRTHEPTGKLLARVQAGTARILSATVRHERGRWFVSFQTEVRRDLVRVARPDVAVGIDLGVKTLAVMADSAGEVREIPNPRHLDGALKQLRRTSRAVSRRRGPDRRTGLKPSRRWEKANTARNKVHHRVANLRADALHKLTSRVAAEYGTVVVEDLNVAGMLRNRRLARQIADAGFAEIRRQLTYKTQRNGCRTVVANRWYPSSKTCSRCGAVKAKLPLHVRTYACDACGLVLDRDANAAHNLAALAAAAVTGTGVAGDLDTPKVSKPRGADQKTRTTRPSRKATAERAGGATLPHQRQTETRDRTQTEALTLR

SEQ ID NO: 62800 - protein, 371 aa, unknown
  TnpB Polypeptide
VKKIYKYRIYPTKAHIAKMESALAACCGLYNACLEERITLHKEKGVSVSGYDQIGRAYAYGVNGLRDVYAQVVQDTVLRLDKAFKAFFRRVKNGGKPGFPRFRSVKRYDSFCYPQSGFKLNDEKHLKLSKIGIVKIKLHRPIQGTVKQCTVKRDGCGHWYVCFSVDTNRKPRKSRNKKVIGMDLGCESFATLSDGTVVKHPHYYKETGKEIGVVQAKYSRTKNLRHKAKLNRLHTKLVNQHNDFLHKESRKLVNKYGAVCVEKLDVAGMVDGGHRSLNRSIMDSCWGKFVFMLVYKAEEAGKRVIEVNPAYTSQRCSRCGTVAEKSLGDRTHRCGCGLVTGRDVNAALNILASGTEALRLERKKAVGLSPR

SEQ ID NO: 62801 - protein, 286 aa, Cyanothece sp.
MLESQPITVACKLQVANTLAKEIDETMMVFACACDWVNQNTPEKMTNKTAMQSLVYQDVRVNFGLSSNLAIQAIRRVCANRKTAKQKGKKVKEFKPTSISYDARIFSFRESDWTVSVKLLNSRQRIKLLIGNYQIGLLKSKNPTSATLVKRKSGNYYIHITLDEPTQPEAKTDKVLGVDLGRTDIATTSEGESWSGKQITAKRNHYAKLRTTIQKKASKGTRSSRRRCRQLLARLSGKERRFQKHINHEISRQLVNNAVTNKQAIAIEDLTGIRERTNRKPRSKKR

SEQ ID NO: 62802 - protein, 395 aa, Cyanothece sp.
MRLTYIDRLRPTKNQQAIIENCLGLLKCQYNYRLAERFNWWEQNRSPVNSCPLICHLPELKDKPSYYQQKADLLETKELFPEYKTIHSQVLQDCIKRVELAFSRFLKGDKDGKRSGRPRFKSWRRYRSFTYPQMKQDCFEGNRINLPKIGKVKVILHRPIPDGFKIKTAQIIRKADGYYVALSLEDKTVPNFTPDIKPSLKNTLGIDMGLKDFLVDDTGSTIPIPQYYRQSQSRLRTIQKQVSRRQKGSNRWKKAVAKLGKQHKKVVDKRQDFHHKKANYLLTKAEVIAHEDLNIHEDLNIKGLARTRLAKSINDAAWANFLNILTFKAEKAGLLTVKVNPRGTTIDCSSCGQAIPKTLKDRWHCCCHCGLLLPRDWNAAINIKYRAVGHSVHVP

SEQ ID NO: 62803 - protein, 402 aa, Cyanothece sp.
MGKVTRTIKLKFVKLNRCKAQLFEEMTVENTRIANELLSLPLQERRKMTTAKIVSELKSALVNQTIRHTTSPTGRKTKQYKVLPVEVNNQNWKLTKKGDTYSISFPTTRGEKRVPVSVASSHWQSVLDGLLEGTIKGGSFKLIKHRNKWYVYLSVIEDVPEITTETKIGCDRGQKNLAVVASKKACGKFFSGREVMHRRRYFQKRRKQLQQAKKFRALKKWDKKERRWMDSINHTISRRIVRFAEYQNADVVIEDLEGCRKTMKQSKKSRSDSGQSRYSWSFYSLEQKLEYKLALKGLKMIKRPAPYTSKSCCTCGVIGNRKKHHFNCPNGHYHNADLNASRNLAQWDGFSCDLSLKQGVFVMDSSDLNHGLLGTAPNFMNTQKERIEYIQLSLFDPTLFGG

SEQ ID NO: 62804 - protein, 496 aa, Cyanothece sp.
MLLGYCYKLRPNHHQSEKIDEWINLLRATYNWSLRDRIDTYYQRYCCGQYCDLQTKAVITPLVCLIGGASGEPWRENGKKRSPVEIQITNLPSLKKARPWYKDIDSTVLQQNLKQLNTAFDNFFKGRGFPKFKNRSRFRSFTYSMGVKLKGNKIYLPKLGWMKFYNSRPIPDGFKIKSVTVRKKADGYYVSLRIEDKSIPAFPVKNLEEIQTITGLDMGLGKLVYCSDKSAIDNPKFATNKTAKRLQKIRQRRVSRKNKYSKNKQKAQQRLSRFQHKIAVKREAYQWQTAKKIVDKSDSIAVEDLQISNMIKRCKPKYDEKTGRFLKNGQSAKRALNRLIADASWYSLTQKIEYMAAKSGKIVLRVNPRCTSQQCSVCHHIDPANREGEKFLCMNCGHIDDANFQASLNIKNKAINQYQLNIKNRTSSKKKCGDKVGRDLPEPKQLTLFETPTNELTLDKRKHHYARMSKRSEPGNLLRQLDLFDQENNPRNSATL

SEQ ID NO: 62805 - protein, 380 aa, Cyanothece sp.
MAILTLTLKLPFYRLNKCKAQEFDRLTELNTGIANQLLEIPKTDRRKLTSKDFNHIEIGSNWINQTIRNACASTKVKKFKCLPLEANNQGWCVEKHGDTYSVGFSMIRGVKKRIPLVIHQSNHADILDKIIAKEAKKGSLKLWKSKKGIWYVLLSVSMDVPDAEQVTNWIGVDRGQNRIAVASLPKSFGKFWDGRQIKHLRRRYQRIRKALQKTKKRKVIKRLEFKERRIMTYINHCISKQLVQFAKNYGMGLRFEDLCGIRQSSKQSKKVKSDAGNNRDSWAYYQLEQFTRYKAIRVGVPVESIPAPYTSKSDHRNGVIGKRNRHWFKGFDGYHCDADWNASQNIGQWVGFSCPLDLQKVVSVMDADGLQDGVNGSPLN

SEQ ID NO: 62806 - protein, 454 aa, Cyanothece sp.
MRKASTQGRKMLTLTYEYKLIPDKQQIEVIEHTLNVCRSVWNYALRERKDWLASRKSPVNACSLIQEYIIPSDTLYPNYHNQAKSLTEAKKTYEILKSVNAQVLQQVLRTLDRAFADMQSKKLGFPRFKNKYRMRSYVYPQMLKDCVKGNQIKLPQLGWVKFRKSREIPDGFELKQARIVRRASGYFVMLSMQLDVNIPDVPFHGHPLGIDLGLDKFLATSDGELVERPRFLNQLHRKLKLLQRRLRNKQKGSTNRHKLNQKIARLHQRISDTRKDWHFKLAHRLCNQSQSIFIEDIDFRSWGRGMLSKHCLDAAFGQFVTILKWVAWKRDVFVAEVNKNYTSQICPNCGFHTGKKLLSEREHNCPECGYKTHRDVAAAQVIRNCGVEEYAMQRGLGGFPHERLHQDALGHSVSENACGDGLTGALPSQESVKQELLSVSLRISRYSDDRSLTG

SEQ ID NO: 62807 - protein, 279 aa, Cyanothece sp.
VGTWDLAYFQESDIKRVRLIRRADGYYCQFVLSCEVKEDVKPSGKCIGLDVGLSSFYTDQEGNKIDNPKFLRKSEKQLKRLQRRLSKKKKGSSNRQKARQRLAKVYLKVSRQRKDFVVKLARCVVHSNDVIAYEDLRIKNLVKNHCLAKSINDAAWYQFREWLEYFGQKMGKITIAVAPHYTSQNCSNCGETIKKTLSTRTHVCKCGCELDRDENAAINILKKAIQCGLGGSRREQLNQEGLSTVGHTGSKAWGENASTLIEEILSKQAISVNQESTRL

SEQ ID NO: 62808 - protein, 416 aa, Cyanothece sp.
MLNVLKVRIYPNQQQEIALNRNLGCARFVWNYYLNKTNNQYQETGKGMTYCQMARDLTQLKKLSDYEWLQESTAATLQQTLKNLESAFKNFFSKRAKFPKFKSKYKKQSIRYPESCSLHNNGLKLPKLGIVKAKLSKEILGKIKSVTVSKTSTGKYFASILFESDDLIINKTFKISGIDLGLSSLVTVFDGETTYTVDPIQPTRKYAKRLKRRQQKLSRRTKGSNNRRKAIKEVAKVHEKITNTRQDFLHKLSRKLVDENQVIVAENLCVKGLARTKLAKSIHDAGFGMLLNFLSYKLEREGGNFVQVDRFYPSTKTCSCCGFKNNLIDLSVRDWVCPNCQTHHDRDLNAAKNIRAEGLRILSTNTVGHTEFQACGETVRLVSACAKKRQCGLGVSPSRATAVQVSVNQESPATLP

SEQ ID NO: 62809 - protein, 413 aa, Cyanothece sp.
MFVLEFKVKAKTQQYQAIDDAIRTAQFIRNKCVRLWMDTKGTGKNDLYKYSKELAHNFKFADELNSTARQASAERAWSSISRFYDNCKRKISGKKGYPQFKFSRSVEYKQSGWKLLNPKTIKFTDKKNIGILKLVGTWDLAYFQESDIKRVRLIRRADGYYCQFVLSCEVKEDVKPSGKCIGLDVGLSSFYTDQEGNKIDNPKFLRKSEKQLKRLQRRLSKKKKGSSNRQKARQRLAKVYLKVSRQRKDFVVKLARCVVHSNDVIAYEDLRIKNLVKNHCLAKSINDAAWYQFREWLEYFGQKMGKITIAVAPHYTSQNCSNCGETIKKTLSTRTHVCKCGCELDRDENAAINILKKAIQCGLGGSRREQLNQEGLSTVGHTGSKAWGENASTLIEEILSKQAISVNQESTRL

SEQ ID NO: 62810 - protein, 403 aa, Cyanothece sp.
MKQRLKFRIYPTTSQKTALAKLFGCTRVVWNDALAHCQQEYREGRKKPNNTQLSSRLTQLKKTEEKIWLGEVSAIPLQQSLRDLEVAYSNFFKSCQGKRKGKKVKSPKFKSRKFRQSARFTDNGFKINQQNVYLAKIGKLKIVWSRELPSKPSSVTVIKDSANRYFLSFVCDVNSSPLAPNNNSIGIDLGIIDFATLNNGEKIKSPKPLKHNLKQLRRLQKNLSRKQKGSKRHEVARLKVAKLHAKITDIRTDFLHQLSTKLIRENQTIALEDLNASGMVKNRKLSRAISDLGWRSFRTMLETKGEIYGRDVRIINRWEATSQTCSSCGFKGGKKELNIREWTCLNCGAVHDRDVNAATNILKVAGGHPETKNGRGEKIRLSNKKAHLSEASTTPQYKQLSLF

SEQ ID NO: 62811 - protein, 386 aa, Thermoprotei sp.
LRVTQPFGSSPTAVLSSGTRLTRQAYVHYRRFSWYPKHLYRKYAPIIGSATAQQIINKNNEAWRSFFKLKRLEARGELPPHITRVSMPRYWKRNRRRELRIIVRRDCYRLEDGFLHLPKGLKLRVKGRLRWHGRQGRLELIYDDVDRVWRGFMTVEVEKPPLRGGNKPLYIDLGVINLASVWFEGLRRPIVFSGRDVLADWWYWTRKISREQSRLARVNGAKTSRRLRWLYRIRKRRFRHAVNAMIKTIIEDAHQLGVSRIILGNLKGIRMNNNHHNSKANSMIHNFWSFRYTVQRFRDKAEEYGIKVVEVDERETSSICPRCGSYRTVKRGRLFKCLSCGVEAHRDAVGALNIGLAQGAKLPAGAINGLMAQPLASKVERDEVGA

SEQ ID NO: 62812 - protein, 396 aa, unknown
  TnpB Polypeptide
VKRTFKYRLYPTKKQDLELNEILAQHRNLYNAALEQRLTAWHDHRIGVWYYQQAADLTEARAEMDWISCGSASAQQATLRRLDVNYREFVTGSRGRPRFRSQQRFRSVTFPAYGDGIKIVDINAGMARLRVKGLAGHLKFRLHRAVLGKIKTVTLKQERTGKWFLTFSCDNVPADPEAMTGSVVGVDLGVIIKAALSTGEKITNQSFLNDDLLRLAKQQKIVAGRQNGSNRQSKARQQVTITHAKIARKRRDANHKLSRKLVQEHDLIFFEKLAPQAMTSGKSKKLNRSVRDQGWSQLIEFTVYKAQEAGKQIELINPRNTSRECAACGIINKRSRCSRDQFLCVSCNYAADADFNAAQVIKKRGLAGLAKKNVKFHNSGLGSSLKSKLDLEAVAL

SEQ ID NO: 62813 - protein, 375 aa, Ktedonobacteraceae sp.
MLKNFRYRIYPTKKQQRTLDAHLEECRLLYNHLLEMRKTCYERDGVSLSCFQQQKTYPVLKEQRPSMREVHSQVLQNVAVRIDLAFKAFFRRCKTGEKPGYPRFKGYGRYDSLTYPQSGFSITHDDRVCLSKIGTIKMVYHRPIKGTIKTCTVHRSSTNKWDVTFSIEYEAERLPENDRAVGIDVGLKTFATLSSGEEIANPRFFRQEKKALAKVQRKHAKLKKGTKERRTHRKVIARVHERIQWRRENFTHQHSRKIVNQFGIICVEDLHVNRMVHTHCLALSISDAAWSQFFEQLSRKAAEAGRAFIKVNPAYTTQDCSRCHHRQKMPLSVRTYHCPCCFLVIDRDLNASYNILGLGLQSRVIPEAPRLQAGE

SEQ ID NO: 62814 - protein, 239 aa, unknown
  TnpB Polypeptide
VAGIDLGIKNIAAVAFPNEYVLYPGNSLKQDKHYFTREEYDAEGENGPSKKSMWARRKLADRETHFYHTLTDTIITECVERGVGTLAVSWPEDVRESDWGKTGNKKLHTWAFDRIYRYLEYKGEIRGVEVLKENEWDTSKTCSRCGDDTKSNRVERGLYVCSSCELVGNADCNGAENMRQKITPSPHGEDRSNGCVVVRETFGLSSSRKARSAFRTTQPSTYLFDRESGTFTTREQAVS

SEQ ID NO: 62815 - protein, 342 aa, unknown
  TnpB Polypeptide
MIRTFQYRIKDSTCGAPLTELARACNQVWNFCNESQEHALRWNQQWPTYQDLCKLTTGSSKELGLHSQTVQAVCEQYATRRQQCKKRKLRWRGKRSPGWVPFKASGVKVIDDTVTYSGHTFRFWKSRDLPGPVKCGSFSQDSRGRWYVNFVVDVPDEAPTTGTQQVGIDLGLKTLATCSDGRKIEAPRWYRNQQRRIAEHQRKKRSRQARNLQAKIANRRKDFLHKESDRLTKECEFIVVGDVGSARLAKTNMAKSVNDAGWALFRHFLEYKAIARKVVYREVSERLSTQTCSGCGAIGGPKGREGLGIREWVCSECHSVHDRDVNAAMNILRLGHQSLALK

SEQ ID NO: 62816 - protein, 460 aa, unknown
  TnpB Polypeptide
MKRKKKKHYNYLEDSEYIKLNNSIIKNNDKLWLPKDEISYDTINTNSCFNIYNHKNNDSFKNIKNIKFINSDKSNNKIYKCIKVELKLNDYQKEIINRWFKAFIIMYNETLKYIKLRKSNNEQLILNFKTLRTYHLKEKRNEIIENSQHPKYTKDTKIKTHIIDKAIQLACANYKSGLTNLRNGNIKHFRIRYWKITKDFYTLSIEPSYFTKSSLCYNILGNINAFYNNEPFDLNLINTKYKSECKLNYSKIINKYELFIPEKAEVNNIIKEKKQFISLDPGIRTFMTGLSNNDCIKINFNNNKIKNILFKIDKLEQIKKKNKYIRKQLFRKRLKIKYLVDELHWKTINYLINNYETIIIGDMSVKSIVNNKTSNINKITKRIATYLCFYKFKQRLKYKCILNNCKYIEMNEKYTSKICSNCGNYNKLLEGNKIYNCEKCSITIDRDLNGSRNICLKCIK

SEQ ID NO: 62817 - protein, 403 aa, Paraburkholderia sp.
VIVRVHKIRLDPTTEQAKYFARACGVARFAYNWALAEWTRQHKEGGKPNEAALRKQLNSIKAVEFPWMAEVTKCAPQVAIKNVGLAFNHFFRRVKLGKKPGYPRFKRKGIRDSFRADNGPVNASSHAVQVVGRTVKLPRCGVVRMREELRFAGRVLGASVSRMADGWYMALSVETEERLKAAEDRGAVGVDLGIKALATFSDGGGAPALKPHRAEHKRIVRLSRSLSRKQKGSANRAKAKAKLARLHLRIANVRKDAVHKLTTNLATNYSTIGIEDLNVSGMLKNGKLARAIADAGFFEFRRQLEYKAAMTGAQVIVVDRFYPSGKTCSACGAIHAITLGERVIECGCGLKMDRDLNAAINIRRQALAQQSVERKALAGASATVKPASVKQKKSRLHSNVQTT

SEQ ID NO: 62818 - protein, 370 aa, Paraburkholderia sp.
VLGSKDETAGNQSCQASVEDDGTLTLKLRLPDGLAAEGRYITIPGVRFAYGHEDIVAALLSSQRVRFQTKDGKPAYRRTGTAISYRFFRDVKGWRVFASMAVRAPVRTTHRKCGAIRVDINTDHLAMSEIDSSGNLVRTLRIDLSTYGKSRQQAAALIGDACMAIAEFARAGGKPVVHELLDFARKKAELEATGARYARMLSSLSYSRIITGIDSACFRHGVETIAVNPAYTSVIGAVNHTKRHGISVHMGAACAIARRGLGLSERPAVRSGHVPARGSGYVTFALPVRNRAKHVWSLWAGVKRSLKAARAAHVRSDRERAKARSRSAPLAPETRSVGAIQTSGVRSPGANRHQHCSGDVCSDLRTFAQV

SEQ ID NO: 62819 - protein, 551 aa, Paraburkholderia sp.
MVNPRLYTYQSRLALGAGQSAWLDAYAALYGRAERGLFAALQAGSSDLNALKREFLVRHGLTARQFNAMRISLQGKIDSIVVSRAERVATLTRQIRHAVTVIGRLEEQAPGSARLHQKRRRLGILHARLDQIQADQKAGRVRLCFGSRKLFRAQFALAQNGYASHAEWKADWQAQRDAQFFVLGSKDETAGNQSCQASVEEDGTLTLKLRLPDALAAEGRYITIPGVHFAYGHEDIVAALLSSQRVQIQTKHDKPAYRRTGTAISYRFVRDVKGWRVFVCMAVRAPVRTTHRQCGAIGVDVNADHLAVSEIDSSGNLVRTLRIDLATYGKSRQQAEALIGDACVVIAEFASAAGKPVVHELLDFARKKAELEATGARYSRMLSSLSYSRIITNIDSACFRRGVETIAVNPAYTSVIGAVNHAKRHGISVHMGAACAIARRGLGLSERPVVRSGHVPARGSGHVTFALPVRNRAKHVWSLWAGVKRSLQAAHAAHVRSDRERAKARSRSAPSAPATRPMGAIQTSGVRSPGANRHQHCSGDVCSNPRGCAQG

SEQ ID NO: 62820 - protein, 501 aa, Paraburkholderia sp.
VVVLAVKLDQLRFEVRTHTREHHPQVVQNFFREYAAPVSCYKDQVCVYQKHAVPAVPYIVVYLTWATHKLSFTSFRRPIMVLHMELLQAFQFELMPTGEQTRKMRQFAGACRFVYNKALAVQRENHEDGGKFIGKFAMKKLFTGWRNSAETPWLADSPRHPCDESILDLDRAFQNFFVKRADFPRFKRKGERDSFRYPDQKQIKLDRENGRISLPKLGYLRYRNSRVVLGEVRSATVSLRAGKWYVSILTKREVAQPVPQGPAVGIDVGVARFATLSDGSFIAPLASFRKHEQRLAKYQRRMARKVKGSSNWKKAKARVQRIHARIANARNDFLHKASNTISKNHAMVAVEDLQVRNMSKSAKGSAEAPGRNVRAKSGLNKSILDQGWGEFRRQLEYKVAWRGGYFVAVDPKNTSRTCSCCGHVSADNRKTQALFACVSCGHEDNADHVGALNILAAGHAVIAYGGMAQSGRSTKQEPAEGARAPVGILAKFRAGRMPNDE

SEQ ID NO: 62821 - protein, 338 aa, unknown
  TnpB Polypeptide
LTKRIELYKTEQKNFNFYDCSKDLTKLKQELKWLKEPDKWALQNTLKNLDFAYHCFFRRIKQGETPGFPKFKSKHNYKQSYKTTFTRNNIEIKNNKIKLPKLGLIKFAKSKEIHGKILNCSIIKTKSNKYFIFICCTDIEIQKYEQADKIIGIDLGIKEFATISDGEIIENPKFLSKLENKLKREHKRLDKKQKGSKNRNKQRIKLAKIYEKITNQRIDFLQKLSTRLIKENQIICLEDLSVKDMVKNHKLAKNINDVSWYEFKRQLLYKANWYGRQISLVDQYFPSSQLCSDCGYKNKEVKDLSIRKWICPNCGEKHDRDINAAINIKNEGLRLLSA

SEQ ID NO: 62822 - protein, 313 aa, unknown
  TnpB Polypeptide
MLLHPGSGYRIEDGYVEIIGGIRLKIIGWDRRYDGYENGEARLVYRGDRMMLWISKRIPRPEPYKPRDTIAVDINEKKIVYGDDRINEERDTKIGEAHRWKKLAEDLQKRYSSARYLAWRRRKAILNRIRSYHRKARNILEDWARKTSLEIVRFAKKLGYAVAREDLTGLINSLRKIKSKDHRTKLIIMGYSRLGEWIDWQTMKHGVPLAIVNPNGTSSDCPQCDSKLVENGYRRLKCPICGFEADRDVVGKLNIRKRALKMLGIKIDFGGVLAPLTAPQMTDVNPNRWGEPMNRPEGNPSSLGRGGGQCFYS

SEQ ID NO: 62823 - protein, 306 aa, Aquifex sp.
VKVYKRLYELLGRGYKPLKSARLIKRGKDYYIGITLQKAVKEKKIKKPRYVINVDLNVQRNLACIGIFEVDWEKRESKLYGIKFVNGKLLRLVYKRDYLFEEIRKKQRQTGRSPQVGDNSRLWKKVNNLNRDIALKVAKEISDIAREFSEKGEVIVVFEKLKGLRGRKGRSKKLNRKINFWMRRKIQERVKELGLEEGFGLDFVYPHYTSKKCSKCGYEGERFSPSGSKALFLCKKCGYVVNADVNAVFNQHFLYLSHLLNGGGKARPVVRVGTSLKSPSREGHNLSGVPKATTTFFYISSLLSTF

SEQ ID NO: 62824 - protein, 345 aa, Moorea sp.
MLRQLDTAFSTFFKGEAKYPKPKRRSRSVGFAESRFRSFKYAPGQVKLDGNRIYLPGIGWMRFHNYRPIPDGFTMKSVTVRRKSRGWFVSIQIEDKSVPASPAKTAKEINHGRVKGCDLGIRKLVSVSNGKTVQNPANTKKYKRQARRLKLRQRAANRKKKGSNNRNKSFSKVASLHERVANKRSAYHWETARNLVDGADALVFEDLNIKGMKSRCKPKPNENGGYDRNGQSAKRGLNRAISDAAWGELVKKVEVVAVKSGIPVIKINPKHTSVECPKCHHTSADNRKGEKFVCTECGYHDDADVNGAVNIKMRGLKKLGINPIQLPSGRSRSVAYGQGKLRPWS

SEQ ID NO: 62825 - protein, 424 aa, Scytonema sp.
VLKAVKVRLYPTTEQEIALAKSFGCARWYWNYALNACIQHYEETGKSLKVSVYKAYLPQLKVEHPWLKEDCYSAVLQCVAINLNKAYANFFEGRARFPRFKSKHHKQSIQYPQNVKVMGDCLEIPKIGVIKAVFHRPIEGKIKTVTISKTPTDKYFASILLEIEGAESQISGDKIQGIDLGLKDFAIVHDGNEVIKYSNPKHLKRHEKNLARKQKKFARKVKGTNSRNKYKKLVAKVHERVSNSRQDFLHKLSRKLVDESQVIVVENLNVKGMVRNRKLSKSISDVGWGMFVNFLDYKLKAKDGQLAEIGRFFPSSKTCSCCGHVLDELTLDIREWDCPSCGTHHDRDSNAALNIRNEGIRILKNGEPLAVDGFPGISKVANPKGGGNPVIADRGCVRPPTRKGKGQRSVRSEARTVPDRVGVG

SEQ ID NO: 62826 - protein, 567 aa, Desulfofundulus sp.
MRKPKKKPRSPEDGVKYTVCGEFFPEVYPAFRSQKWGRGDEDPLVTEMRLFCACTRWAFNRLQEGRSRPQELKKEGQKLFGINSRFCDDAILKAKAIIESQRELLVLEVEEMETKLARARKKLGWAEKDLDKAVEANDPVKIEKAKRAVHGRKSRVKKLSDKLDELKTHQSNGTIPAVVFGGRSLWKGICKGRVSKEEWRQARQNRLFARGDETKGGNPNIKISCRNGDFSLSVTISHLSEQKGTDKKGRPIMTRAPRVEGILWLPEKHRLKVWKLLLSGAPYTVELIKGRDGRYRVHITFTITAPEPVTSSNRGYLGMDTNPDGVALANVNYSGQPEPWPEGFTVPYPKALHKFAGEFQVTVHPNGFLYIKIPELAYSRGYRRTYLIGVLAKVVVGIAKALGKPIALEDLDFGKDRLDTNKKFNRMAANFPFKKIIEAVTRKATREGVGIKPVWPAHTSTIGYYKYMERYGVIIHHAAALTIARRAIGFRECITNELKQKIRVIKEKLNRKVDSLPGEGKGMTRKVKRLFKRLDEKIPVYNGLDRFKQESFYSVWHDLKELVLLSR

SEQ ID NO: 62827 - protein, 400 aa, unknown
  TnpB Polypeptide
MGAKRCSGQRNKEKASTVEQLAYRFQGFPTRTQEHILNQFIGSVRFLWNRMLGDWIGSYKEKGKSDPIRTPASYKQEPGLEWLKDMDSLALCNVQQNFERAVSEFFSGEKGFLRFKKKHACKDSYTTNLSNKENPNLFLEGCMLKLPKVKEPVVLRLHREVAPGGILKNCTVTREPDGRWYFSLVYEYTRKDVPKKAEGQAPDKIRSIGLDMSLPELFVDSNGNVPNYPKPYRRLQKKIAREQRRLSRMEKDSSNYNKQLRKIARLHAKAKHQREDFLHKLSYNLVHDYDIICIEDLDMAAMKKALSFGKSVSDNGWGGFVRMMQYKTERYGCIIIKVDKWFASSKTCSSCGYKHSELKLSGRTYICPKCGHVMGRDHQAAINIRNEGMRIYTETHPLAA

SEQ ID NO: 62828 - protein, 522 aa, Bacillus sp.
MKVTRTGLLFIENKADEKELFNLMAVFSSAIRFSFNRLLDGKKADELIKQVNAQFKLNKRFAEDAVLQAQAIITSQKELLPSRIEGIQAKIKKTEKKLDLYMSGKLKPKKVSLAVCLKGLHSRLEKLKEKEKELLKHQEHNSIPTVIFGGKRNFFDRMENKISKEKWKEIRSNTLYSRGDKSKKGNLNTRIVWNETDHQFYLEVANPLLAKEGKHSPRLLFKLNIPDKYFDEIVNVVMPNIAGATPNGKSIEEYNVYSIELKRKNKKVYVHITHDINTLGSMLKWDEKITSDIVAGIDVNIDKIAVSILTKQGNLLESKTFYCHEMEYVKSNRRTNIAGELAKEIMDYLLSWNVGAFVLEDIKIKQDHDTNRRVNRLTHSFAKTKMQKALILRGVKFGFKIKMVNPAYTSVIGRFKYTKMYGLSVHEAASFVIGRRGLYFEEKLPKEVLKQIQNVVKPHLVKTLGTMEVSEKKTKTGKQRRKYIGMLLNNIDTFKENHIWKLWNVIHKTLRLENHVFKLKEV

SEQ ID NO: 62829 - protein, 186 aa, Oscillatoriales sp.
VAGTIKKLLVSRKAKGSNSRKKAAKKLGLFHQRISNKRQAYQWKVANKIVSRNVDAIALEDLNISGMMRRCRVKVDEKTGRFLKNGQSRKRGLNRSISDAGWGELILKIEYLAAKQGKIVIKVNPKYSSQECRNCGHIDKSNRDGEKFICTECGYHEHADIGAAKTIRDRALNLVRGDSAKPGVRA

SEQ ID NO: 62830 - protein, 267 aa, Oscillatoriales sp.
LLTNYVYKLRPNQTQDLKMSNWVDILRSHFNWCLNDRITQYSQQFIQGNYCDLRTKSEACPLTSCVSKNGATGEPWKIGKTDKKGKVKNPRRNPGHIQITALPELKAARPWFAGIDSTVLQQNVKRLDTAYNNFFDGRGFPKFKNRSNFTSFTFMMGVKIQGSKIYLPKLGWMRFHNSRPIPGGFTIKACAVRKRQNGWYVSVRIEDKSVPDYTTKPLKDVVKVIGCDMGITKLVHLSDGAQIENPKFSATKKAKRTLRIRQRQVSR

SEQ ID NO: 62831 - protein, 380 aa, unknown
  TnpB Polypeptide
MLRGIKIRLYPNKTQERALNKVLGCYRFVYNQMLSRKQNAYKADKTNLSVTELSKWFHGTLLKDEQYAWLKEQNTKVMKQAIRQMDGAYQNFFKQHNGFPKFKTKKDRQSALFPYEAISKKNTFETKHISLTTSLKSIKFRCSDLYLSRLQKYNKNIRSATLSKTKSGKFFLSILIKMEDTEFKKFGHTNKQVGIDLGVKYFVITSDGEVFENKHLFKKKENQVKRLQRQLSRKQKGSNNRDKQRIRLAKVFERLTNQKDSYIHSVVNELFTYYDTVFMEDLNVKGMLKNHNLAKAIQEVSFYNFKEILFSKSLINDKRVVFIDRFYPTSKTCSQCGYKKRDLKLSDRFWVCPECGSKHDRDINAAINILLEGQRMLAPV

SEQ ID NO: 62832 - protein, 363 aa, unknown
  TnpB Polypeptide
MKQIAHKYRIYPDTEQVELLTKTFGCVRVVWNNILDWRSKEYTLNAVKINYCASSKQLTTIKQLEEFTWLNEVSSIALQQALRSQDTAFSNFFAKRAKYPNFKSKHGKQSFRLTASGFKIKDNGLSIAKSKNPLKMSLSRPLPDSVNSLTISKDCAGRYFASFQGEKYIEPLPTINNSIGLDVGLTHFLTTSKGEKIDNPKLYRKGEKRLKALQRRLSRKVKGSNNRNKARLKVARHHAAVADSRKDFLNKLSTKIIHENQVIIVEDLNVSGMLKNHNLAKSISDASWSEFSRMLEYKSVWYGRTFTKVSRWFPSSQICSACGHRGSKKTLSVREWECSECRVIHDRDINAAININTVGLCNT

SEQ ID NO: 62833 - protein, 367 aa, unknown
  TnpB Polypeptide
VLKAYKYRIYPNREQRIQIAKTFGCCRFVYNQTLAYRREIYGKEKKSVSKTDCNNYCNRELKKDYEWLKEIDKFALTNAIYNMDAAYQKFFKGHAGYPKFKSKHDNHKSYTTNFTNGNIAVDFETGKIKLPKLKAVKARLHREYSGQIKSATVSQVSSGKYYVSILAETEYKELAHTNHNIGIDLGIKDLCITSDGKVYENLKIIKKYEKQLVKLQRQLSHKGKRSKNYYKTKKKIALCHEKIRNIRKDYLHKVSHEIISENQVLVSENLQIKNMVKNHHLAKAISDVSWYELTRQLEYKAKWNGRKYIKIDTFYASSQLCSVCGYQNPDTKDLSVRTWTCPKCGAEHDRDINAAKNILTEGLRQIA

SEQ ID NO: 62834 - protein, 392 aa, unknown
  TnpB Polypeptide
VIKTFQYRLYPTKAQDSLLRNTIETCRRVYNDCLSERKLTFESTGKAITKYEQLRHVKDIKNTNPYAKGIHSHILQVAVGDLDGAFRNFFRRVKGGGGKPGYPRFKSRNRFNSFGLKEYGNGFKIDGRRLKVYGIGRIRVRWHRELPSEPSTLRITRKADGWYACFSCECAPEDSLRTGNSIGIDVGISHLITDSNGNKIDSPKWYRDGQRKLRVLQRSVSRKMIGGANRRESSAILQRYHLRISRQRKDFINKVARGLIENNDLVAIEDLTIRNMVKNRHLSKSIMDAGWNYLAKRLCDKAEEAGRTVVKVDPSNTSKMCSGCGNVLGGMTLSDRWFLCPHCGLSLDRDHNAAINILRRGILRLNGDGRFPWAQSSLMQEGLAQKTSEVRL

SEQ ID NO: 62835 - protein, 254 aa, Halobacterium sp.
MEVRRTVPVALDVDSDDAALLEDTVDTFLWSAQYVVDHAFQGEYVTTSKTTLDDETYDNVREKTDGFNGGLVQAARNKAAEACKSVVARWKNDKKASKPRFTSPHVVYDHRTATFHDDYVSLATTDGRIEADYVLPGEDSDTPHSEYLFSDEYEISSAELHYQDGDWVLHIHCKKKVESTTSKQATPENGTVLGVDLGVNTLAVTSTGTFWTGDEFDHWRREYEKRRGDLQQCGTRWAHQNIQSIGKKKKAASS

SEQ ID NO: 62836 - protein, 433 aa, unknown
  TnpB Polypeptide
MDKVERNVYACSYTLPFRGNGALLRAMHKAKSLYNAALWYYRQALDEHHLAEKEGRDPLVEYPDYYKMERKFRDERQINYFDLPQKVSQQVLRDVQSDWSSYVAHVVRNKAYPEGSPERKEKINPPRYKKKEGYARLRYTIQAISFKRYPGKACPSGIDVGLDIPSFINPYRIQQLVIEPDGADYIRVTFIYKVDMTEMLTDNGRIMGIDLGVNNLATCGTNVGPGIIINGRPLKSINQYFNKKLAKMKSDNDALLDKELKRKVETQRHHMTRNIERLFRKRKYKIKDYLHNASCRIFEYAAANGITTIVVGKNAGWKRECSMGTQNNQNFVQIPHARFIDILAYKARARGIAFITVEESYTSKCSFIDGEDMCHHDRYLGRRIKRGLFRSKEGILINADLNGALNIIRKAVPNAFAEGIEAVVVPPTRTLVA

SEQ ID NO: 62837 - protein, 412 aa, unknown
  TnpB Polypeptide
VGRWMVKRVEHIWIKGDNNLSNLCHISKNLYNEANYIIRQELFNSGRWIRYNELYHLLKNSDNYKSLPAQTSQQILKLLDKSWKSFFRAMKEWKKHPEKFLERPRLPRYKDKNGEHILVFTNQQAKIRDGKLILPKMVDLEVKTRVDRLREVRILPKGVGYLIEIVYEKIINPKRRDKKHVAGIDLGVRNLITMVNNIGEKPIVVKGGVVKSINQYFNKEMAKLQSIYAKQKIRTGKKAKRLSVKRERKINDVFHKISRAVVNWCIVHDIGIIVIGYNQNWKQRVKISRVNNQNFVQIPFYKLINQITYKAEEEGIRVILQDESHTSKCSFLDEEPVEHREHYVGKRKSRGLFRSARGIIINADVNGACNTVRKAIPNAFQKWSADGIEGVGLHPVRWKFNIIAQGGLEHVF

SEQ ID NO: 62838 - protein, 382 aa, Escherichia sp.
MRRFAGACRFVFNRALALQNENHEAGNKYIPYGKMASWLVEWKNATETQWLKDSPSQPLQQSLKGLERAYKNFFQKRAAFPRFKKRGQNDAFRYPQGVKLDQENSRIFLPKLGWMRYRNSRQVTGVVKNVTVSQSCGKWYISIQTESEVSTPVHPSASMIGLDAGVAKLATLSDGTVFEPVNSFQKNQKTLARLQRQLSRKVKFSNNWQKQKRKIQRLHSCIANIRRDYLHKVTTTVSKNHAMIVIEDLKVSNMSKSAAGTVSLPGRNVRAKSGLNRSILDQGWYEIRRQLAYKQLWRGGQVLAVPPAYTSQRCVCCGHTAKENRLSQSKFRCQVCGYTANADVNGARNILAAGHAVLACGEMVQSGRSLKQEPTEMIQATA

SEQ ID NO: 62839 - protein, 366 aa, unknown
  TnpB Polypeptide
MKTYEYRLRPTEQQKQKLSTMLWLTKNLYNTGLEELIEHYKNTGKHLNRFSHDKFHNKKTDPLLPAVLTDTTLNRLHISFQNFFRGIKQGKKIGFPRFRSIHRWNSFAFSSAINYIEGSSFHSGKACAGNIKIVKHREMEGTFKHARIVKRPSGWYLQCVCDVPVPTEKTKEGSIGLDFGLKNLVADSNGTITENDRALRTQLKNLRRAQRKVSRRVKGSHNRKKAIRELARLHERIHRRRKDYLHKVSKKITDMFGMIFMEDLQITNMVKNSLLALSISDTSWGMLRQFLTYKAEYAGGQVVAVAPHYTSQRCSNCGEMVEKSLSVRTHLCSSCGYCDDRDINAAKNILRLGLSLYSPSVCTGSV

SEQ ID NO: 62840 - protein, 286 aa, unknown
  TnpB Polypeptide
MSLRASRRKPTVRFDLRTMSLRGNLLTLSSMHGQKRQRFLLPSIPAWFDERYPERRLQAVTLVLDSNGLMARLTLTFRIPKAEPVEGRVLGVDLGMHALYKDSEGGEYRYPRVQRVRRRYAYDRRTLQEKGTRSAHRRLKAMSGREERFIRDVDHCAAKRLADTPGIGVMAFEDLTRIRRLARKGTRTGRHRRNMLNQWPFSQLQEFTAYKAAAKGIQVVMVDPAYTSQWCNRCGYVDKGNRDHARFDCLRCGHSDDADHNAALNIRDRAIQSLGQTQGQGAVNHP

SEQ ID NO: 62841 - protein, 445 aa, Persephonella sp.
MDTTSDKNQKIKESLKKTKEKRKNQVVKVYQLKISYSNLNKEQKQWLERVFLEAKWLYNYCIADIPNRLNSKTEKLKQVEIITPQGIETREMTCLSSQMKQGILDRIKKNLSDLSKAKQKGIKVGKLKFKSDYRNIPLKQNNITFKVLKDRNRIKLQGLKRAVRVLGLHQLPENCDIAKAELIKKPDGYYIYLTCYIDKTQVIKQEKINKPIGIDFGIKHQLTLSNGIKISYSVGETKRLKKLQKKLSRQREGSRNYQKTKQKIQKEHQKINNKRKDIQNKVLSLLKKYEYVIIQEEQIKNWQRGLFGKQIQKTGIGGIISMLRQNIETLILVDRFEATTKICSRCGSRKEEIRLSERIYKCEVCGLEIDRDLNSAINILKMGLEKVEGTTIKNVGLDRPELTPVERDICEAKWRLKEEQATAEILGRNPYICVSYTSVKQEAPN

SEQ ID NO: 62842 - protein, 409 aa, Natrinema sp.
MRYNYRYRLKPTDELHERLAWTVDTCRQVYNHFLHRLNRVDGTSAYSEQKLLPDLKREWTDLQDIHSKVLQKVVQRLYDNISTLKGRKDNGYRVGELRWKAPQEYRSIKYSQTGFKFNNTSGRPVLSLSKIGDVPMVHHREVPDDATIKEVVIKQEPTGEWFAVLGIETENDAPPKPENPEKCIGIDVGILKYAHDSDGTAVEGPDLTDERERLEREQRKLSRKEHGSANYRTQQRIVARRHADLKRKRRDFLHKLSNYYAREYDLVAVEDLDAKGLMELPSNSRNRAGAAWGTFLRMLEYKCGREGTHFVAVEPAGTTKECSNCGVATDKPLWVREHSCPSCGFEADRDLNAAYNILSRGLTEVGVVHPDSMPAETALPTGIDSVPAKRVLETGSPVLSETVRPSRAG

SEQ ID NO: 62843 - protein, 277 aa, Natrinema sp.
VDDDWRVGTAEVVRNRDRHELHINVTYETAEVANKETAETFIGVDVNEDCVGLAAVTESGVEDSVVIEYPDIKKTRHEYFTIRKRMQSVGQTTLEHGVRDEEQRFVHDQLHQVSRDVVAWAQQFENPVIIFEDLKDMRDDIDYGTRMNRRLHSLPFAQLQGFVSYKAAWRGIPSEKIDPEYTSQECVDCGHTTRSNRQGKRFQCVRCGFQDHADRKAALLISARGLEKLNRKVPALNSPPIVRVRRHGNGLNEPADHDPVSTVRGHQTDGETGSVRN

SEQ ID NO: 62844 - protein, 445 aa, Natrinema sp.
VQSSELTHTLSFGLDIQTGSGDDLQTGCLEARRIRNEANRLDRHGWDWGDIKSTVVDNANHVKNTSQLIVGKALGEIETYHDNKDDGWGRPYPYIDESYPVVMNHEEGYRLFFEDDGTVRFRVTATRGTHVKGELCGSPDHFDRLRTAFNDEEWRVGTAEVVHKHSEWRLHVTVTHENHQVASKVDADTIIGVDVNEDCIALIAMSRSSSVKDSVVFEYPSVKEQRHEFFTKRKRMQKAKQTAFETVVQTEERDYVHDCLHKVSRKVVEWVSQFSNPLIVFENLKDMRDSIDYGTRMNRRLHSLPFAALQEMVSYKAAWDGIPSDEVDPEYTSQRCPRTECQHTVRANRHKKRFKCRQCEFQDHSDRKAAVCVVQNWFDEQNENVPSLETLPRVKKVRWAASGAGGGPDSHGLILSSGVDRHGTSAQPEMEAREELKSVASAVPE

SEQ ID NO: 62845 - protein, 424 aa, Natrinema sp.
MYSPRYRLFPDAKQREVLDWTRDTVRQVYNHALREFNQIPADAGTLRQRVWSVRDTLPAIKDWWSDLKQVYSTVLQKAVERIRDNIQNLGKLKAKGYDVGSLNWKKPREYRSFTYRQSGFELDKKSGPNGRGLLILKKLKGETREIPIRLHRDLPDHKQIKEVTLKKEPTGAWYVSFCIKTDEPEKPAIEDINPDDTVGLDLGVLNFVHDSDGRSIGRLDLSADRERLEREQRSLSRKEYKSNNWEEQRRRVAEVHARMTAKKRDYKHKLAHFYTTEYDAVFVEDLNVKGMLESRQNARNKAEVGWRDFITILKHHGKKNGCHVVEVEPRGTTKECAACGVETRKPIWVREHSCPACGFELDRDWNAALNVLSHGLKKLGVVHSEDTPVETATTVDSFMVSASRVVETGSPALMEPAKQASRAG

SEQ ID NO: 62846 - protein, 416 aa, Natrinema sp.
MEVRRTAPVKLIVPDERHTDLHESARQFLHCANRAAEFCWSNASPTECITANTTARDALYDELREETDLTANLVQEAIRRAVQAVKGCVERWKDGKRVSQPEFTSWSILYDKRSATFYRDRVSLSTVNGRVECDFELPSDSPTPYERYVLSEEFEFRASTLQYDKATDEFYFHITTRKHDSDDDESEVSEDTELQTVLGIDLGVNSLAVASTGRFWKGDDYDHWCREFEKRRGDLQQRGTQAAHNALVRLGKREDAWRKQYIHTVANEIVTEAVENGCDVIVFENLTDIRERLPQAKWHHLWAFRRLFEYVEYKAAERGVAAKQVAPNHTSQRCSRTDCGFTHEANRDDEHFKCQKCGYEVNADYNAAKNIGLRYARKRKHRLRSSPTSGSGDAPVDVRVNGGMLNGESHRPIAGD

SEQ ID NO: 62847 - protein, 433 aa, Natrinema sp.
MKRTNEFEVVPQSDEDGELLRRLLDASAALWNEINYQRRTNFDDPDGDVWKIDEYRGRYGGMLGASTVQQIERKNREAWHSFFALREKGEANGKPGFWGNQDEGRELRTYIRNTSYSVEWGEHSRLEILVGQDLKEEYGLGYQERLRLEVRGEPNWKEYDKQGRLELYYDDVSETFRAFQPVTIDNSRLAHPLADETAALDIGANNIVACTVSTGEQYLYEGRDLFEQFRKTTQRIAELQSKLREGQYSSKRIDSLYRRRTRRRDHVMDALARDVIERLYDEGVSTVYVGDLTGVLETHWSVRTNAKLHNFWAFRRFIKRLSCTGEEYGITVEVRTEEWTSQTCPNCGSTEDTTRHQGTVTCTCGFEGHADLSASETFLRRHETDVARPMARPVCLKWDSHEWLGSPRSPRPNEEHTNPQVASVVVRDDEVVS

SEQ ID NO: 62848 - protein, 315 aa, Natrinema sp.
MEVVRNIQVKLDVSEEDYEVLDETFEQFRQAAQHVADHGWDDNPYEITDTKNTLHEETYSDVRDKLTLQSSLVQSARNLAATALGNCKDRIIEDGEKASKPEFRGSVVVYTGRTITYNDDHVSLATVDDRVTAKYVTPVTEEGTPFEDYWTDEWEKGEATLHKRDGTYYLHVAVKKDVESDSSDDESENGVVLGVDLNVDGYLAVTSTGAFLGNADYLNHKRNEYERRRGNLQQTGTHSAHLTIKSIGSRFARWSANYLHRVSKALVREAVENDCTAIAFENLKHIRERISNASKFQQWAFRELQRLKVPAVGVP

SEQ ID NO: 62849 - protein, 436 aa, Natrinema sp.
MAIEVTRTYVGSIQNQRQVCDGLDSLGDSASKIWNVARWTADRIWDATGKIPDEGALKSYMKNRTCWKDLNAQSSQKVIEELSDAFQSWFDLRHKDPKANPPGYRKHGDTRPRSTVTFKADGFKHDPENNRVRLSKGSNLKESWSDFILCEYQTRPDVDLSEVNRAQNVRAVWNGNEWELHFVCKVKLETTDSAGDELAGIDLGIKNIATIAFPAEYVLFPGNSLKQDKHYFTRSEYDTEGENGPSEKSMWARQKLADRETHFYHVLTDTIITECVERGVGTLAVSWPEDVRESDWGKTGNKKLHSWAFNRIYQYLEYKGEICGVEVLKENEWDTSKTCSRCGDDTKSNRVERGLYVCSSCELVGNADCNGAENMRQKITPSPHGEDRSNGCVVVRETGGLSSSRKAQSAFRTTQPSTYLFDRESGTFHTREQVVS

SEQ ID NO: 62850 - protein, 486 aa, Caldivirga sp.
VPRVVPFSSLDEPVGRLPTVFTTLGTLSSSPPKLKRGRKSRSEEMRTVRLRLLPNGSQERRLRRIADATARLWNELNYARLVQYRASGKVNFKDTEHEFYYRFNSVLSVNAGQVINLNNWAWKSFFETLKLHRQGKLPKFNGKPSPPGFWKDKLLGRRLLRILVRNDRYYLEQVNGGEGYVILKDWGLRIKYAGRIKWSGKQGTLVIKLEDNRWFAYVPIEVGGKPAKTNPKGYVKGIHEKIQVENPRGSNKAFIDIGLNNLFAVVFNHTDTAILIKGSSIKAEYYYWKREIKTYQSIRDWLKNHGFEAWRKYHTYYLHAVFKRRERLRHYYRTAIRFLARTLHEMGVNEVFVGYPYMLSQNNSNEYNVNIWWFNKVIRWLGEVLQEYGIRLNVVNEHGTSKQCSICNANHENGRVKRGLYVCQATGIKINADLNAARNIAKRIGYNTPIPRKILSYIVTTNGVKPLTPKEGVTIETPKINPTSPR

SEQ ID NO: 62851 - protein, 443 aa, Nostoc sp.
VGFYTLIPFGRGQSLESEFPSAFCLLPSAFLDKLRNCAIYLLRQAYFTFGQVLDDQFGLHAELKSNPHYQIFYSQAAQQVCTEVAESFTSYKELLPLWYSGQLKHKPKLPKYRKKNGLAGWTYPSVALNFDIDTGLIRLPLGNRFKSEFGFDSLFVTMPHNIRFETIKELRVLPRNGCFYAEFVYKKNSVGMVALDKSRALALDHGINNWLTCVPNTGDNSFIVDGFKLKSLTQWYNKQTATIKEALSKGFWNEKLACITEKRNRQVKDAVNKAARLVINYCLKNNIGTVILGWNQGNKDGIQTGKVNNQKIVHTPTARLKKRLEELCNQFKIEFVQTEESYTSRASFLDGDTVPKYGEKPNGYKPSGVRITRGQYKTSNKKIIIHADCNAAANMFRKVETQLGLCLAKVNRAVLTMPTRIYLWNTKSKKRRGTALAYLEVTA

SEQ ID NO: 62852 - protein, 310 aa, unknown
  TnpB Polypeptide
VSIKGGNCIYLTVKQQVKHLSKEDYITIKKLCHTAKNLANEAIYNVRQYYFAEGEFFKYEKNYALLKNSHNYKTLNSNMAQQILKEVDCSFKSFFGLLKLAKQGKYAFKDCKLPHYLPKDGYTTLIIGFVRLNGNKLVLPFSNSFKKTHKSVEITIPPILVDKHIKEIRIIPKANARFFEIQYTYETECVQRNLNQNNALAIDFGISNLATCVTNTGESFIIDGRKLKSINQWFNKENARLQSIKDKQGFGKRTTNRQKAIARDRNNKVNDYMSKAARITINYCIANDIGTLVVGYNETFQRGSNLGKTD

SEQ ID NO: 62853 - protein, 378 aa, unknown
  TnpB Polypeptide
MMRTASIRLLVSPQQDAALRALQHAYAGACNRLVPIVREKRVWNRVALHNLAYSMLRLATPLGSQMCCNAIFSVCKAYRAQKALGRIRKDGEVPAIRFERASVHFDKRTYSIQGDSVSLYTLDGRIVVPMRMGEHQRRLLGEGKPKEAELALRKGVWYFNLVVETQDANPVTSGPVVGVDVGENNIAAISLGKVFGGGRLRDERDRYLALRRRLQSNGSQSAKRKLRQVSGKEARRVKHINHETSKAIVAAAVAAGARKIVLEDLTHIRARIKAGKRMRARLHRWAWRQLQTFVEYKAKACGVAVEYVQPACTSQTCSSCGGLGKRSKHRFECPHCGLRAHSDLNASRNLARIGETAVLPRAAVNTPNVGNESHLVLR

SEQ ID NO: 62854 - protein, 259 aa, Bacterium sp.
MVFGDYQREQIKYRKGQADLVLVGKIFYLFCTLEIKEAEQIDTQEFIGVDLGIVKLLVDSLGNEVAGELIEKIRLKYLGLRRELQKCRSKNAKRKLKKIAKKEAEFRRQVNHIISKALVKRAKDTNSGIALEILKYIRSRTTVRRQDRAKHSGWAFAQLQAFIVYKAKIAGVPVVFVDPRNSSRECHNCHFIAKRNRVSQSVFCCAKCGLQCNADHNAAKNIALRGKNLWASVNTPIAVHVGSPIVVPLELQASPFKAG

SEQ ID NO: 62855 - protein, 308 aa, Aeromonas sp.
MQILKAYKFRLEPTEQQAQRLRQLGGCARYVWNHGLAETKRILDAGEKLPSAFELNRMLTSWKKDPEMAFLAEAYTDNLQQKLKDLHGAWMRCFDKKLAAKAPVFKKKSDNRDAIRFVNFDKYCRLEKGRVKLPAGLAWVKFRQSQPVEGKIKNATVSQAAGHWYISFQVEQETLEPIHPSGSMVGLDVGIAKLATLSDGTVFEPVNSFKTNQIKLARLQRQLSKKVKFSSNWKKQKAKIQRLHSHIANTRRDYLHKVTTTISKNHAMIVIEDLKVASMSKSAAGTTSQPGRNVRAKSGLNRSILDQG

SEQ ID NO: 62856 - protein, 181 aa, unknown
  TnpB Polypeptide
MNYIVTATVKNLPIRGITGTQRKKLAREQRKLSRMQKGSNNRNKQRLKVAKLHEKVSNQRKDFLHKQSRQIANAYDCICIEDLDMKAMSRLLNFGKSVSDNGWGMFTTFLRYKLEEQGKKLVKVGRFFASSQTCSVCGYKNAKTKNLALREWDCPQCGTHHDRDVNAAVNIRNEGMRLVNA

SEQ ID NO: 62857 - protein, 416 aa, unknown
  TnpB Polypeptide
MEYSHRYLAYPTQEIAGELERHIDIHRQAYNYTLYEYENVDVEDIGSAYKHHYRLPDWKNEFPVFSEVNSKALQRTVTRFYDNLSNLKDQKENGNKVGKLNWKSPREFQSMTFSQSGFELKNTSGRRATLWLSKIGDIPIRYHRNIPDKADIKEVTVKKETTGEWFVSFGLETDEADLPEKPDVDSLDASNSVGIDLGILNYIHTSDGKTVDWLALEDEYDRLRREQRKLSRKEKGSNNYEKQRRKVAKVKRHIRRKVLDYQHKITTWLVREYDAVFVEDLDVKELLEQSHNARNKQDAAWRQFITLLEYKADLYGCHVVQVEARGTTKECASCGVETAKPIWVREHSCPSCGFECDRDANAAMNVLQRGFAELGLGWPESTPVETALPTDTHSVSAKRVVETGSLGVDRNGEAVS

SEQ ID NO: 62858 - protein, 394 aa, Thiohalocapsa sp.
MLLAHKIELRPTADQADYLARACGSRRHCYNKLLEHFSQKDVKWSKAAAYQHYINIIRPAFPWYNEVSSRVTRNAIDDLDNAFKHFFRRIRENKPANPKAKTFREKFGFPTFKKKGIGDSFALREKPKFDVEGRELRIEKLKTKIKMRQPLRFTGTLNQVTISQRAGKFYASILVNTEDYNPHAPEKDAVGVDFGIKSLAVFSDGTETPANDALKRNLKALKRKQRRLSRKQKGSNRRARAKLAVAKLHKRIGDQRQAVLHELSDRLTRDYKVICLEDLNVNGMVKNGKLARPISDAGFGMLRRMIEYKAELRGVEVAFIGRFEPSSKTCSECGQIHDMPLDKRTMECDCGNVMDRDMNAARNILARGLDTLRPDLKRTQESSQTVSAASVLTA

SEQ ID NO: 62859 - protein, 376 aa, Marininema sp.
MHKAFKFRLYPTKEQTILINKSIGCSRFTFNYFLARWNESYDSTGKGLTYGTCSAQLTSLKKEIDWLREVDATSLQNTLKHLADSFSRFFKKQNDRPRFKSKRNRVQSYTSQCNHPKKGKPTVEVVANRIKLPKLGWVSFAKSRKVEGRILSATIRRNPTGKYFVSILCKVNQSPYVPVAKGKAAGIDLGLKNFAILTDGTKVKPSRYFRQYEKKLANAQRIMSRRTKGGSNWHKARIKVARIHEKVSNARHDFLHKLSSKLIRENQTICIEDLGVNNMVKNHKLAKSITDASWSEFVTMLTFKAKWHGRNIVKVGKQFPSSQLCSSCGYRHKEVKNLKLREWTCPTCNAYHDRDINASKNILQEGLRILAVGQNV

SEQ ID NO: 62860 - protein, 488 aa, unknown
  TnpB Polypeptide
LVVAKFEIPEGWTAQAYRYALDPTPTQLRALASHAGAARFAHNHMLALVKAVMDQRVAERSYGVPEDRLTSVLGWSLPALRKVWNQRKPSCAPWWAENSKEAYNTGLDGLAHGLDAWSKSRKGERAGRAAGFPRFKTARAPRSVRFTTGVIRCEADRRHITLPRLGAVRSHESTRKLARRIEAGTARILSATVRQDSAGRWYCALQVIVAVKARPAHARRSIHPIVGVDVGVKADSLLVVATPGGTEIDRVAAPKSLTAAQGRLRALQRRAARQHGPYDPATKTKQVPSKRWRRTQARIGRTHVHAAAVRRDVLHKATTALAQQHQVVVVETLNAAGMRAKGGARKRGLNRALADAALAEIRRMLGYKTRWYGSHLVEADRFYPSSKTCTACGRRKSNLTLADRVFECDDCGMRIDRDLGAATNLARLGVPTHQGEQSPAGSGPVAGRGATRETEPAPAGDAAGDETSTPHHHPVDQTGTASPQGEAA

SEQ ID NO: 62861 - protein, 417 aa, unknown
  TnpB Polypeptide
MNAYGSIKSKLKLTKIQYRCLRYLARIAKNLHNEAMYLINKHYELTGKYLGYYDICKILKNSINYKIMNANMAQHTLQSVDDMYKSFMSLLRIKKAGNNKWVRVVTRPRYLPKDGYDTLYIQQFNILTDRFVFPFSLKYMKYHIRFTIKIPKILKDKSYLVKEIRVIPKSQARFFEIQYIYEKEVKEKEYVVKNALAIDLGVNNLCTCVSNTGKSFIIDGRRLKSINQWYNKESAYLNSIRDKQKIKGYTLRLDKLVYNYKNRANDYMNKASRYIVNYCKNNDISVLVIGYNPGFSIAGNLGKIQNQRIGQIPYGKFVRKLEYVFRMEGINSIVINESYTSKASFFDKDPIPNVNDNHTYEFSGKRIKRGLYRTKNGYEFNADVNGALNILRKSNVVSLDALYARGEVDTPIRIRIN

SEQ ID NO: 62862 - protein, 383 aa, Lactobacillus sp.
MTLKGIKLRLYPNQEQQLKIKLNFGYNRFVWNQILAMMVERYQNNPEAKFLNAFALNNLLPALKTEYEWLKDAESTSLQSTNHDLVEAYKKFFRLHKGFPKFKSRKYPKQSYQTKSVNHNIKLVDNHHIQLPKLGKLKFKSGRKPVGKIKNVTIRLSATGKFYAIILVDTDIKALAKTGNPVGIDLGVADLMITSDGVKYPTIRFDKRLSKKKHYWEKRLARRRLQAQQEIAWDKHNKVIEPRELSDFKNYQKAKRMVAKYAEKIANQRNNYLNTLTKTLVAQYDVIYIEDLKTKNLLKNHKLARAIANQSWRELHRMLEYKCVWYGKQLVTVNPRKTSQICSSCGYDDGKHTLDIRQWACPNCGVSHDRDINAAVNILQATA

SEQ ID NO: 62863 - protein, 392 aa, unknown
  TnpB Polypeptide
MYLTERHIIKNNKELDEICFKSKNLYNRALYLIRQHYFETKKYLNYYDINRIMIDSKDTDYYSLPCKVSNEILKLLDRNFKSFFALLKKKQNNKYDKPVKIPKYLDKQGKNITILPKQSISKIYLKKGLIKLSSLSIEIPTKVTESNIVEVRILPRNNHHIVEIVYKVEEKELKPDNGRYASIDLGLNNLVTIGSNVIKPFIINGKPLKSINQYWNKEVARLQSLLKGNKRTSKRINNITLKRNNKIKDYLHKSSKTIVNFLVSNNISTLVIGYNEEWKQNINIGRRNNQSFVNIPFYTFIKQLEYKCRLEGINVIFTEESYTSKCSFLDNEPLRKHSNYIGKRIKRGLFRSAKNKIINADLNGSLNILRKVIGEFQYPIEVCGTPLKISDF

SEQ ID NO: 62864 - protein, 209 aa, Thermoflexales sp.
MVNLAVDAAGETVCGAQLEAKRRWYAERRKKLQSVGTRSAKRRLKRLSGRQARFQKDTNHCIRKTLVAKARRHNPGIALEDLNGISKRTTVGSAQRSRHYKGSFCPLPSFLSHKAELFGVPVRLVDPCYTSQACSICGDVSKAHRPTRDTFLCERCGFFGPADGVAAVNIAARAGVNQPMVSTEMPKGHSPIAASSEVRCKLPVETGSS

SEQ ID NO: 62865 - protein, 263 aa, unknown
  TnpB Polypeptide
LHFYQPDQIKRVRLVKRADGYYVQFCIAVDRVQSIQVTGNAIGLDVGLKEFYTDSNGATVENPRFLRKGERRLKIAQRLVSRRVKGSSNRRKARQILGKRHLKISRQRQDHAVKLARCVITSNDVVAYEDLRIKNMVKNQRLAKSINDASWYQFRLWLEYYGRVFGKITIAVVAAGTSQECSKCGNIVKKTLSTRTHVCQCGCVLDRDHNSGKIILSRGLATVGHTGSYGLEPCNAWGEMTATEVGAILPQQVASLNQESQCL

SEQ ID NO: 62866 - protein, 394 aa, unknown
  TnpB Polypeptide
VFTDEIPPILSLLLGCIVVEMIRRQAYKFQLKPTPEQIASMKSFAGACRFVYNRALTMQSDIWRNGDRYIPYNKMAPWLVEWKSQEEMSWLSNAPSQILQQSLKDLDKAFNNLFARRATFPSPKKKGKNDAFRYPTQRVKLDEGNERIQLPKLGWVRYRKSRSITGVVKNVTVSMKLDKWYVSLQTEAEVDEPSSQQSSMIGLDTSNIECITTSDSTDFLSQASLPKMEKSLEKNIKRLRKKKRFSSNWVKQRHKVNRLLNRISNMRKDHFHKISTTLSKNHAIVVIENLEAATSLSRRPKSTKRFLSNETYELKRQLDYKLIWNGGELVTVRERDNNFKPVSDDASSSHYGKLRAERILAAGHAVIACGGAELLGHPMKQEPSEDGKSTANLL

SEQ ID NO: 62867 - protein, 242 aa, Chromatium sp.
MNPETTLKTLKVRIKDKHAPLLRQWAFECNQIWNEANAITAEYSYMPIPEVGWMRFNFSAFDLAKSQAIFAKSRGFTIHSQTVQEVTEAHAKARKQFKKDKLRWRVSGGSRRALGWVPFKSGAAVWKNGQVRYNKHFFKVWDSYSLSQFAFRSGSFTEDSRGRWYFNVVVQVPVIEMSGRGEIGIDLGLKKVATCSNGLKLESKQFYRNAEQQLGIAQRANKKKRVKAIHAKLKNRRANHLH

SEQ ID NO: 62868 - protein, 375 aa, Sporomusa sp.
MITALKVRLEPNNKQMSKLFQSAGTARWAYNWTLAKQEENYKNGGKFINDRELRKELTILKQTRELNWLNTYSNNITKQAIKDACDAYYKYFKGLAEKPKFKRRKKSQPKFYQDTDKIKFKNGKVRLEKIGWIKLSEKNRIPENAKYTNPRVTFDGVHWYVSVGIEIQSESVDLTGESIGIDVGIKYLAVCSQIEKPYKNINKSKKIKRLEKKLRRLQRKVSNKYDKNKKGERYVKTGNIIKLENNIRKLHKRLDNIRTNYRHEVTTEIAKTKPARIVMESLNISGMMKNKHLSKAIQQQGLYEFGRFIQYKAERQGTEFIEADKWYPSSKTCSVCGHVKAKLSLSEREFRCECCGAVIDRDKNASINLSRYEVS

SEQ ID NO: 62869 - protein, 372 aa, Sporomusa sp.
MPTITKSISVKIDDPTKTKLEALQDILTISADLSCYYVAKMEALDTESKKVLHTETYNEVKTMFPDIPTGLIQTIRDKSLETYKSYKAQIKKGKKASLPEFKHPVVRFDGRTFTLHTTEKCFTYFVSVSTRQKRVMLPVQYGYFQAKILDKLSAGEYKFCIAELSFSYRLNCYVLNISYKYDVPEKETSAVMGIDLGITNLAVLAVPGQLHKFFSGKCHNQKRSHYANLRRKLGKKKLLKKIKSIGNKEQRYMKDVNHKISRQIVEAAKQYNAVIQLEDLSNIRARVKFSRKMNRKLHNWNFYQLRSFIEYKAMAEGLKVVQVSPKYTSQHCHVCGHTEKGNRPNQATFQCKACGYQANADFNASMNIAVAG

SEQ ID NO: 62870 - protein, 399 aa, Anaeromassilibacillus sp.
MKKGSKPFLSKSILHPERRASERREEKMEKTYRGQKFRLYPTSEQKAEIEKTFGGTRFVWNYFLERTEKALERRGEALSTYECNRILTKMRKEWFLWLDEIGITALQKAIANLFAARRFAKRQQRDPHALFRSKKSPRQDFTTAKSIHVTESYVQIPCIGRVRCRKRPVLPGNPVEVKISKTAAGKYYASVVFVSEQAPRSMPNSVVSGEIGLALSYSGFVVDTAGNQYVRQGAKKENQRLIRKTRTLRRKKLGSIRAQKTWRELVRLRERIYYRNKEFHHKLTKKIADENQVIAIDHPAVANLPDAQEYKRTLQTFSWTDFFVTLRRKAQERGRLFFSVERRIPGLCFCPKCSEAFLMQPPFLPEQRRCLFCGAVYEDSFAAASNALEEARERLRFVR

SEQ ID NO: 62871 - protein, 408 aa, unknown
  TnpB Polypeptide
VTQTDYTDRVPVRRAYKFRAYPTRPQEGRAVRLLADHCDLYNAALMERREAWRMGKKSIGYGAQSAQLKDIRRADPGGQGRHSFTAQQQTLRRLDTVFSAYYQRCKAGKGKNPGYPRFKPYQRFSQVLFVAGDGAKWQPPHTGAWAHATFQAVGTLKVRQHRPVPGTVKALRLTREHRRWYIIVIADTAPVPLPPVGRAVGVDLGVARFLTTSDGEVVANPRFLAASAQVIADLERRKTRARTGSGNRERIRRALAREWRKVRNRRRDFHHKTARVLVDQCDAIALEDLNTAGMTRRPAPRPDPGKPGTFGPNQARAKAGLNKSILDAGWAQFISILTGKAAEAGRRVVLVDPARTSIGCHRCGRRCDRPQQKTVICPVHGAIDADVNGARNIASRAGLGSGQAPKAA

SEQ ID NO: 62872 - protein, 380 aa, Pyrobaculum sp.
MRYRTLLIRRKIEEIPPDQLQRFIEVQEAFRRWATEWCQSGFKTPLPQQNPLRQLARYLKFGMAVVKHHCPKEEGKIWNVPLIFDVQLRVDGERDMSRGVFIDLTRGEVRIRRLCETIVLKLKKSSIKWIKERIEEGGKPVLAMAWVGRPRRSNLVTFNVALVFAREVAPIEMRRVLVVDLNALHNGVAIATIEGERILQRGTLRPDLRLIEMLQKEISRLESLCAKRGEPYCTQFVAAQSRLYRLLRKFEDEAAKKIVRLARQYKALIVVDAPKDESLREIKQSRYDPSKKIYLNVGRLKKRIERLAEWYGVPYSETRLYSTICPRCGFKMKELPGRKMRCPKCGFEAHRDEVPSLWAAKRFSELISSFSSSAIALAVF

SEQ ID NO: 62873 - protein, 378 aa, Pyrobaculum sp.
MKYRTLLIRRKTEEIPPEQLEMFIKIQQQFREWATEWYKSGFKAPMPEQNPLKYFAMKLKYVLKLIPTNGLKKDKWNVPLPFNIQLRINNEKDVGCGVFIDLSKGEVRIRKWGGGTIVLKLKKSSIKWIKERVEEGGKPVLAMAWVGRVKRSNIVTFNVALTFARDVEPIDVRRVLAVDLNGLHNGVVWGVVEKDKILASGTERPHLSKIGRLQKEISKLDSLCAKKGEYCRQAVAAESRLRRLLREFADEAAKKIVRLARQYKALIVVDAPKDESLREIKQSRYAPSKKIYLDVGRLKKRIKQLAEWYGVPYREARLYSTICPRCEAKMEELPNRRVRCPKCGFEAPRDEVPLMWTAKRFSELTPSFSSLAIALAAF

SEQ ID NO: 62874 - protein, 411 aa, unknown
  TnpB Polypeptide
MSRYRLHPTPAQEEVLLSHCAHARYVWNLAVEQRSWWQPGRPAPGFAEQCRQLSEARAAVPWLAVGSVIIQQQALRDFHAAHASWFASLRQWRKRCAKTPPGQRPAAPSPPSWRKRGRREGFRIVAVRPQDVRRLNRRWGQVLVPKLGWVRFRWSRPAPAAKSYRITRDRAGRWHVAFAAVPAAIPAPGNGEVVGVDRGVRVSAALSTGELLTVASLRPAERRRLRLLERRLARARPGSNRRRRVRLSITRLKARQTDRRRDWTEKVSTDLARRFDLICVEDLDVRAMTRTARGTVERPGRGVRQKAPLNRGILASGWGKLVGRLEQKAPGRVQRIPAAYTSQRCSACGHVAAESRQSQTAFCCVACAWAGNADYNAARNIAAAGQVVAARGGQGSPRPVNREPPTLGTVA

SEQ ID NO: 62875 - protein, 303 aa, unknown
  TnpB Polypeptide
MQLKTYKYRIYPTKAQEKYLSEVFGSVRFVWNQLVANFNSFSKEGPNRPMNEKILKDNPEFSWLNNSISYALQQKRMDFEETKSQYFSKTRKSKLGRMKFKKRGVSTDAFRIPGQLFSKSQVNFETSRIKIPKMTPIKMSVDREFSSVVKNVTISKNKANQYFASILVEETIELKQNTGRSIGIDLGLKHLCIMSNGMKIENPRWFRENQSKLKRAQQHLSRKVKGSSRYEKQRLKVAKLHLKVANQRRDFQHNFSIWLVENYDTIITEDLNVKGMIKNRKLAKSISDASWSTLVGMIAYKSN

SEQ ID NO: 62876 - protein, 370 aa, Cyanothece sp.
LSYNRFFQGLSKKPKFKSIRDYSGWTYPGHSGWEALTEGKHGQVRLRDLGITIRMRGQAKQWGTPTTLTIIYKPYLNQWFASFTVNVVIQETLFASDSNLKYQSILAIDLGAETALTAYDGQEFLEIENQRFARHSQAKIKSASKQLRRKRCPNYKKKIKASKRWKKARKKVSRLQRKVTMQRKNWQHQVTTDISRRYDIVVTEKLETKKMTRKAKQGSKRKRQKAGLNKSILDVGFGTLNKMITYKVEAKGGLALFLPTKKIKPSQRCPHCGTLHKDWADLSNRYHVCNHCRFENGRDKSSVMVMYNVAIYQQPGLGIRLEIVDLISSTSKTRKHTGSMKQLGNMKRQKSQQNQKSSGNLETPTSQKLG

SEQ ID NO: 62877 - protein, 471 aa, Cyanothece sp.
MLSPLLFCVTVIIAGRGKPIIVSYQYRLKPNYEQRCRLNSWLEKLRCQYNYLLADRFDWWENNRTYIDSCPLICSIAEPREQPEYYRQKRSLVQLKQERPWYKDIHAHVLQDMVKRVDLAFSRYIKGDKNGKRSGKPRFKGKNRYRTIGFPSIKADCVNNNRITFPKLGEIKFIQHRPLPDGFTVKRALITKKADGWYVTLTLEDKSVPSLTVDIQPTEENSLGIDSGLEFFVACSDSTTVKPPKFYRQSEDKLTKLQSKRDSRKLGSKARRKLNQKVAKLHQKIARQRQQWHYELANQLLDKADVLFVENLKISNMSRRNKPKQGEDGTFLPNGQSAKSGLNKSFADAGISGFLNEILPYKAAKAGKKVVKVNPKGTSRYCAICLNYVPKELSDRWHSCDCGASMARDINSGILIKKVGLGVRLTIKRKSSRSEEEKPAFCCLSNERLEYVMRTEDQGEVRFSTASAIML

SEQ ID NO: 62878 - protein, 411 aa, Cyanothece sp.
MAILTLTLKLPFYRLNQCKSQEFDRLTKLNTGIGNQLLEIPKTDRRKYTSKDFNHVEIGSGWINQTIRNSCAATKVKKFKYLPLEVNNQGWRIEKKGDIYSVAFSIIRGVKKRIPLAIHQSNHTDVLDKIIAKSTKKGSLKLWKSKKRVRNLPSHGKCKTHSRQGIWYVLLSVSMEVPDAEPVKNWIGVDRGQNQIAVASLPDGFGKFWNGRQIKHLRRRYQKLRKQLQKANKRKVIKRLESKERRIITYINHCISKQLVQFASYYGMGLRFEDLSNIRQTSKQSKKVRSDAGNSRHAWSYFQLETLTRYKAIKNGVPFELVPAPYTSKSDHRNGVIGKRNGHWFRGFDGYQCNSDWNASQNIGQWLGFSCPLDLQKTVFVMDADGLKDGVNGSPPSRVPMRRATARGCSS

SEQ ID NO: 62879 - protein, 190 aa, Lactobacillus sp.
MNISKDNWFDLASYEALKMNQVKVISIFKENETYYAALSYEEKVTAKTKTHQKTAVDVNVGHFNYTEGQINVLPAKLQKLYKRIKHYQRMLARKREINGKLAIKSNNYLAVRIKLQRDYRKIANIQNDLLQKFTTKLVNNYDQIVIEDLAIKKMMMTHVASKDMQRSLFSRFRQILTYKCEWYSKKINLS

SEQ ID NO: 62880 - protein, 236 aa, unknown
  TnpB Polypeptide
LPQSCRSGCRHQPPGYALQRSDIPNPRPLERSLRKLRRLNRQLAGRKPGSKHRKATRRRVAQVHARAANLRRDALHKLSTTLATQHGTVVIEQLNMAGMVRNRHLARVLFDSGLADLRRQLTYKTAWYGSRLVVADRLYPSSKTCSTCGWVKAKLTLAERTFTCEGCGLCIDRDLNAARNLVKLVDHVAQSGWETENARGADRKPQLAGQVAAKREAGIERRSNKTGTTAPRGAVA

SEQ ID NO: 62881 - protein, 482 aa, unknown
  TnpB Polypeptide
VRGGVTARFEIPDGWCVQAFRFTLDPTEDQARSLARHFGARRNAYNWTVATLKADIDAWRATGIETVKPSLRALRKRWNTVKNDICINAETGGLWWPECSKQAYADGIAGAVDAYWNWQTCRSAKRAGKRVGFPRFKRTSRDADRVCFTTGAMRVQPHRRHLTLPVIGTVRTHENTRRIERLIRAGRARVLAISVRRNATRLDASVRVVVQRPIQPRVTLADSRVGVDVGVRRLATVATADGVVIEQVANPRPLDAALRELRHVCRARSRCTPGSRRYRERTTQISRPHRRVNDVRTHHLHVLTTRLAKTHGRTVVERLDAAGMLRQKGLSGARAKRRGLSDAALGTPRGHLSYKTGWYGSQLVVADRWFPSSKTCHACGHVQHIGWSERWQCEACSASHQRDDNASINLARYEDTVSVVGPVGAAVKRGADRKTRPRNVLNNAVPVWWCRGRCAGSWASGWVANSRWVIAMGWCGMCCAAS

SEQ ID NO: 62882 - protein, 223 aa, Bacteroidales sp.
MFKAFKYRLYPDQESSILLNKHFGCARWLYNYGLHTKIESYENSGTSVSCIDIANRLPQLKQEFPWLKEVNSQSLQMALRHLDTAYQRFFREKKGFPRFKSKKDNRQRFSVPQHSRVDFAGGLLFIPKFKKGIRIRLHREFTGTIKTITITRTPSNKYYASILTETPETDPVKKPVSENKAIGIDLGVSHFAILSTGEKIDNPRYLIQSQIRLKRLQRRLSRK

SEQ ID NO: 62883 - protein, 372 aa, unknown
  TnpB Polypeptide
VSELKTTVQVRLYPTPEQAAILRAHCQEYISTVNVLVAALDSDVLPDGGKGTSTKDFTAALPSAVTNQAFRDARSVWKRSCALGVIPLLHKPICQWNNQNWRMEDERLVLPVAQDGKVRQISVGCACVALDGTPGLLRIKRKRGKWMAEVAYTLPEPEHTTGVASMGVDLGIKVPAVVHIIGKGHRFFGNGRQQRAKRRQFYARRKDLQKAKKVRAVRKSQGKEARWMRDTNHQLSHQIVSHAQQQGVGIIRMEQLAGIRQRTARKSRGAKARKNNRMIATWTFHQLATFIAYKAARAGIAVAWVDPAHTSQQCPACFRLNTADDRHYVCADGGWTGHRDAVGAINISRRTGLHGQSAGATVASGSDGGRAA

SEQ ID NO: 62884 - protein, 291 aa, unknown
  TnpB Polypeptide
MKTDSLFYRLFQAMPTLALELAGIPISEQATYQFRSEEMTVWKRTEFPWLANSAACCLTQCLMDQDKAFKNFFEKRGRYPKFKSRNDRQAVRYQLDQRQIERTYRAGEELKLPKLGLLKIRWSQIPADVPKMATVSKTPDGRYFVSFACEVKIQPLPLTGQAVGVDLGIKDVAVTSDGWKSGNPRHMKSRMRHLKRQQRRLSRTQKGSNRRRRQRLKVARIHARIAASRMDFLHKTTTQIVRRADGIALEDLHVKGMVKNHHLAGAISVSAWANSAGKSNTRRRGTGARLR

SEQ ID NO: 62885 - protein, 480 aa, Bacillus sp.
VETAMTEYKTMQIWVKNGHRMYDYFQEMCQNAKNMHNTTNFYVRQVFTSLTQEKELQPLQQEVLENIQKHLPKMNDTQLIAYKKRLEKEKTKPVEKRKEIKCNLFDIPSKEKPYVDYNFLDALFKSMVQNDYRSLPTQSSQGIMKTVFQNWKSFYASLREFKVNPSKFKARPRIPGYSRAREKEVSFTNQDCGIKDKKFLKFPKTKGCLNIGKLGFTEGKLKQVRVLPKHGKYVVELVFGIPSEREMKESKQRYMSVDLGVDNLATIVTNTGRRPVLVKGKSIKSVNQRYNKLKAHYTAILRKGKNPKKGQFSSKRLEKINNKRFNQIKDLFHKASHQVEKIALEEDIDTIIIGQNKDWKQNTNMSKKNNQSFVSIPHSLLIQMITYKAERHGIKVIVTEESYTSKASFLDNDDIPVYGESDTKKSFSGKRIKRGLYRSKNGTFINADVNGAANIMRKVFIKAFEETLSSLLQPESLLLK

SEQ ID NO: 62886 - protein, 419 aa, Acaryochloris sp.
MLTLTYRYRIYPDLQQELQMFEWLESCRKVYNYALRERKDWINSRKCSVNACSLHSEYVIPADAPYPDYYRQKKALTEAKKTNPGLKAVHSQVLQDVMGRVDAAFTAMKQRGHGLPRLKKFGQFKSFLFPQIDNDVIVENQIKLPKLGYVTINLHRPIPNGFKLKTARIIRKASGWYVAIAVQMDVSIPGSIPRGHALGIDVGVEYFLSTSDGEQVKRPRFFNQLHRKLELLQRRLKNKQKGSANRRKLNQKIAKVHEQISECRRDFHFQLAHQICDNAGLIFVEDLDFRIMAKGMLGKHTLDAGLGQFVNQILPWVCWKRDVYYGKVDPNGTSQECPDCGAAVKKDLSVRVHHCPECGSTKPRDIASGQVIQNRGLSAVGLIVDQIACGRDLSGALPRQDRVKQEALRSDLEKPALYA

SEQ ID NO: 62887 - protein, 413 aa, unknown
  TnpB Polypeptide
MANRYRLCPDQAQEAILLEHCAHARFVWNLAVEQQSWWWPGRGSAPSPAARMRQLAEARAAEPWLAQGASSVQQQALRDFDHAMAAFFDPANPAGKPSYRSKRGTQGLVIRDVRARRLNRNHAEVSVPKLGWVRFWLSRDLPAELGMARVTCDRSGRWHVSFPGPQPAIGRQSTGAVVGIDRGVRTALVTSGGQHYRAPRISDRRAARYLALQRRMSRQQKGSRKRDKTRRAMAAITVTVTDRRKDWAEKISTRLVQDHDLIVLEKLTTSAMVRRPRPKPDPDQPGAFLPNRRRQKAGLNRGILASCWDLLATRSQQKAAASGAVVLYVDPRHSSQECRRCGHIASSSRESQAVFRCVACGHGDHADANAAKNVLARGLALLAVPAQAPGPRGVRPRKTPVNPGAAGTTRQAA

SEQ ID NO: 62888 - protein, 377 aa, Paraburkholderia sp.
MNVKRAYRFRFYPTPEQEMILARTFGCARFAYNYMLRQRTDAWYGRQERMGYHETSAALTELKKSEEHAWLNEVSSVPVQQALRHLQTAFANFFAGRAKYPTFRRRDGTQSAEYTTSAFKWNGSVLRLAKMNAALAIRWSRTIPKGAKVTTVTVSKDVAGRYHVSMLCDDVVTARPDTAGKIGIDLGLTHFAILSTGEKIAAPNTFRKNEARLAKLQRRLAKKQKGSANRRKAKLKVARMCAKTADSRRDFLHKLSTRLINENQVIAVESLSVRNMQSNRCIAKSIADASWSEFVRQLEYKAQWYGRSLIGVDRWYPSSKRCSSCGHTVAKMPLDVRAWTCLECGATHDRDINAARNVLAAGLAVSAHGEVVSPMSL

SEQ ID NO: 62889 - protein, 422 aa, Halobacteriales sp.
VPDEYDRRTAVTRIAVSESDRELLEQTITEWKRACQLAADLVWNRAQSRETVRRGEVQSLTYDEIRNRTSVGSQHAILATRRAADAIASCLEQRARGKRTSKPQFTAPTVTYDQRSMTMFDDGSVSLATVEDRIQCQLVLPKDDSGYQHQFLDSDDWTLTESTLTVRDSDFYLHLGFRRPLTDTRTAENGTVLGVDLGVENVAVTSTAKFYSGSRLNHRRDEFERVRGSLQRCGTRSARRTLKRVGGRQRRYTDDVLHRVSNGIVAEALRYDCTAIAVENLDDIKERLPNASWFHMWAFRRVIGQLEYKCRERGIRLVKVNPEHTSQRCAECGHSSSANRPSRDRFRCERCGNRGNADYNAAKNIGFRYVRRGQQPSRRTGHRQLALKSGTVSPNGEFDAYPDGFEDEFTDKLRSESSARNT

SEQ ID NO: 62890 - protein, 536 aa, unknown
  TnpB Polypeptide
MEGGYVMATTETIPHHVLTLELKIEPFQVHIVDKHMEIGRRLYNAILGELLKRYEQMKRTKKHQKLKRQTRAVTRLLSQYEQAKSKEGKKKFLFYTKERSSILKQIFAMQREYGLSEYDTHDWVKSGREHFSYQPLKKNGKRSESRPRLHSAIAQTIATRAWKAFEKLLKGEAKQVHFKRYGELFSLEGKQSHTGIVFDKNTLSCAFAGLTIPVFLKKDDVYAQEALGNRLKYARIKIQTIRGKERYYVQLILEGVAPPKRDKHTGKFKHILGKGRVGTDIGTRSVAVVGRKNVVLQELAPTIQNLSREIRRIQRQMDRSRRSTNPQNYNANGTVKKGRKTWAYSKRYLKLRAKLKELRRKEADNRKQEHRNLINQLVFFGDTFYVETMRFQALQKKAKKTEKSEKTGKFKRKKRFGKSIGQKAPALFVRLFEEKVTRLGGSFYKVNTQTFKASQYDHVNQNNVKKALSKRWHVFEDGTRIQRDLYSAYLLSNSNEELTQTRQDICEEHFDSFRKMHNETIGYLRLNKILVANAGL

SEQ ID NO: 62891 - protein, 394 aa, Ligilactobacillus sp.
  misc_feature (160)..(161): Xaa can be any naturally occurring amino acid
MEIQITIKVKLNLANADIASSFTNTMEQYRLACNYVSEYIFNHDFDMKQSRLNKVLYTNLRSLFMLKSQMAQSVIRTVIARYKTVKTQMKRNPYKYQDINTGEWYREIRDLTWLQKPITFNRPQVDLQRNRDWSYLSSGQLSINTLDGRVKVNPICHGFXXKLLKTGSKWYLHISATKTVANFDNQTVKHVVGIDRGLRFLATTYDEQGQTAFFDGKAVMRKRAKYQKLRAKLQAKGTKSAKRRLKKLSGRENRWMTDVNHQLSKTLAQKFGSNTLFVLEDLTGISFERTDLPKALRDQNKSWAFYQLAQFLTYKAHLNNSEVIEVSAQYTSQRCPKCGTTKKSNRNHDLHEYHCSNCGYRSNDDRLGAMNIQLLGTQYISGQEQPKLELTTNA

SEQ ID NO: 62892 - protein, 391 aa, unknown
  TnpB Polypeptide
MYITKKIRLLPTQEQEILMRKTAGCCRFLYNWYIDEFEQGNILNYTQASKKFTQLKKQKEYTWLNEPSRHSLSHTLQNAYNAYQDFFNHKKYHPKYKSKNNDRTSFYVRSEQKRFYRTSNGVKIEKLGIVKTSQPLPKIPKNQHYYNATISYDNKYWYLSVSYIIKEGNTTLTGKSIGIDLGIKDLAITSYHKKYKNINKHPKMKRIEKKIKRKQRKLQRKYDANKNVYIEEVVKDENGNEVISKRKKKLSECKNYQKTKKEIQLLYRKQRNIRENHIYLIINEIVRTKPSRIVMETLYPHILMKNRHLAKSIQEAKWRFFINHIKNKCERYGIEFVQAEQFFPSTQKCNKCGNVKKGKEKMKLHHRIYHCSVCGNVIDRDINASINLANY

SEQ ID NO: 62893 - protein, 428 aa, unknown
  TnpB Polypeptide
VIIIFFHATNIHKLLAVYEIITNFVSGMRKINRTYKFRLYPNKVQADLLARHFGCARFVYNYFLNQRKEQYRLTGKSDNYYAQAKALTALKKQEATAWLKDVNSQTLQFAIRSLEVAYTNFFQKRAKFPNFKSKHSKNSFTVPQFASIADNRLFIPKFKEGIKCRVHREIKGKICKVTISKTPSGKYFVSVFTEEEYATPLEKTNKSVGVDMGLKDLLITSEGETFKNNRYARRYERKLAKAQQHLSRKKKGSRGFENQKLKVARLHEKIANCRADYLHKCSISLVRRYDTICIEDLNVKGMERNHHLAKSITDASWGSFVSMLAYKAEWNGKKVVKIDRYFPSSQTCNVCGYVNKQTKDLSVREWECPICHTHHNRDVNAAINILRFGLNHISAGTADYTGGEGVRANLLKGRSSAKPEAHESLAHG

SEQ ID NO: 62894 - protein, 411 aa, unknown
  TnpB Polypeptide
MLLCKKIKIEVSQQDTEALEFMQAKCRALYNWWVLKLRAGERWNLERAKTSLQESKQYDPELGYVYGKLLAEVYFRLDRAMQAFFHRVEAGEKPGFPRLKPRHQFFTLCYPAMYLQVQGKTIILPTGGGGKWGLKRYPNIRARLTEEPPAHFREVAVSRDARGNYYCSFVYNDTVQKENDEHQAVSKRKRRRQRHIRDEGIVAFDLGIKTLATGVNDQGRFYHIGGFKGYRWYNKQLDKIRSKRDKCKKKSRRYIHLSQVYKRVSERKRRKQQDCLHKASHLIAHRLAERAVVIGDLSQRQMVIPKRNGETKKEQRKRQLRNRMVYNDWGLYCFVQMLKYKCLHVGKTLCIIDERDTTKTCHRCKYKQVMPLWQRTYRCRNCGLVMDRDENSALNIYQRFLARLGPHTPAI

SEQ ID NO: 62895 - protein, 386 aa, Crocosphaera sp.
MQSSELPVLKKARPWYKAIYSSVLQQNLRRLDVAFKNFFDGRGYPKFKTRQRFKSFSYPPNQVKLESNKIYLPSIGWMRFFKSRNIPDGFNLKTVTISLKADGWYVSIRIENKDVPQSKPKDLKQVQAVVGCDLGIKKLLALSNGELIENPQFEKRQSRRKAIRQRRASRKKRGSSNQKKAYAKLARIDQKIVNQREDHQWKTAHHLVRLADVIVLEDLNIQGMIRKCRAKQDENGKFLKNGQSAKRALNRLIRDCSWGNLTEKIESVAAKFGSICVDVNPKFTSQKCSHCGHIEKENRNKERFLCLNCGFLADADIQASINIGIKGLKTLGISQSKLLMVNQKVTPKPEMTGSSDREISVSLEIEPGNPQQLNLFEWVNGEAIPC

SEQ ID NO: 62896 - protein, 339 aa, Deinococcus sp.
VDRNTYPQLRRAVASGQLQPTQENLDVMAQGQVYCPADTLLNAQTLVHDRELQMGNLTVTGELYRLPEGEYSSIITASLGVYRQYPGVQQLLTALLTPMTSTAETIWWQDVRMAVAQGRQLASGVDLTDERWTPTAWRRDLTRLIELGDHWFLILYFAQPPHHLGPRGRAVVGVDIGLRPLATAAWGQQHEVTWGLATPALPVGESAEVRALAQILNYAAARAALEAFTVLVLADAGTLVLEQLDYRGFKSNFSAVSRRRAVADWHQTWARQRAHARGIEVERVPAAYTSQTCSQCQGSTRGTRQGREFTCLHGHVMDAHINAARNLVRRYWGQQSHVQ

SEQ ID NO: 62897 - protein, 504 aa, unknown
  TnpB Polypeptide
MHTVQLLLKTSKYERHEIDRRFHALAHLHNVCVKHARKCMIRLQHDKRYAELRQLYNELVKKEKMSKEEKSQKKKLAKQLAACRTEQGLSKASLEHYIKVCGKQFSKLLSSQQVQAEADRVWCGVERCLFGNGKELHFKKLMDFDTIGGKSNKNGARFDLDAMYVNWLGLSLKCYLPKSENSLSYVWESLKGKISYCNIKRLMFSSGWRYYAEIVVSGAAPTRVSIGTSTMGIDPGVSTIAGVSEDACVLEELAPNAIQYEKKIQKISQGMDRSRRISNPNKYNEDGTINRSNRDPWKYSKNYVKMCRLLKSLYRKKHAYIVDSHRELCNKLITIAKYFPVEKMHFQALQKKAKETRRQEKKTEVKQKDGTVKVIQKYKRKKRFGRSINRRAPARFLLELKRKAEAVGGVYAEVDTKEFKASQYNHVTDTYEKIPLSQREKEIGKRKVQRDLYSAFLIRNADLDFKHPDREKCEYEFEHFANLQDQLILKMKESGLSMRQCFGF

SEQ ID NO: 62898 - protein, 392 aa, unknown
  TnpB Polypeptide
VRCAYKLRAYPTHPQEGRAVRLLADHCDLYNAALAERREAWRMRNVSVRYGDQSAQLKEIRAADPDGQGRHSFSAQQQTLRRLNVAFAAYFRRVRSANGRERRAGYPRFKPYQRFDQVLFVAGDGAKWEPANGSRWAYASFQAVGRVKASQHRPVVGRVKTLQLKREGRRWYVVVVTETETVPLPTTGRAIGVDVGVARFLTTSDGEMVANPRFLDAAQERIVDLQRRKQRTRPGSGNRRRRRRALAKEWRKLRNRRRDFHHKTARGLVDSCDTIALEDLRVAAMTAAAAGTVDHPGRNVAAKAGLNRSILDAGWGQFMSIFAAKAESAGRRVVLVSPAYTSIDCHACGTGCIRPRQDTVVCPVHGELDADLNGARNIAARAGLGSGQASAA

SEQ ID NO: 62899 - protein, 420 aa, Actinomadura sp.
VRTAYKCRAYPDFEQVAVLNRTFGCVRLVWNKTLAERRCAWHAEGQRTTYAETDAALTGWKKTEELAFLSEVSSVPLQQTLRHQHAAFANFFAGRARHPRFKSRTGRQTAHYTRSAFRMKGGELWMAKTTAPLALVWSFEDVDLAGLNPTMVVVSREADGRWYVTFAVDTDAPDPLPATGHAIGIDLGVKEFAVTSDGDRIANPRHLERRATNLARHQRRMARKQRGSANCRKAKNKVARTCRKVRNARTDFLHRTSTTLINRADTIVVEDLAVAGMVRNRRLAKAISDCGWGEFRRQLEYKAERAGRTLIVIDRWHPSSKTCSHCGQVLDELSLSTRRWTCPGCRTRHDRDVNAAKNILAAGRAVARGDSGDVCGADVRRKGTPPSAVGREAETPAARAAGPPPAREPGKVKGAVRGSS

SEQ ID NO: 62900 - protein, 453 aa, unknown
  TnpB Polypeptide
VQRLQAFKYELLPNSQQERQMRRFAGSCRFVYNKALALQKERHEQGQKKLGYAGLCQLLTAWRHSADTAWLADAPVHPLQQALQDLGAGLQPLLRPTRRLPEVQEKRPVRQFPLSRAQANPAGPGQQPHLSAQTWLAALSQQPRRVSNVKSVTVSKHAGKWFVSIQTEREVNWPIPQGGAVGMDMGIARLATLSDGTFYAPLNSFKRHEARLRKAQQALSRKVKFSNNWKKAKARLQRIHSQMANARRDFLHKVSTAICKSQAIVCIEDLQVRNMSKLAAGTADAPGKNVRAKSALNKAILDQGWYEFRCMLEYKLAWKGGRLIVVPPQNPSRTCPCCGHVSSDNRQTQAWFECVACGYENNADRGSGPEAFRGSGPEAFRGSGPEAFLVGAINILARGIQLLRDEGQDTTDAAVGMRVGEPPVSARMACGSNCTGGRKQEPAETTAQGAIHA

SEQ ID NO: 62901 - protein, 433 aa, unknown
  TnpB Polypeptide
MQQETKQEVNGMQLVEQHVIDRKDPRYSVIDEAAFKSKNLYNAALYEIRQSYIHEGKYLNYSEMDKRMQSHEAYKVLPAKVSQQILMVLDRNWKSFFEAQTAYNEDPSKFLGRPKLPKYKHKTEGRNILVYTIQALSKTGLKRGLVQPSMLPIEVQTKHKDIDQVRIVPRKGFYLIEVVYEKDVKQAPVNPAFYAGIDIGMNNLVALTSNKPGFQSVVVNGRPVKSTNQFYNKRKAGLQKQLGHTGTTKRMERMTNKRNRRIDHYMHTASKRIIDVLVKEGIGVLCIGKNDAWKQEANLGKRTNQNFVQIPHARFIAMLAYKAELVGIRVEITEESYTSKASLLDLDPLPVRNNGEEQHTFSGKRLTRGLYRASDGRYVNADINGAGNIIRKVAPDAFSEARAVEDGKGVLASLVVHPVRIVIPVRSQKARGK

SEQ ID NO: 62902 - protein, 384 aa, unknown
  TnpB Polypeptide
MRHVTRYRAYPSHPVEQRLFTGFARCTFVRNHCLDNNVFRDSLLPELKKQHPELKEVQSHVLQKVVHRIVSSLRALRAMKAKGRKVGKLRKKWVHSMEFDSTGFKLTGNRLRLSKIGELRIELSRPVPGRIKQIVIKHTPAHKWFVAIISETPDTPKPTTGTRAVGIDLNLENFSTDTDGVVFEHPHNVRKSAKRLRRAQRRMSKKVLGSRNRRKQRVRVARIHEQVENRRNDFLHKWSRYYVDRYDHIALEHLNIRPMVESLDAKLRGRSRSILDAAWYKAREFIRYKAANAGTYVHLVDPAYTTQDCFLCGHREKKDLAQRTHSCPVCGYTVPRDLNAAQNILKRAAVGWGTPESTLVEIRTTTPPILVVQVPVNEARISRL

SEQ ID NO: 62903 - protein, 134 aa, unknown
  TnpB Polypeptide
LHEHIANQRRDFLHKKTKFLADRYDAIGIENISVKAMAKRKKGKHFSFGKSVSDNGWSKFVNILKYKLAWQGKQLIKVDKWYPSSQICHNCGFQNEETKDLSVREWECPKCGSIHNRDKNVAINIREEVRRMIA

SEQ ID NO: 62904 - protein, 430 aa, Moorella sp.
MKRTNVVRLIPDKNTRPVLKILGDRCAALWNAAQHRMRQAFFQGLPVPSYAKLCEEFQGHDAYKALPSDMAQEILKKARQSWNAFFACLRLYRNGKLENRPRIPGYWKDRKSGQRFFKVIPVKSPRSYSLAARSLSVTLPADLRGNGRLVIPARGVLKFSGKPRTLEIKYDPVKRRWYAFQVVEMPEPDCKPKPAKAAGVDLGARTLAALAVEGIDNQVLFSGREVWKDFLYWSKRISAEQSRLNKAGRKTSRSLKLLYRTRSKRLKHAFEALAKEIARRLKVNKVTVLYLEDLTGIRADMDFGPGNLLVHNFWAFRMLRKAIEAACLKIGVLVIPVNPRGTSSYCAVCGTRLDRFMRNKAYCPRCGLVWHADANAALNILLKGSSKGHGVKAAPQRPQVLRRNHHRWESRLESAVGTPFRAANSVPQAA

SEQ ID NO: 62905 - protein, 347 aa, unknown
  TnpB Polypeptide
MQRTVKTTVWVKIHSLTNRKADLLTREYEAFQTEVYGGDADPYSATDQQASEVQRQNDPNPGTEQPVVLRNDVFDVAYDEDTVLSSWWIKVPVYAPEKGQGNSTRCPAHVPRKDAQLVREGNLRDGELVRRDGDWYVHLVVKRSVTVQDAYDDVLALDMGARWVATCAFLSDRKTTFYREKVRRIREHYKQPRKSIGKAKPRRTQQVVERIVDAARRVDDRLHEIARSFVEDAEERNAVIVVCDLGGIRKDNHKGRYVDDKTHKMPFARLLNYIEYNAHDAGIDVQLVEEHDTSQTCNRCACEGVRATQGFLSRTWAGRQCRQERCIRRSSIFGCLRTFGSQHAKYR

SEQ ID NO: 62906 - protein, 532 aa, unknown
  TnpB Polypeptide
MMEQEEKSTDPHLIGESRIRELEPSASLPAYRVACRCLDESDCERWHGELEALFDAFGRQRQVFLGMLFTRRDRALCLGNDWRKLRDRLVAGKYRSPFGLQARMWKMALQSASGTALAWWSLVQKRARNLIVWKAWFKKAKEAEKHYVRRLLSAPSRDFFALLDGKYPRCLAADELKQIASRKGLCKAILRAVRLVQGRVPKNSRFSSVWFDCDCYRTAERGRDFVTLSLMTLTRGKRARIRVKGSVPVRGTVRLVRGPDGTIRLHVQYPVKPSSVKPLEVPQAPEGMVFCRALDLGFTEVATDDGGRAFGKGLGPLLQDYAAWTDRKVAERNRLEAIAKRAGRAKRRRMARCNLGEGRYHRTIELYRTRVRNVVNEALNRMFSESPAQVYVMEDLSHRFLFTGKFSSETRRMLSGWVRGVIRKRMLFKSALHGAGIAYVPCAYSSQRCPVCGYTARENRHGDIFECRCCGHRAQADENAARNLLERAGDSAFGRRMPKEEVLALENSHHEAWCRRRRKQSQTGPAAIPEAA

SEQ ID NO: 62907 - protein, 376 aa, unknown
  TnpB Polypeptide
VDRQYAAIENDPFVDGEIILKMVIRGAWYRLVFDFDNARFPYGRVTLPLVRVHNDQPVFSFMVVTDNPIVQFSGDWVIGVDVGLNDYATVVVCDIKTGRIVHETTLSRRVHSLWNSIRASERQVKQLRKKSDKLLCDRQGRMSALDEAQLHRKSASRKKRELAILAAQEIADLSHVWGNAVVAVEDLSWIGNTMQNGRWNRGEFVKWLTHYVTQNGGWVIVVNAANTSQQCHVCNHQVTHPIHKLSVCPEHGMMDRDVNAAANIAARAVSRVVKARATRAKNRKLRSQSPLKTPPARTSLKYPGRDRTKNRPTPKRKNHHQVSREVILPSCPARAQATSLEASVLADQGAQGTPGTNKAAFKQGNVAYKSRLCGLI

SEQ ID NO: 62908 - protein, 556 aa, Acidimicrobiaceae sp.
VTRKLRTLSDPFVVAAPTGQRIRTRLHLTEAEAAVLTETGTFLGSLAAKDLAERCGLGRGYKHLGRTERKQGLTAQTSSRLAGSITAATDDQWQLAFDNLYRDLFSLRDSIALIEKRCAIPTGTSVSVNKHATHGYPTPGVRWNKLQRLQVLQARLADVEDRVAAGRVSVVRGGNRLLNNRLNLEAVGLTEEQWASQWRARRLFLTADGEKDKIWGNETIRANPDTGVLTLRLPSALAHLSNTDAVTITGKKIPSYVLPTPVAFSYRADEWAAQVTTGAVSYTITFDPLRSRWYLDASWSTSAVPTPSLAALRASSTLGVDFNADHLAAWVIAPDGNPIGSAFRIELELTGTTSRRDGLLRAAISRLLDIAKLNDCTSVTIENLNFADARATGRETMGAGKRGKTFRGTVSGMPTAKFRDRLTGMAANRGIAIIAVDPAYTSKWAGEHWTRPLKAQSKESNQSPTRHDCAALVIGRRGKQHRARTTTRHLPARHQRMTDGQQVLGADPTVETTRGNTGTGEGSGRAVRKTHLRESDEPVTSGPARPFGRPLVDHVT

SEQ ID NO: 62909 - protein, 358 aa, Aneurinibacillus sp.
MSQTITVKIKLLPTKEQASILSEMSRVYISTINTLVSEMVTEKKSTKKTTKDVSTNLPSAVKNQAIKDAKSIFQKAKKSKYTAVPVLKKPVCVWNNQNYSFDFTHISLPLMIEGKARKTSIRALLIDKKNRNFNLLKHKVGTLRITQKSGKWIAQISVSIPTVEGTGLKVMGVDLGLKVPAVAVTDDEKVRFFGHGRQNKYMKRKYRSVRKALGKKKKRNAIRKLDDKEQRWMKDQDHKVSRAIVDFAKENKVSVIRLEQLANIRQTARTSRKNEKNLHTWSFYRLSQFIEYKAKMVGIKVEYVNPAYTSQTCPQCSARNKAQGRKYKCGCGFEKHRDVVGAMNIRYAPVIDGNSQSA

SEQ ID NO: 62910 - protein, 585 aa, Streptomyces sp.
VRSTNRVALNVAGEQRLAVEGAFDLPYAVLPAAEHRLFRLLSLVPGPDVPAAAADALIGLAQAPGADALERVDRLRERGLRWEVYEQVDMVGLAIELHQLGLEVRAYAVLLHASVNTLCRYFDENQVRMQEKPAMSASSDRAIFRHKTTSTVIGVKLRYNVRVYPSASQRGNLARAFGSARVVWNDALRVRRDAYARGLPRLTATKLSKQVVTEAKKTPERAWLGEVSVVVLQQSLRDLEAAYSNFFASKNGTRRGPAMGPPRMKKKTARQAIRFTANARWSITDGGKLRLPKIGDIQVRWSRELPCEPSSVTIVKDPSGRYFASFVIEVEDKPWLGLDVEETDTGIDLGLSSYAVLRGRKIASPKFFRRQERKLRRAQRGLSRKQKGSNNRRKARRAVARIHARIADQRRDFIEKETTRIVRESQAVYVEDLNVKGMATRRGRLGKSVHDQSLGIFVRTLKAKCKRYGRTFVAIDQWFPSTQLCCTPACGRLTGPKGREQLHIRAWTCTGCGTRHDRDENAEVNIRAAGRKRAAEMRREAERQNACGEHVRPRTPGQRSSKQEPTRSPTAAGGGAGGNHPRSRG

SEQ ID NO: 62911 - protein, 386 aa, Methanosarcina sp.
MMINGYKYRIYPNKAQKVLLEKHIGCCRFVYNKLLHIKKVLYEKFRASISEFDLNTHITVLKDIYPWLKEVNSQSLQQASKNLNSAYNKFFKEGAGFPKKKSKKNPLQSFQIPQHYRIEGKKIWIPKIGWIKIKLHRDMMQGNMKTATISRTPTGKYYISIIVENELEYPEKQEYSHPTMIGVDVGSITFATLSTGEKIDHPKFLKSSIKRLKCLQKRVSMKVIGSNNRRKAVKHLSRIHELISNQRNDFQHKVSKKLICENQAVAVETLNIKGMMKNHCRAQSTGDSAWYSFVLKLQYKAEWFGKTVLKINQWLPSTKTCNICGYKHPNMDESIREWQCPVCKTYHDRDINAAINIKNFALAEREEGLGDSFPKGKGMNQEAPML

SEQ ID NO: 62912 - protein, 310 aa, Okeania sp.
VDVLSILTLRKSAPGGSAEFTKSAFKWKEGQVYLAKCAEPLPIRWSRQLPPDCLPTTITVKLDSCGRWSVSLRVNDTRDLKLKPVKKQIGIDLGIASLVTTSDGEKIANPKNINKLHKKLRLAQKSLSRKTKGSNNYHKARIKVARIHAKIKDSRFDYTHKLTTQLIRENQTIVVENLAVKNMVKNHNPPPSPPGRGARGVGCDANWGELVRQLEYKADWYGRELIKIDRYFPSSKRCSSCGHIVEKLPLNIREWDCPECAAHHDRDINAAINILRMGTRVGVRRKGTPTLEGCGTRSVSLWSDCKTRWE

SEQ ID NO: 62913 - protein, 335 aa, Micromonospora sp.
LGQAGPVSALQEPEAVAGVGGVHLPRFPLPERHAHPGEDGRAVGHRLVQAAARRCGSVDGDRVPRLCPAMVRVPALRGLDHPRHERVDRARLVKAHRKLARKEKGSANRARARLTVARIHARIADRRRDHLHKLTTRLVRENQTLVIEDLTVRNMVRNHRLARAISDAAWRQFRDFLTYKCDWYGRDLVVIDRWYPSSKTCSVCGTVAESMPLGVRTWTCRCGTTHDRDVNAARNILAAGLAVTACGAGVRPQRDTSRTGQPATKQETPGATPGIPRLQAREDVKAGDGSGLTPPPAPVSPGPSPGPPFRATEPLVRSGACRRTAGRRRPPVRAR

SEQ ID NO: 62914 - protein, 260 aa, unknown
  TnpB Polypeptide
VKEIRIIPKADARFFEIQYTYEAECIQRNLNTTNALALDLGINNLVTGVSSKGETFIIDGRRLKSINQLFNKENARLQSIKDKQHFGKKTTNRQKALARRRNNRINDYMNKTARRVIDYCIDHDIGTLVVGYNETFQKDSNIGKRNNQTFVNIPYGKLRDKLEYLCELNGIILVMQEESYTSKASFWDKDVIPVYKSDDTEEYHFSGKRIHRGQYRTASGQVLNADVNGALNIMRKSSVVDVNILYSRGEVDTPIRIRIA

SEQ ID NO: 62915 - protein, 537 aa, unknown
  TnpB Polypeptide
MISDEEYKKLLKHFHKLSDRHILVVETDMSFSDVQKVVVLSDKIRKAGNELVSLMRKNYDQLLRTKRYRKLLFLYGNTEDKDKRKIYTAQLNEMQKAYHVTWEYCRTSMIPIGKKYGIDAVFALTKAEDIWRGIEKCLYGNGNAIHFSKYGELPCIRAKQINRGIPMSVKDDRLQFKLGKIVFGIQVNDSFQQDEVNAVLAYLAEHEIIDRKAISILMKNACCIDTYRPCYATLVPKFIRGKYRMYLHLTIEGKAKPKYDKHGNSRHKYGKGMIGADIGTQTVAYTSDAEVGLKNLSERGNSIQTSERKERLLYRAMDRSRRATNPQNYNNDGTIKNVRKIWKYSNHYKKLKEKHSELCRINAVNRQLAINEDANHLRSLGDTFVTEHKNASKLMKRVKETTKNDKGKFNKKKRFGKSIKNRCPSGFQTTMEKKFKTTGGTYIEVPNNYRASQYDHTANDYIKKKLSDRLYKLQDGTEVQRDWYSSFLLYCYNFETQDIDKDKCITEFDDCYKKEKALITWIKAHKIKVLNSGIKIA

SEQ ID NO: 62916 - protein, 291 aa, unknown
  TnpB Polypeptide
MDRAYKAWFKNLKKGKKKGRPRKKKIFQYKSFTLKQAGWSVNEEEKTITINKKKYKYHKSRNLEGEIKTVTVKRDACGDFWIYFAVEVEEPVVKVRSGQIVGFDYSFEKDSFLVGQEPRFDVLAPSFFRVNLKTFQKLSHALSRKEFGSNNRVRARLSLARQYRRSCWARKDYHYKLAYELCNKYSVICLETLNQNSYKNRHGKKVSDRGFGQFLLILQHVAKKVGIRIVFVDKWFPSSQLCHCCGFQNKALKGKFWIRKWTCPSCGSFHSDRDRNAAINIYNEGLRFIAS

SEQ ID NO: 62917 - protein, 320 aa, Methanosarcina sp.
MIPCLKLLLNYHFSNNFKKISQIEIDSFYVYVAVVFPEEEPEISGRYIGVDRNTRGHIAVVANPESGKIWKLGKMRYHTHKKYENIKKRLYNMGKRKQLKAVEIREKNIVKDLNHKISRKIVDVALYNGCGIKLENLKGIRKLNSKIGGAGENEKNKSEDKKREQKGDKSRNKEINKNSIKTKSKAEKQLWSCEYSLNNWSFHQLQQFIEYKARLRGVEVAYIDPHATSKKCSRCGHRGNRHCKQFECPHCGHVDHADVNAAFNIALTPKGSGQFSAERDAGKGSTDTPRLVLDRTLFSKRTTREETSPQFAWEVCQFLV

SEQ ID NO: 62918 - protein, 387 aa, unknown
  TnpB Polypeptide
MKTSFKYRLYPSQGQETIMKATREECRWLYNHFLEQRKNAWEHDQQSISMYDQIKTLPRLKQERSSLNVVHSQVLQDVAIRIDLAFEAFFRRKADEKPGYPRFRGAGRYDSFTYTQSGFAIVDDRLRLSKIGDIKIKLHRPIIGDVKTLTIRKTATNKWYAGFSCEIEAQTLPESNETVGIDVGLETFATMSTGEKVDNPQFFRVDERALAKAQRKVSKKETPEDKYQKVVAHIYERIANRRSDFSHKLSRSIVNRFGIIAIEDLSINRMVHNHCLAKSIADAAWGQFAVCLAYKAENAGRQYIAVNPAYTSQDCSRCGHRQPMPLSEREFNCPCCGLVLNRDHNASLNILAIGLDSLGLVPRSPCFLDMGAATEPTIERRRRIPLS

SEQ ID NO: 62919 - protein, 207 aa, Okeania sp.
VLNTQTLRKSVWGGSAEFTKSAFKWRNGQVYLAKCCEPLPIRWSRQLPPDCAPSTITVKLDPSGRWSVSLRVNDTRNLRLKPTNKQVGIDLGITSLLTISNGEKVANPKNLSKLHKKLRLAAKSLKRKTKGSNNYQKARLKVARIYAKIKDSRLDYTHKVTYVANPTAPLQLIRENQTIVVEDLSVKNMARESQSTPEQLVMPTGPN

SEQ ID NO: 62920 - protein, 502 aa, Vulcanisaeta sp.
MLRRAVAVELEVTRELNRLLCSVESAYLGIVREVVEYAVANNITSATQLQGLFYRRYRSEYPGLHAHLIIQAIRQASGVAKSFVERKKRGLVSKPYPEVKSVSIRFTEKAWSYEQFIHSIAPVRLSLSLLGGRREVWLRPHKRFWQYWWRVLNGEAGLGRTLIIKRKTNKWYAIFIFEIKPKEGTPQSVISFDINENTVAISRIDIETTVDKVADWNRQYLTPELYMIRTDFGRLARRYEKVRNTIIERLKPHFTLPNGNYVNVTNTREFRKHVKRLREGDRKVGRVRHVANELTKTPAIIVTEELGSNPQESMINGIVKSELRHRIKQTPFKALEKAVEDKALERGSKIFRVSSYRNSRVCPIHFTRLVETNDWHILQCPLGHYVHRDYASVMNMAWKLTPEAWTKSVWWDLRKKMDWRGYESESNPLIPQNIAQLLWLLMRNARASLEQSPAMLARGKPMNHHRIQNEGGGEGTPHALLGQGGGQTNVRTPSNEYLLDIA

SEQ ID NO: 62921 - protein, 378 aa, unknown
  TnpB Polypeptide
MDSEDILTKSKKIRIYPTKEQAEIFSRWFGTARFTYNKTVELLKQPGSVAAWKTIKGDLISSLPEWSKEIPYQIKSIAIRDCCKSVSNAKIKCKETGIPQTVHFKKRRDPVKSCYIPKAAITDRGLYYTLTKELKWSEDLPEDLCDARLIKYNGRYYVSVPYKVTVLNSENQGRIVALDPGVRNFISFYSDQFCGKIGAGDFKRIFRLCRVLDKLQFILSKPLSFYKRSRIKVACGRLRWKIWDLVSELHHKAALFFVKNFDVILLPTFEVSQMVRREVRKINSKSARQMLTLGHFRFKQFIKHKAFEFGKIVIDVSEAFTSKTVSWTGEIIEGLGGRRTIQSKIDGRIMDRDYNGARGIFFRALVDSPISGLDFEIN

SEQ ID NO: 62922 - protein, 448 aa, unknown
  TnpB Polypeptide
MIYNRSINISFDKKYQYILDGQSKICNWLYNQLLDLSIKDYKENNNDNKYLTGRNLRDQVPKFKVDSPFLETVHSSPLKNSAIRLKESFNRFFKGNAKYPNFRPWKKKWFSLLYDEPSKGFKINGREIEISLGKNESNKHLHVIGALCEPLKINDGEKINTFRLCKRQSTFYGVFTIEKEDIKTPRAKPKKWVAIDPNHKNFFMSIDNEGVSVEFGKLELIKYWDKVIDDLKSQRDVCKRKAKRKETPHGKTYYVPSARWVRINRALERVYNSRREQIKQACYTIAHLLAKDYERVVIGDYAPSTNTAICNSMHRSMFNEEVIGTFRKTVEWVCYKSKRQYKTQDEKHTTSDCCICKDREYKNPSVREFICKKCGRRISRDINSCVNIAVKAKLLSSSDYVGWDLSKPTYTVYWNPMLCRVKVAGTLSQKESVNELNQTGSSVWAKLI

SEQ ID NO: 62923 - protein, 367 aa, unknown
  TnpB Polypeptide
MKVFEYRLRPNKLQQEALMKVLIGTRLMYNAALEEWKKHLDETGKYLGMYAQDKQYNKQTYPDLPAVVVDQVMKRLHRALTRFFSFRRGGRPCGFPRFKGPNQWNSIEFRDQTNYLKEHRFHAGKICGGNIKTIVHRPLEGEFRFSRIIKRPSGWYLQCVCQVENHPLPSTGKAVGIDVGIKSIVADSNGITVPNPQFLKAEMKNLAHSQRLLSKKKKGSQRRKKQAHIVARRHERIHNRRKDFLHKLANNYVRNNDLIAIEDLNVSGMVKNHHLARAISDASWNEFRNLLTSKAENADRWLIAVNPRFTSQKCSRCGEYVEKSLSIRTHICPNCGYVDDRDVNAAKNILRIGLDEAIAEGFQWETR

SEQ ID NO: 62924 - protein, 410 aa, unknown
  TnpB Polypeptide
MLRAHKIALDPNNVQATHLARACGVARFAYNWALAEWTRQYEAWKADNSLPRPNQMALRRQLNAIKRSEFPWMLEVTKCAPQLAIMQLGEAFRNFFALRAKYPKFRRKGIHDRFSISNDQFQIESRRIRIPNLGWVRMREELRFRGKIVSATISRVADRWFASICVSVSDTDHAASLNLRSIPQAESQGAVGVDLGVSALATLSTGEVISGPKALACLLPRLRRLSRSVARKQKGSANRRKARLKLARYYARIANIRTDALHKLTTDLTRRFELIGIEDLNVKGMLSNRHLSRWVSDMGFFEFRRQLDYKARDTGSLVVMADRWFASSKTCSYCGWKLEELPLSVRSWTCPNCGVEHERDVNAAKNLKEYAVSSTVSACGEEGSDQERKFLVKPASVKQEVSTKDTYEYI

SEQ ID NO: 62925 - protein, 476 aa, Fusobacterium sp.
MANYVLTLALKTELWQEHILEKRLNIARMIYNSCLSEILKRHRKMINSSEYKEITNLDKKEQSKRYKELDKKYSISKFELNKYVKPMTQRFKKNIGSQMGQELAERAFATYEKFKYGKAKKVYFKSYGNFYSVREKGNITGLRFFKEDCCISWLGLKISVIIKNNDKYAQSCFLDKLLYCRLLKRVVNGKNKYYVQITFEGTPPKKHKVGGENEIGIDIGTSTIAIVSDNKVELKILAENIEINEKEKIRLQRKLDRQRRANNPNKYNADGTINIENKEKWKKSKSYLKTQLKLANIQRKIADKRKQSHNILANSILEIGTIVKVENMSFKGLQRRSKKTEMSEKTGKFKKKKRFGKSLSNRAPALLIEIIDRKLEYIGKNIIKIDTFKVKASQLNHSTNEYEKKTLSKRWVEILGNKIQRDLYSAFLIKNVKENLEEVSIEKAQKEFKNFVKLHHNEEIERIKKGNVKTLKCMGF

SEQ ID NO: 62926 - protein, 404 aa, unknown
  TnpB Polypeptide
MLKRCAYKFELKPNSRQAKKMSQFAGCNRLVWNKALAIQKEKLDKENKIYKYPELASMLVEWKREHKFLADTHSQTYQQTLKSLDRALGDAFNKKNLKKFPVFAKKGLKDSFCYPQGFKVQQHNSRIYLPKIGWICYRNSRNIEGTAKNITVSRNCGKWYVSVQVEIEIPEPKHSSKNVVGIDVGIAKFATISNGEMIEPLNSFKKHEKRLAFLQRGLGRKQKLSNNWKKHKEKISKLHSKIANVRKDFLHKTTNKISKNHAVVVMEDLKVSNMSKSARGTKENPGRNVKAKSSLNRSILDQGWFEFRRQLEYKLKWRGGHLELVDPKHTSQKCSKCGHTESENRTSQTKFECKNCGHLENADINAAKNILAAGLAVFACGGYGVSQPMKQEPTMSRVQVSECA

SEQ ID NO: 62927 - protein, 398 aa, Kribbella sp.
MARFRMYPTPAQESALLEQCGHARYVWNLALEQWSMWTRDKGRTPGYVEQARQLTEARAAFGWLRAGSQTVQQQALRDFDQARGNFYARIHGRPTWRRAGLNEGFRIVGPQASRVVRLSRKWASVKVPKVGWVRFRLSRAVPDAKSYRVARDRMGRWHLAFAAIPPPIAGSGTGGVVGVDRGITVSAALSTGELLSCPGLSKTELKRLKHLQRRLPRCRRGSGRRQRVKTAIAKLYGRAGDRRKDWVEKTSTDLARRFDIIRVEDLRIAQMTKRPRPKPDPERPGEYLPNRSRAKAGLNRGILANCWGQLVARLEHKAPGRVEKVKAAYTSQTCSVCGHCAPENRESQAVFRCAACGHRSNADVNAATNIAAGRAVSARRETPVQISLKREPQHATSA

SEQ ID NO: 62928 - protein, 421 aa, unknown
  TnpB Polypeptide
MEKSLTKTLVFQLQSDDERLLSEAYHEARWVYNQTIQLAKDGMDWDDISPRVENEADLVKNTTQRIVAKALDALQQSYDRDDYNIPSHEKTGSYPLRMNFAEGYNLTLEDNGIHYRISAKPYNPVKGILRGAPDNLKLLEQALESDDWRVGTAEAMTRNGNHELHVNVTHLEATVQDRHDTQTVVGVDINEDCVALSALREDDIVDSVVIDYPEIKEERHRYFTMRKRMQNAGQTAFDRVFEDKEERYVHDQLHQVSRRIVEWVQQFESPLVVFEDLKHMRDSINYGTRMNRRLHSLPFHKLRSFVAYKAAFEGIPSDDIDPAYTSQTCSFSGCGHTARSNRRKKRFKCNACGRQDHADRNAAVNIAKKGLEKLNRNVPALNTLPTVRKLRRQASGCVNQPTVTHATVRGNQADGRMGVSD

SEQ ID NO: 62929 - protein, 358 aa, Streptomyces sp.
VQPRREPRLTARIRHRHHGQDPPPAPGVRRPEGDGPVRAARDPCRAEGRRGLCHAEGEPEGRELRPRRIETPRGRRVQADPFPQGRGPAVRRPLPVLADRRPHRVHLDPRGRSGRIPFEASADQMKTLTEHRRGESDLVHRGGNWYLYATCEVPEADPIEPEGFLGVDLGIANIATTSDGTVHAGKHLNQVRHRNRRLRQRLQTKGTKSAKRLLRKLSGREARFAADTNHRISKQIVTEAERTSRGIALEDLGGIRERVRLRKPQRVTLHTWSFAQLGAYIAYKALRAGVPVVCVDPRYTSQGCSACGHIDKKNRPAQAIFCCMSCGFAEHADVNAARNIAARGVAGWAVSHAADDAA

SEQ ID NO: 62930 - protein, 532 aa, unknown
  TnpB Polypeptide
MARSITLELFRPSPAARQALGLVREAWSGMRPAFEPGSLSDWQLVREADTWIVRFEAFGQTISLPLRAPEQQAERLQAWLEQPSPLAVSLHERRGRWLLTVTFRSPRLPGSETVIGVDPGVAVRAAALEPRSGRSLLIRGKARAHRARHYDEVIARLESAGARRAANQVRAKKARFLAHRDRTDANALLRFARQFPRPVLRIEAPAVGAADPAAVSPLIDQVAMKAGRRGIRVEAVAVRGASRRCSTCGSTCPGQRRGRHFHCSCGHREHADLNAARNVATMSASSPARKRKAGGRTASGQAVGTAVSRAMDVLKGHVGRMRSPRFSGGHAPFPFPPSLDVKHPLPIIPLEENHMASLVKDLTDTSTKYLTGSLDNLKTVVDRTTEELGRVDLLGATKRVLDLAIDRSKDVVKLSVEPDGADLVGKAKAIADGGLEAAKDVLSAITEENKKSDLLGIGSRVVMENVAGLRNQVDLTIEATQALAGRLIPGDSILKPAAPARAAQPAKAEAKAEAKVEARAEGEAPAASKSAK

SEQ ID NO: 62931 - protein, 392 aa, unknown
  TnpB Polypeptide
MIEAIKVQLRPNNKQLTKLFQYAGCGRFAYNWAIAREQENHKLGNKFLQDGELRKEFTQLKKQDEYKWLNKISNNVTKQAIKDACNSYKRFFNGQSRYPKFKNKKNSKQSFYQDNVAIKFTDTHVKIEGFATSRKKNKQKLNWIKLCEKGRIPTNCKYMNPRITYDGLYWFVSVSVEVEDNTTIPTKEGIGIDLGLKDLAVCSNGNSYRNINKTNKVKKMEKKKRRLQRSISRKYNMNKEGVRYKKTSNIVKGEKELLKVIKRLTNIRHNHLHQITSEIVKRKPSFICIEDLNVSGMMKNKHLSKAIQQQGFYEFRRQIEYKSAWNNIPVIIADRFFPSSKLCSCCGEIKKDLKLSDRIYRCDCGNVIDRDYQTSLNLKQYGENVLKQKSTV

SEQ ID NO: 62932 - protein, 405 aa, unknown
  TnpB Polypeptide
MDLTEKEIIYSNDERFELIKELCRLSKNLYNRSLYDIRQYYFETKLHRTWQSQRLIFTEQRDCDYYSIQSHLAGEVLMQVGRQFISFFNNKANKKKRIPRYKDRNGYNVVTFPRITISKRIEFNEDKQLYTYTLCKRSYNLKVQSTKPNVKMMKFVYDEANDLIKCFKIYEVEEPKLKKDNSRYFSIDPGLNNIVSIYNNIGIRPLLYNGRPIKSINQYYNKTRAKLRSELPKNVRTSKRLKRLSIKRSNKIDYEMHKISSHIINEAVRNNISKIFIGNNVGWKNEINIGKRNNQNFVNIPHAKLFHQLSYKASLKGIDVIFTEESYTSKASFFERDGLSVYGNPDNHKFSGKRIKRGLYKDSKGNVWNADLNGAANIMRKCSDEAYKGIRKTKELMKRPILVTL

SEQ ID NO: 62933 - protein, 488 aa, unknown
  TnpB Polypeptide
MYVYTLKLKPTTQQRHELNKRFRQATDIYRATLHEILKRVRKQKKDPLYKKAYKLPKGKERNEILKQLDEKYELRGKFTFTKFSNDYRNERNYSLHIPSDAAGKLGARAWDAYSKVKFGKARRVEFPRMIDSFEGKNNTGVAFRNNTIEVGNKTHRMKIEIQFKNDEYEYWALRDTLKYVRLVRREQYGKVNYYAQLILDGTPPNTKYRNSMQGVVGIDIGTSTVAVSSDVEVRLDELAPNVKLHEREIRRLERKLDRQRRANNPDNFNENGTIKAGRKVWYESKKYKQTKAKLADIKRKQAETRKISHQTQTNHVLSLGDTFVVEQMNFAGLAARAKETKVSEKTGKIASKKRFGKSIGHRAPAMWVSMLKYKTEYAGKNFIDANTWTIKASQLDHSTGEYNKVSLSTRTKEIDGNLVQRDLYSAFLLSCVTPDGETVDISEANRKFDRFVKHHDVAVQKIESKLKSTGVDKFKKQVCTQNESYVMI

SEQ ID NO: 62934 - protein, 500 aa, unknown
  TnpB Polypeptide
LETNLTYVEKCQIFHYADLVRKAGNELTGIMKKRYDQLVRTKRYRKLKSLYKKYKDADNKKALKDICDQMKEMQKQYDVTWDYCRTSMIPIGKKYGIDAVFALTKAEDVFRGIEKCLYSDGETLHFKKRGDLPCIRAKQINRGIIMKQMNFKFKDIEFGVKIKDRYEQEEVNAILYYLKNAEFMDSIAANTYKETNICISTYRPCYVSLVCKKIRGKLRVDVHITIEGLSKPKQDRFGNFKHNKGKGIVGCDIGTQTIAYTTETKAGLKNLAERGSCIEVNERKERRIYRAMDRSRRAMNPDNYNEDGTIKKGKKTWVLSNRYKKLRTKHTELCRINATNRHLAIHEDVNELRSLGDVFVTEPKNAKKLQKKAKTGKRKKRFGRSIKNRCPGYFQSQAKRKFRIYVEVPNDYKASQYDHTSDTYIKKSLSQRMYKLSDGTMVQRDLYSFFLLYCIDLNTNKIDKNKCIHEFEKQYKNQNETIEYIEMNQIKVMNSGIKVN

SEQ ID NO: 62935 - protein, 401 aa, unknown
  TnpB Polypeptide
MKEIHRSYKFRIYPTKEQETLMSKHFGCSRFVFNHFLNVRKEQYLNDKTSLNYYDNANSLTQLKKEEDTEWLKEVNSQSLQSAIRNLDTAYKNFFNKQNQFPKFKSKYNKQSFKIPQNVFIEEDTLVIPKFKSGIKVKVHREIKGKILFATISKNTTGKYYVSVTCEENHKPYSKTKTSVGIDVGIKDFAILSDGKVYENIKPLKSKLKKLKYNQTQLSKKVKGSESRNKQKQKLGVIYENITNIRTDYLHKISTEIVKNHDIIVVEDLNVKGMMKNHKLAQAISDVSWGSFYTMLEYKSKWNDKEYVKIDRWFPSSKTCSSCGWIKQDLELKHREWTCDGCNETHDRDFNASKNILKQGLNIINCVSGTDSQSKQKRSKALPLGESMTSEAHPIGSAVGG

SEQ ID NO: 62936 - protein, 284 aa, Verrucomicrobium sp.
MMRTASIKLDASPEQRAALAALQSDFANACQRLSAVVREHRVWNRVALHQRAYSEMRSSTPLGSQMCCNAIFSVCKAYKALKVTGRIPKDTPVPAISFQRASVHFDKRTYALKKNAVSLYTLGGRVIVPMRLGEHQRRILSFGRPKEAELVFRKGNWYFNLVVESDDKEPIASGPVMGVDVGENNLAAHSLGGIFGGGRLCDRRDRHLALRRRLQSNGSRSAKQKLRQVSGKERRHVTHVNHETSKAIVREALEAGVSKITMEDLTHIRDRIKAGKRMRGRLHR

SEQ ID NO: 62937 - protein, 384 aa, Streptomyces sp.
MKLVVQVKLLPTPEQASVLEATLRVCNRAADHVSRTAFEQGLYGRNELQKLVYTDIKATFGLSAQPAVRAIKKTVDAYATLQANLTAGNLGKPGSKRWLKATGTPVAFRPEAAQPFDDRCLSWQHDARTVSIWTVQGRLKNLRYTGHVDQLKTLVQYRRGESDLICRGGRWYLIATCEVPDPEVYEPVDFVGVDRGIINLATTSDGTNYQGRRLSRYRRWQARKRTELQKKQTRSATRRLARRTQKEQRHATHVNHKISKEIVSVAQRTGRGIAVEELGGIRERVRLRRDQRATLSSWPFHQLGEHLRYKARQAGVPFMEVDPRHTSQRCPRCGHTEKANRSTREHFCCRRCGLAGPADHVAGVNVRNRARSAWVLVTAPAPSS

SEQ ID NO: 62938 - protein, 382 aa, unknown
  TnpB Polypeptide
MIRSYRFRICMSERIGCAFEAAISCSNQLYNAALEERIGSWSKARNSITKFDQFRSLTQVRSDDRKIAGYAVSMLRTPLTQVDEAFKGFFRRLKRNGAKAGFPRFRSVERLRSFGFSETGGWKLKGNTLRMKGLPSVRLKMHRELAGKPVTLTIRKDGRGRWFAVIVTRLPSVFGPTAQGSVGLDLGVENVAIDSNGLSYGRICPDRSADRRHVEDALSRQKRGSRRWRQTQKRLARQRSREASARRTKHFQLASRIVESGPQVICIEKLELRNMTRSAKGTIAEPGTNVKAKSGLNRSILDTGLAQFIQILTDKAESAGRLVVTVDPKGTSQECSDCGATVTKTLGQRWHSCPCGAEYHRDHNAARNVLQRGVVVPLRQAA

SEQ ID NO: 62939 - protein, 408 aa, unknown
  TnpB Polypeptide
MPVRTFVFRLLPTRAQHASLRQILDDQRNLYNAALQERRDAWSKGKTSISMNDQTRSLTEIRKFDETYGDAPYNLSKWTLKRIDDAFKAFFRRAKKAGKAGFPRFRSASRWRSFGFHQKDGLRLKGDRLLFSGGIIGALRLKMHRPLPDGAVIKSAVFTKEAGIWRVALSCEVPLAAANDDATAIGIDVGIEHLATDSIGRHYANLRPGGARAKRVRRAQRALTRCRRGSKRRRKVRTRLAREQRGLRNARTTHLHDVANAIVRSASTIFVEDLRIKNMTRSARGSVAEPGMNVRQKAGLNRALADAAPGRLISMIAYKAESAGGRMIKIDPRNTSKTCSSCGVVAPKALSVRRHVCPCGADLHRDHNAAINIRERGLAAHGVARRPGEPNVAGCGVRAPGKADPLAA

SEQ ID NO: 62940 - protein, 390 aa, unknown
  TnpB Polypeptide
MLVLEYKLILGAKQSQKIDEALRAFQFVRNKALALWFDDRKNKAFDLNKHCAVLAKEYPFANALNSQARQAAAERAAYAIGRYIKPDVNGKRLAKPKFQKDNRSVEYKVTGWRLSSDRKRITFKDGIGIGTMKMLGTRDLCVYGLAQFKRVRIIKKVDGCYVQFCIDVDRQETLEPTGKTIGLDMGLANFYTDSNGEAVDCPKFLRKGEKKIRRAQRKHSRKVKGSNNRRKSKKVLGRRHLRVQRQRKDFAVKLARCVVESSDFVALEDLQVRNMIKNHCLAKSIADASWGIFSQWLSYYGSVFGSPVIKVPPAYTSQDCSSCGKRVQKSLSERTHACQCGCVLDRDHNAARNILRLGLELDSEMYPGAQGNREGFPSETLVEMAPLLST

SEQ ID NO: 62941 - protein, 525 aa, Promicromonospora sp.
MPRHTSFRFCLDLSVEQERVLSRHVGAARFAFNQALRLHKDARAAVRRAQGEPSGVVADGDEPRARTNAIDGDDGAPRVPWTGFDLIKAFNAWKRSEAAGRRFLVGIDRKTRVEVTGLAWRDQVVAQVFEEAAVDLGRGLKACNDSWTGARKGSRVGFPRFKKKSPTGGSFRIRNKTTKRRPDIRIGDGDRPRSVSLPKIGILRVREDTRRLRRMIATGRARILSVTVSRGAARWWISITVEAADLHPAHGHSAARQAPLSVEVSSEQPNAQLNSGWVGVDRGLRVLAVAGSSDGSEVLRVDNQRALRRGLPRLRRLSRAVSRKKKGSKNRQKAVVRLGRQHARIRNRRRHVLHQVSNQLVKNHARLVLEDLNITGMRSNRKLSRAISDAAWGELARQITYKQAWRGGQVVVADRWFPSSKTCSACGSLRKDLALKDRTFECRECGHVMDRDLNAAVNLAAWAENHTPTVADGAGRGAARVGDRQAAGPVKNAHRQDTPAHPGPPGRGGKGLDDVGTSPQAAPAA

SEQ ID NO: 62942 - protein, 448 aa, unknown
  TnpB Polypeptide
MKRTNIVKLIVDKNIHEKLKELAIITAKCWNEVNWLRMQQFKKGERVNFIKTEKEVYNKYKHMLKVNAQQVARKNAEDWRSFFSLIKEKKEGKLLKWIKPRPPGYWRDKSGKYKLIIIIRNDRYEIDEENRIIYLKDLKLALGFKGKLKWHGKQGRLEIIYDEVKKSWYAYIPVEAENIVESKGNLRASVDLGIVNLATIYIEDGTWYIFKGGSVLSQYEYYSKKISRVQKVLARHRQRKSRKLKMLYDKRKRFLKHTLNSMVRKIIKELKEKGVGEVIIGYSKEINRSHGNKLTVNFWNYSYIIKRFEEIGEELGIIITKVDESYTSKTCALCGEAHKSGRVKRGLFKCPRVGKVINADLNGAINILHIPESLRSWSEGQLLVRDRGNGLKTQPVVYRWMNGAGWVNPTSYDVMKMKAVNHKPMTRPGGTLTLQGGKEVRNKLMKDL

SEQ ID NO: 62943 - protein, 336 aa, Thaumarchaeota sp.
IYEVTYSNKRTNVVRLFPNGFQERKLKRLANISAKLFNEINYERRQQFFQQHHVDFDTTWDKYYEKYKEELGVNTQAILKKNNEAWNSFFSLLKLKKEGKLPPFIKHISPPMYWKDKETKKRKLMLVIRQDRYIVDEHNNKLILKDFNMEIDFVGRLRLYGKQGRLEIYYDEAKNAWYASIPVDVGVEITKKGNKSKHIVHGESKNIQVESPKGDKMASIDLGINVLASVIVEDGNWLLYKGVRAKENYFYFEKKIAEVQSLADKTKNMGEHEAYEELLREKRRLHGKLKRRFRHLYRNFASHLVKELHELGVSTIYLGYPFEIAQEKGNKFTVNV

SEQ ID NO: 62944 - protein, 414 aa, Streptomyces sp.
VIVKLMVQVKLLPTPVQAAALEATLRACNEAATWASEIAFEKDVKRNFALREYTYTEIKARWNLGAQAAQHVIKRVCDAYVTLTANLRAGNLGGPGSKRYRRAVEKPVAFRPQSAQPYDDRMLSWQTDRRRVSIWTTAGRLKDVAFTASPEQLATLARYRRGESDLLRWDGRWFLNATCDVPEAPPNTGPVDFLGIDLGIANIATTSDGTIMAGRELNRIRIRERTLRTKLQRKNTPSARRRLRKRRRKEARRAKDINHKIAKRVVAEAERTGRGIALEELTGIRGRVRLRKLQRATHSSWAFAQLGQFIAYKARRAGVPVVYVDPAYTSRTCAECGHIDRANRVCQARFACRSCGFVDHADRNGSRNIRARAWELWRRGAQSTAPDPLPGPGRGTGRKRSATASGARSASPGL

SEQ ID NO: 62945 - protein, 146 aa, unknown
  TnpB Polypeptide
MKLGSRKRYKQKIKVARIYEKITNKRKDYLQKLSSNLINENQVICLEDLQVSNMLKNHNLAKAISEVSWSEFRRMLEYKANWYGRIISVIDRFFPSSQLCSDCGFKNKDVKNLGLREWICPNCGELHNRDINAAINIRNEGLRLLA

SEQ ID NO: 62946 - protein, 174 aa, unknown
  TnpB Polypeptide
VKIILKTYKYRTYPNKQQIILINKTLGCTRFVFNHYLAKRIELYKVENKSLTYNQCSNDLTNLKKEFEWLKEVDSVSLQQTLKDLDQAYQNFFRRVKQGGTPGFPKFKSKKNSKQSYRSQFNKTSAGGNIRIINNRILLPKLNWVKFKNSKQFDGQIKSVTISKTSTNKYLYLF

SEQ ID NO: 62947 - protein, 364 aa, unknown
  TnpB Polypeptide
MIVNRAYKFRIYPNAEQEIHLAKTFGSVRFIYNRMLADKIAHYKQTNEKLNNTPAQYKQEFEWLKEVDSLALANAQLNLQTAYNNFFRDKKVGFPKFKSKKNSKLSYTTNNQKGTVVLVGKNVKLPKIGLIKCVQHRIIPEYQKIKSATVTKNPSGKYYVSILVEYEFEPPNKQLDKSKALGLDYASNGFYVDNQNKIANYPRYYRKALDKLGKAQRKLANMKYRSNNYYKQKIKVARLHESISNQRKDWMHNESTNLANLYDYICVEDINMRTMSRCLNLGKSTLDNGFGMFRSFLEYKLVERGKMLIKIDKWFPSSKLCRHCGTINTKLELSDRVWECECGEIINRDENAAINILRQGLSMV

SEQ ID NO: 62948 - protein, 343 aa, Clostridium sp.
MIKALNIRLYPTQEQATLMYKHIGCMRFVYNWALARQIDSYKHSGKKLSIAELGKELTVLKNTEGYEWLYEVSNATLKEGIRDLDKAYGNFFKGRGFPKFKSKKKSEPKFYSRYEKIYFKDNLVNLEKIGKVKCKVDYDIDLTTIKKFKNPRVKFNGRVWVLSVGIEIPAKKVKKLNKKLKKLQRQCSKKYIINKKGGSYQKTKNIGKLELKIKKLHSKLKNIRLNHTHQTTSKMVKAKPYRVVMEDLKVSNMIKNKHLSKAISEQGFNIFINQMKYKCQKYGIEFIQVPTFYPSSKTCSHCGTIKKDLKLSDRTYKCDCGFTCDRDKNASYNLANYGLEISI

SEQ ID NO: 62949 - protein, 352 aa, Acinetobacter sp.
MKTLKLRIKDKHCKVLDQLASEVNFVWNYVNDLSFKHLKRTGDFFSAFDMTQYTKGTSKLCGLHSQTVQGITEEYVDKRRQHKKAKLKWRVSNKKSARRSLGWIPFKKVAIKYADGYVQYGKQKFKLWDSYGISKYSVRTGSCVEDSRGHWYVCLVVDSPKQDKPTATKVIGIDLGLKDVATCSDGTVISNPKFYRNYEQKLGIAQRARNKKRVRALHAKIANCRKDHLHKASTLLVKENALIVVGDLSASKLVKTKMAKSVLDTGFSALKTMLKYKCENAGVLFEEVSEKFTTQICSCCGEITSSSPKGRTDLRIRVWECECGSINHRDLNSAKNILALGHERLAVGIRLL

SEQ ID NO: 62950 - protein, 348 aa, Anabaena sp.
MLNTDIAQQTLKVVDRTFRSFYGLITSVKSGSYSSKVRLPHYLPKEGYFPLIMPRVKVKDGKFRIPMSTAFKAQYGEIWIPFPNRLNQETLKEVRILPKYNGRFFEVEFISEAEETPIETKAESAIGIDLGLDNLATCIDTNGASFILDGKPLKSFNQWFNKENARLQSIKDLQKIKGTTERQARLAVNRNAKVRDYLNKAARYVINHCIEHRIDKLVIGFNIEMKQSINIGSRNHQNFIQIPHSSFRFKLKALCERYGIKYVEQEESYTSKASFLDNDNIPVFNADNPKKHEFSGKRIKRGLYRTQFGILVNADCNGAANILKKSKHNALSGVSSGCLAQPLRVKIS

SEQ ID NO: 62951 - protein, 570 aa, unknown
  TnpB Polypeptide
MSSHLSLPIQLPFEERHNRLDILTTRIANQLIEQYWTIEHLKGINEHSYQAWKYFDEAFDNFDLYLPSRYKRCVMQKVGETLRSQADKYEAFQSIQTVLPNHKIRRIHTRRIKHQLWDSKEYIKSEYVDLLINQLNSYYDKHGKFPKSYFDIQECPKYSKGVLPYSADDGPKRGQAIKYAYDESALTVKIKTPDTLEPQTRGDWTWKEHELDGYKAFHELVEHGSLSAPSFQPSQTKTDIEYYELSFPIEIEHQEKTDDVETVLAIDGGIRKDSTVVVLDKDGEQLSTPYFIQNTERERMQNLNRERNQLNSKLAYLRQEGRDYTDSFKQVQAEYERVNNKIRHKREQLVHDVSNQVLALALVYDVDAIVHEDLRSLSPPKGNGQLSWELSSWARREIISKIEYRAEIAGLHVKKVRPNNTSKSCPRCGSTGHTTKSPDHFHEVWFGGHFRCDNARCGFQADRDYVGAVNVARVFFSETATLDHDFTSSYTGDFEIVPASRSVGTRLASGTAPVAYIGLSDNDVTAGGGSCFIAPAVTPTETINNSSIVSSPVIQGSTRFKRVTTNCYRK

SEQ ID NO: 62952 - protein, 444 aa, unknown
  TnpB Polypeptide
MVEKPFDKLTANELEVYNEIAFALPLMGEKYKMPVKGKQFLNYYFLNALLTATNNPDYFAVGLPKQTAQQVLKEVVRDMKGFYAGIRAHKKNPSSFTGKPKLPGYGEKGSYHTAIFTNQDCVIYPVKNKPGCHEVKFPGIKKRMFISDMPIRGRLMQVTVTPNHGNFILSFIFDDGQEKPVTKPPHRMVGIDLGVDNTAAITNNLGLPCLLFKGGVMKSINQLYNKKMAVIQSEQTKGTNKKFVMTDEAHRLCVWRNHRIDDAVNKIGSSIIAWCCDNNIDTIVIGHNTHWKQNANMGKKNNQAFVQIPLYKLIKNITYRAERCGIRVIVREESYTSKASFLDNDPIPTYGEIKEPTFSGKRIKRGLYKAANGTVINADLNGSANILRKEFPDVFVPHQPDFRNVVIIRHPDLENTKRNREKQLAKPKTISKAKIKRLKAKGKM

SEQ ID NO: 62953 - protein, 346 aa, unknown
  TnpB Polypeptide
VNCKDSYAWLSEGGRRMLLSHRTSVNIRPEYSNIIGHMCYAASKLWNVCNYERHHYKELGLEKYPDWYYQKKAHKGDLWYRQLPSQTAQETCKQLDKAWKSFYVLKKTGGIKDPNPPRFKQDNIPVTYMQMGIRHEKGSDQLRLSLPKDLKSYMEETYGIHEKFLYLENKIFRNMDHIKQLRIYPPENETCDLIVIYEIEEPEQLSQNGHYLSIDLGLHNLMTCYDSGNGRTFILGRKYLSLERYFHKEIARVQSVWYAQQSERGIKYPKSSKHIRRLYRKKQNAVKDYLHKTTRWIAEYCRKEDIRCVVVETSETSVKRKIWDIRPTRSFTDCHITGCISCWNIN

SEQ ID NO: 62954 - protein, 139 aa, unknown
  TnpB Polypeptide
MDRRILQKRRYPMCGCGDIRNIRKEKDMGHKTNQKFHGLPYNRLYIMLEYKLKLYGIQLIRQEESYSSQCPPQSEEVSHIYAEKRNRKKRGIYIVDTVIYNADAVGAYNILRKYHAVSGKEIDMPVTGLSSTKTIKVAV

SEQ ID NO: 62955 - protein, 520 aa, unknown
  TnpB Polypeptide
MYFYSKGKEATDMGYMRTITVCITQNHPLFDYAETVTRLANHLSNAIRFRQRQVLTAVSKPATNWSANEQEVMKEILDTISQMKRPVPVPTKENHFLGYSFLDSVMKYTKNPDYYAKGLPRQTAQYVLKQAVRDMKAFYASCHAYAKDPSAFTGKPKLPSYKRKGGHTTATVSNQDCIIKLRNGKWYAEFPFIKKKPVCIGFPIPDARLKQACIIPENGRYRLTFQFEVEKDLPEHSKESHRICAIDFGVDNLMAVTNNCGIASLLYKGGPAKASNQWYNKTIAKLVSEQTLQTGKKFIPDETYYAITNRRNDQVSDYLHKCAKHFVTWCVENRIDTVVMGVNKYWKQNSGIGHQNNQEFVQLPITKLREIIQYLCEWNGIRCIEQEESYTSKASFPDHDPIPVYRKEDSTKYTFSGKRKPTHYAGMYKKDGFRGLYKTPNGTIINSDLNGSANILRKAYPQAFDGESLPCFENVFIILHPDYENQKKNRQKQLQAKNSFSKSKEKRQRRKKCAFRQTVA

SEQ ID NO: 62956 - protein, 472 aa, unknown
  TnpB Polypeptide
LTRRDRATFGGKFTSRWTWLLSPLNSAGSHSKSAHTSRMICSMRSRWVPVNTGCRNLVTKTKWACRARTQCLPVLMSPCSTINQRQDHGVQLRYNFRLYPTPGQCAALAKAFGCARVVYNDGLRLRQEARAAGLPYISDAELSKRIITQAKKTPERAWLSEVSAVVLQQAPADLNTAYRNFFVSASGKRKGPKVAPPRFRPKRDNRQAIRFTRNARFQITAGGRLRLPKVGDVTVKWSRRLPSEPSSVTVVKDAAGRYFASFGIEAGEEPLPETAAEVGIDLGLTHFAVLSDGRKIDDPRFLRRAERRLRKAQQALSRKAKGSANRRKAVVKAAGAHARVADARRDFAHKLSTQIIRENQAVMVENLAVKGLARTKPARSVHDAGWSAFVNMLEYKAARYGRTLVKIDRWFPGSKLCSACGAAAESVPLNVRSWACPCGAVHDRDVNAAKNILAAGRAERLNACGGTVRPAA

SEQ ID NO: 62957 - protein, 273 aa, unknown
  TnpB Polypeptide
MLTLTYKYRMYPDRDAEARLAEALETCRWLYNRLLEEARKAKDAGKPLSMYDCHNMIPGLKKENPSLGNVYSKVLQMVSQTLWANIRGLAQLKKNGRRIGQIRFKCVGWYKTLNYNQSGFSFDCNVLHLSRIGDIKVKMHRPLQGKVKGVVVKREGEKWYALVQADTEVHELPENDRIVGIDLGLRSFAVDTDGHTGSRTHDTSAIHSTTSRRRSVSCPGRRRAARTGRGRRRGWRNYTRRSTISGTISCTSCPGSMSKRTGLYASKPSMSRD

SEQ ID NO: 62958 - protein, 525 aa, Streptomyces sp.
VAIRDRLRVSDADAAVLREVGAFLGSLAASDLADRCRQGLEHDGLSWAVRKQKLTGGSSSRWAGSITKATHDQWALARRAQAAHMVWLRGQIAQIEARLARPLGAKADKHASLPKGYASRREWHAKSRRMQTLKDRLAGVETDWTAGRVRVVRGGRRLATIRHHLPEAGLEEGAWRARWEAARMFLAADGESGKRFGNETIRITDTGQVSIKLPPKFAYLANAAHGRYVLDAVVAFKHRGEEWLDRIGAHRAVAYRIHHDPVRARWYVTASWQRAAVPVLPLQTALAQGAVGVDMNDDHLAAWRLDIHGNPIGEPQRFFYDLLGSAAHRDAQIRHALTRLLHFARRCGVAAIAVEDLDFGDSKTREKYGRNKRFRRLISRFPTAKLIARLVSMAAEQDVAIVAVDPAYTSRWGAQHWQKPLTTPRRETTRHDAASIAVGRRAQGFPIRRRTALPPPHQSDAVGHRTAQARPGTRRREGPRPPATDRAPTVPSPSRTRKRGTSRASNTVRDARSDQVWVQDSLLLT

SEQ ID NO: 62959 - protein, 441 aa, Streptomyces sp.
VYARCRRLFDPRGYRGLVPIMATWANAKVVAVQLRYSFRLYPSAGQRMALARAFGCARVVFNDALRVREEARAAGAPFVTSAELSRNLTGAKKTWERAWLGEVSAVILQQSLRDLDTAYRNFFDGLKGKRPKTGAPRFKSKRDNRQSIRFTANASWRITPGGKLRLPKVGDVPVRWSRTLPSTPSTVTVVKDAAGRYFASFVVKTDACAGLPETTPEIGIDLGLGHFAVLSDGRKVDSPRFLRRAEKRLKKMQRDLSRKQKGSNNRGKARLKVARAHAQVTDARREFHHQLSTRLIRENQAIAVEDLCVKGLARTRLAKSVHDAGWSAFVAMLEYKATRYGRRFHRIGRFEPTSQVCSACGVKDGPKTLNVREWTCSACGTVLDRDVNAALNVAKAAGLAASACGAQVRPASVPAQRSETGTRQELPTASPQWEQIGIPGL

SEQ ID NO: 62960 - protein, 393 aa, Candidate divison MSBL1 archaeon
VGDESVSFTFTYPSPKTLRVLRVEGIAMRVEKTIKCRILEPTGRKRGLLIKEYSNAQGYIRRRTEDLYSATKQAMDRYVEKVQNEEYPLFLRNDTFRVEKAENTRRFDYWAKIPLAGVWGGVWVPIKPHQEIEEDMDIHDSKIVWREYGFELHLSVSFEVSNQAPESILSVDLGERVMATETVFPADNGNPRFYGREVRGMRRKYAWLRKRLQEKGLLKRVREMSDKEKRKVEDILHKISRKIVDRAEENNSLIVIGDLKGIGNKDTEKGKRMNRIVNSMPYWKLTKMIEYKAEERGIRVVRVNERSTSKTCHKCGSENTSRPTQGRFDCKTCGLENYHADLNGGKNILQRFLAYMVGNGAFVNKPITGAFMNKNKVISEQVLGSSLLTSETS

SEQ ID NO: 62961 - protein, 372 aa, Thermoplasmata sp.
MSSETVKLTARFKLKEAPEGLYDLFKTYHEIVNYLITYAYENNITSFYRLKEETYYSLREKYPELPSHYLYTACQMATSIYKSYRKRRRRGKARGKPVFKKEVIMLDDHLFKLELKRGVVRLSTPRGRISLGFYPTKYHEKFKDWRVGQAWLVKTPKGVFLNVVFSREVEIKEPKDFLGVDLNENNVTLSLPNGEFVQIITHEREIRTGYFVKRKKIQKKIKAGKRRRKLLRKYGERERNRITDLYHKLANKIIEIAEKYGGIALENLKNIREHVRYSRELNGRLHRWSFRKLQSIIEYKAKLRGIKVIFVDPAQTSSLCPICGERLSPKGHRVLKCGNCGFEADRDVIGSWNIRLKALKMWGAPFPPKALQ

SEQ ID NO: 62962 - protein, 217 aa, unknown
  TnpB Polypeptide
MPAATTGLPFSTRTVCPKPCLRHAFVSPKRLALTSALRPSVHAPTVKRSSLPKLSREQKRSSRKQKGNKNREKARKRLAKLHRKVKRRRSDFLHKTSRRLVNENQALIFETLKIQGMMKNHHLAKAIADAGWGEFMRQCEYKAKHEGRIFAKIGTFYPSSKTCSACGHKLKDLSLATRSWTCPHCGAHHDRNLNASLNIKQEGIRMLKAAGLTVLRS

SEQ ID NO: 62963 - protein, 253 aa, unknown
  TnpB Polypeptide
LSTSRVTPPAVAAKYDLDQKSPVLPPWRMFGYLERIMREDTVFKALTIEDTDSLAGLFGAVRFCYNKALYLKTHFYKVKGVNLHPIHDLKKLIAVAKKTKKYAWLSEYDAIALQESVRNLDKGFRRFFKKEAGYPRFKSRRGEQSSYHCTGVSAGDDFVKVPKMKKIKAVMHRKIEGKVKSITLSMDACGDYWASVLYEDGLPEAVPATCVRQSKTVGVDVGIETFGTCSDGEKIKSPKALKRAEKKLKKAER

SEQ ID NO: 62964 - protein, 432 aa, unknown
  TnpB Polypeptide
VAMRQVERHLIKPSNGLYTICDDLTFKSKNLYNAGLYQIRQSIFERNKSDNKNKKSVLNWARLVSEFRKQDQSDMKALPSKVSTNIIKMLGGNISSYYQLLKGYNDNSNKKIINKPKLPGYLHKTKGRYVVEFTNQTFAKKRGENNELILCPKDLRILIPTKVDNPKCVKIIPKNGYFFIDVIYKIKEKPLRKTRKYAGIDLGVDNLATVTFSDGTNPLLMKGLKAKYINQGYNRLISKAQSKLPNNQKTSKHIHRLFRNREMKLQSELHKITGFLAEYFDEMSLEKVFVGKNDNWKSRVSLSKKVNQRFVQIPYNKFISQLKYKCALRGIQVIEQEESYTSKASFVDCDKIPVWKNDGKKYSFSGKRIKRGMYKAKYGTIINADVNGSYNIMVKGLNNLGEILNRTLVSLHTRSLCGYDILSNKDLVEKYK

SEQ ID NO: 62965 - protein, 263 aa, unknown
  TnpB Polypeptide
VSRKVHVNGLEQFINEREIEYANVKILNQPDGFFVAVTTYTPKTNFKEKEKVKKSIGIDFGIKHSLTTSEGETMDCSVEETESLKKASKRMNHCVKGSNNRMRNRKKLRKCYQKINNRRTDMANRIVSKLKRYSRVVIQDEQLKNWHKGLFGKQIQHSCLGRIKSKLKTLPNVVVLDRFIPTSKVCMKCGKAHELKLSDRVFSCKCGISEDRDVRAAKNMLEIVDMINVPPEQREVKRAEFLASFQKKFGISYGTVKHEDATF

SEQ ID NO: 62966 - protein, 431 aa, unknown
  TnpB Polypeptide
MMNNKVENRGKCDDGKKLAIKNALLATQLRRQNQVLRCYECKIVEKRLNKRQREELEQLFVEGKWFYNHVLNLRNNGQKLNAINTTSIKTVVHYDKDKNSIESELKVLSGQQKQAILTRMAQNEKAICSLVKRGHQKHGNLQFKSELACIPLKQYGTTYKFKSCNKVKIQGIHGDVLVKTGGQLQIADELANANLVKKPDGYYLKVVCFINKENWKTQKTNGREIGLDFGIKTNITTSEGQKIDVSIEESERLKKLQREMFRREKGSSNRYKTVKKIQREYQKIGNKKSDKANKIVHMLKQYDCIVMQDEQISSWQKGVFGKQVQHSCMGRIKQKLKALPQTILLDKYIPTTKWCPKCGKKHSIGLDERTYVCECGYHEDRDIHSAKNMLSIKNLVFNNKISVPTEYREVTLMEFKTSVKSTGSADVKLER

SEQ ID NO: 62967 - protein, 401 aa, unknown
  TnpB Polypeptide
MRTYKVKLEFENQNVKDFWKKRICLVQDCYNYASNITFNEKVQLGLKSVHSRLYYELRGRFKELPSQICIQVERALIANYKSVRSNGHHLDKPIQMKHPAIQLDKRLFSNLTRESFKLSNGDGNHRSEVRFVTYPKFDQLAEMYKMCDPKLTYDVETDVFHACVPFLDIPPTPHEDSYIGVDLGVKRLATLSDGTSYCDKEYLANRRRIRHNKRMLQSKKKHSHSARTKLKKLRRKEANVSKNTCHHLANAILKHRGSVVVMEDLTKIKQSTSKTKEGFKRKRHNNMLSQVQFYLIRQILTYKALLRGKRVETVSPEYTSRQDCRYGSGVGCKRQGCRFYTKDGMVFDADWNASINIMNRYKHSTSFELPIDGKLNLVNRLLQPTNSSVSNHRAISTVFSR

SEQ ID NO: 62968 - protein, 374 aa, unknown
  TnpB Polypeptide
MKLTLKIKLLPNKEQFDSLKNTVSEANKACNNISKTAFTKKLYNNFKLHKEVYYSTKEQFNLSAQMVVRCISKVADAYKLDKKVQREFRPLGAITYDSRILTYKTTDTLSIWCIGGRQNIPFICHNTNYLPYIQGEADLVFKNGNFYIFQTVEVPEEPIKNIEEFIGCDFGLTDIVVTSDGIKHSAEGLNNYREKKQRIRSSVQSKGTKSSKRLLKRLSGREKTTATIQNHTIAKSIVKSAKEQGKGISIEDLTGIRFTSKRRNKTFRTKLGKWNFGQLRSHLTYKSLLSGVKLIVVEPRYTSQTCSCCLHIGKRTNKVFKCTNPNCKVDVIDADFNAAQNISLLGASVNKPESSTMYCSLHYVVSSKAPIPLG

SEQ ID NO: 62969 - protein, 413 aa, unknown
  TnpB Polypeptide
MTKVKESTELILSERHIISSSHPYFSECDHLTFLGKNLYNATLFYQRASFFKKDFQNYYAVNRVFTHEDQADYRALPAKVSKQVQMLVDKSFKSYFALVKKKVKGDYTYPVRIPRYLHKTKGRCTLPYPKDALSLKKEGVVKFSKTGIEIQTKVDKEKIQGARIVPKGNHFVIEILYKKSKKELVSKSIQNVAFIDPGLNNLMTVTSNVFSPLLYSGRDLKSMNQLANKKIAQLKSHLSEKGLYTSPLLVSIYNKRNRRIKDSLHKISSHLVNQFVSHKIDTVIFGHNLGQKQDIKLGGVTNQNFVQLPFYQLISLLQYKCELQGIRFVTTEESYTSKCSFLDLEEIAKQKEYVGKRIKRGLFQTKEGVQINADINGSLNIGRKYLTKLGLYTDTLHEELISHMVNPKRICLV

SEQ ID NO: 62970 - protein, 397 aa, unknown
  TnpB Polypeptide
MNLVEKHIIDETDELNELSFKCKNLYNKVLYITRQEFIKNKSRPNFYNLSIYHKDILEYKAMPVRVSRGVIRILVANWDAYFSSLNSWYKHPNKFNGKPRIPKYLDKKGKFTAIFTDLSVLKRNLKNGLIGLSKMKIQIPYQHIDNKIVEVQVIPYKNEKFKINIVYKYEEKELKKNNKKYVSIDLGINNLMSITSNTGLNPILVNGRPLKSLNQFYNKKKSFYTSELELKQKRKSSNRLGKLSYKRDNKVNDYLHKSSKYLIDYCLRNDINTIIIGYNKLWKQNIKMGKKNNQNFVQIPFYRLIQMIEYKSKMIGINVIKHEESYTSKCSFIDLEPVGWKKNYLGVRIKRGLFKSLNGQLINADVNASYNIMRKVVPNVFTDGIEGVSVHPIKINF

SEQ ID NO: 62971 - protein, 389 aa, unknown
  TnpB Polypeptide
MHLQAGRVVQMIVTKAYKFRMYPNEKQRILINKTFGCSNLVYNKLLDKKKANPKLSKYDLVSFIPGFKQELEFLKEVDSVALVHTAHDVTVGYDKYLSGKGGMPHFKKKGVKVSYTTNCIRSSYKSKSYANIMVDMKNRTIVLPKLGSVKIRGYRNFKNFPFKIVNATVSKVANKYYVSVVVEEDIKSKYAKTYHIVGIDLGIKSLVTTSSFESYGNVSSLKKHEKRIAILQQKLAKKEKNSKNYNKTKIRLARVHSKIKNSRKHNIINIVNEIVKEYDCIISEKLNTKGMSQNHKLAKSIIDASFNKICQLLKWKTKILGKYYYQVDTYYPSSKTCSHCDYKTNITNNLNIRNWECPKCGNLNDRDINASINIMFEGLKIHYLNKVNN

SEQ ID NO: 62972 - protein, 375 aa, Clostridium sp.
MEIVRTLKLQLKLTDEQKLLVDNTLHSLKKALNYASSVAFNNGEITNKPKLQKLVYSTLRDKFGLKSQMAVNVCTVVCGSYQSQHSNNIFGSLAVYKNAKALYSYGRNYSFLNNGKTISINTIGKRIKLPFKVPDYFKKYLDRTWFFGSMEVVRNKNKYYAHITVNKEIMETPSEQINNIIGIDLGQNFIATIYDSHGYIKFYKGRFLKNIRAKYKHLRKQLQEKGTHNTHKKICSINQRESKFMRDINHQISKKIVDYAKGFKSMIAMEDLTGINLSCKVKRENRYYRVSWAFDELQRFVEYKAIQAGLKVIYIDPKHTSQTCPVCGHTHKSNRNKKLHLFQCKACGYTSNDDLIGAKNIWHKGYDKRINLATV

SEQ ID NO: 62973 - protein, 422 aa, unknown
  TnpB Polypeptide
MPQVLTVSCKLKVSQSQAAKLDETKDYVPLTRKDYVPLTRLDALSLRDANANGQALNWVNQNTPEKVVNPLKLQSLCYYEIRARFGLSSNLAQQVCRRLAGARKVARQKNRPVKAFKGGFATYDARIFSFREKDWTVSLTTVEGRERFKLAMSLRDANANGHYQREQLAGSNPKKTSGPLTRKTSGPLTRTATLVKRKDGSYSIQICVEAKLPEQQNTAQVVGVDLGRTDIAHTSEGDNWNGQQLNRVRDHYSRLRAVLQRKTSKGTRSSRRRCRELLQRLSGKERRFQSRQRCVAKTWVNQRPPVRLRERISKAMSLRDANANVSRAKATNSAIALEDLTGIRERINQQPRSKAERRRANSWAFYQLRQFLEYKTLRAGVALILVPPAYTSQTCHKCLHIHPDPAQSCRVFASALRSNSVA

SEQ ID NO: 62974 - protein, 368 aa, unknown
  TnpB Polypeptide
MYKTLKLRIYTKHTPKLVKLASAVNFVWNYVNDLCFQMWRRKHVFLSAYDIHEYTKGAGEELGLHSQTLQAVGETHAKARKQAKRSKLHWRTNRKDAKRKSLGWIPFKASAVKHIRTYQTGKTALKSQVQLSCGKEKLLLTMYDQYDLRRYTEIKTASVVEDSCGNWYLCLVVKGKPAIKNTATGEVGIDLGCKTAATCSNGDKLETKFTHKYAEKLATAQRAHKKKQAKRIHRKIKNSRADATHKFTSKLVRENRLIIAGNVKSSSFTSGKLAKSVYDANWFAINRQLEYKSRRAGCQFIVVNENFSTQTCANCLQITNSSPKGVAGLGIREWICGCCGQLNDRDVNAAKNILRFGRETLAGGSTVL

SEQ ID NO: 62975 - protein, 401 aa, unknown
  TnpB Polypeptide
VQLRYNYRLYPSPGQRIALARAFGCARVVFNDGLAARQDAHQAGQPYPTDGELSARLTAAKATPERAWLGEVSAVVLQQALADLNAAYRNFFASLTGERKGRKAGLPRFRSRKDTRQTIRFTRNARFTVLPNGKLRLPKIGDVPVRWSRPLPSKPSSVTVVRDSADRYFASFVVQADPGIVPEAEQVIGIDLGLEHFAVLSDGRKITSPRFLRRAEKKLRRAQRSLSRKQQGSRNRDKARVKVARGHARVADARRDFHHQLSTALIRENQAVAVEDLCVTGLARTRLAKSVHDAGWSAFVSMLEYKARLYGREFHRIGRFEPTTQTCSVCGVKDGLKPLHVRAWQCPACGAWLDRDINAAVNVARAAGLAVTACGAQVRPGLALAQCGEAGTHPKSRRKAA

SEQ ID NO: 62976 - protein, 456 aa, unknown
  TnpB Polypeptide
LSSQPPLIVPEFCLSHPNAIFKFKLPVNNREVVRKCIVLNNLKLTNRKSNILDNFFSEYLKILDQHLLKIPESFSSIDLHKLTYLDIRKTSFLSSDIVQEARKDSWKMKRYIERSGYNGKFGFKSCSIRLNQRWFKFFETKRGTPCFSITYSPKKKFVIPTSKDRQFQRFESFLNDGWVFDNISLLVNGKISVVLEKEFPKPEINQRFVVGIDIGSSTLASVTVFDTQTSKVVKQLYFGRDVAKRQRKYEQRRNKLKSLADKGSHRAKQSLRKLKYKQFNFVKTRSGQISKEIVNLAKSYNAYISIEKLKNIRAKKGKINKNGRKKINIIPYGKFKEFLKSNSEMFQVPLYEVDAYHTSKWCSHCGEINNGHSSVNYALYKCRKCGQVVNSDRKASLVIAVKSVLERNITHNLTNLGSIQISKTQVSVNALLRPNEVGLNQVVEQHLNQPMESHLR

SEQ ID NO: 62977 - protein, 386 aa, unknown
  TnpB Polypeptide
MRRRSWKYRLYPSKEQKEKFDLYLYECKNLWNSLLEYVKVHYGETGNFPTRKQLYLKTKEQSIFSQVAQNVADRLVKSLEARSTRKKDGVKAGFPRFKSIERIKSFTYPQFGFRLEEKLELSGIGQITIKKHRDIEGTIKTLTIKKSPSGKWHAIFSSETEQTPVSKKAGPVAGIDLGIDHFAYLSNGVSIENPRHLKQAEQKLKKTHGCFSTKKKGSKNRNKAKLKVAKAYEKLTNRRKDFLHRISRHLVDKYALIAIENLNVAGLARGFLAKSVLDCSWAEFVSMIHYKAEEAGCDFVLVNPAYTTQMCSSCGLVQKKSLAERWHSCQCGASMPRDLNAAINILNKATAGIAGSQACGEETPTGYKYGRQVSSEKQEARAFRHG

SEQ ID NO: 62978 - protein, 396 aa, Shigella sp.
  misc_feature (305)..(388): Xaa can be any naturally occurring amino acid
VKRLQAFKFQLRPGGQQEREMRRFAGACRFVFNRALARQNENHEAGNKYIPYGKMASWLVEWKNATETQWLKDAPSQPLQQSLKDLERAYKNFFQNRAAFPRFKKRGQNDVFRYPQGVKLDQENSRIFLPKLGWMRYRNSRQVTGVVKNVTVSQSCGKWYISIQTESEVSTPVHPSASMVGLDAGVAKLATLSDGTVFEPVNSFQKNQKKLARLQRQLSRKVKFSNNWQKQKRKIQRLHSCIANIRRDYLHKVTTTVSKNHAMIVIEDLKVSNMSKSAAGTVSLPGRNVRAKSGLNRSILDQGWXXXXXXXXXXXXXXXXXXXXXXXXXXXXXXXXXXXXXXXXXXXXXXXXXXXXXXXXXXXXXXXXXXXXXXXXXXXXXXXXXXXXVGSVWLCL

SEQ ID NO: 62979 - protein, 382 aa, Shigella sp.
MRRFAGACRFVFNRALARQNENHEAGNKYIPYGKMASWLVEWKNATETQWLKDSPSQPLQQSLKDLERAYKNFFRKRAAFPRFKKRGQNDVFRYPQGVKLDQENSRIFLPKLGWMRYRNSRQVTGVVKNVTVSQSCGTWYISIQTESEVSTPAHPSASMVGLDAGVAKLATLSDGTVFEPVNSFQKNQKKLARLQRQLSRKVKFSNNWQKQKRKIQRLHSCIANIRRDYLHKVTTTVSKNHAMIVIEDLKVSNMSKSAAGTVSLPGRNVRAKSGLNRSILDQGWYEMHRQLEYKQLWRGGQVLAVPPAYTSQRCAYCGHTAKENRLSQSKFRCQVCGYTANADVNGARNILAAGHAVLACGEMVQSGRPLKQEPTEMIQATA

SEQ ID NO: 62980 - protein, 499 aa, unknown
  TnpB Polypeptide
MRSQTPSYVVNVKLHLPEAVKAYLEKSFRIANSAYNEALSFGLRRFDAMKGNPTYQALLVERQNCSDKTHKKNIDQSLTQLRKDYSLTEYGLSNQLSRQRRVPGSAYRHLNSGELQVIAGQAYQTLEKVLFYQVKAHRVKFRSKYNPKMSFRNRVNTTGTRLVPSERKGYAYRLFLHKTSTFVDIPVKAFTPYQQLSLMRSDRIKYVQVIRQTIRGKRVYTLQIICEGYPYAKISKGTGVLGIDPGVSTLAYVSPTEVALVDLVPEQVNRQERLIRSLERRIERSRRVNQPELYHADGAIQKGVKFKPLSKRAQRLQVRRQRAYRSLSEERRKIHGSLINHLLSQASLIKMEDLSIKGLQRRSRELRINPKTNRPFSKKRFGKSIFRAAPGIFKQALLTKASQLGVEVQVISPQHLKPSQYNHLTGTFEKKPLSARLFDLSPEWTGVQRDLYSAFLIQHVEQGVYQEEALASECPHFYHLMTQFLQAPIQTSRLAWYLR

SEQ ID NO: 62981 - protein, 235 aa, unknown
  TnpB Polypeptide
MQEPIIHIPKISFEKAVGIDVGIKSFAYDSAGHQTLNPLNLKKILKPLARIQRKISRRKKGSNNRKKAVKFYQIIHERIKNRRKDFLHKLSTQYAKSHDIIFVEKLQKLNMIKNHRLAQSIADASWGTFVQKLQYKCKMVIEVPARNTTVMCSRCANLVPKSLTVRIHICNVCNLVLDRDHNASINILKKGLNLLAFANYGHASDNLPQELRKVTSVETPMVSVKQKETTQQVEW

SEQ ID NO: 62982 - protein, 448 aa, unknown
  TnpB Polypeptide
LWERGKKMRTVSSYGAEIRKPNIPLRLTMKTYRQAVSYLTEIYVQVWEELREIPETKKRFNAAEHMVHTTKKNTARFDFDLCFPKMPSYLRRAAIQHALGSISSYETRLEQWTKTGKLTGKPRLSCENHAMPVFYRDVMYREGGEGKDEAYLKLYDGHDWKWFRVCLKHTDMEYLRRNWKGKKASAPTLEKRQRRYFLRFSYTEEVTLTKTAVEEQIICSVDLGINTDAVCTIMRSDGTVLGRKFINFPSEKDRMYRVLGRIKRFQREHGSAQAKSRWGYVKRLNIELSRKIAGAVTKYAKENHADIIVFEYLETKGKISGKKKQKLHLWRKRDIQKRCEHQVHRNGIRVSRICAWNTSRLAYDGTGTVARDPKNHSLCVFQTGKRYNCDLSASYNIGARYFIRELLKPLPVTERSLLEAKVPAVKRRTSCVYADLRKLSSEMNLRVA

SEQ ID NO: 62983 - protein, 407 aa, unknown
  TnpB Polypeptide
MAYRCRAYPDEAQQQVLARTFGCVRVVWNQTLAARHARHHSEGRGLSYAESDRELTAMKKDPGLAFLSEVSSVPLQQTLRHQHRAFTAFYTGRARYPRFKSRRSRQSAHYTRSAFSLRDGKLRLAKTDGPLVFVWSWPDVDMTALDPAMVIISREPDGRWYVTFTIDTPGPQPLRPADHAVGIDLGVKDFAVTSDGQRIANPRHLERKARNLARYQRRLARCCRGSANRARAKAKVARAHRKVRDARRDFLHRASANLVHAADMIVIEDLAVRNMVRNRRLARVISDCGWGEFRRLLTYKCERAGRELVAVDRWYPSSKTCSACGHLLAELSLNTRHWTCPQCRTRHDRDINAAKNILAAGLAVARGNPGDACGAGVRHSGSSRVQSAVKQEPQPVTAGILVPHGGE

SEQ ID NO: 62984 - protein, 301 aa, Okeania sp.
LNVELAYPRFKSKHGKQSIQYPQNVRVLSDYLIIPKIGEIKAVIHRPIEGKIKTVTISKNCCDRYFASILFEDGKEKPLSSTEGKAVGVDVGLTHFCTTSSGLKYDNPRFLTKHEKNLKRKQQQLSRKEKGSNNRNKARKKVARVHRKITNCREDFLHKLSRRIVDENQVIVTENLNVKGMMKNHCLAKAIGQVGWGIFMTMLKYKAEENGKTYVEVDRFFPSSKTCHVCLNQVGSLPLELRRWTCKSCNTTHDRDINAAISLRDEGLRIISYGTRDQAYRQTVRRSSRGRKKSTTTLVSG

SEQ ID NO: 62985 - protein, 349 aa, Natranaerobius sp.
MEQTVKIKLVPTKNQEKHLTNISKEYIKTINALVSKMVQEEQALKLSSKDVQASMPSAVKNQSIREAKSVYRRSKKIKRVPVLKKPVCIWNNQNYRIKENTIEFPVYINGKSKRIAVKAILTEYQQNLLKNKLGTLRITKKSNKWIAQVCVTVPEPKPKETDTVMGVDLGLKAPAVSVTSTGKTKFIGNGRKNKYIRRKYKLKRSELGQAKKLNAIKTLNDKEQRWMKDQDHKISRKVVDFAIENQVSVIRLEKLSNIRNTARTSRKNEKNLHTWSFHRLALFIEYKAKLRGIAVEYVDPKYTSQTCPICRNRNHVKDRNYQCSCGFKTHRDRVAGMNIIHAPVIDGVA

SEQ ID NO: 62986 - protein, 496 aa, unknown
  TnpB Polypeptide
LCWTHPQNNLEAVFLSSREALRRVNDYNRLLAPGERHLLLRTWTLAPCSQVKRLHIELDNSALDDFIQGFGLRELVRNESDAELPSNAEVVARVFIQKHQQSGPSNTRIPACHISTDGFSLSVLYEDKVVEVEGGAEVGGDDEVDGVDGVDEVDEVDEVDEVEAEADAPGDVVVGDCAAAPSPARAKKAVGSGKRKGKRGKYHRKKKKKKKKPSWVEVTRDEYPAEPIVIGLDPGRSNIFYAVRMTDGKVFKLTRREYYHLSGINDRKFAMARLGEGLEPYHRQLSREGSLKFGRYEELIAGLILRTQYYNEAWTLYGKNPKRAKLAFKVYCGKARTLQQKLNEFGTGLTREEKKRIVVGYGDGKFPSHGPRGELAVPVKRPRRMCGYTWHTVDVNEAYTTVTCNEPHCREPMVKVMTNIPYYDRSGQIRFKENRGCKRCTSVICRSEHPFKGRDHNAALNIGEITIHMLEGEARPECFTRAYHDARRPRRDPPAA

SEQ ID NO: 62987 - protein, 439 aa, Natronolimnobius sp.
MHVHRTYRAKIRNHSQVARILDLHAWSASKLWNVANYHSREVWEDTGEIPDDSDLKSELKTHNKYKGLHSQSSQRVLEELAEAFNSWYSKRKSDNRANPPGYRKKNSYDNKGNRVHEEHPRSTVTWKQKGIRHDSNHNRVRLSKGANHKDHPRDWDYILVEYETRPEVTVENLQQVRAVYSKSKQRWELHLVCKHEVETPTAPGTETAGIDLGICNFAAVAYSTEEADLYPGNRVKQDGYYFPKEIAKCDNSSGSEATRLHHKWSERRTHFFHSLAKHIVEQCVERGVGRINIGKLNGVREDENGESKNWGRHGNLDLHGWAFDRFTNILTYKAKIEGIGVVEVSERGTSKTCCVCGREDDSQRVERGLYVCEECDAAFNADVNGAENIRLDINNESNSESSASLDEDRSTGWLAQPGVYLHDLSHGFSPREQVVDCKP

SEQ ID NO: 62988 - protein, 405 aa, Anoxybacillus sp.
MEAGRVERHIIYPTHPYYHMFDEYCFRAKNLYNFANYQVRQTFFQHGAYLSYNKLDKLLKTKGMDADYRAMPLAQCAQQTLRMLHQNWKSFFQAMKDWAKSKEKYTGRPKPPKYLRKDGRYVLVLTNQSCKIEDGFVTFPPCFQGFRLKTNMKGKLQQVRFIPKHHHIVIEVVYKISVPAQKRDNGRYVSIDLGLDNFATIVNNVGKQPIAINGKGLKSVNQYCNKQMSHYRKVAKQMNGLDWTKRMSRITEKRNRIVENFMHQASRFVIKYALSLGCNTIVVGMNKDWKREVSLGKQTNQSFVHIPYQMFLRQLQYKGEQHGIRVIVTEESYTSKCSFLDMEEIKKQKQYKGKRIKRGLFQSEKGTLIHADVNGAYNIMRKVFPKAFANGIEGVGLHPIRVHVA

SEQ ID NO: 62989 - protein, 468 aa, Streptomyces sp.
MTEALEQPLPPRVTGAEAKRIKREALRIPDQSKHHQRPATPMKRRAKEPGTHQRVYRYRCYPTPDQAEQLIETFGACRWVYNEGLTLRSNAWRDHRVSVGFAETCRALTGWRQARETCWLQNVSSTVLQQSLRHLESAFTRFFKGGANYPQRKKKGRSRDSATYVRTGFRWFEDPERPGTGLIALAKQTDPLDIRWSRPLPAGTTPVKLTMTRDRVGRFFLSVLVEEHIEPLPPVFLPGTRAPKAVGIDLGLATLVTLDDGEKLDHPRLLRKYEKKLAKAQRELHRKKRGSANREKARQEIARLYALIGDVRRDMLDQLTTRLVRENQVLVVEDLAVMNLLRTTTGPGRKRKAKLNQSIFDASWGELLKQLRYKCEWYGRTLVIVDRYFPSTRRCSSCHVKGERLDLSVREWKCGSCGAVHDRDVNAAQNLREEGMRLYGLVAGSLPPGRTPPPVIRASEVPEVPLAA

SEQ ID NO: 62990 - protein, 368 aa, unknown
  TnpB Polypeptide
MEQKIKTILVTHKDRFGRFGYDWFKKFCMKFNTTIVVVNKEEPSPQEELVQDIVSILHAFSCRLYGLRKYKKQIEGDGEIAKELQDGKGKSDVKMYFVKNNPKDCRCERHRINIPSLGWVRVKKKGYIPVTKDGYVIKSGLVSMKAGRFYVSVLAEIPDSKITTNDYSEGIGIDLGLKDFAIISNGKTYKNINKSATLKKLEKRLIREQRCLSRRYENLKEGESTQKANIQKQKLKVQKLYHRIDNVRRDYMNKTIAEIVKTKPSYITIENLNVSGMMKNRHLSKTVASQRFYEFKVKLQAKCKENGIELRVADRWYPSSRTCHCCGAIKKDLKLSDRIFRCNCGYVEDRDMNAALNLKDAKTYEVAS

SEQ ID NO: 62991 - protein, 367 aa, unknown
  TnpB Polypeptide
VLKAYKYRIYPNKEQKEQIVKTFGCCRFVYNQTLAYRKETYGKEKKTVNRTDCNNYCNRELKKEYEWLREVDKFALTNAVYNMDAAYQKFFKEHAGYPKFKSKHDNYKSYTTNFTNGNIAVDFEKRRMKLPKLKEVKAKLHRDFRGQIKSATVSQVPSGKYYVSILVETVHEELPHTNHNTGLDLGIKDLCITSDGEKYENPKIIKKYEKKLAKLQRKLAHKQKRSRNYYKQKKKIAKCNEKITNTRKDYLNKVSHEIISENQVIVSEKLQIKNMVKNHHLAKSISDASWYELTRQIEYKARWNGRQYIKIDTFYASSQLCCVCGYQNANTKDLSVREWVCPVCGVGHDRDVNAAKNILAEGLRQIA

SEQ ID NO: 62992 - protein, 415 aa, unknown
  TnpB Polypeptide
MVNLVKKNIEVRIFPGKMDRNDNGEKIASTNQIESNIGIRRFIYNKELEFINNFKKMLIQYGYGDDIKIKVNDSSCSVILEMLRCEYSFLEKAESSSRQQAQRDLITAFNRYDDSYLKSAYPAYKTKKKTLKFTFRIINNNNNVRITKDKNGYDKIKLAKLGLVKFKTSKEYRELLRRGSDKNDSSVKIKHVTVKKVHGKYYAVFNVEYIYVPEDIIGPLMQVGIDIGCGKLAVLSNGTEIPNLDLEMETDDIIRYQKNMSHHKKGSIRYLQAQKLYNNAWEKFLNKRKDYYNKLANYIVKNSSFVAVQNENIIAWKSNKYLSHSIQLNAPRDFMDRLEKKCQQEGVKFIKVPRVFPSTQKCSKCQKINKNLKGLKNLGIRNWNCPHCHTHHDRDLNAAINILNKGLEIVGTTMQ

SEQ ID NO: 62993 - protein, 460 aa, Moorea sp.
MAQKKRRKDLIRTDKWQLKPSQLQRQLLRLTVQEFRSICRGLISVVFTHWPELGGLSSKQRIPAVERLMHKTRQNQYPKYEYFIRRFYKFPSYYRRSAISFAIGQVSSFVTRYMEWQSGIRKRRDAKPPRLNADCGCYPALYQGQCILFGAAMDTAKIKVFTGTDWVWTLVPVEIEPGYKRHLLDTNEKLSPYLIVNEKKCHLSVPFRCNPDDRQETNRVVSVDLGINTTAVASVVTSDGTVLARRFIHPGRDIDRRDKRLKGISKKASLSNGKLHKGFCRGNYRKASNINTQIAHSVSRELVDFAEAWGAKFIVFELLLGWKPRGGRKRSNLRQRFHGWLHRAIATWTEAKWNELGGTVKYVNPRGTSSNAYDGSGSVKRDSKNYGLCTFPTGKRYNTDLQATYNIAAKYWFYELVHKKGEAKRGKRTRLAPRSRAVTLSTLWNTPSSSVVGFDTPSYP

SEQ ID NO: 62994 - protein, 548 aa, Moorea sp.
MGLSGAKERQAGLDSLTQEIFFVLEKLQSLTGHITTPSVTAESVPTFKETTSTDFSPISIPSSRKRKSSKISAQVSTKDLGLEPYWSESCAMISSRLLLPVETGSPDSGLNSLSTWSVSTVEKSWFSVNLKAAPNLNLPQIFCPSFTSSPVGFTDSGNTVRKSKKIRLFLSSEQRSLVRQWFGVSRYVFNKTVKILSDGETKANWKAIKTGILNDLPEWCKAVPYQIKSIAIKDACTAVREAKKKYKKTSQINRVRFRSRKNPVQSCYIPKSAVSSKGVYHTKLGEIAFAETLPDNICDCRLTSTNGSCYLVVPHEATNTKAENQGRVVALDPGVRTFITFFSEKSVGKIGHGDFSRIQRICQHLDNLLSRISKAKGGQKRRRRKAARRMVIKIQNLINELHHKTAKFLVDNFDVILLPTFETSQMSRKEKRKIRSKTVRNMLTFAHYRFKEFLKHKAQETGKVVVDVCEAYTSKTVSWTGELVNIGGSQIIKSKIDGRSMDRDINGARGIFLRSRSVAYGHALGDTPWLRNQLALVSQNPPLVDFGS

SEQ ID NO: 62995 - protein, 419 aa, Calothrix sp.
MQTISVKCKVIVPVELRVEIDRTLQGFADACNQILEVAKREKCWNTTKLHHKVYKPVRESTGLKANHVCQAIRRVIGNAKAVKQVHPSGSTLCHRRKAPRRQVSHKFRPRSISLDVRTFQYIEESQTVGITLMCGRVKFKMSIGGYQIALLRGQKPTSATFCKSRKGDYYINICVDIPTDPTGKTPKVIGVDLGRRDIATTSTGKSWSGKQIQNTRDRYSKVRANIQSKRTRSSRRLMRRLSGREQRFQKWLNHNISKQIVQDAKSTNAAIAFEDLTNIRESLNQKPRSKTERRRTNNWAFYQLRIFAQYKANIAGIPVVLVPPAYTSQTCSRCHHVHPVKGKSFRSGKSFKCGHCGFEHDADINAALNIAALGLSVSQPESPGISCQLVSHCVAGVPPVVASGEGQLNLFPTNYFELG

SEQ ID NO: 62996 - protein, 279 aa, Streptomyces sp.
VAANRAIAYRIHHDAARGRWYVTASWQKPASPAVPLAAALADGVIGVDMNADHLAAWRLDVHGNPTGSPRRFCYDLTGTAGHRDAQLRHALTRLLHWARTCGVRAIAVEDLDFTAEKTREKHGGRKRFRRLIAGMPTGRLRARLTSMADQTGIVVVAVDPAYTSKWGAQHWQKPLTSTIRKITRHDAASIAIGRRAQGYPLRRRTTPPRAHRSDVHGHRIVQAGGDAPGREGPRRRLPGPRTRSVPPDAERTRATRTPTTVRGVRGEREGVPDPLLLTD

SEQ ID NO: 62997 - protein, 408 aa, unknown
  TnpB Polypeptide
MILVLKHSYKKSHPFYKELDKLCFLSKNLYNSTLYTVRQHYFETHKYLNYNAVNKLFTDNKQVDYCALPRKVSKMTQQLVDKSFKSFFALLKAKQKREYNEPINIPNYLDKVKGRQIVHYDKQALSFKAKEGFIKLSGTNIYIPLTNDITKDIVRYVRIVPKPHNIIDVEIGYKVEVPEIEYNNRIASIDLGINNLATVTSNVFSPFIINGKPLKSINQYYNKHLADLKSFQMLKGNKKSTNRIKALTVKRNNKVTDYMHKATRLITNHLVSNNISLLVIGYNKGWKQDVNMSKINNQKFVQISFLKFINLLTYKCRLSGIMVVTNEESYTSKCSFIDKEPIQKHSIYLGKRVKRGLFRTLNKNYINADVNGSYNIMKKYLITQEAWNENIFSDCVEACSTPVVFTIK

SEQ ID NO: 62998 - protein, 367 aa, unknown
  TnpB Polypeptide
LNIAYRFRIYPTEEQKILLGKTFGCCRFLYNQMLDDKIREYEKTKKMLKNTPAMYKREYPFLKEVDSLALANVQLHLEKAYKNFFRDPKIGFPRFKSKHHSKNSYTTNMVNGNILVESKRIRLPKLKWIAMKKHREPAEGLCLKSVTVSMEPSGKYFASLLYEGYSCENQAAGPDYSTAKILGIDYAMQGMAVFSEKVETEEAGFFRKNEKRLAREQRKLSRCVRESHNYELQKKKVARCHEKIRNQRRDHLHKLSRKIADGYDAAAVEDIDMKAMGQCLHFGKSVQDNGYGMFREMLDYKLAWKGKKMVKVDRFFPSSKKCCKCGRIKKKLRLFERVYHCECGNKMDRDHNAAISIREEARRMLTA

SEQ ID NO: 62999 - protein, 390 aa, unknown
  TnpB Polypeptide
MLKAYKYRIYPSEDQQIQMSNIFGQVRFVYNLGLETKITTYAGNKININCFDLMGQMVDLKNTDAAWLSEAPAQALQMSLRNLDNAYTNFFRGRGFPKFKSKHGKQSFQLPQGVHLSKDNKQIFIPKLKYVNIDLHREFKGEIKTVTVSKTVTNKYFVSILVDNKQELPVKKPMNISTAVGIDLGIKDFVITSNGKKFENKDFFKSEMNKLRIEQRSLTRKKKGSNHYKKQKMVVGLVHEKIRNQRQDYLHKISKYLVDNYDTICLEDLSVQNMVKNHKLARAISDMGWSEFRSMIEYKSAWYGKNISIIGRFDPSSKLCSSCGYLNKELQLSDREWVCPKCGSKHDRDQNAAVNIKNFGFRNKPSVTQSDGIPCACNVETQFIASGLDR

SEQ ID NO: 63000 - protein, 393 aa, Lactobacillus sp.
MMKDCGEMAQIIKGIKLRLYPNAQQREQLWQMFNNRFVWNQMLAMAKERYQNNPSSHFVNEYGMNYLLKRLKQEYPFLRASDSTSFLVVNHNLAQAFKMLFKHRGGYPRFKSRRAIRQAYTGRSVCRVLAKRRVKLPKLGSIRTSKTTLLANSKIRCYTVCFEPTGRYYLSLQVAVEAPEHLRRTGKVVGIDVGVTSLAVSSDGIKYGTFNAKWAEKQATKWQSKYAKRKHQATVAVYQWNHNHKAFKKELSDYQNWQRAQQQKARYQVKVANQRKDYLHKLTTTLVKQYDVIVIEDLKAKNLQKNHCLAKAIANASWYQFRTMLAYKCAWYGKKLVTVKSNYTSQICSHCGYHSGSKPLNIREWTCSSCGAHHDRDINAAVNILHQGLKAIG

SEQ ID NO: 63001 - protein, 405 aa, unknown
  TnpB Polypeptide
MLIRSLVFRFEEPLPSEAKFLMEDFRLAANNAIRAGLQSRVTSRNALTCLAYHDFRKDHPNIYAKHLVSAFEVAASTLKNYRRRLRHNLPARAPYIRMLFMKTENQAYRLERKSGVLDLPIKAGHHIKLKLVLSDHHRKYLDDESLSLGSLILLPDRAIIAIRRQPPTLYTPESVLSLDTNERSLDGVLAKDYGIEKIVKVEFPGIAIIQERHHQRRRRLQKKKSHDRRMAKRLCKKEGSREHHRIDYRLHQTANIILSLAENNKSSIILEDLTGIRPDKGKAFNRRISMWPRRKLHQIIEYKAAWKGIPVVKVDPRYSSRRCPVCGRIQQRSRKGTDFVCGCGWRIDRHINASINLLKTAAPGWAAGGLRFGPGASQHDAVTILCCRKAARSEPNGTSGVRAIV

SEQ ID NO: 63002 - protein, 350 aa, unknown
  TnpB Polypeptide
MGCTRLVYNRALAAKTEAWYERQERVGYAETSRMLTDWKKQEDLQFLGEVSSVPQQGLRHLQTAFSNFFAGWAKYPNFKKKRNGGSAEFTSSAFRFRDGQVFLALSPEPLAIRWSRQLPKNAEPSTITVKLSPSGRWTVSLLVDIEIETLPESPNQIGWDLGITSLIALSNGEKVANPQAFKAKRRKLRQAQKALIRKQKGSKNREKARLKVAQVHAEISDARKDFLHKLTTRLVRENQTIAVEDLAGSNMIKNRKLALSISDASWGELVRQLEYKCDWYGRTLLKIDRWFPSSKRCFDCGHIVEKLPLNIREWDCPQCGSHHDRDVNAALNILAAFSCRFSLGREHNTQ

SEQ ID NO: 63003 - protein, 222 aa, unknown
  TnpB Polypeptide
MFKHFSKRYKPALLNSHTVREILDRLDVTYKRFFKHDAKRPHKFKKMVEFSSFVFMDNGYSFSGNVLTINKIKKSFKFSLSRPYVGKVKRVTVKRNKLGEYFIVLCLDKQAEPYGKSRNGASVGIDFGLKKYLTLSDGREIDNPQFLKADLQELRRRSRNLSKCKNGSNNRKRKKLELERLCQNIVNKRSDFQWKSPNNSLQVASEYVNQPPQQQLWKEIIF

SEQ ID NO: 63004 - protein, 402 aa, Desulfitobacterium sp.
MKEVFLIIRVYKLPFRTSQDNLNRLYACNRISAQIWNQCLDLAKEHGQRTNTWLSRKELHLATKGRYPIHSQSIQAVYEKYLDARENALQARALGYTQIRYPYKEKHHFNTRWKKDGFRIGEKGRIELSLGLWEGKRQKPITVRVAHCPPGQIKEIELVYDRGLKLAMAFEDGISPKANPAQGTAAIDLGEIHTLASVTDQGQGLLITGRKLRSIKRLRNKKLKELQRKMAHCQKGSRQWKKYRRAFHYVLSKSEAQLTDALHKTTREFVRWCLDNAVKDVVIGDVEGIQRHTSPKKKQTQRKRSRRINQNLSQWTFGKTRRYLQYKLAAEGISLKKVDEAYTTQTCPVCGKRRVPSSRTYHCGCGYVQHRDLHGAGNILTQHLYGHYQAIVLKDYKYLRIA

SEQ ID NO: 63005 - protein, 396 aa, Chroogloeocystis sp.
MPLKGFRTQLNPNNHQKTLFAQHCGVARYAYNWGLDVCFKVIEARKLAKEKGEELPKFPTAIDLHKKLNAEVKSQHPWFYDSSKCAPQQALRDLENAWKRKMKVKNSGTPKRKKKFVRDSFYLEGNIQIKDGFIKLPRIGLVRLHESVANQTIKNVRVSRKADKWFVSFKVEVDIQQTVKCFGKVGVDLGIKTLATLSDGKVFTALKPYHTNKQKLARLQRKASRQVKGSKNRAKTQQKIARLHARIANIRNDATHKLTSHLTKNHSEIVIEDLNVRGMMKNHRLASAIADSGFYEFRRQLEYKAEWYGSKVTVIDKWYPSSQLCSGCGARQSVPLQVRQYDCPSCGLSLDRDLNAAINIRDYPKNAPSSEVLASGQEKARASWLKEEVDSKPKFA

SEQ ID NO: 63006 - protein, 325 aa, unknown
  TnpB Polypeptide
MAQLEYHYGLKVRIYPSDHQKQIIKVNSDASRFIYNEMVAIGKELWQLSRVKLPIDTVQDRIQQLKLRQNAKQMSNHFQFLEDKRIDSLAKANAIQNYHKAWNAFRKVHEAGVPKFHRKSYAWRYQTNCQYPKQKTARLDNGTVCFEDRKHIVVPKLGRLRIKGAQQRLLDRQGETRIGTVTISKDAADRFFLSLQLGSDTPFVPKLSRTNRQIGIDLNTENFLTASDGRTVANPRYYRTIKGKLAKAQRTLSRRQRRAKKEQRSLRESKNYQKQRLLVAKIHARVFDRRHDFLQRTSTALIKNQNLVVAEELRSKNLLKIMPWQ

SEQ ID NO: 63007 - protein, 379 aa, Neisseria sp.
MQILKAFKFELMPNGAQIRRLKQFCGCSRFVFNRALAYQNEQYEADKSFKFSYNKIANLLPEWKRELTWLKDCHSQVLQQSLEDLESSFKNFFAKRSDFPKFKRKGEKDSFRFPQGFKLEQQNNRIYLPKIGWIRYRNSRAIVGEMKNVTVSRKCGKWYISVQTEFEQKTPQPKGGEIGIDIGIVRFATLSSSEYFEPINAFKNLKGKLAKLQRRLKNKVKFSQNWQKLKAKIAKLHHKISNIRKNYLHQISSQISQSHAIVYVEDLQVTNMSKSAKGDVEQHGKNVKQKSGLNRMILDQSWFEFRQQLDYKLLWNGGHLVAVPPQNTSRTCPCCGYTAKENRQTQADFECVECGYTENADVAGAINILRRGHEILAAQ

SEQ ID NO: 63008 - protein, 442 aa, Clostridioides sp.
  misc_feature (331)..(419): Xaa can be any naturally occurring amino acid
MSSRVYSKGGEFMSNRIKNIHYGTQRQQLKNLTKKEYQALREMCFLAKNLYNVGTYNVRQHYFNQGEHLNYEANYHVCKENENYKLLNSNIAQQILKEVDSSFRSFFGLIKLAKEGKYDFRGIKSPKYLDKEGFFSIIIGQIRIKEDGILNVPMSPAFKKLYGKVSIKVPQNILEKKIKEIRIIPKHKARFFEIQYCYEIPKSEEVSNQKNALAIDLGLENLCTCVTNLGDSFIIDGKRLKSVNQWANKQNDKIESLKLKKNITAITRKQFKVWNKRNNQVKDYVNKTCFYIIDYCVKNNIGNLIVGYNAKLEKSDNMERKIYRNFIRIPXXXXXXXXXXXXXXXXXXXXXXXXXXXXXXXXXXXXXXXXXXXXXXXXXXXXXXXXXXXXXXXXXXXXXXXXXXXXXXXXXXXXXXXXXVVNLSNLQNNPQILKQPQRVRIS

SEQ ID NO: 63009 - protein, 376 aa, Escherichia sp.
MKRAYKYRFYPTPEQTELLARTFGCVRFVYNSLLRWRTDAYYARHERVGYAQASAKLTSLKKEPEFAWLNDVSCVPLQQSLRHQQTAFANFFAGRAAYPVFKSKRHKQAAELTASAFKYRDGKLYMAKSKEPLDVRWSRPLPSAPSTVTITRDAAGRYFVSCLCEFEPVSLPITVSTVGIDIGLKDLFVTDTGFKTGNPRHNAKYAKRLAVLQRRLSKKQKGSKNRAKARLKVARLHARIVDCRMDNLHKLSRKLINENQVVCVESLKVKNMIRNPKLSKAIADAGWSELVRQLQYKGEWGGRSIVAIDQYFPSSKRCSSCGFTMQKMPLNIRKWHCPECGAEHDRDINAARNIKAAGLAVLALGESVIPKPLHVV

SEQ ID NO: 63010 - protein, 428 aa, unknown
  TnpB Polypeptide
LLNALKIRLKLTKEQEEKAWRYAYVRRHFWNLLVEIDRKNNLGEYDDLLLKRGNTTYYSKYFSRNIYRLTPSDYLYLAKLAIESYSKSDSNQKEWEWYFKDNQSFIYNSTAKKLAEIKRKNKGKLKFKAAGKTTPSFQVRCDSLYASCKSGNGNNNIKRASRIYLKEDGRLQIPTIGSVKINRTREGFELDCKKQTATISFDGKYWYLAYTENADIEPVISRESIKKAFGIGIDLGINNLAALSDGSIIPNIKSLRRFKVLSKRLKTLQKKVSRKYYINKCNKYNKTKNIKKLEKKIRLIHRSIKNLRLQNIREFIARLIKKSPGYVAIEDLDVKGMMKNRHLAREIANASFYKIREHLTRKAKENGIVVRVVKRFYPSSKLCSHCNALKKGLKLSDRIFECPKCKTIIDRDLNAALNLANATEFELA

SEQ ID NO: 63011 - protein, 569 aa, Parasutterella sp.
MSSLERTLVRQFEMPNETDRVSLDRMCSSYGFVASKFLFAFQTRELRGEVRDFRAFRNKLVAALSKKPVEFNQRLADLRTNGKAAEANLLTLLRELKETSGPHLQVRHWKLALEETSKMALTHWKSVIAEAKKKLAHTLKHFNDQDRHYACWLLCGVNRQFFELLDGRIPVPNPEVSFDRNYCLSYDRPLSSKALRSIAGVVRRTVNKVRRDSVCYPRTQAFHNRIDFDASCYTVRSTEDAQFLELMSLQPGKRISLRLKGRSKIRGTLQLIRDTAGTYSLRVYVPQQCEEKRKTGTVIGIDLGYTEMMATSEQELLGTDLGQYFSAISDKRRKNSEGRNRMHSLFRNLLKKPNKDNLAKAERIRKHNLGRKKQRARYIRDIGVIKTIVNRELNLLFTRKTNPIKQIVVEDLSARMKVHFGKKWNRRLSGWMRGYLQERIRYKAKKHGIEVSEVNPAYSSRECPRCHCTDKKNRYGNSFKCSLCGYHGHADLVASLNILGRLGDKEIRIGMSPSRVKAVLDGRYVGWKSLNHTVSDKISGEARVVDESPRSASSKSELRSNVQVCTASR

SEQ ID NO: 63012 - protein, 389 aa, Bacillus sp.
MGGVKSMIVHKAYKFRIYPNKKQEILIGKTIGCSRFVFNHFLAKWNKIYNETGKGLTYNACSAELPQLKKEFAWLKEVDSIAIQSSLKNLADAFTRFFQKQNKAPRFKSKRNKVQSYTTKYTNGNIAISGNKIKLPKLGYIKFAKSRDVKGRILSATVRRNPSGKYFVSILAETEIQELPKTGSAVGVDVGLKDFAILSTGEVISNPKWYRTLEKKLANAQRILSRRKESAIKRNCKLNEARNYQKQRRKVARIHEKITNARTDYLHKISTYIIKNHDVVGIEDLQVSNMVKNHKLAKAIQEVSWSQFRAMLEYKAEWYGKEVIAVSKTFASSQLCSSCGYQNQDVKNLNVREWDCPSCGTHHHRDINAGKNLKNEALKLLTAGTAGLA

SEQ ID NO: 63013 - protein, 370 aa, Methanohalophilus sp.
MLKAYKYRMYPTKQQEEMFSKHFGCVRVIYNWALEQKIKTYEQDGKAISRFTLNKTIPTLYEDRKWLKEVNSQSLRGATLNLDNAFTKFFREKKGFPKFKSKKNPVQSFSVPQHYEVDFDGNKVKLPKIGWIKTKLHRCFEGYLKTATISKTPSGKYFISILVGNEKNLPDKQDFDENSTVGIDVGIKDFAIMSNGEKIDNPKHLNNSIKCLKVLQKRLSRKQKGSKNREKARQEISKLHEKIANQRNDFQHKLTSRLISENQAIALETLNVSGMLKNHKLAQSISDVSWSSFVTKLEYKAEWYGKSILRIGQFEPSSKICNVCGYHNKNITLADRKWQCPDCGETHDRDVNAAVNIKKFALNKQNLVGI

SEQ ID NO: 63014 - protein, 355 aa, unknown
  TnpB Polypeptide
MLLTYKFRIKDSATKRHLRRYAWACNQVWNYCNQIQREAEGRWKAGRVAKWPSAFDLIKLCTGCAADLGLHSDTVQTICREYAAKRDASRGHLRWRASGGPKRSLGWVPFISRAIKIEGDSVRYLKRNFRFWKSREIGGVVKAGSFVEDARGRWYVCYQCEVADDLPTGSGEIGIDLGLKTLAVCTDGTSVPALKHYRRYEAQLAVAQRAGNKRRVRAIHAKIANARRHHLHEQSTRIARENALIVVGNVNAKKLAQTRMAKSVLDAGWSMFRNQLAYKARRHRARYVEADERNTSRTCSDCGAVSGPKGIAGLGVRLWECSACGEVHDRDLNAARNILFVGAERRPPAVEISGL

SEQ ID NO: 63015 - protein, 361 aa, unknown
  TnpB Polypeptide
MWQHIGSCRYIWNYMLNVQEQRYANNESHLSAYEMVNLLKPLKNDGEHDWLYDVSNTSLQIICRDLDKAYKSLFKGISRAPKFKSRRRSKAKFPIRTTFYLKDDKILCIEKLGKVRYKTDFDLPKGKGAVKYTNPRIENTNGKWILSFGMESESQTRELADKTMGIDLGVKDLAIAEFNGQQLTFHNINKSKTIRTLKHKQKHLQRTISRKYEANRIGKRFVKTKNIEKCEAQLRRIYARLTNIRQNYIHQTTHTLVEYLPKRIVMEDLNVQGMMKNKHLSKAIQEQCFHEFIRQIEYKSEDRGIEFIQADRFYPSSKTCSHCGSVKTNLKLKDRTYVCEECGLVIDRDYNAAVNLSKYVA

SEQ ID NO: 63016 - protein, 415 aa, Streptomyces sp.
LLIVKLVMQVRLLPTSEQAVALEATLRACNEAATWASGVAFEKNVKNNFALREHTYHQIKARWGLGAQAAQRVIKKACDAYATLKSALKAGNLGRPGSKRYRRAVEKPVAFRPQGAQPYDDRMLSWQIDQRRISIWTTAGRMRDVAFTAAPEQLATLALHRKGESDLVCRDGMWFLNATCDVPDAAPNNEPVDFLGVDLGIINIATTSDGQIMAGRELNRIRARERTLRTKLQKKNTPSARRRLKKRRRKEARRARDINHKIAKHVVVEAERTARGIALEDLTGIRERVRLRKPQRATHSSWSFAQLGQFIACKARRAGVPVVHVDPAYTSRTCAECGHIDKANRVSQARFACRSCGFVDHADRNSSRNIRAKAWVLWRRGAHSTAPAPLLEPACGAGRKRSTTASGARCASLGL

SEQ ID NO: 63017 - protein, 443 aa, Acidimicrobiaceae sp.
MSEGTLTKIHQGFSFLLDPTSTQRQLLSSHTGAARFCHNYLLGLVMENWKQNRDKKEAGEVVDQQDYVDTRHLDFQRLWYERRTEIAPWFSENASSTYNYAQVHLAQAFANFHAGRAKVPQFKSKGKCESFTVTGAAARLVDSHHVRLSRIGDLKTYESMRKLHRHLERGAARVVSATVSERRGKFYLSFTVEMSRMIPAPRPPERVIGIDLGISTLYTGATPDGEQVLHVANPRNYQRHQATLARSQRTAARRQGPRKGVAPSNRWKKANARTHKVHAEIANARKNLICETTTTLAKNFDRIIIEDLNVKGMLKNHSLAKHISDAAWGEFVRQLEYKATWYGAAVVKAHRFFPSSKTCSSCGTVKAKLPLEIRMYHCETCGLTLDRDLNAAINLAGWASNPTSAGTRSVAGCRGEVRPQRQKIVHRAQPEEASTETLTLVRA

SEQ ID NO: 63018 - protein, 496 aa, unknown
  TnpB Polypeptide
VKKFQPQPGFVVQAFRFALDPNTAQEHALRSHCGAARAAYNWAVGWVTASWWQRKAEASYGIPEAELTQWRPWSLPSLRKAFNAAKHADPRFAGWWEDNSKEAYNTGLANAAAAFDNYAKSKNGKRKGKRLGTPRFKSKRTARVACRFTTGTIRVEVDGRHVTLPRLGTIRVHEPTAKLLGRVQAKTVRILSATVRHERGRWLVAFQVETARDIQRVARPGTAVGIDLGVKTLAVMADSTAEIREVPNPRHLDGALKLLRRASRTVSRRQGPDRRTGRKASKRWEKANARRNKVHHRVANLRADALHKLTTAVTAEYGTVVAEDLNVAGMLRNRRLARRIADAGFGEIRRQLTYKTKRNGCRIVAADRWFPSSKTCSGCGAVKAKLPLHVRTYQCDACGLVIARDDNAARNLAALAAACTTGTGVAGDQDTVKVSKPRGADQKTRATRPSRKAGAGRAGGATLPHQRQTETGDRTQAEALTLWRCDGPSGPKCPDG

SEQ ID NO: 63019 - protein, 542 aa, Streptomyces sp.
VAGLRLVAAPFMVPGPSGIAIRTRLKGLTGGDEKVLGLVGDHLGALASRDLKARCAAGPEHDSDSWAERKRALTTESSSRWAGSVTKASHDQWALARRGLLAHIHSLQAGVRTIAHRLSLPLAEKGTKHAPGGYRSRREWFAKSRRLRVLEDRLQAAQADWQAGLVRVVRGGKRLLNTRHHLQAAQLTEEQWRSRWRAERRFLQADGESGKRYGNETIRVTPDGEVSLKLPAPLAYLANAPHGRYVLAAQVSFAHRGGQWADRVSANRAVAYRIHEDTGRGRWYLTAAWTLPPVQTIPLEAARARGVVGVDTNADHLAAWRLDEHGNPLGEPLRFGYDLTGTASHRDAQVRHALIRLLHFARRHGLAIAVEDLDFASEKTREKHGRRRRFRKLISGMPVARLRARLVSMAAELGIPVIAVDPAYTSRWGAQHWQKPLTATSRKPTRHDAAAVAIGRRALGHPIRRRTAPPRTHQSDGCGHRTVQARPGSPGREGHRPRIPGPRTRSVPPGRAANAVDQNAQHRPGRSAEHETWQQDSLALSP

SEQ ID NO: 63020 - protein, 303 aa, unknown
  TnpB Polypeptide
MRRSTRTQDDETWRVAVIPVRLSGADHRRAHEACHKAALLWNFLLTETRAYWDEHGSDPSDKELRHRLYEKQPDLRDGLHAHTIQGVLDGMNDAVATYRENRRQGNMDAHAPHRAKNYRPLDFTAGYGWRPANDGKHIALSFGRNHKRILVRMPNISDPKTNAPVPVERWGAMRLCWDRNKRQWSLHVSVPTSRPPQGDPSNVAAIDEGIINPMAVAVKTDDAYEILVVNGRHARAVKHYRNTRIASLQEKLSRCVKGSKRWRKLDAKRRRIEAKTSDAYVTPTIRPPARSPTSFRNTMRGES

SEQ ID NO: 63021 - protein, 156 aa, unknown
  TnpB Polypeptide
VAREQRKLSKCEKGSNNQARQRKTVAKLHKKISNQRKDFLHKQSRQITNAYDAVVVENLNMNDMSMALRFGKSVHDNGWGMFIRFLQYKLTEAGKQLVKVDKWFPSSKTCCVCGKKKEELALSERVYICECGNIMDRDQNAAINIRQEGIRILGIA

SEQ ID NO: 63022 - protein, 371 aa, Methanosarcina sp.
MLKAYKYRIYPNQKQTEMIKIHFGACRFVYNWALEQKIKTYEQTKKSISRFDLQHILVHEVKPSNEWLKEANSQALLASLVNVESAFTKFFREKSGFPNFKSKKNPVQSYQMPQHYSVDFEKQIIKLPKIGEVKTILHRRFEGKLKTATISRSSTGKYYISILVDNENDIPNKQNFSESTTIGIDVGIKDFAVLSNGEKVENPKYLKNSLKRMKVLQKRVSRKVKGSKNRNKAIQHLSKIHETISNQRNNFQHQLSFRLISENQAVALETLNVKGMVKNHCLAQSISDASWSSFVTKLEYKAQWFGKTILRIGRFEPSSKLCNVCGYYNSNLTLDVREWTCPDCKTKHDRDINAAINIKKFSLQDQNLIVI

SEQ ID NO: 63023 - protein, 317 aa, Cyanobacteria sp.
  misc_feature (241)..(316): Xaa can be any naturally occurring amino acid
VLHKAVKVRLYPTSEQQQLLAQHFGCARWWWNYALNKSIETYKETGKSLGQSALNAFLPQLKKEANTAWLSDCYSQVLQAVTLNLTTAYKNFFAGRARFPRFKSKHGKQSIQYPQSVKVIGNTLKLPGKVGVVKAKIHRAIVGTIKTVTVSLEPSGKYFASILTVSEAGGQRPTVDSDNPETSTEGKVIGIDLGLTHFAITSDGTGKISKYDNPRHFAKHEKNLKRKQQKLSKKQKGSKSXXXXXXXXXXXXXXXXXXXXXXXXXXXXXXXXXXXXXXXXXXXXXXXXXXXXXXXXXXXXXXXXXXXXXXXXXXXXI

SEQ ID NO: 63024 - protein, 241 aa, Cyanobacteria sp.
  misc_feature (241)..(241): Xaa can be any naturally occurring amino acid
VLHKAVKVRLYPTSEQQQLLAQHFGCARWWWNYALNKSIETYKETGKSLGQSALNAFLPQLKKEANTAWLSDCYSQVLQAVTLNLTTAYKNFFAGRARFPRFKSKHGKQSIQYPQSVKVIGNTLKLPGKVGVVKAKIHRAIVGTIKTVTVSLEPSGKYFASILTVSEAGGQRPTVDSDNPETSTEGKVIGIDLGLTHFAITSDGTGKISKYDNPRHFAKHEKNLKRKQQKLSKKQKGSKSX

SEQ ID NO: 63025 - protein, 433 aa, Fusobacterium sp.
MIVKRTVKFNIKKSHTDYKYIKTQLIESKEIYNFANYILRQFYFKNSKNHKYSLNFIEEYPTLKDLFLSYIDKNKQFTTLFYKIICEFAKLKKYSINLKIVQNIVDKLKNDWTSYWKLLKMKISKTYDKQVSIPRYKKKYNLVEYNNQVISKKKLKLGYVGTDKMSMGIKIAKRHKDLGCKCFRIYHKNDKFICELIYEKEVKQVEKNDRVASIDIGLENLFTLAFNYNKKGILIKGNKLKTINQYFNKIKANLQSLLPQKRYGSKRINLLLFKRAEQLRNYIGYYANKLIELLREEKISKLVVGYNKGWKQEINIGKVNNQNFVNIAFRKILDILKYKLEDNGIEYIEQEESYTSKASYLDNDNIPMYKENDDTDYIFSGKRVKRGIYKSKNGKIINADLNGALNILKKAGIKLIEPLEYLRFDNIFTSKLV

SEQ ID NO: 63026 - protein, 372 aa, Cyanobacteria sp.
MEQVLTLVVKLDTSTEQSSQLRETALAFANACSWINKNVEPKLANRNSVQAVCYSDVKKQFGLTANHVVRAGAKVAANRQTAKQTGSKIKNYKPTSFDGDQRTFSLREKDWTVSVSTTRKRLRLPLKASNYHRGKLTGRKPTSAQICEHRDGCWYAHMQLTSTPPAPMETENVIGVDFGRREIAKTSHKQGWDGYNLQQKRDKYSRRHPSLPKKASQGTRSTRRRCRQILKRLSGREKRFQNWVNHNISSVIIEQAKQTRSLIAMENLTGIRESTNQQPRNKQEKRRSNNWAFHQLRLFVEYKAIKEGVEVVAIPPAYTSKTCHKCKHLGVRSNKNFKCSNPECGWKGDADFNGAQVIKLWGCTVNQPRGSW

SEQ ID NO: 63027 - protein, 435 aa, Chloroflexi sp.
MKQMLTAKLKLHPAASQFQALRTAQLAYRDALNYVSRYSFAHGKKSNQQWLQQETYADVRASYHLPAQMACNVSRQVGATYKTLWTKVKQNNVARKAGHTKKRYKGLDQPPKYVSPTLTYNYHRDYSLKPENQVSILTLAGRVVVSYTGYEKHIALMRDVAHIGAAKLWYDKPRKQFYLLVTLELEVAEPTPETYQQVVGVDVGQRYLAVTAQLDHGTTFYCGKQTRAKADHYARLRKRLQHKGTRSATRRLVVISGRERRLKQASNHLISRRIVEAHPHSIIGLEDLTNIRERTKRKRGRRATKKQRTANRHASAWAFAELHDYLAYKALLAGSMAIKVDAYLTSQACPRCGHTCPDNRPNKGLLFVCQSCHYRLHADLIGARNVALRTLLTRQDWMSTGVLSVRPDVSSEEAKAARRQRYAELRWSPDTSPQL

SEQ ID NO: 63028 - protein, 359 aa, unknown
  TnpB Polypeptide
MYHAKTLKLRIKDKHARVLSAMAREVNTVWNFCNETSHRAIRERSKWLSAYDLQKLTAGYSKCEGVQIGSATAQLVCEEYALRRRQFKRAKLRWRVSNPKSSKYSLGWIPFKVGGAKYKAGQIVFAGHKLSLWDSYGLADHELRAGSFSEDSRGRWYLNVAVKVQTKASSATAAVGIDLGLKEAAVASDGQRIVGRFYRKLEADLGLAQRAGKKRRVRAIHAKISNQRKDMLHKFSSTLVKDNAAIFVGDVASGKLFKTRMAKSTLDAGWSMLKTMLEYKSHQAGIVFEVVNESYTTQTCSCCGSIPASSPKGRAGLRIRGWTCSDCGAVHDRDVNAARNILAAGHRRLAEGITVSSGR

SEQ ID NO: 63029 - protein, 406 aa, Filamentous sp.
MIVLEFKLKGKTEQYRIIDDMIRTAQFVRNKTLRHWVDNQGIKLVDLYKQCAVVAKEFEWAGKLNSTARQASAERAIFAIQRFFANCKAKKPGKKGYPQFKKYTRSVEYKKSGWALSSDKRCLTFKDGFAAGKFKLIGSRDLYFYAPDEIKRIRVVRRADGYYAQFCINIERKEEPVSTGKIIGIDVGLNHFYTDSDGETVPNPRYLRQSEKALKRLQKRVSRKKKGSQSRKKAINKLGRKHLKVSRQRKDFAIKTALCVVKSNDFVAYEDLQVRNMVKNHKLAKSISDAAWSQFAQWLEYFGKVYSKTVIAVPPQYTSQECSNCGDIVKKTLSTRTHICGCGTILDRDHNAGRNILAKGLKARAGINLNTVGHTGIHARGQYRSLLAGGDINEQIDWLIQESPRL

SEQ ID NO: 63030 - protein, 254 aa, Desulfurococcus sp.
LFSYNPNNIIAVDVNENNVTLAVFKNRALYEVYRVETSLGKMVIAYSERRRRIAEGRSTKDRGVRRALRRLRERKRKTDIIYKVARFIEELAYINSAVVVVGNVRKGKRRLAGKAGSGSLRHRIHQWSVSKLVEVLDNKPIYVVEVSEAYSSSRDPFSGGPIENYTPSVIRVVVRGARRVKVAKITLRLARLSNGLTLDRDVVGTVNIGLKHLSTDGSPVALGSTGSHEVRVKLVNPHRGPTPPAVLLIGFNYF

SEQ ID NO: 63031 - protein, 428 aa, Desulfurococcus sp.
LSKLSKTLKRTVVLEGWTNSAGRRALREVFEAYRTMLQEMVEYAVERNASQVTLHRIFYHKFREEYPWLPTRVIKGCYRDAVRRARSFLRLKKRGLARSDKPVVKNITVAYSDLQDWRLGSGVVELRTHNGWILIHYRGHKQLRRYLYSGWSLSSELRVKLDGKRVLLYLTFKKDFEVSYNPNNVIAVDVNENNVTLAVFKNRALYEVYRVETSLGKMVIAYSERRRRIAEGRSTKDRGVRGALRRLRERGRKMDIIYKVARFIEGLAYANSAVVVVGDVRKGKRRLASRAGSGSLRHRIHQWSISKLVEVLDNKPIHVVEVSEAYSSSRDPFSGEPIENCTPSVIRAAVRGRRVKVAKITLRLAGLSNGLTLDRDVIGAINIGLKHLSTDGSPVALGSTGSHEVRVKLVNPHQGSTPPTELKVIETN

SEQ ID NO: 63032 - protein, 329 aa, unknown
  TnpB Polypeptide
LGKSLTYYDQANQLQAIRQECPDVATVNYSMLQAVCRRAHRSFEGFFRRLKAGRKAGYPRFKGRDRWDSITFLSYGDGCKLTDKRLYVQGIGQLKVKLHRPVEGAIKTVTLRRKAAHWYVCLSCEVEAAPLPATGQSVGIDMGLTHFLTTDTGAAVENPRPLKKAQRKLRVAQRALARCKRGSVRRATVKRRVAALHEKVANTRKDFHHKTAHALVQQNDTICHEDLAVQNMVQNHTLARAISDAAWRQFIVILTSKAEEAGRRVIAVDPRGTSQTCVCGAPVPKTLADRWHDCPACGLSLPRDRMSAMLVKRQRHCRQATTTPVGVVV

SEQ ID NO: 63033 - protein, 498 aa, unknown
  TnpB Polypeptide
LAGSGYGRFGATCCCHRGGGSDRRPGARRPGNPHLGLRASGWASVGQETSPASMGGNGMQVKQAFRFELDPNREARIALAKHVGAARFAYNWGLARCLEAQARGERIPSAVDLHKDWNEWKRKHAPWWVEVSKCAPQEAFRDLERAVRNWREGRAGFPRFKRKKALADNKARLTGSIRVTPRHVQLPRIGKVRTKERTDKLLELLRSGKARILSATISREADRWFVSLTCEVERPDPEPREVRGPEDVVGIDVGLEAFAVLSDGTRIEAPKPLEKALRLLKRRSKQLSRKQKKTVVEQDPETGEERRRTVFSRNYEKAVLRLARLHRRVRNIRRDFLHKVTTELAKAKPVLVVEDLNVGGLARNGSLSRAIQDVGWGAFRRMLEYKCAWYGVVLLIAPRDFPSTRMCSRCGWVGPALPLSQRVFRCEACGLEVDRDLNAALNLRRYGLAALKGPTGSSPGSDACGDPSGGGTGKARSTSHGSMKQEAARHEFHPRRVK

SEQ ID NO: 63034 - protein, 256 aa, Haloactinospora sp.
VKVAATTSHGEFHDRQFATTGEKTRYLRLQRTLARQKKNSTNRITTRAAMNRITTRAVDRRADFCAQTASRLAREHGTIVLEDLNTSGMTASARGTTEKPGTRVSQKAGLNRAILDKGWHRLETALRNAARYTGTTVTKVNPAYTSQTCHQCQHTDPASRESQAGFRCTRCGHSCHADVNAAMNILSAAGHAVPACGDLADRRSAKQEPEGTREEVPLQPALPLVGIPRHWALAVGRKSIFPRRLNPARRYTRLPL

SEQ ID NO: 63035 - protein, 516 aa, unknown
  TnpB Polypeptide
MKARSNTLEHYQSNEDMTLMAISEHKEQPRPSVIAESQAINKKTICKDKLTICINDFLNAKLSKTLDLESILKEKVYYPFFNEQTKELSSRLYLPTKTDCAGSDSILLNGLLKTAVDKSWFSTKLISHQKQNSPKTSLQFYMSSPAECMALEVIKTKLLRISPTKEQKKLFKTWTDCSRYVFNQTIDYIKTCIGFNPSWMGIKKDMLKQLPAWCKPVPFQIKGIAIKEACNAFWKAKGKPAFRTRKNPEQSCFIPKSALSLKGIYSKISGKGLYFQETLPDNFKDSRLIWRHEKWWMAVPHKEKLIVGENQATKIVSLDPGIRSFITFYSPDHSGHLGKGDFSRIQRLCSHLDNLVSKRDLIKNKQRRRSLTKASRRMRAKIKNLITELHHKTAKFLTDNFDIILLPTFETKDMSNKTGRKICRKSVRSMLTFSHYKFKQFLKWKAFQTGKLIVDCCEAYTSKTHPQTGEIRNIGGAKWIKLSDGSRADRDIIGARGIMLRALSDSTMRNHTVNES

SEQ ID NO: 63036 - protein, 490 aa, Mycobacterium sp.
VCASGWRARGWGPLQAGTGGAPSGRAAGCALMAMFDVPEGWCVQAFRFTLDPTEEQARALARHFGARRKAYNWAVATLKADIEAWQTAGVEAAKPSVRVLRKRWNTVKDEVCVNAETGAVWWPECSKEAYAAGIKGAVDAYWNWRSSRAGRRAGKRVGFPRFKRKGRDHDRVSFSTGAMRVEPDRRHVTLPVIGTIRTHENTRRIERLIRAGRARVLAICVRRNGTRLDASVRVLVQRPQHPRVALSGSRVGVDVGVRRLATVATADGVVIERVENPRPLEVALRDLRRLCRARSRCTKGSRQYRERTTELSRLHRRVNDVRTHHLHVLTTRLAKTHGWIVVEGLDAAGMVRQKGLPGARARRRGLSDAALGTPRRQLFYKTGWYGSQLVVADRWFPSSKTCHACGHVQDIGWAEHWQCDACSVSHQRDDNAAINLARWEEPSTAVGPVGAAVKRGADRKTGPCPAGGREARKGTSQPAGEQPREGVRVA

SEQ ID NO: 63037 - protein, 406 aa, Moorea sp.
MRSAYQYRLRLTKEQELKVERWLDMLRHQYNYLLADRFNWYEQNRCSVNSCPLVCHLPDLRNNPDYFYQKRTLPQLKKNRPWYGELHAHVLQDCVKRVDLAFKRFLKGDGNGKKSGRPRFKGNNRYKSFTFPSLSKNPVNGNILTLPKFGKVKMIYHRPIPEGFKIKTATITRKADGYYVTLSIQDDTVPNIIPVDSVSNPIGIDMGLKSFLIRSDGSEVPIPQYYRKAQKRLKKIQKAVSRSKKGSNNRKKVVTKLGKAHKKVADTRKDFHFKTAKGLLDNHDLIAHEKLNIKGLAKTRMAKSILDAGWGQFLSILSNKAENAGLITVAVNPRNTSQNCSKCGTKVPKKLKDRIHACPKCGYTKDRDVNAAINILNLAVGHPVSSKACRATEGIPGVGKKPALSR

SEQ ID NO: 63038 - protein, 489 aa, Bacillus sp.
MTKENPSNYKTLQIWIKKGHRMYSYFQESCHNAKNMYNTTNFYIRQVYTGLTQEKELQPLQKEVLDNIHKNIGKMNDTQLLAYQKKLEKEKLKPKEEQKEITCNLFSEPNFEKPYVDYNFLDALFKVMIQNDYRALPTQCSQSIMKGLFQNWKSFFASLKDYKKNPNKYAGTPRIPKYIRSFEKEILYTNQDCIIKNGRFLKFPKTKLQLNIGKLGFTEGKLKQVRVIPKYNEYVVELVIDVPSEQQIIEENARYMSIDLGIDNLATIVTNTGMKPVLVKGKHVKNINQYYNKMKSHFTSILRNGKQTNEGPFTSKRIEKLHQKRYLKIKDVFHKVSHRIVKLAQEEEVCKIVIGQNKSWKQETNMGKRNNQSFCHIPHSLLIQMITYKANAVGIQVVVTEESYTSKASFLDNDFIPTYGENDQNTTFSGKRIKRGIYRSANKTLINADVNAAANILRKVIPNAWTNGIEGLGVKQLANVLTPLTLIVR

SEQ ID NO: 63039 - protein, 417 aa, unknown
  TnpB Polypeptide
MEVRRTAPVKLIVPDERRDDLHESARQFLYCANRAADYCWDESSYKDCVTANTTARDALYAELREETDLTANLVQEAIRRAVQATKGVVERWKQGKRVSQPEFTSWSMLYDKRSATFYRNNVSLSTVNGRVECEYELPSDSPTPYEQYVLSEDYEFRASTLQYDKATDEFYFHITTRKAGSGGGDTVEASKDTGHQTVLGIDLGVNNLAVSSTGRFWQGDDYDHWCREFEKRRGEMQQRGTQAAHNALLRLGKREEAWRKQYIHTVANEIVSEAVKHDCDVIVFEDLTDIRERLPQAKWHHVWAFRRLFEYVSYKAPERGISVEQVEPNHTSQRCSRTDCGFTHESNRDGEQFCCLKCGYEVNADYNAAKNIGVRYARKRQHKLRSSPKSGDGDAPVDVRLNGGTLNGESHQPIAGD

SEQ ID NO: 63040 - protein, 570 aa, Bacillus sp.
MNTAKETKKTRKKNPPSEFKKMLHVIRNMHTPLHIIEVELDVLPLQHYRMKRIGEHLRVIRNTVLGELYKNYLQMARTKKYNSLLKRYRSVSAEITKNADDAKLLEYELTQLKEQLFELRNSYQVTFDFARNYGAGLREKKFHLPDAVTVWSVCEMAWKTMEKIVFSDGEKPYFYKKGDFITFQGKQAERCIILKHNKKTNDFYVSHSGMNFPLKIRQNDLFILETLSHIRNYMVNCAEIEQINVERHLAGENVLPTYRIRNNRIVRKEIRGKIRYFVQITLEGNPVSKRRKDGSFRHTLGTGRIGGDIGTQSIGIVSKDQVLLKNLAERSSETFHTERKIVNIQRYLDRSRRATNPKNYNADGTIKKGKKEWIFSKKYKKAQRKLRNLHRKAADSRKYAHNEDINRLRSAGDELIIETMNIKGLQKKSKTAAKSEKTGKWKRRKRFGKSILRRSPGYFIQQAKYRFALTAGKVTEINTWTFKASQYDHMLNTTNKKQLLKRWHVLPDGTKFQRDLYSSFLLYCSDDEGQKPDQERCQIGFENFRLLHDGCIQRIKNNRRIVLNSGIKIS

SEQ ID NO: 63041 - protein, 403 aa, Selenomonadales sp.
MRRLLKSFKTELRPTEAQKDKIRRSIGICRFLYNQYVAENIRLYRMYQRGLLDTRQKHFVTANTFDKYVNHVLKIRLPWIDQCGSKARKKSLVNAEHAFQKFFHGEARFPRFKRKSCGDVKLYFPKNNKGDWRIWRHKIMIPTLKQVCLKEYGYLPQGAQVVSGTVSYVAGRYYVSVTAKIDERSRYNNDCETSYQPFTDGIGIDLGIKSLAVTSDGKVFQNINKSPRVRALERKLRREQRRLSRKYTIRKKKGGSAATASANIAKKKLTVQKLHQRLARIRENHENQVIHEIVKQKPRFITMEDLNVKGMMKNRYLAKAVAQERFNSFLQKLQGKASVIGIELRIVDRFYPSSKRCHSCGHIHSDLKLSERIYHCPACGAEIDRDYNAALNLRDANEYRIAG

SEQ ID NO: 63042 - protein, 221 aa, Halobacteriales sp.
VYEHGVWRLHIICRVEIDARDAPGDSVAGIDLGICNLAAVSFGDEAMLYPGGALKEDEYWFQKERANCDSSASREAHRLDRKRTARRTHFLHTLSKDIVAECVERGVGTIVVGDLGGIRENENGEARNWGNHGNLDLHGWAFDRFTTMLKYKAEAEGIDIECVSEHDTSKTCSACGRSADRQRVERGLYVCDCGFVGNADCNGAENIRRKVLPNLACDGGR

SEQ ID NO: 63043 - protein, 390 aa, unknown
  TnpB Polypeptide
LPSLPISSIPITKNENIIGTKKIRIYPKDESKWFDMLSLNRRAYNLAIEFFIKNAEYTEINQIATRRLIREQCKKEFIESGRTFMGMVTDEAINAAFITFYSILKKRKNKIKCDFKFKSRKTPKQSFIIQKLSKNGIMPHLLNCFITEEKPIEAIGKMATVTFYNGRWFLNCKKLIPITKNDIQVNSNRVVSIDQGIRKFATSYSPKEVNFYGENFVNDKIIPLFKQLEVLTSQRQLILNKLKENKQWINDRLVYFKNKIFKIRNRISDLVNDLHKKICFDLVINYDYIILPKYETSNMVLKGKRKLSKIFANAMNCLSSYKFKNMLKHHCLKYGKQLLDSTEEYTSKTRSWNGIIDNKLSGKKIIKDDNIIVDRDINGARGIFLLALTR

SEQ ID NO: 63044 - protein, 327 aa, unknown
  TnpB Polypeptide
MTTVLKGIKLRLYPNKQQQAQLCQMFGNDRFVWNQMLDMAKQRYQNNPSSQFVDQYGMDVLLKPLKQEYPFLKRSDSTSLQVVNHNLYQAFQRLFKHLGGYPRFKSRRSAKQSYTGKSKIQIVANRYLKLPKIGYIKTSKTRQLTHCKIKRYTVSYDPSGRYYLSLQVETTVQPLSKTSQQVGIDVGVTNLAITSDGHKYAKFDAVWLTQQAQHWQSKYSRRRHQATVSVRQWNHNHQDVKEELNDYQNWQWARIQKARYQRQVADQRRDYLHKLTMALVTQYDVIVIEDLKVKNLQKNHHLAAAIANASWHQFRTMLGYKCDWYGK

SEQ ID NO: 63045 - protein, 537 aa, unknown
  TnpB Polypeptide
MFHSKGLTRQKYDELYDFAVLIRNHKNVVSQYVNNNLLQFLEYNKFQFMKEMRGCFMNVIPSSFDAQLYTQVFTCYQNKFDAIQRRLVFEAKSFNGFDFYKRDTKNHKKGDLKKVIIDRKQTSLTNCLTYLARYGNEETISYINSNIDKCDDKKREFYANILRCCNKFGFDRLYNLALSKREHTVKHYSEIPIEFKSLSFSGRCRKSKIIDYNSRFDSKINSFVSLSGIGRKSFDIPVVFNKGWYGNMKEYRKKTPDYEYRLTFDEKKYQVNIHLCKDGERYTPEPNGKTVGVDVNCKHNLFSLSDETTYDYNRKLANDFCKLSLEIDNLKENKSYIVGKRKQRKLVVMKSKMVKSEQQLIANMCKTLQLKGVGHIVMEDLDNSFGKCYVKDKDNEDINYNRKVKFLGLSSLKQEVEHIARKYNIAVSTVQASYTSKMCPVCGCIEDENRPNQETFECIECGYKDNADFNAAKNIRNRVLVTVLRESLLKQLDNGAFKPKKLKREKVKEVLLSFRRNLQETARGECIESSLTTFDYV

SEQ ID NO: 63046 - protein, 364 aa, Bacillus sp.
MHKTYRFRIYPDRKQRELIHKTFGCCRYVFNHFLAKRKEVYEAERKTLGHNACSALLTRLKRELDWLKEPDATALQTELRHLDDAFKRFFREKKGYPRFKSRKNPVQSYTSKNNKGTITIQGNRIRFPKLGWVRFARSREVKGRIVSATIRRNPTGKYFVSVLVETEIQPLPPSNSRIGIDLGVKDFAVLSTGEAIANPKHLYKHGQQLICWQRILSRRTKGGRRWEKARLKVARLHEKVGNCRNDFLHKLSTRLIRENQVICLEDLQVKNMQKNHHLAKSIADVSWSTFRAMLAYKADWYGRTIVLVDKTFPSSQLCSTCGYRNKEVKNLALREWTCPSCGTPHDRDINAARNILQEGLRLLA

SEQ ID NO: 63047 - protein, 474 aa, Ardenticatenales sp.
MAQTIKTHRTAIEMRPGLAEWYEATTTLYNQIVAFYFALYEAHPGLLDLNQQEALTQAERLTHCTHANPDPLWPLDETIRADIPAMLRRAAINAARGAFQSFHSRYQRWQKERATFEAKGKRFHHRPPVPPRVFHFNLPFYQGMFKARDEHSITVRLYSGTSWQWVKLRLLGEALPDEWAAGSPSIVRRRGRLCLHTPLCKTIPTPPKTLVQVAQNPQVRICAVDLNLGDALAVCTILQADGTEVATRFIRGGKALHARRRRLLGKVARKRRQSGILMAGETDNVKLWQKIRAIDESEAHRVSRRIVEFAQAHGAAILVFEHLDNLKPQQGRYSKRGNEKRAYWLKGKIVKFARYKAWEQGILTSRVSPRNTSRDCSGCGHSPVARYAAGETPLDYRPGGPLYLCSCCLKQGNADHNAALNIGFRFFQRAFRTLSESLHPKGSGVPAVNPIAWQQFAVWQDRRSGSALPAFSLA

SEQ ID NO: 63048 - protein, 364 aa, Psychrobacter sp.
MKTLKLRIRDKHAQQLNKLTGAVNFVWNYVNDLSFKHLQRTGKFFSAYDLASYTKGAGEYLNLHSQTLQAVAETHAKSRKQFKKSKLKWRTNSPKAKRRNLGWIPFKKTAIKHLATRQTGKKSLKTTIQLSLAKGKKLTIDLWDSYNLALYSINTCELVQDARGNWYACMTVKEFPTIKCGHGQVGLDLGCKDAAVSSDGNKLVIKQTQKWAAKLAIAGRAKNKKRVKAIHAKIKNTRQDLIRKFTTKLVNDNTLIVIGKLQSTSFTRAKLAKSIYDAGWFEIKRQLIYKCKHAGCHYIEVNEHYTTQTCSCCGSRQNSPKGRTGLGIREWLFECGVIHDRDINAAKNILALGLERLAVGIPSV

SEQ ID NO: 63049 - protein, 438 aa, unknown
  TnpB Polypeptide
MLEVHCTYRAIIRNHSQVADSLDRHGWSASKLWNVANYHSREVWEETGKIPDHEELKDELKSHPTYKGLHSQSSQRVLEELAEAFNSWYSSDDDRDNPPGYRKENYYDDQGRRVHEEHPRSTVTWKQNGIRHDTKNNRVRLSKGADHKEHPKAWEYILVEYETRPGVTVENLQQVRAVYDNLKERWELHFICKDKIKTPDAPGNETAGIDLGISNFAAVAYSTEEADLYPGNRLKQDGYYFPKEIANCDDSGGNTATRLHHKWSERRTHFFHSLVKHIVERCVEKGVGHINVGDLEGVRDDETGEAKNWGTHGNLDLHGWAFDRFISILEYKATVAGITVVEVSERDTSKTCCVCEKKDESQRVDRGLYVCEDCDAAFNADVNGAENIRLNINKESNSKSSTNLCEDRSTGWLAQPEVYLHDLSSGFQPQEQVVDCKP

SEQ ID NO: 63050 - protein, 468 aa, Moorea sp.
MSKKQSYWRCQQVLLSPNKDLLSIFEYIGSESNKIYNCSVYYARQIWFKAKRIVGKSELCAQMKHNPHFTAMYVSASQQVCNGVAESFKSFQKLNKLFWKGQLGYRPKPPAYRKSGLFTVSYPKRWLKLVGNKVRLPLGKQVKAWFGLSEFFIDMPSNLDWRQIREVRILPRNGVFYAEFVYKIEPEVVDLDFSKALGIDHGIDNWLTCVDTVGNSFIVDGKHIKSLNQWYNKRVATLKKGRDKNYWTKQLAAVTEKRNRQMRDGINKAARLVVNHCLKNGIGTLVFGWNQGQKHNANMGKRNNQQFVQIPTARLKQRIFQLCDQYGIKFLETEESYTSKASALDNDEIPVFGEKPAEWKPSGKRVRRGLYRTALNWYINADCNGAMNILRKVAGTIGIDLMGLSRGALTTPLRVRLWTLNESPRLMTGECQYTKTINEDADPAPIVVEANRRTAVNRIENPGAAPQG

SEQ ID NO: 63051 - protein, 397 aa, Microcoleus sp.
MITLEFKLKGKAKQYRVIDEMIRTAQFVRNKTLRYWTENQGVKLVDLYKQCAIMAKEFEWAGKLNSMARQASAERAIFAIQRFFANCKAKKPGKKGYPQFKKHTRSVEYKTSGWLLSTDKRCLTFKDGFAAGKFKLIGNRDLHFYAPDEIKRIRVVRRADGYYAQFCINVEQKEEPILTGKSIGIDVGLNHFYTDSDGKTVANPHYLRKSEKALKRLQKRISRKKKGSSNRRKAINKLGRKHLKVSRQRKDFAIKTALCVVKSSDFVAYEDLQVRNMVKNHKLAKSISDAAWSQFAQWLEYFGKVYDRTVIAVAPQYTSQDCSSCGNTVLKTLSTRTHICGCGTTLDRDHNAGRNILAKGLKQAGITLNTAGHAEINAWGQTELYSLVAASTSKSTD

SEQ ID NO: 63052 - protein, 472 aa, Nonomuraea sp.
MSGLVMTAEPREGGVALKDTASGRYLEAAARVRLAATGSVFQLRDAGGGKVARPPAAGASPSAAARWSWARRSPGSPSTYSVDAPSFRAGRKRGTAGHAGLPILSVAVGRLIGMSRYRLQPTPAQEAALLEHCGHARFVWNLSVEQHEHWKPGRKSAPGFAEQCRQLTEARAENEWLRAGSIIVQQQALKDFAQAMSNFFAGTHRRPTWRKRGQGEGFRIVAVKPGDLRRLSRNVGEVRIPKVGWVRFRWSRAIPEGVKSFRITRDRAGRWHVAFAAVPEPIPAPGTGETVGVDRGVAVSAALSTGQMLNVPGLRGTEKARLLRLLRKLARAERGSNRRGKVKAAIARLKARETDRRKDWVEKTSTGLARRFDVIAVEDLKISGMTRSARGTIAEPGRNVRQKAGLNRGILAAGWGRLVERLEHKAPGRIVKINPAYTSQRCSACGVVDPGRRARAKPTSGADPADTPAMPT

SEQ ID NO: 63053 - protein, 562 aa, Nonomuraea sp.
MAKRANKRRPRPLAAPFTVAAPSGARIRDRLRVTAEDAQVLRLLGELLGSHQRRDLARRITIGNVPARDNQRAERKRALTAVSSSRWAGAITRASEDQYQLAMRTLQAHRVSLQRAIRVITQRLAAACGHRHGRVRGYATRDERRHKQRRLQTLRARLTGVEQQIASARPAIVAGGRRLLNTRHNLHDAHLTEAQWRERWQAQRLFLTADGESGAPHGNYTITVHPDTGQISIVLPAPLRHLANAPRGRYTLSCTVTFSHRRQERLDRATANKAVRYDIACDPERGRWYLDASWAADTTVLPTPQELRASGVRVLGVDLNAGHLAACVLDGYGNPVGEPFTIPAELTGPSSQRDGRLRAAITQLIRLARTHGCAAIAVEDLGFDDARATGRETLGRGKRGKALRRTVAQIPTAKFRERIRGMAYHAGLVVLAVDPAYTSRWGGRYWTAPLQDQTKQITVTRHHGAAVAIARRGLGQRLRRRPGVTARHRRMTARRATGQAIPAPRARGAASPPRTAGTPHGGGKTRPRRSGPFALSPAPHDRSEGHRLSPVSRDPASSGQHR

SEQ ID NO: 63054 - protein, 327 aa, Nonomuraea sp.
VGVRMSFKFLLRPTGKQAAALTACLEDHRQLYNAAPEHRRTAYAKAGVTIRYGDRSSELKHIRADDPDGQARWSFSSQQATLRRLDKAFAAFFKRVRQGRTPGFPRFKGRGWFDTVEWSKDGDGCRWNSQPEHPTATSVRLQGIGHIRVHRHRPVKGRVKTISVKREGSRWYAVLACEDVPARPLQPTGRAAGVDLGVASLVTTSDGVQLANPRHLAASADRLAAAQQALAHKERGSRRRRKALVRVAALHAKVRRRRLDGAHKAALALVRDYDVIVHEDLRIANMTRSASGTVDQPGRNVAAKAGLNRSILDAGWGGVPDDPRVQG

SEQ ID NO: 63055 - protein, 402 aa, Escherichia sp.
VKRLQAFKFQLRPSGQQECEMRRFAGACRFVFNRALALQNENHEAGNKYIPYGKMASWLVEWKNATETQWLKDAPSQPLQQSLKDLERAYKNFFQKRAAFPRFKKRGQNYAFRYPQGVKLDQENSRIFLPKLGWMRYRNSRQVTGVVKNVTVSQSCGKWYISIQTENEVSTPVHPSASMVGLDAGVAKLATLSDGTVFGPVNSFQKNQKTLARLQRQLSRKVKFSNNWQKQKCKIQRLHSRIANIRRDYLHKVTTTVSKNHAMIVIEDLKVSNMSKSAAGTVSQPGRNVRAKSGLNRTILDQGWYEMRRQLEYKQLWSGGQVLAVPPAYTSQRCACCGHTAKENRLSQSKFRCQVCGYTANADVNGARNILAAGHAVLACGEMVQSGRSLKQEPTEIIQATA

SEQ ID NO: 63056 - protein, 355 aa, unknown
  TnpB Polypeptide
MRITNNPDFFSGLPMQTAQHVIRQVCTDFKGWLASLKEYRKDPSGYTGKPKMPGYCRNDTASYLFTNQDAVIYDGKLKLPRTKIRIPVRRRHGRLMEVKVKPVSGGYELLLVYQVKAASVQSGKHAAAVDFGVDNTMAVVSDTGKSVLLKGRFIKSVNQYFMKKKAERISLMSKGKETTERVWSKYLDRLSAYRTSYIRDCFHKMSRKLLVWCQRNDIGCLVLGSNVFWKQNSSIGTVNNQNFVSIPFEMLKSMIELKACEYGVTVVRNEESYTSKASFLDGDDIPVYAEGDGTKHHFSGKRIQRGLYRSSDGTVLNADINGTANILRKAGCDTSSVILTNLLNPEVFAFADLNR

SEQ ID NO: 63057 - protein, 497 aa, Acidimicrobiaceae sp.
VQTTDASQLASTVHQVEETYRMRAVLVPLDPTPAQEQLLRSYCGASRFAYNWTVAVAKSNWDARIKERREGVDGAELTKSLSWSSYSMIPLWNSVKDEIAPWHRDVTSHAFRSGVTNASLALKNFTESRKGVRKGEPVGFPTFKNRHSRQSFTLIDFGRIGSWFSEDSRHVRLILPHFATEPRITRRREQLQWIHTTESLRRLKKKVASNEWTIQAVTISYTGGRWRASFLIRQYIIPSPSCIRLRESLVGVDLGVKHLATLTVPIPGVTDEHGQIKNPCHLDAELTSLAKLDRQISRCKKGSKNRAKLRLRHQRLHGRIARTRNLHLNRLTTTLAGSFETIVLEDLDVAGMVKGSKKNTTAALRRSILDAGWGELRRQLAYKSEDRGHQVVLVSRLYPSSKRCSHCGETKAKLAVSERVFECSKCGISLDRDVNAARNIRDEGIRLLTNEATVAGHQSETLNAVSRDRETKPPWRGRGDRYQSRTTQPARNLSPLA

SEQ ID NO: 63058 - protein, 383 aa, Azotobacter sp.
MCRFAGACRFVFNKALVLQKERYERDERKLGYAGLCKQLTEWRHDPETAWLADAPVHPLQQALKDLERAYANFFAQRANFPRFKKKGQSDSFRYPDPKQIKLDQGNSRLFLPKLGWLRYRNSREVLGGVKNVTVSQSCGKWFVSIQTEREVAQPIPNGGAVGIDLGVARFATLSDGTFHAPLDSFKRHETALRKAQQAMSHKTKFSNNWKKAKARVQRIHSRIGNARRDYLHKTSTTISQNHAMVCIEDLQVRNMSRSAKGSAEQPGKRVRAKSGLNKAILDQGWFEFRRQLDYKLAWKGGWLIAVPPQNTSRTCPCCGHVSVDNRQAQARFACVGCGFEENADLVGALNVLRAGHARFACEVSGAVMPPAAGTHRGESALVG

SEQ ID NO: 63059 - protein, 472 aa, Micromonospora sp.
MKVTRIAYSTALNRGKYAGLVEQARRLGRVRSQVWQRYGSIHGVGSGLRDRQVRDRWLADGTHLQFGLLANAWKETVRDAMADIAANMEAAKVEVRRAICRRTKDLGERKRMFTALKADQWASDPFLARQMRKHWKRGRNRTHDQIVVRADNYNTVVDGRGRLWLAVPGLEPRKMVKIPLSTTVAPRGTLRLILRGERVEVHYQIDASQMRSSQRPCGEATVGVDKGYTEALTDSDGAPYGEQLGLLLASESDRLKVRNRRRAKLRSIANAAALRGDHPKAHRIKVNNLGAVKRDRQAARHRVRVRTEIFTAVHEVVDKAGTVVAEDLTKRFTGRKKLPKNINRRLAAWTKGVTAEALKSVSERRGSALVPVNAAYTSQTCHRCGDFGRRSGDRFHCTRCGVVWQADVNAAINILHRAGDPDIALHTPHQRVKQILQDRTDRHRTRLPVQDSSPALAERRANYPNRSAMSNE

SEQ ID NO: 63060 - protein, 361 aa, unknown
  TnpB Polypeptide
MDQVLLDLLRRINAASTYTALIAKSTGTFNGYKLRALVYNDLKTNYLLGASMAGTAALRAAKAYANKKQRGRTVRFDKKSAIPLDRNTFTYKKNNIVSIWTPAGRLKIPFHCYKEVPLSSKIEAKLVLQDGVFYIHQPVEVEVQEQLAPTEYLGVDLGIKNIAVTSDGTVYSGALLNSLRRRNLRLRRKLQKKQTKSAKRLLKKRSKKEARFANDVNHCISKKIVQKAKDTLQGIAIEDLKNIRKRLGRKPKGGKQKQPKQCITVSKPQRTALSSWSFFQLRSYIEYKALVAGIPVVTVFPHYTSQRCSACGYIHKANRKTRDVFICNQCGYTACADYNAACNISYVASGGVRLSPVRGGL

SEQ ID NO: 63061 - protein, 379 aa, unknown
  TnpB Polypeptide
MLQAIKVRLYPNKMQEQEFNKILGCYRFVYNHMLARKQEAYKADKTNLSVCGLSKYFHHELRKDEQYAWLKEQNTQVMQQSIRQMLTAYDKFFKEHKGFPKLKSKKDKQSALFPIGAISKRNTFETRHITLVKSLKNIKFRCSDLYLNRLRRYKDNIRSATLSKTKSGNFFLSILMDIPQNEFVKFKKTNKQAGIDLGVKDFVITSDGKVFENKHFYKKDEKKLAKLQRQLSKKKIDSNNRNKQRIKVAKLFERITNKKENYIHYVVNKLLTSYDTIYMEDLNVSGMLRNHKLANAIGEVGFFKFKEILKGKALVNDKKVVLIDRFYPSSKTCSCCGYKNKGLKLSDRNWQCPECGEVHDRDLNAARNILREGKRINVA

SEQ ID NO: 63062 - protein, 284 aa, unknown
  TnpB Polypeptide
MIAPSGLGVEIPTKQTAVRQARIAPRKGFYVFEVVYEKEVKQAEVNSEYYAGMDIGGNNLVALTSNKPKFPSVSINGRPVKSINQFYNKRRAELQKQLGHTGTTKRMERMTNTRNRRIEHYMHTASKRVVDLLVKEGIGTLVIGKNDGWKQEANMGKRNNQQFVQIPHARLVAMLTYKAELVGIRVKVTEESYTSKASLLDLDPLPVRQSGDETKHTFSGKRVKRGLYRASDGREINADINGAGNTIRKVAPDAFGTEGVEDLAVHPVRLVVPRTKETKTKRVQ

SEQ ID NO: 63063 - protein, 383 aa, Psychrobacter sp.
MTKQILKAYKVRLYPAIDQQVFFAKSFGCVRFIWNKMLSDKIEHYKETKTQLKNTPAQYKNEYEWLKEVDSLALANVQQNLRGAYNKFFKGGFGFPKFKKKGQRDSYTTNNQKGTVAVTHNTVKLPKIGHIPAKFPNKINGLIKSATISKTPSGKYYVSLLVETVVDEIVKTDSNIGIDLGLTDFIVLSDGSKVANPKFLSKLQHKLAREQKILARRRVVANAQQRKLSDSRNYQKQRIKVAKIYEQITNSRTDFLHKLSFNLIKNHDVIAIEDLNVKGMVKHKKLSKAISDSSWSTFTAMLAYKAEWYGKTLVKIDRWYPSSKTCSNCGHLLTKAELPLSLRSWDCPSCLQTNDRDINASINILNEGLKLVTLKTVGATELA

SEQ ID NO: 63064 - protein, 382 aa, Sulfobacillus sp.
LYLTQSNHVKGLTKREYEALRETCRYAKNLYNVGLYSIRQYVFAEGRFLCCESTYQAVKANANDALLQAGVSQQILKVVDRAFRSFFTLLKNAKQGEYRFRDVRIPHYRDKNAYFPLILSTNAIVIKDGYLLVLMSREFQRLHPDLERIKILFPSRLEGKAVKEVRILPREKARFSNVQFVYEAEEEPQPHLSADKALAMDLGLDNLATCVNSTDGSSFILDGKHLKSINQQYNLRMAKLQSMLDQQRLPRSEQMARITMHRNNQVRDYMRKSARYIVDYCVNHESGAIVAGYNPAWKHDVKLGKRNNQNFAQIPHGQLRNQVKNLCERYGIQYLEQEESYTSKASFLDHDPIPCWDATRQDHAFRGQRVKRGCTATATTVC

SEQ ID NO: 63065 - protein, 411 aa, unknown
  TnpB Polypeptide
MLVKGVVFRLASDLPPEASSLLEEFRLAVNKAIRASLDARVSSRNGISKLLYRTFREEHPSMYAKHLVSSFEVAAGILKNYRKRLRNGRPCGMPFVKRLMMKAENQAYKLDRTEGIVDLPIRAGCRVKLRLVVSRYHRSYLNDETLSLGSLTVLPDRVIIAFRKEAPRPIAASSVLSLDTNERSLDGIFVEGGRKGDTSCIQVKAAFPEVAIIQQRHHERRRRLQKKKAHDRRLTRVLCGREGAREHHRIDYRLHHVANGVLEFAEDHKSAIVLEDLGNMRMNKNKILNRRLSLWPRRKLHQIIEYKAAWKGILVIKVDPRYSSKRCPACGRIPDSRMGTEFACECGWRMDRHINASMNLLQTAISKGLEVAGGLRFSPGAFQHDVVMTLYEPAMAARSELNGTSHIGVTS

SEQ ID NO: 63066 - protein, 283 aa, Cenarchaeum sp.
IREHVPDRVCTGVHAGIDMGSKHTLIVGKSDGSIAMLTLREKDTLRNIARIQTKMSRCKLHSHKWCSLHAQLQLVYKKMENKQKDKLRKFAKKLFAQCDRIIMEGMNLRTMTTKGPGQKNKNRMIRQSKCGEARSHMAQQALQHNTEYVEIDQKYTSQRCCMCGNTNTWRDGSRFRCHDCGVLMHADVNAAFNILFTFRTIQWSKRAQAVYALYNKAGMVLRGKIHLATLTILSVVGDVMAGTGCPKDGHQTPANKGCLLGDPLNGGSPPTFAARQAGNLRDV

SEQ ID NO: 63067 - protein, 423 aa, unknown
  TnpB Polypeptide
MTEITLVTSSLLYKDKNEQLYNYFEGIAPLFTFLVRRTIHHLKHDLNGENLSQYRTRLKQEYNLTNRFAKAVIATAKSTLKLTNTAGEYLHSTYADKIKKVNAKIIKTKAILNNPKTKNSRIKNLKTKLFWLEMKKNKLTQRYNNGPKPMLTFGTKKLLKSDKSKFLEKRDNQIVYIGDKNEHLGNQQFKLFYDKRRNKFTYKIRVENQYIKDSKYIYGGFVVKDNIAKKEILKTLKSPKSNPLSFRIIRKNNRLFLQIMYRTGSEPKTRSSNGVIGVDFNKRFIAVSEIDETGKLLNVDRVNYIHKGKVGVTKNSMHHLVKDLVNLAIQSGKDIVIEDLKSLNKNKIEKTERKHHNRMINTFKFGRFRDFLQTKCDKLGVGLSLVNPYNTSKIASNKYCYSMKLNIHSGASYVIARRFYNLD

SEQ ID NO: 63068 - protein, 473 aa, unknown
  TnpB Polypeptide
MLAWLMKRTNTFAVRPLSEAGEQLLRDLLDASAALWNEINYQRLMRYNDEDGFEGDVWDADTGALEGKYKDVLGASTAQTVRRANSEAWRGFFENKKKFHDKSNTSVTEHPEPPGFRGNEDDGRVLKGVVRKDAYTVEWGDRSRLEMVVGKQLRDKHNSPKSRLRLEIVGDPNWPDYEDQGRLELWYDETDEVFRASQPVTVSDDTRNTPLASETAALDIGANNLVACTTTTGEKYLYEGRKLFQRFRDTTREIARLQSKLGDGRYSSKRIRRLYRKRTRRRDHAQEALCRDLIERLYQEGVDTVYIGGLTDVLETHWSVETNAKTHNFWAFKKFTERLACTAEEYGISIEVRSEAWTSKECPQCGSTDRTNRHQDTLTCLCGFEGHADLTASETFLERQTGQTVRPMARPVSSEITDFRDAENAQRFPARFEWDDHQWSGKSHPHDSPKEQRTDPSTVHRDGNVASGDSQAV

SEQ ID NO: 63069 - protein, 382 aa, unknown
  TnpB Polypeptide
MVSQMNFRYRIYPSQKQIVKLNKTISDCCFIYNKLLEAKVNAYKTDKTNLSQFDLNKLTKDFDVPIHSQVKQNISKRINDAFQHFFRRVKQKKGKVGFPRFKNINRYKSITFPQSGFKFISDKRIFVSKIGNIPIILHRVPKGKLKTFCIKKTALGWFAIFSCADIPIEQIEVKDNHIGIDVGIKSFAVLSDGTKIENPKFLRKSEKKLSKLQRRLSRKKKGSANRRKARFKVARLHQRIFNQRQDFLHKTSFSLIKQFKIISVEKLQIKNMVQNHYLAKSIADASWGCFFQMLSYKVEKTGGQLIKVNPENTSRTCSKCGNIKDMLLASRKFKCLKCGFVCHRDLNSAILVDRAGLVQISSSEENACGDTVRPSSEKARVD

SEQ ID NO: 63070 - protein, 341 aa, unknown
  TnpB Polypeptide
MILTIKIKHNTDLTSELEKAKKIALYALKTKSRSSKDVRHFGLKSAISNQILKKYSSNKKIKAINEVKLTVPNQSIKIDDKKLIIPCLKIIIPMDFFRYNFEKINQIELDKTYAYVTGEVKEPESTKQDKYIGVDLNTTGHCAVIGIPHTGKVIKLGKKALHIHTKYKNIRRKLQNLKKYRKLNQIKRRESNIVRDLNHKISKKIVLTAKENNCSIKLENLKGIRNTKKQAQSFKYSLSSWSYFQLLNFILYKAKKFGVVVGLVAPAYTSKTCSVCGTIGIRKGKSFMCPNCGHVDHADANAAFNIAAWPLQDPLDIDRDISKGNTDVPRCRVALMSRYAA

SEQ ID NO: 63071 - protein, 341 aa, unknown; identical to SEQ ID NO: 63070
  TnpB Polypeptide

SEQ ID NO: 63072 - protein, 371 aa, unknown
  TnpB Polypeptide
MKLTLKLKLHTTPEQKEQLLAAMEAFNAACNYVSDIAFEQKTASQIKLHKLCYYEIRKRFNLSAQMAVRALGKVAESYKAEKKHHHQFKPYSAMVYDHRIWKFKLADTINIKTLTDRIDIPFSFGGYRELDLNRVRGQADLVYIDGVFYFFICVDVPEPPEIKPDDYIGVDLGIVNIATDSDAQSFAGNKVNGLRKRHHKLRKKLRAKGTRSAKRLLEKRKRKESRFAKDVNHVISKKLVEKAKRTKRGIALEDLSGIRDRIRVRKGQRRQHHSWSFFDLRQKIEYKAKLAGIPVVAVDPRYTSQMCSKCGYVSKANRPNQSTFSCKACGFSAHADINAAINIGRRAVANQPDVAFVEAKAVQLLLNWNCG

SEQ ID NO: 63073 - protein, 401 aa, Lentzea sp.
MRTAYKCRAYPAPGQAAVLNRVFGCVRLVWNKTLSERQSRYRAEGARTSYRDADRALTGWKRTRELAFLSEVSSVPLQQTLRHQHTAFVNFFAGRTRHPRFKSRVGRQSAHYTRSAFRMRDGVLTLARTNSPLRFVWSFDVNLTSLDPTMVVVSRDPDGRWYVTFTVDAATVVPADPTGRAVGVDLGLTSFLVTSDGERVANPAHLARKARSLARYQRRLARCRPGSLNRRKAKVKVARAHREVRHARADFLHRTTTRLVRSADLIAIEDLSVRNMVRNRGLARAISDAGWGEFRRQLEYKCARSGRRLVVIDRWHPSSKTCSNCGFRLAELELSTRHWTCPDCRTRHDRDLNAAKNILAAGRVVARGDSGEACGADVRRQGSSFPRSAVKQEARAVRRSP

SEQ ID NO: 63074 - protein, 295 aa, Haloquadratum sp.
MSATNDVVTPYNLPYQAKYALKSYVPKLHKTYNAKELDEEHPLRFVNRAGKFDRDSEREYEICWNIPQPGRGTNFWIPLRLNPDQQELWDGLFDDESSTKVGELRLQKHQTTWTLHVTVEYEIKDTSEIPENPTRIEFDIGESMLVTGCALQHDTPRKPLLINGKEAKRIRKEMFTTLKRLQERDASEWRIEERFSYYQNRLTDIIEKASDEPVEYANQFENPVIVMENLSYIRESLDDGKYMNRRLHAWSFARLQGRIEDRAEDAGVSVRYAHPQYTSKTCHSCKRIGYRPQQA

SEQ ID NO: 63075 - protein, 398 aa, Haloquadratum sp.
MASDDEYHRRTAITRLDGLSQNDHELLQATVEEWLDGCNIASNLAWENEHTQSGVRKVAKSTVEEDTHLGSQHSILACHEVASSIQACIERRNKDKKATQPHFTSKSITYDRRTLTVFPEKEQVSLTVLGGHSRVRADLALPNDEDGYQYQYLHNGEWEYTESTLHHRDGEWYLHLGYRKEKPEPEVGSTTQNGTVLGVDLGVNQIAVTSTARFFSAGKLNHARREFEKTRGDLQECGTQSAHRTLQQVGGREDEYVKNALHSVANGIVREALEYDCDGIIFEKLDEIRDDLPYADWHSTWAFRKLKRFVEYKAEEEGVFVDTVNPKNTSKRCNECGSVRDDNRHRDEFECQRCGNQNHADYNAAKNIAELYLLRGHQPSRGRSVSQYALKSGSRTPS

SEQ ID NO: 63076 - protein, 559 aa, unknown
  TnpB Polypeptide
VIISSDTTDNRRTFDENRIAQFESDAIPQYRTVIRAIDMASLGVADVKALNDLMTAFGHQVEYFLQCFQSREYRRFCQGNRYFEWRNRLVLTQKAENAAAKAEGRAPQSIFPYNLQARQWKMALQAASDITERHFRLLQTKTMTRLRSRKVWKTLSKAEQHYVNGLFCGLSDRFFDLLDGKVPAPNPAVLEKGGVSRPRQLCDLLLEIFREVSGSEPTHGESRTVWFDTSCWTLKFEADGTQRLKLMTLVPGKRIEVRLKGRGPVKGTLMLVRNGGGFCLHVLQKLKPKKAKTSTAVSVQEAEPKQLTVRSADMGMTEVYTDDEGRQYGTELGRILRAYAEVQDRKLRERNRCQALANTTSDLVKRRHIRKFNLGTQKWNENRRRYQAQIESCVNQALNQMLRDGKPDAFIVEAFGSVFRMDGISAKVKNRLSRWVRGLIDERLIFKAAAYGVRIAKVPAAYSSQCCPTCGYVHWQNRNGDKFRCLHCGHEGHSDQVGALNLLARMQDTFFERWAGKKAIERHLREKYEEGCRQRGEVPSPAPPPRNQARTAKVLRTPL

SEQ ID NO: 63077 - protein, 600 aa, unknown
  TnpB Polypeptide
MITLQCKLAFDTPQDKQAVLNLMRNFSACTRYAYNRLLEGWNRKELKKHLQTLFPLNSRYCDDAILKANQLLKACKERKQNPKKVIFGGRKLFEKLKKKHLSGKRREKLKRKWKEKRQGTVYARGDKTKKGNLNERLVLKDGHLHLRINTGKGGYVYGKVCRKVQRGRILKDKWVDLIIRLLSEESFAYTVELKEREGEIYAFISYEEKQPVTIITREWGVIGIDTNASPFHLAYAEIDREGNLKSYGRISLEGLIEKDKNKREYLCWQIAHAIVRLAQEKGKAIVIEELKGLPRGRRGDGLKKLRKRLHRFIYKGLLQKIEILAKREGIEIIKVNPAFTSVIGQLKYSPQYGLDKDTAAAYVIGRRGMGFKEEIPKNYLKLLTAKEFLDYSLYRLEEERQRLKEELKRENNQWKRNGIKRVLRKINGEIREVKRQIKLLQSAEGESASRHQAAGRNKSVRGLFKERQKSWRVLRAVLVFPLLGKLFVRDFSPLKGLLVSGVWERRALGLVPAPGAGAMDGQKPPGGAGHPEEADNKYPTQTPRIALMCSSVNQVIINESRLSYCRRRFGRLCLSRKNCYSTWPKSTYRRKKKSHWWKLL

SEQ ID NO: 63078 - protein, 519 aa, unknown
  TnpB Polypeptide
MSNGYRFRAYPDDKVAGVLLRWIGCQRFIKNAKVREDRYYRAFQRRFAAFAGQHAPIDQAYSHLIGDGNAGAATFAEGGDAPRHEADTTWLREVPSHVLRNGAVRFYQGYQRFFKGLARRPTITTRHGEQSVWLTSELFSFKPEADADGVVTGYVLIIGTKKFPCGELPFVVHKGCEDWTPPASIHVSVNAGRWHVSFSNDAADSPTPSAQEVLDHLRQLTEAELLERAVGVDRGVAVPLMAAGATGTVHSDGHAFDLLPVQRERLAKKQRRRARWQRIAARRVKGSQNRRKANQRAARAGLYAADVRTDFAHQASRALVDSSAQLFVFEALQVKNMTRSAAGTAAEPGKKVAQKRGLNRSILASAWGEAKLFTKYKALAAGKLCIEVPAHHSSQECSACGHTHADNRLDQSRFVCQRCEHAENADVNAARVIARRGAKAVASGSYSLRERKKVGSLRGNAQADPTSSTESENIGQELSEFTSVETVVSRPALTRRSLASSKQKLPGANQETPTTALRA

SEQ ID NO: 63079 - protein, 327 aa, unknown
  TnpB Polypeptide
MHTVQLLLKTSKYERHEIDRRFHALAHLHNVCVKHARKCMIRLQHDKRYAELRQLYNELVKKEKMSKEEKLQKKKLAKQLAACRTEQGLSKASLEHYLKVCGKQFSKLLSSQQVQAEADRVWCGVERCLFGNGKELHFKKLMDFDTIGGKSNKNGARFDLDAMYVNWLGLSLKCYLPKSENSLSYVWESLKGKISYCNIKRLMFSSGWRYYAEIVVSGAAPTRVLIGTSTMGIDPGVSTIAGVSEDACVLEELAPNAIQYEKKIQKISQRMDRSRRISNPNKYNEDGTINRSNRDPWKYSKNYVKMCRLLKSLYRKKHAYIVDSHKE

SEQ ID NO: 63080 - protein, 384 aa, Tolypothrix sp.
MKRTVSIPVDLPAERLLPLMNQCAEIFNAHVDWAIANSTYNKNKAHNELYHLLRVQYPSVPSALLQTVRDNALEAIKATKFKSFPKKKPTSGLRYDKRTMTLRGKQLTLSCIGKRVTLILDVPDYFKEVFETWEFCGATVTYTKNTNQFWVRLVFETEDPQQIEGQIQGIDRGLYHQAVTSNGQFFSSSKIRKVQRRYLYNRRKLQQKGTRSAKRRLKAMSGREKRFMKDTNHCVSKKLANQPGIAVFVLEDLSSIRTQRRGKKMNKWLGSWAFYQQEQFLTYKAEALGKRVVHQDPRYTSQKCNICKHIRRTNRHKSRFHCKNCGHRTHADLNAAKNVRDDYILSSTQRKVGAEVSSDLNFAREGTEEQASVNMPYVSADSFG

SEQ ID NO: 63081 - protein, 106 aa, Bacillus sp.
LQRQVSPKYKRNKEGNRFIKTGNIIKVEKKIQHLHKRLTNIRTNYLHQVTKDIVKTKPYQIVMETLNIKGMMKNKHLSCLTLLQNNAYMNLSAKFNIKAKNTVWNG

SEQ ID NO: 63082 - protein, 474 aa, Acidimicrobiaceae sp.
MTTPISHTGQLLSRAVTFQFALDPNAQQRILLAKCAGARRFTVNRHLARVKVNLDARSAERESLGEGGDSSEPSTPSLSWAAFSFINEFNAWKNGESEDSPVNDDGTRGLAWRHELPGDVFECASVDAARALENFSASRRGERSGTSVGFPRFQARGKVTPSFRLRNRATPGRAPSNQSIRFTDHAHLRLPRFGPVKLFGPTRKVRRMIDAGRFHVYSATLTQRAGRWTVSLTGVATELHQAERSRTSRHAVPVGVDRGIISLCVAADANGVPFESFEGVKILREAQRTLKATNQTLARTTPGSQGRQRAKSRLAKTHRKVASTRRHLVHQASRALVTRAQVLVIEDLNVAGMVRNRHLARSISDAAMGELSRQLLYKARWHGVEVRVVDRYFPSSKTCSGCGAVRNDLDLSTRTYSCGACGLVIDRDLNAAINLARWRPKAPPSSLYSLIPQGSAPRSTREEPIVTRTTITAA

SEQ ID NO: 63083 - protein, 139 aa, Rhodococcus sp.
MQSMTLIRENRAVYVEDLCVAGLVRTRLAKSVHVAGWGMFTRLSEEKAARYGRHFSKVDRWFPSSPMCSVCGRVDGKKSLSVREWTCLCGAVHDRDLNAARNILAAGRAERRNACGETASLPAWWGARLDETGTHRGGV

SEQ ID NO: 63084 - protein, 419 aa, unknown
  TnpB Polypeptide
MPKKQLPETYIRCSKITTKFANQSKQDMVKKFLDSYKQLVQDFVDILWEMRNDSIPSKLGAEITSIPQTWLSARIRQCAAKQARGIVVGTVKKAKEREAMIKKLIDEKKYKKARVLQSKHDKKKVSKPVLKTIFAELDERFVKVDIEPTNSFDGWVVIGSIGLKKPIKIPFKRTIHFNEMYEKGFLKNGVRLGYKNMDFNFEFVTPKKNEGGVIGVDIGKVNIFSFSDGVQIVKDSHGHTFDSIINKLAKKKKGSKGYKRVAAHRDNFTNWALNQVNWGGIKELRKENIKHIFKGKKVSRSLMGWNYRSVLDKVEQRCQKEGVLSVDVNPAYTSQRCSECGWVQKANRVSQSLFCCKQCNYTANADINAARNIGVPLAFVGHNVKSKWLNLKGFYLDEVALGQERIVPDNPKKRNNRDK

SEQ ID NO: 63085 - protein, 392 aa, unknown
  TnpB Polypeptide
MNLSYKYRLYPTDEQRETLDRILWIHRGLYNDALTERRLAWEKSRKSINYTAQAGQLKAIRQFDADAAWLNYSSIQQTLRRLDKAYAAFFRRVKAGETPGYPRYKGRRRFNSVRYVYGDGLHLRDGRLYVQHVGSIRLFRHRPLPEGAVIRQAVIKRDGLGNWCVVFQLELPDPEPLPGPLEAVGLDMGLLSFVALSTGEEVDNPRWFRAGEERLAVLQKRRARCKRGSRQYRELSRLIRQHHERVRNRRLDFQHKLSRALVDAYPVIVTEVLNIKGLARSHVAKSIGDAGWAQFLAFLDYKAAKAGGWRIAVDARNTSQVCPACGCFVEKSLSVRVHDCPHCGYVVSRDVASAQVILIRGLARMEPGRKVFPARLARRVSASGRVAGSSPL

SEQ ID NO: 63086 - protein, 196 aa, unknown
  TnpB Polypeptide
MVKAIKVMLIPNNIQKTKMFQYAGASRFAYNWALAREIENYEKGGKFISDAELRKEFTKLRHSDEYAWLLGISNNVTKQAIKDACTAYKNFFKGLQKFPRFKSKKRSMPKFYQDNIKIQFSNTHVKFEGFSSSRKRNKQKLNWVRLAEHGCIPTDAKYMNPRISFDGLNWWISVCVEFPDCIEKLNDDGIGIDLMV

SEQ ID NO: 63087 - protein, 332 aa, Microbispora sp.
MTRTGRAGGRSPPSRPPCDGWTRRSRRSSAGSRQARSPASRVLRGAGGSTRSSGPRTATAAGGIPSPSTHVRPTSACRGVGHVRVHQHRPVQGRVKTIGIKREGSRWYVVLSCDDVPAELLPATGAAAGIDMGVASLVTTSDGEPLANPRHLEASAGRLASAQRDLARKKRGSKRRRKTVARVAALHARVRRQRLDGAHKAALALVRAYDVIVHEDLRIANMTRSASGTIDNPGRNVAQKSGLNRSILDAGWGVFLRVLAHKAESAGRELIAVNPANTSRTCSRCGHCAKENRLNQAGFRCQACGHSAHADVNAAVNILRAGLALRDAAEAA

SEQ ID NO: 63088 - protein, 431 aa, unknown
  TnpB Polypeptide
LYNRANYILRQYATAIRDFECFKPLTANQMSVFQLIRSVTRETKYEPSTKWMTYGSLDYVLKQTKDAAYYGIFSQANQQILKLLLRDYKSFFNALKTYKNNSSLFNGRPRMPKYKKENALSTAILTNQICKIQNAHFLKMPGTKTKLNLGLSACDDKLKEVRIKKHANVFVIDVVLEYADSANIVDDRTDKQVIDSFKERKDFGELRVLGIDPGLNNFCSVTNNCKLEPMLINGRTLKSLNHYYNKRLAKLKKEAMLCNQQYSTKRMERLHYKRNCKMKDKLHKISRYVANYAKDNNIDLVIIGHNTMQKQEINLGHVNNQHFVQIPFLVFANMLRYKLEEYGIRLVMTEESYTSKADFLALDEMPVYQKDQNPNLSFSGTRVKRGLYKHGDGTYSNADINGAANTIRKVFPNVSEWDRGIVNIPYAVTVA

SEQ ID NO: 63089 - protein, 390 aa, Oceanobacillus sp.
MKVKKAFRFRIYPNKKQITFIHKTIGCSRFVYNYFTGKQKEKDRYWHTVNEMVQNGQLLQHNWKGEFFNKNKAIKAVPELKKAHPFLKEVDSIALQKAVENVNDSYTRYYKKQNKAPRFKSKKNPVQSYTTKHVNGNIAVLDKHIKLPKLGLVRFAKSREVEGRIINATIRRNPSGKYFVSIVVETEVRHYEKTGSSVGIDVGITDFATLSNGTVYANPKFFRTLEKKLAKAQVILSRRQIGSANWQKQKRNIAKIHEKIANKRKDMLDKISTEIVKNHDIIGIEDLSVINMLKNHNLAKSISDVSWSAFQTMLEYKAAWYGKQVVTVAKNYPSSQLCSNCGHQNPDVKNLALRAWTCDSCQCHHQRDINASRNLRKEALRITAGTAGVA

SEQ ID NO: 63090 - protein, 527 aa, Oceanobacillus sp.
LGKNDRKKSVFLFGKPTKNKLERLIETEQAYTNLMNRFIKEMANDSKYYLDLMNNNKQAPKIRALEKSVRHTHQLGSAYGQNAIDQAVSLLHNHFMQIKNNLYGYIFHHDKGIIPYVSFISLLNASVQDENELAVLRALQQSTKNKQAAKTYENAYMILSRLTEEQRTSKREYIRALFYDKLDHWKLPFVHKATLQLDSRVSKIEKSHSTTEDFVVSLKLLNEKKYVEIPVSTSENSLRRLNQYKNGSMTAKVVNGKVKIGIPFTKKVNKRAQEELLGIDQGITDLFYTSNHTKYGSFSGMVHVYEGSLEKKLGNRSSLRNKLRAYQKQLKKTDNQFEKELLRKKIKHIADNLNGKKSLQKERRRYHAVVDYEISQAVKRLFEEITTNSYLPIFEDLDIVKFDRGKKANKRDSFWIRGKLMRKITAKLDWHGYHYKTVDPAYTSKMCGKCHHVDEDNRKGKTFTCTVCKYKADADYNASVVIKNRALDTEITAIVEKYKNNTKKRHKELRELLYKRHCSYMKKVQFV

SEQ ID NO: 63091 - protein, 222 aa, Microcystis sp.
MLTEKDFYDYFAEETISIGFVSTQKPEEPRIYPTNQQKRLLSQLFGCVRVVWNNTLAYCQELYRQGEKKPKYTELSKRLTQIKKTEEKNWLTEVSSIPLQQSLRDLETAYSNFFASCKGERKGNKVKPPKFKKRKSKQSARFTDNGFTVNQHHVTLAKIGDLKVVWSRPLSVISYQLSVIRFELSVSSYQLSVIRFEFSVSSIKWQVRSFLFTDYWLLITDY

SEQ ID NO: 63092 - protein, 413 aa, unknown
  TnpB Polypeptide
LQLVEQHIIKSNNPFFKECDNICFKSKNLYNSCLYNIRQEYINNKINIINNLYHIMKNTDEYKSLPRKVSSSVLLMVQKNFKSFFNSLKEYNKNLNKFKNRPHLPKYLDKIDGRYMVSYTNQAISKKIFKKVNKIKLSQSNIEFKTKINDFNIIDCIRIVPKIGYYVIEIVYTIKEKGLLNDNNQYLSIDIGLNNLATLTSNKINFDPIIINGKPLKNINQYYNKKRSDLQSILKIRNNKNNSNKLNLLTLKRKNKIDNYLHKASKNIINICNENNINTIIIGKNDNWKQDINIGKTNNQNFVNIPHSRFIEIIKYKCEISGIKFITIEESYTSKASFLDLDKIPNYSKNNKTNYNFNGKRISRGLYKTNKGIIINADVNGSYNILRKAIPKVFSNGVEGVRVHPKIIKILKG

SEQ ID NO: 63093 - protein, 442 aa, unknown
  TnpB Polypeptide
MLKAIKIRIYPNIDQIIYINKLLGSCRFIYNNLLAYKIEEYNKNKYSVSWGELGKYLTNLKQKEEYSWLNEMHSKVIAQSLIDLNSAYYNFFIKKTGFPKFKSKKDNKQSCRFPYNGISKKAFKGNRITLIKKLKNIHFKCSIKDEKYLNKNRKNIKSATLTKTKSNKYFLSILIDKEITKILPKSINDIIGIDLGIKDFIIDSNGNKFENIKIKKNNEKKLKRLHKQLSRKVKGSKNKNKARIKLAKAYEKLNNKKENYLHQVTNKLLNENQVIVMEDLSISNMLKNHKLAKSIQELSLYEFKRKLIYKANWYGRQIIEINKFYPSSKLCNCCNYKNNDIELNDRTWTCPNCNTIHDRDINAAVNILNEGKRILNIKENKLNNKIRLSSPEFKLVDYPTMDDKIEISLKSSDRKKQEKNVINKKFYRTINFRTRRTNENIK

SEQ ID NO: 63094 - protein, 388 aa, Streptomyces sp.
VIHVKIVVQVKLVPDAAQASAVGATLHTVNDRANWVSGVAFARGVPREYELRKHTYAELKAAGLGAQAAQHTIKKVVDAYTTLRANLRAGNLGKPGSKRRKKAESKPVAFRPEAAHPFDDRCLSWQYDAQTVSIWTTAGRLKNVRFACSPDALKTLREYRKGESDLIERDGVFYLIAVCEVPEAEQYEPGQFIGVDLGIANIATTSTGYRAAGRGLNRHRKRQLDLRKKLQAKGTKSARRRLKNRRRKEARHAGHVNHIIAKQIVTEAERTSSGVALEDLGGIRQRVRLRKPQRVTLHSWAFHQLGQFVEYKARRAGVPLVYVDPAYTSQECAECHHIEKKNRVDQALFICRKCGVVAHADRNASHNIAARGEAVWIAGRESRVPAPS

SEQ ID NO: 63095 - protein, 395 aa, Streptomyces sp.
VTVKRAFTYRFYPADAQAAELSRTFGCVRKVYNMALATRTQAWARQERVNYNQTSAMLTAWKKTAELAYLNEVSSVPLQQALRHVQVAFNNFFGKRAKYPRFKSRKKSRKSAEYTTSAFRFRDGNLTLAKMAQTLDIVWLRPLPEGAQPSTVTVSQDAAGRWFVSLLCEDAGVKPLAATDTAVGIDVGLDHLLTLSTGEKIANPRHERLDRARLAKAQRHLARKAKGEGANRAKARRKVAKIYARITDRRRDHLHKLTTRLVRENQTLVIEDLTVRNMVKNRKLARAISDAAWADFRSMLEYKAAWYGREVIAVDRFFPSSKLCSHCGALAEKMPLSVRTWTCDCGTTHDRDVNAAKNLLAAGRAVAPCGAGVRPQRRTPGGQSAMKQEVSRREP

SEQ ID NO: 63096 - protein, 463 aa, Streptomyces sp.
VPRGSRRWRNRNRRTRRCPRGRRPTRRRGAAVRPPRRGGHADVRAVTRHSRPVERCGRRTKRSGRSSVASVDTPPFRAERNRTPAEQGRERRFAAGADRRSPPTTPRESHVDVVFCEVMAIHVKRAFKYRFCPTDAQAAELSRTFGCVRKVYNMALAARTEAWARRERVNYIQSSAMLTAWKKTGELAFLNEVSKMAGSLEIVWFRPLPEGSVPTTVTVSRDEAGRWFVSMLCGDPTVKPLAATDAAVGIDVGLDHLLALSTGEKIANPWHERRDRDRDRARLAKAQRNCARKEKGFVNREKARRKVARIHARITDRRRDGLHKLTTRLVRENQTLVIEDLTVRNMVRNRKLARAISDAAWAEFRSLLEYKAAWYGRDVVVVDRFFPSSELCSHCGALQDGMPLNVRTWTCDCGSVHDRDMNAAKSLLVAGPAVSVCGAGVRPQRRTPGGQSATKQKIPRREP

SEQ ID NO: 63097 - protein, 657 aa, Streptomyces sp.
VSRKLPLAVGETSRTACARGLLRRGEDEATGELLSAAVLAERVGWAADLVSGMAASLLAARWNTSDVAVLASGEDAGGRKLPSNAWMALRRLGWTVGPDEGIRVNDRIIRMAQEQAGRTLRSAKWRADLTAGVLATWPADPVNRTSEEWDLVREAVPGGRYMPSSVIKGRTRQIAAFERQYGRLPTDVFELEAGPRIARMLLLSACDGQQATIERHETVPGRALLRLQLPTRPDPRSYKDWTWVACRISLPPTIPAGAVLHLPTLRATGGQVRADLAYTHAVPRAARAGHTVALGVDWGLNTLLSAGAARLHNDGTITALGAGGMFRAAGILAQQHRLRRHSELLHAKAERYQRLIGQDGQHALIGKHAVLAGELRAVSARRSNLGGSLAWAAARWAVDQAVASGASVIYLEDLRSMEARGMGRTMNTRLSQAVRGQITDRIRRLAAEVGITVVMVPARNTSRRCPQCLTPLRHRKAPDRPTTPGWKWAFCHSCGWQGDRDMGAWKRIAARGLTHQSKTVTDRTTGAMAIRSVIDTLEAKAVIRPAALKTSRKDRSKTGPTRGHTTRPAPRRRRAPSPTRPLGPAGKRPEGHAHTDRTRLPRAAHRHQDVTTISTPTTGHRPRGAALGAGFHLHAHSTPPQWADPPPDSMSDRGSLS

SEQ ID NO: 63098 - protein, 276 aa, Streptomyces sp.
VSGAEPAGSGKKKRRGFEARPGFYVVGHRLALGPDAFALQALASHCGAARGAYNWAVRHVLASWSQRAAEETCGVPEAERVPWRSWSLPSLRKAFNEAKHTDPFLAEYGTVVVEDLNVKGMVRNRRLSRRISDAAFGELRRQLTYKTQRHGGRVIVADRWMPSSKTCSRCGVVKAKLSLGVRVFECDACGLVLERDANAGHNLAALAAAGGKTGTGVAGDPGPLVVVPKPRGAKQKTRTARTRKGTGTRAAGPTPRQGTETRDRRQDTRREQLALW

SEQ ID NO: 63099 - protein, 135 aa, Streptomyces sp.
LVRENQTIVIEDLTVRNMVKNRKLARAISDAAWSEFCSMLEYKAQWYGREVIAVDRWFLSSRPCSACGTLQDRMPLNVRIWTCACGTTHDRDVNAAHNLLTAGLAVTVCGADVRPQRSTPDGQSATKQKPSRREP

SEQ ID NO: 63100 - protein, 401 aa, Streptomyces sp.
VNGELVQERRRFGHRARLALAPAQVRVMDDQAHAPRTLWNLLHDWWAMLPKERRSLAAADAAIRQARKEIDWLGALPAQAVQAVLKTYFQAWKNCWDGRADEPNFKARFRAVMSVDIPQGRDLNIVRVHRRWGMVNIPKVGRVRFRWTKDLPVGKRAGTVDRITGARLVKDALGWHIAFRVQTLEAAPEPHQGPEVGIDVGVSVPLALSDGDTKPHGEWLTEKEKAKLLRLEQQAAHRKTFRGRGEKTSRRLKRIYDQIQAFRATAKRRHLDWQHQTTTAIAAKYGVIVVENLTITNMTKSAKGTVENPGKNVRQKAGPKRSISQEAWGRTVELLTYKPHATAAPCTKFPHPAPHNAAQSAGSPPRAVGSLRPCSYARTPTAAGSATPTTMRPGISCTCTG

SEQ ID NO: 63101 - protein, 422 aa, unknown
  TnpB Polypeptide
MMTKAEKIKQTLKETKERRKSLTPVVYQLKIQNLSKTKEEKLNRVFLEAKWLYNWIVANIDRVNTPTKEIKEVDVKVGDKFGKRELKYLGSQLKQAIQEKIKDNLKSLKVLKEKGHKVGRLKFKKSVSSINLKQYRVTFDIDFKRNKVRVQGLGWFRVLGLHQIPQDCEIANAQLIKKPSGYYICLTCYMKKEHFERYKVKTAIGIDFGVANKLTLSNGLTVDFEIEENKRLKKLQKKLARKKKDSKNRAKTQKKIQREYERLANKRKDIHNKLLSLFRHYEIVIFQDDSIKSWHEGWFGSQIQYSGIGMFKARLKDSLATISVDRFEATTQECHVCGYKQKLDLSNRVYCCHVCGNTINRDLNSAINILEKGLNLSHKQVVGTDHPELTPVEMALTTKILGSNPYIKVAVICEAGSSHFYK

SEQ ID NO: 63102 - protein, 213 aa, unknown
  TnpB Polypeptide
VIIENPKVFDKAERKIKALQRSLSRKKKGLRNYEKAKNKLAKIHEHAKNLMDDYVHKITSWLVEQYDEIYVEDLEVKRMVENNHNRTLRKHILHSNFYLFIHHLSYKASRAGRRVVRVDPRNTSKTCAWCGHVEENLTLANRVFVCTKCGWTVDRDYNSSLNIRYAGWGLPRAPVDRKPLLYIPFSEGVYSKFPEGSRKSPPRGGDAPSAGAG

SEQ ID NO: 63103 - protein, 438 aa, unknown
  TnpB Polypeptide
VNYWWLARGVIMEQTVTAKIQIKADKQTTYLLEQSMSVYMQACNFVAEYVDNTHQLKQIPLQKAVYEDLRNNFGLMSQMACNVPRTVIAKFKTAKTNTGKWIKPEFKKPFLALSFNRDYSITKDILSIGTLSGRVKVGFSYKGLEHYFSTLGEKPYLFGGATLFKKKNKLYLGISVTYNIPDIQIEEINNVVGIDRGIRFLATTHDSKGETKFYSGNEVKQKRAKFADVRKQLQVRQTPSARRRLKKIGNRENRWMNNVNHCLSKALVENYPEKTMFVIEDLTGIRGATEKVRRRYRYVQVSWTYYDLETKLTYKAERKGQKVIKVDAHYTSQMCPKCGHTHKLNRDHKNHCFCCRNCGYKSNDDRIGAMNIYQRGLAFIQDYLNEKNNPNNQDGQVCSDGVKSTTPRCNDSSFEKKSKKGRRPKSRNTTGQLQAHRL

SEQ ID NO: 63104 - protein, 451 aa, Moorea sp.
MGPVKTPNKVIRTDKWHLNPTPDQKALFGETVKVYRQACRYLVGIIYTHWSELGNLTADQLTPAVENLMHKTAKRPNIKYPQFNEAFYKFPSYYRRAAIAFSAGQVSSYVTRYSEWQSGKRKRRDSKPPKLNADTGCYPALYKGQCYKLHGFNEVEIKVFNGLDWVWTTVKITRLRERHACASNKMMSPSLVFNERVCHLSVPFNCKPEKRKPEANVTAVDLGINTTATIAVVTHNGTVIHREFIHPGRDIDRRDKRLKSVSMRASLTMGKGGKLHKGFCSLTYQKCRRINNQIGHVVSKRIVEIAKKFNSETIVFENLKGWKPKGGRKRSNLRQRFHGWLKAKIRDFTEMKWAELGGKVIEVVAAYTSKLAFDGSGKVKRHPKNYALATFSSGKRFNADLNGAYNIGARGVIKLTHRNGSEGRFSKSSGRPPRSWASLCDLWAAASSKLA

SEQ ID NO: 63105 - protein, 325 aa, unknown
  TnpB Polypeptide
MKANLEKGEVEVGLVWDFNGLNYRDQIDREKFEVLIPSDGSLTSGYATIINKYAKYPNAAKLTREFILSDEGQINLAEGYAKPIRTGVVLPEDVKAKLHRNFIGQIKSATISQVPSGKYYVSILVETEHVELPHINQNTGIDLGIKELCITSAGKKYENPKIIRKNEKKLEKLQRQLAHKEKKSQNYYKTKKKIALCHEKITNTRKDYLHKISHEIISENQVIVSENLQIKNMVKNHHLAKSISDVSWYELTRQLEYKAKWNGREYVKIDTFYASSQLCSVCGYQNTETKNLTVREWICPVCGTNHDRDINAAKNILEEGLRQIA

SEQ ID NO: 63106 - protein, 376 aa, unknown
  TnpB Polypeptide
MIASRAHKIKLMPTPEQQEKLRRRFLQGQAVRHLCIEWSCEMYAAWKQDPANNAYPSYEAMDKRYTKEKPEEGNLLPRCSAQRKVRDTWKAVENHIKHPDKYACPDYTKKRDVHEYTLYVNNQAAEVGTDHGKPYVHFPKLGLIRLAEEFRFKGARIMSYTFSWDCVDMYVSIQAQVEVTPMCTNDSTVGVDVGLKHIAVASDGTTLDYPKAYKKAQKRVRAEQRKLQRKVQDSNNYWKQYRRLKKAYKRKANVINDALHKYTTRLCKTHSTVVTENLSIADLIKTSEKWMRRGFALSQMKRLIQLLQYKAAIYRQVERFFASSKTCSRCGYKNNALTLADRTYVCPECGLQIDRDLNAAHNTRNFIVGSVRPDLR

SEQ ID NO: 63107 - protein, 347 aa, unknown
  TnpB Polypeptide
LAYYPIKAEFDLPSQLVIRAIAEVCSAYKTLIAQIAEHNRSCRPDQRRELTPIAFKPNLAVPYDPRVMLLNIPAKCISLRTLSKRIWFGFQVGEKRQHLLQYAKGQADLKRYGKQWFLLQTLEVPEADPVATTNHLGVDVGICTVASSTDGKQTLRFPGEPIRRVRNHHYQLRRGLQRHNTRSSRRRVRKLRDKESRTVRTYNHLVSRRIVSQAQRTNSTVVLEDLEGIRAGVKVSRSQRRERFSWAYAQLQQLIVYKAKLAGIAVLFVPPDYTSKTCSKCHFMSDQNRPTQAWFKCVHCGFCGHADDNAAMNIRFLGAASTCHKRTVWMQEYLHTDRCKPLRFSQG

SEQ ID NO: 63108 - protein, 410 aa, unknown
  TnpB Polypeptide
MLRAIKIRLYPNKTQEVYIAKLLGSYRFVYNQCLALKKQKYIESKEIYALKELGSFFHNELTKSEEYSWLQEHNTKVLKQSIMTLMEAYKRFFVNGNGFPKFKSKHDSQHSCRFPLEAISKRNDYSTFKLTLTSDLKNVKFACSDKYSNYLIKHKENIKSATLTKTKSGNYFLSILVDGDLMKELPKPINDIIGIDLGVKNFIVDSKGNEYENIKIKRNNEKKLAKLHKELSRKEKGSKNRDKARIKLARFYEKLTNKKQEYLHHITNQLLNENQVIAIENLNVKGMIQNHHLAKSIQELSLYDFKTKLIYKAQWYDRYIVEVDRYFPSSKLCSNCGYKNVDLTLKDREWICPECGTKHDRDLNAAINIEKEGLKIFNNKIPIRCGELTPLETSQETVDELGNRDLRNFA

SEQ ID NO: 63109 - protein, 353 aa, unknown
  TnpB Polypeptide
MKQTKTLKVRVRDKHIPLLNEMARSVNFVWNYINELSERAIRERGVFLSAYDLHPYTKGAQKELGLHSQTLQVIAKEYVTRRKQFKKRKLAWRKSGGVRRSLGWIPINTGMAQWKNGQVYHNGHYFKVWDSYDLSQYRFKTASFSEDARGRWYFNVSVEVEVEIPTGQDRIGIDLGLKDTATCSDGTKLEAGRFYRDQEAKLAVAQRARNKKRVKAIHAKIANRRKDALHKFSRALVGRCGVIIVGDVSPTKLTKTRMAKSVLDTGWGLLKTMLEYKCDHAGIVFKVVGEQYTTQTCSDCGALPDSRPRGIAGLGIREWTCSACGVTHDRDINAARNILALGHERPVVGIPVF

SEQ ID NO: 63110 - protein, 550 aa, Methylobacterium sp.
MIEEYENQTILDQKQIVIRRYGLLDPLDWDSDCDHEIERSNKLWNILVGIHEECAQKYYDLILKDEALNTAKSNYEKLQQNRASFTAVSEAKKQLAVTQKEVTKRMASELRDLELARREAVKVARQNSGVWWGNYNPLVRAFEKARSAALRGGHAMRRRAPGGNSRITNTLQGGADVEHLFDGSLSQVMIRSPSGRAWSAESRGERRRLQRTRLTATVFVQAGERRSVTWPMVMHRPIPDDCRVKEVIITRRRVGERWKWAVSFLCTRVMGSPPTPPAGAKPIAVDFGWRRIPDGLRVATVSSVDGQPRFVVLQRDLLDAFAFADELRDRVQTSGRVGLELLQTTDATLFEEPYQNLLIALQSRQEGRFTALREFCRGPFFTEQSRDAIGAEIATWRKEYMKLVTWLGNHQRKVVARRNHQYQNAAIEILEGASNIIINDIKFGEIGRRSARSEEASFFPRRANYYRVVAAPSELVRCLKLQAAKRGIQFSKEAAPSPAGCPECGSTARKSRADAMPQSCEACGTRFDQDVATCKSLLAQVGRKPRANQS

SEQ ID NO: 63111 - protein, 410 aa, unknown
  TnpB Polypeptide
MRGAAYNSAMAINRGYKFRLYATEEQEALFGQYAGVCRLVYNLALEQRRDWWRQHERNGLGRITFASQCRELTMLRAEFDWIAAVPNTMQVQALRDLDRAFSNFFSGRSGFPTPRKRGVNDAFRSQGKYCSWRKLNAKWAVVKLPKIGEVKFRLTRDIPGAIKNVTVTHDALGWHVVFSTEVEHEAPDNFGPAIGVDRGVVHTLALSDGTFRDMPRERLNVLDRRARKQARKLAKCKRGSTRRNAARKALASTKAKMARVRLHWNHERTTEIARTHGIVVLEALKTKSMTASAAGTVEEPGRNVRQKAGLNRAILNNAWFQFETLLAYKLAERGAELRKVNPAFTSQTCSCCGTIDKQSRENQATFHCGHCGHLASADTNAARNILRAGIQPAPRPSAEKPLKREPMEVV

SEQ ID NO: 63112 - protein, 349 aa, unknown
  TnpB Polypeptide
  misc_feature (66)..(66): Xaa can be any naturally occurring amino acid
LFGCQQVLIKADKETRAIIEYLCRESNSLYNCSVYYARQIWLKTGKIVTGFALTKEMKFNPHFKAXYASSMQQTCLNVGESFKSFKKLLKKSIKGELNQKPNVPKYRKSGGLFTVTYPKKWLKLIEGKIRFPLGEQVRAWFGLTEFFLPFPVNLKWELIKEVRIVPRNTCLYAEFVYQQIHCELKEGQSLPTHLDSTKVLGIDHGLNNWLTCVSNIETSFIIDGKHLKSVNQWYNKQIATLKEGKPKGFWSRTLAHVTEKRNQQMRDAVNKAARIVINHCLIHGIGTIVFGWNQGQKNESNMGAKNNQKFVQIPTAKLKERIAQLGEQYDIKFVETEESYTFKSFFFGQ

SEQ ID NO: 63113 - protein, 399 aa, unknown
  TnpB Polypeptide
MLSATKVRIYPSADQADKLARAFGCARWYWNNSLNETQKVYQETGKGLGQYALNARLPGLKAEHEWLAETHSQVLQSVSLHMSRAFVGFFERRTQYPRFKSKSGKQSIQYPQGVKVVEGRKLYLPKIGHVKATIHRDLVGTIKTVTISLNQAGHYFASILTENGLEAPAVSFDGKVLGVDVGLTHLAITSSGSKFDNPRHVLRAEKNLARKQQKLSRKTKGSKTREKARRLVAKAHEKTANTRKDWLHKVSHRLVNENQVIAVEDLHVKGMMKNHCLAKSIGDAGWGMLSGFLEYKTARAGKGFIRVNRFFPSSKTCSYCMHVQDKMPLNIRSWTCDKCSTTHDRDINAAQNIRAEAIRMIAAGIAGTANGGSVSQERGRKSSVLQGPLKLEASSFRAE

SEQ ID NO: 63114 - protein, 416 aa, unknown
  TnpB Polypeptide
MIRRQAYKFRIEPTGAQRRKLQQFAGMTRFVFNKALAIQKENHEAGGKYIQYVPMAKLLTAWRNGDETPWLKDAPVHPLQHALKHLDRAYKNFFEKRASFPTFKKRGRSDSFRFPDGKQIKLDQQQEKIFLPKLGWLDYRRSRKVQGLVKSVTVSQKSGHWYVSIQTERKVAEPCHPAATVVGIDLGVVRFATLWDGQKETVIWLLSSFKRHEVRLAKAQRQMCRKTKFSNNWKRAKARVQRIHAQIANTRNDFLHKTSNAISKSHAMIVIEDLQVKNMSRSASGSPAEPGRNVRAKSGLNKSILDQGWGEFGRQLDYKTDWKGGWLVAVPPANTSRECPACGHISAENRKSQSVFICVACGHTDNADLVASKNIRGRGLNSPKVRTIGRIACEVSGVVMPPAAGTHRSEQPTHVD

SEQ ID NO: 63115 - protein, 138 aa, unknown
  TnpB Polypeptide
MEKAYKFRLYPNKEQEMLLQKTFGSVRFVYNHYLSKRKELYIEQGVTFGYNKCSADLTQLKKLDKYSWLKEVDSTALQSSLKDLDLAFKNFFRRVKQGDKKVGYPRFKSKKFSKKSYTAKMNIHLDERHIKLPKLGLV

SEQ ID NO: 63116 - protein, 206 aa, unknown
  TnpB Polypeptide
VSVLCTDVEVEILDKTNTSIGVDLGLKTFATLSNGEIYNHPKAMNKSLKKLAKLQKQLSRKQIGSSNRNKTRVKVARLHEKIANQRNDFSHKLSTNMVRDFDVIAIENLQVKNMVKNKRLARDITDASWSEFTRQMEYKADWYGKSIVKVDTFYPSSQLCSACGYQNKEMKDLKIRRWTCPICNAIHDRDINASINILNKGLSQTA

SEQ ID NO: 63117 - protein, 442 aa, unknown
  TnpB Polypeptide
MARKQLTDTEREQIRKSLAETRERRKTQIIRIFELKVNCHQTKPETFRKFNVFFKQAKWIRNDMIALSKHNEERNIDIFDYNYLEHKNIKHFDKDKNEVYDNITLPVYLHRGMVANVKQDIVNLSKAKKKGIKIGMLKFKSECNSIPILSGGVKIIDNSHITIPGFKNLKVYGLNQILNLNNYELADARIVKKASGIYIHVSVCLNKENYKNNKLYKEVGLDFGIKDNITTSDGEKFNCNVRESEYLNYLQKQLHRKQKDSKRYWKLRNQIRKEYEHLTNKKVDATNKLIHYLIANYNTVYFQDEMIFKWKKKKHSKKNGKKCGNSFGRQVQCSYLGRVKAKLVSMEGTKSFKISKSHPTTKLCTACGCLNTLSLADRIFRCACGYAEDRDIHAAKNVKFIGTIKRTECLEQASVETLSSTVKPAMVNGKVGRRNEKEDSGF

SEQ ID NO: 63118 - protein, 414 aa, unknown
  TnpB Polypeptide
MNCNKAYRFRLKLRSRQERALARYAGCCRFLWNQLLALQKTRMDWDEWTLNFEQLCDVITNWKTCRYSWLNEPPSQALQQVARDLAKALKNAFDTKMPQAFPVFKRKLDCSDSFRIPQGFAWDVEHGTIEIPKLGRLKYISSSDWEKIEGLPTEVTISREGKHWFVSIGVEFEIDPALVHPSKTAAGIDMGVVNFATLSSGEVFKPLNSFRRTEQKLAAAQQSLSRKVKFSSNWKKQLAVVGGVHRKIAHCRHDYINKASTAISKNHAYLVMEDLPVVNMTASAAGTVEEPGVNVAAKAGLNKSILDQGWGGFRTKLINKEKWRGGKVVLVPPHGTSQECPICGHREAGNRKTRDTFCCLKCGYTDDADFVASKNILRRGTPYLPAGTILLGLQEPFRHEEPAMESLGAGISGL

SEQ ID NO: 63119 - protein, 414 aa, unknown; identical to SEQ ID NO: 63118
  TnpB Polypeptide

SEQ ID NO: 63120 - protein, 471 aa, Bacillus sp.
MTTSKERTPSFIATIRVKTDTKSEKQLLVMSDCARQLYNTCLGESLKRLKGIQSTELYKETVQLSKTSGADIEKRRANFKHLNDTYGFTDYSIQSFGTKTKNDSKFIAEHLGTHICQKIATRAFKAVQKFAFKKAKKVWFKRKGEYVSLEGKNNRTFLTYSNGYVFVGKNHSLKCLINPKDQWMQYALKQRIKYCRLIKKEVKGKNRFYVQLVLEGHPYRKYEIGKEVVGVDVGPSTIAIVGESNAELKEFCQEVVFLDKEKRRLNRKLDRQRQANNPNHYQSNGVVKKGKKKWNNSKNYIKTRSEHRELERKIKEVRKQLHGRDTNQILQLASSIQTEKLSYKAFQKMFGKSIGRKAPSMFMKMLKQKVVSQGGIFREFPTRSTKLSQTCHCGAIKKKRLKDRWHICKCGVTAQRDLYSAFLARYVAKNNRLEIKEAEHNWEQLSIVLDDCVTNLKKMKPEGKFISTFGL

SEQ ID NO: 63121 - protein, 427 aa, Escherichia sp.
MHQENTMLPRRISVSLFIDQSIIWPVKRLQAFKFQLRPGGQQEREMRRFAGACRFVFNRALALQNENHEAGNKYIPYGKMASWLVEWKNATETQWLKDSPSQPLQQSLKGLERAYKNFFQKRAAFPRFKKRGQNDAFRYPQGVKLDQENSRIFLPKLGWMRYRNSRQVTGVVKNVTVSQSCGKWYISIQTESEVSTPVHPSASMVGLDAGVAKLATLSDGTVFEPVNSFQKNQKTPARLQRQLSRKVKFSNNWQKQKRKIQRLHSCIANIRRDYLHKVTTTVSKNHAMIVIEDLKVSNMSKSAAGTVSQPGRNVRAKSGLNRSILDQGWYEMRRQLEYKQLWRGGQVLAVPPAYTSQRCAYCGHTAKENRLSQSKFRCQVCGYTANADVNGARNILAAGHAVLACGEMVQSGRSLKQEPTEMIQATA

SEQ ID NO: 63122 - protein, 168 aa, unknown
  TnpB Polypeptide
MPKFYQDNVKIQFSNTHVKFEGFSSSRKANKQKMNWVRLAEHGRIPTNAKYMNPRISFDGLNWWISVCVEFPDCRETLNDDGVGIDLGIKDLAICSDGTKYKNINKSQKVKKLEKQKRRLQRSISRSYEKNKKGESYCKTNNVIKKEKLLLKRNHRLTNIRKNYLKKE

SEQ ID NO: 63123 - protein, 400 aa, unknown
  TnpB Polypeptide
MGTSGKTQGEKKDNKPANKTKGKLMEFILPPLSHSLLQHPGCGGDPVSPHPHHRSRGRRPPIFKGERNAPYLLSDLDISPILRYTMRNPSRKRKGKKAGCPKANGVPAIRYDARSSKLWLNRQEASLSTTSGRLKFKFVIPDYFVPMLEGAEGILSIDLVSYPNGTFWLHVAVTVPRPPQKSNGHVVGVDVGISRIAVSSDGQFFNGKHTKEHARKLFRLRRALQAKGTRSAKRHLKKLRLRERRFRTDVNHRVSKQLVESLPPGSTIVMENLVDIRERVKARRKQRRELHNWSFAQFQSFVAYKAEARGVKVLFADARYTSCRCSRCGHISRSSRQSQSWFHCRECGYQLNADLNAARNLARRGMSALGGPSVNRPIVPPDEAEAHRELRPRAGASSLL

SEQ ID NO: 63124 - protein, 396 aa, unknown
  TnpB Polypeptide
LDLYTDGVILAHCVRLIPTLEQESYFRRACGVARFAYNWALVEWQRQYLEGAKPSEVALRRQLNAVKGRRFPWMLEVTKNTPQQAIKNLGRAYAYFFADLEKYRRKELPWKRVRVPRFKRKGQRDSFRADNGPDKSRPNAVLVDCARVRLPRVGWVRMREEVRFAGRILSVTVSRRADAWYASFAIEVDYEPDTRTDASLVGVDLGLESLATLSDGTKFAAPKPLRRYLKKLGRLSRRLARKRLGSRNRAKAKAKLARLHARIAAIRLDALHKLSSHLVRYAVIVIEELNVGGMLANRCLARAISDVGLSEFRRQLEYKATMAGSRLVVADRWFPSSKLCSSCYSKNESLSLSQRTWTCRSCGMTHDRDGNAAANLARYPESWAGSACGAEGAGGG

SEQ ID NO: 63125 - protein, 422 aa, unknown
  TnpB Polypeptide
MRKMSEMPYHIGLQVKIYPSDLQKHLIAVNDGAKRAVYNHLVACGNKRYRLGKAAGMVPVYRERIDYLDSVSHTVNRIKNALPFLYGKEVDEQAIANAVKNYRTAWKNQKEQHCGVPNFKKKGSEQSYQTNAHYYLNSRKELTSNVRFENAHHVTLPKLGRIRFDGSPKLVGALLDRTADTRIGTITIRRDAVGEYWASCSIASEEPFYDPLQKTGSRQGIDLNLLELVNDSDGGAAPNRRFYQSAQEVLSKAQHKLSRMGEHAKKENRSLASSKNYQKQRKTIAFLHRKVQRQRKDYLHVLSKREVENQDLIAAEDLRVTNMKKNHKLAKAVSDAGWRTFLKMLQYKGALYSKTVVLVPPNYTTQTCSVCGYVMKGEEHLTLKTREWECPNCHTIHHRDTNAAKNILARGIALLKEQGILL

SEQ ID NO: 63126 - protein, 368 aa, unknown
  TnpB Polypeptide
MKEHLRIAKDIWNELLTYSKECYQKTGKFPKKSELQAMTKRKGLYSQTQQNVAHKISDAIFRVFKMRKQNKKCGFPRFKSIDRMKSLYYPQSGFKLRNKLKVTPFSEISIKQHRNIEGQIKTLALKREPSGKWFAVFCVEQEKKEPKTNHGDKVGIDLGLRTFATLSNGNKIDNPRHLKRYEDRLASCQRLLSKKKKGSSNRNKAKLKVARIHEKISNTRSDFLHKTSTQLVNDNSFIALEKLASKEMSEKRFGKQINDVGWNMFANMLYYKAEEAGCRVVFVDPKNTTKECSNCHQIVEKALSDRIHRCPSCGLVMDRDLNAATNILNLGLRTVGQELPEVKPLREGTTAGKQTHQQVPLMNEEVTD

SEQ ID NO: 63127 - protein, 418 aa, unknown
  TnpB Polypeptide
MTVGVKHSNAITQMNFILTPQQRRPHPLGWEELRTITIYPLKTIFSAMLQTLMVKLDPSPEQHKMLCETMKRFNEACNQIAETAFAMHSANKVEIHKTVYYPVREHFGLSSQLTVRAISKVCEAYKRDKSIKPEFRLDGAIVYDQRILSWKGLEKVSLITLHGRQVIPVRFGEYQKARMDRIRGQVDLILVKGVFYLCVVVEVPEETPYDPRGVIGVDLGIKNLAVDSDGEVHSGDRILSVRAKSDALKAKLQSVGTKSAKRHLRKLSGKMARFARDTNHCISKTLITKAKDTLSLISLEDLEGIRNRTVRTVQKSQRHNHSSWSFNQLREFVTYKAAIAGVPLVYIDPAYTSQECPICHCISKSNRPTRDEFCCTCCGFSGPADNVAALNIRARVEVNLPIVARFFAQPQALPFRVG

SEQ ID NO: 63128 - protein, 447 aa, unknown
  TnpB Polypeptide
MWKILIWFSIKPQVSQTTIHQRIAIMYLTASIHVKPTHPMYALLDEYAFLCKNLFNVATYHQRQAFFSNHQTFNAFTLINQFTKEKQPDYKAIPAKIAQQIVKQVAQNFQSFWASIKSYRQDKSKFKSNPKLPKYLHKTKGRANIILTKQAVSKRDWHKGILTLSSYFDTPLSFPLGKLQDMIPYEHVQEVKVVRIANGYDIRIAYKVVEPQQKPDNQRYLSVDLGLNNLLTVAGNTECKPFIITGKPVKSVNQYYHKSKSVLQSEKDKLSGKAIPQLTNLNRRMEQLSCFRKNQIHDYLHKASRYLVNHAVSNNISKIMIGYNQNWKQEINIGKVNNQHFVSIPFARLVSMIQYKAQLHGIEVILTEESYTSKCSFLDNESLKKQDSYLGKRVKRGLFRSSSGKTINADVNGAFNILRKVIGNFKFDPIVACSTPKKINVWQITSC

SEQ ID NO: 63129 - protein, 449 aa, Anaerotruncus sp.
MQVVTSYGIHIRDHYDALKRTAEIFSDAVTYLTGVAFRNWENLSLTDSSYTRLRMMECLIHSGNGNVSSDSFDKKFHKFPSYYRRSAIMQAIGIVSAYQAALKTWEESGRKGAEPKMDSGVHHMPALYRGNTYKPVTDPDTGEVLPYVAKIKVFRNSDWVWETVRLSKTDADYLEKRGRNGEISAPVLEKKHGCWKLRFAVTETVKLSDKPVREQKICAVDLGVNTDAVCSVMNSMGTVLARRFITCGREKDSVKNALHRVSVCQSVQGSHDSGRLWNLAKRRNTNLAHQTARQIVNFAVENECDVIVMEHLDPKGRKHGSKKQKLAMWKHADIQNTAETLAHHYGIRISHVNAWGTSRLAYDGSGRVKRGREVSEDTPYDVCRFKNGKICNCDLSASYNIGARYLIRGLFMESPDLMAEVPEVGSGTTRTLSDLWKISRVLYPLSPAA

SEQ ID NO: 63130 - protein, 386 aa, Anaerotruncus sp.
MKGFKFRLEPNETQKKQIQETLDSARFVYNRFLDLNEYAYQTEGIHLSYAMMCSLLTDLKQDPEYPWLKQADSMALQTALKDLDEAFQNFFTGRAKYPKFKTKKRANKFSYRTRNQNGGIQIIDKHHVKLPKLGIVRARISRFPHGAIRNAVISLTAAGRYEVSFCVDEIAASKKSAGGEIAIDVGLAEFYTDSKGRIAENPHILAKLSRKLAKEQRRLSRMYEAAKKAGRRLSECRNYQKQRVKVAKIHERIANARTDFLQKQSTALADENQIIYAEHLNIRGMVRNHKLAKAISDVSWSAFFQMLEYKVKERNGFLIKVDTFYPSSQICHECGYKNPGVKDLKVRKWICPQCGAVHDRDQNAARNILAEGIRILNEPKTAISVV

SEQ ID NO: 63131 - protein, 498 aa, Anaerotruncus sp.
MFTVRIPIDTDKSAEAHFNKCFFYAWKSSNLMVCCAQQRMNALNSDRAYRNAREEYGRRFSGKKTEDLSKAQKRRKKELSALMQEKQKSYGLSKTDFEKYLSVQQHRYSAWLTSHQMQAIADQVWKGAESVLYGKGRSLHFKRLTDMDTIPQKDNNGIRLNGWNDLVFMKRHYALKAPDSAYLQSVRDKGARVRYCYLKRIEFSSGWKYYAVIVLEGDPPHKEKTRQGHRVGIDIGTSTVAAESEEKVMLENLAPDSIRYEKEVRHLQALLDHKMRMANPDNYADDGTVRKGKKKWHISRQANRLKKRIRVLHRKEAAYILCSHRRQINRILSSANEVIVEPVSLKAMQKRSKKTERSDRGAAINGKIIHKYKRKKRYGHSIKNHAPGRFLLELKRKAEVMDIPYYEIRTSAYKASQFHHDTGEYIPSPVNERYKIISGITVQRDLYSAFLIRHTLDTLNAPDIDACINDFEKFADISNRELAAMKAAGISNQACWGF

SEQ ID NO: 63132 - protein, 419 aa, Anaerotruncus sp.
MYLTQTNYIRHLPKNQYEAILEMCAYANNLYNVGLYQIRQHFFATHQYLRYEENYHLCKGNENYKLLQAGISQQILRICDRSFKSFFALISKKKSGVYDKQVHIPHYRAKGGKYLLVLSTNAINIRNGYLIIPMSRAFAKQHADLDAIRIPVPERIADKKICEIKILPVLNGKVLKIQYCYEQEAEPQNLNTDNALAIDVGLDNLASCVTTTGTPFIVDGRKLKSINQWYNKQLAHYASIKDHQRIKGFTACMSRITDKRNRQVTDYMHKAARYIVDFCIENDIGTLIVGHNVDQKQSVNMGKSSNQKFVQIPFDQLRTYLKCLCERYGIAYIETEESYTSKASFLDGDDIPVFDAKNPYAGAFSGKRVRRGLYRTKENTLINADINGACNIAKKGKQNLSIEGLCRGLLASPLRIRIA

SEQ ID NO: 63133 - protein, 405 aa, Planktothrix sp.
MIKVTRTIKLKFAKLNRCKAQMFEQMTEENTQIANKLLSLPIKERRKMTTAKIMSELKSALVNQVIRHTTSPTGRKTKQYKVLPVEVNNQNWKLTQKGSTYSISFPTIKGEKRIPIEVASPHWQPVLDGLLEETIQGGSFKLIKHRNKWYAYLSITEDVPEVETEKRLGCDRGQNNLAVVAPKEGFGKFFNGQSVKHRKRYFQQRRKQLQEAKKFRALKKWNKKEQRWMEAINHTVSRRIVRFAEYHNADIVIEDLEGCRKTMKQSQKSRSDSGESRHTWSYYSLEQKLNYKLALKGLKLIKRPAPYTSKSCSTCGVIGKRNRHDFNCPNGHYHNSDLNAARNLSQWDGFACDLNLKRDASVMDSSGLNYGVFGAPPNSVKNNQKEYIQLSLFDWARYENPTPLA

SEQ ID NO: 63134 - protein, 404 aa, Planktothrix sp.
MLVFEFKTYGKASQIEAVNQAIRTAQFVRNSCLRYWMDNKKIDKYDLNKYCAVLAKNFPFANELNSQARQSCAERAWSAISRFYENCKKSIPGKKGYPKFQKNCRSVEYKSTGWKLADDRKSINFTDKKNIGKLKLKGTRDLHFYQISQIKRVRLVKRADGVYVQFCVDVDRKENIKPSGNTIGLDVGLKEYYTDSNGVMVENPKFLRQGEKVLKRSQRRISRKVKGSKNRGKARQILGKRHLKISRQRKDHAVKLARCVVQSNDLIAYEDLRIKNMAKNHCLAKSINDASWYQFRIWLEYFGKVFERVTVAVNSQYTSQECSSCGEIVKKTLSTRTHICKCGCVMDRDENAARNILSRGLSTVGHTGTFMLDMSNALGESTSTQAGEILFEQVGSVNKESPHL

SEQ ID NO: 63135 - protein, 533 aa, Proteobacteria sp.
MKKAKSPSFVHSFEILPAKDEGFKNLFKTEDHGRRLYNAVLGKLRSRLKRVKSSKAWADARLIPKGSKARGLAFRTILEAEELTEYGAYDLATLLAKGSPDFKLWLGSHVIQKIGKRAYQAIERLMHGKAKRIRFKRRNDSFSFEGQNNATFLRFLFDDEGRPYVRLGKIDYSVRYNADNHYDSHALGSRVKYVRIIQKRIKKKFRIFAQLVLEGLPYQDLAKKVKHEEKLKLHFGEALQTKLDNTWDDVVSIDYGPSKIAIATARVAYEVNLRAPFEKLSQKAKASQRAMSRSLRLGNPEAFKDGGKLKKGVKLKRSKNYEKLRLIHAEEERKVSETRKSFQGNLSNEILCLGTTIKIENISYRAMQRNFGKSIGKAAPASLKGILSRKASALGGSEELINTYDTKLSQTCICGAMKKKSLSERWHSCPCGFSMQRDELSARLGVFTINSQVVAGRKKKISSRIDMKAARLHIVSEGTFAKVEQALANGQGLSDGLSPEGGAAKPLETSIKNPIRKDLEPIGIHARWEAVFS

SEQ ID NO: 63136 - protein, 334 aa, unknown
  TnpB Polypeptide
MKIQKSFKIRIYPTKVKEALLAMTFGCKRFIRNQMLAERLAFYHEYGKGIGKLRRTEKEWKEIYPFLKDVDSIALQQARIDLDTAYTNFFAGRARFPRFKSRKSPQSYRTECVSGNIRIDAPHRRIRLPKIGWISYRDDRTITGTIVNATVSKTKSGRYFASVLVSQEMEIEQEATLYEESIAAFDMSANDFLVGDTLRYENPRFYRNNETKLARLGRRVSRKVKGSANRDKARVRLARFYDRIGNQRTNWLQKISTDLADRHDAIVIEDLNIDGMKRWNGGLAKSVTLDFSWGSFAWMLEYKMAWQALDKGRSLLPVEQDMLSMRVREPGVDA

SEQ ID NO: 63137 - protein, 410 aa, unknown
  TnpB Polypeptide
VEESGTKDLNWIDVIFLMKIRGSNEKMIRTIQCPLPLDPSLVVTMQAYNEAVNVVIDAGWERKTYNKNVLHAVTYIAVREQFPNLQSSLVQCARDLASASLKLAKKKGWQCKKPVKKLMSSIRFNQRTFTPFLERGTISISTIDGRKTYPLVIPDYFKRYVFSTVNSMALKVKKDKIIAFLNIEITDPVVNDHPITFLGVDRGINNAVVASDNSFYSSNHIKNVKYKYQKLRQSLQSKGTRRCKRKLKSLAGRERRFMTGKNYQIAAWLVAKPFDCIVLENLKGIKANAKKQKKVGKQTRKKFANWAYYQLEMLVANKALETGKMVLFVNPKYTSQRCSRCGHVERSNRNGSGFTCKQCGFSIHADLNAARNISERGNAVFGRANVNGPNVARDDGTEFSLQIAVASHAL

SEQ ID NO: 63138 - protein, 298 aa, Ruminococcus sp.
MRTVFKYRLYPTAQQETLLQQTLGCTRMVYNHYLEKRIGLYRATKANFGFIKCLEDLDSYIEAQPFLADVSRSALEQTIRELDGDFKRFFSRPKRGLPKYRSKNAPTAHFTAASGAFGVENDRLVIPEIGSVKLVLHREIPEGYSVRSVTVTRVGSEWYADLFCRCNVQTRAKKDLRAVTVSFSNEHFITLDNGVSVDYPDELICAEKKLSREKRRLSNMEQNSKNRAEQRLVVTKQRRRVEDIRKDFLHKLTKELSDDYNCVTVNREPSSSAPERSLFISYLGYKLEKNGGRLCSPN

SEQ ID NO: 63139 - protein, 404 aa, Nostoc sp.
VFNLTYEFKLKPTQSQIAIFEDWLEQCRRVYNYALAERKDWIKSRSCQINACSLRSEYIIPVETPRPNYFNQCKRLTQAKKKYPELSRVAAQVLQQILKRLEKAFVAMWEHKHGFPRFKKPGRMHSFLFPQLEVNPIQKGKIKLPRIGWVKFYQSREIPDSGTVKQAHLVKRASGWYVMLIVQWDVSLPQPIPHGEAIGIDIGLTSFITTSNGIFVKRPRFFVDAERKLKLLQKRVSRKRIGSNNWKKAQKKVISLHEYIANCRKDWHRKLSHKICDDTGMVFVEDLNLVGLSRGILGKHFLDAGFGQFFNILQQTCFKRGVYFQKVDSRKTSQICPSCGVETGKKELSVRTHVCSNCGYIADRDVAAAQVVLLRGLAAVGHTVKMLAEGKFIGIPLKQESSYL

SEQ ID NO: 63140 - protein, 371 aa, unknown
  TnpB Polypeptide
MLIDTAYMYRIYPDKQQEEFFAKTFGCVRFIYNLMLEDKIKYHEETGRMIRNTPAQYKDEHPFLKETDSLALCNAQLDLEKAFKNFLTNPQQFGYPNFKSKKNHKQSYTTNNVNNNIHIDGSHIRLPKIGFVKLKYHREIIGRIKSVTVTKTPSMKYYVSILVEREKPEQLPIAERTLGIDLGLKEFLVTSEGETVENPRHLRKSEERLRKLQKDLSRSKPGSRNREKCRIKVARMHEKIRNQRYDFLQKLSTTFIRENQTICVEDLKIENMLKNHKLAKSISDASWNEFIRQLEYKADWYGREIRKIDTWFPSSQKCSVCGFINKEVKNLSVREWICPECQNHHERDINAAVNILREGIKNTTAGTAGIA

SEQ ID NO: 63141 - protein, 393 aa, unknown
  TnpB Polypeptide
MEQAFRYRFYPTPEQENLLRRTMGCARLVYNRALAARTEAWYERQQRIDYAETSSMLTNWKKQEDLQFLNEVSCVPLQQGLRHLQKAFSNFFAGRAKYPNFKKRHKGGSAEFTKSAFSWKNGKVFLAKGKEALPIQSSRPLPEGCSPSTITVKLDPRGRWHVSLLVDNPNVQPLPACAKSVGLDVGISSLLTTSDGERIANPRHFKRHRRKLKRVQRSLSRKKKGSNNRDKARVKVARAHGKIADSRKDFLHKLTTQLVRENQTIVVEDLAVKNMVRNHKLAQSISDASWSELVRQLDYKCEWYGRTLVKIDRWFPSSKRCGNCGHIVESLPLDIREWDCPKCGTHHDRDINAARNILAAGHAVAVCGANIRPDSHKVKGQLRKTSRGKKQKP

SEQ ID NO: 63142 - protein, 137 aa, Microcystis sp.
VRENQTIVVENLAVKNMVKNPKLSQAISDVSWGEITRQLAYKCRWYGRNYIEIDRWFPSSKRCSNCGYIAEKMPLNIREWDCPDCGTHHDRDVNASKNILAAGLAVSVCRATIRPEQSKSGAAGAKNPSGKKQKPKS

SEQ ID NO: 63143 - protein, 483 aa, unknown
  TnpB Polypeptide
MQDKNATKNTISLNLPLLTTLNEKECQPFWNEHCSNIQSSLWLPKKESVHKVDTSTFLMKKITSSSHSILASLSVSLPLSSIKSENDPTKDAVVIASKKIRFYPENKKAYQDALALYRRSYNLAIARYKENTYKDENGKVINLRPEIKEQVEREQREAGSAYNSLISDNGTLAAKRTFTAVCKKNKALKGSQSGFSQLHFKSRKGSRHSFSIDRFPKGKNPCVEALGKIYLTESVPNEAFGKSCIITCDKGRWFIQVQQHISLDTEIQGKVKCMAVDPGVRTFATCYSQEEVLVVGDNFAKEKLFPLMKRVDKLISQRQRLLNAIQGVKNDDLPVWASQWLTHYNNEINRLKCKKDDLVLDLHHRLAYELVKNYDVIFLPSFETKKMVSKKGNTRRRIRANTCRQMLDLNHYQFKLRLKWYARKYGKHVVDCNESYTSKTRSWDGSIDDKLGSSKTIKGDGFSVDRDINGARNILIKHLSKAA

SEQ ID NO: 63144 - protein, 395 aa, unknown
  TnpB Polypeptide
MLISYKYRAYPGATTEARLNAALDTCRWLYNTLLEECTTARETGITPTMRGMQARIVTLKEENPFLKGVYSKVLQMVNYTLWSNIAALSQTKKRGRKTGKLRFKSAFRYRTLNYNQSGFKIDREHSRITFSKIGTISFTMHRPYRGKVKGILITRSGDRWCVTIQAEQTASASKREGRSVGIDVGLGSFAVDSDGTVIENPRFYEHSLNRIRKLHQSIARKKRFSQNWKKAKSRLEKVYEHITNQKNDFLHKLSRQYVDTYATICVENLNIKYLKENGKSRGLRRSIHSASWGRFFSYLSYKAESAGTNFIQIDPRDTTQLCANCGSVVKKDLSVRVHECPYCGFVADRDYNAAVNIHRVGMEQPFEPVEPRPLHHVSVVQVLAMKQEAPPFKAG

SEQ ID NO: 63145 - protein, 345 aa, unknown
  TnpB Polypeptide
MEQALEICRWVYNETLALRKNTWEQEQCSLSLYETNKILTHWKQERPELKQVFSQVLQNCQVRVDLAFKAFFRRVRAGDDPGYPRFKGGGRYDSFTYPQYGFKLDGERLHLSKIGNLQVVLHRPIEGRIKTCTIRRSSTGKWYACFSVEYESSPAPQKETAVGIDVGLESFATLSNGEKIENPRFFRTDEKALAKAQRRLSKAEKGSPERKKARKIVARIHERIANRRLNFAHQVSRQLVNRFGTIAFEDLNITTMQKNHHLAKSIADVAWNLFITITESKAEDAGSRVILVNPRNTSQMCSRCGMIVAKTLSDRIHSCPHCGLVMDRDQNAAINIMRLGLQSQG

SEQ ID NO: 63146 - protein, 516 aa, Mycobacterium sp.
MQACLPGSDGLTTDADHPVRHIRKFELVSVEDGMLRGEMSRHTTFRFCLDPTVEQQVTLAQHAGAYRFAFNQCLAMVKTALTLRGVDATTDVPWTAFDLINAFNAWKKTEDAGRVFAVDAAGVAAVEVTGLTWRTRVCQQVFEEAAADLGRGLNSWSESRSGTRKGRSVGFPRFKKKTRTAPTFRLRNRHSKGRRPAIRIGDNGQPRSVTLPRIGQIAVHDDTRRLRRMLAKNRATICFATVTQRAGRWWLSLNVQAADLHPARRHPVRAHGDDRGWVGVDRGLSAFVVAATAEGDEVARIINAPKALAAGMKRQRRLAKSLSRKKKGSCNHRNAAARLARHHARVANVRHHFLHQVSSRLVKNHDRLVIECLNVSGMLANHCLAQAISDASWAELGRMMMYKQAWRGGELVLADRWYPSSQLCPMCGVRNTQLTLADRVFSCGCGHRADRDANAAMNLARWGRAHQQTSLEPRTPEQRGRATNARRRDGAGQQPSCAGETSPEDTGTDVHTAGRP

SEQ ID NO: 63147 - protein, 269 aa, unknown
  TnpB Polypeptide
MKIVRGYKTELDPTSEQYTLLCQCAGISRFAYNYGLARKQEAYKNGEKTPYAIGLQKELTARKHDDLPWMNDVSKWIVQNSLRDLDTAFDNFYRKCALKNIGQWKGKCGYPKFKSKHKGRGSFRLDCPITVHDKSVRLPKLGLIQLKEHEYIPTWGVKVLSATVSEKAGRWFVSVQVEEEHADPIPATGPAIGIDVGIKTLATVSTGDIFDNPKALRSRLKALKRASRKHSKKQKGSNNRKKVQRKLAKLHMRIANIRKDTLHKVTLYS

SEQ ID NO: 63148 - protein, 405 aa, unknown
  TnpB Polypeptide
MQTVHVYRLDNLSASQFSRLKAAQQEAAQVWNLCMERHKLARTEHTKWPGRNELQQATKGRFALHSQAVQMVVHAFLANVETTRELRKTHPQMKMKYPWRSKRFYPVKWPAQAVCKKKGRVVLPMGKGRQSLVLPLDLPEEAGACTLVWNRGFELHVCLEGKRAETAPGKNQATIDLGEIHLAAATTNTGEALIVTGRGIRSLKRQRHKQLGQLAKKQSRCKKHSRRWRKLQRAKNKACKRNERRIRDLRHKATRKVINFCVENQVGTLFIGNPHGVRNKNCGKHHNQRMSQWEYGKDIDYLTHKANQAHISCFTGSERGTSSRCPRCGHKHKPRNRNWVCRACGFRGHRDLVGSINMHQVAFGTQVNFPRSFTYLRPGSSRRSSRADTPHRESLFARPNLCCLV

SEQ ID NO: 63149 - protein, 402 aa, unknown
  TnpB Polypeptide
LKLTEVIQVEYSLELSKLCHLAKNLYNLANWYVRQDFFNLNNLLNYYDLDFILKNNQAYQSLPSQTSQQTLRYVNRNWKSYFNSLMEYKFNFRKFKKRPKIPRYKKKNGESVVIFTNQQCKIKHGYLHFPKRVNIKPIKTSITERIKEVRIIPLGAQYKVELVYEKEEKDLKLDKLHILSIDLGLNNLITAVNNNGCRPYIIKGGMIKSINQYYNKQLAYYRSIENKKGNYTDTKRIQKLHLTRNNKIITLFHRISKNVIKYCTLHNIGTIVIGYNHGWKQKINIGKKNNQKFVQIPFLKLVKQIEYKAKLKGIHFLTVNENYTSKCSFLDNEPIGKHETYVGKRIFRGLFKTSKGVLLNADVNGAYNIMKKAFPNAISVDGIEAFGLMPQIIHQNIVDIVI

SEQ ID NO: 63150 - protein, 443 aa, unknown
  TnpB Polypeptide
MKCLQAYKFQLKPNGEQIRSMRKYAGNARKVWNLALARQEEHHAAGEKFTNAFGMNAWLPAWKKEYQFLRESPAQTLQQVMENLAAGYTKFFKKTADHPTFKKKGKSSDSFRFSDAKQFIIDEANNRIKLPKLGWIHYRNSRDIKGSPKNITVSANAGKWYFSVQTEREAEQPHHPSTSIIGIDVGITRFATMSDATYINPLSTFRKHEIKLAKYQRRMSHIKKHSSKQFSINWKRAKARIQQIHSHIASVRRDFLHKTTTTISKNHAIVCIENLQVNMSKSAAGTSEAPGRNVKAKSGLNKSILDQGWGEFRRQITYKQAWRRGDVLAVSPHNTSRTCPACTHISGANRKTQAKFVCVNCGYENNADVVGAINILNRGMKMLEGQDTMDASIGYVCTAQIACEVNDAVRSSAAGTRRSESASLTLNAVGIPVSFRVCTAAVG

SEQ ID NO: 63151 - protein, 406 aa, Streptomyces sp.
VIRAYKFLLRPTARQVVALGEMLRDHCSLYNAALQERRDAWRHASKTTVRYGDQSAQLKDIRAFDPERQGRWSFSSQQATLRRLDKSFRAFFERVKAGRTPGYPRFKGVGHFDNVTFPKDGDGCRWDSTPHERQTRVRLQGVGHIRVHQHRPVKGRVKTVSVKREGSRWYVILACDNVPAGALPPTGAVIGIDMGVTHFLTTSEGEHETNPRFLAAMAGELAAAQRHLATFPKRTRQRTKKHRAAARKVAGLHAKVRQQRLDFHHKTARALIAENDVIAHERLNIAGMAKSPAPKPDPGNDGAFLPNGAAAKAGLNRSILEAGWGQFLAILANKAESAGRLVIPVDPRDTSRTCPPSLGGCGHVAKENRVTQAKFRCTACGFTANADHVGASNILDRAGLVLCAAA

SEQ ID NO: 63152 - protein, 365 aa, Photobacterium sp.
MTLRAYKYWFYPNADQARMLNQTFGCTRFVYNNALAYSKEQYELGNKTNFNDWSKNLTILKKNPDFVWLKDVASVPLQQSLKHLDKAFKSFFKSGFGYPKFKNKRGKQSACYVGTAFRFNRDKCEIELAKMKQPLKIKWSRSFVGIPSSVYVSKTKTGKYFISILVEEEIIQNKPTDKTVGIDLGIKSLAVCSDGVTFDNPKSTAKYAKKLAKEQRKLSKKKKGSSNFSKQRIKVAKIHEKIANVRMDFTHKMTTRLINENQVIGIESLKVKNMIKNKKLSKALSDANFGEIVRLLEYKANWYGRTVSAISQWFPSSKMCSACGCLFSGKWSLGIREWTCDCGSLNDRDINAAINIHAEGLRLIA

SEQ ID NO: 63153 - protein, 379 aa, unknown
  TnpB Polypeptide
MLRAIKVRLYPNKMQEQTLNKVLGCYRFVYNHMLARKQETYNSDKTNIGLTELSKYFHHELLRDEQYTWLKEQNTKVMKQSIRQMLTAYDKFFKEHKGFPKFKSKKNKQSASFPSDAISKTNAFDARKISLTKKLKDIKFRCSDLYFNRLQRYKDNIRSATLSKTKSGNFFLSILIDMDNNELIKFNKTSRDVGIDLGVKDFVITSNGEVFENKHFYNKDEKRLAKLQRQLSKKKKGSNNFHKQCKRIAKTFETMTNKKENYTHSVVNELLFRYDTIYMEGLNTSGMLKNHKLAKAIQEIGFFKFKTTLQNKALQNDKNVILIGRYYPSSKTCSKCGYIHKDLKLSERKWQCPNCGSYHDRDYNAALNILYEGRRISAA

SEQ ID NO: 63154 - protein, 435 aa, unknown
  TnpB Polypeptide
MDTRALAQVYKLEPTRDQREALARLVGRRRYVYNWALARRREHYAATGTHLASAVLSTALTSLKRQPATRWLAEVDSQALQQGLRDLDRAYANCFAKRARRPRFASKHRGDQTARIPQRVTVDEAARTVRIPKVGPVRLRLSRPLGGGVRSATVRRDACGDWFVSLRLEARALTDAPVPAERAVANAVGIDLGLTTYATLSTGETVPNPRHLRTGQRALARAQRQLTRKQRGSKNRHKARKRLARLHRKVARPQADFQHKLTTALVRRFDLLAVEDLNLRGLARTKLARSFADAAFGELLRQLRYKAAWHGKHVVAVGRWFPSSKTCGACGTVYAGLTLKERVWTCAACGTTHDRDANAARNLLAEGLRLFALHQVGPGTAHPGAGVAAAGAGARVPTTSIVVAAGTPETQNACGRPVRRPPGAQGRLKQESHSL

SEQ ID NO: 63155 - protein, 301 aa, Moorea sp.
MIIIEFKAYGKKHQYQAIDEAIRTVRFIRNSCIRLWMDNKGTGKYDLSKYCKVLAKKFPFANELNSTARQAAAERAWSSIARFYDNCQKKIPGKKGFPKFQKHCRSVEYKQSGWKFSPDKKSITFSDKKGIGKLKLKGTWDLWRFDKKQIKRVRIVRRADGYYLQFCVSVDVNVRVRAASALPKAWPTALELKPTGKTVGLDVGLKDFYTDSDGNTQPNPRFYRTGEKRLKFYQRRVSRKKKGSANRRKAINKLGREHLRISRQREEHAKRLARCVIQSNDLVAYVRAACRKARFKGKEFS

SEQ ID NO: 63156 - protein, 280 aa, Moorea sp.
MIVYSFKVRGKLNQYNAIDEAIRTGQFVRNSCLRYWMDNRGLGRAELYRYNTELRAMYPFVKDLNSHACQASVERCWSAIARFFENCKRNIPGKKGYPRFKKRSRSIEYKTSGWKLLDPKHIEFTDKKEIGKLKLIGTWHLAFYPVEQIKRVRLVRRADGYYCQFCIQVDVKVDVEQTLHNVGLDVGLKEFYTDSNGNTEPNPRFYRKSEKRMKFYQRRVSRKKKGSANRKKAINKLGRVHLKISRQREEHAKRVARCVVLSNDMVAYVREACRKARFED

SEQ ID NO: 63157 - protein, 462 aa, Moorea sp.
MVSVYKTIPVKAVFTDEEKAFWVFQCQQANSLINCAIYYTKQKHYKWLEEQTEAFITYWHGDELRFGWKTYKCSTKYPALDKALKMSPHYKAMAAQSAQQTLKTVGESIASYNQLVGLYYKEKVDRPKLLRYRKKGGLAAVTFPRQALNYKKGLFYPSISKETKPELITEIALQPPDFIDPDWVKEVTVRPNLGQLWIDWVIDDGKQPVEHNPNLDYSQAWSFDHGGTNWLTGVSTQGKSLIIDGRKLKSLNQGYARLIAKYKAGKPQFYWDANLDRVVRKRNNQIRDVINKAARFIINRCLNDRIGNIIIGWNEGQKNCSNMGKRGNQNFVVIPTKRLIERLKQLCPEYGIKLTITEEAYTSKASYLDDDSLPFHGEKPKGWTPSGRRVRRGLYKTSDGWLINADCNGAANIVRKVATQLNLDLTKVGRGSLTVPHRYDVFNSLKKSYRKRSEEARFQPAS

SEQ ID NO: 63158 - protein, 475 aa, Moorea sp.
MYKTVPLRANFTDEEQAFWVFQCMQANSLWNCAIYYSKQKHYTWLERQPEAFSTYWQGDLLRYGWKTYKCSIRYAELCKELKNHPHYKAMAAQSAQQTLKTVAESITSYNQLVSLYYKGNVDRPKLLRYRKKGGLAAVTFPRQALTYKNGLFYPSISKETKPELLTEIALEPPDFIDPDWVKEVTIRPYLGQLWIDWVIDDGKEPISDNQNLDYSQAWSFDHGGDNWLTGVSTHGKSLIIDGRKLKSMNQGYCRLVAKYKEGKPDFYWDSNLDSPKATLRERVQRKRNNQMRDVINKAARFIINRCLNDSAKPTLRERIGNLIIGWNEGQKSRSNMGKRGNQNFVVIPTKRLIERLKQLCPEYGIKLTITEEAYTSKASYLDDDPLPKYGEKPNGWKPSGCRVRRGLYKASFGDLINADCNGAANIARKVARQLSLDLTKLGRGALTLPHRYDILNSLKKSYRKRCEEVRFQPAS

SEQ ID NO: 63159 - protein, 365 aa, Moorea sp.
VSRYVFNKTVKILQAGVVKANWKAIKTGILNDLPEWCKTVPYQIKSIAIKDACTAVREAKKKYKKTAQINRVRFRSRKNPVQSCYIPKSAVSAKGVYHTKLGQLTFAETLPDNICDCRLTSTNGDYYLVAPYKTARIKTENQGRVVALDPGVRTFLTFFSETSVGKIGHGDFSRIQRLCQHLDNLISKIAKAKGKQKRRMRKAARRMIIRIQNLVNELHHKAARFLVDNFDVILLPTFETSQISKRLNRKLRSKTVRNLLSFAHYRFKEFLKHKATENGKIVVDVCEAYTSKTVSWTGEIVKIGGSKIIKSKIDGRVMDRDINGARGIFLRSRSVAYGHALGDTPWLRNQLALVSQGLPLVDFGS

SEQ ID NO: 63160 - protein, 419 aa, Moorea sp.
VITAYQYRLRPTKAQKAMIDNWLSMLCAQYNYLLADRFKWYEANRCPINACPLVCHFPELRDNPNYYSQKKTLPNLKKTHPWYKQIHSQVLQDVVKRVKLAFDRFIKGDSNGKRSGRPRFKKLHRYRTFTYPQMKEGCLEGDLINLPKIGKVKVVLHRPIPSGFKIKTASITKKCDGYYLVLSLEDKTVPEAKPDINPDSIIGIDVGLKKFLTTSEGEAVEIPQYYRKAQKRLKVIQKRVSRRKKGGKNRLKAIKQLGKQHKKIADKRKDFHFKTANYLLSKYDVVAHERLNVKGLAKSRLAKSVLDAGWSSFLTILASKAENAGLLTVAVSPNNTSQYCSNCGKKVPKKLHVRWHDCHHCGCSLDRDHNAAINIKNRAAGQSVLKAQRLLRDARIGACCLHRPFRFGVGAVTHHIKFG

SEQ ID NO: 63161 - protein, 397 aa, Moorea sp.
MEFKAVVKEPQKIAINEAIRTAKFVRNKVLRYWMDNRGVGKKELYRYNTQLRDEFSFVKELNSHACQASVENVERAIKRFYDNCMGEVPGKKGYPRFRKHCRSVEYKQSGWKLSPDKKSIKFSDKKGIGRVKLKGTWDLWQFDQKQIKRVRIVQRADGYYVQFCVKVDNHEELEPTGNAIGLDVGLKEFYTDSNGHAEPNPRFYRTGEKRLKFYQRRVSRKKKGSANCQKAINKLGRTHLKISRQREEHAKRLARCVIRSNDLVAYEELRVKNLVKNRCLAKSINDAGWYQFREWLEYFGDKFGRTTVAVNPAYTSQNCSDCGQEVKKSLSTRTHVCKCGCRLDRDHNAAINILRRALSTVGHTGTFLNAWGEGTSTLLGSDLEGQVTSLNQESPSF

SEQ ID NO: 63162 - protein, 419 aa, Moorea sp.
MLTLNYRYRLYPDATQQQRLIEWMEICRMTYNYGLREIKDWCNSRKCLVDRCSLDKEYILAADAKFPDQITQLNNLPKAKKEFPLLKEVPAQVLQQTIKQLHTAWKYFTKRGFGFPRFKKYGQFKSLLFPQFKTNPVTGYHLKLPKIGAIPINLHRPIPSGFTVKQVRMILKADKWYACVTIQCDVNLPEPMPHGHPIGVDIGIEKFLATSEGVIVKPPKFFAQMQSKLQLLQRRLSRKKKRSKNYEKARIKVAKLHHHIDNTRKDFHFKQAHALCDAGEMVFMEDLDYRITAKGFLGKQMLDGGFGQFRTITKYVCFKRGKFFGLVDARGTSQTCPECGAKVKKDLRQRVHQCTSCGYTTDRDVASAQVIRNRGRHLISTAGLAGKETACADDLPGAGFPQSRQESKPLLGVTRKLKK

SEQ ID NO: 63163 - protein, 438 aa, Moorea sp.
MQLGYTYKLKPSPQQEATMIRWLDMLLAQYNYLLRDRRETYEQVKAPKMGNYCNIRSQGEVCPLTCSVSKSSSVGYPWKKSQNNPRRSPYEIQSSTLPVLKKQRPWYKQIHSTVLQQMLRQLDVAFAKFFKGESKYPKPKRRSRFRSFKYSPGQGKIDENKIYLPGIGWMGFHNSRSIPDGFAMKSVTVRRKSRGWFVSVQIENKSVPLPPTKKTSEIRPDRVKGCDLGVRKLVSVSDGKTIQNPSNSKKYKRQARRLTLRQRAASRKKKGSSNRKKSFCLVASLHEKITNKRSACHWEVAKELTTGSDAIVFEDLNIKGMKSRCKPKPNDKGGYDRNGQSAKRGLNRVISDAAWGELIKKVEVMAGKSGIPVIKVNPRHTSQQCPRCHHISADNRKGEKFVCTECGYHDDADVNGAVNIRTRGLKKLGIDSTQLPWP

SEQ ID NO: 63164 - protein, 487 aa, Moorea sp.
VYKTVPVKANFSDEEEVFWEFQCQQANNLFNSAVYYSRQKHYDWLRQQPEAYTTYWRDDLLRQGWKTYKCSIKYAELCRELKESPNYKAMAAQSAQQTLKTVAESITSYNQLVGLYYKGQVDKPRLLRYRKKGGLAAVSFPRQALNYKNGLFYPSISKESKPELLTEITLEAPEFIDPDWVKEVTIRPCYGQLWIDWVIEDGKQPVKNNPNLDYSQAWSFDHGGTNWLTGVSTKGKSLIIDGRKLKSMNQGYARLVSKHKTGKPDFYWDTNLDRVQRKRNNQMRDSINKAARFIINRCLTDGIGNIVIGWNERHKNGSIMGKRGNQNFVVIPTKRLINRLEQLCPEYGIKLTVTEESYTSKASLLDEDSLPKHGEKPSGWKPSGKRVRRGLYKSSKGYLVNADCNGAGNIARKVAVQLGLDLTKAGRGALTLPHRYDIFNSLKKSYRTRSVRVASAKADSGTGKPLPRSNIVESPVLQPGEMSRAVT

SEQ ID NO: 63165 - protein, 374 aa, Moorea sp.
MYKALKTKLKLNNYQKTLMAQHAGYSRWVYNWGLAIWQQASQEGLKPSVSTIRKLFTHHVKPNYPWMSQLSSKVYQYALINLGSAYKCFFQGLGKYPRFKKKGRHDSFTIDNSGKPLKLSGCKHKLPKLGWVRTYEPLPDLETKKITISRQADGWYLSFHYQYEPQPTHKQIDVVGVDVGIKELATLSTGKVFTGSLPYRQAKKRLARLHRDLSRKTKGSKNWHKSVNRLALQHQRVANIRKDTLEKLTTYLAKNHGTVVIEDLNVSGMMANHKLASSIADQGFYEFKRQLEYKCQWYGAKLVKVDRFYPSSQLCSSCGHRQKMPLPIRTYNCSECGLILDRDLNAAINLKNAVGSTVSACGRGAADSPERSRK

SEQ ID NO: 63166 - protein, 302 aa, Moorea sp.
VLAMEFKAILNKSQQKAVDEAIRASKFVRNKVLRYWIDNKGIGKKELYRYNTQLRDEFKFVKDLNSHACQASVENVERAIKRFFDNCKKKVPGKKGFPKFKKHCRSVEYKQSGWKLSPDKKSIKFTDKKGIGKIKLKGTWDLWWFDQKLIKRVRIVKKADGYYVQFCVKVNRTESLESTGYAVGLDVGLKEFYTDSDGYSEPNPRFYRKSEKRVKFCQRRLSRKKKGKAVGHATRTANRRKAKNRLGRAHLKISRQRKEHAKRLARCVIRSNDLVAYVRAACRKARLEGQKLSQKSLSCQVY

SEQ ID NO: 63167 - protein, 458 aa, Moorea sp.
MHKTIPVKANFSDEEKVFWEFQCRQANSLFNCAIYYAKQKHYQWLEEQEAYTTYWRGDELRTGWKTYKCGTKYPELDKALKMSPHYKGMAAQSAQQTLKTVGEAITSYNQLVGLYYKGQVDRPRLPRYRKKGGLAAVTFPRQALTYKEGLFYPSVSKESKPELLTKIALYPPDFLDSDWVKEVTIRPYYGQLWIDWVIEDGKEQVKENPTLDYSQAMGIDHGGDNWLTCVSTLGKSFIIDGRKLKSMNQGYCRLVAKYKQGKPHFYWDSNLERVQRRRNNQMRDAINKTARFIINRCLADGIGNIVIGWNEGQKQRSNMGRSGNQKFVAIPTKRLIERLKQLCLEYGVKLTITEEAYTSKASFLDGDSLPKIGEKPKSWIPSGFRVRRGLYKTSKGNLINADCNGAANIIRKVTTQLGINLAKVGRGILTVPHRYDIFNSMNKSYRRRSGAGWVHPPA

SEQ ID NO: 63168 - protein, 430 aa, Moorea sp.
MLTMTYEYKLQPTSEQITIIEQTLDVCRAVWNFALRQRKDWCASRKCPVNACSIYSEYIIGVDQPFPNYHRQAKQLTEAKKVYPQLKNVHSQVLQQTLRTLDRAWDDHKARGFGCPRFKNKYRMRSFVFPQLGKEPIKDDAIKLPKLRWVKWRQSRPIPEGFEIKQARIVRKASGYFVMLSLQLDVNIPNPFPHGHPRGIDLGYDKFVATSDGEEIKRPRFIITLQRKLKLLQRRLRNKQFGSNNRHKLNQKIARLHQRISDTRQDWHFKLAHHLCDGAGMIFVENINFCSWQRGMLSKSAADAGFGQFVNILEWVCWKTDTYFAKVDKDGTSQTCPNCGAHTGKKTLDIRIHSCSECGYTTTRDVAAAQEVRNRGINGVRLHSDFLSKGTLTNTAVGQIVAENVCGLDATGSIGHDALVGTGRSRKSNS

SEQ ID NO: 63169 - protein, 456 aa, Moorea sp.
MAKTKKQMGVQQILLHPDKETEAILTYLCEQSGKLYNMGVYFARQMLFKTGKILTGKFDLVYEKSIGKSIIAKSLPSTPAQQTLLSVAESFKSYKKLRKCWFEGQITDKPRPPKYLKGSKLFKVAYPNSGGQRPRIKEGQLHFSLGLTVRRWFGVKSFSLPFPTNLEGRKIKEWTILPKNGALYLEVSYEIPEQKPQEQVGNEALSIDLGTSSNLAACVDTLGNSFLIDSRAMKSFNQYWNKQVATRKEGKPQGYWDKWLDRVTRKRNHRIRDGINKAARLIINHCLKHKINTLVLGWNEGFKQNSNMGRLNNQEFVQIPLGKLKDRLSQLCDLHGIRLEITEEAYTSKASYLDGDSLPKFGQKPTGWKASGRRVKRGQYLSANRSIVNADLNGSANIMRKVARKLGLDLSRLGRRSLTTVARIRLWELPQFNLSAESPRLMTGECQYYICWAYCC

SEQ ID NO: 63170 - protein, 545 aa, Moorea sp.
MAPSDAKGIQEELDYFIEKMYSGSEQDIQNLINFVNGVAGRSATAESVPTNKETISTDFSPISIPSSPTPKLSLISGQVSTTKGKGLEPYWSELSLEISSRLLLPVETDLPDLGLNSLNTWSVSTVEKSWFSANLKAVRNPNLPQIFSESFTSSPAGFTDSGTTARKSKKIRLFLKPDQRSMIRKWFGVSRYVFNETVKILQSGEVKANWKAIKTEILNNLPEWCKEVPYQIKSIAIKDACTAVMEAKKKYKKTSQINRVRFRSRKNPIQSCYIPKSAVSELGIYHTKLGKLTYAEGLPDDICDCRLTSNNGDCYLVVPHKVTISPVENQGRVVALDPGVRTFVTFFSETSVGKIGHGDFSRIQRLCQYLDNLLSKISKAKRGEKRRMRKAARRMVIKIQNLINELHHKTARFLVDNFDVILLPTFETSQMSRKGNRKIISKTVRNMLTFAHYRFKEFLKHKAQETGKVVVDVCEAYTSKTVSWTGELINIGGSKTIRSKVDGKVMDRDINGARGIFLRALGDTPWLREQLALVSQDLPLVDSGS

SEQ ID NO: 63171 - protein, 404 aa, Moorea sp.
MFNLTYEFKLKPTKQQSQIFDEWLEVTRRVYNYALAERKDWYKSRSCQLNSCSLRSCYIISADATRPTYGSQCKSLTAAKKKNPNLKKVQSQVLQQTLKRVETAFTLLWERNTGFPRFKKKGRMRSFVFPQMKGNRLQPGMVKLPVIGWVRFRQSRNIPEDGVIKQARIVKRVSGWYVMLTIQWNADIPSPMPHGEPLGIDLGLTSFVATSNGLLVKRPKFFGDAERKLRWLQKRVSRKPFGSKNRQKAQNKVAKLHEYIANCRKDWHRKLSHQLCDNAGMIFVEDLNLVGLSRGMLGKHCLDAGFGQFLGILEQTCVHRGVYFQKVDARKTSQICPNCLTETGKKTLAERTHVCGNCGYTTDRDVAAAQVVTIRGLAAVGHTVKMLAEGKFIGIPLKQESSFL

SEQ ID NO: 63172 - protein, 406 aa, Moorea sp.
MITAYQYRLRLAKSQEAEIEIWLDMLRCQYNYLLADRFNWYEQNRCSINSCPLVCHLPTLRDNPDYFSQKKTLPQLKKDRQWYKAIHSNVLQDCVKRVDLAFKRYLKGDCNGRKSGRPRFKSKNSYRSLTFSAFSKNPIKGNKLNLPKFGWVKMVYHRPIPDGFKIKTATVTRKADGYYVTLSLQDDTIPSVIPVEQASNPIGIDMGLKSFLVKSDGTEIPIPQYYRKAQKRLKKIQKTVSRSKKGSNNRKKAVGRLGKAHKKVADTRKDFHFKTAKNLLDNHDLVAHEKLNIKGLAKTKMAKSVLDAGWGQFLSILSNKAENAGLVTVAVNPRNTSQNCSNCGKKVPKKLKDRIHSCPDCGYTEDRDTNAAINILKLAVGHPVGNKAYRVSEALAGVGKKPTLNL

SEQ ID NO: 63173 - protein, 475 aa, Moorea sp.
VYRTITIKATFSDEENAFWVFQCQQANNLWNCAAYYSKQKHYSWLEQQPEAFTTYWRGDDLRYGWKTYKCAIKYAELCKELKSNPHYKAMAAQSAQQTLKSVAESITSYNQLVGLYYKKQVDKPRLLRYRKKGGLAAVTFPRQPLKYKNGAFYPPISKESKSELLTEIALEPPDFIDPDWVKEVTVRPYLGELWIDWVIDDEKQPVEHNSNLDYSQAWSFDHGGTNWLTGVSTQGKSLIIDGKKLKSMNQGYARLVAKYKTGKPEFYWDENLDSPKATLRERVQRKRNNQMRDTINKAARFIINRILRDSAKPTLRERIGNLIIGWNEKQKNGSNMGKRGNQNFVVIPTKRLINRLEQLCSEYGIKLTITEESYTSKASYLDDDSLPKHGEKPTGWTPSGRRIRRGMYRTSRGYLVNADCNGAGNIARKVARQLGINLTKLGRGALTLPHRYDIFKSLKRSYRMRSEVAGNNAAT

SEQ ID NO: 63174 - protein, 398 aa, Moorea sp.
MTEKVYRYRFYPTPEQQTLLRRTLGCVRLVYNKALDARTKAWYEHQERISYKQTSSILTEWKKQDDLFFLNEVSSVPVQQGLRHLQTAFTNFFAGRANYPNFKKKRNGGSAEFTKSAFKLREGQIYLAKCQEPLPIRWSRQLPENCDPSTVTVSLDPSNRWHISIRFNDPRDLSLPPTDKQIGFDLGISSLITTSDGDKITNPKHFKRLKKRLAKYQKALSRKQKGSNNRDKARLKVARVHAQIKDARRDFTHKLTTQLVRENQLIAFEDLAVKNMVKNHKLAQVISDANWAEIIRQIKYKSQWYNREAISIDKWFPSSKLCSVCLNRVDSLPLNIRQWDCPSCNTHHDRDINASINILAAGLAVSVCGATVRPEESKSRKAGAKNSPKGRRKQKPKS

SEQ ID NO: 63175 - protein, 456 aa, Moorea sp.
VKTPTKVIRTDKWQLNPTPEQKVLFGETVKVYRRACRFLIGIIYTHWAELACLTADQLTPAVERLMHETAKRPNIKYPQFNQAFYKFPSYYRRAAIAFAAGQVSSYVTRYNEWQAGARKRRNASPPKLNTDTGCYPALYKGQCYKLHGFDSAKPTLREQLEIKVFNGSDWVWTTVQITGLRERHQVASNKMLSPSLIFNERACHLSVPFSCKPEKRKPEANVTAVDLGINTTATIAVVTHSGTVIHRKFIHPGRDIDRRDKRLKSVSVRASLTMGKGGKLHKGFCSLTYQKCQRINNQIGHVVSKRIVEIALTFNSEAIVFENLKGWKPKGGRKRSNLRQRFHGWLKAKIRDFTEMKWSELGGKVIEVVAAYTSKLAFDGSGKVKRDSLNYALATFCSGKQFNADLNGAYNIGARGVLKLVRRNDNEGRSSKSSGRPPRSWACLCDLWSRDSLRLA

SEQ ID NO: 63176 - protein, 357 aa, Moorea sp.
VSRYVFNKTVKILSDGETKANWKAIKTGILNDLPEWCKAVPYQIKSIAIKDACTAVREAKKKYQKTSQINRVRFRSRKNPVQSCYIPKSAVSSKGVYHTKLGEITFAETLPENICDCRLTSSNGNCYLVVPHEATNVKAENQGRVVALDPGVRTFLTFFSETSVGKIGDGDFSRIQRLCSDLDSLMSRTSKAKKGQKRRMRKAARRMIIKIQNLINELHHKAARFLVDNFDVILLPTFETSQMSRKNNRKIRSKTVRNMLSFAHYRFKEFLKHKAQETGKIVVDVCEAYTSKTVSWTGELVNIGGSKIIKSKVDGRSMDRDINGARGIFLRALGDTPWLRNQLALVSLDLPLVDFGS

SEQ ID NO: 63177 - protein, 365 aa, Moorea sp.
VSRYVFNKTVKILCSVGAATRTDGETKANWKAIKTGILNDLPEWSKTVPYQIKSIAIKDACTAVREAKKKYQKTKQINRVRFRSRKNPVQSCYIPKSAVSVQGIYHTKLGGLTFAETLPDNICDCRLTSTNGDYYLVVPYKTTQVKTENQGRVVSLDPGVRTFLTFFSQTSVGKIGHGDFSRIQRLCQHLDNLISKISKAKGKRKRRMRKAARRMVIRIQNLVQDLHHKAARFLVDNFDVILLPTFETSEMSKKQNRKLRSKTVRNMLTFAHYRFKEFLKHKAAENGKIVVDVCEAYTSKTVSWTGELVNIGGSKIIRSKIDNQVMDRDINGARGIFLRALVDTPWLSNQLALASLDLPLVDSGS

SEQ ID NO: 63178 - protein, 413 aa, Moorea sp.
MIILEFKAYGKRHQYSAIDEAIRTVKFIRNSCIRYWMDNKGVNKYDFSRYSTVLGKKFSFVNELNSTARQSSAERAWSSIARFSDNCKKKVPGKKGFPRFQKRCRSVEYKQSGWKLSPDKKSITFSDKKGIGKLKLKGTWDLWRFDKKQIKRVRIVRRADGYYVQFCVQVDINVRVRAASALPKAWPTALELEPTGNTIGLDVGLKDFYTDSNGHAEPNPRFYRTGEKRLKFSQRRVSRKKKGSANRRKAINRLGKTHLKISRQREEHAKRLARCVVRSNDLVAYEDLRVRNLVKNHCLAKSINDAGWYQFRKWLEHFGDKFGRITVAVNPAYTSQNCSDCGELVKKSLSTRTHVCKCGCQLDRDHNAAINILKRALGTVGHIGTLVLDQNAYGDLASTLLGSDLDEQVESLK

SEQ ID NO: 63179 - protein, 366 aa, Moorea sp.
MLRAFKTKLKLNNKQKTLMAQHAGYSRWIWNWALRIWNEADKEGIKLSTNKLKKFYTNHVKPQYPWQSTLSSRVYQFAFMYLGEAFKRFFQGTSQHPKFKKKGRNDSFTLDNCGRIMEFSGTRLKLPFIGWVSTYEPLPEIQTKRVTITRVAASSWYLSVAYEFEPEQTVKSREYLGVDVGVKVLATCSDGTVFENPRAYKKAKKKLARLQRELSRRKIGSKNRYKTQLKLAKAHQRVANIRKDAIHKLTSWLGKNHAVIGLEDLKVSGLLKNHKLAGAIADSAFYEIRRQLEYKSEWYSSELVFADRFYPSTKTCSSCGHVQQMPLKERVFDCEACDYIADRDLNASLNLERLAEGFSVIACVSK

SEQ ID NO: 63180 - protein, 365 aa, Moorea sp.
VHRVIPDIDRNKKAIPEVKSFRTPDTLGLPAKIMDWTINDVAKAITAQQAACIDGVIKKIYRRFPGKENQKTRKELCKQLKTLAFLENPLLHRLVRKEFQRGHSWVKNQIVYQQVGYKCKRLSRNTYQLELAGLRRGKRNRIIVRSNRKIKGQIRLIHNQVLQRFEIHFLVDHGNVEIPGERRPVGVDKGYTEAFYDSEGQAHGKGLGKVATKKSVRVAWPFGHRICAKNRNRGKLWALHRKLEKIDPAKSARILKNNLSRKTENKRYRQNQSELTAIIGAASKSLFNGKSLKIFAEDLTQPIKGKRQSKAMSRKLNSWMKGEMRDSLQKWADWTGSIVTEVMPSYTSQIDSVTGTLLGKRSGDN

SEQ ID NO: 63181 - protein, 410 aa, Moorea sp.
VEKSWFSTNLKVAQNQSLPQIFSESFTSSHAVDTDSENTAKKSKKIRVFLNPEQRLMVRQWFGVSRYVFNKTIKILVKGETKANWFAIKTSILNDLPEWCKAVPYQIKSIAIKDACTAVREAKKKYNLTGQINRVRFRSRKNPVQSCYIPKSAVSVKGIYHTKLGELSLAETLPDNICDCRLTSTNGDYYLIVPYKTAHVKAENQGRVVALDPGVRTFLTFFSQTSIGKIGHGDFSRIQRLCQHLDNLISKISKTKGKPKYRMRKAARRIIIKIQNLINELHHKAARFLVDNFDVILLPTFETSQMSKKPNRKLRSKTVRNMLSFAHYRFKEFLKHKATENGKVVVDVCEAYTSKTVSWTGELINIGGSKTIKSKIDGQVMDRDINGARGIFLRALGDTPWLRNQLALAG

SEQ ID NO: 63182 - protein, 490 aa, Moorea sp.
MPKQVGAAKKISTQVVPVVGMTKSVETELLQVMKKLGIVRSESYNKLGSISHWGLDWKKSYPEVRTFRKPESLGLPSKLMEWTVSDVAKAITAQQAACTDAITKKLYKRFPGKKNQRARKELCKQLKTLAFLDNPLLHRLVRKEFQRGRSWVNNQIVYQQGGYSCKRLSRHTYQLELAGLKRGKRNRIIVKSNRKIKGQIRLIYNNLLQRFEIHFLVDHGKVEISYERRAIGIDKGYTEAFYDSEGQAHGQNLGKLATKKSNRICTKNRNRGKLWAIHRKLEKTDPVKSARILKNNLSRKTENRRYRKNQSEITAIIGAASKSLFDGESLLVFSEDLTQPIKNKRQSKAMSRKLNSWMKGEMRDSLEKWANWTGSVVKEVQPSYTSQIDSVTGTLLGKRSGDSFTRFDGVVLQADHNAAKNILARGIDFEITRYMNKTEVQAVLLRRTARFLRGMGLSLADAVELGWLDCKHTKTRAFKELLAGMQGAPR

SEQ ID NO: 63183 - protein, 400 aa, Actinomadura sp.
MRTAYKCRAYPDPEQAAIFGRTFGCVRLVWNKTLAERRRVYHADGTRTSYKQTDAALTLWKKSDDLAFLNEVSCVPLQQALRHQHAAFANFFAGRARYPRFKNRNSRQSAHYTRSAFRIRNGQLQIAKTTRPLALVWSFDDVDLATLNPTMVVISRDPDGRWYTTFAVDTDTPKPLPAAGHQIGIDLGVKDFMVTSDGDHLANPRHLERKAANLARYQRRMARKQPGSANRRKAKAKVARSHRKVRNARRDFLHRTSTGLVRQADTIVIEDLAVAGMVRNRKLARAVADCGWGEFRRQLEYKADRAGRTLIVVDRWYPSSKTCSHCGHLLTALSLSTRAWSCPGCRTRHDRDVNAAKNILAAGRAVAGAGPGEVCGADVSRQGPSLPQSATKQKHLRREP

SEQ ID NO: 63184 - protein, 415 aa, unknown
  TnpB Polypeptide
MYRTQRNQLRNLSKQEYIALKELCRLSKNLYNSTLYTIRQYYFTEKKYLRYESAYYICKENENYQLLNTDIAQQTMKVVDRNFKSFFALISKAKKNEYRFTDIHLPHYLPKDGYFMLIIPRFKVKDGFFKVPMSNAFKKEFGEVKLPFPERLKDKQVKEIRIFPKHNCKFFEIEFIYIQEEENLNLNTNNALAIDFGLDNLATCITNTGTSFIVDGRKLKSINQWYNKENARLQSIKDKQGIKGLTNRQYTILTKRNNRVNYYLNKAARIIVNYCIENGIGNIVVGYNPDWKRNVNIGKKNNQNFVQIPYGDLRFKIQSLCERYGINYVEQEESYTSQADFFNNDPLPVHNADNPQEYQFSGKRISRGQYKTCQGTVINADVNGALNILRKSNMVDLTVLHARGCLNQPERIRVV

SEQ ID NO: 63185 - protein, 415 aa, unknown; identical to SEQ ID NO: 63184
  TnpB Polypeptide

SEQ ID NO: 63186 - protein, 515 aa, unknown
  TnpB Polypeptide
LTSALPACGSHRTTRELGRDRASELGSRLRSTGCDDPSIGDDVHLLIPSAPTAQLAQRGFGHVHGRSSSAQEASPRQDGGREADGSDDLSPRISLLKQPMQRFIRPEIGRRSHPPDDDDGIVVVRSRVGDEEIRRSGPAQHPPRRTEPRRSDHHRSALGLEDRLRCEQLLVPKVFRGDDHENAFPRQSLLPHIPVSTWAKAIPQFMAFEAALCALASPMPLRVPPRACRTRSKSYRTSGERVHTRRRHAISPTAWGFLHTPNGVRREADRWFVSLCVKRTRPDPVPVQGPVVGVDVGLSSFATLSDGTRYEAPKPLAAKLKLLRRRCRQLSRKQKGSQNRRKYALRLARLYRKIRNIRMDAIHKFTTMLAKTKSVIVVEDLSVRKMMRNRYLSRSIADVGWGEVIRQLRYKTAWYGSELVIAPRYFPSTRRCSGCGSVGPRLSLSCRVFRCGSCGLVLDRDENAARNLAWYGQFGRNQRACGESSVGGTATSARSTRHGSMKQEADATYPIGIRG

SEQ ID NO: 63187 - protein, 376 aa, Arsenophonus sp.
MKRAYKYRFYPTPDQIELLAQTFGCVRFVYNSILRWRTDAYYERQEKIGYIQANSRLTALKKEPDVQWLNDVSCVPLQQVLRHQQSAFSNFFAGRAKYPTFKSKHRKQSAEFTASAFKYHDGKLYMAKSKTPLDVRWSRELPSAPSTITITKDAAGRYFVSCLCEFEPTSLPITTKMVGIDVGLKDLFVTDTGFKSGNLRHTAKYAKRLALLQRRLSKKKKGSNNCTKARLKVAKLHAKITDCRMDNLHKLSRRLINENQVVCVESLKVKNMIRNPKLSKAIADAGWGEFVRQLQYKAEFSGRSVVAIDQFFPSSKRCSGCGYTLSKLALNVRFWHCPECGSDHDRDINAAKNIKAAGLAVLAHGETVNPKSLTAT

SEQ ID NO: 63188 - protein, 514 aa, unknown
  TnpB Polypeptide
MRAQTSSYVVSTKVPFPESIAKRLEKSLRISNSAYNEALSFGLKRFEALKQNSQYQELLEARRPVVAKLAALKKTKKKDKALSKQVKDYDNALFELRKAYSLTESELQKVLAQQRRKPGSPYQQFNSGEIQVIAAQAYKTLEKVLFYQIKPHKVHFRSKFDLDVSFRNRVNTTGTRLEPSDKEGIAYRLYIHKASTFVDIPVKAFNKYQQISLMRSEKIKYVQIVRKTIRGKKVYYLQIVCQGFPPPKVTKGEGVVGIDPGISTVAFASPTEVALVDLVPTTIARKEKLLKELDRNIERSQRVNNPECYDERGKIKKGARFKRPSNRQVRLRNRRRKVYRSLSEERKKIQGQLVSRIVSQASSIRIEELGVKGLQRRSRDIRINPKTNRPYSKKRFGKAIFRAAPSALRVALETRASQLGIDVEVISPKDVKPSQYNHITQTFDKKSLSTRVYDLSSEYPDVQRDLYSAFLIGHIENGHYQQEQLEQDFPAFYKQMKDFLQEPIETERLAWYLK

SEQ ID NO: 63189 - protein, 445 aa, unknown
  TnpB Polypeptide
MHKRKFTVFTQLHEENNADLIEYFDDRRERQSQIMRKTFQVIKNTETFEKSKYNTYLQNKYGITCRMANSIISDAQGRLNALKELKVFEKAQIEQKIGHLEKKVLPKLISKRDDCIAQLKVNPKGSPIRLRNIRRKIVAKKNKLNRLKQKLDNVTYQIETGRLKLCFGTKYLLKRDYRRFVEQRDSQMSFVGSKSEPAQNQMLQLSYNPKNNQFNIKLRKDFDGYKNANKDDKYIYGRVYFRHHKSELVSILRQGYSPLSYKIIKKGNRFYLYCTFEIHVEDDEFLTRSSYGTIGLDFNKGFVTLSETNEYGHLLRTQVLPYRFKSGSKTRTDLQKLVNDVVDLALQTGKDICIEDLNFKKKKAKTESRQGCKYNEMLHSLTYRQFSHFIEGIAFRNLVYVRKVNPAWTSWLAKELYCPRMKLNVHVGASFVIARRGQGFKDAFK

SEQ ID NO: 63190 - protein, 533 aa, unknown
  TnpB Polypeptide
MKLAYKIAFPDELIDTYDFLQKEFNRVLSDEYMRESILSIDNELHPGKYWPLLRDLIGQDTQYKWKTDKRFPSPSWYFCAFAEQIRQIHKSQKEQLALYDALQRFDNNDNVEFYQYCMNNSIPFNKAKVKNLKRCDERPELPYSATFVLDFAFINSQAAKMVDNTFHYAIFNENNKLIWNQLPIIFHQSSKYQPGMRVSKPRFSKDEDGNYYGVVSFDFEESVTFGENIAAIDLGKINLYTFAYIRPDGTYSDNYFIHSKMIERLKQKLETLYNEKAILIEKNKHVDELFKYSDYIPDASLKKWILRQGKIERLSTKITAIKDAISAEMSAEIVELCQKHNCSTLFMENLSWLESVGGKWNHSVQQDTIALKCAQNGIAVYKVNAKNTSKAHPITGELGKELGRNIIWSNGDILDRDFVSCLNQIQRKGKRRTSHRRIETKQGIQLKSLRDKHQPTPKRTKRQTSRRYENLKKLENLKNKNTSRTTQMVVVLPRISNDYPATWSCVDKKSIQEGNNCMRRTDVYKKSYMYICN

SEQ ID NO: 63191 - protein, 445 aa, unknown
  TnpB Polypeptide
MHKRKFTVFTQLHEKNNADLIEYFDDRRECYAKSMRETFHLIKNADEFDKSSYNTYLQNKYGITCRMANSIISDAQGRLNALKELKVFEKKQLEQKIEHLEKKVLPKLILKRDDYIAQLKSNSKGSPVRLRNVRHKIVYKKNKLNRLKQKLENIIYQIEFGHLKLCFGTKYLLKRNYKRFVEQRDSQMSFVGSKSEKAQNHMLQLSYNPKNNQFDIKLRKDFGDYKNASKEDKYVYGRVYFRHHKSKLVSILRQGYSPLSYKIIKKRNRFYLYCTFEIHVEDDDFLTRSSYGTIGLDFNKGFVTLSETNEYGHLLRTQVLPYRFKAGSKTTTDLQKLVNEIVELALQTGKDICIEDLNFKKKKAKTESRQGRKYNEMLHSLAYRQFSNVVENIAFRNLVYVRKVNPAWTSWLAKKHYCPRMKLNVHVGASFVIARRGQGFKDAFK

SEQ ID NO: 63192 - protein, 313 aa, unknown
  TnpB Polypeptide
MEIPDFNRGKSFLSLKFVNDLTFLWKPIEFKRPQVDLVRNRDYSFKNDMLSMNTINGRIFVKVYGLPENHYFDGSWKLGIGKVVRSGKHWFFHISVTKEVPDFEMKDLKHVVGIDRGLRQILTTYDEKGQTRFVNGAFISKKRKHYAKLRARLQAKGTKSAKRRLRSLSGRESRWMSDVNHQLSKTLVQTYGKQTLFVLEDLTGVTFETVHSRKKENRYEHHSWSFYDLEQKLRYKAHLNESEVVLVDAHYTSQRCPKCGTIDKSNRDKDIHQYTCSNCGYSSNDDRVGAMNIYELGKWFVSGVEEPAFSINE

SEQ ID NO: 63193 - protein, 543 aa, unknown
  TnpB Polypeptide
MSKSENEKWIATIPSQSSANKVKIDLVADLLVPYSELSVYFLKDIDLRFVRDNELSKYTKAKGYRTEDEFDALLVKCHKRYQKQIADGAKPTRSLKEQLEEIHEYAVQTPLSARFVQICYAQTIETYKSWLTKLEDVIRSYLTNSSVSEKDEFFLVTCYRINKNHLWYHNDLSLDWHRTKEGELLVPTKQNKANITLPVSDDILFFMRRLMKQARKRIRFPQLKQLKTLKLDEKVATLEVSQNATHFDYFLKLSTLEKGKPIYLPLNRNPYLDKCLAKGNRKPFVQLRLDDKKCVISAIVESDKAPLRPLDSSIGLDFGMISMFTTSDGEQHGLRSFTKLKIWDEELMALTKELQDQGIKFKSNERYVQLQNRIKSYFKNEICRILNKLARKNVGVFVVEQLDFRASGLSNTMNRLVGRTYRSFVKAKLDRLTEQFGIQIVSVNPAYTSQECSRCHYVSKNNRKSQKQFICEHCHLHCNADVNAGRVIDQRRSLISEFPVYAKKGTSSAIRCQVREASKACHRRYCLDNEFSTTNESFAESSL

SEQ ID NO: 63194 - protein, 590 aa, unknown
  TnpB Polypeptide
MIKKKKKKKVKKPDLATRSYPQKCLANPSKIASLWALLLLYRRDSEILNQYQKRLFFQDFKVNKNAEKKDSPFFQDYLGTERFRETQQYQVVYQIDSYLERLKKEFTKIVFKTFSDDNLRYRLSYINKAGLWQCPPRQLKASVLEKLSPKPGQMSAVELFKLAKSIFKQLRKNNAWPTCRYWMTMALDAKVAIISSKGGLIGQSQKKGAASFADYWIQISTYTKGKVIQIPLETNDYFHQAPGRRSNNLQVHFNQDKTVKISFFRSKLKKLKNLPQTAKFLDIDCGLNCQIATNYGDLLGQDYKKQLDYYDDLENNLKKELKRRNKCAEARGDLLDVVPIWDNHRLQNLSRIRTEYIKNETGRNTNKLISIHHPDILRSEDLDWQESDLDAQMNRHLHRYGQGVMEHKINCFIEDGLLQAHQKKNPAYTSQRCFICGYVDKTNRSNNRDIFICRACFHKAHADCNGSGNVGIGSSNLYASKEEILKDLVASSITRLSSIPLSQESLTAILKNPYYSDYHQDFQGRLRKGNSKKAETSSKGKSLSLEKGSASHLAKMEHWPSVEKKNTIEGDAIIVGFSSSPQLTLGKQFS

SEQ ID NO: 63195 - protein, 381 aa, unknown
  TnpB Polypeptide
MQAYKYKVRTPNKQVVTKLENHLVTCCELYNAALQERRDAYKLNHISLNYFDQANQLSDIKEIRDDLNNVHSQVLQDVLKRIDKTFKAFFARIKRKEKAGFPRFKSVKKFDSFCFPQSGFKLVGDKLTLSKIGSVRLRLSRPIEGKIKTCTIKREVSGWFVVFTVENEIKPLPKTKRSVGLDVGIESFVTLSDGTQIENFKYYESTQKHLRKAQRKVSRRKKGSNSRRKAVVILRKIHEKIYSQRNDFQHKVSTHLINQYDLIAIEKLSILGMSRGILSKQVNDVSWSSFFQKLKYKAENADKTLIEVNPAYTSQDCSHCGNRVKKDLSVRIHHCLKCGLKIHRDTNAAINILKAGQAFETPTYRNTDCVVSESLSITVSV

SEQ ID NO: 63196 - protein, 397 aa, unknown
  TnpB Polypeptide
MSNFVEMLYRQLLVLCGVERCLFGNGKELHFKKLMDFDTIGGKSNKNGARFDLDAMYVNWLGLSLKCYLPKSENSLSYVWESLKGKISYCNIKRLMFSSGWRYYAEIVVSGAAPTRVSIGTSTMGIDPGVSTIAGVSEDACVLEELAPNAIQYEKKIQKISQSMDRSRRISNPNKYNEDGTINRSNRDPWKYSKNYVKMCRLLKSLYRKKHAYIVDSHRKLCNKLITIAKYFPVEKMHFQALQKRAKETKRQEKKTEVKQKDGTVKVIQKYKRKKRFGRSINRRAPARFLLELKRKAEAVGGVYAEVDTKEFKASQYNHVTDTYEKIPLSQREKEIGKRKVQRDLYSAFLIRNADLDFKHPDREKCEYEFEYFANLQDQLILKMKESGLSMRQCFGF

SEQ ID NO: 63197 - protein, 427 aa, unknown
  TnpB Polypeptide
LRSGGDIWAAVLELNALRHRRGDAPVVSYQALCRELTVAGPGCAGELSSVGARSILRRYSDAWFSANAARRGGDASARYPRRRRSLLPSRYYSGTFALDDRHLSLSTARGCPPLALRLSRPVPYDEGSVRSVTLVNVGPKLFVDVTAEVPVASYEKGLGPDPARVAGVDLGIIHPYAVATSGTALLVSGRAIRAEHRLHLAEKKARSRALAPRAPKRGQAGSRRWRQYRARTRRLEERHGRRVAQATHEAARAVVDFAVNERIGTLVVGDPRGLLKNDAGKRQNLAVRNWRPGQMIKALADKAALEGIGVELVDERGTSSTCPSCGARVAKPKGRTFHCGTCTLVAHRDVVGAANIAPRGSRGGTTFDLTRLEIMHRRAGRHLPGRTQRDPRRISMDNHRRGRVDLWPAVARPEAIGESLVRVVSAA

SEQ ID NO: 63198 - protein, 401 aa, unknown
  TnpB Polypeptide
MYRAHTIALDPTNVQATMFARTVGTARFAYNWALARWNEIYQVSLADPQSPKPNRFVLNKELNAIKRTAFPWMLDVSKCASETAITDLDTAFQNFFAKRARYPTFKHKGVQDSARITVGNFSIDGRRIRLPKIGWVRMREELRWPDAKLVSVTVRRHRGRWFAAVCCELPDPVPSARPVTTVGVDVGTREFVDSDGGRYPLPRPYWRATRHLRRAQQSVSRKKKGSKNQAKAQEKVNRVHGRVADIRSDWLHQTTRKLVDEFSLIGVEDLNVKGMAQSHYRALSVLDVGMYEFRRQLEYKAPVVGSTVVAADRLFPSTRMCSRCGEVRTKPLPTSVRRWTCAECGTAHDRGANAAVNLKNNAVGSTVSACGEFFASAGPGGSPGSASSLCEAGTRRMARTP

SEQ ID NO: 63199 - protein, 271 aa, Anoxybacillus sp.
MIRTYKVMLLPNNKQKTKLFQCAGVARWAYNFALAQQQENHKQGGQFLSDGELRKRLTQLKQTKEYSWLNQFSNNITKQAIKDAYQAYKNFFEGRAKFPKFKTKKRTRPSFYQDTSKIKITDTHVKLEKLTPSKKKRKQTFNWIRLAERGRIPHGAHIKYVNPRIVFDGLHWFLTVGVEEAEVKHGTYNEGIGIDLGVKSFATVSNGMTFPNIHHMPQVKKLEKQMKRMQRKISRKYEMNKIQTERGGIPLQKNGKHQETRIPCFEKNAEG

SEQ ID NO: 63200 - protein, 353 aa, Firmicutes sp.
VTSVQTITLRLRLHQPTKAKQAVYRELAGRVTGFANNLVAAGRPKKLTSKTAKPYCPDRIPSAVINQALRDVAAHPKVEKFRVLWPGFNNQNCRLERVGGFWTVGFPTHVGRVRVPLQATDRQAQLLAKLGATVKQGAAKLYEKRGRWYLALSISVQVTPCVGTKVAGVDLGLRNLAVVNCEGETLFFSGDHAAFVRRRFNALRRRMGKAKALGAIRRMKDKEARWMTNQDHEISRKIVDWCIARGVGTIRMEDLTGIRIRGNRNRKDRGRSLHSWSFYRLKQFIIYKANLAGIKVGLVVPENTSRTCPACGVVDQASRRGIRFRCTACGHTEHADSVGAANIARAISGLAAA

SEQ ID NO: 63201 - protein, 237 aa, Okeania sp.
LFVHDIFLNVRISKRANNWYISFKYDNEPTHTAKKRDVIGVDVGINTLATCSDGTPFANPKAYQQAKKRLTRYQRRVNKKKFGSKNRAKAVKRLAILHKKVAEIRADKLHQLTTWLAKNHSTIVIEDLNVSGMLKKRCDPATTSVAPGSAPRHHKLASAIADCGFYEFKRQLTYKCEWYGSELVIADRFYPSSQICSHCGHQQKMPLSVRTYECSACGFTADRDFNAAVNLENYVSQ

SEQ ID NO: 63202 - protein, 319 aa, unknown
  TnpB Polypeptide
MAQMSITAKIQVVASDEDKTLLDETMSVYREACNYVSDYVFRTHDLKQFSLNKALYPTLRAEFGLKSQMTQSVFKTVIARYKTILENQKKWIKPSFKKPQYDLVWNRDYSLTQDRFSINTLGGRVKLPYFAEWMSKYFDRSIYRFGTAKLVNKHGKYFLHIPVTYDVEESNLSDICNVVGIDRGINFIVATYDSKHKSGFVRGRPIKQKRAHYSALRKELQMRHTPSSRRRLKRIGQRENRWMQDVNHCVSKALVVNNPAHTLFVLEDLSGIRHATERVKTKHRYVSVSWAFYDLEQKLIYKAKQNQSSVIKVDPRYTS

SEQ ID NO: 63203 - protein, 412 aa, Moorea sp.
MEFKAVLNYTQKIAIDEAIRTARFVRNKVLRYWMDNRGLGKKELYRYNTQLRDEFKFVKDLNSHACQASVENVERAVARFFDNCKKKVPGKKGYPRFKKHSRSVEYKQSGWKLSPDKKVIKFTDKKGIGKVKLKGTWDLWRFDQKLIKRVRIVKRADGYYIQFCVKIDNHVREAWPTALQLVATGFTVGLDVGLKEFYTDSDGYSEPNPRFYQKGEKRLKFYQRRVSRKKKGSANRKKAIDRLGRTHLKISRQREEHAKRLARCVIRSNDLVAYVRAACRRQDLRVRNLVKNHCLAKSINDAGWYQFREWLEYFGQKFGRITVAVNPAYTSQNCSNCGEVVKKSLSTRTHVCKCGCQLDRDHNAARNILTRALSTVGHTGTFLNAWGDLASTLSGSGLIEQVEFMNQESPPF

SEQ ID NO: 63204 - protein, 434 aa, Bifidobacterium sp.
MLEAVRVALDPTPRQERLLESHAGAARFAYNAGLAHVEDMLERGDKPEWSYYGLRRWWNQAKNTLAVDGTTGEPWWPENSKEAYNSGLESLADALRNFSKSRKGRRKGRRMGFPRFKSKDRAVPGFAYTTGSFGLIDCDPYALRLPRIGRVHCMENVSRRVNGAKVLRMSVSRRGGRWQASLTVERADLPVPSPPKGGSVGIDLGVKELATLSDGTVIHNPHALKSNLGRLKKAQRNLSRKRKGSNRRRKARTRVARLHARVADLRRDLLDKTTTMLARAYADISIEDLNVAGMVRNHRLARSVEDAAFAEFRRQLEYKTARTGARLHVIDRWYPSSKTCSNCGTVKAKLSLSERVYHCEECGLVVDRDLNAAINIQVAGSAPETLNARGGSGRRTDASRRATRHPVKREPSDGVSRVSLGAGLGNEAMQMTSL

SEQ ID NO: 63205 - protein, 384 aa, unknown
  TnpB Polypeptide
  misc_feature (337)..(380): Xaa can be any naturally occurring amino acid
MFLTYKYRIKSNQGLRALRRHVFAINQVWNYLVSTQRKIQQDWKFGLARNWPSQYDFQKLTGNTSKDLGVHGQSIYGTCEQFVKSRDQHKKNPRFRRSSSPKKSLGWIPFLKQSRQITGNSITYLGRTYKVFGTKRRPIPEGAKGGCFVEDSRGRWYVCFQVEVEKDQEHGQGKVGIDLGLKTLATLSNGQKIENPRSYRKLEEKLGIAQRANNKKRVKVLHDKIKNVRKDYLHKESNKLIKNNCLIVVGNVSASQLAKTKMAKSVLDAGWTTFRSMLNYKASRHSASYLEVDERFTTQTCSACGLRPESRPKGIAGLGIREWVCSDCGVVHDRDIXXXXXXXXXXXXXXXXXXXXXXXXXXXXXXXXXXXXXXXXXXXXEAQG

SEQ ID NO: 63206 - protein, 422 aa, Veillonellaceae sp.
VKNVKELTYCFGLKMQAYPSSVQKRIIDKNIDFSRFYWNQLVAANKKMAGLRHTKFILWPWADDQIAHLRELANPNCKLLKQLFTFLNDPELDSDVPMQAKANYRAAWNLCKKVRSVQPPKFHKKCEHGSYQTSNHYNAKKISIATPYNGNIKFLDRTHIFLSKVGRIRVACSKELSLRIEKMVQAGGEVRLTKATVSRDACGDYFVSFQFASDVPYAMAFEKTGSKLGIDLNLENFLTDSNGLSIDNPRYYRQARTQLAKAQRKLGKRCARAKKEHRPLHTAKNYQKQRKLVSRIHRRVLRRRDSFLDNLSTTLIKNHDLVAAEELRSKNLLKNHALAMSISDVGWRTFLSMLEYKAAMHGKEFRTVDPKNTTQTCSHCGHVFDKEHKLTLKDREWTCPVCGTFHIRDHNAAKNILAKALA

SEQ ID NO: 63207 - protein, 409 aa, Haloferax sp.
MQYNYKYRLDPSKALTETLLHHVDTCRQLYNHVLHLLNKTDDNPARYEIQGRLPDLKTWWSDLGDVHSKVLQMVVKRIYDNLSTLKAQKENGRAVGMLKWKPPREYRSLTYNQSGFKLKNTSGRPVLWLSKIGEIPIPLHRDIPENATIKQVTVKQEPTGEWFATFGIDVDEATPEKPETPERVVGIDVGILKYAHDTDGYAIESPDFSDERERLERAQRNLSRKEHGSANWEKQRRVVAERHADLKRKRRDFLHKLSNYYATEYDLVAVEDLDAKGLVELPGNSRNRAGSAWGTFLRMLEYKCDRERTHFIAVDPKDTTKECAACGVKTDKPLWVREHSCPACGFEVDRDANAAWNILSRGLEDVGVGYSESTPVETALPVDTLVSAKRVVETGSPTLKERTASAVSE

SEQ ID NO: 63208 - protein, 351 aa, Paenibacillus sp.
MQSLTVKIRIFPSCPDDLRRLGKEYIRVVNQLTEHAQQIGKFPKVTTKDIVCSLPSAVCNQAIRDARSVFSRSKKLGVRPILKKPVYFVNNQNYTVTDNTVSFPIIVDGKTKKTTFLATPTNRDMKLLAKAKLGLMRIVEKSGKWYAQISLEAPTTESNGECMMGIDLGLKVPAVAVTSTGKTRFFGNGRMIKYVRRKYQSRRRKLGELKKLTAIRKLGNKESRWMRDQNHKISRQIVNTAIQEGVSVIKLERLENIRKTARTSRKNANNLHSWTFYQLQQFIAYKANLVGIRVVEVDPAYTSQTCPACGRNNKVKDRRYECSCGFNAHRDRVGAINIMRQPVADGNSLPA

SEQ ID NO: 63209 - protein, 314 aa, unknown
  TnpB Polypeptide
VAVADQADRAEQGRRAVGELIEAVRAKKRDTCPTFSPRGSIRYDARTYRLMSLDHVSLNTLEGRVVCRLLLGPRQHEMLVDPAWEIGGADLVWRDGVYYLHITQSQEAPPERRPDDGTLGVDLGIVKLATDSGGESFTGAIIHLVRTRYHLRRQRLQKCGSRNAKRRIRRMGQQEVRFQRNTNHCISKRLVQKAAVLRKAIALEDLSGIIERTTVQRKHRYERHSWAFFQLRQYITYKAAWAGVPVYLVDPRNTSRTCSRCGHCEKANRKSQAEFLCRNPLCRHAMNADHNAAINISRTERAAVNRPMASPRAG

SEQ ID NO: 63210 - protein, 481 aa, unknown
  TnpB Polypeptide
LSSVSSDPKSLHDRFLAGQVDGGEHRMPILRRKDQVGLPRQDTVPTRVNVPVLSHGRWILAAMHADTGRRYRAYPSREQAGRLTGWGHSCRAVWNLALEQRRFAWRQRGRTVWSGEQCRHLTDARADLPWLADLPAQTAQQVLRQLDRAYCNWWNPEHPAQAPTFRKRSGGLSVPFPGQAVRVRKCSRRWAEVRLPKLGWMRFRLSRPLGGVVRNATIAKDALGWQVSFGVATATKPAPPNRLPGCGVDFGILCSAFVSDEREPRLMPSTLTAGQRRRLLGLERRKNRQITWAKKHNGGRRSNRLGRTISQIAKLRARQVRRRQDFIHKLTTDLAKNHGWVAIEHLRVKGMTKSAKGTREEPGRNVKAKARLNRAILDNAPYERQRQLAYKAPRFGSELRLVRPAFTSQTCSACGLRDSESRPGCGRLFVCTACGHVEHADLNAAPNIHNLAAGQAVHSTRSHLRAARPSSRMREPVGTIA

SEQ ID NO: 63211 - protein, 342 aa, unknown
  TnpB Polypeptide
LIAKKTIKAKVLELRRGKESLLIKEYQNWQRYIHGDRSAELYSATKQQAEKFIRRLQKQNGGTLKDKEYPMILRNDVYRADTKLTQYWIKIPIHGVRGGINVPVGVSSPIPDGAETKEAKLIRRDGDWFIYMTIEKEVEESPPKNIIGVDLGIRHLAVTVNSSNPKPKFHGKELGAVQAHYYNLRKTLQKKNAHGTVKKVGNHCRRVTDAILHKVSKDIVTEAANTKAAIAIGNLAGIRNHGGGKAFNRKLNSWPFHRLEQFVKYKAEWTGVKVMEVPEAYTSQVCHNCGSKGLRVGGRFQCHSCGREYNADYNGAYNIMKRGIGHALSQGLLLTQPVNPIG

SEQ ID NO: 63212 - protein, 450 aa, Lactobacillus sp.
MTGGEKMKKNEMEYMMGLKMRIYPNRRQEEIFWKNINASRFVYNKLVANSWTDSPIYSNKLDKLFPIPEEYWKYNKNGKLLKASTVRPTGLARITKDKYPWLSDKDIDSDMLSKAEMSYKSAWNLFHKVHKSGTPNFKRKSNPNQGYRTSNHYSSNTIKKDGGVPSLYNGSIKFLDNKHIRLPKVGRIKVKLSKRLPNNQLVRIATVSIKHLPTGEWFVSFLLKSDEPFKEQLPKTNSQVGYDLNTENFLTDSYGNTIDNPRFYRSIKGRLAKEQRKLSRRARRAKSEGRKLWKSKNYQKQRKLVAKLHAKVRNQRKDFLHNLSTTLIKNHDLVVGENLKSKNMLKNHALAMSISDVGWRTFIGMLEYKAPMYGRIFIEIDPAYTTQQCSECKFRMGTNNTRKLTLKDREWTCPNCDTHHIRDWNASKNILAKGLIELSKPLTEDSPIYK

SEQ ID NO: 63213 - protein, 389 aa, Lactobacillus sp.
MTLKGIKLRIYPDDYQRELIEYNFGANRFVWNNMLNMMIKRHENNPDLKSLKVFDLNYILTTFKKEHTWLKKAESTSLQVANKDLFEAYKGFFSKKRKFPRFKSKKYPKQSYQSKFVHNNVEIIDDSYIKLPKLGVMKYKNKKSIPSIIKYVTIRKSSTNKYYAILTVDEDITQLPKTNTSVGLDMGVCDLVICSNESKYKTIRFDKKLAKKKHYWEKRLARRRTQALKDIQYKKKFGLIDPKPLEQYSNYMKAKLMVAKYSEKIANQRKDYLHKITRELVEDNDLIVIEDLKTKNLLSNHKLSRAIANQSWRALRLMLEYKCEWYGKKLLVVNPFKTSQICSNCGYDDGKHELDIREWDCPICGIHHDRDINASKNILNKGLEQALVK

SEQ ID NO: 63214 - protein, 444 aa, Lactobacillus sp.
MMKNEMEYMIGLKMRMYPNRRQEKIFWKNINASRFVYNKLLANSWTDSPIYRNKLNKLYPIPEKYWKHNKNGKLLKSSTVRLTGLARITKEKYPWLGDKDIDSDMINNALVSYKSAWNLFHKVHKSGTPNFKRKSNPNQGYRTSNHYNSVTVKKNGGIPSLYNGSIKFLDNKHIRLPKVGRIKVRLSRQLPTNQLVRIATISIKHLPTGEWFVSFLLKSDEPFKEKLPKTNSQIGYDLNTENFLTDSNGNTIDNPRFYRSIKGRLTKEQRKLSRKARRAKSDGRKLWKSKNYQKQRKLVAKLHAKVKNQRKDFLHKLSTTLIKNHDLVVGENLKSKNMLKNHALAMSISDVGWRTFINMLEYKAPMYGRTFVEIDQAYTTQQCSECKFRMGTNNTHKLTLKDREWTCPNCETHHIRDWNASKNILTKGLIELSKPLTEDSPIYK

SEQ ID NO: 63215 - protein, 401 aa, Okeania sp.
MGIYYARQLFFKSHKAIGKYDLEKVYKHNNHYKVFYSQAAQQILRTVTESFRSYYGLIKAYLAGKISDRPRIPNYRKKGGMATVSYPKQSLKLKGNQIRIPLGNTCKRWFGIDSFFIPIPSNLNFASIKELRLLPRNRCFYWEFVYEKEVVVKTLLNPDNVLGIDHGLNNWLTCVSNVNTSLIVDGKQLKSMNRWYNKQISTIKENKPQGFWSNKLAAITEKRNRQMRDGIHKAARIVINHCLKNQIGTIVFGWNQGSKNQIELGKKNNSEFVQIPTARLKQRIAQLCEESGIIFVETEESYTSIASFLDGDDLPNYGEKPDDWKPSGKRIKRGLYRSSNNWLINADCNGAANIITKVSRKLSLDLRRLCRGTLTCPQRIYLWSAKKRRSNKDLSCCVVST

SEQ ID NO: 63216 - protein, 366 aa, unknown
  TnpB Polypeptide
VKLTLKIKLLPTDEQANLLLETMKEANTVCNAISDVAWEKKIFNNFKLHHEVYHAYKATFKLSSQILVRCIAKVADAYKLDKKTKRQFRPLGSIGYDSRIMTYKPNDIVSLWAIGGRIKIPFVCHNRNYLPYIKGEADLVYKKGKFYLFQTVDVPEEDVVDIEEFIGVDFGQTDVAVLSDGTNYNSEQLKKVRKKYSKTRASVQSKGTKGAKKLLKRLSGRERRFVSINNHTISKQIVAKAKAENKGIAIEDLSKIRFTAKPKSKTQKTELNRWSFYQLRQFLTYKSLLNGVKLVVIPPAYTSQTCSVCNHIGTKENSFRKGKKFACTNCGHVADADINAAHNISAWGVAVNTPEKNNMFCSLHSC

SEQ ID NO: 63217 - protein, 400 aa, Ktedonobacter sp.
MQLVERHFIHQGDARYAALDAASFASKNLYNLANYHMRQAFIQTGAYLDYVEVYQVVKHTDAYQALPRKVSNDVLRLLEKNWKAFRKGLAAWFEDPSKFLGRPKLPKYKDKHKGRNILIYDRQALSKKALKKAVIAPSQLGIEIPTKQAVVKQVRIVPRHGFYVVEVVYEQEPKQAAVDPLLVAGIDIGLNNLAMLTSNKTGFEPVLVNGRPLKSINQWYNKERSRLQSHLGKHERFTSPRLECLTNKRTCKIDHYLHTQSHRIIERLVMEGIGTLVIGKNDGWKQEANMGRRTNQQFVQIPFARFIDMLTYKADLVGIRVILQEESHTSKCSFLDREPICHQNRYRGKRIKRGLFRASSGKRINADVNGSLNIIRKAIPDSFGQGIEGVAVRPVGAPTY

SEQ ID NO: 63218 - protein, 558 aa, Ktedonobacter sp.
MIDRTCASKGGAEVPKKCQGPRKQKEQQEKRPATPTFLLELPLVVDAGQAARLRAHLEAARQLYNAILSQGQTRLRRMRADPAWQEARALPRTHKAERAAAFSALRKTYGFTEAALHEAVKGLRVGWIAEHIEAVLAQTLATRAYRALNRVCLGKAKRVRFKSRGRGFSSIENKRNDTSLRFILLPPESGNAGYLLWNGDHLPAVIDWKDEVVTHGLGHRIKYARLIQRPASSSRAAGADAQGYRYVVQLALEGKPHHKPKHTIGKSIVGGDLGPSSLAVVPQEGEARLEVFCAELAPQARAIRRLQRQMDRQRRAANPEHYDEKGRIKKQGKQKLRWKQSKRYQATRRRKASKERRLAAHRKSLHGRKVHEVVAMGNTVILEKISYKAWQKQFGKSVGLRAPGMFVELLRRTVASTGGTLIEVSTRTTALSQWCHGCGRRVKKPLSQRWHQCTCGVGPVQRDLYSAFLAAYLDPADPIPSCARYQGYWEGAEARLRAAHERTAQRAKEGQILPRSFGISRAGARLPKSLSGPTQEPAFLAQAGRLEAWTERSEPPLL

SEQ ID NO: 63219 - protein, 339 aa, Ktedonobacter sp.
MPTASSQAWQSAADRAWAAISRFYEHCHNKKPGKKGYPQFQHDCRSVEYKQTGWRLEPDGKHIIFTDGCGIGRLRLIGCRDLATCPLPQMMRVRLLKRADGYYAQVLVKAQRHVEHVPTGKHTGIDLGLKAFLTDAQGNTVANPHHLRNAERKLKRLHRRLSRTQKKSANRKKARKKLAKGYLKVQRQREDFARKTANALITSHDLIAYEHLRIANLVKNRTLAKSISDAAWGRFLQWLNSYGSIHTIPVIAVEPAFTSQDCSACGARVKKSLSVRTHICPSCGFVLDRDHNAALNILEKAYRTVGQTGMGEAQAPPNASGQTASTRSGRKARAGKRAG

SEQ ID NO: 63220 - protein, 255 aa, Ktedonobacter sp.
VYKKEVKQADVNPAYYAGIDIGINNLGALTSNKPGFRPVLVNGRPVKSVNQFYNKRKADLQSKLGHTGTTRRMERIANKRNRRIDHYIHTTSKRIIDLLVKEQIGVLCIGKNDGWKQEANMGKRNNQHFVQIPHARFIDMLIYKARLVGISVIITEESYTSKASLLDLDPLPVHDPNNNNEEHTFSGKRVKRGLYRASDGRRLNADVNGAGNIIRKVAPDAFGSKGVEDGKGMFASLVVHPVRIVVPLTKPKSRG

SEQ ID NO: 63221 - protein, 303 aa, Ktedonobacter sp.
MLHVPDKKKCSKPEYLMFLAKEATSLSQCGVEREGVFMLLCKKIKLDLSEQDMATLEFMQGKCRGLYNWWVMKLRDGEKWRFNACKKTLAESRVYDPELNQVYGKLLAEVYYRLDGAMRAFFRRVANGETPGFPRVRPRHGFFTLCYPAMYLTLEGNTLMLPTGGKGKHKRFPAIRAHLTELPPEGFREVAISRDGRGNYYASFSYREPEQAKRDGNTVAFDLGIKTLATGVTQEGRIYHIGGFKGSRWYNKQLDRLRSKRGKCKKKSRRYLHLSKVYKRVSQRKRNKQRDSLHKASHRTTIG

SEQ ID NO: 63222 - protein, 309 aa, Ktedonobacter sp.
MFRRAAINAALGSARAFFSSLKTWRARKEKHEAKPCKKGKKKQPFRERPPVPPRTWNKSASFYAGLWKERSQHSIMLRVWTGSCWSWLKIGALSRDIPEGYAIGSPQLVRKGDSWWLHTPIEKTFEAPAKSGEQLTTAQTRLCAVDLNLDKHLAVCSVQTVDGTILATSFIGNGTAVSGCRKRLLGRIAHKRSQTGIIAEGEQDNADLWRKIRHVDEQIAHLVSARIVQFATKHEASILVFEHLGTLCPEKGTYSRRSNRKRAYWMRRAHLQVREVQGVECRWSHHVPRQSAQYEPAMPSLSRARHSLQ

SEQ ID NO: 63223 - protein, 178 aa, Ktedonobacter sp.
MKQKRAFKYRVYPTPEQRQMLAQTFGCCRFVYNWALRKKTDAYYKDHQRLYYKELSILLTDLKKQEETHWLNEVSSVPLQQALRHLDKAFLNFFEGRAKYPTFHKKRNAQSATYTANAFTWRNGSLTLAKMSEPLQMVWSRPLPNDAIPSSVTISKDAADRYAHLSAGRRGHCASAFQ

SEQ ID NO: 63224 - protein, 253 aa, Ktedonobacter sp.
VERQVAATYKGLWTKLKKNIEHRRAKITKKRFKGLDQPPHYTSPTMQYTYERDYTFQRDSQVSLGTLNGRISVAYQGYNKHIALIREGARIGDAKLWYDQPKKQLYLLVSLSLEVSDPIPAQLQEVVGVDVGIRYLAVTSTSTGKASFHPGKRVRHKANHYARLRKRLQQKGTRGAKRRLRRIGQRERRLKMQANHTLAKQIVQQHPHTLLGLENLTDIRERTKRRKRRRKKNGKGYEPVSAKACKANRVYSQ

SEQ ID NO: 63225 - protein, 602 aa, Ktedonobacter sp.
MFEEGARMSKKCQGQHKQKEQQEKRPATPTFLLELPLVIDAGQAARLRAHLEAARQLYNAILSQGQQRQRRMRADPAWQETRAIPRTHKAERAAAFTTLRKTYGFTEAALHEAVKGLRVGWIAEHIEAVLAQTLATRAYRALNRVCLGQARRVRFKSRGRGFSSIENKRNDTSLRFVLQPPEEGNAGYLLWNGDQLPALIDWKDEVVTHGLRHRIKFARLIQRPASSPRAAGADEEGYRYAVQLALEGKPHWKKKHTVGMGIVGGDLGLSTLALFPQEGEASLEVFCAELAPQARAIRRLQRQMERQRRAANPENYDEKGRIKKQGNMKLRWKQSKRYQATRRRKATKERKLAAHRKSLHGRKVHQVVKLGTTIIIEKISYKAWQKQFGKSVGLRAPGMFVELLRRTVASTGGTLVEVPTRTTALSQWCHGCGRRVKKPLSQRWHHLRRRTGATRPVFGLPGRLSRSSRTYSLVCPIPGVLGGCGSAPAGSTRASSTTRERGAVLAPKLWHPQSRSASAQKSRGTTTRASFPASVGRTGSVERIPGTPSALVLTLPHKCWRAEKKSKNKRRRKAHGTRTFTACRHMDRPDLRSSRIGRSASY

SEQ ID NO: 63226 - protein, 320 aa, Ktedonobacter sp.
MTFTNKFLDQPPHYTSPTVQYTYERDYTFQRNQQVSIGTLNGRISVAYQGYGNHITLIRQGATVGDAKLWYDASKKRLYLLVSLSIDVPEPRAEHLQEVVGVDVGIRYLAVTCTSTGKASFYPGKRVRHQANHYARLRKRLQQKGTRGAKRRLRRIEQRERRLKLQANHTLAKQIVEQHPHTLLGLEQLTDIRERTRRRKRKRKKNGKGYEPVSPKARKANRVYSQWSFAQLHTLISYKAALVGSLAIKVDADYTSKACPMCGHTSEKNRPHKGLLFVCQQCHYCLHTDLVGARNITMRTLLVRHDWIRTGCLCAPREAQ

SEQ ID NO: 63227 - protein, 613 aa, Ktedonobacter sp.
MGDGNRLTRYRERGEKAPVIDAGDESPPLLDERKESRGRYLELAFFPFLWYNRRQWIEITCVFEEGATMPKKCQGQRKKKEQQEKRPATPTFLLELPLAVDPGQAARLRSHLEAARQLYNAILSQGQKRLRRMRSDPAWQEARALPRTHKAERAAVFSALRKAYGFTETALHETVKGLRVGWIAEHIEAVLAQTLATRAYRALNRVCLGKGKRVRFKSRGRGFSSLENKRNDTSLRFVLQPPEEGNAGSLLWNGDQLPALIDWKDEVVTHGLRHRIKFARLIQRPASSPRAAGADEEGYRYVVQLALEGKPHRKKKHPVGASIVGGDLGPSTLALFPQQGEASLEVFCAQLAPDAKAIRRLQRQMERQRRAANPEHYDEKGRIKKQGKKKLHWKQSKRYQATRQRKASKERKLVAHRKSLHGHKVHQVVKLGSTIIIEKISYKAWQRQFGKSVGLRAPGMFVELLRRTVESTGGILVEVPTRTTALSQWCHGCGKKLKKPLSQRWHRCACGVGPVQRDLYSAFLAAYLDPADPIPSCARYQEYWEGAEARLRAAHERLTQRAKEGQTLPRSMGLTRARARLPESSGGPPLEPAFLLKREGREAWAEPLEPPSL

SEQ ID NO: 63228 - protein, 473 aa, Ktedonobacter sp.
MGRNAAFLLWGMGRVVLSHICAVNICVNICYTPVMKQIIIAKLKLHTESAQFAALRKTQLAYRDALNYVSRYSFEHGKMSNQRALQRDCYDEIRLKFGLPAQMACNVPRQVGATYKGLWTKTKQNAALRSAGLTKKRYKGLDQAPTYVSPTLTYNYHRDYSLKSNNQVSILTLDGRVIVSYTGYDKHVALIQHGAEIGAAKLWYDKPHKQFYLLISLELERADPTPESHSHVVGVDVGQRYLAVTATPNNEAAFYCGKAVRAKADHYARLRKRLQKKGTRSATRRSVILSGRERRLKQDANHLISRRIIDQHPHSIIGLEDLTHIRERTKRRKGQKASKKQRKANRHASKWAFAELHGYIAYKATMAGSMAVKVDAHYSSQACPMCGYTDPSNRPNKGLLFVCQSCHYTLHADLVGARNVTMRTLLTRQDWMSTGTLLVSPDVSCDEAKALRQQRYSELRWSTDTSPRRRGVG

SEQ ID NO: 63229 - protein, 264 aa, Ktedonobacter sp.
MATAMRVQLILEGHALIKKKHVQTGTDTIGLDIGPSSLAIVSREGKADLVTFCEELTQNARKKRRIQRKMDRQRRANNPENYDEQGRVKSGKRLRWKESKRYQATRRQHANAERRLAAHRKSLHGNLAHRIASVGNTITIEKTSFKGWQKQYGRSIGLRAPGMFLAHLTRIVAKTGGTLHEASAYQTRLSQYCQKSGQYHKKPRSERWHQCPCGFGPVQRDLYSAFAAFLPGTAANDPLSHPACLGRCGAAPASRDGGASTTCE

SEQ ID NO: 63230 - protein, 346 aa, Ktedonobacter sp.
VTHGLKHRIKYARLIQRPASSPRAAGADAQGSRYVVQLALEGKPHHKPKHSIGTGTVGGDLGPSTLALVPQEGEASLQVFCAELAPDAKAIRRLQRQMERQRRAANPEQYDEKGRIKKQGNKKLQWKHSKRYQATRRRKATKERKLAAHRKSLHGRKVHEVVALGSTIIIEKISYKAWQKLFGKSVGLRAPGMFVDLLRRTVASTGGTLVEVPTRTTALSQWCHGCGKKVKKPLSQRWHLCACGIGPVQRDLYSAFLAAYLDPANPTPSCARYQRYWEGAEARLRAAHERTTQRAKEGQALPRSFGIPRAGARLPKSPGEPTLEPALLLRRGRLEAWKERSEPPLL

SEQ ID NO: 63231 - protein, 467 aa, Ktedonobacter sp.
MEDARETPERQPDETALPVRVKASVYRLYPTRKQEGTLLWTLRRCKELYNASLEERTAAYKMAGVSVSYGMQSEQLPQLKEERPEYQEIYSQVQQDVLRRLDKAMKAFFRRVDEGQPPGYPRYKSNARYRSFTYPQSGYEIIGALTSHDTKKKKTCRLKLSKIGHLKMVMHRPIKGTIKGCTIKHDGDQWYAVFSVEQAIGATPVHPSTKTVGIDMGITSYATLSTGEQIANPRIYRSTEQQIKEAHRRLSRRKRGSHRRARAKRALTRLYRKVRHRRQDFLHKASRQLVNQYGMLVFEALQIPNMTARPKLKPAEAPAPLQGSNSGTAAAVTHYLPNGAAAKGGLNKSILDAAWGRFITLCACKAEEAGGMVVKVAPQQTSQLCSGCGVLVPKDLSVRWHSCPTCGAELDRDENAALNILRRYELHGPIRERKKRKATRKVVGAGSAPQRSVPSKEGADHCRSPRL

SEQ ID NO: 63232 - protein, 205 aa, Ktedonobacter sp.
VGVDVGLKHAAVVSDGRRLENQRPLALHLKKLGKLQRKLSKKQKTKDPQTKRTVFSKQHEKQRLKVARKHQQIANIRRDVQHKFTTELARTCGAIGIEDLNIVEMMANRKLSRAVADAAMGQLLQFLKTKVANAGGELFIASRWFPSTKRCSCCGQVKKRMPLKHRTYECVACGLEYSPDEHPPQEEHEPGSPDARASSSACSSS

SEQ ID NO: 63233 - protein, 293 aa, Ktedonobacter sp.
MLLERPTRNLHNAPFSSRKPARALFLVGKRGRDADFRRDGTLSIWTVAGRKHLTYSIPQDFKTAFEKALEIDSLTVIKRDGKLIGRVTLTLDAPEPQGILPVGIDLNETNALVAVDPDGRTLFVSGKDIKVKNRRTAKTRTRLQRKHATRKAEKKDTRSIRRLLKRLGRTQRNRTRTFAQQTAKHLITFAPENAVLVLEDLHMPKPEKGKLRGKALRRRMSLWQRRLIRTCVENKAQECGLSVTQVNPAYTSKNCSRCGLRGMRKRHAFSCPHCGHTDHADVNAAVVRRFGVH

SEQ ID NO: 63234 - protein, 388 aa, Ktedonobacter sp.
MKTFKYRLMPTRKQREKLEWTLARSCELYNAALQERREMYTYTGKGTTYNAQANQLPEIKEIREEYKDIHSQVLQDVLQRVEKAFKDFFRRVKKGDTPGYPRFQGRNHYDSFTYPQAGFNIDEQGKLFLSKIGHIKIKLHRPIQGIIKTCTIKREGDCWYVCLACEVEAMPRTPYTDEAVGIDLGVSKLATLSTGDVIENPKHYRHAEKKLAKAQQALSTKKRGSHRRKKAVKRVALLHRKVRNQRNDYLHQWSRRLVNTYGTIVFEDIAPANLSRKAKPKQDEETGKYLPNGASAKSGLNKSILDAGWHQFITFCQYKAEEAGTSVVLVDPRYTSQVCSSCGSIRKKELSQRWHSCECGCELDRDHNAAINIKNLWLGRSHREAQAS

SEQ ID NO: 63235 - protein, 449 aa, Ktedonobacter sp.
MPKKCPGQRKKKEQQEKRPATPTFLLELPLVVNAGQAARLRAHLEAARQLYNAILSEGQRRLRRMRADLAWQEARALPRTHKAERAAAFSALRKRYSFSEAALHEAVKGLRVGWIAEHIEAVLAQTLATRAYRALNRVCLGQARRVRFKSRGRGFSSIENKRNDTSLRFVLQPPEEGKAGYLLWNGDRLPALIDWKDEVVTHGLRHRIKYARLIQRPASSSRAEGADAEGYRYFVQLALEGKPHHKPKHTIGKGIIGGDVGPSTLALVPQEGEASLEVFCAELAPQARAIRRLQRQMDRQRRAANPENYDEKGRIKKQGNKKLRWKQSKRYQATRRRKATKERKLAAHRKSLHGRKVHQVVKLGKTIILEKISYKAWQKQFGKSVGLRAPGMFIEWLRRTVASTGGTLVARSHTHDGAEPMVSRMWQAGEEAALSALASVLLWRGSRPT

SEQ ID NO: 63236 - protein, 346 aa, Ktedonobacter sp.
VTHGLRHRIKYARLIQRPVSSPRAAGADAQGSRYVVQLALEGKPHRKKKHTVGKSIVGGDLGPSTLALFPQEGEASLEVFCAELAPEARAIRRLQRQMERQRRAANPEHYGEKGRIKKQGKKKLRWKQSKRYQVTRRRKATKERTLVAHRKSLHGRKVHQVVKLGSTIIIEKISYKAWQRQFGKSVGLRSPGMFVELLRRTVASTGGILVEVPTRTTALSQWCHGCGRRVKKPLSQRWHHCACGVGPVQRDLYSAFLAASLDPADPIPSCARYQEYWEGAEARLRAAHERTAQRAKEGQILPRSLGVTRARARLPKSLREPTQEPASLAQAGRLEAWTERSEPPLL

SEQ ID NO: 63237 - protein, 512 aa, Ktedonobacter sp.
MFEEGATMPKKCQGQCKKKEQQEKRPATPTFLLELPLAVDAGQAARLRSHLEAARQLYNAILFQGQQRLRRMRSDSAWQEARALPRTHKAERAAAFSALRKTYGFSEAALHEAVKGLRVGWIAEHIEAVLAQTLATRAYRALNRVCLGKAKRVRFKSRGRGFSSLENKRNDTSLRFVLQPPEEGNAGSLLWNGDQLPALIDWKDEVVTHGLRHRIKYARLIQRPASSPRAAGADEEGYRYVVQLALEGKPHQKKKHTVGTSIVGGDLGPSTLALFPQQGEASLEVFCAQLAPDAKAIRRLQRQMERQRRAANPENYDEKGRIKKQGKKKRHWKQSKRYQATRQRKASKERKLVAHRKSLHGHKVHQVVKLGTTIIIEKISYKAWQRQFGKSVGLRAPGMFVELLRRTVESTGGILVEVPTRTTALSQWCHGCGKKLKSRFRSVGISARVAWVPCNATCIRRFWLPTLIQQTPFPRVPDTRSIGKVRKRACGQHTSVSHNARKRGRPCPEAWV

SEQ ID NO: 63238 - protein, 378 aa, Ktedonobacter sp.
MGSGTASSIPASFNVPPAAPKRLALIHRAIATRVQLALEGKPHHKPKHTVGQGIVGGDLGPSTLALFPQEGEASLEVFCAELAPEARAIRRLQRQMERQRRAANPENYDEKGRIKKQGNKKLRWKQSKRYQATRRRKVTKERKLAAHRKSLHGRKVHEVVAQGKTIILEKISYKAWQKQFGKSVGLRAPGMFIEWLRRTVASTGGTLVEVPTRTTALSQWCHGCGKRVKKPLSQRWHQCSCGVGPVQRDLYSAYLAASLDPADPIPSCARYQAYWEGAEARLRAAHERTAQRAKEGQSMPRSFGLTRAGARLPKRSGEPPLEPAHLLRGEEQEAWAEPLEPPLLSHGELSGGIVHKLEEDGIPMPTQTRFPGAKRAQH

SEQ ID NO: 63239 - protein, 387 aa, Ktedonobacter sp.
MIKAHKIRLHPTPEQAIYFAKAAGTARFVWNWALAEWNRQYEAGLKPTALKLKKQFNEIRREQFPWTWEVTKNASDQPFLDLGKAFTAFFEGRARRPKFKSKKRSKPSFYLANDQLELGDHRIWVPKLGWVNMAEKVRFAGKVTGARITRTADWWFVSIQVEIPNTIPVKKPAAVGIDVGLNRLATLSTGEGVENQAFLKTALKKLRRANKRLHRRKAGSKKREQARRQVARLHYRITCLRDDVLHKLTTRLATCYGIIGIEDLHLKGLLKNRKLARSFSDAALGKLLSLLASKVEQRGGQVIKVDRFFPSSKTCHCCGWKWEAMQLSDREFLCQNPSCAYHLFPQDRDHNAALCILAEALRLIGLIDQVATGTGSDDGVNLAVDAG

SEQ ID NO: 63240 - protein, 393 aa, Ktedonobacter sp.
MAKATKTIRQALQYPPQAAHSFAEHQALYNRVVAFYFEVIQAHEGILSLKSKEALTALEKLTHATEKNPHPILPLSDIAPDIPAMFRRAAINAALGSARAFFSSLKQWRARKEKHEAKPCKKGKKKQPFRERPPVPPRTWNKSASFYAGLWKERSQHSIMLRVWTGSCWSWLKIGALSRDIPEGYAMGSPQLVRKGDRWWLHTPIEKTFEAPAKSGEQLTTAQTRLCAVDLNLDKHLAVCSVQTVDGTILATSFIGNGTAVSGCRKKLLGRIAHNRSQTGIIAEGEQDNADLWAKIRHVDEQIAHQVSARIVQFAIEQQASILVFEHLGNLRPEKGTYSRRGNRKRAYWMRRAHLQVREVQGVECRWSHHVPRQSAQYEPGMPSLSRARHSLQ

SEQ ID NO: 63241 - protein, 431 aa, Ktedonobacter sp.
MKTAHKIRMNPTPEQVEYLKRACGTRRFIYNWGREQWEKQYQAYTAEQETVPQEQRVLKPPHALALKKQFNQIREQEYPWTYHVTKCVVEGAFDDLKNAYDNFFAGRANYPQYKKKGKSHESFYLSNDKFTLGSHWISIPGLGRFILDQRQTKKDRGKLLRRLGTVNLAEKLRFVEKGKATTPTKKRNQRKHVVCERVKILGATVCCEAGHWYVSIQGDITRERPTTPEAVVGVDVGVKHAAVVSDGRRLENQRPLALHLKKLGKLQRQLSKKEKTKDPQTRRTVFSKNYEKQRLKVARKHQQIANIRRDVQHKFTTELARTCGAIGIEDLNILGMMANRKLSRAVADAAMGQLLQFLKTKVANAGGELFIASRWFPSTKRCSCCGQVKKRMPLKHRTYECVACGLVIDRDLNAALNLLWFATQQLRQLHA

SEQ ID NO: 63242 - protein, 152 aa, Ktedonobacter sp.
MPISLIDAVMRLHKLSTRLIRENQTICVESLAVKNMVKNEKLAKAISDVGWSEFVSQLEYKADWYGRTLVKIDRWYPSSKRCFECGHLLDALTLDVREWICPECGVHHDRDINAANNILAVGLTVHACGESRRPGAVKTKPGSSRRSRKASK

SEQ ID NO: 63243 - protein, 375 aa, unknown
  TnpB Polypeptide
MRLTYKYKAYTQNRNHRGWLNRYLRVAAWVYNHCIALHKRYYRLYHKRLGEYDLKKHLTKLKRQEKYKEWNLLSSQSIQQIAEKISEGYKRFVKGHAKRPPTFRSWRKYRSVTFKNTGWALNGNVFTINALKLRIKFHKSRELEGQVKTVTLKEDAVGDWWVCFSLEREGQAEVKPQTGKSAGFDFGMKTFLTVSDGERVHSPQVLFHSLDKLRKDSRRLSKKQKGSRSRKKARIALARLHRHIECQREDFQWKVANDLVSRYDLLCFEDLDMKAMQQSWGRKIGDLAFASFLNRVEYLACKYGKKVVKISRWEPSSKTCSCCGHKEKELPLDTRQWTCPQCGTAHDRDMNAARNILRVGHPPWKGGAVNPALAG

SEQ ID NO: 63244 - protein, 400 aa, Limnoraphis sp.
MLEVLKVRLYPNKEQEVALAKNFGCCRMVWNYYLEKTNTQYKETGKGLSYCDMAAYLTQLKKLPNYSFLQEATAATLQQSLKNLETAFKNFFAHRARFPKFKNKQKKQSIRYPESCSIKGNGVKLPKLGIVKAKLSKTISSPIKSVTVSKTSTDKYFAAILFESDNLPLDITGKISGIDLGLTSLVTVFDGETYTKVDPIKPTRKYAKRLKRRQQASSRKTKGSNNRKKQVKRVAKVHEKIANTRVDFLHKLSRKLVDENQVIVVENLCVKGLARTKLAKSVLDASFGMLINFLGYKIEREGGKLIEVDRFFPSTKLCNCCKFKNDSLNLSIREWVCPNCKTHHDRDENAAKNIREEGLRILSTNTVGHTEIQACGEEIRLSSACTKKHSSVKQESPVTA

SEQ ID NO: 63245 - protein, 546 aa, unknown
  TnpB Polypeptide
MIIQSKYTKVFHSKDLTRLKYDELYNFAVLIRNHKNVVSQYVNDNLLHFLEYNKFQFNKEMRGYFNNVIPSSFDTQLYTQVFNCYQNKFETIQRKLTFETKTFNGFEFYKRGTKIHKKGELKRVMFDKKHTPLSNCLTYLSRYGNENTIIYIKSNINKCDDKKRKFYDNILRCCNKFGFERLYNLALSKRERTIKRYSESPIEFKSLTFSGRCRKKKIIDYNSRFSSKINSFVSLSGVGRKSFDIPVTFNKGWHGNMRDYRKMNPDYEYTLTIDEKKHQVYIHLCKDGERYIPEPNGNSIGIDVNCKHNLFSLSNETIYDYNRKLVNDFCKLSLEIDKLKGDKLYTLGKRKQRKLDVMKSKMVKSEQQLIANMCKTLQSQGVGHVVMEDLDNSFGRCYIKDKDNEDINYNRKVRFLGLSSLKQEVEHIARKYDIAVSTVQASYTSKMCPNCGCIDDRNRQSQETFECIECGHKDNADFNAAKNIRNRVLVTVLRESLLKQLDNGAFEPKKLKREKVKEVLLSFRRNLQKTARSECRKGTLSAFNYV

SEQ ID NO: 63246 - protein, 381 aa, unknown
  TnpB Polypeptide
MSSHAECMVSEAIQTKSRRIRIYPTPQQKQLFKQWIGVGRKVYNTCINHFKEKDIPFKGWMNMSTLVLSELTEDYIKSVPYQIKKIAVKDSYTARQTNCKKTKQSGKPFKLSYKSRKNPVQSCYIPKTAVSESGIYHTISGKLKFSEREWLKNDICDCRLINDHGRWYISVPQKMKTMPTENQGGIVALDPGVRNFLTYFSEDGRFGWLGIHAFDRILKLNLKRDKLLSKLALTKDKRKKGKLKRTLNRTYHRIHDLVDELHWQCINYLVHNFSVIVFPPFEVKCMTKKGRKLRKSVVRSMLSLRFFEFKERLKQKCKECGVMHIEQNESYTSKTNSFTGELMTKLGSKEWFMYDGIKVHRDLNGARNILIRAMRDSSAAG

SEQ ID NO: 63247 - protein, 420 aa, unknown
  TnpB Polypeptide
MLRATKIKLYPTSRQATQINKLLGCCRVVYNKALDRKIKQYKEHNISENRTTISHWFHHELLTNPNFVYLKEQNTKVLKQAIMDMLTAYNRFFKQHTGYPKFKSKHYNKQSCRFERAAISKRNDYISYKLSLANIKNIKFICSKKYAEYLQKHKANIKQATLSKLPCGEYYLSILVDGDLTHKSVQDTNKCIGIDLGVKDFVITSEGKVFNNLHFKKNEVGKLKRLQRQLSRKVKGSNNRDKARIKLAKANKKINDKKQYYLHAVSNALINENQVICMEDLNVRGMLRNHKLAESIAEMNFGEFRHMLEYKARWYNRKIVFVDRFYPSSKTCDHCGYKYKNLTLSVREWDCPECGTKHDRDINAAVNILHEGMRLLGSSTTEFTLVDYPPMDDRSEMDLKSNDRLKQEANKEQSSTLFKF

SEQ ID NO: 63248 - protein, 426 aa, unknown
  TnpB Polypeptide
MVALFHNKFIRKNFVIHKIISIFASDMRKINRTYKFRLYPNKAQTELLSKHFGCSRFVYNYFLNQRKEQYRLTGKSDAFYAQAKTLTTLKKQEETAWLNEVNAQALQFAIRSLETAYNNFFKKRAKFPKFKSKHSKNSFTVPQYASVVGGRLFICKFKEGIKCRVHREIKGKIGKVTITKTPSGKYFVSVFTEEEYITPLKKTGKSVGVDMGLKDLLITSEGETFKNNRYTRRYEYKLAKAQKHLSRKKKGSRGFENQRLKVARLHEKISNSRADYLHKCSISLIRRYDTICIEDLNIKGMKKNHHLSKSITDASWRKFVSMLTYKTEWNDKKVVKIDRYFPSSQTCHVCGYVNKDIKDLSIREWECPKCHTHHDRDVNAAINILRFGLNNISSGTGDYTGGEEVRADLLESRSSMKPEANKNLKN

SEQ ID NO: 63249 - protein, 393 aa, unknown
  TnpB Polypeptide
MLRAYKYRMYPTDSQKELLDKHLNACRFIYNLALETKNRAYISCRKNITCFELMRQTTELKLDCPWLKEVDSQALQQSIIDLDKAFTQFFKSTKGFPNFKNKYGKQSYRSPHEDRIRIENEKVRLPKFKAGIKIIQDRKYKGELRNATISKTTTGKYYISCLVETGVEIPVKKPIQESTAIGIDLGIKTYIATSEGKEYQNPKYLKNSIDRLKILQKRASKKVKGSSNRKKANLKVALLHEKITNQRKDFLHKLSTEITNQYDTICCENLNIEEMVKNHKLAGAVQDAGWGEFVRQLKYKSEWYGKNLLQIPTFQASTKVCSTCGTMKQGLTLADREWDCDNCQTHHDRDINAAKVIKQYCITHSGQVLPGESVELPTMVGTMKQKDTKLLIH

SEQ ID NO: 63250 - protein, 646 aa, Streptomyces sp.
VEEKTGEALSAAVLAEQAGWAADLVSGMAAALLAEHWNSADVDTLAAGEDEVGRPLPSSAWMALRRLGWTVSPPEGIRVNDRIVRMAQEQAGRTLRSAKWRADLTAGVLATWPATPARRTPTEWDAVREAVPDGWSVPSSVISSRTRQITAFAKKHGQMSADVFEMEAEPRIARMLLLSACDGQQATIERADEPGRALLRMQLPTCPDPRSYADWRWVACPIKLPPTIPTSAVLHLPTLRLHQDTVRADLAYTHAVPKARRSGHAVALGVDWGLNTLLSAGAARLNDDGTITALGSGGMFRANGILAKQHRLRRLSEHLHAKADHYQRLINGAEHHLLTGRHAILTDEIRHVSSRRSSLNDALAWSAARWSVDHAITAGASVIYVEDLRSIEARGMGRTMNTRLSQQVRGQIVDRMRHLAAEAGIAVVTVPARNTSKHCPQCLDVLRHHKAPDRLTTPGWKWALCHSCGWQGDRDQGAWRRIAARGLTHQAKTITDRTSGVMMIRTVIDKLEAGAIVTPTAPKTRREDRSKTGPTRPRSTRPAPRRRRAPSSARPMGPAGQRPEGHAHTDRTRLPRAAHRHQGVTTISTPATSRHRPGGAILGAGFHHHAHATPPRWEIPGQTLRLTWDTQADQRRCGTPVRAQAE

SEQ ID NO: 63251 - protein, 394 aa, Shewanella sp.
MKKTLRYNFRFKPTVEQEAKLAEFGACARGVWNLLLSENVRRYRYDKTFLFYDEMAGLLRDLKMFEEFSWLKAFDSAASQQVARDLDTALKNSSNKGRAQQFPTFKISFKLKRLHDDSFRCVNNNDCIRIEKGAISIPKVGKIPIVLHRKLASKIKTATVKMRHGNWYVSLTQEVECKSAKQVLSTLVGYDINSQYTVVGSNGWYVKNPKAFKKASSKLKQIQVQLSRRTKGSNRWQKTKSRLNKLHGKISRQRLAFAHEVSCSIAKSSDIIVFEDLNVKGMQQFNGQMVNDNVMGLITLLTQYKAELNGAVYHEIGRYVKSSGICSECGHEHKFDLSVREFSCERCKAMQCRDLAAAKSVADTGKKDLMASGILVRALPKSQQKSPLKTKVFE

SEQ ID NO: 63252 - protein, 361 aa, Shewanella sp.
MKRAYKERFYPNEQQSELLAKLFGCCRFVWNNSLKYRTDAYYENGGSIAHSVLEKRLVPLKQEFEWLKEVSSVIFQQALRDQQEAFKNFWEKRAKYPKFKSKHGKQSIRLTKAAFKYRDGQLFIAKSNQPLDIRWSLELPSEPSSITISKDKAGRYFVSMLCEFESKPMLVTAKTVGIDLGLNNLFITDSGEKVDNPRHTKRYEKKLAYLQRQLSKKQKGSKNREKMRQKVARLHAKIADSRSNNLHKLSRKLINDNQVVCVESLAVKNMIRNLKLAKHIADASWGEFIRQLKYKAEWAGRTIAEVDRFFPSSKRCNVCGFVHESMALNIRAWTCPECQTHLDRDINAAMNIKTVGLAGLV

SEQ ID NO: 63253 - protein, 412 aa, Blautia sp.
MSTKQGYSITTRRLRLRCRHPEWLQKTQDFYNEIAFFYYELLLKHTELWNLGSQRLLRELEILSLPGRENRIPESPLPWEKVPLYFRRAAANTGIAAAKSYLARQDINPGRKSQKLDAAVVFYKGMYRDFSSSEITLKVWDGNQWQWMRCRIYGQEFPEGAQIMSPSVVFEYKFVMLHVPIKEAVDDSAGIKQRFAEKRNFCSIQFTNGDAFAVGCISDISGSELAVRLWGGGKEYAHHCKRVVEKIEKSEKSLGESKCGRGRDERLKSNERPNQKYWMHLKHLAEHYAHEVSAGIVSFCKEHDAAVIVLPKYDKDYTRHVMYGSGDWSPLHLSVRIRQFLPYKAWKAGILVIDVNARGISSVCAKCGKNIVGFNKQKIEYFCEDGHRGNRHLNAARNLGKKYLMQFGKHVE

SEQ ID NO: 63254 - protein, 367 aa, Streptomyces sp.
MDRVELQIIDAKHIRLPKIGAVKTFESTRKIGRLLRKNEVPCPACEATGGGPAAAAGGTAAAAVGGTGKCSACKATGTVPAARIVRASVSRDSSGRWFVSLTVARVREIRTAPSARQRDGGPLGIDFGVRDIATLSTGSTIPNPRGLEAHLLRLKKAQQALARSEMGSVRRARTARRVGRIHARVRNLRADFVAKTTTNLIHAHSVIVVEGWDVQQAAQHGSPHLPAKVRSARNRALADTAIGAARWQLQAKAAWYGATVVTTGRHAPTGRQCSACGTVKTTPLRPTQDQFRCAACGTRLDRRLNTARVLAAIAAQHLTGAPGGGEPQNDRGGNISPATLRRGGQSPMKREARTRPPRRGQTGTPGT

SEQ ID NO: 63255 - protein, 430 aa, Planktothrix sp.
MKCDTADLSACNLSTQKILRYHIGVRRIEPMLVYEFKLKGKAEQYRLIDEAIRTALFIRNKCIRHWLDNSKVGKYDLSAYCKVLASEFSFAKKLNSMARQASADRAWSAISRFYDNCKKKVKGKKGFPRFKKRGHSVEYKTTGWKLSEDRKYLTLTDSFGMGKLKLIGTHDLHFYQLADIKRVRLIRRADGYYAQFCINHNREIRTELTKRMIGLDVGLTNFYTDSDGNKVDNPRFLRPSEKSLKRLQKRVSKKFRRGQKQSNNYIKAKQKLAKKHLKVSRQRKDWACKLAQCVIQSNDLIAYEDLQVRNMVKNHKLAKSISDAAWYQFRVWLEYFGKIYGKITVAVPPQYTSINCSNCGNEVKKTLSTRTHKCSCGLVLCRDTNAAINILTKGLGTVGHTGTWAQDALNAWGELSLYLDSVMDLDKDSR

SEQ ID NO: 63256 - protein, 292 aa, Natronorubrum sp.
VFPEYVVPPESKREETPFGRYYDSDEWDASHATLQYDELADEFYLHVTTKHVGDADSERQEAAHEDDGSENGVVLGVDLNVNGAFAVTSTGVFIGSADHLTHRRNEFEKRRGRLQQIGTRSAHLTIQSIGDRFSKWSLDWLHNRANELIAEAKRSDVHGIVFENLKHIRKRISNAAKFQQWAVAKFIKLVEYKVEDTVLFVDTVNPAYTSQRCSQCGFVHEDSRSDKSFECLKCDYEVNADYNAAKNIANRYCAYIHRGQKSRGGWATCQLALKSGTLNVNGDFNASPRLEG

SEQ ID NO: 63257 - protein, 368 aa, unknown
  TnpB Polypeptide
MKTYKYKMSHQSNLIRLGNLLDDLWQVHAYFHKWQDQRYKEGLPYANHAAMCEHVAKRKQTTHPHWKALPSQAIQEELRRIDAAYVRFFKKIGGKPKIKKRHKFKSLTLKQAGWKLRENRLTITLRKWDAGKWKRDLVPYTFFKHREFHGNIRCLTIKRDACGDYWLCITTDFQDTDPLHATGESVGADFGMKDAYVTLSTGEKIQHPQPLKQSLNKLRTLNKSMGRKHKGSNGWWRCVRQLARLYRKISDQRLDFQWKLADDLCKRFDTIVLETLNLDGMKRLWGRKVSDLAFYQFVEILRYKCEKHKRHFVQIGQWTATSKPCSTCGYKNENLSLSDRQWICPNCGSHHDRDINAALNILQAGIAA

SEQ ID NO: 63258 - protein, 414 aa, unknown
  TnpB Polypeptide
MGVKSVMCDSQMKLTFKFRAKPTKTQEHWLFAELRHQKQLQNYMLQMRNQMWAYGRKSVSMYDQINHLAKLRTNTSHYSDHPQDMQVSTIKRVNAAHEHFQRCCKVGAEKKGYPRYKRSVRSLSWSLRKHKLKTGERVRQNPIRETGTRYNRLKVPKLGEVKIRQHRRLIGDPKEVTLKKTARGWYCFIVCEVPDTLKCVPTSACGVDVGTQDFLTTSEGEKIPNPRFYQTVERKLVKLQRDLSRKQYQSKRWYKAKAALGKHADIVACQRLDFLAKTAYDLFHHKGFDAVVAEKLKPSNMLKNRHLAKSISDASWGMFFDWCHWLAKRDGKHFHQVPPHNTSQTCSECCQKSPIKLKLSERLFHCKSCGLKLDRDHNAALNILNRAACALRGEVWDAILYETRNQLLQLACWS

SEQ ID NO: 63259 - protein, 437 aa, Methylacidimicrobium sp.
MRANTQSFIAEFPLRTAAADEVALSKRLNAAREIYNASLGEALRRLALMRQSKDWQRACQMRKTIVDERSGKRIGNKERSTLFRKIQDCFGFSSFSLQKFAESCRNACSIRDHLGSHDTQTASLRAFRAVQAYAFGIRGRPRFKPASRFHSVEGKGDAVIRFRKEPVLAIHWAGLVLPLRLDPKDKRGWQRIALEARTKYVRVVRRTIRGKTRWYGQLVQQGVAPQVRPVGEDVVGYDLGPSTVAFVSETDASLENLCPEVEQPWKQTRRILRSMDRSRRSTNPGNYDTEGRVKRGVKRWVGSERYQHRLRDLAETERRLAAARKTAHGNLANRMLAQGKTIKGEKLCYRSFQKNFGRSVKVRAPGMWVERIRRKAESAGGRLTRDRSPEDSIEPVRSDDRAVREEAALFADARLRRWPYRACAAGSLQRVSREMLR

SEQ ID NO: 63260 - protein, 424 aa, unknown
  TnpB Polypeptide
MMALDGAAISTRIMTVHRIALDVDKAQDALFAQCAGIARFSWNWALDRWKSQYTAHCENNSLPKPSEAALRRELNAIKRAEYPWMLHAPKAVPQQAIKNLGAAFKGFFEGRSRYPNFKAKDLCRESFRPDNGPGTFRVEGRRLKLPRIGWVSMREALRFGSDMNPTLKSVTISREAGRWFAAIAVEIDHSFTPRPEGAVIGVDLGVTDLATLSDGRKFSGSKSLGRNLKRLARLQRSHARKQKGGKNRARSRARIAKLHARIRNIRHDGLHKLTNKLSREASTVVIEDLNVRGMMANRHLSRAISDMGFFEFRRQLSYKLARLGGTLIAADRFFASSKTCSACHTKAEVLPLSVRSWTCANCGAQHDRDINAAINLKNLAGSEDLKVRPVSACGVEGSGGRTDPVVKPATMKQENGPDQKRSGP

SEQ ID NO: 63261 - protein, 334 aa, unknown
  TnpB Polypeptide
LDLAFQAFFRRLRAGGAPGFPRFKSAARFRGWGYKEHGNGFRVEMRHGGRHGHATLFGIGRMRMRGVARTPGRVLKADVTRTIRGWMLNVVVETGCAERAPAEGPAVGLDWGVSTFATLAHEGGTFEEVPNPRHLGLEAEGLKAEQRRLSAAARARKISRRALQKQRRDLARRHAKIAARRKDFLHKASARIAGRHRLIATEALAVRNMTGSARGTAEAPGRNVAQKAGLNRSILDTAPAGFLNMLRYKAEEAGAEFLEAKTREIKPSQRCPDCGAVRKKTLAERHHDCDCGCRLGRDEAAARVLLNWGLAESRRRQNAETINPAGMVGDQAAA

SEQ ID NO: 63262 - protein, 139 aa, Enterococcus sp.
  misc_feature (139)..(139): Xaa can be any naturally occurring amino acid
VERLKAYKFRIYPTEEQEIFFAKTFGCVRKVYNLMLNDRKKAYEEVKNDSSKKMTFPTPAKYKKEFPFLKEVDSLALANAQLHLDKAYKNFFRDKSVGFPRFKSKKNPVQSYTTNNQNGTVALIDSKFIKVPKLKSLVX

SEQ ID NO: 63263 - protein, 393 aa, Enterococcus sp.
MVLTKKGGTEMITAIKIRLKPTKEQEILFRKSCGVARWSYNYFLAESESYYAAHKKTLKETEVRKYINNVLKPTTHTWLKEVGSNVMKQAVKDANLARQRWFKGISDKPKFKSKHKCKDSFYVNYESLKRTKDGFRGEKIGNVKTCGSLPKLKKNEHYLNPRISFDGKHWYLSVSYEKEFEQVKLTDESLGIDLGIKDLAVVSNGKVYKNINKTKKVKRLEKKLKREQRKLSRKIENNISGYTKNRKPIYKKPLREMKNIGKQQKVIKNLYKRLSDIRKNHLHQTTNDIVKTKPYRIVMEDLNVRGMMKNKHLAKAVASQGFYEFKRQIKYKSARLGIAFVEVDRWYPSSKTCSHCGKIKKDLKLSDRTFCCECGFTLDRDFNASINLASYQI

SEQ ID NO: 63264 - protein, 395 aa, unknown
  TnpB Polypeptide
MKKSYQFRIYPTKNQEVKLNRTLSTCRHLYNSSLEERRREAELNELKRIFGVTSWAKPEWVNYYDQANNLSESKTDYQKEVFSQVLQNVLKRVDRSFKNYFNGFGYPRFQGRNRYNSFTYPQSGFGFKDGKLNLSKIGNIKIIQHRDIEGKIKTCTIKKDIDQWYVTFSCDIDIPIIPVKIKTRTGIDVGLKSLITLSNGESIEPPKFLRKSEKRLAREQIHLSKKKLRSKNRNKQRIVVAKVHRRIRNQRKDFNQKLSINLVNQYDHIVFEDLQIKNMVKNHHLAKSISDAGWSQLISLTESKAEYAGKVVERVNPYGTSQTCICGYKVPKKLSMRTHRCPNCGLAADRDHVSANIIESRSSTVGTTGFKACLSSLNGEAMKQEAPSERRGSSR

SEQ ID NO: 63265 - protein, 296 aa, Blautia sp.
MLLSKKTSIKVSQEYANVIGHMCYAASKLWNVCNYERQHYKEMGMEKYPDWYYQKKSHREDLWYKQLPSQTAQEVCKLLDKAWKSFYALKRSGGIENPRPPRFKQESIPITYMQMGIVHEWDTEKVRLSLPKALKRYMEETYQIHENFLYLENKIFRGMDQIKQLRIYPPEKGECKVIVVYEISEREELSQNGHYLSVDLGLHNLMTCYDSGNGNTFILGRRYLALERYFHKEIARVQAQWYGQQSVKEIKHPVTSKHIRRLYQKKQNSVTDYLHKITRYFAKYCREQGITCFIPN

SEQ ID NO: 63266 - protein, 192 aa, Acinetobacter sp.
MKTLKLRIKDKHCKVLNQMASEVNFVWNYVNDLCFKHLQRKQQFFSAYDIAKYTKGTSKECNLHSQTIQAVTEELVTRRKQFKKAKLKWRVNNKKSARRSLGWIPFKKVAIKYADGYVQYGKHQFKLWDSYGLSKYNVKTGSFVEDSRGRWYVCLVVDSIKTEKTSAKTSIGIDLGLKDLATCSDGIKLKAP

SEQ ID NO: 63267 - protein, 488 aa, Bifidobacterium sp.
MAGTAARPPMGRVEEPAATGRRMDPVRPGQGRLAAHPARRAPHPHKPVSRRPLADHALRERLRPDDRHLRHTAHTAHPRRPERAEKASEGLTGTPFSRPMSRMRTDRRHRNRCEYVDRRNRMLPSLSARIGGARIFRSRPSDGQGQSRDRGGRGCHAQTAETADRPRGRPGHARRRHPVRPGGGSAFGSHRHDRRPGHGPEPVGRVRSEPGRFGYQRHEGDRHGRGPHRNPRPARRLAREREATGLERPLRHPLPHLQRIRQLQLVLRGRHLGSLIDTDGNRRRIPAPKPINQTQRRLAKAQRKEARQQQGSKRYQKQKQRIARLYAKARHQIDDYQNKQALRIVRETQAIGLETLNVHGMSRIHGRSVLTAAPSRFVMKLEHKAQQYGRQIRHIGRFQPSTRLCSQCGHHVKGGIPENIRVWKCAECHTTLDRDYNAALNILDAAGLAESLNARGDSVRLHLATAGRSSSQGNANHRHHNDAGIPVL

SEQ ID NO: 63268 - protein, 428 aa, Streptomyces sp.
VADSALRTIEAPFVALGPSGVAIRTSIKGMSQRDREVLPLVGAHLGSLASVDLKARCRAGTDHDSGQWAQRKRALTEESSSRWAGSITKASHEQWNLARRAQLAHIHGLEAGVRTVAHRLSQPVGEKGTKRAPGGYRTKREWFHKTRRLHVLEDRLERERSDREAGVVHVVRGGKRLARGRHNLEAAQLTEYEWRRRWDAGRWFLQADGESGKRFGNETIRVSSDGEISVKLPTPLAHLANAPHGRYVLDGRINFRHRGEEWADRVAANRAVAYRIHLDVDRGRWYLTASWTIPPVQTVPLPAARANGLIGVDTNADHFAAWRLDEHGNPTGEPRRFLYDLDGPATYRDAQVRHALTRLLHWARREDVSIAIEDLDFGADKTREKHGRRKRFRKLISGMPVAKLRARLVSMAATLGISIVVDPAYTSR

SEQ ID NO: 63269 - protein, 427 aa, unknown
  TnpB Polypeptide
VIDIVNVDRFLEKYNTYSKIMLYLCVMIYRAYKYRLFPTQQQQELIARHIGCARYIYNYALAKKVSTYQLTGIGLSRFDIQKDLPLLKKAEDTSWLKEVNSQSLQASLENMDKAFTKFFKEKKGFPKFKSKKNNKQSFSIPQNTTVDFDNNTIEIPKFKKTIKCKLHRKFDGVIKSSTITRTPTGKYFISILVEVNEIIPNKKPLSENKAIGIDLGIKKFAVLSNGVEIENPKYLRKSIKKLKKLQRKVSKKVKGSSNRTKAIKQLALLHEKVTNKRNDFLHKTSHHLVTNYDTLCLETLKAGNMIKNHKLAQALSDIAIGNFNTMIDYKAEWFGTNILRIGTFEPSSKMCSCGVINKELKLSDRVWTCKECNTTHNRDVLASNNIKKFAFVKNNTGGTPELQACGDERLLLSVKQEAHPIASGVGG

SEQ ID NO: 63270 - protein, 553 aa, unknown
  TnpB Polypeptide
VKEVAPPSGCATSTRIHTTGGDDQVLDALAEHLGLLRRRDLAAHSRQEHPASVKQRRRNTNTRKHKLTAASSSRWASTVFTGTDKQIALARRCQVAHRDSLRAAITTITARLAAPVGKATQVSATSRRQGKRPVNGYANRAQRYAKQQRLQILQARLARVEGNLAARHVHVVEGGRGLAHMRHHLDTAGLTEEQWRRQWECARWRVTANGSSDEQYGNLTIRITPDGKCSIRLPRPLEHLANTTGGRYQLSGRVVFAHRGGEWLTRITTGKAVAYTFTRRPGRGGVYLSAAWSTAAGGGRWKPTPTTGGEPDTAVAVPAARAVGEILGVDFNDGHLAVRHLDRHGNPVGSPITIGFELTGTSAHRDAQVRHTISTLLRVASDRGVEQLAVEDLDFADARSTGRETMGSGRRGRRFRRTVSGLPTAVFRDRLTSMTDQAGVALYAVNPAYTSVWGGQHWQRPYRNVTRHHGAAAVIGRRAQGFRGRRREGVTSRDQRITCRRATNQAVNETVGEFHLRGVGELNTDRRAGVGTPPPGNRYPGTRSRGHPDRLKQ

SEQ ID NO: 63271 - protein, 197 aa, unknown
  TnpB Polypeptide
LRRLRERERKLDILRKTVKRIFELANELKAKVIVGKFSFKAKDRMEGNKDSRLRHRIHQWSVVKFSEMLKTQPVDVEEFSEAYTSSINPFDGKKLRKGKQIKEMITKVFNPYLMTGTAHEGGGIRVLKVNARYLESKQGLLERDSVAPLNLARKVDGRVVVFPSTSPNDLRVTVYDPLRGVPVAELEVIKEGKLRHG

SEQ ID NO: 63272 - protein, 352 aa, Lactobacillus sp.
MKRMSSLAYHFGLKVRFYPSSKQKKIIKLNYDAQRFVYNSYVGRNRNNYRAKGYLAVRQYQVMPFAFSVLNNYETKLAEEVVANNELLAKPKNIRDAYSFLRVKEIDSLAIANAIQNYQKAWNNYRKLGHGIPTFHKKRSDWSYQTNCQYPKQTEAFLDNGTARFIDAKHVKLPKLGVVRIASFRKLIKERLLNHIPTRIGTVTIKKTADDQFYLSMQLGSDIAFVKELPKTQSQIGIDLNLDNFLTASNGAMVANPRFYRKTKKKLAHAQRVLSRRQRRAKKEGRNLRLAKNYQKQRLAVAKLHDKIRRQRNDFLLASTLNCTNQKPRFSSCRGIKKQEPVKESCLVSSYF

SEQ ID NO: 63273 - protein, 433 aa, Halobacteriales sp.
VKRVNTFRVVPRSDTDAECLRRLLDASASLWNEVNYGRRQYFTDPNIDQPIWDADDHYGRYKGVVGSATAQQVIRKNDQAWRSFFTLKEAGEANGLPGYWGNEQEGRELRTYIRDDQYTLRWASGTREQSILNVPVGKQLKEEYDIGHRERLRLDVQGEPKWDGDPGQLELYYDDVSGQFRAIQPVTVDDSRQDSPLASEEAALDVGANNIVACSTTTGTQLLYGGRDLFERFRETTHEIADHRSRVKREEGRYTSKRIRRLYRKRTNRRDHAQDALARDLMERLHAEGVSTVYVGALKGVLDKHWSVRVNAKTHNFWAFRAFINRLAYTAAEYGISVEVKPEANTTRECPECGEREDTVRSGDDFWCPCGYEGHADLDASAKFLAQQTNDEVGPMARPVRLTWDDHNWSELPRSCPNEARTHQQKTSVAQSA

SEQ ID NO: 63274 - protein, 418 aa, Halobacteriales sp.
MEVRRTASVKLVVPDEHRDDFHESARQFLHCANRAAEFCWSDHSYTDCVTANTTARNALYDDLRDETELTANLVQEAIRRAVQAVKGCVERWKNGKRVSQPEFTSWSMLYDKRSATFYRNKVSLSTINGRVECDFEFPSDSPTPYERYVLSEKFEFRASTLQYDAVDDEFYFHITTRKYDSGRDSDSSEVSEDTEHQTVLGIDLGVNSLAVSSTGRFWQGDDYDHWCRELEKRRGEMQERGTQAAHNALLRLGKREEAWRKQYIHMAANEIVTEAIENECDVIVFEDLTDIRERLPQAEWHHIWAFRRLFEYVSYKAPERNISVEQVEPNHTSQRCSRTDCGFTHGDNRHGEQFECQKCGYELNADYNAAKNIGLRYARKRHHRLRSSPTSGSGDAPVDVRITGGTLNGESHQPIAGA

SEQ ID NO: 63275 - protein, 204 aa, Methanomassiliicoccus sp.
LNSTGHIAVVANPTTGKVQKYGKEAPHIHKKYCKMRRRLYIEGHPRVAKEKIQHKENRKIKDLNHKISRATLKEAAQQGCGIKMERLSDIRTTVSQSRSSRPTLHSWSFYQIQYMVEYKAKLLGIPVVYVDPAYTSQRCSRCGQLGTREGKDFSCPHCGHVDYADVNASFNIALRPSLEEGDGRLHQDRDWCKGRIDTPQEAPS

SEQ ID NO: 63276 - protein, 192 aa, unknown
  TnpB Polypeptide
MPEVGFPRRKKKFVNDSFTLDGSISVTPDGVKLPRIGKIRTYETLMSCQPKSVTISRKADRWYVSFKIEVEANPTPKIYPVVGVDLGIKLLATLSTGVIFEGIKAYNRAQARLKRLQRRVSHKTKGGSNRRKAITKLAKLHARVASIRKDMLNKLTTYLAKNHGVIGIENLNVSGMLKNHKKSEGCGRHGIL

SEQ ID NO: 63277 - protein, 362 aa, Paenibacillus sp.
MVKNKKRGGETLQTVTIQIRIFPTRPSVLVDMGNEYIRTVNELTEQAERSGTFPKLTSKTIHANLPSAVKNQVIRDAKSLFQRFKKTKKRPLLQKRVYYVNNQNYTIWGNHISFPVILDGKVQRFVVPVLLPDRERDMLSNGKPGLLRVVQKSAKWFVQISIERPTEPAEGHEVMGIDLGLKVPAVVVTSSGKTKFCGNGRKNKFVRRKYSTYRRKLGKLKKLSAIRKQNDKESRYMKDQNHKISRQIVNMAIQEQVSVIKLEKLTDIRKTTRTSRKNAKNLHHWSFYQLQMFIGYKATLAGIQVVEVNPAYTSQTCPSCGERNKAKDRTYQCDCGYTAHRDRVGAINIMRQPVADGNSLPA

SEQ ID NO: 63278 - protein, 372 aa, Saccharopolyspora sp.
VGPIMLRQNFVRALCSENCWEAVDCRYDRGVKLRYRFRLYPTPGQQASLAQAFGCARVVFNDAIAARRNAYMAGEKFPSVVELSRSLITEAKRTSERAWLGEVSTVVLQQALRDVDRAYRGFFDSISGKRKGRKLGAPKFRSRRDRRQSIRFTANAKFSITRGGKLRLPKIGYVPIKLSRPLPSVPSSVTVIKEASGRYFASFVVEVAPESNDVGESAIGIDLGLGHFAVLSDGTKIEAPRFLRKAEDQLKRVQRDLTRKEKGSANREKARIKLARAHARVADARRDFHHQLSAQLIGENQAIAVEDLSVSGLARTRLAKSVLDRSEGLLRRGDWTVVGRGVPVRPLPLRLGDLRAAGVGAGRDHRSPVRAD

SEQ ID NO: 63279 - protein, 451 aa, unknown
  TnpB Polypeptide
MEQGYEGGKLMQRTRTLPHKHKEDFLPLLCAYRDLLNELIREVWSTIQWRKGRLEDRNTAVSMKQHRLLPTFRSDGQFRRELRTRHLVRWSYAAHWVDSADKTAFAILRSWKKNYVKGERRRICPEVRRLFARAKQSLCKLEGEKLRITLRPREFVWIDLSKRYFRLPQVISRFGVGEPTITPELVHLPIFQDSKMADDLPPMIGWDFNFDSLDGFSPQTGWVKIDTTKLVELHRNSSAKIGSIRARFGKSVKGRRIARKYSHRELHRTRKQQIEIARVMRTASQRIVIEALKKKNLLRRGFFNYRLAITDWRGIAGLAGERVEEVSPRLTSKNCSRCGWTNQDLKGAKVFVCRRCGLSIDRQLNSCIGIYARAEGVPYDQNWWDKVVLPSVVGGYFQSGAELRVTDELVRSLDETVMPQVVYGYDRFEDAYLSLPISAETRVRADVPSMD

SEQ ID NO: 63280 - protein, 385 aa, Herpetosiphon sp.
MRTLTRCYKYRLQPTPAQVETLVQWAGSRRFVWNWALHCKQSHYQATGQRLSYQRLAAMLVDLKRQPKMAFLRDCHSQPLQQALMDLETAFSNFFAKRAKYPRFKARKITPHSLRFPQGATVIDECTISVPKIGLMRAIIHRPVMGVTKSTTIKQDATGAWWVVFVCHIDRPDVQPTADRPVGIDVGLESFTTLSTGEKTAPPKFYRRSQKNLARAQRKLSRAQKGSNNRLKAKKRVARLHKKISNQRADWLHKHVLGIVRQFDVVCIEDLNIKGLAKTKLAKSFSDAALSTFMQILMDKTEWHGRRVVKVGRFYASSKTCHHCKTKTTLTLADRVWTCPTCGMTHDRDVNAAINIVHEGIRLLAVGTTESQNAAGDGVNPAKCW

SEQ ID NO: 63281 - protein, 391 aa, unknown
  TnpB Polypeptide
MIIGFKTELKLNNQQRTELLKHAGTARHAWNWGLGLTKDILDHNKANPEGKIKFPSAIDLHKWLVALVKPENPWYYEISKCAPQYALRDLRNAWDRCFTKVSGVPNFKRKGQKDSFELDGIIKVYGIHKIQVPKIGILRTYEALPQIKPKNVTISRTASSWFICFKIELETTDTPKTVDVVGVDLGVKSLATLSTGEVFEGAKSYRQLESKLSRLQWLNRHKQLHSSNYKKSQIQIARLHQRIANLRKDTLHKLTTYLAKNHGTVVIEDLNVSGIMANRKLAKAVQDMGFYELRRQLEYKTKLYGSKVVIVDRWFPSSKTCSCCGAKKETLSLSERVFKCKHCGLEIDRDLNAAINLRNAASHVVSACGSDEADFSEMKQEVSSELLVSKC

SEQ ID NO: 63282 - protein, 207 aa, Okeania sp.
LNDLNQAYQNFFQSCKCKRKGVGANGRSPLKPPQFKSRKSKQTARFVGGNYKIDQDKIYLPKVGKIKIVWSRPLPSKPTSVSIIKDSADRPSIASFVVETCAEYLPKTESYIGIDLGISTFATLINGDKIEAPKPLKQNLKKLAKFQRKFAKTQPVVTFRETSVQRREKRRLKIARLHAKIKDIRADFLHKLSTEIIRKNQTIVLEV

SEQ ID NO: 63283 - protein, 247 aa, unknown
  TnpB Polypeptide
VIAILSSRKPDDWIGVDLNTTGHLAIVAHPATGKVIRLGKNVHRIHEKYERLRKNFELRKKPKKLRKIEGREQAILHDLVKKVSRQIVDHAHSLHCGIKLEQIQGKNSRIQHEGKQSSGYSLTGSSFYRLQKMIESRARDAGVFVAYIDPAFTSQKCSRCGHLGYRKRKKFECPHCGFAEHADVNAAFNIADSAIQAEADREDTKKQREQSRFYRELFRKVRGREPSTGLADSSCASPVANIFLLLE

SEQ ID NO: 63284 - protein, 518 aa, Syntrophaceae sp.
MSNQQTFTYQTRFDAPKEQDAALTAYAALYGTVERNLFAALAAGGDASSLKSAFLRRHGITARQYNAVAINLKGKMSSVKEQRAVLINELDARVKKARKVIAKSKNPNKRHQKKRRLSNLLNRLAGLETEKKAEAVNICFGGNKLFRKQFYLEENGYSSHAEWKHDWVKARSNQFFVIGSKDETAGCQGCVAGVQPDGTITLRLRLPDALASKGKYLVVPDVHFSYGQDVIEAAILTRQAISYRFMRDEKGWRVFVSTSYQAPERISDRGRGVIGIDINAGHIAAGETDRFGNFINAARYDCVTYGKSSGQAKAIIGDAVKQVVRDASMAGKPVAIEDIDLKKHKAEMENESPRACRGLSSFAYMAIQNTIRAACYRAGIEVIDVHPAYTSTIGAVNYAQKYGISVHQGAALAIARRSMGYSERPSVQTAVTPVCNGGHVTFPLPARNRGKHVWSFWAKVRMKLKAAHAAHARLGYPKPLRLYYSPAPGSRRALPESPRHVNRQQNCSADVLDDILVQ

SEQ ID NO: 63285 - protein, 337 aa, unknown
  TnpB Polypeptide
MEDAVLHAVERHVHPMENQSGHGVASGRVLHTLATVDTSRGRGLPELPPPLQGWQDHIVTNHRTGKKRRTGLPRYKSRRDGEQSAEFTKSARFKVGHADGCKWGFLTLPKIGRVKLRWTRELPSTPNTVNIMLHADGSYEASFTVQVDDESDAPRPLHEACGIDMGLDSLMSIVYTDGTREKIPHPRTLKRHARRLRRLDKQLAREKKGSATHAKTRILRAKAYSRIQNQRKDMAYKLASKVAGENQAVALETLNVKGLARTRMAKSLLDANWTRIIDRIQQLGVQYGRTVKRIDRWYPSSQICSACGHRDGKKPLDVRIWECPKCGACSTVTGTRP

SEQ ID NO: 63286 - protein, 562 aa, unknown
  TnpB Polypeptide
MSHREKLAKSCKSQIKPLETGNLPTKYQQSEPHPTSDATTSTAFLEPDTTELQPSTPGSVATNSEKTSTDKSATSKVSIRKLKSSKTSEADSTLKEKRCLPFWDKSCQEISRQLWSDTKTDSQGSVAISSNGSASKTIANSWFSVEMSCLQNEKWLKISSPSSTSLVADSTVCENTNLLSKKIRVYPETKLAAKWRTWLSASRWCYNQAIAILKNAKIGKYDLRKKVMDSAPKWVSEQPYNPRQMAVFQAFEAHKAAKKVKGTAKFRSRFDTSGTIRFQTSNWKLGTFYPTSTKGLSFKTSEPIVEVMQHEPTLSLINRQWFICYAIDARGMKPINSDLAIALDPGVRTFLTGFDGSGFIEIGKNDIGRIYRLARHLDKLMSRIGVSKGRQFKRLRYCLRKSAAKIRIKIKNLVNELHKKAAKYLTGKYKLIFLPTFETQQMVKKGKRRLATKTARAMVTLSHYRFQQMLKHQATKHGGVVVDVTEEYTSKTCSKCGQIHTKLSGSKVFKCPECGHILDRDQNGAFNILLKALRDTSLTGELVAFSVLPYTVIPGLVRDLPD

SEQ ID NO: 63287 - protein, 394 aa, unknown
  TnpB Polypeptide
MIKTYKVKLLPNNKQRTKLFECAGVARWTYNFALATQQENYKNGGKFLNDGEIRKRLTELKKQKEYSWLNDYSNNITKQAIKDVCIAYKNFFEGRANFPKFKSKKKSKPSFYVDTEKIKITDTHVKLEKLTNSKKKNKQKFNWIKLAEKGRIPIGEKIKYSNPRIVFDGLNWYLTIGVEEAEIKNQDYTEGIGIDLGVKDLATISTGQKYKNINKTSKIKKLEKRQKRLQKKLSKKYELNKIQTEGGEYRYRKTNNIKKLEFLVLKMRRRLKNIRHDYIHQITTSLVKAKPEYVVMENLNTCGMLKNKRLSKSIQEQLFYEFKRQMEYKCALNDIKFILADTFYPSSKTCSRCGALKNKLSLSERTFICDECGHEIDRDLNASINLKNYGKSIA

SEQ ID NO: 63288 - protein, 265 aa, unknown
  TnpB Polypeptide
MIKTYKVKLLPNNKQQTKLFECASVARWAYNFALATQQESYKTCIAYKNFFEGRANFPKFKSKKKSKLSFYQDTISTGQKYKNINKTSKVKKLEKRQKRLQKRLSKKYELNKIEMNGGEIRYRKTNNIKKLEFLVLKMRRRLKNIRHNYIHQITASLVKAKPEYVVMENLNTCGMLKNKRLSKSIQEQLFYEFKRQMEYKCALNDIKFILTDTFYPSSKTCSRCGALKNNLSLSERTFICDECGHEIDRDLNASINLKNYGKSIA

SEQ ID NO: 63289 - protein, 435 aa, Streptomyces sp.
MSRFRMYPTSEQAGVMLGHCAHARYVWNLAVEQHSHWRRGRKAAPGFAEQCRQLTEARRENEWLREGNADVMQQALKDFAQAKNARFTSGFGEPTWRKRFQHEGFRVIGTDRVPESGPDGSPKLNARTGKQVMGRSVVVQKLNRRWAQVKVPGCGWVRFRLTRTGLPDAKTFRVTFRDNQWHIAFAVIPAPLPAPGTGEVIGIDRGVTITAALSDGRRLNCPQLTVKERAQVRKHQRRAARAPKGSERKSAEYAKAARLKAREADRRKDWCEKTSTMLARTYGLIRFEKLNIRNMTARAKPKHDLEQPGTFLKNGRAAKAGLNRAILAQGWGMLRRRTEDKAPGRVEDVPAPYTSLRCSACGWIDKNSRKSQADFVCSSCGFTCNADSNAAVNVAAGQGGIPRPRRTAGAGGVTAATSRSSAREPQPTWVGIPLF

SEQ ID NO: 63290 - protein, 413 aa, Candidate division WPS-2 bacterium
VKRIERVRLYPTARQAATLRFMLDVTRELYNAALQERRDAYRLRGTSVTMKMQCAELTGLRKPLGRIDGRLAAVYRECEDAVLRRLDLAFAAFFRRCKRSQTPGFPRFKPAARWKQLQFSHGDRALRFDARQQRVVIPGVGAVRLRKGRAVPAFGRAWIVERNGRWYACCESERNVQPMPATGLTLGVDRGIHVLAALSDGTLLPNSAISEKRKRATARLRRELDSMSVYVGIGRGRRCVNKWDSRRIAAVERLARAHEREANSRRDYAHKIARRIVNAADVVAIEALNLRGMTRSAKGSIEWPGRNVVVKAALNRRMLDASFGLLERMISEKAEESARMIVRVDARFSSQTCARCGACERESRRRRRFRCVACGFAVHADVNAALEIRRRGELRLTSEPHAGEKPVALHSAV

SEQ ID NO: 63291 - protein, 236 aa, Natronolimnobius sp.
VRFTNEELQLDYKPQNAIEWYVKIPHHEDYLLWIPARANPEHREWLEALYADDAEMGESRLFERDGTWYLHVTATRDVEGQSAASNNEQTPIGVDIGEASLVTVCHRDGSGSPVRPRLWADDGKAVRRLRKTYFTATKRLQKRGSERIVESYGNTLWDQIEDVFHRVTREVVEYAESVENPVLVLEDLTYIRENMDYGEYMNRRLHGWAFAKLHAQIRYKAAEKGIPVETVNPRNT

SEQ ID NO: 63292 - protein, 438 aa, unknown
  TnpB Polypeptide
MYKWVGLVGGGSVSIRGLHVVRTWNIKSAYQHLMLVRSLVFRLKDPLPNDAKFLMEDFRLAVNNAIRLGVQSNVTSRFALTKLAYKDFRKEHPCMYSQHLVSAFEVAGSILKNHRRRLRKGLPSRVPFVRRLFMKAENQAYRLDRENGVIDLPIRAGIHIRLELIVSDYHRRYLDDESLSLGSLTLLPEKVVVTIRKRVPKPYTPESVLSLDTNERSLDGVLVKEDRVAAIVKAEFPEVSIIQSMHHEKRKRLQKKKSHDRRTAKKLCGREGMREHHRIDYRMHEVANSVLSFAEERKSMIVLEDLSEIRPRMGKSMNRRISIWPRRKLHQIIECKAAWKGIPVVKVDPRYSSRKCPACGRIQNSRRGTEFVCACGWHIDRHINASINLLQTAASMKAVGGLWFSPGAFQHDVVMVLCGPGRAVRPEPNGTSGIRVVV

SEQ ID NO: 63293 - protein, 416 aa, unknown
  TnpB Polypeptide
MRLKRTYKYRIYPNREQKAHLEEWLNICRVLYNDCLTERRDAWYASHKSINYYDQANQLKEIKTFDDNLKEVHSQVVQDVLKRIDKAFKNFFRRVKRKEKAGYPRYKGKDRYDSFTYPQSGFGLEDRKLILSKIGSVNIKNHRDIPEDANIKTCTIERDLDRWYACFTVSREIEIEEPNYEVIYLANPIGIDLGINHLITLSNGDMEDNPRYLVKSEGKLKRKQRKLSKVLTTSSWDLENLRFSKTRKGSDNRTKRRFEVSRTHRKVREQRTDLIHKISRGLVNAFDLIVFEDLKIRNMLKNHHLAKSISDVSWSQLTNFVSYKAEEAGRRVEFVNPKNTSQECSNCGMIVKKSLSQRVHRCPFCGLVMDRDQNAAINILKRGFKKLNVGQELSEFKPEEFSKRTVIQEAPSVRVG

SEQ ID NO: 63294 - protein, 394 aa, Anaerosalibacter sp.
MIRGIRVQLKPNNKQKTKLLQSAEVARFAYNWTLNKQIENYKNGGKFILNGKLRKEFTKLKQIEEYSWLNNYSNNITKQAIKDACNAYIRFFKGESNFPRFKSRRRTKPSFYVDTDKIQFTGTHVKLEKLATSKKKNKQQFNWIRLYEHRRIPYGEGVKYINPRVSFDGLNWWISVGIEYPDNIEISTNKGIGIDLGIEKLAVVSDGTVYKNINKNKRIKRLEKKKKRLQRKVSRKYEMNKNKIEGGEARYKKTKNIIKLENQLKKLSQRLTNIRHNYLHQITTKIIKRKPSFIVVEDLNVSGMMKNKHLSKAIQEQRFYEFYRQLQYKSEWNNIKFIVADRFFPSSKTCSQCGSYKKDLKLSDRKYICSYCGSILDRDYNASLNLKNYGQEIV

SEQ ID NO: 63295 - protein, 270 aa, Lactobacillus sp.
VDDHHLKLPKVGLVVFKAGRLTIGQIKRVTVRQKAAGHYEATVLCQCETTDLPQTGKRVGGDLGLKSLLNLSDGHKEPNLRYDKKLAKQKHYWEKKRARRLLGAKAQIARDKHEHPDNVRRLTDFKNYQNARVMVAKYAAKIAYQRQDQLHKYTTWLVKHYDHIVLEKMNVKGMLKNHKLARAISNASWGRLVTILAYKCLWYGKKLTLVPPAYTSQECSVCHERNNRLGLSQGQWLSVRQWDCPSCGTHLDRDINAAINILNKGLQATV

SEQ ID NO: 63296 - protein, 182 aa, unknown
  TnpB Polypeptide
MIKGKWMRVLLQPRGNLTAGIDFGINNLMAIYVENGLTKLINGKPLKSISYYWRKKIAEYQSMLNKYGLRTSRRLRRMHAKWKRQVRSYIDAKVREAVEWLYEAGVSKIKVGYPRYIAQENGDFDNVHVWTYRYLLRRIREVAEEYGISVIYVDESYTSSSVHGMAMDAASGYTEDCSSVRR

SEQ ID NO: 63297 - protein, 429 aa, unknown
  TnpB Polypeptide
MRVTRTVVLKSERLPKKVFKIFVELEGMYREMLLQTVLFAVQNETTSFVKLKAEKYRFLRELYPQLPSHYAYTVCQDSALRAKSFLKRKKKGLAEKVFPEVRNVSIWLDDHLWRAGLTVIKIATHKGWIEVGLEAHKHYWKTVNSGWKLASQARIKPDKKERRLVVYLTFHKEVEPYEAKSWVSIDVNEDNVTALIDFTPVIFETGLKKQTLGYYYRRKRVQERWDNRLGPRNRKKNKILRKLREGDKKRDVRLKLARIIVEEARKRDAGIILEDLPKNVQNKMLERIHDKQLRHRIYQSAFLGVQKAIEEKAREYGVPVIRVNPKNTSRVCPVHNTVVKYEDGRFGVCSAGGEVWHRDVLAVWNLYLRALQGDGSNAPSPEGFFVDGRLVPLASTATSDAIWISQSRWLRWNSLPPTQSDTLSHKMKR

SEQ ID NO: 63298 - protein, 365 aa, Chengkuizengella sp.
VYPMLKAYKYRIYPNKEQILFFAKTFGCVRFVYNKMLADRIDSYQESQKSMDKSIKYPTPAQYKAEFPFLKEVDSLALANAQVNLNRAYTNFFRDKSIGFPKFKSKKNNYHNYTTNNQKGTVCIEDGYIKLPKLKTLVKVKQHRQFSGLIKSVTISKTPTNKYFASVLVEEKEQFFPKMDAKVGIDVGLKDFAILSNGLKYENPKWLRKAEKRLAFIQRSLSRKKKGSKNRNKMRLQIAKLHEKIANQRNDFLHKLSNEITNENQVIVIEDLKVKNMQKNHKLAKAISEVSWTKFREYLDYKAGWKCRDLIIAPKNYASSQLCSNCGYKNKEVKNLKLREWTCSECNSHHDRDLNASINLLKLAM

SEQ ID NO: 63299 - protein, 347 aa, Geobacillus sp.
MKLTVKFKILPTKEQEKYLTEILKEYISTVNRIVQVMINTKHIKLTSKDIEANLPSAVKNQAIQDAKSVYKKYKKTNKLPILKKPACIWNNQNYKITDCLSFPVFVNGKTKRIKVKILLTDYQKQQLNNKLGTLRITKKSGKWMAQVAVEVVDKQNNNENIMGVDLGLKVPAVAVTSNGKTRFFGNGRQNKYIRRKYKVLRQRLGKAKKLKKIKQIADKEQRWMKDQDHKISRQIVNFAVENNVSVIRLENLTNIRNTARTSRKNEKNLHTWSFYRLSKYIEYKANLEGIKVEYVNPKYTSQKCPKCQTLNKANDRKYMCKCCGYKTHRDRVGAFNIMYAPVADGVA

SEQ ID NO: 63300 - protein, 426 aa, unknown
  TnpB Polypeptide
VFHVPWNDARLTWLLCEFRLMVNKSIRASAIRDIRSRTRLARATYAEISRDHGVYKQYIPSAFEVALGALKAHRRRTRKGRRSSVPFVRKPMLKAENQSYWLDRETGRLRIPIRGTEGVQMNLPLSDWHRSILSDPSWSLGSLTVIPGKIILVVRKEAPRPLECEAAIAVDTNEDSLDGVVAAGESASLVTIPLDGVRRVQETHFRRRRKLARKKAHDRRVARRLLGREGVREGHRVRQRLHRVSKSLVASAKEQRAAIVLENLTLHGAGGRSRRMNRRLSSWPRGELHRQIEYKAALAGVPVIKVNPAWTSKTCPACGARRRDRVGKDFVCLVCDWEMDRQHNAALNILKTALASHEALARAVRFQPGALRHDVVSPLYDLLRGGGGAREEPSGVELGVQKQPDRTCGTQPEPRRGRGRLCVREI

SEQ ID NO: 63301 - protein, 364 aa, Bacillus sp.
MVLLTTKIKLLPNMEQFKQLEDTMNSFNRACNRISKISFENKTYSKIKIQKICYYDVREEFKLPAQLVIRAIAKVAETYKINKKTFHEFRLDGAVIYDERILSFKGIECASISTMYGRINIPMQISSYHKGILEGKRIRGQADLILVDGTFYLLLVVEFPNDAPIKTEDVIGLDLGIVNIATDSDGKAFSGAKINNLRKRYARIRAKLQAKQTKSAKRLLKKRRRKEQRMAKDINHCISKQIVDKAVRHSSAIALENLNGIAKKKQKSETVIKSQRSKLSKWSFYQLQQFIKYKAEQRGVTVFFVDPQYTSQTCSCCGYVAKENRKTQAKFECVSCGYVAHADYNASLNIREKGYCQLAERRSA

SEQ ID NO: 63302 - protein, 413 aa, unknown
  TnpB Polypeptide
MLVKGVTFRLASDLPPEAVSLLQDFRLAVNKAVRAGLEAHVSSRNGFNKLLYKTFREEHPGMYAQHLVSSFEVAAGILKNYRKRLRRGTCCGTPFVKRLMMKAENQAYRLDCARGTIDLPIRARCHVKLGLVVSQYHRRYLNDETLSLGSLTVLPDRVIVAFRKEAPKPNTVSSVLSLDTNERSLDGIFVEGGQKGDGRSVQVEVAFPEVAVIQQRHHERRRRLQKKKAHDRRSARALCRREGAREHHRIDYRLHHVANAVLEFAEDHKSAIVLEDLRGIRPKKSKDLNRRLSLWPRRKLHQIIEYKAAWKGIPVIKVDPRYSSRKCPICGRIPDSRMGTRTEFACECGWHLDRHVNASMNLLQTAISKGLEGVGGLRFSPGAFQHDVMMILYEPAMAARSEPNGTSHIGMTS

SEQ ID NO: 63303 - protein, 360 aa, Desulfofundulus sp.
MEQTITLKIKLYEPTRAKQEVYQEMTDRTTEFANKYLGLDKKDRPKTSKEAKEHSKPLPSAILAQAIRDIKSKPKAKRFKRLWPAFNNQNFRVEREYTVDGGAVYKVSFPTLERRVGVPIVVTPYQKKYLDLLLAGKVKQGVARLVKCGRDWYIHLSLTVPVERTQKPEKIMGVDLGLIDLLVASAGGQTLFFSGGQLAYVRRKYAKLRRELQKAGAYRALKRLGDKEHLWATDVNHKLSRVLVNFAIAHGVTKIRLEDLTGARWTKAQGKEQREDPGRSLHYWPYYQLRQFIEYKAALAGIQVELVNPDLTTLTCSRCGETVKSRPGGRWFRCPRCKRIKHIDVNAADNIAQAVSGLAS

SEQ ID NO: 63304 - protein, 482 aa, Desulfofundulus sp.
MFTIKGILTVDERLAAILINFMRVFQAAKRTAYQAIRRGVKREEIISSLQSKFIRNARWCQWAYAEAGDTIRSQKELIDMYIHDLEAKIKKAEEKLERTKKSPHRKGILNRIEKLKNKLIYWQSHKEKGTVPPAVFGGKKNLIALTQGRLSKEEWKELRSNSFTSVGQANQKGLRGQQGNANTEIFFDGENFFLNIYLPPNDEDVKLGRGIPRRDEDWVTLPLSIPAPYVKYLAEHLATGRPYTVQVIRKKNRFFCHISFSLEDAKEVDRSLKMAGIDLNLQVISVTIVHPNGNYLISRNFPCPDLPYVSHEKRLHIIGSLCKEIAWWLKKQSVTQVALEELFFNQDHDTNRFFNRMSHNFSHKAMFTNLVIRLRKEGIAVFTVNPKFTSFIGFAKYKDTYGLAVHQAAALVIARRALGYKEKLPREIKRLLAPKEGQPHLSTWGKLFGIVKAARQKARKNGDYKKSWTIENYLTYAKLKVA

SEQ ID NO: 63305 - protein, 374 aa, Desulfofundulus sp.
MQTVTLKIKLLSPNKGKLEKMTRMLEIYRQACFWFLEKAEALNTTSRAHLNRETYRQACELFDLNRGTLQCAMLKALSVRRSYLSRKQRGKKASLPKFEKTVPVMVRQDCYSLHQLPSGTWVIKFPVSSGRSQIAVPLAASTYHAKRLQDLAGSSCRQGSVEIWRDKSGEWYAAISLVYETCPNEPCGVIGVDFGIVKLAVLSNNVFFDGRQVRWRKERWAERRKALQQAGRLSRVKKESGREQRWMRYINHCISKRIVEIAKAEGKAIALENLLGIRERAKGSKKFNRMMSGWNFRELASFIGYKAALAGVPVIYVDPKETSKTCPRCGNVSRYNRKTQGWFKCTRCGYQSDADRVGALNIAAKALDALGARL

SEQ ID NO: 63306 - protein, 138 aa, unknown
  TnpB Polypeptide
VRGGIVLEKLDGIRQTAKTRRKQRYSLNSWSFYQQQQMIEYKSKKFGVPVFYVEPDYTSQRCSRCGHIENANRNGNLFHCKACGTVENAGVNAGFNIAYLHQQGISQFCKERDLQKGNTDIPKEALLKSIATLEPHTL

SEQ ID NO: 63307 - protein, 378 aa, unknown
  TnpB Polypeptide
MLIRKAFKFELVPKSAQVRKMKQFAGCSRFVFNRALAYQNEQYEADNSFKFSYYKIANLLPEWKRELVWLKDCNAQVLQQSLKDLESSFKNFFAKRSDFPKFKRKGEKDSFRFPQGCKLEQQNSRIYLPKIGWVRYRNSREVIGKIKNVTVSQKCGKWYVSIQTEFEQEIPMPKGGEIGIDMGIARFATLSDGTYFEPVNAFKSLKGKLAKLQRQFKHKTKFSKNWMKLKGRIAKLHHRIANIRKNHLHQITSTLSKNHAIVYIEDLKVSNMSKSAKGTVEKPGKNVKQKSSLNRAILDQAWYEFRRQLDYKLAWNEGHLITVPPQNTSRCCPACGYTDKDNRQTQSDFECVDCGYQNNADVVGAINVLKRGQEILAA

SEQ ID NO: 63308 - protein, 402 aa, Streptomyces sp.
MATHVKRAFKYRFYPTDAQAAELSRTFGCVRKVYNMALEARTTAWYQRQERVNYNATSVMLTAWKRTEELAYLSEVSSVPLQQCLRHLQGAFTSFFEGRAKYPRFKSRKKSRKSAEYTSSAFRYRDSRLTLAKMREPLAVVWSRPLPEDAAPSTVTVSQDAAGRWFVSLLCDDTIAPAPATTAAVGIDAGIASLMTLSTGEKITNPRHERRDRSRLAKAQRELSRKEKGSANREKARRKVAKVHARIADRRRDFLHKLTTRLVRENQTVVIEDLTVRTMVKNHKLARAISDAAWSDLRTMLEYKCAWYGRDLVVIDRWFPSSKLCGACGTIREKLPLNVREWTCDCGMTHDRDVNAARNIKAVGLAVSACGDGVRPQRESSRTGQSSVKQEAQRVTAGNPRH

SEQ ID NO: 63309 - protein, 439 aa, Streptomyces sp.
VTRFRLYPTREQEQRMLLHCAHARYVWNLAVEQHSHWKPGRKSAPGFAEQCRQLTEARRDNDWLGAGNADVQQQALKDFAKAKNAKFASGFGEPTWRKKFRHEGFRVIGTDRVPECEADGSPKLNPRTGKQVFGRSVVVHRLNRRWARVKVPGCGWVRFRLSVKGKGARLPSAKTFRVTLRNGRWHAAFAVIPDPVDAPGTGEVIGIDRGVKITAALSDGRSFNCPQLTVRERAQIRKHQRRAARAPKGSARKTAEYAKVARIKAREADRRKDWCEKTSTMLARSYDLVRFEKLNIKTMTDRARAKPDPDQPGQYLRNGRAAKAGLNRSVLAQGWGLLRQRTEDKAPGRVEDVPAPYTSLRCSACGWIDKNSRKSQAEFVCSSCGFICNADTNASINVAAGQGGIPRPRRVAGAGGATTVTSRSSAREPQPAWVGIPLF

SEQ ID NO: 63310 - protein, 365 aa, unknown
  TnpB Polypeptide
MKLTIKVKLFPTPEQKASLVKTIEVFNEACNYISKIAFDKKTFGQVSLHKLVYYDVREKFGLSAQMVIRSIGKVSESYRSEKKTLHTFKKYSALVYDQRILSFRGLDTVSILSLDGRYKIPIVFGEYAKLEQRRVRGQADLIYHKGNLFLCLVVELPDGTPIDPKGTIGVDMGIVNIATDSDGNVFSGKQVDIVREKMTIIKAKLQSCGSKSAKRHLKKISGREARFKRNTNHVISKKIVRLAKDTCRSIALEDLKGFNGRQTVRKAQRERFGKWAFNQLGQFVQYKAQIVGIPVILVNPKNTSRRCSHCGHIDKANRKSQSEFVCIHCGFSLNADLNAAKNISFLASVKMPIVAKSPAPFVDVA

SEQ ID NO: 63311 - protein, 429 aa, unknown
  TnpB Polypeptide
MSTYEAVKIRLDPTPRQERMLASHAGAARFAYNAGLAHVKDALENGEAPEWSHYALLRWWNANKDMLAVNPTTGAVWWSQNSKEAYSMALRDLAQALSNWVKSRKGQRKGKRVGFPRFKSKNHVARFAYSTGFTVPAARDPYGLKLPRIGRVHCTENAHERMAGARLIRVSVSRRAGCWYASLTVEREPRPSSTPKLGAVGVDLGLKNLATLSDGTVIPNPRALNTRLRALRKAQQALSRKTKGSARRGKAQERVARLHARVADVRADAINKATTMIARTYSVVCIEDLNVAGMMKNHRLARSVSDASLGEFRRQLEYKTARTGAVLRVIDRWYPSSKTCSACGAVKAKLSLSERVYRCDACGLSMDRDLNAALNIKVAGSAPETLNARGGDISRADTVSGNADPDETRTKQPPTSGVRLGAASGNRGM

SEQ ID NO: 63312 - protein, 434 aa, unknown
  TnpB Polypeptide
VVLESVKVALDPSPAQERLLLSHAGAARFAYNAGLAHVKACIEADAKPEWSLYGLRRWWNSNKDALAVSDDGVIWWGENSKEAYSSGLEALAKGLSNWSKSRKGARKGRHVGFPRFKSKDRATPRFAYTTGVFGLIEGDPKALKLPRIGRVHCMENVTARVGDARVLRMTVSQRAGRWFAALTVERDDNPMTKPPKGGAVGVDLGIKTLATLSDGTVIENPRCLAASERRLKRAQKALSRKTRGSNRRAKARAKVARLHAHVANQRIDAMHKATTWLAETYSHISIEDLNAAGMVKNHHLAKAVSDAAFGEFRRQLEYKTARTGAVLRVIDRWYPSSKTCSACGAVKAKLSLSERVYRCDACGLSMDRDLNAALNIKVAGSAPETLNARGGDISRADTVSGNANPSETRTKPAQSKPRRLGADGRKPVLQAKSN

SEQ ID NO: 63313 - protein, 427 aa, unknown
  TnpB Polypeptide
MELIMETIRRYNYRAYPTRGQREVLSHLFGACRYAWNWYVRQRLTDWSFNRSRASYAELSAKFNRTKTEPGLEWLGLVSAVPLAQSLRQCEKAYTAFFRYVKKHGYHVDRKGRPLGYPRFKSRHCGEQSATFTTSAHFHVRYERNARWMFLRLPKIDGEIRLRWSRNLPSEPSSVTIMLHADGTYEVSFVVKAEPKKAPKPIHNACGIDMGLESLASIVYSDGTREKVAPLRALRRAERKLRRLDKELGRRQRGSNNYSKTRAAKARLYARIGARRRDLAYKLASRVAGENQAVAMETLCVKGLVRTRMGKSVADAAWSTFTNRVDVLCAQWERRAVHIDRWCPSSQVCSQCGHRDGPKPLNVREWKCPQCGTLLDRDWNAALNILDAAGLAESLNARGGDVRRRLASAGRNAIAREAGTHRTAMPH

SEQ ID NO: 63314 - protein, 175 aa, unknown
  TnpB Polypeptide
MSSVSDIVTPYDLPYQAKAALCNYVPKLRKTYNAQDLDDEHPIRLTNQAAKFDHSEERDYEFTWWVPRPGRGTNFWMPLRINPEQEDLWHDLVSEDAKAGEIRLQQHRKNWVLHVTVEYPVENQRRTVTPRNIGLDIGETAPSSRAVPSRTVLRLTRSCVAEAERSISEKRCTRP

SEQ ID NO: 63315 - protein, 199 aa, Parageobacillus sp.
VSVPEKYEEEIIDLVTGDPVGVNAKGKPLIEYQPYTVEIKRKNGEYYVHLIYEEEVYGRELAYDEPIQAERIAGIDINIDRIAVSIISKQGNFIKSKVFYCHELEYVRANKRNNIVGETVRDVYDWLLQENVGAVVIENIQLRQRHDTDKRFNRFTHNFKKKKLTDTIIRRGMRLGFRIKKANPAYTSVIGRFKYIIRP

SEQ ID NO: 63316 - protein, 290 aa, Nocardiopsis sp.
VAWSWDDVDLAALDATTVIVSREADGRWYATFAVETTDPAPAPESGAEVGIDLGVKDFAILSTGEKIANPRHLERKARNLKRYQRRVARKQRGSNNRRKAKRKVAAAYRKVRHARADFLHKTTTRLVREHDLIAIEDLNVRGMTASARGTVERPGQRVRQKAGLNRSVLDAALGEFRRQLEYKAARYGRTLVVVDRWFPSSKTCSECGYLLDRLSLGTRSWTCPSCRTRHDRDLNAAKNTLAAGRVAARDSVSGDAWGAGVSRQGSSLPLSAAKQETGPVRVAARAAPDR

SEQ ID NO: 63317 - protein, 390 aa, Lechevalieria sp.
VRTAYKCRAYPSFDQAKLLSRTFGCVRLVWNKTLDDRSRRYQVEGARTSYRQTDAQLTEWKRSEELAFLSEVSAVPLQQALRHQHTAFRNFFAGRSRYPRFKTRTGRQSAHFTRSAFRMCDGSLMLAKTSTPLAFVWSFSEVSLGELNPTMVVISREPDGRWYVTFAVVAETPTADEPPDKAIGIDLGLTDFLVTSDGERIANPRHLARKARNLARYQRRMARCQRGSMNRRKARTRVARTHRKVRNARLDFLHRTTTRLVRAANMIAIEDLNVGGMVRNRKLARAIHDAGWSEFHRQLEYKCARSGRTLVVIDRWYPSSKTCSVCGHRLAELALFARHWTYPSCRTRHDRDHNAAKNILAAGQVVARGDSGDACGADVRRRGSTRRNRQ

SEQ ID NO: 63318 - protein, 321 aa, Tetragenococcus sp.
VKVLKGYKFRIYPNEEQIQFFIQTFGCVRFTYNCLLCARKESLQKRSYETKLSPAHLKKDYPFLKQADSLALANAQRNLDRAFKNYFSKRMGYPKFKTKNNTWQSYTTNNQKNTIYLVGKQLKLPKLKSLVSVNLHREVFGEIKSATISAKNNQLFFVSLLCLEEVFPLPKTGKAIGIAYCPKHLVQLTSDRSLPVYECKGVQHRLKRANKKLELRAKVAKKRAVVVKQAKNYQKQKHKVQKLTVKKNNQKRNYIDQLTHLLVHEYDSIYLEENPHFIDNTHFLEADWHHFLRTIRYKAHWYNKKLIFVEDVKKFDEFVMN

SEQ ID NO: 63319 - protein, 260 aa, Exiguobacterium sp.
MLKGYKYRLHPTPAQEEFLIKTIGCARFIYNKLLEDRIAIREEAKAGDGTRRKPATLASYKRLFPFLAEADSLALANAKLNLDTAFAKFFAGTGGFPVFKSRRRSRASYTTNNQHGTIRIENGKVRLPKIGFVKFEQHRPFEGIIKSATVSMTRTGKFFISILVNQDEEKWIPAENKVGIDLGLKHFAVMTNDTMVSEKIDNPRLIRKSEAKVKKAQRALSRKKIGSKNREKAKLLLAKKHEKIANQRKDFLHQAVETDR

SEQ ID NO: 63320 - protein, 284 aa, Rhodococcus sp.
MREGVLMLAKTSTPLRFVWSFGDVDLAALDPTMVVVSREPDGRWYVTFAVDATEPAPAGPAGHAVGVDLGLTDLLVTSDGERIANPRHLVRKARNLARYQRRMARCQRGSRNRSKAKAKLARAHRKVRNARQDFLHRTTTGLVRSADVIVIEDLSVTNMVRNRHLARAISDAGWGEIRRQLEYKCDRSGRTLVVIDRWFPSSKTCSACGHVLAELALSTRHWTCPACRTRHDRDLNAAKNILAAGRAVARGDSGDACGADVRRQGPSLPRSAVKQETRAARRSA

SEQ ID NO: 63321 - protein, 404 aa, unknown
  TnpB Polypeptide
VLRGFLYRFYPTHEQEALLRRTIGCVRLVYNKGLHARSEAWTTGKKSLSYTQQSAMLTEWKRSPELAFLNEVSSVPLQQTLRHLQRAYGNFFAKRTTYPSFKRKRNGGSAEFTRSAFRFVGGQLTVAKMDAPLDIRWSRPLPKNVQPSTVTVSFDTAGRWHISLLCEDASVKKLSRTKTAVGIDLGITSLVTLSTGEKIKNPRHDDRELKRKKLLSRQLARKQKGSRNRDHARQKLARLHARVTDRRRDHLHKLSTRLVRENQAIVVEDLNVRGMVRNRPLARAISDAGWSAFVDMLEYKAAWYGRDFVKVDRFYPSSKTCNACGHVVERMPLSVRHWTCPACKAEHDRDVNAARNILAAGLAVSACGPGVSQRVLRNAVQSGLKQESLVVRPAIPGQHVVEHP

SEQ ID NO: 63322 - protein, 388 aa, Nocardiopsis sp.
MKATVQVKLLPSSEQARALSVTLHSCNEAANAASQVAFDTGATHKYALHERVYHRLKAEHGLSAQPVVRVIGKVADAYTTRASNLRAGDLGPPGSRRREKATATPVSFRPDAAQPFDSRCLSWQVDARTVSIWTVQGRMRNLSFAASTEQLKLLAEYRKGESDLVHRDGMWFLYATCEIPEEPLNTSPAGFVGVDLGVVNIAATSDGRRYAGRGLNRHRKRMNRLRAKLQRKGTKSAKRVLKRLRRREARRARDVNHQVSKNIVKRAKRTGHGIALEDLRGIRGRVRQAKAQRATLHSWAFAQLRDFITYKARRAGVPVVIVDPAYSSQTCSECDHPSRNNRTTRAKFACVSCGVTMNADVNASHNLARWGQVAWHEGRLSAVPTPPP

SEQ ID NO: 63323 - protein, 457 aa, Nocardiopsis sp.
LDWTPNSSVGWAWTPRPSGRGGNALSLLWLSVGFGSCGRGAVATVCAMIRKSVKRAFKYRFYPTDAQAAELSRTFGCVRLVYNRALAERSAAWQQRQERMGYSQTSAMLTAWKKTEELSFLTEVSCVPLQQTLRHLHTAFRNFFDRRAKYPRFKSKKKSRASAEYTRSAFGYRDGHLTLAKMAEPLDIVWSRPLPEGARPSTVTVSRDAAGRWFVSLLCEDTVESAPAANDAVGVDMGVTSLVVLSTGEKVANPRHERRDRARLAKAQRALARKAKGSANRERARRKVARVHARITDRRRDFLHQLSTRLVRENQVVVIEDLTVRNMVKNRRLSRAVSDAAWRELRTMLAYKCAWYERELVVVDRFFPSSRLCSTLGCAYVHASLPLNVRTWTCPRCGVVHDRDVNAAHNLRAAGLAASACGAGVRPQRESSRTGRPAMKQEGRGATRDEALASNHR

SEQ ID NO: 63324 - protein, 398 aa, unknown
  TnpB Polypeptide
MHSTLQLTVIGKVFNPNKGKVLSLNRDLDRYVECVRWYLSFKPTSRGKLHKDAYEKAKERFDLKTALIQSARDKAVEIYKSFEKVKGKDSEIHLRRCCMRFDERSFKFVKVGKGLTPYWLHLSLSGAYGRTAFPIVFGERKELIEEALDGEYSIKSIEMKKRKGEWYVHFNLSRGVGMPDTPDTVIGIDRGEKNFAVAVGIQKGSPNKPRKGMFWSGAEIKALKGKYHHIRRSLGRKKLPQEIKKIKGKLSRKTDQLLHKLANGIVAYASQFENPVIALEDLTHIRNQFRKKKNGKRLNRRMNSLPFRKLQDYIEYKALKEGIPVEYIDPKNTTKECHRCGTINNVGYHRNYWCPNCGLTYDRDLNASINIAQRITSSLGWGTRECPEQPNEVSVAKT

SEQ ID NO: 63325 - protein, 382 aa, unknown
  TnpB Polypeptide
MLVNRSIQYRIYPDANQEELIQKTFGCVRFIWNQELSDEEEFYAATGKCFIPTPACYKKEYPFLKEVDSLALANAQLNLKRDFQAFFKDSKKHGYPKFKSKKRSKKSYTTNCLYGKSQPTIRLEKNGIRLPKLGVVRAKLHRIPKSGWKLKSATICQTKSGKYFCSVLFEFETAAPAEVLPTDENTIGLDYSSPKFYVDNNGHSPEKERWFRKAEEKLAHEQRLLSHMQYGSKNYLKQAKKVARIHEHIANQRKDFAHKESRRIANAYGAVCVEDLDLHTLSRTLKLGKSTMDNGFGMFRTFLSYKLAEQGKHLIKIDKWFPSSKTCCFCGKKNKNLKLEEREWICPHCGQLVPRDEGAGKNLKREGITQFYRERAAAKSTS

SEQ ID NO: 63326 - protein, 423 aa, unknown
  TnpB Polypeptide
MENKSNQVKSGQITITYKMKLYHRHLEDLILTKKLYNQVLKFYYEILLEQEELLELSNFLLMRELEILSVGTKEDKKEKKKPKYALDEFPTLPLYFRRAIINHAISLMRSYKSNYQNWLDSEKKKKCPIPAQTFCASPIYYKGMYKDFTETSIRLKVFDGKRWNWLKFPYQGRKIPEKAVALSPVIYLKGKNAWLHVPVSMEVEQVKTIAERMKEEEKILAVSFPHADTMAVCAILLKNGEMAGYEYIRGGKEWRGKKKRLLERLEKSQKSRKQICVSDNKKIFQKIENLNDYYAHQISRQILEYGKKHQIQVIAVPNYEMGIEFSKRKYFEGNRFDWIGRKIIKYLKYKAFQEGMIVGTVRPYHISDTCAECGSRILRYDERKKLGRNYYGGKLYVCPKGHRGNRGLNAARNIGLHFLKNYN

SEQ ID NO: 63327 - protein, 436 aa, unknown
  TnpB Polypeptide
MITVAHRIQLMPNNKQKTHFRKAIGCCRMAYNWGLAEWQRRYKEGERGLTGRKLRDSFNEIRGEQFPFTYEVTKYATAHAFDDLQTAFNNFFEHRANYPTKHRKKDGVGSFYISADQAKLSDIHKGMKHLKKMAHNVSGKHQYLNVPNLGYVKMAERLRFNGKVLGVKVSQDGDKFFASIQVQITEEECLRTHSNATSDNHGAVGIDFGLDEAMTLSDGIAIHNPHTLRKHQRKITRLSRQLSKRQHAKTKQERLQGVKRSNNYRKLARRLGKEQRHIAAIRQDFTQKLTTILTTHYRAISIEDLNVKGMQRGKLAKSVSDMAFGELRRQIEYKAAMNAVSVTVADRFYPSSKTCSHCGAKKDDLTLKDRTFICPECGHTINRDLKAALNLLSLIKQNVGADYPELTPADLTALHSRFTLNRFATSKVETGRQRKL

SEQ ID NO: 63328 - protein, 603 aa, Rhodococcus sp.
MSTSGDRRTAVAARQFSVTTRAHAAVDDATGEQIGLDDIDVRVGWLLDLITAAGGELVSRLWQPTTFDVLAAGLDRHDRKLPAQGHVAAARLGWTPIYPDGVHVPSRVSRVVTAQVMATLRTLAYRDTAITALSARFDPATGVVAPPTEPGDHVPAGFARGVRRQLAARARRDDGSPAGPLRITDVQGPPQTSAMARLSAADRQLAQLAVTDRDLVLTVKLPTSPAPAGPTQWRNVRLTATIPAHLHGRTITDWHLPTLVLDHRGLLWRCAATEMVPAADLTAGTVAVAMGVDWSPTTLGAAAIAAEGPGGLSSDYRGWTYDDRGLGIKLARLQTEGQLLHRKAARLTRLAATAPPEVRAELEAKIAVLDTHRTAVGVKRGKINRELAFHFGRQVTDYAAAAGAQVIAVEDLTTLETRGHGRVNNNRAAQSARRQAVAALAHTAAAAGSVPARGSSAQCPGCDEPLSRPGGYHDAWCPGCRVGGNRDHIAGVNLAKRALLGRNKATRRRGQMPAVRVAEHAPVRRCRDKHGPTPRRPRHRRVRHSLPAATSRMGVNPKQHVPAPQASVWDTVKPPAPHGDAGSRATRISQAPATPVADSMRST

SEQ ID NO: 63329 - protein, 383 aa, Trichococcus sp.
MALKGIKVKLYPTIEQQMAIENNFRLNRFLWNQLLGMQIARHKNGGSFVNKFGMNYLIKVMKIEFPFLKEAESTSLLYTSADLAESYDRYFKKQSGFPTFKSRRRPKNSYKSNCVNGNILVADNHYLKLPKLGLVKANGLQRVKDRIKSVVVRKKADGTFEATLLVEFETKTFETTGKTIGIDLGVADLAIQSDGFKLPNKQFERSSAKKKRVWERKLARRRQQALVKIKQVKAQGIELELSDFKNVQKAKEQVARINKKIANQRNNYLQKYTTSLVRKYDLIAMEDLKTKNLLQNHHLARSIADAAWAKIKSMLAYKCEWYGKELVLVNPAYTSQMCAHCGENTGKKPLRIRTFDCPHCHTTDIDRDVNAAINILNKALAQR

SEQ ID NO: 63330 - protein, 426 aa, unknown
  TnpB Polypeptide
MTITRRISFRLYPNRQQENQLHCWRRLHANLYNAAVANRKTQWKKFKHSVGYLEQQNCLPEFKQVWPEYVECGSHALQATLKRVDFAFQRFFKGLGGYPKFKASRRYSGWTYPCIAGWKAETDGGNGHLNLSNLGRIQLRGTARTWGTPTTCTILCRNRKWYASITVQCQPTRQTGEGAVGIDLGCKDAITLSTGEKIAKPDFIKEGQRQVKVASKKLRRQRAPNRHKRVKGSRRWKRERKVVSKLQRKIACQRENWLHQSTSNIVSGNSLVAGEELNVKGMTRKGKKQKRQKAGLNRSILDVGFATIGQLFSYKLAEAGGFYLESPTRRLKPTQRCVKCWELTPKTMSDRIHVCSNPDCRHIEDRDINAAQVNLTWARGQELSSSDVESSSSTACGRVLADRVLCPPNSRSMRQLGAKKRHYSSS

SEQ ID NO: 63331 - protein, 362 aa, Nitrospirae sp.
MTRKSTINLNYANTDKDRKLREFIAEYVRVVNVIIDKLWDKQVFAGSFVTREFLEVETWLSARARQCAGKQALQIVKSQRKKKSKTMPVFKGSSIELDNRFIELQKGNNSFDIWIKLSSLGKKIIIIIPSKRHYHFNKFKDWQMKKSARLRIDSKGKIYLDVFFEKTEKEKKIEGGIIGLDCGYKKLAIMSNGDTIGKELQAKIENISRKVQKSKAFNRALIERNEYINKELKQLNLDTIKEIVIEDLNNVKHGTKGKIRKEFNNKLQRWVYCYFFNRLEQHCEVVGVQLHKVNPAYTSQTCFDCGDVHRSNRNGELFKCRSCGYTVDADYNASLNILNRFRPQVHMVPVHKNQLEKSNIFL

SEQ ID NO: 63332 - protein, 622 aa, unknown
  TnpB Polypeptide
MKVKKKKKEDFKEFRNNEKSAYKTFKIPLKTILLNHEIIQPLINNLVFEMNDLVIHTYQFIRLYVLDKYAKNLPLPTIDDIFISYCIKTLGTRDNRGKKCKDAELLETLEKFYKTEYQPLLNHEKTNLKNTTFLLPYLATQIHTSLSNNIQEHFIQHLLRFINKTTNDITEDKALLFQFKKNIMELTDTNELFNDWKEMHLQNIIPENVKKSLYYDVKVRPFEYLKGMLYMNHILEKQESKLFQPLPLRNNIIPKHIILDTACIINLFCPEKDKEGNKIKKGELLSNVKDNQNEVWSNLLNLKHKIFKNKHYQFHNQIQTDGISCCLLFIRKDLKDKKWGAKVPALEEQDFYNIEDLSKEQLETLTDKTIVGCDPGKRSLVYMMDNKGNKLQYTAPQRKRESKAKCNQRILLYEKKKNGIIEKETQLSFQNSKSVDYEHFKMYLIKKNKLNKETIEFYKRDTWRKMKFRQYSYGKKSIDTFLNKIKETFGEKLLIGYGNWSRDTQMKFFMPTMNKGLRKLIHKKYDTITINECNTSKKCCDCHKDLEYYKDKEGKKVFRLLVCSNCVSCENKKIVFRTRDANSSINILKLTKCWINNQTRPSEFQNHISSFTSSTTKEKKKK

SEQ ID NO: 63333 - protein, 356 aa, Sphaerotilus sp.
MEAVKTLKLRIKDKHAGVLSLMAREVNQVWNYCNETSSRAIRERGKWLSGFDLQKLTAGYSKCEGVRIGSATVQLVCEEYATRRKQFKKARLNWRVSNAKAAKHSLGWVPFKAGGAKYKAGQIAFLGHRFSLWDSYGLSRFDLRAGSFSQDARGRWYLNVCVKVDVLKSAGTGLIGIDLGLKTAATCSDGEELASGLYRKHEGALGIAQRAGKKDRVRAIHAKIANTRKDAMHKFSTGLVERNAAIFVGNVQAGAMVKTRMAKSTLDAGWSMMKTMLEYKSHQAGIVFEEVNEAYTTQTCSRCGGIPASSPKGRTGLRMRRWTCCDCGAEHHRDVNAARNIAARGHARLAGGIPVL

SEQ ID NO: 63334 - protein, 242 aa, unknown
  TnpB Polypeptide
VPKLGKLKIRDKMKPHGRILNATITQAPSGKYYISLCCTDIEAEKLERTDKNVGIDLGIKNFAITSDGTVIENPKYLQKSLNKLAILQRRLSRKPSGSSNRNKARIKVARLFEKISNQRKDFLQKLSTMLIKEYDIICLEDLQVKNMIKNHKLARNISDVSWSEFGRMLEYKAEWYGRTIVKVDKFFASSQLCSCCGYRNKEIKDLSIREWKCPACGTEHDRDINAAENLLKEGLRILKEST

SEQ ID NO: 63335 - protein, 301 aa, unknown
  TnpB Polypeptide
MKIVQNIVDKLKDDWNSFWKLLKQRQDKTYNKKVSIPNYKRVYNLVEYNNQVMTKKKLKNGFIGTDKMIQGIKIANKHKNLECKCFRIYHKNNKFICELIYEKEIKEIETNNRVASIDIGLENLFTVAFNYNKKGISIKGSKLKSINQYFNKMKSKLQSLLINNNYITNVIKQLLYKREEQLRNYIGYYTNKLIELLKMENIKKLVVGYNKGWKQEINIGSKNNQNFVSIPFRKILNILRYKLEDNGIEYIEQEESYTSKASYDDIPICGRRIKRGLYKTKEGKTINADLNGALNIMKKQR

SEQ ID NO: 63336 - protein, 391 aa, unknown
  TnpB Polypeptide
VRRAYKFRAYPTGGQTARSAECLRDHQRLYNAALEERREAWRMRKTSVRYGQQSAQLKEIRALDPDQGRWSFSSQQATLRRLDKAMTAFYSRCKAGQKAGYPRFKALDRWDSVEWPSDGDGCRWKPDLSRVYLQGIGHVKVKVHRPVEGRVKTITLKREGRRWYVILSCDDVPARPLPATGREVGLDVGVARFATTSDGEIIANPRFTRESETELAAAQQSLARKKRGSANRKRAKEKVAGAHRKTRNRRADFHHKTARALVNECDVIALENLNTAGMTRRPAPKPDPGQPGAYLPNNAAAKSGLNKSILDAGWYQFASILTAKVEETGRRLVFVNPAYTSIDCHQCGRRCARPRQDTVICPEHGAMDADVNGAINIATRAGLGSGQAYAA

SEQ ID NO: 63337 - protein, 350 aa, unknown
  TnpB Polypeptide
METFNHACDDISKVAYDSKTFNQYKLHHILYYRIREQYTLPAQLTVRAVSKVVDSYKTERRHLHLFDPHGAIIYDQRIMSFKGLEKVSLTTLEGRVIVSLLVGAYGKLDQRRIRGQADLLYIKGEFYLCLVVEQPEEPPLTPEGYLGVDLGIIKLATTSDGVSYSGEKVESVRAHYMGLKAELQHVGTESAKRHLRKLSGREARFKRQVNHKISKELVVVAKDTKRAIALEDLKGIRAQTTVRRKQRERHGKWAFNQLRAYIKYKAKVAGVPMLMVDPRNTSRRCSACGHIEKRNRVSQSEFKCRSCGFELNADLNAAKNIQWRAEVNQPIVVCPDGNLNYKPIPLGVGS

SEQ ID NO: 63338 - protein, 411 aa, Chloroflexi sp.
MLTYRSYRTELDPTSHQRVLLARHCGAARFAYNWGLARRIEAYQSDRTVLTSIDLHRELNALKRTDFPWLYEVSKCAPHEALRDLDQAFSLFFRGLKSGRRVGFPRFKRRKLGRATFRLNGVIRVFARQIQLPRLGKLRLKEEGYLPTSRAHILSATVVEEGGRWFVSLRVREDIVVPPNVGPAVGVDFGLVTLATTSDGEVFPNVRPRRRLERRIRRLSRSIARKRKGSVNRHKATRRLSRLHARIANARKDHLHKVSSALSKTKSVLVIENLSVRALQRSRRLGSSLPDAALRELRSLLEYKVEWYGGKLKIASRFYPSSQRCSRCGSINAALPMSERTFVCPSCGHSCGRDLNAARNLYLIVAASSAETENACGAGSAGRANSVELPASKQEPDADHLENGKVIGVLK

SEQ ID NO: 63339 - protein, 405 aa, Calothrix sp.
MLRIHAYRKVYNNAIAYLNKHQGFEYFNKEGKKTGGKTAFRSFCKTLGEEIIPAWCKELKVAHALDNALFEAYTAWSKTKRMPKFIFQGNNKKPNPQGGLKIAKFRSTRDQKQTIQFDPGNYDDGHFMSVASKGLSKPDYWGQDYCLINFEGATELTYNKGRWYVNFPVDVERELIDKGQKIIALDPGLRCFMTGFDGNNFKEFASGDFARIVKLCQHLDKLKSKHDKSKGGKFKRFRHQLKAAMERVRTKIKNLRTEVHKQVASYLARNYDTIYLPTFETSQMVAKKKRKLKSKSARAMMTWAFYEFSQTLQHLCNRYGSRLVRVTEEYTSKTCTSCGQVHHKLGGNKKFKCPNCGYEIKRDFNGALGIFLKALWDTTFIHDLFENNVVFRLSEDVLNVQGCLD

SEQ ID NO: 63340 - protein, 512 aa, Calothrix sp.
LLTNYLYKLQPNVTQTAEMVRWIDMLRSHYNWCLNDRISQYYQQFIQGDYCDIRTKAEACPITCFVSKNGASGEPWKQDNQNTVVPMGEYCLLPYDLNNLPYSGKTPRRSVGDIQITALPVLKVARPWYADIDSTVLQQNVKRLDTAYENFFEGKGFPKFKNRSNFTSFTYQAGVKVSGNKIYLSKLGWMRFHDSRPIPPGFVIKAATVRKRQDGWYISVRIEDKTVPDYVPKPLSEVNKVIGCDLGIVKLVHLSDGHQIDNPKIATNKKTRRMLKVRQRRVSRKKKNSNNQKKASRAVGRLYKKITDKRQAYQWNIANEIVSRNVDAIGVENLNIAGMLKRCKVKVDVNEVCPKGESTGRFLPNGQSRKKHLNRAISDASWNELILKIEYLTVKRGKVLVKINPKNSSIECRNCGHTDKSNRDKEKFLCSQCGFYEHADIGAAKTIRDRVIELIEYQKVHGDCVEPADKTAKRPKKRKEKSARSTLSKRVEPGNPKSKGENPETGIQEDIA

SEQ ID NO: 63341 - protein, 426 aa, Calothrix sp.
MQLVERRVIKSNHQVFSQVDEMCFASKNLYNKATFIMRQSFLAWGQSNVPQYNSLYHMMKDFEEYKALPAKVSQQVLKMVAQNWTSFFAASLEYQIEPSKFTGRPSLPRYLDKDGRYCVIFTSQATSKKQLGQELIKLSEIDYSFETCVKLGNVNKYCQSRIIPKLDHYVLEIVYEVSNVKVLDNDKIAAIDFGVNNLMAITSNVPGFEPVLINGRPLKSINQFYNSKRATITSKNSNKSSKRLKRFTTSRNHLVKDYLHRASTYVINLLSELGISKLVLGKNKGWKNGINIGGINNQNFVQIPHAQLIDMLTYKGAMKGIQVIIQEESYTSSSSFLDSDFIPVYGNKPLNWKPSGKRVKRGLYVTSNGIALNADINGSYKILVKAFPNAFSFGDTSVNGIGNREVLVTPRKVNLEGHAPLMVIPF

SEQ ID NO: 63342 - protein, 412 aa, unknown
  TnpB Polypeptide
MADFSKTMKLHIHPDVEAVRLFQEMTERYSQACSYISEYLFHNGYVLNFMRLQEALYDEIRNKFELKSQLTISAFKTVTARYKTVREQLQNNPFKYQDENGKWVYIPKTLDWLMKPVVFSRPQADLVRGRDYSFTDNRTMISVNTLGKRVKVSFDVPEYFNKYFEEGTPWSFGTAKLVSLNGEWYLHIPMTKSIPDNIDISAPSHVVGIDRGLRFLITTYDEKGEVEFVSGQDIIRKRQMFNKVRADLQSKGTKSAMRALRRISGRENRWMSDVNHQISKTLVDKYGSNTLFVIEDLTGVSFDEQNLSHRTAGGRNDLRSWTFYQFEQYLAYKAAEAGSAVIKVPADYTSQRCPKCGRIHKGNRHHDTHEYVCDSCGYRSNDDRVGAMNLYTLGTLYVSGDSNPRFGPRKIN

SEQ ID NO: 63343 - protein, 342 aa, unknown
  TnpB Polypeptide
MCENTVEYRRTAVIKLDTPEGADDSLRETVEQFKHCANTASEWCWHGDDGYHVTSKAKAERALYDRLRDETDLTANLVQKGIRRAVEAVKSGVERLKRGENTSQPDFSAESAVYDKRSATFHRHYVSLSTVDGRIECDYILPDGSKTPPTKYVSDEDFEFRMAHLQYRDGDWYLHASMRNVEADEESSESESKHRTVLGVDLGVNNLAVASTGRFWSADELNHWRQEYEKRRGSLQQCGSRHAHENIESVGQKEYGRFEIHLHTMANELIEEAVENDCSHIMFEDLTHIRGNIPEATWQHVWAFRRLYECVEYKANEHGVKAVQIDPRNTSKRCSTCGFTEV

SEQ ID NO: 63344 - protein, 382 aa, Bacillus sp.
MLVKKAYKFRLYPNERQKELIDKTIGCARFVFNFSLAEQRKKEKLWLQVKELVQAGISLFEEYKTGLFSKYQAIPNIPKLKKNYSWLKEVDSTALQSSIEDLHEGYTRFYKKQGGKPRFKSKKNPVQSFTSKRVSNNIEVIENRSRLPKLGSVKFANSREVVGDIKRVTVRKAPSGRYYISVLTDTEVVQLPKTGNTVGIDVGLVRFATLSNGKEYVLPTSPKLEQKLIQLQKVLSRRKVGSSNWEKQRKKVARVYEKIKNMRTDYLQKFSTMIIKNHDNIGVEDLKVSKMVKGRNFSKEIGKRAWYSFRVMLEYKALWYGKKVIAVNPHCTSQTCSKCEHVSKENRKSQSEFECVSCGYKGNADVNAALNIRDLVLVEMGC

SEQ ID NO: 63345 - protein, 396 aa, unknown
  TnpB Polypeptide
MITHKFRIYPSRKTEEKLIETLHICRKAYNFFLGELQQQKVIDKSLIQGVIPNMKICDADYNKVHSKTLQMEVSKLFSNLKGLSGSKKNGRKVGQLRFKGKHVFKTFTYNQSGFKIDFNSRRTQTLSLSKIGNIPIRCHRKIEGNIKQITIKHFPSGKWFAFVIEDGVKSQNTDNNKVVGIDLGLQNIIYDSDGNSIQNPRHLKQKEKRLKHLQRLISNKKKGSLNRNRFRIQLARQFEKLTDTRDDFLHKQSHYYSANYGTIAIEDLKVKNMTQNRFAKSINDASWSKFKQLLSYKVERTGGLMIAVNPRGTTQRCSQCGNNVPKEIQDRWHKCSCGFEADRDYNSALEIKRLGLLKLRVERPESNHLEMETLLSNEQFPSMNNEAYSKTKFWCG

SEQ ID NO: 63346 - protein, 365 aa, Candidate divison MSBL1 archaeon
MVEKTIVCRILDPTDRKRGLLVKEYSNAQGYIRGETEDLYSATKQAMEKYVEKVQNEEYPLFLRNDTFKVERAEDTEEFDYWVRVPLSGVWGGIWIPVKPHQEIRKDMNIHDSKIVWKDYGFELHLSVSFEVSSQTPESVLSVDLGERVMATTVLSADNGNPKFRGRKVRGVRRHYAWFRKRLQEKGLNKKVKEMSDRERRKVEDVLHKVSRKIVDRADEENSLIIIGELKGLGNRDTGKGKRMNRIVNSMPYWKLTRMIEYKAEEKGLRVVRVNESETSKICHRCGSENTARPAQGKFTCNACGLEDYNADLNGAKNILQRFLAYMVGNGASVNRPITKAYSKKHKIEQLEKVLGSSLLTNGTS

SEQ ID NO: 63347 - protein, 391 aa, unknown
  TnpB Polypeptide
MGKLTLTLKIKLIPSEEQSKIMSESMRQYSLACSEVSKQAFEHQTFNKVQLQHELYSKVRTAYGLLSQQTCSVFRTVSAKYQALKSTHQELTQINFSKPQCDLVWNKDYSLSKDAFQISTNQGRIKVPFVMKTKEQYFSSHDYRFGTAKLFCKKEKFYLLIPVTFEVPDFDPSKCVQIVGIDRGINFVVTSYDSKGKTTFVKGRHLKHKRNHYKQLRKHLQSKKTPSSRRRIKAIGKRENRWMNDVNHCISKALVKNNPPNTLFVLEDLTNIKENLRKVKKKDRYAHMSWSYYDLEQKLMYKAKKNQSFVIKVDPRYTSQKCPKCSEIEKSNRDKKKHIFKCKHCGYTSNDDRIGAMNIFNLGVDYMNGLHGSSAPMYGVQSITPSVTTPF

SEQ ID NO: 63348 - protein, 422 aa, Desulfotomaculum sp.
LKPRNIPGGGEIVSKCKNNQSKKSKSKGIDILVNKFPVYLTPEQTSLARTLQREAAKVWNTTCIVHRTIYIKHHCWLDEGAMKAFVKGKYGVHSQSAQAIVETYFECCERTRKLREQGVTDWRYPHRRKRFFTVTWKPLGINYEGKMLTLSNGRGRESLILNLPKRLSGAVIKLVQLVWHRNLYWLHVTVEKPALKKVQGGVTAAIDPGEVHAVAITDGKKSLVVSGRLLRSLHRLRNKVLRRLQKAISKTKKGSKQRNKLLAAKYRFLNNIERRIEHVIHTISTIVSKWCFEHNVNTVYIGNPEGVRKKDCGKKHNQRMSQWTFGKLRRMLEYKLKRHGIKLISVDERGTSGTCPACAEYTKQTGRTYKCGKCGFAGPHRDMVGASGILDKSVNGKFTKGRKLPEKVEYARLKVLALKKTA

SEQ ID NO: 63349 - protein, 510 aa, Desulfotomaculum sp.
MERKTNHCVYNINYHIVFCPKYRRKAITGKVEDAVKQIIQEICNTYGYLRALPPTEYLSLPWLKKKYFWGSGLWSRGYYIGTAGNVSTETFANILKPRNIPGGGEIVSKCKNNQSKKSKGIDILVNKFPVYLTPEQTSLARTLQREAAKVWNTTCIVHRTIYIKHHCWLDEGAMKAFVKGKYGVHSQSAQAIVETYFECCERTGKLREQGVTDWRYPHRRKRFFTVTWKPLGINYEGKMLTLSNGRGRESLILNLPKRLSGAVIKLVQLVWHRNLYWLHVTVEKPALKKVQGGVTAAIDPGEVHAVAITDGKKSLVVSGRLLRSLSRLRNKVLRRLQKAISKTKKGSKQHNKLLAAKYRFLNNIERRIEHVIHTISAIVSKWCFEHNVNTVYIGNPEGVRKKDCGKKHNQRMSQWTFGELRRMLEYKLKRHGIKLISVDERGTSGTCPACAEYTKQTGRIYKCGNCGFAGPHRDMVGASGILDKSVNGKFTKGRKLPEKVEYARLKVKTA

SEQ ID NO: 63350 - protein, 331 aa, Desulfotomaculum sp.
VYAGTCVTSIFKLIKKGISKAYLLCLQMILTNGLTMSILNSKDLSGLRVYHLKHVRSLLSMRRGLLKDSLKNWVNSIPTIGWMRLKEFGYIPYGVTVKSGTVSYKAGRYYVSVIVDIQLVGVEKKCSEGIGVDLGVKVLATVSSGIKFKNINKTSKVKKLERRLKREQRKLSRKYHMRKQRGGTATALRCANIDKQRLKVQKLHQRLTNIQTDYVNKTVNELVKTKPEYITVENLNVSGMMKNRHLSKAIAQQKFYEFNIKLKSKTQWHNIELRVVDRFYPSSKICSCCGHIKWDLKLSDRIYICDNCGFVEDRDVNASINLRNAKQYKIS

SEQ ID NO: 63351 - protein, 366 aa, Desulfotomaculum sp.
VNHLQIVYRFEMRPTKEQQKKMFHTLKLCRKLYNWSLSERQRVYKETGQGLTYNKQQNMLPGYTKEHLEYKQVHSQVMQDTLRRVDFAYQRFFAKEAGYPRFKNRDHYTSFTYPQVDAVKKTFSKPGKIYLSKIGFVKMTTHREFDASQISRVNIKYHGGKWYANLTAEVEVLENLIDSTKSIGIDVGLEHFAVLSDSTEIGTPKYYRKSERKLAKQQRRLSRKKKGSNNRGKAKTKVAKLHAKITNQRKDFLHKASLDVVQSHDIVFMEDLKSKNMVKNHYLAKSIHDASWGTFRNFVEYKCHRYGKIFLPVPPHGTSQTCLCGANVPKDLSVRVHRCPACGMVMPRDLVSAILIERRGLEMLAA

SEQ ID NO: 63352 - protein, 480 aa, Desulfotomaculum sp.
MGIIPELTPKQKEYIDNLMDRYCAAVRWAFKRLLDGWKVQDIRITVQGKFRLNSRQANDAVYDAQTTIKSQYELVQMHYENTKTKVEFTEKRIAKAKSPAKIAKLQKRLEKEQRKLAFWQKHLDNNTFPPVVFGGKKLFQERCKGNITREEWQEVRSNRYLSRGDKTKGGNLNTRIYEGQDQIYLDIAADPVQKGKSVRYNRITVPIYLAQKPSKKTGKINGINYRQMVLDYLKTGSAYQVEILRRDGKYYVHVSIEEEVPMPYNHKGAFGVDTNPDGLGVTQVDCLGQYRGSEWLGQGEWTYARTNRRNNQTCEMAKKVILQAKEKGYALAVEDLKFKNDKSVTAKFNRMSHSFVWSKFLKAVDRSAAREGVPILKVKPAFTSVIGILKYQHMYGIAVHEAAGYVIARRGLGFDHEKIPKILLDKLVKKKPEFKQMANWKQWSAVKKSVLAKIKKITKRKKVNSLISWQIHRKNVLGIG

SEQ ID NO: 63353 - protein, 282 aa, Desulfotomaculum sp.
VNHLQIVYRFEMRPTKEQQKKMFHTLKLCRKLYNWSLSERQRVYKETGQGLTYNKQQNMLPGYTKEHLEYKQVHSQVMQDTLRRVDFAYQRFFAKEAGYPRFKNRDHYTSFTYPQVDAVKKTFSKPGKIYLSKIGFVKMTTHREFDASQISRVNIKYHGGKWYANLTAEVEVLENLIDSTKSIGIDVGLEHFAVLSDSTEIGTPKYYRKSERKLAKQQRRLSRKKKGSNNRGKAKTKVAKLHAKITNQRKDFLHKTSLDVVQSHDIVFMEDLKIKNMVKTTT

SEQ ID NO: 63354 - protein, 315 aa, Desulfotomaculum sp.
LSLFPGLNGAGVTDWRYPHRRKRFFTVTWKPLGITYEGKMLTLSNGRGRESLILNLPKRLSGAVIKLVQLVWHRNLYWLHVTVEKPALKKVQGGVTAAIDPGEVHAVAITDGKKSLVVSGRLLRSLRRLRNKVLRRLQKAISKTKKGSKQRNKLFAAKYRFLNNIERRIEHVIHTISTIVSKWCFEHNVNTVYIGNPEGVRKKDCGKKHNQRMSQWTFGELRRMLEYKLKRHGIKLIPVDERGTSGTCPACAEYTKQTGRTYKCGKCGFAGPHRDMVGASGILDKSVNGKFTKGRKLPEKVEYARLKVLALKKTA

SEQ ID NO: 63355 - protein, 404 aa, Desulfotomaculum sp.
MHYENAKAKVEFTEKRIAKAKSPAKIAKLQKRLEKEQRKLAFWQKHLDNNTFPPVVFGGKKLFQERCKGNITREEWQEVRSNRYLSRGDKTKGGNLNTRIYEGQDQIYLDIAADPVQKGKSVRYNRITVPIYLAQKPSKKTGKINGINYRQMVLDYIKTGSAYQVEILRRDGKYYVHVSIEEEVPMPYNHKGAFGVDTNPDGLGVTQVDCLGQYRGSEWLGQGEWTYARTNRRDNRTCEMAKKVILQAKEKGYALAVEDLKFKNDKSVMAKFKRMSHSFVWSKFLKAVDRSAAREEVPILKVKPAFTSVIGILKYQHMYGIAVHEAAGYVIARRGLGFDHEKIPKMLLDKLVKKKPEFKQMTNWKQWSAVKKSVLAKIKKITKRKKVNSLVSWQIHRKNVLGIG

SEQ ID NO: 63356 - protein, 440 aa, Desulfotomaculum sp.
MFATQKNRIKHLTKEQYALLQNLCRYAKNLYNVALYNIRQHYFVTGKLLSYAKNCALCKTNENFKMLQAGVSQQIIRVATQSFKSFLGLKRLAAKGQYPAEKVRIPRYLKKDGYFQLVLSTNAITINAGYLQLPLSNVFKKDHPEARDIRFPFPERLDKTSIREVRINPAHKAHFFEVEYIYRDKPVVLPSLDSNRILGIDLGVDNLAACASTTGHVLLIDGKQLKAANQWYNKERARLQSIKDLHNIKSETHKLAALAVSRENFITDYLRKAAKHIVEFSISLEIGTVVVGVNKEQKQGVNIGHVNNQNFVQIPLWKFRRVLKNICDKYGITYIEVEESYTSKASFLDKDFLPEYDPANKNEYTFSGRRVKRGLYRTKNGCTIHADINGAANIIRKYRLDGDFSVLDKGIFLNPYRVQVLNTPRKKPPVVQKKKSKAAA

SEQ ID NO: 63357 - protein, 632 aa, Micromonospora sp.
VDEETGEVLSAAVLARRVGWCADLVAGMVAALIGEHWNSVDVEVLACGVDAGGRRLPSNAWMALRRLGWAVTAPGGVRVNDRVVRMAQEQAGRVLRSAVWRAGVTAGVLAVWPADPCRRTPAEWDQVRQAIPGGQHLPSSVIKGRTRQVVTFGKANGRLPVDVFELEGVPRIPRMLLLAACDRQQATIERSDTDPAKALLRLQLPTRPDPRGYRDWTWVECPTRLPSTVPAAAVLHLPTLRLIDGTVRADMAYTHPVPKAARTGHTVAVGVDWGLNTLISAGALRLGKDGRITALGAGGQFRAAGILAKQHRLRRHSERLHAKADQYARLLGGRPDEQLRAKHEVLAGEIRHVSARRQNLNDALAWAAARWTVDQAIAARATAIYLEDLRSMEAKGMGRTLNTRLSQQVRGKISDRMRHLAAEHGIAVVTVPARNTSKHCPQCLTPLRHRRAPDKPTVAGWKWAICPNQSCRWQGDRDNGAWRRIAARGLTHQAKTITDKTTGAMVIRTVVDTLEASAVVTPSAANASRRDRSKTGPTRPHASRPAPRRRGAPSPTRPHGQAGKRPEGHAPTDRKLPRAAHRHQGVNTISTPTAGHRPRGAALGAGFHLHAHATPPRWETIPETPSDSGSLS

SEQ ID NO: 63358 - protein, 279 aa, unknown
  TnpB Polypeptide
LPPLNDRIKQVELFQNRRNSWFVAITCEVSVPPFEDNGQYQAIGLGVINLITAVNLKGRFVQIPNHRPGRYWKDKLRELQSRRDHCKKYSNRWWSYQRKWVKMRHKLVNQLRDFQHKISKVVVMNTRARTIIIGDLAVKSMAQKKSASGCQRQDAATRTLHHSLQNTGFLGRFAQFLTYKAKKVGKRVIRIDEAQTTKRCCVCGKIRNRLLSERVIQCDCGTSFDRDQNAAVNLMVRFLLQQPPVNEEPLQTFWNGLHRHTALPKVPLGVDSMEALALM

SEQ ID NO: 63359 - protein, 503 aa, Okeania sp.
MILTDKLNFGTQTFQQQNIYQSLDRNSILGGKNSSPFWTEFSQAISTSLWWPTQTDLLAEDLNWLNGYAKSMSVNSWFSMKTSSQKNRNSFKICCPSSIASVQGFTDSENTKSKSNKPYKKTSRHAHTKKSNKISPNSVKKIRVYPERDLHKLWKQWLAAYRRVYNWALEQLKAGFKGDLQKVCRANDKFPDWVFELPGHQKQEACEEAFDAYRQARKNGGEAKFKSCRAKSQTIQFKVGNYKHGTWYPRKTKGLSFKAAEPIPLESIYGTELVYQRGKWFACFPQFVEILPTGSNRVIALDPGNRTFLTGFDGENILEIGKGDIGRINRLCSHLDNLISRMSSSSKRQRYKMRKAADRMRAKIQAIVKDLHNKTTSLLVNSYKLIFLPTFETSNMVLKQARKINRKSVRNMLSWSHYKFAQHLIQASNRKGVIVVRCNESYTSKTCSNCGHVHYLLGGAKVFRCPECKAVIPRDINGARNIMIRALQATAFTVKGDAILCSD

SEQ ID NO: 63360 - protein, 294 aa, Okeania sp.
LISCPIGEIPGQPNYHYQSAQLKQTKKLFPEYKEIYFEVQQNNLRRLDKSWQRWLIPDKTGKRFGRPRFKKSGKLRSLSFSRVNHPKAAVKFDGKHIIISRFGSISVIVHRPIPDGFTIKTATITKKADGYYVSFSLEDKSVPSLIPTDNIKTAVGVDVGLKEFLTTNTGETVSVPNFYRKAQSNLARKQRKVSRKKIGSNNWKKAQNTIARLHQKVARQRENFHYKTAHKLVKKYDLIAVEDLNIRGLARNTKLSKSIYDVAWGEFIIKLNAVAVKRGIHVSRGEWPFAPTSS

SEQ ID NO: 63361 - protein, 382 aa, Glycomyces sp.
VAVLSRHRTFRFRCYPTPEQEDNLVRTLGCVRLVYNKGLESRHKAWFRRRERINYAQTSALLTKWKHRQDLAFLNDVSSVPLQQSLRHLQKAFVNFWEKRASYPVFKKKRLTGAAEYTKSAFTWTNGELKLAKHTAPLEVRWSRRLPKGSEPSTVTVSRDRAGRWFVSMLVEQDIPTLPERRESVGVDAGLTSLFTLSTGETITNPRHERRDRERIRKLRRDLSRKQAGSSNRRKAGLRLARAHARVADRRHDILHKLTTRLVRENQVICVEDLGVRGMLGNGRLARAIADAAWAAFRAQLEYKAEWYGRTLIAVDRFLPSSKTCSACGTLKEDMPLRQRVFTCPERECGHTEDRDVNAAKNILAAGLAVAACGDGVRPKRA

SEQ ID NO: 63362 - protein, 340 aa, Glycomyces sp.
LRQHTYTELKDRGLGSQVAQLLIKKTCHAYATLAGLVKAGRPQGERAAKATAKPVVFRPDAAQAFDDRCLSWQHDAGTVSIWTVTGRMRNLAFTGHRDHLKVVEQYRQGESDLVFRDGNWYLMATVEVADAEANTDSVDFLGVDMGIVNIATSSDGDNYSGASLRRYRKRMAKVRAELQAKATKSAKRKLKARARREARAVEDVNHRISKQPVTQAERPRPSPTATRTGGRCAAASHVSAASAWKTLPVSATGYGSQPPGEASSTHGPSTNSRRSSPARRSGPACRWRPSMPGTRRGGARGAGALRRPIGPLVITSPVSAADSLGPPTRWPRSTFVPAHA

SEQ ID NO: 63363 - protein, 448 aa, Mycobacterium sp.
LVRSHFGARRKAFNWGLAKVKADLGAKAVDPGHQSLCWDLGALRWAWNRAKDGVAPWWAANSKEAYLSGLADLARALNNWSASRNGTRRGRRVGFLRFKSARRDPGRVRFTTGTMRVEDDRRTITVPVIGGLRSKENTRRVQRHLASGRARILNMTLSARWGRLFVSIGYALRTPATERTVARPTVRAGVDLGVRTLATVATVDTRTGEQTITEYPNPAPLKATLAARRRAGRQLSRRIRGSRGHRAAKAKLTRLDRRCVNLRREAAHQLTTELAGRYGHLVVEDLDVAAMKRSMGRRAYRRAVCDAAMGAIRPMWAYKTARCGAVLTVADRWFASSQIHHGCTAPDGAPCRLIGKGRIDKLLVCPHTGDVVDRDRNAALNLRDWPDYASCGPVGTTAPSVPGPTESVGTGHGADTGTSGAGGASVRPRPCGAGRREAKTPTPQGNAA

SEQ ID NO: 63364 - protein, 392 aa, unknown
  TnpB Polypeptide
MKKSKPAKNVELIGYKFYGIPSDQDRQLELKTFGCCRKIWNLMLADKSQYYQTNQKSLNVTPAKYKPQYPYLKEIDSLALANVQLHLDSAYSRFFDQLGNFPVFKSKKHARNSYTTNALYYTNKNGVMSCNILVDETTGELWLPKHQDSIQLRLHRKMKQGGKLKSVTVSMEPDGKFYYSILMEYSKTVVSHTIHPENSIGLDMSLPDLYVDDQGNTPDFPKPYRTMEKRIATVQKRLSRKTKGSANYEKERKKLASLYAKSKHQRSDFLHKLSCQLTDTYDIIGTEDLDMSAIKRSLHFGKSVSDNGWGMFTTMLQYKAEKKGKVLVKIDRWFPSSKTCCQCGHVHKELKLSDRIYVCSICGNIMDRDHQAAKNIRQEAIRIWEESQTTLS

SEQ ID NO: 63365 - protein, 394 aa, unknown
  TnpB Polypeptide
MMRNYKFRLYPTREVEQKLVETLEINRVVYNYFVSSNLRSRNDMNYALTELKERQPILRKYHSKMLQMVSTKVAAAWRALEVLEEHGRRTGSLKFCKPGKCNSFTYNQSGFRIENDKLWLLKIGSIKIVLHRQPTKVKQVMVVRQARKWYAVVTCEIAKSIFRFVDTRKSIGIDVGITKFAYDSDDHEIDNPLFLSKMIRPLRRAQRKVSRRKRGSNNRKKAKSWVAHLYQRIANKRHDFLHKLSTEYASKYDLIFLERLRISNMVKNHHVARHIMDSGWGTFKTMLEYKAKMVVGVGPAYTSINCSKCGNTVPKTLAVRLHRCNKCGLTLDRDYNASLNILNEGLTTLPQGLREFTPVEIAPLLASVGVQARSLKQEASLFKAQAIHSAERSQ

SEQ ID NO: 63366 - protein, 241 aa, unknown
  TnpB Polypeptide
VLNYKFRLYPTKEQELVLGHTLNGCRWVYNYFLSIPPMSEYDMNYALTELKEQHPWLRNYHSKMLQMVGKQVAAARKVTTGKLKYRRDYDYNAFTYNQTGFRLDNRGVLILSKVGRIKILLHRQPVNVKQVTVCRKYGKWYAIAACEILRSSYSNIIYKKPVGIDVGIAKFAHDSDNHVIENPQFLSRMLKPLRRAHRIKKADRQQQPRESQTHARQPVRAHKQQAQRLFAQNIDVLCQPL

SEQ ID NO: 63367 - protein, 289 aa, unknown
  TnpB Polypeptide
LKVEKNPNTVSEYWARIPVKTVRGGVWVGIKPYEPLPMNAKICESRLYKQGSNWFLYLVVEQDVPEKSEYQNVIGIDMGIKHIATSVELASGKTIFYGKQLNRVRGHYFWLRKNLGKAKAIDTIKKIGERESRTTNDMLHKISREIVDQAIATDAAIVIGNLKHLRRNRIQQRRKRGARLLNSFPYSRLTQYIKYKAALEGIKVIEVSKAWTSQTCTECRNKGVRLTQGLFKCEHCHTEENADRNAAFNIAKRGLGYMSKLGVSVNMPRTSAMHSLSAMMSGEAIALAR

SEQ ID NO: 63368 - protein, 387 aa, unknown
  TnpB Polypeptide
MMRNYKFRLYPTFQQESKLVNALQTCNWVYNRLIQLKPYSRNELNYALTELKETEPWLYNYHSKMLQMISTRITAEHNSLKALRKKGCKVGSFASIERASYNSFTYNQSGFKIEKRGKTDLLWLSKIGCTEIRLHRKLADIKQVTVFRRNEKWYAIITCDIAKSTFCFIDPRKSVGIDLGITKFAHDSNNRIVDNPLFLTSMAKPLRRAQRQLSRREKGGHNYQKAKSRVARLHERIRNKRQDFLHKESYHYSKEYDLIFVERLHTCNLARNRHTAKRILDSGWSTFRQFLAYKGKMVMEIDPYNTTVDCSQCGNKVQKDLAVRIHCCDRCGLVIDRDYNASLNILQKGLLQLPQGLREVTPVEILCGSMKQEMLTGCDGKYPHVII

SEQ ID NO: 63369 - protein, 360 aa, unknown
  TnpB Polypeptide
MSEYDMNYALTELKEQHPWLRNYYAKMLQMVAKQVAAARKATSSLKRNGCKTGRLSYRYNDDFHAFAYNQKGFKIEENRLVLAKIGRIKIILHRKPINIKQVTICRKNGKWYAVVGCEILRRSCSTIVYKKPVGIDVGITKFAHDSDNHVVENPQFSTRMSRPLKRAHRRLSRKKLGSNNRKKARRMLARLYERINNKRSDFLHKTSAYYCRNYDLIFLERLRMANLTKNHKLAHKILDASWYTFKIMCQYKANRVVEVDPAYSSLDCSRCGHRVPKSLAVRIHSCPKCGALLDRDYNSAINHLQNGLTLLQLPVERREVTPVEPQSKVIETGTLYGDMQLTRGTGASLSGKPVPSPRAW

SEQ ID NO: 63370 - protein, 485 aa, unknown
  TnpB Polypeptide
MSQKVRIDGVKHVGASVFLGVDHCDNPCWTRNPERVMAWLCDGWRSRFNQRREQRPRNIPIKDEAGEIVDWAKEPLGGPDVADSLSDKEARLRCPWMAGIPAPILSSTDRIEDIEWSAGLKRKKTIGGRIPGFKSRHRGLGFVCWRNASKTGNAIFRKTGRKSGVVVITGMNPPRWRKPGEKLHWRVIIHVRVNQPIRPYTSVHVDWTHRSLVFVNMPLPSPRTRNGEVGIDRGCVHTLALSDGTFMDMPKPPKAELKRLKHLQRKMACQDRVNEAKGGKTAKLASKRRQKTLSQFNALQGRIVRRRNDWIEKTTTSLARENGLVVMEDLDVQAMTRRPKPKPDPDNPGRYLHNGAKAKAGLNRSILSNNWSRLRKRLKDKMDANGGNLVIVPAAYTSQTCHKCGHVAKENRDSQAVFECVECGYRANADVNAAKNILGRALSETGGGTASDVEDPQWRSREASTPSTQAGSSFGVRAVKGIPRL

SEQ ID NO: 63371 - protein, 193 aa, unknown
  TnpB Polypeptide
MEPERGTSTRANRVKQLEKKLRRCQRKLSRKIEANIGKRDKNGKPTYKAPMEDMKNIQKQNQIIRKLHKAISDIRTNHLHQSSSEIVKTKPSRIVMETLNVKGMMKNRHLSKAIASQGLYEFKRQMKYKCKKYEIEFVEADKWYPSSKKCSCCGQIKSDLKLKDRLYVCSCGLRIDRDLNASINLANYQIQRV

SEQ ID NO: 63372 - protein, 400 aa, unknown
  TnpB Polypeptide
VLRTQLEVACKLYNTLLHLEQQEYKKNRHTMGKNELRQLALDLRKRNPEFQALHSQVAQQVAERFYQARQRFFEGLANKPRKKKPHMYLSLVYPQKGWKLSDIRGVGQGENKKMRARLYLSKMGFFTVVIHRDFPLGRVCQVCVKLYPSGRMYVVFLVKEEEALNEQAAAGEPRKVVAVDVGVARLATLSDGRFLENPKPLECSLERIRTLQGSLSRKIKFSKNWLKAKRRLAKEYEYVKDFRRDVFFKLDALLAAEYDLLVSEDLNVEGLIRRGETGKRRLRLHDSAFSELRRMLEWGVCKTGESRPSVQLVARVLLVWENKPEFNFGGQSVSLSVLRVHSRSGSQCFSGSFKKGMVGATRSVCPAAELHPIPPLPSLGLKRRKGEAMMREAPSFTGRG

SEQ ID NO: 63373 - protein, 321 aa, unknown
  TnpB Polypeptide
MKKVLDDLCDYRRYCWNQGLALWNDMYDSSLVLDDRKLRPSERKVRDELVANKDDWQYQLSARCLQLAISDLGKAWGNFFNKAMPDWGKPKFKSKKAPRQGFKTDRAKVINGKLRLDKPRGIKTWYDIKFKGAKSLEGDLKVASIYRENDKYWASLPFEVEITKKGKTGNKTAVDINVGHINYTEGKVNTLPDNLKKLYKRIKHYQRQLARKRVVNGNKATKTNNYVKTRAKLQRDYRKVANIQHNIIHKFTTKLVSDYDKIVIEDLDVKKMQMTHVASKGLQRSLFGYFRQVLTYKAGWHDKEVVLADKYYPSTQRCSDD

SEQ ID NO: 63374 - protein, 470 aa, Mycobacterium sp.
  misc_feature (354)..(461): Xaa can be any naturally occurring amino acid
MARLKVPEGWCVQAFRFTLNPTQTQAASLARHFGARRKAFNWTVTALKADIKAWRADGTESAKPSLRVLRKRWNTVKDQVCVNAQTGQVWWPECSKEAYADGIAGAVDAYWNWQSCRAGKRAGKTVGVPRFKKKGRDADRVCFTTGAMRVEPDRRHLTLPVIGTIRTYENTRRVERLIAKGRARVLAITVRRNGTRLDASVRVLVQRPQQRRVALPDSRVGVDVGVRRLATVADAEGTVLEQVPNPRPLDAALRGLRRVSRARSRCTKGSRRYCERTTELSRLHRRVNDVRTHHLHVLTTRLAKTHGRIVVEGLDAAGMLRQKGLPGARARRRALSDAALATPRRHLSYKTGWXXXXXXXXXXXXXXXXXXXXXXXXXXXXXXXXXXXXXXXXXXXXXXXXXXXXXXXXXXXXXXXXXXXXXXXXXXXXXXXXXXXXXXXXXXXXXXXXXXXXXXXXXXXXTKDHSLATV

SEQ ID NO: 63375 - protein, 516 aa, Mycobacterium sp.
  misc_feature (450)..(490): Xaa can be any naturally occurring amino acid
VRPAVRQARCAEPGQARIGGRRRRVGGCLMAKFEIPEGWMVQAFRFTLDPTAEQARALARHFGARRKAYNWTVATLKADIDAWQATGIQTAKPSLRVLRKRWNTVKNDVCVNIETGVVWWPECSKEAYADGIDGAVDAYWNWQNSRSGKRDGKRMGFPRFKKKGRDPDRVTFTTGAMRVEPDRRHLTLPVIGTVRTHENTRRVERLIAKGRSRVLAITVRRNGTRIDASVRVLVQRPQQPKVTDPGSRVGVDVGVRRLATVATADGAVLERVPNPRPLDAALNELRHVCRARSRCTKGSRRYRERTTEISRLHRRVNDVRTHHLHCLTTHLAKTHGRIVVEGLDAAGMLRQQGLSGARARRRGLSDAALGTPRRHLSYKTGWYGSQLVVADRWFPSSKTCHVCGHVQEIGWAEHWQCDSCSASHQRDDCAAINLARYEDTSSVVGPVGAXXXXXXXXXXXXXXXXXXXXXXXXXXXXXXXXXXXXXXXXXLKITHLQRQRCLTKGRRTRFTSLAWA

SEQ ID NO: 63376 - protein, 314 aa, Leclercia sp.
MIKQQAFKFALKPNKQQKNDMLLFAGACRFVYNKSLSLLKDNYQSGGKHMHYNQLAPKLVEWKSESDLSWLKEAPSQSLQQSLRDLDKAFSNFFGGKAEHPRFKKKGQHDAFRFPSQRVKVDQEKQLVLLPKLGWVKYRKSRDITGDIKNVTISGKLGKWYISFNTQTDIVEPEHPTTSNVGLYIDNNRQITLSDGTQYFPPEDLRTLPKKIQKFKLRLRKKTHHSNNWLKSKRKINLLRSRLSQIKNDYLHKTSTAISKNHAMIVIADVEKKSFSGDKQQKNVESYETLTSVQYELIRQLTYKQEWCGGIVIK

SEQ ID NO: 63377 - protein, 376 aa, Leclercia sp.
MIKQQAFKFALKPNKQQKNDMLLFAGACRFVYNKSLSLLKDNYQSGGKHMHYNQLAPKLVEWKSESDLSWLKEAPSQSLQQSLRDLDKAFSNFFGGKAEHPRFKKKGQHDAFRFPSQRVKVDQEKQLVLLPKLGWVKYRKSRDITGDIKNVTISGKLGKWYISFNTQTDIVEPEHPTTSNVGLYIDNNRQITLSDGTQYFPPEDLRTLPKKIQKFKLRLRKKTHHSNNWLKSKRKINLLRSRLSQIKNDYLHKTSTAISKNHAMIVIADVEKKSFSGDKQQKNVESYETLTSVQYELIRQLTYKQEWCGGIVIKLPDNTSISSIDNHASKNEYIAEKLNLNADSLRTKACNLLAAGLAVTACGGDVVKRSPVKQEP

SEQ ID NO: 63378 - protein, 380 aa, Clostridium sp.
MEQLKAYKFRIYPTEEQEIFFAKSFGCVRKAYNLMLNDRMKAYEEMKKDSSKKISYPTPAKYKKDYPFLREVDSLALANAQLNLDKAYKKFFRDKSVGFPRFKSKKNPVQSYTTNNQNGTVALIDHKFIKVPKLKSLIRIKRHRQPRGVIKSVTISRHSSGKYFISLLCKEEILELPKTNSAIGIDLGITDFAVFSNGQKIDIHRFTSKMEKKLKREQRKLSKRASLAKKKRINLFEAENYQKQKRKVAKLHEKVMNQRTDFLNKLSTEIIKNHDVICIESLNTKGMLRNHKLAKSISDVSWSSFVNKLQYKADWYGREIIKVDQWFPSSQICSGCGHKSGKKSLDIREWTCPVCNVHHDRDINASLNILAEGLRLKSIS

SEQ ID NO: 63379 - protein, 496 aa, unknown
  TnpB Polypeptide
MRAQTPSYVVSVKLKLSESIENRLEKSFNIANSAYNEALRFGLNRFEAMKRNSQYQELLELRRNNNAHKEYDRALFELRKSYNVTEFGLSNRLSQQRKKPNSHYRQLNSGELQVIAGQAYKTLEKVLFYQIKPSSVRFRSKYSSNVSYRNRTNTTGTRLVPSDRKGYAYRLYIHKVSTFVDIPIKAFNNYRQMSLLRSEKLKYVQIIRKTIRGKRVYILQIVCQGLPLSKVTKGEGLLGIDPGISTVAYASKKDVALVDLVPKDISHKERLIRYLDRKIERSRRVNNPDCFEGDSTIKKGAKFKRPSKRQMKLQVRRLRVYRSLSEERKKLQGQLANHLLSQASIIKMEALDVKGLQRRSCELRINPKTNRPFSKKRFGKSVFRAAPSAFRQALQAKAHQLGIEIEIISPRDLRPSQYNHITQTFEKKPLSTRVYNLSDEYPGVQRDIYSAFLIGHVEKGHYQQIQLNQDFPDFYQQMKKFLQQAPKTKRLTWYLN

SEQ ID NO: 63380 - protein, 411 aa, unknown
  TnpB Polypeptide
MIVQQVEKHVINKNHPYYAMFCEFTHQSKNLYNHANYLVRKEFVTSGKWIRYQQLDKLLKQDLEYPDYTNMPTAQSAQQTLRLLDANWKSFFKSVKDWSKNKDKYSGRPKLPKYKPKDGQMVLVTTNQQVKQKGDLLTFPNSFGGFTIKPRCVNLSNFEKLNQVRIVPCNQLFCVEIVYSVTIDDAPAQDNGRIMSIDLGLDNLATIVTNTGLHPIIVNGKGLKSTNQYYNKKNAHYQRIAKQMNNKNYTNRLHRLTRKRHFKIEDALHKISRFIVDTALANQITTVVIGNNKGWKQSISLGRKTNQSFVAIPHQKLIDKVCYKAKLHGIRVIITEESYTSGTSFLDGELPAKEVYDKTRRIHRGLFRSIQGVFINADVNAGYQIMKKVFPNEFSDGIEGAVFHPVRVNIV

SEQ ID NO: 63381 - protein, 178 aa, unknown
  TnpB Polypeptide
MRRDFLQKLSSKLVNENQVICLEDLNVRGMVKNHSLARSISDQGWSEFVRMIDYKSRWYGRETVKIDRFYPSSKTCNHCGFKNSNLTLDDREWTCPSCGNVLDRDINAAKNILREGIESLTNRGGLGDSLCKLREKVDSESCQGLPPNEQEGQVETPNGVSDRLGYKLSLTHVVELGI

SEQ ID NO: 63382 - protein, 426 aa, Massilia sp.
MIIEPGGGSVTGPRLITTGVCLVVQETPCSLAHKIRLAPNNVQATYFAKAAGTARFAYNWALARWQELYQASLADPARPKPNEAALRRELNTIKREQFPWMLDVTKNAPQMAIIQLGQAFDHFFAHRAGYPVFRHKGINDRFSVTNDQFRVEKKRIRMPKLGWVRMREALRFTGHIVSATVSRVAGHWYASITVDMPDGPPLPPAENQGAVGVDLGVTTLATLSNGETIPGPKSLRTLLKKLQTRSRALSRKVKGSRNRAKAKLKLARLHARIANLRKEGLHQLTTSITRRFHTIGIEDLNVKGMLGNRKLARAIADMGFHELRRQLDYKTALRGGRVVVADRWYPSSKLCSCCGYKLDTMVLGMRQWSCPGCSTLHDRDVNAAINLKKVAVSSTVAACGGEGAGPARERRVKPAPMKQESNSRQL

SEQ ID NO: 63383 - protein, 329 aa, Clostridium sp.
MLADRIESYKENKDLDIKQIKYPTPAQYKKEFEWLKELDSLALANAQLNLDKAYKNFFRDKSVGFPKFKKKTNTNSYTTNNQNGTVSLENGYIKVPKLKSKIKVKQHRQFTGKIKSCTISKTPTNKYYVSILVDTENFILPKIDKKIGIDLGIKEFAITSDGEFFSNPKWLRRSEKRLRKLQKDLSRKKKGSNNRKKARLKVAKLHEKIANQRADFLNKLSIKLIRENQSIVIEDLKVKNMQQNHKLAKAISEASWSEFRRMLEYKASWYGRKIIIAPFNYASSQLCSECGYKNEDVKNLALREWICPNCGVHHDRDINASKNLLKLAI

SEQ ID NO: 63384 - protein, 350 aa, Moorea sp.
SSIARFYDNCKKKVPGKKGFPKFQKRGRSVEYKQSGWKLSPDRKAITFTDKNGIGKLKLKGTWDLWRFDKKQIKRVRIVRRADGYYVQFCVSVDIKEELDSTRSTIGLDVGLKDFYTDSDGNTEPNPRFYRTGEKRLKFYQRRVSRKKKGKAVGHASRTSNRRKAVNKLGRQHLRISRQREEHAKRLARCVIRSNDLVAYEDLRVRNLVKNHCLAKSINDAGWYQFRKWLEHFGTKFGRVTVAVNPAYTSQNCSQCGEVVKKSLSTRTHVCKCGCELDSPKATLRERDHNAAINIRTRALGTVGHTGTWIDRRSRYANVDPNACGESTSTLPDSGLVEQVGSMKQESPSF

SEQ ID NO: 63385 - protein, 398 aa, Cyanobacterium sp.
MLVIEAKLYGNHPQYQKLDEMIRTATFVRNSCLRYWMDNKGVGQYDLSRLCKELAQEFEWAKKLNSMARQASSERAWASIKRFYDNCKNPSLKKKGFPKFKKGRSVEYKTSGWELSKDRTAINFRDGFKAGWFKMRGGFDLNFYQLNQIKRVRVIRRADGYYVQFCVDQERHEDIKPSGNAIGLDVGLSSFYTDSNGVKVDNPRHLKKSEKQLKRLQRQVSKKKKGSNSRKKAIKKLGRKYLKVSRQRKDWLVKLARCVVSSNDVVAYEKLSVKNMVKNHCLARSINSASWRTFFDWLEYYGKVMGKIVYGVNPQYTSQECPNCKAIVKKTLSQRTHICECGCVMDRDEAGAINILAKALRELSRGGQSQTSSLELVNANGHINLCQLSESLADKLGG

SEQ ID NO: 63386 - protein, 484 aa, Cyanobacterium sp.
MIVAYKFKLKPNSSQKAIMVNWLNMLRSHYNFCLRDRIETYEQVTIPKLGNYCDLKTKAESCPLTCSVSKNSQLGKPFKGNKKPSAYEMQSSELPSLKKSRPWYKQIHSTVLQQNLRRLDTAFKNFFDGKGYPKFKTKQRFKSFNYSPNQVKLKGNKIYLPSIGWMRFFQSRKIPEGFSLRSVTVRQKADGWYVSIQIEDKSIPQSQPKDLEQIKSVIVCDLGIKKLLALSNGEQIKNPQFEKQLERTKTVRQRRASRKKRGSKNQKKAYQKLARLDQKIVNQRTNYQWNIAHHLTRLADIIVLEDLNIQGMSKKCKPKQDENGKYLKNNQSAKRALNRLIRDCSWGELKLKIQSVAEKFGCIVLEVNPKFTSQTCSNCGHVDSANRNKEKFVCTNCGFIADADNQASVNIGIKGLEILGISQSKLLVDNQKVTAKSEVTDLRNQDKSMTLVVEPSNPLQLSLFEWINGQVTGCSESPTIARRV

SEQ ID NO: 63387 - protein, 431 aa, unknown
  TnpB Polypeptide
MIKVNLTQKIRIFPNPEQEEVLKVLSEKCRLIYNFALEERITAWKNDIKGINYFKQNKDLPKIKDRFSEYKWVYSKVLQEVLRNLDASYKSFFALWKKGNKDARPPKFKGKKYFTTMVYNQSGFKIEKGFIKFSHNYNKVPLFFEIPERFQIENVKQVSISQDNLNKEYYVSICYEIADRQYIDNGKYQAIDLGITNIVTAVNMKGKFIQIKNRRPDKYWLKKIEELQSRRDRCKRFSNRWYKYNNQLKHMIRKCSNQIKDFQHKLSKKIVEHTKSNTIIVGELEVKQMARKRKGKANRKSRRSLNRAIKNTGTLGRFVQFLTYKAERVGKRTIRISERNTSKMCCICGKIHNLSLSDREMNCDCGNEIDRDKNSCVNMMKRFLSQNAKWTGYQEFLGNLRHTVNDKTRVPSPNFEYGSENSQEAHEFIRG

SEQ ID NO: 63388 - protein, 421 aa, unknown
  TnpB Polypeptide
MSTKNERIKATLIGTKERRTHMTCRVYTVKLDRSHLNQESLTRLKRLFLEAKWLYNYCVGHPNVFSIDDKITAVPVKIKDRFELRQLMYLSSHIRQSLIMRTQQNICGLARLKAKGHKVGRLKFKSYVNSIPLKQYGNTYKFIDRKYLHIQKLPQKLRVNGLEQLPSNCECANATLLQQHGDYFVAITTYTPQEHKPVVPAKSIGIDFGVKNQLMLSNGVRVQYKIPVTRRIKQLCKKLSCHQYRSKNWWKTLYRLLKAYAKTTNIKRDIRNKLVHFLYTNFQMVCYQNENLRSWQRLWGRRMLSTSLGGIISMLETKVHTPVEIDRFFPSTKTCSRCGHQRAISLAERIYVCQNCSLVIDRDFNSSRTIEHEGHKILGRGPTEVTPAETNTSTLTLEYLNQISYVKASMVKETGSLTALA

SEQ ID NO: 63389 - protein, 277 aa, Clostridioides sp.
  misc_feature (270)..(270): Xaa can be any naturally occurring amino acid
VVVVEKAYKFRMYPNKKQQELINKTFGCCRFVYNKYLAKRIDVYKNNKETFTYKQCSSDLTNLKKELKWLKEPDKFSLQNALKDLDNAYKKFFKEKTGFPKFKSKKINRFSYKTNFTNGNIMYCGQHIKLPKLGMVKIRDKQVPQGRILNATISKEPSGRYYVSLCCTDVDIEAFENTNNHIGLDLGIKEFCISSCGEFIENPKYLKKSLNKLAKLQRELSRKTIGSLNRNKARLKVARLQEHIANQRNDFLQKLSTKLIKENDIICIEXNYPFYKK

SEQ ID NO: 63390 - protein, 317 aa, Tenericutes sp.
MKKLLKAYKVEIKPTTKQIQKINQSIGVCRWLYNEYLSTNNQLYTKYKNGFIDKKQVFMSANDFDKYINNEIKVLDEYSWINNCGSKARRKAIQNAEIAYKRFFKGQAKFPKFKKKNKCDVKLYFPKNNKGDWKVDRHKIMIPTLKNVRLKEYGYIPIGSKIISGTVSKKANRYYVSVIIDVENIPQKNTNQGIGIDLGIKDFAICSDKIIYKNINKTQIVRNLEKKLLREQKRLSRKYESLKLRNKKEKGEATRQNIQKQIAKIQILYQRLNNIRTDYINKVVSNVVRNKPSYITIEDLNVKGMMRNKYLSKAVAQ

SEQ ID NO: 63391 - protein, 163 aa, unknown
  TnpB Polypeptide
LLFIFLRYFGFGLKKKGSNNRNKSRINLAKLHEKIVNQRQYYFYKLAHELCQKYDCIIFEDLNLKGMVKLWGRKVNDLAFNKFLSILQWVSTKYGVTIKFIDRFYPSSKMCSKCGFINRDLTLSDREWKCSECYNVHDRDINAAINIKRVGTSTHELGKVSQS

SEQ ID NO: 63392 - protein, 464 aa, Gloeocapsa sp.
MLLNYQYRCYLETPQKAQLNNWLRVAQYWYNWQLGDRFTWWETNRSNYIVPSGDCCYLSCSLPPKELRDKPNFFSQKKLLPEKKKDLVLVRHSGELLDFTTVPSQTLQDVSKRVDQAFERYIKGDKNGKRSGKPRFKSRYRTLRIEGQAIKITRVGKDWLFLSCSKLKGWLKIRLHRPLPPGFLLKNILISKKADGWYCTFCLDEPTVPIFTPDKIIPTWENSLGIDAVLYEDDYLATSEGQKLPSVKSFRKNQHQLAKISRAKNSRKKGTKARRKLAKREGRKHQQIARARKDHAYKTAHTLVRTNKKVFLVEDLNLKGLTKRNKVKKDTDGNYLKNGQSAKSGLNKSWLDAAFGSFYETLSYIAEKAGAVVIKVNPAYTSQLLAYRDEFVFTDCSIRVYYDPREEITVDRDYNSSINIKRVGLELFPTINRRSGKITKSKTDSTTKQVLEVLKGCQKPILCQ

SEQ ID NO: 63393 - protein, 402 aa, Azospirillum sp.
MSVTHRGYKFRLYATDEQEALFGQYAGVCRLVYNLALEQRRDWWRQFKTSTGRSISYPSQARELTVLRAEFEWIAAVSIIPQQQALRDLDSAFGSFFAGRADYPTPRKRGENDAFRFSGRNCQWRKLNAKWGVVRLPKIGEVKFRLTSDIPGAVKNVTVKRDALGWHVVFSTEVEHEAPQNFGPAVGIDRGVIHTLALSDGRFMDMPRERLNVLDRRARKQARKLAKCKRGSNRRNAAKKLLARTKAKMARVRLHWSHERTTEIASTHGVVVIEALKTRNMTASAAGTAKAPGRSVRQKAGLNRAILNNAWFQFEALLAYKLAERGGELRKVNPAFTSQTCSCCGAIDKASRESQATFRCGHCGHAANADTNAARNILRAGTQPAPRFSIGKPLKRELKRAA

SEQ ID NO: 63394 - protein, 358 aa, unknown
  TnpB Polypeptide
MKLILQIKLLPDGSQAQSLLDTIKKANAACNTISEIAWKGKTFNQFKLHQKSYYLAKEQYGLSSQMTVRCISKVSDSYKLNKKIKREFKPFGAITFDSRILSYKNNSISIWTIKGRLKIPFVCFRPDWLPFVKGEADLITRRGKFFLFQTVEIPEEGIKDVEEFLGVDFGLINIATLSDGEIMSGKEIETYREKRQKIRSSLQSKGTKNCKKVLKRLSGKEKRTASIVNHTIAKRIVAKAFKTHKGIALEKLKGIRKSANNKGKKFRSRVGKWNFADLRAKIEYKAKLSGVPVVAVNPAYTSQTCSRCHNLGSRNGESFKCPHCGFEAHADVNAAKNIGRAVNHAEKSVKGHLAPNQV

SEQ ID NO: 63395 - protein, 384 aa, unknown
  TnpB Polypeptide
MTVITVECLLAFDKYEDKEKVLNLMRKFSSMVRFAYKRLLEEVERKELKKMLSQKYGINTRYSDSAIFLAQQTLNSCLQRGQNPKKIVFGSRELFEKLKKKHLMGKRREKLRQKWEERRYGILYSRGDKSKEGNLNLRLVNLNNQWHLRINLGNGEYVWAEVVRSAKREKDRWIDFVWDLTQAERTGNWFAYAVRLKLKNGKIYAKISREENLPEITITKENVVIGIDINAYPFHLALAWTSRDGNLEKYERISLNGLLDGNMDKREYLSWHIAHQVVEIAKREGKAIVVENLEKIPKGRRGDGMPKIRKKLQKWVYKGLLEKIEIVCKRNGVQLIKVNPAYTSVIGKLKYAPIYRIDKDVASAYVIARRGLGFKERLPKNYRF

SEQ ID NO: 63396 - protein, 599 aa, Paracoccus sp.
MMRCDPLPLLDPNPGKIRDLLAVLKAFRDCAPAVAADQWRRFFETGRFEKKLTAAEEKAVPALAAAKVMLGAQRMQMLRFQVVGQLKSFISNRANDFRDVVLASSLDATLRHQLLTINKEKAWFSRDLVRMKSGPLKGQVIPDNVRRLARSIMRAILACHRKPRFHRLNPNIDQRQVSFGEAHSARHGDLWISIAALDLLDKKTAKEMTAVDAGRAARQGRAPEEFRPGSHRMIHLPLRSHAYFNARGGDLALTVQLIERPASKHSIKLGRSTHRLPDGRPGELVIGLVSDMKAAFEQSRTGYVPRCDELAIDFGLRTMLATDQGDLFGRDWIDRLKWHDERIAGLAARLQAQGIRPNRSKRYRERVEALRGYIRTEIGRALNRLVEIRAPAHLVLERLDFRSPELSRRMNRLLTNCGRAVLREKLKALKEQYGITFEEVNPAYSSQTCSNPRCGYVSKTNRKAQGTFVCGACGKKIHADVNGSRNLGGGRSAFDRAARMTKAESLELTVMRHLERLGAARAGVVLDPSLWPARTRDRVIPERSVYVSNRYFGDALGKFFPTPAAAPMTRRFKSNRRPSAPEIVAAQPTQDMVADVSAG

SEQ ID NO: 63397 - protein, 363 aa, unknown
  TnpB Polypeptide
MDHTDYRALPAQSSQGIMKIAFQNWLSFFASMKDYRKHPEKYSGKPHIPGYARSKVKEVVFSNQDCVIKEQKYLKLPKTKLQLNIGKLGCTDGQLKQVRVVSSHSQFVVEMVFVYPLEKKKAAKANVLAIDLGVENLATIVTTTGSKPMLVKGKMIKAINQYYNKMKAHYIGILRQGKKSHEGAHTSRRLERLHLKRHRRIKDLFHKVSCHIVQLAVEQQIGTIVIGHNDGWKQASAIGRRNNQSFRHIPHQMLIAMIRYKAVEQGIAVTLTEEAYTSKASFLDQDPLPRFDEEGEWIFTGKRIHRGLYTSTKGLIHADVNGAANILRKVFPNVSAQGTDGIEGLDGNQPINVSTPLVLSILK

SEQ ID NO: 63398 - protein, 386 aa, unknown
  TnpB Polypeptide
VRTFGCARVVWNRTLAARHERYMLAREGTSYAETDRALTAMKRDPELAFLNEVSSVPLQQALRHQHAAFQAFFARRSRYPRFKSRRGRQAATYTRSAFSVHGGALRLAKMSGPVPLVWTWPDVDLTALDPTSVTVAKDPADRWFVTFQVDAPGPAPLPVAGQGVGVDVGLTDLATLSTGEKIPHPRNWERHEQNLKRWQRRLARCQKGSRNRAKTRVKVARAHARVADARRDFLHKASTDLIRRFDVIAIEDLQVANMVRNHHLARAISCTGWAGLRAMLEYKAGRYGRQVAVVDRWYPSSKACSACGHLLEQLSLSTRMWRCPSCGTRHDRDINAAKNILAAGLAAGAGNGTNACGGTVRRAGTPRAYVPAKQEPQPVRAGIPAL

SEQ ID NO: 63399 - protein, 263 aa, unknown
  TnpB Polypeptide
MIPTLKQVKLKEFGYLPVGANVTNGTVSYEAGRFYISVVIDIDENSKYNKDLETSYHTTTKGIGIDLGIKNLAISSNGKIFKNINKSSKVKKLEKRLKHLQRQLSRKYEFRKKKGGKTAAASANIGKQKLKVQKLHHRINEIREDYENKVIHEIVKQKPSFITVENLNLKGMMKNRHLAKAVGAQRFNYLLTKLKRKAEIIGIEMRVVDRFYPSSKTCHFCGHIHKGLKLKDRVYICPECGYTQDRDFNASLNLRDAKKYRIA

SEQ ID NO: 63400 - protein, 371 aa, unknown
  TnpB Polypeptide
MKKSFKYYIKANKETIQKAERIFNLCRVLYNLCLEQRKFVWKNYHKSVSCYDQIKELPSLKKFFPELKEVPSQTLQEVVERVDKAFRNFFSRVKKGEKSGYPRFKSFNRYDSFTLKQAGWKIVGKELKIGKVGSFKLFLSRPIEGDIKTVTIRRTLSNRWYVTFSCDNVNPKPLPKTGESVGIDVGCESFLTTSEEEKIDNPRFFQRAQSLLTKRQKTLSRKKKGSKHRNKARILLSKAHEKVFDQRRDFHFKTARKILQTYDTIFIEDMNHFKSYRSLNRSMRDVAWFSFFNILLFKAEEAGKEVVKVPARNTSQICSSCDRIVQKGLSVRVHSCPHCGLSIDRDINAARNILRLGQSLQGAGALAPVMN

SEQ ID NO: 63401 - protein, 240 aa, Ktedonobacter sp.
MSGSVGGRGKRAATRQYLARGLPNPKLGWVNLAEKLRLQGKVTGARLTRQADWWFVSIQVEIPDSIAVKKPAAVGIDVGLNRLATLSTGEGVENQAFLKTALKKLRQANKRLHRRKLGSKNREKARRQVARLHYRITCLRQDVLQKLTTRLADSYGIIGVEDLHLKGLLKNRRLARSFADASLGTLRRLLEAKVAQRGGQVIKVDRFFPGSQDLSLLRLDVGSDDAQGSHLCVSESCLSV

SEQ ID NO: 63402 - protein, 253 aa, Ktedonobacter sp.
MIRAHKIRLNPTPEQANYFAKAAGTSRFVWNWALAEWNRQYAAGEKPTALKLKKQFNEIRREQFPWTWEVTKNASDQPILDLGKAFTAFFEGKARRPKFKSKKRSKPSFYLANDQMERGDHRVWIPKLGWVNMAENLRFQGKITGARVTRTADWWFIAITVEVPEKQSTKRPAAIGIDVGLNRLVTLSTGEEYENQAFLKTALGKLRQANKRLHRRKQGSRESGESPSAGRTLALPYHLHARGCAPQADHQAR

SEQ ID NO: 63403 - protein, 366 aa, Ktedonobacter sp.
LEGKPHHKPKHTIGKSIVGGDLGPSSLAVVPQEGEARLEVFCAELAPEACAIRRLQRQMDRQRRAANPEHYDEKGRIKKQGKQKLRWKQSKGYQATRRRKASKERRLAAHRKSLHGRKVHEVVAMGNTVILEKISYKAWQKQFGKSVGLRAPGMFVELLRRTVASTGGTLIEVSTRKTALSQWCHGCGRRVKKPLSQRWHQCTCGVGPVQRDLYSAFLAAYLDPADPIPSCARYQGYWEGAEARLRAAHERLTQRAKEGQILPRSFGISRARARLPKSLSGPTQEPAFLAQAGRLEAWTERSEPPLLSHGESSAVDSDLQAIPVAGVGAPELLASCGRELACQGVEGLDPARIGAGQEHDWPVAAK

SEQ ID NO: 63404 - protein, 537 aa, Ktedonobacter sp.
MFDDFKSVWYSLREIPYILREEVLNMAKATKTIRQALHYPPQYAAYFAANQSLFNLVVAFYFEVIQAHEGLLALNNKEALTALEKLTHTTESNPNPIMPLTDLAPDIPALFRRAAINAALGSARSFFSSLKTWRARKEKHEAKQTKKGKRRPFRVRPPVPPRSWKKSAPFYASLWRERCTRSIMLKVWTGSCWSWLKLHTLGRDLPDGNLMGSPQLVRKGDRWWLHTPLEKTFEAPAKVREQLTAAQTRLCAVDLNLDHHVAVCSVQTVDGTILATSFIGNGTAVSGCRKKLLGRIACNRSQTGIIAENEQDNADLWAKIRHVDEQIAHLVSSRIVQFATKHEASILVFEHLGNLRPEQGKYSRRGNTKRAYWMKGRMFRYANAKYKAWNGGGIITCRVNPRNTSRKCHRCHGLVVRYNQGQPQEGYTPGAALCFCPQCQMRDHADRNASLRVGQRLIERTQAPLKEKPRALTRRAKREPKGSGVGISQDAKRQMGPSLPAARRGDHANGHGTAQRGRRRMGAPLSDIVSQLRIHFE

SEQ ID NO: 63405 - protein, 303 aa, Ktedonobacter sp.
MSGIRFESQSNSPPITNEHSKAARSMHPQHFTRRNGVWWLTLSFDEDVPLQTKPDAPTVGVDVGIAHFLTTSTNKAYGSFHGKMARQHKHDREKRRRKAKLRACLEKKGVPKGKLPSTSSETSQRLSRHVKQEINRAVNALVKDHRDARLIYEDLNVASMRFKARVMNSYLYASHLGHIPEQLAWAAAKQGMAAHTVRAAYSSQECPRCHYVDRANRPNQKTFKCLVCGYADQADRKAAQTLAGRWGDRKLAACRSTSEVKALLMTRHEAWKQQNQQRIQDAGPPVQLSFWDPPEMFLESSHE

SEQ ID NO: 63406 - protein, 327 aa, Ktedonobacter sp.
MEAKRGNMPRKDILIDLANAWTAYFEGLKQGKKTGRPTFKSKKKSKRSFYLANDQFELGDHRIWIPKLGWVNMAENLRFVGNVTGARITKTADWWFVSIQVELPDAIPAKKPAACGIDVGLNRLATLSTGEGVENQAFLKTALKKLRQANKRLHRRTLGSKNREKARRQVARLHYRITCMRDDVLHKLTTRLANCYGIIGIEDLNLKGLLKNRKLARSFSDAALGKLLNVLKAKVEQRGGHVIKVNRFFASSKTCHGCGWKWEDMQLSDRVFLCQNPHCAYAQFEQDRDYNASLNILAEALRLIGLIDQAVSGTGSDEDANLAVDAG

SEQ ID NO: 63407 - protein, 223 aa, Ktedonobacter sp.
VEDEIEHVPANEQAIGADLGLKSFVVLSTGEVVGNPRFFHKDEKKLGKAQRCHARKKKGSKNRDKARLKVARIHARIADRRRDFLQKLSTRLIRENQVVCVESLAVKNMVKHPTLSKAISDVGWSEFVSQLEYKANWYGRNVVKIDKWYPSSKRCFDCGYLLDSLALDVRQWDCPECGVHHDRDINAAKNIVTVGLTVLACGESIRPGRALSRSGKTQRSRKP

SEQ ID NO: 63408 - protein, 499 aa, Ktedonobacter sp.
MAKATSTIRSALHYQPQHAEVFAANQALFNRVVAFYFECIQAHEGLLALTNKEALTALERLTHATEANPAPIMPLTDIALDIPAMFRRAPINAALGSARSFFSSLKKWRARKEKHELKKPRKGKKSKPFRERPPVPPRSWNKSVPFYASQWKERSDHCILLKVWTGTCWSWLKVGLLSRDLPEGFQMGSPSLVRRGKQWWLHTPIEKTFAAPTNVEQQITTNPQTRICAVDLNLDQHIAVCSVQTVEGTILATSFIGNGTEIAGFRKLLLGRIARNRSQTGILAENEQDNADLWRKIRHLDEHIAHLVSARIVQFAKEHQASILVFEHLGNLQPEKGKYSRRGNTKRAYWMKGRIFRYSKYKAWNASGIITSRVNPRNSSRHCHRCHAAVIRYKQGQPESGYTPGAALVVCPQCQMRGHADRNASLKIGQRLLERYGDPFKEKPHTAVRRAGRVSKETGVALSQDARRQKGPSISEARYGERNAHGTAQQGTLWMDERP

SEQ ID NO: 63409 - protein, 603 aa, Ktedonobacter sp.
MFEEGATMPKKCQGQHKQKEQQEKRPATPTFLLELPLAVDAEQAARLRAHLEAARQLYNAILSQGQQRLRRMRADPAWQEARALPRTHKAERAAAFSALRKAHGFSEAALHEAVKGLRVGWIAAHIEAVLAQTLPTRAYRALNRVCLGKGKRVRFKSRGRGLSSIENKRNDTSLRFVLQPASEGNAGYLLWNGDQLPALINWKDEVVTHGLRHRIKYARLIQRPASSPRAAGADAQGSRYVVQLALEGKPHHKPKHTIGQGIVGADLGPSTLALVPQQGEASLQVFCAELAPDTKAIRRLQRQMDRQRRAGNPEHYDEKGRVKKQGKKRLPWKNSKRYQATRRRKATRERKLAAHRKSLHGRKVHEVVALGRTIILEKVSYKAWQKRFGKSVGLRAPGMFVELLRRTVASTGGTLVEVPTRTTALSQWCHGCGRRVKKPLSQRWHHCECGVGPVQRDLYSAFLAAYLDPAEPTPSCARYQAVLGGCGSAPAGSTRASSTTRERGAVLAPKLWHPQSRSASVQKSRETTTRASFPASVGRTGSVERIPGTPSALAREASGGVSIQMLHAKYGRKASLDEDTPSSRRYSAGCISCHSARRFVPQS

SEQ ID NO: 63410 - protein, 231 aa, Ktedonobacter sp.
LKLKKQFNEIRRVQFPWTWEVTKNASDQPFLDLGKAFTAFFEGKAKRPKFKSKKQNKPSFYLANDQFELGDHRLWVPKLGWVNMAENLRFKGRVRGARITKTADWWFVSLQVELPDAIPAKKPAAVGIDVGLNRLATLSTGEGVENQAFLKTALKKLRQANKRLHRRKPGSKNREKARRQVARLHYRITSLRDDVLHKLTTRLANCYGSIGIEDLNRKRVAQESAAVSFVL

SEQ ID NO: 63411 - protein, 431 aa, Ktedonobacter sp.
MKTANKIRMNPTSEQVEYLKRACGTRRFIYNWGREQWERQHQAYKAEQETVPEAERQLSPPNALALKKQFHAIREEAYPWTYEVTKCVVEGAFDDLGRAYANFFAGRARYPKYKKKGKSHESFYLSNDKFTIGSHWIAIPGLGRFILDQRQTQKDRGKLRRKLETVNLAEKLRFVEKAQASSPTKKRKWRKQVICDQVQIEGATVSCEAGRWYVSIQVEIKKALPQTPEPVVGVDVGLKTAAVVSDGRRLENQKPLALHLKKLRKLQRKLSKKQKTKDPETGRTVFSQHAQKQRVKVARKHQQIAAIRRDVQHKFTTQLAQTAGTIGIEDLNLLGMMANRRLARAVADAAMGQLLQFLKMKVASAGGQVFIASRWFPSTKRCSGCGHVKKRMPLKHRTYHCLVCGLVIDRDLNAALNLAQFARDMLRHLLA

SEQ ID NO: 63412 - protein, 629 aa, Ktedonobacter sp.
VVKTQTLSFPIRVPDGMQAQALRLLDASRLAINQIITTLWPQLDAFAGERAGPAWKQVERHLLIRSGHGNRQERCEMEQAGRILRAQASRKRVFEAIVPLLSEGLIIPAQGKRPARKDHRQINEQVRTSRAQLQDAGEDAEAFVAMTNLMAQACNWYLQTGAFPSTYEALQPVPVLSVGHLTFAGDDGMKAEQTYRARIELAPGCDLESRQERQLASLSLRLRTPDDQGKWSWGAWSQAIALPPAVCASLAQGALPQAPTLREIRGDDGSRVAVLDLTLEVPARYVSPLEQETRVLGWDWGVRSLITVSILQRPEEGDEERSRQVSRPVFLDTGGIDGRQARLRREIDRLKACRDRYGQFVKEAQAAHQEHGVPLPAHLAGWQQRVREYDARISQCWKSYERRNRELAHLASNLLILLALLSDCRLICGEDLRTLKTQGRGRGVRGRFRNWRNNTTVRGELWRVLKYKCHLLGIRARQVEARGTTHTCPRCGEPAKTYASAAPEDRTQAISWGPMLCCSNPECLWKGARDYAASLNIARLGMAFLLTYQQTRRYESYRVTSLEVNSCLYSGQEATLLLPSQGITPRPREGKHVYYAGWSYTIALRTSQPREVLAILSTSHLRKDVLSSA

SEQ ID NO: 63413 - protein, 472 aa, Ktedonobacter sp.
MLITRGYRTQLDLNHQQITLCKQHAGAARWSWNWGLRRKQEVYQQEKRWISAMELHRELNTLKQTEIPWMYEVSKAAPQEALRDLDQAYRNFFRRCGLKKEGKWRGKPGFPKPKTKRKGVGSFRLTGSIHIYEQAIELPRFGRLRLHECGYLPTGGVAVLSATVSEKAGRWFVSVQVIEQVPDPPQAAGPPIGVDTGIKTLAQCSDGRAIANPKALTSELKRIKRLHRWLSRKQKGSKNRAKARQKLARKYARVAYVREDALHKGTSQLTRAQLTLEEREIRKAEIAATLPEPKAKVKPKRGKRSKKEPPPEPLPKTIANKVKAKQMKKLLRQARTLDAQRRPAVVVLEDLHVAGMQQNHKLALAISDVGLGEFKRQMGYKTFWQGENLLWADRWFASTKLCSGCNHIKEEIDLSERIYVCEHPACGLVIDRDLNAALNLAALAILYLSGQPGPYWEFLGKGETPVGEGSSG

SEQ ID NO: 63414 - protein, 401 aa, Ktedonobacter sp.
MDRTVRIQLQPNTEQSHVLQETLVQFTVAYNHVCVYGWQHCEKNGVRLHHATYYETKSLCPGLVSDLLIQARVKATETLRSAFTWKAKKEASYPKKVANAQKQGKPAPLFKPVRCPSSEQCAVRYNVHTYSLNWETQTIRVSTTQGKMTLPFTVPHFSERYRGCNIATADLIHRKGKWWLHVVVNVPEPVVQANDTVVGVDLGLNRPAVTSNRHFLGSRHWKEVDRRTFRLRRKLQSKGTTSAKRHLKKLSRKQMLFHRDCDHVLSKRIVQSVTPGATIVLENLTNIREGVRHRKGEGQRKLHSWSFAQLYGFIVYKGQEQGMVVERIDPRHTSQTCSRCGHQARNNRRSQSVFHCRSCGYQLHADLNAAYNIRDKFCLAQGGRPVLSGSLSDVLSSHASA

SEQ ID NO: 63415 - protein, 437 aa, Ktedonobacter sp.
MQTVLTAKLKLNTTPEQFKALRTTQLAYRDSLNYVSQYAFAHGKMSNAVRLQDATYEEIRLRFHLPSQMACSVPRQVGASYKTLWTKVKNNAVHRKEGKTKKRYKGLDKAPKFISPTLTYQYKKDYTFKKEQQVSILTLEGRVIVPYTGYNKHVALIQRGTEIGASKLWYDKPKKQFYLLVSLEIETADPTPETHKQVAGVDVGMRYLAVTATMQGDCTFHAATSTIAKSHHYARLRKRLQKKGTRSATRRLVAISGRERRLKANCNHVVSKRIITQYSQSLIGLENLTDIRERTKRRKGKKASAKQRKANCTFSKWAFSELHTMIAYKALLHRSMAIKVDANYTSQACPKCGHTCKENRPNKGLLFVCQNCQYTLHADLVGARNIAMRTLLIRQDWIGTGLLSVRPDVSDDEAKAARLKRYAELRWSSDTTPSPRL

SEQ ID NO: 63416 - protein, 398 aa, unknown
  TnpB Polypeptide
MSGRVVKRAYRYRFYPSPEQADLLNRTFGSVRYVYNRALAERSRAWTQERRRVTFAETCRMLTAWKNDPETTWLYEVSNVALQQGLQHLQNAYVNFWARRARYPQFKSKRTSRASATFTRMGFSWRDGQIKLAKCGQPLDIRWSRPLPDGAEPSTVTVSRDAAGRWHISVLCETTVADGPATEAAVGVDAGITSLLTLSTGEKISNPRHERRDRARLGKAQRELSGKVKGSANRARARVKLARVHARITDRRRDHLHKLSTRIIRENQTVIIEDLNVRGMARNHSLARAISDASWAELRGMLEYKADWYGRTVIAIDRWYPSSKTCSACGQLAASMPLNVREWACAACGAAHDRDVNAAKVIRAAGLAVQACGDGVRPARAQRGEATVSETGTLAREG

SEQ ID NO: 63417 - protein, 420 aa, unknown
  TnpB Polypeptide
MIILEFKAYGKPIQYQAIDQAIRTVKFIRNSCIRLWMDKKGTGKYDLSKYSKILAKNFPFANELNSTARQAAAERAWSSISRFLENCKKKVPGKKGFPKFKKHCRSVEYKQSGWKLSPDKKSIVFSDKKGIGKLKLKGTWDLWRFDSAKPTLREQKLIKRVRIVKRADGYYVQFCISVDVSEQLEPSHSTIGLDVGLKEFYTDSMGNTQPNPRFYRFGEKRLKFYQRRVSRKKKGSSNRKKAVNRLGRQHLKISRQREEHAKRLARCVIRSNDLVAYEDLRVKNLVKNHCLAKSINDAGWYQFRKWLEHFGRKFSRVTVAVNPAYTSQNCSECGEVVKKSLSTRTHACECGCELDRDHNAAINILNRALGTVGHTGTWIINPNASGESASTVLGSVREASPTANQVQQAGSLSEESPSRD

SEQ ID NO: 63418 - protein, 365 aa, unknown
  TnpB Polypeptide
MAHKIALDLNNHQRTYMLRATGVARFAYNWALEQWGIQYRAWREDDTLPKPSQFSLRKQLNEIKKESFPWMLEVTKCAPQLAIIQLGEAFKNFFAHRAAYPKFRKKGVHDRFSISNDQFAVQGKRIRIPKLGWVRMREALRFSGKLVSITVSRMADRWFVSITVDTEDRRQQHNENQEAVGVDLGVSALATLSTGEVVQGPKAYSKLVKRLVRLSRSLSRKARGSNNREKARRKLARLHARIANIRQEGLHQLTTSLARRFSIIGIEDLNVRGMLRNRRLSRSIADGAFYEFRRQLEYKSGIYGGTVVVADRWFASSKTCSDCGHRLEALPLSMRHWVCPECGTYHDRDVNAAINLRNNAVSSTV

SEQ ID NO: 63419 - protein, 394 aa, unknown
  TnpB Polypeptide
LGALKAQLRLACEIYNTLRWADIYFYQRDGKGLTLTELRQLALDLRKHDKEYQQLYSQVVQQIADRFYEARERFFKGLARFPKEKKPHKYYSLVYPQGGWKILKVREIRTKSRKNKKKLAVLRLSNLGVFKVIMHRDFPIERVSRVIVKLAKSERVYISFIVEGYVFPQLPKTGRVVAIDVGIEKLLTTSDGQYFPNLKPYEKALKKLKRLHRALSRKKFLSKNWFKAKLRLARAYEHLENFRKDLYMKLGRYFAEHYDEVIMEDISVKQLIGKSVRKLRMRLQDVAFYTLKEIVKYQMEKHGKKLTLVNPALNSKKCAKCGYVNKDLTLADRIFICPKCSWIADRDYNSTLNMLRSAGWEPPLEPVELRPLPVALCYGHGGAMKQEAPPLKTG

SEQ ID NO: 63420 - protein, 204 aa, Pseudoalteromonas sp.
VVDNPKFLKQSKTKLNQLQRQLARRTKGSNRWQKTKQRINKLHGKISRQRLDFAHKISRQITNENDILVFEDLNVKGMQKFNGSMVADNMMGLITQLSKYKTELEGKLYHEIDRFEKSTGVCSECGQHHVLTLNDRYFTCMACETYQSRDLSAAKSIAKTGELDLIAAGIVARVTPTSQQKSAIKTKVFELSKFAVGTEKKEAA

SEQ ID NO: 63421 - protein, 378 aa, unknown
  TnpB Polypeptide
MKSYKFRIYPTKTQDIQMRQHLWLAKELWNDLLAHSKFMLDCFDKVPSVDSLQIMAKGWGMFSQTQQEISHRIHISTMRFFKLRKKGIKVGFPRFKSFNRMKSLHYPQYGTGFILDKKLNVNPFGSIKIKQHREIVGAIKTLALKREASGKWFAIFAVEEPKTTPKINNGPEVGIDVGLKCFAKISDENSISNPRHFRRYEDKLAKAQRRLSKKKKGSKNRNRAKKEVATIHEKISNTRSDFLHKTSTLLVNKYSFIGIEGLSVQKMAMKEFGKSINDAGWATLGQFLNYKAANAGSLVVVVDPYNSTKTCHRCHHVQDMPLEERVYRCPECGLVMDRDLNSAKYIFELAKATSGQGGSNASGDGPKGPSLNDEAHTL

SEQ ID NO: 63422 - protein, 188 aa, Helicobacter sp.
LHLACSNTRDDYLHKISNEITNQYDLIGVETLNVKGLMRTYHSKSLANASWGKFLTMLEYKAQRKGKTPLHIDRFFPSSQLCSYCGFNTGKKHEGITKFTCPHCQTTHHRDYNASVNIRNYALGMLDERHKVKTDKARVGIIRSDYTHHTNGCIKACGASSNGVSSKYGNILDLASYGAMKQEKAQSL

SEQ ID NO: 63423 - protein, 485 aa, unknown
  TnpB Polypeptide
VSQKVRINNVGHSGASVFLGVDHRGNPRWTRNPERIMVWLCDGWRTRFNQRREQRPRNIPVKDEAGGIVDWLKEPLGGPDVADLLSDKEARLRCSWMAGIPAPILSSTDKIENTEWSAGLKRKKTVGGRIPGFKSRHRGLGFVCWRNASKTGNALFHQTGRKSGVVVIAGMNPTRWRRPGEKLHWRVIIHVRVSQEIRPYTSVHVDWTHRSLVFVNMPLPLPRTGDGEVGIDRGCVHTLALSDGTFMDMPKPSKAELKRLKYLQRRMARQDRTNEARGGKTAKLASKRRRRTLSEFNALQGYIVRRRNDWIERTTTRLAQENILVAMEDLDVRAMTKRPKPRPDPDKPGQYLHNGAKAKTGLNRSILSNNWSRLRKRLQDKMNANGGNLVIVPAAYTSRTCHQCGHVASENRESQAVFHCVRCGYRANADINAAKNILGRALIQTGGGTASDVEDPQWRSDEASTPSTQAGSSFGVRAAKGIPRL

SEQ ID NO: 63424 - protein, 663 aa, unknown
  TnpB Polypeptide
MSKTSAIVKQVAEAEITTSVVVKPVGEVAKTAAKVKQDKNRVIRNFTYELHDVEDIFTSKISFFLKELNKQLNALVNSNIYTENKEKLDKVLKSKGEFRKELLCLLKSTDFYQKYYCEANIFGNKAKYFRTVIEEYRRILLSSLHRQTIIDMIVKDPTITYQEVFNKLCELNERSENSDYKFNWISKAEFNNIIKQLSNSTSSFAGVAEAEKHSQTSEAQTIDTYSIDYSGEDDQISKFNLTDNDEYYLIEFKLKYSDYTTQSDSLLTYQCKVPKKQIKGLTTGYTKLKKFTRPRIFLKDNKQLYISFNYELLVNKQQSDSSSEQVTWQFKTMGIDIGVAKSATAAIVTTNMHWVASDGEAGEQQREASKPPAGESSAVASGEHRNSPADIKLVPAIDITKPVAISNELTISDKTKAVSEHIEILKNEQNYIYKKEQAIASLLKLKQSDDGYDNTNSVDELVNHSSKAQLKLFYKYQRLNKHRLHLRSKVSNLKKELSFLTARDMISHAVDNKVDLITMEKLSWIRDEHHTTWDYNQIQQRIIHEANIYGIKVKKVACAYSSKHNPLTLEKEEVDQNRTLVKCLFDRDYAAAIILARRGVKLGKRKQKLHPVSQVSSNPASHINDSFKAVSCPIKPSLKYRQLKLCEQKSIICYANFAYYNIL

SEQ ID NO: 63425 - protein, 387 aa, Nocardiopsis sp.
MLTGFRYRLSLTDEQAERCAEYGDICRAVWNTALDQRRQAVQRWQRGYDQLFCGYHLQATQLAETKTEETWLRAAPSHILQQTLKDLDRACRDHGTFGVRWRGKGRWKPSFRFPDPKQITVERLGRRWGHPKLPKLGWVRFRWSRAPKGAVRSATVSRDGEHWYVSLLCEDGEHTPGEHAVPDAAVGIDRGVAVAVATSDGDLFDRTLQTPKEHERERRLRRKLSRQRKGSNNRAKTKAALSKLTGRVRARRADFSAQTASVLCTKNAVVVLERLNTTNMTASARGTMDAPGRNVRAKAGLNRAILAKGWHGFKLACLNAARRTGTRIVEVDPAYTSQTCNPCGHVAPENRESQSVFRCTSCGHTAHADVNAAQNTLSRGWTGSLSG

SEQ ID NO: 63426 - protein, 335 aa, unknown
  TnpB Polypeptide
MITYRYRIKDSIDIKFLKSIAGKVNHAWNTAQHTKLEYHKINNKWLNYKNLQREIKVAGLHSATTQHVVKEYVKKCGQFTKAKLRWRTGKKNLGWIPCTNQSVKFDKYTGNFQFMKRKFRVWYSRFIIGKIMTVSLNEDSRGRWYINVVCDVVVGKQHGERKIGIDLGCKDQLTCSDGVKYSRDNLTRKHEKKLATIQRARKKRQTKTLHAKIKNKRNDWNHKTTTEVCTTSKLVIVGNIGSKGLCKTKLAKSLYDASHAQIKTMLLYKAIRHGMVVKIVSEKFSTVTCSVCNVRSGPSGLSALGVRQWICLECGANHDRDVNAARNILLSVRGI

SEQ ID NO: 63427 - protein, 399 aa, unknown
  TnpB Polypeptide
MSVRTIALTLAPTEAQKAAFKRLQQAFNAACNTASEVAWREQEFNSVRLHRLVYADLRARHGLLAQHAVRAIGVVATSYKAEQKTLHTFKDDTAVVLDTPRLYRIDGNKAGITTLDGRLKVTLNIGGVQRAQLADAVKLAEADLVCDHKHRWRLLVSAHYADPPMADTDGVLGVDLGRTDIAVTSDGDSFSGAQVTAVRDRYSNTRRMIQHNVSKGTRSSRRRGRQTLARLSGREHRFQAHINHTISHRLVKAASCSDRGIALEDLRGIRECTNKKPRTKTERRRSNSWAFAQLTAFIAYKCVAAGVPLTLVNPAYTSQMCHCCLQLGERSGKRFKCVDDDCGWCGDADLNGAMNIAALGLPVTQARGPWLCCLYQPGHRASESPALKGGEVYAPAEAR

SEQ ID NO: 63428 - protein, 373 aa, Clostridiales sp.
MTGSKTMGYRYRVYPNKEQQIFFAKTFGCCRFLYNKMLEDKQTYYKQTGKWLNCKPSDYYDAYPFLKEVDSRALKNTWLNLIKAYQNFFKNPNKNNFPKFKRKHISKDSYTTEQNKGRNTIRVTGNKINLPKVGLIKAVIHRPLPDGAVIKSATVTRTKSGKYYVSLTVEQAVKPCKPVQPNFDTTLGIDFSFRSFYVDSNGFSPGNPHFYCQLEEKLKREQKKLASKVKGSNNWIKQKIKIEKIQEKIKNRRKDFCHKLSREIADTYNTVCIEDFSLKEFAGSRQLGKSMFDCGFGMFRNFLKYKLAEQGKFLITIDKWFPSSQICNNCGYVNHNLKIDEKQWICPSCGLTLDRDINAALNIRSEGLKQICK

SEQ ID NO: 63429 - protein, 436 aa, Escherichia sp.
  misc_feature (363)..(366): Xaa can be any naturally occurring amino acid
VKRLQAFKFQLRPAGQQEREMRRFAGACRFVFNRALALQNENHEAGNKYIPYGKMASWLVEWKNATETQWLKDAPSQPLQQSLKDLERAYKNFFRKRAAFPRFKKRGQNDAFRYPQGVKLDQENSRIFLPKLGWMRYRNSRQVTGVVKNVTVSQSCGKWYISIQTENKVSTPVHPSALMVGLDAGVAKLATLSDGTVFEPVNSFQKNQKKLARLQRQLSRKVKFSNNWQKQKRKIQRLHSCIANIRRDYLHKVTTTVSKNHAMIVIEDLKVSNMSKSAAGTVSQPGRNVRAKSGLNRSILDQGWYEMRRQLEYKQLWRGGQVLAVPPAYTSQRCACCGHTAKENRLSQSKFRCQACGYTANAXXXXNVAGIHVLQGVEDVNTSVWFHPRHWKPDVRASKRQSLAGFWLTRHLPRTNKTAIRLAGEQDLLIIPRING

SEQ ID NO: 63430 - protein, 227 aa, unknown
  TnpB Polypeptide
MAHVPCTVKQENSDARTAKERMQEGTRVCSVRFTNTDSFAVCTVLDEGSRQLAVKNCRGGNAYRHHCRALLKKVEASRAFTDKDNVSQPNRKYYMHLKHLNEHYAHQVSKEIMDFCKENQTGILVLPEYDEDFSRISMYRSGNYSPLHLSIRIRNYLKYKAWAEGILVLELRADGTEKKCSICGATGKKQGSIFICQNGHQVNRFLNGARNLGRKCQESFRKNNKSS

SEQ ID NO: 63431 - protein, 441 aa, Lentzea sp.
VPASTNAREIGYETTEYNGVVQLRYNFRVYPTPAQREALARAFGCARVVFNDALHARRAAYVNGDPCLSDGELSKQVITRAKSTPERVWLGGVSAVVLQQALADLNTAYRNFFASVTGERTGRKVALPRFRSRKDNRQAIRFTRNARFTVLRNGRLRLPKIGEIDVRWSRDLPAEPSSVTIVKDAAGRYFASFVVTTKQDETLPKVEPEVGIDLGLTHFAVLSDGTKVAAPKFLRQAARRLRRLQKSLSRKVKGSNKRKKAVFKVARAHAKVADTRRDWQHKLSTAIIRDNQAVYVEDLCVAGLGRTRLAKSVHDAGWAGFVGMLEYKAARYGRTFVRIDRWFPSTRTCSACGRVNDKLPLNIRVWTCLCGSVHDRDVNAAINILAAGRAERLNDRGAQVRPASVPAPRRETGIHPDATLSTRSVKGIPALRARRTSTELT

SEQ ID NO: 63432 - protein, 366 aa, unknown
  TnpB Polypeptide
MNKAIKYRLYPTNEQIEMFVKTFGCCRKIWNLMLTNKIEYYKTTGKMLITTPAQYKKEYSFLKEVDSLALANVQLHLQIAYKNFFRDKKTGFPKLKSAKRSRKTYTTNNQNGTVSLADNGIKLPKIGIVKAKIHRKPEPDWEIKSATISQDNDGKFYASVLFEFDKNITKVPVSDNAIGLDYTSDGLYTDSNGNICGSPKYYRKSQKKLAKLQRQLSRKTKNSNNRNKARLKVARLSKHISNQRLDFLHKKSTEIANQYDVVCVESLDMKNMSNKGFGNGKSTLDNGYGMFLVMLDYKLADRGKYFVKVDKWYPSSQICYVCGRQHKRMKNLSIRKFVCDCGYSNDRDINAALNIRREGLRLLQTA

SEQ ID NO: 63433 - protein, 401 aa, unknown
  TnpB Polypeptide
VRTVLTHRIELKPNPRQEGLFRQSVGASRFAYHWALAEWQRQFEAGEKPNEAALRRQFNAIKPIEFPWILDLPKSIPQQAIKNVGRAYQRFFQKQSKFPRFKKRGVRDSARLDNGPGTFECDGSRVRLPKIGWVRMHETLRFDGKPLSATLSREADRWFISIPVAIERPEPVCESPATVGIDLGVSTAVTLSTGEKIDSPKPLKKALRRLKRRSRRHSRKQKGSANRRKSARKLAKLHARIAHVRQDWTHQTTTDLTRRFAVIGIENLNVKGMMANDKLSRSISDIGFYEFRRQLEYKAALSGSTVVVVDRWFPSSKTCSDCGCGRESLPLSVREWTCTECGAVHDRDVNAAKNLQRAALATASWAGSHACGEEGAGRSRKTPVKPASVKQEVSHTIKRYG

SEQ ID NO: 63434 - protein, 420 aa, unknown
  TnpB Polypeptide
MTLVEKSIVTQDNELFSILDNLCFLSKNLYNSSLYQLRQHFFKNEKLDYGKLDKMFRSESQMDYKALPQKVSQHIIKLACQSFSSFYALLKKKKKNEYSEKVRIPKYLDKANGRQVIFYTNQAISIKNLKTDGFFTLSKVYNSNKELIKFYTNVDNIQFVRIVPKGNHIVVEVGYRVDEKHFKKYNKIASIDLGLNNLATVTTNFSEPFIINGKPLKYINNEYNKQIVKLKKSNYYCHNIEYRWTNRMYAVLFKRENRINDYLHKASRSIVNYLVSNQIDTLVIGKNNGWKQNINLGKINNQNFVQIPFNRFIEMLSYKCMLAGIRCLLIEESHTSKCSFIDNESIEHHDKYLGKRISRDLFYTKNNICINADVNGSYNIMKRWCQTNNSPEYISKTLSKYNICQNPKIITIDANSKNVI

SEQ ID NO: 63435 - protein, 191 aa, unknown
  TnpB Polypeptide
MLRNAGISTWREYHEKYLKAMYKRDERLRHLYITAIRFLADELHRRGVKKLYIGYPIMLSQNNGNEYNTNIWWYRKIVLWIVDIFMEYGIEVEIVPEDYTSRECSICGNKHKNGRIYRGLYECKKTRKKINADINAALNIARRLGYMIRIARKIESYLVTHNGVEPLIPLQRANTRDPSIETPPFRAGRVS

SEQ ID NO: 63436 - protein, 200 aa, Geobacillus sp.
MKASGDVGIKHLAVCSNGMIFPNINKTKTMKRLEKRLRRLRRKVSRKYEMNKEGSRFVKTRNMIKLERRCLLLQRRINGIRNNHIHQATSAVAKTKPCAVVMETLNVSGMMKNKHLAKAVQKQKLYGFKTKSTYKCKKYGILFIEADAWYPSSKLCSQCGAIKKGLTLSDRTYTCQCGCKMDRDLNAAINLARYGEAFVG

SEQ ID NO: 63437 - protein, 386 aa, unknown
  TnpB Polypeptide
MILTFKYRLLPSKAQHVALAVLLEDQRQLYNAALEERIGCYQKTGKTLDGYDQCKSLAKWRRDDTEARRTPSNLQRWVISRLDAAYNSFFRRLGAHKGKAGFPRFKGKGQWKSFGFVEFWGIRFDGKRLRWKNFPGGLRVHLHRPMPKNVNIRSCVFKRDQKGWVVSFEIKLETPDKQPVKSAVGIDLGLKVFGYQSDGIIIPNPRIAHKAEKEMRRRQRALARCKRGSKRRIKIKTEVARLHTKIINTRTTWLHQQSARIVWQYDLIVAEDLNISDMMKNSMFARSITDVSWSKFLYMVAYKAEKAGKHFITVDPKNTSQKCSSCEELVPKSLVVRTHECPSCGLTIDRDWNAAINILQAVVGLGADNVTQWSERQLGKLSLVTD

SEQ ID NO: 63438 - protein, 360 aa, unknown
  TnpB Polypeptide
VASATPGPSYSAGCQALCPRLAAVLQGGVGSTSVQETQNVYVCRCPTSLPVSCPPLEPPLGRGKHSLCRTSGFRWTCPLPGVSLDCSGRITGARLTKNSLGWHICFRVEQPAVKFSPITGPPIGVDRGVIHSLALSDGRNLDMPRLLTRGEEHRLRQLERRASRRRMARTAGKPMSGRGRKSYREVASLRARQARRRQDWLHKATTMIGRNHSVVVVEHLRIQSMTRSSRGTIERPGRNVSGKARLNRSILSMGWGMGERMLAYKLQANSGILIWVLAAYSSQTCASCGHVAAESRRSRDRFQCVACGHASSADTNAAQVLLARGLAAHSGTAPGHGVAGREAFAVGQAEKRRPASGAIE

SEQ ID NO: 63439 - protein, 382 aa, unknown
  TnpB Polypeptide
MKTHRAYKYRFYPSPEQIQLLAKTFGCVRLVYNSVLRWRTDAFYQEQIKVGYVAASARLTTIKKDPDLAFLGDVSCVPLQQSLRHQQVAFKNFFEGRAAYPAFKKKHGQQSAEFTRSGFKYQGGKLYLAKSKAPLEVHWSRDLPCEPSTVTVSKDFAGRYFVSCLCEFEAEALPVTPKTTGIDLGLKDLFITDQGERTGNPRHTAKYADRLSLLQRRLSKKKLGSANRAKAKLKVARIHAKISDCRSDGLHKLSRRLINENQVVCVESLKVKNMIRNPKLSKAIADAGWGEFVRQLEYKGAWAGRQVVSIDRWFPSSKRCSCCGHTLKELPLQVRSWTCPECNAELDRDVNAAVNIKAAGLAVLALGERVSPVSPVGMGFAP

SEQ ID NO: 63440 - protein, 320 aa, Natronolimnobius sp.
LKPVADGYLRRTAITRPILTDEQQDLLDATIDEWKAACNISSRIGWRVGETRKTSLQDLAYDEVLGETRLGSQHAILATHQAAAALDGVEAIEDLDEHYKTSRPEFISNTVKYDTRTMTLFDDGSVSLSTVDGRIQCDLNLPDEEDGCQHEYLNHDEWEVTESTLSKRDGEYYLHLGFRKDKPKKQVEKQNDDEDRTVLGVDLGIVNIATTSTAYFASGRELRHQHREFERIRGNIQQTGTQSAHRTIQQMSGRESRYLRDELHQVANQILEEARTHDCEYIAFENLNTFENVRRPSRSSTSGHTDNSLTSWSTRPKPKE

SEQ ID NO: 63441 - protein, 364 aa, unknown
  TnpB Polypeptide
MERAYKLRIYPNKNQIELLEKTFGCVRYIYNYFLNRKIILYKENNINLTYNECSKELTQLKKENKWLKVPDKCALQNALRNLDTAYQNFFKKRTNFPKFKSKKSYKDSYKSSKNLKFENNAIKIPKVGWIKAKGYKKISGKILSITISKTKSNKFFASICVTEFEPKQFEKTNQNIGIDLGLKDFAIFNTGEKINNPKFFIKSQKKLAKMQRKLSKKVFKSNNYFKYKIKVAAFQEKIKNQRLDFLHKLSIRLVKEYDIICVETLRVNNMMKNHKVAKSFQDTSLSEFVRQLEYKAKWYGKVISKIDTFYPSSQLCSNCGYKNSEIKNLEVRKWTCPECGEHHDRDVNAAINILNEGLRILNSI

SEQ ID NO: 63442 - protein, 531 aa, unknown
  TnpB Polypeptide
VPRSGPTAPRSRSSDRCTRSFRARCCTPHTSMRSREGRRRWARSRSGRSGSAPPPRWWGTPRSSAPSRRRSVDASTACWNQVQYARRQAFLNRKESEGNATVSQLKQAVKKTATQEEYRQKYIQQLSSSIPQQLVQKNWQTWDGFFELLKKYRNPEDDSVTDRPGLPGYWKEDGVRTLHTLLRNDTYTLSLGKRSRLRIPLGKELKEKYGIGYHEKLTLEVRGRPHWEGKQGRLELVYDRETESFTAHQSVGNDTHTPSRRTSTHSHLLATTDGEDVVAAVDIGANNLAACTTSRGDHCLFHGRPCFEDFHAYTREISRLQAMLPDGRYSSKRIREVYRKRSVKRDHAMDALIQHLAEWLAEHNVTELIVGDLSDVLKTYWSARVNEKNHLFWAHGRFRRRLHEVVEAEYGIMVREKSEANTSSRCPHCGTENVHRSGDLLQCRTCGVEAHADVAGSMNFLVTETAVEYRDLNQGGSMARPAAPGQNRLGDAVACFEWDDHCWRQRDHSTKEEPANHTRQGKFPSGDPGTA

SEQ ID NO: 63443 - protein, 645 aa, unknown
  TnpB Polypeptide
VLRLLLDTSDPVQRRRIESMFSSAYSVYRAVQSDARARTRAYWAAPHERARGAAAVRDRLGVSRTALEHAAYAHVDAAPHLRRSVTKALAMHLADSVWTALERHLFRDATGTRHGMPVPGGWYEFTRIPGRAKSHTREHKWETFRLHGSLAGHRAAYTRADGTDDGRFVQPDHLRPVHEPSDGWWRYTGPLAVVFTGLPIGTLVLPVRLPASPSNQPILDHHLAEPSRWHKIDVVRHRDPTAAGGWRYEAHLCVLTTPYVAPAVQARRAAVATTTAHRRAGVDVNVSNLTVASHADGADLVITRVLHDDSAKRAMATRGRRKRRRGRRLERSRRATNPDQYELSARQSAHNQRREAARLPQVQMIPKGPRKCRANRKPQVAYRRDALSNTYRRERAADACEADAASQARRDLARQIAARFVRDHGCSFVVEDCDLRAWAPRWGKRLAAFTPGLLVTALERETAAVAHAAGIHGGVERASTRTTALSQHCLCGQRAAKALSDRTHACERCGLRGDRDAVSATLAACVQLATPGEPGSAAVDGVLARELLDAPATRERLCATLPYAMQGRQDVRSESTVHSARDGGFVAGKGPTRDIVVVARRIVGTASYPTLDERGDSGRRTTPERVRTRTNLYRDWAIPQSRDSS

SEQ ID NO: 63444 - protein, 281 aa, Nonomuraea sp.
MCGVAQLVKRAYKYRFHPTPEQAEELARTFGCVRLVYNKALEERTRAYTLEGRRVSYVESSARLTEWKRSGEFAFLSEVSSVPLQQALRHLQAGFANFFAKRAKYPTFKSRKKSRLSAEYTRSAFRWREGRLTLAKMDAPLAIVWSRPLPEGAEPSTVTVSKDAAGRWFVSMLVEEKISPLPPVVSNVGIDAGITALATLSTGEKIVNPRHERRDRRRLAKAQRALARKEKGSNNRAKARRTVARVYARITDRRRDHLHKVTTRLVRENCEDEGVPLRAPA

SEQ ID NO: 63445 - protein, 90 aa, Nonomuraea sp.
MVKNHSLARAISDASWRELRSMLEYKARWYGRTVVAVDRWLPSSKLCSACGALQDRMPLNIREWTCACGAVHDRDVNAAKNVLATGPAES

SEQ ID NO: 63446 - protein, 394 aa, Symploca sp.
MRISYQYKLKPTKQQWQVIDNTLEMLRYQYNYQLAQRFDWYEQNRCSIDRCPLVCHLPELKEKPNRFGQQTSLKQLKKDRPWYKNIYSQVLQQVPRKVEIAFDRWLKGDSNGKKSGKPRFKGAGRYRTFTYPQFKKSPLVGDKIKLPKIGEVRLFAHRLIPDGFALKTASVTKKADGYYVTLSLDDQTVPTIKPDFDANNIVGIDVGLIDFYVASDKTRIAAPKHLRKAEHKLKSAQRKVSRRKKGSNRRLKAIKKLGIQHKKVADTRKDFHFKTAKKLLSKYDVVAVEKLNIKGLAKTRLAKSVHDAGWGQFLSILSFKAENAGLKVIAVSPNGTSKECSSCGHKVKKPLSQRMHNCPVCHTHICRDLNAAINIRNRGAHGLKAQIMSSTKSL

SEQ ID NO: 63447 - protein, 405 aa, Symploca sp.
MRTAYQYRLRPSRQETATINKWLSMLCAQYNYLLADRFNWYEQNRSPVNACPLVCHLPQLRANPNYYSQKKTLLQLKKDRPWYKDIYSQVLQDVVKRVKLTFDRFLKGDSNEKRSGRPRFKPLSRYRTFTYPQINSDCLQGNKINLPKLGKIKVIVHRPVPEGFKIKTVSISKKADGFYVTLSLEDNTVPEIKTDINPESITGIDVGLKDFLTTSNNETVDLPKHYRKAQKRLQLIQKKVSRRKKGGNCRLKAIKLLAKQHKKVADKRKDFHFKTANQLLSKYDVIAHEDLNIKGLARTKLAKSVLDAGWSNFLSILTNKAEKAGLLVIPVSAHNTTQECSSCGEKVPKKLHIRWHNCPHCGCSLDRDHNAAIIIKNRAVGHPVLKAQLMSDGLPGVAEKPTLTR

SEQ ID NO: 63448 - protein, 417 aa, Symploca sp.
MLNMTWEFKLEPTAEQVLEIECILDVCRNVWNFALRERKDWLDSRKSPANACSIRQEFILPADAPFPSYARQCKSLTAAKVQFPKLKSVNAQVLQQVIRKLEASWESWRLKRSGLPRFKKPNRMRSFVFPQMLNNCISDKGIKLPQLGWVKVRWSREIPEKFEVKQALIVRKASGYFVMLSLQADVDIPETMPHGHPVGIDVGLEYFLSTSDGEQVKRPRFFDGLHRKLKSLQRRLKTKRKGSKNWLKLQNKIGKVHQRIADTRKDWHFKLANHLCAHAGMIFVENLDFRIMAKGMLGKHTLDAGLGQFVNQILPWVCWKRDVFYGKVDARGTSQECPDCGAEVRKDLRVRVHECPECGSIKPRDIAAAQVICARGQRVVENACGVYAAGAEVTQSSWLAVKQEILGATSGISLHTR

SEQ ID NO: 63449 - protein, 253 aa, Thermoplasmatales sp.
VLKTLQIKLLPDDKQREALIDTFIKFNDACNFVSEAAFEKKLYNKVFLQKVVYRDIREKFNLAAQLAIRVIGKVVETYKSDKTVFHEFRDFGSIVYDQRILSFKGMDQVSISTTNGRIRVPVTIGKYGEIPFKRIRGQCDLVRKNKLFYLMVAVEFPEKHSIEPENITGIDMGIANIAVDSTGKYYSGDHIKDVREHYADLRSRLQSVGTNSAKRHMKKLSGKESRFVRNTNHVISSEIVHEAKGTSSAIAMP

SEQ ID NO: 63450 - protein, 412 aa, unknown
  TnpB Polypeptide
MPAVVKDEMLVKGIVFYMDSDLPAEAKFLLEDFRSAVNNAIRAGLQARVTSRNALCKIAYKDFREQHPRMYSQHLVSAFEVAGGILKNHRRRVRKGVIFRIPFVKRLMMKAENQAYKLDRKSGVIDLPIRAGCHVELKLAVSQYHRRYLDDMTLSLGSLTVLPDRVIVAFRKDAPGQYTPASVLSLDTNERSLDGVFVEGEGANAVKAEFPEIATIQQRHHDRRKRLQKKKAHDRRTSRSLCRREGTREHDRIDYRLHQVANSVLKFAEERKSSIVLEDLKGMKGRMGKELNRRLSLWPRRKLHQIIEYKAQWRGIPVVKVDPRNSSRTCPTCGKIQYSRMGAEFKCECGWHLDRHINASINLLQTAISKGMAGGLRFNPGAFQHDVMMILYEPAMAARSEPNGTSGVVGVT

SEQ ID NO: 63451 - protein, 331 aa, unknown
  TnpB Polypeptide
VKTFRYLLYPSGTQRRLLESTVETCRRLYNDCLAERKEAWEAEKRNVRKVEQLRFKGRDRFDSFGLKEYGNGWKVDGRRLRLSGIGRVAVRWHRPIEGVPKTLRVRRTAGGWYACITCETAPTPLPATDREVGIDVGLSSLVATSDGEMVEHPRWYRREEARLRVLQRRVCRRKKGGANRGRAVRAVARHALHVANRRKDFLAKMAHSLVERYDLIALEDLRIPNMVKNRHLAKSIMDSGWGYFRAHLAHKAAEAGRVVVLVDPAYTSQTCSACGKRFPEHIGLSMRHVSCSCGLSLDRDINAARNILRAGRARWEPTSTLAGVSQEAAPL

SEQ ID NO: 63452 - protein, 643 aa, unknown
  TnpB Polypeptide
VKSFSLTRSSLTSWCSGKKQPETAFLREAMSQPLQQALRDLDRAIGDSFRPNSDPAHKGWPKFKAKDIGDGFRIPQFAPEHIDDANGRVKLPKIGWIRYRRTRPIAFECADGMLVPGVVKQIHVRKDCGHWFVIFTVEFEVKVPDMKALDVGIDVGVVHAVATSDGRFYDLDTAKIRSIEKRIAGLKRKLSLNQESRKKLAKLGLAEPFDKKQPSCKRRRLKEKLQKLYRKIRCIRQDFNRKTAHALAQEYGCVYVEDLKVKNMTASVKGTVENPGKNVKQKSGLNRAILRTGFYSLRQAIEWQLLKMGGVVIPVDPRGTSITCPHCQTRDKRNRPTQAIFKCVNESCGFKANADVVGALNVLRKAECTQQKAHRPCSEYWGARLSAGGLDAINGSHPQATRSRGPRNPRPLGRRRKSTAESPPGEAFGEGVLASEDAVGDDVRHGRAEVGAVDAARNAQVQPRHAGGACDGQAVGAREHGVREIAPLRPVGGGGEELHAHFPERLVLLVDGAVLLGAEMPAAHDAHERVERQCDASLGRPHGMAHHAGVAREAHVEHGAGDGRKRHAAVGMFGKNFKGARAAGDDDGVGPDGLVRRHAADAAVVGDEARRLPAAEDLHSRFGEVFPELLGVVAHGPGGRARE

SEQ ID NO: 63453 - protein, 454 aa, unknown
  TnpB Polypeptide
VKTQIAYSKNLNSGKYQALLGQAKGLGVIRSEVWQRFGSVNSVGLQDRNIRNQWVKDKREFGVNANSWKETLRSTIDDIKANREAAKTKVKQAIRRHTENKDEQKYLRYLLKYNKWIDDKYLSRIMRKYCKRGYNHTHNQIIVRSDDYSTFTSKGIAWVKIPSLIKGKRIAIPLSTDIFPRGTLRVILRNGKAEIHYATEVIKTNDCGAQTLGVDKGFTEVLTDSNGEHYGTNLGEALSNESDRLKIKYQRRSKLKHIAEKKPWVVKYNLGRKKLDKQSVKHKSIVKTIVHTAVNQVVDKAKVIVTEDLSSPIVGKKFSKNINRRLSSWTKGVIAKSIEDISYRRGSSVIYVNAAYTSQMDSQDGTLSGRRVGDAFHRENGDVLQADVNGARNVLARAYDSEINRWTPYKQVKSILLKRTECHRLKLLNQDSSCKSKDLSTESELLKCICLNMH

SEQ ID NO: 63454 - protein, 308 aa, Methermicoccus sp.
MKSNGEWGLAEFDARTMTLSYGRDFSFKGEYLSITTLDGRKKYKLIIYEYAKQYFDGTWKFLASRLVKRGNEYYFHLSVEKEVPDVDLSKAKKFMGVDIGLNYIAVASTTDLECTFFDGGIIKHIRHMFVGMRERLQRKGSRSAKRMLKRLAGREKRLINNICHVASKRVVEFALEKGVDVIGLEDLNGIRKRTKVRKKQRYDFESWVYRKLQFIIEYKAKQRGIAVVYVDPKHTSITCPRCYHVNKANRNGKLFRCKACGYTLNADLVGARNIERRTREFRYMRDSLGCCQPPRRPFEGQAPSVRVG

SEQ ID NO: 63455 - protein, 391 aa, unknown
  TnpB Polypeptide
MSRYRLLPSPIQETVLQNHCAHARFVWNLAVEQQSWWRPGRVCAPGFRDQCRQLTAARRAYSWLRDGSQMIQQQALRDFAQAMANFFAGTHRRLTWRKAGRDEGFRIVAVKPGHVRRLARKTGELWIPKAGWVRFRWSRAMAAAKSYRVTRDRAGRWHVAFALIPEPIAGPGTGEMVGVDRGVTVSAALSTGELLRVPRLSPARQRRLRSLQRKLARARRGSGRRAKVKLAIARLKAREADARRDWVEKTTTELARQFDVIRIEDLSVRGMTRSARGTAENPGKNVRQKAGLNRGILRSGWGLLIRRLEDKAPGRIEKVKAAFTSQRCSACGRIAAESRKSQALFACVACNFTLNADVNAAKNIAVGHTVTARGGFRDAGPTNREPQLLAS

SEQ ID NO: 63456 - protein, 239 aa, unknown
  TnpB Polypeptide
LLPKGTRAGESFARPCPGYRLGLDNLAACVTNTGTSFLMDGRKLKSINQYWNKRKARLQSIAAKQGRKTTNQLCQLAKKRNFRMQDILRKTARYILDFCISHQIGTLVCGYNRDFKRGLKLGKVTNQHFTQISLSYLRSTLKQLCERYGITYLEQEESYTSQASCLDLDDIPVYQPDAPYTGTFSGKRIRRGLYRFANGRTANADINGAANILRKSKQNFDFEGLCKGLLDSPLRIRLS

SEQ ID NO: 63457 - protein, 359 aa, unknown
  TnpB Polypeptide
MLYNAALEERIGAYRHGVIRSYIDQTKALTEWRQSDPEAAAVAVNLQRATLKRLDEAYKGFFRRVKQKGVKAGFPRFRGKGRWDSFGFREFAGISLEGTRMRFKGMAGALRIHLHRSLPDGASIRSCTFRRDSKGWKVGFATKVAAAEPRVGERSVGIDLGISNFAVLSDGGIIPSVRAARRAERRLRVAQRSLARKQRGSRSRRDARVRVARCHAATARSRSNHLHQASARLIRDYDIIAIEALNIRGLAKTMLARDVHDASWAKFLSILAYKAAKAGVHLIEVDPRNSSQDCSGCGIRVPKRLQDRWHACTHCGLLIDRDLNAARNILDRAGVGPGLHNVAGCGKRAGRNLATHDSP

SEQ ID NO: 63458 - protein, 151 aa, Microcystis sp.
SRTQKGSKNRKKARIKVAKIQARITDSRKDHLHKLTTQLVRENQTILVENLAVKDMVKNPKLSQAISDVSWGEITRQLAYKCRWYGRNYIEIDRWFPSSTRCSNCGYIAEEMPLNIREWDCPDCGTHHDRDINASKNILAAGLAVSVCRAT

SEQ ID NO: 63459 - protein, 508 aa, unknown
  TnpB Polypeptide
MRASTPSFVVSVKVHLPKQIENHLEKSFNITNSAYNEVLGLGLRRLKAMRANPRYQELLEARRSLAESTQRLKKPKCLAWQLKLYDKALYNLRLDYALSEFSLSKHLTNRRNEPNSPYQHLSSTELQVIAKDAYQTLEKVIFYKVKPHKVRFRSKYNLNASFRNKMNNTGTRIIQSEKTGVAYTLYLHKKSTFVDISTKAFNEYQQLSLMRAEKIKYVQIVRKTIRGKRMYYLQIVCQGYPSAKTTKGKNTVGIDPGVSTIAYASQESVELVDLVPENVTSREKLIKSLDRRIERSRRVNNPDCYHSNGTIKRGVRFKRPTNRAKRLILRRQKAYRSLTEERLKLQGELVNRIVSMASIIRMEDLNARGLQKRSKDIRINPKTNRPYSKKRFGKTILRAAPSYFREALKTKANMLGIIFEIINPKKVKPSQYNHLTESFEKKTLSTRMFDLSSEWTGVQRDLYSAFLIGHIENGRYDQTISQEFPNFYLKMKEFLAKQKPSRLDWYLK

SEQ ID NO: 63460 - protein, 426 aa, unknown
  TnpB Polypeptide
MRDMTQVTLVTNCLLYEDKNKQLYDYFAEISPLFTFLVRRTIHHLKHGLNGETLSQYRTRLKQEYNLTNRFAKTVVTTAQNLLKLSSAAGEYLHSTYADKIKKVNAKIIKTKVILNNPKTKTNRIKNLKTKLFWLEMKKNKLTQRKNNGVKPMLTFGTKKLLKSDKSKFLEKRDNQIVYVGDKNDYKGNQQFQLFYDKKYNKFTYKIRVENQCIKDSKYIYGGFIVKDNIAKREILKTLSNPKSNPLSFRIIRKDNLLFLQIMYRTGSEPKTRSSNGVIGVDFNKGFVTVSEIDETGKLLNIASIKYIHKGNSGVTKNSMYHMVKDLVNLATVSGKDIVIEDLKTLNKNKKEKTERKHYNRMINTLKFGRFRDFLQTKCDKLGVGLSLVNPYNTSKIASNKYCYDMKLNIHSGASYVIARRFYNLD

SEQ ID NO: 63461 - protein, 429 aa, unknown
  TnpB Polypeptide
VFRLPLAWLAPLLLGIERGFEVILTHRIELDPTEKQKEYFRQACGTARFVWNWALAEWDYRYELGANIAASEIKRYFNSIKYEAFPWLKNIHRDAHARPFAALGKAWKAYFNGDVEGRPQFKKKGKCRDSFYVACDKFSTRGKTVRLPVIGTVKLREPLRFTGKIQSGTVSREADRWFIAIAVEIPQREVHPPRGEAVGIDLGLATFAALSNGEKVAAPKPLGKGLQKLRRLSRAHSRKQPGSHNCQKTALRLAHCHRRIGNIRRDFLHKFTTRMSKNHAEIFVEDLNVKGMVQNRHLSRAIHDVGWSEMRRQLEYKSHLDGSVVTVRDRFYASSKTCSACGYVMEVLPLSVREWTCPVCQTTHDRNVNAAINLKQNTVGYTGINAWGQEGSGLARPASETGLVEPGTLERILAFTHEKGSRVPCRRLG

SEQ ID NO: 63462 - protein, 297 aa, Okeania sp.
MLRVVKVRLYPNTQQKQFLEQSFGNCRWLWNYSLNLMNETYKNTGKGLSAYEVKKLIPSLKKEYEWLKLTYSQCLQQVCLNLGVAFNNFFEKRTKYPRFKSKHGKQSIQYPQNVTVLKQGLKLPKIGEVKAIIHRPIEGKIKTITVSKNQSHQYFASVLFEDSQEKPEFTTEGKVVGVDVGLTHFAITSDGLKHDNPKFLKLHERNLKRKQQQLSRKEKGSKNRNKARKKVARVHRKITNCREDFLHKLSRRIVDENQVIVVENLGVGELRYDLRNSRSLISQKNYGMSRMSINSHQ

SEQ ID NO: 63463 - protein, 299 aa, unknown
  TnpB Polypeptide
KAHHPRFRRAEKYNSMTYPQSGFLLKDGRLKLSKIGELKMIQHRSVEGKVKTLTITRGSSGNWYAVFSCEVGDEPIIGRLPAVGVDFGCISLVALSDGAKIEVPRCYRKSIERLRRLQRRHSKCKLGSRNREKSRVKLCGVYEKVTDQRKDLSFKTARSIVNRYERIYVEDLKIANMVRNRHLSKSILDAGWGILKDNLTYMAKRSLGVTVLVDPRDTSKICSGCGEMVHKDLSVRVHHCPRCGLALDRDVNAARNILLRGIGLGRPESTLVGEGISTQPDAVLQVPSMNQEATLLVGW

SEQ ID NO: 63464 - protein, 303 aa, unknown
  TnpB Polypeptide
VPFVYNKALALNKQRYENKEKRLGYAGMCALLPSWKTAHPWLSDAPSQALQQSLKDLERAYTNFFKRRADFPDFHKKGRKDSFRIPQGFEVDSSNGRISLPKVGWMRYRKSRDIEGQPKNVTVAIVAGKVFVSIQTEREVEPVMHPSTSLVGVDWGVVNFVTMSNGEVVGQCAPLEQHARKLAKLQRRLARKKKFSNNWKKAKARISRLHQRIANIRKDFVHKTSDSISKNHAVVVVEGLQVKNLSQSARKNVKAKSRLNRAILDASPFELRRQLAYKMGWRGGLLVAIPPGNTSRCCPEWAR

SEQ ID NO: 63465 - protein, 328 aa, unknown
  TnpB Polypeptide
MVLHRLYSNLKSLSKKKENGYQVGRLRYKGKGWYKTFTYNQSGFTIIKTNTRLDILRLSTIGEIPVRMHRDIRGRVKQVIIKQYSRGKWYACVQTDNKGERQCGSGVIAVDVNTSNYLTDSDGRIIENPRFLKEKEERLKKEQRNLARKEEGSNNWNKQKRKLARVYAAMKNARMDFLHKITTAYVEHYDTIIVEDVQVSQMNAGFRYAKANYDAAWGLFKQLLLYKAESAGAEVVFVDPKGTTQTCANCGSHVPKEIWEREHVCPVCGFETTRDYNAARNILQRGLEKIGRERVESTPVETGGPTLTNVSASSVVEAGSSSLEIVAN

SEQ ID NO: 63466 - protein, 396 aa, unknown
  TnpB Polypeptide
MSLRMFRYRIYLSRKQKNRLLDNFKTCKIIHNELLNLSITNYKETGNGLFKYDFNKFLTNKYQNIHSQVKQNVSDRVSKSFSNFFRRIKNNSKQKGFPRFKSSIKSITYPQSGFNFVNEKRLLVSKIGSIQIVLDRIPKGKIKTMTIKRNQAGQWFAIFSCEIELPKIIHNSKKSVGIDVGIKNFATLSDGKVINNPRFLIKSENKLKKLHKKLSRKKKGSKNRFKTKLRLSRQYAKVTNQRTDFLHKESRKIANEYSKIAVEDLKIKNMVKNHKLAKHINDASWNSFIQMLSYKAVECGGQIIKVNPKNTSKICSNCDNIQEMPLSERTFKCLKCGFTCDRDLNASINHHDRAGLARISTPVGDTVRPEHFWEKSSPKTIKARVNETGTIYRRST

SEQ ID NO: 63467 - protein, 270 aa, unknown
  TnpB Polypeptide
MSVSSTIASLQIPKEAKEYDAWFHLASIGNGIIIDIPIRFHKHYNALRERGKRLECYIISEDRVQLCFEVETGTKKTEGEVVGLDTGINALASTSDGKQYGQDVKKLVEIIKRKEHGSNKQKRARKALRQRIDEVAKEVVKDKQLVVVEKLKNLNHKTKAKRRLAKNMRRSLGAWAYRYWLERLQWATEDNRVSFRTVSPAYTSQRCNACGHTERGNRSGESFLCRSCGHANNADINAAKNILDRFLSGPYGAAYQSKNFLSHCEILVDF

SEQ ID NO: 63468 - protein, 187 aa, Salmonella sp.
MSLKDLERAYKNFFQKRAAFPRFKNRGQNDAFRYPQGVKLDQDNSRIFLPKPGWIRYRNSRHVTGMVKNVTVSQSCGKWYISIQTESDLSTPVHSSASMVGLDAGMAKLAPLSDGTVFELVKSFQKKQKKLARLQRRLSHKVKFSNNCQKQKRKIQRLHSRIANIRRDHFHKVTTAVSKNHAMMLRI

SEQ ID NO: 63469 - protein, 333 aa, Streptomyces sp.
MVIEVSGQLKGQGGKLKQQRAHKARLYLTPGQSLKVEDQGHAGRAMWNLLHSWWTMLPKGQRNLAAADETMRQGRKDLPWLADLPAQASQAVLKTYFQGWKNCWEGRAQAPTFKGRFRSRMAIDIPQGRDLQVVRLNRRWGRMWAPKIGHVLFRWTKDLPVGKRADKNNKVTGARLVKEADGWYVVFRVQTEVPEPVEHTGPTVGIDRGVTKPLALSDGTFREHGPWLSKGETKRLRRLEKAAARKKRARKPKEKTSTRLARTYDQIAQLRAKAKRRALDWQHKTTTGIARQFSRVGVEDLTIRKHGQVRQGDRGSPRQERPPKGRPEPCDSR

SEQ ID NO: 63470 - protein, 369 aa, Streptomyces sp.
VLCGRKYRLELTTEQVALCQEFGDICRAVWNTALEQRREYRRRGAWMNYVPQAAELAEAKREHPWLKAAPSHVLQQTLMDLDRACREHGTFNVRWRSKARWAPSFRFPAGKEIRVERLGRKWGRVKLPKLGWVRFRWSRPLGGAVRSATVGRKGGHWFVSFLVDDGRTTPEKHAMPGTAIGIDRGVAVAVVTGDGTFHDRQFITPGEAVRYRRLQKKLARQKKGSANRRRTVHAMGRIMRRVTDRRADFCAYTAHRLTTRNALVVLEDLRTRNMTASAAGTADRPGRGVRQKAGLNRAILDKGWHKLELALRNAARHTGSRVLLVNPAYTSQTCNRCGHVDAKSRKSQAVFECTVCGHRDHADVNAAKN

SEQ ID NO: 63471 - protein, 447 aa, Streptomyces sp.
LCGRKYRLELTTEQVALCQEFGDICRAVWNTALEQRREYRRRGAWMNYVPQAAELAEAKREHPWLKAAPSHVLQQTLMDLDRACREHGTFNVRWRSKARWAPSFRFPAGKEIRVERLGRKWGRVKLPKLGWVRFRWSRPLGGAVRSATVGRKGGHWFVSFLVDDGRTTPEKHAMPGTAIGIDRGVAVAVVTGDGTFHDRQFITPGEAVRYRRLQKKLARQKKGSANRRRTVHAMGRIMRRVTDRRADFCAYTAHRLTTRNALVVLEDLRTRNMTASAAGTADRPGRGVRQKAGLNRAILDKGWHKLELALRNAARHTGSRVLLVNPAYTSQTCNRCGHVDAKSRKSQAVFECTVCGHRDHADVNAAKNQRDAGLAFPACGDLGTSRSVKQEPVGRATGRNPETGNPRQSRGGGQGVRCRTGGPVQEGAACGVHGRRAALGHRQDPQA

SEQ ID NO: 63472 - protein, 429 aa, unknown
  TnpB Polypeptide
MTVTDAARLPQFFDHTCDHERVRTAYKCRAYPDPAQQQVLSRTFGCVRVVWNRTLAARMTRWRLEGTGTSYAESDRALTAMKKDPDLAFLNKVSCVPLQQALRHQHQAFGAFFAGRARYPRFKSRRSRQSAHFTRSAFAVRGGQLRLAKMAAPIRFVWSWPDVDMTTLDPAMVIVSRESDGCWYVTFTVDTDAPQPLEQTGHAIGIDLGVTDFAATSDGGKIANPRHLERKARLTRYQRRLARCQKGSANRRKAAAKVARAHRKVRHARRDFVHRASTSLVRTADLLVIEDLNVSGMVRNRHLARAISGCAWREFRRQLEYKCQRYGRRLVVIDRWYPSSKTCSACGHLLAGLSLSTRHWTCPSCGARHDRDINAAKNILAAGRAVARDCPGDACGAEVRHSGSSRVRSAANQELRPARAGIPVLQGGE

SEQ ID NO: 63473 - protein, 196 aa, Burkholderiales sp.
  misc_feature (190)..(193): Xaa can be any naturally occurring amino acid
VLIRRGFKFELKPNGMQIQLVKQFCGCARYVYNRTLSLERSLYKKDNKHSFKYAEAVNRLPEWKKKNPFLKECHSQVLQQSLKDLDQAYTNFFRKRANFPKYKEKFRNDSIRFPQGVELDEVKQQIRLPKIGWMGYRKSRDIIGTIKNVTVSRRGEKWDVSIQTEYEVVSSAPNPSEIGIDMGVKRFVTXXXXNVL

SEQ ID NO: 63474 - protein, 263 aa, Rhodococcus sp.
MLARSFGCARVVFNDALRARQDAHKAGVKLSDTEVQKQVVTDAKKTPQRAWLTEVASVVLVQATQDARRAYRNWFDSMSGKRKGRRIGAPRFRSRKDTRQAIRLTRNGFSLRSNGKLYVAKVGELEVAWSRDLPSEPSSVSIIKDTAGRYFASFVVETADEPLPECDAEVGIDLGLTTFAVLSDGKVIESPKFSAAPNANSARRSNPCPARTRAAEIGPRPGSRWPRRTRRWPMPARIGRTSSPRRSSARTKRCSSRTCVSQG

SEQ ID NO: 63475 - protein, 483 aa, unknown
  TnpB Polypeptide
LKRLGLLRDSKAWQAARALPKGETGSPERKARAQAFRVAAIAAGFTAYQLRDFAVAYRKDCWANDHLGSHDTQALGFRAYRALEQYLYGLRGRPRFKRRDQFSSMEGFSNEAVIRFRAGAVHWDGLVMPLLRDARDKDQWERDALACPTKFVRIVRRRLKGRWRYCAQLVQEGKAPSRGLIFAQGGTGGLDLGPSTLAAVTETVALKTGFCPKTADKAKAVRLLQRKLDRSRRATNPGNYHPDGTAKQGCRQWVRSVHYRQAQSDLADLQAGLSAERKREHGELANRLMALARDWRTEDVSYLSFQKNFGRSVGKRAPSQFIATLSRKAENAGGSLVAFSTRTTRLSQFDHSTGTYVKKPLSQRLHVFGGDAGAPVDRDVYSAFLARFVRVGQLDTRQVLAAWPHAEPLVRLPVSSLPNCKRRALRGLGGRKPSDRAVRQSKARSAKGDSGDVVGRKPESPGKTLVPTNGVLLVSSPAGIPCL

SEQ ID NO: 63476 - protein, 213 aa, Bacteroidales sp.
MILRAYKYRMYPTKEQEVLLAKHFGCSRWIYNYALDKKVKTYQTTKESLSRFTIQKDLPYLKKSEETSWLKEVNSQSLQASLENLDKAFKFFRDKKGFPKFKSKHDNRQSFSVPQNGVVDFETNTISLPKFKKPIKCRLHRKFEGNSKTVTISKTPTGKYFASVLVEVNKEFPKLKPIDENKTIGIDLGIKTFAVLSNGEEIQNPKKLKRNNR

SEQ ID NO: 63477 - protein, 388 aa, unknown
  TnpB Polypeptide
MQLSETIKLYMTKEQKNLIVMAMNGYISTVNSLVSVATNGTSISKYTTADVDAALPSALTNQCIRDARSIVNKYNKDCRKVSAKNKKLAKQKSAVTIKEPAIPVLKRPCCYINNQNFKIKDNYIDFPVLIDGKSKRISVRTSMTDRQKMIFANAKLGTMRIVCKGNKIVAQVVYEAAELQYSDDGNVMGVDLGIKCPAVSYCSDGSVKFYGNGRRNKYMRRHYKYLRKKLQKVKKPAAVIKINNKEQRIMKDIDHKLSHDIVATAAAHNVSVIKMEQLQNIRSTTRTSRKNNHSLHTWPFYRLAQYIEYKAKLAGIQVEYVNPAYTSLDCQHFFRQIFLGYFSDIVQAFDTLRKNVCGDDYTSLHNPIVLSSVLPAYGMFHSIQILFL

SEQ ID NO: 63478 - protein, 448 aa, unknown
  TnpB Polypeptide
MLKQKYTTVTQLHEINNKDIIEYFENACVYFCKLQRKAFHIFKNENIKGNKIDYNNLLKKFMTDYNISSRTTNSILKEVQGRIKALAELKKYEIFQKEQKIKKLKEEIEKLDTKILEFQEKMKNKIKFSHFKYWDLKKLRAFNKMRLNTFKMRLAQLKWQTETGTYKLCFGSKELLKSDKKKFVLQRDGHITYIGNQCETGRNNMFQLNYNNKNNQFDIKLRKDFGLDTETKYVFGKCYFNNYKNKLIEALKTKNSTPLTYYIIRKNGRYYLHCVFEYRIANKDLFLTRKNYGTMGVDFNKGFLAISETDRNANLIKTYILKYRFGKGNKTKSDLDKCISLILNRASETGKNVCVEDLNFKDKKSKTLKGKTDKDKKYNNMLHSLAYSLYDKLITNMAFRNKIGLIKVNPAWTSWIAKNKFCDRMKLNIHNGAAFVIARRGLGIKDII

SEQ ID NO: 63479 - protein, 396 aa, Massilia sp.
MFRGHRIRLDPNNVQATYLARAAGTARFAYNWALAEWQRQYEACRADPDLPKPNEKALRRQLNAIKRMQYPWMLEVTKNAPQMAIQQLGRAFENFFKGRARYPRYRRKGRDDRFTLTNDQFSVKDKRIRIPKLGWLRMCESLRLSGRIVSASIERVADRWYASVVVNTDASHLPPAKNQGAVGVDLGVRTLATLSTGETFAGPKALRSLLARVKRLARSLSRKVKGARNYIKAKNKLARLHARIAEIRRDGLHKLTTSITRRFHLIGIEDLNVKGMLGNRCLARSITDMGFGELRRQLEYKAAWRGGQVVVVDRWYPSSKTCYCCGHRLEVLDLEVRRWHCPDCGAQHDRDMNAAINLRNMALSSTVAACGGEGAGLGREAQDETGPGEAGIQQQS

SEQ ID NO: 63480 - protein, 339 aa, Escherichia sp.
VKRLQAFKFQLRLGGQQECEMRRFAGACRFVFNRALARQNENHEAGNKYIPYGKMASWLVEWKNATETQWLKDSPSQPLQQSLKDLERAYKNFFQNRAAFPRFKKRGQNDVFRYPQGVKLDQENSRIFLPKLGWMRYRNSRQVTGVVKNVTVSQSCGKWYISIQTESEVSTPVHPSASMVGLDAGVAKLATLSDGTVFEPVNSFQKNQKTLARLQRQLSRKVKFSNNWQKQKRKIQRLHSCIANIRRDYLHKVTTTVSKNHAMIVIEDLKVSNMSKSAAGTVSQPGRNVRAKSGLNRSILDQGWYEMRRQLEYKQLWRGGQVLAVPPAYTSQRCACCGH

SEQ ID NO: 63481 - protein, 336 aa, unknown
  TnpB Polypeptide
MSKLTYKIKHNINLLKELSIAKKIAEFAIKTRTLSSKDVKCFGLKSVISNQILRKYSRNKKCKNIKSVKLTIPGQGIKFLNSNIYISSLKLNLYFNKPVEKINQIELDNIYAYISCSVKDEIPIRENGYIGIDRNAIGHIAVCAIDNKILKMGKRAQHTRNKYKNIRKKAPYNFIKKLGKRESRIIKDINHKISRKIINIAKEKNYAIKLEKLKKINKNRGRIVNNIKSNWPFYQLETFIKYKAKLLGVKVFYVDPCYTSQKCSRCGLIKKENRNKKQFSCGCGHNDHADANAAFNIAKASMYDRSVKDRDLTESKTDIAQGAMVLMRLTPEPLLL

SEQ ID NO: 63482 - protein, 415 aa, unknown
  TnpB Polypeptide
MIKPNKSQEKIVKELMWHSSKVYNMLNYDVREGKEKIKEKGLINVEGSKIYKKYRKENWHSKYLHSHMLQQVILNYIGDYKSYMATKEMYEKGDKNIKGKPRMPRYKKEEKIQITFTKYAIRREGRKIKLSISKKMQEKFQVKSLNFLIPKKLEKLVKLESIKMIKMGKEEKGKYKIEIIYEIEEKKNIEGTNIMAIDLGMNNLATCTNIKNNKSMIIAGEMIKAKIGYINKEISRLQEIQMKMVGNKKYRNTKRIKKLYEKRRNYCHTYMHKASRMVIEYAIENKCNTIVMGNIKDIKQNNKNNKRFVQMPIQSLVRKIEYKAKKEGIEVEYITEEYTSGVSSLDKEEISKRKYNKNRRIKRGLFISNKGKVINADVNGSINILRKYIKRIFSPNLEIAMDIGREQRPLKKRVA

SEQ ID NO: 63483 - protein, 383 aa, unknown
  TnpB Polypeptide
MDSDAFEKLQRTQELFRRACNLLVDIIHEDTEKKLRLWQRFNLHHAGYYRVREAVPELGAQLVCNAVRAVSAAYKTLLSNSPKYAKDKNLELPKIVFKNVGIHLDVRTLTFSKDRTTASVFTSQKRVSVRLCPGTFQQDILSNGKWRECNLVYKKGRKGTKGCWQLHIAVERDLKLPSLKNLKKEEILGVDVGENNMAATSDGCLFKAGKLKDDRDKYLSHRARLQRNGSRNAKRKLRQISGRERRHVQHVNHNVSKTIVEKASQSGKRLIVLEDLTHIRERIKAGHKVRARLHRWPFRELQQMIVNKASRMGMRVMFVDPRYTSKTCSACGAIGKRKKHRFECHCGYRAHSDLNAGRNLHGLGYLLMTQGSDVNRPNATLRM

SEQ ID NO: 63484 - protein, 426 aa, unknown
  TnpB Polypeptide
MLRRVERHIVTKTDKNYEAIKEICHKSKNLYNYANYILRKSFFETNKLPDEYDLVKILTAQNQDDYRSLPAQTVQQTIKLLFKSWKSFFQLCKAYKKDKSKFKARPRIPKFKPRAEKGFFATVFTDQQIKLKANKIHFIKSVLKPITTKVSSIKQVRLIPDTACFIVEIVYEKDIRQIEIEQGSVAAIDLGLNGFVTFLDNQGFTPFIINGKGAKSYNQFYNKRKASLQPQLPLDIYSSNELRRLELRRNLFMQNFLHQSSSIVIKALIERKIETLVIGLNEDWKQEINLGKRTNQNFVSIPHRKLVDQLIYKCEEIGIKVILTEESYTSKIDHFIGEEMKHHDKYAGRRIHRGLFRSSTGLLIQGDVNGALGIMRKVFPEKALELAELIRNRGVAFTPIIVNPISLSAVNRSRLATNNTLLDLAV

SEQ ID NO: 63485 - protein, 220 aa, Okeania sp.
FKENPSKFKSRPRLPGYKNKITGINIVVYTIQAISKKQLKQGIINQSKTGIYLKKLVPTSQIQQVHLVPRLNHYVIEVIYEATKKQYELEKKRCASIDIGLNNLATLTFNQTRMKPLLINGRPLKSINQYYNKVKIFLPSEFKENQSSLTLKKLYNKREFKISDYLHKSSCLIIDTLINHKIGTLIIRHNQEWKQNINLGKRNNKNFVSVLYNKLIEMLS

SEQ ID NO: 63486 - protein, 558 aa, unknown
  TnpB Polypeptide
MITIQCQLEFQNTQDKKTVLDLMRIFSSAMRYAYQRLLEGEKRKDLKKQLSKLFNINTRYSDDAILLAQSIISSCKERCQNPKKLIFGSRKVFEQLKRNHLTGKRRKELKAKWKENRQGNLYSRGDKSKQGNLNLRFEQIDNELYLRINTGDRQYVYAKVIRSVKRKKDKWIDFMFMLENAYRYGEWFPYSVRLKVKNGNVYAFISVEEKIPPIKIKRDNGIIGIDVNAYPFHLALAFTSKDGNLEKYQSISLNELLEVNSEKRQYLEWQIAHQIIKIAKEEKKAIAIENLEKLPKGKRGDGLAKLRRKLQRWSYKRLLEKIEVLARRNGIEIRKVNPAYTSVIGKLKYSPQYNIDKDIAGAYVIARRGLGYKERLPKNYKELLNDTDFLSYTIARIEDNIGKLKQKLEEEKNKYERNKLKTQINKLRKNLKTLQKHVSLLTSHVSRSKSGKSKTATQYPVNQRKEQVRGLPAGRHKSWQVLSIALAFCCLERSYRDFSPLKRVIVLKDWIAVANRLVPVLGTGTMTLPKYRLLGSEVSEMAEYKYPNPSCASFVQFG

SEQ ID NO: 63487 - protein, 449 aa, unknown
  TnpB Polypeptide
MQQIITAKLKLITTPEQFEALRETQLAYRDALNAVSRYAFEQGKISNVTRLHKGMYTELRTCYHLPSQLACSVERQVSATYKGLWTKCKKNAEHRRKKITRRRYKGLDQPPRYHSPTLQYTYGHDYSFKEGQQVSLSTLHGRIVVPYQGYARHVSLIQHGARVGDAKLWYDGAKKQFYLLVPLEIEVADPSPDQLSQVVGVDVGIRYLAVTSTSTGKASFHSGKRIRHKANHYARLRTRLQHKGTRSAIRRLRRIGQRERRLKLHANHQIAKQIIQQHPQTLFGLEQLTDIRERTKRRKRKRKKNGKGSEPVSAKARQANRVYSQWSFAELHALISYKAALSGSRVVKVDAHYTSKQCPRCGHTADENRPGKGLLFVCQQCHSTLHADLVGARNVTMRTLLVRQDWIRTGPLSMAPDASGGETKAARLSRYAELRWSPDASLRLLAGGD

SEQ ID NO: 63488 - protein, 272 aa, Cupriavidus sp.
MTGMLLVYRCRVKSLNGLLNQQSRAVNYVWNFCNDTQKHALKWGKKWPTGFDLNVLTTGSSKELRIHSGFLNIVIEVADTQARCPERGIGIDLGFKDIATLSTGEKVENPRHLGRLEQALAKAQRARKRRQATNLHARITNARRDFLHKLSRRIVRDFDYIAVGHVNAAGLAKTSMAKSVLDAGWSTFRTMLAYKAIAHGAWYEEVDERFTTQVCSSCDAMPPGRPKGIADLGIRQWVCSECGAVHDRDVNAALNILARSGHRSPAEGISSL

SEQ ID NO: 63489 - protein, 375 aa, Hydrocoleum sp.
LKARYKYRIYPNHVQINKLNQLFGCCRFVWNQSLAYCNQLYADGIKKPSYTDLTKQFITQAKKDLLWLKEVASTPLQQSLKDLDQAYKNFFNSCTKKPKGIKVKPPKFKSRKSRQTARFVGANYKIGKDKIYLPKVGRIKIFWSRPLPNQPSSVTIIKDSSNRYFASFVVETCAEHLPKINNSIGIDLGISTFAALSNGKKIFAPKPLKQNLKKLAKFQHKFNRTEKGSKRREKARLRVAKLYAKIKDIRTDFLHKLSTKLAKQYDEIVLEDLNVSGMVSNRKLSKAISDLGWRQFRTLTENKCEKYGREFRVIDRWEPTSQKCSACGFPGGKKELNVREWTCLNCGAVHDRDINAAINILEADSQDVVETVVNR

SEQ ID NO: 63490 - protein, 366 aa, unknown
  TnpB Polypeptide
MLTVRAYKTELDLTNEQVTACKRHAGAARWAYNWGLARKQDAYKATGKSPYAGEVHRELNALKKTEVPWMYETSKCAPQEALRNLDSAFAHFFRRCALKKAGQLRGKVGYPTFKSKKKGLGSFRLTGSIAIFADAIQLPRLGRLRLKEKHYLPTDGVKIRSATVSEQAGHWYVSVQVEQEQVVPANAGPVVGVDLGVKSLATFSDGTVIANPRHLKRRLKKIKRFHRAVSRKQKGSKNRRKAANRLAKLFRNVSNQRQNTLHQVTTMLAKTKQVIVIEDLHVRGMLKNHHLAQAIADVGFYEFKRQLVYKSAWYGSRVILADRWEPSSKTCSGCGWYDEGLQLSDRTFHCQACGLVLDRDWNAAIN

SEQ ID NO: 63491 - protein, 407 aa, unknown
  TnpB Polypeptide
MLINRAYKVELKPNNVQKTFLNKSIGCARLGYNFGLDLSIKRYEQGDKYLGAIGLHKELCKIKKDNYPFMYEVSKLAPQNALRDLDKAFKNFFRGLKKKQNVGFPKFKSKKNQKQTFRIDGANIKVEDSYIKLPIISKIKLKETGYVPVSEVKYMNATISKEIDRYYVGVVVQYEQEVINKEIEDIVGIDLGIKELATCSDGQVFKNPKFTKVYKKKLKREQRKLSRKKKGSKCRDKQKIKVAKVHRKIRNLRQDNLHKMTSSITKTKCSVIVLEDLNVKGMMKNHKLAGAVADSSFYEIKRQFEYKTKFYGGEVYNIDRWFPSSKLCSSCGCIKEDLKLSDRIYRCDCGFEMDRDLNASINIQNYYLNTVSSTGINAYGEDVRLLSNTSLLSSLDEVRTKPEILAC

SEQ ID NO: 63492 - protein, 426 aa, Synechococcus sp.
MLTRRTTFRLYPTPAQSAQLFEWRRLHAYLYNAAMANRRVQYKQFSHSVDYFEQQNSLPAFKEVWPEYKALGSHALQATLKRVDFAFQRFFKGLGGYPKFKSIRRYSGWTYPCKQSWKALSDGKHGRLKLTNLGEIRMRGQARTWGTPTTCTILYRAGKWFASITVQCEPQRATGPGAVGIDLGCKDTVSFSDGSKERKPAFIAVGERAVVAASKAKRRKRAPNRKQGITASNRWKKAAKRVAKLQRHVTRQRTDWMHKLTSDIVSRNSLIAGEQLSVKNMTRKAKKGSKRKRQKAGLNRSILSVGFASISSMLAYKSAESGGIYTESPTRKLKPTQRCAKCWELTPKTLKDRVHVCSNPECQHVEDRDTNAAQVNLIWARGAECASSNAESASSTSCGSLKQLAAVKRQKLLNAGTETPFSREAG

SEQ ID NO: 63493 - protein, 365 aa, Moritella sp.
VNLIAYKYRFYPTNEQALMLAHTFGCVRFAYNSTLGYSKEQYDLGNKTNYSDWSKKLTQLKRNPDFAWLKDVASVPLQQSLKHLDKGFKSFFKSGFGYPKFKNKHGNQSASYVGTAFRFDADKQLLILAKMKQPLKMKWSRSFTGKPSSLTVSKTKSGKYFVSILVKEDIKQLPVVNKTVGVDVGIKDLAICSDGTKFNNPRITKKYANKLAKASRKLAKKKKGSSNFNKQKRVVAKIHEKIANSRKDFTHKMTTKLVNENQVIGIESLKVKNMVKNRKLSKHIHDANFGEIVRQLEYKADWYGRKVSAISQWFPSSKMCNECGSLYSGKWSLAIRTWSCECGATHDRDHNAAINIHKEGLRLAA

SEQ ID NO: 63494 - protein, 395 aa, Microcystis sp.
MEKAYSYRFYPTPEQESLLRRTLGCVRLVYNKALHLRTQAWYERQERVGYAQTSSMLTDWKKQEELDFLNEVSCVPLQQGLRHLQTAFTNFFAGRTKYPNFKKKHQGGSAEFTKSAFKFKDRQVYLAKCTEPLPIRWSRQIPDGCEPSTVTVRLHPSGRWHISIRFDDPTIKPFPVTDKAIGIDLGISSLVITSDGDKVSNPKHFKKHYQRLRRASKNLSRKQKGSKNREKARIKVARIHAQITDSRKDHLHKLTTQLVRENQTIVVENLAVKNMVKNPKLSQAISDVSWGEITRQLAYKCRWYGRNYIEIDRWFPSSKRCSNCGYIAEKMPLNIREWDCPICGTHHDRDINASKNILAAGLAVSVCRATIRPEQSKSVKAGAEPRKGKKQKPKS

SEQ ID NO: 63495 - protein, 420 aa, unknown
  TnpB Polypeptide
MPILKAYRFNLRCSPAQQRSLRRASGGLRWVWNQALAEQKARYARGEPYANYVAMAKWLTAWRNAPETSWLAEGPIHPQQQVLRRLDETYRRFFKKAGGSPRFCARGQEPGVRFPDPKQFELDQMNGRIKVPKLGWLRLRQSQPVDGLVKNISIRREGSSWFASIQVEVAETMPARGIAPSLGIDLGVANFLATSDGDLKAPLAALAAQQRRLRRYQKSVSRKVKGSCNRRKAIERLGRLHRKIARQRSDWLHKLSTSLANQHPVIAIEDLKVKNMSASASGTAAAPGRNVRQKAGLNRSILDAAWGEFARQLEYKLAWAGGELLKIEPAYTSQRCSYCGQIDARSRKSQAQYVCVACGHSEHADVNAAKNILAAGHAVWSLREIERTKACGEDVRRAAVARPRHAASAKQEPAEGTVHA

SEQ ID NO: 63496 - protein, 433 aa, unknown
  TnpB Polypeptide
MRQFAGEEYDHFMKNLIQILIFIKNVHIYGYMLKAFRYRLYPTPSQEELIAKHIGSVRFLYNLALETKQTAYAGSKVNLSRYDLSAQIPELKKECPWLKEINSQSLQQALVHMDTAFNNFFKGQAEFPRFKSKSRSRQSFCVPQSVSLEGGKLCLPKFKKGIAIVEHRPLKGEIRQATISRTPTGKYFVSILVETGVEVPIKKEVRPDTTVGIDLGLKTLIVGSDGFCLDNPRHLRRAMDRLKYIQSHFSKHKGKRAKNKLALLHEKVTNQRRDLLHKASSQLVKNHDSIAIEDLNIKGMVRNHRLAQSVSDAAWGIFVSMLEYKAEWQGKNILRIGRFEPSSKTCSDCGWIHRELALDEREWACRACGSVHDRDRNAAKNIKAFALEKHKTVCGTQTKTRSEPPTLVGVLTSEAHGSLAHGQFTENGTGKKD

SEQ ID NO: 63497 - protein, 393 aa, unknown
  TnpB Polypeptide
MKIIHRTYRFAIEPTRGQIVLLDKHFGCVRFVYNHFLNERKEQYREVKRSDGYHKQCASLTNLKKQEDKTWLGEINSQSLQFAIRCLDTAYVNFFKGQTQFPRFKSKRSKNSFTVPQFATLEDGRLHIPKFKQGIKVNVHREIKGKVGKCTITRMASGKYFASIHVEEKCEPLAKTGAVVGVDLGLKDLLVTSDGRKFKNGRYTRAYAKKLAMAQRHMARKKKGSKSRERQARKVALIHERLSNSRRDVLHKTSIALVRDYDVICLEDLNVKGMVKNRKLSKAISDASWGEFIRMLEYKAAWNDKLVVKVGRFFPSSRTCNECGWINQDLELSDREWVCANGHTLNRDLNAAKNILQEGMNQISAGTVDHTDGDGVRPRKRQSSEKSGVLSSI

SEQ ID NO: 63498 - protein, 275 aa, unknown
  TnpB Polypeptide
VVKYRQNVFVEDHELINFMKTMFKDIAAFDISAKDFLVNDVVRMKNLRFYRSVEKKPKHLHRNLSRKQKGSKNWEKVRLELAKHYEKIYNQKKDWTHKTTRDLGNKYDVIVLETLNIRGMQKFNSGLSKSVTLDFSWHQFKTYIEYKIKWAGKHFIQVKWSFPSSKKCLHCGQITNDLPLDVRVWTCSICGTTHDRDINASINLKVEGICILKEEKHITIIHDDKNNVGMAESQAFGDDVRSIAILQNACRRFSMKKEFHIYGRDLHESSSFRKE

SEQ ID NO: 63499 - protein, 430 aa, Selenomonas sp.
MYHINQKEVNRMATKVVKSSFSASKEDIDKLFACNRIAAMIWNASLEISKSYALANGGKWISKSGLYKALKNLYPLHSQSVQMVADKYLDARDAAHAAILKGYKNKYPWRRKKNFNTQWKDKAFSFDFEKNVLSLSLGIWDGKRQQGICLKLPKNIMAKINEIMSLNKDAISQIELCYDNGLMLCIIYDDGKQSPENIGFPETVGVDLGEIHSIAACATNGNSIIITGRKLRSINRLRNKTLASISKAQAKCTKGSRRWKKLQRKKRYILSKSKHQVAYKTHEITKNFVDWCLENKVGKVFCGNPEGVQRNTSGRKKKNRTKNKKKIRNRKTSQKLSNWNFGKIKDCLKYKLANVGIEFEGISEAYSSQTCPICGQRHKTNSRNYKCSCGYHAHRDVHGAHNILSLGLNGHFDKVCDFEKQKTKYLRLAA

SEQ ID NO: 63500 - protein, 375 aa, unknown
  TnpB Polypeptide
VKRTIKLELPVSPKVFLPTIDAYTKAYNFVCSVGFSQKDFNQFSLHYKTYKILTTYLPAQFAISSRMKAYETLKSVKHLIKKDKIECPKSKRCSIRYDARSFTTSFDKNMISLLTINGRVKVPIQVPKYFQKYLTWRRKSAELFIRKNKVYINIVFDKSNPEVKPSGITIGIDRGINNIAVASNNKFYSGKQVKRICNKYNKLKSSLQSCGSKSAKRHLKKLSGRENRFKTDANHRISKEIIANLPEGSVIVLEDLRGIRSKKRGKKLNKMIGTWTYFQLEQFLTYKAEEKGIQVVKVDPHFTSQKCSKCGHTEKKNRIGNNFKCCACGFRLNADLNASRNILQLHLVAISNQTGVSVNNPIVSTQHFVELETSH

SEQ ID NO: 63501 - protein, 390 aa, Ornithinibacillus sp.
MKVKHAYKFRIYPNQKQTVLINKTIGCSRFVYNYFVGKQKVKDAYWDIVNEMVQNGQLPQNNWIGEFFNKNQSIKAVRELKEHYPFLKEVDSIALQKSVEMANDSYTRYYKKQNRKPRFKSKKNPIQSYTTKYVNGNISVLDNHIKLPKLGLVRFAKSREVEGRIMNATIRRTPSGKYHISILAETEVEPLRKTDSSVGIDVGLKDFATLSDGTVYSNPKFFRTLEKKLAKAQRVLSRRKICSSNWHKQKIKVARIHEKIANSRKDMLDKISTEIVKNHDVIGIEDLSVKNMLKNHNLAKEISEVSWSQFRTMLEYKARWYGKQVVTVAKNFASSQICSNCGHKHKDVKNLALREWTCPACNSYHQRDINASINLRNEALRLTAGTAGIA

SEQ ID NO: 63502 - protein, 369 aa, Chloroflexaceae sp.
MRKSFKYRIYLTNGQRRILGQQLEECRWVYNETLAYRKRAYAEEQRTANWYETKRQLPIWKNVRPTLKLVHSQVLQNVTERVDLACKAFFRRVRESAEEVGFPRFKGVGRYDSITYPQYGNGVRLDGDRLILSKVGAVHVVLHRPLEGTPKTVTLTRSRTGKWYACCSCEVEPCELEPTAEIVGVDVGLASFATLSTGDEIANPRFYRRDEADLKRVQQLKDAAKNAQRWDENRRRKKALAHIHERIANRRSDFAHKRSRELVNTYQLIVFEDLAPLEMGRSRGMRKSILDVAWSQFISMTVAKAEEAGRRVILVNPRNTSKRCSSCGNLVQKSLSERIHTCPHCGLVLGRDHNAALNILHWGLQTLRL

SEQ ID NO: 63503 - protein, 351 aa, Hyellaceae sp.
LKQWFGTSRYVFNKTVKYLQQPETKANWMAIKTGILNDLPEWAKSVPYQIKSIAIKDACLAVKKAKIDFKKTGKICQVKFRSRKDTKQSMYIPKSAIKDCGIYHTKLGLSKLKEALPKDFSDGRLTLAYGEYYIVVSEEVQPHQTDNQGRVVALDPGVRTFMTFLSESSYGWLGKDSNLHVQKLCFKLDKLISKMSKAACRERRRFRKAADRLKSKIQHLVKELHHKTARFLVDNFDVILLPTFESGQMVSKSRRKIRSKTVRQMLTLSHYQFKQHLEWKAWETSKVALTSINEAYTSKTVSWTGEIKQIGGSRIIKDADENRMDRDLNGARGIFLRALVDTPWLNSQLAV

SEQ ID NO: 63504 - protein, 426 aa, unknown
  TnpB Polypeptide
MKVSRVEQHRIKKNDKLFPVIDKLCWESKNLYNYGNYIIRQEFIETSKQKEQGLIENAHWIKYNELFHLCKNSESYKDIGSNVGQATLRKLDKNWKSFFSSVKDYSKNPSKYLGRPKLPRYLPKEDGRFELGIDNIKFKIVDGYIYFSWKPLKIMNNIFRTKILEGSKLIQLRFVPRGNEYIMEVVYEIDVPETENIVSERIAAIDLGVDNLMTITTNCGVNPIIINGKPLKSINQYYNKKISEMRSELKLRHNSDWSNEMQRFTTKRNNQVDDYIQKSTKKVVDFCKDNNIDTLVCGYNSGWKQDTNMGKRVNQKFVSIPYLSIVQRLEYKCENEGIKFIKINESYTSGTSFLDGEEPIEKNYNKDRRIHRGLFQSEKGEYINADVNGSYQIMKKAFPKAFVNGIVDAGSHPVVVNIPLQTANVM

SEQ ID NO: 63505 - protein, 377 aa, unknown
  TnpB Polypeptide
VLRDHCGHARFVWNLAVEQQSWWHRGRHSAPGYLEQCRQLTEARAECGWLRAGSQMVQQQALRDFAQAMTCFFAGTRGKPSWRKAGRDEGFRIVAVKPGHVRKLSRRTGEVWIPKAGWVRFRWSRAVPQTKSYRVTLDRCERWHIAFASLPEPIPAPGTGEVVGVDRGVIVSAALSTGEMLTVPRLGPARRRRLCHLQRRLARAGRGSNRRVQVKLAIARLKAREADARKDWAEKTSTDLARRFDVIRVEDLCIAGMTGSARGSVGQPGRNVRAKAGLNREILRSGWGLLVRRLEEKAPGRVEKINPAFTSQRCSVCGHVAADSRESQALFRCVACGYTCNADVNAARNIAAGHAVTARGGVRDSGPANREPRLFAA

SEQ ID NO: 63506 - protein, 214 aa, Methanobrevibacter sp.
VKKENGKYYAIVNVVTEVEELKKTGENIGIDLGLKTLVTLSNTQEIANLDLSQEEAMIKKYQKKLSRKKYMSKNYQKTLKKYHKWVDRKNNKIKNTYHHISKKIVENYDIISMEDLNIKGMFKNKKWSHKLQQISLYTLLQMIKYKAEWYGKKFIQIDRYYPSSKKCRHCGKINHELKLHMRKWKCPNCNKINHRDINASINILNEGIRIISSE

SEQ ID NO: 63507 - protein, 568 aa, Halolactibacillus sp.
MGMKAIFSNRLYKHTIDPDFVMSMDHTLRVFNQAKHFRYQAEVRELRGSKAKSSVSIHQRLKQRYGLNDYYANSAVQEGRALLSAQRELKNMYMRNKKEQINAVKRKIKATKARLTTLQKIKGSFVKGTPMFNKTSREQQKGAFFVVTYKHSTRLFYCAYDFEHQYLDVQIKHLKSRLGQLNFKKDRYEKQLIQLTNKVTGVCFGSKRLARGRLTQKSYHAHPERWQKDWAAARYGKMTISGRKDAKSGNFVFHYHPEMHALTFKTIDQCVINLSNVVFPYGQDHVNRAIQTQMNLKDKKKYGKPIGWSLEDHGAYYIVKCLIDVPATPYLNTSTSTGMIGIDLNLNHIAVANVNAIGQCVDAFTLPFNLEGKTSGQTTKIIEAEVMALVDYAVKHHKPLAIERLDTTRSKVSRPYEHRNANRKMSQFAYQKMILAIKSRAEKMGVAVYVVNPAYTSQIGKIKYMKRLGVSIHMVAAYVIARRAMGFKEKLPPMLYSLVPEQKQDLHHWAQWAYMTRTLSFVRTHAFYQTERFDQSKLCSWNTLFPQHALTDVEKIGLRRLESRKTYA

SEQ ID NO: 63508 - protein, 551 aa, Chlorogloea sp.
MRTVEFKLDLNQTQQAKVDDWLNVLRWVWNRGLHLLTEFDSFTSWDKVSKTWTPSCPIQWEYYRDDDGHLVPFTRLAQTKPYRMSCPISQAYRQPELESPNHFGLLYYFAQKNHEDKPWFCEVPAKVVAGTLKSLSDAWSEYKAGKHKRPRYKRYKDKLKTLVNNNSKSVKISGKQITLPKLGKVTVKTLDKRWDAKVPIATLKIVKEPSGYYLQLTGELPLKRFKPSNKAVGISLGYKDLFTTDSGKVVKPPAYYQKMEKNLQRLQRKLSRQQNICPISTYNPELAEHFLSCPINPHKGANKAKTQQKISQQHEKIRRARRAFNHKLSTKLVQEYGGIATAKSEVRKITRRPKPIVNKEGTGYDPNSAERKSQFNKQILANGLGQLTTLIEQKAVVNGREFIEIAPKEIPDEPRQRAERYSKRLRLPRAVHLSSFFGRYRAWSWESKPGESQRTLNQEASQEAALRDAGTTSKSSSANTNLTESSNFNGDRASRATSQSSLETRSELANPCKSESFKQLPKAKKHSSAPPTSEKQLGRKKRRSTRENDSS

SEQ ID NO: 63509 - protein, 330 aa, Bacillus sp.
VTLSGPSLRKPDAHSSIHEAALNEAVELRDLFQKCLEDGEKEKAFQVIEVAIEHWESRTLKHAEAEEEGLYKDIVDENPDMISTVIQLTRDHDLMRRLDPNHKNFFVGVDDQGNSIEFKKLQMIKYWDKKIDEIKSLRDVCEKKYRNRKTKHGNSYTVHSPRWNRLNHALNKAYHKRREQIKTALYTTAHELYRRFDLVIVGDYTPTNGTAPFDQMKRSMLNQEKMGEFRTIVEWVAAKLGKYYLLANERNTTKDCCVCGHQEKKDPSIRRFDCMICGTEMMRDSNASVNIGKKVGFSLDVQKYKHKLKNFTHKGKVVYGQSIYWIENKI

SEQ ID NO: 63510 - protein, 403 aa, unknown
  TnpB Polypeptide
MAEVRRTVVVKLDVDDSDAALLHETGDEFLNAANYVVRDAWQEEKIPTAKQELHDRTYSDVRKRTRLQANLVQSARNKAAEAIKGVLARWKQGKRASQPHFTTFSVRYDKRSATFHDDHVSLSTVNGRINAEYVLPPAGDNPQTTYLRNDDYEVTGATLQYRDATDTFYLHIGTKADVESEIPDEGDAEHSTVLGVNLGIEQIAVTSTGMFWNGGYLNHRRREYERVRGDLQRTGTESAHRTIEQMGDREMRWVDDYLHRISKALVQEAVAHDCSTIAFEELTDIRDRMPGAKKFHAWAFRRLYDYTAYKAEEHGIEAVQVDPAYTSQRCSKCGTTLRENRPSQAEFCCQKCGYETNGDYNAAKNVGFRHLRAGQKSPRGGATRHLALKSGTLNVNGDYTPAE

SEQ ID NO: 63511 - protein, 418 aa, unknown
  TnpB Polypeptide
VSVVRNIQVKLDVPEDAYSVLGETFEQFRYAAQYVADYGWGDDPTEIVTDQSDLNTATYDDVREDTDLHSNHVQSARSLAAEALDNCQDRLFKDGKTASKPTFRGTVVVYGKRTITYNDDHCTLATVDGRIRAEYVTPEDDVDTPFEDYWNSDEWERKEATLHKRDGEYYLHVAVGKEPDTDASTVENGAVLGVDLNVDGYLAVTSTGTFLGNADYLNHKRDEYERRRGRLQQTGTRSAHLTIQSIGNTFERWSEDYLHRVSKAIVQEACRYDCSAIAFENLENIRVRISNASKFQQWAFRTIQEYTEYKAEEYGILVDTVQPAYTSQRCSHSECGFTHEDNRDGDEFECLKCGKELHADYNAARNIGWRLVQHWLKSGAGRANCQVALRSGTVNANGEFSPTTSRGQSGSPLTSPPL

SEQ ID NO: 63512 - protein, 371 aa, unknown
  TnpB Polypeptide
LELTVTAKILLKPTQEQQSMLLETGRAFSRACNYISGVIFDTRNLNQAELQKQIYGVLRADYGMPSQMACNAVRHVIGNYRAILANQEEWIKPDYRHTTYALSWNRDYLLRGDYFSVGTIGGRIKMPYKNGGMEKYFDGTWTFGVARVVNKHGKWYLHIAMSKEFDQLNDFEVGNVVGVDLGINFTAVAYDSKGKTTFYSGKQIKHKRGQYKKIRQQLQKRRTASARRRLAAIGSRENRWISDVNHRISKALVDGNPKNTVFVFEDLTGIRNVTEKVRMEDRYVSVSWAFFDLRQKLEYKAKINGGKVIIANPKHTSQTCPKCGHAERANRNKRKHTFKCKNCGYTSNDDRIGAMNLHKKGIEYLSAVAGE

SEQ ID NO: 63513 - protein, 671 aa, Acidimicrobiaceae sp.
VTTTATTSPRTRGKNKQAAWRVGDQPMATIVLNLDTSDAHVRRRLEVLYFTMFNLRRALQRDAQRLCGEYWSRKDERDGLGWRFVAEDLGLNRNGFEALARDHARSSGWAMEHVSAALVSHMADAVFQDAVRHLWSDDSGKRHGPLHVTAPYKFTTIHGRARSHTTTNKWETFRLYGTLKGHLDAYAHGKNQHRTLHDVAALPAGTPVLRQSTMTTPGPTTWSTYTGPLVLVFAGGPQSHEPELQLPVRLPQGRGAWDRVTHFLGDPETRHKIDLVRRQDSSQPGGWRYEMHLLVLANGYASPRNAGLLGSAPTNRTACVDVNVSNLSVVSTSTDQRDLASTVVRADGGEHDRLAALAAKNRRGLRRVERSRRSTNTSQYLKSKAQTARDERRAQRGLREVVTTTPGGGRLSRADGVPLRAYWRDDLSSAYRDTRRRQGERARAQSLTKKTKAHEVAVQLVATHGVDWLIEDCNLTNWARRWGKSLHAFAPGMVTAEFAALTARHGGSFVKMATGPTALSSHCLCGHSSKKDLSTRTHACAACGFSGDRDLVSAALGTCVVHGDVAVPTTARVDFARAAMLLAAISLPTTPSTNGHQDALTSQTHPLEPRRRIDVVAQGARPAGYSSRAARRNARRTAQSTNGPGSARPAKVAHGPALRSSSPPGDLRLSS

SEQ ID NO: 63514 - protein, 298 aa, Caldivirga sp.
MYLFKGIEKTPRPHSIILNLPLVDALHESKGGFIKDGKLILRLNKKVEIKIPERALEWLNKRLAENPDRKTVRVFERRGRLVAQIILHKENIVIPPSNPLLVVVDINSSYGVVVHYWDGKLIKTEKYKPPNRGMKWHSARKLMKLRDNLYNQGCLTQEKINIYSALIRRTLSGSSRSWVQQTVDKIVRRIRRIAKRHKKDPLVLIDIPNDESLRGSVLQRTLLSFVKYFENILSWYGIYWDESRLYSKICPQCGSELDLEMRTKNARIMVCKNCGFKEERDKIPLYWALIKIKLLPNP

SEQ ID NO: 63515 - protein, 445 aa, Rhodococcus sp.
LTISHSSVDQVASEDVASEGELSECMSGLLSVMRASISVMSIVQRVYPVEGAQLDALVMHCDHARLVYNLGLEQRSWWTQSRRHFRQKINYVSQAADLTEARREFDWLRAGSTVVQQGALRDLDRAFTNFFARRAWYPTFKKRSNTRQGFVVRDLAARRVNRKWGEILVPKAGWVRFRISRAWTDICAATSARVAVTNGRWTVSLTTPPAVRKIPDTTAVVGIDRGVANSVATSDGRMFHAPGLTAGEQTRFLALQQRLARQQKGSANRERTKAKLGRLRLRLADRRGDWIEQTTTALASAYCAAAVEKLAIANMTRRAKPKPDPDRPGAFLPNGGRAKSGLNHAILSSCWGKFAQRLDHKMSVIVVSAAYTSQQCSNCGHTCPDNRDSQAVFRCQGCGFEHHADTNAAINIRDRAFIIDHQPEGMSGDRVHQSRLRAAPTTSVP

SEQ ID NO: 63516 - protein, 387 aa, unknown
  TnpB Polypeptide
LLVKIVTQVKLMPDAVQAPALLATLRTVNEAANWVSAVAFERGVPREYELRKHTYAQLKARGLGAQAAQHVIKKVRDAYTTLHANLRAGNLGRPGAKRRTKAESRPVTFRPDAAQPYDDRCLSWQYDARTVSIWTTAGRLKTVSFVCSPAALKLLQEYRKGESDLIERDGALYLIATCEVPEAEQYEPDGFIGVDLGIVNIATTSTGYQAAGRALNRYRKRQLALRAKLQAKGTQSARRRLKARSRRETRHVKNTNHVIAKTIVTEAERTSRGISLEELKGIRQRVRLRKPQRVALHSWAFAQLGDFIVYKAKRAGVPLVFVDPAYSSRQCAACGHVDRLNRLSQARFACRSCGVVAHADRNASHVLARRGEHAWTAGRESRVPATP

SEQ ID NO: 63517 - protein, 321 aa, unknown
  TnpB Polypeptide
VIRAYKFLLRPTVRQALALSEMLRDHCSLYNGALQERRDAYRHASKTSIKYGQQSAQLKEIRAFDPERQGRWSFSSQQATLRRLDKAFQAFFRRVKAGEKPGYPRFRGVNWFDTVEFPKDGDGCRWDFTPHDPVTHVRLQGVGHVRVHRHRPVKGRVKTVSVKREGRQWYVVLACDNIPAEPLPATGAACGIDMGVTHFLTTSDGAHVANPRHGKRNADALAQVQRALKAFGRRKRENRTAKHRRAVEKVAALHRKVRRQRLDHAHKAALALVRDYDQIAHERLNIANMVRTPKPKPDPRNARRVPAERRRGEGRAQPQHS

SEQ ID NO: 63518 - protein, 129 aa, unknown
  TnpB Polypeptide
LLHLRVADRRRDFLHKTTTRLTRTKSAIAVETLNVKGMVKNRRLSRAISDAGFAQFVRQLDYKAEWYGCRVWKADRFFPSSKTCGDCGRINRALVLADRAWICPGCGVVHDRDQNAANNLLAAMLQEIV

SEQ ID NO: 63519 - protein, 452 aa, unknown
  TnpB Polypeptide
MYPIAKIVATNSRYGITGPSSHSRQAAKRGNYSRASCLSDRVASHKLSSVRTAYKCRAYPDEAHQQMQARTFGCVRVVWNRTLAWRHQRYYGEKANTTFLQANAYLTAMKATEELAWLNEVSSVPLQQAIRHQQVAFTNFFAKRARYPRYKSRNGRQSAEYTRSAFRYRNGQLFLAKMDTPLAFVWSWPEIDPASINPTTVTVSRDPCGRWYVSFTVDEAEPEQLPATGRMVGVDLGIKDFAVTSDGEKIPNPRKLARRARNLARYQRRLARCQKGSANRAKAKARVARAHRKVRASRADFLHRTSTNLVRDHDVIVLEDLAVRNMVRNRSLAKAISDCGWGTFRQMIEYKAAKYGRHLIVIDRWYPSSKTCSACGHLLASLSLSTRHWTCPSCGTRHDRDINAAKNILAAGLAVSACGADVRHSGLSRVQSAVKQEPRLVTAGIPVLQGGE

SEQ ID NO: 63520 - protein, 404 aa, Streptomyces sp.
LIVMQLRYSFRVYPDGPQRLALARAFGCARVVYNDALRARETARAAGLPFPKAGDLPKAVITEAKKTVERAWLGEVSAVVLQQSLRDLDTAYRNFFDGLKGKRPRTGVPRFKSRRDSRQAVRFTANAKWKITTGGDLSLPKIGNVRVTWSRTLPSVPSTVTVIKDAAGRYFASFVVETDPDPLSETESVVGIDLGLGHFAVLSDGTKIDAPRFLRRAEKKLKKAQRNLSRKARDSNNQDKARIKVARAHARVADARREFHHLLSTKVIRENQAVAVEDLAVKGLARTRLAKSVHDAGWASFVAMLEYKAALYGRTFVRIGRFEPTSQVCCVCSLKDGPKPLRIRVWECRGCGAVLDRDINAAVNIAKAAGLAVSACGAQVGPVLVPAQRGEAGTGPTPWPSTAR

SEQ ID NO: 63521 - protein, 396 aa, Bacillus sp.
MRWTFLIINKAYKFRIYPNKKQIEFINKTIGCSRFVFNFFLGKQKEKDAYWYIIEEMVQNGQLPSNNWKGEYLNKYETIKALPELKKQYIFLKEVDSIALQKSVENLADSYYRYYKKQSKQPLYKSKKNPVQSYTTKYTNRNIAVIGNHIKLPKLGLVRFAKSREVDGRIISATVRRNPSGKYFVSLGTETEVSELPKTNSAIGIDVGIKDLAILSDGTIYSNPKFFHTLEEKLAKAQKIMSRRTFGGANWYKAKIIVARIHEKITNARKDYLDKISTEIVKNHDIIGMEDLSVSNMLKNHNLAKAISEVSWSQLKTMIEYKAKWYGKQVVTVAKNFPSSQLCSCCGYQNKDVKNLGLREWDCPECNIHHQRDINAGINLKKEAIKLLTAGTAGIA

SEQ ID NO: 63522 - protein, 431 aa, unknown
  TnpB Polypeptide
MANRKITYRLYPNATQELLLQDTLGLHCRVYNTLLEEHKRRYDQGLPCYSYVRMAKDITGWRAQVDAVRGINAQSLQNTARRVDRAFQAFFRRLKAGEEPGYPRFKSASRYPGWGYNTHGDGWRLSGSRLRISGVGIIPIRGKGRFTGVPKTCEIIRKLGKWYASVTFDVEADQLQRSSGTGVVAFDWGLKSLLTMAHEDGSIKTIDNPRFLRSKLDALKKLQQVIAAEQARIKLRLGIASDAKLSHQSYTCKLKRLYRQVGSLHHKVANQRHDFYHKLSTILVTTFGAIATEELDTKEMVKRPKKKQAEDGTFLPNGANQKSKLNRSIHDSAPAKLIQMITYKAEEAGTWFGQAETKIVKPTQRCHKCGTLVPKELDERWHTCPECYTHCDRDANAAQTLLRWFHEGYFWLGTSHADGSRRQQETPSIAA

SEQ ID NO: 63523 - protein, 419 aa, unknown
  TnpB Polypeptide
VEQDQVIKARHCILRLSVADQGRLKTVQQEAARCWNDILVIAKAHYDAGNGWISKGDLQKSLKKGYRLHSQTIQALTDRFCANRLTAAENRRQGLNTRYPWREKRFVTIPFKQMAIKRTPVGTLKLALSAGDSVDTGLIISEEINTCEILWRKGRYILSYTSEFSDAEPVPGIRAGIDIGEIHPVAVVAEDGTGLVVSGREIRAVKQQRNKSLGWFSRALSRCAKGSRRRKKLIRAKGSLKGKTDAQVKDLLHKATRKAINWCIDNGVAELVIGNPAGVQKNTKKKKRLGRKSRQKVSQMETGRIKQYLRYKAKESGIASCFVGERGTSSTCPVCGHVHKPKGRTFRCSRCGFTAHRDGKAGFMMLWKKHPTIPLPESFKIQHVQSFPKYRKSACVDGPDVVPSSLAIADSLLCERLAA

SEQ ID NO: 63524 - protein, 362 aa, unknown
  TnpB Polypeptide
MWGQADKGSEMIQRQLKLRLTRSQEATLQEWLPTLASIWNWSIRKIENDAKGGIYYSPNKFQNLLAGTSKTLGIPSHTIQGMLSLAHQSWQRCFRRVARKPRLKGKRNRLNSIPFPDPIGRPVDNKIKIPGLGMVRYHKQTLPEGKIKQGRIVRRASGWYLCLFIDTEPNNIPVVGHNIIGIDPGYKTLLTLSSGEKISHPKELQRNIKRLGQAQRGNSKRLAARIQERISNQRKDRNHKLSRRLVSENAVICFSKDNLRGLSRSGYGKSVAAASHGQLRSMLAYKSSRTGDRRYIEVPGKGSTRTCSHCGASTGPQGRAGLSVRQWECSACGTHHDRDVNAAINTLIAGVGTTHEEMRHAA

SEQ ID NO: 63525 - protein, 403 aa, unknown
  TnpB Polypeptide
MKRLQAYKYQLKTNCTQERLLRQFAGSCRFVFNRALALQRENHEAGNKFIGYVAMAKLLTEWRHAAGTDWLSDAPVHPLQHALKDLERAYKNFFAKRADFPRFKKKGQGDSFRYPDSRQFKVDQINSRVFLPKIGWVCYRNSRAMEGAPKNLTVSRNGQHWFVSVQTEREIEPSAHPSTSIVGIDVGIAKFATLSNGTVFEPISLKKYQRRLARLQRTLSRKKKFSSNWKKAKSKITRLHTKIANTRIDYLHKTTTAISQNHAVVCIEDLKIKNMSKSASVPIDKPGRNVRAKFGLNRSILDQGWFEFRRQLEYKQIWLGGEVLVVPARNTSRKCSVCGHTEEGNRTSQARFSCLACGHEANADVNAACNILAAGHAVLACGEMALSGFSMNQEPTEAIQVYA

SEQ ID NO: 63526 - protein, 459 aa, Micromonospora sp.
VKTIQAYRFALDLSRGQERAVLAHVGAARVAHNWALAQVKAVMDQRTAERSYGVPDEQLTPSLSWSLAGLRKTWNAAKPEVAPWWAEVSKEAFNTGLDALARGLKNWSDSRKGRRAGRPVGFPRFKSRRRTTPSVRFTTGAIRVEPDRMHVVLPRLGRLKLHESARKLARRVDNGTARIMCATVRGEGGRWHVSFTVEVERAECIPARPDTVVGVDVGIKHLAVLSTGELVPNPRHLVAARQRMLSLGRSLSRKSGPDRRTGRRPSKRWERAAARLGRAHARVANVRRDGLHKLTTRLATTHGTIVVEDLNVAGMMRNRRLARHIADAGFAEIRRQLAYKTSWNGGRLLTADRWYPSSKTCSGCGAVKTKLALSEREYECEACGLVMDRDRNAALNLAALAAEFDTAGSGSVAARGADQKTHARGQVAVKREPGTASAGKTGTVPPQGGTTDRALTKAR

SEQ ID NO: 63527 - protein, 419 aa, Micromonospora sp.
VLLRYNFRVCPTPGQQLELARAFGCARVVFNDGLRLRQATREAGGKYLSDGELSRRLITEAKQTPQRAWLSEVSAVVLQQALADLNAAYRNFFASISGERTGRKVASPRFRSRKDNRQAIRFTKNSRFRILDNGRLRLPKIGDLHVRWSRALPSEPSSVAIIRDAAGRYFASFVVQSGQDEALPPVDSEAGIDLGLTHFAVLSDGTKITAPKFLRRAARKLKRLRQALSRKQRGSQNRKKAVKKVARAHARVADTRRDWQHKLSTAIVRENQAIYVEDLCVVGLSRTRLAKSVHDAGWASFTAMLEYKAARYGRTFGRVDRFFPSTRRCSDCGRINGKMALNVRAWDCPCGAGHDRDVNAALNVLAAGQADNGNDRGAQVRPGFVPAPRREAVTHPDATRSARSVAGISALQAGEDVKS

SEQ ID NO: 63528 - protein, 386 aa, unknown
  TnpB Polypeptide
VGDCMTLIQENIRVRLYPTEEQKVLIDKTFGCVRFVYNQTLEKCKQLYEQTQHFPSKKERSANLVLLKNEYEFLKEVDACALQKSVKDFDLALDNFFRNKNYFGFPQFKSKHKGKQSYRTPGGRSNVGILDNKHIKLPKLGSVKTKRFDMPDVYKIFNITIKRTNTGKYYASICIETEVQPLPKTGQQAGFDLGLKDLLIGSDGSRYERPKFDYANKDKLIKEQRKLSKMRTKLERAKLNLDECKNYQKQKHKVAKLHEHIANSAKDFNHKLSRKLVEEYDFLAFETLNIEGMRKNHYLAYSISDVRWSQLLNFIQYKCLWYGKELKRVDRFYASSKICSECGTYHKDIVNSLSVREWICPDCGTHHDRDVNAAKNILIQALSVGV

SEQ ID NO: 63529 - protein, 382 aa, unknown
  TnpB Polypeptide
MTVIYKGIRVRLYPTEKQEVLINKTLGCCRFVHNKTLENCKQSYEQTQHFPSGKERSANLVPLKEEYEFLKEVSAISLQQSVRDLDSALNNFFKNRSHFGFPKFKSKHGSKQSYRTPYSNNSDGILDNKHIKLPKLGKVKTKRFNMPDVYKLCNITVEKTTTGKYYASICIETEVQPLPKTGKPIGFDLGLKNLLIGSDGTRYERPKFSYVFKDKLAREQRKLSKMRTKLERVNANLDECKNYQKQKHKVAKLHEHIANCAKDFNHKLSRRLVEEYDLLAFENLNVEGMKKNRYLAYSISDVRWSQLVNFIQYKCLWYGKDFRQVDRFYASSKICSECGTYHKDIVNSLSVREWTCPDCGTHHDRDVNAAKNILNQALSVGV

SEQ ID NO: 63530 - protein, 414 aa, unknown
  TnpB Polypeptide
VPREKHYLTAKIKLHPNIEQTEALWIISDSARRLYNLALEQRKSVYSHRKHDVSMFEQKRELTYLREEYFPELHSQTAQEIIRDLDEAYKSYFKHYKTDKSTRPPRFRGYKYFYTLTYPQASFHLEDNAIILHNPKDWLRIEFAEGYRNIERVKKIKQAEICQHEGEYYACISCEVIPERQKTTGKEIAFDPGSITLLTGYDGEQIVEVESKALKKTAKYYDKAMDKIRSKIDLSKPGSKRHRRLIQAKRRTLKKRARRMKQINHCISKELINMGYDAYYVGDWSKKETLADTGIPVVDKKINRVVQNELPVGILVDYLRYKANLKSKQVEKVNEARSTNTCSCCGHVGKKLPITIRTFRCEKCGLKLNRDENAAINLYRWYAAPLTGPAPIKSRMSIKFVFGRYNKCLVQTSA

SEQ ID NO: 63531 - protein, 423 aa, Nocardiopsis sp.
VSHKQGVRFEPAPTGEQAVAMGRHCGLSRVVENFCLETVRKKYAQRKAEESYGITGEDLTKVPWSAPALEREWRAAHPERYPWFSQGGLSSRIPKEACRVRAAGLKNYFASRDGKRKGTRLGWPRWRKRKHGSRFRYDADRAKPLDARTVRLPAIGDVATREDMSWLTDRTATGKARILGATVREQAGRWWVSFQIEVDRDEVNKRRRVEAGAPACGVDLGLKTFAVIANSDGTTEEIHAPRPLKAAQRALKRAGRRLARSAEGSKNRAKARKRVGLLHLRVADRRRDFLHKTTTRLTRTKSAIAVETLNIKGMAKNRRLARAISDAGFAEFIRQLDYKADWYGSRIWKADRWFPSSRTCGDCGRVNRALALADRTWACPGCGTVHDRDANAAGNLLDAMLKHSEKQLAGKLPGEEKCLVETA

SEQ ID NO: 63532 - protein, 391 aa, Chloroflexia sp.
MERDQAYRYRCYPNAVQRHELARTFGAARFVYNWALRERTDAFYERGERMSYVQSSAALTALKQSEGHDWMNEVSSVPMQQALRHLDTAYRNFFAGRSRYPAFQRKHGKQSAEYTTSAFRYRDGQITLAKMDAALKIRWSRPLPPDVKITTVTVSMDAAGRYFISLRFKRPVQPMRPVDGAVGIDLGITSLVTLSTGEKVHNPRHTKRDAKKLAQAQRKLSRCQTNSNRRAKQRKKVARIHARIQDRRSDHIHKLTTRLIRENQTIVVESLAVKNMVRNRTLAQHISDAAWGELVRQLRYKADWYGRTLVEIDRWYPSSKRCHACGHVVAALPLDVREWTCPACGVVHDRDLNAAKNVLAVGHTVTARGEGVRPKRFTAAASFVESGISLL

SEQ ID NO: 63533 - protein, 193 aa, Okeania sp.
MQYFKTKLKVNNYQKTILAKHAGVARHAYNWGLATCIQKYESTKKRPSAITLHKRLIAEVKSENPWYYEVSKCAPQQALRDLDRAFKNFLTIPQRGFPRFKKKGKKDSFYLEGSINILKGNYIKLPRIGIVKTYEILPSVPVKNVRISKRAGDWYISFKYDYQPNPTTKSGCDPATTTARLRNAHQVNEMLSV

SEQ ID NO: 63534 - protein, 269 aa, Okeania sp.
LLVIEAKLKGSQHQYKVLDEMILTGQFIRNSCLRYWIDNKNVKRNDLQKLCAVLAKDNNFPWVKKLNSQARQAAADRAWQSIQRFYNFCRLKLPGKKGYPKFKKFTRSIEYKTTGYKLSPDRKKIEFKDGFKAGVFELWTSRDLVWYSEQQISRVRLVKRADGYYCQFLVNAERKETHNFEGNVVGIDLGLNAFYTDSNGDAVENPKYLSSSEKRLKKLQRRVSRRHEKGKKPQSNNYHKARKQLARQHLKISRQRKDHAVKTARALIQ

SEQ ID NO: 63535 - protein, 355 aa, Okeania sp.
MQSIKTKLKVNNKQKTILAKHAGVSRHAYNWGLANCISEYKSTQKRPSAITLHKRLVAEVKTKNPWYYEVSKCAPQQALRDLDRAFKNFLNIPKSGFPKFKKKGKKDSFYLEGSIKIIQGNYIQLPRIGIVKTYEILPSVPVKNVRISKRAGDWYISFKYECESKPPAKKRDVIGVDVGIKTLATCSDGTKYANVKAYKQAKKRLTRYQRRVKKKEPGSKNRAKAVKRLAKAHKKVADIRADALHKLTTWLAKNHSTIVIEDLNVSGMLKNHKLASAIADCGFYEFKRQLTYKCEWYGSKLVIADRFYPSSQLCSHCGHRQKMPLHKRTYECSNCGFTADRDFNAALNLENYVHQ

SEQ ID NO: 63536 - protein, 432 aa, Cyanobacteria sp.
MLNLTYSYRIYPSLDQEAQMLDWLEQCRRVYNYALAERKDWINSRKCPVNACSIRQEYIIPAEAPYPDYYKQQNALTKAKEEIPELKAVHSQALQAALKRLDKSFKFMAERGFGFPRFKKFGQYRSFVFPQFKSNPVKGFETAVATTEGTPATRCLIKLPKIGVMPINLHRPIPEGFEVKQVRVVFKSSGWYAQLILQADVSVPEPMPQGEPIGIDLGLERFLAVSTGELIERPRFFVDLQSQLRWLQRKLRNKEKGSANYRKIQAKMRALHEHIHNVRREFHFLTAHRLCDSAGMVFAEDLNLKMTSRGMLAKHCLDAAWGSFLDILKWVAWKRGVYFAQVDPNGTSQTCPQCGAQTGKKELSERVHHCRECGYTTDRDVAAAQVVEQRGLVLVADGQSVILPVEEGCLGTPMKQETPTARKGSPRSTRSG

SEQ ID NO: 63537 - protein, 285 aa, Hormoscilla sp.
VQLVQQHIVNRNHPYWSYFDQQCFLANYHMRQHFFGTRSVMSFTALYHLVSKSQAYYSLPNTKVAKQVTRRVHKTWLGYKAAHKDWQKHPEKYIGEPRIPKYKDLTKGRYMLVFPLETVSKPPLRKGIVKLTPCPIQFSSGLLDVAEVRVVPKSGCYVVEIVYEQEEANVVSGDAVAGVDLGLVNMVTLTTNQPGVAPLLIKGGALKAINTYYNKQKAKLQGDLETRHSRFVSRDAHPVVSLLGQASDRVGVSGHDHRVKRGLYKSELGLLNADVNGSYNIIRKV

SEQ ID NO: 63538 - protein, 514 aa, Hormoscilla sp.
MGSATYQTRLPDNLIPFGVAMGNLMSEVERSLYVDLQSGEALKDLKRRYQVEFGINARLVSESAHPCRASDRVGVSGHDQFNSVHAVLKGKIKSRKECHKRQIKELKQRITGLKKKIKSLTKGIKKAPKACPIKRKGYTVKQWLKFQQHQKKRHLVTCSSRLKKLQETEPTIIFGGRKLWNAQFNLEANGYANHSEWLKDWQQHRNSQSFYLGSKDETAGCQIFQLDTEGNIKIRVPKALEGAHGQYVTASGINFNWGQDDAIAALNQDGGQSLSYRIAQKNDKWYLFVTIDRPEVPFISSRRNGAIGVDLNPGVVGWAYCDAEGNLVDRGQFKVNLQDQTSAQTEAILGDLVKHIVQRAETWGCPIVVETLDFSKKKATMKEQGTRYSRMLSNFAYSKFDQMLLSRCDRFGVQLMHRNPAYSSTIGMVKFMSMYGLSSDTAAALAIARRGLGLKERIPSRNALGGQVDTSKHVWSHWNALRKGLPFRRHDLFTSRVANSEPVVKLSVDPSPEL

SEQ ID NO: 63539 - protein, 594 aa, unknown
  TnpB Polypeptide
MTQLTEQFQIPDEYHDACDRLTVLVQKHAQRLLVEEYWRDEHFAAISDHTGQSYTYIRDTDRDDFADVDEYVYDRFKRCVYYRVTHVLDAHADEFQAFQFVTDTVTERKIRRIGWYRLRKRLYDEQSPYIEWRVLESVVEQLNSFYDIHGRFPERYTELVKTPEPNGTLPYGPDKGDYHIHKLAIEGGDLRFVLNAPDTLSPESYHDWTKHKLRFPTHSRFQQLLDAGDLKAPTLHASENGYTLDVPVAVPDQDVETVGDRVLAVDLGVKKQATAVVLDSGDGTHEQVTPPQFIDHPAKNKLFRLKTDAEGINDRLTELRRQGKAHTDRFDHLLSEYRQTRQKERRLREQIQHDVANQLVWLAAENGCETIVFESLGQIDSGDTSGAVAWSISSWARGELLDNVVYKAELLGIGFETVNPWGTSRHCPRCGEHGRTVNAPNDHKECRHGGHFHCTECGYQCDRDVVGAINVGRKYLSHRKMEEANPAAYMATGNHASVPSSREGARSTGVQSATDQQETASGRQTRLSQFRAMPLTSDGTASVSTTKHGERDMSGLHKNHGSDTGLRWPRGSVTQSVLASTTDCGRPLLNPTEN

SEQ ID NO: 63540 - protein, 406 aa, unknown
  TnpB Polypeptide
MYYAYNYRLNPSDAHREELDRHRDICRQLYNHTLYRLNEYQDEHDELPSMTTLRSELPDLKEWWGDLSDVYSKVLQTVVERLFDNLKGLSKLKENGYGVGQLKWKPPREFRSFTYSQSGFKLNKKGGQVVLSLSKLGDIPIRLHRAIPDDATLKQVTVKKEPTGEWFATFGVQLDQEPPEPPENPETCVGIDVGILKYAHDTDGTAVGSLDLSDERDRLEREQRNLSRKEHGSNNWEKQRRRVAECYQQLKRKRRDFLHKLSNYYAREYDLVAVEDLNVKGMLESPSNSRNTASAAWRTFLSLLEYKCDREGTQFVAVNPRGTTKECAACGVSTDKPLWVREHSCPACEFEADRDANAAWNTLSRGLEKVGVGRSELPPTTTVPAKRVVEAGSPTLKKRTASAVSE

SEQ ID NO: 63541 - protein, 511 aa, unknown
  TnpB Polypeptide
  misc_feature (432)..(466): Xaa can be any naturally occurring amino acid
MQTGRSFAAHFEDDASREAYLTWSAAQMLVYNAKVEESNYFWKFRCKFWSPEPLPKPDQKYAHLVNPDTVPWVKEVPSAVRGIGAYRFFQAMTRFMRGLSKRPHRKPIRNADRQLTLTRDYFSVKQVSQKWWELTFGPKKKTAGRIRFRAHRRFEMPAMVMITCTNQCLQLGFSYEDELTEFPETEEEILARLRKLPPEELTERTIGGDVGVKIRLQLSSGESFNLSEIEKTRIARKDFGRRRHQRRLARMNPGSSNYRKQTRKIAKTYVYEKNVNNNFCHQTSHKIAVMEGIEVVALEDLNVAGMVRRPKPKYDDKGRAQPNGAAAKSGLNKAVTKSRFARLRTSILYKCRRNGKVAVFVNAKNSSRECSKCGYTAKENRPSQAVFCCGREGCGHEENADLNASRVIKNRGVKMILEGLVKKKESKKLLRXXXXXXXXXXXXXXXXXXXXXXXXXXXXXXXXXXXNRGGFESGSRRREGLRIKKLRPSGRGVITQSCIVSAMTCLRAFGH

SEQ ID NO: 63542 - protein, 578 aa, unknown
  TnpB Polypeptide
MQRTFATRLPPDAARDSVLAAYAALYGRAERTLFARLRAGRSLAATKREFLVRFGLTARQFNALAASLRGNIQSIQARRPGLINTLERRIDRARRVLATVPQGTRTYHQKQRRLGALQRRLTVLQTEAAVGSVRLCFGSRTLFRRQFALAANGYASHDAWRREWRAARASQFFVLGSKDETAGCQGCVATVEPDGTIVLRLRLPNACASRGKHLVLAGLRFRYGHQAVVAALGRNLSPDTHHWEALSWRFVQDRKGWRVLATVSVPAGPRRSMEHLGVVGVDLNADHLAVTDVDRFGNPIAAFRVPCPTRGKRHHQVRAIIGDAVGQVVTYACLQQKPIIVERLQFDDKKAALEQRGARCARMLSGFAYAALHAIIAARCDDAGIALRRVNPAFTSVIGAHTVAARYGLSRHHAAACAIGRRGMHLAERPPRRLGDHVTVPLPVRNRGTHVWSFWRQVARRDAALRAHGRPGPPGPDPRWHRLRDLDGARLSVGSIAPAGRLLHLPVELRHANRQQHCSAGVWGQVPYVRRIRNGGAPLPDVVMSRHRGARRVSTRVARVSRAPLTRGGAGPIMCGSR

SEQ ID NO: 63543 - protein, 404 aa, unknown
  TnpB Polypeptide
MLVKGVSFRLESGLPSEAKFLLEDFRLAVNNAIRAGLQARVTSRNALCKIAYRDFREQHPRMYAQHLVSAFEVAGSVLKNHRRRFRKDVSCRTPFVKRLMMKAENQAYKLNRKSGVIDLPIRAGCRVELKLIVSQYHRKYLDDMSLSLGSLTVLPDRVIVTFRKVAPKPYAPDSVISLDTNERSLDGLFVEGDVAKAVKADFSEVAIIQRRHHDRRKRLQKKKSHDRRTSRILCRREGTREHRRIDYRLHQVADSVLEFAEERKSAIVLEDLKGFNPKRSKELNRRLSMWPRRKLHQIIEYKAQWKGVPVVKVDPRNSSRTCPICGRIQDSRMGTEFKCECGWRLDRHINASINLLQTAISKGMAGGLRFDPGAFQHDVMMILYEPAMAARSEPNGTSGIVGVT

SEQ ID NO: 63544 - protein, 409 aa, unknown
  TnpB Polypeptide
MKKTYKYRIYPSKTQEQKLETALDQACFLYNQMLDIKQQIYLGEEISLTEFDMNNIIKDFQTPALHSQVKQNIPKRISEAYKHFFRRVKSGETPGFPKFKKRIFYSSITYPQYKGNIKEGKIRLSKIGNMPIIEHRKIDGRTKTLTVKKENNEWYVTVSCIDVPIETTVPEFTSEVEGIDVGIKEFLVCSDNTEVANPKWLRNNESTIKKHQRRLSRKKKGSINRKKARIKLSKYHSNVGKQREDFHKKLARNLAMKIEYIGVETLNIKNMVKNHCLAKSISDAGWGKFFSYLKYYKTIFPGAVVEIGTFEPTSKTCSDCGHKQDMPLKERTFCCESCGMIKDRDLNASINIKKLAVKKLIAQEIKLNTVGHTEIYAFGDSVRLQSTIVEPVAVVVELGTTQREALKCR

SEQ ID NO: 63545 - protein, 475 aa, Homoserinimonas sp.
MAKATGESPKRQYCEKQGLDQVERGTTLEPQHSQTKGWARYRYRIYPNALQQEMLARLFECVRLVFNDFLAANDAHVKVGPRRQYRNNFALSPSLIAQAKNRPERACLKEVPAAPLQQALADGHQAYRNAFDSATGKRKGEKIHFPKFKSRKDNRQTARFTRNTCFAVRPISSNRAMLRLPRMGDIDVVYTRDLPSEPTSVTIIREADGRYHASFVVTRETTSLPPLDRVAGLDLGLIHLATIVYSDGTREKIPAPQHFRKRERKLARVQRLAARQKERAKRAKVREAAAVKEGRATATEPTPTGHRSNAHERARRKVASAHRKVRDARSDFHHKLADRIVHENQVICLETLNITGLARTRLAKSIHDAGWGALIRLIEEKAARYGRTVIRIDRATPTSQTCSVCGINGGKKSLNVRAWGCSACGAWLDRDYNAAVNIIVAAGHAEMLNAGGEDIRLRLSEATPQRNPKQRISVP

SEQ ID NO: 63546 - protein, 267 aa, unknown
  TnpB Polypeptide
MEVRNMIKTIRVMLIPNNKQKSKLFQYANTARFAYNWALAKEQENYKDGGKFLSDVNLRKEFTKMKQTQEHAWLNNISNNVTKQAIKDACDAYKKFFKGLTKFPKFKSSKKSTPSFYQDNVKIQFSETHVKVEGFAASKKKNKQKLNWIRLAEHNRIPTDCRYTNPRIKYDGLNWYLTVGIEYEDSTAIPSNEGIGIDLGIKDLAICSDGNKYQNINKTQRVKKLEKQKRRLQRSISRSYEKNKEGEKLLQNKKYNQKGKAFIKIKS

SEQ ID NO: 63547 - protein, 379 aa, Borrelia sp.
MSANKAYKYRIYPTTNQKKYFSKVFGCVRFLYNKMLSDKKDYYEKNKKSLSVNPSNYKNEFPFLKEVDSLALCSAWIDLNSAYSNFFREIKKVNRTQGFPKYKSKKNRQTFRTNNQKNSIRIENDYIKLPKIGFVKLVLHRKIKSNEVIKNVVVEKDTDDKYYISVAVECLDVKNNDKTKCNNNKKEIVGIDMSMRHFLVSSEGEKINHPKYLLKNERKLKKCQRKLSKKQKGSRNRAKSRLRVAKLHRKISNQRKDFLHKLSYYFVANYENIAIENLSIKGMQKGMFGKSVNDLGWHEFVRQLSYKSEGCGAYLHKVDRYFPSSKLCNNCGIKNTTLKLSDTRWTCIGCNILHDRDINAALNLKAYYYKEIKTKAGTT

SEQ ID NO: 63548 - protein, 296 aa, Crocosphaera sp.
VAFSIIRGVKKRIPLAIHQSNHTNTLDKVIAKEAKKRCDPGDSQSPRECAPRKGSLKLWKSKKNIWYVLLSVSMDVPDAEPVKNWIGVDRGQNQIAVASLPSGFGKFWNGGQIKHLRRRYQKLRKQLQKANKRKVIKRLESKERRIITYINHCISKQLVQFAKDYGMGLRFEDLFNIRQTSKQSRKVRSDAGNNRHTWSYFQLETLTRYKAIKNGVPFELIPAPYTSKSDHRNGVIGKRNGHWFRGFDGYQCNSDWNASQNIGQWLGFSCPLDLKKTVFVMDADGLKDGVNGSPLN

SEQ ID NO: 63549 - protein, 472 aa, unknown
  TnpB Polypeptide
MSSIEELKYHLVFATKYRYNIISVKIAILLKNYFLKQQKKLDFQIISLAIESNHIHMLFQLNSSTQDLNEIIRKLKGGSSFLARKTFKSLKRYTALWTPSHFVASVGNVSKETIQNYINSQGIEDELIQRTFKYKILTPTKHKLEKLKTYFQECSSKSRNIVPSSIYQDFEFHKVCCQNNELNLYVRQQNSRIEKQDTKLAKYWIKIPGSRLSDPFWLGLQGRDIPEDAILKDSLIQEKKGVLYLNLVIEQKRTIQRVNPGNLLSIDLGINHPIASVILKDGHMSNYKFYGSELKNLLFRRERRHAQLQHSGIEEPHSSYTSKINNLLHEYTNSIIQLAKENNLSIVVGDLTGIRKNFTVDKSTKETRKKVNRTPFYKIKMLLEYKARLAGVPLVFVCEAYTSQRCSKCGEINKDSRKGERFECVSCGHKNQADLNGAVNIGSLVGLLSSSHSTLREEFSSESKPMALAMGK

SEQ ID NO: 63550 - protein, 179 aa, unknown
  TnpB Polypeptide
LRAALQRKARKGTRSTRRRCRELLQRLSGRERRFQTWVNHHISKSIVARAQATCSFIALEDLTGIRERTNQQPRSKVERRRSNNWAFYPLRQFVHYEAARAGIQVVVAPPAYSSQTCHRCLWLGQREGKRFRCVNPVCGWEGDADFNGANVIALLGSHFKQVCNIRLYLQTLSWKGIQP

SEQ ID NO: 63551 - protein, 370 aa, unknown
  TnpB Polypeptide
MKRTINLKLTLTQEQSDALLETQKVFANACNGVVPFSVENRCWNRVALHHLCYYSLRGSFPSIGSQMVCNAIKKVCSSYKVLKIKRDQDVPTINFREAGSVHYDKRTFALKGDVLSLFTVNGRIKCTFKLGNFQREYLKESVVKEAELLRKGKRWFFNVVLDIPDVPTKKDGTIIAIDVGENNIATTSNGTIHKGNELRHKRDKFLARRGKLQSNGSRSAKRCLQRISGRESRHVKEINHIISKAIVNEAVESDAKVIVLENLKNIRKRIKGNRRMRSRLHRWSWYQLMQFIEYKAMAHGISVVYVNPAYSSQICSFCDCLGSRHKHLFKCSSCGNYQHSDVNASLNLLKFGESVVSSMAPVNAPMVAVS

SEQ ID NO: 63552 - protein, 193 aa, Clostridium sp.
MAKNKELYELYKQDLIPKEKAFMSANDFDKYINNEVKVYVSVVIDVHMPIVSKNTNEGIGIDLGLKDFAICSNGEKYKNINKTEKIRKIEKKLKREKKKLSKKYENLKKKGVTATKSNIKKQIVKVQKLHHKLDNIRTDYVNKTISNIINQKPKFITIEDLNVKGMMKNKHLSKYVPMASGEFTTVKYYIKCK

SEQ ID NO: 63553 - protein, 548 aa, unknown
  TnpB Polypeptide
MAALLCRLERKLYAEIAANTADVKMLKRRFIAEDGISARQFNALRIRVEGAIKGVQELLKTQIEETEVRIKAQDTKIKKLEKKDVAAKKTVKSVDAAKQTKGSINAFGVMDQAKIRLQLHQRKRRRAILIQCADVLRARLAAPTPGICFGSRKLFNAQFSLEANSYDNHAEWRSDWQNARADHIFCVGSKDETAGNQTCQGQVTADGSISLKLRLPDALAGEHGKHLRIPGLRFRYGHKQVQAALAACVRKEGQAVTWRFVRDVKGWRAFVSINESYAVTCGDTANGAIGVDVNADHLAIAVADGNGNPVSFRRISTPVLGASADQRKAIYGDAAKIIIDMARAHRVPIVLESLDFRKKKAELETSTTPRYARMLSALSYAQIGAMIRTRATRSGVRVIERNPAYTSLIGSTKFSARYGVSVHLSAALAIARRGMSLSERLPRQPSITLGGDVHVTLSQPARIGRRHVWVSWAQLARSRKAALAGRSRSAKRRSSAARSLDPAAERSLNQDGTFLSQLINSEPAGESPAAKSSSALLGRRTDLKATCA

SEQ ID NO: 63554 - protein, 406 aa, Noviherbaspirillum sp.
MQRLQAFKYELMPNGHQERQMCRFAGSCRFVFNKALAWQKGCYEQGKKKLGYAGLCKLLTEWRNSTETAWLADAPVHPLQQTLKDLERAYTNFFAKRADSPRFKKKGHSDSFRYPDPKQIKLDQVNSRLFLPKLGWLRYRNSRDVLGSVKNITVSQSCGKWFVSIQTEREVDQPIPQGGAVGIDLGVTRFATLSDGSYIEPLNSFKQHVTALRKAQQAMSRKTKFSNNWKKAKARVQRIHSRIGNARRDFLHKTSTTISQNHAIVCIEDLQVRNMSKSAPGSTEKPGRNVRAKSGLNKAILDQGWFEFRRQLDYKLGWQGGWLMAVPSKNTSRTCPCCGHVSAANRQTQARFECVACGFEENADVVGAINILRAGHARFACEVSDAAMPPAAGTHRSDSGTAQRRA

SEQ ID NO: 63555 - protein, 374 aa, Noviherbaspirillum sp.
MPTLTSSKEKVVRVLRLRIKDKHAAALRDKAYWVNQVWNYVNELSFKVWERERKFLLGYDFATYTKGASKAGVALHSQSIQAIAEEYANKRKQARKVKLRWRVSGGSRRSLGWIPFKATALRYRNGQLWLSGIDKPLGLWDSYGLSGYDLGTGNVSEDARGRWYINICATPKAKPMQRPTLFSDSVGVDLGLKDFVATSDGAVIEAQNLYRALEAKLRVAQRAKKTNGTRAIHAKIANRRKDFHHQLSRRLVDSYAAIFIGNVNAAALAKTRLAKSVMDAGWSQFRTMLKYKSAYAGVWFEEVNEAYSTVTCSDCKKRTGPIVREGLRIREWTCSGCSAHHHRDVNASRNILALGLGRLAGGIPVLTAQAAAEG

SEQ ID NO: 63556 - protein, 333 aa, Micromonospora sp.
LAGAKSYPVVSVPGVGHRDRLSVVQAYRFALDLSPAQERAVLGHAGAARTAYNWGLERVKAVLNQRAAERSYGIGDDQLTPTIGWSLPALRRSWNAAKDEVAPWWRDYSKEAYNTGLDALARALKNWADSRSGRRASRPVGCPRFRSRRRSAPSVRFTTGAIRVEPDRKHVVLPRLGRLRLHESARKLARRLEAGAARFLSATVRRDGHRWYVSFTCEVQRAPRTPARPCATVGVDLGVRHLAVLSTGGPVPNPRHLDAALRKLRRLSRGLSRKVAPDRRTRRDASIRWQRARGQLGRVHARVANLRRTATADKTGTVPPQGRTSNHALTPAS

SEQ ID NO: 63557 - protein, 402 aa, Salmonella sp.
MKRLQAFKFQLRPDGQQEREMRRFTGSCRFVFNRALALQNENYEAGNKFIPYTNMASWLVEWKNSPEMQWLKDAPSQPLQQSLKDLERAYKNFFQKRAAFPRFKKRGQNDAFRYPQGVKLDQKNSRIFLPKLGWLRYRNSRQVTGIVKNVTVSQSCGKWYISIQTESEVSTPVHPSASMVGLDAGVAKLATLSDGTVFEPVNSFQKKQKKLARLQRQLSRKVKFSNNWQKQKRKIQRLHSRIANIRRDYLHKVTTTISKKHAMIVIEDLKVSNMSRSAAGTVSQPGRNVRAKSGLNRSILDQGWYEMRRQLEYKQLWRGGQVFAVPPAYTSQRCACCGYAGKENRLSQSKFRCQACGYIANADVNGARNILAAGHAVLACGGRVQSDRPLKQEPTEMIQATA

SEQ ID NO: 63558 - protein, 407 aa, unknown
  TnpB Polypeptide
MGDEMKKLRAFKFQLKANSLQQTKMARFSGCRRFVYNKALGIQKERLGRSERAANYAGLCRSLTEWRHAEETAFLAEAPTHPLQQGLKDLEKAFTNFFAGRAKFPRFKKKGRGDSFRYPDPKQIKIDERNSRIFLPKLGWVRYRKSREIAGNIKQVTVSQSGDAWFVSIQTEQEVVGQVHSTGSAVGIDLRVTKFATLSDGTTYTSKVEHRKYERKIAREQRRLALKQKFSENWCKQVKKIQRLYGCARNSRLDFQHKTSTSICKNHATVIVEELNVKGMSASALGTLENPGNNVRAKSGLNRSILNQGWSEFRRQLQYKLEDAAGLLVCVPAKYTSVKCSKCGFTCKENRRSQANFSCLECSHAENADLNAARNILAAGLAVIACGETPLGISLKQEPTVSARALA

SEQ ID NO: 63559 - protein, 433 aa, Sulfolobus sp.
VSKSLRLNDFQPEEEYVYLTYSIKNDKKEETKILLENYRALLQKALDWLWERTKIEKKEVKKGKRAFTKVKVKLPKKKEVYKKLRDELEKINVLASHYVDKAISDAYSILRGWKRRAEKGQASLRKPTLRKVYVRVKSTLRKVEGEEVRITVRPFEYVTFSWSRTWFSRRVEGLELGEPIIKDDKVHLPFRYKLPWFTPLDFLAIDSNLYTLDAYDGDKFVTFFLKELYSLKYGMELKRSRIQSFASKHGRKGKELLRKYSHRERNRVLDYVHKFVNKLLEMYPLTMFAVEKLNKQEMFRDANDKLSKRISRTVWRTIHRVLKYKAPLYGSFVKEVNPHLTSKSCPRCGWVSRKVGRTFHCERCGFTLDRQLNASLNIYLRMCGFPHLFFTPTGSRWVGVIPLKGRRGMNGAMPRDSSEAQRLRIDIKYYEIL

SEQ ID NO: 63560 - protein, 394 aa, unknown
  TnpB Polypeptide
MANKAIKYRLYPETEQDVLFVKTFGCCRKVHNLMLTDKIGGYKATGKFPVVTPAKYKADYPFLKEVDSLALANVQLNLQSAFRNCFSKSRKKNNGFPKFKSAKHSRRSYTTNNQNGTIALYDNAIRLPKIGTVKAVIHRKPDSNWIIKSATVSQESDGKYYVSVLFEFADTVNTYVADKNNAVGLDYASDGLYVDNYGNVGSNHKYYRESHKKLAKAQRKLSRMTEQNICDYRVVGNKRYPVYKRPLEECKNIQKQKLVIAKIHRHIANQRLDHLHKTSTEIANRYDVVCVESLNMRSMANHGFGNGKATLDNGYGMFLSMLEYKLSDRNKHLVKVDKWYPSSQVCHCCKTIHPEMKDLRIRTMKCDCGLTMSRDRNAAINILQEGLRILKEAA

SEQ ID NO: 63561 - protein, 387 aa, unknown
  TnpB Polypeptide
VRVLKSVWQYYAPDERTLFFLNQFRLIVNECIRVGLAENLTSLRSLYGRLSQYDLYSKHKLCAINAARGILRNYRKAKRKNPRTKEPYARRLRLTSCYDVEIQDDMLILPLKAKESLRIPLTSHVQTSIANFQVRSVTLTENTLSIAYAKDVQEIRPKGFVGIDRNLDNVTIAASDGTLVQHDLSESTRVKARYRELRSHFKRNDARICRRVSQKYGRKQYEKVKQILHHASKRIVMEAKEKQYAIVMEKLTGIRKLYRRGNGQGRWYRGRMNSWSHDQLRRQIEYKAKWLGLPVITIPPRGTTSKCSICGQKMRPEENRMLRCPSCGYRVDRDVNAARNILEAGRLRFDLIDLASEGVVREPSRQEVIPKLDARKLTLWRVDRTLR

SEQ ID NO: 63562 - protein, 427 aa, Hydrogenophaga sp.
VSSIKAYRFQLRLRPAQGAALRHIAGGLRWVWNQALAEQRARHARGERYAGHAEMCKWLTAWRNAPGTMWLSEGPVHPQQQVLRRLDEAYKRFFAKTGGLPSFKRRGKEPGIRFPDPKQFRLDVANGRIQLPKLGWVRMRMSQEFTGVLRNVSLTREGAGASARWSASIQVQTGETIAALGVAPTLGIDLGLSVFAATSQGEIVAPLKAMAQQQCRLHRYQRAVSRKQKGSANRRKAVARLANLHRKIARQRADWLHKLTTDLADRHPVIALEDLKVKNMSSCAKGTAEKPGKKVRQKAGLNRGILDAAWGEFRRQLGYKTQWRGGQTILVNPAYTSRTCRVCGYEAAENRKTQSAFICVACGHTEHADVHAAKNILAAGHAAWAKEQAPSPDACGGAVRRGRRASAGRAAPVKQEPTKEISHAAHG

SEQ ID NO: 63563 - protein, 444 aa, unknown
  TnpB Polypeptide
MSRTYIIANYFCERLDEYAFACKNLYNSTLYEYRQRFFNHEPLLSAYDMFDVMSTYDSPVPAKVKQQVIMQVAKNIKSFYAKENAKLPKYMNSRTGRANIILTNQAISRIKFNQENKISFNFQNKTFEYDITNLKRKLQLTFDDIKQVRVVYKFKKYQVILIVNKKPKQKTNGSKIMAVDLGLDRIMSVVYGTNKVLFDGKQLKRVNHRFNRSLAKLQSERDLLKNQLIKLQCQLEKMDYDAIFYYEVSIAFDFNEDKYKKLIRKQSHIINRLRKLEKIIARTYENRNNRLKYCLHWLSRRLIELCVSNGIGTIVIGYNKEWKQDINLGKRTNQNFVQIPHKTLIDYIQYKATEYGIVVKLQEESYTSKCSFLDHEPVKKHDIYAGKQINRGTFRSKYGKFIHADINAAYNIAKKAGCDFYLCPSSLCSWPVLKRIDFGSTKIS

SEQ ID NO: 63564 - protein, 381 aa, unknown
  TnpB Polypeptide
MTYLSHKIKLKDITKEQNQYFLKACGVARFAYNWALNQWNQNGNKNSKFNNFEARKHLNSIKRKQYPWMMEVTKCAVQCAILDLDKAFKNHYKNPKHFHYPKFRRKFVHASFTLSNEQFEVNTDKIWIPKLGWVKMCECLRFGKDTKLISATVSHQADGWYVSICVDAEPKSLTIPKTNTKVGIDLGIDTLATLSNGEKHNGSKPLKRLLGKIKKLQRSLSRKQKGSNNWHKAKTKLAKLHLRIRNIRQDCLHKLTTYIANNFHTVVIEDLNVKGMMKNHKLARAISDMGFYEFKRQLTYKIVLRGGKLFVANRWFASSKTCHCCGYKVESMPLSIRNWQCPDCQTVHDRDVNAAKNLVSLLTGSSSALTLVDSQQCLSSK

SEQ ID NO: 63565 - protein, 368 aa, unknown
  TnpB Polypeptide
MQIRKAFKFELIPNSAQVHKMKQFCGCTRFVFNRALTYQNEQYQKDNSFKFSYNKIANFLPAWKQELPWLKNCHSQILQQSLKDLEAGFKNFFAKRSHFPKFKRKGEKDSFRFPQGCKLEQQNSRIYLPKIGWVRYRNSSKVVGEVKNVTISQKCGKWFVSIQTEYEQEIPTPNGGEIGIDMGIVRFATLSNGQYFEPINAFKTLKGKLEKLQKQFKHKTKFSKNWQKLKAKIARLHYKISNIRKNHLHQISNIISKNHAIVYVEDLKVANMSKSANKQKSGLNRSILDQSWAEFRRQLAYKLAWNGGFLFAVPPQNTSRCCPNCGHTAKDNRQTQAGFKCVECGYQNNADVVGAINVLKRGQQIQAA

SEQ ID NO: 63566 - protein, 449 aa, unknown
  TnpB Polypeptide
MSYRTYVIANIHSQHPFFNKMDEYAFECKNLYNSTLYQYRQNFFNGEKLLSAFDMINYLKSHETKVPVKVKQQTIKQVYESVKSSIKKTKLPRYLNKETGRANIILTNQAILKIKFTNENKIAFNYHDFCFEFNIANLIKKIELKFEHIQQVRVIYHLKLYQIILVVKKEPTAQPMVASDSIAAIDLGLNNIISIVFQNQRILFDGKPLKKINHRFNKNLAKLQSKKALLQNRLDKVNKKLDNKMIVSLFYYELNSDVLFNEEKYKKLINKRNRLENEINNLKTKIARLYEKRNNRIKYCLHKLSRDLIELMAANGISKIVIGYNKEWKQDINLGKRNNQNFVQIPFKTLVDYITYKANDYNIEVITQEESYTSKCSFLDDEEVCKHEIYAGKRVKRGLFRSHNGQEIHADINAAYNIAKKAGFNFAQAQKLESFSPCSWAVVRKLKFN

SEQ ID NO: 63567 - protein, 454 aa, unknown
  TnpB Polypeptide
MEIIRALEFPIKKNRKFMAFLHELNSLLNLIIQENLTTCLESSSDYRNFVLGYLKTQNCYPAILDNLYGNKAKYFRIVIEQCRRILLSRAHQQNLLKDIHLDYDEFKKEHKKVSRAEYNNLRKCKAVNLTARVDTLEIDYTTECDQISQVNFKIENRYIHIEFRFKYSDKEDKADSELIQQVSIPLHKFKYIPEKISRPKIILRDQKLVLSFCYMKNSDFLNQTGFVMGIDVGQLKSATAAVINTCGFLSPELTVSDRTQFISDKINVLENEQRLIYDKEQRIFKLFNKETEKCKRLKSHRLHLRSKVSRLKNELACLTARDMISHAKAFKVETIYLENLKWIRDNVHTKWSFSLLHKKIRENAYAENIRVYTVSAKNTSGVNPFTLEKEEINANRQLVKCLFDRDYAAAIVVARRGIKEPINDFAYAVQKPIKPSLRQFKFDSYLGSCNKLPQ

SEQ ID NO: 63568 - protein, 436 aa, unknown
  TnpB Polypeptide
MYHHQFITNSRPDTVRLAHKIELVPNQSQVEYFAKACGVSRFAYNWALANWKSQYKNWKEAETEAKKNGTGHSLSKPNEYELRKQFNAIKNEQYPFVKEVSKCAVQQAIKDLGVAFVRFFKKTSNYPQFHKKGKHDSFYLDNTQFKIMGKKIHIPKLGWVKMRENVRFYGKIMSATISRIADKWFVSIQVDAPFEFLKAASKLYSENQAVSNSEAGESVSKNIKAVGIDLGIKTMATLSYDDTIEKIDSPKPLKRLLSKLKRLQRKLSRQGQKYTMEDYIDANGETRKIRKYSNNYMKTKMKLARIHAKIRNIRQDFLHKLTTRLVETFDVICIEDLNVKGMMANHKLARAIMDLGFYEFKRQLLYKAQIWNRTVVIADRWYPSSKTCSNCGEKLESLELSDRDWKCPHCHTMHDRDANAAVNLRKLYFNNLSVMS

SEQ ID NO: 63569 - protein, 393 aa, unknown
  TnpB Polypeptide
MKLTKTYKYKLKLTKTQEIIVQGWIHTCRAIYNLALDTKIYAYRSNKISLSCYDLQKQVTELRSCGDFEWIKKVPSESLQDVIERMDKSYKKFFSGGGFPKFANRDKYHSITFKWIKQTGRNRVVLPKLGSVKFFDSRIMQGDLRRATITKEIDGYYISILTRQNINVKPATFYSEKQAVGIDTGVAFFLVTSDGEFVENPHFFKTQQKQMRILQRGLARKKKGSSHYKEQKKKIAKLHAKVKRQRLDFLHKAANKVLTYDFISAEKLQLKNMTKSAKGTVEEPGTNVKQKSGLNRSMLDLGLGIFYDIIRYKSLWQGKMFVQVPPQNTSNTCSVCGFSHKDNRKTQSEFICLKCGHSENADYNASQNIKREGIPYFRQRETIVCALEKNPTT

SEQ ID NO: 63570 - protein, 320 aa, Rhodococcus sp.
VRIHPQTGPQDYRWDGADPICDRVVSTRPVAGVVFRRNYSPRQGTPAHRHLCLRRCRWWCGRFGGRRRCGVKHLAVLSTGEMIDNPKHTRKHAKVLRRLQRRASRQIGPDRLTGQEPSQRWLRTQDQIRAVHTRTADARRDHLHKLTTRLVRDFGTVVVEDLNVTGMTRSGGAYKRGLNRALRDAALAEIRRQLTYKTEWTGTRLHVADRWYPSSKTCSNCQVVKAKLPLNVRVFTCDSCGFRADRDHNAALNLAALAAVVDGGASSASCGRDVKDARQKPTIRPAIRRADGIAAGTPHSGERGRGNPAAHAECTKQRSG

SEQ ID NO: 63571 - protein, 153 aa, Bacillus sp.
GRYFVSVLCELEEMATKLALNKIGLGIDLGVKDFATRSDGIVHENINKTIKVKKIEKRLKREQRSLARKFENLKKRGEKSVTNKRVDIDKNVLRVQKLHARLANIRIEYVKSIVTNVVKTKPTFITVEDLNVKGMMKNKHLSKTIAKQSFFCI

SEQ ID NO: 63572 - protein, 423 aa, unknown
  TnpB Polypeptide
MNLSEINTFIYLSLKFIYLKIIKKICDKYRCKMLKTYKFRLYPNNEQEQKLLWIMQQCKFVYNLMLEKLKEEDKQDRFELQNKLPKLKEQHPHLKGVYSKILQYETYRLFSNLKALSELRKRGRKVGKLRFKSLAGFKAIHYNQSGFKIIETCSRCNRLNLSKVGDIPIRMHREFDGKIKQVVIKRFSSGRWFASINVEEDIVIQKQPIKRVVGIDMGITEFLTDTSGKIIESPSYLKKSLKKVKLRQRGLSRTMDKSNNRKKQIFRVAKLHERVGNQRMDFCHKVAKHYVDSFDFISVENLNIKGMIETIGEENISKGAKHHMRRNIFDVSWKKFFDVLFYKAEWAGKTSVKVNPCYTSQIQKYGKSLDRDYNASLNILERGLEQVGQGLSKFTPLEIVPPPELNVVLASTVVELGSRFQNH

SEQ ID NO: 63573 - protein, 194 aa, Glaciecola sp.
MSRKVKFSNNWKKAKAKVQKIHTGIANARKDFLHQATTTISQNHALVCIEDLQVRNMSGSSKGTSEQPGKMVKQKSGLNRGILDQGWGEFRRQLGYKVAWNGGMLLAVPPHHTSQTCPCCGHVSKDNRLTQAQFLCVDCGYANNADVVGAINVLERGYRLLACGESAQSGRSVKQEPAEGRAQKLRSPAGIPAL

SEQ ID NO: 63574 - protein, 370 aa, Lentibacillus sp.
MATQTFLVKLKKLTKKKHQQFCYEQSEFADCVNHCVERIQKGEKLSSKEVRFNLKSTIKNEAIRRAKKAISDYRKGLAKTIPTFRNSIGIKINNQNWNSVRKNGKWYIAFTTNKGKKTLPIVETADGQMYFPFLTPKNREFRGTIELLRKGTDWYVAIPIQVSSELDLEEKHKGVKESMQDYTFIGVDLGLRHIAVLSEPLSGKRQLFSGKEVGYMRRHFRSLRRSLGKKKAQRAIERIGKKESRWMKDYNRKLAKDIVDFARQFDHPMIKLERLDDIRTTCRSMTKTEKSIHSWPFYQLKQFIKERAAKFNIPVVDINPFKTSQTCFDCKHAEKGNRSQEKFKCKKCGHASHADLNAANNIAVSTTLAA

SEQ ID NO: 63575 - protein, 393 aa, Solobacterium sp.
MIQRAYKYRLYPDQAQAEYFNKCFGCARFIWNKMLEDKQNYYDTYHKNLYVTPAKYKNDFPFLKEADSLALANVQLDLNGAFRAFFEKRTGRPKYKSKKRSRASYTTNNQNGTVAVTDRSIRLPKIGYVRAVIHREIPEGSKIKSATVSRTVSGKYYCSVLCEIPADKKAPLIIVENTKVLGLDYSSGHFYVDSQGSTADEPHWLRVQERKLRRAQRKLSRMIEANISCYTGRRVPVYKRPLEECRNIQKQRKKIAVIHERISNQRDNWCHQESRKIANSCDAVVLEDIDLKGLAGALRLGKATNDNGFGQFRRYLEYKMEEQGKYVIVVDRFFPSSQICSVCGCKEPTVKDLKVRRWVCPQCGTEHDRDINAAVNLRNEGIRVLYTNKIQVI

SEQ ID NO: 63576 - protein, 358 aa, unknown
  TnpB Polypeptide
MYCKGLGGLHSQSAQAVADSFYDALKAWRKKRKSGNYEGLRPPYKQKRYFKVQWKSSAIRLRDDGVLRLSNGRRNDPVLIDWPSDRKPKRVEIGWDGDQYELRAQYKVEENEEPRGTKTAGVDIGEIHLAAVYTGDKSWTVNGRELRSLRRQQNRTKAQLDSKIDRKEYGSKKWKRLVRAKDRQTEKIRNQIRDLLHKQSTQLVKTLHERRVGTVVVGDLTGIREGLDYGSNTNQRLHQWAYSKFARMIEYKARLRGMTVERVGEAYTSQTCPSCGSRHKPHGREYICGCGFGGHRDLVGAANIRQKYLGQTESQDRSLRVAGEMASPTGVRYRPHMRCNPASSRKTCSGRQGRRPVG

SEQ ID NO: 63577 - protein, 401 aa, Symploca sp.
MLVLEYKVKAKQAQYQAIDEAIKTVQFVRNKCLRYWIDAPKEANIKRFDLNKYSTELRNEFTFVKDLNSMACQASAERTWLAISHFYDNCKSHKPGKKGFPRFQKNNRSVEYKTTGWSLHKTKRRLTITDKKGIGELKLLGKWDIHTYPVKSIKRVRLLCKADGYYCQFCIDVECIDLQPHAGNEIGLDVGLESFYTDSNGYTEPNPRFLRKAESDIKQAQRRIYKKQKGSTRRRKARARYSKKHLRVSRQREEHAKRLARNVCKSNDLVAYEDLRVSNMLKNHCLAKSITDASWYQFRQWIEYFANKFGKLAIAVTPQYTSIECSQCGRAVKKSLSTRTHICECGCRLHRDTNAALNILHKAKTRVGHTQSNAKGVATSTLLGATLVEQVATVNLESPSL

SEQ ID NO: 63578 - protein, 619 aa, unknown
  TnpB Polypeptide
MAPDLRTRLAQGMTFAQLLERSRHASLLEAAPPEPLPEEVAWVLALVEVQTAEKQPTNPHTFSLSFPVHPKAQDFTEDGERGKRGKMNPRMPKGAAPKLFLGVHARLVFLKEEDERAVLDLMRRFSSATRFAYNRLLEGRDRKELKREDGPLCTLFGLNTRYADGAIEKAQAILDSARELGQDPRKVVFGGRKLFEQLKRKHLSGKALLALKREWKERRQGLLYSRGDAAKKGNANLRLEPQGDALWLRVNLGNGGYVRARVQTSHPHLKALLQRAYASLPYNVTLRLEDGKVYALFTWSEGLPPPVHTKANGVLGIDANGDPYHLALAVVSPDGNLKRHLTLSLEEMDRAPNKGAKELLLWKVAHQVVALAEEHGVAVATERLKYLRKSKRGDGSGRHFRRREHRFAYRSLLEKIHSLARKRGVEVLEVNPQDTSTIGMLKYAPQLHLSKDVAAAYVIGRRALGFEEKLPKGYEALLSDRSFFAHAEGFYGSRLQELQKLKEAEKNPYLRRRLSREMGKARRALSLLLSFPGPQRGRKASLQGSSGSRKGSTDGRNPSGAHPWRVLRVGLFLPLLGLEVPRGLSSLKPILHFTSLPLGSWKGWKTGSGPPPGGWAGVR

SEQ ID NO: 63579 - protein, 491 aa, unknown
  TnpB Polypeptide
MDGELFDSGSILGHLASEVRDISSYATYVVRNDEALGDELARATAISPADAGRQAGVTMPDFLVSGKRGRSRKAKLVQYNVVAAYRSYEERVKAANGESSKYVSQGWKRTVDASPPSYGGDYVNLGAVDKAYAVIENDPFADGEIILKMVIQGEWYRLIFRFDNTRFTGGRVTLPVIKVENGQPVFIFTVVTDNPVVQFSGDYTIGVDVGINNYATVVVRDVKTGRIVYETTLSRRAHSLWNSVRASEAQVRGLRKKADGLLSQRQGRMSALDEAQLHREAASRKKRELAILAAQEIAVLSHVWDNAVVAVEDLGWVANTMQNGRWNRGAFVKWLTHYVSQNGGWVVAVNPSNTSQHCYKCDSKVTHPTHEVSVCDTHGAMDRDVNAAANIAARAVPKVEKARRTRAKNRKLRPQVALKTPAARRSLRYPGRDRTKSAPTPKRKNHHTRSVREVILPISPARGYHDRGTSGLWRAGRRGDLPSGYQTRKHD

SEQ ID NO: 63580 - protein, 365 aa, Runella sp.
MEVTQTYKYKLKLTKEQVNLLNNWIGTCRYVYNLALDTKIQSYQKGVNVSKYDLMKQLTDLKDVEWIKSVPSQSLQNVVERLDFAYQKFFSGGGFPKWAKKGEYSSILLKSVKATDTGFILPKIGEVRIFKDRMPKGKLKTATITKEGNGFFVCVTFGSQSKNLYPTDEKQVVGLDMGITYFLTDSNGCFVENPKHTKKYEKQLRVKNRALARKKKGSSGFRKTKSELKKLHSKIADVRKDFLHKISFQYVRDNSLIVCEDLKVSNMIKFGSLSKHIADVSWSIFFDQLRYKSKQYEKTFVQVNPKYTSQKCNSCGHTAKENRLNQANFHCVSCGHQQNADYNAAKNILGEGIALNRQREALACA

SEQ ID NO: 63581 - protein, 543 aa, unknown
  TnpB Polypeptide
MRKKKDKDKKPNLRSILYTSKYFNAGKGEEVKQLLRTISNYKHMLSKYVYENRNLLLTSDGIKKLKANYNIVKDNTILAWNIQKEHHMIVDKYADTLKKHMKNLKIRIQDKIIIIRYSKDGKKHKKGETKYFEIKFRTTKLTKLIKYLVYLDFSKEIEAQIIDNDAIKDLFNYYKTKPYFDRILNLAKDIQNRLLSKIKLIKFDNDYSVRLTSTKGINNARIEIDETNSLYKHWFIFKMKNGKEYRLPLEINKDYHNKNIIGKEFMLYLNLKKNKINISTTYEGEELSFKPFNKAVGMDVNIKHNFAKLSDDKEIDYDRDFFKNIVKDLNKLDKIGYQNLSEKDLKKLQKLYRRLDWYVELLIHNILDYCEQNGITDLVVEDLHLKDKSNIINEEFNMKYSRLLKLLHLSDVKNALLRQGEKRGIRVHIVHSEWTSQGCPECGNIDRNNRTTQERFKCSECGYEDNADYVGSVNVLDRFNLFHWLGVQANKLYSVDEYGRISPKHVSRHTLLNILNQYYEARGFLHHPVLPPKVNSVRSVVKI

SEQ ID NO: 63582 - protein, 659 aa, Micromonospora sp.
VSGKLRLAEGEAARTACARGVLRAGVDEGTGEVLSQAVLAQRVGWCADLVAGMVSALLAERWNAGDVEVLASGVDAGGRKLPSNAWMALRRLGWTVAPPGGVRVNDRVVRMAQEQAGRALRSAAWRAEVTAGVLTAWPADPRKRTPAEWDQVRASIPGGQHLPSSVIKGRTRQIVTFVKANGRLPVDVFELEGVPRIPRMLLLAACDRQQATIERSDTDPARALLRLQLPARPDPRGYRDWTWVECRITLPPTVPATAVLHLPTLRLTDGTVRADMAYTHAVPKARATGHSVALGVDWGLNTLLSAGALRLHDTGRITALGAGGQFRAAGVLAKQHRLRRLSERLHAKADQYARLLGGRPDEHLSAKQEVLAGEIRHVSARRANLNDALAWAAARWAVDQAIAARASVIYLEDLRSMEAKGMGATGNTRLSQQVRGKISDRMRHLAAEHGIAVVTVTARNTSKHCPQCLTPLQHRKAPDKRTVAGWKWAICPNQSCRWQGDRDHGAWRRIAARGLTHQGKTVIDKTSGQMVIRSVVDTREAAAVVTPSTFKTSRRDRSKTGPTRPRTSRPAPRRRRAPSPTRPHSRAGKRPEGHAPTDRPRLPRAAHRHQSVNTISTPTTTGHRPRGAALGAGFHLHVHASPPRWETIPETPSDSGSLS

SEQ ID NO: 63583 - protein, 670 aa, Micromonospora sp.
VSGKLRLAEGEAARTACARALLRTGVDEETGEVLSQAVLAQRVGWCADLVAGMAAALVGAHWNSVDVGVLAGGVDASGRRLPSNAWMALRRLGWTVAPPGGVRVNDRVVRMVQEQAGRVLRSVKWRAEVTAGVLSTWPADPRKRTPAEWDQVRASIPGGQHLPSNVIKGRTRQAATFAKTNGRLPVDVFELESVPRIPRMLLLAACDRQQATIERSDTDPARALLRLQLPTRPDPRGYRDWTWVECRISLPSTVPASAVLHLPTLRVTDGTVRADMAYTHAVPKARATGHSVALGVDWGLNTLLSAGALRLGKDGRITALGAGGQFRAAGVLAKQHRLRRHSERLHAKADQYARLLGGRPDEQLRAKREVLAGEIRHVSARRQNLNDALAWAAARWTVDQAIAARATVICLEDLRSMETKGLGHSLNTRLSQQVRGKISDRMRHLAAEHGIAVVTAPARNTSKHCPQCLTPLQHRKAPDRPTTPGWKWAICPNQSCRWQEDRDHGAWRRIAARGLTHQTKTVTDKTSGHMVIRTVVDELEAAAVVTPSTSNASRRDRSKTGPTRHKPPRPAPRRRRAPSPTRPHGQAGKRPEGHAPTDRPRLPRAAHRHQSVNTISTPTTAGHRPRGAALGAGFHLHAHASPPRWETIPETQSDTQDRKADQRRYPARNP

SEQ ID NO: 63584 - protein, 216 aa, unknown
  TnpB Polypeptide
VQRKASKSKKAKRILTKYSKRERNRARKHQLEIARVIQSVAGVIGLEELSKQGMYTRSRLWNRMISRSDWRGISRILIGKMGEAKVKELDPYGSSSYCSRCGWENKDLNGAVFECSRCGLRIDRQLNAAINLYMRLKFGYTTNWDGKKKSVELRMEGASQKEWWDHVVLPSLLGGCVLTGAERKTPDELVRELHEVVKPKLYAYDRYADAYLRAPT

SEQ ID NO: 63585 - protein, 292 aa, Filamentous sp.
MQKSFKYRFYPTPEQETLLRRTMGCARLVYNRALSARTEAWYVKQERVGYDESSKMLTQWKKQDDLQFLNEVSSVPLQQGLRHLQTAFSNFFGGRAKYPNFKKKHNGGSAEFTKSAFKWKDGKVFLAKCSEPLAIVWSRELPKGVKPSTVTVKLSNGARWTVSLLVDVEIEPLPKSPNKIGIDLGITTLIALSNGEKIANPKTFKAKRAKLRKSQKSLSRQQKGSKNRDKARLKVAKVHAQISDARKDFLHKLTTQLIRENQTIVVEDLAIINMLKNPKLALAISDAKLFHI

SEQ ID NO: 63586 - protein, 375 aa, unknown
  TnpB Polypeptide
MLKSYKYRIYPTTKQKVAIDNTVNLCRYLYNCGLEQRIRAYRQQRRNLNYYVQANELRGIKTFSPDFTQVHSQVLQDVLKRLDKSYQNFFRRVKQGDKPGFPRFQGYNRYHSFTYPQPGDNMVPTNGKLYLPKIGKVRINLHRELPGKIKTVTITKTNGKHYACFSVEVDSIELIPTNKQVGIDVGVSSFVATSDGLLIEAPRTYRNTEKKLKTQQREVSRRKKGSNRRKKSVQRLSKTHEKIANQRKDIAHKTARYLVDNYDLIAHENLKIKNMVKNHHLAKSIQDSGWGLFFDVLAYKAEEAGRKVVKVNPYNTSQICSGCGSLVKKSLSVRTHKCDCGLTLDRDINAARNILATALKQGLDGAFGDGLAVAG

SEQ ID NO: 63587 - protein, 423 aa, Gammaproteobacteria sp.
MLRLQAFKFELMPDGEQARDMRRFAGSCRFVFNKALAMQQERYAAGEKRLGYAGMCSALIQWKADPATLWLRDTPSQALQQTLKDLDRAYTNFFNKRADLPRFKKKGRARDSFRYPQGYMLDQAKDRLFLPKLGWVRYRNSREVLGTVKNITVSQSGGKWFASIQTEREVEIPLHQGTAVGIDLGIVRFATLSDGTVLEPLNGFKRREPALRKAQRRLSRKKKFSRNWRKAKAKVQRIQTKIANARRDTLHKATSAISKNHAMIVIEDLQVCNMSASAAGTVEAPGSNVRAKSGLNKAILDQGWFEFRRQLDYKSAWNGGHLIAVPAHYTSQTCPLCGHVAKENRQTQAQFACVACGFQDNADRVGAINVLRRGEAMLSQEGQDTADASVGWSNTARIACEVSPTRGQQQEPTEVTMDTFVCP

SEQ ID NO: 63588 - protein, 392 aa, Anaerostipes sp.
MLRDYVTGQSKTQKCHMSHLIGSSINFQAIFARSAINEAIGKVSSYKSNLKNWKEEDPKIRGRKPSFPKAGYSYPCMYRGNMYQQIGKYEARIKVYIRNTWDWLTIKLRRSDMDYIERRCKARKHCSPILQKRGDEWFLDFPMKEYIELCDTDVADRIICAVDLGINAAATISVMRSDGTILGRHFLKLPKEQDCLTHSINRIKKAQQHGNRKMPRLWAKVNGINHEISVKTAKFIMDIAVLYNADAIVFEYLEKKGKKRGSRKQRLHLWKSQEVQRVVTDKAHRLGMHIARICAWNTSRLAYDGSGRVLRGKHAGFSSYSVCQFQNGKVYNCDLSASYNIGARYFIREILKSLPENERLLMEAKVPPCSKRSTCTWSTLISLNAELMSFVS

SEQ ID NO: 63589 - protein, 1074 aa, unknown
  TnpB Polypeptide
VQGINVKKPTKIKSIKSYLSMLDVDQNDERKNGMLKRTFDCLANGSNVFLWTFLSIFGGVTKEMAVQILGQKSKAEDDESESLMVSKPELLTAIYWFRLVPVSRQSNNVLPPLLPKLFKIYFGEEPTVEVSEYFASNFDQEKYVWQDMKAEFKDLCTRIGVSNANFVLDVGLMVSEGYIGLKCGHAWGTISGLFGTGEKADRKPKVSILKSVIAAIDENPPTTRRELALLVLKCSDCTTAEELKLKYGNIGRSSFLVVRAKETDLLDPIDAEKFKEIKRKLAADLKKQSNDLAWLCNTQLKEYLVSKIGDYYQPAWSEMVNNALPVVQSKTTRNYNFVLEQVKGKSELDPENQTKWELVDAYFGSKFFAADNTFSIRKFHIGAGEELTKLWDSWNDLSDDELVEVVSAFCQSMNDDNRMPIHSLLMYLHSIREKITLKEVLDGITHGETKSKIERHKLNPIVEGKPLFNWGKSSKLSGCIIPPEEKEKHTAGKHGHDSSIWIELTVLDKDNKWVKHHFRTFNTRFYEEMYHPGTAESIPVRSRRFGFDNQVALSEEQINAIRKAPKSMRRAVKRQMRIKAARQNKQLPEFSWSEDFNINIFSDKQGYRTTFSCKIEKEKVETADVFLGFDQNQTARHTYSVLQLIGLTDPEAILFRGLAMKSIGVGYITASQLVKDKPIDQLSYDGIDWDLFQSWRDQREKFVANWKDCIGKNRKGQDVKIDVLELLKRSDKYMPCLYEYNSRYCGHVKKIMKGKSIQELLEMRAEIICFIKGGQFSVLRLSSLNHNSFDMLRNAKGIISSYFSNLLGKHSTDEQKREADEELFGLRVELQEKRQNKAKSKKNLISNRIIALALDVRKSTGSNVIIVGENISKMTSKKNKSKQNARAMDWLARGVADKIKQMSEMHEGIRFMEINPATTSHQNPLVHRNPDKSMRARFKMCLPEKMTEADFKSLVKLCKSDEDTYYTEGARHFMSHYGIPKSDMIMIPFSAFKILMTNILDKRKETSVIFPRAGGRVYLATHKIGECSPYCYDKEDVWLCNSDLVAAVNITLVGIEIERLNAAKKKAVSTTITR

SEQ ID NO: 63590 - protein, 462 aa, unknown
  TnpB Polypeptide
MPSKTFTVSTRLSKDSELVRYAEQSITEYSKIYRYAWHFYINNQNIKRSDLRNHLVYKFGILGRTANSIAFDIDGRLKSYIELKKTELNQLEIKILKKEEKVTNLITTINSLKPVVTNNITSSQQLQKYKSAKQSLYYQKNKLNKMRQSKSNFEYEIINNIYKLGFGSKHIFDNQYRLEENGFKSHQGWYNDYVKQRDKNIFYLGSNNETQGNQLFQMFYNQNTDDFTIKVRKDFGFDKNAKYLIDTINFKYQKDLLKQICLAYWNKTSSTALSYRIHRMNHKWYLQVLFTIEYENYETTNQLGTIGLDYNDGFIELSETDEKGNLVNQKHYDLTYHGTGNKAKTEIEQTISNIVNYAKLKGKDISIENLNFKRTKAYQSKAKGKLGKKYNSMLHKLDYSRYKDTLDNCCHRRKVNLIMVNPRNTSKIGKQKYSDRMKLSAHQAASFVIARKGQGFIDKLVS

SEQ ID NO: 63591 - protein, 373 aa, Bacillus sp.
LILARKIRIKPTVEQEKQLLKSVGTARWAYNWALSKQEENYKQGGKFISDGILRKELTKLKKTKEYSWLYEVSNNVAKQAVKDLCEAYKRFFKGISNKPKFKSRKYSRMSFYNDNIKLKTKKNSVLIEKVGWIKTSEYVPIVKKYINPRVSFDGKYWYLSVGVEQDSPKQELTKEHIGIDLGIKELAICSNGMKFKNINKSKIVKKAEKRLRRLERQVSRKYEMNKEGSCFVKTSNIIKLEKTIRLIHRRLKNIRYNHLHQVTNAIVKTKPCKIVMEDLNIMGMMKNRHLAKAIAKQKLYEFIRQMKYKCEKYGIKFMQVGRFYPSSKTCSRCGMIKKKLKLSDRIYRCECGLEIDRDWNAAINLANYGKSVE

SEQ ID NO: 63592 - protein, 366 aa, unknown
  TnpB Polypeptide
MLRSTKHILKYQTGTKSKQLDQLFQDYKVDLQFYIDQIWDKKLPLKKFLSSKDCPSNLFTYSAWKQILYKQASEIIRSNQKKQKKSKPEIQNTSISLDDRMFDIEVQEDGHFDEFIHIRLPYFQDGKHRAVTINLPIKYHKHYLKYADWKRKKNIKLTKDESGKYFVFLTFEKEAPVIKSTGKSLGVDIGYKKLLSTSDGQFLGTDIEQVCTDISKKVRNSKNFKQSLRFRDNEINRVVNELDLSNVNSLAIEDLKNVKRNSKKDHRISTKFMNKLQYWVYLSAIGKLVRTCEENGVLLTKVNPAYTSQTCSVCGSIHKESRVGERYKCIDCKVEMDADYNAAINILHRAAKEPCQKSLSTINCGG

SEQ ID NO: 63593 - protein, 150 aa, Halomonas sp.
VARLHTKRADQRRDATHKLTTQLIHENQVIAAESLQVKNLLQNRSLSKAISDVGWHQLTCQLAYKAEWYGRDFVQIDKGYPSSKRCFHCGYIADTMPLDIRRWDCSACGTRGIDRDINAARNILKAGKAILAGADKLRHHEQTTVGHTGG

SEQ ID NO: 63594 - protein, 629 aa, Mycobacterium sp.
MWFVREHKVWRRIADPVVAAPPAGVRIRTRINVRADEAAALTKIGTLLGELYRTALAERIRCGVLDGAGQARWRAERKRALTAVSSSRWAGAITRAVEDQYQLGMRVLAAHVGNLQSAVDVLAERCALRPGEVATIAQPDTVGARRVRRGYRDAAERFAKTRRLAILRERLVIAQKALDTGRPSITVGGKRLWRNRSHLNQIAMSEQQWRRRWDSARMFVTADGESGKAGGNETIRVDANGILRIKVPVALAAQLGSHVVIAAPVRFVHRGDEWADRVATRQAIRYDIHYEPERRRWYLDASWKADPQPPPSLVELRAGCVVGVDLNADHLAACILDRFGNVIGTPITIPIPTAVLPASRRDGHVRTAITALLNHAERTSCTAVVIENLDFADARAIGREILGRGVRAKRFRRTVAGIPTRRFRNRLVAMAARRGIAVIGVDAAYTSVWGEQHWRKPLRQQASDPATVTRHHGAAAAIGRRGLGMEIRRRPAGPRNGQRTAAGTPPDRPDRHFEATGRCGSFGPPTRPLGGDRSTEQHPPAAVSTVRAATPQDSPLLTNQERSAIGKDGLMGFLDKAKQLLSQNADKVEQAIDKAGDIVDDKTSGKYKDAVDKVQDAAKKAVDKGDPQN

SEQ ID NO: 63595 - protein, 624 aa, unknown
  TnpB Polypeptide
VGILGYLIAEMKTSKHTNKQKYRLRLFNFSTLRRREIFIFINEECGIHVRTPCIVLRLIDGRETRPRLYTPTSSSFVSPYGFGTREHSSRYHGFVYQRQNPLCFIYFGAEYEARVIKFFHKKTSPFGLFQHINYVRKNRRFFDMAKKKPIRADFVKSCIAYNKLNTIAKIDISGIKNICKRLNLDSIYDVINGRFAIQSKRPSGKKSSSKRVVKCDTVFVAYRFCGHPTEEQASDLKQNIGASRFMWNRMRSDYKLMWKMYGISIPMTPADYKDVSGLEWLNDRDSLALANVQLNLEKARSDYFAGERGVPKRKKKHQCKDSYTTNRVGKNIRIEDGGLRLPKINGLIELSMHRPIKPDGTLKSVTVTHEPDGKWYFSILIEYPAEEVELSDGLQKFFASGNINAISGIGLDMSVPFLYIDSSGNKPSYELNEKEIKFVKQYRKLEKRIAKEQRIRSHMVKDSNNYNKQSEKIARLHAKAKHRRENFLHQIAVRLVRTYDVIAIEDLDIAAMKKALSLGKSVSDIGWGRFTAILEELCLKYGKILVRVSKWYPSSKTCHHCGYKNDDLQLSDRIYVCPVCGNIMPRDKNAAINILEEGLRILKENMFRPSVEGYSKPTLITTIA

SEQ ID NO: 63596 - protein, 245 aa, unknown
  TnpB Polypeptide
MVCLDSTQREVEQSLPKATSAVGIDVGIARFATMSDGSFLSPLNSFKKHQQRLARYQRRMRHKVKFSHNWKKGKAKVQRIHAKIANARKDYLHKATTTISQNHALVCIEDLQVRKMSRSTKGNRVQPGKMVRQKSGLNRSILDQGWGEFRRQLDYKMTWTGGVLVAVPPHNTSRTCPRCAHVSKHNRITQARFVCMSCKYENNADLVGAINILERGHRLLACGELAQSGRSVKQEPTEATQTAFV

SEQ ID NO: 63597 - protein, 245 aa, unknown; identical to SEQ ID NO: 63596
  TnpB Polypeptide

SEQ ID NO: 63598 - protein, 447 aa, unknown
  TnpB Polypeptide
MAEVERLKRDLHQHQRRVGNLEQKLAKARRRIDAPSICFGTRKLFNAQFHLAENGFASHAEWKSAWMRSRSSTFMIEGQAASPAGNQFARLTHRRKGLFDLELRLPEALKLLAQETLKLGGNSVHIVRFSGLKFSHQARELAAALTRGVPVAIRFHRDETGWKIMPTFKAEVPEARQGFSRGAVGVDLNAGFVSVTRTDRFGNVVEAFDIPMVTDGLSQDQARDVVRKVAKQVIGYAAKHDLPIVSEKLDFARKKRELTDGHDARYARMLSSFAYSGFDAALSSAAARAGIHHRRVNPAYTSIIGRVTFARRYGLSTHQSAALAIARRAMQLGEQPPRSFKESRRVGFSLNDAHHVTLELPVRKDPGVQDGGARHVWSDWNEVGKAFRGALAARRPSRQRKKPRSVMGRNDLHSMVCRVRTDGVRRIRASRRFAGRTCATEAKAAVK

SEQ ID NO: 63599 - protein, 257 aa, unknown
  TnpB Polypeptide
MGTFDGPGLRLVVFLQGCPFRCLYCANPDTIDVKGGTPTSAGEILQMAVSQKAFFGKKGGITFSGGEPTLQAEALIPLFKDLKANGIHICLDTNGGIWNDKVEELLSLTDLVLLDIKEFNCSRKANGKRSMFARGQLQKKLMETLNWKGYDFKEIEPDYTSQCCPVCSYTDKANRNNKSFKCQCCGYEADADYVGALNIKARAEDKEILDVCEKYKYNHDEMQKHIKMVYHARNEKYKAAAGKAMQQSEGSGSRDAA

SEQ ID NO: 63600 - protein, 342 aa, Lactobacillus sp.
VQDKNIDSLAKANAIQNYQKAWKMFRKVHSSGTPKFHKKSYRLSYQTNAQYGKDAKMDVYSASVKFLDKNHISLPKLGRLRVSGSHRRIIDNKDDIRIGTVTISKDTADRYFVSMQLGSDTPFVKKLAKTNSQVGVDLNTENFLTDSFGKVVANPRYYRTIKGKIAKAQKVLSRRQRRAKKEKRSLRDSKNYQKQRVLVAKLHDRVRNQRNNFLNHVTTALINNHDLVVVENLRSKNVLKNHALAMSISDVGWRTFLQKLDYKANLYNRTVISVNPKNTTQTCYACGFIMGTNGTDKLNLKDREWTCPNCHEHHIRDWNAAKNILAKGLDKLEKLKNLAKAK

SEQ ID NO: 63601 - protein, 279 aa, Lactobacillus sp.
VRNINYSFVEQGSKISMNVLGQRIKVAFNGNYLNFFDPNYKLGTAKLVQLKKHWFLHIPVTIETDDWEKEHNQHIIGLDRGLRQIVTSYDEKGKTSFKNGKAIAYKRREYAYLRSQLQSKGTKSAKRKLKRLSQKENRWISDVNHCLSKTLVDTYGQNSLFVLEDLSGVTFEKTNSNKNQTRELHSWAFYDLQTKVAYKARKSQSQVLIVSAKYTSQRCPKCGQIRKENRNYRIHRYDCVFCGFKTNDDRIGAMNLYELGKQYISGIENPKFELTNVTD

SEQ ID NO: 63602 - protein, 205 aa, Lactobacillus sp.
MLSEFDRGLRFLVTSYDEQGKTAFFDGQAIMRKRAKYQKLRAILQAKGTKSAKRRLKKLSGRENRWISDVNHCLSKTLVQKYGANTLFVLENLNGVSFERTDLPKALRNQNKSWAFYQLEQFLTYKAHLNNSEVVEVSAKYTSQRCPKCGVIKKDNRNHEKHEYHCDNCGYRSNDDRIGAMNIQLLGTQYISGQEQPKFELATNA

SEQ ID NO: 63603 - protein, 341 aa, Flavobacteriales sp.
MRLVEQHIIKRSSVYYNELQDLLHKCKNLYNKGLYVVRQYYFQYNDDNTVKYKYLNYYSLEKKLRTENDVDYRALPSSVAQQVLMMVDQNFKSFFNLLNKKGRGEYSEKVRIPKYLDKDGMFMAVFPTTAFSQKWIKQGIIKLPKQFSFTIRTNKQNVQQLRFIPKNGYIMFEIVYNKKEKGLMYDNGNYLGIDLGLNNLASCVSNTGSCFIINGKPLKSINQYYNKRLAYLKSKLKGNKQVSRQIRSLTNKRNNKIKDYLHKASRVLINHVVSNGINTIVIGHNKCWKQEINIGKRNNQNFVSIPFNMFISMISYKATLEGINVKIVEESYTSKCSFLDN

SEQ ID NO: 63604 - protein, 369 aa, Eubacterium sp.
MLKAYKYRLYPNKQQIEQIQKTFGCCRFVYNQTLGYRKNLYEMKKESMNKTSCNNYCNQVLKKEYKWLKEVDKFALTNAIYSMDSAYQKFFKEHAGYPKFKSKRDHKKSYSTNFTNNNIEVSFKKNRIKLPKLKWVKVKIHREFVGKIKSATISQVPSGKYFVSILIETEHMPMKENDNSVGIDLGIKDLLITSDGEKFDNIRTTKKYENKLAKEQRKLSRKIKGSKNWNKQRIKVARIHEKIRNTRIDNLHKISHKLINENQVIVSENLAVSNMMKNHNLAKAVLDCGWYELTRQLAYKAEWNDRIYIKIGRYIPSSQTCNICGFVNKDTKDLSVREWICPECGTIHDRDINAAINILNEGLRLLEVA

SEQ ID NO: 63605 - protein, 338 aa, Eubacterium sp.
MLNYKQENYKKEIKLNRTDCNNYVNRVLKKEYKWLKEIDKYALTNSVYNMDTAYKNFFVEGKGCPKFKSKKDNKKSYKTNNNINNGVATIRIERNRLRLPKIGMVRIVYSREITGKIKSVTISQDPSGKYFASILFEAEYKPLQKNNNSVGIDLGIKDLVIASNGKKFENILTTKKFEDKLAKEQRKLAKKQKGSANYEKQRIKVAKIYEKIRNIRLYNLHRISHKLINENQVIVSENLNIESMRQNHNLAKFVSDCSWYELTRQLSYKAEWYGREYIKVDRFFASSQLCNCCGYQNKKLKDLSVRVWICPECGAVHDRDVNAAINILNEGLRLRDAS

SEQ ID NO: 63606 - protein, 690 aa, unknown
  TnpB Polypeptide
MNSQKAKATVKIKNEKLELMIVNKTPLKNIVKTNDLNDKINEVVYKVNKIVIQTCQFLNLYLIYLFDNNMEFPDIDEKFIKTIFNIITIKVDGRGKKSSEDTEKQIKILKDFYTKHYKECIVNSDIINIDKLSYILAYEAIDIVKNIKNNITEHFKDYVNKFVNQSFDIKSVNQDLRNMNFDKDETKRYINETYAELRLVKKDLLKPKSINNFESDEIFNDWLKLHKPNIIRKNKFDKDSIDYDLCSNSLGYLKSLFYMNKELEKINEERIKKNEKQFKLFKVIPQRTNIKPNYITLDTCSLINLTITENFKKYLDKVEDSQEDLWDKNFRTNKKEFKRNNYEFNYMIKTDGIGCSVLLVKLKKGKPVYITSKMQREVKTKLENLDKYIEDVEITKEMKNKRIVCLDPNLSDIYYAVSKNIKEKVIVDENNKFKVIDDEEIITFRYTQNQRRLETRNKKYNKLQDSINKETKINKRTVKEIESELSNYNSKTTNYSNFIEYCKKKNEINRLLFAHYSQKLFRKLKFNRYTNTQKSESKMIKNFSNKFGKPNECTVILGDYDKGEHNMKGKEPIINRRIRKIFRNNGYEVYMINEFRTSKLCNKCESNCDTFHKRESEKPKDLDKKTGKKKIIEVWGLTLCSNNKCSQIHNRDKNSALNMYKIVKSIYGGEGRPKKYCRDIKEIIPVNDRI

SEQ ID NO: 63607 - protein, 428 aa, unknown
  TnpB Polypeptide
MQLVEQHVIDRKDPRYSVIDEAAFKSKNLYNAALYEIRQSFIHQGKYLNYNEVQRRMQSHEAYKALPAKVSQQILMVLDRNWKSFFEALEAYNQDPSKFLGRPKLPKYKHKTEGRNILVYTIQAISKRGLRRGLIQPSMLAIEVQTKQRNVDQVRIVPRKGFYMVEVVYGKEVKQAPVNPAFYAGIDIGMNNLVALTSNKPNFKSIIVNGRPVKSVNQFYNKRKAELQKKLGHTDTTKRMERMTNKRNRRIDQYMHTASKRIIDLLVKEGIGVLVIGKNDAWKQEANMGKRTNQNFVQIPHARFIAMLTYKAELVGITVKVTEESYTSKASLLDLDPLPVRNESGEKHTFSGKRVKRGLYRASDGRKLNADINGAGNIIRKVAPDAFGLRAVEDGKAMLASLVVHPVRLSFPSRSQKARVLQSKASGQ

SEQ ID NO: 63608 - protein, 407 aa, Bifidobacterium sp.
MAELTLTMCVRLSPTRRQADALAALCSTFADCCNDVADYVDSTHTLSQKKINKAIYHQLRETHGLLAQMTQSAIRRVIANYKAIHTRIANLREESKGKKNGKRRKRRKIPAYYSIKPQYAPDGADLLWNRDYSYSTKTGLFSLPVMDGRIKVKAEWASIPDQYRHGRFGTARLIRKRDKWHLLIPVTIPTPDATEHPKTIVGIDLGIRFLATSYDGERTVFYDGKEVKHRRGKYKELRKQLQHRGTRSARKRLKAIGSRENRWMTDINHQVSKALVNQYGKDTLFTLEDLTGIRNTAETVKVQQRYVQVSWAFSQLRSFIEYKAARNGQATIAVDPAYTSQTCPRCGYVSRKNRNKETHTFRCRNCGYRSNDDRVAAMNLRHKGYDLTVMQCDANTLDVAGVQPTIP

SEQ ID NO: 63609 - protein, 403 aa, unknown
  TnpB Polypeptide
MIRLQAYKFQLKANGTQERQLRQFAGSCRFVWNKALAFQKERHGQGEKKLGYATLCKSLIVWKSIDTPFLKEAPSQPLQQTLKDLERAYTNFFQKRAEFPRFKKKGKGDSFRYPDPTQFKIDQNNSRVFLPKLGWIRYRNSRSIEGIPKNVTVSRSGKHWFVSIQTEREVVTPLHPSDSITGIDVGIAKFATLSDGTPFEPVGSFEKYRKRLARCQRAMSRKKKFSSNWKKMKAKVQRVHIEIANKRRDYLHKTTTTMCKNHAIVCIEDLKVRNMSKSAKGTIEDPGRNVRAKSGLNRSILDQGWFEFRRQLEYKQAWNGGMVVAVTAQNTSRRCSVCGHISADNRRSQARFRCTNCGFEIDADVNAARNILAAGLAVLACGEMAQSGRSMNQEPAEAIQACA

SEQ ID NO: 63610 - protein, 403 aa, unknown; identical to SEQ ID NO: 63609
  TnpB Polypeptide

SEQ ID NO: 63611 - protein, 419 aa, Burkholderia sp.
MSSAPDIVVVVHRPNYTIRMQRLQAFKYELMPTGEQQRKMRRFAGACRFVFNKALALHKERYERGEKKLGYAGLCKLLTEWRNGVRTPWLKDAPTHPLQQALKDLERAYTNFFARRADSPRFKKKGQGDSFRYPDPKQVKLDQANSRIFLPKLGWLRYRNSRDVLGAIRQVTVSASGGKWYVSIQTERNVDQPLPQVTSAVGIDMGITRFATMSDGNYLAPLNSFRRHEARLRLAQRAMSRKTQFSSNWKKAKARVQRIHSRIGNARRDYLHKATTAISQNHAMVCIEDLQVRNMSRSAAGDTGQPGKNVRAKSGLNKSILDQGWFEFRRQLDYKLAWNGGYLIAVPPQNTSRTCPACGCVRAENRQTQAKFACVECGFEENADLVGAINILARGHRVAACGEPVQSGRSVKQEPAEAI

SEQ ID NO: 63612 - protein, 536 aa, unknown
  TnpB Polypeptide
MERRSGPPTKTFRFRLHYRPQAEAWFAGTARLFNQVAAFYFAVIQAHPGVLELSAQEALTALERLTHATRRNPAPLLPLTAIVTDCPAMLRRAAIHAAWGAAQSFQSHLARWRHRKEQAEEKARQKGQRCSFHERPPVPPRQWHRAVVLYQGMYRTLDDDAVLLRVWTGQAWIWARFGLSGRALPADWQAGSPQVVRRKKGWALHIPATKKDFAYPAKVEKQLQEPHTRLCAVDLNINDALAVCTIQETDGTVVATRFIRGGRELQGRRKRALGRVAVKRAQTGILAEGQPDNIALFRQIRAWDEDTAHRVSRRIVAFAQAHGATIIVFEHLGHFRPQKGRYSKRGNEKRAYWLRGRILHYTRYKAWAEGIITCRVNPKNTSQQCACCGGAVARYGQGEQPIGYRPGAPLVSCPDCGMRGHADRNAGLNIGRRLLTRYGNLAQEKPPTGQPSWARRSPKGEGVLVSQEAQNRDRPHAKPERHGARDGHGTARRGSRGAARGSDGIPRPLRPQGSGSSAAGPLGVAYAGVPEEAAGF

SEQ ID NO: 63613 - protein, 402 aa, unknown
  TnpB Polypeptide
MHLVERHVIKRADPRFAAIDRAAFASKNLYNAANYMVRQSFIHEGIYLTYPEMHRRMKDHEAYKALPAKVAQWVLRLLDKNWQSYFAACAAWEAGPAKFLGHPRLPGYKDKQQGRNPLVYTIQALSLPALRCGLICPSMLGIVVETRQQQVQQVRIVPRIGFSVVEVIYEREPVPAAVNPALHAGVDSGLNNLAVLTSDQPGVVPRVVNGRPVKSINQYYNKRRAELQSRLGKAHTSRRLERITTQRTRRIEWSLHTASRRSIELLVAEGIGALCIGKNPLWKQEANLGRRNNQNFVSVPHARFVEMLAYTAELVGIQVRVTEESYTSKASFLDADPLPVYGTGALPAFSGKRVKRGLYRAADGRHINADVNGSYNVIRTVAPEAFAQGSRGCVVHPKRLAV

SEQ ID NO: 63614 - protein, 414 aa, unknown
  TnpB Polypeptide
VNLVTTRTITAALTNDREGVARDLDSLARSGSKIWNVARWTAGRIWGETGEIPDEGPLKSYMKNQPCWRDLNAQSSQAIVEELAGAFQSWFEQDNPDANPPGYRKHGDQRPRSTITFKEDGFKLDTKHQQVRLSKGKNLKDGWSDFILCEYQAPPAVDVENIQQVRAVYNARKGRWELHVVCETAITAESPGEKTAGVDLGICNPAAVAFPDEALLYPGDTLREDKHYFQQEEYQTDGPHGPSQKAQWARETLSRRKEHFLHALSKDIVERCVDHEIGTLVVGDPSGVDEDDWGRHGNKRLDNWAYKRVMNLLDYKARERGIEVELPDERGTSSSCSVCGHEDADSRVERGLWKCDRCGVVAHGDVNGADNIRQETLPVTPPLGKGDSGNGCLAQPRVIQFSRTHGFQPRATAE

SEQ ID NO: 63615 - protein, 447 aa, Bacillus sp.
MARKKAVKVLRKQKKTENIQRFTQKQNIGRDTLTAKEFRLLQRMSHSSKALRNVGLYVMKQCYLNNGRIATVKEVDTAMQADVNYWGVQSNSVQAIRRTLYSEVKSFFKALEQWKKTPEKFTGRPKFPKYSRSTDKRIIEIYQVSKVDNDGYWMIPMNVEFRKRFGSIKIRMPKNLLNKKISYIEIVPKQKGRFFEVHYTYEVQISQMKKQPTTTVNVLSCDLGVDRLMSCASNYGDTFLIDGKKLKSINQYFNKTISQQQQKNIENGISKRMITNQIAELWNKRERQINGYISQAVGLLFKKVKELNIDTIVIGYNAGWKQECDMGKKNNQKFVQIPFKKLISAIENKCLKDGIRFKKQEESYTSKASFLDRDMIPVWSVNDKSNYSFSGKRINRGLYRSKTGRCIQADINGALNILRKSEVVELDENLQVKTPIIMEVQKRKAVA

SEQ ID NO: 63616 - protein, 499 aa, Vulcanisaeta sp.
MLRRAVAVELEVTKELNKLLYSVESAYLSIVREVAVYAVANNVTSATQLQGLFYSKYRGEYQGLHAHLIIQAIRQASQIAKSFITRRRKGLAQKPYPEVRSISIRFTEKAWSYEQFIHSIAPVRLELSLLGVRRVVWLRPHKRFWLFWWRVLTGEAELASTLIIKRRTNKWYAIFVFELKPREEKPKLVFSFDINENTVAVSRVDLPSTVGKVVDWNRQYMIPELYAIRTDFGRLARRYERVRNAIIERLKPEFALPSGNYVNVTNTREYRKFVRRLREGNRKLGRVRHVANELTRTPAIIVTEDLGERPQESMIEDVMKDEFRHRIKQTPFKAVERTVEGKALERGSKLVRVSSYRNSRVCPIHFTRLWETNDWHVLYCPRGHYVHRDYASVMNMTWKTTPEAWSKGVWWDLSKGMDWREYEGKSNTTIPYSIVQYLHAMLKTFMASEEGPAVLARGKPMNPAGEADESWARAPPRPLKAGRRSALKIVINIVSSFSY

SEQ ID NO: 63617 - protein, 344 aa, unknown
  TnpB Polypeptide
MAQHAGYARVAFNFGLSSFKTGLDTDEWRSPVDIKREFNAVKYDKFHWCEDLSQNASKNAIHNLGDAVLRWKKGQNKFPVYKNRSGKCSYQADNGEGTVDVYKKRINLPKIGWVRMREELRYSGEITKVVISKHNNKWFASITVRRLDSSNYQHQPALFDDREPIGIDVGINTLATCSNGDTYDNPRPLKHYERKLARANRQLSRRQKGSQNWYKAKAILSAVHNRIANIREDAHHQATIRIVRKASAIGIETLTVANMLKNRKLAKALSDSALGGFLSKLKYKADRRGIPITEAPHFFASSKTCSKCGHEKTDLTLSERTYHCAECGFECDRDLNAAINLCPA

SEQ ID NO: 63618 - protein, 402 aa, Synechococcus sp.
MYVVRRLKLGISEQLERLALAAGELYSKTLVAFWRVVRKKGLWLKPASFMRWFPNSNQNELHSHSADAVIQTFFAALQSWRRRRKADPNAKPPKRRRRYFKVIWKSSAIKVQHGKLLLSNGKSNPPVVIPWPWDTPVQVEIGWDGKQYELRACYSLSQAAEKEGKEVADTPQNGEVAGVDLGEVHLATAHDGAATLITNGRLLRSKRRYQNQLKGKLSRLMARKKRGSRRWKRLIRSKQKQLAKLRKQIADILHKQTTRLVSALHARGVQTVVIGDIRDIRQLANYNKVVNQKIHQMLSGQVRQMLTYKTERLGMRVVLQEERYTSQKCPRCNMLHKPSGREYRCRACGFQFHRDGVGAVNLRRKYLGQFHVPVVGVMASPIGLRFRPHTRCSSGGGNCPAT

SEQ ID NO: 63619 - protein, 399 aa, unknown
  TnpB Polypeptide
MFSVDIMNTSKIMKVIRTYKTKIAIPQDRIHDVERLFQSIQQIFNLHTEWAYQHKSYSKRLAHKELYHAIKEQFPGLPVQYIQSTRDQALEAVKRIVKHQKASEKWTGTVPKKKLWSAIRLVNGCTITFRMDKVTFSCYGKRVTLQLNLSSYHVHTIKDLQFHAAQLRRDKQGNFWLYLQFKKEIKEVEIPPNTRVLGIDVGVYNLLALSDGTLIKAKEFKRVKRKYQYLRQKLQAKGTRSAKRLLKHLSGKESRFSYNFCQTVAKTIANLPYDVFVLEDLSTLRKSKSYSKKANRMVNSYMPYGMFCSLLSYKAEELGKRVVKVNPAYTSVTCSICGSRNTHRCGAKFKCNNCGYQCHADINAAQNIKAIFLSSQSGTDRQGAISRPYASDVMSRCKL

SEQ ID NO: 63620 - protein, 406 aa, unknown
  TnpB Polypeptide
MLKKSYKFRIYPIRKQEKKLEMALDQACFLYNQMLDIHQQIYLGEGKTLSHFDMCNLVKDFETKQLHSQVKQNIPKRISDAFTHFFRRCKNGETPGFPKFHKRVFYKSITFPQYKQEIYPNRLYVSKIGMIKIKLHRKIEGNIKTLTIKKENNEWYATFSCENVPIEKVNNNFKSEVEGLDVGIKKFLVCSNGEEFDNPQFLRKSEKKLKRIQKRHSKKKKGSKNKIKSRIKLAKQHTKITRQREDFHKKLARQLAMKIKYIGIEDLNIKGMVKNHCLAKSISDSGWGGFFQYLKYYKTIFEGKIIEVGRFEPTSKTCSNCEHKQDMSLDKRIFECESCGMIKDRDLNASINIKKLTENILNNTVWQTEFQACGDNVRPCFEFEKIQDKVIVSEAGNYREISRRSL

SEQ ID NO: 63621 - protein, 416 aa, Pseudonocardia sp.
VRTAYKVRAYPDSGQAALLARTFGCVRLVWNRTLAERQRRHTTERRDTSYRETDANLTAWKKTAELAFLNEVSSVPLQQTLRHQHNAVQAFFAGRTRYPRFKSCRGRQSAHYTRSAFRLKPDGLWLAKTTAPLRVAWSWPEIDPVMLDPTMVVVSREPDGRWFVTFLVDTPDPAPAPPTGETVGIDLGVTDFAVLSTGERIPNPRHLVKRERGLRRQQRRLACCRPGSTNRAKAKHKLARLHARVRDARRDFLHQTSTALVRRFNRIGIEDLGVGNMVRNRSLARAISDTGWAEFRSMLEYKAQRAGRQVVVVSRWYPSSKTCSACGHLLAALALGTRQWTCPGCGTRHDRDLNAAQNIDTAAGLVVAASGGVVRPDQATGGRAPVKEESPQVTAGIPRLQARGGSQRCGTSSGIA

SEQ ID NO: 63622 - protein, 223 aa, Nostoc sp.
LDGELFMVIVVDEINEPIVKLMTGKIAGFDFGLKTFLTCSDGSKVESPQFFKQSLNVIKIANRHHSRKAKGSSNRERARKDLARAHEDIANRRTDWFWKLAHDLTNRFDVLCFETLNLKGMKRLWGRKVSDLALRDFLNILEWVAKKKGKQVVYIDQWYPSSKTCSCCGHVLDTLDLSIREWRCPGCQSVNGRDDNASKNIQTVGASMVGVGNVRRSETAVAV

SEQ ID NO: 63623 - protein, 421 aa, Rhodococcus sp.
MIFPQQVEESGRTLFGAEVAKMKRIVMIKLSVTDEQTAALKQTLLTCNAAADFVSDVAQQTSDRRAFALQKTVYTQVKLFGLSAQPAVRVIKKVSDAYTTRKANLKAGNYGRPGTKRYAGVADTAVRFRPLAAQPFDDRCLSWQLDSSTVSIWTVSGRMRGVRFVCAPWQHKLLADRQGESDLVFRDGQFYLHATVDQPAPAPVVPVKDPVDGWLGVDLGIVNLAVTTDDDPKRLDVRWSDGAVTARRKKNLVMRTALQKVGTKSAKRKLKTRRRKERRFATDINHQLSKTIVAQAQHTDRAIAIEDLSGIRDRVRLAKKQRAQVHSWAYAQLRNFVEYKAEAAGVPVAVINPRNTSRTCSQCGFCDVKNRRSQARFECRECGWTAHADHNAARNIAALGHEKYWAAQSTVPIAATSLAAS

SEQ ID NO: 63624 - protein, 383 aa, Lactobacillus sp.
MIKGIKLRLYPNQMQQNLLFQMFGNTRFVWNQMLAMAKARYKNNPSSRFIDEYGMNYFLKPLKEEYPFLKNSDSTSLQVTNHNLAQAFKMLFQHKGGYPHFKSRKISKQSYTGRNGCRVEAKRRIKLPKIGSIRTSKTTHLIGCNIKRYTVTYEPTGRYYVSFQVETEINQLPKTGDAVGIDVGLANLAITSDGQKYGTFDACWVEKQAQIWQSKFSKRKYRAMVAVRHWNHNHKAFQMELSDYQNWQRARIQKSRYQKKIVDKRKDYLHKVTTDLVKKYDVIVIEDLKIKNLQKNHHLAKSIANASWYQFRTMLEYKCAWYGKKLITVKPNYTSQICSQCGYHSGKKPLEIREWMCPNCGTHHDRDINAAVNILKQGLKLIG

SEQ ID NO: 63625 - protein, 386 aa, unknown
  TnpB Polypeptide
MARHLWVEKELWNEMLAFTKKIYSDYGKFPTKKTLRSFCKNSELYSQVGQELVERLNKSIWRMVALKKKGKECGFPRFKSFDRLKSLNYPQSGFWLEKKLKVTPFGEINIKQHRTIEGTNKTLSLKREPSGKWFAVFCVEQLPKETRHNLGAKIGIDLGLKTLATLSDGTMIKNPRHLKKHEEKLAKLQRLFSMAKRGGKNSRKAKRKVAIAYEKVANTRADFLHKTTTSLVNSYSLIALEKLASQEMAEQNFGKSINDAGWGMFANMLSYKAESAGCEVVFVNPKNTTQECSNCHEIVKKDLTVRTHDCPFCNLVMDRDLNAAQNILIRATAGHAGSNASGDEPIGLSLKEEAHTFLTAQPSRLRQQSRQDVRFVHADGSPEPSR

SEQ ID NO: 63626 - protein, 280 aa, Cyanobacteria sp.
VTQKAYRYRFYPTREQEQLLRRTLGCVRLVYNKALHTRTEGWYSRQERIDYKQTSALLTDWKKQEELQFLNDVSSVPLQQGLRNLQKAFTNFWSGSAKYPKFKKKRSGGSAEFTRAAFRWKDGQLWLAKCSEPLPIRWSRTIAENCEPSTVTVRLDAAGRWFVCLLVNDHTDKALPQINKAVGIDAGITSLMATSDGEKITNPKHFKRLRSKLRQAQKALSRKVKGSNNREKARHKVARIHAAIADARTDFLHKLTTRLVRENQTIAAFRFGGEEYAEEP

SEQ ID NO: 63627 - protein, 405 aa, unknown
  TnpB Polypeptide
MFAFNFKLFRAKRNRHLKRLTWIAHDIFNYFLGWQRTRYSLGLPYLSYKEMSRAFTILRKSHPEIFAHWRELDSWAARRVLKRLDEGYQRFFNKIAKRPPKFRSWRNPYSFTMGPSGFEFADPEEGDLGFGIYGDKVRIIKRQYRFNLSRPILGNIKTVTVKADALGDFYMSVVTDHIATEATPKTGQAAGYDFGIKTMLTCSDGTQRESPHFYSTAQSELKSAQQKYSSKVKGSNNRERERKNVARVHRKTKRHREDHHWKLAKSLVHQQDILCFETLCFEGMKRLWGRKVSDIAPYAFHQKLRHQAKKHGKQICYIDRFEPTSKTCSTCRQTQMFMDLSVRHWRCQGCKTKHHRDVNAAINILKVGTSTFGLEGIRLAIASNPRRLHPKSIPHNPTAKQTDSL

SEQ ID NO: 63628 - protein, 568 aa, unknown
  TnpB Polypeptide
MLGIDVLLSGKARPMASRSGKESTPPKTKTPTFLLELPLAVEAGQAARVGGHLEVGRQFYNAVLSAGQRRLRRMRADPAWQAARAIPRTRKQERRAAFSALRERYGFSEYAFHELAKGLRVSWLAEHLDAVLAQTLASRAYRALNRVCVGKARRVRFKSKSRGLDSIENKRSDTGLRFVLQTQDQGQPQGYLLWHEDHIPARIDWDDPVVAHGLAHPIKYARLVRRRASSPRAQGADRGGERYFVQLVLKGVPHHKPKHTVGSDTIGLDLGPQSLAIVPREAEARLEPLCAELRPDARAIRRLQRKMERQRRAANPEHYDEKGRPKKRGRGAPRWKQSRSYQATRRRKAAHERRLAAHRKSLHGRLAHQIVRTGNTIITEKISYRGWQKRYGRSVGRYAPGMLIDHLRRTVASTGGTLHEVPTRSTKLSQFCHGCGRFVKKPLWQRWHQCPCGIGPVQRDLYSAFLAAFLDPAVDFIPSCAQYVVPWEGAEARLRAAHERVQERAKEGQVMPRSMGISRAGARLPQSPSEATQELLFLSRRGKVEAWKRRSEPPALQPGESSAETTGL

SEQ ID NO: 63629 - protein, 340 aa, Eubacterium sp.
MKHYYKVRVPKNEYIQNIISSVDLKEDVVYSFLKRIEFNSGFKYYVVITLRGDAPKRIELSKDGGHRTGVDFGTSTIATVSNNEVHLEELAPESARYEKEIRHKQNLVDASMRKHNPENYNKNGTVKKGKHKWKTTRRCRRLKRQIRVLYRKQSAYIKTSHHTFINRVVQNTSEFILEPMNFKALQKKSKKTERQDKAVSVQQKDGSSKMVHKYKRKKRYGHSIKNRSPGLMQADLKTKATQYGIPYYEIDIHQYRASQLHHDTGEYIKPTLSERFKTIEGHKVQRDLYSAFLICHTDDTLTAPDFETCHLDFPHFVKMQETLISNKKKCGHTMKSCFGF

SEQ ID NO: 63630 - protein, 418 aa, Halobacterium sp.
MEVKRTVPIKLGVPEERRDDLHQTIQQFNTAANYTIDLGKDNDGDLILNKSTIHDVVYHDLRDETDLPANLVVRAYSKAVEAMKSTVAEWKKGNSRPLPSFDKPSAVYDKRTLTVKDEYATLSTVNGRVEADFVLGEYQRSYLEDDDYEKRMGTLHYRPDEEAFYLHVVIQKEVDQRDGERVLGVDLNLKNVAVTSTGRFFDGGELLWGQNHYFRVRRSLQNKGTRSAKQVLRRLSGRENRFVLNRLHTISRGIVEEALRHDCSYIAVEDLTHIRSRMDAHDDRLKRQMHNWAFRELQEQIEYKAAEYGIRVESVNPAFSSQTCSKCGHQSSTNRDSETGWFVCNECGYEVDGDYNAAKNVGLRLLALPPGKRPDGLGNGQLALKSGTLNVSDTSSVHSSLEFERESTDKPTASAVGC

SEQ ID NO: 63631 - protein, 589 aa, Streptomyces sp.
MLSLPRVVTPAGALTVRTRLRLSDRDAVILRELAECLSRLAARDLAERVALGDRHTVADFARRKRELTALTSSRWAGTITRGSNDQWELARRAQAAHIKQLAAEIKAIEQRLSTPVGGRDEATRAKGYPTRRVRAAKQQRLQILRARAAEVAADASAGRVHVVRGSKALLRDRLHLDRSGRSLEEWRDRWWEARNRIEADGEAGKTYGNQSLRVGPDGAVVVKLPPTLAERHREHCDRFGRYTLDARCRFAYRAEEWRAQVEAHRAVGYTVRFEGGRCYLAASFTPAEARPPMGSNDESPMASALSGGVLGIDQNVDHLAVWRLDAHGNPVGRPSRLDAVQHGTASRRDARVRHLCSELIRLARRTGATALVVEDLAFGAGRERCGWSGRAGRRFRSSVAGIPYGRFLSRLVVMAHRADLVVIAVDPAYTTRWGAQHWRRSTSTTRVKTSRHEASAIVIGRRGQGLGARRRAEKAVPRGKTEEAGRSRVDAHCRAGTETHRPAAYDSGPGSLRAQRTADGPEDGARDAPRRRTPTALQAAQHRSGQPAGNTSVPVPRDGWTPSPGSVREQGAGRRLEGCTHGVGVSTSG

SEQ ID NO: 63632 - protein, 220 aa, unknown
  TnpB Polypeptide
MVGIDTGIKDLAILSDGTSYENIKTLKSNLKKLKFEQRQLSKKVKGSSSRNKQRKNLAKIHEKITNVRKDYLHKISTEIIKSHDVICVEDLAVKNIMKNHKLAQAMSDVSLGLFYTMLEYKANWNDKKIIKIDRFFPSSKTCSNCGWINQDLTLKIREWTCPSCGEKHDRDFNASKNILKQGLKILSGLGTNSDIKQKQVESFSLEEAMKPETHQSLADV

SEQ ID NO: 63633 - protein, 365 aa, unknown
  TnpB Polypeptide
MYAGMRVEDGVGGPTTLHAHSRDAAQEGFYKACKTTKALKRAGMEGVRYPHKRQWYRTSTWKKSGIRVKDGALVLARARGLEPVCATLPAPLAALAALAPSSFSEVRLVWDKAARHYAWHAIVDDGITPTVTTATGIAGVDMGEIHPAALTDGVHAAVISCRALRSTTQYTNKRLAVLRGKQDKMVKGSARWKRLQRRKNRFLAQQKRRERDLLHKTSRAVVGWAGQHGVGTLAIGDVRDVADGKRLNRVAQQKVSGWSHGTMRRYIGYKAEAVGIAVDDTVDEAYTTKTCPGCGTRTKPKGRVYACRACGFRGVRDIVGAANILSRKTTGEVGRVMPPAQTKYLRPFVRRSSRLDTAHMARGVA

SEQ ID NO: 63634 - protein, 363 aa, Gemmatimonadetes sp.
MKLTLQIQLLPDTGTAQKLKATIERFNEATNWLAQKAFERKLSNKFALQKLYYSKLRNLFGLSAQMAIRCIAQAVEAYKRDQSVQPSFRPTAAVPYDQRLYSFKGIDRVSLLTLEGRVLVPMIMGDYQREQFGYAKGQADLVLRKDGKWFLLVCVDIPDGTLIPVTDFIGVDLGTANLAVTDDGETFSGNTVENIRQKMSNLRKSLQQKASKLVRQGKRPKNVRRKLSAISGRESRFRRNTNHIISKRIVEKAKDTGKAIALENLDGIRKSQKRFRKPQRAKLSGWSFFQLRTFIEYKAKRAGIRIEPVDPKYTSQTCAECGHCEKDNRHTQASFLCKVCGHKDHADRNAARNIRVKALCQQA

SEQ ID NO: 63635 - protein, 270 aa, unknown
  TnpB Polypeptide
MPKQSKVQCKSDRGLAGDLRMIPQGNSFIIELTYQKKEEKEPVLLDRDEGAFIDLGVNNFAAIVTTKSGEKPILVKSGFLTSINQSYNKRAAELRSKGYKKHLESVTFKRQRRIDDAIHKISRGIVDYCAAQDIGRIFTGRNKNWKQSTQMGRRNNQNFVNIPHAKLIEQLRYKGEAFGIEVVEVMEDYTAKASAVDYDPIPEYEAGKKRGPFSGKRILRGLYRTKDGKLLGLDEGVFVNTPTVIRTLYGERKPLEFGVRPKEAAAVSLR

SEQ ID NO: 63636 - protein, 324 aa, Mitsuokella sp.
VRRSLGICRFLANQYIVRNIWLCRLYQRGVLDEKQPHFITANDFDKCVNHVLKKKFPWIDQCGSKARKKVLVNAEQAFRRFFKGQARFPRFKRKNQQNVKLYFPKNNKGDWTIWRHKIQIPTIGRVRLKEFGYLPQGVTIKIENINTSSRARRLEKRLRREQRRLSRKYEIRKKKGGSTATASANIEKKRLSVQKLHQRLTNLRRNYENQVIHALVEQKPRFITVEDLNVTGMMKNRHLSKSVAQQRFYSLREKLRRKAEIIGIEFRIADRFYPSSKTCHACGHVHGGLKLKDRIYVCPVCGYTEDRDLNAALNLRDTKNYRIA

SEQ ID NO: 63637 - protein, 348 aa, unknown
  TnpB Polypeptide
LILTYRIRHDRDFSEELRKAKRVAEYAVRYRTFTSKDVKHIGLKSMIANQILRKYGRNKTIKKARNVNLIVPSKGIKADHEKRIIMVACLKLTLAYQFPEFEKINQMEFDEEYAYVNVSVPEKEIVEPQHYIGVDLNATGHAAVVCNPQTGKIWKLGKQCHHIHEKYKNIRRGLQKLGKYGKVKKIKDRESRIVRDTNHKMSRKIVEIAEASGCGIKLEDLKGIRKNKKHAKSFNYSLNSWSFYQLRTFVEYKAKLQGIAVACIEPAYTSKTCSRCGHIGDRNGKRFKCPYCGYVENADVNASFNIALRKIGVSQSGIERDMSEGSTGTPQEATARTMQTLEPPWLWP

SEQ ID NO: 63638 - protein, 410 aa, Lactobacillus sp.
MSEFKYHYGIKMRIFPSREQKHQIDNNINASRFAYNEMVAIDKELFQLRKVKCYIASVVNRIAYLQKRKNNTQMLFALHPWLSGTNVGTDVVDQARRAYQSAWRLFRQVHRSGTPKFHKKQMSGSFQLPNRYAKVQPNLFNGSCRFLDSKHVKISLIGRLRVSGSHRRLFSCGNDVRIGTITVSRDATGRYYLSMQLGSDTPFVVGGKQQISPVGIDLNTDNFLTDSNGNIVANPRYYRSIKGKLAKAQRKLSRRALRAKKENRPLREAKNYQKQRVLVATLQRKVANQRNNFLHLVSTTLIKNHDLVVAEELRSKNMLRNHALAMSIADVGWRTFLGMLAYKADLYGHKFVTVNPRNTTQTCSECGYLMHGDEKLTLKDREWTCPQCGNHHIRDWNAAKNILKKGLASA

SEQ ID NO: 63639 - protein, 322 aa, Bacillus sp.
  misc_feature (272)..(287): Xaa can be any naturally occurring amino acid
MEVNQMIINKAYKFRIYPNQAQAILINKTIGCSRFVFNHFLYLWDHAYKETGKGLTYGTCSAKLPAMKKEFVWLKEVDSIAIQSSVRNLADAYTRFFKKQNSAPRFKSKKNNIQSYTTKQTNENIAVVGNKIKLPKLGLVRFAKSREVEGRIVNATVRRNPSGRYFVSLLVETKVQELPKTHSYIGIDVGLKDFAILSDGTPYENPKFFRSLEDKLAKAQRVLSRRMKGSSRWNKQRVKVARIHEYISNARKDYLDKISTEIIKSHDVIGIXXXXXXXXXXXXXXXXDCPSCRTHHDRDINASINIKNEAIRLLTARTAGLA

SEQ ID NO: 63640 - protein, 182 aa, Vibrio sp.
VDFGIKDLAICSSGKKFGANQKLKASLKRLARKQRRLAKQVKGSNRRAKTKQAIQKLHKRIADQRTATLHEVSDCLTRSFDRIVIEDLNVSGMVKNGKLARAVADCGFYELRRQLEYKSQWRNCELVIADRWFASTKICSHCGHKNSDVVLGVESWECPKCLTMHDRDSNASINLDNYQKVA

SEQ ID NO: 63641 - protein, 610 aa, unknown
  TnpB Polypeptide
MRHVTRYRAYPSHTVEHQLFTGFARCTFVRNHCLDNNVFRDSLLPELKKQHPELKEVQSHVLQKVVHRIVSSLRALRAMKAKGRKVGKLRKKWVHSMEFDSTGFKLTGNRLRLSKIGEMRIELSRPVPGRIKQIVIKHTPAHKWFVAIISETPDTPEPTTGTRAVGIDLNLENFSTDTDGVVFEHPHNVRKSAKRLRRAQRKLSRAVKGSRNRRKQRVAVARIHEQVENRRNDFLHKWSRYYVDRYDHIALEHLDIRPMVESLDAKLRGRSKSILDAAWYKAREFIRYKAANAGTYVHLVDPAYTTQDCFLCGHREKKDLAQRTHSCPVCGYTVPRDLNAAQNILKRAAVGWGTPESTLVEIRTTTPPILVVQVPVNEARISRLKPGESVNPQRLLRPFRCRDVAGDAHHVAARPVVRADRDEPHIIPDLTIRQRQPAYVVFDRAGSRHRRDVPAVVCTLAAREEIGETLPEDIFPGAVQHPRPGRVNVEQAPIRVEQEDDVRQRLGQYPVPLFALRPCRLDLSLPGNIAEDGDNLERVLFAGPETGNGKEIKPAVPAFPGVEDAKGLSLRYAGCQGCHMREQVSWVPGAVLTDKPPPEFTLGSTLHIRE

SEQ ID NO: 63642 - protein, 399 aa, unknown
  TnpB Polypeptide
MFVLEFKCYAKESQYQSIDEAIRTAQFVRNKCVRYWMDNSNVGQKGIYAYSTVLRKEFPFVAKLNSMAVQASSERAWSSISRFYDNCKKKVKGKKGYPKFKKNTRSVEYKTSGWKLSEDRKKITFTDKIGIGTLKMKGTRDLNFFQIDQIKRVRLIKRADGYYVQFCIKEDIRVAKPREFEPTKHCIGLDVGLKYFYADSDGNTVEIPQFYRKSEKRLNRLNRQKSKKFRKGKPQSNNYLKAKNRYARKHLRVSRQREEFAKRVAYSVIQSNDLIAYEDLNVKGMVRNRKLAKSINDVAWSTFRKWLEYFGFKYGKVTIAVAPHNTSQNCSNCGEKVPKSLSTRTHICPHCGYVADRDVNAGINILKRGLSTVGHTGTNAWGDLPSSLVGLDLQGYGES

SEQ ID NO: 63643 - protein, 434 aa, unknown
  TnpB Polypeptide
LHLSYHVRIKKTIAAHFANTVYWYRRALDFYIDFCLKKWDSISGIREIRYQIKYIEEQTIAANARVLTVPDESNFKQQFPDFPPYLRRVAIKQARGLVSSHQKHLNSWMTMASNKRGKRPGHPSAGEAFPYLYHKYMFQRIDLYRAKIKVYNNGKWEWCDVDLCRSDAKYIKKNCSDGKEKMPKLVKKGAKWFLKFPFEFDSKVMSVPLEKQIAIGVDLGINNICTCVAMDAKGNIIGRRFLHRGFANKIMSSIGSKKRRNPQISISQMIINGRHQICKKASKFIRDFALEYDGNVVVFEKLDNREMSNKVFFSMSKKIQKMVERKCEKKGIKTEYVCAWNTSRYAFDGSGTVKRDKDNPSICTFRTGKIYNCDLSASYNIAARYFIRKIYNTLTEESRRSIAAKVPECVHRASSTLNTLLLMHSALADGASSH

SEQ ID NO: 63644 - protein, 362 aa, Sporosarcina sp.
LELAKEHHLKTGKWVTKSELQKRSKGIYPIHSQSVQAVCHKYLFARDAAKKTRKAGYVTKYPYKQKKYFNTKWANNGFKVYEDGKIELSMGVFEGKRQTPLVVWIKEVPVGKIKEIELIFDRQLLLSIAYENGQKIKEHTFDKRAAIDVGEVHTIAAVAENGENIILTGRKLRSIHRLRNKKIAELQRKMSKCTKGSKQWGKYNRAKKYVLSKSERQLQDGLHKTTKQFVDWCVENEVKEVAFGNVDGVQRNTSRRKKKKVRSRTTNQKLSNWSFGKVYAYLTYKLDAEGIKIDKHDESYTTQQCPCCAKRRKVSSRLYKCPCGYSNHRDIHGASTFFAKTFYGKIRELDFSLKHTKYLRIA

SEQ ID NO: 63645 - protein, 422 aa, Streptomyces sp.
MFCLSVIIQVRRVRIMRLRYGFRLYPTPGQRVALARAFGCARVVFNDAVRAREDARAAGRPFPSAAELSRTLITQARQTAERAWLGEVSAVVLQQSLRDAEAAYRNFFASLKGQRKGPRLGAPKFKSRKDARQSIRFTANARWSITPTGRLNLPKIGEVRVTWSRTLPVVPSSVTVIKDAAGRYFASFVIDTDPAVDLQRMPDAEAGIGIDLGLTHFAVLSDGTKIDSPRFLRRAEKKLKKAQRELSRRQKGSKNREKARRKLARAHAQVTDARREFHHQLSTQLIRENQAVAVEDLAVNGLARTRLAKSVHDAGWSQFVHMLEYKAQRYGRTFVKVGRFEPTSQVCSTCGAKDGPKPLNVREWTCPACGIVHDRDHNAAKNVKQAAGLADSACGAPVRPEPVLAQRDEAGSHGSPPNARAA

SEQ ID NO: 63646 - protein, 556 aa, unknown
  TnpB Polypeptide
MGNKHTEERKPSKTKTPTFLLELPLVADAGQAARVGGHLEVGRQFYNAMLSAGQRRLRRMRADPAWQEARAIPRTHKQERRAAFSALRERYGFSEYAFHELAKELRVSWLAEHLDAVLAQTLASRAYHALNRVCVGMAKRVRFKSKSRGLDSIENKRNDTGMRFVLQTQDKGCRQGYLLWHDDQLRALIDWDDPVVSYSLSQRIKYARLVRRRASSPRAQGADSEGERYVVQLVLTGLPHHKPKHTAGTDTVGLDLGPTSIAIVPREAEARLEPLCAELRPDARAIRRLQRKMERQRRAANPEHYDERGRAKKRAKGAPRWKQSRGYQASRRRKATKERRLAAHRKSLHGQLVHQIVAVGHKIVTEKISYRGWQKRYGKSVGRCAPGMLIDHLRRTVASTGGTLHEVPTRSTKLSQYCHGCGRFVKKPLWQRWHQCPCGIGPVQRDLYSAFLAAYLDPADPIPSCARYVVPWEGAEARLRAAHERATQRAKEGQVVPRSMGIPRAGARLPQSPSEPTPEPVVLAPSRPAGNVEGTLRTPRDYAGGVFSAQSPRHHL

SEQ ID NO: 63647 - protein, 367 aa, unknown
  TnpB Polypeptide
MKAYKFKLKINQAFVSKCEQTLSVCRELYNAGLQERRDAYAIARKRINFHKQAIQLPEIKLIREDFDGVHSQVLQDILRRLSKAFDAFFRRVKSSAEPGYPRFKGKHRFNSFTYPQSGFRLAGDKLTLSKIGSCRLRLSREIDGKIKTCTIKRQVDGWFVIFTAETPTKPLPKTGDATGIDVGIENFATLADGQIIENPHYLQSAQREIAIAQRQVSKKKLRGSNRGKAARLLARKHLKVTNQRRDFLHKLSNRLVAEYDTIAVEDLKIKGLVKNHHLARAISDAAWGTFVQILSCKAEGAGKRVVTVPAAFTSQDCSQCGARVKKALAVREHRCIGCGFVAHRDHNAAINILARTGPFVRANGVAR

SEQ ID NO: 63648 - protein, 377 aa, unknown
  TnpB Polypeptide
MIFVEAKWIYNDIIKDVKNKATDKYVKSLKEVAVRYPDGFSYRSISHISSQMRQGIATGVINSIRALARLKAQGREIGELKFVSEYRSVDLKQYGNTYRIDFDKNAIKLQGLGKPIKVFGLDQIAHNVDIANAKLVKRFGEFYIYVTTYAKDERVRKNEVLGLDFGISETLTLSNDVELTYQTTMSPRTIKLQQSLSRKIGAKKGEKKSKNYLKNKKSLAKAHYADKMRRLDANNKIFHFIDGYNKIVMQDEQIKSWRGSKEANKAIQYSAMGTIKSKLSGLESSRIEVLDKFKATTKTCSCCGAIRRMKKSDRVYTCPTCKTSLPRNLNSVFVMINMSRFATEYSKTMPVDSNDGDFINLSTIEGLKIKILSREAR

SEQ ID NO: 63649 - protein, 473 aa, unknown
  TnpB Polypeptide
MNNFDVVSRDLYSLPLSKHKYESLLELARRLGVLRTEFRHRFGGIPKKLKDRKIRDEYLASGREFNVPARIWKETLRDTLDDLNAYNEAGFKRVIKKLYSKFGKQEAVAVLLSKTIRNAEYLNNSYIHRLVRKNIKRSYNKSRNQIVLDNCTYTAFIKDDKAFIKICSLDKGKRIVIPLRTNRIPSGTIRLVVDDKSRTLRVIHSVKVYHDEQSSKELGIVGIDKGYSEVLTDNLGNRYGKTFGIKLSELSEYVTNKYRGRNRMSALYKLSIERRDFKKAARILENNLGTKKVSKRKDILKAEIKREVNLASKEICSKAEEITLEDLSHSFSYDKGAKANRNLSQWTRGLIDEALNKYAKRYGVPLFYVNAAYTSQTDCVDYSLSGVRRGDKFYRESGEALDADVNAANNILTRRYDNEITLYHSPKKVKEILSRRSLETAQAVLQLRYADNEERVAKRELSENLINNMARSS

SEQ ID NO: 63650 - protein, 419 aa, unknown
  TnpB Polypeptide
MSEILITKGFKYRIYPNKEQQKLLNHQCFIYNQAYNIILDLQKETYEQNKDKDKKDRTYLKASEIDLKVKLALKQRELPFKTVVAQQARINANRALQQAIKDKNKGFPKFKNSKIAKQSFNWNNQGYQIKDSDNPRFKIFHLMKMPLKMRYHRDLPNNYKINQITISKSHDKFFVSFSVTYTKPNVSLISTSNLDIKKAIGVDLNINEYALSNGELIKTNSKLLSKAKYDKAFKRLQRKQSKRILKAKKEKTKLSANFKKTQIRLNKIYEKAGNIKKDLQHKISKEIVDRFDLIVVENLKTKNMTKRAKLKNIKAKSGLNRSILDTSFYQFLSFLEYKALLNGKLFTKINPQYTSKTCNKCGSIKTNLTLKDRIYICDKCGNEMHRDINAANNILERGLKSFGLGISLLDYKQKAFLVS

SEQ ID NO: 63651 - protein, 294 aa, unknown
  TnpB Polypeptide
LYDGWRVSQELKLRLVGRKALVWLGFEKEVEVETEEGNYISMDVNENNVTLAVFEGFKLKELRRYETGLGRIVLNYSLRREEITKGYSTKGELIKKKLRRLRERERKLDILRKTVKRIFELANELKAKVIVGKFSFKAKDRMEDNKDSRLRHRIHQWSVVKFSEMLKTQPVDVEEFSEAYTSSINPFDGKKLRRGKQIKEMITKVFNPYLMTGTAHEGGGIRVLKVNARYLESNQGLLERDSVAPLNLARKVDGRVVMFLSTSPNDLRVTVYDPSAGVPVAELEVIKEDKLRHG

SEQ ID NO: 63652 - protein, 421 aa, Lachnospiraceae sp.
MAMAEIVKTMKLHLRITEWPVITAFREITEAYRLGCNAVSEYIFQHNMTLSYPVINTDMYHILREEYCLKSQFAQSASRTVIARYKTIMEQLKKNPYRYPGEDGKWHSIPKTLEWLQKPVLFSRPQADFVRERDYSFVRDKITGHPYLSVNTLRGRMRVDYDVPECFAEYFDRTLEHPWSFGTAKLVSLKGEWYFHIPMTREEPDVFDASCPKHVVGIDRGLRFLTVAYDEQGRTFYEEGQKILAKRESFLKVRSELQSRGTASAKKALKRISGRENRWMTDVNHRISKTLVDTYGPNTLFVLEDLAGVSFDEQNLSTRTKQQRNKLRSWAFDQLGQMLTYKAHAVGSEVLEVDPHYTSQRCPKCGRIRKENRNHETHEYVCDCCGFQSNDDRVGAMNIQMLGTMYVSGDSNPRFGKRKIG

SEQ ID NO: 63653 - protein, 369 aa, unknown
  TnpB Polypeptide
MKTNKYKFGDQSNTIRLGNLLDDMWQVHEYFHKWQRQRYKDRLPYAGYEAMCAHVTDLKRTTHRHWNALPSQAIQEELRRIDKAYLRFFKKLGGRPKIKKRHKFKSFTLKQAGWVLEDNRITLNFRKWDNGKWRHDKVAYTFHKHREFYGNISRITIKRDACGDYWLCILTGFLESKPLSATGKSVGADFGMKDAYLTLSTGEKKQHPQPLKHSLKKLRSLNKELSRKIKGSRGWWRCVRQIARLYRKISNQRQDFHWQLASELCKKFDTIAIETLNLAGMKRLWGRKVSDLAFYEFVEILKYKCIKHGRRLLQVGQWTATTKPCSHCGFHNENLTLSDRQWTCPECGSDHDRDINAAINILRAGIAVT

SEQ ID NO: 63654 - protein, 407 aa, Micromonospora sp.
VCAGGVQRRAARTAGSPRGRTAVRLRRRVVQTGHHGGEEDRGPRLAGRGVGGRAATGPGGPEHRVPQLLRLGHGQAQGPQGRPAQVPVPQGQPAEHPVHQEQPVQGLREGRLRLPKIGDLAVRWSRTLPSDPSSVAIIRDAAGRYFASFVVTLGADETLPPVDSEVGIDLGLTHFAVLSDGTKVAAPKFLRRAARKLKRLQQDLSRKQKDSSRRKTAVVNLARAHARVADTRRDWQHKLSTQIIRENQAVYVEDLCVVGLGRTRLAKSVHDAGWALFTGMLEYKAARYGRTFGRVDRFFPSTRMCSACGRINEKMALNIRSWDCPCGVAHDRDVNAARNVRAAGQADLNARGAHVRPALVPAARREAGTHPDAACSTRSVEGISVLQGGEDVKCVSPASGGRRGGRS

SEQ ID NO: 63655 - protein, 210 aa, Micromonospora sp.
MPSRFAINQYGTMLLVQLRYQFRVYPTPGQQIELARAFGCARVVFNDGLRARQEAREAGLPYVCDGELSKRVITEAKKTAARAWLGEVSAVVLQQALADLNTAYRNFFASVTGKRKGRKVAPPRFRSRKDNRQSIRFTKNSRFKVCEKAGCGCRRSATSRSAGPGHCRRTLRPWRSSGTRPGGTSPRSSSPSARTRRCRRSIPRLASTWA

SEQ ID NO: 63656 - protein, 383 aa, Paenibacillus sp.
MLVKKAYKFRIYPTKAQEMMIAKTIGCSRFVFNYFLNKWNELYKETGKGMTYASCSSELTSLKKEIDWLKEPDKFSLQNALRNLDDSYKRFFKKQNDAPRFKSKKNPIQSYQTNFTNGNITVVENKIKLPKLGLVKFSKSREVVGRILNATIRRHPSGKFFVSILVETNVDLLPKTNKRVGIDVGLKDFAILSDWKVFGNPKFFRTLEYKMVKEQRILSRRQQLALKQKRPLVEAKNYQKQKLKVARIHEKIANARADYLHKISTEIIKNHDVIGIENLSISNMLKNGNLAKAISEVSWSQFRSMLEYKAKWYEKQVVVVGKNFASSLLCSSCGYKNKDVKSLALREWDCPECGSHHDRDINASLNLRNEAIRLLTVGITGIA

SEQ ID NO: 63657 - protein, 390 aa, unknown
  TnpB Polypeptide
VKYVKTVKCKIEPTQEQAQALLETTQVFAKACNDALKVAIEHNTANKIKLQKLCYYSLRERYDLQANLTIQAIRRVAGAYKAAKAKKRKPKTFKPTSASYDQRTFSLHQIKRPTPEFEASLSTVQGRVKGIPLKIGNYQRHLLTQVIPKGATLTRTKTGFYLNIILEWDIEAPSGGGRVIGVDLGINNLATTSHGMRFPGGEADNTRGRYSRLRSALDAKGTRSASRTLNRSKRKEQRWMRDRNHIISRRIVDSLKPGDAIAFEDLTHIRERTTVRKDQRRRHHSWAFRQLQQFIEYKALERGIAVVYVDPRNTSKSCSRCGAIGLRTGHSFSCACGYRNNSDYNGAYNIAARGHALVARLSSCSPKATPVEDKAAFAELRPRASASPRL

SEQ ID NO: 63658 - protein, 602 aa, unknown
  TnpB Polypeptide
LGAGENRTPDALLRTEALCSTELQPRFTSILHRLSRISNVLPITPMKRSMKNRESLHAAPYVMASVRVRAAPELTSRKRSSLNELARAMARAREEYLHAYWGPRFAMAAVLTPHRLVEMRRRTGWAVLELSPHQNKVAMETALGLIRGSWQAARGRTRAAILRDSTLDRIDRDYWLRILDDPTLLQRCLDRRPIDIPSDLSPRKRLRGQRKLVRLVLRLRGRYPRKPRRLWFDVDTNLYRVFERREDRYFRGAWFALTSLKKGQRIAIPLRGSDLAAFGSRTGRAESRPSVRVYVGETIEFETARRLPRRPPGNEVVGIDLGFNSLLVASTGSVETAERYGDDPTARSRITDAAANRHRQRQRLQAHERSLRTLLPLRARRIRRRNLTRVRVHRLATKEARQLRDEANRALNQLFASHTLGRSVHEGLGFSSFRLGRLINRRLSRWLWGFLGKRLLFKAELNGVELQVVGAAYSSQSCPRCWFTSRRNRRGERFSCIDCGYTGSADAVAATNVLRRGSDAALTGLMAPGAIRQILDARWQSARSGRARGSNEKAPAVDVPQDLRFGESREEPVGPTLAHARPHGRALSTAAGVPPSGRGGRT

SEQ ID NO: 63659 - protein, 265 aa, unknown
  TnpB Polypeptide
MKLGVLKAYKFRIYPNGQQKQFFIETFGCVRFTYNQLLEARMEELANNEAKQGLTPAKLKKEYPFLKETDSLALANAQRNLDRAFRNYFQKRAGFPKMKTKKSIWQSYTTNNQQHTIYFEEDQIKLPKLKTLVPVKKHREIKGKIKSATISAKNNEEFYISILCLEEITPLPKQQASIAVVYDPQQLIKANQSVPVTCEHAIQTKQKLTRAERKLQVKATAVKRKKILLTQARNYQKLKGKVARLYRFHCCQKREFINQIKYYIF

SEQ ID NO: 63660 - protein, 436 aa, unknown
  TnpB Polypeptide
MKTQIAYSDKINKGKYQALIEQAKRLGAIRTEVWQRFGSIKGVGLQDRTIRDSWLKEGKEFNVGATPWKQTLCDAIGDIKASREAAKFDTKQAIRRHTQDKDKQKQLYTDLKYDKWTDDTYLTRVMRKYWHRGHNHTHNQIIVRSDDYTVFILDKKAWIKIPSLIKGKRIAIPLNTSITPKGNLRIILRNDKVEVHYAVEVVKTQDCGEQVIGVDKGYTEVLTDSDGEHHGEGLGKILTDESDRLKLKYQRRNKLKAIANKKPWVKSYNLGRKKLDRQSVIHQSKAKTIVHKAVNSVVDKAVLVVTEDLTSPIAGKKFSKNVNRRLSAWTKGVTASAIENISHRRGSTVIYVNAAYTSQMDSRDGSLSGKRCGDLFHCESGEVLRADVNAARNVLARLNDTEINRWMPYKQVHAILLKRTEANRLKLLNQDSSCKL

SEQ ID NO: 63661 - protein, 332 aa, Shigella sp.
  misc_feature (31)..(31): Xaa can be any naturally occurring amino acid
MRLVAAVSTRALISGGLSHHPGAYPQKTGSXRFKKRGQNDVFRYPQGVKLDQENSRIFLPKLGWMRYRNSRQVTGVVKNVTVSQSCGKWYISIQTESEVSTPVHPSASMVGLDAGVAKLATLSDGTVFEPVNSFQKNQKKLARLQRQLSRKVKFSNNWQKQKRKIQRLHSCIANIRRDYLHKVTTTVSKNHAMIVIEDLKVSNMSKSAAGTVSQPGRNVRAKSGLNRSILDQGWYEMHRQLEYKQLWRGGQVLAVPPAYTSQRCAYCGHTAKENRLSQSKFRCQVCGYTANADVNGARNILAAGHAVLACGEMVQSGRPLKQEPTEMIQATA

SEQ ID NO: 63662 - protein, 405 aa, Cyanobacterium sp.
MKQRYNYRIYPTSQQEQLLAQLFGCCRVVYNDAVALCRQIYKEGGKKPSNSELQRRLITQAKKTKERQWLSDVSAIPLQQALNDLNQGYSNFFDSVKGKRKGQKVNPPKFKSRKSNQSARFTRGGFKVGQHKIKLAKIGKVKIIWSRELPSLPSSATVIKDSASRYFISFVVETIPEKLPDNGQNVGVDLGIETFATLSNGQKIKSSKPLKKYQRKLRRCQRNLSKKKKGSKRYEKARKRVGKVHSKIKDTRTDFLHKLSTDIIRENQTIVLEDLNVGGMVKNRKLSKAISDMGWRTFRTMLDTKSVMYGREFIVIDRWIPTSQVCSNCGFNGGKKELNIREWTCINCGVVHDRDVNASKNILVAGGHSETQNGRGAGRKTTTMVAVGDEASTHREIRFKQLSLF

SEQ ID NO: 63663 - protein, 311 aa, Moorea sp.
MRSAYQYRLRLTKPQEAEVERWLDMLRHQYNYLLADRFSWYEQNRCSINSCPLVCHLPELRNNPDYFSQKKTLPQLKKDRPWYGAVQSQVLQDCVKLVDLAFKRFLKGDSNGKKSGRPRFKSKNRYKSLTFPALSKNPITGSILTLPKFGKVKMIYHRPIPEGFKVKTATITRKADGYYVTLSIQDDSVPNIIPVDSASSPVGIDMGLKSFLVKSDGSEVPIPQYYRKAQKLLKKIQKAVSRSKKGSNNRKKAVIKLGKAHKKVADTRKDFHFKTAKNLLDNHDLVVHEKLNIKGLAKTKIAKSVLDAGWG

SEQ ID NO: 63664 - protein, 383 aa, unknown
  TnpB Polypeptide
MIQTVSTRTICCKLSLDDPSAATIRATAEAFNAAASYCASVAWDLGITNKNKLHHVVYGPTRSTYGLGAQLACCARDKAAEAVRAARAHGSDTCPTFTPESSIRYDARTYRLMSMDRVSLNTIHRRVMGQLVLGDFQRRHLYDTSWKIGGAELVQRGGQFYLHITQTKRDPEPDEPTGFLGVDVGIVNLATDSDGETFSGDQVKRVREKRFSHRQDLQKTNTRRARWRLRQLATKESRFQKDVNHQISKKLVRKAKTERKALVLEELSHIRKRTDNGCKRSQRRLRTGWAFRQLRTFLVYKAQQAGVKVVAVDPRNTSRTCSVCGYCDKRNRKTQAHFCCRSCGHTAAADTNAAVNIAYRAVRQPAYCAAPPPGGGASTSCLL

SEQ ID NO: 63665 - protein, 425 aa, unknown
  TnpB Polypeptide
LIVHQAFRFALDPSPRAERALASHVGARRFAFNWGLALVKKRLEARRRGEDAEVPWTLPALRREWNRAKETVAPWWRENSKEAYSSGLAGLADALKAWSDSRKGRRKGRRVGFPRFRKKGQCRESVCFTTGAIRVDGKSHVVLPRIGRVRTHEPTTALLEGIEAGKARILRATVSREGGRWFVSFTCEVEREPKAPKFPGTVVGVDVGLRHLAVLSTGEKVPTPRPLRKALRKLARLNRELSRREPGSRNREETRRRLARLHARVARIRRDALHKLTTRLARTYEVIVVETLNVSGMLRNRRLSRSVADAALAELRRQLAYKTVWYGSCLVEAGRFWPSSRTCSRCGVVKGSLPLWERVFRCDACGLALDRDENAARNLAALAAAVAGSGPETENARGRDVRPEAAFGGRPAVPEEAGSRQRAGA

SEQ ID NO: 63666 - protein, 396 aa, Leptolyngbyaceae sp.
MLVLEFKAYGKSSQFKAVDNAIRTAQFIRNSCIRFWMDNSKVNKYDLNKYCAVLAKNFPFANELNSMARQASAERAWSSINRFFENCKKGIPGKKGFPQFQRDCRSVEYKTSGWKLADDRKSITFTDKKNIGKLKLKGTRDLSFYQSDQIKRVRLVKRADGVYVQFCVDVNRVEVLEPSGNTIGLDVGLKDYYTDSEGVMIENPKFLRKGETVLKRSQRRVSRKVKGSNNRRKARQVLGKRHLKISRQRKDHAVKLARCVITSSDVVAYEDLRIQNMVKNHCLAKSINDASWYRFRVWMEYFGKVFGRITIAVNPQYTSQECSSCGEVVKKALSTRTHVCKCGCVLDRDHNAARNILSRGLGTVGHIGTFGLEPSNALGDESSTQVGANLPEQVMS

SEQ ID NO: 63667 - protein, 398 aa, Planktothrix sp.
MLTLEAKLYGKTEQFKALDEAIRTAQFIRNYCIRYWMDNAGVGQYDLSALTKDLAKQFAWCKKLNSSARQASAERAWASIKRFYDNCKKQIPGKKGFPRFKKNVRSVEYKVSGWKLSEDRKAITFKDRFKAGTFRLRGGYDLHLYSIEQIKRVRIVKRSDGYYAQLCIDAERKVKHDFTGKVTGIDLGLEHFYTDAQCNQINNPRYLRKSEKRLKRLQKRLSKKAKGGKNREKARQRLAKQHLRISRQRKDWLIKLASALVQSHDLIVYEDLQIKNLVKNHCLAKSINDASWGIFTNWVDYYAKIHGIVCVAVAPQYTSINCSNCGEEVRKTLSTRTHKCLCGLVLNRDRNAALNILAKCLEMLGIVLPNTVGRTEINAWGENNLYLIGETQLDKLIR

SEQ ID NO: 63668 - protein, 398 aa, Phormidium sp.
MFVLEAKLYGDSRQFAIIDEMIRTVSFVRNKCLRLWMDTPATGRYDLSAYCKVLAKDFEWAGKLNSQARQASAERAWSAIKRFYDNCKRQIPGKKGYPRFKKSRSVEYKISGWKLSQDRQSITFTDQFKAGTFRMRGAFALNYYDTSLIKRVRVIRRADGYYAQFCIHCDKTEAVKPSGNAIGLDVGLKHFYTDSNGQTVENPRYSRKSEKALKRLQRQVSRKKKGSKNRRKAVKRLGRKHLKVQRQRKDFAVKLARCVVSSNDVVALEDLRVRNLLKNHNLAKSLSDASWRLFFQWLEYYGTVFGKMVVGISPEYTSEDCSACGGRVKKNLSQRTHVCPCGCVLDRDENAAINILAKGLAAIGRGGQSQAAGLEPENASGEINLCVISESLSRKLAR

SEQ ID NO: 63669 - protein, 509 aa, Streptomyces sp.
MLELVGAHLGSLASRDLKTRCAQRLGHSADSWAVRKRDLTPLSSSRWAGSLTRATHDQWALARRCQLAHIKGLEAGIRMLRHRLSQPVGAKGTKKTPGGYRSKHEWFAKSRRLGVLEDRLVAARAEWDTGIVRVARGGKRLLNTRHHLEAAQIDTAQWRTRWRAERWFCQADGESGKPYGNETIRVTPDGEVSIKLPAPLAPLANAPRGRYVLSGRVRFAHRGGDWVDRVETNRAIAYRIHYDVQRGRWYLTASWQIRPAPAISLAAALAKGVIGVDMNADHLAAWHLDTHGNPIGRPRRFPYDLTGPADHRDAQIRHALTRLLHWALACDVRAIAIEDLDFTAERSREKHGRNRRFRHLVSGMPTARLKARLTSMADATGITIVAVDPAYTSKWGAQHWQKPLNSKTRKITRHDAAAVAIGRRAQGHSIRRRTTPPPHDRSDRAGHRTVQAGPGTLGHEETRPRIPGPRTRSVPPGRRANAGDQRPQHRSGHAAEHGPWQQEQLPLGP

SEQ ID NO: 63670 - protein, 491 aa, Sutterella sp.
MFNGRRFSAHFEDDTSRASYYTWSAAQMLVYNAKVQESAYFWAFHRKFWSPVPLPEPDQKYSHLLDYEVVPWVKDVPGGVKGVGAYHFFQAQQRFLRGTSGRPRTKKIQGSDRQLTLTRNFFSLEQISNKYWRLNFGLPARPGGSIRFRAHRKFEMPAVVYVRSTNRSLTVSFSFEDDIPDYSETDDEIVARLRMKDPAELAERTVGNDWGVVRNVQRSDGPTHHLLPQQIERIKRFEQGRKHLQHQLSRKEKDSKNSKKLKGRICKKFQYEQNVHIDFAHKTSHELATLENVDLIVFEKLQIANMTKRPRVKYDENGNALPNGRTAKAGLHRSLLRSQYGRITEFTKYKCRQNGKLFVEVDPKGTSQECHTCHHTARENRPDQATFRCTNPNCPDFGVEMNADLQASLVIKQRGVNLVLSGGLRKKTSKKFLSVPRAKKNTKNVGVGRPETMPVKPSKGRGLRCSTKGGCQASQGETSQLPTRGGCEAGS

SEQ ID NO: 63671 - protein, 277 aa, Okeania sp.
MKSIRTKLKLNNKQKTLMAQHAGYSRWCYNWGLSLWNAAYIDGYKPNARKLREVFTNHTKPLYPWMKNLSSKVYQYAFINLGEAFKRFFQGLGKRPRFKKKGKSDSFTIDNCGKPIELNGWNHKLPFIGIVKTYEPIEATTKKITISRQAGDWYLSCSYEFTPTSTPKTTEVVGVDLGIKTLATLSDGKVFESVKSYRKLEAKLSRLQYLNRNKNIGSANSRAAQLKIARLHRRVANIRKDALHKLTTYLAKNHGSVVIEDLNVSGMLANHKLAKIS

SEQ ID NO: 63672 - protein, 402 aa, Streptomyces sp.
VIRAYKFLLRPTTRQEQALRAMLADHCSLYNGALQERRDAWRHGSKTSITYGAQSTQLKEIRTVDPERQGRWSFSSQQAILRRLDKAFQAFFRRVKHGQTPGYPRFKGVGHFDTVVFPKDGDGCRWDSTPHDPQTRLRLHGVGHIRVHQHRPVRGRVKTVAIKREGRRWYVVLSCDEVPAEPLPTTGEAVGIDLGVAHFLTTSTGEHIANPRFLQAAAEELTEAQRHLATFPKRTKQRTTAHRAAARKVAKIHARIRRQRLDHAHKTALALVRDHDVIAHEKLNTAGMTKVPALKPDPEQPGVFLPNQRAAKAGLNRSILDAGWGVFLAILAGKAESAGRTVVAVDPRNTSRTCPSCGHVAKENRLTQAKFQCATCGFAANADHVGALNVLNRAGLALCDAA

SEQ ID NO: 63673 - protein, 275 aa, Nodularia sp.
MLVFEFKAYGKPVQFIAVDEAIRTAKFIRNSCIRLWMDVKGTLKNDLQKYCAVLAANFPFANELNSMARQAAAERAWSSISRFYDNCKKGIPGLKGYPQFQKDCRSVEYKTSGWRIADDRKSITFTDKKGIGRLKLKGTRDLHFYQINQIKRVRLVKRADGVYVQFCIDVNRSQNIEPTGHTVGLDVGLKEYYTDSDGTMVENPKFLRVGEKVLKRSQRRVSRKVKGSKNRGKARLVLGKRHLKISRQRKDHAVKLARCVVQSNDLIAYVRVACA

SEQ ID NO: 63674 - protein, 484 aa, unknown
  TnpB Polypeptide
MPEYITTRTYYSKQLEKQTLKELSLIAKKLGVLRKIIWHQFSSSPRRLNNREIRDQWLKEKRLNSNLYPKIIDQLPARLWKETLRDTIGNINAYFEAGLTEIIKILYKKHGKTKAKELIKQLKTNYKANNKLHRLVRKTIPKGFSKVDNIICLDEECYSFKDDNTNIMQVMGLHSMKRLAIPLTTKYRPSGNFKIILKENRCELKVNYKYQIAEKQEKPYEAIGVDKGYSEVFTDSTAERHENGFGKLLTAKSDFLDQKYKNRNKLWAIMKKAREAGDIKKANNIKFNNLGNKKINRQKEAMKIALKEKIYLAAKTVAQKASIIAIEDLTFKGKNTKYKKVNRRLSSWLKGVIDEAIIKYCFIYGTKLVYVNAAYTSQGDSRYNCALVGKRIGNSFIGFDEVVLDADVNAALNILARLYDQEINLYTPAEKVKEILIRRANAVILASVETAQLRLQQETSTNFSFLAKSGLSEQLNNNLTRNRR

SEQ ID NO: 63675 - protein, 244 aa, unknown
  TnpB Polypeptide
VTLTKTPVKEQIICSVDLGINTDAVCTIMRADGTVLGRKFINHPSEKDRMYRTLGRIRRFQREHSSAQSRGRWAYTKRLNIELGRKIAGAIVKNAEENHADVIVFEYLEMQGKISGKKKQKLHLWRKRDIQKRCEHQAHRKGMRVSRVCAWNTSRLAYDGSGSVSRDPKNHSLCVFQTGKRYNCDLSASYNIGARYFIRELLKPLPVTERSLLEAKVPPVKRRTSCVYADLRKLHSEMELLKAA

SEQ ID NO: 63676 - protein, 420 aa, unknown
  TnpB Polypeptide
LSLPPNRNGKKTLAFYRAKAYNGSGMNLTAKVKLVADPGQAELLRATLEGANDACNFISEAPWHSQTFRQFDLHKIAYRKVRERFDLHAAITVRCIAKVADTYKVDRKSRRTFRPHGCVPYDDRILRWFPDKRLVSISSLNGRVVIPFVCGSRDRELLKHRHGESDLALIDGCFYLLAACDVPEPDPIEPVDVLGVDLGIKQIAADSDGEMFSGALVNGLRKRHRRLRTKLQNKGTLSATRLLRSRRRKESRFARHINHEISKKIVSKAEDTKRAIALENLNGPGSQMTVRRPQRDIFSSWSFFQLKTFIDYKARLVGVPVVIVDRGNTSITCPLCGHIDRRNRKAQGLFLCTSCGLAGAADVIAAENIRRAALIVRPNVSDFGASAPKRAETSHVAASQGRLSTGGDPKPPRSIQSICR

SEQ ID NO: 63677 - protein, 362 aa, unknown
  TnpB Polypeptide
VRRQFNRSNARTAKRGGRFSHSKEGRSQRQARLLGQRTRGPRPSDVHPQHVVLRRVGGEFSRLEILVGQDLKDEYGLGYRERLRLEVRGEPNWKEYDKQGRLELYYDDNAQTFRAFQPVTVDNSRLAQPLASEEAALDIGANNLVACTTTTGQQYLYEGRDLFERFRETTREIARLQSLLEDGRYSSNRIRSLYRRRTRRRDHAQDALARDLIERLHTEGVSTVYVGALTDVLDTHWSVETNAKTHNFWAFRAFIDRLACTAEEYGISVELRSEAWTSQECPQCGSTDRTTRHRDTLTCPCGFEGHADLTASETFLKRQTAVSRSMARPVCLKWDDHRWSESPRSPRSNEEYTNPQVASVGR

SEQ ID NO: 63678 - protein, 420 aa, unknown
  TnpB Polypeptide
MELTKKVALYPNQTMMKILDDLCDYRRYCWNQGLNLWNDLYSQRVKNVPVDLRKKSQLASTDKTIVFSDEEQELLRLFPSPSNRVIRNNLVANKADWQYTLSSRVLQLAIKDLANGWSAFFDNKKPKKKGSKKKKRKVGKPSFRSKKNPKQGFKTDRASIKNGKLVLDKPHKYKDAWYGISFRGYDLPDGKIKHCAITKIGNSYQATITIDCPKQPLPKTGKKTAIDANVNHFDYTEGSFAVFPKQLERLYAQIKYYQRLLARKRHENGKKATQSKQYFKVKTKLQKCYQRVAAIQNDLLHKFTTMIYQTYDTVIIEDLDVQAMQMQKKAKNLHRSLFGRFRLYMEYKAIKFDKTLILADQYYPSTQRCSHCGHVKTDDDKIGLDGNKKHGTKHNEYICYECGFVADRDQNAVANLLALA

SEQ ID NO: 63679 - protein, 739 aa, Prevotella sp.
MSTISKAVLDIVLKRLSCGLDPDNVSIGDATNKSIRVAYMTFCASKQGVPLSDDYLLKAACRLENYEATESVMAKLKSVLMWMRANIPNVKPNPMFQTRWATWTKGTEKKYAKRLISQIKPVLAAKKKRESEKNRINKKIADGLLPDEQKLLDALECRDYETVSQQPLGYLVDVALERIRLHQQYPNVYPLWLSRTIFRQIYKKEPTPEEDRRTTSLIKKIEAYFQDKDIPKSNISEADRLHIDEAVSDWAGLTQKERNKLIAKKSAEKINRAKGMLPIEERKAIRTAQREATEQERKLSSAAKEKYKETHPFCVCHKIRISPNRKQQTYLLKCFGTTRFVYNWLVDEWERLRSEGERPSAIDVSKRFNAIAQTEYPWTYKVTHYAKATAFKAFENAFDRFIKNGDRPQPKKHGLNAGSLHYVKGDRKQPILLDSNPDLPNAAPSQKRQYLHVPGLGYVKMMERLRFEGLLTSIIVKRESDGRYYAVLRVYVDHEEWQRTHKRKYDVQTFDEPVGIDLGVSSLAILSNGLRIDSPQKNERLSAQKKQLQKAIAVRKEKHSRHTSKKQKRMARQLAVVKAKICRKRDDYHHKVTSVLAYTYKNVSMENLNVIDMIRDGKIPPHLILESALYHFRILMEQKLMMAGHHLHLAEKGYPSSEICSRCGHQIEEMPLSKRTFCCPECGYKIDRDLNAAVNLGKLIGLDKSETNPADKGVLTAILTRNRIGTHQTREVEQAGHVT

SEQ ID NO: 63680 - protein, 428 aa, unknown
  TnpB Polypeptide
MSKILINGVSKLYKTQSNQIRQLSKEQYNLLRKMCWHSARLYNFGLYSVRQNFFDTKTYLPYPQNYHYCKTNENFQILPSVMGQQTLKVVDRSFKSFFGLLKAKKKGKYQSRISIPKYLPKDGYFQLIIPKNGFQIKEDKICIGISRQLKQEAGLKNIVLDFSTQIEKESVQEIRIIPQQKATFFKMEVVYEAKEQDLNLNQNNVLSIDIGLSNLATCYDVSNNRAFIMDGKKLKSINYYWNKQNAKLQGIKDKQNIKWYTKHQFLLKRKRENRVKDVMRKTAKYILDYCIEHNIGTIVVGHNKGWKQEVNMGKRNNQNFVQVPFGYLMSILESKCQEYGVRCLETQESHTSKCSAIDNEQVKHHDEYLGKRVKRGLFKSKDGFLINADLNGAINIARKSKVTAIQFNTVEQIKGVVAFPKRIRIANV

SEQ ID NO: 63681 - protein, 407 aa, Streptomyces sp.
VGRVIRAYKFLMRPTVGQAIALGEMLRDHCSLYNGALQERRDAYRHTSKTSIKYGQQSAQLKDIRTFDPDRHGRWSFSSQQSTLRRLDKAFAAFFRRIKSGETPGYPRFRGANWFDTVDFPRDGDGCRWDSTPNDPVTRVRLQGVGHVKVNQHRPVAGKVKTVSVKRQGRKWFVVLTAEQTAPKPLPATGSVVGIDLGIANFLADSNGGFVPNPRHGRTAAAKLDAAQQALGRFPRVRRNKRSANHRRAVEKVAELHGKTRRQRLDHAHKTALALVREHDVIAHEDLKIRNMAKAPAPKPDPATPGSFLPNGAASKAGLNRSVNDAGWGVFLTILHAKAESAGRDVIAVDPRNTSRRCPECGHTAKENRLTQEKFHCVVCGHTAHADTVGALNVLRAGLVRREAQPA

SEQ ID NO: 63682 - protein, 458 aa, Phormidium sp.
MVKQKPIIRTDKWSLNPSALQRLLFAETVQVYRRLCRHLVGIVFTHWAELGGLSNQKVIPAVERLIHQTTQKPHVKYPGIDRVFHKFPSYYRRAAIAFAVGQVSSFVTRYQEWQSGTRSRRDAKPPTLNPNAGCYPVLYRGQCYKLHGTDRIEIKVFTGTDWVWTTVQISGLRERHEVDSNKLLSPSLICNQQACHLSVPFECHPVKRQPDQTVVAIDLGINTTATVTVVTFNGTVNHREFIHPGRDIDRRDKRLKSVAIRASKTMGKGGKLHKGFCSNTYRKCRHLNQQIAHIVSKRIVVLAKQFNAEAIVFEHLKGWRATGGRKRSNLRQRFHGWLKAMIRDYTEMKWQEVGGKTIDIVAAYTSKLAYDGSGVVQRDSKNYALAKFTSGKRYNCDLNGSQNTAARGILKLTRRKDSEGCSSKSSGRSPRSWACLCDLWTRNLQVSTDTITSRQQVV

SEQ ID NO: 63683 - protein, 431 aa, Phormidium sp.
VIVTRRITFRLYPKPAQERKLYEWRRLHCYLYNSALADRKDSYQKLGKSVGYFDQQNRLPEFKAVWTEFIELGSQALQATLKRLDFAFQRFFKGLGGYPRFQSIRNYSGWTYPATSGWKAHTTGNNGYLELSNLGQIQMRGKARTWGVPTTCTIVYRHGKWYASITVKCEPARKTEDGAIGLDFGTLTAIALSDGQKIENPRYLAATQAKVRQASKQKRRKRAPHRKLKIKGSRRWKKAQQRVSKLVRKAARQRTDWAHKRTAEIVSYNSLVVTEKLNIKGMTSKAKKGKRKHQKTGLNRSILDVGWGMMRGMLAYKETEANGIYLEAPTQKLKPSQRCPECWQVKPKTLEERLHVCPCGCTQDRDVASARVCLLWARGLGTSLLEDADQFGSTKSPKHTGGFRQLAETKRQKLRNLEDSGLETPSSYEAG

SEQ ID NO: 63684 - protein, 379 aa, unknown
  TnpB Polypeptide
MINKAIKYRVYPSTEQRVMFAKTFGCCRKVYNLMLSDKIEGYKTTGKFPTVTPAKYKKDYPYLKEVDSLALANKQMDLQAAFRNTFSKSRKKKNGFPKFKSAKHSRKAYTTNNQKGTVAIIDNKYIKLPKIGKIKAVLHREPETGWVMKSATVSQESDGKYYISILFEFDNAVNDYRADKTNAIGLDYASDGLYVDSNGNIGTNHKYYRESHKKLAKAQRRLSGMQGSKKQEVKSKNYIKQLRKVNKIHRHIANQRLDNLHKLSTEIANQYDVVCVESLNLRSMSNKGFGNGKATLDNGYGMFLSMLAYKLSDKNKYLVKVDKWFPSSQMCHCCGTLHPEMKNLAIRTMKCDCGVTISRDQNAAINILREGLRLLNEVA

SEQ ID NO: 63685 - protein, 439 aa, unknown
  TnpB Polypeptide
VQKTIKIPVSDKITQEKLEKLNRLTARLTYGCQLFLNKIIENNVTTVKEAEKFRREIQQLTGLPPAYAQCCRDKALWMYKSYKKLHKRWEKDVKKLEKSIERCKNEHKRKKLEHKLYRLRKREPSLLTINNKISVMFDRRVGSVEFSHSAKEFKLWVRISTLEKGKRINIPLHSYAYAEKHLKEWKIKSFQIVWRSKLKRYEVHVVIEKEVVCKPESFVGIDLGLKRLIVAVEQGKENRVLLVEKSKHKEFFIRMRRLNNRISKLQRLGKYRILKKLRHSRRNYARNFRRKLAAEFARQFSNYLIFIGHPHHVRDKHYKGSGNRKLRKRVNHWAFREFAEILQTKLMEHNNVAVIINEWMSTRQCSECDSKRTKINDRKFLCLNCGHKNDRDVNAAKNILKFGLAKVLRKGAGAVVNQLELPMIGPKPLKVEAPYFSGE

SEQ ID NO: 63686 - protein, 533 aa, Actinoplanes sp.
VNLEGWATFTDVSYASERRRDESGMLPVPGERLGRLTMAGEPVSGATAGPAGQAVMYSGLRRAEDAATKGSGLKTIQAYRFALDLTPGQERDMYAHAGAARFAHNWALARVEAVMGQRAAERSYGVPDEQLTPSMPWSLAGLRKAWNAVKADVAPWWAEMSKEAFNTGLDALARGLRNWADSRTGKRSGRRVGFPRFKSRRRTTPSIRFTTGPIRVEPDRMHIVLPRLGSLKLHESARKLARRIENGTARIMSATVRRDGGRWHVSFTVEIERAERVPGRPQAVVGVDLGIKYLAVLSTGDLIANPRHLVTAQQRMRSLGRALSRKCGPDRRICRRPSKRWQRAAARLSRAHARVANLRRDGLHKLTTRLAREYGTVVVEDLNVTGMLANRRLARHIADAAFAVIRRQLAYKTGWNGGRLLVADRWYPSSKTCSGCGAVKTKLALHERTYVCEACGLVCDRDRNAALNLAALAAEFNTAGSGPVAARGADCKTRLGGQVAAKREPGTASAGQTGTVPPQGRTTNTCALRRTER

SEQ ID NO: 63687 - protein, 463 aa, Acidimicrobiaceae sp.
MRNLIAEARSLQVRTRQIRRRLAIPVGGRRGRLGGYGTSDERFQKQRRLQVLEHRLSLVAARLEEGRLSVCRGGKSLARARHHLDDAGLSDAEWRDHWNAARLFITADGEKGKAWGNETIRFNPDEHSVEIKLPVPLAHLANRPYGRYRLSCPVAFSYRGDEVAAQAASGAVRYDVTFDPAKARWYLHASWKCAVKQPAAIDELRGHPVLGVDVNAGHLAAMVVDKAGNPVGQPITVPLPQSGLTANTRDGHLREAISGLIKTAEHHDCRAIVIENLDFSDAREMGREQTGRRPSRGKRGRTFRRLVSGIGTAKFAGRLIQMASNAGLAVIAVDPAYTSMWGAEHWLGALQEISSDASGHHAAALVIGRRGLKQRARRRERCDSTPAGHGRKRATNSAVWAVPPGQPVGLFEKRTRKPRPDKARGQPHLRQRTRPAEQEPRGDQVTQDRSGPPTKRDSVPLSA

SEQ ID NO: 63688 - protein, 387 aa, unknown
  TnpB Polypeptide
VIVQKSYKFRIEPTCEQEQSFVQFAGCRRWVWNWALSRKRDVYKATGKGIYAKALCQELTALRCHFSWLKDCQAQLLQQTLRDLDKAFEAFFEQRSRFPKFKSRKRSPHAFRFPQFARIEDGFVVLPKIGRVRARLHRPAEGTLKSATIKQESDGHWYVVFVSHVEIPDAAPAYDQPCGLDLGLETFLTLDNGTKINPPKFYRKGQRKLKRLQHQHSRCQKTSRNGVKAKARVSRQHHRTASRRNDFLHKLSRELVAQYGTLCVEDLNVSALVRTKLRGHSKSWTDAAVGSFFRMLEYKSLWCGGQVVKVGRWFASSKTCHCCSHVQHLELSDRMWICEDCGGIHDRDHNAAINILSEGLRIVTAGSAGTLSASGEGVRLVTTSSLR

SEQ ID NO: 63689 - protein, 476 aa, Mycobacterium sp.
MSDGFTVADGSVLQAYQYALDPSGPQAAALESHAGGARFAYNTMLRAVKANLSQREAERSYGIADADLTPTLSWSFQSLRNDFNRRKHTVAVRDDGTPWWQENSKEVYANAVKNLSLALKNWGDSRAGARKGPRMGFPAFKSKRSTRAFAFTTGTIRIEADRHHVTLPRLGTLRVHESTRKLARRLEAGTARILRATVRFERGRWLVSLTCAVARTSQRPAHARCMAPVIGVDLGVKDLIVAATPDGQELLRQKAPRELRHASRRLRALQRKASRQLGPWDTGGAARREPSNAWRRTQHSIAVQHTRVANLRRDRLHKVTTLLAQSFEVIGTETLAVKNMMAAGGARKRGLNRSVADAGLGEFLRQIHYKTTWYGSAHVTADRWYPSSKTCSGCGSVKTKLSLSERTYVCDNNQCGLVIDRDLNAAINLARLARAEQSACFDNGGADHKTTAAAAQVAVKPESSINGSASPQGEAA

SEQ ID NO: 63690 - protein, 450 aa, Goodfellowiella sp.
VSAVLQAYHFAVDPTPAQDAQLRSHCGGQRYAFNWGLAQVTANLAQRDAERSYGVPDDQLTPSVSWSAYSLRKDWNRAKDAVAPWWTENSKEAYSSGLANLATALKNWADSRTGKRHGRMVGFPRFKGKRNALSCRFTTGAFGLADADRRHVTLPRIGLVRTHESTRKLARHVEHGTARIRSATVSHRRGRWFVSFSVEIDRVDPGPTRPDAVVGVDLGLKSLAMLSTGEVIANPKHLEIAQRELRRRQRQASRRQGPDRRTNTTPSQRWRRTQVRVAGLHTAVANARRDGLHKLSTRLVRTFGAIVLEDLNVAGMTKNRRLARRVAGVGMAELRRQVEYKAQWAGVHVHVADRWYPSSKTCSACGAVKAKLRLSDRVYTCHQCGFVLDRDLNAARNLAKLVSVVTGGGGGELRRDSPMETQVRRPLAAQRVLPREGPTGQRRRGNASAA

SEQ ID NO: 63691 - protein, 491 aa, unknown
  TnpB Polypeptide
VPVREPDVIPVNCVIPPELFSMMEDYKAIANHLINFGLHHKIGLETHYYPLSETDKTGKPKPIPPERELRDLNKKWFNEHYKGKYAAHYLDSAASFAMQQIKSWRTNGGDITSIPHIRKPIARLNNDLYTIQESKPDGTMKIRITVAPRKSVVMDIKVNHRHFTEWSLNRPGALVIVPYGLRLCFTDDSKIPKAKESAAYDFNFDRVVIARSDGEMKEVDLSDVMKIQENHKKKRESVQATMAHNPQKSQKIIRKHSKREHNRVNDLLHKKVHGKKNEILTFVGSRHLGVEDLHGTTQDILTDDRGVKFNAKMSSWIHGAFEDIIVHHHPDSKLYYTRGTSRYCPFCSSKLTHPTWKQSKCPNCGMFDRDWLEAVSGLVRTNTKHKKGQPWAVLRDVFPQYIENKLLLSSRLMIRGLPPVKVITESVCPECAVLYSEEQSDIDSGIAAVMHGNRSDVYDPTERVIGSDQLLIESENDANSEIDERMSRLST

SEQ ID NO: 63692 - protein, 555 aa, unknown
  TnpB Polypeptide
VTGVNGSYTNEQGLLGRGWEGVQFTFEYGELFGLSLEDEQSIDWLMERYCSGKRTALNRLLEGASVKKAVHQLEGLSRLALNWRYCEHAARDAQAELKSQHKLILLYLTDVNDKVGDLEKRLAKASRRPKKLESQLEKLKKKRGILQKLATGDTTLKVVFGSRKLFVRRAGGKTSLQEWRRARNSQVYSIGQANQHGNANIRIDSDRVGINIPQQAEPRRAKGRTYRVKNVRRWFNLRVNEKFRVTMDQLQTSGRAYSVRMIKEKGRFLVRVSFEIDLPQLNHVPERVCSIDSNPCGFAVALVSRDGNLFAHRFFRNDRLIYASANKRNDAVGKLVAEIMVWASGLGAEAFAIEKLDMRNRRDFGHRANRVIYAFVRKKFAETLTMQCWKKQLPVITVNPAYTSKIGNLKYRKQYGLSIHEAAAFCIGRRAYGHSEKLEDPIEITVKNEGVKHKVSVLYVWASIYGHGFSVDPRMEPPCRKGSMETKLNSQDTAVFTGHPASALTPLSLCGCDWVRKGREPSENLEATGNGVKPALPTYGGGDASATPSHINNDT

SEQ ID NO: 63693 - protein, 154 aa, unknown
  TnpB Polypeptide
MNKTRIKGGDCKWDKSKNIIKLEKQIKLLHRKLKNIRNTHIHQATYDIVKTKPYRVVVEDLNIRGMMKNKHLSEKIAKQGLNKFVTYLEYKCKFYGVEFIKADRWYPSSKLCSCCGNKKINLSLSERVYVCDSCGLKIDRDFNASLNLAKYKIS

SEQ ID NO: 63694 - protein, 175 aa, unknown
  TnpB Polypeptide
MQVFFFSTKIRYRKAEKKLAREQRRLSKMQKGSNNRSKQRIKVAKLHEKVSNQRKDFLHKQSRQITNAYDCICIEDLDMKAMSRSLNFGKSVSDNGWGMFTTFLKYKLEEQGKKLVKVDKFFASSQICSACGYKNTKTKNLALRKWDCPQCGIHHDRDVNAAINIRNEGMRLVIA

SEQ ID NO: 63695 - protein, 482 aa, unknown
  TnpB Polypeptide
VARSQISGRDRASPPRPGSRNQAGPRRPSARPASGPRPGQRAPFVSSPESTRNGSVSASPRCDYVDMLHPSTLESYTKAMSATTTIRRTYRFRLEPTASQEDGFKRFAGARRFVWNWALQQKQDYHAATGKNLPDKELSGRLTALKSNPGTAWLKGVDSQLVQQALADLKRAFGNFFEKRARFPRFKSRKKDVARFRIPQRVTLTGGYLTVPKIGRVKVRQSQSVDGATKSATFKRDACGHWFVSLISEVEIPDVPLPAPAPERTVGVDLGLKDAVVTSDGERVAAPRFHRVAQRRLRRAQRSFSRKAPGSANRAKARQKVARVHQKIANKRADFCHKLTTTLIKDHDAVCIEDLSIKGLVRTKLATSMLDASMGAIRRQLEYKGVWYRTPVVAVDRFYPSSRLCHECGYKRDGLTLSDRMWACPSCGCILDRDLNAARNIKREGLRRLTAAAGHAEAQNACGPCVRLPMGAARDEARIPLL

SEQ ID NO: 63696 - protein, 414 aa, unknown
  TnpB Polypeptide
VLVLEYKAVVSKQQTTAIEEAIRTTQFIRNKAIRFWMDAPRESKINKVALNNYSTALRKEFVFVEQLNSMACQSATERAWVAISRFYDSVAVASPRASNCKKGKVGKKGYPSFQHDNRSVEYKTCGWSLHQTKRRITFTDKKGIGEVKLLGKWDIHTYPLKTIKRVRIVKRADGFYVQFCLDIEVSLEPRVGEGEIGLDVGLEFFYSDSNGYHQENPRFLRKAEKSIKHAQRQIYKKEKRKNQRRIARQRYARKHLRVSRQRNEHSKRLGRCVCKANALVAYEDLSVKNMVLNHCLAKSINDVSWGLFRHWLEYFAVKFNNTVVAVNPRMTSQKCSDCGIIVKKSLSTRTHKCSCGCELQRDVNAAKNILNLAKATLGHKESNATGVGASTLVGANLLEQVLTVNVESPPSMYS

SEQ ID NO: 63697 - protein, 477 aa, unknown
  TnpB Polypeptide
MYPTKAQAQTLLRWIGCQRFIYNAKVSEDRYFRTFARKSLQLTGEHSPVDQKYAQFIGEGTEWLREVPSHVLRNGSVGWMQAYGRYFKKLAARPKKQKKTGPQSVWLTSELFSFVEKTDKETGEISYSFNVGTKKFPVGIIEYKAHRSHSVPASVRIVVESGRWYLSLSNDDGKNIPTDAETAEWLSGFGLQELSDRAIGVDRGVAIPFALSNGSTFGLSEVQIGRIKKKQVAAKRWQRKLSRRQKGSANRRKAAKRIESLRHYEKCVRKDFAHQTSHRIVSDPKALLIVFEALGVERMTRRAKPKMDENGKWVRNGAAAKSGLNKSILSSAWSITKECCVYKARKAGKLVVEVPAHHTSQACFKCGHTHPDNRLSQAEFVCQSCGHSENADLNAAKNIRQRGVELIASGAFSEKSKKRTMRMRKKDKKLGADCSDVMPVEVEVSRGTGNGCALWPEKQEGCAAMPAEAPTLTCVAG

SEQ ID NO: 63698 - protein, 501 aa, unknown
  TnpB Polypeptide
LPEYQRRFCYAEWDSFQTVFGIKIKKEITMIKSMTGFGRAEVITKERKITVELKSVNHRYLDLSIKMPRKLVFLEGAIRNLMKTYMQRGKVDVFITYEDYTLSCGALKYNKELAGEYLAYIRQMAEEFGLENDVKAGALSHYPDVLTMEEQSVDEDALWAVLEAPLREACEKFAQSRAREGENLKNDLIAKLDALDEKVSQVEARSPEVVDSYREKLEAKVTFFKGMYSDLTDRSICLKLWNGEKWIWTDCNLKGRSFPQDGQLMSPTLVKEGRRYLLNIPVKQENSDARTAKERMAEGTNLCSVRFTNTDTFAVCCILDEQGNQLAVHTCRGGDAYRHRCKLLETRIQKSRPNTVGDNSPQPNRKYYMHLKNLSEHYAHQVSREILNFCKENQAGIIVLPDYDQNFTRMAMVKSGNFSPLHLSSKIRTNLQYKAWAEGILVLETRTDGLKDKCGICGGKVRRKGNEFLCENGHQGNRFLNDARNLGRKCQESFFRGSRTK

SEQ ID NO: 63699 - protein, 437 aa, unknown
  TnpB Polypeptide
LLVRRQTFRLYPNKAQTTVLFGARRLYTYLYNACIAHRKTEYERFGRSVSYFDQQNCLPAFKDCWPEYKQLHSQALQATVKRVDLAYNSFFQGLRKPPNFKSIRDYSGWTYSAKSGWKANTEGIHGTVTLNDLGITLRMRGKANVWGTPTTLTIVYKPHLNQWSASITVEIPTPQVKFGSQSPIEYESIAAIDLGTETALTLYNGKEFEEVTNPRFIRKGEKRVKLASKKLKRKRAPNRKKKVKASNRWKKARLQVSRLQRKVAAKRKDWQHKVTTDIASRHDIVVTENLETKKMIRKGKKRKKQKSGLNKSILDVSFGTLNQMITYKVEVKGGLVVFLPTRTLKPSQRCPQCGVVHKEWAELSNRYHICECGFEMPRDKTSTVVMYQALLNKQPGFGMNLDNRGCLSSTSKTGKRKHTGEGVATRAKEATEAAKCR

SEQ ID NO: 63700 - protein, 384 aa, unknown
  TnpB Polypeptide
MNKSGYKFRLYPTNAQKQVLAQEFGCARVTYNQCLSNAKETGNFNWLAESKGITKRRSEVDWYGARSRTVQDNSLGDLKDAYNRMFKKQNKYPNFKSRSNHQSIRFSEKTCRVGLSDVYVSKALGPIKCKITRKLDAPPKQITISKTPDGKYFCSFCCDRDVVAHQPNKLSIGLDLGLTSYVTLSDGTKIDNPKWMKNKQLRLVRYQRKYSKNKLLPKSNRKTKSRIKVASVHQQVVNARLDFQHKLSTNLIRKYQIITCEDLAVCNMVKNRKLSKSIQQAGWSNFIVLLKYKADWYGRHLVKVDRFYPSSKTCSSCGTVRDTLTLKEREWKCVCGSHHDRDVNAAINLNRAGLAQMNAQGEVWTSANCEETVVNCNPDTMYLG

SEQ ID NO: 63701 - protein, 404 aa, unknown
  TnpB Polypeptide
MLVRGVVFRLDSDLPTEAKFLLEDFRLAVNNAIRAGFQARVTSRNALCKIAYKDFREQHPRMYSQHLVSAFEVAGGALKNHRRRVRKGVTGRIPFVKRLMMKTENQAYRLDRKSGAIDLPIRAGCHVELKLIISQYHRRYLDDMALSLGSLTILPDRVIVAFRKDAPKPFVPESALSLDTNERSLDGVFVEGDGAKAVKAEFPEVAIIQQRHHDRRKMLQKKKAHDRRTSRNLCRREGTREHRRVEYRMHQVANSVLKFAEDRRSAIILEDLKGFKSKRSKELNRRLSMWPRRKLHRIIEYKAKWRGIPVVKVNPRNSSKTCPICGRIQDSRMGAEFRCECGWRLDRHINASINLLQTAISKGMAGGLRFDPGAFQHDVMMILYEPAMAARSEPNGTSGIVGVT

SEQ ID NO: 63702 - protein, 188 aa, Clostridioides sp.
  misc_feature (134)..(188): Xaa can be any naturally occurring amino acid
MYPNKKQQELINKTFGCCRFVYNKYLAKRIDVYKNNKETFTYKQCSSDLTNLKKELKWLKEPDKFSLQNALKDLDNAYKKFFKEKVGFPKFKSKKINRFSYKTNFTNGNIMYCGQHIKLPKLGMVKIRNKQVPXXXXXXXXXXXXXXXXXXXXXXXXXXXXXXXXXXXXXXXXXXXXXXXXXXXXXXX

SEQ ID NO: 63703 - protein, 411 aa, unknown
  TnpB Polypeptide
MERMYTYKFRIYPNKEQQDYLANVFGCCRLVYNHFLNEKKNQYNESKTSDSYNVQQSKLTKLRKTEGFEFLSIVPLQSLQCSLRNMHTAYDNFYKHRSSYPKFKNRRDKQSFKIAQPNTFHIKDGKLYIPKLKNGIDIVVSKEITGKICFATISKNKAGRYHIAITVKQDYKQSDKTNERVGLDLGIKELIITSKGFKYASKRSIIRYYKRKLKIYQRCLARKVYGSKRYENQVLKCNRIYQKITDIKTDYIHKITTELVRQFDLIKVEDLNIKEMLKKHKLAEAISECNWYQFVQTLEYKCAWNGKTMMKVDRYYPSSQMCSECGYINKKVKNLAVRYWTCPNCGAHHDRDINAAKNNESYEPDEWQIHISVRNAEYGRGAVYQPFAKPKKTGEHSDSNEATIELLNSYK

SEQ ID NO: 63704 - protein, 232 aa, unknown
  TnpB Polypeptide
VFRKGAWFFNLVVESGDVETVAAGPVLGVDVGENNLAAHSLGKVFGGEHLRDRRDRYLALRRRLQSNGSQSAKQKLRQVSGKERRRVTHINHETSKAIVAAAVTAGVAKITLEDLTHIRDRIKAGKRVRARLHRWTWRQLQTFVEYKAKAAGIAVDYVNPAYTSQTCSCCSSLGKRAKHRFACDQCGLRAHADFNASRNLARIGSGAPLARAAVDTPDVGSVGSGNPACASQ

SEQ ID NO: 63705 - protein, 860 aa, unknown
  TnpB Polypeptide
MPRRGQKPQQHRTVRKVSCLRQLNGNLHTKRGAIQVVNHCVKAMTYTTIVGTRVLNNDTHLFLEGYRNVEEQERQLLQEFRENNIQQLIQQQQQQQQQLYQNQLQQRQMLADQQNAEQNMGQRMEEVHQGLQQWLQDEQMTQNGILMLEHHAQLVQAYEGRADALNGLQVLQKERRQTDAPHINQTGIRQCFKHLNPNAQASPEWVNEAYCKTYGVNNVDDVPSLPDRDVYRKVYLAEPINNAASQYEVSARNHVTTNFYGRLISCTRIVATQICPKLNKGRNKGRLNQVVYYTARLIMEGVNGEPGLSGDAIQKEVAIAELNGLLQNFLGDDVETKEELIRALWQYAVEALNKYGTADDVYQRLNQRDFHTLLHWLYQMNHEIGNHNGYIEYLRGIAEDNRLAGLPFDNVGWLLKFEKNFTMLPIANTNKAQHILLDTRAAYYLFKDVYNLDESRDYYHDNPGVLWRKVFNLRGIRKSTGWKFANYVTTDGVSLNVHFSKDMTQAEADAARAAAAQNPFRRRSNTTPWHLFPLNDDVDPNNVFGCDPGSKDFVTSVGAKDQDNPPSKKKKFQPPSRQAKTHNKKKQKKNGHRRSRNRNNRLHKHGGRKKQNCNNKGERFFQCSNRHWTHETGSKQAAKSSLQRLALTPVHYVADGFWNETTLYDVKVLIPTAKVVTSQEFLHHCHHVFFFLEDIVNDLMVQKVRRERFGRYMKRQAALDMVCHGITFGRDNAIVVFGNCTRQKSHFPLPIKELIRHLQHYKSTTVIIFDEFRTSKCCSKCAFNQDLGERRGNKMFGEDTKGGKKKGYWPIYGVRVCKNCGVRWNRDINAARNMRLIFLHMVENRLPDQIPVRPFPFARP

SEQ ID NO: 63706 - protein, 419 aa, unknown
  TnpB Polypeptide
MLVTRAYKTELDLNNEQTTACKQHAGAARWAYNWGLTRRQEVYKTTGKSVWAMDLHRELNARKKDDLAWLYEVSKCAPQEGLRNLDNAFRHFFRRCQLKKEGKWKGKVGFPQYKSKKKGLGSFRLTGSIVVFPKAIQLPRLGRVRLKEKDYLPTQGVKILSATVSEEAGHWYVSVQVAEEREVPVNTGPVVGVDLGLKALATLSDGTVIPNPRHLKARLKKLKRLHRRVSRRKQGGKNRRKAVQQLRKQYRKGRNQRQNTLHQVTTMLAKTKQTIVIENLNVAGMMKNHHLAQAIGDVGWYEFRRQLTYKAAWYGCRIVLADRWEPSSRTCSGCGWYDEGLTLKDRTFHCQQCGLVIDRDLNAAINLAKLAESSSDTHNACGVESAGTGRKPRVKLSTKSGKPKEAGTKRALSPRGTKR

SEQ ID NO: 63707 - protein, 259 aa, unknown
  TnpB Polypeptide
MLLSIKTKLKLNKSQATVMSKHAGIARFTYNWGLATWSYLYKDGVAPNKYLLKKFFNNHVKPEFTWIKETGICQKITQYAFDNLGDSFSRFFSKKGGYPNFKKKGHHDSFTIDAGGKPIPVGGTSIKLPTIGRVKTYEGLPHTTCKSITISRTADSWFIAFAYEQSHEPTVKCHEVVGVDLGIKTLATLSTGVVFSNPKYYKTHLSKLCRLSKELSRKENGSSNRFKAKHKLAKHHAKIANLRKNTLHQITTYAKTTQQ

SEQ ID NO: 63708 - protein, 240 aa, Nitrospiraceae sp.
MLLASDKGDLFGRGFFDMLKKYDLLIIELAANRQQQWFRVRSRKYDRLVGNLREYLKNEINRVVNRIITIYSPAEFVVERLNFQNPNLSRRMNRLLSRFGKGILKKKLSSLSEMYRIKITETNPVYSSQECSVCGYVDKNNRKPQAVFRCKCCDKTIHADVNAARNHAARSSGVGMNIYLTKQLVLGIVVQRFLHKLALLGKHADSDPERLSKRCDSLAEGLLSDNPYFRGYPAQLKGFS

SEQ ID NO: 63709 - protein, 403 aa, unknown
  TnpB Polypeptide
MLVQTFKYRLYPSPAQRRLLEDTLETCRWWYNTCLAERKDAWDQEHRTVGKYEQLARVKEYRRQNEFAARLHSHILQVVVVDLDQAFQGFFRRLQTGEKPGYPRFKGASRFDSFGLKEYGNGFQVDGRRLRLSGIGRIRVRWHRPLEGRIKTVRIRRTAGKWYSCFACEVEETPLPPSGREVGIDVGLHHLLATSQGEVVENPHWYRCEQKLLRVLQRRVSRRKLGGSNRKKAVLALQRQHVHIANRRKDFLDKVADHFITHYDRIALEDLQISIMIRNHCFSKSILEAGWGYLRTHLLDKAAEAGRQVVLVDPAYTSRMCSSCGRLWRDLSLADRWVDCSCGLSMDRDVNAAINILKRAGHARWDESTANGLGLSQEAPPLSQKDTGTVRAAGERHKEQLFY

SEQ ID NO: 63710 - protein, 465 aa, unknown
  TnpB Polypeptide
MNQELTQHKETEKALQPFWNERCRELSEHLWSPTAIGCADSGLTLPNGWSNATAEKSWFSTTFSHHQNESLSQTSFPSFKFSIQNELAPLKTRKIRIYPTAEQRVIMRRMMGTARYVYNQTVEYLKQDGTKANWMGIKGGILNSLPEWAKEIPYQVKSVAIRDACAAVKNAKMKCKKTGKFNDVSFRSRKAPKQSLFVNMTTINDHSIFPKLLGDMKFTEQVPKEIKHDCRLVLEDNYRWYVVIPVECETAEAPRTKDKAISIDPGVRTFLTGYCEKGIIEIGKGAQTRVIALCFQLDKMQRKMTKVNAKRRQNIKRAWRRLKFRLECLKTELLWKSATFLAKNFDTIVIPPFCATDMAKKAKRRITSKTIRAMMSLAHSRFREILDWQCRKYGSHMLLISEEYTSKTCPSCGRLHETLGGRNVFRCPSCGYQAPRDANGAFNIMLKAMTDSSALQKQGATVNFC

SEQ ID NO: 63711 - protein, 446 aa, Lachnospiraceae sp.
MKIFSTYSVKIKHYNNIFKETVKLYRESVDFFIEVCLKEWDDIYQIKGNLNQQRYVERLCHRTSDNPDIKYSSFDKRFYKFPSYLRRGAINDAIGKVSSYKSNLRNWETSDEKTGGRKPAYPKAGYIYPCLYRTVMYEETGIYEAKIKVYIRNTWDWITVQLRKSDIDYITRRCTTRKKCAPTLQKRGSQWFLDFPFEEKTVLTDTGIFEQTIIAVDLGINSAATVSVMRSDGAVIGRHFLKLPKEYDSLMHSINRIKKAQQYGNRKTPRLWAKAKGINDAIAVKTAGFITDIAVMYNADVIVFEHLDRKGKVRGSKKQRLHMWRSQYVQSMVENKAHRLSMRVSHICAWGTSRLAFDGSGYVLRGKDADLNNYSLCKFSNSKIYNCDLSASYNIGSRYFIREILKSLPVRERLELEAKVPQVSKRSTCTLSTLINLNAELKSLVA

SEQ ID NO: 63712 - protein, 362 aa, Planomonospora sp.
VAFHDGRFAGEVGDVDAAAQGVAEFSNTHTLSHGTNGTISTVQLRYQYRLYPTPAQRQALARAFGCARTVYNDALRARRQAHANGLPYVSDGDLSKRVITAAKRTPERSWLGEVSAVVLQQALADLNTAYRNFFASLTGKRKGPKAVPPRYRSRKDRRQAIRFTKNARFSVTAGGKLRLPKIGDVPVRWSRNLPAEPSSVTVIKDAAGRYFASFVAEARRDFAHKLSTRLIRENQAVYVEDLCVNGLARTKLAKSVHDAGWSQFTAMLTYKAARHGRHLGKIDRWFPSSKMCGSCGVVAESLPLNVRSWSCPCGAVHDRDVNAARNILAAGRADRLNACGDQVRPGSAPAQVGEAGSLRGAA

SEQ ID NO: 63713 - protein, 373 aa, Bacillus sp.
MLVNKAYKFRIYPNKEQQILIAKTIGCSRFVFNHFLAQWNDTYKDTGKGLTYNACSSQLTQLKKELVWLKEVDSIAIESSLKNLADSYSRFFKKQNKAPRFKSKKNAVQSYTTKHTNGNIAIVGNRIKLPKLGLVCFSKSREVEGRILNATIRRNPSGKYFVSILAETEVQPLEKTGSPVGVDLGLKDFAILNTGKVFSNPKWLRKLEEKLANAQRILSRRVEGSFNWNKQRVKVARIHERITNARTDYLQKISTYIIKNHDVVGIEDLQVSNMLKNHKLAKAISEVSWSQFRTMLEYKAKWYGKEVIAVSKPFASSQLCSCCGYQNKDVKNLNLRKWDCPSCGTHHDRDINAGQNLRDEAIRLQTVGTTGIA

SEQ ID NO: 63714 - protein, 293 aa, unknown
  TnpB Polypeptide
VFSKCDAHLDILKTALTSDEWKIGTAEALFHNDNAELHVNVTNTEQTVRDKHDSRTVIGVDVNEDNVALTALSEDELKNTLVIDFPEIKFERHRYFTMRKRVQNARKNSIHDTLEGREERFVRDRLHKVSRHIVEWSRQFERPCIVFEDLKEMRDSIDYGTRMNRRLHHLPFRALQYYTSYKASFEGIPTGWIDPYKTSQRCPLCGHAERANRNKKRFKCRSCSHQDHSDRGASVNIAVKGIEKHQDWNVPALNSLPTVRKVRRQASGAVDAPTVTHPTARGYQTDGRMGVSD

SEQ ID NO: 63715 - protein, 353 aa, Lachnospiraceae sp.
MFIAYNQERYKNGAPYMSAKLFSVWLNNEYIPNNPDKYWIKDVYSKAVKQSLEDANTAFMRFFKGQSAFPKYKKRIVDKPKMYFVKNNKKDCLCERHKIKVPSLGWVQLKEKGYIPTTKDGYIISSGTIDCIAGKYYISVVVEVPEIQNHNNGNDGIGIDLGVKEFAIISNGKKYKNINKTEKVKKLEKKLKREQRRLSYKYENKKKGGATQGKNIQKQREKVQKIHHQLANIRNNYVKTTVSEIVKTKPSFITIEDLNVKGMMKNHHLSKAIQQQKLYDFRRILIEKCKEKGIELRIVDRWFASSKICHNCGQIKKDLKLSDRIYKCDCGYTEDRDFNASLNLRDASIYKIA

SEQ ID NO: 63716 - protein, 406 aa, Kitasatospora sp.
MATTHVKRAFKYRFHPTDAQAAELSRTFGCVRKVYNMALQARTEAWTLRQERVDYNRTSAMLTAWKKTEELAYLCEVSSVPLQQALRHLQGAFSNFWQKRAKYPTFKSRKKSRKSAEYTSSAFRFRNGRLTLAKMDQPLDIVWSRPLPEGAAPSTVTVSQDGAGRWFVSILCDDRPTMAKPVNAAVGIDVGITSLVALSTGEKITNPRHERRDRGRLATAQRVLARKAKGSANRGKARTKVARIQAGIADRRRDFLHKLTTRLVRENQTIVIEDLMVRNMLKNRKLARAISDAGWSELRVMLEYKCAWYGRELITVDRWFPSSKLCSACGTIAASMPLNVRTWTCGCGTTHDRDVNAAKNILAAGLAVSACGDGVRPQRSAPGGRSSVKQEVVPPQRRRAAAQPRG

SEQ ID NO: 63717 - protein, 371 aa, Bacteroidales sp.
MLTYEYKLYRSKRNRKIDAMLREACFVWNHALALQKRYYSLYGKYCSCARMKAHFAKRITRCRLHSQSAQEILERLDESYQRFFRHLSKRPPKFKRASDFSSIVWKQGGYKLNANVFVVNSIKQHFQFSFSRPYEGNVKQVRIKRSHLGDYYLYVVTDAVAHSYGKSHDGASVGMDFGLKTYLTMSDGKRIENPLFLKNRLSNLRRASRRLSKCEKGSSHRKAARLALDRVHEDITNKRDDWQWKLSHELCRSYDILCVEDLQLAGMSSLWGRKMSDLAFGAFVQKLEHTASKYGCQVVKIDRYYPSSKTCNVCKYVHELLSLSDRSWTCPVCGTHHDRDVNAAINILRQGIASSGSPRKTEPARQGALAT

SEQ ID NO: 63718 - protein, 398 aa, unknown
  TnpB Polypeptide
VFKLHISSENLPKLKRLFQDFVDGKTRTKGVLYYRDEWMDAWGNVLEMREEAGRRTVPNPPAITLLVRFVMPDGSVRGNTAAPCVIDLRRRELRIPSYGVVEGLSTSLYRALVWENLLEPRPGFVLQVTRRGFLRVIAQREAYPELAMPLRLICIDENSAYGFALAAWDVSADGTKVSLRRLEKLRLPNHGYGRWVAKLLQSYADEPSGETRQQLAELLPQEVLEKLTTERARELAEATRRRERRLNNAFVERLAARVRRLVRKAHKRGMSVLVLIDPIDPDSLRGTRLQGTLLRARRSLKNLAAYEGAMLRLLRASGRHCPRCGCWGRELGHTRRSRVYECPRCGLRWDRDKGVLYNLAYSFFACMIREECDDYTAVASRVLEAFREWLEKHPRTLA

SEQ ID NO: 63719 - protein, 424 aa, Halobacteriales sp.
MANRSVTRTHIASIRNQRQVRDDLDSLGFAASKLWNVARWTAERVWSETGHIPGHAELSSYLKSHERYADLNAQSSQRVIQELAEAFKSWYGHRQNGNQNANPPAYRKHGDQHPRSTVTFKEDGFKHDPEHGRVRLSKGRNLKESWSDFILCEYEADPDVDIENVQQARAVYDRGEWRLHFVCRHEIDPDPPGDAVAGIDLGISNLAAVSFGDEAVLYPGGALKEDEYWFQKERAKCDDSASTKADRLDRKRTERRTHFLHALSKDIVAECVERGVGTIVVGDLSGIRDEGDTGAPRNWGDRGNLGLHGWTFDRFTAMLKYKAEEEGIDVEQVDERGTSKTCSVCGTEDGSQRVERGLYVCEPCGTVANADINGAENIREKVLPSLTPDGGDRDNGWMAQPAVRLFDTSTGRVRPQEQVVDREP

SEQ ID NO: 63720 - protein, 428 aa, Halobacteriales sp.
MKRTNTFDVVPQSEQDEELLRRLLDASAALWNEINYERRENYADPDADVWDISEYRGRYGGTLGASTVQQIERKNREAWRSFFALQQKGEANGKPGYWGNEEKGRELRTYIRNTSYSVEWGEYSRLEILVGQDLKDEHGLGHRERLRLEVRGEPNWDEYDKQGRLELYYDEQADQFRAFQPVTISGDTSRLAQPLANETAALDIGANNLVACTTTTGTQLLYEGRDLFERFRETTREIARLQSLLDDGRYSSNRIRSLYRRRTRRRDHARDALARDLIERLHADGVATVYVGALTDVLDTHWSVEANAKTHNFWTFRAFVKRLACTAEEYGISVEVRSEAWTSQECPNCGSTDRTTRHQDTLTCPCGFEGHADLTASETFLRRYEDTARPMARPVRLKWDDHDWSESPRSHESPNEERTNPQVASVGR

SEQ ID NO: 63721 - protein, 417 aa, unknown
  TnpB Polypeptide
VTVVRNIQVKLDVPEDAHTVLDETFEQFRYAAQYVADYGWADDPTEIVTSQSDLNAATYDDVREETGLHSNHVQSARSLAADALSNCQDRMFGGENVSKPTFRGTVVVYGIRTITYNDDHCTLATVDGRVCAEYVTPEDDEDAPFEEYWNSDEWERKEATLHKRDGEYYLHVAVEKEPDTDASTVENGAVLGVDLNVDGNLAVTSTGVFLGNADYLNHKRDEYERRRGCLQQTGTRSAHLTIQNIGDRFGRWSEDYLHRVSKAIVQEARRHDCSAIAFEDLENIRKRISNASKFQQWAFRTIQEYTEYKAEEHGILVDTVQPGYTSQRCSHSDCGFTHEDNRDGAEFECLNCGKELHADYNAARNIGWRLVQHWLTSNAGRANCQVALKSGTLNANGEFTPATARGQSGSPLTSPPL

SEQ ID NO: 63722 - protein, 310 aa, unknown
  TnpB Polypeptide
LLGPSWASALGPGAARRHDKAAGSGFGRRQAARRPRRRDCAEQSLPAIHRVSARKPATSVAGGEHQRRILQSGKPKEAELVVRKGKWFFNLVVEADDPHEVTSGPVMGVDVGENTLAATSTGKVLGGQSLRHRRDRYLALRRRLQSNGSQSAKQRLRQVSGKERRRVKHINHETSKSIVAEALRLGVGCIVMEDLTHIRTRIKAGKRMRARLHRWAFRQLQTFIEYKARALGIEVVYVDPAYTSQTCSDCSSLGTRVKHRFVCDQCGLRAHADLNASRNLARIGGTAVSPRAAVNTPDVGNVGHGIHVLQ

SEQ ID NO: 63723 - protein, 384 aa, Haloterrigena sp.
MSTTPTANKTLEATLAPPTRCKEQRLQQTLSEYRHALHDAFEQDCTTMSATNDVVTPYNLPYQAKDALKSYVPKLHDTYNAQELDDEHPLRFVNRAGKFDRDSSREYEICWNVPQPGRGTNFWIPLRLNPEQEELWDDLLDEGSSTKVGELRLQKHRKTWTLHVTVEYEVEETTELPEEPTRVGFDIGESMLVTGCALQHATPTKPLLINGKEAKRLRKEMFTTLKRLQERDASEWRVEERLSYYQNRLTDIIEKASRKSVEYAKQFENPVVVMEDLAYIRESLDYGKYMNRRLHSWAFARLQGRIEDKARDAGIPVRYVHPQYTSQTCHSCKHIGNRLQQAEFKCKNPECHVSTFQADINASAEHCTSRRPVGREPAVETGRR

SEQ ID NO: 63724 - protein, 443 aa, Haloterrigena sp.
LLDNDEDGFEGDVWDADTGSLEGKYKGVLGASTAQQVIRKNSEAWRGFFRLKDQYHDESNTSITDHPEPPGFRGNEDDGRQLKTVIRNTSYTVEWGDRSRLEILVGSELKDRYDHTGRLRLEIAGDPTWPDYEKQGRLDLWDDETDCTFRASQPVTVSDDARATPLAAETAALDIGANNLVACTTTTGEQYLYEGRELFQRFRETTREIARLQSKLEEGQYSSGRIRRLYRKRTRRRDHAQEALCRDLLERLYEEGVDTVYIGGLTDVLDTHWSVETNAKTHNFWSFKKFTERLVCTAEEYGISVEVRSEAWTSQECPQCGGTDRPTRHQDTLTCPCGFEGHADLTASETFLKRHTEQAVRPMARPVSSEIKEFRDVVRNQSISDCKRDLRSRNAENAQRFRARFEWDDHDWSGTPHPHERPKEQRTDPSTVHHDGNVASGES

SEQ ID NO: 63725 - protein, 410 aa, Haloterrigena sp.
LDYSHRYHAYPTQEVAERLEHHLDVHRQLYNHVRWDYEDSPEDDKPSEYDQNNKLPEWKQRWSVFSELHSKAAQATVARFHHNLTVLSELKEKGYNVGRLKRQAPSEYRSVTYNQSGFDLDEKRGHDRFAYVRISKIGWVKIRYHRPIPDHATIKEVTFKNERTGEWFVSFGLETADADLPEKPVVDSLDTSNSVGIDLGILNYIHTSNGKTVDWLSLEDEYDRLRREQQKLSRKEKGSNNYEKQRKQVAKVKRQIKRKVLDYQHKLTTWLVKEYDAVFVEDLNVQSMLQDDGNARNKQDAAWRQFITLLEYKGDMHGTHVVQVEARGTTKECASCGVETAKPIWVREHSCPACGFETDRDANAAMNVLQRGFSELGLGWPESTPVETALPTDTHSVSAKRVVETGNLGA

SEQ ID NO: 63726 - protein, 423 aa, Haloterrigena sp.
MDDAPRRTVPIKLNVPEERRGDLHQTKTQFLHCANRTSEWAWRYDDFCITNKSKAEDALYSELREETDLTANLVQKGIRRAIEAVKGGVEKLKQGEKTSRPEFDSWSVVYDKRSATFNDDHATLSTPNGRVTAEYVLPPEEEREDTPFGRYYESKAWDASSATLQYDEQDDTFYLHVTLKNPNYEVDASGRQECESRDGPPENGVVLGVDLNVTGAFTVTSTGEFIGSADYLTHKRDQYEQRRARLQQTGTRSAHLTIQSIGSKFRDWSLDWLHNRANDLIEEAQDVDVDGIIFESLTHIRENIANGSKFQQWAYAKFVELVEYKVESTELFVDTVNPAYTSQRCSNCGFTHEDNRDDKQFACQSCGYEVNADYNAAKNIANRYCGYIHRGQKSCGGWATSQLALKSGTLNVNGDYTPTELLG

SEQ ID NO: 63727 - protein, 416 aa, Haloterrigena sp.
MVIQATRTFVGSIQNHRQVCDGLDSLGDSASKIWNVARWTVDRIWDEIGKIPDEGPLKSYMKDQACWKDLNAQSSQKVIEELSDAFQSWFDLRHKDDKANPPGYRKHGDTRPRSTVTFKADGFKHDPGNNRVRLSKGKNLKEHFSDFILCEYQTHPDVDLSEVNKVQNVRAVWNGDEWELHFVCKVSLETNDSAGDEVAGIDLGITNIATVAFPDEYVLYPGNSLKQDKHCFKRAEYDTEGENGPSEKSMWARRKLTDRETHFYHTLADTIITECVERSVGTLAVSWPENIRESDWGKTGNKKLHTWAFDRIYQYLEYKGEKRGVEVSKENEWDTSKTCSKCGDDTKSNRKHRGLYVCSSCGLVGNADCNGAENMRQKITPSPHGEDRSNGCVAQPSVHLFDRESGMFHTREQAVS

SEQ ID NO: 63728 - protein, 410 aa, Haloterrigena sp.
VSDPVTKTLQATLALPTAGKEQRLSRLLDTYREALHDAFDAGADTMSAVNDLVTPYDLPYQAKDALKSYVPKLRDTYDASELDDEHPLRLVNRAATFDYSDEREYGYVWQVPQPGRGTNFWIPLQINPEQESLWADLLSDDGAEPGEIRLQRHRTSWELHVTVKHEIEQAEPNDPTYIGFDVGESALITGCALKRDVPREPIIVSGNRARHLRKEMHTTLKRLQERDAAEWRIDERFGHYQNALTDIVEKVSRQAVEYARQFEKPVIVMENLTYIRESLDYGSYMNRRLHAWAFARLQGRIEDKAREAGISVEYIRPEYTSQTCHACGHIGSRNGDDFRCTNDDCHITVFHADLNAAANIAGRVDPWGESLSWEPTGNDSPRDGSARDSATVHRETSEKHSQMRLTAYTD

SEQ ID NO: 63729 - protein, 268 aa, Haloterrigena sp.
LSDDLPHTHSDKYCANTASEWCWHGDDGYHVTSKAKAERGLYDQLRENTKLTANLIQKGIRQAVESVKSGVERLKNGQDTSRPTFTADTVVYDKRSATFHRNHGSLSTVNGRIECEYILPDDVEKSPTKYVANEDYEFRRATLHRRDGDWYLHASMLKEDGDTNSTTEHRTVLGVNQLAVASTGRFWSADEFNPWKREYEKQRGDLQQCGTRAEHDAIAGVERKADCRFEIFLHRVANEIVAEALTHTCAHIVFGNLTDIRENVPEAS

SEQ ID NO: 63730 - protein, 442 aa, Haloterrigena sp.
MAIQVTHTYVATIRNQQQVQSDLDSLGFAAAKLWNIARWTCDRIWGETGTIPEDGPLKAYLKNHERYADRNSQSSQRVIEELAEAFSGWYAKRRNGDDRANPPKYRKNGDDHPRSTVTFKEDGFKHDAKNNRIRLSKGRNLKEHWSDFILCEIETRPDVTIENVGQVKAVWNDSKGEWELHIVCKHEIEAESPGDETAGIDLGISNFAAVSYSTGDHELYPGNALKTDERYFAKEIAKCNSSRSNNALRLRKKRSKRRSHYLHAVTKHIVAECVERGVGTIAVGNLEGIREDDETGEARNWGDRGNEGLHGWAFDRFTNLLTYKAKAEGITVVIVSERDTSKTCSRCGQKRDANRVERGLYVCRECEAVMNADSNGAENIRCRLDQAEKVTLNPRSTEDRSSGRVARPVVNLFRRGEYDHSRGQGTFAEQASSCKPQISQLR

SEQ ID NO: 63731 - protein, 508 aa, Helicobacter sp.
MMLVTRILYAKNINKGKLKALNEQAQILGKLRSQIWQEYGALKCLNTSDRKIRDLWVKEKREFKVLANAWKETLRDSFNNIKLYLEAAKTSIKKDIFKHYKTKEEQKEAFIQLKKDEWLKDHFLHRKMRKAFKHGKNSVFNQIIVRSDDYKVFELNNQCWISIPSLIKNKRIKIPLNTTMEYKPSGTLRLIIKNKVVEVHSSYEKTDNRACGNEIIGIDKGYSEVFVTSTNEFLGKDLGKILTQYSDKLKVKYQRRNKLLALMKKAQKNNQLEKANRISKNNLGKIKQNKENHKVKQRLKTLIYNACHQVVDKAKVVVCEDLKENFSKNTSYGKNTNRRLNSWVKGLIAAALKNVIACRGSALHLVNPAYTSQCEAMTMVAVQVMGNDTAIGIAASQGNFELNVFKPVIIYNFLQSLRLLSDSMESFNIHCASGIEPNREKIDYYLHHSLMLVTALNPHVGYENAAKIAKNAHKKGISLKESALELKLLSAEDFDKFVVPEKMIGPKA

SEQ ID NO: 63732 - protein, 390 aa, Planktothrix sp.
MEKAFSYRFYPSPEQESLLRRTLGCVRLVYNKALHERTQGWYERQEKIGYNQTSSMLTKWKKQEDLDFLNQVSCVPIQQGLRHLQSAFANFFAGRAKYPNFKKKRNGGSAEFTKSAFKFKDGKIYLAKSVEPLDIRWSRQIPKGCEPSSVTVKLHPSGRWHISIRFDDPTIKPLPVIDQAIGIDLGISSLLVTSDGDKVSNPKHLKKSYRQLRQAQKSLSRKQKGSKNREKARIKVARIHAKITDTRTDHIHKLTTQLVRENQTIVVEDLAVKNLVKNRKLAQSISDASWGEITRQLAYKCRWYGRTYIEIDRWFPSSKRCSNCGYIVEKMPLKIREWECPNCGTHHDRDLNASKNILAAGLAVLVCGASVRPEQSKSVKATAKKQKPKL

SEQ ID NO: 63733 - protein, 413 aa, unknown
  TnpB Polypeptide
MLVKGVAFPLASGLPPEAILLLQEFRLAVNKAVRASLDARISSRNGITKLFYRKFREEHPGMYAQHLVSSFEVAAGILKNYRKRLRQGKRLKTPFVNRLMMKAENQAYKLYRAEGMIDLPIRAGCHVKLRLVVSRYHRRYLNDETLSLGSLTVLPDRVIVAFRKESPRPIAASSVLSLDTNERSLDGIFVEGGQKGDTSCVQVKAAFPEVAMIQQRHHERRRRLQKKKAHDRRLTRVLCGREGTREHHRIDYRLHSVANAVLEFAEDHKSAIVLEDLRGIRPNKSKELNRRLSFWPRRKLHQIIEYKAAWKGIPVIKVDPRYSSRRCPTCGRIPDSRMGTRTEFACECGWHLDWHVNASMNLLQTAISKGLEVAGGLRFSPGAFQHDVVMTLYEPAMAARSEPNGTSHIGMIS

SEQ ID NO: 63734 - protein, 362 aa, unknown
  TnpB Polypeptide
MSKHLTKLKKLEKYQHWNIPYSWSLQNMLKRLAESFREMKTLGRGHPQFKSCKKHKGMTFDGGQAPLEKVLDKQKHERNHPTYKVRLNGRYYRFALHREISGEITQVQVTRDALGDIYVTLTEDYNEVIPEPKTGKVEGFDMGIKDFLTGSDGERRSSPMFYKQNAQHLAQAQRELSRKVKGSNNRDHARKQVARLHKKTENQRTDHHWKLAIDLCRQYDILFFEDLNLEGMKRLWGKQVSDLAFGAFMQKVKHQSKKRIKSVLKIGRWTPTTKCCAVCNHKNETLTLADRNWTCRSCRTHLDRDQNAAINILKEGVASFGLGVVSPLVLYNKIVGCAVEATSPLLYSTNASAEKIAEAPML

SEQ ID NO: 63735 - protein, 420 aa, Gemmatimonadetes sp.
LGFKIVFWSKGMSVVRVQRGYKYRLYPNKYQEQMLNKTFGCVRYVYNHGLERKEKSYKEVGRSVSHEELMRELTAIKKEPDKKWLNEVSAGALQESLRILKNSYERFFNKQSRKPRFKSKSNKQSIRYDQTRCKVTERGVKLQKIDGDIKVRFHKRLSEACELRNMTVTKDCLGRYFVSIGVVEPIKQLDPIDAKIGIDLGLTHHTILSTGEKVDNPRFFDKHFKQLRKAQRTFSRRKKGSKNREKARREVARIYAKIADSRRYFLHKLSTRLIRESQAIGVETLRVRNMMKNRRLARMIGDVSWSEFVRMLEYKGMWYGRRVKKLNAYYPSSKTCSVCGHELDDLPLHIREWECPLCSTHHDRDVNAARNIQNNTVGMTEIDLSSSVRQVNACGVNVRPANMVAKHDEAGNILTAPLAV

SEQ ID NO: 63736 - protein, 375 aa, Gemmatimonadetes sp.
MDYITHKFKLYSRCDRNKYLHRDIDAFAGVYNHFIALHKRYYRRFGKYPNKFALMKHLTKLKRTKRFAHWYLLPNQALQNVIERIDFGYDKFFKRENKRPPKFRSQFRYKSYTLKTAGYKFLERNKIQISFGISGKTKRVYRYYKSMDFDVESVKTVTIKRDRVGDLWLCVVARADRFKQDFVKTGKTAGFDFGLKTYLTASDGTRIQSPLFFSRNIRKVKKANRNLSRKDKGSNNHQSARVNLARVHRRVANQRRDYHWRLAYQLCGEYDFLCFETLNIRAMQKLWGRKISDLGFSDFLTIVEYVAKKTGTGFKKLDMWEKTSKTCSGCDTVKDDLELRERTFRCGECGLEIDRDLNAAINIHRWGHPPMQEAA

SEQ ID NO: 63737 - protein, 150 aa, unknown
  TnpB Polypeptide
MRTSGSGHSPRGNMRHQLSHRLIEENQLVGLETLAVRNMVRKVKPKKSPDGRYMRNGQNCKRTLNRLIHRASWSGFVSKLVYKAEWYGRTLIQVGRFYPSSKLCHECGWKYKELKLSEREWTCRNCGTRHDRDVNAALNILAEAERLAAS

SEQ ID NO: 63738 - protein, 186 aa, unknown
  TnpB Polypeptide
MSQSIRDFAKAKGSYFRKARYEKNRPRFASRNDNIQSFRNCAPIRHMEGNRYLLSRKLGSVRIRKRDRLRYPIENLSSWTVKRENQTYYLTLLFDVDIQPMPKAEGRVGIDLGVKDLITLSTGEKIGYGDRLKKLETDVIRQQRMLSHRMKGSNRYRKQRLRLETCVRQAPATHREETCGTNYPTG

SEQ ID NO: 63739 - protein, 420 aa, unknown
  TnpB Polypeptide
MVLGYGRRIKMNLIYKFYINPTEELVRQCKVSNNLYNQALYLFRQALKNENRWLWYADMDRLMKVTPNLDGEINYRLLKAQVSQQTLKLLDNSVKAYCKSIKNFKKNPHEYKGMPQLPGFKKRGGLFNLYFTNQSANIKDGYIQIAKDLIIPIPQWDKYKEQISKFKQVRIIPVGKKMKVVIIYDIEVHNADVDNKKYASIDLGLDNLATMVCENGCHIYSGKFLKSYNNHFNKRLAKLQSIKDKQGIKKATNRMAFLYENRNRYIEDAFHKYSRFIVDYLVENRIGNLVVGYNKGWKQSVNIGKHNNQKFVQVPFARLTSYLRYKCEMAGINFIENEESYTSKCDSLAYEPIRKHESYLGKRVKRGLFQSSVGKLINADVNGALNILRKVVGDSDVITRIIGSGRLLRPIRYSSPYKVA

SEQ ID NO: 63740 - protein, 505 aa, unknown
  TnpB Polypeptide
MAELASEVRNLSAYATYTVRNDEVLGAELSPATATAPAEVGRQAGVTMPDFLVPDKKGEDGNPLTDKNGEPIKLKTGRSRKERLFRHRVVTEYRAWQERIAAASGESSKYVSQGWKRTVNASAPSYGEDYINLGAVDKQYAVIENDPVVNGEIILKMIIWGKWCRLIFNFDNVRFTEGKVTLPLVKVEKGHPIFIFTIVTDNPIVQFSGDYVVGVDVGINDYATVVVRNSTTGRVVHETTLSRRVHSLWNSIKASERQVRALNKKADKLLYDRQAHMCAIDEAQLHREAASRKKRELAIVAAQEIAYLSHFYGNAVVAVEDLGWISNTMQNGRWNRGAFTQWLTHYVTQNGGWVVSVNAANTSQVCHLCGEKITHPTHKVSVCSKHGDMGRDVNAAANIAARAVPKVEKARKTRAKNRALQPQAALKTPVARASLKHPGRDRTKNASTPKRKNRISKGVKTLFSPARVNMTSVLADCDTYGAVETKQAAINLGNVTCECRLCSLN

SEQ ID NO: 63741 - protein, 180 aa, unknown
  TnpB Polypeptide
VLTLATLSTGEKIAGPQPLRKLFKALRRCSKSLSRRVKGSANRTKARRKLAWLHYRIACQRADTLHKLTTSLVQRFGTIVIEDLHVKGMVRNHHLARAISDMGFGMFRRMLTYKVEAAGVTLVLADRWFPSSKLCAQCGVVVDSLPSSQRVFHCEACGHTTDRDVNAALNLQHYPGLQGK

SEQ ID NO: 63742 - protein, 325 aa, Planktothrix sp.
SSADRAWKGISRFYANCKEGKPGKKGYPKFKKRGRSVEYKQTGWKLSEDRKRITFTDGFKAGTFKLLGNRDLNFYQLKQIKRVRVVKRADGFYCQFLIDVERSEAQSPTGKTLGIDLGLEFFYTDSEGNHVENPRFLRKSEKSLRRLQHRVSKREKGSKNRKKAINKMAQKHLKVSRQRREFAVRTARALVTSSDVIVYEDLKVLNMVKNHKIAKSISDAAWSMFTDWVDYFAKIRGVHVISVPPHFTSQDCSGCGERVKKSLSTRTHKCPSCGLVEHRDLNAAKNILAKGLGLKSTVGHIGTQTLEEIEPLVFSEQSEQVKFGH

SEQ ID NO: 63743 - protein, 708 aa, unknown
  TnpB Polypeptide
VDAAGTGVQRARQARTQACDGPAAGRGRDALHLPHRCTRRGRPRRRDPVDGGATALEVSTSPTPTMRWLVWRSTDGHGRRPASRGSLAWRSTEMSPDRATRPPSTAPSSKPRGIAPSSTWSPSALTATSPPTRLGGWTIAHTRCCSSPWASTRHTPVADSPEPCVPRCCAWRTSWAPRKPLSVLAATRGICFPSDLRGARHATGRPVRVHDKRPELTWAFAGYVPRHGAAGPVPSRDRFVSVVPGTIGCVPVAARRNADTVLVSHTGVPLDRSTTFRFTLDPNRGQGQRLLAHAGAARLAYNHQLGRVRANLDQRAAERSYGIADADLTPSLSWSKVSFINEMNAWKDGRAPDARVSVDDAGNEVRGLPWRDEVSTDVFECASVNAAQALVNWSTSRTGARAGRAAGFPRFKSRHKTAPAFRLRAKYAEGKPSPVRPTGPRSIRFPKLGSLRVHEHTGKLAKLLAAGRLHVYAASFRFERGRWVVAITGVAAQFHHLRRTPQGRHRGRVGVDLGVKTLAVVADEHGRVLHAHEGVKALQHAQARLKVANQRYARTKPDSAGRKKAARRLGKHHARVAHLRRNLLHQITTELARGYTSITIENLNAAGMLHNRKLARVVSDAAFGEFRRQLAYKTAWYGTELAVADRWFPSSKTCSHCGSIDPDLTLSDRVYQCDDCGLVLDRDINAAINLARYTPAAPKSSPPQPVAA

SEQ ID NO: 63744 - protein, 234 aa, Okeania sp.
LRVNTYSGALKQATSVVIYSIAILFTIQAIGISLAGIGKYPKFKKKGRSDSFTIDNSGKPIELNGWNHKLPFIGIVKTYEPIEATTQKITISKQAGDWYLSFAYEFTPDPTPKTTEVVGVDLGIKTLATLSDGKVFESVKSYRQFEAKVSQLQYLNRNKEIGSANWRKIQLKIAKLHTKVANIRKDALHKLTTYLAKNHNPPPSPPGRGARGVGEDLNVSGMLANHKLAKSVSR

SEQ ID NO: 63745 - protein, 401 aa, Okeania sp.
MAQKAYQFRFYPTPEQENLLRRTLGCVRLVYNKALAARTQAWYEQKQRVSYKQTSAMLTNWKKQEDLDFLTEVSSVPLQQGLRHLQTAFTNFFSGRTKYPNFKKKRNGGSAEFTSSAFKWKDGQVYLAKCAEPLAIRWSRQLPPGCIPSTITVKLEPSGRWSVSLRVHDTRDLRLKPIKKEIGIDLGITSLLTTSDGEKVANPKNLNKLHKKLRLAQKSLSRKTKGSNNYQKARLKVAIIHAKIKDSRLDYTHKLTTQLIRENQTIVVEDLAVKNMVKNHKLAKAISDANWGEILRQLDYKAKWYGRELIKIDRYFPSSKRCSSCGHVLEKLPLNIRDWDCPQCGTHHDRDINASINILAAGLAVSVCGATVRPSGSKSRKAGAMKQKAPNSDARESRAVS

SEQ ID NO: 63746 - protein, 451 aa, unknown
  TnpB Polypeptide
MVNIASCEVELNHMNNGMRRVLKDTMRIFREACEMVGKIVEERWDDVERQKTSKDKLSYVESLIHTTKNNQADYPDFDKKFYKFPAYYRRSVINFVTGQVKSYHTRLDEYEEKRYSAISSGKRFKERRPTLNLNTAAFPSMYKEQMYILDGTKLSLKVRIRNTWDWIEVSIPARDRKHLENRASCGKVCSPKLMYKFHKFYLSFPIEYGYAEFPETPIDKQIMLAIDLGVNRGAVASLMDSSGTILGRFFDPFTSERDQMDHLINKIKKIQKATGTGNSLAAVYTKLDGVKTNYTRKLANWIASLASTYHVYGVVFEYLGKMKGSKSARIHHWCKCRIRDMVKGMCFRNGIRTFLINPRNTSALAFDGSGKVERDKKNYSMCTFLTGKRYHCDLSASYNIGARYFLRARFKTMSETAWSELVAKVPELSKRTSWTLSTLIRVESEFRKSAA

SEQ ID NO: 63747 - protein, 424 aa, Haloferax sp.
MKRTNTFEVIPKSDADEELLRRLLDASAALWNEINYERHKNFAGSDGDVWDISEYRGRYGGTLGAATVQQIERKNREAWRSFFALKKKGEANGKPGFWGNASDGRDLRTYIRNTSYSIEWGEYSRLDILVGQDLKQEYGIEYNERFRLEVRGNPNWKEYEKQGRLELFYDEDSKQFRAFQPVTIDNSRLAHPLADEIAALDIGANNLVACTTTTGQQYLYEGRDLFKRFRETTREIAHLQSKLENQRRTTKRIKRLYRRRTRRRNHAQDALVRSLIKRLFHEGVTTIYAGDLTGVLDTHWSVRANEKTHNFWAFRRFVNRLQYTSEEFGIDVEIRSEAWTSQTCPKCGSTTNTTRHQDTLTCGCGFEGHADLVASETFLRQQTTEVRPMARPVCLKWDDHNWSESPCSHRPNVVHTNPKVTSVD

SEQ ID NO: 63748 - protein, 432 aa, Haloferax sp.
MEVIRTVKVKLDVPNERCDDLHQTKNQFLHCANTTAEWAWRYPHDYCVTSKKKAENALYDQLRGETELTANLVQKGIRRAIEATKSGVSRLKKGDNTSQPHFDAWSVVYDKRSATFHRDHVSLSTVNGRVECDYVIPSETEGTPIGEYLLNEDYEFRMSTLQYDRTTQSFYLHARMRRATDEQDQSTANSSDAKHRTVLGVDLNVDGSLAVTSTGAFIGNADEMNHRRREFEKTRGSMQQTGTRSAHLSIQSMKDREHCWMQDELHRASNQILEEAHYHGCTHIAFEYLTDIRKRMAGAKRYHAWAFRRLYQYVEYKAEMFGIEMGQVSPAYTSQRCSSCGFTHENNRRSKHQFVCQKCEYELNADYNASKNVARKLLKKLHSGQKSSGGGAPCQCALTSGTLNLNGDFHASVKSTAEGESTDKPTTSVVGH

SEQ ID NO: 63749 - protein, 669 aa, Streptomyces sp.
MQHAQPPRKFRGKNKAPKWAKPDGGFVSVMVLPLAVTDPADVARLEKLFGAMWSIKQAVQRDTRAKADAYWRAKHERDTHGAKAVRQRLGLNREALERCAYRHLEGAGHLKHHASKALAMHIADEVWNGVQRHLFPDVTGKRHGRPRVGRWHDFTRIPGRARSHTTENKWETFRLVGTLHGHAMAYTSGGRHELMQPRRMPKPTVPEGKVPTGKLTASGKPGMRKASWWDHTGPLAVVFAGGPDSKRGDLVLPVHVPQGPGQWARVEHFLAHPGHWHKVDLVRRRKVSAPGGWAYEAHLMVLGPGYASPAVRRMRRQAAGLDRIGGVDGNVSNLSVVSFPASLDPADSGPASSEITLTDQERARLEKGTRKRRGRARALERSRRATNTGQYGLSKRQTARAQRRAAKGLKPKDVAVPGGARDSRSDGVPKQAFHRDRLSGGYRRLRARQAEAAASAAEYRRHRARTVARDIIAAHGSNLTVEDCDIRTWYRLWGKRLSQTTPGMLIAALEIECKAAGGRLVRASTWSTALSQHCLCGERVTKTLRDREHKCTACGLVGKRDLVSAALAAFVDLTDPHGPKTATLNTARSRHAQIIFEQGLEEALSESTTPCQNTPRGAGRVAVPRQRVTSAHRTAGRRDRATPDEPRPVRDHAGKPGPRPACSPQLTLW

SEQ ID NO: 63750 - protein, 358 aa, Bifidobacterium sp.
MADYEAVKVPLDPTPAQERMFRMYAGAARFAYNAALAHMKEQLDERKAQIEAGVAKKDLVKIDNNVVKFGYWWRANRDTLAPWWPEVASQVFNCAFDNLGHASANFLKSLSGKRQGGPVGFPKFKPRAAAKAFAFSTITIPDAHGVKLPRIGRVHTLRNVERLVAGRATKTTTIRCEAGRWYASILCETPTPTPPVNTKPEVWVVFGLDEYIALSDGTRLTNPRPYRHALADLRKASRDLSRKTHGSARYMDQQRKVARIHKRVKALRDNALHAASKQLAEHYGVIHVQRIHLARGMRHHVLAQSLADAAFAEFTRQLTYKTARTGASMHMHEPMTVEQHVDAMALAQRLATGPLPDA

SEQ ID NO: 63751 - protein, 375 aa, unknown
  TnpB Polypeptide
MKAFKTRIYPTIKQIELIEKTFGCCRFVYNKGLECKKVAYEKDKANVSVYELMKRLTQQKKEFEWLKEVETQALQQSLLDLQSAYVKFFREHKGFPKFRKKGEKESYRTLIPKYFSKRSIYIPKVGIIKTAERIRKKWIIKNATISKRAGLYFVSILIEYNSQKIIKSGEVAGIDLGIKDFAILSNGTKYKNIKSLKQQEDKLARLQRNLSHTQKGSNNRKNLKTKIARLHLHIANKRNDYLHKISTEIINRYSLIAIENLNVKGMIQNHKLAKNIADCSWSEFVRQLEYKANWYNCELRKIGRFEPSSKLCSVCGYKMVEMPLNIRKWECPNCHTVHDRDINAANNILKIALSGREEEPVDTVNGSSLEQENFE

SEQ ID NO: 63752 - protein, 389 aa, unknown
  TnpB Polypeptide
MRKTFKYRLLGNKATFAKADKWLYLCRWLYNTALDQRIQIYRQNKVKISGYDQCNQLPELKEHFTEYSDISAQTLQSVIERLSIYYDNFFRRIKKGGQKAGFPRFKGKDRYDSFILKNTGWTLDGKYLIIKKIGKFKLRLSRPIEGDIKTIAIHRESDKWYACFSCDNVTEKKLPKQDNSVGLDVGIKSFLVDSEGEVVDNPQYFRQSEALLRRRQRVLSRRKKGSNRRKEARILVSKVHEKVKNQRNDFLHKLANQYIKNYGTLVFEDLNIMGMVKNHNLAKSISYVGWWKFYELCAYKAEEAGRQVIRIPRFEPTSKKCSNCGAINQELKLSDREWICKECGVLHDRDYNAAKNIKRVGQTQQALTCGNTQSVACESPNTSSRECQK

SEQ ID NO: 63753 - protein, 433 aa, Erysipelotrichaceae sp.
MIKTVKRSYRFRIYPNPSQKELIEKTLGCCRQVYNDFLSMCIESYKADKNRTINKYELIKLLPEYKETFPYLKEVDSIALQQTVIHLFDAYMNFFRHNAEFPKFKKKKNDYGYTTMNINNSIRFVADDIQIPKVGRVKIKFHRRLPESFKFTMVSVSRKGKYYYVSLLGEEEYLDYGEYIKESLDPNNSIGLDFSLAHLFADSNGNHLDMPTYYQDSLTKLAKEQRKLSRMKKDSSHYQKQLMRIKNLHEHIANQRKDFLHKVSRKLANTYDYVFVENLDLKKMSERKTDLKFGITIFDLGYGTFLNYLSYKLNWLNKKLVKVDKYFPSSQLCSCCNYRKSDLTLNQRSWVCPECGTRHDRDYNAAINIKKEGIRMVLILLINILNRGTLGDSPLILNSLEFLSGKPPSSMSGGGGHCNKDKHHHKIDHHQWF

SEQ ID NO: 63754 - protein, 370 aa, Planococcus sp.
MANKAYKFRLYPTPEQKILFTKTFGCVRFVYNKMLAERKATYEQFKDDKEGLKKQKLPTPANYKTEFEWLKEVDSLALANAQLNLQKAYTNFFSGRAKFPKFKSRKSAQTYTTNVVNGNIQLVDGSIKLPKLKLVKLKQHREIPPHHVIKSCTVSQTATGKYFVSILTEYEHQPKPRDIKQVAGLDFAMDGLFVESEQGKKANYPRFYRQSEAKLAKEQRILSRKTKNSARWNKQRIKVAKLHEQVANQRKDFLHKEARRLATHYDCLVIEDLNMKGMSQAFRFGKSVADNGWGMFTAFLQYKLADQGKRLIKINKWFPSSKTCACCGQVKDVLPLSERLFSCDCGFISDRDWNAAINIKNEGILMLGLT

SEQ ID NO: 63755 - protein, 443 aa, unknown
  TnpB Polypeptide
MLKAVKIRLYPDKTQSNYINRLCGSYRKVYNMCLEKKINAYNLDKTSLGLKELGNYFHNDLTKKEEFKYLNEHNTKVLKQTIINLTEAYKRFFVNGNGFPKYKSKHDTNQSARFPLEAISKQNTYSNNKITLGKPLKNIRFECSERDKNYLANHKDKIKSATISRTKSDKYFLAILIENFINEQPAPINDILGVDIGIKDFMVCSNGQVFDNLKLRGKNEKTLVKLNRQLSKKQRVKTGEFVFSKKWNKDVEVTKLSNNGEKSRIKLAKFQEKLNNIKINYIHNITTQLVRENQTIVIEDLNINGMLKNHKLSKSIQDLSINETFRQLKYKSEWYGRNLIIIDRWFPSSKLCNCCGYKYKNLSLKEREWTCLVCGTVHNRDFNAATNIENEGRRILNKQIGTRYPEFTLVDYPPMDDRLRNEGLKSSDRTKQEEGIKESHRFS

SEQ ID NO: 63756 - protein, 349 aa, unknown
  TnpB Polypeptide
LLSKAKTEKPIIRKVSLWLDDVLWDYKRFPQFNALKDGKKLLIIGLTTKRGRIKLPLKPHKLFFKYLNDGWEVKAGVKLRLIEEERKVLAYFVFEKEFDEPSPSGNFLSVDYNADNVSFGIQEFLIQVRTDLGRLTRFYSDVRKRIQETHLIGWKRKLPSRKGRKLLKKFGQRKRNRRIDLQRKLAKRLVELAKELNATIVLEEVPKNFNQKIMGRRKKNEKRLRDTLHNIGMNGFQKFVTEKAVEYGVPLVFVNPSYSSQVCPRCGAFRVKPDDDALRQRVFECPVCGFNLDRDFVAVLNLLGLFPFSLKADEPPVEDSVSPVMLVVEANLLHHKNSLIVISQGLQQK

SEQ ID NO: 63757 - protein, 460 aa, Halomonas sp.
VKVTRVLRSENLNRGKYAELLRQAELLGGLRSEVWQRYGSVAGVGLGDRKVRDSWLREGRSFTVPANAWKETLRDAMADIKAYREAAKDKVKQAIRLRTTNDTEQKRLYTLLKSDKWLSDPFLRRQMRIHFKHGRNKTFNQIVVRSDNYTVFEQNGRCWIKVPSLAKGRRLAIPLKTTIEHAPTGTLRLILKGSRVEVHSQVDVAQETSCGDQVVGIDKGYSEVFVDSDGESYGEGLGKLISKESDYLNQKYVRRNKLRAIARKKPHKRVVIEQNNLDRKKLDRRQDRQVMCLKMLIYSAAHALVNKAGMVVCEDLTSPIASKKNYGRGTNRRLNTWTKGLMAEALDTVSQRRGSSLHLVNAAYTSQADSFNHGLFTGTRVGDKFYRESGDVVQADHNAARNVLARLSDPEIERWTPFTKVKSILQARTDRYRTELTVQGSSYTPGNGALTECELVLNHV

SEQ ID NO: 63758 - protein, 611 aa, unknown
  TnpB Polypeptide
MEAQSTVISVKVPIRWEAMTEDQRTRLSRITSRDTRVVRAFLGVIALHENDLIVGKTKKRIDGTKLEKLTLTAERYTDPAKLRLTVPHDMKKRFRNISFNELQECRQVATAMWNSYLALEGKKPLSARYYRERKIPRYVFSRRFKIVYSPEKEIHHWLEVVDSLDSWRKDGPFHDRLAVPLSPSSYHLNRLREGEVTSFRFLKDSKHKWWAIFSVRTDTPVVDTKGKPPAVMGIDLGINRAVCSVVLTQGKVRHVRYFTNPEKSRRISRYDEMVDALQRERNTRLNDGVPADGVTRRLCDLSERRKHISVDYDRVMVKQLAVHIIELSQRYNLYVAIGDLRYIRDSAGRSSGRGKSFRTKVGRWSFARVTGLLRHALAQSGWPVEGRDNRLVMVREQWTSKTCHRCGNIGIRPKQSLFVCPTCGYRSNADMNGAVNIARRLIRLIPSLRDEKNGLGRWLLPRERAGLSPKAWRSRRSKGRSGRPLRTSDSRGSNVVECDDQMTLESFASTADPTMVRTAETPPAATAARKASDGRGTTAQRTEAQSGPLGPDKARDERAGVYPVLGGDTNHEKGETRELKASRGVHSPLSNCPDRSVHAAEHNGGNSMSDI

SEQ ID NO: 63759 - protein, 299 aa, unknown
  TnpB Polypeptide
MIKSIKVRLNPNNKQLTKLFQYAGCARFAYNWAINREEENHKQGNKFLSDMDLRKEFTQLKKLQEYKWLNEVSNNVTKQAIKDACNAYKGFFKGQSKFPKFKSRKYSTPSFYQDNVQIKFTDTHVKVEAFSMSKKQNKQKLNWIKLYEKRKIPTDCKYLNPRFTYDGLYWYVSVSIEVDDNTENTLQSNEGIGIDFGIKDLAVCSDGNTYKNINKTQRVKKLEKKKRRLQRSVSRKYCKNKKGDNYCKTSNIIKREKELLKISKRLTNIRHNYLHQTTSEIIKRKPNIYYCVTIKFYLY

SEQ ID NO: 63760 - protein, 418 aa, Thioclava sp.
MTATRSLSFKLYPSPAQAAALARKHLMLKDLWNAALEERIGAWRHSQTRVSRSDQEKALKEIRLGLEGWCGLVHTHEAQVVLKRLDLAFQAFFRRLRAGETPGFPRFKSAERFRGWGYKEHGNGFRVEMRDGGRHGHATLFGIGRMRMRGIARTPGRVLKADVTRTVHGWMLNVVVETGCAERAPAEGQAVGLDWGVSTFVTLAHEDGAFEELPNPRHWDLEAEDLKAEQRRLSAAARARKISQRALRKHRRALARRHAKIAARRKDFLHKTSARIVGRHRLIATEALAVRNMTGSARGTAEAPGRNVAQKAGLNRSILDTAPAGFLNMLRYKAEEAGAEFFEAKTRELKPSQRCPDCGAVRKKTLAERHHDCDCGCRLGRDEAAARVLLNWGLEESRRRQNAETSNPAGTVGDQAAA

SEQ ID NO: 63761 - protein, 368 aa, unknown
  TnpB Polypeptide
MKKSFKYRIEANAQTVQNAITWLDLCRSLYNAALEQRITTYRHNHKSISRYDQIKELPSLKEALPEYKAVGSQCLQEVIERLDKSYQAFFRRVKNGDKPGFPRFKGRNRYDSFTLKQTGWNLDGKYLTIRNIGRFKIRLSRPIEGDIKTITMRRSAANKWFVVFSCDNVTDKPLSPTGKSVGIDVGCNPFLTTSDNVKIGNPRFFKKAQAQLAMRQQRLSRRVKGSRRREKARVLVAKAHEKIFNQRRDFHFKTANWLVRNYDTIFIEGMNAWNSTTALNRSMRDVAWFGFFGILYFKAEEAGRKVREKPSKGTSQLCSGCHHIVPKDLSVHIHSCPFCGLTIDRHLNAALNVLGEGQSPQVCPVPCT

SEQ ID NO: 63762 - protein, 407 aa, unknown
  TnpB Polypeptide
MKLTRKVVLKPNKVMQEVLDSLCDYRRYCWNEALELWNTLYEQRLIGLTEEERAMIQELVKSKQPLTDDLQELNALYPSPNNNTVRNILVSQKEDWQYFLSPRVLQFAVKDLADAWSRFYKNSKEFGKPKFRSRKASKQGFKTDYSRIVNGKLVLDKPQSYKGDWFPIYFRGASLPEGRVSLCSVTRVKGKYYASFVVEVETPNLPKTGKLNAVDLNVDHFDTVDGRFDLQSKLLNKLYNRVKHYQRVLARKRLEKLDYKNSKGYQATRAKLQVTYERIKNIQDDLLHKFTTSLFVNYDIIVIEDLDVKKMQMKKQAKNLHRSLFGRFRQYMEYKAIKFDKELIVADRFYPSTQRCSHCGFVKTGEDKITLEGNKKHGTKHHEYICYECGFTADRDYNAVLNLLALT

SEQ ID NO: 63763 - protein, 479 aa, Pusillimonas sp.
MQIGNRFRCYPTPAQQQKLLRWIGCQRFIYNAKVGEDRYYRKFARKSLSHTGQFAPIDQQYSQFKNPELTPWLADVPSQVLRNGATKWMQAYARYFAGLGGRPVIQTRHGKQSVWLTSELFRFVPTTNPDTGEVTHTLHIGTKKHPIGTLAFIAHCSYTSPSSIHLSVQAGRWHVSFNYDDGVAEPTDEETAAWLRGFNTPELTSMTLGLDRGVKTPLAGSNGQQFDFSDIQKKRVAKQIKFKKRWQRRQARRVKGSGRWKKAKQRVARYQRYGADVRRDFCHQTSHALVTDTDYKLFVFEALKVKNMTASAKGSIEAPGKNVRQKAGLNRSILASGWSQIKLYTQYKARRSGKLSIEVPPHYSSQECSQCGFTHQDNRLSQASFVCQRCYFTENADTNAAKVLVKRGVSLILSDGLVKKNVKRVGITKQKTNKVGAGCSEPAGEIQPTLVEIPVNRQGGNTLAWVSLKRETPATTLGV

SEQ ID NO: 63764 - protein, 457 aa, unknown
  TnpB Polypeptide
MLASGQLLEDEGREPIPPAIPEASIQEVKYTSRRTNVVRLLPSGFQERKLRRLADLSARLFNEVNYERRQQFFRGEKVDLEGTWDRYYERYKSMLGVNAQAVLQKNNEAWSSFFSLLKLRKEGKLPPHMKRVSPPKYWKDRETKERGLLLVVRQDRYVVDEQNHKPILKDFGLEINFAGRLRWYGKQGRLEIRYDEARGAWYASIPVEVGVETTRNGNGSKHIVHGKRRSIRIAKPKGKVAAGVDLGINILASAVTSGGAWLLYRGSRAKEDFFHLTRKIAEVQSEADEARKGGDDEEFLRLSRKKRRLFRKLAGRITHLYWNLAGHLVRSLWELGVSRIYLGYPHDIAQDRGNKLTSNLWTYRKLMDAIELKAQEYGIRVYEVLEYNTSNHCAMHGVEVARGPRGVVTCPLGHKLHSDLNGALNILRRGAGSIPAAVRRPLSFPVDHGGVAPVKGA

SEQ ID NO: 63765 - protein, 438 aa, unknown
  TnpB Polypeptide
MKSKTLIRTAQHTTKFSNTGKLEVLRTFLLEYELAVKHYVDYFWTTKVEWIASDQSIKTLDVANEKFDLPNFISTTDNEPTNTPNLSSRIIKSAAGQALGIVGSIIAKRNKLAFKLNVATAKGDLQRVTKLQEELEKFKLTKPDAKITTANLDSNTLEFIVVDENGESFKEFDGFLKIKSMSRTLGFIEIPVKFHRQIKNLQKRGYKQKTTWFVSIDKVCSTWEKPLPTKKTSGRKVGADQGIKTCLTLSDGQITGTCNHGHSLESIMQKLSRCKKGSKNFADAQEHRTNYINWSIKQLNLTDINEIGYENVKNIRYKQNTSNFMKSWTFTTIRTAVERRCEEAGVQLTSQSSIYRSQRCSSCGFVHKKSRNKKQFTCTQCSHTLDADLNGALNHEVELSDIPHVLLSRKLNTVGFYWLDSGLYSIDGEAITVPRQES

SEQ ID NO: 63766 - protein, 263 aa, Nodularia sp.
VPKFKRKGKHDSFTLEGSVKNLESNKIQVPKIGVLQTYERLPQKEIKSVTISRKANRWFISFRFDVEKQDNKNLKVVGVDLGVKNLATLSTGEIIEGAKSYKKYESKLSRLQWLNRNKVINSNNWRKAQLKIAKLHLKIANIRKDTLHKLTTLLAKNHGKVVIEDLNVSGMLANRKLAKAISDMGFHEFRRQLTYKCELYSSELVVVDRWYPSSKTCSNCGTKKENLTLNERVFQCENCGFECDRDLNAAINLSKIDLSKAVS

SEQ ID NO: 63767 - protein, 419 aa, Streptomyces sp.
VIVKLVVQIRLLPTPVQAAALEATLSACNEAATWASGVAFEKDVKKNFALREHTYGEIKARWRLGAQAAQHVIKKTCDAYVVLKANLRAGSLGAPSSKRYRKATGKPIAFRTQSAQPYDDRMLSWQITERRISIWTVSGRMKDVAFTASPEQLATLALYRKGESDLVCRDGMWFLLATCEVPEARLNTDPVDFLGIDLGIVNIATTSDGEIMAGQALNRIRVRERKLRAKLQKKNTPSAKRRLKKRRLKEARRARDINHKIAKHVVAEAERTGRGIALEDLTGIRERVRLRKPQRATHSSWSFAQLGMFIAYKARRAGVPVVYVDPAYTSCTCAECGHIDRANRVSQALFACRSCGFVDHADRNGSRNIRARAWELWRCGAPSTAPALPPRQRGGVGRKRSATASGARCASPGLPAPGS

SEQ ID NO: 63768 - protein, 602 aa, Rhodococcus sp.
MTGQGSAAPRQFAFTTRAYMAVDDATGEPIGLDDVDTRVGWLLDLITAAGAELTARLWRPVTFDVLAAGRDRQDRRLPAQGHVAAARLGWNPHYPDGIYVPSRVTRVVTAQVMATLRILAYRDAAVAALSERFDPATGRITPPTEPGDYVPLGFARGVRRQLVARSRRDGGAPVGRLRITDVQGPPQTSAIARLSAADRTLAQITAADGELVLTVKLPTCPVPAGRAQWRRARLIAAIPGHLVGRDVTDWHLPTLVLDHRGLLWRCAATELVPTDDLGSVTVAVGVDWSPSTLGAAAIAVEGTGGLTSDYRGFTYDDRGLGIKLERLQTEGQMLHAKAARLEKLAATAPPEVRARVEDKIAVLNTNRTAVGVKRGKINRELAFHFARQVTDYATSAGAEVIAVEDLTTLETRKHGRVNNNRAAQSARRKAVTALAHTATAVGITVVSVPARGSSAQCPGCDEPLTRPGGYHTAWCPRCKVGGNRDHVAGVNLAKRALLGKNKVARRRGQLPAVRVAEHAPVRKCRDKNGPTQPRPRHRRVRRSLPRAVTQRMGVTPNRHVPAPQASVWDTVKHEPPQGDAGIRDTRTSPTSATPVADSMRPT

SEQ ID NO: 63769 - protein, 372 aa, Halobacillus sp.
MVKKNKAFKFKTEPNFEQLNLIKRTFGSARFIFNKMLDDRILAYEDYKNDQSELKKMKFPTPAKYKKEYPFLKEVDSLALANTQMNLDKAYKAFFTGQNKFPKHKSRKARKSYTTNVVNGNIMVQDGYIKLPKLKWVKLKQHRQIPEGSKLKSVTVSMSATGKIYVSILTEYEVEPKEVQPENIIGLDYSMKELFVANEGTRAKYPRFYRQSEDRLAKEQRVLSRRKKGSNRWFKQKNKVAKLHEKVANQRKDFCHKWSRDLADNFDAIAIEDLNMKDMSKALKFGKSVHDNGWGMFSSFLSYKLEELGKKLVKVGKWFPSSKTCSKCGSIDKQLTMSIRTYKCACGHIQDRDVNAAINIKVEGKRLLSEHQ

SEQ ID NO: 63770 - protein, 370 aa, Halobacillus sp.
MAKQNKAYTFRLYPTDEQALLLHKTFGCVRFVYNKMLAERIETYETHKKDKEELKKVKHPTPAKYKKEFDWLKEVDSLALANAQLSLDKAYKSFFEGKNKFPKFKSKRHKQSYTTNAVNGNIQLLDGHIKLPKLKKVKMKQHRDIPSEYTIKSCTLSVTGSGKYFCSILTEYEKEIKPKKAEQVVGLDFAMKGLFVDSEGKKANYPNFYRQILVKLAKEQRRLSRKKKGSSNWNKQRIRVAKIQEKAANQRKNFLHHKSKELVTNYDAVIIEDLDMKGMSQALKFGKSVADNGWGMFKSFLKYKLNEQGKHLIKIDKWYPSTQTCSHCGNTQPMPMNIRTYTCSCGLNLDRDYNSALNIKKEGIRLLALL

SEQ ID NO: 63771 - protein, 376 aa, Halobacillus sp.
VERLKHKAYNFRIYPNKTQESLIAKTIGCARFVFNHFLSEWSSAYKETGKGLSYSTCSKQLPKLKREFLWLKEVDSTAIQTSVKHLSDAYKRFFKKQNQAPRFKSKKNRVQSYTTKCTNGNIAIQDRKIKLPKLGLVRFAKSREVKGRILSATVRRNPTGKYSVSILVKTDIQELPKSKTYVGIDLGLKDFAALSNGTTYQNPRYLRKTEKKLAKAQRILSRREKGSSNWHKQRIKVARLHEKIANSRKDYLHKISTEIIKNHDVIGVENLQISNMLKNRKRSKSIRDVSWSMFTSMLEYKAKWYGKQLVTVSKVFASSQLCSKCGYQNREVKNLAVRTWDCPDCGCHHDRDLNASFNILKEIQRILTTVGATGLA

SEQ ID NO: 63772 - protein, 378 aa, Halobacillus sp.
MEVEMVTHKAYKFRIYPSKEQTTLIAKSIGCSRFVFNHFLSEWNNAYKRSGKGLSYAKCNKQLTQIKQDFQWLKEVDSTALQNSLRNLADSFDRFFKKLNNRPKFKSKKNRKQSYTAQYNKGNIRIVGNKVKLPKVGWVLFAKSREVEGRILSATVRRNPSGKHFVSILVDTKVERLPKTNSSVGIDLGLKDFAVLSNGTTYENPRYLRKTEKKLAKAQRIISRREKGSSNWHKQRIKVARLHEKITNSRKDYLHKISTEIIKNHDVIGVENLQISNMLKNRKLSKSISDASWSMFTTMLEYKAEWYGKQLIPVSKIFASSQLCSYCGYQNGEVKNLAVRTWDCPKCGSHHNRDLNASFNILKEIQRILPTVGATGLA

SEQ ID NO: 63773 - protein, 475 aa, unknown
  TnpB Polypeptide
MQTGFRFRCHPTAAQEQILLRWIGCQRFVYNAKVREDRYFRTFARNSLALTGRHAPIDQQYAQFIGDDTAWLREVPSPILRNGAVRWKQAYGRFFKRLAGRPTLQRKTGAQSVWVTRELFHFDAVADPVTGEVSHRLVLGTKKFPLGAITFKATGQFKPSASIHLTVEAGRWFVSGSFDDGAVQPTFQETAAWLATFDETELLARTVGNDRGVAIPVMASTGQAFDFSDTQKARMAKKEAARRRWQRKQSRRAKGGSNRKKAVRRVEALHQYARNVRRDFAHQTSHALVSSPGTLLLVFEGLGVQRMTRRAKPRQDANGKWQRNGAAAKSGLNAAILRSAWGKVKEFSTYKALRAGKLCLSVPAQHTSQECAACGHIHPENRTTQAVFVCQRCGHRDNADANASKVIARRGVDLVLSGQYREKTAKRTMRLRQKQLGPERSEVTPMETTVSRGAGNSTALGSLKWETPAITAQAV

SEQ ID NO: 63774 - protein, 280 aa, unknown
  TnpB Polypeptide
MPKKFAFNPDCYDVRLIYRKGQVEVKISSEFPTPRIVTKPVSQGAIGIDCNPDGLAVVETNDQGQLVHHHYENEQRIRFARSKKRTYDIRLLAVQVVLFAFLIKKPLVLEALKFRAGKQKNKKFNRMSHNFLHRQMLDAIRSRATRMGVEVVEVNPAFTSILGKLKYQDMYSLNVHTAAALVIARRGQGFLESQRFTDKLFGLGGSRVKLEARSREHTLRPKAWSWLRDEFLKPKNSRAHSPTSGSCNDAGKGGNLGEIPKDESGSITGRSRHSSECLRR

SEQ ID NO: 63775 - protein, 364 aa, unknown
  TnpB Polypeptide
MMQQLTIIGKIDGLSKIKENILQMEYDRFNNICQQVQECRNNDIEPQYIWFKDKNTHASFISEALMSIQHSFIKLNVQPLYLRNDVSRIEKHDNKKYKYWLKIPTKQRRQFWVAVNIPKYCENRLTDFTFCDSKIIKKNDEWYAHITIEKEINMITEYKDVLGIDLGIRRTASVVRLSDGMTRYYGKEIRNIRGHYYYLRKKLGEKKANKTIKKIGQTERRKVNDQLHKISRKIVNKAKETNSAIVIGDLKGITQKKNNKGRKFNRKLSMMPFAKLSDYIKYKANLEGIQVVKVNEAHTSQTCNKCGKKGNRNKGLFKCKCGYDDNADRNGAINIAKRGLGEMSSSGVSMTMPRTEFNMNHRIS

SEQ ID NO: 63776 - protein, 540 aa, Erysipelotrichaceae sp.
MSRRKKCELSDYQKQLRQYHKNSSRHVLVLEADIPYQDKCRIFHYADLERKAGNELVGIMKNNLEQLNRTKKYRYLIREYARCKAAEDEGGLKAAAAKLKKLQQAYNVTFDFCRKAMEPLNDKYGIDAVFGLTKAEDVWRGVEKCLYSGGRDIHFSKRGDLPCIRAKQINRGIIVKAADNSLTFSFQGMTFGVLVRDRFESEEVSAVLSYMNDSEAKDRAAVSAMNATGELISTYRPCYASLSCSVIRGKMRIFVHITIEGRPVTKYNRYGGRRHNLGHGVVGCDIGTQTIAYTSDTEVGLKNLAERGSSVSESERKERLLLRAMDRSKRATNPDNYNADGTIRKGPKKWKFSHRYMKLKARHAELCRINAVNRHLAINEEVNYLRSLGDVFVTEPKNVKKLQKRSTKDGTDKNGRCARKKRFGKSVRNRCPGYFQAQAEQKFACYIEVPNSYRASQYDHTSDSYIKKELSQRMYSLSDGTVVQRDWYSSYLLYSIDTADMTIDKSKCMNGFSDKYAKERALISWITENKIRVLNSGIRF

SEQ ID NO: 63777 - protein, 437 aa, Moorella sp.
MPHRHGFCKTLRLPVLVPAPVIDQLQATTDLFRQVVTYYLRVFAEHLEVLDNPRWLSLAEKLTHRTIKNPAPLYHDFDALFPCLPSGFRRAAIAASYGLALAWRENYRRWQRAKVSAEERNERRAAVGKKPIRFTERPPQFPETARSWLTYYGTEFKVFDARHLLLKVTTGTSYIYRKVALARPWEIPAGYAAGSPTLVQKKNGWEVHIPLFLQERRDLRPAAALMQDPATRICAVDLGLNHHAVMTIQDAEGRVLATAFISGAKDNHLRKQYLERIARLQKKTGVIPEGERFAKDLWDKVKNLVGDIAHQVSRRIVDLAAQHGARIIVFEHLKNLHPEKGTRSRRMNQKLGYWVKGRIFQYTQYKALHQGIIVCRVNPRDTSRRCPYCGFMSIERYLPGKPHGITLAQCGNCGLHDVHADWLATKNIGQKFRLRYA

SEQ ID NO: 63778 - protein, 384 aa, Halorubrum sp.
MERTLSTTVRVKLHSLTNRKAELLTREYEAFQTEVHGGDADLYSATKQQASKVQQQKDPNPGTEQPVVLRNDVFDVSHDADTVLSSWWVKVPVYDPERGRGNSIWCPAHVPHKDERLVREAEIRDSELVRRDGDWYVHLVVKRSVTVADEYDDVLAIDMGARWVATCAFLSDRKTTFYGEEIRRVREHYKQLRKSIGKSKPRGGQQVVGRVGGAEARKVDDRLHKISRRIVEDAERRNAVIVVGDLSGIREDNDKGRYVNDKTFKMPFARLLNYIEYKAHDAGIDVQVVDEYGTSQTCNRCAREGIRETQGRFECPECGLDDSADKNGALNIGKRALGKFSKPLSEAGAVLARPETQVIVRRDEEPANLSVSVDSTSSGGNPRS

SEQ ID NO: 63779 - protein, 177 aa, Enterococcus sp.
VKRLEKKLKREQRKLSRKIERNIAGYTKNRKPIYKKPLKEIKNIGKQKEIIKSLHKRLSDIRKNHLHQTTSDIVKTKPYRIVMEDLNVKGMMKNQYLAKSIASQCFYEFKRQMKYKCERLGISFVEVDRWYPSSKTCSHCGKIKKDLKLSDRVFHCECGFTLDRDLNASINLANYQI

SEQ ID NO: 63780 - protein, 350 aa, unknown
  TnpB Polypeptide
MLIQKTIKAKVIDPTCRKRDILEKEYQGFQSVVHGERADLYSATRQQAERFLKKIKSPQHRHYPLILRRDVIRLERQDTDVAPYWFKFPCFGIRGGIWLALKPHCDIPDVCSLREAKLIKRKSAWFIHLVIEKEVNEPAINPAHLLAIDLGERYLATVCGGDSIHPKFLGKEVRGIRRHYAWLRKRLGERKLLSIIKKVGNSEKRKVNAVCHQISRQIVDEAKETGSTIVLGDLKGIRQRARGKRMNRIVSSMPYYKLTQFIKYKAAWDGVAVLVIPEAYTSKICHRCGSPGSRPYQGLFLCHSCGLRYSADLNGSRNILKRALGYIPSAGAALAQPPNSGILDLRILRL

SEQ ID NO: 63781 - protein, 456 aa, unknown
  TnpB Polypeptide
MKTITLSNRFYYHELDEKDASAIKNDLVLYNSMLHKAYKMLTLKNKGIYMKSSELHKALKKEFGTNDYFPLSVLWKAQSLLKANHEHHQLFIKQKKQQLKRIEMKISEKQKKIDKLDKQIQKLIEKTKEGKQTEKDYLKEVQVLKPERKRIKNQLSQLIFKRNRTLQIMERPMRACCFGGRKLTKLRTTTDIPHEQWYKEYHHARNHLISVCGRRQGKYSNNLFKYQVDEDYLIYRCSSERREIKLNIKFHHDAEHLIKAVKLPHNTAGKAVQYDLIDYKEYFIIRAVIEVQVEPAEFNRSTGTVGIDINVDHIALCETDRHGNCVLLKTIPMNLTNKTRNQRKHIIRNTAKKAVLESVRSNKPLIIERLDFKQKKMNMRYENKSHNRVLSEFAYKEITESLKSRCRKEKAAYKEINPAYTSRIARNKYMKSMGCSIHMAASYVIARRGCGYIDVV

SEQ ID NO: 63782 - protein, 260 aa, unknown
  TnpB Polypeptide
VVNGNIQVEDYRIKLPKLKWIRMKKHRDIPEKYCLKSVTISMEPSGKYYASLLYEKSDCENQAEEFDYEDAKILGIDYAMHGMAVFSEDIQKENEGYFRKSEERLAREQRKLSHCVKGSNNYYRQKKRVALCHEKIRNQRKDFLHKLSHEIAEAYDVVAVEDIDMKAMSQCMHFGKSVMDNGYGKFRELLEYKLTWRGKKLVRVDRFFPSSKKCCKCGNIKKELKLSDRVYLCTCGNRIDRDLNAAINIREEARRMLLAG

SEQ ID NO: 63783 - protein, 376 aa, unknown
  TnpB Polypeptide
MKIQIAYKTQLKPNKKQIILFKKACGTARFAYNWGLSQRIQQYKNTGKSDNFYSQKKQFNQAKKIDFTWTYEVSKCVPQEALRNLDTAYNKFFEKKAGFPKFKSRHNSSQSFTLYGAIHVAKNTIQLPRIGKVKLWEKNYLPCNTKIISTTVSLKANHWFVSVQVEEERQMIPTTPSVVIGIDLGIKELGVCSNGMRFENPKYLKRKELRLKRYQRKLARQIKGSKNRQKTKNKIATVHYKIACARKDSIHKMTTALVKTKPKAIVIEKLRISNMVKNHKLAKSILDCGWSEIARQLKYKCLWDGIELIESDTFFPSTKLCSICGYKNTGLTLADRSWVCPTCRSKHDRDLNASKNLEYYYTGGLPEFQACGQTLR

SEQ ID NO: 63784 - protein, 427 aa, Escherichia sp.
MHQENTMLPRRISVSLFIDQSIIWPVKRLQAFKFQLRPGGQQEREMRRFAGACRFVFNRALALQNENHEAGNKYIPYGKMASWLVEWKNATETQWLKDSPSQPLQQSLKGLERAYKNFFQKRAAFPRFKKRGQNDAFRYPQGVKLDQENSRIFLPKLGWMRYRNSRQVTGVVKNVTVSQSCGKWYISIQTESEVSTPVHPSASMVGLDAGVAKLATLSDGTVFEPVNSFQKNQKTLARLQRQLSRKVKFSNNWQKQKRKIQRLHSCIANIRRDYLHKVTTTVSKNHAMIVIEDLKVSNMSKSAAGTVSQPGRNVRAKSGLNRSILDQGWYEMRRQLEYKQLWSGGQVLAVPPAYTSQRCACCGHTAKENRLSQSKFRCQVCGYTANADVNGARNILAAGHAVLACGGMVQSGRPLKQEPTEMIQATA

SEQ ID NO: 63785 - protein, 395 aa, unknown
  TnpB Polypeptide
MLRGKKIALDLTSEQEQHMWKSVGVARWSYNYAITRCKEQYLKYSEDNTLPKTLTEGQIRKELTVLKNTTHSWLQDVGSNVIKQAIKDWNDARNRFFKGMGKAPKYKSKNTSKPSFYVNYESLRRVSGGFRGERLGFIKTKEPLPRIPKGSHYKNPRISFDGKYWYLSFSYEVSDISVELTDLVIGVDLGVKTLATLSTGEFIKNINKSRKVKQLEKQLRREQRHLARQLQANTKGYLITEKGNRKPIYKRPLEMCSNIQETKRKIKLIYRKLHSIRMNHLHQTTSHLVKQLPKGIVIEDLNVKGLMKNKHLAKHIQNVMFYEFRRQLEYKCLQYGIYLVVADQFYPSSKTCSYCGNIKSELKLKERIYKCDSCGLEKDRDLNAAENLAYYFYRG

SEQ ID NO: 63786 - protein, 233 aa, Microcystis sp.
  misc_feature (187)..(220): Xaa can be any naturally occurring amino acid
MFVLEYKVKPKPNQIEAINEAIRTTQFVRNKVLRYWMDNPGVGKTELFRYNTALRKEFKFVDDLNSHACQTAVERTLRAITRFYDNCQNKVKGKKGYPKFKKHSRSVEYKVSGWKLSKDKRHITFTDKKGIGTLKLIGSRDINYYQPDQIKRVRILNRADGYYVQFCLKLDPRDTVKPLTPSQKTTXXXXXXXXXXXXXXXXXXXXXXXXXXXXXXXXXXTRRVCQECGTPFS

SEQ ID NO: 63787 - protein, 173 aa, Microcystis sp.
LNRHKVKGSNNWNKAQRQIAKLHFKIANIRKDTLHKLTTYLAKNHGQIVIEDLNVSGMMANHKLAKAVQDMGFYEFRRQLDYKTQLYGSELIIADRWFPSSKTCSNCGYKKESLSLTERVFECEQCHVVCGRDLNASLNLASLAVSSTVSAWVVDSADTTTVKQEVNVKFAHE

SEQ ID NO: 63788 - protein, 414 aa, Mycobacterium sp.
  misc_feature (352)..(354): Xaa can be any naturally occurring amino acid
MPKFEVPDGWTVQAFRFTLDPTEDQAKALARHFGARRKAYNWTVATLKADIQAWHASGTVTAKPSLRVLRKRWNTVKDDVCVNTETGVAWWPECSKEAYADGIAGAVEAYWNWQTSRAGKRAGKRVGFPRFKRKGRDQDRVSFTTGAMRVEPDRRHLTLPVIGTVRTHENTRRIERLIKAGRARVLAISVRRNGTRLDASVRVLVQRPQQPKVVHPGSRVGVDVGVRRLATVATADGTAIEQVENPRPLGAALRELRHVCRARSRCTKGSRRYRERTTQISRLHRRVNDVRTHHLHVLTTRLAQTHGRIVVEGLDATEMLRQKGLPGARARRRGLSDAALGTPRRHLSYKTXXXCGPGHSASALVLQDSLVRVGAGGRRPLVPVVENLPRLPACARHRLGRTMAMRPMLSGPSA

SEQ ID NO: 63789 - protein, 261 aa, Mycobacterium sp.
  misc_feature (136)..(139): Xaa can be any naturally occurring amino acid
MPRWCLPAMVALWCRRTCWCKIVTSGWTGRHRRTSAARRSPRMPPTSRRWGRGPPRSWSALEHPLRRRRRRRARWSTECGRRRGALVPASSAAIWSAAGSGWCRSPRLVTLTVVPRCCAPGRRPARCWPSSVSWAXXXXAALGTPRRHLSYKTVWYGSALVVADRWFPSSKTCHACRHVQDIGWDEQWQCDRCSVVHQRDDCAAINLARYEETSSIVGPVGAAVKRGADRKTGPRPAGGCEARKGSSPKAAEQPRDGVQVA

SEQ ID NO: 63790 - protein, 320 aa, Streptomyces sp.
MATDRVQVKRQFGHRAWLALNPAQIRLIDAQAHAARTSWNLLHDWWMMLPKDKRSLAAADAAIRQARQDLDWLAVLPAQAAQAVLKTYVQAWRNCWEGRAEAPAFKSRIRSVMSVDIPQGRDLNIVRVHRRWGMVNIPKVGRVRFRWTKDLPVGKRADKENRVTGARLVKDALGWHIAFRIQTLQAVPESHQGTEVGIDAGVNLPLALSDGNHFDHGRPARLPDGTADRDKWLTDHEKATLLRLEQHAAHRKSFRQPGERSSNRLRHTYDQIKQLRATATRRAVDWQHKTTTRIAEQCTQPQRHRGRLIWRKLRERVTRP

SEQ ID NO: 63791 - protein, 333 aa, Streptomyces sp.
MFTSWKKSEELAFLSEALSVPLQQTRRNLQGAVGNFWPSRAEYPTFKSRTTSRSPPGTPAAVPASATAGATPFTVTVARDAAGRWFVSMLCDDIPAPMPGTENAVGIDAGITGLVTLSTGEKVTDPRHARKDRARLTKAQRVLAKEARGDGANRAKARRKAAKVLARNADRRRDFLHKLTTRLVRENRTIVIEDLTLRNMVRNHALARAVSDLLAIGRWFPSSKLCSACGALRGKIPPHVRDWTCECGATHDRDVNAAENVLAEGLSVTVCGAGVRPQRVLRAGSRRRGGKPHGASRGNPSPSGGGGCQFCIVCAVRGCAMIGGDPGIEERRI

SEQ ID NO: 63792 - protein, 516 aa, unknown
  TnpB Polypeptide
LSSGCDNRTHVRIKRVGRIDSAPHAAHHVPVRPRPVSCAGNHTCPTLWGLAFCVQSEPSAGHLRWRTPRAGCPGACRSAPTPVLGHEDQMHIERGDDVSASTVVVLLSHRPNRFSGMLVRYRYRIDPTGVQRQALARAFGCSRVVYNDALAERQRAFAAGEKLSDTEIQRRVITRAKRTPERAWLAEVASVALVQACQDARRAYRNWFDSRSGRRKGRRIGHPRFRTKHGAQSIRLTRNGFALHGTRLYVAKIGDLRVRWSRGLPSVPSSVTVIREPDGRFYASFVVERDPTPLPPVARTAGIDLGLAWLATVAGSDGTVEQVANPRHLRAAQRQLARAQRQLARKRKGSANRAKAHRRLATAHRKVRDRRADHHHKLALRLIRENQVVAVEDLWVAGLGRTRLAKSVHDAGWATLVRLLEEKAARHGRRVVKIGRWEPTSQICSACQHRDGPKPLSIRAWACQACGVVHDRDANAARNILVAAGLAETQNACGGSVSPGQPLAVASEAGTRRGAA

SEQ ID NO: 63793 - protein, 366 aa, Chloroflexales sp.
VQALAEKLIANVDTARTNRTQEQEAGAEPTTRFPYREKPYQTVTWKGQAVRVEGERLVLPNGRTQADLVLPLPARFHGADIRQVELLWRADHYQMALTIAEPPPKPDEQPAPDERAAGQVAGVDLGEVNLAAVCTQDGQALVVNGRLLRHLKQLRNKRHAAYAERQARCKKGSRRWKQLQRQKSRTSAKLYRQQRNILHQASRKVIDFAEAHSVNELAIGDVRDIADGVAKGRHANQKISQWPHGQFRRYLKEKGERRGMRSTLTGEAYSTRTCSCCGHCHPSAPRGRVFRCSGCGTTIHRDANGAANICSKQVYGRYAAVQVKHTMHRQAAAVRVPTRAKVAGSKRAVSPPGDGTPPEASPFTGR

SEQ ID NO: 63794 - protein, 392 aa, unknown
  TnpB Polypeptide
MIVTQTVRLRLAVNDKQGSALGETVRQYAVAFNVVAKTGWDSRTTNGVKLHRATYKRLRESLGLPSQLVISARMKAVEALKSVRERARQGRKVGCPETAKPAVRFDARSFRLDWSGTVRLTVIGGRLEVPVLFDRHSETFKGLKTCSADLVWKPKGWFLHVVVEKEVPDVQETGKAVGVDRGIKRPAVTSDGKFFGQSRWRAVEERLLALRRRLQGKGTRSARRHLGRLNDRLARFRRDCDHVLSKRLVRSVSPGDTLVFEDLAGIRDNAKARGRANRRRLHSWSFARLGAFVSYKAALRGVKIAYVDPIDTSRRCPECDLIDKENRRTQSTFRCVRCGYERNADLVASWNIRDAHKGLWSPVSRVPGRVNGPNGEEIVQLFSKPRTLVRGS

SEQ ID NO: 63795 - protein, 477 aa, unknown
  TnpB Polypeptide
MPASTQLISDEERGPISPANSDAGVHESEGGKKGSKKEFLINVVRASKERAGVVRLLPSGAQERKLMRLADASAKLWNELNYERRQQWNGGQRVDLEGTWRKYHEEYKGVLGPHNAAAVIAKNNEAWSSFFSLLKSKKEGRLPKHERVSPPGYWKDREEGRRKLIFVVESDSYTVDEASRVIRIKLGRKKRPLEIPFAGRLRWYGKQGRMEIHYDEARRAWRAHISVKVGAERTRNGNPARRIVRGERKSIRMAESKGKVAAGVDLGINILASVVTNSGTWLLYRGSRAKEDFFYLTRRIAEVQSEADEARKGGDEVKSRRLNRKKRRLFRKLTERMVHLYRNLANHLVRSLWELGVSKIYLGYPYEIAQERGNKLTSNMWSYKRLMRAIELKAQEYGIRVYEVKEYNTSNHCAIHNTEVTRGPRGVVTCPLGHRLHSDLNGALNILKRGAGSIPATLKGPLSFLVDHSGVASVKAA

SEQ ID NO: 63796 - protein, 426 aa, Streptomyces sp.
MSRFRMYPSPVQVERMLTHCAHARYVWNLAVEQHSHRRRWRRSAPGFAEQCRQLTEARRENEWLSSGNADVQQQALKDFARAMNARFTSGFGEPTWRRKHVHEGFRVIGTDRVPEYHADGSPKRNAKTGRQVRGRSVVVQRLNRRWAQVRVPGCGWVRFRLSVKGKGGKLPEAKSFRVTFRNGQWHIAFALVPEPLPVPGTDTVIGIDRGVTVTAALSDGRKLNCPQLTAKERARIRKHQRRAARAPKGSAAKAAEHAKVARLKAREANRRKDWCEKTSTMLARCYAPLRFEKLNIKNMTRSAKGTVEQPGQNVAQKSGLNRAILAQGWGLLRQRTGHKAPGRVEDVPAPYTSLRCSACGWIDKNSRKSQAEFVCSSCGFTCNADTNASINVAAGQGGIPRPRRSAGAGGVTTATSRSSAREPQPK

SEQ ID NO: 63797 - protein, 413 aa, Halorubrum sp.
MHYTYRFRLDPTPEQRELLDHHRDTCRQLYNHALGEFQEIPKSTGTLNQRVRQVRDQLPNFKEWWNELNDLYSTVAQAAVMRIEDSIKALAELKKKGHNVGSLNWKAPKDFRSFTYIQSGFEFDSKNGQPLLSLSKLADIPLIKHREIPHTDTVKEITVKKEPTGEWFASFTVGDKETPKKPTNPDRCIGIDVGILKYAHDTDGTAVESLDLSDDRERLERAQRDLSRKEHGSANWERQRQVVAERHADLKRKRRDFLHKLSNYYATEYDLVAVEDLDAKELIEFPGNSRNRTGAAWGTFQQMLEYKCEREGTHFVEVDPRNTTKECASCGVKTDKPLWVREHSCPACGFEADRDANAAWNILSRGLEDIGVVHSESTPVETALPTDTVVSAKRVIETGSPTLKERTASAVSE

SEQ ID NO: 63798 - protein, 345 aa, unknown
  TnpB Polypeptide
MHLDKDRNQIFNIITLPSYLHRGIIQQVKQDIKNLSSSKKHGNKTGALKYKSECRCIPIISGGVKIKNNNTITIPGFSKLKVYGLRQITSLDNYELANANIVKKASGIYIHISVCISKESRQLTYKSVGLDFGIKDNIVTSDGEKFNCNVQESEYLKYLQRQLHKKQKGSKRYYKLLNQIQKEYEHIANKKNDACNKLMHYLLTTYDTIYFQDEQISNWKKRKKKKRFNFGKVIQNSYLGRIKAKLVSLENVRSFKIDKWQPTTKLCPECGTLNALTLNDRIYSCACGYECDRDIHAARNVKYIGVVKRNECLEQASAETLPSCFVKCFNKTKSSQRSENEDSNL

SEQ ID NO: 63799 - protein, 276 aa, unknown
  TnpB Polypeptide
VPDDAKLVEVKIKPYYGNFMILCTIETESVSVTEDRPFMAGIDFGVDNTAAIVTNEGYALLFQGGALKSANQHFNKERARLISCITVGHKTEENVTSKRLRNLSMHRDLFLRDQMHKISSLIVSFCVKHNVGTLVLGVNPLWKQYSSLGDVGNQNFVQIPLAVLKFMITYKVQRSGITVMEQEESYTSKADFLSHDFIPTYGVDDDRADFSGLRVKRGLYKSGTGTYLNADVNGAANILRKAVPDAFIKVNDFSYLKHPYVYGFHEVNPTGISYAA

SEQ ID NO: 63800 - protein, 425 aa, unknown
  TnpB Polypeptide
MNTQIRKHGLSEYDFQSYIKVCAKQFRKCLSSQQIQKEATRVWKGVEDVLYGDGKDIHFKKYRDFTTICGKTNTNGAKFNKDTMTVGWLGLELKCRIPKDSLYIIEALDSDISYCEIKRMMFPNGWHYYVVAYLKGDAPHKLSEIGGMDNITGVDIGTSTVATVSDHMVTLKELAPECKKYNKRIEHLLRHLDLSRRASNPGKYNPDGTINKSNRDRWIYTKTYLRNLNRLRSLYRQKAAYIKQCHEQMINGLLSDSVNFIVENMTFKGMQLRAKTTERQDKTTDIVQKDGSIKQVHKFKRKKRFGRSLNDRAPASFVSILDRKATLYGGGVYKVQTKDFKASQYDHVEDNYKKAELKDRSKYVGGYKVQRDLYSAYLLKNSNTKFDKPDREKCIYGFENFLKLQNNLICEMKKNNITRKQCFGF

SEQ ID NO: 63801 - protein, 375 aa, unknown
  TnpB Polypeptide
MEDVLKGYKYRIYPNEEQKVLLAKSFGCYRLVFNKFLEKKIILYRKEEKTMSHFDGINWVNQNLSVELPFLRECERGIYGFAVQDVIYAYNNFFREIKKGNKDQGFPKFKDKSSPKKYRSGSPSLRADFDRGQVYIPKLKWVDAVLHRKYDGDVRNATISQAPSGKYYIMLCVKTDHEEMEAADGAIGLDLGIKDLMVTSEGVKYNNNKLIRKYEKKMGRLSRSLSRKKKGSSNRYKAKLEIAKLHEKITAARRDNLHKISHEVVKDNHMIFSENLNVKGMVRNKNLAKSISDCSWSELTRQLEYKSEWNNRIYHKVDRFYPSSQLCSSCGYKHEDVKNLKVRIWECPECETEHDRDMNASINVLNQGLKELGVQ

SEQ ID NO: 63802 - protein, 506 aa, unknown
  TnpB Polypeptide
MSLYLSAAFFTPAFRFFTRISATDVLPVPGVPDIARIIKLIFSSKRLNSCGFEKFHTSAEVRCLENIYNLEPQTYRSKCFGSYFSFRLRPSRQTWRFLARSFEFEHARSTMKTYKFRLYPTKENVEKLLFTLDKCRYVYNVLLERMNEQDLIDRGQIQEDVTDLMRIDDELKNVYSKTLQYECHRLFSNLKALSRLKKNGKKVGKLRFKNGESFKTFVYNQSGFKVLDTGNRLDRLHLSKIGNTPIRIHREIKGIVKQVCVKKYASGKWFAFLVVDDSKTYSKPSNEFASSSSVGIDVGIENFAYDSDGNRFDNPRFLNKSLEKLKTEQRKFSRMKKGSKNRQKQKLKIAIIHETIADQRCDFVHKLSNYYVKKYRFIAVEDLNIKNLIGISHNANDIRDASWGRFLRFIEYKAERAGIRFVRVPPGGTTQKCSSCGRKVPKKLSDRVHKCECGYTADRDYNSARNILLSGLERASPLETEPIPSNRQVPSMNQETSGLDRGSSQG

SEQ ID NO: 63803 - protein, 434 aa, unknown
  TnpB Polypeptide
MGEEATKTIQTRLHVASGERSWLHDARLASREIFNDTIRLKQHGYTRTEIQREVDREDFLRNNKCAVVGKALQTWDSYQSLKQWWENQDDPAGGKPTPPSTDKSGSYPLLMAHTEGYRLTVDDDTNCVQFRISPKPYKKVTGHLQGEPDAMDDLRDAITSDGVDVGQAELLCRDGVYYLHVTVTREFDVPDPNTAETLVGVDINERNVALTALDRDTMRTKGTLVLDYGRVKQERQRYHTITTRCQEHGKTSIHRKLGDREERFTEWVFHRLSRAVVEFAEQFSNPVIVFEDMSGIRDEIKYGTYLNRRLHKLPFHKFETFVSYKATWREIPTDTVATYYNSQTCSCCGERGYRQGRRFRCPNDECAVVQDHADRNASVNIEWREKAKLDGSDTNYRTHKTQPQVRLVRLSGSGRVSRPTSSRSLAEQGVLAHG

SEQ ID NO: 63804 - protein, 715 aa, unknown
  TnpB Polypeptide
MSEAKTSVDKVKTNVAGGETTKTTTASSKGKSINDKKDKGVARVIRNFTYELNDVEGVFTSKISFFLEELNKQINALVSSSIYTENKEKLDKVLKSKGEFRKELLRLLKTERSYTDFYQKYYFDAEIFGNKAKYFRTVIEEYRRILLSRLQRQTIIDMIVNNPTITYQEVFNKLCELNEQRSSKNSDYKFNWISKAEFNNIIKQLSNLNNLSELNKLSSLDNLDNSTSEDVEQAIDVYAIDYSSEDDQISEFNLTDNDEYYLIEFKLKYSDYTTKSDSLLTYQCQVPKKQIKGLTTGYTKLKKFTRPKIFLKYSKLYISFNYELLVNHQHSDSVSEQSIGNKNISTEAGSDSVATWHFKTMGIDIGVAKSATAAIMTTNMCWQHSEANSQTSSEASMADKQAKLGGEEEKPASVAAELVATIDFKQPVIISNELTISDKTKAVSAHIEILKEEQNHIYKKEKAIYDLLKLKQFDGYASNVANSSHTSVNASYVDGLVNHVKQQLAKLNDTACFDASPTLDLLDKYQRLNKLRLHLRHKVSNLKKELSFLTARDMISHAIDNEVDLITMEKLSWIKDVHHTTWDYSQIQQRIIHEANIYGIKVKKVACAYSSKHNPLNLEEEEVDQNRKLVKCLFDRDYAAAIILARRGIKLGKRKLKLSPSCEAASHINESFHAVNLSIKPSLNYRQLKLCAKRQKSIICDSSETEASFAYYSIL

SEQ ID NO: 63805 - protein, 549 aa, unknown
  TnpB Polypeptide
MNSEAVKQVTSKASETETSKVKAKRANQTYHNAVKFKITDVKLIGYLNYIHELFLNEYELINQQNIQPSCFTKEELSHHFRGHFSKKLAELVNKNYLEWELNNKARYFRMFSLHLRQDFKSLSYKQKITQVLEKYDFNIQKAEIKKKIQEELAKLNLYPTKQEATLMNICRCYSNANVRSSEAVRSDERGNEYKDIKKLKVIPLDFTLGQDKKTILQPNEKEPVFHINFNGNWVWLNFIDKINKLQLRYFKNKIDKENFVRFTKPKFVFNHEQNCWFIILTIESKVKFDESYDSNDSTSVTKITVAGVDIGQVKPYSAMLTSFDITQNEQNVVENAKLVSKEMVCSKETKRINEKLGEVKFHLSNVYRKLNVYAGIIKNNINEKFTQQILAKQELLINEKRCLRRKRKELQKRKSYLAVRDLMRQLNFFKVKKVNIERLNWVENTGGSWDFSQQQDILEQKAIEFGIEVTKVYAANTSKENPFTKKRLLGKPNPKTRMVEFAGRKYTIDRDILGAINVALRTKMAKQINIKLNFNENKKILKGIMEHNI

SEQ ID NO: 63806 - protein, 346 aa, unknown
  TnpB Polypeptide
MLEVHRTHESKVLNHSQVEEMLDKHAWSASKLWNVANYHCRQVWDETGEIPDHSDLKKELKTHHNYNGLHSQSSQRVLEELAEAFSSWYRSDDDRDNPPGFRKENYYDNDGNRVHEEHPRSTVTWKQKGIRHDTENNRVRLSKGRNHKPYPRAREYILVEYETPANATIENLNQVRAVYDSQKERWQLHLVCEEYIETPDSTGDETAGIDLGICNFAAVSYSCEDAELYPGNRLKEDSYYFPQKIAQCDDSSGDEALRLHHKWSERRTHFFHSLAKHIVERCVEKEVGQIRVGELEGIREDENGEAKNWGRHGNLDLHGWALTDLRVSSIQAKLVGLSLQISERHE

SEQ ID NO: 63807 - protein, 465 aa, Scytonema sp.
VSQLYRTISVKARFTDIEEAFWLNQCEHSNSLINCAIYHVRQTHYARLEESGNALTTYWRGDELRHGWKTYKCFTTYPELDKVLKDNPHYKALAAQSAQQTLKTVGESITSYNGLVNAYYKGEVDKPSLPKYRKSGGLAAVTFPHQALIYKDGCFYPSISREIKPHLLSEIALPLPEFIDSDWVKEVTIRPYYGILWIDWVIDDGKLPIEINPNLDYNSAWSFDHGGTNWLTGVSTLGKSLIIDGKKLKSMNQGYCRLVAKYKQGKSDFYWDSNLDRVQRQRNNQMRDAINKAARFIINRCLADGVGNLIIGWNEGQKNGSNMNKCGNQNFVPIPTGRLIERLKQLCPEYGIVLTVTEEAYTSKASFLDDDFLPKYGEKPDGWKASGERIERGLYKTKKGFLINGDCNGAANIMAKVATQLGLVLVKVGRACLTTPHRYDLFRDLKNSFRTTLRSVSSEHGRRSI

SEQ ID NO: 63808 - protein, 369 aa, unknown
  TnpB Polypeptide
MSIIYNKKIEIAFKKNDIVILDNQSKICNWLYNHLLEVCIKDYLENNNSLKLLEGRNLRNYATALKKEYPFLKTVYSAPIKECAYRIKRAYVKSFTSNAGMPNFRSWRRKWFSLVFDEPYKGWEVKEEGTVISVSLGKIPNLPVEDGKRNPSVLGKLKVPMILEADEKYKLFSLVKKDNKFYGLFTIEKQLPTVNYPQTKWIFINLETHYFFSAADYQGEALYFKQLDLTKYWDNQIQSIKSKRDNCKTKYIKYTTSGTKFVLHSSRWNKLNHAVNIAKNTKQEQLKSILYQISIYLYKHYDLVIVTDYNSSTKPVGLFRRILKWTSEKQQKHFIIKPHSSEHNLGHSPTKIILGEATFNKGIKFNQLS

SEQ ID NO: 63809 - protein, 473 aa, Mycobacterium sp.
  misc_feature (418)..(418): Xaa can be any naturally occurring amino acid
MARFDVPEGWRVQAFRFTLDPTEDQARRLARHFGARRKAYNWAVATLKADIQAWHTAGMATAKPSLQVLRKRWNTVKDDVCVNTETGAVWWPECSKEAYADGITGAVNAYWNWQSSRAGRRAGKRVGFPRFKRKGRDHDRVCFSTGAMRVEPDRRHLTLPVIGTVRTHENTRRIERLIRAGRARVLAISVRRNGTRLDASVRVLVQRPQQPSVALSGSRVGVDVGVRHLATVATAGGTVIERVENPRPLHTALRELRHVSRACSRCVKGSRRYRERTTELSRLHRRVNDVRTHHLHVLTTRLAKTHGRIVVEGLDAAGMLRQKGLPGARARRRGLSDAALATPRRQLSYKTGWYGSQLVVADRWFPSSKTCHACGHVQDIGWAEHWQCATCSVSHQRDDNAAINLARWELPSTAVGPXKITHSQRIGCYPSVTCRTGSVSAWPSSKRTMRSTHPSNKMSPPRSDTSMGHVLPG

SEQ ID NO: 63810 - protein, 399 aa, Microbispora sp.
MWEVGVRRSFTFLLRPTAKQAAALAACLHDHRELYNAALEHRRTAYRRAGVTVRYGDQSGELKHIRADDPDGQGRWSFSSQQATLRRLDKAFAAFFTRVKAGRTPGFPRFKGRGWFDTVEWPRDGDGCRWDSQPEHPAATYVRLQGIGHVRVHQHRRVLGTVKTISVKREGARWYVILSCDDVPAETLPATGAAVGLDMGVASLVTTSDGERLDNPRRLAASAGRLATAQQALARTKRGSKRGGKAAARVAALHARVRRQRLDGAHKAAFALVRDYDVIVHEDLRIVNMTRSASGTIAQPGRNVAQKSGLNRSILDAGWGVFLRVLAHKAESAGRELIAVNPAGTSRTCSRCGHCAKENRVTQAEFRCQVCGHEAHADVNAAKNILRAGLALRDAAEAA

SEQ ID NO: 63811 - protein, 398 aa, Glycomyces sp.
MARFRMYPTKRQEQQMLLHCAQARYVWNLAVEQRSYWARHKSPTPRYVELARQLTEARAASEWLREGNAEIQQQALRDFDQAVARRYTSGFGEPTWRKRHRHEGFRVIGTDRIPAFTPDGIPKLNAKGKQVMSRSVRVERLNRRWAQVNVPGCGMVRFRLTKGRGLPEAKTFRVTFRNGQWHAAFAVVPDPKPAPGTGEVVGVDRGVVITAALSDGRILNCPQLSEAERARHRKHQRRAARAPKGSDHRAAEYARAAKIKAKEAARRKDWVEKTSTMLATRFDVIRFEKLNIKNMTGSARGTAAEPGRNVAAKAGLNRAILAQGWGQLRLRTEQKAPGRVEDVPAPYTSLRCSACGWIEKHSRKSQAEFSCISCGFACNADTNAAINIAAGHAGGTTP

SEQ ID NO: 63812 - protein, 476 aa, Glycomyces sp.
LPSANLYRTLSRTSDGAGVVTESYSEYNHVMARFRMYPTKRQEQQMLLHCAQARYVWNLAVEQRSYWARHKSPTPRYVELARQLTEARAASEWLREGNAEIQQQALRDFDQAVARRYTSGFGEPTWRKRHRHEGFRVIGTDRIPAFTPDGIPKLNAKGKQVMSRSVRVERLNRRWAQVNVPGCGMVRFRLTKGRGLPEAKTFRVTFRNGQWHAAFAVVPDPKPAPGTGEVVGVDRGVVITAALSDGRILNCPQLSEAERARHRKHQRRAARAPKGSDHRAAEYARAAKIKAKEAARRKDWVEKTSTMLATRFDVIRFEKLNIKNMTGSARGTAAEPGRNVAAKAGLNRAILAQGWGQLRLRTEQKAPGRVEDVPAPYTSLRCSACGWIEKHSRKSQAEFSCISCGFACNADTNAAINIAAGHAGGTTPHQLVIVREPQPVSVGIRSQQGSGGCQALHVDRMFINRSAPPSPRSPAS

SEQ ID NO: 63813 - protein, 376 aa, unknown
  TnpB Polypeptide
MRKTFKYRLFPAKAQATSLQKQLDCCCWVYNKTLEVRRGAWQNGQESLSRYDTHKLLPAWKQEEEWLNEGHAQAMQDAQRRVDLAFRAFFRRVKAGQKPGYPRFKGIDRYDSFMYPQQKGNWRFLDDGRLHLSKVGDVKIKVHRPIEGGARTLTIRRDTVGNWYACFSCIVEPKPLPHTDQVAGVDVGLTYFATLSSGEQIDNPRFFKRDQTTLAKAQRRLSKDAKSTSGCREHKRVVQHIHQRIANRRYDFAHQTSRRLINQYQLLAFEKLDIRDMQDGNWRSMNRSIGDAAWRQFTQCCSSKAEEASRTVVFVDPRNTSKMCSGCGEIVPKSLSDRVHVCPQCGLEIDRDHNAALNILALGLQSLGASPRSSPL

SEQ ID NO: 63814 - protein, 372 aa, unknown
  TnpB Polypeptide
MRKTFKYRIFPTHKQTTLFEQTLDGCRWLYNHLLEERKTSWKSEKQSLSCFDQCNTFKLLKEEQPFLKDIHSQVLQNVAMRIDLAFKAFFRRVKTGQMPGYPRFRGRDRYNSFTFPQSGFRFNEFLHVSKIGKIRVKKHRDIEGIIKTCTICRTPTGKWFVNLACNIDHKPIKQPIEPAIGLDMGLCSFATLSNGEQIENPRFFRQEEDDLAKAQQKLSAQEKATKAKAKARKVVARIHERISWKRENFTHQESRKLVNKFNIIAVENLSINDMQQGNFHNINKSIGDAAWRMFLNFLAFKAEWAGKQVIKVNPAYTSQTCSRCGSRHKLKLSDRIFHCPVCSFSLSRDHNAALNILALGTQSLGFALEAPE

SEQ ID NO: 63815 - protein, 332 aa, unknown
  TnpB Polypeptide
MQIISSYGVELRKQNIPIRQTLEIYRSAVSYLIGIYVQVWEELAEIPDAKRRFNAAEHLVHTTKKNHACFDFDIRFPKMPSYLRRSAIQHALGTVSSYKTRLDLWEKTDGKSGKPKLVYENHAMPVFYRDVMYREGAEGKDEAYLKLYDGHDWKWSCVRLDHTDMEYLRKCWSGKKASAPTLEKRHQKYFLRFSYKEEVTLTKTPVKEQIICSVDLGINTDAVCTIMRADGTVLGRRFIDHPSEKDRMYRTLGRIRRSQREHGSAQTQGRWAYTKRLNTELGKKDCGCDCKICGRKPCRCDRVRVSGDAGEDSGKEKTETAPVEKKRYPEVL

SEQ ID NO: 63816 - protein, 316 aa, Halopiger sp.
VTWKQNGIRHDTKNNRVRLSKGANHKEHPRAREYILVEYETRPGVTVENLQQVRAVYDQQNERWELHLVCNDEIETPDAPGNETAGIDLGISNFAAVAYSTEDADLYPGNRLKQDGYYFPKEIAKCDDSGGEQATRLHAKWSERCTHFFHALAKHIVERCVEKGVGRINVGDLAGVREDENGESKNWGKHGNLDLHEWAFDRFTNILEYKAKVEGIEVVEVSERDTSKTCCICGTEDESQRVERGLYACKSCDAAFNADVNGAENIRLDINDESNSESSPSLGGDRSTGWLAQPAVHLYDLSCGFQPQTEVVDCKP

SEQ ID NO: 63817 - protein, 394 aa, Okeania sp.
LKARYKYRIYPNQIQITKLNQLFGCCRYVWNQSLAHCNHLYANRGKKPSYTDLTKQFITRAKKELLWLKDVASTPLQQSLKDLDQAYRNFFDSCSGKRKGIKVKPPKFKTRNSRQAARFVGANYKISQDKIYLPKVGKIKIVWSRELPTKPSSVSIIKDSAGRYFASFVVENSPESLPKTENYIGIDLGISTFATLSNGEKILAPKPLQKNLKKLAKFQRKLARTEVGSKRRHRCRLRVAKLHAKVKDIRTDFLHKLSTDLIRKYDTIVLEDLFAKHSEGKVSGMIKNRKLAKAINDLGRRKFRTLTEAKCEKYGKEFRVISRWEPTSQKCSCCGFKGGKKELNVREWTCLSCGAHHDRDINAAVNILEVVQPKTKVKTVKETYFRKSDSAITF

SEQ ID NO: 63818 - protein, 476 aa, Iningainema sp.
MLLNYQYRMYPDTNQKLELNEWLRTCRYWYNWQLGDRFDWWENNRTSINSCPLICSLPELRDNPDFYSQKKLLPIFKEDLRKIGHSGYLLDFKRVPSQTLQDVSKRVDEAFRRFVQGDSNGKKSGKPRFKNIASFRTMRFEGQAVTIERIEKDWLFLSISKLNGWLKVRLHRPLPDGFTLKNILVTKKADGWYCTIALEDPTVPVFNPDGIVSTWDNSIGIDAVLHENDYLATSEGEKLPSLKSFRKSQNRLAKVSRRKAIKKRGSAKRRKLAVIEAREHQRIARSRKDHAYKTAHKLVRTGKKVFFHEDLNILSLTKRNKAKKDDDGKFLPNGQSAKSGLNKSWLDASFGQFFTTLDYIASKAGAVTIKVKPAYTSQLLAYRDEFVFTDCSIRDYFDLQELLNVDRDINASINVKRVGLGLFPTIKSRRGKLVVTNSATASTSKEVLEVLRKLDTVSKSSVDGTPEAYTLSEGRV

SEQ ID NO: 63819 - protein, 489 aa, unknown
  TnpB Polypeptide
MLIAYNYKLNPSRNQSAVMERHLEMLRYQYNFRVRERSEAYEQVSRPVMGNYCDIKTQVECCPLTCSVSKNALYGDPWTSSGKKRSALAQQDADLPNLKRERPWYKAIQHHVLQQMLRRVDDAFQRFFKGNGAYPKTKRRGRFRSFNYPPGDVRFPGNRVRLPGIGWMRFFQSRPFPDGFDVRSVTVRRKADGWYISVRLQDDSVPKNVSPGDIKTAIGADLGISKLVSLSNGETINNPRFAQRNERRRKILHRRASHKKKGSRNRRKAYQHLARLENKVANQRADHQWKLANRLTSKADVLVFEALNIRGMSARCKPKKDDFGKFTRNGASAKSGLNKAILDASWAELKQKVRIVSEKAGVIFLEINPRHTSQECSCCGYISPTNRDKERLVCESCGHFADADVDAAVVIRQRGLKELGINLPQLPVVHGKVRTLAPRRVPRRSKVSGTPKNRPEMVGTSTGLPVESGKPPIFVQLSLFDLLESREGA

SEQ ID NO: 63820 - protein, 389 aa, unknown
  TnpB Polypeptide
MEKAYSYRFYPTTQQENLLRRTLGCVRLIYNKALAERMQAWQERKERITYNQTSGWLTKWKQQEEFKFLNEVSCVPLQQSLRHLQTAFSNFFAGRAKYPTFKKKHRGGSAEFTKSAFRWKEGKLYLAKCHEPLDIRWSRQLPTGAEPSTITIRLNPAGQWYVSIRFDDPRNLNLKPTNQSVGIDLGLSSLVTLSTGEKVAPLKYLAQYAKKLRLAQKALSRKQKGSNNRYKARLKLARVHQKVSNCRRDRLHKLTTRLIRENQTIVAETLAVKNMIRNSKLAKAISDASWGELLRQLEYKAQWYGRTLIQVDRWFPSSKTCSNCGHTLAHLPLSVREWECPLCHARHDRDINSACTLLAVGHTVSACGANVRPKPSRVAAVAMKQEPKS

SEQ ID NO: 63821 - protein, 202 aa, Okeania sp.
ISRKNAPGGSAEFTKSAFKWKDGQVYLAKCAEPLSIRWSRQLPQNCVPSTITVKLDPSGRWSVSLRVKDTRDLRLKPSNKQVGIDLGITSLLTTSNGEKVANPKNLNKLHKKLRLAAKSLKRKTKGSNNYQKARLKVARIHAKIKDSRLDYTHKLTYVANPTAALQLIRENQTIVVEDLAVKNMVRESQSTQEQLVMPTGPN

SEQ ID NO: 63822 - protein, 487 aa, Mycobacterium sp.
LRVARFEVPEGWTAQAYRFALDPTPTQLRGLASHAGAARFAHNHMLALVKATMDQRAAERSYGVPESELTPVLGWSLPALRRVWNQHKAGCAPWWGENSKEAYNTGLDALARGLEAWSTSRRGQRKGRAVGFPRFKTARAGKSVRFTTGTIRIEADRRHVTLPRLGAIRTHESTRKLARRIEAGTARILSATVRQDSAGRWHCALQVIVEAKTRPAHARRSPHAVVGVDVGVKADALLVVASPDGVEVDRIPAPKSLTAAQSRLRALQRRAARQHGPYDFQTGTRRQPSRRWRTTQARIGRTHAHAAAVRRDVLHKATTALAQQHQVIVVETLNAAGMRSAGGARKRGLNRALADAALAEVRRMLGYKTRWYGSHLEEADRYFPSSKTCTGCGRRKPNLTLADRVFDCEHCGTRIDRDLGAAINLARLGEPNWGEQSPAGSGPVAGRGATHETEPAPAGDAAGNEASTPHHHPVDQTGTASPQGEAA

SEQ ID NO: 63823 - protein, 376 aa, unknown
  TnpB Polypeptide
MFRTVKVKLPFEQSLLQTAIAFNRACQIVLDYGSEHKVYNKDALNKATYRQVREVIPNLPSALVQTARDEASEMLLRTDFTKIVKKRLSVRYDNRCFKFYPESNYVSLTTVHGRLNFPFKHYDYLDTWKGEYTNAQLVIHKNSVFLNVQVNLPNSEENVSGKVLGIDRGILNIAVCSDNTFFDSKHLRAVKGRYRYLRSHLQHIGTRSAHRKLQRLAGCERRFVLNTNHCISKAIVNKPFDVFALEKLEINRRKKNGKRFNRLLGSWSPNELQRFTTYKAEAKGKICVEVNPRHTSQRCSRCGFVHRWNRHGLRFRCGNCGFELNADLNAGRNIEVLGKSEYLRLFVNKPIVASCEASSTGVVDDSYKLPLSRGSS

SEQ ID NO: 63824 - protein, 287 aa, unknown
  TnpB Polypeptide
VKLTVSDEQRDALHRTAEQYLYCANRTADYCWSDTSYTECKTNKRQVRDALYSEFREETDLQAQLVQAAIKRAVEAVKGVVERWKKGQRVSCPTFTAETMDYDARSATFYRNKVSLATVEGRVEPSFILPADSPTPYERYVLSEDYEFRESTVRYDAVDDEFYIQLSTRRTDGVDETCVSSAHQNASRSGDDNAEVPADTGHPDQTVLGIDLGVNSLAVASTGTFWQGDDYDHWCREFEKRRGEMQQRGTQAAHNALLRLGKRRRLAQTVHPHRRQRNRHGSGRTQL

SEQ ID NO: 63825 - protein, 366 aa, unknown
  TnpB Polypeptide
MDRTMKAVIVRLYPNREQERQLNDCLYVCHDLYNTLLEYCIETHKESGKHPSAYDLEKLLPEMKQNNPKLKTVYSQVLCDVCFRLSRAFDGFFRRVKEDAEHTGFPRFKSWKRYDSFTYTQKGFKLSSNHIRLSPWKMDIKIRGYRKIDGTMKTCTIIRKGAGPNYRWEAAVTFEMDGKDKSGITPQTSTEPSRPIGIDLGLRNMVVTSEGISYPNRKNYIQAERQVSKILRKMSRFEKGSKERERYRQRLFHAFERLNNVNRGYIHEVVNGLLEDHDMIIMEDIQTRDLADKSRSKGMRKSFRDASWGKFIFTLGYKAAEAGIAIVKVDPAYTSQQCSKCGIMVPKDLSVRRHQCPHCGLDVDRD

SEQ ID NO: 63826 - protein, 212 aa, unknown
  TnpB Polypeptide
VDLGRTDIAVSSDGDSFSGAQVTAVRDRYTRNRQSRQAIVSKGTRSTRRRVRQALQRLSGRERRFQQQVNHTISHRLVEAAASTGRAIALEDLTGIRERTNTQPRRKTERRRSNSWAFYQLRGYIAYKCVDAGIPLVLVNPAYTSQMCSRCLHIGRRAGKSFRCGHCGVSCDADVNGAKNIALLGVAVTNPGGPALCCLYQPDARATESLAL

SEQ ID NO: 63827 - protein, 426 aa, Anaerotruncus sp.
MAAWSTTTYCLKLHCKRRDWILKTQALYNDVLSFYSGLLLNDVPLLELDNMRLLRKLEQMTIAGRDKKQPEVELPFPKLPLYFRRAAINAAIGSIRSYIGRLHGWEKAREDAQKRGLIWNRKPPAAPSHFHASTVLYKGMYKQFGQGRILIKLWTGSSWSWVGHAYSGRSIPMNARTLSPAIVARGKLIFLHVPVSCPVEDIRSVRERNAAGEPFCSVSFSASDVMAACVVSSGDGRANASYFVRGGKAFAHRRKRLLNMVKKRRRQTGGKLIAGENASIWRKYRNLRMAYAHFVSRRILDFCVRYNVKTIIIAQYSYDGQKNRCYGRGMAAFPGKQVSAYLKYKAWRVGIVVTSVGPKFIASKCNVCGASVKRYNEYHQATANYFGGRLFICPNGHRGNASYNAAINIGKAFIRKFTNIQEEKAG

SEQ ID NO: 63828 - protein, 429 aa, Moorea sp.
MIVTRSIKELSAMKHKAVKVRIYPTKEQVQILAQHFGCARWWWNYALNHCIETYKETGKGLKQSALNSMLPKLKKEKETEWLKECYSQVLQAVSLNISRAYQNFFEGRAKYPRFKSYHHRQSIQYPQKVKQVGDCLKFPGKLGFVKAVIHRPLDGTIKTVTVSKDPSGKYYASVLMEYDSKELKPSKDGRVIGIDLGIKDFAITYDGDKTSKFSNPKHLAKYEKKLGKKQRIAARKKKGSNGRIKARKIVAKVYERIGNVRQDYLHKLSRKIVDQNQVVVVENLNVKGMLCATRTLRERNHKLAKAIFDLSWGTFVNFLSYKCEKEGKVLVEIDRWFPSSKTCSNCHYLIKELPLDVRSWICPSCGTHHDRDGNAAKNIRAEGIRMLSSSGTGEVNASGEEVRPKRGRPSKLRHSSVKLEAYTVPNGSV

SEQ ID NO: 63829 - protein, 370 aa, Brevibacillus sp.
VILAKKIRLKPTPEQEQQLWRSAGTARWVYNWTLARQEVNYHNGGAFLLDGGLRKELTQLKQSEEYVWLYDVSNNITKQAVKDACDAYKRFFKGLADQPRFKRRRHSNPSFYNDPVKLKAKSGLVLIEKVGWVSTSEQVPMDVKYNNPRISFDGKYWYLSVGFEHEIKKPERTGQALGIDVGIKELAVCSNGMVFKNINKTREVKKAEKHLRRLQRRVSRQYESNKEGNRFVKTCNIVKVEKSVRLLYRRLTNIRTNHIHQATNAIVKTKPSKVVMENLNIRGMMRNHYLSKALAQQKLYAFKRQLQYKCEKYGIGFLEAEQWYPSSKTCSDCGEIKRDLKLSDRVFKCGCGLELDRDLNASINLAKLAN

SEQ ID NO: 63830 - protein, 432 aa, Paraburkholderia sp.
LTSYRSNTRSSQKRQRVELDRSPPHKTSIDRFALGDPLAFARLRALSVLDRALTFKLYPNAREVERLTDWIRLHCELYNAALEERIDAYRKHGKSISYYDQQNVLPEIKAARHEFVELGSHALQQTLRKLDLSFQAFFRRVKAGQTLGFPRFKASKRFSGFCYPDPAGWKLMQHGGRGATLRVGSGKDAMSIRARGQHRFGDGAKPNDLTITRRNGEWFASVTLRVPEDACPRARTGAAYRGVDFGLNNWAMFDDGEAIANPRFMRNEMSRIADLQRQQARKKRGSIRYRRLGARVAKVHERIGNLRREFLHKETTRMVKACAVLATEELRIQNMSRSAKGTQQKPGRLVKQKAGLNREILSAGSSMAHNMLAYKAVEAGTRLHVANTRQLKPSQRYAACWEIVPKTLAQRTHVCAHAGTQRTATRTQRRSC

SEQ ID NO: 63831 - protein, 408 aa, Calothrix sp.
MQKAFKVTLIPNHNQEVLINKTIGCAKFVYNRFLSLRKELYSNEQKTLNYNSCSQQLTLLKKEIEWLNVVDKFALQNSLKNLETAYKNFFADLKKVKGKKGVGFPKFKKKNGCKQSYKTNFTNSNIQVIENRLKLPKLGWVKFYKSQAITGKLINVTITRTSSGKYIASILCETEIEKHSQVAQNVGLDLGIKSYLVTSKGEVVDNPKYYRTQKRKLRKAHKKLSRSVKGSSNRVKAKIKLARTYERITNLRDDFLHKLSTRLIKENSIICIEDLRVANMVKNHKLAMSISDASWTKFITMLEYKALWHDRLVQKVGTFFPSSQTCNCCGFINPLVKDLKLREWSCPSCSSYNLRDVNASLNILSEGVRILTAAVGAPDAIYACGELVSPEVIQAQIVEAGIMRLQVV

SEQ ID NO: 63832 - protein, 555 aa, Streptomyces sp.
MSGGGRTRGNGLRVLDRPFTVAAPSGARSRDRLFLSSTDEEVLRLVGRHLGQLARADLAARIRLGNVKAAGARRTERKRALTRHSSSRWAGAITRSSEDQYQLALRCLYDQQAGLRRSVRKITARLAAPCGQRLNGVRGYADEAERQSKQRRLQILGARLVEVEARISSGRPTVVVGGRQLLKQRHRLADVDLTVEEWQERWDAARLFLTADGESGAPHGNYTVTADPDCGAVAIALPEPLRHLANAPCGRYRLSCTVTFHHRREEWLDRITANKAVRYDIVHDPHRDRWYLDASWSATPVRPPAPEDLARAGARLLGVDINADHLAACVVDAHGNPVGQPFTLSTDLSGPASRRDGQLRAAITELLTVAVEHGCSGVAIENLDFAEARAIGRETMGRGRRGKRFRRTVAGMPTAKFRERLRGIAHHRGLIVVAVDPAYTSRWGGRHWQNPLQQQARITVTRHHCASLAIGRRALGHGLRRRPDVTRRRPEDRLGRATGQAVPRPGAPGTADPPRMPGTPHTGGKTRVHRRDQLALSLPFKTVRKAAGSGRFEAI

SEQ ID NO: 63833 - protein, 424 aa, Paraburkholderia sp.
MQRLQAFKYELMPTGEQQRNMRRFAGSCRFVFNKALALQKARYEQGGKKLGYAGLCKELTAWRNGAETPWLADAPVHPLQQTLKDLERAYANFFAKRADFPRFKRKGQGDSFRYPDPKQIKLDQANSRLFLPKLGWLRYRNSRDVLGAVKNITVSQSCGRWFVSIQTEREVEPSVPQATSAVGIDMGVARFATLSDGSFYAPLDSFKRQETALRKAQQAMSRKTKFSNNWKKAQARVQRIHARIGNARRDYLHKSSTAISQNHAMVCIEDLQVRNMSKSAAGTTDAPGKNVRAKTGLNKSILDQGWFEFRRQLDYKLAWNGGYLIAVPPQNTSRTCPCCGYVSKENRKTQALFACVRCGYEENADVVGAINVLRAGHARFACVPQGDFLRGKVSDAVGSPAAGTHRSDSSRLDAAMSAVGISGL

SEQ ID NO: 63834 - protein, 394 aa, Tatlockia sp.
MQKAYRYRVYPTPEQEQLLRRTMGCARLVYNRALAARTEAWYERQERIDYIKTSALLTQWKKQEDLQFLNEVSCVPLQQGLRHLQKAFANFWAGHAKYPNFKKKHHGGSAEFTKSAFKWKDGQVWLAKCSEALPIRWSRQLPKGCEPSTITVTLEASGRFHVSLLVDTTVQPLPKSDKSIGLDVGITSLIATSNGDKIVNPKHFKRLRSKLRRVQKSLSRKQKGSNNRQKQRQKVAKVHAKITDSRKDFLHKLTTQLVRENQTVVVEDLAIKNMVKNHKLAQSISDASWGELIRQLAYKCEWYGRELIKIDRWFPSSKRCGNCGHIVNKMPLSIREWDCPKCGINHDRDINASKNILAAGLAVSVCGSSVRPDRESSKGQLSKTVRGKKQKPKL

SEQ ID NO: 63835 - protein, 424 aa, Tolypothrix sp.
MSITRRITFRLYPSPPQAKTLSYWRRLHKDLYNAAIANRKNQYKHFKKSVDYYEQQNCLPEFKEVWYEYKQLGSHALQATLKRVDMAFKRFFKGLGGYPKFKSIRHYSGWTYPCIAGWKALTNGKNGHLELSNLGKIQMRGSARTWGKPTTCTIVNRQGNWYASITVQCVPVRETGVNAIGLDFGCFTAVACSDGTVVENPRYLSTTQTKIRIASKSKRRKTKPDFKKKIKASSRWKKANKKVAKLQRKVSARRQDWVHKVAAEIVSSNSLVATEKLNIKAMTHKAKSGSNRKAQKTGLNRSILDVGMGALRAAIEYKLAEAGGIFVEIPTQIVLPSQTCPQCGSQKKKELSERIHSCSCGFTCDRDVASAQVMLNWAMGLGTSLNKRGSDSSTSTHCGGFKQLSEMKRQKPRPSKKMGGVVHD

SEQ ID NO: 63836 - protein, 459 aa, Mycobacterium sp.
MAKFEIPVDWTVQAYRFTLDPTDYQARALARHFGARRKAYNWTVATLKADIDAWHANGIGTAKPSLRVLRKRWSTVKDEVCVNAETGQPWWSECSKEAYADGIRGAVEAYWNWQTSRAGTRAGKRVGFPRFKKKGHDADRVCFTTGAMRVEPDRRHLTMPVIGTVRTHENTRLIERLIAKGRARVLAITVRRNGTRLDASVRVVVQRPHQPGVARPGSRVGVDVGVRRLATVANEDGTVIERVENPRPLDAALRELRHVSRARSRCTKGSRRYRERTTKMSRLHRRVNDVRTHHLHCLTTRLAQTHSHIVVEGLDAAGMLRQKGLLGARARRRGLSDAALGTPRRHLTYKTGWYGSQLVVAERWFPSSKACHSCRHVQDIGWDEHWTCEACSARHQRDDNAAINLARYEETPSVVGPVGAAVKRGADRKTGPRPAGGYEARKGERRQALEQPRDGVQVA

SEQ ID NO: 63837 - protein, 465 aa, unknown
  TnpB Polypeptide
  misc_feature (246)..(246): Xaa can be any naturally occurring amino acid
  misc_feature (284)..(284): Xaa can be any naturally occurring amino acid
  misc_feature (289)..(289): Xaa can be any naturally occurring amino acid
  misc_feature (297)..(297): Xaa can be any naturally occurring amino acid
  misc_feature (339)..(339): Xaa can be any naturally occurring amino acid
LLTNYVYKLRPNQTQFLKMSVWVDMLRSHYNWCLNDRITQYNQQFIQGDYCDIKTCSEVSPLTCFVSKNGASGEPWKDSKVDKEGKNKNPRRSASDLQITALPSLKASRPWYAGIDSTVLQQNVKRLDVAYKNFFEGRGFPKFKNRSNFTSFTCVMGVKIQGSKIYLPKVGWMRFYNSRPIPDGYVIKAATVRKRQNGWYVSIRIEDKEVPNSSVKPLSEVNKIIGCDLGITKLVHLSDGTQIENXKFGTSKKFKRLLKIRQRRVNRKVKGSKNRKKAAKIVGXLHQKXTNKRDAYXWKVANQIASRNIDAIALEDLNISGMIRRCKVKVDEKNRFLKXGQSRKKGLNRAISDSSWGNLTLKIEYLAAKQGKIVIKVNPKYSSQECRKCKHIDKSNRDKEKFICTQCGHRSHADIGAAKTIRDRASEMVRADCAEPSARHSNAQKVSPRSQSKRGEAREPENSGY

SEQ ID NO: 63838 - protein, 380 aa, unknown
  TnpB Polypeptide
MMYAIKLELKLNNRERTLMARHSGYARFCYNYALAVYQRVQYLQGSSSKKVAAIERVFTNHVNKLPEYQWTNTLSSRVYKTTFRHFGAALSRYFQGLGKFPNFKRKKDGDSFTVDAADWNHAILLKPQKSIKIPTLGTFRLKESIPFPCMAQTFTISRTADKWYISFAIKTEKIPPLSHPVMGTVGIDLGVSTFATLSDGNCYESPRPLKTAKTKLSKEQWRNRHKQLGNSRLGVKASNNAHKHYRKTAKIHAKIANQRRDFLQKTTTEISKKYAQICIEDLNVSGMIANHKLAAAISDCGFYEFRRELEYKSVMYGTTIELVDRWYPSSKTCSSCGHIQSMPLKERVFECQNCSIAINRDLNAAINLARQSGISKTSSV

SEQ ID NO: 63839 - protein, 403 aa, unknown
  TnpB Polypeptide
MRFKRTEQIWMKPNKNISSLAHVSKNLYNEANYLIRQEFFKTGRWIRFYELDKGLKESENYKSLPAQTAQQILRLLDKSWKSFFKAIKVWGEEPEKFKARPNLPKYKKKDGEHILVLTNQQCKIKEDGSLKFPKLLGLNVKIRLDKETNLREVRVIPKGVGHVVEIVYEKEADPEDLDENKICGIDLGVRNLVAMGNNIGEKPIVVKGGICKSINQFYDKEMGRVQRIYESQKIPKKTGRKSKKLFDKRSRKIKDHLHKVSRFIVDYCVKNDIGTLVIGNNKGWKQNADIGKKNNQNFVQIPFYMLINPIKYKAEEKGINVILQEESYTSKCSFLDGESVEHHEKYVGRRFKRGLFRSAKGMIINADVQGALNIIRKAIPKAFAKVEADEIEGVGLHPLRCYV

SEQ ID NO: 63840 - protein, 434 aa, Bacterium sp.
MSKVARNGKGCCELYYFLEAPMAEKVGSSIITYRLKLRCDHIDWIRETENFYNKVLEFYYEILTDHLDFLELSNMEVLRRLEQMTIVGRDKQPVMMPLPFQKVPLYFRRSAINAAIGHIRSYVGLLQNWERKKEKAEKKGHTWKKGKPAPAKSFHASVVFYKGMFKEFGEGSILLKLWNGRSWIWVRHTYYGRKLPKEGIILSPAVINKGRKILLSVPVKFQVKDVRKVKERKKEKDSFCAVHFTTTGVLAACAVFSGNGHVTDSYFVRGGKEFAYRRKRLLNRIKKAVEGGKKYKRKIFRLSSYYAHLVSRRILDYCKQKGIKGIIVPKYAEIEGHLYGQGIEGFLGKRIIQFLKYKAWKEGIILTTISPYYTASHCCHCGIPLRRYNEGHMPGNRYFGGKLFMCKNGHQGNVALNAAKNLGILFHSRNIVVG

SEQ ID NO: 63841 - protein, 254 aa, unknown
  TnpB Polypeptide
MSKVIKGIKLRLYPNQSQREQLWQMFGNDRFVWNQLPEMHQSVGLDMGLADLVISSDGVKYGTFNAEWLEKQAVRWQRKYARRRYLAQCQVWKWNHNRSDHLEELDDYSNWQRARVNKARCQQRIANKRRDYLHKLTTDLVRNYDVIVIEDLKTKNLQKNHHMARSIANASWYQFRAMLEYKCAWYGRQLVVVKPDYTSQICSNCGFSSGKKPLEVREWTCPKCGIHHDRDVNAAVNILHKGLKAIGQGLALVK

SEQ ID NO: 63842 - protein, 371 aa, unknown
  TnpB Polypeptide
VSRLKTAYKFRMYPNEEQIKKLEDTLATCRLLYNEALADRKNAYESEGVSRSYEEQAAWLTTERRKGNYRNVYSQVLQDVLRRLDKAFKSFFRRVKAGEDPGYPRFKGKGWYKSFTYPQSGFKLEGSKLILSKIGAIRIFKHRELEGKIKTCTVKRDNLGNWYAILTTDIGEAPEKIEPRKAIGVDVGLKNAVTLSTGESVEYPRYYKQLEKKLAAAQIALSRKVKGSKNYQKAKCRVAKIHRKIQNLRRDFLHKLSRKLVDTADLIVFEKLNIKNMLQNHSLAKHIADHAWSTLIQFTTYKAERAGKSVELIDARHTTQRCSSCGFIVPKTLKDRVHECPHCGLRLDRDHNAALNILTLGLRGRACRDTG

SEQ ID NO: 63843 - protein, 359 aa, Moorea sp.
MQLGYSYKLKPNRQQEATMKKWLDMLRSASPRQRRSQYNYLLRDRNDSYDQVKDPRLGNYCDLRSGGEACPLTCSVSKNHSVGYPWKNSKKNPRRSAYEAHSSNLPILKKERPWYKTIHSTVLQQALRQLDVAFSKFFKGETGYPKPKRRSRFRSFKYAPGQVKLDGNKIYLPGIGWMGFYDSRSIPEGFTLKSVTVRRKARGWFVSLQIEDKSVPVSPVKNKNEINPLKVKGCDLGINKLVSISDGRTIANPAKQKSFRRRERRLKLRQKAASRKRKGSKNRGQSYAKIASLHERITNKRSAYHWDVANQLVDGTDALVFEDLNILAMKSRCKPRPNDNGGYDRNGQSAGARSKSLNI

SEQ ID NO: 63844 - protein, 368 aa, Nonomuraea sp.
VAQIVKRAYKYRFHPTPEQASELARTFGCVRLVYNKALEERTRAYTLGGRRVSYVESSAKLTEWKRGGDHDFLSEVSSVPLQQALRHLQAAFAHFFAKRAKYPTFKNKKKARASAEYTRSAFRWRDGRLTLAKMDAPLTIVWSRPIPEGAQPSTVTVSKDAAGRWFVSLLVEEKISPLPPVAAHVGIDAGITALATLSTGEKIVNPRHERRDRRRLAQAQPALARKEKGGSNRAKARLKVARVHARITDRRRDHLHKVTTRLVRENQVIAVEDLTVRNMVKNRSLARAVSDASWREFRSMLEYKAAWYGRTLVAVDRWLPSSRLCSRCGTLQEEMPLNIREWTCACGAVHDRDVNAAKNVLAAGLAES

SEQ ID NO: 63845 - protein, 403 aa, Thiothrix sp.
MQRLQAFKYELKPNGEQRRNLRRYAGSCRFVYNKALALQQANHAAGEKFINYVAMAAWLPVWKREQGFAWLKDAPSQALQHALKDLEKAYKNFFAKRTDFPRFKRKNSDDSFRYPDAKQIKLDQRNNRIFLPKLGWIRYRNSREVLGKLRNITVSGKNGKWYMSIQTQREVEQPTSTATTSTGIDLGIARFATFSDGSYIAPLNSFKTQQAKLAKYQRRMAHKQKFSNNWKKAKAKIQKLHTTIANARHDFLHKATTTISQNHALVFVEDLQIGNMSKSAAGTAEKPGKNVAAKSGLNKAILDQGWGEFRRQIDYKLAWNGGMLFAVPAHYTSQECPECHHVSTDNRQTQARFMCVKCHYENHADHVGAINVKERGHRLLACGDAAFSRSMKQELAEVNQLSS

SEQ ID NO: 63846 - protein, 281 aa, Oscillatoriales sp.
MYDRTSKQQKKMKARYRYRFYPTDQQKQSASQLFGCLRVVWNDALALCKQSEKKLKSAAIQKVVITGAKQTEERAWLSGVSAIPLQQSVADLETAFKNFFDSCKGKRKGRKVGYSKFKKRTNSQSARLTRGGFSLKDNGGVYIAKIGIVNPIWSRALPSEPSSVTIIKDCANRYFLSFVVEIEPVRVDAKNHSIGIDLGIKTFALDEQWRESQSPSYKKLDRKIRKLQKKLARQQKDSKGRNRNRVRIAKLHNQIADSRKDFLHKLSTKIVKENQVIVLED

SEQ ID NO: 63847 - protein, 363 aa, Firmicutes sp.
LNKAFKFRIYPNSDQEVLIAKTFGCVRFIYNKMLGDKIEYYKSTNQKLKNTPAQYKNEFEWLKEVDSLALANAQMNLQTAYNNFFRKPKTGFPRFKSKRNNKKSYTTNFVNGNIKLENDFIVLPKLKAVKIKQHRSIPKDYKLKAVTVSKTATGKYFASILYEYEVDIKTVQPKTILGLDFSMKELYVTSDGIPAQYPRYYRQSLDQLKREQRKLSLCQKWSKNHNKQRIKVAKIHEKVTNQRKDFLHKQSKQITNAVDAVCIEDLDMKGMSQALNFGKSVMDNGFGMFVSMLNYKLMEQGKQLVKIDKWFPSSKRCSCCGTVKNTLLLSERTYHCENCGMTMDRDYNASINIKVEGIRLLLE

SEQ ID NO: 63848 - protein, 523 aa, unknown
  TnpB Polypeptide
LAKNQTYKAFIARTSHVLDLNGELLDDTRVLARLASEVRDISSYATYVVRNDGTLGDELALVIATAPAEAGRQAGVTMPDFLVSGKSGRSRKEKLVQHNVVASYRSYRERVNAANGESSKYVSQGWKRTVDASAPSYGEDYVNLGAVDGHYARIENNPFADGEIVLRMVIQGQWYRLIFNFDNKRFAEGKVTLPVIKVEDGQPVFIFTIVTDNPVVQFSGDYVIGVDVGINNYATVVVREVATGRIVYGTTLSQRVHSLWNSVQASELQVRYLRKKAATLLRDRQARMSALDEAQLHREASSRKKRELAILAAQEIADLSHLWGNAVVAVEDLSWIRNTMQNGRWNRGALVQWLTHYVSQNGGWVVAVNPSNTSQLCYACGQRVTHPTHKDSVCPEHGVMDRDVNAAANIASRAAPRVVKARVTRAKNRKLRPQAPLKTPPARDSLKYPGRDRTKSKPTPKRKNLCRSAREVILPVCPARAQAQRLEARVLADQDIHVTLETNVAVLKQDTGATCEHKLRSPI

SEQ ID NO: 63849 - protein, 430 aa, unknown
  TnpB Polypeptide
VKITRGYKVELDLNNEQITACLKHAGCARKAYNWGLARKQEARAAGKRMPSARDLHKELNVLKASEFPYMYEISKCAPQEALIDLDDAFKHFFRKAALKKQGQFRGKCGYPTFKSRTKGIGSFRLTGAIHVFEKSIQLPRLGPLRLKEHGYLPVGAKVAQATVSECAGRWYVSIQVAQEGAEPLPATGPVIGVDLGIKTLAVVSDSREIPNPQALRTRLKKLQRLSRWHSRKQKGSANRKKAQQKLARMHAKMAHIRADALHKATASLVAKTKPAEKRPAVIGIEDLGVAGMLKNRKLARAIADVGLSEFRRQLTYKAEQAGVQVHVVSRWEPSSKTCSGCGWYHADLQLADRVFVCQECGLVIDRDVNAARNLELLAYLALMSTASYAGFDGSGQGGSGFSAMRSETTLVERATEPGDYGFVHKNPSFG

SEQ ID NO: 63850 - protein, 211 aa, unknown
  TnpB Polypeptide
MCLPRNPRGLDLGIKEFAVCSNGKRFENPKHLKKSLDKLKKAQKKLSMKKKGSNRRNKQRKMVAKIHEKITNQRNDFLHKTSRELIDENQINTYCLETLNVKGMMKNHCLAQSISDVGWSTFVSFLAYKAEWEGKNILRIGRFEPSSKTCNVCGKINKDLKISDREWICVSCNTKHDRDFLASCNIRDFAFDKQNLVGVDNPESTLVEMAQ

SEQ ID NO: 63851 - protein, 425 aa, unknown
  TnpB Polypeptide
MLVTTINIAYKFRIYPNAMQEEILNKTFGCCRFLWNQMLNERNEVYQRLKDNKESLHSHKYKTEKEYKQEFPFLKEVDAKALQNVNRNLFQAFQNFFDGVKGKRPRVGYPSFKLKHGKQSYTTNNINNNIKIDFENKRIKLPKIDAWFKYRDDRTFNEKIRKVTVSKTKSGKHFVSISLERESIIEPMQEIDESRVTALDMSFASFIVSENGRMDNPRFYRKNEQKLKRLHRQVSRKQKASINRNKARVKLARFYDRIGNARTDWQHKVSRELVNANDAIILENLNVEGMKRFNSGFAKTVTLDFSWSEFVRMVKYKAERSGKHAVLVDRFYPSSKTCSTCGFVKDDLTLSDRAWECPSCHAMHDRDINAAKNLKREGTRILLERMNVKIDAIATAGTAGSHASGDRARPVNPRATVDERRIHAL

SEQ ID NO: 63852 - protein, 327 aa, unknown
  TnpB Polypeptide
MRSRSTSRNSRRRTTQANFTMPTPSVSRTKGYDSTTSPRTLSSGTSKSRTTRTTTSDASTTESRTTGLVGSVERGRRHDGRESAIRAGRNVVSSRHRNPRRRGRFRGVRRRTDTHRCRYWEASLVTVCHRDDHGCPTAPNYGPTKGRPFVGLRKTYFTATRRLQTRGSERIAESFGDDLWNQIDDVFHRVTREVVDYAESVKNPVLVLEDLTYVHTGVDGLRRVHEPPSPRMGIRQTHAQIRYKAVEKGIPVKTVNPRNTSKECHACGEVGYRPQQATFKCTNDACWMGEYQADVNGAVNIADRYLSGESRFREHENDDDSVEDGGV

SEQ ID NO: 63853 - protein, 305 aa, unknown
  TnpB Polypeptide
MPVLRIRTFSRVCKNSQDSSPERDQCRSSIRTTLRYNSVIPTLSLKVFLPAGKQISKKKNWVRLAEHGRIPTDVKYMNPRISFDGLNWWISVCVEFPDCKETLNDDGVGIDLGIKDLAVCSDAVKYKNINKSQKVKKLEKQKRRLQRSISRSYEKNKKGESYCKTNNVIKKEKLLLKRNHRLTNIRKNYLNQTISEIVNRKPRFICIEDLNVRGMMKNRHLSKAVQGQGFFAFRKQLEYKCSDKGIQLIVADRFYPSSKLCCCCGNIKKDLKLSDRVYRCECGNMIDRDFQASINLKAYGERFAS

SEQ ID NO: 63854 - protein, 340 aa, unknown
  TnpB Polypeptide
MQVLSSYGVELRKQNIPIHQTLEIYRSAVSYLTEIYGQVWEELEQISDSKRRFNAAEHLVHTTKKNSARFDFDLRFPKMPSYLRRAAIQHALGSVSSYETRMDLWKKSGEKAGKPRLAYENYAMPVFYRDVMYREGEEGKDEAYLKLYDGHDWKWFCVRLNHTDMEYLRKNWSGKKASAPTLEKRYHKYFLRFSYTEEVTLTKTPVKEQIICSVDLGINTDAVCTIMRADGTVLGRKFIDHPSEKDRMYRTLGRIRRFQREHGSAQSRGRWAYTKRLNTEMGRKIAGAIVKYAEENHADVIVFEYLEMQGKISGKKKQKLHLWRKRDIQKRLCWRQKSLR

SEQ ID NO: 63855 - protein, 369 aa, unknown
  TnpB Polypeptide
MTITAKLQIYPTYEQAQLLVETGRAFSKACNYTSDIVFDTHDLRQINLQKKVYSVLRSEYGLPSQLACNVVRHVIGNYRTILANQNEWIKPNYTHTTYVLSWNRDYSLTRDHFSIGTLSGRVKLPYANEGMKHYFDGTWEFGTAKVVNKHGKWFLHISATKEFKPLEDKDVSNVVGVDFGINFIATTYSSAGKTDFYYGKAIKQKRSQYKKTRQQLQKRRTASARKRLKAIGSRENRWMQDVNHQVSKALVSKQPERTLFVIEDLTGVRTAAERVRLKDRYVSVSWAFFDLRQKLAYKAAMHNARVLAVDPKNTSRTCPKCGHTEKANRDKCKHVFICKNCIYTSNDDRVGAMNLHRKGIEYLGAVTVE

SEQ ID NO: 63856 - protein, 515 aa, unknown
  TnpB Polypeptide
LTSGGSVSSRPRSSSQSTWPCSERWSRLAAACRRASSSSDTRRVTCFTMHPRYSYCGCMATGGTSKVHQAYRFALDPTPAQERALRSHVGASRFAWNWGLAKCLERYEAEGKWYSGIGLHKLWNAEKKADPALAWWAENSKCSYQEAFRDLERALRDFVKSKKGQRAGRRVGFPRFKKRGKCRDSFRLVERSLRCAGVTVTLPKFGIIRTHESTRKLGRRLENGTARILSATISRTAQRWFVSFTVEVERAMPERRARPGSVVGIDLGVKTLLTAADEAGNVITIPGPKPLRASLRKLRRASRAHSRKTRGSANRRKSAARLGRIYARVGNVRADALHKVTTDLARRYETVAVEALNVAGMTRNRKLARAIGDQGFGDLRRMLTYKTEWNGGRLFVADCWFPSSKMCSGCGAVKAKLPLSERTYRCETCGLVIDRDENAARNLLQLAASGAESVNACGGTVRPGVAGRVPVKQEPGAALAGETGIVSGQPLTVGLGVRSCFQTLQRHDQRPGPPQ

SEQ ID NO: 63857 - protein, 400 aa, unknown
  TnpB Polypeptide
VKAYKYRLYPNLDQETLLAKHFGVCRYIYNRGLDIRSESYKDSKKSVNMFQISKMATEWKKELNWLKEVNSQSIQSSLRNLDVAFTNFFKKKTKYPTFKSKHHKQSFSSPQNCKVDFENGRFFCPKFKNGIKCVFHREFSGNIKTCTISKTKSGKYYVSILVETNLKKQKEIKPEFDTNLGIDLGIKDFATFSDGTKIKNPKHLKWKLKSLRRQQRKLSRKKKGSNNRNKQRIKVARTHEKVSNTRLDFLHKLSCSISENQTYTSVSMEKLNIQQMIKNKYLSRNIMDCGWYLFQTLLKYKLDDKGKSLILIGQYEPSSKKCNKCSSLNNDLKLRDRIWTCKNCGFVHDRDLNAAINIKNLAFAENDSKSSIGKELPESTLLEIENTQSLKEEALPFMAG

SEQ ID NO: 63858 - protein, 319 aa, Thermococci sp.
MKRAVTVKLQPSKAQEKALLELTQATAIIWNKINYERLKQFKKFGRIDFAITEKEAYHTFKGWIGGSTVQQLAKKNAEVWGSFFSLNKKKKGGKLPEWFKPQPPKFIKEENRREFFIIPLRNDQYRIDGNVIELRRLGKFGRLKIQFKGRIHLKGKQGGLEVIYDEAKRKWYAHISLTVEEKLEGEDWVKIPRKPKGNLTAGIDLGVNNLMAVYVQNGESFLMNGRPLKSITFYWQERVAEYQSKLNKSGAKRIRKLKRMHERAKLQARHYINTAVRQTIRRLYELGVSRIVVGYPREIARAPNRGQKAEFPPLSRVEV

SEQ ID NO: 63859 - protein, 698 aa, unknown
  TnpB Polypeptide
  misc_feature (695)..(698): Xaa can be any naturally occurring amino acid
MFRNIKFRVHFTPQQYSMFSNALFACQMFRNYSLQFLKNRYFAKRTWLKSNANTPEYLAYLAENTKYLALLKEFKEQYPTKDLQKSHKAQQPAKPERFHPLLESNYVALNLELTAQLDKARVWLLKNLPNFKSHLDKHEIVIPAKSPQNICVFYNSLPLPVRKALGKSARNENVLLYLLGSPRSCLVQVVQDLDKTFTKAFKEREQLLKNNSKTKPGKSINTSGFPNFKTLQRHGGIRFQLDDRHTRFTTAWNNQQIVTAEFGELCWHDGGYILPQTPAKMLTLKKEKNGQIFAVFYGTPEYNAKRTQQHVRAVARKTIAPPCASIEEFFDTHSVSIDLNRTSGQIEVVTDIEQAEGTHVLSLCDHKAEAKRLKKIQRREAYIKTQQQKLAHQDMARKKGRGKRKNPNGLHRVGKYSARRMQTQDNIAKACAKDTNQTIQHMRDLVQKLIDGKTLIFAEDLAVQSMLTEYVKNETHDKTANTKTKSNRRKRKNNNRSQIRARFSMFMTILKDACAKNNVVLLKCDRYDPSSQLCSSCGYHWGKLDTSVREITCAGCGTTHDRDINATKNIKFLALYRYAKTLEKETNKDIHNAEMQNIKQLGFNPNHKPLAESVNGRAVGISHISEIAHEELMLYINGHYPIKTVLSTIEKLETQHKASLKKSEQQSAASVSCVKTHHPRFSKTKPGTQVSMAGXXXX

SEQ ID NO: 63860 - protein, 410 aa, unknown
  TnpB Polypeptide
MVISYNAVLIFPNTETESRYKEVLDAEKDCYNYLSQIFDRINFKHHRLSRYDVQSEYYKELREKFPLLSSQMVLKTILEAVGNWTTCIANEKDNFEPPIKKNLSMVLDKRLYSNLTRNTVDLTIPGFKRVHCTIETYEQLDKLFEVYRPQNCNIFYRNGRFFLTIQFDVPEIEHTEGEAIGIDRGIRRIVTCSDGTGWINRDFNRERRKLRYLRRCLKSKNSKSAKRHLRKLSKTERNRSKNEVHRVVNWLLTKDYTTYVLEDLSKIKKSTSKKTIKIYGKNTEVKRKKHNNRFGQIPLKEIQTTLEYKAPLLGKEVVTVEPAYTSRLDYRGLPEGKRLGTRYYASNGELLDADGNGACNIALRHRPDSIVVKPTYGSMIFSGRPMSTGQSWLQLFQTVATTSSPPKGGA

SEQ ID NO: 63861 - protein, 391 aa, unknown
  TnpB Polypeptide
MLTGKLSVLWTFCLSMVELNTYKYKLYNRDSLKYLDNILVIAGRIFNHCIALHRRYYGIYHKMLNKYQLQKYLTKLKKQYTEWNEVPSQAIQDITDRIDRAYHLFFSNLKAGKKTNPPHFQKTAKYHSFTTKQAGYKFHDLNHVKIGKKDFPYWNSRDFDGKIKTLTVKRKSNGFYIYVVVEQECTQTEWTKSGEIVGFDFSVHDFLVSSNGDDCSMPKILQKNLNSLRNLSEKYRKSKGKRGSLRTLQKLHEKVANQRSDMHWKLARRFCRDYDVMVFETLDLGNLSRKYKKSMYDFGFDTFLSVLEYVAHRTGKTVMYADKWYPSSQLCSECGYKNHKLKDASIRHWICPKCGAEHDRDRNAAINLCKVGASTFGTCCPSVATPRIPRL

SEQ ID NO: 63862 - protein, 599 aa, unknown
  TnpB Polypeptide
MMARLELNLTISSLRAISVYMSKHCWTLKDRFESQFSAAFYPMFLSDTKRAEIIHRAEEIRAVRNDISEVFFSDMLGFQDMSKFDAFNFFNPTFNTRLSSHYLKKTIEDVWRAYQLRFDAIRRKIEFVKVDELVPFFYKINVKGHKKGDLKSVEVRTKKTELTKVLTWLARYGKDETVYWLESVIPTVDATKQKFYRTILDKIRKFGFDRLMRLALSRRSAVFSEYEKRGKITFESLTFSGRSRIKRPIVDARRNETGKFDYYIEISWDWYDKGYRGDSKNTLCIPFKYNKAYHRSLNRYCNGTDTSYTIVIRGKDIHFVLARDGYRYKNNEEITEENTLGIDVNSKHNMFALSNGEFMPNDDALIADLETELLNIDQKQKNYNTKFKEGEEHDAFKISKKDKARIESITLKLNESNKRAIVLLCQAFAAKGLKHIAMENLDGFKGSKLHANDSKGFNLGRLHLRTGLSSLKDEFIHIAPKYGLLVSLVQPEYTSKMCGECGCIDDRNRQTQEEFCCVECGHSENADIHSAENIKFRLTSTVLRGNLLIRAGDSEYRYFIPKGLLTRWKVKKCLEKCRCDGLFKQAIENQQLSTTGRFC

SEQ ID NO: 63863 - protein, 396 aa, unknown
  TnpB Polypeptide
MAQRQKRAYRYRCYPTPTQAAVLARTFGCARFVYNWALRLRTDAYYQRQERVSYADTSAALTTLKQQPETIWLNDVSSVPPQQALRHLDRAFRNFFEGRGKYPKFHTKHGVQAAEYTTSAFRYDAEARTLTLAKMATPLHIHWSRPLATGAVPTTVTVSRDTAGRYFVSILVEEEIAPLPPSSGQVGIDLGLHDVVILDSGEKVGNPRFFAQDEEKLAQAQRRLAKKQRGSRNREKARRKVARIHARIADRRQDFLHKLSTRLIRENQTICIESLAVKAMAKHPTLAKAIHDVGWGEFVRQLEYKAAWYGRTLVAIDKWYPSSKRCSACGHVLGSLTLDIRHWTCPECGRVHDRDVNAAQNILAVGLTVSACGEAVRPGRVRPSPAGFGEAGIPQP

SEQ ID NO: 63864 - protein, 410 aa, Desulfurococcales sp.
VIGKVFKPNARKVFELNRTLSEYFRLVRWYLSFGSTSKTFLHEKYYGKAKEIFELNTALIQTARDKAVEILKGFKRTRKEDSVLRLKRISIRFDERCFKFSKTTNALTPYWLTLSLNRKERVSLPIVFGEKQKQRIDEAFNGKWQFSTVEMVKRNGEWYAHFVLKRKVEVPDKSETVIGIDRGERNLAVAAAISVSNPSKPIKGEFWRGEEIKRIRGLYGHIRRRFQRKKILKKVKELKERERRKVNQQLHIIANQIISYAKQFPKPAMAMEDLTDIRNNFHESRKLNKRFHSLPFRKLQTIIEYKALLEEIEVIYLEKKLVRNTSKTCHRCGHVAQVKKRIYKCPKCGMEYDRDLNASINIARRVMSSAGWGSGESPEPANEAGGEKPQLNAGSLVLQDWVAHLSPTWT

SEQ ID NO: 63865 - protein, 285 aa, unknown
  TnpB Polypeptide
MAESTEVELVEASIIERGDIDRISKEMLFAKMYRNALKRIGEESERGEIEKLPRELLEQLDKGINPRLGPLEVEGDKLISIKKLKVKVLNPKKESPLYAVIEFLPKPRVLLAYKAIRPVLGIDIGIRHIFTIASIRDFEIEKAKIFYWGDEDFFNVITRLVGHPQGEGTIEDVRRKLDSFAEEVIIKIGELNPRKVALENLRRAKGRTGEALKLIQKVIISKMVNRGVRFYFLSAYNSSKRCARCGFIVQRVEGKTFICPACGFRIDRDANAALNMAIKCFYECK

SEQ ID NO: 63866 - protein, 314 aa, Halobacteriales sp.
MRYAYKYRLSPTPAVERELQRHIDICRQTYNHFLHELRGADGYLSRYEMQSILPEMKEWWDDLSDVYSKVLQMVAKRLSDNLSGLQQLKENGYNVGRLRWKSPTEYRSLTYNQSGFDVDKNTGRDGWGELRLSKIGTVPIRLHRDIPEDATVKQVTVKKKKTSKWYATVAVEFDRESPAKPDNPERVVGIDAGIVKQTHDTDGVAVKPPDLSDERDRLEREHRNLSRKEHGSNNWQKQRQTVARRYADLKRKRRDFLHKLSNYYEIQVRARRHAFRRGRARRHHRRVRLVWRLDGQAAVGARALLPGVWVRGHP

SEQ ID NO: 63867 - protein, 525 aa, unknown
  TnpB Polypeptide
MNTILDYLTIDILTMYENNIKFHYVEYVERYVNVVWKKKFIVSKIRKMNITQKEKEQRVNNLCGQLRKIKTDLLNVDRTNYKSHTMYHTWINQQKQFITPNKSTYKKNNIVYDLMCSPFDYFPCMIVMMKQVEKEEQTISNVFPMRSEIIPKHIRLDTTTLVHLLMTKKQGIKSEYLTKGNLKRNEDKIWEFFFRTERKMFHKKYYEFHHMIETDGISCTLLLLRKDLIGKRLPMMKKGLSTEPYIDELTDYMQLQNKKIVGVDPGLCDLIYCVDADNKDANNFRYSQDQRRKETKKKKYSKIQLELKKEKINGKTIIEWETELSKLNRKSLNITKFKEYIQKKSEINGLLFAFYEKYIFRKLRLQSYRNTKKSEQKMINNFKRVFGNENNVIVCFGDYEQKQHMKFKEATKGKGMRTLFRKAGFQTYLVDEFRTSCRCSKCEIGICKKTMVRENPKPFRSGNVLVHGLICCKNGCGYWNRDVNGATNIYKIAYNAVNNKERPNYLSRSKNNSTGLDEPVKSKFT

SEQ ID NO: 63868 - protein, 319 aa, Blautia sp.
MPVFYRDVMYREGAEGKDEAYLKLYDGHDWKWSCVRLDHTDMEYLRKCWSGKKASAPTLEKRHRKYFLRFSYKEEVTLTKTPVKEQIICSVDLGINTDAVCTIMRADGTVLGRRFIDHPSEKDRMYRTLGRIRRSQREHGSAQTQGRWAYTKRLNTELGKKTAGAIVRYAEENHADVIVFEYLEMQGKMSGKKKQKLHLWRKRDIQKCCEHQAHRKGMRVSRICAWNTSRLAYDGSGAVTRDWENHSLCTFQTGKRYNCDLSASYNIGARYFIRELLKPLPATERSLLEAKVPPVKRRTSCVYADLRKLHSEMEFLKAA

SEQ ID NO: 63869 - protein, 384 aa, Rhodococcus sp.
LGVQLRYQYRVYPTPGQQDMLARSFGCARVVFNDCLRIRQDAYASGVKLSDTAVQKQVVTAAKKTPERAWLGEVASVVLVQACQDARRAYRNWFDSLSGKRKGRKVGAPRFRSRRDNRQAIRLTRNGFSIRPNGKLYMAKVGELEVAWSRDLPSEPSSVTIIKDAAGRYFASFVVETTDEPLPPVDAEVGIDLGLATFAVLSNGKTISSPRFLRRAERKLRKAQRVLSRKEKGSNNRVKARIRVAKAHARVSDARKDWAHKHSTAIIRENQAVFVEDLCVRGLARTRLAKSVHDAGWGMFTRMVEEKAARYGRTCVKVDRFYPSSQICSQCGVRGGPKPLSIREWACKACGAVHDRDVNAAKNIHAAGRAEWLNACGGAVSLLS

SEQ ID NO: 63870 - protein, 363 aa, Klebsiella sp.
MNKQTKTLSVRVKDKHAAVLRQMAFEVNQVFNLASEITSAAYSNAGDFGAQKPQWLSAFDVQKMTAGIQNERGYTIGSATVQEVIANHGKARKQFKRSRLRWRVSGGARRSLGWVPFKSRAAQWQNGCVKFAGHYFKVWDSYGLSGYTFRAGSFSEDSRGRWYFNICVEVETAPTAGTTAVGVDLGLKDYATPSEGEKLEAGRFYRDLEPALGKAQRAGKKARARAIHAKIKNRRKDSLHKFSTALVNNHAAIFVGDVSSSQLAKSRMAKSVLDAGWAMLKTQLEYKAIAQSVVFEVVNERYSTQACSCCGAISANSPKGRADLRIREWTCCECGTAHDRDVNAAKNILAAGHCRLAAGISVL

SEQ ID NO: 63871 - protein, 384 aa, Actinomadura sp.
VRLRYQFRLYPTPGQRDALARAFGCARVVFNDGLRARQDARAAGLPYVSDAALSRLVITEAKKSPERTWLGEVSAVVLQQALADLNAAYRNFSASMSGKRKGRKVALPRFRSRKDSRQAVRFTRNARFAITAGRKLRLPKIGDVKVMWSRGLPSEPSSVTVIRDAAGRYFASFVVETADDPLPETTGEVGIDLGLTHFAVLSDGTKITNPRILRRAERRLRRAQKALSRKQTGSANRAKAKARVARIHARVADTRRDHAHKLSTLLVRDNQAVYVEDLNVTGLGRTRLAKSVYDAGWAQFTAMLEYKAQRYGRTFARIGRFEPTSQTCSTCRVKDGPKPLNVREWACPACGTVHDRDINAAKNILAAGRADRRNACGGTVSPSA

SEQ ID NO: 63872 - protein, 391 aa, Ruminococcus sp.
VKSVIKTVKVMLRPNNRQKAKLFACAGTARFIYNWVLDYEQINYECDNGFINDYELRKRLTELKKTHSKFMWLNDYSNNIAKQAVKDACNAYLNFFKGITEFPNYKSRRKSKPSFYVDTDKISFTDTHVKLEKLTTSRKANKQKFNHIRLAEKGRIPVGVKYSNPRVTFDGINWWISVGIEVPENTNKPLNNGIGIDIGIKTLAVCSDKAEYKNINKTAKVRKLKKKKRRLQRRISKKYSKNKKGVCYCKTRNIIKSEKQLLKINHRLTNIRHDHIHKATSEIVNRQSKFIVMEDLNVKGMMKNKHLAKAVQEQCFYEFYRQIQYKCQWNNIEFVTADRYYPSSKKCICCGSIKKNLKLSDRIYHCDNCGNTVDRDYQASVNLMRYYGLTA

SEQ ID NO: 63873 - protein, 371 aa, Planomonospora sp.
VSRIVKRAYRYRFHPTPEQAALLTRTFGCVRLVWNRALAERTRRYKDEGVSTSYVETAKWLTAWKQEPGLEFLKDVSNVPLQQVLRAQQVAFNSFFAKRARYPRFKSRKKSRASATFQNNAFSFRDGALKLAKMDAPLDIVWSRPLPEGAEPSTVTVSRDAAGRWFVSLLVEETIRPLDPVEQAVGVDAGITSLLTLSTGEKITNPKHERADRKRLARAQRTLARKAKGSANRVKARLKAARVHARITDRRRDFLHKLTTRLVRENQVIAVEDLTVRNMVKNHSLARAVSDASWRELRTMLEYKTAWYGRELLVVDRWFPSSKLCSTPGCGHVNGAMPLNVRSWTCPRCGTVHDRDVNAAKNILAAGLAER

SEQ ID NO: 63874 - protein, 400 aa, Planomonospora sp.
MRTAYKVRIYPTSEQTAVLNRTFGCVRLVWNKVLAWRHARYHTQGVKTSYAETDRYLTALKREPEHGFLFEVSSVPLQQALRHQYTAFVNFFAGRARYPRYKSRHGKQSATYTRSAFRWRDGRLHLGKMDGPLMFVWSWPDIDVTTLNPTTVTISRDPDGRWYASLAVEIDAEPEPLPATGRAVGVDLGVKDFAVNSDGERIRNPRHLERKVRNLARYQRRMARKQRGSNNRAKAKAKVARTHAKVRDARQDFLHKASTRLVRDHDVIAIEDLNVRGMVRNRSLARAISDCGWGEFRRLLEYKCERYGRRLVVIDRWHPTSKTCSACGHLLAELSLSTRHWTCPTCRTRHDRDINAAKNILAAGQAVSACGADVRHSGSSRVRSAVKQEAQSARTGIPRL

SEQ ID NO: 63875 - protein, 488 aa, Fusobacterium sp.
  misc_feature (295)..(446): Xaa can be any naturally occurring amino acid
MANYVLTLALKTELWQEHILEKRLNIARMIYNACLYEILKRHKKMINSSEYKEISNLEKKEQSKRYKELDKKYSISKFELNKYVKPMTQRFKKNIGSQMGQELAERAFATYEKFKYGKAKKVYFKSYENFYSVREKGNITGLRFFKEDCCISWLGLKIPVIIKNNDKYAQSCFLDKLLYCRLLKRVANGKNKYYVQITFEGTPPKKHKVGGENEIGIDIGTSTIAIVSDNKVELKILAENIEINEKEKTRLQRKLDRQRRANNPNKYNADGTINIENKEKWKKSKSYVKTKVKLXXXXXXXXXXXXXXXXXXXXXXXXXXXXXXXXXXXXXXXXXXXXXXXXXXXXXXXXXXXXXXXXXXXXXXXXXXXXXXXXXXXXXXXXXXXXXXXXXXXXXXXXXXXXXXXXXXXXXXXXXXXXXXXXXXXXXXXXXXXXXXXXXXXXXXXXENLEEVNIEKAQKEFKNFVKLHNEEIERIKKGNVKTLKCMGF

SEQ ID NO: 63876 - protein, 381 aa, Pseudomonas sp.
MTKRAYKYCFYPTTEQAELLAKTFGCVRLVYNKVLNWRTKAFYKEQQKIGYTAASAHLTAIKKKPELAFLNEVSCVPLQQCLRHQQAAFKNFFEGRAKYPAFKKKRNHQSAEFTASAFKYQDGKLYLAKSKMPLNVRWSRDLPSAPSTVTISRDAAGRYFVSCLCEFEPQALPVTPKMVGIDMGLKDLFVTSEGERIANARHTGRYAARLALAQRRLSRKKLGSANRAKARQKVARIHAKISDCRLDGLHKLSRRLINENQVVCVENLAVKNMIRNPKLSKAIADAGWGELTRQFEYKGAWAGRQVVAIDRWYPSSKRCSSCGYIMDSMPLNIRSWVCPECKAEHDRDVNAAINIKAAGLAVLALGENVSSIGQVPMSCSR

SEQ ID NO: 63877 - protein, 384 aa, Silvanigrella sp.
LITTYHYRIKDSGKSGRALKKMSSSVNFVWNYCKNTQKEALKNRTVKKIIDPLSGKTIFVPYFFTKFEMNSLVSGSSKELGIHSQTIQAISEEYTTRRKQFKNILRWRGKNSLGWIPFKATAIKINQDKVSYHKNTFRFWNTREIPDDAIIKSGSFAQDSRGRWYLNITFETKTSQYSNENLIENGVFIDSNHLAKCSNGIKFDRPKISIKYVRKIKISNKIKKNILMKKSKLKLIKRKAPKIKQEKNLRAKLENIKLDHFHKQSTKIINFSSAIITNQITAKRKKSYKNNHFISFGAISKPFQNMLCYKAIRAGRTFKVIPEKDLIWAFSKCCSSQPRTNLRIRVWKCRECGKINHFSTKADKNLLSVYKNPLRIGHDTPRSI

SEQ ID NO: 63878 - protein, 416 aa, unknown
  TnpB Polypeptide
VDNLDQAVTIKAKLLNIDDQTTHAFIKTMTAYRDACNFVSQYVFDHDFEFRFSQLNQALYHDLRDLFGLKSQMAQSVIRNVVARYKTIKTQLKQTPFRYNTGEKDAQGHAIWSQIPRDLTWLWRPVKFKRLQLDLQRNRDWSYLNTSSQLSLNTLMGRKKVDFVCKNFDQYLDASCWKFGSIKLLQFKNNWYIHLSATTSFSEYELKHTQHIVGIDRGLRFLAACYDEQGQTLLCSGQKVLRTRRKYKKLRAQLQAKGTKSAKRRLKKIGQRENRFISDVNHRLTKTLVNHYGPNTIFALEDLTNVRFATEKAAKKRRYEMVSWTFYQFEQFLAYKANLNSSTVVKVSPRFTSQRCPKCGRIRKENRNHELHLYICDECGYKSNDDRLAAMNIQFLGDQYYQGVKRPKFTKIRSAE

SEQ ID NO: 63879 - protein, 419 aa, unknown
  TnpB Polypeptide
VKGGEKMEQTVTIKIKLKLKNPSDADKLVHTMEMFRQASNYISQYIFDHDFLLNQNKIQKAIYHEIRDKFNLKSQFAISAIRGTVARYKTVQTQLEQKPFRYNTGEKDQFGDEIWKKIPRGLSWLWKPVFFKRPQADLQRNRDWSILKDGTLSLNTLDGRIKATSICHGFDQYLDGTWKLGLAKILYVGNKWMLHISATKEFLNYQKEQSQHVVGVDRGLRFLATVYDEKGKTMFFDGQKIVRKRRKFKQLRAQLQLKGTKSAKRRLKKIGQRENRWMTDINHRLSKTLVDRYSANTLFVLENLVNVRFATERVAKDRRYEQVSWAFYQLEQFLTYKAHLVGSEVVDVSARYTSQRCPKCGRINKDNRNHHLHLYQCDRCGYKSNDDRIGAINIQLLGTQYVSGVPRPAFKKSKKTTDE

SEQ ID NO: 63880 - protein, 379 aa, unknown
  TnpB Polypeptide
MQIISSYGVELRKQNIPVRQTLEIYRSAVSYLIGIYVQVWEKLAEIPDAKRRFNAAEHLVHTTKKNHACFDFDIRFPKMPSYLRRSAIQHALGTVSSYKTRLDLWEKTDGKSGKPKLVYENHAMPVFYRDVMYREGAERKDEAYLKLYDGHDWKWFCVRLNHTDMEYLRKNWSGKKASAPTLEKRHHKYFLRFSYTEEVTLTKTPVKEQIICSVDLGINTDAVCTIMQADGTVLGRKFINHPSEKDRMYRTLGRIRRSQREHGSAQTQGRWAYTKRLNTELGKKIAGAIVRYAEENHADVIVFEYLEMQGKISGKKNRNCTCGESGISRGAVDIRHTGKGCGYPGSVHGIPAGWLMMVPGGNTRLGKSQPLYFPDRKTI

SEQ ID NO: 63881 - protein, 417 aa, unknown
  TnpB Polypeptide
LDWLLREFRLLVNKSIRIATRHDIRSRFRLAREAYADLSRDHAVYKQYIPSSFEVALGVLKARRRSLNHGRRSGAPYVQKLMLKAENQSYRLDRKTGCLQIPVRPREYITLRLTLSPWHKKFFDDERWKLGSLTIVPHKAIVILRRHEPHPVETRAAIGLDTNEETLDGVLAGAEGALLFTAQLGEIRRIQATHFLRRRKLARKKANDRRLTQRLLAREGHRERNRVRQKLHLASKQLVSLAARRKAVIVLEALKFTRTKDMPKTLNRRLSIWPWREIHRQIEYKAALQGVPVMKVNPGWTSKTCPVCGARRRDRVGEDFVCLKCDWEMDRQHNAGLNILKTALASNEALARAVLVQPDALRDDVVIPLCDVLQAGGFAKDEPSGVEPDELAPTNQPRDIRQSQIEVLLCNALSRPP

SEQ ID NO: 63882 - protein, 434 aa, Thermus sp.
LEGKIKTATVKREGEHWYIIFITEVDPKPLPPSEEAIGIDLGTNPHFLVTSEGEMVEAPRHFQKAKEKLAKAQRELSRKKKGSNRRKKARLKVAKLHRKIANQRRDFHHKVARKLVNRYGTIVYEDLNLQALSRSHIAKGVQDAGWAQFLAILAYKAAAHRASGSVLSTLPQDFQLHTPQGLEGLNHRLPKLLNPPVVPPRHQKPLHPPPHTLHGVQMGTVPGQVSHRKPPLPPRPLPPLHPPRPVKGRIVHEHPQRPGQTSRHPVQVPPHHLPPHRPLQNGKVQPLPLSPPHQVPHHVHPPAGTPGPGHPPGLPPPTPGVGGRKGQGKPALVQVSHLHPPLPRPLFASSSSAAKAFISSSVGLPKGTYRVRFHTYPMALRCREITLGARRTPKRSARASASCGAVQVLSSASLSSRKAAICGVNFLGAPGGLR

SEQ ID NO: 63883 - protein, 383 aa, Lactobacillus sp.
MTYQGIKLRLYPNQDQQLKIKLNFGYNRFVWNQMLNMLITRHQNNPKAKFLSVFDLNNLLPALKIEYPWLKDAESTSLQVTNHDLIEAFKQFFQKQHGFPKFKSRKYPKQSYQCKAVSQNIKVVDRHHIQLPKLGKVSFRTGRLPVGKIKAVTIRLLATGKFYANVLVDTDIEELPKASKVVGIDMGVADLMITSDSIKYPTIRFDKRLGKKKHYWEKRLARRRRQAEKEIAWDKHNKVPEPRELNDFKNYLKAKHMVAKYSEKIVNQRDNYLHNITKELVEQYDVIKIEDLKTKNLLKNHQLARAIANQSWRKLRIMLEYKCTWYGKRLVTVNPRKTSQLCATCGYDAGKHTLDIRQWTCPSCGSNHDRDINAATNILKATA

SEQ ID NO: 63884 - protein, 367 aa, Crocinitomicaceae sp.
MKERAYKYRIYPTPEQVELLSRTFGCVRFVYNSILKWRTDAFYNDQVKVNYNKSSSYLTELKKQPEFSWLNEVSCVPLQQSLRHQQTAFKNFFTGQAKYPVFKKKRSKQSAEFTKSAFKYRDGQLFIAKSSQPLNVRWSRELPSEPTTITISKDSAGRYFVSCLCRFEPKSLPISKNTVGIDLGLKDLVITSNGFKSGNPKHTDRYDKKLAKAQRALSKKKKGSANFHKARQKVARIQAKIADCRRDFTHKLTSQLINENQVISCESLVVKNMVKNRKLAKAIADANWSELVRQLIYKAEWYGRTVVQIDKWYPSSKRCNCCGHVVDSLPLHIRHWTCPSCESRLDRDLNAALNIKAVGQTVLACGA

SEQ ID NO: 63885 - protein, 397 aa, unknown
  TnpB Polypeptide
MATKVIHKTYKFRLKPSDDQREQFARISGVCRLIWNVCLEQRELIYSSRRKTLNSYNQLPEVTLLRHEYDWIRDVPSQVLQQKVRDLDTAYKNFFEGHAGFPERKKKGKSPDSFRFPQGVQIDNRRMFLPKIGWVGFFKSQSIKGELRHATISSDGKHWFGSICCEVAVPVTHTKEKDVGIDMGIAKLCAASDGEVTENPSYFKQYKRKLAKLQRKLARKEKFSRNFNKLKARISALHIKSADARRDHIHKTTTKIAKNHGMVAIEDLRVKAMSKSAKGAIDNPGRHVRQKSGLNRAILDAGWGEFRRQLEYKVAWANGIVVAVDPKNTSRRCSVCGHTAKENRLTQADFICVKCGHTDDADVNAAKNILRAGHARLACGEIGAARPLYEAGTLKAA

SEQ ID NO: 63886 - protein, 475 aa, Acrocarpospora sp.
MAEPGKKPLRKIARPFVADGPSGVSIRDRLKGLTAEDATVLRLVGEHMGRLASRDLAARCRDGLEHSTDTWAERKRDLTADSSSRWAGSVTSNTHDQWGLSWRAQHQHLVSLDAGIRTIRHRLSLPIGEKGSKGKPGGYRSKEEWFHKTRRLRILKGKSERVSAQREAGKVSVVRGGRRLLKQRHNLTAADKTEARWRAEWEAARWFLTADGESGKRHGNETIRVTPDGEVSIKLPAPLARLANAKHGRYVLTARVSFPHRGEEWRDRIGANRAVAYRIHYDVRCGRWYLDASWTRKDTPVVPLETLRSGEVIGVDMNADHLAAWRLDTHGNPLGEPRRFDYDLSGTATHRDAQLRHALTRLLHWAADSGVRAIAVEDLDFTDSKTREKHGRKRRFRRLISGIPTGKLKARLLSMATEAGISVIAVDPAYTSMWGAQHWQRPLTTKNRATSRHQAASVAIARRALWTATSASTLS

SEQ ID NO: 63887 - protein, 409 aa, unknown
  TnpB Polypeptide
LRKNVQVCVVGKVFKPNRLKVLALNRTLNEYFRLVRWYIGFNSKSKSFLHENCYGKAKELFNLNTALIQTARDKAVEILKGFERNRKDDSILRLKGISMRFDRRCYRFSKTTNVLTPYWLTLSLNRREKVSLPIVFGERQRRRIEEALRGEWRFTTVEMVKHYGEWYAHFTLEKVVEVPDEPETIITIDRGEHNLAVAVAISKSNPNKPMKGQFWRGQEIKRIRGLYGHIRRRLQEKKLLKKVKELKGKERRKVNQQLHIIANQIVAYAKQFPKPVIVMEDLSGIRDNFKRSKKLNRRFHSLPFRRLQTIIEYKALLEGIEVRYLTKKETRNTSKTCHRCGHVAQVKGREFRCPKCGLTYNRDLNACINIAHALTRGMGWGSCEPPEPADEGTGAKPALNAGSLVLQGG

SEQ ID NO: 63888 - protein, 365 aa, Thermosinus sp.
MKLLSPNKGKLEKMIRMLEIYHQACSWFLAQAEALNTASRAVLNRETYKQASGLFDLNRGTLQCAMLKALSARRSYLSRKQRGKKASLPKFETMVPVMVRQDCYSLHQLPSGTWVIKFPVSSGRSQIAVPIAASLYHVRKLVDLARGSCRQGSMEIWRDKGGEWYVSISLIYEPSFKEPSGVIGVDFGIVKLAVLSSNIFFDGRPIRWRKEHWAERRKALQQTGRLSRMKKEAGHERRWMRYINHCISKRIVQIAKDEGKAIALEQLTGIRERVRGSKKFNRMLSGWNFKELASFIEYKAALAGVLVFYVDPKETSKTCPKCGNVSRYNRKTQGWFKCIKCGYQSDADRVGALNIAAKALNALGA

SEQ ID NO: 63889 - protein, 385 aa, unknown
  TnpB Polypeptide
MQAKLTIKLKLDLTPQVSELLTRTSVAYVQALNLTSQVAHDKRCRNAVALHHLTYREVRAATSLPSNLVCSARAVVAEAYTRDLNKLHRWRDGAGVRYDARTLTLKLDVGRATLTTLKGRVNVGLVISDYHRQYLSGEWEVASTATLKRQGKAWYLHLVATREIPDATGSNVVGLDAGIKRIATLTTGKTFKGGAISHLRRRRARQRRALQRQPEGQSKSRNQRRRLKRLSGKERRAVEWKLWNVANEIVREAVRTDSNVIAIEDLKHIRERVKWARKQRIILHGWPFSSLFAKIRHVAARHGIAVVEVGAAYTSRTCSRCGYCDKANRQTQSDFRCLWCGYSNMADFNASYNIRARYVALECGAVNHRLTSVKTDQGGDRAKAA

SEQ ID NO: 63890 - protein, 500 aa, Moorea sp.
MARSDANEPPADTGCFVQLALPLWGNDNPQNQLPSVIAGSVAPSKKMTSSGKSRTCTRSSRKQKSSKTSAQDLTTKGKDLEPYWNDLCRDVSSRLLLPVETGSPDSVLNCLSTWSDTTVEKSWFSTNLKVVQNQNLPQIFSPSFTSSLAESTDSESTGQKSKKIRIFLSADQRSIVRKWFGVSRYVFNKTVKILQNSKVKANWKAIKTGILNNLPEWCKEVPYQIKSIAIKDACTAVREAKKKYQKTGKSNRVRFRSRKNPIQSCYIPKSAVSVKGIYHTKLGGLTFAETLPENRGDCRLTSNNGDYYLTVPHQTTQIKAENQGRVVAIDPGVRTFLTFKSENSTGKIGHGDFSRIQRLCAHLDNLISKISKAKRNQKRRMRKAARRIVLRIQNLINELHHKAARFLVDKFDVILLPTFETSEMSKKGKRKIRSKTVRNLLTLSHFRFKEFLKHKASETGKTVVDVCEAYTSKTVSWTGEMVNIGGSKTIRSKIDGRSMD

SEQ ID NO: 63891 - protein, 563 aa, unknown
  TnpB Polypeptide
MTAELLSVKKKNDRNFITIECLLAFDKDEDKEKVLNLMRKFSSMVRVAYKRLLEKMERKELKNMLSQKYGINTRYSGDAIFLAQQILNSCIERGQNPKKLVFGSRELFEKLKKKHLTDKRREKLRQKWEEKRYGFLYSRGDKSKEGNLNLRLVNLNDQWHLRINLGNGEYVWAKVVRSAKREKDRWIDLVWDLTQAERTGNWFAYTARLKLKNGKIYAQISKEENFPEITITKEDGVIGIDINAYPFHLALAYTSRDGNLEKYERISLNGLLDENADKREYLSWQIAHQVVEIAKREGKAIVVENLGKVPKGRRGDGMPKLRQKLQKWIYKGLLEKIEVVGKREGVQLIKVNPAYTSIIGKLKYAPIHRIDKDVAGAYVIARRGLGFEESLPKNYRKLLEDKEFLSYSVARVEDRIAKLKKERNKLKSELRRLKRELKLLLKFLLDSGKSEPATQEPVNREMERVRGPTQVGQESWRVLSVALAFSCLESFRDFSPLKRVILLGDWVGVAKRKGLVPLPGQGTTAQNKCSLYSFGDQAEGTHNEGLIIAPTLLALPPTCLAFS

SEQ ID NO: 63892 - protein, 381 aa, unknown
  TnpB Polypeptide
LNRSYKYRIYPNKKQIKLLERTLDLHRQLYNMALDQRQYVWRTRKRSLNYYDQANQVKELRPGTDFAFLNYSSMQRTLKRLDRAFAAFFVGGGYPRFKAKDRWASVTYTFGDGISFARDGRLRVQNVGNVRIFQHRDIPNGAKIKTAQIVRQRATGAWFVTFSLDLPDPELGPHAGDPVGVDLGVTTVAALSTGELIKAPRPLREAERELRVKQRRLSRRKRGSTGRKKAARQVGRAHLRVANQRLDFNHKLARRLVDEFSLIAVEDLNILGLSKSRLAKGIHDSSWGQLLSFLSYKAESAGSQVVSVDPRYTSQVCSRCGSIVPKSLSVRVHSCPDCGLVLDRDHNAAINILNKALRARTEPRGANVIGCDVRSPGSSPL

SEQ ID NO: 63893 - protein, 587 aa, unknown
  TnpB Polypeptide
MSNEYSRAAHTKIISITDIDGNNLLISECLNKWHSQAQTIQKISEHIIEEKSKELIQGLYDIGKNGNRSTLKASEAGRRLGITLRNVKNINLHDTTTICDDYSSVYRIEKLVQASVITALRGQDTRRKDYDKVIDKLLNGDNEDNKLKSGWARTVRPTPSKPGKVLDFSIVDKQLFVLLGKTDTTITFKMRCVNEWVIVTFKIPEHLQQAKKINAPKLAWNKNGELSIILTGKFNKMKVKQSEKYIIGIDVGLKEYVTYAVYDIENNTTVDTGVLSNYLSKELYSSIRKTQAQIADCWNKIRKLKTIINCFGLVPDSVKNKIEVLHDDIVKQRSSLSHKRLRLACLAALELRDLSVKYDNALITRENLSWVGNTMQNGRWNCGELFKRIEYKLEEIGLKSAWVSAAYTSKTCSQCNNSSQSGDYAFIVNTDRTIHCNTCGYSGDRDVNAAINIAKRGITLVKSMSSDYRKNKDKYSDPVKVNNTDRGKTPLWVRKRQSVKSRKNKDRSKSSRTYKRYEKELKKKVIGLRLPLELLEWKREVNYLSVACPDFDKSIIGSVLETDGFTPALVSDDGSGVSCYYSQNSHY

SEQ ID NO: 63894 - protein, 280 aa, unknown
  TnpB Polypeptide
MRLKFKTKPFKKTLGAVRFDVRTMKVFLESRYCKLTTAFGRMQYDFRLPEYYKKYATWNVKNAQLKIAKHSCYLNVQVEQPDPELTIGDKRLGVDLGINNIAVCSDNTFCKSGSVKAIKGKYQYLRSKLQSKGTRSAKRTLQTLSGRERRFQMDTNHQIANWIVPKPCDVIVLEDLTSIRDENNKDRRFNRKLGKWSFAKLRSFVGYKAAAVGKQVIAIGPKYTSQTCSRCGFKHKNNRKGKIFKCKNCGFQIDTDLNASRNIATFSRSDRSRLPSTSQS

SEQ ID NO: 63895 - protein, 658 aa, unknown
  TnpB Polypeptide
MAPDPGSEYTVRCALRKAVLESTHLESIRDAVVRVNRCTYHATELLNLYVRDRIENHDGTELDLVFTQNWLLNAYYVVSIGTGRVAKIDTDVQSVFDAHMKDTFDLPTRTGVTQALIYECINLAAVGSTNVWMHFRKRVLSHVRTHFALDEAAYAALTKDQRRARKLALLQVADDLCRNPSIACQSPADYQAWIASERTRLGIDAAVETWGGKPLLWHLKAKPHRFLVAMHTMSLSTHAAGRKAFALFPLRRSHVPRHIRFDKKVLDDLLKFGYGGAAARAKKAKSVDPSSQPHMSSGRAPKRKRDDPSLLEEKAEIFNKVLDLRAAGVHRRHHFAFAFTTDGVSLHLNMQVPGKKADKKDKEVKLSAMPVRGIHSIDALKHAARLEEMHVVGIDPGKRELIVAVDRDDPKTKPVVRYTLDQRRRDMRTRQYADELNRSRPWPVTAAEEDLSHFNSKAPSLAEFSRFGAERRRLLREHAEIHAFYDDLEHRNRRRKSALKAQKSEARLFNRLHGMHDSKTDSRTLVLAYGAWGLVAGRPNMVGNKGNPPTIGVGLMNKLAKHFVVAPTPEHYTSKTCVKCGGLCGPHPTLKNKKNKEIRGLRVCQHEGCGLFQNRDKTGATNIGLQFQKLVCGQKPIRVMSDEEVEFNRLALCTECHD

SEQ ID NO: 63896 - protein, 400 aa, Actinomadura sp.
MRTAYKCRAYPDPEQAAIFGRTFGCVRLVWNKTLAERHRAWHASGRRTSYAETDAALTAWKKTQELAFLNEVSSVPLQQVLRHQHAAFAGFFAGRARYPRFKNRTSRQAAHYTRSAFRIRGGQLQMAKTTTPLEFAWSFQKVDLASLNPSMVVISRDPDGRWYVTFAVDTDTPEPRPAAGHAIGIDLGVKDFAVTSDGDRIANPRHLARKAANLARYQRRMARRQPGSANHRKARTKVAAAYRKVRNARADFLHRTSTSIADRADVIVIEDLAVANMVRNRRLARAISDCGWGEFRRQLEYKAARGGRTLVVIDRWYPSSKTCSHCGHLLAQLSLSTRHWTCPGCRTRHDRDINAAKNILAAGRAVTGYSPGDVCGADVRRQGPSLPQSAAKQKHPRREP

SEQ ID NO: 63897 - protein, 467 aa, unknown
  TnpB Polypeptide
MKVNRVYQTQINKNHLMYNTITDFCIKSKNVYNYGNYIIRQIFIITSKLNNNQSVNQDQQEFLNNINIKVDEYNEFKLNNFKKKQAKGKYLNRQFKSLKYFNKDNRKCSYDFLDFILKDTDCFKKLGSNSSQQTLRALINNWKSFFTAIKDYTKNPDKYLGKPNLPNYRDTKKGKYPLYLCNNQFRIENNYLYFAWIPLKPFNNIFKINIPKDSKLIQLRVIPKNNIYIMELIYEKETTTITDKESTNICGIDLGVNNFATLTNNVSIKPIIINGKIIKSINQFYNKKLAYCKSILKKSNGKDWSNKLNQLTIKRNNKIKYYMHCASKYIINYCIKNNLDTIIIGSNPEWKQNSDLYKTANQIFVQIPYENFIKMIQYKAEDVNIKVVLTNESYTSGTSFLDNEMPIKKNYDYSRRIFRGLFKSNSGRLINSDVNGSLQIIKKVIPNAFTGYGIEGLDLTPVIMNVA

SEQ ID NO: 63898 - protein, 492 aa, unknown
  TnpB Polypeptide
MAKYQPMIRTEKHALGVSVDAHADLARTVQSYRKLIRALAGVIFVHFDDISRASSKCFAVERLFHVTSDNPAPRYAMLDRMFHKFPSYLRRAAIEAAFGAVSSFLSNYDRWQNGQRRHKQDAPPSFARALALNPALYAGQCIKVGDDWRSVSIKVQRADQSWGWSAPLRVKGRLKRLGGTEQNRALSPTLLLSSGKAYLACPVQGTRPAKPTGVRVCAVDLGINTAATCAIVDTTGTVRARSFITSARHNDRLDRSTTRIQQAAKHTLGPLRRVAPNTKPTRPGQLCKGFCRGAYRRISGLNRTVAQATANAIVRFARAHGATTVVFEHLKHFRPKANRRQGSSMRQRFHRWLHRMLVKKAQFLCEEQGLRCVLVAPRGTSAWAHDGSGEVVRNKKNYSLCTFATGKRYNADLNAALNIAARHLAQVLGITTGDRPAAGTGKSSGPASRMPIVLADVWRHFVGPQRRRIKLPQSGASAAVVGLDAPTIALCV

SEQ ID NO: 63899 - protein, 340 aa, unknown
  TnpB Polypeptide
LEKQEDLQFLNEVSCVPLQQGLRNLQKAFTNFWAGRAKYPNFKKKRNGGSAEFTRSAFKWKDGQLWLAKCREPLPIRWSRTLPENCEPSTVTVRLDASGRWFVSLLVEDHRVKTLPQLDKAIGIDAGVTSLIATSNGEKIANPKHFKRLKRKLRQAQKALSRKVKGSNNREKARQQVARIHAQIADARKDFLHKLTTRLVRENQTIVVEDLAVKNMMKNHKLAQAIADASWSELVRQLEYKCQWYGRLLVKIDRWFPSSKRCGHCGHVVDKLPLNVREWNCPECGTHHDRDINAANNILAAGLAVIVCGANIRPDGHKSKGQLRKTPERSLRGRKQKLKS

SEQ ID NO: 63900 - protein, 222 aa, unknown
  TnpB Polypeptide
VDEKEATVRQLPPSQEAVGIDVGLKTFAYLSTGEEIANPRFFRREQTALARAQRKLAKAPTGSKQRAHQRKVVARVHERIGNRRKNFIEQEVSKLIKRFGLLAVEALVVRNMLKNPRLAKSIADVSWSMFFTHLQAKAEEAGRHVVRVNPAYTSQTCSGCSHRQPMPLSVRVYECPHCGLVIHRDHNGSLNILVDGLQAVGRHSRVIPEAPACSRGESSQAC

SEQ ID NO: 63901 - protein, 427 aa, unknown
  TnpB Polypeptide
MRQNTEISKREKTRLLTKERRSNLFCKVFKLKIDKSHLSQKTEKHLHNLFLEVKWFYNYALSLDDLKKLNTKLLAVPVKVKDKTEIRNILTISSQMKQGIRDRIWSNLKSLSSHKKNGNKVGKLKFKSRLHSVPLNQLNNTFSINFDNHYIKIQGLKAKLKVRGLDQISSLKEYEIANATLVKRINDYYLYVTCYVTKEIKAPKLFSVGIDFGCNTQLTLSNGIKIEYQVPISPKIKRLDRKIMKGNRHKKIRTHNLIKDQVKREKAYSKLNNKKQDIKNKIVSILKNNYEVVCFQNESIKGWQAGNHGKKIQNTAIGGIISILKNRIHTPVIVNKFFPSTQLCPQCGIKNKLELSDRIYECSCGYKNDRDIKSAIMIEKEGLKQLQENSKILTERKEFKPQEQKTSTEYILNLFKQVKNISASLQQ

SEQ ID NO: 63902 - protein, 289 aa, Streptomyces sp.
VDPSAGQRLALGRAFGCVRVVFNDGLRVREAARLAGLPFVSSGELSKQLTAAKKTARAGLARRGVVGRVAAVPSGPGHGVPELLRRSQGQAPAHGCASLQVSQGHPPGHPLHCERRMEGNGRWEAAASKVGDLAVKWSRSLPSAPSTVTVIKDSAGRYFASFVVETEPGTPPDTGSAVGINLSLTHFAILSDGTKITSPRFLRRAEKKLKKAQQDLSRKAKGSANRAKARTKVARAHARTADARREFHHQLSTKIIWTTKRWQWRTWQSGDWPVHAWPSPYTTQDGRHS

SEQ ID NO: 63903 - protein, 180 aa, unknown
  TnpB Polypeptide
MQGMAVFSEKIETEEAGFFRKNEKRLAREQRKLSRCVRGSHNYELQKKKVARCHEKIRNQRRDHLHKLSWKIADSYDAVAVEDIDMKAMGQCLHFGKSVQDNGYGLFRKMLDYKLAWQGKKMVKVDRFFPSSKKCCKCGRIKKELKLSERVYHCECGNEMDRDHNAAINIREEARRMLTA

SEQ ID NO: 63904 - protein, 402 aa, unknown
  TnpB Polypeptide
MQIRYRYRLCPSPGQQQALARVFGCARVVFNDCLRLREEAHAAGEKISDTAVQRRVVTLAKATPERAWLGEVASVALVQACQDARRAYRNWFGSLSGKRKGRKAGHPKFRSRKDHRQSVRLTRNGFALHGSRLYVAKVGDIKLRWSRELPSEPSSVTVIQEADGRYYASFVVEVAVTPLPVIARDVGLDLGLGVLAATSDGEFIANPRHVRKAERRLAKAQRSLCRKQKGSANRAKARVRVAVQHRKVREARADHLHKTVLRLVRDNQAVYVEDLAVSGLARTRLAKSVHDAGWAMLVRLLEEKALRYGRAVTKVGRWFPSSQLCSACGHRDGPKPLSVREWACAACGTVHDRDVNAARNIRLEGRKVAGGQPETINGCGGTVRPGLALAGPGETATHRSAP

SEQ ID NO: 63905 - protein, 402 aa, unknown; identical to SEQ ID NO: 63904
  TnpB Polypeptide

SEQ ID NO: 63906 - protein, 554 aa, unknown
  TnpB Polypeptide
MLSRKKPPPNSESTSGHSLSGNKKAKSKRSKPLRDSVDTMSSHTQLVLDLFGQQLSTLESVPAPNNQISIDKSPLLLASTLMPKSSARSEEDSISEGKSFKPYWNESCKKLSDALWWRTKIGSPDSGLTTSDGSVSYTGVKSWYSTKQHSVPNEKWLRISLPYFTASVLDSTDSESTSLRCRKIQIYPSPELNRVWKQWNAACRYVYNQAVAYQKANGRIGKLKLRNTIMQSDLPQWVLDTPCHIRQNAIFDAHRAFKASKDCKFRSCRAPNQAIKFNDCNYSSGKWYPHLTRGLNFIASEPTPSSCDQATQLIKCKSRWFAVFPEPALILTSTNDKVIALDPGVRTFLTGFDGSKFLEIGAGDMGRITRLCQHLDGLTSRIAKCKNHRHRQKMRMAAGRMRTLVQDLVNEVHKQTACYLTQNYRVIFLPTFETSQMVQKAKRKIRSKTARAMLSWAHYRFKLFLKQAAVRRGCTVVDVTEEYTSKTCTRCGHIHAKLGGAKKFKCPKCGHTLLRDFNGAFGIMLKALKDTSYVVNDDGVAIVALHDNMSCSVA

SEQ ID NO: 63907 - protein, 404 aa, unknown
  TnpB Polypeptide
MLVRGVVFYLESDLPSEAKLLLEDFRLAVNNAIRAGLQARVTSRNALVRIAYTDFREQHPRMYAQHLVSAFGVAGSVLKNHRKCVQKAVTCRIPFVKRLMMKAENQAYKLDRKSGVIDLPIRAGCHVGLKLVVSEFHRKYLDDMSLSLGSLTILPDRLVVAFRKDAPKPYVPDSVISLDTNERSLDGLFVQGDVAKAIKAEFPEVAIIQQRHHDRRRRLQKRKAHDRRTSRNLCRMEGAREHHRIDYRLHQVANSVLKFAEERRSAIVLEDLKGFKSKRSKELNRRLSMWPRRKLHQIIEYRAQWKGIPIFKVDPRNSSRTCPICGRILHSRMGAEFACECGRRLDRHINASINLLQTAISKGMAGGLWFNPGAFQHDVMMTLYEPAMAARSEPNGTSGIVGMT

SEQ ID NO: 63908 - protein, 198 aa, Helicobacter sp.
MLITYKQKLYKNDKNRRIDTLLRRYGVFYNHCIALHKRYYRLFKKYLKLNDLQKHTTKLKKTHRYAFLKTLGSQTLQDLTERIDKAFKKFFKKQAKLPRFKKVANYKSFTFKSQVDKKTGLNKGVGFEIKDNVVSFSGYSYKFIKTYALIGKVKTLTIKRDNMGDYFLCLVCELENDPNKQTACDKSVGFDFGLRTFF

SEQ ID NO: 63909 - protein, 393 aa, unknown
  TnpB Polypeptide
MLKGFKTELRITKQKHITKIHQSIGICRFLYNSYLVKNKELYELYKEGKIDKNQAFMSANDFDKYINNEIKILDEFKWINNCGSKARKKAIVNAEMAYKRFFKGQAKFPRFKKKKNQDVKIYFPKNNETDWTVERYRIKIPSLGFVELKEKGYIPTNSKVVSGTVSMKAGRYYVSVLCNIVDHNNYSDSKNEGIGVDLGIKDLAIVSNIDKPFENINKTVTVRKLKRKLKRLQRQVSRKYEMNKDGKKFVKTNNIIKLESKIIIIYQKISNIRLNYIHNITNTLVKSKPEYITIEDLNVKGMMKNKHLSKAIAEQNFYEFRRQLTYKCLWNNIKLRIVDRWFPSSRLCSECGSIDKDLKLLDRVYICKECGIVIDRDKNASVNLKNAQIYKIA

SEQ ID NO: 63910 - protein, 411 aa, Nitrospiraceae sp.
LIYLYFGDKIKTMLIRKAYKYRLKTKPLHEVKLRQAVGCSRYVWNKALARQKDRLDNNQPCLSYNELAGLLVQWKEDEDTFFLGEVHSQPLPQTLKALHRAIHDAFDEISPVRFPGFKRKGVHDSFRYPQGFLINDDVIYLPKIGWVPFHKSREIEGIPKNVTVSRQEAHWDIAIQVEIECEDPVHPSKEETAIDLGITQLATLSDGTFYKPLNSFKTLESALARSQRDLSCKVKFSKNWHQQKSKVNKLHTCIAAARNDYLHKISTTINKNHVLIVFEDLKVANMSGLVRGTKEQPGRQMTQKSGLNKAILEQGWGEFRRMLEYKQLWREGLVVVVPPQYTSQTCPQCGHVHKDNRKTQSGFKCIRCHYMANADHVGARNILAAGYAVLACAEVGAVNPLDEAGIRKDAA

SEQ ID NO: 63911 - protein, 394 aa, unknown
  TnpB Polypeptide
MHRDVTTTVRVKLHSLTERKARLIDREYSAFQDAVHGDDGANLYSATKQQAGKVRSNKNPRADTEQPVVLRNDCITIEHDEDTVLSSWWFKLPVYNPDRERGDSIWVPVHVPEKDTHLLDDEYIRDSELVRRDGEWYVHLVCKRSVAVQDEYDDVLAVDMGAKWIAVSTFLSDRDTQFHGAEVRRVREHYKQLRKSIGKAKVRQGAQVIERIGAKESRTVEHELYQVANELVARARERNAVIVFGDMTGLHFDTDEGRYVNDKTHKMPYAKMANFLTYKAHLDGRECLPVPEYDTSVTCWRCGSQRTSREVQGCVECHECGLEDNADKNGASNIGQRAVGKDIQSPLSTAGAAVAQPETQVRLKGSDGETEPANSPGDVGLALSEGRPRVHSWE

SEQ ID NO: 63912 - protein, 350 aa, Massilia sp.
VLRLRLKDKHAAALREKSYLVNMVWNYCNDLSFKVWERERRFMSGYDFAKYTKGAGKAGIPLHSQTIQAISEEFAARRKQSKKLKLRWRVSRGPRRSLGWVPFKATALSYRNGQLWMSGIHAPLCLWDSYGLAKYALGAGSISEDARGRWYINISVKLDRPAASRMERSIGIDLGLKDFASTSDGEVIEVQHIYRDAEARLATAQRAGKKRIVRNIHAKIANKRRDFNHKLSARLVVGHGAIFVGNVNAGALAKTRMAKSVSDAGWSQFRTMLSYKCDSAGVWFDEVNEAYSTQDCSACFARSGPKGLQDLGVREWTCLECGEHHHRDVNAAKNILRRGRATLVVGIPVL

SEQ ID NO: 63913 - protein, 450 aa, unknown
  TnpB Polypeptide
MEKNKDYMIETEPTMLVSKIVNLMKSYTTYHIWEWYPVYLRKNFWKEHTFWTDGYFACSVRNVFRRNAAQIHRKSRLIRRRQLMLKAYKYRIYPNKAQEELLAKTFGCCRFVYNQTLAYRKEKYEKEKKFMSRTDCNNYCNRELKAKYEWLREVDKFALTNAIYNMDSAYQKFFKEHAGYPRFKSKHDNSRSYTTNFTNGNISIDFESGKIKLPKLKQVRSKLHRKFAGRIKSAAVSQVPSGKYYVSVLAETEHEPLPGKEGNVGIDLGIRDLCITSDGRKYENPKALEKQERKLAKLQRQLAHKEKRSSNYYKTKRQIALCHEKIVNRRKDYLHKLSHEMISENQVIVSEHLQIKNMVKNHHLAKSISDVSWYELTRQLEYKAVWNKRRYVKIDTFYASSQLCSVCGCQNTDIKDLSVRKWICPKCGAEHDRDVNAAKNILAEGLRQIA

SEQ ID NO: 63914 - protein, 400 aa, unknown
  TnpB Polypeptide
LAVKSVWQYYIPTQDVLRLLELFRRMMNDAIRIALAYDATTLRRLSLLAYNELARYDSPSYYKLCAISRAAGILAARKKSIRRGFTTRTPYAFRQQLVSCYGFKIENGYLHIPVSRGKHFSIPLTRHTLEIVSQPGIKVRSFTLTRNRLSLCIARDTPMIECRSTVGVDRNLRDLTVGNDQQTHYYDLSKCVRIANTTVRIVASFARNDDRMRTGIASMYGKRRTSRTGHILHNATKTIVAIAVQRKTAIVLENIESIRSLYRKGNCQGRRYRRRMNSWSFSEAQRQIEYKARWVGLPIIRLSRRETRGSSVTCPRCGERLQSDKRLRRKLWCGKCRVVMDRDMVAAINLSRRGRVRFARSRPPIPLEAQGRAVEAMMGNPTSTVIPGVDAPKLTPPTKG

SEQ ID NO: 63915 - protein, 378 aa, unknown
  TnpB Polypeptide
MKARFKYRIYPKPYQLEPLAKAFGCARVVWNDALAIYRDAHKAGLPRPQDVDKLVITQAKKTEERAWLSEVSNIILQQSYRDLQQAWSNFFDSLKGERKGHKVGFPKFKKKQSRQAIRFRVGGFSVHSCSVKLAKIGHIPMVVSRSLPSQPTSVTIIKDPIGRYFASFVVEVQREILPIVEDAVGIDLGLTHFAILSSGEKIENPRHHKKQLKRIKRANRKLSRCQKDSNRRKVAKLKLARLHAKVKDSRTDFLHKLTTRLVRENQTIAIEDLNVSGMVKNRKLSRAISDAGWHSFRTLLNAKCDRHGRHLSVINRWEATSQKCSDCGFRGGKKELNIREWQCLNCGAFHDRDINAANNIKVRRRSVSGSALVGYQRL

SEQ ID NO: 63916 - protein, 227 aa, unknown
  TnpB Polypeptide
VAALRDLIREARWVYGARPTTPLHAWSWRCLATRRVIPVFADSAPAGDWIGVDLNTTGHIAVVAHPASGGVVMLGELADDVDHRERCGSARKGKKGRAERDRESRIRGDQNRRIAGEIVKMARQLQCGIKLEDLTGAGFTGRQKPGTPLPFSRRDGSLHHLRNLVEGRAHAAGVPVVLVDPALTSRRCSRCGEWGARKGKRFLCPHCGYTGHADANAAFNIAAARVR

SEQ ID NO: 63917 - protein, 527 aa, Lactobacillus sp.
  misc_feature (74)..(294): Xaa can be any naturally occurring amino acid
VITIELDRNHHSVYLPNYHLVMVVKYRRKVINDEISEYLKHRFVVVGQAYGINLQEWNHDQDHVHVLFRATPHXXXXXXXXXXXXXXXXXXXXXXXXXXXXXXXXXXXXXXXXXXXXXXXXXXXXXXXXXXXXXXXXXXXXXXXXXXXXXXXXXXXXXXXXXXXXXXXXXXXXXXXXXXXXXXXXXXXXXXXXXXXXXXXXXXXXXXXXXXXXXXXXXXXXXXXXXXXXXXXXXXXXXXXXXXXXXXXXXXXXXXXXXXXXXXXXXXXXXXXXXXXXXXXXXXXXXXXXXXXXXGQYYITVLVESENQTLPKTSKYIGGDLGLKSLLNLSDGCKEPINHFEDKYRKKLYRWEKLRSRRFLKAQQEIAWDHHNKVLVPRQLDDFKNYQKARIMVAKYRQKIANQRLDQLQKFTTKLVKKYDIIVLEKLNTKGMMKNHHLARAIANASWSKLVDMLQYKCDWYGKKLIQVNPSYTSQICANCGKNNHRLGLNKSEWLAVREWDCPNCGKHLDRDINAAQVILQKGLAIR

SEQ ID NO: 63918 - protein, 442 aa, Ruminococcaceae sp.
MILSEEHRIKKHNNKKLLHEIDSYCYKVKNLSNSVNYLIKQCYRIHTKIKNGKTLEEWEDELIRAINSGITEYNLGRSEVKRLRYIDTDNGHIADAYFLSWYLKGTEVYKEVPYATCSQICIQEKCREWKSFYRATAEYGKDPKKFKEHPHVPGYLDPKTGRGSLVITSQNFKVDEAGKVTMPKFLSGIHIRARHGNVRQIRIKMFKDSILVSLMYEKEEKTTKGTKVMGIDLGVNNLIAAAWDSEDRPVLINGKPLKSINQYYNKAKAHMQKEAKIYNGKNSTKRMNKLTAKRNRKIKDYMHKASRKIVDMAVSSGVGLIVIGANHGWKQEVHMGNITNQTFVSIPYKTLTDMIVYKARLEGIEVKTVRESYTSGTSYLDGEKPDRAHYDKARRVERGLFKSNTGILINADVNAAYQMMKLGEARAIPIKTGEQIIKIKAA

SEQ ID NO: 63919 - protein, 549 aa, unknown
  TnpB Polypeptide
VKNKKKKRKRDSGSTLSFTANTLLCDLSFPKTKTSLYDLLADLGILYGRIKRTLFKDCMRTDKTAMEFKNAYLLKFGITARQFNAVRFDLDGNISSVKELTKLRILELEEKIKAVNKWLASKEDKVLKVSKDGKLTNSEKKSATAKLQFTIENKKLRLANVEKKLAKLRHDQEIGKIRICFGSNKLFRKQFNLQENGYKSHNEWLLDWKKSRNNTFFSLGSKDENRGNQTCALQPDGSLRTRVPGSLIHKYGRFVTIPAVRYSYGQDEVIYALQSKTALTHRFVRDRKGWYLHSTVDIPKGKTITFSPQGIGVLGVDINEKEIAVAETDRFGNFVFSMTWPAVVKDLDTEQTKALYGEIVREIVNLAVKAGKPLFHEQLDFSKKKASLKEQGVSYARMLSGFAYSTFLTLLDRRAAKEGVTVIDVNPAFTSVIGKHNFMNRYGITPHEAAAIAIARRAQRYSEQPDAARANSSVPARTRGKHIWSYWRTVKNRDVKKRAGLRRSSQDISGYGETRKKFTSKTTPRSMPPPLRRLKSAQSGMRPRTVNGT

SEQ ID NO: 63920 - protein, 440 aa, Paracoccus sp.
MEAIRGHVYRLKPTREQEVLLAQTAGVVRLVYNLALEQRRTWGGRPYGGGASRNFGARGMSGELSDLRKAFSWIGSVSQTAQNQALIDLDRAYANFFEGRAGYPKPRKRNVHDVFRHVGREISIRRLNSRWSEVRIPKIGWIRYRDCRTLRKMGDGRLNIRNATIRRVAGGGWEISIATRCEIAERPVPEACIGVDRGVAVPYALSTGQLEHLPGSVEKRDATIRRAQKQLSRRRRGSQRHAKARRRLARLKARDARARAHTAHVLARRLANEHGMVAIEDLRIRNMTRSARGTMEEPGKNVAQKAGLNRAILNVGWFGFERMLAYKLEESGGVLVKVPAAYTSQACAACGHVDAGNRDSQAIFSCTSCGAAANADVNAAKIILSLALDPDRYRRGSTPLLDVEGKAQAPCEASTRSLGERLDAVAWERENPGPSGPGRC

SEQ ID NO: 63921 - protein, 426 aa, Vulcanisaeta sp.
MERRRKGLASKPYPEIKAVSIRFTEFTWSYEQFIRSTAPVRLELSLLGVRRVVWLRLHKRFWQYWWRVLSGEAELASTLVVKRRLNKWYAIFIFKLKPRKEEPKSIVAFDINENTVAVGRIDIVATIDKIASWNRQYATPQLYSIRTDFGRLARRYEAIRNKIIEKLKPKFALPSGNYVNVTNTREFRKQVRKLRERGRKVGRVRYVANELTKTPAIIVTEELGNNPQEEMINGIGKDELRHRIKQTPFKAVEEAVEGKALERGSKIFHVSSYRNSRVCPVHFVRLESTNDWHILYCPKGHYVNRDYASVMNMMWKTTPEAWSKGVWWDLKREKMDWKIHEGDSNPIIPYPIVQYLWYVLTIFTASEESPAMLARGKPMNPTGEADEGRARKPPTPFQGREEVRLMSEPLAMNIFLISLNSFRTPT

SEQ ID NO: 63922 - protein, 242 aa, Ruminococcus sp.
LPKTGLVKIKQHRNIPDYYKIKSVTISQNASGKYFASVLFEYEEEIAEKELGSFIGLDFSMHELYIDSNGNCPEFPRYYRRSEKKLKKEQRKLSKMVKGSRNREKQRIRVAKLHEKVANQRKDFLHKQSRQIANVYDCVCIENLNMQAMAQSMNFGKSVSDNGWGMFTAFLKYKLEELGKRLVKIDKFFAGSQLCHMCGYKNPNTKDLSVREWICPCCQTHHDRDINAAINIRNEGMRIVLV

SEQ ID NO: 63923 - protein, 357 aa, Paenibacillus sp.
VLRAYKYRIYPNHEQQQYLAKVFGSVRFIYNKMLADKIEHYKQTETMLSNTPAQYKKEFLWLKEVDSLALANAQLNLDKAYKNFFRDKSVGFPKFKSKKLNNHRFTTNNQNGTVSIEEGYIKIPKLKTRIRIKLHRQFTGLIKSCTISKTPSGKYFASVLVETDIAPLEKTENKIGVDLGLKNFAITSNGEVIANPKHLHKSEKRLAKLQKALSRKKKGSNNRSKAKLKVAKLHEKISNQRKDFLHKTSTKMINDNQVIAMEDLSVKNMIQNHKLAKAISEVSWSMFRSMLEYKSNWYGRDLIIAPKNYASSQLCSCCGYKNVEVKNLVVREWTCPECGTQHDRDINAAANLLKLAM

SEQ ID NO: 63924 - protein, 376 aa, unknown
  TnpB Polypeptide
MTVMMHRAVVYRAYPTREQAALIERTCGCARFLYNRMLADKIAHYRETGEMLRVTPARYKREFPWLKEVDSFALCNAQLNLDAAYRNFFRRVKAGEKPGFPKYKAKHRSRCCYKTNFVNGNIRFEGDGRYLRLPKLGSVRVRQKREIDPSWRIKSVTVEHTRSGRFEVSVLFEFETQEPERVELESFVGLDYSSHDLYVTSDGERPGYPRCFRRTEWKLAREQRKLSRMQKGSANWGKQKARVARIHEKTRNQRKDFHHKAANGLVERYDCVCVEDLDMSGMSRSLKLGKSTMDNGFGMFRALLSYKLEDRGKRLVTVGRLFPSSQLCHECGYRFSGTKDLSVREWTCPSCGRTHDRDVNAARNIRDEGMRLALSA

SEQ ID NO: 63925 - protein, 408 aa, Nocardiopsis sp.
VSHKQGLRFELAPTGEQAVLMGRHCGLSRAVENFCLEAVQKKYAQRKAEESYGITGEDLTKVPWSAPALEREWRAAHPKRYPSFSQGGLSSRIPKEACRVRAAGLKNYFASRAGKRKGARLGWPRWRKRKHGSRFRYDADRARPLNTRTVRLPAIGDVATREDMSWLTDRMATARAHILGATIREQAGRWWVSFQIEADRDEVNKRRQVPDGAPACGIDLGLKTFATVRNSDGTTEEICAPRPLKAAQRALKRAGRRLARSAEGSRNRAKARERVGRLHLRVADRRRDFLHKTTTRLARTKSAVAVETLHVKGMARKRRLARAVSDAGFAEFVRQLEYKAGWYGSRVWKADRWFPSSKTCGNCGRVNRALALADRTWACPGCGAVHDRDRNAAGNLLAKMSEELGSAV

SEQ ID NO: 63926 - protein, 556 aa, Moorea sp.
MSHPEKLVKSLECQKGRCGTGKKLAKSKPSELQAINADTTLTQYLDKSKTSQPSSTPESPLEDKKKILKGKRRSCKASSRKQKSSKTLDQDSITAEKVLKPYWDESCEEMSALLWSLTKTVGHDSGLNLSNGFVNKTVAKSWFSTNHTYLQNEKWWKISLPLSMSSAADSTDNGSINLLSKKIRVYPETQLKLKWRTWIHAARWCYNKAIAILKSTKIGKYDLRKKVMSDVPEWVGSTPYSPRESAIFQAFEAHKAAIKSGGFTKFRKYSDPVQSVRFNKVNFRKGTFYPKDTKGLSFSKSEPLPEKMTHDPILSIDRGRWFISFAIDEKVETCSIPQRAIALDPGVRTFLTGFDGQKFVDLAMGDIGRIYRLCSHLDHLISRAALAKGSSNKRKRFKLRKAAQRIRVKIRNLTDEAHKKISCYLTSEYQVIYLPKFETSQMASKSKRKIRSKTVRAMMNWAHYRFKMTLKHQAAKRGCFVVDVTEEYTSKTCTKCGHVHRKLGGSKKFTCPKCGHTQDRDHNGAFGIFLKALRDTSSSITDVLYTASGVCQELPG

SEQ ID NO: 63927 - protein, 333 aa, Symploca sp.
RSGKPRFKSSSRFRSFVIEGAGLEPHSCSVGGKYLYLKVPKIGLIKIRSHRHIPHSAVLKQLQFIKKNDGWFVNLRLEDVTVPTITPDEVIPDWDNSMGLDAVLHEDNYLATSENTKLPSLKVLRNSLEKLAQVSQKKNHRKKGSASRRKLAKREGRQHQKIARARKDFQYKTAHKLVRTGLKVFFHEDLNLKGLTRRNTPKQDSTGAYIKNGQSAKSGLNLSWADAAFGQFFEILGHIAEKAGAKVVALNPAYSSQLLSYRDEFVFTDCSVREYWDDVEKLWVDRDINAAVNLKRLGLDVFPSIKRRKGSIVIVGSITDTTSKEALHTLRGV

SEQ ID NO: 63928 - protein, 380 aa, unknown
  TnpB Polypeptide
MLRTASIRLNVDPEQAAALMALQSAYADACNRLVPTVVEHRCWNRVALHHLAYARLRKETPLGAQMVCNAIFSVCKAYKAQKKLGRIRKDAPVPAVHFNRASVHFDKRTYSIHGERLSLYTLSGRITVTLVTGEHQRRIMASGKAKEAELVCRRGRWYFNLVVESDDADPIPSGPVMGVDVGENNLAATSTGKVWGGGELRHKRDGYLALRRRLQSNGSQSARQKLRQVSGKERRRVTHINHETSKAIVAEARRIGASRIVMEDLCHIRDRIQAGKRVRARLHGWAFRQLQTFVEYKARAVGIAVEYVNPAFTSQTCSNCGSIGERVRHRFVCKKCGLRAHADGNASRNLARIGSGAPLPRAAVNTPNVGDASHVCCVSQ

SEQ ID NO: 63929 - protein, 527 aa, Streptomyces sp.
VSRLDAAVLTEVGVFLGALAAGDLAVRSREGLEHDSKTWAVRKRELTGVSSARWAGSITKAAHDQWALARRGQTAEMAWLRKQIASIQARLVRPLGAKADKREGVVRGYGSRAEWHAKSRRLHALRVRLARVETDWAAGRVRVARGGKKLTRLRHRLDQAGLSEQAWRERWKAARMFLAADGESGKRLGNETIRITATGQLSIKLPATLAQLANAPHGRYVLDATVAFQHRSEKWRDRITNNRAVAYRIHHDPVRGRWYVTASWKRAPVPVLPLEAALARGVVAVDMNDDHLAAWRLDIHGNPVGEPRRFFYDLSGSARHRDAQIRHVLTRLLHHTRATVAGAIAIEDLDFTDGRCREKYGRNKRFRRLISRFPTAKLKARLVAMAAEQDIAIVAVDPAYTSRWGAQHWQQPLTTSNRKVSRHDAASIAIGRRALGHPIRRRTTPPPHDRSDRVGHRTAQARPEIRRREEPRPRLPGPRTRSVPPGSGEKADDQRAQHRSEHAAEQQSWTQDSLLLSPEERFTCDTA

SEQ ID NO: 63930 - protein, 382 aa, Acaryochloridaceae sp.
MITLKFKLYQHKRNKYLKRSINAAGVIYNHCIALHKRYYRRYGKHLNCAQLQAHIAKLRKRNPFWQLVGSQAVQDICQRIEKGYQLFFKGHNKGVRPPNFKKVKKYKSFTLKQAGYKFLGGNRIKIGGRVYQYWNSRDIEGTVKTLSIKRTPTGDLFMVVVVDSVIESCIQFETGKSAGFDFGLKTFLTCSEGFSIESPEFFKQSINVVRKASKQHSRKMKGSSNREQARLNLARKHEDIVNQRKDWFWKLAHDLTNQFDVLCFETLNLKGMKRLWGRKVSDLALRDFLDILEWVAKKKGKQVVYIDPWYPSSKTCSGCAHVLEKLDLSVRRWRCPSCGCENDRDGNASINIKIHAERSRSRVGVSTLGLGDVRQAQLAIPA

SEQ ID NO: 63931 - protein, 402 aa, Escherichia sp.
VERLQAFKFQLRPGGQQEREMRRFAGACRFVFNRALARQNENHEAGNKYIPYGKMASWLVEWKNATETQWLKDSPSQPLQQSLKGLERAYKNFFQKRAAFPRFKKRGQNDAFRYPQGVKLDQENSRIFLPKLGWMRYRNSRQVTGVVKNVTVSQSCGKWYISIQTESEVSTPAHPSASMVGLDAGVAKLATLSDGTVFEPVNSFQKNQKTLARLQRQLSRRVKFSNNWQKQKRKIQRLHSRIANIRRDYLHKVTTTVSKNHAMIVIEDLKVSNMSKSAAGTVSQPGRNVRAKSGLNRSILDQGWYEMRRQLEYKQLWRGGQVLAVPPAYTSQRCACCGHTAKENRLSQSKFRCQVCGYTANADVNGARNILAAGHAVLACGEMVQSGRSLKQEPTEMIQATA

SEQ ID NO: 63932 - protein, 469 aa, Lactobacillus sp.
LPKTIKAYSVKLDDETFNALDKLFISYGKCRSRFFNELCGINHMTLNFREQRNLIRQKKISAKLVKQYDFLGKHWTYALFETCSNLNSMWSNLRSKLKAVIRDNDRLNEQERHLLFFVLSFRELWQGALKYDKQAVYALPKKYQKSYFKVLDEVKPERQKAVFSYLRRITRRYKPKPRKSGKHNKSMTYDENMYRFTDLSTIRISSNKPRKVYVIKLTSDWHYDQKGNLVLVLDRTKKRLEFHKLIQTRTHALKYQTPIGIDKGESTLLSCSTGNEYGILFGNKLNEEVERLCEVNKKRNRARSKGNATGNKRYLKAKKRHRAYLDSQISHAVYTMLLTEKPSLIVKEDLTFTKTKVKSKDKSKAKIHRYLSSWLKGELNDRIEYLCQKYGIGFEDVNPAYTSQYCPNCGHKFLTRYGKHHSLTLCKNCGEMNANISASKNILKRKDDKEINLYTPYKKVQEILEQRAI

SEQ ID NO: 63933 - protein, 391 aa, unknown
  TnpB Polypeptide
MVEKALKFRFYPNPEQEDLLRRTLGCVRLVYNKALAARTQAWYERQKRVGYAQTSSMLTEWKKLDELDFLNEVSCVPLQQGLRHLQTAFTNFFAGRTKYPNFLKLRNGGSAEFTKSAFKFKEGQVYIAKCKEPLLIRWSRQLPKNCKPSTITIKLDPSGRWFVSLRINDTTDQKLKPVEKKVGIDLGITSLFTTSDGVKVSNPKHFNKLYKKLRLASSSLSRKTKGSKNREKARVKVAKISAKIADARRDHTHKLTTQLIRENQTIVVEDLAVKNMVKNHKLARAISDANWGELVRQLTYKADWYGRELIKIDRWFPSSKRCSNCGYTKEKLALNIREWDCPKCGTKHDRDINASINILAAGLAVSVCGATIRAEQSKSVQPGAKKQKPRS

SEQ ID NO: 63934 - protein, 364 aa, unknown
  TnpB Polypeptide
  misc_feature (5)..(5): Xaa can be any naturally occurring amino acid
  misc_feature (17)..(17): Xaa can be any naturally occurring amino acid
MNVDXTIKLKLNISEVXKETLKKTITLFNTVFNEVAQYGFEHKTHSKVSIHHATYKNIREIHPELPSSLVQGARDVACEALKGVKLKRLPVARQFSSIRYNQRVITYYLKHGKVSLATINGRIKATFQIPEYYQKYINWEVRSSTLNYDSRKDIFFLHIIFRKESPKSSGGKVLGIDRGIVNIAVCSNNVFFNGKQIKNVRGKYAYLRKQLQSKGTKSAKRHLKKLSRKEKRFVTNVNHCISKTIVNTPYDIFALEDLTSIRVQSRKGKEFNRKLNNWSFYQLAQFLEYKAEALGKSVIYIDPRYSSQKCSKCGNIKKSNRKGNSYHCSCGLDIHADLNASRNIAQAGISCLSRVSVNNPNVTT

SEQ ID NO: 63935 - protein, 518 aa, unknown
  TnpB Polypeptide
VKRTSTPSFVATFGLRYEPWQRDKLDKLFQVDNYIYNALVKDRKNALAQLERTRAWRRNKSGIASIFAVMDKDNPTKEHQVALKALYAQKQDMLSQYELGEHAFQARIQKYRKHYKKLVNTHIAQTTATAVWRKFEAYLFSSEEEIACRSWQYHRSIEGKTNSNAITYHKGMLRVCGMKIPVDLPDNAYEQEALSHRVKYCRLVRIPWKADDWLYQVQLVLEGEPPVKVDPKTGEMLHAIGSGRAGIDIGTQTVAFVSRDFVALEELADKANMRYRELRLVERAMDRSRRGTNPEFFNPDGTVITTGKLPPELLKPNGKRRWARSKHYEELARQKRYLYARLARLRRCQHNEMANRYLAHGDEFYIEDMNFAALAKKAKAQKKEDLKPGEKFRRRKRFGRSIANKSPAGFVSTLERKVIRQGGSFQRINTREAKASQYDHLSREYNKKKLSKRWHHFKNGRRAQRDLYSAFLIMNTNNTLNGFDQALCDANFEQFLALHNIEISRLRGVHMPSSAGVA

SEQ ID NO: 63936 - protein, 400 aa, unknown
  TnpB Polypeptide
MKIINKTYRFRLFPTKEQEVLLNKHFGCVRYVYNHFLNERKKQYQANKKSDNYYKQSAVLTKLKNEEDTKWLKEVNSQSLQFALRSLDTAFLNFFRGNAQFPKFKSKKRKNTFTIPQFGKLEDGKIIIPKFKDGIKVKLHREVKGKIGKMSITKTPTGKYYVSIFTEQIIDELPKTGKQVGIDLGLKDFVITSDNKKFKNNRYIAKYAKQLKKAQQHLSRKQKGSNGFEKQKLKVARIHEKIANCRLDTLHKVSKEIVKSYDLISVEDLNVKGMIKNHKLSKHIADASWGKFVTLLQYKCDWYGKTLVKVNRFYPSSKTCSECGWINQELKLSDREWTCNSCGAIHDRDLNASKNILKEGLKIISAGAVDYTDGDSNKASVKKNESVKSEAQPIAFGVGG

SEQ ID NO: 63937 - protein, 400 aa, unknown; identical to SEQ ID NO: 63936
  TnpB Polypeptide

SEQ ID NO: 63938 - protein, 312 aa, unknown
  TnpB Polypeptide
MTKQNKAFKFRLLPNKKQEVLLSKTFGCVRFVYNKMLAERKQTYEKFKNDREKLKEQKFPTPAKYKEEFPFLREVDSLALANAQLNLQNAYKNFFEVNAEFPNFKNRKTKQSYTTNRVNGNIELQDGHIKLPKLKLVKIKQHREIPENYRLKSCTISKTKSGKYYVSVRTEYEKDIKPKAVEHVVGLDFAMSELYVSSENEKANYPRYYRVMSEKLAKAGRILSKRKKGSARWNKQRLVVAKLHEKVVNQRMNFLHHKSKELASNFDAVVIEDLNMKGMSQALHFGKSVHDNGWGMFTTFLAYKLKEQGKQL

SEQ ID NO: 63939 - protein, 424 aa, Oscillatoriales sp.
MQLAERHIIKSTEHRFATIDRLAFKSKNFYNAANYVIRQNFVYGWGYLNYNKMAQLMKSHPAYKALPAKVSQQILMILDKNWQGFFATVKAYKMQPTKFTGCPKLPKYKDKVKGRNLVVYTIQAISSKQLPKGIIKISGTDISIKTQVKPEKICQVRLVSKCDYYAIEVIHDEPESTSDANQKESVASIDLGLNNLGALTSNQPGFVPLLINGRPLKSINQFYNKRKAHIQSRLKGLRQTSRRIQRLTRCRNQKIDNYLHHASRDIINLLRELKIGTLVIGKNVQWKNEINLGKKTNQNFVTIPHDRLIEMLEYKAALVGIRVMLQEESYTSVSSFISLDPISVYGQNSAQDVKFSGKRIKRGLYKTSSGQLINADVNGSYNIMRKAIPNAFSNGIGICVAQPRRVNPLEVRKKGEGLHASCVM

SEQ ID NO: 63940 - protein, 454 aa, unknown
  TnpB Polypeptide
VSIPAGRGGDYQPGRRHQFRRRSCQRCIGDHHRFLCTSVREPQSSQSEIDRWGTCSSEGVAMFLAHQIRLKPNNVQATYLARAAGTARFAYNWALAEWKRQYEASKTDPALSKPNEAALRRQLNAIKYEQFPWMLEVTKNAPQMAIKQLGQAFENFFKGLASYPTFRRKGRDDRFTLTNDQFRVEQKRIRIPKLGWLRMREALRYSGRIVSASIKRVADHWYVSITVDTSKPLLSPTENQGAVGVDFGVTTLATLSTGERFIGAKALNNMLDRVRRMARDLSRKIKGSRNYAKAKRKLARLHAEIANLRRNSLHQLSNNLTRRFHTIGIEDLNVKGMLQNHCLARVIADMGFRELRRQIEYKATWRGVQVVVVDRWYPSSKTCSCCGYRLDALDLAVREWRCVCCGTLHDRDVNAAINLREMAVSSTVSACGGEGAGLARTRKVKPSPVKQESS

SEQ ID NO: 63941 - protein, 366 aa, Bacillus sp.
MKDFKTEKCPDTTACPVAVTVDVIGGKWKGSFLNKYATIKELPALKKEYYFLKEVDSIALQKSVENLADAYSRYYKKQNKSPRFKSKKNPVQSYTTKHTNGNIGMIGNQIKLPKLGLVRFAKSREVEGRIINATIRRNPSGKYFISVLAETDVQVHPKTNRSCGVDVGLKNFAILSDGTVYQNPKFFRTVEKKLAKAQRILSKRQEIALNRNNPLSEAKNYQKQKRKVAILHEKISNTRMDYLHKVSTEIIKNHDVIGMEDLQVSNMMKDHKLAKAISEVSWYHFKKMLEYKARWYGKQIVTVSKTFASSQLCSSCGYQNKDVKHLNLREWDCPSCSTHHDRDINAGLNLMNEAIRLLTVGTTGLA

SEQ ID NO: 63942 - protein, 363 aa, Natribacillus sp.
MAIQTILVQLKNPSKSKQKQWLYEQQVFASTVNTCVERINNGEKLSSKNVDADLKAAIKNEAIRLAKQAVTDFKEQKAKNIPTFKNSLGVRINGQNWNTVEKNGRWYMSFTGNQGKKTLPVVESSDVKTFFPWLTKKHNDYRGTIQLLRKGRHWYMAIPIQVSSPLDRDINLQAYTPIGVDVGLRHLAVLSEPISGQRQFFSGKEVGYIRRHFRSLRRSLGKKKAQRAIERVGQKEKRWMKDYNRKLAKAIVDFAMQFDRPLIKMEALDDIRKTAKSMKKADRTIHSWAFYQLKRFIKERAAKHNIPVVDINPYKTSQTCFGCGHAEKDNRHRDRFQCTSCGHKAHADMNAANNIATSTSLAV

SEQ ID NO: 63943 - protein, 406 aa, unknown
  TnpB Polypeptide
MTYKVQKIFVNPRHALFKALDNYAFLAKNLYNSTLWRHRQDYKSGKKKISWMKLVGELAAENQADYRAIPAKVAQNIVKCVDEEYKSYFGAKKAGVNAKLPRYKNPINGRYKITFDYQSLFEAQLRKGIIQLPVPKSFTQELKFKIPKNIIGKTIKQVTVTKHNDGYNVCICYKDKTEVTPKHSNNVAAIDLGLSNIVACVSNTEMKPFLISGKPINSTNHYWNKKIAKLKSSLDTSKDEGEKKALKAKISYLNRRRNNKVNDYLHKASTKLVNHLDSNEINSLVIGYNQGWKQDINLGKKVNQKFCSLPFYKFLQMVTYKCADKGITVKTQEESYTSKCSFLDNEEVYKHDSYKGKRVKRGLFKSSKGIEINADINGAYNILVKAIGKFNYRPIQVHDLPSTFKV

SEQ ID NO: 63944 - protein, 398 aa, unknown
  TnpB Polypeptide
LSEITVIKPSNRLLYKACDELCYLSKNLYNTVLYIQRQNYQEGKPYIGYYDMLKLLREQNNPDFYALPSQPAEYVANQVHEDYKKFFSKIKSKNEGKHNQKINPPYYKDKVKGRNVITFYKRKLSIKTYKKEGLIHITETNIKFKSKIPFEQIQQVKAVPKNGYYELQVIYKVEESKPVVSENYAAIDLGLNNLATVITTNSSPMIINGKPLKSINHRWNKRVSKLKSKLKKGERTSKRIKNITNKRNRRVDSYLHKASSALVIELRRLSISKVVIGHNNGWKENIKLGKRNNQNFVQIPYSRFIQMLTYKCKRVGIEAISGEESYTSLCSFLDNESVEKHDTYAGKRVKRGLFMSSNGTLINADVNGAYNIMKKHLGISLSGLNPVQVCSTPKVLKF

SEQ ID NO: 63945 - protein, 369 aa, Sporosarcina sp.
MANKAYKFRIYPTKEQEQLMMKTFGCVRFVYNKMLAERKETYEQFKDDKEMLKKQKHPTPAKYKAEFEWLKEVDSLALANAQMNLQKSYRNFFAGRAKFPQFKARKAKQSYTTNLVNGNIRLLNGHIQLPKLKTVKLTQHRDIPPHHKIKSCTISRSATGKYYISILTEYAHKPVPKEVKALVGLDFAMDGLYVESEQGEKANHPRFYRQTQEKLAKEQKVLSRRMKGSARYEKQRLRVAAVHEQVANQRKDFLHKKSRQLANQYDGVVIEDLNMKGMSQSLHFGKSVADNGWGMFTTFLQYKLGEQGKHLIKINKWFPSIKTCSHCGHVKQMALSERRYACECGFVCDRDWNAAINIKNEGKMMLALS

SEQ ID NO: 63946 - protein, 408 aa, Rhodococcus sp.
VELDEFALDVDAHVPHDRLPPFDGGITEICRSPMTRWRGAVAIPVPRLSDARPAEHAGPGVGCARVVFNDAVAARDAARKDVQPYPTDAELSKALTAAKTTPERAWLSDVSAVVLQQALADTNTAYRNFFASITGAHRGRKVGAPRFRSRRDHRQSIRFTRNARFAITEGRKLRLPKIGEVKVAWSRELPADPSSVTIIMDAAGRYFASFVVDTTDEPLPELDTEIGIDLGLSTFAVCSDGAIIASPKFFRSAERRLRTAQQNLSRKQKGSKNRAKARRKVARAHARVADTRRDCAHQHSTTLIRENQAIFVEDLCVTGLARTRLTKSVHDAGWGMFTRMLEEMPPGTGGRSTRSTGGSRRRRCARPVDVSTGRNRCRCGNGRVRAGPCTIGMSIPRRIFSPPDGRRG

SEQ ID NO: 63947 - protein, 374 aa, Thaumarchaeota sp.
LGQILREVQGYTRCQRPGGPAEEQRGMELVLLIIEAEEGGEAAAIYEARRPAKYWKDRETRERKLILVVRQDRYIVDEQNHRLILRDFGLEIDFAGRLRWHGKQGRLEIRHDEARNAWYAFIPVEVGVETTRNGNESKHIVRGERKSIRIAGPRGDVVAAVDLGINLLASAVTNSGDWLLYRGSRAKENFFYLSRKIAEVQSEADGARNAGDNGKFRRLNRKKRRLFRKLVRRMAHLYRNLANHLVRGLWELGVSRIYLGYPHDIARERGNKLTSNMWSYRRLMDAIELKAQEYGIHVYEVLEYNTSNHCAIHGTKVARGPRGVVTCPLGHKLHSDLNGALNILRLGAGAIPAIVNKPLSFLVDHGGVAPAKGA

SEQ ID NO: 63948 - protein, 395 aa, Sulfobacillus sp.
MMRAHKIALDPNNVQKTYFRKAAGTARFAYNWALDQWQQQFDAWKADPTLPKPTEAALRRQLNALKRDAFPWMLEVTKNAPQMAVIHLGQAFKNFFAGTAEYPTFKKKGRHDSFTLTNDQLAIKGSRVHIPKLGWVRMHETVRFVGKVVEGTVSRTADRWFLSVTVEIPDPPVVHRENQTVVGVDLGIAALATLSTGEKIMGPKAYAAALTTLGRLSKQFSRQMEAAKIRAGLQPGRPIPKGMPMPLSQNMRKTQQRIARLHARMAHIRANALHQLTTDLVDRFDVIAIEDLNVAGMLKNHKLARVMADMGWGEFRRQLEYKASRRGVTVVVVNRWYPSSKICSACGDKVPKMPLSVREWTCPECHTHHDRDINAAINLRHVAESSVRGSSPVSA

SEQ ID NO: 63949 - protein, 256 aa, unknown
  TnpB Polypeptide
MTNNNIVFLGNKIKLPKIGKIKTRDKYRQIEGRILSATVSQTPSGKYYVALCCTDVSQSEFIRTNKYVGLDLGIKDFVITSDAVKYSNPKYLQKSLTRLAKFQRELSRKTKGSSNWEKARVKVAKLHDRIANQRRNLLHQVTCQLIRNYDVICLENLQVENMMKNHKLARNIADVSWSEFMRQLTYKAKWFGKVIVKIDKFYPSSQLCHVCGYKNTEVKNLNVRKWNCPECKTHHDRDVNAAINIRNEGLRILNIA

SEQ ID NO: 63950 - protein, 461 aa, unknown
  TnpB Polypeptide
MKKKRNIRSSRLTLKFANAHKSEKVAEFLDEYARVVTEFVGRFWHELNDGKQVQQMPSGEITNVQTWLSARAIQCAAKQSSGIANGSLAKNKRREWQVKEFEKAGQHKKARVLRAIIEKNKVSCPATNHVEAQLDSRFFDLNPSISTSFDAWLTIKSLRGAKGTKDTTGVKDTKVVGGPTGIRGEKLLIPLNYHKHFNSIQETGTRLNSVRMSKTEVSLSFEIPEPQPAELTLSSIGVVPAIGIVPAIGIDIGQTSIFSVSDGSQIKTGNHGWSLKDINNKMARCKRGSDGFKRAESHCRNFVGESVNRLNFTGVASVRVERIKHLKRGRRTSKSLSHWSATKLLNAVKQKAQSLGVQVSEVNPMFTSQRCSCCGWVQKANRRGEQFVCKGCGNAQNADMNGSVNISLDLPLLPKAAREQHWNRSGFYWNSSSPPTDELIVRQAQKPMESLLSNRAPQISQ

SEQ ID NO: 63951 - protein, 393 aa, Thermococcus sp.
MPSETIKLTAKFKLKETPERLDELFQTYREIVNFLITHAFENNITSFYRLKKETYKSLRQEYPELPSHYLYTACQMATAIFKSFRKRKKKGKARGRPVFKKEVIMLDDHLFKLNLESRRVNLSTPNGRVQLEFYPAKYHEKFKDWKVGQAWLVRTPKGVFLNVVFSKEVEVRELKAFVGVDLNENNVTLSLPNGKFVQIITHEREVRTGYFVKRRRIQRKIRAGKRRKELLEKYGRRERNRLNDLYHKLANKIVELAEKYGGIALEDLTEIRDSIGYSAEMNGRLHRWSFRKLQSIIEYKAKLKGVRVVFVNPAHTSSLCPVCGEKLSPNGHRVLKCLNCGFEADRDVVGSWNIHLRALKMWGVTVPPESPTMKTGVGKVSRNDAYQLYTSHG

SEQ ID NO: 63952 - protein, 419 aa, Thermococcus sp.
MRTSVAVNRIWVGQRPIHPTDIPLGIINTNYMQTLINFVVVVIIMCGIKLTQTFKLMKPNKRKRELLDATIERFKECVNAWISEIEQLGEYPTRKNVHSFAYKKIREQFKDLHSNVVQEAMNRAIEVYRAWLKTKGQKPVFTADVVSFKNVDVKIDRHFINVPLINKERVWLPMHVPKKLRKFLKMKHGRVQISKVDDEYYAQISFEVPEPKPYEPKGWLGVDIGINHIVVISDDRGKINKFYDNAIAWKKSVEYRRARLQFLKDKRTKKGAWRILKRLSHKEKNKMAYINHKIAKEIVELAKHYHYGIAIENLKGIRHHYNAKRHRKRLHKWAYGDLIDKIVYKAKLNGVPVVFVDPRNTSRTCSKCGYLVEKGVKGRWFRCPKCGFQLDRDLNAARNIAKRAFRLAPWGASSSQRRW

SEQ ID NO: 63953 - protein, 184 aa, unknown
  TnpB Polypeptide
LPHSPTDGRFLENPKPFECSLDRIRLLQRSLSRKRKLSKNWFKAKLKLAKEHEYVKDFRRDLFFKLGALLAAEYDLLVLEDLNAEGLIQKRETRKRRLRLQDSAFSELRWILGWQFRKQGKTVLAVPSYNSSRECFWCGGINQGLTLEDRVFHCPHCGFTLDRDLNASLVLSKHAGWEPPARCA

SEQ ID NO: 63954 - protein, 261 aa, Streptomyces sp.
MKIVTQVKLMPDAAQASALERTLGTVNDAANWVSEVAFEHGVPREYELRNHTYAELKARGLGAQAAQHVIKKVRDSYTTLKANIRAGNLGKDGSKRRRKAESKPITFRPEAAQPYDDRCLSWQYDQRTVSIWTVDGRVKNIRFVCSADALKMLQAHRQGESDLIERDGVFYLVATCDVPEAEQYEPDGFIGVDLGIENIATTSAGYLAAGRGLNRYRKRQLALRAKLQKSAPTAPSGGSRPGPAKRRGTPPTRTTSSPRRS

SEQ ID NO: 63955 - protein, 489 aa, Streptomyces sp.
LGGKFTSRWTWLFSPLNSTSSHSKSVHTDRMISSIRLKWASVNTLCRNLVTKTKWTCITKAQCLPVLILCMSPITQVCIVMVMQLRYSFRLYPDTGQQRALARAFGCARVVFNDAVRAREEARAAKQPFPKAAELSKRLITEAKQTVERSWLGEVSAVVLQQSLRDVETAYRNFFASLKGGRKGPKMGAPHFKSRKDKRQSIRFTANARWSITDSGRLNLPKIGAVKVKWSRTLPTTPSSVTVIKDAAGRYFASFVIDTDPAADQARMPETDRTIGIDLGLTHFAVLSDGTKIDSPRFLRRAEKKLKKAQRELSRKQKGSKNREEARLKVTRAHAKVTDARREFHHQLSTRLISENQGIAVEDLSVAGLARTRLAKSVHDAGWSSFVSMLEYKAARYGRTLVTIGRFEPTSQTCSTCGVKDGPKPLSVREWTCTACGSVHDRDHNAAINVKTAAGLAVSACGAPVRPGAIPAQREETGSHGFPTQARAA

SEQ ID NO: 63956 - protein, 459 aa, Streptomyces sp.
MWNLLHAWWQMMPKEKRTLANADVAIRQARRDVDFLAVLPARAAQAVLKTYFQAWKSCWAGRADAPNFKARFRSTLTVDVPQGRDLNIVRVHRRWGMASLPKISRVRFRWTKELPVGKQADEENRITGARLVKDALGWHIAFRVQTLERVPEAHQGPQVGIDVGITVPLALSDGETYEHGQWLTSLEQRLLGLEQRAAQRMKRRKPGERTSRRLHHTYDQIAGLRAKAKRRALDWQHKTTTDIARTYSVAVVEVLQITSMVKSAKGTIEEPGKNVAQKSGLNRSISGQAWGRTVTMLTYKLARQGGTLAKVPAPGTSRRCSACGLTTPGSRQTPRPCSYAGTPTADGPATPTTTRPATSCTCTGWATRSSRLPGGQSPGAHRASSPPPQGRRESPCFSWESTSRADHQGGARADELIHEQRGDGIMSAINFRLEVRRIPDPAGDRVVITLDGKYLPYRQ

SEQ ID NO: 63957 - protein, 437 aa, Streptomyces sp.
VIVTHAYRFALDPTPGQVGALLRHAGAARVAFNWGIAQVKANLGQREAERSYGMAEAGLTPSFGWSMYSLRKAWNAAKREVAPWWAECSKEAYATGLDQLARALENWSASKRGKRKGPRMGFPRYKSKRKTTPSVRFTTGTIRLEDDRRHVTLPVLGTIRTHESTRKLHRRIAAGTAVVKSATVRREAGRWFVSFTCEVERTDRTPSRADTVIGVDLGIKHLAVFSDGRPTAENPRHYDTARRKLGRLSRTAARRLGPDRRTGQQPSKRWQRADAARNRVHYRTANLRRDALHKLTTSLAREYGTIVVEDLNVSGMLKNRRLARVVADAGFGEIRRQLAYKTRWNGGTLEVADRWFPSSKTCSRCQAVTPKLPLRIRMYVCDHCGLVLDRDENAALNLAALVKRHVAGSGPETENGRGADRKTPSCGAGGIEASTPH

SEQ ID NO: 63958 - protein, 411 aa, Streptomyces sp.
MKIVVQVRLMPTPEVASALECTLRTANESANWLSGQAYERGETSRKALQGFAYHDLKSRGLSAQPALHVLRKVADAYTTLHANIRAGNLGKPGSKRRAKAESQPIAFRLDAAQPYDDRCLSWQVDERTVSIWTTAGRIRGVRFACSEQARKLLADHRKGESDLVHRDGMWLLIATCEIPEPDVFEPDGFIGVDLGIANIATTSTGYLAAGRGLNRHRKRQLDLRRKLQAKGTKSAKRRLKHRSRKESRHAANVNHIISKKIVTEAERTSHGIALEDLGGIRQRVRLRKPQRVTLHSWAFAQLGQFLEYKARRAGVPLVYAGPAYTSQECAECHHIEKKNRVDQARFICRRCGVVAHADRNASRNIAARGEAAWIAGRESRVPAPHNRVSGRRSQPSSQLGTTSKPGPLGLG

SEQ ID NO: 63959 - protein, 400 aa, Microbispora sp.
MRTAYKVRVYPTAEQVAVLNRTFGCVRLVWNTVLAWRQARYRDESVRTSYAQTDRYLTELKRDGGHDFLYEVSSVPLQQALRHQHTAFVNFFAGRAKYPRFKSRHGRQSATYTRSAFRWRGGRLFLAKMDDPLEFVWSWPEVDPATINPTTVTVSRDSDGRWYVSLAVETATGPESLPATGGQVGIDLGVTHFAVLSTGEKIPNPRHLERKARNLARYQRRMARKQRGSNNRAKARAKVARAHTKVREARADFLHRTSTRLVRDHDLIVIEDLNIEGMVRNHCLARAISDCGWGEFRRQLEYKTQRYGRHLVMIDRWYPSSKTRSACGHLLAELSLSTRHWTCPDCGTRHDRDVNAAKNILAAGRAVYACGADVSPQGASLRWSAMKQEAQPVRAGIPVL

SEQ ID NO: 63960 - protein, 412 aa, Streptomyces sp.
MVIGVQLRYSFRVYPSTGQRVALARAFGCARVVFNDALRVREAARAAGLPFTPLGELSKWLTSVKRTPERAWLAEVSSVVLQQSLRDLDTAYKNFFDGLKGKRPKLGPPRFKSRKDNRQSVRFTANAGWKITAGGRLRLPKVGNLAVQWSRRLPSVPSSVTVVKDAAGRYFASFVVETEAEALPETKAVVGIDLGLSHFAILSDGTKIDNPRFLRRAEKKLKKAQQNLSRKAKGSNNRTKARIKVARAHARVADVRREFHHRLSTRLIRENQAVAVENLAVKGLARTRLAKSVHDAGWSAFVAMLEYKAARYGRTFVRIARFEPTSQVCSVCGIKDGPKPLHVREWTCGACGAVLDRDINAAVNVAKAAGLAVSACRAQVRPGPVPAQRDETGTHPKPQPVTVGKQSGIPVP

SEQ ID NO: 63961 - protein, 398 aa, unknown
  TnpB Polypeptide
MNRQYTYKFRMYPTKEQEILLSKHFGSIRYIYNFFLNRRTKFYLNAKEKQLAKKSLNYNEMSAELTKLKSNTETEWLNECNSQSLQHSLKHLETAFNRFFKKKSKYPRFKSRRNKQSFRLPQFVSVEDGRIYFPKFKEGIKIDQHRKIEGSIENATISRNVAGQYFACIGVTKNIDIKSKLDNIVGIDLGIKSLVICSNGIRFENIKPLKQLEKLVRVRQKSVSRTGKKSNGRIEARLKLGKLHIKIANIRSNYLHQISHKLVSENQTLILEDLSVKNMMGDHRYAKSIGDCSWSELVRQICYKSEWYGRKVIKIDRYFPSSKTCSNCGYIKDDLTLKDREWNCPKCNHKHDRDFNASLNILRQGLNLTVGTTGLAVCPDVRPIGNNGRLVGTETHLL

SEQ ID NO: 63962 - protein, 417 aa, unknown
  TnpB Polypeptide
MITKRITRGYRFQILPTEEQKIFFAKSFGCSRFVFNYFLNARKEYYLKNGKGIGYNDTAKLLVELKEVKDTEWLNEVNSQSLQQSLRQLDVSYQRFFKKISKFPTFKSKYDKQSFMVPQHFILENGLLTIPKVKQPIKINQHRPFGENHEICFLTISKTKTNKYFVSFIVEEDFTPRFKKINKSVGIDLGLIDLMTFSDGKKISNPRITKKYRKKLVYQQRQHSKKTKKGHNRERARVKLAKTYEKITNVKMDYAHKLTNDIVKNHDIIVMETLSIVSMMKDHRKARSIQEVSWYEIVRQLKYKSEWNDRKFIQVDRWFPSSKTCNDCGYINQSLREGDREWNCPICNIHHDRDYNASLNILKQGLCGLGTKSHDKQKRGEALRIVSGKTERVVKSMSHETQKLESGVGNPPALAGG

SEQ ID NO: 63963 - protein, 412 aa, unknown
  TnpB Polypeptide
LKGGDNIKTQRVERHIIDKNHKAWKLFDEYCFKAKNIYNLANYTQRQLFVRGSPILQYVELSKELNKTEAFKDIGSNSAQMTLRLLCKDWKSFLVSVKDYWKHPNKYLGKPKLPRYKKKNGRHIFIMTNMQTHLYDGYLYFAFIPLKGLNNLFKTNVKNKLLQTRIIPKGSTYILEIVYEIEVQEPKEFNNRILGIDLGVDNLATCVNNVGVQPIIINGKVIKSINQYYNKKKAKLQSDLKKRHKKDWSNKLDKLQQDRDNKINYYLHNASKSIVTYAEGLNITIIVIGLNKTWKQESGLFKSANQNFISIPYDKLIKMITYKCSNIGIKVITNNESYTSGCSFLDNEVIGKDTYNKSRRVVRGLFKSNTNKLINSDVNGAYNIIKKVFSEAFKVDEIEGVHLHPIRVSMTC

SEQ ID NO: 63964 - protein, 404 aa, unknown
  TnpB Polypeptide
MIRAYKFLMRPTVGQVQALGEMLRDHCSVYNGALEERRDAYRHPSKTSIKYGMQSAQLKEIRAFDPERQGRWSFSSQQATLRRLDKAFAAFFRRVKSGDTPGYPRFRGVNRFDTVEFPKDGDGCRWDPTPHDPVTRVRFQGVGHVKVNRHRAVVGRVKTVSVKREGGKWFVVLTAEQEQPEPLAPTGSVAGIDLGIANFLADSDGGFVPNPRHGRSAAAKLEAAQQALARFPRVRRDQRTGNHQRAVEKVAALHGRVRRQRLDHAHKTALALVRTYDFIAHEDLKIRNMSRAPAPRPDSAQPGVFLSNGAAAKAGLNKSINDAGWGVFLTILHAKAESAGREVIAVDPRNTSRRCPECGHTAKENRPTQEKFHCVSCGHLAHADTVGALNVLRAGLVRREAQPA

SEQ ID NO: 63965 - protein, 343 aa, unknown
  TnpB Polypeptide
MVRKAFRYRLYPRRSQARLLDATLETCRCFYNDCLAERKTVVQDLDKAFDAFFRRVKAGEDPGYPRFKGRTRWRSFGFKEDGNGFRLDGRRLKLSGIGRIAVRWHRPIEGQIKTLRISKKAGKWFASFSCVVAEPTPLPATGTDVGIDVGLASLITTSEGEQVAHPRFYRKAQRTLRVCQRRVARRKKGGKNRRKAVVMLQRQHERVANQRKDYLNKLAHDLVQRHDRIALEDLTITCMVHGNLAKSILDAGWGYLVQRLHDKAASAGRVVVLVDPRGTSKTCSGCGATFEGLTLADRWVTCGCGVSLDRDHNAAINIKNRGGQLRWGISSPPGGLPQEAAGL

SEQ ID NO: 63966 - protein, 440 aa, Actinomadura sp.
MARQVRRAFKYRFYPTEEQAAELSRTFGCVRLVYNKVLEERTRAWYGERRRISYVQSSALLTQWKKTTQLAFLSEVSCVPLQQALRHLQTAFANFFAKRAAYPRFKSRKRSRASAEYTRSAFTWRDGHLTLAKMTEPLDIRWSRPLPKHAEPTTVTVSCDSAGRWFVSMLCEDTITPAPDTDAAVGIDAGITSLVALSTGEKVANPRHERRDRARLAKAQRDLSRKAAGSVNRDKARRRVARVHARIADRRRDFLHKLSTRLVRENQTVVIEDLTVRNLLKNGRLARAISDAAWREMRLMLEYKCAWYGRDLVVIDRWFPSSKLCGTCGTIRAKLPLDVREWTCGCGAVHDRDVNAARNILAAGLAVTACGDGVRPQRDTSRMGRSSEKQETQRATAGSPRLQAGEEVNAKPPPRSAGAPSRPPPLKYTAPYESAPGGGP

SEQ ID NO: 63967 - protein, 443 aa, Microcystis sp.
MYRCQQNLMSMDKHLKAILEFICAESHKLTNCGIYYARQLYFKTQKIIGKFDLEKEYKNNKHYQVLSSQAAQQILRSVAESFKSFKELNQKYRKGELTDEPHLPKYIKKEGLFLVTYPKQALKWVDNQIRIPLGKTVKQWFGLDSFYLPMTSNLRFQEIKELRILPRNHCFYVEFVYESKPVEIEVNPDNVLDLDLGLNNWLTGVSSLGTSFVIDGRHLKSVNRWYNKQVATLKEGKPQGFWSTQLAKITEKRNRQIRDAVNKAARLVINHCLEHQRNKDQKTESNLGKKNHQSFVSIPTPKLKERIRQLCEQCGIKFIETEESYTSKASFLDNDSLPKFGEKPAGWQPSGKRTKRGLYRTAQNQYINADANGAANIIRKVRTTINFDLSRVSRGVWTRPQKFKCWSAKKTRSPLRILRHLWVGEVKKTFIMEDNYSCYTLQK

SEQ ID NO: 63968 - protein, 352 aa, unknown
  TnpB Polypeptide
MDNNLISCKNIWNSLLEYSKKYYEETGKFPTRRQLYLRTKGTSLFSQVAQNVANRLVRSMRGMTARRKVGIKAGFPRFKSIERTKSFTYPQFGFRLNSKLWLSGIGEISIRKHREIEGKIKTLIIKKLPSGKWFAVFTSEMEKATCGKEGPAAGLDLGIDNFVYTSDGEIIENPRHFKKAEQKLGNADKRLSRKKKGSKNKGKARIKVATAYEKLTNKRKDFLHKTSRKLVEKYSVIAIEDLDTVRMARSFLAKSVLDCSWAEFSSMLAYKAEDAGCGIVLVNPANTTSECSNCGSVKKKSLAERWHKCACGASMHRDLNAAMNILKRATAGTAGSNASGKEAPTLVGKLLR

SEQ ID NO: 63969 - protein, 329 aa, Alicyclobacillus sp.
MQWCKVSMPLSNLGASVGKQIHKPNHRFVCGATFESSGNRPRSGFRMEISSSPTGAEMLRWSCHGPGKPLFWSNWVGRTGTDYELRAVYSRPAADPVAEGGVAGVDLGEIHLAVVHDGAQTLIYNGRELRAKRQYQNKLKARLAAKLSRMRKGSRRWRKLQRSKRKQLRKLGHQIRDILHKQTTALVSTLHERGVQTVVIGDVRDLRRRVEYGPAANQRIHQMVTGMVRWLITYKAEQLGMRVVIQDEAYTSQECPRCGSRYKPRGREYTCSVCGFRFHRDGVGAINIRRKYLGQGPVVGVMASPTGVRWRPHLRARVARDKRERIPAL

SEQ ID NO: 63970 - protein, 367 aa, unknown
  TnpB Polypeptide
MLTYTFKIKASNKQIQLFEEHLNTTRMLYNLAKETKDYAYSKGVKLTKFDLINQLPELKKEFQWIYNVNGATLQGVIERLYKGYDKFFSDLKRGKSASKPKWAKKKNWNSVEFKQGNLKNTKPNLRFEEDGRFNLPKIGKVRIFKSRKVNGNIKLARIVKKVDGWYLQIVTDYELPKCNNQAQVGVDSGIKYNFVTSDGQFFENIKTTKKYENKLAEAQRKLSLKKKRSNNFYREVEKVKRIHLKISRVREDYLHKISRELANNYQTVFVEDLDVSEMVQDKNFSKAISDVSWSKFFQYLEYKTELIKVDAKYTSQECNNCGHTSKENRPNQETFKCVKCGHSGNADFEASLTIKKRGQTLLEKYGK

SEQ ID NO: 63971 - protein, 422 aa, Symploca sp.
MLVLEYKVKAKPVQYRAIDEAIRTVQFIRNKCLRYWMDAPKQDNIKRFDLNKYSTELRNEFTFVKDLNSMACQASAERTWFAISRFYDNCKSNKPGNSGFPRFQKNNRSVEYKTTGWKLHPTLRRLTITDKKGIGELKLLGKWDIHTYPVKSMKRVRLVRRADGYYCQFCVDVECIDIQPHTAQKIGLDVGLESFYTDSNGHSEPNPRFLRKAESEIKQAQRRIYKKRKGSTQRRKARARYSRKHLRVSRQRNEHAKSLARNVCKYNDLVAYEDLRVSNMLKNHCLAKSIADASWYQFRQWIEYFAGKFGKEAVAVPPQYTSQECSQCKRVVKKSLSTRTHVCQCGCVLHRDTNAAINILHKAKSRGGHPRSNAKGVATSTLVGASLLEQVATTNLESPSMQERGVSKTTDLNRPTCFRQRL

SEQ ID NO: 63972 - protein, 461 aa, unknown
  TnpB Polypeptide
MGMANANKKIISKGKAAQDEKKPSKSPVTVEVTDGIFVFHGGKGGHNITERKNKALEPYGKCIYNYGLLLELIPGDKTSRINQNIGNSRYIHNNYLAERIKYYDEHKETLSIDQYKKEFLSKLKEEKEFLKLTDKFVYQNACQNVETAYQNFFSGKSGFPNFASSRNPNGNSFTTNYTNNNIELKMIDGLPYLKLPKIGNVRFVLPKGKTLADLQPLGVSIKSATVTRTNSRYRVSLQMETVIDRPVFPAVIHADEVISVDLGLKVFGMFGNAKETFTVPNPRWIRVHAKRLRRFQQSLSRKQYDKNTHKGSKNWEKARAKVAKEQRKTADQRRDFHHKLARAIADNYSAFICEDLAVKNMMKNRHLSKAIASVGWSQFLTIVKYKMEKAGKYFRKVSRWFPSSQTCRCCGHKNTKIRDLKVREWTCPQCGTWHDRDENAQKNIHAEGLSILRSEGIQIIM

SEQ ID NO: 63973 - protein, 190 aa, unknown
  TnpB Polypeptide
MLYKNEKGVVYYVVNYFKKNISKKDSNASTHYEKLKKLQKSLSRKVKFSKNWYRQKAKISKLHEYIKNCRRDFLHKLSKKLSEAYNAVVVEDLNMKGMSQALNFGKSVGDNGWGMFLRMLEYKLMFLGKQFLKIDKWFPSSKTCSRCGNVKEELKLSERSYKCECCGIEIDRDYNAALNIRDVGKEMLKY

SEQ ID NO: 63974 - protein, 438 aa, Planktothrix sp.
MLNVLKVRLYPNKEQEVALVKSFGCCRFVWNYYLEKTNNQYKETGKGLNYCEMAKDLTQLKKLPDYLFLQDATATTLQQSLKNLESAFKNFFQKRARFPKFKSKYKKQSIRYPESCSIKGNGVKLPKLGIVKARIPKTISSRIKSVTVSKASTDKYFAAILFETDDLTLDKNGKISGIDLGLTSLVTVFDGETYRKVDPIKPTRKYAKRLKRRQQSLSRKTKGSNNRKKQVKRVAKVHEKIANIRQDFLHKVSRELVDENQVIVVENLCIKGLARTKLAKSVLDAGFGMLLNFLGYKLEREGGKLIEVDRFFPSTKLCNCCKFKNNSLNLSIREWVCPNCQIYHDRDENAAKNIREEGIRILSTNTVGHTGIEACGEDVRLVGLCTKKHSSVKQESPVERVSLTGECQVSLLPYRGRERRFVNLRKKVRAFSHYELFQ

SEQ ID NO: 63975 - protein, 549 aa, Telmatospirillum sp.
VVEAASVASVAPAKKKRAKFPVHDRIIRSFRFAMRVDPKREPGLHAVLDGTHALRNDLVAFLNEERTLNRERKARGEKREWSSRNSLQSWTAEWSKRTGIHLHAHVRHNVVDRVLEGIERWLEALKEGRKGVKPPGPIDRRKHRSFTFKEYGNGCRISNGKAFLSGLGWFKLFDHRRIIGQPKTLTVKFAEGRWWCVVTSAIFEDEWFGPETDHEGKPDAGGDPGLTHLMSDSHGRVFDPPRRLKESQGKLRRAQRVLSRKFVARKDDYAKARALSPMPAELPPLREMPLSNRLLDQIKTVAKLHTKVGRQRDNDQKKIAAVVSDLYGRFGCEEHGVMFMIRNRKLAKSASDRAIGSQKHHLASALGKRYVPTPNARPGIGGNSQTCLCGARVEKALSERMHDCPACGLKAPRDFVSANLVQTIAFGTVSPAMETLLAARTPPQGGTAQGAAEDGVPAGGQPVVTRGGPEGEEGESVRSEPTTALEAPLKREPPKSQPNEAPRVGNLPRKARPAGIGRRLPPRRTLPHEPEPEGQNRATAASFTLEGNP

SEQ ID NO: 63976 - protein, 367 aa, unknown
  TnpB Polypeptide
MLMAYKYRLYPNKEQQEYFAKCFGCVRFIYNRMLSDKIEYYKETKQKLNNTPAQYKKEFEWLKEVDSLALANAQMNLQKAYNNFFKRPEAGFPKFKSKKNNNYSYTTNNQKGNIYVSDRYIKLPKIGLVRVKKHRNFDGLIKSVTISQNPSGKYYVSVLVDQEDKEKLPISDNEIGIDLGIKEFAITSDGEMIANPKFLRKSESRLRKLQKDLSRCKKGSKNREKCRVKVAKQHEKIVNQRKDFLHKLSTRIIRENQTIVIEDLRVKNMMSNHKLAKSIADVSWNEFVRQLEYKADWYGRKVIKIDTWYPSSQICSNCGHRDGKKALSVREWTCPVCGTHHERDINAAINILKEGLRMKTAGTAGIA

SEQ ID NO: 63977 - protein, 380 aa, unknown
  TnpB Polypeptide
MANIAYKYRLYPDTEQQVLFAKTFGCCRKIWNLMLADRNEAYQKDKRIIDPTPASYKQGYPFLKEVDSLALANVQLNQRKAFKEFFRSCKTKKHDRGFPKFKSAKTAKRSYTTNNQNGTIKVGDRYIRLPKIGKVKAVVHRRPNESWKLKSATVSQSSDGNFWCSILFEYEEEIVPVCADTDKAIGLDYKSDGLYCDSNGNIASRHKFYRKTQTKLAKAQRKLSRKMGNKKGETRSNNFLKQQKRVNKIHRHIANQRNDFLHKRSTEIANRYDVVAVEDLNMRSLSNKGFGNGKATMDNGYGTFLNMLEYKMNRKGKYFVKVDRFYPSSQTCHVCGCVDPKVKNLSIRKWVCSACGAVHDRDVNAAINIRDEGLRLLGLI

SEQ ID NO: 63978 - protein, 381 aa, unknown
  TnpB Polypeptide
MLKTYKYRLYPSKAQEGLLEQTLETCRRWYNTCLAQRKDAYETEKRSVGKFAQLRNVKELKRSNPYARNVHSHILQVVVQDLDKAFQAFFRRIKAGETPGYPRFKGHNRFDSFGLKEYGNGFKIDGRRLKLSGMGRLRVRWHRPVEGTIKTVRICRQAGKWYACFSCEVEERPLSLTGQSVGLDVGIHHLLATSDQEVVDNPRWYRNAQTKLRILQRMVSRRKIGGANRRKAVLSLQCQHEYISNSQKDFLNKLAHSLITRYDSIALEDLHINGMVRNHHLSKSILDAGWGYLKQRLADKAVEAGRQIILVDPAYTSKTCSSCGELFPDLSLADRWIECTCGHAIDRDVNAAMSILRVGHTRWDESTDKGLRLSQEAPLLQ

SEQ ID NO: 63979 - protein, 362 aa, Clostridium sp.
MLKAYKYRIYPNKEQKLYFAKTFGCTRFVYNKMLTDRIKSYKENKDLDIKQSKYPTPAQYKKEFEWLKEIDSLALANAQLNLDKAYKNFFRDKSIGFPKFKSKKSNYHSYTTNNQKGTIYIENSRIKIPKLKTMIKIKLHRKFDGIIKSCTVSKTPSNKYYISILVDAENNQLPKTNKKVGIDVGLKEFATTSDGDFFGNPKWLRKSEKRLAKLQKDLSRKKKNSNNRKKARLKIARLHEKITNQRKDFLHKLSMQIISENQAIVIENLKVSNMLKNHRLAKAISEVSWYEFRTMLEYKCKWYGRELIIAPSNYASSQLCSNCGNKSNQTKDLSCRTYICPVCGMIMDRDLNASKNLLNLAI

SEQ ID NO: 63980 - protein, 358 aa, unknown
  TnpB Polypeptide
MAKAVVKTAKNQLKLLKEAARYRYNNLYKRKRSLYKKIQKLKSLLSSSSTSLKQRKLTKLRLFWIQMKLNKVNQFISNGLRLQLTFGTKHLLKNNKTKFLAKRDNQVVYIGDKNETCGNQQFQISFNSKYNRFDYKLRLEKQWASGSDKYIYGSFVLKNKEAKTHILKTLSKKKSNPLTYRIIKRDNVLYLQIMYRRETSDVTRNHYGVLGVDFNKGFISVSEISSEGKLQSLTRYTYLHQGKATKTKASMLKLVSKLVSQAVSVGKDIVIEDLVSLDSNKKQEKTTSKYYNRMINNLKFGLFKRCLLSKAPKEGVSVQFVNPYNTSKIAKTSYTDRMKLNVHDAASYVIARRFYQYD

SEQ ID NO: 63981 - protein, 373 aa, unknown
  TnpB Polypeptide
MVKLVVQVKLRPTADQAESLRATMRRANEACDWLSGKAWENKVFRQFALHNLTYSAARSAFPDLSSQMIVRATAKVADAYKLDRKTRRSFRPLGSIAYDARILSWKSDAANLWTLSGRQVIPFVCGEHQQALLSFERGETDLVLRDSKFYLFVTVDVPDTEEKKILGWLGVDVGIVNIATASDGQNFSGSSLNALRRRAVKLRQRLQSKGTKSAKRLLRKRRMKESRFSSHVNHVISKQIVATAERTALGIALENLEGIRSRVRASRSQRRVLHSWAFADLQAKIGYKAKRAGIPVCYVDPRNTSRECRVCGHTEKANRKTRDAFACLSCGHTADADVNAARVIARRAEVIRPYGDIVDVVASHRDDLQSSAL

SEQ ID NO: 63982 - protein, 373 aa, unknown; identical to SEQ ID NO: 63981
  TnpB Polypeptide

SEQ ID NO: 63983 - protein, 429 aa, unknown
  TnpB Polypeptide
MILTFNVKHNRDFTDELKKARRVAEFAVRTHTLSSKDVKHFGLKSIIANQILRKYSRNKKIKKVGHVNLTIPNQGIRVDREKQEIYIPSLKLTLPYSFRNDFEKVNQIEVDEQYAHVSVTIPEKPVIQPQTWLGVDRNATGHIAVVANPQTGKVWKLGKKAEHIHMKYREIRRKLQKVRKYRLLKRIKDRESRIIRDLNHKVSRKIVEIAKKDNAGIKLEELGGIRNNKKHTKSFSYGLHSWSFHQLEKFIDYKAKLEGVPLTYVEPKNTSKECSRCGSVGIREAKSFKCPHCGHVDHADANASFNIALRPPSVGGVGQLHVDRDACKGSTDTPDREGRLRERRRPRNSVMGSRKTRLIVRSDAEISAKARTSEASAEESMSVYRILRKSEKQRKSGATALSHPVRFSQLRKEAFKRGASQNNPACGAL

SEQ ID NO: 63984 - protein, 434 aa, Lactobacillus sp.
MTKEYKGIKIRIYPNKQQANSIDEFGASARHMWNELLAMQKARYQAFNEMYGDADEETKKIHRKGVYVPKFGMTYLLKPFKQEQGHEWAKHMPSQALQNVCSDVDASFQKFFAKQGGFPRFKSWRQHNDSFSFQQGCVALDEHHIKFPKLGVMKYRGYDGLTNYKIKAATLRKAKDGFYYASCRVEHESMVMPKTNKQVGIDLGVKDLAILSNGVKYDKLENTYKHYLWSKHRLVDWQKKYSRRLERAKKTIAMNDQYEKQFGKSLTGQHRLEDFSNLNKARMMVGRWHAKVANQRKDYLQKLTTELVKDYDLIVIEDLKASNMMKNHNLARSIAEASFFEFRRELEYKCKWYGKQLVIVAPNYTSQICSDCGFHSGKKTLDIREWDCPNCGVHHDRDINAAKNILNKGLEQLKNEVSNKTKKKTTKKSNKKVA

SEQ ID NO: 63985 - protein, 545 aa, unknown
  TnpB Polypeptide
MPRATSSSFVTVVELAATGAQAKKLRSKFEAARQVYNACLGEALKRLRLMREARAWQRAGQMPKGKERTTVYRELQQQFGFREYDLHKWCTQFTRSWINEHIGSKTVNAIASRAFKSAEEFLYAAGKRRPPRFRRRGELRSVEGKARSCCHWKGDHIAWKGVSVPAIIEDDTDEVLKHGLQSRVKYVRMVRKIIRGKERFYAQLVCEGTAFCKPSHKPRRGRVGIDIGTQTIAVVGGKRAYLGVFCDGLERNDTKIRRIQRAMDRSRRACNPDNFDEEGRIRSQGNQRLKWVESKRYLQLRKRLREMLRQEAEFRKNLHGQLVAQVLTFGDDIWLENINYQSWAKRKTQKATGHRKKSYGRSVSRRAPGFFEQRLISEAEKWGASVTRFPTKTTKLSQTCHCGHVEKKKLHIRWHRCKQCGAVGQRDLYSAFLAQFVEGNRLKADQAQKAWPSSCAALEAALSDIKHASGMPSSLGLRSRDRAARLQNCGQTAGKIVDVVPAEKSDRESHKEPVENHNNTIFSRPETHLSQDSTGSSDISGVDSG

SEQ ID NO: 63986 - protein, 503 aa, unknown
  TnpB Polypeptide
MRKGLGLSPPVGEVLGGMTQGGTIPRFVPTDGDPDPLQALKKEIEERLSSNWRDVRLRLLPTGVEHGSLMGIGLTCVRLYNELNYEKRQAFFKGELTRDKMYEIDRKYYYKYNDVLGVNAQAVIQKNDEAWKSFFELLKLKKQGKLPPHIRKVSPPGYWKDRFTGKKEIHIFIRNDRYHLEPIDENGGYLVLEDFGLRIRYAGRIKWEGKQGRLEIVYVNGRWYAYVPIEVGREPPKSNRRGYVKPNYRDRKGRIVNPKSIKQRDPIGDEKAFMDMGLNNLFAVVTTNGYVLLVKGGTIKSEYYWWKREISTYQAVRDLLRNAGLPAWVYYHERYLEAMHTRDERLRHLYLTSIRFLAETLWSRGVRKLYIGYPIMLSQSNGNEYNTNIWWYRKIVLWIVDVFREYGIEVEVVPEYYTSRECSVCGEVHENGRVYRGLYVCRRTGRRVNADVNAAINIARKIGYKVKITRKIESYIVTHNGVKPLIPHRRANTQDPEVRNPAL

SEQ ID NO: 63987 - protein, 285 aa, Thermoflexales sp.
MQYVYGDAKLFERDGDWYVMLPLRIDYDAPTVWDGEPTFIGVDLGIVRLATVSTPDTVEFFDGKAVRHPQEHFSDLRRRYQKHNRLDRVKARRGKESGWMRDINHQISGQIVDLATSYDNPVIVLERLDGIRSRTRGSQRFNRMMGSWPFRQRVDSVEYKAEKAGGLVVFVDPRGTSKTCSRCGHRSRSGRTTGNRGRPKSGWLHSLEGAFLARKWGIYTHIRIKTTPQWGSFDSPRLTVELPPFQSSRSLSFSMCELRLSAECRSRRRSQHRCARATRSGTRAA

SEQ ID NO: 63988 - protein, 377 aa, unknown
  TnpB Polypeptide
MDRTLMLQLNPTGEQAALLKRTLKEHTACFNEVARVGFTTQCSNGIKLHKATYYPLRLSYPDLPSQLVCAARVKATEAVTSALTWKRKKERDYPKKVAKAQKQGRPAPRFKPVKCPQSMIAPIRYDERSYWLKWNLNTCSLATVAGRIELPFTVPHHLEQYVGNKTCSADLCFRKGRFTLHVVVSIPEPPIAPTAMVIGVDLGLIRPAVTSQRHFLGDTRWQEQERRIFRLCRKLQKKNTKSAKRHLKKLSGKRFRQRKDHDHVLSKRLVHTTPPGATLVLENLKHIRATSSIGRGKKNKTVDLKRRFHSWSFAQFHAFLSYKAAVYGIEVVKVDPRHTSQTCSKCGHKHRSNRRSQSLFTVPGVWILPQCRSQCCI

SEQ ID NO: 63989 - protein, 483 aa, unknown
  TnpB Polypeptide
MLVTQAYRFALDPTLVQQRKLCSHCGARRFAYNWGLALVKARLEQRERVRRAALVEQLAGGEVEALARTVAVPWTLPALRREWNRAKAQAAPWWAQNSKESYSAGLADLANGLDAFSKSKRGMRKGARVGFPRFKGRRRRRESFRYTTGRFGVSGRCRVQLPRIGHVRVHERTGKLARRMENGHARVLSISVCRENGRWYCSLCCIVDRSDKPVKAAGTIGVDVGIRHLAVLSTGEMVENPRALCRAQRRLRRYQRKLDRQRRTGNPGCYDEQGRTVTGRRLVKRSRRQARTEHRIARLHARAGNVRRDALHKLTTDLAARHRTVVVEKLNAKGLCRGGNRGLRRALHDASLAEIRRQLAYKTLWRGGELVQAASFYPSSKTCSGCRAVKAKLPLSERTYRCEHCGLVLDRDLNAARNLAALVDSVAPSGGETINARSRPPSGERTENPCQTRPPRRAVGRPRSPQRQPARQTGTASEQSEAA

SEQ ID NO: 63990 - protein, 452 aa, Succinivibrio sp.
MSTAVEIKPKHLTHKIRLYANHKFLSYCSRAAGVQRKTYNWCVDRLKQAIDNKEKIDFIKWKKDFTQVKRQQFPYMYEVTKYASAQPFFFAKRAFEDYCKDKQEGKTGCRRKGFLKYHQKRPGYGSFYIGGDQVYFSDNPYDKKSYNYGIECKHQYIHIPKFGWVKMYERLRFQGHIENCTITYEGDKVYACVLVKITQEEYLRTHKGVVAHDTACGIDVGLKSFITTDTGLKVDAPKPLKKQQRRLKHAQRCLNRRQHPRVKNDTTQCSKNFYKQVKVIRAINSKVVNTRRDFNNKISSVLLRHYEYIGIEKLNVAGMMKNHKLAQALADAGFRIFREMLTYKALWLDRKVVKANVFFASTKTCSNCGHKRFDLTLRDRVYVCPHCGMVLDRDQNAGKNLLKNLKESIGVVSAKFKPMDQTALHSDLAINRIATSWDDMGIQQMLINKKAS

SEQ ID NO: 63991 - protein, 397 aa, Streptosporangium sp.
MLTGRRYLLAFTPEQETFAERIGDACRMVWNTGLEQRRAYRRRGAFVSYVEQARQMAEAKKDFTWLAEAPSHTLQQTLRDLERACKTHGTWRVKWRSRRMNAPTFRFPDPRHISVERISRRWGRVKLPKLGWVRFRWTRPLGGQLRNATVLKDGGRWHISFCVEDGIAETTPNGKPAVGVDRGVKVAVATSDGTMRDRWFVTPGEAARMRRLQQQLARQRKGSNRRAATRAKLARLNARVRNRRSDFLAWTADRLTRDHGLVVVEDLKVKSMTASAQGTGDAPGRGVRRKAGLNRAILSKGWGGLLTGLEHKARYNGSRVVRVPPAYTSQRCSACGAVDAKSRESQAVFACTSCAHTGNADVNAAKNILAAGLAVTGRGDLADGRSVKRQPPEVKAA

SEQ ID NO: 63992 - protein, 400 aa, Streptomyces sp.
VRRSYKFLLRPTVGQQGALVAMLADHCDLYNAALQERRDAWRHSSKTTVRYGDQSAQLKGVRAVVPEQARWSFSSQQATLRRLNKAFEAFFRRVKSGDTPGYPRFRSRARFDTVEFPKDGDGCRWDSTPRAGATRVRLQGVGHVRVHQHRPVRGRVKTVSVKRQGRKWFVVLSCDDVPPELLPATGREIGIDMGTTHFLTTTDGVLIENPRLLTKAAAELVAAQRNLSQFPKQGKAKNRTKKHRQAVRRVAKLHAKIRRQRLDHAHKTANFVVRDADVIAHERLDIANMTRRPKRRPGEDGTFEPNGAAAKAGLNRAILDAGWGVFLAVLTAKAECAGRRLIAVDPRNTSRTCPLCGHVSAQNRDGEGFKCTACGLIEHADTVGALNTAIRAGLALCAAT

SEQ ID NO: 63993 - protein, 386 aa, unknown
  TnpB Polypeptide
MIKTNRVKLKLNKAQFELVREKQIECANCWNDIVAISKEYYLENKKWIAKYDIQKIVKGKYNLHSQTIQAITDKFDANRKTISELRKNGDKKARYPYKTKKFYVIPLKNSAINTNSKGNLKLTMSKGRYLELDFNVPNIKTAEIVWRNGYYLYYTYETKVDKIAKGSNKIGVDLGEIHSIASVTNNGDALVLSNREGRSIKQFRNKMYAYISKRLSRCKKGSRKYKKLLKLKSKIREKSDNQLRNLYHQTTRKFIDFCVEKEVCEIILGDIRGIEKNTKKKKKLNKKNRQKISQMEYGRIKDYIKYKAEEQGIEVKLVKENYTSQTCPKCSKKHKPQGRNYICSCGYETHRDIVGAWNILNKKYKFELVDFNIVHRQPINLKVSTN

SEQ ID NO: 63994 - protein, 430 aa, unknown
  TnpB Polypeptide
MAWEVTRTVRVRLNVHDDRKSDLHATNDLFQHCANRTAEWAWRYPEDNCVTSKSKAENAIYDDLREETDHLHANLVQKAIKRATDDIDNCVDRLADGENTTKPEYDTFSIVYDKRAATYYCDRVSLATVNGRVECEYDLPENPKGTPHGKYLLNDDYSFSTSTVHYDSEADEFYLHAAMERELDVDSPEKAEHSKVLGVDCNVDDHIAVTSTGEFIGNADYLNHKRREFEKRRASLQQTGTRSAHRTFQRIGDRFGRWTEDYLHRCSKALVEEAQKHGCTHITFEDLEQIRERISDDKKFQQWAFRELQQQTKNKAELAGIVVETVEPSYTSQQCSKCGTTLEENRDGQHFECLGCSYTANADYNAAKNVARKFALKLQRGQKSPAGGAFCQYALKSGTMTVNATEVASDTFVSAERESTDKPTASAVGS

SEQ ID NO: 63995 - protein, 379 aa, unknown
  TnpB Polypeptide
MERMTVTAKIQISVDTDSKALLDKTMSAYSDACNFVSEYIFNTKNLKQFSLNQVLYSTLREQFGLRSQMAQSVFKTVIARYKTILENQKKWIKPNFDKPQYDLVWNRDYSLTQNCFSVNTLDGRVKLPYFAKGMSKYFDHTTYKFGTAKLVNKHGKYFLHIPVSYEVEESNISDICNVVGIDRGINFVIATYDSKHKSGFVSGRSIKQKRAHYSKLRKELQKRQTPSARRRLKAIGQRENRWMQDVNHCISKALVESNPKHTLFVLEDLTGIRSVTERVKTKDRYVSVSWSFYDLEQKLIYKAKQNQSTVIKVDPRYTSQCCPVCGHIEKSNRNKKIHLFTCKNCGYSSNDDRIGAMNLYHMGISYLKEAQVPDTVTVE

SEQ ID NO: 63996 - protein, 416 aa, unknown
  TnpB Polypeptide
MSEEKNQRIRDTLRATKERHSKMDCRVFCMKIQENRLSKVVLEKLKRCFLEAKWLYNAVIATETLVLEDTSSVQVKVNGSFETREIKNLSSHMRRSVVNGARQSVFNLSKAKKRGLKVGKLQFKKEYTTIDLSQFNNTYIIKGKNKIRVQGIGVLVVNGLEQINFNEVEFANAKLIQKPSGFYIHITTYSKKQPQSNVEKEVLGLDMGIKDQLTFSNGVKVSFYLEESEQLKGLTRKLSRQTKGSNQYKQTLTRIKRVYEHLSNKKNDVVNKLNHILKENYIVCFQDELLNSWKRTKSKHKFSFGRKVQHGILGRVKDKLKENSSNVMLDSSAPTTQTCPECGCLTKHSLDKRKYHCNHCGFENLDRDIHSANMMVLLSGYGTYRSLNTDTVSTEKMVSLLANLSELGVVVTTNSM

SEQ ID NO: 63997 - protein, 398 aa, unknown
  TnpB Polypeptide
MSAMEAKVAVKVNHVRKLKIGRGERLDTLSLAAGSIYTAAVVWFWRHVRRNGAWLSQYGMQKRLNNGQPSILHSQSAQKAVECFFHALKTWRAARKENRSRRAPYKTKRFYKVVWKKSAIRVLGGKLLLSNAKGTDPLVFPWPHETPVQVEIGWDGAQYELRGTYETELPDDIAPGDAVASCDLGEVHPAVVGTEDFHLILNGGELRSKRRYREKLKGEMSTKIDRKKRGSKRLRRLIASKRRKLESLDNQIRDIEHKLTTAAINTLAKRGVGTLAIGDLRDIRIDYDKGKVQNQRMHQAPTGRFRQYLTYKAERFGWLVELVNEAYTSQECPRCHARTKPLDRRYKCGSCGFEAHRDAVGQVNILRKYLGDDRVPRVVGVMASPIGLRYVPQLRCRS

SEQ ID NO: 63998 - protein, 409 aa, unknown
  TnpB Polypeptide
MGCQDSHAAPTLSCPTKVLNLYSTLVGSCCNIKTRWLSIKIVKTYRYKLYNNKKNKILNNKIDIAGYIWNYCIAAHRMYYKLYKKHLSLYDLQKHITKLKKKPKYSYWCQLGSQAIQDVTERVERSYKAFFEHIKENKPSKKSIPKFKKASKYSSFTLKQKGYRFYDDNTVTIMKKKYKYFKNREIQGEIKTVTVKRDRLGDFYIFVVAEQEMQEISSRVGNAIGIDFGMKHFLNLDNYSVIDSPEYYKQNLTKLKNAHRKVSRCKLESNNRKRAIKELDRIYRKISNSRKDWFYKLANSLTKQYSVICIEDLNLEAMKKLWGRKISDLSYGEFVQILEWEALKNGSKVVKIDRFAPSSKSCHCCGFINDELTLKDRSWVCPSCGEHLDRDVNAAINIRNLGLAKLGNI

SEQ ID NO: 63999 - protein, 570 aa, unknown
  TnpB Polypeptide
MKKPPKKTKKQQINPAEGIKYTVCGEWFPDVYPDFRSPEWYRGDEDPLTTEMRLFCALIRWAFNRLLEGSTREELKKQGQVIFGLNSRYCDDAILKAQEIINSRKELLSIEIKETETKLNRAKKKLNQTTKDLARAVKNGDATRITRAKLTVHGRKMRVKKLRDKLAELQAHQNNGTIPKVVFGGRTLWQQVCKGKASREEWRSTRQNRLYARGDESKGGNPNTKISYHNGGFALSVTISHLSAQTGVDKLGRPVMTRAPRVIGKLWLPEKHRQKTWELLLSGAPYAVELIREKGGRYRAHITFTITQTQTVTNPNRGYLGVDTNPDGVALASVSYTGQPEPWPPGFTVPYPKALHKFAGEFQVTVHPNGFLYIKIPELAYSRGNRRTYLIGVLAKVVVDIAKTLSKPIAIENLDFGQDRLDTNKRFNRMAANFPYRKITEAIMRKAYQEGVGVKAIWPAHTSTIGYYKYMERYGITIHHAAAYAIARRAIGFKERLTKELKQKVLALKAKLNQKANSLPGEGKGMTRKVKRLVLRLDEKVPIHNGLTRFKQESFYSVWHDLKQLAYPSR

SEQ ID NO: 64000 - protein, 415 aa, Ktedonobacter sp.
MNRSHVIRLNPTAEQVVYFRKACGVARHAYNWALARWKQARAEGKRVKMRELKAEYNRIKHEQFPWCFEVTKCAPEQEFSYLGQAFENYWRMKKNGTQPKLKHPRKDGEEAGFPHFKSKKRDRLSFYLNNDKFSVGGNWIRIPKLGKVNMTEPLRFSGKILSAVISERAGWWFVSIAVEVEHRTPIHYGGMVGIDLGIKTLATCSDGVVFENQRHYLQNLGRIKGLSKGLSRKVEGSQNWWKATKKLAKAHYHVSCQRADSLHKMTNHIARTYALIGLEDLHAKGMLANHNLAQAISDASFFEVKCQLLYKSEQYGGYLQLVDRWYPSSKTCSNCGYVKPELSLSEREFVCDACGLTLDRDFNASKNISNEASRLVASVPVVASSARKFACGVGSSGSLCEENETCYDEASTKML

SEQ ID NO: 64001 - protein, 217 aa, unknown
  TnpB Polypeptide
VTEAEPVPLPPTGRSVGVDVGVARFLTTSDGQVVANPRFLDTAQERIVELQRRRQHARAGSGNRRRVRRALAKEWRKLRNQRRDFHHKTARSLVDSCDTIALENLRVAAMTAAAVGTVEAPGRNVAAKAGLNRSILDAGWTQFARILVAKAESAGRPVVFVNPSSTSIDCHTCGARWVRPRQDTVVCPVHGELDADLNGARNIASRAGLGSGQASAA

SEQ ID NO: 64002 - protein, 358 aa, Streptosporangium sp.
VLVTEMLKLAPSLEQGQALLATMRACNTAATRAAEVAFAHRIANKIALQKLVYTDLRHEFGLSAQMAVRSIAKACGAYKRDKTIKPAFRELGAVAYDQRILTWKGRDAVSLLTLSGRVVIPVLYRGRWLDSEGATLRGQADLVYLDGVFFLAVVVEIPEPPRQEEPQRWLGVDLGIVNLATDSTGEPYSGKEVRAVRRRNARLRARLQAKNTKSAKRLLKRRRRKESRFARNINHVISKQLVGKAKDTRSGIALEDLQGIRERVTVRKAQRADLHSWGFHQLRTFMTYKAALAGVPVRLVDPRNTSRTCPGCGHIDKRNRPTRDDFRCVSCGLAGPADHFAAINIGRRAVRHAADDAA

SEQ ID NO: 64003 - protein, 376 aa, Bacillus sp.
MILAKKVRLIPTPEQEQVLRNHAGAARFAYNYCKRMSDRYYKLFGKSVSQLALQKRFTKIKKRKRYEWLKEINAQVPKQASKDFDTARKNSFKKYKNGYHTSYKSKKDLIQGFYANYERLIIGKRVVHIQSIGEVKTSQQLPRNKKPLNPRVIFDGRHWWMSVGFQEDFESQELTNESIGVDVGLKELFVASNGMKERNINKDAKVKKLLRRKKSAQRDMSRRFKKGVKIQSAGYEKAKAEHLRLSRKITNIRNNHIHQATAKLVKTKPMRIVVEDLSISNLLKNKKLSKALSFQKLNFFFQCLSYKCEKYGIAYVKADKWFASSKICSCCGVKYDHSVQPEGQWSLKIREWCCASCNSYHDRDVNASINLSRWVK

SEQ ID NO: 64004 - protein, 399 aa, Clostridium sp.
MRLEKLQKRELYLRECQEKGIIPKVIFGGRKNFFKRMEGKISNKEWKELRSNHAYSRGDKAKSGNLNIRLVYEKDKFYIEIADTLKTKDKNNRSPRIKAEVSIPDKFFNKVIDTIIPDKGYNVKTKKQVDIYKPYTIQIIRKKNEYYVHLTIEEEVSGRELGFSELPVDDKVAGIDINIDRIALTILSKEGNFLKSKVFYYHEMEYVKSNRRSNLAGETAKEVIDDSLSENIGAIVIEDLKFSQDHDTNKKFNRLTSNFAKQKLVNALTHRALRHGFLIKKVNPAYTSVIGKYKYSKIYGLSVHEAASFVIGRRGLGFVEKLPKELIKILKNEVKPHIIKTLGSMEETYKKSESGKSQRKFLGMLLRNIDDFKQNHAWKTWNVVQKALKYKEHKLVLAL

SEQ ID NO: 64005 - protein, 363 aa, Clostridium sp.
LNKAFKFRIYPTKEQEELLSKTFGCVRFVYNKMLSDRISHYNETGESLNNTPAQYKKEFEWLKEVDSLALANAQLNLNKAYKNFFRDKSIGFPKFKSRKNNHRSYTTNCVNGNIKLDDGYLTLPKLKAVKIKQHRMVPDDYKLKSVTISKTPTGKYFASILYEYEKHIELAKPEKFVGMDYSMKELFITSDGISAEYPRYYRLSLEKLKKEQRKLSKCEKGSNNRNKQRLKVAKFHEKVANQRKDFLHKTSKQITNAFDGVCIEDLSMKGMSQALNFGKSVSDNSFGTFVSMLDYKLKEQGKQLVKIDKWFPSSKMCSACGQIKDALSLSDRTYHCEHCGLSLDRDYNASINIRNEGMRILSA

SEQ ID NO: 64006 - protein, 363 aa, Clostridium sp.
VEITVKFKLLLRKEQMNQLEHISKEYINAVNDIVSSMVLAENKLKLTSKNVIANMPSAVKNQAIRDAKSIFSKYKKQIRRNLKKKSDKEIKVPVLKKPVCIWNNQNYSLKDGILSLPIMIHGKSQRIQVKTLITDYQLNNLEYKLGALRITRRSGKWIAQISISIPEPIATGESVMGVDLGLKVPAVAVTDSGKTKFFGNGRMNKYIKRKFRAKRKELGKAKKLNNIRKLDDKEQRWMKDQDHKVSREIVRFAIKNNVSVIQLEQLTNIRNTAKTSRKNEKNLHTWSFYRLAQDIEYKAKLSGIAIEYVNPKHTSQKCPNCNTLNKAKDRKYKCSCGFKTHRDRLDAMNIMNAPVIDGNSLSA

SEQ ID NO: 64007 - protein, 389 aa, Clostridium sp.
MIKGIKVMLIPNNKQNTKLFQYAGASRFAYNWTLEKQQQNYKSGGKFIDDGELRKEFTQLKKQEGYEWLNSISNNVTKQAIKDACNAYKRFFKGESKFPRFKNKKKAALKFYQDVEKIQFNGTHVKFEGFSASKKKNKQKLNWVRLAEHNRIPFGENVKYANPRVSFDGLNWWISVGIEDEDEVKQPANEGIGIDLGIKDLAICSDIDKPYKNINKTSKVKKIKKKLRRLQRKISKKYEMNKEGSCYKKTCNIIKLENKLKRVHHQLKGIRHNYLHQTTSEIVSREPMFIVLEDLAVSNMMKNKHLAKSIQEQCFCEFYRQLEYKSLWNNVKFILADRFYPSSKMCSVCGTIDKNLKLSDRTYICECGNKMDRDKNASVNLKKVGELAI

SEQ ID NO: 64008 - protein, 392 aa, Clostridium sp.
MIMATKIKLNPTKEQEVLFWKSAGVARWAYNYFLSESQNHYNEYLKGNRDTKTIKEREVRKHINNVLKKTTHTWLSEVGSNVMKRAVKDADMARKRWFEGISEKPSFKNRRRSKISFYVNYESLKKTKEGFRGEKLGIVKTYQPLPKLQDGQIYLNPQISFDGRNWFLSIGYKQEFEPLESTGKSLGIDVGLKELAVCSDSQFKKNINKTKNIKRLEKKLKREQRKLSRKLEDNTKNYDKNRKPIYKEPLKNMKNIQKQNQTIRNLYKKLNNIRTNHLHQTSSEIVKTKPSRIVMEDLNVKGMMKNRHLAKAIAKQKLHEFKRQIKYKCEKYGIEFVEADKWFASSKTCSCCGEIKSDLKLKDRLFLCECGFKIDRDLNASINLANYQIQRA

SEQ ID NO: 64009 - protein, 420 aa, Clostridium sp.
MKLSFKFKPSFTVEQLSIIQELSFHTTKLYNIVNYDLREKGFKSYVDIENIYKTNWHSDFLHSHTRQHCFKMVEQNWKSYFASIKDYKENPHKYKGLPKPPKFKNMEDKKNEIVFTNLAIRFRENTFMLSLSKAIQKTFEVESLNFEVSNKLQSLINWNELQQVRIKWDHSLKQWYLIIIYNKQELEPVNNINIMAIDLGLDNLATITFKEGNETYLFCGKKLKGINAFVNKKIAYYQSIEMKKIGSDKFKNTKMIHSLRRYRNNYVNDYLHKTSKNIIDKAIEHKVKKIVIGKIKGIKQDMNYNKSFVQIPIQRLTELIKYKAELQGIEVKFKEESYTSGCSALDLEPIDKNHYNKRRRVVRGLFKSSFGLVNSDVNGSLNILRKEEKCIPEIVQAMRDKGSVSSPLRVRVACLGGSSR

SEQ ID NO: 64010 - protein, 186 aa, unknown
  TnpB Polypeptide
MDSKGTIIGRRFKKLPVEQDSLERALRRIRKAQSNGAKRMPRLWARAKGVNKDIAVKTAGFIMTVANEFKVDVIVMEHLDLAGRKRGSKRQRLHHWRAKYVQQIVEHQAHRCGTRIRRVCAWNTSKLAFDGTGEVTRDTDNYSMCTFQTGEALFVRPVSFVQHRSSVLPQGVREVHFGNEMAAHCG

SEQ ID NO: 64011 - protein, 401 aa, Anabaena sp.
MKTSYQYKINPTALQAEKIDKTLEMLRCQYNYLLVQRFDWYEQNRCPIDRCPLICHLPELKEQPNYYNQKASLVQLKVDRPWYKDIHSQVLQEVPKKVELAFDRWLKGDINGKKSGKPRFKSKGQYKTFTYTQFKRHHFANNKITLSKIGEVKLIVHRPIPDGFDIKTVSVTRKADGYYVTLNLDDQTVPTVKPDFNPDNIVAIDVGLIDFYVASDGSRIAAPKYLRKAERKLKSAQRRVSRRKKGSNRRKKAIQKLGKQHKKVADTRRDFHFKTAKSLLDKYDVVAVEKLNIKGLAKTRLAKSVNDAGWGQFITILSNKAENAGLKVIAVKSNGTSQECSSCGHKVKKPLSERMHNCPVCHTSICRDLNAAINIKARGTHALKAQLMSSREESLRSPHSP

SEQ ID NO: 64012 - protein, 360 aa, unknown
  TnpB Polypeptide
MFNNYLKGYTKCPRYLNKHGYYLLYTEQIRVKKINNKKYIDLPLSNITRTSKIFEEKSEDELINYFISESGIKKKMDISFKIPKHLYNKVIKAFRIIPCSKARKYKIELTYIEKEDPINQVKEENYLSIDLGINNLASFVITKSNESFVIDGKYLKSVNQYYNKQIAHYNSKKKEKEYTLKQTRITEKRNRRIEDYLNKTTRYIINTAIKEKVSEIIIGWNRGMKEKGIKNKELTNLEKQRINQTIIQIPIGRLKEKIIYQARIKNIKCTIINESYTSKCSFYDSEEIGYHNKYLGERIKRGLYETKEKRIVNADINGALNILKKSKIDNYQLIDNLRNRGITLPKRVPSKVILGESIVF

SEQ ID NO: 64013 - protein, 379 aa, unknown
  TnpB Polypeptide
MKIIKALKMRIYPNKEQALKIDKTIGSCRYVYNHMLARNNKIYARRNEHLSYYDMQNLLPHMKEYLPWLKESDSQALKYACRQVNKAFDGFFKKRTNFPKFHSKRTSRQSYTTTNKAYIDYNPDERKVRLPFLGWMCCSDNRILKDCTFKQATVSKKNGRYYVSITYSIEKNVVPVPVSENQALGLDYKSDGLYVDSESNAPDTPHWLRLAQSKLKKEQRKLRNKVGSKKGEPKSHNYSKQLQKVQNLYEHIANQRLDYLHKESTRLADQYDAILIEDLNMKAIANKGFGNGKATLDNGWGMFVTMLDYKLKERGKCLQKVDKWYPSSQTCSVCGCMNEDVKDLSIRKWICPHCGAEHDRDINAAINIKQEGLRLLEVI

SEQ ID NO: 64014 - protein, 369 aa, unknown
  TnpB Polypeptide
MNKVFRYRLYPTRAQETALNHTLDLCRWVYNETLATRRNAYEATKIFPYSKHTLYSRYDTQRLLLLWKEQQPTLTSVYSQVLQEIQYRVDLAFKAFFRRVKAGEKAGYPRFKGKGWYDSFTYPQSGFALDGSTLQLSKIGSVKIKLHRPIAGEIKRLNIKRSSTGKWFACFTVECEPNILEHTNDAAVGIDVGLTSFATLSNGEHINNPRFFRAEEKQLAKAQRKKSKKVVAKVHERIANKRSNFAHQLSRKLVNTYGVIAFEDLNIKGMMQNRYLAKSIGDVAWSQFIAFTQNKAENAGSVVVMVDPKNTTQECSRCGAIVKKELKDRTHSCDCGLVLDRDENAAKNILTRGLSCFRQQTAIEAACVS

SEQ ID NO: 64015 - protein, 442 aa, unknown
  TnpB Polypeptide
MITISHKIELVPNNKQKSYFRKAFGCARLAYNWGLAEWQRRYKEGDKVDAYGLKKAFNAIKKEEFPFVVEVTKYATQQPFINLGKAFKKFFEDLKKGIVSYPQFKRKKDNEGSFYIGGDQVSLSDTNLNSKAFRKIPHNGKQRHQYLKVPNLGWVKMTKRLRFIGKINGVVISQQGDKYFASFSVQITEEEYKRTHPKAFSDKANRKVGIDLGIKSALILSDGVAVDNPKPLNKNLRKIKRISRQLDKRVHARNKQERLEGKKKSNNYRKLSVRLSNAQRKVANIRRDFTQKVTTILTTHYAHIALEDLNVKGMMQNHRLAQSVSDVAFGELCRQIEYKSMLNGIKVLKADRFYPSSKTCSVCGHIKQDLKLSDRTYHCSNCGAIIDRDYNASLNLLSLIIKKQIGADYPKSTPEDLTALLFRFARNGIATSKVETGRQHKL

SEQ ID NO: 64016 - protein, 402 aa, Pusillimonas sp.
MQRLQAFKYELMPNGRQQRQMRRFVGSCRFVFNRALALQKQRHEQGEKKLGYARLCKELTAWKRQAETAWLSDTPSQSLQQALKDLERAYVNFFEKRADFPRFKKKGQSDRFRYPQGIKLDQANSQIFLPKLGWLRYRNSRTVLGTVKNVTVSLSGGKWFVSIQTEREVEQPLPQSTTAVGIDMGIARFATLSDGSHFEPLNSFKRHETALRKAQQAMSRKTKFSNNWKKAKTRVQKIHSRVKNARRDYLHKATTTISQNHAMVCIEDLQVRNMSQSAAGNTDAPGKNVRAKSGLNKAILDQGWFEFRRQLDYKLAWNGGYLIAVPPQNTSRTCPACGHGSKDNRQTQAQFACMGCGFEENADLVGAINVLRAGHARFACEVSGAVRPPAAGTRRGESAPVG

SEQ ID NO: 64017 - protein, 449 aa, unknown
  TnpB Polypeptide
MVEVANEFAVRMARHCMQWLGANTMSIVISDMPTRGIAFCIKDGLPPEARFLLEDFRLAVNEAIRAGLRAKVSSRNALSKIAYKDFRKEHPKMYAQHIVSAFEVAGGVLKNHRRRLRNSIASQVPFVRRLMLKTENQAYRLDREHGVIDLPIMAGCHVKLELKVSDYHRRYLDDSSLVLGSLTLLPDRAIVAFRKEAPKSYAPESALSLDTNERSLDGVLVERDSAVPVMVSFPDVAIVQQKHHERRRRLQKKKVHDRRMSRRLCGREGRREHDRIQNRLHKVADYVLSFAAAKRSAIVLEDLKGIKHKKNKDLNRRLSMWPRRKLHQIIEYKAQWRGIPVVKVDPRYSSRKCPICGRIQDSRMGTVFECECGWRLDRHINASLNLLQTAVSKGLEVAGGLWFNPGAFQHDVMMILYDPATGARSEPNGTSCSGEATLPSPSNNATEPK

SEQ ID NO: 64018 - protein, 383 aa, unknown
  TnpB Polypeptide
VLKILKGYIFRLYPNKEQKILIEKSFGCSRYIYNHFLEKTNGKKYINASNYIKELSILSNEKEWLKEVDGCLLRCTIFNLENALNNHNKGNREYPKFKSKIKSKNSYKTNNIASVYKGKIYNSIELNLKEHTIKLPKLKEIKIRGYRNLDKIDGRILNATIYKEVDKYYVSVCVEELIEIKEVPIRSVIGIDVGLKELLATSDGTIIKNMKFIEKYERKLKGLNRWLSRCQKESKNREKVKKKIQEVYSKLKNARKYFLHKISKQLVEENELIVTEKLKINELVQNKKLSKRIYDASWHELIRQLTYKSKWAGKICYQIGTYYPSSQTCNRCGSINKNVKDLKIREWECPKCTNINNRDINASINIMWEGIKANMKTISKRAL

SEQ ID NO: 64019 - protein, 544 aa, Streptomyces sp.
VGGLRELAAPFVVPGPAGVAVRDRLRVSAVDAAVLAEVGVFLGSLAGGDLAERCRQGLAHDAAGWAVRKRELTGKSSARWAGSITKATHDQWALARRGQAAYRGWLRGQIASIEARLARPLGAKANKREGLVRGYGSRGEWHAKSRRLHTLKDRLAAVEADWAAGRVHMVRGGRQLAHVRHHLAASGLSERAWRERWQAERMFLAADGESGKRFGNETIRITDTGRVSIKLPAPLAHLANAPHGRYLLDATVRFRHRGQEWLDRVTANRAVAYRIHHDVLRGRWYVTASWQRAAAPVVALDAVLARGVVGVDMNDDHLAAWHLDTHGNPVGEPRRFFFDLTGSSELRDAQIRHALTRLLHHARRCGAAAIAIEDLDFTDGTSREKHGRNKQFRRLLSRFPTAKLKARLVSMAAEQDIAIVAVDAAYTSRWGAQHWQQPLTTPTRKISRHDAASIAVGRRALGHPIRRRTAPPHDDRSDRRGHRTVQAPSGTRRREETRPHLPGPHTRCVSPVVERKRGTSLPSTVRGSATEQQSWQQDSLPLSV

SEQ ID NO: 64020 - protein, 246 aa, unknown
  TnpB Polypeptide
MEQITITAKVQIVATDTDKVLLNKTMSVYCDACNYVSDYVFRTHDLKQFSLNKILYSTLREKFSLKSQMAQSVFKTVIARYKTIFENQNEWIKPSFKKPQYDLVWNRDYSLTQNCFSVNTLNGRVKLPYFAEGMSKYFNHSIYKFGTAKLVNKHGKYYLHIPVTYEVEESNISDICNVVGIDRGINFVVATYDSKHKSGFVSGKAIKQKRANYSRIRKRTSNATYAILKAKTKSYRSARKPLDAGY

SEQ ID NO: 64021 - protein, 188 aa, unknown
  TnpB Polypeptide
MTVNISLDLLVVKLLNRNGLIIPGFVKELQMRHTPSSRRRLKAIGQRENRWMQDINHQVSKALATGNPKHTLFVLEDLTGIRNVTERVKTKNRYVSVSWSFYDLEQKLIYKAKQNQSSVIKVDPRYTSQCCPACGHTEKSNRNKKIHLFTCKNCGYTSNDDRIGAMNLYRMGINYLADSQVPNTVVTE

SEQ ID NO: 64022 - protein, 383 aa, unknown
  TnpB Polypeptide
LFAYNRESAKAWNDCLAYAREYHKSNGKWIDKSDLQKLTKGRYHLHSQSIQSIQERYLDARTNAYRAKQVGHGHVRYPWRQKKNYPTRWKKDGFTIQPNGKIMLSMGIHNGKREKPITVHIHRIPPGKVKEIELVWDRKLMLAISCDDSTHPRENPNQGIAAIDMGEIHGIAAVADTGEALIVTSRKLRSVKRLRNKKFKELYKKRSRCKKGSRKWKKYTRAIARTGSKTDNQQRDILHKISRKFVAWASGQGVNTAIVGDVEGVQRNTSRRKKKNIKQKLRSHGLNQKISQWPFGLLLAYLTYKLAALGIDLLKIDESYTTQTCPVCGRKKKPSGRMYHCHCGYTCHRDVHGARNILSRHKHGEIRNLDWKVNKIKYLRPAS

SEQ ID NO: 64023 - protein, 565 aa, unknown
  TnpB Polypeptide
LKHFKSSGGSGVFGKEKWVIEKKKQLERNKFSKSGSGRKRTIDEATGKVIITEEDLTYFRTVKFRVRFSEPQRQRKILNQWCGAARYTYNAALEGIQKENMPMKIESLRDRYVVAKAATCQRGALPKTEEGLEAKRKRDDAKKAAKERVNYETGELVKAHPWLAHTPPPIRSEAVSKLLKSNWALEKKAEIARSEGNAKRSNQEWQFSKKSKSEPSHSTLSIEHLKLREFEVIDRPTKASSPNAEGRRRKWTQFRMFDSTHSGPRFKCSDGKTLGLLYLTEDLSDPKFGGDGVSPISINHDCKLTRDLRGRFFLHVPVPTALPNPKPISEREMCAIDPGARTPFEVWSPTQYGSFGNDDFKRIILPLCEQMDVLIGRRDRATSKWQRYEWVENKVQGDGPLKSYTRYISRLELRIHKLRDRIQNLVNDLHKRVARSLLAEFDTVILPVFETSNMVEHVNEETGRRRVLNSKTVRNLLTWSHWKFREYLKHKALVLGKEVVVVDESYTTKGCSRCGLCTDIGGSKTFKCANPNCGFTAPRDAKSARDIFCKHIVSMGSIASAQQQH

SEQ ID NO: 64024 - protein, 427 aa, unknown
  TnpB Polypeptide
MNLTEQTIVKYSDEYYKLFDELCFKAKNLYNAALYKIRQAYFEYEATMSYNSIDKVFKRKESKETEFPDDYAEMPMASSAQGTLKLVMQNWNSFWASVKEYAKHPEKFTGRPQMPKYLHKTKGRAIVYLTNQNVKVKDGVLHFPKSFCGFTVPTNVSKADIRLVQIVPKNRHFVVEVVYETQETPKKPDNSRYIGVDLGVDNFAAVVSNDGSQPVLINGKGLKSLNKRWNKRISYLREVETAMNGEWIFTSTGKAKISKQTKQQTILTNKRNNQVKDFCHKASKKIVELALERGCNTIVVGKNTDWKQESEMSKVTNQSFVQIPHAVFIDMLEYKCQRYGLNFAVTEEAHTSKTSWLDNEIPCHHDTYVGKRVKRGLFRSAKRLLINADVNGALQIVRKVFPKAGISNANSSDGVWAFGQPVRVNII

SEQ ID NO: 64025 - protein, 472 aa, Halobacteriales sp.
MAAQTKEERTRTNTFRLAPREDWKRVCLIELLDSAAALVNIVTYHRRQTYFDPDKTRSDIWNAITKTEIRSRFQPVLGRAITDKLLDKCDETWDAFFTQLDDCYDGEREDKPSPPGYWKDDGSRVLKTVVRNDAYTIEWGEHSRIELALGSELKEKYGIPLNKRLRVPVRGNPKWDGKSGRLELEYDRITESFTVHQPVTFRHDTIRATPSSGGDAVAAVDVGANNFVAVTSSDGHQAVFHARPLFHHFHRYTERIADLQSQLSDDRYSTRLIERLYDERGAHRNHAQDALVRHLSRLFEEWGVSEVYVGELDDVREEHWSAIVNEKTDLFWAHGRFCRRMQTVLEAECGITVREESEAGTSSRCPRCGEDDHVRRNGDVFQCGSCGFEGHSDVVGSENFLQNVMRDDVELAGSMARPAVSRENTTERGHATVPRLEWDDHRWRRRDRWTKEEPANQSTREGNIASGISGPA

SEQ ID NO: 64026 - protein, 489 aa, unknown
  TnpB Polypeptide
MQQVCFIKQDYDRTVKPFWNDACHNLSDNLFLPYADNNKTNFTIHYLSSFIRKLTPVYTSHFPLSFKSYTLSVPDVIVKAVKKMRFYFNSSKQKTQYEQMMVVARRAYNLTVDMCNNGLYNDEKGKSLDLRIPVRNKVREEINGSDTVFDANVCDQAVLEAIGDFIKVCNSNKKKKSKVSQAFNHSSYSKLGFKSRKYKKQTFTHPRMGKKGVCFDSLGKIKVTEKLPDECYGKNVKVTMDHGRWFICVQKHIVVKGNHLGCAESQGQDKMVAEKEVRVIALDPGSRTFVTGFNEHEVMVYGKDYSVKCLLPLAKKMRRLYSLREKLSQHKLYKKELSDNPQWIKDRLRYIEKNLNRLACKRQDRVNHLHRTVAYSIVRNYDVIYLPEYETKPMVKTKGRKIGRKAVHDMLSLSHYKFKEFLLWTAKKYGKEVIIVNESYTSKTQSWNGVVNEKLGSSRTMKDGTRIIDRDINGARNIYLKHVSQLTNN

SEQ ID NO: 64027 - protein, 474 aa, unknown
  TnpB Polypeptide
MKNTVPMVVSEKSFREVFSFAEDNSALAKNLYNAALFRIRQVFTGWGKEKLTDLQKLVFDELEQTKAVYEGFTPRRVLSYQALLKILRATSNPDYFAGLPMQTAEDTVKEAVKNFRKWLDNLKLYKQDPSLFTGKPRMPKYCRSTHRTFKVTNQDAVLYPKADGGTEGCSLKLPGFKKKERIPLNYIDQGSNLREITFKPYYDKYIMSFVIEDMAAPFYPDMPYMAGLDLGTDNIAAIACTDGTSVVYKGGAVLSENQFFAKQRAQAVSIITRGHEHKHADSAYLEALSREHDCFLKDQMHKISTDIIRYCVDHRVGILVIGVNKLWKQNTNMGKKNNQKFVSIPHYRLRQMIEYKALRAGIDVVEQEESYTSKADVTASDFMPVYGKVKARPVFSGRRIERGMYLCRDGYCINADCNGAANILRKAVPDAWKGFKDFHFLATPASRGFHQLNPAGRNNSHKQHPDWKILSPAV

SEQ ID NO: 64028 - protein, 160 aa, unknown
  TnpB Polypeptide
MLAKEYGTVVVEDLFVAGMVRNHTLARHVADASFGQSRRQLEYKTVWNGGRMVVADRWFPSSKTCSGCGAVKAKLALSERTYACTMCGLVLDRDVNAARNLAALGEAMVAGSRPETLNGRGGEGVSALPAKRQPGTAPAGKAGTVQPQGRTALREPTNAH

SEQ ID NO: 64029 - protein, 199 aa, Rhodococcus sp.
MFPRSPGRRSRDPPDGPQVARQPDPIVRVIRWDASGPDRRSLRKRIVERHSACEAVRHFTSASAEAGPFMAGGSRSALRGRAGTARGIVLEDLSGIRERVRLAKAQRQQLHSWAYAQLRDFVTYKAASVGVPVEVINPRNTSRTCYPCGHVDKANRITQDRFVCRVCGHVDQADHNAALNIGYLGYVKYMTTTHGYWAA

SEQ ID NO: 64030 - protein, 327 aa, Geitlerinema sp.
LLGFMAKALCLTTVTLESRARSIPPQPRLSGVFTSCRKTQLDNGEAREDILRSKINRVRVVRRADGYYAQFGLDLERKEPGTYTGNAIGIDLGLKFFIKDQNDNAVIYPQYLRKSEKRLKRLQCRLSRQHQKGKKQSSNYHKIRRQLGRQHLTVYRQRKDWAIKLARALVSSNDVVVYEDLKVRNLVKNHHLAKSISDAAWSQFTDFLDYYGQVWGKAVVAVNPAFTSQDCHNCGHRAKKSLSTRTHECPNCGIKMCRDKNAALNILKRGMEILGMERSNSIGGHPKTASKEGTTGETSTSADKGKPESVSGVAEPVTALEQESSPF

SEQ ID NO: 64031 - protein, 385 aa, unknown
  TnpB Polypeptide
MSEVTLSVPFRYRASGDVRKLLEDFRQMVNFCVEKALETGVTSFARLRNLIYEEFRARWPGYASHWCHSAVRVATSMLKAWRNRCRKGQADPDKPPRARKLFMRLDDHVARFKGDRVVVTVAPRQHVELELVIGYYQRKFIKAWEHGEIRVGEIVVNEEYVLIPFKKTVDLTKPDEWIALDMNETNITGVSTNPHAYRWDLSELRRIYWVYHEIRRRIQAIKGPRRKRLLRKYSRRLRNRTRDLCHKVSKAVVDTAEELRAGVIMENLNGIKRKRMSRKMNRRLHGFWPVRRLQFYIEYKAKLRGLPIHYVNPKGTSSLCPICDSKLVSNGRRLKCLNCRLEGDRDLIACLNILRMWGVSVPPKRLQMKPLADGGRFPLQMCHML

SEQ ID NO: 64032 - protein, 404 aa, Oscillatoriales sp.
MLTVTHEYKLRPTKSQVQIFEIWLSVCRQVYNYALRERKDWVNSRKSSVNACSIVGEYIISPDTPRPTYASQCKGLSEAKKHCPELKTPHSQVLQQTLKVLESAFVAMWDRGHGFPRFKKRMRSFVFPAVKDAAVENGKVNLPKIGWVRMKMSRPTPEGFLLKQIRVVKRASGYFVMLTYQLAVNLPARPPSGHPLGVDIGLDKYLATSDGELVNRPRFFQALHRELKSLQRRLKHQRKGSNNWLNLQKKIARIHQKISDTRKDWHYKLAHRLCDQAGMIFVEDINFKAWAKGMFGKHTLDAAYGQFFSILSHVCWKRGVYFARVDKNYTSQICPQCGTHTGKKTLDVRIHSCQSCGYTTHRDTAAAQVIRDRGILAVGQPVSKTASGGVLSGIDSNIGLESSL

SEQ ID NO: 64033 - protein, 414 aa, unknown
  TnpB Polypeptide
MMLLKRVVRTETMRIPLSDPLSSMCHVSKNLYNTTNYMMRQEFFHEKRVKTTNYDMNHALKDDLNFMVLPSQTAQQTIGMVYRNWKSFFRSLKEYRKVPSKFTGRPKIPKYLKKNGEYLLLFSNQQCRITRSGILKFPKKMSLEIRTRFDHTLDLREVRIIPRGVGYDIQIIYRKEVYVDEKENMNPKRIMGIDIGVRNLVTIANNFSEQGIAVRAGPLRSMNARFNMIVSSLMSVYDRQDDERNSEMKLKRITDSRNFWMKDMMHKISTWIVNYMSSLNVYAVAIGRNPGWKQNVRMGKRNNRIFVQIPFATLISQIQYKAEEKGIAVILTEEDHTSKCSFLDTEEIRHHAEYKGKRVSRGIFRSSNGTLINADLNAAYKIIKRVFPDAFADGIRGAGLHPVGLSMKDMINPQ

SEQ ID NO: 64034 - protein, 417 aa, unknown
  TnpB Polypeptide
MLEEKNLKIKDTLRATKERRSNMDCYVFSVKIQENRLSKAKLEKLIRCFLEAKWLYNAVLSSTEDFPRSGIKTISIKVKDDFETREIKNLSAQMKQSVVDSVKTNVINLSKAKKKGLKVGRLKFKKECNEIDLPQFGKTYKIKSRNKLSIEKIGVLVVNGLEQINLDEVEFANAKLIQKSSGFYINITVYTKKQQEAQTEKEILGLDMGIKDQLTFSNGVKVNFYLEESEQLKGLMRKLSRQTKGSNQYKQTLARIKRIYEHYNNKKKDVVNKLNSVLEKNYIICFQDELLNQWKQKKSKRKFSFGRKVQHGILGRVKDKLKNNSTNVMLESSVPTTQTCPECGCLTKHSLDKRVYHCNHCGFECFDRDVHSANMMVLLSGYGTYRSLNTDAVSTEKMVGLLDSLTNLGVVVTTNSM

SEQ ID NO: 64035 - protein, 401 aa, Cephaloticoccus sp.
  misc_feature (401)..(401): Xaa can be any naturally occurring amino acid
MQRLQAYKYELMPDGQQKRSMSRFAGSCRFVYNKGLALQKERYEAGEEKHSYSALCKLLTQWRASFETPWLCDSPSQALQQSLKDLERAYANFFAKRTEFPRFKRKGVRDSFRYPQPQQIKLDEANSRIFLPKLGWMRYRNSRNIQGVLRNVTVLLRAGKWFVSIQTEREVDRPLPKSTSAIGIDVGIVRFATFSDGSYLAPLSSFKWHEAALRKAQQSLSRKEKFSSNWRKAKRKVQRLHARIGNARHDYLHKATTTISKNHAMVCIEDLQVRNMSKSATGTSEAPGRNVRAKSGLNKAILDQGWFEFRRQLQYKLDWNGGMLIAVPPQNTSRTCPACGHVSKDNRQTQAGFVCVECGYKNNADVVGAINVLRAGHARFACEVNPKRDQQQESAEVIQQX

SEQ ID NO: 64036 - protein, 486 aa, Cephaloticoccus sp.
VVIFAVELNKFGFKVTADALEDGAHVVQDCFGEHLTAIFSHKDQVDVHGRSTVTSVSNFLVVFHRQNYILAGMQRLQAYKYELMPDGQQKRSMSRFAGSCRFVYNKGLALQKERYEAGEEKHSYSALCKLLTQWRASFETPWLCDSPSQALQQSLKDLERAYANFFAKRTEFPRFKRKGVRDSFRYPQPQQIKLDEANSRIFLPKLGWMRYRNSRNIQGVLRNVTVLLRAGKWFVSIQTEREVDRPLPKSTSAIGIDVGIVRFATFSDGSYLAPLSSFKWHEAALRKAQQSLSRKEKFSSNWRKAKRKVQRLHARIGNARHDYLHKATTTISKNHAMVCIEDLQVRNMSKSATGTSEAPGRNVRAKSGLNKAILDQGWFEFRRQLQYKLDWNGGMLIAVPPQNTSRTCPACGHVSKDNRQTQAGFVCVECGYKNNADVVGAINVLRAGHARFACEVNPKRDQQQESAEVIQQSGNASLDAVGIPRL

SEQ ID NO: 64037 - protein, 375 aa, Soehngenia sp.
MIKAFKIRLLPTPEQEIIMNKTVGVARFTYNWGVSKWQEMYKVGLNPSGIKIKKIFNNTTKKDIQYHWLNEVSSHAISQAFHDLQDAFDRFFIGKSKYPRFKAKKSSRHSFYVRYDRMNIRDDTVNMERIGKVGFTTNYKLPIQKSYINPRCHFDGKYWYLTFGFEQGENQVELNEDLSIGIDLGIKNLAVISSIDSPIKNINKSSTVKKLEKKLKRLQRKCSRKYEMNKKDKQFIKTKNIIKLEQEIKLIHRRLTNIRTNHIHQATNMIVKQKPYRIVMEDLNISGMMKNKHLSKSMQDQKLKEFARQIKYKSEFNGIEFVTADRFFPSSKMCSSCGNIKADLKLSDRIYKCSCGLEIDRDKNASINLSRYKLV

SEQ ID NO: 64038 - protein, 397 aa, Proteobacteria sp.
MQRTVKLKLQPTPEQAQALADTRQQFTQAFNDVCAYGWVQTEKNGVRLHHATYYTEKAACSGLVSDLVIQVRVKATEALKSAFARQKAGLQVSCPQSRACPPRYNVHPYTLSWEAQTVRLSTVGGRMTVQFTCPDYAVKYAGLPVDTADALQYPDGSWWLHVVVTLETPAAAPTDEVIGIDLGLAHPAVTSGNQFLGKKAWKATEGRSFRLTRRLQSCGTKSAKRHLRRIRHKHARFRRDCDHMLSQQLTDAAAAGGTLVLENLTNIRQRMRARRKTATKRRMHSWSFAQLTSFLTYKAEERGVTVARVDPRHTSQRCSACGHRARNNRRSQSRFVCRACGFELHADLNAARNIAAKYRASRGTSSTGAPLSTGVSSPVRSVVRQHASPEVRDKLSP

SEQ ID NO: 64039 - protein, 413 aa, unknown
  TnpB Polypeptide
MLVRGVVFPLASELPPEAKCLLQDFRLAVNEAIRAGLAGRVSSRNGISKLAYKALREEHPGMYAQHLVSSFEVAAAILKNHRRSLRKCGKAKTPFVRRLMMKAENQAYKLDRTRGLIDLPIRAGCHVELRLVVSRYHRRYLDDTTLSLGSLTILPERVIVAFRKEAPKPRAAACVLALDTNEGSLDGVSVKGDKCGGSSTIVKASFPDAAMIQQRHHDRRRRLQKKKAHDRRVGRILCRREGKREHDRVSYRMHQVANAIVKFAEEQSAAIVLEDLAGMRSEWSKELNRRLSLWPRRKLHQIIEYKAAWRGIPVMKVDPRYSSRRCPICGRIQHSRMGARDKEFRCECGWHLDRHINASLNLLQTAISKGLEVAGGLRFDPGALQHDVMMILYEPAMAARSEPNGTGQASAVA

SEQ ID NO: 64040 - protein, 194 aa, unknown
  TnpB Polypeptide
MILNGKPLKSINHDWNKRKAKHQSKLPKGVKTSKRIRNITNKRNRRVNDNLHKASRALVNELRRLSISKVIIGANNGWKKNIKLGKRNNQNFVQIPYSRFIEMITYKCQLTGIEVITGEESYTSLCSFLDNESVEKHNVYKGKRVKRGLFKSSNGTLINADANGAYNIMKKHLGITAEQLDLVQVCSTPKVLKF

SEQ ID NO: 64041 - protein, 422 aa, unknown
  TnpB Polypeptide
MSEGKNVKIKESLRATKERHSQMDCHIFCVKIQENRLSKAKLEKIIRCFLEAKWLYNAALSSTKNFPRSDIKTVVVKGKDAFEKREINTLSAQMKQDVVDSVKQNVFNLSKAKKAGLKVGRLRFKKECNEINLRQFGKTYKIKSHNKISVQNIGVLVVSGLEQINLDEVEFANAKLIQKPSGFYIHLTVYTKKQFQPETSKEVLGLDMGIKDQLTFSNGVKVNFYLEESEQLKGLMRKLARQTKGSNQYKQTLNRIKRIYEHQNNKKNDVVNKVNSVLKTNYIICFQDELLSLWQQRKSNPKFSFGKQVQHGILGRVKDTLKKNSSNVMLESSVPTTQTCPECGCLTKHGLDKRIYHCNHCGFENKDRDIHSAKNMILLSGYGTYRSLNTDTVSINKLVSLLANLENIGVVVTTNSMEAGYL

SEQ ID NO: 64042 - protein, 338 aa, unknown
  TnpB Polypeptide
MIVYKPVMTKKELKEIQEIVLNNKEEVLINSPLKRAIITKENQNLEKAYKNFLKNKDFGFPKYKCKSNPVQSYTTNNQNTIYIKDRYIKLPKLKSLVKIKLHKKIKGIIKSVTISKNSLNHYFSSILCEEEIEEFAKTNKNIGIDLGIKEFATMSDCTKVENLKLSKEYEKKLKREQRKLSRRCKFAKDSDKKLSDSRNYQKQKKKVVKIHNKIRNKRKDFINKLSTKIINNHDIICIEDLNIKGMLKNHKLAKSISDVSWSEFRRQLEYKANWYGRKIVKVPTFYPSSKTCSSCGNIKETLKLSERIYHCECCGLEIDRDYNASINLEKAKIYKVIA

SEQ ID NO: 64043 - protein, 349 aa, unknown
  TnpB Polypeptide
MIRRSQINIDYANKGKKDQLDLFCKEAVCVVNLYIDLLWEQDDFNSKFVKVKVDTWLSARMQQCLGKQALEIVKSQRKRKKKTKPVFKRHSFNLDSRFITIAQDVNSFDIWITIGSIGNRIKIILPGKKHKHFNKFADWNLKKSIRLRCVNGRYYIDVYFEKPSKNKKIFGREVGLDIGYKKLIATSDYRTYGHELEAIYQKISRKKQGSKAFKRSLVERDKKTNQIVNQLPLKRVKTLVVEDLKNLKQKTKGKLKKTFVNKMQRWSYRDVLDKLASLAKEIGFTLKKVNPAYTSQRCSACGVICKSNRQGEIYKCACGLFLDADVNASINILYLGAYSPQASYIKVNK

SEQ ID NO: 64044 - protein, 205 aa, unknown
  TnpB Polypeptide
LRSTRTGRERNRAGKHQLEIARVIQSVCGSVGLEELKKQGMFTRSRVWNRRISRSDWRSITRMLEGRMGEARVVELDPYGSSSFCSRCGWHNRDLNGADVFVCGGCGLRIDRQLNAAINLYMRLRFGYIVKWVGGKKSVELRMEGASRVAWWDRVVLPSLVGGCVLTGAERKTPDELVRGLHDAVRPKLYYAYDRYADAYLRIPT

SEQ ID NO: 64045 - protein, 286 aa, Scytonema sp.
MEQVLTLVCKLNPTPTQSEKLEVVLHAFAAACNYTNETIKPQITSKTTIQNVVYEDLRSLFGLAANLAVRACARVGANRLAAKRAGKPVKAFKPTSADYDARIFAFREKDWTVSLTTLEGREHIKIDAGNYQRGKLKGRKPTSAQLCKHRDGQYYIHIQLKNEVSDPQPTRKVIGVDFGRRDIAVTSNGDSWNGKQLTETRDKYSKVRESLQQKASTRTRSSRRRCRQVLVRLSGRERRFQAWVNHNISKTIIQQAKSEQALVAIEDLTGIRERTNQKTTQQYRTP

SEQ ID NO: 64046 - protein, 432 aa, unknown
  TnpB Polypeptide
MVVLAHKIRIYPTNEDIVNFKKYIGYKRYLYNKAIVVQKELYLKYKEEKAKFEDFDSLDDKEKKIFYNEYYPYMSLVRNHMVRTKEKWEYNYASKLVATAAGDVTNAVRNALNPKMPNHKMPKFKKKKNQKMSFSFEGIKINDKNELIIPKPHKSKLSGVTPENPITFSNIKLGEKLRFQGKLTGATINCTRNGKWFVSLTVKLDEEDEKKHRSKFNRDRTNKPECGIDANIRGFHYNELDGSYSDWKTTSNNLMKQYGLIKYYSKVLSKKRLGNKDWKQSKTYAKMRTKLSKSYAKAYNLQEENLNKFIQFLNNNYSSVTIEDLDVNSMKMNRRMCKSLHRSMFGRFKQKIETKFNQTNIEFIKADRFYPSTQRCSNCGMVKTGDDKLGLSGDKHGNKHNEYKCFHCNSELDRDDNAVENLIQYKKYYAKL

SEQ ID NO: 64047 - protein, 350 aa, Microcystis sp.
MRDMEKAYSFRFYPTPEQESLLRRTLGCVRLVYNKALHLRTQAWYERQERVGYTETSSMLTEWKKQEELEFLNEVSCVPLQQGLRHLQTAFTNFFAGRTKYPNFKKKHQGGSAEFTKSAFKFKDKQIYLAKCTEPLPIRWSRQIPEACDPSTVTVRLHPSGRWHISIRFDDPTIKPLPVTDKAIGIDLGISSLVITSDGDKVSNPEHFNKHYRRLRRASKSLSRKQKGSKNREKARIKVAKIHAQITDSRKDHLHKLTTQLVRENQTVVVENLAVKNMVKNPKLSQAISDVSWGEITRQLAYKCRWYGRNYIEIDRWFPSSKRCSNCGYIALENAVKCSRMGLSRLWDAP

SEQ ID NO: 64048 - protein, 413 aa, Halorubrum sp.
MEYSHRYYAYPTQEVAERLEHHLDIHRQLYNHIRWDYENSPEDDKPSEYDQNNKLPEWKRKWPMFSGLHSKAAQATVARFHHNLTVLSELKEKGYNVGRLKRQAPTDYRSVTYNQSGFDLDEKRGHDKYAYVRFSKIGWVKIRYSRPIPDHATIKEVTFKKERTDEWFVSFGLETDDSTLPEKPDMDSLDTSNSVGIDLGIQNYIHTSDGKTVDWLNLEDEYERLRREQRKLSRKEKGSNNYEKQRREVAKVKRHIKRKVLDYQHKITTWLVREYDAVFMEDLDVAGMLQGDGNARNKQDAAWRQFITLLEYKADLYGCHVEQVEPRGTTKECASCGVETAKPIWVREHSCPSCGFETDRDANAAMNVLQRGFEELGLGWPESTPVETVTATNTTQFESVSASDVIETGSLPS

SEQ ID NO: 64049 - protein, 345 aa, unknown
  TnpB Polypeptide
MVLTYRYRIKDATTSRYLERQTRAVNRVWNYCGEIHEAARRHNKRWPSGYDLINLTLGSSKLLGLHSDTVQAVCKQFAISRDARRKRPRWRGKKALGWIPFQASRAIHWDGDGVVTFLKRRYRLWLSRPLKGKLRCGSFAQDARGRWYLNLQVEAPENRDHGAGEVGIDLGVKSLAALSTGQKIEAPRFYRKNEQALALAQRAGRKARIRAIHAKITNCRKHFLHGLSTRIVGENRLICVGNVSPCGLARTSLAKSVFDAGWSQLRSQLRYKAVKHGAEYIEVDERLTTQVCSACGARGGPKGREDLVVRDWTCGGCGTSHDRDINSAINILVLGRNVGLQGTEI

SEQ ID NO: 64050 - protein, 202 aa, Moorea sp.
LLQRRASRKKKRSKNYEKAQIKVARLHHQIGNTRKDFHSLVAHQLCDQADSIFVEDIDYRVMAKGFLGKHSLDAGFGQFRELLKWVCWKRGKFFAEVDHKGTSKQCPECGTEWDNNLSIRWHTCDECGYSNNRDVASAEVMRNRGINKYPRTIGERKLSADKSVSAEASSAVHTGRSVLSGVLYLDKCYAETLNREVKKPAP

SEQ ID NO: 64051 - protein, 457 aa, unknown
  TnpB Polypeptide
MLTGIKLRANPTSNQKLILSQWMGCARLIWNAKVSEEKYYRTFARKYYPIGTFAPIDQKTSQFKSKELTPWLGKCPSQIIRNSAVNWFNTYNKFKKGACGKPKNKPKTDRGSIYLTREVFSFDTCEDGNMRLFIGTKTNNIGYLSFKKHHKFEIPNSLYIRKERGQYYVSFCYDNGINDSGLLSDKEHLNYLQGATKEYLEENVVGIDRGVAIPAHAGFKEFDFRDNQKKSLTKSERYIKRLQRRLAKQNKGSNRRNKTKHRIAKYHVKKANIRLDFCHKTSKTLVDSKFKVFVFEDLKTSSMTRKSKPKQGEKGKYLPNQAKAKAGLNKAILNAGWHFLESFTKYKAHQAGKAVFKVSAAYTSQECAKCDHTHPDNRKSQDKFVCGNCGNVDNADNNASKVIGKRAINLILDTGTVLSERGVLRSDIGRGGKSKTGKRKRKPAHANETSKKIRLAA

SEQ ID NO: 64052 - protein, 354 aa, unknown
  TnpB Polypeptide
MQVTKLIKAGILNLTKSKKEALDHEYNGFQWWMQFNIDKDILSQHKMAKGWYYDKKKIKYKDYPLVIPNEYTWFRKKETKLTPFWIKISVRKRKGVGVWLPIKPHKEPLDIKYLKDSLLIKNKKGNYELRLVYQYDVPQIKYKTITAIDLGERNIATVCNSKALKPVFYGRNIRGIRRHYAYLRKKLGNKKLLRKIKLIGNKEKRVVEQELHNIANEIVEFAKKMKSLIVVGDIKGIRKNRYRKLNRIIYTMPFFKLTKFIIYKANQQGIQVIKIDERNTSKTCSICSLIGIRKFQGLFKCNNCGYEVNADFNGCKNILKRSLDYMFNDGVIGLNPKISAMQEINPINFCKGNI

SEQ ID NO: 64053 - protein, 432 aa, unknown
  TnpB Polypeptide
MKQHSQATKDKIKASLQATRARHKTMNCKTYELKIVENKLSRSKRETLTRFFLEAKWMKNHIIAGSINQATPLMKTAKVKLPDGSYDERELKNLGSHMRQSILSGIKNDLKSLKETKNKGRKVGALKFCKEVKSIDLKEYGNTYKLDRTTQKAKIQKLGWVRVRGFDNIPENVEFANAKLIKKPDGYYLKITTYQDKKNTPQREYVAGSVIGIDFGLSTSITTSEGDKLELYVEETDRLKGLKKKRSRQVKGSNNYKKTCNLIKKEYQRLDNKKQDLAYKIVSDFSHYEHVFFQDEMISNWKKRDGYVRAGKKIQKGILGRVKALLRTKEWVTMLSRGDATTQTCVCGAKNKHQLDERIYFCSQCGYSDDRDIHAAKNMIRFGLSDNRYNTPQGLGRTPAEDATPILHFNYLKGSTSYNSKKQETNSSSVSW

SEQ ID NO: 64054 - protein, 238 aa, unknown
  TnpB Polypeptide
MISLWTVGGRKRLAFSVPDYFLGYFLNALFFDSLIVKERNGQLIGYLCMTLSKPAVKGSVLVGADRNETNLLVAMKGTGEVFFESGLKLRIWRKKHRKKVARLQRKLAERKAQHKDTRSVRRLLKRLSLRQRNFTKTYCQTVAKRFIAWAGTDAILALENLKFQQGKKGNEALNRRLHQFPHGLLLQCIRNKAEVLGIHCCWSALPSPRKPVPTVAIWATVNGIGFVALIVVSPCMPT

SEQ ID NO: 64055 - protein, 214 aa, unknown
  TnpB Polypeptide
LNGRTTLTQWHDNQQPRERGQQFQIPGKKGFPKFRKHRINLSVEYKTCGWKLSRDRLTITFTDGFEAGSFRMWGSRDLHYYQVEQIKRVRVVRRADGYYVQFCVDVERTEKHEFQNRMVGLDVGLLHFYTDSDGNIVENPRYLRKSERSLKRSQRRLSRKKKGSKNRVKARNKVGRKHLKVSRQRRDFVVKTARCVVQSSTRVLREAELHRLLA

SEQ ID NO: 64056 - protein, 246 aa, Chlorogloea sp.
MSVAPPFKTDKQSSRKEGGDWRLSNYFVHRVSQLMCYNVRMLKAFKYRFYPTSEQETLLRRTMGCARLVYNRALAARTEGWYERRERIGYADTSTMLTFWKKQEDLQFLNEVSCVPLQQGLRHLQKAFANFWTGTAKYPNFKKKHNGGSAEFTKSAFKWKDGQVFLAKCREALPIRWSRQLPKGCEPSTITVKLDASGRFHVSLLVDTFVEPLPKSNKSIGLDVGISSLIATSNGDKIANQGTLNG

SEQ ID NO: 64057 - protein, 280 aa, unknown
  TnpB Polypeptide
VYNDALAIYRDAHLAGLPRPQDVDKLVITQAKKTEERAWLLEVSNIILQQSYRDLQQAWSNFFDSLKGERKGKRVGFPKFKKKQSRQAIRFRVGGFSVHSCSVKLAKIGHVPMVVSRPLPSKPSSVTIIKDMAGRYFASFVAEVTPERPPIELEATSSSQVAASPIITEKSVGIDLGLTHFAILSDGEKVENPRLHKKQLKRIKRANRKLSRCKKDSNRRKVAKLKLARLHAKVKDSRADFLHKLTTRLVRENQTLAIEDLNVSGMVKNRKLSRAISDAR

SEQ ID NO: 64058 - protein, 377 aa, Okeania sp.
MKSVRTKLKLNNKQKTLLAQHAGYGRWCYNWGLSLWNQAYKDGYKPNGRKLREVFTNQTKPLYPWMKNLSSRVYQYAFLNLGEAFKRFFQGLGKYPKFKKKGRSDSFTIDRGGKPIELNGWNHKLPVIGIIKTYEPIEATTQKVTISRQAGDWYLSCSYSYTPTPTPKKTEVVGVDLGVKTLATLSTGVVFEGAKSYKKFEDKLSRLQYLNRNKIIGSANWKKAQLKIAVLHRRVANIRKDALHKLTTYLAKNHGTVVIEDLNVRGMLANDKLAKSISRQCFYEFRRQLGYKCQWYGCELVVEDRFFPSSKTCSNCGHVQDMPLNLRTYNCPECGLSIDRDLNASINLKKRVLNSEETSECKTHSRDAVGLIVNACG

SEQ ID NO: 64059 - protein, 355 aa, Anaerolineae sp.
VKLIAQIALKTTPEQADSLVRTLRMTNLACNWLSAVAYERCIFNRFGLQKAAYHNCRAQFAGLSSQMVIRCLAKVAASYAVKRDEQHTFKPTGAIAYDARILSFNLAKSSVSIWSVDGRQTLEFVCGERQRELLQGKRGESDLCLINGRWYLLVTCDVEQPPMVEVNDVLGIDLGIATLAADSDGTLFSGDKTNDLRRTYRHRRARLQKKGTKNAKRKLRQIRRRESRFAKHTNHVISKQIVIKAQSTGRAIALEELKGIRDRVKAGRRQRTKLHSWAFADLKAKIVYKAALMGIPVLFVDPRYTSQTCCPQCGCVDKRNRPNQATFRCIQCGHADHADTNAARNIRVRAAVNQP

SEQ ID NO: 64060 - protein, 421 aa, Anaerolineae sp.
LKPPPSGGQDFNLSTGFIQSNIRATICDVKLIAQIALKTTPEQADSLVRTLRMTNLACNWLSAVAYERCIFNRFGLQKAAYHNCRAQFAGLSSQMVIRCLAKVAASYAVKRDEQHTFKPTGAIAYDARILSFNLAKSSVSIWSVDGRQTLEFVCGERQRELLQGKRGESDLCLINGRWYLLVTCDVEQPPMVEVNDVLGIDLGIATLAADSDGTLFSGDKTNDLRRTYRHRRARLQKKGTKNAKRKLRQIRRRESRFAKHTNHVISKQIVIKAQSTGRAIALEELKGIRDRVKAGRRQRTKLHSWAFADLKAKIVYKAALMGIPVLFVDPRYTSQTCCPQCGCVDKRNRPNQATFRCIQCGHADHADTNAARNIRVRAAVNQPLESRRMPQAFAENCLSNQVADLAWQGGDFQSQAQSPRL

SEQ ID NO: 64061 - protein, 266 aa, Escherichia sp.
VKRLQAFKFQLRPGGQQECEMRRFAGACRFVFNRALARQNENHEAGNKYIPYGKMASWLVEWKNATETQWLKDSPSQPLQQSLKDLERAYKNFFRKRAAFPRFKKRGQNDAFRYPQGVKLDQENSRIFLPKLGWMRYRNSRQVTGVVKNVTVSQSCGKWYISIQTESEVSTPVHPSASMVGLDAGMAKLATLSDGTVFEPVNSFQKNQKKLARLQRQLSRKVKFSNNWQKQKRKIQRLHSWYRKYPQGLPSQSHNGRQQKPRNDSH

SEQ ID NO: 64062 - protein, 364 aa, unknown
  TnpB Polypeptide
VLAAEQIISTGRRGREARAERVAIEAVVAAGEVLSCRIVKTVIRSRATYRAQLVCAGHSPQRHPVGTGVVSLDLGPSTVAVVTAGTEGTLTGAGLTPLAAKLADTSPELRLLQRQADRQHRAGSPACFDYRGRHTSGRCQWRPRSTRSARTAAKVAELHRRRAGYRATSHGVLVNTWLAVGPHLRTEKLNYVAWQKNYPRSVRDRAPGLLIEMARRKAASAGGGLYEYSTWTTALSQTCVCGAQVKKELSLRTHRCGCGVVAQRDLFSAFLGLFVRPEPDMEDPEKMIDLLDVGQAYASWPAAHDMEWLPASETAVARPKRRGQVRPSRRSVARIKQRRLPPLPTSDGVVRHEPVYLGPTAVAA

SEQ ID NO: 64063 - protein, 405 aa, unknown
  TnpB Polypeptide
MREVKLFFALCWIALLMKENYFKERAILLAHKVEIRPNQEQEEYLLGAVGSRRFAYNHLVAYYNEHKKLTKTISTNLIKELRSKYEWLEDFSTRVIRNCVDDIDKAIKRAWNTQTVVERNRAIAKALTPKQKIKAFRLGMPQFAKKGINESFSIREKEKITIKDRKFKIEKMPFFIKMRNKIRFSGVVKQVTISMQGGRWFASFLIETTDKYEEKQKPSLDSVGVDVGIKELATLSNGVVFPKSQPLKRQLKKLRQLQKKLSRQIRYSNGYEITKAKIAKLHYFVNQKRKATIHELTNYLVSNFNRVAIEDLNVKGMIKNRKLAKAISDVGFGMFREILAYKCKLYGVKLVLVDRFFPSSKTCSRCGTIKDNLKLSDRVYNCNSCNLVIDRDLNASLNINGWRQV

SEQ ID NO: 64064 - protein, 391 aa, Nocardia sp.
MSSSVKRAFRYRFYPTAAQTIELERTFGCVRKVYNLALDARTAAWQRGERVNYVETSAMLTEWKRGDEFTYLNEVSSVPLQQTLRHLQTAFVNFWGKRARYPRFKSKKKSHNAAEYTRSGFRWHDGQLTLAKMSEPLRIVWSRPLPEGAEPSTVTVSKDAAGRYFVSMLCEDAAVGPLPALDAVVGIDAGLTHLLTLSTGEKITNPRHERNDRARLAKAQRALSRKQKGSSNRTKARLKVARIHARITDRRLDYLHKVTTRLVRENQTLVIEDLTVRNMVGNHSLARAISDASWSQFRSMLEYKAAWYGREVIAVDRWFPSSKLCSQCGALRDRMPLHVREWTCTCGASHDRDVNAAKNILAAGLAVTVCGDGVRPQRSTPGGQSSVKQKP

SEQ ID NO: 64065 - protein, 367 aa, unknown
  TnpB Polypeptide
MIKSFKVKLNPTEEQKQIFNKCFGLKRFIYNYCITRQNENYKAGNKFINKFELKKETIRLKEQYEWMKELPAKIIHQATFDACTAYEKFFRKLSKYPRYKSKKETYQSFWNPPDAIKFTKRKVMLQKIGWIELKERNRIPINAKYYQPTISFDGLNYWISVGVEICDNQENNTPKTESIGIDLGIKALATYSNGIINNKPNTKKVEKKLRRLQRSASKLYIKYRGKDKSKNLLKLEKEILKLHQRKTNILNDNIHKFTTNLIKVNPEWIAIEDLNVKGMMKNRCLSKSIANAKFYEIRRQLEYKCLWNNIPLVVVDRWFPSSKMCRMCGNIKSDLKLSNRVYKCECGHIEDRDIQASFNIRDWILSQ

SEQ ID NO: 64066 - protein, 448 aa, unknown
  TnpB Polypeptide
MYAVSTRLDMTDELRRYLEDYIAFYNSIERRVFYDICHGIPSEMGMSRYISHICSSYGILKRTANSIRFDMQGRINAYLELKKTELSQISIKIQSIRKKIVKLESCVSEFKPLARNNTLDKKGLSEYKNMRSSLYYQKNRLNKLCQRKSVLEQQIKDKAVSLCFGTKKLFDAQNRLDGNGFRSHDGWLHIFQNRRDSGVFFLGSSDESCGNQILQIKPCEDGFLMQLRKDKPYEVDGKHLFTNIKFRYMENEIISALGDNRPMTYRISRKGRKWYLTVMFYINTNIITDSESGVIGIDYNDGFMELVETDKSGNMVNAEHVSLECHGAGSKAESEIKEKISRIVKMASSKKKDIVIEDLDFKKKKAKQNKGENAGYNRMLHLFDYHRYAFWLENLCIKYGVRLTKVNPAYTSVIGKKKYSNSRKLTVHRAAAFVIARRGQRFCDKLAA

SEQ ID NO: 64067 - protein, 371 aa, unknown
  TnpB Polypeptide
MKVVYKTYKFRIYPNKEQITLINKTIGCSRFVFNYFLDQWNKIYKETGKGLSYTKCSAELTKLKKEFVWLKEVDSVALQSSLENLSDAFNRFFNKQNDKPKFKSKKNPVQSYKTKFNKTSSGGSIRIEGNKILLPKLKWVKFAKSREVEGSIVSVTVRKNPTGKYFVSVCCAVKIQELPTNDHAIGIDLGIKNFAITSDGEVIGNPKFLRKYEAKLIKEQRKLSRKKVGGSNWKKQKLKVAKIYEKIANLRNDFLHKLSTRLIRENQVICLEDLQVKNMLQNHKLAKSILDVSWSEFRRMLEYKAKWYGRTISVVGKTFASSQTCSCCGYKNKEVKNLGLREWTCPECGTYHDRDINAAINILNEGLRLLS

SEQ ID NO: 64068 - protein, 402 aa, Streptomyces sp.
VIRAYKFLLRPTARQTVALGEMLRDHCSLYNGALQERRDAYRHTSKTSIKYGDQSAQLKSIRAFDPERQGRWSFSSQQATLRRLDKAFAAFFRRVRAGQTPGYPRFKGAGHFDTVTFPKDGDGCRWDSTPHDAQTRVRLQGVGHVRVHRHRPVQGRVKTITVKREGNRWYVVLACDQVPAEELPPTGRSVGIDMGTVHFLTTSGGEHVANPRFLTAMADELAQAQRHLATFPQRIRQRTKAHRAAARKVAKLHGKIRRQRTDFHHKTARALVTGHDVIAHERLNTAGMTKAPAPRPDPDRPSGFLPNGAAAKAGLNRSILDTGWAQFLKILANKAESAGRRTVPVDARNTSRTCPACGHVAKENRVTQARFRCTACGFAANADHVGATNVLNRAGLALCAAA

SEQ ID NO: 64069 - protein, 524 aa, unknown
  TnpB Polypeptide
VTAQDEAVLQAVGTHLGSLAGKDLAARCTEGRLDAGGRAASRARRKQALTAASSSRWAGAITRISEDQWGLAERNLRAEKAGLQVRVRRIEARLAVPAGGRAGPTRGYATAAERHARALRLRSLRARLATVQRRLEAGTVSVVRGGRVLLRKRNSLITAGLTEDQWRREWEAARLFLTADGEKDKPWGNETIRWHPDAGWVDIKLPAPLACLANRPHGRYRLSTPVKFSYRGGEVGAQAASGAIRYDISRDPVRGRWYIDASWKTAPAPPASLDRLRQRPVVAIDVNCGHLAAAAVAPDGNILGTPATIGLNLSRLPAGTRDGHLRAAITGIIATAKQHGAHAIVIENLDFAQARAEGRERTGRRPSRGRRGRSFRRAISSLPTGKLRDRLVQMASNAGLSVVVVDPAYTSRWAAQHWLAPLREHHPETTGHHAAALVIGRRGLGHRARRRATGTRTAPEEAARPAQARPRTTPAAGNALRKPATPRGSRQPPCAKTGKPYRTRAGNQAAHDRSGPSASKDYVR

SEQ ID NO: 64070 - protein, 416 aa, Lactobacillus sp.
VKPLEQSITIKAKLLNIDNETAQAFVQSMEKYKDACNFISQYVFDNNFELSQSKLNKALYHEIRDQFGLKSQMAQSAIRNVIARYKIVRTQLSQKPYRFDTGKKDSKGHAIWSQIPRDLDWLWKPIEFKRPQLDLQRGRDWSYLSSAQQLSLNTLQGRKKVSFVCKGFDQYLDADKWKFGSIKLLQSKQNWYVHISATTSLPEYSPEEAEHVVGIDRGLHFLAACYDEAGKTLLYSGEKVLRTRRKYKKLRAELQSKGTKSAKRRLKQIGQRENRWMSDVNHCLTKTLIDHYGANTVFALEDLTDVRFATEQTAKDKRYEMVSWAFYQFEQFLTYKANLNSSIVVKVPAKYTSQRCPKCGRIRKENRDHKQHLYVCDRCGYKSNDDRLGAMNIQLLGTLYRSGEEAPQFNKQASAE

SEQ ID NO: 64071 - protein, 464 aa, Halobacteriales sp.
VKRSNTFDVAPRSPQDEELLSRVLDASASLWNELTYERRQRFFGELDGSVWDAPRVHDTYKGVLGSAAAKEMKRKNDEAWRSFFAAKEKGEPAGPPGYWGNEEDGRDLRWYGRCDQYTLELGKRSRLEIPVGKDLKDEYRLGQTERLRLEVRGRPKWDGKPGRLELYYDGLDDQYRAIQPVTVDNSRQDLPLADETAALDIGANNIVACTTTTGQQYLYEARDLFERFRETTRRIAEQQSTVKREEGRYTSKRIRRLYRRRTRRRDHAMDALARDLFERLYEEGVSTVYVGDLTDVLETHWSVRANQKTHNFWAFRAFIDRLACTAEEFGITVEVRPEAWTSQTCPQCGSTEDTTRHQDTLTCSCGFEGHADLTASETFLRRHRKSEISDWQTRHGVSRRRHEADVPRPMARPVCLKWDDHRWSALTRREASRPHTRNLRFLGTSPRAHRPNEEHTDQSILRSA

SEQ ID NO: 64072 - protein, 374 aa, unknown
  TnpB Polypeptide
MKTYKFRIYPSKKQELQLKEHLWIAKNIWNELLAYSKDYYQKTGKFPSKSELQMLSKGKGLFSQTQQAVAHKVSNSIFRVFKLKKKGIKCGFPRFKSIDRMKSLCYPQAGFSLDKKLKVTPFGKLPIKKHREIEGNIKTLTLKREPSGKWFAIFCAEQESKEPKFNKGEQIGIDLGLKTFATLSNGELIKNPRHLKRYEEQLAWNQRLFSKKKKGSNNKKKSKLKVARIYEKVSNTRADFLHKTSTKLVNDYSLIALEKLASWNMAEQNFGKFINDAGWNMFANMLRYKAEETGCEVVFVNPKNTTQECSRCHDIVKKGISVRIHDCPFCNLVMDRDLNAARNIFIRATAGQVGSKLLENGTIVLSMKEEAHTL

SEQ ID NO: 64073 - protein, 383 aa, Proteobacteria sp.
VKTVRTIPCKLAPTAEQRTELDATLVAFAEACNVAAEVARSIHSTNKVTLQHACYQELRQQFGLSANLAIRAIARVCAALKVPAKMHSTFEPTSVDYDARLFSFREWDWKFSMTLLHSRAHLATQLGTFQQRQLQGRLPSSATLVKRRDGTFFVHVVLTDTAPEPEEPRGMIGVDLGVVNLATTDDGERFSGDAVEAVRKRYGRMRRTCQQAGTKSAKRKLQTIRVRESRMRANENHRISTRLIAKAKDTRSAIACEDLAGIGDRMTARKAQRSRLKGWAFFQLRTFITYKAKREGILVLPVDPRHTSRTCSACGHCEKRNRQSRDAFVCRHCGYALPADWNAAKNIKARGEVMHPVVGPVDAGPRNPVEGTNKPRGFSRSGS

SEQ ID NO: 64074 - protein, 417 aa, unknown
  TnpB Polypeptide
VNLVTTRTITATLTNDREGVTHDLDSLGRSGSKIWNVARWTISRIWDHTGEIPNEGSLKSYMKNQACWKDLNAQSSQAIVEELAGAFQSWFEQDDPDANPPGYRKDGDERQRSTVTFKEDGFKLDTKHQQIRLSKGKNLKDGWSDFILCEYDTGPDVDLTDVEDIQQVRAVWNGKQWELHFVCKVSIGAADSAGETTAGVDLGICNTAAVSVGDQTVLYPGNALKEDAHYFRREEYDTEGENGPSTHAEWARRKKSRRQSHFLHALSKDIVEQCADRDVKKIAVGHPKNIREDEDWGRHGNKRLHDWAFETILSHIEYKAEERGIEVERVDEYELATSITCCSCGMKADSNRVERGLYVCEECGLVANSDLNAAENMRATVTPNPEMDRSNGCLAQPSVRLFDKSTGRVAPQEQVRP

SEQ ID NO: 64075 - protein, 415 aa, unknown
  TnpB Polypeptide
MLVNKGHRIQLLPNNEQRDIFRRWAGTHRWAYNYGLERKIKAYEETGKSPGAYSLAKEIVKLKQTEEYAWLKDVSKSVPRMALMQLEQAYANFFRRCKDGNDKPGFPGFKSKKRGKIVFHLETDQVRVEGKRVRLPKIGWVRMTKSLRFEGKLVATVAVSKQAGKWYISFNVETEHVSTENQGGVVGIDLGVKTLATLSDGMAYENPKALRHYQKLLARVQRQLARKQKGSNRWRKAKLRVQRIQKRIADTRANAIHQATTDIVKRYDFVAMEDLNVKGMVRNHSLAGAVSDSAFGEFRRQMQYKLEWEEGELVLIDRWFPSSKLCSACGCINDSLILADRKWTCSGCGAVHDRDENAAKNILAKGLQTPGGSDGAGRGGLEEVVSPAKRQAGTPVSPALVGTRAQICQIRFDTV

SEQ ID NO: 64076 - protein, 390 aa, Calothrix sp.
MAKKEKTPSFVTEFELIVNSQAEKELDARFQAGRQLYNAVLGEAVVRVQNVRNSEPYQEAKKIKVKTEDDKKLKNELFSQARKQARFSDFELQDFATLTAKDSKWMWEKLDSHTIQKIGTRAFKAVEKVLYGKARKVRFKLFSSFHSIEGKTNTQSIRFFGGTDCCIKWGSYLILPIRFPNKWNEVLEYGYRVPVKYCRLLWREINGKRRWYVQLINEGVPYKETPAYKLHNKVNSNTGLVGIDLNVSNVAVVGDNKAGLFPFAENVPTFEQEIKTLQRKMERSRRVTNPDNYEPDFDKKVGRNNKRKKGKVKKGSRRWKHSLAYRKYARKKRELERRKAAYSKSQNRGLTNKIVREFGKNIKAEKVSVRGWQKRYGKAISAKSPGFFQS

SEQ ID NO: 64077 - protein, 342 aa, Calothrix sp.
MTLPEYAWTKDYPSAIYQSAFQDLGEAVARWRKGLTEFPVLATKKKGDKFTLYKSRGIYPKKGEPALPFTNRVSIAPGKKINLPGYGEVRSKEKVDFYYSSQTFTVTRTSDKWFVSSNIDAEPIPPIIHKVEKVGIDLGVKTFATFSDASTISAPESLKKAKTKLSKEQWRNRNKEFGNRGKGVRASKNAKKFFNYIARKHAHIANIRRDFLQKTTTQISRKYYKIRVEDLNVSGMVANHKLAEAVSSLGLYEFRRMLDYKQSHYGTKLEVVDRWYPSSKTCSVCGHVQDMKLSDRVFNCGACNFVIDRDLNAAINLERADNHMSAAPKQKKSIKKSRKKKD

SEQ ID NO: 64078 - protein, 386 aa, unknown
  TnpB Polypeptide
MTRCYKYQIDPTPEQKHSFAVFAGCRRFVWNWGLSRKQQVFKLTGKGIGYNALASELVAFKKTDATFLKNCQSQVLQQTLLDLEKAFKAFFEKRSRFPKFKSRKRTSHAFRIPQNVSIVDGKVSIPKIGLVRARLHREIEGTIKSATIKQEADGHWYVVFVSHIEIPDVVASYDQPCGIDLGLEAFATLDNGTKVKPPKFYRHGQRKLKPLQRQLSRCQKASRNRAKAKARVARQHHRTANRRSDFLHKLSSELVSRYDTLCVEDLNVSALVRTKLRGHSKSWADAAVGSFLRMLEYKSLWNAGQLVKAGRWFPSSKTCHCCSHVQRLELSDRMWTCDNCAVIHDRDHNAAINILSEGLRILAAGSAESLTASGESVSPAMAGSSR

SEQ ID NO: 64079 - protein, 563 aa, Scytonema sp.
LSIITIQTLATDSNDNKIALDYLQDYAVIFGQATRTAFSKRNRIGKTKTKESELEKQICKELETRFGLSNSEAKNVYNKASAAYASQAELVDLYIDEAYDSTKGVRKTIKKLEFKLNKATVAGQTSTVKKLKKKLHYKQQKINKLEAKIVRLKESKASGTFSVTFGSSKLFEKQYRLEENGYNSHKEWLEDWRIARSNRSFFIGSKNFHAGNQLVRYDAEQHTLTITCTPGLRAKYGDSVTLHDINFSYGEEWLLAAVENVRYTSTRKGKNGEKVETSRNGSKLPVTYEIVNRDGKFYVNATLESPDPQIKSSLENGALGIDFNPGSIDWTLIDRHGNLKRHGSIKINVQDKRSLQTKDIIGKAVSELIRIALSEHVPIVIEDLDFALKKASMKEKGAKYARMLSNMAYSQFTQMIESKCLKSSVELIKVDAAYTSVIGTTKYMAVYGLNSGCAAALVIARRGQGRTETLPAALVTYFKKPEDLLKSGAWAKVARKINICGGFNRHKFYSLGIKQARTNCSLYGKLRQTKVPSGRDTVQVLVTPHIHQKQGAVGFPDLKGVNP

SEQ ID NO: 64080 - protein, 167 aa, unknown
  TnpB Polypeptide
MVLVKKIKHRESDIVRDLNHKISRKIVDTANKNNTGIKLEDIKQIRKHVKSRRGFRYSLNSWSYYQLEQMISYKAKLLGIPVEYIEPAYTSQNCSRCGHLGNRDKKKFKCSSCGHVDHADSNASFNIAKRQVKNGRLNVDRDAFKGSTDTPQTAMMGTTLTVEPHAL

SEQ ID NO: 64081 - protein, 446 aa, unknown
  TnpB Polypeptide
LLDIPRSITIFNTEHSINTYGNSSMLETTRTYRAKIVNHTQVSDDLDDCGHSASKLWNVARYHTQQVWNDTGEIPSEADLKRELKDHERYSDLHSQSSQRVLEELAEAFNGWFKKRKNGDTNANPPGYRKRGDNHPRSTVTWKQNGIKHDSKHNKLRLSKGFNLKNHRSDFILVEYETQPDVSVENIQQVRAVWNVDRWELHLVCKVEIPVEEAPGDNTAGIDLGINNYLTIAYDDDEAELYPGNVLKQDKHYFTRDEYDTEGENGPSRRALRARQKLSRRKNHFLHALAKHIVERCINHEIGRIAIGDLSRIREDENGDSRSWGKRGNKKLHGWEFDRFTNLLEYKAEKHGILVDRKSERDTSKTCSCCGRKNKSNRVERGLYVCDSCGATMNADVNGAVNIRRKITQSPPMGDMSNGRLARPVAYLFNQTSGRFAPSEQMGCEP

SEQ ID NO: 64082 - protein, 376 aa, Clostridiales sp.
MEYVKTAKVQIYPSDNEKDLLYKSMKAYSAACNYISHYVYQTHDLTQVSVQKHTYRKIRSQFDLPSQMACNAVRTVIGSYKTLLTNHHKWTECKYNSPQMTLSWNRDYSLNNDIFSVGTLHGRIKVAYTDKGMEQYFDKDKYLFGTAKVTYKHKKFFLHISVRYQIDEPTDSEICNIVGHDRGIRFLTTSYGSDGKTSFVSGNEVKQKRAHYKELRKQLQQVGTPSSRRRLKAIGQRENRWMQDVNHCVSKALVENNPKGTLHVIEDLSGIRFATEKVKRKSRYVMVSWPYYDLEQKLFYKAKDHGQKVIKVDPHYTSQTCPKCGHIEKANRDKKKHLFCCKNCGYTSNDDRIGAMNLYRMGIEYLIESQVSISDL

SEQ ID NO: 64083 - protein, 400 aa, unknown
  TnpB Polypeptide
VLAVKSVWQYYVPVGDVLRLLDVFRRMVNDSIRIGLLNDASSLRGLSFLSYNQLAHYDSPSCYKLCAISRAAGILAARKKSVRRGFPTRTPYAVRQQLVSCYGFKIENGYLRIPVSRGKRHSIALTRHTVEIISQPGVKVRSFTLTQNRLSLSIARDPPMIECASTIGVDRNLRNLTVGNDDHTRQYDLSKSVRIANTTVRIVASFTRDDARIRTAIASKFGHRRTDRVGHLLHAATKTIVALAVQRREAIVLENIEGIRSLYRKGNGQGRKYRGRMNGWSFGEAQRQIEYKARWVGLPIIRLSRRETRGSSISCPRCGERLQSDKRLERKLWCGKCRVVMDRDQVAAVNLARRGRVRFARSRPPIIEAQGRAVEAMMGNPTPTVIPGVDAPKLTQPTKS

SEQ ID NO: 64084 - protein, 368 aa, unknown
  TnpB Polypeptide
VDETTGEPWWPRNSKESYNSGLESLADALKNFSKSRKGRRKGRRMGFPRFKSKDKAVPGFAYTTGSFGLIDCDPHALRLPRIGRVHCMEDVSRRVDGAKVLRMSVSKRGGRWQASLTVERADLPIPSPPKGGSVGIDLGVKELAALSDGTVIHNPHALKSNLRRLKKAQRNLSRKRKGSNRRRKARAQVARLYARVANLRSDALNKTTAMLAHTYADISIEDLNVAGMVGNHGLARSIQDAAFAEFRRLLTYKTARAGARLHVIDRWYPSSKTCSNCGTVKAKLPLSERVYHCEECGLVIDRDVNAAINIQVAGSAPETLNARGGSGRQTRLECGTMRHPAKREPSGGEGRVRLGAGLGNEAMQMTSL

SEQ ID NO: 64085 - protein, 377 aa, unknown
  TnpB Polypeptide
MRTYEYRLYPTKQQYQQLVVCLKDSRGLYNEMLAATKQQYAQTGKFLFKYDLNLRFKGRGADTVPATTVQTLADRLDKALRRYLAFKEQGLPCGFPRFKTPNRWHSIQLRQYAQSRDVWLDANGKHLHVPAKLGLLLKIKLHRPIEGTPKTAHLVLRADGHWYALIVCEPAEAEQTHQKTAGVCVHSNIGLDVGLKVFLADSEGKTIANPRHYRKSQQTLRRKQRTLCRRKKGSKRRRKAARNAAKTHLKIKRQRRDFLFKAAKPYAEGYKRLCVENLNINGMLHNHSLAKSIADASWGAFIEILEDKAARAGHRVIKVPACFRSQKCHRCGEIVQKSLSVRTHLCPFCGYVEDRDVNAAKNILRAGAPPSDDNVHQ

SEQ ID NO: 64086 - protein, 367 aa, Escherichia sp.
MRRFAGACRFVFNRALARQNENHEAGNKYIPYGKMASWLVEWKNATETQWLKDSPSQPLQQSLKDLERAYKNFFRKRAAFPRFKKRGQNDAFRYPQGVKLDQENSRIFLPKLGWMRYRNSRQVTGVVKNVTVSQSCGKWYISIQTESEVSTPAHPSASMVGLDAGVAKLATLSDGTVFEPVNSFQKNQKTLARLQRQLSRKVKFSNNWQKQKRKIQRLHSCIANIRRDYLHKVTTTVSKNHAMIVIEDLKVSNMSKSAAGTVSQPGRNVRAKSGLNRSILDQGWYEMHRQLEYKQLWRGGQVLAVPPAYTSQRCAYCGHTAKENRLSQSKFRCQVCGYTANADVNGARNILAAGHAVLACGGCQQTG

SEQ ID NO: 64087 - protein, 622 aa, Fischerella sp.
  misc_feature (31)..(83): Xaa can be any naturally occurring amino acid
  misc_feature (527)..(615): Xaa can be any naturally occurring amino acid
MGKSKASKTKQGKDSLTSSLTCAVQLELPLXXXXXXXXXXXXXXXXXXXXXXXXXXXXXXXXXXXXXXXXXXXXXXXXXXXXXKSLTCNHSTQKPKSSKISAVESTSSAKDCKPYWTDLCAEINSRLLLPVVTDCAGSDLNSFSTWSSKTVDKSWFSKTLYTVPNQNLPRIFSPSSTSSLVECTDSGNTVKKSRKIRIFLKATQKQIIKQWFGVSRFVYNTTVKLLQDSTIKANWKAVKTDILNGLPDFCKSVPYQIKSIAIKDACKAVSNAKKKFKNGGGISKVKFRSRKDPIQSCYIPKSAVSDKGIYHTILGEVTFKEALPQSFGDCRLVKAYGDYYLTVPEEVSRQQSENQGRVVALDPGIRTFITFFSESSFGEIGISANIQIQKLCFRLDKVISKIAKAKCKSKRRLKLAATRLRGKIKNLVDELHKKTARFLVDNFDVILLPTFETSRISKKAKRRIRSKSVRQMLTLSHYRFKQFLKHKAFETSKVVMDVNEAYTSKTVSWTGEIIHNLGGAKFVKSPXXXXXXXXXXXXXXXXXXXXXXXXXXXXXXXXXXXXXXXXXXXXXXXXXXXXXXXXXXXXXXXXXXXXXXXXXXXXXXXXXXXXXXXXXSVFVNKC

SEQ ID NO: 64088 - protein, 368 aa, Mycobacteriaceae sp.
VWNLAVEQHQYWQPGRHAPGFNEQCAQLTAARAEYDWLAAGSQTVQQQALRDFDQAMRYFFAGTHRHPTWRKANVHEGFRKVAVKPHHIERLNHRMGRVWVPKIGWVRFRLSRPVPEGVKSYRVTRDRAGRWFIAFAHIPDPILGPNDGTVVGIDRGVAVSAALSSGELLHAPSLSRGETKRLKVLQQRLARAQRGSVRRARTKRAIATLKAREADRRRDWVEKNTTDIARRFETIRIEALDVRGMRAARGTPQRPGVRVSQKRGLNRGIRRSGWGLLASRLQQKALGRVEQIPAAYTSQRCSACGHIAPESRKSQAVFECVACSAGPCNADVNAARNIAAGRAVTARGDLGASRSANREPQLCAPAE

SEQ ID NO: 64089 - protein, 280 aa, unknown
  TnpB Polypeptide
MVVARCADGVPADRVAFAGSKPGMRETKAFLETHVSGPEVEVLERIQISGRAFLARIMEHANRIDGLRSEIDLGYARIGRLKAELNQIVGRESQAPVPEASEDLTGPQADRYRSMHGRFFRLLSGLGRLKARRRALYRQIAGVKKSWFGHVANIRAALAQKHGAVVVREDLSVLTVEKKDPGYKGRTFNKMINNGAKGQYTRRADDKLAWRGIATLKLPSFYTSSTDWRTGTVDKTQRKGAVFTGRDGTAWDADLHAAELLARWLFLRPKPEAPAAQPTM

SEQ ID NO: 64090 - protein, 242 aa, Helicobacter sp.
MGLRTLIVTSDKIEYPHIRFYQKLEKKLTKAQRRLSKKLKGSNNRKKQAKKVARLHLACKNAREDYLHKISDEITNQYDLIGVETLNVKGLMRTYHSKSLANASWGKFLTMLEYKAQRKGKTLLSIDRFFPSSQLCSYCGVNTGKKHERITKFTCPHCQTTHHRDYNASVNIRNYALGMLDERDKIKIDKSRVGIIRTDYAHYTNECIKACGASSNGVTSKYGNILDLASYGAMKQEKAQSL

SEQ ID NO: 64091 - protein, 367 aa, unknown
  TnpB Polypeptide
MGKNIRSMVVRLYPNKEQKRKLNDCLYVCHELYNTLLEYCIETHKEGGKHPSAYDLEKLLPDMKKRDPKLKTVYAQVLCDVCVRLSRAFDGFFRRVKEGPEHAGFPRFKSWRRYDSFTYTQGGFKLSPNHIRLSPWKMDVKIKGYREMEGRMKTCTIIRKGAGPHYRWEAAITFETESNNSNEAAIKTVPIVPSRPVGIDMGLRNIVVTSEGKEYPNQRNYIQAERQISNVLRKMSKYEKGSKEREKYRQRLFHAFERLRNINKGYIHEVVNDLVDNYDMIVMEDIHTQKLTDKSKSKGMRKSFRDASWGRFVFTLGYRAAEAGIPLVKADPAYTSQQCSVCGMMVPKDLSVRRHQCPHCGLDVDRD

SEQ ID NO: 64092 - protein, 388 aa, unknown
  TnpB Polypeptide
MYKAFKYRISPTNLQKELIGKHIGSSRFVYNLALETKNTAYLGSKHNLSPFDLTKQLPELKKECEWLKEVNSQSLQQSIQNMDIAFKKFFKGAGFPKFKKKSSGGSFSVPQNVIVENGLLIIPKFKEGISIVLHRPIIGTIKSATVSVTPTGKYFVSVLVDTNVITPKKVPINESTTIGIDLGIKTFLVTSDGLEIENPKYLRKAQSKLKYVQRKYSKNKGKRTKKRLALLHEKVVNKRKDFLHKTSSKLIRENQTICLEDLAVSVMTKNHNLAQAINDVSWSTFVSMLEYKADWYGKNILKIGRFSPSSKTCSCGIINKDLKLSERTWTCKSCKVTHDRDILAANNIKSFALKNILSGTDRKNQNELPTLVGVLTSEAQPIAYGVGG

SEQ ID NO: 64093 - protein, 268 aa, Streptomyces sp.
VAVKWSRSLPSVPFTVTVIKDAAGRYFASFVVETEPSEVLPEVAPEVGMDLGLSNFAILSDGTKIDNPRFLRRAEKRLKKAQQLLNRKAKGSSNRRKARLKVARAHAKAADARREFHHQLSTKLIRENQAIAVEDLAVKGLARTRLAKSVHDAGWSQFVTMLEYKAARYGRTLVKIGRFEPTSQVCSQCGTKDGPKPLHVRTWTCSACRAVLDRDVNAAVNVAKAAGLAASACGAQIRPRPVPASRDEPGTHPKPRRSTARQAGIAPL

SEQ ID NO: 64094 - protein, 578 aa, unknown
  TnpB Polypeptide
MAFGSKESTPSFVLTLPLDINLNEQNYLYKEFKKCGTIYNQLVSATTKMWHQLHKTHEYRALMAAIAKTVPDSEEQKSLLKQRQNMIQQFGFSEGSFHKMVEPYAKHFAINSHVAQKVASAVWTAWNDFFFSKGKVVHYKKLENVTSISGNNNATGIALRPANLTTSIIKSTKDKKKKAIEQKYIDMYKRPGAKEDEEVVIPEDAKKQMQIEIKAAVAKVKTTIGKGSLRIVYGKHEFPVVLRNPNTPTGRYQQEALKCGVKYCRITCKWVRNKWKYYAQLVLEGYPPVKCDSNGVVRHPVNQGRVGLDIGTQTLAISSNDICDLRVLALSARAQAKSLVNEIARTQRAMDRSRRATNPKYYNPDGTIKRLKRKHGQKQKRDWKYSKHYYHLRTKLRNLNRRLADIRKMEHNALANELLQHGNEFIVEDMDYKALQKRSKKTKINAKTGRAHTKKRFGKSLSRCAPAKFITILTNKAVRNGGNVIKVDTFETKASQFDHTDESYTKKKLSERMAHLSSGEVVQRDLYSAFLLEHIDTEALKYDIEALKAAFPAFLKMHENTKKRLQEAESYLPASVGF

SEQ ID NO: 64095 - protein, 379 aa, Bacillus sp.
MLRHKAYKYRIYPNTAQEALIAKTIGCSRFIYNHFLNLWNEAYTSTGKGLSYNACSAMLPQMKKDDATIWLKEVDSIAIQSSLKNLADSFTRFFKKQNKRPRFKSKKNPIQSYTTKNVNNSIAINGSRLKLPKLGLVRFANSQEPTGRILNATIRRTASGKYFVSLLCEEEIQPLPATSNAVGIDLGITDFAILSNGQKYDNNRFKYKMEQKLKREQRKLSRRALRAKANGVSLFEAKNYQKQKQKVARLHEKVMNQRADFLNKLSTDIIKNHDIICIEDLHTKGLLRNHKLAKSISDVSWSSFVEKLTYKAEWYGRDIIKVNRWFPSSQRCSDCGEMTGKKPLHIRKWSCPQCHSQHDRDLNASKNILAEGLRELVPV

SEQ ID NO: 64096 - protein, 380 aa, Bacillus sp.
MERLKGYKYRIYPTDRQKEFFAKSFGCVRFVYNLMLNDRIEAYQTVKDNPTVKMKYPTPAQYKAAYEFLKEPDSLALSNAQMNLNSAYENFFKGTAKFPKFKSKKNPKQSYTTNNQKGTVGTIGDKLLRLPKIKGLVKINIHRPYKGIIKSATISRHSSGRYYVSLLCKHEIEEMPKTSNEIGIDLGVSTFAITSDAVKYDNQRFTKKQETKLKREQRKLSRRMLQAKKYGKKLIDCMNYQKQRVKVARLHEKVAFQRQDFLHKLSTDLVKNHDIICVENLKIKNMAKNRKLAKSISDVSWREFVTQLEYKSKWYGKQLIKIDQWFPSSQLCSACGYNDGKKPLHIREWKCVSCGTYHDRDINASVNILNEGLQQVLITA

SEQ ID NO: 64097 - protein, 513 aa, unknown
  TnpB Polypeptide
LDVMRERKAYQQARTLAQGDVRRDAFREMRALVGFSEYGLHAWATRHISHSSLGDHLDANTVQTLATRGFRAVQEYGFGTRGRPRFKGKNQIGSIEGKGNKQGLRWKEGSLLWSGLTLTGIIPADQATNPVLAHGLDHPIKYVRLIRRRLNGRVRFFAQLVCEGQPCRKPQHIVREGVIGLDPGPRTFGVAGPDWGAQVDLQTPLKQSRQVIRRLQRHIDRQRRANNPANYNPDGTAKKGRMTWTISRGQRRNEVKLVEMRCKATAHRTGLHGQVAHAILSRGATIHVERNSYKSFQRSYGTSVGSAAPATFVNHLTRLAESAGGSVTRVPTTLRLSQTCLCGTIKKKSLSERVHHCDCGITVQRDVWSAWLARFAVATVTAKETGKGKAGKDTILWHLDAEAAQQAWATLPGSDAGLPVASTPLPPERFAALVGRLGEREPASSRAVRRAHVKQAVSPSVMASEPIAGKGLPKTGDATDVVPLVQLSLFGDSSMRRESRGKLVGRAWESHAL

SEQ ID NO: 64098 - protein, 544 aa, unknown
  TnpB Polypeptide
MTRAAAIPTRADARTTTTAVRIVPLHGLAPEQRALLRAGQREAGVVYTVCMQAHKIACHTRGSWPSSVDLHRLTKGRHPDLCAQSVQVTCKADGTIKSAVANRKAGNTRMRYPWKERYFQPIRWPVQALQRKRDGTRFPLGGIGKNRRYVDLPIHLPHNAGACQIIWNHGQYELHVCVTHEGAVEASGCGRGCVDLGEIHAAALVTDTGTGLIVSGRGIRTIKQGRNRAIGELQKKQARCTRHSRQWTKYQRARDRINGRTERQVRDLRHKGARLVIEQAEKGGVGELYVGNPDGVRRHKTGRRHNQRMAQWEYGTDIGYLKEKGAGVGMTVRTGPERGTSSTCPNPTCRHKQNVRGRRWVCRQCGGSWHRDLVGATNMFALAFGDTATVLVPERQNITYRRPGPVGLRQRGRAGNARRSSPDRGLRGTPIPTELITSAVGHPPIPGSAKATCGMGPEEHTLGVLDGHGSAPGQSHHGSFTDRSSASPLPTAPRFGNAHASAPDTERPSEKGPSCDCPGFSPRGLDVRRSSEGRSFGCAEAVAL

SEQ ID NO: 64099 - protein, 411 aa, Anaerolineae sp.
MGYRSVATNCIVRVIPMRSLSKQQADLCRFVREEAGRCWTNMLQAHIESRGGKWLSSLDLGKMYKGQYRLHSQTIQALAQKLEANVDTARELRKTEPEARYPYHPKQYQTATWKESAIHWTEDGKLLLSNGRNTPALVLPVPGEYLDADICRVELTWRANHYELCLTIDTGLVNPPLRESGQIAGVDLGEINIAAVCTEAGDALVVSGRALRSAKQLRNKRHSCLTALLSRCKPGSKRYRRLAKSKGRASAKLERQQRDILHKASRQVVEFCRENDVMALAIGDVRDIQDKVDLGAKINQKISQWTHGQFVKYLSYKAREYRMSVGQIPEDYSTRTCSFHGGVAKHAPRGRVYTCSGCVAVINRDVNGASNICSRALYGEYSKVQARTIMYLRPIKLGRCRAFDTGQSCLL

SEQ ID NO: 64100 - protein, 371 aa, unknown
  TnpB Polypeptide
VEYTKGYKFRIYPTKAQVQTIEQTLGCCRFVYNHFLALRMESWKTKKESVTYVQTSALLTELKNHPDYVWLKAVDSMALQESLRNLDRSYQNFFKKIAKYPRFKSKHNHRQSYRTRNQGNGIRIEGEKLHLPRLGLVKIKLSREFEGKIQNATISRTASGKYYVSLCVTADIENFLARNEGGEVGIDVGLKEFCSDSNGNVVENPCILKRLSKKLAREQRKLSRKKKESKNRSKQRKLVARIHERISNARKDFLHKISTKLVRENQTIGIEDLQVKNMMKNHKLAKAISDVSWAEFFRMLEYKAVLYGTDVIQVPTFYPSSQTCSVCGERNTETKNLAVRDWICKKCGAHHDRDVNAAKNILAKAKEIQAA

SEQ ID NO: 64101 - protein, 191 aa, unknown
  TnpB Polypeptide
MPFSTDNASSCDWIGVDLNTTGYTAVVAHPASGGVVMLGEREQAEDGCGGASKRKKNRSREQAFRRDQNQRIAKEIVKMARQLECGIKFEDLSGAGFAGRTKQSTPLPFSRREGSFYHLQKLVEARAQSAGVRIVYVNPAFTSQRCSRCGEPGIRKGKRFSCPHCGYVVHADANAAFNIASAPPDAGTWVS

SEQ ID NO: 64102 - protein, 435 aa, Phycicoccus sp.
METVLRYRYRAYPGTVESAALSRTFGSCRVVANDAIAARQHAYKNGLAALSLGVLSTRLTAAKQTPERAWLGEVSAVALQQALKDVDVAYRNFFSSLKGTRRGPKMGPPKFRSRHTSRQGVRFTRNARFKIEGTPGGQARLFLPKIGWLPFVLSRPLPSDPTSVTVIREADGRTYLSFVVTVIDVPQVVAGRVCGIDPGLSTYATILSVDTGTGEEEVGKIDTPMFLRRKERALARSGRSLSRKKKGSRNRAKAKVRVAVLHRKVREARLDHAHQKAAEIVATHDIIAIEALSVAGMARTNLAKSVHDQAMAQFLRLIVEKAARQGRTVVPLGRFFPSTQTCSTCGAITGPKGQAGLGVRHWTCTNCGVTHDRDVNAARNILAEGLRLLKLGQPSTVADGQSETSNACGVEARPPETAAPDVEPGRTRSGQSCSA

SEQ ID NO: 64103 - protein, 192 aa, unknown
  TnpB Polypeptide
MQKFLGLDFSMHELYRDSNGKEPAYPRYYRNAEKKLAREQRKLSKMQKGSNNRNKQRLKVAKLHEKVSNQRKDFLHKQSRQIANAYDCICIEDLDMKAMSRSLKFGKSVSDNGWGMFTTFLKYKLEEQGKKIVRVDRFFASSQTCSVCGYKNTKTKNLAIREWDCPQCGTHHDRDVNAAINIRNEGMRLVNA

SEQ ID NO: 64104 - protein, 480 aa, unknown
  TnpB Polypeptide
MKAILVNLTNEQKALIDNLMLVFCTAIRYSFKRQLEGQVIGDLEKVVAHNYNLNIRQAKDAVESARQTIASQHELVKLNRENYSKKVEELVKVLRNPKLSEKKVKALQSKLAKRQRNLDYWTTFLLSKTFPPVTFGTKALFLRRCKGLITKQEWQDRRNNRLYSRGDKSKGGNPNLRIVVKEGSSFLEISTLEKTKTNRAIKVLMPIYLPQKLSKKTGKVNGIHYRKLFMDSLERGDAYQVEILRRDGKYYAHITFEELEAKVIYTGHVSIIGTDTNPDGFGLTEVSRQGNYQGHAYLRQHELTFCRGNRRLNLCGELSAQAVSKAEKHKCGMATEDLKFKDDRDVSSKLARVTHQFVYATLLRMLERRCLRRGVEYVKGPPQYTSKIGLYKYCHQYGLDVHNGAALVIARRSYGLKEAVPKLLLDKLVPSKKRQEFMAKTEWGQWSEISKQVNKLFKKRKEVNSPGLWLVRRKLLLGIA

SEQ ID NO: 64105 - protein, 389 aa, unknown
  TnpB Polypeptide
MNMDMQRTVRLRLRPDAATAALFAETVALSTSSFNAVAAHGWATGIANGVELHKATYYPERARTGLPAQLVCAARVKATEALKSAKALAAKEMKRPEDKRHMPSLPQSDHCPIRYDARSYRVDLAAGTASLLTTRGRRAVTFRLSPYHRRYADWPTASADLFCDRQGRWWLHVVVAAPVAATAPTDETIGVDLGIVHPATDSRGNHYGSDHWRVVEGRTHNLRRRLQAKGTRSAKRHLKRLSGKQGRFRRDCDHVLSKRLVTSVQPGATLVFEDLTDIRGRAKVRKQQRRRLHSWSFAQLQAFTAYKAQARGVAIGYVDPRYTSQKCSACGHRERANRPHQAEFRCVSCGFVCNADHNGSLNIRQDYLSRAAVSPPIVSAPCQGQAPGL

SEQ ID NO: 64106 - protein, 430 aa, Ignisphaera sp.
LNRQLKTLERTVVLQSAPLTRAKADALRYIYQVYGRSLAEALEYVWSNSLYSWTSAKKALYKRFRELYPDIPSHYIHEAVRDASQRLKSFLKLKKKGLAHTSKPAVKKWSVGCDNQLWRLTPCGVKIATHRGWVNVPLQFHKQFWKYYNSGWSLRSSARWKIAEDKLYLYVVFVKSVEARQRAASKVYGIDINENNVTIYEHPANRAVTLVTNFSKIVLGYAYRRAKIQQKWSKAYGVNGNRRLRSVLKKLRERNVKRSTKLKLVKRVLEIVRDGLVVLEKLPKRFQDKIVEKSRVLNGLDVHRLKQSSMRGVHRILTEKLAEHSIPYVLVNPSHTSSTCPICGSKLFSMTGRAQRSGWKPRVVKCPSCGLVHDRDVVGAMNLVKKYLLDVGGRAVGLPNGAHDLRVEWSVTAMKRGAEAQPVLAKPTTT

SEQ ID NO: 64107 - protein, 407 aa, unknown
  TnpB Polypeptide
MVKTYQYRIYPTTKQRQTLDAILEACQTLYNQALAMRKHAYEKHGESLSYKIQANHLTPLRQASCFWASIHIDVLQDTLRRLDKAYQAFFRRAKAGQAPGFPRFKGKGRYRSMTFSHLSKQLIRTIGKRMGRIVVPKIGHVAIRYHRPLPNGRVKNLTIQRKASGWYANIAVKVADVPEVEVQTTTGVDVGLESFLTTSDGDKVHNPRHFRESEKQLRKAQRILSRRHKGSVRYQQQRAVVAKIHEHIANQRRDFHYKTAHWLFSQCDEVAVEDLTIRNMVQNHHLAKSISDAGWGNFQWILQSKAANAGKQLTKVSAKYTSQKCSGCEAIAKKSLSVRIHDCPDCGLRLDRDHNAAINIKKAAIALRGGAVVTNTPEKSRFIGERSAKPVSPRGRYHEHRPSGRGS

SEQ ID NO: 64108 - protein, 364 aa, unknown
  TnpB Polypeptide
VEKAYKFRIYPNKKQEELINKTFGCCRFVYNRYLAKRIESYENNKETFTYKQCSSDLTSLKKELEWLKEPDKFALQNALKNLENAYKKFFREKIGFPKFKSKKTNRFSYKTNFTNGNIQYYDKYIKLPKLGMVKIRDKQIPKGRILNATISKEPSGKYYVSLCCADIDIKPLENTNSFVGLDLGIKEFCISSDGEFIKNPKYLSKSLNKLVKLQKKLSRKTIGSKNRNKARLKVARLQEYIANQRKDFLQKLSTKLIKENDIICLESLQVKNMVKNHKLAKAIVDVSWAEFIRMLEYKSKWYGRKVIKVDKFFASSQLCSECGYKNKEVKNLNIREWICPCCNTHHNRDINASINILKEGLKLI

SEQ ID NO: 64109 - protein, 330 aa, unknown
  TnpB Polypeptide
MAERFSLTATATTLNGPTKIYSRSGLLFPDSKSGGQNEAFRYPQGVKLDQENSRIFLPKLGWMRYRNSRQVTGVVKNVTVSQSCGKWYISIQTESEVSTPVNPSASMVGLDAGVAKLTTLSDGTVFEPVNSFQKNQRKPARLQRWLSRRVKFSNNWQKQKRKIQRLHSRIANIRRDHLHKVTMTVSKNHALIVIEDLKVKNMSKSAAGTVSQPGRNVRSKSGLNRSVLDLGWYEMRRQLEYKQLWRGSQVLAVPPAHTSRRCACCGHTAKENRQSQSQFRCQACGYTANADVNGARNILAAGHAVPACGGRVQSGRPLKQEPTEMIQATA

SEQ ID NO: 64110 - protein, 158 aa, Okeania sp.
LSFVVEIQPEILPQTDNSVGIDLGISTFATFSDGRKVDAPKPLKKRIKKLRKLNKSLSHKTKGSKRYEKARARMAKFHAKLKDTRIDFLHKLSTKIIRENQTVVLEDLNVSGMIKNRNPPPPLPGGEQEGWVSDARLENIQDFCRRKSRKIWSRFQSN

SEQ ID NO: 64111 - protein, 399 aa, unknown
  TnpB Polypeptide
MKLRYNFRLYPDEEQEASMKQTAGNTRFIWNYFLTQNRLHYDLYKRFVFEFDMNNELPYVKSKYEWLNTSYSQVLQAKLKDLSKALKFKKNNRGFPHYQKKWNASDSFRYVQHTKIIDGKLRLPKIGDIRIKLHRDLPKYSSVTIYQDAGKWYASFVIEVDEQPKVKIDTSIGIDVNANNIADSNKILHLTPRPNRKYKQKLKFLQQEVSRKKKKSKNRMKAMARLKRFSAHLRNIRLNFLHQISARITKAADLVLVETLNIEEMKKNHKVAIAVQDNGWAALFGLLQYKCELIGHHFHKINKWLASSKTCHCCGNKKDKLDLSIRTYVCDECGHIEDRDINAALNIDTWGWQEVMRRVKKSGPERAKVLLDVVLDTLSSDGISSTQLKEEAATSLESR

SEQ ID NO: 64112 - protein, 333 aa, Metallosphaera sp.
VSKNLRIKSFQPEEEYVYLTYSLKNDKKEESKILVENYKILLQKALDWLWDRTKVERKQVKKGKKIFTKIKITLPERKEVYKTLRDELEKVNVLASHYVDRAINDSFSILKSWKRRAEKGQASLRKPKLKKVYVRVKSTLRKVEGKSVRVTVKPYEYITFSWSHTWFSRRVKGLELGEPIIKEDKVYLPFRYELPWSTPIDFLSVDTNLYTLDAYDGDKFVTFSIKELYSLKYGMQLKMSRVRSFASKQTKKGMELMRKYSHRERNSVVDYIHKFVNKLQETYPITMFAVEKLNKQAMFEDANDSLSKKRFPRLYGGQSTVCLNTRLLFMVLL

SEQ ID NO: 64113 - protein, 272 aa, unknown
  TnpB Polypeptide
MKQTIAVKLEPNEQQSQALRLTMEAFNLGCDYVAEVAFKKRLANKIAIQPFVYGTLRSEYGLSSQMAIRAIAKAIEAYKRDKNIQPAFDPHGAMVYDHHIMSFRDLSHVSLLTLSGRELLPLRYGAYQQARMDRVKGQADLILRDGTFYLYLTVDLPSAPPIEPVDVLGLDLGIVQLAVDSDGEAHTGAGVKKCRRRFQGLRKGLQSCGSKSAKRHLKRNRRREARYQKHVNHCISKHLVSKALVGQRAIAIEELSFINQRVAVKKNQRYER

SEQ ID NO: 64114 - protein, 452 aa, unknown
  TnpB Polypeptide
MFKGIKLELEAEEKEFISLDGQSRICNWLYNHLLEMANKHKEIFVETQDTNAAKIVYSKRGLRNLLPDMKKELPFLKSVHSSPLKNTALRVSAAIQEHQKGKKGKRKNKSGWPQFRSWKKSWFSLFYDEPNKGWKLEKDFLIISLVMGCYLKFHIKEASILKNKKLRNLRIIRQAGHYYAIFTVENNLPQQKPIRKVIAFDPNHKNMAYGVDCAGNSIEIAAPYWLKRYDKRIDEIKSKRDHCQKKAKKLIDEKSGKEYFIPSKRWQKYNKTLEIALHKRREQTKVFMFTISNDLCREYDCVGVGDYTPQGGGCTIKMRRAMNNRSLIGRFKEIMAWTAKRSGKLYIEYDEKGTTRTCNYCGYKVEDGLSPSIRKWECPVCKATHIRDENAAQNGLKKVLRELPTKSETSVSLVPGSGLDFIKNRWAWRVLPSGVEKHLRGKDCIQLQASGN

SEQ ID NO: 64115 - protein, 452 aa, Pleurocapsa sp.
MKYKHYAKITFMVKLNVRTDKWQIVATRQQKELLQNTVFEFRRLVRCLVGVVNTHWSTIGLLDGLSQIPAVEKLIHQTAKNPSPRYKYFNRRFFKFPSYYRRGAIQFAIGQVSSFNTRYREWQSGIRKRQDSNPPRLNADCGTYPPLYKGQCVKFAKDNNSAAIKVFDGLDWMWITVGIEGHRKRHLNPNNVRKSPYLIVNGRSCHLSVPFQIKTPKFKDTESVLSADLGINTTATVSVINFDGTVSHREFIHPGRDIDRRDKRLKRISKKASLTGQLQRGFARGLYRKAGNINREIGQKVSARLVKIAKQYGIKYIVFEHLKGWRPRGGKKRSTLKQRFHNWLHRRIVNLTEMKWSELGGRVVLVNPRGTSSYAYDGSGKLKRNNQNDALARFANSKLYNADLSASYNIGAKGILKLCGGNSPEVGQGKNSCPSPRSRGTLSMLWVVPSIL

SEQ ID NO: 64116 - protein, 233 aa, Pleurocapsa sp.
VADSEGNIVDRPRFIKQAQEKVNQLAKKGRRKKAPNFKKRIKASRRWKKANKAVSKVQAKVARQRQDWQHKVALDIVRSNSFIATEKLNLKNLTKKAKRGSKRKRQKSGLNRNLLDVGIGNLKSLIKYKVTEVGGIYIEVPTKKLAPSQTCPSCNARRKKDLSERIHTCDCGIEPLDRDVAAAQVMLNYARGLGTNLLQDAESSSSTNCGSMRQLGAKKSVGDPGVSPACRTT

SEQ ID NO: 64117 - protein, 432 aa, Pleurocapsa sp.
MILNYRYRIYPDNEQVELLDEWLETCRVSYNYALRELKDWIASRKCSLDRCSLESEYMMAADYPFPSYHQQQNNLPKAKKKFSRLQAVPSQVLQTNIRRLHDSWDSFQARGYGFPRFKKYGQMKSMLFPQFKTNPVSDWQIQLPKLGKVQINLHRPIPEGFVIKQVRVLKKAIGWFAVVAIESDIELPSPVPHGHAIGVDVGLLSYVATSDGYIEKRPKFFKTAYRRLKVLQKRLSRKKKRGKNYEKAQLKVAKQHNYIAFRRSDYQFQLAHKLCDMADTIYVEDCDFRIMAKGMLGKHTIDAGWGKLRDILEYVAQKRDVFVGRVDHRGTSQVCPNCRSEVRKDLRVRLSECHECNYVVNRDIASGQEICNRGRETYRGTPEKQEIGSQVVLSGNLVVDKWRNLSLDSRGARSISDNGSPHCNNFRAKAIK

SEQ ID NO: 64118 - protein, 308 aa, Actinomadura sp.
VSRYRLQPTPIQEAALLEHCRHARFVWNLAVEQWAGWRRGRKRPPGFGERCRQLTAARAAEPWLATGSVIARQQALKDFALAMANFFAGTHRRPTWRKAGKDEGFHIVAMKPGNVRRTSRNVGQSRIPKVGWVRFRWSRAVPRAKSYRVTRDGAGRRHMAFAVAPPPLAGPGTGSVVGVDRGVVVSAALSTGELLHVPGLRETEARRPRLLRRRLARARPGSKRRAGTKAALARLHARCSACGNLDRKARESQAVFRCRPCGFVGNADVNAALNVGNAARHAVSAREGLWDAGPTHREPHLAHLRSFA

SEQ ID NO: 64119 - protein, 461 aa, Micromonospora sp.
VNTIQAYRFALDLTPRQERVVLAHAGAARVAHNWALGQIKAVMGQRAAERTYGVAEADLTPATDWTLPALRKAWNSAKDEVAPWWRECSKEAFNTGLDGLARAMKNWSDSRGGKRAGRSVGFARRKTKRRTTPSVRFTTGAIRVEPDRKHVVLPRLGRLALHESARKLARRLDNGTARIMSATARRDGGRWYVSFTCEVQRTPCVPARPASTVGVDLGVKHLAVLSTGEVVANPRHLAQASRRLRRLARRQSRRISPDWRVRRAESKRWEGTRRALASVHARVAHLRRDGLHKLTTRLAREHGTVVVEDLNVAGMLHNRKLARHIADAGFAEIRRQLAYKTQWSGGQLIVANRWYPSSRACSGCGAVKTKLALSERTYTCTTCGVTLDRDLNAALNLAALARDVVDDRSGRESLNGRGADRKTPLAGLVAVKRLPGTAPAGQTGTVPPQGGAIDRVHTKVH

SEQ ID NO: 64120 - protein, 521 aa, Calothrix sp.
MANKEKTPSFITEFELIVTSLAEKELDARFQAGRQLYNAALSEAIVRVSLVRNSEPYQEASRIKVKSDEDKKLRNELFSQARKQSRFSDFELQNFATITAKNAKWIAEKLDSHTIQKIGTRAFKAAERVLFGKARKVRFKSFNAFHSLESKTNASGIRFFGGTDCCMKWGSYLTLPIRFPLEWNEVLEYGYRSPVKYCRILWREINGKRRWYVQLINEGVPYKETPAYKLHNKVNLNTGLVGIDLNVSNVAVVGDDKAGLFPFAENVPTLEQEIKALQRKMERSRRATNPTNYEPDFEKKVGRRNKRKKGKVKKGTRKWFNSKAYKKYAKNKRDLERRKAAYAKSQNRGLANQIVRKFGNNIKAEKVSVKAWQRRYGKAISAKSPGFFQSELSRKAESAGGKFTTFSTRKTALSQTHLDGTRIKKSLSERVHKDVSGFEMQRDLFSAYLSRYVNDDSELQVSQAYSNWGRAEPLLTQAWSEFKTASARTSSKPGGVISPSEQNCVKANQQRQIAFKKGKKR

SEQ ID NO: 64121 - protein, 516 aa, Calothrix sp.
MKAKKQQTTEESYTVITPVIFCDDEPQIDRLMNACGVVRAVTYNKLGSLQGWNLNWMFAAPQIKPILPPESVGMSKCRKIWEWSVNDCMKAIAAQQEAAIALIIREIWQKLPMQVNQQKRIAWLSETYNKKLHEQALILFPKCEIELSREKLLNLLYTNPTADNWIHRRIRKHFQRGHTYKRNQIVYQGAGYKCKRVNRHSVVLTVMGEDARQKITLKLRSRQIIKGQIRLIRNEQGVLEVHWTRTRTIILPTQSKLPVKIGLDKGYTEGFYTSDGIQVAPGLGKLMSDKTNRITAKNRNRYRIRAFSESLKKHDPVKAARILKNNLGYKVKSRKLQNEKNTIKNFIRRDLRQVITTNVELFCEDLCSPIKSKTAAKSINRKLNQWMKGELQTSVDKIALETGSKVTLVNCAYTSQTCSLTGTLLGFRKGDRFTCHTGVVLQADLNAAKNIRNRGTDYEIQRFMKSEVVLVVLLNRTIRYLVSIGKSISDALELGWLNPKFKTKALKLETIYHSQG

SEQ ID NO: 64122 - protein, 578 aa, Calothrix sp.
MSKSLLSELTHRSYSKAKNPDGTRTPQLRIGVEARIDYHPFLEDWGDRYQSIVRTALNELQYGQSEDNIEKTFQRRFDIDWAWADSIATDAKGTFDQLTEARALRIKALNDDIKAGWESVASTIELMSQQLALPSRKNMKGFARRLMGLESKVNRLERKQVEKEELEKAKRLHICFGGAKLFNAQYHLENNGYSSHDEWRADWEKKRGGNFYSIGSGSVVGNNRVAKIFYIQDDIFSVTFTVPRYLRGDYGDTVSLEFEVSGQRKHNLLYALESGKPVTVQCFRREHKNDQWYIHLTTYVQDVPTISNLQNGCIGIDLNAETIDVIYIKRDGNPERCRNAISFPIPTGTTGQKEAKLRDIVCEIVKLAEIYQCPIACENLDFSTKKNQLRHSLSKEYNRMLSGFIYDKFRSYLVVRSEKYGIEILFKSPFLTSVIGMVKYMQKYGLNSASSAAMVIGRRALGFREYIPQQWLKTLTAFFRPEDWDDAGFGGGWRAISAWLKKFCIRRPRMFELDTVLRFLLDSLVLESQKKTYKKRKPGGSNKSGGKRKGKADPTEAQVLLEREQMKVTQKGAFTVAP

SEQ ID NO: 64123 - protein, 502 aa, Calothrix sp.
MSTITYVKGLPTKESEINHLGFTDFEMFLNAFSAIFKQAVCETVEAILSSKDFEKKKGKFNTHLQKKYGLSKRHANGVIALASGKVNSACECRANHIKQLEGKLKSAKIWLKNALKRLSDSQKFYAKKNWHSSKTGCKVPLCCDLNTGRSNWHAIRFQIHHKKRYIYVLENKIAHLKTAPIRVKVSSSEIYIVGSKDESFGNSVCQYDGNEIFFRVPYCLEERFGKYIETEIGNFDRNINRLPNDKAKTWHFFRKNGRWVVGVQFTPKPVEKVSRPVQYGAIGIDINASSIGWAYVDYQGNLQNFGSIPLQSGLSKNFNSQQIVNACLELAKLATKYACPVVCEELDFSNKKELLREKGKKYARMLSSFAYSKFYQLLESILSNRGISLYKKNPAYTSLIGLVKYSRMYGLSSDIAAALVIARRGMNLSEKLPVSTNAYLGVNPRKHVWSGWSKLNKITKNIAIVKSRHDYFNVPNWGMVVKVVVLGVAVKRESRAASKSAK

SEQ ID NO: 64124 - protein, 401 aa, unknown
  TnpB Polypeptide
MLSYEYKVDGTPKQYAAIDEAIRITQFIRNTCLRTWMDKRGVSKNDLQCSCAVLAKEFSFASLLNSQARQVAADRAWCAISRFYDNCREHKPGKKGYPQFQHDNRSVEYKATGWKLDKGGKHIIFTDGCGIGRLRLVGNKKQQITTFPLTHIKRVRLLRRADGYYCQFALKAERKVEHVSTGAQVGIDVGIKYFYVDSHGNTVANPRFLRKAEKKLKRLHRRVSRTQKKSANRTKARKTLGKAYLKVQRQREDFARKQANALITSHDLIAYEDLKLANMVRNHKLAKSISDASWGQFLQWVNYYGAVQEVPVIAVAPHFTSQQCSGCGHMVKKSLSERTHICPYCKLVLDRDENAARNILTKAGGRTVGHTETGTSAHVRNASGQIDLYVSPAMETRKSAG

SEQ ID NO: 64125 - protein, 461 aa, unknown
  TnpB Polypeptide
MSIPLMYREETDYLPRTEQIWIKYNDTLSKLCHYSKNLYNEANYIVRQEFIKSYKSSGTGNYLNYSIIDYLIKDKSKNYQSLPAQTAQQILKILDRNWKSFFEAIKDWKVNPDKYLGRPKLPGYLKKDGEFLLVFTDQQVKVIDGKIKFPRMLDVLNYKNAIKTRIKSVIKELRIIPKVTTSKLSKNIGYLIDLVYYKEVKKINNLNKESVIGLDFGSRNIVTISNNIGEKPICIKGGVLKSINQFYNKKLGHLKTIYSKQYVIIEEIDKNTGNKTEKMVQRSTGPAIQILTVNRNKKIKDTMHKYSRFIIDYCIKHNIGTIIVGHNDNWKQEINLGKRNNQNFVQIPFYQLIKMIKYKCDEVGIETIEQDESHTSKCSFLDEESVEHHDAYVGKRISRGLFKSGKGKIINADVQGALNIIKKAIPKAFPKGKVDRIEDEGLHPLRIDPLNVNRNVNIVGS

SEQ ID NO: 64126 - protein, 425 aa, unknown
  TnpB Polypeptide
MTSITLVTESKLYLKDNTPLYDYFDEYSKLFSFLVRRCVHHLRHQLNDESESRYRTNLMLEFNITNRMAKAVVKTAKNQLKLLKEAARYRYNNLYKRKRSLYKKIQKLKSLLSSSSTSLKQRKLAKLRLFWIQMKLNKVNQLISNGLRLQLTFGTKHLLKNNKTKFLAKRDNQVVYIGDKNETCGNQQFQISFNSKYNRFDYKLRLEKQWASGSDKYIYGSFVLKNKEAKTHILKTLSKKKSNPLTYRIIKRDNVLYLQIMYRRETSDVTRNHYGVLGVDFNKGFISVSEISSEGELQSLTRYTYLHQGKATKTKASMLKLVSKLVSQAVNVGKDIVIEDLVSLDSNKKQEKTTSKYYNRMINNLKFGLFKRCLLSKAPKEGVSVQFVNPYNTSKIAKTSYTDRMKLNVHDAASYVIARRFYQYD

SEQ ID NO: 64127 - protein, 436 aa, unknown
  TnpB Polypeptide
MKLTGDFKALETSIVIYRQVLTFLIPIINDAWEELSQYEFANQKYNQIEKWVHSSQNNQALFDFDQQFPKLPSYLRRSAIVTALGIVSSYRSKLANWEANPKGQAPKLQLVHYEYPAYYKGNLFKNFDPIHQTIELKVYKNGDWVFEQYGLKQSDCTYYKRYLAGKKQNVPILQKKGRRFYTAFSYEENVQLVPEESIDKICAVDLGLGTDATCSIMGQDGTVYARKFISFSKEHDRLYTQLGRIKRNQKRGSYHNKTLWRSVSGISQDIADKTVQAILDFGNEYGVDVFVLEYLDFKGKKAVKRAHFWRYKRIYKVLTQKAHQYGLRIARVNARYTSRLAFDGSGWSKRGREIAPNTPYSTIQFATGKFYNADLNASYNIGARFFIRHLLKTVTVTQRLALEAKVPQVAKRSTCTLSDLINLRSEFVTLITKTQA

SEQ ID NO: 64128 - protein, 442 aa, unknown
  TnpB Polypeptide
MQIISSYGVELRKQNIPIRQTLEIYRSAVSYLIGIYVQVWEELAEIPDAKRRFNAAEHLVHTTKKNHACFDFDIRFPKMPSYLRRSAIQHALGTVSSYKTRLDLWEKTDGKSGKPKLVYENHAMPVFYRDVMYREGAEGKDEAYLKLYDGHDWKWSCVRLDHTDMEYLRKCWSGKKASAPTLEKRHQKYFLRFSYKEEVTLTKTPVKEQIICSVDLGINTDAVCTIMRADGTVLGRKFIDFPSEKDRMYRTLGRIRRFQREHGSAQAGERWAYTRRLNIELSRKIAGAVAEYAWENHADVIVFEYLEMNGKISGSKRQKLQLWRKRDIQKRCEHQAHRKGMRISRICAWNTSRLAYDGSGIVLRDWRNHSLCAFQTGKRYNCDLSASYNIGARYFIRELLKPLPATERSLLEAKVPPVKRRTSCVYADLRKLHSEMELLKAA

SEQ ID NO: 64129 - protein, 380 aa, Azospirillum sp.
MQVLSYRYRLYPNRAQNVGLEMMLGSFCDLYNAGLQQRIEAYRRQGKTLRYIDQAAELKAVRVVDERLAGYSFSAEQQVLRRLDKAFTAFFRRLKTKTKAGFPRFQAKNRFDSAEFRVGDGLTVRKSKRLGITGIPGEIKVNWHRDLPIGAKIGAAVLSHSAGRWFVCFQIALPDQEVQPRDGAAVGIDVGLSNLIATSDGERVETPQWTRHAAKKQRRLQRALARCKRGSKRRLKAKQRLARHSAATANQRQNFLHTLSRALVDRYAVIALEDLSVDRLARSMLAKAVHNAAWGQLRHFIEYKAASAGVRVDVIDPRGTSQTCPACGAVVAKTLSDRVHRCDCGCVLDRDVAAAKVIQQRAQGTRPGHGLRTPSQRDAA

SEQ ID NO: 64130 - protein, 423 aa, unknown
  TnpB Polypeptide
MIIKKVFSLEVSRVHTLNITRQLNNEQLTILNHLTYSASKLWNVSNYEVMQRNINPNKIDVQMKNNFWFKNLHSQSAQAVCQKLSIAWDNFFKHYTKTEGFRCSPLRSEHTKKPKFQPKDGHFPVKWKKNGFKIIDNKLRLSLSKQTKNYLKEKHGIESKYLWIRLPKILSLNTMKIKEVEIVPHDIYGKRYFILHLIYKKKITPLTFNNEKVMAIDLGIKNLATTVIQNEKQPYIFNGKTLVSKLRWFNKTKAKLMSILSKQKLKTSKRLSKLTVKEKNYVKDYIHKVSRMIVELAKNDKVSKIVIGEMNKGITSMNIGKINNQKLHRIPFGKLIQMIQYKAVGYGITVEQVNESYTSQTCSNCGIVKKSNRKYRGLYICSKCGLIINADVNGALNILKKVVPNPSKDRDSGLGNPIRIYSL

SEQ ID NO: 64131 - protein, 147 aa, unknown
  TnpB Polypeptide
MQKGSKNRGKQRVRVARLHEKVANQRKDFLHKQSRQITNAHDCVCIENLDMKAMSQALHFGKSVSDNGWGMFTAFLKYKLEEQGKKLVKIDKFFASSQICSCCGYKNPETKNLSIRAWDCPECGTHHDRDVNAAINIRNEGMRIIFA

SEQ ID NO: 64132 - protein, 247 aa, unknown
  TnpB Polypeptide
LDFTFEENVKLEDKPIDRQIIIGVDLGINNACTCSAMLSDGTVIGRKILSLPREKDSLGHKLNKIKKAHQHGARKMPRLWAKAKGVNLDIAHKTAQFIADVAMLYSADVIVFEHLDTQGKKRGSKKQKLHHWRAQAVQRIVADKTHRDGVRVRRVCAWNTSKLAFDGSGEVERDEHNYSMCTFKTGKRYHCDLSASYNIGARYFIREILKSLPAKARLGIEAKVPQCTKRTTCTLSTLLSLNAELVA

SEQ ID NO: 64133 - protein, 416 aa, unknown
  TnpB Polypeptide
VTIPGYICEICDDEKEELERLLFKFGNARRRAYALKQKGYTRSEIVEILREEMGLNARYVRDAYDSIKDLPPHVTFGGLKNQRLREKGKISKEEYRKRRNSIVIARGEKNKKGNLNMRLDLEKMELRINTGSRWIYPKIFIPQKYLKKYGHLLDGSAPYTVVIKRRNNDRGYDVRITVEVPTEEKEGSRIMALDVNAGHTDFAVMDKRTKKLVAAGRISHHETQFVRSGKRDFLIHKLVDKIGNMAEHFDADVAVGKLNTGKFKSRNRKANRKVKNMPQHKLRRALKKLRMRGIAVIESSEAYTSKVGRKLSPLLGIDVHKAAAIAFCIKLIDDDLFESMRRNPPGVASDEGDGSLRGRRGAGCGPTAPRQSQRGLAGDDPGRARLAGDARYPALSALAESLKTSLAGRIWHVKIC

SEQ ID NO: 64134 - protein, 489 aa, unknown
  TnpB Polypeptide
MLTGRKFAARFKNSSAREAYFTWSAGQMFIYNECVLEQRFFDSLSRLIAETERHKQPIRNECRITRPKPDQKYAHFVDKAQRPWLSQVPSAILGIGAFRFCQASKRAAAGLAARPKLRAIKDAERHLLLTRAYFTIEPTSRAGWYELRFGSARIPGGTILFRAHREFAVPAMVSVTLTSKALFVSMSYEETEQERFPETEKEMLERLRQYSEEELIACGNGIDRGVVRPVQTSNDPEPYALTKDQLERIRRKERQRKHYQKRMARCEKGSRNRAKMRRKVARTFDYRKNVINDFAHQTSHALVSDDKVQFFVLEDLKVKNMTKRPEPKYGDNAKALPNGARAKAGLNRAILSSGWGKTEEYLKYKAKKAGKLVIKVEPAYTSQRCPKCGRVERKNRPSQSEFRCVSCGFESTNADYVATGNILMVGVKLIREGRFEPKKVKATLRGKPAKATNLKLGPGWADVMPVEPERCLGRLGCRTRCEAGSPSFQ

SEQ ID NO: 64135 - protein, 499 aa, unknown
  TnpB Polypeptide
LPVCLCRRAGVQGRQGRRGGRSRSERAPPPPTDPAPRPQGRRHHSRAPRPVGPVRFGVHRSGIGGFRATPGRGGPRGEEGRPGAGYARRTDQLLCPSLRSQGGPEPRRTRHVCHGGQAVIVNQAFRYELDPNVGQGEGLARHAGTARFAYNWALNLCRACLDAKERLPGGMTLHRLWNRWKGDNAPWWAEVSKCAPQEAFRDLDRAFANFWRGRKTGKRTGFPRFRKKGQDDRFRLTGAIHILPRAVALPRLGPIRTKEPTAKFQGRILSATVAREADRWYVSLAVERERPDPALVEGPVVGIDLGLDCFAVLSDGARMEAPKPLARNLRRLRRRSRAHSRKQKGSANRETSALALARLHRRIRNQRQDFLHKLTTRLAKTKSVIVVEDLSVAGMIRNRRLARSIADAGWSEFRRMLAYKTTWYGSHLVLGPRFFASSKTCSACGSAKASLPLSERTFWCEACGTTLNRDLNAALNLERLVAGSSPETQSARGVDVRPA

SEQ ID NO: 64136 - protein, 377 aa, unknown
  TnpB Polypeptide
MILAKKIRLYPTAEQEYKLWQSVGTARFIYNWALYKQEENYKNGGKFIKDNDLRKEITQLKKDELTWLNEVSNNVAKQAVKDCCNAYKNFFKGLANKPKFKSRKKSKPSFYNDTSKLKAKEKSVLIEKVGWIKTKEQIPIGVKYTNPRVSYDNKYWYISVGIEINQPLVKLTDESLGIDVGVKELAVCSNGMTFKNINKTKEVRRLKKSLKRKQRKVSLKYEMNKIKKGGENRCQFKKTNNIIKLEKEIKLIHRRLSNIRLNYIHQVTTKIVKTKPSRVVMEDLNIKGMMKNKHLSEAVAEQSLYNFKIIMKYKCEFYGIEFIEVDRYFPSSKLCSCCGSIKKDLKLKDRTYKCSCGLNIDRDLNASINLSRYELAV

SEQ ID NO: 64137 - protein, 259 aa, Gammaproteobacteria sp.
VRFCSKTFRVFEPERLEGVKWKQGCFAQDAVGSWWLCLPIEVRIEETVAPLEKVGSDLGLKEVAVTSDGARCERNRFYRGIEHKIAQAQRRGHLRQAKYLHRRAANRRKDALHKFSRQVVSQYQKIVVGDVSSTQLVKTRMAKSVLDAGWGILKTYLQYKGQQAGRIVQTVSERNTSCTCSSCDSLTGPRGVNGLHVRHWTCAACGVSHDREVNAARNILRRAELPASVCGNESSSLRVPPSRASRSRKAGIEPVRTVA

SEQ ID NO: 64138 - protein, 216 aa, Thermosporothrix sp.
VGIDLGLRAFFTDSEGNTVAPPQDLRKAERRLKRLHRRLSRTQKRSRNRRKARQALSKAYLKVQRQREDFARKQANALISSHDLIAYEALQIRHLVKNRHLAKSIADAAWGRFLSWVRYYGTLHQVPVIGVEPAYTSQDCSRCGQRVKKSLSMRTHLCPGYGLLLDRDHNAALNILHKALQGTVGQTGTDEEVSSNASGQPAATRRRTATTRKQAG

SEQ ID NO: 64139 - protein, 500 aa, unknown
  TnpB Polypeptide
LNRIVGWPWPGAAPDGGASTTAVVPALFYRCAHEAAAVSSGGRRHGQCDPGLPVRPRPTPGQRRALASHCGAARYAYNWGRDLVQQRLERRRAGEDVEVPWTMFRLQWMWNRAKHQVAPWWAENSKEAYKSGLDGLARALKNYSDSNAGRRKGRPMGFPRRKRKGRCRDACRFTTGPLRVEADRKHITLPRIGALKTHESTRKLARRLEQGTARILAATITRTADRWYVSFTVEVQRHLPASNGHDTVVGVDVGVRHLATLSTGATIPNPRALEHSLRKLRRLNRQLARHMPDAKRRTVTRRRLARVYARSANLRRDALHKLTTGLATEHGTIVVEQLNVAGMVRNRRLARVIADTGLAELRRQLIYKTTWYGSRLVVADPFYPSSKRCSACGCVKAKLTLAERNFTCEACGLRIDRDLNAARNLAKLAPHVAQSGWETQNARGADRKPQPAGQVAVKREAGPEHCSDRTGTAVLQGAASWDVEDPRMNAPSRGNGSCPC

SEQ ID NO: 64140 - protein, 380 aa, unknown
  TnpB Polypeptide
MKSIATIKLKIPKRSELLETMKQYSKAISYIADKGFTSGIHNRYKLHHLCYYEARQKFNLPSQFIINANRIASQTLKSIKTNKGSKPTFKELMPLDFDKRTFTFSFDNVRLTTIKGRIDVPIEVPEYYWKYLDWSYQTALLTVDKNNRMFLHITFSRDIYIKISNGYQVGVDVGINHIAVTSNRQFFSGTKIKSYRLKFKRLRARLQSKGTRSAQKLLKKISGRERRFKAYWNHVISKQIVNNCNAGTIVLENLKGIRNARKGKRFNFWLNGWSFYQLQNFISYKAVQRGINVTKVSPYNTSKICSRCGSLGSRSKGFFVCSHCGYSLNADLNASFNLAKHHSISDGVLVAVTQPNIQSYDVKGTFCATATELMDKSPHL

SEQ ID NO: 64141 - protein, 411 aa, unknown
  TnpB Polypeptide
MLTHNCYVFRIYPTSEQEEFLFKTIGCARKTYNLLLDRYNELYEQKEKGELSDDEYVKLKNSLNPSFFKNKEECSYLKEVDSTALKYAQMHVKSAFKNFFDGRADKPKFKSRNKSKWSYTTCRASKGARNLRLEKGGKLYLPKMSKSPIKTVVSRNPRGTLISATIVKSRSNTWHVSLMYEHHAPAVIYPETIEAMKSPIGVDVNLEDLVVTSVGEVFKNLRFSYKSKEKVKKLDRILSRKREQAKKDGRKLEDCKNYQKAKIKRARAYEKVRNQREDMLHKLSTALVKNHDFIAIENLSVSNLQKNHCLAFAISDASWRSLFTKLEYKAKRAGGIIQVIDRFYASTQTCSSCGEKCGPKGESSLKVRSWTCSNCGEVHDRDLNAAKNIVAQGLQEFSAVGTTVAYSVKKA

SEQ ID NO: 64142 - protein, 394 aa, unknown
  TnpB Polypeptide
VEERVTAGRVSVCRGGRKIAKSRHSLPAIGKTVEQWRAEWDAGRWFLTADGEAGKRLGNETIRWDPDEDWLELKLPAPLAHLANAPHGRYRLECPVSFPYRGDEVAAQTASGPVRYDISYDPGRDRWYLDASWRAPARPVPPLENLRARPVLAVDLNHGHLAAWAVTPDGNPAGPPVTVPLELAGLPATQRDGRLRAAITTLITLARGHSCRAIAIEDLDFADARQQGREHTGRRPSRGARGRRHRVITAGLPTARFRDRLVQMTANAGLHVIAVDPAYTSRWAAEHWLTPLRDREQVTTGHHAAAVVIGRRAHGHGARRRESVTGGDQRIAARRAAPRAPQARHANRNGGIPRATRQPPRRHKTAAADPEHPPNQGAEDRSRPPAEPVLTTAQ

SEQ ID NO: 64143 - protein, 378 aa, unknown
  TnpB Polypeptide
LIKTYKVRLEPNKEQEQKMWQSAGTARWAYNWTLNTQQENRQNGGKFIQDGDLRKSLTELKKTEEFNWLNNYSNNVTKQAVKDACHAYKSFFNGRNKFPKFKSRKKSKPSFYQDTAKIKFSESHVRLEKIGWVRMSETNRIPQGKYFNPRVTHDGLHWFISVGIEIEQPILDKSTTEPIGIDLGIKELAIVSTGEVVKNINKTKEVRRLTKKLKRLQRQASRQYEKLKKQGGESRCEKTSNLLKLEKEILKIHQRLKNIRTNHIHQSTSKLVKNKPEYIVIEDLNVSGMVKNKHLARAIQEQKLYEFRRQLIYKCQWYGVRLIIADRFYPSSKICSQCGQIKRDLKLSDRVYYCDCGLRVDRDLNASINLREYGKLAS

SEQ ID NO: 64144 - protein, 409 aa, Nocardia sp.
VSILQRAYPSADLVEVLNMHLGHARYLYNLGLEQRGYHVKGQALRLNAAQQQRELAEARKEFDWLRAGSSSVQQAALRDLDRAFRNFFARRAGYPRFKKRHRGRESFVVRDLVVRRLNKRWGEVVIPKSATRLRFRVTVAWDRIAAAKSARVTFGNGVWHVSFVTAPPEKMASVSDDVLGVDRGVANSIATSDGEFATAPGLSQGQQRRAKALQRKLARQRRGSRAREETKRQLGKLRLVDRNRKTEWVEQTTTRLARAYTGFALEKLPIKNMVKKPAPRPDPDQPGRFLPNGRAAKRGLARGIMSSCWGEFARRLADKSSVVFVPAANTSRTCVPCGHISAGNRQSQAVFRCENCDHEAHADTNAAINIRNRAFPEPEGIGGSGAEVSHSGAAPTSGLIARNTPLPLV

SEQ ID NO: 64145 - protein, 443 aa, unknown
  TnpB Polypeptide
MKQRKHRHTGPYDPQTLTRAVTHIRLEAANAGKLTALDELAQVYLALCQQYVTLFCTDERPNKLRAPLFATPLSERWHRVAIQQATGIAQSWRTNRAQAYQDYVDDLLDYHEQQMEGTLDPREQEPAWKEWNVPTLRQTCIQANTNVVALEASQDSTFDYWLKISTLEFRKQVLIPVKLAAYHREALKGKTINTSVTLNKRGDGWWLTLSYDQVVPVHTAPSAPVVGVDVGIANFVTTSTGKHYGTFHGKLRERQKRDREKRRRKAKLRTCLEKKGVKKLPSTSSKSGQRLARHVRQSINRAVNQCFTEHPDAHIAYEHLSVASMKFKARAMNAYLYASNLAHLPKQLAWNAAKRGVAAIRVKSAYTSQECSVCHYPDKANRPNQQTFCCVVCGYSTHADLNASLNIEHRWGDDELRACKDRKAVKALLMKRHETWRKANGWP

SEQ ID NO: 64146 - protein, 243 aa, Planktothrix sp.
MLLCCWYASIVIEDASVPSPLSLDTVKSAVGIDVGLKEFLVDSEGDAVPIQQYYRKAQSKLARAQRELSRKVKGSANYQKLAHKIACLHQFVARVRKEFHYQVAHKLCEKYDLIGLEDINIKGLAKTRLAKSILDAAWGQFSQILEAVAVKRGNWIVKVNPYGTSQRCSGCGKNVPKALSVRTHECPHCGTVLDRDHNAAINIKNLALNAVGLTVSACGSKRGYSACEAGIFICEEKKLTLYR

SEQ ID NO: 64147 - protein, 288 aa, unknown
  TnpB Polypeptide
LNGGSFNIPQNVLLENGKLIIPKFKKGIDIVFHRPTKGDIRQATISRTPTGKYFVSILCETGEPIKPKAIIKENTTVGIDLGIKTYLVASDGKEFDNPKFLRKAQSKLKYVQRKYSKHKGKRTKQKLAILHEKVANQRKDFLHQTSSELIKNHESIAIEDLAVSNMVKNHNLAQSISDAGWSTFVNILEYKAEWYGKNILKIGRFEPSSKLHANCGHINKELTLSDREWTCSKCGEVVSMDLNAAINIKSFSLKNILSGTDRKNQGKLPTLVGALTLEAHHISYAVGG

SEQ ID NO: 64148 - protein, 403 aa, Streptomyces sp.
VPKDGVSSAAHRPSGPGPSRDAAGSLLAIQRRVAGTPRRLRARVEGKRHVRNAVRAAQGDSGVRPGTSGPLVLLQPAGDTRRLDKAFAAFFRRKKAGETPGYPRFRGVDWFDTVDFPKDGDGCRWDSTPHDPGTRVRFQGVGHVKVNQHRPVTGKVKTVSVKREGRKWFVVLTAEQAQPEPLAATGSVVGIDVGIANFLADSNGSFVPNPRHGRKASAKLEAAQRALSRFPRRKARDRTANHRRAVEKVARLHGTVRRQRLDHAHKAALTLVREHDFIAHEDLKIRNMSKAPAPKPDPGKPGAFLPNRGAAKAGLNRSIADAGWGVFLTILHAKAESAGREVIAVDPRNTSRRCPECGHTAKENRPTQEKFHCVACGHSAHADTVGALNVLRAGLVRREAQPA

SEQ ID NO: 64149 - protein, 513 aa, Chlamydiae sp.
MRCVKQRTLKPNTRKQRDIDALINAYSREKESWLRYFDRWKNISFLGKPRLVRDEKIKEKYRSPYGLQARHWKLALTDAIETWDKYWKSLFVIVRSHVARNSHLSEDEKHYAYWLLKGYDQFSQMMQGEYPIPPFSLPVPSLKRGASALRRLLKKHKKNPPQLKRKRSVRFDADCYSSFEHNNRWYVSLMSLIPGKRIVLPLLGQTGISGTVTLVCKDEGLDLHVSCLLKPKKNASSAMEAVDFGYTEVMTDTEGKRYGTVFGKHLTKISEWLHQKGKKRNRLRAIGENKKNKKMRRCNLGRKKQTNVTRRAKATLLKEINTGINQLIRLKQPAILITEDLRHSFTFNKSKKLNRKLSSWLRGELQDRIEFKALAEGFRHEQVNPAYGSQSCPACLFVDSKNRTHDNFTCQYCRYEDHADRVAALNYFNRYGDLEIGRYTPYRQVKTILLERFHRRLELGLSKTVTGRTLDTVAGVHPPPLSIQTASLDGKVVYEPGECILANRAVTQRANRK

SEQ ID NO: 64150 - protein, 370 aa, Bacteroidales sp.
MFKAFKYRLYPTAPQAEKINQNIGCARFVYNQLLDDRIKVYRETKQRSKKTYCDLKKEYAFLKEADSRALLHARENLDAAYGKFFKEPSAGFPKFKAKHKCRWSYTTDNNSDAVRFDGNRLRLPKVGYVKVVEHRRHEGRIISATISHERGGEYYASVLCEIEQTESLPVTEKIVGIDLGLHDFIVCSDGERVSSQKHFRKSEQRLARVQRAFSRTQKGSKGHEKARLKVARCHQKIKNQRNDFLQKLSTKLIRENQVICLEDLSIKGMERNHKLAKSVTDASFSKFVSMLEYKAEWYGRKVIKIDRFYPSTQLCSGCGYRNESVKGLKGLKVREWICPECGEVHDRDLNAARNILKEGLKRIEPTEHGG

SEQ ID NO: 64151 - protein, 405 aa, Bacteroidales sp.
MFKAFKYRLYPTAPQAEKINQNIGCARFVYNHLLDDKIKVWKETKQRSKKTYSVLKEEHDFLKNSDSRALKHAQANLDESYDKFFKESNTGYPKFKSKHKCRWSYTTDNNNGTVRFDGNRLRLPKVGYVKVVEHRRHEGRILTATISKERSCEYYASVLCEIEHPEPLPVNDKVIGIDLGLHDIIVCSDGTRVEAPKHFRKSEQRLAKRQRVFSRTQKGSKGHEKARLKVARCHQKIKNQRNDFLQKLSTKLIRENQVICLEDLSVKGRERNKKLAKNVTDASFSKFVNMLEYKAEWYGRRIIKVDRFYPSTQLCSGCGYRNESVKELKGLKVREWICPECGEVHDRDLNAARNILKEGLKILNLRNVGDSKFTAHHTNSFSVSGDVLALEARPLKRAGSSQRCD

SEQ ID NO: 64152 - protein, 399 aa, Streptomyces sp.
VTIHVKRAYRYRFYPTDVQAAELSRTFGCVRKVYNMALAARTEAWALRQERINYNTTSAMLTAWKKTEELAFLNDVSSVPLQQALRHLQTAFTAFFAKQSKYPRFKSRKKSRKSAEYTSSAFRFRDGKLTLAKMDQPLDIVWSRPLPEGALPSTVTVSQDAAGRWFVSLLVEDPTVQPLPATGSAVGIDAGLGHLLTLSTGEKIANPGHERRDRARLARAQRNLARKARGDGANRAKARRKVAKVYARITDRRRDHLHKLTTRLVRENQTLVIEDLTVRNMLSNGKLSRAISDAAWSQFRSMLEYKAAWYGREVIAVDRWFPSSKLCSVCGTLRGKLPLGVRTWTCDCGATHDRDVNAAKNLLAAGLAVSACGAGVRPQRESSRTGQSVTKQEVPRREP

SEQ ID NO: 64153 - protein, 435 aa, unknown
  TnpB Polypeptide
MKHTLRFRAYLADDVASEAWRHIDILRQIRNHAVRHYYNSDYNDRPSDYDQHDKLTEWTDRWPTFAEPSQHAAQQAISQIHSDLETLQERRNEGYSVGRLKWQGTGEFRSLSYNQPRRWNADHNTGDDRFVRLRLEKISWFKIRAERDVPPTEDSDEVILKKETTGEWYVSLVTTVEDTSEKPPLSEIEPEDCVGVDLGITNYIHTSENLSVDTLERVGLAESDEYDRYAREQRKLARKEHGSANWEKQRQSVARAKRTIKRKVRDYQHKLTTWLVQEYDVVAVEDLDVKPMLETSQSAKNKQDAAWARFIELLEYKADLHGTHVEKVKPEGTTKECACCGVETAKPLWVREHSCPACGHEDDRDLNAAKNILTRGLRQLGAGRSEETPVQTALPTFTPQREAVDAKRVVEAGSSGIVRKTQSSMMTRDSVSRTT

SEQ ID NO: 64154 - protein, 181 aa, unknown
  TnpB Polypeptide
LKNSLQRLNVLQRRVSRKVKGSKNRQKAIQKLARCYETVANQRNDLLHKLSYQIVSENQAIAVESLNVAGMQKNHTLARSINDVSWSTFFTMLEYKCRKYGKTLLTIGRFDPSSKICSCCGYRNRDLKLSDREWICSDCGTVHDRDINAAINIKKFAVQEQNLVGVLTGAERAIEPVDLPQ

SEQ ID NO: 64155 - protein, 372 aa, unknown
  TnpB Polypeptide
MLRTVRYRLRPTRRQRALLDGALALCCDLYNAALQERTEAWRRQRKAIRYQDQTRSLTELRRLYPDIAALPVDLAREPLRRLERAFRGFFRRVRAGARPGYPRFRAPERYKSLAVSGVRVQGNVLVVPKLGGFRFRQSRPLRGTPRCCALVRHGARWSVSIVCEIGPAPAKRPVTRPIGIDLGLSVFVTLSDGSVVENPRWLAQSADVLADAQRALARKRRGSRNWTRARRTIARCHARIRNRRANFCHHVSKALVQTYDLIAFEQAQLRGLARSRLAKSMLDAAWGQLLGQLTYKAEEAGRWAVPVDPRGTTQRCAGCGEHVPKTLGERMHRCPACGMVCGRDHNAALNILALGTRAVGCTMAPERHLDSQ

SEQ ID NO: 64156 - protein, 374 aa, unknown
  TnpB Polypeptide
MRRNFVYRLYPTKTQASAMRWTLEECRWLYNHLLEKRKVAWEERQESLRLYDQQKYVTGLKTERSSLRVVNAQVIQNVAVRLDLAMHAFFRRVKAGETPGHPRFRGEGRYDSFAFPQAPSGCTLTGDRLSLAKIGTVRVVLHRPLEGTPKTCTIRRSSTGKWYAIFSCEVADPLRLPASPERAGIDVGLSTFATLSDGDTIASPRFFATDERALGGAQRRLAKEAKGTPQRKKRRKPVARILERIKFRRHDFTHQRARRVVNRYGVIAVENLRLNQMGRDTRFAKGIHDAAWGQFSDALREKAGCAARQFVAVNPAYTSRDCSGCGARQALPLAVRVYHCPSCGLTLDRDLNAALNILGVGLHTLGLGPRSPRL

SEQ ID NO: 64157 - protein, 403 aa, Nostoc sp.
LFNLTYEFKLKPTHAQAQIFEDWLEINRRVYNYALAERKDWYLSRSCRINACSLKHEYIIPADTSRPTYASQCKALTAAKKDFPELKKVQSQVLQQTLKRLEVAFVAMWERNHGFPRFKKLGRMRSFVFPQIQCQRLNPGMVNLPVIGWVKFRQSRAIPDGGVVKLARVVKRVSGWYVMLTVQWDVSVPKPLPHGEAVGIDVGLTSFIATSNGLQVLRPKFFVDTERKLKLLQQRVSRKQLGSNNWYKAIKKVASLHEYVANCRKDWHRKLSHQICNNAGMVFVEDLNLVSLSRGILGKHCLDAGFGQFFNILQQTCFKRGVYFQKVDSRKTSQICPSCSVETGKKELSERTHVCSNCGYTTDRDVAAAQVVLKRGLAAVGQTVKMLAEGKFIGIPLKQESPN

SEQ ID NO: 64158 - protein, 406 aa, Streptomyces sp.
MFPATSNGVRSHDHRMQLRYAFRLYPEPGQRTALARAFGCARVVFNDAVRAREDARTAGLPFPNAAELSKRLITQARHTVERCWLGEVSSVVLQQSLRDVEAAYKNFFASLKGERKGKRMGASGGRLSLPRIGAVRVKWSRVLPAVPSSVTVILDAAGRYFASFVIDTDSATDRARWDAPEPGSGVGIDLGLTLPQRGYPHRGSLRRPEDRQPAVSAPRGEEAEESPAGTVPQTEGIEEPGQSTAEGRPRPRGRGGRAQGVPPPALHPADPRQPSGRGGGPGGIRTCTHPAGQERARRGLGTVRDHLEYKAQRYGRTFVKIGRFEPTSQTCSTCGHRDGPEPLHVREWTCPACNTLHDRDHNAAINVRQAAGLAASACGAPVRPEPVLAQREETGSHGTLKRTCAA

SEQ ID NO: 64159 - protein, 369 aa, unknown
  TnpB Polypeptide
MTIRQKSYKFRLYPNEEQKQLFAKTFGCSRAIWNMMLADKIKHYNDTNKTLYNTPAQYKKDFPWLKEVDSLALCNVQLNLQTAYKNFFKSGFGFPKFKKKSHAQSYKTNNNNGNIILENGFVKLPKVGWVCVKAHRQISGVIKSATISMTPTGKYYISILCEVEIDSLPKTNSSIGIDLGVSDFAILSAGEKIGNNRFFSKLSKKLTKEQKILSRRASAAKKEGRKLSDSKNYQKQRMTVAKIHEKIANMRRDFLNKLSTYLVKNHDVICIEDLSSKNLMRNHRLAKSIADASWSEFVRMLEYKANWYDKKVSKISRWYPSSQICSDCGFSSGKKPLSVREWTCTNCGSHHDRDINASINILNEGLRLL

SEQ ID NO: 64160 - protein, 405 aa, unknown
  TnpB Polypeptide
VKLNYQVKLYPNKAMKQVLDSLCDYRRYCWNKAIECWNDQYESRKIGLSQSLIDKLQDENGKLTVVEQELVNQYPTPSCYTVREELVRQKEDWQYELSSRVLQQAVKDVAKAWNLFFNNQDTAGRPTFKIKKSTRQGFKTDRASIRNGKLLLDKPHCYQGKWYAIKFKGLSIPEGKITYCSITRVNDKYIATFTLDVESTLLPKTGKKTAVDANVDHFDTTDGQVTLKPEMLNPLYDKVKHYQRILTRKRCKNPKAIHSKSYRVTRTKLQRTYERITNIQTDLLHKFTTDLYHQYDTIVIEDLDVKKMQMSKKAKNLHRSLFGKFRQMMEYKAQKFGKTLIIADRFYPSTQRCSACGFIKTGEDKITLYGNQKHGTRHNEYICYHCGYKDDRDHNAVLNLLALAN

SEQ ID NO: 64161 - protein, 430 aa, unknown
  TnpB Polypeptide
MRHVERHWIKENHELYSICDELTFKSKNLYNTGLYQIRQSFFERERSENKANHPILSWVTLTSNFRKEKQEDMLALPSKVSTNILKSLGDTMNSYYQVMKRFYDKSNTSVTHKPQLPKYLHKVDGRYVVEFNNQTISRKRGENGEIIICPRELNLMIPTKVDKPKCVRIVPKLGAFVIEVIYEVKESPLKHTNNFAAIDLGIDNLASVTFSNGVNPLLVSGQKIKSINQGYNRLIAKAQSKLPTKQKTSKHIHRLWRNREMKLQSELHRITSFLSQYFDEMCIEKVFVGKNTGWKNNASLGKKTNQKFVQIPFNTFISQLKYKCLLRGIEVIEQEESYTSKASFVDNDEIPVYGKIDYEPQFSGKRTHRGLYKAKNGFMLNADINGSYNILVKGLQSINKNINRNDVSYHTRTFRSSNHKSIEDLILDYM

SEQ ID NO: 64162 - protein, 399 aa, unknown
  TnpB Polypeptide
MVIRKAYKYRLKTNMCTEQMLSQFAGSCRFVWNKALALQKDRLDRKESCLSYNELSALLLQWKGDPETSFLRAAHSQILQQSLMFLDRSLKDAFNKKSPKRFPKFKKKGVYDSFRFPQGFKLKGNVLYLPKIGWIPFHKSREIDGTIKNITVSRKGGHWFISIQTEMEVGKPVHSSISTIGIDMGVKRFTTLSDGTYYEPLNSFKSLQGKLAHEQRNLSRKVKGSCNWRKQKRVLTRLHIRIADARNDYLHKTSTAISKNHAVVIMEDLKVANMSASAKGTVEKPGRHVRSKAGLNRAILDQGWHEFKRMLQYKQLWRGGTVITVPPQNTSRTCPHCGHVSPDNRKRQELFRCVTCGYSGNADYVAAQNILAAGHAVSACGEMAQQGHSVKQEPAMKAA

SEQ ID NO: 64163 - protein, 428 aa, unknown
  TnpB Polypeptide
MDTLDKIARTSTNTRSTTAFKAVKPIKTITVRKVLKAHKIRLHPTAEQEAYLRRACGTRRFIFNWGLAEWQRQYAAGEQPSALALKKQFNGLRGSESPWTYDVTKCVVEGAFDDLGKAFANFFAKRAGYPKFKKKGKSQESFYLANDKFIVGDHWVQVPVLGDFIIKQREASGEIITKRAQLKRRLGKINLAEKLRFVGTSGTTSKIMGATICCEAGWWFLSVQVAVEVPQIPVEGPPIGIDLGFMRLATLSDDTRFENQKPLRHLLAQVRYLNQQLARRQKGSKNREKTKRKLARLHYRIRCLRDDLLHKVAHQITERYGFIGLETLNVRGMMRSRSRALSASDAALGRLAHYIETKAQAHGTPVQRVGRFFSSTKRCHRCHHLREIAEDERTYVCFNPACGWVGDRDLNAALNILEEALRLASLAV

SEQ ID NO: 64164 - protein, 416 aa, unknown
  TnpB Polypeptide
VRTVINTITVLKAHKIRLHPTAEQEAYLRRACGTRRFIFNWGLAEWQRQYAAGEQPSAAALKKQFNRLRGVEFPWTYDVTKCVVEGAFDDLGKAFSNFFAKRAQYPKFKKKGRSQESFYLSNDKFTIGDHWVQVPVLGDFIIKQREAQGEPITKRAQLKRRLGKINLAEKLRFTGTSGTTDKTSTMSTMSTTSKIMGATIRCEAGWWFLSVQVQVQVAQTPVEGPAVGIDLGFMRLATLSDDTRFENQKPLRHLLAQMRFLNQQLARRQQGSKNREKTKRKLARLHYRIRCLRDDLLHKMAHQITERYSFIGLETLNVRGMFQNRQRALSASDAALGRLARLIETKAQAHGTCVQRVGRFFPSTKRCHRCHHLRDIAEDERTYVCFNPACGWTGDRDLNAALNILEEALRLASLNL

SEQ ID NO: 64165 - protein, 350 aa, unknown
  TnpB Polypeptide
MASFTMEFELIAGNQEINFLEKRFNTGSNIYNLCLDHCIKQLNKLKRDKEYRKSVKALKTVSRKLEKKNLPQDEIKRLKDIKISCTNKIKELEKEYQFTESEIKKYAKVPREFTGKILNSAIVQNIASTAFNAVKKIQYGKAKKVKFKKKGEISLEGKSNETGLIFDIKTMKLKLGKKLFCNLKTIDERQRNCFKNRIKFCRVLKRYIRGKKRYFLQIVFEGTPETDFQIGEGEVGLDIGTSTVAISSDNEVKLLKLSETETEARKIRILQRSLDRKRRMANPDNYDENGKVKKKRKEWKLSKNYFRELNKLKEIYRKKRVKDNQYKNILVKFILSQGDEVKTEKTSVNS

SEQ ID NO: 64166 - protein, 229 aa, unknown
  TnpB Polypeptide
MNPRITYDGLKWYLSIAVEIEDNIKPILTNESIGIDVGVKDLAILSSGIKYENINKTKRIKKLEKKLKRLQRKTSRKYEKNKQGNKFIKTKNINKLEVKIRKIHKRLTNIRTDYIEKTTTKIVRTKPSQIVMETLDIKGMMKNKHLAKYIQQQKLYEFKTLIKYKSNKYGINFIEVDRWYPSSKTCSECGYIKPKLSLKEREFICEDCGCIIDRDLNAAINLSRYNNIL

SEQ ID NO: 64167 - protein, 187 aa, unknown
  TnpB Polypeptide
MVASMDLGIKVLAGVPVNDGMWLLHKGVRTKEDYFYFERRIAGIQSLAVRTKNINEYDAYLELNRDKRSLFKKLTRRLLRLYRNFAPHLLKKLCELGVSTNYSGYTLSIEQDKGNKFTSSVWSYRKLMEAIELKSQEHGMIVYVIVEYDTFRYCAFHGVEAKSPRGVVNRPLDHKLHLDLSGALNIL

SEQ ID NO: 64168 - protein, 401 aa, unknown
  TnpB Polypeptide
MKKRKQKRRTYKEKIRNHPQNMRVGNMFDDLEDVHNHFLALEKRYYRIYGKYAGRYRLQPHLTKLLERTHQHWVWIPRDTLDAVIIRIHIGYERFFDWIENGRRGRRVGPPKFKRRGKLRSAKFQTGYKIFVDSKDADKPSPVPKGTVRLSFKEWDAVKQKFVFKKRNILYHHHRDWEGNVRYIQIGRDAAGEYWLYVVTDSTSKEVLPATGESVGVDFGMETYLTLNTGEKIQHPQPLKQSLNELRKLNKAVSRKVKGSGNWWRAVRDLARLYAKIANQRKDWHYKRATDLCRRFDTIVTETLNLEAMRRLWGRKVSDLAFYQFIEILKFKCLKHNREFFQVGRWTPTTKPCSACGHHNENLSLSERQWTCPECGSHHDRDINAAINILRAALGPSVEQM

SEQ ID NO: 64169 - protein, 370 aa, unknown
  TnpB Polypeptide
MEYSYKFRIYPNSVQEDQILRTFGCCRYVFNRYLAIRKETYEKNGKTLNYCSCSADLTVFKKSLEWLKEVDSTALQSSLRNLDTAYQNFFRRIKKGEKPGYPRFKSKHDYRQSYKSKCVGTNIKVLDKTIQLPKLGLVKCRISKEVNGRILSATVSSNPSGKYFVALCCTDVEITPLPSTSATIGVDMGLKAFAITSDGVAYQNHKYLVQSQKKLAKLQRQFSRKTKGSKRREKARIQVAKLHEHIANQRQDMLHKLSTQFVRENDIVCIEDLAPKNMVKNHKLAQSISDASWSEFRRQLEYKANWYGKTISVVGRFFPSSQLCSDCGALWSGTKDLSVREWTCPVCGSVHDRDINAAVNILNEGLRLLS

SEQ ID NO: 64170 - protein, 397 aa, unknown
  TnpB Polypeptide
VLSHRIALVATVPQEVLLRQAVGVARFAYNWALAEWKRQYQAGEKPSEAALRRQLNSIKHQQFPWMRLVPKSVPQQAIKNCGAAFQRFFKKQGRYPKFKKKGVRDSARLDNGPDTFEFDGKRVRLPVIGWVKLREELRFSGKSLSTTVNRVADRWFLSVPVEVDLPEPVRESQAAVGIDLGVSTAATLSSGEKLPGPKPLQAHLERLQRLSRWHSRKNKGSNNRRKSAMRLARLHARICNVRQDWLHQTTTRLVREFSVIGIEDLNVRGLMATEKLARNIGDIGFYEFRRQLEYKARLYHADLVTASRWFPSSKICSACGRISEELPLSIREWSCECGTFHDRDMNAARNLCRYALDRASCARINACGEEGSGAGLTASVKPASLKQESAMSHLGTD

SEQ ID NO: 64171 - protein, 321 aa, Microcoleus sp.
MLQQVLRKLETAFLDMKRKGMGFPRFKSKYRMRSFVFPQMLKNCIQGNSIKLPQLGVVEFIKSREIPNGFAVKQARIVRKASGYFVIISLECDVNVPEPVATGYPIGIDLGLDQFLATSEGKLIKRPKFLAVEHRKLKLLQRRLKNKKKGSNNRHKLNRKIARLHQRVTDTRKDWHFKLAHEVVKDAGMIFVEDIDFRVWAKGMFCKHTLDAGFGQFVAILAWVCWKRGVYFEKVNKDFTSQVCPNCDTHTGKKELNNRVHTCPECGYTTHRDVAASQVIRNRGLSAEGRSVDIKEIACGDGLAGTGNSLVKNPRSRKKKA

SEQ ID NO: 64172 - protein, 223 aa, Microcoleus sp.
LVKRADGYYVQFCISIDRLETAPMTGKTIGLDVGLKEFYTDSNGFMVPNPRFLLRAEARLKRAGRLVSRKVKGGSNRRKARAILGKRHLKISRQRKDHAIKLARCVITSNDVVVYEDLRVSNLVKNHCLAKSISDASWYQFRVLLEYFGKVFGRITIAVNPAYTSQECSNCGEAVKKSLSTRTHDCQCGCEMDRDPNAAINILNRGIGTTGHVGTSVLDAVNA

SEQ ID NO: 64173 - protein, 359 aa, unknown
  TnpB Polypeptide
VRKINRAVKIRIYPNKEQITQIEKTIGCSRFLYNRMLADKIRHYQEEKKMLKNTPAGYKKEYPWLKEVDSLALANVQLNLEGAFRKFFREPGVGFPHYKSKKHSRKSYTTNMVNGNICLQDRFLKLPKMQPVKIKLHRMIPEGWKLKSVTVSREPSGKYFASLLFDCENQTAEKRQAEKFLGMDFAMHGMCVFSTGERAGYPMFYRNAEKKLAREQRKLYRCEKGYPLQGEIHKFYPDRISGTCMGSIGFSPIAVHKDERIVKAAEYHTTTWEGIVALDDDMIIHVAPASAGAPVPELTRAFIVPKGTMVKINAAIWHLCPLPLNNEVLHAMIILPECTYANDCTVVDFEEKDWFKITV

SEQ ID NO: 64174 - protein, 607 aa, unknown
  TnpB Polypeptide
MKNQYNKTITACFVGYIVQAVVNNFTPLLFLFFQKSYHVPISQITLLVTFNFGIQLLVDLLSVRFIDKIGYRVSMIAAHALAAAGLLLLTVLPEILPVPFIGILIAVMIYAIGGGLLEVLVSPVVEACPSDNKEKAMSLLHSFYCWGHAGVVLLSTLFFYAAGIDNWKILAIIWAIIPIGNAFVFAKVPIAPLLEDGETGLGLKELFRLKTQKERVYAVEKLTVITRERPEVKYDFGKEFYKFPSYYRRAAIAEALGSVSSYISRLESWEKEDPKSRGKEPGILKAGFTCPALYKKGCYVRLTDYTAGIKVRVRNTWDWVTVNLRKSDADYIFRYCRNRKECVPVLRKRGKKWYLDFSFQEKVKLEEKEIWNTRILAVDLGINNACTCCVMEADGTVAGREFLSLPAENDCLDHAVGRLKKAQKNGAKRMPRLWAAVNGLNDNIAVRTASFIVEQAVKYNVDTVVFEHLDTSGKKKGSKKQRLHFWKAQYVQKMVTDKAHRLGMRVSRICAWGTSRLAFDGSGTVKRGKASEKTAGNYSICEFQSGKIYHCDLNASYNIGSRYFIREILKSVPVTVQQDIGAKVPRCLKRSTCTLSDLISLAAVLAA

SEQ ID NO: 64175 - protein, 476 aa, unknown
  TnpB Polypeptide
MNEKRKHRKQKKHATMGEPYLVTRAVTHIRLVEVNPGKLAALDALAPVYLALCQQYVTLFCTQERPNKVRDPLYATPLSERWHRVAILQAAGIAHSWRSNRAAAYQQYQDDLAQYRKRQEEGTVEASAKAPRWREWNIPTLREPCLQANINVVKLEVSRDSTYDYWLRISTLEKGRPIQVPVKLAQYHKEQLTDPKTGQTRKLNSSVQLNKRDGVWWLTLSYDEEVTVQTPPDAPVVGIDVGIANFVTTSTGKHYGTMHGKLKERHKRDRAKRRRKAKLRACLQKKGANKLPFTSSRTGQRLIRHVKQAINRAVNQCFAEPEHQGMQFAYEALSVASMHFKARSMNAYLKASNLGHIPQQIVWNSQKRGVQATPVIAAYSSQECSVCHYTDRKNRPDQRTFRCQVCGFEAHADTNGSLNISRRIGDTQLRACKDRTAIKDVLMQRHEAWKQQQGMRDTCPVKRRKRETSSSSLTSL

SEQ ID NO: 64176 - protein, 332 aa, unknown
  TnpB Polypeptide
MACSIYKSFRKLKRKGKAKGDKPVFKRDVVMLDDHLFSLNLDDWTVSIATPSGRIKFKLLHGKYHERFKDWKVGQAWLIKKDDNMFLNVVFRKEVEIGMPIDVIGVDVNENNVTIAKSNGFERRVTREKNIRITYFLKRRRIQSKIKVGKKRRKLLSKYGRRETKRILDIYHKIANFVAEEALKTSSAIALENLKNIRKKIKYSRNMNGRLHRWSFRKLQFIIEYKAKMNGIPLVYVNARGTSTYCPICGAKLSPNGQYRTMKCKRCGLEADRDVIGAWNVRLRGLEKIDVRSPVPREGLPMKPEGGRFTITKLLNVPKVTANQNGNIHGNI

SEQ ID NO: 64177 - protein, 407 aa, unknown
  TnpB Polypeptide
MELRRTAVIKLSVPDDRRDDLKQTMDTFRDAAQQFADRGWEGNDNGYVITSRSQLQTYLYDDIRDETGLHSDLCVGAANHASHALRGVVDRMKEGETVSKPVFTSNTTVYNTSAISYFDRYCTLAAYGSGRVKAEYVYPDDSIQAEYMENDEWDKQGAKLRYDHQSDTYYLHVTVVQERDDPQGEAEGRTVLGVDRNVDGYLAVTSSGAFIGNADYFNHKRREYERRRGDLQQKGTRSAHLTIESIGERFANWSEDYLHRVSKQVVAEAVANGCDTIVLEDLEQIRERISNGKKFQQWAFRELGRQITYKAKAEEITVEVVNPAYTSQQCSHSECGFTHEGNRNSDEFACLKCSKELHSDYNAARNIAARYLRNRRKSGSEGATNHLALKSGTVNGSGDFTPTASSG

SEQ ID NO: 64178 - protein, 411 aa, Salinigranum sp.
MDWTRNTVRQLYNHALNDFNQIPKDAGTLRQRVWMVRDTLPALKDWWPDLKQVYSTVLQKSVERIRDNIQNLGKLKAKGYDVGSLNWKKPREFRSFTYRQSGFELDKKSGPNGRGLLVLKKLNGETREIPIRLHRDLPDHDSIKEVTLKKEPTGAWYVSFCIETETPEKPAIEDIELENTVGLDLGVLNFIHDSDGRSIGRLDLSADRDRLEREQHSLSRKDYESKNWQKQRRRVAEVHARMSNKKRDYKHKLAYFYTTQHDAVFVEELNVKGMLESSQNARNKAEVGWRDFITILEHHGEKNGCHIVGVDPRGTTKECASCGVETRKPLWVREHSCPSCGFELDRDWNAALNVLSRGLRKLGVVHSEETPVETATAVSTDGGDSSSIVVDASRVTETGSPALKEATPVAE

SEQ ID NO: 64179 - protein, 442 aa, Salinigranum sp.
MPAKIDVRMEDVIRTVKVKLDVPAARCDDLHQTKDRFLHCANTTARWAWRYPNDYCVTSKKQAESALYDQLREETDYMHANLVQKGIRRAIEAIKSGVVRLKKGEKTSQPYFDAWSVVYDKRSATFHRDHVSFSTPNGRLECDYVLPADPEGTPIGEYLLNEDYEFRMSTLQYDRQTASFYLHARMRRTTDETEQSTIDSSNAKHRTVLGVDLNVDGSLAVTSTGAFIGNADEMNHRRREYEKTRGSMQRTGTRSAHLSIRSMKDREHCWMQDELHRASNRILDEARDHECTHIAFENLTDIRNRMAGAKRFHAWTFRRLFEYVEYKAEMYGIEVEQVSPAYTSQRCSKCGSLHESSRRSKHRFKCQKCEYELNADYNASKNIARKLLKKLHSGQTSSSGGAPCQCALASGTLNLNGDFHASVGSTAEGESTDKPTTSVVGY

SEQ ID NO: 64180 - protein, 426 aa, Salinigranum sp.
MEYSPRFRLLPTDEQRETLDWTRDTVRQVYNHGLYRFNQIPDSEGTVKQRVTKIRDELPQLKTWWTDLQNVYSKVLQTHIERIARNITNLGKLKAKGYNVGSLNWKKPREFRSFTYNQSGFKLDHKSGPDGRGKLSLSKIGWIPIRLHRDVLEDAEITEVTVKKEPTGAWHASFCIDVDEPEKPPVKSLTVDDSVGIDLGVLNYIHDSNGVVINRLDLSDDRERLEREQRALSRKEYESENWDKHRQRVAKSHARMNERKWDFKNKLAYYYTTHYKAVFLEELNVKGMLEGPQNARNKAEVGWRDLIRIFKHHGKKNGCYVVTVEPENTTLDCASCGTSVYKPLWVREHSCPTCGFETDRDWNASLNVLSRGLDRLGVVHSEAPPVETATAVSSDGGEYSSIVVDASRVVETGSPALKEATRSVAE

SEQ ID NO: 64181 - protein, 417 aa, unknown
  TnpB Polypeptide
VNLVTTRTITAALTNDREGVVRDLDSLGRSGSKIWNVARWTISRIWDHTGEIPDEGPLKSYMKNQQCWKDLNSQSSQAIVEELSGGFQSWFEQDDPDANPPGYRKDGDERPRSTVTFKEDGFKLDTKHQQVRLSKGENLKDGWADFILCEYDTGPDTDLTDVEDAQQVRIVWNSEQWELHFVCKVAIDAEDSAGEKTAGIDLGICNTAAVSVGDNTLLYPGNTLKEDAHYFRHVEYDTEGENGPSNHAEWARRKKSRRQTHFLHAVSKDIVEQCADRGVGTIAVGHPKNIREDEDWGRHGNKRLHDWAFETLLQHIEYKAEECGIEVERVDEYELATSITCCECGMKADSNRVERGLYVCEECGLVANSDCNAAENMRATVTPNPDRDRSNGCLAQPSVRLFDTSTGRVAPQEQVRP

SEQ ID NO: 64182 - protein, 399 aa, unknown
  TnpB Polypeptide
MGYRTIKFAWIPSTGQNWATFTAVRKEAARLWSWLVEHHADIRQQGGKWPSKADLQKEIKGLFPGLHSQSAQQIVADFCEAITSAESLRKKGDPFCYPNRKTLYRQVLFTNQAPRFRDGRMILPCGAAGYLSVYIPKGVILPGRLMEIRLDYGEVEIICEVPNEVRPIGPTIGIDLGVNTVMAATDGKKAIAISGREIKATIQLRNKQLAEIVSKQSKKTKRSRRHKRLQRAKYRVLKHAKNKVRDLCHKATRKVADAFPNAKAYVGEPFNDAGREMGRKQAQTVSSACNRKIINLLNYKLAACIEVEEAYSSQTCPVCGERSKHRRIYRCRCGYEASRDVAGCANIRTIGIEGSMRPGCCVPNAIQFVHPSKYPGPPPGSPGDTGHVARKQFREATGL

SEQ ID NO: 64183 - protein, 393 aa, Lactobacillus sp.
  misc_feature (238)..(357): Xaa can be any naturally occurring amino acid
MVWNFVNGKNQILLCCVAKIIICWLMNERYQNNKALPFLGKCKLNYLLKPLKKEYPFLKNSDSSSLQVVNEFLTQSWKNFFQDKSGQIGKPRFHSRKYLKKSYTGYVKTSKTGVLQNTKIKRYTVLLEPTGKYYLSLQAEIPEPEKYSLTGKRVGIDVGVADLAILSNELKYPSFDSSYFEKKAKVWQRKYARRRHLAKLLVLQDRNKKVLCPRSLESFTNWQKAQKSKAKCQAKAAXXXXXXXXXXXXXXXXXXXXXXXXXXXXXXXXXXXXXXXXXXXXXXXXXXXXXXXXXXXXXXXXXXXXXXXXXXXXXXXXXXXXXXXXXXXXXXXXXXXXXXXXXXXXXXXXXXXXXXXXCPKCQTKHDRDINVAINILYKGSTKLTGQGLAMVTS

SEQ ID NO: 64184 - protein, 359 aa, Glycomyces sp.
MARFRMYPTSGQEQQMLLHCAQARYVWNLAVEQRSFWARHKGASPGYVELARQLTEARAASEWLREGNAEVQQQALRDFDQAVKRRFTSGFGEPSWRKRYRHEGFRVIGIDRIPEFEPDGSPKLNAKGKQVMARSVAVQKLNRRWVQVKVPGCGWVRFRLTRRDLPAAKTFRVTWRRGQWHVAFAVILESVDPPGTGGVVGVDRGVAVTAALSDGRKLTCPQLNDRECARLRKHERRAARAPKGSPQKAGLNRAILAQGWGLLRTRTEQKAPGRVEDVPAPYTSLRCSDCGWIEKDSRKSQAEFSCVSCGFTCNADTNAAMNVAAGQGGVPRPRSSTGAGGTTARQGSSVREPQRPPPR

SEQ ID NO: 64185 - protein, 425 aa, Bifidobacterium sp.
MFVGFSPSGNKTWTCNPEKVIAHFCDCWRRLHNSQRAHRERRIYRAGERISGPLGARASTTPFFTAAGAARSHPGNEYLMFLPSLLLKACIRHEDTEWFAGLKRKKTAGGAVPGFISKSHDPVFICLANRGTHEPYITFEVVNRRKGVITFGGDAPKDWRKPGHEGERKWRLRIFVRISEPIRPFTSIILNNHKRTVSFVNKPVKRRNVPKRRNDGIGLDFGVRNTVALSDGTFLHIPMATEREKRRRRFLQKKLSRQDTRRRGCSHRRNTTHAKMAKLDRRLKQRKNDWIEKTTTDWVLDNRIIVMEDLRIRDMTRRPKPRIAPHAPLGYLPNGKGRKSGLNRSIQSSKWGMIRSRIEQKGELYDCRTIRVDPRHTSITCSVCGGRDVKNRRSQSIFECRNCGYKANADTNAAIVIRGLGMRAG

SEQ ID NO: 64186 - protein, 477 aa, Moorea sp.
VYKTIPVKASFSEEEKAFWLFQCENANSLGNCATYYAKQKHYSWLEQQPEAYTTFWRGDVLRYGWKTYKCGVKYAELCKELKENPHYRAMAAQSAQQTLKSVAESITSYNKLVGLYYKGEVDRPKLLRYRKKGGLAAVTFPKQALTYRNGFFYPSISKESKPELLCDITLSPPDFIDSDWVKEVTVRPCLGQLWIDWVIDDGKQPIDLNPSLDYSQAWSFDHGGDNWLTGLSTHGQSLIIDGRKLKSMNQGYARLVAKYKTGKSDFYWDANLDRVQLKRNNQIRDTVNKTARFIVNRCLNDRIGNIVIGWNERQKDSINIGRKGNQKFVVIPTKRLIERLKQLCPEYGIKLTVTEESYTSKASYLDEDPLPRHGEKPSGWQPSGKRVRRGLYRTKQGYLVNADCNGAGNIARKVAKQLGLDLTKVGRGALTLPHRYDVFNSLKKSYRMRSVREASAKADSSTGKPLLRNILIESSVF

SEQ ID NO: 64187 - protein, 437 aa, Phytohabitans sp.
VWACVLELNAWRRQRRDKPLASYQELCRELAASGPGTFGELDSTGARSVLRRFSDAWFAAAKRRRDGDATARFPRRRRGLVPVRWYHGTFTLDPGGRRVRLPTARGGRPLWLRLARSLPYPAEQVRSVTLLAEGGRLFLDVTAEVPVTVYEPGCGPDPARIAGVDLGVIHPYAVAGPDGQALLVSGRAIRGEHRMHLADTKQRRRAVAGRAPTRGQRGSRRWRKYRRRSRAVEGRHGRRVRQAQHEAAKTVITWAVQQRVGTLHMGDPRGVLQLAAGRRHNLRLRQWQVGQLIRILVDKATLAGITVHLVDERGTSSTCPGCSRRIPKPSGRVLTCPHCALTGHRDLVAAASIATRTPGGGPTTPAGSSVVLPGVVTHRRAGRHLPGAGRSRRDPRRPPAPRAARGSVGQRWPAPPHSGGESLAHTGEDPQHPPETR

SEQ ID NO: 64188 - protein, 378 aa, Enterococcus sp.
MIRARKIRLRPTKEQEKQLWQSSGTARWIFNWTLKMQEMNHRFGGKFIANNHLRKHITKIKKRPKYGWLNDVSNNIAKQAVKDACDAYKKWFGGRTGKSRLKAEKPRLKSRKKTKPAFYNDNFKLKVKAKSVLLEKIGWVKTSEQLPRNTKYFNPRISFDGKYWYLSVGIEKEKLEQNLTGEILGIDLGIKDLATVSNGRVYQNINKTKKVKKIEKRLRRLQRTVSRKYEMNKEGNRFVKTCNIYKLEKEIRYTHRKLANIRQNYIHQTTTEIVKTKPSKIVIETLNVKGMMKNKHLAKSVAQQKFYEFKRQLQYKCEGYGIELVEADRFYPSSKLCHECGHKKVDLKLSDRTYHCEECGYTADRDYHASLNLASYIA

SEQ ID NO: 64189 - protein, 451 aa, Synechocystis sp.
MLTLTYRFRIYPQAAQQQELIEWMDICRNAYNYGLRQIKDWCNSRKCLVDRCSIHHEYILGADLPFPNEAVQHSALPGAKKEFPRLALVPSQVLQQTIKQLHRSWEGFQKLGHGFSRFKKYGQFKSLLFPQFKTSPIVGTNLSCKGSRKAQPPTNFALLLPKLGQVKVNLHRPIPDGFIVKQVRILKKADRWYASISLQCDVNVPDPIPHGYPIGVDIGLEKFLATSDGVLVKPPKFFKSLQSKLKLLQRRLSRKQKRKVCGAGFLARSFPRERSKNYEKARIKVALVHHQIDNTRKDFHFKQAHALCDAGDMVFMEDLDYTVMAKGMFGKHMLDGGFGAFRTIVKYVCWKRDKFFGVVNARGTSQECPECGATVKKDLSVRVHSCPECGFTTDRDVASGLVIRNRGIELVSTVGQTGIEIAYADGLPGAGENQSRSKSKTRKGKTRKSKL

SEQ ID NO: 64190 - protein, 394 aa, Synechocystis sp.
MQKAYRYRVYPTSEQETLLRRTMGCARLVYNRALASRTEGWYERQEKVDYIKTSAMLTQWKKQEDLQFLNEVSCVPLQQGLRHLQKAFANFWAGHAKYPNFKKKHNGGSAEFTKSAFKWKDGQVWLAKCTEALPIRWSRQLPKGCEPSTITVKLDASGRFHVSLLVDTVIEPLPKSNKSIGLDMGITSLIATSNGDKIANPKHFKRRIAKLRRVQKSLSRKQKGSNNRHKQRLKVAKVHGQITDSRKDFLHKLTTQLVNENQTIVVEDLAIKNMVKNHKLALSISDASWGEFVRQLAYKCEWHGRELIKIDRWFPSSKRCGNCGHIVDKMPLNVREWDCPKCQTNHDRDINASRNILAAGLAVSVCGANIRPDRQESKRQLQKTRKGKKQKPKS

SEQ ID NO: 64191 - protein, 397 aa, Synechocystis sp.
MYRAYKFRLYPTNEQKTALAKSFGCCRWYYNYSLNLCQETYKLSGKSLSRGALQGLLPSLKKEYVWLSDAYSQCLQYVALNLSTAYKNFFDKKAGFPKFKSRHGRQSISYPSNVKLEDDYILMPGKVGKIYCQQERKFDGIIKTVTVSLNPDGKYFAAILVDDGKENPTLSSEGKAVGIDLGLTHFCITSNGSKFDNPRHHRKHAHNLKKKQQSLARKQKGSNTRLKAKKLVAKIHSKIKRVREDFLHKLSRKIVNENQVVAVENLNVKGMVRNHNLAKAISDCGWGQFCTMLKYKCQWDGKTYIEVDRFFASSKTCNVCLNKIGSLALDVRSWDCAKCKTHHDRDINAALNIRNEALRILSLGTSDTANGGNVSQPGKTSVLLDAVPREVGNPTPL

SEQ ID NO: 64192 - protein, 394 aa, Synechocystis sp.
MLKAFKYRFYPTPEQEILLRRTMGCARLVYNRALAARTESWYERQERIGYADTSTMLTIWKKQEDLQFLNEVSCVPLQQGLRHLQKAFANFWAGNAKYPNFKKKHNGGSAEFTKSAFKWKDGKVWLAKCAEALPIRWSRQLPTGCEPSTITVKLDAAGRFHVSLLVDTVIVPLPKTDKTIGLDVGITSLIATSNGDKIANPRHFKRLRSKLKRVQKSLSSKQKGSNNRQKQRQKVARVHRRITDSRKDFLHRLSTQLVRENQTIVVEDLAVKNMVQNPKLALHISDASWGEFVRQLVYKCEWYGRELIKIDRWFPSSKRCGNCGHIVDKMQLFVREWDCPKCGINHDRDINASKNILAAGLAVSVCGANIRPDGHKSKGQLQKTPRGKKQKPKQ

SEQ ID NO: 64193 - protein, 413 aa, Synechocystis sp.
MYGCQQTLISHNNELKAILKYVCAEANKLSNCGLYYARQMYFKAGKIVNKFDLHKQLNKNPHFGALQSQTAQQALTTIAESFKSFLGLLKAYRNGTIADCPKLPNYRKKGLTLVTYPSQAVKLIDHQLRFPLGSKVKTWFGLDAFYLPMPSNLDYKSVREFRILPRGGCFYVEFVYKLESVSSDVNPDFALGIDPGLNNWLTCVSNVGTSFIVDGKHLKSLNQFYNKQISTIKENKPQGFWSNKLASITEKRNRQMRDAVNKAARKVLTHCLNNKIGTLVFGWNKGQKDSSNMGRVNNQKFVSVPTAKLKDRIAQLCEQYGIKFVETEESYTSKASFVDGDFLPIFGEKPEGWKSSGKRTKRGLFRTFADWHINADCNGASNIIRKVATTLGLDLSGVSRGALSTPLRLRIWS

SEQ ID NO: 64194 - protein, 433 aa, Synechocystis sp.
MLTLTYRYRIYPQTVQQQLLDEWMDICRNAYNYGLRQIKDWCNSRKCLIDRCSIHHEYILGAELPFPNEAVQHSALPGAKKEFPRLALVPSQVLQQAIKQLHRSWEGFQKLGHGFSRFKKFGQFKSLLFPQFKQSPASGNNLLLPKLGLVKINLHRPIPDGFLVKQVRILKKADRWYACIALQCDVSVPEPMPHGHPIGVDIGLLKFLATSDGILVKPPKFFKSLQSKLKLLQRRLSRKTKRCGIFGENNSSQKMPSKNYEKARINVALVHHQIDNTRKDFHFKCAHALCDASDMVFMEDLDYTVMAKGMFGKHMLDGGFGAFRTIVKYVCWKRDKFFGVVNSRGTSQECPECGATVKKDLKQRVHSCPECGFTGDRDVASGLVIRNRGISSLSTGGQPGIESVCAADLPGAEEIQSRQVAKPRKRKTRKSKL

SEQ ID NO: 64195 - protein, 404 aa, unknown
  TnpB Polypeptide
VKKAYKYRLYPTGKQAATLQWTLDRNRELYNAALEERREAWRMGKVNISYNIQSAQLSKMKEIRPEYKEIYSQVLQDTLKRVDKAFKAYFKRCKEGKTPGYPRFQGYDRYDSFCYPQIEKLKGKPTISIENGKVVLPKIGRIRVKQHRPIEGKMKTCTIKREGDCWYVVFVCDVEAQKKLPSTNLAIGIDMGLKHFATLSSGDTIENPRYFRKSRGRLKELQRRLARKKKKSNRRKKAVKLVAKAHKKIRNQRRDFHHKESRILVDTYEMMVFEDLSIHTMVKRPKLKQDENGKYLPNGAAAKSGLNKSILDAGWASFIELVEHKAECAGVEVYKVDPNKTSQICSGCHKEGEHKDLSVRTHVCIHCGVVLDRDHNAAINIPDRGLGRSLREPASQGTFREAIA

SEQ ID NO: 64196 - protein, 252 aa, Nitrosococcus sp.
LPKLGRVKLRWSRGIEGIPKMVTVSQAPAGRYFVSLTCEVEILPLPVRRNAIGVDVGVKDVVITSEGWKSGAPKYTYHYARQLKMAQRRLSKKKKGSQRRRQQQQRVARIHARITDSRRDFLHQQSSKIVNENQVICLEDLNIQGMLRNRRLSKAIADCGLYELRRQMEYKAAWYGREVLIVDRWAPTSKTCSACGAVQESMPLKVRAWACECGATHDRDINAAKNILFFGTAGSAGTSKARGAVKPPRAVA

SEQ ID NO: 64197 - protein, 384 aa, Nitrosococcus sp.
MLLAHKIELRPKASQAEYLNKSCGSRRHCYNQLLEHFSKPDNKWSKAAAYQYYIKVIRPAYPWYNEVSSRVTRNAIDDLDDAFKHFFRRVKKGGKPGFPKFKKKDINDSFALREKTKFEVKGRKLRIEKLKTLIPMRQRLRFEGTPKQVAMSKQAGKYFASVLVDTTDYKDYSQNRSPSVGVDFGVKSLAVTSDNEVIPSNNKLKKSLKKLKHLSRSLSRKRKGSNRRAIAKQRLAKLHYRIAQQRKAVLHELSHSLTANYDRIAIEDLNVKGMVRNRTLARSIADAGFGMLRQLIEYKAFLRGCTVELVDRFFPSSRMCSGCGQLHDITLADRALACDCGLTIDRDLNAAINLNRYRRDTLKPDVKRTQEPSKTALAASVWTV

SEQ ID NO: 64198 - protein, 406 aa, Aeromonas sp.
MRRLQAFKFELRPDAQQARQMRRFAGSCRFVFNKALALQKERFEQGEKKLGYAGLCKLLTGWRNSAETAWLSDAPVHPLQQTLKDLERAYGNFFAKRADFPRFKKKGKSDSFRYPDPKQIKLDQANSRLLLPKLGWLRYRNSREVLGMVKNVTVSQSCGKWFVSIQTERDVDTPVHQGDAIGVDMGIARFATLSDGTFYAPLNSFKWHEAALRKAQQAMSRKQKFSANWKKAKARVQRLYSRIGNARRDYLHKCSTTISKNHAMVCIEDLQVRNMSKSAAGSTEKPGKQVRAKSGLNKAILDQGWFEFRRQLDYKLAWSGGHLIAVLPRNTSRTCPCCGHVSADNRQTQARFECVECGFEENADVVGAINVLRAGHARLACEVSGAIMPPAAGTHRGELGVFAWPR

SEQ ID NO: 64199 - protein, 431 aa, unknown
  TnpB Polypeptide
VVKLVVDGEAYEKLRELAVVTAKCWNEVNWLRMQQFKIGERIDFTRTEKEVYEKYKQVLKVNAQQVARKNAEAWRNFFSLIKEKREGKLPKRFKPRPPGYWKGEDGKYKLVIIIRNDRYVVDEDKRIIYLRDFDLTLRFKGKLKWHGKQGRLEVIYNDARRGWYAHIPVEVENVAEAKGSLRAGVDLGIVNLATVYVEDGTWYIFKSGGVLSQYECYSEKISKVQKVLARHRQGTSRKLRLLYDKRRRFLRHALNSMVRKIMEELKEGGVSEVVVGYPKDIVRNHGNKLTVNFWNYGYIIRRFKEIGEELGIRVIDVAEPNTSKSCSLCGDAHESGRIRRGLYKCPRMGKVINADLNGAINILHIPESLGSRSRGQLLGRDRGNGPEAQPVVYRWTNGAGWVQITPTSYEVMKMKAVNHEPVIRPKGTPAL

SEQ ID NO: 64200 - protein, 463 aa, Rhizobiales sp.
LQTISIPYRCCDQSAAFLRELRRVFSAAVRTSYANAVSNGVSLKQKDLRNLVKQRFAGGAADAWILHCATLEGIDLRKARPEGGMIFGTRAGLEQRRKGLITHNEWRNLRLRPLCSRGDKTFAGNRHFRLALDGRTCSVRVYGREVTLFLPQMTGNSGEALRQAAALAVERKINLTFRLDSAKLHVTLDPDDLPDHPQRRRPIRALPGRALGIDLNPNWIGLAAASNCGDASKIKDTKLLEHALIKLDMGVDASPELVRETLAAVCDRAISMARKHRCGTIVLEKGLGKLRSSGKSRSLNRLLNYWARTVFVQMLTRRARLAGMEVLEVWAGYSSTIGNLAFDAPDACASATEIARRGIARLAGIKDVLPALEEGCVSRLWKNGKVPAELGSWQDVHRTIKAAKIGYRRPHPDVPIGARGSDVHGTRMFCGHAVVRLGRRHRPGLVFRPIVTSAKADAVFRTF

SEQ ID NO: 64201 - protein, 364 aa, unknown
  TnpB Polypeptide
MPKLYRYRLYPKKSQITKLENSLELCRLVYNETLALRKNAWETEQRNIGYYESKRELTKWKQECPELKTVHSLVLQDVTMRVDLAFKAFFRRCKAGENPGYPRFKGKGWYDSLTYVQSGYELKDNILWLSKIGDVKIELHRPIEGDIKRITVRRTATGKWYTSLLTDAISDKLEPCDMAVGIDVGILSFAMLSNGESIENPRFFIQSENALAKSQRKLSGADKNKPEYGRALTAVRHVHEKTANRRDDFAHKISRNLVNRFGTICFEDLNIDNMVKNHCLAKHIMDVSWNKLVQYTTYKAESAGCRVVLVNPNNTSKMCSTCGTIVDKTLKDRIHNCPVCGLSIDRDLNAAKNILRLGLQSVAT

SEQ ID NO: 64202 - protein, 580 aa, Streptomyces sp.
VLVGGVARSASGLRVLAPPRLAECSGALAVRTRLRLSPQDEEVLVELGGFVSQLAARDLAERVFLGAEHSNEDFARRKREISALSSSRWAGTITRGSNEQWALARRAQAAHLERLDAAITTVQARLAVPVAACDVATRTKGYPSARVRAAKQRRLARLEAVAARVRADEAAGRVRVVRGGKDLLHTRLHLEQAGMDVQEWRRHWFEARCRIEADGEAGKRHGNQTISIAPDGTVTIKLPPELATRFAGHCDRHGRYTLDAACSFAYRNAEWQAQVQAQRAVGYTIRFENGRCYLTAAFTPPRPDLPAGVDEVTLMAAARAGGIVGIDHNADHLAAWRLDTHGNPVGRPVRIEVDYRGTTARRDAQVRHACSALIRQAKATGATALVIEDLGFDTSREQCGWTGRAGRAFRSTVAGMPTAKFAARLVAMAHRAGLAVIVVDPAYSSRWGAAHWRAATSTAVQETSRHDAAAIVIGRRGQGLGARRRAEKTVPLKKKEAAPAGNSTPCATTRGRAGTEDHRPHTAHTPTRPHHAPRARACPEDRAHDARRRRKQATAQPAEDRSRQATDRQSWTQDSLWLSE

SEQ ID NO: 64203 - protein, 376 aa, Ruminococcus sp.
MSQEVRALNKAYKFRIYPNSEQKTMLSKTFGCSRLIYNYYLNKRIKLYEEEKITFGYTKCANDLTVLKKEKEFLKEVDSISLQQSLRHLDTAFQNFFRDKKVGFPKFKSKRNNNNSYTTVCVNNNIKLECGTISLPKIGKVKIRQHKHIPDNYILKSVTVSQTPSGKYYVSILFEYENQVQKTEPQKFLGLDFSMHELYVASDGTSANYPRFYRQALKKLEREQRKLSKMQKGSNNRNKQRIKIARLHEKIANQRKDFLHKQSRQITNAYDCVCIEDLNMKAMSQAMNFGKSVADNGWGMFTTFLQYKLEEAGKQLVRIDKFFASSQRCSVCGYQNSDTKDLSIREWICPCCQTHHNRDINAAVNIRNEGMRIALA

SEQ ID NO: 64204 - protein, 257 aa, unknown
  TnpB Polypeptide
LGKNISSVRAGAVRRDGQWKSGCFAQDAVGDWYICLPVSVAVERTYPAKSAVGIDLGLKDIAVTSDGERLEAARFYRDLEAKIGQAQRRGHRRQAKFLHRTAARRRSNALHQFSRRLVDQYQTIIVGDVSSLKLVKTKMTKSVLDSGRGIPKAQLQWKGQQAGRCVKIVSEVNSSRTCSSCGSLTGPQGVNGLRVRSWMCPECGSSQDRDVNAALNILAAGRCLPSVCGNDPTQSLAPPSRVSHPREALKVRDSAAA

SEQ ID NO: 64205 - protein, 183 aa, unknown
  TnpB Polypeptide
VKRLQRRVSSKVKGSSNRAKARGKLARKHLKVRRQRKDVAAKAARTLIMSHDVIAYEDLKVANMVKNRHLAKSISDAGWRAFVTWEGYLAHVYGKVFVAVPPRDTSQDCAWCGERVKKALSERTHVRPRCGTVRDRDHNAACNILALGLRYLEATTAGHAESHAWGQSALYPLGVTQPDKAAG

SEQ ID NO: 64206 - protein, 417 aa, Natronomonas sp.
MASEARRHINICREVYNHALGLYDSAPDGDKPSYTRLQNKLPAWKREWNSWTTVNSKCLQMAVRRIYSSLSVLKSLKSKGYKVGKLKWKSPREYRSIVFNQSGFDVDSNTGRTEHATLELSKLGTMAVAYHRPLPDDGEIKEVRLKEEKSGKWHASIVVDHDPEHPEKAAVKDIRLEDTVGIDLGILTFAHDSDGNAVTPLDESEDRERIEKRHQALSRKQHGSTNWEKTRVKLAEAYERLSNKRKDFIEKLARSYTTQYSAIFLEKLNVREMLEQDSNGRNIASMSWSAAIKTFKRHGNKNGCHVVTVPPDGTTKRCTRCDVESDKAIWVREHSCPSCGFEADRDENASYNVQKLGLEELGIEYDVDAVVGLGEAESTPAETALPTGADASDSSSFRLVSAKRVVETGSHGSPDPW

SEQ ID NO: 64207 - protein, 415 aa, unknown
  TnpB Polypeptide
MKAFLRSKKYKIPYSWYRKKLLFREGGYLMAKRKKLGARKKENVDVLCYRFAALPSSEQAVQLNKTFGCCRYIWNRMLADHNDLYREIGSVPDNTPADYKDLDECLWLNEVDSLALANVQLNQNQAFQRFFHHEAGYPRFKSKKYSKDSYTTNNVSNNIRMESDGIRLPKLKGNLKLIQHRKIKAGGKLKSVTVCHEKDGKWYCSISFEYPKTESIYPKPSENIKHIGLDMSATHLYVDSDGKLAGFKKPYKKLQTKLAREQRKLSLKPEDSKNREKQRQVVAKLHAKIKHQRMDSLHKISEQLTREYDLISIEDLNMSALKQTLRLGKSYSDNGWGMFVTMLLYKGKRNGCCIVKVDKWFPSSKKCSICGYIHKELQLSDRTYICPNCGNIIDRDKQGAINIDQEGLRILLTSV

SEQ ID NO: 64208 - protein, 165 aa, unknown
  TnpB Polypeptide
LKEKPKLQGRIISATVSRKADRWFVSVCVERKIPAPSHVTGPRIGVDLGIKSLAFFSDGTKIENPQALVKKLQKLKRLSQQVSRKKKGSHNRRKVIIRLARLYWRISNIRMDVIHKLTTYLVKNHSQIVIENLCVKGLMKNKRLSRAIADVGFNEFRRQLEYKTK

SEQ ID NO: 64209 - protein, 642 aa, unknown
  TnpB Polypeptide
MRHKKNVKFKNNSIGDPKPMPNKSINLDNYDKPIWFDLNLSKLINLPESGEHTNYISLENNIGLGNIGYNNQFVKHFSFTDKSECILVNTSLINTNISDIEKIKQTHNKSVLKLQDKLIDEQDKLETKIKTLTTKLNKNISKLGKVTICKKYYIYPDIKQVNKLHEWFDECRKIYDYCIKKYNENNNFFDKGYMSAKISIFEELYGNENKPVPYDILTDEIRIFCSNLKSCQTNLANSNIKSFEMKSKKNHFGQCIFIPKTAMTQKGLYFNHLGKMSGFEKIQLNEVVNDCRLIYNKLHNSYTLLVPINKDKIIIPNRKKIVAVDPGGRIFMAYFSPDDFGFLGYEYRQLFLSELEKIAKLQRILKRGYNNHGKKIRNKKSIIRRINMIYERMKNLRDELHHKIALFLCENYDTILIPNFETQRMLSSDLNYRKGQKYVERIYDEEGKEAGKEALREYKKRRRLNKKDKFVLNMLSHYRFRQHLTNKACEYGCKIEVVTEEYTSQTCTNCGHKSTQYNYREKTCENCNYTIDRDINGSRNILIKNISSYIPEEKIDQEDHNLKSHCKNDKCFFVEEKGYDNDDFEEDLIENIKEVKNVKRTGIRNKVKKEIVNERKIRVRKYEVERPLGMNGPHDVEKPYRR

SEQ ID NO: 64210 - protein, 307 aa, Thermococcus sp.
LEQSKLPEKTTILQKANRGLQQHRKNVYEEFKREIGSATVQQIARKNSEAWRSFFSLLRKKRNGELPSWLKPKPPNYLKEDGKRKPLIVLRNDQYQIEGNKLILKGLGKFKRLEIQFKGRIHLKGKQGRLEVTYNPVRWKWYAHISFTVEEKLEGENWIKLPRTPRGSLSAGIDLGVNNLMTVYVENGESFLVNGRPLKSIDFYWRRKIAEYQSKLNKSGAKRSRKLRRMHEKAKLQAKHYINTAVRQTVRRLYDLGVSKIVVDYPKGLARNSDKGKKQKLPPLPRVAVQLRYQTPHRGCRGVWYCR

SEQ ID NO: 64211 - protein, 483 aa, Fervidicola sp.
MLTIQAKLIFQSTEDKREVLDIMRRWSSCARFAYNRLLEGKSRNELKRELQWIFNLNSRYVDDAIMKAKSVLESCKERGENPSKVIFGGRSLFENLKKRHINGKAYKKLQQEWQERRKGNLYSRGDKSKKGNLNTRIDIDENGAVLRINVGERKYAYARIQAGWKKGKSREELLEAISTCGEAYSVELKLKNGKVYAYFTIEENFPEVVVTKENGVIGIDVNAYPNHIAWVEADGNGQLVSYGKIPMPELTSGSSDKREYYRWQYVHEVVGLAEEKGKALAIERLDIRDKGKRGDFSGRKSRRIRHGFSYKSLLDKVKILAQRKGIQVIEVNPAYTSVIGMLKYAPQYMISKDVAAAYVIARRGLGLKEQIPEGYMAILKELDADELEELKEHVKRTVKNKQLKKRQLKEIDEAIKLIKSLGSEPGEALIPLDGTSVNACSESYKLWRVLKVAVVTPLSPGKVLRDISVLKGVLHSGQVGRPG

SEQ ID NO: 64212 - protein, 397 aa, Herbidospora sp.
MSRYRLAPTPVQEVALAEHCRHARYVWNLAVEQHSCWRPGGRSAPGFAEHCRQLTEARAEFAWLRAGSIVVQQQALKDFAQAMANFFGKTHRKPTWRKRGQSDGFRIVAVKTGDVRRLSRNIGEVRVPKVGWVRFRWSRAVPEGVRSFRVSRDTAGRWFVAFAAIPEPIAAPGTGQVVGVDRGVAVSAALSSGEMTSAPTLRDSEKARLLGLVRKLARAEKGSHRHRKVKAAIGKLKAREIDRRKDWIEKTSTDLARRFDIIGVEDLNVSTMTRSAKGTIEAPGKNVRQKAGLNRSILAAGWGRLVTRLEQKAPGRVVKVNPRFTSQTCNTCGYRAPGNRESQAVFRCAACGHQANADVNAARNVRDIAAGLAVNARRGDPVAGPEKREPQLVLLSG

SEQ ID NO: 64213 - protein, 393 aa, Herbidospora sp.
VRRSFRFLLRPTARQAAALAACLDDHRTLYNAALEHRRIAYAKAGVTIRYGEQSADLKHIRAADPGQARWSFSSQQATLRRLERAFRAFFDRVRQGRTPGFPRFKGRGRFDTVEWPKDGDGCRWDSQPEHPTAAFVKLQGIGHVRVHQHRRVLGTVKTISVTREGSRWYLVLSCDEVPGRALPATGAAVGIDMGVASLLTTSVAEHLVNPRHLAASADRLAAAQRDLARKRRGSARRRKAVARVAALHARVRRQRLDGAHKAALALIRDYDVIVHEDLKVANMTRSASGTVERPGRHVAQKSGLNRSILDAGWGVFLTILSYKAESAGREVIAVDPRGTSRTCSRCGHCAADNRVTQAGFRCTACGHAAHADVNAAENILRAGLALRRAAEAA

SEQ ID NO: 64214 - protein, 601 aa, Rhodococcus sp.
MTGPGSTAPRQFAVTTRPYVAVDDATGEPIGLDEVDIRVGWLLDLITAAGAELVARLWHPATFDVLAAGLDPHNRRLPAQGHVAAARLGWNPTYPDGVHVPSRVTRVVTAQVMATLRTLAYRETAIAALSARFDPATGVLAPPTEPGDAVPPGFARGVRRQLAARARRGGGAPAGRLRITDVQEPPRMAAMARLSAADRQLAQITVAERELVLTVKLPTCPTPAGRTQWRRIRLTAAIPAHLHGRDVSDWHLPTLVLDRRGLLLRCAATELVPAGDLDSATVAVGVDWSPTSLGAAAIAAQGADGLSSDYRGWTYDDRGLGIKLARLQAEGQLLNAKAARLTQLAGAAPPEVRAELEAKIAVLDSHRTAVGIKRGKINRELAFDFARQVTDYAAAAGAQVIAVEDLTTLETRGHGRAKNNRAAQSARRQAVAALAHTAAGVGIAVVSVPARGSSAQCPGCDEPLARPGGYHTAWCPRCRVGGNRDHIAGVNLAKRALLGRGKATRRRGQMPAVRAAEHAPVRPSRDKKSPTPRRPRHRRVRRSLPTATRRLGVTPKQHVPAPQASVWDTVQPTPPHGDTGSRDTRTSQASATPVADSMRCT

SEQ ID NO: 64215 - protein, 492 aa, unknown
  TnpB Polypeptide
MSQKVRVTHVKVKGGQPYLGQHDGMPRYSDDPDAVMRWLCDGWRSRYNQCRSTRRKYGPDHELIPIGDTVTDLTDAQARRACPWLAALPTLILQSPSKLEAVEWYSNVKRRKTARKQHRNPGRMPRFKSRHHDPLTFVCWYDGGRNAVFRQVNKTHGIVTITGQNPVGFRAHGARWRVEIHVKTSQPVRAYTNVRVNWTDRTLVFTNPPQPLDATLTGRAVGLDRGVAHQLATSDGRFIDLPQAKLNRISKEVARRQKAMARKALLAGYHNQRDYRKHGASKRYERERRQVARLYRKARDITVDWAQQATTRLVRGYDFIVMEGLNLQGMIRRCKPKPDPKHPGRYLHNGQTAKRGLNRGLLQSNLGLIRSLLEYKTRLLSGKTLATVNPAYTSRTCIRCGHCAKENRESQAVFSCTKCGFTWNADLNAAVNILDMGVRAASAGELSEQGMDYALRAVNMARHGDATRGSRALFAREPQPSDASPATGIPRL

SEQ ID NO: 64216 - protein, 308 aa, Methanohalophilus sp.
MFLTKTIILKIANPDNDLVETMQKYSDGMNYVSEIVFDNGKPISAMKLQQEVYAYLRETLKLKSQMSCNIPRQVAGCYKTLYKLKESKWQKVQFSPSSMTFSYKRDFAISENMVKITTINGRKAYSILNYDYAKQYFDGSWKYQASKVVKHKDGDYYFHLCVEKEVPDKELTDASTFMGIDVGMNYLAVASTTDKKCSFFAGGEIKNLRNQYKSMRKRLQSKGTLSAKRMLKHIAGKEKRLMRDVNHTISKEIVRFAIENKVSVIGLEDLTGIRDSTLSKTPKKRRHNHSVTGCLLDVKNVVMRTMPT

SEQ ID NO: 64217 - protein, 397 aa, Trichocoleus sp.
MANKGYKWRLYPTPEQEQYLSRCFGCSRFVYNYFLRLIIDAYAESKKHLKYTDTAKLLTLLKKDEQFSWLTDVNSQSLQQSLKDLESAFVRFFKKLGSFPVFKKKRNRQSFRIPQHWSITPDGMLKLPKMQPIKMVQHREMEGTPSSVTISKTPGGKYYASILVEYDHREAPLNGGKIGADLGLKEFLITSEGEKYPNPRFYKRSLKRLKRLQRSLSRKVKGSNNRNKQRLLVAASHEKVANQRLDMQHKLSLQLTCNNQVVAVEDLYIKGMVKNHKLAQAISDAGWGQFLTMLEYKGKLYGCEIRQLDRFFPSSKRCSKCGYIHQTLTLDIREWACPECGTHHDRDINAATNILIFSDPQIRQELPESTPKEPVERQGYQGGYSLGLGSCAGLSPQ

SEQ ID NO: 64218 - protein, 554 aa, Hydrogenibacillus sp.
VKNSFTIIGEFFPEVYPAFRSGKWARGEEDPLTTEMRLFSACLRWSYRRILKGVSRTEIKKQGQDLFGLNSRYVDDARLKAQGMIDAQKELLELEIETTEAKLRRARKKLGWAMEKRSRAEKNGLSKDELRTLDRTVPGRQARVSALEKRLKELREHKENGTVPTAIFGGRKLWRNVCKGKATRDEWRAARKNRLYARGDRTKGGNPNLKITFDGHAFRMAVTISHLSEPTGVDALGRPIMRRAPRVLGRLWIPPKHRARLLGWLAEKRPYTAELIRGPDGRFRVHIALELDDQPAPDFSRGALAVDINPDGVGLANVSSCGLPEPWPKGFRIPHPKNLGKYDGEFQVIPYPSGFLTIRVPELAYASGFRRRYLIGVLAKVVVDVAKALGKPLAMETLSFDQGRLDRGKTFNRMAAQFPYAMVLQALMRRAVKENVGYKQVPPQHTSTIGRLKYEKKYGVPVHGAAALVIGRRAMGFRERITREVRDFVLRVKERRKPTGDLRPREGTGMTRKVEAALQALETKLLLHNGLARRQQESFFSCWRELKTLALAFR

SEQ ID NO: 64219 - protein, 394 aa, unknown
  TnpB Polypeptide
MNLNTCSIYPACGPEAILYRLPVMYPVKLSVNTLKNKRPGGKPMQITVKAKLMPSKEQSQLLKSTTREYIRLVNHVVSDCIDAGKTVKHTSATVSADLPSAVRNQAIRDGKSVYQKYKKTNIQSILKKPVCIWNNQNWSLKDGLLSFPVLIDGKSKRVIIPVLMTDYQLQRLTGKLGALRITQKSDKWIAQIVVEAPELLNPGTKIMGVDLGLKVPAVGVIEDGKTRFFGNGRQNKYIKRKFRSHRKKLGKQKKLSAIRRLNNKEQRWMKDQDHKISRQIVDFAISQNIGIIRLEALSGIRQTARTSRKNEKNLHTWSFYRLAQYIEYKARLAGIRLEYVKPEFTSQKCPMCGKLNKAKDRDYRCICGFHTHRDRLGGINIINAPVADGNSLSA

SEQ ID NO: 64220 - protein, 411 aa, Moorea sp.
MLTLNYEFKLVPTLEQIAIIEQMLAVCRKVWNYALRERKDWYQSRKCSINACSLEKEYILPADVTYPSYKEQAASLTKAKKSNPELKSVNAQVLQQVLKTLERAFTSMKSQGHGFPRFKNRYRMRSFVFPQFKGNPVINDLIKLPQIGLVKMRLSRAIPDGFKLKQVRVVRRASGYFAMLTLQSDVSVPDRSPWGHPLGVDIGLDKFLATSDHELVERPKFLITLQGKLKLLQRRLKLKKKGSANRHKLNQKIARLHQKISDTRKDFHFKLAHHLCDQAGMIFVEDIDFRAWAKGMLSKHTLDAGFGQFFNILAWVCWKRGVYLGKVDYRYTSQICPKCGAHTGKKDLSERTHKCLECQYEINRDIAAAQVICQRGITAVGQIVAQINCVGVLSGTGNSLDKCRKSSEPRS

SEQ ID NO: 64221 - protein, 312 aa, Lactobacillus sp.
  misc_feature (302)..(305): Xaa can be any naturally occurring amino acid
LAKLGRTIKLRLYPDADQAEQFLAMSQEYQRLANIVSQWIFDHAFQLSWLKINHQLYKQFRQESPLNSQMIQSVFRTVVARYKTVREQMKQHPYRYKNEENKWIQLPKDLTWLVNPIQFRRPQADLVRQSNYSFVSEMRQISITTLGKRTKLGFTNKGFEKYFTDDWKFGTAKLVHNRGKWFLHIGITKEVSDFSPKDNPKIVGIDRGLRFLATAFDDEGKTLFFDGQKILRKRMKFLGIRRQLQSKGSKSAKRKLKRLAQRENRWMTDVNHRLAKTLVAAYGSHTLFVLEDLTNVTFNTDXXXXGLLKVPS

SEQ ID NO: 64222 - protein, 277 aa, Cyanobacteria sp.
MWYTYAKLVSVIMLVFEAKLEGVKQQYVRLDEAIRTARFVRNKCIRYWMDNKGIGKYELSAYCAVLGKEFPFAGKLNSQARQASAERAWSSIARFYDNCKKKKPGKKGFPRFKKHQTHGSVEYKTTGWKLSEDRRTITFSDGFEAGSFKMWGTRDLHFYQLKQIKRVRVVRRADGYYVQFCLDQERIDKREPTGKTIGLDVGLTHFYTDSNGQTIDNPCHLRKSEKSLKRLQRKLSHTEKGSKNRDAARNRLSRKHLKVSRQRKDFAVKLAFRRSPV

SEQ ID NO: 64223 - protein, 462 aa, Moorea sp.
MFRTIPIKAKFSLEEQLFWVDQCQHANSLTNCALYYTRRSHYERLENEEAYSSYWVGDEYRCGWKTYRSNTTYPELYKSLKDNYHYKAMAAQSAQQTLKQVGESITAYNGLVNLYYFGEGPRPHLPKYRKKGGLAAVTFPRQALTYKDGCCYPSISRETKAELLTDIALPIPDFIDIDWLRELRIRPCLGEFWIDWIIDDGKAPLKTNANLDYNQALGIDHGGTNWVTAVSTKGKSFIIDGRKLRSMNQGYSRLIAKYKQGKSEKYWDYNLDRVQRKRNNQMRDAVNKAARFIINYCLTNGIGNLVFGWNQGQKSGANIGKHGNQNFTPIPTGRLKDRLQQLCHEYGIRFTLTEESYTSKASFLDGDSLPKFGEKPESWRPSGKRVWRGMYKTANGWLVNADCNGAANIIRKVAIQLGLNLAEVGRGALTLPQRYDLFTSLNRPYRKRLLSDGFQPHHLATF

SEQ ID NO: 64224 - protein, 392 aa, unknown
  TnpB Polypeptide
MINYGTIIVPINCSKKDYTYLLSCNKLSAEVWNIVLDLEECHRKENEGEWLDRNQLQKLTKKCVPLHAKGIHHVVHKYLFARDSALKAKKGNGENNKYPHKKKQYFPTGWDVQSVKVNKNKLILSKPTIERDGKNYKQKPITLYVKSIPENIVEVELVYKKELMLAIKYKDKSEKLQIKSKNHASIDLGEIHSITSIDSCGNAIIITGRKMRAIKQHRNKIQADIYRRMSKCKKGSKQYRKYLRALKNMKWKYDKKILDCVHKVSKLYLDYCIINDVSTVYYGDLDSATRNTKKRANKFVGQKLNQWNYGELIKQLENKLTRYGIKLIEVKEYYTSQKCPSCESLNKPTKRNYTCKCGYRQHRDIVGAMNILNDNSEFEISRYTDKKYLQIT

SEQ ID NO: 64225 - protein, 184 aa, Bacillus sp.
  misc_feature (91)..(91): Xaa can be any naturally occurring amino acid
MTKQNKAYKFHLYPTEEQAHLMRKTFGCVHFVYNRMLAERKEVYEKYKDDKKQLKKQKLPTPAKYKTEFQWLKEVDSLALANAQLNLQTAXNGNIMLFNSHIKLPKLKMVRIKQHKEIPQDHVIKSCTISMTPTGKYYVSILTKYKKEIVQKEVETVVELDFAMDYTLVLRMREPIILSSILKC

SEQ ID NO: 64226 - protein, 365 aa, unknown
  TnpB Polypeptide
MHTVQLLLKTSKYERHEIDRRFHALAHLHNVCVKHARKCMIRLQHDKRYAELRQLYNELVKKEKMSKEEKSQKKKLAKQLAACRTEQGLSKASLEHYIKVCGKQFSKLLSSQQVQAEADRVWCGVERCLFGNGKELHFKKLMDFDTIGGKSNKNGARFDLDAMYVNWLGLSLKCYLPKSENSLSYVWESLKGKISYCNIKRLMFSSGWRYYAEIVVSGAAPTRVSIGTSTMGIDPGVSTIAGVSEDACVLEELAPNAIQYEKKIQKISQRMDRSRRISNPNKYNEDGTINRSNRDPWKYSKNYVKMCRLLKSLYRKKHAYIVDSHRELCNKLITIAKYFPVEKMHFQALQKKAKETRRQENKTRS

SEQ ID NO: 64227 - protein, 381 aa, Fusobacterium sp.
MDSTVYTFIGTKIRLKPTKEQEILLWKSAGCSRFIYNWALDKQIDNHKKGNKFINDKVLRREMTKLKKEEDFKWLCEVGSNVLKQAVKDLCLAYKKFFDKKASFPKHKNRKSNISFYVNYESMKKTQNGVQCEKLGNIKTAEPLPELLIEEKHYLNPHISYDGKYWYISFSRKIEIHKTEHNNTTVGIDLGIKNLATCSNEKVYKNINKTKRVRKLKKKLKRLQRKVSKKYLMNKNGEKFVKTKNIIKLERKIKLINRTLTNIRVNHTHQVTTEIVKTKPSKIVIETLRVTNILKNKHLSKAISEQSFYRFISFIEYKCKLYGIELERVPTLYPSSKKCSHCGAIKKDLKLSDRIYHCECCGLTIDRDYNASLNLANYKIS

SEQ ID NO: 64228 - protein, 366 aa, Thermocladium sp.
MDRTVKLRVRVDYATYSALKEVEEEYREVLEDAVSYGLANRTTSFTRIRAGGVYMTEREKHKDLPSHYIYTACEDASERLSSFEKMKRKGRAFTDKPTIKKVTVHLDDHLWKFSLDSISISIKRGGKVFISPTLPKLFWKYYNGGWTIASEARFKSLKGNVVELYIVFRKDEPKPYEPKAFIPVDLNENSVSVLVDGNPILLETNIKKITLGYEYRRRAITTGRSTKDRDVRSGLRRLREGGDRKADIRWKLANLIVKAALEGRSAIVLENLPRNTPEKMIKGIRDPQLRLRIYRSAFSSMKNAIIEKAREYGVPVIPVNPAYTSSTCPIHNCRITYSPNVALPKGWVSARRVVNCGTGMSSHYTT

SEQ ID NO: 64229 - protein, 407 aa, unknown
  TnpB Polypeptide
MIIHKAVRYRLETTPEQETLLARAVGCVRFVWNRALSVQKSYLDYQCGTLNYAGLCELLTSWRNTEAFGFLAESPSMPQQQTLKNLTRALKDAFDRKSAKQFPKFKKKFVHDSMRYPEPDHIQFDLKPVDQDGRKVLPKIFLPKIGWVKFRKSCTIGGEIRNVTVSRSGGHWYAAIQIEKTVADPVHPATSAVGGVRSVTANILALSDGTIFQPITVYRDMQKKLAREQKKLAHKVKFSANWKKQKAKITRLLQRIVELRRTVLHQISTIISKNHAVVVLEDLKVQHMTASATGTVDQHGRNVRQKSWLNKSILNQGWGMLKRMLGYKLQWSGGMLLLVNPAHTPKPARRAALLTPGTVKRQCFVACTAGMRRADVNAAKNILARGLATPHGVASTAGLAGVVCSPE

SEQ ID NO: 64230 - protein, 413 aa, unknown
  TnpB Polypeptide
LIRDKLTVLNRMKCQRKVEYRLYPSPNQAAELARMSDTCRKVYNWALAERREYFETTGKSLSFAEQCRRLTVARRENFAWKAVHTHALQMALKRLDLAFGHFFRRVKTGEKPGYPRFKSKDRFSGFGFKEHGNGWRLEHAGKVVRITGIGRVKLRGKARFDGGEPRTCEVIQRAGKWYLSVTFTLAALPERKRTGEIVSGLDWGVETFATLANSDGTSEEIANPRHLRRKLDRLAAEQQTLARKQRGSKRRHLAKQRGARLHEKVRRQRQDFLHQTTAKLAASRRVIAVEKLSPLAMSAAGGATKAGLNREILAAAAGAFHSMLAYKAEEAGSTIIEIDPRLHRPSQTCSGGGPARKKSLSERAHVLPDGSVISRDLNAARNLLNLALGREPTQHSGPGTGPDTGCETATIAA

SEQ ID NO: 64231 - protein, 413 aa, unknown; identical to SEQ ID NO: 64230
  TnpB Polypeptide

SEQ ID NO: 64232 - protein, 480 aa, unknown
  TnpB Polypeptide
MQMLLSYKYKLRPNQQQSDKLARWLDLLRANYNWCLKDRIDGWHQQFICGDYCDLRSGIEITPLTCSLVRGTQLANPWKEGNGKAKKEGEKDKSPKRTASLMQDANLQDLKAARPWYQGVDIGVLQQIPARVNEAFSKFFSGAGFPKFKRRHDFKSFSYKPGRIKIQGSKIYLPKIGWMRFYNSRSIPDGFEIKTVTVRQKADGWYVSVRIESKSTPDFPAIPDSEITTITGCDMGLGKLVYLSDGSVIDNPRFATNKHTRHLMRVRQKRVNRKQKGSKNKFKAQQKVARLRNKIQQKREAYQWNVANKIVKKADAVAVEDLQVKNMMKRCKPVNSEIGRSLPNGQSAKRGLNRSIADASWHSLTQKLEYLAVKSGKKIYRVNPQHTSQTCSKCGNVDKENRNGEKFICTNCGHVDDANLQAARNVKAKAIKLYKLNGTAGLVETSLINSGERPLDNTLPKGKRCMNGNPGNRNIKAEMS

SEQ ID NO: 64233 - protein, 395 aa, Mycobacterium sp.
MRRAYVFRLRPTARQHVALAACVQSHRELYNAALQERREAWAYSKTRINYGDQSAQLTEIRQERTDQAVWSFSSQQATLRRLNKAFAGFFRRVKTAKPGVKPGYPRFKGKARFDSVEWPKDGDGARWLPETKRVYLQGIGQVTVDLHRQVAGRVKTIQIKRQGRHWVLVLSCDDVPTNPLPATGRQAGIDVGIASFATTSDGEHVDNPRWGRAAADRLVAAQQRLARAKRRSTNRERKRETVAARHRKIANQRKDFHHKQARALVERYDLVVVEDLQITNMMRRAKPVADPENPGQFLPNGARAKSGLNRSIGDAGWGGFVSILRAKAEDAGRIWIEVDPRHTSDGCEKCGYSAAENRVTQADFVCQRCLHRTQADEMAARNILRAGLALHAQAA

SEQ ID NO: 64234 - protein, 432 aa, unknown
  TnpB Polypeptide
MQVVKTVKIPVHYTTTKRKLDILNRLTARLTYGVWLWSRIIEANGTRTRSGLRKREFEQEVREQTGLNAAFAQCCADTALWMWKSYWKLHSEWEKKVAGAQRECNERWLCKLMKREPQPPFSNGLKHKIPIWFDYRIGSLEHSEIKLSPRVIRISTLKRGERITILLNPAKYHLSLLERGEIKSFQIVKREGKFYAHVKVEYEVQDQPVRAVRGVDLGVRRSTATVLLRSDQSLRRDGFSVIRDGEKAHRLSELSKKVAKLQQLKKWEALKRMRNKRRRVAEYYDRLTAKRIAEISSGCIVAIGYPKGIKYENYRGNGKRKLRRLMAHWAYGRIIRYTIEECAERSIEAMTPDERWSSMTCHRCGSRNTERLIQSIIHCYECGLTYNADFNGAINIGSSILAVPRSRRAAVDPAPTSDESLEERGEAGSPCL

SEQ ID NO: 64235 - protein, 476 aa, unknown
  TnpB Polypeptide
MLSEKMEIQFGNIFVIYIRNLFPFFGMCDRIFTKEIVILVKNRKEGKFIMKKGKQPVRDKIYGTQTQQLKNLTSKEYEALKELCFLAKNLYNVGCYNVRQHYFIEGEYLSYQSNYHLCKENSNYKLLNSNVAQQILKEVDKPFKAFFGLLNLIKKGKYDFRSVKLPSYLPKNSYFNLIIGQIRIKKDGTLDVPLSPTFKRTHGKITIKVPKNLLDKKIKSIRIIPKDNARFFVVHYTYEIEKYEGNLNKNNSLAIDLGVNNVCACVSNTGDTFLVDGKKLKSYNKWANEQYLRLEKIKKKQNIKITTKQQKKIWEKRNRQINDYYNKAVKIIMNYCEANDIGTIVVGYNKTIRKSSFSQKVYCDNFKSLPMRTLKSKLEHKCKIYDIDFIKQEESYTSQSDFLAEDILPKYINADHIKSYSFKGERISRGQYKSSTNVILNADINAALNILKKANITDINHLVTSEIKQPKRIKVS

SEQ ID NO: 64236 - protein, 381 aa, unknown
  TnpB Polypeptide
MIKQLDNLFNYRNFVWNKALETWNDLYELSLVMEDPMCRPNEYKIRDELVHNKEDWQYTRSSRVLQLTVNDLAKAWKNYFNQAMPNHDKPKFKSRKHSKKSFKTDRAKIVNGKLRLDKPRGSEDAWFDIAMVESVRFEGTLKLTTVTQEADGYYASLSIEIDETPVKRDNNVITGVDVNIRKFDYKTKEDYATQETLPISLLELYQKITHYQRLLARKRVANPNRFNSNNYRITRTKLKRAYQEVYRIQEDLLHKFTAQLVKDNDVIVIEDLDNNHMKMNKHLAKNLHRSLFGRFKTILPYKAEWNGATVILADQFFPSTQRCSECGNIKTGDDKITLAGNKKHHTNHDEYHCYNCGVSLKRDENAVENLIWYGKQALTLH

SEQ ID NO: 64237 - protein, 392 aa, Herbidospora sp.
VFRLRPTRRQEIALAACLADHRELYNGALEHRRTTYRTAGVIVRYGDQSAELKSIRADDPDGQARWSFSSQQATLRRLDRAFAAFFTRIRTGRTPGFPRFKGPGRFDTVEWPKDGDGCRWNSQPDHPTATYVRFQGVGHIRVHQHRRVSGTVKTISVKRAGSRWFVVLSCDDVPARPLPRTDAMIGIDMGVASFVTTSEGTHVANPRHLLAGAGRLACAQRSLARKKRGSNRRRKAVARVAAIHGKIRRQRLDGAHKTACGLVRGFDVIVHEALQVTKMTRRASPIPDGGGGFSPNGAAANSGLNKSILDAGWGVFLTILSHKAESAGRELIAVNPANTSRTCARCGHCAAGNRVSQAEFRCGACGHVAHADVNAAQNILRAGLALRGAVAA

SEQ ID NO: 64238 - protein, 453 aa, Nonomuraea sp.
MWPTSSRGSLPTTCAPSFRTCAPGCPHCGHGPTSWPRSAPCLPRRCGATSRRSTRGHPRRAAMRRTFKFLLRPTTKQAVALAACLEEHRRLYNAALEHRRTAYRKAGVTVRYGDQSAELKHIRADDPDGQARWSFSSQQATLRRLDKAFRAFFDRVKAGRSPGFPRFKGRFDTVEWPKDGDGCRWDSQPHHPAATFVRLQGVGHVRVHRHRLVLGTVKTISVKWEGSRWFVVLSCDDVPAGALPTTGAVVGIDMGVAWLVTTSDGDHIENQRHLAASADRLTVAQRDLAHKKRGSGRRRKAVAGLAALHAKVRRQRFDRAHKAALALVRGYDVIVCEDLRIAGMTRSASGTLDAPGRNVAQKSGLNRSILDAGWGVFLTILSHKAESAGRKLIAVNPAGTSRTCARCGHCAKENRTTQAEFWCTACGHEAHADVNAAINILRAGLALQDAQAA

SEQ ID NO: 64239 - protein, 490 aa, unknown
  TnpB Polypeptide
MWFVKVFMGAGDMECVRRAVAVEIESPPSELYAVEGPYRKIVEEVAVYIADRGRLEKEKYNELYRRFRKQYPLPSQLIQQAINQGVEIGKSFLELKRDGRVHKPRPEVRQVSIRFAKDSWSYKKAVGSTAPVRLALSLPGGRRKVWIKPHRRFWLYWWKTLRREADLASTLVLKRRRNKWYAVFVFDVKPREGPPAEAVAFDVNENTVAVAKVSLLSTVDAVARWNRRYIDPAVYFIKTDFGRLAKRYEAVRNAKLEELKRKYPYAGRDDEEKVQNVTDTREFRRFVRRLRERRRKEGRVRQIASEVTKSPAVIITEELGKNPQEEMIGLEEKKVKKRELRHRIRQTPFRRILRAVEDKAAEVGSVVVYVSPYRNSKVCPIHFSLLKNGSGWHTLHCPRGHGVDRDHAAVLNMLWKITPEGATKAPWWDLKDVKRRLEKGRGLVPKEAVRRRNPLVPWPVVHAVWASLGALKASSQWPAVLARAAPMTPA

SEQ ID NO: 64240 - protein, 652 aa, unknown
  TnpB Polypeptide
MTEKPIFQTVKTSLKSIIRNDRQQQDEVVRKIALATKMTSRIMTHTLLFLKLYFLYTFDNENEWPELNERFVEQVMKTLCAGRNARGRRPNEDTVALKTALDTFYEDHYRPQMVEEDALSYENLCQSLKYMSIEVITMYKNNIIQHFVSYIERYINFTQNKSTRITDIKQNANLEPAQRTEQIRALTQELRNVKHDILTKAADPEKKSNGNLHAWINEQIGSILPDHQVRENNISCDLEDSPLDYLKCMIFMMKHIEVQDEDCKLLNVFPQRSTLIPAHFRLDTTLLISLISTDKTALDKRVGELKERKDAAWASEFKTELKIFGLNETKEQGYTFHHQIETDGVSASILLIRKDKAQLKKPKSKSKKGVKEPYITDLDTPAKRMKVADKVLVGIDPNMSDLLFCVDSDNSNQRKLRYTQDTRRRETYLSKKQKILEKKKEVTKIDGISVKHLESNLGEFNKKTLNFNKFKIYLSAKNRLNARLAPFYDKNCFRRLKLGSFIRRQVTEARFLNKFKVKFHVDHKPEDVVVCLGDWEQYKHRKFKEPVKGKGFRTMFRRAGYHVFLVDEYRTSCKCSYCSDADAVCETFRRVKNPKPNTTGQILCHGLVRCRTCSRLWNRDVNAASNIWKIAKEAIGGRQRSEYLARGGNRNH

SEQ ID NO: 64241 - protein, 399 aa, Deinococcus sp.
MVILEFKAYGRAEQFVALDEAIRVTQFIRNKALRYWMDNRGVSKYDLNKQCAVLAAEYDFADRLNSQARQAAAERAWSAVARFYDNCKKKVKGKKGYPQFKKNVRSVEYKTTGWRLSEDRKSITFTDKCGIGRLKMKGTRDLLFYHPTLIKRVRLVKKADGYYIQFVVDADRREPLEATGKTLGLDVGLQDFYTDSAGHKEPNPHFLRKAEKQTKKLQRRVSKKVKGSNNRRKAVKRLARKHLKIQRQRKDHAIKLARCVIQSADLVAYEDLRIRNMVKNHSLAKFISDASWYQFRTWLEYFGKVYGRITVPVPPQYTSQACSECGSKVEKTLSTRTHRCPHCGYVADRDKNAARNILTLGIHTAGQAGIYAWGDSASTESGETANSASAVAEPRIQRL

SEQ ID NO: 64242 - protein, 416 aa, unknown
  TnpB Polypeptide
MFGCQQILLKPDKELKAVLEYIGQESNKLHNCAVYYARQIYFKAHTYVRPFDVINALKRNPHYGALCAQAAQQTCGAVGESVKSFKGLIKLFREGKLEFKPKFPNYRTPGGLHLIAYPKQALGKKLIDGQISIPLGQKVKAWFGLKNFQVPMPSNLDYADIREIRILPKNGCFYAEFVYKSISVQAVGDDRKALGIDHGIDNWLTCVSNSGTSLIVDGKHLKSVNQWYNKRVATLMEGKHNGFWSHQLARLTEKRNRQMRDAVNKAARLVVNHCLKNKIGVIVFGWNKKQKDSVNMGKKINQNFVQIPTARLKNRIAQLCEQHGIKFVEAEESYTSKASFVDRDFLPTIGEKPDGWKETGRRVKRGLYRTGAKNWYINADCNGAANILRKVATMLGLDLDGVGRGVLTAPSRIAIW

SEQ ID NO: 64243 - protein, 415 aa, unknown
  TnpB Polypeptide
MTLTERHVIKKNNPLFPTLDELCFKSKNLYNSTLYKIRQEYFNSGIYLGYYSIQKEFQKTNQFDYRELPIKTSQQTMMLVDKNFKSFFGALKEYQRNPKKFKGRPRIPRYLDSMDGRFIVIYTYQSISKKELENNGRIKFSGVNNVYITTKVQYKDLCQVRIIPRGSHIVVEVVYKKQEKQILPDNNRYAGIDLGVDNLVTLTTNVPKDIPVVWSGKRIKSWNHKYNKDIAYYKGVLDKTNKSKRKKWSKRLERITLKRELRINDCFHKISKDIVNHLVSKHINTLVIGNNKGWKQDTSLGKIGNQNFVQIPFMKLISMLEYKCRLEGINFYIVTEEYTSKCSFLDLEVIGKHNVYLGKRVHRGLFRSRSGKLINADVNGSFNILRKCKPGCFDNFTIKNNGVKGVVVHPIIKII

SEQ ID NO: 64244 - protein, 439 aa, Natrialbaceae sp.
MSAECKTLEAYLAPPTQHKQRKLHDEYDRYESLLHKSFDDECDTMSAVNEAVSGEDLNWHSKNALKKYVPNLLDEDTYDAKQLADDHPIRYANTAAVFDRDEDRHHEICWEVPLPGRGTNFWIPLQLNPEQEDWWNALIDDENESVWAGELRLQRDGGRWVLHVTANYEVEPDHSCSCDSDDVTPIGFDVGESKLLVGCALRDDTPVDPLFVDGSRVRHLRQKQANAEDRLKQRYASTLLDDLVWGRWQDAIEDEIEKASHRAVEYASKFESPVIVLEYLEGITDEDIGEYWNRRLGKWLFSRLQSRIEDKAAERGIPVEYVYPHHTSKTCHACQHIGYRPHQGTFRCTNEECWVSEYQADLNAAANVANRLNPWGESLPWKSAGDDSPQNGGQWQAYEDTLPSEGLPSERRASDDKGSSSSPAVGAGTKPETGDAHTS

SEQ ID NO: 64245 - protein, 413 aa, unknown
  TnpB Polypeptide
MKTKHLTCKIALKPTIKQEEIFKQWAGASRFIYNWGLALRKQLYEEGKYKIDVYELNKYLNILKDSEKEYSWLNLIPSETRKQALKDMDTAYKRFFTISDSGFPKFKSKRKTPMAFYVRYDAIKIIDERHIKIPSSKDIEGDMIVKTYEKVNIPTGKILNSRIKYDGKYWYLTFVIRICKENIGNSVIDRFVRNKSQIINTPLSDALGIDLGILHTMTLSNGKTYENINKDYEDISKTQEEKVLTNETIRLRKKLKRLQRKLNKKYKMHKQGNKHVKTNNIKKLEQQIRLVNRRIKNIRNTHISQMTTEIVKTKPSKVVMETLDVSNMLKNRKLAKSIQDQSFYEIRRQMEYKCDIYGILFKLVDKLFPSSKLCSKCGYKNASLTLKDRQYNCPQCGLSIDRDLNAAINLSMQ

SEQ ID NO: 64246 - protein, 710 aa, Streptomyces sp.
MAKLMATAPCTAFSGVLEGTGERVGQRALLQRVGFLAQLSRELTGTLVAARWDEESLDVLSAGLDERGEDLPSKGWMAMRRLNWPQTSALPAGVYVPDRVRRGAEEYAARTLRLALHRRSIVAAVLATWPDDPRRRAGGEWAALRAALPAGVSGAEIRNRTRQICAYLSQDGKLPAGVCVLEGPPRVAGQVLLAAMDRQQVTLQRVDEASARLRVKLPLRAAPASGRDWAWHVIDIRLPGTVTADAALHTPTLRPTRTGRIAVDLPHSRPAPVTKASGHQVALGFDWGVNTLLTGTLARLTGKGQTRRVVTDGRRLVFDATTVSAALHRLRGVREHLAVKRDHCRALADGLGSPHLAWAEHLDRARVLEVEHGRVCARIRHLNAALARAAARWAVDQAVALGASVIYLEDLATLEARGHRRGNARLSGQVRGTVAEAMRHLGAKAGIAVVTVPARGTSRLCPGCLSPLTHHPAPDRLHERGWKWAHCARCGLSMDRDHAAARRIVSRGLLAQTHTTTQRPTGTRSIRTTVEGAVAVARRPKKTTRRLRRQRRAEMAPPRPAGTKATPGKGHPTPARPTSPRHSAAGPGPDQKTPRRMPDARTVPATTPTPGAVQRPAGHDTTTPAPSGPVPGHGVPAPHRIEEDPLRSHQVRLSRRTCRRRTRAAERTGFHHLHATEVHSLTPRFGPPDSDRTRPRRARKAWKPQAHTEF

SEQ ID NO: 64247 - protein, 420 aa, unknown
  TnpB Polypeptide
MLTKEQILERNKLISENGLRTRQKRMSQICKTFRFKIDYNNLNLKQKECLKMMFVEAKWIYNYLISQEDIYHFDYKNLNIITHKDKNKQDVLSNIQYVGSSIKQELILQIVNQIKGLSKLKKKGHNVGKLKYKSEFNSIKLKQYNITHSLRGTKFKIQGIKDPIRVMGLRQLRKYNNIDYTTANLIYDGNDYYISLTCFIDKENKQYENDIVGIDMGVSTSLTLSDGTKYDISIGESEKLKRLQVKLSKQKKGSNNRYKTIKKIRKEYTHINNKKNDISNKIVSKILNGYKTIIIQDEQLAEWRQDGISGSKMQHSILGRIKHKLSMCDRIVILDKWFPTTKYCRHCGTKVELELKDRIFECPKCKTKEDRDIHAANNMIWFYLNYTAPGTDVKLPVKLTYKTFVSKLAKQESNTTLAYC

SEQ ID NO: 64248 - protein, 372 aa, Brevibacillus sp.
MFLAKKVRIQPTPGQEQALWRSAGAARWVYNWTLAQQEDNYRRGRKFISDGVLRKKLTRLKRTVEYVWLNKISAQTTKQAVKDACDAYKRMFNGQSRKPNYKSKKRSKPAFYSRYDRFRTNGCQIYLEKIGWIQTSEPIPVSDKYCNPRISFDGKYWYVSVVIDMEQEQSELTDITIGIDVGIKELAVCSNGMVFKNINKSAAVRKREKRLRRLQRKVSRKYEMNKEGNRFVKTCNIVKVEKSVRLLHRKLTNIRTNHIHQATNAIAKTKPGTVVMEDLNVRGMMRNRHLSRAIAEQKLHEFIRQMKYKCEKFGATFIQADKWFPSSKMCSSCGKVKSNLKLSDRIYECDCGLVIDRDMNAAINLSKLAICT

SEQ ID NO: 64249 - protein, 403 aa, unknown
  TnpB Polypeptide
MRNTTHKLFHDKSLKHLHDDLNIIGVVRNHFIGLSMRYYRRYGKGLSYSKMSKHLTRLKKLEKYQHWHIPYSWSLQNMLKRLAQSFREMKTLGRGHPQFKSCKKYKGMTFDGIQAPLEKVLEKQKHQRNHPTYKIRLNGRWYRFALHRAIEGKILRVQVTRDALGDVYITLTEDFTEVRYEPKTGKAEGFDFGIKDFLTTSDGEKPASPMFYKQNAEKLAKAQQEHSRKVKGSHNRERERKKVARIHKKTANQRTDHHWKLAIELCREFDILFFEDLNLEGMKRLWGKQVSDLAFGEFMRKLKHQSHKRIRSVLKIGRWTPTTKCCCVCGHKNENLTLTDRHWQCPECDTYLDRDQNAAINILKEGVASFALGEVNPIVLFNKIVGISVEASSPLLKTTNASA

SEQ ID NO: 64250 - protein, 115 aa, Microcystis sp.
VISKAIVAEAKLTNSIIAIEDLTGIRERTNQQPRNKTERRRSNSWAFYQLRQFLEYKGIKEGVEVIAVNPRYTSQTCHCCLHIGIRSGKSFKCSNKTCGWIGDADANGSKIDFWG

SEQ ID NO: 64251 - protein, 553 aa, unknown
  TnpB Polypeptide
VSSLRQIAEPFVAAAPAGARVRTRIAADDRDDLVLRALGVYLGMLMSGDLAARCAQRRLTGPGRARSRQQRKQELTGGASSRWAGAITRTSDDAWNLGERNLIAEARSLRARVRRIDQRLAVPVGEKQGPQHGYASQAERWAKQQRVGRLRARLAEVEARLQTGRVSVCRGGRRLARVRHNLDAAKLTEAQWRERWESERWFITADGETDALWGNQTIRWHPTERWVELKLPAPLAYLANRPHGRYRLSQPVQWPHRGDEVAAQAQSGAVRYDITHNAERGRWYIDASWRIAPGPPPTLGMLRERPVLAVDLNHDHLAAWAVTPDGNPVGPPVTIPLALAGLPASQRDGRVRAAISELIRLAAAHHCLAIVIENLNFADAREQGRENRGRRPARGKRGKNFRRLVAGIPTARFRDRLAQMTCNAGLAVIVVDPAYTSRWGREHWLTPLQNQTSPTAPRPQVHHAAAVVIGRRAHGYRARTRCAPREPEDSRGRATRPPHPRTGTPGFVSPHEAERQTRLGQKTVKAERIRPPIQAAQDRSGSPTEQDSLLLSA

SEQ ID NO: 64252 - protein, 353 aa, Archaeon sp.
MIEKIRKEGFQSRNDLNYFLTELKESEPWLYDHHSKMLQMISTQVHGTQKSLIQLRKNGHRAGTLKFARFQEYNTIVYNQSGFCIKDGFLQLSKIGRIKIIHHRPIPENHIIKQVTVSKSKSGKWHACVVVDIDAILPKIILTKSVGIDVGIRNFAYDSDGYQTPNPLNLQKMLKPLIRAQRKVSRRQKGSNNYKKAVRFYQIIHERIKNRRKDFLHKLSTQYSKKYDTVFLEKLQKLNMIQNHRIAGNILDSGWGIFTNMLDYKCMVVEVPAKNTTVNCSRCGNSVQKTLAVRTHRCDVCGLILDRDHNASINILKKGLEIFKLPQELREVTPVEISMRSRKQEDATGQVRQ

SEQ ID NO: 64253 - protein, 324 aa, unknown
  TnpB Polypeptide
MLIQRAYKTELDPTPAQRETFKRYADAARFIFNWGLGKRIELYEAEKKSISLYDQSKEIVRLKASGELAWLLEISNRVPRWALRSVDYAFKNFFRRIKKGGNGKPGFPRFKSWRDHIQKFKLDSCIRVTLSAIRLPRIGWVKLKEKSYLPGHVKINSATVSSQAGRWFVSIQVELEHTIPPPNPDHDISIHLDFSPEFNPYYLTSDGQKLDPCKPLERALRRLRKLSRRHQRKVMDSKNRDKARQRLAKLHWRIAEKRKDFLHKATTRLAKNYSIITVEKPDLERMLQHAPTPIARATADAAFGEFVRQLTYKTKWYGSELKII

SEQ ID NO: 64254 - protein, 377 aa, Streptomyces sp.
MNYVPQAAELAEAKRDFPWLKEAPSHVLQQTLRDLDRACREHGAFKVRWRSKSRWSPAFRFPAGNLITVERIGRRWGRAKLPKLGWVRFRWSRPLGGEVRSVTVTRQGRHWFVSFLVDDGKTMPERHVMPATAVGVDRGVVVAATTSDGQFHDRAYATPGEVARLRRLQQKLSRCKRGSNRRKAVVASINAITGRVRSRRADFCTQTAAELTTRNAVVVLEDLRTRNMTASAAGTVEQPGRQVRQKAGLNRAILDKGWHMLELALRNAARTSGTSVVLVPAAYTSQTCNECRHADPKSRESQASFRCTACGHTAHADVNAAKNILNAAGHAVSGRGDFGVTRSVKRQPPATRTRAGRSLRAARVAGIPVLRAGRKSS

SEQ ID NO: 64255 - protein, 412 aa, Cyanothece sp.
MFILEYKLRGKKHQYQAIDEAIRTVQFVRNKCLRYWEDNKGVGQKDIYKYTTQLRTEYSFVKALNSTACQQACERTWTAILRFYNNCKSPQAPQAPLNKGGIKRGIGYPKYSKQTRSVEFKKSGWKLNRDTKRITFTDGKNIGELKLIGSRDLFYFQEWQIQRVRIVRRADGYFVQLILKLDVRDIAPQLEPTKKCIGLDMGLRYLYADSNNNVVEPPKYYRKAEKRLNKLNRRKSRKFRRGKKQSNNYIKARKKSAKGHLKVSRQREEFSKRLALRLIQSNDLIAYEDLKVKNLVRNKKLAKSINDAGWSQLRKWIEYFGVKYGRLTIAVNPAYTSQECFNCGQLIKKSLSVRTHVCSCGYVEDRDKMASLNILKKATIGHIGSYSEELNAWGDSTSILVGSNTCQGKLSQ

SEQ ID NO: 64256 - protein, 404 aa, unknown
  TnpB Polypeptide
MQLVEQHCIGKNDARYAVIDAACFASKNLYNYANYIVRQSFIHEHVYKGYAVVYHEVKGHESYQALPAKVANDVLRLLDKNWKSFFKAIEAWKLDPTPFVGRPCLPKYKDKQKGRNILIYDIQAVSKKGLKKGLIQPSLLGIEVQTKRKNVQQVRIIPRCGFYMVEVVYEQDPEPANVNPALIAAIDIGVNNLVALTSNKSGFIPRFVNGRPLKSVNQFYNKRKAELQTILKPDTRFTPRMEHITMKRTRRINHFLHTASRRIIDLLVSEGIGTLVIGKNPLWKQDPAMRKKEAQHFVQIPHARFVEMLRYKAGLVGIQVVIQEESYTSKASFLDHDPIPTYGKVKDEPMFLGKRLKRGLYQSRHGIRFNADVNGSYNILRKASPNAFVQGSRGCAVHPIRLHV

SEQ ID NO: 64257 - protein, 506 aa, unknown
  TnpB Polypeptide
MATPTYTLELALDTSNLSTKNYLKNYFNEVARLSNTVRRFAMRQLNLLKRDNRYKTLLKEYITLDKDNPRKKELSHQLNDIVRNYGLYKYGLDIFARNQRKNMKYIHSDVYANICDDIWRGVEKVLYSNGKNIHFKKWDEFDSFENKKNSTGIIYDNGYVYINRTINKPMHGIKIKVKMPHNKNSRHYQYEMDCLKNRTKYCRIVRRMFNNGWHYYVQLVQEGIPPQKHVVGKGRVGVDIGPSTAAIVSKNKCSLEELGTNQNEIKVFDKKIKKLQRQMDRSRRMSNPQNYNEDGTVRKIRKGHKKWSYSKRYYKTRNKLKTLQRKRATSIKQWQEAFANEIISDGNVVFIESMSFNGLKKKSKETKKNSKGKYQSKKRMGKSIQMHAPAQLVSIIERKLSYAGGVLFKINTYKFKASQYDHVTDEYHKKKLSQRYALIDGEPVQRDLYSAFLLMNSESDLTHADRELCFQEYNNFKKNHDICINELKEQTNSIKKYPTSFGLNKL

SEQ ID NO: 64258 - protein, 420 aa, unknown
  TnpB Polypeptide
LEQRSCLLNNTEGVRDITSAQNPKDNKRGPQSLSGHTQAFRMRIYPTREQADWINRMFGQARFVFNDALALWRESRNKAGRGLSYGVCASRLPGMKKAPETAWLTEGDSTALQSSLRNLADAWDRFYKGQCREPRFKSKKNPAQSYTTKYTNGNISLRDGWLKLPKVGKIRTSVSRPLAGRIISATVKRHGSGRHYVSILCENPHVPAGGPVKLLPATGLSVAIDLGVKSYATLFNSNGETSVIPNPRHFEKLERRLAIEQRKLARKDKESNGRRRQARKVARVHERISDARGDALHKLSTYLVKTHDEIIIEDLDVAGMIQNSPSSKCTKSVSDAGWSEFRRMLEYKCKWYGRKLVVVDRYFPSSQLCGTCGFVNDKVRDLSVRSWICPNCGAIHDRDVNAAQNLFREGARIQTAQQAV

SEQ ID NO: 64259 - protein, 425 aa, unknown
  TnpB Polypeptide
LQRVSVVRTDTLRLLTTPELDDFLRRVGDATAKLINMENYRRRRQFFETGKIDYSWQSAWARRFAEYYSVYKLLGSKNFAEACRLISDQWKSFLGLLKAAKEGKLEPWQKVRPPGYKKRDGQRIPIIIVRADGYRVDLERKLLYLKYWNVNIPFTGKPRWLIKQGAKQGRLIITYDPVKKRWYARLSVEVVLERRLDNGLKAGIDLGRERLIAFVTEPSEKGEGVALLYRGGPLKADYFYFERRIAEIDRMLSDPRSEEMDRSVLKEMHRRLYEKRKRHRDQVFANAAAHLAGMCLELKVGAVFIGGLRGLAQDKPGKGNTNVWSYRKLEMRLATTFENHGIALFEIPEDGTSKVCARHGCEVVRKPRGLVRCPHGHVMHADVNAAMNILKRGGGRVPQRVKVLSFIPTASKVIAVNEKKNGNPA

SEQ ID NO: 64260 - protein, 600 aa, unknown
  TnpB Polypeptide
VRGPEPRVPELEIPCLERGAEPKGVGKPKNNCSGAGLGEPGVRVFKLKTKSIRGKLKEFYDMLTSLLPRDGLPKSAFRYREEWENSFIEVIHSRLATGKWLRPKRRKRGRKRVKRKSGKPIPKRPPFLLTARFILTTNERRGRTDAPVVVDLRKREVRIPCVGVAVPIPERLARALEEENRLEPRPDFVVQLTSSGALRIIAKRAPEPRALEPPLRIIAVDENSRYGFVVAVFDFDERGYCRLTRFEVFKPPNHGYREKVVSALKSFADKPAGALESVRELLPFIPTPSDAGRLARKTLARKRRLNNAFVESFVSEVRELVREASQEGAAVVILVDPIDAESLQGTPLQGTLLRVRERLENLARYEGAHFAEIRASGKLCPFYGVEGRENGHRVFRCPRCGTVWDRDRAAVANLVLRYLRTLYKEECQDADPLRLADAVQAWLKRHPGFLLRVSPVPEGAGVRHRGPSPEGAQRAGRIVTGEPAARRARRLPPLTGGRAPRRGGDAGARASDLEVGERDAVVVENARAGEREEQEEGGSHDHGFGEDPLPLLLAHPRRQRVKYGDVAQRVENHEQHRDGVQQLPNLLDHGRAPLAQPKSL

SEQ ID NO: 64261 - protein, 445 aa, unknown
  TnpB Polypeptide
LAGLCGGTPPGTVSTAGHPGALAASLLYLSWTLTEMGQKAPRLEPGDEWPSPLVNTHALCYNLDMRKTFKYRLYPTPAQVRRLEQHLEECRWLYNHLLAERRDAWEQRQESVRLYDQHAELPALKAERPSLAGVQSQVLQNVAVRIDLAFQAFFRRVKAGEKEPGYPRFRGQGRYDSITFPQVPVGCKLETGTGRLYVMNVGRIKLVYHRPLEGTPKTATIRRSSTGKWYVSFSCECAEPAPLPPTSQQVGVDMGLTTFAMLSTRQAIANPRFFRQEEKALAKAQRRLSKAEKGTPERAARRTVVARVYERTTWRRSDFTHQHSRRIVNAFDLIAVEDLSVNRMVHNHCLAKSIHDAAWSQFADLLSYKAAWAGRKYVAVNPAYTSQDCSQCGHRQVLSLSDRVYTCPCCGVVLDRDLNASLNILGVGLHTLGLAPRSSRIYPGE

SEQ ID NO: 64262 - protein, 286 aa, unknown
  TnpB Polypeptide
VPIGSQLKAEYGFGRAERLRVAVRGEPHWHGDQGRLHLTYDDIDETYRAHQPVTVSDEAQATPTGTDVAALDIGANVLVACTTAAGDQYCYSGQEPFRQFRETTERIADAKAKLPDGQQTSTRIQRLYRKRSRRRDHAVNALLRDLVQRLYDDGVETIYHGDLTGVLGEYWSVEANLKARTFWAHRQCLDQLANVCEECGIDVAATSEAWTSQTCPECGEREQTRRHRETLTCPCGFEGHADLVASRTLLEQATNTAVRPTARPVRFQWDDHQWYSVEEDAVAPNE

SEQ ID NO: 64263 - protein, 409 aa, Nocardia sp.
LGTLIRIGYDPGVQLRYQFRVYPTLGQQDSLARAFGCARVVYNDALAAREQALRDGARRISDAELSKQLTAAKKTPERAWLSEVSSVVLQQALADLNTAYRNFLQSNAGKRKGAKLGAPKFRSRHDSRQAIRFTRNARFSITVGRKLRLPKIGDLRVKWSRQLPCEPSSVTVIKDSMGRYCASFVVDVSSDPLPERDSEVGIDLGLTTFATLSDGRRIASPRFFRRAERRLWKSQQALSRKEKGSKNQAKARRRVARVHASIADARRDFANKHSTAIIRENQAVYVEDLCVKGLARTRLAKSVHDAGWSMFTRLLEEKAARYGRYFAKVDRFFPSSQLCSDCGVFDGKKPLSVRSWTCQCGAIHDRDVNAARNILAAGQAERRNACGARVRPEPVPALCGEAGTHRERR

SEQ ID NO: 64264 - protein, 7 aa, Artificial Sequence
  Synthetic
PKKKRKV

SEQ ID NO: 64265 - protein, 16 aa, Artificial Sequence
  Synthetic
KRPAATKKAGQAKKKK

SEQ ID NO: 64266 - protein, 9 aa, Artificial Sequence
  Synthetic
PAAKRVKLD

SEQ ID NO: 64267 - protein, 11 aa, Artificial Sequence
  Synthetic
RQRRNELKRSP

SEQ ID NO: 64268 - protein, 38 aa, Artificial Sequence
  Synthetic
NQSSNFGPMKGGNFGGRSSGPYGGGGQYFAKPRNQGGY

SEQ ID NO: 64269 - protein, 42 aa, Artificial Sequence
  Synthetic
RMRIZFKNKGKDTAELRRRRVEVSVELRKAKKDEQILKRRNV

SEQ ID NO: 64270 - protein, 8 aa, Artificial Sequence
  Synthetic
VSRKRPRP

SEQ ID NO: 64271 - protein, 8 aa, Artificial Sequence
  Synthetic
PPKKARED

SEQ ID NO: 64272 - protein, 8 aa, Homo sapiens
PQPKKKPL

SEQ ID NO: 64273 - protein, 12 aa, Mus sp.
SALIKKKKKMAP

SEQ ID NO: 64274 - protein, 5 aa, Influenza virus
DRLRR

SEQ ID NO: 64275 - protein, 7 aa, Influenza virus
PKQKKRK

SEQ ID NO: 64276 - protein, 10 aa, Hepatitis virus
RKLKKKIKKL

SEQ ID NO: 64277 - protein, 10 aa, Mus sp.
REKKKFLKRR

SEQ ID NO: 64278 - protein, 20 aa, Homo sapiens
KRKGDEVDGVDEVAKKKSKK

SEQ ID NO: 64279 - protein, 17 aa, Homo sapiens
RKCLQAGMNLEARKTKK

SEQ ID NO: 64280 - protein, 4 aa, Artificial Sequence
  Synthetic
GGGS

SEQ ID NO: 64281 - protein, 5 aa, Artificial Sequence
  Synthetic
GGGGS

SEQ ID NO: 64282 - protein, 9 aa, Artificial Sequence
  Synthetic
GGSGGSGGS

SEQ ID NO: 64283 - protein, 15 aa, Artificial Sequence
  Synthetic
GGGGSGGGGSGGGGS

SEQ ID NO: 64284 - protein, 20 aa, Artificial Sequence
  Synthetic
GGGGSGGGGSGGGGSGGGGS

SEQ ID NO: 64285 - protein, 25 aa, Artificial Sequence
  Synthetic
GGGGSGGGGSGGGGSGGGGSGGGGS

SEQ ID NO: 64286 - protein, 30 aa, Artificial Sequence
  Synthetic
GGGGSGGGGSGGGGSGGGGSGGGGSGGGGS

SEQ ID NO: 64287 - protein, 35 aa, Artificial Sequence
  Synthetic
GGGGSGGGGSGGGGSGGGGSGGGGSGGGGSGGGGS

SEQ ID NO: 64288 - protein, 40 aa, Artificial Sequence
  Synthetic
GGGGSGGGGSGGGGSGGGGSGGGGSGGGGSGGGGSGGGGS

SEQ ID NO: 64289 - protein, 45 aa, Artificial Sequence
  Synthetic
GGGGSGGGGSGGGGSGGGGSGGGGSGGGGSGGGGSGGGGSGGGGS

SEQ ID NO: 64290 - protein, 50 aa, Artificial Sequence
  Synthetic
GGGGSGGGGSGGGGSGGGGSGGGGSGGGGSGGGGSGGGGSGGGGSGGGGS

SEQ ID NO: 64291 - protein, 55 aa, Artificial Sequence
  Synthetic
GGGGSGGGGSGGGGSGGGGSGGGGSGGGGSGGGGSGGGGSGGGGSGGGGSGGGGS

SEQ ID NO: 64292 - protein, 60 aa, Artificial Sequence
  Synthetic
GGGGSGGGGSGGGGSGGGGSGGGGSGGGGSGGGGSGGGGSGGGGSGGGGSGGGGSGGGGS

SEQ ID NO: 64293 - protein, 65 aa, Artificial Sequence
  Synthetic
GGGGSGGGGSGGGGSGGGGSGGGGSGGGGSGGGGSGGGGSGGGGSGGGGSGGGGSGGGGSGGGGS

SEQ ID NO: 64294 - protein, 70 aa, Artificial Sequence
  Synthetic
GGGGSGGGGSGGGGSGGGGSGGGGSGGGGSGGGGSGGGGSGGGGSGGGGSGGGGSGGGGSGGGGSGGGGS

SEQ ID NO: 64295 - protein, 75 aa, Artificial Sequence
  Synthetic
GGGGSGGGGSGGGGSGGGGSGGGGSGGGGSGGGGSGGGGSGGGGSGGGGSGGGGSGGGGSGGGGSGGGGSGGGGS

SEQ ID NO: 64296 - protein, 10 aa, Artificial Sequence
  Synthetic
GGGGSGGGGS

SEQ ID NO: 64297 - protein, 32 aa, Artificial Sequence
  Synthetic
LEPGEKPYKCPECGKSFSQSGALTRHQRTHTR

SEQ ID NO: 64298 - protein, 20 aa, Artificial Sequence
  Synthetic
PKKKRKVEASSPKKRKVEAS

SEQ ID NO: 64299 - DNA, 27 bp, Artificial Sequence
  Synthetic
ggtggtagtggagggagcggcggttca

SEQ ID NO: 64300 - DNA, 72 bp, Artificial Sequence
  Synthetic
ggtggaggaggctctggtggaggcggtagcggaggcggagggtcgggtggtagtggagggagcggcggttca

SEQ ID NO: 64301 - DNA, 48 bp, Artificial Sequence
  Synthetic
tcgggatctgagacgcctgggacctcggaatcggctacgcccgaaagt

SEQ ID NO: 64302 - DNA, 192 bp, Artificial Sequence
  Synthetic
gtggataacaaatttaacaaagaaatgtgggcggcgtgggaagaaattcgtaacctgccgaacctgaacggctggcagatgaccgcgtttattgcgagcctggtggatgatccgagccagagcgcgaacctgctggcggaagcgaaaaaactgaacgatgcgcaggcgccgaaaaccggcggtggttctggt

SEQ ID NO: 64303 - DNA, 108 bp, Artificial Sequence
  Synthetic
ggtggttctgccggtggctccggttctggctccagcggtggcagctctggtgcgtccggcacgggtactgcgggtggcactggcagcggttccggtactggctctggc

SEQ ID NO: 64304 - DNA, 12 bp, Artificial Sequence
  Synthetic
acttgtttaagt

SEQ ID NO: 64305 - DNA, 12 bp, Artificial Sequence
  Synthetic
  misc_feature (1)..(4): N represents any complementary sets of nucleotides that together will base pair to each other to create a stem
  misc_feature (9)..(12): N represents any complementary sets of nucleotides that together will base pair to each other to create a stem
nnnngtttnnnn

SEQ ID NO: 64306 - protein, 9 aa, Artificial Sequence
  Synthetic
IEVMYPPPY

SEQ ID NO: 64307 - DNA, 10 bp, Artificial Sequence
  Synthetic
ccccctcccc

SEQ ID NO: 64308 - RNA, 25 nt, Artificial Sequence
  Synthetic
gggaacaaagcugaaguacuuaccc

SEQ ID NO: 64309 - DNA, 18 bp, Artificial Sequence
  Synthetic
gggtagggcgggttggga

SEQ ID NO: 64310 - RNA, 12 nt, Artificial Sequence
  Synthetic
  misc_feature (1)..(1): Biotin Tag = /5Biosg/
  misc_feature (12)..(12): 3IAbRQSp = Iowa black quencher
ucucguacguuc

SEQ ID NO: 64311 - RNA, 24 nt, Artificial Sequence
  Synthetic
  misc_feature (1)..(1): Biotin Tag = /5Biosg/
  misc_feature (24)..(24): 3IAbRQSp = Iowa black quencher
ucucguacguucucucguacguuc

SEQ ID NO: 64312 - DNA, 32 bp, Artificial Sequence
  Synthetic
ggggtccacgcatggcgcggttcttatgatgg

SEQ ID NO: 64313 - DNA, 30 bp, Artificial Sequence
  Synthetic
gtcagataccccatggcgaaagccaggggc

SEQ ID NO: 64314 - DNA, 1206 bp, Artificial Sequence
  Synthetic
ctaagccgaagcgtgagacgagaggacgtctgacagcgacccactcaggacaggtctaccaccctgagcaagacaaaatttgtctcggatgttgtatgcagcattgaggtctgcatgaagttgatacccgcaggagcgacagtgaaagaccgattgagaacgccgattgttgcgtgcttgatgcccacaacgagaacaggtctgcgaggtatgacgcggatcaatgcgttcaaccaccattccctgttcttgccctttgtagacaatgaagccgtacaactgcgcaaaggaccaggaatgcaacttacgttgtccttcacctttgcgatgtcggactccttctcgaatattggtcaagttctcaagcacaattgttgctccaggggttacgctttgcacgatgcgtttggagagcacatggtcacagtcccggtggaaaagcatctgcttacgcgacagctttttgagatgccgtttggcagacgtggttcctttggactgaagtttgcgacggagacggaacgtacggcggtcaacctctttccagtggcgagagccaaggaagtgacggttggaagtcacagcaggacgattcaagcccaagtccacaccaacaaccgtgtcattggcttgaacaacaggttcgggaacattgaccacgacatgcagccaccatttccctttgcggtggatcaggtcagcagtagcaatgttacacccacgatatcgctcactgaaatgaggaacggtaaagggaagagtcattttgccttgcgtggtcgaaacgcgaatcgtttgtgtttcccaattgagggagtaggtgtgaacattgtaacgaaccgcacactgctcagaggaagggcaacgaacaggcttgaagagaggagcgggtttcccctgtttctgtgcgttagcaacctttttcggataggacgcttccttcttggctttccaggtgaaagcactgcgaagcgtttcggtggctttgacccgagcctgaatgagcaagtcactcaccagaccaggacacaaggatttcgtctcgtagtaggtggcatgatgaagcctgacaccgttcttctcgcaatgctgccaaccatagacacacacatgattgtaggcaacggtaaactgcaccaacgtttcctgcaagacgtgggactgttctgtattcggttgaagttgaatccgcaccgttctatccat

SEQ ID NO: 64315 - DNA, 76 bp, Artificial Sequence
  Synthetic
aagagaggtagcaatgtcagataccccatggcgaaagccaggggcttgtccctaagccgaagcgtgagacgagagg

SEQ ID NO: 64316 - DNA, 57 bp, Artificial Sequence
  Synthetic
tgtccctaagccgaagcgtgagacgagaggacgtctgacagcgacccactcaggaca

SEQ ID NO: 64317 - DNA, 23 bp, Artificial Sequence
  Synthetic
accccatggcgaaagccaggggc

SEQ ID NO: 64318 - DNA, 1299 bp, unknown
  TnpB Polynucleotide
atggaactgaagcgagcatacaagtacaggatttacccgacgaagccgcagcgcattatgctcgccgagtgggaggcgcagctgcggtggttgtggaacctcgccaatgagcagagggtgtcctttgccaagcggacgcgcgccgatcgtgcaaaagcctttgagcagggcatcaagccgcctgactacttctcgcaatcgaaagagatgacctctctcgttgccgaggacgccagactagctgctgttccctcgtgcgtacgacaggaaatccttcgcgatctggagaaggcgtggcagcggttccgaaagggcctaggcggcaagccgcacttcaagcggcgaaacgatgctatgcgcgcctacgcgccggataagacaggctggagcctgacgatgcctgatggcaggttcggctcgattcgattccgaggaatcggaaacgtgcaggctcgcatcgatcgtccgctcgaaggcgtcgcgtcgtcgtgcattctcgtgagggacgttggcaggagcgtcaatgagcatgagtggtacgcgatcattctatgcacgtcaacgattcatgaccccgcgccgagcaagctccctcctgtggccatcaacaggggtgtgcatgtgctagcggccacgagcgaaggtattttgcacgagaaccctcgcttttacgagaaaaagatggatcttctcgcacgccgacagcgccaggctgccaggaaggctccgcttccggggcagcctgcgtcgaagaattacctgaaggctctgcatcgcgttgcgcggctgcaccaaaagacacgccgacagcgtgcacatgttatcgagtgcctgtcgaagcagctcgtggagcaccacggattggtcgccatcgaggcttacgatacgaagggtatgcttgagaagaagatcgaggacaagcctgcgtttgtgagccgagccgttcatagggggattgctgacagcgcatggggaatgcttggaatcaagatcacgaacaagtctgttccgctcggtgtgcgagtggaaaaattctcacccgtcgacaagagtcgcaagtgcaacaagtgcggccacgttgacgaggcgtccatgcgtgggcgtgagttcaggtgcaccaaatgcggccacgaagatcacatcgacgtgaaccatgccaagaatgggctggaggatgcgctggctgcggcaaattctccgcctgctgctccaaaaacgaggaagaagacttcgattccagggcgtcgcaaggcgtccgcgacgtccggacctcttccggatgctgactcgggaggctga

SEQ ID NO: 64319 - DNA, 1716 bp, unknown
  TnpB Polynucleotide
atggctcgcgtcgaactgcaccgcgcctacaagttccggctctacccgacgccggcgcaggtcgccgagctgtcggaatgcgaacggcagttgagacgcctctggaatctctcgcatgagcagcggctcatggcgctcgggcggcacttgcggcccgcgcagcccgtcgagtgccggtcgtgcggcgccgtgcgggcgaagggcgacgacgacgacaagacagagcacctggctacgtgcgcggcgcatgaggagatcgcccgcgacaagacgtggaagcgctggacgacgcagagcgagtgccggtcctgcggagcgttgaagggtgcggacggcaagattgagcacacggagtcctgcgccttcgtcgactactaccggcaggcgccggagatgacggagctactgcagggcggagacgaccagctcgcgcgcgtcgtctgctcggcgcggcaggaaatcctgcgcgacctcgaccgagcgtggcagcgctggcgcaaagccccccagcagtggggcaagccgcggttcaagcggcgcggcgaccggtgtcggatctacttctcgaacccgaaggcgtggaaggtcgaggcggggtccctgtcgttcgcgggtgcggcggcgtcggtcgggcagatcaggatccgtcaggaccgcccgtggccgggcgacgcgaagttctcgtcgtgccacatcactcgcgacggcgacgagtggtatgcggtcttcccgcttgttttttccaaggaagtggtgcgcccgacgggcggggcggtcgggatcaaccgcggggccatccacgcgattgccgactcgaacggtcgcgtggtcgactcccctcagttctacgcgcgagcgctcggcattatccgccaccgcgcgcgtcttttcagtcgaaaggtgccgttcggacactgcgtgaagccgtcgcccacgaagtatcggggattttccccggcagtggtcgacgcgctggcccgggacctcgcgacctcgccggggcgcgtcgtctacgaggcccagaagcgcggcgggctcgaggcggcccgcacctacctcctcgcgaacccgccagcgccgccgcgggcgactctctccatcccgagtgacgggcggaatcgcgagcgggcgcgccagtacctcgcccgcgcgcaccagcgcgtccgccggcagcgcgagtggttcctgcacaacgagagcacccactacgcccgccgattctcgacgatcgcaatcgaggactggtcgacgaaggggatgacgtcgagcgagccggagggagacgagccccggagcgtcgtgcgcgggcgcaaccgatcgatcctggacgttggctggtacgagttcgggcggcagctcaagtacaaggtcgagcccacgggcggggagttcgtcccggtcgaccccggtctcatggagacggagacggtcgtaccggcggccaccacgcgggagcgcggcgcggacgcgtcgctcttgaagggcgaggcgggcatctcccgtacgtgctcgtcgtgcgggggtctactccccgaggcggcgagtgggcaccgggaggccgagtgccagctatgtttgacgacgcgactgggcgacgtcaacgccgccgtgaatgtcctccggcgcgcgcgtagggctcctggggatgctccggcgtccgcgaagaaaaagcgcgtgaccatcgggatcaagggtcggaaaaagagggcggcgtga

SEQ ID NO: 64320 - DNA, 29 bp, unknown
  Direct Repeat
ggcaggcccgtgcgcgcagggacgagtgg

SEQ ID NO: 64321 - DNA, 29 bp, unknown
  Direct Repeat
ggcaggcccgtgcgcgcagggacgagtgg

SEQ ID NO: 64322 - DNA, 29 bp, unknown
  Direct Repeat
ggcaggcccgtgcgcgcaggggcgagtgg

SEQ ID NO: 64323 - DNA, 29 bp, unknown
  Direct Repeat
ggcaggcccgtgcgcgcaggggcgagtgg

SEQ ID NO: 64324 - DNA, 29 bp, unknown
  Direct Repeat
ggcaggcccgtgcgcgcaggggcgagtgg

SEQ ID NO: 64325 - DNA, 29 bp, unknown
  Direct Repeat
ggcaggcccgtgcgcgcaggggcgagtgg

SEQ ID NO: 64326 - DNA, 29 bp, unknown
  Direct Repeat
ggcaggcccgtgcgcgcaggggcgagtgg

SEQ ID NO: 64327 - DNA, 29 bp, unknown
  Direct Repeat
ggcaggcccgtgcgcgcaggggcgagtgg

SEQ ID NO: 64328 - DNA, 29 bp, unknown
  Direct Repeat
ggcaggcccgtgcgcgcaggggcgagtgg

SEQ ID NO: 64329 - DNA, 29 bp, unknown
  Direct Repeat
ggcaggcccgtgcgcgcaggggcgagtgg

SEQ ID NO: 64330 - DNA, 29 bp, unknown
  Direct Repeat
ggcaggcccgtgcgcgcaggggcgagtgg

SEQ ID NO: 64331 - DNA, 29 bp, unknown
  Direct Repeat
ggcaggcccgtgcgcgcaggggcgagtgg

SEQ ID NO: 64332 - DNA, 17 bp, unknown
  Direct Repeat
cgcgcagggacgagcgg

SEQ ID NO: 64333 - DNA, 30 bp, unknown
  Direct Repeat
aggaaggtccttgcgcgcagggacgagtgg

SEQ ID NO: 64334 - DNA, 30 bp, unknown
  Direct Repeat
cggaaggtccttgcgcgcagggacgagtgg

SEQ ID NO: 64335 - DNA, 30 bp, unknown
  Direct Repeat
cggcaggcccgtgcgcgcagggacgagtgg

SEQ ID NO: 64336 - DNA, 30 bp, unknown; identical to SEQ ID NO: 64335
  Direct Repeat

SEQ ID NO: 64337 - DNA, 30 bp, unknown; identical to SEQ ID NO: 64335
  Direct Repeat

SEQ ID NO: 64338 - DNA, 30 bp, unknown; identical to SEQ ID NO: 64335
  Direct Repeat

SEQ ID NO: 64339 - DNA, 30 bp, unknown
  Direct Repeat
gggcaggcccgtgcgcgcagggacgagtgg

SEQ ID NO: 64340 - DNA, 30 bp, unknown; identical to SEQ ID NO: 64335
  Direct Repeat

SEQ ID NO: 64341 - DNA, 1179 bp, unknown
  TnpB Polynucleotide
atgttccgaacctacaagtttcgtctttacccgaataaagatcaacaagaccgattaaatgcttggtcagatgtttgtagatttatttggaacctaggtcttgaacagtggttaaacttagtcagaagttcaaattttaaaaagatatcacttacctcgtttaaacaacagtctgaattctctgaattgaggcgagaacatctttggctaagagattgtcctaggcatgcgcaagacgctatcttctcaagactgtttcagtcttggaacagatgcttccaaggaatagcaggcagaccaaagttcaaaaagaaatcagaatgggtatcaatagtagaacctgaaagatctaaattttcaatttcaggaggattcctcagattcccaaaactatctcctatagtagccatacagcacagaattattgaaggaactcctaaaaagtgcactataaaacgaacaggggaccagtggtatgcttatgttcaagttgagcggtcaagacctgacactaggttgagaatttcctcagaagtaggtatagacctaggagtgaatagttttattgcggattctaatgaaaatctagttgaaaatcctagatttttacaacattcaatgaatcttcttattaggtctcagcgagacgtttctagaaaagtcagggggtcctctaagcacaagaaagcatgtcgcagagtaagtaaaatatacagaaagattaaaaatcaaagaagtgattttattcacaagctatcccgacaatatgctaatagtcacggctttattgttatggaagatcttaaaatagaaaatatggtaaagggcctatgcggaggcgctatacttgattctggctggggtctattcagagaatgtctggagtataagttactagaaaacaatgggattttacaaaaagttgaccctaagtacacatcgcaaacatgtagcagttgtgggtacacggactcctgttctagaaccaaatcaacttttaattgtactaaatgtaatcatgtagaacacgctgacacaaacgcagcaaaggtaatatacagccgtgcggatcgctcggttctggccgtggacggagatctgaagtatcagaccggaagaagcggcaaagcgaaaaggaaagtatctttctttagtagtactaagcctaaaggcttatag

SEQ ID NO: 64342 - DNA, 1833 bp, freshwater bacterium sp.
gtgggttcccatgaaggtggcctactacaagaagctggtggaactcaacgagaagggtctatctggttgggctatgaatgggcagccggttcccttgaccgaccaggacaaggaatcaaatcttgcccaactgaaagcgtgggaatcggcccagaagcatttgtgataggggtacccacgggcgtaataccccccgtggacaagaccgacacacaccagcgcgggtacaagtaccgtctgtacccgacccccgttcaggaggaaattctccgcgggtggcaggaaacccaccgtcgggtgtggaacgagctgatcggtccgtacgcggaagcgatccagcagggcgtccagcgcaagaagaccaacgccgaatgtatggcggaagccgttgctaagggcatcactggggatgatgccctgaaggctgccgtcaaggaactgaagctggcggacggtgcgcggttcaagcaggacgtgctgaatctgttcaagtccaaggggtggacggctgggaccagattggtttctgaacgcaacatcctacggaagaagcgggcgggcagcccgttctgcgcgcagatcccattctcggttatggatgaaatcgtgcaggcgcacgtcaaggcttgggattcttacttggcaggcatcaccaagatgccttgtttcaaggcaaaacatgaatccatgtcgtccgtgcggacccggctggctgcgtcgttcaagatccacgatcatcatgtggaactgtccatgttcgagttgaacggcgaacggactaagatccgcttccacaagcaccgtcctttgccgacggaaccgactcgagtgtgcatcacgtcccagggacgccgttggtttgtggtgttcggggtgaaggtgctttctatccccctggacccggatcgtccggcggtggggatcgactgtggtgtggtgaatttgctgacggattccaccagtaggtcggtacctgggattcggacgtcagaacgactggacgcgcgtgaacgctggttgcagcggcgtctggccaagaagaagaaggggtctggtcactggcacaagatcaatgaccagatcaaccgtttgcgtcggcacaaggcggacgttcgtgcggacgtgcttcacaaggaatcccttcactacgccaggacgtacagcacggtggtgctggaagacctgaaggtgaagaacatgaccaagacggccaagggcacgaaggaagcccccggcaagaacgtcgcccagaagtctggcttgaacagggcaatcctgtcccaaggctggggcatgttcggtgatatgctgcggtacaagatcgcccagcgtcacgggaatctggttcatgtccaaccgaatgggacgtcgcagacgtgcttcaagtgtggccacgtcagtgcgttgaaccgcaccacgcaggctgaattcaagtgcgtgaactgtggctacgaagtcaacgccgacgtgaacgccgcccagaacatccttgcccgggccgtacccggttccactcatgtggtggaaaagaaagcccctagaaagctacacactgtcaccgggcgtaagaagccccgtacaacactttcagtgggggaaacctcacagaatgcagcggtcggaaggaccgtcaagctgcccgtggaggatggggagactgctccccccgatgaaacgggaacaacttgtccatcaaccactgtttcgcggactttgcgttcaagcatgaacgggacgctaccaacaccagccattgtcatcctagatatgcttgaaaacgttactgaaagtcctagtgaaagcacggacttgcagaatggctccgcggaatag

SEQ ID NO: 64343 - DNA, 36 bp, freshwater bacterium sp.
ccgcggaatagcggttggtgggtaggttggcttcac

SEQ ID NO: 64344 - DNA, 36 bp, freshwater bacterium sp.; identical to SEQ ID NO: 64343

SEQ ID NO: 64345 - DNA, 36 bp, freshwater bacterium sp.
ccgcggaatagtggttggtgggtaggttggcttcac

SEQ ID NO: 64346 - DNA, 36 bp, freshwater bacterium sp.
ccgcggaatagcggttggtgggtagggtgacttgtc

SEQ ID NO: 64347 - DNA, 1407 bp, unknown
  TnpB Polynucleotide
atgtcggtgaaagcaaaggagcgccaggaagccgaaaaaggctatcgtatggcgttcaagtacaggatctacccaacggcggatcaagaggaatatctgcaacttaatttcgacgctacacgcttcgtctacaacgtgttcctgcgcaagcgtatcgacgcctacgagcgcacccggaagacgctcagaaagccggttacggacgacgacggggaatttgtcagggacgagagcggcaaggttgtatacgccgatgtggagaacgaggggtacgatcccgaggcgaaacccctcagtttttacgacacgtcgcggatgcttacgagcttcaagagggagtgcctgaacagcgacggcgaagcctggctcgccaaggcggatgccacggctctcgtctacgccctgcgcaacctcgaatccgcctatcagggattcttccgccgcgtcaagagcggcggttccgccggatttcccaagttcaagcgccgccaagggcggcagtccttcaagattgccggcaggggcgcgagaatcgcgcacgaggaggacgatcggttcgcgcgcttcaccatccccaagctcaaggatcctatcaagcttcactaccatcgcgaaatcgagggtgaaatagtgtcctgtacgatcgagcgcacgcccgcaggcaattattacgcctccttctccgtcaagggcgtcgaacgcagggcgctgcctgagcgcgaagacgagatcggcatcgctctgggcatcaccccctgggtcgtcacgagcgacggcgaggcggtggagaacccgcaccaccgcaaggtactccagaagcggctcgcccgcgcccagcgcaagctcgcgcgcaggcaaggtgccaagaagggcgaggagaagtcgaagcgattcctcaaacagaagagtcgcgtggagaggatcgaggagaaaatcgccgagcagcgacgcgactcgacgcacaagctgactcatatgctcgtcagcgagcatggtgtcatcatcacgcgagatatggcatcgtcgtccatgctgcgcgatgccgagaagaagagttggaagcttcgtcagagtattgctgatgccaacttcgctgagatcaaccgccagctcgcttataaaggagagtgggcggggcgcacggtcgtcgttgtgccctcggacttcccgactgcgcaagtctgctcgaagtgcgggcataaggagaccgttctcgcaaaggatctccgcgcgacatggacgtgtccggagtgcggatgtcgccacaaccgcaaggccaacggcgctgcaaacgttctcgctgctggtcgcgacattcttgccggtgaggagcgggcttacgtcacgtgtgacgccatgacgacgcgaaaaaagagacagaaaggtgagcgaaagggagagctttag

SEQ ID NO: 64348 - DNA, 36 bp, unknown
  Direct Repeat
agatgtgagatatggaaaactcggcacctgccaaac

SEQ ID NO: 64349 - DNA, 36 bp, unknown
  Direct Repeat
gtcaggcacccatgggaaatccggcacctgccaaac

SEQ ID NO: 64350 - DNA, 36 bp, unknown
  Direct Repeat
gtcaggcacccatgggaaacccggcacctgccaaac

SEQ ID NO: 64351 - DNA, 36 bp, unknown; identical to SEQ ID NO: 64350
  Direct Repeat

SEQ ID NO: 64352 - DNA, 36 bp, unknown; identical to SEQ ID NO: 64350
  Direct Repeat

SEQ ID NO: 64353 - DNA, 36 bp, unknown; identical to SEQ ID NO: 64350
  Direct Repeat

SEQ ID NO: 64354 - DNA, 36 bp, unknown; identical to SEQ ID NO: 64350
  Direct Repeat

SEQ ID NO: 64355 - DNA, 1368 bp, unknown
  TnpB Polynucleotide
atggccaaagaccttgccatgggaaaatcgatggaagagggagccgatcagggccgcaggctctcatacaaatacaggatctatcccaacgccgagcagcgcgagtatttcgcggtcaacttcggctgctgcaggtacgtctacaaccacttcctctcagagagagaggccgcgtggcttcgcacgcaggagacgatcaaggcgccgaagctcgacgaggacggcgagcaagtcagggacgagaagggcaaggcggtctatgagggcgcgccgaacccggcatacgtcgccggctccaagccgatgtccatgttcgacaccagcaaggcgctcaccgccctcaagaaggagaccgtcgacgaggaaggccataaatggctctgcgacgccgacgcgacggccctggtgtacgccctgcgccacctcgactccgcgtacaagaacttcttccgccgcatcaagcagggcacaggtccggcgggccatcccaaattcaagaccaagcgcgacccgcacccgacgttcaccgtcgccaagtgcgaggtcggcgaggatttcgtcgtgctgccgaaatgcggcagggttaaggccaaggtacaccgcccgctcgaaggcgtcgtggtcagtgccacggtgacgcgcgaggtcgagcccacgccgaagcgccccgagggcgtctacaccgtgtcggtcaacgtgaaggaggcgccgtttcccgagcccgtcgagcccgaggccggcgcggtgggcgtcacgatggggctcgagcgctggatagtcacgagcgacggcgaggtgctccagctgcccgacgagataaggcgcctcgaggccaagctcgcccgcgagcagcgcaagctctcgcgccgcaagggagccaagaagggcgaggcaccgtcgaaccgatacctggagcagaggcgcaaggtatcggccatccaggcgcgcatcgccaacatcaggagcgacgccgtccacaacgccaccgccgagctcgtgcgcgagcacgaggcggtatatacgcgcgccatgggatccaggcagatgatgatggagcaggaaggcccgggaaagaagcgccgcgcgataaaccgcaggatcgcggacgcgagcttcgccgaggtcaaccgccagatcgcctacaaggcagactggttgggaaggcggcacgcggagctagacgcgctcgagccgacggcccagacgtgctcggactgcggccacgtcgagaagtccgtcggcgactcgttcgcccagacctggacgtgcccggaatgcggccgcgtgcacgaccgcaagtacaacggcgccagaaacgtgctcgaggcgggcctgcgcctcgactccgcagaggccgcgggcgaatag

SEQ ID NO: 64356 - DNA, 1215 bp, unknown
  TnpB Polynucleotide
ttgccatatgacggacattgcggatacaagttcagactgtatccgaacgatgagcagacacagcagatcgagacgacgttcaacgcatgcattcgcgtatggaacctcgcgcttgagctgaaggacgccgcatacaagaacgacaagacgagcttgtccgtattcgacattaacaagatgatcaccagatggaagagaatactcccgtggctttcgattgcgccgatttcggcgctgcagcagacggcgaggaacctcgaccaggcatacaagaacgcattcaagagactcaagaagggcgaagacccaggcttcccgaagtacaagacgatgagaaccggagcgaagtcgtacaagaccccagcgggaggcagaaaggggccagacggcaaggtcatcgtgaagacgcaggcggtgagagttgtcgacagacaccacatcatcctgccgaagctggggacggtgagatgccgtggcatgcaggacgcattggtgaacggcgaatgcggccatgtcctctcggcgaccgtgagcagaaccccgactgggaagtactactgcagcgtcgggtgcgaggacgtcccacagcccgagatggaagatggaatcgtcgacgtgatgggcgtgagggtcgcggtcggtgacggaataaccaggtccgacggaatcgcgataccgaacccgaaggcgtacaagaagtacgagcgaaaggcacgtcgtgagcagcgcaggctctcgaggaaggtgaagggctcacataactacgagaagcagcgcaggcgcaaggcgagggtcgacgagagggtcgcagacataaggagcgaccacatccacaaggtgacgaaggacatagtcagagactccaagtcggtcatcgtcggaaggtcggaggtcaagaagatgaccaaggcaaagaagggtgacggacgtaaggtgcagaggtccatcaaccgtgccattctggactcggcgatctacacgacaacatggagacttgagtacaaggccgacaggtatgggagacaggtgatagtgctccaaggcggattgccatggacgagaacctgcagtaggtgcggcgccgagactggccccacgaagcccggggtggcgcagtggacgtgcacggaatgcggcacgacccacgtgacgtcggagaacgccgcaaggaacatacagtacgagggcgctgcgatgcttaaggaaatgtcgtag

SEQ ID NO: 64357 - DNA, 28 bp, unknown
  Direct Repeat
gtgccgcccgcgtacgtgcgggatggcc

SEQ ID NO: 64358 - DNA, 28 bp, unknown
  Direct Repeat
gtgccgcccgcgtacgtgcgggatggcc

SEQ ID NO: 64359 - DNA, 28 bp, unknown
  Direct Repeat
gtgccgcccgcgtacgtgcgggatggcc

SEQ ID NO: 64360 - DNA, 28 bp, unknown
  Direct Repeat
gtgccgcccgcgtacgtgcgggatggcc

SEQ ID NO: 64361 - DNA, 28 bp, unknown
  Direct Repeat
gcgccgcccgcgtgcgtgagggatggcc

SEQ ID NO: 64362 - DNA, 28 bp, unknown
  Direct Repeat
gtgccgcccgcgtgcgtgcgggatggcc

SEQ ID NO: 64363 - DNA, 28 bp, unknown
  Direct Repeat
gtgcgccccacgcacgtgggggatgacc

SEQ ID NO: 64364 - DNA, 28 bp, unknown
  Direct Repeat
gtgcgccccacgcacgtgggggatgacc

SEQ ID NO: 64365 - DNA, 28 bp, unknown
  Direct Repeat
gtgcgccccacgcacgtgggggatgacc

SEQ ID NO: 64366 - DNA, 28 bp, unknown
  Direct Repeat
gtgcgccccacgcacgtgggggatgacc

SEQ ID NO: 64367 - DNA, 28 bp, unknown
  Direct Repeat
gtgcgccccacgcacatgggtgggacga

SEQ ID NO: 64368 - DNA, 1836 bp, unknown
  TnpB Polynucleotide
atgcctcagcagcagccggacaagccggcaacggtcaccaaagtcatcaagttcatggtcgacatgaaggccatgcccgacacccaacgcgagctgctcgaacgacacgcgggcacggccagggctgcatggaattggggtttggccgaggtcaacgcgcagcagagactggtgcaggcgcacgtcaagcggcaggctctcgccgaaagcagcgacgactgggacgccgccaagaagctcctcgcggacaagaagtggcgcaccgctgcctaccatatggccgaggagcagctggggaaggtgccgaacgccgtagcactgtcggccagattcaccgagatggggcgcgatccgcagtctcgattcggatggtggtcgaccgagaagcatggcgtgaacaggttcgccgccagtactgcgctccgagacctggataccgcgcggaagaggttcctgtccggcgcagcgaaacgcggtaagggccgcaagaagcgcgccgatggattccccgggggatggcccaggttcaagaagaaaggtcgtagtcaggacgcgttcgcgctgttcaacatcgctgtatccgattcctggaagccattgcagcgacgcggcgcgtccaagaaggcgccgctgaatcacagcggtgaacccatgctcgaatcacaccgaatcaatctccctagtctgggatcggttcgcgttacacagaacacgacgaaattgcgtcgaatggtacgccgcggcgggcacccgaagtccgctagattcgtgaggaacggcgaccgctgggagatcgccatcaatgtgtcattccaggcagacaacccctacgtggcaccacctactaagccgaaccgtatccagattgctggcggagtgacaggaatcgacctcggactcggagcgctcattgcctttccggacggcagactgatcgaaaacccgcaggtgggcaagaaggaacaagcgaagctcgctcgcctgcgccgcaaatattcacgacagcacgtcaccgagtcaccggagtgctttgagggatccggcgtgcacgtcaaaggatcgtgcgcatggcggggcggcaagggtgtgcccgcgaagatgacatcgtcgtcgcgggagacactccgcggaatccgcaagacggaacgactggtcgcccagcagcgcgcaacggtgatccaccagcagaccaagatgctcaccacccagttcgctacggtgtgcatcgaagaccttcgagtggccaacatgagtgcccggccgaaggccaaagacaacggcgatggttcgttcgctcaaaacggcagatcccgaaagaagggcttgaacaagtccatcctgcgaagctccttctacgagttccgcaggcagctcgaatacaagtcgaagctatacgggtcgaaagtggtcgtcatcgaccgctggacacccaccagcaagacatgctcctcatgcggttcagtgaaacccaagctgaaactgagtgagcgcatctaccgatgccaaaattgcggactggttatggaccgggacgtgaacgcggcacggaacattctttccgccggcctggccgagatggaaagacggggcgcggagagggttgtgcaaacccgagtcccgggcgacgcggtctccggatcgcaccttgcacacggaccccacaccggcactgagccctgtgggaccaccgtgggtaagacgccgaaaccgtcggaaacggcgaagcattcgaggcgtggcccaggtctcgccaacgatgcaaccggttccagtaatggagccgtcacccccacacagtgccgtagtggaacgaccagaaacagacgagcggcttaa

SEQ ID NO: 64369 - DNA, 28 bp, unknown
  Direct Repeat
ctggtccccgcacacgcgggggtgatcc

SEQ ID NO: 64370 - DNA, 28 bp, unknown
  Direct Repeat
ctggtccccgcacacgcgggggtgatcc

SEQ ID NO: 64371 - DNA, 28 bp, unknown
  Direct Repeat
ctggtccccgcacacgcgggggtgatcc

SEQ ID NO: 64372 - DNA, 28 bp, unknown
  Direct Repeat
ctggtccccgcacacgcgggggtgatcc

SEQ ID NO: 64373 - DNA, 28 bp, unknown
  Direct Repeat
ctagtccccgcacatgcggggatgatcc

SEQ ID NO: 64374 - DNA, 28 bp, unknown
  Direct Repeat
ctggtccccgcacatgcgggggtgatcc

SEQ ID NO: 64375 - DNA, 28 bp, unknown
  Direct Repeat
ctggtcccggcacatgcggggggtgatc

SEQ ID NO: 64376 - DNA, 28 bp, unknown
  Direct Repeat
ctggtccccgcacacccgggggtgatcc

SEQ ID NO: 64377 - DNA, 28 bp, unknown
  Direct Repeat
ctggtctctgcacaagccggggcgatcc

SEQ ID NO: 64378 - DNA, 1701 bp, Streptomyces sp.
atggctacgtggcaacccggtcggccactgccggtgctggttaggccaggccacacgctgtcgagtgcattcgacttcgcaggagttacattcatgcccgccctcgaggtgacacggagttttcggtttgccttggaccccaccgaggcacagcgggaaagtttcctcaagtccgccggtgcatgccggtgggcatataactacgctctcgagaagaagacacggtcccaccaagcgtgggtctcccggcgtgattcgctgatcgccaagggcatgagcagaccacagtggaaggcccagctgcggcgagagactgcagacctgaaggcgtcatgcgctgcctgggaccaccaccgcagggctctcatccgcatggcgcgctccgctgaaccggaggtggcggttgcgccacaggaaccggcggatcttgtggcgcggctagctcgtgaacgtgaggaagctcggcctggcggttcgggagaggagtacgcccgagccttggcccgggcacgccggatggtcgcgcgtcacaaggaagagctcttcgcgcgaggagaccagattcctaaccagcatgacatggcggcaatgtggcgcaccgagcgtgacctccccaaggaacaggggggcacaccgtggtggaacgaagtcaacgtctattgcttcacttccggcttcgaccgcgcccaggcagcgtggaacaattggatgacctcggccagcggcgagcgtggcggccgcagggtgggctatccccgcttcaagaagaagggcggctgcctagacagcttcacgctgtaccacgatgtccaaaagcccaggattaggctggacggataccgccatctgatcatccccacgactggccggatcagaatccacggctcggccaagcgtcttgcccgcctcgtcgccctcggagaggcgcgcgtccagtcagtcactgtcacccgacgcgcacaccgctggtacgccagcgtctcttgcaagatcacccaacggtttcccgcggagccaaccctccgccagcgtgccggagggaccgtgggggtagatctcggctcccgctatctggctgttctctctaatggccccgggacagcaggtggaagggagagcgtcatccctcatccccaattccttctgcgtgaccttccgcggatcaactgcatcaaccgccgtatgaggagaatgcagccaggatcccgggagtacaggcggctgtctgcccgcgcggccaggcgccatcaccttgtcgccctgcgccgggcgggaacactgcacgacatcaccaaaaggctttcccggggctacgcctgcattgccgtcgaggacttcgacctggtcagtcttgttacctctgctaagggaagccggtccagacccggcaccaaggtgaaagtgaagtccctcttcaatcgccgcctcctggacgcctctatcggagagttccgtcggcagctcgcctacaaatgcccgcagtatgggtcgaggctgatcaaaatcgatcgcggtgaaccagtcgccaccacatgttcccggtgcggcgaccggaacccgaacgccaagccctcccaagaaaaattcacctgcccctcctgccgttacaccgcagatcgtcatgcgaatgcagccgcttgcatttacatggccgcactgcgtaagatgtcagccgtcgcctcgggtagcggggagacataa

SEQ ID NO: 64379 - DNA, 1413 bp, unknown
  TnpB Polynucleotide
atgacgggcaacagagccatgctccgcgcgtaccgggtgccacttgcccctagcccggcccaacaacattccctaatgtcccacgccggagccgcacggtgggcgtacaaccttgccctgtccgcgaagatccaggcccggctcatctgggagaaacgtgtcctctccgaggtcatggggggatcctccgcagcggaagcccgcaaggccgtgaaggtgaggaccccaacagcgaccctcatcgacaaggcccgggtccgtgtccgtgggacggacaggtcaggggcaccgtgcacaccagactggggcgcagcgcaagacatcctcgtcgcggccctcgaagacgaagaagtcgcatcactgatcctcgaaaggtgggcggcccggtgcgctgaccccagccgcgggatccaaccatgggcggctgacgtcccgaactcggtcatccaacgcggcgaaaaagacgccgaccgggcgtggaataactggatggactcggtcaccgggcggcgttccgggcggcgggtcgggttcccccgcttccacgggaagggcgaccgggaatcgttctacctgacgaacacggagtgccgggttgtgaccggtcgacggatccgtctcggcgggatcctcggggaggtccgcacccaccaggggatgcggcgtttggtgaaggctctcaacgtccgccgtgggcgggtcatgggggtgactgttgcgtgggacgggcggcggtggttcgcgtcggttctcgtcgaggaacaggccgcagatccccgtccgactcgacggcaggtgtcctcgggcgccgttggggtgtcgatcggtattgaggatcaccggattgtcttgtccactggtgaggcgttcgagaatccgaggttggcggattctgcgcaggacaagatcacgcggcggtctaggaagttggctcgcaccgggtggatcactgatcctgagactgggcgtcgtcgtccgtcgcggcgacgggtgaaggctcgccggtcgctggcccgggctcacgccgaggtcgcggcgcgccggcagaccgcgacgcatgcggtgtcacggcggatcgttgacgggtgggcgacggtggtggttgaggacttggatgtggtggggttgacggcgtcggcgcggggccgacgggggcgtcctgggcgtggggtgaaggcgaagacggcggtgaaccgggcgacgttggatgtggcgcccggcgagttgcgtcggcagatcgagtacaaggctgagtggtctggtactgttgtggaagtcgtggaccccgttccgcggccggggtgtccgattcatggggcgacagccaagcccgatacggatgccgttgactgctcgtgtggtctggtcgctgatcgtgagacggctgccaggatcgtggacaaggctaggtag

SEQ ID NO: 64380 - DNA, 28 bp, unknown
  Direct Repeat
ggtctcgcccacgtgtgcgaggaacggt

SEQ ID NO: 64381 - DNA, 28 bp, unknown
  Direct Repeat
ggtctcgcccacgtgtgcgaggaacggt

SEQ ID NO: 64382 - DNA, 28 bp, unknown
  Direct Repeat
agtctcgcccacgtgcgcgaggaacggt

SEQ ID NO: 64383 - DNA, 1596 bp, unknown
  TnpB Polynucleotide
atggacctgcgcgcgtacaagttccggctggatcccaacatcgcccagacccaggcactgtcccaagccgccggggcggcccgggtcgcgtacaacatggtcattgcccacaaccgtgccgcccacgacgagggccggcgccgggtggaggagctcaccgtgtccggggtggactcggaggaggcggcagccagggtccgcgcgcagcgcacgaccgacccggccctggccatggtgttcaccaagatggggttcaacgcgatcctcaccgccgagaggcgacgccaccaggcagcggccgatgcgatcgccgccggcgcggacccggcggaggtgtgggccgggcagcgctacgagcacccctggctgcacgaggccaaccggcgggtcatggtctctggggtggagcacgccaccgcggcgttcaccaactgggtgaactcctacaccggtcaacgcgccgggcggcgggtgggctacccccggttcaagaagaagcacgcctcccgggactccttcaccatccccgccccggagcccatgggcggcaaaggcacgccctacaagcggggggaggcccgcaagggtctgatcaccgactaccggcacctgcgcctgggcttcctgggcaccatccgcacccaccagcacacccgccgcctggtgcgggcgtgccagcgtggggcggtgatgcgttcgttcacggtctcgcgtgccgcggaccggtggtacgtctcgatcctggtggcaaccccacgcgagacggccccggagccgacacgggcccagcgtgcccgcggtggggtgggggtggacctgggcgtgaacaacctggccgcgctgtccaccggcgagctggtagacaacccccggtacgggcgccgcggcgcggagaagctgcggcgagcgcagcgggcctacgcacgcacgaagaagggcagccagggccgggcgcgggctgcccggagggtggcgcggctgcatcacctagtggcgttgcaacggtccacggcggtgaacacgctgaccaagcgcctggccaccgggtacgcggtggtggcgatcgaagatttgaatgtgtccgggatgacccgctctgccaagggcacggtggagaacccggggaagaacgtggcggcgaagtccgggttgaaccgctcggtgcttgacgccgcgttcggtgagctgcgtcggcagctcgagtacaagaccgcgtggtacggatcgtccgtggccacgatcggcaggtacgcaccgtcgtcgaaggcgtgctcatcctgcggggcagtgaaacccaagctgtccctgggtgagcgggtctacgactgtgaccagtgcgggatgcgcctggaccgcgatgtgaacgcggcccggaacattctcgcctgggccactggcggacgtgaccagccacctgcccccggcacgggggctgacgggcgtggagatccagcaccgccctcaccaccaggtgaggggccaccggtgccggctcaacgaagcgctaagaccgggtacgtaccgcacccggccaccgcagccgagcaatcggctgctcacccccaccaatcgcataccccgatcctgccaagctga

SEQ ID NO: 64384 - DNA, 28 bp, unknown
  Direct Repeat
gacggcccacgcacgcgagggtgagccc

SEQ ID NO: 64385 - DNA, 28 bp, unknown
  Direct Repeat
gacggcccacgcacgcgagggtgagccc

SEQ ID NO: 64386 - DNA, 28 bp, unknown
  Direct Repeat
gacggcccacgcacgcgagggtgagccc

SEQ ID NO: 64387 - DNA, 28 bp, unknown
  Direct Repeat
gacggcccacgcacgcgagggtgagccc

SEQ ID NO: 64388 - DNA, 28 bp, unknown
  Direct Repeat
gacggcccacgtacgcgagggtgagccc

SEQ ID NO: 64389 - DNA, 1587 bp, Nocardioides sp.
atgaaggaggtccgcgccaaggctgccccggcccctcgcgtcaccgtcgtgcggaccttcaagttccgcctcgatcccaccccctcacaggaggagcggttcgcacagcacgcgggcgcggcccgggtggccttcaacttcgccgtcacgatgatggacctggccacggaccggtggcacgccctacgggctggccttatggagcagggcatgacccgcgaggaagccacggaggccttgcggggcaggtcgccggtccccaggaagggcgacgtgcagagggcattcaaccgctgcaaggggagcatgaaacccggctccgagagggcaggggagttcccctggtgggatcagccaggccgcgaggtcggcacctacgcctttcaggacgccttcgccaacgcggagcgggcctacgccaactacatcgcctcgatgtcgggtcgccgccggggctccggcatgcgcaggccgcgcctgaagaagaagggccgcagcgtcgactccttcggcgcccgtggacaggtctcgctcgtgggctaccgggccgtgaagatccccgtcatcgggccggtgcgcaccctcgacccgcgactggccaagaagatgactcgtctcatggcccgcggcagcgggcgcatcagcggggcgaccatctcccgcggcggcaagcactggtatgtcgccctgaccgtccccctcgaccccgccgccgtcccggtccccgggccgacccgggccgcctcgcagcgcggctcagcaggagcagtcggggtcgacctgggcgtctccctgctcgccgccacctccgacgaccgagacccgcagcagacattcgatcgcctcgcccccgcccgcgccagccacaccagaatgctccgagcccagcggtccctcgcgcgcaccaagacgggctcgcggcggcgacggaaggcagcacgtcgcgtcggcgcgcttcaccacacgatctcgctgcagcgtgccaccgcgcagcacgccctgaccgcccacctcacctcctcctatgccctgatcgggatcgaggacctgagggtggccaacatgacccgacgagtcgcgcccactcctgacccgaacgacccggggcggttcctgaagaacggccagaggtccaagtccggtctcaaccgctccatcctcgacgtcggttggggcgagatccgccgccagttgacctacaaggcagagcgacgcgggatcaccctcgtcgccgtccccgccatgaacacctcgcggcgctgcaacgagtgcggccacgtcgccgcggagaaccgcaagagccaagcggtcttcgcatgcgtcgcctgtggccacacccgcaatgcggacgtcaacgccgcccacaacatcctgaccgcagcgctcgcgatccgcgcaccgctcggccacggtggcccaccgcccctgacagaggggaacggggacacgcgcgaccaccgcaacgcggccatgcgcatgtccgaacacgctgaaggaggcgcgcccgagcccgggaaaccaggccgtggcgacctcctgctgacgcgtgaagcgtgcgaaccactgcacgcaaccgtgcgggagtga

SEQ ID NO: 64390 - DNA, 1572 bp, unknown
  TnpB Polynucleotide
gtggagggggcactgctgcgagcgtggcgcgtgtgcttggacccgtctgggtcgcagcgcgtcatgctcgctcagcacgccggggcggcccggtgggcctacaactacgcgctgggccgcaagaccgccgcacacaagacgttcaccgcggcgcgagacgcagtacttgacggcatccctgagccgaccccggagcaagtggcggcggccgcgaccgcagcccgcgtccaggcgggtcgtatgcccagctcgatcgacaacctgaagacctggcgggccgagcgtggcgacgaccgggccggcgtggagggcgtgtcgccgtggtggcacacagtgtcgtcgtacgcggtctcctcgggcatgcgggacgccgacgcagcgttccaggcgtggttcgactccctcgccggccgacgggcaggccgggccgtcggctatccgcggttcaagcggaagggccgtagccgggacagcttcaccctgtaccacgacgtgaagaagccgacgatccgggtcgtcgacgcccgccatgtgctgctgcccaggatcggggccgtgcggctccactcgaacctgcgccgactgatccggctccagggtcgcgacgagttgcaggttcgctcggtcaccgtgtcccgccaaggcggccactggtacgcctcgatcctcatcgcacaccccgcccggaccgtgaagcccacccgccggcagaccgccgccggcaccatcggggtcgacctcggcgtcaagaccgccgccaccctctctgacggcacgcagatcccgaacccgcggtgggggagagcggcgcaggaccgtctcgccaaagcccagcgggcgtatgcgcgcacccggcgcgggtcggcgaaccgggccaaggccgcgcgccgggtcgcgacgttgcaggcccggctggccgagcagcgcatcagctggatccaccaggtcaccaagcagctcgcgaccggctgggcgacgatcgcgatcgaggacctcaacgtggccggcatgacccgcaccgcccgcggcaccctggagcggccgggtcgccgcgtccggcagaaggccggcctcaaccgggccatcctcgatgtcggcttcggcgagttccgccgccagctcacctacaagaccagctggtacggcgccaacctcgtcctggtcgaccggtggctacccagcaccaagacctgctcggcgtgcggctggcacaacccggacctcaccctcgccgaccgcacctaccggtgcgcacagtgcgtgctgagcatcgaccgcgacctcaacgccgccatcaacatcgccgcagcggcacagaccaccgaaccgtcccgcgaaggacgaccgacgccggcgagaaccaagccggccaggccgcccagggacgggtcagagcccgacacccgcgacgagcgggaccccgaggcgtcatatcgggtgcctgacgagccagacccggccacggccaggcccggcgctgacgcaggaagaccgccacccaacaggtggcggccaccccagccgagtaatcggctggcgtcccacacgccggagcctgcgctagccagctag

SEQ ID NO: 64391 - DNA, 1599 bp, Propionimicrobium lymphophilum sp.
atgtcttacctgtgcgcgcgtggaaggttcaacttgtcgggattctcgacaggttcgatgggtgtcttacccgtgcgtgcgtcactgtttgcgcttcttttcacgactttgcacggtgcccgaatctccgcacactggtatggcatgagcaaagaaaacgatcacacagtcacatgcataaaaatctgtttagagccgaacaaggctcagcgcgcccagtttgcgtccttcgcgggcagcgccagatgggcatacaacttcgcgttagcaatcaaaattggttaccagaaacgctggtttgaagcccgcaaacaattcatcgagtcaggcttagacgagaaagcagcaggcaagaaagccagcgaacaagtagggcggatgcctaactatatgtctattgccacaaatgagtggacacagcttcgtgacgaagtttgcccctggtatccagaagtgcctaggagagtgtttgttggcggattccagcgcgcagatgccgcattcaaaaactggttcgactccaagtctggccgcagaagcggggcagcgatgggttggccaaagttcaagtcgaaaagcaagtcccgcgaatctttcgtaatcgctaacgatgttcagccggctttcgttgctaacttgaatcgctacattaaaaccggcgagctagccgacatggactaccgccacataaaggtgcccaagtgcggggaggttcgcttaacccctggatcggcaggacaactacgccaactcggtaggacgatgcttgctgaggcgaaaactggtgagctaatcacccgtattacttctggcaccatatctcgcctaggtgacagatggtatgtaagcctggtcatatctggcccattcgttccagacgctatctccactaagcgtcagcgccgcaacggggtggtaggtgtcgacctcggttcgggacgtttctacgccactacatcggaggggctaagcatcattaaccccaaatttgtctctaagtatgagcaggagctagctagagcaaaccgggcactagccaagaccgctaagggttcagccgctaggaagaaggctctggctaggttgcgcagggttcatgcccgctcagctttagctagggatggtttcagccatcaggtctcggcatggctaactagccagttcgccggtgttgcggtagaaaaatttgatttagcctccatgcttgcctctgctaaaggaacggtcgaaaagcctggcaagaatgtggatgttaaggcccgctttaatgcccatcttgctgatgtgggtattgcttcgaccatagacaagctgctctataagggtaagcgtgacggttgcagagtgcaggtagtcaatactttggataattcgtctaccacttgcgccaaatgtggccatacatgcgtttgcggcccggagcagaaaacgtttacttgccccgattgcggttacaatgctcccagacagttgaactctgctcaatatattaggcagctagccacggtagggttcgacgagctggggctagacatgacagccagcctgacacctgatacgggtaagcgccctatcgccttcatgacttccgcacactag

SEQ ID NO: 64392 - DNA, 28 bp, Propionimicrobium lymphophilum sp.
gtcaattggtgtcttgcccgtgcgcgtg

SEQ ID NO: 64393 - DNA, 28 bp, Propionimicrobium lymphophilum sp.
ggggcagttcgtcttgcccgtgcgcgtg

SEQ ID NO: 64394 - DNA, 28 bp, Propionimicrobium lymphophilum sp.
gagaagaaccgtcttgcccgtgcgcgtg

SEQ ID NO: 64395 - DNA, 28 bp, Propionimicrobium lymphophilum sp.
gtctagctcagtcttgcccgtgcgcgtg

SEQ ID NO: 64396 - DNA, 28 bp, Propionimicrobium lymphophilum sp.
aagccccgtcgccttgcccgtgcgcgcg

SEQ ID NO: 64397 - DNA, 28 bp, Propionimicrobium lymphophilum sp.
tgacattttcgtcttgcccgtgcgcgcg

SEQ ID NO: 64398 - DNA, 28 bp, Propionimicrobium lymphophilum sp.
tagatggtacgtcttgcccgtgcgcgcg

SEQ ID NO: 64399 - DNA, 28 bp, Propionimicrobium lymphophilum sp.
gtcaattggtgtcttgcccgtgcgcgtg

SEQ ID NO: 64400 - DNA, 28 bp, Propionimicrobium lymphophilum sp.
ggggcagttcgtcttgcccgtgcgcgtg

SEQ ID NO: 64401 - DNA, 28 bp, Propionimicrobium lymphophilum sp.
gagaagaaccgtcttgcccgtgcgcgtg

SEQ ID NO: 64402 - DNA, 28 bp, Propionimicrobium lymphophilum sp.
gtctagctcagtcttgcccgtgcgcgtg

SEQ ID NO: 64403 - DNA, 28 bp, Propionimicrobium lymphophilum sp.
aagccccgtcgccttgcccgtgcgcgcg

SEQ ID NO: 64404 - DNA, 28 bp, Propionimicrobium lymphophilum sp.
tgacattttcgtcttgcccgtgcgcgcg

SEQ ID NO: 64405 - DNA, 28 bp, Propionimicrobium lymphophilum sp.
tagatggtacgtcttgcccgtgcgcgcg

SEQ ID NO: 64406 - DNA, 2280 bp, Mycobacterium abscessus sp.
atggcggtgcttgttgtcggtgctctgtgctgtgctgatcacatgcgcccgtcgtctgatcgagttggtcggtggaggacggtgcgcttaactcttgatccgacgcggcggcagatcaaggtcatggagatgtattgcctgctcgatcgccgggcatatgaacgggcgctgcccgacggcccctgccctaacggtgacagcagccacgcatcggtatcgcggcagcccgatgttgccgccgtattggcctcgatcgaaccacccagcacgccaggtgatctggagacaaagtgggcggtcgtatcgagcgcccaccattatgccgcggcagtctctggccgcagagcacttcgagtgcccccgcgatcggcccgtcggcccgcgcctcgcaagagacctcaaacgtcgacgcggacaatgtttggcctctacgaacgtggcggccgaccgcatttcgaaatccaaagttatcggagagtgcgcataggtccgctggcttcgatacgtatccacaacagtgccaagggactcgccgccgaactcaaagaccctgccgttcgactggtgatgaccacggtgcaccgcaaagcccaccgctggtacgcctcgatcctgatcgaggactcccggcccctaccagcgcccaccgcacgccagaaacgtaacggaccggtgggggtcgacctgggagtcctgcatcttgcgacgctgtcgaccggcgaaaccatcccaaaccccaaggtattcgagcgcgggcgaaagcaggtagcgaaagcgtcccaggctgttgcccgatcagccgaaggcagccgccgccaccaaaaaagcgttgaacgtctccaccgccggcaccatgaaatcgccgagcaccgtaaaacggtcctacacacgatcacacgccgcctggcgacctcgtggtcccatatagcgatcgaggatctcaacgtccgcggtatgaccacctctgcacgcggcacgatcgagaatcctggccgaaatatcaaagccaaaagtggactcaaccgcgccttacgcgacgtatcgccctggaagtttcgcgaacagatcagctacaagtcgggttggtacggctccgaactagtcatctgctcccgctggtttccctcatcgaaacgttgctcacaatgcggcaccatccggcgggcactaccgctgacacagcggatatttcgttgcgccacttgccaacttacgatagaccgagaccttaacgcggcagtgaatctcgcgagccgcgtaggagtcgcctggggtacctgggagactgaaaacgcccggaaagaaagcatcatcacgaacacggctggggtcagccacgatgccgccagcacgggaagaccacgagcagactcgtcggccaccctggatgagcaatcatccagccacccaacacgatctaatcgtcaaggtggacccaagactctcaggggcccaggcccactgacatctcgaaaacaacccgactggacccgataccacactcaatggttgttgaattgcctggcgttagcagcccagcagcccccgacaaccagagcacgctgggaagccgtcacgcaatctctcgctgaaaactcacaacgttccgggaacgtcgaacacggcatgcccgtagtcgccgtaggttcgcgcgcattagcgatcggtgcgcaatacctctgcgagagcgtcattcaacgatgcctacttcagttgagcgccatctcaccggacccacccatcgcgctcgtgcgccgcggcagaggcctgggtgccgatagatgggcacttctgcccgtcacgtcccccaccgaaatcgccaccggcatcaaacccatgcacccggcatggcacatcgtgggcccagcgcacatgcccacatacgaactcgtccaaaaacacggcccgacctcacccgtcgagatcatctcggctgccacgcacatagggaaaagcgctgcctacaacagcttcaacgtgctgcaacaatggggcctgataacccgccgtccgcgatacatcgcactaggtcccacaacgctcgacgacatccttgaccagcatgatcacgccgcggccaaagatgccatgttggaccggcaccgacgtcagcgcgcaggttggagaaaaacactcaacctgatcgaatacgcgcgcaccagccacgacatcgcagaactggcgcccgactcaccccaactaacggcaggagactcagaggacgagcagcagtaccgcatagctgtaatggccgggcctcccccgccggaagcgccgtag

SEQ ID NO: 64407 - DNA, 1983 bp, Streptomyces griseocarneus sp.
atgcccatgatcaaaatcactgagtgtgtgacatggggcaccacatgtgatggtttatgggatgctcgaccgcacctggaggtgaggcgatcgtggagtccgccagtgcaaggaggccgcacgaaccggcttgacgcccctccagcctcggtgactctcaacatccacggcagagttgagcatcctagagatgcagatgcgttgtcagtggcgccccttagggtgcggcacatgtttgaacgaaccacaaccaaggccgccttccttagccccctcgacctacgccccacgcaagccaccgacctcgaacgcttcgcgggaaccacccgctgggccttcaactgggccaacgcgctactcgaagcgcatcatcaggcgtacgaggggcgccggcagcaggccgccagacatctgttcggcctgggccccgagcaactcgacgagttaagagtcctcgccaacggcacgcgggacgagaacggcaaaaaggccaaaggggaccccgtcaagcgccgggagtacgagtcgatacagaaggcgaccaagaaggccgtcagcgaggagaacaaagcgctgggcgcggagatgaagctgtgggacgagcaccgcagcctcgtcgtgcacaaaggccgacctctcctcaccccgggcgacgagcctgctctggacgccccgccgctggcccaccgcctctacgcacgccgtgtcgaactggccgggatccagaagaccgaccccgactactacgcggagcagcggaagaaggagcgcgaggcgatcaccccgaacgtcgtggccatgaaacgcgacctgatggccaagggcgcctacttcccgtccgaatacgacctccagtacatctggcggaccgtccgggacctgcccaaggaagaaggaggctccccgtggtggcccgagtgccccacgatcctgttctacgacgggatcaaccgggcgcggaccgcgtggaagaactggatggactccgcctctggcgcccgcaagggaccgccggtcggtatgcccaggttcaagagcaagtacaaggcgaaggacacgttcacgatcaccaacccgaacaggtccgtgatcaagttcgagacctaccggcgtatcgccatcacaggcatcggcagcatgcgtctgcaccgcggagccaagctcctcgcccgccgcatagccgctggccaggccgaaatcacctcggccaccatcagccgctccggaaccgcctggtacgtgtccgtcctgtgcaccgtacacaccacggcacgcaccgcgccgagcaaggctcagcgcagccgcggggccgtcggcgtggactggggcgtcagggcgctggccaccacgtccaaacccatcgccctcacccccggcaagccggcgtcaagaaccgtgcccgccgagaagtacggcgccgcgatgagccagaagatcgcgcgagcccaacggcaactggcccggatgcccaagggcagcagccgccgccgcaaggccgcccggcacgtcgccgacctccagcacctggtggcccagcgccgcgcctccagtgtccaccagctgtccaaggcgctcgcccagtccttcgagatcgtcgcgatcgaagggctcaacgtccgtggcatgacgaagtccgcgaagggcaccgtggagaacccgggcaagaacatccggcagaaggcggggctgaaccgggccatcctcgacgcgacgccgggtgagctgaagcggcagctggagtacaagacgaagaagtacggttcccggctcgtggagctggacacctggtacccgtcgagcaagacgtgctcgcgctgcggatgggtccaccccaagctgaagctgtcgatgcggacgttccgctgtcagcagtgcggtctcgtcgaggaccgggacttcaacgcggccgtcaatatcgaaaggcaaggaatcacgcatatcgtgaaggagaatgagggaacggacgatcgagaagagggttga

SEQ ID NO: 64408 - DNA, 29 bp, Streptomyces griseocarneus sp.
gtgctccccacgcgcgtacgggtggtccc

SEQ ID NO: 64409 - DNA, 29 bp, Streptomyces griseocarneus sp.
gtgctccccacgcgcgtacgggtggtccc

SEQ ID NO: 64410 - DNA, 29 bp, Streptomyces griseocarneus sp.
gtgctccccacgcgcgtacgggtggtccc

SEQ ID NO: 64411 - DNA, 29 bp, Streptomyces griseocarneus sp.
gtgctccccacacgcgtacgggtggtccc

SEQ ID NO: 64412 - DNA, 29 bp, Streptomyces griseocarneus sp.
gtgctccccacgcgcgtacgggtggtccc

SEQ ID NO: 64413 - DNA, 29 bp, Streptomyces griseocarneus sp.
gtgctccccacgcgcgtatgggtggtccc

SEQ ID NO: 64414 - DNA, 29 bp, Streptomyces griseocarneus sp.
gtgctccccgcgcgtgtatgggcggttcc

SEQ ID NO: 64415 - DNA, 1719 bp, Streptomyces sp.
gtgcagtccacgggcgctctactcccccctccaggggacgagttcgcctcctggggaggcgaacgagcaacacggtatgagatgaaccgaagagaacagcgcattggcttcgctattcacctttttgccgcatttatcagtggtgggtgtgatggtgcgggcatggacgagaacaccaccactgtcgtggtccgggagacgctggatcccaccgcagaccagagagcgatcctgcagcgctacgccgacgcctcgcgctgcagcttcaactacgccctcggcctcaagcacggtacccaacagctctgggcccatggacgtgaccggctgatcgctcaggggcagacgccggccgaggcggccaggaacgcgccgaaggtcgatgtgccctctcagttcgctgttcagaagatctttctggcgcagcgggaccagccgctgcctggtcctctgctgccgggccaggagccgcggttgctgttcccgtggtggaagggggtgaacgcgatcgtgtgtcagcaggccttccgggacgcggatacagcgttcaataactggaagagctcgggtcggcgcaagggggctcccgtcggctatccgcggttcaagcggcgtggccggtgtcgggattcgtttcggatgttcgccgtgcggctggtcgagcaggatctgcggcatgtacggatcggcggtggcggtggtcagccggcgttctcggtgcggcttcatcgtcctgcgcggcgtctggcacggttgctggcccggggcggcgtggcgaagtcggtgacgatctcccgtgaggggcaccgctgggtggcggcgttcaacgtccgtgtcccggtcgggccggtaccgcggccgagtcggcgccagcgggaggcgggcacggtgggggtggatctgggcgtgaaggtgttcgccgcgacctccgatccggtgatcatcaacgaccacaagatccagctgttcgagaatccccggcatctggagaacactcgtcggcagctgcggaagtggcagcggcgcatggcacgccggcatgtgcgcgggctgaggtctcacgagcagtcgcagggctggaaggaggcccgggaccaggtcgccagactgcacgcgctggtggctgcccgccgggcatccagccagcacctggtgaccaaacggctggtcactcagtatgcccacgtggccttggaagacctgcgggtgaagaacatgacggcctccgcacgcggcaccgcggagagtcccggccgaaacgtcagggccaaggccggactgaaccgggccatcctcgatgtcggcttcggcgagatccgtcgccagatcgagtacaaagccctgctgtacggggcccaggtgaccgttgtcgacccggcgtacacctcgcagacgtgcaaccgctgtgggcacgtggacgccaagagccgccgcacccgcgatcagttcacctgcacccgctgcggccacgccacccatgccgacatcggcgccgcaatcaacatcaaagcccgtgcagagctcacgtccgagtccgccgccccaggactcgccaaccatgaccaaggcgttcactgcggagcaccggcgaaccagacccgccccaaggcccggcggtatgcccctccagcgaagcacggcatgccctactccggagaagtgagcggcaaagtaccgaagggcagagcgtcacactcgcctgtcagccagccaggctga

SEQ ID NO: 64416 - DNA, 29 bp, Streptomyces sp.
gggaccgcccctgcacccgcggccggact

SEQ ID NO: 64417 - DNA, 29 bp, Streptomyces sp.
gggaccgcccctgtacgcgcgggccggac

SEQ ID NO: 64418 - DNA, 29 bp, Streptomyces sp.
gggaccgcccctgtacgcgcgggccggac

SEQ ID NO: 64419 - DNA, 29 bp, Streptomyces sp.
gggaccgcccctgtacgcgcgggccggac

SEQ ID NO: 64420 - DNA, 29 bp, Streptomyces sp.
gggaccgcccctgtacgcgcgggccggac

SEQ ID NO: 64421 - DNA, 29 bp, Streptomyces sp.
gggaccgcccctgtacgcgcgggccggac

SEQ ID NO: 64422 - DNA, 29 bp, Streptomyces sp.
gggaccgcccctatacgcgcgggccggac

SEQ ID NO: 64423 - DNA, 1812 bp, Streptomyces spectabilis sp.
ttgtctgtccaggtggtcgagcgcgcttttcgcttctgcctggacgtttccagagcagagatccgcaccctggagcggcactgcggtgcggcacgctgggcgttcaatttcgcccatgcccagttcttggcgcagcacactgtttttgttcagcgcaagcagtcggctgcagaaggtctgtcaggccggggcggggagggcatgctgtccgaccttaccaaggcgcagcgcagggaggtctaccgccaggctgtcgccatggtcggtgcggagaacagggtgttgtgtgccgagctgaaggtggtggatcagcatcggtcacgggtgacgcacaaggggaaggcgtttttggagcctggtgatgtgcctgcggtcggggcaagccgactggagctggagctgtacgcacgtcgcgtggagttggcagctctgcagcaggcgaatccggctgagtacacagtggcgaagcggggtgagctgactcgggtgcggcccgtgctgctggaaatgaagcaggagcttgccgcgcgtggcgcttatcggccgacttcctttgacattcaaagtatttggcgcgctcgacgggatctcccccgtgatgcgggcggttccccgtggtggcctgaggtggccattggtgcatttatctgtggcttcgatcgtgctgcacgggcctggcagagttggatggactcggccgcagatcggcgtgccggggcccgcgtgggattgccgcgatacaagaggaagggccaatgcctcgacagcttcacgttgatgaacccccgccgggcagtgatccacctggaggactcccggcatctgcgtctgacggggatcggcacgctccggttgcatcagcccgctcggcggctgaggcgacttctgcgtgcgggcgtggctgacctgacgtcagtgacggtcaaccgcagcggcgaccgctggtatgtcaacatccagacgaaggtgcaccagatcatccccgcgaagcccactgcccggcagcgcgctgccgggctggtagcggttgatctcggttctaatccgctcgcagtgctctctgcccctctggacgtgtgcgggggcggtaccgaaatcgccgcgcgcaagccgttgatcgtgcaggagaagcggctcgcgcacctgcaacgggcgttcacgcgaactgtcaagggatcgaagcggcgccacaaagccgcgcggagactgggccgggtgcacgcgcagatcgcacggcagcgctccggcttcctgcacacagtgagcaaacagctcgccacacggtgcgcgcacattgcgattgaagacctggatttgatgcggctgacggcctcggcgcggggcactgtccaagagccgggccgcaacgtcaaggtcaccgctcggttcaatcggcatctgctcgatgccgggctggcggagctacgccgtcagctcgcttacaaaactacatggtacggatcctcactcatcgtccttgaccgaggtgaggcgaccgcgacgaaatgcagccggtgcggagagcgaaacccaagctcgaaagtcggcagtaagcgtttcacctgcccgcactgtggtttggacgtgaaccgccgtgtcaatgcggcacgcagtatttataaggcagcgtgtcaggcagcatctgcgtccgtggcctgcggcgagcgggacacgcaaaacgccctccgagacgaacggcccccgcgcgtcggcgacggcgccggaccctcgtcgttgaagagacccccgtcccccgaggcgacgggtggaagacccagctcccgcgtggacagggtcaccccggccgagtaa

SEQ ID NO: 64424 - DNA, 1455 bp, Rhodococcus sp.
atggccgacatgacatgttcgcgcgcagtgctgctgcacctcgatgcagcggcgctcactgacgaccaaagactgttgcttgatcggtctgccggtacctctcgcgcggtgtacaactggggtctggccactatcaatgcgtggaatgtgcagcggtatgcatggttgtgtgagcgtgcctacgcggtcgcccgtagcgagggcgaggcgcagaccctgctgggcgatatggactggcgtagggggtcgctgcttcaggcgccggaggacttgcgtcggcgtcccaacaggacctcgctgggtcgtcggttcaccgaactcacccgcgacccgaacagccggttccactggtggcacatcgagaatcacggcgtctcccgattcgtcgtgagtacggcgctccgcgacctcgatgccgcgatcgcccgctactgggacggtgccaggtctccagaccggccaccacgcaaggatggccgcccgatcggatggccacggttcaagaagaagcaccgttcgaaggattcgttcgcgatcttcaacctcagcgtcaccagtcgcggcgacgatccgtggaaggcgatcgaccaggggcaccgggttcgtatccccaaccttggttcgctgcgggtacacgagaatacccgtcggctgcgtcgctggatccagcgtggtgctatcccaaaatctgctcgattcgtccggcgcggcaccggatggacggtcagtatcgtccttgagatccccgccgaggtgattccggcgtcggtggccacccggcggcagcgggccgccggagcggtcggtgtcgatgtaggagtgcattcgctggtcgcactgtcgaccgatgaactggtcgtcggccagccttctgccgcgttcaaccggcgtcttcgtagactgcaacggcacgccgctcggcagcgaggccccactcacgagcaggggccctctgccggatgggtggagaccacccgcaggatcgtgcggttgcagcacgccgacacgcttcgacgtcggggacggctgcatgaggtgacgaaacggatcgcaaccggattcgagacgatcggaatcgaggatttggcagtggcagggatgacggccgccccgcgacccaaacccgacccagcccgcctgggtagttttctgccgaatggtcggcgagccaaggccggcctgaaccggtcgatccgccgcgccactttcggggagatccgtcgacaactcgaatacaagacgtcgtggtacggcgcacgcctggtcattgtcgacaggttcgcgccgacctcgaagacctgctcgggctgcggcgcagtaaaagccacgctgcgtctgtccgagcgggtgtatcgctgcgagcagtgcggcctggttctcgatcgtgacctcaatgctgcccgcaacatccgttcactcgccctccccgtcgaccgtggatgcggccgacgctaa

SEQ ID NO: 64425 - DNA, 1749 bp, Miniimonas sp.
gtgaaagagaccgtcacacgagtggtgcggtatcgcgtcgacgtgaacgcgttgacgcccacgcaggcgcagctgctcgaccggcacgccggaacggcgcggcaggcgtggaactgggccaccgcacggtggctggactggcaggccagcatcgagcacaccgtgtgggcacaagccgcccacgccgtcggcctggaccacgccaccaccacgacacgcctcggtgacgcgctcctcgccgcccgagcactcctccgcggccacgagcccgagcagcgggcctggcaaagcaccgcctacaccaccgcacgagccacccacggccaccacgcgaccttcgaggacgcctacaccctcgcccacctctaccgactcaccgccgcccagccccacgaccccaccagccccgacggcctcgagcggctgcactggtgggccgcccagggcacaagctccggcctgccccgcacccagcagcacggcgtctcgaccttcgcctaccagaccgccctcgccgacttcgccaaaacggcccaggcgtactgggcgcggccccgctactcaccccgcaccgggcgacgcctcggcgcaccccggttcaaacgccgcggcgagcacgacgccttcgccatcatgaacctcaccacgaccgcgtcagggccgtggaagtgcatcctcgacgggcaccggctcctcgtaccgaacctcggcagcctccgcctcacccggaacacgcgtgagctgcggcgcctcatccaacgcgggggacgccccacctcggtcaggttcacccgcaccggtggacggtggcacctcgcggtcaacgtctcgttcgaggcaaccaaccccgccgtcctcccaccgccccgcccgaaccgagtccagatcgccggaggcgccgtcggcgtcgacctcggcatcacccacctcgccacgctctcgaccgggacccacatccccaacccccgacacctcaccgctgcggccgcccgactcgagaacctccagcagcgacgcgaccggcagcaccgggccgcctcccccacctgcttcacccccgacggcacccacaagcggggccgctgcacctggggccgcgccgacggtgcacccctgtctcggcgagcgcggaccacccaagcccagatcacccgcctgcacgccctcctcgccacccagcgcgcctcgaccctgcaccagctcaccaaacacctcgccacacgccacgaacgcgtcgcgatcgagaacctcaaccccgccagcatgacccgacggccctaccccaaacccgaccccgcgcagcccggcgcctacctccccaaccagcgacgcgccaaggccggcctcaaccgggccctgctcgacgccgggttcggggagttccgccgccagctcacctacaaaacgacccgctacggatcgaccctcaccctcgtccccccagccgggaccagccaaacctgccaccactgcggacaccgagcaccccagaaccgcgaaacccaagcggacttcgtgtgcgtctcctgcggccacgtggccaacgccgacatcaacgcggcgtgcaacatccgcgaccaccacgtcgcagcgcctacggagagccagcacccagctggcgcgggcgcggccacacaccacccaccagtggcagtagccgaacagaccccaccaggggtcaacgagacccgcaagggatctcccgtccaacacacgcgcacagccgaccccgcccgcgtcccagcatga

SEQ ID NO: 64426 - DNA, 28 bp, Miniimonas sp.
gccccggccccacgtacacggacggtcc

SEQ ID NO: 64427 - DNA, 28 bp, Miniimonas sp.
cccggccccacgcgcacacggacggtcc

SEQ ID NO: 64428 - DNA, 28 bp, Miniimonas sp.
cccggccccacgcgcacacggacggtcc

SEQ ID NO: 64429 - DNA, 28 bp, Miniimonas sp.
cccggccccacgcgcacacggacggtcc

SEQ ID NO: 64430 - DNA, 28 bp, Miniimonas sp.
cccggccccacgcgcacacggacggtcc

SEQ ID NO: 64431 - DNA, 28 bp, Miniimonas sp.
cccggccccacgcgcacacggacggtcc

SEQ ID NO: 64432 - DNA, 28 bp, Miniimonas sp.
cccggccccacgcgcacacgggcggtcc

SEQ ID NO: 64433 - DNA, 28 bp, Miniimonas sp.
cccggccccacgcgcacacgggcggtcc

SEQ ID NO: 64434 - DNA, 1629 bp, Rothia dentocariosa sp.
atggctactactgataagaaggataaggataaagaaaaacttcgagcatataagttccgtcttgacccaaatcaagctcagactatcgctctctatcaggcagccggtgcggctcggtatacatacaatatgctcaccgcatataacttggaagtgaatagacttcgtgatgattattggaagaaacgccatgatgagggtatctccgacgcagatattaaaaaagaacttaatgcgcttaccaaagaagataaacgctataagcagttaaagtacggagcatttggaacccaatatttgactcctgagaaaaaacgtcatgaacaagccgaacaccgcattgaaaatggcgaagatccgtcagttgtgtggaaccaagagacggagcggtcggctaatccgtggcttcataccgcaaatcagcgagtgctggtgagcggtctgcaaaatgcaagtgatgcttgggacaatttctgggcttcccgtacgggtaaacgtgctgggcgtttggtgggtgcgccgcgtttcaagaagaaaggtatttcgcgggattcttttacggtacctgccgcagagacaatgggtgcttatggcaccgcatatctgcgtggtgaggccgcctatcagcagggtaagcgcacgattactgattaccggcatgtgcggctctcttacctgggggtaatccgcacctatgactcgacgaagccgctggttaaagctgtcgctgccggtgctgagattcgcagctacacggtctctcgtaatgctgaccgctggtatgtatctttcttagtgaagttttcggaacctatacgtcgttctgcaacaaaacgtgctcgtgccgctggtgctgtgggtgttgatttaggggttaaatacctagcgtcgctttcagattctgaggcgccacaacgcttcccgaatctaaagtttgccgaaggtctgcctagtcttgagaacccgcgttggagtgaggcaagctcgcgacggctgcataagctacagcgtgctcttgcacgttctcagaagggctcgaatcgacgttcccgtctagtgaagcagatagcccggctgcaccatatgacggcgttacgtcgtgaatcgaatctgcaccagctgacgaaaaaactttctaccgggtataccctggtggggcttgaagacttgaatgtttccggtatgaccgcctctgctaaggggacggttgagaatccggggaagaatgttgcccagaagtccggtctgaaccgggtagttctggatgcggcattcggcgtgttccgttatcagctggagtataagactgcctggtatggttctacgcttgagaagattgaccgttattttgcttcgtcgcagacgtgttcggagtgtgggaggaaagcgaaaaccaagctgactctgcgcgaccgtgtcttcgactgtgcgtactgtgggaatatgatggatcgtgattttaacgcggccgtcaatatttgccgtgaagcgcagaggctttttaacaaaaaactcgcctcagaaaatggggagagtctaaacggacgtggaagtcgaggcgctcttcagggtgctgagactgtggaagcgtcaagaccacctacgagtcatcgtagagggtcaccgtag

SEQ ID NO: 64435 - DNA, 29 bp, Rothia dentocariosa sp.
gtctgccccgcgtgtgcatggatggttcc

SEQ ID NO: 64436 - DNA, 29 bp, Rothia dentocariosa sp.
gtctgccccgcgtgtgcatggatggttcc

SEQ ID NO: 64437 - DNA, 29 bp, Rothia dentocariosa sp.
gtctgccccgcgtgtgcatggatggttcc

SEQ ID NO: 64438 - DNA, 29 bp, Rothia dentocariosa sp.
gtctgccccgcgtgtgcatggatggttca

SEQ ID NO: 64439 - DNA, 29 bp, Rothia dentocariosa sp.
gtctgccccgcgtgtgcatggatggttcc

SEQ ID NO: 64440 - DNA, 29 bp, Rothia dentocariosa sp.
gtctgccccgcgtgtgcatggatggttcc

SEQ ID NO: 64441 - DNA, 29 bp, Rothia dentocariosa sp.
gtctgccccgcgtgtgcatggatggttcc

SEQ ID NO: 64442 - DNA, 29 bp, Rothia dentocariosa sp.
gtctgccccgcgtgtgcatggatggttcc

SEQ ID NO: 64443 - DNA, 29 bp, Rothia dentocariosa sp.
gtctgccccgcgtgtgcatggatggttcc

SEQ ID NO: 64444 - DNA, 29 bp, Rothia dentocariosa sp.
gtctgccccgcgtgtgcatggatggttcc

SEQ ID NO: 64445 - DNA, 29 bp, Rothia dentocariosa sp.
gtctgccccgcgtgtgcatggatggttcc

SEQ ID NO: 64446 - DNA, 29 bp, Rothia dentocariosa sp.
gtctgccccgcgtgtgcatgggtggttcg

SEQ ID NO: 64447 - DNA, 29 bp, Rothia dentocariosa sp.
gtctgccccgcgtgtgcatgggtggttcc

SEQ ID NO: 64448 - DNA, 29 bp, Rothia dentocariosa sp.
gtctgccccgcgtgtgcatgggtggttcc

SEQ ID NO: 64449 - DNA, 29 bp, Rothia dentocariosa sp.
gtctgccccgcgtgtgcatggatggttcc

SEQ ID NO: 64450 - DNA, 29 bp, Rothia dentocariosa sp.
gtctgccccgcatgtgcatgggtggttcc

SEQ ID NO: 64451 - DNA, 29 bp, Rothia dentocariosa sp.
gtctgctccgcgtgtgcatgggtggttcc

SEQ ID NO: 64452 - DNA, 29 bp, Rothia dentocariosa sp.
gtctgccccgcgtgcgtatggatggttcc

SEQ ID NO: 64453 - DNA, 29 bp, Rothia dentocariosa sp.
gtctgtcctgcgagtgaatgggtggttcc

SEQ ID NO: 64454 - DNA, 1614 bp, Corynebacterium glutamicum sp.
atgacaagcaccacgctcgcaccagaagaacccctcatggtgttccgcggcgcgcggtttcgtctcgatccaaccggggaacaacaaggcatattaagccagcaagcaggtgcagcgcgcgttgcatataacatgatgtgcaccctcaacaaagacatcctcgaagcccgaagtcagctgtattcaacgctgatcaaagatggaaaaactaaagataaggccaaaaaagaacttaaagctgccgcaaaggaagatccttcactagctattgtctgggcgcgtgatttcgataaaaactacatcaccccagaacgcaatcgccataagcacgccgcccaacgaattgctgcaggtgaaaacccagtcgatgtatggaacccagacgaagaacgtttcaacgaaccctggctccacaccgcaaaccgccgagtgcttagatcagggcaaaaacaatacgagcaagcactcgataacttctttaagtctcagaacggatccagggctgggcaaaaaatgggcaagcctcgttttaaaactaaaattcgctccacagactcattcaccatcgacgccgttgatgtctcctcatcgaccacactcatcagagatataggccccaaagaccatgcccgatacaaaaccggtgaagcctcaacaggaatcattgcagactaccgccacgtcagactctcccacctaggcacatttcgcgtctttggatccactaaagccctggtccgacaactcgatagaggcgggcggattaaatcctgcacagtgtctcgatccgctgatcgctggtacgtctcattccttgtcgaactccccatcgagatagcacgctctacacctacgaaaaagcaatataaagcaggtgcagtcgggattgatctgggagtaaaaagcctcgctgccctatctaccggcgagattatccccaacccacgtttcttacgcaccgcagataaaaagatcaagaagcttcaacgcaaaatcgctcggtgccaaaaaggatcaaaaaattccatccggttaaagcgacgtcttgcacgctgccaccatgaactcgcgctgcaacgtgcagggtatctgaacgaactcactagcatgctggcatcgagtttttccgcgatcgcactagaagatctcaacgtggcggggatgacatcatccgcgcgcggaaccgtggaaaatccgggtaaaaatgtgaaacaaaaagcagggttaaacaggtcaattctcgacatctcaccagggcgtatccgcacgttgttggagtataaatgcactgatcgcggtgttgagctgcaggttattgatcgttttttcccctcatcgcagttatgttcgtcctgtggatcaaaaaccacgatccccttggcgcagcgtatctatcactgtgatgtgtgtggtggtgtcattgatcgtgatgtcaatgccgctatcaatattgtctatgaagccaagcgattggtggaacaaaaatgtagtgaacactcggctccggagggggcagaggataaacggccgtggagtgtacatctcccatcaacgcagtatgttgatggactgtatacgaggaagcggcaaggccccagcggtcatagcagttga

SEQ ID NO: 64455 - DNA, 30 bp, Corynebacterium glutamicum sp.
tgttcttcccacgcacacgaggaagatccc

SEQ ID NO: 64456 - DNA, 30 bp, Corynebacterium glutamicum sp.; identical to SEQ ID NO: 64455

SEQ ID NO: 64457 - DNA, 30 bp, Corynebacterium glutamicum sp.; identical to SEQ ID NO: 64455

SEQ ID NO: 64458 - DNA, 999 bp, Streptomyces sp.
atgaagaccgaagtgctgcgcgcctaccgcttcacgctggccccctcccccgcccaggagcagaagctgttgcgctggtgcggcaacacccggctcgccttcaactacgcgctcgccgcgaagaaggcggcacatgtgcagtggcgggccaaggtcgacgagctcgtcgccggcgggacgccggaggcgcaggcgcggaagcagacgaaggtcccgatcccgtcgaagccgaccgtccatgaggtgttcaacgccgagcgcggcgacacccgggagggtgtcgagggcgtgtgtccgcggtggcacgaagtgaacacctacgtcttccagtctgcgttcatcgacgccgaccgcgcctggaagaactggctggagtccttcacgggcaagcgggccggccgccgcgtgggccacccacggttcaagaagcgcggccgcgcccgggactccttccggctgcaccacgacgtgaagaagcccggcatccgcctgaccacgcaccggcgcctgcggctggcctcgttcggtgaggtgcggctgcacgactccggcaaacgcctgttccgccaagtcgcccgcgatgaagcagtcgtgcagtcggtgacggtctctcgcggcgagcaccgctggtacgcgtccgtgctgtgcaaggtcaccctggacgtccccgaccgtgcgtcgcgtgcgcaggccgagcggggcgaggtcggcgtcgacattggcgtgaaggtcctcgccgccctgtccaagcccctgggtgtgtgggcaggtggacgtcggcgcggacgggatgctgatcgtcaatccgcggccgctgcgcgacgcgcggcagcccggcggttggtgaaggcacagcgggcgttgtcgcagccgcagaagggctccgtgcggtgggagaaggcgcgccgtcgcgtcggccggtttgctcgaactgtggatggcaaaacccacgcctggcgctgtccgacaggacgttctactgcacgacctgtggtctga

SEQ ID NO: 64459 - DNA, 777 bp, unknown
  TnpB Polynucleotide
atgcctctataccgtaaacttcttggtgtttccgcggcggcggcgctgaccgcctccgtcactcgtgcccgtaagaacgcacgtcgacgcgctatcgaactgggcgcgcccttcggtgttctgccgaccctgcccaccggtgaggcgcagcgcgtgggcgtggtgtacaaccctagtaagcccggcgctgcggcggctatcgagattctggaacgtaccctcgcggcgaatggccactcgcagccgctggtgcgcaccacccgcgtggacgagcccggttccggggcggcccgcgagctgatctctgagggtgttgacctgctcatcgctgccggtaccatcgaggcaccgggtaaaaacgtgcgccagaaggctgggctcaaccggtctattctggatgccgcttttagtacgctgcgtcgtcagctggaatacaaggccagctggtacggctcacaggtacagattattgaccgcttctttgcatcctctcagacgtgtagcgcctgcggagcacgagcgaaaaccaagctcggactccacgtgcgtgtctttgaatgcgcggcctgtggtgtgcggattgatcgtgacgtgaatgcggcacgtaatatccgtgcggaggctgtacggatgtatgaggcgcaactcgcccccggcacgggggagagtctaaacggacgcggagttgctgactctgatgctgccggttcggtggtgttgggggatgtggcgttggatgcgtcaagaccagccgcttctggcggcgggtcaccgtag

SEQ ID NO: 64460 - DNA, 1716 bp, Dermacoccus sp.
gtgggttatccccgcgcgcatacggccgcgcacgggtcccaccccgagcccgcaacaacgcgacgaagctccacaccccccaaccccatagattccccggaattccggggttgtcggtgtgcacgactaggttctcaccaaggaaggaggcaccccatgaccactcgtgaaatcttgcgcgcataccgcgtccccctggacccgaccgacgcacagaccgcagcactggcctctcatgcgggcgcctcccgcgccgctttcaactgggccctcggcgccaaggtgcacgcccaccgcatgtggagcgcgtgcgtcgccgatctgacctacacccgctacggccacctcgacgcagatcaggccctcgccgccgcgaagaaagacgcctcgcgctactaccgcatccccacatcccaaaccaacgagaaggcgttcgaccgcgacccggactacgcctggcgcaccgaggtcaaccgccgcagctgggtctcggggatgcgccaagccgacacggcgtggcagaactggctcgactccctgacaggtcgacgcgccgggcggcgcgtcggctacccccgcttcaagtccaaggggcgctgccgcgacagcttcaccctggcccacgacgtgaagcgtcccagcatccgcccggacggctaccgccgactgacgctgccgaagaagatctccgtcaccggctccatccggctcaagggcaacatccgccacctcgcccggcgtatccgtcgcggcgtcgcacgcatccagtcagccacgatctcccgcgcgggcaacggctggtcagtgagcatcctcgcgctggaaacactcgacatccccgaccaccccaccccgcgccagcgagccgcaggcgcggtcggggtcgacgtgggtgtgcaccacctgatggctttcagcgacgccaccatcatcgacaacccgcgccacctgcgggcggcgcagaagcggctcacccgcgcccagcgcgccctgtcgcgcagcaagtggcgcctacccaacggcgacctcatcgacgcccccaagcgtggccaacgtgtcacacccacgacgggccgcatcaaggctcgagcccgtctcgcgcgagagcacgccgccgtcgcccagcaccgcgcgagcaccctgcacgccatcaccaagcagctcgcgacctcgcacgccgtcgtcgcggtcgaagacctcaacgtcgccggcatgacgcgcagcgcacgaggcaccatcgacaagcctggccgcaacgtcgccgcgaaagcgggcctcaaccgttccatcctcgacgcgagcttcgccgagatgcggcgacaactcacctacaagacttcgtggtaccgatcgcggctcctgccctcagggcgcttcgttcccacgagcaggacgtgttcgacgtgcggggcagagaaagccaatctgcccctgtcggaacgcgtgtaccactgcgagaactgcgccacggtgcttgaccgtgacgtcaacgcggcgaagaacgtccttcgcaccgctctcgcatcccacgacgcccccggcatggaggagtcgcaaaacgcccgtggagtgcgtatcgagacatctgtcgcgctgcgttctgcgaagcgggaagacccaccgcgaggtgggccaccccggccgagtaatcgcgtccggtcatctccccccgacgggaaagcgaaagtgaaggcaaacgcttctcccaccaactaa

SEQ ID NO: 64461 - DNA, 29 bp, Dermacoccus sp.
gtcggccccgcgcacgcggagatgagccc

SEQ ID NO: 64462 - DNA, 29 bp, Dermacoccus sp.
gtcggccccgcgcacgcggagatgagccc

SEQ ID NO: 64463 - DNA, 29 bp, Dermacoccus sp.
gtcggccccgcgcacgcggagatgagccc

SEQ ID NO: 64464 - DNA, 29 bp, Dermacoccus sp.
gtcggccccgcgcacgcggagatgagccc

SEQ ID NO: 64465 - DNA, 29 bp, Dermacoccus sp.
gtcggccccacgcacgcggagatgagccc

SEQ ID NO: 64466 - DNA, 29 bp, Dermacoccus sp.
gtcggccccgcgcacggggagatgagccc

SEQ ID NO: 64467 - DNA, 29 bp, Dermacoccus sp.
gtcggccccgcgcacgcggagatgagccc

SEQ ID NO: 64468 - DNA, 29 bp, Dermacoccus sp.
gtcggccccgcgcacgcggagatgagccc

SEQ ID NO: 64469 - DNA, 31 bp, Dermacoccus sp.
gatcggccccatacacgcagagacgagcccg

SEQ ID NO: 64470 - DNA, 29 bp, Dermacoccus sp.
gtcggccccgtgcactcggagataagccc

SEQ ID NO: 64471 - DNA, 30 bp, Dermacoccus sp.
gttggctccacgcacgcggagtgcaaaacg

SEQ ID NO: 64472 - DNA, 1677 bp, unknown
  TnpB Polynucleotide
atgaacggccacgctgaccccgccgataccgctgccagtgacacctgtctgcgggggtacaagttccggctctcgccgaacagtgcccaggagtccgtcctgcgtcagatggcgggggcgtcccggtacacctacaacttcatggtcggccacaaccgtgacgtgcagaaacgccggcattcctatcatgaccagcttgtcgcagagggagtcgacagtgctgttgcctgggaccgggtcaagagcgccgcacagtccgacaaggcactggtactggtgaccagttacgagacgttcgcgacgcgttttctcacgccggaggtccagcggcaccgtgtcgccgctgagctcctggccgccggggtgcctcgggatcaggcatggccagttaccgagctgttcgataatccgtggctgcatacggtcaatcgaagggtgttggtcagcggactccagaacgccgccaacgccttcgggaactacttcgcctcactgagcagaaagcgcgggcggaggaaggtcagattcccccggttcaagaagcgtgggcgctcgacagactcctacacggtgcccgcccccgagtccatgggtccgatgggctccgaaggcgggatctaccactccaaggtcgacggacgtcgggggaagattgaggactaccaccacgtccgtctcgcgaatctcggggtcgtccgggtcaaccgctccacgaaaaaactggtccggatgctccaccgcggtggaacgctgcgttccttcaccgtgtcccgccacgccgactactggtatgtctccttcctcgttgatcaacctgatcgaccgcgtcaggctccgacgcggaagcagaaggccggcggggcagtgggcgtggatctcggggtcagcaagctgatgacgctcgataacggcgctgtggtggccaaccctcggttgctgcgccgggatggtcaccgggtcgcctgtatacagcgcaaaattgcccggtccgttcccgggtcgaagaatcgtgaccgcttgaagcgacgtctggcgaagcgccagcaccggcttgcacagcggaggaaaggaatgatccatgaagtcacgacgacactggtggaggcagccaccctgatcgccatcgaggacctgaacgtgtccgggatgagcagttcagcccgcgggacgcttgagaagcccggcaagaacgtcaaggcgaaggccggcctcaaccggtctatcctcgatgcctcgttcggcgagattcgtcggcagttggactacaagtgcgctgagcgtggcgtagagctcatcgtcattgaccggttcttcgcgtcgtcgcagacctgttcgctgtgtggatcgaaaaccaagatcacactgtcgacgcgggtgtaccggtgcgagtgctgcgggttggtactggaccgcgatgagaacgcggcccggaacatcgttgacgttgcgctagcgcaacgtgggtttccacgtaaatatggtcggcctgggacgggcacgaccctaaatggtcgtggagtcaccggggctcctcctccgtcagctgtggcggaggctggacccggtgacgtggaagcggcaaggctcactgtctctcctcggggagtcgcagagtcaagcagtcgagcgatcggctgcccatcccccacggaagtgaagcaaggagagcaaccgtga

SEQ ID NO: 64473 - DNA, 29 bp, unknown
  Direct Repeat
ggttctccccacgcgagcggggatggtcc

SEQ ID NO: 64474 - DNA, 29 bp, unknown
  Direct Repeat
ggttctccccacgcgagcggggatggtcc

SEQ ID NO: 64475 - DNA, 30 bp, unknown
  Direct Repeat
ggttctccccacgcgagcggggatggtccc

SEQ ID NO: 64476 - DNA, 30 bp, unknown; identical to SEQ ID NO: 64475
  Direct Repeat

SEQ ID NO: 64477 - DNA, 1815 bp, Streptomyces agglomeratus sp.
ctggctccgccccgacgctcccaccagcgacggccggctgttctgccacgtctacgcacgcggcgaccgcggcaaggaccagttcgtcccaggctggccgtactccttcgtcgccgctctggaaacaggccgcacctcctggtgccggctcctggacgccctgcggctcggacccacggacgatgcgacactcgtcaccgccgcccagctccgcgaggtcgtggaacgcctggcccacgcgggacactggaagccgggcgaccccgagatcctgatcgtgatggacgccggctacgacgtcacctacctctcccactccctgcgggacttgccggtcgtgctgctcggacgactgcgctcggaccgcgtcatgctccgcgacccgggccccgcccgctccggaccgaagggcggccggccccgccgacacggcggcatcctcaccttcgccaagcccgacacctggcaccagcccgacgtcaccaccgccacggacaccacccgctacggcaaggcagagacgacggcctggaaccgtatgcatccccgactcacccaccgcggcccctggctggagcacgcggacgacgaactacccgtcctgcacggcacattgatgcgcctgacggtcgagcgcctgccgggcgaccgcgaaccgaaaccggtctggctgtggtgctccgcaacctcggccacgtcggcggacgtggaccggtggtggcaggccttcctccgccgcttcgacctggaacacaccttccgactgatgaaacagaccctcggatggaccgcaccgaagatccgccgcgccgacaccgccgatctgtggacctggctgatcatcgccgcacatacccagctttgtctcgcccggcccctcaccgaagacctccgacggccctgggaacgacgaaccgaaccccgtcgcctcacccccgcccgggtcaggcgggggtttcgcaacgtccgtgcgaccgcggccgtctccaccacgacgtgaagaggccccggatccggctggctggctaccggcgcctgcgccttcccgccttcggagaggtccgcctccacgagtccgccaaacgcctgcagcgtcgcatcgaccgcggggaagccgtcgtgcagtcggtgaccgtctctcgtgccgggcaccgctggtacgcctccgtactgtgcaaggtcacctcgcacgttcccgctggcccctcgcgcgcgcagcaacgacgcggcacggtcggcgtcgacctcggggtcaaggtcctcgccggactctcccagcccctgaccgaagatgatccggacagcatcctcatctccaaccccgcccccctgcgttccgccggctgccgcctggtgaaggcgcaccgtgcgttggcgcgtacccaaaggggatccgctcgtcgggagaaggccaagcggcgcgtcgcgaggctgcatcacgaggtcgcgttgcgccgtgacactgccctgcatgcgctgacgaaacgactggcgaccagtttcgccacggtcgctgtcgaagacctgcacgtggcgggcatgacccgctcggcccgcggcaccgtcgccgccccaggccaacgggtgcggcagaaagccggcctcaaccgggcgatcctcgactccgcccccggcgagctgcgccgccagctcgcttataagacttcttggacggctcccagctcgcggtcctggaccgctggtggccctccagcaagacctgctcgcactgcggctggcaagacacaagccagacgctcgccgaccgggtgttccactgcgccacctgcggcctctccatggaccgggacctga

SEQ ID NO: 64478 - DNA, 28 bp, Streptomyces agglomeratus sp.
gtgcagcccgtacgcgtagggaacgacc

SEQ ID NO: 64479 - DNA, 28 bp, Streptomyces agglomeratus sp.
gtgcagcccgtatgcgtagggaacgacc

SEQ ID NO: 64480 - DNA, 28 bp, Streptomyces agglomeratus sp.
gtgcagcccgtacgtgtagggaacgacc

SEQ ID NO: 64481 - DNA, 28 bp, Streptomyces agglomeratus sp.
gtgcagcccgtacgcgtagggaacgacc

SEQ ID NO: 64482 - DNA, 28 bp, Streptomyces agglomeratus sp.
gtgtagctcgtacgcgtaggaaacgacc

SEQ ID NO: 64483 - DNA, 19 bp, Streptomyces agglomeratus sp.
gcctgcgcctgcgccagtt

SEQ ID NO: 64484 - DNA, 1533 bp, Streptomyces hyalinus sp.
atggtcgagacgaccatccgatcctttcgattcacgctcgatcccacggccgaccaggagatgaacctcacgcgccacgccggcgcggcacgatgggcctacaactgggccctggggcacaagatcgcggcctacgatcttcgcagagcggagatttcggcattgatcgagagcgggcacaccgaggcttcggcgaaaaaggcgacgacggttcgcattccgagcaaggcggccattcaaaaacatctgaacaggatcaagggcgactcccgtcgccaccttcccgagccccaggcgtacgggccgcatccgccctgcccctggtggcacgaggtctcgacgcacgcgttccaatccgcgatgacggactgcgacaccgcctgggacaactgggtgaagtccgtcgccggcaaacgcgcgggccccagggtgggcatgccccgcttcaagcgcaagggcagggcccgcgactcgttccgtctgtacggcatcggcctgcgcctggacggctaccgtcggatcagccttccccgcatcggctcggtgcgcctgcacgattcggcccgccgactgggacggctgatcacgcgggggatcgcgaccatcaagaacgtgaccgtcacgcgtcgcggatcccgctggtacgcctgcgtgttgaccgaagtgaccgacgcgagcccgcccacgcgagcgcggcgcgccggtggcacggtcggggtggacctgggggtgcgatggttgatcacgctctcccgaccactggatcccgccgtgcccgacagcgacacgacgccgaacccgcggtggatcgaacgagacgcccgacgcctgcgcaaggcacatcgcaggttctcccgcaccgtccgcggctcacagcgccgtcgccgggccgcccgggcactgggcgcgatccacgcccgcgtcgccgaacgccgggcggggcatctgcatcgactcaccaagcgcatcaccaccaccttcgacgtcatcggcctcgaacgcttcgatctcgtccgggcgagcgcgtccgcgcgcgggacggtcgagcaacccggaaccaacgtcggcgtcaagtcccgcttcaaccgcctcctgcgggacgcggccctgggcgagacccgccgccagatcgactacaaggcacgccgctacggctcgaccgtcgtacacctcgcccccggaacgcccaccaatgcgatctgttcgtcgtgcgcgtgggaaaacccacccccgcgcctgggcaccgatcgtttcgcgtgtgggaagtgcggcctgcgcgtacgccgcgccgtcaactcggcgcgcaacatcgaacgattgacacatcgatcggtacacgtcgcccctgacacagaggagacgcgaaacgctcgtggagtggtctcgtccgacgcctcaccggcgccgaacgcgaccacggggaagcgagaaggcccgcaagggtcaccccgacggagcaatccgtcggtcaccgggtccaccccggtcgagtcggagaccgccaccagtgcgggcatcccgatcacccgatga

SEQ ID NO: 64485 - DNA, 1662 bp, Micrococcus yunnanensis sp.
atgacgactaccacgggtaccgccctggccccgaggctgcgcgcgttcaagcaccgcctggaccccaaccccgcccaggccaccctgctggcccagtacgccggcgccgcgcgcgtggcctacaacatgctcatcgcccacaaccgggccgccctggccgccggtgccgcccgtcgcaccgagctggccgagagcgggctggccggccccgagctggccgcgcgcatgaaggccgagcgcgccgccgaccccaccctccgcgtggccagctaccagtcgtactccacggcccacctgaccccgctgatccgccgccaccgtgaggccgccgccgcgatcgccgccggtgccgacccggccgaagcatggaccgacgagcgatacgccgagccctggatgcacaccgtgccccgccgcgtcctggtctccggcctccagaacgccgcgaaggccaccgagaactggatggcctccgcctccggcacgcgcgccggtgcacgcgtcggcctgccgcggttcaagaagaagggccggtcccgggacagcttcaccatccccgcccccgaggtcatcggcgccgcgggcaccccctacaagcgcggcgagccccgccgcggggtgatcaccgaccaccggcacctgcgcctggcctccctggggaccatccgcacctacgacaagaccagccgcctggtccgcgcctgccgccgcggcgcccagatccggtccatgaccatctcccaggctggcggacggtggtacgcctcgatcctcgttgccgaccccacccccatccggaccgggcccagccgtcgccagcgcgccaacggcgccgtcggcgtggatctgggcgtcaagcacctggccgccctctccaccggcgaggtcatcgacaacggccgccccggtgcccgccaggccgcccgcctgacccgcctccagcgcgcctacgcccgcacccagcccggctcgaaccgccgcgagcgcgtgcgccggcagatcgcggcactccatcacgggatcgccctacgtcgggcggggctgctgcatcaggtgtccacgagactggcgacggacttcgcggtggtcgccctggaggacctgaacgtggcggggatgacccgttcggcccgcgggacgctcgaggcgccgggtaggaacgtggccgccaagtccgggttgaaccgggcgatcctggatgccgggctggggatgctgcgccggcagctggactacaagacctcctgggcagggtcccaggtgaagatgatcgaccgattcgcgccctcctcgaaggcgtgctcgcgctgcgggacagtcaaatccacgctgtccctggccgagcggaccttcgagtgcgaggcctgccacctggtgatcgaccgcgacgtgaacgccgcgatcaacatccgggcgtgggctgtgcaggaggagcgtggagcaggggtcgagctcgcccgaggccgtcgggagagtcgaaacggacgtggagctgctgtctcgggcccgccatctggcggggccgcggggcaggggcgtggaagcgtcaagcccgcaccccagggtgtgggcatgtccagccgggcaactggctggtcatcccaacccccctcaaccgaaggggaaagcgcagagcgcggagcatccgccctggccaggtag

SEQ ID NO: 64486 - DNA, 29 bp, Micrococcus yunnanensis sp.
ggaggccccgcgcacgcagggatgagccc

SEQ ID NO: 64487 - DNA, 29 bp, Micrococcus yunnanensis sp.
ggaggccccgcgcacgcagggatgagccc

SEQ ID NO: 64488 - DNA, 29 bp, Micrococcus yunnanensis sp.
ggaggccccgcgcacgcagggatgagccc

SEQ ID NO: 64489 - DNA, 29 bp, Micrococcus yunnanensis sp.
ggaagccccgcgcacgcagggatgagccc

SEQ ID NO: 64490 - DNA, 29 bp, Micrococcus yunnanensis sp.
ggaagccccgcgcacgcagggatgagcca

SEQ ID NO: 64491 - DNA, 1821 bp, Saccharopolyspora rectivirgula sp.
gtggctcaagccgaggctcctcgacgtctccgcgcttataaattcgcgctggatcccaccgaggcgcagctgagggagtttgagcagcacgcaggaagcgcacggtgggcctacaaccacgccaacgcaatcctatcccgctactccgacactctgcggaaccgctggaatgcttggattgcccagcaccacggcctcagccgtgagcagctgtatgcgctcccggacagggagcgcacagccattcaggctgcggcacgggcggcagtgaaggcagaaaacgcccagcttgccgcagaactcaggatcattgacgaccaccgcaaacgggtcacacacaagggaaaaccaagcgtcgagccaggcgagcagcccgctgaggatgcgcctgagcgtgcgtaccagctgtggcgcgagcgcgtggagctcgcccggctgcacgccgaggatccccaggcctaccgggcggaacggaaacgtatcctcgacgaaatccgccccctggttaacgccaccaagcggaagctcatcgagcagggggcgtatcgccccaccgcgatggacatttccactctgtggcgcgagatccgcgacctgccgccagacgagggcggatcaccgtggtggcccgaggtcagcatttacgcgtttaccagcggttttgctcacgccgagaccgcgtggaaaaactatctggaatccctggcggggcggcgtgccggcaggccggtcggcaaaccacggtttaagaaaaagcgccgctcgcgccgcagctttaccctctacggaagcgtcaaacttgtaacctaccgtcgcatccaggtgccgtccattgggtcggtgcgcctgcatggatctgccaaacgcctgcaccgcgcactggagcgccgcggcgggatcatcaagtcgatcaccatctcccagggcggccaccgctggtatgcctccgtactggtggacgaactcgacatcactccgggcagggagacgcagcgtggcccgtcgcggcggcaacgcgaccgcggcgcagtgggtgttgacctgggggttcaccacctcgttgccttgtcggacccgaacgaaaaaacgctggacaatccacggcatctgcgtaaagcccgcaaacggctgctgaaagcccagcgggcgatgtcgcgacggcggggcccggacaagcgcaccggacaggaaccatcgaggcgttgggttaaggcgcggaaccgcgttgctcgcctgcatcacgaactggcggtacgccgcgcaggacacctgcacgagatcaccaagcggttggccactagctacgagctagtagccattgaggatctcaacgtggccgggatgacccgctcggcgcgcggcactatcgaccaacctggcaggggcgtcagggccaaggcggggttgaaccgatcgattctcgacacgtcgccggcagagttccgacgacaactgcagtacaaggcctcttggtacggggccacggtcgctgttatcgaccggtgggcaccgaccagtaggacgtgctcgtcctgtggggcagtgaaagccaagctgtctctggccgagcgcacatttttttgcgagcactgcgggatggagttggaccgcgatatcaacgcggcccggaacatcctggcgttcgcgcaatccgcctaccccggggaggggaaggcgttaaatgcctgcggaggctctgtaagtcctggatcacagtctgtggttcaggctggagctgatgaagctggcagacctgcgcggaaaccgcgcaggtcatcccgggggagtgatcccccggctacccccacaacacgcgcataa

SEQ ID NO: 64492 - DNA, 28 bp, Saccharopolyspora rectivirgula sp.
ggatcacccccgcatacgcggggagcac

SEQ ID NO: 64493 - DNA, 28 bp, Saccharopolyspora rectivirgula sp.
ggatcacccccgcatacgcggggagcac

SEQ ID NO: 64494 - DNA, 28 bp, Saccharopolyspora rectivirgula sp.
ggatcacccccgcatacgcggggagcac

SEQ ID NO: 64495 - DNA, 28 bp, Saccharopolyspora rectivirgula sp.
ggatcacccccgcatacgcggggagcac

SEQ ID NO: 64496 - DNA, 28 bp, Saccharopolyspora rectivirgula sp.
ggatcacccccgcatacgcggggagcac

SEQ ID NO: 64497 - DNA, 28 bp, Saccharopolyspora rectivirgula sp.
ggatcacccccgcatacgcggggagcac

SEQ ID NO: 64498 - DNA, 28 bp, Saccharopolyspora rectivirgula sp.
ggatcacccccgcatacgcggggagcac

SEQ ID NO: 64499 - DNA, 28 bp, Saccharopolyspora rectivirgula sp.
gtctgttccgtgcgcacaggggtagccc

SEQ ID NO: 64500 - DNA, 28 bp, Saccharopolyspora rectivirgula sp.
gtctgttccgtgcgcacaggggtagccc

SEQ ID NO: 64501 - DNA, 28 bp, Saccharopolyspora rectivirgula sp.
gtctgttccgtgcgcacaggggtagccc

SEQ ID NO: 64502 - DNA, 28 bp, Saccharopolyspora rectivirgula sp.
gtctgttccgtgcgcacaggggtagccc

SEQ ID NO: 64503 - DNA, 28 bp, Saccharopolyspora rectivirgula sp.
gcggaatccccgcgtgcgcggggagcac

SEQ ID NO: 64504 - DNA, 28 bp, Saccharopolyspora rectivirgula sp.
ggatcatccccgcgtgcgcggggagcac

SEQ ID NO: 64505 - DNA, 28 bp, Saccharopolyspora rectivirgula sp.
ggatcatccccgcgtgcgcggggagcac

SEQ ID NO: 64506 - DNA, 28 bp, Saccharopolyspora rectivirgula sp.
ggatcatccccgcgtgcgcggggagcac

SEQ ID NO: 64507 - DNA, 28 bp, Saccharopolyspora rectivirgula sp.
ggatcatccccgcgtgcgcggggagcac

SEQ ID NO: 64508 - DNA, 28 bp, Saccharopolyspora rectivirgula sp.
ggatcatccccgcgtgcgcggggagcac

SEQ ID NO: 64509 - DNA, 28 bp, Saccharopolyspora rectivirgula sp.
ggatcatccccgcgtgcgcggggagcac

SEQ ID NO: 64510 - DNA, 28 bp, Saccharopolyspora rectivirgula sp.
ggatcatccccgcgtgcgcggggagcac

SEQ ID NO: 64511 - DNA, 1458 bp, Mycobacterium heckeshornense sp.
atggtccgcagtgtgggtgatgatctgcgcgcgtaccggttcgcgctcgacctcaggcccgctcagctgcgagcggtggccgagcatgcgggcgcagcccgctgggcctacaaccacgccctcggggtcaagttcgccgccctcaagcagcggcaaacggtgatcgcagagcttgtcaccgccggcgtcgatgctcaggctgctgctcggcgagcgccgcggatcccaaccagaccgcaaatccagaaagacctcaacgcgaccaaaggtgatagccgctcgggtgtcgacggcctgtgcccgtggtggtggaccgcttcaacgtatgcgttccagtcggcgatgatcgatgcggatcgtgcgtggcacaactggatgtcgtcggtcaccggccagcgtgccggcaggcgggtgggccgtccacgcttcaaaagcaaacaccgttgccgcgattcattccgcatccaccacaacgtcaaacagcccaccatcaggccggacactagcgggtatcggcggttgatcgttccccgacttgggtcgctacggacccacgattccacgaagcggctgcgccgcgcgctagaccggggcgcagtgatccagtcggtgacgatcagccgcggcgggcaccgatggtatgccagcgttctcgtcaaaacgccagatgctcccgccgttggcccgagccgcgcccagcggaaggccggaatcgtgggcgtggatatcggcgtccacagcttggcggcgttgtcgaccggcgaactcgtggtcaatccccgccacttgaattcgtcatgtgaccgtctaggagccgcgcagcgagccctcgcacgctgccagaaaggatcgaaccgacggcgccgggctgcacgactgctgggccgccggcatcacgaattggcggagcggcgcgcgacagccctgcaccaactcaccaaacggttagcgacctgctggagcgtggtggccgttgaagaccttcacgtggcaggcatgatcagatcagcccgcggaaccgtcgacaagcccggacgcaacgtccgcgcaaaatctgcattgaatcgagcgatcctcgatgttgcccctggcgagctgcgccgccagctcgcctacaaaacagtctggtacgggtcatccctagtggtctgcgaccggttctacccctcaacccaaacatgctcggcgtgcggagcgaaagccaaactcacgctcgctgatcgtgtattccgctgcaccgcatgcggtttcggtcctaccgaccgagacatcaacgcggcgcgcaacatcgccgcaaatgcggccgtcgcctcgggcgccggggagacgctaaacgcccgccgagcagaccaacagcacctaccccaagtgggaccatgccgccggcctgcaatgaagcgggaaggccaccaccagtccaaaacggatagtggccacctcagccgggcaaccggctga

SEQ ID NO: 64512 - DNA, 25 bp, Mycobacterium heckeshornense sp.
gttgccgccgttggcgccgttgccg

SEQ ID NO: 64513 - DNA, 2001 bp, Streptomyces sp.
gtgcctgtggtggagttgacgcggggtttccggtttgctctggatgtttcgccgcgggtgggggcggagttggcgcggcatgcgggggcggcgcggtgggcgtacaactacgcgttggcgaagaagaccgcttcctatcgtgcgtgggcgcagcggcgtaatgctctggtggatgcgggtgtgggcaaggcggaggcgtcgaagcggttgagggcacaggctgctctgcgggggcgtgaggcggcagcgtgggagtatcaccgcaaggtgctggtgtcgtggacgcgtaggaatcccaagctggtacgggagcccgccaacgctgatcctgaggtgctggcgcgtctgagggagctgcgtgaggatgtcgagcggggcagcctggagcatcgtcggctgctggctgaggcgcgggcttggtgcgatgcggccaagggcgggcagttcgcggcgggggatcggtttccgtcggcgatggatatctgtgcgttgtggcgtgatgagcgtgacgtagtgtgctcgggcgaggatggcccttggcacggggaggtgtccagttatgcgttctcgggcgggtttgaccgggcggagcgggcgtggaagaactggactgacagtctcgccgggctgcgggcggggcgtgcggtggggtttccccggttcaagaagaagggccgcagtacggattcgttcatgctgtgccacgacgtgaaccatccggccatccgcatcgagcagcaccaaggcgcgggtgcctatcactatcttcagctgccgaagatcggccgggtgcggacatgggacgacgcccgccgcctggccaagctggtgaagagtgggcgggcggtgatctcgtcggtgacgatcagccgggccgcggaccgctggtacgcctccgtggtctgccgcatcgagcaggatgtcccggtggcgttcaagcacaccgctgctgacggtacgagtgctctctacctcagccactctgaggccatcacggctgccgcggcgtgtgcgaagcaggccttggccgcacaggcagagcagcacaagcggcgcggagaccagcaggccgccgcgaaactcgcccagatcacccacgccctcgccccctgctcaccgggcacctgcgccgacgcggccgagcgggcccgcgcccgccagctcgcccaggtccacggcgggccggtgcagcgtgtcgggaagaacacccctacccagcgggtgggcggcctcgtcggggtggacctggggtcgaaacatcttgccaccctcaccgcgcgcctggaccagtccgatcctggctcgatgaccgtggccgcccccaagagcctcaacaccatgctgggtaaactcgcgcgcgcccagcaggtgctgtcacggaagatgaagtcctctggccggcgccagaaggcggcccgccgggtggcccggatccaccacaaggtggccctgcaccgcgccggagcccttcatgacgtctccaagcgtctgaccactggcttcacccaggtggcgatcgagaacctgaacctggtccagctcaccgcctccagcaaaggaacagcagaaaaccccggcaagaacgtgaaggtgaaagcagccttcaaccggcacctcctcgattcagccctgggtgagctgcgtcgtcagctcacttataaaagcctctggtacgggtccgaactcctggttttggacaagggatcggcaccgaaccagacgtgtggacagtgcggagagcgaaacccaaactccccgcccctccacgcgcgcttcacctgcttcacgtgcggtcataccgcggaccgcacgcacaacagcgccagcgccatccggcggctcgcgcgagagcagatcgcggcagtggcctccgataggggggacactcaaaacgctcgccgagcctcagtaagacccgacaacccacgggaaaccgggcatggagcgatgaaacgagaagaccccggccacgccgctggccgcgggccctccagcgggtaa

SEQ ID NO: 64514 - DNA, 1044 bp, Streptomyces sp.
gtgaagaagcccggcatccggctggccacgcaccgccggctgcggatcgggtcgttcggtgagatgcgcctgcacgactccggcaaccgcctgttccgccaggtcgcccgcggtgaagccgtcgcgcagtcggtgaccgtctcccgcggcgggcaccgctggtacgcgtccgtgctgtgtaaggtcaccacgggcctccccgaccgcccgacacgccagcaggccgaacgcggcaaggtcggcgtcgacctgggcgtgaaggtcctcgccgggctctccaagcccctccccactgacgggcccgtcaaggtccgcgggggcggtctgctggtggacaacccacggccgctacgcgcggcgatgcaggggctggcgaaggcccagcgagtgctgtcacggaagcagaaggggtccaaggggcgggagaaggcccggcaacgagtcggccggctgcaccaccaggtcgccatccgtcgcaacgccgtcctccatcaggtcaccaaagccctcgctacacacttctcgatcgtgtcagtggagaacctccacgtcgccggaatgacccgctcggcccgcggaaccgtggacaccccaggacggcgcgtacggcaaaaagccggcctgaaccgagcaaccctcgactccgcccccggcgagctgcgccggcaactcgcctacaagacttcctggtacgggtcacaactggcggtcctcgaccgctggtggccctccagcaagacctgctcgaactgcggatggcaacacccaagcctgacgctggccgacaggacgttccactgcaccaactgcggcctgacgatggaccgggacctcaacgcggccctcaacatcgaacggcacaccgaatcacccaacgtcgccgctgatagaggggagacggaaaacgcccgccgagcacctgtcagactccccggcccccggggccggggagcagggtgcggcgaagcgggaaaacgctggcccatttgggccggcgccacctcggcggagcaatccgccgacactcccactccaacgccatga

SEQ ID NO: 64515 - DNA, 1389 bp, Streptomyces sp.
gtgaccgagatcaagcgcgccttccgcttcgccctggaccccaccccggcgcagaccgagttcctccagcgctacgcgaacgcctcccgctgcgccttcaacttcgcccacgccttcatgctcgcccatcaccacaactggcaccgcggccgcaacaccctgatcgccgccggcatggacaaggccgaggcgaccaagaaggcgccgcgggtgaagatgcccggccgggaccgggcgcaggccttctggcgcgatacccgcgggcaggggttcgtcggcccgctccgcgaaggggccgagcgggccggtgcgtacgtgtggtgggagggggtcaacaaccgggcctactacacggcgttcgaggacgcggcgaccgcgtggaagaactacctggactcggccgccggccgccgggcgggcgagcgggtggggctgccccggttcaaggccaagggccgctgccgggagtccttccggctggtccacaacaccaagaagcccgagatccgtttcatcgagccacgccggctgcggatccccggcggcggcggtcagcccgcgttcaccgtccggctccaccagcgcgcgtcccgcctcatcgccctcatcgaggcggggaaggccgtgatcacctccgtgaccgtcgccagggccgggcaccgctggtacgcgtcggtgctgtgcaccgtcgaccaggcgatccccgaccagcccacctgccgccagcgccaggccggccgtatcggcgtcgacctcggcgtcaagagcctcctcgccctcaccgaccccctccacctgacccccggaacccccgcagccaccctggtcggcaacccccgccactacgacaacatcgcgcgcaaactcgcccgggcgcagcgccagatggcccgccgccacgtcaagggcgcccggcagcagtccaagggattccaggaagcccgggaccgggtggccaggctccaggcacagctcgccgcccgccgcgtcaccggcctgcacctgatctccaaacggctcgtccagcagtacagcgagatcgcgctggagaccctcaacaccaagggcatgacccgctccgcgaagggcaccgtggaccggcccggccgcaacgtgcgcgcgaaggccggcctcaaccgcgcaatcctcgacgcctccttccgcgaactcaaccggcagatcgagtacaaggcccgctggcacggcgtccaggtcgcccgcgtccccaccttcttcccctcctcccgcacctgctcgacctgcggatggaccaacacgacacaaaccctcaaagaccgcacattccactgcgaaagctgcacaatgatcctcgaccgcgacaccaacgcggcccgcaacatcaagaaacacgccgtacccgtccagtga

SEQ ID NO: 64516 - DNA, 29 bp, Streptomyces sp.
ccggtgcccccgcacgcaggggtggtccc

SEQ ID NO: 64517 - DNA, 29 bp, Streptomyces sp.
ccggtgcccccgcacgcaggggtggtccc

SEQ ID NO: 64518 - DNA, 29 bp, Streptomyces sp.
ccggtgcccccgcacgcaggggttgtccc

SEQ ID NO: 64519 - DNA, 29 bp, Streptomyces sp.
ccggtgcccccgcacgcaggggtggtccc

SEQ ID NO: 64520 - DNA, 29 bp, Streptomyces sp.
ccggtgcccccgcacgcaggggtggtccc

SEQ ID NO: 64521 - DNA, 29 bp, Streptomyces sp.
ccggtgcccccgcacgcaggggtggtccc

SEQ ID NO: 64522 - DNA, 27 bp, Streptomyces sp.
ccggtgcccccgcacgcaggggtggtc

SEQ ID NO: 64523 - DNA, 29 bp, Streptomyces sp.
ccggtgcccccgcaagcaggggtggtccc

SEQ ID NO: 64524 - DNA, 18 bp, Streptomyces sp.
caggtgccccgcacgcct

SEQ ID NO: 64525 - DNA, 2622 bp, Streptomyces europaeiscabiei sp.
ttgggcagtgagcagagggatcgtttccccaatgaccgcgtgggcgtaggcgggggtctgcagcaggtcggggatcaccatgggctcgtaggcgtggacggtcgcggcgtccgcctccaggccgacatacacgctctggggaatgtcgccgtagacgtgccaccagccctgctgtccggattcccgggccatccgcatgagcgagtcgatgacctgctggtccgtcactccgtagatcgcgcacagatcgcgtacatcgcgggggctgatggcgcggcggccgttctccaggtgactgatcttgggctgggagaccatgagccgctcggctgcttctgcgctcttcagcccgctggcctgacgcagccggcggagctcggcccccaggcggcgccttctgacggtgggattgctgttcgccactatggcggtctacctccggctccaagtcatcgtgctggaacgcagattgtcatggaacaggcatcgttgatcatgtgccatgccgtcgggttccgttgggcagccgaagcggactgtgtcttcgtcatttgcctcaccacaggaaccaccaggcgatccaccaggtgcgatcgaacgcaggcacgagtgtttgcttcacatgtcagcaaaggctcttgccttgctcgagctgaggcaattgccagtgtaagagtctttttcgactgcccgacgaacacgacggtatggcgcgtgaccggcagcctttaccccatggcaacctgcggtccagcacagcgacttggaaccggaggtacaccgcgcgtggcggcgagatccaatcccgcagggccagggcacggtcccgctgccgtgacgatgcccgtaacagaggtgttgcgggcgtaccggttcaccctggacccctccgatcgcgagcgcgccgccctgtcccgctattccggcgcttgccggtgggcctacaactacgccgtggccaagaagacccaagcccaccgggcatgggccgaccgccggaccgcctacgtcgaggcggggctgaccgaagccgaggccaaggaacggatcaaggccgacggcgccgagctcaccgaccgcatcaaggtgtgggaccaccaccgcaagagcctcacactcaccgtcgtcggcaagcctccgccggccgcgatgcgatccccggcagggcaggaggccctcgtccgtcggctggccaccgcccgcgcggacgccgccggaaccagccgtgaacgcgcactcctggccgaaggccgtgccatggtgaacgcgctcaaggcccaggcgttccgtgccggtttccgcacgccgaccgcaaccgacaccagcaacctgtggcggatggaacgcgatctgcccaaggaggagggcggcagcccgtggtggagcgaggtcaacgtctactgcttcacctccggcttcgaccgcgcccaggtcgcctggaagtactggcaggactcgctctccggccgtcacgccggccagcgtcacggatacccccgcttcaagaagaaaggccacgcagaatcgttttctctcttccacgacgtgatgaggccgatcatccgcctggagggctaccggcgcctggtgatgcccggtctgggcagcatccgcatccacgactccggcaagcgcctcgcgcggctcgtcgaccgcgggcaggctgtcatccagtccgtgaccgtcagccgaggcggccaccgctggtacgcctccgtgctggccaaggtgcagcaggacgtgcccgtgctgtgggagcacgtccacgacgacggcacccgcaccccgtacctgagccgcatccaggccgagaaggcctccgagaacggcggacgcgtcgagcagatcggccgccccaccgcccgccagcgtgccggcggcctcgtcggcgtcgacctcggctcccaccacctggccaccctgtccagccctctcgacccggccgaccccgccaccaccgtcgtacacctcccccgtcttctcgccgacagtctggccaggctctcgaaggcccagcgcgcgatgtcccgttgccaacaggggtcggggcggtggaggaaggcgaccgcccgggtctcccgcgcccaccagcaggtcagggtgcgacgcgcctcgttcctgcacggcctgtccaagaagctggccaccggtttcacccacgtggcgatcgaggacccggacatcaccgctctcaccacctcgaccgagggcacgcgcggcaagccccgcaagaacgctacggccaaggcccgcctcaaccagcatctcctggacgccggcctgggcagcctgcgcaagaagctcgcatacaagaccgcctggtacggctcacaactcgtcgtcctcgaccacggtgagcccgtcaccgcctcctgcgcgacgtgcaaggagcgaaacccaagctccgacccatcgtgcagcaaggtccactgcccctcgtgcggggcggtcgtacaccgacacgtgaacagcaccgcgagcatcgttgacgcggcgcacagaaaactcaagacggtcgcctccgacaggggggagacccaaaacgctcgccgagcccctggaagtcccggagcccgcaaggctcccgggcaaggggcatcgaagcgagaagacaccggctga

SEQ ID NO: 64526 - DNA, 2091 bp, Pseudactinotalea sp.
atgtccacgccgatgggctggaccgcggtgaacggtggcgacgctacttcgccaaccacccgcgtgtcatcgccgcctggggagccgcgaacgggggcctgcccacgtgcggctgccgccgatgcgacccgcgcggaatcctccccacggcgaacgtcgtcgccggcccggccgggtgagcgacacgcccgggcgcgaacgagcaggtatccgatcccgaacacatacgtagtagaccgcccctctgcagaaggagaccgacatggacaaagcagcctcgactgcgggccgtgccctgtccgacgttccggggcgttgcatcagtccagtcaagccgcacaccggaggagcatgaccggcgctaagcagaagacacccatccgggtggtgcgattctccatcgaccactcggcgctgactcctgcccaggtcgtcgcctttgcccgtcacgccggtgctgcccggcagacatggaactgggccctggggcgctggatggactggcgcaacaacacgaagttctatgttgactacaaggtgttcaaggctgctggtatggggcccggcctgagcactgacgatctgattcaggttatcgagagggctgtctcgattcgtcaggacgataagtggatggacgctgcgtgggatgaggctcgccagattcacggcgagtgggaccagttccagaaggcgagcaccctgcagagcctctaccttgcgggggcccaggagccattcgatccttcgcgcgacgatggcatcaacccgtaccactggtgggttaccgagggcgacaagtccggtctaccgaaggcagagcgccacaacgtgaactccggtgccacgtacaccgctccgctacgcgccttcgaggaggccgtggggcggttctataagctgcccggcaagaagggcaccccgaagttcaagtccaagcatgacgacgagcagggtttctgcatccagaggctcacagaaacagggttgagcccgtggcgggcgatcgagggcgggcaccgcatcaaggtgcccagcatcgggtccatccgcgtggttcagagcacgaagcggcttcgacagctcatcaagcggggtgggaagaccacctcagcccggttcacccgcaggggcgggaagtggttcgtgtccgtcagcgtcgccttcgacctttcggcccccagggtgcagcgacctgcgcgcctgagccgtcgccagcgggccggcgggagcactggcgtcgaccttggggtcaaccgcctggccaccctgtccagcggggaccagttcccgaaccgccgactgctacgcaagtcgatggccgagatcaagcgcctccagcggaagttcgaccggcagcaccgcgccggatcccccgaatgcttcaacgaggacggaacccacaagaagaggtgccgttggggccgagaggacggcccggcgatgtcacgttcggcccagacgacgaagcgtcagctgcgccggattcatgacctgacggcccgacgccgtgctggtgtccttcacgagatcaccaaagatctggcgacccggttcgagctgatcggggtcgaagacctgaacgtcgcgggcatgaccgccaagtccaagccgaagccagacccggaccgtccgggacatttcctgccgaaccggcgcgcggccaaggccggactgaaccgggccatcctcgacgtcggtttctacgagttcaagcgccaactcgggtacaagaccgagtggtacgggtcgaccatgcagatggtccaccggtacgcggcaacgagcaagacctgctcaggctgtggttgggtaaaacccaagctcaccctggccgagcggaccttcaactgcacgcaatgcggcctggcgatggaccgggaccacaacgcggcagtgaacatccgtgccctcgccctagagggtgcagcgcctatggagagggagcagcctgctcccgtgggcgcggccgaaaagcgacaccgggaccctgtgtcccaccgtcgtcggccgaaaagtctcgcaccatgcgagtcaacgaggcccgtgagggacctctcaccccctgcaacgcaggaagagacagcctga

SEQ ID NO: 64527 - DNA, 27 bp, Pseudactinotalea sp.
ctctcccccacacgcgcgggggtgatc

SEQ ID NO: 64528 - DNA, 27 bp, Pseudactinotalea sp.
ctctcccccacacgcgcgggggtgatc

SEQ ID NO: 64529 - DNA, 27 bp, Pseudactinotalea sp.
ctctcccccacacgcgcgggggtgatc

SEQ ID NO: 64530 - DNA, 27 bp, Pseudactinotalea sp.
ctcttctccgcacgcgcgggggtgatc

SEQ ID NO: 64531 - DNA, 1554 bp, Streptomyces bauhiniae sp.
atgcagcaggagatcctcaaagcattccggtttgcgctagaccccactcctagccagctagagggccttgcccagcatgccggcgccgcgcggtgggcgttcaaccacgcgctcgggatgaaggtggccgcgcatcagcagtggcgcagcgccgttcaggagctggtggataacgggatgtcagaggcccaggcgcgcaaggaggtgcgcgtgcccgtgccgacgaaggcggtcgtccagaagcacttgaaccagatcaagggtgactcgcgcggcgatgcattgccggatggcagcctggggccggagcggccctgtccgtggtggcacgaggtgaacacacatgccttccagtccgctttcatcgacgccgaccgggcatggaagaactggctcgactccctgaagggcacccgagctggccggcgggtgggatacccgaggttcaagaagaaggggcgcgcccgcgaagcgttccggctgcaccataacgtgaagcagccgaccgttcggctagagagctatcgtcggctccgacttccgaccatcggctcggtgcgcttgcacgacaccgccaagcggatgagccgttcgatcgggcgaggcgatgcggtaatccagtcggtaacggtatcccgcgcagggcaacggtggtacgcctccgtcctctgtaaggtcaacgccgaccttcctgaccagcccactcgccgccagtgggaccgcggccgcgtcggtgtcgacctcggcgtcaagcacctcgccgtcctgtcccagcctctggagaccgacgcagccaccacagctttcgtcagcaacccccgtcacatcaggaaggcagagcagcagctcgccaaggcccagcgcgccctttcccgaacgcagaaggggtcggcgcgccgcgcgaaggcccgccgccgagtcggccgcgtgcaccacgaagtcgccgtccgacgcagcaccgtcctgcacgcactgaccaaacaactggcgactcgcttcgccgaggtggcgatcgaggacctgcacgtctccgggatgacccggtcatcctccggcacccccgacaagcccggccgacacgtcaagcagaaggccggcctcaaccgggccatcctcgacaccgcccccggcgagctgcgccgccagctcacctacaagactcgctggtacggatccaccctcgcggtcctcgaccgctggttcccctccagcaagacctgctccgcctgcggatggcaaaacccacgcctcaccctcgcggacaggacgttccactgcaccaactgctccaccacgatcgaccgagacctcaacgccgcacgcaacatcgcccagcacgcggtcctcgccgatcaactcctcgcccccggtagaggggagacacaaaacgcccgcggagcccccataagaccacccggccctcgggccggaggacaggaggcgatgaaacgggaagacaccagcccagcaaggccggtgccacctcagcggagcgatccgctgacgctcttcaccctcgacgacacaggacacgaaacggcaaagcgcgcctag

SEQ ID NO: 64532 - DNA, 29 bp, Streptomyces bauhiniae sp.
gtccgggccgtgcgcgtggggagcgaccg

SEQ ID NO: 64533 - DNA, 29 bp, Streptomyces bauhiniae sp.
gtccgggccgtgcgcgtggggagcgaccg

SEQ ID NO: 64534 - DNA, 29 bp, Streptomyces bauhiniae sp.
gtccgggccgtgcgcgtggggagcgaccg

SEQ ID NO: 64535 - DNA, 29 bp, Streptomyces bauhiniae sp.
gtccgggccgtgcgcgtggggagcgacgg

SEQ ID NO: 64536 - DNA, 1299 bp, Mycobacterium hodleri sp.
ctgagcagctgcgcgcgtaccggttcgcgctggacctcaccgaggcccaggcgtctgccgtcgcgcaacacgccggcgccgcacgctgggcctacaaccacgccctggccgccaaattcgccgcactcgacgagcgccacaccgccatcaccctggcggtggacgccggtgcggaccgagctgacgcagccaagcgggcgccgaaagtgcctggcaaacccgacattcagaagacgctcaacacggcgaagggcgacgaccgccgcggcgaggacggactctgccttggtggcacaccgtcagcacctacaccttccaatccgccttcgccgacgccgaccgcgcctggaagaactggctcgactcacgcaccggaagacggaaaggccgccgggtcggccggcctcggttcaagaccaaacaccacagccgcgacagcttccgcattcaccacaacgtcaagaacccccccagcatccgaccagacaccggctaccgaagaatcatcatcccccgcctcggctccttgcgcgtgcactcatcgaccaaaccgcttcgccgcgctctcggccgaggagccgtcatccagtcagtgacgatcgcccgcggcggccaccgctggtacgccagcatcctcaccaagcaacctcacaccgaggtcacctccacgcaccgtcaacgccaagccggcaccgtcggcgtcgacctcgcgtccacaccctcgcagccctatccactggtgagacgatcgacaacccgcggcacctggacgccgcacggacccgtctcacgaaggcgcagcgagcactctcgcgcacccagaaaggctcgaaccgccgccgccgagcagctcgactcgtcggccgcaggcaccacgaagtcgccgaacgccgcgcaacgaccctgcacgccctcaccaagacgctggccacacagtggtcgaccatcgcgatcgaggacctcaacgtcgccggcatgacccgatcggcccgcggcacagtggaccacccccggccgaaacgtccgggcgaaaacaggactcaaccgcgccattctcgatgccgccccccggagaactgcgccgccaactcgagtacaagacgaactggtacggcagcagcatcacggtcatcggccggttctttccgtccagtcgaacgtgttcagcgtgcggagcgaaagccaagctcacactcgctgatcgcgtataccgatgcgctgcatgcggattcaccgcagacagagacgtcaatgcagccatcaacatcgccgcccaggcggccgtcgccctcggcatga

SEQ ID NO: 64537 - DNA, 22 bp, Mycobacterium hodleri sp.
tccacgcgcggacgggtgagcc

SEQ ID NO: 64538 - DNA, 1899 bp, unknown
  TnpB Polynucleotide
atgacgaccgagaccgtcatgcaacagttggcgttcaaggtcgccctcgaccccacccctcgccaggcccgtgccatgggctcccacgccggtggcgcccgcttcgcctacaactggggcatcgcccgcatcgccgaggcgctgaagcagcgggaagccgagcggcaggccggcggcgaaccgaccactcccgtgcccgaccacttcgccctgtgcaagctctggacgcagtggaaggacaccgcggaatgggtcgaccgcgccaccggcgaggtcacgcgcggcgtgccgtgggtggccgagaacttcgtcggcacctaccaggccgcgctgcgggacgcggcccgcgcctgggcgaactacttcgactcccgcaccgggcagcgagcaggccgcgccatcggcaagccgcgcttcaagtccaagcgcaccgcccgaaagtccttccaggtgcacgggtcctcgctgcgcctggtatcggcggtgaaggtgaacctgccgaagatcggcacggtcaccgtcatgagcgatgactcccggcacccggccatggcccgctcccgccgccgtgtccccgggcagcggcacatgggcaaccggcgccgctcccgccagctgtggcagcggctccgccacggccaggccctcgccgagcgggccgccgagatcctctcggccgcctacgcggatggcaaccctgaccgggtgctggagcacctgactgccctggcggacgagcgggcccgcgcccgtgctgtggccgctgccgaagagcggctgcaaaaagccaaggccgccgccgccaaggccaaaccggagaagcgggagaaagcccagcagcgggtcgcccaggccgaggaggcgctgcggcgggcgcaggcgatcaccgccaaccgcaaggacggctggagcgcccgcaagctcgcggaggtgtgccgcaccggactcatcaccccggtgcaggccgccgacctggccgaggtgttcggcctgggcgagcagcagcgggcggctctggccgaggcggcgctgcagccccgcctggtcaaggccaccgtcacgctcggcgcagacggcctgtggtggctgtccctgagcgccgaggtaccggtgcgggtacgcaccagccccagccggcggcagcgtgagcgcggcgcgaccggcctggacctgggggtgcgcaacgtggtcacctccagcaaacgcctgggcggtgaccagaacctgcccaacccccgctacctggagcaggccctggtcgagctgcgcgccgcacaaaagcacctgtcccggtgcacccccggctcggcccggcacgccaaggcgaaggcgcgggtcgggctgatccacgccgacgtggcccggctgcgcgagcagcaccaccaccgcctctccacccgcctcgtccggacctttgccggcatcgcggtggaggggtacgacctgcaggagctggcccgccgcggatcggagggcctgccgggcgaggtgcggcgccgccggaaccgggcgctcgccgacaccggcgccgggatgctgcgccagcagctgcagtacaagactgcgcgttacggctcgcacctggtggtggcggagccggacgcccccacaggacgaacgtgcgccacgtgcgggcaggcgaaagccaagcctgtcccgccgtaccacgaggtgttcgcctgtgaagcgtgcggacgcaccaggccgcgccggctgaacacggcgctggccctggaagcggtcgccgcgagttccggctcgccgcatggcgggtcggaccagccgcgtggagaggacgtaagacctgccgcgtctcggcgtggcgggcagtcctcgatgaagcgcgcagcccgctcccggccaccaggccggggtcagacgggcacccccgggccgtaa

SEQ ID NO: 64539 - DNA, 28 bp, unknown
  Direct Repeat
gtccgccccccaggcgcagggacgacgg

SEQ ID NO: 64540 - DNA, 28 bp, unknown
  Direct Repeat
gtccgccccccaggcgcagggacgacgg

SEQ ID NO: 64541 - DNA, 28 bp, unknown
  Direct Repeat
gtccgccccccaggcgcagggacgacgg

SEQ ID NO: 64542 - DNA, 28 bp, unknown
  Direct Repeat
gtccgccccccaggcgcagggacgacgg

SEQ ID NO: 64543 - DNA, 1515 bp, unknown
  TnpB Polynucleotide
atggacgataagatgaagtggtacgcaataccatcatatacaatgaagtgcagattatacttaaataatacgcaaaaagaattgattgaaaaatcgttaaatgggcttagaattgtgtataattcaacactttatgatatgaaaaaagaaggtggatgtacaaaacaaaagaaatcagaagatggaactattgtacattttccagattttaaatacgctgcatcggcagaacatttgaataaacttcgtgaagaaaatccgatgattgggtatgcgaaaccatattcattaagtggtaacaatgggataattcaaagcgatctgaagcgtatgttttctaaaatcagagaaaataaaactggtaactttggtactggtaaatcaatgccacttgaatatattgattataatgagttaaattttatttctaaaaaacatccgagaaggagcatgagtttccaggttaaggcaaaaaatatattcttgaaagaaatttgcgacaataaaggcgataaaacagtcaataataaagttctatatattgatttgggaaagtttaaggacgaaaaatttggagttgcaaaaattcgtggatggaatacaaaaataagatttgatagtaatggagaagttgattttattacttggttgtctataaacccggcaaaagatattactattacaattagtaaagataactgtgatgactattggatttgtttcaaattttcttatacatataataagcagaagaaagtttggcaaggaattcaggtatataaacaaaccaaaaacgtgctaataaatgaaaaagttggtcttgatgttggtaaaaaacatctgataagttgctcaaatgataagatattcaaagacggaaaagttgagaataaacggtttaaatcaaatgagagcgaccatttaaaagcattaaatagaagattatcaagaagatttggatggtcgaattgtaatttcagagacaagcataaagaagatgatacattgcttccatccaaaagatacataaaaacgcagaaaaaagtaagtaaacttcatagaaaaattgcgagaaaacgtaatctttataataatgaggtaagcatgaaattagttgaaaactatggatttattggaatagagtcattaagtgtttctggaatgtttaatgatccgagaacggaagaacagaaagatattaacagtaaagagtttattccaaagagatatattcgtaggacaaatgagaataccgcagacgcagctatgggcgaaatcttgcaaatgataaagtacaaatcagaatggtataacagagtttgtcaggaaataggaagatatttcccttcgtcaaagcgttgtcatgtatgtggatatataaaacgtgatttaacgttaaaggatagggaatggatatgtcctagctgtggaactgttcatgatagagatgaaaacgcagccattggaatagaaatggaagcgtggagaatttatacgaataaaaaagcaagttaa

SEQ ID NO: 64544 - DNA, 1950 bp, unknown
  TnpB Polynucleotide
atgttaatcccgtctccccatcagattttcgcacacacaagctatcctgtattggatggcttgtgcgtgaaaaaatatctttgtgtggtgagtgaagtttattgtgtgtccgttcgcgacaatattgattttgtttgcccgaagaaaacccgagtgaagcgggcgcaagcgggaacgcttgcgcgcggatatcgctttatagctcaacccactgcagaacaagaaaaactcatcaaccgaattttaggggcaagccggtgggtgtggaactggggtttgaacctgtatttgcaacacgaaacgtcacaaaataaaaaagagaaaaataaaaccgttcaaaaatctggtcaagccagaaaatcaaaacacacctcactgtcgtacaacgaagtgtccaatcaactcacacagttgaagaaaacctttcaaacaaagacgcgcaacggtgtgctggttcatgaaaaacactggttgaacacgatccccgatacggtgttgcggcaaagtctgatggatctgggaaacacctggaaagcgtacgaagacggaaaaaacggaaaacgtcgcgacacacctggtaaacccaaattcaaaagcaaaaccaaccaagccgattccgcaacatttcaagtcgatgctcgagtggaatgcaaaaccagttgcattgactcaacccacaacactataaaaattccagggatagaacaaccacacaatgttcttaccttcaaacgaaccgaaaacattctcggagaaatttccagttttgtgattgctcacaaaacgggacagtattacatttctttgtcgatgatcaatattgcacaccgcgatatcatcgcaagtaaggtccatggaaaacacaatttgggctctgcggaagaaaacaaccttgccagtaagttcgttgattttgcatacgatgagtatcccctttgctcaactttgaaccccaagcgtgaaggattgctggccattgacatggcggcaaaatggggtggggtggccacacgtgacggcaaaaccacctatcaactgatctcagaagagcaacgcaagaaggccacccaaaaagaaaccaacaccattcgttttcaacgcgtgcaaagccgtaagattgaagccaaatatcaggaatacggcattactcgtgaagccaatggcgcgtggcccaaagacgcaggaaaactcttggctgagaaagtagctgagcgcaacgaaaagcataaacgaaaacgcacacaaaaaattctgaaaaacaaaacgttaaacaacacagaaaagcaacaacaaattgctgatctgacaaacgtgtttttcgccaaaagccaacgtcagattgctgttgaacaacgtttgtcccaaaaacacacgctcaaacgcaatttcctggtcgacgccattcataaagccaccactcacatcattgagcaaaaccatacggtggtgtgcgaaacactcaatgtcaaagcgatgctcgaagatgagagcaaacattcgggcttcaaaaagagcatcgccaacacctgtataagcgaaattacacggcagttgaagtacaaagcccgatggtatggacgtaatatgatttttgtcagcccatggtttgcctcaagccagctgtgtagcacaaaaggttgtacgtatcaacacacacagttaaaactgtctgacacacattggacgtgtccaatgtgtggtacctatcacgaacgaaacagcaatgcttcgttcaacctgtggtttcagggttggcatttgctcgaagaattcttcgagcaaaactcaacaaaaaacctcgcggatgggtcattcgttaaaggatcacagggtgttgtggaaaaaacggtttcgattgaagagcatcgagcttggcaaaaagccacctcgaaaaaatctcgaagacaaaacgtttctcccacggtagcacggttttcaaaaaccgtgtaa

SEQ ID NO: 64545 - DNA, 1215 bp, Lactobacillus phage sp.
atgcatgctctaaatgatatatctatggagcaatgttgggataactatagaattaaattaacaattaaagaaaagagtggaaattacatgattaattatgcacataaatataggatttacccaaataaggaacaacaagaactaatttggaaaaacatcaatggagctagatttgtttataacactttattagctgatgccaaacagcaatatgaagaaacaggaaagtctaaattaaagctagttacttgggttaaaaacaagccagaaaactactttttaaaagactgtgataacaattgtttggactatgcaagaacaaatttaagccaagcatatcaaaacttctttagaggaattaagaaacatcaaaaggtaggattccccaagtttaaaaactatcataaatgtgcatggtcttataagactagagttcacaaaggtgaaaaaagtattagactagaggatgaccatattaagcttcctaagatttcaccaattaagattgtattacacaggctattaccagatgattgccgaattatctcagcaactgtctcaatgacaaagtctggtgaatactatgtatcaattgggtttgaagtgcctgatgaccattttaagaatgttgattatcacactgataaagccattggattagacttgggaattaaagactttgtcattactagtgatggtaaaaagttttctaatatgcacgctatcaaaaagagtgaaaagaagcttattaaagctgatagagctttagcccgtaaacaaaatggtagtatgggtagggttaaagctaagattaagcgtgctaaagtatatgaacgtttacaaaaccaacgcaaggcatatctgcataatattagcaagtatcttattgttaattatgataaaattgctattgaagacctgaacgttaagggaatgatggctaaccataagctagctaaagctgttggagatgtatcactatatgaatttactcgtcagctacagtacaaggctgattggtatgataaagaagtcaagaagattgacagattctatccttcatctcagacgtgcaatgactgtggatatcggttagaaggagcggataaacttactttaggagaccgtgaatgggcgtgccctaactgtggtgttattcatgaccgtgatatcaatgcggctaaaaacattagagatgaagctttcaaaaaataa

SEQ ID NO: 64546 - DNA, 26 bp, Lactobacillus phage sp.
tgctctaaatgacatacctatggagc

SEQ ID NO: 64547 - DNA, 26 bp, Lactobacillus phage sp.
tgctctaaatgacatacttatggagc

SEQ ID NO: 64548 - DNA, 1122 bp, unknown
  TnpB Polynucleotide
atggattctcaaacagaaataataattaagtcggttaaatttaaactttatcctaacgaaaaacaaaaaaacttaatagagaaaacatttggtgcgactagatttatttataattattttcttagaagaaggcaggatgcttataaagaaaataaagaaactcttagtttttttaaatgtagttcagaattaactcaactaaaaaaacaaaaagaatatttatggttaaatgaaataagtcgtactgctttaaattatagtttacgaaatttagatgatgcttataaaaatttctttaaaactaagaaattcagtaaacaatcttattctgaaacaaatcagacttcatattatgcagataggcaccatgttcatatatctaaattaggtaaagtcagaaccagtgatttaagaggaaatattcctggaaatggaagacatattaatacaactgtttctaagtcaaagactggaaattattattgttctatgagctttgaagtagaaagaaaaagattagttcctactaaaaaagaagctggtattgatttaggtataaaagatttagttataacttctgacggagaaaaattcgataatcctcattttctaacgaaatacgaagaacgtcttaaacgattacaaagaaaactatctaaaaagcaaaaagatagtagcaactatgagaagttaagaattaaaatagctaaattacatgaatatataagtaattgccgttcattatatcttcatagaatttctaaaaaattaatagaagattatgattttataggaatggaagatttaaatgtaaaaggaatgactagaaatcatcatttagctaaagcgttaacagatgtttcgttaggaggacttaagcgtcagttagaatataaagctgattattatggaaaaatagtagaaactatagatagattttatccttccagccagttatgttctaattgcggttatcagaataaagaagttaaaaatttaaatattcgagattgggtttgtccgaaatgcggacagcatcatgatcgagatataaatgcggctaagaatatattattcgaagctaaacgacaatttaatactagagctgagaaaacagcttaa

SEQ ID NO: 64549 - DNA, 702 bp, uncultured Lachnospiraceae sp.
gtgtccaaagacaattgcggaaaatattggatctgtacgacccttcctgttgtatataagccggttaaggttgcaaatcatccggaacccattggtatagatgttggcatcaaagatattgcaatcctttcaaatgggataaaatatgagaaccgcagatacaagaatgggattcatggtgaagtacagatccatcggagattgttggataggcgtttatccagacgctggggatgggcaaacatcaagttccgcgacgcacacaaggctgataaaacgatagttccgtcaaagtcgtattttcgaacacagcaaaagatatctagattcgagcaaaggatcatgaatcaaagaaactgggctaacaataacattactagcgatattgtcaggcaagcctctatgatcggaatcgaatctttgtcgattaaaaacatgttccgaaatcggcatcttgcaaacgccttgtcagatgcgtcaatgagcacgattcttcagcagataaaatataaatcggattggtatggagtgccatgtcatgaaattgcgagatggactccgtcaagcaagcaatgcagtgtttgtggatatataaaaaaggatcttactttatcaatcagaacttggatttgtcctatatgtaaaacgcatcacgatcgtgatgtaaatgcagcgaagaacattttaaaatacgcaatgtaa

SEQ ID NO: 64550 - DNA, 1320 bp, unknown
  TnpB Polynucleotide
atgtggtataaaattcctaactataccatgaagtgtagaatttatcctagtactgctcaacaggaagctattgatagaattcttcatggtattcgtgtggcttataatgttaccatgtatgaaatgattaccaattttaaaaataccaaagaagccaaagataagaaagaagataaaattattcatttccctcagttttcttctatgattaaaaaagaatggcttgactaccttagaaacaattaccttgccgtgaaagaagtccctgctagttgtttgagttcttctgtttacggaatttttgcttgtgatgctaaaaaagcttgggaatctatgggcaaaaagcccgtagaattttataaacctttcttttattcggctaaaaaggctcgcaccagttattcctatcaggaaactttttctaagttttctttttcagaagataacaaaaatgtcctttatattaatttaaataaacttggaaaagtgaaaattcgtggatggaatcagaaaattcgattcgatgaaaaatattctaaagattttgttgattttgtaaaagaatcttctagtaaaactcaatttggtcttactattagtaaaaataatattggggaatattttatctgctttaagcttaacaatgtttataaatttatcaaagaatcagattttaacaagaaagaactcggaattgatgttggattaaaggatattgctatttgttctaacggggataaatacgaaaataaacattttgctaaaaaagaaaaaaggcacaagaaaattcttaatcgtcagtgttctcgtagatggggttggtctaatgaggaatttagaaaggctcataaagataatctcgaaatcatgcctagcaaacgttatgagaaagctatgctatctatgaaaaaactagataataaaattgcaagaaaaagagatttgtataatcatgaaaccactcttaaaattgtttcttctgctacctctcttgcaattgaatctcttaacgtaaaaggaatgatggctaatcatagacttgcttatgctttatccgatgcggctatgtatgatgtattaaataaattgtcctataaatctttatggtatgatagaactattacagccattggacaattcgaccctagtagtcaacgctgtaataattgtggatatcaaaaccctcttgttaaaaagctttctattagagaatgggtatgtccctgttgtggttcgcaccatgatagagatattaatgctgctaaaaatattctttggtatgcaaaacaaaaaaataataataccttgacaaataaataa

SEQ ID NO: 64551 - DNA, 34 bp, unknown
  Direct Repeat
agtcacaacttacatgtgtgcgtggattgaaata

SEQ ID NO: 64552 - DNA, 1407 bp, unknown
  TnpB Polynucleotide
atgtatgtgaaggtaaataactattcaatgaaatgtaggctatatccaaataaagagcaggcaaaaataattgacgatcaaatatacggtgtacaattatatctaaataaatgtatgtataatctgttcaattattttgatggaacgacagaaaagaaagataaagatggaaaaacagtgcattggataaattcaaagacatttggtatgtttacctctgcagcttataaggctaattgtatcgcagccgatagtagaatagggttagcaataccggcatcccttacaacagaaattggtgcgattaaaaccgactttaagaaacggttattgatggctgaaacagtttgggaaaaagcagaaagaatcaaagcaaaatcagagggtaaaaagtataaaaagcaaaaaaagattgttacagatattaagtgtgcaacgataaaatatccagtagaatctataataccaaattattatacaaaagaaaaatcaagaaagagctttacatatgctacctgtttgtcctcagtttcgaaaacaggtaatgataatgtattttttatacaacttgttaaaccaagagcagaaaaaagagtttttcagccagtaaaagtcagaggttggaataaaaaaataagatttggagaaaattgttcaaaaacatttttagaatgggttttggagaacaaaacaaagaagatcacgataactgttagcaaagatcacgaaaataattattggataatttttaaaataccagaatgttatgttaaaactaaagaaaaagtagggaatcaaattggtattgatgttggaatcaaggatttgattattacatcaaacggagtaaaatatccaaataaaaaatataaatataataagcaaaacgagttaaaaagaatagataagagactttcaagaaggttaggttggagaaacataaaatttcgagaaggatacaaagctggtagatttgaaaaaccatctaaaagatatctgaaaacacagatgttatctgcaaagataaatcgaaaaatagcaaataaacgaaatttatggaacaatattgttagtaaggatattgtaataaataatgattatattgcagttgagacattgaatataagtggaatgtttagaaataaacatttgtcaaaagcattagaagatgcaagtatgggagatgtactagcaaaaattaagtataaatctatttggcatgatagaattgtcatagcgattgatagatggagcccatcttcaaaaagatgcaactgctgtggatatattaaaagagacttaaaattgagaactagggaatggatttgtccagtatgtaggacacagcatgacagagatataaatgcggcaagaaatattttgtactattccatgaatctcaattaa

SEQ ID NO: 64553 - DNA, 22 bp, unknown
  Direct Repeat
tattagatgtgtgaattgaaat

SEQ ID NO: 64554 - DNA, 22 bp, unknown
  Direct Repeat
atatagatgtgtgaattgaaat

SEQ ID NO: 64555 - DNA, 22 bp, unknown
  Direct Repeat
atatagatgcgtgaattgaaat

SEQ ID NO: 64556 - DNA, 22 bp, unknown
  Direct Repeat
atatagatgcgtgaattgaaat

SEQ ID NO: 64557 - DNA, 22 bp, unknown
  Direct Repeat
atatagatgcgtgaattgaaat

SEQ ID NO: 64558 - DNA, 22 bp, unknown
  Direct Repeat
atatagatgtatgaattgaaat

SEQ ID NO: 64559 - DNA, 22 bp, unknown
  Direct Repeat
atacagatgtgtgaattgaaat

SEQ ID NO: 64560 - DNA, 1383 bp, unknown
  TnpB Polynucleotide
gtgaaagcaaaagacaatctccgacttgatttagtctcagcttacaccatgaaagcacgtctctatctgaacaaggcacaggaagagattgtagaccggattttgactggtgtccgactttattacaactgcacgatgtatgccatgctgaatggcatggaatgcacaagggaagtccagagcaaaactgatccagaccagactgtacattatcccgatttcaaaaagggtcaaaatgccacatggaagaaaaaactgtgtgacgaacatccgattataggagaagtacctgctggcgctcttatgggaaacaatggctgtgttggggccgatttgaccaaggcattaggaaaacggagtgttgagtatatcaacaagcagattgcttatgccaagtccgtgaaagctgacaaatctctttcaagggaagagaaaaagaaaaaacttgaaggtgtacaagtcccacactattacagccaaaaccatcctcgaagcagttacacctatcaggaaacatgcagcaaagttcagccgacaggcaatatcaatgtcttcaaaatctctctgaacaagctggggctgtgtaaggttcgcggatggaaccggaatgtatggtttgacgcagacggtatgaagaactttttagatttctgttctgaaaacaaacgtcaaactatcacagtaacaatttcaaaagacctttgcggtgattattacatctgtttcaagttgttgaatgtctatgttccgatcaaggatatccaaggagatgccgttggtgttgatgttggtctcaagcatatcgcggttttgtctgacggcacgaaatatgaacgcagacggttcaagaataaagaggagaagtacaaactcaagataataaacaggaaactttctcgtaggcaaggttgggcgaacgaagaattccgggaagccagaaagactgataaggaactccaagtgtctaacagatatctcaagatcaagaaaaagcacgagaagttagaacgcaagctcaaaaggaagagagatctttataaccactgcgtcactcatgaaatcatagaacagcatgatgctttggctgtagagtcccttgatatcaaggggatgcaggaaaacaagtatttaacgtacagtctggcagatgcggctctgggagacgttctttctaagctgaagtacaaagccaaatggcacaagaaggaacttcgcgcagtagagaaaaaatatccgtcaagccagatatgctcagagtgcggatacgttaattcaaaacttaccctaaacgtgcgcaaatggacgtgcccgaactgcggtacagtccacgacagagatataaatgctgctaagaatctgttgagccacgcttacaacatataa

SEQ ID NO: 64561 - DNA, 29 bp, unknown
  Direct Repeat
tcgtaatggtttgtcgttgacaaaccatt

SEQ ID NO: 64562 - DNA, 29 bp, unknown
  Direct Repeat
tcgtaatggtttgtcgttgacaaaccatt

SEQ ID NO: 64563 - DNA, 1530 bp, unknown
  TnpB Polynucleotide
  misc_feature (1)..(3): N is any nucleotide
nnntggaactgggcgttgtctcagcaaaacgaatacgcaatatcacggaacaacaacacaattgaagcccatcagaccaactcctcagaagatatcaccgataccaatgttgcttcaagtccagatgttttgggtaaagatgataattctttaccaaaaacattaacggtcaacgtgttgtccaacactctcacccaagtgatcaaacagcattctcaggagggttttgaagctgctccagaccaaaccaatatggcatttttaaagaaatgcccgcgcacggtgttaaccaattccttgcgtcacttgggaacggcatggtccaatttttacgatggcgttgcaggaaagcgttcggatgatccaggaaaacccgtgtttcgcaaacgtctgggcaaaaacgaacgagcaacattccaagtggatccccgtcacaaacaccccattgatgtgaacaaccaaactgtatccattcccggattgggtccagttaaagttgttctgaccgaagaggtggttggggatctctcatcgatgaccgtcaagcgcaaaggcaatgtctggttgatttcgttttccgtgatcaatgttaaacattctttgatgaaacgcaaacctgaaaaatttgtgcaataccccgacgaccctacggacaccattcttaatcctgagaaaaatggtgttgccgcaatagatctgtcggtggtgtccggtgcggtggcaaccaccgatggctgcacaaccttctcgttgttcaacgaagcagttttgcgttccaacgaacaccacgagcaacgcaaaaccaaataccaacgcgcgtactcccgcaagcaagaacagctttacatatccaacggaattgttcgcgatgctaatggcgcctggccgaaaaacgccacaaccctcttaagtaagaaaggcgtaaagaaaaacactcgcaacatggaaaaactgcaagacaacatcgcggtgttggatttgcacgaactgtttcgtaaaaccgatgccattcacaagtttaccaccaaactggtgcaggaaaaccacactattgtggttgaaacaatcatgctccacggtatagctcaaacgctcaaccggggcttccggcgtagaatgcatgaagcttgcatgggcaaaatcattgagcaattgaaatacaaatgtcaatggtacaaccgttctttgattttcgtggacaaatggtttccctcaagcaagcggtgttccaacaccgcttgccacgaaaaaaacacacatctcttactcaaagatcgcacttgggtgtgcaccgcctgcaacacaagccatgtgcgcgacaatactgcagcttttaacctctggcaggaggggtggaggttgttggaggaattcttccaacaaaacgacaccaattgtctggcggccgggtcggtcgtgagaggaaggcagggcgttgtattttcggcacatcccattaaaccgaaaaaacgcaaaacaactcctaagtctttacataaaaccatctctccacttgctcaaagtggttaa

SEQ ID NO: 64564 - DNA, 1674 bp, unknown
  TnpB Polynucleotide
atggaaacacaatattataaggttgcagcatacccgatgaaaatccggctgtaccccacaaaggaacaggcgaagaccatagacagctggcttctgggcttgcagaaggcatataatatgacgctgtacgcactgaaagagggtgtgccggaagaaccggaagaaccggaagaaccgggcgagaagaagccagaactgcgccgaaaatcagaggatggttcaacggagttccccaactggaagtatatcggaagtggggactggattgagcggctggaaaggaaaaaccagtctctcaaaggaatcccgcatgatgcgtactataatgccgtcggcggaatgctttcggttgacatgaagaaggcgtgggaaagtcaggggaaattacctgttgataaatggtttcaggccagggatgagaagggccacttgattgtacgatggtataacaaggggaagacgagaagttccgcctaccttcaggttgaagccagaaaaattgttcaacagggcaagagcgtttttataaccctgcaaaaagggttcagcgtcaaggcgaggggctggaatgaaaaaattcggttttcagaggatttgacgcaaagcttttttgacaaatatcagggggacaaaagaaaagtaggtgtgagaatcagcagggataattgcggtgactattacgctgtaatttcactgaaagatgtttatcgccctgttaaagtagaagcagagagaagaagcgtcggtgttgatgcgggaacaagagtaatggcgacagattccgacggcatgacttatgagaatccgcggataaagaaaagaaatgaagctgaaaaggcggaactggaccgacagctggcacggcgatttggagccagaaacgaacagttccgtgcggaatgtaaagcagctcgcaaatacaacaagtcgcatcaagaagaaattgcagaaaaagtggttgagctcaagagagttttaccatcgaagcgctacttaaaggcacagttaaaattgtccaaattggagcggaaggcggcacgacagcgggatatggttcagcatatccatacagcgcaaattgtggcaaaagccaatctcgttgccatcgagcacttaaatgtcgaaggtatgaaaaaggattcaaattctgcaagcagtgtagaagatgcagcaatgtcgggacttctgcaaaaaataaagtacaaagcgcagtggtctggtggcaactatcattcaatagggacatttgacccctctacacagcggtgtgcgcaatgtgggtatgttttgaaggatgaagaaaaactaaagcgaggggacgatacgtttgtttgtccgcgctgcggcaatgtggatggccgagacgaaaacgcagcaaaatctatactgatagttgcgaaagaacgtattgaaagaggacttccatctgcggacaccatcaagaagccaaaggaaaagaaaaagaaaacctacccggataagccaatcgggaaaaactatcctggtgtattcacgcatttttcagaggaatttagacaacaatataaaaatccgtttgtaattgtaaatgataagcaggaagtattggatgatgcccaggggtatgggtacagtgatagacagagtgcccagaaattctggacacataaaatgaaaacacaacaaaaacagtaa

SEQ ID NO: 64565 - DNA, 1455 bp, Lactobacillus salivarius sp.
atggaagaaaaagttttagaaagtcgtagaattagaatttatcctactaaggatcaacaagcatatttaacgtttaatatgtttgctaatatcaagatgtggaacgcattactagctgaagtttataagccagttagtgagttagatgaagttcaagctttacctagaaacaaacaaagtaaagaagtttataaacgcattgaaagaatgtcatgggaagagcaacgtgatttgttcaaaggtttacgtggactttcgactaaggctatttacgatgctgatgaaactgtgtttgaaagtggttggactttaaaagacgctgatactagcatgtatagttacactttacgtactttaaaaacagcgatgagcaaccatttgaaaaaccctagacactttggtattcctaggtttaagacaacaatggacgttgaaaatcaaggtagttatacctcaggcgctcatgtttgtgaaatcagtgaagacggcaagtaccttagagtaggtaaattgaaaagatttaagttaggcttaattgagatggctaatcactatcctagtgacggacgtttgtataaagtaacaattaagcatgaatccagcgatacttggtatgtatcatttgtgtttgaacaagctgagcatacagtaaaacgtcctagaactggtttagcagctggtattgacttaaacgtaacaggtaacagtcatattgttttacaagatggtactagataccaattgccatatgacaaaatcagaaaattagaacaaaagattgaaaaagaaaacgtaaaacgtagtcgcaagtatgaacaatggaaaaaagaggttgcaatcattgaagaagacaataaaaaatccttaattccaaagcatgttcctactttagccgaacgtagcaattaccaaaagaacaaaaagaagattgctaagttacatttacgcattaaaaacttgaaaaaagactatattaaaaaaacatgttcaaagcttgctaatgaatatgatgtaatcgttatggaagacctagctgtttcagatatggaaaagaataaataccgtgctagagcaatcactagatcaaacttccgtgaaattagagatacgcttacttatatgatggactgggctgataaaaagattgtgtttattgatcgttggtcaccaacttcaaagcgttgccatacttgtggttacattaagcacaaccttaaattaagcgaccgtaagtggacttgccctatctgtaattctcaccatgatcaagacataaacgcagctaaaaacatcttagatgaaggcttagacttgctagacaaaatgaatgattcttgcaagaaatgtgggcatgagcgtacggttattacaacagacgaaaagtggacatgtacaaagtgtggagctaaaaataaaaccacacctaaagaagaaaatagtagcgatgtagcctaa

SEQ ID NO: 64566 - DNA, 36 bp, Lactobacillus salivarius sp.
gttctgaacctaggttaaatgacataggtgtaagac

SEQ ID NO: 64567 - DNA, 36 bp, Lactobacillus salivarius sp.
gttctgaacctaggttaaatgacatgggtgcaagac

SEQ ID NO: 64568 - DNA, 36 bp, Lactobacillus salivarius sp.; identical to SEQ ID NO: 64566

SEQ ID NO: 64569 - DNA, 35 bp, Lactobacillus salivarius sp.
gttctgaacctaggctaaatgacataggttgaaga

SEQ ID NO: 64570 - DNA, 35 bp, Lactobacillus salivarius sp.; identical to SEQ ID NO: 64569

SEQ ID NO: 64571 - DNA, 35 bp, Lactobacillus salivarius sp.; identical to SEQ ID NO: 64569

SEQ ID NO: 64572 - DNA, 1155 bp, Lactobacillus suantsaii sp.
gtggcctttatagtagcgtttaaattcagattaaaaccaaataaggagcaagaaaaactaatttggcaaaatattaatggtgctaggttagtatataatctcttactcgaggacaataataggatttataaagagtacaaaaaatcatcgacgttgacagtaaaacaaattaaggatgatcctaagtatgcttttttaaaagggtgcgatgcaaatgctcttgcttatagtaaaaggcatttagatcaggctttcaaaaatttctttaggggattgaaaaaacatcgaaagataggttaccctaaatttaaaagcttagcgcatagtgccctaacgtatacgacttatagagcttctagttacaagaactcgccaatagaagaaggaaatttggctttaaatgagaaaaaagggttagtgaaattaccaaaaattgggtgggtaaaagttattaatcataggccaattccaaaaagtgggaagataaaatctggaattattagtgctgatcgcattgatagatattatatatctatatcagtagaactgccggatggttattttcttaatttaaaggagaggtcggctaaccgtgtcggggtagacgttggaattaagtattttgctacgttgagtaacggaataaaaataaaaaataagcattttttaaaaaatcaggagcagaaactaattaagctacagcggaagcgtgatcgtatgcagagaggaagtaataattatcgtaaggccaatatgaaattacgaaaattacacgcaagaattgcaaggcaacgacgcgcttttgtacagcaaacttcgaccgacttaataaaaaataattatgttattgctattgaaaacctgaatgtaaagggaatggtttctaaccataaactcgcaaaaagtatcgaagaagagggatttaatgagtttaagcgagagcttgtttataaatcagaattctatggacggaaagtaattgaaattgatcgtttctatccctcttctcaaatctgttgtgtgtgtggctatcaaaataaagagacgaagaacttagccgttcgtgaatggcagtgtcctaaatgtggcacaattcatgatcgagatataaatgcagctaaaaatattctaaaaaagggattagaaaaaatctaa

SEQ ID NO: 64573 - DNA, 25 bp, Lactobacillus suantsaii sp.
ggttgatgaagtcatcaaatgacac

SEQ ID NO: 64574 - DNA, 25 bp, Lactobacillus suantsaii sp.
ggttgatgaagtcatcaaatgacac

SEQ ID NO: 64575 - DNA, 25 bp, Lactobacillus suantsaii sp.
ggttgatgaagtcatcaaatgacac

SEQ ID NO: 64576 - DNA, 25 bp, Lactobacillus suantsaii sp.
ggttgatgaagtcatcaaatgacac

SEQ ID NO: 64577 - DNA, 25 bp, Lactobacillus suantsaii sp.
ggttgatgaagccataagtgaaaca

SEQ ID NO: 64578 - DNA, 28 bp, Lactobacillus suantsaii sp.
gtagtccccacgtatgtgagggtgattc

SEQ ID NO: 64579 - DNA, 28 bp, Lactobacillus suantsaii sp.
gtagtccccacgtatgtgagggtgattc

SEQ ID NO: 64580 - DNA, 29 bp, Lactobacillus suantsaii sp.
gtagtccccacgtatgtgagggtgattct

SEQ ID NO: 64581 - DNA, 29 bp, Lactobacillus suantsaii sp.
gtagtccccacgtatgtgagggtgattct

SEQ ID NO: 64582 - DNA, 1035 bp, unknown
  TnpB Polynucleotide
ctgtccgtaagagtctcaaaggacgcctgcaataactactatgtatcaataacaatttcaaaaggttgcaacgcttaccgtgaagttcccgttcgcaccgaagccgagcctatcggcattgatgtcggaataaaggacatcgctatattaagtgacggaacaaaatatgaaaacatacatttcaggcgaaacaagctgaaagctctgaaagccatgaaccgcaagctctcccgaagatggggtcctgcaaacccggcatttcgcgactataacagtaatatccgcagcgaaaatcgaaagtgcgactttgaaaagcaattacatcttgccactccaagcagcggatacttgaagattcaaaacgataaagcaaaattagagctaaaaatcgcgaatcggcgaaacacctattatcatcaaaagacagcagagatagtaaatcgggcgagtttgattgctgttgaaacactgcgcgtcaaaaatatgaaaaggaatcacaagcttgcatttgctttagacgacgcggcgatgagcagctttatatccaagctgaaatacaaagctgagtggagaggggtcgaattggtgtctatcggcacatttgagccatccagtcaactttgcagcaattgcggagaaagcaatcccgccgtcaaagaccttagcatacgcttctggacttgtccaaagtgcggagcaaaacacgaccgtgacattaacgccgctaaaaacatacttcgtatagctcaggaaaagggcggcgttgatgataaagtcgaaaagtcaaatgttggatcaccgccgcggcgaaaaaagcaacaaatcattaagcgaggtaaggatatccacatatttgatgataagccaaacattgttatacgattcagcaaagagctcaccgcaatgaacgacccacgatacataatagttgacacagaaacagataagattcttgacgacgcgcagggatttggattccgaagcgcttgcaatgcaaaaaatagctataagtccaaaatgaaacgcaacaaataa

SEQ ID NO: 64583 - DNA, 30 bp, unknown
  Direct Repeat
aagcaacttgcacaagtgcacagagcagaa

SEQ ID NO: 64584 - DNA, 30 bp, unknown; identical to SEQ ID NO: 64583
  Direct Repeat

SEQ ID NO: 64585 - DNA, 30 bp, unknown
  Direct Repeat
aagcaacttgcacaagtgcgcagagcagaa

SEQ ID NO: 64586 - DNA, 30 bp, unknown; identical to SEQ ID NO: 64585
  Direct Repeat

SEQ ID NO: 64587 - DNA, 1542 bp, unknown
  TnpB Polynucleotide
ttggcagtattttttttaataaaaacaaaagttatggaaaaagttttaaaagcatataggtttgagttagtacctacaaaagaacaatgtgttgaatttgataaacaaatagcatcttgtagacatacttggaatgctttgttagcattagatactaacaaacatagaaattactatattagtaatattgatgaactacaagattatataaataacctaactaaggttgaagagttgaagaatagttacgctaagtatttagtagacaatccgaatcccacttttgaacaaaaattggattttttcattcctgctgttgtaaccaaattaaactgtggtgaatttataacacatgtaacagaatatttacaagagcgtataaaatttaatactgaaagtctttctaaaatagaatctgttgatgataattctaaaattttggcgaagaagttaacaactaaaatagaatcagacaacaaaaacttattagatattactacagttaataaaaaatattcaaaattaacattggcaaaatttttaacaatactcaggtcatatgaaaattatgaatggatatcaacttgtccgagactttctcaaacttctgttgttataaattactacgaatcttggaataagtattttaaatatttaaccaaactaaaaaaaggtgataaaaaccatagggttggtaaacctaaatttagaaaatataaagatgtttcatcatttacaacatcttatggtgacaatataagattagaaaatttagatgataggaaatcattactacatattacaggttgtgaccctatacgattaattagacatagagaaccaaaaggtattctaaggtcagggactatagtcagggagtatgcaggtaaatattatgtaagtttactatatagtattgatgattatcaacctatttctaaaaaaactgaaaaagaaatagctatagatttaggtgttaaaactttagttgttcaaaacgatggacatacttatgaaaataaatctaaacaattatcagcagatatgaaattagctaaaattcaaagagaattagctttaaaaacaaaaggtagtaaatcaagaaggaaagtgatagctaaacttcgtaaagctcatcgtaaactaaagaatatcagaactgactacttacacaaagtttctagggaacttgttaataattatgatgtaatatatacagaaaacttgaagaataaggaaatgatagaaaaaggtacaaaaagtctatcaaaatctttacaagaaagttcatttggtaaatttgtcactatgttagaatataaaagtagagaagatgataagagagtaattaaggttgatacttattttccctcatctcaactatgttcaaattgtggacataaaaatacagaattaactttgaatgacagggaatgggattgtccaatatgcaatgaacatcacgatagagatttgaatgctgctaaaaatatattcaaagaaggtataagaattaagaactcaatagagagttctaaataa

SEQ ID NO: 64588 - DNA, 36 bp, unknown
  Direct Repeat
gtcagagtacgtctttgggttggggagggtatctca

SEQ ID NO: 64589 - DNA, 36 bp, unknown; identical to SEQ ID NO: 64588
  Direct Repeat

SEQ ID NO: 64590 - DNA, 36 bp, unknown; identical to SEQ ID NO: 64588
  Direct Repeat

SEQ ID NO: 64591 - DNA, 36 bp, unknown; identical to SEQ ID NO: 64588
  Direct Repeat

SEQ ID NO: 64592 - DNA, 1440 bp, unknown
  TnpB Polynucleotide
ttgcgccaatcggaattatatggtatattatttttagacaacgttttgaaaaagaaggggatacagatgcattatgacttagtacagaattacgctatgaaatgtaggctgtatccaactaaaactcaggctcaagcaattgacgatgcgttgcatggaatacaagtatttcacaattgtctggtatacgacatatggcacaatcaactacacacaagaactcacccaaaaaagaaccaagatggttccgttagtaccgaggttgtacattttcctgatatcagtgctgctttgaaagcagattacaaaaataagctgatagtggatcatccaattatcgcaaagtgtccacaagctgccttaacaaccaacgttggtttgaaggcagatttgaccaaaaagtttggaaaaataccaatcgagtatcaaaaaccaaggtattacaacgatgaccaccccagacgatcctatacctatcaagaaagcacatctaagattcgatctacagagaatccaaacgtatttcgaatcaatcttgcaataatcggaaatgtaaaggtgcgcggttggaatcagaagctgcgatttggcaatgaatccaccgattttttgaaatgggctcaaacagcacctaaaacatccattacagtaaccataaaaaaggatgcagtaggtgactacttcattgttttcaagctcaaggagtgtttgaagccgtttccgaagtctaccaaggttcagactggggttgatgtcggtatcaaggatatagcaatctgtgcagatggttacaaagcagaaaacaaaaaattcaaacagcaagaaaaacgtcaccagcgtcttctgaaccgaagactttccaggcgttgggacgcgtccaatgagaattatcgaaaggtgcataataaaatcaagtccgagcgaagggatttttataatcacccttcagacaatcaaaaaccaccggcattcattaagccctccaatcgatacctgaaaactcgtataaagcatgctagactcaatcgaaaaatcgcacgaaaacgagatttatggaatcatgaggtcagtcgaaaaattgtcaaatcctatggattcattgggattgaatctctaaacatttcgggtatggtacgaaacaaataccttagctttgccttgaacgatgcagcgttcggtacactcctcacgaacattcaatataaatcaagctggcacgggcgaaccgtaagtgaaattggaagatggacgccctccagtaaacgatgttccagttgtggatatttgtataacagtaatgatcaataccacttgaagccttggacattaaccatacgcgaatgggattgccccgtatgcaacacacaccacgaccgagatattaacgcagctaaaaatattctatattatgcgaaagaagcagcaaattttcagaattaa

SEQ ID NO: 64593 - DNA, 31 bp, unknown
  Direct Repeat
gatgcaatttgtacgccagtatgaattgcga

SEQ ID NO: 64594 - DNA, 31 bp, unknown; identical to SEQ ID NO: 64593
  Direct Repeat

SEQ ID NO: 64595 - DNA, 31 bp, unknown; identical to SEQ ID NO: 64593
  Direct Repeat

SEQ ID NO: 64596 - DNA, 1533 bp, unknown
  TnpB Polynucleotide
atggtaaataataaagaagaactaattttggaggcaagacgttatcgtctttatccaacagaagaacaaaaagaacaaatcaaatttaatatcaatgcaaatcgtgaattttggaatcatttgttaagtaaaatttatgaaccagtttcggaattaaatattatcaaaggaacaacagatcgagaacgaagtagaaaaatgtatgattatcttgatggtggatttaaggtgaacaatacacatctatcagaagggaataaaaagaagtataaattctgctggggttacaagacacttaaacagcatcttaaattgaagacggttcaagaagcaaaagatctaattggaaataaagactcatccaactatgataattatgaggttgttcgtcaaggattggcgtgggaagaattgaatgatctaaagaataaaggattaaagattaccgagaaatctattaaagaagaatatccaagacttaaaatggcagactccacctcgttgcaacagactaagaagtttatgaagcagacttttaaggctcatatgtctgatccacagcgtgttggattgccgagatttaagagttataaagatacattatatagtggatcttacacaacatctaatactattgctaaattagacaataggaaattgtatattaatggtttctctgatacaaagattaaaggtgtttgtcgtggtggaattgaaacaatacaacattatcccgcaccagagggatctcgtatatatagcgtgacaattattcgtgagaatactgatgattatttcgccagtgttatgtatcaactaccacatcatacgaaaacgtttagtaaatctgcccataagattggaattgatttgaatgtgtctaatcatggatttgtatctaacgatggacaaatttggttaccacctaaaacagtagaactagaaaaaagattgcggcgtgaaaagcgtaagttaagtaagcgtcatgacaatgctattcgtggaattattgaagataaagctgacgtaaaattggatccattaaaacatgtaagagatattagggagttccctaattatcagaaacaacgtattaaggttgcaaagatacaaaaacatattactaatatgaaacttgaatggttcaggagactggcatcttggttgtctgaaaattatgatcagattatatttgaagacctaaacgttaaaaagatgactgctaaaggatctggcaaaggggctggacaaaagcgtgagctaaatagacaaattcaagccagtggatttagaaaattcagaacaattattgaatataaggcagcatggtctaacaaggaaacatttgcggtagatccttcatacacttctaaaacatgttttaaatgtcagagggtaaatgatgacttgacaactgagcgtgaatggaattgtccttattgtggtgaacatttaattcgagatatgaatgcagcacagaacattcttgctcgtggaattaaacaacttgaaaataacaaagaaatggcttga

SEQ ID NO: 64597 - DNA, 1134 bp, unknown
  TnpB Polynucleotide
atgctagttgaaaaagttataaaaataccggtgtatactttcaattttagaatgtatccaaataaagaacagagtgaattaatagatagaattatcttagctttacataaagcatgtaatatggctgtttatgatatgtttgaaaataaagttaatacaattgaaagaccagacaaaaagaatggaggacaaactgttcattttccggatgtaaagtctattgcaaagaaacagtatttggatgtgttaagaagtaggagagaagacattaaattgattccagcgggtgctttgtctggtgagaatggagttttcttgtgtgatttgtcgaagcgattggatgctcaagtgagtggagaaaattctaataagaaaacaaacggaaagggagttaaaagaccgattgagaacagtaaacctccatattattcaaagaaacatccgagaacaagttatacatatcaagaatttctgagaaaaatgagctttaatgaggagaataaaaatgtagcatattttaatttagctaaaatcggaaaggtaaagattagggggattaaaggatgcctaaaaaatatctggtttgattcatcatgcacgatgaattttgaagaatatgtgaatttacataagaaacaacaaatattaacaactgtaaaaaaagataattgtggtgattactttttacagctatgtatgaaagatatttataagattgtgaaagtagaagaagagaaaagagaaattggaattgatgttggaatttcaactttgatgactttatcagacggaacaaaatatgataatcctagattcaaaaatggtaaagacggaagtgttcgtcaacatcgtgagatgttaaatagacaattatccagaaggcaagggtatagcaatattgagtttaggaaaaggttaagtgaattaagaaaagaaaatgttgaattaaagccttctaaaagatacatagaaacaaaagttaaaaaagcaaaattagaaagaaaggtaacacgacaaagaaaatatcatatggagaatatggtgttagaagttataaaaagatcagactttattggaatagaaactttgtcggttaaagatatgtatgtcaagaaaaacaagagtgagaaatga

SEQ ID NO: 64598 - DNA, 1467 bp, Ruminococcus bromii sp.
ttgagtacagataagaaatactataaaatttcacaatatacaatgaaatgccgactttatccgaataaaacggttgctaaaggttttgataaggcaattcaagctattcattgttatcataattgccttttatacgatatttttaatggaaacattgaatctactgcaaagccatataagccaaaaaaggaatcaaagcctgagaaaaagaaaaatgaaagcgattttgattatcggcaacgtctttactcttatgaacaaaagcaaaagtacaaagagggcgatataattcatttcccgaatttgaattacgcattttccgcagagtataagaacaagttaatcgaagaacatcccgtaatcgctaatgctccggcttctgcaatcacagcaaagattggtcttatgtccgatgttaagaaatcgctcggcaaacttccaatcgaatttcagaaaccaaagtattatagcaagaaaaagccaagacagagtttttcttatcaagatgtattaggtaaattagttgaaaccgataataaaaatgtattgtttattaaactgccagagaaatttggcggcacacgctcaaatcctgcaaagtgtaaaattcgcggttggaataaaaaaattcgttttgatagatacggggaaataaattttatagattatttcaaatccaatccaaacaaaaggattactattaaaatcgaaaaggataattgtggtgattattggattgttttttcactgaccaatgtttataagtcaatggcaaatccacaaaatacatttggtggtattgatgttggaataaaagatattgctattctttctgataatacaaaatttgaaaatcgaaaatttaaggatgaagaaaaacagcatattaaatttttgaataggcgattgagcagaaggcaaggttggtctaacgaagaatttagagatggctataagcagaacaaagatatgattgtatcaaaaacatatcagagaacacagcttaaactttctaaattacacagaaaaatcgctcgtaagagggagaactataatcataatataaccacaaagattataaatacatattcgttcattggtattgaaactctgaatgtaactggtatgtttagaaacagacatttatcaaatgctttgtcggatgccgctatgggagaaattttgtcaatgcttaaatataaagcagaatggtatgacagaatcattcaacccatcagtcaatggtcgccatcaagtaaacggtgtagttgctgcggatatattagaccaaagttgggcttacatatcagagagtggcaatgtccaaaatgcggaacgtttcacgatagagatgtaaatgccgcaataaatattctttactatgctttgttaatttattacggcgaagaaaaaggcaaagaaatttttgaaaaattgaataataattttcaattattatgtgcatag

SEQ ID NO: 64599 - DNA, 1512 bp, unknown
  TnpB Polynucleotide
atgtcatacaaaagaattgaaaattattcattaaaattaagaatttacccaaacaaaaaacaggcagatattattgatagcatcctttgggagattaaagcttatcataataatacaatgtatgctattaaaaattttgatgaaagattagtaaaggaagtcaaattaaaaaagaaagataaagatggaaaatatattaaagacgaaaatggtgaatttgtttttgatacagttcactatttagataaaagtaaattaaacgcaaattttaaatcagagttgtttaaagaaagaaaccaggaaattgtgaaatacattccatccgaagcagttatttgtaatggatctgttgtagatgatattgcaaagtcgtttaaaagaagtggtaaaaacggtggaaatattccaattgaatcagtagaaccacatttttattctaaaagtaaaccaagagaatcttttgctttgaatgccagaaaaagagaaatgtttagattttcagataatgacaaagtgatgtggattgattgtgggaaaggcatcggagaaattaaatgtagaagacaaatgaaaaagttaaagttttctgaaaatggaatgagtatggaagaattcttttcgtgcaatgagaacttttacaagacaatagataaacatggtaaggaaacaaataatttatcaaagttatcttgtagtattaaaagagataactgtggagattattacataattctttctctcccttatgtgtacaaacaaatcgaagaaaaagaaaaatcggcgtgtggtattgatgttggtattaaaacaaaagcaacaatctacaatgcaacagaagataagtttgaaactattgagaataaaactttcttatataagaatggaacttttgaacaaagcaatcttgataaacaattaaagaagttaaatgagatcaagtcaagaaaatggggttatgcaaacaaaaagtttagagaagcacttaaaaagagtaattatactatcaagccatcaaaacagtatatgaaaatcgatgaacagtctaaaaaattaaatagaaaaattaagcgacaaagagaagcaaataatcatgcttggtcgcattatatcatagataattacaaaacaattggtttagaaacattatctgtgaaagaattccttgagaaaaaagatgtggatgaaaataaaaaacgttcacatgaagagaatatggaattacataatcaaaaagaatttagaagacttgcttctgacacaggacttggacagtttttggaacaattagtttataaagccaattggtatggaaatcaagtgattcatgttgatagatatttcgcatcaagtcagatttgctcatcatgtgggtataaaaatccaaaagtaaaaaatgttcatgttagagaatggacttgccctgtatgtggtgaacatcacgatagagatgagaatgcagctagaaatattttctttgaatcagaaagaatttcgctaaaagaagcagtgtga

SEQ ID NO: 64600 - DNA, 36 bp, unknown
  Direct Repeat
gatttagaagtgtgttaaataacataggtacaaaac

SEQ ID NO: 64601 - DNA, 36 bp, unknown; identical to SEQ ID NO: 64600
  Direct Repeat

SEQ ID NO: 64602 - DNA, 36 bp, unknown; identical to SEQ ID NO: 64600
  Direct Repeat

SEQ ID NO: 64603 - DNA, 36 bp, unknown; identical to SEQ ID NO: 64600
  Direct Repeat

SEQ ID NO: 64604 - DNA, 36 bp, unknown; identical to SEQ ID NO: 64600
  Direct Repeat

SEQ ID NO: 64605 - DNA, 36 bp, unknown
  Direct Repeat
tatttagaagtatataaaataatatcgatacaaaaa

SEQ ID NO: 64606 - DNA, 1380 bp, unknown
  TnpB Polynucleotide
atgattaaagtagataattttgttgtaaaacttcgtgcctatccgaatacagaacagcgtgaaaagatagataggatattacatggtcttagggttgcttataacgtgaccgcatatgaaattaccaaaggcaatcctatgataacaaagcaagatgccaacaatccagaaacacgttggccagattttaaagcctgtatgaagaaagagtggctaaattggttaagggagagttacaatctttctgatatacctgcaactgctttatcctcttctgcttacagcgtctttaaagacatgactaaatcttgggagaattttcatcctgagatagtaggtaaacaaaagaaaactaaaaaaggaaagccagtttttaaactagatggtacgccagtttgggagaaaactgagaagccagttaaacttccatgcggaaaatggcaaccagaatattattccaataagaaaccaagagaatcttttactgtgcagagttttgcgcatggctttgtatttaaagataattcaaaaagtgtttatataccagttaccaatcttggaatgataaaggtaagaggttggcgatatgatttaaaatacggagacaatcagcaggattttctggagtacttttccaataaggatttatttcctagagggaaagcattaggtgtaaccttatcaaaagacaactgtggagactattggattgttgtaaagttacaaactgtctggataccagataaaagtaaaacggaaaagaaatctattggtatagatgttggcatcaaagatattgctattacatcagatggcagtaaatatgaaaaccaacattttaagaagaaagagaaaagccataaaagaataataaataggaaggtaagtcggagacaaggctggtcaaatgctacatttagagagttgcataaatcagataagtctttgcaaccttctaaaggatatataaaggcaaagctgaaactttcaaagctagagaaaaagatagctagaaagagacaaaactataataatgtagtaacatcagatattgttactggtgctgatttcataggaatagaatcacttaatgtaaaaggtatgatgagcaatcataaacttgcagatgctttgagtgatgctgctatgtatgatgttttaagtaggataaaatataaggcagagcgttatggtgttcctgttgtagaaatagggaaatgggaaccttcttcacaactttgtagtaattgtggatataagaacgtagaagttaagagtctaagcgtaagaagttggacttgcccaaagtgtggtgaaacacatgacagggatgtaaatgccgcaaagaatatactagcgatggctagaaaaaagaaataa

SEQ ID NO: 64607 - DNA, 31 bp, unknown
  Direct Repeat
aagagatccgtatgatagtatggaatagaag

SEQ ID NO: 64608 - DNA, 31 bp, unknown; identical to SEQ ID NO: 64607
  Direct Repeat

SEQ ID NO: 64609 - DNA, 31 bp, unknown
  Direct Repeat
aagaaatccgtatgagagtatggaatagaag

SEQ ID NO: 64610 - DNA, 1323 bp, Lactobacillus agilis sp.
atgggtacggagaaaaaggtgtatgagggacgcgtttttaaaatatatcctgaaaaagacagtattgaaaaaatagagttgaatattgaatatgcaagggtcacttggaataatttgctgtatcattgttatcaacctatttacgctaaatattgtgacctatctagaaaagagagagctaaagcagtacgaaagtacttgagttcgatagaatacacggaggtcaaggagttaagaaaaaggctaaataaaattaagcgtacagacattgatgaaaaagagtggacgcgagattgtgatagccaaatttttccgcaaacattgaggattttgaaaaaagcttttgataattatctgaaaaatcctaaacattttaaagttcccaaatttaaaagtagaaaatcaattcgatattccggaagctatcaaacaacgaatgcatgtcggttagttaatgaatgtaccttcaaattaaataaggtttctaacaaaataccgatttaccagcactatccaagcgacggacgattgtataaagtaaatattaaaaagaaacccgatgagacttattgggcgtcgttagtttacgaacaaagtgagcatacggttcgaagagaaaaaacgggtagaagtgttgggattgatttaaatgtaagcggtggaaattatattactttgtcggatggtcatatttatagcgtgccttttgaagaaataaaacggattgagaataaaattgagcgtgaaaatagaaaattatccaaaaaatatgagcagtggcgtaaagaagtagctatcattgagaatgataataaaaaagcgttaattccggcacatattcctaagctagaagaaagaagtaattatcaaaaaaataggttaaaaaaagctaaacttcaagagcatttgaataatataaaaaaggattcgattagaaaaatttgttcccaaatagctaatgactacgatattgtggcaatggaggacttgaatgtatcaggaatgataaaaaatagtaaattagccagggcagtggctcgttctaattttagagagatacgtgatactttaaaatatatgctggagtggtctggcaagaagctcatttttgtaggtcgcttttatcctagttctaaactttgctacgaatgtgggtataaaaatgataacttaacgttaaaagatcgtgaatgggattgtccaaattgtaacgcacatttattacgcgatttaaatgctgcaaagaatattgaacgtgagggcttacgtattcttaaagaagaaattaccaaagaaaagggtaaatctcctggaaaaatataa

SEQ ID NO: 64611 - DNA, 30 bp, Lactobacillus agilis sp.
gattctatttaacttaagaggaatgtaaat

SEQ ID NO: 64612 - DNA, 30 bp, Lactobacillus agilis sp.; identical to SEQ ID NO: 64611

SEQ ID NO: 64613 - DNA, 30 bp, Lactobacillus agilis sp.; identical to SEQ ID NO: 64611

SEQ ID NO: 64614 - DNA, 30 bp, Lactobacillus agilis sp.; identical to SEQ ID NO: 64611

SEQ ID NO: 64615 - DNA, 30 bp, Lactobacillus agilis sp.; identical to SEQ ID NO: 64611

SEQ ID NO: 64616 - DNA, 30 bp, Lactobacillus agilis sp.
gaatctatttaacttaagaggaatgtaaat

SEQ ID NO: 64617 - DNA, 30 bp, Lactobacillus agilis sp.
gaatttatttaacttaagaggaatgtaaat

SEQ ID NO: 64618 - DNA, 30 bp, Lactobacillus agilis sp.; identical to SEQ ID NO: 64617

SEQ ID NO: 64619 - DNA, 30 bp, Lactobacillus agilis sp.
gaatttatttaacttaagagaaatgtaaat

SEQ ID NO: 64620 - DNA, 30 bp, Lactobacillus agilis sp.; identical to SEQ ID NO: 64617

SEQ ID NO: 64621 - DNA, 30 bp, Lactobacillus agilis sp.; identical to SEQ ID NO: 64617

SEQ ID NO: 64622 - DNA, 30 bp, Lactobacillus agilis sp.; identical to SEQ ID NO: 64617

SEQ ID NO: 64623 - DNA, 30 bp, Lactobacillus agilis sp.
gaatttatttaacttaagaggatgtaaatc

SEQ ID NO: 64624 - DNA, 30 bp, Lactobacillus agilis sp.
gaatttatttaacttaagaggtatgtaact

SEQ ID NO: 64625 - DNA, 30 bp, Lactobacillus agilis sp.; identical to SEQ ID NO: 64611

SEQ ID NO: 64626 - DNA, 30 bp, Lactobacillus agilis sp.; identical to SEQ ID NO: 64611

SEQ ID NO: 64627 - DNA, 30 bp, Lactobacillus agilis sp.; identical to SEQ ID NO: 64611

SEQ ID NO: 64628 - DNA, 30 bp, Lactobacillus agilis sp.; identical to SEQ ID NO: 64611

SEQ ID NO: 64629 - DNA, 30 bp, Lactobacillus agilis sp.; identical to SEQ ID NO: 64611

SEQ ID NO: 64630 - DNA, 30 bp, Lactobacillus agilis sp.; identical to SEQ ID NO: 64611

SEQ ID NO: 64631 - DNA, 30 bp, Lactobacillus agilis sp.
gattctatttaacttaataggaatgtaaat

SEQ ID NO: 64632 - DNA, 28 bp, Lactobacillus agilis sp.
gttaagtccacgcatgtggggaagattc

SEQ ID NO: 64633 - DNA, 29 bp, Lactobacillus agilis sp.
gttaagtccacgcatgtggggaagattct

SEQ ID NO: 64634 - DNA, 29 bp, Lactobacillus agilis sp.
gttaagtccacgcatgtggggaagattcc

SEQ ID NO: 64635 - DNA, 29 bp, Lactobacillus agilis sp.
gattctatttaacttaagaggaatgtaaa

SEQ ID NO: 64636 - DNA, 29 bp, Lactobacillus agilis sp.
gattctatttaacttaagaggaatgtaaa

SEQ ID NO: 64637 - DNA, 29 bp, Lactobacillus agilis sp.
gattctatttaacttaagaggaatgtaaa

SEQ ID NO: 64638 - DNA, 29 bp, Lactobacillus agilis sp.
gattctatttaacttaagaggaatgtaaa

SEQ ID NO: 64639 - DNA, 29 bp, Lactobacillus agilis sp.
gattctatttaacttaagaggaatgtaaa

SEQ ID NO: 64640 - DNA, 29 bp, Lactobacillus agilis sp.
gattctatttaacttaagaggaatgtaaa

SEQ ID NO: 64641 - DNA, 29 bp, Lactobacillus agilis sp.
gattctatttaacttaagaggaatgtaaa

SEQ ID NO: 64642 - DNA, 29 bp, Lactobacillus agilis sp.
gattctatttaacttaagaggaatgtaaa

SEQ ID NO: 64643 - DNA, 29 bp, Lactobacillus agilis sp.
gattctatttaacttaagaggaatgtaaa

SEQ ID NO: 64644 - DNA, 29 bp, Lactobacillus agilis sp.
gattctatttaacttaagaggaatgtaaa

SEQ ID NO: 64645 - DNA, 29 bp, Lactobacillus agilis sp.
gattctatttaacttaagaggaatgtaaa

SEQ ID NO: 64646 - DNA, 29 bp, Lactobacillus agilis sp.
gattctatttaacttaagaggaatgtaaa

SEQ ID NO: 64647 - DNA, 29 bp, Lactobacillus agilis sp.
gattctatttaacttaagaggaatgtaaa

SEQ ID NO: 64648 - DNA, 29 bp, Lactobacillus agilis sp.
gattctatttaacttaagaggaatgtaaa

SEQ ID NO: 64649 - DNA, 29 bp, Lactobacillus agilis sp.
gattctatttaacttaagaggaatgtaaa

SEQ ID NO: 64650 - DNA, 29 bp, Lactobacillus agilis sp.
gattctatttaacttaagaggaatgtaaa

SEQ ID NO: 64651 - DNA, 29 bp, Lactobacillus agilis sp.
gattctatttaacttaagaggaatgtaaa

SEQ ID NO: 64652 - DNA, 29 bp, Lactobacillus agilis sp.
gattctatttaacttaagaggaatgtaaa

SEQ ID NO: 64653 - DNA, 29 bp, Lactobacillus agilis sp.
gattctatttaacttaagaggaatgtaaa

SEQ ID NO: 64654 - DNA, 29 bp, Lactobacillus agilis sp.
gattctatttaacttaagaggaatgtaaa

SEQ ID NO: 64655 - DNA, 29 bp, Lactobacillus agilis sp.
gattctatttaacttaagaggaatgtaaa

SEQ ID NO: 64656 - DNA, 29 bp, Lactobacillus agilis sp.
gattctatttaacttaagaggaatgtaaa

SEQ ID NO: 64657 - DNA, 29 bp, Lactobacillus agilis sp.
gattctatttaacttaagaggaatgtaaa

SEQ ID NO: 64658 - DNA, 29 bp, Lactobacillus agilis sp.
gattctatttaacttaagaggaatataaa

SEQ ID NO: 64659 - DNA, 29 bp, Lactobacillus agilis sp.
gattctatttaacttaagaggaatgtaaa

SEQ ID NO: 64660 - DNA, 29 bp, Lactobacillus agilis sp.
gattctatttaacttaaaaggaatataat

SEQ ID NO: 64661 - DNA, 1635 bp, unknown
  TnpB Polynucleotide
atgaaagaaaaagtaagttggtatacgatgaaaatgagaatttatccatcagctgaacaggcaaagcagtttgatcgcttttttcttgcacttcagcttgcctataataggacatgtcatgaggggttcttaaaaaatccgaatgtatgccaagaaaaagagggggtattttggccagattatgagaagatgggcaatagtgcttggaggaaaaaattgattgaaaataaaccgattatagctgaagtaccagcggttgcaattgagaatgcgaacgggttatttaggaaggatgcaaaaaaggcatgggaaacaggaatgcataatctaccggttaataaagtagatcgtaaggactttcgcttctataatgtccgaaaaccgagacgaagttttgtgtttcaattagaacaaaataaattaactccgagtgatgataatcctaaagttgcatggattaaggttcccaaagtgtcaggacagataaaagcaagaggatttaatcgaaaaatatggtttggacccaatggtacatatacttataaagaagcggttgaaatgggtaaaattgcaaagaaaatgacagcacgaatttcaaaggatacatgtggggattattatatttcaataacattttatgaaggcaataagaaagaatatgatatttaccgagaaactaggaagtgcgctgaatgtatgtcagtggggttggatgttggtgtaaaagatattgctatattaagtaatgggaaaaaatatgaaaacaagcattttaaggagaaaaagaagcaaagtctcattaaaatgaatcgtcagttatctcggcggtggggaccagctaattcagcatttcgcgattataataaagaaattcgtgaagaaaataaaagtaatgatgatgctgaagataagaagaacaaagaattagcaaaaccaagtaaaggctatttaaagattcaaaaaaatcatgcaaaattggaaagaagaatagcacgccagagggaaactacttatcatcaaatgacagcagaaattgtaaagcaagctaattttattggggtagagacgctttatgtaaaaaatatgatgaaaaatcatagacttgcatatgcattgggcgatgctgcaatgagtgattttatttcaaagttgaaatacaaagcagcacgtagtaatattccattggttgcctgtgggatgtttgaaccgacgagtcaaatgtgtagtgtatgtggtgagataaatccgaaagttaaaaatctcagtgttcgggagtggacatgtccgcgatgtggaacgcatcatgacagagatattaacgcagccaagaacattttgacgttggctcagaaaacagaaaatagtcaagaagttgataaggaagagaaaacttctgctgtattgaaaaagaagattaaaaagccacctagaaatatagtatttatagataatcttgatattgtaatttgctttagtagggaattaacgagaaataacgatccaagatatgttattcttaataagaaaaccaatgttgttattgatgatgctcagggggtaggatataggagtatttcaaaagcaagaaactgttttaaagcaaaaataaaatggtcacaaaaaatgactaagtaa

SEQ ID NO: 64662 - DNA, 32 bp, unknown
  Direct Repeat
aaacaactcagaagagtaagcggagcagaagt

SEQ ID NO: 64663 - DNA, 32 bp, unknown; identical to SEQ ID NO: 64662
  Direct Repeat

SEQ ID NO: 64664 - DNA, 32 bp, unknown; identical to SEQ ID NO: 64662
  Direct Repeat

SEQ ID NO: 64665 - DNA, 32 bp, unknown
  Direct Repeat
aaacaactcagaagagtaagtggagtaaacaa

SEQ ID NO: 64666 - DNA, 2196 bp, unknown
  TnpB Polynucleotide
atgcttagcaaaatcactctggttgaaaacatcctgcatgtgcatgcggaggaaattagcctcaagaacaccaaggctttcacgcatggaacagttgttttcaacgccgaaggcgtcacgttcgcttcgtttcctcccctgcccttgcccgctggccttgcccccatagacaagctgaccctcgatctccaactcgttggcccggacggcgaactgcgtaagcagacccgtaccatcactttgatcgccaacgaaaaggttcccggcgagtttcgcgctgctggcaaatccaagacggaaagtttgcatacggccgcgctgggatggaagtacgccaattacaaattcagagcgtatttcacacacctaggcatcaagaccgacccccttcccaagtggattgaggacagcgtaacccgccagcgtctgctctggaacgctctcgccgcgctctgccgcaatgcccggcgcgcctgcagcagtgtaccggaagatgagttcctgttgttcatcaaggagactgttctccctgccttcaaaacctacaatgactcgctcgggcgaaagggcgcaaaactgaagatgaaggagccgaagaaactgaaggaggaaaatccctctccggatgcactctggaagctcgcgggatctctcaagcatcgcatcgaagagggcaaacccgtccctccaggcctgctcgaaaaagttgaggccttcacgtcaaagtacaagaccgactactccccgctgaataccttcctcaacaaccgtggcaacattgcggcagaagaggccaaaaaatacggtctgaagcactgggaaaagaagtccgtcatcacgtcctttgaatctactctcaagctgcggaaaaccaagatgatgaagttcggtgaaggctggccaagattgaaggagcgtttgcccttacaggtgagcgactggaacatctcctacaacttcggacagggcggcgttgatagcgctgaactgctgaccgaaaagggtgttcctggactgaaccttggcgctaatctggctccctccgccaccggccataaaaagatgctgccaaccagtagtgctgccaagcgcatgatccgtccagctaccatctcgattgcaggcgaaaacaaggaacgctgggtgtataacttctgcgtccttgagcatcgacaccttcccgaaggctcccttgtcaaggaatggaagctgactcatcaggacggcaatctgtggctcaacctgattattgcctaccccaccgctccgcaggagaagatcgaggcccagatgaataccgctggacttgatatcggctggcgccggaataacgaaggcatcaagttcggtgtcctctatgagccggtgacgcagagcttcaatgaactcacggtggatttgacaaagattgcagctgatccaaccaagcggactccgttccgtattgatttcggtcccggcaagcaccttcgccgtcacacggcggattacctgccgaactggaagccaggggacgagattccgaacgctatcgacttgcgtgagattcttcgtagtcgcatggacaaggtgaaggatgaggccaagaacaagattcaggaagttcttggcgatgaaaccccggtttggatcaagaaggttggccggcgcgggatgctcaagatgaaggatgaaacctacaagggcaatccggcaatcgttgagcttctctctgcatgggccgtgaaggatgagaaactcggcaaggtgttcagtaccttctctgagaacatcacccggcgcatccagtatggcaagtatcaggttgcgcatgacgtggcccggttcttgcattcaaagggcgtccaccgtctcaacgtcgaagcaaagtttctggcaaacgccgccaccaaccagaccaacaacgatgaatacagcctgaagaatagccaacgctatcgccagttcatcggcgtggcaggcttcgttgcaatgttgaaagaggtcgcagaaaagtatggtatcgaagtggttgaagtcgatgccgcatactcatcacgcacctgttcctactgcggcaacgtcaatgaaggtacgcagaagctgcgctttgaatgcgcttgcggtcgtgagatcgatcaagatcagaacgccgcaatcatcatctcccgctctaccgagaaggctacagaaacgggtgaagaagtagctgtgtaa

SEQ ID NO: 64667 - DNA, 36 bp, unknown
  Direct Repeat
gttctcagattcaataagtgcagttcacactgcaac

SEQ ID NO: 64668 - DNA, 36 bp, unknown; identical to SEQ ID NO: 64667
  Direct Repeat

SEQ ID NO: 64669 - DNA, 36 bp, unknown; identical to SEQ ID NO: 64667
  Direct Repeat

SEQ ID NO: 64670 - DNA, 36 bp, unknown; identical to SEQ ID NO: 64667
  Direct Repeat

SEQ ID NO: 64671 - DNA, 36 bp, unknown
  Direct Repeat
gttctcagattcaaaaagtgcagttcacactgcaac

SEQ ID NO: 64672 - DNA, 36 bp, unknown; identical to SEQ ID NO: 64667
  Direct Repeat

SEQ ID NO: 64673 - DNA, 36 bp, unknown; identical to SEQ ID NO: 64667
  Direct Repeat

SEQ ID NO: 64674 - DNA, 36 bp, unknown; identical to SEQ ID NO: 64667
  Direct Repeat

SEQ ID NO: 64675 - DNA, 36 bp, unknown
  Direct Repeat
gttgtcagaaacaaaaagtgcagttctcactgcaac

SEQ ID NO: 64676 - DNA, 1227 bp, unknown
  TnpB Polynucleotide
atgccacaccctgacggccagatgcgccgctatctgttcaagctctacccggtccctgagcagcgcgacgtgctgcaccggcagcgccagatgatcgccgatctctggaacgcgctgaaacagaggcgggaggatgtgtaccgccgcgaagggcgcgggctgacgttcttcgatctcactaacgagattaccgagctgcgccacgagtgcccggaatgggcgacgattccggccattacggcgcatcgggtggcgaagcatctgacggatgcctacagcgcgttcttccgccgtgtcaaagcgggcgaggcccctggctatccgcgctggcagcgccgtgaaaccgcttcctgcatcccgctcgggacgatgggcaagacgggctggatgttcgagcagcgcgacgacaacccgctgtcgtggaggctccactacaagtctgtgacggaggtcaaggaccgcgcgacgtggatacatgctcgcgggagcctgccggcaggcgatagccggaaatcttctattatgccggccggccgggaagccggagatcagttcgtcgcgcaatggcgcaatgccgacatcctctggcgcgacaaccgctggtggctgtcggtatgtgtcgaggtcgagcctcggcgtcagcccggccgcttttcgatcacggtcgccttcgacttgctcgatgactttgtgcgcgtcaacgggatcgccgagacacccgatgaattgcttgatgccgcactgatccaggcggatatcgaccggctgaagtcggaacgggacacgcactggccgcgcggcaagcgtgtgccggacaatgagcgccccgagcttgccgaaatggcggctgaaatatcggcgttgtcggcatacgtcgcccgcaagcggcggaatgcgctgcatgtttggtcgtcgcggatcgtcgcgagggcgagcgatctcacaatcatcgccccgccgaaaatcaagcaggagacggcgacgccacgcggagatgaaaggcgatggggcgcgcaggtcgagaccgtatcgacgctgaaccggcatgtcctgtcgcaggcgccggcaacagcaattcaaatgctccgctacaaggcggcggaggcaggcattcggtgtgatgtcgtagcggacgacgcaccgaatattggcgttggccgcgagttggtcaacgccggcaagcaactgcgccgagcgcggcgcgaaaccaagaggagagcagcataa

SEQ ID NO: 64677 - DNA, 36 bp, unknown
  Direct Repeat
gtttcaacacccggctcgccgggccaaaagcgagag

SEQ ID NO: 64678 - DNA, 36 bp, unknown; identical to SEQ ID NO: 64677
  Direct Repeat

SEQ ID NO: 64679 - DNA, 36 bp, unknown; identical to SEQ ID NO: 64677
  Direct Repeat

SEQ ID NO: 64680 - DNA, 36 bp, unknown; identical to SEQ ID NO: 64677
  Direct Repeat

SEQ ID NO: 64681 - DNA, 36 bp, unknown; identical to SEQ ID NO: 64677
  Direct Repeat

SEQ ID NO: 64682 - DNA, 36 bp, unknown
  Direct Repeat
gtttcaattcccggctcgccgggtcgaaagcgagag

SEQ ID NO: 64683 - DNA, 36 bp, unknown
  Direct Repeat
gtttcaacacccggctcgccggatcgaaagcgagag

SEQ ID NO: 64684 - DNA, 37 bp, unknown
  Direct Repeat
gtttcaattcccggctcgccggggacaaaagcgagag

SEQ ID NO: 64685 - DNA, 23 bp, unknown
  Direct Repeat
gtttcaacacccggctcgccgga

SEQ ID NO: 64686 - DNA, 2022 bp, Acidobacteriaceae bacterium sp.
ttgattgccccggacggtacgctgcggagacagactcgttccggagtactcaagagaagtgaaaagcagccgggtatccttcgcatcgctggcaaagcaaaaaccgcgagcaaattcttgtctgcggacggctggggaaacgccatctacaagtacagggcctaccctacacatccaggaatcaatgccgatggcgagattcctgacgggctcaagggatcaattgcgcgccaaaagggtctttggaatcgcttggcatggctctgccgcgaagcgcggcacaactgcacgccagtacccactgacgaaatcatcgctttcgttcatggcacaatcttgccggcaatcgacgcgttcaacggtgagctagggcggtccaagggaaagatgaagcaccctcgcaagctcaagaccgatgcgccgggtgtcgatggtctttggcactttgtcggagaactacgcaggcggattgaaataggacgggctgtaccaggtggcctgctcgacatggtggtgcgatttgccgagcaattcaaggcagactacactccactgacccagtttctcaactcctacggcgatatcgccgagagggaagcaaaggcactgttccttgaaaaggatgccgcgcctgtggagttgcggcactacgagataaggccgattatcaaggcgttcaaggaagcgcttgatcgtcgcaagacgaccaaggccccatggtcggaaggttggccacgaatcagattccaggacagcccaagagctaccgactggggacttcactattatttcaacaaggctggagttgactcggcccttctcgaaacatcaaagggcgtacccggacttatctttggtccgccgctcagttcctacaacactggccataagaagttgatcggagttgccgccaatcggaaattgcgcaatgcagagatttcgattggcggcgaaaatggcgaacggtggaacttccgtttcggtgtgcttcagcatcggcccttaccggcaaactcgcacgtcaaggagtggaagctcatcttccaggatggtaagctctggctctgtctcgtggtcgaacttcaacaccccattccggttaatggcccgcttgctgccggtctcgacatcggctggcgccggacagaggaaggcatccggttcggtactctgtacgagcctcaatctaagaccttccgtgaactgacaatcgacctgcagaagtcccccaaagatcccaatgaccggacgccgttccgcattgatctcggcccgacccgctgggaaaagcgtaacgtcactctgctgtttcctaattggaagccgggagatcccatcccgagtttatttgagactaggaacgctctgaacgtgcgtcgaacctactgcaagaacacgaccaagactctactgcggaagcatctctgccagcggctgccggcgtggtttgacaaagctgggagcaagggattgcttaagctggctgaggagttctctggcgacgctattgtccaggatatcctcaagggatggcggcgaaacgaagagcatcttgggaagctcatgtccatgtacttcgatcggacaaccaagcgaatcgagtacggacatgcccaagtggcgcatgatgtctgtcgttacctgcagcaaaagggtactactcggctgatagttgagaccagttttctcgcgaagacctcgcagcatcaggacaatgaagatcccgtcgctctgaagcgatcccaaaagtaccggcaattcgtggcagtgggcaagtttgtggctgtgctcaaaaacatggccgttaaatacggcatcgtcgtagacgcacaagagaccatcaacaccacacgcatttgccaatactgcaaccacctcaacccgcgaattgagaaggagcaatcaacttgcggaaagtgtgggcgcatggtcaagtggaaccagaatgccgcggtcaatctctctcgcttcgggaccgatcctgagttggcacagatggcacttcacgccggaaaagtctga

SEQ ID NO: 64687 - DNA, 2178 bp, unknown
  TnpB Polynucleotide
atgtttacgaaaatcacactcgagtctgataacgttctgtatttccatgcaggagatacctcgctcgcgaccacgaaggcatttacacacggcggcatagtcttcgatccggactcagtgattgttggcaagatgcccgcaattcccttgccttcggacctcaaacttgaggctggcaaaactctctctatgcaacttgtggcgccggacggcactcgcaaggctcaaaccaggacaggtaccctcctggcgatcgaggacggcgtgtttcgcgtcaagggtagggcgaggactccctcaacccacagcgtcgaggatgggtggggctacaccgtgcggaaataccgggcatatgctactcacccaggagctccaggatcttccgacttgccgcagtggcttcatcaatccatcgagcgtcagggcaagttctgggatcgcctcgtttggcggctgaaacaagcccgccgcgcctgttcggacgttgcgcctgaagaggtacgtgagttcgtgaccaagaccattgtgcccgccatagacgcgttcaacctggctcaaggacaaggtaagaagctgaagtatcccaaagacttaacctccgacgagccggttctcgcagcagtgtggagctttgccggtaaactcgcccaacgtgcgaagaaaggtcagccagtaccggacgagctggaggcaatcgtccttgcctgggcgaggctacataggaccgagatgggtcctctgcgtgaattcgagcgtaaactgattaactacattgatgaggatgctaggaccatcgacttgcggtcgtgggagaaggcgccgaagagcagggcctttcgcgcggtattacagcgccggcgaatactacatctgcctttcgctaagggctggccgcgtttcaggaagaaggacccgcagaagcaggagtggggaattcacttccatttgaacaaggctgatactcccgcagacgcgcctttcaccggtgaacttcgaagcctctacataggcgaccccattcccccggagagaacggggcatgcttcgcaccaagggaagcgattccgcgtccgcaggactctcaggcctgtcaagatcgccatttccgatcggaaatcaaaggaaacctgggcgctggctttttccatcgtactgcaccagccaatcccaaagggcgcgttcttaaaggaatgggacttgatctacgagaacggcaagctctggctatgcttgctgtttcagtctaagcaaccttgggaattggacgcatccgtctcacatctatgtgcaggtcttgatctaggttggcgctttgagaacgactgcgttaaggtagctaccctctgggaccccgttcacaatagcttccgccggatcatggtcgatcttactgctaaagcccgcgataccaaagaccggccacaatttatggtctatatgggcccatcgcgtgactcaaggcgtgccgcgaagatcgcccatgagaacggtgtggccgcttacctcgatacctaccagggatgcggcgagattcagcaagcccggtccgcggcgaacgagtcgatcaagtcccttattagtcgagaactgggcgatgcgtcaccaccttggctgcgaagagcgggatcgtcgggaatcaagaagcttggcagtctgcttccggattctccgctcaagtcggcaatcgatcgatgggctctgaacgacaaacaactgagtgagctgcatagtagttacgctgcacgcattcaggctcgcctcaagaaggggtacgagtgggttgcaaatgacatcggcaaaatgctcagggctggtcggattccagtgcttgccatggagaagagcttcctccagaaagcacctggaaccgaagtcggggaacaccaagaagcgctagaacacggcgccaggtaccgccagtgggttgctccggcaactcttgcgaccattctcgatcggatccttccgaagtacggtgtacgagtgatccgcgtcgaagcggcgaataccaccaggaagtgccgcttctgcgagcatataaacgagaatgtggatgagcaccttttctatcagtgcgcaaagtgcggaagggctatccaacaagatgagaacgcggccatcaacattgccagagcttggaaatccaactcggagagagcgggtacaggcgaacaatag

SEQ ID NO: 64688 - DNA, 1623 bp, unknown
  TnpB Polynucleotide
atgcgcacgctcaagctctacatccgacccgagactgaagagtccgccgagctagcgctagctgagactcagcgctactgctgggcgcgaaatcggtacatccagcaggcccgcaagtgggtgggcaccaaagcccgtaagcgtggcgacggatctgtggtgcccgcgcaacccgcgcgagtccgggaggataacctcctgcccgagtttcgcgttgtagctgacgcgctcaggagtgaacagcgtaccggccgcaagccctccgagagagcgcggtaccgagccagcggtctgcggcccggtaagcgtggccgtgacccgtttgagttcgtgagggcggtcccaaccaccgacaagcagcgagatgcgctagcaaagaagctccaagggctcagtgagcgctatgaatcggtggagtgcgtggagtctgggcttggccggactgattgccaggagctagctgccaaagaggccagggagatttatgcagagtttgtggcgatgggcgggtttcatggtacgcatcgccttgcacaagaatcggccgccaaagcgactcggatgatcaaagattccgatgagggccgagcagccatgcatgtgccggacatccagtgggagtgggacccggagtgcccgacgcgccgcacgaagtattttcgctaccacgcgacgcgctggtctatcaaacgccaagacatcccctacgtcgatagtatcaagggcccgatcaagcaggcgtacattcaaaggcaacgcgtctccagtgccgaatcgcgcaaccccaagtaccgttggttcctttatctcgtagtagatgaagccccggcaccgcacgctgtggcgcacaaccgtactgcggccgggcttgatctgtgctggcgtcaagacgatgagggcgccacgttgcgcgtcgcctatgtggcgagccctgtcgcgcatgggcagatcacgatccctgaagcggcgtatggtcagcaccagcaagctcggtctatacaggggttcgtggatcgtgaggccaacttcctgcgcagtgaatttggcctgcccgctcaaaccagccatcgcacgctaatagagcgagcgggcctcgatcaccccgtggggaagcgactcgtccatttggcggagtacgcccaccacgcgggacggcacgccctggatagccgtgacgagcactacctcaaagaggctcatcgactcctacgggcacatcacaccatctactgtgagaagctcaagggcaccggagatatcgtaaggactcccgccaagcttcgtgagcataccgaagacgttgcgaagtctcgggagcgcgcaggcaaggctcgcaatcaacgccaatccgccgcaccattcacattcctacggctcttgcagcgcgaggccgccaagttcaatacccgagtggtagagctagatccggcgtttacgagccggatctgttcctgcggtcacgatatggggccaagctcccaagctgttcgacgctgccaagagtgtggccagcgctgggatgtcgatcatctggcggccctcaatctgcttcgcatagggcagacgcaggattcgagcgtagaagtgccgtccgaacccctggcaccgctcgatctctcgtga

SEQ ID NO: 64689 - DNA, 36 bp, unknown
  Direct Repeat
ctatcaaagccgacgcggaggcttagtttctgcgag

SEQ ID NO: 64690 - DNA, 36 bp, unknown; identical to SEQ ID NO: 64689
  Direct Repeat

SEQ ID NO: 64691 - DNA, 36 bp, unknown; identical to SEQ ID NO: 64689
  Direct Repeat

SEQ ID NO: 64692 - DNA, 24 bp, unknown
  Direct Repeat
agagggatcgagcaactattacta

SEQ ID NO: 64693 - DNA, 24 bp, unknown
  Direct Repeat
agagggatcgagcaaccattacta

SEQ ID NO: 64694 - DNA, 24 bp, unknown
  Direct Repeat
agagggatcgagcaaccattacta

SEQ ID NO: 64695 - DNA, 2427 bp, unknown
  TnpB Polynucleotide
gtgggaacctggcctcccacattcgttcttcgtcatcccgagcgagttgaccggcgtccaggctgtacgattgggaatgctttctcccgtgcctcacccatctcatcgcacgcgccgatgctcccaatgcactttgttaaaccttttttggtcggcccttccatgatgtcccgccgagttgaccacccgtctactcagaagtacactcctgccaaggaccagcccatgtacaaaaaagagcgcgcgcagcgaaaggtatggcgcgacgaagcgcttaacgggatcgaacaagctaaatctgaagaagccgcccggtcacaagatgagcgcactcaagtcgcgaagcagtccttccttttgcacagaactcgcgagattctaaatcttgactctctcacggggaatgaactccaaaccaaggagttgtggattagccgaaaaatcaggggcaagacgcccgcgcaaaatcctgatgctccccgaatcgcacctcgttacgaagcatggcccgtggaaggcgagattcccgaatggcttcgcaaacgcttcctcgatgagcattggctctggaatgcgcttgctctgcctcttcagcacaccatttcgcgcatccgtgatcaacagaagcaagctgttgctgccgtctacaaggaggcagaagcaagtggagtgaacacacaagatgagcaggcgagaacgaacctcgctcccaaaatccgagctgccctcaagactactgatttttcgccactgaagcagatattgaaacaccgagatcttgtccttgaagaagcgcaccgcattcgtgcgggtaaggtaactgatcccgatgctgagatggggagactcggctggagcaaacccaattggacttttgcagtttccgtctctaacctcccagcttggctgcagcgaatcgttgaaaaacgactgcaggcagctgtaaaagccaagcgcacaagacgccaaggcggggccagcgagaaatggtcacatggctacccgaagtccgacccggaggaccgaagcagcgagggccgtctcgacgtgtacttcaacggagacaatctccaatgggtctcaggcgacatgcacaacgggtatctcgatatttcctcgccgtggaacccgccggaccatcgcgggccccgcaagggcaagtacaggtcaattcgtgaaatgcgaaaggtgacaatctacgagcctggggcttcagcaaaaacaagaaccaaaaaagagaacaaaaaccgattcagcttcaacgttctctttcattctgttccaaccgacgcgctcatgaaagagtacaagctcagggcacagaaggacgcggcggggaagctaagatggttctttattcccaccttcgaactgccttgcagcagcgaaccggagccaaggcgatttgccggcgttgatgtgggatggcgcacatctggcgatgaagatttcaagcatgttcatagctggagcgaagtacgcggctaccgatcttacgaacttacaatcagccctaatcgctggtcacgtcgctataaccaccgccaggcggccctatccgccgatgatcagtttcccatcgagatgacgcccgttggactgcgcgattttgcatcacgccgggcaactttactgagagatcttaaggcgaaaatggctgaagccctcaagaggcaaaatcaccttcccgcaaactgggatcgtatcggcagacgcggcatcgcgcggatgatgacagatagcaagagcccggaatcccctgttcttcaatccctccgctccgagtatgacacctgggctaagcgggacgaggaactcgcccgcacttatcgtacggcttgggcgatggtatcggagaacctcgacaaacaacgaaggcaaatcgcgcgcgacattctctcgggcgtgacggacgttggtatcgaggccttggacgtaaagcaaatggcgcaagcagagaatcaaggaacgaccaactgggagcgccatatcgagaacgtacaggatcgcagccgccagcttaccggccctgcaaagttcctgtcgattctagtgaacgccgcccgcaaaatgggcaagcgagttcaccagatcgatccgtgccgtacttccaagacgtgttcccagtgcgggcacgttaatgaaattggggtggaggaagagtttacgtgctccgggtgtgcgcgcaagtggaaccgcgacgaaaacgccgcccgcaatcttgagcgactcggccgcgagtgcgccggtgctgacacccaccccctgaggtgctcgcgggacggtaagtccatcccgtttcatgggcttagccgttcggctgttggcagagcttcagaacagtccgaagaggcgagcacggtactcgctgctgaggctctaacccattcaaaacagggcaattacaagggtggcggttacttttga

SEQ ID NO: 64696 - DNA, 35 bp, unknown
  Direct Repeat
ttacttttgattaaagtcccccgaacaggggtgac

SEQ ID NO: 64697 - DNA, 35 bp, unknown; identical to SEQ ID NO: 64696
  Direct Repeat

SEQ ID NO: 64698 - DNA, 35 bp, unknown; identical to SEQ ID NO: 64696
  Direct Repeat

SEQ ID NO: 64699 - DNA, 35 bp, unknown; identical to SEQ ID NO: 64696
  Direct Repeat

SEQ ID NO: 64700 - DNA, 35 bp, unknown; identical to SEQ ID NO: 64696
  Direct Repeat

SEQ ID NO: 64701 - DNA, 35 bp, unknown; identical to SEQ ID NO: 64696
  Direct Repeat

SEQ ID NO: 64702 - DNA, 35 bp, unknown; identical to SEQ ID NO: 64696
  Direct Repeat

SEQ ID NO: 64703 - DNA, 35 bp, unknown; identical to SEQ ID NO: 64696
  Direct Repeat

SEQ ID NO: 64704 - DNA, 35 bp, unknown; identical to SEQ ID NO: 64696
  Direct Repeat

SEQ ID NO: 64705 - DNA, 35 bp, unknown; identical to SEQ ID NO: 64696
  Direct Repeat

SEQ ID NO: 64706 - DNA, 1572 bp, Acidobacteria bacterium sp.
atgacaatacgagtgatccacaggcccgccaaagtggttgacgggctcgaagccctggatagggaattcagatccgcccgctgggcgcaccaccagctactccggatcgaggacgatcaagcggagcagctagacctggtcgcggacatgtgcgcgcccggccttcgccgtgtcggacgcatcctggcgaagctccggcgccgagcctgccgagccgagcgcgccaccgggtggagcccgaatccacgcgtcgaactccggaagacgatggcggcccgcatgcgttcgctgaaggcccagcgtgacgccgacccgcggtggaagatcgcgcggggctggttggatgcgtcggccgatgacgctccggtgaaggcttgtcgccgcaaggcgggtgagtccgacgcgctctacgacgcccgagtcgcgaggcgcaagcgccggagtcgccgcgaggaaaaacgccttgagctgtacagccaaattcgctgccactacgacacctggaacgagctagtgaagcaggtcgatcaagccattcgctcggtccgggctgtccgcaagacgggccaatccgcgcggtggaagcacccgcgatacgacgacccgaccacgatcgccagtgaccactgggacttggtggagcgcggtccggtctggtgggtcatcgatttgaagctccgcgcgggcgtgcgagttcgcttacggacgaaggccggcacctatgacggggtcccggcggatcccgatttccggactctgaagctcacgaggcgccgagtcggcaggttcggctgggagtattcgtgctcgatcgccgtcaatctcgccgaacgggtgccgtccgggacgggcgttgtggcgctcgactggggccaccgcgagcacgggcacgcgaccgcggaccagggcatcagggtcttcacttgggccggcgatgacggccagaccggagaggtgctcttgcctattgcgtgtcgtgacctgctctccgagctcgacgagctcaaggggcgccttgacacggtctatgccgcgcgcggcgagcccgagctgaaccgggcgcgctaccgccgaagactcaatatgtgcggagtgctcacgcgagaggagcaggattggctccgctgggagacccgtcaggatcggaggctgtcggccatgcgtgaccggatcgagcacatccgcagggagtcctatctcaaggccatccacgagctggggcgccggtaccgtgtgttcgcgttcgaggacctccaaggccagcaaatcaaggacctgcagaccgagaaccaaatggggcggcgcaagcgccagaatcgggacctttcggctcggtatctttttgaatcgttgtgcaagcagtcgggtgccgagcggatcaccgtacccgctcgcaacagtacccgccagtgcccggcctgtgggaaactacgcgaaaagactgcggatttgcttgtcgcgtgcgacgcctgcggctacgttggcgaccgtgatcgtgatgcttgtcggacacttttggcgcgggcgaaggaggcgctcgcaaagcgtggcgcaagtgtgcagaatgactag

SEQ ID NO: 64707 - DNA, 36 bp, Acidobacteria bacterium sp.
ccaccaacagccgcgcagggcttcgaatactgcgac

SEQ ID NO: 64708 - DNA, 36 bp, Acidobacteria bacterium sp.; identical to SEQ ID NO: 64707

SEQ ID NO: 64709 - DNA, 36 bp, Acidobacteria bacterium sp.; identical to SEQ ID NO: 64707

SEQ ID NO: 64710 - DNA, 36 bp, Acidobacteria bacterium sp.
agggcttcagccgcgcagggcttcgaatactgcgac

SEQ ID NO: 64711 - DNA, 36 bp, Acidobacteria bacterium sp.; identical to SEQ ID NO: 64707

SEQ ID NO: 64712 - DNA, 36 bp, Acidobacteria bacterium sp.; identical to SEQ ID NO: 64707

SEQ ID NO: 64713 - DNA, 36 bp, Acidobacteria bacterium sp.; identical to SEQ ID NO: 64707

SEQ ID NO: 64714 - DNA, 44 bp, Acidobacteria bacterium sp.
ccaccaacagccagccgcgcagggcttcgaatactgcgacggta

SEQ ID NO: 64715 - DNA, 2136 bp, unknown
  TnpB Polynucleotide
atggcgaagcgagagaagaaagatgacgtggtgctacgcggcaccaagatgcgaatttatccgaccgaccggcaagtgacgctgatggacatgtggcggcgacgctgcatcagcctatggaacctgctcctcaatctggagaccgccgcgtacggtgcgaaaaacacgcgctcaaagctcggctggcggtcgatctgggcgcgcgttgtcgaggaaaaccacgctaaggccctcattgtctatcagcacggaaagtgcaagaaggacgggtcatttgtactcaaacgagacggcacggtaaaacacccccccagagaacggtttccaggggatcggaaaattctgctcgggctgttcgatgcattgcgccataccctggataaaggcgctaagtgcaaatgcaacgtcaaccaaccctatgcactgacgcgcgcatggttggatgagaccggacacggagccaggacagcagatatcatcgcctggcttaaggattttaagggcgagtgtgattgcacagcaatcagcacggcggccaaatattgcccggcgccgcctaccgccgagctgctgacaaaaatcaaacgcgctgcgcccgcagacgacctgcctgttgaccaggcgatcctgcttgacctcttcggggcactgcgaggaggcctcaaacaaaaagaatgcgaccacacgcacgcgcgcacggtcgcatatttcgagaaacatgagctcgcaggacgcgctgaggatatcctcgcctggctcattgcgcacggtggaacctgcgattgcaaaatcgtcgaagaggcggccaatcattgtcccggaccgcgactgttcatatgggaacacgaacttgcgatgatcatggcgcgcctgaaagcagaaccgcgtactgagtggattggggatctgccgagccacgctgctcagactgtggtgaaagacctcgtcaaagcgctgcagactatgctcaaagagcgcgcgaaggccgccgctggcgacgagtccgccaggaagaccggatttccgaaattcaaaaaacaggcctatgccgccggtagcgtgtattttcctaacacgaccatgtttttcgatgtcgccgcgggtcgcgtgcagttgccaaacggttgcggctcgatgcgttgcgaaattccccgtcagctcgttgcggagctactggagcgcaatctaaaaccgggactcgtgatcggcgcacagcttggtttgctcggagggcgtatctggcgccagggcgatcggtggtatctctcgtgtcagtgggaacgcccgcagcctacactgttacccaagacagggcgtacagcgggtgtgaaaatcgccgcgagcatcgttttcacgacctatgataatagggggcagacaaaagaataccccatgccaccagccgacaagaaattgactgcggtgcacttggtcgcaggcaaacaaaattccagggcactggaagcgcagaaggaaaaggagaaaaagctaaaagcacgcaaagagcggctgcggcttggaaaattggagaaggggcacgatccaaacgcgctgaaaccgcttaagcggccgcgcgtgaggagatcgaaactgttttataaatccgctgccaggctggcagcctgcgaggcgatcgagagggatcgccgtgacggatttttgcatcgtgtgacgaatgaaatcgttcataaatttgatgcggtgagtgttcaaaaaatgagcgtggcgccgatgatgcgccgtcaaaagcagaaagaaaaacaaatcgagagtaagaaaaacgaggcaaagaaagaagataatggagcagcaaagaagcctcgcaatctaaaaccggtacgcaagctactgcgccatgtagctatggccaggggacggcagttcctggaatacaaatataacgatctccgaggcccaggaagcgttcttatcgcagatagattggaaccagaagttcaagaatgttcacgttgcggaacgaagaatccgcagatgaaggacgggagacgtctattacgctgtatcggcgttttgccagacggtaccgactgcgacgctgtgcttccgcgtaatcgcaacgcggcgcgtaacgcggagaaacggctgcgtaagcatcgtgaggcgcacaatgcttag

SEQ ID NO: 64716 - DNA, 28 bp, unknown
  Direct Repeat
ggttcccccgggtggggtggcggtggcg

SEQ ID NO: 64717 - DNA, 28 bp, unknown
  Direct Repeat
ggttcccccgggtggggtggcggtggcg

SEQ ID NO: 64718 - DNA, 28 bp, unknown
  Direct Repeat
ggttcccccgggtggggtggcggtggct

SEQ ID NO: 64719 - DNA, 28 bp, unknown
  Direct Repeat
ggttcccccgggcgcgggtggggtggcg

SEQ ID NO: 64720 - DNA, 28 bp, unknown
  Direct Repeat
ggttcccccgggcgcgggtggggtggcg

SEQ ID NO: 64721 - DNA, 28 bp, unknown
  Direct Repeat
ggttcccccgggcgcgggtggggtggcg

SEQ ID NO: 64722 - DNA, 28 bp, unknown
  Direct Repeat
ggttcccccgggcgcgggtggggtggcg

SEQ ID NO: 64723 - DNA, 28 bp, unknown
  Direct Repeat
ggttcccccgggcgcgggtggggtggcg

SEQ ID NO: 64724 - DNA, 28 bp, unknown
  Direct Repeat
ggttcccccgggcgcgggtggggtggcg

SEQ ID NO: 64725 - DNA, 28 bp, unknown
  Direct Repeat
ggttcccccgggcgcgggtggggtggcg

SEQ ID NO: 64726 - DNA, 28 bp, unknown
  Direct Repeat
ggttcccccgggcgcgggtggggtggcg

SEQ ID NO: 64727 - DNA, 28 bp, unknown
  Direct Repeat
ggttcccccgggcgcgggtggggtggcg

SEQ ID NO: 64728 - DNA, 28 bp, unknown
  Direct Repeat
ggttcccccgggcgcgggtggggtggcg

SEQ ID NO: 64729 - DNA, 28 bp, unknown
  Direct Repeat
ggttcccccgggcgcgggtggggtggcg

SEQ ID NO: 64730 - DNA, 28 bp, unknown
  Direct Repeat
gattctcccgggcgcgggtggggtggcg

SEQ ID NO: 64731 - DNA, 28 bp, unknown
  Direct Repeat
ggttcccccgggcgcgggtggggtggcg

SEQ ID NO: 64732 - DNA, 28 bp, unknown
  Direct Repeat
ggttcccccgggcgcgggtggagtggcg

SEQ ID NO: 64733 - DNA, 28 bp, unknown
  Direct Repeat
ggttcccccgggcgcgggtggtggcgat

SEQ ID NO: 64734 - DNA, 2232 bp, unknown
  TnpB Polynucleotide
atgcttaagcgaaaagggcagactgtgagggataaattcccttgcaaggtattcaagtttgggaaccgtggcggccatacgttaggggagaacgcccatcttgttcaggcccaccttcttgggtcacaccaacgtcgtaacgactatacaagcttggaaattgaccgtcgagaagctgtcaggaataaggtcaacgaggttcaactcaagttccctcagatccacgctctcactcagcggattgaggaggtccaggcagctcgtcttgcattgagtcaagaaattcaagctgagaaaactcgacttgctctggtgagcctttctaatgcacccaagttgtccgacgctggggctatatcgacccaggccacgccggaggacatacgcattcatctggagaggacacttatcaaacgtgcacgtcggggcgctgtcaataaatctaaggcgaggcaggtggaccctgcgctagctaagaagagggcagagcttgcggcacaatccaaacagctctccgaggatcttcgggagttgaaggaccgcacccctgaatacaatagggagttcgacagcttttgggtgaaagataagaaggtcttcgggttgtccacgaaggactcgcttgttaagaacgaagattggattcagcaccgactggaggagaggaacaaagtcctccgaaaggacggtaagcgggaggagccacctcggagcgtcatcaagctggtagctgggacttcggatcttgttcgtagcgcagcggttgactcctctaaccgctgtaagaaaaacgggtgggggagtaactccgaccctaagttcaagaagtttaaagcccattacggtaaggacgcagagtatcccgcagaaggctctttgtgctcagtggagtctcgtactgggtttgccctcacaagagacgtgttgtctggcaagtcctctaagcttcgcttagagttggtgagcaagaagcgcaaagtccacgtctataacgtatggctgtgcgtcggacggaacgaggaaggccctctttgggcggagttccgcaacatctctttccatctccgtaagaacttggatggctcttacggagatccgttcccaatggatgatacgagcaaaatcctcaaggcgagttttcattacaggcaggtgggaacccaagagaaatgggagctgcatctgaccgtcgagtctcggttgcttattgcccctgtgcttgagcgtctacccaaggttgcagctatcgactcaagtttcttcctggaccttcagacgggggtccaacgagtgggcttcttggtcgatagtgagggggacaggaagactctcaggcttcattttttgccgcgaatgagggagaggcggcttttcgatcgcgaatcaggtgagtggttctacaagcaccctttgtccgagttggcgtacaagcacccgagtaagggggtgcattcaattccgaatggcacggggattttccctgctgacgagagctacacagagggtaaaggttgtaagcacaatcgactcaaaagctcggacggaattaaagctgtacgggataaggcacgagacagtctgaaggacgaacttggagcgtggcttaggggccgcaagaacctcccgtcattcctcaaagacatctctcgggtcctagctaatattcagagttgcgcaactctttccaggttggcgaacacctggtctgtcaaccggtttcaaggtgacgacgacatctttgacgtggtggagcgttggcgtcaacgggaccggcacctccatcagtttgggacccacctccgcgaacgtgcctacagctttcgtttggacacctatcgaaagtgggccaagcagttgtgtaacgagtacacagagatccgttacagactccctccaaaaagcacacgagccaatgcagatcacgtttcttccgtagagaaggccaagagtagtgtggctttcagcgagttcgtaggcgctctccagaatgcagctcgtagcactggcacacgcattgtgaacatgtcagaccaggcacaccacaaaaattgcaatgcgtgcggagcagcccttgagtcgtctgagagtcatttggtcgagtgccctgtttgcggtgtcgttgatcgtggagagaacacggctagaaacatgctgaactcctcgcaggacatttctctcaaagaaaacgatgagttaggcgatatctatactctgcctctcgccggagagtag

SEQ ID NO: 64735 - DNA, 32 bp, unknown
  Direct Repeat
gcaaaggttggccatacccttagaaaatggca

SEQ ID NO: 64736 - DNA, 32 bp, unknown
  Direct Repeat
gcaaaggttggccatatccttagaaaatggca

SEQ ID NO: 64737 - DNA, 1332 bp, unknown
  TnpB Polynucleotide
atccacacaccgggcccgcccgggcaacagcgggagatcaagagagcgcggcgttatctctttgctctctacccgacagcggaacaaaaggcggtgctgcagcggcacagcgagatgctggccgatctctggaatgggctgctgcagcgctatgagcacatccagcggacgacgacgcagcgccaggtctggtttgacacggcggggcgacacagcggggtcagctaccaccggctgacctggggtacttacagaaaagccgagcgcgaggcggtagtcatcgagccgggcgcgaacggccggccaaagcctttcacggcgttcgacatgcagaacgaaatcaccgcactgctgaacgaactgcccgaatggaaggaaatgtcggtctggtgctgccaccgtaccgcgacaaagctcagtctggcgatcgaggcgttctatgcccgtgcgaaaaagggaaagggcgcccagtcggggtatccgcactaccgccgacgcagcagcgaccgtcttagcgtcccgcatcgctttgcgtcgggttgtcggctgaccaaagatccccgtcatgcaaacagctggcagctcactctaaaaggtataccagggaaaattcacgcgcgcggctgtttcccgttcgcagtacccagcccgtcgggaccacagcggaaggattgggccgatgccgatgtcatctggcgcaacggcaaatggtcggtctcggtctgcgtcaaagggcagcgctcgcgctcgcatggctaccggccggtgacgatccgctttgatctgatcgcgggttttgcgctggtcgacaattacccggaggagccgccagggttgatccaggcgcgcttgctgcaggaccggctcgcagatcgccaatcggactgcgatcgtcttttcccgcgtggcagggtgcgccgcgacgaacctgattatgccgagctacggctcgagatctcccggctcgccgcgcggatcgcgcgggtgcgcgccaatgcactgcacacttggaccgccggtattgtagcccgagcatcggcgatcactgtcattgcgccgccgctcgaggaggacatcagaacaccgcacggcgacgccaaatcctggggtgcccatgtcgaagtagtgtcggcaatcaatcgcgaagcgctcgcgcaagccccgggagtgacgatccgcatgctgcaatacaaggcggccgaggccggcatcgcttgccacgtcgtcactgacccggaaccgccgctcgccgtcggtcgcgagcttgtaaccgccggcaaaaccctgcgccgcgcacggcgcgctcatcgtgaggagatggcccatggccta

SEQ ID NO: 64738 - DNA, 20 bp, unknown
  Direct Repeat
cgccgggaaccacagcggga

SEQ ID NO: 64739 - DNA, 20 bp, unknown
  Direct Repeat
ccgccggggcaatagcggga

SEQ ID NO: 64740 - DNA, 20 bp, unknown
  Direct Repeat
ccgccggggcaacagcggga

SEQ ID NO: 64741 - DNA, 20 bp, unknown
  Direct Repeat
ccgccgggtcaacagcggga

SEQ ID NO: 64742 - DNA, 20 bp, unknown
  Direct Repeat
ccgccggggcaacagcggga

SEQ ID NO: 64743 - DNA, 20 bp, unknown
  Direct Repeat
ccgccggggcaacagcggga

SEQ ID NO: 64744 - DNA, 20 bp, unknown
  Direct Repeat
ccgccgggacaacagcggga

SEQ ID NO: 64745 - DNA, 20 bp, unknown
  Direct Repeat
ccgccgaggcaacagcggga

SEQ ID NO: 64746 - DNA, 20 bp, unknown
  Direct Repeat
gcccgccgggaacagcggga

SEQ ID NO: 64747 - DNA, 1191 bp, unknown
  TnpB Polynucleotide
atggccaataatcgccgatacaccttcaagctccacccggacccgtggcaagaaaacgcactgcgcgatcactgcaggctggtcggccagctctggaacgccctgctacatatgcaggaggagcagtaccggcgcacacgcggccagcgcggtgtgtgtcacggggacggaggtgtgcgggtcgtggagacgcgcgcaggcaggcacacgctgggaccgaagtcgcatctcagcggcttcgacatgggctatctggtcagcgagcttctggcatgcgatcccgagtggcaggcgctttcgacttggacgccgaggcgcgtggccgacgcgttggcgaaggcgttcgatgcgtttttccgccgggcgaaacagggcgcggggtcgcagtcgggctatccgcgatttcggtcctatcgccgtggcgaacagacctggctgccgcaccgattcgcctcgggatgcaagctgacgcatcagcgcggcacccgctgggcgctacggctcaagggcgtcgacggtgacatcgtggctcggggcaaattccctggagacccgaccaagctcacggacgccgacatacgctggcattctggagcgtggtggctgtccgtggggtgccagatcgagcgcgcccgagacgccggcgaccgaccgctcgtggtggtgctggacggcatcgacagcttcgcgcgggtcaacggcctgcccgttctcgcgtcggacgtaggactgccgccgcccgaccggcggatcgagtcgatccagcagcgcatggccgagctgccacgcggttctgtcgagtacgccgccctccgccggcagaaggcgcgcctggaagcgagggcgggacggcagcggcgcgaagcgctgcatgagtggacttcgaggctagtggcgggcgcgagcgcgattgacctgttggtgcctgccgacctttcaggcgctctcgcgtccggtcgcggcgatcaatacgaatggggcggcgcggtcgagctgaaggcgtcgtttaaccgggccgtgctggcacagggactgagcggctgcgcggcaatgatcgaatacaaggccgcagaggcgggtatcccgctgacgcgtgccacgcatgacgcgctcagcgtcggcaatctggcggtcgagaaccgcaaggcatctcgccgagttcggcggcaactacaggagtgcgcagcatga

SEQ ID NO: 64748 - DNA, 35 bp, unknown
  Direct Repeat
gagtaccacgccgacgcgccggcggatatgcgcgg

SEQ ID NO: 64749 - DNA, 35 bp, unknown
  Direct Repeat
gagtaccacgccgacgcgccgacggatatgcgcgg

SEQ ID NO: 64750 - DNA, 1629 bp, unknown
  TnpB Polynucleotide
atgaccaacaacactaaggcggcggaagcgtccggcaaggtcatgcgcgggtgcaaaatcaaactgtatccgaagccggagcaagcggccaagctcgacctgtggcggcggcgggcacgcacgctgtggaacctgctgctcggcatgcagcaggcggcctactccggcaagccgtatcggccggagctcggctggcggcgcatctgggccgaggtggcggaactcaattaccgcctcgccagcgagcggcgcgaagtgcgcttggccgatggccgagcgaccagcgcggaggccaagccgccgcagctcgacaagatcctcgcccgcaacggcggggacgacgcgccgaagctgttcatctgggagaccgattgccagaaattgatggcacggctcaaggccgtgccgctgacgggctggatcggcgagctgccctcacacgccgcccagcacgtggtgaaggatttgataaaggcgctgcaagccatgctgcgcgagcgcggcaagcgtgccgccggcaagcccggacgcgataccgggttccccaagttcaaggcgaaccggtatgcagccggctcgatctatttcgccaacacacagatcgcgtttgattgggatcggcggcgcatccgcttcccggcgggactgaaaaccatcaagtataaaggggccgagaacatcccggcgggcgccaagctgatgggcgccagggcttggcgccagggtgaagagtggtggctgtcggcgcagttcgagatggccgcgccgccgccgctggccaagaccggccgcgaggccggcgtgaaaatcgccgcggccatcatcctgacgacggtcgatagtcaggggaggtcgaggcaggttgacacgccgaagcaggacaagcgccgtgtgcggcgcatcaagctcgccgggcgcaaattggcgcggtgtctcgccgcgcaaaaggcaaaggaggagaagatcgccgcccgcacggcgcggcgcaagccctcggtcgcccgcctgccctcgggagcagcgcgaagcgcgccgcccgagggcaagggcacggcggcgggacgcgtgaggatcggccgttcgcagggcttctacgcggcctcggcgcggctcgccaaactgcatgcggaggagcgcaacacccgcgacgacctcctgcacaaagagacaagccgcatcgttgcgcgctacgacaccatcaccgtgcaggagatggacgttgcggcgatgatgaagaagccgcagaaacacgagaaacggctgcgccgccgcgagcggcggctggaggagggagcggcgccgccaaaacggcggaacctcaaagtcatgcgcaaggtcaaccgccgcgccgccatggcccgctgccgcaccctgctcacctacaaggcgcacgacggcgggcgcgtgctgaacatcacgcatgcgctgatgccgatcgtgcaggagtgctcgcagtgcggcgcgctgcacccggagatgcaggacgggcggccggtgctgcgttgtctcgccaccctgccggatggcacggtgtgcgacgccgtgctcgagcgccgcaagaacgcggcggccaacgagttgcggcacggacgcaccaaccgcgaagcttcggagaagctcgatgcttag

SEQ ID NO: 64751 - DNA, 28 bp, unknown
  Direct Repeat
ggaccgccaacgcgcgcaggggacagcg

SEQ ID NO: 64752 - DNA, 28 bp, unknown
  Direct Repeat
ggcccgtccacgcgcgcaggggacagcg

SEQ ID NO: 64753 - DNA, 28 bp, unknown
  Direct Repeat
ggcccgtccacgcgcgcaggggacagcg

SEQ ID NO: 64754 - DNA, 28 bp, unknown
  Direct Repeat
ggcccgtccacgcgcgcagggggcagcg

SEQ ID NO: 64755 - DNA, 28 bp, unknown
  Direct Repeat
ggcccgttcacgcgcgcaggggacagcg

SEQ ID NO: 64756 - DNA, 28 bp, unknown
  Direct Repeat
ggcccgtccacgcgcgcaggggacagcg

SEQ ID NO: 64757 - DNA, 28 bp, unknown
  Direct Repeat
ggcccgtccacgcgcgcaggggacagcg

SEQ ID NO: 64758 - DNA, 28 bp, unknown
  Direct Repeat
ggcccgtccacgcgcgcaggggacagcg

SEQ ID NO: 64759 - DNA, 28 bp, unknown
  Direct Repeat
ggcccgtccacgcgcgcgggggacagcg

SEQ ID NO: 64760 - DNA, 28 bp, unknown
  Direct Repeat
ggcccgtccacgcgcgcaggggatagcg

SEQ ID NO: 64761 - DNA, 28 bp, unknown
  Direct Repeat
ggcccgtccacgcgcgcaggggacagcg

SEQ ID NO: 64762 - DNA, 1359 bp, Rhizobium sp.
atgatgagtgtgacaagacggtatacattcaagctgtatccaaactcagcccagcttattgcgcttcaagagcaggccgtattatgcgcccgcctatggaatgctgcacttgaacagcgcgaaatccagtgggcgcatgagtgcctgcgcaaaagcaagggtgagcgaaaaggattatcgggttttgatcaacaaaaagagctaaagttcattcgcaccaatgatccagcctatgcggccatgtcatctggcagcttagaactcactatcaaaaatttagatctcgcattccaggcgttctttaagcgcgctaaagctggagctgggaaatcctccggttatccgcgatacaaatcagccaaacatgccgatactattccacatcgggatgcatatggctggaagataaagccagcaggcaaacatttcaaaatttacgccaaagggatcccccacgagattaaagctcggggaaagtttcccacatatccaatagaaattcgcaccatgactcttatcaagcgcggtggcgcatggtgggcctcaatcgttgtgtttatggaagaacgacgcacagccggggctatccctctatgtgttaacatggatcttattgaaaaatttgcggaggtgaaaaacctctcaaacggggaatgtcttcccggcttgactttggaatcttattccaaggaagagcaaatcattctgcaaagtcaaaaggataaactctattccagtgagaacctcgacaatttgcggggcgatgacagtcatgctttccactatcaaagccgggcggagagtgagaacctcgacaatttgcataatgacgacaggctaacgggggagaggtggagcaactgtcttggtaaaaacctcgaaaattttcaagacattagcaaccaaaaactcgacgcaatacgatcaaaaacagatcgttgctacaaacgtttttcttaccgctggaaacagcaaatacaaaggtttgcgaaacttaaggcgaagcaatcacgccaaagagcgcatcatctgcacaattggtcagcattgatcattgatgctgcatctgagattcagattatcactccgcccataaaacaactggcgcgctctgcacgcggcgatcaacgcaatcatggcgcagccgtggatattgtcgcgaaagtcaaccgggcagttctggattatgcgcccgcagccgctatcgccatgctcgaatacaaagcagccgaagcgggaattcctatcattatcctaaaaaacaacgagcatcatgccttcgttggtcaggacatatcaaccatcgccaagatcgaacgcaaaacaaggcgtcaactcaaaaaggacaaagcagcatga

SEQ ID NO: 64763 - DNA, 21 bp, Rhizobium sp.
gtgagaacctcgacaatttgc

SEQ ID NO: 64764 - DNA, 21 bp, Rhizobium sp.
gtgagaacctcgacaatttgc

SEQ ID NO: 64765 - DNA, 1593 bp, unknown
  TnpB Polynucleotide
atggtaacactagcgctaaagagaccagcaatagtagacgcgacggaagcgctggacgctgaataccggtccgcgcgatggctacaccatcgtctgctcgacttcgaagatgagcaccaacgcctgttagactgcgtggctaacgaatgcgcgcccggcgtagtgcgcgtggggcgcatcgttgcccgcctgctgcgccgctcgaaacgacgcgcccgggcgtcaatcgggacctggacacccgatccgcgtccggcgttgctagtgtcgctgaaagcaagactcgatgagctgcgagagcaacgaaacgctgatccgcggtggcgcgaagcgtgtcgctgggcagacacgcctgccgacgatgctcccgtgcgcggggaggcgcgccgcaaagccagtgagaccgacgaggactttgcgaagcgctgcgagaaacggcgcgatcgactgacccgccgcgaggcataccggcacgcactatacgagcaacggcgctgctattggggcacgtataacgcgctttgtaaatgcgtggaccaggcgcgcgttagcgtgatcaaggcacgcaaggccgggctaccagcagagtggcggcggccgcgatttccgcagagtcctcagtcgatctgggcggacaagggattccgaatcgtcgagcgaggcaagctttggtggacgctcgagatgccgctcggcgtgaagccgattcagtgggtgcgctttcgcgccaagtgcggcaactggcacgctataccagaagacgcgcatctgcgtatggtgcaactccgtcgcgaacgtgacgggcatcgatggcgctactccgtgagcatcgtgatagccgggataccagagcggcgtcacaacggatcgggcgtggtagggttagactggggccatcgggaacacggacacggactcgagcgcgagggcatccgagcgttcacttggatcggggacgatggcgcctctggcgagatactgataccgcgcgaatgccgcgaccagttagatcgcatcgatgagctgaaagcgcgggctgacgatgcgtttaatgcgcgaggcttacccgatcgcaaccggtatagttatcgtcgtcgcttaatgggattaggtgtacgcacgcacgaagagtcgctttggcttcagtgggagatgcgctacgagcgccgcatggcgagcgcgcgcaagcggtggcaggcgttgcggcaaggggtgtacctgtcagcagtacgccaactgcggcagcggtacgccgtttttgcgttcgaagacgaaaccggccgcgggcaccgtaagctagacaccgaggagcagacgcggcaccgtaagcgcagtaaccgtgacctgacggcgcgctatgagtttctccagatctgcgagcggtccggcgctcgcgtaatcacggtacccgctcgcaattctacgcgcgagtgtccggagccagaatgcggcggtcttttgccggagaatggcccagaattactggtggcgtgcccgaagtgtgggcgcgtcagagacaaggactacggcgcggcgagagtgattctgcggcgcgctctagaggctctcgcaactgaggcgcaaagtgcatga

SEQ ID NO: 64766 - DNA, 36 bp, unknown
  Direct Repeat
atcacaacagccgcgagaggcttcgaatatctcgac

SEQ ID NO: 64767 - DNA, 36 bp, unknown; identical to SEQ ID NO: 64766
  Direct Repeat

SEQ ID NO: 64768 - DNA, 36 bp, unknown; identical to SEQ ID NO: 64766
  Direct Repeat

SEQ ID NO: 64769 - DNA, 36 bp, unknown; identical to SEQ ID NO: 64766
  Direct Repeat

SEQ ID NO: 64770 - DNA, 36 bp, unknown; identical to SEQ ID NO: 64766
  Direct Repeat

SEQ ID NO: 64771 - DNA, 1170 bp, unknown
  TnpB Polynucleotide
atgagcgagccacagatccgccgatattcattcaagctctatccaacgccggcgcaagacgccgctctgcgagagcaggccgccatgtgcgcgctcttgtggaacgcgcttctccagatgcgggaagacaaatatcgccgcgagcgcaagaccttgagcgctttcgatcaagggaaggcgataaccgagctgcgcgccgaattggcggaatggcgcgaaatgccgcgcgggacgcaagagcgcgtcgccgacatgctcgatctcgccttcaaggccttctttcgccgcgcgaagcaaggcgccggccgcgagtccggctatccgcgctacaagcgcatagcggcctccgcaaatgttccgctgcgcgagcctgtcaaatcttgctggaagttcacgccgaagacatcggggagctggcggctgaagatgcgcggcgtgccaggcgcgctcaaggcgcgcggcgagtttcccgcttcgccggtcggcttcaagacggccgatctcaaattctatgatggcgcatggtggttttcggtctgcgtcagcgtgccgccgcgccgcacagccggccgccaggcgctgaccgtcagtttcgacctgatcgatgaattcgccgccgtcacggatgcgaacgggcgatgcgcgcccggcctcaatggcgaactggtctctgaccagatgcaggttcttagcgccgccatccaatcggcgcgcgatacaaaattcgtcaaattctcctgccgctggcgccgcgaggttcgccgcatcgcacggcttaaagcgcgcgaggcccggcgaaggcgtgaggcgctccacaaatggacgaccgccgtggcgtccacagcgaatgtgctgacgatcatcgctcctccgatcaaggacaacacgaagaccggccgaggcaatgagaaattccacggcgccgaagtcgagacgatcgccgccttaaatcgctcggtcttgtcgatggctccggccatggcgatccaaatgctcgaatacaaaatgcaggaggttggcgcggcctgcgccgtcattaagccggaagatcatcagattcgcatcggccgtgaattgcgcgccgcagcgattgaaacgcgtcgcgcgcgacgcaaggtaaagaagatggagagtcaacatgggtgcggttcagaaaatttcgccgtttga

SEQ ID NO: 64772 - DNA, 28 bp, unknown
  Direct Repeat
cctgctcgcaagagcgaacctcgcgcgc

SEQ ID NO: 64773 - DNA, 28 bp, unknown
  Direct Repeat
acgcatcatgcgagcgaacctcgcgcgc

SEQ ID NO: 64774 - DNA, 27 bp, unknown
  Direct Repeat
aagcgccgatgagcgaacctccgcgcg

SEQ ID NO: 64775 - DNA, 1764 bp, unknown
  TnpB Polynucleotide
atgctgcggcgctataccttcaaggtgcatttcagcaagcgccgcgccatgcggcgcgcgcaggaggaagccgcgatgcgcttcgcgcggatggcggccgagctgcgcaatgctctgattgagctatgctacaacacctactgctgccgctgcgagagggccggcgcgcctcctcccgtcgaccctcgtgtggttgcctatgccgtacgggacaggaccaaggcagaggcgcgcgagatcatcgcctcctaccggcgcggcctcggcggctcgatgcggcgcagcgagccgcaatggcacaagcccgagcgcccatggccgcaggagcgcaaggaaaagctgcgcgccacgatgcggcgtcgcgaagaggaaaagcgcgccaggcgcaaggcgccggcgaagccgcgcaagccgccccggcaagccagcgtgcgggcgctcgcgctggcggagctcaccggcgagatcacggccttgcgctgggcctgccccgagtgggccgaaatgccgacccatatgcagcatcgggtcgccgacgggctcgtcaagtcgctcgccgccctcatgcgcggcgacgcgaaagcgccgcgattcaagcggaccgatcgcgcgaaccggctcccgctcggcgccaaaggctataagctcgcgccgcagggccgcgagcggtcgcgcgccggccggtcccgcgcgagcgctcgaaactggaaattgaccgtcacggggctgccggggcacatgcgcgccgtcggcgagttcccggccgaggtcaggcaatggaagacggccgatctgattttccatgccggatcatggtggctatcggtatgcgttgagattgagcgcgagcgctctcacggcgcagaagaggttacggtcaggctcggcctgatcgacgagtttgcccatgtggaaggggcaacgggtccacgctggtgcccgggcgagggcgttcgcgcctgcgccgaaagtccgcatcgtttccacgacttggcaggaggctctgacaacgccgcagatgccgttgcggatgggcgggccggattggccggcattggccacataggagcgaggtctgacaacgccgcagatgccgttgcggatgggcgggatcaggacggttgccggaatcctcggcgactaccacctgacaacgccgcagatgccgttgcggatgggcgggatcaggacggttgccggaatcctcggcgactaccacctgacaacgccgcagatgccgttgcggatgggcgggttatcaaacctttctcgatccctcaatcaaaacggccggccgagccggtcgcagacgccgccgccgacgccctcaaggccgagcgcgaccgccgctaccgccgcggctcgcggcgatggcgccgcgccgcccggcgcatcgccaggatcgaggcccgcgccgcccgcaggcggcgcgagcgccatcatctgtggacatcgcaactcgtgcgctgcgccggcgccataacggtgatcgctcccgacattccgcaattcacgaaatcagggcgcggcgacgcgcggaactggggcgccaacgtcaagctcgccgccgccctcaaccgtcacatcctcggccaggcgccgatgctcgccgtatcgatgctgcaatacaaggccgaggaagccggaatccggtgcgacctcatcgaagacgacgcgccggagatcgccgtcggccgcgaccacgtcgccgccggcaaagcccagcgccgcctgcggcgcgccatcagaaaggacgcagcatga

SEQ ID NO: 64776 - DNA, 36 bp, unknown
  Direct Repeat
ctgacaacgccgcagatgccgttgcggatgggcggg

SEQ ID NO: 64777 - DNA, 36 bp, unknown; identical to SEQ ID NO: 64776
  Direct Repeat

SEQ ID NO: 64778 - DNA, 36 bp, unknown; identical to SEQ ID NO: 64776
  Direct Repeat

SEQ ID NO: 64779 - DNA, 36 bp, unknown; identical to SEQ ID NO: 64776
  Direct Repeat

SEQ ID NO: 64780 - DNA, 1161 bp, unknown
  TnpB Polynucleotide
ctgtccagcccggctgtctatgcgcgggcggcggcggcttacatcgccaagaccgggcgcaacccaacccgctaccagctcgccggctacccgaagcgcaagaacccgcacaagccaaagggcatcccgcatcggtttgcgtcgggttgtcggttgaccaaagacccgcggcacaagcgctcgtggaaactgtcgttaaagggtgtgccggagcgaatccatgcgcgcggcctgttcccgttcgagatcaccaaatggaccaacgccgatgtcatgtggcatgacaataactactgggtgtcagtgtgcgtcgagggggattgctcgcgcgagcacggcgatcagccgaccaccatcgcgttcaacacattggacggtttcgtcgaggtcaacggccaccccatgcagtgcgacgatctggtggagacgcagctcctccagaaccaactcgacgagatgaagtcggagcacgacatcctctatccgcggggcgagcaacgcaccgacgaacaacggaaagaggctgtagactcgtggcgggtgatctcgcatatgtcggctcggatcgcccgcaagcgccgcaatgcgttgcacgggctgaccgccaactgggtcgatcaagcgagcgaactgacgatcatcaccccgcggatcagcgagcatacccagacgccgcatggtggtgagaaggagtggggggcacacaccgccatcgtgtctgagctgaacaggaacacgctcagtcaggtgccggctatggcgaccgccatgctcgaatacaaagcgcgcgaggccggcattgactgcacggtcgtggtccaggacgagcccgacatcgggggtggcggccagttggtcgaggctggcaagcaagcccgccgtatgaagcgtcaagtcaagcggctagcgcgtagggtaccaccgagagtgactccgagggggcagcggacggcgcctcgtggacaaaggcgttggtcgatgggctctctcggcggatcactatccccacgccgtcttccgcttcacgtaaataccccgcgagccagtaaagaccgttggctcgcggcggcaattcgcctaaatagaaaatattacaaggcgaacaagaaacatgaagaacccagctttcagcaccatcatttcgggccgactaatcgttga

SEQ ID NO: 64781 - DNA, 33 bp, unknown
  Direct Repeat
caatacccggctcgccggggcaacagcgagatc

SEQ ID NO: 64782 - DNA, 33 bp, unknown
  Direct Repeat
caatacccggctggccggggcaacagcgagagc

SEQ ID NO: 64783 - DNA, 32 bp, unknown
  Direct Repeat
aatacccggctcgccggggcaacagcgagagc

SEQ ID NO: 64784 - DNA, 33 bp, unknown
  Direct Repeat
caatacccgactcgctggggcaacagcgagagg

SEQ ID NO: 64785 - DNA, 1038 bp, unknown
  TnpB Polynucleotide
atgctttatgtcaaggggattggcaaccgcaaaaaccggaatacctggattcaggcgcgcggccagataccgctagagaggccgctgcatcgtccctgtcgcggggccactattgtgtgggaataccgcgaatggtttttgtcggtatgtttcgactacggcccgataggcgaggctttgccgccgcagcccccagcatcgattgtcggtttcgacttgctcgatgattttgccgtggtcaatgggataacggagactcccggcgaattggccgatacgacggcgatacaaactgacatcgatcggcttaagggcgagcgcgatacgaccaaggataaggacgaaaagcagcggatcaagctagagatcattcggcttttacggaagcgcgacgacaaacgatcaaacgccctgcacgtttggacgcaccggctggttgcgcgttccggcgacctgacggttatcaagcctgatcttaccgagcacgtcgagacaccgcacggcaacccgcgggattggggagccaacaccgagatcgtcagcgatctaaaccgcatggcggcgcggctgtggtgccccggcatggcgattcaaatgctgagctacaaggcggcggataagggcatccgatgcgatgtcttcgacgatgatgatccgaatatcgcggtaggccgcgagatggtgcacgctggcaagcaagtgagaactgcgcgccgggcgcaacgacgaccgcgcaattccgcccggtcgcagtttcacaaggagagagcgatggctttgaagtttacggttcccgagttaaaaaccgcggtcgacatggcgatcgacgctggcacgagcgagtgcgacgacaaggtgacgcagcgcgaggctacaagaaaagccacgaccgcggcgacggttgttcgcggcgtcggcaccgagcttagggtgcaactgactgaaaccgatcggttggtcgaggccaagcgcgcggcgaagtgggagcagcgtgacgcggcggaaggcccgtcaccggaaaccggctcggcggggtaa

SEQ ID NO: 64786 - DNA, 26 bp, unknown
  Direct Repeat
ccggctcggcggggtaagaccgagag

SEQ ID NO: 64787 - DNA, 26 bp, unknown
  Direct Repeat
ccggctcggcggggtaagaccgagag

SEQ ID NO: 64788 - DNA, 1176 bp, Stappia sp.
atgggaaaacgcaagacggaacgcgccggtcttccgcgccggtacacgttcaagctctacccgacggccgagcaggctgccgagcttgagcgccaggcgcagatgtgcggcgacctctggaacgcgctcttggagcggcaggaggagacctatcgccgatggctccagggccgcagcgagcgggcccgcctgaccttcttcgacatgacggctgagatcacggccctgcgtcacgaatgccccgaatgggccgagctttcggtctggacggcccaccgtgtcgccggagcgctggacgaagcgttcaaggcgttcttccgccgcgcgaaggcaggtgccggtgcgtcgtctggctacccgaggttccgcccgcgccgccttcagacgtggttgccgcaccggggcaaaagcggattcgcgatgcaccagatgcagcgtgacgggtgcgccaggcagctcgactggctggtgtccctgaagggcttcgacgcaccgatccgcgccatgggacggtttccgtccgacccgctgatcgagcgtcacctcgacgtggaccttaggttccgagacgggcgctggtggctgtccgttgccaccgagatggcggcgcgcggctcgcacggccctcgcccgacgatcgtgcgcctcgacctcatcgactgcctggcgcacgtgaacgggcaccccgtcaaggcgcacgacatcggccttcacctcgacgacctgctcgccgagcgcgccgaggtgcagcgcgaaatggctccgctgaaacgcggctccgacgactggcgcgagtgcgccgagaggctgtcgcggctgtccgccaagaccgcgcggcgccggcgcgaggccctgcatgtgtggacgacatcgttggtgcgacaggcgtcccgcgtgtcggtgatccgccccgcctcgatcaaacacgacacggcctcgggccgcggcgacgagcgctcttggggcgccgccgtcgagaccaaggccgaaatgaaccgggccgtcctggcgcaagcgcctgggatggtcctgcagatgctcgcctacaaggccgccgaggcgggcatcgaatactcggagacggcggccccgacccttgcggtgggcaccgacacggtccgcaccgcgaaagccacccgacgcgcacggcgcgaagcccgaaaggcagcagcatga

SEQ ID NO: 64789 - DNA, 1782 bp, unknown
  TnpB Polynucleotide
ttgcaccgtcggctacctcgccgcgggcgaaggcgagccgcccgaacccgcgaacgtgaagcgcgctgtagctcgcgctcgacggagactggaggggtaagcggctgcatcacggtaactttgagccgcgagcatacaacacgcaatggtcaaatcgagtcaattggaggcgcagctccatgctctctgcgacgggttaaaatggcgacgaaagtactaaagttaggggttcgcaggctgtcacctgagaaccgtcaggagttcttctgcgaagcgttggcggcgcgtcagtcacgccacgccatgacggaaattgcgcggcgctccgaccgaatgtttcgagacctcgagggggacatgtttccctccttggcacgggctcgggttcgagctgcgcgcatgcatgggatactcgacactattcgtcgagtccaacgacgcgggcgcagtgactaccgagacgctctgcacgccctgatacgggcaacgatcgagcgcgaacaatcggaaacgaaagctcttcgggttgaacgcgataggagcgaggagttccgtgctcgagtcaaagccgctgacgcggacaatgccgcccagctcaaagcactcaacgcgagtaaaacttgctcgtggggcacattcaacgcacagcgtgaggcgcacgaccgcgcaatgaaagcggtgttcgctcgacgtaaacaagggctcccgtctgaggttaggttttcgtccgaccgcacacggttcatcgcggcgcagatccagtgtgaggcggacaagaaagggaccgaaaaggacccgcagtcatgggcgaacatgacgcgcgatgatgggcgcggacaggcgcgactagtgaagctccgcgaaaccagcaaaggcgcaatctatgagctccgaattaggacagcaaacggttgggtttgcgcgaaggttcacatgcgcggctgggaactccctgtcgatgcgaggatcccaactgtgcgtttggtcgctacccctgtcggtcacggttggcgctggcatgcgtgcatcaccgtcgtcggcagttggcccgagcgagaactgaggccaggagctgtcggttacgattgggggcaccgcgagggtacggacggcagcgtgcgcgcgtattactacgcgacgtccgatggcgagcacggcgagatccgattgccgccaaccgtgcgacgcgcattagaccgcgccaacgaagtacggagcgagcgttctcgcctactcgatgatgcgcgtggattagtgcccgagatggggcgctcccgttcaccgcgtaagctgctccgcgcgattcgcagcacaccgacaacggcagctgtgttgctcgcttacctgggcgaggaaacccgtctagcaacgcaagaggacaatcttcgtcgcaaggcctacaacatccgcaccgaggtctaccgacgcgcaacccgttcgctgaactacgaggttcgcgcaatcgaggcgctcaagaaagacaccatgaagaagatgggcgtcgagggcatgacggcgcgccgggggcgagccaatcgcgacctcgtcgcggccagcgaattcgagcggtggagctccccgacaatctcggtgcccgctcgcaacacgagcaagacctgccacgtgtgcggtgaaatcaatcagataggcagcgcgactacctggaaatgttccgggtgtggaacgtctcacgaccgcgaccacaacgcggcaatcaacatcatgcggcgcgcgctcgaaaagcacgtcgcaagtgtccggatcgaaaaggatgccgcatga

SEQ ID NO: 64790 - DNA, 36 bp, unknown
  Direct Repeat
ttcaactggaggcgcagctccatgctctctgcgacc

SEQ ID NO: 64791 - DNA, 36 bp, unknown
  Direct Repeat
ttcaactggaggcgcagctccatgctctctgcgacg

SEQ ID NO: 64792 - DNA, 36 bp, unknown
  Direct Repeat
ttcaactggaggcgcagctccatgctctctgcgaca

SEQ ID NO: 64793 - DNA, 36 bp, unknown; identical to SEQ ID NO: 64791
  Direct Repeat

SEQ ID NO: 64794 - DNA, 36 bp, unknown; identical to SEQ ID NO: 64791
  Direct Repeat

SEQ ID NO: 64795 - DNA, 36 bp, unknown; identical to SEQ ID NO: 64791
  Direct Repeat

SEQ ID NO: 64796 - DNA, 36 bp, unknown; identical to SEQ ID NO: 64791
  Direct Repeat

SEQ ID NO: 64797 - DNA, 1584 bp, unknown
  TnpB Polynucleotide
ttgcatcgggcttgtcgtctacgccgcgtgcgtgggcctgtcgcgggccgaggcggcctatcggatcgagaggagagtgtgatggctgggagccggactttcgccagacgctacacgttcaagctctatccgagcaaggcgcaggaagccgctcttgtccgtcaggcggcgttgttggcgcatttgtggaacgcggctcttgaacagcgcgagacgcaatgggcgcaagagtgccagcgcaagccgaagggcgagcgcaaggggctatcgaagtacgaccaaggccgcgatctcaagacgatccgcgccaatgatcctgaatacgcggcgatggggtccgacacaatgaacctgtgcctggtcgcgctcgatgatgccttcaaggctttcttcaagcgggcgaaaggcggcgcgggaaagtcgtccggatacccgaaatacaaatcgccctacgccatcgaaaacaagggggctgactgcacgatctggcatcgcgagcaccggaagggctggcgtctcgatcaggcaggcaagcagttcaaggtctacgccaagggtatccccggactgatcaaggcaaggggccggttccctgttggcatgggcgagcttgacctccgcgacatgcggctgatccgagtcggcggggtgtggcagctctccgttgtggtgaagatggaagcgcgtcgagttcctggcgctcacaaggcgacggttgagttcgacttgatagaccaatttgcgtcggtgaaagtcggcgcgaacggggaatgcctccccggctgggagggtgattttcaatcgcccgacgagcaaatccaccctcaatctcaatggcttgaacagcaaaccgctgtcgatgcctcggaaatcggggcggaaggcagggagacgatcctttgcgcgaccctgggcgaagctgtcgatgcctcggaaatcggggcggaaggcagggcggcaaagacgaacgacgcgggatcgattgctgtcgatgcctcgggaatcggggcggaaggcagggatcagggtgcttgtgttgccatcggcatggctgtcgatgcctcggaaatcggggcggaaggcaggaggctggtgctcatgcggcctccgagagcggctgtcgatgcctcggaaatccagtccacgggcgaccgccgcttcaagaagttctcctaccgctggaagcaggagcgacgccgcgtcgccaagctcaaggccaaggaagcccgtcagcgcaaggaagcccttcaccgctggacgacgaagctcgttgccgaagtcgcagagcttactgtcgtgtgcccgcctatcaaggaaaacacagcatcggcgcgcggcgacgaaaagcgtcacggcgctgccgtcaagacggtcgccatgctcaatcgccatgttctggcacaggcaccggcaatggcgatccagatgctcgaatacaaggcggacgaggctggaatcccgttcgcccggttcaccccagacgaacacaagatcgccattggcgcgcagatttccagcgctgccaaggccgtccgctcaaccaggcgtgcaatcaggaaagagaaggaactgctccatgtatga

SEQ ID NO: 64798 - DNA, 36 bp, unknown
  Direct Repeat
gctgtcgatgcctcggaaatcggggcggaaggcagg

SEQ ID NO: 64799 - DNA, 36 bp, unknown; identical to SEQ ID NO: 64798
  Direct Repeat

SEQ ID NO: 64800 - DNA, 36 bp, unknown
  Direct Repeat
gctgtcgatgcctcgggaatcggggcggaaggcagg

SEQ ID NO: 64801 - DNA, 36 bp, unknown; identical to SEQ ID NO: 64798
  Direct Repeat

SEQ ID NO: 64802 - DNA, 1329 bp, unknown
  TnpB Polynucleotide
atgaacacggagggggctatgcagatccgccgctacacgttcaagctctacccgacggcggctcaggtcgcccggttcgagcggaacctcgacctgcatcgggcgctctacaacgcggcgcttgaagagcgcatcgactgctatcggaagaccggcaagacgctcacgcgcttcgaccagtcgcgatcggtgccggaaatccgcaaggtctatcccgagatcggcgagcttcaggcaaacgcgatcatcgagacgctggtgcggttggacaacgcctatcaggcgttcttccggcgggccaaggccggcgcgggcgcgtccagcgggtttccgcggttcaagggcacgcactttttcagttcgtggtgctacccggccgactacgcgttcagcttcgaacagactggcccgtcgaaattccgcattcgcggcggcgggccgaagaaggacgacacgctcggctgggtcaaggcccgcggcgccttccctgtcgaaggctgggcgccgaggacggcgacgatcatgcggcgagacggcggctggtggctgtcgctcgcggtgcagatcccggcgcgtcgagaggcgggcacggccacgaccacggtgcacatggatctgatcgaccgcttcgccgcggtcgagatggtagggccgacgcacggcctgcgcgatgcgcaaaccgccggagaggctgaccgcgggtgtagcagatgcaccaacgccgacgggtgcgagccccttgcaagccccgatgcggcggacgtgggtcatgttccacctcctgccgaccaaggcggatgcggggcgtcgttgaagtcgttcggtggacgcgagaactccatgtcaggcccggcgctcgccgatgccatcgacgccgagcgccgcctcgacgaactgaagtccgagtgcgaccgcaacttcaagcgcggctcgtggcgatggagagaacgccgccggatcatcgcgagggcttcggcacgcgcggcgcgcgctcgcaaagaagccctgcacgtctggacgacgcgggtcgcccgcgccagtgcctcgctcaccgtcatctcgcctgccgtctcgactgagaccaaatcggccaagggcaccgtcaagcgccccggcgcggccgtccagacagtcgcatccgtcaaccgtgccgcgctgtcgcaggcgccggccgccgccgtccagatgctcgcctacaaggcggttgaggccggcatcgagttccgcgagatcgcggacaaaaccccggcgatctcgatcggccgggacatctccgaggcgaagaaggccgagcgcaaggcgcgtcgggccgtgagaaaggcagcatga

SEQ ID NO: 64803 - DNA, 1455 bp, unknown
  TnpB Polynucleotide
gtgtacacagaatcagaagattctaacatagatagtgtgctcaattcgagggaagctaacacagatcagccgcgcattgatcgccgttattcgtggaagttgcaccccacagcacagcaagatgcgcgcttacacgaacaggcccgcatgtgcaccgaattgtggaacgcactactcgaaattgattttatattacagaatgtccgggcatgggtttttgataaggacgccttggggccattggtattcgatttagcggggaacctgcgggttgtgtccttggcagatattttgctgcgcaggcaatacggcttgcgcacacgtgcagagcatctggttactgcgatcggtgccgctggtgcaattcagtatcagccgggacaagatatccgcacacggttgcctagcgcgtatgatcgcgggtactggatcacgcagttacgcgacttgcagcccgaatggctggcattgtcaacatggacacctagacaggttagcgaaaatctcgccaaggcatggaaacactgttttacgccccgcgctaagcgcattcccggaagaaagtacggcgcaccgcggttcaaatcgctggcgaatgcctttgccataccccatcggtttgccagtggctgccggttggaacatgccggtatgcacgaacgcagttggtggctttatctagacggtgtttccgatcagaagctgtggcgccgtgggcgcggacgcggcgacgtgtgggcacgcggaaagctgccatcaccagcgcttaagtggacggacgcggatgtgcgtcatgttgatggacactgggaaatatccgctgctgttgtcatggaacagcgccgcactttgatcgggcgcggtattccgatcacggttgagttctgtgtcattggtggtcttgcactggtcaataacgagcaagtggaacttgtcgaattgataaaggcacaggaactggacgttaaacatgcaaatatgcagcgtgaatttgatcggaattggccacgcaacaagcgctggaccgatgatgaatggaataaccgttgtgaggataaggccgaaatcggcaggcttgcgtcacacatcgcccgagtgcgccgcaacgcactccatgtgtggactaagcaactggtagaacgcgcaagtgtgttgactattattaaaccggcttctatcaaggattttacacagacggcccgcggaaatgtgaaaaactggggtgcggccgttgagatagtgtcggaaattaaccgcgacacgctatcacatgcgccggctatggctgtgcagatgctggaatacaaggcggaagaacttggcattccgtgtcaagtcattgaagatgatacaccagaaatttccattagtaaggcatttgttgccagtcgtaaggtatcccgacgcagcgcgcgcgagacaaagaaaggcgtgagtgaaaatgagaaagattaa

SEQ ID NO: 64804 - DNA, 36 bp, unknown
  Direct Repeat
aagaaataccccggcctgccgggttaaaagcaggag

SEQ ID NO: 64805 - DNA, 36 bp, unknown; identical to SEQ ID NO: 64804
  Direct Repeat

SEQ ID NO: 64806 - DNA, 36 bp, unknown; identical to SEQ ID NO: 64804
  Direct Repeat

SEQ ID NO: 64807 - DNA, 36 bp, unknown; identical to SEQ ID NO: 64804
  Direct Repeat

SEQ ID NO: 64808 - DNA, 36 bp, unknown; identical to SEQ ID NO: 64804
  Direct Repeat

SEQ ID NO: 64809 - DNA, 1827 bp, unknown
  TnpB Polynucleotide
atggctagaacatcaaaacctacacgcgctttagcctcgttcggcgtctatggattgcccaccgaagatgagttggcagttttgaaattagcggacgcctttcgagaagaactctgcgatcaaatttggcaagagtacaggaaagaaatcgacatccgaaacgccattcccggtgtgttcgatgctatggtgcatcttgagcacttaaagtcgttcatctatgccattgaatcagtggtcaagcagcggaacgccaaagagcgagaccggaatgcaatcacggtcgaggaaaatctgaaactgaaagctgcacgctctgaattggagtcggccgagaaattaaagaaagaaaagttaaagggctggtgggacttgaagaagagtttctcaaaatggctcggcgaaagcggccaagcacggaaaaatgccaagacgttagaatctcgcaaggcaattttgggcaatctcgcttgcccgaccgaattcaaaccgttgtttgacttatacttattctctgacagcggccgaaggggtttgtcggacaagtatcaagccttggggttgcattccagcatacgtgccgagatagtcgtagcatcagaaatcaaaatcaagaaggacgcaccggggattcggtacttctatgacagaaaaccatcgccgcaaccttggacgaaaatcgtcttacaaatctctggtggtttgaaggttagcgaagcgttggatggaaccgcaacattaaagttgacgcccatctacacaaatcacaaaaaatccggggacgagactatttacgaggttcagcaacaaattggcactcgccaacacccacggttgttgacttactcggtgaaactccaccggtcgttgaaacaacatgccaccatccaacggtggtctttggtggttcgacaaaataaacgtctagtcattccaattgtgaccgacatggatttttctaaacctgccggacaaggtgtgtttgcgtatgatttgggctggcgggttacgaatgagggtgttcagatcgcgcaattctttggcacacacgttaatgagaccttaattttgccgaactggttggttgccgcgaggatgtcatataaagagttccaatcaaaatgggacgccgaagccaatacacggttgaaggtcacgggttacaccggtaaagtgactggggtcgcaggggtttacgaattcctgaagcggcatgatgatctgtccatgcggaactggatggatgattgcgaatatcatgctcgtgcagcacacaccttgcagaaacgtgccgaacgaaccatcgtgaaaatttacgagctagtgtcgagtcgggtatgccggctacacgatacgatagttcccgacagcatcgacatcgccaaattgatccgttcaaaaaccagggacttgactcgacccgatgacatcgcctcatccaccagagaacgacgacaatgccttgctccgggtaagttgcaggctcttcttcttggctacggattgaaaacgctattggtggattgcgccggtgaatcaaatgtgtgcttgaattgtggcgctaacaacccaacgtcacgggacaaaaaacggaaatgccggaagtgcaagcatacttgggaccgtgacgaaggtgccgtccttgtgcgattagcgagagccgacatgctcgatcccaacctggatacctctcgcaacactgacctattcagcacttacgtcaaaagtcttggggtgaagacaggaccaaagactaacaaaccaaaccaccgctcgcaatacacgtcgcaaaccactgataaatctgtagttacgactccggggtaa

SEQ ID NO: 64810 - DNA, 25 bp, unknown
  Direct Repeat
caagcgtgcaggcaaacactgcaac

SEQ ID NO: 64811 - DNA, 25 bp, unknown
  Direct Repeat
caagcgtgcaggcaaacactgcaac

SEQ ID NO: 64812 - DNA, 25 bp, unknown
  Direct Repeat
caagcgtgcaggcaaacactgcaac

SEQ ID NO: 64813 - DNA, 25 bp, unknown
  Direct Repeat
caagcgtgcaggcaaacactgcaac

SEQ ID NO: 64814 - DNA, 25 bp, unknown
  Direct Repeat
caagcgtgcaggcaaacactgcaac

SEQ ID NO: 64815 - DNA, 25 bp, unknown
  Direct Repeat
caagcgtgcaggcaaacactgcaac

SEQ ID NO: 64816 - DNA, 25 bp, unknown
  Direct Repeat
caagcgtgcaggcaaacactgcaac

SEQ ID NO: 64817 - DNA, 25 bp, unknown
  Direct Repeat
caagcgtgcaggcaaatactgcaac

SEQ ID NO: 64818 - DNA, 25 bp, unknown
  Direct Repeat
caagcgtgcaggcaaatactgcaac

SEQ ID NO: 64819 - DNA, 25 bp, unknown
  Direct Repeat
caagcgtgcaggcaaatactgcaac

SEQ ID NO: 64820 - DNA, 25 bp, unknown
  Direct Repeat
aatgcgtacaggcaaacacttcaag

SEQ ID NO: 64821 - DNA, 1299 bp, unknown
  TnpB Polynucleotide
atggccaagcgcaagaccgaacgcctgggcgcaccccgccgctacaccttcaaactctatccaagcgcgaaacagaatgagacgctgttcgctcaagcacaaatgatggccgagttgtggaacggcttgctccatcgcaatgaggagcaataccggcgcacgcgcggccagcagggcgtgatgcatgccgaaggcaagcgcttgctcagctatgaggacatgaccgccgaaatcaccgggctgcggcatgcctgcccggattgggccgcgctgtccgtaggctcggcccgacgggtggcgaatgccttgagcgacgcctttcaggctttcttccgacgcatgaaggaactgggcgaaccaggcggttatgagacgcgggcggcggactggcggtcgaaaaaacggggcaaccctcggtggagcgaacgcaatccgacccgccacgaactggccggctatccgaaatatcgccgcatcgcgcaagcggactggctaccgcattgtttccagagcggctgcaagctcgccgctgatggcggacgccgccaacgcccgaacggccgtgcgagcgactgcaaatggcggctcgcgctgaaaggtatcgacggctcgatccgggcacgcggcgagtttcccgaacaggcgctggcctggtcggacgcggatttgcgacatgcggatggccattggtggctatccgttggcgtcgaaagcctgtcaagtcgggatgcatccggcgacgccgtcaccgttcggatggatctgatcgatacatttgcggcggtcgatggcgccgatgtcggtccgccggacttcacagccgtgcatgccgcgcaggatcgcgtcgatgtattgaaatccgagcgcgaccagcgctggccgtggccagccgggaagcccaggccgaacagtcgggcctatcgtgaaatgacgcggcgcatcacccggctcgaagcccatacaacacgtcggcgacgtgagttgctgcatgagtggacgacggctgttatcgcccagtctgggcgcatcaacgtgataaagccgcccatcagggatgcaacacgctcagcccgtggcaacgcgaaggactggggcggcgctgtcgatctggtcgccgacatcaatcgccgcgtgctgtcgcaagccccggcttcggccgttcaaatgctggaatacaaagcccttgaggcaggaatcccgtgcgtcattcatgacgttcaaactcatgtcgcagtcggacgcgacatcgcagccaccgtgaaagccggacgcaaggcgcgccggaaatgtaaggagtaa

SEQ ID NO: 64822 - DNA, 28 bp, unknown
  Direct Repeat
ggtcgtcctatgtgcgggccgaggcggg

SEQ ID NO: 64823 - DNA, 28 bp, unknown
  Direct Repeat
ggtcgtcctatgtgcgggccgaggcggg

SEQ ID NO: 64824 - DNA, 28 bp, unknown
  Direct Repeat
ggtcgtcctatgtgcgggccgaggcggg

SEQ ID NO: 64825 - DNA, 28 bp, unknown
  Direct Repeat
ggtcgtcctatgtgtgggacgaggcggg

SEQ ID NO: 64826 - DNA, 28 bp, unknown
  Direct Repeat
ggtcgtcctgtgtgtagtccgaggcggg

SEQ ID NO: 64827 - DNA, 1317 bp, Deltaproteobacteria bacterium sp.
atgattgtatctcgagtatatagatacagactagagcctacacctcaacagaagaaatatcttttgcgtgtgggaatgggttgtagatacatttacaatctagggcttcagcaaagaagcttggctaggaatgataaactgcctagtttgtacgagcttcaccagcaacgtttgtcagaattccagcagcagaaagatgagagtgaggagaagcaatcattggccaagcaattttcgcttgggagcgattcctcgacaagacctatcaagcacatgatcactgggcagaagcagagtaaagagttgacggcattgcgtaggcaaacggattggatgaaagaaatcccattcagttgcctgcaaaatgcgctagttgttgacctgcaccaagccttccagcacttttatcgtcgtgtacgcaatggtaagaaaatttcggaggcttcgaaaaattcatttggttaccctgtaccacgccgcaaatcgcacctttcaattctttggaagccgaacgatgtcagcatcaaatctttgtccaaggcctgcggtggtaaggattatttctccgaaattcggatgccaaaatgcccaggtctgatgcgtatgcgtcaggatcggccgattcctgaggcagccaaaattggtcaaaagcgggtaattcaggaatccgacgcacattggtatatcgggtttacagtggaagagaatatcgattggcactcggctgctgaagagattggtttcgtaactcttagtggtagcactgttagcttgcaagacggtactgtttatcctctagctggcaaacaggataggacttggaccctggttcgagtggtcgatcaaaaaattgctaagaagcgacgccaattagcaagaaaagataagttctcagaaaactggagaaagcaaagtcagcaaatttcgaagcttcagcacaagcgggctgaagcgctgaaatcgttgcgtcatgagattaccaatcaactggcctctcggtttcgatcactggttgtgacagacttgagcgcattaagtggtccagtggattctgcggaacctttgctgggtgttgccgattttcttaaacaacttgactacaaaatgaattggcacggtggggaactgaccctcgccatggtccctgaattagctcaggggtgtagtcagtgtggtagggtgaaaagttttgttcagagaaatttgaatagcttttgctgcaatgtttgtggatttgagactctgattctggccaatgttactcaaattccactaagcgccaagcattcagagaatgaactgagtaggtacacctga

SEQ ID NO: 64828 - DNA, 1335 bp, unknown
  TnpB Polynucleotide
atgctcatcaactatccctacaagttccgtctggaaccgactgaagagcaggaaaagcaactttaccacttcgccttcacctgccggtttatctacaacctagccctcgatcaacggaacctcgcaaaatctcccgatccactcccgtccctgctggagatgtggcagaaacgtctggcggacaaggaggccggagttaaacgggagcgtgaaaaagtagattttgaagaagaaaggaaaaaggaaatagtccacaaggggattaatttcaattttcagtctgctcagatgacggtgctgagaaagaatgtggaatggatgggggatgttccattttcatgtcttcagcaaactttgatgtcactccagacggcatttaagaatttctttgatcgagtgaaaaaaggccaaagggtttcagaaggcaggaatccttttgggtttccagtttatcgcagccgataccgtttatcgattccgttcaaaccggtagatgtttcaatcaagagggtttgtgagcgtgccggtggtgaagaaggtgtgtatttttcggaagttaagatcccgttgatcggtctggtgaagttccgacagaatcggcctgtgatcggcataaccaaaaccccgaccattaaacttgaaggggataaacattggtacgtggtgatcctgaccgagcaggaaatcgatgatccagaacaggctcaaggtgaaatcggtatagatttaggcgttgcaaaaatgatcactctcagtgacggaacccactacccgttgacggagaaacagatcaccaccctgaagaatattgaaaagctttatgatcggatacggttgttgcaagcacgatgcgaccgaagaaaaaccaaattctcaaaaaattggatcaaggataaaagaaagatcgcaaaactcaaacaccggcaaatgaagagccggaatgaacttcaccatgagatatcccacgccgtcactgacaagttcggcaggattgcggtggaagatttgaacatcaaagggatgactgcttctgctgcaggaaacgttgaagaaccggggaaaatggtgaaacaaaagtcaggattgaaccgcagcatccttgaaatggggtggggtaaatttgtcggccagctggaatataaggctgaatggaaaggtggagaggtggtcaaggttgatccaaaaaataccagcaggatgtgttctgtttgcgggcatgttgctgcagaaagcaggaccactcaggccaagttcaaatgtgtccagtgtggtcaccaagaaaatgcggatgtgaatgcctcaaagaatatcttgtccaggatgaatgaggtgtga

SEQ ID NO: 64829 - DNA, 27 bp, unknown
  Direct Repeat
tctgacccacgtacgcgggggagtttg

SEQ ID NO: 64830 - DNA, 27 bp, unknown
  Direct Repeat
tctgacccacgtacgcgggggagtttg

SEQ ID NO: 64831 - DNA, 27 bp, unknown
  Direct Repeat
tctgacccacgtacgcgggggagtttg

SEQ ID NO: 64832 - DNA, 1308 bp, unknown
  TnpB Polynucleotide
atggcggctgaagaaacagatatagttgtatttcgcacgcgattacgacctacggaggcgcaggaggcgttgctctaccgcaattgtgccggatgtcgttttatctataactttgtgcttcaagttcagaaggagcggcatgaagtattcagtgctgctcgcgagaaatttctagcagataatcccactaagacaaaaaaagacttcaaacctagcgattcagagaaactcttttctgcatatgaccttaagaagctaatagccgtcattaacaaggaagagaataccagttggctttcagagttggattcacaaatccttcaagactccgttcttaacttcggtaaaacttggaaacgattttcgacaaaaattggtggttacccaaggtttagaaatcgcgatatgcacaatgggtttggacgagcaaatggtgataaatccaaattgattagggataagcgattcacattatccaaaattggttccatcaaaatgtttgaggaacctaaaccaaaggtttctgatgaagttcaatatctaattgataatggtcaactggatttgagccgtcctactagctacatggtttctcgtaaggctcacaagtggtggatttcaatcagatggcaggttcctaaaactatcattccagttcgcgaaggaaaaagtgtgggtatagacatgggcgttgcagaatgggcaacaaccagtgatggcgaacatttaggcagggacaaacatgtagaaaagaaacttaagcagttaaacgaacgtaagaatttctatcaacgccaactggctcgtagaccaaaacaaaaaggggaggatgggaaaagtttccatgggtcaaaccgagttaagaccaagaagaaactggccaaggtttctagcaagattgctgagataagaaggaactatagccaccattcatcaaaggatttaaccactagatacgctaagattgctcttgagaaactgaacattcagaacatgactaaaagcgccaagggaaccaaagaggagcccgggaaaaaggttaaacagaaagctggtcttaatcggagcatacttcagcaaaattggtatcagcttaggtcaatgttggaatacaagatgttgagaaatgggggtaaaattgaagatgttgaccccaagcatacttcccagatgtgttcggtatgcaatcacgtggctccagagaatcgtaaatctcaatcaaagtttaagtgtgttaaatgcggacatgaagaaaacgcagacttgaatgcagcaaaaaacatctacagaattgcttttggcgcgtag

SEQ ID NO: 64833 - DNA, 29 bp, unknown
  Direct Repeat
gttcattccgcgcgggtgtggagacactg

SEQ ID NO: 64834 - DNA, 29 bp, unknown
  Direct Repeat
gttcattccgcgcgggtgtggagacactg

SEQ ID NO: 64835 - DNA, 29 bp, unknown
  Direct Repeat
gttcattccgcgcgggtgtggagacactg

SEQ ID NO: 64836 - DNA, 29 bp, unknown
  Direct Repeat
gttcattccgcgcgggtgtggagacactg

SEQ ID NO: 64837 - DNA, 29 bp, unknown
  Direct Repeat
gttcattccgcgcgggtgtggagacactg

SEQ ID NO: 64838 - DNA, 29 bp, unknown
  Direct Repeat
gttcattccgcgcgggtgtggaggtactg

SEQ ID NO: 64839 - DNA, 1497 bp, unknown
  TnpB Polynucleotide
atgaaaaaattagtaaacagaaactggacacttcctctatcgatgagtaaaaaagataaagagatgtttattgagtggaacactaaactaaatctgctgtggaatactcttgttgcaattattgtatcatatcaatacttaaagaaaaatgacgaagtcactccaataaagctgaaaaacaaatatgaagaactaaaatcttttggtcaagcaaaaaaagtaaaaagagaagaattaacagaattcttaaagtatgccttaaacaaaaggcaatggccaaaagatactaaagtcaatttcgaactgctccctttaacaaataaaacatttaagacaatggttgagtcccataagtattcagataaaaaagagaaaaagttcggattcaagaatgcaaattttctatctatgtctccaacaagtacatctattaagaacgaaaacaaagacgtactagaagagttcccatccatagtaagagaggggatattaaagaaatgctgcacagcctttgaaaaaaagaagaacaaatttgggaaaacagtatttccgactccagtaatgaagctttataaggatagatacaatgtttctattccgttcaagaaagcaacaggatataagagtttaggatatttagagaattctaagaaatttatctgtcaagttctaaaaggaacaacagtaactgttaaaaatacttatcctgtagacttagggaccgtaactaattatactattttatgtgacgggagaactaatgaatggaatatttctatttgtcataagtattatgaagactttcagaaaccaaatttagacgaagtaggtcttgatttaggagtaaaagaagcaattacagcttcaaatggtatgacgtttaatctgccaaatgaaaagctcgcaaaattgcaaaagaatagaaagaaacagcaaagaaaattatcaagagcctttgaggaaagtgatgaattaagaattttagagcttaaaaagagaattgcaaagatagataataagattgtaaatattagaaataatttttcccataatgtttcaaaagttttagcgaaccataaggaaatatattttgaaaaattaaatatccaagcaatgacaaagtcagcgaaagggacgactgattccccaggaaagaatgttgcagctaaaagaggtcttaataaggcaattttagataaaaattggggaagaattaaagaaatgacagtctctaaatctaaagatagaggagggaaagtttttgaaatagaccctaaatttacctctcagatatgtaatgaatgcaatcataaaagtaaagaaaacagaaaaagtcaagcagagtttaagtgtgtaaaatgcggacatgaaaacaatgcggatgtaaatgccgcaaaaaatatcctaaagaagggtaagaaattaaagaagtcaggagatattaaaagtcttactgaggacaagaaaaaagaggctgtaaagaaaaaagcagcttaa

SEQ ID NO: 64840 - DNA, 31 bp, unknown
  Direct Repeat
aagggtgttacccctgcgtgtagccgtaaag

SEQ ID NO: 64841 - DNA, 31 bp, unknown
  Direct Repeat
aagagtgttacccctgcgtgtagccgtaaag

SEQ ID NO: 64842 - DNA, 1203 bp, unknown
  TnpB Polynucleotide
atgacagaatttattaggacattcaaaatgagactgcttccgactgctccgcagtcggaaagactaaataattggttctaccactatcgcctcgtctacaatgcggcactcgaacaccgcaaggccaggtgggacaactggaagataccaacctcaaaatacgaccaaaagaaggagcttcccgcaataaaggcagaacttgagtggctgaaggacagcccgtcctgcattctgcaagatgcgattctcgacttcgatacgtctcttcgggccttttttcggcgaatcaaagaagcaaagttggccaggcaaatgggcaagaagcccgagaaggtcacttacccaaaattcaaaaatgaatacatgaaccaatgcatacgattcaatcactccctgtgcagcttccgacaagaaaccaagaaacttggtttcatcaagatccctaagatcggagagcttagggtatgctggaatcgcaaagttcccggaagactcaagagtattgcggtcaccagagaccggagtggtaaattctggacttgtatcactgtggcaattgagcataccccttcggtcaatcgagggggcacaattgggattgcccggggggtgaggcagacggtgactacctctgtagggcaaattttcaatttgccctatgatgatttggcatactggtttgagaagtcacgtattgcccgtcgctcaatgagtcgcaaaaagaaatatggggccaactggaaaaaggcacgcgatcgattaagaaaaattgatcgaaagatcgccaacatccggaggaactggattcatcatgcgaccaaacaacttgccactgaacatggcaaaatcttcatccgtgacctagggatcaaggaactcagtaaatcgggtaagggcaccgtggaccaaccgggcgagctggttgaactaaaggcgaaattcaaccgcttcctccttaacacggggggcttcatattctatgaaaccctgagatacaaggccccctggtatgggtcagagctcggagttgttgggcctgaatacacagaacagacatgctctcgttgcggacatatccgtggcgaacattcattcaaagctctgttcagatgtgatgcctgcaattttgaggaaaatgctggtataaataaggcagtaaatgttcttaaagaaggacgcgatttagaggcagtacctgtctaa

SEQ ID NO: 64843 - DNA, 28 bp, unknown
  Direct Repeat
tgtcacccgcatacgtagggatgaaccg

SEQ ID NO: 64844 - DNA, 28 bp, unknown
  Direct Repeat
tgtcacccacatacgtagggatgaaccg

SEQ ID NO: 64845 - DNA, 29 bp, unknown
  Direct Repeat
gtattccccacacacgtagggatgagccg

SEQ ID NO: 64846 - DNA, 1623 bp, unknown
  TnpB Polynucleotide
atggacaaagaaattatattaaaaaaatacggtaggatttatagactttatcctacaaaggatcaaatcaaaattttccaagattggcaaaatggtgccagagcatatggcaatgaaattttatggaatcaaacagtttcggaaagatttttcgatgaaaagaaacgagatatcgtcgaacttaaaataaaggcacttaccgatgttggaaaaaccgaagaagaaattaaggttctaaaagataaagacttctgggttactattaataaccaactctcggaccaatatccgatcaaagacgcgattcgtaatggttttaaagaaatcaggacagaattaaccatagataagaagggaccagatcgagaacttttagataagattatattagaaagatatcccaattatgttgatctaaaagattcatctaaaagttatctgggtgcatgtggagagggaggaatgtataaggtcggaaccggaaaatataaactaccttcggcactggtcatagggattttaaaatctaatgataaggcatggaccacgttctacgaaatttgtaagaacggaaaaagtgttcaacatctcgttggtgcaaaaaagaaaaaagccgcaaaaggaaagagagttgataatttcggaaaacccaagtttatgaaaaagtgggaaattcctaatcttttattttctaccggaaatctgaaaggaccgaattttgaaaaacaacaggtatttattcaaactttgaagacaccgatcaaggcaaaattagatgtttatcccatagggattatcacttcttatacagtttcaaatataggtaagaagtggtttatttcttatggtctaaagaccaatgtaatagaaccagaacatcaacacatcgaatcacaggtagggctagatttgggtgtaaccaaattcttgaccaccaccgatagttcccaaaagacccgaatttttgaattagacaaaacctctaagaaaagactggcgattttgaaaaatcgggtgaagatgatccagacgattatttcgagattagaacgagccgaaccgatgaactatatagaaatcaactggaaactaaaaatgtccgacaagacaaatccagattataaacatttccagagacatagtaataattggtttagatcaaatcaaaaactggttgaaacgaaatataaaatcaatgaaattttgaaaaattttagacatcatgtttctaatgtgatcaccgataaatatggaaccatcgggatagacaatctacaaatttctaacatgaccaaatccggtaaaggaaccaaagatgaacatggtaaaaatgttaaacaaaaggcaggtctgaataggtcgatcttggaacagggttggggaatttttaataaccaattgaaatataaggcatcatggagaggtgcaaaggttatcgaaatcgatcctaaatacacttcccagacatgtcccgactgtggacacgtttccagagacaatagaaagacacaggcaaagttcgaatgcattgattgtggacatagtgccaatgccgatgtggtaggatcacaaaataatttgaaaaagattaataaaaaggttgcaatacctgagactttgtag

SEQ ID NO: 64847 - DNA, 36 bp, unknown
  Direct Repeat
ctaacaatagagtttagagaatgaatatgattgaga

SEQ ID NO: 64848 - DNA, 36 bp, unknown; identical to SEQ ID NO: 64847
  Direct Repeat

SEQ ID NO: 64849 - DNA, 36 bp, unknown
  Direct Repeat
ctaacaaaagagtttagagaatgaatatgaatgaga

SEQ ID NO: 64850 - DNA, 36 bp, unknown
  Direct Repeat
ctaacaatagagtttagagaatgaatatgaatgaga

SEQ ID NO: 64851 - DNA, 36 bp, unknown; identical to SEQ ID NO: 64847
  Direct Repeat

SEQ ID NO: 64852 - DNA, 36 bp, unknown
  Direct Repeat
ctaacaatagagtttagaaaatgaatatgattgaga

SEQ ID NO: 64853 - DNA, 36 bp, unknown; identical to SEQ ID NO: 64852
  Direct Repeat

SEQ ID NO: 64854 - DNA, 36 bp, unknown; identical to SEQ ID NO: 64847
  Direct Repeat

SEQ ID NO: 64855 - DNA, 36 bp, unknown; identical to SEQ ID NO: 64852
  Direct Repeat

SEQ ID NO: 64856 - DNA, 1245 bp, unknown
  TnpB Polynucleotide
atgatggtaggttttaaaacaaaagttggtacaaataatcgccaaaacagcactcttcttcattggagcaacgccagacgttatgcttttaattatgcattagggttatgtttcatagaccaagaaaccctatctcctgatgaaaaatggaaattggcaaaaataaatgattacgataaattttttaaccaaggtaaataccctcttggttttaaaaagccaacaaaatctggagtaatgttaggctcaggaatccacacatggttaaatgggatacccggtagtgttggtcagattgctataaagtatgacctcaaagaggcatggcagcgatgcttcaaaaagcttggaggcagacccaagtttcaatcaaagcatcgcaggaaaagttttaaattaagcaatacagactttaaaaaggaaaagaatcttgatgacgttggggcttacatcctccacaacagacttggaaagatgaaactgggagataagatacctgcacgtatcctgaatgggagacttatgaataccacgttcagcaaaactgctggtgactggtatgttgctttcatctttgaaatacctgacgaagattattatcagatctctaataaaagggaaatgtgtgttggtgttgacttaggtgttgcacaatatgcaacatgttatgattcagaaagtggaacagcatggcatgaggaataccctaaaggcccgttaaaggctattgaagatcgcattcgtattcttcaacgtaaacaagccaaatgccagaaaggtagcgtaagatacaaaaaacttggtgaaatgattactacacgtaaggccaaacagggaaatatccgccaagacgcctgccataaatttactaaaaagttgactacaaaatcctacaaaattgtcttggaggatttgaaagtatccaatatgacgaaatcgtcaaaaggaacgactgaagaacatggcaaaaatgtgaaggctaaaacaggccttaatcgagagattctgaatatgagtctatactcggtacgtatgcaattagcttacaaaacgatcaggtacggaagtgagttaatgctagttaatcctgcatacacttctcagacgtgttctgaatgtggacatgtagcaaaagaaaacaggaaaacacaagaaaaattcctatgtgtatcttgtggtcatactgaaaatgcagacattaatgctgcaaaaaatattcttaataaggggatgacacagaagtaa

SEQ ID NO: 64857 - DNA, 20 bp, unknown
  Direct Repeat
tgttccccacatatgtgggg

SEQ ID NO: 64858 - DNA, 20 bp, unknown
  Direct Repeat
tgttccccacatatgtgggg

SEQ ID NO: 64859 - DNA, 20 bp, unknown
  Direct Repeat
tgttccccacatatgtgggg

SEQ ID NO: 64860 - DNA, 29 bp, unknown
  Direct Repeat
gtgttccccacatatgtggggataaaccg

SEQ ID NO: 64861 - DNA, 29 bp, unknown
  Direct Repeat
gtgttccccacatatgtggggataaaccg

SEQ ID NO: 64862 - DNA, 1344 bp, Methylophaga sp.
atggggcattatgcatactatctgaggacagatgcaactcagagtcagtctgaaacatatttcagatatgctggagggtgtcgctttctttataatcttgctcttgagcaacggaaccttcgttattttgaaggcccattaccaaccatgcttgagcttgctagggcaaaagaagctagagatgctttaaggaaggcagggattaaaccaaaacgcaaagagtctgcccccccagagaagggggacaagaaggaagtagttcacaagataacctatgcgtctcaaagtgccgagataaagatcttgagaagtgcgtatccatggttgaatgacatcccgttttgttgtcttcaagaaacactcaggaatcttgatcgggctttcgtaaacttcttcaagaataagagcaggtatcccgtatttcacaaaaagtccgggaaggcttctgttaattttcctcccaataggattaacatcaaggagctttctgataaagccgggggaactgaaggattgtactgttctaagtttagggttgtaaagtcaaagataggagaggatgtcggtctactcaatgttcggactgatcgccctattctagggattcctaagtctacaacccttaaatttgaaggtgatggtcactggtggctgagcattacaacagagcaagaaatcaaaaaggaaaaggctaagccggggaagattgggatagatttaggggttgtcagatggattgcattaagcaatgggttaaccctccctgttgaggacaagcacatcaaaacagtatttagaatctattatcttagggaaaagttgaagagggcactgtctaggcttgaccgtaggaaggtgaggggatcgaacaacttcaagaaagaacaagtgaaaatccgttcattgaaatggagaattgcaaaggcaacagaatcagttatacatgagatgacagattacctcacaaagaattacgattatattgctgtggaagccctacgtgtaaagaatatgactgcttctgctaagggaactatagagaatcccggaaagaatgtgaagcagaaaacggggcttaatcgaagtttacttgagaagtgttttggcaaggttgtagagcagataatttacaaagcggaatggagaggaggagaggtacacaaggtcaatcctgctaacacgagcatcacttgttcaagttgtcattatacgaatgagaagaaccgcatagatcaacctagattcttgtgtaagaagtgcggtttctctatgaatgctgatgagaatgcggctaagaacatcttaaggttagccttggatgagtctgcattactcacagcatag

SEQ ID NO: 64863 - DNA, 17 bp, Methylophaga sp.
gacttacccacgtgcgc

SEQ ID NO: 64864 - DNA, 17 bp, Methylophaga sp.
gacttacccacgtgcgc

SEQ ID NO: 64865 - DNA, 17 bp, Methylophaga sp.
gacttacccacgtgcgc

SEQ ID NO: 64866 - DNA, 17 bp, Methylophaga sp.
gacttacccacgtgcgc

SEQ ID NO: 64867 - DNA, 17 bp, Methylophaga sp.
gacttacccacgtgtgc

SEQ ID NO: 64868 - DNA, 17 bp, Methylophaga sp.
gaattatccacgtgtgc

SEQ ID NO: 64869 - DNA, 1224 bp, Methylobacter whittenburyi sp.
atggcaatattgacagcatctaaaactagattgagagtcaacaacaagcaagctgctatgttgttccaatgtattaatgtccgtcgcgtggccttcaactatgcgttgggcaaatggcaacaaatgtacgatgcgtggaaagaggacaacaccaaacctcaaccttcagcttttttgatcgacaagctgttcaatgccgataaagcaaacctgtatccttggatgtatgacgctaaaagcaaattaatagtgccttcctgcgtcggccaagaagccataaaagccgacataaaaagcgcgttcaataatttctttcgccgggttaaaaatggcgaaacacccgggtatccaaaattcaaaaaacgtggcatgggcgaaagctttaccctaactagcgtggtcgttaacaataatcacgtgagcggaaataaacttatattgccgaaggggtgggggactgccactcttggcgatagcattcctgaaggaaaaataaaatcgaccaccatttcatacagggccggtaaatggtgggtctcatttctgattgaaggcgattatgaatatgaatcctgtggcgataaaattgtcggcatcgatatgggggttgccaagttcgccagcttgtcgaatggtattgtttacgatagcgcgaaagctcttgaacagaaccaagcaaaattaaccaaattacaaagacaattggccaagatggaaaaaggcagtaaccgtcgtcaaaagcaaaaggagcggatcgcaaagctgcacaagcgtattgctgacataagagtgagtcatgcccaccaggtttcatccgagctatctaaaaaatatggaatgattgcactggaagacttgaagctaaggaacatgactaaatcagcaaaaggaacagctgaagagcccggtaagcaggtaaagcaaaaatcaggcttgaacaggtcgttattgaatcaaggattgtttgagtttagacgacagctcgaatataaaacagtgcgtcatggtagcgtgttgacgctgataaatcctgcttatacctcgcaaacttgctcggcttgtggttatgtaagcaaggaaaatagaaagactcaggctatttttgcctgtgttgagtgtgggcatattgaaaatgctgacatcaatgcagccaaaaacatcctgaaaaaagggcgttttaaacagtacggcgatataggccggaatttacggacgtggacatga

SEQ ID NO: 64870 - DNA, 31 bp, Methylobacter whittenburyi sp.
gagtgttccccacgcccgtggggatgaaccg

SEQ ID NO: 64871 - DNA, 31 bp, Methylobacter whittenburyi sp.; identical to SEQ ID NO: 64870

SEQ ID NO: 64872 - DNA, 31 bp, Methylobacter whittenburyi sp.
aagtgttccccacgcccgtggggatgaaccg

SEQ ID NO: 64873 - DNA, 30 bp, Methylobacter whittenburyi sp.
gagtgttccccacacccgagggatgaaccg

SEQ ID NO: 64874 - DNA, 28 bp, Methylobacter whittenburyi sp.
gtattttccacaggtgtgtgggtgatat

SEQ ID NO: 64875 - DNA, 28 bp, Methylobacter whittenburyi sp.
gtattttccacaggtgtgtgggtgatat

SEQ ID NO: 64876 - DNA, 28 bp, Methylobacter whittenburyi sp.
gtattttccacaggtgtgtgggtgatat

SEQ ID NO: 64877 - DNA, 28 bp, Methylobacter whittenburyi sp.
gtattttccacaggtgtgtgggtgatat

SEQ ID NO: 64878 - DNA, 28 bp, Methylobacter whittenburyi sp.
gtattttccacaggtgtgtgggtgatat

SEQ ID NO: 64879 - DNA, 28 bp, Methylobacter whittenburyi sp.
gtattttccacaggtgtgtgggtgatat

SEQ ID NO: 64880 - DNA, 28 bp, Methylobacter whittenburyi sp.
gtattttccacaggtgtgtgggtgatat

SEQ ID NO: 64881 - DNA, 28 bp, Methylobacter whittenburyi sp.
gtattttccacaggtgtgtgggtgatat

SEQ ID NO: 64882 - DNA, 28 bp, Methylobacter whittenburyi sp.
gtattttccacaggtgtgtgggtgatat

SEQ ID NO: 64883 - DNA, 28 bp, Methylobacter whittenburyi sp.
gtattttccacaggtgtgtgggtgatat

SEQ ID NO: 64884 - DNA, 28 bp, Methylobacter whittenburyi sp.
gtattttccacaggtgtgtgggtgatat

SEQ ID NO: 64885 - DNA, 1623 bp, Rhodospirillales bacterium sp.
atgctgttcccggcccaggcgctcttgacacgggggccgggatcgtctaactgttggggcgtcggtctttctcaccgccgctccacaaagcagaatggacctgcaccagtgaccagggatgtagaccccacctcgccggattgcaagacgcaggtcttgacctatcgctaccggttgttgccccggcaggtgcaacatcggaagtttgaggcggcggtcgcgcatacctgcgagctttggaacgctgcgctcgaagagcgtgagtcctgcttcaggaagacaggcaaagggcttagctggcaagaccagtccaagtctttgaccgaactccgcaaagataaggaatgggcgcagtattccgtcagcttgcagcgctggccgctcaagcgcctcgacactacattcaaaatgttcttcaagaaacaaggcggatacccgaaattcaagagtcggtttgtggcgcagtcgttcggggtcgtggacgccgacggctggaaagtcacggacaacaagctctacatacagaacattggcaccatccggttcatcaaacatcgtgacttgccgtccgcacccaagacattcaccatcaccaaagagggcggccagtggtatgttggcttttcggtcgaatgcccgtgtgccgaggctgacgacacccgcctggtgattggccttgacatgggtgttgccaaccaaatcacgacatcgaccggcgagtttatcagcgtccccgccgatcattacgccgagaagatactggacgctgaacgcgccctgtcgcggaccaggaagcgttcaaagcgacgccgcaaggttcgggatcgcatggcgcggctcaaagccaaacgagcgcgggttcgcaagacccacaacaatcaggtcacggccaagcttgcgcgtgagaaccgcgcggtcgtgatcgaggacttgaagatcaagaacatgacccgttcggcgaagggcaccgtcgaagagcccggcaagaacgtgtcggccaagtctggcttgaaccgtggcatccttgagtcttcctggggtcagatcaaagagatgctggcttacaaaatggttagggaaggcggtcaactgatcaaggttgacccgcaccacacgtcgcagacctgcgctgagtgcggccacaggcacaaagacaaccgagaggatcaggccaccttcatatgccgcgcctgcggccacactgcgaacgccgacgtgaacgcggcaaagaatatcagaaacaagggtgtacggacccttgggggctctgccccggaaacctctgctggaaacggcatgagaccgtgttcctgccctgtttccaaatcggggtcaggaaacaaaacccaagtaacttcgtggacttacggtgccgtcggttcgtccgcccccggaagcggcgacttgggtggacggctggatcaaggtccatgcggtgttctccgttcgtccgcccccggaagcggcgacttgggtggaccgcagggtctggtggtggaggacgtgggcggttcgtccgcccccggaagcggcgacttgggtggacgcccaatcatcctcgacgccgacggcaagcgttcgtccgcccccggaagcggcgacttgggtggaccaccccactag

SEQ ID NO: 64886 - DNA, 36 bp, Rhodospirillales bacterium sp.
gttcgtccgcccccggaagcggcgacttgggtggac

SEQ ID NO: 64887 - DNA, 36 bp, Rhodospirillales bacterium sp.; identical to SEQ ID NO: 64886

SEQ ID NO: 64888 - DNA, 36 bp, Rhodospirillales bacterium sp.; identical to SEQ ID NO: 64886

SEQ ID NO: 64889 - DNA, 36 bp, Rhodospirillales bacterium sp.; identical to SEQ ID NO: 64886

SEQ ID NO: 64890 - DNA, 36 bp, Rhodospirillales bacterium sp.; identical to SEQ ID NO: 64886

SEQ ID NO: 64891 - DNA, 36 bp, Rhodospirillales bacterium sp.; identical to SEQ ID NO: 64886

SEQ ID NO: 64892 - DNA, 36 bp, Rhodospirillales bacterium sp.
gttctccgggctccggaaacgggtgcttgggtggac

SEQ ID NO: 64893 - DNA, 1368 bp, unknown
  TnpB Polynucleotide
atgccagccgataccactaccgttggattcaaaacccgcattcatcttaataacaaacaaatatctgcatttgaaatatggtcaagagctaggcgtcgagcgtttaactttgccttgaatttaagtgaggtttatttggaacggataaaagttactggcgagaaaaataaattaattaccgaaatcaatcaatttgataaacatttcaatgctagtaagtatcccttaggggtggtaaaaaaagggaaaggtggtgggttaataggtaccggaattaatagttggattagagaacaaaacgtaccatcaaccgcgtgccaaatggcgattaaatatgacctaaaaaatgcatggagtagatgctttaaaaaattaggtaagcagcctcattatcaaggccgtgggcgtagagattcatttacattatctagcgcagacctaaagcccaaatttgttaacgggactagtctcacattacctaagtcattaggtacgaccactcttggcgatgcgatcccctattcggaatacaaacttggcaataccgcatttagccgtgaaggtgataagtggtacgtgtcatttaccctcactattcctgctgatcaatattataaacaaccagccaatagagagcgcattgtcggtgtagatctcggtgtgaaaatctatgcagctgagagttcagggaaaaaccatatcgcaccggataaactgactcagctagagcagcgtaaggcgagaatcaaccgcaagattgggctaactgttcacaaaaatttgatgttaactgtgtctagctgtgagcgttgctctgaattagtcaaaggcatgagtgataaaaaacgtctatgtcgcccctgccaacaaatattttaccctctgatgcgtagtcgtaagatcaccaagttgcgtgcctcagtagctcgtattgcagcaaaacaggctgatattagaaataatatggcgcatcaattaacgaccgatttagttaatcgttatgaatttatcgctatcgaagatctgaaagtcgccaatatgaccaaatcttcaaaaggtgatgccgacaatccaggtaaaaaagtcaaacaaaaatcagggttaaaccgcgtcattctaaatgtggcaccttttagggttcggcaaatgctaaattacaaagcagataagtttggtggatccattattgctgttaaccctgcttatacgtcacagatctgtagtgaatgtggtcataaatcagctgataataggaagtcccaagctgtttttcagtgcgtggaatgtggacataccgttaatgctgataccaatgctgcgataaacataaaggaacgcggcattgataaacttaaaggtagcaactag

SEQ ID NO: 64894 - DNA, 28 bp, unknown
  Direct Repeat
tgtttcccgtaagcgtagggatggaccg

SEQ ID NO: 64895 - DNA, 28 bp, unknown
  Direct Repeat
tgtttcccgtaagcgtagggatggaccg

SEQ ID NO: 64896 - DNA, 28 bp, unknown
  Direct Repeat
tgtttcccgtaagcgtagggatggaccg

SEQ ID NO: 64897 - DNA, 28 bp, unknown
  Direct Repeat
tgtttcccgtaagcgtagggatggaccg

SEQ ID NO: 64898 - DNA, 28 bp, unknown
  Direct Repeat
tgtttcccgtaagcgtagggatggaccg

SEQ ID NO: 64899 - DNA, 28 bp, unknown
  Direct Repeat
tgtttcccgtaagcgtagggatggaccg

SEQ ID NO: 64900 - DNA, 1479 bp, unknown
  TnpB Polynucleotide
atgggtaaacagcgggcaccatctctttcgaagagttttcaacattctcgggtcattcgttacaggttgttacctactcctgaacaagagaaggagttgagatcatggcggtggcatttgaaaacggttaccaatgagtatatcaaggcgttacaggaccggatgttggctgctggttgtgatttcactccagaaggttttgctgcacgggctgaagagagagaaagagcacatgctgaaattgattcgtccaagatagataatgaagagaatttatcagaatcagagattgaggaaataaaagaaaaacttaaaagggagtggtctgctgaggccaagggaaaatttcatcatgctgcatggaaggcatggctgggcaatggtgaaaaagatgatccgaaggctgtgaaaaatctggtgcatgcggattttcgtaaaattcgtgagaaatataaaaagaaaacaggcatcaatgcttcctcggttgaggaaatcatgtctaggcttgataaaacttttttgaagtcgatcaatcataccaagtatccaagggctggttttccgaagttcaggaaattttctgaccggtgtaatttttcacttcgtttgtttgatggaacaaaacgggtcaacacggttattggaaaggatactattaagtttccaaagattggccgtattcgttatgtcaaacataaacagatcagtaacaagttaaagggtgccctctgtttcatacaatatgataagcgcaatggtggtttttatgagtttggtataatgtatgagcacaaggtgaataatccttggtgtggtgatgaatgtgttggtcttgatttgggtgtcagcatcaatgccatgttatcgaatggtgaacgacatcagtgggtgtctaaaaaacagtttgacaatatggaacgtatcaaggtattacaaaggaagcgttcccggcttcaaggttccaaaaagggcgagaagcgttcaaatatgtatcacaaattgaccaaaaagattagccgactgcattattccattgcggaagacagaaagcggttgcaatatgaagcagctaatgccattatcaagggcaagaagatgattgtaattgaagatttacaattagggaacatgactcgttctgctaaaggaacgaaggaaaaaccgggaaagaatgtgaaagcaaagtctggtttgaatcgtgcactaacgggtgctgcattgcggcaatttgttggtatactggaattcaaggcggaggaggcagaggtacagattataaaggttccacctgcatacacatcattagaatgtagtgagtgtggtcatgtggataagaatagccgccgtaatcaagctgagtttgaatgcactgagtgtggttatgcgtataatgctgattacaatgcggcaaaaaatattctttcgaaaggggttaagcttcttgaggaagaatcggcgggggtttcagcctgttcgtaa

SEQ ID NO: 64901 - DNA, 1950 bp, unknown
  TnpB Polynucleotide
ttgatcgtctttacctacgaagcccggccccccctcgtcgggctcgaagatgcagagcggcagtttgatctgcggctccactacaagaacgacctcatcggcatcgaacgccgccgccgccagatggacgagtcggcgcagcggtcggtctgccccgcgctggccgcagccgcggaggcagcgcgccaggcggaggcggaggtcgaggccctcgtgcaaacgatggccgcgcagcgcgccaagacgcgccgccgggccgcggatgcgcctgagggcctggccgaggccaaggcccgccgcaaggccgcctgggaggcggagacagcggcggcggggcccgtgcggggccccgtccggcccgcgacggagggatgcctcggcggcgccgccgccccgcaggggaggcggaagaagaaggccaaggcgggattccacgcctttggctgggacgcattgaagggccagttcgtctgcgccctgtgctcccacgcggcgccgcccgcggcgccgcccggagagaggtgggcggagctttcggagctccgcgccctcatgcaccaggcggcgctcgcggcccagcgcggcgcgcgggagaaggcaagcgaagcgggcctctactggcccaactaccagcgcgccgatgaagccgtgacgcggatgagcggcccagagctgccgcgcttccgccagccctccgaggatgaggatggcgagaccgccgtccaccctgccaatggcgggaagatcgtgacggtggcgcaggtgttggagggcaccaaggaggtgtggcttaagcgctgcacctacgaggagtacgtagggccggagctgctcgcgcggcgcgcggcggcggggctgccggtgcgggggcggcgggcggcgggtaaggactacgccctgtgccacctgcgcgtcggcagcgagggccgcgcgccgcgctggctggtgctgcccatctgcctccaccgccccctgccagcgggggcgatcgtcaaatgggcgtgggcgcggcggttccgcgggaagtggtcggtgcagttcgtgctcgatgcgcccgcccgcaccgagccgcgggccgcgggtgggcgggtcgccatcgacctgtcctggcgcccggtgcaaggtggcatccgggtcgccttctgggtggacgaccaaggcgagtcggggcaggtgctgtgccccgactcggtgatcgcgcgcctgcggaaggcggacgaggcgcgggccatcgccgatcagcagtttgacctcgcgcgcggcgccgtcgggctctttctcgccgcccttggggagtggcctgagtggctgcgccagacgggcgcggagcacatcgccaagtggaagaagcacgggcgcctcacccagctcgtcggcctcttgcgacagcaccgcctgcccggtgatgagcagctcctggccaggctcgacacctggcacgctccgcacgagcggccccttggctcggggccggtgtcgtgggaccggcaggatcggcacctgcacgaggactgcgatcggaatgcgcgggcacttgcagagagacatcggctggagctctatcgccgcttcgcggcatgggtcgccaggacctaccgcgaggtggtgctggagaacctcgtgctgaccgacttcgccaccacgcgtcccaccccagaacagggcgcgcagaccgaggacgcggcccttcgccgtctgcggaccctcgcggcgccaagcctcctgcggctcgccgtggtgaatgcggtggggcgcgaagggggcaagatcaccaagctgccggcggcgtttacgagccgggactgcccggactgcgggcacaggaacccgccgagcaccgacctcctggtggtgtgcgagggctgcggcgtgctggaggactgcgataaaagggcgggccgcaacctcctgttggctgcgagcagtccagccgtggcgcaggtgccctga

SEQ ID NO: 64902 - DNA, 19 bp, unknown
  Direct Repeat
caccgcctgccgctgggcg

SEQ ID NO: 64903 - DNA, 18 bp, unknown
  Direct Repeat
caccgcctgccgctggcg

SEQ ID NO: 64904 - DNA, 19 bp, unknown
  Direct Repeat
caccgcctgccgctgggcg

SEQ ID NO: 64905 - DNA, 19 bp, unknown
  Direct Repeat
caacgcctgccgctgggcg

SEQ ID NO: 64906 - DNA, 19 bp, unknown
  Direct Repeat
taccgcctgccgctgggcg

SEQ ID NO: 64907 - DNA, 19 bp, unknown
  Direct Repeat
caacgcctgccgctgggcg

SEQ ID NO: 64908 - DNA, 32 bp, unknown
  Direct Repeat
taccgcctgccgctgggcgtgtccagcgcgac

SEQ ID NO: 64909 - DNA, 32 bp, unknown
  Direct Repeat
catcgcctgccgctgggcgtgttcagcgcgac

SEQ ID NO: 64910 - DNA, 32 bp, unknown
  Direct Repeat
caccgcctgttgctgggcgtgttcagcgcgac

SEQ ID NO: 64911 - DNA, 32 bp, unknown
  Direct Repeat
caccgcctgccgctgggcgtgttcagcgcgac

SEQ ID NO: 64912 - DNA, 32 bp, unknown; identical to SEQ ID NO: 64911
  Direct Repeat

SEQ ID NO: 64913 - DNA, 32 bp, unknown; identical to SEQ ID NO: 64911
  Direct Repeat

SEQ ID NO: 64914 - DNA, 32 bp, unknown
  Direct Repeat
caacgcctgccgctgggcgtgttcagcgcgac

SEQ ID NO: 64915 - DNA, 32 bp, unknown
  Direct Repeat
caccgcctgccgctgggcgtgtccagcgcgac

SEQ ID NO: 64916 - DNA, 32 bp, unknown
  Direct Repeat
cagcgcctgccgctgggcgagatcagcgcgac

SEQ ID NO: 64917 - DNA, 32 bp, unknown
  Direct Repeat
caccgcctgccgctgggcgtgaccagcgcgac

SEQ ID NO: 64918 - DNA, 35 bp, unknown
  Direct Repeat
cgccaacgcctgccgctgggcgcatccagcgcgac

SEQ ID NO: 64919 - DNA, 35 bp, unknown; identical to SEQ ID NO: 64918
  Direct Repeat

SEQ ID NO: 64920 - DNA, 35 bp, unknown; identical to SEQ ID NO: 64918
  Direct Repeat

SEQ ID NO: 64921 - DNA, 35 bp, unknown; identical to SEQ ID NO: 64918
  Direct Repeat

SEQ ID NO: 64922 - DNA, 35 bp, unknown; identical to SEQ ID NO: 64918
  Direct Repeat

SEQ ID NO: 64923 - DNA, 35 bp, unknown; identical to SEQ ID NO: 64918
  Direct Repeat

SEQ ID NO: 64924 - DNA, 35 bp, unknown; identical to SEQ ID NO: 64918
  Direct Repeat

SEQ ID NO: 64925 - DNA, 35 bp, unknown
  Direct Repeat
cgccaacgcctgccgctgggcgcatccagcgtgac

SEQ ID NO: 64926 - DNA, 35 bp, unknown
  Direct Repeat
cgccaccgcctgccgctgggcgtgttcagcgcgac

SEQ ID NO: 64927 - DNA, 35 bp, unknown; identical to SEQ ID NO: 64926
  Direct Repeat

SEQ ID NO: 64928 - DNA, 35 bp, unknown
  Direct Repeat
cgccaccgcctgccgctgggcgcatccagcgcgac

SEQ ID NO: 64929 - DNA, 2061 bp, unknown
  TnpB Polynucleotide
atgaagcggaagaagtcgaagctcccatctcgggtatacaagtatgccctgcgacccccgacgctcaatgccgagctcgtcgacgagtcgcactgtgagtcgaggcgatattacaacaagctcgtcacgatcgagaatcgccggcgacacttctaccgtctctgccgagccaagtacttcccggagtatgctcgcgcggaggaggacgtcagcgcgctcgagctgaggctcgaggaggagcgcacttccatcttgagcaagaagtccgagggtaggacgaggcaggtgagtgacgctgaccgggggagcgttgatcagatcctggcggagctcaagctggcgcggaagcgggtcgtcgagctcgggctgccgatacggatagtggagcacgagctgcgtgtggtgaagctcgaaaccgagcgagcggagcttgctggagcaggcgacgaggacggggctcgagaagttgtcgagaagctagtgaagctggtcaagaagctcgctaagttgcgcgagaggctcgcgaagatcttgaacgagaccgcggttgtcgagcgggtgcgcgaggctgtcgcgaggatgcgcgaggatgtggaggtccacgacgaggaggcgctcgaggccgtcaaggcgctgcggtctagtctctactggggcacttacctgcttgtcgagaaggcgttcgagcaggcctccgcgaagtcgaagtatgacgttgcgtacgatgatacgccttcgcatctgctcaagagccgcatcggtgttcattgggttggagggacgtctgtggaggaggtgctctcgaacgatacgctcatgcagatagtagatccgccggaattccggcagacgaagagtgggatctacaggcccaggtacaagagggacgagcagggcaacatcatctactgcatgctgaggttccgggttgggtcggtcggcaagaagaaggagcccctctgggcggagcttccgctcgcctacgatcggccgctgccggttgacggtcgcatcaagtttgcctatgttacgaggcgtccgctgcgggagcgcaatccatggcagtactacctgtgcgtgtcggttgaggcggcgagcttcgagcgcacgctgccccacgtgacccaggaggggacgacaacggtcaattttggttggcggcagctcgacagcggtaacatcagggtcgcgacggtaaaccgtgacggagggaaggtggagtatgtcgagatcccgaagtacttcgtcgacggccacgtgaagtgcaggaagctgcagggtctgctcgacgagaagttcgaggccgtcaagaaggagatcgccgggtggatctcgtcgagggagcggcatttgccggggatgctgccggagctgttcgtcgagagcttcgagcacgtcaccatgtggaagtcgcagcacaagctttgcgagctcgtgcgctactgggaggagcacagggtggagggggacgacggcatctggtcggtggtcgacgagtggcgagggaggtacttgcacctccatgactggatgactaacgcgaggcggagactgctcggctggcgccgcgacttctatgcgagggtggccaaggatctggtgattacgtcggctcaggtggcgatagatactttcaagatcgccgacgtggcagagcgaccggaggccgaagctgtcgaggaggggggcgagagggcgaggtggaaccgggtggtcgcggcgccgagcgagctccggagggctatagaggtggcggccaagaagtaccattgcctagtgctggctgcgcccactgtggacggcaccaggaggtgcaatgtctgcggggagatctacgagtgggatcctgctcgggagttcgtgcacgcgtgccctgggaaagatggttctgggtgctcggagtgggatcaggacgtcaacaacaccgacaacttggtcgatgccgttgcgagcggcgacgtggtgccgttggttcggccggctgagcacagggatggcgaggacttgatctctagtgagcagttgccctatggcatcgctcgcaagatgctgggcaagtag

SEQ ID NO: 64930 - DNA, 36 bp, unknown
  Direct Repeat
gtcgcgagggcggcgcaggggcccgaacactgcgag

SEQ ID NO: 64931 - DNA, 36 bp, unknown; identical to SEQ ID NO: 64930
  Direct Repeat

SEQ ID NO: 64932 - DNA, 36 bp, unknown; identical to SEQ ID NO: 64930
  Direct Repeat

SEQ ID NO: 64933 - DNA, 36 bp, unknown; identical to SEQ ID NO: 64930
  Direct Repeat

SEQ ID NO: 64934 - DNA, 36 bp, unknown
  Direct Repeat
gtagtgagggcggcgcggcggcccgaataccgcgag

SEQ ID NO: 64935 - DNA, 23 bp, unknown
  Direct Repeat
ccggtcgcgagggcggcgcaggg

SEQ ID NO: 64936 - DNA, 23 bp, unknown
  Direct Repeat
ccggtcgcgagggcggcgcaggg

SEQ ID NO: 64937 - DNA, 23 bp, unknown
  Direct Repeat
ccggtcgcgagggcggcgcaggg

SEQ ID NO: 64938 - DNA, 1767 bp, unknown
  TnpB Polynucleotide
atgaaacgaaaaaccagcacgacgccaaccaagatctggtccttcggggcgctcgcgcccactaccaacggagaactgctcctcgagcagctgttccttggctcgcgttattacaacaccctgatcgaggtggaacaacggcggcgcaaaaactaccgcgacgcgcgctccgaagccgcgcccgcattggctgggttggaagccgaatgggcgaagctcgacgctgagctgagcgtcggcatcgaggcgctaccgaagggtgagaagggcaagaagaagttgacgcccgagctgctcgcactgaaggagcggcgcaaggaagtctcggcccgcatgaaagccgagcgcgaggcattctcggccgatacctccgcaaagatcgctatccaggcggtcgacgaaaaggcacagctcgaggtgaaggccgcgcgcgccgcgaccgatctctactgggggtcgtacctgctcatcgagaagcagatcgagcaggcccgcaagagcaagctcgacccacgtttccggcgcttcgagggcagcgggcgcgtcggtgtgcagctgcagggcggcctgtcgctcgcggagctgacgagtggcgaagacacgcgcctgcgcctcgtggcgcgctcgacgcctgccaaggtcaagaagcccaaggctcaacacgaagtgcacatccgggtcggtagcgacggccgcgcgcccatctgggccgtgctcccggtcattctccaccgcgacatcccgactgatgcgaagattcaatgggcgtggatcaaggtccagaacgtcggaggccagcgtcggttctttctgcagatcgtgatggagtcggagacgttctcgaggaagtcggcgccgggagccggtaccgtcgccgtcaacttcggatggcgcgcattggacgatgggtcgcgccgcgtggcctacgcggtcgacgactctggcaacgagcaggagttcgcgctccctgcgaagatcgagagcagtctcgagttctgcaatggtttacggagcgcacgtgatctccacttcgaagacgcgcgccgcgcgctcggtgcgtacatggccatccatgaggtgccggagtggatgaaagaggacacgcagcacatctggcagtggcgctcaccgaagaagctcgcgaaggtcgctgctaggctcaccagggagctgctcgagggtgacaccagtgtgcagcggtggcgcgcagagcgactcgctgagcccaagcaggacctgtttgcgccggcaccggagatacttgcgtggctcggcaagtcggacctacgcgcgatggcgatctacctagagctgtggcggcagaaaaaccgccacctctggcagtgggaagccaaccagcgcttgaaggcgacggcccaccggaacgagctgttccgggtatgggcgcgccgtctcgctgaccgctatgcggagatccgcatcgaagacttcgacctgcggaagatggccaagacgccggagcccgacgaagagtcgcgccccaagggcttccgtgtgtcgcgcgccgcggcggcgcccggagaattccggatgcgattggcggaggttgcggggaacaagatcgtgaaggcgccggctcatggcaacacggtgacctgcttcgagtgtcgccacgtgaatgaacgctcactcacgcgcctgatggtgtgcgtcggctgcagcaaggagatggaccaggacgccaacaattgtcacaaccagctccgtgagcgcgacggtgatgcgccgagcgtagcggcagaataa

SEQ ID NO: 64939 - DNA, 1779 bp, unknown
  TnpB Polynucleotide
atgacagtccgtatttacgagtaccgcgctaaaacagcgactgacatggctgacctggtcagtgatcagatgcacttggcgcatcgttatcacaacgcgcttgtcgagatcgagcgagcgcggcgccagaaggtgcgcgaagtgctcgaaggtcaccccgacaccgaaaagctcgcaggcgaggtcaaaacactggccgatgaactgcacaacgtgcgcgcggagatcaacctcctacgtcgccaaacccgctcggctgccaagctggcgacgcagatgttgcgagaccgcgcctgcgagctgaagcctcgcctgaaggcggctcgcgccgaccttcgcgttgctaaagcactcattgcggacgacgccgttgttcagacggcgctagcggacgtcaacaagacggccgccgaccaggtgaaaagcgcccgcgctgcgtccggtctgtactggggcacgtacctcatcgtggagcaggcggtcgaacaggccagcaaagcaatcgcggacccgcacttcaagcgctggaccggtaacggacatctcgcggtccagcttcagggcgggctggatgctgcgctcatccacgagcccgacacgcgctgctggatcgaacgaccgaccgcccaatccgattcgcgcaaggggcgccggcggctacagaagaccgtgatgcgctttcgcgtcggcagcgaaggccgcgatccgatcttcgccgtcatccccatcgactaccatcagccgttgcccgcgggacggatcaagtgggtccacttgctacgccaaaagcgcgcgacccgatacgtgtggaaggtgcagttcgtcgtcgacgccgagcctgaaaaggtcgcatgcggccacggcaccgtagcgatcgacgtcggctggcggctacttgacgacggcagtctgcgcgtcgcctactgggtcgacgaattcggccgcgagggcgagctgcggctccccgccatgatgctgcgcaaggaccagcatgcagacagcatccgagctgtgcgggataagatattcgacgaggtcaagccccgcatccacgcatggctccagacagtcgaccacgaggcgatgggcgcagaccccgcgcacgtccatctctggcgcaacccacgacgggtcctgcggctctacgacgagcatcgtgaccagatgcctgccgacctggtggagcgactggaggcgtggcgccgcaacgacttgcaccttgggcagtgggaggttgaggagtcgcgccgggttctgcgccagcgacgagaggtgtaccggcagttcgccaacacgctcagcaccgcctattcgcgagtggtgctggagaagtttgacctgcgtgacgcgactaagcggggcgatgccgaagaaggcacccgcgaccagcgcaagcagaactacgggcgatttgtcgcctgcgtatcagacctgcgccagcgcatccacaacgcatgcggccggcgaggtgccgatattgccgaggtaccagccgagtggacgacaacggattgtcactgctgtcagcaccgcaacacctgggaccaggcagccaaactccgctacacgtgtgaacagtgtggcgcggagtgggatcaggacgagaacgccgcgcacaacctgctcgcgagagccccggcggtgacgcctgtcgaggaaggcgctcgcgagggtcaagacagtggaaagaaggtgctttcccgaaggcagcaacgatttcgcgggatgctcgaagagcagcaagcgcggcgcttgcaaagcgctgatggaggtgagtaa

SEQ ID NO: 64940 - DNA, 17 bp, unknown
  Direct Repeat
tgaaaggatgctcggat

SEQ ID NO: 64941 - DNA, 17 bp, unknown
  Direct Repeat
tgaaaggatgctcggat

SEQ ID NO: 64942 - DNA, 17 bp, unknown
  Direct Repeat
tgaaaagatgctcggat

SEQ ID NO: 64943 - DNA, 1821 bp, unknown
  TnpB Polynucleotide
atgtccacactcattcgtgttcacggactccaccagcccaccctcaacagggacatcgtcaacgaacagattcaactgagccatctcctgtacaacgagtacatctacgtcgaacgcaggcggcgcaaggcataccgcaaagcccaattcgcgttccaggacatcagagacgaacacaagctggtaacggacatcgaattcgaagccagagaggtattcaagtcttacaagaaaacgcgacacctcccatctggggcttcggggaaaacgccaaaggtggctgtccaaaagatctacacgatcctcaccaaagccaggaagaagctgaccgatgccatacggtcacacatcgaggagcttcagcccgcctacgacgagatcgataaaaagtgggggatctacggatcggaaagaaaggccaagaaagctgttagcggtgtcttttggggcacggaactcagaatctcttcggctgccaaccaagcctgcaatgccaaagtggaatacttcgacatcaacggaaaccccaggaacatcgtccagtgggaacacgccccagcattccgagaccccgacaaagacttcgagggcggtctggtttgtgtgcagctccagaacgggatcatgcccgtgtcaaaggtcttcaacaaagacaacattgagcggggatatctgcacatcgccccgctccccgcaaacgccttcgatgagtcattgcctcgtagcgaacgtgccaagctccaacgcacgaccgttcacctccgcgttggatcgaccggatccggaaatcgccagcccatctgggcatcgtggcccttgttcctgcatcgggcactccccgaagcaaagccgggagaaacccccccgatcatcacctgggccacgatcgtcaggaagccatggaagcaggaattcaggtatcgctgggaactccagctcaccatcgaaacgcccgtcgtacttcccaagcagttcaggaatgctgttgcaatcaacctgggctggcgccaggttgaaggcggtgatctccgcgtggcaacctgggtcgactccgacggaaactccggataccaactgctggatgacaaaagattcaggagccgcatccgagcggtggaacaaaaaagaggataccgagacacctgcctgagcaagctccagggatacctcatcagccacggtgtcccatactcgcaatggcgaaacctgaagaggtacgaggaacttcaacaccaggggacccttgctcctgatgtccaggcacacctcgacgcctggatggaagaggatcaccaccactggcgctacgagagcggcagccggcggggagcgctccgctaccgaaaagagatctaccgtctgttcgcgctggagatggcagagaagtacgatgtcatcgtcatcgagaagtacaacatcaagaacatcgccgaggacgaagaccgcctcaaggaaccgtccgcacaacgcgtcgagggatcaccatcggaggctcgccagatcattcgcagcactgctcctcagcacggttgcctgatcctggagggcgattcaaagaaggccacacagcactgcaacgtgtgcggctgcgaagacccatgggacgccgctccgcagatcgaacatcactgcaccggttgcgataccgtctgggaccaggacatcaacaacgcgaagaacatgctcgacagagccaagcccatcctggaaagcccggaagctctcgccaaagcgtacgccaagcaggtcgccaaaaaggccgccagatacgcaaagaagcacaagaaacacgaggaggacgacacggacgaggagcagtag

SEQ ID NO: 64944 - DNA, 36 bp, unknown
  Direct Repeat
gtgacaaaggctatcgggacagccgaaggttccgac

SEQ ID NO: 64945 - DNA, 36 bp, unknown; identical to SEQ ID NO: 64944
  Direct Repeat

SEQ ID NO: 64946 - DNA, 36 bp, unknown
  Direct Repeat
gtgacaaaggctatcgggacagcctaaggttccgac

SEQ ID NO: 64947 - DNA, 36 bp, unknown; identical to SEQ ID NO: 64946
  Direct Repeat

SEQ ID NO: 64948 - DNA, 36 bp, unknown; identical to SEQ ID NO: 64946
  Direct Repeat

SEQ ID NO: 64949 - DNA, 36 bp, unknown
  Direct Repeat
gtgacaaaggctatcggagcagcctaaggttccgac

SEQ ID NO: 64950 - DNA, 36 bp, unknown
  Direct Repeat
gtgacaaaggctatcgggacagcccaaggttccgac

SEQ ID NO: 64951 - DNA, 36 bp, unknown; identical to SEQ ID NO: 64944
  Direct Repeat

SEQ ID NO: 64952 - DNA, 36 bp, unknown; identical to SEQ ID NO: 64950
  Direct Repeat

SEQ ID NO: 64953 - DNA, 36 bp, unknown
  Direct Repeat
gtgacaaaggctatcgggacagcctagggttccgac

SEQ ID NO: 64954 - DNA, 36 bp, unknown; identical to SEQ ID NO: 64950
  Direct Repeat

SEQ ID NO: 64955 - DNA, 36 bp, unknown; identical to SEQ ID NO: 64946
  Direct Repeat

SEQ ID NO: 64956 - DNA, 36 bp, unknown
  Direct Repeat
gtgacaaaggctatcgggacagccgagggttccgac

SEQ ID NO: 64957 - DNA, 36 bp, unknown
  Direct Repeat
gtaacaagggctatcgaaacagccgaaggttccgac

SEQ ID NO: 64958 - DNA, 35 bp, unknown
  Direct Repeat
tgataaaggctatcggagcagcttaaggttccgac

SEQ ID NO: 64959 - DNA, 36 bp, unknown
  Direct Repeat
gtaacaagggctatcggagcagcttgaggttccgac

SEQ ID NO: 64960 - DNA, 35 bp, unknown
  Direct Repeat
taatgaaggctatcgggacagcttggggttccgac

SEQ ID NO: 64961 - DNA, 24 bp, unknown
  Direct Repeat
atcggagcagccgaaggttccgac

SEQ ID NO: 64962 - DNA, 36 bp, unknown
  Direct Repeat
gcgacaaaggctatcggagcagccgggggttccgac

SEQ ID NO: 64963 - DNA, 36 bp, unknown
  Direct Repeat
gtgacaaaggctatcggaacagcctaaggttccgac

SEQ ID NO: 64964 - DNA, 36 bp, unknown
  Direct Repeat
gtgacctaggctatcgggacagcctagggttccgac

SEQ ID NO: 64965 - DNA, 36 bp, unknown
  Direct Repeat
gtgacaaaggctatcggagcagcttaaggttccgac

SEQ ID NO: 64966 - DNA, 36 bp, unknown
  Direct Repeat
gtgacaaaggctatcggaacagtctaaggttccgac

SEQ ID NO: 64967 - DNA, 1062 bp, Mycobacterium simiae sp.
atgctgctggtggagctgcccgtccagcagcatcgccaactgcccgctgacgccgacatcacaggtgcgcgactgaccatccgccacacgccggccgggccgcgcgccactctcaatgtctcagccactgtgcccgatcccgacccccggcgcaccggcccggcggtggcagtgcatctgggttggcgccgcggcgccgacgggatcatcgcggccacgtggagatcgactcgggcactgaatattccagaggaattttgcgccgtcgtagtcgccgagaccacgcgtaccgggcggctgatcgtgcccgcgacactcatcgatgggttcgcccgtgcggatcaaatccgggcccagcgcgggcaagctactcgcgcactgcagctatcccttgtgacctggctggccgaacacgggccgatcgacgatccgcgcacgcccggcggtgtcctcgatgccgcgaccgtcgaacattggcgcggcgtagcgaaattccacgcattggctcgcgcttgggaaatcgccccgccggcggatgccaagtcgatcgcggctctacttctacgctggcagcgccgcgatctcaaactgcggcgcggcccggacctcggccagaggcgtcatgccatcgctgcccgcgacgatctctatcgccggttcgccgccatgctcgccagccaggccaaaacccttgtgctggatgatttgttgctgcctgaactcaccgccgcatccgtcccgcgaccacgtgctgctcacaaaggcatcgcggccgcgcgaagcgtggtggcacccggacggctacgtacgctcgtgaccaccgcggcgttgcgcgagggctgcgccgtcagggaggtcggtcgctttgggctctcccgcatccacggggacggctgcggctacgagaaccccgctgatgcgcggtaccaggccgcgacggtgcactgtgatggctgcgggcaggactacgaccaagatcatgcggccactgcgttgatgctgcgccgggccggcgctatccgtcatggagcgagggcttcgaccagcatcgtcggcccgtag

SEQ ID NO: 64968 - DNA, 1818 bp, unknown
  TnpB Polynucleotide
atgtccgaacgcgtcttccgctacggcggcaggcctccgatgcaacaggaggcgctcgtacggtctcagatgcgccttgcgcacgcgtatcgcaacgacctcgtgcagatcgagcgtggtcggcgcgctgcaattcgtgaggcgatcgcgcaggcgggggacgttccggcgctgagccgcgcggtcgtcgcggccgaagagatgctcgagcgctctcttgcggtcgtgcgcacgtcgaaggtcaaggcgcgatcgcgcaacgccgcgacgccggagctgcgtgcgtcggtcgagcaagcgcgcaaggtcctgcgtgaggccaagagggcgctggccgaggcccgcaagagggtccgcgaggacgagacgatcgtgcgccggtgcgacgaaatcaacgagcttgccggcgagctccgacgaagcgcgcgcgcatactgcggcgtctactggggcacctaccttcggatcgaagccgcgatgcaggcctcgtcgcagatgccgctctacgacggcgccgagccgaacgatccgcgcttcgttcgctggagcggcgaggggacgatcgccatccagctccagcacggtctcgatccaagcaagctgctcgaaggcaaggacactcgtgcgaggcttcgaccgatgccgccgagcgccgacggaaagtgcggcaagaacatctacctgctcgagcttcgcatcggcacggccgcaaagcgccagccgatcttcgcgacgttttcggtgaggctgcaccggccgtttccggagggcgcgatcatccggtggatcgccgtgcattgccgcaggcacgcttcgaacgagcgctggtacgtggacttcacgatctcggtgccggaggtcgtgcgcgcggccgatgatccgacggcgccgaagggagccgtggggatcgacgtcggatggcgcgtcatcggcgatgagatccgggtggcccgctggagcgacgactccaacggtgagggcgagctccggcttccggcggcgctcattcgcgagcttcgttacgccgacacgctgcgtgcgctccgagacgagaagttcaatttggcgatcgggttcatcgtcgggttccttgcggaggtgcccgcgggcgtcgtcgtccccgagtggttcaagagggagcgcttttcgcagtggaggtcgtgcgcgcgcctcgaatcattcgtgcgctactggcgatctcaccgcttcgcaggcgacgaggacctcttcatcgcgctagaggcgtggagatatcgcgactcgcacctctggcacttcgaggtcggtcagcgtcgcaaggcgctcggtcaacgaagggacctctatcgagtcttcgcctcgaagcttgcgaagacctacgcgctcgtcgttctgccgaagttcgaccggagcaagatcgcacgtcgtccgaatctcgagcggcccgaaaagcaccaggtcgaaaaggcgcgcagcaaccgtcatctcgtcgcgacgagcgagctcgaaggggcgatcaagaacgcgtgcgtcgtcgagtacgtcgcgcccgagaacgtgacgctgacgtgctcgcagtgccagatcatccagcagttcgacgcggccaaagaactcgtgcacacgtgcccgaacggccacgtctgggaccaggacgacaacgcggcgacgaacatcctgaaccgccgcgtcctcaagcccgacgcgccgtcgcccacgccgacggatacgaaggaggtcaagcgcaacgagcgctggcttcgcgcgcgcagaggccaggccgaaaggaccgagcgcacgcagaagtcgaagtcgccgtcggacaacgcagcggagtga

SEQ ID NO: 64969 - DNA, 1944 bp, unknown
  TnpB Polynucleotide
atgttgctcgtctacaagttcggagggggtcctcccacggcggccgccgacgtggtgcgtgagcagatgcgatcggctcaccactaccacaacgcgctcagggagatcgagatcgagcgacgagcggcgtcgcgtgccgtggagccgaaactcaccaagttcctctcggccgtcgacgaggccgaggatgccgtcgtcgagacgctcgctgtgctcaatgctcagcgggcctctactcgatcggcgagtgacacggaggagcagcgagctacggtggacgcggcgaagctccagaagaagatcgccgtcgcggcgttgaatgcccagcgcaagatcgcgtgcaagaagccgtccgtgatcaaggcacgcaaggccatctggaagaagcacatgatccgcacccaatcggtgcgcgccgcgaacggcctacactggggcaccggcaagttggtggacgacgcgatgaaggccacgtcgaagatgcccctgtgggacgccagcgaaccaaacgaccctcagttcaaacggttcaccggtgagggtcacgtcggcgtgcaggttcaccagaagggcgcaggcaagcaaggactcaccgtggccgaggtcacgtcagggatccctggccgttggttgcaggtcgtcaacaggccggctcaagagcgggctccggcgcgaaccgcgaagatcgcagctcacagggctcgaaacgcagctcgtcgcgacgcgtccatcgcgtctggtggtggaaacacgtcggagatcgtcgagctacgcatccggatcgggacctcggaggacggcgagccgatcgtggcctcgtggccgatgatcatgcaccgtccactgccggccggagcgatcgtcaagcgcgtcgctgcgtcgatgcgccgcgttgggcctcgcgaggaatggagcttcgacttcacaatcgacgcgagcgcgtgcgcgaagatcgagccgaccggagtcggcaccgtcgcggtggagcttggctggctctccgtggacggcggtctgcgggcggcatcgacgatggacgagagcggagagatgaacgcaaacctaatgcgagtcgcggcaaactcgacggccgacaaagtgagactcgcgacgatgatgaacccgcccctcgtgctcaacgccgaacacatcagcggcgtccgacgggctgagtcgctggcctcgacccgcaagaagaacttcaacgcggcgcttaccggcctcatcggctggctgcgcgagcacgggatgcccgcgtggatgcgagccctcaccgtgaagaagggagtcaagctaccgacgcagaggcaggcgctcgcgcacctcgccaagtgggagagcgcgggtcggctcgcctccctcgtgctccgatggcgttccgaacgccacgagggtgacgacgatggcttcctcgggacggagtactggcgctaccacgactaccacctgtgggcgtgggagtcagagcagcgaaagcggatgatccgatcgcgcagagatcagtaccgcgtgttcgcggcgcagctcgcgaagaagtacgccaggatcgtcgtctcgaacgcgaactacaaagagatcgcgagaaagtccaaagtgaggctcggcaacgaccgagctgcgagcaaccggcagatcgcggcggtcggagagctgcgaagcatcatcaaacaggcttgcgcaaagtacggagctgagttcgtcaaggtggatgccgcaggtctctcgacgacgtgtccggcatgcggttcgcaggacgcggcccagcagaatgtggacaaacgcacgtgcgcgtgcgtgaacgtgaagtgtgcccgcgttcgcgacgtggactcgacggcgctgctgaatgagttgcgccgcgccggatgcgactcgcaggtcgacgcgatcatcgagcgtggagacaaactcgcagccatgctgcacaaggatgccgccgagtag

SEQ ID NO: 64970 - DNA, 36 bp, unknown
  Direct Repeat
ctcgtagcggttcgctcgacacctagaagtcgagac

SEQ ID NO: 64971 - DNA, 36 bp, unknown; identical to SEQ ID NO: 64970
  Direct Repeat

SEQ ID NO: 64972 - DNA, 36 bp, unknown; identical to SEQ ID NO: 64970
  Direct Repeat

SEQ ID NO: 64973 - DNA, 36 bp, unknown; identical to SEQ ID NO: 64970
  Direct Repeat

SEQ ID NO: 64974 - DNA, 36 bp, unknown; identical to SEQ ID NO: 64970
  Direct Repeat

SEQ ID NO: 64975 - DNA, 36 bp, unknown; identical to SEQ ID NO: 64970
  Direct Repeat

SEQ ID NO: 64976 - DNA, 36 bp, unknown; identical to SEQ ID NO: 64970
  Direct Repeat

SEQ ID NO: 64977 - DNA, 36 bp, unknown; identical to SEQ ID NO: 64970
  Direct Repeat

SEQ ID NO: 64978 - DNA, 22 bp, unknown
  Direct Repeat
ctcgtagcggttcgctcgacac

SEQ ID NO: 64979 - DNA, 1785 bp, unknown
  TnpB Polynucleotide
atgcgccgcagcccaggcgatgccgccccgcgcgacctgatcgtccgcaagtacgcggtcaaagggctcgccggctggaacgacgagtgcgagcaagaactgcggcgctgcaccgacctatggaatcttctcgtcgaacagcaccgcgcggcccagcaacggcgtgaggctacggaagatcgcgatcccgcagtccgcaccgctcgcgaggcgctgaaagagcttgcggccgcaacgccgccggacgagaacgccatcaaggccgcccgcgcggccctcaacgaagaactgaagcgcgtccgcaaaatacccagcaccaaggccgcgttgcagcggatcgagatcgagcgccgcgaggcggcgacgacggcacgacaaaaggcggtgctggacggcctgtattgggcgacggcgagcgccatcctcgacggcttcacgactgcacgatcctcaatgctcgccaagcgcggagccggcattgcggccgatctgcatttccgccgacatgacggcggcggccggattgtcaatcagtttaccaatggcgggttgccgttgaacgcattcttgaaccgcgccacagaagccggcatccccatgacggcgacggtgaagaacgacgccgagccgatgcccaaaacccgcatgcggcgcggcaaagaagagaccgtgcagtggcgaccgccgggcgagccgcacgagatcgtcgtgcaggccgtcctgcaccgcacgatcgactccggcattcggcaagacttcgctggcgatcctgacgtgcggatcaaatccgtctcgctggtgcggcgagagaataaagactggacgcgcctgatgccgccgcgcgaccgcttcctgacgcgagacaacgcctttgtcgtgacagcatcagcggcggcgggcagcaccatcatcgacgcaccgggccgcgagatcgtcgccgtcaacctcggctggcgcaaggtgccagacggactgcgagtggcaacgatcgtcgggcagcgagaggattggccgcggctgtgccgccgtcccgatcgcggcatgatagcggacgactcttacttccgcgtcatcccggaagcgaagctggcgctgcccacccgtgccgacgagctatgcggcgagcgtgacaagttgctagccgaaatgacgccgatgctgcggcggctaccgtgggccgacgcgccgcccgccatcgtcgaccttggctcagccttggccgcagcgccgaaattcggctcgcgctcgctggcgaggctggtggtcgattggctcctagatgcgccggagtggcagcccgaggcactggccgaacttgagtcgtggcgcaagcaccgcgacaaccatctccgcaaccaggcgaagtcggcgctgcggcacttcatcggctggcgcggcgactggtatcgggtgctggcaaagcagatcagcgagcgcgcaaccatcgtcgtgacggcggtgacggattattccgtgctggcccgcatcgccgccgccggcccggccaaggccgcctcgcacaaccgcttcctcgccgcaaacggcctgatgatggccgagctaaagcgagccatgcgggcgcgcgggaagcatgttgccgagatcggcggcatcttcacatggcgcgagtgccaggtctgcggccggacgcttgatgtgccgaccgacatcaaggccgaccttcattacatgtgccgctgcggcgtcacgctcgatatcgacacaaaccactgcgcagctctgctgcggcaattcgttgaggacagacgcgccgctgtggcgtaa

SEQ ID NO: 64980 - DNA, 1932 bp, unknown
  TnpB Polynucleotide
ctgcggtggtgccccacttgtctccgcactcgccagcaatcagcggcgagcgcaccgagcagggcccgatctgcgattaccgaggcgttatgtcttccccgtggcacggtaaggaagccgttgggctatcaccagaagctaagcaacgtatcaccgagaaaatcaagcaggctttatcaaatggcaactaaaaactgggtgtacggggccaagactccagacattgaacaggccgttgacgctgcaaccctggcagcccatcgctaccggaatcgcctctgcgagttggagatagacaaacgcaagcgacacgaagagctattgcagcggctagcgcctggctatgtggctgcgtgcaatgccgtggaggctgccgagacgcgactagcagagatacgcgaggcaatccaggccgagcgagttaagcagaggacgaagaagcctacaggctgcgacagcctaacagccgaagcgaccgctaccaaagcacagctcaagcaattacgggcaacgcgcaagatagaaaagcaagctgcatactcgatgcccgctgtggccgaggcgatgaaagtaaacactgctcagcacaaggcacagtgcgcagaagcgaaaaccgccagcggtctctactggggaaccgaagctattgtcaggcaagcgtgcggttcgttcgctagcggcgcaccgccgcgattcaagcgatacgacggcgaaggtcaactggcggtgcaactccaaggcgggctcgattgtgccgacgcagagcggagcaacacgctgtgctatctgggcgatgccatcgaccgcaagcggcgctggtgctatatccgcattggcagcgatggcagggcgcccatctttgcccgcgtacccatcgtgttccatcgtccactaccagcggggcgcatcaagtgggcttacctggagcgacgcaagatagctagtcacgtccgctggtcgatacgactgaccatcgactgtgatcctgagacagaccggtgccgtgatggtgaagtagctattcatactggatggcgcatggaacctagtggcctacgtgtctgtacttggctcggcagcgatggtgagcgcggatgcctgcgattaccaacgtcacattgtgacgactattacaaactcgacgaaatcaaatcgcaacgagacctagcattcaatgaggccattgggcaatttatgcagtggcgcgcaaagcagaccgagctccctgagtggctttcagagttgacttcgcacatccatcaatggaaatcggctaaccggctggatgaccttgcttggcgaatgtacgcgcacccgacgcacgacgacgatgatattgtcgatagactgatggactggcggaaacaagacaagcaccgctggcagaatgaacgacgtttgtcagtgcgaattgtccgacgacgcaacgacctgtttcgtaatttcgctaaacagatgagcgaccgctacggagtggctattgtctcacctatcgacgctaaagagttgacggagaatagcaaccccgaggacttagagcgagacaacacccaagcgcataggcacgcgaaatgggctgctgtcagcacgcttacacaatgtgttcgcgagaagttcccgctgcattgcatcgaggttagtagcgtggacattacgcggcaatgctgcaattgcggtacgctgtcggccagcacaagccgaaaagtgcagtgcttggagtgcggccacacgcacgacgtggacgataatgcggtggtcaatacgcttgcgagaggtgaggcggcgattaaatccggggcgctgctcgaacttgttgctgcacaagaagataaggctgctagcaaggctgcaaaactagccaagatgcaggaggcaaacaggggtgctcgcaaacacaagcaaataaccaaggaattgcaggggaagatatag

SEQ ID NO: 64981 - DNA, 1992 bp, unknown
  TnpB Polynucleotide
atgactgaagtaacacgtaactggtgttatggagccaaggcgccaacgttgaatgccgacatggtggaccaccagctttggctggcccacaattacaagaaccggcacatcgagctggagcggaacaggcgaattactgcggatgcgttcgccagatctcttcacccacagttcgaactggatgccgcagaatatgaggttgcagacgctgcagtggatgcagcgttcgacctacttaaagctgagcggattgcggcacggagccgtgtagacgcgacgccggcggttgctgcagcaatcagggaagctaagcggatccggtgtgatgtaggtgctcgcaagaaaataagctcgagagctgcatacaagctggtcaatgagtcgcaggagccgtacaaagagagagctgcggctgagacagttattccggaggggacaacccctgcagctcgtgatcagctgatttatcgcaataggttggcgatgatggaggcggctggcgtagatgccggcgccaaggtgatgtacgacgccagactcgcagcccgcgaagagttccgcgatcttgggctgaattggggcacctacctgacggtggaggctgcgacaaaggactaccacaaaggagcacccccggaatttcgcagatttgatggtcgcgggtccatcggtgtgcagatacaggtaggcggaggattaacgtatgctgctgctgttgcctgcgcgaatacgtttttgagaattcagttgccaccactatctgagcggttggcaacaacaggctcggacagcggcgtgcaggctcacggggtggcgtggttaaggatcggctcagtcggacaccaaccgatctgggcgacagtcccttttgtgtacagtcgcgagattccgcacgatgctgtaatcaagtgggcgtacctggacagggttcgtgtcggccagaagtatcactggaagctgcggcttaacctgaagacttcgcaggtcaggaggccggcagagaacagagatatggttgcagcccatctcgggtacaggctggtaggcgaagaaatccgtgtgctgacaaccttggataccagcggagaagtaagcaccctctccatctcgcgggaagaggtggcagcgttcggttacatgcgcaagctggagtcgatccgagagaatgcctcgaatctggtgacagcagctctcggtcgctggtcgcgtgtagctaatatctcagagtggttccaggaacattcggacaacatctcaaggtggcgaggccctgagaggatgagtcgacttgcccggtcttggcgtgataacaggttcgacgcagaccaatcttcgtctgcagagattcctgagtttttggagtgggcgcagctcaagctggaggagtaccggagacagccgcactatcggccgaccaacccggatgatttgactacagttttcggggtggtagagttctggaggaagtacgacaagcacctgtgtgaatggtcggcgaatcagtcgcggaaatgtatcgcaaggcgtgagcagctctacaggacatatgctgctaatttggccaggcggtacaacgcgttggcgattccggatgttgactgggccgagcttcgagaaaagccagcggtcgacgagacagatgcgcagagcaaggaattgcggagattggcatctatcgtctcaccgggcagactatcggcaatcctggtcgaggtgttcagcgaccgagctcacaagacagccgctcaggggatgactatcatctgcaatgcgtgcggtaaggtccatgagttcgacaagaagcagcgtgtgacaacttgtgtccactgcggggcaacgtgggaccaggatgagaatgctgtccgcaacacgttggcaaatggcctggtaaagcgggcgagggtagagtccagaaacggggcaccagatccggacgcccctgtgaaagtgcgagcggtcagacgggaccggaggagacctgctacgacgtag

SEQ ID NO: 64982 - DNA, 1968 bp, unknown
  TnpB Polynucleotide
atgaagcgcaagacctccgacgtcccgacccggatctactcctaccgctgcctgccgcctctcaccgaggccgcacgcgtcgaggatcagttccgtctcgctcaccagtacaaaaacgcgctcgtcaagatcgagctcgacctgcgcgagcggtttcgcgacgtccagctcacggtgccccaggtagcggcggctctcttggcctacgaggacgccgacgcggccgtcgagagcgcgatcgaagatctgcgcgcggccaaatcgggcacggccaaccccgatctcgccgctcaccggctgcggctcgaggcggccaaggagctccgcgcgctgcgcggaagcgagctccgcgacgccaagcgcgatcacgacgaggtgttgcggcccggatacgaggacgcccggaaaggggcgcacgccgaaatgctcgcggcccgcgccgacttctcgcgccgcggcctacgccacggcacgtacgtgcggatcgaggacgccgtccagcaggccgcgcgatcgacgaagcggcccctgcactttgagcgctacgacggatccggctcgatcggcacgcagctcgtcggccgcgatggacccgagggcgtccgcggcctgacgctctccgagctgcactcgtgcgtggacacacggctgcgcgtggcggcgctgccgtgcgccggcgatgtcgtcgcgatgcccccgtggggcggattcggctcggaagacgtcttctggaacatgcgtcgcggcgatcgccggcgcgcggcacgcgtgcacatgtggctgcgcgttgggagcaatcccgatcggtcgccgatcttcgcggagtttccgatcacgatgcaccgcccgctgccgaaggacgcgatcatcaagtgggcgtacgtcgtgcgcaagaggatcggcccgcacctcgagtggcggttccaggtcacgatcgagagcaagacgttctgcgcgccgaccgccgcgttcggcgagggcacctgcgcgatcgacctgggctggcgctggaagctcgacgacgagggacagtccgtcgcgctgcgcgccggctatctcgtcgacgaccaggggcgcgagcgcgagctcgtcgtgcccgagaagctgtggcggcagatgcccaaggtgtacgacctcgcgaaaatccgcgaccaaaacctcgagcgcgcgcagctggcgctctccgaatggatcgccgatcggggcgagatcccgccagagtggcaggccgccgaggaagacggtcgaccgagcatggcggatcggctgcggggctacgcgcagtggcgcgcggcgcgcaagctccaggcattcgtcgatcgctggaccgagcgccgggtgcccggcgacgcggcgatctacgaccagatccaggcgtgggcgcggcaagatcgccacctccaggcgtggagcgagcaccagcgcgaccggctgatcgcgcaccggcgcgaggtgtggcgcgtgatcgccgccgagatcgcgcggacgtactcgacgatcctgatcgaggacggccgcaacgcgaaccagacgatgcgcctgccggagatcgagggctgggagcggcccgcgcccgaagacggcgatccgtcggacgggcgcgaccagcggcggacgaaccgcctggtcgcccccggcgagctccgcgacgcgatcgtcaaggcggcccacaagaccggcgcgaagatcgaagtcgagcgcagcgcgggaacgacgaaggaatgcgcgcgctgcggccacacgcaggagcacgtcgacttccgcgcgcagatcacgtatcgctgcgagggctgcggggcgatcgacgatcaggacgccaacgcgtgccggaacctgctcaagcgacacgggatcgcgggcggcccggtgccgccgcgcgcgcccaaggtgctcgcgccggcgaagaggccgccggagctcggcaatcacggagcgtcacacgcggcagagacgttcgccgcgccgtag

SEQ ID NO: 64983 - DNA, 36 bp, unknown
  Direct Repeat
gtgatcgtgactgctcggcaggctgactgccgagac

SEQ ID NO: 64984 - DNA, 36 bp, unknown; identical to SEQ ID NO: 64983
  Direct Repeat

SEQ ID NO: 64985 - DNA, 36 bp, unknown; identical to SEQ ID NO: 64983
  Direct Repeat

SEQ ID NO: 64986 - DNA, 36 bp, unknown; identical to SEQ ID NO: 64983
  Direct Repeat

SEQ ID NO: 64987 - DNA, 36 bp, unknown; identical to SEQ ID NO: 64983
  Direct Repeat

SEQ ID NO: 64988 - DNA, 36 bp, unknown; identical to SEQ ID NO: 64983
  Direct Repeat

SEQ ID NO: 64989 - DNA, 36 bp, unknown; identical to SEQ ID NO: 64983
  Direct Repeat

SEQ ID NO: 64990 - DNA, 36 bp, unknown; identical to SEQ ID NO: 64983
  Direct Repeat

SEQ ID NO: 64991 - DNA, 36 bp, unknown; identical to SEQ ID NO: 64983
  Direct Repeat

SEQ ID NO: 64992 - DNA, 36 bp, unknown; identical to SEQ ID NO: 64983
  Direct Repeat

SEQ ID NO: 64993 - DNA, 36 bp, unknown; identical to SEQ ID NO: 64983
  Direct Repeat

SEQ ID NO: 64994 - DNA, 36 bp, unknown; identical to SEQ ID NO: 64983
  Direct Repeat

SEQ ID NO: 64995 - DNA, 26 bp, unknown
  Direct Repeat
gttctcggcgagctgactgccgaaac

SEQ ID NO: 64996 - DNA, 27 bp, unknown
  Direct Repeat
gttgctcggcgaactgactgccgagac

SEQ ID NO: 64997 - DNA, 26 bp, unknown
  Direct Repeat
ttgctcggcgtattgactgccgagac

SEQ ID NO: 64998 - DNA, 1974 bp, unknown
  TnpB Polynucleotide
atgcggcgaaagctgcgacaaacccgaggagattttttcatgttcggaaataaatctttgccgtcccgagtctatcgttaccactgccgcattgcgccggagagccaagcgctagtagacatgctactacgccgagcaaataactaccgcaatttgctggtggagaatgaacggaggcgccgtgaagaagtcgacgcattgattcagcaggtgcagccgcagttacaagtgatcgagcaaacgatcacgtcgttgagcgagtcgatcgaaaccgttgaaaccgagatcaagcagatcaagcaacggtcccgtcctgtaacgaagaaggacggaaaagacgaagcaagggaaaagctctcaaaagaagaaaggcagtcgctcaaggatcggcggaaagagttgcaggcttcactcaaaagtctcaaggtggagcgaaaggaagcttacgagagccgcaaggcgctacgcaaagcgactttcagttccgaagcctgggagaccgctagccaggatatcgagaatcgcttttgccgcttggacaagctggatcgcagtcgtaacggcttgaactggggcacgtacttgatcgtcgagcaggccgtgagcgacagacgcaagggcccgccaccacaatttaagtctttttccggcaacggatcgctggcaatccaaatccaagggccaaaagacttgctggtccccgaggcgatgctcaagggagacaatcgactgtcgattgactccagcggtaagtacccaactgtgcgactgggtttgggtcggagccgtcggcacaacccgcgtccaaaggatgaaaagaccaaaaagactattcttccttgggagaaccctgcagcaatgcagttggaaggcccggaaactggctccaagtttcaaagacaagagcagcacatcctctgcacgatgaagctgcaccgacccatgccgagcgacgccaagatcacgtgggtcaagttggtgtgtcgtcgcgtagggattcggtcggagtggtcgattcagttcacactggccaaagcggaaggttggcaaaaaccgtacggcagcggcactgtggcaatcaatctcggttggcggttgcggcccgacggcgtgcgggcagcctattgcgtggattctcaagggcatcaggaagaactgatcctgccaaactccccgcagaaaattccagacgagatactcgcgaaactggcggagttggagcagtccggcagcgacaaagaccgcaagaaagcgcagcggatacgcgaagcttacaagcggaccaacaaggtcggcatcttggaggtggtggctggcttgaattccgtgcgagataaaaatctcaatacgatcaagctgcagctggcgacttggctcgacgcaaacagagtgccggagagcttgaccgaaaggctgaaaactttgcggtcctggcgtagccagaaacggcttgcgggcgtggtcaggttctggcgggacaaccgtttcgccggagacgcggaaatgttcgataagcttgtcgcgtgggacaagcaggacatacacctgtacgcctgggaatcgaacgcttaccggcattaccaggactggcgaaacaacctgtaccgcgagttcgccgacagattggccaaacgctatggccgagtgctcttggcagatatcgactggagcaagatccagagcaggcctggattagaaaagacggacgaagcgaagactattcgcgccagaaagctcatcacttcgccgtcgatcttgcaaactgcgttagagcagcggtttgaagaagtagttctgtttgatcccaagcacgcgacccgtacgcaccaccgctgcggcaagctgactaaaacgaccgacaccttggcgttgatgcacacttgcggcgcgtgcaaggaaacttacgaccaggactataaccactgcctcaacttgctgacgatagacggaaagaacgatttccaagtcgcttag

SEQ ID NO: 64999 - DNA, 1689 bp, unknown
  TnpB Polynucleotide
atgtacggaaatccttccgatccaagcgtgacctatcgctatggtgcaaaagcacccatccacaaccttcctcaaagaagtgcatgtccggaaacttcgtgtccggaacctctcgtgtgggagcagcttcgcgcagcccaccgctacagaaacaagttggtcgagatagagcgccggaggcgcgatcgttctgccgcgtttatttcttctgcatttcctcagatagccgagctagaaaactgccttgtcagcttggaaagcagaactgatgtgataaggacatgtatcaagattcccaatgccatgatgcgcaaacaactagggaccaaggaagaccgagcggagcctgcggcaatcaaagccgacaaaaagcagatctacgcgtccctgaaaagtgccaagaaagtggcatacaaatcgcctgaatcagaagctgcgctgaaggcaatcaacaatgacgccgaattagagcacaaggcagcgaggaaagcttgcaactgcggctggggaacgtatttagctgtcgaacaaagcttgaccggaatccgcagtggagcacctccgaaattcctgtcgtggcgaggcaacggcaaattggcggtacagatccaaaaaaagaaaggaaagaaagaaatgacggtcgaagaggccggggtgggcgatacttggctaagaattgaattcactggcggcaagtgtgcaaatgtttggatgagagttgacagtgatgagaaaggcaatccgatttgggttattgtcccaacggttttccatcggccactacctcgcgatgcaaaaataaaatgggtatatctcactgctcgcagaattgcttgtcataccgaatggagcgtgtgtttcgttctttccagaaaggcaggatggcagaaggcggatcttgcttattcaggaagcgttggcattgatcttgggtggagaataacgccgaatggattgcgcgtggcatattggcgaggcaacgatggcgatcaaggcggtgtcttgattccctgcaaagacctttcccgatggaagaaagccgaggatgtgcgctcaatacgcgatcagcactttgatgtagctcgtgacgcactggcagcatggctgcgagacaaggcggtgccagattggctggcggagaaaacacagcacttgcgacaatggcgctctacagcacgattggccgtggtggttttggcgtggcgggaacagagattcaaaggcgacgcggaaagttacgcagtacttgaagcgtggcgaaaaaaagacaagcacctctttgagtgggaagccaaccaacgacgcaaggcagtggcatggagagagcacctgtatcgaaatttggctgccgagttatcgcgtcggtacaagaatatagttgtcgaagacgccgactggaaagacattggtcgacttcctgatgccggtgaatctgctggcaatcaagaggcaaatcgaaacagggttatcgcatcaccaggtttgctgaggcgttttgtgaaggaacggtttgcggattacacagaagtcaaggccgccggcacaaccaggaaatgctccggttgtggaaaatcgatggggcgagtagaagccgggtggacatcggtgacttgtccgcattgcgggcgccatgacgatagagatggcaacgcggccgcaaacattcttgcgagcggtgcggtggcataa

SEQ ID NO: 65000 - DNA, 35 bp, unknown
  Direct Repeat
taacaatgcctgtccaaaggcttagtatttggaac

SEQ ID NO: 65001 - DNA, 35 bp, unknown; identical to SEQ ID NO: 65000
  Direct Repeat

SEQ ID NO: 65002 - DNA, 35 bp, unknown; identical to SEQ ID NO: 65000
  Direct Repeat

SEQ ID NO: 65003 - DNA, 35 bp, unknown; identical to SEQ ID NO: 65000
  Direct Repeat

SEQ ID NO: 65004 - DNA, 35 bp, unknown; identical to SEQ ID NO: 65000
  Direct Repeat

SEQ ID NO: 65005 - DNA, 35 bp, unknown; identical to SEQ ID NO: 65000
  Direct Repeat

SEQ ID NO: 65006 - DNA, 35 bp, unknown; identical to SEQ ID NO: 65000
  Direct Repeat

SEQ ID NO: 65007 - DNA, 35 bp, unknown
  Direct Repeat
taacaatgcctgtccaaaggcttaggatttggaac

SEQ ID NO: 65008 - DNA, 35 bp, unknown
  Direct Repeat
taacaatgcctgttcaaaggcttagtatttggaac

SEQ ID NO: 65009 - DNA, 35 bp, unknown
  Direct Repeat
caagcagtgcctgtccagtcggctttgttactgga

SEQ ID NO: 65010 - DNA, 35 bp, unknown; identical to SEQ ID NO: 65009
  Direct Repeat

SEQ ID NO: 65011 - DNA, 35 bp, unknown
  Direct Repeat
caagcagtgcctgtccagtggctttgttaccggaa

SEQ ID NO: 65012 - DNA, 1722 bp, unknown
  TnpB Polynucleotide
atggcaaccatcgtctatcgttactggtgcgagcccgcgaccgcggaggacgctcgccttctcaaagaccaaatcttcctcgccaagggataccggcgagaattggtcgatatcgaaaatcgaggacgggccttgcgacagcctcgggtagcggtccttacgccggaggcaaagcagtgccttcgcgaggggaacgagtcccgctatgcggagctcggcatcaccgcggatcatgtgctccgggagtgcatcatgaccgttcagtcgacggttcagaagcaggcccgggccgcggcggtcgagcgtggtcttcactggggcacgtaccaggatgtcgatgaggcgatggccgcctcgtgccggatgacgaagtatccggaacccgtcagcaggaagtctgggtcgtccggatgcgtcgccgtgcatctccagccggcgcgcaccttgcgcgacgaaggtgacacttgggttcaaatcggccgctatctcgtgcgacacggtagcgagttcaacaagagcggtcagcttcgtccgaagaagtatcatgaaatcaaggttcgcgtgggatctgatgggcgctggcctcgctgggctgtggtgcatgcgcgattgcatcgcccgcttcctgccggtgcgcctgtatcatgggtgcgtgtcaagcgacgcacggtcggttcgcgcgagcgatgggagattcatttcacggtttcggtacctgatcgggttccgatccccgaagatgcggacacgcgtgtcgcagcctgcggtgtcgacatcggttggcggcaactcgagggccgtgtccgggtcgcatactggtggggcacggacggcgagcacggcgaggtctgcatctcgaacgaggtgctcggtgcggacgagaaggccgactcgctccgggctatccgggaccgtgcgcggaatcagttccgggatcggttgttgtcatggattcgaacgctccccgagtcctcgtggattgtcgaggaaactcggatgattcacctgtggacgaagacctggcggttcatccgattggttcggcgatggcggaatgaccgcatcgagggtgacgagactgtgttcgccgacgcgatggcctgggacaagcaggatcgccatctctggaactgggaggcggcgtcgcgcgagaagcgtaagcgtcgagtcgatgagaccctgcgcgtcttggcggttactctcgctcggcgttatcgccgcattggcgttgagaaaccgatggttgcccggttggttcgcaaggcggataagtgcgtcgactgcacgtccttgcggcgctgcagtgcatgcatggacaacgagcgcctgcggcgcttggcagctacgcgagttccgcatgcggcgccggcacggacgcgtcaggagttgcatgtgttcgggcgcaagtatggctcgatcgtgctcgaggtcgacgcggcttacacgaccatggattgcgcgctgtgtggtcatcgcagaaccgaggtcgacgattggtcgaagctcaacgttcgttgtgccgcctgcggtatgatccaagatcaggatttcacggccgccatgaatctggctcggctcgcgagcgagacggtgctcgacgaacacgggaagccactcgagttggacaagggtgcgaaggaaaagaagaagctcggggcgcggcggacacgaaagaaggcgagcggagttgattcacttgaccgctcgaatttgaccgagtaa

SEQ ID NO: 65013 - DNA, 34 bp, unknown
  Direct Repeat
ggttgaaagctctgcctaagcgagcgtggcttgg

SEQ ID NO: 65014 - DNA, 34 bp, unknown
  Direct Repeat
cgttgaaagctctgcccaagcgagcgtggcttgg

SEQ ID NO: 65015 - DNA, 34 bp, unknown
  Direct Repeat
tgttgaaagctctgcccaagcgagcgtggcttgg

SEQ ID NO: 65016 - DNA, 34 bp, unknown
  Direct Repeat
aattgaaagctctgcccaagcgagcatggcctgg

SEQ ID NO: 65017 - DNA, 34 bp, unknown; identical to SEQ ID NO: 65014
  Direct Repeat

SEQ ID NO: 65018 - DNA, 34 bp, unknown
  Direct Repeat
ggtcgaaagctctgtccaagcgagcgtggcttgg

SEQ ID NO: 65019 - DNA, 34 bp, unknown
  Direct Repeat
tattgaaagctctgcccgagcgagcgtggcttgg

SEQ ID NO: 65020 - DNA, 32 bp, unknown
  Direct Repeat
ttgaaagctctatccaagcgagcgaggcttgg

SEQ ID NO: 65021 - DNA, 37 bp, unknown
  Direct Repeat
tgttgaaagctctacctgagcgagcaaggcttaggac

SEQ ID NO: 65022 - DNA, 37 bp, unknown
  Direct Repeat
cgttgaaagctctacctgagcgagcaaggcttaggac

SEQ ID NO: 65023 - DNA, 36 bp, unknown
  Direct Repeat
gttgaaagctctacctgagcgagcaaggcttaggac

SEQ ID NO: 65024 - DNA, 28 bp, unknown
  Direct Repeat
ctcttcctgagcgagcgaggcttgggac

SEQ ID NO: 65025 - DNA, 28 bp, unknown
  Direct Repeat
ctcttcccgagcgagcgaggcttgggac

SEQ ID NO: 65026 - DNA, 2004 bp, unknown
  TnpB Polynucleotide
atgtacgggagcaagtccaagccagcgcaaaactgggcattcagcgccaacgcgcccgtcaacgacgcaagcagcgcgctactacaagagctgttcttcaagagccacaagcatcagaacagtcacgtcgagctagagcgcgagcgtatcaagctcacagaggagaagctccttcagctctccgcgccttacgccgcgcttacggtgcagctcaagacgatcgaagactcactggacgtcgcttacgaggccaagcgtaagttcaacagcacgcagcgtaagcgcacgccgcatcagacgctggatgcgcagatcgagctgctgaagtcgctacgcccaccgttgtgggaggctcagtccgcggccaggtctctgatcttcaagaccgacgagtggaaggtcttcagagctttcctggacggcgagtccgttccgacggtgaagaaggatggcacccccagccagaagaagaaggtagtgggcggcgtcatggccaccaagcagaaggcgctctacagcacggacaccaagaccgggctcggttggggtacggcaaacgctgtgaaggcatcagtgcaggcggctcgcaagaccggtaggcagccgcgcttcaagcgctacgacggctctggccgtcatgtcatacagcttcagaagaagagcggcaagtgcatgactttcgacaccctgttggccggcacatccagggccgttcagatcattgagaagccggatggcgtgtggactgagggcgccggacgtccgcgcgctccagagctgggcggcggggtctacatgcgtaagctcggcaccgccatcttgcggttcaagcacaagaagaaggtaatcgaggtgccgttctatctgcaccggaagcctccggccggcaccacggtccagagcatcgcaatccgctccaaccgtaccggcacagaccacaagtggagcgtcatgttcactttgggacgcgagtcctgggtgaaggacgatctggccgtaaacggagcggtcgccatcgacatcggctggcgtctccagccggacggggcactgcgggtcgccacctggtacggctcggatggtcagcacggcttcgtgacgctgccagaacgggcgcaacccaggccagaacaccggctgctgagctggtgtgatcggatggaagctacggagaacctccgcagcggtcgtgacaccgacttcaacgtgatcaaggcaaagctgctcgatcattacgaagcccacggcgttccggacttcgtaagggagctagtgaactggaagggcgaccaacccactgacggacagatccgctcggtgatcgccaactggcacgcgcagctccgtctggtacgactggccctggcatggcgagagcatcgctacgacggtgacgaagagatcttcaccgaggtggagaactggcgcgctcatgacaagcatctgttcaactacgaggcgctgctccgggcaaagctccagaacaacaggcgtgacatctaccgaaacgtagcggctgatctgagccgacgttatgccacggtggtgctggagggcgagtcgtcggcaaaggacaagaaggagtcgaagcgccgccccaagaaggatcagccatccacgccgatggaccttcgtgtcttccacgagaacccaggcccagaggcttctgccgacacgatcggacagcctggcagccgtgcgaaggagaacgtacgtaacgcggcgatcagtgtgctgcgtgactgcctgaagcgcgcgcgtcatctggtgacggagccggctgccggcaccagcaagcggtgctcagactgccgcgcctggaacaatctcggcgccgagcaggtatacacctgcaacgcgtgcggtctagttatcgatcgcgacgtcaacgcggcgaagaatctgctgactgcttacaacgagcgcctcgccgcagcagcgctcagctcggtcaagacatctaatccggagttcgagcagtccatcgcctcactcagtgcctga

SEQ ID NO: 65027 - DNA, 36 bp, unknown
  Direct Repeat
ccagcagagcgtacacagacgctgcgtatctgtgac

SEQ ID NO: 65028 - DNA, 36 bp, unknown; identical to SEQ ID NO: 65027
  Direct Repeat

SEQ ID NO: 65029 - DNA, 36 bp, unknown; identical to SEQ ID NO: 65027
  Direct Repeat

SEQ ID NO: 65030 - DNA, 36 bp, unknown; identical to SEQ ID NO: 65027
  Direct Repeat

SEQ ID NO: 65031 - DNA, 36 bp, unknown; identical to SEQ ID NO: 65027
  Direct Repeat

SEQ ID NO: 65032 - DNA, 36 bp, unknown; identical to SEQ ID NO: 65027
  Direct Repeat

SEQ ID NO: 65033 - DNA, 36 bp, unknown
  Direct Repeat
ccagcagagcgtacacagacgctgcatatctgtgac

SEQ ID NO: 65034 - DNA, 36 bp, unknown
  Direct Repeat
ccagcagagcgtacacagacgctgagaatctgtggc

SEQ ID NO: 65035 - DNA, 36 bp, unknown
  Direct Repeat
ccagcagagcgtcggctaacctcgcaggacgttgct

SEQ ID NO: 65036 - DNA, 1947 bp, Phytoactinopolyspora sp.
atgcgttccgactggcccgtgaggccgacccgaccggcggtgctgtgtcgtcgtacgccgcgcaattcggcatcgacgaggagcatctcctcaagcgcctcgcgtcgctcggcccggccggtgacctcgccgtgcgcgacgccctgtcacgctggtgggcgacccactccggcagcgacaacggccccgagtcgttccgcgcggccgggctcaccatcctcgacaccggagagtgatgagcccgtgaagcgatcgacgttcgacggccaggtcgtcgtctaccagtaccgggtgcgctcggtcggagtcggcgtcgacggtgcccgcgacaacgggtatcttcccgcggaggcgatgggacagctgcgactcgcgcacgagctccgcaacgacctggtccgcatcgagcgtgaccacgccgacgcgaaagcacgcgtgtggatggagcacccgcagatcgcggcagcgcaggccgcggtcgacacggcgaaaaccgcggtcgacgaggccgaggaacgcgccaggggcgaacggcagcggctacgctccaccaagatcagcggcgccctgcgggacgagctgcgagacctacgggcgcgacgtaaggccgcccgtgaggacctggccgcggccaggcaggaacactggccggcgatgcaggcgaggttcgccgcattgcagaccgagcggcgcgcggccatcaaagacctgtaccgggtctactgcgccacctccaacccggaggcacggggcctgtactgggccacgcataaccacgtcgttgctcgccacgacactgccgttcagcaggtcgaggcgaaacggaaacggggcgaggcggcggagctgcggttccaccggtgggacggcaccggcaccctcgccgtgcagctgcaacggcaggccggcgatccggcacgcagcccggagctcatagcctcaggcgagggccagtggcgcggcgtgttccagctgcgaccgtgggccgatccagcgatcgcaccccggccgcgggggaaagaccgcgacggggacatcaccatggctctcggcggcggacgaaccctcaccctgcccgttagggtccaccggttcatccccgccgacgctgacatcaccgacgtgcagctcactcgtgagcgcgtcggacctcactaccggctgcacgtgtcggtgtcagtgcggctcccgcacccggacgtcccgcagacgcggcgggcaaccgcggccgttcggctcgccaaccagtcgagtgcggccgggatcctcgtcgctcggatcgccgcgagcgtcgcgctgccacccgcgcctcgtgacctggccgatgtggtccgcgtgtccggcaggagcgcggatgtgcacgttccggacacgtggcgggcgctgtggcgccgcgacgacgacatccggtcgatccgtgacgaccgcatggaggcgctgcgcgaggccgtcattgccgccctgaccgaggacccgacgctcgggcagcaggtcggggtgccgccgtgggccaggggcgacgaggatgggccgctgcgcgcctcggtggtggctcaatggcgtgccccgcgaaagttcgtgtggctcgcccggcaatggccggccggtcacgaactcgccgggcaactggagcagtggcgacatcgagatcgtcacctctggacgtttgaggctcatgagcgcgacgcgctcgtcgccaaacggcgcgacgcctaccgcaaagtggcggcgtggctgtgtgacgtcgcctcggagatcgcgctcgacgggactgatctcgccgcagcgcgacgcgtccctgacgtatcgtcagaggacaaacatggtgcccgtggtgcacgacggctcgctgcgttcgccgcgccaggtgaactacgacaggccatcgagaacgccgcccggcggcgcgggatcagtgtcctgtacgcagaggagggaccggcatga

SEQ ID NO: 65037 - DNA, 22 bp, Phytoactinopolyspora sp.
gtcgcaatgcctgcgtggaggc

SEQ ID NO: 65038 - DNA, 22 bp, Phytoactinopolyspora sp.
gtcgcaatgcctgcgtggaggc

SEQ ID NO: 65039 - DNA, 22 bp, Phytoactinopolyspora sp.
gtcgcaatgcccgcgtagaggc

SEQ ID NO: 65040 - DNA, 22 bp, Phytoactinopolyspora sp.
gtcgcaatgcctgcgtggaggc

SEQ ID NO: 65041 - DNA, 22 bp, Phytoactinopolyspora sp.
gtcgcaatgcccgcgtggaggc

SEQ ID NO: 65042 - DNA, 22 bp, Phytoactinopolyspora sp.
gtcgcaaagcccgcgtggaggc

SEQ ID NO: 65043 - DNA, 22 bp, Phytoactinopolyspora sp.
gtcgcaatgcccgcgtagaggc

SEQ ID NO: 65044 - DNA, 22 bp, Phytoactinopolyspora sp.
gtcgcaatgcccgcgtagaggc

SEQ ID NO: 65045 - DNA, 22 bp, Phytoactinopolyspora sp.
gccgcaatgcccgcgtggaggc

SEQ ID NO: 65046 - DNA, 36 bp, Phytoactinopolyspora sp.
gtcgcaatgcccgcgtagaggcttggtatctacgac

SEQ ID NO: 65047 - DNA, 36 bp, Phytoactinopolyspora sp.; identical to SEQ ID NO: 65046

SEQ ID NO: 65048 - DNA, 1182 bp, unknown
  TnpB Polynucleotide
ttgaagccgaagctatgggacgagaccggcaaggtcgtggttcagttccagcgtggcctcgcggtcccgagggcttttcttcaaaatggacggctgcagatcggcccgctttctgaaggcgcctggtctgccccttcgcgcgccgaacgaagacggctaacacgtacgagtatccggattcgcgttagcgcaaatgcagaccgatctcccgttgggatcatcgttccggctgtcttgcatcgccctatgccgcacgatggcgtgatccggggcgtctcgtttgtccgcgagcgagtaggcctgaattggcggcatcgcgtattgttcatggtgtcggaacccgcgttcccggtctcaacgacatccattaacgccgttggtgtagacctgggctggcggctgacccaaaaaggactgcgagtggcatactgggctggcgacgatggcgagtgcggagaactgctgctgccgccgcgcgacctcaacgaatttaagcggatagggagcctgcaaggggtgattattacggcgcatgagcaggcgcgcacgcgtctggcttcatttcttgcgcgtaagtctttgccacatgagattcggaagcttatcggcgaagccgtacggtccccatctccgcgagcgcttgtaaacttgctcgaaaaatggacagcgcaccggttcgccggtgacaggtacgcattttcaaaactgcgggattggcacaagcagcatattcacctatggacatggcgggcgaacctccgggatcaactccttcgcagacgccgggagctgtaccgccgatttgctgcgaatctttcagagcaatacggaaaagtctttgtaaatgatatccagttgcgcagcctggtcgagaagcccgacataccggtgctggccccaattcagcgtcaacgccggttcattgctgccatcagcgtcctcgatcggattctccacaatgcgtgccaaaagcgaggcgcgattctcgaacgtgtgaaatgtaaaggcgcgacaatttcatgccatctctgcggagccaccgacgattggaacccgcggacgacattaatgcacacttgttcgaaatgcggccggtcctgggatcaggactataacgcggccatgcacgttttgaagcacgggacctcgctcagcaaacggcgtgaagccgagaagggttga

SEQ ID NO: 65049 - DNA, 1896 bp, unknown
  TnpB Polynucleotide
atggaacacaaggtttacaagtacggcctgcatccacccacagagggggtggaattggttctgcaacagatgatgcttgcccatcgctaccagaacgagctcattgcgatcgaatgcaccagacgtgctgcggtgcgtgaggtgtacaacacctacccgaccatcatccccttgcaagaggagatcaaaccgctcgtggcacgactcagtgaggccgggaacaccatcaaggcgcaacggcagcaggacaaggccaactcggaaacgaatgagcagaaagaactggtcaagcaattgaaggctgagctgaagccccttcgagcacagctgaaggaagcaagtcaagccttgaagaaggacgtggtagctcaagccaagtttgctgcagccgaagcgctttgcaagcagcagcggaaactcgctcgtgacagttgtggggtcttctggggcagctctgcgataaaggtggctgcagtggacgctgcacgggacgccacctggctatggcgtgatggcgagcccaatgacccacacttcaagcgctgggaaggttatggttcagtcgccgtgcagctgcagcatggattatcagtggaagacttgcttgccggcaaggaccagagagcacggcttgtcacaacagagccacctcccgttatcgttcaggacaggccaggtcgtggaccacgacctgttctgaaggatgacagcaaacggacaaagaggcgccaacggtacacgttgtggctgcgtgtcagctcggaaggccgcgcgcccatctgggcgaagtggcactgtctcatgcatcggtcgttgccagagggtgcagaggtgacctgggcgaaggtcatcaaggagcgcctggctggcaaagacaggtggtcgctgcatctgacattgcgaatcccagattcagaaaccgtccaaggtcatcctttctgggatgacgtcgagtccgtcagcaagaagcagaagccgactggtgttgtagcacttgatctcggatggcgacgggtggatgctggtctccgggctgcatatgcaatcggagatgatggcacgcattatgagttgatccttggcccggagattgagaaacggctggatagaatcgatggtaaagacggactcgaatctattcgcaagaagaacttcaatgcgatgcaagaatggctcgtcgcctggatggcaggcaatccggtgcctgacagtatcaaggagagagcgaagaccttggccaagtgggaatcacaggccagactcgctgcgctcacgttgctatggcgtgacaatcgtttcgacggagatgacgaggtgttcaccaggttggaggaatggcgaaagcaagacaagcatctatggtcgtgggaaactcatttgcgcgataaggtattgcgaagacgaaagcatcaataccgggagttcgcagccaagcttgcaaagatatatggcacgctcatacttgagaatctggatctgcgagatttccagaagcgtgaaaaaaccaaggatggtaagaagaccgcaaaaccaccgagaacgcaacagaagacggtttcacccagcgagctacggctgtgcctgctgaatgccttctcctccaattgtggcctggcagcatgggttgagccggccaatacaaccctgacgtgtcatgcctgcggcctagtagagaaatgggatacggcgaaggaactgattcatacctgctccggttgcaagaccctatgggaccaggatgccaacgcatgccagaacttcttgcacatgttttgcaagtggtgcgatggcagcctgacagtggaattgataagggtcgaagacttcagggttaaggagcttcaagaatccaagtgggcaaagcttaatcggaaccgctcgaaagacgatggctaa

SEQ ID NO: 65050 - DNA, 35 bp, unknown
  Direct Repeat
aaacaacgcccgtgcagaggcagtgtatctgcaac

SEQ ID NO: 65051 - DNA, 35 bp, unknown; identical to SEQ ID NO: 65050
  Direct Repeat

SEQ ID NO: 65052 - DNA, 35 bp, unknown; identical to SEQ ID NO: 65050
  Direct Repeat

SEQ ID NO: 65053 - DNA, 35 bp, unknown; identical to SEQ ID NO: 65050
  Direct Repeat

SEQ ID NO: 65054 - DNA, 35 bp, unknown
  Direct Repeat
aaacaacgcccgtgcagaggcaacgtatttgcaac

SEQ ID NO: 65055 - DNA, 35 bp, unknown
  Direct Repeat
aaacaacgcccgtgcagaggtagtgtatctgcaac

SEQ ID NO: 65056 - DNA, 1878 bp, unknown
  TnpB Polynucleotide
atggtacaacgatccacatttgcgggacgcaattgcgtctactcttacggtactccggccaaggttgatattccagactacgcaattgaacagcttcggttggcaaatcgtttctggaatggactggttgagatccaacatggctatgagcaggccgtggcggatatctgggcaagccacccagagttggctaagctcaacaacgaaatagctcaattagttgaacatgggcgcgagctgaaggaaaaggctgatgccgccagggtcgaggggagacgtcggtatattgccgataacgacctaaagaacgagctaaagcggcaacgagagcagctaaaagctgccaagaagagttaccgagagagtaagagtctcttctacaaccagttgaagccgcggttcacggcgctcaaggacaagcgagtgagcgacataaagtctctgcgtcagacgttcgcttcgcaaggtttgtattgggggacgtacaatgccgtcagccaaagttttgatacggcggcgaaacgcgtaagttcgttgcgctccagtggacgttcgtctgcattgcgttttcaccggtttgacgggtctgggacatggacggtccagcttcaacgggaggctggcgactcgccgcgcacgtgggcgacccttgttggaggccaatcgaaatggaaaaatgacgttaaaattgtacctgaggaactggatgagggaggtaagcgtaagcgtccgcgtacgctattgagtatcaggtgtggtaggcaggggaaagaggctatatacctgtccatacccattactattcaccgccccattccgccggaagcggaagtcacccaaatacaggtgacccgcaaacgggttggcacgcacttcgagctatcggcagcattttctcttcgtttgccgacaccacccgagagaaaaaatcctggcgtagttggtatcaactttggctggcggagtaggcgctctgatgaactattgcgcacggcggtttggtatggaattggtcgtgatacacaattggagctaagggagtggatgactgagtgggttacgcaagagaggttagccaagggtgaaatagttggcgaaattcgtgtaccagaccgttggagacggggaatggcacggatgcacgagatcagatcacaacgtgaccttaaccttaatgccattcgaggtgaggtagccaggtggcttaccacacacaaagacggtgcggcttcgctggtgtctgcttgggcacaagaacacccgaacgccttgaaaccactctggaacaagccatcagatgtaggactgtggcggtcggctggtcggctggcatcgctttgtctattctggcggacacaccgacagagtggagatgaaaatgtctttgctgtatttgaggcttggagaaagcaagacaagcatctgtacgattgggagtcttattctactcgccaactaattgcccaacgcagggaggtatataggtgtgtcgccgagcagttggcttcaacatatggtcacattgttgtggatggtgccaatttccagacgctaaccatgaaagagacgaggattgaggaggctgacagtgaacaggccgatcttgcacgctcccaggccagagatgcctcgccaggactgtttcgtgagatcatgaagcgtacagcgtccaaacttggtacggctcttactgtggaaccggcgaacggcatcacacaagtccattctgtgtgtaacacgtgggttgatgcggatgcggcacagaagataatgctgtggtgccccacttgtgaaacgtcctttgaccaggacgaaaacgcgtcaagaaaccttattagattggcaacaggtcaggcaacccaactcgttaaatcctag

SEQ ID NO: 65057 - DNA, 22 bp, unknown
  Direct Repeat
aatgcctgctcatgggcctagt

SEQ ID NO: 65058 - DNA, 22 bp, unknown
  Direct Repeat
aatgcctgctcatgggcctagt

SEQ ID NO: 65059 - DNA, 22 bp, unknown
  Direct Repeat
aatgcctgctcatgggcctagt

SEQ ID NO: 65060 - DNA, 22 bp, unknown
  Direct Repeat
aatgcctgctcatgggcctagt

SEQ ID NO: 65061 - DNA, 22 bp, unknown
  Direct Repeat
aatgcctgctcatgggcttagt

SEQ ID NO: 65062 - DNA, 22 bp, unknown
  Direct Repeat
aatgcctgctcatgggcttaat

SEQ ID NO: 65063 - DNA, 22 bp, unknown
  Direct Repeat
aatgcctgctcatgggcctagt

SEQ ID NO: 65064 - DNA, 22 bp, unknown
  Direct Repeat
aatgcctgctcatgggcctagt

SEQ ID NO: 65065 - DNA, 22 bp, unknown
  Direct Repeat
aatgcctgctcatgggcctagt

SEQ ID NO: 65066 - DNA, 22 bp, unknown
  Direct Repeat
aatgcctgctcatgggcctagt

SEQ ID NO: 65067 - DNA, 22 bp, unknown
  Direct Repeat
aatgcctgctcatgggcctagt

SEQ ID NO: 65068 - DNA, 2097 bp, unknown
  TnpB Polynucleotide
ttgccatgctgctttgtctcggctgcgatagcttcgtgccgtgcggcatgctccagtttcgagatggtacgcacggcttgtcgtgtggaggcccgcgcccgttcgtctgttacgtcgaggacggcgcctgcttctggttcccgggtgccccatgaccgcgatcacttggcgcggattcgaggtcactctcggcatgtcgctcgcagatcacgagagactcctacaacaacacttccggatggagataccacgatgaagcgcaagaccagcacgacaccaactcggatctggacctatggtctcaggtggccgcgcgatccaaaggacgaggccgctgtgcgtgagcagatgtaccgggcgcaccgctaccaaaacgtgctcatcgaaatcgagcgcacgcggcgcgccgagtttcgcaaggcacggtcggggtgcagccccgagctcgaggagctcgaaaaacgcgtgaaggtattgacggaagcgatcgaggggcagcggcacgaaatcaagtcgatccgaaaggtgacccgcgagcgcacgctcaacaaggcggccgcggacatgctgaagacgctgcaagccgagcgccggctcgtcggcatcgccctcaaggccgcccgcgcccgcatcaacgagagcgacgagctacgcttgctcgccgcgaccctgaacgaacactccaacgcgcgcgtgcgcgaggcccgggcccagtccggactctactggggcacctacctcctcgtcgagaaggcgatggaggccgcggcgcgcggcaaggatgacccgcgcttccggcgtttccgaggccggggccgggtcggcgtgcagatccagaagggcatgaccgtcgccgagctctttagtgggcacgacacgcgcctgcaagtaaagccgctccccgacggtacgtgggacacacggcccggacggcggcatgcgctgacggagctgaagatccgcatcggctcgaatggacgcgagcccatctgggcgacgttcgacgacctcttgcagcaccggccgctcccggcggacggcatcatcaagtgggcatggatcaagctcgagcgcctcggcacgcgcacgcgctggacgttccagctcgctctcgaatcggagacgttcggggagagaaagcacaagccaacgacggaccgcaccgtcgccgtgaaccttggttggcgtctgaaggcggacgagagcctgcgcgtcggctactgcgtggacgaagacggcgctacgcgcgagctcatcctgccggcgcgcctgcgtcagcacctctttcacgctgacaagctccggagtgccaacgacctcatcttcgacgaggcgaagaaggcgacccaggcgtggctgaagaccgttccgccagtcgacgtcgatctccagaagctcctcgagcacatgcacgcctggcacgaccatggaaagctcgtgcgtgtcgccatggcgctcacgaaagcgcactcgactcccgaggagtgccgcaagatctggatcgactggaaggtcacgcgcttccgagcgctgaaagatctctacgacagtccggcggtcgtctctgattggctccgggcacagggcttcgaagagccaaaggtgcacgctctctatctcctcatctggtggaaaaagaacgatcacatgtggaacatggaggcgcgtgagcgcgatcgtgcgctcggctggcgcaaagacctctatcggaactacgcagccggtctcgcgcgtgattacaaacaactcttgatcgagaagttcgatctccgagacgtagcggagcggcccgaagccgaagatcagacgccccacatccaggccgccgcgcgtgcccggacgcacgcggcgccgagcgagctccgaagcgctctcctcgcggcgttccacggcgaacatctcgagcagagcgccgatcacaacacgctcgcgtgcaagcgctgcggcaccatcactgacgacctcccggcggagcagatcgtcatcatgtgcccggcttgcaagtccgagcacgatcaggataagaacaactgcgaaaaccaacttgcccgctaccggggcgagtaccgcgggccgacgccgcaggcggcggagtga

SEQ ID NO: 65069 - DNA, 35 bp, unknown
  Direct Repeat
gtgaaagtgcctgcgtgggggcgtggttcccgcga

SEQ ID NO: 65070 - DNA, 35 bp, unknown; identical to SEQ ID NO: 65069
  Direct Repeat

SEQ ID NO: 65071 - DNA, 35 bp, unknown; identical to SEQ ID NO: 65069
  Direct Repeat

SEQ ID NO: 65072 - DNA, 35 bp, unknown; identical to SEQ ID NO: 65069
  Direct Repeat

SEQ ID NO: 65073 - DNA, 19 bp, unknown
  Direct Repeat
caagaatcgctgctcggtg

SEQ ID NO: 65074 - DNA, 19 bp, unknown
  Direct Repeat
caagaatcgctgctcggtg

SEQ ID NO: 65075 - DNA, 19 bp, unknown
  Direct Repeat
caagaatcgctgctcggtg

SEQ ID NO: 65076 - DNA, 19 bp, unknown
  Direct Repeat
aaagaatcgctgctcgggg

SEQ ID NO: 65077 - DNA, 19 bp, unknown
  Direct Repeat
caagaatcgctactcggtg

SEQ ID NO: 65078 - DNA, 1653 bp, Thermorudis peleae sp.
atggtggctttgcagggaagcattcgcacgtaccagtatcgctgtgccatgccagttgaaggcctcaccattgtcttcacccagcaacgcctccgggtagcctactggaacgcgctggccacgcacgtacggcgcgctcgccgctccttgtctcgttctccacgcgcaaaaacgcccgatcctccgcttgctcctcaatcagcaggcttcgatctcaaaactgtccgcgcgcagttccgagcccaagggctttaccatgggaattatcaagatgtcgagcgcgccttccgggcagtgcttcgccgggttgggccgccgcatccccgccgctatgacccgtggtctggaaccgtctcgtattggtttatgaagggcttgccggtctcccaactcacctgcgatccccgtgttcgtctcgaaccggttcccccatggtcgtcccgagctggtgtgcgtcatacagtccggacaaggctcttgcgcgttcgcgtcggtaccgatcacgaacggcagccaatctggctcgcgctccccatcttcctgcatcgcccgttaccaaccgacggcatcatccgcctcgtgcgtgtccagtggcggccttctccgcgcatccatttgccgacgcccgagatggtcgaacgcttccagcgtgctctcgggctcgacaacgctgagatcgctgcagcactccgtgctgttggcctcgactggactattccggaacaactcgctccttgggtacgacgccagcttgagtggtcagcgagctttgtcgttgctttgccaagtcggccaactcagcctgggccggcccgccggtctgcagcaatggcactctgctggcgagtggtcgcgaatcacggactgcgatgtggctattggctcggcgacgatggtgccgagggcgacgttgtccttccgcacgcgtggcttgccgacatagctcaggccgatcgcctgcgcagcctacgggcacggcggcgcaacgaacttgttcgatccctactcgtgtgggggcagtcagcgagcagttgtccatcgtggctgcgccacgccctcaacgcgctgccgtcttggcgctcaccgaccctcttcgcattcttagcctggttctggcagtgccatcgcttcgctggcgacgaacagggctttgctctcctctggacatggcgtgtcgatgaccgccgccttgcgctccaggagtggagtcgacgtacaacgtactggcgtcggcgtcgagaggcgtatcggcgcattgccgcacagctgagtagacgctatcgggtcatcctgctcgaaaagcaagaccttcgccccttagcaacggccaacgtacctggagccgtgccgtcgccagaacaacatcagcggatgctcgctgctccgtcgctcctccgcgcgttacttgcgcatgcgtttcgccgcgaccatggccctggagcggtggtgctcgtgcctcctcccacactgcacctgtgtccaacctgcagcacggctcgcaatgcaaatcgcggcgcatcgccaaccttcgtctgtccaacgtgtggcacggctgaggatcacgatcgtcgagtgtgcctgtacctgctcgcgcaggtacacgatacgctggcacaacaacggggtgatcagccggcaacgacgacacagtga

SEQ ID NO: 65079 - DNA, 1887 bp, Alphaproteobacteria bacterium sp.
ttgagcgaacaacttgacgacacgcccgaacaaccgaacgaggtcgaagagaccaagaagaggaaacaacgcaacaaaggcaagcacccggccaggatctggagcgtcttctccagatacctggtctcggggcgtgagcacttcgacaagcaggtgctcctggcccatcggttcaggaacaagctcgtggagctggagctccagcggcgcgccgccgccaacgtcgtgatcgcgcaggcctcttccgagctgcagcctttgatcgacgccctggccgccgctgagcaggttctcgaagtcagtcttcaagagctgaaggccgtgagggccaagcacaggagaagggctgaaagcgcggcgcaacgagatgctgtcaccaacgcgaggacggctaggaaccaggcctccaaggccctctctaaagccaggaaggacgccttcgcttccgaggcggcgcaggtcggcctctggcttgcggaggagcaccacttccaggccgtcctggccgcccgtcatgctttcatcaacgacggcctctactggccgacggccacggacgtccaggaccgtgcgcgcgccatgcgaaagggtgcccctcccgtcttcaggcggttcggcggcgcggagcaagcgggccgcatcgccgtccagatccagaagagcaccgacaagtcccagtctgagggcggcatcacctttgaggaggccttctcctgctcccacggcttcttccggctggagaagaagccagggcgcgaccctttgccagagatcgccgaccagcccgactacaagtccaaacggcaacagctcctgacctacgcccgcgcctggctgcgcgtcggctcggagggcaagggcgccagggccaagccctgctgggtcgtcgccgatgtgcttctcacccggcaggcccccaagacggcgcggatcgtccaggtctacctggaccactcggtgatcggcgatcgagagcgctggcgactcagcttggtgctcaccaaccaagagggctggcccaagcccaaccgggcctcgggctgcatggtcggtattgacctcggctggcgactgctcgataccggtgagctgcgagtcgcctacgcctgcggcgccgatggacagcaccacgagctgcggctgcccgcctccctggtcaaggtctggcgccggcccgatcgcatccagcaggagagggacaacctcttcaacgacgtcaaggcgaggctccttgagtggctcaaagggagggaggaccttcccgactggctcaaggagcaagcggagcatctgcatctctggaagtcatccaccaggctctcgcggctggtggatcactgggccggtcgagatatcaactggtcgagccagaggcgcatcgccggggacgaggagatcctcgcgtccttgcgcggctgggtgaaacgcaacctccacctgcgcgactaccagtatcacgagcgtgagcagttggcggcccatcgtcttgatgtctacaggaagtgggctgacggtctggccaggctctaccagacggccgtcctcgaagacgccgactggcgagacctagcgcgactcccatcgcctgaagacgacgccgtcaacgagaccgcgcgctacaaccaacgcatggcctcgcccggtctactggcctccgtgatcacgaacatgttcgcgatcacgagcagggtggagtgcgcgaacaccaccagggagtgctggcgctgcggccatacggaggcgttcgacgccgaggcgcagttgatcagggtttgtcctggctgcggtgatgcgtgcgaccaagacgagagcgctgctcgcgtcctgctcgcgagagggcaggccctaaaccagtcacaagtcgccgaagctgcgccaagttcttga

SEQ ID NO: 65080 - DNA, 37 bp, Alphaproteobacteria bacterium sp.
gtgacaaagccctgtgcagcgggctcaaagctgcgac

SEQ ID NO: 65081 - DNA, 37 bp, Alphaproteobacteria bacterium sp.; identical to SEQ ID NO: 65080

SEQ ID NO: 65082 - DNA, 37 bp, Alphaproteobacteria bacterium sp.; identical to SEQ ID NO: 65080

SEQ ID NO: 65083 - DNA, 37 bp, Alphaproteobacteria bacterium sp.; identical to SEQ ID NO: 65080

SEQ ID NO: 65084 - DNA, 37 bp, Alphaproteobacteria bacterium sp.
gtgacaaagccctgtgcagcgggctcaatgctgcgac

SEQ ID NO: 65085 - DNA, 37 bp, Alphaproteobacteria bacterium sp.; identical to SEQ ID NO: 65080

SEQ ID NO: 65086 - DNA, 37 bp, Alphaproteobacteria bacterium sp.; identical to SEQ ID NO: 65080

SEQ ID NO: 65087 - DNA, 37 bp, Alphaproteobacteria bacterium sp.; identical to SEQ ID NO: 65080

SEQ ID NO: 65088 - DNA, 37 bp, Alphaproteobacteria bacterium sp.; identical to SEQ ID NO: 65080

SEQ ID NO: 65089 - DNA, 37 bp, Alphaproteobacteria bacterium sp.; identical to SEQ ID NO: 65080

SEQ ID NO: 65090 - DNA, 37 bp, Alphaproteobacteria bacterium sp.; identical to SEQ ID NO: 65080

SEQ ID NO: 65091 - DNA, 37 bp, Alphaproteobacteria bacterium sp.; identical to SEQ ID NO: 65080

SEQ ID NO: 65092 - DNA, 37 bp, Alphaproteobacteria bacterium sp.; identical to SEQ ID NO: 65080

SEQ ID NO: 65093 - DNA, 37 bp, Alphaproteobacteria bacterium sp.; identical to SEQ ID NO: 65080

SEQ ID NO: 65094 - DNA, 37 bp, Alphaproteobacteria bacterium sp.; identical to SEQ ID NO: 65080

SEQ ID NO: 65095 - DNA, 37 bp, Alphaproteobacteria bacterium sp.
gtaacaaagccctgtgcagcgggctcaaagctgcgac

SEQ ID NO: 65096 - DNA, 37 bp, Alphaproteobacteria bacterium sp.
gtgccaaagccctccccagtgggctaaaagctgcgac

SEQ ID NO: 65097 - DNA, 37 bp, Alphaproteobacteria bacterium sp.
gtgccaaagccctacgcagcgggctacaagctgcaac

SEQ ID NO: 65098 - DNA, 30 bp, Alphaproteobacteria bacterium sp.
agccctctgcagcgggctgaaagctgcgac

SEQ ID NO: 65099 - DNA, 33 bp, Alphaproteobacteria bacterium sp.
gtcgcagcattcagcccgctgcggagggctttg

SEQ ID NO: 65100 - DNA, 2106 bp, unknown
  TnpB Polynucleotide
atgagcgaaaccgatacgatggctttcaagttccgcattcttcgaatcgtctccgatgaggcacgcatcaagcgggagatccgcgaagcgcaccagctgtacaacgacctggtggcaatcgagcgcaagcgccgtgatgacacgcgcctgttctgggccgaccgcggcgggtacgccgacaagctcgccggcttgcgcgccgcagctgaggacgccgagaaggcggctgcgctcacggcaaagggagatgctgggaagaaagagcgtcaagagatctgggcgcccgtcgacacgctgaagcgtgagatctgggaactgcagcgtaagacggaagaagagctttcggaccctgcgaaggtgagacgcaagcagcgcgcccgagaactgcaggccgaggcgaaggcgcgagccggcaaggcgctcaagaaggaagcgctagcggcgctgcttgacgccgagcccgattgcatgtctccgcgtgaccgtcgaaggctcgaactggtgcgcgagtacgaggcgcgcggtgtggccgtgagcggcaaggccgttgcgcagcgcttgcgcgacgagggccttgtcggaccgaccgagcaaatcgaggaagccgcgcgcaaggcgggatacgaagcctatctgaagcgcggcgtgagccctgggacgcgcgcgatcatagccgacgccttcgagcgctccctggaagacctggagccatgggccacgcagcggttctcgcgctgggacggccacggctcgtttggtgtgcaggtgcagggcggctcgctcacggaagaggtgtacagcggtgagcatacgcaggtgcggcttcgacgtcttgaggacactgggaagcaccgagaaggctcgcgccgctcaggacgacggcacgagctccgcgtgcgcatcggcagcgacgggcgcgctccggtctgggccgtattcgaggcgatcgtcgacaggccgctgccgcctgaagcatccatcaagcgcgtcgtggtcacctgtgaccgcttaggcgtgctcgacatctatcacgtggtgttcacgtgctctgtcccctcgagcgtctaccacaagcgcagcggagagcagcgcggcacggtcgcggttgacttcggctggcgctcgctcgggggtgaggagatgcgcgtcggctactgggtgaatgaccgtggcgagagcggtgaaatccgcctgcccggcgttggagtcgcgcgacgcggcacgactggcaagaacagcccatacgagccgaagattcgcgggcaggtgccgatccggcagctcgacaagcacacgcgcgatctgacggagatcatggcgcgagagttcgctgagtacgacggcgggaagatatgcggcggagcgctgcgcgatgtagcgtcctggctctcggcaaacgtcagcatcgtccccgagtggctgaccgagcgcaccactggcattcacgtgtggcgctctcagcaccggctctactggctcgcgcaggactggaaagcgcagcgcttcgatggcgacgccgagatcttcgagaggctgagcgcctgggcgagcgactgggcgcacctcgccgagtgggagcgccgtcagcacgcggccatacttgcagcacgcaacgaacactatcgcctcgtggcggttggactcgcgaagaagtacgagcggatcgtgatcaacggagcggacttcgccgcggcgaaacgcaggaagaccaaggacgagaccgaccgtctcgtgatgatcgacgaccgctcgcgctcgcaagcacacctcgcggcggccggcgaactgcgcgaggagatcgtgcgcagcgcgaagaagtggcaggccatcgtcatgaaggcgaagccgaacaaggccacttgccacgcgtgcgggtcgacgtgcgtgtacgacgccgcgaaggacctcgcgcacgaatgcgagcactgcggcgtgcgttgggaccaggacgagaactgttgccgcaacatgctgtgcgagtggtccggtgacgggcaaaccgctggaggcgctcgcgtctctcctaacgcgaagaaatcaggcgaggttttgcgcagcaagaagcgcgatgaagatggcggcccgatcggagaagcggcagagtag

SEQ ID NO: 65101 - DNA, 1857 bp, Mycobacterium simiae sp.
atggcctccgatgatgagcccgtccagccggggccagtgacacccgagggcgctatcaccgttcacacgatgggcgtccactaccggtggcaaattcctgaggtggtccgccagcaactgcggctcgcacatagcctgcgcgaggatctggtcaccttgcaactggcctatgacgaagacatcaaggcgatctggtcgtcgtatccgacggtagcggccgctgaagctcacgtcgcggcgaccgaagcggaggccatcgcggccaacgaggcactgaaggctgcccgctccgcagccagaggcaaacgcgtgaacaccgcgatcaccgagcgactacacgacgccaggaccgcactcaaagccgcacgccacgcccgccgggaagcgatcgccgacgtgaggcaagacgccgcgcagcgccgccgcgaccgcggcgcacaactggcggccgagcagaaagccctctaccgcacctactgccaacacggcgacccgacgctgttctgggcgacgttcaacagcgtcatggacgaacataaggcggcggtgcgccgaatccagcaacagcgcgcccaaggccgcccagctgcgctgcgccaccaccgctttgacggcaccggcaccctcgcggtccaactgcagcgaaccgccggcgcgccgccacggactccgatgctgctcgccgatcccgccgggcgctaccataacgtcctgcacctgccgtgggttgaccccgaccagtgggcatccatgacccgcgccgagcagcgccacgcaggacgcattacggtgcggatgcgatgcggatcccttgggggccaaccacagtggattgacttgccggtccaagcccaccgctggctgccccaagacgccgatatcacccgcgccaaactcaccgtcacccgactcggcgccgatctgcgggcgcggctttcgatcaccgcgcggctcccccatccgactgtcccccgccgcggcgatctccccaccctggccatacatttgggctggcatgccatcgatgagggtgtcgtggtcgcgcattggcgctcagaccgaccagtggcgatcccatccgaactggccgacgtgatcgtgcccatcgtcgagggaatctcgggccgcatcatcgcgcccggctccgtcgggacccggctagagcgctacgccgagatcgcctcggctcgtgatgcggcattgaacgacatccgggaccggctgagcacgtggcttgccgaccaggggccgcggccgcatccgatccggcccgacgaacagatcaccgccgccgatgctgcgcggtggcgctcccccgctcgattcgccgccctcgcgctcgcctggcgcggctccgacctcgagatcgcccaaccgcttgaagcgtggcggcgggccgacaaactgttatggcaacagcaagcgcacggccgtgcacgagccctcggccaccgcacggacttgtggcggcgggttgcaagcgcgctggtcagccagtgcgggcgcctagtcgtcgatgacaccaatatctccgccgtgatacgaaacaccatggagcacactaggattcctgccgacctacagcgccaaatcgatcgccgccgcgatcatgcagcgcctggcgctctgcggtcgagcatggtcgccgcagcgacccgcgacggcgtcccggtgatagtggtgcccgctgcggggttgagccgaatccacgccggctgtggatatgagaaccgggtagagagccgacggcggcgccgcaagatcatttgcgccgggtgcggtcgcacctatgaccccgatctttcagcgacggcgctgatgctcgctcgagcggcgcaaccaccggtgcagccttga

SEQ ID NO: 65102 - DNA, 29 bp, Mycobacterium simiae sp.
gcccagcgatccgggcccaaaggatcgac

SEQ ID NO: 65103 - DNA, 29 bp, Mycobacterium simiae sp.
gcccagcgatccgggcccaaaggatcgac

SEQ ID NO: 65104 - DNA, 2052 bp, unknown
  TnpB Polynucleotide
gtggtcaagctgtatcttgagctcctgcaagccagcatcgccttcgagaggatgaccgtcggcgaggccatcaccgaatgggagcgcttccagccagagggtacctacgccgccagagccgacatgcaaggcttgagagaggtcgccgatgcgcccgacgaccgagcccgagaacgagaacccgacaaggagtgcccgatgaaacggagcacgttcgatggcgaggcgattgtctaccgctacggctgcccgcactgggcggacctcgacgaagccggtctgcgccagctgcggttagcccacaacctttggaacgagctcgtcgctggagaacttcaacacgaggagacggtgcgacaactctgggcacagcatcccgaggtgggcgagaccctcgcagtggtgaccgtcgccgaagaggcgctcaccaagctcctcgagaggacgaagtccgagcacgtgaaggaccgctcgacccggacgagggtcgagacaaagtcggccgtcgccgaggcacgtcgggagctgcgtgagaccagggcggtggccaaggctgccaagaagtcggcctatgccgagatggagccgctctttgccgaggtgaagcaggcccagcgagacgcccagagggcattctatgggacctacacaggccagggcctctactgggcgatgtggaacgacgtcctccagcgtttccagaccacactgcagaccatcgccacccagcgccgtgccggccgtcctgccacggtgcgcttccatcggtggaccggcgaggggacgctcaccgtccagctgcagcgccagacgggcgacccagcccgcaccccctcgatactgctgtcgccggagtcgaagtggaagaacgtcttcgtgccgcccgagtgcgctggggaggagtggccggagcggtgccgcccggcggcgcggccgaaccagggccggggcaacatccggatccgcatgggccaagacgagcagggcgctgcccagttcgccgagatcccggtgcagatgcaccggccgctgccatcgaatggcgatgtcacccttgtccgccttacccgcaagcggatcgcgggccagtaccggctctacttcacgatcacggttcggaccgagaggcctgccgagcgctccgagggccatgcgatcgcatggaacttcggctggcgtcgcctcgaagacgggtccgtccgggtcggcaccttcgaagcgagcggtacgcccgcggagcccttcagcttcggctctccgatgttcgacgagatcgtccgggtgagagacgccggccgcagcggcgaggtcgtcatccctgcctcatggattgaggtgatcgacaagcaggaggccatcgcctcgctgcgctcgacctccttcgacgaggcgcgtgcggtctttgctacggcgcttgttgccagccctgagctggtcgaggccctgggagtcgtcccgggagacgtgtcaaagtggcgctctccctcccgccttgccgccgcggtccttcggtggcgggacctcgacgactcgctgaagggcgatgccctcacgcgcctggaggcctggcgacgccaagaccgtcacctgtgggagtgggtcgcgaacgagcgcaaccagctgctcgcccgacgccgcaacgtctaccgggtgatcgccgccgcggtctcggaccgcttcgggacgatcgtgctcgacgatgccgactaccgggcgctcgctcggcgccctgtgcccgaggaggaggacgcggagatggcgcgtcgctcccgggcaatgcgtgtgctcgttgccccaggagagctgcgtgacgccctcaaccaggcggcgaagcgacgaggcgtccccgtcgacgttcattccgcggccgggctcacgagcatccacgagacgtgtggcagcgacctgtcggagcgctccagcgccgacttcgccggctcgacccgggtctggtgtgccacgtgcgagaagagcttcgaccaggactcgaacgctgcgaagaacttgctcgctcgactcgtcgacaacgagcccggtgcaaaagcgggttag

SEQ ID NO: 65105 - DNA, 2628 bp, unknown
  TnpB Polynucleotide
ttgccggcgcagtcgtcatctgccctgagccgcctcgggaatgcacgacgtgtgggcagacgcgcgagtgccgcccctacggcaaggacggtgctcaagtctgccacccgtgcgcgatggccacgccagagagcaaggccgaagcggagcggcagatggcgatgcggctgttcggcgaaggtagcgcgtgaagcgatccctgctcgagatcgccaccgaaatggacgccctcgagcgccggcacgccgagctccgtgccgaattccaagccgtcgcgctcgagcagcccattgccaagaccagcggcaggactttgattgtcgctgcgaagcttggcacccaggtcgagtggcgctggcgctcggacgcgctcaagccgccggtcaagcacttgttcctgggaggcatcggagcctgtcaggttgcgcgacgctacgcgccgaagatgtcgctatgcaccccgccgacagacgctttggacacgtgcaccaactgcgcgcaatgggcgcggatgcacctgccatctcaggagaaaacagcatgacgacgatggtcttccgttacgggatcgcgacgcctcacgaggggctcgacgaggtctacgcgcagatgcgtctcgcgcacgagtaccggcgcaacctcatcatcatcgagcgcggcaggcgcgcggccgagagacagatccgcagcgagttcggcggagaagcttccatcgtcgaggcgcagctggtcggcatcaaggccgcgtgcgactggctcgccgccgagatccgggtgttgcgcaagaacagccgcaaacgttcggagacagccgcgatgcggctgcagctggcggccgcccgcgccaaggccaaggcggtgcgcgagcacctctacgagcttcgtcgcatgctggccccgcagtgcgcggagtgcaggaaggccggcagcgaagagatgccgtgccctcacgccacaccggaagcagtcgcgctgcgccatcgtctcgacgggagcggcgccatcgcgtcggatctgatcaagaacgcccgcgaacactcgggcctgtactggggcacgtacctgctcgtcgagcgcgccatgcaggcgagtcgttcggcgccgctctacgagaaggacggcatcacgccccacgatccgaagctgccgccgccgcgctgggatggcgacggcaccgtcggcgtgcagatccagtcgtccaagccgctctcggtcgagcaggcgctcgccggggcagacacgcgcctggccttcgtggcgtcaccgtggcccgagcagtggttggcgaccgccgacctgaccgcgaggccgccgcgtcgggaggacagcatcatcggaacaggacgcgggcgccgtccgccgggcgtgcgtccgggcgaacgcgggcagcccgacacggcggcgccgaccacgcgtccggacgggacaccagcgcgctgggtgagtgaccgggcatgccggcacggcgaactgcgcatgcgcgtgggctcgacgagcggcgccccggtctgggcgcgctggcgcctcgactaccaccgtcctttgccagctggcgcgcagattacgtgggcagccgtgcacaggaccgtgcgcgggccgcacgccgagtggagcctgtgcgtcaccgtggaactgagcgcgcccttgcgggcccctcacgcggatggtccgcgtccgaccgtggcgatcgacgtcggatggcgcatcatcggcgacgagatccgtgtcgcagcgtggaccgactccagcggccagaccggcgagttgcgtctgaccgcggccgatatccgcgccctgcgtgccgcggaagatctgcgggcccagcgcgacgttgcgatggacgcctgcaaggcaacggtcaaaagatggatctcggctcaggcacaccccccgcagtggatgcgcgatgcgtcggcgcacatgcactcgtggcgacgcgcttcgcgcttggtagtgctgcttcgccagtgggacgcggagcgaccgtcaccttcggccgacgaacgcatcgtcgtcgaggcgttgcgtgcgtggacgatggccgacagagccaagtgggcaagcgaggcgagtcgccggatctggggtcttcgcaggcgccgcgacaagtaccgcgtttttgcggcgcagatgtgcgcccgctacgaggccgttgtgctggagaagttcgacctgagggacgttgccgaacggccgcagacgggcgaggacagcgccgagaacgagatggcgcgcagcaacagacagctcgcagcgatcagcgagctgcgcggatgcttgctcaacgcggcccctcggcgcgaaggtatcgtggtagccgtggatgccgcgcgcacgacgagtacgtgcccgagctgcggcctcgtcgcggaccgtgatgcagcagcgagcgtgcggctgcggtgcgagtgcggccacgaatgggaccaggacagggaaggggctgctccgatgctgttgcgccggtacagcgagaagcctggtgacgcgaagatcctcgcgggcgctcgcggcgacgataacgtgtcggaaggtaagccgaagaagtcggcgaagtgggcgcgggcgaagcggatgagcgctgcgaagaagcagcggatggcggagcgctcgcaagacggcctgtag

SEQ ID NO: 65106 - DNA, 32 bp, unknown
  Direct Repeat
gtcgcgacggcatcgcggtcgatcgaggactg

SEQ ID NO: 65107 - DNA, 32 bp, unknown; identical to SEQ ID NO: 65106
  Direct Repeat

SEQ ID NO: 65108 - DNA, 32 bp, unknown; identical to SEQ ID NO: 65106
  Direct Repeat

SEQ ID NO: 65109 - DNA, 32 bp, unknown
  Direct Repeat
gtcgcgacgacatcgcggtcgatcgaggactg

SEQ ID NO: 65110 - DNA, 32 bp, unknown; identical to SEQ ID NO: 65109
  Direct Repeat

SEQ ID NO: 65111 - DNA, 32 bp, unknown; identical to SEQ ID NO: 65109
  Direct Repeat

SEQ ID NO: 65112 - DNA, 32 bp, unknown; identical to SEQ ID NO: 65106
  Direct Repeat

SEQ ID NO: 65113 - DNA, 32 bp, unknown; identical to SEQ ID NO: 65106
  Direct Repeat

SEQ ID NO: 65114 - DNA, 32 bp, unknown; identical to SEQ ID NO: 65106
  Direct Repeat

SEQ ID NO: 65115 - DNA, 32 bp, unknown; identical to SEQ ID NO: 65106
  Direct Repeat

SEQ ID NO: 65116 - DNA, 32 bp, unknown; identical to SEQ ID NO: 65109
  Direct Repeat

SEQ ID NO: 65117 - DNA, 32 bp, unknown; identical to SEQ ID NO: 65106
  Direct Repeat

SEQ ID NO: 65118 - DNA, 32 bp, unknown; identical to SEQ ID NO: 65106
  Direct Repeat

SEQ ID NO: 65119 - DNA, 32 bp, unknown
  Direct Repeat
gtcgcgacggcatcacggtcgatcgaggactg

SEQ ID NO: 65120 - DNA, 32 bp, unknown; identical to SEQ ID NO: 65106
  Direct Repeat

SEQ ID NO: 65121 - DNA, 32 bp, unknown; identical to SEQ ID NO: 65106
  Direct Repeat

SEQ ID NO: 65122 - DNA, 32 bp, unknown
  Direct Repeat
gtcgcgacggcatcgtggtcgatcgaggactg

SEQ ID NO: 65123 - DNA, 32 bp, unknown
  Direct Repeat
gtcgcgacggcatcgcggcgacggcatcgcgg

SEQ ID NO: 65124 - DNA, 1509 bp, unknown
  TnpB Polynucleotide
atggcgatcgagaaccgtgtgtacaagttcgggtgtcgggctccggatcagccggagctggcggagcagatcctaggtcaggcgtggctctaccgggacgaactgaggcgcatctacaacgcccagaagcgcgacgcgagggcgcttctggacgcgaaggacgacagctcgcacgtcttctcgtggcttcatgactgcctgaacgagcagatccgtggggcgcgagggcgtcggggccacctgctcgacgccggcacgtactggctcatcgaggcgtcggtgctcgcggcgagcaaggcgtccaagctcgacccgatcaagacacagcactgggatgggacgggtaggattggcgcggagatccagtcgacgacgcagttcccagctgcggagtgggagcacaagcgtgtcgacctcacgacgccgaacgagaagcgccatgcgacgctgatgatccgcgtcgggccgctgcccaggcgacggaagggccagatggctgtcgggcgctccatcgcgtggccgatcaagctccatcgtccgttccccgagggggctctggtgaagcaggtcgcggtgcagcgcacgcgcgtggggcatcgcttccgatgggaggcgctcgtcacgatcgcgtacgagtgtgagcgcttcgacgcaagggcagagggcgtcgtaggcgtagacctcggctggcgctcggacggcgagctcggcatgcgcgtcgccacgcaccacgggacggatgacgacgagggtgtcctccacatcgggacacacctcaagttcgagtactcggacgctgtccgagggacgcgcgacctcgtgttcgatgaggcgaaggagtacgtcgcgagcgccggggtgccaggcggagagcacgcgcgcctctggcgtgacaaggagcgcatgcgtcggctcgcgcgtcaaggcgagctcggcgcggcgatgtggaacgagcgggacaagcatctcgaggatattgagtgtggcgtccgggaacgcgcgattggtcggcggcgggacgcgtaccgtgtctacgcggacaagctcgcgaagcgctaccggtacgtcgtgctcgaggacatgccgatggaggattgggtcggggaggctccgacgagcgggcttgagcggcggcgttcgacggcggctctttatctactccagatgacccttgcgcaacgcttcgggctcgaccgtacggattgggcaccgagcaggaacacctcaaggacatgctcagcgtgtggacatgtccgttcggagaccgtgggtccgcaggcgcattggacgtgtgccggttgcgacgtcaaccatcatcaggatgagaacgcggccaagatccttcggatggacggcgagcggtggatcggtggcggaaacccgcctcgcgctcgcaagcggaaggcctcgaaaggaaaggggaagagggagctgcgggacgtggcgacgggcgacgagctcgagatggtggtcactgctcgcggatcggtctcggaggccgcggaatga

SEQ ID NO: 65125 - DNA, 35 bp, unknown
  Direct Repeat
gtggaacaagccagcgagggggcttcagccttcga

SEQ ID NO: 65126 - DNA, 35 bp, unknown; identical to SEQ ID NO: 65125
  Direct Repeat

SEQ ID NO: 65127 - DNA, 35 bp, unknown; identical to SEQ ID NO: 65125
  Direct Repeat

SEQ ID NO: 65128 - DNA, 35 bp, unknown; identical to SEQ ID NO: 65125
  Direct Repeat

SEQ ID NO: 65129 - DNA, 35 bp, unknown; identical to SEQ ID NO: 65125
  Direct Repeat

SEQ ID NO: 65130 - DNA, 35 bp, unknown; identical to SEQ ID NO: 65125
  Direct Repeat

SEQ ID NO: 65131 - DNA, 35 bp, unknown; identical to SEQ ID NO: 65125
  Direct Repeat

SEQ ID NO: 65132 - DNA, 35 bp, unknown
  Direct Repeat
gtcgaacaagccagcgagggggtctcatctctcga

SEQ ID NO: 65133 - DNA, 35 bp, unknown
  Direct Repeat
atcgaacaagccagcgagggggcttcagctctcga

SEQ ID NO: 65134 - DNA, 22 bp, unknown
  Direct Repeat
gcgagagggcttcatctctcga

SEQ ID NO: 65135 - DNA, 22 bp, unknown
  Direct Repeat
gcgagagggcttcatctctcga

SEQ ID NO: 65136 - DNA, 2049 bp, unknown
  TnpB Polynucleotide
atgcagattcagtggatcaattccgggaaccaggcgttgggctttacgattaagttcgtacgcaaagggcttcgcctgcgagaaagcgatcggaaggtcctctggttttccccgccgaagttctcactctccgtctccgaaaggcagtcgcgctgccgtgtcaatgcattgagcgatgtcgagcacctcggtttgctcgtcgaaaaagaaacgctcgcggctcgcctcctagttcagttcggctctttgaaatcactggtatgcgatcaattccataatctagcggagacatcagaaaagcagatcccggaaaaggacacaacaatcaaagtctacagctacgcgtgcaagatcagctatccgatggacgcagccttggtcgagcaccaaatgacattatctcaccggcaccgtaatgggttgaccgaagcgctagtcgaagggagaaagcgttaccggcagattatgaaggagcacttgggcctggacattaagggactggaagaaaaagacgaagaactcaccggtgctattgaggcgatctaccaggagctcgcaaattggaaagaagaaaaccggaccaggaagaccaatcctaagttggcgggaaagcttcaagagttaaaagcagagagaaaactcgtaagggatcaagtcaaagccgtgaaggttgcggctaaagaggacccagcgattaagccgctgatcgaggagatcaacctggctgtcgatgccgcgatcaaggaaacgcgcaatcgttacagcaacaagcatggtttgtattggcctaattacctggagaatgaacgatcggccaaacaggcgcgttttcaacggatggatccgaaattccgccgctggactggggagggcagtttagcaatccagttccagggtggcctcacaagggatgaactcttcgattgcaaggataaccgtttgcgtttggtgcccccacccgaaagcgcagtgagggctggaggtcaggtcagaggccaaggacggcacgtgcgagcgttatatcgggttcaatctaatgaggatggctcgccacgctggattgctttggatgtaattatgcaccgcatgctaccgaccaacggggttctcaagtgggctcatctacaacgggagaaatcctccagctcagtcggcaaaacgtacatttcattaactcgggactacgattacactctgcgtctgacggtagaagagccgatggctaagccggcagcgccggtcaaggtggccatcgaaatcggctggcggctctttaaacagggccttagggtagccgtcgcactgggagaagatgggaagttcaaagagctgtatctgcctgctgactggctggaagggaagcgaaaagcggagtcgcttctgtccattattgatcgggaaaccaacgctatggttaagacgatcaaggcgtcccatccggaagtttgcacggaacttgcctgggcaggaaccaatagccgcaaactagccagcgccttgctcagagtctggagagagaatcacttcttgcggcctaaccttgagcaatggagaaagcatcattttcaccttttgcgatatgagcgcggattccaccaaagcctcaaccgggcgcggcgtgacctctatcggaacttcgtcagcgaactggttaagacctattcgatctgtggaattgaggagtttgatctgcgtacgttcactagaaaggatcccgctaaggacgctccgccggatcttgctaagtggcaccggacggtagcgaacctgtcgtcgttgagggcactgttaaaacagcaaatgttgacacaaaaacttcctgcccacaacaccaccaggaagtgtcacaattgcggactggtcgaagcatggaattcggccgtggaggtttggcatcgctgcagtaattgtcaaagcaggtgggatcaagactataactcagcccagaaccttctggtccttctttgcgagagctacgatgagcaaaaaaagctaagtgctcgcgagtcagaacgcattgaggacaaggatctacaacggatgaagtga

SEQ ID NO: 65137 - DNA, 1800 bp, unknown
  TnpB Polynucleotide
atgaaaaggtcaaagtccgacaaaagtgcccgagtctacaaatttggatccccgctaaaaacggctgtcgaaagcgaggtcgccatggagcagcttcgccttcaaaaccgtttctggaatgcgctcgtggaagccgacaaggtttttacggaaaaatactgggctattcgagatggtgccgatgcccggttgccggttctgaggaagcaaatagaggatatcaaggtgaggacagaagagatacgaaccgagatcaagaaggggcgccaggacggcatcaaaggcacgccttccgacctcaaggccgagattgtcgaactgaaggcgcaaaagaaacccctgatagccgaaaagaaagagatatgggcattcgtgaaggacacggttaagcctcagctccacgagttggatggtgagcgatacgataagaacgtggccattcgtcaagaatatgcccaaaacggcctttattggggcaactatctggctgtaatggattcattcgaaacggctcgaatggcaatcatgaagacgcaagtagaggatggccaaaaaagacccgagcttcaattccaccgatttgagcgggttggccggtggacatgccaaatacaaggcggcatgaacatcactcaggcttttcttgggtccaacaactattttcagatcgaccgattgccagccgatgcttggactcacccgtccaggggagagcgagggcggttgaaaaggaccaaagcgcgaatccggataggttccggagaaaaaaagaccgttcccatttggcttgaaatacccatcgtcatgcatagaccaatcccggaatcagccgaaatcaagtctgtttcaatacatgtttcgaagctggccgataaattcgtgtggtccttaactgtcaccgtccgggaagattgttcggtcccgcttgaaaggaccgggcattgtgtcgccataaatataggatggagggccaagggtctggcgacacgcatagcctatatgcttgacagccggggagtcgaagaagagatcctgctgggaagtgaatataccgtctcgaacgaaaaggcggcatcgcttcaaggcatccggaagaaaaatttcaatgaaaccgttgcatggttcaatgagtggaaaaaggcaaacgccgatatcgttccgccgtggctatcggagaggacaaaaatgatgatgagctggaaatctgaggctcaactggcatcggtagcgattcagtggagtggcagaggattccggcgcgaaggggacccgcccgagtttcgattccatggagacgaagaggcgtttaacaaaattgaggcgtggcgcaaacaggacaagcatttatggcaatggcatgctaatttgtcggaccgtatccgcggccggcgattgtgcgaataccggaagattgcgctcaaactttcaaaagaatatgatgtcgtcatccaggaggattttgacctccgaaaaacgaaggggaagaagaaagccgaggagggcgcggacaatgacgaccatatcaggagaatgagcgatctcgcttccgtttcgacttttaggacggaaaccatacgggccatgcgctctgccgggaaggaacacgtcaagttagactcgaagaatatcacaaaaacatgcccgttttgcggcgggactatcaagccgggccggaaaacgaacatcatggtccagtgcagcaagtgcgggaaggtctacgatcaggattgggcggcgtccaagaatcttttgaccgcctacctcgattcgagcggtgatgttccgccggaaaccccgtga

SEQ ID NO: 65138 - DNA, 36 bp, unknown
  Direct Repeat
gtttcagtatcctgctcagaggagtcgtttctgaga

SEQ ID NO: 65139 - DNA, 36 bp, unknown; identical to SEQ ID NO: 65138
  Direct Repeat

SEQ ID NO: 65140 - DNA, 36 bp, unknown; identical to SEQ ID NO: 65138
  Direct Repeat

SEQ ID NO: 65141 - DNA, 36 bp, unknown; identical to SEQ ID NO: 65138
  Direct Repeat

SEQ ID NO: 65142 - DNA, 36 bp, unknown; identical to SEQ ID NO: 65138
  Direct Repeat

SEQ ID NO: 65143 - DNA, 36 bp, unknown; identical to SEQ ID NO: 65138
  Direct Repeat

SEQ ID NO: 65144 - DNA, 2346 bp, unknown
  TnpB Polynucleotide
atgaagacaaaagacaagtatgcagtgtttccacgcttcaccacaggcgaggctggtgctgtcgatcgtgagacagctcttcacgtcttgcaggctgaacaaacgcacatcgacaacgccctcagtgggggacttggtgccgctgcacgtgcccaggtgaagctacaaggtacacggttcatcgtcgtttctatgcgatcagccaaacagggatggagagtcactgacctgatggaccacactcgtcacttgtggccgcaccggctcaagtgtccaacgtgtacgacaagttgcaaatgtcgacacggcaaaatcgtgccgcatgatcacgagggtgcgccatgcgacggtagtgaccgctatgtcgggcacgaactggatgcagctatcatctcagctgctgagacgtacggtgcggagcagccgacccaaaacgctgacatcgtgatgaaagctttgggaaaagctgcagcgtaccgcaacaagctcaccgaaatcgaacgagaacggcgtgagcgagaggccaccctactcaacgcggtaggtgatgtggcaatcatcaacgaacagatcaaggcgctcgaagacgaacaagaggtgttgcagaagcggatgaagcaagcgaaaagcggcaaaacgaaagctgagcgatcagagcctgatccagctgacgttcaacgtgcccgcgccatcaaggagttgttgaagcctcttcgagcacgacgcaaagagatccgtgcccacgttagaagcgccgtcgtccaggacgagatcaaggtgattcaggatacgtacaaggaggaatatcgagaagcacgtgcgaagcgtgatgtgtattggggcacaggcggaatcgtcgaagaagcagcagaccaaagcttcaaaacagtcaagaaggggcctcccaagtttgttcccttcaggggacaaggtgcaattgctgtacagattcaacatggtgttccgtggcgggacctattcggcaccaccaaccaacaagtccgtatcgatccgatagatcctagcgcgtggactggttctcgggctgtacgacggcgtgcttgcaaaactgtgatgcatcttcgtgtctcgtcggacgcggaccgcaaaccagtttgggcatcttttcccttctggatgcaccgctcaccaccagaccgcgcggtcgtgaaaaagatcaaggcgatacgacgccgcgacggtcaccgttttcgttggagcattgtcgtcacgtatgatgtgccgcgcgacgatgttgtgcatacagacgtaccagacaatcgtgccgagtgggttggaatcgatgtcgggtggcgcgcgttccgtgaggacaaggctacgtcccaagatcgtccgcagtggacagaagacgacaagctgacgcgagaagaaggtgttacttacgccaccgcgtgtcggctggctgacgtcggacggctagaagaggcgttcaatttgctggccacgaatcctaaagcgttgaagcgtctaaaggctaggatgtcggggccacactctatccgtgtcgcttgttggcacggatctgacggtgtgagtggagagctggtcctcgaccctagttacagtcgtgctagaaagcgtatggaggacttggagtcgacgacgaagaaaaacttcaatgaatgcgtgcccaagattgttgcttggctcgaacagaatccagtctcaagcaacttcctaatcgctgtcaaaccgcttttccgtacagcaggtgactctaaacccgatgctgcaccgttcactcaagaggtgatgacagctcggctcaaggagtgggaggcgccttcacgtcttcacgtgcttcgagacttgtggtattactttgtgatcgacaacgatgaagaagtttggcgggtgttgaatgattggcaccaccaagacaaacacctcgtcgattggatacgaagcctgaaaaggaaggcacgcggtcggcggcgggagttgtaccgactattcgctgctgagatgggccgcaaatacaaaaccttctacatcgaggattttgaactacctgatgtcatagagaagccgcctgttgaggaagagaaagaacatcgtaacaagttggcagagcaaaaccgccgcactgctggcgtcagcgtccttcgtgacgcactcaagaacgttggtcgcacgtgtgtagtagaatacattgctgtagctgccaacgagactacacgacagtgtgcggagtgtggtagcatcgagacgtgggaccaggctaagtacgtaatgcacacctgtagcgggtgtggagcaacgtgggaccaagacttcaacgccggtaagaacatcggcgaacgtggtgccaactccactaactag

SEQ ID NO: 65145 - DNA, 36 bp, unknown
  Direct Repeat
ttgctcaacatcttgtttgttgagacacgcctgatc

SEQ ID NO: 65146 - DNA, 36 bp, unknown
  Direct Repeat
ttgctcaacatcttgtttgttgagacagactcgcta

SEQ ID NO: 65147 - DNA, 36 bp, unknown
  Direct Repeat
ttgctcaacatcttgtttgttgagacaggctggccg

SEQ ID NO: 65148 - DNA, 36 bp, unknown
  Direct Repeat
ttgctcaacatcttgtttgttgagacaagttggagc

SEQ ID NO: 65149 - DNA, 36 bp, unknown
  Direct Repeat
ttgctcaacatcttgtttgttgagacgtcctccatg

SEQ ID NO: 65150 - DNA, 36 bp, unknown
  Direct Repeat
ttgctcaacattttgtttgttgagactaccactggg

SEQ ID NO: 65151 - DNA, 36 bp, unknown
  Direct Repeat
ttgctcaacaccttatttgttgagacatgaagctgc

SEQ ID NO: 65152 - DNA, 36 bp, unknown
  Direct Repeat
ggatcaactactgctcaacgctttacctgttgagac

SEQ ID NO: 65153 - DNA, 36 bp, unknown; identical to SEQ ID NO: 65152
  Direct Repeat

SEQ ID NO: 65154 - DNA, 36 bp, unknown; identical to SEQ ID NO: 65152
  Direct Repeat

SEQ ID NO: 65155 - DNA, 36 bp, unknown; identical to SEQ ID NO: 65152
  Direct Repeat

SEQ ID NO: 65156 - DNA, 36 bp, unknown; identical to SEQ ID NO: 65152
  Direct Repeat

SEQ ID NO: 65157 - DNA, 36 bp, unknown; identical to SEQ ID NO: 65152
  Direct Repeat

SEQ ID NO: 65158 - DNA, 36 bp, unknown
  Direct Repeat
ggatcaactactgctcaacgctacctgttgagaccg

SEQ ID NO: 65159 - DNA, 36 bp, unknown; identical to SEQ ID NO: 65152
  Direct Repeat

SEQ ID NO: 65160 - DNA, 36 bp, unknown
  Direct Repeat
ggatcaactgctgctcaacgccttacctgttgagac

SEQ ID NO: 65161 - DNA, 36 bp, unknown
  Direct Repeat
tcaactactgctgctcaacgctttacttgttgagac

SEQ ID NO: 65162 - DNA, 36 bp, unknown
  Direct Repeat
gattcaactactgctcaacgccttacctgttgagac

SEQ ID NO: 65163 - DNA, 36 bp, unknown
  Direct Repeat
agatcagccacaactcaacgccttacctgttgagac

SEQ ID NO: 65164 - DNA, 36 bp, unknown
  Direct Repeat
agatcaactactactcaacgccttacctacccggcg

SEQ ID NO: 65165 - DNA, 1767 bp, unknown
  TnpB Polynucleotide
atgacgcgggtctttgagtacggtctaccattcgaccctttcgatggggccgagctggtggatgagcagatcctgctcgcgcaccgatactataacaagctcatcgagctggagcacacccgacgatcatcgatcctcgcggtgcagagagccgaccccaaagtcggtcctctcctggcggcctacgacgcagccaacgccgaagttgaggatctgcttgcccggaagcgcgaggcaaaatctcgcgacaggagggtcgcggcgccagagctgtcggaaattgaggcggcgaaagaagcgcggcggcacctctcggtccagctccgcaaggtgaagaaggtggcgaccgaccgccttaagcccgagtacgacctcgctgagcaggccacccgcgacgcgaagaaggcggcccgcgctgcatcgggggtgttctggggcacctactcgctgatcgagcaggcagccgacgctgcggcgaaggcgaagccggtgctccggccaggcacccacccgcgaccctgggaccaacaaccatccttccgccgctggaccggggaggggatggtggctgtccagatcaatattaaccggccgctcaatgacgtgaccgtcttcggcgacgacttgcggctccggatcactccggtagaccccgccgcatggagcgatgccacttcgaggggcgaccgaaagtgcctcgctcggaccaatgtcaccatgcgcgtcgggcgcaacacgggggagactgcgacttggcccatggtcatgcaccgccctctcccggccggctcgcgagtcacgtgggcgaaggtgcttcgccggcgcctcgatgaccggccgcactggttcaagtacgtcctccagcttacagttgagaccgccgacgcgccgcgacaccctggtctggtctcgctgccacctgccatcgtcgcgatcaactgcggttggcgggccctccccaatggctccctccgcgtcgtgacatgggttggctcagatggagctgaaggtgtgctcgacctagggtgtcgtgagtaccgcgaccgaatcgagcgggcagaatcaatccggtcagtccgcgaccagctccgcaacgaacttacctcgaagctagtcgggatcggcattgatgtcacacggtggcggtccttcgaccgcttccaccgactcttccgtgagctcactgcggagggctgtgagcgaaacgaagcggtggagctgcttgaagcgtggcatcatcgggaccggcaccttcggcagtatcaggatggcgcccggggtggggcgcttcggtttcgccgagagcagtaccgtctccttgcggttgagctcgcgcggcgctacccggtggtctgtgttgagtcgtgggacctgcgtcccgtcgtcaccgacgaggaccgcctgcccgggccagccgcagcgcgggtcgaaggggcatcttccaccgcccgactagcgctcgcctcggctgcgaccagggaggggtgtgtcgtcctgacccagatcgccgcgcatgttcgactccagacgcagacctgtcatgtctgcggctatggcgctaagaagggtgaggagtgggatgcggcggcggagcttgtgcatacctgtgaggggtgtggggagacctggaaccaggatgtcaacttctgccgcaacatcctggcggcgagcagggcagcggtgactgaaatcccagagctgctcgtgccgaaaattatgaagcgttctgcgaggttcgcagcacgacacaagaaggtggccacctga

SEQ ID NO: 65166 - DNA, 34 bp, unknown
  Direct Repeat
gtcgcaatgccagccgaacggcttggaagttcgg

SEQ ID NO: 65167 - DNA, 34 bp, unknown; identical to SEQ ID NO: 65166
  Direct Repeat

SEQ ID NO: 65168 - DNA, 34 bp, unknown; identical to SEQ ID NO: 65166
  Direct Repeat

SEQ ID NO: 65169 - DNA, 34 bp, unknown; identical to SEQ ID NO: 65166
  Direct Repeat

SEQ ID NO: 65170 - DNA, 34 bp, unknown; identical to SEQ ID NO: 65166
  Direct Repeat

SEQ ID NO: 65171 - DNA, 34 bp, unknown; identical to SEQ ID NO: 65166
  Direct Repeat

SEQ ID NO: 65172 - DNA, 34 bp, unknown; identical to SEQ ID NO: 65166
  Direct Repeat

SEQ ID NO: 65173 - DNA, 34 bp, unknown; identical to SEQ ID NO: 65166
  Direct Repeat

SEQ ID NO: 65174 - DNA, 34 bp, unknown
  Direct Repeat
gtcacaatgccagccgaacggcttggaagttcgg

SEQ ID NO: 65175 - DNA, 34 bp, unknown; identical to SEQ ID NO: 65166
  Direct Repeat

SEQ ID NO: 65176 - DNA, 1749 bp, unknown
  TnpB Polynucleotide
atgaaagtatataagtttcaccttcttgaacctatccaaaacaaagataaagtattcgatgcattctccaaaatgcacaaatactataataaactgattgaaatcgaaaacaataaacgagatcaaatcagagccattcaatcctccgtagcctctgtctctgaactagaacagaaactagccgaggcagagattgaagctgaaaacgctagccaagctatcaaaaatcaacgtaaatctaccagatctaactctgataccgctacccaaaagaaagctcagaaagatgctaacgatgtcgtcaagggtctcagagcatctctccgagatgctaggaaggctctcaaatcaaattcagaaattcagttgaagattgaagcgacgtcagaggctgccaatgagcaagcaaagcttgcgaggtcattgtgtggcgtctattggggttcctacctcctagtggaggcagcggtggaggcggcttgcaaaactaccccaatgtataagaatgtggccttcaaacgttggagcaaagatggcaaaattggtgtacagcttcaaagcaatgcgaataagacccaattcgttagggatgtatttggaacaactcatactcaactaagaataactaaacaacctgataatacaactctacaagaaagaatgtatcttgatgtaagacttggggatggcccgacaggtaaaagaaatgatattctatttgctaggtttccgatgttgatgcatcgccctatgccattggatgggattatcaaaagcatctcaattcatgccaaatgggaaagttatcgctaccgttggtactgttgtatcaccgttgattcgcctagtgtcatccgtaatacaacggaagatatggtagcggttgatattgggtggcgcaaacttcctgatggaatccgggtaggatatacaagtgatgatgaaagtcttgtattgcctaatagtttgattgaagtatatgacaatagtgttaagcttcaaagtcttcgggatgaactatttaatgcttgtttgaagcaacttgtggaaacggtatccccttaccttgataatggggacaataacaaaagaatagccgaaaagtttcaacacctatcacaatggaagagcaaggatagattgcgtcatgctatctactggctcaaagagaatccaattgatggagttgatatgactccatatttggaatggtgtaaacgagagttgcatttgcttcaatatgaggcaggggtacgcaatcaattctacaatcgtcgagatgaattgtataaggtttggtcagctcaactggcaaataagtataattgtttggtattggaggattttaatatcagcaagattgcggaagagaaagcttatcacaatcaaattcgtcagattgttggggtgagtgaattggtcaaggcattgacgaatgcttttaataatgtaatgggagtagatccagcatattctacacatgaatgtagtttgtgtggtcaggtggatgagtttgatgcagcggcatacattcatcatgtttgttcaggatgtggggctctatgggatcaggatcagaatgcagcggttgtattgtgcgagaggggaagtgctgctcaaaatgccggcacctctcgctggcgcaaacagcttgataatacggaggaatttgtgggcaagtggaccaagcgcaaggctgacaagctggcgcaggaggaggctctcgcagatcaagttgtaaacgcatga

SEQ ID NO: 65177 - DNA, 36 bp, unknown
  Direct Repeat
ctagcaatggcatctcagagcctttacatctgagac

SEQ ID NO: 65178 - DNA, 36 bp, unknown; identical to SEQ ID NO: 65177
  Direct Repeat

SEQ ID NO: 65179 - DNA, 36 bp, unknown; identical to SEQ ID NO: 65177
  Direct Repeat

SEQ ID NO: 65180 - DNA, 36 bp, unknown; identical to SEQ ID NO: 65177
  Direct Repeat

SEQ ID NO: 65181 - DNA, 36 bp, unknown; identical to SEQ ID NO: 65177
  Direct Repeat

SEQ ID NO: 65182 - DNA, 36 bp, unknown; identical to SEQ ID NO: 65177
  Direct Repeat

SEQ ID NO: 65183 - DNA, 36 bp, unknown
  Direct Repeat
ctagcaatggcatctcagagcctttatatctgagac

SEQ ID NO: 65184 - DNA, 36 bp, unknown
  Direct Repeat
ctagcaatggcatcttagagcctttacatctgagac

SEQ ID NO: 65185 - DNA, 36 bp, unknown
  Direct Repeat
ctagcaatggtatctcaacaccttttaaattgagat

SEQ ID NO: 65186 - DNA, 20 bp, unknown
  Direct Repeat
ccaccaccaccaccaccacc

SEQ ID NO: 65187 - DNA, 20 bp, unknown
  Direct Repeat
ccaccaccgccaccaccacc

SEQ ID NO: 65188 - DNA, 1536 bp, unknown
  TnpB Polynucleotide
atgaccaaagtctacaagtacggagcactccccggtggggacaccttgtgtgcccaaatgaacctgggccgtgtctactacaacagtctcgtcgaagcggagaacgagaggcgcacgactatgtggggcggggatcgtcccccttcaccggcaacacacgtgtgcaaaaaatcttgttcgacctgtgataaagcggaaagcaagaaacgcaaaccacgaaagcacgagtgcaagaaattctgtccggtttgccgcgctcattacaaggcactgcgcaagcagtaccgttctgagcctcctcttgacgtgaagccgttccgcaagaaagcggccgaaggtggcctatactggggcacctatcttgtgatcgaacaagacttttcggcggcttggaaagagactgaatctttctcgctggtgaaattccgcagctggcgccagggtgatatgtgtgcggtccaaatccagcgcgacaaggatccagaccggatgttcttgatcaagtcggcgccggatcctcgtaagaaaaagcaacagcgctacacgctccgtcttcgtgtgggatccaaaggccaagcgcctgtgtgggccgagccactacctttcgagatgcatcgtccccttcaaggtacggccacgtgggtcaagatcgcccgcaagtacgtcgcagatcgtgtcatctggtctgtgcagttcacgcgccgcgatatccccgagcgcaaagacaacgccgagcgaggcgctgtcgctatcgatgtcggttggcgtaagaccgacgacggcatgcgcatcgcttacgcgcgtggtgacgacggtgccgagtacgagttggtgctccctcctaaatggatgaagcatgctgatcaagctgatcggatacgatcagcgcgtgatcagaaccttgtggagttacaaaaacaagagcgtttttggagcgtcattttggccgtttgcggattctcgaacaaaaaacttttcgcacgactgaaatcgacactgagcgttcgacgtgtcgcaaaaccaggagagcacaccaagtggatcaagaaggagcggcacttgtggcagtacgaagcagggtgtcgtaaccggtcggtcacccggcggcgcaacgacgtgcgcgtctggctgcgtgatctacgccgacgctacgcgcatgcggtcatcaaggattcctgccacaagaagatgaaggaaaacaaaacgagccttccgaagccggctcgacgccagggtcatcatgccgcgcccggcgaggtgattgaagagatcacgcgcgtgtttggccgcatcacgggtgtttccgtcgtctgtgcggtcgatacgaccaaccattgcccggcttgcagcttcgtcaacagctacgggcccgagcgcgtggtgacgtgtgggggctgtggtgtcgtagaagatcgtgaccgcgtaagcacgcaaaacatgatgaatatgtatgcgatcggaaacgtccgtaacccaaccactcgaaaaagcacgcctaggtttgcgaaaaaacacaaagatccagaggcgccgtag

SEQ ID NO: 65189 - DNA, 35 bp, unknown
  Direct Repeat
tagcaatggcagcgcatcgcctttcaagatgcgac

SEQ ID NO: 65190 - DNA, 35 bp, unknown
  Direct Repeat
tagcaatggcagcgcatcgccttttaagatgcgac

SEQ ID NO: 65191 - DNA, 35 bp, unknown; identical to SEQ ID NO: 65190
  Direct Repeat

SEQ ID NO: 65192 - DNA, 35 bp, unknown; identical to SEQ ID NO: 65190
  Direct Repeat

SEQ ID NO: 65193 - DNA, 35 bp, unknown; identical to SEQ ID NO: 65190
  Direct Repeat

SEQ ID NO: 65194 - DNA, 35 bp, unknown; identical to SEQ ID NO: 65190
  Direct Repeat

SEQ ID NO: 65195 - DNA, 35 bp, unknown; identical to SEQ ID NO: 65190
  Direct Repeat

SEQ ID NO: 65196 - DNA, 35 bp, unknown; identical to SEQ ID NO: 65190
  Direct Repeat

SEQ ID NO: 65197 - DNA, 35 bp, unknown; identical to SEQ ID NO: 65190
  Direct Repeat

SEQ ID NO: 65198 - DNA, 35 bp, unknown
  Direct Repeat
tagcaatggcagcgcatcgccttacaagatgcgac

SEQ ID NO: 65199 - DNA, 35 bp, unknown; identical to SEQ ID NO: 65198
  Direct Repeat

SEQ ID NO: 65200 - DNA, 35 bp, unknown; identical to SEQ ID NO: 65189
  Direct Repeat

SEQ ID NO: 65201 - DNA, 35 bp, unknown
  Direct Repeat
tagcaatggcagcgcatcgcctttcaaggtgcgac

SEQ ID NO: 65202 - DNA, 35 bp, unknown; identical to SEQ ID NO: 65189
  Direct Repeat

SEQ ID NO: 65203 - DNA, 35 bp, unknown; identical to SEQ ID NO: 65189
  Direct Repeat

SEQ ID NO: 65204 - DNA, 35 bp, unknown; identical to SEQ ID NO: 65189
  Direct Repeat

SEQ ID NO: 65205 - DNA, 35 bp, unknown
  Direct Repeat
tagcaatggcagtgcatcgcctttcaagatgcgac

SEQ ID NO: 65206 - DNA, 35 bp, unknown; identical to SEQ ID NO: 65189
  Direct Repeat

SEQ ID NO: 65207 - DNA, 35 bp, unknown; identical to SEQ ID NO: 65189
  Direct Repeat

SEQ ID NO: 65208 - DNA, 35 bp, unknown; identical to SEQ ID NO: 65189
  Direct Repeat

SEQ ID NO: 65209 - DNA, 35 bp, unknown; identical to SEQ ID NO: 65189
  Direct Repeat

SEQ ID NO: 65210 - DNA, 31 bp, unknown
  Direct Repeat
cgccgctgccgccgttgcttccgtcgccgcc

SEQ ID NO: 65211 - DNA, 2037 bp, unknown
  TnpB Polynucleotide
gtggacgcgaatccaggcgctggcggtgctggacgccttgaccaccggcgccgcgcccgctgcacagcaggagcagaaagagatcgcctagcaacggcagcgtctggcctgacacccccagccccgcacggaggagcggggcctacccgaatcgagcatcacatgagcgacaccaccaccaaggtgttcaaataccggctgaacaccgctgacttaccggcggagatgctggtcgccatgcggctggccaccgtcaaccgcatccacgggcgcggcgacgtcccagcgcccgtggtcgacgagatccgccggggccacaacctgtggaaccggctcgtcgagctccacaagggctacgaggagaagctcaaggagatctgggcctcccaccccagggtggccgagatcgaagagcgcatccgcgtcctggaagagcaggcgaagcagctgggagagcgggcggccgccgaacgcatgacggcccggtcccggacaggcacctcggccgagaccaaggcggccctgaaggaagccaaggccgcgctcaaagaggccaaggccgcgctcaaggaggccaaagacctggcctacccgcacgtcaccccccagatcggggacgccaaggcctccctcaaggaggccatcaaggccacgtacgccgagttctgccagagctcggaggggttgtactgggcgacctacaacgacatcgtccggcgccgcttccccaccgcgcaaaagcacgtcgctgacgcgcgcaagcaaggccggtccgcgcagctccgcttccacccctgggacggcaccggcaccgtcaccgtgcagctcatgaggcaggccggccaaccccgccgctcgcccgccgtcctggccgacccgaacggcccctgggcgaacgtcgcccggatcaccatgcaggggaagcgcgggcggatccgccttcggctcggcgccggcgacgccaaggactgggtggaactggggttcatcgctcaccgccccatcccgccgaacagcgacatcgtcgaggtcaaggtcacccgaaccaggcgcggccccgactacgaggcccacctgtgcgtcgtcgccaacgtccccgccccgcccgcccgcacccagggccgcctcgtggccgcgcacatcggctggcgggcaatgccggaggggcacctgcgcgtcgccgtcgtcaccggcgccgccccgccaccggccgccttggtcgacgccgggatcgtccgcgaccacgggtcgtggcaggagatcgtcctgcccaagcagtggcgggaggacaacgacagggtcgcgtccctgcgtagcatccgtgaccgggactttgcccaagcccaccagcagttctgcgggtggctcgacgacgagcgccgccggctgctggaggagctgaccgggtgggatctgtcgtcggtgggccagtggcggtctgctgaccggctgagcgctttcgtgtccgccattcggcggagccggaagcaccgaacggagcgggtcgcgccgggccgcgccggcatccgcgacctttgggcgggggactcccgcctcgccgatggggtgctcgacctgatcgtgtgggaccgccaggatcttcacctggctcggatggccgcagggacatccggcaaactggcgaacaggcgtaaggcccgctaccgcgaggtcgccgcctgggtcgccgacgaggcggccgtgatcgttgttgacgagtggtccgtaggcgaggcggtccgacgcccggaggaccctggcgacgacgaccggatcgccgaggcagcccgcgccaacgccaggatcgccgcccccggcgagctgcgctctaccctcacgcaggcggtcacctcccgtggcgggcgcgtcggtgatccgccgcaccgggccgcataccgggtacaccacgagtgcggcggcatgctggacacctcctcccgaatggcgcaggtgatggtgccgtgccagggctgcggccaggtggtggaccaggattggaatgtgctgcagcacatgcgagaggctgcgtgctcttga

SEQ ID NO: 65212 - DNA, 36 bp, unknown
  Direct Repeat
attgcaaggcccgcggagaggcaacaaatctccgac

SEQ ID NO: 65213 - DNA, 36 bp, unknown; identical to SEQ ID NO: 65212
  Direct Repeat

SEQ ID NO: 65214 - DNA, 36 bp, unknown
  Direct Repeat
attgcaaggcccgcggagaggccgcaaatctccgac

SEQ ID NO: 65215 - DNA, 36 bp, unknown; identical to SEQ ID NO: 65214
  Direct Repeat

SEQ ID NO: 65216 - DNA, 36 bp, unknown; identical to SEQ ID NO: 65214
  Direct Repeat

SEQ ID NO: 65217 - DNA, 36 bp, unknown; identical to SEQ ID NO: 65212
  Direct Repeat

SEQ ID NO: 65218 - DNA, 36 bp, unknown; identical to SEQ ID NO: 65212
  Direct Repeat

SEQ ID NO: 65219 - DNA, 36 bp, unknown
  Direct Repeat
gttgcgatgccctcggagaggccgcaaatctccgac

SEQ ID NO: 65220 - DNA, 1923 bp, unknown
  TnpB Polynucleotide
atgattaaaacagaaaaatatggattgttatcaccaacactaaatgcagacttagttttattagaaatgcgtaaagcacatgactatcaaaacaacttaattgaaattgaaagatggcgaagagatgaaataagaaaaattgaaagtatatatggaaatattcctcaattaactattgattatgatattgcctcaaatgattatgagacaattcttaaaactaagaagaaaaataattctaatgccagggcaaatgtttcaacgccagaattaaatcaacaattgaaagatgcaaagagtaagcgtaaagcttgcgaaaataaattaaaacaagcaagattaagttcgagaaaagatgataaaattaaaaaagcaaaagacaatatttctattttagaaaacaaaaaacaaagtcttttaagaaaaagcgatgctgcaccttggtatggaacatatatgttaattgatcacgcttttggcatcccatctgcaaaaggtaaaacaaaaggcatgccgctatataatggtataaatccaaataatccgatatttagaaattataatggcgaaggtagaataggaataaaacaatttcaaccatatgaaccaattaataaaattattaacataaatccaacaagcaaatttttacaaattgttcctattccgccgccaaaattgaaaaaagatggctcgcaaagaaaaataggaaataaaaatcttaaattattacgcatcagaattggtacaggtgaaaagaatgctccaatttgggcagagtttcctatggtatatcatagaccgttgccaagtaacagcgttattaatatggttcaaataactaaaaaaataattgcttcaagagaaaaatgggcagtttctatttcatatgaagataatatacagttttcaaaaaatgaaattaaaaaagttgtagcatttgatttaggttggagggagttcccagatcgtattagaattgcttgttggaaagacaatgatggtaaaagtggtgaaatatcattgccgattggattaggtataaaaaaagatagtaatgataaaattatcaaaaataaagatggaaatgataaattatttcattctacaattaacaaattaagaaaagttaaagaattaaaaagtggaagagatttagattttgatcgtgtcaaacaattatttggttattttgtaaatagtgggattatttttccacaatggtttcaagattggctaaatacaactaataaaaatggtaaaaaaattaacgatataacatatatttctaaatggagatcgcaaacaaaattatctaaattgattttgcaatggaaaaataatagatttacaggtgatgaagatatttatatgtggttggaatattggcgctatcatgattttcatttacgtgattatgagtataatttgcgaaacaaatcaataggcgctattgaaagtttatataaaaatacggcagcacattatgctaataattatgatgctgcaatttttgaagatattaatttaagtaatatagcaaaaggtaaagttggaagtacaaatagacaattgacagctccaagtaagtttcgtaacgcatgtaaaaatgcgtttaatatgcgtggaaaatgttatgaagaaattattgcaagaaacacgtcacgcgaatgtgcagtttgccacgtgttaaatgatattggaggaaaattagagtatttttgttctggatgcaatgttgaacttgatagagatgaaaatgcagcggaaaatatcttagaaagaggtaggaaaaaattgtcagacaataacacatatatagacagtcatgagaattgcgagcacgatagtaatgctaaaaatgccgtaggcgctcgcatagacgaaaattgtaatgaaaacaacaatttacagtatgcttga

SEQ ID NO: 65221 - DNA, 35 bp, unknown
  Direct Repeat
tagcaaaggcagcttgacgccttaaagatcaagac

SEQ ID NO: 65222 - DNA, 35 bp, unknown; identical to SEQ ID NO: 65221
  Direct Repeat

SEQ ID NO: 65223 - DNA, 35 bp, unknown; identical to SEQ ID NO: 65221
  Direct Repeat

SEQ ID NO: 65224 - DNA, 35 bp, unknown; identical to SEQ ID NO: 65221
  Direct Repeat

SEQ ID NO: 65225 - DNA, 1974 bp, unknown
  TnpB Polynucleotide
atgactgcccgtatgctagtagccccattaactgctgcatctaaaaacaagcgtaaaacgtgcgtgagagagtgggacacgtggagcaagcgcgatatggtgtttggtgtgttattttcacacaccacaagacaacgtgagatcaaagggcaacaagtcgcatataagtttatcgaggatcaaatctatcaagggcacgcatattacaaccagtgcatttttgtcgaacgtcatagacgacgtgcatatagacgtttggtaaacacgattccagtgttgaaaccgtatcgtgcacgtgaggcggcgatccaagaacaacttaatcgttgttacgatcaaatcaacgaggagaagattcgtcaacgcagcaaacaggtaacactaccgcttgtagatgcagcaattactaacttaaagaagcaacttaacaaagcgcgtaatgaacgaaaagagaaagagagcttgtgtctgccacaacatccactagtcgtagctgcactaacacgtgtgaaagaatacgccaaacatcgtagtgttgaattgtttgatgcttgtcgtgctaatggcctagggtggcacaccgccaatctataccagaaagcgatcaaacaggcgtgtagtgctaaaggactccctaaatatcgtcgatggtccggtgaaggttgtatcggcattcagctaccggagtctcgtcaccacgaacacaacaaaatactaacaaaaggtggcgtacgtgtcgcagatctctttggcacgtgcaaagaggtcacaatccacgaacctgatgaaagccgcgcgttttgtcggcgcccaccagtagtatgtgacctgctatacggttttgggatggagcacactggtaaagcaaaaaggcgtcggcagcagtacaaattagaattgctggtaagactacatcgagagcttccgcctgaaggtgttgtaacacaaatacgaatagcgcgtgtaaaagatgggcgcaggttttcgcacaagataatattcacagtggtgcaaaagccgcccgcaacatccgttaagacctcgatcgtagcgtttgatttgggttggcgttacaaccctaaaacaaacacattgacagtagctacgacggtagatacaaacggtaacacacatcgttttgaagtaccgtcttcaattcttgccgcacacacccaattagatgagctacacagacaacgatcgatcctgttagacgatctaaaacaacagcttaagacatggagtgaaactactccacctacacctgcgtggcaacagtttcttgaagatgtcaacaagctacagaagtcaagatcacaaagacgatttgtacagctaatttacaggtggcgtgacgagtattttgttcacaatgatgaaatcttcaaaagcttagaaatgtggcgacaaaacgacatacgactgtttcaacacgaagcacgtcttacgcgacgtgtcgttgagcaccgtaagaagctggcatatgaattcattaaagggatgtgtagactgcacgatgaactagtgttcgaggacattgacatctcacaactagcaaagagagacaacccctcccaacgaaatcgttcgattggtgccccaggtgagtttagggaattggcaatgagtgtatgtcatcgcgaaggccgacgatatcgtacagtttccgcagtgaatacaactgttacgtgtcacatctgtggaaaaaagaacaacaaaaggaggtggcctgatcctgctgcacagattttcacgtgtcaatattgtggtgctcgatgggaccgcgacatcaatggcgcaacaaatgttttgtttcgagcatgtgatgaacaaaacatcccgcgtccagccttgcggcttttggattcgagcgccccagtacgtgtgatttcacctcgcccagaaatcaaacagttggccgtcaagcacacacaaaacaacaaggcgctcgcgaaacagtttgcaacattgtaa

SEQ ID NO: 65226 - DNA, 37 bp, unknown
  Direct Repeat
ggagcaacgcctgtccgaaggcttgaagatcggaacg

SEQ ID NO: 65227 - DNA, 37 bp, unknown
  Direct Repeat
ggagcaacgcctgtccgaaggcttgaagatcggaacc

SEQ ID NO: 65228 - DNA, 37 bp, unknown; identical to SEQ ID NO: 65226
  Direct Repeat

SEQ ID NO: 65229 - DNA, 37 bp, unknown; identical to SEQ ID NO: 65226
  Direct Repeat

SEQ ID NO: 65230 - DNA, 37 bp, unknown; identical to SEQ ID NO: 65226
  Direct Repeat

SEQ ID NO: 65231 - DNA, 37 bp, unknown; identical to SEQ ID NO: 65226
  Direct Repeat

SEQ ID NO: 65232 - DNA, 37 bp, unknown
  Direct Repeat
gggatgacgcctgtccgaaggcttgaagatgatgtag

SEQ ID NO: 65233 - DNA, 1731 bp, unknown
  TnpB Polynucleotide
atgaagcgcaaagtcaatagtacccccaccaaaatctggagcttcaacgcgcgtcagctgccagaaggcgctgcggtattcgattcccagctctatctggcgcaccagtacacgaaccgcctgatcgagattgagcgctcgcggcgcggtgcctacctggaagcttgctatgcggaatttccacggctgcgggagctggatacgcgcgaagcggtgctggagatcgagctccaaaaaacagcgaaggccaatcgcgagccgttatatatggagcggcgcgatatctgggccgagcaaaaaaagctgcgtgctgagctgcgccggatcatgcaaccggcgcatgcagcgcgcaaagagcgcagtgcagcgcgcaatgcggggctcggtccacgcatcaaggaacgcctgaatttggagctgagcgaggaaatgctcgccgagcaatggcccgaagtgtggaaggcggcgacacgggcggactgcgccgcgttgctcacggtgaaggcggcccgcgcggagttcgtggagaaggggctccccaatgggacctacctgctgtgcgacaaggcgatggaggcgattcgccgcgactctaagagcgagccacgctttcggcgctggacgttcgaggggcgcgtcggcgtccaggttcgcaatggggcagagattcagatcgtggacatatcccctgcacgcgggggtcgggcttcgcggcttggcgaaacgtatgcccgcgttcggctgcggctaacccccaaagggcagcctgagacctggtcagactggagtatccgcttccaccggccgctgccgaaggacgccgtcatcaagtgggcttgggtcaaggtttcccgcgtgggtgatcgcaaacgctacgagctgcagctcacgattgagtccgcgccgcccgtgcgcgtcgtggcgacgactggcgtcgtctgtgcagcgttcgggtggacggagcagccggacggtagcgttattgccggcacgctgacgaaggtggacggcgagctggtcgagcatatcgtgcttccggccgctctgcggcgcgcaacggtgtttgccgacgagctccgcagtcacatggacaagcacttcaatgctgcgatgcctctgctgtcgcaatggttgggtctggcatcggccgtaccggactggtgtcgagaggacgccaagcacatgcacctttgggagagcccccgccggctcgcgcgtgtcgcgcggcggctcgtctacgagcaggacgctacggccatcgcacaggtgcatgcgttgtggcgcgcatggaaggggcaccgcggcaagctcgacctatacggcacctatgaagagcgagagcagtttttcgttacgcaggagagcgcggaggagaaacggctgctgctccacctcgaatggtggcgaagaaaaaattcccacttgtggcagtgggaggaggacgagcgccgcaagctgcgcatgcagcgcaaggatttgtatcgggtcacggcacgccgggtctccggtcaatttgccacgatcattttgccgcagatcaccggctcgaaggcggcagcggatactaagggtaagcgcaaggcgcagcgactctccgaccaggagcagcgcgcgcgcgccgaagccgctccctatgagctacggcgctattttgcggaggcgttcgggtcgcgggtggtcgagcggtccagcgccagatccttagagcaggaggatgcggcagctgaataa

SEQ ID NO: 65234 - DNA, 36 bp, unknown
  Direct Repeat
ggtcgcgatctcacggccgtcgcgatggccttggta

SEQ ID NO: 65235 - DNA, 36 bp, unknown; identical to SEQ ID NO: 65234
  Direct Repeat

SEQ ID NO: 65236 - DNA, 36 bp, unknown
  Direct Repeat
cgtcgcgatctcacggccgtcgcgatggccttggta

SEQ ID NO: 65237 - DNA, 36 bp, unknown; identical to SEQ ID NO: 65234
  Direct Repeat

SEQ ID NO: 65238 - DNA, 2298 bp, unknown
  TnpB Polynucleotide
atgggcgaagttcgagggcgacaccatggtcatgtttttcatggacggccgactggcggccctggccgaccgcgaagagggcggcgtcgaggtcgtgcatgtggtgaggctgcgcgacgaggccgcaccgaagcccgagcccgagaccaagtcgccccgggaactactggaggccgcggagtcggctttcatggccgcggtgcggaccgggggcgcagggctgaactatcagaaacagacggacgacttgatctccgcccgcaacgcgctggagcgggccctcgtcgtacagggggaagcggcagcggcgcgcgcgagcgccctacacaagcagaactgccgcctcgaggaggcggtccgcctcctggctcgcatcgtggccaacaaggcacagggaggcatagacacctacgaaggctcggtgtcagacattcttcagggcaaaggagagaccacatgaacatcgtgcacgagtacggactcctcggcccaagggaaggcgcagagcgcgtcgacgagcaactgttattggcacatcgctattacaacaaactcaccgagatcgagagggcccgccggctggcctacgtcgccctcgtgaacaccggcgaagtggagcgcctgaacgccgaaatggccccaatcgatgccacgatcaccgcgctgcgtgaacagatcaagagcctgcgttcgcggaaacgcgagaagccagaagtggtgcaggagatcgcggctacgcggatgaaactcaacggcacggtcctcctgatcaggacactcagggagcagcgtcgcgcggcccaagtggcactcaaggaagacgggacactgcggaccaaggtcaaggatctggacgacgagtatgcggcgcagaagcgcgcggcccgagccgcctgcggcgtctactggggcacgtatttgtgcgtggaggcgtcgcactaccaagcgtgtatggcgaagcccgagatgcgagaggatcgaccgccgccgccatggacggagaggccgcacttccggcgctggaccggcgagggggccgtggcggcgcagatgcagggcggtcttgcctccccgttcggcgcggacacacgcgttcggatcggggcggtagatcctcgtgcttgggatccgtccactccccgcggcgaaagacgccgcatgcagcgcacaaccctctctctacgcatcgggtcggacgatcacggcaagcccgagtgggccaagtggcccatgatcatgcaccggccgcttccgcccggctcacagatcatgtgggtcaaggtgctccgccgaaaggagtgtggccacgatcggtgggtggtgcagttctctctgcggtgccccgagcccgcgccgtctccctctccccacgacatcggcatcgacctgggctggcggaagcgcggcgccgaccttcgggtcgcctactgggcagacgactccggtcttcatggggaagtgcgagttgatgccacagtgctcgacctgcaccggaaagccgagagcctgcggagcatccgcgaccgcaacatggatgcgctcaaggacgccctcgcgccgctactggccggagttgcgctgcccgaggacgagttcctgtccgtggccgcatggcggcagtggaggtctccgcagaagtttgcggcgttgctgagtcggcacgtcgcggcgctgccaaacgcggcccgagaggccctggacgcctacataaagagggatcggcacctgtggcggtacgagaccggggtgcggaagtcagccctcggccggcggcgcgagaaagcacggatctgggcctcgcgaatcgcgacgcagtatggcgtggtgtacatcgaggacttcaatctgcggaatgtggcgacgttgccaacgcccgaagctaggcccgatgcggccgacggcggccgggacgcccgcgagcggtatcagcgagtcatgggctgcccgtcggaggtgcgacaaatcctcatctcggctgtgcgtgttcgcgggggccgagtggtcaaggtgccgtgcgagttcaccacgatggattgccacctgtgcggagagacgaacacctgggaccaccatgaactcatgcacacatgcacgcgttgtggagagacatgggaccaagacgaaaacgcgtcctggaacattctcgcgagaggtcgggtggcgtcggaaaccccggatccgctcgcgcggcccaaactagcgaaatggcacaagaagcattgcgtcgcagcgacgcccagagtagaacagcaagtcgccggcgaggaccgctcgcagagcacggcggaagcgccgtaa

SEQ ID NO: 65239 - DNA, 36 bp, unknown
  Direct Repeat
gtcgcagagcctgctcgggggcgtagaacccgagac

SEQ ID NO: 65240 - DNA, 36 bp, unknown; identical to SEQ ID NO: 65239
  Direct Repeat

SEQ ID NO: 65241 - DNA, 36 bp, unknown; identical to SEQ ID NO: 65239
  Direct Repeat

SEQ ID NO: 65242 - DNA, 36 bp, unknown; identical to SEQ ID NO: 65239
  Direct Repeat

SEQ ID NO: 65243 - DNA, 36 bp, unknown; identical to SEQ ID NO: 65239
  Direct Repeat

SEQ ID NO: 65244 - DNA, 36 bp, unknown; identical to SEQ ID NO: 65239
  Direct Repeat

SEQ ID NO: 65245 - DNA, 36 bp, unknown
  Direct Repeat
gtcgcagagcctgctcgggggcgtagtgcccgagac

SEQ ID NO: 65246 - DNA, 36 bp, unknown
  Direct Repeat
gcagcagagcctgctcgggggcgtagtgcccgagac

SEQ ID NO: 65247 - DNA, 36 bp, unknown; identical to SEQ ID NO: 65246
  Direct Repeat

SEQ ID NO: 65248 - DNA, 36 bp, unknown; identical to SEQ ID NO: 65246
  Direct Repeat

SEQ ID NO: 65249 - DNA, 36 bp, unknown; identical to SEQ ID NO: 65246
  Direct Repeat

SEQ ID NO: 65250 - DNA, 36 bp, unknown
  Direct Repeat
acagcagagcttgctcgggagcgcagtacccgagac

SEQ ID NO: 65251 - DNA, 2028 bp, unknown
  TnpB Polynucleotide
atgatcttcgtttaccgttgtggactccagccgccgacgcaaggggccgatctcgtacgcgagcagatgcggctcgcgcatgcgtaccggaacacgttgacggagatcgagcgcgcgcggcgcaagatgcttcgttcgctcggcggcgaggaggagatcgcgctcctcgcggcgcatgcggcgaccgacgaggtgtgccgcggcatcgccgtcgagatcaaggcctacaagtcgcgcgagcgcacgcgcaaggttcctccggaaatgtccgagcgcatgaaggtcgcgaaggaggcgcgcaagaaagcggcgcgtgacgtcttcgatttcaggcgccagcgagcgaccgatcccgccgtcgcggcggccgtcgacgaggtgaacgaagccgcttcgctcgcgcgccaggtggctcggcgcacgtgcggcgtcttctgggggagctatctccccgtggaggcggccgagcgcgcttcgcgcgccaagcctctctacgacggcgtcgcgcccgacgatccggagttcgtgcggtggacgggcgaggggacggtcgccgtgcagcttcagggtggcctgtcggtcgccgatctccagagcggcgaagacacgcggctccgtctccggctggcggcgtggggctcaccggagacggtgtcggacgagccgccgcccggctggggaagccgacgctacacgcccgaagagcgccgcgcgcgctggcgccacatgctcgcgcacggaggggcgcacgacggaacgcatccagggcaaaagggtccgcggcccatggggacgctcgaactgcgggtcggctcggcgaacgcgaagggagaacgctgcgccggaggtcatacgccggtgtgggcggcatggcctgtcccgccgacccgtcgttccttgccgccggacgcgatcgtgaagtgggcccacgtccacgtgcgtcggatcgccgcgcgcgaggagtggtcgctcacgctgacgatcgagtgcgcgcggcgcgagtcgtgcgggaccggcgcggtcgcggtcgacctcgggtggcgccgcatggaggacggcggcctccgcgtggcggtcgcgcagggcgacgacgggaaggttcacgagatgcgcctctctccgtgcgacatcgaccagctcacgaaggcggactcgatccggtcgcaccgcgacatgctcttcgacctcgcgcgtccgtggctgcgcgcgatcctcgacgcgctcccggagcggcccgcgtggctcgacgaacggctcgcgtcgatggctctctggcgcgcgcaagcccgcctcgcggccgtcgcgatccactggcgcagccatcggttcgacggcgacgccgacgccttcgccgcgatcgaggcgtggcggaggcgcgacaagcacctctggagctacgaagatcatcagcgcaagggctccctgcgccgcaggcgggacctctaccgcacgtgggccgcgaagctcgcccggcagtacggcgtcctcgttctggaagacggcggcgccaagggcgagacgcccgtcttcgatctgcgcgccttcgcgacgctgcccgaggtcgaagaggtcgagaccgagcgtgacgagcgcgcgcgctcgcagcgtcacctcgccgccccgagcgagcttcgcctcgcgctcacgcaggcgttcgagggccgcggcggccagcaaaggtcggtcgtgatggagaattcgacgcgccgatgcgcggtggagggttgcgacgccgtcgagtcgtgggatgcgggcgcggagctacgtcacacgtgcaagaacgggcacacctgggatcaagacgagaacgcgggtgcgaacatgctccgcctctaccgtgagaaccgcgagcggcctcatgacgcctccgcgaggacgaccgctcgcaagaaggaaaagaagggaaaggtcaagaaggatgggatcgaaggcgaatccgcgtacgctcgcggacggcgccttcgcgccgagcgccaagctcgaatcgctgccgctcgcaagacgagccaagaggccacaggaggatga

SEQ ID NO: 65252 - DNA, 28 bp, unknown
  Direct Repeat
tgcctgtgcagaggcttcgtttctgcga

SEQ ID NO: 65253 - DNA, 28 bp, unknown
  Direct Repeat
tgcctgcgcagaggctttgtttctgcga

SEQ ID NO: 65254 - DNA, 19 bp, unknown
  Direct Repeat
gatgacttcgtttctgcga

SEQ ID NO: 65255 - DNA, 28 bp, unknown
  Direct Repeat
tgcctgtgcagaggcttcgtttctgcga

SEQ ID NO: 65256 - DNA, 28 bp, unknown
  Direct Repeat
tgcctacgcagtggctttgtttctgcga

SEQ ID NO: 65257 - DNA, 28 bp, unknown
  Direct Repeat
tgcctgcgcaaagacttcgtttctgcga

SEQ ID NO: 65258 - DNA, 22 bp, unknown
  Direct Repeat
tagaggcgcagaggcttcgttt

SEQ ID NO: 65259 - DNA, 28 bp, unknown
  Direct Repeat
tgcctgcgcagaggcttcgtttctgcga

SEQ ID NO: 65260 - DNA, 25 bp, unknown
  Direct Repeat
cgcttgcgcataggctttcgtttct

SEQ ID NO: 65261 - DNA, 28 bp, unknown
  Direct Repeat
tgcctgcgcagaggcttcgtttttgcga

SEQ ID NO: 65262 - DNA, 28 bp, unknown
  Direct Repeat
tgcctgcgcagaggcctcgtttctgcga

SEQ ID NO: 65263 - DNA, 28 bp, unknown
  Direct Repeat
tgcctgtgcagaggcttcgtttctgcga

SEQ ID NO: 65264 - DNA, 28 bp, unknown
  Direct Repeat
tgtctgcgcatgggcttcgtttctgcga

SEQ ID NO: 65265 - DNA, 28 bp, unknown
  Direct Repeat
tgcctgcgcagaggctttgtttctgcga

SEQ ID NO: 65266 - DNA, 28 bp, unknown
  Direct Repeat
tgcctacgcagaggcttcgtttctgcga

SEQ ID NO: 65267 - DNA, 28 bp, unknown
  Direct Repeat
tgcctgcgcagaggcttcgtttctgcga

SEQ ID NO: 65268 - DNA, 28 bp, unknown
  Direct Repeat
tgcctgcgcagaggcttcgtttctgcga

SEQ ID NO: 65269 - DNA, 28 bp, unknown
  Direct Repeat
tgcctgcgcagaggcttcgtttctgcga

SEQ ID NO: 65270 - DNA, 20 bp, unknown
  Direct Repeat
gcccaggcttcgtttctgcg

SEQ ID NO: 65271 - DNA, 28 bp, unknown
  Direct Repeat
tgcctgcgcagaggcttcgtttctgcga

SEQ ID NO: 65272 - DNA, 28 bp, unknown
  Direct Repeat
tgcctgcgcagaggctctgtttctgcga

SEQ ID NO: 65273 - DNA, 25 bp, unknown
  Direct Repeat
tgcctgcgcagatggcttcgtttct

SEQ ID NO: 65274 - DNA, 28 bp, unknown
  Direct Repeat
tgcctgcgtagaggcttcgtttctgcga

SEQ ID NO: 65275 - DNA, 28 bp, unknown
  Direct Repeat
tgcctgcgcagaggctttgtttctgcga

SEQ ID NO: 65276 - DNA, 28 bp, unknown
  Direct Repeat
tgcctgcgcagaggcttcatttctgcga

SEQ ID NO: 65277 - DNA, 28 bp, unknown
  Direct Repeat
tgcctgcgcagaggcttcgtttctgcga

SEQ ID NO: 65278 - DNA, 42 bp, unknown
  Direct Repeat
gtgagcggtcctctcgaaggcacatttgcggcgacgagcgcg

SEQ ID NO: 65279 - DNA, 42 bp, unknown; identical to SEQ ID NO: 65278
  Direct Repeat

SEQ ID NO: 65280 - DNA, 40 bp, unknown
  Direct Repeat
cgggatcatggctgggttgaacaagaaagagatcgaagat

SEQ ID NO: 65281 - DNA, 40 bp, unknown; identical to SEQ ID NO: 65280
  Direct Repeat

SEQ ID NO: 65282 - DNA, 29 bp, unknown
  Direct Repeat
tgcctgcgcagaggcttcgtttctgcgac

SEQ ID NO: 65283 - DNA, 28 bp, unknown
  Direct Repeat
gcctgcgcagaggctttgtttctgcgac

SEQ ID NO: 65284 - DNA, 28 bp, unknown
  Direct Repeat
gcctgtgcagaggcttcgtttctgcgac

SEQ ID NO: 65285 - DNA, 1731 bp, unknown
  TnpB Polynucleotide
atggcctatcaggtctactcctacttcgtgaagcgcatcctgtccggcgatgacctcgcggcggagcagcgccgccaccggacgacgtactggaaccggctcgtggaggtggagcgcgcctaccgcgctggcatggacgccgcgttgggtgagcactccgccgcgctcgcggaactggaggaggccatcgccaaggccgaggagcgcgtggaggcggcgaaagccgccatcgccaaggcccggcaggcggcccgctccaaggccaaggtgcccgatgaactccgtgaggcatcgaaggccgcgattgcggtgctcaagccgctccgggagcgccacaaggagatgcgggccgcgctgtttgcggaccccgccgtgcaacagcgcatcgaggcactggaggaggagcggcgcgcggcccaacgggacgcccgccacgcggcggtcgaggcgggactgtactggggcaactacctggacgtggacggggcgtacaaggccgggcggcaggggaagggtgggcggctgttgaagttccacgccgcccgccgtgagggcacggtgagcgtctggtttcagaagggcctacccgtggccggcgttgacggcgcggacagccgcctccagatcgtccccgtgccgacggaggacgcggcggcggagatggcgcggccccggggaccgaagcagccggccccgaacatggccgaccgccgcatcggtcggctgcgcgtgggcaccggagaggagcggacgccgctctacgtcgagttcgccatgctctaccatcgcccgctccctgaacacggcgtcatccgccgcgcgtcgttggtgcgggaggaggtggcgtcccatgcccggtggcggctgctggtggtggtcaacgagggggagcggaaggagccggaaccgcgcgaccccatcgtgggggtggacgtgggatggcggcagctgcccaatggtgacctgcgcgtggcctgcgcctgcacggaggagggggagccggactacctgaccctccccgcgcgcgtggtgacggccttcgagaaggccgacagcctccgcgccatccgggacagggacctcaacgcgaacctcgccgcgctggtggcgtggcgcagggagaacatcaccgcattgccggattggttcatcgaggcgaccaagaccctctcgcagtggcggtcctcggcgcggctggcggcgctggtgctgcgatggcgggtcaacccgttccccggcgatgagatggcccacgatgcgctggaggcgtggcgggagcacgacaagcacctgtggacctgggaggcgaacgagcgccggaacgccagcgcccgccggcgggaggcgtttcgcctgttcgccaagcggctggcgcatacgtcgggcttcgtggggctggagaagttcaacctgcggcgggtcactggcaccgacgaggagcaggaccatgccgcgcggatgcgggtgatcgcgtcggtgggggcgctgcggggcatcatccgccagacgtgcgcgcgggatggggtctgcgtgaaggacgacctccccgcgatgcacaccaccatcacctgttggcagtgcggcgtccagatacagtttgacgcgcgcaccgaactgcgcgtgacctgtcccacccctggttgcggcatcacctgggaccaggatgagaacgcggcgcggaacctcgcccacatcgccgcgacggggagcctgcgagcgccgacggcgtga

SEQ ID NO: 65286 - DNA, 36 bp, unknown
  Direct Repeat
gtggaagagccatcccgaaggctttgtatttgggac

SEQ ID NO: 65287 - DNA, 36 bp, unknown; identical to SEQ ID NO: 65286
  Direct Repeat

SEQ ID NO: 65288 - DNA, 36 bp, unknown; identical to SEQ ID NO: 65286
  Direct Repeat

SEQ ID NO: 65289 - DNA, 36 bp, unknown; identical to SEQ ID NO: 65286
  Direct Repeat

SEQ ID NO: 65290 - DNA, 36 bp, unknown; identical to SEQ ID NO: 65286
  Direct Repeat

SEQ ID NO: 65291 - DNA, 36 bp, unknown; identical to SEQ ID NO: 65286
  Direct Repeat

SEQ ID NO: 65292 - DNA, 36 bp, unknown; identical to SEQ ID NO: 65286
  Direct Repeat

SEQ ID NO: 65293 - DNA, 36 bp, unknown; identical to SEQ ID NO: 65286
  Direct Repeat

SEQ ID NO: 65294 - DNA, 36 bp, unknown
  Direct Repeat
gtggcagagccatcgcagaggctttgtatttgggac

SEQ ID NO: 65295 - DNA, 29 bp, unknown
  Direct Repeat
agccatcgcaggggcttcgtacttgcgac

SEQ ID NO: 65296 - DNA, 29 bp, unknown
  Direct Repeat
agccatcgcaggggcttcgtacttgcgac

SEQ ID NO: 65297 - DNA, 1683 bp, unknown
  TnpB Polynucleotide
ctgaaagaacccagaaaaaagcggaagccgccgcgcaagaccgagaagaagcccgagtttacccgggtctatcgttacggctgcaagatcacggacggtgctccgatcgcttacgagcagatgcgggctggtcataagtaccgcaacgagctggtcgcgatcgagcgtgagcgacgcgaaaaagcgatgacgatcatgcacagcgtcgcgccgcacgtggagaagctgcaagtcgagatcgagcagataaaagagctgatcgggtcgaaggaagatgagctgaaggcgctgcggcagaaggatcgccggcgtacgtcgtccaaagagctttccgccgagcttgcaacgctgcggaagcgaaagaaagagttgattgacgagtacaagccgaagaaggacgcggcgtatgagtcaaaggcgtacaagacggcgtccgcggacatggaagaggaggacaaggaggctcgcttggcggctcgcaaagccacgacggcctactggggcacgtacggcatcatcgagcaatcgacgaagaaaattcgcaagggtgccccgccgcagtttcatccgtggcgcggcgatggttcgatcggcgtgcaaatgcagcgggtcatgacgccggcgtcggcctttggcggcaaggacgaccgggccgtgctgacgccggatccggacggcaagcacctgatcatacggttgcgcttgaaggatcgcggcgggaaggtgtacgtgacgtgccgtgcgcgatatcaccgaccgctccctgagggcgtgcggattcggtggatcaagctggtgtgccgccgcgtggcgacgcacgacaaatggtcggtgcagttcacgttgtcgcggcccacgccgtggcccaagcgtcgcggattcggcacgctggccgtgaacctgggctggcggaagctgcccaacggcgacgtgcgggcgttgtcatggctggacgacgcgggcgagcgcggcgagctgatcctgccgaaggagcaggttggtcgtcttagcaagtccgagtcgttgcagtcgatccgtgaccggaatatggacacggtcaagctgcagctgagcagttggttgaagacggcggaaaacctgcctgactggattcaggagcgactcaagacgctgtcagcgtggcgcagtcaggcgcggttggcgagcgtggtgctgttctggcgtaagaaccggttcgagggcgacgagaagctgttcgacgaggccgaggcctggcggaagcaggacaagcatttgtacgagtggcaggcaaacaaccgccgcaagtaccaggcttggcgtcgcgatctgtaccgcaacttcgcggcgaagatgaccgatcgttacgacctgttgctgctggccaacgtgaagttcaagcagattcaggacaagcccaagccggaggaggagacggacgaaatgcgcgtcgctcgcgagcgcaagtcgatcacagctccgtacgagctgcaacagacgctggccaacggtttccacgaggtccagaagtttgaccccaagaatctgacggcgaagcaccatggctgcggcaagctgtctcagacgtctgatccagcgtcgatgacgcatcactgcgagcactgcggcgagacctacgaccaggatcacaaccactgccaaaatctgttggcggagttgtcgaaagcagcagtcgccgcctaa

SEQ ID NO: 65298 - DNA, 1968 bp, unknown
  TnpB Polynucleotide
atgcgccgcaagaccagcgaactgcctacccggatctacacctacggcacccgggccccgacggccaatgccgagacggtggctgatcagttcctgaaggccaggctctatcgtaaccggctggtggagattgaactcacacggcggacgaaggtacgggccatcctgaatgctttgccagcggtggcccctctcatggaggccaggctcaagctggaggaggagctgaaagcggcccgggaggccctccagaaggcgaaagtagccgagcggtcacgaaatcccaaggcttctgcagaacgggagaccatcaagcgggtgttaccgctcctcaagaagctgcgagacgagatcaaggaagccaggcagggggccatcacaccggaggtgaagcaagccctggcggtggtggaggcagaaaacagagaaacgatcaagcgcgcccgggctacctctggcctctactggggcacgtatcttctcgtggagaaggccgccgagcagtttcgcaagggcaagatggatcccaggttccgccgctgggatggtagcggtcgcatcggtgttcagatccagaggacagggaagatgctggggatgtccgtcgagcgtctactcggcggagtggacacgcgtctccaggtggccccggtgccagcctacaccttcgccagggagacccggcgctgcgatcgccgccgggccatccggaccgcgatgaagatccgggtgcaatcagatgagaaggacaacgccatcttcgccgagttcccgctcttctatcatcgccctcttccggccgatggcatcatcaagaacgcctgggtgaagcgctatcgcatcgggcggcgcatgtaccactgtctccaggtggcagtggagtcggccacgtttttaccaaaggtggagcctggacgtcccgtggtggccatcgacatcggatggcgttcaaagcgcgatgacgattccctgcgcatcgcctacttctacgactcccatggctaccatggggagatccgatttcccgatgggctcaagaccttgctcagccaccctgatagcctgcgcgccatcagagatcgcatgttcaatacccatcgcaagttgctgatggattttgcgaccaggtacaccgaggagggtctcagtctcagaactctacccgcatggtggtcggaggagtttgcccatctggcttcctggaagacgcccgtccggctggccaaggcggctctcgtctggagagagaagagattcgagggagatgagcagattttctcggtcatctgggcctggcgtaagcaggagctgcacctctacgactgggaggccaacgagcgcaaccagaccctggccttccgcaaggatttttactggcgtctcgccaacgagttcaccaagaagtacagcgtggtcgtcatcgaggacttcaatctcaatgacgtcgccatctcctctcctccggagggctcgggtgaggagcatgaggggacagataagtcccggcaccagcgcttcatcagctcgttgagtgagtttcgtcagatcttggagtgctccggtcccaagtacggcgcggtggtggtcaaggaagatgccgtccggagcaccatggagtgtcacctctgcggatacgccgaggcttgggacgccgctccccgtatccagcatcggtgcgagggatgcggcgaggagtgggatcaggaccggaatgcggctcagaatctcctccatcgctggcagaagaagaatccgaaggggctgaagatgccagcagccgagacagccgagacagcagcgaccggcacgaacgggcacgacctgaacggcaccaagtcttccgtgcgaccaccgccgcccgccttcagcatggccacgatcgtgaccacggcgaggccctcgcgaccgacgagcagtgtcaggaaggcggggccggggccagaatcacgacccggacccgatcggtag

SEQ ID NO: 65299 - DNA, 1908 bp, unknown
  TnpB Polynucleotide
atggctaaggtagccaagggagaaaagatgacctttgtatacgagtatggattgcgccccccgtcgctaaatgcagacatcgttgataaccaactgatccttggtaatcgctaccgtaatgcccttgtcagcattgagagaaagcggcgcgatgctatccggggatggatcaacaaacctgtcgagaaggaatccatcgcatatagcgaggctattgaatctttcagcattgcagaaaccgcgatgaagaagcaacgagcttccacgcgctctcgatctgacaccgccgatcaacgcgatgaagtgaaagatctgcgcaagaaaaagaaggatgccttgagtgttctcaaagcagcacgcgtcaaagcaaaaaaagaagagttgttcaaggctgagatggacgatgttgaaaaccagtcaaaacaagagatcaaagacgctagatctgaatgcggactctactggggtacatacctcgtcatcgaggcagctatggcggcatcgcgcaaaaaaatgccactatgggataagcactttgagccagcaaatccaagataccaacgatggcaaggaacaggtaccgtcgctgtacaggttcaaaagtctcagcagaccacagcagatcacactatggaatgcactggtagattgatccaactggacatggagaaaatcagcgacgaagagcgatcaaagatgtcaaagcgtcggcagaaaagatgttttggaacccttcgcatgcgcgtgggaagcgaaggccgcgatcccatctgggccgaatggccgatcatcatgcatcgcccgcttccctctgatagcactatcacagaagtgcgagtgataaaaaagaagatctctgaccatgacaaatggaatgtacacatcacgatcaagaccccagacggctactacaagcagcacaatggcgtcgatgacaagtgcggatctggacctcttgcccttgatctcggttggagacttctcggtacaggagaattgcgcgttgcgtacactaccgatgaagacggaacagaagaagagatccggcttgatcataacatactcactggactcaagaagtctgatgaactgcaaggactctgcgacgatcttcaaaacaaaatgaagtcaacactcaacgaatggaaaaaaacacaccatctccctgactggtttgctgaggaatcatcgcacattcatgcgtggaagaagacgcacaaattcgtgaggctcctgcatagctggagtaaaaacaggtgggatggagatagcgaaggatttgacatcctcaacgactggcactttggcgcatacaaagaagaccttggcaggagagatggtggtagtcgccacctctggcaatggcgagagcatcagcgcaagaagtcactcctgcgcaggaaagatcagtacagagttctcgcggcaagactctcgcgcaaatattcagtactgatcttggaagatctcaaccttagcaagttgcaagagcataacaagtcagaagatgatgctgtagaaatcaaggaagcacgctggcaacaacgcgcagcagcatgctacgagctgcgagaatgcctcaagcaggcgttcctctcgcgaggtggcagggtgctcaaggtcaaggccgccatgacgacacaacgatgcttctgctgcggctgtgaaaaaaaatgggatccgatccccagcatcaaccacacatgcgatcaatgtggaaagacttgggatcaagatgccaacgcagctaaaaacatcatgctactgtacgataaaaaggaattcagcgagcaatccagcggtgtgaaaaaagaagatgcggaatcattgtcaaaatggggcaagattggacgccataaaaagacctcgctaaagctaacagacaaccaaccagagcaattgaactaa

SEQ ID NO: 65300 - DNA, 36 bp, unknown
  Direct Repeat
atagaaatggctgtggaatgccttttaaatttcaac

SEQ ID NO: 65301 - DNA, 36 bp, unknown
  Direct Repeat
acagaaatggtagtggaatgcctttaaaatttcaac

SEQ ID NO: 65302 - DNA, 36 bp, unknown
  Direct Repeat
acagaaatggtagtggaatgcctttaaatttcaact

SEQ ID NO: 65303 - DNA, 36 bp, unknown; identical to SEQ ID NO: 65301
  Direct Repeat

SEQ ID NO: 65304 - DNA, 2124 bp, unknown
  TnpB Polynucleotide
atggcgaaaaagaacgcagcaaagtcagcgaaaaaaagcaacgcgcgcaagacgagcacgacgccgacgcagatatggtccttcggcgcgcgtccgccggagcgcgacgcggaactgattcgcgagacgctgttccgcgcgcgccggtacggcaaccacctcgtggagattgagcgcgatcgggtcgagagctaccaggcgatcagggcacgtcattgccctgcgattgcggtgctccaggaagccatgggggcggccgagaccgaggtgtcggcgcagtacgaagcgatcaagaaagaccgcgcgaagcggttcgcccgctcccgcgagaagtcactcgagatcacaccggaacgcaaggcgctgctcgcctcagcgaaggcgcatcgcgcggacgtgtcggcgaggctcaaactcgcgcgcgccgagtttgaagcgacgctaaatcccgtccgcgcagagcacaaacgcagactgacggagcgcaaagcggcgctgtccgttgacggcgcgaagtgcggaccacggaccgcggagcgcgtcaacgcggagacgcttgcggagatggtggccgaggactggcccgcggcgtggcgcgagctggtgctgtcggatgcctcggctgtcgtgcggaacaaggcgcgccgcgcgctgcgcgacttcgggaccggcacgggcctgctcgtagaatcggcgatcgctcagtcgatcaaagacgcgcgccccgagccgccgaactttcggcgattcgccggagaaggccgactaggcgggcaagtcaaaaactgcacgatcgcggacttgctcagcggcaagaacacgatgattcgactccggcaatccgagcaccgggcgccgaagtcggccggcaacccgtggcaccccggacagacggaggagcacggcgagcggcatcgcggccagtggtggatggtgagcttgaacatcggctctggcgagcgcgggaaaccgacgtgggttgaattcgcggtgagaatgcatcgcccgttgccgatggacggcgtcgtgaagtgggcatggatcaaggtgtcgaaaaccggcgatcgcatgcgctacgatctgcaactcacgctcgaagcagaatcgttccggctcggcagtggacgccccgccggggtcggccgagtcgcggtgaatttcggatggcgcaagaccgcggacggcgtgcgcgtcgcgacatggctcgctgaatcgggggagacgggcgagatcgcggtctcgggcgcgccgcggggactgctctcgaaaatggatcgcccgaagatccatcgcggcgtcaccgactcgctgttggatcggtcgctgcgggtgatccggtgcgccatgtcgctgtctgggtcgcgcggaacgtactgggaccgcatggtctccgagcgaaaccgcgggatgctcgcggtgcatgtcatcgcactggtcaagtcgtctctcggggaccgcgccgcggagctgttcgccgagtggaaggcggaacgccgcgcccgagatatggacctgttcgcggatatcggtccagtctcgcggtgggcgaaggcgcggggcgtcgacccactggggcgactggcgttctggctcgacctgtggcgccgcaaggatcgccacatgaggcagttcgaggccgacgaacgcgagcgcgcgactcgacagcggaacgcgatctaccgccaagcggcgattcacctcgccaccaagttcggcgaactcgtgaccgacaacacgaacatcgcagacatggccaagctcgcggagccggacgagcgcgacgacgcgacggagaaatcccgtgcgactcggcacggggtcgcgcccggggaagctagagcgatcatgcgcgacgtgttcggcaagaatcgtcagatcatcgtcagcgcgatcgacaactccgcgcggtgctggcagtgcgcggcgaagctggccggtgatccgatgtcggtgattcgagcgtgcgagacacacggcccgattgacgtggacgcgaacaactgccggaatcttcttcgccgcgccggagacggcgagaggtccggtggtgacgaaaacccgggaggcgctcgcgaggctgaaattcaagacgattcgatggcgttagggcacgcggcggagtag

SEQ ID NO: 65305 - DNA, 35 bp, unknown
  Direct Repeat
cgacaacccatcgagacgggtttgaagacctcgac

SEQ ID NO: 65306 - DNA, 35 bp, unknown; identical to SEQ ID NO: 65305
  Direct Repeat

SEQ ID NO: 65307 - DNA, 35 bp, unknown
  Direct Repeat
cgacaacccatcgagacgggtttgaagatctcgac

SEQ ID NO: 65308 - DNA, 35 bp, unknown; identical to SEQ ID NO: 65307
  Direct Repeat

SEQ ID NO: 65309 - DNA, 1542 bp, Chloroflexi bacterium sp.
atgccctatggcaacaggacgtgctcggtgcgcgcctacacctacggctgcgacccgcccacgtccgggctggaggaggccgtggagcagtcgaggctccgcaaccagctgtggaacaacttggtcgagctggagcttactaggcgcgccgcggcggaggtagtgctcgctccctacgtacagggcgacgctgaggaagagcgccgcgcctcgcgcagggcagcactggagcgcgcggaggtgagagcggatctgcgggagctcgctcgtgagacctacgaggtgtcgaagctcatctaccaattgagcgactgctactggggcaactacctcgatgtagttcacgcttggaatgccgcgcgcagtagacgtgatgctcccaggttccacgggttcgaccctgggcggggtaagctgtcggtgcggtggccgaaagggctaccggtgtcgcgtgtccggggagggaacacgcagctcgtaatcgacccggtgccgcccgacacatgggattcaaggcggaagcgccgcaagcagcagcgcaccctcctacgattccgggtacgctcgcaggacagacgacccgtgtgggtggagctgcgagtgtacctccacagaccgctgcccgaggaagcgttgatccggcaggcacatctcacctggcgcaggttgggggcgcgcatccgctggcaggtatcaatcatcttagagatgccgaaagaggagcgggactgggtcgtgagggcgggcgacccgtccgtagcggtggacctgagatggaccagacgcaagggagggctgcgggccggctatatcgtgggcgaagacggcgaggagcgcgaggtgctgctgcccaacgaatggctgcgggggatgcggaggactcaggacatccgctcgattcgcgatcgcaacttcaatgcccatcgagaggtgctcgcgcaatggatcgacgcgacaggcgaagtgcccgagtggctcggggatgcccggcgccacttaccccgctggcgatcccctacaagactcgcagtactggctctaaagtggagggctgcaaggttcgaaggggacgaggaaggctacaacgcgctggaggagtggcgcaagcgtgacaggcaccttcttgagtatgaggcaaacctccgcgacaaactgattgcaaggcgcagggagacgtaccgggtgctcgcggcgtggcttgcccggaagtacgggactctgatcctggaagatctggacctgagggggctggcgcggcgacggaaggaccagcggacctcgacagccggctactacagggtgctcgcgaacccttcaggactgaggatggccctggtgaacgcgttcgagcgggagagaaagagggtggcaatggtgtcggcccggcacaccagcgtcaggtgcgcagggtgtggtcgtgcagagccgctggagttctcggtggtggagcgcaagtgtgtgtgcgggctcatttgggacgtggcgaggaatgcgtgtttgaacctgttggagcaactggagccgtcgggagtgcgggtgtag

SEQ ID NO: 65310 - DNA, 1995 bp, unknown
  TnpB Polynucleotide
atgatgacgtacaagtactgggcagaacccatgtccaaggaggatgaccgcatcctcaagcaacagcttgcccgcgcggcggcgtaccggcgcgaactggtacgcatcgagaacctcgcccgcgtgctcaccagagctatcatggcgctgcccgacaaggaggagcgtaagctctatcaccagctggtatcgaatgcccaccgcgcggcgtgcaaggccgccagggagcgatgtcgcgcggacccacgcgcggaggagtaccggcgtgagctcgtacgcctagagagcctagcgggtgtgctcaaccgcgccatcgaagcactgcccgacaaggaggaacgcaagctctatcacaagcgggtgtcggtggctcaccgcaaggcgagcgaggcggccaaggcgcaagcgggaaccgctgcgggggatgagcttgggctctcgtggggaagctgcgcaatggtcgacgaagcccacgacttctcgcagcgcacgacgatgatctacaacgacgtcaagcagacggcgcgttgggacgaagggctgctcgccgtgcagtaccagcgccacgagacggacaaggcccaagcacgctatgacgagcgggtcacgcgctacagatctggtggtctcgaggcactgacgaagcgcgaacgaacgttacttctcgacaatcgtggcgaggtaaggccgttccgcccgccagtgtggcgcccgaccattgcctcccagttcgtgggcggctccgactccttcgtgcgcatcggtgccaacctcatcggcaagccgacgctccgcgctcagcgccatggcgagactatgggggctcgcaatctacgcgagctcatgttcagggttgggacggttcccggcggcagggaaccgctgtgggcccggctctacgtgctcatggaccgaccgctgcccgaggcgaggaccacttgggtcaagctgtcgtgccgccgcgtggggctccgctaccgctggcacctgatcgtcatcgtcgatgaggatttcaggaggccggtgctgcacgcacgtgccgaggcggtcggcatcgacatcgggtggcgcaagctcgacaacggcgacatccgcatcgcctactggtacggaagcgatgggcaagagggcgaactgagcatcccggaaagggtctaccagcgcaaggagaaggcagactccctccatgccatctgcgaccgcacccggaacgagatgtcgctggagtggaggacgtggatgcagcagttcgtgctcgatgatcatccgctccgcatcgcagcgaaggacatgcacctgtgggtgaaaatgtggcggttcgccaagctggcccgactgtggcaggacaatcgggttgccggagacggggagatgttcgagcgcgtgcacgcgtggctcaagcaggaccggcacctcctctcatgggaggtcaacaaccggcgtcggctgtcgctccaggtcgccgggcgcatcagcgacatggcgcaccagttggtgcagcggtacgagatggtggcggtcgaggagcgtgggatggtgcccaagctcgtggcacgaccgaagaacatcgatcccggctcctcaccaagtgcaagagaggacgagtggctccgtgcggtcaacgcacgccgagtcggcattctcgcgccggcgctgatgcggcagaccatcgagtacaggtgccgcaaatacggttctctctatcgagaggaggaggcagcgttcaccaccatcagttgtccgtcctgtggcgtggagcgcgtcatcgatgatcccgcctccttgttgctcacctgcaacgtatgcaacgtcactgacgaccaggaccgcaccgcagcgcggaatttgttgacgcgcgcacggcggcggcttgcggcagaggtcgccgaggcggctgcagtccccgagagcactgccgcgaaaccgaagaaactgggtgctcggagaaccaggaagggggcagcgagcaaggcgttggcagcggtggagtcgtaa

SEQ ID NO: 65311 - DNA, 1953 bp, unknown
  TnpB Polynucleotide
atgacgaccgcgacgacggtgcgggtgtggcgcttcgggctgctcgcccccatcgagaatgaggccctcgtgcgcgcgcagatgcgtggcgcccaccgctaccgcaacacccttgtggagatcgagcgcgcgcgacgtgacgccctccgcgacgccgaggtgagcgccgggctccgcgaggtcgagcaggcgtacgaagccgcggacgcgcgccacgctgaggccgtgcgcgcagcgaaggacgagcgcgcgcggacgggatcacgcaagctctcggagctcgtcgcggccgagatcgccgacgcgaaggaggcccgcacggacgcgcggcgacacttcgccgaggtgcgccgcgcggtgctggagagcggtcgcctcgatgcacgacgcacggaggtgaacgccctcgcgggcacgctccgccgcgacgcgcgggccgtctgcggcgtgtattggggcacgtacctcctcgccgaagccgcggccgaggcgtcgttcgccgagcccctgtgggatggcgcgcagccgcatgacccgacgttcgtgcggtggacgggtgacggcgcgatcggcgtgcagtttcagcacggcgcgtcgcccgaggagatcacgggcgacggggacacgcgcgcgcagatcctcccgcgagcggagagcacgacgaccgggcgcgcgggctggtgtcgtgtcgagggctcgcgccgcgcgggtcgcacgcgcctcttgcgggtgcgcgtgggctccgaagggccgggcaatcgcatccccgtgtgggcgtccttcccgatgatcatgcaccgcgacttcccgccgaacgcgcgcctcaaagggcttcgcgtgagcgtgcgaccgcagggcgcgcatccacgcaagggcgtcgcgcgggaggagtggtcggtggagttcacggtcgagatggcgactgagtaccggccgcgcgcgtcgagcaacggcgccgtcgcggtcaacctcggctggcgcgcgctcgacgacggcggtctgcgcgtcgccctgtggcgcgcgacggacggcgcgaccgggagcctcgcgtggacgccgcgtgaggtcgagcacacgcgcgtcgcgccggggctccgtagcgtgcgggacgagcgcttcgatcgggtgcgcgcggcgttcgtggcgtacctcgaacgcacgcccgacgcgccgacgtggctccgcgaggacgggcgcacggtggcgcagtggcgctcggtcgatcgcttcgcgagcctcgtgcggcgctggtacgcggaggcgtacccgacgcgcgcggagcgcgtcacacaggccgaggtcgaggcgtggcgcgagccgcccgtcggcgcgtggacggcgcgcgacttcgcggtgtggggcagtcatgacgcgcacctcgcgacgtggcgcgacgcgaccgcgaagtgcgtccttcgccaccgcaaggaccgctaccggaccttcgccgccgacctcgcgtcgcgctacgcggtgctcgtgctcgcgcacgtggactaccgcgaccttgccgtgcgtcccgcggtcggggaggacgccgggcacatcgacgccgcggcgtcaaaccgccacctcgtcgcggtgagcgagctgcgtcaggcgctgcgcgaggcgttcttgatgcgcggcgggcgcgtgctggagtacgccccgacgtacacgacgcagacctgctacgtgtgcggcgcggtcgagccgttcgacgccgcgcgcgcgatccgtcacacgtgcgaggcgtgcggctcgatgtgggatcaggacgacaaccacgcgcgcaacctcctccgcgcgcacgacgactgcgagcggtcgggtggtggcgaaaacgcgggggccgctcgcgtcgagattcgcgcggaaaagaaggtgtccgagcgacagacccggcgcgcggacggcaaggcgaggcgccgaaaggaggaccgctcgcaagaggtttgcgaagccgtgtga

SEQ ID NO: 65312 - DNA, 36 bp, unknown
  Direct Repeat
gtcgcaaaggtcgctcagtacctctgaaactgagac

SEQ ID NO: 65313 - DNA, 36 bp, unknown; identical to SEQ ID NO: 65312
  Direct Repeat

SEQ ID NO: 65314 - DNA, 36 bp, unknown; identical to SEQ ID NO: 65312
  Direct Repeat

SEQ ID NO: 65315 - DNA, 36 bp, unknown; identical to SEQ ID NO: 65312
  Direct Repeat

SEQ ID NO: 65316 - DNA, 36 bp, unknown; identical to SEQ ID NO: 65312
  Direct Repeat

SEQ ID NO: 65317 - DNA, 36 bp, unknown; identical to SEQ ID NO: 65312
  Direct Repeat

SEQ ID NO: 65318 - DNA, 36 bp, unknown; identical to SEQ ID NO: 65312
  Direct Repeat

SEQ ID NO: 65319 - DNA, 36 bp, unknown; identical to SEQ ID NO: 65312
  Direct Repeat

SEQ ID NO: 65320 - DNA, 36 bp, unknown; identical to SEQ ID NO: 65312
  Direct Repeat

SEQ ID NO: 65321 - DNA, 36 bp, unknown; identical to SEQ ID NO: 65312
  Direct Repeat

SEQ ID NO: 65322 - DNA, 36 bp, unknown; identical to SEQ ID NO: 65312
  Direct Repeat

SEQ ID NO: 65323 - DNA, 36 bp, unknown; identical to SEQ ID NO: 65312
  Direct Repeat

SEQ ID NO: 65324 - DNA, 36 bp, unknown
  Direct Repeat
atcgcaaaggttgctcggcacctccgaagccgagac

SEQ ID NO: 65325 - DNA, 1524 bp, unknown
  TnpB Polynucleotide
ttgactgatcctgaggacgagactctactaggcttaattgaagagttggctaaagttagagaagaaattaaagcgtcacgtaaaaaaataagatcaaatagaattgacaattctgaacttaaaaataaagcagctattttaagggaacagataaaggcaaatagtaaagaaagaaaggaaaagagaaaaataactgctgcaaataataaatatttactagaccagtatgaattagatcgccgtgaagcctctaaaaaagcaatgactgctagtggattatactgggctaattataataaggtaagaatggattatgaggaggccaggagaaaagtttttaagttgggagcagaactaaaattccacaggtttacaggagagggtagcataaatgtacagtttcaaaaaggactaccgacagaggatgtatttagagagggaactatacttcaaatacttgaagttcccgagtattcttgggataaatcaagagctgaaagaaaaagactaacccaaacaaaagtaaaatttagggtaacttctgataataggaaacctgtatgggcggaattttcaatggttttacatagacctttacccgaaggagaaagtatcaagtctgctgcagtaataagaaaaaaagtgggtagaaaatggaggtatagtttacatataactgttactatagaatcacaattaaagatacatggaaaaggtattatagctttagacatgggttggagaaaagtagatgaaggcttaagggtaggttattgggttaatgtcgatggagatcatgatcagttggtgttaaacaatagtattctggctgaatttgaaaagtgcaatgatttaagaagcattagggataatcattttaacgaaataaaggaaaaaataaaactatggtctaaggaaaatgaaaaacccgattggcttgcggaagatattaaatttttaagtaaatggaaatctcaaggaaagttagtttcaattgttaataaatggagggaaaataggtttgatggagacaatgatatttttacacttataaactattggagggaaagagagtttcatctttatgattgggaatcaaacctacgagatcaagtaattaagaggagaagagagatttatagagtatttgcttcagaattagttaaaaaatatggcgtaattattattgaagatattgatttaattaatctagctaaaaaagtagatccagaacatggtcctaagatcagcatcaaggcggatagcaacaggtttatagcatcgataggcatattgataaaaagtatagaagatgcttgtaagagatcaggagccgataaaataaccgtagatgcagtaaatactactaggatatgtaataattgtagttttttaaatgataagagttcagtcaaattatttttgacttgcgaaaaatgcggcaatacttatgatcaggattttaatgccgctaaaaatattttaaagagaggtctaattgaagttgaagtgaagagcatttaa

SEQ ID NO: 65326 - DNA, 1911 bp, Myxococcales bacterium sp.
gtgggactcgctggtcaccacgacgcagcacgtctcgctgctgcgccccgagcgagaggggggcgcaacatgatcaaggtctacaagtacgggctcctccctccgacgggaggggccgagaaggtgcgcgagcaaatcctgctcgcgcatcgctaccgcaacgatctgacccagatcgagcgaggtcggcgggctgcgatccgagcggccatgagcgagcacggcaacgttgccgtgctcgagcagacggcggccgagcgcgacgcggacgtggtgcgctgcctctcggagctgtccacgacgaagagccaagcccgctcacccaaggtcccacagcacctacgcgacgcgcttgctgtggcgcgggccgccaagagcgaggcggtccgggaactccgtgagcaccgtgccaaggtgcgcgaggacgaggcgctccaggcgcgcatcgccgacgcaaacgcgaaggcgctggagctgtccaagagcgtgcgcgcctacggcggggtgttctggggcacctacctactcgtggaggacgcggccaagcgagcctctgacgacaccccgctctacgacggcgccgagccgctggacccgcgcttctcgcgattcgacggcaccggcgaggtcggcgtccagatccagggaggcatgacggcggcgcagctcttcgggtgcgctgacacgcgccttcacgtggcgcccgtggatgagcgcgcgtggcactctcccctgcgtggcgagcgtcgcctggcctcgcgcacgacggtcaagctgcgcgttggcagcgaaggccgagcacccatctgggccgagtggccgatgacgatgcaccgacccttgcccgaggggtccatcgtcaagggcgctgtggtccacctgcgacgcgtcgggcctcgcgaggagtggacgctgaccatcaccgtcgacatccccgatggcgtgggcgagcgatgcggcgacggggcggtggccatcgacgtaggatggcgtatcttcggcgaggaggtgcgcgtcgccacctatcgctcgacccacggcgaggtcggcgagctgcgcttgccggcgcgcatcttgtcgggattcgagaaggcggagtctctccgctcgattcgcgacacggccttcaacgccgcgcgggcggcgctgggcgcgtggttggcgacggacgcgacgcggcccgagtggctcagcgtcgcgaccaagaccctgggtcagtggcgcggggtgggtcgtctggcggcgctggccaagcgctggcgcgaccaccgcttccccggcgacgaggaggtctacgcggcgctcgagacatggcgctaccacgaccaccacctgtggggctgggagaccgggcagaccacgcggaccctgcgctcgcgcaaggagatctaccgggtcttcgcggcgggcctggcccgcaagtacgggacgctggtcctggagagattcgacctgcgagaggtcgcgacgaagaaggcgccggacctccaggagaagagcgagaacaagaccgcgcgctacgaccgccagcgagcggccatcagcgaactccgcggcgctctagagcaggcgttcaaggcccgactcgggggcgaggtctgcctagtcgacggagcctacaccacgcgcacgtgttcggactgcggccacatagccaagttcgactcggcgaagatggtccaccacgcatgcccttcgtgcggcgtggtctgggaccaggacgagaacgcggcggcgaacatcctcgcgatctatgagcgcgagcgcgaaagtgataaaaaaaagacgggaggcgctcgcgcccaggaaaaacgcgagtcaaggtgggctcgcgccaagagggagaaggccgagcgcatggcggcgaaagggggtgctcgcgaatcgccaagcaacaccgcggaatcgtag

SEQ ID NO: 65327 - DNA, 36 bp, Myxococcales bacterium sp.
ccagtaagggtagctcagcaccctataagctgggac

SEQ ID NO: 65328 - DNA, 36 bp, Myxococcales bacterium sp.; identical to SEQ ID NO: 65327

SEQ ID NO: 65329 - DNA, 36 bp, Myxococcales bacterium sp.
accgtaagggtagctcagcaccctataagctgggac

SEQ ID NO: 65330 - DNA, 36 bp, Myxococcales bacterium sp.; identical to SEQ ID NO: 65327

SEQ ID NO: 65331 - DNA, 36 bp, Myxococcales bacterium sp.; identical to SEQ ID NO: 65327

SEQ ID NO: 65332 - DNA, 36 bp, Myxococcales bacterium sp.; identical to SEQ ID NO: 65327

SEQ ID NO: 65333 - DNA, 36 bp, Myxococcales bacterium sp.; identical to SEQ ID NO: 65327

SEQ ID NO: 65334 - DNA, 36 bp, Myxococcales bacterium sp.
gcagtaatggtagctcgacaccctataagtcgggac

SEQ ID NO: 65335 - DNA, 1746 bp, unknown
  TnpB Polynucleotide
atgaccaatacccgtatctattcctacggcgcgtccgagcccacgaagcacctcgactcggtccgccagcagatgcgcgacgcgcacggctaccggaactggatggccgagctcgagcgggagcgccgtgagatcacggacaagctcctcgccgacatggaccccaagctcgcggccgtcgaggtcgagatcaagcgcctcaccgtcgagatcgaggcgatccgcttcgagatcaccgagaagaacgtgaagcgacgcgagcgccactgcacccccgaggacaccgtcaaggtcgccgccctcaagaaggagaggaacgtcgtcttcaagctcaggaacaacctccgcgccaaggcgttcaagtcttccgagtgggagccgcggcagaaggagatcaacgagtggttcgcctcggaggagaaggcccgcagggacccctgcaagaagctgctcgagtggggcacgaggggcgcgatcgagacgaacatgaaggcgtcgcgcaagaacgcgccgcctcggtggaggccgttccgcggcgacgggcgcctcgccgtccaggtccagaaggggatctcgtccgaggaggcgttcgcctgcgacgacacgcgcatccaggtcatcgacatgcccaagggcgtgtgggtccaggggcggcgccgccagaagaagctcgggacggcgatccttcgcctgcggatcggatcggacgagaagcgcaagccgatcttcgccgagatcccgttctcctatcaccgagacctgccgaagggatcgcagatcatgtgggtctacctgatccgccgggcaatcggggcccacgaccgctggttcgtccagttcgtgatccggttgcccgatcacgtcgaggccgcgattcgtccgcgggccacttcggggtcggtctcgatcgacgtgggatggcgggtcctggacgaccggcgtctccgggtggccgtgtggcgcgggagcgacggcgcgaccgggcagctctgcctgccgcactccaccccgtatccccgctccaagaaagagcgcgagtacaagggctgctcgatctcgtggatcgacctctaccgcaagacggaggacatccagtcgatcaggaagaacctcttcaacgaggctcggacgaagctgacggcgaagctggcggagctcaagctgccgacatggttcgccgaggctgcggagaccctgtctcagtggaagtcgcagtcgcgcctcgccaggctcgttctccgatggcgcgacgcgcggttcactggcgacgagggtatcttcaaggccatcgaggaatggcggaaggccgacaagcacctcctctgctacgaggccgaggtccgcgatcagcttcaggcgcagcggctcgacgtgtacaggaagttcgtggcatccatgagggtccgctacgccgaggccaagatcgagaagctggacctccgcgagttccacgaggaaccgaaccccgaggagatgcgcgaggaggacgcggccgcgaagaaggagcacgtccgggacgccgcggtctcgatcctcaagcggctcctcaaggagtccatggcgaaggtgaccgaggtcaaggctgccaagacgacgcggatctgctccgagtgcggcttcgagaacaagtgggacgaccagagccagatcctcctccggtgcgagtcgtgcttcgcgatctgggaccaggacgagaacgccacgaagaacatcgcgagcgccgaggcggtcgagagcaacgcctag

SEQ ID NO: 65336 - DNA, 36 bp, unknown
  Direct Repeat
gtagagaggcccgcggagaggcatggtgtctccgac

SEQ ID NO: 65337 - DNA, 36 bp, unknown; identical to SEQ ID NO: 65336
  Direct Repeat

SEQ ID NO: 65338 - DNA, 36 bp, unknown; identical to SEQ ID NO: 65336
  Direct Repeat

SEQ ID NO: 65339 - DNA, 28 bp, unknown
  Direct Repeat
tggagcccggctctggaggccgtgaaga

SEQ ID NO: 65340 - DNA, 1974 bp, unknown
  TnpB Polynucleotide
atgacaacgcgcgtattcacgctagaggccaagctatcacgggatatgcaggagcgattgcatgagctgctgcgagaacagaagcagtaccgcaaccggctggttgagctgcagcgaaaacgcgccgacgagtaccaagagattcggcgcggatttgatccgaggctggccgaaatcgacgcgcgactggctgctctcgagatcgaagaaaagcgccacgggcttgacgacgacgagcgggcggagcgcaagctcctgagcgcagaagccaagccactgcgcaaggcgttcaacgaacgcctcgcagccggcaatgcggaattgaagcgtcgcaaggcggggaagtttacgcatcaggcaagggctgcgcatgaagaggccattgcgcagatgacgaagaccaaggaacgctggccgaaagaatggaaagcggtagcggctagcgaactcgatgtacaccgcgaggagcttgcggcacgcgagggcagcgggcttaggcaggcactatacgctgcgccggacgccgaaatgcaggcagcgaagggggcagcgtcgaaagcgcacgtgccgtgccgacctgagttcgttcgcttcgacggcgagggtcgcatcaagattcagatgcatactggacgccagccggcgatctcgaactccgtcttggctatcatcaaccacgacgtcgagatccgagaggtgccaaggcgtcttccgaccgagcaccggcatccgcgggtcgaacgaagtccggacagtgtgcggccgcgcaagcgcttctttgacgttcggcttcgggtatccaacgaagacggcaatgagtggcttgccttcagcgccatggcacaccgagtcatcccggatggcacggttgcgtgggtgaacctagttgcgaagcacagaggcgctcacctctgctaccagctccagttggaactgaattcggagtcgtgggagcaatgctcgccattggatgctgaggaagcggcagcggtccacctgggctgggcgagcaacggcaacgggacgtatcaggtggcctacgccttgggcacagacggctggaccgacaagctggtgcttgacctgcgtcgcagtacggataccggagagcgatgtgacttgtccggaatcgagtttggccgatcgttgcgtagcgctcaggaccgccattttgaggtggcccgtgccgccatggtggcgtggatcaaaacgaagccggctgaggcgaaagcgagctacacctaccgggatcgtaacggtgagcattctacctgtctgaaggaagagtgcgctgccattgcgcagtggcgcgcaccgtggaaacttcgccgtgcggccgcacggttggcgacgatctgcgggatcgacgtgaagctgccggcattctggcaggcgtggaaagccgagcgtctaggccgggggcttgacctgcttgatgctcccgatgtcgttatggcgtgggcagcaaagcatggagtgaaaacgccagttcagatgctcgccgtctatttcgcattctggtcgcgcaagtctctgcacctggaatcgtgggagcaggacgaatggcggcaggcgcggggccgacgaaaagatgcgatgcgcgcgtggtggcggaagctcgagaggcgctatgcgtccgcgatggtggccgagtgggatctgaccgaaatccccagcgctacccgaaagcgcgtcgacgaggacgagcagacgaaggcagcgcggaaaaatcgaggcgcctgtgcgccgggtgagatgcgcgagatcggcaagcaggcgttcgggtctgctcgctgggaagacgctccggcgggcgaccatgctttgcgctgctcgcagtgcggcaaagcgtcgcgttcccatccagggtcctcagtagtcacttgttcatgcggtcatgcggaggaccgcagtctgagatggtgtcgaaacgtgctcgcagtgcgagccacagcaaaggaagccgcggagtaa

SEQ ID NO: 65341 - DNA, 35 bp, unknown
  Direct Repeat
cattcaatggcatcgggacgcctcatcgatctcga

SEQ ID NO: 65342 - DNA, 35 bp, unknown; identical to SEQ ID NO: 65341
  Direct Repeat

SEQ ID NO: 65343 - DNA, 35 bp, unknown; identical to SEQ ID NO: 65341
  Direct Repeat

SEQ ID NO: 65344 - DNA, 35 bp, unknown; identical to SEQ ID NO: 65341
  Direct Repeat

SEQ ID NO: 65345 - DNA, 35 bp, unknown; identical to SEQ ID NO: 65341
  Direct Repeat

SEQ ID NO: 65346 - DNA, 35 bp, unknown; identical to SEQ ID NO: 65341
  Direct Repeat

SEQ ID NO: 65347 - DNA, 35 bp, unknown; identical to SEQ ID NO: 65341
  Direct Repeat

SEQ ID NO: 65348 - DNA, 35 bp, unknown; identical to SEQ ID NO: 65341
  Direct Repeat

SEQ ID NO: 65349 - DNA, 35 bp, unknown; identical to SEQ ID NO: 65341
  Direct Repeat

SEQ ID NO: 65350 - DNA, 35 bp, unknown; identical to SEQ ID NO: 65341
  Direct Repeat

SEQ ID NO: 65351 - DNA, 35 bp, unknown; identical to SEQ ID NO: 65341
  Direct Repeat

SEQ ID NO: 65352 - DNA, 35 bp, unknown; identical to SEQ ID NO: 65341
  Direct Repeat

SEQ ID NO: 65353 - DNA, 35 bp, unknown; identical to SEQ ID NO: 65341
  Direct Repeat

SEQ ID NO: 65354 - DNA, 35 bp, unknown; identical to SEQ ID NO: 65341
  Direct Repeat

SEQ ID NO: 65355 - DNA, 35 bp, unknown; identical to SEQ ID NO: 65341
  Direct Repeat

SEQ ID NO: 65356 - DNA, 35 bp, unknown; identical to SEQ ID NO: 65341
  Direct Repeat

SEQ ID NO: 65357 - DNA, 2319 bp, unknown
  TnpB Polynucleotide
atgagcaccaagtcagactcgcctaccgtcacgtcgttgaccggcgccattctaggaggcgcttcgccgagcgccgttcctgtcgtagtagcaccgtcgacaccaaacggcgtcagcagcacgccgaagcgcaagatgcgcaagaagaccagcgacgtgccgacgcgtatctactcgtacggcgcgcgaccaccggtcttgaacgcgaaccttgtcgaggacgagttcaggaacgcacggaagtactacaaccagctcgtcagcatcgagcgtaaccgccgcgccgccatccgagccgagcagcgtcggcacggtcagatcggtccgctcagcgacgcggtcgatgtacttgttaaccagctggtggcggccaaggatgccgtcaaggcgaagcgcgccggagcgggcaagctggcgaacgtgacgactgaggtagccgtcgtcaaggcgatcagtgctcagctcaagagtgcacggcaggtacttcgcgccgagcgagatcgcgtgaagaaggacccgacgatcgctgcgcaaatgcaaccgcagtacgatcagatcaaggcgcaggatcacgccgaccgcctggctgcgcgcaagaactgcaagctgcgccacggcacgtatgtacgggtcgagaacgctgtgcagcaggcgaagaagccgccgaagaaggaagtcaaggtgacgaagaacggcaagcccaagaggccgacgccgtggcatctgctgcccaagttcaagcggtacgacggaacgggctaccttggtactcagctgctcggctacggcgaagctggtgatcctaaccgcgtgctcggtatgaccgtcaccgaggcgttttcctgtcaggacacgcgtctgcaaatcgatcccgtgccggcgaacacgttcagtcgtcggcgtcaccatcgacgccttgcatcgcggactcgggtgcggattcgcatcggaacgaacaaggacaagcagcgctcgccgatctgggccgagttcccgatcatcctgcatcggccgttgcctgacgatgccatcatcaagtgggcgtacatcatccgcaagcgcgtcggtctgacctacgagtaccgctttcagctgacgatcgagtccaacaccttccgcacaccggcctcggtgggcaatggtgtggtcgcagtagacctcggttggcgcaacctcgtacctggaccggactggcacagcaccatcgcagccgcgaccgcactgggttggcatgaccctatcgaagatgcgcgcaacggtttgctcgatcccgaccagctcgacagcacgcaacgcgcgcagttcaacgtcttggaagggcgtgcgaatcagttgacagagccctatggtgtgcgtgtcggctactggtgcgacgacaacggcaacagcacgcagatcttggttcccgaacgtactcgacggggactggagaagccgcgtgacttgcgcgcgatccgcgacaagatgttcgatgcgatcagggacaacgtcgcgtcctgggtgtcgtcgctcagtggctcgctgccgacggcgctagcgcagctcttcgttcccaagagcacggcacaagcgaacacgcagtcggcacttccttccaacgcacagatcgcggcacgcatcgccatgtggggggcaccgcgtcgcatggcgatgctgtttcgcgtgtggcagcagaaccggtttgccggtgacaccgcgatgttcaacgcagtcgaggcgtgggcccagcaggaccgccacttgtacttctgggaggcgagtcagcaggaccgtcgaatcaatcaccggcgcgagcagtatcggatcttcgcagcacagctcgcacgcacgtacgaggtcatcgttcttgaagatccagacagcttccagctcaccaaggctgtattcgccgaggcggcagagcccgaggatggcttgccgacggacggcaagttgcagcggcgtaccgctcggctagcagccgctggtgagctacgcgatgcgatcatcaaggcggcggcgaagtacggcgccaagatcgtcttcgtgaaccccgagttcacgacgcagcgatgtcacatgtgcaagctgcttccgcagacgccgtgggacgcgaaaccacacatcttgcacacgtgcgacaactgcaacgccgtgtgggaccaggactacaacgcgtgcaagaacatgctggatgactacctcacgtcgctgaccgcgccgtcgagcagctcggatccgtcgaccggcgccgagccgctcgaagaagacaacgtggcggagtcagacgatgatgtcgacgtgaacgatgagagcagcgtgactgacgaggctgcttaa

SEQ ID NO: 65358 - DNA, 36 bp, unknown
  Direct Repeat
gtaggaagcgcttgctcgatcggctttcgatcgaga

SEQ ID NO: 65359 - DNA, 36 bp, unknown; identical to SEQ ID NO: 65358
  Direct Repeat

SEQ ID NO: 65360 - DNA, 36 bp, unknown; identical to SEQ ID NO: 65358
  Direct Repeat

SEQ ID NO: 65361 - DNA, 1992 bp, unknown
  TnpB Polynucleotide
atgggacgtaatcgcggtgcagaccgcgctgcgatgggagatcacgcacgaggacgtgatgcagtgggtgatctcgcacagttgcgactgacaaggcgatccgcgccgcgaagcgcggaccaaaggaggattgcgatggcaaccaggaactgccggtacggactcttggctcccgttgaggggcgggacgaggtgatgcgccaactgcgggtcgcgcacgaggtctacaatacgctcgtccagtacgagcgggagcggcggaaggcggtggccgatgcgacccgcgagaccgacgcggaggtcgcgcggctggaggcggaggtcgaggggctgctgtcccgactggcggacctgcgtgctgcgatccaggcggcacgggccggcggtggggacaacgcgcgtctcgcggaggcccaggcggaggcgcgcgagtgccggcggctgcttggagaggcgaagggcgcgctccgagaaaccaagcgggtcgcgcggcagaaccccgcgctgcgggagcgactcgaggccatcaaggccgaacaccatcggcgtcaactcgcgctctaccatgaggtcgtagaggtgggcaaacggctgtactggccctcgtggaacgacacgaaggccgccgtcgagcaggcggcgaagaagacgaagaacggcgacctgcggttccggcggtggaccggcgaggggagcctgtacacccaggtccaagggaagcaaccggtctgcgagacggcgacctcgcgctgggtccggatcgacccagtgccgcccgaggcgcatgatcccgcgacgccgcgcggagagcgccggcgtctgtgccggacccgcttctatctgcgcatcgggagcacgggtccacgggaggaccctgtgttcgcggtgtttccgatggtctatcacaggccgctgccggagggcgccgtgatctgcggggcgcggatcgtccggcgcaagaacgcggaccgcgagtactggcaggccgtggtgacggtggacctgccggatgaggccgcgcagaagagcgggccgcgcgtctgtgcgctcgacattggatggcgggaccggaggcccgggggctccgacgagccgccgccgctgcgagtcgcggcctggtacgacggggaccggacgggcgaggtgctcgtggacccgtcggtcttcgagcgatgtgcgaaggcggacgcgatccggagcacgcgggaccggatgctcgatgacctgcgggcgtggctctgcgaggcgcgcaaggaccttcccgagcacttggcggaggcgctcgcgggctgtggtctgtggcgggccgcggggaagttcgcgcggctgcgcgggcttctgagttccggcgatgtgccggcggaagtgcgagaccggttcctcgcgtggtatcaccgcgaccggcacctttggcaatacgagcacggcatgaggttgaacgcgatccgcgaccgcgacaacgcctatcggatcgcggcgaagcggttcgcccaggagtacgacgtgctgatcgtcgaggcgacgggcacgccgcagaaggagcgggacccgaaggcgccggcggcgatggacctgcggcccttgatcaaggagccggaccccgaggacgcgccgccgcgagaccagcagcgcgaaaggaaagagaacaaggcgcaccaccagcggttcatcgcggcggcagggacgttcaggcgctacctgttggaagccgcggccaagtacgggacgcgcgtggtgatggttccgtgcgagcagacgacgttggagtgctgggtctgcggggcgaagtacgagttcgaccggtggccgctgatgcacgagtgcgagtcctgcggtacgacctgggaccaagaccagaacgccgcgcggaacctgtttgcgaggggcgctgtggcggcgaaagggccagggccgctcgaagtgcaaggaaaaccgcgacttccgcgatggcataagcgccacaaagcgtaccgcgagggcggggcggggtga

SEQ ID NO: 65362 - DNA, 35 bp, unknown
  Direct Repeat
tggaaagggtatctctggaccttacaatcagagac

SEQ ID NO: 65363 - DNA, 35 bp, unknown; identical to SEQ ID NO: 65362
  Direct Repeat

SEQ ID NO: 65364 - DNA, 35 bp, unknown; identical to SEQ ID NO: 65362
  Direct Repeat

SEQ ID NO: 65365 - DNA, 35 bp, unknown; identical to SEQ ID NO: 65362
  Direct Repeat

SEQ ID NO: 65366 - DNA, 35 bp, unknown; identical to SEQ ID NO: 65362
  Direct Repeat

SEQ ID NO: 65367 - DNA, 35 bp, unknown; identical to SEQ ID NO: 65362
  Direct Repeat

SEQ ID NO: 65368 - DNA, 1695 bp, unknown
  TnpB Polynucleotide
atgttcgggcataaatcgctgcccagccggatcttcagtttcggtgggaatccggccctcacgaacgccgaccggatcgaccagcagatgttcgcggcccaccggtaccgcaacttgctcgtggaaaccgagcagaagaggcgcgaaaaggtcgacgccgccctgagggagctttcccccaagcttttcgcggtcgagaagaagatcgaggagaccgaagcccaagtcgaagagcagcgcgcggcgatcaagcgggatcacgtcatgctcatgctccgggccgccaacgaccccaagaaagtcggcaaggtctccgtcctgaaaaaggagctgaagaagctctacgccgaacgcaagaagatccggacgaagctcttcgcctccaggacctggaaggcccatcagaaagagacagacgcctgggccaaagaagaagaccaccggaaccgggacgccggagactactactgggggacctacctgcaggtcgaccagtcgatgagcagccggcgctccggagcgccgccccggttcatgcgctggaacggagacggccacctcgcggtccagatccagaacgggatgagcgtcgccgaagccctctccggggaggatcccaggctgcagatcaagctgggccgggtggaagtggacggatcgcgcaccgcccagacgggtatcaagaggaagctcgggaacgcggtctgcaggttccggatcggcaccgacgagaacagggagccgatattcgcggacatcccgttcaccatgcaccgtccgctgcccgacgaagcccagatcaaatgggtccatctgatccggcgccggatctccacgaaatccgaatggcgcctccaattcgtcgtttcccagaaggtctgggagaagcccgaccgcgcccaggacggcaccgtgggcctgcatctggggtggaggctgtcggaccagggcgacctccgcgtggcggtctgggcaggatccgacgggcagaccggggagctcgagcttcccgcggactggctgggcgagatgaagcgcaccgaggacatccggtcgatccgcgaccagaacttcaacgacgcaaaaaagtctctctcgcagtggctcgcccagtacaagacgaagtcctgggtcaaggaagatacggaatccatcgcccagtggaagtccgcggcgcggctggccgctctcaccttgcgctggcgcgacaaaagagtcccgaaggacggcgagatcttcacgatcctggaggaatggcgcaagcgcgacaagcacctctacgagttcgaggcgaacctgagggatcagctcatcggccggcgggattccctctacaggaacttcgccgcggaactccggcgcaagtacaggacggcgaagatcaagctggtcgatcgccgcaaggcccacgagcttccgaagccggaagagcagccgaaagagcacggcatgaaagcccacgcgcgcgacgcctgcctgtcccggctggtctgttgcctgaaagagtccatggcggaaaccctggaaatctccccgaaagagctcgggagagtccaccaggcctgcggatctcttcaggagcccgaccccagcaaggccatgcacacctgccgcgactgcggggagccctacgatcaggacgaaaatacggcaaagctcctgctctacaccggcgtctcgagcgtcctggtgtag

SEQ ID NO: 65369 - DNA, 1977 bp, unknown
  TnpB Polynucleotide
atgacactctcaaagaagcccaagaaaaagtggacacgcaagagccccgattcgcctccttcgcgggtgtacaaattcgatctggtcggacagcccatggaaggtcgcgaggaattcgaggcctcgctttttgatgctcgcatgttcggaaacactttgattggccatagccaaaaaacgcgcgaggatttccgcaagtttctgcaaattaaaagtcctcatgtcgcatctattgatgatcagattggtgttttagagtcacagatcgaaaaacagcgcgattcgataaacgaaaagaaaaaagtcgcttatctgacagatgctctattgggagacatcgaaccggaaaaaaaggcgatcaaagatctcgaaggtgagatcaaaaaacttcgtgctttgcgcaagccgctttacgatgtgttgaaagtgtcacacgcggaggaaatagaagccctcaacgaagccgggcacgcggaatacctaaagcgagccaaggaaaccgatgtttactggggaaccaaagctctagttgtgggctcttgggttcaggcccgttccacgcctgccggggcaaaatttagtcgctgggacgggagcgggcgcgtcggtgggcaggttcgagacatcaacaacaagactctatttgaaccgaaccttcagatcgtgatcaccagatctgaccctgcaacattccggcccccggggcgttgtgcgaggcctatcacgcccgaagagcaggttcgtcagaccatcgccattgaggctcgcaaagagcgcttgcgtgcaaagggcgaggagtacaagccccgcagcaagctgttggataccgtgcgtctgcgcatcggcaccaatgacaagcgccaacccgtctgggtcaagtttgcgtttcgcatgcatcgagatcttcccgccgacgcgcaggtcgtgtccgcagtcatctcccgaaaacctagagggccttacacagcgtatgctctgtgtttgaccgttaattctcgcacacacgcggcgatcccgaagccttttcacccgggagccagcctcttggccattgacatcggccaccgaaaaatgggcaacgaattgcggttcggctacacgtttgacggggcgtctggccaagaactggtgctcggaaattccttcatggagcgatacagacaggccgaaaagctgcgaggcacgcgcgatatgctttttaacaatgtccgaaaaacgttttcgttgtttttgacgacaacgggccttcgcgttcccgcaggcatccgaaaaaagcataatggggaggaggattacgttctgtcccatatgcatacgtggaagaccccccaaaggctttatctgctggtgcaggactggaaaaagcaacgctttggcggtgacgatgtgattttcaacgtccttctggactggtccaggcgtgagaatcacctgtatcgatgggagacggggttgcgtttatccgtcctagatgggcgccgagaagagtaccgaattgtcagcaagaaaatggcagagcaaaacgcagcaatctttttggagaaaatagatcttagtcgcttggcgaagcgcaagcctcccgaaaaatccgagaaggacttgcatcaggccgcccggcatcaaaggttccaggtggctttgtcggagtttcgtggtgttctcgaacaggcctgccaaaagacaggcacccagatcatttatgtcgagcccgcgctgacgacaatgaattgttggaactgttcgaacaccgaatactgggatatgggaaaagaactggttcatacctgttcgagttgtgcaagcgcttgggatcaggacaacaacggcgcacgaaacatctatgctctagggcgcaaagccttgaacgatgatgccatcgtggtagcacagggatctggaaaactggtggcaacgccagtgctcaagaagacgtcgcgtcggggggttgttttgggcggcttgggtgttggcgaatag

SEQ ID NO: 65370 - DNA, 25 bp, unknown
  Direct Repeat
gtgcgcggacgtagatcttccgcga

SEQ ID NO: 65371 - DNA, 25 bp, unknown
  Direct Repeat
gtgcgcggacataggtcttccgcga

SEQ ID NO: 65372 - DNA, 25 bp, unknown
  Direct Repeat
gtgcgcggacatagatcttccgcga

SEQ ID NO: 65373 - DNA, 25 bp, unknown
  Direct Repeat
gtgcgcggacgcagatcttccgcga

SEQ ID NO: 65374 - DNA, 25 bp, unknown
  Direct Repeat
gtgcgcgggcgcagatcttccgcga

SEQ ID NO: 65375 - DNA, 25 bp, unknown
  Direct Repeat
gtgcgcggacgcagatcttccgcga

SEQ ID NO: 65376 - DNA, 25 bp, unknown
  Direct Repeat
gtgcgcggacgcagatcttccgcga

SEQ ID NO: 65377 - DNA, 25 bp, unknown
  Direct Repeat
gtgcgcggacgcagatcttccgcga

SEQ ID NO: 65378 - DNA, 26 bp, unknown
  Direct Repeat
gccccgatgagcctgcctggtcgctc

SEQ ID NO: 65379 - DNA, 26 bp, unknown
  Direct Repeat
gccccgatgagcctgtctggtcgctc

SEQ ID NO: 65380 - DNA, 1497 bp, unknown
  TnpB Polynucleotide
atgacaacgaaagtttttaaatacggagccttaccagttactctcgatagcgagattcgcaagaaaatgaagttagcaagggaatattacaatcaactggtagaggcagagaacggtcgacgtaaaacggtatggggcggcgagcgtcccaaacaacctccgcatgagcacaaggacgagccggtttgcgaagaatgcaaaaagcactggaaggatattagagacaaatattttgctacaccacccttagatataaaaccattgcgagcgaaggcatcggaagcgggtttgtattgggggacgtatttgataatcgaagaaagtttttccgctgcttggaagaaaacagatgggttatcaaccgtacgctataaatcctggcgagatggcggaataatgggagtacaattacagcaagcgcattcagcaaatggtttctatcgtatagagcaagcgccagatccgcgaaaaggtcgtaaggctggacaacgccacgcggtaaagataagaatcggaacccgagaaaacaaaccggtatggtcggaacctatcgcgttcgaaatgcatcgtccgttacaaggtcggccgacctgggtaaagatttgctatttctatcggggcgagcgtgaaatctggtcggtgaatattacctgtacagacgtacccgaacgggccttgcctgatacggctaaggttttggcgatcgatatcggctggcgcgttatgtcggacgacagcattcgcgcggcatatgctagagacgagaacggtaacgaaagcgaattactgtttgattctcgttggagagaatgcggagatagggcggatcgtataagatcggcgcgagacgatcgactaaacgaactcaagaaaaaagatactcgatttagtctaataaaaaagccgtcaggcatacgtggatatgttgcgaaaaattcgatagaagataccgaggttaccgagtggataaaacaggatcgacacctggaacaatacgaattaggatgtcgccgtcgaagcgtagcggtccgaaaagaaaaattacgggtctggctgtcgtcattgagaaagcaatacgctacggcgattatcaaggatagcagtcacaaggaaatgaaagccgctaaacgggctaaggcagatggtatgccacccccggcgcggcgcaacgctcaccatggggcgcctggcgaaatcgtcgaggaaatctgtcgtgcgttcggacggcagacgaatattgcgatcgttgaagctccggggacgactgccacgtgcgcgagttgtggccaagagatggaaatcggcgctgaattgatgattacgtgcgagcggtgcaatgctcgtgaggatagagattgcataagtacgcggaatatgctacgtttgtacgcaagtgggaattgcaaaaaacccaccgctcgaaaaacaatcgcaaggttcgcgaaaagacacaagaattatgtggagcccaaccaatgccagcgcgacggcttatga

SEQ ID NO: 65381 - DNA, 36 bp, unknown
  Direct Repeat
ccaaccaatgccagcgcgacggcttatgagtcgcga

SEQ ID NO: 65382 - DNA, 36 bp, unknown; identical to SEQ ID NO: 65381
  Direct Repeat

SEQ ID NO: 65383 - DNA, 36 bp, unknown; identical to SEQ ID NO: 65381
  Direct Repeat

SEQ ID NO: 65384 - DNA, 36 bp, unknown
  Direct Repeat
acaaccaatgccagcgcgacggcttatgagtcgcga

SEQ ID NO: 65385 - DNA, 2076 bp, unknown
  TnpB Polynucleotide
atgcgcgtgtacaagttcctctgcatccccgcaaccgctgccgacgatcgcgccttgcgcgatcaagtgtacttgggatcccgctaccgtcgacagagtgcgctgatcgagaaccgcgcgcgcgtgctccagcgcgggatcgcagatcgaccggcgctgaatgtcccggagaaggatcgttccgcgtggtggaaatcggaggagggcaaggcggcacgcgacgcgtggtacgcctccgacgagtgcaagatgctccgcgagatcatcttcgcggagaagaaacgcgcgctcaaagcagcgcgcgacgccgcgatcgaggccggcaccatgtggggaacgtgcggcaaggcggacgacgccgcagacttcgcgcgtcgcgcggtcgacaaaaacggcctcatcgacgaggacgggcagaccacgttcgtggacacgcactttcccgcggacgtgggccgcatcgccgtgcagttccagaggggcaacgagcggatcgacacccgcacgggcaaaaagatccccgcgaagaagctcatctacgccgatgacctgatcggcgatgaggatacgcggctccgcatcgggaccgtcgcctacgcgctggccgagcctgtcgacgggttcaggcccgctgcgatcgacgctgagggcaaagcgatcgacgtctacacgcgcggcctcagcgagcgagaacaagatctactcgcgcgagatcaacgagaagaagcgatcgctgcctacgccgctcgcacgcccgccagcatcgatccgtcgggtaacatctgcaagacgcccgaacagaaggccgtcacgaagatcgtccgctgggagcgtggcgagcgagacgagaaaggcaagcgctaccattctctcgcgattcgcgtagggaccatgccgggcacgatccgtccgatctgggcacacctgcacgtgatgcttcatcagagcccgcgatccaagaatcaactcgtgctcggccacgacgtcgtcaagtgggccgtgatccggcgcgaacggacgggcctgcgctatcgctggttcctcacgctcgagaccgagggggacgtggcggtgacatcgccgcatccccagcctcacgacgcgatcgccgtccacatcggctggcggcagctcttcagcgaagccggcgatcctgccggcatccgcgtgctcacgtggagcgccagcgcgccgctcgatcccgacgatccgcggagtccccgcgagggacagctcgtgcttccgcaggaagtcgtcgaccagaagccgttcgccgatcgcatccattcgacccgcgacaagaaccaggacgtgctccgcgacatgatcctcgtgtacgcgcgatcgctgccgacgtcgtcgtggctgcgagtcgaagctgcccacatgcaccaatggcgcgcgccccgcaagtacgtgcgtctgtactgccagtggaaggagcaacgcatccacggcgatcaggccgcgttcgcggcgctggaggcatggatcaagcaagatcgtcacctgcttcaccgcgaggcgccgagcatcgagcgcatgaagcgtcagatcgagggcagggtcaccgcgctcgcggtccagctggccaagcgctacggcgtcgtcgccagcgataacatcgccgtgggcgagctggtcaagaaggacgaccgccacgacgaggacgagcagaagctgcgcaagaagacggcgcggcgtgtgaacgtcgtggcgccgggcgaagcgcgagcgctcgtccgctacttcgcgaagaagtacggctgtgtcggcctggagctcgacgcggcgggaggcacgatcgactgcgacgcgtgcggacatcgacgtgacgtcgcccgagaagaccgcgtgcagcggatgatccgctgcgagaattgcggtcacgtcgaggaccaagatctcacgatgagtcggaacctcctgtcgggtgcgagcgccgtcgctcgcggcgagagtgggtggccgctcgcgcccaaggttccggcagcttccacgaagaagcgagcgaccgtccgacggaatcggcgacgcgggcagcagccgctcgcaagcagtgtcggaacgccgtaa

SEQ ID NO: 65386 - DNA, 36 bp, unknown
  Direct Repeat
gtagcaatcgatgcgagacctcgcactggtctcgac

SEQ ID NO: 65387 - DNA, 36 bp, unknown; identical to SEQ ID NO: 65386
  Direct Repeat

SEQ ID NO: 65388 - DNA, 36 bp, unknown; identical to SEQ ID NO: 65386
  Direct Repeat

SEQ ID NO: 65389 - DNA, 36 bp, unknown; identical to SEQ ID NO: 65386
  Direct Repeat

SEQ ID NO: 65390 - DNA, 36 bp, unknown; identical to SEQ ID NO: 65386
  Direct Repeat

SEQ ID NO: 65391 - DNA, 36 bp, unknown; identical to SEQ ID NO: 65386
  Direct Repeat

SEQ ID NO: 65392 - DNA, 36 bp, unknown; identical to SEQ ID NO: 65386
  Direct Repeat

SEQ ID NO: 65393 - DNA, 36 bp, unknown; identical to SEQ ID NO: 65386
  Direct Repeat

SEQ ID NO: 65394 - DNA, 36 bp, unknown; identical to SEQ ID NO: 65386
  Direct Repeat

SEQ ID NO: 65395 - DNA, 36 bp, unknown; identical to SEQ ID NO: 65386
  Direct Repeat

SEQ ID NO: 65396 - DNA, 36 bp, unknown; identical to SEQ ID NO: 65386
  Direct Repeat

SEQ ID NO: 65397 - DNA, 36 bp, unknown; identical to SEQ ID NO: 65386
  Direct Repeat

SEQ ID NO: 65398 - DNA, 36 bp, unknown; identical to SEQ ID NO: 65386
  Direct Repeat

SEQ ID NO: 65399 - DNA, 36 bp, unknown
  Direct Repeat
gtagcaatcgatgcgagacctcgcactagtctcgac

SEQ ID NO: 65400 - DNA, 29 bp, unknown
  Direct Repeat
tcgatgcgagacctcgcactggtctcgac

SEQ ID NO: 65401 - DNA, 36 bp, unknown; identical to SEQ ID NO: 65386
  Direct Repeat

SEQ ID NO: 65402 - DNA, 36 bp, unknown; identical to SEQ ID NO: 65386
  Direct Repeat

SEQ ID NO: 65403 - DNA, 36 bp, unknown
  Direct Repeat
gtagcaatcgatgcgagacctcgcactggtctctgg

SEQ ID NO: 65404 - DNA, 19 bp, unknown
  Direct Repeat
acctcgcactggtctcgac

SEQ ID NO: 65405 - DNA, 36 bp, unknown; identical to SEQ ID NO: 65386
  Direct Repeat

SEQ ID NO: 65406 - DNA, 36 bp, unknown; identical to SEQ ID NO: 65386
  Direct Repeat

SEQ ID NO: 65407 - DNA, 36 bp, unknown; identical to SEQ ID NO: 65386
  Direct Repeat

SEQ ID NO: 65408 - DNA, 36 bp, unknown; identical to SEQ ID NO: 65386
  Direct Repeat

SEQ ID NO: 65409 - DNA, 36 bp, unknown
  Direct Repeat
gtagcaatcgatgcgagacctcgcattggcctcgac

SEQ ID NO: 65410 - DNA, 36 bp, unknown; identical to SEQ ID NO: 65386
  Direct Repeat

SEQ ID NO: 65411 - DNA, 36 bp, unknown; identical to SEQ ID NO: 65386
  Direct Repeat

SEQ ID NO: 65412 - DNA, 36 bp, unknown; identical to SEQ ID NO: 65386
  Direct Repeat

SEQ ID NO: 65413 - DNA, 33 bp, unknown
  Direct Repeat
gcgatcgatgcgagacctcgcactggtctcgac

SEQ ID NO: 65414 - DNA, 34 bp, unknown
  Direct Repeat
agcaatcgatgcgagacctcgcactggtctcgac

SEQ ID NO: 65415 - DNA, 36 bp, unknown; identical to SEQ ID NO: 65386
  Direct Repeat

SEQ ID NO: 65416 - DNA, 36 bp, unknown; identical to SEQ ID NO: 65386
  Direct Repeat

SEQ ID NO: 65417 - DNA, 36 bp, unknown; identical to SEQ ID NO: 65386
  Direct Repeat

SEQ ID NO: 65418 - DNA, 36 bp, unknown; identical to SEQ ID NO: 65386
  Direct Repeat

SEQ ID NO: 65419 - DNA, 36 bp, unknown
  Direct Repeat
gtagcaatcgatgcgagaccttgcactggtctcgac

SEQ ID NO: 65420 - DNA, 36 bp, unknown; identical to SEQ ID NO: 65386
  Direct Repeat

SEQ ID NO: 65421 - DNA, 34 bp, unknown
  Direct Repeat
gtagcaatcgatgcgagaccttgcactggtctcg

SEQ ID NO: 65422 - DNA, 36 bp, unknown
  Direct Repeat
gtagcaatcgatgcgagacctcgcgctggtctcgac

SEQ ID NO: 65423 - DNA, 36 bp, unknown; identical to SEQ ID NO: 65386
  Direct Repeat

SEQ ID NO: 65424 - DNA, 36 bp, unknown
  Direct Repeat
gtagcaatcgatgcgagacctcgtactggtctcgac

SEQ ID NO: 65425 - DNA, 36 bp, unknown; identical to SEQ ID NO: 65386
  Direct Repeat

SEQ ID NO: 65426 - DNA, 36 bp, unknown
  Direct Repeat
gtagcaatcgatacgagacctcgcactggtctcgac

SEQ ID NO: 65427 - DNA, 36 bp, unknown; identical to SEQ ID NO: 65386
  Direct Repeat

SEQ ID NO: 65428 - DNA, 36 bp, unknown; identical to SEQ ID NO: 65386
  Direct Repeat

SEQ ID NO: 65429 - DNA, 36 bp, unknown; identical to SEQ ID NO: 65422
  Direct Repeat

SEQ ID NO: 65430 - DNA, 36 bp, unknown; identical to SEQ ID NO: 65386
  Direct Repeat

SEQ ID NO: 65431 - DNA, 22 bp, unknown
  Direct Repeat
gtagcaatcgatgcgatacctc

SEQ ID NO: 65432 - DNA, 19 bp, unknown
  Direct Repeat
acctcgcactggtctcgac

SEQ ID NO: 65433 - DNA, 36 bp, unknown; identical to SEQ ID NO: 65386
  Direct Repeat

SEQ ID NO: 65434 - DNA, 36 bp, unknown
  Direct Repeat
gtagcaatcgacgcgagacctcgcactggtctcgac

SEQ ID NO: 65435 - DNA, 36 bp, unknown
  Direct Repeat
gtagcaatcgctgcgagacctcgcactggtctcgac

SEQ ID NO: 65436 - DNA, 36 bp, unknown; identical to SEQ ID NO: 65435
  Direct Repeat

SEQ ID NO: 65437 - DNA, 25 bp, unknown
  Direct Repeat
gtagcaatcgatgcaagaccgcacg

SEQ ID NO: 65438 - DNA, 27 bp, unknown
  Direct Repeat
tcgagtgcggctatcagaatgatcttc

SEQ ID NO: 65439 - DNA, 27 bp, unknown
  Direct Repeat
tcgagtgcggctatcagaatgatcttc

SEQ ID NO: 65440 - DNA, 1797 bp, unknown
  TnpB Polynucleotide
atgttcggaaacaaaagcctgcccgcgcggatctattcgtacggggggaagcctcctacggagaacctgaaagaggtcgagcgcctcatgtaccaggcgcaccgttaccagaacgcgcgcatccatctcgagcgcaagcgccgggaaaaggtcaaccgggccctccgggtcttctcgccggaactcgccgatctcgaaatgaaggccgaggcgctcgatgagcagctggatcaggtccgcacggatatcaacagcgcccgggccatcgcccggaagaagatctcccctgaagacatggtccggaaatgcgaggagatcaaggcggaactgaagaagatcaatccacgtcgcaaggaactccggatccccatctgggggtccccgggatggcacaaagaacagaagaaggccgcggcggagtcgcgcccgcccgattcctccctgacgcctccccatccggactggaccaaggtccaggcgaagatcgacaagtgggacaaccagaaaggaaagcagttccgggccgtttccgggctcaaccacgtcttcggcacctacaacatggtggaaggcgccgtcaagcgcaccgggcggccgccgaagttcaagaagtggctggggcatgggcatctggtcatccaactccagaagtgcagggggaagtacctgtcgacttccggtgtcttttcgggaaccgacacgcgccttcggatcgatccgcttcctcctgaagcttttcgcatcgatccggatgacgggaagatccgtccggttcggaaactgtgccggaccaaggtgcatttcaggatcggcgtcgaagggaagagaaagcctctctttgcggtcctgcctgttatccttcacaggccccttccggaagaggccacgatccggtttgcccacatcatccgccggcgcatcgggacgaactgcgaatggaagttccaggtcacgctgtcccggaaaggcggctgggagaagctggatgccgccccggacggctcggtcggactcgacgtcgggtggagaatcgtcaagtccggaagccccctccgcgtgatctactgggccggggacgacggtcggcatggagaggaagtccttcccgcggattggctccaggagatgcgccgcacggagggcatccagagcatccgggacaagcttttcgatgccgtccgcgagcgcctcagcgtggacctgtccaagcttcaactcccggattggctgcgcgatcagacccaaaacctctggcactggaagtcccaggccaggctggcggtcgtcatcgtcaagtggagaacggcgcggttctccggagacgagaaggtcttcgcctacgcggaggagtggaggaaacgctactgccacctctacaacttcgaggccaatctgcgcaaccagctccagaaccgccgcgaggacatctacaggaacttcgcggcgtggctgaggagaaactaccggtactacgtgatcgaggacatggatctccgggacttctatgtccttccgaagccggaagaaaaacccgaggatccggcgacccggcagcatacgcgcgacgcctgcctgtcgcttctaaagcggtgcatcaaggaatccatggcggaaaaacccatagaggccccgcccgagaacacgacaaagaagcaccactcctgcgggtccatcgaggagtgggaccacaaggaactgatgcacacgtgctcgaagtgcggagagcattacgaccaggactacaatgcagcgctgaatctcctggacttcgcgagaggctcgatggtaacgtcctaa

SEQ ID NO: 65441 - DNA, 36 bp, unknown
  Direct Repeat
ctctccgtgcttgcgaagtggcattgaaacttcgac

SEQ ID NO: 65442 - DNA, 36 bp, unknown
  Direct Repeat
ctcgcagtgcttgcgaagtggcattgaaacttcgac

SEQ ID NO: 65443 - DNA, 36 bp, unknown; identical to SEQ ID NO: 65442
  Direct Repeat

SEQ ID NO: 65444 - DNA, 36 bp, unknown; identical to SEQ ID NO: 65442
  Direct Repeat

SEQ ID NO: 65445 - DNA, 35 bp, unknown
  Direct Repeat
ctcgcagtgctcgcggaggggctttgatactccga

SEQ ID NO: 65446 - DNA, 35 bp, unknown; identical to SEQ ID NO: 65445
  Direct Repeat

SEQ ID NO: 65447 - DNA, 35 bp, unknown; identical to SEQ ID NO: 65445
  Direct Repeat

SEQ ID NO: 65448 - DNA, 35 bp, unknown; identical to SEQ ID NO: 65445
  Direct Repeat

SEQ ID NO: 65449 - DNA, 35 bp, unknown; identical to SEQ ID NO: 65445
  Direct Repeat

SEQ ID NO: 65450 - DNA, 1890 bp, unknown
  TnpB Polynucleotide
atgttcggcaacgcatcgatccccagcatcgtctactcgtatggcgcgcgccgtcccatcgacggcctgtcactcgtacgcgagcagatgcacctcgcgcaccgataccgcaactcactcgtcgagttggagcgggagcgccgcgcgcgcaccgacaccgcactcgcggagatgttccccgacctcgccgccgtcgagcggaacatcgcacgtgccgaggcggacctgacggcgagccgcgccgtgatcacatccgcgaacgccgcggcacggtccatcgtcgcgacgcccgagatgaagaccaccacgaaggcgcacgtcatgtggctccgcgagctgcgcgcgacgcgcaagacgctccgcaaggcgtcgttcgcctccgaggaatggaagacgcgacaggaacaggtcgaaacgtgggcgcgtgccgagcagaagcgccgtcgtgccgcgagtggactgtcgtgggggacgtacctgcacgtcgagacctccctgcgctcgtgccgcacgggcgcgccgccgcagttcatgcgtgccgacgggtcgggccacctcgcgatccaactccaactcggtgcgacgtggggagaactcacaagcgaagcggacacgcgcctgcgtctcgtgcccgacgaaccgtccgcgctgtcgatccctggcagccgtcgtcacgggacgcactatacgtgctggtggcggatcgggagcgacggacgcaatcccgtgtgggccaagttccccgtggtcttgcaccgtcccgttccgtccgacgcccgcgtgaagtgggcgcacctgctgcgcgaggtcgtcgggacggtggatcgctggacgctgcaactcgtgatctcgcgcgaggcgggctgggccaagcctgacgtcgcgaagtccggcgcgtgtggccttgacatcggatggagacgcactggcgaggggctgcgcgttgccgtatgggttggcgacgacggcaaggacggggacctcgtgttgccgcaatggtggctcgacggctggattcagaccgagaacctgcgcgcgatccgagacggcgagttcaacgcggcgcgggagcggctcgcggcatgggtggagagcgacgcctgcacggacgcggcactgcgcgccgcgtgcaaccgcacgtggacggacgagcgcgggaacgcgcgggcgacgcacatccgccagtggcgggagcccgagaagctcgtgcgggtctggtggggatggcggaagaaccgctttgcgggcgacgcgaccgagttcgacctgctcacgcgatgggcggtccacgagcggcacctgcacgactatgaggacagtctgcgggagcagctccaggcgcagcggctcgacctgtaccggcgcttcgtcgcggcgttgcgacggcggtatcggaccgtggcaatcgaggatcgcaagcagctcgacctgtcgcggttccaggcgttgccgccgccagagggagaggctcccatcgccgcggcacgcgagcatcagcgggacgcgtgctgccacgtgctgcgcgggttgctggcgcagagcatcgcggacctgcgagacgcggagatgcgcgggtcgacgatggagtgccatgcgtgcgggctcgcgagcgacttcgaccgcgcggacatgatgaggacgtgcccggggtgcgggcacgtacacgaccaggactggaacgcggcggtggtcctgctgcgtcgcgcgactggcggatcgagcggtccgatggcgacggaacccttggacccgctcgcggagtgcggaaaccctgtcgcgcgcagggataggagcaagcagctggagcggatgaggcgcgagcgggatggcgcgcgcgcggagaaagtggcaccgctcgaaaacgtagacgtagcgcccgcgctggagtag

SEQ ID NO: 65451 - DNA, 36 bp, unknown
  Direct Repeat
gtagcaatgggtgctcgatcccagggaaatcgagac

SEQ ID NO: 65452 - DNA, 36 bp, unknown; identical to SEQ ID NO: 65451
  Direct Repeat

SEQ ID NO: 65453 - DNA, 36 bp, unknown; identical to SEQ ID NO: 65451
  Direct Repeat

SEQ ID NO: 65454 - DNA, 36 bp, unknown
  Direct Repeat
gtagcaatgggtgctcggtcccagggaaaccgagac

SEQ ID NO: 65455 - DNA, 36 bp, unknown; identical to SEQ ID NO: 65454
  Direct Repeat

SEQ ID NO: 65456 - DNA, 36 bp, unknown
  Direct Repeat
gtagcaatgggtgctcgatcccagggaaatcgaaac

SEQ ID NO: 65457 - DNA, 31 bp, unknown
  Direct Repeat
caatggctgctcagagccggagaatctgaga

SEQ ID NO: 65458 - DNA, 31 bp, unknown; identical to SEQ ID NO: 65457
  Direct Repeat

SEQ ID NO: 65459 - DNA, 31 bp, unknown; identical to SEQ ID NO: 65457
  Direct Repeat

SEQ ID NO: 65460 - DNA, 1854 bp, unknown
  TnpB Polynucleotide
atggccaccatcgtctaccggtacggggtgcggacccgcaccgagaccggccgctacgacctgcccgcagaggtgtggcagcagatccacctcagccaccggctccgcaacgccctcgtcgaggtcgaacaccggcacgacgaggcgatgcgggatctgtggtcggcgcatccgcaggtcgccgaggtggagcagcggctggccgccgccgagcagatggtcgccgaactgatcgaccaggcaaggttggagcattcgcaggaccggaccacagccacccggcggggtacggccaccaacctgcgggaggcccgccgggcggtccgtgacgcccgggctgcccggcgggcagcgatcggcgaggcgtacccggtggtgaagccagggatcgaggccgtccgagcggcgcggaaggccgcgatcaaggacctgtaccgggagtactgccaagacggcgacctgtactgggcgacgtacaacgcggtggtggcggaccaccgtatcgccgtgcaggcggtcgaacggaaacgccgacagggtcaggcggcgcagttgcggtaccagcggtgggacggcacaggcaccatctccgtgcagttgcagcggcaggccggacagcctgcccgcagccccgaactcctggcgtccggcgacggccagtggcgcaacgtgctgcaggtgcggccgtggatgccgccggaacagtttgatgggctcacccgcggcgaacgcaaacggcacggccgcggcgaagccgtgtggagcgtcggcggcggccgtacggtcaccttgccgattcaggtgcatcggatgatgcctgccgacgcggacgtgtgcgaggcccagcttgttgtgacacgtaccggcgctcactggtccgcggccctgtgcgtcacggtccgcttgcccgaccctgacccggttgagggccggtcgccgctggcgttgcattgcggttggcgtcaccggcctgacgggtcggtgcgcgtcggcacctgggccagccccgagccgctggtcccgccggcgaacctagccgacgtgctggccgcccatgacagcggccggtggggcgaaatcgtgatacccgcgtcctggctggaactggccggccggccggcggcgctgcgttcccgccgcgacctcgccttggagccggtgcaacgcaaactcgccgaatggctcgaccagaacccgcaacccgacggcgacgacggccggcccggtctgaccggcggcgacgtgcgccggtggcggtccgccaaccggttcgccgcgctcgcgatccgctggcgggacaccccgccgcccggcgagggtgctgcggagatgacggccgtgctcgaggcgtggcgccggcaggacaagcatctgtgggagtgggaggcccacagccgggctcggctccgcggccgtcgtgacgacgcgtggcggaaggtcggggcgtggctcgccgaacaggccggggtgctcgtggtcgacgacgtcgacttggcggcgttgcgacagcgcggggatgtggccgacgacgacccggttttgccggggacagccgccgggcaggctcgggcgcgggcggcgttggccgcgcccgggcggctgcggcagtgcgcgaccggcgccgccgaccggcgtggagtggccgtccgcacggttgagtcggggtatctcacccgcacctgcccgcactgcggcgaacggggtgacgcgcatccgcggtacgcccagtcggcggtggtgacctgcccgtcgtgtggtcgttcgtacgatcaggaccggtccgcggcgacgctgatgctggaccgcgagcggtccggtgacggccctgggaagggtgagcgctcgcagcagtga

SEQ ID NO: 65461 - DNA, 35 bp, unknown
  Direct Repeat
tcgaaatgcctgctcgggggcttcgtacctgagac

SEQ ID NO: 65462 - DNA, 35 bp, unknown; identical to SEQ ID NO: 65461
  Direct Repeat

SEQ ID NO: 65463 - DNA, 35 bp, unknown
  Direct Repeat
tcgaaacgcccgctcgggggcctcgtacctgagac

SEQ ID NO: 65464 - DNA, 35 bp, unknown
  Direct Repeat
tcgaaacgcctgctcgggggcctcgtacccgagac

SEQ ID NO: 65465 - DNA, 35 bp, unknown
  Direct Repeat
tcgaaatgcctgctcgggggcttcatacccgagac

SEQ ID NO: 65466 - DNA, 2256 bp, unknown
  TnpB Polynucleotide
gtgcgccgtgaacagcgcgcagacgctcgacagcctattagggccgcagctagacgccgccttagacgcggtcgcacgcgcgagcgatcgaaacgtcacaaccgagcaagccgaggagctggagcgggctccagcgcaaaagaaggaaacttgaaaatgcaaaccatcgcctacaaataccggatccttcgcgtgctctccgacgagcgggctatcatggacgagatccgagccggtcaccggctctacaacgatctagtcgccatcgagcgcaagcgacgggccgcgaccgaggcgttctgggctgagcgtggtgggtaccaggatcttctggccgagcgtgggaaggccatcgaattcgccgagtcgattcccaagggcgatgatcggcgcgaggagaagcgcgcggcatggcgcgctgtgaacgatctgcgtaagcagatctgggagtgcgagaaggacgccatcaaagcgttccacgcgagcgatcccgtgaagatccgcaggatggaacgcgccaaggaactccgtgctgctgcgaaggcgcgcaaggaaaagctaacggcgaaaaagatcgcggacattcttgacgaggaaccagattgcctgaccgagcgggataagctgcgcaaaacgcttatccagagctacaaggatcgcggcgtcgggatcagtgcgaaaaccgtggctggcaagctcgcagaggcattccctggtccgacggaacacgtcgagcaggaggcgaaagccgcggcgtacacagcctatcgcgaacgcggtgttacgcccggtacgcgcgcggtggttgcggacgcgcatgagcgctcgcttgagatgctcgagtggcgagagcaacgcttcaagccgtggtccggccacggcgcattcggaacgcaaatccaaggaggcgcgacgtacggcgacctatgcagtggcagccacacgtttgctcaactggagtgcctcgaccgcggcaactacactcctgggtctcgccggcatggcagtctgcacaggctacgcgtgcgccttgggtcggacggtcagaagcccgtctgggcggaattcgaagcgagcctacttcgcagcggcccgcgtacgtccgcgtcgacatcggatccgatcccacccgatgcgcgcgtaatgcaagtgcgcgtggtggtcgaccgaatcggcgtgcacgaccactggtacgtctgtttcacggctcaggttccggacgccgtgcacttgcgggatgagccgccgacgaagggcgggacggtggccatcgacattgggtggcgcagtttggacggtggtttgcgggtcggatacttccacgacgggcaagagcacggccccatcgacctgccaacgatccgcaagcgactcaagccgcacgggaagcgaggcgccaaggcgaagtggttcgaagtgcgcgacgtgttcgatcacgcgagtcacatccaagggatcctgtctcaggaattctactccgaggacaaggatgcggccgtgtacggcggcgccttgcatgacctagcggtctggatcgactcgcgcgggcgcgatgctctccccgagtggctctccgaatctaccgccgggatccgacagtggcgttcgcaagctcggctcaacggactagttgaacgatggcttcacaaccgtttcgagggcgacggtcaaatcgtcgctcgcatggatcagtggcgcaaagactataggcatttgcatgaatggtgcgcgcgggagagaaaccgcgccctgaacgcgcgcgacgagcactacaggcagaccgcgctacgcctcgcgcgcgcgtacgaaacgatcgtgatcaacggcgccgaccttgcaaccacgcgccgccgcaagcggaaagagaaggccgccccccagctggtcatggtcgaggatgcgaagcgttcgcaggccttcgacgccgcgccggggaagctccgggaagagatcgtaaaggcggcaaagaagtacggccggacactggtcaaattgccgttcgaaaccgagaggtgtcacgtttgcggggaggtgtgtgaatttgaccgtgcccgctatctctcacacaagtgcgagcacgaaccatgcacagcacagtgggaccaggacgccaacgcgtgcctgaatgcccttcgcgagtggtccggtggcgcgaaaaccccggggaccgctcgcaaacgcgacaagcccgcgaagtcacgtgagaaaacgacggggcgcggcgacgcaataggcgctgtgagcgattcgctgtag

SEQ ID NO: 65467 - DNA, 29 bp, unknown
  Direct Repeat
aaggccctcggcgcctttgaagccgagac

SEQ ID NO: 65468 - DNA, 29 bp, unknown
  Direct Repeat
aaggccctcggcgcctttgaagccgagac

SEQ ID NO: 65469 - DNA, 29 bp, unknown
  Direct Repeat
aaggccctcggcgcctttgaagccgagac

SEQ ID NO: 65470 - DNA, 29 bp, unknown
  Direct Repeat
aaggccctcggcgcctttgaagccgagac

SEQ ID NO: 65471 - DNA, 29 bp, unknown
  Direct Repeat
aaggccctcggcgcctttgaagccgagac

SEQ ID NO: 65472 - DNA, 29 bp, unknown
  Direct Repeat
aaggccctcggcgcctttgaagccgagac

SEQ ID NO: 65473 - DNA, 29 bp, unknown
  Direct Repeat
aaggccctcagcgcctttgaagctgagat

SEQ ID NO: 65474 - DNA, 1650 bp, unknown
  TnpB Polynucleotide
atgtttggacacgattccttgcctagctgtatttattcctacggggcgaaagcccctacgatcaacgctgagctggtgaacgcacagatgagcgcggcccacaaatacggcaacaagctcgtggaaatcgagctacagcggcgtgaggcgaccaacgccctcgtccggcggctatcgcccgacctggaggcggccgagcaggccgtggccgatctcgaccagcggatcaaggcggttcaagccgcgattcgcctgaccaaccagtcggcgcgcaagaagggcaagggtacgccagagcaacgcgccgaaatcaaagagctacggacgaagcgcaaagaggccgccggccgccgcaaggaagccaaggccctggcctacgaatcgctcgaagccaaggcggaactggggacgatcaaccaggccaccgggcagaccatgcgcgacgcccgcgcggagtcggaaatatattggggtacttacctacaggtggagcaagcggcgggcaagaatcgtagcggcccgcccccacgctttcgccgctggacgggcgacggcaagttagccgtccagattcagggaggcatgaccgctgaagacgcgttcgccggtaaggataagcgattcatcctggagggcgatagcaagtacgcgcaggcgtggattcgcatcggtagcgagggccgccagccagtctgggcagtggtcccggtgctcatgcacaggccgatccccgatgattgcctaatcaagtgggtgtacctgattcgtcgtcgggtcgaggctcatcataaatggcagctgtgtctggtactgtcccgtgcgggcggctggcagaagccggatctggcccgcagtggaaacgtcgggatcgacttcggctggcggttgctggaccacggcctgcgcgtggcctattgggcgggcgatgacggtcagagcggcgaactggtattgccgatccgcgacgtggggcgatggcaaaaggccgatgatctgcaatccatacgcgacgaacgattcaatcttgcgttgacatcgtttcgcgagtggctgcgagcgcatgagctacccgactggctggccgaacggacgaagagcgtcgggcaatggcgggcccaggcccggctggccgccctggtgatccactggcgcggcgaacgattcgcgggcgacgaagagatattcgcgcagatcgaggcatggcgaaagaaggacaagcacctgtggacgtgggaggtaaaccagcgacggaaggcggttgcatggcgagtggacttgtaccgcaacttcgcggctacgctttcccgccagtatcgcgtggcccacatcgagaacaccaagtggtcggacatggcaaagcggccgactgccgagacggaggacgatggcaacaaggcgtcacgccgctaccggcagatagcagcacccggccggctgggcaagttgattcgggaacggttcgccgaggtggtcaaggaagaggcagcgtacactacgcaacggtgtcatgcgtgcggcgaattggcgcaattcgacgcggccacgcacctctggacgaaatgccgccactgcggcgcggagtgggatcaggattataatgcggcgatgaatctgcttgcgagcggtccggtggcgcagaaaaccccctga

SEQ ID NO: 65475 - DNA, 35 bp, unknown
  Direct Repeat
tcacaatgcctgcgaaagggcttcgtactttcgac

SEQ ID NO: 65476 - DNA, 35 bp, unknown; identical to SEQ ID NO: 65475
  Direct Repeat

SEQ ID NO: 65477 - DNA, 35 bp, unknown; identical to SEQ ID NO: 65475
  Direct Repeat

SEQ ID NO: 65478 - DNA, 35 bp, unknown; identical to SEQ ID NO: 65475
  Direct Repeat

SEQ ID NO: 65479 - DNA, 35 bp, unknown; identical to SEQ ID NO: 65475
  Direct Repeat

SEQ ID NO: 65480 - DNA, 35 bp, unknown; identical to SEQ ID NO: 65475
  Direct Repeat

SEQ ID NO: 65481 - DNA, 1698 bp, unknown
  TnpB Polynucleotide
atggcttttggtaaagaatcgaaaccttgtatggtatttgaatacggttgtccttcgcgaaaaataaaaggtgatcttaaagtttttgaagatcaaatcttccataaaaataaactctggaatcgttatgttgagattgatcgcgagtatcgtcaagccgttcgtgctctaatcactcctgaagatgcaaccatagatcagcttaacgaaaaactcgaaacagttcgcgaagaaattaaaactaaacgtaaactcgctcgaaaaggcgatgttgatatagacgaattaaaagcacaggcaaatgaattaaaagaacaaatcaaaaccgctcgtaccgctcaaaaggaaataaaaaaacaaattgtcgccgccaataaagtaaaacttcaagaacttgacgacgaacggaaagcaaaagttagcgtcgcctcccacggaagcaacctttacagctataacaaagaagataccttaatgtcctacgacatcgctcgtaaacaagcaatgaaaaagggtatcgatcttcggtttcaccgttatgatggtaccggcaaatgctttaatcgttggtcgcaagggcttagcaccactaaaattttcaccccaaacacaatgctctggattgaacctatcgataccgaaaaagcctggctctcgcccaaacgtggggaacgcaaaaaagctcagcaaaccaccgcacatttccgcattgcatcttctgataatcataaaccggtttggattgaagttcctcttgttatgcaccgagaactccctgcgaacggcgacattcgcaatgcctctcttattcgctataaggttggcaaaaaatttatttacaagattctcatcaccgttgcgtttgagacctctaacattcgaaaaatagacggacaagccggtagcattggtattgacatcggctggcgtaaagtagaaggcggcgtccgcgttgcttactggaccgattccttcggcaactcagatagtcttattctagaagactctgttataaatgctttccaaaaagtaaaagacttgcaatccatccgagatcaacatttgaacgctatgcaatccatcttaatcacatggaaaaccgcgcgagaaactttgccagaatggtttcgtgaaaaaactcaataccttggccaatggaagtccccttctaaatttattgcactttataaagagtggaccgaaaatcgtttccctggtgaccaagaaatgtacgcttacctccacgaatacaccaaacgtgaagaccacctttatttataccaagctaatcttcacgatcaagttcttaagcgtcgtaagcatatctaccgcaactttgccgctcaaatctccaaaaaatacaaagaacttatccttgaagattttgatcttcgtaacgtcgttcaaaagaaatccgctgaagacggtacccaaggttccacccctgccgacgcttaccgattcattgcctccgtcagcaccctccgggacgctttaaaaaacgcctgttctcgtgacggcgtagacctaattaccgtagactctaaaggcaccacttccacctgtagtgcttgcggctccatcgaatccttcaaccgcatgaatattttctggacctgttcctcttgcggcactctccacgaccaagaccaaaacagcgccaaaaatatcttgaaatactccaaacttccagtataa

SEQ ID NO: 65482 - DNA, 20 bp, unknown
  Direct Repeat
gttttactaccatattattt

SEQ ID NO: 65483 - DNA, 20 bp, unknown
  Direct Repeat
gttttactaccatcttattt

SEQ ID NO: 65484 - DNA, 2835 bp, unknown
  TnpB Polynucleotide
atgtcaaaagaaatagaaaatccttcagctttggattcagattcatcggatgacgagagcgttttgctcgttcacagcatggacgcgtccgccgacgacgaggacgatgatgagaagaccccctcccggggctggtcttatgatatctggaatttgaaaatcgatggggattccgagctgcgtctcctcgataaacagcttactcttgcacacaactatcagcaggacctcgtgcgtctcgagctcgatcggcgcaaacgctaccgcgacttgcggcggagctatttccccgaagtggccgacatcgaggcggcgattgaggtttttgcaaacgagcaggaggagatacgaggccagggcaaggacgcgcgctcgaaaaagcgctcgcgtgtgaagttctctgcggaggccaagaagcgtcttggagagcttacgcgcctcattaagccccttgtggaaaggaaaaaggcgctcatcgcgggcctcaaagggcagcatcgcgatcttttggcgagatactgtccggatgggctcgttctagaggacaagatcgagcagtgcgcagccgagctcaagctgctttcttcgaagaaaaagaaggagcccgaagaggccgagcaggaaaagagctcgaagagttcgaagacctcgaggcgttcgaagcgggaaaaggatgcgatttccgatctaaaggatcggaaggccgtgtttagcgcggagagaagagagctcctgttggggcttggggagaaggcgaagctgtttttgtacttcatgctcgagcgggatggcgatgcgctcaagaaggaatgtaccgtacgcgcgaacgagatacgcgcaaagagcggggtgttctggggcagttacctactcgtcaataaggtggtaaaggacattcgagggaaaaaaatggatccagtcgatccggattcatccgaggggaagtactggaacggggaagggcgtgtgggaatcgtcttccagccgccgattcccgcaaaaagggtttttggcaaaaataatcaactccttcagattacggcgccgtccgaggagacgtattacatgcccaggcgctgcgataggcgcaagaagtcgcagacctgcgggcgcattcgactcgagtccacccaagatcacaagccgatttggctatcgttcgatttcaatatgcatcggccgattccagacgatgcgatcgtcaagatggcctggatcaaacggactcgggtcggctgggagcgccgctataagcttcagatcgtcgtctcgtcggagaagtttaccaaggacacctccggaacgggtacttgcggaattaatctcggctggcgatgcaagaacggccggcccttgcgggtagcgtatctcgtcgacgaccaggggcacgaagaggagatctgtctcgatcaggccattcaggaaaagttcgatcatgtgagctcactcagatccatacgggatctcaatttcgataagataagagaagaggtcgttaagtggctcgatgatcatgcattcaagagctggcttcatcagcactggaagtttttaggcaaatgcaagtccgtgcggaaattcgtgaaagacatcgaagtctgggcccaggagcgcattgacggcgatgacgacatcttccaaaaggtgtgggatttttatatcgaggaaaatcacctttatttctgggaggcgaacgagcgagagaaggtcctagcctgccgaatcgatgactggcggaacgtgtctgcgcgaatttcttcgcgctacgataccattcgtctcgaagattttaatctcgcaaaagtggtcaagttgtcgccgccggaggcggaccaggaggtgccccaaaaagctcgtcacaatcgcgtacaggccgcgccggggcaattccgcactatactcatatcggcttgcacggctcgtggcactctcgtggagaagaatccctgcgagtacattacgatgacctgccacatctgcggtcatgaaaacgagtgggacaaggccgctgagctcatgcatacctgcgaagggtgtggaaaaacctgggaccaggatcaaaacgcggccatcaataaccttcttttcgagcagggcggtaagggcgggtacaagaaaggctctcgtccggcttatactctcaaagaggaatccacctgcgaagtgggtctttatttcaatccctcgaagtcggctccaatgcgtgttggttacgtgaaggacggtgcgggtagacgagagatttccattacgtcgaacgttacgcggctgcttaatgatgccgatcggatccatcaggatcggcagaacggttttatggccgtaagaacgaagctcaattccgctctcgctggctctctcaaggggtgttttgacgatacgtggctgctttcgtcgcttccttgggcgatagaggacagggtcgtgagtggagtggttcatgctccatcgctgcgccgtctcgttcggctgctggataagtggaaaacacagagggttcgctgggatggcgagatcttcttgctcgtgcgcgaatggatgacacaagaggagatggatcgagagagggagatcgctctgcgtaaagaggcgagccgaatacggcgagggatcttcgtgaaggtcgctcagaaactcatcagctacaagcgggtgacgattctggctatcggggcgggtggtataccaagaaggctggatacggctccctcggacctccgcaatgcgattgaggaggtgctgaaaaagcaacggataccctataacaccgatcggcgacggcattacgagtcggcccgggcgcgcctaggcttagcggctgccgccgtagcgtga

SEQ ID NO: 65485 - DNA, 22 bp, unknown
  Direct Repeat
cgaccgcaggacttgcagtcgg

SEQ ID NO: 65486 - DNA, 22 bp, unknown
  Direct Repeat
cgaccgcaggacttgcagtcgg

SEQ ID NO: 65487 - DNA, 2439 bp, unknown
  TnpB Polynucleotide
gtgggccaccagccgggggataccggtgcaccgtgtggtgaccgaaaccgggtccgccgcaggcgggacgcacccgcggctacgcgcgttgctgcgggacagccgggtcaccacgatcgtgatggacccccgcacctggttcggtgccggggacgtggaagcggcactggcggcacagggacgccggctgctgatcgccccggaacaggaggatgggacatgagcaccggcacggttccccccgcggccgggaacacgccccccacgggggaggtcacggttgcgcggcggtacggcgcgaaacccggccccatcccggcagcgatccgggaggaactggaccgcgcccactggctggtgaaccggctcgtcgaaatcgaccgggaatgcgacgagcaagtcacagccgtgtgggaagccgacccgcaggtcggcccggtcctcgccgccgtccgcgacgccgaagacgcccgcgccgcagccagtgaggagctacggcgggcgaaagtcaagctgggggcggtgaaatccggccggtcccgcaccgggctggacgtcgcccgcgcccgcgtggacgccgcccgcgaggccgtccggcaagcgtccgcagcactgaaacaagcccgcgaccgggccggcgcggtgaaacaggaacgctggcccgccgcagcccccgtgatccgcgccgcccaggaggcccgggacgccgcgatccgcgccacctaccccgagtttgtcgcccgcggcgggtactgggcgacgtggaacgacatcaccggcgcccacaaacggcgccgggaccgcgtgcagcagctacgccggcagcgccgccccgcgcagatgcggtacaagcgccgcgacggcaccggcaccctcaccgtccagctgcaacgccagctgggggtgtccgccgctgagcgggcacacgtgaccgggctgcgggacgcgggcctggcaccctcccagatcgcggcccttatcacggccggggtccccgccgccgaggtcaccccggccagggtggcccggctgcgcgccgcgggcctgtccgcccccgaagtcacccaggcgctggtcgccggcgcggacccggccgcagccgctgccgcgtccaggacccccgggaaagccgcccgccgcgccgccctcggcgaagtactcgccgccgcagccgccgcccggccaccgcggaccccgggccggcggtggcgcccccagtcggtggcacgggtccgcgccggcggcaaggacacccccggcgacccgccgttcaccccggatgtgctcgccggccccgccgggccagccgcactgcaggtgcgtcccgtgctgccccccgggtacccgcagctgccgcggcggcagcagcgggccctggcccggcaaggcgaagtcgtgttccggaccggctccgccgccaacgccgcctacaccaccatccccgtcgtcctgcaccggcccctgccagctggcggggacgtgaaaatgggccggctcaccgtcacccgctgcggccccgatctggagcagtccgtgtccatcaccgcccgggtgccagccccgccccccgcagccgggcacaccgcagcggtccacatcggctggcgcgccctcggggacggcgcgatccgggtcgcggtcatcaccggcccccgcaccccgccgccccgccagctggccgaggctggggttgtgcggcccgtgggcggctgctgggaggtcgtggttccccccaggtggcaggtggcgctgacccgggtggatgggatgcggtccgcgcgggaccgggaatggcagcaggtccgcgaccgggtcgctgcggccatcccgcccgggcatgacacgctgcccccgcccgcgcaggtgcgggcgtggcggtcccccggccgcatggtcaccctcgccgccgcctgcgaagccggcgagcacggcggccacggccgcgccatcgcggatctggtcaccccgtgggcgcgccgggatcgtgccgcatggcggaacgagtcccgcgcccgcaggcgcatcctgcggcgccgtgacgatgcgtgggcggtcatcgccgcgtggctgacagccggggccggcacggtcatcgtcgacgactgggagctgccgccgctgggccggcgtcccgggctgacggaggaggatgatccgcagtggcgggccgcgcgggccaaccgggtgctcgccgccccgggagccctgcgggcccgggtgcgggtgaccgcggagctggcgggtgtggcggtggcggagttcccggtgccccggccggggcaggcgcacgccgggtgcgggcacccgctcgacccggacgcgcgccgggaagacgtcctggtgccatgcctcggctgcggggtcaaggttgaccaggacatcaacatgctgacgctgatgctggacggtgcccgggagggggcgccccaggctggctag

SEQ ID NO: 65488 - DNA, 26 bp, unknown
  Direct Repeat
cgtgcgcagccggataacgctgcgac

SEQ ID NO: 65489 - DNA, 26 bp, unknown
  Direct Repeat
cgtgcgcagccggataacgctgcgac

SEQ ID NO: 65490 - DNA, 26 bp, unknown
  Direct Repeat
cgtgcgcagccggataacgctgcgac

SEQ ID NO: 65491 - DNA, 26 bp, unknown
  Direct Repeat
cgtgcgcagccggataacgctgcgac

SEQ ID NO: 65492 - DNA, 26 bp, unknown
  Direct Repeat
cgtgcgcagccggataccgctgcgac

SEQ ID NO: 65493 - DNA, 26 bp, unknown
  Direct Repeat
cgtgcgcagccggataccgctgcgac

SEQ ID NO: 65494 - DNA, 26 bp, unknown
  Direct Repeat
cgtgcgcagccggataacgctgcggc

SEQ ID NO: 65495 - DNA, 26 bp, unknown
  Direct Repeat
cgtgcgcagccggataccgctgcgac

SEQ ID NO: 65496 - DNA, 26 bp, unknown
  Direct Repeat
cgtgcgcagccgggtaccgctgcgac

SEQ ID NO: 65497 - DNA, 1797 bp, unknown
  TnpB Polynucleotide
atgttcggaaacgattcgcttcccagccgcatcttcagctacggcggcaacatcaagcacgtccccgtcggtaacaccgatacgaaccttccgttccctggtcacgccgaggtctaccaggccatgcgcctggcgcacacgtaccacaaccagctcgtcgagctcgagctcgctcgccgcaagcgggtcgacgaggccctcctcaagatctcccccgagctcgtcgggatcgagaaggcgatcgccgaggccgacgccaagtacgaggcggccgaggagaagatccgccgcgcctcggccatcgcgaggaccaaggtccgccccgaggacgccctgcaggccatccgcgagtccaaggcggccaagaaggatctctggcccaggcgcaaggacctccgcaccaaactcttcggcaagtacaacaaggagaccaaggcctacgacgtcgcgcccgaccccgagtggacgcccttccagaacgagatcaacgcctgggccaacgccgagcagaagcgtctcagggctgcgagcggcctctactggggcacgtacttgatcgtcgagcagtccgtcaagcgctccggccctccgccgcagttcgcctcctgggacggccacggccacctggcggtgcagatccaacacggtctctccatcaaggaagtgctcgcctgcaccgatacgcgcgtccggatcgagcccgttcccgccgaggcgtggctcccgggcgggcgtcatctccgcaagacccgggtctggttccgcattggcagccagcccaacggcgagcccctgtgggccgtcgtgccgttcgtgtaccataggcagatcccctcggacgcccaggtcaagtgggtccacctcgtccgctaccggatcggcaccaacttcgactggagagtgcagttcgtcctctcccgcgagagtggctgggcccaccacgactgcgccgagaccggttccgtcgggatcgacatcggctggaggctgaagcccgaccgctccctccgggtcgcctactggaaggacctggaaggtcagcacgacgagctcgtgatcccggccgactggctcaccgagttcgagaggaccgagagcatccgcagcttccgcgacacggagttcgacaccatccgcgaccgcctctcggcttgggtcgtcgccaacgccaatatcctccccgactggttcaaggaggacatcgagacccttccccagtggaagagccagcgccgcctggcctccctcgtcatccgctggcgcaacgccaggttcgaaggggacgccgagatgttcgcggcctgcgaggactggcgcaagcacgacaagcaccacttcaacttcgagagtaacctccgcgaccagctcctctcccgccggatgcacctctaccggaacttcgcggccgagatgcgccggaagtaccacacggtgtttatcgaagacctggacctccgggagttccacaagaatcccaaggccgaagagcccacgcccgacggggcgctcaaggagcacacccgcgacgcgtgcctgagcctgctcatccagtacctgaaggagtcgatggcggagctcgtcaagcgcccggctcccgacaccacgcgcaggtgctgctactgcgggtccatcgaagactgggaccgcaaggagctcatgcacacctgcggccggtgcggccggaactacgaccaggactactgcgccgcgcacaacctgctctacggcgagcctggccccgaggcccagaagcccccggcccctcccgatgacaagcccaaggaggatgccgcctaa

SEQ ID NO: 65498 - DNA, 18 bp, unknown
  Direct Repeat
atgcctgcgaggtggctt

SEQ ID NO: 65499 - DNA, 18 bp, unknown
  Direct Repeat
atgcctgcgaggtggctt

SEQ ID NO: 65500 - DNA, 18 bp, unknown
  Direct Repeat
atgcctgcgaggtggctt

SEQ ID NO: 65501 - DNA, 29 bp, unknown
  Direct Repeat
acgccagcggagaggcttggtgtctccga

SEQ ID NO: 65502 - DNA, 1932 bp, unknown
  TnpB Polynucleotide
atgtcgaaatttagagtatatcaatacggattaaaagcacctaccgaaaatgccgagttggttcgtgagcaaatgtttctcgctcatcgctatcacaatacgctgattgaaattgagcgaggacgaagaggtgccatccgaacattaactaggggacataatgcgacaattcgtcaattagaagctgatttattggaagctgacgctctggttggaaaaattgttcgtgaaattaaaacgcaacattcggagacccgatctcgtctttccactcaaaccgataaagaggagttaaaggttgctcgtcaaaaaaagaaagagataaagagccaattaattgaagcacgttatctcgataaaaataatccaagtatcattaatgaacgaaccaacattaatgatctggctaaagaggcaataaagtcggcacgcaaacattgtggagtttattggggaacttctcaactaatagatgatgcggtagaagcatctagaaaaatgcctctatataatggagaaaaggataacgatcccagttttaaaccatggaaacatcaaggatcggtaggcgttcagatacaaaaacgagacgatattcaggggatggatgttaagaatgtttttggagctgacacttgtttcagaatagattgtgtgaatgagggtgctttttatgccgaaaagagaggagatcgtcggaagcaacgtaaaactaccatgagaatgcgtattaattccgatgataaaggcaaaccaatttggtcctattttcctatgactatgcatcgtccgctacccgatggtggtataattaagaaggccaaagttcgtctgaaaaaaataggatcgagagaagagtggtcattatctattacggtagatatgtctaatgtattaatgacaaccaataataatcatgaggctgtagcgattgatattggctggcgtgatatgaaagatgataatggtcaaacaactgggtttaggatgtgtaaatctcgtggaacggatggtaagatcgaagaaattaaactcgatccaaaaatcatcagtgctattaaaaaagcaaatgaacttcgtggattaagagatgataatttcaataaggaacgagcgtcttttgtagcatgggcaaaagtaaatgttttgcccgattggttagtgaaagaaacaaaaacaattgcacaatggcgttcaatatccagattggtcaaattgtttaagcaatggaagaataatcgttttgatggagatgaagttatttttggagtttcaggtaaatggaataaaggcgataaatccgttattactggaactggtttagcaggctgggcatatcatgattttcatttatggaattgggaggctaatcaacgcaccaaagctattagaaggcgcaaagagttttatcgtgtggaagccagcaaattagccaaacaatatcaaacattggtattggaagattttgatttgagtgatgtgtctcaaacggcagagccagaagccgaagatgataatcaaagaggtaggagtaataagacgatttcctctccaagtgagtttaaactggctctaattaatgcttttgatgcccgtaatggtaagatagaaaaagtgaatcccaagggaacatcttatatttgtcatttatgcaagtctaaagaacatctcgattcgacttttcatattcacacatgtagtaaatgtcatcaaacttgggatcgagaagataatgccacggctaatatactaactttgtggcgcgagcggttgagcgatgagcaaaatgccgtgagcgctcgcaaggacgaaaacggtaatgaaaacaagggggtagaagagacgagatatcaacgcagaaatcgtgccaagcaagaaaagaaggctcgattggagaccgctcgcaatgcggaagctaacatagcggaatga

SEQ ID NO: 65503 - DNA, 36 bp, unknown
  Direct Repeat
gtagcaagaggtgctcatgcctctagaatatgagac

SEQ ID NO: 65504 - DNA, 36 bp, unknown; identical to SEQ ID NO: 65503
  Direct Repeat

SEQ ID NO: 65505 - DNA, 36 bp, unknown; identical to SEQ ID NO: 65503
  Direct Repeat

SEQ ID NO: 65506 - DNA, 36 bp, unknown; identical to SEQ ID NO: 65503
  Direct Repeat

SEQ ID NO: 65507 - DNA, 36 bp, unknown; identical to SEQ ID NO: 65503
  Direct Repeat

SEQ ID NO: 65508 - DNA, 36 bp, unknown; identical to SEQ ID NO: 65503
  Direct Repeat

SEQ ID NO: 65509 - DNA, 36 bp, unknown; identical to SEQ ID NO: 65503
  Direct Repeat

SEQ ID NO: 65510 - DNA, 36 bp, unknown; identical to SEQ ID NO: 65503
  Direct Repeat

SEQ ID NO: 65511 - DNA, 36 bp, unknown; identical to SEQ ID NO: 65503
  Direct Repeat

SEQ ID NO: 65512 - DNA, 36 bp, unknown; identical to SEQ ID NO: 65503
  Direct Repeat

SEQ ID NO: 65513 - DNA, 36 bp, unknown; identical to SEQ ID NO: 65503
  Direct Repeat

SEQ ID NO: 65514 - DNA, 36 bp, unknown
  Direct Repeat
gtagcaagaggcgctcatacctctagaatgtgagac

SEQ ID NO: 65515 - DNA, 36 bp, unknown; identical to SEQ ID NO: 65514
  Direct Repeat

SEQ ID NO: 65516 - DNA, 36 bp, unknown; identical to SEQ ID NO: 65514
  Direct Repeat

SEQ ID NO: 65517 - DNA, 1656 bp, unknown
  TnpB Polynucleotide
atggcaaaaacgcgagcaaaagccctgccgtcgatcgtgtatcagtacggctgcaagccgcccgacaaccaagcggctgttattgagcaaatgcggctggcgaatcgttatcggaatcgcctcgtcgaaatcgagctagcgcgccgcgcgtcggcggacgctatcgtacacgccgacgaacttgccgcccaacgcgcggagatacagaccctcgatgaacggctagcggagttgttcgcggatcgacgccggcgcaattcggaaaagcgacgcaagaccgcatttactcccgaggaaaaggccgaggtagcggcaatcaaggagcaactgacgccgttgcgcaaggcgtaccgtgaagccaaactcgctgcctacggaagccccgcgaacaagattgcactcgccgcagccgagaccgcatcgaaggccgccgcgaaagaagcccgtcgcattgccacgtcggaatggggactgtattggggtacctacacggccgttgaggcatcggcgacaaagttccgcaagggtgtgccgccgcgttttcgaggttttcgcggcgacggacaagttgcggcccagattcagtccaatgccgacacgcggctgacgacggaggagatttcggaatgcggcggcgactcgcattttcgcattttgcgaattgacaagaaacacgccagcgtgtcgatcctgatcggcggcgccgatccatgcaaacggatttcgccgtcgaacccgccggtgtacgccactgtgcgggcgacgcttcaccgaccgctcccggacggtgcgcatgtgtcctgggttcgtttggtgcgcaaaaagatcgggaccagttttaagtggtttgtgcaattcattctcgcccgtgcggaagggtggaaaaagccggcaggcgatggcgtagtcggcatcgacgatcggttcgacgaactggccgatggctcaattcggattgccaagtggcatggcggcgacggcgacagcggcgaattggtgttgcccgccgatctggtggcgaagatgcggcacaagcccgccattcaatcggtgcatgacgagaaaaccgagattgccaaaaaggcgttgttggcctggatcaaagcgacaaaagaacttggtgaagcgtcgggaaagaagccggaagagatatttcccgattggtggaacgaggcgacgaagaccattcatgcgtggcgaggcgcgtccaggttcgctggactgatcgccaagtggcgcgacaaccggttcgatggcgatgctggcatattccaacagatggaagactatcggaaagacgcgaaacatctattcaattggtattcgcacgagacaaccaaggcgttgggccgaagaaaggacttgtatcggaactgggcgagaatgcttgccaggaaatatggcacggttggcgtgcggacgaagaagactgctccactgacggatgtcgttgcgaggtttgcggcgatcgcggattttcgcgcgacgctgaaacagggtgggttggagctgatcgaattgccggcgggcgagggcgacgacccggccgaggcgattctgcgaggggtccagtgcgcgaaaaaagaaggcgacctctcgcacgttgcagcgcaaggagttacgattggcgacgagctggatgcgagcaaaggatga

SEQ ID NO: 65518 - DNA, 35 bp, unknown
  Direct Repeat
tggcaaagcccgcacagaggcttggtttctgtgac

SEQ ID NO: 65519 - DNA, 35 bp, unknown; identical to SEQ ID NO: 65518
  Direct Repeat

SEQ ID NO: 65520 - DNA, 35 bp, unknown; identical to SEQ ID NO: 65518
  Direct Repeat

SEQ ID NO: 65521 - DNA, 35 bp, unknown; identical to SEQ ID NO: 65518
  Direct Repeat

SEQ ID NO: 65522 - DNA, 35 bp, unknown; identical to SEQ ID NO: 65518
  Direct Repeat

SEQ ID NO: 65523 - DNA, 35 bp, unknown; identical to SEQ ID NO: 65518
  Direct Repeat

SEQ ID NO: 65524 - DNA, 1935 bp, unknown
  TnpB Polynucleotide
atgttcggaaataagagtcaaccgtcgttgaactattcatacggggcgtctgcgccgttcgcaaccaagggtctgggtcttgtcgatcagcagatccgcgcagggcacgactacaagaacaggctgatcgaggttgagcgtgagcggcgtcagcgcgttgacacactcatcgctcagctctcgcctacgcttcaacaggtcgagacaaacatcgcggctgctgagaagcagatcgaggacctgcggtccgcgaaaagggcggctcacgccaaggttggcaagcgcacgcgcgatcctgccaccacgaaagccatcaaggacttctcagcccagaagaagaccctctatgagcaacgcaagtctctcagggacggcctcttcaaggggccgaactggaaggttcaatctgaggccatcgaggcctgggccaagaaggagaacctgcgccatcgaagcgagacggacgcctactggggcacctatctcagcgtagagcaggcgatgagcaagatgcgtaagggagcgccgcctgagttccgtcgctggaccggcgatggaaagatcgcggtccagatccagggtggggtgtctcttgccgacgccgtggccggcaagagcaacttcattcgcatcaaactcaagcccatcgtcgttggtgaggatgggcgatcgaagcgccgcaacgttttggtccctggacggaagcagttgaagggcaagaccaacaccgacggcaaggtctaccagaagaaactaggtaatgctgtcgtctatctccgagttggtacgaccaagaacaagccggtgtgggccgccgttccgttcacctaccaccgtgacatcccttccgacgccgccatcaaatgggtctgtctgacccgtcggcgcatcggtacgcacttcgagtggcgtgtcgtgttctccatctccagggagcgcggctgggagcggccggacgcggccacctcaggagcggtcggaatcgacgctgggtggcgttacatgaaagatgacgggcgactgcgagtggcctacttcatgggagcggatggccacgagggagagcttgcccttcccggcgaatgggttacagaaatgaagaagacaagggacatcaagtctattcgtgataaggacctgaacgggatgaaggatggccttgtggccttcctcaaggaccgtgagcttcctgagtggctctgcaggctgaccggcaagtcctccctaccgacgccgacgagtgctgaggccaccgctcgcatcgcccaatggcgatcgcctgctaggttcgctggtctgatccgtcggtggcgagacaaccgctttgctggcgatgaggttgagtcgcctcagttgtccgactggtccaaggcgatgtacgggaagctgttgctggccggcgataaatcaggccgattcgcggcccgtaatcctagcgtcttcgatgtggtcgctgagtggcagcgtcgggaccgccacctctacgagtacgagacgaacctgcgcgatcaactccagaagcgccgcagcgatgtctaccgctgcttcgccaagtcgatctacacgcggtataagacgatcgtgctggaagacctcaagctcagcgagttccacaagctgcctaaggccgaagaccctaaggacaagctgaagaacagtatcagagacgcgtgcatcagtaatctgatgacttacatcaaggaagtgggccgcgacgttcaggtcatcgatcccagaaacacgacgaagacctgcgctgagtgcggccacaaggacaagtgggaagacaaggccgcgcagtctcacacttgctcccactgcggtgtgacgtgggaccgcgaccgaaacgcggccaagaatatcctcaaggccgcaatcatcagtgctcctgcgagcggcgtcgtggttgccgaaccggccatgaccgcttgctga

SEQ ID NO: 65525 - DNA, 35 bp, unknown
  Direct Repeat
ctaacaacgcctgcgatatggcttggtaatatcga

SEQ ID NO: 65526 - DNA, 35 bp, unknown; identical to SEQ ID NO: 65525
  Direct Repeat

SEQ ID NO: 65527 - DNA, 35 bp, unknown; identical to SEQ ID NO: 65525
  Direct Repeat

SEQ ID NO: 65528 - DNA, 35 bp, unknown; identical to SEQ ID NO: 65525
  Direct Repeat

SEQ ID NO: 65529 - DNA, 35 bp, unknown
  Direct Repeat
ctaacaacgcctgcgatatggctttgtagtatcga

SEQ ID NO: 65530 - DNA, 35 bp, unknown; identical to SEQ ID NO: 65525
  Direct Repeat

SEQ ID NO: 65531 - DNA, 35 bp, unknown; identical to SEQ ID NO: 65525
  Direct Repeat

SEQ ID NO: 65532 - DNA, 35 bp, unknown; identical to SEQ ID NO: 65525
  Direct Repeat

SEQ ID NO: 65533 - DNA, 35 bp, unknown; identical to SEQ ID NO: 65525
  Direct Repeat

SEQ ID NO: 65534 - DNA, 1986 bp, unknown
  TnpB Polynucleotide
atgccgaggaagaagaaggggaagacgagcaagctgccgagcgcgatctacaagtactggttgatgccacccttggaacaggatgctgtcgacgcagccttctgggcggctcggcgccactacaacaccctcatcgggatcgagatccgtcgccggcgcgcgtaccgcgagctgcgctctgccatgttcccggtgctcgcagcgctggaggtagcagagcatgagctcgtagtgcacctcgaggcggcgcggaaggtcttgaaggctgccaagtctcggaagcggagccgggccgtcgaccctgcagtccgagtcgaggtcaagactatccaggccgacctcaaggtcttgagagtgcggctccgggaggagcggcggcaagtcgagtcgccggcagccctcgacctcatcgaccggttgcgtgctctctcgaaagatgacgaggaagaggccaagagtctgcgcgagcagctcaaggaagagcgctcgacgactgcctttggtcgcgccgtccaggtcgttgacgacggggcgaacgaggaggtcaagaagctgcgtccgacgacgtactcggggacctacctgctcgtcgaagaggcagcgcgggcagcgtcgaaggggaagctcgaccctcggtacgacgacgctcctgctcacctcgccgagggccgcgtcggcgtgcacttctgcgggggtatcggggttgacgaggtcacgagcgggacgctcatgcagatcttccctatcccgatgttccgcacgaggctgtgtgacggcaagcagcacgcgcgcggcaaggcggcgcgcacgacgttgaagttccggatcgggtcggaggggacgcggcgaagtcccgtctgggccacgttccccatggtcatggacaggccgctgccagccgacgcgcgcatcaaggacgcctacgtcacgcgcaggcctcacgacgtccgcacgccctggcgctacgagctctgcgtggtggtcgaggccgcctcactccacagtagtcgtgctactgtagagcagacaggcacgacgtccgtcaactttggctggcgcaagctcgacgggggcgacctgcgggtggcgctggtgtcaagtccgcgcggggtagaggaagttaggctcccggcccgggtcgtcagcggcttcgagaagtgctcggctctgcagggtacgctctcgaccaacttcgacgctgtcaaggtggagctcgctgcttgggtcgccaagcacgcgagtagtctgcccgaggccttcctccacgagctcgagaccatgcccaagtggaagtcgcagcaccgactggcagaggtcgtctggtactggcgcgagcaccggctgcccggtgacgaggagatctggtcacgactctcgaacccgatgccgaagggagaagaccccaagagttggccgcacggttggctcgacaggtaccgtcacctgcagtgctgggtcgacaacgagcgccggtacctcctcgacttcaggctcgacttctaccgtcgtgaggccaagcggatctgcacgagcaccgcgtgcgtcgtcgtcgacacgttcaagatctccgacgtggctcgccgatctttgcccgaggaagtcgagaccgggggtcaggacgccaggaccaaccgagtcatcgcggctcccagtatcctgcgacgggagatcttgcgtgcttctgccaagtggcactgcacggtcgaggtggcgaagacggagaacggtactcgccgctgcaacgtctgcggggtgctggcgggtgctgccgtgcgcaagctcgttcacgcttgcgcttcctgcggtgctgtctgggatcaggacgtgaacaacaccgacaacctcgacgaggctcacgcgagcggcgaggtggtgaccatcgtccgtcctgccggggtggcggaagacgggaggatcgtcggggggaagacgacctctttcggagtcgctcgcgaggcggtgtctaagttactgaaaactgaatag

SEQ ID NO: 65535 - DNA, 31 bp, unknown
  Direct Repeat
agggggagcgcgacgccctgaacgttgcgag

SEQ ID NO: 65536 - DNA, 31 bp, unknown; identical to SEQ ID NO: 65535
  Direct Repeat

SEQ ID NO: 65537 - DNA, 31 bp, unknown; identical to SEQ ID NO: 65535
  Direct Repeat

SEQ ID NO: 65538 - DNA, 31 bp, unknown; identical to SEQ ID NO: 65535
  Direct Repeat

SEQ ID NO: 65539 - DNA, 31 bp, unknown; identical to SEQ ID NO: 65535
  Direct Repeat

SEQ ID NO: 65540 - DNA, 31 bp, unknown; identical to SEQ ID NO: 65535
  Direct Repeat

SEQ ID NO: 65541 - DNA, 31 bp, unknown; identical to SEQ ID NO: 65535
  Direct Repeat

SEQ ID NO: 65542 - DNA, 31 bp, unknown; identical to SEQ ID NO: 65535
  Direct Repeat

SEQ ID NO: 65543 - DNA, 31 bp, unknown; identical to SEQ ID NO: 65535
  Direct Repeat

SEQ ID NO: 65544 - DNA, 31 bp, unknown
  Direct Repeat
agggggagcgcgacgtcctgaacgttgcgag

SEQ ID NO: 65545 - DNA, 31 bp, unknown; identical to SEQ ID NO: 65544
  Direct Repeat

SEQ ID NO: 65546 - DNA, 31 bp, unknown
  Direct Repeat
agggggagcgcgacgctctgaacgttgcgag

SEQ ID NO: 65547 - DNA, 31 bp, unknown; identical to SEQ ID NO: 65544
  Direct Repeat

SEQ ID NO: 65548 - DNA, 31 bp, unknown
  Direct Repeat
agggggagcgcgacgccctgaacgttgtgag

SEQ ID NO: 65549 - DNA, 31 bp, unknown; identical to SEQ ID NO: 65535
  Direct Repeat

SEQ ID NO: 65550 - DNA, 31 bp, unknown; identical to SEQ ID NO: 65535
  Direct Repeat

SEQ ID NO: 65551 - DNA, 31 bp, unknown; identical to SEQ ID NO: 65535
  Direct Repeat

SEQ ID NO: 65552 - DNA, 31 bp, unknown; identical to SEQ ID NO: 65535
  Direct Repeat

SEQ ID NO: 65553 - DNA, 31 bp, unknown; identical to SEQ ID NO: 65535
  Direct Repeat

SEQ ID NO: 65554 - DNA, 31 bp, unknown
  Direct Repeat
agggggagcgcggcaccctgaacgtcgcgag

SEQ ID NO: 65555 - DNA, 25 bp, unknown
  Direct Repeat
ccggaggctcccgagccggaggctc

SEQ ID NO: 65556 - DNA, 25 bp, unknown
  Direct Repeat
ccggaggctcccgagccggaggctc

SEQ ID NO: 65557 - DNA, 28 bp, unknown
  Direct Repeat
gtcgaagactctgcgagtcgaagactct

SEQ ID NO: 65558 - DNA, 28 bp, unknown
  Direct Repeat
gtcgaagactctgcgagtcgaagactct

SEQ ID NO: 65559 - DNA, 1569 bp, unknown
  TnpB Polynucleotide
atgaccacccgtgcctacagctatggcgcgaaggctcccaccgagaacgcggaactcgtgcgccagcagctcatcctcgctcaccgctatgcgaaccggctcgtcgagatcgagcgcgagcgtcgagaagccagtctcaaggccaatgaagacgagcaagccctcgaggcgtgcgaggcgacggcggctgaggccatccgcagggcacgtggcgactcgggcctctactgggggacctacctgtgcgtcgaggatgccgcgcagcggagccgccgcacgagccgcgaggcccccaggtttcggcgctgggatgggtcgggcctcctcgcaacgcagctccaggggggcctggcagtcccggatctcctcgcgggcaccgacaggcgcgcgcagctcgtcggcgagggcaagcgtcgcctactccggctccgcgtgggctccaccgggcgagatccggtctgggctgcgttcccgacggtctaccaccgcgatctccctcctgaggcaaccgtcaaatgggcaaggatctgctgtcatcgcctgggcacgcataccaagtggtccgcgcagatcgtgctcgatggactgcccgaggtgacgctgccgagccccactcgaggcaccgtcgccatcgatgttggctggcggcgcttcgacgagggcgtacgggtagcgacctgggtcgatgacgaaggggagacgggcgagctgctcatgcctcacgagctcgtcgagcgctggcataaggtggaggatctcaggtcgatccgcgatacgaacttcaaccaggcaaaagatgagctgagagaatggcgtaggctcgagactctgccggactggctgcgcgagaccacgaaggccctgcacgcctggcgcgcgcctgcgaggctcgcagccctcgcccttcggtggaggtcgcagcgcttcgagggagacgagaccggattcgagctgctcgaggcctggcgggctcacgatcggcatctcctcgagtgggaggcgaatcagcgagagaacgtcctgcggtcgcgacgcgagcgataccggctcttcgcgcgcaagatggccacgtaccaccggatcgtcgtcgaaaagctcgatctccgggacttcgccgagctgcctccgaagccatccgaggaagacccgcgactgagggcgtcgcgaggccggcgcttcgctgcgagcctctccgagcttttggcctgtctggcagatgctgcggggcgtgctgggagtgaatggatcgaggcaccatcagcgtacacgacgcacacgtgctcgatctgcgggtcgctcgagaagttcgacgctgcggtcgaggtcgaacatagctgtggggagtgtggccaacgctgggatcaggatgaaaacgctgcgagaaacctcctgcgagcggcgaggtgcggcgagatcaaggggggccgctcgcgccagcaacgtgtcgagaagaaaggggaatccaaggcagacgcacggcgagcgaagggacttgcgacgagacgagcaaggcgctcgaaagtgaaggatgaaacgcctgaaacgactgaagaaaaatgaggggctgga

SEQ ID NO: 65560 - DNA, 1893 bp, unknown
  TnpB Polynucleotide
atgaagcgaaagacaagccctatccccaccaaggtctacaaatacggactcctcgcacccgtcgagaacgtcaagctcgttgaccacgccttctacctcggcggcaagttctacaacaaacttattgaaatagagcgcaccagccgaaacgagtaccgacaggagcgcgcacgccggttccccaaccacgacaaagtcgaaaagctcgtggctacactctcagaccaaaagaaaaaactgagcgaaatcatcaaagcctccaagatcgccaccaagtctcgcaatgtgccccctgaactggccacagaatacaaaaccctggccgcagcctacaaatccgcaaaactaaggcaagacgcagaacgcgaacaatgcaaaaaagatcgcgacttctccgcctggaccttaacccacaacgaaaagaaaaatgccctcgtagccgacgcccgaaaaaactccggcctcatgtggggcacctacaacgccatagcggcgagcgtgcagcaggccggggcaagcgcaatcctcgacccggagttcaaatcctaccgtggcgagggacgcatcgtcgtgcagatccagggaggcatatacctcgccgagctcggcagcgacacccagctccaaatcaatctacccaacctaaacgagagcctgacccgcggcgagtggcgccagagctccagaaccattgtcaaaatgcgcatcggaagcgacaaacacaagaaacccatctgggccaccttcccggctgtttttcatcgtcccctgccctccgatgcccgcatcatgagcgccaccatcaccaggcgacggctcggcgtcttccaatcctcaggacgctacgaataccacctgtgcatctcatgcgagtcgaccatgttcgacaacgaggctgtcaggccccgcctccaagatcccacacagcaaagagaagttcgagaacaccgcggaacatccaccatcaacttcggatggcgccaattcgatcagggcaaagacaagagactgcggatcgccatgaccaacaacgaggtcaccggactcgagcccctctggctccctcgggaaatcatcctaggtctccaaaaatgcgaaaacctgcgttcaatcatcgacatgaaattcaacgaggtcagagccctcctcaccacatggctcacaccccacaaacaagactgccccgcctggctcgccgaatccctccagttcctacacacctggaagcaacccgacaagctcgatcgagtcgtcgccaactggggatcgggcatgaggttcccagccgacgccgacatctacccggtcctcgccgagtggcgtaccaaacaccgtcacctcagcgagtggatgatgaggcaaaggcgcaaatcctacaaccatcgcgacgactactacctcaagacagccgcccgcctggcccaatcgtcctcacgcatggtcatcgaaaacttcacgatctcaaaagttgcagtgaaacccggcccagaagtcgaaaaaaccggcggtaacgaggctcgtcacaaccgcaccctcgccgccgtgagtgaactgcgctctgccctcatccacgcgtgctccaaacaccactgccccatggacatcaccccagcagtcaacaacaccaggcgctgcaacgtgtgtggcaaactgctcgattgggatcctgccatcaaagtcgatagacagtgcccagagtgctccaactgggatcaggacgtgaacgccaccgacaacaccaacgacaaggttgcgagcggcgatgtggtgacgatggttgtgcctgcaaaaacctcagaaaatggcgagtttgaggcgggaacgatcagcacttttggaagtgctcgaaagaggttgcacaacctagagaaaacattaacaattcaagagtaa

SEQ ID NO: 65561 - DNA, 36 bp, unknown
  Direct Repeat
gtaacaatgccagcccagaggcaaaggttctgggac

SEQ ID NO: 65562 - DNA, 36 bp, unknown; identical to SEQ ID NO: 65561
  Direct Repeat

SEQ ID NO: 65563 - DNA, 36 bp, unknown; identical to SEQ ID NO: 65561
  Direct Repeat

SEQ ID NO: 65564 - DNA, 36 bp, unknown; identical to SEQ ID NO: 65561
  Direct Repeat

SEQ ID NO: 65565 - DNA, 36 bp, unknown; identical to SEQ ID NO: 65561
  Direct Repeat

SEQ ID NO: 65566 - DNA, 1899 bp, unknown
  TnpB Polynucleotide
atgtcgatgctcgtctaccgctacggaatcgcggcgccacacgtcaacggcgacctggtgcgcgagcagatgcgcctcgctcaccgctaccgcaacgtcctgacggagatcgagcgtgggcgccgcgcagccgtgcgtgcggccgaggcccaggtgggcgacctggcggcggcgatgacggcggtcgagcaggcgcgcgccgcgcgcgaagccgccagcgacgccatcaccaagcagcgggcccgcacgcgttctcgcagcgagacggccgagcagcgggcgtcgctcaaggcagcgcgcgaggtcgagagggcagcgatcggcgtcttccgcgagatgcgccggcgcatcgccgagctgcccgatctcgtggccgagcgcgaccgcatcggcgagctggccaacgagctgcgccgcagcgcgcgcaagcactgcggggtgtcctggggcagttatctgttggtcgaggacgccgccggcgccgcgttctcggacacgccgatgtactcctcgggcgaggcgaccgacccgaggttcgcgcggtgggagggtggcggcaccgtgggtgtgcaactgcagggcggcctgcccgtagacgaggccctcggcggcaacgacacgcagctgcagatcacggcgcccgatccgcgggcgtgggaccgggacggcacccggcgctgcgaccggcggcggttcgcgcggcacggcgagctcgcgatccgcgtggcttccgagaagggccccgacgaccggcgccccaagccagtctgggccaagtggcgcctcgacatggatcgcccgctgccccctggggccctgatccagcggtgcgacgtgcacgtcagcccgcggggcccgtactgggagtggtacgtgacgatgacgctcaagatgcccgacggggtctacgctcgggaaggtaatctctgcgcgaccgttgggggcccggtggccgtcgatgtgggctggcgcgtcatcggtgacgagctgcgcgtggcgtgctggcgcgacgccaaaggcaacgccggcgagctgcggctggacgccaggacgatggcgatgctgcgggagccgagccagatccgcagcgagcgcgacctgcggttcgacgtcgcgaaggcgaagctcaagcggtggatcgacagccacggcgacgcgcctggctggctgctcgaggtggggcgcacgctgcacacctggcgctcgcagcagcgcatggccgccgtgtggatccgctggggcgactggctgcacgagcacgggggcccgcgcgacggctacgacgagatgaccagctggtaccatcgcgaccatcacgagtgggcgtgcgaggcgcgccggcgtctgcgcgcgctgcgccgccgccgcgaaatctaccgatgcttcgcggcggacatggcccgcaagtacgacgtgatcgtgctcgagaagttcgacaagagccagctagcccgccggcagccgaccgaggccgagaaggccgacaacgagaccgcgcgcggcaaccggacgctggccgcggtcagcgagctctgctcctgcctgacgctggccgctcgcgcgcggtgccgcggggccttcacggtgccggccgccgactcgacgcgcacgtgcggcgcatgcggcaaggtcgagagcttcgacgccgagcaggacgtcgccaaggtctgcggtggctgcggcgccgtggtcgaccaggacgacaacgccgccggcgtgctgctcgagcggtacatcgccgctccgggtgaagccaagagcctgctcggcaagcctgcagccgagagtggggcatccgcgtcagacggcgccccccccgatggggagacgcgctgggcccgcgcgaagcgcctgcgcgtcgagaaggaagccaggatcgccacgtccgccgcggagtga

SEQ ID NO: 65567 - DNA, 2133 bp, unknown
  TnpB Polynucleotide
atgactgagaaaccgccgaccaaaatctacacgtacgggctgcttcagccgacaaagaacggtcacgagttcagcaaaatgtgtcgtgcggctcacgactactacaacgctctgctcgaaatcgagcgaacgcggcaacgtgaggaagacgacttctgggccaagcgaggcgggtacgtcgatcttctcgatgagtttcgccagcttgaggccatgcggcctcgccgagacgacccgaaaagagaggaaatctttgcacgtcgtaaggaacttcgcaagaaattgtgggagctccgtgacgttacggttgatcgttcgctacctatcgaggacgcgaatcgtcgcaaccggcaccgcgagctcaaaaaagcggcgaaggcggagggtcggaacatcacagatgcggagatctccgcgagtctcgacaaggatccgtcttgcgtgtctccccgccgtcgggctcagcttgagtatacggaggaggcgaaggctcgtggggtcaacgtcagtggtcgggggctcaatcaatatttgagggaccggggtcttctcaaagtcacccagcccatcgatgaccgggcggctgaggatcagaagcgagctcgggatcacttcgagctctactatgggacctaccttctggtggagcctgcggcggagcaagcgattgagcggtctgagatgtttccggcgttcaagccctggcgtggtgaagttgggcgcgtcggcgctccggtgaacacgaacacggggatcagtgtggaggccatccacaactgcttcaacgaggatcccaagacaggggagcgcacctttagcgatggtgggaacacggttctgcagatcatccccatccgcaaggaggtgcgggagtcccgacgtgtgcgtgtgaagggagctccttcggcgcaccagcaagggatgaagttcctgaatcagacggtgatgcggatctgtgttcgctctgaaggtcgcgtgggcgctcagcgtatccctgtgtgggtggagttcccgatgcaataccatcgggacttgccgccgaatgcgaaggtcacggccgcgtgggtcattgcttcgcagcttgggacccgcaccgtgtacaagcttcaacttcaggtgcaggacgaggccttccggaatcccgtgaagccctgtggtcggtccaccatggccgtcaacctgggataccgctctaccgggcgcgtggcctatgccttgacgcaggatggacgctacgaggtgatggacgtcaaagaccgcgtcggcaagtgcatcgatgaagcggacgagctccgaagccttcgggatcgggatgccaaccgcatgcgcaacgacctgttcgagtggcgcgatgtggaagcctaccctcaatcgtttctggagggggacggggagaagtttgtcccccattggtcgggtgatgagaaacgtcgtcgctcggtcaaagttcggtcaatgaagacgaggatcgacggactcgttcacgcgagagacgatagcctaccgactcgactacgtgcgatctacgagacgtgggagcggatgcgcgagcaagggcttctgcggagtgtggacgaccgcatcttcaaagttttccgtgagtggtacatcgaagacaagaggagccaggacaaagaagctcaccagcggctcaacgcccatgggacgcgcgagctcgacatctacgcctgggctcaccggctctgtgatgaggcgtccctcattctggtggaggacacgaactacgccacaatgaagctgaaatcgaacaggaggcccaaggaggagcttcctgtggagatttcggtgagtatagctcggcgccgtgacatgtacgcgccggggcggatgcggaagattctggagcaggtggcggtcaagcgcggggtgaagatcgtgcgcttgtcgtcggtcggcctgacgcagcggcaccacaagtgcggcttcgacgagccctgggacgccatgcgttcgattcaacacaagtgcgagggctgcggggtcactttcgaccaagaccggaatttctgcgagggcttgttcgagcgctaccgtggcacgcttccagcggctcccgctcgcaaagcaggaaaaggtaaaaaatctcgtgatttacctgctgaggccgagtaa

SEQ ID NO: 65568 - DNA, 33 bp, unknown
  Direct Repeat
ggaacccctagtgtcctgggtggagaggacaac

SEQ ID NO: 65569 - DNA, 33 bp, unknown; identical to SEQ ID NO: 65568
  Direct Repeat

SEQ ID NO: 65570 - DNA, 33 bp, unknown; identical to SEQ ID NO: 65568
  Direct Repeat

SEQ ID NO: 65571 - DNA, 33 bp, unknown; identical to SEQ ID NO: 65568
  Direct Repeat

SEQ ID NO: 65572 - DNA, 33 bp, unknown
  Direct Repeat
aggaaccccagtgtcctgggtggagaggacaac

SEQ ID NO: 65573 - DNA, 33 bp, unknown
  Direct Repeat
gggaaccccagtgtcctgggtggagaggacaac

SEQ ID NO: 65574 - DNA, 33 bp, unknown; identical to SEQ ID NO: 65568
  Direct Repeat

SEQ ID NO: 65575 - DNA, 33 bp, unknown
  Direct Repeat
ggaacccctagtgtcctgggtgaaaaggacaac

SEQ ID NO: 65576 - DNA, 33 bp, unknown
  Direct Repeat
gaacctcctagtgtcctggggcgaagaggacaa

SEQ ID NO: 65577 - DNA, 1971 bp, unknown
  TnpB Polynucleotide
atgatcgtttacaagtaccggctcgctgcacctcacgaagggggcgacattgtgctcgcgcaaatgcgactcgcacacatctacagaaacacgctcaccgagatcgagaacggtcgacgaacagccgttcgcacggcagaggagtcatttggtacgctagccgttctggcagcagctctacgtaaaaccgaagacgaactcacccaagcgctcaccgagctagggcgaactcgggccagcgtacgtcgtcgaggcgagaccgcaacgcagacggagcgcgtgagagcggctcgcgcagagaaacgcgtcgcagccaaagctttccgagacgagcgggcgcggctgagcgcgtgttgcgccaactgtcgaaaagtagacgtagaggcgccgtgcgcgcacgcgacgcccgatgcgctgctgctcctcgtcgagtacgaccgtattgccgagctggctggagagcttcagcgatcggctcgcgcacactgcgggctcggggagaaggggccattcttcggcgcgtggggtacctacgtgctcgtcgaggcagcagccaagcaagcgttcaagacgacaccgatctacacgttcgacgggcagccccagaacgtgcgctacgtacgctgggatggtgccggggaggtcggcgtgcagattcagggcggcgattccatcgagtcggtaacatcaggaggacagtggcgaatcacgatcgacgtgccttcaggtgagcctcgacccggcgagccatgggtaatggcgccaagacagattcgcaaggaagcctcgcgccacggaacactctcgatgaacctcggaaacaacgcggcaggcgatcagttctcggggcaatggcggctcgacatgtttcgccgaccgctgccggcgggaagcatcatcaagcgcgctacggtccaccgcgttcgcgtggggccaatcttccgatggtacttgaccgtcacgctcgacaacgtacccggcatcgcctgcaccccaagcgagtcgacgctcgcgatcgacgtcggatggcgtgtcatgggtgacgagatccgtgtcgcgacctggcgaactcacaccgacgagacgggcgagcttcggctatcggcacaagacatccgactactccgcgcgcctcaagagatccgaagcgcgcgagacgcccggttcgaggatctcaagctccggctaggaacctggctcgcgcgaggacagatccccgattggcttgtgacggcgaccgagtcactcggtttttggcgttcgccgaaacgtgcagtcgcgctcttgaggcagtggcgcgatcaccgtttcgcaagcgacgagatcctcttctgtgcactccaagcgttttgcgaggtcgattggcacaaatgggctgaagaagctgtctggcgcgagaaggcacttctccgacgtcgagagaagtaccggatcttcgcagccgagatggcggagcgtcacgtgcgacttgtgctcgaagccgatgacaagaagaagaaagtcttcgacatgcgcccgctcgtggtcacaccagacaccgagttggcggcacagaatacggttgcgcgaagcaatcgcttcctcgtagcgatatacgagcttcgtggcagcctcctgaacgcgttccgtcggcgcggacgcgagatcgttttgatcccagcgcgtgacacgacgcgtacctgcaacgtgtgcggggtcgtcgaggcgcgcaacgctgcggctgccgtcgtcttgagctgtggcggttgcggggcggtgtgggaccaagacgacaacgcatgcctgaacctgcttcgtgggttcgagcggggcggtggcgaccaaacccccgagggcgctcgtgaggatgaggacaccaacgaaaacgagcaggtaaccgaagaccactgggcgaaagcccgacgacaaggcaaggcgaggaagcgtcgacaagggagcgctcgcaaagcgacagacaaagccgcagaatga

SEQ ID NO: 65578 - DNA, 36 bp, unknown
  Direct Repeat
tgtggagaacgaaactcgatcgtcctcagatcgagg

SEQ ID NO: 65579 - DNA, 36 bp, unknown
  Direct Repeat
cgtggagaacgaaactcgatcgtcctcagatcgagg

SEQ ID NO: 65580 - DNA, 36 bp, unknown
  Direct Repeat
cgtggagaacgaaactcgatcgtcttcagatcgagg

SEQ ID NO: 65581 - DNA, 36 bp, unknown; identical to SEQ ID NO: 65579
  Direct Repeat

SEQ ID NO: 65582 - DNA, 2550 bp, Actinomadura sp.
atggatcaagccaaatcccgcccgaccaggacgaccgtgttccggtacgcggtcatcaagggggacctgcccccgcaggtcctcgacgagctgcgtcgggcgcacaactgcaagaacgcgctcgtcgagatcgagaagcggtacgaggacaagatcgccgccgtcttcgcgtcccacccggagatcgccgccgcgatggcggtcgtggccgacgccgaagaggagctgggggaagtgctccgggaggctggcgccgagcggcagcggcggcacagctcggagaacaccccccagaccacgcaggcgatccgggacgcccgtacccggctccgcgcggcgaaggacgagatgaagaagatccggcggcagtacacgccgggcctcaagccgcagctccgcgcggtcgaggccgcgcgcaaggaggagctcaaggccgcctacccggcgtcggggcaggcgggcttgtactgggcctcgtacaacgaggcccgcgccaacttcgacaccgccgtgcaggcggtccagcgggaccgccgcgcgggcaagcccgccggtctccggttccggccgtgggacggccgggggacgatcgccgtgcagctccagcgcgccagcgggggtcgcgtcaagctcacctggtcggtgaaggtgcgtccgctcgacgacggcgggaagccggagctgccggaggtcccggtcgagctggtcacggacggggacgtgaaggccacgctctcctccaaggagatcgaggacggcgtccgcctctacaccgccgagatcacgaaccgggggcccgagaccgcacaggtgcggtggacggccgacctggaggcgctgctgaagtacgccgactacggggccgacgcggaggtggcctactccgacgcgctggaggaccacgtcggggcgggcaacctgctggacggactcaaggacgccgagggtgccggggccccggcgtccctggtctgggaggccgcgctgccgggcggcgacgagtaccgggggccggtggtgctgcgctcggaagaggggaagtggcgcaacgccgcccgcatcctcccctcgttcgtcctcgccgacgacacggaccggcgcaccctgcaccagggcaagaaggccgagctggacggcgtgatcgagatgcggatcgggtccaccgcctaccgggacgacatcggggagtcggtgaccgcctcggtccggacctggctcaccggcggcggaaccgacctcatctggcacctcgccaaggacgtgaagctggccggccgcgcggagaaggtactggagtgcctcgccgaccacgccgacaccatccgcgacgggggcaagacctacgggggtatgtcccgcgcgcaggcggtcaaggcgagcaagctctcctcggaggacgcagaagaggcgatccgcgtcctcgtgcgggccgggaagatccgggacctgagccgcaagctgctgctggtcggcgtgacctaccaggaccacgtgcggctccccgtggtgctccaccggcccctgcccgagggcgcggacgtgtccatgctgctgctgacccggcacaagaccggcccccactacaaggcgcacatcagcgtcgtcgcggacgtgcccgcacccgacccccacaccgaaggcgcgctcactgccctgcacatcggctggcggcgcctgggggacggagcgatccgcgccggggtcgtggtcggcctgccgcgcgacaccgaggtctcgccggagatccgcgactgggtccgggtgcatgaggactgggccgagatcgtgctccccgccaactggcgggaatcgtgggcgcactacgacaagctccagtcgcagcgggacctgaacatggaggacctgcgcggctggctgaccgagcggttcgagcagtacccgtggctccgcgagcacctcgacccctcgaactcgctgagccggtggcgctcgcccgagcggttcatcgacatggccgggtcgatgtggatccgccccgaggacggcggccagtggaagatcgcccccgtcccggaagtggagggcgcgaaccggaccgtctgggggaacgtggccatgcacgtggaggcgtggcgcaagcaggacaagcacctgtggacctggctggccagcggccgccagaagctcatcggccgccgccagagcgcctaccgggtgatcgccgcctggctgaccagggacgccgccgtggtcgctgtggacgcctgggacatcaaggcgacctcccgcaccccgcgcccggagtccggggagaacacgaagcaggcgcagatcgcccgcgcgaaccgcaccctggccagccccggcatcctccgcgactccctccgggacgccgccaatgcgcgggggatccgggtcgaggtgccggagctgcccggccccaccaagcacctcggctgcgggggcgtgttcgacccggacgagcgggccgcgggggtcatggtctgctgcccgacgtgcgacaagatggtcgaccaggacgtgatgtccgcgcgtgcgctgctcgaagcggccaaggccggccagtag

SEQ ID NO: 65583 - DNA, 23 bp, Actinomadura sp.
gccgggggcttcgtgcccggcga

SEQ ID NO: 65584 - DNA, 23 bp, Actinomadura sp.
gccgggggcttcgtgcccgcgag

SEQ ID NO: 65585 - DNA, 28 bp, Actinomadura sp.
gcccgcgcgggggcttcgtacccgcgac

SEQ ID NO: 65586 - DNA, 28 bp, Actinomadura sp.
gcccgcgcgggggcttcgtgcccgcgac

SEQ ID NO: 65587 - DNA, 2121 bp, unknown
  TnpB Polynucleotide
gtgtctgcaaccacgaagacggatgcggcttcctccacgcccgcgcagaggctttgtatccgcgccccgtcttcaagcagcaactcacgcccgcacagaggcttcgtttctgttaccgacccgcccaccacctcgaacgcccgtgcggaggcttcgtgtccgcgaccaggatctcctttcccaccacctagcccccctaagagttacgccatgagaaacaaaatgcagggagacggtcgcgtcttcaaatacggcgcccggcctccgacctccaacctggacggcgtccaggagcaattccagcgagcgcacgtctaccggaacaagcgctgcgagatcgagctcgagcgtcgcgccgaggccgacgagctgctcgcgaggctctcgcccgagctgctcgcggtcgaggacttgatcggggccgcgagcagcaaagccgaccccgactcgggggctcccgcggaggccggctggggggtgatcggggagatcgagcgcctcgagtcggcggtcaaacgccttcggaaggcgaagcgctcgaagaacgtcaaggatccaaccttgagcgaggcgctcaaggttgctcgcgcctcgcgcaaggcgctttacgcctcgcgcaaggcgatccgggcggagctgttcgcagaccccgcctggatcgaagcgtatgcgctgatcgaagccaaagaggacgtcgcgcgaaaggcggcccgcgccctgaatggcctctattggggcacaggcggggccgtggacgacgcatgcaagagcatgcgcaagggctcgccccccaagtttcggccctggtcgtgtcgcaaggacaagatcgaggtccaagtcccgggcggcatgagcgtggcgaaactcctctcggggacctccacgcaggcgaagctcgtagtctcgcaccgaccttcggcgatccctgggtccaagcgtgccgcagggcgcctccagggatcgctgagcctgcgaatcggctcgcaggccgactcgtcacggtccgcgatctgggcggagatccccttcgtctatcaccggcccctcccgcctgacgccgtcgtcaagcgggtcttctgcacccgcagaaacctgggctgccaggacgtgtggtcggtccagtttgtcctcagcgccgagaagggcgcgtggaccaagcccgacctggcctccaatggccgcgttggagtcgacgtcggctggcgacgcatgtcagacgggcgactgcgcgtcgcggtctgggccggttcagacggcgccgagggcgagctcgcgctcccggcgcgctggtgtgcagaaatggagaaggtcaagcggatccagagcgagcgcgatcgactcctcgacgcgatccggcccttcgttttcgagtgggtcaaggcgctcgaggcccagggtcgcgtgcccccacggcgggacgggaagcccgtgtccacgggcctttctcacacgcggtcccaggcccgggtgcggagcttgacccgcgcgctcgccgacaagggagaagccgtgcctgccgagatcgaggcttggcggctgcgcgagcggcacctcctcgactacgaggcccacacgcgcacccagctccaagcgagccgcaaggacctctaccggcgcttcgccgcccgcatgacccggacctacagggagattcggatcgagaagctcgacctgcgcgagtttcacgttctcccgcttgtcgaggaggggcagaccgcgaaggcagaccgcatgaagcgcaacgcgcgcaacgcctgtctctcgagcctgatcgagtcgctcaaaggccgcggggcggacgtgagcgcagttgaagcggcggagacgaccacgcgctgtcacgcttgcgggtcggtcgacagcgagtggacggaccacctcctcctcctgcatacctgctcggcgtgcggcctgcggtgggaccaggacgtaaacgcagccaggaacattctcggcgccggcccggacggcggctgggtgcgtgagccctacgcccctggcgacctcatgacctacacgacgaccggaccgaaccgagccgaacggcgggcggcaagcgccgcggcgagggagaacgccgcgcacgaggccggcgccctggtcgagctcgccagaagttga

SEQ ID NO: 65588 - DNA, 32 bp, unknown
  Direct Repeat
gtcgcagacacgaagcctctgcgcaggcgttg

SEQ ID NO: 65589 - DNA, 28 bp, unknown
  Direct Repeat
acgcccgcgcagaggctttgtatccgcg

SEQ ID NO: 65590 - DNA, 35 bp, unknown
  Direct Repeat
cgaccacgcctgcgcagaggcttcctgtctgcgac

SEQ ID NO: 65591 - DNA, 1707 bp, unknown
  TnpB Polynucleotide
atgtacactaccatcaagtacggcgtcctggcggtaacctccggcgtccccgagatggaggcgcagaacgacctccggcagcggtactggaaccggctggttgaggtggagcaatccttctgggaacggcatgaccagattgtagattcgatggcgccggacctggaaccgcttcagaaaacctacgagaacgccaaagaacggctggcccaactgcgtcaggacggtcgagacacccgcaagataacccgaagccgcacgattcccgaggcgctaacctctgcgatcaaggctgctcaggaaaccgccaaactggccctggccgactacaaggtggaacgggccaaggtataccaggacccagacgcgctggaccggctcaaggaactggacacctggcgcaccgcccaggtgcgggaggcgcgacacaactgtgaactttactggggcaactacatggacctggaggccttctaccaggtggcccgccgcaagaagggccggcagctcaagttccaccggcacacccgcgaccggggcgccgccgccgtattcatgaccgagggcctggacaccgaccgcgccttcggagatgggccggatgacagccggttcaaactcgatccggtcgatccccgggcctggggggcaacccccaggtccatacgcaagcggtactggcgcaccacgctgcatatcagggtgggcagcgtccaacgccacccggtctacgccaccgctcagatcgtggctcaccggcccctaccgcgaggcctggtccgccacgccgtcctgacctgggagacgctggcgggacgccgccggtacaacctgatgattacggtagacgctcccgaactgccgacggtgcaggaaggactggagaaccggcccagagtcggcattgacctgggatggcgcaagatcgaggatcgggtgcgggttgcggtcctggcctgggacaacggccagaccgaggaaatctctctgccggcggcaatcatcagcgcgtaccggaagatggacgacctcaagagcattgccgacacgcacttcaacaccttcaagctccggctaggtaccgtcctggaccagatggcggcggagaaaccactgcccatctggctggcggaggcgcacgaaacgctggcgcggtggcggagccggcggcgtctgctggcgctggccgaagagtggggggaacaccggctggacggcgacgagacgatcttcgcggaactggaggtctggcgcaagagggagaaggttctgtggcaatgggaaattaacggcagagacaagctcaccaagcggcggttggacctctaccgcaacattgcctacagggtggcgaccacggcgggagccgtagcgattgaggaattcaacatttcgcaagtgattaccaaccctgacaccgagaccgccgccaactattaccgcagcatggccgcctgctccgagttccggcgcgtgatggaaagcacctgcgcccgcctgagcgttccagtaaccaggttcgacggggcctggaccacccagacctgctctgagtgcaaaaacccggtcttattcaacagcaagctggaactgttggccgactgtcccacctgcaaccagcggtgggaccaggacgaaaacgccgcccggaacctgttacggttcctggaggacccgacaccgattacgccaatcccggtggcttga

SEQ ID NO: 65592 - DNA, 23 bp, unknown
  Direct Repeat
caatgcccttcccgggggcttga

SEQ ID NO: 65593 - DNA, 23 bp, unknown
  Direct Repeat
caatgccctgcccgggggcttga

SEQ ID NO: 65594 - DNA, 21 bp, unknown
  Direct Repeat
gccgccggtgccgccggtgcc

SEQ ID NO: 65595 - DNA, 2172 bp, unknown
  TnpB Polynucleotide
atgaacgactcgaccaaggcgcccggggcgcggatctggagtttcggggggcggacgccgactgcgggcggcgacaccctgcgccgccagctgcggctcgcgcatcactactacaacaagctcgtcaccctgaagctggagcgactgcaggacttccgcgacgcgcggggggagctgcgcgatctgacgccgctggtcgagcgcgtggacgcgctgaccggacgcatcgacgctatcgccaagatcttggcgtcgacccggaagaagaagaaaggcgtgccggtgccggtgccgccgtcgatcgacgtcgaggcgctgcgcgcagagcagcgcgcgctcagccaggagcgcaaagacttgcgcggcgaactcgcgcgcgagcggaaggagctgaacctgctcttcgcgcccggcgacgaggaactccgcctgcgcgtttgcaacgccgtgctggctgcgggcttcccgccgatcctgaagatcgacggatctttcgagcgcttcgcgcccgcggccgtagctcagctacggccggccatcgtggaggagatgctgaacgagccgcagtggtccgaggcgtggaagcggcacatccgaggcgaccggggctgtctggacgcgagcaagcaggcgcgcgcggcgagcggtctgacgaagggcacctacgtgctgacggaagacgccgtcgcagcggccttcaggccgaacccgatgcggaagggcgacccagagccgagaaagcactttgggggtactggtcgcgtgggactccaggtcccgtgccttcccgtgtcggctctgttcgacggtacctaccagccgctgcagatccgctggacggatcaggagcgggggcgggcgaccgctcgcatggcgatcgagcgcgggccgagaggggtcatctacgtcgagctgccggtgctctttcaccgagaactgccccccgatggcgaggtccgctgggcctggatcctggtgcggcgcgtggggccgcatttcgagtaccgcttgcagctcacgatccgctcgcgggagtgggagctgcgcccgaagggtaccggtgtggtggcgatcgatctgggatggcggaagcaagacggatccggcacccccaacgggctgcgggtcggctacgcgatcgatgatcgcggcgcggcgcgcgagttcttggtcccgcaggcagtgatcgatgcgcaagcgaaggcctccgccctccgtgggcacgcggacgaccacttcaacgtggcgctggcgaccgtgttgcagtgggcgcgagaacacggcgagctgacgacgcggatcgtgctgccggtgcgcgcagcgccgccgcacatggatccgcacacccccgccccggtgacggctccgcgagagccgacggagacgcttcggcaggtgctgacgcacgcgcacctgtggaagcacaagggcaagctcgctggcctgacgcttcgcctggtcgagcatgtgttcgcggatcgcgagcaggtctccgacctgtggggcgagtggaagcgcgagcgactcgtaggaggcctcgatctattcgatctccccagcgtgatctggccgtgggccgctgcgcgcgggctgaccgacgagcaacgactcacgctgtacctcgacttctggcgccgcaagaaccgccacctgtacgagtggcagactcacctgtcgacccgcgccaggcggaggcgggacgacctcttcgcggtgtgggcgcgcgaactggcccggcagtacgacacgatcgtcgtggaggacttcgacttgcgcaagttcagcaagcgcaaaccgaagcaggaagaggaccacggcaccgcaatgcgccgcacgcgcgcgacggccgcgcctggagtgctgcgcgacaagctcgtagcggcaacaggaaagcgcgtgaaaaaggtgccatgcgagtacagcacgcgagagtgcaggcgctgccaccacgtcaactctgactggcaggatccggcgaagctggtgcagcagtgcggcgggtgcggggagtcgtgggaccaggacgagaacgcggcgtacattctgcgcgaccgctgggcgtccggacagtctcccgcgccggaaggcgcaccgaaggctcccgtgaaggccaagctgaaagcgcggcgagtgacacgtgatgcggtgtcactcgtccctcccgcggagtga

SEQ ID NO: 65596 - DNA, 2055 bp, unknown
  TnpB Polynucleotide
atgaagcgtaagacgagtgagtttccgacccgcatcatgacgttcgggtgtctgccgccggacgtcggcggcgccgagttttccgagcaactactgctcgcgcatcgctaccgcaacaaactcgtcgagatcgaccgggcgcggcgcaacaagttccgagggatccgcgccaagtatgcaccccgactggtcgagatcgaggccgcgctcgaggcgctcaacgccaagatggacgaggcgtacgcactctcgaagcagcgcggatggctggagcagcagatccgtgaggcaaagcgcgcgcgtgacaagctcctggccgaggccaagcgggcacagacgatcccgtttgcgcccatcgaagaggccaacaagaccatcgaagcgatgctggcgcgcctcgcggctgccaacgaggccaaggccgacgcggacaccctcaaagcagcgcgcaagctgcttggtgccgaggccaaggaggagcgtgcgcggtacctcgatttactccagcctgctcaggctgaatttcggcgcagagttgactcacacggcaaggtcggtcccagaaccaccgagcggctcaacatgacgattcgatctgccatgctcgaagagcccgagtggtccgaggcctggaaggaaactgcgcggagcgaggagttgtttctcgagatggcgaaaaaagcgcgggccgagtgcggtgtcagtccggggacgtacttgctcgtggagtcggccatggaggcctccaagagggccgccctgggcgacgtgcggttcgtggcatacaacggcgaggggcgcatcggggtgcagttgaagcacacgagcatcgccgggatccgtgagggggagagtaactttctgcggctggaggctgcgcgtgccccgaccaagcccggcgtgacgcatcgcccggacatctaccagcgcgtatggatccgtgttgccaccagcgcggatcgtaagccggtgtgggccgagttaccggtcaagatccatcgcggcatcccagccgacgcgcagatcaagtgggcctggatcctcgtacgccgccagggtcctcggcggatctactcgctgcaactgacgatcgagagtgccaccgcgctcgtctccgtgcgctgcggcgacggcagcgttgccatgaacctcggctggcgcaagaccgaccaagggctgcgtgtcggctactgcgtgggctcggacggcaccgagcagtcgatcgaatgcgacgccaagagcctggagttgtttgccttctgtgactcgctgcgctccatctccgatcggcatttcgacgcgacgcgcgccgaggtcaaacagtggcgcgaagccagcggacgcctcaccgagcccgagtggctgaacgacgcactcgagttcatgtcgcactggcggagccaccgcaagctggcccgcgtggcccgcaactgggtggcggaggcgatcgagcccgacctgttgcgctcactttggacagcgtggcgcacggagcggatcggcgcgaagttggacctgttttgtccgctcgaagagtttgaggggtgggcgccggtgcgagcactggatccgtccgagcggtttgcgctgtggctcgaatggtggcgtcgcaaggacgaccatctctgggcctgggaggccaacgagcgccagcacgcaatacggcgccgcaaacaggcctaccgtctgaccgcaatcgatcttgcgaagcgctacaacacgatcgtcattgacgacacggacctccgcaaaatggctgacctgagcaaggccggcggcgaactgcctgaagtggcgcgccatcagcggatgatggccgcgccgagcgaactcaaggcacagttgctcgaggtcttcggtaaagatcgtgcgaccaaggtgccagcgaaggacaacacggcgttgcacgctggttgcggtgggcgcatgtcggaggagcccagcatgttgcacctgcgctgcacgacctgcggcgcagtcgcagatcgtgacgcgaacaactgcgagaatctgctgattcgcagcggattttccccgaagcggcgcgtcggataa

SEQ ID NO: 65597 - DNA, 35 bp, unknown
  Direct Repeat
gcttcaacgccatccgaacggcggcgagagtcgga

SEQ ID NO: 65598 - DNA, 35 bp, unknown; identical to SEQ ID NO: 65597
  Direct Repeat

SEQ ID NO: 65599 - DNA, 35 bp, unknown; identical to SEQ ID NO: 65597
  Direct Repeat

SEQ ID NO: 65600 - DNA, 1704 bp, unknown
  TnpB Polynucleotide
atgaataaggtatctatcactaaagtatttaaataccgctgttttgagccagttgaaggattagcattatttgatgaagctcttgataatcgtcatacgttgtggaataaattagttgaaattgatagggattttagagaaaaaagtactcaaattattacgcctattaaaagtgattatcaagttcttgatcaagaaattaaaaatttacaagattctattaaagctattaagcgtaaaactagatcaactgcaaaggaagaaacacgtaacattcaggatacaattaaagaactaaaagtgaagcgtaaagaagcctatcaagaatttaaacgattaaaacatgaagctattgaacgtgaaaaaccgcttcttgattgtcttaataatgaacgtaaagaaaaagttaaacaattgcgttctgaaagtggattacatggctttaattttgacgatgtaattcataatatatatgatgttgctcgtattaaagcgatgaaacaaggtactttattacaattcaaacgatactcaaaaaatggaaagattgctgttagaccctattcaagttcccctttatatggttctgatattcatagagttaacacaatcttttatatagaaccagtaaatcaagaactatataatagccctattagaggggttagaaaaaaagctagtgtaacacgatgtcacattcgtgtgggttctgctgataaaggaaaacctatttttgttacattgccgatggtatatcatcgtcctttacctatggatgggaaaatcaatgctattaatgttaagcgtcactatattgatcacaaacctatttatgaatgccttattaccgtaacctatgctatagaagctcctactattaatcctaattcatgtgtggccgtagatttaggatggcgcatgactaaggatggattacgtgctgcatatgcaactgatacagatgacaagacgattgaatgtatcgttacacaacgtcaattgaatgagtttgataccatttgtggtttatcatctactcgtcaaaaacatcttaatgattgtattcatgttataaaagcttggatggctaataaaaatttacctgattggctaactgatgcagtagcctatatagataaatggaagtcatacactcatatatttgatttacatagtgcttttttacaacataaaaaaagcggaaatcaagaaattgtatcgtacttagaagcctatatagaaagagaaaatcatttacgaacttggcaatctaatttacaaaatcaagttattgctagaagaaactatgaatatcaaaattttgcagctaaattggctaatatgtatgatgtattagtattagaaaaactatctattactaatattgttaaacatcaaaaagcgattattggtagtcaacaatctacagcggtagatcgtaaccgtactattgtggctccttatgtattgaaaacaattttaatcaatgcatttagaagcaggggaaaacagttcgttgaggtgaatgcaagttattctactaaagtttgtcatcattgtggtgcattagaagaagttcatcaatcttctattatgcatacgtgtacacaatgtcatactgtttgggatcaagattataatgcgtgtattaatcttctagctctatataatcatgataataaaggaggtgtttcttgtgtatga

SEQ ID NO: 65601 - DNA, 25 bp, unknown
  Direct Repeat
agtgagtttagcacatctctaaaac

SEQ ID NO: 65602 - DNA, 25 bp, unknown
  Direct Repeat
agtgagtttagcacatttctaaaac

SEQ ID NO: 65603 - DNA, 25 bp, unknown
  Direct Repeat
agtgagtttagcacatctctaaaac

SEQ ID NO: 65604 - DNA, 25 bp, unknown
  Direct Repeat
agtgagtttagcacatttctaaaac

SEQ ID NO: 65605 - DNA, 1623 bp, unknown
  TnpB Polynucleotide
gtgaagcgatccacgtacgacggtgccaccgccgtctaccgatacggctgcccgtcgtgggcggacctgcccgacgaggcgctccgccaactgcgactcggccacgatctctacaacgaactcgtcgcgatcgaccggcgctacgaggcaatgaaggccgcgctgtggctgtcgttccctcgcgttgccgcggcccaggccgctgtcgacgccgccaaccagaccatcgagcaggtcaccgccgacgcgctcgccgaacgccagaacgcgcgcaccaccgtggccagccgcgatatcaaggcccggctcgccgccgcccgcggtgatcgtagagccgcccgcgaccaactcaaggtcatcaaggctgatctgaagccgcagatggacgccgtccgtgccgaactcgacgaggcacgccgccacgccgaaggcaaggccaacctgtacgcggacttcgtcaaaacccgcgggctcggctggggcacctacaacgacaccatcgacaagttccgtgctgcccgtagccgcgttcgcgaagcctggaaggccggccagcccgcggagctggcattcaggcgctggaccggcgaaggaaccctgaccgtgcaagtacggtccaccagcggcgcgttgcgccccctgtgggcgctcgaacccggcaggccggccagcgactggctcggaaagctacggcgggtcaacgagcgcatcagcgaccggacccggaccctgcggctgcagattggccggacccgcgggctcggaccgtactggctcgagctgccggtcgtccagcaccggcatctaccggaagatgcggaggttcgttacgtgcgggtcacccgcacccggacggcaggccagcaccggttgcacgtcaccctgaccgcccgcacgacgtcgccggcgaagaagaccaccggcgaggcagtcgacgtcgatctgcgttggacgtccggcggcccgaccggcggcgtgcgcgtagcccgggtctccaccgcatccggcaacctgcccgcaccgccggacgaggttgccgcgcacgtcaccagcggcgacttcgctgagctgtgggcgcccgccgcctggcgggacctgctcggccgcgacgacgcgatccgtgccgaccgtgccgaactgctcaacgagctccgcccggccgtcgtcgaggcgctgaccgaagcttccgacctggccgaacaggtcgggtgcaccgcggcgcaggccagggtgatgaagttcgcgaagtacgaccagctggcgacagcctggccgaccgaccatccgctggccgcgaagctcgtcgcatggcgcagtcgtgaccggcacctgtgggagtacgaggctcacgagcggcagcagaccatcgcgaaacgccgcgacctgtaccgcaaagccgccgcgtggctgtgcgacgctgcccgcatcatcgccatccgcgacatcgacattgccgcactgcggcgcaccgcagccgtcggcaacgaagacaccccccaagcgcggcacggccgcaagcagatgcagtacgcggcaccgggtgagttccgagccgcgctcatcaacgctgccgaacgccgcggcgtgcaggtcgtctactacaccactggaggcggagcatga

SEQ ID NO: 65606 - DNA, 31 bp, unknown
  Direct Repeat
aatgccagcgcgggggcttcgtacctgcgac

SEQ ID NO: 65607 - DNA, 1926 bp, unknown
  TnpB Polynucleotide
atggaggtcattgtgagcacgatcgttttccaagatgggctactagctccgacagtaggagcagacatcgtacgagatcagctgcgcctggctaaccgataccgcaacgacctgacgaggtgggtgcgtgccaggcgtgacgccgagcgcgagctgcaactccgagccggcatggatgttgaaatgcaggccatgctcgcagctaaggagcagcttgggctggcgctcgacgccattcgcgcgtcccgcaagaagtctcgtagccggagcgagtcagatgaaatgaaggctactgccaagtctgcacgcgctttggtgaaggaggccaggaaggccctggctctgcggcgcgaagccgtgcgccccatgattcaggctgagcgtgacaggctgcacgagcggtggctgttcatccgacgcgctctgcgcgagtggagcgggcttcgccacggcacctacatcgccgtggaagcgtcgctggaccaggcgtgcgctgagacgccactatgggacgagggggaacccaacgatccgagcttcgttaggtgggacggagaggggcagatcggcgtgcagctgcagggaggaagggctttggcccaggtattcggcgatgacacgtttctgcggatcagccgagtgccggacaagttcgccgagcgcggacgcgatggccgcggcggtggacgcagaaggccacagtttgctgagctgtggatgcgcgttggatccgacgatgatcgcgcgccagtatgggcgaagtggccaatgaagatgcaccgacagatccctgatggctcccgcgtcaagcgtgcgatggtcagcgtgcggcgctgcgggccacgcgagctatggaccgtcgagctgacggtggatcttccagacaactacaggtacgagccgtgcggctctggcaccgtcgccatcgatgtgggatggcgcgtcatgggcccaggtgacctgcgggtcgctgcttggcacgacgacagtggccgtagcggaacgctgcgactgacgcgaccatggatcgacgctctcagaaagcctcagtcgctgcgcagcgtgcgcgatgagaaactcaacgccatccttcctaggctgtgcgcctggatgcgagagcgcctcgacgctctgccagattggctgctgcgctcgacggttggccgacgtgacgcccttcctagcccagcgcaggctgtcgcctggatcggccagtggcgctcacatgcgaggctcgcttcgctcgagcgcacatggcagaagaataggtggaccggagacaagatgggctacaccatgctcgccggatggcgctaccgcgaccatcacctttgggagtgggagtcggctcagcgtcgcaagtctcttctccgacggcgtgacctgtaccgcgtgtggtccgccaagctagcgcgcaagtacggcacgatcatcgtcgaagactttgaccgtcgtcgcgtctctcgcacgccagagccagatgaggatcctggcaaccagaaggcgatgagcaatcgtcagctctcgtgcaccagcgagcttagctcgtgcatcaagaatgctgcatcgtcccgaggagccgtgcacgagaagctaaatccggctgacacgacgcgagagtgtccgtgggaagactgcggatacatcgaaaaatgggacgcagccgctagcgtcgaccgagtcccgccgtgccccaagtgtaaccgcacgtgggaccaggatgatggggctgcgatcgtactgctgcgtaggtggtcgcgcgagcgctccggtgggtcgcaagatccagctggtgctcgcgacgaagcaaacgacaacggatccaacgggaaaggcgaaacgaagtgggtgcgcgtggcgcgccaaagggcagaaaaggtggcaaggatggacgccgctcgcaatggcgctgctagcgaggcgtaa

SEQ ID NO: 65608 - DNA, 23 bp, unknown
  Direct Repeat
ctggacgccttcgagatccagac

SEQ ID NO: 65609 - DNA, 23 bp, unknown
  Direct Repeat
ctggacgccttcgagatccagac

SEQ ID NO: 65610 - DNA, 23 bp, unknown
  Direct Repeat
ctggacgccttcgagatccagag

SEQ ID NO: 65611 - DNA, 23 bp, unknown
  Direct Repeat
ctggacgccttcgagatccagac

SEQ ID NO: 65612 - DNA, 23 bp, unknown
  Direct Repeat
ctggacgccttggagatccagac

SEQ ID NO: 65613 - DNA, 23 bp, unknown
  Direct Repeat
cgggacgcctccaagatcccgac

SEQ ID NO: 65614 - DNA, 23 bp, unknown
  Direct Repeat
ctggacgccttggagatccagac

SEQ ID NO: 65615 - DNA, 23 bp, unknown
  Direct Repeat
ctggacgccttggagatccagac

SEQ ID NO: 65616 - DNA, 23 bp, unknown
  Direct Repeat
ctggacgccttagagatccagac

SEQ ID NO: 65617 - DNA, 23 bp, unknown
  Direct Repeat
ctggacgccttggagatccagac

SEQ ID NO: 65618 - DNA, 23 bp, unknown
  Direct Repeat
ctggacgccttcgagatccagcc

SEQ ID NO: 65619 - DNA, 23 bp, unknown
  Direct Repeat
ctggacgccttcgagatccagac

SEQ ID NO: 65620 - DNA, 23 bp, unknown
  Direct Repeat
ctggacgccttggagatccagac

SEQ ID NO: 65621 - DNA, 1467 bp, unknown
  TnpB Polynucleotide
atgatcgtttacaaatacggcgcgctgaaacccaaggtcatcggcggcaccttcgaagatctgcttcagtaccagcgccactcgaacgccttctacaacgcgctcatcgagatcgagcgctggcgcatcgccgcgcgagacatcgtcgagctcgcgcaatccgctccgctctccgacgagcaaaagaccgagcatcggctggcctacaacgccgcgtgccgcgcggccggggccgcgacgccgatcggctggggccaaaagcaagccgtgacggagatggtggcggctgccatgaagacgcggcgttcggatgagttcaaggcgcggcagcgggcttcgaagaagggctatgattttttgaagcgcgtcatgacttgcgcgcgcccgcggcaccggcgcttcgatggggaggggatcctggcagcgacggtgcagggggcaaccgggctcaaggcaagcgccgtgctcacgaagccgggcccggtgcaaatctcgggcgacgggaagcaccgcacggtcacgctccggttgcgggaggggctctcgcttgaggtgcccatcgtttatcaccggccgctccccgagcgcgccgagaaggagggcgtgccctatgacgtgcgggtgattttcgcgcggatcgtgatcgatcgcatcggagatcggtggacttactccgtacatttgaccatcgacgcagcgccgcgcgtgcacgtcgcccagggcggcctcggccgctgcgcggtcaacttcggctggcgccgggtgccgggcggcatccgcgtcgcgtacgcggtggacgacgacgggaacgagacgagttgcgtgttccctgatgcgctgctcgggcggcagaagcatgccgagtcattgcggagcctcgccgatgagatcgcggccgcctacctcggagatgccgcccgcagaacaaaagcacgctgctccgcgctcgcggatcccgacgcgattcaccgtgaactcgggcgcgagtggtttacgatggagcaagcggcaaagcgagatggaacggatgctgagcactgggctcgccgtgatcggcacctctaccagtgggagcgggacgagtatgcttccgtgctgcgcgctcgccgagagatctatcgactctgggcgcgcaagctcgccgcgagctatgactcggtcatcatcgaggccttcgatatgcggagcgtcgtcaagcggacaccaagcgaggatgacattccggcagcgcggcactaccggtttttggtgggcccgcattgcttgcgcttagagatccagagcgtcttcggcgcgcgatgtgaggtgctcaagcccgccaagcgcacgctcacttgccatgcctgtggggcgctctgcaaatgggacaaggcgcgcgagcttcgtcatgattgcgagagctgcggtgctgcctgggatcaggatgcaaataacgcgaagaatcagctactcgacgcggctgagtag

SEQ ID NO: 65622 - DNA, 36 bp, unknown
  Direct Repeat
gtgtggaggcagctcggtgccgatggaaactgagac

SEQ ID NO: 65623 - DNA, 36 bp, unknown; identical to SEQ ID NO: 65622
  Direct Repeat

SEQ ID NO: 65624 - DNA, 1824 bp, Mycobacterium lentiflavum sp.
gtggcgttcagtggtgtgaccttgagtgtgcactacacctggcgtctgtccgagccgattcgcgagcaattgcgtctcgcgcatgagctgcgcgaagagctggtggttattcggttggcctacgaagccgatcttcaagcaatctggtctagttttcccgcagtggccgcggccgaagagcgcatcgctcacgcccaggcggcgtggaccgcggcgttggaaagcgcgaaagcctcacgggggcagtcggaacgcggtgtccggcgcagtcccgccgaaacttcagcgatgtcggcacttcgtgaggcacgccagcagcgccgcgcagcgatcaccgaggttcgcgcccaagccgcaggcccgcgcgcggtgcgaactgcggcgttcaacgccgcgcaacgagccctctaccgaccctacgtccaagagcgggggctgttctggtgcacctttaacgatgtggtggcccaacacgccggtgcggtgaaacgccttcgtcagcaacgcatcacccgccccgacgccacactacgccaccacccctttgacggctcgggaacgattgcggttcaactgattcgccgccgcgacgatccaccacggtccccagcggtagtcgcagccttggatggcaagtaccacaactactttcagcttccgtggatcgatcccgaggtgtggaaccagatgtccgcgagccaacaacggcgtgccgggcgagtcgtcgcccggttccgttacggccgcagcgcggacgggccgatgctgctggtggagctgcccgtccagcagcatcgccaactgcccgctgacgccgacatcacaggtgcgcgactgaccatccgccacacgccggccgggccgcgcgccactctcaatgtctcagccactgtgcccgatcccgacccccggcgcaccggcccggcggtggcagtgcatctgggttggcgccgcggcgccgacgggatcatcgcggccacgtggagatcgactcgggcactgaatattccagaggaattttgcgccgtcgtagtcgccgagaccacgcgtaccgggcggctgatcgtgcccgcgacactcatcgatgggttcgcccgtgcggatcaaatccgggcccagcgcgggcaagctactcgcgcactgcagctatcccttgtgacctggctggccgaacacgggccgatcgacgatccgcgcacgcccggcggtgtcctcgatgccgcgaccgtcgaacattggcgcggcgtagcgaaattccacgcattggctcgcgcttgggaaatcgccccgccggcggatgccaagtcgatcgcggctctacttctacgctggcagcgccgcgatctcaaactgcggcgcggcccggacctcggccagaggcgtcatgccatcgctgcccgcgacgatctctatcgccggttcgccgccatgctcgccagccaggccaaaacccttgtgctggatgatttgttgctgcctgaactcaccgccgcatccgtcccgcgaccacgtgctgctcacaaaggcatcgcggccgcgcgaagcgtggtggcacccggacggctacgtacgctcgtgaccaccgcggcgttgcgcgagggctgcgccgtcagggaggtcggtcgctttgggctctcccgcatccacggggacggctgcggctacgagaaccccgctgatgcgcggtaccaggccgcgacggtgcactgtgatggctgcgggcaggactacgaccaagatcatgcggccactgcgttgatgctgcgccgggccggcgctatccgtcatggagcgagggcttcgaccagcatcgtcggcccgtag

SEQ ID NO: 65625 - DNA, 1911 bp, unknown
  TnpB Polynucleotide
atgaagtcgtcagacctcccgagtcgcatcttctcgttccgagtaaaagagatcacgtcctccatcgaagacgtcgaccgccagtaccgactggcccacgagtaccagaacgccctcgtcgccgtcgagctgaagcggcgccagacctaccgcgcatgccgctcgaccatccccgagtacgccgaaatcgaacgaccctacctgaaactcgaagaagagatcgagtccatcagggaagagatcaacctcgtccggcagaagaaccgaaagcgcgttgataccccggaacaaaacgcgcgaatagccgccctgatagcagaaaaaagaaagcacaaggttctgctggacgccgccgccaagaaggtaaagggaaacgcagaactcatggccgtgggtcgagaagccgacgcggaagccgctacatcctctcaggcactccgcgacaactactctcggcaagatctcggctggggtaccaggggaatggtcgaggcggccgtgcaggccgccaaaaaatcagaccgcgacccgaagatccaccactggaacggcggaggtcgaatcggagtccagctacagggcacccacctgagcaaggaattgaaggcatccggacaccagatcaagctcgaccaaaagcgccttagggagatgcgaaaagaacttgaacccgaagggtctgcgacccaagggtctgcgacccaatcgaaagtcgtaagagatctcaccgaccgcctggcccgagaaaaaaccgcgcgctactcgcaaaaatcccccgagaaccgcggcctgcccgtgagcaacctcgcgaccgacacccgactccagatcgtcgtcccccccgagatcgcctaccaggcactgtccacccgccggggcgaccgccgtcgagccgctcgcactaccggaaagctccgcatcggcagcacccccgcaagagatcccgtctggatcgaattcaaggtaacgatgcaccgacagctccccgacgacggaatcatcaagtgggcctggatcaagcggatcatggtgggcacacacgaggtctaccacttgcagctggtcatcgaggccccgtcgttcgagcagaaggtatcgatctccaaccgcgaggaagcagtcgccatcgacgtgggctggcgagtgcgcgagaaaaacagcctgagagtcgcctacctcctcgacaccgccggaaaacacgaagagatactgctgcccaccaccatggtgagcaggatcggccacgcggaggggctgcgaagtacccaggacacagccttcgacaacatcaaggatctcttcctcgaatggatctccaacaacaaagacaactcgccgccatggttcaaggacgccttccagttcctggcccagtcgcgctcacccaaaaacctcgcctggaacgtccgggagtgggggcgaaggcggttcgcgggcgactcgctcatctacgacactatgatgacctggcgacggcagttcctccacctctacgagtgggaggtgaacgagcgggccggcgccctcgccgaacgcaagaacttctaccaccacgtcgccctagacctcgccaggcgataccacaacgtgctcctggaagacttcaaaatgaccaggatcgtcgagaacgcgatgccggaagaggaggccgacaacccgcagacccagaggcacaaccgggtcatgtcgtcgatcagcgagttcaggcaaacggtatcatcgacctgctcggcctggcgctctcgggtatggcagcttcccgccgcctacacgacgctcgactgccacgcgtgccacatcgagggagaaaaacatgccgagtgggatcctgcccaacaactcgtacacacctgccgagagaagtgcggaaagacctgggaccaggactacaatgccggcgccaacctgctg

SEQ ID NO: 65626 - DNA, 1818 bp, unknown
  TnpB Polynucleotide
atgccgaccttggtatataaatacggactgcttccgccgacggccaacgccgaggtggtctcggatcagatgcagagggcccaccgctactacaaccagctgatcgagatcgagcgctggcgaagggagacctatcggaaactgagatcgtggatgccggagatcgagaacttggaggcctggcgctcggtggaggtggagcgcctggagctcgctcggcaggcgatcacgtcccagcgggccagcacccgtagccgctcggacacggccgagcaacgccagcgggctacggaggccagggaggccctgagggaggtctccagcctgtggaaggccgctcgtgatgccgctcgggaagatctggagctgcaggaagcggccgaggcgatcaacgccgaagcccgagaccgaatgcgggcagctagggcggcgaacggtgttttctggggaacctacctctgtgtcgaggccgcggaggacgaggcccgcaagcacgcacggtttgaacccagcttccgccgctggtccggcgatggagtggtcgccgtccaactgcagcatggcctcacggcggccggggccctgggatgcgaggacacccggctgcagatcgatgagagacctaggccatgcggttcgggcagggggaagagccgacctcgggttcgcctgcgggtgggctcatcgggtcgggacccggtctgggccgagtggccactgatcatgcaccgaccgcttccagcgggggcggtgatccagtgggcgaaggtcaagcgtgagcgcctggccgggaaggaccggtggtcgctacatctgaccctggtggttcctgttccgcggagagacagtggagactgttcccaggcgatcgccgtggacgtcgggtggcggaggaaggaagatggcgggatcagggtggcctacctcgtaggtaccgacggcgaacgccgggaggtgttgatcgatccgagcgtgctctccggtctgcagcaggtcgaagatctgcggtccatccgggacatgcgactcaacggccttcgcgagttgctgggcccctggttccgagaccatgcggcggaactgccggagtggttggtctcggcgacagaacacctggctcaatggcgttcgccagctcgattcgcggcgctggccattgcgtggagagagcatatagatggacacggtgaggcgctcggcggcatctatgatctactcgaggcctggaggaagaaggacaggcacttgtggacgtgggaagtgaatctgcgggacaaggtccaggcccgacggagggagcagtaccgggtgctggcggccgaacttgccgggcagtatcagacgttggtgatcgagcgtttcagcaagagcgagacccaagagtaccaaccgccagagagcgagactccggaccggaaggcggtgcatagccagcagacgcaagcggcgacgagcatcctctgcgggtgtcttctgaatgcctttgctcgccggggtcgcgtgacggcagagatgcctccgcagtggaccaccaggacctgccggagttgtggtttcatcgacaccgactgggaccccgccgtggccgtggagcatcgctgtaccgcctgcggagagctggccgatcaggacgaacaggcaggggacaacctgttggcgctctgggaggcatggcgcgagcggggaggtgatgcggaaagtgctgggggcgctcgcgtggtcgatcacagcgcggtttctcaggtttcagtgccgcgggcttcaaaatggggcaagcgcgggcgccatagccggaggtgctcgcaaggggcaaattga

SEQ ID NO: 65627 - DNA, 36 bp, unknown
  Direct Repeat
tggatgaggagcggcaatgcctgcgcaagggcttgg

SEQ ID NO: 65628 - DNA, 36 bp, unknown
  Direct Repeat
cgccgacccggcggcaatgcctgcgcaagggcttgg

SEQ ID NO: 65629 - DNA, 36 bp, unknown
  Direct Repeat
ggcccgcctcgcggcaatgcctgcgcaagggcttgg

SEQ ID NO: 65630 - DNA, 36 bp, unknown
  Direct Repeat
gggaagtcgggcggcaatgcctgcgcaagggcttgg

SEQ ID NO: 65631 - DNA, 36 bp, unknown
  Direct Repeat
gggtggcgttgcggcaatgcctgcgcaagggcttgg

SEQ ID NO: 65632 - DNA, 36 bp, unknown
  Direct Repeat
aatgatggccgtggcaatgcctgcgcaagggcttgg

SEQ ID NO: 65633 - DNA, 36 bp, unknown
  Direct Repeat
gtcctggctcgtggcaatgccagcgcaggggccttg

SEQ ID NO: 65634 - DNA, 1698 bp, Peptococcaceae bacterium sp.
ttggaaaaggagggcaaaatggatacagaacaactaaaaagctattgtgtgtatgagtatggttgcttaacaccaatatccggagagactgaaatgacagaagaaatttatcgaaaacatcaactgtggaatcagctagtggaattggagcacggacaccgacaagaagtgcggaagatcctggctgtaccggatgatccggtagcacccctggtggaggaactaaaaaacacacgggagaaaatcaaaacagcccgtcaaaaggcacgttccggcaaggttgatgtttcagttttgcaagaacaggcaaaaatattgagagaaagactcagcgctgccaaggtcgagcaggctgaggaaaagagaaaaattaaggaagccggcaaggagaagctgaaagagcttgaacaggagcgccggcaagcagtcaaggtcctgactaaggccagtggcctgtactggatcaactatgaggaagtggtggggaattacgacctggcccggcggcgggctatgaaagaaaaaaccgagatcaagtttcatcgttggaccggcgaagggaaggtcacaatacgttaccagaacgggcttccggtggaggaagtgttccaacgagatacgcgtttgcaaattgatccggtgccccaagaagcctgggatagccctgttcgaggaaccaggcgcaggctggccagaacactgatccgcctacgggttagatcggaaaacagaaagcccgtgtgggttgaactgcctatggttatgcatcggccattgccgccggacagtgaaatcaggctggcatctattattcgccagcgtgtaggcaggaaatggcggtacaaggctgtcctaacagtcgctgttcccaaaagagatcatattcacggcaaaggaacagtggctattgacttgggatggcggcaggttactgacggcctgcgggtagcatattgggctgatgatgccggtgatcatggccaagtggtattgccgttggaagtgctgtgggagtttaataagctaccagatctgcgggctatccgggacaagcacttcaatgaaatcaagacagggctgacggaatggatggcaaaaaatgtatcacccgattggctaaaagaagcggcaaaacatctatcccagtggcggtcacaggggaaacttgcttggttgattcggcaatggaaggaaagccgattcgatggcgatgcggaaatctttgaatcgctggagtattggcttcgccgggagaatcacctatacgattgggaagccaaccttcgggatcaggtacttcgcaggcggcgggaagtataccgcatatttgccgccaacttgacaaggaaatatgacacagtagtgctagaggattttgacctgcgaaaggttactgaaaagtccagtccggaacacgggacagccggagttttgccggcagacaagcagaggtttattgcctctgtcagcgagctgcgcctggcaataaaaaatgcttgttcccgtgacggagtagaggtgattgagatagatgcgaagaatactactatagattgtgccagctgcggccattctgaaaaatgggattccgcatcacaaatctggcatacatgtcctgcttgtggcaagctatacgatcaggatgaaaatgcctgcttaaatctgcttaaccgtttcgcaaatgccccggcaatttga

SEQ ID NO: 65635 - DNA, 24 bp, Peptococcaceae bacterium sp.
gttgcagtccccagctcagggggt

SEQ ID NO: 65636 - DNA, 24 bp, Peptococcaceae bacterium sp.
gttgcagtccccagctcagggggt

SEQ ID NO: 65637 - DNA, 24 bp, Peptococcaceae bacterium sp.
gttgcagtccccagctcagggggt

SEQ ID NO: 65638 - DNA, 2082 bp, unknown
  TnpB Polynucleotide
atggcatctgcagataagcttccgaccagaatttatacattcggtcttctgcctccaaaatcaggaggagaagctctccataggatgttgagggcttcctgtcattattacaacgctctgctcgaaatcgagctttggaagcgtaaagaaaccgccaaattctgggcccagagaggcggatactccgacaagctcgaacagttggagactttaaatgatgccgttcgcaagactccggatgatgcgaaacctgttctttattcccagattaaagaacttgaacttcacattcgtgagttacgggaagcggtaataatgaagtctcttccaaaggaagaagctcgacgccgcgaacgcgaaaaagaaatcaaagcagatttcaaaagtagaaaaatcgttctctccaaatcaagactcatggatcttcttgatttggaacccgattgtgtttcccctcgtcgtcgtttccagctgaatttttcggtagactcagaaaagcgcggagtgaagccgagcgggaagcttctaaacaagcttcttaaagaagcaaaccttatcaagacaactcaacatattgatgaccaggtatcgattgatatcgagcgggccaaaaaatattatggtctgtactatggcacctacgccctaattgacgatgctgtagaccaggctttaaggacttcggatactttcccggctttcaaacgctggaccggagaaggccgtgtcgggtctcctgtcagtacaaacgagggattgaacgttagctcagttcatgattgttctttcgaaaatggtacttgggctgataaggggaatactgttctccaaatcgtaaaaatcccggacgaagtttgggagcaaaaaacctcgcgtgaaaagggcgtcgatggtgaaccaaattcaagttgggttcggaaaacgcgtaccaatatgaggatttgtgttgattctcttggtcgagccaatcgtggcagactacccgtctgggttgagtttcctatcgtcattcaccgtcctctcccgaaaaacggaaaaattgtcggtgcatgggtttccatattcatgcgcggtaatcgaacgaaatatgagcttcaactccaagttcaggatgagactcatcttcatccaaagaagcctcatggtgatgggaccgttgctttcaacttcggttatcgatcaactggacgcgtggcatataccctcgatgatactaattttgctcaggaaatgactgttgatccgaaggtagagaagaagattgatcttgcggacaaacgaagacagtcacgggagcttgctgccaatgaaatgcgagattccatcttgaaatggtccaaggactgcatttttcctgattcttttagtaggaatgatggtaagaaaatcattattcctcattggtcaggggaggaatctcgtgcaagaagctataacgaacgctccttgaggaagaagattgaacttctccctctcgcgaaagacgagagtctttcaaatagactacatagtgttcacaacgagtggaaattcgttttggctatggattcacttcttagttttttctgcggcccgaatactcttgttcgtccagaggataaaataatttttgaggagctaaacacttggacctttgacgataaatcaatccagaaccatgaagccgggagtcgcttcaaatcacggaagattcgtcagaatcaaatccatgtctgggcccatgagatttgtgacaataattcgactattcttattgaaaatacgaattacgcaaagatcaaaagggtcgcgaaggataaccgtggttccgtccctgttgaggttattacttcaatatcacggagacgtgacgcctatgcgcccgggaatacccgaaagataattgaagaagtcgctaaagcacgtggtctggaagtaaagaaaattaatccagcaaatcttacgagaattcaccatgcttgtggccatgacgctccttgggatgcctccgtgtccatagaacatgaatgtgaaaaatgtcgtgttgaattcgatcaggataggaatttctgtgagggcatgctaatcagatcaaaaacttga

SEQ ID NO: 65639 - DNA, 22 bp, unknown
  Direct Repeat
gaggagcccgaggaggagcccg

SEQ ID NO: 65640 - DNA, 22 bp, unknown
  Direct Repeat
gaggagcccgatgaggagcccg

SEQ ID NO: 65641 - DNA, 1809 bp, unknown
  TnpB Polynucleotide
gtgggaagattttcacagggcgtacgtaaagagcggggtgcctcatcacgaggcgcttcggatggtcaaaggaatcgaggacaaatgacaacgagggtctacaggtacgggttgcttgctccgactgagaacagcgagctagtcaggcagcaaatgcggctcggccatcgctatcagaacgacctcatcgcgatcgaacgaggccgaaggctggcgtttgccgctgtcatgtcgagcgacacgcggatcgcagaagccgaagccaagatcacggaaatcgacgcgaagatctccgaagcggtagagcgagctcgacaagctcgagtggcgcgccgaaccaaagcagacaccgagcagaccaagtccgagatccggtcactgaaagcatctaaggccgctgccgtgctcgatctgcgagccatcaagccgctcgtgcaatccgagctgcgacctaggatcgcggaagtcgacgctagggctcacgagctgcagatctccgctcgcgctcactgcggggtctattgggggacctatctgctagcggaagcggcggccgaacaggcggcaaagaccacgaagggcgagctgagatttcagcgctgggacggctctggacaggtctcggtgcagatccagggcggtgcagacgtcgacgacgtcgtcggcgattcggacactcggcttcgctggcctgaatatgtcgaggggacgcgcaaggcgaagcgcaccgaacttgccatgcgcgtaagcagcgaaaagggcgtgccggtctgggcacgttggccgatggtgtatcaccggccgctgcccaccaatgcccggatcaagcgagcgatcgtatcgctacgcatgcgcgggccgcgtgaggagtggtcggtcgaggtcacgatcgacgcgtcgacgtgcaggctccgcgaccggcccgatggcggcaaggtggcggttcatcttggctggcgaaaagagcctagcgggaacgtgcgagtggctacttggctcggcgacgatggggacgctggcacaatcgagtgccccgagcgtgttctgaccgggttcgctaagtgcgagtcgttgcgatcgattcgcgatcgaaatctcgacgaactacgggcgcgcctagttttggctcgcgagggctggccggtatggctgcgcgatgcgacgtcgagcctataccagtggcgatcgccggggcgattcgtagcgctcgcgcaacgatggaaagcggctggcgtggctcctgaacacgcgagcgactacggagcgatcgaggcgtggcgctacaacgatcatcacctgtggcgatgggagcacgaccagaggctcaactcgactcgctaccgtcgcgaagtctacaggatcgcggtggctgagctgtcgaggcgataccgtcgcgccatcttgatggcggccgattgggccgaaatggcaaagctgcccggtatcggagaaggcgcgccggacctaccggacgaagcgcgggcgcagcgtgtggagactgctccctacgtgctgaccgaggccttgcattctgcaatgaccgaagtggtctgggtcgatcctagctacctgagtcaagcgtgccggcattgcgaccacaaggacaccggcgacacgtgggttagagaatgcacctcgtgcggcaaagcgagggacatcgacgaggcggccgttcgcacgatgttggatctcgaggaggccggcgcgtggtcgtggaagaagggaggagccaaggacgaaagcggcaaggtccgcgagatccgcgctccgaagtgggccaagaaacacgcgaccgaggccgcggagtga

SEQ ID NO: 65642 - DNA, 23 bp, unknown
  Direct Repeat
ttgcaagggctgctcagggccct

SEQ ID NO: 65643 - DNA, 23 bp, unknown
  Direct Repeat
ttgcaagggctgctcagagccat

SEQ ID NO: 65644 - DNA, 23 bp, unknown
  Direct Repeat
tcgcaagggctgctcagggccct

SEQ ID NO: 65645 - DNA, 23 bp, unknown
  Direct Repeat
tcgcaagggctgctcagggccat

SEQ ID NO: 65646 - DNA, 23 bp, unknown
  Direct Repeat
ttgcaagggctgctcagggccat

SEQ ID NO: 65647 - DNA, 23 bp, unknown
  Direct Repeat
ttgcaagggctgctcagggccat

SEQ ID NO: 65648 - DNA, 23 bp, unknown
  Direct Repeat
tagcaagggctgctcagggccct

SEQ ID NO: 65649 - DNA, 23 bp, unknown
  Direct Repeat
ttgcaagggctgctcagggccat

SEQ ID NO: 65650 - DNA, 2214 bp, unknown
  TnpB Polynucleotide
atgatgatcggtgcgcggctcaggaaatgcacgaaagcgtgtgaggtgggtcgcctgcggaacaagaggggggtgactgtggagcgcaggacatcaacgaatgaagtcagggtttttaagtttgggatgcgtaaaggccagatggagaacgaggctctcgccctcgatcagatctggctgcagaaccaataccggaacgccctcgtgcagattgaccgcgagttccgtgagcgttataacgccatcgtcggcgtggacaatccggcgctcgaccgcatccgccagatcggcgcgcggatcaaagagctccgggcaatcatcaaggtgcagcgaaccggcgtgcagcgggcgggctggaaggctctctcgcccgaagagaagaccgagatcaaggaactcagcgcggagcgcaaggccctgaatccggaagctgaccgcgtgaagcaggtcaacaagaccacatacgaaccgcaaatcaaagctctggaccaggagttttacgccgcgatcaaggcggtcggcgcaaagttcgcggacggcacgtattcctatatggacaaggacggaaaccgccacgatctgggaggcaagaagctcttctggatgaacgaagagcatgtctataacaacttcctcaaagaccgcagcgcggcaatgggagctaagaccgtgctcagctttcaccgcttcgatcacgagggtgtggtggcgtgccgccctcgggtggcggtcaaggaggaccccggagcccgccccattacgctggcgctgaaggcagagggaacaaagctcaaaaagatttctttgcctttcagcgaagtcggcgcgttcgtggcctccaatcccggcgcgaagatcgtgcgcgccgatgccttgcggtttcagaaactgtcggcgggtgactggacgaaggaaaagagttaccagcgcaacatctccgccgtgcagtccttcgacgccaacaacggatcggcgttttacttcaccgtcgagaaggtgggccgcaagcaaacctccaagcgtagtcagcgactaaccagggcgttcgcgcatcttcaaatcggaaccaagcccaaggcgttctttatcctgcctgttgtgctgcaccgttcattccccgagggagccaccttcaagtcggtcgcggccaagcgcgagcgcgtgggccggcactaccgttggtccctactcgtcacggtggattttcctgcgcccgagccagcgcacggcaagggcgtggtggctcttgatcccggctgggccatgggaactcttccggaacctgacggacggctacgcgttggcggcctcacgaacgaggatggtgagttcaaggaactggccttgcctcccgaatttatgtctcaggttgggcaggttggaaagctccagtcaatcgtcgccaaagaaacgaacgcactcatgccgagagtgcaggaatggctcgaccggcacagcgagcaatccgaaatccgcacgcattttcagaatgccgtgctcgctcacggcaatgccaagcggcgtcaacgcgaagccggcggcttccgccacctgatcaaggcggtaggggctgtgtggccgaatgtactaccgccggaaagacaccgcgagccagcaaagcttgacgacccaagcttggagaaggatctgaagggctggtataagcgcttccgccacctcgatgagtggatgcgaaacctggcggaccagaatggcgcgcgcaagctggaccagtaccgaaactgggcagccaaggcggcaaggcagtaccacaccgtggtgatcgacgattccgacttgcgtaaggccgctgaggcccccgctgccgatacggacaaggcccagccggcgggcagacaacgccaggtggccgcgcccagtctgctcgtcgctgcgttcgtcaatgccttcaagtcggcaggcggcgaggtgcgctgggcgattggcatgacctcacggacttgctcggaatgcggacacgtgaatccggcgttgggagctactcgggagttcaagtgcgaaaagtgcggctatacggctgaccgcgaactcaattccggccggaaccttatcaacgcacacgggaatgggcggagcgcgagcgaaaggcggtcaacaaaagttcgcaaacctcccccggtttcgagcagacaagaggttagcgaaaaaaacctaacggggacggagccaacagcggtagaatcagttggttag

SEQ ID NO: 65651 - DNA, 36 bp, unknown
  Direct Repeat
ttgcaagagcctgttcagtggcttggtagctgaaac

SEQ ID NO: 65652 - DNA, 36 bp, unknown
  Direct Repeat
ttgcaagagcctgtccagtggcttggtagctgaaac

SEQ ID NO: 65653 - DNA, 36 bp, unknown
  Direct Repeat
ttgcaagagcctgttcagtggcttggtagctaaaac

SEQ ID NO: 65654 - DNA, 36 bp, unknown; identical to SEQ ID NO: 65651
  Direct Repeat

SEQ ID NO: 65655 - DNA, 36 bp, unknown; identical to SEQ ID NO: 65651
  Direct Repeat

SEQ ID NO: 65656 - DNA, 36 bp, unknown; identical to SEQ ID NO: 65651
  Direct Repeat

SEQ ID NO: 65657 - DNA, 36 bp, unknown; identical to SEQ ID NO: 65651
  Direct Repeat

SEQ ID NO: 65658 - DNA, 36 bp, unknown; identical to SEQ ID NO: 65651
  Direct Repeat

SEQ ID NO: 65659 - DNA, 36 bp, unknown; identical to SEQ ID NO: 65651
  Direct Repeat

SEQ ID NO: 65660 - DNA, 36 bp, unknown; identical to SEQ ID NO: 65651
  Direct Repeat

SEQ ID NO: 65661 - DNA, 36 bp, unknown; identical to SEQ ID NO: 65651
  Direct Repeat

SEQ ID NO: 65662 - DNA, 36 bp, unknown; identical to SEQ ID NO: 65651
  Direct Repeat

SEQ ID NO: 65663 - DNA, 36 bp, unknown; identical to SEQ ID NO: 65651
  Direct Repeat

SEQ ID NO: 65664 - DNA, 36 bp, unknown; identical to SEQ ID NO: 65651
  Direct Repeat

SEQ ID NO: 65665 - DNA, 36 bp, unknown; identical to SEQ ID NO: 65651
  Direct Repeat

SEQ ID NO: 65666 - DNA, 36 bp, unknown; identical to SEQ ID NO: 65651
  Direct Repeat

SEQ ID NO: 65667 - DNA, 36 bp, unknown; identical to SEQ ID NO: 65651
  Direct Repeat

SEQ ID NO: 65668 - DNA, 36 bp, unknown; identical to SEQ ID NO: 65651
  Direct Repeat

SEQ ID NO: 65669 - DNA, 1845 bp, Desulfurellales bacterium sp.
atgatccgaagctacgagtacggtgcgcgaacgccagagaatcaggaggtcattctgaaaattctcgacaaggcgaatcggtaccgcaatcggctggccaaaatcgagcagcagcgacgcgagaagactgatgcggtcatgctcgagttttgtcccgagctgatgtccgtggagtccgaacgcgacaagctcacgacgaagattgatgagcttgtcgatcaggtgaaggggcgatcgaccaaggcgcggaagaaggttccgatgtcacgcgaggagcgtgaatccctgaagtcgatgaaagccgaaagaaaagtcctcaacgatcgccggaaggagttgcgagcggtgctgttcgcggaaacttcagagctgacgcaccgcattaacgcgatcggcgagtgggccaaggaggaatgccggcaggcccgggctacgtgcgatctgtactggggcacctacctgttgatcgaaggggatgcggaggcgtttcggaagggcccaccgccgcgacttcgccggttcgagggtcgcggccgaattggcgtgcaaatccagaatggtctttcgtgggatgcgatgtgtgccggcgaggacacgcgattgcgactgatcgcagacggggttccaccgccggatgccccgccgcgtctttcggccaagggcgttcccctgcctaagcagaaggccaaacgagcagcgatgaactacacgctatggatgcggatcggctcgcaggataagggaaagccgatgtgggccaagattccctgcattatccatcggcagccaccggaagggacgatggtgaagtgggcgacgctccaccggaatgtggtcggcggcgtccatcaatggcgcgtggtgttctccctggagaatcacgccagcgcctggacgaagcgcgatgttgcgtatggcggggccgtcgggatcgacatcggctaccgagtgcttccgtcaggccggcagcgtgtggccattgcagtcggaagtgacggccgcgagcactccctggtactggacaagggaatggtcgatgaattcgacaaggtaaaacgtattcagtctcaccgggatgagttgttcaacgaggcgaaggcttggattctcgaatacatgaacgagcacggcgaagacccgtggttgaaatccaagctcgagcatttggacaaatggaaatcgaagcgccggcttcaggatgtcattgaggagtggtcggcgaggtcggcgttgccgggggatgccctagtgctcgagaagctcgagcattgggcgtttgagcgcgaaccacacttgtgggcgtacgagcggaacctggaccagcagcttcgcgcccggcggaaggacatctaccgcaattgggtggtcatgctgcggcgaacgtaccgcaccgccatcatcgagaagatggacctgcgggaagccatccacgatacgaagcgaccggaagaggaccaggaggttacggcgacccaacggcgtaaggcgtcgcaggtagcgctgtcgatcctcattcagtgcatcaaaaatggtggccaggatgtggtggagctggatccgaacgcaaccacttccacgtgccactactgcggaaagcaatgcgagtgggaccacgccaaaaatctacgccaccaatgcgagcattgcgggacgacctgggatcaggacgagaatgccgcgcggaatctcctgagagcaggattagaagccgctccggccgaagcggaacggaaggaatggcaggaaattgagggtgccaaatcgaaacggcacgccggacgaatgttggccaagcagcgtcgcatggccgagaagatcgccaccccatcggagtcgaagtcatga

SEQ ID NO: 65670 - DNA, 1701 bp, unknown
  TnpB Polynucleotide
atggccttcggcaacatcaccactgaccagaccagagtctacaagttcggagccaggatcggcaaagacgatttcaaagaggctcatgaaatcctcttcaagtccaactgctaccgcaatcgactcatcgagctggaattggagcgtagggcttcagtcgacaatcttctcagggaattgagtccggatcttcctctcatcgaaaatcaaatcacctccgtcgaagctgagatcgagaaggtgctgacttcagcaaaggccaataatcaggtcaacagaaagaagaacgccaacagtgccgagaagttggccttgaagacattcaaagattctaggaaggatctgtgggctaagcgcaaggacctcaggagttctctcttcaaggatcccattttcattgagaagaatgaaaagatcgaagaagataacaaagctaagcgcaaggaagccagagctaactgtggcatcttctgggggacctatctcacggtggaaacggcgcgacagggagaccgtaaaggtcctccaccgaggttccatcgtttcgagtcgaacggccgcattgcggttcagatccagggtgggattccaatcaccaagctctatgatggtactggcaccatcattcagctcgaccccaaacccgttgggagcagtggtaacccatggcgcaagggacgcatccgtatcggtagtgatgataactccaaaccaaaatggcttgagtttcaggtgaagattcaccgtgacattccagatgatgctgtcgtcaaatgggcatggctcaatgcgcggaaggtgggaacccatgtgatctggagcttgcagctctctctcgcccggaaggcgtgggacgatccgaggcgttgcttggaagaaggtgtcatcgctgtcgacatcgggtggcgcaagattcctgaaggtcttcgcgtggcctactggctggatgattcaggcaaagaaggccaagtcatcattccgcagtggatcatcgaccggcagaaaaaggttgaggatcttcagtcgatccgcgacaagaacttcaataccatcaagactgttctatccggtttccagaagacgactgttttccctgaatggttgcaagacaaactcaagagcctcagtaactgggaatctcaggctcgcctcgcttccgtcatcatcgcatggcgtgttcagcgtttcgtcggagatgaaaatctttatggaactttggaagcgtggaggaagcaagacaagcacctgtacgactgggaggaggcgcagagaaagtcggtacaagagtggcgtctcaatctctaccgtgagttcgcctgcaagatcagtagggaatacagggtcgctgtgatcgaagacatcgactggcgtgatttcgccaaactcccggatatcttttctgatgaaactgtgaaggaagctgtgcgttggaataacaaactcgcggccgtttcctacttgctcaactgcatcaaagccaagatgaccgaatgcttgaaagctccaccagagtggacgacgcaggcatgcaacaagtgtggacagattgacaacttcgacgccgaaaaggaattgatccacacatgctccaagtgtggagcaacatgggatcaggacgccaatgcctgccgtaatcttcttacaagatacgcgagcggtgcagtgataccggcaatcgccaaggccgctcgttctccttga

SEQ ID NO: 65671 - DNA, 36 bp, unknown
  Direct Repeat
gtttcaatgcccgctcagaggctttgtttctgagac

SEQ ID NO: 65672 - DNA, 36 bp, unknown; identical to SEQ ID NO: 65671
  Direct Repeat

SEQ ID NO: 65673 - DNA, 36 bp, unknown; identical to SEQ ID NO: 65671
  Direct Repeat

SEQ ID NO: 65674 - DNA, 36 bp, unknown; identical to SEQ ID NO: 65671
  Direct Repeat

SEQ ID NO: 65675 - DNA, 36 bp, unknown; identical to SEQ ID NO: 65671
  Direct Repeat

SEQ ID NO: 65676 - DNA, 36 bp, unknown; identical to SEQ ID NO: 65671
  Direct Repeat

SEQ ID NO: 65677 - DNA, 36 bp, unknown; identical to SEQ ID NO: 65671
  Direct Repeat

SEQ ID NO: 65678 - DNA, 1866 bp, unknown
  TnpB Polynucleotide
atgagcgtcaaggtctatcgctatggtttgggcgcaccggtcgagaacgaagcgttggtgcgggcgcagctgcgtgcggcgcatcactaccgcaacgcgctcgtcgaggtcgagcggtggcgccgcgccgagcaccgacgactgctcggtgcgcatccgggcgtcgggccggcggaggccgcggtgacgctcgcccatgcggtgctcgacgaggcgttgaccgccgtcaagcgcgtgaagggggcgagtcgcagcggtgcggtgccgtcggagttgcgcgctgcgctccatgtggcgcgctcccgcaaggccgatgccgtgcgagcgttccgagaggcgcgagcggcgctgcgcggagacgaagcgctgaacgccgagcgggcgcgcgtcgacgagacggctgctcagcggcggaaggccctccgagcgtcctgcggcgtctactggggcacgtacctcgggatcgaagcggcggatgagcagtcgcgcaagcagccgctctacgacggcgcggagccgctcgacccgcggttcatgccgtggacgggcgaaggacgtgtcggcgttcagttccagggcggcctcgcggtcgaccaggtggtggacgacacgcgcatgaggatcgaggacgcgcagccggtgcgcgtctcaaagctcgggcgcgtgctgcctcagcgtgatccgtcgagcaagcgatccgccctccgccgctacgcgacgctcgcgctgcgcgtcgggtccgacgacgatcgtgggcccgtgtgggctcgctggccgctcgtgctgcaccggccgctccccgagggcggcgtcctcaagtgggcacacgtctcgctccggcggatcggtccgcgcgaggagtggtcgctgctttgcaccgtcgagagcgaggaccgtcgcccgctgccgccgctcgaagccggagcggtcgcggtcgatctcgggtggcggcagatggacgacggctccgtgcgcgtcgcctactggctgggccaggacgggcaggagggcgaactgcggctctcgccgcgcgacctctccgggctctcgaaggcggacgaggtgcgggctgtccgcgaccgcgccttcgatgccgcgcgccgcgagctgcgtgagtggctcgccacgaaccctggtcgaccgtggctgaggacgaggtgcgagtggatcgaccggtggaaggcgccgggccggctcgccgcgacggtcgtgcagtggcgcgcggacggcttccgcttcgagggcgacaaggagatcttcgtgaagctcgaagcgtggcgcaagcaggacaagcacctctggtgctgggagacgtcgcagcgcacgggcgcgctgcgagcgaggaaggatctgtaccgccgcttcgcgtgtgacctggcgcgtcgctaccgcacgctcgtgatcgaagacttcgacatgcgcgaggtgtcgcgccgacctgccgcggacgaagcggccggcaacgctgccgcgcggtcgatgaggcagcgggcagcgccgagcgaggctcgtctcgcgctcgtgcacgcgttccgcgacgtgtcgaagcaggaccccgccgacacgacccacgactgccactcgtgcgggtcgcgcgagcagttcgatcaggcggccgagctggtccatcgctgcggagcgtgcggcaccgagtgggaccaggaccggaacgcggctatcaacctgatgcgtcgcgcgagcgatgccggtgctctcggagaaggcggggtcgctcgcgagccgcgagaggccaacgatttcgaggcgaagcccgcgggccgatgggcgcgagcgaaggcgaagaaggccgctcgcatcgcgcaacaggcgaccgctcgcgaagcggcgcccagtgacgcggaatga

SEQ ID NO: 65679 - DNA, 36 bp, unknown
  Direct Repeat
cgagcggtcagttgcagggccagcgcgggggccgag

SEQ ID NO: 65680 - DNA, 36 bp, unknown
  Direct Repeat
ctgcgctggcgttgcagggccagcgcgggggccgag

SEQ ID NO: 65681 - DNA, 36 bp, unknown
  Direct Repeat
aaatcagcgggttgcagggccagcgcgggggccgag

SEQ ID NO: 65682 - DNA, 36 bp, unknown
  Direct Repeat
atgtcgcgaagttgcagggccagcgcgggggccgag

SEQ ID NO: 65683 - DNA, 36 bp, unknown
  Direct Repeat
cttcgtcgcggttgcagggccagcgcgggggccgag

SEQ ID NO: 65684 - DNA, 36 bp, unknown
  Direct Repeat
gaatctttagtttgcagggccagcgcaggggcctgg

SEQ ID NO: 65685 - DNA, 2088 bp, unknown
  TnpB Polynucleotide
atgagacgcaaaaacaaagatgctccgccgacgcggattttgacttttggctgtttgccgccggatcgccccggtgggatcgagcttctggtgcgccaactgctgttggcgctgaagttctggaacatgatggtgcccatcgagaagcagcggcgccgcgaggtgcgagaggcgctggcggcacatcctgacgtggcgccgttggcggcgcgcgtgaaggaactcgaggacgagatcaaggacctgcgtagcggactgaaggccgccaaggcgcgcatgtcgttcgagatgaaagaagggagggagcgggtgcgtgagttgcgtgagtcgctcaagtctcttcgtgagtcgctcaaggaggcaaaggcgaagctaaaggcagcgacgaagtcgagccgagcggccatggcgcctgacgtggcgtcgttggcgacgcgcgtgaaggagttcgtggatgagatcaagagcctgtgtcttggtctcaaggccggacgggaggaggctaaggagcggatcggagcagtgaagaagcgggtgcacgatgtgattgagtcgctcaagccggttcgtgccgcgcgcgacgcagcaaaggcgaaaatcgaaaacgacccggaggtggaactgaaaaagaaggcggcgaatgatgtggcgaacgcagcattgaagctggcctacggagccattcgcgccgaggggcttggctggggcacatgcctgttggtgggcaaggcgatggaggaggcgcgcaaaggtcacatggatccgaaattccatgggagccctgatgtcggcagggttggtgtgcaggtgcagggcgggatgcctgtgtccaaactgtttggtgaggggacactcgtccggcttgcacctgtgccggaaggggcctacgccttgccacgcagcgagagggaacgggcgacgcgatcgcgtgtcatgttgcgggtcggttcccaggataagcgtgcgcccgtgtggctcgagttgccggtcatcctgcacaggccgttgccggaagacggcgtggtgaagtgggcgtggattctgcggacgcgcgtagggaatcgctaccggcatgagctgcaactctcggtcgaggcgccgtcgttcggttccgtagcgcccgagggcaaagacgctgcggcgattgacatcgggtggcgactcgtggacagagacgcgccgacggatcaactgcgaatcggctactacgtcgattcgaaggggaacgcggccgaaattcggctgcctgccgatgtgtctgaccgcttgagccaatgcgacgctttgcgtgcgacacgggaggggaaattcaatgaggccatcaagctgctgacggcgtacatgaagaacacttcgtccgtgttgcctgagtggtttgtggcggccaccctgacgatcccgcactggaagtcattccggcggctcatcagattggttcagacgtggagcgagcgtcgatggaagggagacgagtcgatctacgcggcgctggtcgagtgggggaaaaaagagaaacacctctacgcttgggaagctgatgggagggctggggcgcttgccaggcgcaaggatttttaccggaacacggcgcgggtgatttcgatgcggatcggagcgctggtgttggaggatttcgatcttcggccgatggcgcgtttgccacagccggaaggtgagcctgtggcgccacaggtgcagcgtaggaaccggcatgtggtggcgttgtcagagtgccgatcgatactcaaggcggcgtgcaaggcccagggcgttccggtcatcaaggttccggcccaatggaccacgatcgactgccatgtttgcaaagaacacatactgtgggacgcggcgccgcagatcatgcacaagtgcgccaagtgtggcgctgattgggaccaagactttaacgcggctgtgaacatgctagacagggctcagttgccgacaccaccggttaattcgcgcaagatgatcactctctacaccgcgccgcttgcgatcagtggctctgtgcgcaaggcgcgaaaggagcgggagcgcaaggagcgtggtagcgaagccaagaacaagaagaagaaggccgcttaa

SEQ ID NO: 65686 - DNA, 35 bp, unknown
  Direct Repeat
ctgctaggcgagctcaggcgccagattccctgaga

SEQ ID NO: 65687 - DNA, 35 bp, unknown; identical to SEQ ID NO: 65686
  Direct Repeat

SEQ ID NO: 65688 - DNA, 35 bp, unknown; identical to SEQ ID NO: 65686
  Direct Repeat

SEQ ID NO: 65689 - DNA, 35 bp, unknown; identical to SEQ ID NO: 65686
  Direct Repeat

SEQ ID NO: 65690 - DNA, 35 bp, unknown; identical to SEQ ID NO: 65686
  Direct Repeat

SEQ ID NO: 65691 - DNA, 2049 bp, unknown
  TnpB Polynucleotide
atgtcattcaaaaaaccagcgcatcccgattggccgacaaaaaacattgcttatcacgcttggttcgttcagcaagatgaatccggtaaattctgggcggacaatcgcccgccgcaatcgctacttgacgctggagagtcaatgcggcgcctgtggaacaaggagtgtgatcgtttttgggatttgcacaaaactgaaccgctcgaatgcgagaatggtcactcgctcacgccggaactgctctacagcgacaatcaacgctaccgcgcgcggttctgcgccgtctgtcgcgacgaagggaaggatcgcgttcaggcatacagccggctgcgaggtaaagagcggggtgagtattatcagcccgtgcttaacaccattcgctcaccgaaagcttgctacgaccagtttatcgccgagctatcgccggaagaccgtgttcgatttgcgctgacctcatcctgctattacgaggatgtgatcaatcgttttgctcagaccttccgcgcctggcttttctctccgcagaaaaatgatcctccgcgcttcaagccgcgcctggacagcgtccgtgtaagctacaaggagaaatccggcggcgcgccgatcagtgagtttatcaacaccggcggcgggcgagcgggcgtgattaatacattgcatctggccccggagcggacgaatcgctgcgccgagtgcggcgagtggatcaatttccaggtcgggctaactgaagcggactgcccaaatgggcatcggcaatcgaagcaggcgccggaagtttcgcgcgaatatttggagaacggctatttcattctcggcaccacgcgcaacggccagcgcatcccgttgcatgtagcctacgggacggatttgatcgggacggatgacgcattcattcaaggcgaggatgcgctggttaaagaagtcacgctgtcgcttaaatgggatcgcgcgcatggctgggaagccaagcaaatcttcacgatccaggccccgtatacgccagagccgcgccttaacgagggtgtcttggcgattgactttggttggcggcggatggagcggattgaagaaaatggacaggaggttgcgccggagcgattgcgcatcgctgccgtttacgatgggcaggagtatttcgagatatgcaagccaattaacctggcgcgccagcgaatgaagcgcggtcactctccgcgcgccgtatctccgctactggtctgggagatcgaggccgagatcggcgccggggttcagcgatgcaaggaggcgctggcgcaactggatcgcagcgcgtggccggcggatgcgcgagaaacctggcagggtaatgtcaagatgcgggagagcggattattccgattgcgccgtcaattgcgcgatgcgggcatcgtcttgccggagttcgaggcatgggtggtgtcgcacgatgatcttttcaagcgcagtcggcagatggagcggaagattgagcgcgctgaaaatgcgctgatgcgcaatatcgcctatgaactcgcggctcaagcgcgcgtgatgatcgttgatgagttgcaagtcaaagagaaggccgtccgcgctgggcgacgaaaagaggcgcgcaaggacaagcatctcgaaaccgggcagtgggagcagcgcacggaagcggagcgcatcgaagagcacgccgccaagtggcgcgactatgccgccatctcgacgtttcgccgctacctgttggaagcctgcgcgaagtttggcgtcgaggtcattcgcaagccgcaagataacctgtgtgcgatatgcggcaagccggttgagtttgcggaagcgttacacgccgtttgccccgacgggcattggcgggagaagaaccgcaacgcagtgcgtgagctatgggagagcgaggacatagcggggaaggagagtgcgccccgattggacttggggctgatggtggacgagaatggactacccaagcaggcgttgcggggcttgcgggcgatgacaaatccgctcgcgcgaaccccaagtggcgacgcgaaagcggtgggttcgcgtgcggtgtaa

SEQ ID NO: 65692 - DNA, 36 bp, unknown
  Direct Repeat
gttggtcggcgatcttcagcagatagactgctgaaa

SEQ ID NO: 65693 - DNA, 36 bp, unknown; identical to SEQ ID NO: 65692
  Direct Repeat

SEQ ID NO: 65694 - DNA, 36 bp, unknown; identical to SEQ ID NO: 65692
  Direct Repeat

SEQ ID NO: 65695 - DNA, 36 bp, unknown; identical to SEQ ID NO: 65692
  Direct Repeat

SEQ ID NO: 65696 - DNA, 36 bp, unknown; identical to SEQ ID NO: 65692
  Direct Repeat

SEQ ID NO: 65697 - DNA, 36 bp, unknown; identical to SEQ ID NO: 65692
  Direct Repeat

SEQ ID NO: 65698 - DNA, 2220 bp, unknown
  TnpB Polynucleotide
atgaacacctttgtaacaaagaaatttcagttcggcgcagggttcggtgaaatcatcaacgaggaacttgccatccaacagatgagggcacggaactttctccgcaatgaactggtcgcccttgaccacaaaacacgagagcaatactacgccatcgtcaacgctgacaacccggcgcaggacagcatcaccgagactctcagcaagatggcagagttgcgcgacgaactgctgatgttgcgggttcctcctgccacgaaggcattgctgcggcttgaagcagttgctatacgcacggataaagctgctgttaaaaacctgactggtgcagagaagaaggcggcactggctagcttgaagaagcgcaccgactctctcaagaaggacataaagaattcacgggagcagtctgaagcggaagtcaaggagcagaagggtgctctgaaactacagatcgacaacctgaagcagaccatcactgatctacgccccatcgctaaagcgaagcagcaggagaacaaagagaacaactccgaggctctggcgaagttgaatacggaacgtagaaccacaatcaacgctttacgtacccgtgctgtcgctgggtacacacacattcgcactaaggagaacggtgaggtgttctcagtcgaagtcgcaccactatacaacctaaacgctggcgagatttgggcccagcacgaaacagaacgcagccgtgccatgaaggagaagaccgaacttcgttttcatcatttcaatggcgagggcaggtcattcgtgggtgttcacctcccttcttgcaacgatgcggagttcaaaaagatttgtgaggaaatcaggaatctcaggcagcagaagaaaagtgccaagaagaattctcatgaggctaaggctttggggtctgccattcaagaattggaagacaccttggctgagaaatttcatcgcactccagggctgtctgaggaagaagtcttcagcggcactgcaacggagttccgcctcaacgctgtgaacctgcagcgtgatgccaacaaccctaccgtgtggaacaaaggtacggtgcggggtgaccggcgtcgtgcaatgaggacggttgcccatatccgcattcagtctgcggaaaaaggcaaacctgttttcctcagcatcccaatcgtgatgcatcggccattcccagtgggtgccaggattctttcggctgcagtcaaccgtgagaagattggtttgaagttccgctggaatgtggaatttacggtcctctacaaggagattgcgctgccgtcagccaacggtatcgtgacgctcgacctggggtgggccaaggattcactccctgacgcagacggtcgcgttcgagtggctggtgtcagggagcgtacagcagacggtcaggagacgttcaccgagttttgcctcccggtgtcgttcacggaatatgccaagaagctggaggatatccattccatccgtgacaaatacacaaacgaggcatttgaaaagattgcggcgtttcgtgcggtgtacgagataaaagatgaaactctgcgtaaccttttggacaaagccaaggctagtctgattgcacgtaaagggaagacacctccagttggacaccttcggtcggcagtgtggatgctgaggaacggcaaggccgaagcacaggttgaactgaaggacattcttgaggtgtggtacgagcgttggaatcacttgaacgagtggatgagcaacgggagagacaatcaacttgccgctaagaaagactactaccgtcgctttgcctacgctctggcacagcgtaacaatacccttctcctagatgccgacaacttttctaaattggcaagggagaaacctgcggagcacgatgagaagcctgccaagaatgaaattcggtttttggcggctcccgcaatgttgcggtcggcattggaagcctgcttcacagaggaaaaaggaaagcgagtcctgtggactagtttggcgtcttccaagacatgctcgaagtgttggaagcccaatgaggggctaggattgtctcgaacattcgtctgcaacgactgcggacacaccgatgaccgtgagtccaatgcgacagcaaacgtgttaggtgaattcctgaggaagccgggtagtttttcagcagacaagaaggtggccgaaagactggccactaaaaaagctgaggagacagcacagatggcagcggcgtga

SEQ ID NO: 65699 - DNA, 22 bp, unknown
  Direct Repeat
gtagcaaagcgagtcagagcgc

SEQ ID NO: 65700 - DNA, 22 bp, unknown
  Direct Repeat
gtagcaaagcgagtcagagcgc

SEQ ID NO: 65701 - DNA, 22 bp, unknown
  Direct Repeat
gtagcaaagcgagtctgagcgc

SEQ ID NO: 65702 - DNA, 21 bp, unknown
  Direct Repeat
aagcgagtcagagcgcttagt

SEQ ID NO: 65703 - DNA, 21 bp, unknown
  Direct Repeat
aagcgagtcagagcgcttagt

SEQ ID NO: 65704 - DNA, 1764 bp, Betaproteobacteria bacterium sp.
atgattattgtctatcgctacggtctcctcgcccccaccctaaacggtgataaagtcgccgagcaaatgtcggctgcacaccgatactacaacaagctcgtggagattgagcgaaagctccgcgccgagatcagcgaagcccttaagccgcacgaaacgcctgccgcaaaggaaatccgggcgaagatggcagagctgcaccaagagcggcgagccattgccgaacgcctcaaggcacaggatgcgagcgaaagcgccacgattccagaggatgagctgaacggtctccgccaccgccttgccaagatcgaggaggaacgagaggccctttccaagagcctcggaaaggccaacaaacccctctacgaactccctgccgtgaaggagagcatccttgccctgcgagagcaggcaaaggcgcaagtccgcgaggcgcgtgcccactgcaacgtctattgggggacctaccagcagatcgaagctgccatagatcaagccaaggcgtcctcgttctcgccagacgccccgaaatacaaggcttggtcgctggatggacgcatcacggtctccgcacaaggcaaggagtgtgacattgacggactgacctcctgcgcagacaccctcgcccaactccaactcacgcccgctcccgtccctacgtcgtcagggaaggaacggacacagggcaacccgctccctcggctccgagtccgcatcgggtccaacgaaaaacgtggacccgtgtttgccgaatggccgatcaagtaccaccgtcccctgcctcccggcagcaaaatcaagctctgcacggtcaacaggcggagcatcggaacccatatcagatggtatgtctgtttcaccatcgagacatcggcggcagcgccacaggcaccaacccaagcccggcccgttgccgtaaacctacgctgggctctggctcggcccgaagacccgtcccgcatcatcgcggcggactggcacgatgggaccacgggcggcgaacttattgccgacgaaggtgccatttcgcagatggagaaaagtacgagcctgcaatccatccgcgaccgtgaactgaacagcgtcaaactcatcattaaggacctgtttaacgacctattgaaatccctagcggcgaccaaccgccttgagcttgcgacggagcacaaggagcggcttgggcacgttcacctgtgccggtccacccgcaaactggcgggcagtatcgtctggtggcgcgcccaccgactccccggtgatgatcgcctcttcgccgagatggaacggtggcgcaaacaggacaagcacctcctcgattggcaggcgtgctcggccaagaaagcccttaatcgccggaaaaacgggtatcgcacctttgcggcgaagctcgccgacacctacgacatactcctaatcgacaacctgaacattgccgcgctggccaaaaaaccagagcccgaagaagagcggaaacacaacaagcaggccagccgccagcgatttgccgtctcgtgcagcgagctccgccttgtcctcgaaaacgcctttaagatgcgcgggaaagccgtcgtgaaaattcctgccggcatgacctcgcaagagatggtccgcttccacgcatccggtgaatctgcggtattgccgaacgagcccgagaagcccaaaaagccgtctcgccgcacccgctttgccgaagccaaggcccggaagaccgcagcagccgagaaacaagccctagcggcaggagcaggcgcgagcgcctga

SEQ ID NO: 65705 - DNA, 36 bp, Betaproteobacteria bacterium sp.
gtccttatgcctcctctgtggcttcgttactgaggc

SEQ ID NO: 65706 - DNA, 36 bp, Betaproteobacteria bacterium sp.; identical to SEQ ID NO: 65705

SEQ ID NO: 65707 - DNA, 36 bp, Betaproteobacteria bacterium sp.; identical to SEQ ID NO: 65705

SEQ ID NO: 65708 - DNA, 36 bp, Betaproteobacteria bacterium sp.; identical to SEQ ID NO: 65705

SEQ ID NO: 65709 - DNA, 36 bp, Betaproteobacteria bacterium sp.; identical to SEQ ID NO: 65705

SEQ ID NO: 65710 - DNA, 36 bp, Betaproteobacteria bacterium sp.
gtccttatgcctcctcagtggcttcgttaccgagac

SEQ ID NO: 65711 - DNA, 36 bp, Betaproteobacteria bacterium sp.
gtcgttatgcctcctctgtggcttcgttactgaggc

SEQ ID NO: 65712 - DNA, 36 bp, Betaproteobacteria bacterium sp.; identical to SEQ ID NO: 65705

SEQ ID NO: 65713 - DNA, 36 bp, Betaproteobacteria bacterium sp.; identical to SEQ ID NO: 65705

SEQ ID NO: 65714 - DNA, 36 bp, Betaproteobacteria bacterium sp.; identical to SEQ ID NO: 65705

SEQ ID NO: 65715 - DNA, 36 bp, Betaproteobacteria bacterium sp.; identical to SEQ ID NO: 65705

SEQ ID NO: 65716 - DNA, 36 bp, Betaproteobacteria bacterium sp.
gtccttatgcctcctctgtggcttcgttactaaggt

SEQ ID NO: 65717 - DNA, 36 bp, Betaproteobacteria bacterium sp.
gtccttatgcctcctctgtggcttcgttaccgaggc

SEQ ID NO: 65718 - DNA, 1857 bp, Propionibacteriaceae bacterium sp.
atgatcaccgtcattaaatacggagtatggcacacctggtcacgccacatccccgactccgtccgtgaccaactctggttggcccactgcgcgcgagaagacctcgtcaccaccaccttggactaccacgacgccctgaaagacatctggtcgtcattccccgaggtcgccgccgccgaacaacgcatccgtgacgcggacgacctcctcgccaccctcctcgacgaacagagcaaagcccgacaggcgtcacaaagcaagaaggtccccaccgatctacgccaacgactgacgcaagcccgcgccagcgtccgttccgcgaagcaggaacgtcgggacgcgatcacgacggcgggcgtgatcgccacacccttgatcgcccaagccaaggacgcccagtacgcccgacgcaaggagctctacaccacctactgcacccgtggcatccccgaccgcgacgggcgcatcgtgcgcctgtatcacgcgaccttcaatgacgtgcgtaccagtcacgagacggcggagaaacgcatcagcgcctcacgagccaacggcagccccgcccagatgcgccaccaccgcttcgacgagacggggacgctcgccgtgtccctcctccggcaagcgggcgcgcctccacgcaccccccaagtcctcgccgacaccgagacggggaaataccgcaacgtgctggccatgccatggttcacccccgacgcttgggcgggaaaaacccgcgcccaacagcgcgtggacgggcgcgtcactctacgcatgaggatcgggtacgctgacgacctctcaagccccaccttcgtggacctccccgtccaggcgcacaggttcttcccacccgaggcggacatcacgggcgcgaaactcaccatccagcgacgagggaccacgttccacgccaccgtgtccatcaccgggaaagggctccccgaccccacacccgtcaccagcggacccgccgtggtcctgcattggggatggcgggaagtcgacaccgacatagtggaggtcgcacggtgggcggcggacgcacccctccacatccccgacgacatgggtgacgtgttcaccaccgacggctcagggacaggcgggtccatcctcacccccaagacggtgttcacccgcctgaaccacgtcgagaaactccaaagcgagcagggcaccgccttcagctcggcgaaaaacgccctggtctcatggttgtccacccacgccacacccatgggcgaccccacctccaaacagccgcaacccctggcccccgcactggtcgacgcctggagaagccccgacagactcgcccgtctcgcatggttatggagggacgaccgccccgacggggccgacgatctcaccgccgacctcctggcctggagaggcgcgtatcgacacaccgccacccttatcgccaacacccgcgccaaagccatcagccaccgcaacgacgtgtaccgcaacgtcgccgctgtcatctccggacaggcggccaccgtagggctggactccatggacctcgccaccatcgccgccacgagcgccaggtccgaactgtcaggcgacgtcacccaaccgggcgccagaaggcgcacctatgccgcaccggggactctgcgcgaatacatcgcggcagcatgcgcgaaagacggcgtgaccgtgagcagcctcgactcgtcgcacgcctcgcgcacccactacgagtgtggacacaccaacccacgcgacaccaaatggctcaaccccatcgtccgttgcgacgggtgcggtgagagcttcgaccagaacaccaacgcactccaccacctccaagccagacagcgcgacctcagtctcaccgcctga

SEQ ID NO: 65719 - DNA, 27 bp, Propionibacteriaceae bacterium sp.
ggcgtccgccagcgtcggggcaaccac

SEQ ID NO: 65720 - DNA, 27 bp, Propionibacteriaceae bacterium sp.
ggcgtccgccagcgtcggggcaaccac

SEQ ID NO: 65721 - DNA, 27 bp, Propionibacteriaceae bacterium sp.
ggcgtccgccagcgtcggggcaaccac

SEQ ID NO: 65722 - DNA, 24 bp, Propionibacteriaceae bacterium sp.
cccgcagcgcattgacggccatcc

SEQ ID NO: 65723 - DNA, 24 bp, Propionibacteriaceae bacterium sp.
cccgcagcgcattgacggccatcc

SEQ ID NO: 65724 - DNA, 2031 bp, Meiothermus silvanus sp.
ttgcgcagcggctgtataagctccaggccgcagaggcgctggttcgcctggctctggccggggcgctggacgaggagggtgccctccccgctcccctggcggcaggccccaaggaacgagccctggtcgaagctgcggggctggaaggagatagccacgacccggcagccctggcctacctggtggcctggctggccgaccagggcgaccccgaagccggacggcacctggcccagggctttctggcccggtttcctgggcaccggattcgctcggactgaaggaaaacccccgctccagagagcgggggagcagggcgcaccgattgagctagcgtttcaatcccctacggggctgttggccctgcctgaccctagtataccacagcggacgttcggctcaagtaaggaaggaggagagatgccttttggcaaaaaagcccgacacgtaaaagcctaccagttcggcgcggacgccccgcaggaggggatggaagcggtgctggaacagcaccgcttgcggacggactactacaacgccctggtggagatggagttgcgccagcgcgaggagcggaccgccttgctcgctaacctggcggcggagtcgggcctcgagagcccgaaccaggtctacgagcggctgaaggctgcgggggagaaggggataagaaaacatcccgagtacgtcgcggcccgagagcggcaaaaggccctgtacggccatccgcgcctgctggaactgcaatcccgccagcgcgaggagcgcaacgccctgcggcggagcttcggggcgaaggggctgtattccagcaactacctggacgtggagcgggccttcgacaaggcccggcagtctcccgagctccgctttcgccgctacagcccccacgaagggcggctggccgtgctgtacaccgaggggctgccgatgcgcgagatcggcagcgacacgcgggtgcagctcccgctgcccgatccaatcatctaccgcgaccgggctacgcggcgcaagcatcagcgggtgctgatgaaattcagggtgcgctcggtggagcggcaaccgctgtggatcacggtgccggtctacctgcaccgggagctgccggacggggtttgccgggaagtgagcctgcactggcaccgagtagctgaccggctgcgctggacggtgagcgtcgtcgtggaggtagagggccctccggtggcctcgcccacgggccggggagcggtagcggtggacctcggctggcgcagggtggaaggcggcctgagggcgggcttctgggtcggggaggacggggcggggggcgagatcgcccttagcgagggcgacctcaagcaattcagcaaggttgaggatttgcgctcgatccgcgaccagcacctcaacgcgctcaaggaggccctcgcggcctggctcgaagcaccgcccgcgcccctgcccgactggctcgcggaggagaccaaaaccctgccccagtggcgcagccctgcccgtttcgccgcgctcttccgccggtggcagtccgagcgtgtccatgccgacgaggccgcttatggcctcctggagggctggcacaagcgcgaccgccacctctggcagtacgaggccaacctgcgcgagcagatgatcctgcgccgcagggagcagtatcgggtgctggcagcgacgctggcccggcagtacgacgcactcatcgtggaggacttcaacctccgcgcggcagccgaactcgaccagggcggctcggacctgcccgacgcggcccgccgctaccgcaccatcgcctcgccctcgacgctccgggacgcgctagtcaacgccttcgcccagcgcggaaaacccgtcaggaagctcaatccggcgcacaccaccaccgattgccacgcttgtgggggcgctctggtgggcgacccggccaaggaattgcggctgtactgccccacctgtgagcgcttctacgaccaggacgagaacgccgctcgcaacctgctccgccgcgcgcaagaggtgcaggcgcaggtctag

SEQ ID NO: 65725 - DNA, 34 bp, Meiothermus silvanus sp.
gcaacgcctagctcgggggtttgatgactgagac

SEQ ID NO: 65726 - DNA, 1866 bp, unknown
  TnpB Polynucleotide
atggggacccgcatctacgagtacggactcctgccaccgacggtgaatcgcgacgtggtgctggcgcagatgcgagccggccacaagtacgcgaacacgctgatcgagatcgagcgcgagcggcgcgggaagcatcgcgccatcgacgctgagtatcccgaggtgagtttggcccacgctgtcctgcaggatgcagtcgcgcgggtggagacgctgcgcgcgacgatgcgagcacagcgcgccgcgacaaaggtcggacgtgcgatcgatatcgagatcacgaccgcccaggtgaagactgcgcgggacgccgccaaacaagcgcggctcgcgtggcgcgacgcccgcaagcgattccgtgatgacccgctgcgtgccgaggccctcgccgccgccgccgatcacgctcacacacggcatctcgctgagcgcgccgccaccgagacgtactggggcacgtacctgaagcgcgaggcctcgcacgagcaggcgtgcgagacgacgtcgctctacgatgagacgggcgcggcgcaagatccacgatggcgccgatggatgggcgatggatacgtcgcgatccaccaggtgaagccgcgtggattggtggcggcactcgagagcaacacggcgctccggatcatgccggtcccggaggacgcctggtctcacccgtcccgcgggtatcgccgccgggccgcgcgtacgacgctgtggatgcgcgtcggcagccaggatcgtgctcccgtatgggcgcactggccgatgatataccaccggccgctacctccacgcggccggatcaagaacgccgcagtgttcctgcgccacgagggcccggcagagatctggtgcgtgcagatcactgtggacgagccgcaggacgagttgcccgtgggtgctggtgtcgtcggcatcgacgttggatggcggatcaggggtctcgacgacgacggctcactccgcgtcgcggtcgcgtcgggcgaggacggcgcggtccacgaactacgcctctcatcgccggacctcgacgccctcacgtaccctgatcacttgcggtcgatccgcgataccaggcttgacgagctgcgcgcgatgctcgtgggatggatcggcggcgcggttgcgccgcagtggttccgcgatgccacgacccatttgcaccagtggcgcgctccgcgacggttcgccgcgctgtaccggcactggggtgagcagcgatggaagggcgacgagtcggcctatgaggcgctggcggtctgggtgaccaaggaccgccacctgtggcactgggaatcggcgcaacgcggacgagcgatccgccggcgccgagacatctaccggcgttgggcggcgacgctcgcggatcgctatgaggcgatcgccgtcgagaacttcgaccggcggcgggtggcggtgaagcccgcgacggaagatggcacggccgacaccagaggatatgatcgcctgcgcgtcctggcggccacgagcgtgctgagccaggcgctcaaggcggcgtgcagcgcccgcgggcgcgactacctcgtggtcgagggagcctacacgacacggatctgtcacgggtgcggacacacgtgcacatggccgcaggatcgccacgtggtccaccagtgcgacgactgcggagcgacgtgggaccaggacgcgaacgcggcgatcaacctgcgcgagcggggtcgtgaggcgctggctcaccgtgaccgctcgaatggtggcaacgacgcgggatcagagcagaagggaggccgatggtcgcgtcgaaaggcggagaaggcggcgaaatccgcggcgcggaacgggtcgctcgaaaacctggagccaactgacggacatgacgcggtgatctga

SEQ ID NO: 65727 - DNA, 35 bp, unknown
  Direct Repeat
cagcaaaggcagctcgatgcctcacgaatcgagac

SEQ ID NO: 65728 - DNA, 35 bp, unknown; identical to SEQ ID NO: 65727
  Direct Repeat

SEQ ID NO: 65729 - DNA, 35 bp, unknown; identical to SEQ ID NO: 65727
  Direct Repeat

SEQ ID NO: 65730 - DNA, 35 bp, unknown; identical to SEQ ID NO: 65727
  Direct Repeat

SEQ ID NO: 65731 - DNA, 35 bp, unknown; identical to SEQ ID NO: 65727
  Direct Repeat

SEQ ID NO: 65732 - DNA, 35 bp, unknown; identical to SEQ ID NO: 65727
  Direct Repeat

SEQ ID NO: 65733 - DNA, 35 bp, unknown; identical to SEQ ID NO: 65727
  Direct Repeat

SEQ ID NO: 65734 - DNA, 2085 bp, unknown
  TnpB Polynucleotide
gtgattcgatgggatatcagaacgaagggggaatggacggcaggaggacattcacgaacaggagaatcagaccaccgggacgataatttgccttttaacgaatctcatgctagggttgcctgttcccatcgcagcgggttggtagctgcgaagatttcccaccttctggagttcccaagcatggcattcggtaacaagagcaaaccgactcgcaagtacaactacggttgccgggggttcctttccggtccgcgtgaaatcaatcctgacggcacgaaagccctccgtcagaggttcgatggacacgacctggcagttacccagatgaagctcgctcaccagttccagaacaagttggtagaaatcgagcgtgcccgcagggaagccatcgacccaatcctggtcagacactttccggctctgacgaccctccacaacgcagcccaggagcagcaggaacgcctccaggagcttcgggatgaactcagccagtcgaacagtcagaaccggcagttgatgtcagaccccgaactagtggagcaaatcaacgctcagaagcgtgtggtgtcccaggcatgggagttctattctgatcagcgggacgccgcgtttgccgacccgaaggtgaaagccgacctgaaggacaacgataagtcgtttgaacaacgaaaggcagatgcccgcaacgcggcggtggaaggtgggttgtactgggctacttccctgcaagtggtgggacgtgtaaagagaaccggcccacccccgaagttcaagtcgtggcggggggaggaagttatctcggttcagttccaacggaagcccgacaagacatccccgaaggagccagttttggactccaaaggcaatcccaagatccatccacgcagcaagaagccaacgttcgctcacgtgggggggtcatctcttcggacctgtgatgtcttcacccccaacacgaattgctggatcgaaaggacgtatcaaccaccgctgacggctccccatccgaagtacgtcgtcatccactttcgtgtatcgtcggacgaaaagggaaagccggtgatggcgtcgattccggctgtcatgtcgcgtcctctccccgaagacggtgaagtgaagtgggttcacctgtcccgcaggaagattggaactcattaccggtgggatgttcagttcgacatcgcacgggatgcgtggacgtatcacccggccggacaggatcgggcacaggaagggactgtcgcggtggcgttgggttggcgtctgattgatggggaaatccgcgttaccgagtgggttggtgatgatggtgtgaccggaaccgtccgtattcccaaagaattggtggaggggtggtcctatcttgacaccctccagtccattcgggataccttgtttgaagctgaaagggctgaactggtcgactggttcgtgaactacccgaatccccttcccgaagagtggaccgagcgtgcccagactctgattcagtggcgaagtgccgacaggttcatgtggctcatttggtggtggaaggatcatcggattcccggagacgaagagatcttccaaagaatgtgggggagaatccaactcaacccaaccacgggaaggaatcagtacaccggggggcgtttgcagagcaaacacctgtgcgactggagggcacacaagcgggacaagatcaagaactggcggaaggatttcttccgaaaagtggcgattgacctgagctatcagtacaaggacgtggtgatcgcggaaattgactggaacaagttggctgagaatcctgaagtcgagaacgggaacgatatcgtcaacaagcgatatcgggcactgtcttcctgtgcccaactccgggacgagataacaagatacatgaacgaagttactgagtccgccaggaacatcgtgacgacgtgttgtcagtgtggggaatcgtgtgaccacccgaagtcgggccgctggattcgctgcgagtcctgtggtggtgaaaagagggatcgggcagtgaatgccgccacgaacttgttaaacagggctttgggggcttctggggcgaaagtacccgctcgcgtctag

SEQ ID NO: 65735 - DNA, 36 bp, unknown
  Direct Repeat
gtaacaatcccagtgcaacgggttagtagttgcaac

SEQ ID NO: 65736 - DNA, 36 bp, unknown; identical to SEQ ID NO: 65735
  Direct Repeat

SEQ ID NO: 65737 - DNA, 36 bp, unknown; identical to SEQ ID NO: 65735
  Direct Repeat

SEQ ID NO: 65738 - DNA, 36 bp, unknown
  Direct Repeat
gtaacaatcccagtgcaacgggttagtagttgcaat

SEQ ID NO: 65739 - DNA, 36 bp, unknown
  Direct Repeat
gtaacaatcccagtgcaaccggtttgtagttgcaac

SEQ ID NO: 65740 - DNA, 36 bp, unknown
  Direct Repeat
gtgacataccgagtgcaaccggtttgtagttgcaac

SEQ ID NO: 65741 - DNA, 36 bp, unknown; identical to SEQ ID NO: 65735
  Direct Repeat

SEQ ID NO: 65742 - DNA, 2022 bp, unknown
  TnpB Polynucleotide
atgcctacacatcaacacaggtggggagaccatccagatccaaaaaaagaactgattcaggtctgttcgatttgcaaaatcgaaagccataaaacagtcgaaaatactattgaattccgccttgggagaccgacattcgcgggaccggagagcgactgtccaaaatgtaatcaggacaccgatggtgacctgtgcaatggtcacactctcatctatcaactgcgcctggggcacgaccatcggaacaagctcactgaggcctatcgagcctcaacgaagctatacagggaaatcataggtgaagcccctagcctccgcatggaggagttgaattcaacgatcgacgagctatccgaagaaatcaaatcactcaaggccatcctcaaggccgacaagaccaataagggagcaaaagatctcaagaaaaagcttacggctaagaagaaggttgctacttctgagcgaaaggatatacgcgaggaaatcaaacagcgcccagagattgaagataagataacggccaacaataagaaactcgctgcggaaatcaaaaggatacgcaatgagttcagggagcagcataagatatgctggggcacctacggggcaaacgaaagagccgctagggcggcccaatatgctcctgggagaaggaaagatccaaaattcaaacattggtctggtgacggtattgtctcagtccaactgcagaaaggtatcaccgccgagcaggcatggggtggtagcaaattccttcagatcacaaaaccgttctcgaccccggaggacaatccttggaccaagaatagaccggatggcaccccagaccgggccttccggcgcaaaaactgtcgaacaacggtgcgcatacgtgttggatcttcgccaaccaatcgcatgaagccaatatgggtggaatttcccattacaatgcataggagtatcccagatgatgtgaaaatcaaatgggccaagattgtgcagaaaagatcaggcaccacctaccgattttacctgcaactgactctaagcaaggataaggcaaaagaagttcagcgccctggggtcgtcgcagtgaatctgggctggagaagagtcggtgacaataacatccgcgcagcctactggtacggagacgatggtcgccacggcgaagtcatccttgagggtgaatacagcaaaaagatggaaacgatgtgcataaagcaggcggcgcgagacctggcactcaatcagattaaagagtcttttgcggtctggctgtctcgtcataaaaaagagcaagacagccttccgcagtggctaaccggatggcgcggcatcagtatgattagaaactgggaatctcaacgtaagctagcgtcattcgttcttcattggagaaaaaatcgcttcgatggcgatgaagccatgtttggcgaactggaaacctggcgaagtctggacaaggctgcatataataggacacgcggcatcgagtaccgctgccagctacgcaagaaagacgcatatcgaaaatttgctgccttccttgcccgtgaatatggcaaggttgtagtcgataatacaaattacgcaaaattcaagaccaaggaaaatttcgacggtgagctgaacagcaaaatcgtcagaaaacaagcctcactcgcatctcctgggaaaatgcggatcctcatcaataacgcctgcggaaaccatggcgcgatattcgaagcgctggactctaagcacataactgctatgtgccatcaatgtggagtgattaacgattgggatcatgcgctatccatcaatcattggtgctcggattgcggtgccttctgggaccaggatgcgaatgctgctatcaacctctgccgcagcggcggaggaaccccacccgatttcgagaccccaggtgacccgaggaagtcaggcatcccatcattggctgtaaatactaaatatgattggattttccaggaaacaatcggaccagcagaacctgctaaaagagtccgaaaagccacctctcgaaattag

SEQ ID NO: 65743 - DNA, 24 bp, unknown
  Direct Repeat
cttgaatagcttgctcgtcggctt

SEQ ID NO: 65744 - DNA, 24 bp, unknown
  Direct Repeat
cttgaacagcttgctcgttggctt

SEQ ID NO: 65745 - DNA, 24 bp, unknown
  Direct Repeat
cttgaacagcttgctcgtcggctt

SEQ ID NO: 65746 - DNA, 24 bp, unknown
  Direct Repeat
cttaaatagcttgctcgttggctt

SEQ ID NO: 65747 - DNA, 24 bp, unknown
  Direct Repeat
tttaaacagcttgctcgtttggct

SEQ ID NO: 65748 - DNA, 24 bp, unknown
  Direct Repeat
acttaatagcttgctcgttggctt

SEQ ID NO: 65749 - DNA, 24 bp, unknown
  Direct Repeat
cttaaacagcttgctcgttggctt

SEQ ID NO: 65750 - DNA, 24 bp, unknown
  Direct Repeat
cttaaacagcttgctcgtcggctt

SEQ ID NO: 65751 - DNA, 24 bp, unknown
  Direct Repeat
tcttaaaagcttgctcgttggctt

SEQ ID NO: 65752 - DNA, 24 bp, unknown
  Direct Repeat
tcctaaaagcctgctcgtttggct

SEQ ID NO: 65753 - DNA, 24 bp, unknown
  Direct Repeat
tttaaatagcttgctcgttggctt

SEQ ID NO: 65754 - DNA, 24 bp, unknown
  Direct Repeat
ctttaatagcttgctcgtttggct

SEQ ID NO: 65755 - DNA, 24 bp, unknown
  Direct Repeat
tttaaacagcttgctcgttggctt

SEQ ID NO: 65756 - DNA, 24 bp, unknown
  Direct Repeat
ctcgaatagcttgctcgttggctt

SEQ ID NO: 65757 - DNA, 24 bp, unknown
  Direct Repeat
actttaaagcttgctcgttggctt

SEQ ID NO: 65758 - DNA, 24 bp, unknown
  Direct Repeat
cttgaaaagcttgctcgttggctt

SEQ ID NO: 65759 - DNA, 24 bp, unknown
  Direct Repeat
cttgaatagcttgctcgttggctt

SEQ ID NO: 65760 - DNA, 24 bp, unknown
  Direct Repeat
cttgaacagcttgctcgttggctt

SEQ ID NO: 65761 - DNA, 24 bp, unknown
  Direct Repeat
cttgaaaagcttgctcgtttggct

SEQ ID NO: 65762 - DNA, 24 bp, unknown
  Direct Repeat
cttgaacagcttgctcgttggctt

SEQ ID NO: 65763 - DNA, 24 bp, unknown
  Direct Repeat
cttgaacagcttgctcgttggctt

SEQ ID NO: 65764 - DNA, 24 bp, unknown
  Direct Repeat
cttaaacagcttgctcgttggctt

SEQ ID NO: 65765 - DNA, 24 bp, unknown
  Direct Repeat
cttaaacagcttgctcgttggctt

SEQ ID NO: 65766 - DNA, 24 bp, unknown
  Direct Repeat
cttgaacagcttgctcgttggctt

SEQ ID NO: 65767 - DNA, 24 bp, unknown
  Direct Repeat
cttgaacagcttgctcgttggctt

SEQ ID NO: 65768 - DNA, 24 bp, unknown
  Direct Repeat
cttgaaaagcttgctcgttggctt

SEQ ID NO: 65769 - DNA, 24 bp, unknown
  Direct Repeat
cttgaaaagcttgctcgtttggct

SEQ ID NO: 65770 - DNA, 24 bp, unknown
  Direct Repeat
cttaaacagcttgctcgttggctt

SEQ ID NO: 65771 - DNA, 24 bp, unknown
  Direct Repeat
atttcaaagcctgctcgttggctt

SEQ ID NO: 65772 - DNA, 24 bp, unknown
  Direct Repeat
cttgaatagcttgctcgttagctt

SEQ ID NO: 65773 - DNA, 24 bp, unknown
  Direct Repeat
cttaaacagcttgctcgttggctt

SEQ ID NO: 65774 - DNA, 24 bp, unknown
  Direct Repeat
cttaaatagcttgctcgttggctt

SEQ ID NO: 65775 - DNA, 24 bp, unknown
  Direct Repeat
cttgaatagcttgctccttggctt

SEQ ID NO: 65776 - DNA, 24 bp, unknown
  Direct Repeat
cttaaacagcttgctcgccggctt

SEQ ID NO: 65777 - DNA, 24 bp, unknown
  Direct Repeat
cttgaaaagcttgctcggcggctt

SEQ ID NO: 65778 - DNA, 27 bp, unknown
  Direct Repeat
gcttgctcgttggcttaaagaacgaga

SEQ ID NO: 65779 - DNA, 27 bp, unknown
  Direct Repeat
gcttgctcgttggcttaaagaacgaga

SEQ ID NO: 65780 - DNA, 21 bp, unknown
  Direct Repeat
gcttgctcgttggctttatga

SEQ ID NO: 65781 - DNA, 27 bp, unknown
  Direct Repeat
gcttgctcgttggctttaataacgaga

SEQ ID NO: 65782 - DNA, 27 bp, unknown
  Direct Repeat
gcttgctcgttggcttaaagaacgaga

SEQ ID NO: 65783 - DNA, 1896 bp, unknown
  TnpB Polynucleotide
gtgatcgcggtctaccggtacggcatgcccgcatgggtcgagctgcccgaggacgttgttgatcagctgcggctcgtccatgacctgcgtgaggaccttgtcaccctcgagcaccgcctcgaggatgcgatcagcgcgatctggtccagctatccggatatccgcgagctggaaacgcggctggcggctgccgtgatgcaggccgaggtgttagaggcgggagtcgccgaggagaagggaaagcagcgaacccggagaccgaccacaccactggtcgccgaactgacagcagcccgtgccgccgtgcggacgctcaagcaacagcgccgggagcagataagggccgtacacggtgcagcgcagcccggcatcgcggccgcggtcacggaacaccgcgcggccgtcaaagcgctctacagcgactacgtgcagactcgcggcctgtactgggcttgttacaaccgcaccgtcgagcgccaccgcaccgccgcgcggcgcatcgccgccgaccgagccgccggccgccacggccgaatgcgccaccaccggttcgacggctccggtgtcttgtcggtgcagctgcaacgtcaacgccacgagccgcaacgcacccccgccctgctcgcctccggaaccgggcgatggcgcaccgtcttgcaattgacgccgtggataccgcccgaggtcttcgagaagatgccgtccgccaatcgacgccgtgccgcgcgcggtaccgtcaccttccacatcggccgtaacggcagtgtcgaactgccggtgatcgtgcaccggatgctgcccgccgacgccgacgtcgtcaccgcgcagctcgtcgtgcgccgtgtggcaggcgggcggcgcgtccacctcaacgtcaccgtgcgtctcccggacccggtgccatccagctccccagacgccgtcgccgggccagacggggcaggctcgcgccccgccgtggcggtccacttcgaatggcgccgcgtcgccgacgacggcacgctgcaagtcgcaacgtggctggccagcgcgccgctgctggtttctgacggcgtccgcgacgtcgtcatggacgacggaagctggtcgggcaccatccaactcccaggcagctggcgcgccgccaccgcccgcgacgccgagcttgcctcacgccgcgacaccagattcgacgcgatccaggcgacagtcgtcgattggctgcgccgcaaccctcccggcgctgcagggagcgctcacccgccaatctgcgacgggtgggagccgcccaccgcggccgaggtcgcccgatggcacgctcccgcccggctggtcatctgggcccgccgaatcgccgagcgcaccagccagccgataccggcatccctggaagtgctgttcgcccaagtcgagcagtggcgccgtgaggaccgccacctctgggaacggcagacccacggacgggacaaggctctcggacggcgcgacgacgcctggcggcgcgtcgccgcctggctcgcgctcaccagcggccagatcgtgctcgatgacaccgtgctcaccgaactttcgcgcaccgaggccaccccgatcccacaacaggtagtggcggtcgcgagtcgacaacgcatggacgccgccgttggacggctgcgagaacagatcaagaccgcggctgcgcgcgagggcgtcgcggtcacgctcgtgtcccacctggggctgggcaggatccatgcggcctgcggctacgagaaccctaccgacgaggtacgccgctctgccgacatcacgtgcggcggctgcgggctgcgctatgaccgcgaccgcaacgccgtgaggctgatgctcggcgcagccgcgacgaccccaacgtcgcccaagcccaccacggtgcggcgggtgacccgagcgagatag

SEQ ID NO: 65784 - DNA, 2028 bp, unknown
  TnpB Polynucleotide
atggcctcccctggtagccagcttcatgccacctggcaactacctcgatctcccgccgcgagcgaatcgcggtgtccacctggacacggccccggcgtgtcccctcgcgtcgccccggtattgccgggcgggccgcgagccccggcgggatgcgggatgtacgatctgcgggtgcgccgggcatgccccgggaatacctcgcctcgcgtcagcgtctcgatctgggccatgacccgcgcctacacctacggactcctgccgccgacccagggcgccgatctggtggccacccagatgcgcctcggccacgcctaccggaaccggctcgtcgagatcgagcgggcccggcgcgcccaggtgtccgagatcctcgagcgcggcgagcccgccgagctgcggacccgcctcgccacgctggtcaccgcgcacgacgaggcgcgcgccgagatcctgcgatcgcgcgcggcgacgcggcgccgtcgcggcgatcccggccaggcggcgctgcgcgatcgcgcccgcgatctggccgcgcagatcaggcccctgcgcgccgcgctgcgcgcgcaccgggcccaccccagcgagtcggcccagatcgggatcgcctgggtgcagctgatcgcctaccacctcgtgcgggaggcccggaaggcgagcgggctctactggggcacctacctgctgcacgagcaggcaatgcgcgccgcggcgacggccgcgagcccgccggagccgatcccgtggcgcggcgagggccgagtctcggtgcagatccagggcggcatgtcaccggacgacctcgaggacgggaccaagatccagatcttgcccggacgccacctgtcggcccccgccgggacccagagccacgcgatcccgctcgcggggaacggcgaccaggtcggcctcggggcccggtccgcccgcgtgctccggatccgcgtcggatcgggtccggggcaacgcccgatctgggccgagtggccgatgcacgtgcaccgtcccctgcccgacggctgccccatcaaggtcgcgacggtgtcgctccgccgccgcggcacgcggtgggactggtcggtgcagatcgtcgtcgacgacggcgacggccgcgacggaggcgccgcccgcggtggcgccgtggcgctcaacctcgggtacgcgatccggcctggcgaccagatccgggccggctacgtcgccggatcggacgggatgcggcgcgagatcctggtcccggcgcgggtgatcggggcgctcgacaaggcggacgcgatccgggcccagcgcgaccgcgacctcaacgccgcgcgcgcccagctggcggcctggatcgccgggcaggacgaggccagcctccccgactggttccgggagcgcacgcagcatgtcggatcctggcgatcgcccgggaggctggccgcgctcgcccgcgactggcagcgcggctggtgggacgacggcgacgccgggtacgatctgctggagcgctggcggctgcgcgatctgcacctcgagcgttacgagaccgggatgcgatcgacggcgctgcggcggcgacgcgacggctaccgcgtcctggcccgcgagctcgccgatcgctaccagaccctgatcatcgacgacaccgatctgcgggacctgcaggagatcccggcgccggagtccgacgacgatccggcctggccggccgcgcgtcgccagcgcaccgtggcctccccgcacgagctccgcgccgcgttcatgaacgcgttcggggtcgatcgcgtcgtccggcgatcggccgtctacgtcacccgcgaccacgtcgactgcggacaccgcaacgagccctgccgggactcccgcgaggtcacgtgcggcggctgcggcgccgtgtacgatcaggacgacaacgcgtgccagaacttgctccgcgagccgccccgtgcgacaggagacgggcagaccgctcgcgctcccacgcgcacgacgagacgaggttatcgaatccgcaagggcagtctggcgacgcgatcgggcgagtga

SEQ ID NO: 65785 - DNA, 36 bp, unknown
  Direct Repeat
gtgacgatggcagcgcagcgcctgatagactgcgac

SEQ ID NO: 65786 - DNA, 36 bp, unknown; identical to SEQ ID NO: 65785
  Direct Repeat

SEQ ID NO: 65787 - DNA, 36 bp, unknown
  Direct Repeat
gtgacgatggcagcgcagcgcccgatagactgcgac

SEQ ID NO: 65788 - DNA, 36 bp, unknown; identical to SEQ ID NO: 65785
  Direct Repeat

SEQ ID NO: 65789 - DNA, 36 bp, unknown
  Direct Repeat
gtgacgatggcagcgcagcgcctaatagactgcgac

SEQ ID NO: 65790 - DNA, 36 bp, unknown; identical to SEQ ID NO: 65785
  Direct Repeat

SEQ ID NO: 65791 - DNA, 36 bp, unknown; identical to SEQ ID NO: 65785
  Direct Repeat

SEQ ID NO: 65792 - DNA, 36 bp, unknown
  Direct Repeat
ttggcaatggcagcgcagcgcccgatagactgcgac

SEQ ID NO: 65793 - DNA, 36 bp, unknown
  Direct Repeat
gtgacgacggcagcgcagcgcctgacagactgcgac

SEQ ID NO: 65794 - DNA, 37 bp, unknown
  Direct Repeat
gataacgatagcagcgcagtgctcgacaaactgcgac

SEQ ID NO: 65795 - DNA, 36 bp, unknown
  Direct Repeat
gtgacgacggcagcgcagcgcccgatagactgcgac

SEQ ID NO: 65796 - DNA, 38 bp, unknown
  Direct Repeat
gcgtgacaatggcagcgcgacgccagatagatcgcgac

SEQ ID NO: 65797 - DNA, 37 bp, unknown
  Direct Repeat
tgtgagaatggcagcgcagcgcccgatagactgcgac

SEQ ID NO: 65798 - DNA, 36 bp, unknown
  Direct Repeat
gtgacgatggcagcgtagcgcctgatagactacgac

SEQ ID NO: 65799 - DNA, 36 bp, unknown
  Direct Repeat
gtgacgatggcagcgcagcgccagatggactgcgac

SEQ ID NO: 65800 - DNA, 38 bp, unknown
  Direct Repeat
gatgacgaatggcagcgcagcgcccgatagactgcgac

SEQ ID NO: 65801 - DNA, 36 bp, unknown
  Direct Repeat
gtgacgatagcagcgcagcgcttgatagactgcgac

SEQ ID NO: 65802 - DNA, 36 bp, unknown
  Direct Repeat
gcgacgatggcagcgcagcgcccgatagactgcgac

SEQ ID NO: 65803 - DNA, 38 bp, unknown
  Direct Repeat
ggatggcgacggcagcgcagcgcccgacagacttcgac

SEQ ID NO: 65804 - DNA, 35 bp, unknown
  Direct Repeat
gggcgatggcagcgcagcgcccgatagactgcgac

SEQ ID NO: 65805 - DNA, 36 bp, unknown
  Direct Repeat
gtgacaatggcagcgcagcgcccgatagactgcgac

SEQ ID NO: 65806 - DNA, 36 bp, unknown
  Direct Repeat
gtgacgacggcagcgcagcgcctgatagactgcgac

SEQ ID NO: 65807 - DNA, 36 bp, unknown
  Direct Repeat
gtaacgatggcagcgcagcgcccgatagactgcgac

SEQ ID NO: 65808 - DNA, 36 bp, unknown
  Direct Repeat
gtaacgatggcagcgcagcgcctgatagactgcgac

SEQ ID NO: 65809 - DNA, 38 bp, unknown
  Direct Repeat
cgatgacgatggcagcgcagcgcccgacagactgcgac

SEQ ID NO: 65810 - DNA, 36 bp, unknown
  Direct Repeat
atgacgacggcagcgcagcgcctgatagactgcgac

SEQ ID NO: 65811 - DNA, 36 bp, unknown
  Direct Repeat
gtgacaatggcagcgcagcgcctgatagactgcgac

SEQ ID NO: 65812 - DNA, 36 bp, unknown
  Direct Repeat
ttgacgatggcagcgcagcgcccgatagactgcgac

SEQ ID NO: 65813 - DNA, 36 bp, unknown
  Direct Repeat
ctggcgatggcagcgcagcgcccgacagactgcggc

SEQ ID NO: 65814 - DNA, 33 bp, unknown
  Direct Repeat
ccacgggcgcgaccggcgatacgggtgccacgg

SEQ ID NO: 65815 - DNA, 33 bp, unknown
  Direct Repeat
ccaccggcgcgaccggcgatacgggtgccacgg

SEQ ID NO: 65816 - DNA, 1755 bp, unknown
  TnpB Polynucleotide
atgccttttggacgaaaagcgaaaccgtgccgtgtcttcgaatatgggtgccttccccctgtatcgggcaaagacgaattacttaaagaattgcgattacgcaacaactactggaacaaactcgttgagatagaccgtctaatccgacaacgaagcgcattaatactactattgccaggcgacattgaggctgcgcacctagacgcgcagatagacctgatgcgaggagaaatcaaaaaagggcggcagagaacccgttcgagcataaccgacgccgaccttaaacagcggataaaagactccattgcggaattgcgcgtactctgggaacaaaacaaaaaggatcgcaaaccgctaatagaaacaacccgtgcagacttagccgccatcgaaaccgaatggcgggtcgctcgcaaagccgctcgtgctgatagtggtttatattggtgtaattacgacgatgtagacactgcctacgacgtcgcccgcaaagaaaccgccaaaaagtgggcattcccgaaattccgccgatttgacggtacgggcaaagttaccgtccgttggcagaacgggttaaacgcgaacaacgtttttgacgggactggcacattgcttcaaatagccccagtacatcaagacgcatggaatcaccctgtacgatcaaaccggcggaaagcgtcccgaacgacagtacgtttcagggtccgctccgagaatcgttccccggtctgggtagaattaccgatggttatgcatcggcctttaccggcgggcggagaaatccgtagcgcttccttagtttgtggatacgttggcggcaaaccaacgtacaagctagtcatcacggtagcgccacccgcccatacattgcctgaagaaggcatgcacagaggcatccgtccgacagtcggtattaatttaggttggcggaaaaaagacaatgatatccggattgcttactgggcagatgaagaaggtcggcatggagaattaaccttaaccagcaacacccttgcccaattctccaagttgaacgatttaaaatccatccgcgacaaatatttcaacgaagcgataagtgccctggcattatatatcagcgagggaaccatccctgactggctcaaagcagacacaacacacttgaacaaatggcgttcaaaaccccgcttattggcacttgtcggcaagtggcgagaaacccgttttactggtgacgaaattatttacgaggcgttattttactggcgcggtcgggagttgcacctgcatcaatgggaagccaacttgcgcgaccaagttcagcgtcacaggcgagagcggtaccgcatattcgcagcgcagcttgccaaagactacagccaaattttcattgaaaatcataacttagtagtgacgaaaaagaaaaaggctactgaagacggcacgtacttaaccaccgaagttgacacactacgcaccattgcatctccgggcatccttcgcggccaaatagagaacgcctgcaggcgcgagggtgtcatcttcacgaaactagacgcaaaacacattactagcaaatgtcatatttgcggctggcaagaaaaatggaacgctgccgcaacaataacaagagaatgtcctggttgcaaaaccgaatgggatcaagactacaacgcggcccgactgttgttgcaacgcggactagatggcgggtatttggctgtaccgcaaaccaccctcgaagatgatcccaatttttgtataggttcctaa

SEQ ID NO: 65817 - DNA, 25 bp, unknown
  Direct Repeat
gttgcagtgcccagctcaggggctt

SEQ ID NO: 65818 - DNA, 25 bp, unknown
  Direct Repeat
gttgcagtgcccagctcaggggctt

SEQ ID NO: 65819 - DNA, 25 bp, unknown
  Direct Repeat
gttgcagtgcccagctcaggggctt

SEQ ID NO: 65820 - DNA, 25 bp, unknown
  Direct Repeat
gttgcagtgcccagctcaggggctt

SEQ ID NO: 65821 - DNA, 25 bp, unknown
  Direct Repeat
gttgcagtgcccagctcaggggctt

SEQ ID NO: 65822 - DNA, 25 bp, unknown
  Direct Repeat
gtcgcagtgcccagctcgggggctt

SEQ ID NO: 65823 - DNA, 25 bp, unknown
  Direct Repeat
gttgcagcgcccagctcaggggctt

SEQ ID NO: 65824 - DNA, 25 bp, unknown
  Direct Repeat
gttgcaatgcccagctcagggctta

SEQ ID NO: 65825 - DNA, 25 bp, unknown
  Direct Repeat
gttgcagcgcccagctcaggggctt

SEQ ID NO: 65826 - DNA, 25 bp, unknown
  Direct Repeat
gttgcagtacccagctcaagagctt

SEQ ID NO: 65827 - DNA, 37 bp, unknown
  Direct Repeat
gttgcagtgcccagctcaggggcttagtgactgagac

SEQ ID NO: 65828 - DNA, 37 bp, unknown
  Direct Repeat
gttgcagcgcccagctcaggggcttaatgactgagac

SEQ ID NO: 65829 - DNA, 35 bp, unknown
  Direct Repeat
tgcagtgcccagctcaagggcttaatgactgagac

SEQ ID NO: 65830 - DNA, 35 bp, unknown
  Direct Repeat
tgcagtgcccagctcaggggcttaatgactgagac

SEQ ID NO: 65831 - DNA, 2268 bp, unknown
  TnpB Polynucleotide
atgatcgcgtcgttcaccaccttgcgcacccatgccgcggcacccccgtacccgagcgctgcggcatgttttttccaacgcgcgagatctcgcgagttgcagcggatcatgaacactacgtcaagatcagccacgcgcggtttcgacgcctttcgagccacgtcccacgtgtatagctatccattgacgtcgtcaagtcctgtgtgctacctggatccggtgatcaagaactacgaatacggcctcctcgatccaacgttcaacgcgccgctcgtcgacaaccagatgcgcgcgggccaccgttactacaaccagctcgtcgagatcgagcgtgatcgacgcaccgcgatcggaaagatcttgatcggacaccccgacaccgaggccctcgccgcccgggtcgccgccctcgtcggccagcgcgacgcggcccggcaggcgatcaaggtgtcccggcaggcgacgcgggatcggtccgagaccgcccagatgcgcacacgggtgaaagatctcgccgtcgagctcaaggcggcacgcgcaacactcaaggcggcgcgcgacgtgatcaagaccgatccggagatcgtcaccgcgatcgccgcagccgacgagatcgcagccgaccgcgtgcgagcagcacgtgcagcgaccgattgccactgggggtcgtacttgctccaagagcaggccatcgacgccgcgaagaaggccaaggcaccgccgagtttcaagcgcgtatccaaactcgaactggagcagaagaagatcgaggacgtagccgaggacgaagacgaggacgaggacgaagacgaggacgaggacggcgttgtcgaggcgaagatcaagatcgctccctggatgggggagggacgtgtgtccgtccagctccagggcgggatctccgacaccgagctgttcggtacggacacccagatccagatcgcgccggtctcgccggacgcacatgatccggggaagccccgcagtgtccaccgcctcgcgagccgcactacgctacgcctgcgcgtgcagtcgacggacaagggcaagcccgtctgggctgaatggccaatgattttgcaccggccgatcccggccggggcgcgcatcaaggttgctacggtgtcgcgtcgccgccgcgactgccggcgctgggactggcgactcctgctcacgctggagatcccggacggagcgatcgcggcgcgtgcgattcccgccgggggtgccgtcgcgctgaacctcggctggtgccggcgacccggtgacgaagtcagggctggctacgtgctctccgacgacggggcggtcgatcgcgagatcgtcgtgcagcgatccacgatcgatcgcgtcgagaagtccgaggcgatccgttcgcagcgcgacaaagatctcgacgtgatgcgggcggcgatcgtcccgtggctgcgggagcgcgaggcagagctaccggagtggctcgtcgagcggacgatcctgtcgcgagcaccacgagaaccacgtgaacagcaagagccgctcgacgctccacgagtcgagacagcgacgaggatgcgatcctggcacatcgcacaatggcgatccgcctcccgcttccgcgcgctggcgttcgcgtggcgagcgcagcgcttcggcggcgacgaggcgggctaccagatcctggaggcctggcgctaccgcgacgagcacctcgagcgctacgagtcgggcatgcgccgcggcggcctcctcgatcgccgtgaaagctaccgcctactcgccgccgatctggccgcgcgcttccgaacactcgtcgtcgacgatttcgacctgcgaacgttccaggaaaaaccaaagccggaggacacccgtgtcgagcgggccgcggccaagcggaaccagcgccacgccgccggatccgagctgcgcggcgcgctcctgaacgcgttcgggcccgcgcgcgtccagaaggagtcgtcggtcgacgtgacgcgcgcctgcgcaagcgtcctggctgccaccggccacgtctgtggtcagatcgacgactgggatcacgccgcggcgcgggagcacacgtgctcggagtgcggcgtgtcatgggaccaagatcagaacgcgtgcaagaatctgatcggccgctggcgaatcagcgagcggctcggtgcggacaaggctaccgagactcctcgcgacgccaacgtggcgccgaagaaggagtcccggtcagagcgcctgcggaggacgcggtggaagcgtgaggaggtcgcggcgctcgatacgccgtag

SEQ ID NO: 65832 - DNA, 29 bp, unknown
  Direct Repeat
gtcgcgagagctgctcgacgctctacgag

SEQ ID NO: 65833 - DNA, 36 bp, unknown
  Direct Repeat
gtcgcgagagctgctcgacgctctacgagtcgagac

SEQ ID NO: 65834 - DNA, 36 bp, unknown; identical to SEQ ID NO: 65833
  Direct Repeat

SEQ ID NO: 65835 - DNA, 36 bp, unknown; identical to SEQ ID NO: 65833
  Direct Repeat

SEQ ID NO: 65836 - DNA, 36 bp, unknown; identical to SEQ ID NO: 65833
  Direct Repeat

SEQ ID NO: 65837 - DNA, 36 bp, unknown; identical to SEQ ID NO: 65833
  Direct Repeat

SEQ ID NO: 65838 - DNA, 29 bp, unknown
  Direct Repeat
gtcgcgagagctgctcgacgctctacgag

SEQ ID NO: 65839 - DNA, 36 bp, unknown; identical to SEQ ID NO: 65833
  Direct Repeat

SEQ ID NO: 65840 - DNA, 36 bp, unknown
  Direct Repeat
gtcgccagagctgctcgacgttctatgagtcgagac

SEQ ID NO: 65841 - DNA, 36 bp, unknown
  Direct Repeat
gtcgcgagagctgctcggcgctctatgagtcgagac

SEQ ID NO: 65842 - DNA, 36 bp, unknown
  Direct Repeat
gtcgcgagagctgctcgacgctctatgagtcgagac

SEQ ID NO: 65843 - DNA, 36 bp, unknown; identical to SEQ ID NO: 65842
  Direct Repeat

SEQ ID NO: 65844 - DNA, 36 bp, unknown; identical to SEQ ID NO: 65842
  Direct Repeat

SEQ ID NO: 65845 - DNA, 36 bp, unknown; identical to SEQ ID NO: 65841
  Direct Repeat

SEQ ID NO: 65846 - DNA, 36 bp, unknown; identical to SEQ ID NO: 65841
  Direct Repeat

SEQ ID NO: 65847 - DNA, 36 bp, unknown; identical to SEQ ID NO: 65841
  Direct Repeat

SEQ ID NO: 65848 - DNA, 36 bp, unknown
  Direct Repeat
gtcgcgagagctgctcgacgctctatgagtcgagga

SEQ ID NO: 65849 - DNA, 36 bp, unknown
  Direct Repeat
gttgcgagagctgctcggcgctctacgagtcgagac

SEQ ID NO: 65850 - DNA, 36 bp, unknown
  Direct Repeat
gtcgcaagagctgctcggcgctctacgagtcgagac

SEQ ID NO: 65851 - DNA, 27 bp, unknown
  Direct Repeat
gtcgcgagaactgctcggagctcggcg

SEQ ID NO: 65852 - DNA, 36 bp, unknown; identical to SEQ ID NO: 65833
  Direct Repeat

SEQ ID NO: 65853 - DNA, 34 bp, unknown
  Direct Repeat
cgcgagagctgctcggcgctctatgagtcgagac

SEQ ID NO: 65854 - DNA, 36 bp, unknown
  Direct Repeat
gttgcgagagctgctcggcgctctatgagtcgagac

SEQ ID NO: 65855 - DNA, 36 bp, unknown; identical to SEQ ID NO: 65841
  Direct Repeat

SEQ ID NO: 65856 - DNA, 36 bp, unknown
  Direct Repeat
gttgcgagagctgctcgacgctctacgagtcgagac

SEQ ID NO: 65857 - DNA, 36 bp, unknown
  Direct Repeat
gtcgcgagagctgctcggcgctctacgagtcgaaag

SEQ ID NO: 65858 - DNA, 36 bp, unknown
  Direct Repeat
gttgagagagctgctcgacgctctacaagtcgagac

SEQ ID NO: 65859 - DNA, 39 bp, unknown
  Direct Repeat
gttgcaagagctgctcggcgctctactacgagccgagac

SEQ ID NO: 65860 - DNA, 28 bp, unknown
  Direct Repeat
agctgctcggtgctttacgagttgagac

SEQ ID NO: 65861 - DNA, 36 bp, unknown
  Direct Repeat
gtcatgagagctgctcgacgctctacgagtcgagac

SEQ ID NO: 65862 - DNA, 36 bp, unknown; identical to SEQ ID NO: 65833
  Direct Repeat

SEQ ID NO: 65863 - DNA, 36 bp, unknown
  Direct Repeat
gtcgcgagagctgctcggcgctccacgagccgagac

SEQ ID NO: 65864 - DNA, 24 bp, unknown
  Direct Repeat
gctcggcgctctaggagccgagac

SEQ ID NO: 65865 - DNA, 36 bp, unknown
  Direct Repeat
gtcgcgagagctgctcgacgctctacgagccgagac

SEQ ID NO: 65866 - DNA, 30 bp, unknown
  Direct Repeat
gtctcggctcgtggagcgccgagctgctct

SEQ ID NO: 65867 - DNA, 34 bp, unknown
  Direct Repeat
agcaagagccgctcgacgctccacgagtcgagac

SEQ ID NO: 65868 - DNA, 1785 bp, unknown
  TnpB Polynucleotide
atggggcatgacaccgatgggtggccggtccgggtctaccggtacggggcgcccggatggggtgggaagcgggccatcaccttgtcggaccgcgggcacgatcagatgcggctcgctcatcggctgcggaacgacctggtggaggtcgcggaaacggctgacgcccggatggcggcgtggtgggctgaccggctcccggacgtgtacgccgctctcgcggacgcccaggcggcccgcgagagcgcatggcaaggcgttcagcgtgcacggtcggtacagcggcgccgggacgtcactgggcccgaggtcgacatctaccaagccgcgacagcagtcctgcgagctgcgtcggcggccgtgaaagccgcgcaggccggggtgcgggccgatgacccggacggcgtccgggagatgctgacacagacccgtgcagcgtcggctgcggccgggaaagcgctatacgcccggtactccgaggccgggctgtactgggcgacgatcaacgcagtcagggacgatgcccgggtcgccgagcagcgggtcatcgcggcccggaccgcgggaaggccatcagcccgccggtacgcccgctgggacggctccggaaggatcgcagtccagctgcaacgggcttccggcgatccgcggcgcaccggcgtcctactggcttccggggcagggaagtggcggaacgtcctgacgatcgggccgtccgagtacggtccccgtctacgccgggtcgagttctcaaccggacgtggccagccacctgtcggggtggatgtggcctggcaccgggaccttcccaccggcggtgacgtgaccagcgctgagctcgtcgctcaccggatcgcaggacgaacccggtacagcgtgcacttcgcggtccgggtcgccccaccggtcccggtgacggccggccccgacctcgctgtccacctcgggtggcggcaggaacctggcgggggagtccgggccgcgacgtggcagtccaccgtccccctgcaggtccctgccgagatggttgggttcgtgaccgctgacaccccgaccggtggccgggtcatcgtccctggggcactgctggagcggctggcccgggccgacgagatccgcggtggtcgtgacgtcgctctcgacgagatccgcgccaccctggccgcgtggctcgaccagcatccccagccctcgcttcgggacggcgaccctgacctgaccggcccggtcgtgcgggcgtggcggtccccggccaggttcgtggccctcactgcggcatggcgggccgacccccgagaggaactcgacgacatcgccacccaactggagacctggcggtgcgctgaccgccgcgcatgggaacgagaggcgaacctgcggtcccggaccgtcgggtaccgccgcgacctgtaccggcaagttgcagcgtgggcatccacgaccgcgggtcgggtcgtcgttgatgacaccgacctccggcaggtcatcgcccgggccaagaccggggacctgctacccggcaccgcggaagccgcgatcgcagggcgccgcgccgacgtcgcccccggagacctgcgcgccgctgtcgtccaggcagccatccgggacggggtcccggtcgtcacagtcccacacaagggcggtaccgtgacccatcacgcgtgcggggcgtctctgcccgccgatgaacggtggctacgcccgatcgtcacctgtgaccgatgcggccgcgacttcgaccaagacgtcaatgccgccgcgggcatgctggcgcgagcggtccaatga

SEQ ID NO: 65869 - DNA, 1968 bp, unknown
  TnpB Polynucleotide
atgactaagtccgatgcgaccatgaccaagtccgatgcgaccatgacgtctacaacgtccatgacttctgttctcgtctaccgctacggcatcaccgctcccagcgaagagcgcgagcgcgtcttcgaccagatggaatgcgcgcatcgtttccgcaacacgctggtcgagatcgaacgcggccggcgcgcggccgagcgggcgttctacgcggcgctgagcgagaagctttcaacgctcacgcaagcggccaagagcgccgatgacgaggtcgagcgcttggagaccgagatccgcaaagagcgcgcgaggactcgcaagcgttctgatggagcggagcagcgcgaggctctgaagatagctcgcaaggtcaagtcggtggtcgtgaagatgctgcgcgaagctcgcaacgatttgcgcaccgatccggcggtcatcgcggcccgcgacgcgctctccgagcgtgcgggcgagctagtgcggtcggcgcgcaagtactcgggcctcgcgagcgcaggaccgcacttcggcgcctggggcacctaccagctcgtcgaggaggcagcacaggcctctttcaagtcgacgccactctactgcctcgacgggatcactcccaacgatccgggcttcgtgcgccgtaccggcgacggtgccgtgtcggtgcagatccagggaggcgcgaccgtagaggaggttttcggggaccacattcagttgcgcatcacgccgcccgacgagcgggcgtggctcaagatgccggacaacggttggtcggcgcgccgacggttcgcgcggcagggagaccttcgcatgtgcctgggcacggacatcgaaggcaaacgcatcttcggccggtggcgactcgacatgcaccggcaattgcccaagggagcgatcatcaagcgcgccaccgtgcgtcgacgcatgagcggtccgtatgcgcactggtcggtggagctgacgatcgagtgcccgcagcgcccgatcctggcgccgacccacggcggcgccatcgcgatcgatctcggctggcgcgtgatgggcgagggcgcggacaaggagctgcgcgtcgcagggtgggccgacacctcgggccgacacggcgacgtgcggctcgacgtcaagatgctcgggtggctgcgcgatccggaccgcatccgcggacgacgtgactgcgcgttcgatctgcaggttctgcacctgtcccggtggctcgacacgttcacgcgcgtgcctgcatggttggctgaagccacgcaaacgttgaaggcctggaagtccgccgctcgcctgacggcgcttcgcaaccgttggcgggaggcgcggtttgcaggcgacgagatcatgtttgccgcgctcgatgcgtgggccacggccgaccgacactactgggcgcaggagtctcgtcgccgggacgcggctctgcgggcccggcgtgagcagtaccgggtcttcgcagcgaagatcgccgacgaatacgagaccatcgtgctcgaacggttcgacctgcgcgtcttcgcggtccggccggcggcggaagccgagaaggcggagaatgagaccgctcgtagcaaccgccacttggccgccgtgagcgagcttcggatggcgatcctcaacgcagccacgtcgcgcgggcgcactgcggtgggtatgtcggcggtcgacacgacccgccagtgccccgtgtgcggcacggtggaggtgagggaagcggcggagtccgtcgtcctggcatgcgcctgcggcgccgtctgggaccaggacacgcacggtgcggctccggtcctcttgcagcggtggacgaccagccccggggatatcaaggtgctcgtaccgaacgaagagaaggagaagcgccgtgtacgggtgcggcgcctgcgggacgcgaaggttgagcggatgggcggccaggcgggtggagagaaggcggcggcgggaggcaagaggaagcgaagtcgctag

SEQ ID NO: 65870 - DNA, 22 bp, unknown
  Direct Repeat
ggtgaaccgtctgcggagggga

SEQ ID NO: 65871 - DNA, 22 bp, unknown
  Direct Repeat
ggtgaaccgtctgcggaggtgg

SEQ ID NO: 65872 - DNA, 22 bp, unknown
  Direct Repeat
ggtgaaccgtctgcggaggtgg

SEQ ID NO: 65873 - DNA, 1998 bp, unknown
  TnpB Polynucleotide
atggaccgacgcgatcgccgccgtccatccgagccgtggcgacacgcaccctctctacgccatcgccatgcgcatggtcgggcatcgccacagcaaggcggctctcgtccacctcgtgcactggctcctcctcctgaaccagcgccgcgagaaggtgattccgtgatcgtctaccagtacggcctgcactccccgcacgaaaacgcccacgtcgtcttcgagcagatgcggctcgcccaccgctaccgaaacaccctctgcgccatcgagcgcgcgcggcgcgcggcgatgcgcgccatgctccgggatctctcggctctcctcctcgagtacgaaacggctgcggccaagtggcacgccgaggtcgaggtcgtgctcggacggatcaaggcgtcgcgcaaggcgagccgcaagcgctccgagtcggaggccgacaaggcgctcctgcgcgaggcgcgcgcgatgcacaagagcgccgtgggcctgcttcgcgaagcccgccggcaggcgcgggaggctccgcacgtcgtcgccgagaccgagcggatcaacgccctcgccgccgacctcaaaagaaacgcccgcgcccactccggcctctactggggcacctacctgcgcatcgaggacgccgcggcgcagagcgcgaagatgccgctctacgacggcgagcacccgaacgatccccgcttcatccggtggcgccccgactgctggcatggcgaatgcgccgtgcaactccagaatggcctcccgctcgatcgcctcgtctcgggcgccgacacgcgcctgcgcctcacgctccccgaagtcggcgcgtgggaccacccgtcgtgggcggagcgccaccggcgcgcccggacggcggccttgcagatgcgcgtggcaagcaccaagtcgggcgcgcccgtgtgggccacctttacccttgacatgcaccggcccttgcccaaggacagcgtcgtcaagtgggccgtcgtgcagcgggtgccggtcgggccccacttccggtgggtgctgctgctcaccgtcgacgcgccgacgaccgggatcctgcccgagaccggcagcatcgtcgcgctcgacgtcggctggcgcgcgctcgaggggggcctgcgggtcgcgtgctggcgcgggtcggacggagcgagcggcgaggtgcgcctctcgccgaaggatctcgcgcggctccgggagcccgacgacctccgctcggcccgggacatgctgatggataccctcaagacccacctcggcgcgtggctgaaggtcaacgaccacgcgcccgcctggctgaaagaggagacggcggcgctccacgcgtggcgcgccccggatcgcttcggcaagctccggtggatgctcgagcagaaggagcgcttcaagaccgacgactacccgagagccctgctcgacggatacctcgcccacgaccgccacctctgggcccaggagtctcgaaggcgcgcgcggagcctgcgcatgcggcgcgagatctaccgcgtcgtcgccgccgccctcgccacgcgctacggcgtgctggtgctggagaagttcgacctgagggacgtcgcgcgcaagcccgacgccctcgatccatcggacaacgccagcgcgcgcggcggccgacacctcgcctccgtctccgagctccgctccgccctctcgaacgccgcccgatcccgcggccgcatggtggtcaccgtcgacccggcccactcgagccacgtgtgcccggcgtgcggctgcgccatcaccttcgacgccaaggagagcctcaccttcgcgtgcgacggctgcggcatcacctgggaccaggatctcgccgccgccgcgaacctgctcgctcgctacctcgcggctccggcggctgcaaacgtcgtgctgcaaggccctcgcgcgcagacggaggtgatggccacggagaaggaaggccggtgggccaaggcccggcgcatgggcaaggcgaagaaggagaggcaagcggacgccccgtag

SEQ ID NO: 65874 - DNA, 1860 bp, Rhodopila sp.
atgctagtaaacgaccccggcctaaaggccgacccaggaattctaatgaagactctaaactggacatatcgagcgtgcgccccgacggtaaacgcggctcgcgtctccgaccagatgtggctgggtcatcgctaccgcaacgccctcgtggaaatcgagcggtggaggcggcaggcgatcgcggacctgcggaccaagctgctgccggggctggccgaagccgaggcggcacatcaggcggccgacggcgcgtgcgcggcgcatgcggcggaagtgaaggctcgcaatgcccagtcgcggagcaaggcggccagcaacgcggatcgtgatcgcaccaaattgctggcagtggctcgtaaggcggcatgggaggccgttaaggcgatccggggacaagaaaagaccacggagtacatcgcggggtgttcgtcaattcaggacgagtttaatgcccggtggcgcggcgcgcgtgccgcctctggactatgggccgggacgtatcaggtcgtcgaacaggcggcccgtgcttcctttcgccagtccatcgcgccgccgaaattcatgaagttcgaggggcatggcgtcgtcggcttcaacgattccgacgtacgcgaccctgagacaagcggcatacccatcgccgacgtgattgccggcacctgtacaaaactgcgcattgagcccgagccgttgccgccggggatgcgcgaagccaaagccaagccgcacaccgtttatctgcggatcgggagcgaagtggacggacgggctccggtatgggcggtgttccgagcccgcctgcatcggccgattcccgccagcgcgatcgtcaaatgggcattcctggagcgggagcgggtcggcgcgtcgtatcggtggcaattccgcctgacgctggcgtgccccgatggatcgctgaagcctaagccgcgggccgctggaggtgtcgtggctgttgacgtcggctggcggatcgtgccggcgggcctgcgcgtggcgtattgggtcgggtcggacggcgatcagggcgagttggtcattcctaagtcgcggttgcgccagatgcgcaagcccgaggagttgaagtcgatccgggacctcgctttcgcggaggtcctgccggcattcaaggcatgggcgtcgggccgggaactgccggaatggatggtcgaggcaaccaagacgctgccgcactggcgctcgcaggggaagctcgcgtggctggtgacccaatggcgagagaagcgattcgacggggacggcgcgatgtatgacgtgctggaagcctggcgcaagcaggacaagcatttgctcaattgggaaggtttcgggcggtcaacagactggcgcaaggagttgtaccgtgatttcgcggccttgctccgcaagcggtacgcgcgagtcattgtcgaggatacggactggcggaaaatcgcccgccgcgccccggcggattccaataagcacgatattgaggccgcgcggtggaatgcccgcgtggccgccgtcggagaattgtgccagacgttgcgggcgttcgcgttcgccgaggatgcacctgctgagtattctactcaagagtgtcatttatgcagttacgtcaattctttcgacgccgcaaggtcgattatgcagacctgcgcgaaatgcggcgcgacgtgggaccaggacgaaaatgccgcgcgggtgctgcttgcgagaggctcagtggtaagcgaaacgccggaccctcgcgaggttgttgtggaaacggaagttaggcggaaaaacacggcggcggagtggcggacgggtgcccaacgaaagcgggccgctcgcagggcggcagctatcgctgcggcctgtaatgggttagagtaa

SEQ ID NO: 65875 - DNA, 1695 bp, unknown
  TnpB Polynucleotide
atggcgaaaaagatgcagagtgaagaagcccagaggaatacctcatttcgcgtatttgaatatggatgcttgtccccacttgctaatgaagatattgcgcttgagcaaatgcggaaacgaaatgaattctggaaccgcttagtttcgatagagggtgaatatcgtaaaaagtcgatgtctttaatcgcttcggaaagaaatgataccttggataatcttgaaggaaaaattgctgatttgcgcgatgaaatcgataagcatcgtaaggttgctcttaaagacgttgatgcttttagtcttgtcaatgaagtcaaaaaactgcaagaagatcgcaaaatattatacgccgaacaaaagatgcgtcgcaaagaatttattgagatgaataagccagcgtttgaattgatcgagaaggagcgccgtgatgccgtaaaaaaggcgcaggccgaaagtggtttgtggtggtgtaactatgacgatgtgctaagcagttacaatgtggccagaatcaaagcgatgaaagaggggaaagagttaaagtatcatcgttttgatggttccggcaaagtttcggtgcgatgtcaaaggggtctggctatagaaaaagtttttggttcgaataaacatatccaaataaaacctattgaccagaccgcgtgggattgttcgattcgtgccgaacgccgaaagatgactcgctccattgttaagattcgcgtcggttctgatggacgagacccaatttggtttgaattgccttttgttatgcatcgccctatctcttttgagtgtacaattcgctcggcatctgtcgtgagagaaaaatatggtaacagttttcgttataaattaatcatcataacttgcttttctcagttcgcggaaaataccgccgataaaggggctgtaggaattgatttaggatggcggcgtgttgatgatggcctcagggttgcctattggtgtgatgaagaggggcgaaacggtacactcactattccgaatgatatcatcgtccgctttaagaaagtggatgatttgaaatctattcgtggtagacatttcaataatgctaaagctgttctggctgggtggctcaaagacaagccaacacctgaatggcttaaaggggaagcaaagtttctctataagtggaattcgcccagtaagtttaaaaaactattgtttaaatggcatcagaagcgatttcccgaagatcaagagatggtcgctttcattgaaaaatatttgaaacgggatttgcatctttggcaatgggaatttaatcttcgcgataagattcaaaggcggcgccgggaattataccgtatttttgccgctgaattggtgaagagatattccactgtattcctggaaaagtttgatctgcggcgagtagaggaagaatcggaatatggtacgcaaggtgcgctgctttctaattatcaccggacaatcgcgtctgttagcatattacggaatgtgattaattccacattttcccgcagggggaaatatatactgcagattgaggctaaaaatactacgatgaaatgtcataaatgcggacaggttgaaaagttcgattctaagaggcaaatttttcatacatgttccgcatgcgatgcagtttgggatcaagatcataacgccgcaatcaatatcctagaaaggggactctcgcaaaaagagtag

SEQ ID NO: 65876 - DNA, 37 bp, unknown
  Direct Repeat
gttgcaatgcctagcacagaggctttaatactgtgac

SEQ ID NO: 65877 - DNA, 2301 bp, unknown
  TnpB Polynucleotide
atgccacgcgcccgccgcaagaagacatccgacgttcccacccggatctactcgtaccgctgcctgcctccgatcaccgagggcaagcgcgtcgaagatcagttctggctcgcggggcagtaccgcaacgccctcgtcgagatcgagatccgccttcgagagcacttccgcggcgtccaactcgatcatccgatcatcggcaaggcactccagctctacgagggcgcggacggcgacgtcggaaacgcgtacgaggacctccgcgccgcgaagtcgggcgtggcagatcccgacctgaccgagcaccgtctccgcctcgctgccgccaaggagcttcgcgcgctgttcgcgtccgatctgcgcgaggcgaagcgcgcgcaaggagcgcatctccaagacgtgcttctcgcgcatcccgagatcggtccgaggatgcgccgcctcaaggatccggagatctccaaggaggatcacgaacggatcaaggccgagttaagtgcggccaagcgcacgttgttcgcggcactgcacaaatccgtagaaccagatctcgccctcgcggcgggttaccagaacgcgagggatcaagcccacgccaagcggctcgcctcccgtgcagactactccgcgcgaggactgcgcaccgggacctacgaccgcgtcgaaaccgcgctcaagcaggccgcggcgtcgaccaagcatccgccgcacttcaagcgctgcgacggtaccggatcgatcggtacgcaggtcatcggcggcatgacggtgcgtgaggcattctcgtgcatggatcctcgtcttcgcatccatgctcctggagcgagcgacaaacatccgcgtccagaagtcgaaatctttgctcgatcaggtgacgatgacgatcgagacaccgtccccgagctcttgtcgcggcaagatcccggctcccgcgcagttaaacatccgccacgagaggaggcgtgggcagctgtccctcaactctcgcgcaacctacggcgtcacgcggcacggacatacgtcgacctccgcgtcggctctaacccagatcgatcaccgatcttcgcgcgctttccggtcactcttcatcggccactgccgaaggacgccgtgatcaaatgggcgtacgtcgtgcgcaagcgcgttggccgccactacgagtggcggtttcaggtcacgatcgagagcgagatcttccgcgcgtgcccggacgcgatcggcacgggcgcatgcgcgatcgacctgagctggcggcggctgttcgacgacgagggtaaccagatcggcctacgcgtcggctatctcgtcgacgacacggggcgcgagcgcgagatccgcgtgccgaacaagctcctcttcggtatggacaaggtctacgacctggcgggaacccgcgacaaggaattcgagaccgcacgcgatcggctggtcacgtggctgcgcgaccgggagacgccgtcaggcctgacagatcgcctcgccggcctcgcgcagtggcgcgcgccgcgcaagctccaggcactcgtcgacgcgtggaccgggatcgactgggatgcctggcgtaccgcgcgcgctgcggggaagaagcagtgcaacccgtcggatttcagctcgaaggcgaacaggatcaccggcgacagcgagatcctcgccgcactccaggcgtgggcgcgccatgatcgccacctccagaactggcaggagcaccagcgcgatcggctgatcgcccaccgtcgcgagacgtggcgcgtgcttgccgccgagctgacgaatacctacgcgatgatcttgattgagggcggtgcgaaccgatccccggaccacgcgggcggtggcggcggatcggtcgggggtacgatgaagctaactgaaatcgacggctgggagcgcccagagcccgaggacggcgacccgtccgagggccgagagcaacgccggatgagccggctggccgcgccgggcgagctgcgcgccgagatcatcaaagccgcccccaagcgcggtgcccgcgtcgaggtcgaggagaccgcggactcgacgcgcgaatgcgcgtggtgcacttcgatcgaggtgttcgacgcgaaagccgcgatcgagcacacctgctcgtcgtgcagtcagacctgggatcaggacgcgaacgcgtgccgcaacctcctgcatcgacacggtcactcgaacggaccggtgccgcccgtgccgacgacacctgccccgcaggtacttgcgcccgtcaaaccgaaggcatcgcgctcggttgcgggatctaacgccgttgctgcgctcggcaaacaacgctga

SEQ ID NO: 65878 - DNA, 36 bp, unknown
  Direct Repeat
gtgatcgtacttgctcggttggttgacgaccgagac

SEQ ID NO: 65879 - DNA, 36 bp, unknown; identical to SEQ ID NO: 65878
  Direct Repeat

SEQ ID NO: 65880 - DNA, 35 bp, unknown
  Direct Repeat
tgatcgtacttgctcggttggttgacgaccgagac

SEQ ID NO: 65881 - DNA, 36 bp, unknown; identical to SEQ ID NO: 65878
  Direct Repeat

SEQ ID NO: 65882 - DNA, 36 bp, unknown; identical to SEQ ID NO: 65878
  Direct Repeat

SEQ ID NO: 65883 - DNA, 36 bp, unknown; identical to SEQ ID NO: 65878
  Direct Repeat

SEQ ID NO: 65884 - DNA, 36 bp, unknown; identical to SEQ ID NO: 65878
  Direct Repeat

SEQ ID NO: 65885 - DNA, 36 bp, unknown; identical to SEQ ID NO: 65878
  Direct Repeat

SEQ ID NO: 65886 - DNA, 35 bp, unknown
  Direct Repeat
gtgatcgtacttgctcggttggttgacgaccgaga

SEQ ID NO: 65887 - DNA, 36 bp, unknown; identical to SEQ ID NO: 65878
  Direct Repeat

SEQ ID NO: 65888 - DNA, 40 bp, unknown
  Direct Repeat
gtgatcgtacttgctcggttggttggttgacgaccgagac

SEQ ID NO: 65889 - DNA, 36 bp, unknown; identical to SEQ ID NO: 65878
  Direct Repeat

SEQ ID NO: 65890 - DNA, 36 bp, unknown; identical to SEQ ID NO: 65878
  Direct Repeat

SEQ ID NO: 65891 - DNA, 36 bp, unknown; identical to SEQ ID NO: 65878
  Direct Repeat

SEQ ID NO: 65892 - DNA, 36 bp, unknown; identical to SEQ ID NO: 65878
  Direct Repeat

SEQ ID NO: 65893 - DNA, 36 bp, unknown; identical to SEQ ID NO: 65878
  Direct Repeat

SEQ ID NO: 65894 - DNA, 36 bp, unknown; identical to SEQ ID NO: 65878
  Direct Repeat

SEQ ID NO: 65895 - DNA, 36 bp, unknown; identical to SEQ ID NO: 65878
  Direct Repeat

SEQ ID NO: 65896 - DNA, 36 bp, unknown; identical to SEQ ID NO: 65878
  Direct Repeat

SEQ ID NO: 65897 - DNA, 36 bp, unknown; identical to SEQ ID NO: 65878
  Direct Repeat

SEQ ID NO: 65898 - DNA, 36 bp, unknown
  Direct Repeat
gtgatcgtacttgctcggttggttgacgactgagac

SEQ ID NO: 65899 - DNA, 36 bp, unknown; identical to SEQ ID NO: 65878
  Direct Repeat

SEQ ID NO: 65900 - DNA, 36 bp, unknown; identical to SEQ ID NO: 65878
  Direct Repeat

SEQ ID NO: 65901 - DNA, 36 bp, unknown; identical to SEQ ID NO: 65878
  Direct Repeat

SEQ ID NO: 65902 - DNA, 36 bp, unknown; identical to SEQ ID NO: 65878
  Direct Repeat

SEQ ID NO: 65903 - DNA, 36 bp, unknown; identical to SEQ ID NO: 65878
  Direct Repeat

SEQ ID NO: 65904 - DNA, 36 bp, unknown; identical to SEQ ID NO: 65878
  Direct Repeat

SEQ ID NO: 65905 - DNA, 36 bp, unknown; identical to SEQ ID NO: 65878
  Direct Repeat

SEQ ID NO: 65906 - DNA, 36 bp, unknown; identical to SEQ ID NO: 65878
  Direct Repeat

SEQ ID NO: 65907 - DNA, 36 bp, unknown
  Direct Repeat
gtaatcgtacttgctcggttggttgacgaccgagac

SEQ ID NO: 65908 - DNA, 36 bp, unknown; identical to SEQ ID NO: 65878
  Direct Repeat

SEQ ID NO: 65909 - DNA, 36 bp, unknown
  Direct Repeat
gtgatcgtacttgctcggttggttgacaaccgagac

SEQ ID NO: 65910 - DNA, 36 bp, unknown; identical to SEQ ID NO: 65878
  Direct Repeat

SEQ ID NO: 65911 - DNA, 36 bp, unknown; identical to SEQ ID NO: 65878
  Direct Repeat

SEQ ID NO: 65912 - DNA, 35 bp, unknown
  Direct Repeat
gcggtacatgggtgatcgtacttgacgaccgagac

SEQ ID NO: 65913 - DNA, 36 bp, unknown; identical to SEQ ID NO: 65878
  Direct Repeat

SEQ ID NO: 65914 - DNA, 36 bp, unknown; identical to SEQ ID NO: 65878
  Direct Repeat

SEQ ID NO: 65915 - DNA, 36 bp, unknown
  Direct Repeat
gtgatcgtacttgctcggttggttgacggccgagac

SEQ ID NO: 65916 - DNA, 36 bp, unknown; identical to SEQ ID NO: 65878
  Direct Repeat

SEQ ID NO: 65917 - DNA, 22 bp, unknown
  Direct Repeat
gtgatcgtacttgctcggttgg

SEQ ID NO: 65918 - DNA, 24 bp, unknown
  Direct Repeat
gctcggttggttgacgaccgagac

SEQ ID NO: 65919 - DNA, 36 bp, unknown; identical to SEQ ID NO: 65878
  Direct Repeat

SEQ ID NO: 65920 - DNA, 35 bp, unknown
  Direct Repeat
tgatcgtacttgctcggttggttgacaaccgagac

SEQ ID NO: 65921 - DNA, 36 bp, unknown
  Direct Repeat
gtgatcgtgcttgctcggttggttgacgaccgagac

SEQ ID NO: 65922 - DNA, 36 bp, unknown; identical to SEQ ID NO: 65921
  Direct Repeat

SEQ ID NO: 65923 - DNA, 40 bp, unknown
  Direct Repeat
cgggtgatacttgctcggttggttgacgaccgaccgagac

SEQ ID NO: 65924 - DNA, 36 bp, unknown; identical to SEQ ID NO: 65921
  Direct Repeat

SEQ ID NO: 65925 - DNA, 36 bp, unknown
  Direct Repeat
gtgatcgtacttgctcggtcggttgacggccgagac

SEQ ID NO: 65926 - DNA, 2127 bp, Blastocatellia bacterium sp.
atggcaaagaacacgaagaagactggcgacgaagacaactccgggctgactcgagtattcgcgtacgccgccaagccgctagagtctgagcagttcggttcggccgagaccttcgtgtggccgcctgcagttcagatcattgataccgagacccacgtgaaagccgagatcctcggacaagacggcgagtaccaaagtctaaagaatgcgtcgcctgagtatatcaaagggtcggccctcggccttgaggcttggatgtacggtcggtaccgaaaccggatcaccgagaccttcaacgccaagtacgacgcgtttcaaacccgcgtggaggaactcttcccgcagtacaaagttctccttgctgccgagcgagcagcgacgaacaaatttatcgaacttcgtcgtgcgcacgcccgagctgagcaccctcctgtcgcgaggctacaaaacgacctcaccaagtctcgttcgggcaggagagaagctaaagactcgtcgaaaatcgatgacctcgccctaagcctcgctgcagccaaagccgagtcggatgcagcgagagatgccctccatgatttcattgtcggccttgtgaagaacaaggagacgtgcactgaactgcgggatcttgagtattccctggagaagaacagagcgacggaagagaaaatcgtacgagcatcgtttgctcagaaactcataaaatcgttcgctttagcggctgaacttacttcgcggaagtcgaacgtcgaacaatacctcgatggagtgaaaaaacacgggttctccttcgtaaacggacaagagcctgtcgggttgtacacgcccgatccccaagccctcgggttcggtacttaccaagcggcggatgactcccttaaagccgccgttaagaagctggttcgtgatcctcaagggacgggccggatggcgaaatggacgtacggccaaattctgaccgggaagcgcctccagtttaagaagtttatcgacccccaggccgacaaaggaggggctgacccggtagtgtgcgtcaactaccaaaacgattacgtgaagccatcaaaacatcttttcgaaggagagggggcggtcaggttgttcgtcccgaatcccgagttccctaagcacgttatcgtggcgttctcggtcggtcagggcaagacgcaggcttggacctacttccacatgaagcagcacaggcccctgccagacgggctagtcaaacgagccaggatcgttttcaataccgtaggaacgaagaccctttacgaaatccagttcacggtcacgcttaaagatgaccggaagccgtcgaagccccggaacggatctgacgctgtcatccagcttgagtacaccccgacggaaaaaggtctccacgttggaactattgtagtcggccaagacaggcagaatatctacctccctgattctttgtggaaggatcggcctgcccgttcggaaagcattcgtgactacatgaaagaggaggtcgagacctttcggcaaggaattactgactggcagatggacaaccccgatgcagagatccctgcgaagctcgcacggctgatcgggaacatcgtactgacccgccgtgacaaagcgcttgtatcccaagagaagtcgacgaagaccccagctcctagggcgattgcaaggctgtgtgacacgtggagaaagaataggttcgaaggagacgacgaaatctttagcaaaaccttcctgacttctaagaaggaggaacggtacagaggcgtagacggctggctccggaggtactcacatctttacgattacgaaaggttcaattctcttcgtgtgaaaaagtctcgagtcgacctgtatcgtactattgcctcgcaacttgctaccgattatggcaatatcgttgtagccagcccggacctcaagaccaaagctcggaagacgaagaagtccggcgacggcgccgctgacgcgattcgtgagcttggtagaaagaaagacgatgtcttccgcaaagcggcagcgctgtacgagttcaagaacgcgttgaagcaagcggctctgaagcatctccgggggtacgaggagatcgagcgagtagatggtgaagatgacgcggggaccgctcgcgcagcttaa

SEQ ID NO: 65927 - DNA, 36 bp, Blastocatellia bacterium sp.
gttcacatgcctgcgatgaggcttcgtttcatcgac

SEQ ID NO: 65928 - DNA, 36 bp, Blastocatellia bacterium sp.; identical to SEQ ID NO: 65927

SEQ ID NO: 65929 - DNA, 36 bp, Blastocatellia bacterium sp.; identical to SEQ ID NO: 65927

SEQ ID NO: 65930 - DNA, 36 bp, Blastocatellia bacterium sp.; identical to SEQ ID NO: 65927

SEQ ID NO: 65931 - DNA, 36 bp, Blastocatellia bacterium sp.; identical to SEQ ID NO: 65927

SEQ ID NO: 65932 - DNA, 36 bp, Blastocatellia bacterium sp.
gttcacatgcctgcgatgaggcctcgtatcatcgtc

SEQ ID NO: 65933 - DNA, 1905 bp, unknown
  TnpB Polynucleotide
atgagagtctacagctggggcgcacgtatgccgaccacgtatctcgatgtggtcgaagaccagatgaagctggcgcacatctactacaacaagctcatcgaaattgagcgccggagaaaagtcgagtacgagggcgtgctgctgcgcgacgatgcctacgctgaggcagtgaggatggccaatgaactgcacacccgtctcatggccgtccgcgatgagatcaaccgcctcaagcagaaggcacaggcagatgtcgcgactccggtccaggtcgccgaagctaggaaactcaagaaggaacgggataaggaatatgcgaggaagaagaaagaacgcaagcgcgtccaggaacttggatggtgcaagaaggcggtcgatgaaatcaacgccaaggccaagacggacagcgtcgagtcccgtcacaattccgggttgtactggtgtacctacaatcaggttggtcaggcgttcgacgcggccaagaagtttccggagaagctgaagaagcatcgcccaaagtccaagcgcacgggagcagacaagttcatcgatgcgctggagatcacggccgagaagatggcgcgagaaagctatatgccacgcttcaagcgaggcgatggctcgggtcatatcagcgttcagatccagtacggaatctcggtgaaagaggcgctttcctgcgaggacaatcggttccagcttgttgccccgccagagaatgcctgggactcgaagcatagccgtcggaagctgacgcagacggtagcgcggctgcgagttggccctccggacaacccagtcctggcagagatcccggtctacatgcatcgcccgctacccaaggacggcaccatcaatcagattcacctgattcgcgagtccctcgcgggaaggtgcaggtggaagctccagctttctgtggagtcgagcgagaagaaaaaggcttccgcaggccacggagccgtcggcatcgacattggctggaggcaactggagaaagacaagactacgggtgactacggccttcgcgtggcttactggtgcaacaacaaggacgagcacggcgagttcgcgttgactcagcgccacgttggtgcgttcttgcatgaagacaagctagagagcgaccgtgacaagaatctcaatgtcctcaaggatgccttccgcgactggaagaagaccaagccgtacatcccggactggctcagggcccatctgaagacgcttcatagctggaacgctcaggcccggttcgtgcgcttgacgagagagtgggagaaaaagcggttcgagggagacggtctgatatttggagtcctcgcctcctggaagaagcaggacgaccatatgtggaagtatgtaagcaaccatcgcgataagtcgcagaagcggagactcgattactaccgcgtttgggcggcagagcttgccgacaaatactccgaggttgtgcttgaggctgacggtgacgaggaccgagccatggacctgcgcccactggcagagcaggcagatccagaagatccccaggattgggcaaagaaggcgcgtcgcaaccggatgatcgcctcggtggcgagtctgcgagcatgcgtcattcaggcgttctgggcgcgcggacgagatgtcaggtggcgcgaccatgctggcacaaccgagagacacgcgcggtgcaagttcagcgaggaacgtacagcgaaaatcatgcagacgtgttccaagtgcggcgaggaattcgaccgtgacgagaatgcggcccgcaacctcgtgatggcttggagcaaggggccggagaagcacctcggacgacggcacgaggaaaagaagctggttgggtccaggtacacgcggcggcgcgagcagcgcgagcttgaagcagaacaggcgaagaaagtccaagcgtga

SEQ ID NO: 65934 - DNA, 1674 bp, unknown
  TnpB Polynucleotide
atgtttggacacgattccctcccgtcgaaggtctattcgttcggcgcgaccgcgccggcgtcggatgacggcggtctggatgtgacgcgcgagcagatgcatctgtcgcacaggtaccagaacaagctgatcgagatcgagcgcaaccgccggcaggcggtgcgcgatgcggtgaccgccgcctcgccggagttgtcggcctcggatgcggaggccgaaaggatcagtgcggagattgacgcggcgacggcgcagatcgcggcgatgaactccgacgcgcgatcgcgcaaggccgcgtcgtccgacctgcgaaagctggtcaaggacctgcgggcccggcgaaaggacgtgcgcgaccgcgccaaatcgcttcgccggcaggtctacggcgatcccgccatgcaggccctgatgaagcagatcgacgcgcgggccaacgcggagattcgtgccgcgagggcggcgtcaggcgtctacttcggcacttatctcgcggcggaatcagcggtcaagcaggcccgcgtcgccaaaggcatgccgcagttccgccggtgggacggggacggcaaggccggcgctcagatccagggcggatgctcgctggccgaggcgctggctggtaccgacacccggctgcggatcacgatgctcgatgatcggccaaagccccgcgcgcgggtctccgtgcgcgtggcctcgaaggacaagcggccggtgtgggccacgtccgtcgtgcggtggcatcggtcgattccggacgacgcgcggatcaagtgggcgtatgttttgcgccgtcgcgtgggcgtcaccgatcactggtcgatccagttgaccgtctctcgcgacggcgggttcagcgagccgtccgaccgcgcgaccaccggccatgtgacgatccgccggcgatggacacaggatcgcggcggcatcgtggtggccgagtggatcggctcggacgagcgaagcggccggctgatgatccccgccgaccgcgtggaatccctccgggccgctgacggcctgcggtctgtccatcgctcgcggctcaatgacacggtggcggtactgcgggcgtggatcaagggagaaccgatccccgagtcggtgtcgaatgacctccgctacatcagcgaccggatgatcggcgagcaaaagccgtcggcattgcgggcgctggagaatcggcgggccgcatgcgagcggatcatcacggagtggccgtcctcgcctgtcgagatacccgaagcgttcgacgatcgcgcgcggcatgcccacgcctggaagtcctcaaatcggctggcggcactatcgctgtggtggcgcgggaaccgattcgtcggcgacgaagcgatcttcgagttcgtcgagcaatggcgacggcacgacaagcacctgcgcaatttcgagtgccaccggcgccggaagttcgccaactggcggaaagagttttaccggcagttcgcggtgcagatgcgccgcgcctacgccagccacgaagtgaccaagctggacgtgaaggcggcggcgaagtatccaatgcccgagaaccccgatcccgtgttggagatcgcgcggtacaatcagcgggtcgcttcgcccggctacctggcggcggtgatgcgggagttcgggccgaagctgacgagcggcgacgtggtggcccggccagcgtag

SEQ ID NO: 65935 - DNA, 33 bp, unknown
  Direct Repeat
gtcccagcgcccgcgcagaggctttgtgtctgc

SEQ ID NO: 65936 - DNA, 33 bp, unknown; identical to SEQ ID NO: 65935
  Direct Repeat

SEQ ID NO: 65937 - DNA, 33 bp, unknown; identical to SEQ ID NO: 65935
  Direct Repeat

SEQ ID NO: 65938 - DNA, 33 bp, unknown; identical to SEQ ID NO: 65935
  Direct Repeat

SEQ ID NO: 65939 - DNA, 33 bp, unknown; identical to SEQ ID NO: 65935
  Direct Repeat

SEQ ID NO: 65940 - DNA, 33 bp, unknown; identical to SEQ ID NO: 65935
  Direct Repeat

SEQ ID NO: 65941 - DNA, 33 bp, unknown; identical to SEQ ID NO: 65935
  Direct Repeat

SEQ ID NO: 65942 - DNA, 33 bp, unknown; identical to SEQ ID NO: 65935
  Direct Repeat

SEQ ID NO: 65943 - DNA, 33 bp, unknown; identical to SEQ ID NO: 65935
  Direct Repeat

SEQ ID NO: 65944 - DNA, 1722 bp, unknown
  TnpB Polynucleotide
gtgtatcgctatgccacgggtgtacgttgcgacttcgatgccaacgctatggctcagttacgcatggctcacgagctgtacaacgaattcgtagccatctggcgtagacatgaggaacaaaaggccgccgcatggcgagagcatcccgaggttgatgcgctcacaattgcagtagaagttctcgacgaacaactcaccgatgctgtggagctatggcgcaaatcgaagagcaaggcacgtaatcgcacaggcgacaaggaactcaaagcagcgttagacgctctgcgtgctgaactcaaagaggctcgctcgacactcaaaaaaacaaaaaccgacgtgcacgaaacgctaattcctcgctttcgtgagctgggcgatgaggctcatgcagcaggcaaagccacctacgctgacttagtacagacacgagggctgtattgggcaacgtacaatctcgtgcgagaacaacacctgagagcagtacaagccctaaatcgtaaacgcaccgctgggcagccagcagagctacgattccgtcgctggcaggcacagggacagcttgccgtgcagctacaacgtgaagcaacagcaccacagcgcacgccagaattattggcgtcaggtgagggcaaatggcgcaacgtcattagtttgcccccgatgcaagaacgcaaacatcgttccccgctgacaatacgcacaggagtcaacgaggatggggagacaacgcatctgacagtgcccgaggtcatttggcaccgcccaatacctcctgaggccgacatcacagccgccactgtgtcacgacagcgcatagcgggaaatcacatgctgtgggcaggactgacagcaaaaatacccgtgtcggacccgtctactgcgcctggtgtgtgtggagttgatacgggatggcgcacaatgcccgatggctcgatacgggtagctatttggcgatcgaagtacaacggggacatcgttgtaccctctcacctgcatgattcaatacgtctcgatggtgagggtggcgaagtaagtatcccgcctcgttacataagcaagtggttgcacattgcagaactacagtcacgccgtgatcgcaagatggacagactacgagagcagcttaagggcagtcccgaggtcgctgaacacctacaagaaggagaacgcatagatcagtggcgctcacctaatcgctttgcagcgctggcctttaagatgcgtgagtcgaagtcatcgacagcaactctcttagagcaatggcgtaaagcagatcgccgactatgggagtggcagactcacgaacgcctacacgtcattgactggcgcaccgatttatatcgcgtagtagcggcattgttgtgtgggcagaacagcatcatcgcagtggaagagccctatgtggcaaaggtgacacgcaaaactgagaacaacagcattacagacgatgccacacgtaaagcctttgtcatagctgcaccatcgtctctcatcttgtgtattaagcaggccggagtagcaagaggtgtgtccgtcactgtccacccagccaaacacaccaccatgatgcacaaagcctgtggctacttaaacgagccaggcataggggtgcgatcatcgttgattcgttgtgctggatgcgaagaaatctacgatcaggacgccaacgccgcgtggtggttagtcgatcacgcaagcgcggagttagcccccagcatttga

SEQ ID NO: 65945 - DNA, 2694 bp, unknown
  TnpB Polynucleotide
atgcgctcagagatcacaaataggccctgtccgtgtagcggggcagttgcgaacatgagttcgtgcaacggaccgaatggggagcgtgaaaaagacccgcaccaccactggatccgtccaacagctcggctacggcgacggcgacggcaccggcggcggctacggctatggctacggcggcgcctgatggccgtcctaagccagccagcccgtgccctcgcaacatgccttacccaggcggaccttatggagaccgctcgcaaagtgggagttctatcgacctcaacaaagagtactgtgagcacacgtcagcgagctgaagcggctgccgcaccatcaattgtagcatccccacacttgcatgccgccacagccagtgctataaacgccttaccacccaaggatgtcaccttgaaacgcaaaaccagccacctgccgagccgtgtgtacaactacggctgcctgccgcccaccgagaacgccgaggcggtcgacaacatcctgcgcctggagcacgcgtactacaaccgcatcatcgagatcatgcgcgatctgcgcctgcgctttcgcgaggcccgcgccaaggtggcgcccgagttggatgcgctcgaacagaagtgtgacgagctggccaagcgcaagaaggcgctgcgtgacgagatgaaagccgtccgcaagaaggcccgcaagcgcgtcgcctgtccggagttgcaggcagaggtcagggccatcgaggcggagctgaagccggccagggacacattcaaggcccagcgcaagcgcgtggacgccgagctcaagccaagcaaggccctgtacgtcgagcgagtccaggccgtctgtatcgcggaggggcgcgtcaaccccgacggcactgccagcaaagcaccccagacacgcaaacgcgtgaacgccctcgtcgcggccgagatgctcgccgatgacgagatgccggagttctggcgcgagaccttcggcaacgagcgtcaggcgttggccaaggtcaaggaggcgcgcgcacactgcggcctcgagcacggctgctacctgcgcgttgaggaggccgccacgctcgcctgcaggatgagcaagcgagaccttccgcgtttcaagcgctacatgggcaccggcacgatcgccgtggagctgcgcaagcagacgaccgacaccgtgctctgcgggacgagcaactacgtgcgcattgagcccctgccggccgacacgtggacgaaggaggacggcaagcgtgaccgccacggctgccggaaagcctacacgacggtgcgcatccgggtgggcaagaccagcgcgggcgagcccatctgggccacgttccccatcctcatgcaccggcccctgccggcgggcgcgccggtcaaatgggcatgggtcaagatctggcgctgcggcaaccgcaagcgctacaatctgcaggtcactctggagagcgagcagttcctgccggagaaccgtccctgcggggagggcacgatggcgatcgacctcggctggcgcgtcctgcccaacggccgcatccgcgtcggctatggcgtggacgaccagggtaaccactggcgcgagtctcccggagccgagccgggcttcattctgcccggcgcgcggcccgagaacggccgggccgccaccctgccggcgaccaatctgccgcccaagcgcgcgctgcgcgaacgtatcgagtacgtggagacgctgcgcagccacggcgacctgtggtttgaccgcgcaaaggcgcggacggttgcctggctcaaggagcagacccagcacgaggatatgggcaacaagagctgcgtgcccgactggatgcgggcagacactgagcatatcggcaagtggcacgcacaccacaagctcgcccgcgtcgcgtaccgctgggtgcgcgagctcattacggaggagcgcatcaggagcctctgggtcgaatggcgcacggagcggctggcgagcaagcaggacctgatgggcgactgcaacgacatcggcgcatggttcgccgcccacggcgtcgaagacgaaccctgccggttcgcgctgtggctcgaatggtggcggcgcaagaacgcgcacctctaccagtgggagcgcgcccaggaccacaaggcacgcggcgcccggcgcgatctttaccggtgctgggccgcccgactcgcgcgaacgcacaagacgatcgtcatggaggacttcgagatcagcaaggtcgcgaagaagcccaagtcggaggatagcccgcagaacaagaaggccaacgcgatccgccagatggttgcggtgagcgagttccgactcgccatcctctccgcggtcggcgagaagcggctctgccgcgagccgcctgaggacacgacgcgccagtgcacgcactgcggccacctgcccaagcgcggcgtcaacgtccacgctgcggagacgatcgtgctcacgtgcgcgaagtgcgagaggtcggaggaccaggacaagcgtggggcgatcaatctgctccggcgccacttcgacggctatggcaaggacccgcagcacgcccagccggcgccggccggctccacggtctgcgggcgccccggcccgtcggtcgaggccaagcggcccacgccgcaggcgaagaagtcggtgagtacacgtcatgcaagcggcgaagtggcgcacgagatagccgggccgctcgatcggctgtag

SEQ ID NO: 65946 - DNA, 35 bp, unknown
  Direct Repeat
tcgcagagccagctcggaggcgtagattccgagac

SEQ ID NO: 65947 - DNA, 35 bp, unknown; identical to SEQ ID NO: 65946
  Direct Repeat

SEQ ID NO: 65948 - DNA, 35 bp, unknown; identical to SEQ ID NO: 65946
  Direct Repeat

SEQ ID NO: 65949 - DNA, 35 bp, unknown; identical to SEQ ID NO: 65946
  Direct Repeat

SEQ ID NO: 65950 - DNA, 35 bp, unknown
  Direct Repeat
tcgcacagccagctcggaggcgtagattccgagac

SEQ ID NO: 65951 - DNA, 35 bp, unknown; identical to SEQ ID NO: 65946
  Direct Repeat

SEQ ID NO: 65952 - DNA, 1914 bp, Candidatus Eisenbacteria sp.
ttgacgtcgtggttgctggcgtgctgtagtgtgtgggctcggtacactccgagacgaaggagaacgacgatggcaactcgggtctacagctacggcgggaagacgccgattcgtggtctcaaggagatcggggagcagatggagctcgcccgttcctactacaacgagctcatcgccatggaacggcagcggcgcctggactaccgcgagcggtgccgcacgcagagccacgagctcgtcgatctcgccctcatgatcgaggggtgcgtcggggtcaagatcgacgccaaggctcaggctggcgaggagcgcgtggtggccatgagtcgcaagggggccaccgaggagaccagggacatcgtgaagctggcgaagtccgacctcaagatgctctggagcgacttcaacgctctcgtggctgacgagcgcgcgcgcgacaagaagttcgacaaggacatcagggcactcgacgagaagtgcaatgaggacgccctcgagatccgccacaagtacatcgcactgaatctctactggggcacctacaacgccgcctacaagtccttcgagcaggcgaggaagtcgcatcacccgccgcacttccgcaaggagtacggcgtcgggcagatcgacgtccagatcatcaatggcctccctgctgccgacgtcttcggcaacgacacccagctgcagatcgatccgatcgcgatgacgtcggtgaccgctccatgtggcggttgtgcgtcgtgggatgccacccgcggcgagcgtcgtgccgccgcccgcgtgaacgctcgcatccgcgtttgcagcgatgatcgcggtcatccgatctgggtcgagttgccgatcgtgatgcaccgtccgcttccggccgacgcgatcatcatggaggcccgtctggtggtgcgcagggtggcatcgcacatggcctactctctgcaggtcgcggtgcgggagaaggcgaaggcgctcgtcgaggtgacgcccgagacgtcggtcggcatcgatctcggctggcgctggcaggacgaggtgagggtcgcctacgcctacgacggcacgggggagcacggcccggtgtccttcgggaacgacgtggcctctgctctcgaccacgcgaactccctgcgcagcatccgcgacaagagcttcgactccatcaaggccaccttctccgagtggctgaagacccaccagtcgccggagtggttgctggaggggacgaagtcgatggcccagtggaagcgccagggccacctggcctctctgatcatcgcgtggcgcacccagcacttcgacggcgacctcgacatcttcaccacgctcgaggcctggcgggctcaggacaagcacctctgggagtgggaggtgaacgagcggaggaaggcgctggcgcggcgcaccgagatgtatcggatctgggcggcgaagatcgcgaacacgtacagcctcgtggtcatcgaggacttcgacctccgcgactcggcgaagaagccgccggtcgaggaggagggcgagtacgacgatctggccaggagccagcgcatcgtcagcgccccgagcctcctgcgtggctccctcatcaacgcctgctcctcgcgcggagtcctggtggtcaaggtgccctgcgagaagacgacgatcacctgtcattcctgcgggcaggagaccatctgggagaaggcgaagtacctgtgccaccgctgcgagtgcggggtggcctgggatcaggactacaacgccgccgtgaacatcctgcgcgccggcctcgcggtccacaagcgggaggccgcgaggatgatccgaaagctcaacaagcccttcgtcggacgcttccagcgtcgcaagctggagaagcataagagggagaggaaggagttgaaggagaagctggcggcgaagaggctgcgctag

SEQ ID NO: 65953 - DNA, 28 bp, Candidatus Eisenbacteria sp.
gcctgctcgagggcgtagtgctcgagac

SEQ ID NO: 65954 - DNA, 28 bp, Candidatus Eisenbacteria sp.
gcctgctcgagggcgtagtgctcgagac

SEQ ID NO: 65955 - DNA, 28 bp, Candidatus Eisenbacteria sp.
gcctgctcgagggcgtagtgctcgagac

SEQ ID NO: 65956 - DNA, 28 bp, Candidatus Eisenbacteria sp.
gcctgctcgagggcgtagtgatcgagac

SEQ ID NO: 65957 - DNA, 28 bp, Candidatus Eisenbacteria sp.
gcctgctcgagggcgtagtgatcgagac

SEQ ID NO: 65958 - DNA, 28 bp, Candidatus Eisenbacteria sp.
gcctgctcgagggcgtagtgatcgagac

SEQ ID NO: 65959 - DNA, 28 bp, Candidatus Eisenbacteria sp.
gcctgctcgagggcgtagtgatcgagac

SEQ ID NO: 65960 - DNA, 28 bp, Candidatus Eisenbacteria sp.
gcctgctcgagggcgtagtgctcgagac

SEQ ID NO: 65961 - DNA, 28 bp, Candidatus Eisenbacteria sp.
gcctgctcgagggcgtagtgctcgagac

SEQ ID NO: 65962 - DNA, 28 bp, Candidatus Eisenbacteria sp.
gcctgctcgagggcgtagtgctcgagac

SEQ ID NO: 65963 - DNA, 28 bp, Candidatus Eisenbacteria sp.
gcctgctcgagggcgtagtgctcgagac

SEQ ID NO: 65964 - DNA, 28 bp, Candidatus Eisenbacteria sp.
gcctgatcgagggcgtagtgatcgagac

SEQ ID NO: 65965 - DNA, 28 bp, Candidatus Eisenbacteria sp.
gcctgctcgagggcgtagtgctcgagac

SEQ ID NO: 65966 - DNA, 28 bp, Candidatus Eisenbacteria sp.
gcctgctcgagggcgtagtgcccgagac

SEQ ID NO: 65967 - DNA, 28 bp, Candidatus Eisenbacteria sp.
gcctgctcgagggcgtagtgctcgagac

SEQ ID NO: 65968 - DNA, 28 bp, Candidatus Eisenbacteria sp.
gcctgctcgagggcgtagtgctcgggac

SEQ ID NO: 65969 - DNA, 28 bp, Candidatus Eisenbacteria sp.
gcctgctcgagggcgtagtgctcgagac

SEQ ID NO: 65970 - DNA, 28 bp, Candidatus Eisenbacteria sp.
gcctgctcgagggcgtagtgctcgagac

SEQ ID NO: 65971 - DNA, 28 bp, Candidatus Eisenbacteria sp.
gcctgctcgaaggcgtagtgctcgagac

SEQ ID NO: 65972 - DNA, 28 bp, Candidatus Eisenbacteria sp.
gcctgctcgagggcgttgttctcgagac

SEQ ID NO: 65973 - DNA, 1881 bp, unknown
  TnpB Polynucleotide
atgtcgagtatcgtctacaaatactctctctccgcgcccgacgacgagtgcgttgatcgcgtgttcgatcaactccgtgccgcgcacgcgtacgcgtacgacctcacgttcatcgagcgcgcgaaacgggccgctgtccggggccttctcgacgctgagacgaccgtcgagatcgagacggcgcgcggcgcggatcaggtagccgccgaggccggcgccgtcgttcgggccgctcgggccaaagatcgcaccctgaaagtggacacgaccctgcgcgacatcgctcgcgcgacggcccgcgtggcacgccaggcgctcatcaccgctcgcaaggaagcacgcgggcgcctggagaccgacttgctcgagatcgaggagcgggcccgtgagcttcgcaagagcgtgcgcgagtacacctcgctctactggggctcgtacttgctcgtggaggaagcgtccaccagagcattcgccgcgcctctctaccaagaggacgggttcaccccgaacgatcccgaccttcctcggtgggatggctccggcacgctcggcgtccagctccaagggggtctctccgccgtgcgcgcgtgcggcggcaccgacacgcgcctgcgcatcgacgcgccgccccccgccgcatgggcgcccaacgataccccctacacgccgcggccgcccgggcaaggctaccgccatcagcatctcgtccgcatgcgacaagatagccgcgtgcacctgcgggtcgggtcgaccgcgaacggcaagcccgtctgggcctcgtgggagatggacatgcaccggcccctccccgagggctcgatcatcaagtgggccaccatccatcggatgaaaaatgggcccttctactcgtggcacctgtgcgtgacgctcgccctgaacgtgacgtccatcgcgccccgggccggttcggttgccattgacgtcggatggcgccaggtcgaaggcgacatccgcgtatgccggtggatcgcggccgatggggcgcaaggcgagcttcgcctttccgccgaggacatccgggtcctcaaggcgccccgtgagatccgaagccagcgcgactcgcggctcgagacgatacgcacgtcggtcgggcgctggctccgcgcatggccgaaggtgcccgaggcggtccggctcgccgcgcagaacctgcacgtctggcgctccccggcgaagttcgtccgactcctgcgcgcctggggggacaaccgcttcgaaggggacgagatccccttctgtgcgctcgaggcctactgcgcgcaggaccttctcgactggcggacagagacgagctggcgaacctccgcgctcgggcggcgccgctgcaagtaccagatgttcgccgcgaagctcgcgcagatgtacggcacgatcgttctcgagcgcttcgacctcaataagcccgggttcgctcggtacgaggaggactcagccgaaaacgagaccgcccgcggcaaccgtttcctcgtggcaacaagcgagctccgcgacgccctatgcaacgcggcccgcacgcgcggcggggtcgtcgcgcttgtctcggcggtgaacacgacccgcacatgccgcgcttgcgggctcgttgagaagttcgacgcggcggcctcgatcgaccgggtgtgcggcggctgcggcgagctgcaggaccaggacgacagcgccgggtcgatcctgctgaagcgctggatcgagagccccggcgacgcgcggatcgtagtcggcgctcgcaaggagaaaaaaacgagcgatggcgaggaggcggcagagagtcgatgggccaaggcgcgccggctcggggcggcgaagaaggcgaagatcgaggccgctcgaaaagggcggggtaaggagggggaaacatga

SEQ ID NO: 65974 - DNA, 25 bp, unknown
  Direct Repeat
gtgcgacgctagatcgagagtccag

SEQ ID NO: 65975 - DNA, 25 bp, unknown
  Direct Repeat
gtgcgacgctagatcgagagtccag

SEQ ID NO: 65976 - DNA, 25 bp, unknown
  Direct Repeat
gtgcgacgctagatcgagagtccag

SEQ ID NO: 65977 - DNA, 25 bp, unknown
  Direct Repeat
gtgcgatgggagatcgagggtccag

SEQ ID NO: 65978 - DNA, 25 bp, unknown
  Direct Repeat
gtgcgatgggagatcgagggtccag

SEQ ID NO: 65979 - DNA, 25 bp, unknown
  Direct Repeat
gcgcgacaggagatcgagagttcag

SEQ ID NO: 65980 - DNA, 2040 bp, unknown
  TnpB Polynucleotide
atgattttcgtgtatcgatacggactcaaggcgcccacgcacaatgcggcctcagtgcgcgagcagatgtaccgcgcacactgctaccgtaacaacctcgtcgcggtcgcgcgaggcatacgtgccgtccagcgcgatctgatcgatggagtgccagacgtcgtggttgcgacggggcacgcgctcgctcgtcgcgcagctgtgatcgccgcgcacgcggcgatcaaggcgcagcacgtggacggtcgcgctcgcaagcactcagccgtagccgacgccgcgcttgctgtggcgcgcaaggactacatcgacgcgctcgaggcgctggagacagcccgccgtgcagcggaacgcagcgcgcctgtgcgtgctgagtttgcacggatcgcagagctggcggacggcgtgctggctcctggcgagacacggcgccgcggcggtcttcgtaagagcctccgcgctcagtgcggcgcgtggtggggcacgtatcttctggtcgaggacgcgatggaccgctcgcttcggcttgtgtacgcgccggggaagtccattgcgttgccgaagtgggatggactggacccgcgagatccacgctttgtacgctggaacgagtcgacccaggccgttggcgcgtccaacaacaaggggccgacggggaagagcgacgagttcgtacgaatcgtcgatggtcagctctctctcaagatcggggcggacgagtgggccagatggcccatcgccctgcatcggccggtgccgtctgatgctcgcatcaccgcgtgtcgggtgcaggttcgtcgcgaaggaccgggagagcaatgggaggtcctgctcacgctggacacacacgagacacgtacgcgcaccgatctcggccaccggggccagcgcgatgagtgcggcgacgggcgcgtcgcggtcgacatcgggtggcgagtgatcggcgacgagattcgcgtggcgtgctggcgaaactcgcgcggcgaaaccggagagatccggctcgacgcaacgctgatcgctcagctgaggcgcccagcagagatccgtagcgcacgcgaatcactgttcaaccaggcgaagctcgcgctcgggtggttcatcgcctcgttgacggatccgccggcctggttgccgaggctgcacgatctgctgggtaccccggccggtaggcatgctcaggacagcgacgaccagggacatatcgacgcccagggacgtgtcgtgaagaaggacggcgcgacggggtggaggtctccggatcggctcgtacgcctgtgcctcggatggcgcgagaagcggtttgctggcgacgaggtcatctgccagctgctcgacgactggtcggccggcccgtatgacgcggccgcgcacaagtggcgcggacacgacgagtcgtggcggcggcgcgacaagcacctctggcacatggaggccgcgatgcgcgagaaggcgatcgcgcggcgcaacgacctgtaccgggtgatcgccgcagggctggcacgcacgcacggcgaactggtgctcgagagcttcaacctgaacaacgtaacgcgcgtgccgacggtggagtcgtgtgacgacgacgagggctcgcggtctgcacgatcgaatcggcagcttgtggccgtgagcgagcttcgaggatcgcttattcacgcgctcgccgcacgcggcggacagacgatagaggttgatccggccgagagcacgcacgagtgccccgtgtgccacgtcgtcacagagttcgacgcggccgcgtcgatcacgtgggagtgctccggctgcgggcatcagtgggaccaggaccactcagcagcgtggatcctgctgcagcgcggcgagcgggggagggggagaggattcggcgacgggggaggcggagcgcctggtggtgacgcagcgacgggcgccggcgacaagcctgcgccgcgtgagacgaaatgggcacggaaggcgcgagagaaacgcgagcgagaggcgcgcgcggcggccgaaacagagcccgctcgcagcgcgagtgatgccgaggggcaatga

SEQ ID NO: 65981 - DNA, 36 bp, unknown
  Direct Repeat
gtcacaacgcctgcgtgggggcatggtgcccacgac

SEQ ID NO: 65982 - DNA, 36 bp, unknown
  Direct Repeat
gtcacaacgcctgcgtgggggcatggtgtccacgac

SEQ ID NO: 65983 - DNA, 36 bp, unknown; identical to SEQ ID NO: 65982
  Direct Repeat

SEQ ID NO: 65984 - DNA, 36 bp, unknown; identical to SEQ ID NO: 65982
  Direct Repeat

SEQ ID NO: 65985 - DNA, 36 bp, unknown; identical to SEQ ID NO: 65982
  Direct Repeat

SEQ ID NO: 65986 - DNA, 36 bp, unknown
  Direct Repeat
atcacaacgcctgcgtgggggcatggtgtccacgac

SEQ ID NO: 65987 - DNA, 36 bp, unknown; identical to SEQ ID NO: 65986
  Direct Repeat

SEQ ID NO: 65988 - DNA, 36 bp, unknown
  Direct Repeat
gtcgcaacgcccgcgtgggggcatggtgtccacgac

SEQ ID NO: 65989 - DNA, 32 bp, unknown
  Direct Repeat
caacgcctgcgtgggggcatggtgtccacgac

SEQ ID NO: 65990 - DNA, 32 bp, unknown; identical to SEQ ID NO: 65989
  Direct Repeat

SEQ ID NO: 65991 - DNA, 32 bp, unknown; identical to SEQ ID NO: 65989
  Direct Repeat

SEQ ID NO: 65992 - DNA, 31 bp, unknown
  Direct Repeat
aacgcctgcgtgggggcatggtgtccacgac

SEQ ID NO: 65993 - DNA, 31 bp, unknown
  Direct Repeat
aacgcccgcgtgggggcatggtgtccacgac

SEQ ID NO: 65994 - DNA, 2052 bp, unknown
  TnpB Polynucleotide
atgacgaacacatcaatggacatcagcaccgaggccgacaaactcacccggcccgcaccgttctcgggcgaaggccaggtgcccaacgcacacgtctaccgctacggtctccagccgccaacggaagccgccgacgaagtccgcgagcagatgcggctcgcgcaccgctaccgcaacacgctcgtcgagatcgagcgtgggcgccgagccgccgtccaggcgctcatctccgcggagccctcgacgagtgggcctgaggccatcttcgcggctgccgaccttgctctcgaagacgccaggcgagccgctgcctccgccaagtccaccgaccgcctcggcgtcgccccggagcttctacgcaacgccgtcatcgccgcacgcgccgtccgacgcgacgcggccaacgcgctgcacaaggctcgacgcgaagcccaggtgctgcctcacgtggccgccgagatcgacctcatcgcggaccgcgcgaaagagcttcgacgcagcgcgcgcaagcactgcggcgttttctggggcacgtacctgctcatcgaagatgccgatcaggcgtcacgccagatgccgctctacgacgacgcgcgacccaacgctcccaggttcgttcgctgggagggagaggggcgggtcggcgtccaggtccagaaaaccaagcccctgtcgctgctccagctgtacgcggccaccgacacgcgcgtccgcattgaaccgggcgctccgctgcgcacgacgttcgggcactccaagcaacgaccagacccgacgagcaggcgttccgcgaagcgtcagcgttacgtgctcgcgctccgtatcggctccgagagcaacaagtcgccgcgctgggcccgttttccgatgctgatgcaccgcccgtttccggagggtgcccaggtcaagtacgtcaccgtccagctccgcatggttggaccgcgcgaagagtggtcggtgctgttcacgctagatcttacggccgcgcaggggccttcaacccgcgacattgaggcgaccaacggacgcgtcgccatcgacgtcggctggcgcgtcgtccctgaggggcttcgcgtcgcagcctggcgtgacgaggccggcaacaccggcgctctcattcttagtggcgagcaggctcccgtaccgggcgatacaacgccacgcagcaagagcgccaaacgttcattcaaccgccgagcggcggggataatgggccagttccgcaagagcgacgggctgcaggccattcgcaagacgaatttcaacgacgcccgtcgtaacctggccatccacctcacggcgctcgacgctgtgatgccaccatggctccgtgatgcgacgaagtaccttggtctctggaagtcacagagcaagctcgcagccctggccaggcgctggcgcgacgcacgcttcgacggcgacgcggaggcgtacgacgcactcgaagcatggcgctaccacgaccatcacctctgggagtgggagacaagccagcgcgtcaagtcgctacgctaccgacgcgagctgtaccgctgtttcgcggccaagctcgccacgcgctactcgaccatcgtactggaagcattcgatctccgtcgtatcgcacggctgccggtggtcgaggccgacgagaccgaaaacgaaacggcgcgaagctcgcgcgtagttgcctctacgagcgaactgcgcggctgcctgctcaacgcgttccgtggacgcggcggcaccgtcgagttcgtcgaccccgcgctcacgacgaagacgtgtgcggcgtgcggctccgtagagcaatgggaccaagccaaagagctgcgccacgcttgcggcgcatgcaaagccgagtgggatcaggacgacaacgcggcggccaacattctcgtgtggccgaagcgcactggcgggcctgccaagaagcgcaaggaagatcctgcgcacccgggcgagacacgctgggtgcgagccaagcggctggcgtccgagaagaaggatcgcagagctgctgcgctcgcagcttctcccacgaacatcgcggagcccagcgccgcggagtaa

SEQ ID NO: 65995 - DNA, 35 bp, unknown
  Direct Repeat
cagcagcgccagcgcaccggcgtgatgggtgcgac

SEQ ID NO: 65996 - DNA, 35 bp, unknown; identical to SEQ ID NO: 65995
  Direct Repeat

SEQ ID NO: 65997 - DNA, 35 bp, unknown; identical to SEQ ID NO: 65995
  Direct Repeat

SEQ ID NO: 65998 - DNA, 35 bp, unknown; identical to SEQ ID NO: 65995
  Direct Repeat

SEQ ID NO: 65999 - DNA, 35 bp, unknown; identical to SEQ ID NO: 65995
  Direct Repeat

SEQ ID NO: 66000 - DNA, 35 bp, unknown; identical to SEQ ID NO: 65995
  Direct Repeat

SEQ ID NO: 66001 - DNA, 35 bp, unknown; identical to SEQ ID NO: 65995
  Direct Repeat

SEQ ID NO: 66002 - DNA, 35 bp, unknown; identical to SEQ ID NO: 65995
  Direct Repeat

SEQ ID NO: 66003 - DNA, 35 bp, unknown; identical to SEQ ID NO: 65995
  Direct Repeat

SEQ ID NO: 66004 - DNA, 35 bp, unknown; identical to SEQ ID NO: 65995
  Direct Repeat

SEQ ID NO: 66005 - DNA, 1863 bp, unknown
  TnpB Polynucleotide
atgcgtaactactccttcgtcgcctgggctccggtcgagaacgccgacaaggtccacgagcagctccgcatcgcgcacgcctaccagtgcgggctcgtcgcgctggagcgcgagcgacgcatcgagatcgacctgatctaccagcgcgctctcccggcagagtgggccgccttctcggcggccgaggcggcggagaaggcggcgttcgaggcgtgccgccggcagcgttcgaacggcggcgacatgctgccgcccgacgacgacatgaagtcggagcgcgccgaggagctgagggccgcgaagggccgcctggaggctgcgcgcgaggcgctcaaggtggcgcgcgacgcctggtacgcgggcaggaaagcccttacgccgacgatcaaggaccagctccgcgccgtcgacaaggaggcgtacgcgaaggcgaagcgcgcctacaatcttgccggcgacgtcgggctcccctgggggacgcggctgaagatcgcggagagcgtcgagcgcgcggcgaagatggcgtcgaaggcggggtcgctcccgcactttccgcgctttgatggtggcggggcgattgccgtgcagctacagcacgggctgtcgaggacggcggcgatgtccggcgctgacacgcggttcaggctggagatcgaggagcctcgcgacgaggactaccgcgtggtcaagaaggatggccgcgtcgtcgagctgccgcggccgacgccgggcagcaagcgctcgcagcgccggcaagtcgccgtcgcgaggctgcggattggctcgaacggccgcgcgccggtctgggcggcgtggaggatcgacttccagaacgggtaccggccgctgcccgacaacgcgcccatcaagtgggtccagatgatcgcgaggaaagtcggctcccgaacgcagtggcagctcctcctcaccgtcgacgacgagccggtgccgacgcgcgcgcacgggccgaccctggcggtgaatttcggttggcgaaaccttcttgacggcggtctgcgcgtcgccttcgcggtcggatccgacggccaccgggaagaggtccgcgtgccggcgaaatacatcgagggtatcgcgcgcgtcgattcgctgcgcgcgatccgcgacaagcggttcgaggcgctcaagaaggatttggaggagtggatctccgacggggcgcccgagtggctcagggaggccaccgagtggatgtcgatgtggcggtcgcagaagaagctcgcgttcctgatctccgagtggagcaggaagcgcttcgacggcgacgcgaagatcttcgccgccctggagcagtggctgaagaaagacaagcacctccgcttttgggagtgcgacgagcgggaaaagctgatcttcgggcggaaggatttctaccgctgcgtcgcggcccgctgggcgaagacctacgcgaggatcgtcgtcgcgggcatggacctgcgagactttgccgagctgcccgacccgctcgacggggcgaagggaaaggacagcgtccagcgtcgctcgcgattcttggcggcgccgagcgtgttttttgacgcaatcaaaaacgcgtgctcgacccgcggcgcggcgttcgaggaggtcgacggaaaatacaagacgcagacctgcaactcgtgcgggatcgtgttcgcgttcgtggcgcggcagagcctggagcaccagtgcgagtgcggcgcaaagtgggaccaggacgagaatcactgcaagaatctgcttgcgagcggctcagcggcgcgcaagaaggccgaggtgctcgcaccgtcggtgggtggcgaaggcggtgactccaaggagaaaaaaggtcgctgggggaagaggcgctcgcagcaggcagagtaa

SEQ ID NO: 66006 - DNA, 32 bp, unknown
  Direct Repeat
ggtcgtcgacgccgtgcaggggcttggtgcct

SEQ ID NO: 66007 - DNA, 32 bp, unknown; identical to SEQ ID NO: 66006
  Direct Repeat

SEQ ID NO: 66008 - DNA, 32 bp, unknown; identical to SEQ ID NO: 66006
  Direct Repeat

SEQ ID NO: 66009 - DNA, 1953 bp, freshwater bacterium sp.
ttgcatggatcgtgttaccatgttgcttttcttcttgacgcgcgacgccgatgcgacgatattgccttcaagttttctggacacgaacaccgcacgggagccgacgtggagcccaaagatccgattccgcccgttgagaagaagaagaagaaggtcatgccgaagcgaacgagcacgacgcccgttcgcgtctacaagtacggcttgctgccgcccatcgaggggggtgagtacctgcgcgagcagatccggctcgccgataggtactacaacaagcgcattgagattggaatggcgtcgagggtcgaaaaggacaaggcccgcgccaccgcatcgcctgggttcgataagttgtccgcgcgcaagaccgagctcatcggcgagatcgaagctgccgacaaggctggcgacaaggaccgcctgaaggcgcttgtcgccgagcgcaaggaagtgacggcgaagctacgagaagcgcgcaaggcgctgaaggacaacgaggaggtggccgcgctcgtcgaaaaggtcgccgccgacacgaaggtcatcgagaacaatgctcgcaagtcgagcggcgtgttctgggggacgtatctcggcatcgaggcggcggccaggcaggcgctcgcagcgccgcgaccaaggttccgtcgtcacaacggcaacggcttggtcggcaatcagttccaaggcggcatcaccaaggccgaggtgctgtcctgcatggacacgcgacttcagatccagccgttgcccgagggcatcgagcttctgggcaggcaccagcgcagaaaggccagccgaaccctgtgccgtctccgcatccagtcggacgagaagaacaagccggtgtgggtgacgttcccgatgatcatgcaccgcccgctgcccgacgacgccaagatcacctgggccaaggtgtccgtccgacacgtcgggcgcaggccggaatacaccctgctccttaccgtggagagcgagacgttccaccgtcgcagcgaagcgaccgttgacgccgtggcggttgaccttgggtggcgtcgcacggtgaacggcgtccgcgtggcgtactggcgcgacacgaacggcgacagcggcgagatcctggtgccgcaggaagtgccgctcggactcgaaaaggttgcgtcgctgcaatcaatacgcgacatgcacatgaacgaggtcaggctcaagctgatggagtggaaggccacgcagggcgagtgggtgcgcgagaacctttcgcacgttcacgtctggcgctcgccccggcaggttgtccggttcgccggcaacgcgaggcgcgaaggcatcgagcttcccgatttcgtggaggcgttcctgctcaaagaccggcacctgatgttctgggccgagcagcagcgagatcggcggctcaatcgtcgtcgagacttctaccgcaacgtggcggcgcagtttgcgcggaagtacaagcacatcatccttgaggacttccgattgacggcggtgcgagagaagcagacgaacctgcgcgacgacgccacggccaaggagaagaaaaccgactccggcagcgtggcgatgcgtcgccaggccaacgtcgccgcgccgggtgagtttcgcttggcgatgagtacggccagttcgacgtacggcgctcgcgtgatcgtggttgaccccgcgtacacaagcatgacctgtcacatctgcggtcacaagaagccgtggaaggacaagtcggagctgctccaccgatgcgagggatgcgacagcgtgtgggaccgcgattcgaacgccgcgcacaatctgcttgcgagaggcttggaggcgctgaaaacccccctgccgctcgacatgcccaaggagcccgagatcgctcaggaagtggaagatgacgacgatgacgacatcgaaatcggcgacgattgcggtggaccgctcgaagcggtcatgctaggcaagcagaagaactag

SEQ ID NO: 66010 - DNA, 24 bp, freshwater bacterium sp.
gtcgcaatacttgccgaatgggtt

SEQ ID NO: 66011 - DNA, 24 bp, freshwater bacterium sp.
gtcgcaatacttgccaagtgggtt

SEQ ID NO: 66012 - DNA, 24 bp, freshwater bacterium sp.
gtcgcaatacttgccaagtgggtt

SEQ ID NO: 66013 - DNA, 24 bp, freshwater bacterium sp.
gtcacaatacttgccaagtgggtt

SEQ ID NO: 66014 - DNA, 1968 bp, unknown
  TnpB Polynucleotide
gtgaatattgtctaccaattcggcatcctgccgcccttcgaaggcgcggacctcgtcgagcagcaattgcgcatggcgtgggagtaccgcaagaagctcacggagctggagcgcgaatcgcgcgatgcgcagcgggccatccgcgaggccaacggcgacatccacgccgcgcaggtgcgactcgaggcgaccaacgccgcatgcgaggccgcgtggaaagacatctgccggcaccgcgcgaagacgcacaaaaaagacgagccggcggcgatgaccgatgcgctgaaggcgcggcgcgcggaggcgaagctcgcgcgcgccgcgctggcgatcgcgcgaaaagcgtggcgatcgcgccccgaggcgcaacggcaggtggatgcgctggccgagcgattgagcgagcgcattcggaccgaagtgcgcgctgtgttctcgcgcaagggccaagggttgcgacacggtacctacacgctcgtggaggacgcggccgagatggcgcgcaaccccaagacagtccctatctaccgcggcacgcagccgcacaatccgcgttacccgtcgtgggacggcggcggacgcatcggcgtgcagatcgcgggcggcatgacggtggccgagctcacggcgggacaccacacgttcctgcgcatgacggccgcacctccgccgccaccgcgaaaagacgataaaccgagacgggttgggcagaaggacattcgggccgtgtggctgcgggtcggcacgaacgacgcggaccgttcgccggtgtgggcgaagttcttggtggtcaagcaacgggagtttcccgatggcgcggtcatcatgcgcgccatcgtgcgcaagcggcgcatcggtccgcggtcgcactggacgatcggtttcgtcttgcgcgtgccggacccagtcgcgcagccgcgcgggttggcgatcgcgattgacgtcggctggcgcaagctccgcgacggcgtgcgcgtgtgcgcctggcacggcgaagacggcaagagcggcgagcttctattgccaaagacgctcgtgttcgcgctcacgcacccggacgagatccggtcgacacgcgatgagcttttcaacgccgcaaaggcgaagctcaaggcgttcctgtcgagtggcgtcgtgatccccgaatggctgaaggagcgcacggtgcacatgcacgcatggcactcgccagccaaactggcgtcgctgctacgccagtggcaggggcaacgcttcgagggcgacgccgcgatctggcacttcctcgccgatcccgagaaccgcgagccgcactcggacggcgttcggtcttggtcggagcgcgccgactggtggggcaaggaccaacacctttggcactacgagtcggacgagcgccagaagggcctgcggatgcggctcgatgtctaccgaaactttggtgctgcgctgacggagcgctacggcacggtggtgttcgaggacttcgacctgcgcaaggtcgcggtccgaaggacggagaaacaggagcacgataacgccagcgccaggcaccagcggacgctggtggccgtgagcgattttcgcgccgctgttgagcacgcgttccggtggcgaggcaagtactccgagaccgtcaacgccgcgcagtcgacgcatacctgtcatgcctgcggccacgtcgcgaagttcgatgcggcggcgcagatcgttcacgagtgcgtggcgtgcggcgcggtctgggatcaggacgagaattcggcgcaggtgctgctcgggcggtatcttgaccgaaagaaaggcggtgagagggccggcgacgagcggtctagcggcgcgcaaagtggcgggggcgctcgcgatggtgaaaacccgaatgctgacgtagagaaaggagagagccgacgggcaagatcaaagcggaagagccttgaacggaaggctcggatcgagagtgctcgcaaggactcggataaggtaacgaaatga

SEQ ID NO: 66015 - DNA, 35 bp, unknown
  Direct Repeat
gtggcaatggctgctggacgccttgaagatccaga

SEQ ID NO: 66016 - DNA, 35 bp, unknown; identical to SEQ ID NO: 66015
  Direct Repeat

SEQ ID NO: 66017 - DNA, 35 bp, unknown; identical to SEQ ID NO: 66015
  Direct Repeat

SEQ ID NO: 66018 - DNA, 35 bp, unknown
  Direct Repeat
gtggcaatggctgctcaacgccttgaagatccaga

SEQ ID NO: 66019 - DNA, 35 bp, unknown; identical to SEQ ID NO: 66015
  Direct Repeat

SEQ ID NO: 66020 - DNA, 35 bp, unknown; identical to SEQ ID NO: 66015
  Direct Repeat

SEQ ID NO: 66021 - DNA, 35 bp, unknown; identical to SEQ ID NO: 66015
  Direct Repeat

SEQ ID NO: 66022 - DNA, 35 bp, unknown
  Direct Repeat
gtggcaatggcagcgggacgccttgaagatccaga

SEQ ID NO: 66023 - DNA, 35 bp, unknown; identical to SEQ ID NO: 66015
  Direct Repeat

SEQ ID NO: 66024 - DNA, 35 bp, unknown; identical to SEQ ID NO: 66015
  Direct Repeat

SEQ ID NO: 66025 - DNA, 35 bp, unknown; identical to SEQ ID NO: 66015
  Direct Repeat

SEQ ID NO: 66026 - DNA, 35 bp, unknown; identical to SEQ ID NO: 66015
  Direct Repeat

SEQ ID NO: 66027 - DNA, 35 bp, unknown; identical to SEQ ID NO: 66015
  Direct Repeat

SEQ ID NO: 66028 - DNA, 35 bp, unknown
  Direct Repeat
gtggcaattgctgctggacgccttgaagatccaga

SEQ ID NO: 66029 - DNA, 35 bp, unknown
  Direct Repeat
gtggcaatggcagctggacgccttgaagatccaga

SEQ ID NO: 66030 - DNA, 35 bp, unknown; identical to SEQ ID NO: 66015
  Direct Repeat

SEQ ID NO: 66031 - DNA, 35 bp, unknown; identical to SEQ ID NO: 66015
  Direct Repeat

SEQ ID NO: 66032 - DNA, 35 bp, unknown
  Direct Repeat
gtggcgatggctgctggacgccttgaagatccaga

SEQ ID NO: 66033 - DNA, 1734 bp, unknown
  TnpB Polynucleotide
gtgaatcgcgtatataaatacggtctcctatctccaacgttgggattcgatttgatcgatgacacgatctacaaatctcatcgctactacaacactttgatcgagattgaacgcggacgacgtactcatatccgtgaggctctttgcactcacgcagataccgaatcattagttatcgagatcacaaacctagctgccgaacgagacgaggcacgcgagcaaataaaacgtaaacgatcagcatctagatcacgctcagaatcagctgagcaacgagaacgcgtacgacaattgggcatacggctcagggcactccgcgcgcaactcaaagacgctaaggccgtgatcgctaccgatccgatgatcgctggtgcaattaagctagccaacgaacatgctgctcagcgccgacgagacgaacgtaaacgctgtggagtatattggggcacctacctgttaattgaggcagcagttgaccaagctgcaaagagcaaaatggatccgcagtttagatcttggtcaggtaatgggcgaattggtgctcagcttcaaggcggaattgacctcaccgaacttgcaacaaacacacagctacaaattcacgatcgtgtagatcaccgcatcgggcgtagagctggaacacgcaaattgctacgcgtacgtgttggtagtaacgaacgcgctcctatctgggctgaatggccaatgatcatgcatcgccccctacctgatgatgcacgaatcaaaggtgtcactgtacacaagcgtcgccgcgattgtagacgttgggagtggctcgtcgacattctaatcgatacgaatttgactgctactacaaaacggtccagcaccggagcatgcgcactcaatttgggttgggcacaacgatcgcaaggattgagagccggttatgttgtcggagacgacggacacgaagtagagattgtgttatcgcaaggtgtgatagatcgcgtcgagaaagcagagtccattcattcgacccgtgacaagttgctcaacacacttagaccactactaatcgaggcgatcggtgtaattgcaggcccgcctcaatggctcgtagagcgatgtcaacacatacatacatggcgatcggcatctagattcgcatcgcttgcacgtatgtggagacagcaacgtttcaccgacgacaacgaggcctatgaattggtggagtcgtggcgttatcgagacgaacatctccaacgctacgaagcaggacttgtgcgtggggcacacctcaatcgactagacgaataccgcaagctagcggcaacgctcgctgctaaataccacacgctaattatcgacgacactgacctccgcgatatgcaaagatcgccacgtccagaagacgaacgacacaaggtggatgttgttaagcgaaatcaacgccatgtgtcaccgcatgaagttcgagctgccctcgtcaacgcgttttctcgaataataaaactctcatctatcaacgtaacgcgaacgtgttacaaatgcggcgccatagaacaatgggatcgtgcatgttcggatcgtaaccataagtgctcatcgtgtagttccacttgggatcaagacgccaatgcatgccgaaatctattacgcgagtggttgcgtacggagcctgaacgagaagctgctcgatctgccaagggcacagagaataaggaaacacgatcagatcgattgcggcgcggacgtaagaaagccgcctga

SEQ ID NO: 66034 - DNA, 30 bp, unknown
  Direct Repeat
aatagctgctcgatgttctatgaatcgaga

SEQ ID NO: 66035 - DNA, 30 bp, unknown
  Direct Repeat
aatagctgctcgatgctctatgaatcgaga

SEQ ID NO: 66036 - DNA, 1893 bp, unknown
  TnpB Polynucleotide
atgccaaagaaaaagggtgtggttcaggacggcagaccgggtaggcggtttgtgtacgggctgagtgccgatctggacgggaacgtgacctctccggagaccgcggctcaaattgacaggttacttggccaagcgcgtggttaccgaaactcgttgatcgagatcgagaagggccggcgggccgagttcagcgcaacgctgaaagacagtggcgtcggggacctcgatgccatcaacgcgaagttggaggagctgagcgcccagaggaccgagctgcttgcgatgctcagggcaaagaaacggagcaagaagaccgaggaggcgaatcagctcagggccgaactgaaggtcttgaatgcgagtgctgtcgaatatcgtgccaagaggaaaacttggttcggtgaggcgctcaagaaaccggaggtgaagcaggcgctcggcaacgtgaacgcgcgcgcgaccgatgcagtgaagtcagccagaaagaacaacggcctgtactgggggatctacctactggttgaaaagcaggtggagaccgccaaggagacccgtagcggaccgcagttccgtaaatgggatggcagcggcgctgttggcgttcagctccaaggcgggctcagcgtggctaaggctttcggtggcaaggaccaaaggatccgcatcgatccagtgccagagcgcgcgtacgcggcgaccaacgccaaggctcgcagcaaggccactcgaacactgatgcttctacgtgtcggatctgacgagagtaggcgcccgttgtgggcagagttccacgtcattctgcaccgtccgctgccacccacaacgacgatcaaggagatcgctatccgtcgagaacgtgtgggcgaaaggtttcggtggaccgcagagttctctctgcgcgatgtcgagttctccaagccgatcgctgtaaagcgcgcgcgggactacaacccgagcgctgtagcggcgatcaacgtcgcatggcgagagaagctcaccggcggcgttcgcgtcggcagtcggttcgtgcgcgacctgcgtgtcgggttcctggtcgattccacgggccactacgaggagatcctggccgatcgaagcgtgctttaccgcattcaccactgcgacgatctcaggtccattcaggacgatcgtttcaacgcggccatgtcggagttgacagggtttctgtctaaccgggagctgcccgagtggctcgcggaagcgcgtggctacctgtcgaaggtcaagtcgcatcgcacgttgcgtaggatcgcggaaaagtggcgcgagaatcggttcgacggcgacttggaagccttcggtaagctatgggcctggcgcgagaagtccttgcacctgtacctgtacgagtccaaccagcgcgacgacgcgctcgggtgtcgccgcgagatgtaccgcctgatcgccgtcaggttggcggccaagtacgggacggtgatcgtggacgacttcaacctcgctaagctcgccacgaaggacaacccggagcagaaccgaaaccagcggcgtaacagggccgtctcggccccgagtaagtttcgggaagcgttgaagtacatgttgacgaagcgcggggtgacggtacccgatccgaacaaacggtcggtgatggccacggcgaactgccatgtgtgcgggattgagtgccagtgggatcgagaaaaggagctgtggacgacgtgcccgaacggtcaccactgggaccaagacgccaaccactgctacaatctgatccagcgctatcgagacgcgagtggcccgaagacgcccgagttccaggaaccgctcgcagacgacgaaaaagacagcgaatccgactggatcggcattgcgctgggcgacgtggagacgctggccgctaagtccgggtag

SEQ ID NO: 66037 - DNA, 35 bp, unknown
  Direct Repeat
cggcaacgcctgctcaccggcttgaaaggtgagac

SEQ ID NO: 66038 - DNA, 35 bp, unknown; identical to SEQ ID NO: 66037
  Direct Repeat

SEQ ID NO: 66039 - DNA, 35 bp, unknown; identical to SEQ ID NO: 66037
  Direct Repeat

SEQ ID NO: 66040 - DNA, 35 bp, unknown; identical to SEQ ID NO: 66037
  Direct Repeat

SEQ ID NO: 66041 - DNA, 35 bp, unknown; identical to SEQ ID NO: 66037
  Direct Repeat

SEQ ID NO: 66042 - DNA, 1812 bp, unknown
  TnpB Polynucleotide
atgctggtctatcgttacggactcctggctcccacgcacaacgccgcgctcgtcgcggagcagctccgcaaggcgcatacgtatcgcaacgtcctggtcgagatcgaacgcgagaggcgcaaagcactcgcagcggcgatgaacgactcggcggtcgtcgacgctgagaagctcgtcaacgatcgcatctcgaaacttgccgagcttcgtcagaagctacgcgtcatgcgcgtgcacgggcgctcaaggcgcacagacgccgacgagttgaaagcgcaggtcgacgaggccaagcgcatgaagaacgaggccatcgccgcccaccgcgttgcacgacgcagcgccttcgagcgcatcaaggccgaacgcgagcgcatcgaagcgctgacgcttgagcttcgcaagggcgcgcgcgcgatctgcgacgtctactggggctcctacctcctcatcgaggacgccgacgtcgcgtcgcgcaaagcgccgctttgggacggtgccgagcttcacctgcccaggttcgtgcgctggaacggcgaaggtcaggtgggtgtccaagtgcagggcggaatgtccgtcgaggaggtgacgagcgaggaagggacgctacttcagatcctcgctcggcagacctcgaagaagggcgagccgtgggacgccgcgcgttctccttggggcaagctcttgcgcatgcgcgtgggatcgaccgataccggcaagcccatctgggccgagtggccgatgaagatgcaccgggagctgccgccacacgccgtcatcaagcgcgcggccatcttgaagcgcttcatcggaccgcgcgaagaatgggcgctgacgatcacgctcgatgacacgctctcgccgcccaggcatccggacgtcaagaatggcaaggccgtggccgtcgacttcggttggcgttcgctgggcggagaagcgggcatccgcgtggcgacttggagcgatcaggaaggccaccgcggcgaactcgcgatcacgcgccaccagctcaatggtctgcgcaaggcgaacgagctgcggagcgttcgcgacaaggagcttgaggttctcaaggcgcgcgtgaatggctggcgacccaagctcagcccggagcttcaggctgagaccgatcacgtctggaactggcgctcgcccaagcgcttcatccgcctcgccgagttctggaaactccatcgcttcccggccgacgaggacatgttcatcgagcttctcgcgtggtgcaagcaggaccgtcacctctggtcgtgggagagttcgcagcgcatcggctcgctccgctggcgcaaagacctctaccgatgcttcgcgcgcgacatggcgcgcaggtacgagtggctcgtcatcaaggacttcaacatggcggagttcgtcgcgcgcgtgcccgaggtcgagcacctcgacaccgaacagcaggagcgtgcgcgctcgtaccgacacctcgtttcaccatcggagcttcgactctgcttgatgcatgctttcacgggcgcgcgcgtgaagctcatcgtcgatcgcgcccagcgcacgatcgtcaccgagtcgtcctacacgaccatcacttgtcacgtgtgcgggtcggtcgagaagtttgacaagaagaccgagcttcgtcacacgtgcaatgcgtgcggtaccgactgggatcaggacgacaacgcttgcgagaacctgctcaaggactacgagctgctcgacatcccgtcgggcacgcgcgagtcgaacgaggcctaccaaggccgttggcatcgcctgaagaaggaacgtgaggagcggcaggccaagcaagcctga

SEQ ID NO: 66043 - DNA, 1902 bp, unknown
  TnpB Polynucleotide
atggaagcagaagatgtggaagtggaagagaacgtcgaaatcagcgctggccgtacccgcgtctacaagtacggtctccttgcgcctaccgtgaataccaagatcgtcgaagcgcagatgcggctcgcgcacaactatcgcaatacgcttgtcgagatcgagcgtgggcgtcgcaatgcgcagcgttctgtgcttgcgaaattcgatctctccggaaaggaacaggcggttctggccacaagagcggagctcgaagctgccttgctcgcggtgcgcgttgcgcgtgcagcctcaagatcacgttccgagaccgaagatatgcgtgatcgggtcaaggcggcgagaaaatcacacaaagaatcgacgaaggctctcgcgatcgagcgcaaagcgctccgcgcggacacccaagttcagctcgagatcgacgtcatcaacgatcgtgcggctgaattgcgccgcagcgcgcgtgcgttttcgggcctcggagaaatggggcctcacttcggtgcgtggggcacctatttgctgatcgaagccgccgacatggcagcgcgaaaagctccattcttcaaggattcggagcccaacgacccgagattcgttcgattcgagggcgaaggtcaggtgagcgtacagcttcaaggcggcatgagcgtcgaggatcttttcagcggcttccatgcacgcgcacgtgtcgacgccgtaaacgaaaatgcgtggttcgcgaagaagcgcggagaccgcaggcgcgcctcgcgcacgatgctgtcgcttcgggtcgcctccgaaggtcgcgatcccgtgtgggcgacgtggccgatgatcatgcacagaccgattccagaaggcgcgagtattcaacgcatcaccgtgagccgtcgaaagtacggcccgcgtgaagaatggtcggtcgatttcacactgaaactctccgacaagactccggcacgcacaaaatgcgggcaatcgggcgtggtgacgatcgatctcgggtggcgaacgatcggcaacgagatccgtgtcgctgcgtggcgcgacgatcaaggaaaacatggtgagctacgcctcgacgcgcgtgctgtttcgggattgaagaagccggacgagctccgatcgcttcgtgacgaaaagttcaactttgcgcgggctgctctcatcgaaatattgggaaaggtaaccattcccgattggcttcgagaggagatttcacacatcgcgcaatggcgctcgcaggcgcgactcgcagcgctcgctcgaaagtggagcgatcgtcacttcgaaggtgacgacgaggcgtacgcgatgatcgaaacatggcgctaccgcgaccaccatctgtgggaatacgaatctggacagcgcatcggttcgttgcggcatcggcgcgagatctatcgacgcttcgccgccgagctcgggcggaagtacaagacacttcttctcgaggatttcgacctgcgcggggtcgcgacacgggcaccgaccgaagaaggagcagaaaatctcgttgctcgtcggaaccggcaactcgccgccgtcagtgagcttcgcggctgcctctgcaatgttttcggcgaagacgcgttgaaggtttctcctgaaaattcgacgcacatttgcaacgcatgcggagcggtcgaggagttcgacgcagctttgaagatcgatcacacgtgttcggcgtgcggagcgacgtgggatcaggacgacaacgcgacgatcgtgcttttcgagaggtggcgcgccgcgaaaaaggcggaagccgctcgcgcggctgaaaatccgaaggatgctaatgtggtacgcgaatcaagatgggttcgggcaaagagaatgaaggaggcaaaaatcgaaagacagaacgctgctcgcaacaaggatccgaaagacgaggaatga

SEQ ID NO: 66044 - DNA, 33 bp, unknown
  Direct Repeat
tgtgggagacaagttgcaaaggttgctcgacac

SEQ ID NO: 66045 - DNA, 33 bp, unknown
  Direct Repeat
gcgtccgaaatcgttgcaaaggttgctcgacac

SEQ ID NO: 66046 - DNA, 33 bp, unknown
  Direct Repeat
tcgcattgcggagttgcaaaggttgctcgacac

SEQ ID NO: 66047 - DNA, 33 bp, unknown
  Direct Repeat
gccactcggcgagttgcaaaggttgctcgacac

SEQ ID NO: 66048 - DNA, 33 bp, unknown
  Direct Repeat
cgtcgacgacgcgttgcaaaggttgctcgacac

SEQ ID NO: 66049 - DNA, 33 bp, unknown
  Direct Repeat
ctccgctacctcgttgcaaaggttgctcgacac

SEQ ID NO: 66050 - DNA, 33 bp, unknown
  Direct Repeat
cgcgagagcgcggttgcaaaggttgctcgacac

SEQ ID NO: 66051 - DNA, 33 bp, unknown
  Direct Repeat
gcgatgcgccgcgttgcaaaggttgctcgacac

SEQ ID NO: 66052 - DNA, 33 bp, unknown
  Direct Repeat
gccggacgaatcgttgcaaaggttgctcgacac

SEQ ID NO: 66053 - DNA, 28 bp, unknown
  Direct Repeat
ggatcgagacggttgctcgacacctggg

SEQ ID NO: 66054 - DNA, 33 bp, unknown
  Direct Repeat
ttacggcgtcgcaaaggttgctcgacacctggg

SEQ ID NO: 66055 - DNA, 33 bp, unknown
  Direct Repeat
tcgcgctgttgcaaaggttgctcgacacctggg

SEQ ID NO: 66056 - DNA, 33 bp, unknown
  Direct Repeat
tcggctggttgcaaaggttgctcgacacctggg

SEQ ID NO: 66057 - DNA, 33 bp, unknown
  Direct Repeat
gacttcggttgcaaaggttgctcgacacctggg

SEQ ID NO: 66058 - DNA, 33 bp, unknown
  Direct Repeat
ccgggctgttgcaaaggttgctcgacacctggg

SEQ ID NO: 66059 - DNA, 33 bp, unknown
  Direct Repeat
tcaaggagttgcaaaggttgctcgacacctggg

SEQ ID NO: 66060 - DNA, 33 bp, unknown
  Direct Repeat
gtcgcatgttgcaaaggttgctcgacaccttct

SEQ ID NO: 66061 - DNA, 36 bp, unknown
  Direct Repeat
gcgtcgcgctgttgcaaaggttgctcgacacctggg

SEQ ID NO: 66062 - DNA, 36 bp, unknown
  Direct Repeat
acgtcggctggttgcaaaggttgctcgacacctggg

SEQ ID NO: 66063 - DNA, 36 bp, unknown
  Direct Repeat
ttcgacttcggttgcaaaggttgctcgacacctggg

SEQ ID NO: 66064 - DNA, 36 bp, unknown
  Direct Repeat
acgccgggctgttgcaaaggttgctcgacacctggg

SEQ ID NO: 66065 - DNA, 36 bp, unknown
  Direct Repeat
acgtcaaggagttgcaaaggttgctcgacacctggg

SEQ ID NO: 66066 - DNA, 2037 bp, unknown
  TnpB Polynucleotide
atgcacggcaacgacgcgaagccatcacgaatttactcctatggtgccaaggctccgactatcaatggagaggcggttcgccagcagatctatgacgccaatcgctacagaaataacctggtggcagccgaacgcgaacgacgggaagcttctttggcggctttgcgccgctatttcccggaagtcgaaaccttggagcagcggctagccgaggccactgaggctttggaggctgcgatcagggaaacgaaggccaagaacgccaaagcacgcaagcgcgtgaccacggatgccgacaaggaccggattaaatctttgcgggcagcgcgtaagcggttgacgatcactctcaaggaagcgaaggcgcggtgctggggaaatgacgacagggtcaaggagttgcacgactggtacaaagccgaagtgaagcggcagggcaagaaacggttagtcctggcggcgctgcggcaggagtatcgacggcggcggcgactcctctccgaaaaaccggaatttcaggacgaaataaaccgggtcgaggatgaacacgatgccaagctcaaggagttgcgggccgcttgtagagtgttctggggcacctatttgaccgtggaacagtctcttaagggcattcgcgaaggcaaaccgccacgcttcaagcgcttccgcggggacgggaagatcgccgtccagttccagggcggtctgagcgtggccgatgccttcgctggaatggatacgcgctttcggctgcggcccaaaccgctgggcgaaggcgaaaagccgagtaaggcggcggtgcggcgctatctcgcgtcggtgcggattggctcggacgggcgcgcaccgatctgggcggaattcgtggtgacgctccatcgtgacctgccaccggatgcgcagatcaaatggagctacggcctcaaacggcgcatcggtactcatgatgaatgggccttgcaactggtgatttcgcgcgaggatggattcaccaaagaggatcaggccgagtctggatatgtggccgtcgatgttggttggcggctacggcccaacgggctgcgcgtggcctactggattggcagtgatggcgccgaaggggaactcatcttgccgcacgcggacttgaaacgctgggaaaagcatgacgacttgcaacagattcgggaccggacgttcaacgtctatcatgcgacactcgtgacttggctcaaggcggaggacttgccgattgccgacctagccagggaacttcagcacctgcggaagtcggcagcggagcaggaatggaagctccagaggttgcccaagctcaaggatgtgtcgcaaaacaggcgagccaagatggagaagagtgccatccgctggcggaatgatctggaagaacgctgtgcggccatcgagacgctcctggccaaccgcaagcgtggtgtggacgtgccgaagtggttggaagaggagacagcaaccctggcctcctggcgtagcgaggatcggttggccaagttggtcctcaagtggcgtttccgccgcttcaccggggaccagtccatcttcccggtgctggaatggtggcgcaagcaggataaacatttgtatgactggcaggcattcgttctcaagggagccattcgctggcgcgatgacgtgtaccgcaacttggccgctatattgcgccgccgctatcatgcagtcatcaccgaggatgtcaactggcgcgatttacaggatactcccgaggtcgatcaagtggaggggtatatccctctcgactatcggcgctgtgcggccgttggccggctggtgcaactttgttgcgagaatgcaggtgaagcgccgaaggcaccggcgagccagacgacgaccaaatgcgcgaccacggaggttgtggacgaggacatggacaaggcccaattagagcactgctacagtggtagtcaggaagtgcgggaccaggaccgcaatgcctgtctgaacatgctgcggtggtatcgcgagcgcggcgatggtgaaagagccggttctgtggccctttaa

SEQ ID NO: 66067 - DNA, 36 bp, unknown
  Direct Repeat
ttggaagaccctgctcagtgggttggttactgagac

SEQ ID NO: 66068 - DNA, 36 bp, unknown; identical to SEQ ID NO: 66067
  Direct Repeat

SEQ ID NO: 66069 - DNA, 36 bp, unknown; identical to SEQ ID NO: 66067
  Direct Repeat

SEQ ID NO: 66070 - DNA, 36 bp, unknown; identical to SEQ ID NO: 66067
  Direct Repeat

SEQ ID NO: 66071 - DNA, 36 bp, unknown; identical to SEQ ID NO: 66067
  Direct Repeat

SEQ ID NO: 66072 - DNA, 36 bp, unknown; identical to SEQ ID NO: 66067
  Direct Repeat

SEQ ID NO: 66073 - DNA, 36 bp, unknown; identical to SEQ ID NO: 66067
  Direct Repeat

SEQ ID NO: 66074 - DNA, 1731 bp, unknown
  TnpB Polynucleotide
atgtttggccggaagtccaaaggctttatacaaatgtacgagtacggatgccgcaaccggcctgtggccggtctcgacgtcgcgcttgatcaaatggagcggcgaatccgactgtggaatcggttcgtcgaaatcgagagggagattcgtcgaaaagcacggttactcctatccgatgaagccgagcagcgcgagatcggagaactacaaaccagaatttctactcttcgttcttcgattcttgcgcggcgaaagacggaagggcggaactccgctgcgatcgaagatctcagaaaagcggttttggagtcccgaaccgaattggcagcgttaatgacacgcataaagttgaccagaaacgaacgtgtcattcgttccaaagcggccttcaaagcgctacagacggaacgtgctgaacaggtcaaacaggcccaaagagatagcatgctgtattggtgcaactacgatgatgtaaggcacgcgtacgaagttgcccgcgttcgagtcatgagggaaggcacagaattacgggaacatcattggaacggctcggggcgaatttctgtgcgttttcaacggggcttgcccgtgcacaccgcgttcactcgtcgtggtctcaggctccagatcgagcccgtaagggaagaggcgtggactgcgtccgtccggaatgtgcgcaggaaactatcgaggagtagggtgcgcattcgcgtcgcctctacaccgaactcacagctacccgtttggcttgaaattcccgttgtaattcatcgcccgctgcctcaggacggaatcattcggtctgctgcattgattcgcgaacgcctggcacttagctggcgctatcgactgattctcacagtcgcccgtcccaatccgcccgctcgtgtatccggtgaacggcccagcgttgcaatagatgtcggatggcgggtcacaccggtgggcctgcgcgtggcattttgggccgacacgctaggttctcacggtgatcttgtaattccgccgtcggacctcgcggaattcgcgaaaatccgtgagctatggtccatcctggacaagcatttcactgaaattcgagccgccgttttagcatggcgcggcgcgaatcagattcccgaagggctgctaccgcattttgggagagtggcggagagccagttacgagcaagcttgctacgattgctggacgagtggcagaggaaccgcattagtggagacgatgaaatattcgaacggcttttgacgtggagaaagaagcatattcacttatggacttgggcagtaaatctgcgagatcagttgacacggaggcgtttggaacatttccgacacttcgcggcaacgttggtgaaggaatacgaaacaattttcctggaaaagttcgatcttcggtcgttctcgagaatctcgccccccgaggtcgcaacacgctcgtttggtgggaagtttcgagtgattgctgcaccggggattctccggcaagtgattgagaacgccggtcgccggacggccgtgagagttgaaggtataaaggcacgaaatactacgaaggcatgccatgtgtgtgggcgagttgaagagtggaatgttgctaaacagattgttcacacgtgcatttgcggcgcgacctgggatcaagaccataacgccgcggtccagatcttacgcgctggccaggctcaaattggaatgggaacaattcgggaaaatccagccgtgatgtcctga

SEQ ID NO: 66075 - DNA, 1761 bp, unknown
  TnpB Polynucleotide
atgggcacgcgagcgtacaagtacgtcatccgggctccggtctcgaaccgagagctgatcgtcgagcagatgaaggcggcccaccactaccgcaacaagctcgtcgagatcgaacgcatgcgccgtcaggcgcagagggcgctgctgtcgtcggccacgccggtcgccgaggccgaagcctcgctcgcttcgatcctccacgacctcgaagaggccgtgaaggagatcaaggcctacaagcagaacaagcgcgccggcaaggttcccgaggaactgcgcacgaaggtcagcatgctgcgcgtgcgtcggagggacgcgctcgtcgctcatcgacaggcgcggctcgccagcaaggagacgcagaagacggaggccatgacggtcgacgcgctcgcggccgaccagcgcaaggcggcgcgggcctcgtgcggcgtctactggggcacgtacctgctggtcgagagcgccgaccagcaagcgcgcaaggacacgcccctctacgacggcggcgagccgagcgatcctcggttcaccccctggacgggcgaaggtcagatcggcgtccagctccagcacggcatgagcgtcggcgagctgtacgagcccaacacgctcgttcagctcatcccgcacgaacgcatcacggtgaagggcccggccacgagcaagcgtgccgcccgtcgccagtactgccatctgcggatgcgcatccagagcaacgaggcgcgcgatccgatctgggccgagtggcccatggtcatgcaccgaccgctgccgcccgacggccgcgtcaagcgggtcatcgttcaacggcggcgtgtcggcgcacacgaggagtggagcgtcgtcttctcctgcgaggccgactaccgccgcatcgacaacgcccgtgacggcgtcgtggggctcgacatcgggtggcgcatgcggcccgatggtcagatccgagtcggcgcctgggccggctccgacgggcagcggggcgaggtcctgctcccgccgcggctgatcacggcgatgagcaagcccgacgagctgcgctcggtccgcgacaaggcgttcgaccgcgcccgggctgagctgaagcagtggattcagcaggccccctacgtccccacctggatgcgcgagcgagcgcagtgggtcgatcgctggaagtcgccggggcgtctcgccggcatcgtcaggacctgggccgggctgcgcttcgagggtgaccgggagatctacgaccgcatggaggcctggcgctaccacgacttccacctctggaactgggagtgtcatcagcgcgagacgtcaaagcggtggctgaaagacttctatcgcgtggtcgcccgcgacctcgcccgccgctacgagcggctcgtgatcgaagagttcgacctgcgacccctggcgcgtaggcccatggtcgaggaccacgaccctacgcaccggctcaccaacgccacgcgccacctcgtggcgccctcgatgctgcgcgagtgcgcgatgcaggcgttctccaccgtcgagcaggtcgacgcgaccaacacgacccgcgcctgccgtcactgcggcacgatcaactcctggaacgccgccgaggaggtcacccaccagtgcgtctcgtgcggcgccgtctgggaccaggacgacaacgcggcagacaacatccgcatgcgctcgggcacgggcaaggtcgtcggaggagagaggccgacagagcgaggaggaagctgggcacggcgcaaggctgctgccaagaacgctgcttga

SEQ ID NO: 66076 - DNA, 32 bp, unknown
  Direct Repeat
gagaggctgcgcggcgccttgaagaccgcgac

SEQ ID NO: 66077 - DNA, 32 bp, unknown; identical to SEQ ID NO: 66076
  Direct Repeat

SEQ ID NO: 66078 - DNA, 1194 bp, unknown
  TnpB Polynucleotide
atggcgtgcaaagaccggagtgtgctgcgccttgttaaatttcggagctggcgagatggcggcgttgcggccgtgcagatacagagggcggcatgggagcgagatggcggcgccagtatgtatcgcacccgagcgcaggtcgacaatcgaactggccggcgaacgaagcacggaggacgccagacgctcgagattcggatcgggtcagatggccgcaatccgatctggtctgagcccgttcggtacgagcagcaccgggaggccgtgggccggccgacgtggatcaaggtgtctatgaagtatcgcggcgacctagaggtgtggtctgtggtcgtcacgtgcgccgacgtgccgccccgccccgcgtccgaagaggcacagcgaggggtcgtggctgtcgatgtcgggtttcgccgggtgggcgacgacatacggatcgcgtacgccagggacgatcgcggcaaggtgagcgaactgctcatggatgccaggtggcgtgagttgtgcaatcgcgcggatcgaatccgcgggcaccgagacgacaacttcaacgccctccaggaagccgactcggagaaccttttctcgctcaccaaaagcgctaacggcgctaggcaaaagatcgagcgtttagttcgcgaaggcgaagaagtgtcgcaagagatgcgcgcgtggatgcaccgagaccggcatctatcgcaatacgaagacgggtgcagacggcgatcggtgaatgcgcgcaaagatgctatgagaaaatgggcgcgggaattgcgaaggaattactctcagctcgtcctgagtaaaacggcggttaaaaaaatgaaggagaatgcgaaggacgacggattaccgaagcctgccagaaggcaggggcagaacgcggcaccaggtgagctgctggactggctcgtgatggtgttcggtcgggccgaggtggccatcgttaaacccatccacacgactgatacatgcgtgtcgtgcgagcacgtaaacgatcacggaccagaaaccattgtcgtctgcgaggagtgtggtgctgcgctcgatcgggacgaggcaagcacccgaaacatgatggatctgtgggtaaatggagagtgtgagaaaccaaccgctcgcaaagcgtccgctaagtttgccaaaaagcacaagactgaggataaggatgacaatgccagcccagcggcctag

SEQ ID NO: 66079 - DNA, 22 bp, unknown
  Direct Repeat
tgacaatgccagcccagcggcc

SEQ ID NO: 66080 - DNA, 22 bp, unknown
  Direct Repeat
tgacaatgccagcccagcggcc

SEQ ID NO: 66081 - DNA, 22 bp, unknown
  Direct Repeat
tgacaatgccagcccagcggcc

SEQ ID NO: 66082 - DNA, 22 bp, unknown
  Direct Repeat
tgacaatgccagcccagcggcc

SEQ ID NO: 66083 - DNA, 22 bp, unknown
  Direct Repeat
tgacaatgccagcccagcggcc

SEQ ID NO: 66084 - DNA, 22 bp, unknown
  Direct Repeat
tgacaatgccagcccagcggct

SEQ ID NO: 66085 - DNA, 22 bp, unknown
  Direct Repeat
tgacaatgccagcccagcggcc

SEQ ID NO: 66086 - DNA, 22 bp, unknown
  Direct Repeat
tgacaatgccagcccagcggcc

SEQ ID NO: 66087 - DNA, 22 bp, unknown
  Direct Repeat
tgacaatgccagccccgcggcc

SEQ ID NO: 66088 - DNA, 22 bp, unknown
  Direct Repeat
tgacaatgccagccccgcggcc

SEQ ID NO: 66089 - DNA, 2220 bp, unknown
  TnpB Polynucleotide
atgcctgaagaagatctgcctgagatcaagaagccaccgaagcaagtccgcgtctatccgccgcgacctcctgcgaggactctgaagaacggcaagaagtcgcaatcgcgcaagacgagtgagctgccttgtaaaatcctgacctacggtgtgcctttcggcccgtccaagcatcaggctgaagttgagctggagtacatctacggcggacagtggcagaacctccaggtcgccatcgtacacgagtacaggaagtcgattcgcgttcgcgaagcgacgtaccctgcaatcgctgaagctgacgtcaacgtcaagactgcgcaggatgccttgaatcagttggaggacgtgctgaaggaccagcgcgtcgaggatcgcaagcgcacacccccctcgtcagagcagtatgcagcgatcaaagcagcgcgagccgcgttgtctgccgcgtaccagaagaggtcgaagctgaagtgggatcttcgtaagaacgacaaagaccacaaagcgtttatggaggagcgcaaagtagcttacgagcacgcggtgtgggttgcggagcgtggtccgaactacaaggggcatcaggagttcctgcgcaagtaccagcagccctacgacaacggcatctaccccgacatcggcgtgccgttctggggtacgcgagggttgcgactcgccagcgtgaagcaggccaccaaagacacgaacatggaccgtgaccaagatccgaatttccatgcgtcacgcggggatgggcgcatcgggattcagatcatgggtgggcctttgaagggcatgacggtggcgcagtttctttctggtggtgacaaccgtatcgggttcaggctcgatgagccttatggcaccagcaagcgtgctcagatcatgcgtcgaggagtcttctcgatgcgaatcggaacgcaggaggacggcagtccgatgattgcagagttcccagtggtgtatcaccgaccgctgccgcccgatggtttgatcaagaacgtctgggtgcgtcgacagaagtttgggtaccgttaccgttacgagcttcagatcgtggtggaggctgacttcaacaaaaagccgaaggaggagtcagagaagaccctcggagccatcgacatcggctggcgtgtgcgacccgacggcatgcgtgtgatggtcatcgcacggacagcaggctcaccgctgttgcagtggaacgggcaggtcgtggagcacccgctgccgtacatgcacggcgggttgccgtgttccgaagtgagaatgccgggagagcgtcttggcaagatccaaccgcctgctctgcgcgagaagtgcgccgacggcaagatgcgtcgagtcaagcgaccagagaacttggagcaaggcggaacgtggccaggcagacgtcgagaccggctctctatctgggccgctctggagcgtgcggacgagcttcgcagcatccgcgacaggctcaagaacaacatcaccgagagcctgatgaagcatcttcagagcacaccatccgagtggctcaaagagcaaaccgagttcatcgaccagtggaagtccccgaagaagctgatcggactctgctaccgctgggtcgaaaaccgtttcgacggagacgaagacatcttcgcggcccttgacgcctggagggtcaaagagaaacatcttcaccagtggcaagcggacatgcgccagcgtggggaggggcagcgcgaggatttttatcaatccatcgcgaagcagcttgcgcggacgttgtctgtgatcaagatcgaggcgttcaatctctcagaggttgcggtcttgcctcttgttgaagaccccgagccgttgccgcaggctgcccgcaggcatcggacctacgcagcggtcagcacgttccgtcagtcgcttacttcggcctgcgcccgcgaaggcacgtcgttgctcggcgtcgaagctcagaacacgacgcttcagtgcagtcggtgtggtagagtcgagaagttcgacaaggctccgctggagcacgtctgctatgcgtgcggacaacgctgggaccaggatgagaacgcaacgcagaacatcgctgtgtcgaagtcttctggaacaccggataacgattctgccggtgaccccgacaacacgcctgcgagcggctctgagactcaacacgcccaggagccgctcgcagcttctccaagtccacgagatccttcagacaacgacggcagctactcctga

SEQ ID NO: 66090 - DNA, 27 bp, unknown
  Direct Repeat
gtcgaaacgccatcgcagcggctagaa

SEQ ID NO: 66091 - DNA, 27 bp, unknown
  Direct Repeat
gtcgaaacgccatcgcagcggctagaa

SEQ ID NO: 66092 - DNA, 27 bp, unknown
  Direct Repeat
gtcgaaacgccatcgcagcggctagaa

SEQ ID NO: 66093 - DNA, 27 bp, unknown
  Direct Repeat
gtcgaaacgccatcgcagcggctagaa

SEQ ID NO: 66094 - DNA, 27 bp, unknown
  Direct Repeat
gtcgaaacgccatcgcagcggctagaa

SEQ ID NO: 66095 - DNA, 27 bp, unknown
  Direct Repeat
gtcgaaacgccatcgcagcggctagaa

SEQ ID NO: 66096 - DNA, 27 bp, unknown
  Direct Repeat
gtcgaaacgccatcgcagcggctagaa

SEQ ID NO: 66097 - DNA, 27 bp, unknown
  Direct Repeat
gtcgaaacgccatcgcagcggctagaa

SEQ ID NO: 66098 - DNA, 27 bp, unknown
  Direct Repeat
gtcgaaacgccatcgcagcggctagaa

SEQ ID NO: 66099 - DNA, 27 bp, unknown
  Direct Repeat
gtcgaaacgccatcgcagcggctagaa

SEQ ID NO: 66100 - DNA, 27 bp, unknown
  Direct Repeat
gtcgaaacgccatcgcagcggctagaa

SEQ ID NO: 66101 - DNA, 27 bp, unknown
  Direct Repeat
gtcgaaacgccatcgcagcggctagaa

SEQ ID NO: 66102 - DNA, 27 bp, unknown
  Direct Repeat
gtcgaaacgccatcgcagcggctagaa

SEQ ID NO: 66103 - DNA, 27 bp, unknown
  Direct Repeat
gtcgaaacgccatcgcagcggctagaa

SEQ ID NO: 66104 - DNA, 27 bp, unknown
  Direct Repeat
gtcgaaacgccatcgcagcggctagaa

SEQ ID NO: 66105 - DNA, 27 bp, unknown
  Direct Repeat
gtcgaaacgccatcgcagcggctagaa

SEQ ID NO: 66106 - DNA, 27 bp, unknown
  Direct Repeat
gtcgaaacgccatcgcagcggctagaa

SEQ ID NO: 66107 - DNA, 27 bp, unknown
  Direct Repeat
gtcgaaacgccatcgcagcggctagaa

SEQ ID NO: 66108 - DNA, 27 bp, unknown
  Direct Repeat
gtcgaaacgccatcgcagaggctagaa

SEQ ID NO: 66109 - DNA, 25 bp, unknown
  Direct Repeat
gtcgaaacgccatcgcagcggctag

SEQ ID NO: 66110 - DNA, 25 bp, unknown
  Direct Repeat
gtcgaaacgccatcgcagcggctag

SEQ ID NO: 66111 - DNA, 25 bp, unknown
  Direct Repeat
gtcgaaacgccatcgcagcggctga

SEQ ID NO: 66112 - DNA, 25 bp, unknown
  Direct Repeat
gtcgaaacgccatcgcagcggctga

SEQ ID NO: 66113 - DNA, 25 bp, unknown
  Direct Repeat
gtcgaaacgccatcgcagcggctga

SEQ ID NO: 66114 - DNA, 25 bp, unknown
  Direct Repeat
gtcgaaacgccatcgcagcggctga

SEQ ID NO: 66115 - DNA, 25 bp, unknown
  Direct Repeat
gtcgaaacgccatcgcagcggctga

SEQ ID NO: 66116 - DNA, 25 bp, unknown
  Direct Repeat
gtcgaaacgccatcgcagcggctga

SEQ ID NO: 66117 - DNA, 25 bp, unknown
  Direct Repeat
gtcgaaacgccatcgcagcggctga

SEQ ID NO: 66118 - DNA, 25 bp, unknown
  Direct Repeat
gtcgaaacgccatcgcagcggctga

SEQ ID NO: 66119 - DNA, 25 bp, unknown
  Direct Repeat
gtcgaaacgccatcgcagcggctga

SEQ ID NO: 66120 - DNA, 25 bp, unknown
  Direct Repeat
gtcgaaacgccatcgcagcggctga

SEQ ID NO: 66121 - DNA, 25 bp, unknown
  Direct Repeat
gtcgaaacgccatcgcagcggctga

SEQ ID NO: 66122 - DNA, 25 bp, unknown
  Direct Repeat
gtcgaaacgccatcgcagcggctga

SEQ ID NO: 66123 - DNA, 25 bp, unknown
  Direct Repeat
gtcgaaacgccatcgcagcggctgg

SEQ ID NO: 66124 - DNA, 25 bp, unknown
  Direct Repeat
gtcgaaacgccatcgcagcggctga

SEQ ID NO: 66125 - DNA, 25 bp, unknown
  Direct Repeat
gtcgaaacgccatcgcagcggctag

SEQ ID NO: 66126 - DNA, 25 bp, unknown
  Direct Repeat
gtcgaaacgccatcgcagcggccta

SEQ ID NO: 66127 - DNA, 27 bp, unknown
  Direct Repeat
agggaagcgccagcgcagcggctagaa

SEQ ID NO: 66128 - DNA, 24 bp, unknown
  Direct Repeat
gttgaaacgccatcgcagcggtcc

SEQ ID NO: 66129 - DNA, 27 bp, unknown
  Direct Repeat
gtggaaatgccatcgcagcggctggaa

SEQ ID NO: 66130 - DNA, 1860 bp, unknown
  TnpB Polynucleotide
atggcaagcccaggtggcaagtctggaagcgagggctgcataatgggcacattggtttatcgatacggtttgttggctcctgttgatcacaacaaagaagtgcgcgagcaaatgtggtacgcacatcgttacggcaacgtcctcgtggaaatcgagcgcgctcggcgcgcagcggtacgccttgcgtacggcccacttgcgacgtttgagcatgccgccaaagaggctggcactgtagtgcgggatgcccgcgaggccatcaaacgcgcacgcgccgaacaccgcgctcgtgtcgagacagacgcaatgaagctcgcgctctcgtctgcgagagaggcagagcgagaggccaaacgtgctctgtttgaggctcgtcgacagctgagagagagcggcgcagtcgacgcggcactggcagacatcgaagctcgtgcgggagagctacgtcggggtgccagggctctttctggtgtgcactggggaacctactcgctgatcgaagcggcgcacgacgcatctcgcaagatgcccctgtacgacggcgtagagccgaacgatccacgcttcgcgcgctgggaacacgaggggcaggtagggatccaggtacaccaaaagggcagcactggaacgggtatggtcgcagaggagctacacgcaggaatcggtggcgagtggctgcgcgtcgaacgtgtccacgatacgcgtcaggggcgcagggccggaacgcgagcgcgactgactatgcgcatcggaacaagcgacgtagacggcacgccgatcgttgcagcgtggccgatggtcatgcatcgcgcggtccctcctggcgctatcgtacgacgagctacagtgtcgctccgacgccgagggccgcgtgaagaatggtcggtagagctgaccatccaggtgccaagcacgattgctcccgaggagcgacagggccacgttgcaatcaacgttggatggaggtccatgggcgatacgattcgggtggcgtcttgggttggcagtgacgggcaaaagggagagctgcatctgtctaagcgaaccatcgaaggcctgcgaaagcctgaggggttacggtccacacgagacaagaacttcaacgacgcgcgcaacgcgctgctcttggcgctcgccggtctcaacgtgcccgagtggtacacgctgcgggctaaggctctgtcgcagtggcgaagcccccagcgactcgccgcgctcgcaacggaatggaaaacgaagcgtttcgcgggtgacgagtcggcctacctcgcgctcgagacgtggcgataccacgaccatcacctttgggcgtgggaggcatcgcagtcagttggctctcaccggcaccgacgagaggtgtatcgggtttttggatcgcaactggcgaagaggtatcggacgttggtgctcgccgactttgataagagagtcgtcgctatccgcccagcggtgggcgacgccaacgacaagacgcaaaacgagacggcacgatcaaaccgccaactggcgtcgacgagtgagctcgagcgcgaagcggccaacgcgtttacgtcgcgcggcggcacggcggagtacctgtcagcagtagacatcacccacacgtgcgcggactgtggagcgttgtcgacgttcgatgccgccgaacgcatccacgctgcgtgctcatcgtgtggtgtggtgttcgaccaagacgagaacgccgctcgtgtgctttgcgagcggtggcgtgatggcgaaaaggtgggggtcgctcgcgtagcggaaccacaagagaaagtgggatctaagtggcaacgggcaaaggcgcgcaaggaggaaagacaagccgctcgcaaagcggtggctagcgccgcggaatga

SEQ ID NO: 66131 - DNA, 36 bp, unknown
  Direct Repeat
gtaacagaggctgctcaatgcctttgaaattgagac

SEQ ID NO: 66132 - DNA, 36 bp, unknown; identical to SEQ ID NO: 66131
  Direct Repeat

SEQ ID NO: 66133 - DNA, 36 bp, unknown; identical to SEQ ID NO: 66131
  Direct Repeat

SEQ ID NO: 66134 - DNA, 36 bp, unknown; identical to SEQ ID NO: 66131
  Direct Repeat

SEQ ID NO: 66135 - DNA, 36 bp, unknown; identical to SEQ ID NO: 66131
  Direct Repeat

SEQ ID NO: 66136 - DNA, 36 bp, unknown
  Direct Repeat
gtaacagaggctgctcaatgcctttgaaattgagct

SEQ ID NO: 66137 - DNA, 1854 bp, Polyangiaceae bacterium sp.
atgattcgtgtttatcgttatggtcttctggctccgaccatgaacggcgcgctcgtgcgcgagcaaatgcgtggtgccaatcaataccgcaacgtgctcgtcgagatcgaatgcgcccgacgcagcgcacttcgcacgctgctcaccgataacgggctacgccagctcgaggaagaggtggcagccgccgaagcgtcggtgcaaacggccgttgcagccgcccgcgaagttcgatcttcagccaggtcggccgcgtcagttacggcaaggcatcgcgtgcgcgaagcgagagagacgcgccgacgcgccgtggatgcactgcgagcgcggcgtcgcgaaatccgcgacagtgccgcggtgcagcgcgcgatgagcgaaatcaacgagcgtgcggcctcgcttcgtcgtagcgcccggggcttgtgtggcgtttattggggcacctatctccttgtggaagatgccgatcatcgcgcgcgcgccgcagcgctctacgacggcgcgttacccaacaacccgcggtgcttgcggttttttggctccggccgtattggcgtccagatccagcgcggcatcccgtgcgccgtgctctttggttccgatgcgcgattgcgcgttgcgcccgttgatccaggtgcatggcagtcgcccgagcgtgcggagcgccggcgactgtcgcgcacggttctttcgctccgcattggctcggaagggcgcagtcccatttgggcccaatggccgatgacgatgcatcgcccgctgcccgagggctcgatcgtcaagcgcgcaacggtcagcgttcatcgccgtggtccacgcgaagagtggagcgtcgaaatcaccttggaggtccctgacgattcgttcgttggctcgcgggctaaccaggctaacggcacgggcagcgtggttgcgatcgacatcggctggcgcgcgatgggcggcgagctgcgcgttgctgcgtgggctggatcagacgggcgttcgggcgagctcgtgctgcccgagtcgctcgttggcgcattcgtgaaggttgaagagctgcattcgattcgcgaccagaatttcacggcggcgcgtcaaggcctcgaggcctggcttaccggcttcgcagcgattcccgattggctgcacgatgcatccgactccatcgcggagtggcgccatccatcgcgcctcgcagcgctagcaaaaaaatggaaaggtttacgcttcgcaggtgacgagcaggccttcgaagcgctcgaagcatggcggtatcacgaccaccatctctggtcgtgggaagcgtcgcagcgaatcaatgctctgcgcgcgcgtcgcgaaatctatcgcgtgtttgcttctcggctcgtccgaacctacgcatccatcattctcgagaacttcgattttcgaagcactgccgagagccggctatccgacgatgtgcgcacgtcgtcaagaggcagtcggcgcgatcgccagatcgctgctgtgagcgagctgcgtgcgattttgcaaaacgcttcggcagggcgctccgtaggcatcgaaatgctcgatgcaacgggggccgccgattccgccgattctgcttgccccccatgcagctcgaaagaattcgatacggccgggcagcttcatggtgcctgcgatccgtgcgacagcgtttgggactcccatgaaaacgccgcgcgtggactgctcgcgcgatggcagcgtgagtgccgtggcattgactcgccacgtgcaggagtgagcagtgagcagatgcccgaaagtcgttgggtgcgtgcacggcgtcttcgggccgagaaagatgccggcgcggaccgtgccgcggagtgtaaagcgaaacacaaagcggtctaa

SEQ ID NO: 66138 - DNA, 2025 bp, Deltaproteobacteria bacterium sp.
atgaaagcgacgagagtgtacaagtacggttgcaggccggagataacggagcaactgctcgaccaattgaaggcagcgcgcgaactgcgaaccgagttggtcaacatcgagaacaggcgaatggaggagttcctcgcattgcgttcggtatcgtgcccggggctggctgagcttgaggagcaaaacgaatcgctaaacgagtgcatcgaagacgtggtaaagcgcatatcttacgccaagaagagcgagcgccggaagcacccgctacaggctgagttgaaagcgctgaaagccgagcgcaaacctgtctacgaagccgtgaaagccgagcgcgagaagttctcggagctcctgggtccacacgacaaggcattggctttgctgaaggataccgcatgtgccgcggctggttttccaaccaagaaaggcatgaagcgctattccgatgacggcaaacagatgggagcccacctactgggtagtctcagcagagaagctctggatgagatgcttgcacgcaaggatgtgccgaccgagtggaaaacagcgaagaacatcgacaacgaagcaaagcgctcatccaaggcggccctgaaggcgactcgttgcaccagcgggacgaagttcatgattcacaacgacgtcattgctgcagcgaagaagtcgaagggacgaacgcggctcaagacgcgctacgatcgcgagtcggtcgcgctggacatcaagtcgcttaggctgagcgacgttgctaacggaggctcgccactgctcaggttcgtgaacgagtcgaccgcatcgcacggcagggtattcgtcgactgcatcgtgcgattcggcgttctacccgagccgttcgttgttggaatgagcgtgctcatgcatcggcctctcccagccgactctgacattcgctcagttcgactgtgtcgcgagcgcattgggcggcgcgagcggtggacgatacagttcaccgtgctgactgatgagccgaaccagaggcgtgtcccgaagggaggaacgatcgcgatcaacatcggttggcgagttagaagcggcaaagctgctatgggtgcgcagttcggaaaggtgtccgacatcggcgataagcatgtgcgggttggcgtggccatcgacgacgacggcaatgtgcgcgagctcactcttccggcgcggatgcgcagaagggaagaattcatccggtcgcttcagtcggcgtcagacaagttgttcgattccgccttgtcccagtttcgggagatccgaaaggcgcaccctgagttgctcgacttcgaactggctattccaggtcgcgagccggtaacactgctgaagaagaccattcagtgcgacaagtggcgcagtcacaagaagctgctgttcgccattcgtgatctcgcgaaccacatgggaatcgatgggcgcccgatctacgcagagtggaagaagcagcgcctagcagcgaagatcgacctgttcgctacactggaggaaacgcgcgagtggttgagcgagaatggcgagtctgagcctctgcgccaagaggtgatctggctgttgttctggatgcgcaaatgctaccacctcgactcgatggcgcgtgacctgatcgccaagaccacggggtggcgtcgggagatattccggatctgggcggcgcagttcgctgcagcataccagacactggtcacctccgatgagaagtacaaggagctgaaggaaaagaagccgaaggagcaagacttcgaaggcccgcaagagcagaaggcgcgagcgaaccagcacaaggcgtcaccgggtctgttgcgctcgatactccgagacgcgtttggtcaacgctccatcgttgtgtctgcatccgacgtcaccaagttacactatgactgtgggtgtgagctttacggcgacagaaagaagaatgtggcgcttgcgtgtgaacgcgacggctcatatcatgaccaggacgaaaacgcggcacgtaacatgctgcgagcggtccttgaaaaacgtagcgaggtagcggcctga

SEQ ID NO: 66139 - DNA, 36 bp, Deltaproteobacteria bacterium sp.
attcaaaaaggtagcggatcgcctaaagagtccgac

SEQ ID NO: 66140 - DNA, 36 bp, Deltaproteobacteria bacterium sp.; identical to SEQ ID NO: 66139

SEQ ID NO: 66141 - DNA, 36 bp, Deltaproteobacteria bacterium sp.; identical to SEQ ID NO: 66139

SEQ ID NO: 66142 - DNA, 36 bp, Deltaproteobacteria bacterium sp.; identical to SEQ ID NO: 66139

SEQ ID NO: 66143 - DNA, 36 bp, Deltaproteobacteria bacterium sp.; identical to SEQ ID NO: 66139

SEQ ID NO: 66144 - DNA, 36 bp, Deltaproteobacteria bacterium sp.
attcaagaaggtagcggatcgcctaaagagtccgac

SEQ ID NO: 66145 - DNA, 36 bp, Deltaproteobacteria bacterium sp.
attcaaaaaggtagcgaggcgcctaaagactttcga

SEQ ID NO: 66146 - DNA, 1719 bp, unknown
  TnpB Polynucleotide
ttgacaatcccgagcgctaccgggaaatgtagcgacgataggggttttgtggctgttggattgagaaatgaagtggtgacaaccctgagcgctaccaggaaatgtggcgacacccaattgtccactttgccgggtgcgttacaaccctcaaaagataaaaaggaaaacaaaatggccagaaagaagaagaatggcggaaatcacgcggaacctagtgtgccgtgcaggatctacagttatgggtgccttgagccaactgttggcttagaaaaaatattagaacagatgaggaagggcaacgactaccgaaactcgcatgttcgcattgagcttgatcgtcgagacgaatactacgcaacactgtcggaaattgatcctagcatcggcgagttgcattcgttgacaaagggcatgcaaattgagatcaggaagctgcctagaggaaaagaaaaggacgagatgattgatcagcagaaggcgcacagagacgttcttaaattactctgcgccaaggcgaaattagccgatgcagtcaaggctagattgaaacaacttgatggtcaaaactatgaagaaataaaggaattgtacaatagcgcatctgacgtgtattgggcaacacgcctagttgtagatgctgctgcaaaagatttcaagaaaggttgtccgccagaatttaggaggttcgttggcgagggccgtattgctgtacaattgcagggtggccttccggtgaacgacgttgacggcggaactatattcagaatagtgcctgctggccaaagcaaaggaggtcgtcgcaaatttgctgagtgctggttcagagttggcagcaccgagaaaggaaagccagagtttgctgtcattccttttgtgtaccatcgaccccttccagatggcgctaatatcaaatgggcataccttcatcgcctgaagtgcgggacgagatggacgtggaaactatctgtggtcgtgtccagggagtgtggttggccaattaatgatgctgccaatgatggtgttgtgtcaattgacattgggtacaaaatgacgagtgaaggtcttcatgttgcaacattcgtggcaagcgatggagggcaaggtgatcttgtaatcaaaaatgatgattacaaccgttggcttaactccaactacacaaaaagcgaacgaaagaagagttttaatgactttaagtcgtatctgtctgattggctgtctgacagagatgttccagattggctttccgaatcgacaaatacaatcggtttgtggaagtcatgttccagactgtctcggctatatgaggagtggagtggcaacagatttgttggcgacgatgagatgtttgacacgctgaagaagtggtattacgccgacagaagggcgattgacatggaacaaggccagagttcaagggctatacgatggcgagacgatatgtaccggaactttgtgtctggactaagacgcaagtatagaaaggtggtgattcgagacgttgattattccgtgatagcgacggctggttacatgccagatattgcgagaagaaaccggttcatcgccgctcctggccgtctcgtgtcgctgatagtcgttggatttgctgaatgcgaaaaagtggctgtagtgaaagaaagtcgagaggccgaagttcccaagccgaaaaagactggttctggatcgagaaaaaagactcgctcgaaagtagcagtctaa

SEQ ID NO: 66147 - DNA, 2049 bp, unknown
  TnpB Polynucleotide
gtgcgccagatccgagcggcacagacgtatctcggccctgtccttgcgcgcgaccgcctcgtcgtgtatcacctcacgtatcaccgtggcagcgaggcgccgcgaggcctcgacagcaggaggaggaagccgatgagcgaatacgaggatcccgagtgcgagatgccgaagggccggtcgatggtctaccgttacggtttgctcaggccgaagacgaacgccgacatcgtgcgcgcgcagatggaactggcgcaccggtaccggaacacgctcgtgcagatcgagcgtggccgtcgggacgcgctgcgggcgctcatgcggagccacgggggtctcgcggcttgcgagcacgactttcagcaggcgaagatcgaactgggcaacgcatccttggcgatgagcgaagccaggaaggcgtcgcggtcgcgttcggagacgaaggagatgcgggagcgtgtggctgaggcgcgtgccaacctgaagaaggcgagcaaggctctgagcctgcgtaggaaggaggtgcgtgaggacgcgagcattctcgaagagaaggcgtgcatcgaggggcgcgccaaggatctgcgcaagaacgcgcgcaagtactgcggggtctattggggcacgtacctcctcatcgaggatcaggacagggcatcgcgtcagatgccgcttcacgacgggatcgagccgaacaacccgaagtttcgggcggcgcacctcatgcgtgactggtttcccgggaagacggagagttcgtgggggagcaacggccaagtgggggtgcaggttcagaacgggatgccggccgacgaggtcttcggtgatgacgtgcgggtgcggatcgctcctgtggacgagagggcgtggcacgcggagcgacggggggagcggaggaggcatcagttcacgacgctcagcttgcgggtggggtcgaccgagggtcgcgggccggtatgggcggagtttcccatgctgatgcacaggccgcttcccaaggggagcatcatcaagcgggtgaacgtgagtcttcgccaccacggaccgcgtgaggagtggtcggtggagatcacggtcgacttgccggcaaacgcgccgcatcgcgccgagaggggtcagaaggggttcgtggcggtcgacctcgggtggcgcctgatgggggaggaactgcgggtggccgtgtggcgtgacgacgagggcaagatgggagaactccgcctctcggcgcatctcatgaacgcgctacgcaagcccgctgatctctggagcatcttggataggggcttcaacgagatcaggaaggacttggcccagtggatgacggcgaacgatacgcccgactggctgaaggaggcgacgcgcacgatgccgcagtggcatgaccggacgcggatgctcagggtctgcaagcggtggctcgagagccgcttcgcgggcgacgaggacatggtcgctacgctcgaggcgtggcgtgtcagggaccgtcacctctggcgctacgggagcgagttggccatttcgtcgctccgtcggaggagggatctctatcggtgcttcgctgccgacctcgcgaagcgctaccggattgtggtcttcgaggacgtcgatcttcggcttctggcgcgcaaggcgaagccggaggacaaggcggacaacgagaccgcgaggaggaacaggatgttggcggcggtcggcgacatccgctctacggtcgagaacgcgttcaacggtgaccagtgggaggcgccgacggagaactcgacgatcacgtgccatgtctgcggcttggtcgaacggttcgacaaggcgaaggagttggagcacacgtgcagcggttgtcgctcgacgtgggaccaggacgagaacgcggcgtgggtgcttggcgagcggtggcgtgtcgcgcgcgaggcggggactgctcgcacacaaaaggaggtcaaagaatccgcaggtgtacaggaatcatcgtgggcgcgcgcaaagcgcatgaaggcagagaaggaggtcacagcatcagccgctcgcaatacgaccggcaacgatgcggaatga

SEQ ID NO: 66148 - DNA, 36 bp, unknown
  Direct Repeat
ctcgcgatggcatcggggcgccatgaagtcctcgac

SEQ ID NO: 66149 - DNA, 36 bp, unknown; identical to SEQ ID NO: 66148
  Direct Repeat

SEQ ID NO: 66150 - DNA, 36 bp, unknown; identical to SEQ ID NO: 66148
  Direct Repeat

SEQ ID NO: 66151 - DNA, 36 bp, unknown; identical to SEQ ID NO: 66148
  Direct Repeat

SEQ ID NO: 66152 - DNA, 36 bp, unknown; identical to SEQ ID NO: 66148
  Direct Repeat

SEQ ID NO: 66153 - DNA, 36 bp, unknown; identical to SEQ ID NO: 66148
  Direct Repeat

SEQ ID NO: 66154 - DNA, 36 bp, unknown; identical to SEQ ID NO: 66148
  Direct Repeat

SEQ ID NO: 66155 - DNA, 36 bp, unknown
  Direct Repeat
ctcgcgatggcatcgtggcgccatgaagtcctcgac

SEQ ID NO: 66156 - DNA, 36 bp, unknown; identical to SEQ ID NO: 66148
  Direct Repeat

SEQ ID NO: 66157 - DNA, 36 bp, unknown; identical to SEQ ID NO: 66148
  Direct Repeat

SEQ ID NO: 66158 - DNA, 36 bp, unknown
  Direct Repeat
ttcgcgatggcatcggggcgccatgaagtcctcgac

SEQ ID NO: 66159 - DNA, 36 bp, unknown; identical to SEQ ID NO: 66148
  Direct Repeat

SEQ ID NO: 66160 - DNA, 36 bp, unknown; identical to SEQ ID NO: 66148
  Direct Repeat

SEQ ID NO: 66161 - DNA, 36 bp, unknown
  Direct Repeat
ctcgcgatggcatcgaggcgccatgaagtcctcgac

SEQ ID NO: 66162 - DNA, 43 bp, unknown
  Direct Repeat
atgctcgtcaggttggcatcggggcgccatgaaagattccgac

SEQ ID NO: 66163 - DNA, 35 bp, unknown
  Direct Repeat
gcatcgatggcatcgggccgccaagaaggcccgac

SEQ ID NO: 66164 - DNA, 39 bp, unknown
  Direct Repeat
atgtcgatgatggtatcgggacgccatgaagttcccgac

SEQ ID NO: 66165 - DNA, 37 bp, unknown
  Direct Repeat
gattacgatggcatcggggcgccttgaagctctcgac

SEQ ID NO: 66166 - DNA, 1803 bp, Desulfonatronum thiosulfatophilum sp.
atgccccccagaatctacaaatacggcctcggaaagaacatcgaagggcctgaccagcgtctgcctgatcaggttttcgagcagttccggctgcagaaccggttctggaacgccctggtggagatcgaaaaggctcatgccgtcaagtacgacgagctgcgcactggcgccgatgcccgactcggcgccgtccaggaacgcatcgacagcatgaacgagagccttgagcacatcaattccgatataaaggcccaacggaaaaatgccaggaaggtcgtgcccacggacccggccaccaagaaacagatcgcggacatcaaggggcagatcaaagcactgaaaatcgagcgcaaggaactgcgggaacgcatcaagggcattatccgcccccaggccgaggccctgaacacacagcggttgcaggaaattaacgacaagcgccgcgagttcgccgccctggggctctactggtgcaactacaacgccgtgctgaacagcatggagacggcccgcaagcacatcctgcgcaagcgcgcccaggggctgcccgctgacttcacgttccgcccgttcacgggccagggccgcttgacggtccagttgatgcacggcccccccttcagtgaaatccttgagggcatcaacactcagttgcagctggggccggtgccggatgacacctggaccagcccggacagagccgagcggcgtcgcctttccagaacacagggcaggatcagaatcggctcggagggatttcagggacgcgagccgatctggttcgaattccccattgtcctgcatcgcccggtacctgaagagggcaagatcaagaaggctcaggtctcgcgcaggaaagtcggcctggattgggtgtgggagctggacctcacggtcgtcctcccggaagttcaaccggaagcccaacgtgaaccccagactggcgcgcagccggggcaggtccggaaagttcaacactgcatcggcctggacctgggctggcgaaagactgacgacggcctcagagtcgccgcctgggtggactcggacggacaacagggcgtcttccgcctcgatgtcgggtatgtggccacgcaggatcggctggacgggctgaagtccgtgctggacaagaatcgtgaccagatcacagctcagctgctcgactggggcaagcagcatgaacacctcccccattggctggacttgcaaaaggtgtccgtggtcaagtcgcaccagtatttcctgcacctggccgacacctgggcaaacgacaggcaggaggcggaccaggaggtcttcgaagacctcgcccagtggcgtaagcgctttgtccacctctattcctggcactccaacctgagccggaagatgcgctacaggcggagggaggcgttccggttgttcgccaagaaactggccgagacctatacccatgtatttctggaagagttcaacctggcctggtccagcaggaagaaggacgccgaggacacgccactggcgctgcaacgtgcatccaacaaatgggccagagtcgcatcacccggcgcgttccggcaggaactgcaaaatttctgcaacaagacgggcagcctgctcatcttcggcaaatcggacaaagcctccaggacttgtccggagtgcaaaaacaaaatagcaaaggatatgtcagcgaggatcatggtcatatgcgaggcatgtcgcgccgaatatgaccaggatctcggggcggcggcgaatgtgttgtgcaaagggatggagaaccatttcggcaaacaaccggaggatttggctggttga

SEQ ID NO: 66167 - DNA, 2037 bp, unknown
  TnpB Polynucleotide
atggcgacagcggcggcaacggttgcggtgcgagacggcgacacgaaggacggcggggaggacgaggtacgcttcggcgactgtgcgcccggtcacctgatccgcgtgattcgactgggggcgctcgccccccacgacggagcggctttcgtcgaccagcagatgctggccggccaccgctaccgcaacacgctgacggagatcgagcgcgggcgccgggaagctctccgcagtatcgagcgagccgccggcgacgtgcccgcgctcgagatcgcgctcgaggccgccaacgtcgccgaactggcggctgccaaggccctcaaggcgacgcgagccgcggccagatcgcgccaggagacggcggcccagaaggagacgctcaaggccgcgcgggcgcaccggggcgagatcgccaggcagctccgcgaggcgagggcgcgcatccgcaccgatccggccatcatcgccgcgaagatggagatcaacgggtccaaggaggacgagcgcggcgagaagggcggccgggccggcgaggcgaagcggggggcgcgcgctctttcaggcgtgggctggggcatctactcgcgcgtcgaggcgcgcgcggacgcggcccgcaaggccctggacaaggagggcggcctctacgacggcctcgagcccaacgacccacgcttctcgcgctggcgcggcgacgggttcgtcggcgcccagcagctcgtcggcggggtcacggtcgccgagctcctctcgggccaagatccacgcgcgagcatcgggccggccgtgctcgtgcgccaggtgtgggatcccgcctcgcgcgtccaccgcagcttcgtcgacacgagcgggcgagagcgcaagggcaacggcgcgctccgcgccacgcttcgcgtccgcctgggcaagggcgccaccgcgacgtggtgctcgtgggtgatcatcctctcccgcccgctgccgaaggacgcggtcgttcgcgagatcgtcgtccaccgcaagatgcgcggcccgcgcgaggagtggtacgtgacgatgtccgtggccatcaagagcgaagctcgggtccaggggagccgcggggcctgcgccgtcgatctcggctggcgcaagatgccagacggcggcatccgcgtcgggacctggcgcgacacggacagcgcgagcggcgaggtccgcctgccccccgccctcgtctcggcactgacgaaggccgcgtcgatccgctcgatccgcgatctggacttcaccgggcccaagggctcggtggacggcggcgcccgcggcgcgctcgtcgcgtggctgcggcaggcgccaggggtgccgtcgtggttccgcgacgccaccaagaccctgcacctctggaagtcgcagggcgccttccagtcgctcgtgcgtcgctgggccgcctcgcgctgggacggcgaccaggaagcgttcctcgcagccgaggcatggcgctaccgcgaccaccacctctggtcctacgaggaaggcgctcgcacgcgcgccctccgccgccgcaagcagttctaccgggtcgcagcgaaggagctcgcggcgcgccacaggttgctcgtcctcgaggacttcgatctccgcgacatggccgagaggcccgagacggggacggacgaggacgtggcgcagaacgaaggcgcccgcggccagcgccagctcgtcgccccgagcgagctgcgcacctgcctcatccaggcgttcgccgacgtcgcgaaagcgccagccgcgaacacgacgcgcacgtgccacgcgtgctcgctcgtctctgcgttcgacgcggagaagagcgtcgtgcgtgtacccgagtgcccaggttgcggcgccgcgtgggaccaggacgacaacgcagccgtgaacctgctcaggtggtggcgcgagcagggcagcgccgggcaaaccccaggcggcgctcgcagcaccgagaagagcaaggatctcaccacggtacgcggcaccaggttccagagagcacgacttgcggccgagcagcgccgggcccagcaggacaccgctcgctaa

SEQ ID NO: 66168 - DNA, 36 bp, unknown
  Direct Repeat
ccggcagaggcttcgcggcgccttcaagctcgcgac

SEQ ID NO: 66169 - DNA, 36 bp, unknown; identical to SEQ ID NO: 66168
  Direct Repeat

SEQ ID NO: 66170 - DNA, 35 bp, unknown
  Direct Repeat
ccggcagaggcttcgcggcgccttcaagctcgcga

SEQ ID NO: 66171 - DNA, 36 bp, unknown
  Direct Repeat
ccggcagaggctttgcggcgccttcaagctcgcgac

SEQ ID NO: 66172 - DNA, 36 bp, unknown; identical to SEQ ID NO: 66168
  Direct Repeat

SEQ ID NO: 66173 - DNA, 36 bp, unknown; identical to SEQ ID NO: 66168
  Direct Repeat

SEQ ID NO: 66174 - DNA, 36 bp, unknown; identical to SEQ ID NO: 66168
  Direct Repeat

SEQ ID NO: 66175 - DNA, 36 bp, unknown
  Direct Repeat
tcggcagaggcttcgcggcgccttcaagctcgcgac

SEQ ID NO: 66176 - DNA, 25 bp, unknown
  Direct Repeat
ccggcagaggcttcgcgaccccgcc

SEQ ID NO: 66177 - DNA, 35 bp, unknown; identical to SEQ ID NO: 66170
  Direct Repeat

SEQ ID NO: 66178 - DNA, 36 bp, unknown; identical to SEQ ID NO: 66168
  Direct Repeat

SEQ ID NO: 66179 - DNA, 36 bp, unknown; identical to SEQ ID NO: 66168
  Direct Repeat

SEQ ID NO: 66180 - DNA, 36 bp, unknown; identical to SEQ ID NO: 66168
  Direct Repeat

SEQ ID NO: 66181 - DNA, 36 bp, unknown
  Direct Repeat
ccggcagaggcttcgcgccgccttcaagctcgcgac

SEQ ID NO: 66182 - DNA, 36 bp, unknown; identical to SEQ ID NO: 66168
  Direct Repeat

SEQ ID NO: 66183 - DNA, 36 bp, unknown; identical to SEQ ID NO: 66168
  Direct Repeat

SEQ ID NO: 66184 - DNA, 36 bp, unknown; identical to SEQ ID NO: 66168
  Direct Repeat

SEQ ID NO: 66185 - DNA, 28 bp, unknown
  Direct Repeat
gtggcgaaggcttcgcggcgccttcaag

SEQ ID NO: 66186 - DNA, 36 bp, unknown; identical to SEQ ID NO: 66175
  Direct Repeat

SEQ ID NO: 66187 - DNA, 20 bp, unknown
  Direct Repeat
ccggcagaggcttcgcggcg

SEQ ID NO: 66188 - DNA, 36 bp, unknown
  Direct Repeat
ccggcagaggcatcgcggcgccttcaagctcgcgac

SEQ ID NO: 66189 - DNA, 36 bp, unknown; identical to SEQ ID NO: 66168
  Direct Repeat

SEQ ID NO: 66190 - DNA, 36 bp, unknown; identical to SEQ ID NO: 66168
  Direct Repeat

SEQ ID NO: 66191 - DNA, 36 bp, unknown; identical to SEQ ID NO: 66168
  Direct Repeat

SEQ ID NO: 66192 - DNA, 36 bp, unknown; identical to SEQ ID NO: 66168
  Direct Repeat

SEQ ID NO: 66193 - DNA, 36 bp, unknown; identical to SEQ ID NO: 66168
  Direct Repeat

SEQ ID NO: 66194 - DNA, 2187 bp, unknown
  TnpB Polynucleotide
gtgacgctgagctacggctccgccgatatttgcgctgacccccttgcgcgcagcggcagcagcggctacagtgctgtcaccatgaagagacgccagtcaacagccgcgatcggggtttgggaagcgttctgcatgccgcccacgagcgggcaggcggcggtgtgggaccagctccgcaaggcccacgactactacaaccgactcgtcctgctggagctgtggcgccggttagcgttccgcgaggcccggggcgcactcgcgggggagcttcccgcgctcgaagcggagctggcggagctgaatcagcggatcaaggacgctcgcggcgacatccaggtgaagcgagcgaaaaaccgcaagcgcgttgaggacccggttgttgcggcccaggtgaaggcgctgcaggcggagcgtaagccgctcgctgagcggatcaaggcggcccgaaaagaggtcgtgaaggtctacggcccgggcaacgatgagttgagccgcctcagcgctgaaaaggccggaggcaacaaggcggccgtggtgagggcaaagacgaacgccgcagcgctggccgagatgcttgcggacccagcctggtcggaggagtggaagatcgtggcgcggctcgacggggaagcgacggcagccggcaagctgttccgctccgagtgcgggctcacccccggcacgtacatgctcgtcgagaaggccgtcgaggccgcgttccggcccccgaagaagggcgagccgccgcgcccggatccgtcgccgaagggccggttcgaggggcgtggaaggatcgggattcagttgcaccagttgtcggtcgcggatctgctggctggccgtcaccgtcaggtccagttgcggatgagcgatcgtctcccgaacgggaagcacgcgacgcagcgctacggcacgctgcgcctgcgggttacgcccgacatgcaattcgcggaggtgccggtcaagctgcaccgcccgctgccgccagacggcgtcgtgacgcagctatggctcctggtgcagcgtgacggcccgcgcacgcgctactcgctccagtgcgtggtggaatctgcgcagtgggagcggcccgcgccggtgaagggcaccggcatcgtggcgatcgatacggggtggcgtctcgtcgaggaagggatccgagttgcgtactgggtcgatgaccacaaccggcacggccagatcgtggtgccgaagaaggcccaggctgccgtcgcacacgcgagcgtgctgcgcggccacgccgatcggcacttcgatgaggcccgcgctacgcttcggtcctggatggccgagcacgctcaggccctccccgagtggctgccggcggccaccgaaagcatcgcgcagtggcgcgcccactggaagctcatccgcgtggctcgccgcctgaccgaggagtacctgccgcaggctcctcagttgtggggccagtggctcgcgcaccgccaggcggcgaacctggacgagttcgcgccgctctcggtggttgcgggttggctgcaggcgcagggcccggtgccgccgctcgtccagttggcggtctacatggagttctggcgccgcaaggacgctcacctgtacgactgggagacccgcgagcgccggcacgcggagaacattcgccgggagctgttccggaaagtggcgcaggtgtcccggcagtacgagcaggtgatgatcgaacagatcgatctgccgaagttcaacaagaacgcgcccccggaagagcaggcgaaccaggagtggatgcacgagcagcagcgcctggcctcccctggcgacctggcggccaggatcatggaggcgtgcaaggggcgctccacgaaggtcacctcccacaacacgactcgtacgtgccaccgctgcgagcacgtgaatgccgcctgggagcatcccgagcggctggtccagacgtgcgcggggtgttccgccgagtgggatcaggacgagaatgcctgccgggtcatgcttggtcgcgcgtatgcccccgacggcgagcggccgggcgacgcgataccccccgcccccgctcgcggcagcgaaaacacaccggaaacgcacgccagcgcggccgctgagcagcctttccggtcgcccggaaaggggctcgacgggcaccgctcgcaatccagtctgcaaagcgcggaaatgatagcggggctcggatga

SEQ ID NO: 66195 - DNA, 36 bp, unknown
  Direct Repeat
aagcgcggaaatgatagcggggctcggatgacaggt

SEQ ID NO: 66196 - DNA, 36 bp, unknown
  Direct Repeat
gtcggagccccgcgaggtcgagaatggtcgtgtcgt

SEQ ID NO: 66197 - DNA, 36 bp, unknown
  Direct Repeat
tgtccaggttgtcgaacacgagcacgtcggtgctgt

SEQ ID NO: 66198 - DNA, 36 bp, unknown
  Direct Repeat
gtacccgatgtcgcgcatgccccggaggaacgcggt

SEQ ID NO: 66199 - DNA, 36 bp, unknown
  Direct Repeat
gcagcgcgccgatcggcatgtcccccacccgcaggt

SEQ ID NO: 66200 - DNA, 36 bp, unknown
  Direct Repeat
ggcagccggacggcccagtcgatcagcagatcgtgt

SEQ ID NO: 66201 - DNA, 36 bp, unknown
  Direct Repeat
tccaccgggttgccgaccactgccggcgaggttggt

SEQ ID NO: 66202 - DNA, 36 bp, unknown
  Direct Repeat
ctcgtcccagaagcccgggccctgctactccagggt

SEQ ID NO: 66203 - DNA, 36 bp, unknown
  Direct Repeat
ggatgtccggctcgcgttcacgcgggcgccgccagt

SEQ ID NO: 66204 - DNA, 36 bp, unknown
  Direct Repeat
cccagctcctgcgcggcgccgtcgaccacgtcgggt

SEQ ID NO: 66205 - DNA, 36 bp, unknown
  Direct Repeat
ggatcgcgggcgtgcagtccgtgatctgcgcgaggt

SEQ ID NO: 66206 - DNA, 36 bp, unknown
  Direct Repeat
gacgcgctcacgctgatcgccaaggtgacgggcggt

SEQ ID NO: 66207 - DNA, 36 bp, unknown
  Direct Repeat
gaggcggaggtcgagcgggacattgccttgcggagt

SEQ ID NO: 66208 - DNA, 36 bp, unknown
  Direct Repeat
gaccggaggaacggaccggattcgccatcgacgagt

SEQ ID NO: 66209 - DNA, 36 bp, unknown
  Direct Repeat
gatgccggctacggtcggtgtcgatgtggtgttcgt

SEQ ID NO: 66210 - DNA, 12 bp, unknown
  Direct Repeat
ggcaagcgcagt

SEQ ID NO: 66211 - DNA, 36 bp, unknown
  Direct Repeat
cgccagacccgtcaccaaggcaacgcggggcctacg

SEQ ID NO: 66212 - DNA, 36 bp, unknown
  Direct Repeat
tgaccgtttcagcaccaaggcaacgcggggcctacg

SEQ ID NO: 66213 - DNA, 36 bp, unknown
  Direct Repeat
agcagatcgtgtcaccaaggcaacgcggggcctacg

SEQ ID NO: 66214 - DNA, 2106 bp, unknown
  TnpB Polynucleotide
gtggccaagaagcctccaaagcccccgaccaagatatacacctacggtctgcgcccgccatcggttggtgcggttgagttcaatcgggttcttcgtggggggcacaactattacaatgcgctcctggagatcgagcgaacgaagcaggaagcggagcacgacttctgggccagactcgggagttacgaaagcctcctcgccgaatatcgggagcagagggctctgagaccctctcgcgaagatccggatcgtcaggctgtgtgggatcgccaggatgaactgaaggcgcaggtcaaagcggcccgagagggaactgaggcgaaacacctccccgttgaagaggtgtttcggaaacaacgatccaaggaattgaagaaggaatacaagggaaaagagctttctgctgagagtctcctggacatccttgactcggacccacggtgtgtctcacctcgtaggagggcgcaactagattttcaagtcggggcagcagctcgtggggtcggggtcagcgccaagaagctcaaccaagagctacgggatgctgggctcggtaaagtcacacaggagatcgaggaccgcgcatctcgtgagatcaaccttgcgagggctcatttcggggtccactacggcacgtacctgttgatcgaagctcagatcgaacaggcgttgaagacctccgagggcttccctgttttcaagcgttggaccggggtcaccggggaaccagacaaggagggtagagactacgacactcgttcaggtgaaggacgggtaggagcacccatagacacgaccagggggtttttcgtagctcagatccatgatggtcaaaacgcggtcctccagatcgatccggtgccggagagtgtctacgtccgaagttcggaacggggtacaccacgtggccacggagaatcttggcgcatgggccatcgcacgaagatgagaatttgtgtcggctcaggtgagcggattaagggccagaggggccggaatcccatgtgggtcgagttcgacatggtcatgcaccgccccctacccgtgggaggtaaaatctgtgcggcttgggtgtctgtgttcaggcgggggactcggacccgatacgagctgcaactccaagtgcaggcagagtcccttcgccctgagcatcgccacggggagggcatcacagccatcaacttcggctaccgctcaagtggccgagttgcctacacgatcgatggtcggggggtcagttctgaactccttgcgaatccggatacgggacggctcattgaccttgcggacaagattcgaggtcagaggcaggatgccgccaacctcattcgggacagcttgttcgcctggtctgaagagcttggctaccccgaagtttttgaggtaggggacgggatcggctcgacccctcattggtctggtgtcgaaagccgggcccgtgagcaccccacacggtccctgaaggccaggatcgaaggactgcgtagcgcacgggaaaaaagcctctcagcgagactacaggccatcttccggacctggaccaagctccgcgaacagacccgattcgacaaagacgatttgatctacaagcatctccgtgaatgggtcatcgaggacaaaaatcaagagaatcgggagtcagggtgcagagttcatgcacgaggtgctcgtaaccaaaacgcccgcttgtgggcacactccttgtgcgactccgccgatgtcatcctccttgaggatacaaactacgccctactgaaaagtaaggctaagtcagtagacatcatgccgattgagaagcagaccgccattgcccggaggcgggacttctacgcaccgggagaactgcgtgaaatcgtgaggctcaccgcccaaaatcgtggtgtcctagtagtcaaagtgagcgcaaccaacctgactgcaatgcatcacgcttgcggtaggatcgaaaatcgtgatacgttgtcgtctatcgttgtaaactgcacacactgtgctacgaagttcgatcaagatcacaacttttgtgtggggctacgcgagcggtacaatgccggtcagaaccccacccccgctcgcaggacacgtaaccgctcgaaatcacgatag

SEQ ID NO: 66215 - DNA, 36 bp, unknown
  Direct Repeat
gtcgaacaccttagctccttgagggtcaaaggagcc

SEQ ID NO: 66216 - DNA, 36 bp, unknown; identical to SEQ ID NO: 66215
  Direct Repeat

SEQ ID NO: 66217 - DNA, 36 bp, unknown; identical to SEQ ID NO: 66215
  Direct Repeat

SEQ ID NO: 66218 - DNA, 36 bp, unknown; identical to SEQ ID NO: 66215
  Direct Repeat

SEQ ID NO: 66219 - DNA, 36 bp, unknown
  Direct Repeat
gttgaacaccttagctccttgagggtcaaaggagcc

SEQ ID NO: 66220 - DNA, 36 bp, unknown
  Direct Repeat
gtcgaacaccttagctccttggggattaaaggagcc

SEQ ID NO: 66221 - DNA, 1779 bp, Thermodesulfitimonas autotrophica sp.
atgccttttggtctaaaatctgaaggagttgtgcgtgtctacgaatacggttgtcttgccccggtctcgggggaggaggctatagtcggcgttcttcgcgcccgcagtgacctgtggaataaactgattgaaacagaaagagagcttgacaggaaaaggcgggaagtttacgccagggcctctgagttagccagcctgggtgtactggagaaggagatagagtttgtaagcaacctaataggttccctccgggaggagatcaagagagagcgcaagctgcaccggcaaggtagcgttgccctgtccgctcggatgctggaggatcttaacaggttcaagggctgcctggcccggttgaaggcccaatacaaagaggctaggaagggcgccctcgacggcgtgagagaagagctggagcagctggaggaggagcggaggcaggccgtccagcgggtggacgacgagttcaagcgggtgctctggtggcccaaccgggacgaggagcgagtcgagtatgagaatgccaggaagcgccttgttagaagccgttccgagggacaaaaagcggaactgaggtttcaccggtttgacgggacgggcaaggccacggtccggctgcgggagagaggttctgcgggcccgtgggggatgccggtgggaaacatctttatcccgaactccgtctgctggatgcggcccgtgccgccggaggcgtggacctctccggtgcgcgcggagcggcggaggaaggcccgcacggtgctgcacttccgggtgggtacggacgccgacggcaatcccgtctgggcggtcctgccgatggtcatgcaccggcccctgccggaagggggtgttgttcgtcaagtctcggtggtgcgggaacgtgtggggcggcacttccggtacaaggcagtgttcacggtgcagttgttcccaaatgcaataaaggaagagcctctgttagacggggtggtggcggtggacgtcggctggcgcagggtcgaaagcggtatcagggttgccgtctggcttgacgaccacggcaatcacggagaggtaatcatcccggaccgcctctaccgggagttcttgcggttaaaagaattgcagtccctgcgtgacactcacttcaacgaggcgaagaagatcctggtggagtttctgaaaaaggcgcagggaatgccggagtggctgctggaggaatgcaggagtttgaaagagtggcgctctcccggcaggctggtgtccctgctcgggcggtggaaaaagaactgcttccctggtgacaagggcatcctcaactggctctctgactggcaacagcgagaggaccacctctacgactggcagagtcatttaagagaccaaatcctgcgtcatcggcgggaaatctaccgcatttttgccagtcagttagctgacaagtacggcgtggtagtcttggaggacttcgacctgcggaaggtggttaaaactcccccgccggaggaggggacgcagggttcgatcccgccggactaccagcggttcattgttgcgccttcggagctccggctgtgcattgtgaacgcctgcgccagggagggggtaagcgtatctttgcagcctgccgcctttacaaccctgcggtgccacgcctgcgggtacgtggaaaagttcgacgccgcgagggagatatggcaccgctgcccgaagtgtggggagttatgggaccaggattataatgcttgtgttaatttactcgaacggtacttttcgaaagagagtgccgattcgtaa

SEQ ID NO: 66222 - DNA, 33 bp, Thermodesulfitimonas autotrophica sp.
gcagtgcccagctcaggggctttgtttctgaga

SEQ ID NO: 66223 - DNA, 33 bp, Thermodesulfitimonas autotrophica sp.
gcagtgcccggctcaggggctttgtttctgaga

SEQ ID NO: 66224 - DNA, 33 bp, Thermodesulfitimonas autotrophica sp.; identical to SEQ ID NO: 66222

SEQ ID NO: 66225 - DNA, 37 bp, Thermodesulfitimonas autotrophica sp.
gttgcaatgctcagctcaggagctttgtttctgagac

SEQ ID NO: 66226 - DNA, 37 bp, Thermodesulfitimonas autotrophica sp.; identical to SEQ ID NO: 66225

SEQ ID NO: 66227 - DNA, 2040 bp, Mycolicibacterium peregrinum sp.
ctgtcgggttcagtcactacatgtacagccggagctggcggtaatgaaccgacaacgcgccagggtattgccggctcatctggccccatcgcatgcagcggccagcggttcgtacgccgccagaactgtgatgcctaccagccgccgcggcgtccggcgctgctatgctcgtcgaattcgccagcggagcggcgtcgtagttccgatgtggtgtgccgcaaccgattggatgtgtgcatgacctccatccctacgggtgcggtgactgtgcacacctttggcgtgcactaccgctgggagttgcccccgatcattgagacccaactgcgactcgctcacgaggcccgcgaagagtttgtggcgttgcacctggcctatgacgccgatgtgaaggccctgtggtcgtcctatcccggtgtggccagcgctgagaccgaactcgagcaggccgagacggactgcgccgccgtcaccgaacaggccaaagccctgcgggtgcaacggtccagccgccgaacggttcccgaaatacaggcccagctcagggcggctaagaatcgtctcagcgaggcccgtcaggcacgtcgtgacgcgatcacggcggtgcgcgacgtatcggcccagcgtcggcgcgaccgtttgaagcaactgcgcgctgatcagaaagcgttgtacaccaaatacaccggtcaagggctctattgggcgacggtaaacgacatcgccgcccagcataaagccctggtgcagcgaatcaacaagcagcggcgcgagggccgcccagctcaattgcggcacagacggtttgacggaaccggcaccttgacagtgcagatccagcgccgtgacgctgcaccgatccgcacgccagcgacattggcgaatacgcagggccggtattcgtatttcgcagtgctgccatggattgcgccgcaacgctgggaggcgatggctcccgccgaacggcgggcagcgggccgggtaagtgtaaggatgcgggtgggcagcaccggcgaagggcaaccacagtgggtcgacattcctgtgcaggctcaccggtggctgccggcccaagccgacatcacgcacgtgagattgagcgtcaagcgcatcgccgcgcgccggacagcgcaggtattggtcaccgctcgcaccgatcagcagcacgccctggcctctgatcgggcggctgtggcggtgcatttaggttggcgtcaaacggaatcgggcattcaagtggcgtcgtggcgttcaacagcgcctctgcagattccgccggcattggaatccgtgatgatcgccgaccccggggcgacgacaggccatatcgtggtgccgccggcgatcacggcccggcttgaccgaaccgaccaactcgggtcgatgcgcgcagaatcactgccgcatgtgcgggatgcattggccgcctggctgcacgcccatggcccggtgcagagccaagggcgcgctctcacagccgatgtggtgcgccagtggcgttctccggcacagtttgccgccgtggccaaagcctggcgagatagtgaagcgcctgacggcatcggtgccacgctggaagcatggcggaaagtcgatgtgcggttgtgggaccgacaggagcatggtcgccgccgtgcgctgggccaccgcgacgatctctaccgtcaagtctcggcggccatcatcgggcaggcccggatggtggtcgtcgatgacatggatttgtccgagctggcacgggtcgcgaattctgatcccggggaaccggtggcgttgcagcgcagtgcggagcgtcggcatcgggcggcacctggtcgctttagagaggcggtggaggcagccgcccggcgtgccggcctgcgatgtgaggcggtgtcgcccaaggggatagcgcgcattcatgctgcgtgcggctatcagaatcccggcgacggccggttcgcctcgtcgctggtgacatgcgaggggtgcggtgagcagtatgaggttgatgcgtcgaccactttgttgatgctgcgcggtgctggtgtgctttcatga

SEQ ID NO: 66228 - DNA, 1785 bp, Clostridiales bacterium sp.
atgtcaagacttgaggcaaggactcgttatttacaagccgggcaaaaacggctgggaaaaataagaaaaagggggtttttcatggaaactgccgcaaccaagaactacctggcattatcctttggctgcctttccccgacaaggggggaggaatacctgctggaccagatcaaaaagaaacacgacttgtggaacaagctggttgaaaaagaccgggaacacagggaaaaagtgcgtcaagtcatggtttttgaatcagaaacgacaaaaaaaatcaaagaactggaggaagaactgaactcattaagggaagaaattaaaaaccaaagaaaaaccaagcggacgggaaaggttgacttgacagaccagaaggccaggattgaggaaattaagcctcaacttaaacaactcaaagagaaattcaaagaagaacgctcgtttatttttgaggcccgcaagcaggagcttgcccaactggagaaggaaaggtgggcggtcgtcaaagaattgggaaagggaagcgggttgtattggtgtaacctggaggatgtggtgaacagttacgatataggccgcaaaaaagccaaagctgcgggcggggaaatgcgattccatcgttgggacggcactggtaaagtcacggtcaggttccagaagggcctgcctgtcaatgaaatgttttcctgcaccaataacctgctgcaaatagaccccgtggataaagacgcctggtacaatccggtccgggccatccgcaggaaaaagagccggaccagggtccgcctgcgggcctgttccgaaaacaaaaagccgttgtttattgaactgcctgtggttttgcaccgggagataccggaagatgccctgatcaggaccgcctccgtcattagggaaaaagttggcatgagataccggtacaaactcaacctggttctggaaattttgggagaaaacacaaacagaatccttccagccctggaaggcacagcggccattgacctgggttggcgaacggtcaaggacgggcttagggtggcttgtcttgtggacgacaaaggccacagcgaggaactcatccttgacaacgatgttctccatgagtttaataaaataaaggacctgcaatcaataagggacaacctgttcaacgaaacaaaggcgaaactgatggaattgttaaaaaccctggaacttcccgatgaagcgaaagaaagaacaagccatatggcaaactggcgttcacaacaaaaaatgctgagacttcaccaatactggcgggaaaaccggttgcccggcgatgatgaggtatgggaagttttggaatattggcgtaaacgggaaattcacttgtacgaatggcaggaaaatttgcgggatcaggttcttcgcagaaggaaagaaatatacaggatatttgcggccaaaataaccaggaagtacaaaaccatagtcctggaagaattcacgctgaacaaaacggttcagaaacccaaccccgaagaaggcccggcaggaacattgcctgcaaacaggaacaggtttatagcggcaatatccgaattcaggaacgaattggccaatgcttgtcggaaaaatcatgtggaattcacatatgtgcctgctgaaaatacaacaataacctgtcataaatgcgggcacaaggaaaaattcgatgcggcggctcagataatacatacatgcagcacatgcggggaactatgggaccaggattacaacgcagcgaaaaacctgttggctttttcgcaaaagggcggggtaaaataa

SEQ ID NO: 66229 - DNA, 37 bp, Clostridiales bacterium sp.
gttgcaatgcctagctcagaggtttaaagactgagac

SEQ ID NO: 66230 - DNA, 37 bp, Clostridiales bacterium sp.; identical to SEQ ID NO: 66229

SEQ ID NO: 66231 - DNA, 37 bp, Clostridiales bacterium sp.; identical to SEQ ID NO: 66229

SEQ ID NO: 66232 - DNA, 37 bp, Clostridiales bacterium sp.; identical to SEQ ID NO: 66229

SEQ ID NO: 66233 - DNA, 37 bp, Clostridiales bacterium sp.; identical to SEQ ID NO: 66229

SEQ ID NO: 66234 - DNA, 37 bp, Clostridiales bacterium sp.; identical to SEQ ID NO: 66229

SEQ ID NO: 66235 - DNA, 37 bp, Clostridiales bacterium sp.; identical to SEQ ID NO: 66229

SEQ ID NO: 66236 - DNA, 37 bp, Clostridiales bacterium sp.; identical to SEQ ID NO: 66229

SEQ ID NO: 66237 - DNA, 37 bp, Clostridiales bacterium sp.; identical to SEQ ID NO: 66229

SEQ ID NO: 66238 - DNA, 37 bp, Clostridiales bacterium sp.; identical to SEQ ID NO: 66229

SEQ ID NO: 66239 - DNA, 37 bp, Clostridiales bacterium sp.; identical to SEQ ID NO: 66229

SEQ ID NO: 66240 - DNA, 37 bp, Clostridiales bacterium sp.; identical to SEQ ID NO: 66229

SEQ ID NO: 66241 - DNA, 37 bp, Clostridiales bacterium sp.
gttgcaatgcctagctcagagatttaaagactgagac

SEQ ID NO: 66242 - DNA, 37 bp, Clostridiales bacterium sp.; identical to SEQ ID NO: 66229

SEQ ID NO: 66243 - DNA, 37 bp, Clostridiales bacterium sp.
gttgcaatacctagctcagaggtttaaagactgagac

SEQ ID NO: 66244 - DNA, 37 bp, Clostridiales bacterium sp.
gttgtagtgcttagctcaggagttgataaactgagac

SEQ ID NO: 66245 - DNA, 37 bp, Clostridiales bacterium sp.
gttgcaatactcagctcaggagttaaaatactgagac

SEQ ID NO: 66246 - DNA, 37 bp, Clostridiales bacterium sp.
gctacaatactcagctcaggagttaatacactgagac

SEQ ID NO: 66247 - DNA, 37 bp, Clostridiales bacterium sp.
gttacaatactgagctcagaagttggtgaactgagac

SEQ ID NO: 66248 - DNA, 1983 bp, unknown
  TnpB Polynucleotide
ctgagttcaaggtctggcagggacaaccgcacgctcccgaagagctcgacgcctggatcgtacttctcggcgacgctcgccacgacgaggctgccgcgaccaaggccgtcgtctcgaacactccgaagtccgaacagtaagtcaacatcgttcgaggataaaatgcagcgaaagaccagctcgtccccgaccaagatctacacctacggctgccgcccccctgttgacggggctgaagtcctcgccgaccagcttcggcgcgcgcacgcctaccgcaacgggctcgttgagatcgagagacgtcgccgcgaggggatcgccgccacacaggcacagcacgacacgctcggtccgctcttgacgatgatcgaccacctcgagactgcggtcggtgaaggtcgatctgaaatgcggctccttcgctcgggcggcaagaaggagcaggccgcgcgcaaggacgagcgcctggcgctcgctgagaagatccgcgagcacctcgccgatctcggctgtcttcgctggtttcgggcctggcataagcgcgtactcaagggcgacgcggacctcaaggcatcgtatgaggcggtgggcaacgcggcctacgtcgaggccaaggccctgcgcaacggcgaggccgctccctactggggcacatacctcgtcgtcgacaagacggccgaggactggcgagtggccgcagacgcaccaaagttcctgcgctacgacggaggcgggcgcgtcgccgtacagctccagggcggcctcacggtcgccgaggcgctctcgggccaggacacgcgcctgcgcatcctgccggcgacgcctcgtgtaaagaaggacggctccctggcgcccgtgcgggacacctaccgtacggtcaagatccgcgtcggctcaaacggtcgcgcgcccgtgtgggcgacgctacccttcgtgatgcaccgcccgctccccgaggacggcgtgatcaaatgggcgtgggtgatctgccgccgcgtaggcgtgcgctaccgctacgatttgcagatcacggtggaggcgccgtcgtttgcgagccaaggtcgcggtgaaggcgcggttgcgatcgacatcggcacacgcgatctgccaggcggcgagcttcgcgctgccatctggctcgactcgaaaggcggccaagacgacgtccgtctgccgacgacgcggctgtcctcccccgcaagtcacggtaaagggaggcggcgcgtcgtgccctgcgatctcagcaagtgcgaggatctccgcggtattcgagacaagaatctggatgcggtcaaggtgcagatcgcagaggcacgagcgcgtgctcccgagtggttccgcgagcgcacgaagtcggtggctcagtggcgaagccctgcgcgtgcggtaacgctcaggcgcgcgatgcgtgagggctcctcggcgttcaacgacaagcccgcgcatgaggcgtgggatgacgagggtctgggtgccacgctcgacgcgtacctcaagcaagacagacaccttctggactgggaaacacgcgagcgcagccggcacctcaatcgcaggcgcgatcagtaccgcgtgtttgcggcaaggatgacgaacacctacagcacgatcgtgatcgcaaagcgcgactaccgaaggtccgagaagttggccgaagacggaccctcgagcgacgggcacagcggccgggtgctcatgcgcaacgcgtcgccgggcgacctgtgcgccgagatcaagcgcgcggcgaagtcgcgtggcgtgcgcgtggtcgaggtggagatcgaaggtgacacggtctgggcactggactacaaggtgtgcgagagattgctcgcgagcggcgaggtgttgcagaaagatgcggagacgctcgcggcggtaggtgtgccaaagaatgagggatcgcggaaggtgccgagccgtcgcaggttgggcacggccgagcatcaggacccgctcgcaggacaggatgtaacgctttga

SEQ ID NO: 66249 - DNA, 33 bp, unknown
  Direct Repeat
agcaagagcatcgaggacgctcagaggactcga

SEQ ID NO: 66250 - DNA, 33 bp, unknown; identical to SEQ ID NO: 66249
  Direct Repeat

SEQ ID NO: 66251 - DNA, 33 bp, unknown; identical to SEQ ID NO: 66249
  Direct Repeat

SEQ ID NO: 66252 - DNA, 33 bp, unknown
  Direct Repeat
aacaagagcatcgaggacgctcagaggactcga

SEQ ID NO: 66253 - DNA, 33 bp, unknown; identical to SEQ ID NO: 66249
  Direct Repeat

SEQ ID NO: 66254 - DNA, 33 bp, unknown; identical to SEQ ID NO: 66249
  Direct Repeat

SEQ ID NO: 66255 - DNA, 33 bp, unknown; identical to SEQ ID NO: 66249
  Direct Repeat

SEQ ID NO: 66256 - DNA, 33 bp, unknown; identical to SEQ ID NO: 66249
  Direct Repeat

SEQ ID NO: 66257 - DNA, 33 bp, unknown; identical to SEQ ID NO: 66249
  Direct Repeat

SEQ ID NO: 66258 - DNA, 2052 bp, unknown
  TnpB Polynucleotide
gtgtcgcgaagcaggcgttgcctgctgggtgaaacaactcggcacgaactgcgtggaccgcaacgacgctggtttcgacggggccgaaggcgaatggccagcaggcacacgaacccgaggcagcgagaggtttcagggcgcgccggtgcacattcgcttccgcgaccgcgccggtgccgacccgtccgaatggcccgaagatctcaaagtgagacaaacgctggaggctcgccgatgaaacgaaaaactagtcacctaccgacccggatctacagctacggctgccgcctcccaaccgagggggcgcagatcatcgaagagcagctcaagctcgcccgcgtctatcacaacaagctcttggaaattgagcttgcgcgacgggcggccgtgaggacggcgatggcgtcctgccctgacgtggcgacggccgcagcggaggttgcggagatcgatcaaaaaatcgaggccgaacgcgtggtgatcaaggcagctcggcaggcggctcgatccggggcggtcgatgtgcgggcgaacaaagagcgattgaaagagctcttcgtggaagtcaaggccgcgcggcaagccctcaaagcggcaaagaccgccagccgtaccccgcagatgctggcgaaattcaagtcggcccaggagacggcaaaccaagccgtgcgcgacgcgcgcgcgatctgcggcgtgtactggggtacatacttgctggtcgagcaggagatcgaggcagcccgcaagagcaagacggatccccaattccgccggtggaccggcacaggacgcatcggcgtcgagttgatgcacggcctgtcagttgccgatctcatggccgggaaagacactcggctgcagatccacatgaccccgggcgcaagcaagcggagccagagcatggccgtggtccggatccgcgtgggatccgccggtcgcgatccaatctgggccgcgctcccgttccgcctgcaccgccccttgccagccgacggccgggtgaagtgggcttggattcatcgcacgttcaagggccggtgggtcaactgggatctgcagatcgtactcgaggccgcctcattcgcggtgcctgaacgcccagcccacgatggcggcgtggtggcgctcgatctgggctggcgcgcgcgacagtctactgcgggcgatggttcgcagaccattcgggtcggctactggtgcgacgaccgcggccagcacggcgagcttgttatgccggccgatctcaagggccgcctggagcacgccaacagtctgcgggcaatcgaagaccgcaacttcgacgccgcgaaagcgcgattgatagaatggctcaaggagcacacagctccggagggcatagatctggcgaatctcgcggcctggaaatccgcgaagcggttgggtcggacggtgtccgaatgggagaatctgggcgaggtgccctgcgacttgctggcctggtggaagcagcatcgccacctctacgattgggaaagctcggaaagggcccgcgcgctgaacgctcggaagaaccactaccggaacatcgccgcgcaactcacgactacctacgccgtcttggtgctcgaagacttcgacatgcgcggcgtggtcgagctgaaccagcccgagcacaaggaagacgatgcggtcaagcccgcccggcgcaaccgggtgttcgcggcgccgtcggagtttcgcctggcgctcaagtcggccgcgccgctgcgcggttgtcgcatcgccgaattggcctgcgcgttgacaacccagccctgccacgtgtgcggagagagcgagcggtgggacgcggcgaagtctgtctggcacacgtgtcgcaacgggcaccagtgggatcaggattacaacgcggctcgcaatctactcggtgtctacgcgagcggcgatgcgctgaagcgcgaacccccgtcggacagagggaaaaagagcgacgaaaaaccgagcctcgcgcacacggaggtgcaagatagcgaaaccacgggcgaatctctggtgcccgttgcaatgcctgctcagggggctgtgccttga

SEQ ID NO: 66259 - DNA, 35 bp, unknown
  Direct Repeat
ttgcaatgcctgctcagggggctgtgccttgagac

SEQ ID NO: 66260 - DNA, 35 bp, unknown; identical to SEQ ID NO: 66259
  Direct Repeat

SEQ ID NO: 66261 - DNA, 35 bp, unknown; identical to SEQ ID NO: 66259
  Direct Repeat

SEQ ID NO: 66262 - DNA, 35 bp, unknown; identical to SEQ ID NO: 66259
  Direct Repeat

SEQ ID NO: 66263 - DNA, 35 bp, unknown
  Direct Repeat
ttgcaatgcctgctcagggggctttgccttgagac

SEQ ID NO: 66264 - DNA, 35 bp, unknown
  Direct Repeat
tggaaatgcctgctcagggggcaatgccttgagac

SEQ ID NO: 66265 - DNA, 35 bp, unknown
  Direct Repeat
tcgcaaagcctgcgcaaggggctgtgccttgagac

SEQ ID NO: 66266 - DNA, 35 bp, unknown; identical to SEQ ID NO: 66259
  Direct Repeat

SEQ ID NO: 66267 - DNA, 35 bp, unknown; identical to SEQ ID NO: 66259
  Direct Repeat

SEQ ID NO: 66268 - DNA, 35 bp, unknown; identical to SEQ ID NO: 66259
  Direct Repeat

SEQ ID NO: 66269 - DNA, 35 bp, unknown
  Direct Repeat
tctcaacgcctgctcagggggccacgccttgagac

SEQ ID NO: 66270 - DNA, 35 bp, unknown
  Direct Repeat
ccgcaacgcccgctcagggggctatgccttgagac

SEQ ID NO: 66271 - DNA, 35 bp, unknown
  Direct Repeat
tcagaaagcctgctcaaggggctacgccttgagac

SEQ ID NO: 66272 - DNA, 1905 bp, unknown
  TnpB Polynucleotide
atgaagcgcaaaacgtccacggttccgtcctgtgtctatcgatatcggctctatgaaccccggggtgaaaccgctcctcgcgcggccgaaggttttgcgggttcgcgcgttcactacaacaagctcatcaccatcgaaaaccagcggcgtgctctctaccgacaagcgcgcagtcggctcttcccgagcttgcagctcctcgaagctcgttatgccgaggtgaacaccaacatcaaggcattgcgcgatgccgtgcaagccggaaaggtagcgactcgatctcgcgatgtagatccaggcaagcgggccgagattgccgcgctcaaggcgtcaaagaagcccttgctcgaagcgttgcgtgctgctcgcaagatctgcgcggagtcgcccgagatgctggccgccgccaagaaaatcgatgatgcctccaaggagcaggtcaaggccctgcggcctgagacctactggggaacgtacctgctcgtggaagcagcggcgaaacaagcaagcatgagcagcacgggcgatcctgagtacgatcttgtgccgccttatcgctgcaagagccgcatcggtgtgcatttctgtccggggatccctacagcagatctcaagaacagcaccctcatgcgcatcgagcccgtgaagttccacctagaccggcacgacaacttgattgccaccggtaaggccgcgcgcacgaccttgcagttccgcattggttcgaatgaagatcgcacaccgatctgggcaatcttgcccatggtcatgcatcgaccaatccccgaggacgcgaagatcaaggatgcctacatcacgcgcaaacggttctcggtgcgcgtgccctgggagtaccatctgtgcgtggtgctcgaaagcccgagtttccaacgcacggcgccctttcccgagcagcaaggcatggccatggtcaacttcggctggcggtctacgcctcgtgggatccgcgtggccatgatcaagaggacagaccgcgaaccggaagaggtactgctaccaacccattacctctacctcgaaaccaagcgccgggagctggcttctattctcgccgagaacttcaaccgggcgaaaacccagcttaccggctggatcgccgaacacgattgccctgaggagttcaagcagatcttctcgcacctggcaaaccggcgctcgcagcactggttcgcggagtggatggactactggcaggagcacaggtttcctggcgatgatgagatcttcgtggcgttggccgcgcgagaagatccgaacgcccggcggggaaagctagcctggcggccggaggacatcgccagggcatcctggatggtgcgctatcggcaccttgccacctggcatgattccctccggcgcaagttcgagaactggcgaagcaacttctatcgatgcgtggccaaggaactggcgaccacaacaaccaaggtggtgatcgaggtgttcgacatgcgcaaggtggctcgccagccccaggcggagtctcctgaagatcagggcgatgaacgcgcgagatcgaatcgccagctcgctgccccgagcgagctgcgtctcaagatacttcaggccgccgccaagtatcactgccaggtggaagtcgtgtcgcccgagaacaacacgcgccgctgccatgaatgtggggagctgcatccgtgggatccgaaggcatcgatcatgcacacctgccccggttgcggggcgacatgggatcaggacgtcaacaacacgatggagcagcaggcgaaggtcgcgaggggcgaggtgctgacgttcgtaagacccgcccaaaagggcgaaaacacggatggatcaacgaaaatcgaacaagcggattctctcactttggaagccgctcgcaaggccatggtgaacagcaagaaatga

SEQ ID NO: 66273 - DNA, 34 bp, unknown
  Direct Repeat
cgacaagagttccgaaagcactcgaagctttcaa

SEQ ID NO: 66274 - DNA, 34 bp, unknown
  Direct Repeat
tgacaagagttccgaaggcactcgaagctttcga

SEQ ID NO: 66275 - DNA, 34 bp, unknown
  Direct Repeat
cgacaagagttccgaaggcactcgaagctttcga

SEQ ID NO: 66276 - DNA, 34 bp, unknown; identical to SEQ ID NO: 66275
  Direct Repeat

SEQ ID NO: 66277 - DNA, 34 bp, unknown
  Direct Repeat
caacaagagttccaaaagcactcgaagcttttga

SEQ ID NO: 66278 - DNA, 40 bp, unknown
  Direct Repeat
taacaacaagagttccgaaagcattactcgaagctttcga

SEQ ID NO: 66279 - DNA, 42 bp, unknown
  Direct Repeat
caaacgcacaataagagttccgaaggcactcgaagctttcga

SEQ ID NO: 66280 - DNA, 35 bp, unknown
  Direct Repeat
gcgacaagagtcccaagggcactcgaagctttcga

SEQ ID NO: 66281 - DNA, 34 bp, unknown; identical to SEQ ID NO: 66275
  Direct Repeat

SEQ ID NO: 66282 - DNA, 34 bp, unknown
  Direct Repeat
caacaagagttccgaaagcactcgaagctttcga

SEQ ID NO: 66283 - DNA, 35 bp, unknown
  Direct Repeat
acaacaagagtctcgatggcgctcgaagctttcga

SEQ ID NO: 66284 - DNA, 36 bp, unknown
  Direct Repeat
gtgacaagagttccgaaggcactcgaagctttcgac

SEQ ID NO: 66285 - DNA, 36 bp, unknown; identical to SEQ ID NO: 66284
  Direct Repeat

SEQ ID NO: 66286 - DNA, 36 bp, unknown; identical to SEQ ID NO: 66284
  Direct Repeat

SEQ ID NO: 66287 - DNA, 36 bp, unknown; identical to SEQ ID NO: 66284
  Direct Repeat

SEQ ID NO: 66288 - DNA, 36 bp, unknown; identical to SEQ ID NO: 66284
  Direct Repeat

SEQ ID NO: 66289 - DNA, 36 bp, unknown; identical to SEQ ID NO: 66284
  Direct Repeat

SEQ ID NO: 66290 - DNA, 36 bp, unknown; identical to SEQ ID NO: 66284
  Direct Repeat

SEQ ID NO: 66291 - DNA, 36 bp, unknown; identical to SEQ ID NO: 66284
  Direct Repeat

SEQ ID NO: 66292 - DNA, 36 bp, unknown; identical to SEQ ID NO: 66284
  Direct Repeat

SEQ ID NO: 66293 - DNA, 36 bp, unknown; identical to SEQ ID NO: 66284
  Direct Repeat

SEQ ID NO: 66294 - DNA, 36 bp, unknown
  Direct Repeat
gcgacaagagttccgaaggcactcgaagctttcgac

SEQ ID NO: 66295 - DNA, 36 bp, unknown
  Direct Repeat
gcgacaagagttccgaaggtactcgaagctttcgac

SEQ ID NO: 66296 - DNA, 36 bp, unknown
  Direct Repeat
gtgacaaaagttccaaaggcactcgaagctttcgac

SEQ ID NO: 66297 - DNA, 36 bp, unknown
  Direct Repeat
gtgacaagagttccgaaggcactcgaagcgttcgac

SEQ ID NO: 66298 - DNA, 36 bp, unknown; identical to SEQ ID NO: 66297
  Direct Repeat

SEQ ID NO: 66299 - DNA, 36 bp, unknown
  Direct Repeat
gcgataagagttttgaaggcactcgaagctttcgac

SEQ ID NO: 66300 - DNA, 36 bp, unknown
  Direct Repeat
acgacaagagttccgaaggcactcgaagctttcgac

SEQ ID NO: 66301 - DNA, 36 bp, unknown
  Direct Repeat
gcaacaagagttcagaaagcactcgaagctttcgac

SEQ ID NO: 66302 - DNA, 1518 bp, unknown
  TnpB Polynucleotide
atgccttacggacatgtagcaggtgatgttagggtttttgagtacggtgtcccgcgcagcgcgattcaccacggattaggcttcggcttcgagcttgccatcgctgagatgcgccggcggaaccaactctggaaccggctagtggagattgatcacgcctaccgtgacgagcgagcgcttctggtatctccctacccgctacctgagcgggtgaacggtagtcgaccgcggcgacaactgctggagtcagtgctagatgagctccatgcgctcgacgatcgcgtgcgagtctcagtcaatcttgcctgccaggactccggttgctggtggggtaactacactgacgtaaaactatcctggctcgtggctaggaagcgggctgatggcgtgaagttccacggttttcgtggtgaggggaagattacggctttcgtggcccatggcatttcagtcagtcgggcggctgagggtagtatggtccggctggcgcctggggcgcgtgagggtgatgtgcttgcccatatcaggatcgggagccaggagagggagccggtttggctggtgttgccagcccgattccaccgtcccctgcccgctgatggattgatccgctcggcctcagcgatccgggagcgcgtggtcgaccagtggcggtggaagctccttatcacggtggagcggcccgtgggactcgtgctcccctgggcgacgctgcccggcgagcggcgcgggcgtatctcactcgacctcggctggcgcaaacgccccaacggcctacgagtggcctactggcgggatgatgcgggacgagagggcgaactgttgcttgacgaccgctatttggcgaggatgcgtcggtgcgaggagttgcgctcacagcgcgatctgattcgcaacgcagctcaggcagacctgggggcgtggctggcccagcaggttatacctgattggttgcgagaggagacacggactctccgacagtggcgctcgccctcgcgcttggggaggttggaggcgatctggcggcggcagcggttcgagggggattcgggcgggtatggagtcgtggcgaagtggcggcgtgatgatctgccgctctggcaagaggaggggaatctccgggataaggcgctccgagaccggcgcgaggtctatcggcggttcgcggcggctacggtagcacggtatgcggagatcgtgattgaggacttcgacctgtcgcaggtggcggtcgtgaaggggatggttcctgacgagcggctgccggaggtagctcggtggcagcggttcatcgcggggacctatcagctcaggctggtgctggtgaatgcggcgaagagggaaggggtcgcggtgacgaaggtgccatccgcctacacgacggcgatctgctcggcgtgcggcagtctggagaagtggaaccatgcggagctgcggcatcgctgtgacgggtgcggggtcgagtgggaccaggactccaatgcgagcgtgaacctgttggcgctggcagcgggttga

SEQ ID NO: 66303 - DNA, 29 bp, unknown
  Direct Repeat
gcgcagcccacgcgcgtgagggtgggacg

SEQ ID NO: 66304 - DNA, 29 bp, unknown
  Direct Repeat
gcgcagcccacgcgcgtgagggtgggacg

SEQ ID NO: 66305 - DNA, 30 bp, unknown
  Direct Repeat
gcgcagcccacgcgcgtgagggtgggacgg

SEQ ID NO: 66306 - DNA, 30 bp, unknown; identical to SEQ ID NO: 66305
  Direct Repeat

SEQ ID NO: 66307 - DNA, 24 bp, unknown
  Direct Repeat
agcccacgcgcgtgagggtgggac

SEQ ID NO: 66308 - DNA, 1743 bp, unknown
  TnpB Polynucleotide
atgcgaatctacgagtatcgggcgcgccgccctacgaccaacctcaaccgggtcgaggagcagatgtacttggcgcacaagtaccaacacaccctcgtcgagctggagcgtgctcgacgcgaggcagtccgctgggtgacgtcggaggatgctgaggtggcggcgcttgaggagcgcgtccgtcttgccgtcgaggtcctcgacacgctacgcgaagagatcgcaaaggggcgccagaaagcgcgcaagaacacgacaccgcgggcggtgagagagaaagcacggagccagcgcaagcacatcaaggcgctccgcggcgagctacgccaagagaggacccgggcgcgggccgaggccaaggacaaactggatgcgatcaatgaacgcgcaacggtctggggcaaggctgcgcgcaaggcttccggcctgtattgggggacgtacctaatcgtggagcaggcgatggatgccgcgcgcaaagagaagacagatccgaagttccggcgctgggacggtggcgggagagtcgccgtgcaagtgcagcgcggtctacgtactgagggtgttgtcggcggtgccgatgcgcgagtgcagatagacccgtcgcaggacacgcgcaccgggagacggcgcggaacgaaaacgacgatgcgcctgcgagtaggcagcgagggacgtgccccgatcttcaccgagatcccaatcactctccacagacccctccccccagggagaatcaagtgggccgcgctcattcgcgaaaaggtggccaacgcgacgcaatggaaggtgcagtttacggtggatgaggacgccccaaaacgcgggccgggcgtaggcacagtcgctattgacgtcgggtggcgcctcttgcgtgacggctcgttgcgcgtggcctacagcgtcgatgagcacgggcaggaggacaagttacgtctcccagctcgcttgctgagcaagatcagacatcacgaagacctgcggtctctccgtgaccgacttctcgacgagaaaaaggctcgggtagccgaatggttgtcgaccggcaacggccccgaagaggtcaaggccgcacacgtccgcatgtggcgcaaccccgcgcgcgtggtccagcttctgcgtgcgcacggcgaagccatgccgcgtgagttgcgagccgatctggaagcgtgggcgcgcaaggaccgccacctctggcagtgggaggtgcatgaggcccgaaaggcgcgccgtaaacggcgtgagcagtaccgcctctatgcccacgctctcgcgcagcggtactcggtcgtggtcctcgaggatttcgacctgcgtgacgtcgctcagcgaggtgaggtcgaggacggaccgacgaccgaccggcgcaggcccaactacctgcgcacaatcgcggcgatcagtgagctgagacagtgccttgtgtcggcgggtctgcgtgtcgtcgctgtgccagcggagtacacgacgcagcgttgtcattcgtgcgggcacgtcggcgactttgacgccgcaaaagcgatcgaccacacgtgctcatcatgcggccgcacgtgggaccaggacgcaaacgccgcgcggaacatccttgcgagcgctccggctacgagcaccaacgagaaaggcgctcgcgaacagcaaagcagcgacaagcctcccctatcagcacggcaacgccgtttccgcggcatcgctgacaacgacggcgcgaagcgctcgcaggaggtctcgcctatggtgtga

SEQ ID NO: 66309 - DNA, 27 bp, unknown
  Direct Repeat
cacttcaacgacgagacacaaaggcta

SEQ ID NO: 66310 - DNA, 27 bp, unknown
  Direct Repeat
cacttcaacgacgagactacgggactc

SEQ ID NO: 66311 - DNA, 27 bp, unknown
  Direct Repeat
cacttcagtgacgagacccagacactt

SEQ ID NO: 66312 - DNA, 27 bp, unknown
  Direct Repeat
cacttcaatggcgagacgcaggcgggg

SEQ ID NO: 66313 - DNA, 2370 bp, unknown
  TnpB Polynucleotide
atgaaaaagaaaaaaagagaatcccaatctcgtcgaacaagtaataccccggttttagtctgtgcctatgggtgtattcatcgaaaattggaagcgattgtcaaaaagagcaccgatgacgagttatttaaggcaaggaaatactataatgcaagcatcgccattgaaatatctagatatgatcagtaccgagaacttagaagtagtttgtctcctacattgaaaaaattggaatctgatcatgacgaggccaataaacggtatcatgaatcccataatcttttaggaggcccgcgtgatgttacgaaagcagatgatactcctgaagcaaaagaagttcgtcggcttaaggtgatccgtaatgccttgtgggaaaaggtcaaagaagaacgtaaaaaggttgaaaaacaattctttgtagaagccaatgaagagtttcaaaggagaaggttgaagttgctttttgaagaagggaaaaaacggggcctgtattacgactttgacgcattatcaaaggaggaaatttcaacggcagtaaaagaattgaagcacgtaattggcccacatatcagaaagcattatccgccgattgtcagggcccaaatgcttggcgaagattggcctgatgcttggaaagaaaaagagtgtattgaggccaactcttacattgctagaaagaaggcgtgtaaggattctggttgtgctcccggtgtgtatttgatggttgacgccgctgttggggctgcgctaaaaacctccgagggtcgtcccaagttcaaaccatttgatcatacaggtcttgtaggaatccaagttccaaaacgagatacgaaaatagatggtaaaaagataagtgtggatgtcactgtgaaagatgcgtggtctgggacatatccgcgtctaaaactcgaattgttgcctgaacctagtgatgaaaatcccggcattaagatttatggttatcgaagggcggaacgtaaatttaaagaaggaaaagggtacaagaaaacacctgttctagctacgattcaacttacaaaggaagagggatcagcgatcaggatacctttcataatgcatcggcccttacctgaagatggcgttataaagtgggtgatgttgcatgtcaccagaattgggactcgatacatttacaaattgcaattcacttgtgaatccaagtcgtttaatcaagcaccaacaggacagggagttatagcgattcgtgaggggtggcggcggttagaggatggttctttgcaagttgccgtgacggatgatggggaaaattctatacctcttgttcttcctgctaagatgattcaaaagaacgaatatgtcaaaggtcttctgaggctttctgatcagctttttgatgggaagcgtaagaagcacgaaaaggttgatattgttgttgatattgcctctgggaacagaagcgtgaaagcatcattatctgattggttcaaagaggataaaaaacatttggcaatagctcaagaagctcttgatgaatggtgcgctcgtagagactatgagtccaaggatgtcaaggacttccatgcttggaaagcacatgggaagatggctttcctcacttttgctctttgtgagaaatactcaactccggaacgagtcaaagctctgtggaacaagtggaaagccgaaagattcaaaaagaatttggatctcttcaaggagaacggggatgatggttttatccttattactgaatggttgcgtaaaaacggagttcacaattccgtagagcaagtagctttgtggttagagtggtggcggcggaaagatgcccatttagttaacatggcgcggggagtacaaagccataacactttacatcgccgggatttctacagaaaatttgcgtttaacttagcgaagaaatatgagttgatagtttacggcgaaattgacaaagaaaaaatcgctaagaacccagatccggaggatgacactcgcaataaacgtgaggagtatgcgaacgctttgcgtcaattatgcggtgtgtctattttaaaagaggctattcaacacaaattcggggaatcctgttttattaagcagcttataaccaaaaccgaacattatggctgtggtgggactattgagttgcacaccgaaggcgatcagcatggtatttgttcaaagtgcggaaatcgttttgattccgatgctaatattgcacggcaattgtgggcaacttatagggatcagaatccttcaccatctccaaaaagtgccgaaaagctgcacaaaggaagctcacctcctcaaagagtgagacgggacaatggtggtcggaagcgcacctcctcaaagagtgagacctgtatgaacacggcttcgtga

SEQ ID NO: 66314 - DNA, 36 bp, unknown
  Direct Repeat
gtgacaaaggaagctcacctcctcaaagagtgagac

SEQ ID NO: 66315 - DNA, 36 bp, unknown; identical to SEQ ID NO: 66314
  Direct Repeat

SEQ ID NO: 66316 - DNA, 36 bp, unknown; identical to SEQ ID NO: 66314
  Direct Repeat

SEQ ID NO: 66317 - DNA, 36 bp, unknown; identical to SEQ ID NO: 66314
  Direct Repeat

SEQ ID NO: 66318 - DNA, 37 bp, unknown
  Direct Repeat
gtgacaaaggatgctcaccttcctcaaagagtgagac

SEQ ID NO: 66319 - DNA, 33 bp, unknown
  Direct Repeat
gtgacaaaggatgctcaccttcctcaaagagtg

SEQ ID NO: 66320 - DNA, 37 bp, unknown; identical to SEQ ID NO: 66318
  Direct Repeat

SEQ ID NO: 66321 - DNA, 36 bp, unknown
  Direct Repeat
gggacaaaggaagctcacctcctcaaagagtataac

SEQ ID NO: 66322 - DNA, 35 bp, unknown
  Direct Repeat
aaaccaacatggtcaaatcctgctcttgaaaaata

SEQ ID NO: 66323 - DNA, 35 bp, unknown
  Direct Repeat
aaaacaacatggtcaaatcctgctcttgaaaaata

SEQ ID NO: 66324 - DNA, 1227 bp, unknown
  TnpB Polynucleotide
ttgcaggagatcgcaccggaaaccggaaacgtccgcacggatcgcgggatcagacccgcagaaccggcaaatacactcatccgcgtctatgaatatggctctgggggcgaggccattcgcggcttggacatagctatcgagcagatgtttcgccgaaatgagctatggaaccggatcgtcgagatcgataacgaagtgcggacgaagatggacgccacgttgttcgcgggggcgcaagaggaaaaactcggatccatgcgagagaacctcgaagaactgcggagccgtctggcaacgctgagcgccgaccgcaactcccccaaggccgagagacaccaagtgcgcgcacagctcaaagcggcgacgttggaggttcgaacacttcttgatgaggtgaagcgtgtccgtaaagcgaatgccgatgcgaatcgagcgttcctgcccgagctaaacgccgaccggctacggcgaatacgacaggcccaagtccgagccggcttgtactggtgcaatcgaactgaggttcttcgaaattacgaaattgcgagacggcgcaccatgagagacggcagacgccttaagccgcggccgtggaacgggactggtaccgtctctgtgtattttcagaagggactgagcgtcagtggcgtctttggcgaaaacggccgactgcaaatcgatccggttcccgaggatgcatggaaatctccgtcgcgttcggtccggcgacggcttgcgcgaacttgcttacggatgcgaattgccgcgaacgccggcctttcgtctgtgtggctggaattgccaatgacgatgcatcggccccttccggacgggggtgtgatccgctgggcgtcgatcgtccaggagcaagtcggtctatctttccgtcatcggctgctcctgaccgtgaggcagccagccccgagcgggatcgagggacgtttcgaggcggtcggcgtcgatgtgggttggcgcattacccctgatggcttgagagtcgcttattggtgcggcgcggacggaaatcatggtactttggtgctgccgcactcggacctggcggcgtttaggcaaatcgattccctccagtccaccatcaccgctgcgcatgatcaggcaagatcgtttctcaggtcgtataccgacagccataccttagctgaacgcttagtgtcgctggcagcggccgctctttcgtcgccggcaccacgggccttggtaacaatg

SEQ ID NO: 66325 - DNA, 1893 bp, unknown
  TnpB Polynucleotide
atgaaggtctaccagtacgggttgcttcccccggtcgtgaatggcgccctggtctcggaccagatgagcctcgcacacaagtaccggaacaccctggtggagatcgaggtgggtcggcgcaatgcgatccggtcggccattgagtccgatccaggggttgcggcggcaaaagactccacccaacaagccacggatgccctgaagcgggaagaagaagccgcgaaggaggcccggtccgtggggcggacacaggaaatcccgaaagcacaagcccgcaaagtgggaagtgcccggaaactctggaaagaggcgtacaagcagttttcagcacatgtccgggaggccaagtctcttctggccgacgagatcacgaggatcaacgcggttgcccgcgacctccagatcaatgcacggaagcattgtggggtctactggggtacctatctcatcgtggaaagggccatggatgcatcacggaaacagccgctctaccatggtgcccacccccaaaacccgtcatttgtctcatggggagacgtgtgccaccacgtaggggtccaattgcagaagggtcagtccgtccctgtcacgttcgggactacacccacccaactgcggatcgaacgggacgggacacacccgaaacccatgcgtgacgggagccctcgacgtggggctgtgctgtcgattcgtgtggcttccgacaaagggaaagccgtgtgggcgacgttcccgatgatcttgcaccgggatcttcccaaggatggggacatccggctggccaccatcagtcgccgccgtgttggccccaacatcaagtggacggtggaactcgtcgtgggggagcctatcaggactcccgtgactccctccatcggaggggccatggccatggacatcggctggcgtcagaagggggacggagggctcaagctcgcatcctgggtcggagaggacgggcgggggggtgaggtcatcctcaacaccaagatggtgtcaggtatccgcaaggcgcaggagcttgcggggctccgcaaggacaagttcaacctcatcctggacgcgacccgtgactgggtgagggccaactccaccctgtgtccagcgtggttgaccagttccgccagccacatgcacgattggcgaagcatcgggcgtctggccgcgctcgcccggaggtggcgcaaggagcggttcgagggggatgccacgggctacgacatggtggaggcatggcgctaccatgaccagcacctgtggtcgtgggagtgtgcccagcgggggaagagcctgggtgcaagaagagagcagtaccgggtgctcgcggtggagaaggcccgtgagtacgacgtgctggtcatcgaggatttcaacctgtccgcgaaggggatcgcccaacacaaggacatcgagaagggaccagagaacctcaccgcacgtagcaaccgacaactggccggggtgagtttcctgcgactggccctggtacaggcattcctcgtccaggggcgtaaagtggtgaaagtgcccccggagtacacatcgaaacggtgcaacgtctgcaagaagatcacgcacctgaaggctgaagaacgctacgtctgcgagcactgtggcagcgagtgggacagggacgagaacgccagggcgaacctcatggacatctaccacgctgggagtgtgtccccggcatctggttgtgagcccatggacggtgggcagacccatgatgccgcggacaagggcgtaactcccagtgagaccgctccggtacgcaaggccaagtgggtgaacgtcaaacgcaagaagggggctgcgacggacgtggtgtccgctcgcaacttggacgaaatcaccagtgaccacgggtcgtttgcggacctgggtctgtaa

SEQ ID NO: 66326 - DNA, 28 bp, unknown
  Direct Repeat
ggttgcccaacaccctataagttgggac

SEQ ID NO: 66327 - DNA, 28 bp, unknown
  Direct Repeat
ggttgcccaacaccctataagttgggac

SEQ ID NO: 66328 - DNA, 1530 bp, Ruminococcaceae bacterium sp.
atggcaaaaaagtcagatgattcaacgtgcgttctgacgcttcctctaattattgaaaaatggcaggcagacaaaatcgaccggcgtctggaagccggtcggcagatgtataacgctttggtgggagtgatgctaaagcgctaccgtaaacttcagcacactcctgagtatcaagaaatcatgcaaggaataaaggataatagtaaaaataataaagagttatggaaaaggcgggatggactcctgaaggaatggggatttgtattaagagcaaaagctggattacccagttttgaatcagaaatcgatcccatgcgaagacactttacctgtattcagtcacatgtaggtcataggatagccgcatcggtgtgtgaagcttttaaagagttgctagaaggaaagggcagaaaagttcattttaaacgaaaaggtgaattgaattcattagaaggaaagaataacgaaaccaatattagatatgccgatggggttgtacaatttaacggactacaattaaaagtaaaattggatagtaaaaatatttatgaatcagaaatgctgcaaaagcgagtaaaatattgcagagtattgcgtcaaagaattcgtggaaaaaataaatattatattcagcttgttttagaaggaactgctgcggtgaaaagaaaaaagtcagatgggtctttttctcatatgaaaggaaacggacgagtgggtttagacatcggcacgcaaacactggcaatctgttccgataaaaaggtcgcattaattgagcttgcggaccgggtggggaacattgaggctgaaaagaggcggctacagagaaaaatagacagaagtcgaagatcctgcaatccggaaaacttcgcagaggatggacaaattaggcggggaatcaaattggaatggaatccatcacaacactataaaaaagcagtagatgaattgcgagagttacagcgtaaacaagcagcaatcaggaaatatcaacactatttacttgtaaatgagattgtaagtttgggaacagaagtatatgttgaggatatggactttgctgcattgcaaagacgtgcaaaaaagactgagaaaaatacaaaaggacgatttaaacgtaaaaaacgatttggcaaatctcttgcaaataaagcgccttccatgctgcttactatgttggataataggctgaaagcgataacaggccatgcccacaataaagttgataaatgggaatttaaggccagtcaatatgatcatttgagcaaaacatataataaaaagagtttaagtaaaagaattcattgtttagagaatggagatgtactccagagagatttatactcagcgtttcttattatgaatgcatcggaagatttgaagtcaccagattccgaaaggtgtgaacgtacttatactaattttaaagtaatgcatgacaactatatagaaatgttggcaaaatcaaatattcatactctttccagcatgggaatcaatcaaataaccaacggtgcgaatgtccagtga

SEQ ID NO: 66329 - DNA, 32 bp, Ruminococcaceae bacterium sp.
aattgacctacgtaaagcacgcagaggttcgg

SEQ ID NO: 66330 - DNA, 32 bp, Ruminococcaceae bacterium sp.; identical to SEQ ID NO: 66329

SEQ ID NO: 66331 - DNA, 32 bp, Ruminococcaceae bacterium sp.; identical to SEQ ID NO: 66329

SEQ ID NO: 66332 - DNA, 32 bp, Ruminococcaceae bacterium sp.; identical to SEQ ID NO: 66329

SEQ ID NO: 66333 - DNA, 32 bp, Ruminococcaceae bacterium sp.; identical to SEQ ID NO: 66329

SEQ ID NO: 66334 - DNA, 32 bp, Ruminococcaceae bacterium sp.; identical to SEQ ID NO: 66329

SEQ ID NO: 66335 - DNA, 32 bp, Ruminococcaceae bacterium sp.
aattgacctacgtaaagcacgcagaggtttgg

SEQ ID NO: 66336 - DNA, 32 bp, Ruminococcaceae bacterium sp.; identical to SEQ ID NO: 66329

SEQ ID NO: 66337 - DNA, 32 bp, Ruminococcaceae bacterium sp.
aattgacctacgtagagcacgcagaggtaata

SEQ ID NO: 66338 - DNA, 1479 bp, Prevotella sp.
atggcaataaaaagagctacaccaaactatgtgattacatatccattgaaagtggaaaagtggcaagctgatattatagaccagcgtttggaattgttacgtcagatatacaactatgccatatcccatcttatgggtaagtatctgtggcttactaatacgaaaactttcaagcaatgcaagtcgattaaagagaaacaagctttctttaatcaaaatccatgcccaatgacatttactcagtatggaatagctaattgggttgcaaaactaaatcaacgttctgttgatggtaatagaacattcattgattttggtataaatggtgaaatggcagctttgcttggaatgacgatttggaatgcttgggataaatatatgtttgattcaaaatgtgatcagataaacaaaaaaagaccaggacagataaatgctttgggagccagggtcaaaagtggatatgcttctggcttctcgtttgattttgagaaaatgaatatctcaatcaacgtaaatggcaaacgtaaatctcaggctaaatatattacgatgccaatagtaactcataaaaaccaaacagaatatgaattgacacctttgaaagaaggtctcaagaatatccgtatagtgaaaatagccaagcagattgttagaggcaagcgaaagtactatttgcaactgactgtagagggtaaagtaccaagtaaaggtcatgaactaggcaaaggaagagttggtatagatgtaggaccccaaaatatagccatctgttcagatactcgtgtctcaatagaacgtcttgcaaaagatggcgaaaaagatcaaaagaagattgacagcattcgtagtgctatgtatagaagtcgcaaagaaaacaatccaaataatttcgataagaatggagcatataagcccaaggaagaacatgagccatgtaataatactatacgttatatgaaactcagtatagaacttaaagaattatatagaagaaaggctgcaaggataaaacttcaacacatattgttggcaaacgagttgctaaaacttggaaacatctttgtcgttgaggataatccaattagcgaatggaaagaaaagaaaggaaaaacgaaaggagatacaataacaagttcacaaaaatgtaggaaaggatggagaagatcaataacacatcattcacctgcaatgttcattaacgttttaaagaataaggtggaaggacgtggtggaagatttataaaagttgattgctataacgctgctactcaatatgactttactgcaagaaagtttattaaacatggtatacaagaaaggtatatcacattgtctgacggacgcacacatcagcgggatattatggcagcgtttaatttgcaacacctcaacacggattcaaaagaaatgaaagaatataatactgaacagatgcacgtagattatctgaaattctgcgaattagagaaacaaatgtaa

SEQ ID NO: 66339 - DNA, 1026 bp, unknown
  TnpB Polynucleotide
ctgccccttaaactggaaaaatggcagtccgaccatcttgaaaagcgtttcgagattgcgcggcagctgtataatacgctggttcatgctgaactaaagaagaaatgccaagttgaaagaatgcctgaataccaagaaatcatgaaaatgattgatactgccagcaatcagaaggaaaagtgggcattagaaaaaaagagaaaagcatttttggaagaaaacggttttagcagaaatgcctttaaggctgatatggaaaaatactataagcactttaatgataatatcggcgcaaatgtagcgttgcatggaattacagcacaggtgtggattgcttttgataaggtgttcgttgacaactataagcagaagggaaaagtacatttcaaaaagccgggtgaactttgttccgtgcagggctattcacagaagaaaagcggtggaaaggagattatgttccgagaagatagaattatatggaatcagcaaggtaatcgtgaccgcaagaaggtaaaaagagagtttttgctgaaattatcacctaataatccttacgaggccgagatgttgaaaaggcatgtgaaatttgtccgcatcctccgcaaagacggcaagacaaagccgcattggtatgcacagcttgttttggaaggaaagccggcggtgaagcgtgacccgataagcagtgcgccgaagcatcccgtcgggcatggtgtcgttggcatcgacattggcacacggacgctggcatactcgaccgataaggaggttaatctgctggaattggctgaccgtgtgcagaatatagaacaagaaaagcggcgcttgcagcgcaagatggacagaagccgacgcgcaatgaatccggagaattacaattcggatggaacatttaagcgcggcgtgaagctaacgcggaacaagtccaagcgatacagacggattcagcaccagctggcaatgattcagcatcatcaggcggacatccgaaaacagcagcataacgaattggcaaatttctgctga

SEQ ID NO: 66340 - DNA, 34 bp, unknown
  Direct Repeat
cgttgcaatctgcacggagcgtgtggaggcaaag

SEQ ID NO: 66341 - DNA, 34 bp, unknown; identical to SEQ ID NO: 66340
  Direct Repeat

SEQ ID NO: 66342 - DNA, 34 bp, unknown; identical to SEQ ID NO: 66340
  Direct Repeat

SEQ ID NO: 66343 - DNA, 34 bp, unknown
  Direct Repeat
cgttgcaatctgcacggggcgtgtggaggcaaag

SEQ ID NO: 66344 - DNA, 34 bp, unknown
  Direct Repeat
cgttgcaatctgcacggggcgtgtggaagacctt

SEQ ID NO: 66345 - DNA, 1512 bp, Clostridiales bacterium sp.
atggcaaaatgtaaaactgcaacctgttccttaactttacctttgagagttgaaaagtggcaaatagacaaattagataaacgctttgaaatcgcaagaaaaatttataatatatttgttggttttgaattgaaaaaactaaatcgtttaaagcaaactcccgaatatcgagaaatattacatgaaataaagttaaaaaaccaagataaagaaaaaaataaagctgaaatcaaagctttatataataaaaggaacgctattttaaaacaatggaattttactgagctaagattcacaaatgatatgaccacaatgaataaatattatagctcgaattttggtgctataacatcacaatctatttccaacgatgcgtggcgtgcttttaatactttactttttggtaaaggtgagcaaataaagtttaaaaagattggcgcagtaaattctgtttctggtaagtcatttaacagagaaattcgtctaataccttcaaaaaactgtatcgaatggaagggactcacacttccttatcgtgtagaacgtgggaatctgtacgaagaaaaaatgttatcacataaagtaaaatatgtacgcattttgagaaaatgggcgaataccaaatataattattatgcacagattgtattggaaggtgttcctgaaccaaagatcaacaaaaaaactggtgaactgctccatcccatcggtgaaggacgtgtcggattagatattggaccacagactattgcctatgtatctgatacagaagttggtttaactgaacttgcagataaagtcgtatcgatagaaaaggaaaagcgacgactatcacgcaagcttgatcgcagtaaacgagctactaatccaactaattacaaccaagacggtataacaaaacatggcgttaaattaactcataataaatcaaagcgatatctaataacacaagaagaattaaaaacactttacagaaaacaagcagatatacgtaaacttcaacataatattttaacgaataaattattatcactgggtagtgaattctatgtagaaaaaatgagtattattggattagcgcgtagagcaaaaaaaacagaaatatctgaaaaaacagggaaatttaagcgaaaacgacgatatgggaaatctattacaaataaagctccagcaatgctgctacaaattttaaataataaactaaaagcacaaagtcttagcaaacttattgaaatagatacatataatgcgaaagcgagccaattcgatcatataaacgaaacatataccaaaaaatctctttctcaacgatggacaaaacttgataatggtgatgaaatccaaagagatttatattctgcttttttaattcaaaatactgataatactttaaaagcattcgataaagttctactaaacgaaaaatattcgaattttaaaataatgcatgatgcattcataaaccaacttaaggaacagagtacatatcatccgaccagtatgggagtttag

SEQ ID NO: 66346 - DNA, 1497 bp, unknown
  TnpB Polynucleotide
atggagttagaggataggaacatcttcaccatcacatttccgctgtatgtagaggaatgggaggctgacgtcattgaccgtcggctggaatgcttgcgccatatttacaacaacgtgcagggaaaactcatcaaatactgccgctacttggagcggtttaagtctttcagagaagccagaaacggcgttgacaagttgcagtttattattgggcaccagtcgccttactcgttttgcaagagcgatattatcaaaatgatgtctgcagcctacgagcagcaggtgggcagcggtaagacttacagagacatcggcatcagttacaacatcgccaattttttaggttatagcgcatggttcgcatggaatagatatttctatggcaacggaaagaacgtgctactgaggaagcccggtgagcagaacgtgataggcagcttttgtgacaacgtagatgggaagatgtatgccggaggcttcgtgttgaacttcgccgatatgacggtttccatgaaaatcaacggaagacagaaaggcaatgccgaatacatcaccatgcccatactgaccaacaagcggcaggttgaatacgaatacaacatgctcaaaggcggtgagaccacggtgaaaaagttaatgattgtgcgcaagatgataagaggccgcagaaaatactatctacacctttctatcgccgacgttaccataccgctcaaatatccgaatattggctatggcttcatgggtatagacatcggaccgtcaaacgtggctttcagtgccgaggacttcgcgtatttcacgcagctgccatcaggaggcgacatcgacaaaaagattgcccgactgcaaagggcaatggagcgcagcagcagaagcacaaacccacagaacttcgaggccgacggcacaacctatcggcaagacctgaaagaaagaacatgggcgagatctaatagatggtttgccatgagaggacgactgaaagagttgtaccgcaagcgcacggcaaagcgaaaatacgagcaatgccggctggcctccctgctactcacgatggcaaacgtctttgtagtggaagataataactacatggcatgggccaagaaatcgagcaagaacacctacagcaagcgcacaggccgcatgagaacgaaacaccgatggggcaagaccattgaggtgtttgctcctgcgtcgttcttcaggacactcgaatacaaggcgaagtcggctggcggcatactggtagaagtgaacaccaagaacgctgcgtcgcagtttgactttacaaacggaaaattcacgagacaccacaccagggaacgagtgataacaacatctgacggcatacctcacaacagagacttgctggctgccttcaacctgcagcacctgatgttctggaaagagcgactgaaacaatacgatatagacagaatgagatacgactacagaaagttttgtcaattagagcgaccatttgtaggactatga

SEQ ID NO: 66347 - DNA, 1575 bp, Clostridia bacterium sp.
ttgtttcacgctgttctaaaagcgtattatacggagtgtaagcttttgcaggttaaggagaaagtaagtatggctaaaagtaaaacgtgtacatcttgtttgactttacctcttaaggtggaaccgtggcaagcagatgtgcttaataaacgtatggagatatgtcgcaatatttacaacgcgtttataggttatcagttaaagcgatatgaccagcttattcgcacatgtgaatacaggtctattattgaagaaatagatagtttccgtctcgttgatgaaaacggaaacaaaaaaggttgggaaaaaagcaaaaagaaacctgaaagagttaccgaattgtataagcagcttaatacgctttacaaagattggggttttaccgagtttggttttatttccgaagttaaaaatttccgtcagcattttaaaggtgctatcgacagtcttaccgtatctgaaactgttgcaaaacctgcgtggagggcatttgaaaaaaatttattcggtaacggagaaaaagttcactttaaaaaaacaggcgaagtaaatactttgtgcagcggcagtgataaagtcggtcctctgtaccgtgacggttacgtggtatggaaaaagaattataaggattatcttaaaatcaaagttcgttttgataaaaacaatcagtacgaagaagaaatgatgagtaaccgtgttaaatattgccgtattgttcgcaggtggataaaagggaagtaccagtattttgttcagattatgttggagtgtcaaccggttattaagtgtgacagtgagaccggtgaggttaaacatccgcttggttccgggcgtgtcggcttgtttgtgggcgtgaagaacattgcttactgttcagagaatgccgtcggtgtggttgaacttgcagacaaggtggatgatattgaggctgaaaaacgtagacttttgcgtcatttggaaagaagccgtagggctatgaatcctgataattataatgaagacggtactgtaaaaaaaggtgttaagcttaattgggttgtttcgaaagaatatgaagagtccttgggcaagcttaaagaactgtatcgaaagcaggccgatgttcgtaaaatgcagcacaacattcttgcaaatcagcttttagcattgggcgatgagttttatgttaataaaacaaattataaaaaattacagcaaagagcagagtattctgaagggtacgagaagacgtcttccggtaaaaataagtctaagaaacgttttggtaagactatcggtgataaagcgccggcaatgtttgttactattttagataacaagttgaagcaatacggccgtccgggtgtgtttaaggttgatttaaaaaggaagtcttcttccgagtttgtacatacaaccggcgaaattgtcgatgttaaaccttatcaaaaatatattgatgtagatgggcattttgtccctcgtgatttgtattttgcctttttgcttatgaattcagacgggtctttagcaaatgttgactcggagcgttgcaacgaaacatttgacaggtttttagaacttcaagagagttga

SEQ ID NO: 66348 - DNA, 1308 bp, unknown
  Direct Repeat
atgcgcctgtgcgtcggagacctgcagctcgccgtccgggcgaaggacgacgcctacatggcggaatcccttgctgcaatgcggcgctcgtacgcaagcgagcgcgaagggcgcggcacgctgcccggctgcatccgctactgcaccatcaggcgccaccttgtcaacgaccacggcgcagtgcgctatgcgtaccggctcctcgtcacttgcgacggcccggccccggagcgcaaggcccttgtaccggccgcgggacgcgagagccgcaccgccgccatcgacccctcgatggcgatgatggcgctctgcgacagcgacggcgacacggcattcctgctgctcgacggcaaaaaccccaggacgaaagcgatgatgaaggacaccgcgcgtcgaatggatgcctcgcgccgcgccacaaaccccgagcggtacagggccgacggcgcgttcgacaagagctcggtcaacgccgggacgggagggaaggagaagaaccgctcctcccgttacgaagacctttacatgaggcgcaagctgctgctgcagaaacagtcggagaacctcaagggccgccgggcctcgctctgcaacgccctcgtgcgcacctacggcacaatcaggacggagggtatgcgctacgtcgcgctctccgtgcgcgcgaagaacatgcggttcgtcaagggcggaacgatagcgtcgaaaagccggttcggctccaccatccagcgcttcgcgcccgcctcgttcctcgccgagctcaggcgcaaggccggggcttccggagcgacgttcgaggagatcaacccctggacactgaaagccagccagtacgacccgacggacgggcagaaccataagcaccggctgtccgaacgcatctatgcactgtcggacggcacggccgtccagcgagacctgatggccgcgttcaccattctccatgcacggcgtgaggaggtcgtggatgcgaagaccaacaagaagaaaaccgtcgacctcccggacagggaggcgatgctcgcggcgctgctgccgttcatccgtgcgatgcacggggtgatggacggtctcgtcaagtcaaaacggcagctcccggccgcaatgggagccggggcatggactacgccccagggcacggggaaaggactttcccctgtagacgtgccgcactgcgtcgaaggtgaaatacccgcgctgcaaagggcgtgcggaggcggccaacaggccgccgaggtacgtcaggctccgcggaatccatccaaaagcagggagggcgacagccccccgggaaccccaccgctttag

SEQ ID NO: 66349 - DNA, 1500 bp, unknown
  Direct Repeat
ttgcccttaaaactggaaaaatggcaggaagaccgacttgccaaaagatttgaaattgcacgacagatttacaatacgatggttcgtgcggaattgaaaaagctggatcgagtaaagcaactgccggaatacagaaagaaccagaaagaaattcaggcactagactggaaaaattcggcagataagcaaaggctaaaggaactgtacggaaaccagagaaaaattctgcagaagcaggggtttacagaatacggctttaaggcggacagcaaggattattacaagcattttatagagaacatcggatcgagcgttgcaacgcatggtattgcgcctcaggtttggaatgcctttgataaaatgctgtttcaaaaagacggaaaggttgtccattttaagcggtatggcgatgttcattcgctaaaaggaggctctgttgcccataaaagcggcggtgcggaaatcatgttccgcaaaacctatatcgagtggaagggattaaaactgccgctgaaactgtcgcccaacaatgcctatgaagcggagatgctctcctaccgtgtgaaatatgttcgaattttgcgcacacgaggaaagacaaaagatcgctggtatgcgcagctctccttggaaggaaaaccggcggtaaagtatgattcaaacaccggaaagcccgtgcatcctgtcggaaggggagcggttggactcgatatcggaccgcaaacgctggcatatgctggagcaaatgaggcaaacctcgtagaattggcagatcaggtacaaaatatcgagcaagaaaagcgcagactccagagaaagctggatcgcagcagaagagcgaccaatccggacaattacaatgaaaacggcacaatccggcgaggcgtcaaattgactcacaacaaatccaagcggtattgcaaattgcagaaggaattaagctggattcagcattgtcaggctgaaacccgaaaacggcagcatatagcgctggcaaaccatctgctttcgctcggagattgcttttatgtcgaacccatggcatggccgtcgctgacccatcgggcgaaaaagacagaggtttccgaagaaacgggaaggattaagcggaagaagcggttcggcaagtccgtagccaataaagcgccggcttcactgattggcattttaaagctgaaatgcatctctctcgggcttaccggagtggtggaagttccgatgctgctcagagccagtcagtataatcatcagtcaaaagattatgcaaagaaatcactttcccaacgatggaatgatatgccggatggcaatcgaatccagcgcgatctctattcagcgtttttattgcagcattacgattcccgatcagaaagctttgaccaggaaacccttgaacgagattatccgcaatttgtgcggcttcataaccaaacgattcaacgattgtccgcactgccgaagaccccatccagcatggggattcggcgaagcgtaagctaa

SEQ ID NO: 66350 - DNA, 21 bp, unknown
  Direct Repeat
gatgcaatccgtgcgggatgt

SEQ ID NO: 66351 - DNA, 21 bp, unknown
  Direct Repeat
gatgcaatccgtgcgggatgt

SEQ ID NO: 66352 - DNA, 21 bp, unknown
  Direct Repeat
gatgcaatccgtgcgggatgt

SEQ ID NO: 66353 - DNA, 34 bp, unknown
  Direct Repeat
tgatgcaatccgtgcgggatgtgctgaggcaaag

SEQ ID NO: 66354 - DNA, 34 bp, unknown; identical to SEQ ID NO: 66353
  Direct Repeat

SEQ ID NO: 66355 - DNA, 1485 bp, unknown
  TnpB Polynucleotide
atggcaagagagaatgaaaattctagttgttttgttgttactttcccgttgaaaacggagaagtggcaagaggatagaattgataagattctaaccttgcttactgtgcgctatcgtgaaaagcagaaaatactgttagacagatatatacacttatcccattctccagaattcaaggaagcgaaaaatgcaggattaaaggcatttcgcgactttatgaatgagcataagttcacgaaatttgatattcaaaaggtgtttagcgattcaagtctgtcaaaatcagccaccaccgacgtaatgcttacccatggcataaactcagacatcatggaggaactatcacatcgtgcttggagtgcatgggaaaagaaactatacggacagggaaagttcatcagacttgacaatgaagtaaacattttcaaaagcagaaggcataaagaacatatcacaggttttgaatactcattcacagatatgaccttatcaatgaatgcaacaaaacctaagaagcacacaatgttcactattccgtttgtagtaaaccgtaaaagtgaatatgaagcctatgctttaggttgtgaggttagaaacatcgccattgtgcgccaacagattagaggcaagaacaaatactatgttcaattctcatttgccggcactccatacaacaaaggtcgaaaaataggtactggcatcgtgggtattgacccaggtccaagtaagatagccattgttagcgatagcgaaatacgcataactacgcttgccccttctgtaaagcgagatgaaagagccgtatgccgtatgcaacgtaaacttgaccgtagccgtcgtgctactaatcctgataactacaacgacgacggcactataaagcgtggaataaaactgaaatttgataaatcaaattcatacaaacgtacacaggcaaaattggcagacactcaacgaaaacttgcagccaagcggaaaatcgaccataatatccttgccaacgaaataatagctatgggtaatgaattccatgtagagaacaactctttcaagagtatgcaggcacgtagcaaggaaactaagaagaacgacaagggcaagaacttgagcaagaaacgatttggcaagtctttggcaaatcgcgctccttctgaactattgacaatattgaagaataaagtctgccaatatgcagatggagaatatgtagatattccttcgggcgtttcttgcacacagttcgattttactaatggtgagtttactaaacacgaactgaaagaacgcattataaccacatcagacggctttgtgcatgaccgggatgcccttgcagccttcaatatgcgctttgttaatagacagagaattgaaggcaagaaaaaagtcgaaaagaacaaagagaactttgaccttcaggcaatgaccaaagcctataagcagttctgtgcacttgaagaaaacataaaaaatcgggacaaataa

SEQ ID NO: 66356 - DNA, 40 bp, unknown
  Direct Repeat
caggtgtttatcgtctaaaattgaggggtaaatacaggta

SEQ ID NO: 66357 - DNA, 41 bp, unknown
  Direct Repeat
gaggtgtttatcgtctaaaattgaggggtaaatacaggtac

SEQ ID NO: 66358 - DNA, 41 bp, unknown
  Direct Repeat
aaggtgtttatcgtctaaaattgaggggtaaatacaggtaa

SEQ ID NO: 66359 - DNA, 41 bp, unknown
  Direct Repeat
caggtgtttatcgtctaaaattgaggggtaaatacaggact

SEQ ID NO: 66360 - DNA, 1824 bp, unknown
  TnpB Polynucleotide
atggcaaaagaagaatttgtactaacgctgcctctaaaggttgagaaatggcaagccgacattctcgacaaacgctacgaactgttgcgccaagtatataatatggtgcagcagaagttggtacgtcagtacatttacttctcacaacagaaagcatacagggattgtaagaactttgagcagagaagaggctttttcgaggctcaccctttccacgtcaaaagcgtgaaaggaaagaatggagaactctgtgatataaagttcccttatacttataagagtagaggtggttcttccggaaagagagctcctaatggcatttctgactacgtttccaaattgtggtcccacaagatagggcagaataaaaccttggctgattttgggataaatagctatattatggaggaacttggcctgcatattatgaaggcttgggaagaccgtctatacaaaccaaagtcaaagagggtttctttcaaagattatggtgagataaactcatttggtagtcgcaataagaacggtaattttgccggttttaccatcaatttggacaatggaattattacgtataaaaccaatggtcgtcagggtcagttcgccgatttaatccagcttcctattgacttcagtcgtgaaaagaatggttatgcaagtgaagcactcaaaggcggcatagaaagtctaaaaaaactactaattgtaagaaggtgtatccgaggggaaaataaatactatttgcaactaaccatcagtggagaaaaaccccaaaaaggtcgtactttgggcaagggtaatgttggtatagacattggtccatcaaccatagccacttcatccttaaatggcgtttattttgacaaattagccgataaatgcgataatatagaacacgagctatacctaataaaccggaaacttgacagaagccgaagagccaataatcctcaaaattataatgaggatggacagattaagcgtggagtacggttagtttggaaaaaagacaaggatgtcaagagatatacaacactgaaattgcagcgaaaggaattgtatcgcaaacaagccgaaatcaggaaactgcaacatctggagatggctaatgcgatgctgtctgaaggtgatacattcatcgtggagaataatcctattgatgcttgggttagaagaaccaaagaaacgacaaagaccaaagcgggaaagaacagatgcaaaaaacgttatggtaagtctgttgcaaaccacgcccccgcaatgttcgtctcaattctgaagaataaggtattgtcattaggtggaaaattctatgagatagaccctcgtaatgctgcaacccaattcgacttttctaacggagagtttacaaaacacgaggttagcgagaggagcataaccttgagtaatggtcgcacccatcagcgcgatatgctgtcggcttttaaccttcagcacatcgtactgcaaaacaaagaactaaaagaatacgatatagaacaaatggaagccgactatcccatcttctgtaggctggaaaatacagagctggaacgattcaaggaagctcggcacaaagaacgtgatgcactttactttgtgggtgcatcagaaaaacaaatgaggcgtcagcctcaagaagaatcggtcgctaatcgccacaatggtggcgttggccgaaaacattgtaatacttctctgggaggtggaaacgcaaaaataacaggtaacgggcttgcccgtgagagtatagagcgagtttcacaggtaccagacgaacgccatctttctggttgtgtccccatttctttagatgggctgtaa

SEQ ID NO: 66361 - DNA, 35 bp, unknown
  Direct Repeat
ctgtaaaaagccgaagaaatgatggtgattacaag

SEQ ID NO: 66362 - DNA, 35 bp, unknown; identical to SEQ ID NO: 66361
  Direct Repeat

SEQ ID NO: 66363 - DNA, 35 bp, unknown; identical to SEQ ID NO: 66361
  Direct Repeat

SEQ ID NO: 66364 - DNA, 35 bp, unknown; identical to SEQ ID NO: 66361
  Direct Repeat

SEQ ID NO: 66365 - DNA, 35 bp, unknown; identical to SEQ ID NO: 66361
  Direct Repeat

SEQ ID NO: 66366 - DNA, 35 bp, unknown
  Direct Repeat
ctgtaaaaagccgaagaaatgatggtgattacagg

SEQ ID NO: 66367 - DNA, 1911 bp, uncultured Parabacteroides sp.
atgcatatggatacagacacacatattgagacaatggctaaagcgccagaatccaccaacagggagataagctcgtgctaccacgtcatccgggtcggtcttcggttgaacaatcataccgaccgcatgctgcggcacttctttcatggatgcgacgcgttcaaggttgagctgggcaatctcgtgtcagggcgtttgaacacgctcatgtccgagaaagagaacgccgagcttgccaaggagctggataccctgaccatgaagaagaggatgagcaaggaggacaagaaccacttctccgagatgaccaaggagctccgggagctgttcaaggataacggtctcgacaagggcggcgtgtaccggctggctaaggagttgcgcaagagcatgaccgacagcaacaagtccgccctgtactcgctggtctcacaatccatagcagacgcttacgttcagggactctccgtcatcgcctccggaaagggcaagtatctccatgtgccgaaatggggctgccttgacgccatatccttcaagcaagagggtaacggctgccacctcgacatcgagaagcggacgttcaccttcagggcgtggaagaagatcgacggcaagatcaagaccttccagttgacgcttccgatcgtggtaccccgccatagctccgccggtgacgagctggacgatctgcagaggaaggtcatggagtacaaggtacaaggagaggacatatccacggcctataaccccgttcgctactgcgtcatccgtcggaggcgctgccaggaccacggcaagatcatattccgttacgagctgcagatcctcgtcgagggttcggctccggagcgcaagcaccgccccgttctcggggtgggcaaggccggcatagacccctccacattcacgcacgccgtggtcagcgacagctacgcgggtttcttcacgccatcgccctcgatgacgaagttgcaaaacaagtgcgcccacctgctccgccgcatggatgccgagcttcgagccaagaacgagtcctggtttgacgaaaagggacgctggcatcgcccggacgacgaggaggtggccaaaaagggccttgtcaaaagcaagctctaccgcaagctgctccacaggctgcaatactactggcagcgatacacggatacccgtctctgcctcttccatgccgaggccaggttcgtttgcgccctggcgagcgttctcttcgtcgaggatatgagctacagcggcctgcagaaaagagggcacagtgaggtgctcgtgacgcaccgtgacgagaacggcaacgatgtcaccgagtccgaggaatggacacggcgccgcttcggtcgctccatcctgagaggggctccggggttgttcctcagtatcctcgagaacacggtgaaagccgccggcggcagattcgtcaaggtcagtccatgggatatcaaggcaagccagtacaacccgctgaccggagcgtacaacaagcacgggcttgacgagcgggtcatcgaggtgactcccggcatctatatccagcgggacttgctggcggcgtacatcctgaagcattgcgagctggtgatagacccagagaaagcgaagagtaaggccaagaaggatgagtccatagcgcaggaaacagagacggacatggttagtgagccaaggaagaacgggcgtatccgcccaaggcatgagcggaaggtaaagtcctccgagacctaccagacaaacaagctcgcctgtcgggaagaattcgagcgattccgccagatccacgatgactgcatccagtatatcgtgcgccattacgatgagttgccagcctccgtgggactgaaggacttgaaggagattttccttgaaaaaaattgtcaagaccagcgaaaaaccgcctga

SEQ ID NO: 66368 - DNA, 1554 bp, unknown
  TnpB Polynucleotide
atgaagaaaaaaacaactgaagaaacttttatcatggaacttcctttaaaagtagagaagttccaggctgatgaacttaacaagcgttttgaactgatgcggcgtatttataactccgcacagaacaagcttgaaagacaatacgaatatcttttatcctttaaggaatataaagagtgtaatactaagaaggcaaagggagagtttataaacaatcatccgttttcattcaagggtgtccttaacaaaaacggcgagccgatgaatatcacttttaccgaatttggtttaaagtcatatcttgcagactttgcgaagaaaaaagtagattcacaatatacatattctgatttcggcatcaacacctcaatgttgatgtctatgggaatggctgcctggtcagcctggaagaaggtaatctatgatccgaaagcgaaagatatacactacaagaaatatggagatctaaagagtattgccgttgactgggaaccaaagcatcaggcaggaatgtaccttgatgtctgcaagggagtattaaaactgaatatcaatggtcgtcgtggtcaatatgcaaaatatctcaccttccctattaaattcgggaggaaagaacggcagctatggtacgagggcgatgctctcaaaggaggtgaggacagtatcaaaggtctggctatcgtcagacgaaaatataatggtcagtttcgctatttcctccagctgacgatccggaactgcacacccaccaaggatcgtaccctcggtaaaggccgtgtagccatcgatcttggtatatataagattgcagtatataccggcgatcaggtatatttctttcccctcgctcccaactgtcgtaaaatagacgagaagatagcggtcttacagcgtcagatggagcgcagtaagcgtattttcaatcctcagttctataacgccgacggcacctatatcaaggctaagaagcacgagcatcgaaaatggaatttcaccaaggagtatctgaaactccgtgccataaaggcagagttacagcgcaagcaggctgccatcagaaaacaggatcatatcgacctcgccaaccacctgttatccttcggaaatgagtttgtcatcgaggataacgatgttaaggcatgggctgaacgtaagaaggaagagaaaaagcgcgagaaagatggtaagaacctctccaagaaaggtcttggcaagcctatcggcagccatgctcccgccacttttgtcacccttctggcgaataaagtgaaagctcttagaggtacattcacaaaggtcgccgttgacaacggtgctaccgactatgatttcattaacgacacctttactccccatgagctaaaggagcgttatataactctctgtaacggagtcacccaccagcgtgactcgctggcagctttcaacctgtattatatcgatacaaatccagagaaatcacgctgctatgaccgtaaggctatgaagcgaggatataagaagtttcaggagctggagaaggtagctctcaaacagtggaaaaaacccgtttag

SEQ ID NO: 66369 - DNA, 24 bp, unknown
  Direct Repeat
ggtgttaatcatcctaatttgtaa

SEQ ID NO: 66370 - DNA, 24 bp, unknown
  Direct Repeat
ggtgttaatcaccctaatttgtaa

SEQ ID NO: 66371 - DNA, 24 bp, unknown
  Direct Repeat
ggtgttaatcaccctaatttgtaa

SEQ ID NO: 66372 - DNA, 24 bp, unknown
  Direct Repeat
ggtgttaatcaccctaatttgtaa

SEQ ID NO: 66373 - DNA, 24 bp, unknown
  Direct Repeat
ggtgtttatcaccctaatttgtaa

SEQ ID NO: 66374 - DNA, 24 bp, unknown
  Direct Repeat
ggtgttaatcaccctaatttgtaa

SEQ ID NO: 66375 - DNA, 24 bp, unknown
  Direct Repeat
ggtgttaatcaccctaatttgtaa

SEQ ID NO: 66376 - DNA, 1239 bp, unknown
  TnpB Polynucleotide
gtggcagttcatggaattgcgtcacaagcttggacggcgtttgaaaaagtgctgctttcaaaagatggaaagatggtgcattttaagaaaaagggagaattatcctcgctgagaggttattcacagacgggaaagagtggtggcatcgaaataatttttcgcggcagctatgtcgaatggaaagggctgaaacttccgctgaaactgtcccctgacaacgattatgaaacggaaatgctcagcaagcgcgtgaaatatgtgcgcatccttcgtcaagacggcaagacaaagccgcattggtatgcacagcttgttttggaaggaaagccggcggtgaagcgcgacccgataagcggtgcgccgaagcatcccatcgggcatggtgtcgtcggcatcgacattggcacgcgaacgctggcgtattcggcagatagcaaagtagatttgatagaattggctgaccgcgttcagaatattgagcaggagaaattactgcttcaaagaaagctggacagaagccgacgcgcaacgaatccgggaaattacaatccggatggtaccatcaagaaaggcgtgaagctgacacggaacaagtccaagcgatacaggaagattcagcaccaattggcgatgctgcagcatcgtcaggcagacatccgaaagcgtcagcataacgaactggcgaattacctgctgacgctgggagattgcttctttgtggaagatatggactaccgcgcattaacccgtaaagcgaagaaaacagaaatttccgaaaagacggggcgctataaacgcaaaaagcgcttcgggaagtccattgcgaataaagcaccgtcgatgctgattgcactgctggatcagaaatgtgaatcactgaatctggaaggagtcaaaaaggtagacacggcggtaaaagcaagccagtataatcatcagacagacgaatgcaaggcaaaggagttgaaagaacgctggaatattatgccggacggcgagcgaattcagcgcgatttgtactcggcgttcctgctccagcactgcagaagagatttgccggaatataataggaaggaattacagaaagagtttggggaagaactttaccgagtatttgaccgcgaggcactccaacgtgactatcctcaatttgttgcgtatcatcatatgacgattcagcggctttcagaactgccgcatacgattcccagcatgggcatcaggcgaatcatcagctaa

SEQ ID NO: 66377 - DNA, 33 bp, unknown
  Direct Repeat
gttgcaatctgcacggagcgtgtggaggcaaag

SEQ ID NO: 66378 - DNA, 33 bp, unknown; identical to SEQ ID NO: 66377
  Direct Repeat

SEQ ID NO: 66379 - DNA, 33 bp, unknown; identical to SEQ ID NO: 66377
  Direct Repeat

SEQ ID NO: 66380 - DNA, 33 bp, unknown; identical to SEQ ID NO: 66377
  Direct Repeat

SEQ ID NO: 66381 - DNA, 33 bp, unknown; identical to SEQ ID NO: 66377
  Direct Repeat

SEQ ID NO: 66382 - DNA, 33 bp, unknown; identical to SEQ ID NO: 66377
  Direct Repeat

SEQ ID NO: 66383 - DNA, 33 bp, unknown; identical to SEQ ID NO: 66377
  Direct Repeat

SEQ ID NO: 66384 - DNA, 33 bp, unknown; identical to SEQ ID NO: 66377
  Direct Repeat

SEQ ID NO: 66385 - DNA, 33 bp, unknown; identical to SEQ ID NO: 66377
  Direct Repeat

SEQ ID NO: 66386 - DNA, 33 bp, unknown; identical to SEQ ID NO: 66377
  Direct Repeat

SEQ ID NO: 66387 - DNA, 33 bp, unknown; identical to SEQ ID NO: 66377
  Direct Repeat

SEQ ID NO: 66388 - DNA, 33 bp, unknown; identical to SEQ ID NO: 66377
  Direct Repeat

SEQ ID NO: 66389 - DNA, 33 bp, unknown; identical to SEQ ID NO: 66377
  Direct Repeat

SEQ ID NO: 66390 - DNA, 33 bp, unknown; identical to SEQ ID NO: 66377
  Direct Repeat

SEQ ID NO: 66391 - DNA, 33 bp, unknown; identical to SEQ ID NO: 66377
  Direct Repeat

SEQ ID NO: 66392 - DNA, 33 bp, unknown; identical to SEQ ID NO: 66377
  Direct Repeat

SEQ ID NO: 66393 - DNA, 33 bp, unknown; identical to SEQ ID NO: 66377
  Direct Repeat

SEQ ID NO: 66394 - DNA, 33 bp, unknown; identical to SEQ ID NO: 66377
  Direct Repeat

SEQ ID NO: 66395 - DNA, 33 bp, unknown; identical to SEQ ID NO: 66377
  Direct Repeat

SEQ ID NO: 66396 - DNA, 33 bp, unknown
  Direct Repeat
gttgcaatctgcacggggcgtgtggaggcaaag

SEQ ID NO: 66397 - DNA, 33 bp, unknown
  Direct Repeat
gttgcaatctgcacggggcgtgtggaagacctt

SEQ ID NO: 66398 - DNA, 1581 bp, unknown
  TnpB Polynucleotide
ttggcgaaaaaaaataacaatgataccgacacctgtgttctgactctgccgcttagggttgaaaaatggcaggaggattgcctcttgaagcgctttgaagcggcgcgcaggatttataattctttacttaattttgagctgaaaaagcttcgtcagctcgagcgcactgttgaatatcggcaaattcaatccgtaatcagcagcgcttaccgcagcaacacaaaggattcgcccgaatgcaaggatgcttttaaacgcagaaagaagcttactgatgaaaacggcattagcgaatatggtttcaaaagcgatgtcaaattcttttataaacattttgacggtcttatcggatcaagtgttgccgttcactgcattgcggttcagctttgggctgcattcgataaatacctgcgcgggaacggaaaggagattcatttcaaacgccttggggacatttcttcacttaaaggatactctgtgcgcggcaagagcggtggatgcgaaataatttttcgcggacaatatgttgaatggacaaggaaaaagaaaaagcttttgcttccgctgaaaattgaccccgataacgaatacgagcgtgaaatgctttcaaggcgggttaaatatgtccgtatcatcaaaaaacccggaaaaaatcgtctgcgatggtatgctcagttaacgcttgaaggaaaacctgcgcttaagtattctgcggaaacaggaaagccgatccactctgtcggcaagggagatgtcggaattgatatcggtccccagaccgttgcatacgcttccgataaagaagttgctctgcttgaacttgctgaccgagtcaccaatatcgagcatcaaaaaaagaagcttcagcgcaagctggatcgcagccgccgcgcaacgaatccggacaactacaaaccggacggcacaataaaacgcggagtgaaactgacccgcaacaagtccaaacggtatctgaaattgcagtcaaagcttgcttatattcagcatcggcaggcagaaatcagaaagcttcagcacacttgccttgcaaaccatatgttgacgctcggtgatcggttttttgttgaaaaaatgaactggcccggtttggcgcaccgcgcaaaggaaacttcaatttcagaaaaaaccggaagatacaagcggaaaaagcgtttcggcaagtctcttgcaaacaaagcgcctgctatgttcatcagtatactcaaacgaaaatgtgaaactcttgggctgcccggagtcgttgaagtcgatacatacaaccttaaggcaagccaatataatcaccttagtgacacttatgaaaagaagagtctttccgaacggtggaattacatgccgatttcagatggctccgacagcagcaaaacaaagcggattcagcgcgatttgtactctgctttcctgctccaacacacgataccgcagccttgttcttttgataaagaagcactgcggatagactatccgaattttgtcaccatgcatgatgccgagattcatcgtttggaatcccttccgaaaacggtcacaagcatgggtgttcggcgaagtcatagctaa

SEQ ID NO: 66399 - DNA, 24 bp, unknown
  Direct Repeat
agtcgcaacccgcacgaatgcgct

SEQ ID NO: 66400 - DNA, 24 bp, unknown
  Direct Repeat
gtcgcaaccctttgcgaatgcgct

SEQ ID NO: 66401 - DNA, 24 bp, unknown
  Direct Repeat
gtcgcaacccgcacgaatgcgctg

SEQ ID NO: 66402 - DNA, 24 bp, unknown
  Direct Repeat
gtcgcaacccgcacgaatgcgctg

SEQ ID NO: 66403 - DNA, 24 bp, unknown
  Direct Repeat
gtcgcaacccgcacgaatgcgctg

SEQ ID NO: 66404 - DNA, 24 bp, unknown
  Direct Repeat
gtcgcaacccgcacgaatgcgctg

SEQ ID NO: 66405 - DNA, 24 bp, unknown
  Direct Repeat
gtcgcaacccgcacgaatgcgctg

SEQ ID NO: 66406 - DNA, 24 bp, unknown
  Direct Repeat
gtcgcaacccgcacgaatgcgctg

SEQ ID NO: 66407 - DNA, 1860 bp, unknown
  TnpB Polynucleotide
atgtccggaagtaaggtcatatcggataattgccatgtactggaactggcattgtggacaaacgcgtaccaggaacatttcctcggacgcgtcttctccgaatgccgtcgtttccgaaacgacctcgccgggaacgccatgcaccgcatcatgcgactacgccaggacgtggaataccgtaacctgctgaagacactttcaacgctcaagaaaagcggcacggatgcatcttcacaactgaaagaaatcaagaatcgcctgtccgcaatccgcaccatccatggcctttcgagcatgggccagtttgagaagatcatctctcctgtaagaaacagccattataatacatcactcctccagtcccatgtcgcacaaaccctcgcagcggacgtctgggccggcgtggagaagatactgtattccaacggcaaagacctttctagcaaaggagaacatgaattcctgagcattcgtggcaagagcaacgagacggccatcgtctttaaccccgtacaaatgtctgtccgtatcggcaaacacttcatccccgtatccggcggactggacgagtaccagaagacagaccttgcgaagataagagcgtcgttcctatcggaaaagaacggatacggcccgctccccgggtgtatccggttcaacaagatagtccgcaggctcgccaacgaccacggccgcatcaagtggggctattggcttcaggtgacagccgacggcccggcgccaaagagcaacttctcaaggaaacacactacgagcgcatcccgttccaaccagacccttgccatcgacccgtcccagacgatgatgtcctgctgcacaagcgacggcaatgccttcttcctacttctggacgggaaaaatccgaaagcggacatgtcctcgcgtgaggtctccgtccgcctgaaccagtcccgccgcgcatccaaccccgaacggtacaatccggacggaacctatcgcaaaggctctgtcaatgccggaacaggaaagaaaaatgactggaacaccactccgaactatgagacgctccaccgtcgccggagactcatgatacagaagcagggatggacgctccggacaagacggaacgaactgtgcaacaatcttgtcagtacgtatccaaacattaagaccgaaggtacgaactatctcgccctgtccgtgcggagcaaacgaataagaatccgacaaggtggagcaattgcctcaaagaaacgctttggcgatacaatccgccgcttcgcgccgtccctgttcctctcgacgctcaaacagaaatgtgaagcctccggaggacagtacgtagaaatcaacccctggacactcaaggcaagtcaatacgacccgacagacaacagctataccaagcacaagctccagcagcgcgtgttccgcctgtcggacggaacgccggtccagcgggacctaatggccgcactgaacatcctctgctcgaaaaaggaaaaacgcagggatgaaaagaaaggcaaaactgtcattgcagacgtaccagaccgtgaacttctgctcgacagtcttgcctggttcattccggccatgggggaggagatgcagcgaatgcatcagaaatcatccaaacagaccatcccgtctgcaataggggtaggagcatggactgcactcctgggtgcggggaaatcagaaccggacgctgccggcgatgatgtagacgcgccaaatccaacaggcgaagatacccgggcggtcacccgcggacacagggaatgcaatgacgctcccgacacccgcaacaccacacggaatcaagccgacaccaaaaggaaggctccgccttcctgcggaaccccacggctttaa

SEQ ID NO: 66408 - DNA, 44 bp, unknown
  Direct Repeat
aaatcggtcagtactaagtggtcactttggcaaaatcggtcagt

SEQ ID NO: 66409 - DNA, 44 bp, unknown; identical to SEQ ID NO: 66408
  Direct Repeat

SEQ ID NO: 66410 - DNA, 22 bp, unknown
  Direct Repeat
aaattcaccaagtacctccggg

SEQ ID NO: 66411 - DNA, 22 bp, unknown
  Direct Repeat
aaattcaccaagtatctccggg

SEQ ID NO: 66412 - DNA, 1914 bp, unknown
  TnpB Polynucleotide
ttggctgttcatatcgtttcattcatctcactatacaaacatacgaaatattacatagttcacgcattaaataactctaaaatgattatctttacaaagatttccgaatttatcatatcttattggatgcctgtaaagaaagacgataaaccgcgatttgttcttgaaatgccattgaaagtagagcaatggcaggcagacatattgaatgtccgctatgaattgatgcgccggatgtataatcaggctcgacgtatattgttatctcatttctattatatggtgcaaaagaatgagtatcaagaatgtgcctccaataagcgtgaaagagccgtgtatattaaaaatcatccgatttttatcaagggagtaacggataaaaaagggaatgtaaaacctattacgtttacagagttcggaataaaagatgttgtgttgtcattcgttacccgagatgtaggatcgggaaagacgtataaggattttggaataaatacttcttttgctgattgtgtcgcttctaatctgtgggctgcatgggaaaagttcatgtatgacggaaagtgtaaaggcgttgcatttaaacggcggttcaatacaatatcgatagggaaaaataacggctgttttggagggttgaaactttctcttgaaagtatgactttgtctgtaaatgtgaatggaaagcaaaaggggaacgcaaaatttatcacattgcctgtttgtggtgataaccaatctgaatatgaaatgcaggcattgcagggtggattggagagtatctgtgtcgtatcgattgcgcgaaagttaataagaggaaaatataaatattatttacaacttactataaaagggcatgctccgaataagggacgggcacttggttgcggaacagtcggagtagatgttggaccttctactgttgctttcgtgtcacagtcggatgtgcagattaataggctggcatctgaatgtgatgatatagaagatgtgattggaaaaattcagcagaagatggatcgaagtcgcagggctactaatccgcaaaattttaatgaagatggcacactgaaacgaattagcagaaaaaacggagaacgaagaatttggaatgattcacgcagatatcggttgttgtgtaaacaaaaggctgaactacaacggaaacaagccgctgtcaggaaaatgtcccatatcttgaagataaatcaaatcctttcgttgggagatacgttttttgtggaaaataatccgattagtcaatggacaaaacgtgcaaaagagacgaaggtatccgaaaagaccggacggtattgcagtaaaaaacgtgctggtaaatcggttgccaatcatgcaccggcaatgtttgtcacgttattgaaaaataaggtacagtcgttgggcggtcgatgcagagaagtagatataaagaatgcagcatctcggtttgattttacagatggacaattcaaagttcatggtttggatgagcgtatagttactttgtcgaataataagacgcaccagcgggatatacttgctgcatttaatttgcaacatattatttgtgttgatgacgataaaaaattaaaaaaatacgatattgtccgaatgtatgccgactatccagccttttgtgatatggaaagggctgaaatagaaaaatttgtgtcgggagaaaaggaaacagacagacatactattggagcaatagaagaattaaaagtggtattgtcaagccacgcagatgatccgtccgtactttatagtgtggataaattgtctgcaaattcggaaggaaacaaaacagggaaaaaggcaggtagtgcacttgtgcatgagagtaatgaccgagttttggaagtactgaatgagagtacattatttacaatcaaggatctacacgttacctga

SEQ ID NO: 66413 - DNA, 1758 bp, unknown
  TnpB Polynucleotide
atgggaaagaaaaaaaacgcgattagcgattcgatgccgagagcattcgagttgccactccagtctaccacggacgatggctggacgctccttcggcaatgctggaaggaatcgacactgcttgccaactggtgcatccagcagatgcagaaggtggacgcaggccgtctgcccgggatgacattcgaggaatgcttgaagggatatgtacccccagatctgtttggtaacctggtgggaagagaaaaggagggccgtggacgaaaggacaaaaacaagattctgccggtcatcccccggcagtacccagggacggaattcttcattggcgcgaagacatcggcgaacgcaatcatccaacaagtatccaaaaagtatcttgcagatcgcatggatgttctctggctgatgaaaaagagtttccctcgctatcgaacattcggctggccggtggatccggcgggttggtcgttgacgatgaaacccagaagcaacgacaataaaccgaaagacgagcgcggctggcgggccaggtgcaaggatggttcattccggttgccttgggttcaggaactccttgacgagaacggagagctgccggactactgtctcggaaggaccatcgacggaaagaactgcctgaacacgaatgctagcgaggaggaaaaggcgaaagcgaaagagtgtctgaaaccggcatggctcgatgacagtggcaggccgcacattgtggtgacactgccaacgggttgcaatcgtaaaagcggcactgacgacaacgaggactctgagagttccgaaggtggcaagacgattctccgacttcgtggaggccccgagttcgcgcgccagatggctcagtttcgccagatcgtccgtggtgatctacccagacggcaagtacagattcgatggaagccttgctcggaatcgcatcatcgaccaacgtgcaggctgaatggacagccaggacgagtgatggtcaaaatggtagcggatcttcccgtgcgtgagaaaccaggcggtcgaaccatcgttcttatgacagatccgaacgcattctgggtggcatggttggatggacagaaggcctgggtactcaacaacgatcatttcgttcgcacgacaaagcgatacgaagaatctctgtgcaggattcgctgtatcgagtggcgacgagagcgtttggaaaagccgcgagtagttattgcccacgagaaacatctgcgacaactccagcgcatgagtcaggacgcaaaggcggaacgacgaatacgtggcaatcgcgatgaaaagcaactgatccggctgaaaaaaatggccgacaaagacaggagacgactggactccttcacgcatgaagttgctgccaatctcgtcaactttgctattcgtcaaggagtaggggagatctggtatctcgatcgagataaagggtttatcagcaaattcccttggtttgagttacacctgaaactcaaagacaaatgcaaggcaaacggaattgatctcgcatctgagtcagatggcgaatctagcaccaacaatcaaccggatgggccgaacgaagacggccaaacgaacgacgaatcacccagcaatccgttacctgcgtcgggtaacggccaaatgatcgaaagtcgctctgaggaggatgacgtatggataagagtggaccgattgcgggaaatggccgcgctccgagtgatctctgctcggaagcggagcggatcgcatcccgcagttaccgtaccatga

SEQ ID NO: 66414 - DNA, 36 bp, unknown
  Direct Repeat
ctggaacgtctgatcgatcgatgagagcgttgcggg

SEQ ID NO: 66415 - DNA, 36 bp, unknown; identical to SEQ ID NO: 66414
  Direct Repeat

SEQ ID NO: 66416 - DNA, 36 bp, unknown; identical to SEQ ID NO: 66414
  Direct Repeat

SEQ ID NO: 66417 - DNA, 36 bp, unknown; identical to SEQ ID NO: 66414
  Direct Repeat

SEQ ID NO: 66418 - DNA, 1329 bp, unknown
  TnpB Polynucleotide
gtgctcatgacggaaaccaatccaatcgcccgctgctcgcaatgcgacgaggaaaaagaatccgtcgtcaaatccgacggcacggtcaaacttccccgcggttggatggaatttgcgggccagccatattgccgcaaatgcaagggcacatccctgtgcgtccgcgccatctcccttcccgtggccggtccggtggatatggaatggaaggagttgcggacactcttggccgccgcatggtcgcgatcgcggtctgccgcgaatctgatggaacgccaactggcttcgcgagacgtggtgcgaactgccgcgatggagaaacttccggccgcgcccaaattgtccgcggacgttctttatcagcccgcgcgagcgctcgtaccacaacttcccagcgggacggtctcggcgatccagaaacacgtcgccgacacgtacatgaagcaacggtacgagtcgatctggaccggagatcgatcgttccgcaacttcaaatatccttatccgatccgcgtccgcgtccaagattacacgctggggttcgtcgaacacgacggcaaagaatatccatcggtcagtttgaggctggaatctactgcggttgatggtgcgaagcggatcaccttgcgattgcgcggcggtcgcggcttcgacaggttcatgggcgacttccgaaggctgatcgacggcacggccaaggccggagaattgattatcacccgtcagcgggccaacgaatccgaccatcgaccgggtatcggcgatcgctccagcggcgggggatctcgtatcatctaccggatcatgtgcaagatcgtcggtcgcttcccgcgccgcaagaaaaacgatcaacagcggacaggaacattgaacgtccgaaccggaagcggatcgttctggttcgtcaccgaagagggtgaggagagatcgtggctgaacgccgatcacatgcgccgggcgcacgcggcgcacgcattatttctcggcaggatcgcagatgacaccaagttcgagaagcggacgccacgtcgcaatcgccgccagatcgatggctatcgcgctacaagggttgacaaacacaaaaaccggatcaagacgttcgtggatcaagcctgccgcagtctggtcggctacgcggcgcgacgagggtatgccaaattggaatacgatgaccgcgacagacagtacatgcccagcttcgactacagccagatcgaggctcggctgaaaatattgtgccaagaggcgcaactcgaactcgtcatcgtccgcaaggatcgtgacgatagggcgactgcaacgcccagcgcggacccggacggtgcttga

SEQ ID NO: 66419 - DNA, 36 bp, unknown
  Direct Repeat
ggtgcgcgacgccggagtttgtgggcctcgcgcagg

SEQ ID NO: 66420 - DNA, 36 bp, unknown; identical to SEQ ID NO: 66419
  Direct Repeat

SEQ ID NO: 66421 - DNA, 36 bp, unknown; identical to SEQ ID NO: 66419
  Direct Repeat

SEQ ID NO: 66422 - DNA, 36 bp, unknown
  Direct Repeat
ggtgcgcgacaccggagtttgtgggcctcgcgcagg

SEQ ID NO: 66423 - DNA, 36 bp, unknown
  Direct Repeat
ggtgcgcgacaccggtatttgtaggcttcgcgcaga

SEQ ID NO: 66424 - DNA, 1350 bp, unknown
  TnpB Polynucleotide
atgtccatgaaagtttacgtattcgggtgcaagatttctaagtcagatcaggtattgatcgaagcagaaatcgaacgcggacggctgtattacaactcgatgatcgagtcatacaaccctaacccgcgccagcgtccgggggacgtgcgcaagcgctttccagcatcgggcaccgagtgctacaaaggaacgtacgacattgttgcgagcgattttgaccgcgcagtatcggcaaaacgtccaggaaaatggccgggagatccgtatcactttcgccgcaagcatgagaattctggagcgtctgttggggttcgggtttatccgtcgtgctcctggggcgatctaaagactggcggtaagcgagtggtagcagtgctaccgtcgcaaaatgagcaatttagccacaagcgctttgtccttcggatcaaggtagacaaagagaatgatccaatagaactgtcggtttcgctaccgaagccgtgccgagggatccgtcgcacagtacctgacgaggcaatgatttctcacgttagaatatttaggaagggtgactttgcaactggggctaaatatgtggtgcacgtgacggctcaggacattgactctacgacttgttcgatcccagaaactgagcgcattggaatcgactttggctggcatgagcaaccgaatggcgctctgctcgttggaattacttcgcagggagaaccaatacagattcctgcatatgttgtgagaatgtggagatcatcggaatcgatccgaggcgagcgcgacgctgcggcaggcgctatccgcgatcgaattccatcaatcaataatgaacgcgtaccaaagtcagcgtctggaattgctgcgtacatcaagcgtcacaaccttcccgggttcgcaaaatgggagatcgtagaatatgacgcgcatgtcaaggaagatcatgtaaggcggagataccagaatgttagaaatgacatatacaagaagctcgcttccagaattggcccagtgtgctgtatcgaaaggcttgatctaaagccagtgatcgagaaagacaaagagggaccattgccaaaacctataggcgagcgtaggttcatcgcgtctctgttcgttttgcagcaactattgcgtaaccatggagctatcgaagtgccaccagtttgcgagcgatccgaggagatcttagggacgcaagccgaccgcgtcccaactactgagaatgcatcgcttatatttgcggcttgcgctggcggaaaccgttttcacagagccactcgcaaaccggttcgtaagtacaggaaaaagctaacatctacagacacgcctctcaacgccatggcaacggcatcgtag

SEQ ID NO: 66425 - DNA, 1296 bp, unknown
  TnpB Polynucleotide
atgatctcccaaaacacaatggccacgacaaccccctcaatccagtgcagcgtctgcgacaaagccgtcgaggccaaaacgcgcgacgatggacatccgaagctgccgcccaagtggcgacgcatcgcaggccgggtgctgtgcccgaactgcgccagcagccagtacgtgtcgcgctcactgaccctgccgatcggcgagtgcgtctcgcacccgtgggctgagtttgcgcaagcagcccaccaggcgtttgcgaggtccactgccgtcgcgcgtgaggcgatccgtcagtacgcgatgagcgaccctcagacgccgccgggccaaaaaatcggcaaatggacaccgcccaacgcctatcaggcgtgccgacagatcgcgccagaactggccgccggcacggttgcgaccatctgccagcgattgcaggggatttatcgcgagcagcggcttgcgctgcacagaggcgagcgcgtcctgccaggcgtgcgttatccgcagcccgtgccgatccgagcacaggattacacgctcacagtgcaggatgatgtcctggtgattacattccggctagagtccacggcggtagagggatcgcagcggtacacgctcaagttgagggaaaagggtggctttgaacgcaatggccgcctgctgcggcggctgatggagggggatggcgtcattggcgaggtgacgctcgacgcgatccgcaccaatggcacgagccgcgatcacccccgtgagcagcgcgatgctggtgggggcaatcgcgccgcatggaagtacgtgctgcggttttcctgcaagctgccggcggcacagcgagacgacaccagcgacgccatgctattggttcggacggcggaagagggtttgttggtctggcagatcgccggccaggaggagcgtcctccgctgcatgccgagcacgtcaggcgtcagcttgtgcgctttggccgtgagcaggccaggctgcgcgacgatctgaaattcgaaaaacgctggccgtctcgcgtgcggcagaaaatggtatcacggcaaaacgacctggcggcgaaacgctcgcggatgctgcgaaccttttgccagcaggcggcggcgatgaccgtggcgtttgcccgtcgccgaaaatgtggcacaatccagtacgatgacacagtgcgaacgtttgcggcgtcattcccttggcatcagctgcgcgatgcgatcgcggcgaaatgccaagcggagggcgtgattttggttgacgcgaaccccaagccgacagagaatgccgggcaggtttgcgattga

SEQ ID NO: 66426 - DNA, 1497 bp, unknown
  TnpB Polynucleotide
atggcagcaggcaagaaacgcaagaccaacagcaacggcgacaacctgagggctgccgtccgcgtggccaagtgcgaagttgattgggggtcgtccgtgaaggacatgaacgccaagactcgcgagcattacgaagccacgacaaaacgttggcacgcggcgactcggctggttcaggagatatccaattgcttctacgattactggctggcgtggcatgtcctgaaccagtcggacattaaaacaaaagcgtggctcgatgaacggcagcgggtgcgtgatgccatgtccggccaacccgagaagatcatcaacgcggccctgaaggaacaggtggggccatgtcctgtcgagaccttcccgccagacctgatggacagcaagcggcccacgtcattctatcgcgtgctgacaatccgctttggagaactcccggcacatatcgtgtcggtcatcctgaacggcctgcaaggcaagctgacgggcaaggcggcacatggatcgctccccaagccaacggcgatgttcctgcatcatgagcgggtgccgaacttcacacgaccattgccgattccgttcgtgaagcaggattgcacgctgcggaaagagggcgacgaattctacatcgacctgaaggtatggcgggtcgaaacgacgtcgaagaagggccagcccaagatggtgtgtctgactgattcgatcaagctccggacgaagggggcgaagtgtgccaacgaacgggccatgttgtcgaagatcttcaccggcgaatgggagttcaaaggcagcactctgcaatgggacgacagatgccgcaagtggctggtcaatgtgtgtcatcaacgcccatcgcacgtgatgccggttgatccgagcaagatagcctacctgatggccggttgccggaatgcgttcagtgttttttaccgcgacggaaaacgctggcggcggaagtggttccagggtcgcgggctgcacatcatcgagatgcggcggaagctgtgggagtaccgggcagagaggaacgcgaactatcgacacgctacggctcgcaaaggccggggatttgataatgcgaatcgctggcgggccacgtcggcgcagacgtggaaatactttgtgaggcgggtcaaccacaatctgactgccgaagtcgtgaagtggtgtgtcgcgaatgggtacggagcactggtgtataagcaaccggaagggaggtacgcgaccagtcgattcgtggctggggagttcaagaacagcacatgggagttttatcagatcggaagtcagctggcatacaaatgccaggacgccgggattgctttcagcgttcaaaaggttggtgcgagtgcggatgtggcgacgggggttctgggtgacgctcgcgactcaagcgacgtaacgggttccgacgcgacacagatcaacaagattggacgcaatgccgggcgacaacaggaccgctcgcgaaaggctgccggaagtatgtcgcggcaatga

SEQ ID NO: 66427 - DNA, 36 bp, unknown
  Direct Repeat
gcatcggcgggagacgaatcaaaagggttatgcagg

SEQ ID NO: 66428 - DNA, 36 bp, unknown; identical to SEQ ID NO: 66427
  Direct Repeat

SEQ ID NO: 66429 - DNA, 36 bp, unknown; identical to SEQ ID NO: 66427
  Direct Repeat

SEQ ID NO: 66430 - DNA, 35 bp, unknown
  Direct Repeat
ggtgcggacgacccggaactgcgagggctatgcag

SEQ ID NO: 66431 - DNA, 35 bp, unknown; identical to SEQ ID NO: 66430
  Direct Repeat

SEQ ID NO: 66432 - DNA, 35 bp, unknown; identical to SEQ ID NO: 66430
  Direct Repeat

SEQ ID NO: 66433 - DNA, 35 bp, unknown; identical to SEQ ID NO: 66430
  Direct Repeat

SEQ ID NO: 66434 - DNA, 1257 bp, unknown
  TnpB Polynucleotide
atgttagttagtgtgactccatttgagattttcaagttcgctggtggggacaaggctcgtcgcgcgcagtggaagctagtctccgaggaatgccagcagattcacaatcgagtctggcagctattcctccagtggcatagcgttaatgggtctgttgcaaagatcaaggctggcttggaggccttggctgcttggcgtgcggcaggtggagacaaggagacgaaacctaagccggaagtggtggcgatcggctccgagcttagcaagatcatctaccgtgatgtatctgatggctggccggatgttcactcacgcaccagagtgctgctgctgaatcgtttagtatccggcatccgaacccgcaaggcttgcagaggctccttgccgggttggatcaatatcctgttctgccgggagggaatcccatccttcacgcatccagttccgattccattcgataaggtaaactcccatctgattcctcctgacgacgagaacgataactggcggctgtcggtgaaggtggagcggtcgcctagtgacggccactccctggtagatgagtgtgaactcatgacccgcaagcgaaagacacgcagaatcgctggcgtgctctctaggatcgctgagggactgtcatcgtttcgtggctcctatttggtatgtgatcgcgggaagtgggttgccatgatctgccacacctcagccgcggagcaggctaacatgctcgactccaccaggaaggccatcctcatgccgggggtgcataacgcgtgggtggtgaagaagaacggcatgatacgtcgtcgattcgctgaccggaatggtgaagcgaggcacgtccttggtatgcgtcggttgatcttcggtgaacgtcaggagcggcaggcaaattaccgctgggcctcgtccagccttaagggtcacggccgcgggaaagccacgcacggatgggaaaagctctccagccgctggcgtgatttcgtgaagcgttacaacaacgagatcacgacgaagctggtgaaggagtgcgtgcaggacgggattggaacgatcgagtactaccagccagttgatttccagcgcgatcggcgctggctaaccgggaaagactaccgttgtggctgggactattttcaggttaaaacgatgctctcccagaagtgtcaacgggctggcatcgtgtttacaacgaagcagatcggtgcggtggaggagggcgcgaagccagccaccatacctcgaaaaactgcctaa

SEQ ID NO: 66435 - DNA, 22 bp, unknown
  Direct Repeat
gggaatcaatagggaatgcggg

SEQ ID NO: 66436 - DNA, 22 bp, unknown
  Direct Repeat
gggaatcaatagggaatgcggg

SEQ ID NO: 66437 - DNA, 1401 bp, unknown
  TnpB Polynucleotide
atggacatcactatcaggctccgtatctcccgcgtcatcaatgccggcaagaacgatttctacaagtctctgcggcagacgctgaacctgtccaggcgtatagcgaacatggttttgactcattgtgcgaccgacgacccagcgatgtccaatccggtaagtgaaaagattgccaaggccggaaagctttatgcgtatccgcatatcaaggcgctgaatcgtggtggctacgcaatcgagctgtcaagcttggctcgccgctacgagaaggtctacaaagacgcgcggttcgcaatttggcgcgggacgaaacaactcccgctggtgcggtcagcgccttggcccctgttacacaacaagtcgaccaggagattttcactaagagaaaccgacgatgggcgtctggtcatgacgctcagtctgcgcagcgataagttcgaggtcgagctgaaacgtggctcgaattatcgcgaccaagtatctggtgtcatcgatgcgatgaagcgtgacgcaatcggagactcgtcaatctggatcgaccgcaatggtagggcaagtattggcttttccgtggacgtggagcccgaaaaaccaagggttgcgcggggcacgctgcgggcgagcacttcgcgcgatgcgttcttggtggcgatgaaagaacgtgatacaactccctggacgatcaacgctgaccagatgaggcgttggcaacgcgagaaggaaaagcgttaccagcgactgcggcaggaccgcaaggcggatgtgaagctgggccgtcccgccaatcaggaactgcagcaggtggcgggcaagtacaaccgccgcatgcagacattcgcgcacaacgcggctcgcgcactggtggactatgccattcgccgacgtgtcgccaagcttacgctggacgctacggtcaagagctacgtcaagaaatttccctggcacgacttcgcaaccaaggtggcatacaaatgtgaaatggctggcatcgaatttagcgaaataacgcaaacggtcttggatccttccaccgacaagccgcacgtgtatttcaagtattcgcccatgacaaatcgcgtaaagattgggaggaccggtgtaggtgcagcgcgccacaaacaggcagagactgatagccccgatgatcaacttaccatcctggctctcgacaatcagccgaggaataagctagtggcgcgagagaaatattggcacgcctatttctccagcgcgaaatccgataagataaaacaacgtgaatggtacgaggcggaaccaataattacttggttgcgagaggctgagtggctcgggaattccgggaaccgctcgcaaatcgcacaagtcctgggcacatcggaagatggagtcctgagcgggccacctccaggcccaagatga

SEQ ID NO: 66438 - DNA, 36 bp, unknown
  Direct Repeat
ctggtcgagtcgattgatgctgaggtgttgtgccgg

SEQ ID NO: 66439 - DNA, 36 bp, unknown
  Direct Repeat
ctggtcgaatcgattgatgctgagggacctctgagg

SEQ ID NO: 66440 - DNA, 36 bp, unknown
  Direct Repeat
ctggtcgaatcgattgatgctgagggatcctcgacc

SEQ ID NO: 66441 - DNA, 36 bp, unknown
  Direct Repeat
ctggtcgaatcgattgatgctgagggcgcacacctg

SEQ ID NO: 66442 - DNA, 36 bp, unknown
  Direct Repeat
ctggtcgaatcgattgatgctgaggggattttgatg

SEQ ID NO: 66443 - DNA, 36 bp, unknown
  Direct Repeat
ctggtcgaatcgattgatgctgagggggttccaggc

SEQ ID NO: 66444 - DNA, 36 bp, unknown
  Direct Repeat
ctggtcgaatcgattgatgctgagggcgcacgcctg

SEQ ID NO: 66445 - DNA, 36 bp, unknown
  Direct Repeat
ctggtcgaatcgattgatgctgagggtgagtgtcgc

SEQ ID NO: 66446 - DNA, 36 bp, unknown
  Direct Repeat
ctggtcgaatcggttgatgctgaggggtagacggcc

SEQ ID NO: 66447 - DNA, 33 bp, unknown
  Direct Repeat
ctcgaagcatttggtcgaattgactgagactga

SEQ ID NO: 66448 - DNA, 33 bp, unknown; identical to SEQ ID NO: 66447
  Direct Repeat

SEQ ID NO: 66449 - DNA, 33 bp, unknown; identical to SEQ ID NO: 66447
  Direct Repeat

SEQ ID NO: 66450 - DNA, 33 bp, unknown; identical to SEQ ID NO: 66447
  Direct Repeat

SEQ ID NO: 66451 - DNA, 33 bp, unknown
  Direct Repeat
ctcgaagcatttagtcgaattgactgagactga

SEQ ID NO: 66452 - DNA, 33 bp, unknown; identical to SEQ ID NO: 66451
  Direct Repeat

SEQ ID NO: 66453 - DNA, 1203 bp, unknown
  TnpB Polynucleotide
atgacttgctgtaactgtcaacggttaggcaagagcgaacgattgccgcacgggtggaaacggcttcgggaatgtgtttattgcgacgtctgctggcgggaacgatacaccataaggtcggtcgcgataccggtcgccgagccgatcggcgcagcatggccggagtttcgtgaggcgctccagcaaggatgggcacaggcgacgacagccgcgaattggatgatgacagagctttatgcgcgggatatccgccgcaacggcgaggctaagatgccaccgatgggtcgcgtgtacctttacccggaggcgcgggtacgttttccgtttctcgcatcccaaaccgttgtcagcattgagaacgccgtgcaggctgcataccgggcggcgcgatatgaggttgtctggacatgcgcacggagtcttcccacctatcgctaccccttgccgctgcccgtgcataaccaatcctgggaagcaacggtcgccgaagagcggccagtggttcgaatccgtgtgggcgaccgttggtgggaattgcgcctcaagggcggtccccggttccgttggcaaaccgaggcttaccggcagatcgtatcagggcaagctaccaagggggaactcgcactctaccgggtacgggcgcacgatgggaaattggagagccggcccaatggcgatcaaagggtgaaatatatggtcatctgcaaaatggtggcatggctgccgcgggggaccgagcgagacgcgcacaaacctgcaggcgtgcttcgagtgtgtaccgcaaatgacatgttcctggtggcacgtaatctaaaggacgaacgcacctggcggtttcacggagatcacttacggcgctggaccgcggaacaccgaagagcgctccagaactttgcggacgatcaaaaggctgaacaacggcccgtgccatctttcgcagaccggcgcactgccgctgcgctcaaataccgcaatcggatgagcagcgccataagggaaattgcggctcagttggtgggctatgctacgcgacgaggctttgccgcaatcgcgtacgacgattccgccgcgggcttttgtcccgagtttccgtactcggcgctacgcgagcagatccgcacaaagtgcgatgaacagggattggagttcgaacactcgaatggaatcgcagaatctgaggagccggaactcttcgccagttaa

SEQ ID NO: 66454 - DNA, 1149 bp, unknown
  TnpB Polynucleotide
atgaaaacacgacaaagagtactagcgctgaaatgcgcgatcgattggcgagatgaagaaagcaaggcgctgtacaaccgccttcgcgatctctcatggatggctgcgcactacaagaacggcattatccgccgcaagtgggcggcgctgactggccaccgccttgccgatgcacctgaggatatgagccagatctccaagcactggcgcaggatcgggaagggcgaactgtccggtgcagcctacagtgccgccgagcgcgaggtggagggcgcatgggcgcgggatgggaagaagatgctcgccggcgcaccgctgtctcagtggaagaccgctgaatcgttgagcatccgtgggcacaagaaccgcgacgagtccggcgtgaggctggagtttgttgacggtcagtacttcgccctgctacaggcgcaatccgacaagtatcctggtggatgctggctgcgcgtgccggtcgccaagggttcagagaaggactggcagcgctgcatcctggatgcgatgtgcagatgggatgttccgatccgcaaggccaccgttcacctgaagaagcgtgggatcatcctgcggctgacctacgaagtcgaggttccgccagaagtcagcggcgatcgtgtggcaacgctggggccggtcacatcgacaggcggactgttttgcagggccgcgacggcaaccatggacttctcccacaagttgctggcgattgcagaccgcaaggagcactgggacggcatccgtcgccgggtaactcgccagatcggctggcggaaagggcacgctcgcaccaagcgggaagtcctgtcccgcatgacgtgggataactggctcgacgaccacctccacaaatggagccgtgaggttgcggcgttctgcgcatcgcagggatgcaagacaatccaggtggtcgatatcgacaccgaagattggccgaaattcaagttcaccgagcggctgaaatacaaggccgaggaatacgggatgaccgtagtggatggttatgccgagacggcggccagcgctactcgtgcggtgtcgcacgaggcgaagaaggcaaaacgggacgtgcggcgcaggcgcgaagcagtgtccgaactcaacgaccaactcaagaaaaggagacgagcttga

SEQ ID NO: 66455 - DNA, 1239 bp, unknown
  TnpB Polynucleotide
atgctgggccaagaggaacgggtaatgaaatgtcacaaatgccttcaatcgcgtgagagcgatcggttaccgcccggatggaagcggcatcgcgatgcagtctggtgcaaggcctgctggcgcgcagcctacattctgcgagcaatcacggtgcctgttgcggggccgctagacgcggactggagggaactgagggattgtcttcagatgtgctgggccgactccaccgctttggcaaactgggtggtgacggaactcgccaagcgtgatgtgattcgcgcgggcgaagcgaggatgccgaagttcgagttcgtgtatctctacccggacgcccgcaagagattcccacatctcaattgccaatctgtagtatcgattctgcaagcggtggatcgtcgctaccgccggcgccggctcgaggcgatctggcgatcgagcgagagtctacctcgataccgatatccgatgccttatccgacccataatcagggatggaaagtcatcaagcgcggcaacgactataccctgcgtgtccgcatgcagggagaaccatgggacctgcgcctccgcggaggaaatggcttcgggcgacagcagcggcagatggaccagattctcgatggttcggcagtgcagggcgaacttgcgatctatcgcgtccgcgcgcacgccggcgatcatcgcaatggcgcagccggcaaagcctcgggagagaaggccttctatcgcattatgacgaaaatggtggcgtggctcccgcgtgaggagcggcgcaagggcaaagggattgtgctatcgctgcgcacggcgagcgatcgattctggatcgcatcgtcgccggcgatcgaggatatctggcatctcaatgccgaccaggcgcggacatggattatcggctatgagcgattccgacaacgattgtcggaggatcgccggcccgagacgccccggcaccgcgcaaatcgggatctggaattgcgcggcaaaaagcatcgcgaccggattcgatcgttcgtgcagatgagcgtggccgggctggcgggctacgcgcgccgccgcggcgttggtacgatcatctatcacgatactgatcgcagctatttcccttcattcccctgggccgctgtggtgacggccctacagacaaaactggacgagtacggtattgcattcgagcacgcgagcgccgaggtggcgagcgaatcgccagacccgctcgcgaaggaggaacatgagtga

SEQ ID NO: 66456 - DNA, 35 bp, unknown
  Direct Repeat
ccggagtgaccgattgagatgacggtcactggggg

SEQ ID NO: 66457 - DNA, 35 bp, unknown; identical to SEQ ID NO: 66456
  Direct Repeat

SEQ ID NO: 66458 - DNA, 1221 bp, unknown
  TnpB Polynucleotide
atggtcaaggaacaggaagaagaaaagaaatgcctgcgtaccgccaattttgaagtataccttaaagacgacaaggatttttccaagaggaatgccataagggaagatatttggacttttcgccgcgcctgcgggagcgtggcgggcttgctctatatgcttgagtttgccatcgccaagcgcgaaatgtcacagtcgcataacatgaagctgctgcccgcgccggccggtgtggataacgaagtgcttaagcagcttctcgccgccaccgccggcttcgataagaagtccgccatttatgaactggccaagcgttgcttcgatgcgccggccacgccggtggacgccaagaaaaaaggcatcccgattccctggacgaccgcgccctggttggctgagatcgccagtagcgtgcaacgcgtggttgaaaaacgttggacttccaaagatgccttcattcccaagtgccgccgcaactggctggctttgaactatgaccgcaaatttcccatgttcaaatttcagggtcttcccctgcgggccgcgttggtgaattgccgcgactatgagatcgaattgacttggcgcaaggatttgcccattgttttcaagctgggcgaattggacccggtgcgccgcagcctgtggcacaagattaaaaaagacggctggaacacttgtgtcttaaacgagcgggacgggcagttgcgtatctctgtctgctacgaagtcgagcgcactatcgagaagctggaaaccaagcgtgtgttggaagtctcaaccggcgacaacccggataagttcttcgccctgcgcatcgtggaagggcacaagactttggtggacgatctttttgttgaatacaagaacgtatcggcgattgtggcctggctgaataaactcagcgtacagcaggataagctaaaagctgaactgaccggctgcggcttaaacaaccgcgttttcaaagccattcaggagcggcgcgacaacgtaaccaaagtgcgcgataacggcgtgaagaactggaatcatgtgtggagcaaggcgattgtgcgcgaagcgctgcggcggaattgcgggcaggtgcgcgtgcatgtgcccagcagtctgttcaagcgcgaatggcagtggagcgatttggagttcaaattgaaatacaagaccgatcaactgggcatcggattggaggtggtgcgcgagaaaagtgctgaaaaataa

SEQ ID NO: 66459 - DNA, 36 bp, unknown
  Direct Repeat
cctgtggttgaccgtagttggacgggtggctacagg

SEQ ID NO: 66460 - DNA, 36 bp, unknown; identical to SEQ ID NO: 66459
  Direct Repeat

SEQ ID NO: 66461 - DNA, 36 bp, unknown; identical to SEQ ID NO: 66459
  Direct Repeat

SEQ ID NO: 66462 - DNA, 36 bp, unknown; identical to SEQ ID NO: 66459
  Direct Repeat

SEQ ID NO: 66463 - DNA, 36 bp, unknown; identical to SEQ ID NO: 66459
  Direct Repeat

SEQ ID NO: 66464 - DNA, 36 bp, unknown; identical to SEQ ID NO: 66459
  Direct Repeat

SEQ ID NO: 66465 - DNA, 36 bp, unknown; identical to SEQ ID NO: 66459
  Direct Repeat

SEQ ID NO: 66466 - DNA, 36 bp, unknown; identical to SEQ ID NO: 66459
  Direct Repeat

SEQ ID NO: 66467 - DNA, 36 bp, unknown
  Direct Repeat
cctgtggttgaccgtagtttgacgggtggctacagg

SEQ ID NO: 66468 - DNA, 36 bp, unknown
  Direct Repeat
cctgtggttgaccgtaatttgacgggtgactacagg

SEQ ID NO: 66469 - DNA, 1266 bp, unknown
  TnpB Polynucleotide
atgggaataaaatgcacgcgcgtcgaaatacggcgactgaataacgacgccgaaaacgatgcgcgcagaaagatctggcgttcgatcgccacagagtgtctgcgggcgaccaattgcttttgggagacgtggtggcaatggcacctggccggtcagtcgcaaactgccctagcaacgtggatcaagactttaatcgcctggcatgatgccgaccccaaaacacgcggcaagaagccgccatgcccggtcaaagccatggccaaggaagcgagcaatatcatatatcatcgattgaccgagacttgccagaatcttcacacaagaactatcgtgctattgactaatcggctcacgaagagactcacgtctcagcgatccgcacacggaagcttggcgtggtggtgcaatttacttttgtatcgcgagcgcactcccgcgagtatcgatccgcaacctatcccattcgacaaagccaattcgaagctattgccaccaactgaatctggtggaaattgggggatcgagttgcggttagctcgcgtggccaaaggcatctcggtttcgcaattgtgcgagctatggacgtccggcaagaaacgccactcgatcgccacgatcctatcacggatcgcttcaggtgagtatatcgcgaaggggagtcaattgcttttggtgcgtggcaagtggtatgcggccctcagctatcagatgccagatgcggacaaagtctcactgagtgccgcgaagcgagctattctgcttccaggccgcaatgatccttggcttctgcagatcgagggcggagtgtattggcggggcgggacaggccgccacatcgctgccgtgcgcaagagagtgattcaggaacggagagaaagacaagaaaattatcgttgggccgcaactgcccagaagggccgaggccgaccgcgtgccactgcggcctggacgagactgcggagcgtctggacccactgctgcacgaactacaaccggcacgtcgccaaggctatagtggacgagtgtgtgcggcgcggtgtgggacagttggaatattggcagcctgagggaaaacgtagtgactctcgtttcctcgggcgagctggcaagttcgatggctatcgggatcagaccacgtatccctggtaccagatggccttgttgctgtcggataaatgcgtcgaaaaaggaatcacgttcgcggtgcggaagttcggccatgagacaaaagaaaatcccgctgacgacgtactgcagactgtgtag

SEQ ID NO: 66470 - DNA, 29 bp, unknown
  Direct Repeat
atctccgcgaggccaagctcctccgggcc

SEQ ID NO: 66471 - DNA, 29 bp, unknown
  Direct Repeat
atctccgcgaggccaagctcctccgggcc

SEQ ID NO: 66472 - DNA, 1323 bp, unknown
  TnpB Polynucleotide
atggggagaaagaaattaagagcggtcatgaagctgaagcttggcgccgtacgagggatgagccgccgtaagctctccgcgcagctgttgcgtgtggctcgcgacgtcaaccggtcgaagaacgcgatgcagctctactggttgcagcggagacaggcgcacccggagtgggcgccggaacaatcgcgggacaagaaagggcagctcaagttcgatgagaacggtaagcccgagatggagccgcaacacgcgtcgcagcagctgggcaaggagatgtatcgcgagggacgtcgtatatcgccacacatcaacaccagcgtcttgtcgctagcccataaggcattgctgggacgcctggcggatcgtgtaccctacgaccatgacggggatgccgactacgtgtgggaagcgatcttggcgttcgagcgatctatggcctgctatcgctcccggacagttcctgtgcccaacaacagcgctacgttgttgtattgcgggcagtccgcgaagaagctctcgccaggcgtgctgaaaagaactcgcgactttgcaggttcgagcgcggttgttcggttcccgctgtggtccaggttgtcgggctacaagacactggacgtcgtggcgcgcattcactgccgcgacttgggtaacggcaatcgtcgcctgctccgcaaagtgatttctggcgagctgaagttttgtgattccagcctcgtgtacaaggacggcgaatggttcttccacctgagctacgaagtaccgatcgttgatcaccatctcgaccaggagcgagtagcgacggtgtatttgggtgccagcggaaagttgatgatcgacttcgccggagaacgttgtgagcagctggggcactacgctatgctggaatcggagtaccggcgtctggtgatacgccgcaagtcacagcgatatcgcagtcgttacggtagtgggcgaggtcacgggaagggcaggttctacttgcgtctgcgtccttacgcgcatcgttggagcgatatgcaaggccactttcgtaaccagatgctgtcgcggctgatctcgcagtgtcgtttccacaattgtggtacggtgcggtaccgagagccggggttgggtctgcggaacttgagttggttcgcaaagacgggcgtccctatctgctggacgacgttgctcaacaccatgacgttcatgtgccggaaaaactcgatcgtcttcgagaccgcgcggatgcacacggcggagtggaagggcgaagcgccagcgtggaagccgcctaagaaacgaacgaaaagaaagagaaaggaaaagattaaaagtgcctaa

SEQ ID NO: 66473 - DNA, 28 bp, unknown
  Direct Repeat
ggctaaatcaacaaacaggtaatgagag

SEQ ID NO: 66474 - DNA, 28 bp, unknown
  Direct Repeat
ggctaaatcaacaaacaggtaatgagag

SEQ ID NO: 66475 - DNA, 28 bp, unknown
  Direct Repeat
ggctgaatcaacaaacaggtaatgagag

SEQ ID NO: 66476 - DNA, 28 bp, unknown
  Direct Repeat
ggctgaatcaacaaacaggtaatgagag

SEQ ID NO: 66477 - DNA, 28 bp, unknown
  Direct Repeat
ggctgaatcaacaaacaggtaatgagag

SEQ ID NO: 66478 - DNA, 28 bp, unknown
  Direct Repeat
ggctgaatcaacaaacaggtaatgagag

SEQ ID NO: 66479 - DNA, 28 bp, unknown
  Direct Repeat
ggctgaatcaacaaacaggtaatgagag

SEQ ID NO: 66480 - DNA, 28 bp, unknown
  Direct Repeat
gactgaatcaacaaacaggtaatgagag

SEQ ID NO: 66481 - DNA, 28 bp, unknown
  Direct Repeat
ggttgaatcaacaaacaggtaatgagag

SEQ ID NO: 66482 - DNA, 28 bp, unknown
  Direct Repeat
ggctgaatcaacaaacaggtaatgagag

SEQ ID NO: 66483 - DNA, 28 bp, unknown
  Direct Repeat
ggctgaatcaacaaacaggtaatgagag

SEQ ID NO: 66484 - DNA, 28 bp, unknown
  Direct Repeat
ggctgaatcaacaaacaggtaatgagag

SEQ ID NO: 66485 - DNA, 28 bp, unknown
  Direct Repeat
ggctgaatcaacaaacaggtaatgagag

SEQ ID NO: 66486 - DNA, 28 bp, unknown
  Direct Repeat
ggctgaatcaacaaacaggtaatgagag

SEQ ID NO: 66487 - DNA, 28 bp, unknown
  Direct Repeat
agctaaatcaacaaacaggtaatgagag

SEQ ID NO: 66488 - DNA, 28 bp, unknown
  Direct Repeat
ggctaaatcaacaaacaggtaatgaaaa

SEQ ID NO: 66489 - DNA, 33 bp, unknown
  Direct Repeat
ttcgctgcaattactgtcgctgttacgacgtcg

SEQ ID NO: 66490 - DNA, 33 bp, unknown
  Direct Repeat
ttcgctgcaactactgtcgctgttacgacgtcg

SEQ ID NO: 66491 - DNA, 1854 bp, unknown
  TnpB Polynucleotide
atgctcttgagcatcgagctcacgcgtgtgcgggtttcggggagcgccacctgcgacgcgcttgacagacaggtcgagtccatgcgtgtgcgggtttcggggaagggcattgagcaggtttccggcatacctagtgccggccttggttggccgagcaaagagcggcgtatgctgctcacctgtgcgtgtgcacaggcgccggtgtggctggtcgtatcctgtattgaaaggagccatgctatggcaggaccgcaggtcgtaagtcgtagaaaggttctgacgggacgcactgtccagaggggcatgagctttccggttgtgatcgacggtgacaagtaccggcaagttgccaatatggtgtcgagctatcgcaagctcttcagggagttcgatgccatggcagcgatgagccaggccatgacgtcgaggttggtcgtgcggaaggtcaaggtggacgcgaacggcaaggtaatcaagccgtccaagaagcccaactccgcgaagacagcgaagtcggatctgccgccggtcctgacaaggatcaagacgaggaagaagacggccaagaaggtcaagatcgagaagcgcctgcgtgccaatctggacctgggcgcggccaaggagttgctggaagccctgctgggcaccaagccgcgtaaggccatctactacgagatgcgcaagccgttcatggaggcggccgaagagatacgcaagctcggcgtcagcctcggcagtcacatgttcgattcgctgcggcggcaggtacactccatccgcgacaagcgcgagccggcctacggccgcataccgcggcgtgtgttggtcgctctcggcgtgatggatcttttgccggcacagttcatcggcgtgccgttcgtgacaaacgatcccaagaagaagcctgacggggggtggacgtcgggcaagcggacggggatgttcatgaaggacgatctcggtcggttgatcattcggctccagtggggtcacaaagaggatcacgctgacttcatcgtggacggcaagacgtgcggcggcgtgaagacctactcgaagaaggcggccgattcgcagaagctcgcctttcacaagatgtactccggcgagtggtcgtaccagacaccggtgctcaactggcggcgtgatggttccttctccatccacgtgtctttccgtcggccggcacccagagacaagaacctcgaccgcgataaggtcggcgaggtcatcttccagtccatcatcggcagggatctgcccaagaagaagaacgacaccgggcgggatgacgacaagatcttcgcgatccatgcttaccgcgtggatcgggcgggtcgtggcaagaagcagaagtgcgcgttcaagcaggtcttcaggattccggtcaacgacgtggttgaccacctgagacggctcaacgccatgtcccactcgcgcgaggtcagccgcgacacccgtcgctactggccgaagcacctggtcaagccgctgcaggagcgcgtacacagggtcaccaagcagcgtgcgaagatccagcaacaggccaaccacacctggtcgaggcgggtcgtttcggtgctggcgtcctggggcattgggacgatcaaggtcttcggtcctccggacggcgctaccgccggactgttgggcgacggagcgtatccgtggggttggcacgacttcgttcaaaagctgacgtacaaggccgaagagcggggcatgcgcgtcgaggtggtcaagagcaacaaggtcgtcgggcggatcacggatcagctggtggctcgaaagctcagtccaaccatgcccgagccgcaggctgcagcactgccgaaacctggcgtactcatatag

SEQ ID NO: 66492 - DNA, 18 bp, unknown
  Direct Repeat
atcgagctcctgcgtgtg

SEQ ID NO: 66493 - DNA, 18 bp, unknown
  Direct Repeat
atcgagcccacgcgtgtg

SEQ ID NO: 66494 - DNA, 18 bp, unknown
  Direct Repeat
atcgagtccatgcgtatg

SEQ ID NO: 66495 - DNA, 18 bp, unknown
  Direct Repeat
gttcagcctacgcgtgtg

SEQ ID NO: 66496 - DNA, 18 bp, unknown
  Direct Repeat
atcgagttcacgcgtgtg

SEQ ID NO: 66497 - DNA, 17 bp, unknown
  Direct Repeat
ttgagcccacgcgtgtg

SEQ ID NO: 66498 - DNA, 1212 bp, unknown
  TnpB Polynucleotide
atggggcaattatggtgcaattcgtgctggcgaaagaaatacgttattcgagccgtaactattccggttagcgggcccatcgaccccgaggagtggccggaattccgcgaggcgcttcgcactgcgtgggcgcacgcaacgaacattagtaattgggcgcaaaccacactttacgcgtcagatgttcgccggaaaagcgaagacaaaaaactggcgcccatgccaaaaatatacctttatggcttggcgaagtctgaatatcacgcgtgggatgatggaacaatagacaaggcgagtgcgggcgacatccttacccaagttgagcagaaatatcgctcacagcgctacgaaatactttggctagcgtcgagaactttatcgaattaccgataccctcagccctttccgtttcggccggaagggatcaaaatcgataaaatcgacagccgtatctgtgttgaaattcgcgtcgccgggcgtcggtggaaagtcaggcttgcgggtagtgaaaagaacaggcgacagcttgcgggtatccagcacttgatggacaatcccgaattgatggcgcagggggctatttatcaagtcaccgcgcacgggtcggacaatcggaacggagacaggggaaaggacaacggaaccggcattaaatggaagacgcgaatcatgctcaagttcgtcggatggtttccggtgaagcacaaggagcgcgacggcgacctgtttgttaatacggacgttgactcactattggtggcgatgaacacaaggaaagataagttgtggttttacaacggggaccacgcgaggcgcctttgcttgaagcatcaggaccacatgagacggctccagcgccgcgctgatgacaaaaaacacgagcgacgcaagccccgaaaaaagaatgcgagatatcgccagaacgtgagcgacatttcacgaaaagaccgcaatcgaatgacctcgatttgtcacgaggtaagcgcgtcggttgtcggattcgcggcgcgctcgtcgttgtcgcgaattgtgtacaatgactcagagcgttcgttttccgcatatttcccgtgggcgaaactccgggaaatgattaagcaaaaagcggctttgcacggaataaccttcgaggtggcggggaaagagggcgacggcgacggcgacaaatccaaaaaggccaagaaaaccaaaaaggaaccggctcttacttaa

SEQ ID NO: 66499 - DNA, 1344 bp, unknown
  TnpB Polynucleotide
atggcgatacgaaccatgagattgcgaatccgaattgacggtaaggatctcggtttgttttacagttgtgcgcggcaagtggctcgatgtcgcacaatggcaatgcaactacttcgcgcggcggatgcagaacgaccgacaatgattcggccggatcatccgcacaaaaagaacgccaaaggcgagatgaagccggattggaagactattttcggcaacatgccggagatgccaccgccgcgaacgctgacttcacagttgaaacctcattttccggaactgactggcacaatgattggtaccatctcgtgtcggtcgtacaagctctatggcaagatgcgcattgatattctcacgggcaaaagacgcgtccccgaatggcgtgatgccgcgccgattccttttcgagacggatcacccaaattgagatgggatggcgatgacttttatcttgtgctgcctatatgccctatcggtgagcacaaatgtcggagggtcgaagtacttgtggaatcgcgaagtttgccacaagcgtatctcgatcgtttgcatgattacgccgctcaaaagccgcgccccatgccgacaaagcccgagaagactgtcacgcacatgccggctatcttagtttatcaatcaggcaatcgacacaagcggaaatggtttgttgacattccatttgacgttgctcatgaagatcatcccttagatgacaaccgagagctgctcgtcgtcgaaccgcatggagaactgggatttctgcgatgtttgttccataggaaacggggagtaccatggcacgaagacttggaatggcaatccgctttgcgcgccaaggagcacctcgaagagcgacgaaatgccattgcggccaagtacagatgctccgctgctcgaagcggacggcgcggtcacggcttcaagcgcgtaatggaaaagtcttgggcgctcaccaaaaagcgccgtgaccagcagatctcgttcaataacaacgcggccctcaagattgtgcgcacagctatccgatggaaatgtggcacaatcaggatggaagacctgagccaagtcaaagatcgtagcgtgctcgtgctcggcaattgggagtacggccacttgaatacgcgagttgccgatttgtgttggcagcatgggatttcgttctacaaggtaaagccggcttggttgctggcaaaggaagagtgtttggatggcgacgaaaatggaagaggaacagacgagcatgacgccgacggacgatcggttcatggaggcgtgggaacagatcgagccgttggttcatacgacaatggcagcctatcagaagttgggagaaaagctgtatga

SEQ ID NO: 66500 - DNA, 36 bp, unknown
  Direct Repeat
tcatgcgggaaggcgcaaaacgtggggtggttacag

SEQ ID NO: 66501 - DNA, 36 bp, unknown
  Direct Repeat
acatgcgggaaggcgcaaaacgtggggtggttacag

SEQ ID NO: 66502 - DNA, 36 bp, unknown; identical to SEQ ID NO: 66501
  Direct Repeat

SEQ ID NO: 66503 - DNA, 36 bp, unknown
  Direct Repeat
ccatgcgggaaggcgcaaaacgtggggtggttacag

SEQ ID NO: 66504 - DNA, 1413 bp, unknown
  TnpB Polynucleotide
atgccaacggcagtccttgaagtcaagctcggccgcccgctccagatgccggcgaagcggctcgaaaagctcctggagcaggcccggcgggactgctgccgggcgcgaaacgcggcgatcatgcactggtatcactggcgagtgacgcacccggaatggacgccgggtgcgccctacgacgcgccatcgccaaagcggaagctgtcgccccgcgtcgatcggcgtaaagagtcggcccaataccgccggctcgtcgaagagcacgcgaccgagacgaatccgaagaagcgggaccgactggccaagaagctcgcgaagtacgacgagcccatgaagccgcccacggattcgccggtcggtccgcgcctgtttctgtcgcgcgagctgtatgcggccggatgtgcggcggccatcaagctcgccgcgaatctcgcgtcgtcgtgcgtccaggacgtgctctcgcggctgaagtcgaacacgccctacgaccacgatggatcggcccggttcgtctggcaggccattctcgatcacgaggtgagcgtgccgacgtggcggggcgggaagatccccatgccgtccaaagagacctgcatcgggtacgacgggctggtgctgcccggcaagaggcccggcgcggccgacgtggcccgggccgcagagagtggggccgccatccggttcgccctgctttcgatggcgtcgggctatgccacgcggtcgccgatcgtgcgattggaagtcggcgacctgtcgctggggcggaagcgaatctttcggaaaatctgcaccggcgagtacaagctgtcggacagctccctgtacgagaagaagggcaagtggttcgcgcagctctgttatgaggccccgacggaagcggctggcctgcccgaggatcgggtgctgacgatcgggccggcgcaaccggacgatcggcggccgttcgtggcgacgtggctcgacgacgaggggcacgctcggcgatggtacttgggcgagggcaagccgctggtggccgagttccgtcgcgtcaaagcgcggcgtcgcgcgatccagtatcgctaccgggatggcatgggctccggtcacggccggcagcggtgggccagggcgatcaagcccatgagccgggcggtcgtggacatgcagtcgcgattcctgaagctgctgtcgtcggacgtggtgaagctggcgatccgcgaaggctgcggcacgatccactaccgcgagccgacgctgccggtgcgcacgaaggagtggttcgcgacgcaagacatgccgttggattggaccaagctcgagtcgaagatcgcgtcgaaggcgaagcaaaagggattgcggtacgaaaaaacgcggatcgggatgaaagaatggaaaccggacgacgaaagcaaaagcgcggccgccggctga

SEQ ID NO: 66505 - DNA, 39 bp, unknown
  Direct Repeat
cggcaacgggcgagaatgaacgggtgtgatgcgagtgtg

SEQ ID NO: 66506 - DNA, 39 bp, unknown
  Direct Repeat
cggcaacgggcgagaatgaacgggtgtgatgcgagagga

SEQ ID NO: 66507 - DNA, 39 bp, unknown
  Direct Repeat
cggcaacgggcgagaatgaacgggtgtgatgcgaggggt

SEQ ID NO: 66508 - DNA, 39 bp, unknown
  Direct Repeat
cggcaacgggcgagaatgaacgggtgtgatgcgagcggg

SEQ ID NO: 66509 - DNA, 1239 bp, unknown
  TnpB Polynucleotide
atgcagtgcacatactgctcaacaacaggcacgcacccaacccgactgccgcgcggctggaagcgaagccacgataaccacccgatctgcgcgaaatgttggggcgagcggtacctactccgagccgtgacgatccccgtcgttggccccgtcgacggcacctgggacgaactgcgtgaggatctgcgtgaggcctgggtcgacgccaccgccctgagcaactggctgatgactgaatattatgtgcgcgacgtgagacgcaacgaccaggccaaactgccgccacagccaaagacctacctctacccagaggcgacggcgcggttcccgtcgatcccggcgagcgttgtaacagcaatcgaccacgccatttcaggcaagtaccgggccgcacgctacaaattgatctggaccggagaggtctcgctgccgacctaccgctatccggcgccggtggtcataccctcccgagcttggcggcccgagtacggcaaaaacaacgtccccatagtgcatgtcacgctgcgacgaagcacacgacgatggacactgcgattgcggggaggccgggaataccgccgacaactggcggccttctcgcaaatggtcgctggcgtggccgtggctggcgagctagccctgtaccgccagagggccaacgcggccgaccaccgcaacggagtggccgaccgtgacagcggcggccaaaaggcaagctaccgcgtcatgtgcaagatggtggcctggttgccacgcgagccggcgagcaagagcgatggagtgctgtttgtacgcacggacaaggacgccctgctcgtcgcgctcaacgcgaaggacgaaaaggtgtgggtgctgaacgccgaccacgtcaagcgatggcaggccgagcatcgacgcaagctgaatcgctggagcgacgatcagaaggcggagaacaggccgcccaactttcaggcacgaagagaggccacctccacgaaacaccggcggcgcatggactcggcttgccacgaggccgccgcgcaattggtcaactacgccgcccgtagacgttttgccgtaattcggtatgatgatgctatacgcgatttcctggggcagttctcctgggatcggctgcggggtctgatacgcgagaaggccgatgccaaggggattgtgttcgagcttgtcgatgcccgcggttcggtggcgaaagacaccctcgcacctcccgcggcaacgcaagacaagttgtga

SEQ ID NO: 66510 - DNA, 1287 bp, Planctomycetes bacterium sp.
atgattcttgcaactcatcagagtaagcggatcggtgtgcttaaattgcaactgcaagcggcggacggaatgtcccgccgccgcatgtacgaaagtctcgcgaccgcgaagggagcggcgaatcgcgccaagaacgctgccgccctcaactggtatctgtggcgaacgcaaaacccacgctggcagcccgcccaacgcaccgacaaagacgggctgccgaaattcaaccagcgtggcgagccgatgctcgaaaacgcggcgttgtcgcaagcggcagaacgtgcgatgtacacggccgctcgcgccgccgtgcccgagctttattcgctcatcacgagccggtgcgtaaacgacgtgatcgacatgctgaaagccgacacgcccgacaaccaccctggtaaagcgaagaaggtgcacgaggcgattttgctgcacgagtttcagctcggcaattacaaccgcccacaatctcgcagcttcccagtgccgggtaaggcggtctatttgttttattgtggcctgtgcaatcgcaagagcgacggcatcacccggcgaattgaagcgttcgccgggagcagcgcagcggtgcgtttcccggtctggagcagagatgctgggcagcatcgcgtcgatgtgttggcgcgaattgcggttagcaaaatgcgaaaagcctaccgccatacgcttcgccggatcgccgctggcgacatcaaagcactcgattccgacatcgttgaagacggcggcaagtggtttttgcatttgttctacgagcggcccgcgaagatttccaatttggatgaaagccgcgaggccgttctcaccatcggcggcgacaattcgtttacgctgatgctgcccgatgcgacgccgcgcaagctcggcagtgacgaatacctgtacgctcagcttttgcgaatgattggccggcgtaaggcgatagaattttcgacacgattcggccaggggcgcggccatggccgtggtcacatccatgcaattcagagccgtagcaaccggcagcagcggcaccaaatccaagcgtttaccaacaatctgcgggctgacgtgatgaaggcctgtgtgcgcgcgaattgtggcaaactcgtctaccgcgagcccacgctgccgttgcgaaaactaagctggttcgcacaacaaggcatcgagtttgcttggcacgagttcggccccgagctgtcgcgtgtcgccgttcgcgaggggcttaaatttcgaatcgatcgcatgggagtgccggaatggaaaacaatccacagttcaccctag

SEQ ID NO: 66511 - DNA, 1269 bp, unknown
  TnpB Polynucleotide
atggacaagcagccgaaaaactgcggagaggtgttcgacctcatgccgaacaaggagcacaaggacgcgctctaccgcgtggccaacgtcgctacgttcgcggagaacgccatgtgggaagcgtggcgccgctgcgacccgctaactggccttgaagtcgccgctatgaaagcacaccgtaacgagtatggcaagtggccgaaaatagaacgctgggcactcggcaacggaaagcctagaactaacagcagcgggcaagaactcaagaccacggctccagccaaggggctgacgccaacgacatacgccaaggcactctgccccggacttcggagttacgtctacgacgccatagcaaaccaggtcgccaagctctaccagaagcaccgcttcgagttgctgacctaccagcggcggctcccggttgggcaacacctgcgaatcaggttccgggaaaaggcggtcaagatttcagttcaagacgccgaaaagggctggtaccaggtggagctgctcctggagcaagggccggcactcgttgtccccatcaagacggccggcaagtccgcggcctgcatggattggctcgctgagctagcggagtctggaggcaacccgtccggagggaccatcactctacgccgcaagcgtgggaagaacgtgtggcaactgtgcctggcaaggtcgcgtcggcccggtgagcgggagcaggtcaaggatatcgtggccggccggaccatgaccgtctgggcaccgatcgtccaagaggcatttctccgttggcagatcccgctccacaatcgggcaatcggcggcgagattgaaggccacgacctgcttgccatgaaacatcgagacgagcaggtacgccggcaaatggggcggcactaccggcagacccacagaggaggcggaatcggccacggccgaacgcgggcaattgcgggcaagttgcgttttcgcggccggtatgagcggcgggtacacgactggattgagaaccgatccgcagagatagtcaagatcgcgtccgaattccgttgcgagctgttgcaggtcgagaacctgtcatcacgcgacccgagcaagctgcttgttggtgctatgccgttgtacaggctgacacaacggattgagcagaaagcacacgcggtcgggatcaaaacgaaggtctttacggatatcgagtcggcagaccggttgttttccgagagtcgaaagcgcacaactacagagacggcagcgagttgcgagtgtgcgggtgggtga

SEQ ID NO: 66512 - DNA, 26 bp, unknown
  Direct Repeat
gcgggtgggtgagacggtagtctggg

SEQ ID NO: 66513 - DNA, 26 bp, unknown
  Direct Repeat
gcgggtgggtgagacggtagtctggg

SEQ ID NO: 66514 - DNA, 35 bp, unknown
  Direct Repeat
ggtgcgcgagactgtcatcggggatgtagacgcag

SEQ ID NO: 66515 - DNA, 35 bp, unknown; identical to SEQ ID NO: 66514
  Direct Repeat

SEQ ID NO: 66516 - DNA, 1182 bp, unknown
  TnpB Polynucleotide
atgatccgtagtctgaaaatcgaggtctatccgaaagaaaaaacggactggccaaagatccgcgcgatgttcgcggagtaccgggcggcacttcggaaagcattcgccgcgcatgcgctcaccgaatgcgcggcggcggaaatcatcccgccgaagggaaagcgcaataccgtgctaaaggcgacgcagttggccggaaaaataagaaggcaactgtggggcgggaaaagcgaacaacgcggggtgcatccgtttatgatcgaggccttgccgtcgttcaacggcatggcccgcgattgtgcgaccacgtttatcatggattcatggaaatctaatgatccagaattccctactgcgccgcgcgggtatctcatcatgcagggcgcccggaaattcgcggtcatgggaaatgccgatattcgcgtccgcaaaactcacacaaaaatgaatgaacacgggatatcgctttgtatttttgccgatcaaagctcgctagaattgaaggtaaaaacactcgatcctggccgctggggacgctggaaaaaggttgtaaagggggacttgaaatgcggtgatccgatccggcttgggcttcgagacggaaacctttttctctacgtgccgtttcacgaggaggatgcaggaccgcgcgagatcgacgctacgcggatcatggaagtctcctttggcgataccaaggaaagagcgatctgcctgtcattgcgcgagggacacaagaccttgttggacgagattgtccatcgtgagattgacgcgaacggcgcctgggcgggcttgctgcggcaaaacatgcagaaggaaaaatgcactgcggaacgcaaagcctgcggccggcgcggacaaatcggcgggatcggacatgagcgcgggtacgacgcaacaaccggccggctgcatcggcttacggtcggacgcgacaatttctgcaagacctggaatcacgtctggacaaaacgaatagttaaacaggcacacgactggcgctgcgggaaagcgcaggtgttcgggccgccggcggacttgtgctccgaatcgtggccctgggcggatttccgggcgaagctcgactacaaggctaaagccatggggctggccatcgaatatcttccgcgcgcggaagcggcggaactgaaaaaggataccaccgctttttggaggtga

SEQ ID NO: 66517 - DNA, 1260 bp, unknown
  TnpB Polynucleotide
atgccaatcggcattttggaagtcaagcttggacgtccggacgggatgccgcagcgacggctgtggttgctcctgaagcaaacgcagcagaagtgcagcacggtacgcaatgcaactatcacgcattggctggtgtggtgtcggttgcacccggactggatgcccggtggtgagtatgaacccccgccccgccgcatcaagcggaagccgaaactcgtcgatccagcgacgaaaccggcgaaggatccaccctacgcgccccgagagttcctcacccgagagctgtattgtgtgggcactgccgcggcacccacgctcaacaccagtgtggcatcgtcctgcgtgaaggaggtcagtgaaaaactgcgtgccaagaccccttataaccacgagggggaagcgaggtatacctggcaagcgatcctgtctagcgagatctcgctgccgacctggcgtagcggaaaaatcccggcgccgcgcagcgtgacacggctggtgtataccgaggacaagtgctcgttgaaagtttcgctgctgagcagacagagtggctacaaactgctcgctcccacggtgaatcttcacgttagcgatctcaataccgctcgtcggaagatcctcaagagattggccagtggtgatctgcggctggctgacagccagctcgtggagcgcaaagggatctggtatgcgcagttgtgctacgatgtgccggttatgggtctaggcctgccagtggaccgtgtactgacgatcctgccgtcgttgcctgaaggtcgacgcccgttcgtagcgatctggctcgatgagcagaatggtcgcgagaaaacctgggcgctcggcaatggattgccactggtcgcggattatcggcgggttgtagcccgacggcgagcattgcgggaccgctactccgacggttgcgggactagtcatgggaccggacggtgggcgcgaacgatcaagccactgagccgatacgtagtggacatgtgctcccgtttcagcaagcagaccgtggccgacatcatggccctggccctccatgagcggtgtggatctatcgtgtaccgagagccgaccatgccggtgcgtgaacactcatggtttgcggaacaggacgtgccgatggactggacggcgttcgaggcacgactggcattcaagtgtcaagtggctgggatcacatatcccgatccacgcaaaaaccggatagggatggcagaatggcggccaaagaaagaaaaaaacgccggctga

SEQ ID NO: 66518 - DNA, 36 bp, unknown
  Direct Repeat
gttgaggccgacgaacgaaacgaaacgtgatgcgag

SEQ ID NO: 66519 - DNA, 36 bp, unknown; identical to SEQ ID NO: 66518
  Direct Repeat

SEQ ID NO: 66520 - DNA, 1425 bp, unknown
  TnpB Polynucleotide
atggcagttggtgtcatcagcttgaagcttggtaagtgtgtaacggctcccaccaagcgtatgattaaagatctcaacgatatcgctgagaagaaccgcgcagtcaagaacgccatcgcgcgcacttggatcacctttcatgatgataatcctgaatgggaaccggggcaagcgatcacacgtgatcgcaagactggcgaagagactttgaaatttgacgccaagggtaagccgatcatggaaattggttttggcccctctggtcttgggcgcgatctttatcgtgctggtgtcgctgctgaaccgaaactgcacagtagcatcacatcaatggcctcacaggcagtgattaagaagttgcaagctaagatgccttggaaccatgatggctccgctagatttttttacgaagctatccttgcacatgaagtgcatctgccacgctataataaagggtctatccacttcgctcctgcagaacttgcttttgcctataagggagaatgcagcccctgtaagatgaaggctgtcggtgcacgtatgaccgaccttggtcagcattatgctgttgttcgtattccaatgtggagtcgtaaaagttctagggatgagaagggctgtattttccgagtagaagtgcgccaaatgtctcgcggtaaccgtaaattgcttgaaggcgtcgccaatggtgaagttaaactccgtggtagtgcgttggtttatcgagacaaagacaagtcttggtactttaaccttacatatgacgcacttaccaagaatcttgaactcaacccagaaaatgtagcgactatcacgatgcttgccagtagcggcacaaacccattcgcaatcaattgtggtaaggttcgttggactcttggtaaagcgagaatgctggcgtaccagtatgatcgagtgaaaattcggcgaaataatcttcgtgagcgttatcgcctcgcggatggaacgggtaaaggccatggtaaaaagcgattcttcgagaagacaaagccgatgagtcgagcctttgttgacttgcaggctgttttcactggcgatctggttgcggaagttatcaagttttgtaagcgatatgattgcggaacagtaatcttccgcgaaccgaccatgcctctgcgaaagcacgattggttcggtaagcgtgatatggctttcaattggactttgctcaattccaagttggttgataagtgtgctaatgttgggattggcttgaaaatcaatccaaagcctgatggtaggcttggtatgaaagagttctttgaaaaatatccaaacagaaatactaaggagcttgtcgaagcctcttctgaagaatctaataaaaaagtaataacgcttcataagtcaaaacagcgaaagctgcttccagaagttcgagaagcactcaacaagcaatcataa

SEQ ID NO: 66521 - DNA, 1281 bp, Rhodopila sp.
atgtcaacaagcacccaattgatttgcgcggtcacaggcaagactttggaagccaagggcatcaacgccgacggctctctaaaacttgcgatgggctggaagcggctgcgcggcgagacgctttcgcccgagggcgtggcggctaggtacgtacggagagtcatttttcttccggtcctcaaaccgttcggcgaaattacctggaaggattttggctccgccgtcgatgaatgcttccgcgagtccgcccgcatggcgaacctggcgatgcggctgtacgccatcagcgatgtcgaaccgccaaccggcacggcgggcaagatgaagctggcgaaatggaagccgagcaatgaggtttatgcaaagtgccggcagctttgcccgtcccatccgagcggcagcgtcacggatctgcttcaacggcttcagggcgtttacgccaagtcgcgatttgaaatgcaggtcacatgtcgcaaatccctgccgagcttcagtcgcgggcgactcccgatgagcgtaagggcgcagaactggagggctggcaaggactccgatggcaatttgctttgcaccttcacgctcggctcgctcgattccgatggcgttcggcgcgggccgctgacggtgattctccgccggcacaaccacgagcgacacgcgaagatttatcagcaggtcgtcgagggggaaatcgagtcggctgacatgaagatcaagccgtgcaaggacggccttggaatagcggttactgtgatgctgccgcgaaaggccgttgctggggctgacggcgtcttgcgcgttcgcaccgatccggcgtcgtttttgatctggacgatggacgaggacgaatctcgcccgccgctgcattgcgacatggttcggcgaatgatcgcggctcaggatgcgcagcggcagagatggtctgacgatttgaagttcgagaatcgatggccggctcatgtccgccgccggatggtccatcgccgagcgaagatgctgaaaagttgggagaatcgtcgggtgaacttcatccgcgaggcggctcgtttgacggtgaattttgccaaacgccgtcgcgccgctaagatagaatacaatgattcggaacgatctttttcgccgcgcttcgcgtgggcggaattgtcggcagccatcgccaacgcggcggctgctgatggaatagattttgttgttacggctcctgccgagccgaagggcgatcaaggccgcggtcccgagcaatcggataatagcgccgtggtgcaatcgccagagccatga

SEQ ID NO: 66522 - DNA, 1611 bp, unknown
  TnpB Polynucleotide
gtgttcgccgccagcgccgcaagatcgtcgcccggcagcacacgtacacggcgcaggaatacgagatttccggcggtcggtttgtcatcaagggcgggccccattgcagcgttcggatggcgctcactcgcgacatttacgacgcggctcggcgacattttgaggcgaccgcggaggttgcctgagagggtttcgtttcacggccgtctgcgcggccgacaggtgagctcgcgacgggcaaaaagcacgccgttctcaccaagcctcacttccggcggcccggtctacgggccgggccgccaaccgttgaaggtggagataatgcaggccacgaagacgcgaatcaagatggcgaccgtcgaactccggttgacgcgggagcaaagcgctgcactgcgcgatgcggccgtgctcttcgttgacgcgaaacgggccgtctacgaagcgctctacgcggcggaccccgttcggtacgtcgatgcgctcgatctgcggcgacgacaggcgacagcgggagaaaaggccgcaggtggagcgcgatcgctgaagctgccagattggattcctgaaaaatcgctcggtacgggcagcatgtccacctatgacgttgcgctggaggtgttcaagcgatcgggtcgcgcgtattactcgcatgtcgccaaccaggccgaacaggattccgtgaaagactacagacgctggcggcaggacatccgcaagcacaagcgcaacgtgccgaatcccaactcgctgtcgtttcgcgttcgggataaaggttggcgtctgtctcatctttatgatgaccggttcgtaatcgagctgcgcctcatcaaggatgagccgttgcagattccattccggactcgcaccatgagcgacgaggcgcacgagtgcctgttgcgcattgccgccggagacgctcgacaagccgcggtcattctcagcagtccgtttgtgcgtgatttcaggcccggcatccagtgcaacaagaagaaggtctggtcgctgtgcattcccgtttctgtggcggatgtaaagccaattgcctccccggttgctggtcggcaactgctcatcatcgcgcccgagtcgcaggatgatggcgtgtttctggagtgccgcatcccaggcgcgggctaccggcagagtgattacgtcgaatcagtcagcggtcacgacttggccgtgcttcgacagcgtgaacaggcggcccgcagaatcttcggccggcactggacgcagacgccgttgtctgcgtcacacggacgcggccgcaagcgagcgcgtcaaggtctcgacagacggcgtgctcgttacgcgaacgctcgggataactggatcggcaacacgtccaagtaccttgtcgacctggccgtgaagaaacgatgttcggcgattcggatggaggatttgacgcaacgtgatcccgagctgcttcgtcccggcgcgtttgcctactacgcgtttcaggaagcgattcgccaaaaagcaaccgccgccggcctgtcgttcacgctgttcgtgcagtcttcgcaggccttttcagacgcaatggccgcccaggacgagagttgcgtgttatcaggtgtcgaagacggagatttagagtga

SEQ ID NO: 66523 - DNA, 35 bp, unknown
  Direct Repeat
gtgtcgaagacggagatttagagtgaggtcgcagg

SEQ ID NO: 66524 - DNA, 35 bp, unknown; identical to SEQ ID NO: 66523
  Direct Repeat

SEQ ID NO: 66525 - DNA, 35 bp, unknown; identical to SEQ ID NO: 66523
  Direct Repeat

SEQ ID NO: 66526 - DNA, 1263 bp, unknown
  TnpB Polynucleotide
atgctgaccgtcaccagtcgctgcacgtgctcgcggtgtgccgtcgagcgcgacggcaagccggccaaggacggctccgccaagctgccgcgcggctggaagcggtggtgcgacgcgctctggtgcgacacctgctggcgtcgcgggtggtccatgagggcggtgtcgatgccgattgcgtcggccgcacgggatggcgagcagatcgagcgcagcgcgctgcgcgatctcatccgggcagcctgccagatggcgtcgaccgctgcgaacatcgtcatccgcgagtgtgtcgcgacggacatcgtcaggcttccgggcatggccaagctgccgccgatgccagcgttcccgcctggcccgacgggcaaggcatcgacgcacgtctaccaccgcgtccgcgccgcgctgcctgacctcgacccacagagcgtgacgagcatcgtgcaggccgcgcagcggaagtggagcgcgtcgcggttcgatgtcgtctggcgtcgctcggcggcgccgccgtcctaccgcgacgacatgccgtgcccgatcgcggctgcggcgacgtctgtcgcgatggacggagatcgcgccgtggtgtcgatcaggctcgggcgcagccgcgtcgcctgcaccatggtgcagggtgccgagtggaggcgtcagctcgcgacgctgcgccggatcgcgtcccgcgagtggcccggcggagaggcatcggtctacctgcgcgacggcagaccgatgatcaaggtctgtgcgtgggtgccagtctcggcaccgcgagagaccgatggcgtgctctcagtgcgcacctgcggcgaccacatgctcaccctgacggtcggtcagacggtgcgcagagtcaactgcgaccgcgatcgccggatgctggagactcacgatcgtcggctccagcgctggagcgacgacatgaagccggaggtcaggccaccgtcgatggtcgctgagcacctgcaggaggatcgcgagatcgcgtgtcgcgcgcgggctcgcgtcgtcgacacgctgacgcacacgctgtcgtcgatcgtcgcgggactcgctcgccgccgtcgcgtcgcgcgagtggtgtacgacaacaccgaccggacctacatgtctggatcgttcccgtggcacatgctggctgagcggatccgccagaaggtcgcggcgaacggacaggagatgctgaccatcacgcctgacgcgagcacgagggtggtggcaccccctcaggagatgctcgcgagtgaggcgggacaatga

SEQ ID NO: 66527 - DNA, 37 bp, unknown
  Direct Repeat
ccccgcggtgcctcgatcgacgatcagggactgtggg

SEQ ID NO: 66528 - DNA, 37 bp, unknown; identical to SEQ ID NO: 66527
  Direct Repeat

SEQ ID NO: 66529 - DNA, 37 bp, unknown
  Direct Repeat
gcccgcggtgcctcgatcgacgatcagggactgtggg

SEQ ID NO: 66530 - DNA, 37 bp, unknown; identical to SEQ ID NO: 66527
  Direct Repeat

SEQ ID NO: 66531 - DNA, 37 bp, unknown; identical to SEQ ID NO: 66527
  Direct Repeat

SEQ ID NO: 66532 - DNA, 38 bp, unknown
  Direct Repeat
cgcccgcggtgcctcgatcaacgatcaggactgtgggt

SEQ ID NO: 66533 - DNA, 37 bp, unknown; identical to SEQ ID NO: 66527
  Direct Repeat

SEQ ID NO: 66534 - DNA, 37 bp, unknown; identical to SEQ ID NO: 66527
  Direct Repeat

SEQ ID NO: 66535 - DNA, 1182 bp, unknown
  TnpB Polynucleotide
atgcgaaaaaaagagaaaaaagaaaacttgaacaggtctttaaaaatagacttggctcttccgaacgaaagcaatcatctctacagacccatactgaactctatccgaaagtatagagccgtggccagaaaacttttttcagcctgtgccatggcagaaatggccggggcttctatcaccaccgaagaaaaaaaaggtgaaagcaatattaaagtcaaaccggataatgaggcttccaagctcatactggccaatgccttcggcaccgatgggaaagctcacctttatcagttgaggacttatgtacgaaaagacttggccccagaatggcattcatttgtatgggacagtgtccgccaagatgtctcctcccgatggtcttctcctgatcctgaattttcaaaagcaaaaagagggtggctcgtaacccaaggagtcagggccctggcccggttcatgcatattggaattggatttccaattgctactgccaatcctaaaatggatgcacatacgctctctcttaaatgggattcaactgtcggtccagtgagcttcgtcattcccagactggatgcctcaagctatttcatctggaagaatatccgagacaaagttgatggatgggaaccaggaacagtctatttaaatgagcgagacggaaaaatctttgctgtcctctcttataaatgccccttcaaaaatgaaaaagtggatctcaaaaaagaactggttgtggaatttcctgaagatcggaacacttttataactattcacggccctaagactttctcaggagatgtcctcagttctgaggaggccattggttggctgaatgaactcttacaaatcagtgaagtctataaaatgagactgtccgcagtgggcaatacccataagaagtggggagacactgtagcacacgatgccctggttaagaaactgaataaggttactgaacgcagaactaacggccagaagaccagaaatcacctgtggactcggagaatagtcgagaatgctatcagaaccggctgtggtacgattatattaaaaggttttcccgagagagagctcttcggacatccctggtcatggtatcagttcaagaattttctggaatataaaatgaatgaaattggtggaagagttaatctggaactcgtccgaaaagttgcctga

SEQ ID NO: 66536 - DNA, 28 bp, unknown
  Direct Repeat
tctgtcccttgtacgtggggataatggg

SEQ ID NO: 66537 - DNA, 28 bp, unknown
  Direct Repeat
tctgtcccttgtacgtggggataatggg

SEQ ID NO: 66538 - DNA, 28 bp, unknown
  Direct Repeat
tctgtcccctgtacgtggggataatggg

SEQ ID NO: 66539 - DNA, 28 bp, unknown
  Direct Repeat
tctgtcccttgtacgtggggataatgga

SEQ ID NO: 66540 - DNA, 28 bp, unknown
  Direct Repeat
tccgtcccttgtacgtggggataatggg

SEQ ID NO: 66541 - DNA, 28 bp, unknown
  Direct Repeat
tctgtcccctgtacgtagggataatggg

SEQ ID NO: 66542 - DNA, 1140 bp, unknown
  TnpB Polynucleotide
atggcaggaacgttaaatagaagcatgacttttgatcttaaagtcgataatgacaaagatggtattatacaccgaaaggtggtcaacagtatcagattgtatagatctgtttgtcgaaaagtttattctatgactgcaatggcaaggattgctattgcggatattagaataacgaaaagtggttatgtcaaagtagaagataatcaaacaacagatctcaaacttctttcagaagcattcggggcaaatccgagtagacaaataaatttacaggagttttgtcctacagctttagcctttttctgggcatcagcaatcggtgatgttacttccaggtggagatccagggatcccgaatttgattgtgttccaagaagtgtattaactttgaatgggatacgtgatctggcatggtttaatcatataggtataggaatgccacgtttaacggcacgtcccgatttatatgaaaaatcaatcagtgttaaatgggatcatgaaattggcaaggttgatttttcatttccaaaaaaactcgattcttcacggtattggatatggaaaaacctacgtgataataatgaagagtgggggttgggtacgatatatttgaatgaggatgaagggaaattgaaaatgacaatttcgtattccatccccgaaaaagaaaaaaaattaaatctcgacaaggtagttcttattgaatttacaagtgatcctgataatttcattacctgttatgtcgatggtggaaatatgggtgaagccgacaagatcagtgccgttgaggcgcttggttggttggaaaaacttttattgttaaacaataaatttaaagacagggcctccgctgttggtaattctcgcaaggcttgggggagtaaaaaacttaaagcggttgctaatgaatgtcgcgaaagggtaacgaaaaaacgggagaatggggaaaagtatcggaatcatttatggacccgtcggataataagtttttgtcagcgtcacagtgccggcactataaagcttataaatgttcccgatggattgttgggtcacccttggggatggtatcaattcagacacgatctgaaatataaaattgaggaagtcggtggaaagattgttggaacatgtgaggattgc

SEQ ID NO: 66543 - DNA, 1656 bp, unknown
  TnpB Polynucleotide
atgtgtctcgatgggagacggttggcgggttcgagtcccggtgtttcgattgtcaccgatgttcctgggaaaggatcatcggcaagccccctcgcaggggtcaaggtgagaacagcttcggaccaagcgagccgagtagcactcaccatgtttgttggatgtgaggggccgggacacggtctcggtccctcacgtttttcttcgaaaggattttcaatggctcagagtgaaagaatgtcggtttcgtccggcgacgttcgtgcaacccgaatcgagatttttcggttttgcggttccgataaagaacgtcgtgaggtgtggcggcgtgcgtgtgaggatgttcaggaggcgtttaatttcttgtggcgttactggatggtgtttcatacgttaaatgattcggcggccaagatccgagagtcgttggaacggtatcgccagtggcatcaggcagagaagaagacacgtggtccgaaaccaaaatgggatgtggatgcgttcccaaatacgggtgagctaaagggcggcaaggtggtgtcgcagtcgtgggatttcgctcatggcaagtcggcgagaaagggcataaccaatccacctgatttgcagaatgatctgtatcatgtggtggcgaagaacttccctcgtttaacaagcgatcagatcagtttgattctccagaagtggtcgaagtcgttaaagactcgcaaggcagccaagggcaatttgccagggtgggcggcgatcattttggggcgtgaggcgatcccctcgtttacacgtcggatgccgatcccgttcaccaagcgttcgtgccctggaggaatcccgttgcgtcgggatggtgacaaatggattctcgatgtgaaggtggatcgggttcaagttgactcgtgcgacctgatgttgaaccgtgagaagacgggaagcaagcgagcgatcgtcagtcggatcatgagcggcgagtatgtgttcatgggttcggcgattcagtacgacgatgctcgcaataaatggtacgccatgatttcgtatcggatgcctgcgtcggtgaaaccggacctggacccgtcgttgacattgatcgtgcgtccagggcgtcattgcccatggcgtttcatgatcgtgggttccgattcggtttccggtaaatcgttcggtcggttcggtcacggtcgtcatgtggagttcgcgcgtcgcaacattatttcggagcggatgtcgcgttcggagcattcgcgtttcgcgggttccaattccaaggggcatggtcgccagcgaggagacgcggcgtggacgaagttgtcatcgcggtggaaggattttgcgaaacgatacaacaacgaggtcaccaagcggatcagcgaatggattgtcgatcgagggattggtcgcatcgttttcgttcagccgaaacgagagtcggtcaaccagcggcgttttttgagcacggctggcaatagcgagcgcagcgggatgtcgtgggagtatttccagtttgcgacgatgttgcgtcagaaatgcgagcggctcggtgctgtcgtggaagtgaagcagcaaaacacggagaaaacggcacctgttaccaagggaattcaggccgctcgcaaaaccacccgcaaagcacgtaaaagcaaaggtgagaaatgtaagccctga

SEQ ID NO: 66544 - DNA, 1323 bp, unknown
  TnpB Polynucleotide
atgccagtcggtgtaatcaaattaaagattgattcatgcgccaccatgccatcgaagcggtggacgaagctaatggatgagcggctcgcggatgccaatcgtgttcgcaacgctgtcgttcgcgcgtgggtgcgctggcgagaagactttccagaatgggtgccggagcagcggagaattcgcgacgggtcccccaaagtcgataagaaaaccggtaagccggtgatggaaaacgaaatgatttcgcaaacgaaagaagcggaattgttccatgtttacaaatcggttgcaccgttgctcgcatcagatattgcgtccggctgctggtcggaggtgctgtctgatttgcgcgaccacatgccgtacaatcacgacggtagtaagtaccgctggcaggcaattttgaatttcgaagttgcaccgccgagctacaccggatcaacaattccgtgcagcaaaaaagcttcgaagctgatttacacggacgatcgattcgagttgcggtttccaatgttgtcgcaggctagtggatatagttcgcaagcgcggtcgccggtcgtgaggctgaaaggctacaagtcgcacgggctcagcgacggtgaaaaggctttgttaaaacgtattgcagccggtgaattgcggcgcgctgattcaacgctcgtgcgcaaagacggcggttggttttatcacctggtttacgaggctccgataaaagaccacggcttgaatcctgatacgattgctaggctaactccgttgcggtccaattcccgtaagccgttcgagctcgcgattgccgatggtgcgacatggacggttggtgatgggatcgcgttcgcgaaaatctgcgagaggctaacaattcgtcgccgggcaatccgcaatcggtacaaggacggagccggcaaagggcacggcaaggcgaaattctatcgggctttgcggccggcgagtagatcggtaatcgacgcgcaagataatttccgcaagcacctggtcaacgagattgtcaagttttgtattcgcaatagtgcaggaacagttgtttaccgtgagccgacaatgccgttgcggagcttgctatggttcgatcagaagggcctgccgttcaattggactagctttgccgcatacctgaaattcaagcttgaagtcaatcatatcgcgatggagttggaaccgcgaggcaggtccaagggctttccgaggatcggagtagcacaacacaaactggagtatgctggatcatggccggtgagcaaaaacgacaaagacaaagtcgatacatcctcgattgcggactttgcggcatggcctgcgtga

SEQ ID NO: 66545 - DNA, 1473 bp, unknown
  TnpB Polynucleotide
atgccaactacgaaaaaatggccgatcgataaacgaggaaatctttccctcaaacacggatgggtgtggattgatcctaaggcacctgcttttgatacggcgagtgcgaagtgcgtggtctatgctttcaagctgcccgttgtggagccgttgaacgccacctggaggcaggttgatgatctcctgggtaaggcttttgagcaaaacgatcgtttccacaattgggcgatgcagactcttttcaagtccgaacctgttcgtgcacggaaggaccagaaatatcccaagcagaacaaaaagacctataactccacacagcgtgatctctataaccaggcccgaaaattgttccccgccctgtcttcaagcacaatttcaacgacgcttaacaagcgcataatgccttcattcaaccgatcaaagttccgtgtgtggaacgaaaccgatagtatccctctttacaaaacgaaccaacccctccacatccccgtcgtcagttatgacttgcgccagttgaacatgtgcgggagtgagacttgggttatcgacctgatagctaaagccggtaaaggcgggaaccgtctacagtttagactcgcaggtggcgataaattcggtcgtgagcacggatcattggagcaagttatgaaggggaacgccaagcttggagagctgtgcctggtaaaagaagtgtgtggtgacattcatcgccatacaaccgttcatcgcaacggaggcggtcagaaacagaaagacgtgctgaccgccaaactcgttgtgaaagctcccatgccagtgctttccagcgaccataaaaaagtcatgatgctatcaacccatgaggaggcattcctgtctatgtgggtcggaggaaagaaattccaggtatacaatgctgaccacctcaagcggtggcaagccgaagcggaggtaaaaggacttcaggttttagacccgaagctgctggaggagcattatggtaagctaggcgcggaaaagcagcgagaattgtatgctgtgctccgtccggaatatgccatttatctatcggaaaagcgacgatcacatttgcaacgtttcagcgatgaccggaaggccgagcatcggggcggccacgctccgtgttttaacggaaaatcctctgacattgcgaggaagttcgaacagcgcacagattcgtggatcaagcaggtttgcgccgtgataacgaatcatgcccgacggcggcgcatcggtgaagtggtttggaacgatacggaaggcaaaatacttgacggagcttttccctggtttaagttcgagagctgtctcaaaaatgccttactcagagttgggattactctggtggattatgaaaacgaagaaagagctgctgcaaaaggtaagaagcaaagcactcccctgggtggaaaagaagtttcgggaaaagcggtgtttgatggctcaagcgtggaggttggatcatccccttga

SEQ ID NO: 66546 - DNA, 1389 bp, Candidatus Solibacter sp.
atgcccgcaggcgatctcgaggccgcactccgcgctgtggagcgccaggcggaagcaatgcaagcgatcgagcgcaagatcgccgcggtctacagcaggcgctccaccgacttgccagcgacggcaccgccaaacgccgaccaccacacaactatcgaccgaggcggttcgcacccgccgcgtggcgtggcagcggaaatgccgtcgcacgccccaagtggggcaacgaggaccgtccagcgcgtgctcgctctgcgggccgcgctggactggtccaacccagagcaccgcgaactgtatcgcgagcttcgcgatctcggatggcaggcggcccactaccgcaacatgatgctgcgggccaagtgggcgcaggcatacggctggacagccccgtccgcgccggatgacaaggccggtccgagcaaagcggtgcgccagcgggaaaagggtgagctttccggcgacgcgtacagcgccgcggagatggaggtgcagggcatctggacgcgcgagggcaagcgcatcctcgccggctcgccactgcccgagtggcgacccaatgctgcactgtccgtcaccggcaaggcgaagcgcgaggactccggcgtccagctcgtcaagcgaggcgacgagtacgcggtgaggctgcgcgcgcggtcgaacaaagatccgcgcggatcatggatcgagattccgatcaagcgcggctccgcgcgcgatgagtggcagggtccgattctggacaagatgctgcgctgggaaatcccgatgaaaaaagcaaccgtgcacatcgagcggcgcggcatcacggtgcggatcacgtatccgctgagtctgcctgccctgcccccgcccggcgagcgccgcgccgtaatttccgtcaccgaggacggtaggttcctgatccgcacagagacccagacgcgcgatgatacgaggcgctatcagcacttgctgcggcgcgctgacgattgggagctgatacgccggcgagctatggcacagatcgggcgatgcaagggccacgcgcgaaggaagcgcgaggcgatcgcgcgcttgggttggcaggactggttgcgagactacctgcatcgctggactgctgacatcgtgcagtggtgccgatcgcagctcgtcggcaccatcgagattgcggaaattggggcgctgacgtggccagcggcgcagttccggcaactcctggcatacaaggcggaggagtatggcatcaaagtcacagctggcgctgacgtaaccaccgagccaggcgagcgcgcagcggaagctgagctgcgccggcgattggcgaaagcgaaaaagcgccgcgaggcactgcgagagattgaataccaactcaactcggaggttaaacatggagaaccaaaatga

SEQ ID NO: 66547 - DNA, 1260 bp, unknown
  TnpB Polynucleotide
gtgagtatcgaaactgcgcttgcctgttgcgatctatgttctcttgagcgtctcagcaagaaggcgaaggacgggggcgccaaattgccacgtaactggaagcgccaccaggagaagacctggtgctcaatctgctggcgcaaagcttatgcgatccgggcaataaccatgccggtagccggacccgtggatctctcctgggaggaactccggccgaaacttcgcgctgcctggcaactggctacggcggcagccaactgggcagtccagcgtctcatgagcctcgatcacctccggcggcccgaggatgagaagctgcagccggcgccagtggtatacctctatccggagtgtcgcgcgctctttccggcgttgcctacccagactgtttgtgcgctccttcagacggtggagcgccgctggcgtgccaggcgctgggaagtcctctgggcgcgctcggccgctgcgcccacctatcgctatccgatgcccttcccggtgaagaacactaactggcacctcgaggaatacgagcaatcggtagccgtgaacacggcgctcctggctcaagagcgagtccggctccgactgcgtgggggcctcgagttccgccgcaagttgcgcttcctcgacgcgatcctgtcgggcgaagcgctccagggtgagctctcgctttctgaacagcgcgtccactccggtgaccatcgtcccgctcttcttggacgcgcccccgggggtggccagaaaactgccgcccggctagtcgcgaaggtggtcgcatggttccccaaggaggcgcgtggggagctctctggcacgcttgaggtaaagaccgatccggagcacttctgggtggcgacccacgcggatcatgatccgtgggtgctcaacggcgaccatgtgcgccgctggcagcgagagcacaatctggtcatcgagcgccttgctgaggacagcaagtatgagaagcgctggcccgggaaggagcgtttggagatccaggagtatcgcgagcgccgctgtgggaaaaatcgccgccggctggaggcctggtgtcatgatgccagcgcgcttctggtggcctatgcgcggcggctcaaggtggcgcaggtggtgtatcgagacggcgaaaaagggtatatgagccatttcccttggtgtcagctcgcggaaaagctcgaatacaagctcgatgcggccggcatcaagctgcagatggtgaaggagagggcggcgggtggggaagacaacgtggcctga

SEQ ID NO: 66548 - DNA, 1212 bp, unknown
  TnpB Polynucleotide
gtgtatattaatttaggtagtaaaaatctaacgggagggttaagggaaatgaaacgatcagttaaaattgacgtgaactcttctgaggatcagtacaaagttatcatcaatcttattaaaacctaccgtattgcctgcagacagttgtattctgtgctggctatgtcggaaattgccgtttctgaacacgtgattgatgaaaaggggatttcggttaaacctaataaggatagtaatcatcagttactaacatggattaaaaatcccactcggcgtgatattattgaagaattactacctgggtatttaagtgcagtatgggacggggtaaaacgtgatgtagaatctcgatggaaatccaaggatccggcgtttccttccgcgacgcgagggtatttaactatcaatggagtgagagattttgcacttttcaatcatataggcgtgcaatgcaactcaaatgttccaaggactatgacggagcatggaatgtcgttgcgatttacttccaatattgaggatactattgatcttaaatttggtagactggatggtagcagatattatatactgaaaaatatctgtaataatcctgattggaagtgtggtacttgttacgtgaatgaacgggaaggtaaattgtttgttgttatcagttatgaggcaccggatgtaaaagcagaaatcgatataaacaggattttggaagtgtcctttacagataatcctgaggcatttattcagattaaaggaccaaagggagttcagacatatgatactatttcagcggtagaagttattgcctggattaaagaaattcaaactctgactatgaaatttaaaactcataagacggcgacaggtaatcctcgcagagcctggggatccacaaaacaatttaaagctttacaagatcggttatttcgcgttacgaagcgccgtgagaatggcgttaaagagcgggatcacttatggagcagaagaattgttgaaagggctaaaagttggcaatgtgggcatattgtaatgaatgaattgccaaaggatttgtttggtttttcatggcaatggtaccagttttcacagtttttaagatacaaaatcgaggaaataggcggaaaaattactgagcaaaaagctacggtagatcataagaaattaaaagccaagataaaattatcagccagtctggaggagataaaaaatgtctaa

SEQ ID NO: 66549 - DNA, 22 bp, unknown
  Direct Repeat
ccacgagcgcaggggttatggt

SEQ ID NO: 66550 - DNA, 22 bp, unknown
  Direct Repeat
ccacgagcgcaggggttatggt

SEQ ID NO: 66551 - DNA, 22 bp, unknown
  Direct Repeat
ccacgagcgcaggggttatggt

SEQ ID NO: 66552 - DNA, 22 bp, unknown
  Direct Repeat
ccacgagcgcaggggttatggc

SEQ ID NO: 66553 - DNA, 22 bp, unknown
  Direct Repeat
ccacgagcgcaggggttatggt

SEQ ID NO: 66554 - DNA, 22 bp, unknown
  Direct Repeat
ccacgagcgcaggggttatggc

SEQ ID NO: 66555 - DNA, 22 bp, unknown
  Direct Repeat
ccacgagcgcaggggttatgga

SEQ ID NO: 66556 - DNA, 22 bp, unknown
  Direct Repeat
ccacgagcgcgggggttgtggt

SEQ ID NO: 66557 - DNA, 22 bp, unknown
  Direct Repeat
ccacagtcgcgggggttatggt

SEQ ID NO: 66558 - DNA, 22 bp, unknown
  Direct Repeat
ccacgagcgcgggggttatggt

SEQ ID NO: 66559 - DNA, 22 bp, unknown
  Direct Repeat
ccacgagcgcgggggttatggt

SEQ ID NO: 66560 - DNA, 41 bp, unknown
  Direct Repeat
tgagtttacaggatttattgggattgaaaagggtgttattc

SEQ ID NO: 66561 - DNA, 41 bp, unknown; identical to SEQ ID NO: 66560
  Direct Repeat

SEQ ID NO: 66562 - DNA, 1143 bp, unknown
  TnpB Polynucleotide
atgcatcgatccgtgaaaattgatattgcggtaaaagattttttgctacaaagaaaaattatagaatccatccggctttatcgtgcggcatgccggaaagcattcagcatatgcgcgatggccgaaatggccggggcggaaataatcgaagatcctgaaaagggcatagtgattaggccacaacaaaaagcggcaagggaaattttagaacaggcatttgatatacatgggaaaaaagcacatttatatgaaatgcgcttatggctgcgcgagttacatccatcatggcaatcaatcgtgccagaagcaatacatatcgatgtatcatcacgatggcgggcgaaagatgtcgagtttccaaaagccacgcgtggctatcttgtgctcaatggtgcgcgatcaatggcgcggtttgaacacattggaatcaccataaaaaataccgttcccacgttggcggggaggaccgtatcttttaaatgggacgaagatattggcaaagtggaacttaacctggctaaactcgatggttcacggttttttatatggaggatgattgaaagcaaggctgccggatggaagttgggcacgttgtatctcaatgaaaaagacaacaatctctttattacgatgtcctatacatgcccggatttgaaaaaagagcttgataaaagaaaaaatatgttagttgaattttcggaatcacaggagaattacatcaccgcgcattcgccggatgaagcattttccggtgatgttattaatgtgactggcgcggttgcgtggctgaaagagatggaatgtatttatggaaactataaagcacgattacgcacctatgggagtgtcaataaaaaatggggcggaaaaaagggataccaagcggttgtggaacggatgagccgttacacggagcggcggaaaaacggtgaacaatatcataatcacttatggacccgccgaatcaccgaacattgtcgccgcaaagaggcgggtaatgttattgttgtcaattgcccagaaggggaaatgtttggattaccctggggctggtatcagttcgggcaatttttaaaatacaaaattgaggagattggagggatggttaaatttgagacggttgaaaagcagaaagtagcataa

SEQ ID NO: 66563 - DNA, 31 bp, unknown
  Direct Repeat
ggtgttgcacccgcacgcacggggatgatgg

SEQ ID NO: 66564 - DNA, 31 bp, unknown; identical to SEQ ID NO: 66563
  Direct Repeat

SEQ ID NO: 66565 - DNA, 1167 bp, unknown
  TnpB Polynucleotide
atgactgttctaaaaatgattgtcacgaggccaggcgttcagcctggacctctagtctgtcgcgattgcggcgtcaaccgcagcgacctcggaaagcgcctgccacgcggatggaagcgccaggacgagtttgcttattgcgcgacttgttggagtagtcattatcttcttcgctccataacgctgccggtggccagcccgctggactgcggatggaaagagcttcgtagtatgctgcacgagatgtgggcggcgacaactcaggcctccaattggctgcttacggaattgtacactcgggacgtccggcgtgcggatgaggcgcgcatgccggccatggtcaaccactatttgtatcccgaggctcgcgaccgttttccatctttaccttctcagacggttgccgcactcgtggaaaaagtgaagcgaaagtaccgcgccgtccgttacgacactagttggaggtgcgccgccagcctgccgacatatcggtatcccacgccattttcagtgcccaatcaggcttggaacatttgcaaagacgaaggcccagcgcccgtggtcagcctgcgaattggcagccaacgcatccgtctacggctgaaaagcggcgctcgctatcgacggcagctcgattcggtctcgaagatcgctaccgggcaggcggttcggggcgagttggttatctatcagcgctccagtgacatcatgtgcacgctggtcgcctggctgccccgcccgagttttcaccaacatcgcgctggagtattgatggtccgcacgtcaacctatgcgctaatcgtgggctgcaacgaaaaggatgagcggatttggacctacaatggcgatcagctacgccgttggcaggctgaacaccggacgcaacttcagcgctgggcggaagacaccaaggctgaacatcggccagttccgccgttctccgagaggcgagccaatgcggtgcgaaaataccacgatcgcatgcagaccgcctgccatacgatcgcatccctcatcgtgaactatgcgaatcgccggcaatttgccgccctacgttatgacgattcgaaccggacttactgcgaggagtttccttggtttgaactgaaatcgaaagtcgctcagaaatgtgacgaggtgggattgctttttgaaaatgtaccctaa

SEQ ID NO: 66566 - DNA, 1434 bp, unknown
  TnpB Polynucleotide
atgattgccgccaaagaacctaagtcgaagtccaaatcaaaacccattccgttcgtttgcgacatcgactcttcgcacatcgggagtggccgaaagacgaaaaccggcgaggttgcaattcctcgaaagtggcgtcgattccaagagaaggtctggtgcgaccagtgctggaagacccatttcaaggttgcggctatcaccatcccggtcagcggaatcgttgatggggagtggggcgacttgtggaaatcccttcacattgcttggcggcagtgtggccaggcgatgaattgggttacatgccagctttacgcggcggacgatgcagtacggattcctgtcgtgactgacggcaaggcgaggcttggaccattgccgcagtcgcaaatcaatgatgccatcacaaggattctcggcaggcccggcaaatgcacggacagcaccgtgctctatcacaccatcggagcgctgtttcctacccttaaggggacaacggcgtcgatagtcgaccggaagacaaaggaactttacaacgccaagcggttcgacatctatcgtggcgttacgtctctccccacctatcgagagcagcctttcccactctcttcgcaatcttgcagcctcgacaaaatggctgacggacgagtcgccatcagtttcaagcttggcgaacgcagatggacactgccacttggcaaccgcgcccactttgcaaggcaactttcggcgatggacaagatcattgatggttcggcgcttcaggtggagtcgcgaattggagaagccaagtgcggttcgacgcataggccgtctggcacgggcagggacggcggtggacaaaagaacggcactcgcgttgttgccacgattgtctgctggcttccgaaacgagataacgcttttgttctttccggcacattgcttgtcagaaccgggccaaccagcttcctccgcgcccgcatgatgggtcgaacgtccaatgagcgatggtcgcatgaggatcatgttcgcaaatgggttgcggctcaccgccgcagactgcaacgaatgtccgacgatcagaaggttgaacgtcgcgttggcatcgaaccttctctggcatccgcccgcgagcgaatctgcgaccgccaattccgccgaatcgactcgttcattcaccaaaaaagcactcaagttgccgaactggcgttgcgactgcgcgcttcggaagtcgtctatgacgataacgacggttcgtgggtgtcgtctttcccgtggttcaagttctggtctacgctcgaatacaagttgagcgaacgcgggatcagcctgaaaacgtccgatgccagaaagaaggaatttgaaaccgccaagaatctcgaacagtggctcgcgatgttcgcggcccttgaagaaatcaataaggagcagagcaatggtatcacaggcaattaa

SEQ ID NO: 66567 - DNA, 37 bp, unknown
  Direct Repeat
gggtcacttgctctgagatcgttgagatagatgcggc

SEQ ID NO: 66568 - DNA, 37 bp, unknown; identical to SEQ ID NO: 66567
  Direct Repeat

SEQ ID NO: 66569 - DNA, 1419 bp, unknown
  TnpB Polynucleotide
atgaaaaacgacgacaaatacaccaatagaatgttgcacctgaaagtggttgcaagaactactgaggattaccataaaattctcaacgacattaaactctatcgcatggttgttgataaagctctttgtctaattcatatggcacattgtttatcaacagacttaaacaaagtttctccaaaaaaggaaaaagaatttaattccttcttagtagatgtagcggacagggaaatcgttttacaactggctcgtttaatggggggagcagaagcatcatctagtaaagcaagtcattttgtttgtgagttaattccactgattcgcaaagagctagaacatatttatcctaaattgtttaatgcggtttcagatgaacttagccgagacttattacaagctgctatagaagaagcctataaaatatatacacaaaaagacccaatacttaaagtacgtcgaaataaacttattgccaattatgaacgaccacttcctaatgtttctaatattggcatgaaagtattgcgtttctatgatcctaaagaccccaagtatggagaaagtcgtgtgtgttgtggtgtaaccgaagaaaataatgagtttaaaatttggttttctcttggaacttctaaagattccaaagaaaaacgtctttggttagtagcacatggtgaatttgagaacaagggagaaatgcagactaaaaaacttaaatcattccttgatcgcaatttgcttcataaaatggtaacaaataaactccaatattgtgatatggtttttaatgttcgtgatggtcgtttaacagttaatatcccttataaagtagaaatcaaggatgtaaaaacagatccatccaagcaacttcatgtcggtttttaccatgaggaaggcaaacctaaaggcaaggacggaaaagacttatctgatgtaggtaaagattttttcattcatgtacaagttcccacaacaggcggtagtgataaatttaaacattataagattcctgtgaataatgttattgaacacctgaaacaaattggtgctatcagaagtcgtgctgaattgcgtaaagattgctgtatgaccagggggttacgaactggtgataagaatcttcgagacatttttcgtagccgcgtaaacgatatttcaaagaatagggacttgttcgtcaaagacaataaccagctttggtctaaatctattatagaatttgctcaacgttggtcttgtggaacaataaaaatttatctacaaccagacatggattttcttgggcagagttgggcttttggacaattatcagattttattgagtacaaagcgaaatcttgtggtatacttgttgagcggattgaatcagaaggcgttaaaaaattcatggactttttcaaaaccaaggaggaagaagaatga

SEQ ID NO: 66570 - DNA, 1119 bp, unknown
  TnpB Polynucleotide
atgataagaaatttaaaaattgaatgctttgttagggacaatgatcttcatgcaaaaataagggcgtcggtacggctgtaccgggcttgtcttcgagcggcgttttcgtattgcgcattggccgagactgccggggctgaaattgtagcagaaaatggcaatgtcactgttaagccaaatgatgaaaaggcgcgagaaatattatcggcctgtgtcggacattctgggaaaataaagtattacgaaatgtaccattggatgaaagagctttatccatccctcatatcaaattgctattccaaaatacagtatatcatcggcaaaatgatgaccatgaaggatcaggatataaagaagtgccagaaaaaatttcttatcgttaatggcaaaagggctttcgcgcaattcaaccgctctggaattcccattaagagcggcatggcaaaaatagacgggcacttgttaaaatgccggtgggataaagatatcggagaagtagagttcacgacgaataagatggactcgtcaacctattacgctttttcttctctccgggaaggctgggaaggttggagtataaaagattcgtacctgtctttcgatgaggataaaaataagatcgtagtcatcctgtcatacgaaagaccggatactccgacaaatattgagcctgaaaaagtaatgcatgttgaattcaccgacgacaaagagatgtttatcacttgttatactgatgataaatggtctgcaaggccgttttcggcagccggtataattggatatcttgaagagatggagcaaatttatagccgttactggtctgaattcaaaagttatgaacgcagggaacggaaacagcgtaaccatgtcaaagaaaaacttaacaggtatactgaacgccgggctaatgcagagaagaacaacaatcatttatggagcaagaggatagttgattttgcgcggcagcaatgcgccggtaagctcgttgttgttaatcttccagaaaaaaccttatttgatttgccttatggatggttcgattttaaaacaaagcttgattacaagatgaaggaaatcggcggtacggtaagtttcgtaactgtcgataaagacaaatag

SEQ ID NO: 66571 - DNA, 31 bp, unknown
  Direct Repeat
tttcatctcgtgcgcgggtatggtttgtgag

SEQ ID NO: 66572 - DNA, 31 bp, unknown; identical to SEQ ID NO: 66571
  Direct Repeat

SEQ ID NO: 66573 - DNA, 31 bp, unknown; identical to SEQ ID NO: 66571
  Direct Repeat

SEQ ID NO: 66574 - DNA, 31 bp, unknown; identical to SEQ ID NO: 66571
  Direct Repeat

SEQ ID NO: 66575 - DNA, 31 bp, unknown
  Direct Repeat
tttcatctcgtgcgctggtacgggttgtgag

SEQ ID NO: 66576 - DNA, 1323 bp, unknown
  TnpB Polynucleotide
atgccaatacgtatgatgagactgaccgtagcagaggtgcttcacggtggaactaggcgtgagttttacgatgacctgcggcagtcgctagacttatcccgtattgctgcaaacctttgtgtaaccgagtgtgtgcgccaagatgatttgcagttagaaaagtgtggcaagatttacacgtacccagcaattagttcgcttttcccaggtgcgactaattcggcggctagcttgtcgcggtctgttgagtctgcgtatttgcaagacagataccgggtaaagactgggcagcgatcggttcgtgtgtacagggcttttgcgtggcctctgctaagcaacaattcttacagcactatccggattatcgacgaaggcgagtatttagctgcgtctattcggctgctcaatggatggtggacggttaggctatcaaatggcccgcagtacgcaccgcaaacccgcatactacggcaagccgtagctgacggttcatatggtgactcgcagattttcctagacacaaagcaccgagccacactgaatatcagttgtaggctagatgcggctgaaactgtcgatcagcatggagaaatgcgagttgcatcgagccgagaaagcttgcttgttgcgtcattgccgaacacggaccgcccgtttgttgtaaacgcagatgtgatcaagtcatggcagagtgaagccgaccgttcctaccagcgtttacgacaagactgcaagctaggaagcaatgtaagaaggcttcgttgtgccatgaacaaggtttcaatcaaacgcaacagtcgcatgaaaaccctatgtcacgaagtttcgagtcaagttgttaacaaggcaatccgttctaaagttgagtcgatccgattggatttaacaattcggagttatgctaaatcgttcccgtggtctgttcttgccggattcattaagtacaaatcagagatggcgggaataaagctagtagatgccacgcagggcgttcgggagccaaacgtcaataaaccgcacatttatttcaagttggcaccaatggcaggtcgtatcaagatcggaatgacgagtcgagaagacggagggcgtcacattgacaagacgcagtttgctgaggaaccagtgattctagcgatagacaatcacccgaagaaaaaacttcggtcaatggaaaagcattatcacgcgatgtttcaagagcatcgcgtaacaggtgaatggttcttagcggaaccgatccttgcatggttgcgagatatgggatggctcggaaacgcgggcaatatatcgcagatcatgcaagtcttggacgtgtcctag

SEQ ID NO: 66577 - DNA, 1098 bp, unknown
  TnpB Polynucleotide
atgatttcacgcgcaatgaagatacaagttttttgtccgcctgataagctacaagcggttattgattccatacggaaatatcgggcggctgctcgaaagatgtttgctcttgccgctcttgcggaaataagcggaagcgagattgatgaaaaaaagggaacggtattgcccgtatccgataactcgaaaaaacttctttcccttgccatgaataaagaggggaaagcgcatctatacgaaatgagggatttcataagaacagagtacgcgccggaatggttatcgtttgtttgggatagcctgcgggccgacgtatcgaacaggtggagggcgaaagacccggaattcccaaaggccacacgcggctatttaattgatcaaggggcgcggtcccttggattctttcagcgtatcggaataggctttccacaagcaacgggaaggccaaaaatcgaagggcataccataacgttaaaatgggcgcacgatattggggaagtagcgtttcaagttggacggcttgacgcggggagacactatcattttaaatgcctttcagaaaaacttgaagaatataaaccgggaacggtctttcttaccgaacatgaaggcaaactatttgtttcccttacttattccatgccagaaaaaacgaaagcattagtgcctgatagagtaatggaattgcgtttcggcacggctcccgagcagtttatgcttttctccgggcaaacaatatcggctgcgggaattattgcgcaattgggaaggcttaaaaatcaatccctggcttataaagatgaattggcggcgcatggcaatccgagaaaatcatggggcaacaaacgcgcctatgaatccacatcaaagaaattaaacaatgttaccatgcagcgaacggcaacggccaagaatcagaatcacctttgggcgcggcgaatagtcgatgaagctatccggaacgaagcggggatattgaaagtatccgacttgcccaaaaaagaaatcttcgggtatccatgggatttcagtcaattaaaaagttttctcgaatataagatgacagaagtcggcggaaaagttatttttgagaactga

SEQ ID NO: 66578 - DNA, 29 bp, unknown
  Direct Repeat
gtctaacccacacacgcggggataacggg

SEQ ID NO: 66579 - DNA, 29 bp, unknown
  Direct Repeat
gtctaacccacacacgcggggataacggg

SEQ ID NO: 66580 - DNA, 29 bp, unknown
  Direct Repeat
gtctaacccacacacgcggggataacggg

SEQ ID NO: 66581 - DNA, 29 bp, unknown
  Direct Repeat
gtctaacccacacacgcggggataacggg

SEQ ID NO: 66582 - DNA, 29 bp, unknown
  Direct Repeat
gtctaacccacacacgcggggataacggg

SEQ ID NO: 66583 - DNA, 29 bp, unknown
  Direct Repeat
gtctaacccacacacacgggggtaacggg

SEQ ID NO: 66584 - DNA, 29 bp, unknown
  Direct Repeat
gtctaacccacaggcgcgggggtaacggg

SEQ ID NO: 66585 - DNA, 29 bp, unknown
  Direct Repeat
gtctaaccaacgggcgcggggataacggg

SEQ ID NO: 66586 - DNA, 29 bp, unknown
  Direct Repeat
gtctaatccacaggcgcagagataacggt

SEQ ID NO: 66587 - DNA, 29 bp, unknown
  Direct Repeat
gtctaatccacaggcgcagagataacggg

SEQ ID NO: 66588 - DNA, 1446 bp, Catenovulum sp.
atgagaatgatcaaaacatttaagaccgcggttttcaatgttaagtttagtaagagaaaaggaaatataatagatacacagatgcgtttagccgaaaacgcattctatgatgttatagaacggctggcacatcatgttgagccccttattaagctaaataaagaacaaagaaaggacatgttaacacggcttaaaaaagaggctagtcaacttataaaaccacatcctttatccaacgcctctaaatcaggtgtcgtcgcagatgcaatcgcacagattagttcaactgttgagcttcgtttaacggggcaagatgcaaaattacccacacgaaacaatagagacatcgacacttatgatattggaatggatatgttagttggttcgttagatcttgaatctcaagatttggctaagcaattaatatattcaaagccttatgatggtatgccaagacctttactatggcttaggactcggccatcggatggggctatgttgttgagagatggtttaggcagatattttgtttatattaacagtcatagttctaagtcgaagttttcgaaagcaaaagttgttattaatgatttggtgaatgttcgaacaggggaaaccgaaaacttctctagttccactggtttattgttgcccatacaactctctaagtggcatcaatctgaatttttggctaaaggtaaacctaaatcttatcgattaataaaaaaagcagacgggtacatattggcagtcacttttgaatttaaagctgaaaaaattgagcctgctacctatttgggggtagatcgcggtatagacaaaattgcggcttttgctgttacttcaaaaaaagaagttttaaagaaagatttttgtgatggcaatgaactaagagactatcaaaaagaatgtgagacaaacgctagaaaaaaacaaacaaaaggcaatgccaagtatatccgatggcgtggttacactgatttaataatgcataaaattgcaaatgagatcgtcaatacagcgctaaagtataggtcacaagtagttttggaagatttgacaaatattgcgaacggacaccatcacaggcgagctaggtttgcacgaaaaactaatttcaataaagttttaagtcgtcagcaatatcaaaaattacagcatttattaaattataagctgtcctacgttgggctaccaacaccgctatttgttagagctgcaggtacatcaattacttgcaataggtgtgggaactatgattctaaaaatcgcgacctaaatgagcgatcgttgtttttgtgtaaaagctgtaattatcaagataacgctgatgttaatgcagcagttacaatttcaatgaaaggtgaatggttgactactcagttcgataaagaacataaaaaaatgaaaaataggttctcagactggatccctttaccatcatag

SEQ ID NO: 66589 - DNA, 28 bp, Catenovulum sp.
gttcacggttacgtaggtgatatggaag

SEQ ID NO: 66590 - DNA, 28 bp, Catenovulum sp.
gttcacggttacgtaggtgatatggaag

SEQ ID NO: 66591 - DNA, 28 bp, Catenovulum sp.
gttcacggttacgtaggtgatatggaag

SEQ ID NO: 66592 - DNA, 28 bp, Catenovulum sp.
gttcacggttacgtaggtgatatggaag

SEQ ID NO: 66593 - DNA, 28 bp, Catenovulum sp.
gttcacggttacgtaggtgatatggaag

SEQ ID NO: 66594 - DNA, 28 bp, Catenovulum sp.
gttcacggttacgtaggtgatatggaag

SEQ ID NO: 66595 - DNA, 28 bp, Catenovulum sp.
gttcacggttacgtaggtggtttggaag

SEQ ID NO: 66596 - DNA, 1575 bp, Rhodospirillaceae bacterium sp.
atgtctgagcctgaagttgttcgtcgtggtggtaagaaggctttgccccctggatatatcaaggtcttcaagacggcaaagttcaaaatccacaatccttctttgcgcaagagggccatgctcttcgatgcgatgaagcgtgctcaccttgcttacgacaaactcctacaacaatgtctgcctgacgaaggaacagctacagagattagggcgctacccaagcctgagcgacgtgaacacttcaggcgtatggaacagagggttgttaaactttcggagggtgttggaaaacatcctcaactgaacggcaacgctaagtccgcaattcgtgtggattgcctcgctcagatcaagagcaccatcaacctgggggatgagcaggatgatgttggccgacctgtagtcgcactcctgaatgacagcgaggaggaattcgacgctagcctggacgagcttatacatagcctcgatcttccatctgaaaacatggccagggacaaacttctcagggcatccaaaccagggcagctgagacctctaggatttgttcgctccaacaagtccgcaggctttctcctcctgaagaatatggagacgggtcgtctgtgcgcatggctggctcttcatccgaagtcgtccagaagggctcgtcctgttaatgtgcgcgacatggcaaatctgaaggacggagaaatcatgtctttcagaagcaatgtcggtgacatcttccctctcgaattcggcagaagctttcacgagcacaggtatctggagaaaggcgaaccccagacagcacgactgtgcaagaaaggtgatgattacgagttgcatgttgccttcaagtttgtggtgaagaaacgggaggcccgaacctggcttggggtggatcggggcatttacaatcttgcggctctctcagtcatcacacagtcggggattgtcgtcgacgaggctcgcatctcaggcatggaactgcgctacatccagaggcaggtggaagcacgcatagccaaggggcagaagaagggcaaagttgtgcgcgaccgaacacgatgggcgcaggcggaaattgctgtccatcttacggcgaatgccatagtcgaaatggctgacaagcatgatgcgcaggtggtgcttgaggacttgaaaaatattggggctggaaagaagcggacgccagggtcgaggcgtggtggtttcaggaagctattcggcagggcgcaatacgagaaactccgaagggttgtggaatataagctgctggagcgaggccttccaaagcctgtgaaagttgaccctaaaggtaccagcattcaatgccctgagtgcggtcattggtctcctaaaaatagagagaaaaggcctgagggtgaccaattcaaaatggatgtatttgcgtgtgttgaatgcaagcaccgaaaggatgctgatgaaaatgctgctcgtgtcattgccatgaagagagtctggatggatggcgttccaagttcggcatggaagaaaaaaccgctaccagacaaacacaaatttgaggtatttttacggggtgctgccgaaaggcgcatggcgggctag

SEQ ID NO: 66597 - DNA, 36 bp, Rhodospirillaceae bacterium sp.
cctctagctaccctccaaatgaggtgtgactagagg

SEQ ID NO: 66598 - DNA, 36 bp, Rhodospirillaceae bacterium sp.; identical to SEQ ID NO: 66597

SEQ ID NO: 66599 - DNA, 36 bp, Rhodospirillaceae bacterium sp.; identical to SEQ ID NO: 66597

SEQ ID NO: 66600 - DNA, 36 bp, Rhodospirillaceae bacterium sp.
cctctagctaccctccaaatgaggtgtgactagcca

SEQ ID NO: 66601 - DNA, 1638 bp, unknown
  TnpB Polynucleotide
atgcccgcccaacacagtcatcgaactgccgtatttacgcttcatatcgataaacaatacattagagatattttagacgaagcccttcataattacacaagggcatatacggacatcttagacttttttaaggattactccgcagaagaactgcacgcaatgtctatctatacccttcccgatggtaaacagagaaccagtgcgcgaacattggagacctttcttttcagaacagacaaacgaccagaggttgagagaatgcttgaacctcttgaggctcgattacgtgcttcactaaaaagtggtgtggcagagacgctatcgagctttgctgaactatcacggacagagaaacagaaaccctcctaccccaaccgcgtagaagataaggacttggagcaaagaaggatagaggcattagaaggactgcgcactatcgcggacgatctagaagaggaaaatctccttcgagaccagtcgctcagaacacgccagcgcggattagtgccactctcctttgccaattctatgccagaccagggctttcgtattttcctcaatcgcgtaacgaaccgcttttacgtacgcctctatgtcattggagcatcatcgatttatcgacgaaaaataactaataagggcgaatacattgatatccgcgaacccgagaacatctacatgcgccacgaagatgccaaggaccgcgaagatgtcaagagcttcggaacaggaacgcgctctatcctggcgcctatcaagctaggtaggtggcacgagaatggcgtgagattcacgagctacgggttcctctccaatcgttggcacaccgatgcaaaaccttcaaaaaaaatacatattgacgcaaaacccgcatggcctgtcaccgccaagctcatgaaacatggcgatgagtaccaattacacgttgtcttccagttcgagaaaaccgaacgaataaaacctgcaacctatcttggcatcgaccgctcaatggattatcttgcatcgggtgccgtcgtttctatggacggtaaagaagtcatcgaaacctttaatgtgagcaccgacgaattgcaccgagttatcagcgccatagagaaaaatattgccacgaagcaggcaaagggcaagacgaccaaaggagatcgacgccgcgccaggatcgcagatcgccatgttcacctctgcgctaactctatcgttgagatggcgaagatgcatcaagcacaagtagtcgttgaagatcttagctacttgccaccgccaaagaaaaggggtaagagaggaaaaatcttcaaccgtgttctgcaaagaaggcaataccaaaaattgcaagatgtccttgaaacaaagctagagattgcggggctaccgccgttacgcaaggtaagcgctgccttcacagcatcaacgtgtacgcaatgtggctgtgtggataaggagaactttgataaggagaaccgttcattgtttcgatgtattgagtgtgggcatgaaactgatgtatatcgacaatcggggatcaatatcgtgcgcaagatgccattcttacagctacgatccaatgaaaaacaaagagaagtccctgaaaatcaacgcacgacatgggaacaatttgcacggcaattcaaaaagtaa

SEQ ID NO: 66602 - DNA, 21 bp, unknown
  Direct Repeat
aagaacatacattattgcaac

SEQ ID NO: 66603 - DNA, 21 bp, unknown
  Direct Repeat
aagaacacacatcattgcaac

SEQ ID NO: 66604 - DNA, 21 bp, unknown
  Direct Repeat
aagaacgcacatcattgcaac

SEQ ID NO: 66605 - DNA, 21 bp, unknown
  Direct Repeat
aagaacacacatcattgcaat

SEQ ID NO: 66606 - DNA, 21 bp, unknown
  Direct Repeat
aagaacacacatcattgcaac

SEQ ID NO: 66607 - DNA, 1530 bp, unknown
  TnpB Polynucleotide
atgtttaaagcggcgagcttcaaactgcacaatccaagccagcacaaaaaagccgcgttgaacaatgccctcaggaattaccactacactgtgaagcggggaattgaatcggtgctcgcggaccctgacctctcggcaaaagtcagcagagcggacaagcgagggaaacttcggcccaatatgtatctcttggggaaggaaattcgcaagacgattccgtcaggtatttccatttctcgggtgcgcgattacgctataggagacgcttcggcgatggtgctgtcgtatttatcgaagcaggcgaagggagatgtaacggttcaaccgcccacgctgccagagcttcgcgctttgaccaacgaagaaatcagtcgctctatggccgtctttgcggagacgattgagcatccaatcaaaccaggccagagcgacaaggttgcccaagctacggaacgcggggaaacgagggttgcgaagcggctggagaacgtattttcatcatgggctgcgaccaaggcagcagcccaaatgttgcgaaagacgcaggttcccgcgccacatccgctggaattcactcattgtgagctgacacgtggcttcatgctggtgagccaaggtacgcgatactttgcaatgattaagatattttccgccgattcccgatacatcaaaaagtccgtgttagaggagggctttgttgacttggcgacgggagaagacatctccggcagggggtatagcggacttatcttccctctagagatggggcgcgatcatcatcaaaaggaattcatcgagaagggccgcccgcgttccgcaaagctgattaggcgcggcgatgagttttttctgaatattgtgtttgagtttacgccggagccggtcaagccagagacgatcatgggaatagacaggggagccgcaatgatcggagcggcggcagtcgtcggctcgaacggccagcttatcgagcggctcgatctgcatggcaagactttcagtgaagaaatggcgggttatagaaggcgcatcgcgaaggcgcagagcgaagggaaacggttgtttaatttccggattcgagggcggcggagtgatatcgtaattggcgaatacgcgaatcggctggtagaaatggctgtgaagcacaaatcacaagtggcattggaatcgctggaaggaagagcgatggggcggtttctgacgcaaagccaagtggcgaaactgcatcagaagctggcctataaactcgaatgccagggtcttcccgcgccgatggaagttccggctgcgtacacttctcagacctgtgcgaaatgcggccacagagcgagagaaaatcgagcgagccaagcgctgtttcagtgcgtcaactgccattacgaagcgaatgcggaccagaatgccagcgagattatcgcgctgagaggcctgcatcagcaggagtgtggaggtaggtatcagaagtttgagaagtttcaggtttggctgaaaggccaaatgggtgctgaaccgtcagcaatggcggggtag

SEQ ID NO: 66608 - DNA, 35 bp, unknown
  Direct Repeat
ttgaagaccatcggaaatttccggctgattacaac

SEQ ID NO: 66609 - DNA, 35 bp, unknown; identical to SEQ ID NO: 66608
  Direct Repeat

SEQ ID NO: 66610 - DNA, 35 bp, unknown; identical to SEQ ID NO: 66608
  Direct Repeat

SEQ ID NO: 66611 - DNA, 35 bp, unknown; identical to SEQ ID NO: 66608
  Direct Repeat

SEQ ID NO: 66612 - DNA, 35 bp, unknown; identical to SEQ ID NO: 66608
  Direct Repeat

SEQ ID NO: 66613 - DNA, 35 bp, unknown; identical to SEQ ID NO: 66608
  Direct Repeat

SEQ ID NO: 66614 - DNA, 35 bp, unknown; identical to SEQ ID NO: 66608
  Direct Repeat

SEQ ID NO: 66615 - DNA, 35 bp, unknown; identical to SEQ ID NO: 66608
  Direct Repeat

SEQ ID NO: 66616 - DNA, 35 bp, unknown; identical to SEQ ID NO: 66608
  Direct Repeat

SEQ ID NO: 66617 - DNA, 35 bp, unknown; identical to SEQ ID NO: 66608
  Direct Repeat

SEQ ID NO: 66618 - DNA, 35 bp, unknown; identical to SEQ ID NO: 66608
  Direct Repeat

SEQ ID NO: 66619 - DNA, 35 bp, unknown
  Direct Repeat
ttgaagaccatcggacatttccggctgattacaac

SEQ ID NO: 66620 - DNA, 35 bp, unknown
  Direct Repeat
ttgaagaccatcgggaatttccggctgactacaac

SEQ ID NO: 66621 - DNA, 1686 bp, unknown
  TnpB Polynucleotide
ttgttcaaacaggcatcccccatctcgccagttctactcgagatttggcatgtaattatagcacacatcggagcggcgtggaagggcatctgtggcggaatgtgcggttccttgacttttctttcgctctgcagtaaactaagcgtaaacaccttccccggcagggcaaccggaatgataaggaccgctatcttcaagctccataacccgtctcggcgcaagcgcgccgtactcgactacgccttcaagcactacaccgtgggtctgcaggccgcgctcgccctcgccgaacgcaaccttgactggcttacagaaaagtctctccgcaacgggcgactggccgagaagtcgctggagtccgcgatcgcgaagctgttctcggaaaacaagttcaaactgccgcttcattcctccctgcgggactccatgatagtggagctcggcggcatggtcggctcgtacatcgggctgggactctccggtaggcagaagacgacggactttccgcgcagtcggccgttccacggccgcgaggaactgcacaacgcggcgctcgagggacttcggctgtccactacgaaggaggaagaggacgcgcaccgcgacacgctcgcgctgttgaaaaccggcgacgtcatgcctctccatttttcccgctcggacggcggctcgaagaaacgtacccgcgacttcgggctgatgaagaacccggagacgggcaggtacagcgcgctgttgtttctgttggccggcgcctccagccgcgggaagccgctgatcgagcgccccggtcgcctcgtgaatgtgcggacgcccagcgagccgttcgcgccgtctgagaagcttcgcagcgccatcatctgcccgctcgctttcggcgactggcacctttccgcgttcatcgaaaacggcgatccgaagacggctatcctctgccggcgcgacggcgaatacttcctgcacgtgtccttccagctcccgggcccggagcccctgcagaccgagacccttctgggcgttgacaggggaatagccaatctcgcggctatggcggtggttacgcctgacggccgccgcgtgttggagcgcggcgcggcgtccggcgcgcagctcgcgcgcgtgcagacggagctgctccgccgcaggcaggagaagcagaagaaaggtcgaacccttactgcaaaggaccgcaaagcgggccgtttcgccaaaaacgcgatccatgaggccgcgaattccatagtggacatggctctcgcgcaccgcgcgcaggtggtcgtggaggacctccgcggtatgcggctgcccgcgctcatgcccaggcagcagtacgccaagctgctgggcgtcctggggtacaagctgcaggcggtcggcttgcccgcgccgcgcgaggtccgcggcgcgtatacgtcgcagacatgctccgcctgcggttccgtttcaagcgagcacaggctgacgcaggcggatttcgcctgcacggaatgcggccatgccgagaacgcagatgtgaacgcggcggtcaacatcgcccggaagttgctctggctggactgtcgcaaccgggaatcaaaggaggggttgcccgaagaagagcgcacaacctggcccagtttcgccagacagatatgcagctcgtcctccgccgtcaggcggagccgagatgcagagcggggtaattag

SEQ ID NO: 66622 - DNA, 38 bp, unknown
  Direct Repeat
ggttgcagtcgccggaatccagtttcggagactgtaac

SEQ ID NO: 66623 - DNA, 38 bp, unknown
  Direct Repeat
cgttgcagtcgccggaatccagtttcggagactgtaac

SEQ ID NO: 66624 - DNA, 38 bp, unknown
  Direct Repeat
ggttgcagtcgccgcaatccagtttcgcagagtgtaac

SEQ ID NO: 66625 - DNA, 38 bp, unknown; identical to SEQ ID NO: 66622
  Direct Repeat

SEQ ID NO: 66626 - DNA, 38 bp, unknown; identical to SEQ ID NO: 66622
  Direct Repeat

SEQ ID NO: 66627 - DNA, 1599 bp, Alphaproteobacteria bacterium sp.
atgcccagaaaaaagcgcgacccgcgctatcactatgtttataaaacggcggtttttcaaattcacaatccgtcgaaaaagaagcaacggattttgcgcgatgctctgatacgcaaccatcttgcatacagcaaattgttgcccttgactttggcggagttcgaaacattgggccagataaccgccgaaggaaaatatctcaccaataaggttcggattgacgcggttaaaaagtttattgcaccattggtgaaacctttacctttggggcttgcggccaaggtcggtttgcaggaagaccttgctaacacaattgccgcctatctggcgttgcaagacgactataaaaaacgctgtgccgaagaagccgaaaagcctgaagacaaacgcaaggagatttccgaacccggcctgccgacatttacccgcttgacaccctatcagaaagcccatgaagaagcctatgaagagcttaaaaacagcttgacactcaaagacgaaaaccaagcaagggacaatatattaaaagaaaataaatccggccttacccgccccattctgtttctgacaaatcgaattagcgatggcttcctcattttatatgataatgtcaaagaaaaatatctactttacctcaacctacattcgaaaaagagtcgttttgccgagtcgatagatttaggcgggctgattgatattcgcaccagtgagtgtttttgcgaaggaaagagaaacagaaccggcgcattgtttccaatcaaatttgcggccgattttcaactgaccgaatttatgaaccgcgccaagtcagcatcggcgaaactgatggagcgccatggccactttgaggtgcatgtcagttttgagtttaaaacacggaaaattgagcggcaaacctatcttggcgtagaccgtggcatctataatctggcgagtatgtgtgttgtggatgatataggtcatatcatcgccgaggaaaattttagcgggcgcaatttgcgctatgtgcagcaaaaagaagaacgccgccaacggacaacgcaaaagcacggcaagaagtataaatcggcaaccagattggccgaagccgacaaggcagtgcatcaagcggcaaataaaattgttgaactggcaaccgaacacaaatcacaagtggtgattgaacatttgggcaatttgacagaccgcacatcgaaacgaaagcggaataatttcaatcgccttctggcacgtagtcaatataccaagctggcgatggtgctggactacaagctaccgctcaacggcttgccaaagccgattgcggtcgcagcacctggcaccagccagacctgccccgaatgcggcaaacggaattgcaaaaaccgtgaaaagaagccattacccgacggcaaagggtttgccatggacaggtttttatgtatagaatgcggttacgaaaaagacgcagatttgaatgcggcacgcgtgattgcgttaaagaaaatgtggcgggttggtttgccgaaaagccagcaagcaaaagaggcaaaaatactttccaccacaaaacatagttttgagtgctgtttgacattgtggacagaaaaacgaaattag

SEQ ID NO: 66628 - DNA, 1581 bp, unknown
  TnpB Polynucleotide
atgactggcaggtcaattaaaacatttatgactgccgtatttgagttaaaaagcccaacaaagaccaagactaccgtactaaattactgttttctaaattatcataacttgtatgaagaattgttggaggatgcaaaatcctccaaccttgatcgctttatcaaaagcaaaacgtatgaaattcgtaactttataaaaaaccagttaaaatcaaatcctgtttttgcaaataagatgaataaacttcacttgtcacttgccatggaagatggtttgtcaaatgatctggcagcaagtattcagtcatattgcgaattgaagaacgattacaattccactatggaaaatgctggtatcgcagacactgaaaaagaaaaattaagtttgccagggctcccgactattccgccattaatagccagacaggagaattgggaaaatcggctggaaaaactagccactgccagcacccttgatgacgaaaacgaagctagagatcagttgctgaaagagaataaagctggtcaatttcgccctattgtatttcctcgccaccgattagctgatggcttttatatgcttcaacataaaacaaaacccagcttttatattctgttcaatctttataaaaaggaaagtcggttttcgcgtaaaattgacttgtcacaatataaggttttaggcacagaaaaaacacataagcacacagcaataggtctcgtttttccaatcaattttggaaaatcatatcaatatgatcgctttttgcggtggatagctgaaaataataatgacgttttagacgcgccgattatcaaacctaaaaccgccagactttgtaaaaaaggtgaccgctttgaagcccatgttagtttcgagataactcgtgaagctaaagagcctctaacttggctgggtgttgatcgcggcatccataatattgctagtttatgtgtcattagagaaaatggtgagatcattgccgaaaaaaactttactggcaagcaactgaaatatgttcagaaaaaaatggaacggagacaaaaaactgtacagaaaaagggcaagaaatatcgctcagccacgcgcctgagtgaggctaaaaaagctattcatggcattgccaatcgcatcgttgaacaagccaaaaaacatcatgcacaggttgtgatagaacatcttggtaatttgacaagcagaaataagaaacgcaataagagcaacttcaatcgtctgctaggccgccagcaatattctaaactaaaagatgtgttggagtataaattatcacgagcagggttacccaaaccgctatccgtttctgctgcctatactagttccacctgcccaaaatttggtgttagcgaccaaaacaatagagatagaaatgacccaaataatgcgttttgttgtcagaattgtgggtataagcatgacgctgatttaaacgctgcacggatgattaccctacaaaaaatctggcgtaatggattgccaaaaaacaaaaaaacacttaaggttaatgtattagatgagacggatttttctttaccgagctttttgaaacggttaaatctttga

SEQ ID NO: 66629 - DNA, 1665 bp, Acidobacteriaceae bacterium sp.
atgttcaaaaccgcgcgcttcaaagttcacaatccgtcccgacacaagagcacaatgctctggtacgccatgacccactatcacgatgcgttgaaggccgtgctcgaaaagacgctggctgttcccgatctgctggagcaaatctcagaacttgacaaaaaagaaaaacttcgccctaaccagtacaagctcaggaagctgcttcgtacgattcttccgaggggttgggaacttgcacctttgacacgctatctcgaattggatgcagctgcgatgctgatgagccatttcaataagtcgtacaagggagcgaacgagtccaatccgcccacagtctccagcctggatgcgatgacagacgcggagtttcgcaaggcatacagcgagttcacagacccggaggcaaagctcaccgtcaagccgcagcatcaggagaagatcgacaaagcaaaggaacgaggcgaaactcgcgtcgccaaacgtctgagcaaaatctacgccagctgggccgtctcccgcgccgcaggacaagttctgaaaaagttagaaggcgctctgccccaccccatcgaattcaccaacaatgagttcgggcaaggctgcttactcgcctattgcgatggaaactactatctgctcgtcaggctcttcgccaaaaaacacaggtacaagcagaataatgtactcaaggacggcttcatcagctgtaaaacgaaagagcctcttggcgggaagaaataccccggcctgattctgcctcttgaattgggtcgagaattccatgaacaggagtacctgacttacggctccatccaaagcgccaagctggtggtgaagcggcgggaaaagcctgcatcgagggctaaggcccgcacctcttctcgcatctcaacggacaagcagaagcccatccccttcaatgctgaagactacgatttttacgttcatgcggccttcgagtttaacccaccgaaggttgaaactatgactttcctcggtatcgaccgcggagctgcaaaactaggagcagcgacgctgatcgaccagcacggcaagcgtctggaaaccaatctcgatctggacggctcagcattcgctgcggagatgcggcgctacgaacagcagatcaagcgaattcagcaacagggaaaacagaagtcgcgcaagttttccctgcgcggcaaacgagcagaaatcattctgggagagtacgccaaccggattgttgctattgccaaagagaatcgctcacaaattgtcatcgaagccatcaagggcgtgacgatgggccgattcctcaagcaaagccagttcaccaaattgaagcagatgcttacctacaaggcggagcgagagggattgccagcccctatcgaagttcctgcggcgttcacttcacagacctgcgccagatgcagccataaagatccagccaatcgtcccaagaaagatgcggctggaaagtcgattcaggatgtgtttttgtgcacggcttgcggtcatcacgccaacgcagattccaatgccagtctgattattgcattgcgggggatgcatcagattgaaaatggtggtaaattcaagaagttcgatatctttcaacagtggttgaaggagcttatcggccgggacggttcctctgccccagggcagttgaacccgtag

SEQ ID NO: 66630 - DNA, 21 bp, Acidobacteriaceae bacterium sp.
tcacggctgacggaaacgacc

SEQ ID NO: 66631 - DNA, 21 bp, Acidobacteriaceae bacterium sp.
tcacggctgacggaaaccctc

SEQ ID NO: 66632 - DNA, 21 bp, Acidobacteriaceae bacterium sp.
tcacggctgacggaaacgcaa

SEQ ID NO: 66633 - DNA, 21 bp, Acidobacteriaceae bacterium sp.
tcacggctgacggaaacctgt

SEQ ID NO: 66634 - DNA, 21 bp, Acidobacteriaceae bacterium sp.
tcacggctgacggaaacttac

SEQ ID NO: 66635 - DNA, 21 bp, Acidobacteriaceae bacterium sp.
tcacggctggcagaaaccctt

SEQ ID NO: 66636 - DNA, 1548 bp, unknown
  TnpB Polynucleotide
atgttggacactcagtcagcgttcttgacggtgaagtacaagcttcacaatccgtccagacgccgcagggcgatgctactggacgcgatgcgccgcgcccataaactccttagagcaattcggccagacgtagaggcgatggccgccttggatcagcccccgcgccgcgaggcccaaagcaagctgtggcgaagggcgcaaacaaggctgcactggagagccaagagaaagcttcaaaggaagctgcaagacctcgctagaccgcttccgctgggggccgggccaaagcaatccattatctttgatgcgatggcacaagcggaaagctatctcgaacttaagaaggcgaacccgaatacctcttatcccgtaacgcctcgcctgaaagtgggggaagacgatagaggggccgcacttgatggactcgccaactctcagtccatcttagaggagaacgaataccgcgaccttttggcaaagctctcacgtccgggtatcccccgccctctcaatattctcaagaatcgcgttagcgacggtgcgctgatcttgcaggatgacaaaggccgccttttagccttcatcaacctcctgccccgcactgccaatcgcaaacgcacggtttcccttgatggtcttatggatacccgcacaggtgaaatcatggcggggtcaacatctggcggcgacttatttccccttgagggaagccgatggcacgctgagaaatttcttagccgaggaacgctacaggccagccgcctgatctatgacgggcgagacttctacctggctgcgacattccagtttgaagcacccgtgcgcgaacctacggcataccttggagtggaccgagggattgaacttctcgcggcctgggctgtcttggatgagaacggcgaaaagatcgaggacggattttgcagtggctcgcgcctgcgccagttccagcgccgcgaagaacgtcaacagcgccgcgttcaacagcgcggtaagatttattcatcccgcacccgacgcatgatcgccgatgaagaagtccaccgaacggccaatgagattgttagcgccgccaccaaacacaatgcccaggtggtaatggaggacttaagaactatcgccatgggaccacaccaagcacggcccaaaggtgcgcgccgcggtggctggcgtcggatgctgacgcgagcgcaatacatgaagctgaaacactgtgtggactatcggctcaagatcgaaggcttcgcacctataaggcgcggccaaacttccttcattgaagtcagccccgcatacaccagcgtcacgtgttcggcctgcggccaccgggataaagagagtcgccagggccaagccgtatttgtctgcaccaagtgtgggcacaaagagaacgcagacgtgaacgccgcagccatggttgctgctaaaggcaaacactttgacgacatcgtgcgcggaaggaggaagggacaaaaactgcgcaatgatgaacagttttcagcgtggtacgccacgttgaagaatgggggcgggacacatgtgtcttag

SEQ ID NO: 66637 - DNA, 36 bp, unknown
  Direct Repeat
ggtgcggccacaggggaattgtggggtatcgacgac

SEQ ID NO: 66638 - DNA, 36 bp, unknown; identical to SEQ ID NO: 66637
  Direct Repeat

SEQ ID NO: 66639 - DNA, 36 bp, unknown
  Direct Repeat
ggtgcggccacaggggaattgcggggtatcgacgac

SEQ ID NO: 66640 - DNA, 26 bp, unknown
  Direct Repeat
ggtgcggccacaggggaattgtgggg

SEQ ID NO: 66641 - DNA, 1296 bp, unknown
  TnpB Polynucleotide
atgcctgtgcacctgacggccaaagtcaaggttcacaacccgtcccgacgaaagagggccatcctcgaccgcgcccttgaggaatacactcgcgccttcgccgagcttctggcctgggccaaagacaacatggacgttctcgaggagaaaggtcggttccgtgggcgctttaccgagactgccatccgctccgccttccctaacccctctgccctaaatcactaccatctgcactcgagcgctcgggatgcgctttgggttgatgtggcgggtacgctgtgctcctacttcagacttcgcgaagagaactcgctcaccgcgttccctacctgtcgtgacccgtcgccggagacctaccctgatgccctgaatgatttcgccgctgttcttgacgacgaacaacaggaaaaggattgccgtgcgcgtctgctgagggtcgcacgtggctccgttatgcccatctacttctcccgccccgacgctgtcccccgccagcgcaacttctccctcctgcatgatccgcagcgtcaacgttactacgcgctcctctacctggagccaggcgcgaacaactcagatagctgcctacgcggtaaggggaacctagtgcgagtggggtggcctcaaaacaaggcggcaaccgatcctaagccggtgttccgcgcaaaggccccttgtgccgtgctcttgcccctcgctttgggcgactggcacgtcgagacttttctgagtgcgagtctgcgcggggacgcaaacgtccgttcagccttcctctcgcggcgcgagcgagaggggagcgaacccgagtactacgtccacataaccttcgagttctcgcccgagcgcgtccaaaccgagactgcgctcggggtggacaggggcctcgccaatctcatcgctctgacagtgaccgacgaggccggcaagattctccatcaggaactgcacccagggcgcgacctgatcgactaccagaagtacgtttataccgtctaccggagccgtcagaagaggggacgtagtatcgccggtcaggtgatggttgctcgggtgaacgaggaggtctgccaccggttggcgaatgtcatagtggaaactgcggtcgagcacaagtcccaggtggtgatggagaatctcaaatggttcaaggaacgccgacgggacttcgggcaactcaaacgagcaccgctgcagcgcattcagcagatactcgagtacaagctgccgatgcgggggctgccccgcccctggtatgagaatccagcctacacgtcaagagagtgtccgcgttgcggc

SEQ ID NO: 66642 - DNA, 1548 bp, unknown
  TnpB Polynucleotide
atgttcaaaacggcctcttttcggctctacaaacccacccagcacaagcgggcgatgctgttgtacgccctagagtcctaccacaagacgtttgctgcgcttcttaatcgttgccttgacgactccggcttcaaagagcggtgcaagtacacaagtcccaagggtcgaatcagctaccgtcagcttgccattgaaaaggaagcccgcaaacaattccctgtcgccaactggccttgcgtaccccttaaggactatctgattgcggacgtcgccactgctttgggcagctactacgctttgctcgaagacacttcggtccaaacgaatcgcccaaccgtcaattcattggatcccatctcgccggaagaaatgaagcaggcattcgtcgatttcattcaagcctacgattctggagtggtggagctaccaggcgggaagcaagcgcagattcaggaactgcgcgcattgggaatgccgcgccacgccaaacgcctagaggctattctccgcaatcgtctcgcatcgaagatgacaggtcagattctgcgccgggtcgagccgggaaacccgcgtccgattgaatttacccgctgcgaggagcgcgggtttatgatctttcaaaagcagggccgttttctcattggagtgcggttgttcgggactacatcgaagcattacaaacggattccactcgaaggtctaaccgactggaagactcatcagccagcttccggcagcgcccccctaattcttttccctgttgaaatgtcccgccgcttccatgagaacgaatacttacaattcggcaagccgcagtccgcgaagctgctctgccgccgaaacgaatcgggaaaacaagatttctttatcaatatcgcctttgagttcagccccgaaccggtccagcccgaaaccattcttggaatcgaccgcggatggaaaaagattgcatcctgtaccctgatcggcatggaccgaaaggtgatccaatccgggatcgatatggaaggctccgaatttttcgccgcacagaaacgctacgagttactcattgcggaggcgcaacggaaaggcaagaacctaaaaggcagattccgggtgcgcggcaggagcggtgataatgccctaggacagtttgcgaaccgcttgattgcctacgcggtggagcacaaggccctgatcgtgctcgaaaggctgaacgcccgcagcatgagccgctttctctcccgaagccagatcgccaagctgcacaatcttctttcctacaaggcggaacgggcggggtttccgaaacccatcgaggtcagcgcggcgttcagttcacagacatgcgtgcaatgcggccacaaggactccgccaatcggcccaagaaggacgctgagggcaaggcgatacagcacgtctttaagtgcgtgaattgtggctatgcggccaatgccgaccacaatgccagccacttcattgccttgcggggtttgcaccgcatcgaatgcttgaagaacgggtcacgagattattcctttgagaaattcatcaattggctataa

SEQ ID NO: 66643 - DNA, 36 bp, unknown
  Direct Repeat
gctgtagaccaccggaatttcttgggtgatcacagc

SEQ ID NO: 66644 - DNA, 36 bp, unknown; identical to SEQ ID NO: 66643
  Direct Repeat

SEQ ID NO: 66645 - DNA, 36 bp, unknown; identical to SEQ ID NO: 66643
  Direct Repeat

SEQ ID NO: 66646 - DNA, 36 bp, unknown
  Direct Repeat
gctgtagatcacctgagattccagggtgatcacagc

SEQ ID NO: 66647 - DNA, 36 bp, unknown
  Direct Repeat
gctggagaccaccggaatttcttgggtgatcacagc

SEQ ID NO: 66648 - DNA, 1686 bp, Hyphomicrobiaceae bacterium sp.
atgggccagttcctgaccgccgtcttcgagatgcgcccgacccgccgcaaggcggcgatcatggaacgcgtccgccgggaggcggaggacgtgttctggtcggtgatggcgcccgccaacagggctgcggccgagcaggcggtggcgacggaggacaagaccgagcggcgcaaactgctgtcgacctatgaggtgcgaatgcgcgcggaggccgcgcgggcggggctgatcgaagctgtggcccagggtctggcgcgtgatgccggaatggcggtgtcgtcttatgtcgaactgaggcggaagggccaatccgcagaatggcccgagcgaaagcttgcgaaggcctcgggccatgaggacggccttgccgctctcgcggcggcgatgacgcgggaggaggagaacgccgcccgcgacctgttcacctccgccacgcgcgagccctctccccgccctctgaccttcgcccgcgagcgcgatgcgcgcatcgtcagaaagaccgtaaacggcccgatctcggtggtgctcaacatcatcacggcgaaagaccggcgcgcgaaacagatgatgatggccgaaggcctcgacgccgccaccggcgaggcgctcagggaacacaggtcgaagaccaagctcatcgttccgctgtcttgctcgctctggcacgaacagaaattcctcggcggcaaggcgatcctgcgctccagcatgatcctgcggcggggcgagcgctggttcctgcagtcgcagttcgagtttcccgacgcgacacccgtgaagacggagggatcgctgggcgtcgaccgcgggctggtgaacacgctggttggcgcggccgtggacatggagggcgcggtcacgggcctgcccatcatctcaggcccggcgatcggcgacaccattcgcgcgctcgacaagaaggaccgcgcctacaagcggcgcacgggccgggtgggactgcagcaccgccgccgcgtcgaccacatgctgcacgagatgacgaacaggatcgtggccgaggcgaagaaccgccgcctgcaggtgacgatggaagacctgaagggcttcaagcagaccatcgtgcagaagcgggcgaagggcgggcggcgcaacccgtgggccagaagcctgaagaaggcccagcttggcaagatcgaacagattctggactacaagctgactttggctggccttcccaagatgcgcatcgtgccgccgggcggcacatcgatcacctgttcgcgctgcggccatgcggcgaaggagaaccggacagagcaggcaagcttcaaatgcgtctcatgcggcttcgaggcccatgccgacgccaatgccgccgtgcagatcgcgcggcgcggactgatgaaggtcaggaagggcgacaagctggccgtccttcacacgaacatggccgtggcgctgtcgaagcgcggcggcgatggtgggctcgggcttctggcggcgtctgccgccggagggttcgttgcagcccacgcttctgcgccggagccgtatgaggccgaagcgccgcaaggcgtggaggtccttagcttcgatgcggggcaagaactcaccgatgccgccaaaaacctccgaaaggatgtattcgcagagcgtggcggctcagattttgagggacaaaacactggaaatcgtaacaaacgccatggtttggatgaagcctga

SEQ ID NO: 66649 - DNA, 36 bp, Hyphomicrobiaceae bacterium sp.
gatgcggtccccctcgatttgtccggtgagcgcaac

SEQ ID NO: 66650 - DNA, 36 bp, Hyphomicrobiaceae bacterium sp.
gatgtggtccccctcgatttgtccggtgagcgcaac

SEQ ID NO: 66651 - DNA, 36 bp, Hyphomicrobiaceae bacterium sp.; identical to SEQ ID NO: 66649

SEQ ID NO: 66652 - DNA, 36 bp, Hyphomicrobiaceae bacterium sp.; identical to SEQ ID NO: 66649

SEQ ID NO: 66653 - DNA, 1176 bp, unknown
  TnpB Polynucleotide
ttgattaatgttggtcaaaaggccaactggcctacaagaagacccaaggacgacccatatcctgctgcactagaggctctgacagcatcgattacgctggcggaaatgacctctgctactgaggcactaagcgccaaagctaggactaacgaaccaaggcctttgtccattgtccgtaacgacaagcgaggcacaatgctactgaaggatgacaaaggcaggctgtttgcttgggtcaacttacatgggcagggcagtcggtttgcgaggcctgtcgttgtaagcaacatcgtgcatacacgcactggtgaaatcgttaattttaaatccaagctagggtgcgtcatgccgctggcatgcagtcagtggcatttccaaaggttcattgaaccgggacagatcacatcctcaaagctcatctacggcaaaggcgactttttcctagcctgtgcttttcagtatttgatcaaagacattgattgcgatacctatcttggcatcgatagaggcattgaggaaatagccagctatgctgtcattaacgacgatttaaaactgttgaagcaagggtcatttgaaggctctacgcttagggaataccaaaggaaaaaggaagcagcagccaaagcgacacagcgtcgaaagggtgagtcccgcgtctcgtggcgtgcctatgcagatcatactgtccgtaccttagcgaacaagattgttgaagaagcctattcgcataaaagtcaggtggtgattgaggacttgggagctatctcacaggagcctcagcataaaagacccaaatttaggccaagaaccaacttaaccaaggtgctgaatagggcccagtatcaaaagctagctaaggttctggcgtacaagcttcgtgctgtcgggctgccatcgccaaaattggtaatagccgctggtacatctatttcttgcaacgcctgtggttacagagatagggggaaccggcaaagtcaggctacctttatttgtcttgaatgtggccagagtgagagtgctgatctgcatgcagcgaaaaacattgctgcaaaacacatatactggcggcaagttggcccaaaggttaagggcaagaaacttcaggataagtttaaatatgagcactggctcaaagcgagaagggaacgattgaaggttaatttggaggaatga

SEQ ID NO: 66654 - DNA, 1371 bp, unknown
  TnpB Polynucleotide
gtgccacgcactgtgatcgtccagaagacggcgatcttcaagctccacaacccgagtgtgagcaaacggcaggtgctcgacctggcattcgctcggtatggcgaggcttacaacctggcactggagaagtgccgacacttgcccgacgaatggttggtggcagcacgggagagcaagcgactcccggggctgttccgagcggcgatgcagatccgcccctgcctgcccgttggttccgaactcaagctgcccaagtcattgcgagatgggctgctgctcgacatcgctggcaacctcctctcgtactgccaactgcgcatgcgatgggaatcccagggcgaacatgaagggcaggctggcgagcctaagtatcccgccccgatctacggctacaggccagatgcttactatgccaccctcgccgaggtggtcctctgggccggcgactcctttgatttcatcgaattccaggcgcatctgactcgagaggcaaaggaagtcgtgcgccccctacacttcgcccgagcgggcgacttcgcactcgagcagttagatggcgatcgctgggggacaacgctgatgctgcagcccaaaggctatatcccgaccaggctgcgcttcccactcgctttcggtgaatggcacgagcaggagtacctcggcaaaggaacgcctcgctgcgctcatctgtgccggcgagaaggcgagtacttcctgcacgtgagcttcgagttcgagatcgaggccatggctcggggcgaggaacaggcctaccttggcatcgatcggggagtgacaaaacaggcggcgttcgcactggtcgacctggaggggcacgtactgcacgtcggctccctcgggcgtgagctccggaatctgcagatcacgctcgggcgataccggcaagcttcacagaaagccggccggcgtgtgcgatcgctggactggcagcgccggcaccaggaggaaatgctgcaccagatcgccaatgctctagttgagcgggcgagagagaaccgggccctagtggtggtcgaggatttggacctgcagaccggcggcaggtttgtgcggtcgcagtatgcgaagttcgaggggatcctggactacaagttgcgtctggcgggactgctgccgcccagagaggtattcggggcatactcgtcgcagatatgttgccaatgcggtgaggacgggcagcgaggggaccctgaccgggaacacttccggtgcccggcatgcggggccgaatcagacgccgacgagaacgccgcagtgaacatcgcccgacgggcgctctaccgcaagtcggcatgggagcgccggggtgggtatcgagcctttcatcgctccttcgggagtgttggatag

SEQ ID NO: 66655 - DNA, 27 bp, unknown
  Direct Repeat
ttctccccatgggtgcggggttgtgac

SEQ ID NO: 66656 - DNA, 27 bp, unknown
  Direct Repeat
ttctccccatgggtgcggggttgtgac

SEQ ID NO: 66657 - DNA, 27 bp, unknown
  Direct Repeat
ttctccccatgggtgcggggttgtgac

SEQ ID NO: 66658 - DNA, 27 bp, unknown
  Direct Repeat
ttctccccatgggtgcggggttgtgac

SEQ ID NO: 66659 - DNA, 27 bp, unknown
  Direct Repeat
ttctccccatgggtgcggggttgtgac

SEQ ID NO: 66660 - DNA, 27 bp, unknown
  Direct Repeat
ttctccccatgggtgcggggttgtgac

SEQ ID NO: 66661 - DNA, 27 bp, unknown
  Direct Repeat
ttctccccatgggtgcggggttgtgat

SEQ ID NO: 66662 - DNA, 1752 bp, unknown
  TnpB Polynucleotide
atggcagggcagtacctcaccgccgtgttcaagctgcgtccatcgcgccgcaaggccgcgatcatggaaaagctgcgcgcaaaggccgaggatgttttctgggatatcctggcgcagaaacgccccagggcggatgccgtcgcggccgaggctgacaagaaagcgcggcgcgaacaatcccgcgcgctggaccaggaaatcaatcggcttgtcatccgcgatgcgaccaaggccgggttgaatgaacccgtcgcccaggggcttggccgcgatatctccatggccatcggttcctatatcgaactccgcgccggggggcatgaagcggaatacccggcccagctagttacctcggaagctgatcacgccgccgcgcttgatgcgttggcccgtgccacaacgcgggaagaagaaaacgccgcgcgcgatgctcttggccgcgtggcgcgtaaaccggggccaaggccgcttaccattgcccgcgcgcgcgatgggctgatcattcgcaaaggcccgaatggtgcgctttcgctggtgctgaacatcatgcgcgccaccgatgaaaaggcgcggcccgcgcagcttgcgccgggcatggaagcggccaccggggaagttttcaaaggcggcgtttccaaaaccaggatcatcctgccgctggaatgttccctgtggcatcagaacaagttcctgtctggcaaaaccatcctccgttccgggcttttgctgcgccggggcgatgaatggttttattgcgcgcaattcgaaatgccggaacgcaaggcggcgctttccgaagcccggcttggtgtggataggggcatcgtcaatccgattgcgctgagtgttgtggccggagatgggcgcatcatacgggtttcagaaccgctgggccaggaagtgggcgctagtattgcggtggcggatcggcggcggcgcgcagaacaaaagcggcgcggtgccaccagccaccggcatgtggaacgcgtggaccaggcgttgcatcttttggcgaaccgcattgtggcggaagccaaggcgtatcgcgcgcaagtcgtggtggaaaagctggatggcttgaaacgcactatcaccgaagcccggcccaaaggcgcgcggcgtggcgggtggcggcggcatttgaaaaaggcgcagcttggcaagttggaagtgctgctgggctataagctgaagctggcggggctgcctgcgccaaaggatgttgtggcgggcggcaccagccaaacctgccctgcctgcgcggcgcgggatgcgaaaaaccggccaagccaggaaagtttttgttgcatcgcctgcggcttttcggcgcatgccgatagcgtgggtgcggtgaatatcgcccgccgcggcgtggcgatgataggaattacgaagggcgataaactcgcgcctcgtgaacaggacatggttgcgcggcttaggcggcgtgacgatggcggtcttgggccgttggcggcgcatgctgctggcgggttcgttgctgaccgcgcttctacggccaagggcgtatcatccccgcaaggggagttacccggcctggagcagaaaaccacccatggcgaccaaaacgcccgcaagggcgtattcgcagcgcggggcgccacatttttcagaggtcaagacgggaaaaaaccattgcgcggcaagggcgttacagatgatcccccccggagtgaccctgaatttgtggggtggccgcaacgcgtttgcctggaacccatcgcggactga

SEQ ID NO: 66663 - DNA, 31 bp, unknown
  Direct Repeat
agtgactctgagtttgtggggtggccgcaac

SEQ ID NO: 66664 - DNA, 31 bp, unknown
  Direct Repeat
agtgaccctgaatttgtggggtggccgcaac

SEQ ID NO: 66665 - DNA, 31 bp, unknown; identical to SEQ ID NO: 66664
  Direct Repeat

SEQ ID NO: 66666 - DNA, 31 bp, unknown
  Direct Repeat
gagtgaccctgatttgtggggtggccgcaac

SEQ ID NO: 66667 - DNA, 31 bp, unknown; identical to SEQ ID NO: 66664
  Direct Repeat

SEQ ID NO: 66668 - DNA, 31 bp, unknown
  Direct Repeat
agtgaccctgaacttgtggggtggccgcaac

SEQ ID NO: 66669 - DNA, 31 bp, unknown; identical to SEQ ID NO: 66664
  Direct Repeat

SEQ ID NO: 66670 - DNA, 31 bp, unknown
  Direct Repeat
agtgaccatgaatctgtggggtggccgcaac

SEQ ID NO: 66671 - DNA, 1512 bp, unknown
  TnpB Polynucleotide
atgactagccagttcctcacctgcgttttcaagttgcataaccccagtgcgtggcggcggaaggtgttggatcatgtgttcgagcagtatacacttgccaagaccgacctcttgaagtggtgcaaactcaacctgggcgcgattcagggtcaaggcaagtacgagtacaagcgcaacgggaaagacaaaagcaagtataccagcatgtcaattgcttcttgtctgcccaaaacaggggggctgaacgttgacattgcctcttgcctgaaggaatcgctcatccaggaagtggcggcgggtatggcgtcgtatctggagcttgaaggccaggagggagagacgggctttccgacctcccgcgacccatcgcctgaaggttggccgaatgcgttggatgacttgcaggtagtcggtggaagcccggatgacgaggagcgtgccaaggccaatctactccgccaggcgaaatccagcgttgttcccattccctttgtccgttcgcgcgactttgccatcctgtatgatgtacagcaggaccgcttctttgtggcactgaagatgttgccgagcggtcattgcctgggtaggccgctgggccaacagggcaacctgctaaacttgaatgatgatatggggccgttcgccgcccgcagcaggattatgattctggtcccgctagaagtgggccgacgcaacggcggctggcattggcagtacgaaaacttcctgctgcccaccatcgcaggcaaggcgtccatccagtcggccaagctgatgcggcgcgagaatggtggcgcacatgactatttcttgcatgtctcgtttgccttcgattgccctgatctgtataagccagaagcctacctgggtattgacaagggtgtactctacacgatggcctacggcgtggtggacctggaaggaaacgtcatcgagatggggcactacgatgacggcctgcgcagcttgcaaatagccacacgccgaaggattcagaagcggcagcagcagggccaacgggtcacgattagggactatcgggggcgcacacatgatggtatattacaccagcttgccaatcgaatcgtagaaaaagcagccaaccataaggcgcagctagtagtagaaagcctgaatgttggggtgaggggcgggttcgtcacatcgtcctggcgcaaactggacaaaatcctgcaatacaagtgcaagctggctggtgttccctttggtgtcggcgtatccgctgcatactcatccataatttgtattcactgcggggagttagtagaacgaaatgacagggttgtgacctgccggcggtgtggagcggtggagcatagcgacgatgctgcatcggtcaacattgcacggcgggccatgtaccgcaagaaagactgggagaagaaagggggctatcgagcatttcacaggagtttctcaaatctcgctggttttgagtccgaaaacgatttgagacagcgagtggggggcattcagcttgctctaatgtaa

SEQ ID NO: 66672 - DNA, 36 bp, unknown
  Direct Repeat
gttgcaatgggtaacacaggatcatagacaatgcga

SEQ ID NO: 66673 - DNA, 36 bp, unknown; identical to SEQ ID NO: 66672
  Direct Repeat

SEQ ID NO: 66674 - DNA, 36 bp, unknown; identical to SEQ ID NO: 66672
  Direct Repeat

SEQ ID NO: 66675 - DNA, 36 bp, unknown; identical to SEQ ID NO: 66672
  Direct Repeat

SEQ ID NO: 66676 - DNA, 1590 bp, unknown
  TnpB Polynucleotide
atggatgagtttgaccgaatcaggaatgggggcgacgcgccacctgtcaagtattatcaggtacaccgcacggcgagcttcaagctacacaacccgacgaagcggaagcagacgatcctcaacttcgccctgactgaatacaccatcgcgtattctcaactgcttgactgggcttcggccaacagggatacgctcgaaccacagatcatacgccttcgagacgatggtcggttgtcctggatcggcgacaaagggctggcaggcatcctgcgtacgtccggcatccggcccaatgttcatagctccctggccgaatcgctttacctggatgttgcgggtaatctgctcagttactacaggctgtaccatgactaccgcaagcaggcggaacgctatctgcacgcggttcgggaagcggaggctcgtggtgagacgctaaaacgcaagccacccagcccacccagttttcccatctcgcgcgatccgcgcgcccacgccttcggcgaggccctggacgagattggcgctaccggtgatgtggacgaggaaacctggttgtaccggcaggcgtggctcactcgcttgcagcgcgggcggtacatgccgctgtacttctcccggcccgatgcagtacccaataaccgcaatttctccctgctagccgacgacgagcatggcaggtactacgccctgctgtttctattgcccgacaagcacgaacttggtcaaccgatcgcccacaacggcaacctgcgccgggttgggcacccggccacagcgacgcccccctatgaccccgtgtacttcgccagccggacgacctgcgccgtgttgtgcccgctggagatgagtgactggcatgtgactgagttcatccagcatccttccgccaatgtacgctccgcttttctcttcgagcgcaacggggactacttcctcaatgtcgcctttgaatacacggtccaggcgatcccaactcaggccgtcctgggcgttgatcgcggcgtggctcagttcgctgcgctgcgcgtgctggatgctgaagcgtgcgtgctgcacgaggagctgtggtctggcgacaagttcctggctttgcagtgggacatcaagaagactctgcgcaggctgcaaaaacgcggcagggatgtgactgggctggtgcacatcagccgcatcagcgagcagacagtgcacgccctggccaacgccattctcgaacttgccaggcagtaccgggcgcaggtggtgttggagaatctcaagcacctggacaggcagaaagagcgttttgtcaagctgagggcaacgccgtaccagcgaatcgccgctgtgcttgagtacaaactgcccttgcacggcctgccgcctcccgcctatgtctcgcctgcctacacgtcgcgcatgtgcgctcgctgtacttacggcgacagcagcaaccgccctgatcaggagacctttgtctgccagcagtgcgggcacaccgatcacgccgatctgaacgcggcgacgaacatcgcccggcgctggctggctcgccagcagggccaagactggtggccgcacaatattgccagtaagcgtgtgcgctaa

SEQ ID NO: 66677 - DNA, 36 bp, unknown
  Direct Repeat
gttgcacagcctggaagccaaactggtaggctgtga

SEQ ID NO: 66678 - DNA, 36 bp, unknown; identical to SEQ ID NO: 66677
  Direct Repeat

SEQ ID NO: 66679 - DNA, 36 bp, unknown; identical to SEQ ID NO: 66677
  Direct Repeat

SEQ ID NO: 66680 - DNA, 36 bp, unknown; identical to SEQ ID NO: 66677
  Direct Repeat

SEQ ID NO: 66681 - DNA, 36 bp, unknown; identical to SEQ ID NO: 66677
  Direct Repeat

SEQ ID NO: 66682 - DNA, 36 bp, unknown; identical to SEQ ID NO: 66677
  Direct Repeat

SEQ ID NO: 66683 - DNA, 36 bp, unknown; identical to SEQ ID NO: 66677
  Direct Repeat

SEQ ID NO: 66684 - DNA, 36 bp, unknown; identical to SEQ ID NO: 66677
  Direct Repeat

SEQ ID NO: 66685 - DNA, 36 bp, unknown; identical to SEQ ID NO: 66677
  Direct Repeat

SEQ ID NO: 66686 - DNA, 36 bp, unknown; identical to SEQ ID NO: 66677
  Direct Repeat

SEQ ID NO: 66687 - DNA, 36 bp, unknown; identical to SEQ ID NO: 66677
  Direct Repeat

SEQ ID NO: 66688 - DNA, 36 bp, unknown; identical to SEQ ID NO: 66677
  Direct Repeat

SEQ ID NO: 66689 - DNA, 36 bp, unknown; identical to SEQ ID NO: 66677
  Direct Repeat

SEQ ID NO: 66690 - DNA, 36 bp, unknown; identical to SEQ ID NO: 66677
  Direct Repeat

SEQ ID NO: 66691 - DNA, 36 bp, unknown; identical to SEQ ID NO: 66677
  Direct Repeat

SEQ ID NO: 66692 - DNA, 36 bp, unknown; identical to SEQ ID NO: 66677
  Direct Repeat

SEQ ID NO: 66693 - DNA, 36 bp, unknown; identical to SEQ ID NO: 66677
  Direct Repeat

SEQ ID NO: 66694 - DNA, 36 bp, unknown; identical to SEQ ID NO: 66677
  Direct Repeat

SEQ ID NO: 66695 - DNA, 36 bp, unknown; identical to SEQ ID NO: 66677
  Direct Repeat

SEQ ID NO: 66696 - DNA, 36 bp, unknown; identical to SEQ ID NO: 66677
  Direct Repeat

SEQ ID NO: 66697 - DNA, 36 bp, unknown
  Direct Repeat
gttgcacagcctggaagccaaactggtaggctgtgg

SEQ ID NO: 66698 - DNA, 1110 bp, unknown
  TnpB Polynucleotide
atgcgcccgattttatatctaaacaatcgaataagcgacggcttcctcatcttgcatgacggcagcaaggatagatattttatttatctgaacctctacagccaaaacagtcgctttgcccaaaaaatcaatcttggcggtttggttgatatcagaacaggcataaggttcccggaaaataagaccaatacaactggtcttattttcccgattaatttcagccgtgaatttcattttgaaggctttatggatagaggctttcaattggaacaatttgcccgtcaggtaaaatcggcctctgccaagcttatggagcgcgacggtcgttttgaggtgcatgtgacttttgaattcaaaacgccgaaaatcaaacctaaaacctttatgggcgtcgacaggggtatttataatctcgccagcatgtgtgtggcggatgaggttgggcggataattgaagaagaaaatttcagcggtcgtgaccttcgttttgttcaaatgcgcgaggaacgacggcaaaaaaagatccaaagaagtgggagaaaatacaaatccaagacgcgattgagcgaggccgacaaagcagttcacgcggctgccaacaaaattgttgaaatggcggtcaaacataatagcgtggttgtgcttgagaatttgagtaatctgaccaagcggactgtcaaacggcgtcgtagcaatctcaaccgcctattgaacaggtcacaatatacgaaacttcagagtgttctggaatacaagcttccgctttatggagtaccggttgaaggcaaaagtgaaacgcgcatgctaacaacagttgcggcacaaggcaccagtcagacttgccctgaatgtggtcattggagccccgacaatcgaaagaaaagaaccagaccaaattcaaatgaatttgtcatagatacgtttttatgtgtaagatgtggttattggcatgatgcccatctaaacgctgctagaataattgcgctaaaaaagaaatggcggctcaacctgccaaaaagcaggcaaagcaaaaaagctaccgagttgcgggatacgaagtatagttttgaatgctgtttgacatcgtgggcagatgaaagaggaaaatag

SEQ ID NO: 66699 - DNA, 37 bp, unknown
  Direct Repeat
ggttggtttcgacccgaaaatgcggggtgagcacagg

SEQ ID NO: 66700 - DNA, 37 bp, unknown; identical to SEQ ID NO: 66699
  Direct Repeat

SEQ ID NO: 66701 - DNA, 37 bp, unknown
  Direct Repeat
gagtataagggctcgctttcccatagggaaagcccag

SEQ ID NO: 66702 - DNA, 37 bp, unknown; identical to SEQ ID NO: 66701
  Direct Repeat

SEQ ID NO: 66703 - DNA, 1515 bp, Alphaproteobacteria bacterium sp.
ctgctgccaactcaacggaaggcagccgctctggagcgcgcacgaaaaggtgcagaaggagccttctggaaccttatggcgaagctgcgtgcccccgctcaggctctggtgaccattcctaaaaagggtgatcgaaaagcagagttgcgcaagctgatcacttcggagcaattgaagtcctatagcttaccgaccgccgtggctgatggagtgtggcgcgatgtgatgatggccgtgtcttcatatgtcgaactcaaagctgggggtcatgaagctgagtggccagaacctcagcccccagtggaagctgattatcttcaaggtttggaagatcttgctgtcgctcaaactcttgatgaagagaggtgcgctcgcgatcgagtatttcggttacaacgccggcaagcacttcgtcccatgacacttcgccgctcacgggaatgtcgccttgtgcgtcaggaagaaaatgggcgcatatccgcggtattgatggtttcaaaccatagttggtcgggagggcggaaatctctacagcatgccggcatagacgctactactggtgaaactttgaaggcgtctaaatccgagtgcgccatcatcgtgccagtagcatgctcaaaatggcatgagcagaagttcttatcgggacgggctatactgcggagttgccagatacagcggcagggtgatcgatggttcatgtatgcccagttggagatggctgcggcggaacctgtaactcctgagacagtgttgggggttgatcgtggcctaaaacgggctttgagtgcggcttctgtcaccagaactggagaagtccgtcatgtttccacgatcgcgggcacggagttcgctgacgctatcagagcggcagaacgtcgaggccgcgcttatcaacgccggactggccggataaaggcaggccatagagaacacgttcaacacctactgcataaagcgacaaacgagattgtggctcaggcaaaggcgggtcgagccgaggtcgctttcgaaaagctggatggcttcaagcgtgttatcgtaggacgccggcccaagggtgcccgccgaaatccatgggcaaaatcactgaagaaaatgcagatgggtaagcttgaaaccatgctttcctacaaactggctttagctggtttgcctcccctgcgggaagtctttgcggctggaacttcacagacatgtcctggctgcggacatcgggatccaaagaaccgtcccgggcctggagaaccattcaattgcaccagttgcggcctcgccgctgacagtgacgatatcggagccgtgatgattgcccggcgtggtgcattgggagcggcgaaaaagattacgaaggggtcgaaactcgatgaccttcacaaggacatggtggccggccttgccggacaccgtggtggtgggcttgggccactggtggctggtgtcgccagtgggttcgttgcggcccacggctctggcggacaggcgaatgaggactcttcggagtccctgacctcc

SEQ ID NO: 66704 - DNA, 828 bp, unknown
  TnpB Polynucleotide
atgactggatatggttacggatatgaccggcctgcgggcatcacgctcaacctccagccaaaggggcagcaacctacccggctgcgcttcccccttgccttcggggagtggcatgaagagacgtacctggagaaaggaaccccgaggtgcgcgcacctgtgccgacgggagggggagtacttccttcacgttgccttcgagtttccggttgaagtgatggaagcgtccgaggcgcagtgcttgcttggcatagaccggggcatcgtcaagcaggcggcctacgcactgacagacctggaagggaaggtgctccgggttggctcgctcggtcgggagcagcgggaacttcagatcgttctgggccgctaccggcaagccgcgcagaaggcaggccggcgcgtcaccgcgcgcgagtggcagcgccggcgccaggaagagaacctgcacctcgtcgtcaacgcagtcgtgaaactcgctgcggctcataaggcgctcgtcgtaatggaagaccttaacctccacaaggcgggccggttcgttcgctcccagtacgccaagctcgccaagattctggactacaaactgaccgaagcagggctaccgcagcccaaagaggtgttcgcagcttcttcgtcgaaaatctgttccaactgcggcgaagaaggcgggcgggaccgcgaatatttccactgctccgcctgtagttctgacatggacgcggacgagaacgcggcggtcaacatcgcccggcgagcgctttaccacaaggcgaaatggacccgcgagggcggttatcgggcctttcatcgctcgtttttgagcgcgtga

SEQ ID NO: 66705 - DNA, 36 bp, unknown
  Direct Repeat
gttgtagcataccgtccattcacgtgtagctacgac

SEQ ID NO: 66706 - DNA, 36 bp, unknown; identical to SEQ ID NO: 66705
  Direct Repeat

SEQ ID NO: 66707 - DNA, 36 bp, unknown; identical to SEQ ID NO: 66705
  Direct Repeat

SEQ ID NO: 66708 - DNA, 36 bp, unknown; identical to SEQ ID NO: 66705
  Direct Repeat

SEQ ID NO: 66709 - DNA, 36 bp, unknown; identical to SEQ ID NO: 66705
  Direct Repeat

SEQ ID NO: 66710 - DNA, 36 bp, unknown
  Direct Repeat
gttgtagcataccgttcattcacgtgtacctacgac

SEQ ID NO: 66711 - DNA, 36 bp, unknown
  Direct Repeat
gttgtagcataccgtccattcacctgtagttcgtag

SEQ ID NO: 66712 - DNA, 1833 bp, unknown
  TnpB Polynucleotide
atgtctgcgaatagctcatcgcaagggccaaagactgtcacggcagtaaagactgcggtctttaagctgcacaatccgactaagcgcaaacgcgcgatgttggaccacgctctcctgcacaaccatctcgcctatacgaaggcgctaaaaactgcgatcccactggtccagactttggtcgagaccgaattgcaaagccgcgtaactgacaaagatctgatggtgcgtgagcgcaccattcatgcacgactgcgaaaatgggaacgtgcggtcattctcaaaaagcggatacggagtgcgattggcgggatgcctatctgtggggcttcgggcgccgctcgcagcttgcccggcagcatcatcggtcaaatcgaaagttatcttgagctgcataagacgcatgccacagtaggcttaccaaccgttcaaccgctgcggcgcgacgaggtgctttacgagcaggccctgcatgcgctggtttcatcgcacacagcagagcaagaggaagccccgcggaatgaattgatgcgtgtgtcaagggcgggtcaactgcgtccgcttttgtattcagggaacagggtgcacgatggatttttgttgcttcgtagggagaacgatgatcgctatttcatctatttgaatctggttccacagacctcacgcttttgtcgtctaaccaaagtcgaacaacgctcaccatcgtgtcgtcgcatagaaaacctcatcaatatgaggacgggtgaggtcgtctcgttcacaagccggaccggctgcctgtttccgattgaatttggacgtgattaccaggactcggaatttatgcgatgcggctcgccgctttcggcccagctatcgaagcgttgcggccgatatgaggttcacatctcattcgagttcaaagccaagcagattaagccaaagacgctcctcggctcggacagaggtatttacaatctcgcgtcactcgctgtcatcggtcaagacggcggcgtcattgaacgtaagaatatcgatggcaggaacctgcgtatggtccagcgagccatcgaacgaaagcaccagcaactccgaaggcggggtaaaccgtttatcggagcggcccgacgtcatgccgcgaacgaggcagtacatgttgccgctaatgcgattgttggattggcgaccaaaaaacactcgcaagtggtcattgagaatctttcaggcctcgcgtcgacaggcgggaaacgtcggcgctcgcgtttcaaccgaatcttgaatcgcgcgcaataccaaaagctacaaagggtcttgtcatataaactcgcagtcgcggggttgcctgcggctcgcgaggtacatccgagttatacctcacaagcgtgtcccttgtgcggaagtatctcagcagaaaacagattgaaaagagcaacgtcggacggtgttcagacgcatgagtttaagtgcgtgtcgtgtgggttttccgatgacgccgacctgaatgctgcacgaaacattgccttaaaacggttatggcgggacgggttatcccctgccttgcggacagtgagttttagtgaggtgccagaaaacaaaagcttttcgtcctttctcaaattccgcgccgaaaggcgcggagagcgtgcctgtgaccgcaaggtcggtgcttctgggcgcgctggtctggatgcgcaatacgaggatggcgaagtcgcgcccggtgggaacgccgttgagcctcggtctggaccgaacacccctgcgagcaaaaattcgccgaccatgcagtcggcggttagtccttcggacgaaaactcgcgcccactaaccaaatctgtgaggttgtccgacggatga

SEQ ID NO: 66713 - DNA, 1467 bp, unknown
  TnpB Polynucleotide
ttgcagaaggcttttaaaaattatcacttgctttatgataggcttttaaaggttatttataacgagttaagttccttctacagtgcgatagcatacagtacaaaaaatggtgaagcaagatgtagcgataaaaaggctgtacaatatataaactctcaatacagaaatgtcttaaattccttcgtcttatcatctggtctcaaagagtctctttgcaaagacctcgcagacaatcttataagctataaagaactattggcacaaagaccaaacacatcctatccatctctgcaaaaattaaaggagcgggtaaaagaacgaacacttgaggagttgtatgagtctcttaaagcttgtatagatacagaaacatataatcatttgcgtgatgcgattgcaagacagagtaaggagaatgcaaagttaaaacctctctcttttattagatgcgatacaacacatcaaaacatgacttttctttatagtcctgatagaaaaaaatactatgctttgctttatgtattgccatcctcaaagaaaaaacttgttataataaaagaagatgagctttacgatgttagaacagggcagcttttctcgaggccaaaaggtacaacaacaggtctcatttttccaatagaaacaggtcagcgaatagttgaacgatatcttaatgaaaaatcacagccaaaagaaggcaaacttgtttatgacagtaagaacaacgaatattatttacatcttgcctttgagtttaagcctgaaaagataccgaccgaaacaattattggaattgacagaggaatcgaagccatttgtgcatattctgttattaacatgaattacaatctgcttgaaagcggtttatatgagggcaagacattaaaagaattgttaaaaagcgaagaaaaacgaatggctgaaatgcagagacgcggcgtgaattatagatttaaagtaagaagaaattgggcaaacagaataatccatgaggctacaaatatgattgccgacattgcatcgaaatataaatcacaggtttatgtggaagacctgcaggggataactgacaggactaaagctcgcagaaaaagttcatttaataaaatgttaaaccgctcccaatttcaaaaaattcttatgactctggactataaacttgaagggaaaggactaccgagggctaaaaaagtccatcctgcttatacaagtatgacatgtgttcagtgtggtcttattaagcctgaaaacagacctaagtttgacgaaaatggtaaccctatacaagataaatttaaatgtgttggatgcggatatgaggataacgctgacaaaaacgcaagcagggcgattgcactaaaaggcatatggacatatattaaaaaagaagataaaataaggcaggaaatcgaaagttttcaatcttttttgaataaaaaattaaataagaaggtcatagctctttga

SEQ ID NO: 66714 - DNA, 28 bp, unknown
  Direct Repeat
attcatctgaaccatgtgggatataaag

SEQ ID NO: 66715 - DNA, 28 bp, unknown
  Direct Repeat
tttcatctgaaccatgtgggatataaag

SEQ ID NO: 66716 - DNA, 28 bp, unknown
  Direct Repeat
tttcatctgaaccatgtgggatataaag

SEQ ID NO: 66717 - DNA, 28 bp, unknown
  Direct Repeat
tttcatctgaaccatgtgggatataaag

SEQ ID NO: 66718 - DNA, 28 bp, unknown
  Direct Repeat
tttcatctgaaccatgtgggatataaag

SEQ ID NO: 66719 - DNA, 28 bp, unknown
  Direct Repeat
tttcatctgaaccatgtgggatataaag

SEQ ID NO: 66720 - DNA, 28 bp, unknown
  Direct Repeat
tttcatctgaaccatgtgggatataaag

SEQ ID NO: 66721 - DNA, 28 bp, unknown
  Direct Repeat
tttcatctgaaccatgtgggatataaag

SEQ ID NO: 66722 - DNA, 1458 bp, unknown
  TnpB Polynucleotide
atgcctgtcaagacagccgtatttaaaatttataatccaagtaaacataagcaaacagttatgaattttgcattaaaacaatatactctcgcttatgactatctaattaatcttgctaaggctaactttgaaattattatagaaataggcttatacaataacaagtatagtacccaaagcataattaaagtacttacacccttagttggatcaaaactcagacattttaaaatgcatgggtcaatgagagaaagtttattacaagatgtagcagcatcattattgtcgtatattgaattaaaaaaagaagacgaaaacacttcatttccgactgcaagacttattaaatataaggacgaatattatttagaggccttagaggagcttagtcaaagcattacgctagaggaagaaaaccgtgctagggatgctctcacagagtcacgtagatctagttttatgccaatatattttggtcgtcctgatggcgttatacgtaatcgtaattttgggttgatgtacaaccctagcaataataagttttttgcggttttgtatttactgcctagtcaatcttctagaaaaaaagcaataaaaccaaaagattcgttggtgccaatacacacaatatcgactatctggaaggctactggtagagaggttggttatattatcgttccactcgcttacgaaaaatggcatgaggaagtttttttaaaaagagcgattgaaaatcctagtagcgtaagatcggcttttttaagttacaaaaatggtgaatattttcttcatgttgcgtttgaatttgaagcggataagattgagcacgatacattgttgggtattgatagaggaataattaatttagctgctttaactgtaattgattataagggaaatataatatatcaagaagaatactcaggtaatgagttagagagaatacaggattctttaatgctaaagcggcaattgtaccagcaagtaggcaaaaacctttatgggaataagaaagagaaacgaatcacagatcagcatatacatatcctagcaaatcacattgttgaagtggcaacacgttataaatcacaagtaattatggaagatttaaaacgtttaaattacaaaggttacaaaggaaagttatcaacaaaaaaagctctcaaaacaatgaaccgtaggttaagtagagtaccttacaataaattgcttaatattcttaattacaaattaccgctggcaggcttgaacaagcctaagcttgttaaggctaggtacacttcacaggaatgccccatctgtggggaaatatcaagggataatcgacgcggactcaattttaaatgccttaaatgtggttatgaggccaacgcagatctcaatggttcacacaatattgcaaggagggggataaatgtattaaaaaaagctgaagagaagcgtaaagaaattagttaa

SEQ ID NO: 66723 - DNA, 1620 bp, unknown
  TnpB Polynucleotide
atgctgatggatgccatgaccatacatacacaggagactatatccgcgaccaagacagcggtcttccgcctgcgcgatccgtcggcgcgcaaggccgcgatgttgctcgacgctatgaagcgcactcacttggctaccgaggcggtgatcaccgccctgctcactgagttcgagactatccggggcttctcgaaaagcgtaaaatcgaaatcgcgcgagaatggggggaaggtcgagcgcaccgcgttcatgcagcgcgttgcctacgccacgctgcgcgcctggaacctgccgggagccggggcggcatcggcacgggttgacgcgatcggcatggtcgagagctatctccagcaactcggcgacgggcgcgagacagccagcccgccaaccgtgccaccgctctcgggccgtcaggctctctacgaggaggcgctcgaccatctcgctgagacccacgccaacgtcgagcgcgaaagcgcttggcgcgacgagttgaaccggatggcgcgtaccggctccccgcgtcccctgagcctgcatggttatcgccacttctatatgctgctaaggcacgccgagaccggacggctttacgcctgggtcaacctgctgaccaagagtgggcggctgacaccgacccagcgtgaggccaacgcggcgggcgcggcgggcgacatgatcgagatcaccaccggcgaggtgatccggtgcaagagaccgtgctggaccttgttcccgctggatttcagctttgatttccacgaccgtcggttcctgctgtccggcgagcccggcggtggtcgcgtcgtttaccggcccgacgaggaccgcttcgagctgcacgccagcttcacctacgaaagcccggcggtagacaccggacgccgcttcctgggcgtcgatcgcggcatctacaacatcgccgcatggtcggtcaccgatgagcatggccgggtgctggaggacggtttgatcagcggcatgaaactccgctttgttcagcgcaccctggaacgcaggatcaagcgggagcagaagcggcgtggtcatgtctcgattaccgcacgccgcgcccagtccgacgaggcggtccacaccacggcgaacgagctggtagcgatcgccaagcgccacggcgcgcggatcgtgatcgaggagctgaccatgcagcgacggctgaaggcgctcccggtgggcaacaagggcgggcggggaggccggaatttccgtcgcatcctggggcgacagcagtacgccaagctggtccaggtgctgacatacaagctggcccgagtcgggctgccgccaccgatcgcgatcggcgctgcctacacctcgcagacctgtccggagtgcggccatgttgataaagccaacaggccgaaactaaaagttgagggatcggatgtattggacgtgtctcggtttgcttgtgtcaagtgtaaccataaggctgacgcagacaagaacgccgcccacatcatatcgataaagggggcatggctaactcagttacctacgaagaaggagagaaacggcagggacttgcgcgaggacgaaaactttgcgcattatttacttgacgctgtaaggcgtcgcgggctgagcggccggtaa

SEQ ID NO: 66724 - DNA, 22 bp, unknown
  Direct Repeat
gccgtgcgcgcgagggtgaggg

SEQ ID NO: 66725 - DNA, 22 bp, unknown
  Direct Repeat
tccgtccgcgcgcgagggtgag

SEQ ID NO: 66726 - DNA, 22 bp, unknown
  Direct Repeat
ggttcgcgcgcgagggtgaggg

SEQ ID NO: 66727 - DNA, 22 bp, unknown
  Direct Repeat
cgtccgcgcgcgagggtgaggg

SEQ ID NO: 66728 - DNA, 22 bp, unknown
  Direct Repeat
cccgtgcgcgcgagggtgaggg

SEQ ID NO: 66729 - DNA, 22 bp, unknown
  Direct Repeat
tccgcgcgcgcgagggtgtggg

SEQ ID NO: 66730 - DNA, 22 bp, unknown
  Direct Repeat
tccgcgcgcgcgagggtgaggg

SEQ ID NO: 66731 - DNA, 22 bp, unknown
  Direct Repeat
tccgcgcgcgcgagggtggggg

SEQ ID NO: 66732 - DNA, 22 bp, unknown
  Direct Repeat
tccgcgcgcgcgagggtgaggg

SEQ ID NO: 66733 - DNA, 22 bp, unknown
  Direct Repeat
tccgcgcgcgcgaggatgaggg

SEQ ID NO: 66734 - DNA, 22 bp, unknown
  Direct Repeat
tccgcgcgcgcgagggtgaggg

SEQ ID NO: 66735 - DNA, 22 bp, unknown
  Direct Repeat
cccgtgcgcgcgagggtgaggg

SEQ ID NO: 66736 - DNA, 22 bp, unknown
  Direct Repeat
tccgcgcgcgcgagggtgaggg

SEQ ID NO: 66737 - DNA, 22 bp, unknown
  Direct Repeat
tccgcgcgcgcgagggtgaggg

SEQ ID NO: 66738 - DNA, 22 bp, unknown
  Direct Repeat
cgcgcgcgcgcgagggtgaggg

SEQ ID NO: 66739 - DNA, 22 bp, unknown
  Direct Repeat
tccgcgcgcgcgagggtgtggg

SEQ ID NO: 66740 - DNA, 22 bp, unknown
  Direct Repeat
tccgcgcgcgcgagggtgaggg

SEQ ID NO: 66741 - DNA, 22 bp, unknown
  Direct Repeat
tccgcgcgcgcgaggatgaggg

SEQ ID NO: 66742 - DNA, 22 bp, unknown
  Direct Repeat
tccgtgcgcgcgagggtgagga

SEQ ID NO: 66743 - DNA, 1557 bp, unknown
  TnpB Polynucleotide
atgtttctaacggctcagacgatcaaacttcacgacatcgggaagcataaggctgctgcgcttctgcatggcctgacttgctatcacgagacggtgcgtttggctcttgcgaagactgctgcggacgccgaaatattcaatcgcgccatctacaccgacaagaatggcaagcagcatgtcaatggatttggtatcgggaaggtcattcgcccgttggtgccgaagggtatcgccatatcaatgatccggacttacgccaccgagaacatcaagaacatgctgctgtcttattacaatcttcgcaagaacggtcatgaggcgaatctcccgacgctgccggaactccgagagaagtccgatgatgaaatcggtgccgaacttgaggcatcaatagatgcaccactggctacattgactaaggaacaggaggcacgtttagagggatttaatccgaagcggcgagaacggatgcggactgcatatcagcgccgtgcgttgcagaaaaaggtagacgctatcctgcgctcgaaggcaaaaccgctgccgctgccaattgagtttacgcattacatgatgaacaacgattttaaggtgggctttctcttggccgtgaagggcggtagctatttcttcctgtgccgcatcttttccaagggtcatcgatactgtcaggaatatactctgcaagatggattcgctgatgcccatagtggtgagtcattggctggccggaagttcacgggattcgtactgccgctcgaactcggtcgggagtatcatgagcgaaagtttatccatgaaggcaaaccacgctctgccaagttgtttatgaggcggaatgacgctggagtggaggagttcttcgtcaacatcagcttcgagttcacgcctacgccaatcgagccggagacgtttattggtctcgaccgtggtgcagccattatcggagcagcgacagttatcgatgctaccggaaatgttttggagcgattgcagcttgatggtggaggattcgccaaggaaatggctgcgtatgcagagcggattgcagaagctcaacggctgggaaggcggaagttcaagtttgggctgcggaagcggacggcggacaatgtaattggggagtttgccaataaattgatcgaagcagccatcaagtatcgggcgcagattgttatcgaagctctcgacggtaaagcacttggacgatttctgcgccagtcacaggtaacgaagctggcccaaaagttgaattacaagctggaacgtgtcggattgccatcatgtacggaagttcctgcggcgtatacttcacagacgtgctcacgctgcggacacaaggccgctgagaacaggcaggagcaggaagcgttccggtgtgtggaatgcggctacgctgagaatgcagatgtgaatgcgggtgaagtgattgcgctgcgcgggatgcatcaggtcgcggcagcaaacggaaaaaagattaggtatcagaagtttgatgccttccaaatttggctgcgaagccaaaggggtgttgaaccactggcaacagtgggttag

SEQ ID NO: 66744 - DNA, 29 bp, unknown
  Direct Repeat
gttggagaccagcgaaaactttctgtggt

SEQ ID NO: 66745 - DNA, 29 bp, unknown
  Direct Repeat
gttggagaccagcgaaaactttctgtggt

SEQ ID NO: 66746 - DNA, 29 bp, unknown
  Direct Repeat
gttggagacaagtgaaaactttctgtggt

SEQ ID NO: 66747 - DNA, 1449 bp, unknown
  TnpB Polynucleotide
atgcaaagtgcagatctcgctcttgtcataaaagcaattggctttttagaaaaaatgtttctcaccataccgacaaaaatacacaatccttcggaaagaaaaataaccctgttggagaaagcattccaagataacaccagagcatacgactacatcttgagtatggtcaagggcaacctggatgaaataagaaagcaattctattggactgatgccagaggaaaagaacggttagtgggcgctaacaaagcggcttcaatcataaaccacttctgcgatttcagcaacttcaaactctcttcggtgttaaaggactctgttcttaagaaagcagcttcaaacatcttggcatactttggaaacccagaatcgaatttccctgagccagaacgctatcaggatagagccaaactttatgaattggcgttggaaaagctacaaaaatcaaccactaaagaggaggaggattcagcgagagatgaggcagcaaaggtgtcgaaaccaaatcccgctcccttggctttcaggcgagaaagagatttcaagatatactatgacccaaagaaaaataacttttttgtcctattgcagcttattccagcgacttcaaacaaaatcagaaagatcaaaagggatgatgacttgaagaagttcaatgacctttctcaaggattgcctaacacaaaaacgggaatccttttaccgttggagtttggggtatggcaagaggaatttttgaaacggcaagatataaaattcaaaaccgcagagctgttcaaaaaaggatcggagtattatttcaatattacctgtgaagtccccgaagcagagaaactcccagtggaaacttttctcggaatcgacctcgggctaaaggatgccgccgcctggacggtcttagacaagaacggcgacgtattaaaacaggagatattcagcggcaccgaacggctggcaactctgcgaaagcatcttgctgaattgcgagaaaaacagagaaagggtaaggaagtaaggggaatcagacaaaagagaagattggaggaattggctcacctcttggctaatgatataataaaagtagctttggattttagatcgagaataataatggaagacctgaaatatattcgaactcgaagtatggttcttaagaaggttctgcggcgcctcgtgaacgcatggaattttgatgagctaagacagatattagaatataagacagtcttaaaaggtttgcccgcaccatttttcgtgaggtcacactacaccagccagatttgcccaaaatgctttgacgagaacggcaagcccttttacagcagggaaaatcgacctacacccacccagttcaaatgcataaggtgcggttatgaggctcaggctaacttgaatgcatccgaaaatatcgcccgacgaggtttaggaatattagaaaaaaacacttga

SEQ ID NO: 66748 - DNA, 2190 bp, Paracoccus ravus sp.
atgcgatgctcggcgaccaggctgagttgccgaacaggcttgagagcgacgggagcctttccgggcgtctggaaagattcaggaatgatgtcgatccggtgcaccgagcctaaccaagcttgtcgatttcgacaaatggatcaaaatgcaataccatcccatcctaagggcagcagcacaacattgcgacccatgccgatggatggtctcgacccgattctcgcatcccggcgtccgccctctgccagcggcgcgatgtcgccggcgcgagaggcagatttcacgggtcagtttctcacggctacgttcaagctctgtccaacgcaccggaaggctgcaatgttggaacgcgcccgagccgcgacggaggcggcatggtgggctgcgctgccccatctgcgggggcatgcagatgccatcatcgctcgcatccgggccgagatcccggacaaggccaaacgcaagaaggcgccttgggacaagtacctcaaggaagctttcccgcgccgggatctcgataggttcgtcactcccgatgtgagagcgaggaactcggccagagagcaggctaaaaatgcccgtcagggactaccgaatgtcctgctcgacggcgtctaccgcgatctgattgctgtcgcatcttcctatatcggcctggttttgggcgatcatcccgccgaatggccgactccccaacccgtcggtgaggacgcctatcatgccggcctcgcattgctggctgcatccaccgacaaagcggatgaggaccgggggcgcgacatgatggcccggttggcgcgcggggcgtcccctcgtccattcaccatatcgcgggcaagggagtgccggatcgtttgcgacgcggtcaccggcagaatggcggcggaactcctgatcacccagccgagctggagcgagactccagccaccatcaatgcaggccgggatgcctgcaccggtgaagacgtaatcgcggcgacatcgcgccgcgcggtgatggtgcccttggaaatgtctgattggcataggaatacgttcctgcatggcaaggccaagttgcgctcttgcctgatctcccgtgagggggaggcatggttcatgcgggcgcaattccagatgcccaagctcgagcccaacctgaccggggcggtgctcggcatcgaccggggacttcgacgcggtctggttgcctcggtggttcgcggtgatggctcggtgatgaaactggtcgagatcctcggtcgcgaaatggtcgagacgatccacgctgcggagaagcgcaaccgtgtgagccaacgctggcgtgcccgtcctgcaaagggttatcgcaagacaatagaccaggagctgcagcgtgcaaccaaccgcattgtggcctgggcgaaggaatatggggcgcaggtcgcactcgaggacctgagcgggttcaagtctgcgattacggccaaacggccaaaggggactcggcgaaacgcgtggcagaagagcttgaagaagatgcagatgcatgaggtcgagcgcatgctggcctacaagcttgccgtggcggggcttcctgccccgattaccgtcaacgcaggcggcacatcgatgacctgcccggcgtgtggacattgcgccaaggtgaaccgtccggcacccggagcccccttcgcttgcgtggcgtgcgggttcgaggcggatagcgatgatgtcggagcggtgaacatcgcgcggcggggtgcagttttaaaaagatccagaggcctgaaaatggccgatctggaaaaagacatggtcgcagaccttcgcgggcgcgacgatggcgggcttgggccgttgcgggcaggtgccggcagcggagttgttgcggtccgcgtatctggtggagtggcgaatgatgacccgtcggggtcgcgtatccgaccctcccctggtgcagaagatcatccacatcccggaaaaaccggctctcggtcggtattagcatcgcgtccgggggcattttcacaagggccagaaagccatgttggcgctcagtaccaagggcttgtcgataggtcagtcgaggcggtcccggaaatgcgggctgacggcaacagggtcgtcgcggcgcggttcaattccgccaagtcgaggcggtcccggaaatgcgggctgacggcaacgaggaagccccgatccggtgagcttcccggcgcagttcgttga

SEQ ID NO: 66749 - DNA, 37 bp, Paracoccus ravus sp.
agtcgaggcggtcccggaaatgcgggctgacggcaac

SEQ ID NO: 66750 - DNA, 37 bp, Paracoccus ravus sp.; identical to SEQ ID NO: 66749

SEQ ID NO: 66751 - DNA, 1410 bp, unknown
  TnpB Polynucleotide
atgtcatcaatatttaaaacggcaatatttatactacataacccatcagttggtaagatatatgcgttagaagcagcaggtcaacaatacataaaaacaattcaaggaatattagattattttcgacagaatagtttagaaataatagaaatatttaatgatctattccccaataaatctttaaacgcaaaatggctagaaaatcatatatctaagaattataccgggactaaatgtctatgtaggaagttatttgacggtgctttagctaaagcagttttaatgatacagagttatcttgctctaaaaggtattgacgataaaacaaactaccctaaaatggttagcagtaaagaaatggactattttactgccctagataacttcactcaatcggtcattgaaagcgacaagcaatttactgaactgcaaagcgacatcattagatgcaataagtcaactcaattaatctgtggatacaaaagaagtcgcgactttcccttgattcgtaatataagcacaggtaaatattatgctctattgtcgcttggaacagggactaagccgttggccaatgcaggaaaagaagattttgtctgggcaacaactggcgaggtttttactatgataaaaactgatgcagttattttcccactgtcatttggagaatggcacgaacaggaattttggaataagggcaatcctaaaactgccgaagtattaaaaataaacggcagatatgaattgcacgttgcatttgaaatgccagcagatgaaaagattaatacagagacatacttaggacttgaccggggtctaattaacatagcgactccagtcgtaataggtgcagacggtaaacttattcacgcggaactatttgacggaaaaaattttacttctattgtgcgcgaagaagtaaaagcgcaaagagagggtcaaaagaaaggcaagcgactattcggtcataaacgcaaaaacgtaagcaaaaacatatgtcatgtcataaccaacaaaatagtctatctagccaaaaaatacagaagtcaagttgtcttagagtttctgggaaacctacgaggtccacacagtaaaaaatatcagcagtacagcagggttgcacagttattggaatataagttaccgcttgctggactacctaaacctatttctcgtggtgctgcatggacttctcaaacatgtcatgtatgtggttatattcacgcagacaataggggcaagggggaggaaagggattctttcaaatgtctgcaatgtgggcatgaggataatgcagatataaacgcaggcgtaaatatagcaagaaaggcactatggaagaaggacagtaaacttccgaaagataaggtttttgaagaatggcagaagttttgcgttaagatatcttag

SEQ ID NO: 66752 - DNA, 1791 bp, unknown
  TnpB Polynucleotide
ttgaaggcccccaatccgagcgttttatcttttccaaaacccgttgtggctgggcctgcaatgcaacttttgattgatttatctttttacatgattagcgtacttagtatgcctcgaatgacacctcaatacttgaccgccaagatcaagctgcgacccagtcgtcgtaaggcggccgtcctggagcgagcacgctccgcggtggaggaggcgttttggcatcgcatggagatactccggcccgcggccgatcagctcctggttatcgagaaaaagaaagatcgggttgcggagctgaagcgtatgacgctgcctgcatcactgaaatcttatggtctaccgtcgtcactccgtgatggtctggcttcggatctagagagatcgatctcctcctacgttgagctcaaactgggcgatttcgggcctgaatggccctcccgccagcgcccgtatgcgagcaggctggaagatggtctggatgacttggctcgttccgcctccaaggaggaggagaacctggcccgcaatgagatctaccgcggcggccagcctgagcgcttccgtccctttattttgacccgtggccgagaatgccgtctcctgcgcaaagaggagaacggatccctggtcctggtgctcgagatcgtgtctgcgaacgatcctcgctcccaaaaagcattcatctcagacggtattgatgcctgcaccggtgaggttatggcggccaaagccagtaaaaccaggctccttatgccagtttcgctttcaaaatggcatgagaataaattcctgagcggcaagtcgatcttgagatcatgcatcatctcccgggatggaggtgactggtacatgaatgcgcagtttgagatggctacaccggccgagatcacgcccgagggtgtgcttggcatcgaccgcggcatcacgatgacagcagctggcgccatcgtcggcatgaacggccatgttaaggacctcgtggccacagccggctctgaggtctccgctcgggtccgccggtacgaacgattgaaccgcaaacatcaacgtcgaaaaggcgtgcctcgaaaagggcatcgccaggctgtcgatcagatcctgcatgaattagccaatgacgtcgtggcgctcgccaaggaaggccgcctggcggtagccatggagaaacttgatggtttcaagttggtaatcaccacgaagcgagcaaggggcacccggcgatccggatggcaaaagcatctcaaaaagatgcagctcgccaagctcgaagatattctggcgtacaaactgaggttggccggtctgccgccgcttcaacaggtcgtggcgccaggaacatctcagacctgctcagcctgcgggtatagggatcggtcgaaccggcccagtcaggctgagttcaagtgctcgagctgcggctcagaatttcatgcggacctcaatgcaggtgtgcagatcgcacgccgcggtgtgattggtatccgcaaattgaacaagaagggctccaaaatggatgctcttcacaagaacatggtcgatgatctttcagatcgcgatgatgcaggactggggcctctgtcggtaagtgccggagaagggttcgttgcggtcctggattctgcaaggagcgcgaatgaccggacccagtccggcttacgccctggtgggtcaaaaaattcagctcgtaatcgccaaaaaacggggcctgttcccgtattctcagagagcggcgattccatttttgtgaactccgggaggcagttactccatatccgttgtggagttccatga

SEQ ID NO: 66753 - DNA, 1770 bp, unknown
  TnpB Polynucleotide
atggcccgtgtgatgcgcacgctcgttttcaccatccacaacccctcgcgacggacgacagcgacgctccaccgcgccctacgggcctatacgaatgctgcggcggcggtgctggaaggcgctgcgcgcgagtgggatgcgctgtgcgccgatgcggaaagagatggcacgctcaatctgctacagctacagcgtacgctcactcgacgctatcgatcgcgcacgacggcattcccgctacattcgagcctgcgcgacgccgttttcgtcgatctcgcggcacaactcagcggctaccacgcgctcctaaagcggtgggaggtcgagcgtgatcgggtgcgcgcccatatcatcgaacaagggtggagtctggagcctcttgactcgcgagcggatgcggcactgcgggcgctgggggcgtccccctcatggccaaacgtgccacgcacgcgccccgattatgcagccttcgacaatgccctcgaacgattgacggcggtcatcccggccatcccggccacctcggacgcggccggggccatgagccctcagcgcacaacgaaggcgcagcggctcatagaacgactgagtgagcaggcatcgccgtcgcgcgatcaagtcccccatcctcaccggctcctccctctcgtgactgtcggtgtacggcccctccttttcccccggcccgatggtgcagcgcaggcgcgcaatttctcgttgctacgctcggagaaggacaatcgctactatgcactgctctatctcctcccgaacaaagatgcgcgtgcacgcccactggcggctacaacgcccgacagcaagcatggacaactggtggctctgcacccgtctgctgctgtcgtggaacgatcgactaaaccatccctggccttatgtttgccgttggagtgcggggcgtggcatatagagaccgcgctagaagaagctgtcgcacacccggagatggtacgcgtcgcgcgcctgtacttccgccccacgcggcgatccgtcgtcgggcaccaccaagaccgtttcctgctagcgataaccttcgagcacgatatccccgatcgccgcgttaccaccgcgcacatggccgtagccatggatgaatggagtcgcgtcgcatggcgcgtgtacgacgactcgacaagacgagagctcgcgcacgggatagatgagtcgctcgtcggcttgcaggagcgttggcggcgcgatcgacgccagcgcgcgcgggggggacagttggacaagcgtagccaccgcgtgcaggccgaacaggtcaagcacgccgcccatgtgctttgcaactatcttatcgccgtcgccaaccaacacgatgctcgaatcctcatgaatgacgtgggctacctgcgtcagcggcgagtcgtgcttgagcgcgacgagcagggcaagcgcgaggcccgctccgagacatggcatgacatgatggccgagcagcaatatcggcgcgccacgttgattagtggcaagctcgaggagatcatgcgctacaagctcccgcgctccggcttaccattgccgcttattatgcggggaattagtccacgcgattgcgccgcgtgcgggcagcgtggagcagaaaatggtatttgcggcttgtgcggagaggtgttggatgcgaaaaacaccgcgcgagtgatcgcggcacgcacaccggacgtgctgagcaaggtccaggccgcacgggccaggcgtctggcggggtggggcggagacacgctggacacgaccacgcccatgggttag

SEQ ID NO: 66754 - DNA, 1794 bp, unknown
  TnpB Polynucleotide
atgcccgaatttctgacggccgttttcgagctccgtccatctcgtcgcaaggcagcggcggtggagcgagttcgtgcgccggctgaaagcctgttctgggacgcggtgggcaaactgcgtgacccagctgacgccatcgttgcaatcgaggcgcccaggaaacgccagaccgccgccgcggccatgaaggtcgatattgccaagaacaccatggcatcagccagcaaggccggcttgaacgaggccgttgcccaggggctgacccgcgacataacagccagcgtcatgtcctatgtcggcctgcgcgcgaacggccatgcggcggaatggccatcgcccgtcgcaccggatgcagccgaccacggcgccgccctaaaccagttcctgaccgcgaccacgaagggcgcggaggacgccgcacgggatgcgctggcgcggatctcacggctgcctgggcggcgccctctgttaatcgcgcgggcgcgcgattgtgcgctcgtccgtaagaaggatggcgggcagatcgtcgccgttctgaatatcctgcgagcggacgataaacgcgcacgagaggcgaagatcgacgacggattcgatgccgccagcgggctgccgatcctccggcagtcagacgcggagaaggaacgcaaggcgcggcaggcaagaggcgcgccgcgtaagtcgaggtccgagccgcgcaacctggtcatgccggagacctcggactcccgattaattatcccggtgacctgcagcaaatggcatgagcagaagtttttgaacgggcggaccaagctgcggtcgagcctgatcgtgcggcgcggcactcgttggtttctatgcgcccagttcgagatggcggaaccgaagaagccgcagatgaccggcgcacggcttggcatcgatcgcggcatcgccaacccgattgccgtttccgtggtggcgcatgatgccgccgtgattgctgcaccgaagccggccggcgcagagatcggtcaggccatccataaggccgagcagcgtcggcgtgcggaacagcgtcggcgcggcgtgtccagccgcaagcacgcgcggcaggtggaccatcatctgcatcatctggccaatgacatcgtccgcgacgccaagacattcggcgcccaggtggtggtcgagaagctcgacgggttcaaggcgacgatccgcaccaagcgggtcaagggcgcgcgaaagaacccctggcagaagtcgttgaagaacgttcagcttggcaagctggaggcgattctggactacaagctgaagctggcaggattgcccccggcgcgtgaggtgttcgcggccaggacatcgatttcttgtccggcgtgcggccagaccgatccgaaaagccgcgtggcgcaggacaagttcgtctgcacgggctgcggcttcgaggttcacgcggacacgtgcggcgcggtcaacatcgcccggcgcgatatcgcgtttacgaaacacacgaagggcggggacttcgctgctcttgaacgggacatggtcgcggggcttcggtcgcgcgacgatggcggacttgggccgttggcggcgggcttgatggctgccggcgggttcgttgcggtccgcgctactgctgacaggctgtatgagacacagctcgtccttaacctgtcggcggagcaaaatgcttaccctgatgccgttcaaaaccgccggtcggcggtattcgcagagcggagcggcgcattttctggtcacagcaaacagcgaaggagcgttgaatcacaacgacttacgcaggagcggttgttgtga

SEQ ID NO: 66755 - DNA, 35 bp, unknown
  Direct Repeat
gttgttgtgagccggcatttgcaggggggcagcaa

SEQ ID NO: 66756 - DNA, 35 bp, unknown; identical to SEQ ID NO: 66755
  Direct Repeat

SEQ ID NO: 66757 - DNA, 35 bp, unknown; identical to SEQ ID NO: 66755
  Direct Repeat

SEQ ID NO: 66758 - DNA, 35 bp, unknown
  Direct Repeat
gttgttgtgagccagcatttgcaggggggcagcaa

SEQ ID NO: 66759 - DNA, 35 bp, unknown; identical to SEQ ID NO: 66755
  Direct Repeat

SEQ ID NO: 66760 - DNA, 1026 bp, unknown
  TnpB Polynucleotide
atgagggtgtataacctttacagaacggttatcttgcaagcatatcctacactgagtcaggaaaagctactgagaaaagctgaagagtctgttttcaaatttttagagctttcgaggagagaacttcaaaagctactttaccataagttcaaaaacgatggaattgaaccgagaatgcttactttattaacacagcgttttacgggttctttaggtgaaaagacaatcttgtgctttgatgactacaattcaaaattcgtttgcgagaatggaatctggtatgttgaagttaagttgagtaagggaagaaatgcaagggagagaattctaatagctaagtcaaacaacgagtattacgatgtaatcgaagagttgaagaactttcactttgtcatggttagagagaatgacaagtggtttgtttatgtttccattccagtagaacctcaatctaacggcttagttgtcggagtagacttcaatctgagaaagtgggttgttgctccctatgaaggacgaccattctttttcgatgcttcagaatacgctgagaagattgatagactccagaggttaattagcagagcttattcaggaaaagactataaaaaagcgaatgaatattatcgcaagattcaagaaattgtcaaattgactcacggaaactttttatctaagattaagaagatatacggaatttgcaccttagcgattgaagatgtcagcataatgtttagactaaccgagaaagagaatacgatgataaacaactggctctacaagaaaacagctatgagaaagttcgtccttagagctatggctaaggggttcaatgtcgttgaagtgaatccagcgggaacgaccagaacctgccacagatgcggtgctgaagtgaaaatatacggcagaacgaagaggttaataagatgcgataactgcggtcttagagattataacagagacctgaattctgcaagaaatcttgctctacgagctattcatctcttatcaaaaaacgataagtga

SEQ ID NO: 66761 - DNA, 1119 bp, unknown
  TnpB Polynucleotide
atgaaaggaaagaaaataagagccatggtcttgaagtgccagccggatgaggaaaccaaggacattctagattccttgctcgtgagggttcgcgagtttctcgaaatcaccgagtacgagttcacgaagctcctgtacgagaagttcagggagctcgatcctactgttcactccagaattcctactgcgattgcaaaggagctctgcaagaccgtcatcaaccagcgcgtaatcccgctcgacaagcagatatgcaggctgaagaggatcaggggcgggtggttcatagagctgaccgtgttcagcaggagctcgggcagggataaggaaagcaggactatcaatattccggtatgtctgagcgagaacagctactaccacttcctcctagacaggctgggcgatgatggaaagctgcccggagatgggcgcctgataaaaataggtgacacgtacttcgccgtcatcccggttcccctgcagcccaggttcgacgccaccaagcctgtcgtgtcgattggagtgagcctgtccattcacggcaagcatgcggccacgctttacgacccgaagcagggattcgtgaagaacatgttttacgacgtcacgagcttctgggataaggcctggaagataatgcggtacatttccaagctgcagagcatgggaaagaaggatgaagtgaaggccaatcatgcgagaattaccgagattgccaagcttgcgcacggaaatttccttgccaaactgctgaaagttgccgacgagtactgggagaacggatacaacgtcgtgttctcgctcagcgacctgggctggctgaagcaggtagacttcaacaacaacgtaatgaacttcagaaaaagcagactgctctcgtggcttaaattcgagatgatgctcgacgcccgcgattacctggtttacagggtgaggggcacgaggctgagatgccacaggtgcggggctgaaggagaggttaagaaaaaggagttccgctgccagaattgtggcctatcgaacttcaacgccgagctcaacgcggccagaaacgctgccaaggtgggctggcagagagcggaaaagaagcggattaagatggagaaggctaagaattag

SEQ ID NO: 66762 - DNA, 36 bp, unknown
  Direct Repeat
gttacagagtacagagtactaggacagagagtgaag

SEQ ID NO: 66763 - DNA, 36 bp, unknown; identical to SEQ ID NO: 66762
  Direct Repeat

SEQ ID NO: 66764 - DNA, 36 bp, unknown; identical to SEQ ID NO: 66762
  Direct Repeat

SEQ ID NO: 66765 - DNA, 36 bp, unknown
  Direct Repeat
ggttaagagtacagagtactaggacagagagtgaag

SEQ ID NO: 66766 - DNA, 36 bp, unknown
  Direct Repeat
ttacagagttacagagtactaggacagagagtgaag

SEQ ID NO: 66767 - DNA, 36 bp, unknown
  Direct Repeat
gttacagagtacagagtactaggacagagagtggag

SEQ ID NO: 66768 - DNA, 1068 bp, unknown
  TnpB Polynucleotide
gtgacactaagactcgtaccaactccagaccaggcagacgtgatagacaaaaacctattgaaggttaagaaattcttagacatatcaaaaacagagtttcaaaagctcctctggcgtaaagcccgtgaggatgaagagctacacgaagcacacacgagattgctcgacctgatggcacagaggtttgctggcactgtaatgggtaacctgctgtacccattagatgaaagaaactacaggttcattaaagacaatggttacttcaaagctgagataagattcaaaccaaaagttacagtcacaatcaacgttgacaggagtggtaatagatactattctgacatacttgagaacacagcctatcctgcgttcatatataaatatggaagggattatttcatgtcggtgtctataccacacgagtacagatatgatgatggtagaccaacagtatattgtgggatcgatctaaatcagaggaagcatgtagcctgcttctaccacaacagtgagtacaaagagaccatcttcttcgacttggcaccagttgatcgtaagataaagaccatccagagaacaatatcatcaatacaaagaggtatgagatcatcacagatgtcagacgaggataagcatagactaaacaagcactacctgagaatacgcaaggttatagagaaaggacacggtgatttcatctcaaagctgattaaaatagccgatggatattgggatgatggattcaacgttgtatttgtccttgaagatttgagatatattactaagaatgcgagaaagagctacaaaccattcaatagatggttacactcccaatggtgctacaggaggtttgcaatactacttgaagctaaaccatacccggttgtatatgtctcaccgaagaacacatccaagctgtgccacaggtgtggtgctgaggttaacatctacggcaagagggggagactaatatcatgtgagtgtggtttgagagatttcagcagagatttaaatgcagcgaggaatatagcaaaacttggtgagggaaatggcgttcgagttgcgtaa

SEQ ID NO: 66769 - DNA, 29 bp, unknown
  Direct Repeat
gttctactccaactatagtacccttgaaa

SEQ ID NO: 66770 - DNA, 29 bp, unknown
  Direct Repeat
gttctactccaactatagtacccttgaaa

SEQ ID NO: 66771 - DNA, 29 bp, unknown
  Direct Repeat
gttctactccaactatagtacccttgaaa

SEQ ID NO: 66772 - DNA, 29 bp, unknown
  Direct Repeat
gttctactccaactatagtacccttgaaa

SEQ ID NO: 66773 - DNA, 29 bp, unknown
  Direct Repeat
gttctactccaactatagtacccttgaaa

SEQ ID NO: 66774 - DNA, 29 bp, unknown
  Direct Repeat
gttctactccaactatagtacccttgaaa

SEQ ID NO: 66775 - DNA, 29 bp, unknown
  Direct Repeat
gttctactccaactatagtacccttgaaa

SEQ ID NO: 66776 - DNA, 29 bp, unknown
  Direct Repeat
gttctactccaactatagtacccttgaaa

SEQ ID NO: 66777 - DNA, 29 bp, unknown
  Direct Repeat
gttctactccaactatagtacccttgaaa

SEQ ID NO: 66778 - DNA, 29 bp, unknown
  Direct Repeat
gttctactccaactatagtacccttgaaa

SEQ ID NO: 66779 - DNA, 1125 bp, unknown
  TnpB Polynucleotide
atgccaaagagatacagaacaattgtactgagatgtgaacctgatgctgagacaagagaggctttagacactgcatttgtggaagtaagtaaattctgcgagatattggagggggagttctccaagttgatttaccacaagtacagagagggagcaacggatactgacgcagaactgcatgtaagagtgtctaatcttctagcaagacgttttgttggaacagtaatggggcagaaaattctaacattcgataaggattgttacaagttggttaaaagaaatggatcttggtttttagaagtaagagtcttgagaaaatatgaaggaaaaaagctaaaagctggaacaaagtatttaattccaatttacaagaccgataacaaatactacgggttgttgcttgagaattctgcattccccgttactttgttcaaggagggagatcagtacaaagctgctgtgagtatccccgtcagcataaaatttgaagatagcagacctcttgtaactattggtatcaacctaacgatgtggaagcatgcagcatcactttacaatccagaaaccaataagtttgagaggaatattttttatgataataggtgggttgatgagaaagctaagaagatacagaagaaaatcaacttccacaaaaagcaaataagattgaaagaggttgacgaggaggatggtaaagagaggattcgaaaactgcatgcaacaatttccgagttgataaaaaaagcacacggtgagtttatatcgaaactactcggaattgccgatgaatactgggacaacggatacaatgttgtgttctccgtaaggaacttaaagggttttggagagattacattcaggtatccttggttaaactacaagttaagaagtttacttgcatggcaaaaatttgcaaatatgcttgagccaagaggatattatgttgtgtatcccttctcttcgattaaagaatgccatagatgtggagagaaaggtgaagtggtaaaaagagtttttaactgcccaaattgtaatctaaaggactttaacgctgaactgaacactgcaagagttgtagcaaagcgagggcttgatagagctaagaagaggcggttttattcttga

SEQ ID NO: 66780 - DNA, 37 bp, unknown
  Direct Repeat
gttacagagtacagtataccaatacattgattgaagc

SEQ ID NO: 66781 - DNA, 39 bp, unknown
  Direct Repeat
gttacagagtatagtataccaatacattgattgaagcgg

SEQ ID NO: 66782 - DNA, 39 bp, unknown
  Direct Repeat
gttacagagtgcagtataccaatacattgattgaagccc

SEQ ID NO: 66783 - DNA, 39 bp, unknown
  Direct Repeat
gttacagagtgcagtataccaatacattgattgaagcag

SEQ ID NO: 66784 - DNA, 2061 bp, unknown
  TnpB Polynucleotide
ttgacgggaaggaaacgctcgggcagagtcattcctgcatggattggcggtggtgcccgcagcaccgttggtccgggccgactgcacggccctgaagggagaagctgcctcgcggaggttcgcctccgtaaaagcccgcaggctcggcgcgctcaagggcgtcccggtgtccgaaggggtcaagaggcgacgcgctccctgagtccccgacttcggtcggtggacatctcacccgagtgggtggggctccatgctgcgggcacaaatcttggaggttccgtgtcggctctcgcccttcctgatcttcccgacctccccgacaccgaggaagctggaacgcggaagctgacccggaccgttcggttcgaggttcgtctcgcggacatccgcaaggcggaccggcagggcaagggggccatggcctaccgtctggctgccacggcgggggccctcatggaggggagcaacagggcgtccttcgccctcgcgtccgtgttcatggggtcgatcccctggccgatggagcccgatccgaagaaccccgggaaggagcggcgggtgctcgcccgctcgctggcctacgcggccatgagcgggaagtggcaaccctacgggacggcgctgtacgccccggagccgcgctaccgcgtgaccggggccgtcctgtcggtccaggccggggagatcctagcgcggctgaccggaagcaacaccggcatcggcttcaagatcaaggagggggtggagtcccaggtcgccaagacccactggtgggacaccgtgggcggtcggcgctccttcccggggttcaacctgcggcgaggcgggatcccctaccgcaacgactccctcaacttgagccggcaggacggggtgatcgtcctgaccgtgtggggccaggagtccaccaagggctcgcgcaccgtggcgctgcgcccgtggatccgccgggacggatcggcccggaccaccctgcaacggctccgcgacgggatctacaagcagggcgggggctgcctgacctacgatccgaagaagaagaagtggttcctgtccatcgcctggacgggcgtgatcgaggagctggtgcccgaggtgccgcgcatcgcgggcgtcgatgtgaacgtggccaagaccgcagtcgcggccttcgtccagcaggcccccccgcgcaaccgcaagagtggagggcagatctaccccagcctggtcgaggcggtgggcgtgcctgcgggccccagcgggttcctgcccgaaggcgcgttccccaagacccgtgggggcaagtcctccccgcgcctgggttgggcgctgaactggctcgggatcgagtcgttccgcgcccaggtgaacctgccgacgcgagtcatccgggcctggaaccgggccgaggcagagcggaagcagcgctcccgctggaaccgggaggagttcggcctgcgtgagggccgaggccgccagcggaagctccgtgtgaccaacggggtgcggaacctggaggatctgacccacacggtcatcaagcagctcgtcgctgccgtcgtcgggcaggccaaggggtacggctccgtgatcctcgccaccgaagacctgcagcactggtccgtggacaaggcgatgctggagtcctacgagcagctcgaagggcaagcccgcaaggcccaacgcaagtggtacctgcgctggcaccagggcctgctgcgcgagcagttcgcctccgtgagcacccgtgaggggatggtccacctggccgtcgatccgcgctactcgtcgtggatctgcgcggtctgcgggcggctctacaccgagtcggtctacgaggaggcccaggacagcagcaaggccccgaagtgggggtacttcggccacctcgacttccgctgcgcctgcgggtggaccagcgacggcgaccggaacgctgcgctggtgctcgcccgccgggcgcggggagaactcagcatgatcggaggagcactcctgccgatggacaagaaggcggtggaggtgctggcagccgcgaagaaggcggtggaagcccaagcgaagcgcctccgcaactga

SEQ ID NO: 66785 - DNA, 37 bp, unknown
  Direct Repeat
gtcgcaaggcatccccgaagtcaagatggagtgcagg

SEQ ID NO: 66786 - DNA, 37 bp, unknown
  Direct Repeat
gtcgcaaggcatccccgaagtcaggatggagtgcagg

SEQ ID NO: 66787 - DNA, 37 bp, unknown; identical to SEQ ID NO: 66786
  Direct Repeat

SEQ ID NO: 66788 - DNA, 37 bp, unknown; identical to SEQ ID NO: 66785
  Direct Repeat

SEQ ID NO: 66789 - DNA, 37 bp, unknown; identical to SEQ ID NO: 66785
  Direct Repeat

SEQ ID NO: 66790 - DNA, 37 bp, unknown; identical to SEQ ID NO: 66785
  Direct Repeat

SEQ ID NO: 66791 - DNA, 37 bp, unknown; identical to SEQ ID NO: 66785
  Direct Repeat

SEQ ID NO: 66792 - DNA, 37 bp, unknown; identical to SEQ ID NO: 66785
  Direct Repeat

SEQ ID NO: 66793 - DNA, 37 bp, unknown; identical to SEQ ID NO: 66785
  Direct Repeat

SEQ ID NO: 66794 - DNA, 37 bp, unknown; identical to SEQ ID NO: 66785
  Direct Repeat

SEQ ID NO: 66795 - DNA, 37 bp, unknown; identical to SEQ ID NO: 66785
  Direct Repeat

SEQ ID NO: 66796 - DNA, 37 bp, unknown; identical to SEQ ID NO: 66785
  Direct Repeat

SEQ ID NO: 66797 - DNA, 37 bp, unknown
  Direct Repeat
gtcgcaaggcatccccgaagtcaagatggagtgcggg

SEQ ID NO: 66798 - DNA, 37 bp, unknown; identical to SEQ ID NO: 66785
  Direct Repeat

SEQ ID NO: 66799 - DNA, 28 bp, unknown
  Direct Repeat
gtcgcaaggcatccccgaagtcaagatg

SEQ ID NO: 66800 - DNA, 37 bp, unknown; identical to SEQ ID NO: 66785
  Direct Repeat

SEQ ID NO: 66801 - DNA, 35 bp, unknown
  Direct Repeat
cgcaaggcatccccgaagtcaggatggagtgcagg

SEQ ID NO: 66802 - DNA, 37 bp, unknown; identical to SEQ ID NO: 66786
  Direct Repeat

SEQ ID NO: 66803 - DNA, 37 bp, unknown
  Direct Repeat
gtcgcaaggcatccccgaagtcaggatggagtgcggg

SEQ ID NO: 66804 - DNA, 37 bp, unknown; identical to SEQ ID NO: 66786
  Direct Repeat

SEQ ID NO: 66805 - DNA, 23 bp, unknown
  Direct Repeat
ccgaaggcgaaatggagtgcagg

SEQ ID NO: 66806 - DNA, 22 bp, unknown
  Direct Repeat
cgaagctggaatggagtgcagg

SEQ ID NO: 66807 - DNA, 37 bp, unknown
  Direct Repeat
accgcaaggcatccccgaagtcaagacggagtgcagg

SEQ ID NO: 66808 - DNA, 37 bp, unknown
  Direct Repeat
gtcgcagagcatccccgaaggcaggatggagtgcagg

SEQ ID NO: 66809 - DNA, 1659 bp, unknown
  TnpB Polynucleotide
atgtccgatatcgaagtcggcgcagcaggaagaaccggttcagttctcgccacacgttcccgagacggggacgctcttcacgcaagtcagaacgctgcgatctcacgcggcaaaggcgagggagctgcgctggatgctgcgccgacttcggatgcggacacggcccccatcaagatcgtccgggcgagcacgcgattcgagattcgaatccgtccggattcttctgggatctcgctgctgaaggcactcgattcagtgacgtctgatgtcgctcgcgcgaggaacgctgcggttcgggcgaacatgctcgctgacggcgcgtggctcgacgcacacccggagatcatcgcgcgctggaaggctggagagaagaagctcgaatggtggggcgaacgtcggacccgtcgcaacgcggcgctgaatccaaacggcgtctacagctatccggtcatgcgtgcggcagcgccagaagtcgactgcaacgtgatcgcgtcacttcagaactccgatgacgcagagtggattggatcgcgtttcgacgtgctcgtccgctccacgagggcgccccgcttctataagccgaatcaaccgattcgtgttccgcatcgcgcggtgaagttggtgcttcgtgaagacggttctgcggatctgtcgctcaggctccaagcggcttcggtcgatggcgcgcctcgatactcgtttcatctcgtcggccgtgacgcctggcaacgcgaggaacttcagtcatgcgctgacggcacgtggaagctcggagatgtcgttttatcgcgtcacccgaccaagcgcggtcgatggtttgctcgcctctgttacacgcgcttggtcgaacgtgcagagaagggtgaggcgacggtggtcgtcaggcgcggcgtgagatcattcttggtggctgcagcgagcactggagagtgcagggtcatctacgacggcggtgacttggtcgcattcaacaagcagatgatggctcgtcgccgagggctaggggagaacaccaagcgcggcacgatggggcgaggcgcgaccgggcatggtacgaagcggcgcgtcggcgcgctcatcgatctgtcggacaaggaagctcgctacaagcgcgaggcgtgcaagcgtgcggcgcacgcgctcgtactctttgcgcagtccgtcggcgcgagggaggtcgtttacgaggatttcgcggcgccaaaagaggagggcgtctattggctcctcaagcgctggccgtggcacgagctgtcgctcgcctgccagagcgcgtgcgaggcggcgggcctggcgacgcgcgcggtaatggttcgcacggatcgtcgaacgtgtccgaagtgcggccatgtccacgtcgaggcgccggtggcgattcgactcggagatcgcgtctgggagtgcctcgcgtgcggcatgcggcgtcctccggatcaagttgatgccctcgacatgttgcgcacggtggtcggcggcggagcagtcgagcgaacgacggcaaagcagaaggcgatcgcgagaactctcgcgctcgcaaaagaaccggaatcgctcgcgacgaacaatcatccgaaatcgggcagcgatcgggagcgtccgcgttcggactccgattcgtcgtcatcgtcgggaggcaagcgctcgcgaagacgcgagtaa

SEQ ID NO: 66810 - DNA, 1425 bp, unknown
  TnpB Polynucleotide
atgtcagtgaggataggagtgggggcccttcgatcccctaaaggcgagggcgaaagcctctcagccaatcgcgaaagcgacatccgccaagatgatagtactcttatcctctctgatgtggctaaactcacttccgccataacgcttcggatctggccgaataaggcacaaacagacatgctttgggctgcggctcggtgcatgcctcatgtcgagcgtgaagtcacccttggcttgctcaaaggtgaaggtgaaggagtagctcccgctacatatgcgtgcagaaaagcggtagctattgcaaaggcatggggcgagatccctgcaaagccacgaaaggacggacgtctaccggatgcttgctggcgatggggaggtgcgtttgtcggcgaagctgccatgcatgcggcaacccggttcgctacatggaagaagaaaaaccttgagaaggcctccccgccatgggcaaagtccgtcggtttcggagtgcgtacggacggagtgagattgtcaaaaaatggccgaagagtacacgtgtccctagcgatgctagggatgcgggacggtcacagacaagcgcaacctgttttcattgtcaccgtagaaggacgtcaaagccctattgttcttgatagaatacttgcgggagaatactcatctaagagctgtagggtcgtcaacaaagatggcaagtggctcctcaaggtctcctaccaatggccaaagccgcattccacgcaagccaaggggattatgttcgtccgtcggacaactaacaagttccttgtggcgatgacactcgctggagaatcacccgaacctttgcttgagacgcggtcaatcgtggctcttaaaactcaactagacgcccgcaagaaagctgtgcgtcaggggctagcacaccgcggtagtggcgctcgcgggcatggtgttgctcgtaggtatcgagagtacacgcgactagacggaatagagcggaacactgtagcaacatggtgccagcagcaagcggcatggatcgccaaggaatccgtccggctgaactgtggtatggtcatgctggaagactttgccggaagttcggtacctgtcagtgaggaccgccgtctacagacgttacttaggcgatttccatttgccaagttgaacgaatgtatcgagtgggcgtgcaagaagcatggattggagtgctcttctcaggtcgtacatacgtccgtcgagtgtccggtatgtggtgaggtagtaagcgaccgaagtggctggaaggtctgtgtgtgtggtttatgcgtgcagaaagataccttggcgatttggagaataattcttgccgcaaagctggacacagtcggcatggtgaagcgggcagaccacgaggccaggttggcaaagacaatcgaaaggagcagaacacatggcgtggtttga

SEQ ID NO: 66811 - DNA, 38 bp, unknown
  Direct Repeat
ttgagctgactgatgtttggcggatggatcgaaggagt

SEQ ID NO: 66812 - DNA, 38 bp, unknown
  Direct Repeat
ttgagctgactgatgtttggcggatggatcgaaggagg

SEQ ID NO: 66813 - DNA, 38 bp, unknown
  Direct Repeat
ttgagctgactggtgtttggcggatggatcgaaggagg

SEQ ID NO: 66814 - DNA, 38 bp, unknown
  Direct Repeat
ttgagctgactgatgtttggcggatggatcgaaggcgc

SEQ ID NO: 66815 - DNA, 1785 bp, unknown
  TnpB Polynucleotide
gtggaaagaagtgagtccgcagagagagggctgactgcacagcctcaaggcgaggaaattgcgcgatacaccgacattgtcggggaagccaaccgcgcaatgctcgccaattcgcccctgaccggggcgtccgttacccacccggttacccgccgggatatctcatctgcggactcacttctatccacgatccctgaactcaattcgggtaacggagtggagcaggcgcccgctggagagtgcagtgttgtgcgggccacatgtcgcatccagatcgatctggccatggtcgccgacgacaaggacgcgcacatcaaacgccgctgcggcgggagcaatcctggggtcgagccttgcaaggcgtgcgttttgcgggagcagctgcgccatgctcgcaacgacgccgtgagggccgccaacgcggtcatgcgcatgcattggcgggcagacgccgatgtgctggatcgggctcgtgtaaagctcggtcgggcgcccaagggggcagatgagtggaagcagtaccacgacccccacgccttggttagagctgtcctccccggactgcctgagggcgccgagaaggggctcaaggtgctgtcggacagcggcaacctgtacacctacgcgatggccaggctcgttgcccctgccctcagctcgggatgcgcctctaccatcgcgcgtgaggtcgctgccaagtggcagcagtccaggttcgagtgcctgattcggcaatccatgaccccgccccattatcgcgagagcatgccgctgccgatccgagcagcggacgttcagttctcgcacgtcgaaggagacctgttccgaatccgattcggtgtgctagccggcaagaacatgagctgggcgattccgatcaaggcccgtgattcgtacatgcggcaggttctgcgggagctgactgatgggcagaccaggatgggcgcggtcagggtccaggaagaccggcttcgaccagggcgctggtacctgcgaatctcgtacacccgtaaggtgaacaagatcgcccccgcagaaaagattgtcgctgttcacccggggatcgtgacgtttctctgcgcgctgggaagcgacggagatcggtggctgtacgacggcaaggatatcgaggcgtacttgcggcaggtgcaacgccgccggcagcagtatcagcgggacagcaagggcagtgcgcgctgggggcatgggctgggcaggacgctggcgccgatccggaagctcgaggacgcaggggagcggtggcgcgatacgaagatccagactctaggccgacgcctagctacgtggatccgtgacaggggctacacgctcgtgctgatgccagacttttcgggcatccgagacggccttcccgaaaaactcaaggggggcaagcgggtctgggaccgggtgcaaacctggccgtggtaccgccagcagcaggcgctgacctcgtgtctggaggagtacggcatccaggtcaagatgcaagagagcccacacaaggcggacacctgtccgaagtgcgagcattcggacaacgcgaacattcacttgaaaaggaggctgttcatttgctcggaatgcgggtataggaagatgctggacatcgtgttctgcgagaacagtctcgcgtgcgagcgctcaggcggtggagagttggatcacgaggaaaacggcaggcccgggaacggcaaaaagggaccgctcgcaaagcggcgcgcaagtcctagaaaagccaagggcaacggcaggagccctggcaacgggaagaattctgggtaa

SEQ ID NO: 66816 - DNA, 29 bp, unknown
  Direct Repeat
ctggcaacgggaagaattctgggtaatgg

SEQ ID NO: 66817 - DNA, 29 bp, unknown
  Direct Repeat
ctggcaacgggaagaattctgggtaatgg

SEQ ID NO: 66818 - DNA, 29 bp, unknown
  Direct Repeat
ctggcaacgggaagaattctgggtaatgg

SEQ ID NO: 66819 - DNA, 29 bp, unknown
  Direct Repeat
ctggcaacgggaagaattctgggtaatgg

SEQ ID NO: 66820 - DNA, 29 bp, unknown
  Direct Repeat
ctggcaacgggaagaattctgggtaatgg

SEQ ID NO: 66821 - DNA, 29 bp, unknown
  Direct Repeat
ctggcaacgggaagaattctgggtaatgg

SEQ ID NO: 66822 - DNA, 29 bp, unknown
  Direct Repeat
ctggcaacgggaagaattctgggtaatgg

SEQ ID NO: 66823 - DNA, 29 bp, unknown
  Direct Repeat
ctggcaacggaaagaagcatgggtaatgg

SEQ ID NO: 66824 - DNA, 29 bp, unknown
  Direct Repeat
ctggcaacgggaagaattctgggtaatgg

SEQ ID NO: 66825 - DNA, 29 bp, unknown
  Direct Repeat
atggcaacggaaagaagcatgggtaatgg

SEQ ID NO: 66826 - DNA, 29 bp, unknown
  Direct Repeat
ctggcaacggaaagaagcatgggtaatgg

SEQ ID NO: 66827 - DNA, 29 bp, unknown
  Direct Repeat
ctggcaacgggaagaaacacgggtgacgg

SEQ ID NO: 66828 - DNA, 36 bp, unknown
  Direct Repeat
ttggcaatgggaagaaagacgggtaacgggtgcagg

SEQ ID NO: 66829 - DNA, 36 bp, unknown
  Direct Repeat
ctagcaatggcaagaaagacgggtaacgggtgcagg

SEQ ID NO: 66830 - DNA, 36 bp, unknown; identical to SEQ ID NO: 66829
  Direct Repeat

SEQ ID NO: 66831 - DNA, 36 bp, unknown; identical to SEQ ID NO: 66829
  Direct Repeat

SEQ ID NO: 66832 - DNA, 36 bp, unknown; identical to SEQ ID NO: 66829
  Direct Repeat

SEQ ID NO: 66833 - DNA, 36 bp, unknown; identical to SEQ ID NO: 66829
  Direct Repeat

SEQ ID NO: 66834 - DNA, 36 bp, unknown; identical to SEQ ID NO: 66829
  Direct Repeat

SEQ ID NO: 66835 - DNA, 36 bp, unknown; identical to SEQ ID NO: 66829
  Direct Repeat

SEQ ID NO: 66836 - DNA, 1689 bp, unknown
  TnpB Polynucleotide
atggcacctgttacccggaccacccggttcgaagtccagttcgtgaacctgcgtagcgccgaccgggagcgtcagtacgccaggatctggggaacgatggatgacgcgacggtcgccatgaatcggatcagcaacgtgttctggctgctgcacgaagccatgctccctccccagatggagggcccccggacacgcccgaagatgtacgcgcagcgcctgcgcgatctcggcttcactgatgacgccatcgataccatgtccatcgaggacatgtaccgagcgatcaagggccccaacggcgccgatccgaaggcctgggggtaccgcgacgtggcttatcggatgttcaacggcgagtaccagccgggagggaagcgcgcctacagcccgtctgtgggggccggccgcctctcgggcaacgcgatgtcggagatctcctcctgggtcgagacgcggatcacgacggacggacgagacatctcgcgaggaaagcaggtcttgtcgacgttccgtcgcacgccgctcggggtgacgaatcaggcgatcaccttccgtgacgacggcgtcgtcgagctcgggctgttcgctaaggacgaccccaccggcggaacccgtgtggcgctgaggccggtagggaggatcgactcgacgaggaagaagatccttcgtggactacaggacaagtcgatcaaggtggggtgcgcgaagctgatctggcaccagcccgagaaccgaaaggggaagtggtacctcgccatctcctacacgactgcgaatgctgcgcgtttcgacgctcctgtgccgagggaggcgacgatcgccgccggtatcgacatcgggatccggtggacgtcgatgatcgcgttcgtcgacgcgaatacgggcgtctacgagaagcggtacgagtacgtgcaactcccccgacatgttcgggcggcctgggaggctgtcgatcgggagcgtcgagagcgctcggcgttcaaccgtgacgtctacgatctgcgcaccggacgtggacgcgaagggaagctcagggtcgtccggtgcatcggcgatcgtctgtcgcggctcgtggatacggcactggattgccatgtggccgcggtcgtacgaaccgtcaaggcgcgaggtgcgacgatctgcagcatcgaagaccacgcgcactggtctgtcggcagggcgcacgaccgcgcggaggacgagggaggcacgaacgccggcaaggcgaaaatgcgccacgactacttccgctggcatcagggggcgttgcggagcaagctcgagtccgttctcgcccgtgaggggatcgaggtccggatcgtcgatccggcgatgacgtcgcgcacctgtcccgactgcggcaaggtgtgggccgagacgggtgtgtatgcgccgaagggggttgcccctggttcgttcggcaggatctcgctggagcggttcgtgtgtgagtgcggctgcagcaagcaggcggacttctgtgcaggcatcacgatcgctcgccgctgggaggcgggactcacgcctgccgaagtggacgccgcgaacaaggctcacgtctccacggcgaccgcccgtgccgcgaaggctgcgaagctgtcgattcaggaatggaagacggcgaatccaaagaaaaacaacaggaaggggtcgaccagcaagagcaccagtgatacattgaacgcgtga

SEQ ID NO: 66837 - DNA, 37 bp, unknown
  Direct Repeat
tcgcaacgcgctgttcgctcgaccttgtgttgcgaca

SEQ ID NO: 66838 - DNA, 37 bp, unknown
  Direct Repeat
tcgcaacgcgctgttcgctcgaccgtgtgttgcgaca

SEQ ID NO: 66839 - DNA, 37 bp, unknown
  Direct Repeat
tcgcaacgcgctgttcgctcgaccgtgtgttgcgacc

SEQ ID NO: 66840 - DNA, 37 bp, unknown; identical to SEQ ID NO: 66838
  Direct Repeat

SEQ ID NO: 66841 - DNA, 37 bp, unknown; identical to SEQ ID NO: 66838
  Direct Repeat

SEQ ID NO: 66842 - DNA, 37 bp, unknown
  Direct Repeat
tcgcaacgcgctgttcgctcgactgtgtgttgcgaca

SEQ ID NO: 66843 - DNA, 37 bp, unknown; identical to SEQ ID NO: 66838
  Direct Repeat

SEQ ID NO: 66844 - DNA, 37 bp, unknown
  Direct Repeat
tcgcaacgcgctgctcgctcgaccgtgtgttgcgaca

SEQ ID NO: 66845 - DNA, 1626 bp, unknown
  TnpB Polynucleotide
gtgctggacgacaccgaggacacgcagatcgacaacgttgacgacgaagccgcgggcaagctcgccgacttcgccaacatggagctctcgcgggcgacgacgcgcttcgcgctcgacttgcggctgctctcgccgctcgcgccgaaagggatcaagcgcgagctctccgacgaagagaaggacgcccgccgggcactcgagcgatgctcgctgctctgcacgacggcgcgcaacgtcgcgattcgcgagaacgtccggcgcgacggaacggcgctcgacacctggctctcggaacacggcggcgcgatgcccaagcgcggagagctgaagtacgaagcagcctacagctaccagttgattcgcaaagtcgctccagcgctcgcgagcggtatcgcggcgacggtcggtcgcgaggtcgatcgcaagtgggtcggcgagcgattctcggtgctgcacttccaagagcgctcggcgccgcactaccgcgttggacagccgtttccgatccgcgctgctgatgcgcgctggacgtgggacccggcgcacggacgcgccgtggtgacggtccagctcttctcggggtcggagccgatccaacggtttcggctgcccatcgaagcgcgcgacgagcaccagcgcgaggtcttgcgccggctggcgtcgggcgattggaaagccggcgaggtcaagatcgaacgcgaccggctacggccagcgaagtggtacctgcgcgtcgggtacaagcgactggtgccacggcgcgtgacggggccgtgtgcgaccgtgaaccgtgggatgcggtgctttctggtcgcgatgatcgagggacgggaaggcaggagatccgatgccggtggagtagcgacggcggacggcggtcgcatcgacgccgtgcacggcgagacgtggatctacgacgctgacgacatcgaagcgtacatgcagcagatgcagcgccggcgccgcatgtaccagcggggggtgaaggcgagcaaccgcgtcggtcacggtcgcccgcgagcgcttcgcagcatcgagcacctagcaggcgtcggcgaacgctggcggcagacgcgctgtcaggtcatcgcgcgtcgcctcgcgcgctggctcgccgagcggggcgtgtcgcgcgtctacctggacgacttcacgggcatccgggacagcgtaccggaatcgctctcgagcaaggatccgagccggcaacggtggatctgggagcgcatccaagaatggccgtatttccagctcggcgctcggctcgaggcgtgcctggccgagtacggaatcgctgtccagaagcaagaaacggtcggcaattcgatgcactgcccgcagtgcggctacgagagcgccgacaaccgagacctgcgcaactggcgcctcgtgtgccgcaacccagcgtcccgcggtggtcgcgggtgcggctactcgcgccacctcgacgtggcgttatgcgccaacgctctgctccgttcgaggggagatgcgacgctgcggacgacagtcaatgaatccgcgccgttactctccgcgcccgcgagcgacgaagggaccgctcgcaaacgggcgcgcaaacacttgaaacgaaaggaggacggcgggacgggtcgcaacgggtga

SEQ ID NO: 66846 - DNA, 36 bp, unknown
  Direct Repeat
gtcgcaacgggtgacagaagtggatgggaaggcagg

SEQ ID NO: 66847 - DNA, 36 bp, unknown; identical to SEQ ID NO: 66846
  Direct Repeat

SEQ ID NO: 66848 - DNA, 36 bp, unknown; identical to SEQ ID NO: 66846
  Direct Repeat

SEQ ID NO: 66849 - DNA, 36 bp, unknown; identical to SEQ ID NO: 66846
  Direct Repeat

SEQ ID NO: 66850 - DNA, 36 bp, unknown; identical to SEQ ID NO: 66846
  Direct Repeat

SEQ ID NO: 66851 - DNA, 36 bp, unknown; identical to SEQ ID NO: 66846
  Direct Repeat

SEQ ID NO: 66852 - DNA, 36 bp, unknown; identical to SEQ ID NO: 66846
  Direct Repeat

SEQ ID NO: 66853 - DNA, 36 bp, unknown
  Direct Repeat
gtcgcaacgggtgacggaagtggatgggatggtagg

SEQ ID NO: 66854 - DNA, 1674 bp, unknown
  TnpB Polynucleotide
atgacccctattacttatagaattcctataactgcatatgttataaataacgaagaagcacccgaacgtaacgcattacagactcttgaaggcataagaaaacacctttaccttgctgctaatattgcctaccagcactattatcaactcctggcaaaagaggatcctgttcagaaaaatctgtttgagaagtacaacaaattccagaaggcagatgaagaagcctggaaaaatctaaacgacgccaagttacgctaccatcacctccagacttccaaagaaaaggaagaggtaaagtccatcatagaaaagcttccagataaaattagagaaattcgaaacgacgccaagaaaagtatatatgattttgtaaagcaggatgagtttattgcaaagctgacagataaattcaggaatgtaattccccgcgaggtaatgcaatactccatgacaaaagtattacaggaattatataccgattatccaaacatacaagacgaaaatatccgccaaccattaagggtttattctaacaatttcccgatctgttttggctggaacaacgacctgaaaaatagctttaagttccttgataaaaaaggatctggagaaaagactgtgcagttttactcatttcgctgtctcgataaagaaaatgaactgattttcagatgtcgaataggaaaaagattgtctgaattagcagacttgctcgcccaaattagtattggagcgaacagctataccaatattggcgacccttccatacagtataacggaaagaataaatgggtgcttcaatttacatataagccgggctctgccgcaattactactgccggaaatgataaattggccatgggcattgacctcggttataaggtccccatatcgtgggccattactgatgataacaacacgtcaggtgagataggtggtattgatgaaattaaagaggagaggaagaaaatacaggcattgttcaaaaagaaaattgcggctataaaaaatacgcggtcgggtcggggaagaagtagaaaaaatgctattctgaaagacaggaatgtgcaggaaggaaactattttggaaacttgaatgcttgctgggcacataaactggtaaaaattgccgtggaccacaacgtggctatcataaaaattgaagaccttgatttcagggaaacaaagaaaagaatcaaacaaattgccaaacaaattaatctgcaattagcccagcgaggaactaaaaaggaacataaaagccaacccgataatttgttgaccatgttccggaactggtcgtacgccgatttaatcaatcgcattgagaaagaagcagaacaacacaaaataatggttgcaagagtgcatccttataaaaccagtaaaatttgctggaaatgtgaaaaagaaggcaaacgcaacacgcaggctcatttgagatttacaagggaacaagctaatcaatgcagttataaacaatctggtgagtgtgtattaatcccttatgacgagaaggttattgcccgccagagaaaaaaggcggtgaagaacggtaacagtaagggtggacaggcgcagcaagttttcactcattacctcatggcagatcaaaacgccgccatgcgcattgcatgggcgcaacaataccacttaaccccaaaacagtcatga

SEQ ID NO: 66855 - DNA, 1959 bp, unknown
  TnpB Polynucleotide
atgaaatctatagctaatggtcaccacggggcgactagcgttagtgagcgagctctccaatctcgcaaaggcggcaagaaggatcgttttgccgaagaggcgcgtcgcccgcgtactcagccaacagaggacatatcccgtgttcgggttgcagcgtcctctactcttcatccgcgcaagtcgccccttggtgaccataagccctcccaacaatccaaactcgatcctgagcaactcgcatcgcgcgagtggttgaaagaacagctaacggctcgacaggtagcaaaacctgtcgcgttcctgtacaacggctcctgggtgtgccggaacggtaacacgaagatcgggatcatcccagcggcactcgtgactgcgagggacgcatcggctgtagacgggatcttcgtgatccgggcgtcagttggcgtagaaatcgttcaacccatatcttctagtaccaagcaggctgctcagtaccgagtcaagtcaaaaactgctaagtcggacgatgagcgcaagaagttcttagctgatgccgagcgcgctgaaaagtcagcgtgggatgaacttggcgcaatgttgcgaactgcttcgcgcgtttacccgttcatgatgcgggctgttactgagtggtgtctcaaggggtgtcttccacagaatccacgggaaggagaaccaacaagcgacaactatcttgtcgcgtttcgtgctgacaaggagtggcacgagctgcacccggacgcgcctccacaattgctccactcgggcataaaatcggtcgcaaagaaacgcgcttacgacgactggcacggttgggacagatcacccaagacccgcatgagcaaaggtccaccgtggaacacacgcgaaggtttctctctaccagaatcgtgcttcacgcttcggtccgaaggcggccaaatggtctgcgaacttcggctccacgccaagaccgacgacggtaagaattctcctccggttcgggttgtcgtcgcggcccgcagtggggggtcttgggctcaacttcgggcgcttaccgacccaacgtctggctgctcgatcgatcaagccagaatcctttggtccgaagacgaacgcaaatggctgatgcgaatctcgttttcaaaacctctaccacctgtacctactggcgatggtcccgcgatcgtggtacgccgcggcgtaaagcgctttatggtcgtggtacgaagcgacggggagcgcattccgcgcgaagattttcagggacaccctctccctaacctggaggatgcttggggggcggtcactactcttcgccgtctagaggcacgacgcggcaagaaccgtagaaaggctattgggcctagcatcctggagctcaaggaggccatcgacaaccggcgccgccagatcaagggccacctgccggcgcagggaagaggagccagaggtcacggtaagaaacgatatctgcgggctctagagagcatccgtcgagctgaagccaacttctctcagacatggtggaggcagtgggcatcctggttggcgcgcgtcgccgagactattcgtgcttcggaggtcctcatcgaggattggtgctcggtcccggctccatggcacgaagacgaggtgatcaggactatgctccgacgattcccaaccgctatggctcgagacgccatcgtgtgggcgcttaagaagcgcggcatcaagtgccgactgatcgcagcgtggtacgacctcaagcgctgtccgtcgtgcggggcagatactgaagtggacggaaagcgcgtctactgcacgaaatgcccggccgctgctccgcgcgatcagtgggccgcgtggcatgtgttcacgaaggccgggtacacagaaattcagctaagtcattacatctcatgggcttcagcaattttgcgggccaagaaaggtaaaagcaatgaacaagaccccagaaataaagcagcagaatga

SEQ ID NO: 66856 - DNA, 1878 bp, unknown
  TnpB Polynucleotide
atggacagaagtgccgcgaaaccagggtcggaagcaggtcgactccacgaacctgaaggcgagccttacgaggtctccgccaagcctctcaccggaggggcacgtccgccagacgtatctccggccctggtttcgcggcacttcacgatgcaggacacgatcggtgcagataatggcggacgtgttggagaaaacgtatctccggccctggtttcgcggcactccatctcccacactgctgacgaagacgaaaacaccggcctcgatctatcgaagtattccgatccggaatctgccgtatggcttctcggaattttgcagaagttggacatagagcggccgaaagttcgagagactagacagggttgggagcttcgtgatggtagagtaaaactctgtcatacgttacgtgtagacgaagttctgaaaagggatcctgaactgatacgtgacgaggttctaagactccgtcatgttattgcgttaaggctatgcaccaaaaagcgggatgacctgcctctggctgacatgtttgggtctgtcgctcagtgcatccactttgtcaggcaggaaatcgtctgggatctgatacgagaacgcaacgacaaagttgattccgatggtaaagccattccaatcgacacgtgggcctataatagagcggccaaggcgtgtaaggattggaaggcagcgaaacagaagcaaaaaaagcccaaagatgacagggaaagacagaaacgactgttggatgacgttttcacgtgggccaccagtcttatcggcacaaatgcaagagagttcacaggcaagttcaatgcttggcgtaacagcggtctagagaaaacagcccctccttggcccagatctaccacattcagcatcaagagtaactccgtcaagttagccatcgagaaaattgacaatagagatcaattgttcgtaactttgagtatgtttggggtagaagacggtcatcgactcaagcaaccgcagatacggctgtacccaggcgacgcgcataattggtccgtcgtgcataaaatgttgtctggggagtacaggcaggaaagcgcaaagatagtcaaacaagacaaagactggatgctgaaaatcacatattcgcatccaaagcctaaaccagccgaaggcggatcgatgctcatgcttcgatccatggtgaatttcgcttgtttctgtacgaacgatggtcgttccccaagagaagggataaaagcgaacaatctgatcgctatcaaagcccaattgcaaaatcgtcgaaccgcgatccgacagagcatgaaactccgaggcgaaggttcgagaggtcacggcaaaaagcgagcctatactttctaccaggcattaagcaacaaagaagctaattatgtcgatacatggtgcaaactgttcgcggtagaggtggctcaaacatgtaagaatttcggctgtagtgaactagttatcgaagacttcggatcgcaagtgccggagcattcagatactcggtaccaagccatacttcgacggttccccttcgcaaaattgaaagatactattttggtagcgtgcgcgaagatcggaatcaaaacacgagaagccaaatcgagttcgtgggccaaatgccctctgtgcgattccgtattagccaaagatcgaaatgtcatgtgttgccccacctgcgatatagattctcagatcgacatgtggaggctactgcggatggcgaagaacgccgaacttccgtttgatggcttgttagataccatgcacatgcaaacgaaagtaattcgaaaagagtccttaacagagcctgaacctgaacctgaacctgaacctcccaagaaagttcgagttcggggcaagatcgtgccccggtaa

SEQ ID NO: 66857 - DNA, 22 bp, unknown
  Direct Repeat
tttttggcggacgtgttggagc

SEQ ID NO: 66858 - DNA, 22 bp, unknown
  Direct Repeat
tttttggcggacgtgttggagg

SEQ ID NO: 66859 - DNA, 22 bp, unknown
  Direct Repeat
tttttggcggacgtgttggagg

SEQ ID NO: 66860 - DNA, 22 bp, unknown
  Direct Repeat
tttttggcggacgtgttggagg

SEQ ID NO: 66861 - DNA, 22 bp, unknown
  Direct Repeat
tttttggcggacgtgttggagg

SEQ ID NO: 66862 - DNA, 22 bp, unknown
  Direct Repeat
tttttggcggacgtgttggagg

SEQ ID NO: 66863 - DNA, 22 bp, unknown
  Direct Repeat
attttggcggacgtgttggagg

SEQ ID NO: 66864 - DNA, 22 bp, unknown
  Direct Repeat
tttttggcggacgtgttggagg

SEQ ID NO: 66865 - DNA, 22 bp, unknown
  Direct Repeat
atcttggcggacgtgttggagg

SEQ ID NO: 66866 - DNA, 22 bp, unknown
  Direct Repeat
tttttggcggacgtgttggagg

SEQ ID NO: 66867 - DNA, 22 bp, unknown
  Direct Repeat
tttttggcggacgtgttggagg

SEQ ID NO: 66868 - DNA, 22 bp, unknown
  Direct Repeat
tttttggcggacgtgttggagg

SEQ ID NO: 66869 - DNA, 29 bp, unknown
  Direct Repeat
acgtatctccggccctggtttcgcggcac

SEQ ID NO: 66870 - DNA, 29 bp, unknown
  Direct Repeat
acgtatctccggccctggtttcgcggcac

SEQ ID NO: 66871 - DNA, 1464 bp, unknown
  TnpB Polynucleotide
atgaaaacccaggccgaaatgctcacgggtgtcgtcaaggcggcgatcgtcaagccactcggcgacgtcacctgggagcaattcggctcgttactgagggcgttgcgcgcaccgcttcatcgcgttctcaatggcgtagtgcgagagcttgaggttccgcactacgatcgcgaagactggtgggccgatccgaaggatgccgccggcctggccagtccacgcacggctgcctaccgcatcgcgggtacggtgtggcgcgaggaatgcgaggcggcggcggaacgcgtggcgcgcaagaaggagtatccgctcgatcgcgtcatcgcagaacatcgtccatcgagcgccgcacagctcggcgcggcgagcatcgcgttcactcgctggaagaagttcgacaaagaccgttggcgcggcgaaacatcgctgccctcgttcaagaaggaatcgccgatctacctcttcaacgcgggcgtgcaacttcgcgccgaagacggccagtacatcgcctcgttggcgttgagcggcgagcgcatcgaggtcgttctcggggttgatggaggccacgagcacgccaagatcgcgaagatcctctctggcgcagcacgcagcggtgacggcaagatcatcctcgttaccgatcggcattccaagaagcccaaatggatgctgtacctctcgatgtcgtggcctgcgccggaacgccaggaggggcgaaccatggcgttgcatcgcggtatcaagagcttcttgtcctgcgccatacagcgcagtgacactggtgcgaaggatgccttctcggcgatcttggagacgggtgaagaccttttgcggcacaaggaggcgtattccgctcgccgccggtcgcttggcaagcagctccgccagctcggagcaggcgcgcgcgcccatggcaaaggacgccgatacgaggctgtgactcgaattgaagacgccgaagccagatggatccgatcgaagtgccaagaggtcgccgctcacgcctgccggctcggcgaacacaagggcgtgacgcggctactgctcgaggactggacgaatccagcacgcgatggcgcgcctcatttgggcgaacatatcgagtacgtgattcgcagctttccttttgcacaactgcgcgaatcaatcgaatgggcggcaaagaaacggggatgggtcgtcgagatcgtgaagaccgattacaacagtcgtgattgtccgaactgcgggcatcgccatgacgctgcgcaggtggacaccttccgttgcgcgaactgcatgctcgagcgcaatgtcgatatcatattcgcttggaacatgcttgcgcgggacggcaagacaccgggaatcgaagaggctaaacaggcaaccaaacgggtgcgaggcagaatgcgcccgggaaaggaatcgaataaaacttctggggccaccgctggccccgagcgcgaggggtccggtccatga

SEQ ID NO: 66872 - DNA, 1401 bp, Gemmatimonadaceae bacterium sp.
gtgaaaaccaagaaagaaaaggcaccaacagagacccgtgcgcttcgtgtcgagatcgtcaaacctcttaacaacggtggatgggaaacggtaggcgcgcaactccgagcgttgcgaatggttagccatcgggttttgcaatcggtgtttctcgcctgcgtggcgcaagagcgagtcaatcggacgctaaccaaagccgatgctactcacccgcagacagctggctatcgcgtggttgacggcgaaatcgatgacatcaaagcatgggcgaaaaaggcactgaaaaagaaggcggctggcgagcgcgtcgaactgctcaaggcgatcgctgaactcaatccgtcaagccgcatgaagctcggttggtcatccgctggatatgcggcgttcggcaagtggagcaaagacaagcagaaaaacgcgatgcctgaatggcgacgcggcgccccaatcgcgatcaatcgggacggcgtgaagatgcgcgatgacggtacgggattggtgctgtcggttcagctcgacccggccggcacggagtggaccgacttcgcaatcaagtgcggcaaaggctcacactatgggcgcgtgcgggagatgaccagcggtgtcgtgaggccaggtgaggtcaagttggtgctcgatgagcggcagaaaaagtggttcgcattcgtgagctacacgaggccttctccgtccgctccgtccgagtgcgacgtgaaaaaagctctcgtggtgcatcgcggaattcacaacgcgctgtatctagtgtgtagcgatgggcgatcgtatccaataccgggcgcaaagttattggcgaccaagcgcaggcttgtggcgcgccgacatgagatgcagcggatcgcacgttgtgagcgcggaagcggtacgcatggccacggcaaggctcgtcgctacgcagcgccggattcgatcacggacaaggaagcgcgcgttgtgcgcacgtggtgccagcagatgggagccgaggtaacgaagcgcgtaaaagcttggggatgcggcacgatcgtgatcgaggactatggtggcatcgagcagactggcgatgcgcggcaacgttacctcgacaagtttccgttctaccaactcaaacaagcaatcgagtggtcagtgtctaaggttggtcttgcaacaacggaggttccgtgcgaatacatcagcagcgtttgcccggtgtgtggcaacgcggacctgcggcaacacaaccacaggactggaacgtttcattgtgcgaaggcggcgtgtgggttcgagcgtgccgcggattacgttgcagccttcaatatgatgaaacgggctggttttggtgatgggctccgcaagaaactgaaacgtgagatcgatatagtcgctgtcacccgcgaaatcacggctgccgaatag

SEQ ID NO: 66873 - DNA, 30 bp, Gemmatimonadaceae bacterium sp.
agtcgcaacggatcggaaaaggaatgcagg

SEQ ID NO: 66874 - DNA, 30 bp, Gemmatimonadaceae bacterium sp.; identical to SEQ ID NO: 66873

SEQ ID NO: 66875 - DNA, 1563 bp, Armatimonadetes bacterium sp.
atggatgcagtttcgaggcagcaggcgacgagtcatcaatcaaagggggcgttccactcccccgaaggcgaggggcttcggcccgctcagccaagcccgaggaaacgctcggacacttcgcatcgtggtgactcgccgcctactgccccgaagcccaagaaaccgaagcggaccgaagcgcgggagcggtccaagcggctggtggcggccgtggacctggaggtggtggctccggtgcaaccggcaacgtggcccgagctgagggggttgttgtgggaggccggatgtgcggtgccggaggcgcagcgtgcagtcgtttcgcacctcatcgcgcgtgacgttcggcaagatcggcaggacgtggcgccggcgacggaggcatatcaggttgcgatcgatgcgttggagcagcgccggttgcgtgccaagacgccggagcaggcagggctgcggctgcgattgcacaccggcaacgtggtgtgtgtggctagcaagatggcagcagatgcctacgcgacatggcggaaggggcagtaccaggcgggtccgaagaagggccccccctggtacaagcgcccggggatcccgctgcaccatcgtgcgatcaagctggtgcagaccaaggacggggtacattgctcgatcgggttgttcgggatgaccgaggatggccaccggcagccgccgattgtggtgggggtggcggcgtgcggcgggagcgcatgggcgacattgcaccggttgttgacgcgggagtgggagccgcgggcggctcggttggtgtacgacgaggagcagcggaagtggaagctgaagttgagctacgagtacccgatgcccgagcaagcgacgggcgagcgggtgatggtgctgcggcgggggctgcaccggttcttgccgatgttggtggatgatgggaccatgccggcgccgctcgatgcgggcagctcgctcattgcgttcaagcggggcattgatgcgcgcaaggcggccatgcgtggccatctgccgtggcagggcaagggggcgcgcgggcacggaaagaagcggtggtaccggagttacgatcggctgggtcagctggaggcgaactatgtgctgacgtggtgtcggcagcaggcggcgcacgtggcgaagacggcagtgaagctcgggtgcagccgggtgctcatcgagaagttcgaggagagccagccgccgacgcacccggacccgttcgtgcagaagctcctccggcgtttcccgttctgccagctgcgcgacagcgtgaagcacgcgctggtcaaggtcggggtggagttggtcggggtgaagtcggaccacaacgcgcagcgctgcccgaagtgcggcagcgacgatccggcgcagcatgatcgtcgggcccggtggttccggtgcacgaagtgcgaggttgggggtggttcggacttcatcgcgatgtggaacacgctggtggacatgggcatcgacgacgcggcggtcgagcgcctggcgcagaagtcggccgcgatcgtgaaggcggcgcagcggcgccagaaagtggagatcgaagatgggaactag

SEQ ID NO: 66876 - DNA, 22 bp, Armatimonadetes bacterium sp.
ggcgcagcggatcggaaggtgc

SEQ ID NO: 66877 - DNA, 22 bp, Armatimonadetes bacterium sp.
ggcgcagcggatcggaaggtgc

SEQ ID NO: 66878 - DNA, 22 bp, Armatimonadetes bacterium sp.
ggcgcagcggatcggaaggtgc

SEQ ID NO: 66879 - DNA, 1905 bp, unknown
  TnpB Polynucleotide
atgaaagacgtcggaacgctgctcatcgagatcaagaagccggtcggcgacgtgccgctcgtctacaagcgcctccgcgcgctcacgcgctcgggcgcccaggcgctcaacatgacgatgcaggactcgcacccgaacgccgtcgctcaactgcgggcggtctgggacggcgaggcaaagcagacgcgcacctcgtccgaggattggcgcgctcgggtgcgaacggtcctagctcggaactggaacgcgcggctcgaacgtgaacggctagatcgcaaggctgagcccgatgcggagatggtctacgccgggatcaacggcagcgcactcgccgaggagacggcgaccaacatcacgtcgcagttcaacggcgagaacatgaaggagatgatcgcgctccgaaagggcttcccggagttcgggatcgcgtcgtcgttctactgcggtggacgctactgcgcggtggtcggcactctgcgggagacgctcaagcgaacatgcgcgaccaaagacgacgctgatgccgccgtgaaagaactcggtgaggggcacttcgctcgcagagcgggcgacaagtggcaagtggtgcacgaggactccgcgcgggtggcgttgcctctctggggcactggcaagaaggtcaccgagctgatcattgggcctgctggcgggcacgtccgctcgacctggcggcagctcgttgctcacttcgagcgtcgggacgagatcgtacaagccgagaaggaactcgacgctatctaccgaacagaagcggagaaggcggcactcgcgtccctcaaggccgtgaagaaaacagagcgcgacaagacgaagcgccgcgagattgacggccagatccgcgccgtcgtcgaggcgtcgaacaagcgcatgcaatcgctccgcgatcccatcgaagcgaaactctacggcctcacgaagatcggccggatcggggtcgtctggaaggagcgacggcgcaagtggttcgtgacgatcagctacacgcggtacacgccctccatcgagacgaaggggcaagcggcagcggtgaacttcggcatcaacgtgtttctccaggcgttcgcggccgacgagagtgcgttccatgtcgatggcgcgcagatccttcacaagcgcctcgcctacaatgcggcgcggaagcgcatccagaagagcaagcgccagttcggtcgtggatcacgtgggcgcgggaagagacgccgtgagctgcctctcacgaagcgccaaggcgatgagaccaactggacgcagacgttcatccgtcaactggcctccgacctgatcgcgtggtgcaagaggcgcggcgttgctgatctctatctggaggatctcagcggtgtgcgagacgagttcgagcaggcgacggggggccaggcacacccagaggtgaagcgtcggatccactcttggccgtacgccgagaccaggatggcgatcgtccgagagggtacgcaacatggcgttcgagtacacgcgaagggctcgcgcttcgtgagtcaacgctgcccgtcttgcacgcatacggttcccgagaacgtgcaggaggtgacgattcccggcccggtgctgccgcttcagtcgcttggaaaagggcggtggcgggaggtgccgtaccagcggtttcaggattcagagtccaaagcggcgcagtacgatctctatcgccggcaagacaagacctaccggttcgagtgcgtcgcctgcgggatgaaagggcaagcggacatcgttgcgtgcctgaaccatctccaagacctcggagtggtcccggcaggaaagcccactccgccgggaacgcccactccgctcgcgaagatgcaagaggctgcgcgcgcgtccgtctcgaacgacaagcgaaagaaagtcaggagaacaggaacatga

SEQ ID NO: 66880 - DNA, 28 bp, unknown
  Direct Repeat
ggatctggagaaggaatggtgttggaag

SEQ ID NO: 66881 - DNA, 28 bp, unknown
  Direct Repeat
ggatctggagaaggaatggtgttggaag

SEQ ID NO: 66882 - DNA, 28 bp, unknown
  Direct Repeat
ggatctggagaaggaatggtgttggaag

SEQ ID NO: 66883 - DNA, 28 bp, unknown
  Direct Repeat
gggtctggagaaggaatggtgttggaag

SEQ ID NO: 66884 - DNA, 28 bp, unknown
  Direct Repeat
ggatctggagaaggaatggtgttggaag

SEQ ID NO: 66885 - DNA, 28 bp, unknown
  Direct Repeat
ggatctggagaaggaatggtgttggaag

SEQ ID NO: 66886 - DNA, 28 bp, unknown
  Direct Repeat
ggatctggagaaggaatggtgttggaag

SEQ ID NO: 66887 - DNA, 28 bp, unknown
  Direct Repeat
gtcgggggagaaggaatggtgttggaag

SEQ ID NO: 66888 - DNA, 28 bp, unknown
  Direct Repeat
ggatctggagaaggaatggtgttggaag

SEQ ID NO: 66889 - DNA, 28 bp, unknown
  Direct Repeat
tggatctgggaaagaatggtgttggaag

SEQ ID NO: 66890 - DNA, 28 bp, unknown
  Direct Repeat
ggatctggagaaggaatggtgttggaag

SEQ ID NO: 66891 - DNA, 28 bp, unknown
  Direct Repeat
gggtctggagaaggaatggtgttggaag

SEQ ID NO: 66892 - DNA, 1653 bp, unknown
  TnpB Polynucleotide
atgggcctcgacgtcaccagcggcaccatctccgtagggccgctccaggtcctaaaggatgagcgtgcgctcaccaataaggcggcggtaaccactccgcggcagccaacacccaaacccgggcaaccggcgggaggtggtgccactggtgacgtcgaggaaacgacccgagacacggtcgttgtccagttctcgatcctctacgacggcaatcaggaaaagttcgaccgcctctgggcgatgcgcgactgcatgcaccgggtgctcaacacggcgatcagcgagtggcacagagcggacaaggtcgcgtcggcgcgcaacccggagaaggagacgctcgcgcgaggccccgtgaccgacgccgtgaaggcgctgctcgagcgagagcgcgagtactgggccaagcaggtgccgaaggccgagacggaggtggcgaagctccgtgtggaccttggccgggcgaagtcgaaggagcggctggaggaggcactcaccctcagcacgcgcctcgagttcgcgcagaagcgatgcgcaagcctcaggatcaaggccaccaatcagatgccgagctccgtctacgattcggtcgtgcggtggacggcatcgcgctacgcgatctacaagaaagatgctttccggggagacagatccaacgacacgtaccgggcgggccagccgatccggtggcgtgacggaagctgggctcttgtgcgagaggtcgacgctaagggccgctacaacctgaccctggagctccactcggacggtaagcacgtcgagcgcgccggcttcacggtcatcccggacggccccagcatgcacggtttcgcgaagcgaatggtggccggcggagacacggtcaagctctgcgatgcgcgtgtcgtgtattccgagcggaaaaagcagtggtttgcgaagctcactatccgcctcgtccggaaggcctcccggcctctcgcgggcacgacggccgcccttcgtcgaggcgtgtggagcgccctggtgctcgtcttcgaagacggttcgatacgcaccattacgggcggcgacgtcgtggccttcaagcgcaagctcaaggcccgcaaggtcgcgctcggcgagcacatggggcagatggaagccggtgacggagcaagggggcgagggaagcgccggcggttcgcggcgctgcggaagatcgacgatgccgaagatcgcttcgtcgacacgcgttgcaaggtctgggcgcgcatgatcgcgagggagtgtgccgatcgaggcgttggacgcctcctcgtcgccaagatgaatccgaaggagatgggtgacgatgtcccgggcgtcgtacaggccatgctccgcaactggccgtttgcgaagatgctcgatcgcatcaagcagtcctgtgcgaagatctacgtcgacgagcgcggccgggcgacacgcgacgcgctggcggcgaccgtctccgtcgagctcgccccgttcgatgcgcactgggacgcgcgaggctgccccaactgcggccacgtccacgacgagcgacaggtcgctccgacgtgggagtgcgacaagtgccacttcacgcgcggcacggaccagatcgtcgcgtggaacggactcaagcgcgagctcaagaggcatccgggagagccaaagccatgcacgtcgtag

SEQ ID NO: 66893 - DNA, 1590 bp, unknown
  TnpB Polynucleotide
atgtgcgccatggcccgacaatcatccgagacaaacgtggatccaatcatcgctcgggccattcaggccattcaggacaaggctgaacagtttggtgtgactctggagggaagagtttcaatctctcccaacaaccggatttggaaggtccgacaaggacgggcaactttagggcggatgactcaggatcagctcacccgctgcgatgtagaccacttgttcgtgattcgtcgagcggtttgggtcgatgtcgtaaaacccgccggagatacgccgtggcctgagtggtcccaaccgctttttgcgctccaatgggctttaggtcagctcaaggatgcagccttggacgagttgcggctctccgcacacacaggagagaatgaggtgcctctcgccacccttgcctatcggacaatccaatcggagacacagcagcaacgtcttcgacaggacgcacttcggcgtggaagaaattccaggacttgggccgatagggcgacattcagtgttggtggtgccacagcatcttgtgctggccaagccgtccattctgcgtttcagcgttggcagagaggggagatcggttatccctcgtggtcaggcccgaagtcatccatccccctgagagccgccgagacgtctttgacatgtctcgatgaagacatcgttctccgcttcaacgcaacgggaactcgacaggagtgcttggtacgggccaagggctggtcggcacagaaaaccatcgagaagatcatcaagggcacctgcttgaagggcgacgccaatctagtctgggatgaaaagaaacggcggtggcgggtcagtatctcctacagcatgcctcgcaaacagcctgccgagggtgccaattacttggctgttcgtcgcaacgttcatgacatgttgttcgtgatggacagcaagggcaagacctataaggcgtgccaggggattgggctcaaaatcatccatgtccggagccattttttgcgcaggaagagcgagatcagggccaccctgaatttccaaggtcagggtgcccgtggacacggaaagaaacggttctatcgttcttacacgaagtgctcggacaaggaagcgaacgcgattgatacgatgctcaagcagctcgcttcttcgatccgcaaagcagcagagagcgccggagcctcaagcgttctgttggaagactttgctttgccgtggacgcctgaagctggtgacccgcgttttgtccggctcttgcgtcggatgccatggaccaaggccgaaactcttctccgacgagaattggaagagcacggtattcgtctggtcacaatggcacaggcgcacaacacgacaacatgccctgcatgcggagctgatctacgacaggttgatgcccgacacgttgagtgcgattcctgtcaactcctttgtacccgggcgattgtcgcgacctggaacatgttcctggcagcggaagtccctgttgaggaactggctgaggtaaaacgcaaggcttccttcattggccgtgagatccgtcgtcgtaatcaagaagtcgaagccgccaagagtctggcggacaccattgctgcggagtaa

SEQ ID NO: 66894 - DNA, 36 bp, unknown
  Direct Repeat
gtcgtgatcagaagacttgagaccagtgatagcagg

SEQ ID NO: 66895 - DNA, 36 bp, unknown; identical to SEQ ID NO: 66894
  Direct Repeat

SEQ ID NO: 66896 - DNA, 36 bp, unknown; identical to SEQ ID NO: 66894
  Direct Repeat

SEQ ID NO: 66897 - DNA, 36 bp, unknown; identical to SEQ ID NO: 66894
  Direct Repeat

SEQ ID NO: 66898 - DNA, 36 bp, unknown; identical to SEQ ID NO: 66894
  Direct Repeat

SEQ ID NO: 66899 - DNA, 36 bp, unknown; identical to SEQ ID NO: 66894
  Direct Repeat

SEQ ID NO: 66900 - DNA, 36 bp, unknown; identical to SEQ ID NO: 66894
  Direct Repeat

SEQ ID NO: 66901 - DNA, 36 bp, unknown; identical to SEQ ID NO: 66894
  Direct Repeat

SEQ ID NO: 66902 - DNA, 36 bp, unknown; identical to SEQ ID NO: 66894
  Direct Repeat

SEQ ID NO: 66903 - DNA, 36 bp, unknown; identical to SEQ ID NO: 66894
  Direct Repeat

SEQ ID NO: 66904 - DNA, 36 bp, unknown; identical to SEQ ID NO: 66894
  Direct Repeat

SEQ ID NO: 66905 - DNA, 36 bp, unknown
  Direct Repeat
agcgtgatcagaagacttgagaccagtgatagcagg

SEQ ID NO: 66906 - DNA, 36 bp, unknown
  Direct Repeat
gtcgtgatcagaagacttcagaccagtgatagcagg

SEQ ID NO: 66907 - DNA, 33 bp, unknown
  Direct Repeat
gtaatcagaagacttcagaccagtgatagcagg

SEQ ID NO: 66908 - DNA, 36 bp, unknown
  Direct Repeat
gtcgtgatcaaaagacttcagaccagtgatagcagg

SEQ ID NO: 66909 - DNA, 36 bp, unknown
  Direct Repeat
gtcgtaatcagaagacttcagaccagtgatagcagg

SEQ ID NO: 66910 - DNA, 36 bp, unknown
  Direct Repeat
gtcgtaatcagaagacttcagaccagtgatagtagg

SEQ ID NO: 66911 - DNA, 23 bp, unknown
  Direct Repeat
ggcttcagaccagtgatagtagg

SEQ ID NO: 66912 - DNA, 36 bp, unknown; identical to SEQ ID NO: 66894
  Direct Repeat

SEQ ID NO: 66913 - DNA, 36 bp, unknown; identical to SEQ ID NO: 66894
  Direct Repeat

SEQ ID NO: 66914 - DNA, 36 bp, unknown; identical to SEQ ID NO: 66894
  Direct Repeat

SEQ ID NO: 66915 - DNA, 25 bp, unknown
  Direct Repeat
aaggcttcagaccagtgatagcagg

SEQ ID NO: 66916 - DNA, 36 bp, unknown
  Direct Repeat
gtcgtgatcgaaagacttcagaccagtgatagcagg

SEQ ID NO: 66917 - DNA, 21 bp, unknown
  Direct Repeat
cttcagaccagtgatagtggg

SEQ ID NO: 66918 - DNA, 1353 bp, unknown
  TnpB Polynucleotide
atgctgaacgggacggtcaacaatcgcgcgattcggttggaactcgtgaagccggtgtccgattcgtgggaggagatcggttcgctcttgcggctgctcgcaaacgcgacgccaaagctcttgaacgctgcgctcgacgcacgagtcgccgttctagtggccggcaagcaggccgtgaagagcgcaatcgcaccagacgcgaaggccgcttccccggatggcctcgcataccaggctgtgcttcgtacagtcgagagccttcgcgcgtggggcgcgcagaacgacgcgcaaccggctcgggcgagatacgcaaagctcgaagtccctagcgggatgtctgcggcaatcgcacgcgctgcttgccaagcgttctctcgacgagatcaggagcgcccgcacttcgcaagcgaacggattctagtccgtgctgcggagacgcagctcgtcgccgatgatgtgggtcacgttttgcacgtcgggctacggtcgaaggggcgcgtagcgttcgcggtcgcgcgatcttggggtacgcacgctgaaacgctgaagggcatcgccagtggcgttatcccgcatggggacgtgaagatccaatgggacgatcgccgctcgaagtggtacgcgctgctgtcgtacgccgcgccggagccagcgcccatgaccgtcgatccgcagcgtgtgctggccgtgcaccgcggcgtacgaaacgctttgacgttgcttccgtctacaggcgcgcgcgcgctctacttgcgaggtgggaagtttgcggcgcagcggcggaagctacacgcgcgggcatcggacattcgacggacgagtgctgcggagcgtgggggcggggcgaaagggcacggcaagtcgaggcggttcgagcagcacagcgcgcttgacgacaagatcgcgcgcgtcacgaagacttggtgccagcaggcagcagcgttcgtgcagcaggcggccgagcgcatgggctgcggccttatcgtcatcgaagattatggtgggattgaaccgcacgagaacgtgcacgtacgacgagtgcttgatcgcttcccgctgcacgaactcaagctggccgttgttcactgcgcgacttcgcacggccacactgtgtcggaggtgcctgcggcgtggatcagctcgacttgtccggtgccggagtgcggcaaccaggacacgcggcagcacaacacccgaacgaacgtgttccactgcgctgtgtgtggattcgagcggccagcagactggctcgccgcctactggatgttgcgcttggccggctactcggcggcgctggacgaacagctctcgaagcaggcgaagctcgccggaaggatcaagcaaactggatga

SEQ ID NO: 66919 - DNA, 25 bp, unknown
  Direct Repeat
gatcgaaaggaatgcaggtcggagg

SEQ ID NO: 66920 - DNA, 25 bp, unknown
  Direct Repeat
gatcgaaaggaatgcaggtcggagg

SEQ ID NO: 66921 - DNA, 25 bp, unknown
  Direct Repeat
gatcgaaaggaatgcaggtcggagg

SEQ ID NO: 66922 - DNA, 25 bp, unknown
  Direct Repeat
gatcgaaaggaatgcaggtcggagg

SEQ ID NO: 66923 - DNA, 25 bp, unknown
  Direct Repeat
gatcgaaaggaatgccggtcggagg

SEQ ID NO: 66924 - DNA, 25 bp, unknown
  Direct Repeat
gatcgaaaggaatgcaggtcggagg

SEQ ID NO: 66925 - DNA, 25 bp, unknown
  Direct Repeat
gatcgaaaggaatgcaggtcggagg

SEQ ID NO: 66926 - DNA, 1254 bp, unknown
  TnpB Polynucleotide
atgataaagaccgcgacattctatctggccgacatgccgcaggaggacaagcgcctgtgtcaactcctctgcgatgaactcggcgcggcgggctccgcgatggttcgcgagtggtatcgcgcctgtgacgaagtagatggcgagcgtatcaactggggtgacgtgcaggcgcgcggtgtgcaggtcggcaagcaggcgtttgcggatcgtggataccgaggcgaactcgtcaatgacctccagcgcgcagagttcttcgctcgcttcaagactgagttcaagaagattgccgcaggtgagcgcgcctcgctcccgttccccggcagcgcgcccttcatcttcctgcgcatggaccccggccacgaagtggcttccgtcgtcaacgagggcggcacctggtatctgtgcaatccgcacttctaccccggcggttcgcgcagtgaagacaaccggcgcgaatggcggctcaaggacgttggccgcaacgggtggggctacgcgatccttgccgaagcagagaagttcgcctgcatacggatcatgcccgaccgcaagaagcgcggctcgtgggttgtgaagatcaccgtacacctacccgacgccatagcccgaagggaggtcgagaagcaggaggtgtgggcggggatagacttggggctgaactgcccggcagtcttgtctatccccgaccatcccgacggcggcttcgttcgcttcctcggcaatgaccagtatccacgcctctggaagcgccttgatgattacgaggagcgcaagcgcgtcctcaatcgcgcaggcaagcgcgaagccgcccgcgacctgcgtgcgaagatcaccggcgttcgacagcatatcaacgaactcatcagccgggagattgttgacctctgcctcgctatgcgcgtgacgggtctgcgcatggaggacctcaaaggcctcggtgtggagggaagcggcaggctgaagttctggccgcggttccacctggttactcgaattgagcagaagtgcggtgaggtggggctgacgttcgagaagatcaaaccagcgggcacctcgcagacctgctcctcctgcggccatcgcgacaaggacaaccgcaacggccccgactttgtttgcctgcggtgcggtttcgcccgccatgccgacgtgaacgcagcgaacaacattgcccgtggcatggatgacttcgacttgccgacgggcgcaagcgcgccgacgaaggcgcggcgattggagattgcatcatga

SEQ ID NO: 66927 - DNA, 29 bp, unknown
  Direct Repeat
agcgtgcgatccacgcgcgcggggcagag

SEQ ID NO: 66928 - DNA, 29 bp, unknown
  Direct Repeat
cgtgcgatccacgcgcgcgcggggcagag

SEQ ID NO: 66929 - DNA, 29 bp, unknown
  Direct Repeat
cgtgcgatccacgcgcgcgcggggcagag

SEQ ID NO: 66930 - DNA, 29 bp, unknown
  Direct Repeat
cgtgcgatccacgcgcgcgcggggcagag

SEQ ID NO: 66931 - DNA, 1437 bp, unknown
  TnpB Polynucleotide
atgggcgaggaagtaaccaaccgccttcacgcatgtgtgaaggcagaaatcatcaaaccgattggcgcgacctgggaagaggtggggccacacctgcacgccctacgcaacgtttcccaccgtatgttgaacacggccatcacggcgtgtgcgattgccgacgcggagcgaggtgagtcaaagaagaaactggtcttcgaatcagtagcctacgaggcgacgaaaaccgcgctggaacgtgaccgcgactttgcacaagcgatgctcgcgattggaaagacaaaggaccctatcgcgcgtgagcggctcgaacggcgggcaatgctttcggtcccgtcgaacatctataacgcagcaagcatgaaggcgtcgcagcggtacaagaccgaccgcgtcgaggtgttcacgggaaagaagtccctcccatcgttccgttcaggagctcccatcttcgtgcgcgatggcgaccgcgcgtggagcatcgtcaaggatggcaatggctacacgctggtcgtgaagatttatggggggcgaagcggttcggtgcgctttgccctagcgttcgatggcggcagtgcattcgcgcacgcgaagcgcctgacagacgaagaggccatcgagcgtggggatatcaaacgtggcgacttgaaactcgtgtggctcgagcggaagcgcaagtggctcgctatcatgagctacggctttccgaagccgctgtgcacccttgagccgaacagggcgctcgcggtgcaccttggcattcgctctttcctcacaacggcgacgggcgatggcgatgcgggccccctgttcgatggcggggatatcgtcgctttcaaggggcagatggatcgtaggaagaggtcccttcaacgacatcggcgcgagctcggaacgggggcgcgtgggcatggtgtcgaacgccgcgccgccacgtaccgaaagctcgaagacaaggagcaacggttcgttcgcacgaaatgccagcaagccgcgtctgccgtcgtcaagcgcgccgccgcgaagggatgcggcatggtgctcatagaggactattcgccgaaggagatggccgatggggcaagcgagccgggtgcacgctttctccgacggtggcccttcgcggagctgcgcgcctgtatcaagtgggcgtgcgagcgcgaaggcatcgcggtcaagattgtccccgcagcctacgagagtgtcacgtgtcccaagtgcgggaatgtcgatgcggaacaagatgataggcgcggtacgtttcaatgccgccgcgctggatgtgagttgcggcggccggccgacgtcgtcgccgcctggaacatgttgcgacgcgggggagaagacccggggattgagaagagcaccgagaagacgaaggagttcgtggaaaagctgaagaaggtgaagacgacgaagcgtaaggcggcgtcgtga

SEQ ID NO: 66932 - DNA, 1695 bp, unknown
  TnpB Polynucleotide
atgtattatatggtatatatggaaaatagcgatattgattcggttgatggaagacctctcaccgctgaagggcgactcattcgtcctgaaggtgaggcgcaagcgctcactaatgcgggggtaaccaatccccagctccactcaaatacctcgcaagaggcgagcggtgagaggtcttccatcgatcaaatccttggtgtggatcttgaactggaagtgaaggttgtttcattttcagttttgtacgacggggataaagaaaaattcgaacggctttttgcattacgcgaacgcatgcaccgagtgctgaatactgcgattagcgagtggcatagagctgacaagcacatctccaaaaagagtggcaaggaaacatttgatcggccacttcctgcagtcctctccctgatggagagggaacgttcctattggtctagaagactgctcgattgcgagattcagggcacaaaaattggtaggcaactgattcaggcaagggccgcttgtagccctaatgttgctgatttggaacaagtctatacacttgctgaaaaggcaatttttagagcgaggattcgctcacaacttcaaatgccttgcagcatttatgatgctgctattagatttaccaagcaaagatacgatctgtataaaaaggcagaatttagaggggatcgttctcttgatacttttcgttctgatggcccaattcgttggcgtgacaaacattgggaaataaagccaggggaaaagcgagggcattacagtttggagcttgaacttcattcagatgaaaatggaaagtcaaggagaattgaacgaggcgtatttgatttgattccaaatggtggatcaatgcatgcctatgcaaaatgcatgactgatctagaggctataaagcgtggggatgtaaaactttgtgacgcacgtttgctctattcgaagagcaaaaagcaatggtttgcgaagttgacgattaaagttccgaagaagattgcttcttcatttggaacgggtgtcgctgctcttcgcagaggtgttaagaatgctttcgttctggcttttgaggatggagatgtccggttcattccaggcactgaagttctcgccttcaaaaggaagctcaaggccaggaaagtttcgttaggcaagcttggaagcagtcttgctattggtagtgctgcacgtggccgtggcaaaacgcgcaggtataaggcttgggaaaagattgatgacgctgaagcgcgttatgttgattggcgctgcaagacctgggcagctgaaatcgcaaagacgctcgtcaaacgtggtgtgaatgttctattgtttccagaaattggaaagaacaaggacatggccgaaggtagtgagtatatagaagctttgctttattcctggcctttcgcaaaaatggaggattggatcaaacgaacttgcgaaaaaaacgggattgaggtcaaagattataagccttactggcaggcacgacgctgtcctaattgcaagcacacgcatgagaagcggcagataaacacattcctttgtgaagtctgtgggtttgagcgtcctgtggagaccatcgtcgcttggaatggtttactagatgtagtcggcccgcaaccactggagaaaaacaagaaaaagaagcaagcgattagagacctgtttacatcgccggagttgagtggagtatga

SEQ ID NO: 66933 - DNA, 1701 bp, unknown
  TnpB Polynucleotide
gtgctgtatgaaaatagagtcaaggtacgcgatcacgacaagatattgaaacaacgaactgaatggataaaagaattcttcgctgcggagaaaaaaaagaatctcgatcttttcacgattgaagaaatgtatttcagcttccagcatttttcaagtttcatggcatcgttatacaacaagatttgctccaaaatgttcacttcaatcattgaagggaatggaaaaattaatccttacaccttgataaatgaagtattgaaatttcctttgtttataggtaaaaagcaatatgatatcaattcgatgatcgtgggaaatggtttttccgatttcgtatcgggattggatagaaagatcaaatccaacttcagcacgcggtacatcaaggatttcctcataggaaaaaaatcgattccaaatgcaaccaacgggtttcctattccgttctataaacatacttctcacgggatcatcgtatcgtttcaaggagtagattatgaacacgagaaacttgtttacggagaaggtgattttgatgattatgtcgtcaatatcaggattccaatcgttcatcctagtgaattgagaaaaaataagaagaaacaagaagaaacgagtaacaagataaattttcttgacgagatcaagagcatcgaattcaaggatatcccgttcttgatccatagtggttatctcttgcgaaaaacgagggatggttccacgaacgcgttgatccttgatttcattactggaaaaatcaaggaacggatacataattttgtcaaggataatgaatctagaatagcagaattcataaaatcaaaagaattcaagaaaaaaggagagcttgccgatataaacgagatcattgaatctggaattgaaaaatggagcggtatatcatcatacgagattcttccgagggaaataaagcgatccggtagaaaagaatggttcgtgaacttctcgtaccaaaatcttccccgtgtcgtgacttccagatcaggatcgagaattgctggcgtggatttttgtttttcacgaaaaaaaattctcagcgtcgttatcatcgatatagatgtcatgaacaaggaacgtgagaaaattcaatcctggatcgttgatgaaatgcctatctttgattcagtatatcatttaagaaagatatatgacaagttcaagtcaagcttgtcaaatttacaacgatccggtaaaaaatcgagaaaaaccgcaacttcaatgtcgaaggtacaaaagacctttgaaaacaagcgtaaatatttcatcaacaagataacgaaggatattgccaagatgtgcaatgatcaaaatgtatcggaagtccatgttgaaaatctcgacaatttaaggcaaaaggacacatggttcgccatcaataagatacgttccttcccggtgaaaggaatgatcgatttgctcgaaagaaaattggatgatcttggtataaaaacggtacgagtcagcccgaaaaacacgtcacgaacttgtcctgtatgtggaacattgaacgatgatttcacgttcgagtatcgcagcaaaaataaatttcctatattcacttgcaaggataaaaaatgccggtatagcaaggaaaaaacaaatttaatggaaaaacattatcgagatgcagatttgaatgcagctatcaacatagcaatcaagaacgatgataatcaataa

SEQ ID NO: 66934 - DNA, 36 bp, unknown
  Direct Repeat
cttgcacttcacgatttattgcctcgtgtcgtgcaa

SEQ ID NO: 66935 - DNA, 36 bp, unknown; identical to SEQ ID NO: 66934
  Direct Repeat

SEQ ID NO: 66936 - DNA, 1566 bp, unknown
  TnpB Polynucleotide
gtggatcagatcgttccttcgagtgagcccgcgggactgccaaaatcagggccgcctccacggcctgaaggcgagaagcacaccggacatgccggctcgtccggggaagtcagctcggtcgcgctcgccaaacgcgctcgaaagagcgccccctcaacggccccgcccacgggcggggatggcgggaccgcgggttcactcgaagaaacgatcgccatcaccagggccacggccaagatcgcagtcgagccatggcggctggcctcggacccgaaggcccatgcggaaaagcgatgcgggggtgcagagaagtgccgcgcctgtgggctcctcaagtcgctcagggacctccagcgctcggcggcctgggcggcgaacgtcctgattcgccggctatggctggctgacgcaacgtcgctggaggaggctcgcgcgagggcgctcgccgaggcccggcccttcaagggggcggactggtcagcggcgaagctcaaccactaccagatcgtgagggagagcgcccccgagctggtctcatccagcgccgcctcgctctcccgccgcctcggcaagaagtggtctcagtgccggtgggatgcgctcgtcaagcagtcggcgtccccaccacacttccgagcgacgatgccgttgcctctgagggcggacgtcatcaagatcgctcaggtggaggacggtctctttcgctggagcttttccctgcgggccgggcgccactccggaggcgccgagtacgtcttgccggtccacgcccgcgatgagtaccaggtgaggacgctccgagaactggtgtcgaagaacgtcaagatcggagatgccagcatcatccaggaccgccgtcgtccttcacggtggtacgtgcgcttcagctacacaaagcgcgtgagcgctcctccgaggaccggagtggtagcgggtatcaaccgaggcctggtctgcttcctggccgccgtcacctcgacgaaggagacgtggctctacagcggcaacgacatccgctcgtacctggcccagatccagcggcgccggcagagctaccagcgtcaggtggtggcctccgggcgcgtggggcatggccggaacagggcgctcaagccgatcgaccacctggaggcgaaggcggagaggtggaggcagacgaggtgccaggtcatcgcccggcgcttcgtgaagtggctcgttcagcggggtgtcgtccgcctctacgtggaggacttcagtcagatcagggacagctcacccgacacgctctcgtcggaggcgaaggaactgatctggcagatggtccaggagtggccctactaccagctccagaccaggatcgaatcgtgctgccaggaggcgtccatcgaggtcgttaccgtctcctcccacaagatcgcccagcgttgccccaactgcggtcacacggacaaggcgaatatggatctgccccggaggaccttccggtgcggcaagtgccagttccggaggcacctcgacgtggccaccgggatgaacgtcatccatgtcggcgagcacgggggtgacgagaagccgccggcctag

SEQ ID NO: 66937 - DNA, 35 bp, unknown
  Direct Repeat
gtcgcaggacgcgatggaacgttgaggggttggag

SEQ ID NO: 66938 - DNA, 35 bp, unknown; identical to SEQ ID NO: 66937
  Direct Repeat

SEQ ID NO: 66939 - DNA, 35 bp, unknown; identical to SEQ ID NO: 66937
  Direct Repeat

SEQ ID NO: 66940 - DNA, 35 bp, unknown; identical to SEQ ID NO: 66937
  Direct Repeat

SEQ ID NO: 66941 - DNA, 1569 bp, unknown
  TnpB Polynucleotide
atgactgaacgaaatgcttgtcgcaattgtggtactataaaggcagacgggcggtgtccatcatgcatcgtcacggctgtgcttatggagatcgtgaaacccacatcagaaaactgggacgatttcggagatcaacttcgcggtcttcgaagtctcactcatcgaatgcttaatgctgcgatgattggccttgtgtctgatcttcacaatcgggaaagtaagaaggattgtgccggtttcaccgatttaagtttttggcgagaagttgatctccataatcgtgacacaagtcaggatattgactcaggtcagagcacttataagcatattaatgctgaactcagatcctattctgcttggtgcgctggtcaacgtcaacagaaacaagaggctttggattctagtcaactggcattattgaaagctcggccaggtaaaaataaggaaaagttgactgcggacgtcactcgttttgacaacgaggtgaaaagacttgcttcccgtgaaaacttggcgtctaccatgtcgatgagcatggttgcctgcctcggcaaaacagctgacgataaattcagacagtggctaaaagttcggatcgaagaacgtcttcccatgtataagaagaagtctccgatcatgcttaataatatggacgtcaggattcaacttattgataagtcatccgttcaaatgagtttgaagctccgtagtaagggtacaactcatgttattgcattacccgtgagtgggtcagcatggcaagcgatgcgcttggttgcgtcaggtgcggccaaacatggagccggtaaaatcacttacgacgaagctaagaagaaatggtttctacgtttgacgatcatccgtccacgtccacaacgtccacccatgaactccgatgtggttttagcggtaaatcgtggtcgcaacaatttcttatatgcagtttctaatgacgggcgtacttcccgggtcatatggcctggtaatgatattcttcagttcaaaaagagcatccgggctcgaacactggacctgaaacggatgcgtcaccatcgtggcagtggtgctcatggacacggacgtgatcgatttttcgcgtctgaaaccagactcaaagactacgaaataaatttcgttagaactctttgccaaagagctgcggctgcactggatcagcaagctcgagaaattggtgccgggactatagtcatcgaagactttaacacaattgattcagaagaccttcgttatgttatgagttggccatggtatcaactcaaacaggcaatcgcctggatgtgtgagaaaactggtcgtacactcgttgaagtgcctagtgagtatatcagttctgagtgcccgaattgcgggaatcgggatgttagccaagttaatcatcttggagtatttcattgtaaagggcactgcactggatataagaatgggttcagtcgcgaatcagatttcgtggcttgttatacaatgttgcgacgatccaatgttgatatgtcaggttgggatcgttacttcaaaattacggataaaatctcagcagaagcagcagaataa

SEQ ID NO: 66942 - DNA, 36 bp, unknown
  Direct Repeat
gtcgaaatcgagatcagaacaggatgaaattggagc

SEQ ID NO: 66943 - DNA, 36 bp, unknown; identical to SEQ ID NO: 66942
  Direct Repeat

SEQ ID NO: 66944 - DNA, 36 bp, unknown; identical to SEQ ID NO: 66942
  Direct Repeat

SEQ ID NO: 66945 - DNA, 36 bp, unknown; identical to SEQ ID NO: 66942
  Direct Repeat

SEQ ID NO: 66946 - DNA, 36 bp, unknown; identical to SEQ ID NO: 66942
  Direct Repeat

SEQ ID NO: 66947 - DNA, 36 bp, unknown; identical to SEQ ID NO: 66942
  Direct Repeat

SEQ ID NO: 66948 - DNA, 30 bp, unknown
  Direct Repeat
atcgggatcagaacaggatgaaattggagc

SEQ ID NO: 66949 - DNA, 36 bp, unknown; identical to SEQ ID NO: 66942
  Direct Repeat

SEQ ID NO: 66950 - DNA, 36 bp, unknown; identical to SEQ ID NO: 66942
  Direct Repeat

SEQ ID NO: 66951 - DNA, 36 bp, unknown
  Direct Repeat
gtcggaatcgagattaaaacaggatgaaattggagc

SEQ ID NO: 66952 - DNA, 36 bp, unknown
  Direct Repeat
gtcgaaatcgagatcagaacaggatgaaactggagc

SEQ ID NO: 66953 - DNA, 1509 bp, unknown
  TnpB Polynucleotide
atgagtatgacgcgcgccatcaagtttgaagtcgtcttccccggactgcgaaacgacgaccgctcggccctttacaagaagctctggggtctgcagtcggatctgactcgagccgcgaaccgcgtcatcagcgccctgtggctcgtggacgggctcgggcaactggcccatcccgtggagcctcccgcccgaaagccgaacgatcccgcgaggcctgttcctctggcgaccttggcctatcgcggcatgaacggaagctggcagcccttcggcaagccgtgctacgagccttacaacggcaaccctgccgcagcagcgggggttttgtgcgagatcggtgcgacgattctgactcgacacaagacagacaagaaagacatcctggctgggaagcagagcatcgccacctttcgtgagattccggtctcgtttcgaggtcaggactacagggtgcgcgaagacggatgcttcgagctgactgccttcggcatagcagacaagaaacgctctgcccgtgtggtcatccggcctcggaagctcgataacagccagaacgagatcctgcaccgctgccggagtgggcagtacaagacaggttctgcccggctctggtggtccaaaagggaagggcaaaagggtaaatggctgttctccatgtcctggacggatgaaggcattgttgccgtggaagctccagagcctgcactcgagcccgagaagctgatcatcgccggcatcgacaccggaatccgccacgccgcctggattgccttctgcgagatggatgggtcagtactcccgaagccggccatcatccagttccctagtcggacactgcgcgcagtagtacgcatctccaaagagcgcaaggagaggtccgagttcaaccgcgaggcgttggggttgagggaaggtcgcgggcgtgtgcgcaagatgcgtgtcgtcgagaagatcggcgataaggtcgagcgtatgaacgaaaccatggtcgaacagatggccgcctccgcgatcgaagcctgcaagaagcggggagcgaagatcgtagtcctcgaggaccatggggactggtccgtcgacaacatgcacggacgggcggaccgttcagctaccaagtcggaggcagccaagattcgcgcttcgtacttccgctggcatcaaggagctatgcgcgaagcactgaagtcggtcgcggaacgagaaggacttcgccacgtcgagatcaatccggcttggacctcccgtacctgtcacgagtgcggcgtgattcacaagaagactgggatgtacgctccttcgggagcacccgagtccgagaagcaagtcggacgcgtcagtgcagagttgttcgcttgcacctgcgggtacagaggccaagcagatcacaacgcggcaatcaacatcgcgaagctcggcctgcgtgtcatcaacggagagaacgagcccgtggagattgctccggttcgcggagccaagaagaagaagtcggaagaaaaagcagcgaagtga

SEQ ID NO: 66954 - DNA, 37 bp, unknown
  Direct Repeat
tctcaacgcagagacgaaacggtcatctgctgcgagt

SEQ ID NO: 66955 - DNA, 37 bp, unknown
  Direct Repeat
tctcaacgcagagacgaaacggtcatctgctgcgaga

SEQ ID NO: 66956 - DNA, 37 bp, unknown
  Direct Repeat
tctcaacgcagagacgaaacggtcatctgctgcgagc

SEQ ID NO: 66957 - DNA, 37 bp, unknown; identical to SEQ ID NO: 66956
  Direct Repeat

SEQ ID NO: 66958 - DNA, 1773 bp, unknown
  TnpB Polynucleotide
ttggaacttgattctaaattaggtgtaaaggatagagtatttcaattaagaattataagaccatataataatgagtcaatagaaaaagagtttaaggaattaaaagaacaatataatgagaagattaaggaaattaaagaaaaatcacaaaaaggagttatagcgaaggatttgtctaaaaaatctattgagaaaattaaaaagcaacgtaaaagggctgtcaaagaattttttaataagaaagcaaaggaaaatcctgatatcttaactttaccgcaggtttttgagggattcagactcttttctagagctactagggatatgtacaatactacaattactgagagttatattcaactcaagaaaatgaaggaaaatggtgttaagcctgatcattatggtaatgtaagcaaggcatttgaagagatatctaagaatagagatacaagagtgccatatgccaataagctaccagaaaaaataccttctaatttgatacaagggatagcaaaggtaatacaatcaaattttagaggtaaagagttacttcgtggtgataggtcattatcaatagctagaacggggtttccaataccattttatttggctcaaggtgggcaaacagaaaaagattcattgattaagttttatgaagtatcagaagacgaatatatagcagaatttaatgcacctgttgttataaatggcaaaataattataaaaaaaataaaagttttatgctcaacaagaaagcgaaagaaaaatttcaggcgaaataaagatgatgctactaacaagcttataatggattttatcacaggagaaataaaaaatgtagtgaaaaagcgtctagatattctatctcctaaacatgatttaaaacaaagtaaaatagaagaacttttgcgtaaatatacacagataccacgatatgaaattataccaaagcctacaaaatttggtggtagtgatgagtggttcttatccataacgtgtaaaattttacctgaaaagatagaaaaagcaacaaatccgaatataatagctggtatagattattgctattctaaagataaaataatgcagatagctgtaatagatgtgcaaaaatacaaagaagataaaaataagataaattcatggcagattgccagttttacgattacagattacaagtatggattgagaaaaatatacgatgatttttattctgaaagaagaaagatgcaggctatgatatcaagaagaataaaatctgatgattatgaacataagtttaatcttagatttcaaaacagaaggaattatataataaaggttattgttaagcatattagcaatttcatgcagaagcataatgtttctgaaatttactttgaaaatttagataatttatccaaaaaggaagattggtttacagtacataaaataagaggatttcctagaaaagagcttataaatttgcttgctatgaaattagttggtaaaatgccagaatctaaaaagaagtatgtatttggtaatggggtaaaaatagatttgggaatatctcctgcttatactagccaaaaatgttctatttgtcgtaaacgtaatgaaaagtttgatttcaaattcagaagtgcaaacaattttccaccttttacttgcatcgactctacatgtaaatttggaaaggatttatctaaagccaaagattttgaaaaatttattagggatgcagatttaaatgctgctagaaatatagcacttagaggttctgaaaaggcttaa

SEQ ID NO: 66959 - DNA, 37 bp, unknown
  Direct Repeat
tgatgcagaaagggtaattgagttaagtgttgtgcaa

SEQ ID NO: 66960 - DNA, 37 bp, unknown; identical to SEQ ID NO: 66959
  Direct Repeat

SEQ ID NO: 66961 - DNA, 37 bp, unknown
  Direct Repeat
cgatgcagaaagggtaattgagttaagtgttgtgcaa

SEQ ID NO: 66962 - DNA, 37 bp, unknown; identical to SEQ ID NO: 66961
  Direct Repeat

SEQ ID NO: 66963 - DNA, 1356 bp, unknown
  TnpB Polynucleotide
atggcattccggcggggaaaagcgaaggccgaaggacggataattgggattcgcttcaaggtgagcgacccgaagccggccgacctggcgatgctgaagacgctggcagcgcgctgccgcgagttgcgttatcacctctttgattgggcagtcgcaaacgatggttccgggccagagcacctgcgcgccatgtattacgaggccgcccgcttggcgcccgatctgtcggcagacatgagaggcacgattgccggggaaatacgcacggcgatcaagcagtatcgcaaagtgcagcgccaggacccgctggcgcgccccttcgagttcaagcgcgtcatcattccggtcaaggtctcaagcatctatgagttggcgccagaaggggcgaatggttattggcggctgcgtgtcggactatgggcgaggggcggcactgaagaaaccacggccagtctccgtctagccgcggacactaatcgcaacggggatggctatcaattggcgcactacaatgctgcggtggcctggggactggaggcaggctcctcgccgataggggacggtaagattgtgctccaacgcgggaagtggctctacattcaggccttatccttggctccggttatggcggtcgagggcctgcgggttgcgggggttgatgtggggcgccatcatctggcagtggtggcgatgcccgagaacggaaagacggagttcgtggggcgttacaattgggtgcgcgacttgatcgccgaccgctggcggaagactcgtctctatcgtgcgggcctgcggaagcgcgccaatgccgaaagcgatagggcggctgacaagacaaagacaatctgtcagcaggtggcggctcgcgtcgcggatgtgctcgtgcagtgggaggccacgcacgtggcgatggaagacctgaccggcatgagggagagactcgcggaaaagttcggcgagggcaccgagggagccgtcgtcaatgcgcgcttcccctactatagattgcaggcggcgattgagtatgcttgcgggaaggttgggattgccaccgtcaaggtggaggccaaatacagttcgcagacgtgttggcgctgcggagaaaggggcaagcgggatgggctagagtttagatgcgacgagtgcggcaaggagcatgctgatgcaaatgcggcccgcgtgatagctcagcgaggtcgcgaagaggtgatggcacagatggatcaagcaaggccagcggttccggctgctggaccccgggcgcctgtacgcccgcacgccgacgaagcacaggagaggcgggaatcctgtgccggtctcggcaattggccggagaaaaatgaggctacggtctag

SEQ ID NO: 66964 - DNA, 32 bp, unknown
  Direct Repeat
agtggggcgcgcattcacggccaactacaggc

SEQ ID NO: 66965 - DNA, 32 bp, unknown; identical to SEQ ID NO: 66964
  Direct Repeat

SEQ ID NO: 66966 - DNA, 32 bp, unknown
  Direct Repeat
agtggggcgcgcattcacggccaactacagga

SEQ ID NO: 66967 - DNA, 1608 bp, unknown
  TnpB Polynucleotide
atgagtgaagtgactccgtcatcccgcgatgggctactgtccagcccagagggcgagaagttcccgagcacgccggcctccgagccggggaagatggcgcggaaacgctcgctgaacgccccaaaggggcatcaatcaccgaccggcgccggcacgaccggcgacgggactggggcggcggagtcacttgactcatcgttcaccattgtgcgcgcgacaggcgcgatcctcatcgatcctcgactcctcgccgaggaccccgacgcgcaccggaggcaggcctgcggcgggagggagagctgctcggcgtgccggtttcgcgacgtcgcgcacaacgcccagcgcgaggcgtcgcacgcggccaacacgctcgtgcgggcgtactggcgcgccgacgctgacgctctcgacgcgctcgccgccgagctgggccggctcccctacgggaaggaggagatgaagcgctggccggcgccgaagctgtcctcgaacggataccacatcgtccgcgcggcggctccggctctctccggcggggtgtgtgcggcgatcagcaagagcgtcaccgacaagtggctccagacgcgcttcgacgcgctcgtgaggcagatcaaggcgccgccgcacttccgcagcacgatgccgctgccgattcgcgcccaggagctagggggcgtcaagcggaccggccccggaaagtacacggttaggttttccatttcgccgggttcggccgagcgcgccgggaaggagttcacgctgccgatcgaggcgcgcgacgcgtatcagcgccgaacgcttgacctgctctcggacgactcctcccgcccgaagatcggcgcggcgcagatcttccagcaccgcacgaagaaggggaagtggctccttcgaattgcctactcgcgcattgtttcgaagtcgacgagcaccgtgacggcggcgatcaaccgcgggatggtgtgctttctcgcggcggcgacgtcgaagggcgggagttggctctacgacgggcacgacatcgaggcgcacctgaagcgcatccaggcgcgccgccgcgagcgccagcgcgacgtgatcgctgctgggcgcgtcgggcacgggcggagccggacgctgaagccgatcgagacgctacaggcggccggcgagcggtggcgcgcgacgaagtgccaggcggtcgcgcggcggttcgcgcgctggctggagggcgagggtgtcggaactctctacatggaggatctcgccgggattcgcgacgctgacgcggagagcttggagggtggtcgggcggtctgggagaggatccaggagtggccctactaccagctcgggatgcggatcaaggcgtgcgtcgaggaggtcggcatcaccgtcaaggaggtgccggcggcgttcattagccggcgctgcccgaagtgcggccacgttgacgtcgagcgccgcggagccgcgccgcgcgtgtacaggtgctcgcagtgtcgattctcccgccacgtcgacctggtggcggccatgaatgaactcgccctggcgtcgggagtgtgggacggtaacgtcggcgcggagcataatagcgaaggaaaacctcgtcgaggtggcaggcgttga

SEQ ID NO: 66968 - DNA, 1398 bp, unknown
  TnpB Polynucleotide
atggctcgaacgaaacccacgactgcccaagccaaacccaagatgctcgtgcgcgctcttcgcgccgagctagggaagccaatcgacatgtcttgggacgatctcgggcgagatctacgtcgtcttcgtgctgtcgctcaccgagcaatcaatgctgcggcaacagcatgcgaagtggcgcgcgtctgcaattgggacgtcgccatggagacggtagcctaccgagcgacgcagtgggagcttgccgggttctacgcatgggcgaaggagcacaaagatcccagcgtgcgcgcgctcgcagagatcgaaccaggaggcggactcacctccggttgggcgagtgccggctaccaggcgtggcagcgctggcaaaagtctgggcgcatcacgtcgcttccgaccgcgaaacaaggcgctccgatcgagctgcgaaagcaagaggtcgagatccgaacagacggtccgagcgttgttctggatctacgtatcgccgacaagtcgcgtgcgcgccacgtcgtttcaattcgaccgtcgaaaggtggacactgggcgcgtctacgcgagattgccgagggcaaagttcagcacggcgcggtcaaaatcgtctactcgccgagcgctcgccggaaggacgggaagcgcggcaagtggtacgcgctcatctcctactcgatgccgatgccggcgaaggcagcgcctgaatctggaggcgccttggtcgtacatcgaggccaccgaaacttcctgacgctcatgtcgagctcggtaggactggtgaaatacgtgggcggctacggcatgcggaaccgctggcgacagctcgaagctcgatcgcgcgacgcgaagaacggtctcgacgaaatcggttctggagctcgaggccacggtcgtacacgtcgctaccgaacgcacggactcatcggagacaagatccaccgctgcaagcagacgttctgccagcagtctgcgatgaaagtgattcgcagggcgaagcatcttggggcgacggtgatcgtcatcgaagactacggcgggattgagccgcacgcggaacgtggagttcggcggtttctcgatcggttcccgatgttcatgttcaaacaggcgctcgtgagcgcatgcgaacgcgaagggatcgctcttgaagaggtgccagcggagtacatctcctcgacgtgtcctgcatgcggcgcgcaaaataccggataccatcacgtgtcgcgcaacatgtttcactgcggcgagtgcggcttcgatcgcggcgcagactgggttgcggcctaccacatgctccaacgatacatggggccgcgaccgaatgcgccgcgagacaatcttcgtaacgagcgaaaactcgcgaaacagttggagggatctctgtccgacgcggcagagtga

SEQ ID NO: 66969 - DNA, 35 bp, unknown
  Direct Repeat
ggcgaagcgaagatcgaaaggaatgtgaagtggaa

SEQ ID NO: 66970 - DNA, 35 bp, unknown; identical to SEQ ID NO: 66969
  Direct Repeat

SEQ ID NO: 66971 - DNA, 35 bp, unknown; identical to SEQ ID NO: 66969
  Direct Repeat

SEQ ID NO: 66972 - DNA, 35 bp, unknown; identical to SEQ ID NO: 66969
  Direct Repeat

SEQ ID NO: 66973 - DNA, 35 bp, unknown; identical to SEQ ID NO: 66969
  Direct Repeat

SEQ ID NO: 66974 - DNA, 35 bp, unknown; identical to SEQ ID NO: 66969
  Direct Repeat

SEQ ID NO: 66975 - DNA, 35 bp, unknown; identical to SEQ ID NO: 66969
  Direct Repeat

SEQ ID NO: 66976 - DNA, 35 bp, unknown; identical to SEQ ID NO: 66969
  Direct Repeat

SEQ ID NO: 66977 - DNA, 35 bp, unknown; identical to SEQ ID NO: 66969
  Direct Repeat

SEQ ID NO: 66978 - DNA, 1617 bp, unknown
  TnpB Polynucleotide
atgaaacctacctgtccgaaatgttcggctcctatcgcgaacgcgcgcgtgcgtacgtgcgcggcgtgcggctaccgctggcgcgtcgtgggcggaacgctcaagtgcgagatcgtcgcgtgcgactgggatctcgtggccccgcgccttcgtgcgctgcgcgacacctgcgcgcaggcgctcaccctcacgatgagggacctctacccggacgccgtcgacgcgctgaagggcgcgtgggacggcgagaagttcgtccgtgcgtgggaggcgtcgggcgagaagcgactgcgggagcactggaacgcggcgctcgcgcggcgctccgtgttcgtcgcggagatgaaggccaaggcgaaggagaagggccccgagaaggggccacagcaggagccgcaggagccgcaggagccgcagaaggagccgcaagatcagcaggcccacgcgccggtgaccgagtatttcaccgcagagacggtggaccagattctctcacggttcgcgggcgagcatctgaaggatctcctcgccggacgcgcgagctttccgagctggcgccgaggctgcgccttctacgttcggtcgcgcgcctgtgaggttctcggtcccgtgcgcgaggcccgtctcctcttccctctctggggcgccgggaggaaggcgacggagctgcgcgtcgcgccgtgcgggcgcgagggggagatcgcttggcgtcggctcgtcgacggtgtccgggacgggcagggactcaagatgggtcgcgtcgggatcacgcacgacgagcggcggcgcaagtggtacgtgctcgtgacgtggacggagaccatcgagcacaaggagcgcgcggggcaggcggcggcgctgaacctggggtgcaaccagttcgtcgtggccgtggcggaggacggctcggtgttccgcgtcgacgggacggacatcctcgcgaagcggcgccagtggaacgcgcgccgcgccagcatccagcggaacctcgccacgatgggcagcggctcgaaggggcgcggtgtgaagcggcgcatggcgcccatcgcgcgcctcgacgacgcagagcgtcgttggatggagagcaagaaccggcagatcgcggcgtccctccggcgatggtgcatcgtgcatggcgtggctcgtctcgtccgcgaagacctgagcgggattcgcgacgcgttcgaccggaagaacccggacgcggagaagagcgaggctgggctcgtggtcaagcgcatgatccactcctggccgttcttcgagttcgggcaagccgtcgaccgttcgctcctgaaggcggacgtcgtcgtcgacgtgcgcgtgcccgatcgcacgtctcagcggtgctcggcgtgcggccacgtctctccggagaacgtgcagcgcgtcgacgggcgcgtggagacgcgcacgatcgaaggcaagacgtgggagcgccgcgagcgcgttacgaagttctgctgcgtcaagtgcggcgtcactcgcgacggcgacgagaacgcggcgcagaaccacttgcttgacgcgttggggacgtcatgcaaagaagactctatccagcgttccaagcgaggtcgaaggcgaaagccggaaaccttgccgagtcctgggtag

SEQ ID NO: 66979 - DNA, 1599 bp, Deltaproteobacteria bacterium sp.
atgaaacaagcaggcaccatcaaagtcgagatagtcccggacggcgacggggcacgcgtgtatgccaggcttcgcgcgatgcgtgggtcactcccgctcgcgctgaactttgcgttccgtgacgtgttccccgaggccatggctcagctggagtcagcgctcaacggcgagcgcggcgacgccaagtggcagggcagtgtgcgcaagcgcctgcggcaccattggaacgctcagctgcaatcgaggcttgccttcgcctcgcgcacgaaaggccagggcaagaagtccagcgccaagccgccagacccaacagtgttcgaacccacgcttgacacgctttgcagcgagaccagtgatcacatcgtttcccgattctcgggtgaacactttcgcgacctgatggctgggcgggctggcgtgccaacgttcaagggtggagggaagtccttcttcgcggaagggcgtgcagtctcgttgtccggcacgctttcgacgcttcgcatgcgctttccgctgtggggctccggcaagaaagccacaccgttcaaggtgttcaccgaaggcaacgcggcacgagcaacgatgcggcagctgctcctatcgagtggcgaccgtgagaacgtgatcgaactcgaacgacgcgtgcgacggaaggaatctcgtgagcaagcggaattcgagctggagcaactcggcgccatcaagatggggcgcgtcgggatcagctacgacgagaaccgtcagaagtggttcgccctcatctcgtggacgcgccatgctcccgaaggctacaaggagggccaggcagctgcgcttcacctcggttgccaagtgttcctacaggcggccacagagaaaggtgagctatggcagcgaccgggcttcgacattctcgcggcacgagcacggttccacggcgcacgctggcgcctctcgaagtgcaagcggtccttcggcaagggttcccgcggacatggcaagaagcgtcgggaactcccgttcaccaagctttcagaacgcgaatctcagtgggtgaagaactggatccgcaccatggccagcgatctcatcaagtggtgtctgctccacggcgtgtcggacctgtacctcgaagacctcagcgggatccgcgacaccttcgagaaggaaaccgaaggagacgcccccgagccgctgaaacgcatgatccaccagtggccgtactacgaaacgcaacaggctatcgagcgacaagcggccgagttcggcgtgcggtgccacaagacggcgcaagcaatctccacccaccgctgcccaagttgtggccacaccgatccggagaacgtcacgttcaccaatatgctctcacacgacgaagtgcgcgtgctgaacggtatgctattcaaacgcgtggacaagcgcgcgtggttctcgtgcaccgcttgcaagcatcgcggctcggcagacgtcgtcagctgcatgaaccacctcgccctggttgggcgtgaccattcattcggcgccatgcaagaggcgtccaagaaacgaaagggtattcaacggaagaaggttgcgagtgctgccaatggcattggagttggaagcgatgctgcggagtag

SEQ ID NO: 66980 - DNA, 36 bp, Deltaproteobacteria bacterium sp.
ggcaaagtcgatccgtggacggtcaggtgtttggag

SEQ ID NO: 66981 - DNA, 36 bp, Deltaproteobacteria bacterium sp.; identical to SEQ ID NO: 66980

SEQ ID NO: 66982 - DNA, 36 bp, Deltaproteobacteria bacterium sp.
ggcaaagtcgacccgtggactgtcaggtgtttggag

SEQ ID NO: 66983 - DNA, 36 bp, Deltaproteobacteria bacterium sp.; identical to SEQ ID NO: 66980

SEQ ID NO: 66984 - DNA, 36 bp, Deltaproteobacteria bacterium sp.
ggcaaagtcgatccgtggactgtcaggtgtttggag

SEQ ID NO: 66985 - DNA, 27 bp, Deltaproteobacteria bacterium sp.
ggcaaagtcgatacgtggacggtcagg

SEQ ID NO: 66986 - DNA, 1125 bp, unknown
  TnpB Polynucleotide
atgatcgacgggatgactggcgtgatcaaggcgcgattcggcaagtggcgcaagcagcggttcgcgggacacgagcggttcccgagcttcacgagcggcacgatcatggtgcgggacaccggctggcgtcttggtcgtgacgacaaggggctcgtcctgtcagtgaagctgcacgcgggactgaccgagcgcgtccagttcgctctgcgcgcggacggcggaagcgcccacgctcaggcgcgcctgctcgccagcggagccgcgtcgatcaagcagggggactgcaagctcgtctgggacgactccgacaagaagtggagcgtacggctagcgtacactcgtccgctggaggacgcgaaggccctcgacccgtcacgggtgctcagcgtccaccgcggcgtcagatgctttctgacgtgggccgactccgatggcggtacgggcatcctcaaggcgggcgccggccaggacatcgccaacttcaagaagcagatgacccgtcggcgagccgggatgcgctcgcacatggccggatcgccgcgtcaccgcggtcacggctggtggcgcaagttcgacaactatcgcgcgctggatgacaccgaagcgcggttcacggacacgaagtgcaagcaggcagcggccgaggttcgcaagcttgtgctcgcgggcgggtacggcaccgtgctcctcgatgactggaacgtccgtcagatggctgccgtcgtggcgaagttcgaggggccgtacgcagcatggctggtgcgccggttcccgttcgcccagctcaagggcgcgatcgagtgcgcgctggagccgcacggcgtcggcattgttgcgtcaccggccgcgtacgagagcatcgagtgcccgtcgtgccacaacatcgacgcctcgcaggacgacggacgcgggacgttcacgtgcaaggcgtgcgcgttcaagcggggcgtggatggggtcgcgaacctcaacgcgctggcgagggcggggattgattgggtgctggcgaagcaggatgagccgcggaaggcgtggcttgagtcggccggacgcgagcggtcggatggaaaggggacaaacagcggcccccggaaaggcggcgctcgcaaaccggttcggaagtga

SEQ ID NO: 66987 - DNA, 35 bp, unknown
  Direct Repeat
tggaaacgttagaaggaaagaggatcggttgcagg

SEQ ID NO: 66988 - DNA, 35 bp, unknown; identical to SEQ ID NO: 66987
  Direct Repeat

SEQ ID NO: 66989 - DNA, 1710 bp, unknown
  TnpB Polynucleotide
ctgggcacggcaaccggacgggggcctaaaccccgacggcgcgctcgtgccagcggtgaaaggggggttgacccccgcagccatcgagacgtacaagcgcgccgtgaagcacgcgcgagggcgcccggcgctcagcgtcctcctggccagggagaacccctacccgccaccggcggacgggcagtggcgctaccagcgagcaaaggacgagaaggtcgacgcttgacactctaccccgcagagggtagaagttggttcatgcccaagatcacccgcgccctgcgcttcgaagtctacttccccgacgtgcgccgagccgacctgttcggcgagcgcgaggaagagggccgtcctgcctccaaggccaagcgggcctccgacggggcctcgctctacgctcagctatgggcgatgtcgaacgacctcacccgagccgccaaccaggtaatgacccacctgtgggcgatcaagatgggggcgttgcccgccccgatgaaggcggaaggaaagcggcgcccgctccagtcgctggtctaccagggcctcaccgggtcctggcagccggccggcaagcctctctacgatccccagggcgaccgggtcggcagcaacgtgctgttgggggcggcgtccacgatctggacgcggttttcgactgacttcagggacgtggcgatgggcaagcagtcgctcagcacgttccggtcgctgccgatcacggtggcctcggccgccgtcgaggtgcgcgacgacctgtcggtggtgctgaccctgtggcctgccgagaagggagagcggagagcgaagcgcgtccgggtccgctaccgcaagatcgacgcgagccagcgtacgatccttcgtcacctcacgaatggcacctacaagaccggcgatgctcggctggcgtgggttgcaccaaaggggcgcaaggggcggtggatgctgagcctgtcctggacgggcgaggtcgaggacgccaagggcgaggcggtcgtcggcgtgcacctgggcatgatcaacaccgtgagcctggccttcgccgatgccaccacgggcaaggtcgctacccgaagcgaggtcgtcaggatccccgagaccgtgacccgcgcctggaaccgggtcgagcgcgagcgccgagaccgtcttcgcggcggcgccatcgagaacggcaacgcccgtgcgggccggggccgagaccgtaagctccgggccgtggacgccagtgcgcaccagctcgcggacatcgtggacactgcgctcaaacaggtagcagcccgcgtggtcgccgccgcgaagtgccagggagccagcgtgttggccctggaagacctcgcgcattggtcggtggccaaggccatggacgagctgcccgacggcaccaacgcccagcgggcgaagcggcggcgctggtacctgcgctggcaccagggggccttgcgcgagctgattacgtgcgcggccgagggtgctgggctgaaggtggtcaaggtgagcgcgagcaacgactcgcgcgaatgctcaaagtgcggcgtcgtccacaagacggtcggcgtcaacgacacgggcttgcccaccgggcggtactccgtcgagggctttcgctgcggaagctgcgggcatgtggctcatgccgaccgcaacgcggcggtgaacgtggtccagcgcggattgaaggcactggcgttggcccaggtggtcgaaacgggttag

SEQ ID NO: 66990 - DNA, 33 bp, unknown
  Direct Repeat
cagcggatctcgggagtagatggatgttgcgac

SEQ ID NO: 66991 - DNA, 33 bp, unknown; identical to SEQ ID NO: 66990
  Direct Repeat

SEQ ID NO: 66992 - DNA, 33 bp, unknown
  Direct Repeat
cagtggatctcgggagtggatggaggttgcgac

SEQ ID NO: 66993 - DNA, 33 bp, unknown; identical to SEQ ID NO: 66992
  Direct Repeat

SEQ ID NO: 66994 - DNA, 33 bp, unknown
  Direct Repeat
cagtggatctcgggagtggatggatgttgcgac

SEQ ID NO: 66995 - DNA, 1701 bp, unknown
  TnpB Polynucleotide
atggtcgagggtcgaagtggtggcgtgagcagcggaaggagccctctgtcggggtgtgatggcgaggctacggcgctcgctgatgctggtcgcaatcctgttcgcgccgcctcttcggccctcgacctagacgccctcgtgcgcgctgtcgaggtagaggcggaagcgctcggggtagagcttgcgggtcgcgtgaccgcgcgtcacgtgaagacgaaggccggcaccggcaaggggatcgaggttcgggccgggcgcgcgaagctcgcgacgctgaccaggcatcaggctgaggttctcgacgtgtcccgatgcttcgagatgcggcgctcgctgctgctcagtgtcgggatcccgaagtcggtgtcgtggtcagagtggtccgaaccggtgcgcgcgacacaatgggcgctcggacggctgatggatcgggccgccgtactcctccgcatcggcgaggtcaccggcagcggcaagagcgtctatcagacaatcgtcgacccggaggcgcaggacgaactgcgagccgaagcggcccgggtctacgcacggaccaagtcgccgaagtggaaggcgcgtagcgagttcacgctgtccggtgcagccgcgtcgcaggccgccaggcaggtagagatgttctaccggcgctggaagctcggcgagatcggattcccctcttggtccggtcccaacgggtcgatcccgctgcgagccgccgaactgacgttcgagcgcgacggcgacgacgtgcgctgcaggctccccatcttcgccggacggggcaacggtcacgagtgcttcgtctgggcccgaggcttcgcgcatcagcggatgttcgaccggattcttgatggcgagatccgtcatggtgacggccggctgatctgggacgaccgtaagaggcgatggcagatccagctctcgtacgcgcttcctaggccaaagtcggcggaggcgcgcgacacacccgtctacctcgtcgttcgccgtgacgtgcgagacgtcctccaggtgtcgagcagtacgggccgggagggcatcgacatccggggatcccgtggcggcccgtcgaacacgcgggcgatcggtgtcgcgttgctcgaggcgcgagggaagttccaccgtgtccgcaagacgcgtctcgagcggttgccgctcctcgggcgaggggcgcgcggacgtgggcgagcgcggctcttccgtgacatccggcgatgcagcgacgacgaggctaagacggtcgacacgctgctccggcagctcgcgagcgccatcgtccgtcgggcactggccgagggcgtgcacgagatcctcgtcgaggacatgtccctcgagtggcgttggcacggcgcctcgaacgagcgcttcgcgcgtgtcgtcgagcgcacgccgtggtcgaaggcggtcgagtacctgaagcagcaggcgcaggagttcggcatccgaatccgcatcgtcgcgcgcgcgcaggacgacctgacgtgcccctcgtgcggggcggaggcgaagcgcgacggcgagtacaccgactgcgagggctgcgggctcctcgtcgaccgccggctcgtggcggcctggaacatgttcaagagcgctggcgtcgacgacaccgcgctgaaagaggtgcgtctcaaggcgtcctacatgacgcgcgagatgcggaagaaggtcgagaaacagaacgaaaggagaggtcgatga

SEQ ID NO: 66996 - DNA, 36 bp, unknown
  Direct Repeat
gtgacgacgacagatcagaagaccagcaacgacagg

SEQ ID NO: 66997 - DNA, 36 bp, unknown; identical to SEQ ID NO: 66996
  Direct Repeat

SEQ ID NO: 66998 - DNA, 35 bp, unknown
  Direct Repeat
gtgaaacggcagatcagaagaccagcaacgacagg

SEQ ID NO: 66999 - DNA, 36 bp, unknown
  Direct Repeat
gtgacaacggcagatcagaagaccagcaacgacagg

SEQ ID NO: 67000 - DNA, 36 bp, unknown; identical to SEQ ID NO: 66996
  Direct Repeat

SEQ ID NO: 67001 - DNA, 36 bp, unknown; identical to SEQ ID NO: 66996
  Direct Repeat

SEQ ID NO: 67002 - DNA, 36 bp, unknown; identical to SEQ ID NO: 66996
  Direct Repeat

SEQ ID NO: 67003 - DNA, 36 bp, unknown; identical to SEQ ID NO: 66996
  Direct Repeat

SEQ ID NO: 67004 - DNA, 35 bp, unknown
  Direct Repeat
tgacgacgacagatcagaagaccagcaacgacagg

SEQ ID NO: 67005 - DNA, 36 bp, unknown; identical to SEQ ID NO: 66999
  Direct Repeat

SEQ ID NO: 67006 - DNA, 36 bp, unknown
  Direct Repeat
gtgacgacggcagatcagaagaccagcaacgacagg

SEQ ID NO: 67007 - DNA, 36 bp, unknown; identical to SEQ ID NO: 66999
  Direct Repeat

SEQ ID NO: 67008 - DNA, 36 bp, unknown; identical to SEQ ID NO: 66999
  Direct Repeat

SEQ ID NO: 67009 - DNA, 23 bp, unknown
  Direct Repeat
gtgacgacgacagatcaggtgac

SEQ ID NO: 67010 - DNA, 36 bp, unknown
  Direct Repeat
gtgacaacggcagatcagaagaccagcaacgaaatg

SEQ ID NO: 67011 - DNA, 1794 bp, unknown
  TnpB Polynucleotide
atgggccgcgtccatcggctatgtgcgcgacggaaaactgccagtcgagctggcggagaagctgtctgcgaaattggaaggatcgagtcacgcagagatcgagcaatgggcgttgaggttggccaagcgcgtggtgcttgccaatggcgacgtcatcaccaacgaagacgtctacgggtgcgacgacgaggaaaaaacagcatgagtggttctagtgcacgactctcggtttcaggggctactccaagtcccgaaggcgaacaagtttccggacatgccgctacgagcggggaagtcagttcggggacgctcgccaatagccagcgacgcaattcccatttgcgcgcggcaactcccacgaccgagagtcgtgctctcgagcccctcagcatcgtccgagccaccggcaaaattgccgtcgacacgagcctgctagccgacaacgagagccacgcgctccgcaaacggctgctggaggtgcgccgaagcttggccctggcggccaacattgcggtgcgggtgcactggcgggtggatgcgcgcatcgtgcagcggtacctcgtgcacgagcaacgggcccccaaggccaaggagtggcaggcgaccgagcaggagctgcgcgacgcgatcgacgaggtggctccgctggtgacgccggcggtcgcccaggtgctcaccgacaagtgtctccggaaggggcagctcgacctgttttcgctggtgcggcagattgccccggacgtgtcctcgggcatcgccagtgccctcaaccgcaaggtcatgcagcgctggcgcaccgaccgcttcaaggtgctggtgcagcacgagaaagcgccccctcactaccgcggcacgttgcccatcccgatccgcgcctccgacatgcgcttcgtgcgtgacggccggcggtttctgatgaccttcaatctgagccccggtcgccacaagggcggcgagttcacgctgcccatcgagccccgggacggctaccagcggcagctcctgggcgacttggccgacggggtggtcaagatcggtgaagcggctctcacgcaggaccgtctgcggaaacgcaagtggtttgtgcgcctggcctacaccaagcaggtccccaagaccgtcgagaccaagcgggccgccatcaaccggggcatcacctgtttcctggccgcggtgaccgacaccggagagcagctcctctacgacggggacgacatcgtcgcccacctgcggggcacgcaggcccggcggcgccagtttcagtaccaggtcaaggcctcgggtcgcgtcgggcacggccgcacgcgcaccctcaagcccatcgatcacctggccggtgccagcgaccgctggcgggacacccgctgcaagacgatcgccgctcgcttcgccaagtggtgcgacgaccgcggggtgggcgtcgtcctgctcgaagacttcactggcatccgggacgggctcccggagaagctccaggggggcgagtacgcctggcaggagatccagacctggccctactaccggctgcagcaggacatccagtcggcgctcgagtcttacggcatcgccttcgagcagcgcgacccggcctatatctcccagacgtgccccaagtgtgggcacgtcaccgaagacaacatccagctccgtcgtcggaagctggtctgcgtcgagtgcaaacacaccgtgcacctggacgtggcggcgtgcgagaatcagctgcagggagtcacggctccgaagagctcgccgcggaagaagaagccggtggggaagcggccgaagaagaagtag

SEQ ID NO: 67012 - DNA, 1728 bp, unknown
  TnpB Polynucleotide
atgacacgcacagtacaacgttcgagtctgggtcgtcgcaggaagggtgacctccactcacccaaaggcgaggccaagatgcactcagccaaacttgagctcacgcgctcaagtcctctgcatcccggcgacctggactcgagcgctgcaccgtctaagggacccaagtcgcttgggtcagcggatcttgacctggctcgggagtggctcacatcagaactcctgttgcgtggagttcagaagccagtcgtcttccgtgcccgcaagggccacggcgtcgaagtaaaagacggaaaacgcaagcttgggcagctcgataacactgagttgcttacgcatgatacatcggcgatcgatgggttgttccgaatacgaggatgcctcaaggttgagttgaaccctgcggatgcggcagagagtagctggctgttgttcggtctctctcgggctgttgtagccgggcagagagcggcagtattatcgctgttccgtggtgacaacggaacagtcaacgcaggaactcacgcatatcgggttctatccgcgacagtgaccgatttcttgtcgaagtccaaagatgaccgcgttcacggtctatccgtgtgcggagatgtcatggcgatggccagcaaattggcggccgacaagtttgctttgtggcaacgttcgaaccaagccgaccagtctccgccatggttcacatctatctcgatgccaatcaaggattcccgctatcggcttgagttgcagggcagagaactgtatgtgaccctgggagtccagggtgctgtagagcgtcggatccctgagatccgattcaaggcctacggtagggggccatcggcttgggcggatatccggcgacttctctctggtgagtacgcgcgcgccgcggcccggctggtatgggactgcaacagacgacgttggacgctaaatatctcctactcgcgggcgcgtccggagctgcagagcgggaccggcgcgatggccgtatgccccggcattgactcgttcgtgcggtgctacacagacgatgcctggaaaggtccacaggacaacacagcgagcctggtagcgttcaagcttgggcttgacgcccgcaaagcgagccgcggtcaacacaaggacttccagggccatggtgcacgcggccacggagtgaaacggttcactcgattactgcggcacttctccgagttggaaacaaactttacacgaacccacatcgaacaggcagcgtctcgcgtccggcgcctcgccactggggaccggctagggaaacatggctggaatgagacgcgaggccccgtcggggaggtcctagttgctgatttcggtaacttctgccccacgcactcgaatgctcgggtggagaagatcctgcgccgatatccaatctgtaccgcacgcgacaagatctgctgggcccttaccaaggcaggaatcccccatcgagtcgtcaagccgacaaacgtttgccctcactgtggcaaatccaagctgaagcacttttgcggttatgactgggtctgtccggaatgccatctggtggcacctagagacctatggaccggatggcagacatttgtcgccggtggcgccagctcccactacgacctaatcgaggtaggtaaggctttcaaaaaggcagccgaattcgcggactctgtccgcagaaaggcgatcaaccatggaaccgaagaaactgacgaagctgctcaatga

SEQ ID NO: 67013 - DNA, 23 bp, unknown
  Direct Repeat
aagcgagtcctcaagcgaggccc

SEQ ID NO: 67014 - DNA, 23 bp, unknown
  Direct Repeat
aagcgagtcctcaagcgaggccc

SEQ ID NO: 67015 - DNA, 1644 bp, unknown
  TnpB Polynucleotide
atggcgaatcacacctccgttgcgaaagccgagctgatcaaaccgctcgacggcacgtggcaagaacacggaacccacctccgcgacctcacccgcctgtggttccgtatgctcaacgacggtatccgtgcggcacacctgtccatctccctgggagtgtcggcgaaggatcgcggcgacatgatctacaaggcggtggtggatttcgtcgatgaggataagcgctggaacgcatgctcgatcaacacgagcgtcaagcggaaaaagctccaacccggacaaatcgctgctaggggccgccgtgccaagatcgaagtaccttcgctcatttgccacgctgcctatcgacgtgcggaacaagcctggaaggtctacgccgccacgatgaatgaggggacgcgggcgatcccttccttcgaggaccacacgtccttccatatccgggacaaggcgtggcgagtcgagaagaatggccgtgattacatcctgcacgtcaagctgcacggtggccgtggcgaatcgacgtggacgcagttcgcactgggcatcgaaggcggttcgatgtacgagcacttccgccgcatcgcccttcttgaaaacgccgacaagctggcctccaagaacaagctcacccccgaggagttggccgaacgcaaggcgctccaagctcagggggaggacacccctctcacgcccgagcaagagaagcgtctcgaagctctcgcaccgacaatcgacgtccctctcggacccaacgccatcaagcgtggggaccttcagatccgatgggtcgaggctcgcgccaaggctacgaagaagcagaagcgggagggtaagaagggtatgtggatggcttacgccacgtacacccgcgaacaccttccggctgtcctcgaccgatcgaaagtgatggccattcaccgaggaatgcactcgctgttgacgtatgcgacgctcgaaggcgcgtcgagcatcctcatccctggggatgcgatcctcgaacacaagcgaaggttccaggcacggcgtgactcgttccgaaggcatcggcgggcacgaggacccggtggtattggccacgggaccgatcggacacatcgcgagtacgggcagatgcaggatagcgagaagcgctacgtggattcccagtgccagcaatgggcggccaaagcgatccacgccgctcaagcccaaggttgtggggtcatcttgatcgaggactacggcacgatcaagaacgaggaccctcgtttcatcccgagctggccgtgggccaagttgaagagcacgatcatcgcagcagccctcttggccgggatcgaggtccgcgaagttcccagcgggtacatctctcagacgtgcccgtgttgtggacacatctcggcagaaaaccgtcggtggggtagcggcgcttctgcgtctacggctgcggcacgcctgacgggggatatcgcaccgggtcgcggggacatgttccactgcgtctcgtgcgacttccaccgtcatgtggatccggtcgctgcctacaacatgctcagaaccgcagagggcttcggtcccgagaccttcaaccgattccagcagaccctccggaagtttcagcaggcgatcgaagaccagcaacccgacaaggctgcggagtag

SEQ ID NO: 67016 - DNA, 1563 bp, unknown
  TnpB Polynucleotide
atgctggagagtcagtcgaagaaacaagagatccctgacagcatccggaacgtgtccacagatgccgcagagggcgatgacatggacctcgttcgcgcctcgacccgcttcgagatccgcctaagccccaagcatgaggacgggacgccgcacacactgaacctcgaaacgcttcacgccctcgacgaagcttcccagctcgtcgcccgctgccgtaaccgcgtggcgcggtggctctacggacaggattccgactggctctacgcacagcccttgccgtggccgaagaagatcgcgtggtcgccggctcccgtcgggccgcgccgcgacggaacgaccggacccatcgcgctcaccacgctcgcgtacaggcaggccatctcatcccaagacgtcgctcgcctctcctcagacgtcgtcgcttgggcgagcaaagacgtcgtgagcaagtggaccgagaagcgctgggacatcctcgtgcgccagaccgaggccctcctccattacaaaccccaccagccgatcgcgatcccacataaggccgtgaagttcgcccttcgtgaggacgggagcgcggacgtcgcgtttcgcgtgctctcgctcaaggccgaagatgcgaaacccatccatgttcacatcgtcccgagggacgcgtggcaacgcgaggagcttcgcgcgctcgcggccggcgactggaagctcgggcagctcgtcgtctcgaggcatcacgagaagcgagggcgatggttcctccgcttctcgtacacgaagcgcgtcccccgcgccgagggtaacggcgtcatcgcgatccggcgcggcatgagatcattcatcgtcaccgcgtccactacgggagacgtccgggcgctcgtggacggcggggacatcctcgcgttcaagaggcagatgctcggccgacgccgctcgatcggacggcgcgcacgggcatggcaagccgggcagggggccacgggtcacgggacgcgccgccgggtgggggcgctcatctcgctcagcggcaaggagcaagcgtgggtcaaggagcgctgcaaacagatcgccgccgccgtcgtgcactgggccaaggagcagaaggcgagcgaggtcgtcatcgaagacttcactatcccgtggaaagaggacgcgtggcgcgaggtcaagagctggccgtggtacttgaccaaagagtccgtcaagaccgcagtcgagaacgccgggctcaagttccgcgagctgtccgtcgcgtcgaaccgcaagcgctgcccggtgtgcaagcgcgagcaccaggtcgagcccgtcgacagctacggtcgctgggagtgcgagtcgtgcggggtgaagcgctcggtagaaagcatcgtcgtgctgaacatgctcgccgacgcgggcaggcccgaagcggtcgagcgcgccgaagacaagcgccaggccgtcgcgaagatcgtcgcgagagcgaccgtgagtcaaaaacccctggaacctctcgcgggcaaaaacgagaagagtcgcgcgaagatgtgcaacgggatacgtgggaagaggaacggatcgggcaagaagtag

SEQ ID NO: 67017 - DNA, 1923 bp, unknown
  TnpB Polynucleotide
atgaataccatgcacacgacaatcgatagcgccctcggcgccacccggagtggggaagctactggcttgacgctcgacaatcatgacgccccagtggcgtcacacgttgcacccgcgaaagcggtagggcggactccaccgcccgaagtcgaacaagtcaagacagatgccacccaggtagcaccgggggccctatcgatagtccgtgccacttgtcgaatcctgctggatgtggcggtgctcgccgcagaccgacgcgaacacatcgccaaacgatgcgggggtaccgaaggcgggtgcaaggcctgccagctacagcaggagcttcggggagcccaacgagaagccgttcgggccgctaatgcggcgatgcgggttcattggcgtgccgacgccgatatcttggatcaggcgcttcttgccaccggcgctccgccggcaaaggccgcggactggaagcgcttcgcccagattgacccagagcggctggttcgcgcggtatccccgggactcagcaggggagagacgaagcttgcagcaggtgagcttgtgaagaccagtaaggccgataagacctatttgtcgacctatcgcctagtccgtgtgatcgccccagatctcccaggtggtatcgcgtcggccatctcggattccgttcagtccaagtggcagcgtgaacggttcgcctctctggtccgctgcaccaagtctccaccgcactatacggggacaatgccactgccgctgcgcgccgccgattgcgcactgacccattgtgtggatgatgactacgaattcacctttgctattcgcggtggcctcgggcaccgatggacgctcccaatctccgcacgcgacggtgccaccaagaaacgctatctggcgaagttactgtccgaactcgctggctcgaacgtgaagttcggagcctgccagatctctgaggaccgtatgcgaccaggtcgctggttcgtccgtatcgcctacacccggcgagtcgatgcagctgtcgtgggcaagaacgactgcgcaatccatctaggcatcgtcaacttcatggctgccttaggcagcgatggagaacgtttcatcatcgagggcaacgacattcggactcaccttgcgcagatccaggcacgccggagaagctatcagcgacagatcaaatacagcaaccggaccggccgcggtagagaagcagcgttggcggcgagtcgaaaactagcaggtgcacacgaacgttgggtcgacacgaccatccaacggatcgcacgatccatcgcaaactgggtcaaagagcacggatacagccgcgtctacatgccggattttacccgagtacgggactccgtcccggagcttctagagcgtagtgactcggtctaccagtggctccaagagtggccatactaccggatgcagcaggccatacggtcttgcctcgaggaggtaggcatcggttgcaatcacgaatgctcgggtagccgagctaggccccccacatgcagctgtatcgcggaacgtggtagcggagtagatgatggtgtcctatcgcgtcatgcttgcccggcatgcggagagaccgaggcgctaatcgaagacctcgggatcaggaccttccgctgcgaaagctgtggtcaccatggtcctctggacgtagtattggccgagctaatcctcgctcgcggtcgcgagcgccgaggtgactcggactcgcttataggagaaaacggctcgaagcttggaccaccaaagggcaaaaacggaggcgctcgcaaagcgtcacgtaagtacccgaaatcaaaaggtcctcgccgggcggggtcagaagagagttcagtgtgcaacgtgattggagctatggcccgccgaccagcggcgcagcagctccttcgtcagaagagagttcagtgtgcaacgtga

SEQ ID NO: 67018 - DNA, 36 bp, unknown
  Direct Repeat
gtcagaagagagttcagtgtgcaacgtgattggagc

SEQ ID NO: 67019 - DNA, 36 bp, unknown
  Direct Repeat
gtcagaagagagttcagtgtgcaacgtgattggagg

SEQ ID NO: 67020 - DNA, 36 bp, unknown; identical to SEQ ID NO: 67019
  Direct Repeat

SEQ ID NO: 67021 - DNA, 36 bp, unknown; identical to SEQ ID NO: 67019
  Direct Repeat

SEQ ID NO: 67022 - DNA, 36 bp, unknown; identical to SEQ ID NO: 67019
  Direct Repeat

SEQ ID NO: 67023 - DNA, 36 bp, unknown; identical to SEQ ID NO: 67019
  Direct Repeat

SEQ ID NO: 67024 - DNA, 36 bp, unknown; identical to SEQ ID NO: 67019
  Direct Repeat

SEQ ID NO: 67025 - DNA, 33 bp, unknown
  Direct Repeat
gtcagaagagagttcagtgtgcaacgtgattgg

SEQ ID NO: 67026 - DNA, 33 bp, unknown; identical to SEQ ID NO: 67025
  Direct Repeat

SEQ ID NO: 67027 - DNA, 36 bp, unknown; identical to SEQ ID NO: 67019
  Direct Repeat

SEQ ID NO: 67028 - DNA, 33 bp, unknown
  Direct Repeat
agaagagacttccatgtgcaacgtggttggagg

SEQ ID NO: 67029 - DNA, 37 bp, unknown
  Direct Repeat
gtcagaagagagtttcagtgtgcaacgtgattggagg

SEQ ID NO: 67030 - DNA, 22 bp, unknown
  Direct Repeat
ccatgtgcaacgtgaagggagg

SEQ ID NO: 67031 - DNA, 19 bp, unknown
  Direct Repeat
caatcacggcaggcgaggc

SEQ ID NO: 67032 - DNA, 19 bp, unknown
  Direct Repeat
caatcacggcaggcaaggc

SEQ ID NO: 67033 - DNA, 19 bp, unknown
  Direct Repeat
caatcacggcaggcgaggc

SEQ ID NO: 67034 - DNA, 19 bp, unknown
  Direct Repeat
caatcacggcaggcgaggc

SEQ ID NO: 67035 - DNA, 19 bp, unknown
  Direct Repeat
caatcacggcaggcgaggc

SEQ ID NO: 67036 - DNA, 21 bp, unknown
  Direct Repeat
gctcggcaatcacggcaggca

SEQ ID NO: 67037 - DNA, 21 bp, unknown
  Direct Repeat
gctcggcaatcacggcaggca

SEQ ID NO: 67038 - DNA, 28 bp, unknown
  Direct Repeat
ggaagccctgggcaccaccggcacccga

SEQ ID NO: 67039 - DNA, 28 bp, unknown
  Direct Repeat
ggaaaccctgggcaccaccggcacccga

SEQ ID NO: 67040 - DNA, 1380 bp, unknown
  TnpB Polynucleotide
gtgacgaccgacacagacacgaccgacgcagacgcgaccggcaccgtcgaggtgccaacccgcgtgacgacgctcaagttcgaagtggcatggccggggtggaggaagtcggatctgtccgccctgtggtccgaactgtggcgcgcgcaggatgatctccggcgtgccgcaaaccgcggtatcacggcgttgtaccaggtcagagctggactcctgccccgtcccgagaaggacggcaagccggtctccgaccaaacgctgtcctaccagatcttgtctggtaagtggcagccgtacggcacacccgcctacgtcccgtctcccgacaccaggcaggtgtccagccaggtgatcctggaactcgcatccgttcttcatactcggatgaagaccgactatgcggaggtccagaaggggaacaagtctgtccccacgttccgctccgtacccgtcggcgcctcgggtggtggggtgaaggtcgaccaggaactcggcacgatcagcatgccactgtggagtgggcgcaacgcgtcacgcgtggtgctccgcccgcgcaagctcgacggcagaagctggaggatctggcgttcggccacgagcttcgggaacgcgcgcctcacgtgggaccggcccccgggcaggcgggggaagtggatgctgtgcatctcggcgcacgtccccgtcgtcgagcgcacggcggagccgatgatctgcgcggtcaggctggggctgtacacgtcgtgcaccctcgcattcgcggagatctcttccgggaagctggcccgccgaagcgagtgcatcaacctcccctcctccacctggcgcgcggtgcgccgggtccaggcccagcgcgaggagcgggggctgtggaaccggaaggaccacggacagcgcgagggccgcggccggcagcggaagctccgcgccgtcgccatgctggcagatcaggtcgcgaggatcaccgacacggccgtgtgccagaccgcggctgcggtcgtggcgatggcgaagcggaacaacgccgcggtgatcgcgctgcccgacctggcgcggtggtccgtctcaaaggagatggactccaccgcagatctacctagcccggaccgggcggaggcgcggaagcggtatttctcgatgcaccagggtgcgttgcgcgagaagatccgcctggctggacagcgcgaaggttttcgtgttgtcgatgttgacgtgaggcggagcagtgttacatgttcggagtgcggggcggagaaccccgagtacctgaccgacgcgaagtgggaatgcagctgtggctgcaagctcacctccgaggtgaacactgcgaaggttctcgccaagagggctgtcgccaatctgaacgagaagaaggccgagtag

SEQ ID NO: 67041 - DNA, 1245 bp, unknown
  TnpB Polynucleotide
atgaaacgagcgattgcattgtttgcgaaatttcccagtaaggacgaacacgaccgcctttacgaggtggctgagttagtccaacgtgcgaccaatcgagtgtggtggttgtgggggcaggagtgcggaaaatacaacaaggacctgaccgcgcatgagttgcaacgagcgtacaaggccggcgagaaatcggatacaaagctgttcgcagtggagccgggctttcaatcgcgtgcctcgcaagacttagccgggctctacgaacagcttcattcgcgagtagcgacgttgatcgtcaacgagacggtaaagcggatcaagcagaccaagagcactattggagccatgccgctgtggcgagcgtgcctgctgaatttacaaaatgcggcgagcgcgaactatcgtcacccaatctgtttcgattcgcaaaacgcaaaacttctggcggttccgttgcgacttgaggtgcggatagatcgttttttcgacggcaagagtacgaacgccaagagcaacccgattacgctggagctggtggaccgcaaagcgaaatacaacgcgagtcgacgtgctgctggtgcgagagattacgtatcaccgctagaaaagattctagccggcgaggggaagtttgccgggagcgagatcgtctggcagcagaagaaacgccgctggaaggtggtgcttgtggtcgacgttcccgatcctgtgccactgccagcgggatcggtgatgattgtgcgacccggtgagtcgcgttgctgggagacggagattcccggccagtcgccgattatgctgcggaattctccagatagggtgagttacctacgcaagaggctattggctcagaagcaggctcgcaatgatgagtgcggagcgagtggccgcgtcggtcatggccgcaagcatcggctacgagcggcggaaccaatcaccggcaaatgggagcgtgtcacgcggactatgacgaagcagatagcgagcgaactctgtcgaaaagctttggcgcgaggtgtaacgcgcgtgaagtatgagccaccgcaggaagcagtcgcgcttgataaggccggcagtgcggaaagttgtttggtgttgccgtggccgtggcatgagagtcgggagatttttgcgcgagaatttaccgatgccggtatggagttcgtaagtgtgagcgattcttcgagcggtcacaagggccgcaagcggaagttagcgaaggtgttaggtgaggatcgggtgtga

SEQ ID NO: 67042 - DNA, 36 bp, unknown
  Direct Repeat
ggtgtgagtggcagcgaaatgatgggtgtgcgcagg

SEQ ID NO: 67043 - DNA, 36 bp, unknown; identical to SEQ ID NO: 67042
  Direct Repeat

SEQ ID NO: 67044 - DNA, 36 bp, unknown; identical to SEQ ID NO: 67042
  Direct Repeat

SEQ ID NO: 67045 - DNA, 36 bp, unknown; identical to SEQ ID NO: 67042
  Direct Repeat

SEQ ID NO: 67046 - DNA, 36 bp, unknown; identical to SEQ ID NO: 67042
  Direct Repeat

SEQ ID NO: 67047 - DNA, 36 bp, unknown
  Direct Repeat
ggtgtgagtggcagcgaaatgatgggtgtgcggaac

SEQ ID NO: 67048 - DNA, 1449 bp, unknown
  TnpB Polynucleotide
gtgaagatcacccgggcactcaaatgccagatcatgttccccaacgcacggggcaaagatctcctgggcaaggaagggctcctgtacgcccttgcccaggccatgggtgaggccaccgatgccgccaaccgggccgtgaccgccttgtgggctctcgaagaaggcgtgttccatcgtccaccgcatcccaccaaagcagggaagttcctgtcttcggatacactggcctaccagtgcttctcggggaagtggcagccgaccggagagcctatgtaccggcccaagggccgagggctcgccggagccgtgaaacggaacctcggcaaacacgtcgccaaacgcctcaagaccgacctcaaggccctgcggagagggaaacaggcgttgccccacttcaagctgttaccgctgatcatcagcgggtccgccgtttccatctcccccgatgggcgattcaccctccaggtgtgggaagggacggacaagaaaaacaaccggatcgtggtcaagcccgtcaatctgccccacggccagaaggacatcctcagccgcatcatcagccgcatcatcagcggcgagtacaagatgggggacgtgaaggtctacaaggaccgccgcaaggacaagtggatgatgtccgtggcctggaccggggaggtaaaggccgtgaccaacgggaacctggttgccggactcgacctcggcatcgtgaccacggcgaccattacttacatcgaccgggacacgggcgagaaaatcgagggctacgacctggtcaacatccccaagaccaccatccgggcctggaaccgggtgacccgggaacagcgggagcggttcaagttcaaccgggacgagtacgaccagcgcaccgggaagggtcgggggcgcaagctccgtgtcgtccaggccatctccgacaagaaggggcgcttggtggacagcgccatcaaggagaccgctgcggccgtcgtccgggtctgccagcgtcgtggggtcacaaccctggtgatggagaacctcacaggcatcaccgacgagaagctgcgggactacgaggccctcgaaaccaacaggcagcgggctgcggcacgcaagtggttcctccagtggcagcagggggcgctccgcagcgccatcaagaccgccctcgaaggggcagggatcgaagtgatcatcatcgaccccgcctatacgagcaaacggtgctccgaatgcgggatcatctggtcctcgactgggaaaacggagatcgccaagaagctcgggcttccggtcgctgacctggtcgtgcagaagccaaccgactcgcttggccgggtctcccagagcaagttcaagtgctcgtgcgggcctgagcaacacgcagaccgtaacgccggatacaacatcgctcgcacaggggtcccgctcagcgggatcccgagtaaacaggacgtggccgcctaa

SEQ ID NO: 67049 - DNA, 37 bp, unknown
  Direct Repeat
cttgccaagggtccccgaacccctcggggttgtgggg

SEQ ID NO: 67050 - DNA, 37 bp, unknown; identical to SEQ ID NO: 67049
  Direct Repeat

SEQ ID NO: 67051 - DNA, 35 bp, unknown
  Direct Repeat
cttgccaagggtccccgaacccctcgggttgtggg

SEQ ID NO: 67052 - DNA, 36 bp, unknown
  Direct Repeat
cttgccaagggtccccgaaccctcggggttgtgggg

SEQ ID NO: 67053 - DNA, 35 bp, unknown
  Direct Repeat
ttgctagggtccacgaacacatcggggttgtgggg

SEQ ID NO: 67054 - DNA, 1581 bp, unknown
  TnpB Polynucleotide
atgggtgcggaggacatgcaggtaggttcggtctcagaaggagacctttcttcggtcaacaacgggttgactccacaacctgaaggcgaatcagtttcgggacacgccgcttcgtcggaggaagagagccccgaaacgctcgccaataaggcgcgagaagcgccacgatcgacagccgaagaagggtctcctcctgggaacgagccccctctgtcacccacgaagacgaccaagatcacgcgcgcgacggcgcggctcacgctcgatctccgacgtcgcctcgacgatcccgatcgcgtgtgggccgacgagctcgacaaagcgctcatcaaggcgcagcgcgagtgttcccgtgcggcgaacgccgtcacgcggatcctttggcgcgcggacggagagacgctcgacgctcttcgcaaggcgaacaacttcagcgccaagaattggcccttcacgaagatcaacacgtacgcgatcgctcgtgagctcgcgcccgagctcaataccgggattgcgagcgccgtctcgcgtatggcgatggtgaagtggggcgacgatcgatgggacgcgctcgtgcgcgagacgcggtcgccgccgcactatcgatcgacgatgccgatcgtgcttcgcgcgcaggagctcagactgcgccaagacaaaggcgtgttccgcctgagcctctcgttgagagccggccgcgacgcgcgcatcgagatcccgatcacgccgcgcgatcccaggcagcaagccgatctcgcgaagatcgcgaccggcgaatggaagatcggcgacgcacgcgtcgaacaggacaggctccggccgcgtcgatggtttatccgcatcgcgtacacccgattcgtcgagaagaagacgggcggcatcacggccgcgatcaaccgcggtatccgcgcgttcctcgtggctgcaacggcgaaaggatcgcactgggtctacgacggcgaggacatcgaagcgttcctcaagcaggtgcagcgccgtcgcaagagctaccagtacgcgagcaaggcgtcgtcgcgctgggggcatggacgacagcgcacgctgcgcccgatcaaaccgctcgaggacaaggcgacgcgctggcgcgagacgaagtgccaggtgatcgcccggcagctcgcgcgctggctcgatcaggaaggcgtcacgtgctgctacgtcgaggacttcgtcggcatcaggcattcgccgccggaaaagctcgagggcggcgtgccggtgtggcagcgcatccaagagtggccgtatcaccagttgctcacgcgcctggtctcgtgcctggatgagctcggcatcgagaccgtcgtcgttgcgccgcaggacatgtcgcgcacgtgccccgattgcggcctcgtcgacgagcgcgcgatcgatcgtcgcgcctgggtcttcaagtgcaccgcgcccggctgtggcttcaaacggcacctcgacgtgacgttcgcgatgaatctccgcgtacgtggcgaggagaatcaaaaaaagcgcgcagcgggcaacgtcgtcccactggcgggcgccaaaaagaaacgaaagccgcgcggcaacggtgcgtcgtga

SEQ ID NO: 67055 - DNA, 1503 bp, unknown
  TnpB Polynucleotide
gtgacagagatcgtttcgacgctgcggctggaggtgatccggccgctcgatggcgactgggatgcgcttggctctgcccttcgcgccctgcgtacgccgctccaccgcgtgctcaacggcgtggtcactgacctggaggtcgaggagcgcgcgggtaagctcggcaaggaggaagacggcaagattccagcgcggactcgcggctaccagctgacgcgtgatctctggctgaacgagcgcgaggcggcggcggcgcgcgttgctgcctacaagcaagatccgaagaagaacaagatctacgcgggtgaccagcagatcgcgaccgttcatcccggcgcgcaggtcatcaacggggtggccggcgccgcgtacgcacgctggcagaagtggcgcaaggagaagtgggccgggaagatgtctctcccgagcttcaagaagaactcgccgatctacatcgcgtcgagcggcggcgccgtgaagatcgaggaaaaggacggccttggcgttctgcgtctatcgctcttcgctggcggcgacgagacccgccctgtcgtcatgcgcctcgtggtgaagccgtaccgcggaagcggctgggcctcactgaagaagatcttctccgaccccgactgtcttggcgactgccggctgatcgaagacaaccatggcggcaagcggaagtggatggccttcgtgtcgttccgctccgaggtgcgcgaggccgcgcagggccgcacgatggccctgcatcgtggtctgcgcacgttcctcaccgcggcgatcgcgcgcagcgatgatggcaaggaagaggcgtacacgaccgtgctcgcggatggcggggacatcctcgctcacaaggccggctacgatgcccgtcgtcgctcgctcggcaggcatcggcgagagcttggcgctggtgctcgcggtcacggcaaggcccgacgcgaggagcacatcacgcggctggaggacgccgaggctcgctgggtacgcacgaagtgccaggagatcgctgcgcatgcgatgcgtctcgctgagaagcgtggcgtctcgcgcatcctggtcgaggactggacgaacccggccaaggagggtgctcccgagcttggcgagtatctcgaatgcctcgtccggcgttttccgctggcgcagctgcgagagagcatcgagtgggccgcgaagaagcgtggctacaaggtggagatcgtggcgagcgacggcaacgcgcgcacgtgcccgaagtgtcgtcacgtgcacacggccgagcagtcgcatgcgttcggcaaggccggcgtgttccgctgcgaggagtgtctgctcgaacggcccgtcgacatgatctacccgtggaacatgctcgtgcgtgacggcaagccgctgccgctcaatgaccagatcgccgcgacgaagcgtgcgaccgatcgcatcaagcgcggctcggcgacggtcaagaagagcggcgtgaagaaggtgcagccaatgcagccgccgaaggccgctgtgtga

SEQ ID NO: 67056 - DNA, 24 bp, unknown
  Direct Repeat
ctcggaacgcgagatcgaaggatc

SEQ ID NO: 67057 - DNA, 24 bp, unknown
  Direct Repeat
ctcggaacgcgagatcgaaggatc

SEQ ID NO: 67058 - DNA, 24 bp, unknown
  Direct Repeat
ctcggaacgcgagatcgaaggatc

SEQ ID NO: 67059 - DNA, 24 bp, unknown
  Direct Repeat
ctcggaacgcgagatcgaaggatc

SEQ ID NO: 67060 - DNA, 24 bp, unknown
  Direct Repeat
ctcggaacgcgagatcgaagggat

SEQ ID NO: 67061 - DNA, 3222 bp, unknown
  TnpB Polynucleotide
ctggcagcccgccgcggcctcgacgcgttcgatcaccatcaccggcaacccgtacgtgaacacggcgggcgccccgaacctcgacatccgcccgtcagtcatcatcacgtcgaaggcccgcgcgccgtggcatggaacgaaccacctcgcgtggtggggtccccgcatcgccggccgcgtcctgttcgacctgccgaaccaagcgggtgcacccccggcctacgccggcaacgtagaggtcgtgatcgacggcgaggtcttcggcaacgggttcgcgaacgcggtcgagtgcatcaacaccacctacgccggcgtcgctcttggcaacaacccgctgctcacgatcgaactgaaccggtgccgcttccgcaagccggcgaacttcggaacgcagtgcacgctcggacaggcgatcgggtcgcggttcgacggtctgctgtcgaccggcacctacgggacgatcagcctctgccggttcagcgccgggtggacggccaccgctgcggcggccttcttccctgcgggcgtgttcaacagcttcatggccgggacgttcacaggcaacgtcggggccttcctacggctcgacctcgcgagcaacaccacgctggtcgcgaacggcaacctcgtggcgggctggacgaagacgctgctcaacgacgcgacgatctaggggcaggccttcgcgtcctggcagctcgccggcaccgggctcgggaagtacgtcacggtcagccccgagggcgtcccgaagtcgccgaacgtgtcctggcacccgacctgggggctgcgtccgtccgggcacccaccagtcgtcggcgtcgcgtacgcgtcggggcacttgtcgctgtcgcacaccagcgggcggcagtcatggttcgcgctgtcgtgggcgcaggtcaggtccggcgcgaacgtcacggggatcgagtagaactccttctccgtgtccaggttgaagctgtcgaacttgccgtatgggtcctcggtgttgccggccgtgaactcgacgcgggtgcccttcgcgcaaccagccacgccgacgttggcgaggacagcgaggccagcggtcaggcacgcgggctgccacgacgggaggcacgaggcgtagttcccatcgacgatcacgaagaacgacgacgcgcccggcgcgagcacggggccgggggtgcagttgcactggggagcgccgggcgtcccgtcgccgttgcagccgatctggtacgccagggacaccgtctcggtcgggctggcgttcgtgaacgtgaggcaccgctgcccggcagggcaggcggtgccccaggacgtcgagtagtccgggcagacgttcaacgccttcgagcagtcaccggcggctgcggcgaggggcgcggcggcaccgacggtgagaggcgcggaggcagtcgcttcggggccagcggccaccacggtcggggcatctaccgagacggaatcgccacaacccagcagcgcgatgatcaggacgagcatgaaggcctccaaggggagggcgaacctatcgcgtcggtgtaccggcgtcccggttcgcgctctagggtcaagaaaccggtggacgcatcgtacacagcacgctacacaggagagcaacgcgaggccttcatgccgtcagttacccgttcgctccgattccaggtccagttcgttggtctgcgtcacaaggatcgggagaaggtctacaaacgtgtctggggcgcgatgacggacgtgacgcgcgcatcgaacaagatcatggacgtgttccacttcatcgaccagaagatgctggcgatgccttccgaagctcctcgacgtggtccgaacaagggcggcccggcgaagctctgggggttcaagaacaccggctatcgcctgttcaacgatgagtggaagccgttcggcacgtcgacctacatcgtgcgtcccctctcgggtcgtgtctccggcaacgtgatggtcgaagtcgtgagctggctggtgacggatcaccaaaccaacaagcgagccgtcttcttcggagatcgctcggcggcgagtcgtgaaaaaatacaacctctcggcgtgacgaatcaggcggtcgacctgcacgagaacgggtcgatcacgctgcaggtcttcgcgaaggacgaccctaccgggggaacgcaggtcactgtgcgtccggtcgggcgcatggacgcgagccgcaagaagatcctgaagtcgatccagagcggcgccttcaagaagggagccgccaagctgatctgggacaggcccgagaaccggaccggaaagtggtatgtgtccttgtcgtacaccgcggaggcggccgagacggcgaccttcgagagcacgccggtcgagaacgcgatcgtgtgcggtatcgacatcggcatccgatggacgagcatgctcgcgttcgtgaacgcgatgacgggcgagtacgacaccaagtatcagcccgtacagctgcctcagcaggttcgcgctgcctgggaggctgtcgagcgcgagaagaaggagcggtcggtgttcaaccgcgacatctacggcctgcgtaccggacgcggcagggaacggaagctgcgttcgacccgctgcatcggcgacaggctgcagcgactcgtcgacacggcgatcgacatgcacgtagcggcggtggttcgggccgtgaagaggcaaggcgcgacgatcgcgtgcctcgaagatcaccagcactggtccgtcggcaaggctcatgatcgcgccgacaacgaagagacgaacgccggtaaagcggctgcgcgtaagcgatacttcgcgtggcatcaagggctcctgcggcagaagctcgaagaggtcctgttgcgcgagaacgtgatcgtgaagatcgtcaaccctgcgatgacgtcacggacttgtcctgactgccggaaggtctgggcgaacaccggcatctacgctcagaaggacgctgttaggctccctgctccgccggtacactggtcccctcagggacagcctcctctgtcgaacgcgaagcgggtcaagcgttggggcgatctctcccgctggagtttcggtcgggtcacgttggagcggttcgtctgcgactgcggttgtgacaagcaggcggacttcacggcggggatcgagatcgcgcgacgctgggacgttccctacgagacggaggccgagcgacgcaagaaaaagtacaagaaggcctcgacatcggataccgagacggctacactgtctctgtaa

SEQ ID NO: 67062 - DNA, 1848 bp, unknown
  TnpB Polynucleotide
atggaaaccctgtctttaaaattaaaacttaacccttcaaaagaacagttgctcgttttagacaaaatgttttggaaatgggcttcaatttgcacgcgccttgggttgaaaaaagcggaaatgtccgatttagagccgccaaaagacgcggagggcgtttggttcagcaaaacccagttgaatcaggccaacaccgacgttaatgacttgaggaaggcaatgcaacaccagggaaaaagaatagagtatgaattagacaaggttgaaaaccggcggaatgaaattcaagaaatgctggaaaaaccggatcgccgcgacatatcaccaaaccgaaaagacttgttccggcccaaagccgccgtagaaaagggctatctcaagctgaaataccacaaactcggctattggagcaaggaactcaaaaccgcaaacaagctgatcgaaaggaagaggaaaacactcgccaaaattgacgcaggcaaaatgaaattcaagccaactcgcatcagcctgcacaccaattcattcaggataaagttcggcgaagaaccgaaaatcgcgctttcgaccacttcaaaacacgaaaaaatagagttaccgctgattacctcgcttcaacgacctttgaaaactagttgcgccaaaaaaagcaaaacctatctggatgccgcaattttgaatttcttagcatacagtaccaacgccgcgctttttgggttaagccgttctgaagaaatgctgttaaaggcaaaaaaacccgaaaaaatagagaagcgcgaccgcaagctcgcgacgaaaagggagtcttttgacaaaaaactgaaaaccctggaaaaattgcttgaaagaaaactctccgaaaaggaaaaatccgttttcaagcgaaaacaaacggagtttttcgacaagttctgcataactcttgacgaaacgtatgttgaagctctgcatagaatagctgaagaattagtttcgaaaaacaaatacttagaaatcaaaaaatatcccgtgcttttgcgaaagcccgaaagccgattgcgttccaaaaaactcaaaaacttaaaaccagaagactggacgtattacattcaattcggttttcaacctttgttagacactcccaaaccaataaaaacaaaaaccgttctcggaatagatcgcggagtgagacacctgttggcagtaagcatttttgacccgcgaaccaaaacgttcaccttcaacaggctttattccaacccgatagtcgactggaagtggcgaaggcgcaagttgttgcgttcgattaagcgcttgaagaggcggctaaagtccgagaaacacgtgcacttacacgaaaaccagttcaaagccaagcttcgcagccttgaagggcgaatagaggaccacttccataatttgtcaaaggaaatagtggacttggcaaaagagaacaacagcgtgatagtcgtcgagaacctgggcggcatgcgtcaacacgggcgcgggcgtggaaaatggctgaaagccctcaattacgcgttaagccatttcgactacgcaaaagtgatgcagctcataaaatacaaagccgaacttgccggcgttttcgtgtacgacgtcgcgccagcgggaacgagcataaactgcgcctattgcctgcttaacgacaaagacgcctcgaattacacgcgcggaaaagtgatcaacggtaagaaaaacacaaaaatcggggaatgcaaaacctgcaaaaaagagtttgacgcggacctgaacgccgcgcgcgtgatagccctttgctatgaaaagaggttaaacgacccgcagccgtttggcactcgcaagcaatttaaacccaagaaaccataa

SEQ ID NO: 67063 - DNA, 1599 bp, Candidatus Micrarchaeota sp.
atgaacatgagtaaaactacgatttcagtaaaattaaagattattgacttaagctctgagaaaaaagagtttcttgataactattttaacgaatacgcaaaagccacgacgttctgccagttaagaatacggcgacttttgagaaatacacactggcttgggaaaaaggagaagagttcaaaaaagtggatttttgaaagtggaatatgcgatttgtgcggtgaaaacaaagaacttgtgaatgaagatagaaattcaggcgaacctgcaaaaatttgcaaaagatgttataatggaagatatggcaatcagatgatacgtaaacttttcgtttcaacgaagaaaagagaagttcaggaaaacatggacatacgaagagtcgctaaactaaataatacgcattatcaccgcataccggaagaagcatttgacatgattaaagccgccgatacagcagaaaaaagaagaaagaagaatgtcgagtatgataaaaaaagacagatggaatttattgagatgtttaatgacgaaaaaaaacgtgcggcaagaccaaaaaaaccaaacgaaagggaaacccgttacgttcatatttctaaattggaaagtccgtcaaagggatatactctgaacggaataaaaagaaaaatagacggcatgggtaaaaaaattgagagagcagaaaaaggtctctcaagaaagaagatttttggttatcagggcaatagaatcaaacttgattcgaattgggtccggtttgaccttgccgaatcggagattactatcccctcactgtttaaggaaatgaaactaaggataactggaccgaccaacgttcattcaaaaagcgggcagatatattttgcagaatggtttgagcggataaacaaacaaccgaataattactgttatctgataagaaaaacaagttcgaacggcaaatatgaatattatcttcaatatacttatgaagccgaagttgaggcgaataaggagtacgctgggtgtttgggggttgatataggatgttctaaacttgctgccgcagtttattatgattcaaaaaacaaaaaagcacaaaaaccaattgagatattcacgaatccgattaaaaaaatcaagatgcggcgcgagaaactgattaaacttctttccagagttaaggtgcggcacagacgcagaaaactcatgcaactcagtaaaactgaacccattatagactatacgtgccacaaaaccgcaagaaaaattgttgaaatggcaaatactgccaaagcttttatctccatggagaatcttgaaactgggataaagcaaaagcaacaggcaagagaaacaaaaaagcagaagttttatcggaatatgtttcttttcagaaaattaagcaaactaatagagtacaaggctctgctgaaagggataaagatagtatatgtgaaacccgattatacaagccaaacttgttcttcatgtggcgcagacaaagaaaaaaccgagcgcccatcacaagcaatatttcgctgtcttaatccaacatgccgatattatcaaagagacataaatgccgacttcaacgccgcagtgaatatagctaagaaagct

SEQ ID NO: 67064 - DNA, 1833 bp, unknown
  TnpB Polynucleotide
atggatgaaaaacattttttttgttcatattgcaataaagagttaaaaatttctaaaaatttaattaataaaatatcaaaaggcagtatccgcgaagatgaagccgtatcaaaggcaatttctattcacaataagaaagaacattcactgattctcggaatcaaatttaaattatttattgagaataaattagataagaaaaaactcaatgaatactttgacaattattcaaaagctgttactttcgctgcaagaatatttgataaaattcgttctccttacaaatttatcggattaaaagataaaaacacaaaaaaatggacatttccaaaagcaaaatgtgttttttgcttagaagaaaaagaagttgcctacgcaaatgaaaaagataattctaaaatatgtactgagtgttatctaaaagaatttggcgagaatggcatcagaaaaaaaatttattctacacgcggaagaaaagttgagccaaagtataacatttttaattcaacaaaagaactttcttccacacattataattatgcaatccgagatgcatttcagcttctggatgccctaaaaaaacaaagacaaaaaaaattaaaaagcatttttaatcaaaagttaagacttaaagaatttgaggatatattctcagaccctcaaaaaagaattgagctgtcccttaaaccacatcaacgagaaaaaagatatattcacttatcaaaaagcgggcaagaatcaataaaccgcggttatactttaagatttgttcggggaaaaataaaatctttaaccagaaatattgaacgcgaagaaaaatccttaagaaagaaaacacccattcactttaagggaaaccgccttatgatatttcccgcaggaataaaatttgattttgcatctaataaagtaaagatttctatttcaaaaaatttaccaaacgaatttaatttttcgggaactaatgtgaaaaatgaacacggaaaatctttttttaaaagcagaattgaattaatcaaaactcaaaaaccaaaatacgcttatgtccttagaaaaattaagcgggaatattcaaaactcaggaattatgaaattgaaaaaatacggcttgaaaatccaaatgcggatttatgtgatttttatttacaatatacaacagaaactgaatcaagaaacaatgaagaaataaacggaataatcggaatagatcgcggaataactaatctggcctgcttggtattacttaaaaaaggcgataaaaaaccatcgggagtaaaattttataaaggaaacaaaatattaggaatgaagattgcatacagaaaacatctctatttattaaaaggaaagcgcaataaactaagaaagcaaagacaaataagagcaatagaacctaaaatcaacttaatccttcatcaaatatcaaaggatattgtaaaaattgccaaagaaaagaattttgcgattgctttagaacaactagaaaaacctaaaaaagcaagattcgcacaaagaaaaaaagaaaaatataaactggcattatttacattcaaaaatttatcaactttaattgaatataaatcaaaaagagaaggaatccctgtcatttatgttccaccagaaaaaaccagccaaatgtgcagccattgtgcgataaatggagatgaacatgttgacactcaaaggccatataaaaaaccaaatgcacaaaaaccatcttattctttattcaaatgcaataaatgtggaattgaacttaatgcagattataatgctgctttcaacatagcgcagaaaggtttaaaaactttaatgcttaatcattctcattaa

SEQ ID NO: 67065 - DNA, 1638 bp, Candidatus Woykebacteria sp.
atgaggcttactaaatcgtacaagttaaaaatcttacctaccaatgagcaggttaagttccttgaagattatttctcaagattcgctaaagcggtaaacttctatataagtaaaattggcttgcttcgaaaagactatgagtggctatctaaggacaagcagaaaaaaggaaagtgtgcgaattgtggccaaaataccgatcttagtcacaaattcctgcctgctaactccttagtttgcccccgctgctataattacgaagttggcgacctttttattagaaaaaagctatatgcaaccagaataggcccaaataaaagaaaaaggggcaggtttgatgttcgagatgcaacaaaattgccggggacggattacgccttagccttcaagagagcagccgatactatcaagggacaaaagaaacaactgggaaaagtcaaaaagcagctagtttttacagaacgacgcttaaatgaatggattgaggtgcttgaaaataaggaaaccctactacaagatggcaaaaaagccctaacaagatttacacttcctaaaaaaccaggacagaaagtagaaagatttaagcacatcctttataaagacaacccatcccaaggaaaaacagaatcccagatcaaaggaataatcaaggctttggataggactgttcaaaggcttactaaaaggttaaaaactgcggacattaaattcaatggggacattgttgatcttcactactcagcagtaaaaaacattatagaaaaattcaccgaaataagccttgatttaaaaaagcaacagtttccaattgcagcagaaaatgtagtttctaagaaaagtaggggttggattattgaaaagataaacgagatgaaaaagggcaaacccttatatccgcttcttctgaaaaagaaaaacgatttttacctaagctacccagtccgattggagctagaagaaccaaaagaggaaaaagtcactaaagcaatggggattgatcggggagtaaatcaaatagctgttactgcagttattgacaggcctacagataaacctcatcatattgaattttattcaggaaaagacttaataaaaagcaaattaaaataccagctaataaggaagaaatttactggaacaaaaagtgttaataaacgcagggcaaaatttggagaaaaggtagcaaggggatctatgtatgttctccacgatatttcaaggcagatagtaaatcaagcaaaagaacaaaaaccaattgttattgttatggaagatttaaaaatgattcaaggcgagaaaagggtgaaaaaaggaagtgccgtgagggaaagaaaagtcaattttcttctctccaactttaactatggccgattacaaagtttaattagttataaggctttacaagagggaatcccaattaggtttataaaacctgaatatacatcccaaacctgttcaaaatgcagggaaataggcaaaaggactaaggggttttttcagtgcgtcaatccaaaatgcaaccataaaatgaatgcagatctcaatgccgccattaatattgcaaactcatattgtaaggaagattcatttacaaaaaagccaaaaagtgctatattgcaagcgacgacgagctcttag

SEQ ID NO: 67066 - DNA, 22 bp, Candidatus Woykebacteria sp.
aagaagaattaaggaatgcaac

SEQ ID NO: 67067 - DNA, 22 bp, Candidatus Woykebacteria sp.
aggaagaattaaggaatgcaac

SEQ ID NO: 67068 - DNA, 1650 bp, unknown
  TnpB Polynucleotide
atgttggttggaatgaacgaagataatatcacaacaagcataaagtttaaactgtattttgacagtgaaaaagacaaaagagagatggatgagtttttcgacgaatatgctaaagcagtaacatttgcggcaagggttatttccaaactgcgcaaaccgttcagaccgctgggtaaatatgttgacaaaacgtgggtgtctgaaacaggagtttgcagcaaatgcaagggcggcaaggaactttatcgcattaacacgtttaatggagaaaaactgtgtaaagactgctattacagtgattacagcgacacagcacttcgtaaacgaattgtgccagcaattcgcggcaaaagaaagggtgaaaaaatagatggcaagtttaatcttcgtaatgtgacaacaaaaatttccccaacacatatgcactacgcggttcgtgacgcgcttcagattctcgatgctttgaaagaacaacgaaaacagaaatggggtaggtatcggcgtgacatgcggcggttgcgggaatttgaagaaatgatttccgatccatccaaacgcgttggaattccaccacgcaaaaggcaaagagaaccaagatatgtgccaaagtctcaggaggaccggataaatgagttaaggggctatacgttaagccaagtaaataaaaaaattcaggttttgaaaagaaacatcgaaagagatagaaaatctctaatgcgccccacgccaatacatttcaagggcacaagaatcacgttagccccatcaataaagtttgatgttagaaataatcgagcacgtttgaccttgcgagaagtaaagtggtatgggattagcgggacaaacgttgccagtgaacgtggtagaaaatattttttggaaaaattaaaagaaataacaaagcaaaaaccaaagtatgcatacatcattcgcaaacagattggagagtatggaggggttccaatttatgagtattaccttcaatatactgtcgagactataccaaagtttaggttgagatatacaggagttttggggatagaccgtggcataacaaaattagccaccgtggttttcttggcaaaagataacccaacaaagcctaggctcgtaaagttcttcagaggcgacgagatatccagaataaaaatagttcggcgaaaacaaaaatacgccttgacgggggttcatcacagacgtgaaaaaatgaagcgcatgcgctttattgaaccaaagattgaacacatattgcataacgtttcgaaggaaattgtagcgctcgcgatgcaaaacaaggctgcaattgcaatcgaaaaacttgaaaaaatgaaaaagggaaaaaccaagcaacgtagaagggaaagatacaagctatcacttggagattataacaagttagcacagtttatctcgtacaaggcaaagaaagaaggcataaaagtttttgaggtttccccagaaggcacaagttatacttgcagccattgtgtcgttcaaagaagaaaagaagttaccaacaccgtcaggccatacaaaaatacttacagtttgatgaagtgcaacgagtgtggcgtagaacttaactccgattacaacgctgcgttcaacgtggcttggagaggcttaaatagtttgacggaagaaagttaa

SEQ ID NO: 67069 - DNA, 36 bp, unknown
  Direct Repeat
ttgcagaaccagaatccacgaacgtaggaatgcaac

SEQ ID NO: 67070 - DNA, 2532 bp, unknown
  TnpB Polynucleotide
atggtaacaagagcgttaaaattaaaaattgaaccgacaagaaaacaacataaaattcttgatgaaatgttttggaagtgggcgtctattgcaaataggtataatagatatacttattcaaaaaatttgggagagagcactatcaaagaaaaacttaaaccaaaacaagatattcaaacggtccaattttctgaaacaatggtaaatcaacgtgcaaaacaagacaatgctgacttaaagagagcaatggaagaacaagggaaacagaaagaagaagagttaaaaggactagaagagagaaagcttattattgaaagaatgttaaatgataaagatgaaagagaaattaatccgcaaaggcctgtaaatataagacctaaaggatggtttaaatttcataatattaatcattggcagagagaatttgaaaaattggaaaagcaaatcaaaagaaagaaaaatacgattaaaaaaatagaagaaggaaaaatatactttaaacctaaaagagttagcttttggtcaaataattggaagattagcttcaagtcaaaaaaattaatactaaagccttctaatagtcaagaattaatattggatttaatcacggaaccaatacaacctcataaaagttcttccttaagaagtaaagaatttttagaataccagataagtgatttcttaaatttttctcttcatagccttttctttggacttgcaagcaatgaaggtcccttggtagatttcaaaatttatgataaaatagtaattccaaaacctgaagagaggtttccaaagaaagaaagtgaagagggtaaaaaattagattcctttgataaaagagttgaagagtattattcagataagctggaaaagaaaatagaaagaaaacttaatactgaagaaaaaaatgtaatagacagagagaaaacaagaatttggggagaagttaacaaattggaagagattagaagcattattgatgaaataaatgaaattaaaaagcaaaagcatatttctgaaaaatcaaagttgctaggagaaaaatggaaaaaagttaataacattcaagaaacattattaagccaagaatatgttagtttaatctctaacttgagtgatgaattaacaaataaaaagaaagagttacttgctaaaaaatattcaaaatttgatgataagataaaaaaaataaaagaagattatggtttagaatttgatgagaatactataaaaaaagaaggagaaaaagcatttttaaaccctgataaattttctaaatatcaattttctagttcttatcttaaattaattggagaaatagcaagatctctaattacatataaaggttttttagacttaaataaatatcctattattttcagaaaaccaataaacaaagttaagaaaattcataatcttgagccagatgaatggaaatattatattcaatttggttatgaacaaataaataatccaaagctagagacagaaaatatcttaggtatcgacaggggcttaactcatatcctagcttattctgtttttgaaccaaggagtagtaaattcatattgaacaaacttgaaccaaatcctattgaaggttggaagtggaagttgagaaaattgagaaggtcaatacagaacttggaaagaagatggcgtgcacaagacaatgtcaaactaccggaaaatcagatgaagaaaaatctaagaagtatcgaggataaagtagaaaatctttatcataatttatcaagaaagatagttgatttggcaaaagaaaaaaatgcatgtatagtttttgagaagttggaagggcaaggaatgaaacagcatggaagaaaaaagtccgatagattgaggggtttaaattataaattgagcttatttgattatggaaaaatagctaaacttataaaatataaagcagaaattgaaggaatcccgatatatcgaatagacagtgcttatacaagccaaaattgtgcaaaatgtgttttagaatcgcgcagatttgctcaaccagaagaaatctcctgtttggacgactttaaagaaggtgacaacttagataaaagaatattggaaggaacgggcctagtggaagccaaaatttataaaaaacttgctaaaaagatctttttagcaagaaaaaataagagtcatgaagaagttaaattacaaatagaagtaaaaccttataagattattatttctaaagggactttcaaattgaaagaaaaaaaagaagattttgagatagaagaagatattgcgatgtttgatacaaaaaaagtaattaaagaaaacaaggaaaaaacagtaattttagattatgtttatacgcgtcgtaaggaaattataggtacaaatcataagaaaaatattaaaggcattgcaaagtatactggaaatacaaaaataggttactgtatgaaacatggacaggtagatgctgacttaaacgcttcaagaactattgctttgtgtaagaattttgatataaataacccggagatttggaaatag

SEQ ID NO: 67071 - DNA, 36 bp, unknown
  Direct Repeat
tttcatattcagaaactaggggttaaggactgcaac

SEQ ID NO: 67072 - DNA, 36 bp, unknown; identical to SEQ ID NO: 67071
  Direct Repeat

SEQ ID NO: 67073 - DNA, 36 bp, unknown; identical to SEQ ID NO: 67071
  Direct Repeat

SEQ ID NO: 67074 - DNA, 36 bp, unknown; identical to SEQ ID NO: 67071
  Direct Repeat

SEQ ID NO: 67075 - DNA, 1575 bp, unknown
  TnpB Polynucleotide
atgaacagtattatccaatcagttaaattcaagttaaaaaccacaaaggagcaaaaagacttcctgaaaagttattttatagagtatgctaaggcggtcaatttctttctagagaaagtccccagtttgggtggcaataagtttaacaacataagccgagagaagcagagaggaatttgctcaaattgtcgcaagaaaaccgacctaaaatttattgaaaaagataacacaaaagtaagattgtgtggaagctgttacgatttgttgtatggtcgtaaagctctatatgccacaagtggcagaaaaagaggcaggtatgatgtgcgtgatgccgccagattaaaaggaaccgaatatgcccttgcattccaaaggtcgcagtccacaatcaggtctttaaaagccctacattgggaatggaaaaaaagattttggagagaagaattcaggcttagaaaactagaggaagttcgcgataacaaaattattaatgttggtgagggagacaaaacaaaaaaagttaaggctagggttatcgttatcaagaaagagaaacagagagttgatcgttacaagcactattacgatagtgaaaaatatccaggttacacactatccgccctttccggattcattaaagaacattctagaagagtagatgggttaaaaaggagatttctgaaacaaccaacctttcggggcgatgtggtagatttacaccaaaccgcgttcaaactactaggtttgtcgcaactgcggcttacgcttaatggagcccgttatgaatttagtttttggagcgacgatgtaagaaacaagaaaagcgcagattttttaaaagaaaaagtaaatctgataaaaataggtaagccgcgctacccattgctattgcaaaaatccggtgaattttacctgcaatatcctgttctgatttcgatcgatattcctaatccagacaagaaattcagggcaatgggaatagatcgtggagaaaaaatgattgcagtctcggcagtcgtcgacaaggaaggaggcaaacctcatgatataagttttattagaggtacagacatacttgttcccaaacaaaagtacgaaaaaataaggaaaaaaattcaacaaaaatttacaggcctccaggccaggtcttccaggtcagctaaatttagaaaaagagcacaaaatatttctcgttatcgcctacatcgagtcgcaaagaacttggttcaaatagcgattgcaaataaacccattgtgatagttatggaaagaattaaggggataagggaagatcgtggctttcgggtagcccgtacaaaacaacaaaaggaacggaattatatgttgtctaactttgtttacttcactctacagaagcttattgaatacaaagctttcaatcaaggcattcccgttctttacgtagatccaaaaaacacatcccaactttgttggaaatgtggaaattttggcacaaagggtaaaacacgttttcgttgcaaggcttgtaaaaaccagattcaccctgatcttaacgccgcaattaacgttgccaacaagttttacgacttataa

SEQ ID NO: 67076 - DNA, 26 bp, unknown
  Direct Repeat
aacctcttaagaagagttaaagaatg

SEQ ID NO: 67077 - DNA, 26 bp, unknown
  Direct Repeat
aacctcttaagaagagttaaagaatg

SEQ ID NO: 67078 - DNA, 26 bp, unknown
  Direct Repeat
aacctcttaagaagagttaaagaatg

SEQ ID NO: 67079 - DNA, 1878 bp, unknown
  TnpB Polynucleotide
atgttagctctaaaattaaagataatgcctacagaaaaacaagccgaaattttagatgctatgttttggaaatgggcatcaatttgttcgagaatagctaaaatgaaaaaaaaggtgtctgtaaaagaaaataaaaaagaattaagtaaaaagattccttcaaactctgatatttggtttagtaaaactcagttatgtcaggcagaagttgatgttggagatcataaaaaagccttaaaaaattttgaaaagcgacaagaatcgttattggatgaattgaagtataaagttaaagctataaatgaagttataaatgatgaaagcaaaagagaaattgatccaaataacccttctaaatttagaattaaagattcgactaaaaagggaaatttaaattcgccaaagttttttactttgaaaaaatggcaaaagattttacaagaaaatgaaaagcgtatcaaaaaaaaagagagcactatagaaaaattaaagagaggaaatattttctttaacccaacaaaaatttctttacacgaagaagaatattctattaattttggctcgagtaagcttttgttgaattgtttttataaatacaacaaaaaatctggaataaattcggatcaattagaaaataaatttaacgaatttcaaaatggcttaaatataatatgttctccacttcagccaattaggggttcaagtaaaagaagttttgaattcattaggaatagtataataaattttttaatgtatagtctatatgctaaattgtttggtatacctagatctgttaaagcacttatgaaatctaataaagatgaaaataaattaaaattagaagaaaaattgaagaaaaaaaagtcttcttttaataaaactgttaaagaatttgaaaaaatgataggtagaaaattgtcagacaatgaatcaaaaattttaaatgatgaaagtaagaagttttttgaaataattaaatcaaataataagtacattccaagtgaggaatatttaaagttactgaaagatatatctgaagaaatttacaattcgaatatagattttaagccatacaagtattctattttgattaggaaaccgctaagtaaatttaaatcaaaaaagttatataatttaaaacctacagattataaatattatcttcaattgagttacgaacccttttctaagcagttaattgcaactaaaaccatacttgggattgacagggggttgaagcaccttttagccgtttctgtttttgatccatcacaaaataaatttgtttataataagcttattaaaaaccctgtttttaaatggaaaaaaagatatcatgatttgaaaagatctataagaaatcgtgaaagaagaataagagcacttacaggagtgcacattcatgaaaatcagcttattaagaaacttaaaagtatgaagaataaaataaatgtgttatatcacaatgtttctaagaacatagtagatctcgcaaagaaatatgagtcaactattgttttagaacgtttagagaatttgaagcaacatggacgaagtaaaggaaaaagatataaaaaattaaactatgtattaagcaatttcgattataaaaaaatagaatccttaatttcttataaggctaaaaaagaaggtgtgcctgtgtctaatataaatccaaaatatacaagtaaaacttgtgcaaaatgtttacttgaagttaatcaattatctgagttgaaaaatgaatataatagagatagtaaaaattcaaaaataggaatctgtaatattcacggtcaaatagatgcagatttaaatgctgcaagagttatagccttatgttattctaaaaatctgaatgaaccacactttaaatag

SEQ ID NO: 67080 - DNA, 2328 bp, Candidatus Pacearchaeota sp.
atgaaagccctaaaacttcaacttattccaacgaggaaacaatataaaattcttgacgagatgttctggaaatgggcttctttggctaaccgagttagtcaaaaaggagagtccaaagaaactcttgccccaaaaaaagatattcaaaaaattcagtttaatgcaacccaacttaatcagatagaaaaagatattaaagatttgaggggagcaatgaaagagcagcagaaacaaaaggaaagacttcttcttcaaattcaagaaagacgctctactattagcgagatgctgaatgacgataataataaagaaagagacccccatagacctttaaattttaggcctaaaggctggagaaagtttcatacttctaaacattgggttggggaactctccaagattttaaggcaagaagatagagtaaaaaagactatagaaaggatagttgcaggaaaaatatctttcaaaccaaaaagaattggaatttggtctagtaattataagattaattttttcaaaagaaagattagtattaaccccttgaactcaaagggtttcgagcttactcttatgactgaacccacacaagatttaattggtaaaaatggggggaaatcggtccttaataataagagatatcttgatgattctattaaatctttattgatgtttgctcttcactctaggttttttggtctaaataatacagacacttatttactaggaggcaaaattaatccttcattggttaaatattataagaaaaatcaggatatgggtgaatttgggagagagattgttgaaaaatttgagcgtaaattaaaacaagagatcaatgaacaacaaaaaaagataattatgtctcaaataaaagagcaatattctaatcgtgattctgcatttaacaaagattatcttggacttattaatgagttctctgaagtttttaaccagcgaaagagcgaaagagcagaatatttgcttgattcatttgaagataagattaagcagataaaacaggaaattggagaaagtttgaatattagtgactgggattttcttatcgatgaagcaaaaaaagcttatggctacgaggaaggatttacagagtatgtttattctaagagatacttagaaatattaaataaaattgtgaaggctgtcttaattacggacatttattttgatttaagaaaatatcctatattacttagaaaacctcttgataaaattaagaagataagtaatttaaaacctgatgaatggagttattatattcaatttggttatgattcaattaaccctgttcaattaatgagtactgataagttcttaggtattgatagaggtttaactcatcttctcgcgtattctgtctttgacaaagaaaagaaggaatttataattaatcaacttgaaccaaatcccataatgggctggaaatggaagttaagaaaggttaagcgttccctacaacatttagagaggagaataagagctcaaaagatggttaagttgccagaaaaccagatgaagaaaaagcttaagagtattgagccaaaaatagaggtccattaccataatatctctcgtaaaattgttaatcttgctaaagattataatgcctcaattgttgttgaaagtctggagggcggcggtttaaaacaacatggaagaaagaaaaatgcaagaaatagatctcttaattatgctcttagtctttttgactatgggaagatagcatctttaataaaatataaagcagacttggaaggagttcctatgtatgaagttcttcctgcctacaccagtcagcagtgtgctaagtgtgttcttgagaaaggaagttttgttgacccagagattatagggtatgttgaggatatagggattaagggaagtttacttgactctctttttgaagggactgaattatcttccattcaagttttaaagaagattaagaataagattgagttatcagcacgagataaccataataaggagataaatttaatcttaaagtataattttaaaggtttggtaattgtgcgaggacaagataaagaggagattgctgaacatcctattaaagagattaatggaaaatttgctattcttgactttgtatataagagaggtaaggagaaagtcggcaagaaaggtaatcaaaaagtaagatatacaggtaataagaaagtcggctattgttcaaaacatgggcaagtagatgcagatttgaacgcttcaagagttattgccctttgtaagtatcttgacattaatgaccctattttatttggagaacagagaaagtcttttaaatga

SEQ ID NO: 67081 - DNA, 1794 bp, Hadesarchaea archaeon sp.
gtgacgccgtggtactccgcccagcccggcactatccagatcagcatccgcgcaccgagaaccgttgccggggggcgtttttacaggttaacaatgatttacgggtttttcatccgtgagttccgctttatattcaatagttcggctaatagaattttgatgagcatggccgaattgaagaagacgattaagctgaagctcgatcttgaaccgggcgagtcggaaaaagttaatgaaataatgtgtagatacgccgaggctgtgaattttcttctcaagcgctgttctgcccttcttctccaaaatcggaggctgggaaaagactcttttgaaggggtctgctcaaactgcgggcaaaaaagcaaaatagtttcaagcggcagtttagggcagctctgtaacgaatgctggaaaggaaagcttagctatccggcactccgcaaggagtttatcccgactaaaaagagaagggtcctcgcctcaaaaaacgtctatctggcggcaaggggcatatcggcttcttcggtggacgttgccttttctcataccaaacaaatcctcgcgagttggttcggcgcggatcgaaagcgccagcgtcagctcaagaatttgaagaagagacttcagctctggaaagaagtactcgaaaacaagaaaatagagatggaagggaaacatgttgatgcccgcgtggtgataccgcccggacctaagcaaaggatgccgagattcaaacacgttctccatcccgcagagtacaaggggcggacgcttaccgggattaaggcggccatcgagaaaatagaaaagcggattaggagactcgaaaaagaaccgaccccaccaaagtttcgaggagaaacgatgtggttgaagaatacctccgtcaagtttctggacgaaaaaacggtaaaactggctttgaatggccacaagtttataactaaatttttcactgtcgatgtgaagagggaaaagagccgggctttccttttggatcgcgtgagacgaatacttgaaatgcaggagaaaggaatacgcgcctatccccagctttccgttgaaaacggcagctactacctaaattttccgatccgcatttccacacaagtgccggaacctgacgggagctttggggttatcggcgttgacaggggcatcaacaacataatagcggcggccgcgatcaaccacccccatggaaaaccacaccacctgtggtttgaagggggaaaagatctgcgttctttacaaatcaggaaaaaatggctcagacataaaatgcaaaaaattgctgccgaacaaagggacttgggaaaaaggtttaggctcggtagaaagttgcgctcgatgagaggcgaaggcgcctattcaaaaaatctctttcacaatatcgcaaaacgtgttgtttcgagagcaaaagaactctatcccgacggccgcgttgttatcgccatggaagatctgaaggaattgcgccctgttagaggtaagaaatacgagcgggctctgaactacatgctgtcaagttttgcctaccgacggctccagcagctaatcaaatataaagccgaagaagcgggaattccggtggtactcctgccgccagaatggacctccactacctgctcgaaatgcggccataacgacccggcaaaccggcctggctccggagggtttttcaggtgtacaaggtgcggatacacgatgaattctgacctcaacgccgcaatcaacattgccaaccgcttttacgaaaagttaaaccttaaaaatggccggcaacaaagataa

SEQ ID NO: 67082 - DNA, 37 bp, Hadesarchaea archaeon sp.
gttgcaatcaagcttttcattctcaaagcgatgcgac

SEQ ID NO: 67083 - DNA, 37 bp, Hadesarchaea archaeon sp.; identical to SEQ ID NO: 67082

SEQ ID NO: 67084 - DNA, 37 bp, Hadesarchaea archaeon sp.; identical to SEQ ID NO: 67082

SEQ ID NO: 67085 - DNA, 37 bp, Hadesarchaea archaeon sp.; identical to SEQ ID NO: 67082

SEQ ID NO: 67086 - DNA, 37 bp, Hadesarchaea archaeon sp.
gttgcaatcaagcttttcattcgtaaagcgatgcgac

SEQ ID NO: 67087 - DNA, 1761 bp, unknown
  TnpB Polynucleotide
atgccatccgaaacatacattacgaaaaccttgtcattaaaactcattccatcagatgaagaaaagcaggcgttagaaaactattttataacattccagagggccgtgaattttgctatagatagaatagtagatataagaagctcctttagatatctaaacaaaaatgaacaatttccagccgtgtgtgattgctgtggtaagaaagaaaagataatgtatgtgaatatatccaataaaacctttaagtttaaaccatcaagaaatcagaaggatagatacacgaaggacatttatacaatcaagcccaatgcccacatatgtaagacatgctacagtggcgttgcaggaaatatgtttatacgcaaacaaatgtatccgaacgataaagaagggtggaaagtttcgcgttcatacaatatcaaagttaatgcccctggactgactggaaccgaatatgctatggccatacggaaggcaataagtatattaagatcttttgaaaagcgacgaagaaatgctgaaagaagaatcatagagtatgaaaagtccaaaaaagagtatttagaattgattgatgatgttgaaaaaggaaagacaaataaaatagtggttcttgagaaagaaggccatcagcgagtgaaaagatataaacacaagaattggcctgagaaatggcaaggtatttctttaaataaagcaaaaagtaaggttaaagatattgagaaaagaataaaaaagctcaaggagtggaaacaccctacactaaatcgaccatatgtcgagttacacaaaaataatgttaggatagtgggttatgaaacagtggaacttaaattaggaaacaaaatgtacaccatacattttgctagcatatctaatttacgaaaaccatttagaaaacaaaagaaaaagtccatagaatatctgaaacatctcctaaccctagcgttaaaaagaaatcttgaaacataccccagcataataaaaagaggtaagaatttctttttgcagtatcctgtgcgagtgacagttaaagtgcctaagctgacaaaaaattttaaagcttttggcatcgatagaggcgtaaataggcttgcagtaggttgtataatctcaaaagatggaaaacttaccaataaaaatatttttttcttccatggaaaggaagcgtgggccaaggaaaacagatacaagaagattagggacagattatacgctatggccaagaagttgagaggagataaaaccaagaaaataaggctttatcatgagattaggaagaaatttagacataaagtcaaatatttcaggagaaactatctgcataatatctctaagcaaattgttgagattgcaaaggaaaatacaccgactgtcatcgtattagaagatttacggtacttgagagaaaggacatatagaggaaaaggaagaagcaaaaaggcgaaaaaaacaaattataaattaaatacttttacttacagaatgcttatagatatgataaaatacaaggcagaagaagcgggagttcctgtaatgattattgacccaagaaacacatcacgaaaatgttctaagtgtggttatgttgacgaaaataatagaaaacaagcctcgtttaagtgccttaagtgtggttatagtcttaatgcagacttaaatgcagctgtcaatatagcaaaagctttttatgaatgccccacgtttagatgggaagaaaaattgcatgcatatgtttgttcagagcccgataaatag

SEQ ID NO: 67088 - DNA, 18 bp, unknown
  Direct Repeat
aatccctccccctgcact

SEQ ID NO: 67089 - DNA, 18 bp, unknown
  Direct Repeat
aatccctccccctgcact

SEQ ID NO: 67090 - DNA, 18 bp, unknown
  Direct Repeat
aatccctccccctgcatt

SEQ ID NO: 67091 - DNA, 36 bp, unknown
  Direct Repeat
ttgcagaacccaaagtaataggtcaaggaatgcaac

SEQ ID NO: 67092 - DNA, 36 bp, unknown; identical to SEQ ID NO: 67091
  Direct Repeat

SEQ ID NO: 67093 - DNA, 36 bp, unknown; identical to SEQ ID NO: 67091
  Direct Repeat

SEQ ID NO: 67094 - DNA, 36 bp, unknown; identical to SEQ ID NO: 67091
  Direct Repeat

SEQ ID NO: 67095 - DNA, 36 bp, unknown; identical to SEQ ID NO: 67091
  Direct Repeat

SEQ ID NO: 67096 - DNA, 36 bp, unknown; identical to SEQ ID NO: 67091
  Direct Repeat

SEQ ID NO: 67097 - DNA, 36 bp, unknown; identical to SEQ ID NO: 67091
  Direct Repeat

SEQ ID NO: 67098 - DNA, 36 bp, unknown; identical to SEQ ID NO: 67091
  Direct Repeat

SEQ ID NO: 67099 - DNA, 36 bp, unknown; identical to SEQ ID NO: 67091
  Direct Repeat

SEQ ID NO: 67100 - DNA, 36 bp, unknown; identical to SEQ ID NO: 67091
  Direct Repeat

SEQ ID NO: 67101 - DNA, 36 bp, unknown; identical to SEQ ID NO: 67091
  Direct Repeat

SEQ ID NO: 67102 - DNA, 36 bp, unknown; identical to SEQ ID NO: 67091
  Direct Repeat

SEQ ID NO: 67103 - DNA, 36 bp, unknown; identical to SEQ ID NO: 67091
  Direct Repeat

SEQ ID NO: 67104 - DNA, 36 bp, unknown; identical to SEQ ID NO: 67091
  Direct Repeat

SEQ ID NO: 67105 - DNA, 36 bp, unknown
  Direct Repeat
ttgcagaacccaaagtaataggtcaaggaatgcatg

SEQ ID NO: 67106 - DNA, 1593 bp, unknown
  TnpB Polynucleotide
atgcctaaacaagatttggtaactacagggataaaatttaagcttgatgttgataaagagacgaggaaaaagctagatgattattttgatgaatatggtaaggcaataaattttgcagtaaaaattattcaaaaaaatttaaaggaagatagatttgctggaaaaatagctcttggtgaagataagaagcctttattggataaagatggaaaaaagatttacaattatcctaatgaaagttgttcttgcggtaatcaagttagaagatacgtaaatgctaaacctttttgtgttgattgttataaattaaaatttacagaaaatggtataagaaaaagaatgtactctgctaggggaagaaaagcagattcagatattaatataaaaaactccactaataaaatctctaaaacacattttaattatgctattagggaagggtttattttagataaatctcttaaaaagcaaagaagtaagagaataaagaagttgctagaattaaagaggaaattacaagagtttattgatattagacaaggtcaaatggttctttgtcctaaaataaagaatcaaagagtggataagtttattcatccgtcttggttgaaaagagataagaaattagaagaatttagagggtattctctttcagttgttgaaggcaagataaaaatttttaatagaaatattttaagagaagaagattcgcttaggcaaagagggcatgttaactttaaagcaaatagaattatgctagataaatctgtcagatttttagatggggggaaggtcaactttaatcttaataaaggcttgcccaaagagtatttacttgacttaccaaaaaaagaaaataaactaagttggttgaatgaaaaaataagtttaataaaattacaaaaacctaagtatgcttatcttttaagaagagagggtagcttttttattcagtatactattgaaaatgtacccaaaacattttctgattatcttggagctattgggatagatagaggtattagccatatagctgtttgtacttttgtttctaaaaatggggtaaacaaagcccctgttttctttagtagtggagagatattaaagctgaaaagcttacaaaaacaaagagacttatttcttcgtggaaaacataataagataagaaagaagagcaatatgaggaatatcgataataaaataaatcttattttacataaatattctagaaatatagttaatttagcaaagagtgagaaggcattcattgtttttgagaagttggaaaaaataaagaaaagcagatttaagatgtcaaaatctttgcagtataagttatcccaatttacatttaagaaattatctgatttggtggaatataaagctaaaattgaagggataaaagtagactatgttcctccagaatatactagtaaagaatgttctcattgtggtgaaaaagtagatacccaaagaccatttaatggaaattcgagcttgtttaagtgtaataaatgcagggttcagctaaatgcagattacaatgcttctataaatatagcaaagaaaagtttaaatatctccaataactag

SEQ ID NO: 67107 - DNA, 36 bp, unknown
  Direct Repeat
tttcatactcagaacaaagggattaaggaatgcaac

SEQ ID NO: 67108 - DNA, 36 bp, unknown; identical to SEQ ID NO: 67107
  Direct Repeat

SEQ ID NO: 67109 - DNA, 36 bp, unknown; identical to SEQ ID NO: 67107
  Direct Repeat

SEQ ID NO: 67110 - DNA, 36 bp, unknown; identical to SEQ ID NO: 67107
  Direct Repeat

SEQ ID NO: 67111 - DNA, 36 bp, unknown; identical to SEQ ID NO: 67107
  Direct Repeat

SEQ ID NO: 67112 - DNA, 36 bp, unknown; identical to SEQ ID NO: 67107
  Direct Repeat

SEQ ID NO: 67113 - DNA, 36 bp, unknown; identical to SEQ ID NO: 67107
  Direct Repeat

SEQ ID NO: 67114 - DNA, 36 bp, unknown; identical to SEQ ID NO: 67107
  Direct Repeat

SEQ ID NO: 67115 - DNA, 36 bp, unknown; identical to SEQ ID NO: 67107
  Direct Repeat

SEQ ID NO: 67116 - DNA, 36 bp, unknown; identical to SEQ ID NO: 67107
  Direct Repeat

SEQ ID NO: 67117 - DNA, 36 bp, unknown; identical to SEQ ID NO: 67107
  Direct Repeat

SEQ ID NO: 67118 - DNA, 36 bp, unknown; identical to SEQ ID NO: 67107
  Direct Repeat

SEQ ID NO: 67119 - DNA, 36 bp, unknown; identical to SEQ ID NO: 67107
  Direct Repeat

SEQ ID NO: 67120 - DNA, 36 bp, unknown; identical to SEQ ID NO: 67107
  Direct Repeat

SEQ ID NO: 67121 - DNA, 36 bp, unknown
  Direct Repeat
tttcatactcagaacaaagggattaaggaatgcaag

SEQ ID NO: 67122 - DNA, 1809 bp, unknown
  TnpB Polynucleotide
atgctggcgctgaaactcaagcttgagcccacagaggagcaactgccgctcctggatgcgatgttcgtgaagtgggcatacctggccacaagggcggccaagcaaagagagagttggaaggacgatacaaagaacatggaaaagaaagcgcctatttttacaagaacccaaatcgcgcataaaatacaggatgatatcaaagctgcggaagatggcttggagcaccagggaagaagaatcgggagagaaatcgaaaggaagcaggaatggctggattacataaaaaagctaatcgaagacgaaacagtaagggaatataatccgaaaggacgtggctcgtttagaatgaaaggcagaaagggaaagttcagaacattaaaagcatggaacgggactctggaagagaatgagaaggtcataaaaaagaaaaaaacaactttggagagaataaagaatgggctcataaagtataagcccacgaggataacactttgggaatcgacctattcctttgacttctcaggaaaaaatatagaattaaggattcttgaggataccccgttaacgatatcgtatgtagacgcaccattttcagaaaaagggagttccaacaaagcgagtgccgagtatataaaaaatgccatacggcagtttgtcatatacgcgctacattcgcattactttgtcggctttagacagtatgaaaaagcatggttcaaatcaagcaaaccggaatcgcgggaaaaggcaaaagccgcacttcaaaagaagattgaaaaggttcgggaagaaacgccaaaactagcgaaaaagtttcttggaaaggaacttgaccttgggaatgcggactggattgaagacgctgttaaacgcgagataggcggggaaggcggaccgcacggagaatacttgaaattgctggagaagatggcagacaaaatactcaatgacggaagatttaatccggaaaagtatcttatcctgctaagaaaacctttgaaatccaagatgtacaaaaaactggcaaacctcaaaccaaacgaatggaagtattatgtgcaaataacttacgagccactatatgctgagagaggggtggaagaaaaaaccataatgggcatagacaggggagtcagtcacctcctggcgatttctgtcttagacccaaaaacaggcagattctttgaaaatcagcttgttcccaacccagtaaaaaattggagaagggagaggagaaaactacgggcttcgattaggaatacggagaggagcgtcagggctgaaaccgggcagcacattcaggaagcccagataaaaaagaggctgaagtctatcacggatagagtagacgattactaccataatgtttcccgaaatgttatagatctagccaaaaagcacaaatcagcgatagtattcgaagacctgggagacctgcgcgtccatgcgagaaagaaaagcaaatatgttaaagagcgcgattacgtgctcagcctttttgattatcagggaatctacaaattgattgagtacaaagcacgaaaggaaggtttgacagtatacgtcgttgacccaatagacacgagcaacaggtgtgcaaaatgcctgattaaaaattacggcaaaagcgagtatcagaggggcattaaaacaaacccgaatgacagatacggaaatcctaaagtcggcaaatgtgtgaactgttgcggggagggcaaagattaccaaatagacgctgacctgaatgctgccagagtaatagcactctgcaaacaaaaaggaataaataatcctcgtcgcgtatcatag

SEQ ID NO: 67123 - DNA, 1812 bp, Candidatus Aureabacteria sp.
atgaagtcatttaagctaaagttgttgccaacagatgagcaaaacgttcttttaaatgaagtgttttgtaaatgggcatcattatgtaccagaatggcgtctaaaggacacgataaagaacgactggcgcctcctgattcaagcgggaattattttaacaaaacacaactcaatcaggtgaatactgatgtaactgaccatatgggtgcgcttgaagagtcagcaagtcaaaaagaaagagcagttgagaaagtcaaaagaaggttgaagctgatttcagatatgctctctgagccaaatttaagggatgtttctcaacaaaaaccaaccacgttccgtccattagagtgggttaaggagggtctgttaaaaacaaaataccatactgtgcattattggcaaaaggaatgtgataagttaacaaaacaaaaagaacgaatggagaaaacaattgagaagataaagaaagggaagataacgttcaaaccaacaaagatgtccctgcaccaaaattgtttttcgttatcattcggaaagggaacgttttcaatgcggccttttagcgacactaaacgaggcataaatcttgatatgctaactgctcccattcaacctgcaataggaaaaaacgatggcaaatcatctttgaggagcaaagagtttatcgcaaggaatattgaaaactacattattttttccatccactcacaactatttgggctgagcaggtcagaagaactgttgttaaacgcaaaaaaagaggaactcgttgctaagcgagatgcaatgctcaaaaagaaatctgattcgctaagtaaaaaaataaaggaattagaaaaaatagtaggaagaaaaattactgattcagaacgttcagagataatgtctcagggcggcaaattgtcttctgaaaagttcagtgaagataattcatatttgaaaacgttaaaggtgctggcaaaagacattattgggcgagaggaattgttcagacttaagaagtacccgattgtgattagaaaacctctcaacgaacgaaaaaagctcaaaaatcttaaacctgacgaatgggaatattatttacagttgagttatgatgagttggaaaagaaagagtttacaccaaagacaattatgggaatcgatagaggactaaaacacattcttgctattgcgatttacgaccctgtgcaaaataaatttgtaaaaaatatgctcattccaaatccgatattaggttggaagtggaagttgcgaaagataaaaagaagtattcaacatatggaaaggagaatacgggctcagcaaaatgctcacgttcctgagaatcagttgaaaaaacggttgaaaagtattgagaacaaaattgattattactatcacaatgtgtcgcggcaaatattgaatctcgctcacgatttcaaatcagcaatagtggtagaagacttacagaatatgaaacaacacggaagaaagaaatcaaaaggactaagaggactaaactacgcattaagtaactttgactatggaaaaattatgggtcttgttaagtataaagcagaatcagagaatgtgcctcttcttaccgtgttgcctgcaggaacgagtcaaaattgcgcgtattgtctcttgtacggaaaagaacaaggaaattatgtgcggaataatgtcaacagtaaaataggcaagtgtaagcttcatggagaaatagatgcggacatcaatgcggcaaggacgattgcgatttgttatcataagaatattaatgaaccaaaaccatatggtgaacgaaagacttttaaaagaaagtaa

SEQ ID NO: 67124 - DNA, 23 bp, Candidatus Aureabacteria sp.
gttgcagatgtggagaaatagag

SEQ ID NO: 67125 - DNA, 23 bp, Candidatus Aureabacteria sp.
gttgcagatgtggagaaatagag

SEQ ID NO: 67126 - DNA, 23 bp, Candidatus Aureabacteria sp.
gttgcagatgtggagaaatagag

SEQ ID NO: 67127 - DNA, 23 bp, Candidatus Aureabacteria sp.
gttgcagatgtggagaaatagag

SEQ ID NO: 67128 - DNA, 23 bp, Candidatus Aureabacteria sp.
gttgcagatgtggagaaatagag

SEQ ID NO: 67129 - DNA, 23 bp, Candidatus Aureabacteria sp.
gttgcagatgtggagaaatagag

SEQ ID NO: 67130 - DNA, 23 bp, Candidatus Aureabacteria sp.
gttgcagatgtggagaaatagag

SEQ ID NO: 67131 - DNA, 23 bp, Candidatus Aureabacteria sp.
gttgcagatgtggagaaatagag

SEQ ID NO: 67132 - DNA, 23 bp, Candidatus Aureabacteria sp.
gttgcagatgtggagaaatagag

SEQ ID NO: 67133 - DNA, 23 bp, Candidatus Aureabacteria sp.
gttgcagatgtggagaaatagag

SEQ ID NO: 67134 - DNA, 23 bp, Candidatus Aureabacteria sp.
gttgcagatgtggagaaatagag

SEQ ID NO: 67135 - DNA, 23 bp, Candidatus Aureabacteria sp.
gttgcagatgtggagaaatagag

SEQ ID NO: 67136 - DNA, 23 bp, Candidatus Aureabacteria sp.
gttgcagatgtggagaaatagag

SEQ ID NO: 67137 - DNA, 23 bp, Candidatus Aureabacteria sp.
gttgcagatgtggagaaatagag

SEQ ID NO: 67138 - DNA, 23 bp, Candidatus Aureabacteria sp.
gttgcagatgtggagaaatagag

SEQ ID NO: 67139 - DNA, 23 bp, Candidatus Aureabacteria sp.
gttgcagatgtggagaaatagag

SEQ ID NO: 67140 - DNA, 23 bp, Candidatus Aureabacteria sp.
gttgcagatgtggagaaatagag

SEQ ID NO: 67141 - DNA, 23 bp, Candidatus Aureabacteria sp.
gttgcagatgtggagaaatagag

SEQ ID NO: 67142 - DNA, 23 bp, Candidatus Aureabacteria sp.
gttgcagatgtggagaaatagag

SEQ ID NO: 67143 - DNA, 23 bp, Candidatus Aureabacteria sp.
gttgcagatgtggagaaatagag

SEQ ID NO: 67144 - DNA, 23 bp, Candidatus Aureabacteria sp.
gttgcagatgtggagaaatagag

SEQ ID NO: 67145 - DNA, 23 bp, Candidatus Aureabacteria sp.
gttgcagatgtggagaaatagag

SEQ ID NO: 67146 - DNA, 23 bp, Candidatus Aureabacteria sp.
gttgcagatgtggagaaatagag

SEQ ID NO: 67147 - DNA, 23 bp, Candidatus Aureabacteria sp.
gttgcagatgtggagaaatagag

SEQ ID NO: 67148 - DNA, 23 bp, Candidatus Aureabacteria sp.
gttgcagatgtggagaaatagag

SEQ ID NO: 67149 - DNA, 23 bp, Candidatus Aureabacteria sp.
gttgcagatgtggagaaatagag

SEQ ID NO: 67150 - DNA, 23 bp, Candidatus Aureabacteria sp.
gttgcagatgtggagaaatagag

SEQ ID NO: 67151 - DNA, 23 bp, Candidatus Aureabacteria sp.
gttgcagatgtggagaaatagag

SEQ ID NO: 67152 - DNA, 23 bp, Candidatus Aureabacteria sp.
gttgcagatgtggagaaatagag

SEQ ID NO: 67153 - DNA, 23 bp, Candidatus Aureabacteria sp.
gttgcagatgtggagaaatagag

SEQ ID NO: 67154 - DNA, 23 bp, Candidatus Aureabacteria sp.
gttgcagatgtggagaaatagag

SEQ ID NO: 67155 - DNA, 23 bp, Candidatus Aureabacteria sp.
gttgcagatgtggagaaatagag

SEQ ID NO: 67156 - DNA, 23 bp, Candidatus Aureabacteria sp.
gttgcagatgtggagaaatagag

SEQ ID NO: 67157 - DNA, 23 bp, Candidatus Aureabacteria sp.
gttgcagatgtggagaaatagag

SEQ ID NO: 67158 - DNA, 23 bp, Candidatus Aureabacteria sp.
gttgcagatgtggagaaatagag

SEQ ID NO: 67159 - DNA, 23 bp, Candidatus Aureabacteria sp.
gttgcagatgtggagaaatagag

SEQ ID NO: 67160 - DNA, 23 bp, Candidatus Aureabacteria sp.
gttgcagatgtggagaaatagag

SEQ ID NO: 67161 - DNA, 23 bp, Candidatus Aureabacteria sp.
gttgcagatgtggagaaatagag

SEQ ID NO: 67162 - DNA, 23 bp, Candidatus Aureabacteria sp.
gttgcagatgtggagaaatagag

SEQ ID NO: 67163 - DNA, 23 bp, Candidatus Aureabacteria sp.
gttgcagatgtggagaaatagag

SEQ ID NO: 67164 - DNA, 23 bp, Candidatus Aureabacteria sp.
gttgcagatgtggagaaatagag

SEQ ID NO: 67165 - DNA, 23 bp, Candidatus Aureabacteria sp.
gttgcagatgtggagaaatagag

SEQ ID NO: 67166 - DNA, 23 bp, Candidatus Aureabacteria sp.
gttgcagatgtggagaaatagag

SEQ ID NO: 67167 - DNA, 23 bp, Candidatus Aureabacteria sp.
gttgcagatgtggagaaatagag

SEQ ID NO: 67168 - DNA, 23 bp, Candidatus Aureabacteria sp.
gttgcagatgtggagaaatagag

SEQ ID NO: 67169 - DNA, 23 bp, Candidatus Aureabacteria sp.
gttgcagatgtggagaaatagag

SEQ ID NO: 67170 - DNA, 23 bp, Candidatus Aureabacteria sp.
gttgcagatgtggagaaatagag

SEQ ID NO: 67171 - DNA, 23 bp, Candidatus Aureabacteria sp.
gttgcagatgtggagaaatagag

SEQ ID NO: 67172 - DNA, 23 bp, Candidatus Aureabacteria sp.
gttgcagatgtggagaaatagag

SEQ ID NO: 67173 - DNA, 23 bp, Candidatus Aureabacteria sp.
gttgcagatgtggagaaatagag

SEQ ID NO: 67174 - DNA, 23 bp, Candidatus Aureabacteria sp.
gttgcagatgtggagaaatagag

SEQ ID NO: 67175 - DNA, 23 bp, Candidatus Aureabacteria sp.
gttgcagatgtggagaaatagag

SEQ ID NO: 67176 - DNA, 23 bp, Candidatus Aureabacteria sp.
gttgcagatgtggagaaatagag

SEQ ID NO: 67177 - DNA, 1173 bp, Haloarcula amylolytica sp.
atgcagaccagcatcagtgagttcactgctggcactgacgaactcgacattacccggacgatccggtgtaagctcgccaccagcaacgagaaaaacgagactgtccgtcgtgggatcgaggcctaccagcaggtcgccagccacatggctgatgtgctgccgtcctaccccgcatatgagtggaacctccagaacacgcagatgtatcatcaggccaagcgagcgctcccagatgatgatgtgcggtataaaaccacgctcgcacagatggccaagaacgatgtcgtcgagtcgttcaccagctggcgcgaacgtggtgaagacgggacgttgcctcgtggccagtacggtgacgctgactacctcagcctccggcatgacgactgcgagattcacgcgaacgacaagggctggggtgtcaagacgagctttatcagctacaatccagtgtggttccacattcacgctggagactatcagcggcagtttctcgaacgcgtgactgatgacgatgatccggcaagcgccgggtctgccgaactccatctccacgacgacgggacgctgtacctccaccagacgatcacatggccagttgaggtctaccagcccgccgaggtaagtaccgtcgttggcgttgacctcaacgatgatccactagtctgtgcagctgtcgtcgacgacggtgatgtcgtggctgtcgagttggagtcgggtgcggagtatcgccaccatcgcgagcgggtgaagcgtcgccggagcgaggcgatggagcgcaacgacctgaaagccatcaaggacgctcgactccagtacaagcgctacaccgatcacatcaccaacgtcgccagcaaacgtgtggttgacgtcgctgaagagcatgctccggcagtaatccatttggaagatctcacccactatcgcgagactgccgaggacccaattcacgactggcccttcgccgagatccaagagaagatcgcgtacaaggcccacgaggctggcattccagtccaggtaatcgacccacgcaacacgagtgttacgtgccgcaagtgtggggaaaccaatccagccatgcgggatggcgatgacttcgagtgttgggaatgtggatacgaggtccatgcggacgtgaatgccgcgatcaacatcgcaaatacagatccatag

SEQ ID NO: 67178 - DNA, 29 bp, Haloarcula amylolytica sp.
cttcaaccccacaaaagattcgtctgaaa

SEQ ID NO: 67179 - DNA, 29 bp, Haloarcula amylolytica sp.
cttcaaccccacaagggttcgtctgaaac

SEQ ID NO: 67180 - DNA, 29 bp, Haloarcula amylolytica sp.
cttcaaccccacaagggttcgtctgaaac

SEQ ID NO: 67181 - DNA, 29 bp, Haloarcula amylolytica sp.
cttcaaccccacaagggttcgtctgaaac

SEQ ID NO: 67182 - DNA, 29 bp, Haloarcula amylolytica sp.
cttcaaccccacaagggctcgtctgaaac

SEQ ID NO: 67183 - DNA, 29 bp, Haloarcula amylolytica sp.
cttcaaccccacaagggttcgtctgaaac

SEQ ID NO: 67184 - DNA, 29 bp, Haloarcula amylolytica sp.
cttcaaccccacaagggttcgtctgaaac

SEQ ID NO: 67185 - DNA, 29 bp, Haloarcula amylolytica sp.
cttcaaccccacaagggttcgtctgaaac

SEQ ID NO: 67186 - DNA, 29 bp, Haloarcula amylolytica sp.
cttcaaccccacaagggttcgtctgaaac

SEQ ID NO: 67187 - DNA, 29 bp, Haloarcula amylolytica sp.
cttcaaccccacaagggttcgtctgaaac

SEQ ID NO: 67188 - DNA, 29 bp, Haloarcula amylolytica sp.
cttcaaccccacaagggttcgtctgaaac

SEQ ID NO: 67189 - DNA, 29 bp, Haloarcula amylolytica sp.
cttcaaccccacaagggttcgtctgaaac

SEQ ID NO: 67190 - DNA, 29 bp, Haloarcula amylolytica sp.
cttcaaccccacaagggttcgtctgaaac

SEQ ID NO: 67191 - DNA, 29 bp, Haloarcula amylolytica sp.
cttcaaccccacaagggttcgtctgaaac

SEQ ID NO: 67192 - DNA, 29 bp, Haloarcula amylolytica sp.
cttcaaccccacaagggttcgtctgaaac

SEQ ID NO: 67193 - DNA, 29 bp, Haloarcula amylolytica sp.
cttcaaccccacaagggttcgtctgaaac

SEQ ID NO: 67194 - DNA, 29 bp, Haloarcula amylolytica sp.
cttcaaccccacaagggttcgtctgaaac

SEQ ID NO: 67195 - DNA, 29 bp, Haloarcula amylolytica sp.
cttcaaccccacaagggttcgtctgaaac

SEQ ID NO: 67196 - DNA, 29 bp, Haloarcula amylolytica sp.
cttcaaccccacaagggttcgtctgaaac

SEQ ID NO: 67197 - DNA, 29 bp, Haloarcula amylolytica sp.
cttcaaccccacaagggttcgtctgaaac

SEQ ID NO: 67198 - DNA, 29 bp, Haloarcula amylolytica sp.
cttcaaccccacaagggttcgtctgaaac

SEQ ID NO: 67199 - DNA, 29 bp, Haloarcula amylolytica sp.
cttcaaccccacaagggttcgtctgaaac

SEQ ID NO: 67200 - DNA, 29 bp, Haloarcula amylolytica sp.
cttcaaccccacaagggttcgtctgaaac

SEQ ID NO: 67201 - DNA, 29 bp, Haloarcula amylolytica sp.
cttcaaccccacaagggttcgtctgaaac

SEQ ID NO: 67202 - DNA, 1269 bp, unknown
  TnpB Polynucleotide
atgaacgataatatgtacacccggacgatccagattccggtggcacggttgactgccacgaaggccgggaagctcgcccgcgcgatgaaggactaccggcgagcacgggcagaaacgattacgtacttccgggaggagggcgaccccctggatttcagctacagtgaacgcgagaaacttcgcaaacgactcggggctcatgatcggatcgacctaccctcgcgggtgttgtatccggcgatcacgacggttgagcagaactacgccgagtacgagaaggggcagttcgactcgccgccgaccgcggaccgagcggacacgctcgcactagaaggtcagaacgcgcggatatttcacaccggcgggcgctactacctcgacgtgccgacgggccggggatcggtcgcctgtccgctccgcacctcggacgatgactggcacgcgcgacgtcttccccagccggaggcgatcccgccggaggggcgctcgcggacaggagtgcccttcgccgatctcgacgccgatgacttccccgataacacggtcaaactctcgacgtcaacgctcacgcagcggggcacgcgatcgttcgtggcgaacttcgtgttccagcacgcaaagcgggtgcaacagccaagcaacacggcacagtacgtcgtcggagtcgatcgcggccggaaccaactcctcaccgcggccgtctacgatgtcgagcgcaatcacgtcgtggactggcttcacgtcgggggcgacgaggtggaacactacatggatcgcttcgctgaacggattcgcgagttccagcaagcgggcgtctgggagcagatggaagctgcccgcaggcgacggtttcggtacaagcgtcagcgcgactacgaagctgccgggcaagtggttgatctcgcccgcgagcggttcagcatcaggattgcggtcgaagacctgtcgtcgatgggccggctcggagggtacgcccgcgagtcgcggcggttcgcggaatggtcgttcgggcggcagcgagatgccatcgctcggaaggcagaaccttacgacatcccggtggtatcggtcgagccacgccacacgtcgcaagtgtgctcgtggtgtggcagcgacgacacccatcgcgagagtgtccacttcgcgtgccgggcgtgcgggtacgaacagcacgctgacgcgaacgcggcggtcaacatcgccaagcgggcagtcggcgtcggcccgctggcgagcgagaccagcgaaccgacagaggtaacggcatga

SEQ ID NO: 67203 - DNA, 20 bp, unknown
  Direct Repeat
ccgtcgaccggtgctgtgag

SEQ ID NO: 67204 - DNA, 20 bp, unknown
  Direct Repeat
ccgtcgaccggtgctgtgag

SEQ ID NO: 67205 - DNA, 20 bp, unknown
  Direct Repeat
ccgtcgaccggtgctgtgag

SEQ ID NO: 67206 - DNA, 20 bp, unknown
  Direct Repeat
ccgtcgaccggtgctgtgag

SEQ ID NO: 67207 - DNA, 1197 bp, Thermus tengchongensis sp.
atgaaggtcgtgcacagagtggtgcaaggttgtcttgagatcggcaagtcggagcgggaaagcgtttcggtcctcctggaaacctaccagagtggtctctccctcgtgcacaagcttttcagttcaagcggctgccaaggggaggatgcccacgagatgtaccggcttcttcggcaagggcttgggctccccgcggtttatgcgaacgctgcgctccgccaaggtcgcttccctactccccgccccaccctgcacctgtacgctaaggccttcaccctggacttgacgacccatccacccctactctccctacgcgttttggagggacgaacttgcgctctcctgaacacgagcgcacgaaacctctccctcctcctcgcctaccccccaaagtacggggagatctggaaagatggggatcgcttttacatccggttttccctggcgatcccagttcccgagccgccggcggatcccacgcatgtggtaggggtggacgtgggggagtggtgcctcctcgcgacctcggacggcgccctctacgccgctgaccccctgcgcgaagcgctggaggaaatggtgaggctttcccaaaggcttcgcgtaagcaaacgggccaggaaggcctacaaagaggaacaacgtcgggcgaaccttctgcttcgtgcgagcgttaaccacttcctgcgctcccttccccctggttccctcatcgtgctagaggacctgcgaaggatcagacagggcgcagcgcgctccaaggaccgccgcaccttgttccacttttggccgtacggccgcgtgcgaaagctcataatggaaaaagccgagtggctcgggcacgctgtgaagatcgtgtcccctgctcatacctcagtgacgtgcccctgctgcgggaccgtggacgcccgcaaccgccggggcgcggaattccggtgcacaaactgcggattccatggccatgctgaccttgtggctgcgctcaacctgcgcagccgcggaatgcccacacgggccatgcaaccgggcccggcgtatcccctgagggttttcgtgcccactacctcaggggtgcgcgaatccccgcttgggggaacggtgcaaggaaatgccgagtccaaacgggggctcggcaacatcttcaaggggaacctaaaggaaacacagccgtcagatcctagcttttcgtctccttga

SEQ ID NO: 67208 - DNA, 1143 bp, unknown
  TnpB Polynucleotide
atgtcgcaagagacaaaaactgaaacgtgtattcgaacgatccctctcgagctccagacgagcaattggaagaatgacggggttcaggaattcattgacgaaatgggagatgtcatggagtggatgtgctccatacttccaacgtaccctgtacatcgttgggggaacgatacccatctgtacagacacatgggaaaacaattccctgacgaagaacggagctattacgccaatcactatcaagctgcacagacaaaggtgatctcttcgttcaattcctgggattcaaacggtcgtcctggaaacaagccaactccgtcttcaggaaacttcgcaccaatgagtgcgaactatatcaaaatagaaaaaaacaatggatcgtttggtgttcatctcaaatttgagccatatacaagtgggctcgatctctggtttgggatcaacgactcgccatactcgagactatatcttgaagatgtaatagacgacaacgaaaccagtattggtggaagtgaactccatcttcacgacgatggatcactgtaccttcatctcgttgtaaaatggccagtagaggtttacaagaaagacactgtagatcggtatcttggtgtcgatctcaacatagatccaatggttgcgatgactgtggtggactctgacggtgaaatagatggtgttgaaatggagagtggtaaagagttccagcaccacagagaacgtctgaagaaaaagaaggctcaatcacaaaagaacagaagcgagcaccgtgtactttggcaaaaatatactgacaacatcacaaacaatgcttcgcgtagagtcgtcgactacgcagccgaaaacgcacccattgtaatcagactcgaagatctcactcactaccgagaatcagcacagaatccaatacatgactggccgtacgcagaaatccaaaacaagatcaagtacaaagcacttgcaaaacgaattccagtcgaaatggtaaatccacggtacacctcgatcacatgccgaaagtgtggggtgacgaataaaacgtccaggatcactcgagacaaatttgactgctgtaattgtgactacgaagtcgacgccgatgtcaatgcagcctacaatattgcgactggtggagtagtttag

SEQ ID NO: 67209 - DNA, 27 bp, unknown
  Direct Repeat
gttcgtctgtaacgtgttgctcccaaa

SEQ ID NO: 67210 - DNA, 27 bp, unknown
  Direct Repeat
gttcgtctgtaacgtgttgctcccaaa

SEQ ID NO: 67211 - DNA, 1404 bp, Halomarina oriensis sp.
atgcctcaggaccccccagatgccacgctgtcagccgtgttcgaagatggctatcaaagccttctcgatgagttcgtcgaggcagagggggtgtggaacccgcaggtcgagttactcgatgaggccccgaccaacgcagggccacggcaattccatcacacctgggagaccgactcactcaaagaacgattgacgtacatcctcccgctcagcgtgggcacacggaccgcttcacatctcgacaattacatcagcgaagcccaaacgatccgccggctcgcggcgaacttgctctggtcgtatgaaccggcccaatggggtggcaactccgacgtcaacagtctcatcaaaactcacccctactggaaacggaacaacctcaaggccgggaacaagcaagccaacgtgaataaagtgggcgaggcgttcggggcgtgggcagccaacgaccggtcggccgacacctcggccttgccgcagttcgggtcgggaaactatctgtgcatccgtggcgattacatcgaggtgtgggacgacgccgctggcgtcacgatcgcggtgggcggcgtgcagcatcagccccccgacccagggcgggacgaggaatttcagctcgtctgtggtgggggcgactaccaacagaaagtgctcgacgctgtggccgaaggtgtggtcaataccgggcgctcggaggtccaccatcgagatggggagtggtttctccacctgacggtgtggtacaaccagcccaaatacgatcatcgagagcttgagcgctgggtcgggatcgatctcgggacggtcgcgttgtacacggccgcggtcgtcgagcgcgctcccgattcaccgaaaggaaacggggttgatgtgctggaggttgctcatgggccgggcagcgagctcatggacacccgccggacacagcaacagcgcctgtcgtatcttcaggaggaatacgggtacgaggtggccagcgagaaactcggccagcaactcgccgaacacagcaaacagctcgaacacgagtacgccaacgagatcgtcgcgctagccgatgcgtacgccccctgtgggatcgtcttcgagaccctcaaagggatcaaagggcttgggtggtcgcatctgtgggcgtatttccggttcaagcaggtgatcacctacaaagcccaccaacgggggattccgacagtcacgctcgggaagagccagacccaacataccagtcaggactgctcggcgtgtggccgccggacgagcgaggccgacgacgatggacgcattacacgcgcgcagtttcgctgtgacgactgtgggtatgggccggtcgatgccgacagcaacgcggcgatcaacattgccacgcggcggctttcaacactgttttcggagtgcgggcgctactag

SEQ ID NO: 67212 - DNA, 29 bp, Halomarina oriensis sp.
gttacagacggacccttgtggggtcgaag

SEQ ID NO: 67213 - DNA, 29 bp, Halomarina oriensis sp.
gttacagacggacccttgtggggtcgaag

SEQ ID NO: 67214 - DNA, 29 bp, Halomarina oriensis sp.
gttacagacggacccttgtggggtcgaag

SEQ ID NO: 67215 - DNA, 36 bp, Halomarina oriensis sp.
gtcacagtaccctagaaacccaacacgggattgaaa

SEQ ID NO: 67216 - DNA, 36 bp, Halomarina oriensis sp.; identical to SEQ ID NO: 67215

SEQ ID NO: 67217 - DNA, 36 bp, Halomarina oriensis sp.; identical to SEQ ID NO: 67215

SEQ ID NO: 67218 - DNA, 36 bp, Halomarina oriensis sp.; identical to SEQ ID NO: 67215

SEQ ID NO: 67219 - DNA, 1197 bp, Natrinema versiforme sp.
atgctcaaccgacagatcaaaaactacctcctggcacgccagtatgccgctaaacacttccagagcgacggcgtggtggccagcgatctaacgtactccaaacgcaacgagcttcggaagtctatccgcacaaagcccgatgtcgatttgaatgcacggtcgattgaagtggccataaccaggatggcgaaagactacagcaaatacgaaacagatccgcgggcgagtgaaccgtggcctgagggtgtcaacatcattgcttactctgcacagacggcatatctgttccacgatactggtcggtactatctttgtgtccctgggaagaacgaccacctgatccttccgttagttgtgtctgacgatcaataccaccaagaagctctgcctaatcccgaggccgcgaaggacagtggacgccggccgggaacagcgttggaagatttcggaccaagcgatttccaagggacggctgtcggacttggacagtgttcggtagtgaaacgcggtcctcgagagttcgaactccacctttcggtgaaacgcgagcagaaggcgtcacgcaatgttactacgccgcggtacattgtcggtgtcgatcgcggccgcaaccaactcatctacgcagcgctttatgatcgaaaggaggatcatgtgaaacagtgggtgaatgtttccggggacgaggtcgagaacatgatggatcaagtcgccgatcgaatcgctgaatgccaacaggctggcgtgctcgaggagatggacaaactccgaagacggcgacgccggttcaagcgacaaaaggactacgaggccgcaaatgagattgttgacttggcacatgaaggtctgcgcggacagtccacactcgagtcatatggcgttgtaatcgtgctcgagtatttatctggtatgagtcggctaggtgggtactcggcagagcgaaggcggttcgctgaatggtcgtactaccggcagtatctggcaatcaaaaacaaagccgaaccatacgatattagtattgaatcggtcgaatcagcctacactagccgaaagtgcgcgcggtgcggtgtcgatggtgatgaaacacaccgttcgggcatacacttcgagtgcgaatcgtgtgggtacgagatccacgccgacgcgaatgcggccgtaaatatcgcaaagcggtatgcagaatcgcttgaagcgtaa

SEQ ID NO: 67220 - DNA, 1233 bp, unknown
  TnpB Polynucleotide
atgcgactgttcagggagattgctaacgaggtctccaaaatggcatttgcggcgcgagagcaagtgaatggttaccccagtttgcgcaaacattgttaccccgttctccgccagcgctaccctactgttaacagccgagtgttggagtatgtcctcaaggttgttgctggcgcttattcgaagaagaatagcaagaagctggagaagcctgctgagttcaagagggactttgccttgttcgacaagaggctttttaggtttaatgggcaaaccctaacgatttggacagtggcggggcgtaagagctttcctttcttcctcgtgccctccagacgatttctgaattggtggaaaaggaaaacagatatagatagcattatttttaaaaagtgtggcgacaacattatcgctcatgtgtgcctaactgttcccgagccgcttcctgtcacacctcggcgttttgtcgggatagacttgggcgctagctgcccgctcgtcgcggtgcgagacgacggaaaaatcttcttccccgatttcagcgagtttcaccgcaagcgcgaggagtggttcgaagaacgacgccacttgcagtggaagttggcaatgcaacgcactctcggcaaggacgcacacaacacaattagagcacttaggagattatcgcgcaagcagcgacactttacccgccagtttgttcgctgggttgtcagccgtctcttgacttgggctggcgacgcagttataattgtggagcggttgagattaccgaaggggaagaaagttaagggggcaaagaaattgaacagaatattgtcactcatgccctacgggcttattcgaaatactctcgtgcagaaagcggaagaattggggttggaagtgcggttcgttgaccctaagggcacttcgcaaacctgtccgcagtgcggcgaacgcggagaaagacccaacagagatttatttaaatgcccctcgtgcgggttcagttgccacgccgacattgtaggtgcaatgaacattttaaggcaaggtttgcaaagttattcccaaagtggggctgaggctggggacaaaccagccggtagacctttccagccccttgagacctgcccgccttccgaaagggaggcgggaacgtggaatctcactatagtcccccaggaggagaggttgcagtcgacctccaagcgaaaacgagcaatcgggggtcgactgcaacccagtttgttttga

SEQ ID NO: 67221 - DNA, 22 bp, unknown
  Direct Repeat
ggggactatggtgggaagaaag

SEQ ID NO: 67222 - DNA, 22 bp, unknown
  Direct Repeat
ggggactatggtgggaagaaag

SEQ ID NO: 67223 - DNA, 22 bp, unknown
  Direct Repeat
ggggactatggtgagaagaaag

SEQ ID NO: 67224 - DNA, 22 bp, unknown
  Direct Repeat
ggggactatggtgggaagaaag

SEQ ID NO: 67225 - DNA, 1383 bp, unknown
  TnpB Polynucleotide
atgtcgaacgtgagcccgccagcaccgccgtctggtgttgagacgacgacggaatcggtcacgcgaacggtagtcgtcccgttagagacgagcgagcggaaaaatcaggtcgtcaaagccgcgctcgggccagttcaacgggtcatggcccggacggcagataccctcccctcgttcccggagcggacgtggggcgggcgctcgacccaactctatcgccagcaggtcaaagaccgtcccgatagcgagcgcgagatcacgcttccgtccggcgagacgaagaaattgaaggcacaggttccccaggccgctttccagaccgtctccagcaatttcaaaacctggcggacgaacgggaagcgcggtgatccaccgtctcgcgaccagtatctgagcgcgtcgtatctcccgctcaatggcgacactatcgacatcgtcgcgaacgaccgtggctacggcctcgaggctgatttcatctcgtatggcgactcggtgtggtggcacgcagccacgtcccagtaccaccgccggtatttcgagcgtgtcgtcgacggcgaagccgaagcgggctacaccgagttgcatctcgacgatgacggcggattgacggcgcatatcagcgtctcgtgggacgtcaaggtgatcgacgccgaggacatcgaccgctacttgggcgtctatatctcgccgtcggtcctctacagcggcgcggtcgtcgatctcgacccgacgcgaaacgtcgaacaggtcctcccgttcgcggcgggctcgactgacgccgacgctggtagcggtggtgagcgtcccgacaggggcggtaccgacgggcgtccgacccccgaggagcggttcacgggcgcacctatcgacgacgtccggggggtcgcggtcgaaaaggccgacgagtaccgccaccaccgggcggtgatccgcaaccagcgcgagcgccggtcggaaaacggcgaccttcgcggcgtcaaacaggcgcgaagcgaatttcgccgctacaccgaccacatctgccatgtggcaagtcgggatatagtcaacctcgctcgcgagcaccagccgtgtgcgatccggttgaccgacctagacaacatccgcgaggagcttgacgttgaggaggttcaccgctggccgtaccgcctgattcaggaaaatattatctacaaggcaactgcggcggggattcccgtcgagacggtcccgacgccgtacatccgccggacgtgtcggcggtgcggcaccgccgtacaacaggtgggctcgacgttcaactgtcacacctgcgggtacgatgtcgacgcggcggtcaacgcggcgtgcatcgtcgccgctggcggcgttcaggacgaggtcgttgacggagccgacggatag

SEQ ID NO: 67226 - DNA, 23 bp, unknown
  Direct Repeat
cctccaaccccactaggggtcta

SEQ ID NO: 67227 - DNA, 23 bp, unknown
  Direct Repeat
cctccaaccccactaggggtcca

SEQ ID NO: 67228 - DNA, 23 bp, unknown
  Direct Repeat
cctccaaccccactaggggtcca

SEQ ID NO: 67229 - DNA, 23 bp, unknown
  Direct Repeat
cctccaaccccactaggggtcca

SEQ ID NO: 67230 - DNA, 23 bp, unknown
  Direct Repeat
cctccaaccccactaggggtcca

SEQ ID NO: 67231 - DNA, 23 bp, unknown
  Direct Repeat
cctccaaccccactagaggtcca

SEQ ID NO: 67232 - DNA, 30 bp, unknown
  Direct Repeat
ccaagtgtccgtctggaaggtggcttgaga

SEQ ID NO: 67233 - DNA, 30 bp, unknown
  Direct Repeat
ccaagtgtccgtctggaaacaatggaaccc

SEQ ID NO: 67234 - DNA, 30 bp, unknown
  Direct Repeat
ccaagtgtccgtctggaaggacatcctggc

SEQ ID NO: 67235 - DNA, 1134 bp, unknown
  TnpB Polynucleotide
atggatacagtcaatccaacgcgaaccgtcgtctgtccgctcgaaacgagtaaccgaaagaacaagcgcgtcgagaaggcgatagccgactggcaacggcttgccgagcgcatagggaatttgctcgtggggtttcccgaacaccgctggggaaacgagaaagatacgcacttgtaccgactactctcccgtgaggcagagaagatggacgtgtcgctgaaaaagggcgacgcgcatgaagccgcaaagaaagtgaccaccatgtatcagtcatacttgtcgaacgggaagcccggcgagaaaccatcgttcggtggcgggaactacgttcggtttcgtggtgactcggtgacgcttgctgacaacgggtctggatacgggttgaagatcggtatcgagccgtataagcccgagtggtggcgctgtcagacgcgtccgtaccacgacgaatacttcgagcctgtgtgtagtggggagagtagcattggcgcgtcagaactccatctgaacgatggaaatttgacagcccatgtgtccgtatcaacgcctgttgaagtctacgagccgcgtgagacggacggggcgttgggtattgatttaggcgagcgggtgatattcgctgctgcggcggtggacggtgacggaaccgtggacagcgtagaaatgcgtaccggagacgagttccgacaccatagaacggaactaacgagacagtaccgtgaacagatgcggaaggggaatcttacgacagtcaaagaactacgcggacagcgcgagcggtacacaaagcacgtcgcgcatgaagtgagcgagacgattactcggatcgcggctgagggtccgtatacaatcgtgttagaagatttgagtgactaccgccagacggccgcggatccgatccacgatatgccgttttccataatacaggagtttgtttcatacaaggccaccgcgaagggcgttcccgttgtgacggtcgagccggcatatacttcaacgacgtgtcgagagtgcggctcgcatgtgccgtctgggcgggatgggatcgacttcttgtgtcccgcttgcgggtatgaggtccatgctgatgtgaacgcggcgatcaatatcgccaaccgacatttggcggattga

SEQ ID NO: 67236 - DNA, 1260 bp, unknown
  TnpB Polynucleotide
atgtcatcagagcagtccactggtgggtctgcaatgccagatacggcaacagaaacgatcacacggaccatcgtttgcaatctcgaaacctcgcagtcaaaaaaccggaaggtgcaggatgccattgatgaattcgcagaaatgatggcgcatacagcagtgatgttgccctcctttggggagtttaactggcaccgacaaaacaataccatctatcagcatctcaaagaggagtttggagacgaccgtgatgtttacgcagcgataatgcggaatgctggccaggtagttgcagaatcgtttgcatcttggcgtgaacgtggcaaagaggggaagccaccacaaccagataagttcagaaaagcaaattacattgaactttccaatcaagaagttgtcttagaagagaacgaccgtgggtggggaattggggcgaaattcttgatgagcgacggccccgacggtgaagatgggaagcccatctatgaggggggtcaagagtggttccatatcagtgatggcgcgtatcaacgcgagtatctggagcgaattactgatggtgatgcatcgctcgggagcgttcagttcaggctcacagatgatgggtcgctatcctgccatttggtagtgaaatgggatattgaagtgtatgaaccaagtgatgtttccactgtcgttggtattgacttgggtgagaattcactctacgcagccagtgttgtagagatgattgacactgctgatacagaagaggggaacgagattgcgtctgttaacgaagtcgagatcaagtcaggccgagagtaccggcacatgcgtacgcaacttgatcggaagcggagacagttacagaaacgggacgatctgcgcggcatacggaaattgtctggtgaacggcgacgatacaccgaacagatgacccatacaacaagtcgtgaaatcgttgatattgcaggcgcatatgccccagcagtgattcgacttgaagatctcatggactatcgttcgacagcagatgaaccaatccacgactggccctatgcgatgctccaggaacaaatctgctacaaagcgactgaatctggtatcccagtccagtttgtcgatgcaaaaaacacgagtatccgctgtcggaaatgtggctttgagtccgcagacaaccgcgatggaaacgaatttgtctgtcagtcctgtgggtatgaagttcatgccgatgtgaatgccgcctacaacatcgctgtcgccccagtcaacgactag

SEQ ID NO: 67237 - DNA, 29 bp, unknown
  Direct Repeat
cctacaatcccacaaaggtccatctgaaa

SEQ ID NO: 67238 - DNA, 29 bp, unknown
  Direct Repeat
cctacaatcccacaaggatccatctgaaa

SEQ ID NO: 67239 - DNA, 29 bp, unknown
  Direct Repeat
cctacaatcccacaagggtccatctgaaa

SEQ ID NO: 67240 - DNA, 29 bp, unknown
  Direct Repeat
cctacaatcccacaagggtccatctgaag

SEQ ID NO: 67241 - DNA, 29 bp, unknown
  Direct Repeat
cctacaatcccacaagggtccatctgaaa

SEQ ID NO: 67242 - DNA, 29 bp, unknown
  Direct Repeat
cctacaatcccgcaagggtccatctgaaa

SEQ ID NO: 67243 - DNA, 29 bp, unknown
  Direct Repeat
cctacaatcccgcaagggtccatctgaaa

SEQ ID NO: 67244 - DNA, 29 bp, unknown
  Direct Repeat
cctacaatcccgcaagggtccatctgaaa

SEQ ID NO: 67245 - DNA, 29 bp, unknown
  Direct Repeat
cctacaatcccgcaagggtccatctgaaa

SEQ ID NO: 67246 - DNA, 29 bp, unknown
  Direct Repeat
cctacaatcccgcaagggtccatctgaaa

SEQ ID NO: 67247 - DNA, 936 bp, unknown
  TnpB Polynucleotide
gtgaaaatgcagttgtttggagcggtagctaacgaggtttcccagatggcgtttggaattcgcgatcaactgaagaagaaatttgatttgcaccgtcactgttactcaatcctccgtcagcgttatccccaagttaacactcgctttctggggatggtcatcaatgttgttgcggggtgctactcgaagaaggaacggaagaagatggaaaagcccgccaagttcaggaaggattttgctctcctcgacaaggggcttttcaagattacggggcagactgtggagatttggacggttgcaggccgcaagggatttccgctcatcttcgtgcctgtaaggcgatttaaggaattgtgggaaaagaagacggatatagacagcattactcttaaggagtgcaacgggaagatcattgggcgtgtttgcttgactattcctgagcctcctcctgtggttgggggccagcgttttgtcggggtcgacttgggtgccgagtgtccgttagtcgccgtgcggagcgacggcggaattttctttcccgactacagtgaatttcaccgaaagcgcaatcattggctcaagctgcgccgcttcttgcagcgaaggttggcgatgcaacgcaagttccgcaaggacgcgcacaacactgttagggcattaaagcggctatcaggcagacaacgaaggttcacccgtcaattcgtctattggcttgttgaccgcttgctgaattgggcgggcgacgctataatagttatggagaagttacggttaccgcaaggaaagaaggttaagggggcgaaggcattgaatagaactttgtcgctgctaccttgcgggcttgtgaaggaggcgattgaggagaaggcgaaggagcggggcttgacagttttgtttgttaaccccaaaggcacgtctaagacttgtccccagtga

SEQ ID NO: 67248 - DNA, 1155 bp, unknown
  TnpB Polynucleotide
atgaaagaagaaaaagtttccagaaccattcctattagattagaaacgagtaatagaaagaacgagtacctgcaaggtgtgatcgaccaatggcaggaggtgttgaagtattgttatgaggttgctccatcatatcccgaatatcggcaaggaaataggatcgacacacataagaatagacagctaaaaaagaactttggggattacgatataaaggagtccgttcgtaatatggcatttaataaagtatctgatatgtatagctcgtggcacagcaatggacatgagaaagatagaccttcgtatactccatctaactatgttagaatgagagatcgagacattgatgtgtcgttcgataatggaaactatggagtgaaactatctcttgttccatacaatcctgagtggttcagcatgatagtatctgattatcaggaagaatatttggaaaaagtagtagatgaagaaagggatgcaaaggttggagcaagtgagttgttcttggatgaagacggttccgctacgctaaatctcgttgtttcccaaacggttatcgttgatgaattggatgatgtatataatctcgtcggtgttgacgtaggagagaacgttttgttcacaactgctgtgttggaaaacgcatggggcagttccaatattactggcgtggagttgaaggatggtcgggagtatcgacattatcgagatatgttggatgataagaaggcacgacggcaacgagagggtcgtcttggccaattgaagtctggaaagattcggcaccagcgacagaaatatacagaacaggttcttgatactgcatcgagaagggttgttgataaagcaagcgactatcagccaagcgcgattattctggaagatatggttggatatagggaatcttctgataatccgatccatgattttccatatggagcgttgcaggaaaagatcatgtataaggccactgaagctggcgttccggtagaaaagatcgatccatcgtatacgtctcaggaatgcaacaagtgtggatcgagaaatactgttcgtaatgggactgattttgattgtcgcaactgtggctatcacgtccacgctgatgtaaatggggcaataaacattgctcggcgtggtgttgaattgttgtaa

SEQ ID NO: 67249 - DNA, 16 bp, unknown
  Direct Repeat
ctacaagagcgtttat

SEQ ID NO: 67250 - DNA, 16 bp, unknown
  Direct Repeat
ctacaagaaggtttgt

SEQ ID NO: 67251 - DNA, 16 bp, unknown
  Direct Repeat
ctacaaggacgtttgt

SEQ ID NO: 67252 - DNA, 16 bp, unknown
  Direct Repeat
ctgcaagagcgttcgt

SEQ ID NO: 67253 - DNA, 16 bp, unknown
  Direct Repeat
ctgcaagagtgtttgt

SEQ ID NO: 67254 - DNA, 1242 bp, Planctomycetes bacterium sp.
atgcagatcaagcgagcgcatgtcatccggctgaagccgaaccgggaacaggaatcctactttcgccgcgcctgcggtgtgcgccggttcgtcttcaactgggcgctgaatcagtgggaagcatggcggacgctgtatgagaaaacgcccggacgcccgcgacgtcccggttggatgaaactggacaagtatttcaacagcatcaaggatggtgtctgtccgtgggtgcgggaagtctccgctcacattccagcccgtgccatccgcaacgctgacgacgcgtatcagatgtggttcaaagcgatgcagcgggcggacacgcaatggggaagaccgcgtcgcgcgaagcacggtgtgaatgaacgattctacgtccacaatcagcagcttcgttttggtgacgggcgcgtgttcattgggaagtgcggctgggtgcgctgccgagaagacttccgatttcccgacgcgaagattcttggcggatcgatccgtcaacgggcggacggatggtatctgtcggttcagtgtgaattcgatgtcgacgatccagtggaacacgcaggcgcgcctgtcggcatcgacgccggtgtcacgaagaatttcacgctgtcagacgggacggtgctacacctgccccgcgagcgaatgcaggaactggaacggaagatcaaacgtgcgcagcgtgttgccagccgccgatgggcgggcaagccgaaaaagggacacgaagcgaaggcgctgcgaaacgaagacggaaaactgttgccgaagtcgaatcgatttcaaaaggcgcagaagcggattgcgaaactgaagctgaaacaggcacgcatcaggcagcactacctgcacctgttcagcaggcagatcgtcgacaattactcaacgatctgcgttgaagacttaacgctgaaaaacatgacgaagtcggcgaagggtgacgcggagaatcccggaacgaacgtccgtgcgaaggctggactgaatcgcgagatgctgaacgtcgcgatcggcgaatttcggtggatgctggattacaaatcggctgcaacgggggcgatggtgatcgcggtcgatccagcctacacgtcgcaaacctgttcgcagtgcgggcacgtcagcgcggcgaaccgtcgcagtcagtcgtcgttctgttgcgaagcgtgtggatttgccgacaatgcagacgtgaacgcggcaaggaacattttgaagcaaggaaccagcgttgaatcacagtag

SEQ ID NO: 67255 - DNA, 36 bp, Planctomycetes bacterium sp.
ggtgtagccagtggtcaattgccgggtgtgtgcagg

SEQ ID NO: 67256 - DNA, 36 bp, Planctomycetes bacterium sp.; identical to SEQ ID NO: 67255

SEQ ID NO: 67257 - DNA, 36 bp, Planctomycetes bacterium sp.; identical to SEQ ID NO: 67255

SEQ ID NO: 67258 - DNA, 36 bp, Planctomycetes bacterium sp.; identical to SEQ ID NO: 67255

SEQ ID NO: 67259 - DNA, 36 bp, Planctomycetes bacterium sp.; identical to SEQ ID NO: 67255

SEQ ID NO: 67260 - DNA, 36 bp, Planctomycetes bacterium sp.; identical to SEQ ID NO: 67255

SEQ ID NO: 67261 - DNA, 36 bp, Planctomycetes bacterium sp.; identical to SEQ ID NO: 67255

SEQ ID NO: 67262 - DNA, 36 bp, Planctomycetes bacterium sp.; identical to SEQ ID NO: 67255

SEQ ID NO: 67263 - DNA, 36 bp, Planctomycetes bacterium sp.; identical to SEQ ID NO: 67255

SEQ ID NO: 67264 - DNA, 36 bp, Planctomycetes bacterium sp.; identical to SEQ ID NO: 67255

SEQ ID NO: 67265 - DNA, 36 bp, Planctomycetes bacterium sp.; identical to SEQ ID NO: 67255

SEQ ID NO: 67266 - DNA, 36 bp, Planctomycetes bacterium sp.; identical to SEQ ID NO: 67255

SEQ ID NO: 67267 - DNA, 36 bp, Planctomycetes bacterium sp.; identical to SEQ ID NO: 67255

SEQ ID NO: 67268 - DNA, 36 bp, Planctomycetes bacterium sp.; identical to SEQ ID NO: 67255

SEQ ID NO: 67269 - DNA, 36 bp, Planctomycetes bacterium sp.; identical to SEQ ID NO: 67255

SEQ ID NO: 67270 - DNA, 36 bp, Planctomycetes bacterium sp.; identical to SEQ ID NO: 67255

SEQ ID NO: 67271 - DNA, 36 bp, Planctomycetes bacterium sp.; identical to SEQ ID NO: 67255

SEQ ID NO: 67272 - DNA, 36 bp, Planctomycetes bacterium sp.; identical to SEQ ID NO: 67255

SEQ ID NO: 67273 - DNA, 36 bp, Planctomycetes bacterium sp.; identical to SEQ ID NO: 67255

SEQ ID NO: 67274 - DNA, 36 bp, Planctomycetes bacterium sp.; identical to SEQ ID NO: 67255

SEQ ID NO: 67275 - DNA, 36 bp, Planctomycetes bacterium sp.; identical to SEQ ID NO: 67255

SEQ ID NO: 67276 - DNA, 36 bp, Planctomycetes bacterium sp.; identical to SEQ ID NO: 67255

SEQ ID NO: 67277 - DNA, 36 bp, Planctomycetes bacterium sp.; identical to SEQ ID NO: 67255

SEQ ID NO: 67278 - DNA, 36 bp, Planctomycetes bacterium sp.
ggtgtagccagtggtcaattgccgggtgtgcgcagg

SEQ ID NO: 67279 - DNA, 36 bp, Planctomycetes bacterium sp.
ggtgtagccaatggtcaattgccgggtgtgtgcagg

SEQ ID NO: 67280 - DNA, 36 bp, Planctomycetes bacterium sp.
ggtgtagccagtggccaaatgccgggtgcaatcact

SEQ ID NO: 67281 - DNA, 25 bp, Planctomycetes bacterium sp.
tcgtagacggtgtcgtagacggtgc

SEQ ID NO: 67282 - DNA, 25 bp, Planctomycetes bacterium sp.
tcgtagacggtgtcgtagacggtgc

SEQ ID NO: 67283 - DNA, 1224 bp, Rivicola pingtungensis sp.
atgactccgtcagaaaatccaacgcagtctgatgatttactcagctccgcacatacagaaacggcgcggcacaatgttcgttgctatcctactgtcgagcagcaagctcagctgactattgagtttgaagcttgccggcttgtgtacaatctgtcggtggaaatggctcgccatgcttatgcgcaaggagagccttatcccggtgaaaaaggcttcaaaaaagccatcacacaatggaaaaaaaccactgactggtcatggtcacgcttggccagcgttcaatgcttacaatgggcggccaagcatgccgatagtgcgttcaagcacttttttcgtcgatgcaaggctaaacaggagccaggctttccacgcttcaaaaaagctgcgcatgaagcgtctgccacttataacattgtgcattgtcgctggtcggaacaaaccggcgaactggttttatccaaacaaaagacgccgcttaaaattcgctgggatcggcgaggcacacctcagcaagcaaaaagtgtaaccatacgtcgagatgccgctgggcgttacttcgcctctttcacttgccaaaaagctatagaacaacttcctgcggcaacagccgccgttggcatcgacatcggcgtcacacatgctctggcgctgtctacaggagaactggtggatgcaccagcgtttctaagcccacagcgacaacgcagactgcttcatctgcaacggaaattggcgcgacaagacaaaaaatcccactctcgcgagcgaacaaggaaagcaattgccagattgcatgcgcgtatggcagactcccgcacaacatggcaacataaaataactcgctcactggtcatgcgcttccaagccattgcgtttgaagatttgaacatcaaagccatgacccgctcgccagcgcctcaacaagaccctgcaacacaacgatatctgcctaatcggtcaagcgctaaagctcggttacatgccttgatgttgaatgttgcaccgacaagtctgagaagcaaaatagaatataaggccaaatggggcggacgccagacacaggccgtcaatcccgcgtacaccagtcagaaatgcgcacgttgtgggcatatcagtgcagaaaatcgtaagaaaacccgatttctgtgtgtcaagtgtgggtacattgaacacgcagatgtgaatgccgccaaaaatattttggcgcatgctttcggcgcatag

SEQ ID NO: 67284 - DNA, 27 bp, Rivicola pingtungensis sp.
gttgcatccacgggcgtgtggaagacc

SEQ ID NO: 67285 - DNA, 27 bp, Rivicola pingtungensis sp.
gttgcatccacgggcgtgtggaagacc

SEQ ID NO: 67286 - DNA, 27 bp, Rivicola pingtungensis sp.
gttgcatccacgggcgtgtggaagacc

SEQ ID NO: 67287 - DNA, 27 bp, Rivicola pingtungensis sp.
gttgcatccacgggcgtgtggaagacc

SEQ ID NO: 67288 - DNA, 27 bp, Rivicola pingtungensis sp.
gttgcatccacgggcgtgtggaagacc

SEQ ID NO: 67289 - DNA, 27 bp, Rivicola pingtungensis sp.
gttgcatccacgggcgtgtggaagacc

SEQ ID NO: 67290 - DNA, 27 bp, Rivicola pingtungensis sp.
gttgcatccacgggcgtgtggaagacc

SEQ ID NO: 67291 - DNA, 27 bp, Rivicola pingtungensis sp.
gttgcatccacgggcgtgtggaagacc

SEQ ID NO: 67292 - DNA, 27 bp, Rivicola pingtungensis sp.
gttgcatccacgggcgtgtggaagacc

SEQ ID NO: 67293 - DNA, 27 bp, Rivicola pingtungensis sp.
gttgcatccacgggcgtgtggaagacc

SEQ ID NO: 67294 - DNA, 27 bp, Rivicola pingtungensis sp.
gttgcatccacgggcgtgtggaagacc

SEQ ID NO: 67295 - DNA, 26 bp, Rivicola pingtungensis sp.
gattccccgcgtacgcgggggtgaac

SEQ ID NO: 67296 - DNA, 25 bp, Rivicola pingtungensis sp.
gattccccgcgtacgcgggggtgaa

SEQ ID NO: 67297 - DNA, 26 bp, Rivicola pingtungensis sp.
ggattccccgcgtacgcgggggtgaa

SEQ ID NO: 67298 - DNA, 26 bp, Rivicola pingtungensis sp.
ggattccccgcgtacgcgggggtgaa

SEQ ID NO: 67299 - DNA, 1317 bp, Alphaproteobacteria bacterium sp.
atgaagtggacgcggagggcgcgccgttacagacggcttaaaagtttgctgttacttgcatcgatgggtgggggtgcttatattaggagcatgcatagaacttaccaatatagattattgccgaacaaggagcagcgcgaagccttagggcgtgctttggctcaaacgcggtatatctataactcggcattggacgaccgcatccaatcatacaacaacaagaaatccgcaagctacttgggattgacctataaaacattgacgaaattcgaccagatgaaagcactgacgcaatggcgaaaagaatcgtttaatggcgttaagaatgattggttgggggcgtgggttcagcacggtgcgttagacaggcttgataaggcgtatcaagcattttataggcgggttaaatctggtggtgaaaaggctggcttccctcgtttcaaaggaaagaggttttggaagagcttagatgttcctcaccatataggttatcaagttgtcgggaatagagtcaatattaaggggcttggtaagttaaagataaagatgcaccgcccgctccccgaagggcataagcaatgtggattgactttgacgcaagacggcaagggctggctggtgtcgatgcgtgttgaaatagaagctgcccctgataaaaagctcgttatgcctgaaaatgttgtcggtgttgatatgggtatcaagaggtttgttacaaccagtttaggtgaggagaaagaaaaggctgtgctgggtgcttattatgactatgagcgcgaatacaggaaagaagagaggcaattgcggttaaaacaacgagcggttgagaggtcaaaaaaggcaagtagcacgttagatggatgtgagggtaagaatctagcgaagcgcaggaaagccgtgcaacgtctgcatgaaaagattgctcgtcggcgtaaggattttcaccataagctatcgacgattcttgtcgataaatgcgatgctcttgcttttgaggatttgcgagtcaagaatatggtgcgtaatacccgtttgtcgaagtcgattcatgatgctggttggtcggcttttgtcaatatgtgtgattataaggctgatggggcgggcaagcattgtgtaacggtagatgcgaaaggaacgagccaagtttgttctgcttgtggggcgattgttcgtaaagacttgtctgagcgaacgcataaatgtgattgtggcgttattctcgacagagaccataacgcggcaatcaatatcaaaaaaagggcagtggatgtccttgcgagatataattcctctgacgggaaaagcggttcttga

SEQ ID NO: 67300 - DNA, 36 bp, Alphaproteobacteria bacterium sp.
gctgaggtctcttttgattgtggcggtaagtccaac

SEQ ID NO: 67301 - DNA, 36 bp, Alphaproteobacteria bacterium sp.; identical to SEQ ID NO: 67300

SEQ ID NO: 67302 - DNA, 36 bp, Alphaproteobacteria bacterium sp.; identical to SEQ ID NO: 67300

SEQ ID NO: 67303 - DNA, 882 bp, Alphaproteobacteria bacterium sp.
atgtctgtgacaatgcaacgaggggcattggcgcgggtgaacaaggctctcaaggggttttttcgtcgggtgaaggcggggcagacgccgggtttccctcgttttaagggatggcggcgctggaaatccatcgagataaccgaaagctataggctaaaggaaggacgtctttttgtgaaaggcgtgcgagggggtatgagaacgaacatggcgcgccataatatcatgccagaggacgcaacactttgtgactgcaccatcaagcatacgcctaaaggctatcgcctgtttgtgagagcatgtatcggtgacgcgcctacccctatgcctaagggtgaggtaaaacatgccgtggggtgtgatgtggggattaagagcttcgtgatgacagataaaggcgagtcgtttgatagtccgaactggtatcgcgaggcagagaagacgctggcaagaaaacagcaagcgctctccgccgccaaaaggggcacatgtcggtggcgacgcgccttgcgcgccgtgcagaaatggcatagcaaagtgagccatcagcgcaaggattttcatcataaactcgcaagggaattcgtgaagagatttgaccttcttgtttttgaggacctgaggatagccaatatggcaagaaatcaccgcttggcgaaatcaatccatgataagggatgggctgccttcataggaaaagttgcttacaaagcggaagaagctggtaagcattttgtgcaggttgacccaagaggcacatcccaaaaatgctcgggatgtggggcggttgtagaaaaatcgttagatgagaggacacaccattgtcatgtgtgtggactgaccatcgaccgagatgaaaacgccgccagaaatatcctacgg

SEQ ID NO: 67304 - DNA, 37 bp, Alphaproteobacteria bacterium sp.
ctctatagagcccgttcaaacacagggagcgtcgcac

SEQ ID NO: 67305 - DNA, 37 bp, Alphaproteobacteria bacterium sp.; identical to SEQ ID NO: 67304

SEQ ID NO: 67306 - DNA, 37 bp, Alphaproteobacteria bacterium sp.; identical to SEQ ID NO: 67304

SEQ ID NO: 67307 - DNA, 37 bp, Alphaproteobacteria bacterium sp.
ttctatagagcccgttcaaacacagggaggctgttgt

SEQ ID NO: 67308 - DNA, 1281 bp, unknown
  TnpB Polynucleotide
atgcgtaaatcatttaaatatcgtttgtatcctaacaaggttcaaattcagaaacttgagttacaattgaatgcaactcggtctctgtataatgctgcgttggaacagcgtatacatcagtacaagtctacacccaagttttggaatgagaacaaaaagaaatatacgtcttctgtatcatcgcttactgcgtatgaccagatgagattttatccagaagcccgtatttctgaccctgctggtcttggtcaagtaccagcacaaacttgtaatgcggtattagaccgtctacataaggcttacaaggcattcgagaaacgtgtacaagtaggtgcaggtaaagccgcaggttttcctcgattcaaaggacgagatagatgggatagtcttgtgtatccaacatacggttctggttgtaaacttgtgaagctcccaagtggtagattcgttgtaagattcttgaacattggtcttgttcgtgtcaagatagaccgcagtattcttgggacaatcaagactacaataatcaaacgagaagcaaatgagtggtatgttgtattttcttgtaataatgtaccttgtcaaagattacctaataccgacaaacaagtcggtattgatgttggtttgaacacctttgctatgttatctactggacaggcaatagaaaaccctcgttggtatcgtaaggcggcggttgcgctaaccgaagcacaacaaagtttgagtcgcaaggccaaaggctctaatcgtcgtcaaaacgctaaaaaacgagttgttgctttacataccaagattcgtagacaacgagcagattttcaccataaattgtctcgaacgcttgtaaatcagtatgggttgattgctgttgaagatttgaacgtaaaaacaatgtctaagcgatgtaagccaaaatcaagtttaccgaacggattgaataagtctattgctgatgctggttggtcacagtttttgaatcagattgcctacaaagcggaagaagctggtagggtctttgtgaaagtaaaagcagcaggaacaacaagtacatgttcacagtgtggtcgtgtgcaaaagaagacgttagcggaacgaatatatacatgcgaatgtgggcttgaaataaatcgagatttgaatgctgctattaacatcttaaggctcggtcagagccaacaggcgcaagcctgtaaagagacgttcgtctcaccgactgacgggtgtatcgagtcagaagggtctcaaaagtttgggttagcggaagctatacagattgtatag

SEQ ID NO: 67309 - DNA, 31 bp, unknown
  Direct Repeat
gttgcaactcgcacgtgtgtatgagatgaca

SEQ ID NO: 67310 - DNA, 31 bp, unknown; identical to SEQ ID NO: 67309
  Direct Repeat

SEQ ID NO: 67311 - DNA, 31 bp, unknown; identical to SEQ ID NO: 67309
  Direct Repeat

SEQ ID NO: 67312 - DNA, 31 bp, unknown; identical to SEQ ID NO: 67309
  Direct Repeat

SEQ ID NO: 67313 - DNA, 1434 bp, unknown
  TnpB Polynucleotide
atgcggacctacaaatatcgttgctatccggggcagcaggcgcaagcggccgcgaaccggattatggcctgcgtggtcaagccgatctggaatgaggcacagcgggaacggcaggagaatttcgacgcgcgatgcaaggccaagactaaagaagagaaaccgccgaaatgggtcagttggtacagccaacggcatctgattgatcctaaaacgcatcctgactatgaaggtacgagatatgggttgcgtgatggcgtccttgccgcgttggattgggggtacaaatcgtgctgggcactgcgaaagaacggccacaaggacgcgaggccgcccggcccgatgaaatggtgtgactgggtcacgtatcgctggcgggattgccggctggacggtcacacgctgcgagcgccggggatcggcgacattccggtacggatgcaccgtccggtcggtggcaggatcaagacagtgacaatccgcgtgaaaaacgccaagtggtatgtctatttctcctgcgaaatcgagaattttccgggggcgtgtcgctccctgagcggagccaaggcccgcaagggcaagggcttacgccaaaagcaccccgaatccggtgggaccacccctcaaatgcggggtgtagacaacgagaaccttggaggctatgacaatgaggacggtgggaccacccctcaaatgcggggtgtagacaacgtcagtgaggcgctgaacgaagtcaccgctgaaatgtggggggcagacaacttttccgggccaaggtccagattcccaaccgatgggtgtacccaccaaagtgacgacatcgtcgtcatttggctgcgccccgaagaaggttgctttcttgcggactcgacgggacggtgggtcgatgttcccggattctatgaggcgggtttgccggaagaacggcggctgaaccgactgttgagtcagaagaagcgccggtcgaacggccctgactcgccggagaagggacgcaaccagtataaggcccgactgcgactggcgaaattccgcgaacacgtggcgaatcagcggagtgcctttctctggtcagaggccaaatactatgcaacccggtatcgccaaatcgagatcatcagtcggccggcgaagatcccgattcaatacgccaaggatgaacgtacagcgcgtggcctgtgcgatggagcatatggactattcgagcaacggctcgcgcagaagtgtgaagagtatggcacggaattcagatcaaaggagagatcgacatggttaaaggaaaaagaagtgtgtcaggaacagggaaagatggaaaagctgcaaccgattctccgcaaggcaaagcgaaaggtaaagcggagaatcaagggccttcccgcgtctacgcgatccttgcagagggcctgcgaagaattgacgacctggcagattacatga

SEQ ID NO: 67314 - DNA, 1416 bp, unknown
  TnpB Polynucleotide
atgaattcagatgaaaataaaactataagaaagagcttcaaataccgctgctatccgaacgccggcacgaagagacgcacattcagagccatgtatatacagggtgaggtttggtcaaatgcgacggcgcaaaaaagcagggcctggtttgcccagcaagatgccatttacctggcaggaaagaacgccggccgagaattgacgcccgaagagaaagatgtgataaaaaaacaatcaccgataccaactttttacgatcaatacagtctcattagaaaaagagagcatcctcaatattgtaaattcgatgcccagagtctgcagaacgttcttcataaagttgacagttctttcaaatctttttttgcattgaaaaaaaacgggcagcctgatgtcatgccgccgaatcagaagcgaattcatcggtgcctggcgtaccggcagagcggttggaaactggaaggaaataacctgtatctaagttacatcggaaagtttcatctcaagttgcacaggccgataatcggcaaaataaaactcattagcattactgaaaataatggcaaatggtacgcatctttttcatgcgaagtgaatattctatccgggacgtgtaatcccgtgtctaagtctaaatccgcttcggcggatgacttgcggcaagagtacgctccatcgggtggagatgaacccgaaaaggccagtacttacaacaaaagagttctggcaagcgagatattcgggggtggagatgaccccgaaaaggccagtacttacaacttcctgtcatcaggcagtccaatagccttaggtggagatgaccccgaaaaggccggagaaatcgaaattgccttcggtctgcgagataatgtttttatcatcgactcggcgggctttattatcgagcatccggagttttacggcagtgaattggacaaattgaaaaggctcaatcaaaacctcgcacaaaaaaagtatcgctctgaaaactggtacaaggccagaaatacgctgatcaaatggcacgagcgcattgaaaacaaaagggcttactttctctggaatctggcaagatattacgccaaaaactttgagaaggtgacaattcaaaaatggcctttgaataaggagataaaatatgcaatagacaacaaaacggcaagaagattgtgcgatggagcttatgggaaatttatccagatgctcaagcataaatgtaacgagtcaggaaccgaatttattgaacgaaaggagttgtcatggcaaacagaaatcgaaagattgacagagcaggcaaaaatggaggaactgacaagagttctcagggaatccaaaaaggcagtgaacagaaaatatcatgcacgcttcaagtacttagagacggcctgcgaacgcttgatgatgctgcggatatga

SEQ ID NO: 67315 - DNA, 36 bp, unknown
  Direct Repeat
attgtaagagacctcgatttgaggggtagatacaac

SEQ ID NO: 67316 - DNA, 36 bp, unknown; identical to SEQ ID NO: 67315
  Direct Repeat

SEQ ID NO: 67317 - DNA, 36 bp, unknown; identical to SEQ ID NO: 67315
  Direct Repeat
